United States Patent Application Publication US 2007/0134655 A1 - sequence listing, part 2

SEQ ID NO: 34336 - RNA, 32 nt, Human
acauuucccagccugccugccccucugcccac

SEQ ID NO: 34337 - RNA, 32 nt, Human
acauuucccagggggcagaggcaggggcggga

SEQ ID NO: 34338 - RNA, 32 nt, Human
acauuucccauagccuugacagugccaggaga

SEQ ID NO: 34339 - RNA, 32 nt, Human
acauuucccaugagccucaaaacugaaugcug

SEQ ID NO: 34340 - RNA, 32 nt, Human
acauuuccccugcuugcacucccuucauccgg

SEQ ID NO: 34341 - RNA, 32 nt, Human
acauuucccucccauuugccuugccucagaaa

SEQ ID NO: 34342 - RNA, 32 nt, Human
acauuucccuguuucgagccaggcucuuccaa

SEQ ID NO: 34343 - RNA, 32 nt, Human
acauuucccuuggaggguucagagauuaaacu

SEQ ID NO: 34344 - RNA, 32 nt, Human
acauuucccuuucuucuuuccuuuuuguuuuu

SEQ ID NO: 34345 - RNA, 32 nt, Human
acauuuccggagccgcccugggugucagcggc

SEQ ID NO: 34346 - RNA, 32 nt, Human
acauuuccguaauaaaagaugccuucagaaac

SEQ ID NO: 34347 - RNA, 32 nt, Human
acauuuccuacaaaucagcguaguuacaaagg

SEQ ID NO: 34348 - RNA, 23 nt, Human
acauuuccucagucaaguucaga

SEQ ID NO: 34349 - RNA, 32 nt, Human
acauuuccuuucuacucuuucugccaagagcc

SEQ ID NO: 34350 - RNA, 32 nt, Human
acauuucuaggucacaugguaacucuauguuu

SEQ ID NO: 34351 - RNA, 32 nt, Human
acauuucuaguuuuauuuuaccaauaauuuua

SEQ ID NO: 34352 - RNA, 32 nt, Human
acauuucucaaagauuuuugagguuguauuug

SEQ ID NO: 34353 - RNA, 32 nt, Human
acauuucucacugccuucugucugcccaguuu

SEQ ID NO: 34354 - RNA, 32 nt, Human
acauuucuccacaaguggaccccacacagucg

SEQ ID NO: 34355 - RNA, 32 nt, Human
acauuucuccaccugugcccccucauguucac

SEQ ID NO: 34356 - RNA, 32 nt, Human
acauuucugccucugcugcuucagaggaugcg

SEQ ID NO: 34357 - RNA, 32 nt, Human
acauuucugugucauuucuaccacagaugcgc

SEQ ID NO: 34358 - RNA, 32 nt, Human
acauuucuguuuuucaaaauugaugcuuaauu

SEQ ID NO: 34359 - RNA, 32 nt, Human
acauuucuucagccucuccaccaagcucuuua

SEQ ID NO: 34360 - RNA, 32 nt, Human
acauuucuuucaucucucuugucuauaccuga

SEQ ID NO: 34361 - RNA, 32 nt, Human
acauuugaaaaguagaaaaauuagaaauuauu

SEQ ID NO: 34362 - RNA, 32 nt, Human
acauuugaaaccacuauuuacuuaauaauguc

SEQ ID NO: 34363 - RNA, 32 nt, Human
acauuugaacaaggggaaggggcagcuuacac

SEQ ID NO: 34364 - RNA, 32 nt, Human
acauuugaagaauucacccaggcuccagcuag

SEQ ID NO: 34365 - RNA, 22 nt, Human
acauuugacaugcccucccuca

SEQ ID NO: 34366 - RNA, 32 nt, Human
acauuugagauccaccuuacuguguuuucuac

SEQ ID NO: 34367 - RNA, 32 nt, Human
acauuugaugucuagauaacauucaugagauu

SEQ ID NO: 34368 - RNA, 32 nt, Human
acauuugauucuguguguuuuccauaauaaaa

SEQ ID NO: 34369 - RNA, 32 nt, Human
acauuugcacugacuguuuccucugccuggac

SEQ ID NO: 34370 - RNA, 32 nt, Human
acauuugccauuuuggaaagauuucugaaucg

SEQ ID NO: 34371 - RNA, 32 nt, Human
acauuugccccagggaaggucacagcugccug

SEQ ID NO: 34372 - RNA, 32 nt, Human
acauuugccguucugcaauauuugcuguucug

SEQ ID NO: 34373 - RNA, 32 nt, Human
acauuugccugugagucagagcuggaggccga

SEQ ID NO: 34374 - RNA, 32 nt, Human
acauuugcuuccuucacaggccugugugaaca

SEQ ID NO: 34375 - RNA, 32 nt, Human
acauuugcuuugagaaguggugguagaggcag

SEQ ID NO: 34376 - RNA, 32 nt, Human
acauuuggaaugcacacagcggcugccuccug

SEQ ID NO: 34377 - RNA, 32 nt, Human
acauuuggacagacuugauuuguauuuuauuu

SEQ ID NO: 34378 - RNA, 32 nt, Human
acauuuggagccauggaaucagagagaagagg

SEQ ID NO: 34379 - RNA, 32 nt, Human
acauuugggaggguggagggaggcaguguccu

SEQ ID NO: 34380 - RNA, 32 nt, Human
acauuugguaucuauuaccaagcugcccuuca

SEQ ID NO: 34381 - RNA, 32 nt, Human
acauuugguggcugaugcuguucuccuuugac

SEQ ID NO: 34382 - RNA, 32 nt, Human
acauuuguacuuuaagaaaaauuuaagugaca

SEQ ID NO: 34383 - RNA, 32 nt, Human
acauuuguagauuuuaaagaaaaauaugaaau

SEQ ID NO: 34384 - RNA, 32 nt, Human
acauuuguaggggcacuaauccagcccuuaaa

SEQ ID NO: 34385 - RNA, 32 nt, Human
acauuugucaccccacuggccuucucaggugc

SEQ ID NO: 34386 - RNA, 32 nt, Human
acauuugucagugauguugccuagaaucuucu

SEQ ID NO: 34387 - RNA, 32 nt, Human
acauuugucaucucuagggcaggcuggggcug

SEQ ID NO: 34388 - RNA, 32 nt, Human
acauuugucugccuggugcaaacaaggaaucc

SEQ ID NO: 34389 - RNA, 32 nt, Human
acauuugugauucucauuuucucaccauuaaa

SEQ ID NO: 34390 - RNA, 32 nt, Human
acauuuguuccaauggggagcuuggaagaugg

SEQ ID NO: 34391 - RNA, 32 nt, Human
acauuuguuuuuaguuaaaaguaucuacuuac

SEQ ID NO: 34392 - RNA, 32 nt, Human
acauuuuaaaaauguuuugccauagcuuuuua

SEQ ID NO: 34393 - RNA, 32 nt, Human
acauuuuaaccagcaacugguaacaaagagcu

SEQ ID NO: 34394 - RNA, 32 nt, Human
acauuuuacucucuccuccuagaaugcugccc

SEQ ID NO: 34395 - RNA, 32 nt, Human
acauuuuagcacugaggcugggguagcuuuug

SEQ ID NO: 34396 - RNA, 32 nt, Human
acauuuuaguugcagaagaaaggcuaggaaau

SEQ ID NO: 34397 - RNA, 32 nt, Human
acauuuucaaagauuuuuauuuugaaaaauga

SEQ ID NO: 34398 - RNA, 32 nt, Human
acauuuucauacugcugccuuccuacagcugc

SEQ ID NO: 34399 - RNA, 32 nt, Human
acauuuucauuucugaugcagccaccuucugg

SEQ ID NO: 34400 - RNA, 32 nt, Human
acauuuuccaaaaagaaaaauuaaaugauuau

SEQ ID NO: 34401 - RNA, 32 nt, Human
acauuuuccaaacauaaccccaaagaguacug

SEQ ID NO: 34402 - RNA, 32 nt, Human
acauuuuccccacucugucugccugcaucucc

SEQ ID NO: 34403 - RNA, 32 nt, Human
acauuuuccucuuucuccuuguuauuaggcau

SEQ ID NO: 34404 - RNA, 32 nt, Human
acauuuuccuguaaauguaugugugcauuugg

SEQ ID NO: 34405 - RNA, 32 nt, Human
acauuuuccuucauuuccagauccuuuauuuc

SEQ ID NO: 34406 - RNA, 32 nt, Human
acauuuucucuuuccuccucuugaacuuacau

SEQ ID NO: 34407 - RNA, 32 nt, Human
acauuuucugcugcugcugacagauuaaccca

SEQ ID NO: 34408 - RNA, 32 nt, Human
acauuuugaaguuuauagcuuccagauuacaa

SEQ ID NO: 34409 - RNA, 32 nt, Human
acauuuugagcagcgcgagaguagaagugaau

SEQ ID NO: 34410 - RNA, 32 nt, Human
acauuuugagguacauuguuuugucucagcua

SEQ ID NO: 34411 - RNA, 32 nt, Human
acauuuugauucuccagccugggcaacggagu

SEQ ID NO: 34412 - RNA, 31 nt, Human
acauuuugccucucucacuggucauguauuu

SEQ ID NO: 34413 - RNA, 32 nt, Human
acauuuugcucuuuggccugguguggacggaa

SEQ ID NO: 34414 - RNA, 32 nt, Human
acauuuuggucuacuuacuaugugcuagauuu

SEQ ID NO: 34415 - RNA, 32 nt, Human
acauuuuggugacuucugacucuccuuccacc

SEQ ID NO: 34416 - RNA, 32 nt, Human
acauuuuuaugaucaugacugaucagauuugc

SEQ ID NO: 34417 - RNA, 32 nt, Human
acauuuuucaaaguuacacaacagaaaugcaa

SEQ ID NO: 34418 - RNA, 32 nt, Human
acauuuuucaugcagucauuugcagugaauua

SEQ ID NO: 34419 - RNA, 32 nt, Human
acauuuuuccuggaacaagggagggaauaaau

SEQ ID NO: 34420 - RNA, 32 nt, Human
acauuuuucugcacaaacaaguuacaaaguuc

SEQ ID NO: 34421 - RNA, 32 nt, Human
acauuuuugcagcccuuuguauuuugugguag

SEQ ID NO: 34422 - RNA, 32 nt, Human
acauuuuuggucucuguuagaaguagacucug

SEQ ID NO: 34423 - RNA, 32 nt, Human
acauuuuugucuaaauagagugcaauauauaa

SEQ ID NO: 34424 - RNA, 32 nt, Human
accaaaaacacacaaagaaauuagcugggcau

SEQ ID NO: 34425 - RNA, 32 nt, Human
accaaaaaccaccuguaccccaaaaaguauug

SEQ ID NO: 34426 - RNA, 32 nt, Human
accaaaaagcuaguuuugucuaccucaguucu

SEQ ID NO: 34427 - RNA, 20 nt, Human
accaaaaagugcacaaggua

SEQ ID NO: 34428 - RNA, 23 nt, Human
accaaaaauagcagguacuucua

SEQ ID NO: 34429 - RNA, 32 nt, Human
accaaaaauucauaaucuaauaguuuaucagu

SEQ ID NO: 34430 - RNA, 32 nt, Human
accaaaacaagcagagauuaauaaccaggacu

SEQ ID NO: 34431 - RNA, 32 nt, Human
accaaaacagcuugaucuuccagaccuguucu

SEQ ID NO: 34432 - RNA, 32 nt, Human
accaaaacaugguccccaccuuuuggagcuua

SEQ ID NO: 34433 - RNA, 25 nt, Human
accaaaacccagugauugggccuua

SEQ ID NO: 34434 - RNA, 26 nt, Human
accaaaacccaugcacagugcugcag

SEQ ID NO: 34435 - RNA, 23 nt, Human
accaaaacgucuuuaggguucuc

SEQ ID NO: 34436 - RNA, 32 nt, Human
accaaaagcuggguuccaggaacuggaucaua

SEQ ID NO: 34437 - RNA, 32 nt, Human
accaaaauagugagugaucacacuucuaauag

SEQ ID NO: 34438 - RNA, 32 nt, Human
accaaaaucaagggguagggagagggaggagg

SEQ ID NO: 34439 - RNA, 32 nt, Human
accaaaaucuaacaaguaaauuuuggauuuug

SEQ ID NO: 34440 - RNA, 32 nt, Human
accaaaaucuuuccucauucacucuucacgug

SEQ ID NO: 34441 - RNA, 32 nt, Human
accaaaaugagguggugccacaggguggggca

SEQ ID NO: 34442 - RNA, 32 nt, Human
accaaacaaggcagacuugcaagaaccacggc

SEQ ID NO: 34443 - RNA, 32 nt, Human
accaaacaaguuggcuagaaagauuggaauau

SEQ ID NO: 34444 - RNA, 32 nt, Human
accaaacaauaccugcucauuuacacugagga

SEQ ID NO: 34445 - RNA, 32 nt, Human
accaaacagguuguuucucugcaguuuccaac

SEQ ID NO: 34446 - RNA, 32 nt, Human
accaaacauggcgaaaccccaucuguacugaa

SEQ ID NO: 34447 - RNA, 32 nt, Human
accaaaccaaaaauaaagaguuuaguugagga

SEQ ID NO: 34448 - RNA, 32 nt, Human
accaaaccaaaccauucuuauuuaaaccuugc

SEQ ID NO: 34449 - RNA, 32 nt, Human
accaaaccaaccaaucaaccaaacaaagaaaa

SEQ ID NO: 34450 - RNA, 18 nt, Human
accaaaccaagugccuca

SEQ ID NO: 34451 - RNA, 32 nt, Human
accaaaccacugccccucggagccugguagug

SEQ ID NO: 34452 - RNA, 32 nt, Human
accaaacccuccugauuucucuugccuuuucc

SEQ ID NO: 34453 - RNA, 32 nt, Human
accaaacccugagucaccacugacuguugccc

SEQ ID NO: 34454 - RNA, 32 nt, Human
accaaaccuauaggaagccuuccagugugagc

SEQ ID NO: 34455 - RNA, 32 nt, Human
accaaaccucccugcuaaucuccaugcccacg

SEQ ID NO: 34456 - RNA, 32 nt, Human
accaaacuaaggcuggagagagaagcgauggu

SEQ ID NO: 34457 - RNA, 32 nt, Human
accaaacuacacuguuuuaauugcuguaaauu

SEQ ID NO: 34458 - RNA, 32 nt, Human
accaaacuaugggacaguuaaacggagaguau

SEQ ID NO: 34459 - RNA, 32 nt, Human
accaaacucagaaaggcagagcagagcccagu

SEQ ID NO: 34460 - RNA, 32 nt, Human
accaaacugcacccuuucuugggugagugagc

SEQ ID NO: 34461 - RNA, 32 nt, Human
accaaacugcagcugcauggagcagccuaugg

SEQ ID NO: 34462 - RNA, 32 nt, Human
accaaacugguccccuccaccaaaaagcgggc

SEQ ID NO: 34463 - RNA, 32 nt, Human
accaaacuguaccuuagccacuuuggacacau

SEQ ID NO: 34464 - RNA, 32 nt, Human
accaaagaagugaaagaucucuacaaugaaaa

SEQ ID NO: 34465 - RNA, 32 nt, Human
accaaagacaggcaggagaugagggagguuau

SEQ ID NO: 34466 - RNA, 32 nt, Human
accaaagagaaguaacaaagauccuccguuug

SEQ ID NO: 34467 - RNA, 32 nt, Human
accaaagagcccucuuuccacgagacugaagu

SEQ ID NO: 34468 - RNA, 32 nt, Human
accaaagagcugcuuccugagaacaaguuauu

SEQ ID NO: 34469 - RNA, 32 nt, Human
accaaagagggcuuccucuagaagccaaggga

SEQ ID NO: 34470 - RNA, 32 nt, Human
accaaagauauaaucaccuagguuuacaaaua

SEQ ID NO: 34471 - RNA, 32 nt, Human
accaaagauggguggacuggaggcagcuggaa

SEQ ID NO: 34472 - RNA, 32 nt, Human
accaaagcaaaaugagaauuucacucuaccug

SEQ ID NO: 34473 - RNA, 32 nt, Human
accaaagcaauagaauuaaccuaaguguccau

SEQ ID NO: 34474 - RNA, 32 nt, Human
accaaagcagaggggcaggcagcacaccaccc

SEQ ID NO: 34475 - RNA, 32 nt, Human
accaaagcaggguuggggaaucccgaauggcc

SEQ ID NO: 34476 - RNA, 32 nt, Human
accaaagcauuuuauucgcaccuguacuuuau

SEQ ID NO: 34477 - RNA, 32 nt, Human
accaaagcccaggauggcuuggugggaguguc

SEQ ID NO: 34478 - RNA, 32 nt, Human
accaaagcccuacccuccagcacuccaaggca

SEQ ID NO: 34479 - RNA, 32 nt, Human
accaaagcucacuacugcgguuugccugugcc

SEQ ID NO: 34480 - RNA, 32 nt, Human
accaaagcugccugugccaugcccaaggccua

SEQ ID NO: 34481 - RNA, 32 nt, Human
accaaaggaaggaggaacacugaggggaaucc

SEQ ID NO: 34482 - RNA, 32 nt, Human
accaaaggagcucaguuuucaaacuuuaaugg

SEQ ID NO: 34483 - RNA, 32 nt, Human
accaaaggaggagagauguguuuuguucaaaa

SEQ ID NO: 34484 - RNA, 32 nt, Human
accaaaggcagccugccaccacccucacuguc

SEQ ID NO: 34485 - RNA, 32 nt, Human
accaaaggcaggaaggauccugccuugauuuu

SEQ ID NO: 34486 - RNA, 32 nt, Human
accaaaggcaggccuggcugggugcaguggcu

SEQ ID NO: 34487 - RNA, 32 nt, Human
accaaaggccaggaguuugaggcugcagugag

SEQ ID NO: 34488 - RNA, 32 nt, Human
accaaaggccugauuaucauaaauucauauag

SEQ ID NO: 34489 - RNA, 32 nt, Human
accaaaggccugucucucaccaacaagccaac

SEQ ID NO: 34490 - RNA, 32 nt, Human
accaaaggcugcaggugucuucacaucacagc

SEQ ID NO: 34491 - RNA, 32 nt, Human
accaaagggauuguuucucugccacccucaua

SEQ ID NO: 34492 - RNA, 32 nt, Human
accaaagguucaguccaggagcccacacagcc

SEQ ID NO: 34493 - RNA, 32 nt, Human
accaaagucacuuguuugaaaauaaaucuuua

SEQ ID NO: 34494 - RNA, 20 nt, Human
accaaagugcaggacaucaa

SEQ ID NO: 34495 - RNA, 32 nt, Human
accaaaguuugagaacugggaacuucaugcug

SEQ ID NO: 34496 - RNA, 32 nt, Human
accaaauacucuuauggggcaggcugggcaug

SEQ ID NO: 34497 - RNA, 32 nt, Human
accaaaucaacaacaaccuauuuagcuguucc

SEQ ID NO: 34498 - RNA, 32 nt, Human
accaaaucuaucucccuagugcagugucucca

SEQ ID NO: 34499 - RNA, 32 nt, Human
accaaaugacaccugcaggcucuaagccuuuc

SEQ ID NO: 34500 - RNA, 32 nt, Human
accaaaugccuaaaauuuuauuuuuaaaaagg

SEQ ID NO: 34501 - RNA, 30 nt, Human
accaaauggcaugcugggagaaaaugaaac

SEQ ID NO: 34502 - RNA, 32 nt, Human
accaaauggggaagaauuaggaaauaaucaug

SEQ ID NO: 34503 - RNA, 32 nt, Human
accaaaugguggggacccugagcccagcucug

SEQ ID NO: 34504 - RNA, 32 nt, Human
accaaauguucccugguuaugauucugaaagc

SEQ ID NO: 34505 - RNA, 32 nt, Human
accaaauuaccuaggcugagguuagagagauu

SEQ ID NO: 34506 - RNA, 32 nt, Human
accaaauucccaggaaucuugaaugcuuucuc

SEQ ID NO: 34507 - RNA, 32 nt, Human
accaaauuugguguuuguuuucaccuugacgc

SEQ ID NO: 34508 - RNA, 32 nt, Human
accaaauuuguccccucuucucucuguuaagg

SEQ ID NO: 34509 - RNA, 32 nt, Human
accaacaacacagacaagacccuguuuacaac

SEQ ID NO: 34510 - RNA, 32 nt, Human
accaacaaccaccacuacaccacacaugcuua

SEQ ID NO: 34511 - RNA, 32 nt, Human
accaacaaccucaacugccuacuccaaaaugu

SEQ ID NO: 34512 - RNA, 32 nt, Human
accaacaagccuucccccuccugcuggacaca

SEQ ID NO: 34513 - RNA, 20 nt, Human
accaacacaaaaagauguaa

SEQ ID NO: 34514 - RNA, 32 nt, Human
accaacacaccacucauuggaaaauggaaaaa

SEQ ID NO: 34515 - RNA, 32 nt, Human
accaacaccgugagugcagcaugccaucggcc

SEQ ID NO: 34516 - RNA, 32 nt, Human
accaacacuccuguaauuccaauaaagcaguu

SEQ ID NO: 34517 - RNA, 26 nt, Human
accaacacugacccuugaaccaauaa

SEQ ID NO: 34518 - RNA, 32 nt, Human
accaacacugccuuccuccagccugucccucc

SEQ ID NO: 34519 - RNA, 32 nt, Human
accaacagcaggaggagcaggaggagccggag

SEQ ID NO: 34520 - RNA, 32 nt, Human
accaacagccauucaucaucugaucucugcug

SEQ ID NO: 34521 - RNA, 32 nt, Human
accaacagccucugcaaucaggaaaagggagg

SEQ ID NO: 34522 - RNA, 32 nt, Human
accaacagguuucaguuccaacagaaaggucg

SEQ ID NO: 34523 - RNA, 32 nt, Human
accaacaguccccggugaagcugcaggacuuc

SEQ ID NO: 34524 - RNA, 32 nt, Human
accaacauaccagcaaaggaugcagcaccagu

SEQ ID NO: 34525 - RNA, 32 nt, Human
accaacaucugcucagcuucuggugaggccca

SEQ ID NO: 34526 - RNA, 32 nt, Human
accaacaucuguccuuagaaaggaccaucuca

SEQ ID NO: 34527 - RNA, 32 nt, Human
accaacaucuuucuaaacugcaaaggauauca

SEQ ID NO: 34528 - RNA, 32 nt, Human
accaacaugccuggcuaauuuuuguacuuuua

SEQ ID NO: 34529 - RNA, 32 nt, Human
accaacauggagaaacccccaucucuacugaa

SEQ ID NO: 34530 - RNA, 21 nt, Human
accaacauggagaaacccugu

SEQ ID NO: 34531 - RNA, 21 nt, Human
accaacauggcgaaacccugu

SEQ ID NO: 34532 - RNA, 19 nt, Human
accaacaugguaugggguu

SEQ ID NO: 34533 - RNA, 32 nt, Human
accaacauggugaaaaccccaucucuacuaaa

SEQ ID NO: 34534 - RNA, 21 nt, Human
accaacauggugaaaccucgu

SEQ ID NO: 34535 - RNA, 32 nt, Human
accaacauuaauuccauaugaaucaaguguuu

SEQ ID NO: 34536 - RNA, 17 nt, Human
accaaccaacaagggga

SEQ ID NO: 34537 - RNA, 32 nt, Human
accaaccaaccaaccaaccaaccaacaaacaa

SEQ ID NO: 34538 - RNA, 32 nt, Human
accaaccaaccaaccaaccaaccacaaaccac

SEQ ID NO: 34539 - RNA, 32 nt, Human
accaaccaaccaaccaaccacaaaccacccua

SEQ ID NO: 34540 - RNA, 32 nt, Human
accaaccaacuggccuguaucuaucuaucugg

SEQ ID NO: 34541 - RNA, 32 nt, Human
accaaccaaggagccuccagaaggaaaggagg

SEQ ID NO: 34542 - RNA, 32 nt, Human
accaaccaaguaugccccaaaccaaaggguuu

SEQ ID NO: 34543 - RNA, 32 nt, Human
accaaccacaucuggucucugccuucgguggc

SEQ ID NO: 34544 - RNA, 32 nt, Human
accaaccaccaccaccaccaaaaccaguuuau

SEQ ID NO: 34545 - RNA, 29 nt, Human
accaaccaccagacaagcagcugcagucu

SEQ ID NO: 34546 - RNA, 32 nt, Human
accaaccaccuugccggguguccucagccacc

SEQ ID NO: 34547 - RNA, 32 nt, Human
accaaccacgaccaccaccaccaccaccacuc

SEQ ID NO: 34548 - RNA, 32 nt, Human
accaaccagccaagaugaacauggugaagagg

SEQ ID NO: 34549 - RNA, 22 nt, Human
accaaccaggaagcagcuugaa

SEQ ID NO: 34550 - RNA, 32 nt, Human
accaaccaggguaguggcauggagcaccguaa

SEQ ID NO: 34551 - RNA, 32 nt, Human
accaaccagugagaauuucuuccuucagacgg

SEQ ID NO: 34552 - RNA, 32 nt, Human
accaaccauagaacuuuauaauaggacaguua

SEQ ID NO: 34553 - RNA, 32 nt, Human
accaacccaaauguccauccacaguugaagcu

SEQ ID NO: 34554 - RNA, 32 nt, Human
accaacccagggagucaaggaccagcaaacca

SEQ ID NO: 34555 - RNA, 32 nt, Human
accaaccccagggagauguuugcaguguggag

SEQ ID NO: 34556 - RNA, 32 nt, Human
accaacccggggacuggugccucugccugauc

SEQ ID NO: 34557 - RNA, 32 nt, Human
accaacccucagggagcccucagucuggugga

SEQ ID NO: 34558 - RNA, 32 nt, Human
accaacccuccaggacgaaguuucagaauugg

SEQ ID NO: 34559 - RNA, 32 nt, Human
accaacccucugcccccggcucaggccagagc

SEQ ID NO: 34560 - RNA, 32 nt, Human
accaacccugauuuccugcuucuccuuuucau

SEQ ID NO: 34561 - RNA, 32 nt, Human
accaacccugcaggccucaucuuucccaaaac

SEQ ID NO: 34562 - RNA, 32 nt, Human
accaacccuggcaacauaacaagacccugucu

SEQ ID NO: 34563 - RNA, 32 nt, Human
accaacccuguacugauucauugcacauaaau

SEQ ID NO: 34564 - RNA, 23 nt, Human
accaaccgaccaacauggugaaa

SEQ ID NO: 34565 - RNA, 19 nt, Human
accaaccgccccgcugcca

SEQ ID NO: 34566 - RNA, 22 nt, Human
accaaccgccuugcauccagug

SEQ ID NO: 34567 - RNA, 21 nt, Human
accaaccuagccaacauggug

SEQ ID NO: 34568 - RNA, 24 nt, Human
accaaccuagccaacauggugaaa

SEQ ID NO: 34569 - RNA, 24 nt, Human
accaaccuagucaacauggugaaa

SEQ ID NO: 34570 - RNA, 22 nt, Human
accaaccuccaacauggugaaa

SEQ ID NO: 34571 - RNA, 19 nt, Human
accaaccugaccaacaugg

SEQ ID NO: 34572 - RNA, 24 nt, Human
accaaccugaccaacauggagaaa

SEQ ID NO: 34573 - RNA, 24 nt, Human
accaaccugacuaacauggugaaa

SEQ ID NO: 34574 - RNA, 24 nt, Human
accaaccugagcaacauggcgaaa

SEQ ID NO: 34575 - RNA, 32 nt, Human
accaaccuggacaacauagcaagaccccaucu

SEQ ID NO: 34576 - RNA, 21 nt, Human
accaaccuggccaaaguggug

SEQ ID NO: 34577 - RNA, 24 nt, Human
accaaccuggccaaaguggugaaa

SEQ ID NO: 34578 - RNA, 32 nt, Human
accaaccuggccaacacagugagacccugucu

SEQ ID NO: 34579 - RNA, 18 nt, Human
accaaccuggccaacaug

SEQ ID NO: 34580 - RNA, 21 nt, Human
accaaccuggccaacauggug

SEQ ID NO: 34581 - RNA, 24 nt, Human
accaaccuggccaacauggugaaa

SEQ ID NO: 34582 - RNA, 24 nt, Human
accaaccuggccaacauguugaaa

SEQ ID NO: 34583 - RNA, 21 nt, Human
accaaccuggccaacauugug

SEQ ID NO: 34584 - RNA, 24 nt, Human
accaaccuggccaacauugugaaa

SEQ ID NO: 34585 - RNA, 21 nt, Human
accaaccuggcuaacacggug

SEQ ID NO: 34586 - RNA, 24 nt, Human
accaaccuggcuaacacggugaaa

SEQ ID NO: 34587 - RNA, 32 nt, Human
accaaccugggcaacaccgugagaccccaucu

SEQ ID NO: 34588 - RNA, 32 nt, Human
accaaccugggcaacauagugagacccccauc

SEQ ID NO: 34589 - RNA, 32 nt, Human
accaaccugggcaauauagugagacccuauuu

SEQ ID NO: 34590 - RNA, 32 nt, Human
accaaccugggugacagagcaagauugcaucu

SEQ ID NO: 34591 - RNA, 19 nt, Human
accaaccuggucagcaugg

SEQ ID NO: 34592 - RNA, 24 nt, Human
accaaccuggucuacauggugaaa

SEQ ID NO: 34593 - RNA, 24 nt, Human
accaaccugguuaacauggugaaa

SEQ ID NO: 34594 - RNA, 32 nt, Human
accaaccuuacccucguccccaacacaauccu

SEQ ID NO: 34595 - RNA, 22 nt, Human
accaaccuuucccagggcggca

SEQ ID NO: 34596 - RNA, 32 nt, Human
accaacgaaauccuaagcagcugagaccuuuc

SEQ ID NO: 34597 - RNA, 19 nt, Human
accaacgagucacagggua

SEQ ID NO: 34598 - RNA, 31 nt, Human
accaacggcaagagaggcugaucugucuaca

SEQ ID NO: 34599 - RNA, 32 nt, Human
accaacgggggaggggacgcugagcgcgccgu

SEQ ID NO: 34600 - RNA, 32 nt, Human
accaacggucucccccucccagcuucuuaccu

SEQ ID NO: 34601 - RNA, 21 nt, Human
accaacgugguaaaacccugu

SEQ ID NO: 34602 - RNA, 32 nt, Human
accaacuacuguagaagaugaggaaucuauug

SEQ ID NO: 34603 - RNA, 20 nt, Human
accaacucagcagcaaggug

SEQ ID NO: 34604 - RNA, 32 nt, Human
accaacucccaaaauauagguuacucuuguuc

SEQ ID NO: 34605 - RNA, 32 nt, Human
accaacucgaguguucagcccugugugcucuc

SEQ ID NO: 34606 - RNA, 32 nt, Human
accaacucugccaacggagccagcacagcuau

SEQ ID NO: 34607 - RNA, 32 nt, Human
accaacucuuucucucucugguguuuucuccu

SEQ ID NO: 34608 - RNA, 20 nt, Human
accaacugauuaugcaaggu

SEQ ID NO: 34609 - RNA, 22 nt, Human
accaacugcaaacaccccaggu

SEQ ID NO: 34610 - RNA, 32 nt, Human
accaacugcauugguuuuccaugaccuuaagg

SEQ ID NO: 34611 - RNA, 19 nt, Human
accaacugcuugcugaggu

SEQ ID NO: 34612 - RNA, 32 nt, Human
accaacugucuucuggaucuauuggauaucua

SEQ ID NO: 34613 - RNA, 32 nt, Human
accaacuguggacuuggaauaucagcagagua

SEQ ID NO: 34614 - RNA, 32 nt, Human
accaacuuagucaccaccccugccuccgguga

SEQ ID NO: 34615 - RNA, 32 nt, Human
accaacuuauuuagagcgaauuggacauggau

SEQ ID NO: 34616 - RNA, 32 nt, Human
accaacuugacaggggugcccaguuaccccac

SEQ ID NO: 34617 - RNA, 32 nt, Human
accaacuuggacaacauagugagaacccuuuc

SEQ ID NO: 34618 - RNA, 24 nt, Human
accaacuugggcaacauggugaaa

SEQ ID NO: 34619 - RNA, 32 nt, Human
accaacuuuaugccacuaagucauagccucag

SEQ ID NO: 34620 - RNA, 32 nt, Human
accaacuuuuauguaacaaacagccccucccc

SEQ ID NO: 34621 - RNA, 32 nt, Human
accaagaaaaugguuugcacgacuuugaacau

SEQ ID NO: 34622 - RNA, 32 nt, Human
accaagaacguuauucuuaaucuggaaauuug

SEQ ID NO: 34623 - RNA, 32 nt, Human
accaagaacucuuuccuguaauaagcaggauc

SEQ ID NO: 34624 - RNA, 32 nt, Human
accaagaacugcagcuugaggaauucucucca

SEQ ID NO: 34625 - RNA, 32 nt, Human
accaagaagaauugaggcugcuugggaggaag

SEQ ID NO: 34626 - RNA, 21 nt, Human
accaagaagagcgcucugcag

SEQ ID NO: 34627 - RNA, 32 nt, Human
accaagaagaucugggcagcuucuguuccugc

SEQ ID NO: 34628 - RNA, 32 nt, Human
accaagaagcagggaaauggacccaguggccu

SEQ ID NO: 34629 - RNA, 32 nt, Human
accaagaagccacgcauuuccccaaggucucc

SEQ ID NO: 34630 - RNA, 32 nt, Human
accaagaaucaacuugcaaaucugccauuaaa

SEQ ID NO: 34631 - RNA, 32 nt, Human
accaagacagaguugagucccacagcaaggga

SEQ ID NO: 34632 - RNA, 32 nt, Human
accaagacaggcucggagccaucagcugggug

SEQ ID NO: 34633 - RNA, 32 nt, Human
accaagaccagccuggccaagauggugaaacc

SEQ ID NO: 34634 - RNA, 32 nt, Human
accaagaccuucccauuccuccuccccacaug

SEQ ID NO: 34635 - RNA, 32 nt, Human
accaagacuccagagcagguggguucuugaug

SEQ ID NO: 34636 - RNA, 32 nt, Human
accaagacuucacccaaccacgguccuucacu

SEQ ID NO: 34637 - RNA, 32 nt, Human
accaagagaaaccaaacccaaacuccuuccuu

SEQ ID NO: 34638 - RNA, 32 nt, Human
accaagagaacccagaacugguucagagaucc

SEQ ID NO: 34639 - RNA, 23 nt, Human
accaagagaacuaacggcugcgg

SEQ ID NO: 34640 - RNA, 32 nt, Human
accaagagacaggcagcucaccaggguggaca

SEQ ID NO: 34641 - RNA, 32 nt, Human
accaagagaggaaggagaagggucccgugaac

SEQ ID NO: 34642 - RNA, 32 nt, Human
accaagagaguguuucuucacucaacucaggu

SEQ ID NO: 34643 - RNA, 32 nt, Human
accaagagauccucugucaagagaauuuccug

SEQ ID NO: 34644 - RNA, 32 nt, Human
accaagagcagcaagaacaaaagggagacuga

SEQ ID NO: 34645 - RNA, 32 nt, Human
accaagagcaggaagagguugcuggagcaaga

SEQ ID NO: 34646 - RNA, 25 nt, Human
accaagagcaggcaaagacacggga

SEQ ID NO: 34647 - RNA, 32 nt, Human
accaagagccucccugccguucgcugaguccc

SEQ ID NO: 34648 - RNA, 32 nt, Human
accaagagccuucucucuuccuguugacacuu

SEQ ID NO: 34649 - RNA, 32 nt, Human
accaagagcucucccgccuucucccucgagca

SEQ ID NO: 34650 - RNA, 32 nt, Human
accaagagcuguggacacagcacuccaacuua

SEQ ID NO: 34651 - RNA, 32 nt, Human
accaagagcuguucuucccagaagagcccugc

SEQ ID NO: 34652 - RNA, 32 nt, Human
accaagaggaagaugaagccuaccaggaauua

SEQ ID NO: 34653 - RNA, 32 nt, Human
accaagagggauuaacaagcagaggaguggug

SEQ ID NO: 34654 - RNA, 32 nt, Human
accaagagggcugagggugagguguggaaggg

SEQ ID NO: 34655 - RNA, 32 nt, Human
accaagaggggcucugccauuaguuggacccu

SEQ ID NO: 34656 - RNA, 23 nt, Human
accaagagucuugcuaccaggag

SEQ ID NO: 34657 - RNA, 23 nt, Human
accaagagugaccuacacacgag

SEQ ID NO: 34658 - RNA, 20 nt, Human
accaagagugaggggcagag

SEQ ID NO: 34659 - RNA, 22 nt, Human
accaagagugccccaccaagag

SEQ ID NO: 34660 - RNA, 32 nt, Human
accaagauauuccuuucaucucugguugaguu

SEQ ID NO: 34661 - RNA, 32 nt, Human
accaagaugauuccaaugagggguuggaauua

SEQ ID NO: 34662 - RNA, 32 nt, Human
accaagaugcccguuggccucugagcagucac

SEQ ID NO: 34663 - RNA, 32 nt, Human
accaagcacaugcacugauccaccgcacgaug

SEQ ID NO: 34664 - RNA, 32 nt, Human
accaagcagaagugaagagaaaagaggaggac

SEQ ID NO: 34665 - RNA, 32 nt, Human
accaagcagacuggagggaaagagugaggcca

SEQ ID NO: 34666 - RNA, 32 nt, Human
accaagcagaggugacauggugccaucaggag

SEQ ID NO: 34667 - RNA, 24 nt, Human
accaagcagcaggaauucaaagcu

SEQ ID NO: 34668 - RNA, 21 nt, Human
accaagcagcuuguggcggcu

SEQ ID NO: 34669 - RNA, 23 nt, Human
accaagcauuggaggaauaucgu

SEQ ID NO: 34670 - RNA, 32 nt, Human
accaagccaaagcaaaggaugcagccccucgg

SEQ ID NO: 34671 - RNA, 32 nt, Human
accaagccaagagggcuugggggugugcaggc

SEQ ID NO: 34672 - RNA, 21 nt, Human
accaagccacagcagguccuc

SEQ ID NO: 34673 - RNA, 32 nt, Human
accaagcccagccaauuguuuguauuuucagu

SEQ ID NO: 34674 - RNA, 32 nt, Human
accaagccccuucagcuucucccuccggaucg

SEQ ID NO: 34675 - RNA, 32 nt, Human
accaagcccggccaccacgcauggcaugcugu

SEQ ID NO: 34676 - RNA, 32 nt, Human
accaagcccuacucucuaguuuuccauauaau

SEQ ID NO: 34677 - RNA, 32 nt, Human
accaagcccuacuuuuguucuucuauaggccc

SEQ ID NO: 34678 - RNA, 32 nt, Human
accaagcccugcccccagcccaagaggagccc

SEQ ID NO: 34679 - RNA, 19 nt, Human
accaagcgauuugguccca

SEQ ID NO: 34680 - RNA, 22 nt, Human
accaagcucuccugggguuccc

SEQ ID NO: 34681 - RNA, 32 nt, Human
accaagcucugucucagaauugcacauguggc

SEQ ID NO: 34682 - RNA, 18 nt, Human
accaagcugacucacaag

SEQ ID NO: 34683 - RNA, 32 nt, Human
accaagcugagacccccauccccagcugcucu

SEQ ID NO: 34684 - RNA, 25 nt, Human
accaagcugauggggagggacuugu

SEQ ID NO: 34685 - RNA, 32 nt, Human
accaagcuggacugcaguggcaugaucucggc

SEQ ID NO: 34686 - RNA, 32 nt, Human
accaagcuggucucuaacuccugggcuuaagu

SEQ ID NO: 34687 - RNA, 32 nt, Human
accaagcuuccacccuuuuauaauaggaaggg

SEQ ID NO: 34688 - RNA, 23 nt, Human
accaagcuuuccugaccaccuga

SEQ ID NO: 34689 - RNA, 21 nt, Human
accaaggaccaguccaccuga

SEQ ID NO: 34690 - RNA, 16 nt, Human
accaaggacccaucaa

SEQ ID NO: 34691 - RNA, 32 nt, Human
accaaggagagagguugacaugaccuccccgc

SEQ ID NO: 34692 - RNA, 32 nt, Human
accaaggagaggggagcaaaugguuuugggca

SEQ ID NO: 34693 - RNA, 32 nt, Human
accaaggagagucuggacaaagcuacugaaac

SEQ ID NO: 34694 - RNA, 32 nt, Human
accaaggaggcagagguuguaguaagcugaca

SEQ ID NO: 34695 - RNA, 32 nt, Human
accaaggagguggagguugcagugagccggga

SEQ ID NO: 34696 - RNA, 32 nt, Human
accaaggcaagggggaugagaguucacggggc

SEQ ID NO: 34697 - RNA, 31 nt, Human
accaaggcaaugucuuacuaccucagcucag

SEQ ID NO: 34698 - RNA, 32 nt, Human
accaaggcacuccagccugggugacagaguga

SEQ ID NO: 34699 - RNA, 32 nt, Human
accaaggcagucucacuucucaaugacuggac

SEQ ID NO: 34700 - RNA, 32 nt, Human
accaaggccacagggagcuccaccuucucugg

SEQ ID NO: 34701 - RNA, 32 nt, Human
accaaggccaguagaaagcuauggcugcaaaa

SEQ ID NO: 34702 - RNA, 32 nt, Human
accaaggccaucuggagacuccuggcuuucug

SEQ ID NO: 34703 - RNA, 32 nt, Human
accaaggccauggaaguggaggcugcagaggc

SEQ ID NO: 34704 - RNA, 21 nt, Human
accaaggccccuccccaccau

SEQ ID NO: 34705 - RNA, 32 nt, Human
accaaggcccuugcaucuccccagaucguuuc

SEQ ID NO: 34706 - RNA, 32 nt, Human
accaaggcucauacuguccuguccuuacccuc

SEQ ID NO: 34707 - RNA, 32 nt, Human
accaaggcuuaggaauuucucaggccaccuua

SEQ ID NO: 34708 - RNA, 32 nt, Human
accaagggacuccaccaccaagucacuucccc

SEQ ID NO: 34709 - RNA, 32 nt, Human
accaagggagagaggggcccagggguagggaa

SEQ ID NO: 34710 - RNA, 32 nt, Human
accaagggaggcacuagcaagagguuggaggg

SEQ ID NO: 34711 - RNA, 32 nt, Human
accaagggaguuaaccuaccugaacuaaguag

SEQ ID NO: 34712 - RNA, 32 nt, Human
accaagggaucugccauugggacccuccagug

SEQ ID NO: 34713 - RNA, 32 nt, Human
accaagggauguggaguccaggcuggguccua

SEQ ID NO: 34714 - RNA, 32 nt, Human
accaagggcaaaaacuagaaacuguaacugcc

SEQ ID NO: 34715 - RNA, 32 nt, Human
accaagggcccucacucaggaacccuggagac

SEQ ID NO: 34716 - RNA, 32 nt, Human
accaagggccuccuggaaacaccagcucugac

SEQ ID NO: 34717 - RNA, 32 nt, Human
accaaggucacugagccaggacuggacccagg

SEQ ID NO: 34718 - RNA, 24 nt, Human
accaaggugaagccacugcugcag

SEQ ID NO: 34719 - RNA, 19 nt, Human
accaaggugagcagggccc

SEQ ID NO: 34720 - RNA, 32 nt, Human
accaagguggcagagguugcaguaagccaaga

SEQ ID NO: 34721 - RNA, 32 nt, Human
accaaggugugaacaugcccugaugccuaacc

SEQ ID NO: 34722 - RNA, 32 nt, Human
accaagguucuuuuuguuuacacaauacuuga

SEQ ID NO: 34723 - RNA, 32 nt, Human
accaagguuuugaaaucccaucaggucaccgc

SEQ ID NO: 34724 - RNA, 32 nt, Human
accaaguaaacccaggcagcgaggggcaaagc

SEQ ID NO: 34725 - RNA, 32 nt, Human
accaaguacagucucucgccugugcugucuca

SEQ ID NO: 34726 - RNA, 32 nt, Human
accaaguaccaguauaagcaucugccaucugc

SEQ ID NO: 34727 - RNA, 32 nt, Human
accaaguagaaggcacaugugcucugauggcc

SEQ ID NO: 34728 - RNA, 32 nt, Human
accaaguagcuccucuccugaaguaaauuuua

SEQ ID NO: 34729 - RNA, 32 nt, Human
accaaguagcuggagguggugaucagaugauc

SEQ ID NO: 34730 - RNA, 32 nt, Human
accaagucauucaccugaacaccagaauuaga

SEQ ID NO: 34731 - RNA, 32 nt, Human
accaaguccaaggccaggucucagucgguguc

SEQ ID NO: 34732 - RNA, 32 nt, Human
accaagucuccucaugaaaaccacagugaguc

SEQ ID NO: 34733 - RNA, 32 nt, Human
accaagucuccuccugugucacccugcggggc

SEQ ID NO: 34734 - RNA, 32 nt, Human
accaagucuguuucuuguuuuguauuuucucu

SEQ ID NO: 34735 - RNA, 32 nt, Human
accaagucuuggaggugauguguuacauuacg

SEQ ID NO: 34736 - RNA, 32 nt, Human
accaagugaaacgucucacaggcccaggacuu

SEQ ID NO: 34737 - RNA, 32 nt, Human
accaagugaagaggaggagaaagagucaacca

SEQ ID NO: 34738 - RNA, 32 nt, Human
accaagugagugagaggcagagcgaggacgcc

SEQ ID NO: 34739 - RNA, 32 nt, Human
accaagugauggaagagguuggaagugaauaa

SEQ ID NO: 34740 - RNA, 32 nt, Human
accaagugauggagaacggugucuggaauauu

SEQ ID NO: 34741 - RNA, 32 nt, Human
accaaguggaaccagaacaaggccccgacagg

SEQ ID NO: 34742 - RNA, 32 nt, Human
accaagugucugcaaguaaacaccuggaggug

SEQ ID NO: 34743 - RNA, 32 nt, Human
accaagugucugcaaguaacaccuggagguga

SEQ ID NO: 34744 - RNA, 32 nt, Human
accaagugugggcccacauggugugggccuuu

SEQ ID NO: 34745 - RNA, 32 nt, Human
accaaguucaaaacacuuucagauagaagucu

SEQ ID NO: 34746 - RNA, 24 nt, Human
accaaguuuucuuuucuucuccca

SEQ ID NO: 34747 - RNA, 32 nt, Human
accaauaaucacaacauguaauucagcaaaac

SEQ ID NO: 34748 - RNA, 32 nt, Human
accaauagaaauaaagauacauguggguguug

SEQ ID NO: 34749 - RNA, 32 nt, Human
accaauagagcagggaaagggaaauguagaua

SEQ ID NO: 34750 - RNA, 32 nt, Human
accaauagcccgugacacagaccucaggagau

SEQ ID NO: 34751 - RNA, 32 nt, Human
accaauagggcugagcucucugugggcuggca

SEQ ID NO: 34752 - RNA, 32 nt, Human
accaauauacaguggggcugaagucugcaagg

SEQ ID NO: 34753 - RNA, 32 nt, Human
accaauauacuuuuuaaaauuugguuauuuuu

SEQ ID NO: 34754 - RNA, 32 nt, Human
accaauaucuucuucaggcucugacaggccuc

SEQ ID NO: 34755 - RNA, 31 nt, Human
accaaucacagcucaugccgagguggaggua

SEQ ID NO: 34756 - RNA, 32 nt, Human
accaaucaccaccacagccugcaagugcacug

SEQ ID NO: 34757 - RNA, 32 nt, Human
accaaucagcauaggaaucugagaauugcucu

SEQ ID NO: 34758 - RNA, 32 nt, Human
accaaucaugccuucccagcagucccucaaag

SEQ ID NO: 34759 - RNA, 32 nt, Human
accaauccagaugccagcagccugucaaucac

SEQ ID NO: 34760 - RNA, 32 nt, Human
accaauccgcgcagggcagcgaggaggagcca

SEQ ID NO: 34761 - RNA, 32 nt, Human
accaauccucagccacuuugguguuuucucaa

SEQ ID NO: 34762 - RNA, 32 nt, Human
accaauccugggaggugggagcuggaaugggg

SEQ ID NO: 34763 - RNA, 32 nt, Human
accaaucuaggcaauguagugagacccugucu

SEQ ID NO: 34764 - RNA, 32 nt, Human
accaaucuggggcuggaaauguuaggagguug

SEQ ID NO: 34765 - RNA, 32 nt, Human
accaaugaagaagacaaagucuaaggaagaau

SEQ ID NO: 34766 - RNA, 32 nt, Human
accaaugcaguuucaccugcagagcucacccc

SEQ ID NO: 34767 - RNA, 32 nt, Human
accaaugccagaagaaaggggcuguagacccc

SEQ ID NO: 34768 - RNA, 32 nt, Human
accaaugcccacuuccccuccugggucaccuc

SEQ ID NO: 34769 - RNA, 32 nt, Human
accaauggcacccagagagggcauggaggcuc

SEQ ID NO: 34770 - RNA, 32 nt, Human
accaauggcccuuccaagagcugguuuuagag

SEQ ID NO: 34771 - RNA, 32 nt, Human
accaauggccuauuagcccccaaaaaguuagu

SEQ ID NO: 34772 - RNA, 32 nt, Human
accaaugggaggacggcggcgcagcccgcucc

SEQ ID NO: 34773 - RNA, 32 nt, Human
accaaugggcaauagagguugagagagauuca

SEQ ID NO: 34774 - RNA, 32 nt, Human
accaauggggacaccagcugaagacuggaagg

SEQ ID NO: 34775 - RNA, 32 nt, Human
accaaugugcuccgcuacauccagcugacuca

SEQ ID NO: 34776 - RNA, 32 nt, Human
accaauguggagagaggaagguggcaggucug

SEQ ID NO: 34777 - RNA, 32 nt, Human
accaaugugggccaaguggccaugaagggaga

SEQ ID NO: 34778 - RNA, 32 nt, Human
accaauguuauuuucaaaauauuugaaaucca

SEQ ID NO: 34779 - RNA, 32 nt, Human
accaauuauauuaaucaaauggaaauuaauug

SEQ ID NO: 34780 - RNA, 32 nt, Human
accaauuccugguuaaugaagggagagugugg

SEQ ID NO: 34781 - RNA, 32 nt, Human
accaauucuacccugcuccucuuuuccuuuuc

SEQ ID NO: 34782 - RNA, 32 nt, Human
accaauugcugcccaucuggccugugugccca

SEQ ID NO: 34783 - RNA, 32 nt, Human
accaauugguagaaucagaaacugucuuugga

SEQ ID NO: 34784 - RNA, 22 nt, Human
accaauugucaugcuugacaca

SEQ ID NO: 34785 - RNA, 32 nt, Human
accaauuguccaaccuccauuacaggggucuu

SEQ ID NO: 34786 - RNA, 20 nt, Human
accaauuucaauuuccuggu

SEQ ID NO: 34787 - RNA, 32 nt, Human
accaauuuccucccccuccucacucucacaag

SEQ ID NO: 34788 - RNA, 32 nt, Human
accaauuuguagaaugaauacauauuuucaaa

SEQ ID NO: 34789 - RNA, 32 nt, Human
accacaaacccugcugaacacagugucuguuc

SEQ ID NO: 34790 - RNA, 32 nt, Human
accacaaagcugaccaacuccugcuuccuuaa

SEQ ID NO: 34791 - RNA, 32 nt, Human
accacaacacgccaccgggagagaugcugaga

SEQ ID NO: 34792 - RNA, 32 nt, Human
accacaaccagcuucuccaggucauaugugcc

SEQ ID NO: 34793 - RNA, 24 nt, Human
accacaaccuccaccucccagguu

SEQ ID NO: 34794 - RNA, 24 nt, Human
accacaaccuccaccucccggguu

SEQ ID NO: 34795 - RNA, 24 nt, Human
accacaaccuccaccuccuggguu

SEQ ID NO: 34796 - RNA, 24 nt, Human
accacaaccuccgccucccagguu

SEQ ID NO: 34797 - RNA, 32 nt, Human
accacaaccugacacugggcaagauggcccac

SEQ ID NO: 34798 - RNA, 24 nt, Human
accacaaccuucaccuccccgguu

SEQ ID NO: 34799 - RNA, 23 nt, Human
accacaagaggcagggcagcggg

SEQ ID NO: 34800 - RNA, 32 nt, Human
accacaagccagccccucgcccucucuguggc

SEQ ID NO: 34801 - RNA, 32 nt, Human
accacaagcccgagggcaggcuugaguuaggc

SEQ ID NO: 34802 - RNA, 32 nt, Human
accacaaggaagcgaaacugggugcguucacu

SEQ ID NO: 34803 - RNA, 32 nt, Human
accacaaguccccaagagugugauauuccccu

SEQ ID NO: 34804 - RNA, 31 nt, Human
accacaauaaagagcccuccacccuccccac

SEQ ID NO: 34805 - RNA, 32 nt, Human
accacaaucaacuauugacacaugcuugcagg

SEQ ID NO: 34806 - RNA, 32 nt, Human
accacaauccacugacucaaccaggaaaucau

SEQ ID NO: 34807 - RNA, 32 nt, Human
accacaauccuccuccuccucuccaggggccu

SEQ ID NO: 34808 - RNA, 27 nt, Human
accacaaugagauaccaucucaugcca

SEQ ID NO: 34809 - RNA, 31 nt, Human
accacaaugccuggccccuguguguguacau

SEQ ID NO: 34810 - RNA, 32 nt, Human
accacacaaaggcaaggagcugaccaggaggu

SEQ ID NO: 34811 - RNA, 32 nt, Human
accacacaaggcaguugcccaaaccauucugu

SEQ ID NO: 34812 - RNA, 24 nt, Human
accacacaauauucccauguaaca

SEQ ID NO: 34813 - RNA, 23 nt, Human
accacacacacauggcaugcaug

SEQ ID NO: 34814 - RNA, 23 nt, Human
accacacaccaugggccucuaua

SEQ ID NO: 34815 - RNA, 32 nt, Human
accacacacucaggaagccuugucuaccuuuc

SEQ ID NO: 34816 - RNA, 21 nt, Human
accacacacuugugugcgugu

SEQ ID NO: 34817 - RNA, 32 nt, Human
accacacagaagucuggucaccucugggcgcc

SEQ ID NO: 34818 - RNA, 32 nt, Human
accacacagacaggguuucaccauguuggcca

SEQ ID NO: 34819 - RNA, 18 nt, Human
accacacagaggcugccu

SEQ ID NO: 34820 - RNA, 32 nt, Human
accacacagauguuccugucuccucgcauggg

SEQ ID NO: 34821 - RNA, 32 nt, Human
accacacagucuuucuuagccauuccaaaaag

SEQ ID NO: 34822 - RNA, 18 nt, Human
accacacauauguuauca

SEQ ID NO: 34823 - RNA, 32 nt, Human
accacacaugauuuuauuuuucucuuccuuug

SEQ ID NO: 34824 - RNA, 32 nt, Human
accacacauggucuccccaccugguuucagcu

SEQ ID NO: 34825 - RNA, 22 nt, Human
accacaccacaccucacugccc

SEQ ID NO: 34826 - RNA, 32 nt, Human
accacaccacugcacuccauccugggcaacag

SEQ ID NO: 34827 - RNA, 32 nt, Human
accacaccacugcacuccugccugggcaauag

SEQ ID NO: 34828 - RNA, 32 nt, Human
accacaccacugcuuuucagcauuguacugga

SEQ ID NO: 34829 - RNA, 22 nt, Human
accacaccagaaaugggaccua

SEQ ID NO: 34830 - RNA, 31 nt, Human
accacaccaguguccaugcccagagguucug

SEQ ID NO: 34831 - RNA, 19 nt, Human
accacaccaucccgagcag

SEQ ID NO: 34832 - RNA, 32 nt, Human
accacaccauugcacuccagccugggcaacaa

SEQ ID NO: 34833 - RNA, 32 nt, Human
accacacccaaggcugcuuuccagaaagcccg

SEQ ID NO: 34834 - RNA, 32 nt, Human
accacacccagccugggucucucuacuuuuaa

SEQ ID NO: 34835 - RNA, 32 nt, Human
accacacccagcuaaauuuuuguauuuuuagu

SEQ ID NO: 34836 - RNA, 32 nt, Human
accacacccagcuaauguuuuguauuuuuagu

SEQ ID NO: 34837 - RNA, 32 nt, Human
accacaccccugugacacacaacuuacucaug

SEQ ID NO: 34838 - RNA, 32 nt, Human
accacacccggcuaauauuuuguauuuuaaua

SEQ ID NO: 34839 - RNA, 32 nt, Human
accacacccuggaaggugcaguugggaagaaa

SEQ ID NO: 34840 - RNA, 32 nt, Human
accacaccuagcuaauauuuuguauuuuaaua

SEQ ID NO: 34841 - RNA, 32 nt, Human
accacaccuccuuuugcccuccgcaggagccu

SEQ ID NO: 34842 - RNA, 32 nt, Human
accacaccucugagagaagucagugcagacgg

SEQ ID NO: 34843 - RNA, 16 nt, Human
accacaccuggcccag

SEQ ID NO: 34844 - RNA, 32 nt, Human
accacaccuggcuaacuuuuuguauuuuuagu

SEQ ID NO: 34845 - RNA, 32 nt, Human
accacaccuggcuaguguuuuguauuuuuagu

SEQ ID NO: 34846 - RNA, 26 nt, Human
accacaccuugccaugcagagcaccu

SEQ ID NO: 34847 - RNA, 32 nt, Human
accacacgcaugcgccaccacgcccagcuaau

SEQ ID NO: 34848 - RNA, 32 nt, Human
accacacucauggcucaggucugccggggccg

SEQ ID NO: 34849 - RNA, 32 nt, Human
accacacuccagccugggugacagagugaaac

SEQ ID NO: 34850 - RNA, 32 nt, Human
accacacucccacacuccagccuggguaacag

SEQ ID NO: 34851 - RNA, 32 nt, Human
accacacucuccccagcaucuacucaagguag

SEQ ID NO: 34852 - RNA, 32 nt, Human
accacacugaccaaaucuggaucuuuggacua

SEQ ID NO: 34853 - RNA, 32 nt, Human
accacacugauccagcccugaguuccuagcca

SEQ ID NO: 34854 - RNA, 24 nt, Human
accacacugccaccacccugcaca

SEQ ID NO: 34855 - RNA, 31 nt, Human
accacacugugcggggagguuggcccagagc

SEQ ID NO: 34856 - RNA, 18 nt, Human
accacacuucaggugcua

SEQ ID NO: 34857 - RNA, 32 nt, Human
accacacuugcuggaugggcccacggagcgag

SEQ ID NO: 34858 - RNA, 32 nt, Human
accacagaaccucacaguuuauaaagcuguag

SEQ ID NO: 34859 - RNA, 32 nt, Human
accacagaagacagggaagaacuaccaggccu

SEQ ID NO: 34860 - RNA, 21 nt, Human
accacagaagucucagugcca

SEQ ID NO: 34861 - RNA, 32 nt, Human
accacagaauuggaugggcaucaggaaguaga

SEQ ID NO: 34862 - RNA, 17 nt, Human
accacagaccccccagg

SEQ ID NO: 34863 - RNA, 20 nt, Human
accacagacgcucuccaggu

SEQ ID NO: 34864 - RNA, 32 nt, Human
accacagacuacaacugcccagcuucaucuaa

SEQ ID NO: 34865 - RNA, 32 nt, Human
accacagagccaacuugugaagcacacagcuc

SEQ ID NO: 34866 - RNA, 32 nt, Human
accacagagcuugcccucagugaccaaauaau

SEQ ID NO: 34867 - RNA, 32 nt, Human
accacagaggcagaaggggugaugagugagag

SEQ ID NO: 34868 - RNA, 32 nt, Human
accacagaggggaccagggcacugugagcccu

SEQ ID NO: 34869 - RNA, 32 nt, Human
accacagaggugcuugccauuaugggaaauca

SEQ ID NO: 34870 - RNA, 32 nt, Human
accacagaguucacugcauugaaggaaaucac

SEQ ID NO: 34871 - RNA, 21 nt, Human
accacagauccauggcacuua

SEQ ID NO: 34872 - RNA, 32 nt, Human
accacagaucccuggauugcugggaauggaag

SEQ ID NO: 34873 - RNA, 32 nt, Human
accacagaugaccacaucuaauccugcuucua

SEQ ID NO: 34874 - RNA, 32 nt, Human
accacagauguaagaaagugauaagccauggc

SEQ ID NO: 34875 - RNA, 21 nt, Human
accacagcaauacccccaaca

SEQ ID NO: 34876 - RNA, 32 nt, Human
accacagcacaccggugcuggccacaccagcc

SEQ ID NO: 34877 - RNA, 32 nt, Human
accacagcacgugcuccagucagugguccugg

SEQ ID NO: 34878 - RNA, 32 nt, Human
accacagcacucaagccugggugacagagcaa

SEQ ID NO: 34879 - RNA, 32 nt, Human
accacagcacuccaaccugggugacagaguga

SEQ ID NO: 34880 - RNA, 32 nt, Human
accacagcagaggacggggugccggcaccucc

SEQ ID NO: 34881 - RNA, 32 nt, Human
accacagcagcaaagcacagagugugaccuuu

SEQ ID NO: 34882 - RNA, 21 nt, Human
accacagcaugcccggcuccu

SEQ ID NO: 34883 - RNA, 32 nt, Human
accacagcauucagcccugcagccugggaccu

SEQ ID NO: 34884 - RNA, 32 nt, Human
accacagccacuuuagaaaagcuuccuguacc

SEQ ID NO: 34885 - RNA, 32 nt, Human
accacagccagccaguaugaccuaucuuaauc

SEQ ID NO: 34886 - RNA, 32 nt, Human
accacagccagccuuagggaaaacuuggaagu

SEQ ID NO: 34887 - RNA, 32 nt, Human
accacagccagugucaggccucugccucuggg

SEQ ID NO: 34888 - RNA, 32 nt, Human
accacagccccagcugccucagagcaggcaca

SEQ ID NO: 34889 - RNA, 32 nt, Human
accacagcccugggcaaaggggaccagcaagu

SEQ ID NO: 34890 - RNA, 32 nt, Human
accacagccgcugaaugaggcuuccaggcguc

SEQ ID NO: 34891 - RNA, 23 nt, Human
accacagcucaaggaggccugcc

SEQ ID NO: 34892 - RNA, 23 nt, Human
accacagcucaagggggccugcc

SEQ ID NO: 34893 - RNA, 32 nt, Human
accacagcugagaagcaggcaauucuguaggc

SEQ ID NO: 34894 - RNA, 32 nt, Human
accacagcugcucuccaggugcugggcccugg

SEQ ID NO: 34895 - RNA, 20 nt, Human
accacagcuuacuccuuaug

SEQ ID NO: 34896 - RNA, 32 nt, Human
accacagcuuuaccaccucccguuaaguccuu

SEQ ID NO: 34897 - RNA, 32 nt, Human
accacaggaguuugugguguagcaccacccac

SEQ ID NO: 34898 - RNA, 32 nt, Human
accacaggauaguguacccacagauggguguu

SEQ ID NO: 34899 - RNA, 32 nt, Human
accacaggcaagugcaccaccaugacuggcua

SEQ ID NO: 34900 - RNA, 32 nt, Human
accacaggcaugagccacugugcccagccuag

SEQ ID NO: 34901 - RNA, 32 nt, Human
accacaggcaugugccaccaugccuagcuaau

SEQ ID NO: 34902 - RNA, 21 nt, Human
accacaggcccccgugccugc

SEQ ID NO: 34903 - RNA, 21 nt, Human
accacaggccugagccacugu

SEQ ID NO: 34904 - RNA, 32 nt, Human
accacaggccugagccacugugcccagccuug

SEQ ID NO: 34905 - RNA, 22 nt, Human
accacaggccuggcacauugug

SEQ ID NO: 34906 - RNA, 32 nt, Human
accacaggcgacugccaccacacccagcuaau

SEQ ID NO: 34907 - RNA, 32 nt, Human
accacaggcgcccaccaccacgcccagcuagu

SEQ ID NO: 34908 - RNA, 32 nt, Human
accacaggcgcgagccacugcguccggccggc

SEQ ID NO: 34909 - RNA, 32 nt, Human
accacaggcugcagcacaaggucuccaccauc

SEQ ID NO: 34910 - RNA, 32 nt, Human
accacaggcugccucaugacccuccuguccag

SEQ ID NO: 34911 - RNA, 21 nt, Human
accacaggcuggaguacagug

SEQ ID NO: 34912 - RNA, 32 nt, Human
accacagggaacuuccuuccagaggcuugcuu

SEQ ID NO: 34913 - RNA, 32 nt, Human
accacagggccacagagcuggagcuggaucua

SEQ ID NO: 34914 - RNA, 32 nt, Human
accacagggccaggcuguuugcuccccaucgg

SEQ ID NO: 34915 - RNA, 32 nt, Human
accacagggccugagaagucuugcuuuauggg

SEQ ID NO: 34916 - RNA, 18 nt, Human
accacagggccugcagca

SEQ ID NO: 34917 - RNA, 32 nt, Human
accacagggcugggcuacuaagcuuuuucagu

SEQ ID NO: 34918 - RNA, 22 nt, Human
accacagggguaugccaccaca

SEQ ID NO: 34919 - RNA, 32 nt, Human
accacagggguaugccaccacaccuggcuaau

SEQ ID NO: 34920 - RNA, 24 nt, Human
accacaggggucuccuuccaggcc

SEQ ID NO: 34921 - RNA, 32 nt, Human
accacaggguaacucuacaugcuguucuccua

SEQ ID NO: 34922 - RNA, 32 nt, Human
accacagggugaggucaaggugagcauucugg

SEQ ID NO: 34923 - RNA, 32 nt, Human
accacagguaguuaaugcugggggaagagggg

SEQ ID NO: 34924 - RNA, 25 nt, Human
accacaggugccuaccaccaugcca

SEQ ID NO: 34925 - RNA, 32 nt, Human
accacaggugcgcaccaccauacccagcuacu

SEQ ID NO: 34926 - RNA, 32 nt, Human
accacaggugugagccaccacaccuggcuaau

SEQ ID NO: 34927 - RNA, 19 nt, Human
accacagguguuggcugcc

SEQ ID NO: 34928 - RNA, 32 nt, Human
accacaguacuccagccuaggugacagagcga

SEQ ID NO: 34929 - RNA, 32 nt, Human
accacagucacagaacugggggucauuuucua

SEQ ID NO: 34930 - RNA, 21 nt, Human
accacagucagaauaaucuca

SEQ ID NO: 34931 - RNA, 32 nt, Human
accacaguccaaggagcucacccugggcaacc

SEQ ID NO: 34932 - RNA, 32 nt, Human
accacaguccucacgauggugcagugauuucu

SEQ ID NO: 34933 - RNA, 21 nt, Human
accacagucugaagcaaggug

SEQ ID NO: 34934 - RNA, 32 nt, Human
accacagucuucacccuacugaacccgucaag

SEQ ID NO: 34935 - RNA, 32 nt, Human
accacaguguucccucgcagcaccacaaccuc

SEQ ID NO: 34936 - RNA, 19 nt, Human
accacaguugaccacaggu

SEQ ID NO: 34937 - RNA, 32 nt, Human
accacaguuuaccucaggugugccuguugcuu

SEQ ID NO: 34938 - RNA, 32 nt, Human
accacauaaaaaggccagacagggcggggugu

SEQ ID NO: 34939 - RNA, 25 nt, Human
accacauaaaugaugaguuugugug

SEQ ID NO: 34940 - RNA, 32 nt, Human
accacauaucaaagguugggauuuucagaguc

SEQ ID NO: 34941 - RNA, 32 nt, Human
accacaucacacuuauuuccacauugaccaca

SEQ ID NO: 34942 - RNA, 32 nt, Human
accacaucagcagcaaaaccgccagggcugaa

SEQ ID NO: 34943 - RNA, 22 nt, Human
accacaucaggaucggaaucua

SEQ ID NO: 34944 - RNA, 32 nt, Human
accacauccacccagggauuaggguucaagua

SEQ ID NO: 34945 - RNA, 32 nt, Human
accacaucccaguaaggaaacagcugccagcu

SEQ ID NO: 34946 - RNA, 32 nt, Human
accacauccuggaagaggagggggccccggga

SEQ ID NO: 34947 - RNA, 32 nt, Human
accacaucggaagugauuuucuaaauuggauu

SEQ ID NO: 34948 - RNA, 32 nt, Human
accacaucuacucugugaacccuggcuuaguc

SEQ ID NO: 34949 - RNA, 32 nt, Human
accacaucuccccucacccucacccucccugc

SEQ ID NO: 34950 - RNA, 32 nt, Human
accacaucuggcuaacuuuuuguauuuuuagu

SEQ ID NO: 34951 - RNA, 32 nt, Human
accacaucuucucacuuauagaugguagcuaa

SEQ ID NO: 34952 - RNA, 24 nt, Human
accacaugcuugguguacuauaug

SEQ ID NO: 34953 - RNA, 21 nt, Human
accacaugguaaccuacuguu

SEQ ID NO: 34954 - RNA, 32 nt, Human
accacaugucuugaacauucacauggguuaaa

SEQ ID NO: 34955 - RNA, 19 nt, Human
accacauguucgcaaagua

SEQ ID NO: 34956 - RNA, 32 nt, Human
accacauuagggaauaagcaguauuugcaugg

SEQ ID NO: 34957 - RNA, 32 nt, Human
accacauucaucaccuuggcccugcacucuga

SEQ ID NO: 34958 - RNA, 32 nt, Human
accacauuccugcucagaaacugcucacuucc

SEQ ID NO: 34959 - RNA, 32 nt, Human
accacauuccuuccuuucuuucccaacuucuu

SEQ ID NO: 34960 - RNA, 32 nt, Human
accacauuccuuccuuucuuucccgacuucuu

SEQ ID NO: 34961 - RNA, 21 nt, Human
accacauucucccagggaccc

SEQ ID NO: 34962 - RNA, 31 nt, Human
accacauucuucaaggagguuguagacaaau

SEQ ID NO: 34963 - RNA, 32 nt, Human
accacauuguuaccaacaauagccggaagugg

SEQ ID NO: 34964 - RNA, 32 nt, Human
accacauuugagaaguauuuccauccagugcu

SEQ ID NO: 34965 - RNA, 32 nt, Human
accacauuuuuccucaaguucccuggagaaga

SEQ ID NO: 34966 - RNA, 32 nt, Human
accaccaaccccacagaaauacgaaaaacccu

SEQ ID NO: 34967 - RNA, 32 nt, Human
accaccaacuggcuggcccuccuccucuuccc

SEQ ID NO: 34968 - RNA, 25 nt, Human
accaccaagcaaggacuucuguaau

SEQ ID NO: 34969 - RNA, 32 nt, Human
accaccaaggcaaagcagcacagugugaauag

SEQ ID NO: 34970 - RNA, 32 nt, Human
accaccaauucucuuuggaggcuggggauagu

SEQ ID NO: 34971 - RNA, 32 nt, Human
accaccacaaaucaugguuaauaaaagagagu

SEQ ID NO: 34972 - RNA, 32 nt, Human
accaccacacuccagccugggugacagagcga

SEQ ID NO: 34973 - RNA, 32 nt, Human
accaccacacuccagccugggugacagaguga

SEQ ID NO: 34974 - RNA, 32 nt, Human
accaccacacuggccucugauggcaagacuug

SEQ ID NO: 34975 - RNA, 22 nt, Human
accaccacagccgccgccgcug

SEQ ID NO: 34976 - RNA, 32 nt, Human
accaccacagccgccgccgcuggccagggugc

SEQ ID NO: 34977 - RNA, 32 nt, Human
accaccaccaacaacaucaacacagaucuuca

SEQ ID NO: 34978 - RNA, 32 nt, Human
accaccaccaccacaaaagcacccaggccgcc

SEQ ID NO: 34979 - RNA, 32 nt, Human
accaccaccacugugcggugggcugagcaggu

SEQ ID NO: 34980 - RNA, 32 nt, Human
accaccaccagagccuccugcccagcccuggc

SEQ ID NO: 34981 - RNA, 32 nt, Human
accaccaccagauucuucuuugaagucaacuu

SEQ ID NO: 34982 - RNA, 25 nt, Human
accaccaccagugagcuccagccug

SEQ ID NO: 34983 - RNA, 32 nt, Human
accaccaccaugauccaaucccuucccaccag

SEQ ID NO: 34984 - RNA, 22 nt, Human
accaccaccgccaccaccgcug

SEQ ID NO: 34985 - RNA, 21 nt, Human
accaccaccgccgccgccucc

SEQ ID NO: 34986 - RNA, 32 nt, Human
accaccacgacagcccuuccuccaucagaaga

SEQ ID NO: 34987 - RNA, 21 nt, Human
accaccacgcagccgccgccg

SEQ ID NO: 34988 - RNA, 32 nt, Human
accaccacucuggcuggcuuccaagggcacaa

SEQ ID NO: 34989 - RNA, 32 nt, Human
accaccacuuccuggguucaagcgauucuccu

SEQ ID NO: 34990 - RNA, 32 nt, Human
accaccagaagggagagggaaccagauaugca

SEQ ID NO: 34991 - RNA, 32 nt, Human
accaccagaguccuuggacucccccugggucu

SEQ ID NO: 34992 - RNA, 32 nt, Human
accaccagauacagaaaugugcuuuaacauca

SEQ ID NO: 34993 - RNA, 19 nt, Human
accaccagauaguguuaca

SEQ ID NO: 34994 - RNA, 32 nt, Human
accaccagcaccauccucuccucccagcagcc

SEQ ID NO: 34995 - RNA, 32 nt, Human
accaccagcagccugcguacccaggccccaag

SEQ ID NO: 34996 - RNA, 32 nt, Human
accaccagcauguucauguccagaccucggca

SEQ ID NO: 34997 - RNA, 32 nt, Human
accaccagccagcuaauuuuuguauuuuuagu

SEQ ID NO: 34998 - RNA, 23 nt, Human
accaccagccccaacuguaggca

SEQ ID NO: 34999 - RNA, 32 nt, Human
accaccagcccuggugacaggguggagacccc

SEQ ID NO: 35000 - RNA, 32 nt, Human
accaccagccuaucccugaaaaagcaaagaca

SEQ ID NO: 35001 - RNA, 30 nt, Human
accaccagccucuccaagcucaaguacaaa

SEQ ID NO: 35002 - RNA, 32 nt, Human
accaccagcgaugcccagcccuugguagagcu

SEQ ID NO: 35003 - RNA, 23 nt, Human
accaccagcgccuggugucauca

SEQ ID NO: 35004 - RNA, 32 nt, Human
accaccagcuccucuccacuucccaagggaga

SEQ ID NO: 35005 - RNA, 32 nt, Human
accaccaggagagaggcagaggggcugugccg

SEQ ID NO: 35006 - RNA, 32 nt, Human
accaccaggaggugagcuugcucugggaggca

SEQ ID NO: 35007 - RNA, 22 nt, Human
accaccaggggcugucugcaau

SEQ ID NO: 35008 - RNA, 32 nt, Human
accaccagggggcagaguugcacuuuuccagg

SEQ ID NO: 35009 - RNA, 21 nt, Human
accaccaguuuacccugaaac

SEQ ID NO: 35010 - RNA, 32 nt, Human
accaccaucaccaagcagaucacgcccuacgu

SEQ ID NO: 35011 - RNA, 32 nt, Human
accaccauccaccaguucaccuccuccagcuc

SEQ ID NO: 35012 - RNA, 18 nt, Human
accaccaucccugggagg

SEQ ID NO: 35013 - RNA, 32 nt, Human
accaccaucucaggaaaggcuguugugcuggu

SEQ ID NO: 35014 - RNA, 32 nt, Human
accaccaucuccuggguucaggcgauucuucc

SEQ ID NO: 35015 - RNA, 32 nt, Human
accaccaucuucuauucaaaugaagugaguca

SEQ ID NO: 35016 - RNA, 32 nt, Human
accaccaugccuggcuaauuucuguauuuuua

SEQ ID NO: 35017 - RNA, 32 nt, Human
accaccaugccuggcuaauuuuguauuucuag

SEQ ID NO: 35018 - RNA, 32 nt, Human
accaccaugccuggcuaauuuuguauuuuuag

SEQ ID NO: 35019 - RNA, 32 nt, Human
accaccaugccuggcuaauuuuugcauuuuua

SEQ ID NO: 35020 - RNA, 32 nt, Human
accaccaugccuggcuaauuuuuguauuuuau

SEQ ID NO: 35021 - RNA, 32 nt, Human
accaccaugccuggcuaauuuuuguauuuuua

SEQ ID NO: 35022 - RNA, 32 nt, Human
accaccaugccuggcuaauuuuuguauuuuug

SEQ ID NO: 35023 - RNA, 32 nt, Human
accaccaugccuggcuaguuuuuguauuuuua

SEQ ID NO: 35024 - RNA, 32 nt, Human
accaccaugccuggcugauuuuuguauuuuua

SEQ ID NO: 35025 - RNA, 32 nt, Human
accaccaugccuggcugguuuuuguauuuuua

SEQ ID NO: 35026 - RNA, 32 nt, Human
accaccaugccugucuaauuuuuguacuuuuc

SEQ ID NO: 35027 - RNA, 31 nt, Human
accaccaugcuggccucagggcugcuucugg

SEQ ID NO: 35028 - RNA, 32 nt, Human
accacccaacuggccccaguacauucauucuc

SEQ ID NO: 35029 - RNA, 32 nt, Human
accacccaaugaguucagcuugcccacugccu

SEQ ID NO: 35030 - RNA, 20 nt, Human
accacccacacccccagcac

SEQ ID NO: 35031 - RNA, 18 nt, Human
accacccaccucaaggaa

SEQ ID NO: 35032 - RNA, 32 nt, Human
accacccaccucauccuggcucagccugguga

SEQ ID NO: 35033 - RNA, 32 nt, Human
accacccagcaacuacuccuggaugcauccua

SEQ ID NO: 35034 - RNA, 32 nt, Human
accacccagcuggucagacucugauguugggu

SEQ ID NO: 35035 - RNA, 32 nt, Human
accacccagcugguuccagcccuggccaaggu

SEQ ID NO: 35036 - RNA, 32 nt, Human
accacccagcuucucccugagggcccaccagc

SEQ ID NO: 35037 - RNA, 32 nt, Human
accacccagcuuucucccagccacagccaaga

SEQ ID NO: 35038 - RNA, 24 nt, Human
accacccaggucccgcagcugccu

SEQ ID NO: 35039 - RNA, 32 nt, Human
accacccauaaaugacagugacuuuuucaaua

SEQ ID NO: 35040 - RNA, 32 nt, Human
accacccaugaucccaggcuggaggaagcagc

SEQ ID NO: 35041 - RNA, 24 nt, Human
accaccccagcccaccccgccacc

SEQ ID NO: 35042 - RNA, 32 nt, Human
accaccccaucuuccaugagggcucuaacggc

SEQ ID NO: 35043 - RNA, 24 nt, Human
accacccccaccgcccccaccacc

SEQ ID NO: 35044 - RNA, 24 nt, Human
accacccccaccgcccccaccgcc

SEQ ID NO: 35045 - RNA, 32 nt, Human
accacccccgcaccugcccucggccuuuguga

SEQ ID NO: 35046 - RNA, 21 nt, Human
accacccccucauccagggaa

SEQ ID NO: 35047 - RNA, 20 nt, Human
accacccccuccccagggag

SEQ ID NO: 35048 - RNA, 32 nt, Human
accacccccugcccucugcugccauaaucaca

SEQ ID NO: 35049 - RNA, 19 nt, Human
accaccccgccccaaggaa

SEQ ID NO: 35050 - RNA, 31 nt, Human
accaccccguuucagcccucagccucagggc

SEQ ID NO: 35051 - RNA, 32 nt, Human
accaccccugcagugggcugccagcugggcca

SEQ ID NO: 35052 - RNA, 20 nt, Human
accaccccugggauggcacu

SEQ ID NO: 35053 - RNA, 32 nt, Human
accaccccuucccagucaacccuuuacccuca

SEQ ID NO: 35054 - RNA, 19 nt, Human
accacccggcccugcaaca

SEQ ID NO: 35055 - RNA, 32 nt, Human
accacccgggcaacccucugggcuuguguucc

SEQ ID NO: 35056 - RNA, 32 nt, Human
accacccuaaguuugaauauggacuuuggagc

SEQ ID NO: 35057 - RNA, 19 nt, Human
accacccucaaguacuucc

SEQ ID NO: 35058 - RNA, 32 nt, Human
accacccucaccaauucucucaauccccauga

SEQ ID NO: 35059 - RNA, 32 nt, Human
accacccucacuguccuccagcccaggauggg

SEQ ID NO: 35060 - RNA, 19 nt, Human
accacccucccggcguauc

SEQ ID NO: 35061 - RNA, 32 nt, Human
accacccucuccaaccccucccuucccgaccc

SEQ ID NO: 35062 - RNA, 22 nt, Human
accacccucuuucuguacuuca

SEQ ID NO: 35063 - RNA, 19 nt, Human
accacccugagguuagcca

SEQ ID NO: 35064 - RNA, 18 nt, Human
accacccugagguuucca

SEQ ID NO: 35065 - RNA, 18 nt, Human
accacccugagugcuuca

SEQ ID NO: 35066 - RNA, 32 nt, Human
accacccugccugauccugccccugccugacc

SEQ ID NO: 35067 - RNA, 21 nt, Human
accacccugcuagaugucauc

SEQ ID NO: 35068 - RNA, 18 nt, Human
accacccugcugugauca

SEQ ID NO: 35069 - RNA, 32 nt, Human
accacccuggacaauauggugaaacccugucu

SEQ ID NO: 35070 - RNA, 32 nt, Human
accacccuggcaguuccagccuguaggggagu

SEQ ID NO: 35071 - RNA, 23 nt, Human
accacccuggccaacaugcgaaa

SEQ ID NO: 35072 - RNA, 22 nt, Human
accacccuggccaacaugguga

SEQ ID NO: 35073 - RNA, 24 nt, Human
accacccuggccaacauggugaaa

SEQ ID NO: 35074 - RNA, 24 nt, Human
accacccuggccaauauggugaaa

SEQ ID NO: 35075 - RNA, 32 nt, Human
accacccuggcuuauguggaacaccuaucagg

SEQ ID NO: 35076 - RNA, 32 nt, Human
accacccugggaaacauaaugcugccccuugg

SEQ ID NO: 35077 - RNA, 20 nt, Human
accacccugugugugucauc

SEQ ID NO: 35078 - RNA, 17 nt, Human
accacccuguuacauca

SEQ ID NO: 35079 - RNA, 32 nt, Human
accacccuguucucuguccuauggucacucag

SEQ ID NO: 35080 - RNA, 32 nt, Human
accacccuugagagaagaggcagcagcagcgg

SEQ ID NO: 35081 - RNA, 20 nt, Human
accacccuuguauuuuauca

SEQ ID NO: 35082 - RNA, 19 nt, Human
accacccuuuggucaauca

SEQ ID NO: 35083 - RNA, 32 nt, Human
accaccgagcaggcacagcacagcagugacuc

SEQ ID NO: 35084 - RNA, 24 nt, Human
acccaggcuggagugcuguggugu

SEQ ID NO: 35085 - RNA, 22 nt, Human
acccaggcuggaguggaguggc

SEQ ID NO: 35086 - RNA, 22 nt, Human
acccaggcuggaguggaguggu

SEQ ID NO: 35087 - RNA, 21 nt, Human
acccaggcuggaguguaagug

SEQ ID NO: 35088 - RNA, 22 nt, Human
acccaggcuggaguguaguagc

SEQ ID NO: 35089 - RNA, 22 nt, Human
acccaggcuggaguguaguggc

SEQ ID NO: 35090 - RNA, 23 nt, Human
acccaggcuggaguguaguggcg

SEQ ID NO: 35091 - RNA, 23 nt, Human
acccaggcuggaguguaguggug

SEQ ID NO: 35092 - RNA, 24 nt, Human
acccaggcuggaguguaguggugu

SEQ ID NO: 35093 - RNA, 32 nt, Human
acccaggcuggagugugcaguggcgcggugcg

SEQ ID NO: 35094 - RNA, 24 nt, Human
acccaggcuggaguuauagugacg

SEQ ID NO: 35095 - RNA, 23 nt, Human
acccaggcuggaguucaguggug

SEQ ID NO: 35096 - RNA, 23 nt, Human
acccaggcuggcgugcaauggcg

SEQ ID NO: 35097 - RNA, 24 nt, Human
acccaggcuggcgugcaguggugu

SEQ ID NO: 35098 - RNA, 22 nt, Human
acccaggcuggcuccuggggcg

SEQ ID NO: 35099 - RNA, 32 nt, Human
acccaggcuggcugagagccugcagggaagag

SEQ ID NO: 35100 - RNA, 32 nt, Human
acccaggcugggaauugcaguggcacaauccc

SEQ ID NO: 35101 - RNA, 22 nt, Human
acccaggcugggaugcaguggc

SEQ ID NO: 35102 - RNA, 23 nt, Human
acccaggcuggggugcaguggcg

SEQ ID NO: 35103 - RNA, 24 nt, Human
acccaggcuggggugcaguggcgu

SEQ ID NO: 35104 - RNA, 32 nt, Human
acccaggcuggucucaaacuccugggcacaag

SEQ ID NO: 35105 - RNA, 32 nt, Human
acccaggcuggucucaaacuccugggcucaag

SEQ ID NO: 35106 - RNA, 32 nt, Human
acccaggcuggucucaacuccugggcucaagc

SEQ ID NO: 35107 - RNA, 22 nt, Human
acccaggcuguagugcaguggc

SEQ ID NO: 35108 - RNA, 24 nt, Human
acccaggcuguaguggaguggugu

SEQ ID NO: 35109 - RNA, 32 nt, Human
acccaggcugugaucuguccugggcggggacc

SEQ ID NO: 35110 - RNA, 17 nt, Human
acccaggcuguggggga

SEQ ID NO: 35111 - RNA, 21 nt, Human
acccaggcuugcaaagugacg

SEQ ID NO: 35112 - RNA, 32 nt, Human
acccagggacacuccaacucuacacagcucag

SEQ ID NO: 35113 - RNA, 32 nt, Human
acccagggaccucgggcuggagcccagcagga

SEQ ID NO: 35114 - RNA, 32 nt, Human
acccagggagagagcuguuacugcuccagaga

SEQ ID NO: 35115 - RNA, 32 nt, Human
acccagggagcuggaguugagcuguuccccua

SEQ ID NO: 35116 - RNA, 32 nt, Human
acccagggaggucgaugcugcagugagcuaug

SEQ ID NO: 35117 - RNA, 32 nt, Human
acccagggauccuagacaggucaacuggaagg

SEQ ID NO: 35118 - RNA, 32 nt, Human
acccagggcagggagagaagaaccuagaggcc

SEQ ID NO: 35119 - RNA, 32 nt, Human
acccagggccagacuguguuuguuagaauccc

SEQ ID NO: 35120 - RNA, 32 nt, Human
acccagggccuggccuucucucccagcagccu

SEQ ID NO: 35121 - RNA, 32 nt, Human
acccagggcugaggccugccccaugaagaggc

SEQ ID NO: 35122 - RNA, 32 nt, Human
acccagggcugcugcucauccugggcaagcug

SEQ ID NO: 35123 - RNA, 32 nt, Human
acccaggggaaacugagucccucacccccuuc

SEQ ID NO: 35124 - RNA, 32 nt, Human
acccaggggauggaggucuacccuggacacua

SEQ ID NO: 35125 - RNA, 21 nt, Human
acccaggggcacgcucugggc

SEQ ID NO: 35126 - RNA, 32 nt, Human
acccaggggcccugugguccagggugagaguc

SEQ ID NO: 35127 - RNA, 32 nt, Human
acccagggggcagagguugcagugagccgaga

SEQ ID NO: 35128 - RNA, 32 nt, Human
acccaggggguggagguugcacugagccgaga

SEQ ID NO: 35129 - RNA, 32 nt, Human
acccagggucagcugagcuccuugugggggcu

SEQ ID NO: 35130 - RNA, 32 nt, Human
acccagggugguggcgaggugggagcuggcag

SEQ ID NO: 35131 - RNA, 32 nt, Human
acccaggguuuccccuuccccuucccuucuga

SEQ ID NO: 35132 - RNA, 32 nt, Human
acccagguaaacacuggcuuugguagaauugu

SEQ ID NO: 35133 - RNA, 32 nt, Human
acccaggucaucugagugaugccucagaucug

SEQ ID NO: 35134 - RNA, 21 nt, Human
acccagguccacgugguucca

SEQ ID NO: 35135 - RNA, 32 nt, Human
acccagguccccaauugagaaugucuugcuug

SEQ ID NO: 35136 - RNA, 20 nt, Human
acccaggucugcugcccagg

SEQ ID NO: 35137 - RNA, 32 nt, Human
acccaggucugucgguuuacgagaaugcaguu

SEQ ID NO: 35138 - RNA, 32 nt, Human
acccagguggcggagguugcagugagccgaca

SEQ ID NO: 35139 - RNA, 32 nt, Human
acccagguucaagugauucucgugucucagcc

SEQ ID NO: 35140 - RNA, 32 nt, Human
acccagguuguggagguuguagugagccgaga

SEQ ID NO: 35141 - RNA, 32 nt, Human
acccaguaagcuucuaccauuguuaggagcau

SEQ ID NO: 35142 - RNA, 32 nt, Human
acccaguaaugaggggcagggaagggaacugg

SEQ ID NO: 35143 - RNA, 32 nt, Human
acccaguacucccuccagccucagcuggcuga

SEQ ID NO: 35144 - RNA, 32 nt, Human
acccaguagaggaagguugcaguaagcugaga

SEQ ID NO: 35145 - RNA, 24 nt, Human
acccaguagccgccgccgccgccg

SEQ ID NO: 35146 - RNA, 32 nt, Human
acccaguaggcggaaguugcagugagcugaaa

SEQ ID NO: 35147 - RNA, 32 nt, Human
acccaguagguguggaggauaaaggcuucugu

SEQ ID NO: 35148 - RNA, 32 nt, Human
acccaguagucaccaaggcagguagugugaua

SEQ ID NO: 35149 - RNA, 32 nt, Human
acccagucacauuggcagagguggggguuggc

SEQ ID NO: 35150 - RNA, 32 nt, Human
acccaguccaagaggccugggcugaggacgug

SEQ ID NO: 35151 - RNA, 32 nt, Human
acccaguccagccuccuggcuguugacuuccc

SEQ ID NO: 35152 - RNA, 32 nt, Human
acccaguccagcugcuauaacugcuuggacac

SEQ ID NO: 35153 - RNA, 22 nt, Human
acccaguccuucccagggaccc

SEQ ID NO: 35154 - RNA, 32 nt, Human
acccagucugggauaggaggaggucggggaag

SEQ ID NO: 35155 - RNA, 21 nt, Human
acccagugaaaguggcuggua

SEQ ID NO: 35156 - RNA, 32 nt, Human
acccagugaacccaaggccugaagagaauuug

SEQ ID NO: 35157 - RNA, 31 nt, Human
acccagugacuucuuuuugcccaggccugga

SEQ ID NO: 35158 - RNA, 32 nt, Human
acccagugagauacauguuuauucaaacacaa

SEQ ID NO: 35159 - RNA, 32 nt, Human
acccagugcagccuggcaccuacccacccacc

SEQ ID NO: 35160 - RNA, 32 nt, Human
acccagugcccucuccccucagccucuccccu

SEQ ID NO: 35161 - RNA, 32 nt, Human
acccagugcugcagguuucuccugggugaaga

SEQ ID NO: 35162 - RNA, 32 nt, Human
acccagugcuggccgccuucuuggugccaaac

SEQ ID NO: 35163 - RNA, 32 nt, Human
acccagugcuuaauagcagggaagaagguacu

SEQ ID NO: 35164 - RNA, 32 nt, Human
acccaguggaacacuuagugacuaucacagcc

SEQ ID NO: 35165 - RNA, 32 nt, Human
acccaguggcaucagcagucacagagcaccaa

SEQ ID NO: 35166 - RNA, 32 nt, Human
acccagugguagcuuuggaagcugcuuucgag

SEQ ID NO: 35167 - RNA, 32 nt, Human
acccagugguagcuuuggaagcugcuuugcag

SEQ ID NO: 35168 - RNA, 32 nt, Human
acccaguggugaagccaaagcacaggaaugcu

SEQ ID NO: 35169 - RNA, 32 nt, Human
acccaguguccaucuuuccacccucccugauc

SEQ ID NO: 35170 - RNA, 25 nt, Human
acccaguguuagcaccaaaguccca

SEQ ID NO: 35171 - RNA, 23 nt, Human
acccaguuaaggccagaccaggc

SEQ ID NO: 35172 - RNA, 32 nt, Human
acccaguugguagaggagucaggaggugggag

SEQ ID NO: 35173 - RNA, 32 nt, Human
acccauaaaccaguucaagaaagggaugaagg

SEQ ID NO: 35174 - RNA, 32 nt, Human
acccauaaggcagagguugcagugagcugaga

SEQ ID NO: 35175 - RNA, 25 nt, Human
acccauaaucaagacaaauuugcca

SEQ ID NO: 35176 - RNA, 32 nt, Human
acccauaauccagcuacuugggaggcugaagc

SEQ ID NO: 35177 - RNA, 32 nt, Human
acccauaaugccacucagcaagccuugguugu

SEQ ID NO: 35178 - RNA, 32 nt, Human
acccauagcuuggugucauuaacauaauuauu

SEQ ID NO: 35179 - RNA, 32 nt, Human
acccauagggcuggcucacauccagucacucc

SEQ ID NO: 35180 - RNA, 32 nt, Human
acccauauuucauccaggaggccgccuucacc

SEQ ID NO: 35181 - RNA, 19 nt, Human
acccaucaauguggcccca

SEQ ID NO: 35182 - RNA, 32 nt, Human
acccaucaccaccaccaccacggugaccccaa

SEQ ID NO: 35183 - RNA, 32 nt, Human
acccaucacuuuaaauccuuaaaguuagaagc

SEQ ID NO: 35184 - RNA, 32 nt, Human
acccaucagaacuuggugcagcacagccccgc

SEQ ID NO: 35185 - RNA, 32 nt, Human
acccaucaggguggaggagcuggugacacuca

SEQ ID NO: 35186 - RNA, 32 nt, Human
acccaucaugccacaccgguacccuccucccg

SEQ ID NO: 35187 - RNA, 32 nt, Human
acccaucccacacaccagcugugugaccuugg

SEQ ID NO: 35188 - RNA, 18 nt, Human
acccaucccaccccucca

SEQ ID NO: 35189 - RNA, 32 nt, Human
acccaucccaggagucagcuuggacuaucaca

SEQ ID NO: 35190 - RNA, 32 nt, Human
acccaucccagggcuccucuggagcuaauccu

SEQ ID NO: 35191 - RNA, 32 nt, Human
acccaucccucugcccuccaccucuaccacuc

SEQ ID NO: 35192 - RNA, 32 nt, Human
acccaucccuggggcuuccuuugcucugccuu

SEQ ID NO: 35193 - RNA, 32 nt, Human
acccauccuaggcccgcuuucuugccgagcca

SEQ ID NO: 35194 - RNA, 32 nt, Human
acccauccuccacucccucuucuuuaacccag

SEQ ID NO: 35195 - RNA, 32 nt, Human
acccauccucggcgguucccaucaccacugca

SEQ ID NO: 35196 - RNA, 32 nt, Human
acccauccucuacuuagucacucuuauagagc

SEQ ID NO: 35197 - RNA, 32 nt, Human
acccauccucuucuccccguacugccucaacc

SEQ ID NO: 35198 - RNA, 32 nt, Human
acccauccugucuaucuucucaguugaguuuu

SEQ ID NO: 35199 - RNA, 32 nt, Human
acccaucggggaaaaagucuaaauuggagauc

SEQ ID NO: 35200 - RNA, 32 nt, Human
acccaucuacuuuaucugucauguccuucuuc

SEQ ID NO: 35201 - RNA, 32 nt, Human
acccaucuauuuuuguuugggaagaggaaacu

SEQ ID NO: 35202 - RNA, 32 nt, Human
acccaucuccaccucccaaagugcuaggauua

SEQ ID NO: 35203 - RNA, 32 nt, Human
acccaucucccaguugcauaguacagugucug

SEQ ID NO: 35204 - RNA, 32 nt, Human
acccaucucccccucacugaaugccucaaugu

SEQ ID NO: 35205 - RNA, 32 nt, Human
acccaucuccccucagaagaggcuuucucucu

SEQ ID NO: 35206 - RNA, 32 nt, Human
acccaucuccccuccgccucuuuggcugcagu

SEQ ID NO: 35207 - RNA, 32 nt, Human
acccaucucccuugucaugcugggcagcccac

SEQ ID NO: 35208 - RNA, 32 nt, Human
acccaucucuacuaaaaauaaaauuagccagg

SEQ ID NO: 35209 - RNA, 32 nt, Human
acccaucucuacuaaaaauaaaauuagccaug

SEQ ID NO: 35210 - RNA, 32 nt, Human
acccaucucucccuuacccaucuugcuuccaa

SEQ ID NO: 35211 - RNA, 32 nt, Human
acccaucugcaaauaucucccucucuccaaca

SEQ ID NO: 35212 - RNA, 32 nt, Human
acccaucugcucaccagaucucaggcaggaaa

SEQ ID NO: 35213 - RNA, 21 nt, Human
acccaucugcuccuccagcca

SEQ ID NO: 35214 - RNA, 32 nt, Human
acccaucuggcagcugcugugccugagguggc

SEQ ID NO: 35215 - RNA, 32 nt, Human
acccaucuguagucccagcuacuugggaggcu

SEQ ID NO: 35216 - RNA, 32 nt, Human
acccaucugucuggccagaccuguucuccaga

SEQ ID NO: 35217 - RNA, 32 nt, Human
acccaucuucacagcucuggugccaguggauu

SEQ ID NO: 35218 - RNA, 32 nt, Human
acccaucuucacuuggugcugccaucaacuuu

SEQ ID NO: 35219 - RNA, 32 nt, Human
acccaucuuuugcagugcaugccuuccuacuu

SEQ ID NO: 35220 - RNA, 29 nt, Human
acccaugaaacaaucauucccauuguuuc

SEQ ID NO: 35221 - RNA, 32 nt, Human
acccaugaaagagacccagugguuacugugca

SEQ ID NO: 35222 - RNA, 32 nt, Human
acccaugaaguaaguagacaagaaaaggagga

SEQ ID NO: 35223 - RNA, 23 nt, Human
acccaugaaugugagcuuaccag

SEQ ID NO: 35224 - RNA, 21 nt, Human
acccaugacaaacucuccaga

SEQ ID NO: 35225 - RNA, 21 nt, Human
acccaugacuuccucucgcca

SEQ ID NO: 35226 - RNA, 32 nt, Human
acccaugagauggguguccuaagagccaaggg

SEQ ID NO: 35227 - RNA, 32 nt, Human
acccaugagcagcuucagcagaguguaggucc

SEQ ID NO: 35228 - RNA, 32 nt, Human
acccaugagcccacagacagagcuguauuaag

SEQ ID NO: 35229 - RNA, 32 nt, Human
acccaugaggcggagguugcagugagccgaga

SEQ ID NO: 35230 - RNA, 32 nt, Human
acccaugagguggagguugcggugagccaaga

SEQ ID NO: 35231 - RNA, 32 nt, Human
acccaugcagaguuuccaggugugcacuggaa

SEQ ID NO: 35232 - RNA, 32 nt, Human
acccaugcaggaaagaaagcccauggaagagg

SEQ ID NO: 35233 - RNA, 32 nt, Human
acccaugccuggcuaauuuuuguacuuuuugu

SEQ ID NO: 35234 - RNA, 32 nt, Human
acccaugcuguaucugcaucccugucauucgu

SEQ ID NO: 35235 - RNA, 32 nt, Human
acccaugcugucuccacuucacaauauuugau

SEQ ID NO: 35236 - RNA, 32 nt, Human
acccauggcaggcagugaaaagagccaggagu

SEQ ID NO: 35237 - RNA, 22 nt, Human
acccauggccucucuccaggcc

SEQ ID NO: 35238 - RNA, 32 nt, Human
acccauggcgacaggaaugggagaaaggugug

SEQ ID NO: 35239 - RNA, 32 nt, Human
acccaugggcaggguggguggagggacugaug

SEQ ID NO: 35240 - RNA, 32 nt, Human
acccaugguaccuuaaaaaccuucuaaaaugc

SEQ ID NO: 35241 - RNA, 32 nt, Human
acccauggugcacaccuguaguccuccaugag

SEQ ID NO: 35242 - RNA, 32 nt, Human
acccaugucaucccagagaggugaucacaggg

SEQ ID NO: 35243 - RNA, 29 nt, Human
acccaugucugggaacugccccugccuac

SEQ ID NO: 35244 - RNA, 32 nt, Human
acccauuacaugcacauguacucacauacucc

SEQ ID NO: 35245 - RNA, 32 nt, Human
acccauuacugagagguacagagcguacagcc

SEQ ID NO: 35246 - RNA, 31 nt, Human
acccauuagaugcaggcucuaccucaaguac

SEQ ID NO: 35247 - RNA, 29 nt, Human
acccauuaucugugugugccugggagucc

SEQ ID NO: 35248 - RNA, 32 nt, Human
acccauucacacagcaggacucuucucacaug

SEQ ID NO: 35249 - RNA, 24 nt, Human
acccauuccaacuacagcaguuca

SEQ ID NO: 35250 - RNA, 18 nt, Human
acccauuccagggacccu

SEQ ID NO: 35251 - RNA, 32 nt, Human
acccauuccuuuacacaugaucuauggcagag

SEQ ID NO: 35252 - RNA, 24 nt, Human
acccauucuaaacaagggcauuca

SEQ ID NO: 35253 - RNA, 32 nt, Human
acccauucuccaccaacaucuuucuaaacugc

SEQ ID NO: 35254 - RNA, 32 nt, Human
acccauucuccucaucccucugcucucuggcc

SEQ ID NO: 35255 - RNA, 32 nt, Human
acccauucuuguacucccuugugaucuauaaa

SEQ ID NO: 35256 - RNA, 32 nt, Human
acccauucuuucuuuaucaucucccuccaaag

SEQ ID NO: 35257 - RNA, 32 nt, Human
acccauugaacauucggcacgugaccuugugg

SEQ ID NO: 35258 - RNA, 32 nt, Human
acccauugacucaccuuauccaaagcaaguuu

SEQ ID NO: 35259 - RNA, 32 nt, Human
acccauugccaagagaggaugcaucuggggag

SEQ ID NO: 35260 - RNA, 23 nt, Human
acccauugucugcugcccaaggg

SEQ ID NO: 35261 - RNA, 24 nt, Human
acccauuuaauuuauaaugguuuu

SEQ ID NO: 35262 - RNA, 32 nt, Human
acccauuuauuuccuuccuuccuuccuucuuu

SEQ ID NO: 35263 - RNA, 32 nt, Human
acccauuucaacaaaauugaacacaggacucu

SEQ ID NO: 35264 - RNA, 23 nt, Human
acccauuucacaaggacagcuca

SEQ ID NO: 35265 - RNA, 32 nt, Human
acccauuuccucacauccuugccaguacuuca

SEQ ID NO: 35266 - RNA, 32 nt, Human
acccauuucuuucuuuccuuccuuccuucuuu

SEQ ID NO: 35267 - RNA, 23 nt, Human
acccauuuuauuuauuggcuuug

SEQ ID NO: 35268 - RNA, 32 nt, Human
acccauuuucacauucccaucugucaccaauu

SEQ ID NO: 35269 - RNA, 32 nt, Human
acccauuuugacaaaguggaacaguggagcug

SEQ ID NO: 35270 - RNA, 32 nt, Human
acccauuuugcacuagaggaaaaccaugaagc

SEQ ID NO: 35271 - RNA, 32 nt, Human
acccauuuuugaagagggugaaguuuggagaa

SEQ ID NO: 35272 - RNA, 21 nt, Human
accccaaaacaggucuggcca

SEQ ID NO: 35273 - RNA, 18 nt, Human
accccaaaagccuguggc

SEQ ID NO: 35274 - RNA, 21 nt, Human
accccaaaauaaccccuugau

SEQ ID NO: 35275 - RNA, 32 nt, Human
accccaaaaugcugggacuuugagauugcacu

SEQ ID NO: 35276 - RNA, 32 nt, Human
accccaaaccuccucagcucaccucucucucu

SEQ ID NO: 35277 - RNA, 31 nt, Human
accccaaagagaccgccaucauggacgaccu

SEQ ID NO: 35278 - RNA, 22 nt, Human
accccaaagaugucucuggcua

SEQ ID NO: 35279 - RNA, 32 nt, Human
accccaaagggcccucgcagcacuguuugaaa

SEQ ID NO: 35280 - RNA, 17 nt, Human
accccaaagggcuacca

SEQ ID NO: 35281 - RNA, 32 nt, Human
accccaaagugcugggauuacaggcgugaagc

SEQ ID NO: 35282 - RNA, 32 nt, Human
accccaaaucacacugcacacagggucccuga

SEQ ID NO: 35283 - RNA, 32 nt, Human
accccaaaugaccacaacacaguacaauugcc

SEQ ID NO: 35284 - RNA, 32 nt, Human
accccaaaugcagcaauggccuggugauuccc

SEQ ID NO: 35285 - RNA, 32 nt, Human
accccaaauggauuuccagucaauucagaagc

SEQ ID NO: 35286 - RNA, 32 nt, Human
accccaaaugucccuuucuggaggaagccacc

SEQ ID NO: 35287 - RNA, 18 nt, Human
accccaacaccacugcca

SEQ ID NO: 35288 - RNA, 32 nt, Human
accccaacacccaccggcacacagaccccaac

SEQ ID NO: 35289 - RNA, 19 nt, Human
accccaacaccucaccucc

SEQ ID NO: 35290 - RNA, 20 nt, Human
accccaacagcacccucucc

SEQ ID NO: 35291 - RNA, 18 nt, Human
accccaacccaacaacca

SEQ ID NO: 35292 - RNA, 21 nt, Human
accccaaccccaauaggggag

SEQ ID NO: 35293 - RNA, 21 nt, Human
accccaacccuucaacuacca

SEQ ID NO: 35294 - RNA, 15 nt, Human
accccaacggaucca

SEQ ID NO: 35295 - RNA, 19 nt, Human
accccaacuacugaaucca

SEQ ID NO: 35296 - RNA, 18 nt, Human
accccaacuacuuuucau

SEQ ID NO: 35297 - RNA, 18 nt, Human
accccaacuccagcccau

SEQ ID NO: 35298 - RNA, 32 nt, Human
accccaacucugucuucucucuuuagagguaa

SEQ ID NO: 35299 - RNA, 18 nt, Human
accccaacugagucccca

SEQ ID NO: 35300 - RNA, 16 nt, Human
accccaacugccucca

SEQ ID NO: 35301 - RNA, 17 nt, Human
accccaacugucuacca

SEQ ID NO: 35302 - RNA, 17 nt, Human
accccaacugucuccau

SEQ ID NO: 35303 - RNA, 21 nt, Human
accccaacuucaaugucuuga

SEQ ID NO: 35304 - RNA, 17 nt, Human
accccaacuugaagcca

SEQ ID NO: 35305 - RNA, 32 nt, Human
accccaagcccaccucccuuguccucagccua

SEQ ID NO: 35306 - RNA, 18 nt, Human
accccaagcccgcccggc

SEQ ID NO: 35307 - RNA, 32 nt, Human
accccaaggaagagaauggcugucuuuggcgg

SEQ ID NO: 35308 - RNA, 22 nt, Human
accccaaggcagccugggguua

SEQ ID NO: 35309 - RNA, 32 nt, Human
accccaagucuggcuccauuccuggccuucug

SEQ ID NO: 35310 - RNA, 19 nt, Human
accccaagugcacgcugug

SEQ ID NO: 35311 - RNA, 32 nt, Human
accccaaucacuuccgaccugcuggccugcca

SEQ ID NO: 35312 - RNA, 32 nt, Human
accccaaucucagaaauucaaauuuaagcaug

SEQ ID NO: 35313 - RNA, 32 nt, Human
accccaauuacugcuggcaucuuaguugagag

SEQ ID NO: 35314 - RNA, 32 nt, Human
accccaauuccuggcccugucuugaagcauuu

SEQ ID NO: 35315 - RNA, 32 nt, Human
accccaauucuggcccacaccuauggcucagg

SEQ ID NO: 35316 - RNA, 21 nt, Human
accccacaacccacauccucc

SEQ ID NO: 35317 - RNA, 31 nt, Human
accccacaagugucuucacuguggaaaaccu

SEQ ID NO: 35318 - RNA, 18 nt, Human
accccacacaccccuucc

SEQ ID NO: 35319 - RNA, 32 nt, Human
accccacacacucugccaugcacacaggagga

SEQ ID NO: 35320 - RNA, 32 nt, Human
accccacaccaggccguccucccgggcccucc

SEQ ID NO: 35321 - RNA, 32 nt, Human
accccacacccacauccucucuuuuccacaca

SEQ ID NO: 35322 - RNA, 32 nt, Human
accccacacuggggcccuccuccugggccuga

SEQ ID NO: 35323 - RNA, 32 nt, Human
accccacagaagugcuuucuucucccaauuca

SEQ ID NO: 35324 - RNA, 32 nt, Human
accccacagagcugucugugggugccuucuca

SEQ ID NO: 35325 - RNA, 24 nt, Human
accccacagccaaucagcuacaga

SEQ ID NO: 35326 - RNA, 32 nt, Human
accccacagcgagggaagagacaggaugcguc

SEQ ID NO: 35327 - RNA, 23 nt, Human
accccacagcgcacacagaacac

SEQ ID NO: 35328 - RNA, 32 nt, Human
accccacaggaagggggaaggaaggagggaau

SEQ ID NO: 35329 - RNA, 32 nt, Human
accccacagucgggcuggcaucuggggacagg

SEQ ID NO: 35330 - RNA, 32 nt, Human
accccacaguucccacggcaucugccacucuu

SEQ ID NO: 35331 - RNA, 32 nt, Human
accccacaugcuguccucacagguggcgccuu

SEQ ID NO: 35332 - RNA, 32 nt, Human
accccacauggauucucaacagguggccggug

SEQ ID NO: 35333 - RNA, 32 nt, Human
accccacauggcauauaccacccaucucuggu

SEQ ID NO: 35334 - RNA, 32 nt, Human
accccacauugcacucccaucucugcaugcuc

SEQ ID NO: 35335 - RNA, 32 nt, Human
accccaccaccacccgcaacacugccgcuguc

SEQ ID NO: 35336 - RNA, 32 nt, Human
accccaccacugcacuccagccuggaugacag

SEQ ID NO: 35337 - RNA, 32 nt, Human
accccaccagaaauggagagcacacagcagaa

SEQ ID NO: 35338 - RNA, 32 nt, Human
accccaccagaacaugcccgggugaccuccuc

SEQ ID NO: 35339 - RNA, 32 nt, Human
accccaccagccccuuucaucccuccuuccuc

SEQ ID NO: 35340 - RNA, 32 nt, Human
accccaccagccuggcccugggaacagcaggc

SEQ ID NO: 35341 - RNA, 23 nt, Human
accccaccauaaccuccuacuca

SEQ ID NO: 35342 - RNA, 23 nt, Human
accccaccauggcccagggaccc

SEQ ID NO: 35343 - RNA, 32 nt, Human
accccaccauugcacuccaguccgggaaacaa

SEQ ID NO: 35344 - RNA, 19 nt, Human
accccacccaaagcugccu

SEQ ID NO: 35345 - RNA, 32 nt, Human
accccacccaacuggccaaguguuaagugaug

SEQ ID NO: 35346 - RNA, 32 nt, Human
accccacccaggagcugaggcugauggagccc

SEQ ID NO: 35347 - RNA, 32 nt, Human
accccaccccacccuucacaccuggcugauuu

SEQ ID NO: 35348 - RNA, 20 nt, Human
accccaccccacgcuccagc

SEQ ID NO: 35349 - RNA, 32 nt, Human
accccaccccgggagggcagagccagaagaag

SEQ ID NO: 35350 - RNA, 19 nt, Human
accccaccccuccacucca

SEQ ID NO: 35351 - RNA, 32 nt, Human
accccacccuccaccucaauccccucccaucu

SEQ ID NO: 35352 - RNA, 32 nt, Human
accccacccuccaggguuagggggagcaggaa

SEQ ID NO: 35353 - RNA, 32 nt, Human
accccacccuccuccacccucuacccucaagu

SEQ ID NO: 35354 - RNA, 17 nt, Human
accccacccugccacca

SEQ ID NO: 35355 - RNA, 32 nt, Human
accccacccuugcccccagcccucucucccug

SEQ ID NO: 35356 - RNA, 32 nt, Human
accccacccuuucuccuccuccuuccucugag

SEQ ID NO: 35357 - RNA, 32 nt, Human
accccaccuaaaggacagguggcccucacaca

SEQ ID NO: 35358 - RNA, 32 nt, Human
accccaccuagaccacccuccaugucagguac

SEQ ID NO: 35359 - RNA, 32 nt, Human
accccaccucccccucucccuccuccccuuug

SEQ ID NO: 35360 - RNA, 32 nt, Human
accccaccucgagcuccuggaugcacugcuau

SEQ ID NO: 35361 - RNA, 32 nt, Human
accccaccucgaggagcuuccugagcaggugg

SEQ ID NO: 35362 - RNA, 16 nt, Human
accccaccugccaccg

SEQ ID NO: 35363 - RNA, 32 nt, Human
accccaccuggaacccgaccucccagccucgc

SEQ ID NO: 35364 - RNA, 32 nt, Human
accccaccugggaaccuuuuucccucaguuag

SEQ ID NO: 35365 - RNA, 32 nt, Human
accccaccugugaacuccuaccagagagaaac

SEQ ID NO: 35366 - RNA, 32 nt, Human
accccaccuugggcccccucuggagcagcccc

SEQ ID NO: 35367 - RNA, 32 nt, Human
accccacgcccaccuccaccccaggagccgaa

SEQ ID NO: 35368 - RNA, 22 nt, Human
accccacggcccggaggacaca

SEQ ID NO: 35369 - RNA, 32 nt, Human
accccacucaccaguucugcugccucagguca

SEQ ID NO: 35370 - RNA, 17 nt, Human
accccacucacuuccau

SEQ ID NO: 35371 - RNA, 32 nt, Human
accccacucagcucaccucucccuccaccucc

SEQ ID NO: 35372 - RNA, 19 nt, Human
accccacucccaagggaag

SEQ ID NO: 35373 - RNA, 18 nt, Human
accccacucccacauggg

SEQ ID NO: 35374 - RNA, 21 nt, Human
accccacucccaccuuugaag

SEQ ID NO: 35375 - RNA, 32 nt, Human
accccacucccucugcugcagcacccccauac

SEQ ID NO: 35376 - RNA, 32 nt, Human
accccacucuccaggacccauggaguccuuca

SEQ ID NO: 35377 - RNA, 32 nt, Human
accccacugaagauggaaguagagcagucugc

SEQ ID NO: 35378 - RNA, 21 nt, Human
accccacugacgucuuucaga

SEQ ID NO: 35379 - RNA, 32 nt, Human
accccacugcauuccagccugggugacagagc

SEQ ID NO: 35380 - RNA, 20 nt, Human
accccacuggccacugccau

SEQ ID NO: 35381 - RNA, 32 nt, Human
accccacuggccacugccauccugcugccuuc

SEQ ID NO: 35382 - RNA, 20 nt, Human
accccacuguagacaggaaa

SEQ ID NO: 35383 - RNA, 32 nt, Human
accccacuguagacaggaaagccaggccagga

SEQ ID NO: 35384 - RNA, 32 nt, Human
accccacuguccuccagccugggcaacagaga

SEQ ID NO: 35385 - RNA, 21 nt, Human
accccacuuccagugaagaag

SEQ ID NO: 35386 - RNA, 21 nt, Human
accccacuuccuucucggaag

SEQ ID NO: 35387 - RNA, 32 nt, Human
accccagaagcagcaguggcagcuugggaaau

SEQ ID NO: 35388 - RNA, 32 nt, Human
accccagaagccccaauuuccccaagccccau

SEQ ID NO: 35389 - RNA, 19 nt, Human
accccagaaggccugggca

SEQ ID NO: 35390 - RNA, 22 nt, Human
accccagaauuccauguugaaa

SEQ ID NO: 35391 - RNA, 32 nt, Human
accccagacagcccuucuggcacagggacagg

SEQ ID NO: 35392 - RNA, 21 nt, Human
accccagaccccagacacagg

SEQ ID NO: 35393 - RNA, 32 nt, Human
accccagacccuggcuggccaggaugaaguau

SEQ ID NO: 35394 - RNA, 23 nt, Human
accccagacuuaaugaauuucag

SEQ ID NO: 35395 - RNA, 24 nt, Human
accccagagacucauucucugcca

SEQ ID NO: 35396 - RNA, 32 nt, Human
accccagagccagcccucccacuaccaccacc

SEQ ID NO: 35397 - RNA, 18 nt, Human
accccagagcccuguggc

SEQ ID NO: 35398 - RNA, 23 nt, Human
accccagagccugacccugcaga

SEQ ID NO: 35399 - RNA, 22 nt, Human
accccagagcgggagcuguggc

SEQ ID NO: 35400 - RNA, 21 nt, Human
accccagagcuaggccgcgga

SEQ ID NO: 35401 - RNA, 32 nt, Human
accccagaggcagaggcugaagugagccaaga

SEQ ID NO: 35402 - RNA, 32 nt, Human
accccagaggcagagguugcagugagcugaga

SEQ ID NO: 35403 - RNA, 32 nt, Human
accccagaggcagagguugcggugagccgaga

SEQ ID NO: 35404 - RNA, 32 nt, Human
accccagaggcggagguugcagugagccgaga

SEQ ID NO: 35405 - RNA, 32 nt, Human
accccagaggucaagacugcagugagcugaga

SEQ ID NO: 35406 - RNA, 32 nt, Human
accccagagguggagguugcagugagccgaga

SEQ ID NO: 35407 - RNA, 24 nt, Human
accccagaguccccagaugagcug

SEQ ID NO: 35408 - RNA, 32 nt, Human
accccagagugaggaggacgcaggggucagag

SEQ ID NO: 35409 - RNA, 32 nt, Human
accccagaugcaugggccagagggccggcccc

SEQ ID NO: 35410 - RNA, 32 nt, Human
accccagcaaccccugugucuccuacuccugc

SEQ ID NO: 35411 - RNA, 17 nt, Human
accccagcaacuguggc

SEQ ID NO: 35412 - RNA, 19 nt, Human
accccagcaagugguccua

SEQ ID NO: 35413 - RNA, 18 nt, Human
accccagcagcgcugcgg

SEQ ID NO: 35414 - RNA, 21 nt, Human
accccagcaggaccugccagc

SEQ ID NO: 35415 - RNA, 20 nt, Human
accccagcagugacuaccau

SEQ ID NO: 35416 - RNA, 32 nt, Human
accccagcaguggugcaggacagcugccagca

SEQ ID NO: 35417 - RNA, 21 nt, Human
accccagcaucagccuguagc

SEQ ID NO: 35418 - RNA, 17 nt, Human
accccagcaugcuugug

SEQ ID NO: 35419 - RNA, 16 nt, Human
accccagccacaccau

SEQ ID NO: 35420 - RNA, 21 nt, Human
accccagccacaggcuguggc

SEQ ID NO: 35421 - RNA, 19 nt, Human
accccagccaccccagcca

SEQ ID NO: 35422 - RNA, 22 nt, Human
accccagccaccgcccugcggc

SEQ ID NO: 35423 - RNA, 32 nt, Human
accccagccacuccagaaacccaaugggaggg

SEQ ID NO: 35424 - RNA, 17 nt, Human
accccagccagcauggc

SEQ ID NO: 35425 - RNA, 32 nt, Human
accccagccagccugucaccaugcugacagca

SEQ ID NO: 35426 - RNA, 16 nt, Human
accccagccagcugug

SEQ ID NO: 35427 - RNA, 21 nt, Human
accccagcccaacuccagggc

SEQ ID NO: 35428 - RNA, 32 nt, Human
accccagcccaccucacuaucauacucagcuu

SEQ ID NO: 35429 - RNA, 21 nt, Human
accccagcccaggcaccaggc

SEQ ID NO: 35430 - RNA, 20 nt, Human
accccagcccaggccggggc

SEQ ID NO: 35431 - RNA, 18 nt, Human
accccagcccagggcggc

SEQ ID NO: 35432 - RNA, 20 nt, Human
accccagccccacuccgggc

SEQ ID NO: 35433 - RNA, 22 nt, Human
accccagcccccaccuuucaga

SEQ ID NO: 35434 - RNA, 21 nt, Human
accccagcccccauccugggc

SEQ ID NO: 35435 - RNA, 23 nt, Human
accccagccccccaaacuuuggc

SEQ ID NO: 35436 - RNA, 19 nt, Human
accccagcccccgucugug

SEQ ID NO: 35437 - RNA, 21 nt, Human
accccagccccgcacagaggc

SEQ ID NO: 35438 - RNA, 19 nt, Human
accccagccccgcccaggc

SEQ ID NO: 35439 - RNA, 20 nt, Human
accccagccccugcccaggc

SEQ ID NO: 35440 - RNA, 20 nt, Human
accccagccccugucagggc

SEQ ID NO: 35441 - RNA, 21 nt, Human
accccagccccugugccaggc

SEQ ID NO: 35442 - RNA, 19 nt, Human
accccagcccgacccuccc

SEQ ID NO: 35443 - RNA, 20 nt, Human
accccagcccgccguccagc

SEQ ID NO: 35444 - RNA, 22 nt, Human
accccagcccggcuggcccggc

SEQ ID NO: 35445 - RNA, 20 nt, Human
accccagcccguaccugggc

SEQ ID NO: 35446 - RNA, 19 nt, Human
accccagcccgugcagcug

SEQ ID NO: 35447 - RNA, 19 nt, Human
accccagcccuaggcuggg

SEQ ID NO: 35448 - RNA, 20 nt, Human
accccagcccugcacggggc

SEQ ID NO: 35449 - RNA, 32 nt, Human
accccagcccugcccuugcuuccuucaauaaa

SEQ ID NO: 35450 - RNA, 21 nt, Human
accccagcccugcgcaugggc

SEQ ID NO: 35451 - RNA, 18 nt, Human
accccagcccuggaggug

SEQ ID NO: 35452 - RNA, 25 nt, Human
accccagcccuggcaucugcccaga

SEQ ID NO: 35453 - RNA, 18 nt, Human
accccagcccuggggugg

SEQ ID NO: 35454 - RNA, 18 nt, Human
accccagcccugucuggc

SEQ ID NO: 35455 - RNA, 21 nt, Human
accccagcccuugggccuggc

SEQ ID NO: 35456 - RNA, 18 nt, Human
accccagccgcauccccu

SEQ ID NO: 35457 - RNA, 32 nt, Human
accccagccggaggaagugagcucuccugggg

SEQ ID NO: 35458 - RNA, 19 nt, Human
accccagccggaucugggc

SEQ ID NO: 35459 - RNA, 24 nt, Human
accccagccggcugcguuccucuc

SEQ ID NO: 35460 - RNA, 21 nt, Human
accccagccggcugcuggagc

SEQ ID NO: 35461 - RNA, 20 nt, Human
accccagccggcuuccuggc

SEQ ID NO: 35462 - RNA, 19 nt, Human
accccagccgggcugccgc

SEQ ID NO: 35463 - RNA, 19 nt, Human
accccagccggggcucugg

SEQ ID NO: 35464 - RNA, 19 nt, Human
accccagccuaggcugcgc

SEQ ID NO: 35465 - RNA, 23 nt, Human
accccagccucagacagacacag

SEQ ID NO: 35466 - RNA, 32 nt, Human
accccagccucaucuucuaggccuuuuccauc

SEQ ID NO: 35467 - RNA, 32 nt, Human
accccagccucauuuucuuucuguuccuuccc

SEQ ID NO: 35468 - RNA, 23 nt, Human
accccagccuccccacccaccuc

SEQ ID NO: 35469 - RNA, 19 nt, Human
accccagccucccugaggc

SEQ ID NO: 35470 - RNA, 21 nt, Human
accccagccucugccaacggc

SEQ ID NO: 35471 - RNA, 22 nt, Human
accccagccucuuccaggagag

SEQ ID NO: 35472 - RNA, 20 nt, Human
accccagccuggccacgcag

SEQ ID NO: 35473 - RNA, 21 nt, Human
accccagccuggccgccuggc

SEQ ID NO: 35474 - RNA, 32 nt, Human
accccagccugggaagaacauuuuccugaaca

SEQ ID NO: 35475 - RNA, 22 nt, Human
accccagccugggcaacagagc

SEQ ID NO: 35476 - RNA, 21 nt, Human
accccagccugggcgacagag

SEQ ID NO: 35477 - RNA, 23 nt, Human
accccagccugggggccacaagg

SEQ ID NO: 35478 - RNA, 26 nt, Human
accccagccugggugacagagcgaga

SEQ ID NO: 35479 - RNA, 19 nt, Human
accccagccuggugccggc

SEQ ID NO: 35480 - RNA, 32 nt, Human
accccagccugguggcagaggaagcagguggc

SEQ ID NO: 35481 - RNA, 17 nt, Human
accccagccuggugugg

SEQ ID NO: 35482 - RNA, 20 nt, Human
accccagccuugagcuuagc

SEQ ID NO: 35483 - RNA, 19 nt, Human
accccagcgcgacugcagc

SEQ ID NO: 35484 - RNA, 32 nt, Human
accccagcggagaguguuccuuuuggucccuc

SEQ ID NO: 35485 - RNA, 19 nt, Human
accccagcuaaggcauggc

SEQ ID NO: 35486 - RNA, 31 nt, Human
accccagcuacucaggagguugaggcaggag

SEQ ID NO: 35487 - RNA, 32 nt, Human
accccagcuauugcauuuccagcugcugccag

SEQ ID NO: 35488 - RNA, 20 nt, Human
accccagcucaagccauggc

SEQ ID NO: 35489 - RNA, 19 nt, Human
accccagcucaccccuggc

SEQ ID NO: 35490 - RNA, 32 nt, Human
accccagcucacuagccuucauauaugccuua

SEQ ID NO: 35491 - RNA, 32 nt, Human
accccagcucagcuccaauuucccaggcuuuc

SEQ ID NO: 35492 - RNA, 17 nt, Human
accccagcuccacugug

SEQ ID NO: 35493 - RNA, 16 nt, Human
accccagcucccugug

SEQ ID NO: 35494 - RNA, 19 nt, Human
accccagcuccgacugcgg

SEQ ID NO: 35495 - RNA, 19 nt, Human
accccagcuccgcugcugc

SEQ ID NO: 35496 - RNA, 32 nt, Human
accccagcucugccucacaggcaggcaggccc

SEQ ID NO: 35497 - RNA, 19 nt, Human
accccagcucuggcuaugc

SEQ ID NO: 35498 - RNA, 32 nt, Human
accccagcucuggggcuugggggugaggguca

SEQ ID NO: 35499 - RNA, 16 nt, Human
accccagcugcugcca

SEQ ID NO: 35500 - RNA, 19 nt, Human
accccagcuggcccguggc

SEQ ID NO: 35501 - RNA, 21 nt, Human
accccagcugugagccuuggc

SEQ ID NO: 35502 - RNA, 32 nt, Human
accccagcuguuacccagcccggggcaggugc

SEQ ID NO: 35503 - RNA, 32 nt, Human
accccagcuucucucuccuggccagugauuac

SEQ ID NO: 35504 - RNA, 21 nt, Human
accccagcuugggagcugugg

SEQ ID NO: 35505 - RNA, 19 nt, Human
accccagcuuguccuuggc

SEQ ID NO: 35506 - RNA, 21 nt, Human
accccagcuuuucacuggggc

SEQ ID NO: 35507 - RNA, 23 nt, Human
accccaggaauggcuucaacaga

SEQ ID NO: 35508 - RNA, 23 nt, Human
accccaggacacccacccaccca

SEQ ID NO: 35509 - RNA, 32 nt, Human
accccaggagaaaguguccaggugggggcugg

SEQ ID NO: 35510 - RNA, 32 nt, Human
accccaggaggcagagguugaagugagccagg

SEQ ID NO: 35511 - RNA, 32 nt, Human
accccaggaggcgaagauugcagugagcugau

SEQ ID NO: 35512 - RNA, 32 nt, Human
accccaggaggcucuuaucuccccagccccgc

SEQ ID NO: 35513 - RNA, 32 nt, Human
accccaggagguggacauugcagugagccgag

SEQ ID NO: 35514 - RNA, 25 nt, Human
accccaggagucuaaaauccagguc

SEQ ID NO: 35515 - RNA, 32 nt, Human
accccaggcaacauuuauuuauuggaaauuga

SEQ ID NO: 35516 - RNA, 32 nt, Human
accccaggcacagacccugcugugcucuuugg

SEQ ID NO: 35517 - RNA, 22 nt, Human
accccaggcaugcaccaccuca

SEQ ID NO: 35518 - RNA, 22 nt, Human
accccaggccgagaucuugccc

SEQ ID NO: 35519 - RNA, 32 nt, Human
accccaggccugaaaaggaugcaaagccugcu

SEQ ID NO: 35520 - RNA, 30 nt, Human
accccaggccugcaaucauaagcgacugaa

SEQ ID NO: 35521 - RNA, 21 nt, Human
accccaggcuacauauggaag

SEQ ID NO: 35522 - RNA, 21 nt, Human
accccaggcucaggcugcaga

SEQ ID NO: 35523 - RNA, 32 nt, Human
accccagggaaaucacucuuuacaauuuguaa

SEQ ID NO: 35524 - RNA, 32 nt, Human
accccagggaggcacagggggagcaugaagag

SEQ ID NO: 35525 - RNA, 32 nt, Human
accccagggaugaccuagagucuaacccugac

SEQ ID NO: 35526 - RNA, 18 nt, Human
accccagggccaacuccc

SEQ ID NO: 35527 - RNA, 32 nt, Human
accccaggggaggaggagaugggcaggauuua

SEQ ID NO: 35528 - RNA, 32 nt, Human
accccaggggcagacuccagaucaucagacac

SEQ ID NO: 35529 - RNA, 18 nt, Human
accccagggggccuuggc

SEQ ID NO: 35530 - RNA, 22 nt, Human
accccaggggucugguacagcc

SEQ ID NO: 35531 - RNA, 22 nt, Human
accccagggucaagccugcucu

SEQ ID NO: 35532 - RNA, 24 nt, Human
accccaggugauccaccugccuca

SEQ ID NO: 35533 - RNA, 19 nt, Human
accccaggugcagccuggc

SEQ ID NO: 35534 - RNA, 32 nt, Human
accccaggugcggcuggaucugucuuugacuu

SEQ ID NO: 35535 - RNA, 26 nt, Human
accccaggugguggagguugcaguga

SEQ ID NO: 35536 - RNA, 32 nt, Human
accccaggugguggagguugcagugagccaag

SEQ ID NO: 35537 - RNA, 32 nt, Human
accccagguguccagagcacugccccaugccc

SEQ ID NO: 35538 - RNA, 32 nt, Human
accccagguucucaccucagggguuaagagcu

SEQ ID NO: 35539 - RNA, 19 nt, Human
accccaguaagauuguggc

SEQ ID NO: 35540 - RNA, 18 nt, Human
accccaguagcgcugggc

SEQ ID NO: 35541 - RNA, 32 nt, Human
accccagucacuccucucuagggcagaagacu

SEQ ID NO: 35542 - RNA, 17 nt, Human
accccagucuaacacca

SEQ ID NO: 35543 - RNA, 17 nt, Human
accccagucuagcacca

SEQ ID NO: 35544 - RNA, 17 nt, Human
accccagucugccucca

SEQ ID NO: 35545 - RNA, 21 nt, Human
accccagugauaaucuauggc

SEQ ID NO: 35546 - RNA, 18 nt, Human
accccagugccacugugg

SEQ ID NO: 35547 - RNA, 19 nt, Human
accccagugcccgcugggc

SEQ ID NO: 35548 - RNA, 32 nt, Human
accccagugcccgcugggcccagccuggggac

SEQ ID NO: 35549 - RNA, 17 nt, Human
accccagugcugcugug

SEQ ID NO: 35550 - RNA, 32 nt, Human
accccaguuagucagcaagaagacugaguugc

SEQ ID NO: 35551 - RNA, 32 nt, Human
accccaguucccaaacacaggaagugauuuuc

SEQ ID NO: 35552 - RNA, 19 nt, Human
accccaguugggcuuuggc

SEQ ID NO: 35553 - RNA, 32 nt, Human
accccauaaauauacaaaauuauuugucaauu

SEQ ID NO: 35554 - RNA, 32 nt, Human
accccauaagauuuaccagccaucagcucuau

SEQ ID NO: 35555 - RNA, 32 nt, Human
accccauauguagcaaaaaucagggcuggggg

SEQ ID NO: 35556 - RNA, 32 nt, Human
accccaucacugggguguguuuauuugauggu

SEQ ID NO: 35557 - RNA, 32 nt, Human
accccauccagccacaccaccucugccuucca

SEQ ID NO: 35558 - RNA, 22 nt, Human
accccauccuugcuucaucuca

SEQ ID NO: 35559 - RNA, 32 nt, Human
accccaucgagaugaaauuaaacagauuagaa

SEQ ID NO: 35560 - RNA, 32 nt, Human
accccaucucuaagaaaaagaaaaagaaauaa

SEQ ID NO: 35561 - RNA, 32 nt, Human
accccaucucuacaaaaauacaaaaauuagcc

SEQ ID NO: 35562 - RNA, 32 nt, Human
accccaucucuacaaaaauacaaaauuagcca

SEQ ID NO: 35563 - RNA, 21 nt, Human
accccaucucuaugcuguggc

SEQ ID NO: 35564 - RNA, 21 nt, Human
accccaucucucagggacccu

SEQ ID NO: 35565 - RNA, 32 nt, Human
accccaucugacuaccccagacucugccugcc

SEQ ID NO: 35566 - RNA, 32 nt, Human
accccaucuguuugccugaggcugcagcaaaa

SEQ ID NO: 35567 - RNA, 32 nt, Human
accccaucuuccacaucuuuaaagcucaugug

SEQ ID NO: 35568 - RNA, 32 nt, Human
accccaucuuugcugggauucccaucaacucu

SEQ ID NO: 35569 - RNA, 26 nt, Human
accccaugaggacaugcagagcaccu

SEQ ID NO: 35570 - RNA, 22 nt, Human
accccaugauccacccgccuca

SEQ ID NO: 35571 - RNA, 32 nt, Human
accccaugcucaagccuccccgcuagcagccc

SEQ ID NO: 35572 - RNA, 32 nt, Human
accccauuaagaagguuggcuuggccaggcag

SEQ ID NO: 35573 - RNA, 32 nt, Human
accccauucccuauccucucccuaaucccaaa

SEQ ID NO: 35574 - RNA, 32 nt, Human
accccauucucucuguucguccuuccuugacc

SEQ ID NO: 35575 - RNA, 32 nt, Human
accccauucugggacugcucaggcuccccaag

SEQ ID NO: 35576 - RNA, 32 nt, Human
accccauucuuuccuucucugaaaguggugcu

SEQ ID NO: 35577 - RNA, 32 nt, Human
accccauugcacuccagccuggacaacaagag

SEQ ID NO: 35578 - RNA, 32 nt, Human
accccauuucacuccagccugggcgacaagag

SEQ ID NO: 35579 - RNA, 20 nt, Human
accccauuuucaugguccua

SEQ ID NO: 35580 - RNA, 23 nt, Human
acccccaaaagggaagcagagga

SEQ ID NO: 35581 - RNA, 22 nt, Human
acccccaaagagagacgugggg

SEQ ID NO: 35582 - RNA, 23 nt, Human
acccccaaaggaaaagccagagg

SEQ ID NO: 35583 - RNA, 32 nt, Human
acccccaaagugcuggauuacaggugugagcc

SEQ ID NO: 35584 - RNA, 22 nt, Human
acccccaaaucacucucagggu

SEQ ID NO: 35585 - RNA, 32 nt, Human
acccccaaccaccaucuaccacuacggccacc

SEQ ID NO: 35586 - RNA, 32 nt, Human
acccccaacccccauccccaguucgagccgcc

SEQ ID NO: 35587 - RNA, 17 nt, Human
acccccaacccccuucc

SEQ ID NO: 35588 - RNA, 21 nt, Human
acccccaaccccugcccacag

SEQ ID NO: 35589 - RNA, 32 nt, Human
acccccaacccgucacagcguggccgugggug

SEQ ID NO: 35590 - RNA, 21 nt, Human
acccccaaccucccagaggga

SEQ ID NO: 35591 - RNA, 20 nt, Human
acccccaacgcguccucuca

SEQ ID NO: 35592 - RNA, 18 nt, Human
acccccaacucccuucca

SEQ ID NO: 35593 - RNA, 32 nt, Human
acccccaagaaugcaggcucugccuggcacgc

SEQ ID NO: 35594 - RNA, 32 nt, Human
acccccaagcuuccaccugucccucuccuaug

SEQ ID NO: 35595 - RNA, 32 nt, Human
acccccaaggcggagcuugcagugagccgaga

SEQ ID NO: 35596 - RNA, 32 nt, Human
acccccaauauuuuuggacuggcagacucaag

SEQ ID NO: 35597 - RNA, 32 nt, Human
acccccacaauccucuccugaaacuuaaaaac

SEQ ID NO: 35598 - RNA, 32 nt, Human
acccccacacacaaccuccccuguuuucacau

SEQ ID NO: 35599 - RNA, 32 nt, Human
acccccacagaccugcucuggacacuugcuca

SEQ ID NO: 35600 - RNA, 20 nt, Human
acccccacagcccgaagcag

SEQ ID NO: 35601 - RNA, 32 nt, Human
acccccacagccggagcccccgccgcuccaca

SEQ ID NO: 35602 - RNA, 32 nt, Human
acccccacaucccggguucaagugauucuccu

SEQ ID NO: 35603 - RNA, 32 nt, Human
acccccaccaacaccguccagagaggccugag

SEQ ID NO: 35604 - RNA, 19 nt, Human
acccccaccaccccuuuca

SEQ ID NO: 35605 - RNA, 32 nt, Human
acccccaccacugcagacucgcucuaggaaga

SEQ ID NO: 35606 - RNA, 32 nt, Human
acccccaccagcggcccugcuugcuccguagc

SEQ ID NO: 35607 - RNA, 32 nt, Human
acccccaccagcuguagcugaacgucuggaug

SEQ ID NO: 35608 - RNA, 32 nt, Human
acccccaccaugaaccugucagccucuuuccc

SEQ ID NO: 35609 - RNA, 32 nt, Human
acccccacccagcacacacacagaugucaggg

SEQ ID NO: 35610 - RNA, 22 nt, Human
acccccaccccaaauuaaaaug

SEQ ID NO: 35611 - RNA, 32 nt, Human
acccccaccccacggacguguugcagugauau

SEQ ID NO: 35612 - RNA, 32 nt, Human
acccccaccccuccacuggccagccugggggu

SEQ ID NO: 35613 - RNA, 23 nt, Human
acccccaccccucugccaaagua

SEQ ID NO: 35614 - RNA, 32 nt, Human
acccccacccugccucuauccuaaggaagacc

SEQ ID NO: 35615 - RNA, 32 nt, Human
acccccaccucccagguucaagcgauucuccu

SEQ ID NO: 35616 - RNA, 32 nt, Human
acccccaccucccggguucaagcgauucaccu

SEQ ID NO: 35617 - RNA, 32 nt, Human
acccccaccucccugcagcuuugaggcuggcg

SEQ ID NO: 35618 - RNA, 24 nt, Human
acccccaccuccugcaauaaaaua

SEQ ID NO: 35619 - RNA, 22 nt, Human
acccccaccuccugcaauuaaa

SEQ ID NO: 35620 - RNA, 32 nt, Human
acccccaccugucagaagucccucgcagcucc

SEQ ID NO: 35621 - RNA, 32 nt, Human
acccccacgugguguaagcagaggaggaauug

SEQ ID NO: 35622 - RNA, 32 nt, Human
acccccacucacugcauccugggaaccuucgc

SEQ ID NO: 35623 - RNA, 32 nt, Human
acccccacucccaccaucugcagguggugaaa

SEQ ID NO: 35624 - RNA, 32 nt, Human
acccccacucccgccucagggccaggcccagg

SEQ ID NO: 35625 - RNA, 32 nt, Human
acccccacucuugccuggauucugagugucac

SEQ ID NO: 35626 - RNA, 21 nt, Human
acccccacugcaggcuguggc

SEQ ID NO: 35627 - RNA, 19 nt, Human
acccccacuggcccuucca

SEQ ID NO: 35628 - RNA, 32 nt, Human
acccccacuguuguggucagccccagagaauu

SEQ ID NO: 35629 - RNA, 32 nt, Human
acccccagacacauccacacagaugaccucac

SEQ ID NO: 35630 - RNA, 32 nt, Human
acccccagaggcgcagagguggccgcugugcu

SEQ ID NO: 35631 - RNA, 32 nt, Human
acccccagagguggcccuuguuuacagugagg

SEQ ID NO: 35632 - RNA, 32 nt, Human
acccccagaguguggaaagaaagaccaucucc

SEQ ID NO: 35633 - RNA, 32 nt, Human
acccccagcacccagagccuaggcagccggaa

SEQ ID NO: 35634 - RNA, 32 nt, Human
acccccagcauggcuuggaagacugaaaggca

SEQ ID NO: 35635 - RNA, 32 nt, Human
acccccagccaaggccugcugaccgcgccgag

SEQ ID NO: 35636 - RNA, 32 nt, Human
acccccagcccccacccagccugcuggcagag

SEQ ID NO: 35637 - RNA, 32 nt, Human
acccccagcugccuccugagggugugggguua

SEQ ID NO: 35638 - RNA, 21 nt, Human
acccccagcuugacuucuuuc

SEQ ID NO: 35639 - RNA, 32 nt, Human
acccccagcuuuucuuggugugacacaaaggu

SEQ ID NO: 35640 - RNA, 32 nt, Human
acccccaggccagagugcaguggugcaaucuc

SEQ ID NO: 35641 - RNA, 32 nt, Human
acccccaggccagagugcaguggugcgaucuc

SEQ ID NO: 35642 - RNA, 32 nt, Human
acccccaggcccaaugucugaccugugcccac

SEQ ID NO: 35643 - RNA, 32 nt, Human
acccccaggugggaggggcaggaagcagccgg

SEQ ID NO: 35644 - RNA, 32 nt, Human
acccccaggugucugaguccaggcacuaagaa

SEQ ID NO: 35645 - RNA, 32 nt, Human
acccccaguguggcugucugcgagauugggcc

SEQ ID NO: 35646 - RNA, 32 nt, Human
acccccaguucugggcugggauccuggcucca

SEQ ID NO: 35647 - RNA, 32 nt, Human
acccccaguugacaucaagccucggcagccaa

SEQ ID NO: 35648 - RNA, 32 nt, Human
acccccaucccacccaaccacaggccccacuu

SEQ ID NO: 35649 - RNA, 32 nt, Human
acccccauccugucugucuccacucucauccc

SEQ ID NO: 35650 - RNA, 22 nt, Human
acccccaucgcuacaaaaaaua

SEQ ID NO: 35651 - RNA, 32 nt, Human
acccccaucucccagguucaagcgauucuccu

SEQ ID NO: 35652 - RNA, 22 nt, Human
acccccaucucuacaaaaaaua

SEQ ID NO: 35653 - RNA, 32 nt, Human
acccccaucuuccuccucccgacaucgcaaac

SEQ ID NO: 35654 - RNA, 32 nt, Human
acccccaucuugcccuuccuguuccuuggcaa

SEQ ID NO: 35655 - RNA, 21 nt, Human
acccccaugcugacccccuuc

SEQ ID NO: 35656 - RNA, 32 nt, Human
acccccaugggacaggugaggggcucggacgg

SEQ ID NO: 35657 - RNA, 32 nt, Human
acccccaugugcacccuucucccuccagccug

SEQ ID NO: 35658 - RNA, 22 nt, Human
acccccauuaaauucacuuuca

SEQ ID NO: 35659 - RNA, 32 nt, Human
acccccauuauauuaauuuucagggauaguaa

SEQ ID NO: 35660 - RNA, 22 nt, Human
accccccaccaacccccuucua

SEQ ID NO: 35661 - RNA, 22 nt, Human
accccccaccucccacccccca

SEQ ID NO: 35662 - RNA, 18 nt, Human
accccccagcaccuucca

SEQ ID NO: 35663 - RNA, 23 nt, Human
accccccgccgccccccuggaaa

SEQ ID NO: 35664 - RNA, 21 nt, Human
accccccggcuucagggaccc

SEQ ID NO: 35665 - RNA, 18 nt, Human
accccccucaccccagcc

SEQ ID NO: 35666 - RNA, 20 nt, Human
accccccuccuaccccuccc

SEQ ID NO: 35667 - RNA, 18 nt, Human
accccccugccccgcucc

SEQ ID NO: 35668 - RNA, 22 nt, Human
accccccugcugcugcccaagc

SEQ ID NO: 35669 - RNA, 22 nt, Human
accccccuuggccuccccucca

SEQ ID NO: 35670 - RNA, 32 nt, Human
acccccgaggggcaagguggaggagcucuccu

SEQ ID NO: 35671 - RNA, 32 nt, Human
acccccgcaccaccugcugugugccagccuga

SEQ ID NO: 35672 - RNA, 32 nt, Human
acccccgcagaggcagaaugaacccauaggga

SEQ ID NO: 35673 - RNA, 32 nt, Human
acccccgccagacagacucccaaccagacuga

SEQ ID NO: 35674 - RNA, 32 nt, Human
acccccgccagaccuggugaagaggaucauaa

SEQ ID NO: 35675 - RNA, 20 nt, Human
acccccgcccuacacucagc

SEQ ID NO: 35676 - RNA, 32 nt, Human
acccccgcccuccaaggggcccccaugggaca

SEQ ID NO: 35677 - RNA, 32 nt, Human
acccccgccuccaggguucaagugauucuccu

SEQ ID NO: 35678 - RNA, 32 nt, Human
acccccgccucccggguucaggagacucgcuu

SEQ ID NO: 35679 - RNA, 32 nt, Human
acccccgccuccuggguucaagcgauucuccu

SEQ ID NO: 35680 - RNA, 32 nt, Human
acccccgccuggcugcgucuuccucugcuaua

SEQ ID NO: 35681 - RNA, 32 nt, Human
acccccgcgccccagcccuggcagcccgggac

SEQ ID NO: 35682 - RNA, 32 nt, Human
acccccgcgccgcgcccugcccgccgcucgga

SEQ ID NO: 35683 - RNA, 32 nt, Human
acccccgcuccccaacccuucuugccugggua

SEQ ID NO: 35684 - RNA, 32 nt, Human
acccccgcuucccggguucaagcaauucuccu

SEQ ID NO: 35685 - RNA, 19 nt, Human
acccccggcaaacguccca

SEQ ID NO: 35686 - RNA, 32 nt, Human
acccccggcccaggccaccgcagaccaccucc

SEQ ID NO: 35687 - RNA, 16 nt, Human
acccccggcgccccca

SEQ ID NO: 35688 - RNA, 32 nt, Human
acccccggcggccacagaaacggguacccagu

SEQ ID NO: 35689 - RNA, 16 nt, Human
acccccggcucgccca

SEQ ID NO: 35690 - RNA, 20 nt, Human
acccccgggacuuuacccca

SEQ ID NO: 35691 - RNA, 32 nt, Human
acccccgguccaagccuccccuccaccacugc

SEQ ID NO: 35692 - RNA, 22 nt, Human
acccccgucagcaggcccuccc

SEQ ID NO: 35693 - RNA, 22 nt, Human
acccccguccgccauccugccc

SEQ ID NO: 35694 - RNA, 32 nt, Human
acccccuaaaaauacaaaaauuagccgggcgu

SEQ ID NO: 35695 - RNA, 32 nt, Human
acccccuaaaaccccuucaucacuuucauucu

SEQ ID NO: 35696 - RNA, 32 nt, Human
acccccuaaagauggcgcacccggcagccccc

SEQ ID NO: 35697 - RNA, 32 nt, Human
acccccuaaagguaucugugguauuggcagga

SEQ ID NO: 35698 - RNA, 32 nt, Human
acccccuagagugcucuguguaugcggaugau

SEQ ID NO: 35699 - RNA, 32 nt, Human
acccccuagugauggaaugacagggucuggug

SEQ ID NO: 35700 - RNA, 18 nt, Human
acccccucaaccccuucc

SEQ ID NO: 35701 - RNA, 32 nt, Human
acccccucacacacacuggaaagugagggugg

SEQ ID NO: 35702 - RNA, 32 nt, Human
acccccucacacacuaugcucucucaagaaug

SEQ ID NO: 35703 - RNA, 32 nt, Human
acccccucacacugaguucacagugcgcccuc

SEQ ID NO: 35704 - RNA, 32 nt, Human
acccccucagcaccaucugccucuaacucuga

SEQ ID NO: 35705 - RNA, 32 nt, Human
acccccucagcuuagaucaccaaacagacaag

SEQ ID NO: 35706 - RNA, 32 nt, Human
acccccuccagccccacaccugggccuccccc

SEQ ID NO: 35707 - RNA, 32 nt, Human
acccccuccaggaccggguuucucagccuugg

SEQ ID NO: 35708 - RNA, 19 nt, Human
acccccucccacacucagg

SEQ ID NO: 35709 - RNA, 32 nt, Human
acccccucccagucuucaggcuugccacgcuc

SEQ ID NO: 35710 - RNA, 32 nt, Human
acccccuccccaacaugccccaccccaccccu

SEQ ID NO: 35711 - RNA, 18 nt, Human
acccccucccucaaggaa

SEQ ID NO: 35712 - RNA, 21 nt, Human
acccccucccuuucacagaga

SEQ ID NO: 35713 - RNA, 32 nt, Human
acccccuccuacccucucuccuguaccccuuu

SEQ ID NO: 35714 - RNA, 32 nt, Human
acccccuccuaccucuuuucugugccaccugc

SEQ ID NO: 35715 - RNA, 32 nt, Human
acccccuccugccuccauccaccggggcuaug

SEQ ID NO: 35716 - RNA, 32 nt, Human
acccccuccuggcaaucaauacagcuucauua

SEQ ID NO: 35717 - RNA, 32 nt, Human
acccccuccuucagacacccucaaccucuucu

SEQ ID NO: 35718 - RNA, 24 nt, Human
acccccugaaaaucauaugggcuu

SEQ ID NO: 35719 - RNA, 18 nt, Human
acccccugagacuaucau

SEQ ID NO: 35720 - RNA, 32 nt, Human
acccccugcaaucccccaccuuucggggucuc

SEQ ID NO: 35721 - RNA, 19 nt, Human
acccccugcccccaaagaa

SEQ ID NO: 35722 - RNA, 32 nt, Human
acccccugcccuuuugcuucccucccaucagu

SEQ ID NO: 35723 - RNA, 32 nt, Human
acccccugccggacccuccacccuucggcccc

SEQ ID NO: 35724 - RNA, 31 nt, Human
acccccugccucuuuugguuguuguucuuaa

SEQ ID NO: 35725 - RNA, 32 nt, Human
acccccugccuuaucucugccugcacgcccug

SEQ ID NO: 35726 - RNA, 32 nt, Human
acccccugccuuccccagcuugcccauuuccc

SEQ ID NO: 35727 - RNA, 23 nt, Human
acccccugcucccgcccaccuga

SEQ ID NO: 35728 - RNA, 32 nt, Human
acccccugcugcccacucuccugcugcucggg

SEQ ID NO: 35729 - RNA, 23 nt, Human
acccccuggagccagacagcagu

SEQ ID NO: 35730 - RNA, 32 nt, Human
acccccuggggugggaucugagcucccaccuc

SEQ ID NO: 35731 - RNA, 32 nt, Human
acccccuggugccugcaggccacccagggacc

SEQ ID NO: 35732 - RNA, 32 nt, Human
acccccuuaccucccccagugccuucuucaga

SEQ ID NO: 35733 - RNA, 23 nt, Human
acccccuuaccuuucacagagga

SEQ ID NO: 35734 - RNA, 23 nt, Human
acccccuucagcaggcaccucca

SEQ ID NO: 35735 - RNA, 32 nt, Human
acccccuuccaggagaggaugggcaggcauuu

SEQ ID NO: 35736 - RNA, 24 nt, Human
acccccuucccagccucugggaaa

SEQ ID NO: 35737 - RNA, 32 nt, Human
acccccuucccccacccagagacugggcagcu

SEQ ID NO: 35738 - RNA, 32 nt, Human
acccccuuccccggcuccccugcccacccugc

SEQ ID NO: 35739 - RNA, 18 nt, Human
acccccuucccucuggca

SEQ ID NO: 35740 - RNA, 20 nt, Human
acccccuucccugcugagca

SEQ ID NO: 35741 - RNA, 25 nt, Human
acccccuuccugucaugcccagggc

SEQ ID NO: 35742 - RNA, 32 nt, Human
acccccuuccuucuggagccuuagcucugaaa

SEQ ID NO: 35743 - RNA, 32 nt, Human
acccccuuccuugcugcccucccuucccugcc

SEQ ID NO: 35744 - RNA, 32 nt, Human
acccccuucucugcccauuccccagccucucu

SEQ ID NO: 35745 - RNA, 16 nt, Human
acccccuugacaccau

SEQ ID NO: 35746 - RNA, 32 nt, Human
acccccuuuagauuccucuguuucuucuaccu

SEQ ID NO: 35747 - RNA, 32 nt, Human
acccccuuuucuuccuacucugugccuggagc

SEQ ID NO: 35748 - RNA, 32 nt, Human
accccgaaaagcaagugccacuguuagaaaug

SEQ ID NO: 35749 - RNA, 19 nt, Human
accccgaacccgcacuccc

SEQ ID NO: 35750 - RNA, 32 nt, Human
accccgacacccaccggcacacagaccccaac

SEQ ID NO: 35751 - RNA, 32 nt, Human
accccgacauaggagggcaccacccacauggc

SEQ ID NO: 35752 - RNA, 32 nt, Human
accccgaccaccugcccaaccugcucuccucu

SEQ ID NO: 35753 - RNA, 19 nt, Human
accccgacgccacagccca

SEQ ID NO: 35754 - RNA, 32 nt, Human
accccgacugcgacuccaccugggaggaggac

SEQ ID NO: 35755 - RNA, 21 nt, Human
accccgagcaagacccugcac

SEQ ID NO: 35756 - RNA, 32 nt, Human
accccgagcugcgcagccuggcgcggcgugcg

SEQ ID NO: 35757 - RNA, 32 nt, Human
accccgaggagcucuguaagucccugcuccuc

SEQ ID NO: 35758 - RNA, 23 nt, Human
accccgaggcaaccggcugcaga

SEQ ID NO: 35759 - RNA, 32 nt, Human
accccgagggccugaggagagggagcuguggg

SEQ ID NO: 35760 - RNA, 32 nt, Human
accccgauuggcuggagaauugacuugggaga

SEQ ID NO: 35761 - RNA, 32 nt, Human
accccgcaaacucgugggcagugcagugcugg

SEQ ID NO: 35762 - RNA, 32 nt, Human
accccgcacagccuggguagcguguggaagau

SEQ ID NO: 35763 - RNA, 19 nt, Human
accccgcacucacacuccc

SEQ ID NO: 35764 - RNA, 32 nt, Human
accccgcagcuagccaacccagagccaggaga

SEQ ID NO: 35765 - RNA, 32 nt, Human
accccgccaccugggucagugcccgccccggg

SEQ ID NO: 35766 - RNA, 32 nt, Human
accccgccagcucacgcccuccaugaggcucg

SEQ ID NO: 35767 - RNA, 18 nt, Human
accccgcccaaccguggc

SEQ ID NO: 35768 - RNA, 32 nt, Human
accccgcccacaacagggaguuaaacuggagg

SEQ ID NO: 35769 - RNA, 32 nt, Human
accccgcccagccuggcagauuuuauuuaauc

SEQ ID NO: 35770 - RNA, 24 nt, Human
accccgcccgcgccgccgccgccg

SEQ ID NO: 35771 - RNA, 32 nt, Human
accccgcccugccucugagaccccgccucacc

SEQ ID NO: 35772 - RNA, 20 nt, Human
accccgccgccgccgccgcc

SEQ ID NO: 35773 - RNA, 21 nt, Human
accccgccgccgccgccgccg

SEQ ID NO: 35774 - RNA, 19 nt, Human
accccgccgccgccgccgu

SEQ ID NO: 35775 - RNA, 32 nt, Human
accccgccucauuccucacgccgagcuccaga

SEQ ID NO: 35776 - RNA, 32 nt, Human
accccgccugcuucauccacaucaggaggguc

SEQ ID NO: 35777 - RNA, 32 nt, Human
accccgccuggcugcaccccugcccagcaugu

SEQ ID NO: 35778 - RNA, 32 nt, Human
accccgccugggaacaacagucauucuuccuc

SEQ ID NO: 35779 - RNA, 24 nt, Human
accccgcgagcgcagggguccucu

SEQ ID NO: 35780 - RNA, 32 nt, Human
accccgcgccucucccccgccuccuccugccg

SEQ ID NO: 35781 - RNA, 32 nt, Human
accccgcucagguucugccugccuuacugggg

SEQ ID NO: 35782 - RNA, 19 nt, Human
accccgcuccccaacaccu

SEQ ID NO: 35783 - RNA, 32 nt, Human
accccgcugcagaucaccuggccccaccagcc

SEQ ID NO: 35784 - RNA, 32 nt, Human
accccgcugcagggauggccuccugggcuaag

SEQ ID NO: 35785 - RNA, 32 nt, Human
accccgcugccuggcgggcagccccugcugga

SEQ ID NO: 35786 - RNA, 32 nt, Human
accccgcugccugggcccugugguugcugggc

SEQ ID NO: 35787 - RNA, 32 nt, Human
accccgcugggaacuccuccaggggcugagau

SEQ ID NO: 35788 - RNA, 32 nt, Human
accccggaaaauccucugucuccagucucugg

SEQ ID NO: 35789 - RNA, 32 nt, Human
accccggagagggagucagccgagguccuggc

SEQ ID NO: 35790 - RNA, 32 nt, Human
accccggagagggcggacgagcagggcgccgg

SEQ ID NO: 35791 - RNA, 32 nt, Human
accccggagagugaagacucugccugucggac

SEQ ID NO: 35792 - RNA, 25 nt, Human
accccggagauggagguugcaguga

SEQ ID NO: 35793 - RNA, 32 nt, Human
accccggagauggagguugcagugagccaaga

SEQ ID NO: 35794 - RNA, 32 nt, Human
accccggagccgcagagaggggaagaggcaga

SEQ ID NO: 35795 - RNA, 32 nt, Human
accccggaggcagagguuucagugagccgaga

SEQ ID NO: 35796 - RNA, 32 nt, Human
accccggaggcggagcuugcagugagccgaga

SEQ ID NO: 35797 - RNA, 25 nt, Human
accccggaggcggagguugcaguga

SEQ ID NO: 35798 - RNA, 32 nt, Human
accccggaggcggagguugcagugagcugaga

SEQ ID NO: 35799 - RNA, 32 nt, Human
accccggagguagagguugcagugagccgaga

SEQ ID NO: 35800 - RNA, 32 nt, Human
accccggcaacuucuagaugaacccaagugaa

SEQ ID NO: 35801 - RNA, 24 nt, Human
accccggcccugugccugcucgga

SEQ ID NO: 35802 - RNA, 23 nt, Human
accccggccugaccucucucgga

SEQ ID NO: 35803 - RNA, 23 nt, Human
accccggcgcccgggcucccaga

SEQ ID NO: 35804 - RNA, 32 nt, Human
accccggcggcagacgcagguucgggaccaug

SEQ ID NO: 35805 - RNA, 24 nt, Human
accccggcucugggccccaucaga

SEQ ID NO: 35806 - RNA, 32 nt, Human
accccggcuuccuggggacacaggguuggcac

SEQ ID NO: 35807 - RNA, 32 nt, Human
accccgggaccaccccucccuuccagcuaugu

SEQ ID NO: 35808 - RNA, 32 nt, Human
accccgggagacugaacugcaggguucaagcc

SEQ ID NO: 35809 - RNA, 32 nt, Human
accccgggagcacugcccuaggagccuggacc

SEQ ID NO: 35810 - RNA, 32 nt, Human
accccgggagguggaggcugcagugaguugug

SEQ ID NO: 35811 - RNA, 32 nt, Human
accccgggcaccaugggccacuccaggauggg

SEQ ID NO: 35812 - RNA, 32 nt, Human
accccgggcaggcaaaggcaguggguagagga

SEQ ID NO: 35813 - RNA, 28 nt, Human
accccgggcagggcugccuccucaccuc

SEQ ID NO: 35814 - RNA, 32 nt, Human
accccgggccaacauggaaaacccagagccac

SEQ ID NO: 35815 - RNA, 32 nt, Human
accccgggcccaggcgugcuggucaccaugac

SEQ ID NO: 35816 - RNA, 32 nt, Human
accccgggcucaacaucucacuucucccacag

SEQ ID NO: 35817 - RNA, 32 nt, Human
accccggggacaugcccccacccgggaggggc

SEQ ID NO: 35818 - RNA, 32 nt, Human
accccggggccaccgggaggcacuuuugugga

SEQ ID NO: 35819 - RNA, 32 nt, Human
accccggggcucuccuguucucucacauuuaa

SEQ ID NO: 35820 - RNA, 32 nt, Human
accccggggcugcccuuugcaggugugaguca

SEQ ID NO: 35821 - RNA, 21 nt, Human
accccggggcugcgcacugca

SEQ ID NO: 35822 - RNA, 32 nt, Human
accccgggggcacacaggcuccacacugccac

SEQ ID NO: 35823 - RNA, 32 nt, Human
accccggguauugaccccagacaacaaugcca

SEQ ID NO: 35824 - RNA, 32 nt, Human
accccgggugcuguucccucggucacccuguu

SEQ ID NO: 35825 - RNA, 32 nt, Human
accccguaucuacaaaaauuagccagguguug

SEQ ID NO: 35826 - RNA, 32 nt, Human
accccguauggcacuagagacuuauugcauua

SEQ ID NO: 35827 - RNA, 32 nt, Human
accccguccugacccccucugccuguucaucu

SEQ ID NO: 35828 - RNA, 32 nt, Human
accccgucgcacaggcuggagugcaguggcaa

SEQ ID NO: 35829 - RNA, 32 nt, Human
accccgucgcccuuuuguccagcgucugcagc

SEQ ID NO: 35830 - RNA, 32 nt, Human
accccgucucauuccuccaccugccguggacu

SEQ ID NO: 35831 - RNA, 32 nt, Human
accccgucucuacaaaaauacaaaaauuagcc

SEQ ID NO: 35832 - RNA, 32 nt, Human
accccgucugcgccgcugugcuguugucugcc

SEQ ID NO: 35833 - RNA, 32 nt, Human
accccgugaccucccucucuccuuccagucac

SEQ ID NO: 35834 - RNA, 32 nt, Human
accccgugagccagcagagagccauaaaucca

SEQ ID NO: 35835 - RNA, 19 nt, Human
accccguggacuggcccag

SEQ ID NO: 35836 - RNA, 32 nt, Human
accccguucuuccucugcucucaacccauugc

SEQ ID NO: 35837 - RNA, 32 nt, Human
accccguuuuuguuauuuuguuucugguuuuu

SEQ ID NO: 35838 - RNA, 32 nt, Human
accccuaagaaagguucucugaaaauuauuug

SEQ ID NO: 35839 - RNA, 32 nt, Human
accccuaagucaagucacggguuuccauagcc

SEQ ID NO: 35840 - RNA, 32 nt, Human
accccuacaaacagcacccccaccauguuuaa

SEQ ID NO: 35841 - RNA, 32 nt, Human
accccuaccagcuguaccagcgucuggaacag

SEQ ID NO: 35842 - RNA, 32 nt, Human
accccuaccccuggcuguacugcucaggcugc

SEQ ID NO: 35843 - RNA, 32 nt, Human
accccuacccuuucccaaacccuucgguauug

SEQ ID NO: 35844 - RNA, 32 nt, Human
accccuacuccagccccugaaauaaaccacuc

SEQ ID NO: 35845 - RNA, 32 nt, Human
accccuacuggcugacccuuugacacccuucu

SEQ ID NO: 35846 - RNA, 17 nt, Human
accccuagaacugccau

SEQ ID NO: 35847 - RNA, 32 nt, Human
accccuagcauacugccuggcacacaguaaau

SEQ ID NO: 35848 - RNA, 32 nt, Human
accccuagcuaccacugccuccaggcuacugc

SEQ ID NO: 35849 - RNA, 21 nt, Human
accccuaggaacccccaggga

SEQ ID NO: 35850 - RNA, 32 nt, Human
accccuaggaauguaaucaguguuaggaugcc

SEQ ID NO: 35851 - RNA, 31 nt, Human
accccuagggaauaccuacucagcuuaagaa

SEQ ID NO: 35852 - RNA, 32 nt, Human
accccuaugaguguugaacaugugagaaagcc

SEQ ID NO: 35853 - RNA, 26 nt, Human
accccucaaccuggcucaucaacaga

SEQ ID NO: 35854 - RNA, 31 nt, Human
accccucacagcucaagccaaguccagcggc

SEQ ID NO: 35855 - RNA, 32 nt, Human
accccucacccagcugugguccggcuuuggga

SEQ ID NO: 35856 - RNA, 24 nt, Human
accccucaccccagaagcagcagu

SEQ ID NO: 35857 - RNA, 32 nt, Human
accccucacugcacucugcucaucacgggagg

SEQ ID NO: 35858 - RNA, 32 nt, Human
accccucagcaagaacagccugccugguggcc

SEQ ID NO: 35859 - RNA, 32 nt, Human
accccucagccuucucagcauuuccuuauccc

SEQ ID NO: 35860 - RNA, 32 nt, Human
accccucaggcuguuccagucuggcuuuugca

SEQ ID NO: 35861 - RNA, 32 nt, Human
accccucaucaggaguuccagugcugcaugcg

SEQ ID NO: 35862 - RNA, 17 nt, Human
accccucaugucagcuu

SEQ ID NO: 35863 - RNA, 32 nt, Human
accccucauugcugcaaugcagccucugcugg

SEQ ID NO: 35864 - RNA, 32 nt, Human
accccuccaacuaugcccuccccaccaugccu

SEQ ID NO: 35865 - RNA, 20 nt, Human
accccuccacacuucagcuc

SEQ ID NO: 35866 - RNA, 32 nt, Human
accccuccacaggaguuaucaggauuuuucug

SEQ ID NO: 35867 - RNA, 21 nt, Human
accccuccaccccgcaagcuc

SEQ ID NO: 35868 - RNA, 32 nt, Human
accccuccacguaucuuuccuaggcagaucac

SEQ ID NO: 35869 - RNA, 32 nt, Human
accccuccauuucucgccauggccccugcacu

SEQ ID NO: 35870 - RNA, 32 nt, Human
accccucccaacccuucuuccagggucaggga

SEQ ID NO: 35871 - RNA, 32 nt, Human
accccucccaaccucaaugcccugccauuaaa

SEQ ID NO: 35872 - RNA, 32 nt, Human
accccucccacacaccuugcucuggcuucucu

SEQ ID NO: 35873 - RNA, 32 nt, Human
accccucccagcccucuccuccuguuccuccu

SEQ ID NO: 35874 - RNA, 23 nt, Human
accccuccccucgugucagcuca

SEQ ID NO: 35875 - RNA, 24 nt, Human
accccuccccuucucccacagcca

SEQ ID NO: 35876 - RNA, 32 nt, Human
accccucccgcgcagcgccacccggccuggga

SEQ ID NO: 35877 - RNA, 25 nt, Human
accccucccucuguccaccagccca

SEQ ID NO: 35878 - RNA, 32 nt, Human
accccucccugccaccaggcacugccuggagg

SEQ ID NO: 35879 - RNA, 32 nt, Human
accccucccuugccccuuuccugggcccagaa

SEQ ID NO: 35880 - RNA, 22 nt, Human
accccuccgacucaccggccca

SEQ ID NO: 35881 - RNA, 32 nt, Human
accccuccggccccgucucucuuggacccacc

SEQ ID NO: 35882 - RNA, 32 nt, Human
accccuccucacugccucuccucucugggaca

SEQ ID NO: 35883 - RNA, 32 nt, Human
accccuccuccacccccacggcagacccuggu

SEQ ID NO: 35884 - RNA, 32 nt, Human
accccuccuugcagaacaguaucucugggacg

SEQ ID NO: 35885 - RNA, 32 nt, Human
accccucgcagcugcuuccuucugccugggau

SEQ ID NO: 35886 - RNA, 32 nt, Human
accccucgccucccucuccagcagcucccaca

SEQ ID NO: 35887 - RNA, 19 nt, Human
accccucgcucguucccuc

SEQ ID NO: 35888 - RNA, 19 nt, Human
accccucggccauucccuc

SEQ ID NO: 35889 - RNA, 32 nt, Human
accccucgggcucgucaguagggcuguggcug

SEQ ID NO: 35890 - RNA, 32 nt, Human
accccucuacuuccccucuuucccuucugaga

SEQ ID NO: 35891 - RNA, 32 nt, Human
accccucuauuuauuucccuuccacagugugg

SEQ ID NO: 35892 - RNA, 32 nt, Human
accccucuccagguuaucccagaaaugaccca

SEQ ID NO: 35893 - RNA, 32 nt, Human
accccucuccaucacugccaugguucggagac

SEQ ID NO: 35894 - RNA, 32 nt, Human
accccucuccaucacugccaugguuuggagac

SEQ ID NO: 35895 - RNA, 32 nt, Human
accccucuccccugcugucucuuggggcucuc

SEQ ID NO: 35896 - RNA, 32 nt, Human
accccucucgcgggugcugguggagaaaggac

SEQ ID NO: 35897 - RNA, 32 nt, Human
accccucucuccccaccuucccucucccggca

SEQ ID NO: 35898 - RNA, 32 nt, Human
accccucucuccccacuccucuucuccgaccc

SEQ ID NO: 35899 - RNA, 32 nt, Human
accccucucugagucacagaauggagcuaagu

SEQ ID NO: 35900 - RNA, 32 nt, Human
accccucugagaacagugaggcugguccucgu

SEQ ID NO: 35901 - RNA, 32 nt, Human
accccucugccagccgggccccggcugcagaa

SEQ ID NO: 35902 - RNA, 24 nt, Human
accccucugccaucacccagccca

SEQ ID NO: 35903 - RNA, 32 nt, Human
accccucugcccccucccuuguucucaagccu

SEQ ID NO: 35904 - RNA, 32 nt, Human
accccucugccuccucucgaugccuuacaguu

SEQ ID NO: 35905 - RNA, 32 nt, Human
accccucugccuggcaccuggauacccugggc

SEQ ID NO: 35906 - RNA, 32 nt, Human
accccucuguaaccuccauaauccaucagguc

SEQ ID NO: 35907 - RNA, 24 nt, Human
accccucuguggaacccacaaggg

SEQ ID NO: 35908 - RNA, 32 nt, Human
accccucuucccccuuccccugcgcccucccu

SEQ ID NO: 35909 - RNA, 32 nt, Human
accccucuuucauguauuaaaauaacacugag

SEQ ID NO: 35910 - RNA, 32 nt, Human
accccugaacagcuggacagcugggcuguggg

SEQ ID NO: 35911 - RNA, 32 nt, Human
accccugaaccgcgaagcgacagggaaagcgc

SEQ ID NO: 35912 - RNA, 19 nt, Human
accccugaaccuccagcca

SEQ ID NO: 35913 - RNA, 32 nt, Human
accccugaauuaagaggugcuguuauacauug

SEQ ID NO: 35914 - RNA, 32 nt, Human
accccugacccccauccucuuuuccuaccucu

SEQ ID NO: 35915 - RNA, 23 nt, Human
accccugaccucaggugauccgc

SEQ ID NO: 35916 - RNA, 32 nt, Human
accccugagauggguccacgcaucucucuaca

SEQ ID NO: 35917 - RNA, 32 nt, Human
accccugagccaagcugacuuccagucuucag

SEQ ID NO: 35918 - RNA, 20 nt, Human
accccugagccaccuguggc

SEQ ID NO: 35919 - RNA, 32 nt, Human
accccugcaacuggcccuccgcagccgaaagc

SEQ ID NO: 35920 - RNA, 32 nt, Human
accccugcacacauuacgacaggucccuaaau

SEQ ID NO: 35921 - RNA, 25 nt, Human
accccugcacccccagcugggggag

SEQ ID NO: 35922 - RNA, 18 nt, Human
accccugcaccuccagcc

SEQ ID NO: 35923 - RNA, 32 nt, Human
accccugcacuccagccugggugacagaguga

SEQ ID NO: 35924 - RNA, 32 nt, Human
accccugcacuccagccugggugacagcuaga

SEQ ID NO: 35925 - RNA, 24 nt, Human
accccugcacuccaggcugggcaa

SEQ ID NO: 35926 - RNA, 32 nt, Human
accccugcagccagagguuugcaguggguagu

SEQ ID NO: 35927 - RNA, 32 nt, Human
accccugcagucccccuggcugugccagguaa

SEQ ID NO: 35928 - RNA, 32 nt, Human
accccugcaucuuccugcugggcacaggcgag

SEQ ID NO: 35929 - RNA, 32 nt, Human
accccugcaugccaagcugccugcugccccag

SEQ ID NO: 35930 - RNA, 20 nt, Human
accccugcauggcugaacag

SEQ ID NO: 35931 - RNA, 32 nt, Human
accccugccacucaccccuccuggcccaggcc

SEQ ID NO: 35932 - RNA, 32 nt, Human
accccugccaucacugccccacauggacaaaa

SEQ ID NO: 35933 - RNA, 32 nt, Human
accccugcccagcagcccugagcucagcugca

SEQ ID NO: 35934 - RNA, 32 nt, Human
accccugcccaugcgcgggaggcugcagcaug

SEQ ID NO: 35935 - RNA, 32 nt, Human
accccugccccgugugugccccggguguucuc

SEQ ID NO: 35936 - RNA, 32 nt, Human
accccugccggccagcaggcaggauggugcuu

SEQ ID NO: 35937 - RNA, 22 nt, Human
accccugccuucuggcaagcaa

SEQ ID NO: 35938 - RNA, 32 nt, Human
accccugcgcugugcugaccccagggcucagc

SEQ ID NO: 35939 - RNA, 32 nt, Human
accccugcgucgagcugggaagguuccaugaa

SEQ ID NO: 35940 - RNA, 32 nt, Human
accccugcucaggccuucucucuggcugccag

SEQ ID NO: 35941 - RNA, 20 nt, Human
accccugcuccagccucgau

SEQ ID NO: 35942 - RNA, 21 nt, Human
accccugcugaugaugagcaa

SEQ ID NO: 35943 - RNA, 32 nt, Human
accccugcuguugcugccacugcuucaauauu

SEQ ID NO: 35944 - RNA, 32 nt, Human
accccugcuuccugguucucagucccacccca

SEQ ID NO: 35945 - RNA, 32 nt, Human
accccuggaaccugguugggcaguaggggagg

SEQ ID NO: 35946 - RNA, 20 nt, Human
accccuggaccccagccuca

SEQ ID NO: 35947 - RNA, 32 nt, Human
accccuggacuaggcccugcuucagugcccac

SEQ ID NO: 35948 - RNA, 32 nt, Human
accccuggaggcggcggcggcggcgagggagc

SEQ ID NO: 35949 - RNA, 32 nt, Human
accccuggccccugagcccacacccucucgga

SEQ ID NO: 35950 - RNA, 32 nt, Human
accccuggccuccccagguccuccuguauuug

SEQ ID NO: 35951 - RNA, 31 nt, Human
accccuggccugacucccaugcaaguagcug

SEQ ID NO: 35952 - RNA, 32 nt, Human
accccuggccuugacgcuaucucccaucaccu

SEQ ID NO: 35953 - RNA, 32 nt, Human
accccuggcugcaguggccaggugacauuccu

SEQ ID NO: 35954 - RNA, 32 nt, Human
accccuggcugggacugaaccacccagagcgg

SEQ ID NO: 35955 - RNA, 21 nt, Human
accccugggccaugccuagau

SEQ ID NO: 35956 - RNA, 32 nt, Human
accccugggccucuccccaugcugccuccccu

SEQ ID NO: 35957 - RNA, 32 nt, Human
accccugggggaaaagccuggguuggguuuag

SEQ ID NO: 35958 - RNA, 32 nt, Human
accccugguacucagcacacacaugcuuaccu

SEQ ID NO: 35959 - RNA, 32 nt, Human
accccuggugcugggucccugcugcuuucucu

SEQ ID NO: 35960 - RNA, 19 nt, Human
accccugguuaccuguggc

SEQ ID NO: 35961 - RNA, 32 nt, Human
accccugguuccuuuaagucuuaagugaugcc

SEQ ID NO: 35962 - RNA, 32 nt, Human
accccuguccccaccaggcucagagccagacc

SEQ ID NO: 35963 - RNA, 32 nt, Human
accccugucuccucuccuccuccagcccccag

SEQ ID NO: 35964 - RNA, 32 nt, Human
accccugucugcccuucucccuccugcuucug

SEQ ID NO: 35965 - RNA, 32 nt, Human
accccugucuuucuccuccugacugguggucu

SEQ ID NO: 35966 - RNA, 22 nt, Human
accccugugccccuccuagggg

SEQ ID NO: 35967 - RNA, 24 nt, Human
accccugugccugggacaggggag

SEQ ID NO: 35968 - RNA, 32 nt, Human
accccuguggcccacucugccuuccagagaga

SEQ ID NO: 35969 - RNA, 32 nt, Human
accccuguguccugcuucucacucucuuccau

SEQ ID NO: 35970 - RNA, 32 nt, Human
accccuguuccccucagcuuucccuccucgcu

SEQ ID NO: 35971 - RNA, 32 nt, Human
accccuucaagcaguuguuucccauucccaac

SEQ ID NO: 35972 - RNA, 32 nt, Human
accccuucacagacugacagaaugguuuuguu

SEQ ID NO: 35973 - RNA, 32 nt, Human
accccuucagcuuuccugagcugaaguccuug

SEQ ID NO: 35974 - RNA, 23 nt, Human
accccuuccaagugccuuuuuaa

SEQ ID NO: 35975 - RNA, 17 nt, Human
accccuuccacgcugug

SEQ ID NO: 35976 - RNA, 32 nt, Human
accccuuccacuccaguaggggacaccuuucu

SEQ ID NO: 35977 - RNA, 32 nt, Human
accccuuccaugcucaucucacugcccaguga

SEQ ID NO: 35978 - RNA, 32 nt, Human
accccuuccccgccccucucccggccggccuc

SEQ ID NO: 35979 - RNA, 32 nt, Human
accccuucccuggcuucucugcugcaauuuuu

SEQ ID NO: 35980 - RNA, 32 nt, Human
accccuucgucugugggcaccagcacuucauu

SEQ ID NO: 35981 - RNA, 32 nt, Human
accccuucucagacuccaguugggccggacuc

SEQ ID NO: 35982 - RNA, 32 nt, Human
accccuucuccuggcuuugaggaaggugcucc

SEQ ID NO: 35983 - RNA, 24 nt, Human
accccuucuguuacauaagggcuu

SEQ ID NO: 35984 - RNA, 32 nt, Human
accccuucuuccgaggaggggguggguaaaag

SEQ ID NO: 35985 - RNA, 32 nt, Human
accccuugaacccccaugcaaugagcuucuaa

SEQ ID NO: 35986 - RNA, 32 nt, Human
accccuugcccaggcaaggaaagacagcagug

SEQ ID NO: 35987 - RNA, 32 nt, Human
accccuuggcccacugcaucucagguuuccua

SEQ ID NO: 35988 - RNA, 32 nt, Human
accccuuggcccuucgcucuugcugccuuaac

SEQ ID NO: 35989 - RNA, 30 nt, Human
accccuugggaccacauggcacaaugggac

SEQ ID NO: 35990 - RNA, 32 nt, Human
accccuugggcccucuggggcuuccccucccc

SEQ ID NO: 35991 - RNA, 32 nt, Human
accccuuuccacgugcuccccuucccagccac

SEQ ID NO: 35992 - RNA, 32 nt, Human
accccuuucccugcaaccuccuugacucuggc

SEQ ID NO: 35993 - RNA, 32 nt, Human
accccuuuccuguaaccugcacuuugggaugg

SEQ ID NO: 35994 - RNA, 32 nt, Human
accccuuucucccacccagccccaacccccag

SEQ ID NO: 35995 - RNA, 32 nt, Human
accccuuucuggcucucccauuuccugagacc

SEQ ID NO: 35996 - RNA, 32 nt, Human
accccuuucuucuuauuucucccuuuuggaau

SEQ ID NO: 35997 - RNA, 32 nt, Human
accccuuugucccugcacucagcccuguggcc

SEQ ID NO: 35998 - RNA, 32 nt, Human
accccuuugucuccaaccuccauuucuguuca

SEQ ID NO: 35999 - RNA, 17 nt, Human
accccuuugucugccuc

SEQ ID NO: 36000 - RNA, 32 nt, Human
acccgaaacagcccuccgucuuccugcccaug

SEQ ID NO: 36001 - RNA, 32 nt, Human
acccgaaagccgcugggaaaaguuuacccaag

SEQ ID NO: 36002 - RNA, 32 nt, Human
acccgaacaccaugggccucgaggggacugcu

SEQ ID NO: 36003 - RNA, 32 nt, Human
acccgaacccuucgccugaauaacuccagccc

SEQ ID NO: 36004 - RNA, 32 nt, Human
acccgaacuccugguuuggcgcuuugugaagc

SEQ ID NO: 36005 - RNA, 32 nt, Human
acccgaagcccaggcugaagaguuuaacuuug

SEQ ID NO: 36006 - RNA, 32 nt, Human
acccgaagcugcuucugcccagucccagccgc

SEQ ID NO: 36007 - RNA, 32 nt, Human
acccgacaaacagggcagccagagccagacag

SEQ ID NO: 36008 - RNA, 22 nt, Human
acccgacaacuaccacucccca

SEQ ID NO: 36009 - RNA, 32 nt, Human
acccgacacacaaaagccgcuuucuccgcgcc

SEQ ID NO: 36010 - RNA, 32 nt, Human
acccgacacaccuacccugcugaccccuucug

SEQ ID NO: 36011 - RNA, 32 nt, Human
acccgacucgcuggcgcuucauggagaacuuc

SEQ ID NO: 36012 - RNA, 32 nt, Human
acccgacugcccuaccagccugcacaugggua

SEQ ID NO: 36013 - RNA, 32 nt, Human
acccgagagacggagguugcagugagcugaua

SEQ ID NO: 36014 - RNA, 32 nt, Human
acccgagaggcggaaguugcagugagccgaga

SEQ ID NO: 36015 - RNA, 32 nt, Human
acccgagaggcggagcuugcagugagccaaga

SEQ ID NO: 36016 - RNA, 32 nt, Human
acccgagaggcggagcuugcagugagcugaga

SEQ ID NO: 36017 - RNA, 32 nt, Human
acccgagaggcggagguugcagugagcccaga

SEQ ID NO: 36018 - RNA, 32 nt, Human
acccgagaggcggagguugcagugagccgaga

SEQ ID NO: 36019 - RNA, 32 nt, Human
acccgagagguggagguugaagugagccaaga

SEQ ID NO: 36020 - RNA, 32 nt, Human
acccgagagguggagguugcagugaaccaaga

SEQ ID NO: 36021 - RNA, 32 nt, Human
acccgagagguggagguugcagugagccaaaa

SEQ ID NO: 36022 - RNA, 32 nt, Human
acccgagauaguaccacugcacuccagccugg

SEQ ID NO: 36023 - RNA, 32 nt, Human
acccgagaucacacccucauuuuucacauuau

SEQ ID NO: 36024 - RNA, 32 nt, Human
acccgagcaagaagcagcucccagagagaaag

SEQ ID NO: 36025 - RNA, 32 nt, Human
acccgagcaccuucucuucacucagccaacug

SEQ ID NO: 36026 - RNA, 20 nt, Human
acccgagcccccacccgccu

SEQ ID NO: 36027 - RNA, 32 nt, Human
acccgagcccuccacaccagccuccuguaucu

SEQ ID NO: 36028 - RNA, 32 nt, Human
acccgagccuagagcaggcucaugcccaaaau

SEQ ID NO: 36029 - RNA, 23 nt, Human
acccgagccugcccccugccagg

SEQ ID NO: 36030 - RNA, 20 nt, Human
acccgagccuuuugucaagg

SEQ ID NO: 36031 - RNA, 32 nt, Human
acccgagcugggaccaguaccuggguccccag

SEQ ID NO: 36032 - RNA, 32 nt, Human
acccgaggagcaggacagagaagacggccccu

SEQ ID NO: 36033 - RNA, 32 nt, Human
acccgagggccaggaagaaccgcucucgcaua

SEQ ID NO: 36034 - RNA, 32 nt, Human
acccgagucugccucucggagcagggagcuca

SEQ ID NO: 36035 - RNA, 30 nt, Human
acccgaugauccugagccaggagcucugug

SEQ ID NO: 36036 - RNA, 31 nt, Human
acccgaugccucucaugaucugucucuuuag

SEQ ID NO: 36037 - RNA, 32 nt, Human
acccgcaaccacagcaagaacuccaccagcag

SEQ ID NO: 36038 - RNA, 32 nt, Human
acccgcacacacagcaggaggggccugcccag

SEQ ID NO: 36039 - RNA, 32 nt, Human
acccgcacagaacuuggucucuggaauccagc

SEQ ID NO: 36040 - RNA, 32 nt, Human
acccgcacuggcagcgggaggcagagggagga

SEQ ID NO: 36041 - RNA, 24 nt, Human
acccgcagccuaggcaggcucugc

SEQ ID NO: 36042 - RNA, 32 nt, Human
acccgcagccucccccgcugccucccuagggc

SEQ ID NO: 36043 - RNA, 32 nt, Human
acccgcagccugaagaagcugauagcggaccc

SEQ ID NO: 36044 - RNA, 24 nt, Human
acccgcagcuccuggcgcucggcg

SEQ ID NO: 36045 - RNA, 32 nt, Human
acccgcagggggaaggagggaggcugacaagc

SEQ ID NO: 36046 - RNA, 32 nt, Human
acccgcagugcgcgcaccacaccagguucacc

SEQ ID NO: 36047 - RNA, 32 nt, Human
acccgcauccugggugaugaagucagacacgc

SEQ ID NO: 36048 - RNA, 32 nt, Human
acccgcaucuucuguuaggcaggaucuguaca

SEQ ID NO: 36049 - RNA, 23 nt, Human
acccgcaugaucccuucccgcca

SEQ ID NO: 36050 - RNA, 32 nt, Human
acccgcauuggauaucagagcugggagggccc

SEQ ID NO: 36051 - RNA, 32 nt, Human
acccgccaaagaccccuucggugugccggcag

SEQ ID NO: 36052 - RNA, 32 nt, Human
acccgccacugcauuccacagccuguagaagu

SEQ ID NO: 36053 - RNA, 32 nt, Human
acccgccagcacacccuuagccuccagcaccc

SEQ ID NO: 36054 - RNA, 32 nt, Human
acccgcccaagacugcagcccaaucaacgccu

SEQ ID NO: 36055 - RNA, 32 nt, Human
acccgcccacggucuauucauagggucccaaa

SEQ ID NO: 36056 - RNA, 32 nt, Human
acccgcccaggagcgcgcagcugggguucuag

SEQ ID NO: 36057 - RNA, 32 nt, Human
acccgcccauaauaacacuccagucuggggcu

SEQ ID NO: 36058 - RNA, 32 nt, Human
acccgccccauccugggucauuacagaguggg

SEQ ID NO: 36059 - RNA, 32 nt, Human
acccgccccugccccugccccugcuacugcca

SEQ ID NO: 36060 - RNA, 32 nt, Human
acccgcccuccccguccugccuccucggcccc

SEQ ID NO: 36061 - RNA, 32 nt, Human
acccgcccugcacuugaccgcagcaggaggga

SEQ ID NO: 36062 - RNA, 32 nt, Human
acccgccgcaagcaucuugaacugacagccac

SEQ ID NO: 36063 - RNA, 32 nt, Human
acccgccgccuccgcucuccccggcugcaggc

SEQ ID NO: 36064 - RNA, 32 nt, Human
acccgccucaccucucacccuccuccaguccc

SEQ ID NO: 36065 - RNA, 32 nt, Human
acccgccucuacugccggcuccgcgcccuucc

SEQ ID NO: 36066 - RNA, 25 nt, Human
acccgccugcagaucugggauccag

SEQ ID NO: 36067 - RNA, 32 nt, Human
acccgccugccuggccgcaggugguucucccu

SEQ ID NO: 36068 - RNA, 32 nt, Human
acccgccugccuggggcggugcugcaccaggu

SEQ ID NO: 36069 - RNA, 32 nt, Human
acccgccugccugucccugaggggccuggugc

SEQ ID NO: 36070 - RNA, 32 nt, Human
acccgccugggaacaagggaugaggaggaguu

SEQ ID NO: 36071 - RNA, 32 nt, Human
acccgccugggcuugcagcccgccacuuuacu

SEQ ID NO: 36072 - RNA, 32 nt, Human
acccgccuguaaucccagcuacucgggaggcu

SEQ ID NO: 36073 - RNA, 31 nt, Human
acccgccuucuagcugggccugggcucgcgg

SEQ ID NO: 36074 - RNA, 32 nt, Human
acccgccuuugccugcgagucucccucgcugg

SEQ ID NO: 36075 - RNA, 32 nt, Human
acccgcgagagggaagaagcaggaggucucag

SEQ ID NO: 36076 - RNA, 21 nt, Human
acccgcgaggaagggcccgcg

SEQ ID NO: 36077 - RNA, 32 nt, Human
acccgcgaggcggagacugcagugagccgaga

SEQ ID NO: 36078 - RNA, 32 nt, Human
acccgcgcacggcuggcuacaccccgacgcca

SEQ ID NO: 36079 - RNA, 24 nt, Human
acccgcggacccacagaccccgcg

SEQ ID NO: 36080 - RNA, 32 nt, Human
acccgcggagccagaagagggaggaaaggaga

SEQ ID NO: 36081 - RNA, 32 nt, Human
acccgcggcgcaggagcuucaguggucugggg

SEQ ID NO: 36082 - RNA, 22 nt, Human
acccgcggcucaaaucuccggg

SEQ ID NO: 36083 - RNA, 23 nt, Human
acccgcggcuucccuggcucccg

SEQ ID NO: 36084 - RNA, 24 nt, Human
acccgcgggacaacucuacgugca

SEQ ID NO: 36085 - RNA, 32 nt, Human
acccgcggggaugaggagguugucagugauug

SEQ ID NO: 36086 - RNA, 25 nt, Human
acccgcguaccggccgccgccgccg

SEQ ID NO: 36087 - RNA, 32 nt, Human
acccgcuaaugagcuguugacacuguuguucc

SEQ ID NO: 36088 - RNA, 32 nt, Human
acccgcuccaucuuccguggaacagggacacu

SEQ ID NO: 36089 - RNA, 32 nt, Human
acccgcucccaccaggcagcugaggccacuuu

SEQ ID NO: 36090 - RNA, 32 nt, Human
acccgcucccaccucacaccccucagccacaa

SEQ ID NO: 36091 - RNA, 32 nt, Human
acccgcuccgcagccggcaccaugcgcgagau

SEQ ID NO: 36092 - RNA, 32 nt, Human
acccgcuccuuugacauuggugccccacucca

SEQ ID NO: 36093 - RNA, 32 nt, Human
acccgcucguccccuucucuuucugccacccu

SEQ ID NO: 36094 - RNA, 32 nt, Human
acccgcucguuuuggcggcagcucguguccca

SEQ ID NO: 36095 - RNA, 32 nt, Human
acccgcugccaccuccauagagcuccgacuca

SEQ ID NO: 36096 - RNA, 32 nt, Human
acccgcuggccccugggcccagccugggcacc

SEQ ID NO: 36097 - RNA, 32 nt, Human
acccgcuggcgaccgcugccuccgggaaguuu

SEQ ID NO: 36098 - RNA, 32 nt, Human
acccgcuggcuuccagucuccaccuucccgcc

SEQ ID NO: 36099 - RNA, 32 nt, Human
acccgcuucagauagaucauuguuagauauuu

SEQ ID NO: 36100 - RNA, 32 nt, Human
acccgcuuucacucuucgaauuugugcuuagc

SEQ ID NO: 36101 - RNA, 32 nt, Human
acccgcuuucagcccugugcucuggccccaga

SEQ ID NO: 36102 - RNA, 32 nt, Human
acccgcuuucucucuggucuucucccaggcug

SEQ ID NO: 36103 - RNA, 32 nt, Human
acccggaagcacuuacccuccacuuccuccuc

SEQ ID NO: 36104 - RNA, 32 nt, Human
acccggaaggcagagcuugcagugagccgaga

SEQ ID NO: 36105 - RNA, 32 nt, Human
acccggaaggcagagguugcagugagccgaga

SEQ ID NO: 36106 - RNA, 32 nt, Human
acccggaaggcggagcuugcagugagccgaga

SEQ ID NO: 36107 - RNA, 25 nt, Human
acccggaaggcggagguugcaguga

SEQ ID NO: 36108 - RNA, 32 nt, Human
acccggaaggcggagguugcagugagccaaga

SEQ ID NO: 36109 - RNA, 32 nt, Human
acccggaagguggagguugcagugagccgaga

SEQ ID NO: 36110 - RNA, 32 nt, Human
acccggaagguggagguuguugcggugagcug

SEQ ID NO: 36111 - RNA, 32 nt, Human
acccggaagguggaguuugcagugagccgaga

SEQ ID NO: 36112 - RNA, 32 nt, Human
acccggaccaguggcugggagccccacacaga

SEQ ID NO: 36113 - RNA, 32 nt, Human
acccggagagguggaauuucacuuugaaauuc

SEQ ID NO: 36114 - RNA, 32 nt, Human
acccggagccaugucuucacauaggaggaaag

SEQ ID NO: 36115 - RNA, 32 nt, Human
acccggagccgcccgcaugcagcuucaccucc

SEQ ID NO: 36116 - RNA, 32 nt, Human
acccggagccucagggaugggcucaggcugau

SEQ ID NO: 36117 - RNA, 32 nt, Human
acccggagcuccucacccggcaccacaucugu

SEQ ID NO: 36118 - RNA, 32 nt, Human
acccggagcucuuggcagcccauugcugccug

SEQ ID NO: 36119 - RNA, 32 nt, Human
acccggaggcagagguugcagugagccgagau

SEQ ID NO: 36120 - RNA, 32 nt, Human
acccggaggcagggagccaccuccucagcuuc

SEQ ID NO: 36121 - RNA, 24 nt, Human
acccggaggcagggguugcaguga

SEQ ID NO: 36122 - RNA, 32 nt, Human
acccggaggcggaaccggcagugcagcccgaa

SEQ ID NO: 36123 - RNA, 22 nt, Human
acccggaggcggagguugcggu

SEQ ID NO: 36124 - RNA, 32 nt, Human
acccggaggcggagguugcgguaagccgagau

SEQ ID NO: 36125 - RNA, 32 nt, Human
acccggaggguacgcagacuccacacucagua

SEQ ID NO: 36126 - RNA, 32 nt, Human
acccggaugcagagucuacagccugacccagc

SEQ ID NO: 36127 - RNA, 32 nt, Human
acccggcacccacuuuccaaaauggccaugga

SEQ ID NO: 36128 - RNA, 32 nt, Human
acccggcaggaagagguugcauugagcugaga

SEQ ID NO: 36129 - RNA, 32 nt, Human
acccggcaggcagagcuugcagugagccgaga

SEQ ID NO: 36130 - RNA, 32 nt, Human
acccggcaggcagagguugcagugagccgaga

SEQ ID NO: 36131 - RNA, 32 nt, Human
acccggcaggcaggaacucacccuggagcccu

SEQ ID NO: 36132 - RNA, 32 nt, Human
acccggcaggcggagguugcagugagcggaga

SEQ ID NO: 36133 - RNA, 32 nt, Human
acccggcagggaagggaggaguuggcaagaau

SEQ ID NO: 36134 - RNA, 22 nt, Human
acccggccacggaggagccaca

SEQ ID NO: 36135 - RNA, 23 nt, Human
acccggcccacuggcagacacag

SEQ ID NO: 36136 - RNA, 32 nt, Human
acccggccccugcugguucaggguuggccccu

SEQ ID NO: 36137 - RNA, 32 nt, Human
acccggccccuguguucugccugccaggccag

SEQ ID NO: 36138 - RNA, 32 nt, Human
acccggcccuacuggaggguguuuucacgaau

SEQ ID NO: 36139 - RNA, 32 nt, Human
acccggcccucugccagcauaaaccacucaca

SEQ ID NO: 36140 - RNA, 32 nt, Human
acccggcccuugccucauguuugaaugauaau

SEQ ID NO: 36141 - RNA, 32 nt, Human
acccggccugugccccagcucuccccgagggc

SEQ ID NO: 36142 - RNA, 32 nt, Human
acccggccuuucuuucucccucuugcaaccaa

SEQ ID NO: 36143 - RNA, 32 nt, Human
acccggcggacagagcgcgccccgcgcccgcg

SEQ ID NO: 36144 - RNA, 32 nt, Human
acccggcgggaagagguugcagugagccaaga

SEQ ID NO: 36145 - RNA, 32 nt, Human
acccggcgggcagagguugcaguaagcagaga

SEQ ID NO: 36146 - RNA, 32 nt, Human
acccggcgggggcggagccagcgggcgggcgc

SEQ ID NO: 36147 - RNA, 32 nt, Human
acccggcucccaggauccucauuaggaagccc

SEQ ID NO: 36148 - RNA, 32 nt, Human
acccggcucuacugcccgucccggacgacuca

SEQ ID NO: 36149 - RNA, 32 nt, Human
acccggcugcaaccucucacuguagaacugcc

SEQ ID NO: 36150 - RNA, 32 nt, Human
acccggcugccuccuccucuuccuggcugcag

SEQ ID NO: 36151 - RNA, 32 nt, Human
acccggcugcugauggccuggugccagcuggg

SEQ ID NO: 36152 - RNA, 32 nt, Human
acccggcugggcaggcccggacagcucccgcg

SEQ ID NO: 36153 - RNA, 32 nt, Human
acccggcuguagcugcucucacaccggcccaa

SEQ ID NO: 36154 - RNA, 32 nt, Human
acccgggaagcagagguugcagugacagagau

SEQ ID NO: 36155 - RNA, 32 nt, Human
acccgggaagcagagguugcagugagcugagg

SEQ ID NO: 36156 - RNA, 32 nt, Human
acccgggaagcagagguugcggugagccgaga

SEQ ID NO: 36157 - RNA, 32 nt, Human
acccgggaagcagagguugcggugagcugaga

SEQ ID NO: 36158 - RNA, 32 nt, Human
acccgggaagcagagucugcagugagccaaga

SEQ ID NO: 36159 - RNA, 32 nt, Human
acccgggaagcggagcuugcagugagccgaga

SEQ ID NO: 36160 - RNA, 32 nt, Human
acccgggaagcggagguugcagggagccgaga

SEQ ID NO: 36161 - RNA, 32 nt, Human
acccgggaagcggagguugcagugagccaaga

SEQ ID NO: 36162 - RNA, 32 nt, Human
acccgggaagcggagguugcagugagccgaga

SEQ ID NO: 36163 - RNA, 32 nt, Human
acccgggaaggcggaaguugcagugagccgag

SEQ ID NO: 36164 - RNA, 32 nt, Human
acccgggaaguggagguugcagugagccaaga

SEQ ID NO: 36165 - RNA, 32 nt, Human
acccgggaaguggagguugccgugagucgaga

SEQ ID NO: 36166 - RNA, 32 nt, Human
acccgggacaguggucaggaagcccugagcau

SEQ ID NO: 36167 - RNA, 32 nt, Human
acccgggacgcagggguugcagugagcggaga

SEQ ID NO: 36168 - RNA, 32 nt, Human
acccgggacuccuccuguccugggccgaaugc

SEQ ID NO: 36169 - RNA, 32 nt, Human
acccgggagacggagguugcagugagcugaga

SEQ ID NO: 36170 - RNA, 32 nt, Human
acccgggagacggcgcuugcagugagccgaga

SEQ ID NO: 36171 - RNA, 32 nt, Human
acccgggagacgggagguuguggugagcugag

SEQ ID NO: 36172 - RNA, 32 nt, Human
acccgggagaugaagguugcagugagcugagg

SEQ ID NO: 36173 - RNA, 32 nt, Human
acccgggagauggcgcuugcagugagcugaga

SEQ ID NO: 36174 - RNA, 32 nt, Human
acccgggagcggagguugcagugagcugagau

SEQ ID NO: 36175 - RNA, 32 nt, Human
acccgggaggaagagcuugcagugagccgaga

SEQ ID NO: 36176 - RNA, 32 nt, Human
acccgggaggaggagcuugcagugagccgaga

SEQ ID NO: 36177 - RNA, 32 nt, Human
acccgggaggaggagguugcacugagccgaga

SEQ ID NO: 36178 - RNA, 32 nt, Human
acccgggaggcaaagguugcagugagcugaga

SEQ ID NO: 36179 - RNA, 32 nt, Human
acccgggaggcagaaguugcagugaacugaaa

SEQ ID NO: 36180 - RNA, 32 nt, Human
acccgggaggcagaccuugcagugagccaaga

SEQ ID NO: 36181 - RNA, 32 nt, Human
acccgggaggcagacuuugcagugagcugaga

SEQ ID NO: 36182 - RNA, 32 nt, Human
acccgggaggcagagauagcagugaacugaga

SEQ ID NO: 36183 - RNA, 32 nt, Human
acccgggaggcagagauugcaguaagcugaga

SEQ ID NO: 36184 - RNA, 32 nt, Human
acccgggaggcagagcuugcaguaagccgaga

SEQ ID NO: 36185 - RNA, 32 nt, Human
acccgggaggcagagcuugcagugagcagaga

SEQ ID NO: 36186 - RNA, 32 nt, Human
acccgggaggcagagcuugcagugagccaaga

SEQ ID NO: 36187 - RNA, 32 nt, Human
acccgggaggcagagcuugcagugagccgaga

SEQ ID NO: 36188 - RNA, 32 nt, Human
acccgggaggcagagcuugcagugagcugaga

SEQ ID NO: 36189 - RNA, 32 nt, Human
acccgggaggcagagcuugcagugagucgaga

SEQ ID NO: 36190 - RNA, 32 nt, Human
acccgggaggcagagcuugcggugagccgaga

SEQ ID NO: 36191 - RNA, 32 nt, Human
acccgggaggcagagcuuguggugagccgaga

SEQ ID NO: 36192 - RNA, 32 nt, Human
acccgggaggcagaggcugcacucuagccugg

SEQ ID NO: 36193 - RNA, 32 nt, Human
acccgggaggcagaggcugcagagagccaagg

SEQ ID NO: 36194 - RNA, 32 nt, Human
acccgggaggcagaggcugcagugagccgaga

SEQ ID NO: 36195 - RNA, 32 nt, Human
acccgggaggcagaggcugcagugagcugaga

SEQ ID NO: 36196 - RNA, 32 nt, Human
acccgggaggcagaggcuguagugagccaaga

SEQ ID NO: 36197 - RNA, 32 nt, Human
acccgggaggcagagggugcaguaagccgaga

SEQ ID NO: 36198 - RNA, 32 nt, Human
acccgggaggcagagguaguagugagcugaag

SEQ ID NO: 36199 - RNA, 32 nt, Human
acccgggaggcagagguggcugugagccgagg

SEQ ID NO: 36200 - RNA, 32 nt, Human
acccgggaggcagagguuacagugagccaaga

SEQ ID NO: 36201 - RNA, 32 nt, Human
acccgggaggcagagguuaucgugagcugaca

SEQ ID NO: 36202 - RNA, 32 nt, Human
acccgggaggcagagguugaagugagcugaga

SEQ ID NO: 36203 - RNA, 32 nt, Human
acccgggaggcagagguugcacugagcugaga

SEQ ID NO: 36204 - RNA, 32 nt, Human
acccgggaggcagagguugcagccggcugaga

SEQ ID NO: 36205 - RNA, 32 nt, Human
acccgggaggcagagguugcaguaagcagagg

SEQ ID NO: 36206 - RNA, 32 nt, Human
acccgggaggcagagguugcagugaacccaga

SEQ ID NO: 36207 - RNA, 32 nt, Human
acccgggaggcagagguugcagugacccaaga

SEQ ID NO: 36208 - RNA, 32 nt, Human
acccgggaggcagagguugcagugagccaaga

SEQ ID NO: 36209 - RNA, 32 nt, Human
acccgggaggcagagguugcagugagccgaca

SEQ ID NO: 36210 - RNA, 32 nt, Human
acccgggaggcagagguugcagugagccgaga

SEQ ID NO: 36211 - RNA, 32 nt, Human
acccgggaggcagagguugcagugagcugaga

SEQ ID NO: 36212 - RNA, 32 nt, Human
acccgggaggcagagguugcagugaggugaga

SEQ ID NO: 36213 - RNA, 32 nt, Human
acccgggaggcagagguugcagugagucgaga

SEQ ID NO: 36214 - RNA, 32 nt, Human
acccgggaggcagagguugcagugaguggaga

SEQ ID NO: 36215 - RNA, 32 nt, Human
acccgggaggcagagguugcaguguggugaga

SEQ ID NO: 36216 - RNA, 32 nt, Human
acccgggaggcagagguugcauugagccgaga

SEQ ID NO: 36217 - RNA, 32 nt, Human
acccgggaggcagagguugcggugagccaaga

SEQ ID NO: 36218 - RNA, 32 nt, Human
acccgggaggcagagguugcggugagccgaga

SEQ ID NO: 36219 - RNA, 32 nt, Human
acccgggaggcagagguugcuguaagcugaga

SEQ ID NO: 36220 - RNA, 32 nt, Human
acccgggaggcagagguuguagugagcccaga

SEQ ID NO: 36221 - RNA, 32 nt, Human
acccgggaggcagagguugugagcugagaucg

SEQ ID NO: 36222 - RNA, 32 nt, Human
acccgggaggcagagguuguguugagccaaga

SEQ ID NO: 36223 - RNA, 32 nt, Human
acccgggaggcagcaguugcagugagcugaga

SEQ ID NO: 36224 - RNA, 32 nt, Human
acccgggaggcaguggcugcagugagcugaga

SEQ ID NO: 36225 - RNA, 32 nt, Human
acccgggaggcauagcuugcagugagccgaga

SEQ ID NO: 36226 - RNA, 32 nt, Human
acccgggaggcgagcuugcagugagccgagau

SEQ ID NO: 36227 - RNA, 32 nt, Human
acccgggaggcggaacuugcagugagccaaga

SEQ ID NO: 36228 - RNA, 32 nt, Human
acccgggaggcggagauugcagugagccaaga

SEQ ID NO: 36229 - RNA, 32 nt, Human
acccgggaggcggagauugcagugagcugaga

SEQ ID NO: 36230 - RNA, 32 nt, Human
acccgggaggcggagcuuacagugagcugaga

SEQ ID NO: 36231 - RNA, 32 nt, Human
acccgggaggcggagcuugcagugaaccgaga

SEQ ID NO: 36232 - RNA, 32 nt, Human
acccgggaggcggagcuugcagugagccaaga

SEQ ID NO: 36233 - RNA, 32 nt, Human
acccgggaggcggagcuugcagugagcccaga

SEQ ID NO: 36234 - RNA, 32 nt, Human
acccgggaggcggagcuugcagugagccgaaa

SEQ ID NO: 36235 - RNA, 32 nt, Human
acccgggaggcggagcuugcagugagccgaga

SEQ ID NO: 36236 - RNA, 32 nt, Human
acccgggaggcggagcuugcagugagccgagg

SEQ ID NO: 36237 - RNA, 32 nt, Human
acccgggaggcggagcuugcagugagccuuga

SEQ ID NO: 36238 - RNA, 32 nt, Human
acccgggaggcggagcuugcagugagcggaga

SEQ ID NO: 36239 - RNA, 32 nt, Human
acccgggaggcggagcuugcagugagcugaga

SEQ ID NO: 36240 - RNA, 32 nt, Human
acccgggaggcggaggcugcagugagccgaga

SEQ ID NO: 36241 - RNA, 32 nt, Human
acccgggaggcggaggcugcagugagucgaga

SEQ ID NO: 36242 - RNA, 32 nt, Human
acccgggaggcggagguuacagugagccgaga

SEQ ID NO: 36243 - RNA, 32 nt, Human
acccgggaggcggagguuacagugagccuuuu

SEQ ID NO: 36244 - RNA, 32 nt, Human
acccgggaggcggagguuacagugagcugaga

SEQ ID NO: 36245 - RNA, 32 nt, Human
acccgggaggcggagguuccagugagccgaga

SEQ ID NO: 36246 - RNA, 32 nt, Human
acccgggaggcggagguugcaguaagccgaga

SEQ ID NO: 36247 - RNA, 32 nt, Human
acccgggaggcggagguugcagucagccgaga

SEQ ID NO: 36248 - RNA, 25 nt, Human
acccgggaggcggagguugcaguga

SEQ ID NO: 36249 - RNA, 32 nt, Human
acccgggaggcggagguugcagugagccaaga

SEQ ID NO: 36250 - RNA, 32 nt, Human
acccgggaggcggagguugcagugagccgaaa

SEQ ID NO: 36251 - RNA, 32 nt, Human
acccgggaggcggagguugcagugagccgaga

SEQ ID NO: 36252 - RNA, 32 nt, Human
acccgggaggcggagguugcagugagccugga

SEQ ID NO: 36253 - RNA, 32 nt, Human
acccgggaggcggagguugcagugagcuaaga

SEQ ID NO: 36254 - RNA, 32 nt, Human
acccgggaggcggagguugcagugagcugaga

SEQ ID NO: 36255 - RNA, 32 nt, Human
acccgggaggcggagguugcagugagguaaga

SEQ ID NO: 36256 - RNA, 32 nt, Human
acccgggaggcggagguugcagugagucaagg

SEQ ID NO: 36257 - RNA, 32 nt, Human
acccgggaggcggagguugcaguuagccaaga

SEQ ID NO: 36258 - RNA, 32 nt, Human
acccgggaggcggagguugcaugagcugagau

SEQ ID NO: 36259 - RNA, 32 nt, Human
acccgggaggcggagguugccgugagucgaga

SEQ ID NO: 36260 - RNA, 32 nt, Human
acccgggaggcggagguugcgacccaaagcuu

SEQ ID NO: 36261 - RNA, 32 nt, Human
acccgggaggcggagguugcggugagccaaga

SEQ ID NO: 36262 - RNA, 32 nt, Human
acccgggaggcggagguugcggugagccgaga

SEQ ID NO: 36263 - RNA, 32 nt, Human
acccgggaggcggagguuguagugagccgaga

SEQ ID NO: 36264 - RNA, 32 nt, Human
acccgggaggcggagguuguggugagccaaga

SEQ ID NO: 36265 - RNA, 32 nt, Human
acccgggaggcggagguuguggugagccgaga

SEQ ID NO: 36266 - RNA, 32 nt, Human
acccgggaggcggagguuguggugagcugaaa

SEQ ID NO: 36267 - RNA, 32 nt, Human
acccgggaggcggagguuguggugagcugaga

SEQ ID NO: 36268 - RNA, 32 nt, Human
acccgggaggcggagguuucagugagccgaga

SEQ ID NO: 36269 - RNA, 32 nt, Human
acccgggaggcggaguuugcagugagccaaga

SEQ ID NO: 36270 - RNA, 32 nt, Human
acccgggaggcggaucuugcagugagcggaga

SEQ ID NO: 36271 - RNA, 25 nt, Human
acccgggaggcggggguugcaguga

SEQ ID NO: 36272 - RNA, 32 nt, Human
acccgggaggcuaagguugcagugagccgaga

SEQ ID NO: 36273 - RNA, 32 nt, Human
acccgggaggcugaggcaggagaaucacuuga

SEQ ID NO: 36274 - RNA, 32 nt, Human
acccgggaggcugaggcaggagaaucacuugu

SEQ ID NO: 36275 - RNA, 32 nt, Human
acccgggaggcugaggcaggagaaucgcuuga

SEQ ID NO: 36276 - RNA, 32 nt, Human
acccgggaggcugagguugcagugaguggaga

SEQ ID NO: 36277 - RNA, 32 nt, Human
acccgggaggcugaguugggaggauccuuuga

SEQ ID NO: 36278 - RNA, 32 nt, Human
acccgggagggagagguugcagugagccaaga

SEQ ID NO: 36279 - RNA, 32 nt, Human
acccgggagguagagcuugcagugaaccgaga

SEQ ID NO: 36280 - RNA, 32 nt, Human
acccgggagguagaggcugcagugagccgaga

SEQ ID NO: 36281 - RNA, 32 nt, Human
acccgggagguagagguugcagugagccgaga

SEQ ID NO: 36282 - RNA, 32 nt, Human
acccgggaggugaaggaugcagugagccaaga

SEQ ID NO: 36283 - RNA, 32 nt, Human
acccgggaggugcagguugcagugagccaaga

SEQ ID NO: 36284 - RNA, 32 nt, Human
acccgggagguggaacuugcagugagccgaga

SEQ ID NO: 36285 - RNA, 32 nt, Human
acccgggagguggagauugcagugagcccaga

SEQ ID NO: 36286 - RNA, 32 nt, Human
acccgggagguggagauugcagugagcugaga

SEQ ID NO: 36287 - RNA, 32 nt, Human
acccgggagguggagccuacagugagucaaca

SEQ ID NO: 36288 - RNA, 32 nt, Human
acccgggagguggagcuuccagugagccgaga

SEQ ID NO: 36289 - RNA, 32 nt, Human
acccgggagguggagcuugcagugagccaaga

SEQ ID NO: 36290 - RNA, 32 nt, Human
acccgggagguggagcuugcagugagccgaga

SEQ ID NO: 36291 - RNA, 32 nt, Human
acccgggagguggagcuugcagugagcggaga

SEQ ID NO: 36292 - RNA, 32 nt, Human
acccgggagguggagcuugcagugagcugaga

SEQ ID NO: 36293 - RNA, 32 nt, Human
acccgggagguggagcuugcagugagcuggga

SEQ ID NO: 36294 - RNA, 32 nt, Human
acccgggagguggagcuugcaguggguggaga

SEQ ID NO: 36295 - RNA, 32 nt, Human
acccgggagguggagcuugcggugagcugaga

SEQ ID NO: 36296 - RNA, 32 nt, Human
acccgggagguggagcuuguagugaggcgaga

SEQ ID NO: 36297 - RNA, 32 nt, Human
acccgggagguggaggcugcaaugagcugaga

SEQ ID NO: 36298 - RNA, 32 nt, Human
acccgggagguggaggcugcagcgagccaaga

SEQ ID NO: 36299 - RNA, 32 nt, Human
acccgggagguggaggcugcagugagccgaga

SEQ ID NO: 36300 - RNA, 32 nt, Human
acccgggagguggaggcugcagugaguuaaga

SEQ ID NO: 36301 - RNA, 32 nt, Human
acccgggagguggaggcugcggugagccaaga

SEQ ID NO: 36302 - RNA, 32 nt, Human
acccgggagguggaggucgcggugagccgaga

SEQ ID NO: 36303 - RNA, 32 nt, Human
acccgggagguggagguggcagugagccgaga

SEQ ID NO: 36304 - RNA, 32 nt, Human
acccgggagguggagguuacagugagccgaga

SEQ ID NO: 36305 - RNA, 32 nt, Human
acccgggagguggagguuacagugagcugaga

SEQ ID NO: 36306 - RNA, 32 nt, Human
acccgggagguggagguucuagugagccgaga

SEQ ID NO: 36307 - RNA, 32 nt, Human
acccgggagguggagguugcaaugagccaaga

SEQ ID NO: 36308 - RNA, 32 nt, Human
acccgggagguggagguugcagcaagccgaga

SEQ ID NO: 36309 - RNA, 32 nt, Human
acccgggagguggagguugcagggagccgagg

SEQ ID NO: 36310 - RNA, 32 nt, Human
acccgggagguggagguugcaguaagccgaga

SEQ ID NO: 36311 - RNA, 25 nt, Human
acccgggagguggagguugcaguga

SEQ ID NO: 36312 - RNA, 32 nt, Human
acccgggagguggagguugcagugaaccaaga

SEQ ID NO: 36313 - RNA, 32 nt, Human
acccgggagguggagguugcagugagccaaga

SEQ ID NO: 36314 - RNA, 32 nt, Human
acccgggagguggagguugcagugagccgaga

SEQ ID NO: 36315 - RNA, 32 nt, Human
acccgggagguggagguugcagugagcuaaga

SEQ ID NO: 36316 - RNA, 32 nt, Human
acccgggagguggagguugcagugagcugaga

SEQ ID NO: 36317 - RNA, 32 nt, Human
acccgggagguggagguugcagugaggugaga

SEQ ID NO: 36318 - RNA, 32 nt, Human
acccgggagguggagguugccgugagccaaga

SEQ ID NO: 36319 - RNA, 32 nt, Human
acccgggagguggagguugccgugagcugaga

SEQ ID NO: 36320 - RNA, 32 nt, Human
acccgggagguggagguugccgugaguugaga

SEQ ID NO: 36321 - RNA, 32 nt, Human
acccgggagguggagguugcgaugagcugaga

SEQ ID NO: 36322 - RNA, 32 nt, Human
acccgggagguggagguugcggugagccaaga

SEQ ID NO: 36323 - RNA, 32 nt, Human
acccgggagguggagguugcggugagcugaga

SEQ ID NO: 36324 - RNA, 32 nt, Human
acccgggagguggagguuguagcgagcugaga

SEQ ID NO: 36325 - RNA, 32 nt, Human
acccgggagguggagguuguagugagcugaga

SEQ ID NO: 36326 - RNA, 32 nt, Human
acccgggagguggagguuguggugagcugaga

SEQ ID NO: 36327 - RNA, 32 nt, Human
acccgggagguggcaguugcagggagcuaaga

SEQ ID NO: 36328 - RNA, 32 nt, Human
acccgggaggugggaguuguagugagccgaga

SEQ ID NO: 36329 - RNA, 32 nt, Human
acccgggagguguagguugcagugagccgaga

SEQ ID NO: 36330 - RNA, 32 nt, Human
acccgggaguggagcuugcaaugagccaagau

SEQ ID NO: 36331 - RNA, 32 nt, Human
acccgggaguuaaagguugcagugagccgaga

SEQ ID NO: 36332 - RNA, 32 nt, Human
acccgggaguuccagcccuaggccaggcuccg

SEQ ID NO: 36333 - RNA, 32 nt, Human
acccgggaguuggagguugcagugagccaaga

SEQ ID NO: 36334 - RNA, 32 nt, Human
acccgggaugcagagguugcagugagcugaga

SEQ ID NO: 36335 - RNA, 32 nt, Human
acccgggcacuucucagcauggccaucuucuc

SEQ ID NO: 36336 - RNA, 32 nt, Human
acccgggcagcggagguugcagugagccgaga

SEQ ID NO: 36337 - RNA, 24 nt, Human
acccgggcagggcucccacagaga

SEQ ID NO: 36338 - RNA, 32 nt, Human
acccgggcaguggccaguggccuuaagggagc

SEQ ID NO: 36339 - RNA, 32 nt, Human
acccgggcaucgugcccaggaggcgagaaagg

SEQ ID NO: 36340 - RNA, 32 nt, Human
acccgggccaugccccuggcugggcagccugg

SEQ ID NO: 36341 - RNA, 32 nt, Human
acccgggcccaagagggggccccaauggagca

SEQ ID NO: 36342 - RNA, 32 nt, Human
acccgggcccgguggaggcugcagugagacga

SEQ ID NO: 36343 - RNA, 32 nt, Human
acccgggcccucucuguuugaaccgaacccga

SEQ ID NO: 36344 - RNA, 32 nt, Human
acccgggccgcgugugagcgcacuuugcaccu

SEQ ID NO: 36345 - RNA, 32 nt, Human
acccgggcggcggaaguugcagugagccgaga

SEQ ID NO: 36346 - RNA, 32 nt, Human
acccgggcggcggagauugcagugagccgagg

SEQ ID NO: 36347 - RNA, 26 nt, Human
acccgggcgggccgccgccgccgccg

SEQ ID NO: 36348 - RNA, 32 nt, Human
acccgggcgguggagcuugcagugagccgaga

SEQ ID NO: 36349 - RNA, 32 nt, Human
acccgggcgguggagguuguagugagccaaga

SEQ ID NO: 36350 - RNA, 32 nt, Human
acccgggcuuugaagccaccuccagggccaga

SEQ ID NO: 36351 - RNA, 32 nt, Human
acccggggaaccuagaccaggucuccagaggc

SEQ ID NO: 36352 - RNA, 21 nt, Human
acccggggacccccaacuccu

SEQ ID NO: 36353 - RNA, 24 nt, Human
acccggggagccgccgccgccccg

SEQ ID NO: 36354 - RNA, 32 nt, Human
acccggggaggcugaggcaggagaauugcuug

SEQ ID NO: 36355 - RNA, 32 nt, Human
acccggggaggggccuggaggagagauagcug

SEQ ID NO: 36356 - RNA, 32 nt, Human
acccggggccuccugcagauuucggaaauugg

SEQ ID NO: 36357 - RNA, 32 nt, Human
acccgggggcagaggcugcagugagccgagau

SEQ ID NO: 36358 - RNA, 32 nt, Human
acccggggguuccagccccuagcugcucugga

SEQ ID NO: 36359 - RNA, 32 nt, Human
acccgggguuaaacagcagaggcuccaugugg

SEQ ID NO: 36360 - RNA, 32 nt, Human
acccggguggcagagguugcagugagccgaaa

SEQ ID NO: 36361 - RNA, 32 nt, Human
acccggguggcagagguugcagugagcugaga

SEQ ID NO: 36362 - RNA, 32 nt, Human
acccggguggcgcuggaaguuaucaguggcua

SEQ ID NO: 36363 - RNA, 32 nt, Human
acccggguggcggcgcuugcagugagcugagc

SEQ ID NO: 36364 - RNA, 32 nt, Human
acccgguagaggcggagguugcagugagccga

SEQ ID NO: 36365 - RNA, 32 nt, Human
acccgguaggcagagguugcagugagccgagg

SEQ ID NO: 36366 - RNA, 32 nt, Human
acccgguaggcggagcuugcagugagcugaga

SEQ ID NO: 36367 - RNA, 32 nt, Human
acccgguaggggagcuugcagugagcccagau

SEQ ID NO: 36368 - RNA, 32 nt, Human
acccgguagguggagguugcagugagccgaga

SEQ ID NO: 36369 - RNA, 32 nt, Human
acccggugcagagggagggagagccagguccg

SEQ ID NO: 36370 - RNA, 32 nt, Human
acccggugcaucuggcacguggccaggagcca

SEQ ID NO: 36371 - RNA, 32 nt, Human
acccggugccacacucacccagaagacgaaac

SEQ ID NO: 36372 - RNA, 32 nt, Human
acccgguggcauucugggggaggaguggggcc

SEQ ID NO: 36373 - RNA, 32 nt, Human
acccgguggcugcugaggcggccgagaugcuc

SEQ ID NO: 36374 - RNA, 32 nt, Human
acccgguggggagggguggggagccggagcuc

SEQ ID NO: 36375 - RNA, 19 nt, Human
acccggugguguggcccca

SEQ ID NO: 36376 - RNA, 32 nt, Human
acccggugucccaccaggcuccaggcucccac

SEQ ID NO: 36377 - RNA, 32 nt, Human
acccgguguugccaccaugcaccauggcaugc

SEQ ID NO: 36378 - RNA, 22 nt, Human
acccgguugcugcugcccaagg

SEQ ID NO: 36379 - RNA, 32 nt, Human
acccgguuucuaaucccugcucugucacuaac

SEQ ID NO: 36380 - RNA, 32 nt, Human
acccgguuuuauuuagacuuguuuucccguuu

SEQ ID NO: 36381 - RNA, 32 nt, Human
acccgguuuucccagcggcauuuccgaugaca

SEQ ID NO: 36382 - RNA, 32 nt, Human
acccguacccagcuaauuuuuguauuuuagua

SEQ ID NO: 36383 - RNA, 32 nt, Human
acccguagggagaggcggguugcgggcggcgg

SEQ ID NO: 36384 - RNA, 32 nt, Human
acccguaucugcccuccuugcugguagaagcu

SEQ ID NO: 36385 - RNA, 32 nt, Human
acccgucaaccagagcgugccuccgggccagc

SEQ ID NO: 36386 - RNA, 32 nt, Human
acccgucaauauggcggcgaucggccgcggcc

SEQ ID NO: 36387 - RNA, 32 nt, Human
acccgucccaauaaccacccacggccaggagg

SEQ ID NO: 36388 - RNA, 32 nt, Human
acccguccccacuccuuccucugcaugaccuu

SEQ ID NO: 36389 - RNA, 32 nt, Human
acccguccucaccauguuugccacaucugggg

SEQ ID NO: 36390 - RNA, 32 nt, Human
acccgucuacauugccuucuucaagggcaggu

SEQ ID NO: 36391 - RNA, 32 nt, Human
acccgucuccucccucuccuucccugggcucc

SEQ ID NO: 36392 - RNA, 32 nt, Human
acccgucuggaacucaguuuccccagcuguga

SEQ ID NO: 36393 - RNA, 32 nt, Human
acccgucugugaauguguccacucucuucugc

SEQ ID NO: 36394 - RNA, 32 nt, Human
acccgugaggcagagguugcagugaaccgaga

SEQ ID NO: 36395 - RNA, 32 nt, Human
acccgugaggcagagguugcagugagccgaga

SEQ ID NO: 36396 - RNA, 32 nt, Human
acccgugaggcggagguuguagugagccaaga

SEQ ID NO: 36397 - RNA, 32 nt, Human
acccgugcagauuaaaguaacugugaaguuuu

SEQ ID NO: 36398 - RNA, 21 nt, Human
acccgugcaugucaucacaaa

SEQ ID NO: 36399 - RNA, 32 nt, Human
acccgugccuguauauuccacgcuuugcgcac

SEQ ID NO: 36400 - RNA, 32 nt, Human
acccgugcgggauguggaggggcccggggcgc

SEQ ID NO: 36401 - RNA, 32 nt, Human
acccguggcagcccuggcggacgcaggagcga

SEQ ID NO: 36402 - RNA, 32 nt, Human
acccgugggauggugcccagggguugccuugg

SEQ ID NO: 36403 - RNA, 32 nt, Human
acccgugggccuggggugugccugcgucuagc

SEQ ID NO: 36404 - RNA, 32 nt, Human
acccguggugcugcugccaugcggcgcuucug

SEQ ID NO: 36405 - RNA, 32 nt, Human
acccguggugggcaaauguccaggccugggcu

SEQ ID NO: 36406 - RNA, 32 nt, Human
acccguguauguuaugaaaacaugguuugaua

SEQ ID NO: 36407 - RNA, 32 nt, Human
acccguguccuagagucggaaagagaagcuaa

SEQ ID NO: 36408 - RNA, 24 nt, Human
acccgugugccccuucccaccaua

SEQ ID NO: 36409 - RNA, 32 nt, Human
acccguguggcagagguugcggugaguguaga

SEQ ID NO: 36410 - RNA, 32 nt, Human
acccguuccaucccgggcuaucccaguucccc

SEQ ID NO: 36411 - RNA, 21 nt, Human
acccguugcccaggcuggagg

SEQ ID NO: 36412 - RNA, 32 nt, Human
acccguuuggggucucaucucuacuucuaggg

SEQ ID NO: 36413 - RNA, 32 nt, Human
acccuaaagauuuccccaguacagucagcucu

SEQ ID NO: 36414 - RNA, 32 nt, Human
acccuaaaggcagagguugcagugagccgaga

SEQ ID NO: 36415 - RNA, 32 nt, Human
acccuaacccacccucuuuaccaaccccuuuc

SEQ ID NO: 36416 - RNA, 23 nt, Human
acccuaacccugauacuaacccu

SEQ ID NO: 36417 - RNA, 32 nt, Human
acccuaagaucagcuagacucucugccuuguu

SEQ ID NO: 36418 - RNA, 21 nt, Human
acccuaagccagaaccacuca

SEQ ID NO: 36419 - RNA, 32 nt, Human
acccuaagcgcccgcucacuccugccuuuauu

SEQ ID NO: 36420 - RNA, 24 nt, Human
acccuaaugagcaccuccgggaaa

SEQ ID NO: 36421 - RNA, 32 nt, Human
acccuaauuaacauaaagaccauucaucagcg

SEQ ID NO: 36422 - RNA, 32 nt, Human
acccuacagauggggcuuuggggguuugcucc

SEQ ID NO: 36423 - RNA, 24 nt, Human
acccuacaucacuccauucugccc

SEQ ID NO: 36424 - RNA, 32 nt, Human
acccuacaugucucuucucugcacuccagggc

SEQ ID NO: 36425 - RNA, 32 nt, Human
acccuaccaggcucccugucucggcucuccuu

SEQ ID NO: 36426 - RNA, 32 nt, Human
acccuacccagccugcugccucagcacagcca

SEQ ID NO: 36427 - RNA, 20 nt, Human
acccuaccccaugccuuggu

SEQ ID NO: 36428 - RNA, 32 nt, Human
acccuaccuccagggcauagucagucugggcu

SEQ ID NO: 36429 - RNA, 32 nt, Human
acccuaccugcccugccugccugcugccccuc

SEQ ID NO: 36430 - RNA, 32 nt, Human
acccuacgcugccccucacacccuaugcucag

SEQ ID NO: 36431 - RNA, 32 nt, Human
acccuacucccugugccuccagccucgacuag

SEQ ID NO: 36432 - RNA, 32 nt, Human
acccuacucuacuggauucaaggccaguaaau

SEQ ID NO: 36433 - RNA, 32 nt, Human
acccuacucucugugccuccagccucgacuag

SEQ ID NO: 36434 - RNA, 32 nt, Human
acccuacuuggcaugaaaaaggaagcucaguu

SEQ ID NO: 36435 - RNA, 32 nt, Human
acccuacuuucagcagggcuuugaggcuggga

SEQ ID NO: 36436 - RNA, 21 nt, Human
acccuagagaacugccuuugu

SEQ ID NO: 36437 - RNA, 32 nt, Human
acccuagagccauaccuucacugacaucucau

SEQ ID NO: 36438 - RNA, 32 nt, Human
acccuagagccugggaccuggccauccucugc

SEQ ID NO: 36439 - RNA, 32 nt, Human
acccuagaggcggaguuugcagugagccgaga

SEQ ID NO: 36440 - RNA, 23 nt, Human
acccuagaugagcuguccugcuc

SEQ ID NO: 36441 - RNA, 24 nt, Human
acccuagaugauuucauccugccc

SEQ ID NO: 36442 - RNA, 32 nt, Human
acccuagaugauuucauccugccccucacuuc

SEQ ID NO: 36443 - RNA, 17 nt, Human
acccuagccccuccuua

SEQ ID NO: 36444 - RNA, 32 nt, Human
acccuagccugaggcuccacuggaagaucucg

SEQ ID NO: 36445 - RNA, 32 nt, Human
acccuagcucacugcaaccuccaacugcuggg

SEQ ID NO: 36446 - RNA, 32 nt, Human
acccuagcugugguaggaaguggcccucagag

SEQ ID NO: 36447 - RNA, 26 nt, Human
acccuagcuuggguggcagagcaaga

SEQ ID NO: 36448 - RNA, 32 nt, Human
acccuagcuuuucauuaucuacaaucaauagu

SEQ ID NO: 36449 - RNA, 32 nt, Human
acccuaggcuauacaagucucagucuagggga

SEQ ID NO: 36450 - RNA, 32 nt, Human
acccuaggcuuccuccuggaugugauggggau

SEQ ID NO: 36451 - RNA, 32 nt, Human
acccuaggcuuuuccccucugugacuggcaga

SEQ ID NO: 36452 - RNA, 23 nt, Human
acccuaggucucccuuccaggcc

SEQ ID NO: 36453 - RNA, 32 nt, Human
acccuauaaaggagggagcucguggcgaggca

SEQ ID NO: 36454 - RNA, 32 nt, Human
acccuauaaccucaggccuuggcauugagucc

SEQ ID NO: 36455 - RNA, 32 nt, Human
acccuauacucucagucuccccaacccacccc

SEQ ID NO: 36456 - RNA, 32 nt, Human
acccuauacucuugccuuggugcugucgcaga

SEQ ID NO: 36457 - RNA, 32 nt, Human
acccuauaugcugcugccucaggcagagcccu

SEQ ID NO: 36458 - RNA, 32 nt, Human
acccuauccuacacuacuaggaacuugcacag

SEQ ID NO: 36459 - RNA, 32 nt, Human
acccuaugauccagcauuuccacuucugggug

SEQ ID NO: 36460 - RNA, 20 nt, Human
acccuauucaauaaauggug

SEQ ID NO: 36461 - RNA, 32 nt, Human
acccuauucucagggaagauggaauuuaguuu

SEQ ID NO: 36462 - RNA, 32 nt, Human
acccuauugcccaggcuggagugcaauggcgu

SEQ ID NO: 36463 - RNA, 32 nt, Human
acccuauuguaagcggagaaacuuagugugcg

SEQ ID NO: 36464 - RNA, 32 nt, Human
acccuauuguccugccacaucucccucuccga

SEQ ID NO: 36465 - RNA, 32 nt, Human
acccuauuuuucccuguucccuggugccacag

SEQ ID NO: 36466 - RNA, 32 nt, Human
acccucaaaagcugcaccacagccuggagaau

SEQ ID NO: 36467 - RNA, 32 nt, Human
acccucaaacacccagcucagccacacacaac

SEQ ID NO: 36468 - RNA, 22 nt, Human
acccucaacagaacuuucaucu

SEQ ID NO: 36469 - RNA, 32 nt, Human
acccucaacccggcuacccuguugccuguaga

SEQ ID NO: 36470 - RNA, 32 nt, Human
acccucaagaaacccccagugccuuguaugaa

SEQ ID NO: 36471 - RNA, 32 nt, Human
acccucaagaggaguuagaaaagagguccuug

SEQ ID NO: 36472 - RNA, 32 nt, Human
acccucaaguguaaccaucacaagauaaggcc

SEQ ID NO: 36473 - RNA, 18 nt, Human
acccucaaugaacuacca

SEQ ID NO: 36474 - RNA, 32 nt, Human
acccucacaccgcugcuccucuggaccucugu

SEQ ID NO: 36475 - RNA, 32 nt, Human
acccucacauccccauccccuucuagccuuuc

SEQ ID NO: 36476 - RNA, 32 nt, Human
acccucacaucucccuuccugaauuucuuuag

SEQ ID NO: 36477 - RNA, 32 nt, Human
acccucacaugccucccccaucccugcuggua

SEQ ID NO: 36478 - RNA, 32 nt, Human
acccucaccaucuacaaaauggagauuaauaa

SEQ ID NO: 36479 - RNA, 32 nt, Human
acccucacccuccacccuuugcugcugaccuc

SEQ ID NO: 36480 - RNA, 20 nt, Human
acccucaccuaccccuccca

SEQ ID NO: 36481 - RNA, 32 nt, Human
acccucacggagacuugccagcaauggcagaa

SEQ ID NO: 36482 - RNA, 32 nt, Human
acccucacucagccuuuucccuccaggcaucu

SEQ ID NO: 36483 - RNA, 32 nt, Human
acccucacugcccucaaggacaacagcagggu

SEQ ID NO: 36484 - RNA, 32 nt, Human
acccucacugggugggacugccagcggagagu

SEQ ID NO: 36485 - RNA, 32 nt, Human
acccucacuguccuccagcccaggaugggcca

SEQ ID NO: 36486 - RNA, 32 nt, Human
acccucacuucccccuucccuaccucuuucuc

SEQ ID NO: 36487 - RNA, 32 nt, Human
acccucacuucuuuaccaaaugcauuuccaaa

SEQ ID NO: 36488 - RNA, 32 nt, Human
acccucagaacugaagagguucagagaacuuu

SEQ ID NO: 36489 - RNA, 32 nt, Human
acccucagaccccauucucucuguucguccuu

SEQ ID NO: 36490 - RNA, 32 nt, Human
acccucagaccugccccggggccagguggaga

SEQ ID NO: 36491 - RNA, 19 nt, Human
acccucagcaccccuucca

SEQ ID NO: 36492 - RNA, 32 nt, Human
acccucagcugcuggaggccacccuggcccag

SEQ ID NO: 36493 - RNA, 19 nt, Human
acccucaggccacccucca

SEQ ID NO: 36494 - RNA, 27 nt, Human
acccucaguaaauaguggugcauuugu

SEQ ID NO: 36495 - RNA, 32 nt, Human
acccucaguagaauuggauuuccaugucagcc

SEQ ID NO: 36496 - RNA, 32 nt, Human
acccucagucuucucaugaauaaauuccuuca

SEQ ID NO: 36497 - RNA, 32 nt, Human
acccucaguuuucaccaagauguuguaaggag

SEQ ID NO: 36498 - RNA, 32 nt, Human
acccucauccuagccucgugacuucuggucua

SEQ ID NO: 36499 - RNA, 32 nt, Human
acccucaucuggagagaggcaagaacagggca

SEQ ID NO: 36500 - RNA, 32 nt, Human
acccucaugccuggaccccugagagcuucuga

SEQ ID NO: 36501 - RNA, 32 nt, Human
acccucauuccucugguggggagcugccugca

SEQ ID NO: 36502 - RNA, 17 nt, Human
acccuccaaagcccucc

SEQ ID NO: 36503 - RNA, 24 nt, Human
acccuccaaguccuaaccccucca

SEQ ID NO: 36504 - RNA, 21 nt, Human
acccuccacacacuucuucca

SEQ ID NO: 36505 - RNA, 17 nt, Human
acccuccacaccuccca

SEQ ID NO: 36506 - RNA, 18 nt, Human
acccuccacagccuccca

SEQ ID NO: 36507 - RNA, 32 nt, Human
acccuccacaguacuccagaaaggacuguccu

SEQ ID NO: 36508 - RNA, 20 nt, Human
acccuccaccccagcugcca

SEQ ID NO: 36509 - RNA, 16 nt, Human
acccuccaccccgucc

SEQ ID NO: 36510 - RNA, 20 nt, Human
acccuccacccuguccccca

SEQ ID NO: 36511 - RNA, 19 nt, Human
acccuccacccuucucccc

SEQ ID NO: 36512 - RNA, 17 nt, Human
acccuccacccuuuucc

SEQ ID NO: 36513 - RNA, 20 nt, Human
acccuccaccucccaccucc

SEQ ID NO: 36514 - RNA, 18 nt, Human
acccuccaccuccuugca

SEQ ID NO: 36515 - RNA, 15 nt, Human
acccuccaccucuuc

SEQ ID NO: 36516 - RNA, 20 nt, Human
acccuccaccuuccccucca

SEQ ID NO: 36517 - RNA, 21 nt, Human
acccuccacucuccucuucca

SEQ ID NO: 36518 - RNA, 32 nt, Human
acccuccacuuccuccuccuguuuggcuucug

SEQ ID NO: 36519 - RNA, 17 nt, Human
acccuccagaccuccca

SEQ ID NO: 36520 - RNA, 32 nt, Human
acccuccagagccaggaggccaaggcugugaa

SEQ ID NO: 36521 - RNA, 19 nt, Human
acccuccagcccccuccca

SEQ ID NO: 36522 - RNA, 32 nt, Human
acccuccagcccugguccccagccccugcuac

SEQ ID NO: 36523 - RNA, 32 nt, Human
acccuccagcuccugacucugccuauuguucc

SEQ ID NO: 36524 - RNA, 32 nt, Human
acccuccaggagaccccagugucugugguuuc

SEQ ID NO: 36525 - RNA, 32 nt, Human
acccuccaggcuucggggaaauguggguuugc

SEQ ID NO: 36526 - RNA, 32 nt, Human
acccuccagguguccuucgcacccaacagugc

SEQ ID NO: 36527 - RNA, 20 nt, Human
acccuccaguccccugccca

SEQ ID NO: 36528 - RNA, 32 nt, Human
acccuccagucgugcccugcaggccuggccca

SEQ ID NO: 36529 - RNA, 20 nt, Human
acccuccaucaaguccucca

SEQ ID NO: 36530 - RNA, 19 nt, Human
acccuccauccacuuccca

SEQ ID NO: 36531 - RNA, 18 nt, Human
acccuccauccccacccu

SEQ ID NO: 36532 - RNA, 21 nt, Human
acccuccauccccacccucca

SEQ ID NO: 36533 - RNA, 21 nt, Human
acccuccaucccucaccuucc

SEQ ID NO: 36534 - RNA, 21 nt, Human
acccuccaucuaccccuucca

SEQ ID NO: 36535 - RNA, 19 nt, Human
acccuccaucuacuggccc

SEQ ID NO: 36536 - RNA, 19 nt, Human
acccuccaugccccugcca

SEQ ID NO: 36537 - RNA, 20 nt, Human
acccuccauuucucccccuc

SEQ ID NO: 36538 - RNA, 32 nt, Human
acccuccauuucucccccucacccaugcugag

SEQ ID NO: 36539 - RNA, 32 nt, Human
acccucccaaaaugcugggauuacaggcguaa

SEQ ID NO: 36540 - RNA, 32 nt, Human
acccucccaaagugcugggauuacaggcauca

SEQ ID NO: 36541 - RNA, 32 nt, Human
acccucccaaagugcugggauuacaggcauga

SEQ ID NO: 36542 - RNA, 32 nt, Human
acccucccaaagugcugggauuauaggcauga

SEQ ID NO: 36543 - RNA, 21 nt, Human
acccucccaagcaccauguca

SEQ ID NO: 36544 - RNA, 32 nt, Human
acccucccaaguagcugggacuacaggcgccu

SEQ ID NO: 36545 - RNA, 32 nt, Human
acccucccaaguagcugggauuacaggugccc

SEQ ID NO: 36546 - RNA, 20 nt, Human
acccucccacccaccuucca

SEQ ID NO: 36547 - RNA, 32 nt, Human
acccucccacucccaucuccuuaccucuggaa

SEQ ID NO: 36548 - RNA, 32 nt, Human
acccucccaucgugcaaaauuacccugcccag

SEQ ID NO: 36549 - RNA, 32 nt, Human
acccucccauguagcugggauuacagcugccu

SEQ ID NO: 36550 - RNA, 32 nt, Human
acccuccccaagugcuggaauuacaggcguga

SEQ ID NO: 36551 - RNA, 32 nt, Human
acccuccccaccuagcccuccaaccaaggcua

SEQ ID NO: 36552 - RNA, 19 nt, Human
acccuccccacucccucca

SEQ ID NO: 36553 - RNA, 32 nt, Human
acccuccccaggaaggaggaggguguucagga

SEQ ID NO: 36554 - RNA, 32 nt, Human
acccuccccaucuuugcugagcucucaguucc

SEQ ID NO: 36555 - RNA, 32 nt, Human
acccucccccacuugccaccaucccccaucac

SEQ ID NO: 36556 - RNA, 32 nt, Human
acccucccccagaagcucacaaaggaaaacgg

SEQ ID NO: 36557 - RNA, 32 nt, Human
acccucccccagacacagcccaggucccuccg

SEQ ID NO: 36558 - RNA, 19 nt, Human
acccuccccccaccuucca

SEQ ID NO: 36559 - RNA, 19 nt, Human
acccuccccgcacccccca

SEQ ID NO: 36560 - RNA, 32 nt, Human
acccuccccgcugugguuggcagccacccacc

SEQ ID NO: 36561 - RNA, 32 nt, Human
acccuccccguggcucaggucuccccuauccc

SEQ ID NO: 36562 - RNA, 32 nt, Human
acccuccccuagugggcucugggguuccacca

SEQ ID NO: 36563 - RNA, 19 nt, Human
acccuccccucccccuucc

SEQ ID NO: 36564 - RNA, 32 nt, Human
acccuccccuccggcagccucucccauggcca

SEQ ID NO: 36565 - RNA, 32 nt, Human
acccuccccugccggccugcgccagcuggacc

SEQ ID NO: 36566 - RNA, 32 nt, Human
acccuccccugccuccgaggccugccugcuac

SEQ ID NO: 36567 - RNA, 32 nt, Human
acccuccccugccuccgaggccugccugcucc

SEQ ID NO: 36568 - RNA, 32 nt, Human
acccucccgaguagcugggacuacaggcgugg

SEQ ID NO: 36569 - RNA, 32 nt, Human
acccucccgaguagcugggacuacaggugccu

SEQ ID NO: 36570 - RNA, 32 nt, Human
acccucccgaguagcugggauuacaggcacac

SEQ ID NO: 36571 - RNA, 32 nt, Human
acccucccgaguagcugggauuacaggcgccc

SEQ ID NO: 36572 - RNA, 32 nt, Human
acccucccgagucacugggauuacaggcgccc

SEQ ID NO: 36573 - RNA, 32 nt, Human
acccucccuagagggcccuugucugagaaacc

SEQ ID NO: 36574 - RNA, 32 nt, Human
acccucccucaaggaauccugucagaagaugu

SEQ ID NO: 36575 - RNA, 32 nt, Human
acccucccucccccauccuccccaaaauagcc

SEQ ID NO: 36576 - RNA, 32 nt, Human
acccucccuccccgcuucccugccucacccuc

SEQ ID NO: 36577 - RNA, 32 nt, Human
acccucccuccccucccggcuccccggccaga

SEQ ID NO: 36578 - RNA, 20 nt, Human
acccucccuccuccaaggaa

SEQ ID NO: 36579 - RNA, 32 nt, Human
acccucccugcuccaagugcaccaggaugcaa

SEQ ID NO: 36580 - RNA, 32 nt, Human
acccucccuguucaucccauguuagcuccaaa

SEQ ID NO: 36581 - RNA, 32 nt, Human
acccucccuguuuaaagaaggaaucugagaug

SEQ ID NO: 36582 - RNA, 32 nt, Human
acccucccuucgccacccuccacccacccacc

SEQ ID NO: 36583 - RNA, 32 nt, Human
acccucccuuucucuuuccucauugccuucuc

SEQ ID NO: 36584 - RNA, 19 nt, Human
acccuccgaacucccccca

SEQ ID NO: 36585 - RNA, 21 nt, Human
acccuccgccccacccccucc

SEQ ID NO: 36586 - RNA, 32 nt, Human
acccuccgccccacuccagccaguguggggag

SEQ ID NO: 36587 - RNA, 23 nt, Human
acccuccgcugccgccgccgccg

SEQ ID NO: 36588 - RNA, 32 nt, Human
acccuccggcaucugugacucuaccucaagga

SEQ ID NO: 36589 - RNA, 32 nt, Human
acccuccuaucccgggaggagccucagguccu

SEQ ID NO: 36590 - RNA, 32 nt, Human
acccuccucagaggcccggggaagggaagagc

SEQ ID NO: 36591 - RNA, 32 nt, Human
acccuccucaugcccacccagcaagggacaga

SEQ ID NO: 36592 - RNA, 32 nt, Human
acccuccuccacccucuacccucaaguagucc

SEQ ID NO: 36593 - RNA, 20 nt, Human
acccuccuccccuccuucca

SEQ ID NO: 36594 - RNA, 24 nt, Human
acccuccucccucugcccccucca

SEQ ID NO: 36595 - RNA, 32 nt, Human
acccuccuccugccacccuuguggacuaagac

SEQ ID NO: 36596 - RNA, 32 nt, Human
acccuccuccugccacccuuguggacuaggac

SEQ ID NO: 36597 - RNA, 32 nt, Human
acccuccuccuugccuguaucuugacagcauc

SEQ ID NO: 36598 - RNA, 32 nt, Human
acccuccuccuuucuucuccccacauccgcac

SEQ ID NO: 36599 - RNA, 32 nt, Human
acccuccucucacccuccacccuccaggagac

SEQ ID NO: 36600 - RNA, 32 nt, Human
acccuccucugccucccaaagugcugugauua

SEQ ID NO: 36601 - RNA, 32 nt, Human
acccuccucuuggaauuacaagcccugggguu

SEQ ID NO: 36602 - RNA, 32 nt, Human
acccuccugaguagaugggacuacagguacgu

SEQ ID NO: 36603 - RNA, 32 nt, Human
acccuccugaguagcugggacuacaggugugc

SEQ ID NO: 36604 - RNA, 32 nt, Human
acccuccugcagcagaacuacagaccugccau

SEQ ID NO: 36605 - RNA, 32 nt, Human
acccuccugccccaucuccaucccuucuuuua

SEQ ID NO: 36606 - RNA, 19 nt, Human
acccuccugcccccucucc

SEQ ID NO: 36607 - RNA, 32 nt, Human
acccuccugccucacagcuuuaucuuuguauu

SEQ ID NO: 36608 - RNA, 32 nt, Human
acccuccugccuccucuccaggcccuuguucg

SEQ ID NO: 36609 - RNA, 32 nt, Human
acccuccugccugggccgcagccgccgccgcg

SEQ ID NO: 36610 - RNA, 32 nt, Human
acccuccugcugagcugccccugcugcuuaag

SEQ ID NO: 36611 - RNA, 24 nt, Human
acccuccuggcuaacacagugaaa

SEQ ID NO: 36612 - RNA, 32 nt, Human
acccuccugggcugccaggauuuagcagggag

SEQ ID NO: 36613 - RNA, 32 nt, Human
acccuccuguaccuccggccucccagcggccc

SEQ ID NO: 36614 - RNA, 32 nt, Human
acccuccuguccugacaggcucagcucugcau

SEQ ID NO: 36615 - RNA, 22 nt, Human
acccuccugugacaugguccca

SEQ ID NO: 36616 - RNA, 32 nt, Human
acccuccuuauuucuguuacuacuugucugug

SEQ ID NO: 36617 - RNA, 32 nt, Human
acccuccuucacguucucuuguggaaucaugu

SEQ ID NO: 36618 - RNA, 32 nt, Human
acccuccuucuauuuucccuacccugcaacuu

SEQ ID NO: 36619 - RNA, 32 nt, Human
acccucgcaaacuguggccuggcggaaauccu

SEQ ID NO: 36620 - RNA, 32 nt, Human
acccucgcagcccagaggcgcccagaggaagu

SEQ ID NO: 36621 - RNA, 32 nt, Human
acccucgcagugaguguuacaguucuuaaaga

SEQ ID NO: 36622 - RNA, 32 nt, Human
acccucgcagugaguguuacaguucuuaaagg

SEQ ID NO: 36623 - RNA, 32 nt, Human
acccucgccugccucggggccaguacauaccg

SEQ ID NO: 36624 - RNA, 25 nt, Human
acccucgcugcaccuaccccuccca

SEQ ID NO: 36625 - RNA, 32 nt, Human
acccucgcuuucuccggcuuccucuggcccag

SEQ ID NO: 36626 - RNA, 32 nt, Human
acccucggacucaggcaggacauggcaggaug

SEQ ID NO: 36627 - RNA, 32 nt, Human
acccucggagaugcugcugcagugagugguuc

SEQ ID NO: 36628 - RNA, 32 nt, Human
acccucggauuccuuccuuggcucucggggcc

SEQ ID NO: 36629 - RNA, 23 nt, Human
acccucggcccaaagcucccaga

SEQ ID NO: 36630 - RNA, 32 nt, Human
acccucggcccagugggaggccagcuuggcuc

SEQ ID NO: 36631 - RNA, 32 nt, Human
acccucggcccucccugucacugcagggcagc

SEQ ID NO: 36632 - RNA, 32 nt, Human
acccucgggcagccccuccagcuuccugggag

SEQ ID NO: 36633 - RNA, 32 nt, Human
acccucgggugagagagcagcccaggggcacg

SEQ ID NO: 36634 - RNA, 32 nt, Human
acccucggucaccccaaccucuggcucugagc

SEQ ID NO: 36635 - RNA, 18 nt, Human
acccucgguccccuucca

SEQ ID NO: 36636 - RNA, 32 nt, Human
acccucggugggcagcgcacuccagucuuccc

SEQ ID NO: 36637 - RNA, 32 nt, Human
acccucguagucaauaaggucuugccacauuu

SEQ ID NO: 36638 - RNA, 32 nt, Human
acccucguguccucccuucauccugcggggcu

SEQ ID NO: 36639 - RNA, 20 nt, Human
acccucuaacccccacucca

SEQ ID NO: 36640 - RNA, 32 nt, Human
acccucuacaggagaagugcacccuagggccu

SEQ ID NO: 36641 - RNA, 32 nt, Human
acccucuacuaugccuucuauguggcugugcu

SEQ ID NO: 36642 - RNA, 20 nt, Human
acccucuacugacccuccca

SEQ ID NO: 36643 - RNA, 32 nt, Human
acccucuagggcagugccugcccucagcucuc

SEQ ID NO: 36644 - RNA, 32 nt, Human
acccucuaucagcaguggcccaggaaggaggu

SEQ ID NO: 36645 - RNA, 32 nt, Human
acccucucaagugcccucuccgagcugguagg

SEQ ID NO: 36646 - RNA, 20 nt, Human
acccucucaccgugguccca

SEQ ID NO: 36647 - RNA, 32 nt, Human
acccucuccagccucagaccugagacagggcu

SEQ ID NO: 36648 - RNA, 32 nt, Human
acccucucccccuuaucuaucuccuucucggc

SEQ ID NO: 36649 - RNA, 32 nt, Human
acccucucccuccuaacccucuccuugccuga

SEQ ID NO: 36650 - RNA, 32 nt, Human
acccucucccuggcugccucaggcuucucuua

SEQ ID NO: 36651 - RNA, 20 nt, Human
acccucuccuagcacuguca

SEQ ID NO: 36652 - RNA, 32 nt, Human
acccucuccuccugaaacuuuagucacuccug

SEQ ID NO: 36653 - RNA, 32 nt, Human
acccucuccucugaccuccacucacucauccc

SEQ ID NO: 36654 - RNA, 32 nt, Human
acccucuccucuuccuucuccuuucucccauu

SEQ ID NO: 36655 - RNA, 21 nt, Human
acccucuccuugaugcagcuu

SEQ ID NO: 36656 - RNA, 32 nt, Human
acccucucucagacuguuugguuuuugagcau

SEQ ID NO: 36657 - RNA, 32 nt, Human
acccucucuccaggacuugucagcuggugguu

SEQ ID NO: 36658 - RNA, 32 nt, Human
acccucucuccucggaugaccugccuccuaau

SEQ ID NO: 36659 - RNA, 32 nt, Human
acccucucuccucuuuguucucucauuguugu

SEQ ID NO: 36660 - RNA, 32 nt, Human
acccucucugacauugggugggagacucuggg

SEQ ID NO: 36661 - RNA, 32 nt, Human
acccucugaagccacagccagagcuguauguu

SEQ ID NO: 36662 - RNA, 32 nt, Human
acccucugaccuuucaguuuuccauagcagcc

SEQ ID NO: 36663 - RNA, 18 nt, Human
acccucugacucccucca

SEQ ID NO: 36664 - RNA, 32 nt, Human
acccucugagauaacuguuuucaucuacagaa

SEQ ID NO: 36665 - RNA, 19 nt, Human
acccucugaucucccucca

SEQ ID NO: 36666 - RNA, 32 nt, Human
acccucugcccaacucuggcagucucuccugg

SEQ ID NO: 36667 - RNA, 32 nt, Human
acccucugcccuucuaagucauagacuaggua

SEQ ID NO: 36668 - RNA, 18 nt, Human
acccucugccgacuacca

SEQ ID NO: 36669 - RNA, 32 nt, Human
acccucuggacaggacaugcugggcaggggac

SEQ ID NO: 36670 - RNA, 32 nt, Human
acccucuggaugccuuucuugucacuuaguau

SEQ ID NO: 36671 - RNA, 32 nt, Human
acccucuggccuaggcuggcuccagugugcca

SEQ ID NO: 36672 - RNA, 23 nt, Human
acccucugggaggccaaggcagg

SEQ ID NO: 36673 - RNA, 23 nt, Human
acccucuggggacaagagucuga

SEQ ID NO: 36674 - RNA, 32 nt, Human
acccucuggggcaggaggggcuugggcuuccc

SEQ ID NO: 36675 - RNA, 18 nt, Human
acccucuggggccacgug

SEQ ID NO: 36676 - RNA, 32 nt, Human
acccucuguccuggcuuugaaagagaaacugg

SEQ ID NO: 36677 - RNA, 18 nt, Human
acccucugugccccuccc

SEQ ID NO: 36678 - RNA, 32 nt, Human
acccucuguggacacccacacucugcagggac

SEQ ID NO: 36679 - RNA, 23 nt, Human
acccucuuccuacuggucucucu

SEQ ID NO: 36680 - RNA, 32 nt, Human
acccucuuccuucucuuugaccccugugacuc

SEQ ID NO: 36681 - RNA, 24 nt, Human
acccucuucgccugguacagcccu

SEQ ID NO: 36682 - RNA, 32 nt, Human
acccucuugucccuaccagcagcuucucuugc

SEQ ID NO: 36683 - RNA, 32 nt, Human
acccucuuuauaacuuccuccccaccggccuc

SEQ ID NO: 36684 - RNA, 32 nt, Human
acccucuuuccaggaccucaguaggcaccguu

SEQ ID NO: 36685 - RNA, 18 nt, Human
acccucuuuccccuucua

SEQ ID NO: 36686 - RNA, 20 nt, Human
acccucuuuggauggugcca

SEQ ID NO: 36687 - RNA, 32 nt, Human
acccugaaacacagcaaaccuucauccggcug

SEQ ID NO: 36688 - RNA, 32 nt, Human
acccugaaaccagcuuuauccauagcuucugc

SEQ ID NO: 36689 - RNA, 32 nt, Human
acccugaacaaaucuugggugggugaaggccu

SEQ ID NO: 36690 - RNA, 32 nt, Human
acccugaagaggagggggagggugagccgggc

SEQ ID NO: 36691 - RNA, 32 nt, Human
acccugaaggcugaggcaggagcauugcuuga

SEQ ID NO: 36692 - RNA, 32 nt, Human
acccugaauuaaauagucacaugguaacaauu

SEQ ID NO: 36693 - RNA, 32 nt, Human
acccugaauuccucacaccuaacccugauagu

SEQ ID NO: 36694 - RNA, 32 nt, Human
acccugacaaguguccaugaugcugggcccug

SEQ ID NO: 36695 - RNA, 32 nt, Human
acccugacacagccccagaccccacaaagccu

SEQ ID NO: 36696 - RNA, 21 nt, Human
acccugaccaacaguccagcc

SEQ ID NO: 36697 - RNA, 32 nt, Human
acccugaccaacaugaaaccccgucucuacua

SEQ ID NO: 36698 - RNA, 26 nt, Human
acccugaccacugaguaauacagccc

SEQ ID NO: 36699 - RNA, 21 nt, Human
acccugaccagaucaucagcc

SEQ ID NO: 36700 - RNA, 25 nt, Human
acccugaccccugacgcauagcccu

SEQ ID NO: 36701 - RNA, 32 nt, Human
acccugacccucuccagccucagaccugagac

SEQ ID NO: 36702 - RNA, 24 nt, Human
acccugacccugaggcauagcccu

SEQ ID NO: 36703 - RNA, 23 nt, Human
acccugaccguguacauagcccu

SEQ ID NO: 36704 - RNA, 22 nt, Human
acccugacguugugauacgccc

SEQ ID NO: 36705 - RNA, 32 nt, Human
acccugacucuuccagccuccauguccagacc

SEQ ID NO: 36706 - RNA, 32 nt, Human
acccugagaacacacacagacacacaacacac

SEQ ID NO: 36707 - RNA, 32 nt, Human
acccugagaacagugcucuguguaugauaagu

SEQ ID NO: 36708 - RNA, 26 nt, Human
acccugagaaguggcugguacaaccc

SEQ ID NO: 36709 - RNA, 17 nt, Human
acccugagaccaugagu

SEQ ID NO: 36710 - RNA, 32 nt, Human
acccugagagaaggguugagaagaaucaucuc

SEQ ID NO: 36711 - RNA, 32 nt, Human
acccugagagaauccagcagauuauuaaaaga

SEQ ID NO: 36712 - RNA, 32 nt, Human
acccugagaggcagauuuuugucuuacaucuc

SEQ ID NO: 36713 - RNA, 32 nt, Human
acccugagagggcgguggagguggugaggagg

SEQ ID NO: 36714 - RNA, 17 nt, Human
acccugagcagaaagag

SEQ ID NO: 36715 - RNA, 32 nt, Human
acccugagcagcccauguacauggaagaucuu

SEQ ID NO: 36716 - RNA, 32 nt, Human
acccugagcaguuccuggaggcugcggccacc

SEQ ID NO: 36717 - RNA, 32 nt, Human
acccugagccugacgagggugaggagugacgg

SEQ ID NO: 36718 - RNA, 32 nt, Human
acccugagcgccagacaccaugaaccuuccuu

SEQ ID NO: 36719 - RNA, 32 nt, Human
acccugaggaagaggaacucuacacuucucuc

SEQ ID NO: 36720 - RNA, 32 nt, Human
acccugaggcggagguuucagaguagaaggug

SEQ ID NO: 36721 - RNA, 32 nt, Human
acccugagggaugugaggccagacagcuccuu

SEQ ID NO: 36722 - RNA, 32 nt, Human
acccugagggccugccgggcugccuuugcccc

SEQ ID NO: 36723 - RNA, 32 nt, Human
acccugagggccugugccugggugagaugucu

SEQ ID NO: 36724 - RNA, 32 nt, Human
acccugaucucauggcugucucuccuuucauu

SEQ ID NO: 36725 - RNA, 23 nt, Human
acccugaugaagacaaagccagg

SEQ ID NO: 36726 - RNA, 32 nt, Human
acccugaugagaccuuaguguucuccaggcuc

SEQ ID NO: 36727 - RNA, 32 nt, Human
acccugaugccaccccuuaccagccggguaac

SEQ ID NO: 36728 - RNA, 32 nt, Human
acccugauuccguccagcaccugcggaguugg

SEQ ID NO: 36729 - RNA, 32 nt, Human
acccugauuccucuaucucccccagcccuagg

SEQ ID NO: 36730 - RNA, 32 nt, Human
acccugauucggugccuuucuguuuaccagcu

SEQ ID NO: 36731 - RNA, 32 nt, Human
acccugauugaaugugugaugugaacugacuu

SEQ ID NO: 36732 - RNA, 23 nt, Human
acccugauuuaggagaagccagg

SEQ ID NO: 36733 - RNA, 32 nt, Human
acccugauuucccucacuucuugcucauuccu

SEQ ID NO: 36734 - RNA, 24 nt, Human
acccugcaaaagagacagguccuc

SEQ ID NO: 36735 - RNA, 32 nt, Human
acccugcaaagccacagggguggagcugccaa

SEQ ID NO: 36736 - RNA, 32 nt, Human
acccugcaaagccacagguggggagcugccca

SEQ ID NO: 36737 - RNA, 21 nt, Human
acccugcaagagaggccuucu

SEQ ID NO: 36738 - RNA, 32 nt, Human
acccugcaagcuguuuccacaucagaacuccc

SEQ ID NO: 36739 - RNA, 32 nt, Human
acccugcaagggaggagccaggagcaagcauu

SEQ ID NO: 36740 - RNA, 32 nt, Human
acccugcacaaagccucagccuggugaaaaca

SEQ ID NO: 36741 - RNA, 32 nt, Human
acccugcacucacccacagcagcuccauccac

SEQ ID NO: 36742 - RNA, 32 nt, Human
acccugcacugaggccggccaggucucggggc

SEQ ID NO: 36743 - RNA, 32 nt, Human
acccugcagcgggccagcuauggugggaagcc

SEQ ID NO: 36744 - RNA, 32 nt, Human
acccugcagcuccagccuucuccauacuucaa

SEQ ID NO: 36745 - RNA, 32 nt, Human
acccugcagcuccucaaaccagccuguauuga

SEQ ID NO: 36746 - RNA, 32 nt, Human
acccugcaggccaacguggcccagcuggaggg

SEQ ID NO: 36747 - RNA, 32 nt, Human
acccugcaggccaggccagcuuccccucacuu

SEQ ID NO: 36748 - RNA, 20 nt, Human
acccugcagucuucauccuc

SEQ ID NO: 36749 - RNA, 21 nt, Human
acccugcagugaggggcccuc

SEQ ID NO: 36750 - RNA, 19 nt, Human
acccugcauaacccuccca

SEQ ID NO: 36751 - RNA, 32 nt, Human
acccugcaucgcuccagccgccgcggccaugu

SEQ ID NO: 36752 - RNA, 32 nt, Human
acccugcaugagcgccugcggggccuggaggc

SEQ ID NO: 36753 - RNA, 32 nt, Human
acccugcauguuuaacaccagggagcuuggaa

SEQ ID NO: 36754 - RNA, 32 nt, Human
acccugcauuguggucaggagcacugaaugcc

SEQ ID NO: 36755 - RNA, 32 nt, Human
acccugccaagcucugagcucugcucccaggg

SEQ ID NO: 36756 - RNA, 32 nt, Human
acccugccacuuguaauuuucagaaucacuga

SEQ ID NO: 36757 - RNA, 32 nt, Human
acccugccagccacgacguuuccucuuucccc

SEQ ID NO: 36758 - RNA, 32 nt, Human
acccugccagccgcccgcccgcccggcgcaga

SEQ ID NO: 36759 - RNA, 32 nt, Human
acccugccaggacugcagcccccauggugaug

SEQ ID NO: 36760 - RNA, 32 nt, Human
acccugccagugccagggugggcuggggacuc

SEQ ID NO: 36761 - RNA, 32 nt, Human
acccugcccacagcaggcccuccugcccagcu

SEQ ID NO: 36762 - RNA, 32 nt, Human
acccugcccaggauggggccagccucgugcuc

SEQ ID NO: 36763 - RNA, 32 nt, Human
acccugcccagucgcuguugggcugcugcgga

SEQ ID NO: 36764 - RNA, 32 nt, Human
acccugccccuccccagcaucccagcugggcc

SEQ ID NO: 36765 - RNA, 32 nt, Human
acccugccccucucugucauagcuaacaggaa

SEQ ID NO: 36766 - RNA, 32 nt, Human
acccugccccucucugucguagcuaacaggaa

SEQ ID NO: 36767 - RNA, 32 nt, Human
acccugccccuggagcagcagcuuugauacca

SEQ ID NO: 36768 - RNA, 32 nt, Human
acccugccccuuaccagccuuguggcagcggg

SEQ ID NO: 36769 - RNA, 32 nt, Human
acccugcccgcucucccagccugugcuccuuu

SEQ ID NO: 36770 - RNA, 32 nt, Human
acccugcccuggaagguggguuucccucgagc

SEQ ID NO: 36771 - RNA, 32 nt, Human
acccugcccugugggcccccaaauggaaaugg

SEQ ID NO: 36772 - RNA, 32 nt, Human
acccugccggguagcuggggcuacaggagcau

SEQ ID NO: 36773 - RNA, 32 nt, Human
acccugccuaccugcaggcagauggaccggag

SEQ ID NO: 36774 - RNA, 32 nt, Human
acccugccucccacaguuccuccccuaaucug

SEQ ID NO: 36775 - RNA, 32 nt, Human
acccugccuccccucuucacugaccccaucuc

SEQ ID NO: 36776 - RNA, 31 nt, Human
acccugccucugaagccagguguugagacca

SEQ ID NO: 36777 - RNA, 32 nt, Human
acccugccugcacuccuccaccaucacaaucu

SEQ ID NO: 36778 - RNA, 32 nt, Human
acccugccugccgucugugcuuccuccugccc

SEQ ID NO: 36779 - RNA, 32 nt, Human
acccugccuggcaacagagaccccaagaccua

SEQ ID NO: 36780 - RNA, 32 nt, Human
acccugccugggaaucaucucuaaugcuacua

SEQ ID NO: 36781 - RNA, 32 nt, Human
acccugccugggcacacugcuuggggaggucu

SEQ ID NO: 36782 - RNA, 32 nt, Human
acccugccuggugcuggagggcaguaugggag

SEQ ID NO: 36783 - RNA, 32 nt, Human
acccugccuugucgcagccagccugcucuuac

SEQ ID NO: 36784 - RNA, 32 nt, Human
acccugccuuuaugguacgaagagucuaauag

SEQ ID NO: 36785 - RNA, 20 nt, Human
acccugcgacuacgcugcgg

SEQ ID NO: 36786 - RNA, 32 nt, Human
acccugcgaggcaaggguuugcccaguuugca

SEQ ID NO: 36787 - RNA, 23 nt, Human
acccugcgccuccagagguccuc

SEQ ID NO: 36788 - RNA, 22 nt, Human
acccugcgcuccccgccccgcu

SEQ ID NO: 36789 - RNA, 32 nt, Human
acccugcggccaggccuggugccaugagcagg

SEQ ID NO: 36790 - RNA, 32 nt, Human
acccugcguuucucccucccaggcuaggaacc

SEQ ID NO: 36791 - RNA, 20 nt, Human
acccugcuauaaacuguggc

SEQ ID NO: 36792 - RNA, 32 nt, Human
acccugcuauuuucuccuugugugacuuugga

SEQ ID NO: 36793 - RNA, 32 nt, Human
acccugcucacugcuggcaucaccugagccua

SEQ ID NO: 36794 - RNA, 32 nt, Human
acccugcucccagggacuuggguggaugcgcu

SEQ ID NO: 36795 - RNA, 31 nt, Human
acccugcucucuggccuccuggcugugucac

SEQ ID NO: 36796 - RNA, 32 nt, Human
acccugcucucuggccuccuggcugugucaca

SEQ ID NO: 36797 - RNA, 18 nt, Human
acccugcucugccugcca

SEQ ID NO: 36798 - RNA, 32 nt, Human
acccugcucugccugccagcggccugcccugc

SEQ ID NO: 36799 - RNA, 32 nt, Human
acccugcucugggaucccuugugaggcugccc

SEQ ID NO: 36800 - RNA, 32 nt, Human
acccugcuggucagaggugcaagcagaugaga

SEQ ID NO: 36801 - RNA, 32 nt, Human
acccugcuguggggcccugccuuuguggggag

SEQ ID NO: 36802 - RNA, 32 nt, Human
acccugcuguuccucucccugccuguucugca

SEQ ID NO: 36803 - RNA, 32 nt, Human
acccugcuucacccucacccccuccuggcaau

SEQ ID NO: 36804 - RNA, 32 nt, Human
acccugcuucccuagagagaacugaucucaug

SEQ ID NO: 36805 - RNA, 22 nt, Human
acccugcuuccucgaccccccu

SEQ ID NO: 36806 - RNA, 32 nt, Human
acccugcuugcagcucagguuucggggugcuu

SEQ ID NO: 36807 - RNA, 32 nt, Human
acccugcuugcucaccaggccuagagaauggc

SEQ ID NO: 36808 - RNA, 32 nt, Human
acccugcuuucguacaaggaagggggacgaug

SEQ ID NO: 36809 - RNA, 32 nt, Human
acccuggaaagccacaaguguggugcugccca

SEQ ID NO: 36810 - RNA, 32 nt, Human
acccuggaaagccagggugugagugggguggu

SEQ ID NO: 36811 - RNA, 32 nt, Human
acccuggaaauucuuuccuuccugauuugccc

SEQ ID NO: 36812 - RNA, 32 nt, Human
acccuggaacagccacaaugucugccccuuag

SEQ ID NO: 36813 - RNA, 32 nt, Human
acccuggaaccugagucccaagaaaugguaga

SEQ ID NO: 36814 - RNA, 32 nt, Human
acccuggaacuggcccacccacugugucuucc

SEQ ID NO: 36815 - RNA, 32 nt, Human
acccuggaagagcaaaugccuccuguugucuu

SEQ ID NO: 36816 - RNA, 32 nt, Human
acccuggaagcaggaaggauugccagauaguu

SEQ ID NO: 36817 - RNA, 32 nt, Human
acccuggaaggaagcaggauggcagccggaac

SEQ ID NO: 36818 - RNA, 32 nt, Human
acccuggaaguggagguugcagugagccuguc

SEQ ID NO: 36819 - RNA, 32 nt, Human
acccuggaaucagcauggaugagaccagagga

SEQ ID NO: 36820 - RNA, 32 nt, Human
acccuggaccagagguaggagcccaagguccg

SEQ ID NO: 36821 - RNA, 32 nt, Human
acccuggaccaguggucucacauggugcuacg

SEQ ID NO: 36822 - RNA, 32 nt, Human
acccuggaccucuucugccacgcgcucauuuu

SEQ ID NO: 36823 - RNA, 32 nt, Human
acccuggacuccugugugccuccugccauccc

SEQ ID NO: 36824 - RNA, 32 nt, Human
acccuggagaaggaggccaggagccagccacu

SEQ ID NO: 36825 - RNA, 32 nt, Human
acccuggagagggcgcagccgaugcgggcggc

SEQ ID NO: 36826 - RNA, 32 nt, Human
acccuggagcagcucagggcucagggggccac

SEQ ID NO: 36827 - RNA, 32 nt, Human
acccuggagccaagggucuuucacaucaccua

SEQ ID NO: 36828 - RNA, 32 nt, Human
acccuggaggagaagaggaaagagaaagccaa

SEQ ID NO: 36829 - RNA, 32 nt, Human
acccuggaggcaccugguggccaugcuccucu

SEQ ID NO: 36830 - RNA, 32 nt, Human
acccuggaggcagaggugguagugagccgaga

SEQ ID NO: 36831 - RNA, 32 nt, Human
acccuggaggcagagguugcaaugagccgaga

SEQ ID NO: 36832 - RNA, 32 nt, Human
acccuggaggcagagguugcagugagccaaga

SEQ ID NO: 36833 - RNA, 25 nt, Human
acccuggaggcagagguuguaguga

SEQ ID NO: 36834 - RNA, 32 nt, Human
acccuggaggcagagguuguagugagucguga

SEQ ID NO: 36835 - RNA, 32 nt, Human
acccuggaggcagagguuguggugagcugaga

SEQ ID NO: 36836 - RNA, 32 nt, Human
acccuggaggcagagguuguggugagucgaga

SEQ ID NO: 36837 - RNA, 32 nt, Human
acccuggaggcggaaguugcagugagccgaga

SEQ ID NO: 36838 - RNA, 32 nt, Human
acccuggaggcggagguuccagugagcugaga

SEQ ID NO: 36839 - RNA, 32 nt, Human
acccuggaggcggagguugcagugagccgaga

SEQ ID NO: 36840 - RNA, 32 nt, Human
acccuggaggcggagguugcagugaguggaga

SEQ ID NO: 36841 - RNA, 32 nt, Human
acccuggaggcggagguugccgugagccaaga

SEQ ID NO: 36842 - RNA, 32 nt, Human
acccuggagggcccugagcccaccgcaccagg

SEQ ID NO: 36843 - RNA, 32 nt, Human
acccuggaggggaagguggcuucccccaagca

SEQ ID NO: 36844 - RNA, 32 nt, Human
acccuggaggggacccgggaacaguaguagaa

SEQ ID NO: 36845 - RNA, 32 nt, Human
acccuggagguagaaguugcagugagccaaga

SEQ ID NO: 36846 - RNA, 32 nt, Human
acccuggagguagaggcugcagugagccaaga

SEQ ID NO: 36847 - RNA, 32 nt, Human
acccuggagguggagguugcagugagccgaga

SEQ ID NO: 36848 - RNA, 32 nt, Human
acccuggagguggagguugcagugagcugaga

SEQ ID NO: 36849 - RNA, 32 nt, Human
acccuggagguggcgguugcagugagcacaga

SEQ ID NO: 36850 - RNA, 32 nt, Human
acccuggagguugagguugcagugagcugaga

SEQ ID NO: 36851 - RNA, 32 nt, Human
acccuggaugccucauggagaauuaagagaga

SEQ ID NO: 36852 - RNA, 32 nt, Human
acccuggaugcuguugaagggccaagagaucu

SEQ ID NO: 36853 - RNA, 32 nt, Human
acccuggcaaagcagcaacacacaugcuccgu

SEQ ID NO: 36854 - RNA, 32 nt, Human
acccuggcaaagcagcucacacacugcagcca

SEQ ID NO: 36855 - RNA, 32 nt, Human
acccuggcaagaaccucuguguccagauguuu

SEQ ID NO: 36856 - RNA, 32 nt, Human
acccuggcagcaucccaccuccugaguccucu

SEQ ID NO: 36857 - RNA, 22 nt, Human
acccuggcagucccaggcagca

SEQ ID NO: 36858 - RNA, 21 nt, Human
acccuggcauguccuuccaga

SEQ ID NO: 36859 - RNA, 32 nt, Human
acccuggccaugacaggcaagucggugaagga

SEQ ID NO: 36860 - RNA, 20 nt, Human
acccuggcccacuccacagg

SEQ ID NO: 36861 - RNA, 32 nt, Human
acccuggccucugcacuccccugcugggugug

SEQ ID NO: 36862 - RNA, 21 nt, Human
acccuggccuggucccugguc

SEQ ID NO: 36863 - RNA, 32 nt, Human
acccuggcgauaucacuuuaacuuucugaacc

SEQ ID NO: 36864 - RNA, 32 nt, Human
acccuggcgggcccucuccccaccucaccucu

SEQ ID NO: 36865 - RNA, 32 nt, Human
acccuggcggggaagcaguaguguucccauug

SEQ ID NO: 36866 - RNA, 22 nt, Human
acccuggcucacagacaugguc

SEQ ID NO: 36867 - RNA, 32 nt, Human
acccuggcucaggcuucugggcucugagaaau

SEQ ID NO: 36868 - RNA, 24 nt, Human
acccuggcucaugcugccauaguc

SEQ ID NO: 36869 - RNA, 32 nt, Human
acccuggcuccauccagucucuugccuuccuc

SEQ ID NO: 36870 - RNA, 32 nt, Human
acccuggcuccucuuuccccagcuucugucug

SEQ ID NO: 36871 - RNA, 32 nt, Human
acccuggcuccuggcccgagccugggcucccu

SEQ ID NO: 36872 - RNA, 21 nt, Human
acccuggcuccuucacaggga

SEQ ID NO: 36873 - RNA, 25 nt, Human
acccuggcugcccagcagcagcccu

SEQ ID NO: 36874 - RNA, 32 nt, Human
acccuggcuggaggggauaggagggcuuuuaa

SEQ ID NO: 36875 - RNA, 32 nt, Human
acccuggcuuccaucaugagugcagugucauc

SEQ ID NO: 36876 - RNA, 32 nt, Human
acccuggcuucucuuuggcacaucagccccua

SEQ ID NO: 36877 - RNA, 32 nt, Human
acccugggaaaccagcuggggcugcacagggc

SEQ ID NO: 36878 - RNA, 32 nt, Human
acccugggacaggcacaggcugggcagaggca

SEQ ID NO: 36879 - RNA, 20 nt, Human
acccugggacugugguucca

SEQ ID NO: 36880 - RNA, 32 nt, Human
acccugggagcggagauugcagugagcugaga

SEQ ID NO: 36881 - RNA, 32 nt, Human
acccugggaggaggcagguggggagggaaccc

SEQ ID NO: 36882 - RNA, 32 nt, Human
acccugggaggcacauccaggcuugggaaacg

SEQ ID NO: 36883 - RNA, 32 nt, Human
acccugggaggcagagguugcagugagucgag

SEQ ID NO: 36884 - RNA, 26 nt, Human
acccugggaggcggagguuguaguga

SEQ ID NO: 36885 - RNA, 32 nt, Human
acccugggagguggagguggcagugagccgag

SEQ ID NO: 36886 - RNA, 32 nt, Human
acccugggccacugcaccccaccaggacggca

SEQ ID NO: 36887 - RNA, 32 nt, Human
acccugggcccccagccucuggccucccucca

SEQ ID NO: 36888 - RNA, 32 nt, Human
acccugggcucccacagccagcauugggggaa

SEQ ID NO: 36889 - RNA, 32 nt, Human
acccuggggagggaagggacagaggaagcuau

SEQ ID NO: 36890 - RNA, 32 nt, Human
acccuggggaggugaaagucagagagcgaagc

SEQ ID NO: 36891 - RNA, 19 nt, Human
acccuggggccacccauca

SEQ ID NO: 36892 - RNA, 32 nt, Human
acccuggggcccuggccuucugccugaaggcc

SEQ ID NO: 36893 - RNA, 32 nt, Human
acccuggggccucccaccccagccucccugag

SEQ ID NO: 36894 - RNA, 32 nt, Human
acccuggguaaaggguguaggaaagguuuugu

SEQ ID NO: 36895 - RNA, 32 nt, Human
acccuggguccccaggagguggugucaagaga

SEQ ID NO: 36896 - RNA, 32 nt, Human
acccugggugaggggcuggugggcaggaaggu

SEQ ID NO: 36897 - RNA, 31 nt, Human
acccugggugcgaggaacugggugaagggaa

SEQ ID NO: 36898 - RNA, 20 nt, Human
acccugguccgccucccugg

SEQ ID NO: 36899 - RNA, 32 nt, Human
acccugguccuuggauccccuucgucccaccu

SEQ ID NO: 36900 - RNA, 32 nt, Human
acccuggucuugcugcucauaucugccaggaa

SEQ ID NO: 36901 - RNA, 23 nt, Human
acccuggugaaccccgggugcua

SEQ ID NO: 36902 - RNA, 32 nt, Human
acccuggugaccaaaguggcuccggucagcgc

SEQ ID NO: 36903 - RNA, 32 nt, Human
acccuggugccuggcagguucucccucugccc

SEQ ID NO: 36904 - RNA, 32 nt, Human
acccuggugcugugcagccucuggcagagcau

SEQ ID NO: 36905 - RNA, 32 nt, Human
acccuggugucaucaucucccaggauccauga

SEQ ID NO: 36906 - RNA, 32 nt, Human
acccugguuaggugagccucuaggaaaacuua

SEQ ID NO: 36907 - RNA, 32 nt, Human
acccugguuucaaugaaccuaaccucauuauu

SEQ ID NO: 36908 - RNA, 32 nt, Human
acccugguuucaaugaaccuaaccucauucuu

SEQ ID NO: 36909 - RNA, 32 nt, Human
acccugguuucgcugagaacaaacucugagau

SEQ ID NO: 36910 - RNA, 32 nt, Human
acccugguuucugagcuccagaaacucuguau

SEQ ID NO: 36911 - RNA, 32 nt, Human
acccugguuuggagcugggaggaagaaggggg

SEQ ID NO: 36912 - RNA, 32 nt, Human
acccugucacauagagaugaaaagccggcuuu

SEQ ID NO: 36913 - RNA, 32 nt, Human
acccugucaccacugaaccuugauuuaacaga

SEQ ID NO: 36914 - RNA, 32 nt, Human
acccugucacccaggcuggaaugcaauggcac

SEQ ID NO: 36915 - RNA, 32 nt, Human
acccugucacucaggcuggagcacaguggugu

SEQ ID NO: 36916 - RNA, 22 nt, Human
acccugucagacguugguccca

SEQ ID NO: 36917 - RNA, 32 nt, Human
acccuguccuccaccugccuuccauuuugaag

SEQ ID NO: 36918 - RNA, 32 nt, Human
acccuguccuccucacugggggcaggguggag

SEQ ID NO: 36919 - RNA, 32 nt, Human
acccuguccugcuucucacacugacaucugcu

SEQ ID NO: 36920 - RNA, 32 nt, Human
acccuguccuugggauagcuuucuugagcaua

SEQ ID NO: 36921 - RNA, 32 nt, Human
acccugucgcccaggcuggagugcaaugccgu

SEQ ID NO: 36922 - RNA, 32 nt, Human
acccugucgcccagggggcgugcuguccagca

SEQ ID NO: 36923 - RNA, 29 nt, Human
acccugucucugugugguuggguugggag

SEQ ID NO: 36924 - RNA, 32 nt, Human
acccugucuugaagacccugaccucaagugau

SEQ ID NO: 36925 - RNA, 32 nt, Human
acccugucuuucucucuggccugcugcucucu

SEQ ID NO: 36926 - RNA, 31 nt, Human
acccugugacugucucccacgagaagaacua

SEQ ID NO: 36927 - RNA, 32 nt, Human
acccugugagccaccgagacugaaccaaaccc

SEQ ID NO: 36928 - RNA, 32 nt, Human
acccugugauggggcccugccuccuuugugag

SEQ ID NO: 36929 - RNA, 32 nt, Human
acccugugcucuaaacaguuaggguuuguucc

SEQ ID NO: 36930 - RNA, 32 nt, Human
acccuguggcccaagcaggccugcugaacuca

SEQ ID NO: 36931 - RNA, 32 nt, Human
acccugugggcuguaagcaagcucaggcuagu

SEQ ID NO: 36932 - RNA, 32 nt, Human
acccugugggggcggcugugggggaggucccu

SEQ ID NO: 36933 - RNA, 19 nt, Human
acccuguguaccuccucca

SEQ ID NO: 36934 - RNA, 32 nt, Human
acccugugucauagccucauccaucagccagg

SEQ ID NO: 36935 - RNA, 32 nt, Human
acccuguguguaucuucaucuggcuguuuacu

SEQ ID NO: 36936 - RNA, 32 nt, Human
acccuguucaaccucucaggaacagggauucu

SEQ ID NO: 36937 - RNA, 32 nt, Human
acccuguuccgcccgcccagcaugcagaacaa

SEQ ID NO: 36938 - RNA, 32 nt, Human
acccuguucuuagaaaauguguuuaguuaugg

SEQ ID NO: 36939 - RNA, 32 nt, Human
acccuguugccaggcuggaaugcaguggcgcg

SEQ ID NO: 36940 - RNA, 32 nt, Human
acccuguugcccaggcuacagugcaauggcau

SEQ ID NO: 36941 - RNA, 32 nt, Human
acccuguugcccaggcuggaauacaguggcac

SEQ ID NO: 36942 - RNA, 32 nt, Human
acccuguugcccaggcuggagugcaauggcgc

SEQ ID NO: 36943 - RNA, 32 nt, Human
acccuguugcccaggcuggagugcaauggugc

SEQ ID NO: 36944 - RNA, 32 nt, Human
acccuguuggccaggcuggagugcaguaagug

SEQ ID NO: 36945 - RNA, 24 nt, Human
acccuguugggugagcacagcccu

SEQ ID NO: 36946 - RNA, 32 nt, Human
acccuguugucaccccagcugaauuucuuaug

SEQ ID NO: 36947 - RNA, 32 nt, Human
acccuguuuaugcgguaccggaguagcagugu

SEQ ID NO: 36948 - RNA, 32 nt, Human
acccuuaaacaucaguagacugggagcuguac

SEQ ID NO: 36949 - RNA, 20 nt, Human
acccuuaacccugacccgga

SEQ ID NO: 36950 - RNA, 32 nt, Human
acccuuaaguuccuaguucacaguuauuccca

SEQ ID NO: 36951 - RNA, 32 nt, Human
acccuuacaagaaaacuggucugcaaagagaa

SEQ ID NO: 36952 - RNA, 32 nt, Human
acccuuacccuuuccuccuuuaucacaaccac

SEQ ID NO: 36953 - RNA, 32 nt, Human
acccuuagaaguauugccuacuuauccgggcu

SEQ ID NO: 36954 - RNA, 32 nt, Human
acccuuaggacagggucccugcuguguucccc

SEQ ID NO: 36955 - RNA, 32 nt, Human
acccuuaggaguucgauggagagaccaugagg

SEQ ID NO: 36956 - RNA, 32 nt, Human
acccuuaggcugggaccucccucccuccucug

SEQ ID NO: 36957 - RNA, 32 nt, Human
acccuuauguuagccacaucuggaugagaaca

SEQ ID NO: 36958 - RNA, 19 nt, Human
acccuuauuuccaaaggaa

SEQ ID NO: 36959 - RNA, 19 nt, Human
acccuucaaugccugcucc

SEQ ID NO: 36960 - RNA, 19 nt, Human
acccuucaaugcuguggcc

SEQ ID NO: 36961 - RNA, 32 nt, Human
acccuucaaugugcccgugugccuaaauauuc

SEQ ID NO: 36962 - RNA, 18 nt, Human
acccuucaauuguuacca

SEQ ID NO: 36963 - RNA, 32 nt, Human
acccuucaauuuccucuucuuuuuccucugac

SEQ ID NO: 36964 - RNA, 32 nt, Human
acccuucacauggaagauuaaugagggaaauc

SEQ ID NO: 36965 - RNA, 32 nt, Human
acccuucaccucccaccucuuccucaccuugg

SEQ ID NO: 36966 - RNA, 32 nt, Human
acccuucaccuccccuaaccccaaacauagau

SEQ ID NO: 36967 - RNA, 32 nt, Human
acccuucacucaccaucuuuucccacaaucaa

SEQ ID NO: 36968 - RNA, 32 nt, Human
acccuucagccaauaaauaccaucuguuggug

SEQ ID NO: 36969 - RNA, 32 nt, Human
acccuucagccggagaccagaguccagucccg

SEQ ID NO: 36970 - RNA, 18 nt, Human
acccuucagggugcccca

SEQ ID NO: 36971 - RNA, 18 nt, Human
acccuucaggucugccca

SEQ ID NO: 36972 - RNA, 19 nt, Human
acccuucagguggcauccc

SEQ ID NO: 36973 - RNA, 32 nt, Human
acccuucaggugguucccuugugcaccguuca

SEQ ID NO: 36974 - RNA, 19 nt, Human
acccuucagugaggcccca

SEQ ID NO: 36975 - RNA, 32 nt, Human
acccuucagugcaguguaccagggaagagacc

SEQ ID NO: 36976 - RNA, 32 nt, Human
acccuucauacacacacgcacacacgcacaca

SEQ ID NO: 36977 - RNA, 31 nt, Human
acccuucauacuucuuugaucuuuggaagaa

SEQ ID NO: 36978 - RNA, 32 nt, Human
acccuucauacuucuuugaucuuuggaagaag

SEQ ID NO: 36979 - RNA, 32 nt, Human
acccuucauagcuuagcccaggaaaaauaaaa

SEQ ID NO: 36980 - RNA, 32 nt, Human
acccuucaucauccucauucagagguauggau

SEQ ID NO: 36981 - RNA, 32 nt, Human
acccuucaugaaaccaccucugcaguccugga

SEQ ID NO: 36982 - RNA, 32 nt, Human
acccuucaugggcugcagaggccccacugcag

SEQ ID NO: 36983 - RNA, 32 nt, Human
acccuuccaagcuuuccugcucaguguucuac

SEQ ID NO: 36984 - RNA, 32 nt, Human
acccuuccacacaauagccucuguagguuagg

SEQ ID NO: 36985 - RNA, 18 nt, Human
acccuuccacauccuccu

SEQ ID NO: 36986 - RNA, 19 nt, Human
acccuuccaccucaagaug

SEQ ID NO: 36987 - RNA, 32 nt, Human
acccuuccagauccccggccccggcugugacu

SEQ ID NO: 36988 - RNA, 32 nt, Human
acccuuccaucagugucuuccagccugcaugg

SEQ ID NO: 36989 - RNA, 21 nt, Human
acccuuccccaccggacugug

SEQ ID NO: 36990 - RNA, 18 nt, Human
acccuuccccgcuguggc

SEQ ID NO: 36991 - RNA, 32 nt, Human
acccuuccccuccucaaggaucacccauccuc

SEQ ID NO: 36992 - RNA, 32 nt, Human
acccuucccugccuccagcugucagccugguu

SEQ ID NO: 36993 - RNA, 32 nt, Human
acccuucccuuccccucucccuucugccuuuc

SEQ ID NO: 36994 - RNA, 32 nt, Human
acccuucccuuuccucugcuucucuccucauc

SEQ ID NO: 36995 - RNA, 32 nt, Human
acccuuccuagagcggaggaaccgggucgugc

SEQ ID NO: 36996 - RNA, 32 nt, Human
acccuuccuauuggucuguccugggccaacug

SEQ ID NO: 36997 - RNA, 32 nt, Human
acccuuccucaucugugccugucuguccaacc

SEQ ID NO: 36998 - RNA, 32 nt, Human
acccuuccuccaccucagcucagagcacagug

SEQ ID NO: 36999 - RNA, 32 nt, Human
acccuuccuccaccucaguucagagcacagug

SEQ ID NO: 37000 - RNA, 32 nt, Human
acccuuccugcauuucucuucucagcucuucc

SEQ ID NO: 37001 - RNA, 32 nt, Human
acccuuccuucuggauucaccaauuguuaaca

SEQ ID NO: 37002 - RNA, 32 nt, Human
acccuuccuuguaucugucuucccaggagaga

SEQ ID NO: 37003 - RNA, 19 nt, Human
acccuuccuuuggcuccca

SEQ ID NO: 37004 - RNA, 32 nt, Human
acccuucgucucuucaucugucaccaaagaca

SEQ ID NO: 37005 - RNA, 32 nt, Human
acccuucuacugugcugaccauuaggauacau

SEQ ID NO: 37006 - RNA, 32 nt, Human
acccuucuccaugcucauccccaaacuggggc

SEQ ID NO: 37007 - RNA, 32 nt, Human
acccuucuccuggggcauuuguuuuguuuuca

SEQ ID NO: 37008 - RNA, 20 nt, Human
acccuucucgaccccuucca

SEQ ID NO: 37009 - RNA, 20 nt, Human
acccuucugaccuggucuca

SEQ ID NO: 37010 - RNA, 32 nt, Human
acccuucugagaucacccucccugcuucccca

SEQ ID NO: 37011 - RNA, 32 nt, Human
acccuucugcucccggccgccgcuuuccgccg

SEQ ID NO: 37012 - RNA, 32 nt, Human
acccuucuguaggaugcauuucaggcucagag

SEQ ID NO: 37013 - RNA, 32 nt, Human
acccuucuuggccucugcucagcuacucuggu

SEQ ID NO: 37014 - RNA, 32 nt, Human
acccuucuugguagaagcuaaggugugagcug

SEQ ID NO: 37015 - RNA, 32 nt, Human
acccuucuuguccuccucucuggccccaucca

SEQ ID NO: 37016 - RNA, 32 nt, Human
acccuucuugucuuuacuuccuccuuacccaa

SEQ ID NO: 37017 - RNA, 18 nt, Human
acccuucuuugggucuca

SEQ ID NO: 37018 - RNA, 32 nt, Human
acccuugaacaacacagguuagagcugcauau

SEQ ID NO: 37019 - RNA, 32 nt, Human
acccuugaagauuuggccugggccagugagac

SEQ ID NO: 37020 - RNA, 32 nt, Human
acccuugagagaagaggcagcagcagcggcgg

SEQ ID NO: 37021 - RNA, 32 nt, Human
acccuugaggugggcauggagugagcagaaga

SEQ ID NO: 37022 - RNA, 32 nt, Human
acccuugcacugacacucuuagcacagagucu

SEQ ID NO: 37023 - RNA, 32 nt, Human
acccuugcagugagugugaguuccuuccaggu

SEQ ID NO: 37024 - RNA, 20 nt, Human
acccuugccauccugcaaca

SEQ ID NO: 37025 - RNA, 21 nt, Human
acccuugccccaguccugccc

SEQ ID NO: 37026 - RNA, 32 nt, Human
acccuugccccugcuuguccuggaccacuuuu

SEQ ID NO: 37027 - RNA, 32 nt, Human
acccuugccugccuccuaggcuggaagccaug

SEQ ID NO: 37028 - RNA, 32 nt, Human
acccuugcgugcuguggagacccuacucucuu

SEQ ID NO: 37029 - RNA, 32 nt, Human
acccuugcugaaccuugugcuccagggguccu

SEQ ID NO: 37030 - RNA, 32 nt, Human
acccuugcugcaggcuagggagcugcaguccc

SEQ ID NO: 37031 - RNA, 32 nt, Human
acccuugcuggcugaucaccuugagcaacuua

SEQ ID NO: 37032 - RNA, 32 nt, Human
acccuugcugucuaagccuuguggcuggaggg

SEQ ID NO: 37033 - RNA, 32 nt, Human
acccuugcuugccuuuuucagagaaaaagaaa

SEQ ID NO: 37034 - RNA, 32 nt, Human
acccuuggaagggugucagggucugggcucgc

SEQ ID NO: 37035 - RNA, 32 nt, Human
acccuuggacaacauuuaucauaauuugucau

SEQ ID NO: 37036 - RNA, 32 nt, Human
acccuuggcagcaaucaaagugccaguggcuc

SEQ ID NO: 37037 - RNA, 32 nt, Human
acccuuggcagcccugugccucucgaauguua

SEQ ID NO: 37038 - RNA, 32 nt, Human
acccuuggcugaaaauucccuccuuagucuac

SEQ ID NO: 37039 - RNA, 32 nt, Human
acccuuggcuugggcccaugcccagcgcaggc

SEQ ID NO: 37040 - RNA, 32 nt, Human
acccuugggacaauccuucaugugagcaaagu

SEQ ID NO: 37041 - RNA, 32 nt, Human
acccuugggaucuggggcuuccuggccuggcc

SEQ ID NO: 37042 - RNA, 32 nt, Human
acccuugggccugggccucugccccucccaac

SEQ ID NO: 37043 - RNA, 23 nt, Human
acccuuggggagcugaucuaucu

SEQ ID NO: 37044 - RNA, 32 nt, Human
acccuuggucuuggcacccuucugccuuauac

SEQ ID NO: 37045 - RNA, 32 nt, Human
acccuugguucccacaugcacagaugcuacgg

SEQ ID NO: 37046 - RNA, 32 nt, Human
acccuuguaagccccuuccuuccucccuugcc

SEQ ID NO: 37047 - RNA, 32 nt, Human
acccuuguacggcuguuuggguccccgaucac

SEQ ID NO: 37048 - RNA, 32 nt, Human
acccuuguagcucuggguaagaugaccugagu

SEQ ID NO: 37049 - RNA, 32 nt, Human
acccuuguaucauguuuuccucccaucuucua

SEQ ID NO: 37050 - RNA, 32 nt, Human
acccuugucauccauuagagcgguaaucaaga

SEQ ID NO: 37051 - RNA, 32 nt, Human
acccuuguccuagaaccuacccccucucaagg

SEQ ID NO: 37052 - RNA, 32 nt, Human
acccuugucuacucugccccuggauggugcgg

SEQ ID NO: 37053 - RNA, 32 nt, Human
acccuugugugggaacaggugcuccccaaaca

SEQ ID NO: 37054 - RNA, 32 nt, Human
acccuuguugcccaggcuggagugcaauggcg

SEQ ID NO: 37055 - RNA, 32 nt, Human
acccuuguugcccaggcuguaguacaauggca

SEQ ID NO: 37056 - RNA, 32 nt, Human
acccuuguuggggaguggguggcagguggggg

SEQ ID NO: 37057 - RNA, 32 nt, Human
acccuuuacugcacuuucugaccaggagcuac

SEQ ID NO: 37058 - RNA, 32 nt, Human
acccuuucaaguagcugggauuacagguaccu

SEQ ID NO: 37059 - RNA, 32 nt, Human
acccuuuccuggggcucuucuggugcugggag

SEQ ID NO: 37060 - RNA, 32 nt, Human
acccuuuccuucaucaucacucccugcauucu

SEQ ID NO: 37061 - RNA, 21 nt, Human
acccuuucgucaccucuucca

SEQ ID NO: 37062 - RNA, 32 nt, Human
acccuuucuccaccacagccaaggccuggaga

SEQ ID NO: 37063 - RNA, 32 nt, Human
acccuuucuccuccuccuuccucugaguugac

SEQ ID NO: 37064 - RNA, 32 nt, Human
acccuuucugcaucccugucccuggcauccac

SEQ ID NO: 37065 - RNA, 32 nt, Human
acccuuugaagagcaggaaggccagggcacag

SEQ ID NO: 37066 - RNA, 32 nt, Human
acccuuugaggguuugaguuacucuaaauagg

SEQ ID NO: 37067 - RNA, 32 nt, Human
acccuuugccucucccccuuuaauuugccuuu

SEQ ID NO: 37068 - RNA, 32 nt, Human
acccuuugcuaccuaugugcccgguuuuacuc

SEQ ID NO: 37069 - RNA, 32 nt, Human
acccuuugggaggccgggacagguggaucacc

SEQ ID NO: 37070 - RNA, 32 nt, Human
acccuuugucagccugacagugccucaucuga

SEQ ID NO: 37071 - RNA, 32 nt, Human
acccuuugugacugcugaccccugagccaccc

SEQ ID NO: 37072 - RNA, 32 nt, Human
acccuuugugguuacaguuugagacuuccaaa

SEQ ID NO: 37073 - RNA, 18 nt, Human
acccuuuguuuuggccca

SEQ ID NO: 37074 - RNA, 32 nt, Human
acccuuuucacucugggcuucucccaaaaccc

SEQ ID NO: 37075 - RNA, 32 nt, Human
acccuuuuccccucacccucugcccuucuaag

SEQ ID NO: 37076 - RNA, 32 nt, Human
acccuuuuccucaccugcucaaccauuauuca

SEQ ID NO: 37077 - RNA, 32 nt, Human
acccuuuuccuccaaaacaaaaauuagaggau

SEQ ID NO: 37078 - RNA, 32 nt, Human
acccuuuucuccccauaucuguuuggacauga

SEQ ID NO: 37079 - RNA, 32 nt, Human
acccuuuugggaucagcacugaaagugacgcc

SEQ ID NO: 37080 - RNA, 32 nt, Human
acccuuuugugguuuugaacaccaacauacug

SEQ ID NO: 37081 - RNA, 32 nt, Human
acccuuuuguguugcccuucuuuccaucaagg

SEQ ID NO: 37082 - RNA, 32 nt, Human
acccuuuuucuuucuuuucgccccgcugcugu

SEQ ID NO: 37083 - RNA, 31 nt, Human
accgaaagucuccugcuuucacugcgguccc

SEQ ID NO: 37084 - RNA, 24 nt, Human
accgaaagugggcggcggccgcgg

SEQ ID NO: 37085 - RNA, 32 nt, Human
accgaaaucuggcaaauacauaccuuuggaga

SEQ ID NO: 37086 - RNA, 32 nt, Human
accgaacaucuucucgugggcuuacuggccau

SEQ ID NO: 37087 - RNA, 32 nt, Human
accgaagaacugcucucugacagaacagagac

SEQ ID NO: 37088 - RNA, 32 nt, Human
accgaagagccaguaaccaguagcuccaacuu

SEQ ID NO: 37089 - RNA, 32 nt, Human
accgaagcagagggugcuguuucaacgccacc

SEQ ID NO: 37090 - RNA, 21 nt, Human
accgaagccacagggcagcau

SEQ ID NO: 37091 - RNA, 32 nt, Human
accgaagccagcugcccggccaggcgaccugc

SEQ ID NO: 37092 - RNA, 32 nt, Human
accgaagcccaggcacauguauuuugcaaaac

SEQ ID NO: 37093 - RNA, 32 nt, Human
accgaagccgccuguggacagccugagucacc

SEQ ID NO: 37094 - RNA, 32 nt, Human
accgaagcucacucccuuccucuccaucucuc

SEQ ID NO: 37095 - RNA, 32 nt, Human
accgaaggcccccagaguguuucugugugaaa

SEQ ID NO: 37096 - RNA, 21 nt, Human
accgaaggccggcggccgcgg

SEQ ID NO: 37097 - RNA, 32 nt, Human
accgaaggggagaaaguuaaagaaaucgccca

SEQ ID NO: 37098 - RNA, 32 nt, Human
accgaaguagccgcgcucccagcugcuugcag

SEQ ID NO: 37099 - RNA, 32 nt, Human
accgaagucaggcccugaagccgguccugcuc

SEQ ID NO: 37100 - RNA, 32 nt, Human
accgaaguggauggaaggggacugggguuucu

SEQ ID NO: 37101 - RNA, 32 nt, Human
accgaaguucugucuacugaugcagcacaaga

SEQ ID NO: 37102 - RNA, 32 nt, Human
accgaauauggccugacauuugcaaagaaaug

SEQ ID NO: 37103 - RNA, 32 nt, Human
accgacaagauggagcauugaugggggagauc

SEQ ID NO: 37104 - RNA, 32 nt, Human
accgacagccaucaccuccuucuuggaacagc

SEQ ID NO: 37105 - RNA, 32 nt, Human
accgacagugaugagcaucuugaagucuuauu

SEQ ID NO: 37106 - RNA, 32 nt, Human
accgaccagugguaagcacccaggaagcaacu

SEQ ID NO: 37107 - RNA, 32 nt, Human
accgaccccagccuggccgccuggcaugggga

SEQ ID NO: 37108 - RNA, 32 nt, Human
accgaccccugucugcccuucucccuccugcu

SEQ ID NO: 37109 - RNA, 32 nt, Human
accgaccuguguuagacgaaccuguguugccu

SEQ ID NO: 37110 - RNA, 32 nt, Human
accgacgagagaucauuggaagcugccuucua

SEQ ID NO: 37111 - RNA, 32 nt, Human
accgacggccgcuggagugcacuggcaugauc

SEQ ID NO: 37112 - RNA, 32 nt, Human
accgacgggagcgggagccggagcagcugcgg

SEQ ID NO: 37113 - RNA, 32 nt, Human
accgacguguuucuccccgaccguggcuuugc

SEQ ID NO: 37114 - RNA, 32 nt, Human
accgacuaccccagucccagggaagguggggc

SEQ ID NO: 37115 - RNA, 32 nt, Human
accgacugcggguguucaccacaggccaggcc

SEQ ID NO: 37116 - RNA, 32 nt, Human
accgacuguaggaagcggaauguugaaagccg

SEQ ID NO: 37117 - RNA, 32 nt, Human
accgacuuauucauguuaauguagcauaauau

SEQ ID NO: 37118 - RNA, 32 nt, Human
accgacuuuguccuuuuucucagcaucagagc

SEQ ID NO: 37119 - RNA, 32 nt, Human
accgagaaaggagccaugggccagaucuuuug

SEQ ID NO: 37120 - RNA, 32 nt, Human
accgagaacuagcaguggcccugcacucaagc

SEQ ID NO: 37121 - RNA, 32 nt, Human
accgagacaaugauaugcaagugcaaaagaau

SEQ ID NO: 37122 - RNA, 32 nt, Human
accgagacagaaguaccugaaaacagcugugc

SEQ ID NO: 37123 - RNA, 32 nt, Human
accgagaccagccuggggagccggugacugag

SEQ ID NO: 37124 - RNA, 32 nt, Human
accgagagaagaagagaaagaaaagaaaaaga

SEQ ID NO: 37125 - RNA, 32 nt, Human
accgagagagugaggagccagacgacaagcac

SEQ ID NO: 37126 - RNA, 23 nt, Human
accgagaggagggaccagcgcgg

SEQ ID NO: 37127 - RNA, 32 nt, Human
accgagaugccauuaacauucaucuaaaaaug

SEQ ID NO: 37128 - RNA, 32 nt, Human
accgagauggcuccgccagccugcugcugccc

SEQ ID NO: 37129 - RNA, 32 nt, Human
accgagauugugccacuacacuccagccuggc

SEQ ID NO: 37130 - RNA, 32 nt, Human
accgagcagacggaggugagcugagagcugag

SEQ ID NO: 37131 - RNA, 32 nt, Human
accgagccacuguacuccagccuaggugacaa

SEQ ID NO: 37132 - RNA, 32 nt, Human
accgagcccugagugcugugcugcugcugguc

SEQ ID NO: 37133 - RNA, 32 nt, Human
accgagccgggugguggcgggagcagcgggag

SEQ ID NO: 37134 - RNA, 32 nt, Human
accgagccuggcucucggucagcaggugauga

SEQ ID NO: 37135 - RNA, 32 nt, Human
accgagccuucucccuguccuucugucucuga

SEQ ID NO: 37136 - RNA, 24 nt, Human
accgagcgggccgccgccgccgcc

SEQ ID NO: 37137 - RNA, 25 nt, Human
accgagcuucagcaagcucucucca

SEQ ID NO: 37138 - RNA, 32 nt, Human
accgaggaaaugugcuuccugagggagugggu

SEQ ID NO: 37139 - RNA, 32 nt, Human
accgaggaacacugggcugagcacaugacagg

SEQ ID NO: 37140 - RNA, 32 nt, Human
accgaggagagcgcgggagccaaccugggcgc

SEQ ID NO: 37141 - RNA, 32 nt, Human
accgaggaggcagagcuugcagugagccaaga

SEQ ID NO: 37142 - RNA, 32 nt, Human
accgaggaggcgaagguugcagugagccgaga

SEQ ID NO: 37143 - RNA, 32 nt, Human
accgaggcaggcggaucaugaggucaggagau

SEQ ID NO: 37144 - RNA, 32 nt, Human
accgaggcaggggcugcagccacccacuggga

SEQ ID NO: 37145 - RNA, 32 nt, Human
accgaggcauggggcucccugggcuguucugc

SEQ ID NO: 37146 - RNA, 32 nt, Human
accgaggccccucccuccuccuggaacagcuu

SEQ ID NO: 37147 - RNA, 32 nt, Human
accgaggcuacagcuccacacgccccgguccc

SEQ ID NO: 37148 - RNA, 20 nt, Human
accgaggcuggagugcaaug

SEQ ID NO: 37149 - RNA, 20 nt, Human
accgaggcuggagugcagug

SEQ ID NO: 37150 - RNA, 32 nt, Human
accgaggggccagauggcuucgaccggcuuag

SEQ ID NO: 37151 - RNA, 32 nt, Human
accgaggggucauccgcacagagcgaggugca

SEQ ID NO: 37152 - RNA, 32 nt, Human
accgagguggccauggagacuccaccuggauc

SEQ ID NO: 37153 - RNA, 22 nt, Human
accgaguccccuccuccacuga

SEQ ID NO: 37154 - RNA, 32 nt, Human
accgaguggcagggcggccacuguggcggggc

SEQ ID NO: 37155 - RNA, 32 nt, Human
accgaguggucaguagucacuucaacucuuag

SEQ ID NO: 37156 - RNA, 32 nt, Human
accgaguuccagguagugguuuugccuuuccc

SEQ ID NO: 37157 - RNA, 32 nt, Human
accgaugacucugcuuuaaagcgugucucuca

SEQ ID NO: 37158 - RNA, 32 nt, Human
accgaugaugauugaggcguggcagcguccuu

SEQ ID NO: 37159 - RNA, 32 nt, Human
accgaugcacagucuucccauuuuacacuuuu

SEQ ID NO: 37160 - RNA, 32 nt, Human
accgaugcugcucucugcgggugacagggaga

SEQ ID NO: 37161 - RNA, 32 nt, Human
accgaugcugugcagcucacaccacuccagaa

SEQ ID NO: 37162 - RNA, 32 nt, Human
accgauggcauggugcuauauccugccugggc

SEQ ID NO: 37163 - RNA, 32 nt, Human
accgaugucccuuugauaaccugcacucacca

SEQ ID NO: 37164 - RNA, 32 nt, Human
accgauucccaugccuccuuucuagccugaag

SEQ ID NO: 37165 - RNA, 21 nt, Human
accgauuuccugcccaccuga

SEQ ID NO: 37166 - RNA, 32 nt, Human
accgauuugaucuuaauccuguauuuaaaguu

SEQ ID NO: 37167 - RNA, 32 nt, Human
accgcaacagagccauggagaagagccacacu

SEQ ID NO: 37168 - RNA, 32 nt, Human
accgcaaccauaggagcuggauccugacaucc

SEQ ID NO: 37169 - RNA, 24 nt, Human
accgcaaccuccaccucccggguu

SEQ ID NO: 37170 - RNA, 24 nt, Human
accgcaaccuccaccuccugaguu

SEQ ID NO: 37171 - RNA, 24 nt, Human
accgcaaccuccaccuccuggguu

SEQ ID NO: 37172 - RNA, 24 nt, Human
accgcaaccuccgccucccagguu

SEQ ID NO: 37173 - RNA, 24 nt, Human
accgcaaccuccgccucccggguu

SEQ ID NO: 37174 - RNA, 24 nt, Human
accgcaaccuccuccucccggguu

SEQ ID NO: 37175 - RNA, 24 nt, Human
accgcaagcccugccuccuggguu

SEQ ID NO: 37176 - RNA, 24 nt, Human
accgcaagcgauucacccaccuca

SEQ ID NO: 37177 - RNA, 24 nt, Human
accgcaagcuccgccucccggguu

SEQ ID NO: 37178 - RNA, 32 nt, Human
accgcacacagcauggcuuccagccugaagug

SEQ ID NO: 37179 - RNA, 32 nt, Human
accgcaccacugcacuccagccugggcgacag

SEQ ID NO: 37180 - RNA, 32 nt, Human
accgcacccucauguguuuucucccccaggag

SEQ ID NO: 37181 - RNA, 32 nt, Human
accgcaccuggcccccuuccuucgucuuaguc

SEQ ID NO: 37182 - RNA, 32 nt, Human
accgcacggcgccgcugcaggaggccgccggc

SEQ ID NO: 37183 - RNA, 32 nt, Human
accgcacuccagccugggcaacagagugagac

SEQ ID NO: 37184 - RNA, 32 nt, Human
accgcacuuaucucccuuguccuguauccuuu

SEQ ID NO: 37185 - RNA, 32 nt, Human
accgcagaagaacugaagacuguugugugcuc

SEQ ID NO: 37186 - RNA, 32 nt, Human
accgcagaaggaaggcagggaggaggcagaga

SEQ ID NO: 37187 - RNA, 32 nt, Human
accgcagaccagcaacaguaguaugaacucca

SEQ ID NO: 37188 - RNA, 19 nt, Human
accgcagagcccagcucag

SEQ ID NO: 37189 - RNA, 32 nt, Human
accgcagaggacuuggggaccagcaagcaacc

SEQ ID NO: 37190 - RNA, 32 nt, Human
accgcagaggccucuggggauuguaguuuugg

SEQ ID NO: 37191 - RNA, 32 nt, Human
accgcagagugggaagagaguaccggcaucgg

SEQ ID NO: 37192 - RNA, 32 nt, Human
accgcagcagggcugcagucacauccugcgcg

SEQ ID NO: 37193 - RNA, 32 nt, Human
accgcagccccugagggaacagugccgucuua

SEQ ID NO: 37194 - RNA, 32 nt, Human
accgcagccgccgaggccagugugugagccgg

SEQ ID NO: 37195 - RNA, 32 nt, Human
accgcagcuccagcugccguccugggcagacu

SEQ ID NO: 37196 - RNA, 18 nt, Human
accgcagcucgcggcggg

SEQ ID NO: 37197 - RNA, 18 nt, Human
accgcagcugagcaggug

SEQ ID NO: 37198 - RNA, 32 nt, Human
accgcaggcagcaguuugcguuuugaagguua

SEQ ID NO: 37199 - RNA, 32 nt, Human
accgcaguagccgccucugccgccgcggacuu

SEQ ID NO: 37200 - RNA, 32 nt, Human
accgcaguccaugccccauuguggaccaccca

SEQ ID NO: 37201 - RNA, 32 nt, Human
accgcagucccgggaguaagcauuucaaaggg

SEQ ID NO: 37202 - RNA, 32 nt, Human
accgcauaauuauucauuaaacuacaaacuuu

SEQ ID NO: 37203 - RNA, 32 nt, Human
accgcaucccuuacauagagagcagaggccug

SEQ ID NO: 37204 - RNA, 32 nt, Human
accgcauccgcccaugcacagggagcagaugg

SEQ ID NO: 37205 - RNA, 24 nt, Human
accgcauccuccaccucccagguu

SEQ ID NO: 37206 - RNA, 32 nt, Human
accgcaucgucggcucggaggcugaggggcug

SEQ ID NO: 37207 - RNA, 32 nt, Human
accgcauguacccugagggcucauggugaaua

SEQ ID NO: 37208 - RNA, 32 nt, Human
accgcauucccuccugacucagacucaccgcg

SEQ ID NO: 37209 - RNA, 32 nt, Human
accgcauugcuuguuguugcgcuucggaggcg

SEQ ID NO: 37210 - RNA, 32 nt, Human
accgcauuucucuccuuccugauucugauguu

SEQ ID NO: 37211 - RNA, 21 nt, Human
accgccaccaccgccgccgcc

SEQ ID NO: 37212 - RNA, 23 nt, Human
accgccaccgccaccgccaccgc

SEQ ID NO: 37213 - RNA, 22 nt, Human
accgccaccgccaccgccgccg

SEQ ID NO: 37214 - RNA, 24 nt, Human
accgccaccuccgccccccggguu

SEQ ID NO: 37215 - RNA, 21 nt, Human
accgccaccugcuuccaggcc

SEQ ID NO: 37216 - RNA, 32 nt, Human
accgccacucauccccuugucucccucucuga

SEQ ID NO: 37217 - RNA, 32 nt, Human
accgccacuuucuccugccuuccuuguggcug

SEQ ID NO: 37218 - RNA, 32 nt, Human
accgccagagucccagacaccgguuuuccuag

SEQ ID NO: 37219 - RNA, 32 nt, Human
accgccagccccaggccaggcugcgagggccg

SEQ ID NO: 37220 - RNA, 32 nt, Human
accgccagcucuguucuuccucagccagccuc

SEQ ID NO: 37221 - RNA, 32 nt, Human
accgccaggagccgcuggugcaguggcauagc

SEQ ID NO: 37222 - RNA, 21 nt, Human
accgccagggcccugcugggu

SEQ ID NO: 37223 - RNA, 22 nt, Human
accgccagugcugcagggggug

SEQ ID NO: 37224 - RNA, 32 nt, Human
accgccaucuuccaguaauucgccaaagugac

SEQ ID NO: 37225 - RNA, 31 nt, Human
accgccaugggccucacuaucuccucccucu

SEQ ID NO: 37226 - RNA, 32 nt, Human
accgcccacaggacuucauagcugccauccga

SEQ ID NO: 37227 - RNA, 32 nt, Human
accgcccagaauaagauuacaguuguuggggu

SEQ ID NO: 37228 - RNA, 32 nt, Human
accgcccagcuucucccugagggcccaccagc

SEQ ID NO: 37229 - RNA, 32 nt, Human
accgcccaggguggagaaggaggcccuugcuu

SEQ ID NO: 37230 - RNA, 32 nt, Human
accgcccaguaggaagaaaaaugagacauuuu

SEQ ID NO: 37231 - RNA, 16 nt, Human
accgccccaccacaga

SEQ ID NO: 37232 - RNA, 32 nt, Human
accgcccccugcugccccuccugcggccuccc

SEQ ID NO: 37233 - RNA, 32 nt, Human
accgccccuccaggaugcuggggacagggcuc

SEQ ID NO: 37234 - RNA, 32 nt, Human
accgccccucgcucccccuccccuggggccgc

SEQ ID NO: 37235 - RNA, 32 nt, Human
accgccccugcuccccucuccgacccuuugag

SEQ ID NO: 37236 - RNA, 32 nt, Human
accgcccgcccuucccugccccgggcuccucc

SEQ ID NO: 37237 - RNA, 32 nt, Human
accgcccucccgcguucccaugacaacgacac

SEQ ID NO: 37238 - RNA, 32 nt, Human
accgcccucccucuccccggggcccauggcgg

SEQ ID NO: 37239 - RNA, 32 nt, Human
accgcccugcacccuccacccggccaggcccc

SEQ ID NO: 37240 - RNA, 32 nt, Human
accgcccuggacaauauggugaagcccuaucu

SEQ ID NO: 37241 - RNA, 24 nt, Human
accgcccuggcuaacauggugaaa

SEQ ID NO: 37242 - RNA, 32 nt, Human
accgcccuuucccagcugcacucgcccugugg

SEQ ID NO: 37243 - RNA, 32 nt, Human
accgccgaguggaccugcuguaacccugugug

SEQ ID NO: 37244 - RNA, 32 nt, Human
accgccgcaccgaggccugggcccugccaaag

SEQ ID NO: 37245 - RNA, 32 nt, Human
accgccgcagaggcagcaggcacuccccacgc

SEQ ID NO: 37246 - RNA, 25 nt, Human
accgccgcagccgccgccgccgccg

SEQ ID NO: 37247 - RNA, 24 nt, Human
accgccgccaccgccgccgccgcc

SEQ ID NO: 37248 - RNA, 32 nt, Human
accgccgccacuggggcagccagcacaaucgg

SEQ ID NO: 37249 - RNA, 32 nt, Human
accgccgcccuuuaacacagucuggauuuaau

SEQ ID NO: 37250 - RNA, 24 nt, Human
accgccgccgccgccaccaccgcc

SEQ ID NO: 37251 - RNA, 24 nt, Human
accgccgccgccgccaccacugcc

SEQ ID NO: 37252 - RNA, 22 nt, Human
accgccgccgccgccgccgccg

SEQ ID NO: 37253 - RNA, 25 nt, Human
accgccgccgccgccgccgccgccg

SEQ ID NO: 37254 - RNA, 25 nt, Human
accgccgccgccgccgccgccgcug

SEQ ID NO: 37255 - RNA, 22 nt, Human
accgccgccgccgucgccgccg

SEQ ID NO: 37256 - RNA, 22 nt, Human
accgccgccuccgccaccgccg

SEQ ID NO: 37257 - RNA, 32 nt, Human
accgccgcggucgucggggagccccggggcuc

SEQ ID NO: 37258 - RNA, 32 nt, Human
accgccgcucgggccauguccgaggggcgcgc

SEQ ID NO: 37259 - RNA, 25 nt, Human
accgccgcugccgccgccgccgccg

SEQ ID NO: 37260 - RNA, 32 nt, Human
accgccgcuucugcaaggucucagggacgggc

SEQ ID NO: 37261 - RNA, 32 nt, Human
accgccgguccugccaaggggcuacuuccugc

SEQ ID NO: 37262 - RNA, 25 nt, Human
accgccgucgccgccgccgcagccg

SEQ ID NO: 37263 - RNA, 31 nt, Human
accgccguggugagucuggccaacaccaagc

SEQ ID NO: 37264 - RNA, 32 nt, Human
accgccucagccgccucgcacauuuagucuug

SEQ ID NO: 37265 - RNA, 32 nt, Human
accgccucccacccacugagggcaggagggcu

SEQ ID NO: 37266 - RNA, 24 nt, Human
accgccuccccugccaccgccgcc

SEQ ID NO: 37267 - RNA, 32 nt, Human
accgccucucaccuucuccaucgugcaugucc

SEQ ID NO: 37268 - RNA, 23 nt, Human
accgccugagugagaaccagggg

SEQ ID NO: 37269 - RNA, 32 nt, Human
accgccugcacugccaugccuggaggcagaca

SEQ ID NO: 37270 - RNA, 32 nt, Human
accgccugcagcugcgcgaggagugccgccgc

SEQ ID NO: 37271 - RNA, 32 nt, Human
accgccugcuaaaaauacccgacuggaggagc

SEQ ID NO: 37272 - RNA, 32 nt, Human
accgccugcucccuccggacagcacacuccug

SEQ ID NO: 37273 - RNA, 24 nt, Human
accgccuggaccuuugcccggagg

SEQ ID NO: 37274 - RNA, 19 nt, Human
accgccuggagccgccggg

SEQ ID NO: 37275 - RNA, 32 nt, Human
accgccuggcccagccuccaccagggaccccu

SEQ ID NO: 37276 - RNA, 23 nt, Human
accgccugggcaacauggugaaa

SEQ ID NO: 37277 - RNA, 32 nt, Human
accgccugggccugagccugaccgggccauuc

SEQ ID NO: 37278 - RNA, 32 nt, Human
accgccuguggaacaguggggacgcugcuggu

SEQ ID NO: 37279 - RNA, 32 nt, Human
accgccugugggacccagagggcuugaggaca

SEQ ID NO: 37280 - RNA, 32 nt, Human
accgccuucccaacaccuccuucccaaacccc

SEQ ID NO: 37281 - RNA, 32 nt, Human
accgccuugagucuggccaaggaggugauuaa

SEQ ID NO: 37282 - RNA, 28 nt, Human
accgcgacccggggcgccucauccucag

SEQ ID NO: 37283 - RNA, 32 nt, Human
accgcgacuuccuaaggucugucuccucugaa

SEQ ID NO: 37284 - RNA, 32 nt, Human
accgcgaggaaggcacccugcugccugcacuu

SEQ ID NO: 37285 - RNA, 32 nt, Human
accgcgcaagggccccugccucccgggagacu

SEQ ID NO: 37286 - RNA, 32 nt, Human
accgcgccacugcacuccagccugggcaacaa

SEQ ID NO: 37287 - RNA, 32 nt, Human
accgcgccacugcacuccagccugggcaacag

SEQ ID NO: 37288 - RNA, 32 nt, Human
accgcgcccagccuaauuuuuguauuuuuagu

SEQ ID NO: 37289 - RNA, 32 nt, Human
accgcgcccagccugaaauacucuauauuggg

SEQ ID NO: 37290 - RNA, 32 nt, Human
accgcgccccagggguuggaggaccuugucug

SEQ ID NO: 37291 - RNA, 32 nt, Human
accgcgccgcggaccucacaccugcgcagccc

SEQ ID NO: 37292 - RNA, 32 nt, Human
accgcgccuauaauccuagcacuuugggaggc

SEQ ID NO: 37293 - RNA, 32 nt, Human
accgcgcgugcuucuagaaagggggcguggag

SEQ ID NO: 37294 - RNA, 32 nt, Human
accgcggcaauguccagcaauaguuuuccuua

SEQ ID NO: 37295 - RNA, 32 nt, Human
accgcggcagauugaggcauugauugggggag

SEQ ID NO: 37296 - RNA, 32 nt, Human
accgcgggcccugcacccuggcccagauggcg

SEQ ID NO: 37297 - RNA, 32 nt, Human
accgcggugcaagagcccagcccaggggcgcu

SEQ ID NO: 37298 - RNA, 24 nt, Human
accgcguagccgucgccaccgccg

SEQ ID NO: 37299 - RNA, 32 nt, Human
accgcgucccgagagccccagaagucggcggg

SEQ ID NO: 37300 - RNA, 32 nt, Human
accgcguggcuugcgauguccaugucuucagc

SEQ ID NO: 37301 - RNA, 32 nt, Human
accgcgugggacagagcaagaucuucuuccgg

SEQ ID NO: 37302 - RNA, 32 nt, Human
accgcgugggccgcggggugcugguaggagug

SEQ ID NO: 37303 - RNA, 32 nt, Human
accgcuacacuccagccugggugacagaguga

SEQ ID NO: 37304 - RNA, 23 nt, Human
accgcuaccgccgccgccgccgc

SEQ ID NO: 37305 - RNA, 32 nt, Human
accgcuagauaaacgugugccugucccccagg

SEQ ID NO: 37306 - RNA, 32 nt, Human
accgcucagcugucuuguaaaacagugaacac

SEQ ID NO: 37307 - RNA, 32 nt, Human
accgcuccaguucucaucaucucccaggcaga

SEQ ID NO: 37308 - RNA, 18 nt, Human
accgcucccagcuuauca

SEQ ID NO: 37309 - RNA, 32 nt, Human
accgcucccuucuaaccuucccccucugagaa

SEQ ID NO: 37310 - RNA, 32 nt, Human
accgcucgaaucucccuggggugcccucccca

SEQ ID NO: 37311 - RNA, 32 nt, Human
accgcucugggagagaaauaagcacugggaga

SEQ ID NO: 37312 - RNA, 32 nt, Human
accgcugcacucaagccugggugacagugaga

SEQ ID NO: 37313 - RNA, 32 nt, Human
accgcugcacucaagcuugggugacagagcaa

SEQ ID NO: 37314 - RNA, 32 nt, Human
accgcugcacuccagccugggugacagaauga

SEQ ID NO: 37315 - RNA, 32 nt, Human
accgcugcacuccagccugggugacagagcga

SEQ ID NO: 37316 - RNA, 32 nt, Human
accgcugcagagcauugaggauguaugugaug

SEQ ID NO: 37317 - RNA, 32 nt, Human
accgcugccaagccuguucucccccauuacaa

SEQ ID NO: 37318 - RNA, 32 nt, Human
accgcugccccaggagcagcacgaggaagaga

SEQ ID NO: 37319 - RNA, 32 nt, Human
accgcugccucagccucugccucccagccucu

SEQ ID NO: 37320 - RNA, 32 nt, Human
accgcuggccggcagcccugggcugaggcaca

SEQ ID NO: 37321 - RNA, 32 nt, Human
accgcuucacuuucucccuccugccgccgccg

SEQ ID NO: 37322 - RNA, 32 nt, Human
accgcuucagggacggagacaggaccggcgga

SEQ ID NO: 37323 - RNA, 32 nt, Human
accgcuucccccaaguucugcuguuggacucu

SEQ ID NO: 37324 - RNA, 32 nt, Human
accgcuucgacuggaagauccaccuccccacu

SEQ ID NO: 37325 - RNA, 22 nt, Human
accgcuucucagccacaaaccc

SEQ ID NO: 37326 - RNA, 32 nt, Human
accgcuucucagccacaaacccugccucuuuu

SEQ ID NO: 37327 - RNA, 32 nt, Human
accgcuugaacccgggaggcggagauugcagu

SEQ ID NO: 37328 - RNA, 32 nt, Human
accgcuugagccugagagaugaagguugcagu

SEQ ID NO: 37329 - RNA, 32 nt, Human
accgcuuggagggagugugcucugaguuaagc

SEQ ID NO: 37330 - RNA, 32 nt, Human
accgcuuguacccaggagguggagguugcagu

SEQ ID NO: 37331 - RNA, 32 nt, Human
accggaaagcacaacuguguaaggagagacua

SEQ ID NO: 37332 - RNA, 32 nt, Human
accggaacccaagauggcugcgcuguugcuga

SEQ ID NO: 37333 - RNA, 32 nt, Human
accggaaccccaguuacccggggaggacgugg

SEQ ID NO: 37334 - RNA, 32 nt, Human
accggaaggcagagguugcagugagccaagau

SEQ ID NO: 37335 - RNA, 32 nt, Human
accggaagugacgagaccugucggccauggag

SEQ ID NO: 37336 - RNA, 32 nt, Human
accggaagugcugcccgcugcccagaagaacu

SEQ ID NO: 37337 - RNA, 31 nt, Human
accggacaagugucauguuaaaagacagaug

SEQ ID NO: 37338 - RNA, 32 nt, Human
accggacccacuaauccucugggauuggccga

SEQ ID NO: 37339 - RNA, 32 nt, Human
accggacuccacacaucaacacugucauguga

SEQ ID NO: 37340 - RNA, 32 nt, Human
accggagaacccacaauaauagaaaucuuuuc

SEQ ID NO: 37341 - RNA, 31 nt, Human
accggagagguuuugccucagcugcucucaa

SEQ ID NO: 37342 - RNA, 32 nt, Human
accggagcuacaccacgcagcugaccaugaac

SEQ ID NO: 37343 - RNA, 32 nt, Human
accggagcugaauuaccuuucacuuucaaaaa

SEQ ID NO: 37344 - RNA, 32 nt, Human
accggagcuguggggcagaagcaucccaggcc

SEQ ID NO: 37345 - RNA, 32 nt, Human
accggagcuugucuuuaaaaaugagcaggaag

SEQ ID NO: 37346 - RNA, 32 nt, Human
accggaggacaccuacacggaggacuccugcu

SEQ ID NO: 37347 - RNA, 32 nt, Human
accggaggauccccgcccugccccgccccgcg

SEQ ID NO: 37348 - RNA, 32 nt, Human
accggaggcaggcugggugcaguggcucaugc

SEQ ID NO: 37349 - RNA, 32 nt, Human
accggagggaggaggaggaggaagaagagcgg

SEQ ID NO: 37350 - RNA, 32 nt, Human
accggaguucauguucaauaaauauugggugu

SEQ ID NO: 37351 - RNA, 32 nt, Human
accggaucugcugccgcugagcuugcagaauc

SEQ ID NO: 37352 - RNA, 32 nt, Human
accggaucuggauuggggagguuggucaggga

SEQ ID NO: 37353 - RNA, 32 nt, Human
accggaucuucacuucucagugggauuuuguc

SEQ ID NO: 37354 - RNA, 32 nt, Human
accggauggggguagugagcaaaucugcccug

SEQ ID NO: 37355 - RNA, 32 nt, Human
accggauuccccuggugaaucugugugccccc

SEQ ID NO: 37356 - RNA, 32 nt, Human
accggauuguucaaaguggaccccaggggaga

SEQ ID NO: 37357 - RNA, 32 nt, Human
accggcacagccgcgggagcaugggcaggagg

SEQ ID NO: 37358 - RNA, 32 nt, Human
accggcacagggcagagaugcggguggcccaa

SEQ ID NO: 37359 - RNA, 32 nt, Human
accggcagaaauggaaguauccauacauuuuu

SEQ ID NO: 37360 - RNA, 32 nt, Human
accggcagaacagucugaucucuuuguauguu

SEQ ID NO: 37361 - RNA, 32 nt, Human
accggcagaucuuccucuacaccuugggcaaa

SEQ ID NO: 37362 - RNA, 21 nt, Human
accggcagccgcugucccggc

SEQ ID NO: 37363 - RNA, 32 nt, Human
accggcagggaaggaggaaauggaguuuuccu

SEQ ID NO: 37364 - RNA, 32 nt, Human
accggcagggcuggggugagaccccucccuuc

SEQ ID NO: 37365 - RNA, 32 nt, Human
accggcauccacacaaaaccaaacaggagcag

SEQ ID NO: 37366 - RNA, 32 nt, Human
accggcauccuccuagggagggauuauuauua

SEQ ID NO: 37367 - RNA, 32 nt, Human
accggccaaauaaauggaaccugcugagagag

SEQ ID NO: 37368 - RNA, 32 nt, Human
accggccaccccaccgcccacccggcucccgg

SEQ ID NO: 37369 - RNA, 18 nt, Human
accggccacccucuucca

SEQ ID NO: 37370 - RNA, 32 nt, Human
accggccacugcagcccuggugagggcgggug

SEQ ID NO: 37371 - RNA, 32 nt, Human
accggccagggugggaccuagguuuuaacucg

SEQ ID NO: 37372 - RNA, 32 nt, Human
accggccaucauuggaaucagcuaaugguaaa

SEQ ID NO: 37373 - RNA, 32 nt, Human
accggcccugcuccuuccuccucuagguccag

SEQ ID NO: 37374 - RNA, 32 nt, Human
accggcccugcuccuuccuccucugggcccag

SEQ ID NO: 37375 - RNA, 32 nt, Human
accggccgcuucuguccucggacccauuccaa

SEQ ID NO: 37376 - RNA, 32 nt, Human
accggccgggcugacguguuucaucuggcagc

SEQ ID NO: 37377 - RNA, 32 nt, Human
accggccucacacuaguaucgcauguccacua

SEQ ID NO: 37378 - RNA, 17 nt, Human
accggccuccaggugcu

SEQ ID NO: 37379 - RNA, 32 nt, Human
accggccuccccucuccuucugggccgcagag

SEQ ID NO: 37380 - RNA, 32 nt, Human
accggccucuguccucuccacuagcgccaggg

SEQ ID NO: 37381 - RNA, 32 nt, Human
accggccugcuguucuguccuuccaucccucu

SEQ ID NO: 37382 - RNA, 32 nt, Human
accggccugcuuuuuagcuccugggcccuaac

SEQ ID NO: 37383 - RNA, 24 nt, Human
accggccuggccaacauggugaaa

SEQ ID NO: 37384 - RNA, 24 nt, Human
accggccuggccaacguggugaaa

SEQ ID NO: 37385 - RNA, 24 nt, Human
accggccuggccaauauggugaaa

SEQ ID NO: 37386 - RNA, 24 nt, Human
accggccuggucaacauggugaaa

SEQ ID NO: 37387 - RNA, 32 nt, Human
accggcgccaucagcuaccacccguacggcag

SEQ ID NO: 37388 - RNA, 32 nt, Human
accggcgcugacagcuguaggcuguagccugc

SEQ ID NO: 37389 - RNA, 32 nt, Human
accggcucaagcaauccucccaucucagccuc

SEQ ID NO: 37390 - RNA, 32 nt, Human
accggcuccccaagcccuccccaccaaggggu

SEQ ID NO: 37391 - RNA, 22 nt, Human
accggcuccuucuccaagaaag

SEQ ID NO: 37392 - RNA, 32 nt, Human
accggcuccuugguccaguucugcaccggggu

SEQ ID NO: 37393 - RNA, 32 nt, Human
accggcugaagcagggcaaguucugaccagga

SEQ ID NO: 37394 - RNA, 32 nt, Human
accggcugcacccaggcugugaccucagcuga

SEQ ID NO: 37395 - RNA, 32 nt, Human
accggcugccaggagaaaaccucauggaucac

SEQ ID NO: 37396 - RNA, 32 nt, Human
accggcuggaggaagagcaggaagaggcggug

SEQ ID NO: 37397 - RNA, 24 nt, Human
accggcuggcgcggccagcuggaa

SEQ ID NO: 37398 - RNA, 32 nt, Human
accggcuuaagaaacggcgcaccacaagacua

SEQ ID NO: 37399 - RNA, 32 nt, Human
accggcuucucggcuuggauccugggcugggu

SEQ ID NO: 37400 - RNA, 32 nt, Human
accgggagaggaacuuccagaccagccccuca

SEQ ID NO: 37401 - RNA, 32 nt, Human
accgggagcggcuucuggaggagcgcgaccug

SEQ ID NO: 37402 - RNA, 32 nt, Human
accgggagcuggcucuggaggcugcggaggcg

SEQ ID NO: 37403 - RNA, 32 nt, Human
accgggaggaagcagcugcggccaucgcgccg

SEQ ID NO: 37404 - RNA, 32 nt, Human
accgggaggagcagacgacuccggacgcgcca

SEQ ID NO: 37405 - RNA, 32 nt, Human
accgggaggcagaaguugcagugagccgagau

SEQ ID NO: 37406 - RNA, 32 nt, Human
accgggaggcggaaguugcagugagccaagau

SEQ ID NO: 37407 - RNA, 32 nt, Human
accgggaggcggagguugaggugagccgaaau

SEQ ID NO: 37408 - RNA, 32 nt, Human
accgggaggcggagguugcagugagccgagau

SEQ ID NO: 37409 - RNA, 32 nt, Human
accgggagucccgguuaucccaaaaaggguug

SEQ ID NO: 37410 - RNA, 32 nt, Human
accgggauccuggaaggugaguguguaugaau

SEQ ID NO: 37411 - RNA, 32 nt, Human
accgggcaacaacugccauccagccugucgcc

SEQ ID NO: 37412 - RNA, 32 nt, Human
accgggcacagcaagcggcccagaucucaguc

SEQ ID NO: 37413 - RNA, 32 nt, Human
accgggcagagggaggggaggagaggaggccg

SEQ ID NO: 37414 - RNA, 32 nt, Human
accgggcagcaaccccacucccacucggaggc

SEQ ID NO: 37415 - RNA, 21 nt, Human
accgggcagggaggggugcug

SEQ ID NO: 37416 - RNA, 32 nt, Human
accgggcaguuccugaccagcaccccaccaag

SEQ ID NO: 37417 - RNA, 32 nt, Human
accgggccaggcucggagcugcagggaauccg

SEQ ID NO: 37418 - RNA, 32 nt, Human
accgggcccagggcaagcagaugucgcaagcc

SEQ ID NO: 37419 - RNA, 32 nt, Human
accgggcgaggacugcagccucgaguccaccu

SEQ ID NO: 37420 - RNA, 30 nt, Human
accgggcucagcuccagggcacagucacuu

SEQ ID NO: 37421 - RNA, 32 nt, Human
accgggcucccagaagagcuggcauugugucu

SEQ ID NO: 37422 - RNA, 32 nt, Human
accgggcuggacugcccugaucccugggacgu

SEQ ID NO: 37423 - RNA, 32 nt, Human
accgggcuuaggcaggcuguugaggagcugug

SEQ ID NO: 37424 - RNA, 32 nt, Human
accggggagacggagguugcagugagccgagu

SEQ ID NO: 37425 - RNA, 32 nt, Human
accggggagcagcugcuccauugugccucgag

SEQ ID NO: 37426 - RNA, 32 nt, Human
accggggaggcagagguugcagugagcugaga

SEQ ID NO: 37427 - RNA, 32 nt, Human
accggggaggcagagguugcaguuaagccgag

SEQ ID NO: 37428 - RNA, 25 nt, Human
accggggaggcggagauugcaguga

SEQ ID NO: 37429 - RNA, 32 nt, Human
accggggaggcggagcuugcagugagccaaga

SEQ ID NO: 37430 - RNA, 25 nt, Human
accggggaggcggagguuacaguga

SEQ ID NO: 37431 - RNA, 32 nt, Human
accggggaggcggagguuacagugagccgaga

SEQ ID NO: 37432 - RNA, 32 nt, Human
accggggaggcggggguugcaaugagcuaaga

SEQ ID NO: 37433 - RNA, 32 nt, Human
accggggaggcugaggcaggagaaucgcuaga

SEQ ID NO: 37434 - RNA, 32 nt, Human
accggggagguggaggcugcagugagccgaga

SEQ ID NO: 37435 - RNA, 32 nt, Human
accggggagguggagguugcagugagcugaga

SEQ ID NO: 37436 - RNA, 32 nt, Human
accggggaguuggagguugcagugagccgaga

SEQ ID NO: 37437 - RNA, 32 nt, Human
accggggccaacacuggcagcuggagauggcg

SEQ ID NO: 37438 - RNA, 32 nt, Human
accggggccggagacguggcagccgcccugcc

SEQ ID NO: 37439 - RNA, 32 nt, Human
accggggcuccagccugcaccugcaccaggca

SEQ ID NO: 37440 - RNA, 32 nt, Human
accgggggacuggccggcccgcuucgugccug

SEQ ID NO: 37441 - RNA, 32 nt, Human
accgggggaggaggaggaggagaagguggaga

SEQ ID NO: 37442 - RNA, 31 nt, Human
accgggggcaaaggagguggcaugucgguca

SEQ ID NO: 37443 - RNA, 32 nt, Human
accgggguaaagggagggaagcaauucaauuu

SEQ ID NO: 37444 - RNA, 31 nt, Human
accggguaauaguguccgacagcagauuuua

SEQ ID NO: 37445 - RNA, 32 nt, Human
accgggugagugagaaggagagcggggcaagc

SEQ ID NO: 37446 - RNA, 32 nt, Human
accggguggggagggggcugguugggagagga

SEQ ID NO: 37447 - RNA, 32 nt, Human
accgggugucugcgguaggaacaagagggcug

SEQ ID NO: 37448 - RNA, 32 nt, Human
accgguaaccaccacuuccccacaccgccgcc

SEQ ID NO: 37449 - RNA, 20 nt, Human
accggucagaccagcccgag

SEQ ID NO: 37450 - RNA, 32 nt, Human
accggucuacaucgcacccccacccccacccc

SEQ ID NO: 37451 - RNA, 24 nt, Human
accggucuggccaacauggugaaa

SEQ ID NO: 37452 - RNA, 32 nt, Human
accggugggugaggggugauguagagucaaug

SEQ ID NO: 37453 - RNA, 32 nt, Human
accgguggugcuggucugccuuugccaacuau

SEQ ID NO: 37454 - RNA, 32 nt, Human
accgguguccccguccgcguccuuccuccccg

SEQ ID NO: 37455 - RNA, 32 nt, Human
accgguugcucugagaguagcugguaaagagg

SEQ ID NO: 37456 - RNA, 32 nt, Human
accgguugucgccccaguggccgcccucugag

SEQ ID NO: 37457 - RNA, 32 nt, Human
accguaauccuagcuacucgggagacugacgg

SEQ ID NO: 37458 - RNA, 32 nt, Human
accguaccaccgcucgccagcacgcaggggga

SEQ ID NO: 37459 - RNA, 27 nt, Human
accguagccugggugauaagagugaga

SEQ ID NO: 37460 - RNA, 32 nt, Human
accguauacguucacacacaugcacuauguaa

SEQ ID NO: 37461 - RNA, 32 nt, Human
accguaugaggugaauggacagccagccacca

SEQ ID NO: 37462 - RNA, 32 nt, Human
accguauucuucauuccuucuuuuggaaaugu

SEQ ID NO: 37463 - RNA, 32 nt, Human
accgucacaggccaccaccacgccgucaauga

SEQ ID NO: 37464 - RNA, 18 nt, Human
accgucaccacccgacag

SEQ ID NO: 37465 - RNA, 32 nt, Human
accgucagccucccuccccucuccacccuuca

SEQ ID NO: 37466 - RNA, 32 nt, Human
accgucaugccuggcuaauuuuuguauuuuug

SEQ ID NO: 37467 - RNA, 32 nt, Human
accgucauuggccugugaagcauuggacauuu

SEQ ID NO: 37468 - RNA, 32 nt, Human
accguccagcaaagccagcacagcagagauga

SEQ ID NO: 37469 - RNA, 32 nt, Human
accguccagcagcugcugcucuccaaggcugc

SEQ ID NO: 37470 - RNA, 32 nt, Human
accguccagccccugaccacacuuguuccuag

SEQ ID NO: 37471 - RNA, 32 nt, Human
accgucccacaccuuuuacuugcucagugcug

SEQ ID NO: 37472 - RNA, 32 nt, Human
accgucccagaaccuccuugcucugcaguccc

SEQ ID NO: 37473 - RNA, 32 nt, Human
accgucccucugccagccauaggcccugccuc

SEQ ID NO: 37474 - RNA, 32 nt, Human
accgucccuugaucucucauacuuucucccug

SEQ ID NO: 37475 - RNA, 19 nt, Human
accguccucaccccugucc

SEQ ID NO: 37476 - RNA, 24 nt, Human
accguccuggccgacauggugaaa

SEQ ID NO: 37477 - RNA, 24 nt, Human
accguccuggcuaacacggugaaa

SEQ ID NO: 37478 - RNA, 24 nt, Human
accguccuggcuaacauggugaaa

SEQ ID NO: 37479 - RNA, 32 nt, Human
accguccuggcuucgaacccagcucuuccacc

SEQ ID NO: 37480 - RNA, 32 nt, Human
accgucggcccgagggcgcagaccugaggcga

SEQ ID NO: 37481 - RNA, 24 nt, Human
accgucguggcuaacacggugaaa

SEQ ID NO: 37482 - RNA, 32 nt, Human
accgucuaguugggaaagucacccuacagggu

SEQ ID NO: 37483 - RNA, 32 nt, Human
accgucucauuuccccucuguuucucaguucc

SEQ ID NO: 37484 - RNA, 32 nt, Human
accgucugccuugcuccucucuucccaaauca

SEQ ID NO: 37485 - RNA, 32 nt, Human
accgucuucucccuauucccucucucucccag

SEQ ID NO: 37486 - RNA, 32 nt, Human
accgucuuuaccucagcuccuagggccuccag

SEQ ID NO: 37487 - RNA, 32 nt, Human
accgugaaggaaaugaagguugagaaccugga

SEQ ID NO: 37488 - RNA, 32 nt, Human
accgugacaucaggccagagguuuccaaucag

SEQ ID NO: 37489 - RNA, 32 nt, Human
accgugaccccagcuccggagccugcugaaaa

SEQ ID NO: 37490 - RNA, 32 nt, Human
accgugacccccuccuccuccuucuuugccac

SEQ ID NO: 37491 - RNA, 32 nt, Human
accgugaccccuguccccacacugaccugugu

SEQ ID NO: 37492 - RNA, 32 nt, Human
accgugagcuuggaggcagugcaccacauaaa

SEQ ID NO: 37493 - RNA, 32 nt, Human
accgugagggggaccauccauccaggagagua

SEQ ID NO: 37494 - RNA, 32 nt, Human
accgugauggagaggacagagcaggggcucca

SEQ ID NO: 37495 - RNA, 32 nt, Human
accgugauugagcccaagaaaccagggacuua

SEQ ID NO: 37496 - RNA, 32 nt, Human
accgugauugagcuugucagcagagcugaaag

SEQ ID NO: 37497 - RNA, 32 nt, Human
accgugcagcuuuggccugggcacagacccug

SEQ ID NO: 37498 - RNA, 32 nt, Human
accgugccacugcacuccagccuggcaacaga

SEQ ID NO: 37499 - RNA, 32 nt, Human
accgugccacugcacuccagccugggcaacac

SEQ ID NO: 37500 - RNA, 32 nt, Human
accgugccacuguacuccagccugggcagcag

SEQ ID NO: 37501 - RNA, 32 nt, Human
accgugcccagccuggacuugccuuuuaccuc

SEQ ID NO: 37502 - RNA, 32 nt, Human
accgugccuggcuuugcuguggauucuuuugg

SEQ ID NO: 37503 - RNA, 32 nt, Human
accgugcucagccuguuucucucugcccucua

SEQ ID NO: 37504 - RNA, 32 nt, Human
accgugcugcuugauagaaugacuuugagguc

SEQ ID NO: 37505 - RNA, 32 nt, Human
accgugcuucagaaucccagcacauaguaaaa

SEQ ID NO: 37506 - RNA, 32 nt, Human
accguggagaggaggcauucacuguggggugu

SEQ ID NO: 37507 - RNA, 21 nt, Human
accguggaggcagggggcaag

SEQ ID NO: 37508 - RNA, 32 nt, Human
accguggaugcugaaguuagagcacgucgcca

SEQ ID NO: 37509 - RNA, 32 nt, Human
accguggcacaguccugcucagucccuggacu

SEQ ID NO: 37510 - RNA, 20 nt, Human
accguggccaggccaucucc

SEQ ID NO: 37511 - RNA, 32 nt, Human
accguggccccuccuggccccugggccuccug

SEQ ID NO: 37512 - RNA, 32 nt, Human
accgugggaacagcaggcuugggagugcagcc

SEQ ID NO: 37513 - RNA, 19 nt, Human
accgugggccucagagcug

SEQ ID NO: 37514 - RNA, 32 nt, Human
accgugggugguaaugcagugggagccaccuc

SEQ ID NO: 37515 - RNA, 24 nt, Human
accguggucuccugcugucccgcg

SEQ ID NO: 37516 - RNA, 32 nt, Human
accguggucucgaucuccugaccucgugaucc

SEQ ID NO: 37517 - RNA, 32 nt, Human
accguggucugugaauggagagagugagcugg

SEQ ID NO: 37518 - RNA, 32 nt, Human
accguguccuagagagccucuaugcauuucaa

SEQ ID NO: 37519 - RNA, 32 nt, Human
accgugucugcagcacgcuuccgucuccgcau

SEQ ID NO: 37520 - RNA, 32 nt, Human
accgugugggcuguaguagcgggagggguggg

SEQ ID NO: 37521 - RNA, 32 nt, Human
accguguuagccaggcuggucucgaucugacc

SEQ ID NO: 37522 - RNA, 28 nt, Human
accguguucagugcugcuucacucuacc

SEQ ID NO: 37523 - RNA, 20 nt, Human
accguucacuuccccuucca

SEQ ID NO: 37524 - RNA, 16 nt, Human
accguuccaccacaga

SEQ ID NO: 37525 - RNA, 32 nt, Human
accguuccagaaaucccaacucucacacccag

SEQ ID NO: 37526 - RNA, 32 nt, Human
accguucccuuccuccugccuggaccauggua

SEQ ID NO: 37527 - RNA, 32 nt, Human
accguucuguacuggcuuacucuaaugguguu

SEQ ID NO: 37528 - RNA, 32 nt, Human
accguuuaugaggaaaacugagcaggguggca

SEQ ID NO: 37529 - RNA, 32 nt, Human
accguuuccucuucucuuucccuggccaaugg

SEQ ID NO: 37530 - RNA, 32 nt, Human
accguuucugacucugugcccugucccugagc

SEQ ID NO: 37531 - RNA, 32 nt, Human
accguuugucauggaagccagggagccuggga

SEQ ID NO: 37532 - RNA, 23 nt, Human
accuaaaaaauuccuaggugcua

SEQ ID NO: 37533 - RNA, 32 nt, Human
accuaaaaaccugagaggaaggggacaaguag

SEQ ID NO: 37534 - RNA, 32 nt, Human
accuaaaaccaauuucaaaauggcuuucuuug

SEQ ID NO: 37535 - RNA, 32 nt, Human
accuaaaagaugacagaagcauagcccuuaac

SEQ ID NO: 37536 - RNA, 31 nt, Human
accuaaaaggauauguuaucacuggaauuua

SEQ ID NO: 37537 - RNA, 32 nt, Human
accuaaaaucuuuacacuuucaucucaaagau

SEQ ID NO: 37538 - RNA, 32 nt, Human
accuaaacauuccaacccuuaaagcuaaaaca

SEQ ID NO: 37539 - RNA, 32 nt, Human
accuaaaccauccuaagugacuguggaauucu

SEQ ID NO: 37540 - RNA, 32 nt, Human
accuaaagaccagcaaccauacugaaacaagu

SEQ ID NO: 37541 - RNA, 32 nt, Human
accuaaagcaggaggccaggagcccagccucu

SEQ ID NO: 37542 - RNA, 22 nt, Human
accuaaagcuggcacuagcaaa

SEQ ID NO: 37543 - RNA, 32 nt, Human
accuaaaggacaaaugucagagcccagcagga

SEQ ID NO: 37544 - RNA, 32 nt, Human
accuaaauagaaagcgaacuucaagagaaguu

SEQ ID NO: 37545 - RNA, 32 nt, Human
accuaaauagcaaaagcaauccuaagcaaaaa

SEQ ID NO: 37546 - RNA, 32 nt, Human
accuaaauccugauuauaggcuuuucauuucu

SEQ ID NO: 37547 - RNA, 32 nt, Human
accuaaauuuugcuuaaggaaggccuuuauca

SEQ ID NO: 37548 - RNA, 32 nt, Human
accuaacaaaggcauaaugaugggacuucuca

SEQ ID NO: 37549 - RNA, 20 nt, Human
accuaacaacgaccggcgcc

SEQ ID NO: 37550 - RNA, 32 nt, Human
accuaacacccccuagcaaaacucacagagcu

SEQ ID NO: 37551 - RNA, 32 nt, Human
accuaacagcuguccccaacucucauucauga

SEQ ID NO: 37552 - RNA, 32 nt, Human
accuaacaggaaauagcuaaacacaacacacc

SEQ ID NO: 37553 - RNA, 32 nt, Human
accuaacaggaugucagcagggcaguuaacuc

SEQ ID NO: 37554 - RNA, 32 nt, Human
accuaaccagagggccagaguuuggggugcug

SEQ ID NO: 37555 - RNA, 32 nt, Human
accuaaccagcuuguauuggccaucuggaaua

SEQ ID NO: 37556 - RNA, 32 nt, Human
accuaaccaggaggccagagcgguuugaaaac

SEQ ID NO: 37557 - RNA, 32 nt, Human
accuaacucuagaccaccuucagcucuuuuau

SEQ ID NO: 37558 - RNA, 32 nt, Human
accuaacuuuuuaguaaccagauuuucaaaaa

SEQ ID NO: 37559 - RNA, 32 nt, Human
accuaagaagugagaauccuaggcauccccau

SEQ ID NO: 37560 - RNA, 32 nt, Human
accuaagauucucuggcucagccccagccuuu

SEQ ID NO: 37561 - RNA, 32 nt, Human
accuaagccgcgagccuuugcccacacggaga

SEQ ID NO: 37562 - RNA, 32 nt, Human
accuaagcuucucuuucuccuagaagguaaaa

SEQ ID NO: 37563 - RNA, 32 nt, Human
accuaagcuuucaguguauccagauccacauc

SEQ ID NO: 37564 - RNA, 32 nt, Human
accuaaggaagcgcgaugcuggaacacauccc

SEQ ID NO: 37565 - RNA, 32 nt, Human
accuaaggacugccugcuuucuggucacaugu

SEQ ID NO: 37566 - RNA, 32 nt, Human
accuaaggccugauguuuaccuggagccagau

SEQ ID NO: 37567 - RNA, 32 nt, Human
accuaagguagaaagcugcccaucgggggccc

SEQ ID NO: 37568 - RNA, 32 nt, Human
accuaaggucuuagaaaaucuuaacuugaaaa

SEQ ID NO: 37569 - RNA, 32 nt, Human
accuaaguacacacaaacaaaaacaugcccac

SEQ ID NO: 37570 - RNA, 32 nt, Human
accuaagucaucuucgaguccucagcacuuca

SEQ ID NO: 37571 - RNA, 32 nt, Human
accuaaguccuuccaccugccacccccuuccc

SEQ ID NO: 37572 - RNA, 32 nt, Human
accuaagucuauauucacuguguccuuuucug

SEQ ID NO: 37573 - RNA, 32 nt, Human
accuaagugccgccugacccuuguacacuagg

SEQ ID NO: 37574 - RNA, 32 nt, Human
accuaagugccucaggacugcaccuuagggca

SEQ ID NO: 37575 - RNA, 32 nt, Human
accuaagugccuccccaaccagggucuguccu

SEQ ID NO: 37576 - RNA, 32 nt, Human
accuaaguggcagagguugcagugagcugaga

SEQ ID NO: 37577 - RNA, 32 nt, Human
accuaauaaggcaugcgaaauguucucaugaa

SEQ ID NO: 37578 - RNA, 32 nt, Human
accuaaucaaaggcacuuacugcugcucagaa

SEQ ID NO: 37579 - RNA, 32 nt, Human
accuaaucaaucaguguaucagugcaucuggu

SEQ ID NO: 37580 - RNA, 32 nt, Human
accuaaucacucccaaaguccaccuccuaaca

SEQ ID NO: 37581 - RNA, 32 nt, Human
accuaauggccuuggacaccagauucuuuccc

SEQ ID NO: 37582 - RNA, 32 nt, Human
accuaaugguuuuuaauuuugguacaacuccu

SEQ ID NO: 37583 - RNA, 32 nt, Human
accuaauuauaguagugagaacuauuucuuuu

SEQ ID NO: 37584 - RNA, 32 nt, Human
accuaauuugucugaaauuaaauuuaauaguu

SEQ ID NO: 37585 - RNA, 32 nt, Human
accuaauuuuguagcuucagaacaggugugac

SEQ ID NO: 37586 - RNA, 28 nt, Human
accuacaagugguuugccucauugccuu

SEQ ID NO: 37587 - RNA, 32 nt, Human
accuacaaucaccagucucaaaugcgcuauug

SEQ ID NO: 37588 - RNA, 32 nt, Human
accuacacugaucuuaguucucuuaugaaaaa

SEQ ID NO: 37589 - RNA, 32 nt, Human
accuacagaaaagaugcagaugcaagaauaau

SEQ ID NO: 37590 - RNA, 32 nt, Human
accuacagacaugcagaacaugcacguguaca

SEQ ID NO: 37591 - RNA, 32 nt, Human
accuacagccuggaagaagagaguaucuggaa

SEQ ID NO: 37592 - RNA, 32 nt, Human
accuacagcgugccuuggcacugggcuagaga

SEQ ID NO: 37593 - RNA, 32 nt, Human
accuacaggaggccacugcaucaacacgccac

SEQ ID NO: 37594 - RNA, 32 nt, Human
accuacagggaagaguaggugagcugucgggg

SEQ ID NO: 37595 - RNA, 32 nt, Human
accuacagguaagucuacauccucucugacag

SEQ ID NO: 37596 - RNA, 32 nt, Human
accuacaguaaauggguaugauuguagcuucc

SEQ ID NO: 37597 - RNA, 32 nt, Human
accuaccaaccaggaacauguugcuucucagg

SEQ ID NO: 37598 - RNA, 32 nt, Human
accuaccaccccacuggcugguuccagaacgu

SEQ ID NO: 37599 - RNA, 32 nt, Human
accuaccagaccuucccaucagggaagagggu

SEQ ID NO: 37600 - RNA, 32 nt, Human
accuaccauuggagagcuugguuccuugccuc

SEQ ID NO: 37601 - RNA, 32 nt, Human
accuacccaacaagaaccaaccugagcagcug

SEQ ID NO: 37602 - RNA, 32 nt, Human
accuacccaauuggcccaacacugucugcccc

SEQ ID NO: 37603 - RNA, 32 nt, Human
accuacccaggccacuggagugagucuagaga

SEQ ID NO: 37604 - RNA, 32 nt, Human
accuaccccucccauugcaaagccaacuugga

SEQ ID NO: 37605 - RNA, 19 nt, Human
accuaccccugcugcacca

SEQ ID NO: 37606 - RNA, 19 nt, Human
accuacccgugccugagaa

SEQ ID NO: 37607 - RNA, 32 nt, Human
accuacccucagaaaggaggaggaaugucuuu

SEQ ID NO: 37608 - RNA, 32 nt, Human
accuacccucgccucuggaauggccuacccaa

SEQ ID NO: 37609 - RNA, 32 nt, Human
accuaccucaaagggcaguuuugaggcaugac

SEQ ID NO: 37610 - RNA, 32 nt, Human
accuaccucaaagggcaguuuugaggcgugac

SEQ ID NO: 37611 - RNA, 32 nt, Human
accuaccucaaaggggugguauaagguuuaaa

SEQ ID NO: 37612 - RNA, 32 nt, Human
accuaccucacagugggagggcaggagauuuu

SEQ ID NO: 37613 - RNA, 31 nt, Human
accuaccucauaggggagguugugaggccac

SEQ ID NO: 37614 - RNA, 32 nt, Human
accuaccuccacccucccccuagccagccagg

SEQ ID NO: 37615 - RNA, 32 nt, Human
accuaccugauccugaucacuuccuaaacugc

SEQ ID NO: 37616 - RNA, 20 nt, Human
accuaccuuggagcugggug

SEQ ID NO: 37617 - RNA, 32 nt, Human
accuaccuuugccuuuuucugucauggagaau

SEQ ID NO: 37618 - RNA, 32 nt, Human
accuacgcucuuaccagcuggagggaguaaac

SEQ ID NO: 37619 - RNA, 22 nt, Human
accuacggcaccugcuggacca

SEQ ID NO: 37620 - RNA, 32 nt, Human
accuacgguggagggggcaggcgggggacaga

SEQ ID NO: 37621 - RNA, 27 nt, Human
accuacuaaaaauauaaaaauuagcug

SEQ ID NO: 37622 - RNA, 32 nt, Human
accuacuaaaaauauaaaaauuagcugggugu

SEQ ID NO: 37623 - RNA, 32 nt, Human
accuacuaugugcagugcaguuacuccaaucu

SEQ ID NO: 37624 - RNA, 32 nt, Human
accuacucgagaagcugagauagggucaccug

SEQ ID NO: 37625 - RNA, 32 nt, Human
accuacucuccacucuuugcaucagugggaau

SEQ ID NO: 37626 - RNA, 32 nt, Human
accuacucugagucucacaucucuaaaccuca

SEQ ID NO: 37627 - RNA, 32 nt, Human
accuacugaacccagagucaggaagagauuua

SEQ ID NO: 37628 - RNA, 23 nt, Human
accuacugcgaccacccaccuca

SEQ ID NO: 37629 - RNA, 32 nt, Human
accuacugcgaccacccaccucauccuggcuc

SEQ ID NO: 37630 - RNA, 32 nt, Human
acgaagccgcggcccgggcacagccauggccc

SEQ ID NO: 37631 - RNA, 32 nt, Human
acgaagcugcucagcaacuccaccugcccgcc

SEQ ID NO: 37632 - RNA, 32 nt, Human
acgaagcugcugcaggaugagaagauggcagc

SEQ ID NO: 37633 - RNA, 32 nt, Human
acgaagcuuccagaggaaggaauacacagcaa

SEQ ID NO: 37634 - RNA, 32 nt, Human
acgaaggagaagcaaacacugcgcagcgggac

SEQ ID NO: 37635 - RNA, 32 nt, Human
acgaaggcguuggccaaggcauuugguuccgc

SEQ ID NO: 37636 - RNA, 32 nt, Human
acgaaguacagaacacaaacagucuuuguucu

SEQ ID NO: 37637 - RNA, 32 nt, Human
acgaaguaguuaauuuuagaaaaggauuuacu

SEQ ID NO: 37638 - RNA, 32 nt, Human
acgaagucaagaguucaagaccagccuggcca

SEQ ID NO: 37639 - RNA, 32 nt, Human
acgaagucagaagaucaaaaccagccuggcca

SEQ ID NO: 37640 - RNA, 32 nt, Human
acgaagucaguaguuugagaccagccuggcca

SEQ ID NO: 37641 - RNA, 32 nt, Human
acgaagucgggaguuugagaccagccugacca

SEQ ID NO: 37642 - RNA, 32 nt, Human
acgaagucucgcuauguugcccaggcuggucu

SEQ ID NO: 37643 - RNA, 32 nt, Human
acgaaguguaccaaaucucagcuauuggacug

SEQ ID NO: 37644 - RNA, 32 nt, Human
acgaaguucuggcaaauguggaaaaccuggcc

SEQ ID NO: 37645 - RNA, 32 nt, Human
acgaauagccacugcauaccaaccugggcaau

SEQ ID NO: 37646 - RNA, 32 nt, Human
acgaauaguaaauaaugaacucgugcaagaca

SEQ ID NO: 37647 - RNA, 32 nt, Human
acgaaucacugcacccagccuauggaacaucu

SEQ ID NO: 37648 - RNA, 32 nt, Human
acgaaucagcugcaggucucuguuuugaaaaa

SEQ ID NO: 37649 - RNA, 32 nt, Human
acgaaucagcugcgggcggagacauggccaac

SEQ ID NO: 37650 - RNA, 32 nt, Human
acgaaucccuuccuccucuccccuuuaccccc

SEQ ID NO: 37651 - RNA, 32 nt, Human
acgaaucugguggaggugcggucaguugugac

SEQ ID NO: 37652 - RNA, 32 nt, Human
acgaaugaaugacagacagagaggaggaaaaa

SEQ ID NO: 37653 - RNA, 32 nt, Human
acgaaugcuucugccugugcugugcauucccg

SEQ ID NO: 37654 - RNA, 20 nt, Human
acgaauggacugaugguuug

SEQ ID NO: 37655 - RNA, 32 nt, Human
acgaauggagaugcaggagcugcgggagccga

SEQ ID NO: 37656 - RNA, 18 nt, Human
acgaaugggguucaacgg

SEQ ID NO: 37657 - RNA, 32 nt, Human
acgaauuguuaucugaaaggcuuucauucuuu

SEQ ID NO: 37658 - RNA, 32 nt, Human
acgacaaacacgagacgccacuguggaaugag

SEQ ID NO: 37659 - RNA, 32 nt, Human
acgacaacauuuuauuucuccugacccuuuug

SEQ ID NO: 37660 - RNA, 32 nt, Human
acgacaagaccaccaacguguccuuguacccu

SEQ ID NO: 37661 - RNA, 31 nt, Human
acgacaagccaagaagaccuguugaaaguuu

SEQ ID NO: 37662 - RNA, 32 nt, Human
acgacaagcuacgucuccacacuggucuacac

SEQ ID NO: 37663 - RNA, 32 nt, Human
acgacacagagguucucaucauucugcugagg

SEQ ID NO: 37664 - RNA, 32 nt, Human
acgacaccacugcacuccagccugggugacag

SEQ ID NO: 37665 - RNA, 32 nt, Human
acgacacugcacuccagccugggcaacggaga

SEQ ID NO: 37666 - RNA, 32 nt, Human
acgacacugccagugccagcaguguccuuggg

SEQ ID NO: 37667 - RNA, 32 nt, Human
acgacagacccaggcuggagucuuggcugugc

SEQ ID NO: 37668 - RNA, 18 nt, Human
acgacagagacaaggaaa

SEQ ID NO: 37669 - RNA, 32 nt, Human
acgacagcacauccacccuccaccucuagccc

SEQ ID NO: 37670 - RNA, 32 nt, Human
acgacagcacuggagggucuucccucucagau

SEQ ID NO: 37671 - RNA, 32 nt, Human
acgacagccccacggcacagcagaucaugcgg

SEQ ID NO: 37672 - RNA, 32 nt, Human
acgacagcccucugcugaccucacccggcagg

SEQ ID NO: 37673 - RNA, 32 nt, Human
acgacagugcaugcacuccagccugggcaaca

SEQ ID NO: 37674 - RNA, 32 nt, Human
acgacaucaaagaacucauacgugggaauguu

SEQ ID NO: 37675 - RNA, 21 nt, Human
acgaccaccgaccugagccug

SEQ ID NO: 37676 - RNA, 32 nt, Human
acgaccaccgccccaccaccuccugggaccac

SEQ ID NO: 37677 - RNA, 32 nt, Human
acgaccaccgcggccgccggaaacccaaagcg

SEQ ID NO: 37678 - RNA, 21 nt, Human
acgaccaccguggccaucugc

SEQ ID NO: 37679 - RNA, 32 nt, Human
acgaccagaguauugcccugccaccacuaucu

SEQ ID NO: 37680 - RNA, 32 nt, Human
acgaccaugccuggcuaauuuuguauuuuuag

SEQ ID NO: 37681 - RNA, 32 nt, Human
acgaccccuccagcaaaggagucugaggcuga

SEQ ID NO: 37682 - RNA, 32 nt, Human
acgaccccugcagcaaagaagcccgagacuga

SEQ ID NO: 37683 - RNA, 32 nt, Human
acgacccgagggcuggagucggccccgcgccu

SEQ ID NO: 37684 - RNA, 32 nt, Human
acgacccucuuucagguggauucagagaccug

SEQ ID NO: 37685 - RNA, 24 nt, Human
acgacccuggccaacauggugaaa

SEQ ID NO: 37686 - RNA, 32 nt, Human
acgacccuugcucuccaggcuguuaaccuuuu

SEQ ID NO: 37687 - RNA, 32 nt, Human
acgaccgcggggcuuccucucccaggucuuuc

SEQ ID NO: 37688 - RNA, 32 nt, Human
acgaccuccucgggggaaagcacaccucaugc

SEQ ID NO: 37689 - RNA, 32 nt, Human
acgaccuccucgggggcuccgggggcuucacg

SEQ ID NO: 37690 - RNA, 32 nt, Human
acgaccucuuugugaagccucuucuggguuua

SEQ ID NO: 37691 - RNA, 32 nt, Human
acgaccuugcugcagugcaucagcagaugcca

SEQ ID NO: 37692 - RNA, 32 nt, Human
acgaccuuucuuucuuuauuucucagccugcc

SEQ ID NO: 37693 - RNA, 32 nt, Human
acgacgacagcaggaacaacgcggccucagcc

SEQ ID NO: 37694 - RNA, 32 nt, Human
acgacgaggcgggccagagcugagcgugagga

SEQ ID NO: 37695 - RNA, 32 nt, Human
acgacgaguucugcgcggcggugcgggccuac

SEQ ID NO: 37696 - RNA, 32 nt, Human
acgacgaugaugcagaaauguagggccauaca

SEQ ID NO: 37697 - RNA, 32 nt, Human
acgacgauuucagcuaggaggcugaggcagga

SEQ ID NO: 37698 - RNA, 32 nt, Human
acgacgccuacaguccugcccugcugcugcug

SEQ ID NO: 37699 - RNA, 32 nt, Human
acgacgcucugccucuccuuauccuucacauu

SEQ ID NO: 37700 - RNA, 32 nt, Human
acgacgcuggcggcccagccugggcagguuuc

SEQ ID NO: 37701 - RNA, 32 nt, Human
acgacgcuugccccggcccacccuccaucccc

SEQ ID NO: 37702 - RNA, 32 nt, Human
acgacgcuugcggcccagccugggcagguuuc

SEQ ID NO: 37703 - RNA, 32 nt, Human
acgacggcccagcccuggccccggcugcgguc

SEQ ID NO: 37704 - RNA, 32 nt, Human
acgacgggcgcuggcaccaccuggcccucgag

SEQ ID NO: 37705 - RNA, 32 nt, Human
acgacggugaagccccgucucugcuaagagug

SEQ ID NO: 37706 - RNA, 31 nt, Human
acgacgugggucucugggacugccugugccg

SEQ ID NO: 37707 - RNA, 32 nt, Human
acgacucaaaaucaacuaucagugaugacagg

SEQ ID NO: 37708 - RNA, 32 nt, Human
acgacucccaggaaggccuagagcagacccuu

SEQ ID NO: 37709 - RNA, 32 nt, Human
acgacuccuguaaucccagcacuuugggaggc

SEQ ID NO: 37710 - RNA, 32 nt, Human
acgacucugcccucagcuucacagucaccgaa

SEQ ID NO: 37711 - RNA, 32 nt, Human
acgacucugggcacuuccccugaagcuccucu

SEQ ID NO: 37712 - RNA, 32 nt, Human
acgacugaagagagcaagggauuuccugggac

SEQ ID NO: 37713 - RNA, 32 nt, Human
acgacugaagucaguguagaccugagcuggga

SEQ ID NO: 37714 - RNA, 32 nt, Human
acgacugcaucuucuuggcacauuuauuauac

SEQ ID NO: 37715 - RNA, 32 nt, Human
acgacugcauucuagccugggugacagagcga

SEQ ID NO: 37716 - RNA, 32 nt, Human
acgacuggaagggcgugaggccucccagcagu

SEQ ID NO: 37717 - RNA, 32 nt, Human
acgacuggacuacugccugacguugucaguca

SEQ ID NO: 37718 - RNA, 32 nt, Human
acgacuggagccgccucucgccgacagcgggg

SEQ ID NO: 37719 - RNA, 32 nt, Human
acgacuggccuuccugccuccagccuggcuuc

SEQ ID NO: 37720 - RNA, 32 nt, Human
acgacugggugaugcuggacaugggagauagg

SEQ ID NO: 37721 - RNA, 32 nt, Human
acgacuucagcagccucaggagaggacuucca

SEQ ID NO: 37722 - RNA, 32 nt, Human
acgacuuggacuucuucccucgcuucucuucg

SEQ ID NO: 37723 - RNA, 32 nt, Human
acgacuuuacuaccugcagaccugcacuauaa

SEQ ID NO: 37724 - RNA, 32 nt, Human
acgacuuucuacugccuguuccaggcccuggc

SEQ ID NO: 37725 - RNA, 32 nt, Human
acgagaaaaagaaaaagagagagagccacgua

SEQ ID NO: 37726 - RNA, 32 nt, Human
acgagaaagaggaaugggggcagggcaggcca

SEQ ID NO: 37727 - RNA, 32 nt, Human
acgagaacaaagacucugagaaaagcacagau

SEQ ID NO: 37728 - RNA, 32 nt, Human
acgagaacaacaaaaauacuuuccuugaacau

SEQ ID NO: 37729 - RNA, 32 nt, Human
acgagaacccccaggguacaggaggaggcugg

SEQ ID NO: 37730 - RNA, 32 nt, Human
acgagaagagaaugccuucuagaugcaaaauc

SEQ ID NO: 37731 - RNA, 32 nt, Human
acgagaagagaggagcagggaggagggggagc

SEQ ID NO: 37732 - RNA, 32 nt, Human
acgagaauccacccauccuaccaaugcaugca

SEQ ID NO: 37733 - RNA, 32 nt, Human
acgagaaucugcaggagcugaacuggggccug

SEQ ID NO: 37734 - RNA, 32 nt, Human
acgagacacauuugggacgaaggugaaagaga

SEQ ID NO: 37735 - RNA, 25 nt, Human
acgagacaugaauauaguccaacca

SEQ ID NO: 37736 - RNA, 32 nt, Human
acgagaccacccugggcaacauggugaaaucc

SEQ ID NO: 37737 - RNA, 32 nt, Human
acgagaccaggaguucaagaccagccugacca

SEQ ID NO: 37738 - RNA, 32 nt, Human
acgagaccauccuggcuaacacggugaaaccc

SEQ ID NO: 37739 - RNA, 32 nt, Human
acgagacccaagugaagaucugguuccagaac

SEQ ID NO: 37740 - RNA, 32 nt, Human
acgagaccgcggcgucuccagccucgguacca

SEQ ID NO: 37741 - RNA, 32 nt, Human
acgagaccuaguuuccaaggaagaacucacug

SEQ ID NO: 37742 - RNA, 32 nt, Human
acgagacggucuucacuguccauuccaacagc

SEQ ID NO: 37743 - RNA, 32 nt, Human
acgagacuagagggagugggguugcaguggcu

SEQ ID NO: 37744 - RNA, 32 nt, Human
acgagacucucuccuccuccucaccucauugu

SEQ ID NO: 37745 - RNA, 32 nt, Human
acgagagagucuuccagguacugauccuguuu

SEQ ID NO: 37746 - RNA, 32 nt, Human
acgagagcagaugcuagauuugcucagugacg

SEQ ID NO: 37747 - RNA, 32 nt, Human
acgagagcuccuccucaggggccuggcacuca

SEQ ID NO: 37748 - RNA, 31 nt, Human
acgagagggacaaucccagcuuccccaacau

SEQ ID NO: 37749 - RNA, 32 nt, Human
acgagaucagccuggccagcacggugaaaccc

SEQ ID NO: 37750 - RNA, 32 nt, Human
acgagaucaggaguucaagaccagccuggcca

SEQ ID NO: 37751 - RNA, 32 nt, Human
acgagaucaggaguuggagaccagccuggcca

SEQ ID NO: 37752 - RNA, 32 nt, Human
acgagaucaguguggacagucuggacuucaac

SEQ ID NO: 37753 - RNA, 32 nt, Human
acgagaucuuccuuccgcucugaggcaacccc

SEQ ID NO: 37754 - RNA, 30 nt, Human
acgagauguucuugcugccucuuccggcug

SEQ ID NO: 37755 - RNA, 32 nt, Human
acgagauucugucuuaaaugaaugagugaaug

SEQ ID NO: 37756 - RNA, 32 nt, Human
acgagcaaaccugaaagcuacucucucagcuu

SEQ ID NO: 37757 - RNA, 32 nt, Human
acgagcacaagacggagguugagguggggcua

SEQ ID NO: 37758 - RNA, 32 nt, Human
acgagcacaggagggagguugagguggggcua

SEQ ID NO: 37759 - RNA, 31 nt, Human
acgagcaccugugaauccacagcagaacagc

SEQ ID NO: 37760 - RNA, 32 nt, Human
acgagcacugggucugcagcuguggggacagg

SEQ ID NO: 37761 - RNA, 32 nt, Human
acgagcagcuccaggcuggaguucugguucuu

SEQ ID NO: 37762 - RNA, 32 nt, Human
acgagcaggaaagcucuggaaaugucuucuug

SEQ ID NO: 37763 - RNA, 32 nt, Human
acgagcaggcccggaagugagcuggaagacag

SEQ ID NO: 37764 - RNA, 32 nt, Human
acgagcaguggaggaaacagccucccaaaagg

SEQ ID NO: 37765 - RNA, 32 nt, Human
acgagcaugaaugccaucaauguaauagacaa

SEQ ID NO: 37766 - RNA, 32 nt, Human
acgagccaaggaguuugagaccagcuugggca

SEQ ID NO: 37767 - RNA, 32 nt, Human
acgagccacauguaggcaguucagaggugcuu

SEQ ID NO: 37768 - RNA, 32 nt, Human
acgagccacgguggcccugccucuccccgcuc

SEQ ID NO: 37769 - RNA, 32 nt, Human
acgagccagggccacacugagcagaaaggaga

SEQ ID NO: 37770 - RNA, 22 nt, Human
acgagcccaagggccacggcug

SEQ ID NO: 37771 - RNA, 20 nt, Human
acgagccccacagggacccu

SEQ ID NO: 37772 - RNA, 32 nt, Human
acgagccccuccaccuugauagcuccuugaua

SEQ ID NO: 37773 - RNA, 32 nt, Human
acgagcccucacccuucuugucuuccuuccca

SEQ ID NO: 37774 - RNA, 19 nt, Human
acgagccugggcaacaugg

SEQ ID NO: 37775 - RNA, 32 nt, Human
acgagccugggguggagaggagggagccggca

SEQ ID NO: 37776 - RNA, 32 nt, Human
acgagcgcucugcuccucuccugggccccugc

SEQ ID NO: 37777 - RNA, 32 nt, Human
acgagcgggcccagggcugagcccagcggcgu

SEQ ID NO: 37778 - RNA, 32 nt, Human
acgagcgucugaagacguccucccgagggcag

SEQ ID NO: 37779 - RNA, 22 nt, Human
acgagcucccggacuccaucca

SEQ ID NO: 37780 - RNA, 24 nt, Human
acgagcugcccgauggccagguca

SEQ ID NO: 37781 - RNA, 32 nt, Human
acgagcuggaggaggagaaggaaggcccggcg

SEQ ID NO: 37782 - RNA, 32 nt, Human
acgaggaaaaggaaagagucucagaguggaac

SEQ ID NO: 37783 - RNA, 32 nt, Human
acgaggaagcaguucaagccgggccuggccua

SEQ ID NO: 37784 - RNA, 32 nt, Human
acgaggaaggagaauacuacagcaaccuggaa

SEQ ID NO: 37785 - RNA, 32 nt, Human
acgaggaagggcagacuggugaaaucgcaaac

SEQ ID NO: 37786 - RNA, 32 nt, Human
acgaggacaaauauggaugagguggagagugg

SEQ ID NO: 37787 - RNA, 20 nt, Human
acgaggacaggacccuuggc

SEQ ID NO: 37788 - RNA, 32 nt, Human
acgaggaccaucgggggcaggucguuggagac

SEQ ID NO: 37789 - RNA, 32 nt, Human
acgaggacugaacaaggugcugucucacugcc

SEQ ID NO: 37790 - RNA, 32 nt, Human
acgaggagacgcgaggaggagggaggaggaag

SEQ ID NO: 37791 - RNA, 32 nt, Human
acgaggagaggcaaugguggucuuggcaacag

SEQ ID NO: 37792 - RNA, 20 nt, Human
acgaggagcgcguagcccac

SEQ ID NO: 37793 - RNA, 32 nt, Human
acgaggaggaggaggaggaagaggggauggag

SEQ ID NO: 37794 - RNA, 32 nt, Human
acgaggaggagguggaggaggagagguggcag

SEQ ID NO: 37795 - RNA, 32 nt, Human
acgaggaggcagcaggagcagugacggugacu

SEQ ID NO: 37796 - RNA, 32 nt, Human
acgaggaggcaggaccucccaccuucaggucu

SEQ ID NO: 37797 - RNA, 32 nt, Human
acgaggaggggcggggcgauagggauccagag

SEQ ID NO: 37798 - RNA, 32 nt, Human
acgaggaucagacggccugaacuccggacugu

SEQ ID NO: 37799 - RNA, 32 nt, Human
acgaggaugaagggaagggagagccagugacg

SEQ ID NO: 37800 - RNA, 32 nt, Human
acgaggaugaggaggaggaaggugaagaggag

SEQ ID NO: 37801 - RNA, 32 nt, Human
acgaggaugagggagaagaauaagcagcugcc

SEQ ID NO: 37802 - RNA, 32 nt, Human
acgaggauuaauuucauuuaucuggaaaauuu

SEQ ID NO: 37803 - RNA, 32 nt, Human
acgaggcaaggagccugcacacugauggagga

SEQ ID NO: 37804 - RNA, 32 nt, Human
acgaggcagcagccugacccaggauggcucua

SEQ ID NO: 37805 - RNA, 32 nt, Human
acgaggcagccuggcccuuaucugcacugggc

SEQ ID NO: 37806 - RNA, 32 nt, Human
acgaggcagcugucccaugcucugcugagcac

SEQ ID NO: 37807 - RNA, 32 nt, Human
acgaggcaggaacuuucgucucugccucucgu

SEQ ID NO: 37808 - RNA, 32 nt, Human
acgaggcaucaguugggaagaggggacgcaca

SEQ ID NO: 37809 - RNA, 32 nt, Human
acgaggcauguggaucaccugaggucgggagu

SEQ ID NO: 37810 - RNA, 32 nt, Human
acgaggccacagcaucuucuacaaaggacuca

SEQ ID NO: 37811 - RNA, 32 nt, Human
acgaggccaccagggugacugcgggauuccga

SEQ ID NO: 37812 - RNA, 32 nt, Human
acgaggccacgagacccacugcuuuuggguau

SEQ ID NO: 37813 - RNA, 32 nt, Human
acgaggccaggagaucaagaccauccuggcua

SEQ ID NO: 37814 - RNA, 23 nt, Human
acgaggccaucagcugccaugca

SEQ ID NO: 37815 - RNA, 32 nt, Human
acgaggcccucgggcccagcccccacagugcu

SEQ ID NO: 37816 - RNA, 24 nt, Human
acgaggccgccugacgccucagca

SEQ ID NO: 37817 - RNA, 32 nt, Human
acgaggcgcugcggcuccaccugaccaguggg

SEQ ID NO: 37818 - RNA, 32 nt, Human
acgaggcgcugcggcuccaccugccagugggu

SEQ ID NO: 37819 - RNA, 32 nt, Human
acgaggcggcuguggcgguggcugaggcggcu

SEQ ID NO: 37820 - RNA, 32 nt, Human
acgaggcuacaaaggcuccgcucacaaaagaa

SEQ ID NO: 37821 - RNA, 32 nt, Human
acgaggcugagguggaaggaucaagugagcgc

SEQ ID NO: 37822 - RNA, 32 nt, Human
acgaggcugccuccagcauuuccugauuuccu

SEQ ID NO: 37823 - RNA, 32 nt, Human
acgaggcugcggcggaggagguggcggcggcc

SEQ ID NO: 37824 - RNA, 32 nt, Human
acgaggcugcugaccagaagagguuuagugcc

SEQ ID NO: 37825 - RNA, 32 nt, Human
acgaggcugcuguuugucuacuuccuccugcu

SEQ ID NO: 37826 - RNA, 32 nt, Human
acgaggcugggccugccucacucuccagggcc

SEQ ID NO: 37827 - RNA, 32 nt, Human
acgaggcuucaggcugagguggcagauaguga

SEQ ID NO: 37828 - RNA, 32 nt, Human
acgaggcuuccgcccuguugugaagugggugu

SEQ ID NO: 37829 - RNA, 32 nt, Human
acgagggagccccagaacagggguccggcggu

SEQ ID NO: 37830 - RNA, 32 nt, Human
acgagggcgagcugagguggaggcaggcugcg

SEQ ID NO: 37831 - RNA, 32 nt, Human
acgagggcgcggcggaggcucccguggccucg

SEQ ID NO: 37832 - RNA, 32 nt, Human
acgaggggagaaaggcaggcagccggcgggcg

SEQ ID NO: 37833 - RNA, 32 nt, Human
acgaggggagcgaagguaggaggcagggcuug

SEQ ID NO: 37834 - RNA, 32 nt, Human
acgaggggaggaggaggaggaggagaggagca

SEQ ID NO: 37835 - RNA, 32 nt, Human
acgaggggaggcacggugcggagagcgucgca

SEQ ID NO: 37836 - RNA, 32 nt, Human
acgaggggaggcugcucugugaaggaaccgcc

SEQ ID NO: 37837 - RNA, 32 nt, Human
acgaggggauggcagaggaggugaggagggag

SEQ ID NO: 37838 - RNA, 32 nt, Human
acgaggggccaggagagcagcagcaucauaag

SEQ ID NO: 37839 - RNA, 31 nt, Human
acgaggggccucucugagggggcugugucug

SEQ ID NO: 37840 - RNA, 32 nt, Human
acgagggucaggaccugcauccugccucagag

SEQ ID NO: 37841 - RNA, 32 nt, Human
acgagggucuagcucuaccacauucaggaggc

SEQ ID NO: 37842 - RNA, 32 nt, Human
acgagggugcuuucacuggucugcaccauggc

SEQ ID NO: 37843 - RNA, 32 nt, Human
acgagggugguguugggccggugcugcugccg

SEQ ID NO: 37844 - RNA, 32 nt, Human
acgagguagggagaucaagaccauccuggcua

SEQ ID NO: 37845 - RNA, 32 nt, Human
acgaggucaagagaucaagaccagccugacca

SEQ ID NO: 37846 - RNA, 32 nt, Human
acgaggucaagagaucaagaccauccuggcca

SEQ ID NO: 37847 - RNA, 32 nt, Human
acgaggucagaagaucaagaccauccuggcca

SEQ ID NO: 37848 - RNA, 32 nt, Human
acgaggucagaaguccaagaccagccuggcca

SEQ ID NO: 37849 - RNA, 32 nt, Human
acgaggucagaaguucaagaccagccuagcca

SEQ ID NO: 37850 - RNA, 32 nt, Human
acgaggucagcaguucgagaccagccugacca

SEQ ID NO: 37851 - RNA, 32 nt, Human
acgaggucaggaauucaagaccagccuggcca

SEQ ID NO: 37852 - RNA, 32 nt, Human
acgaggucaggaauucgagaccagccuggcca

SEQ ID NO: 37853 - RNA, 32 nt, Human
acgaggucaggagaucaagaccauccuggcua

SEQ ID NO: 37854 - RNA, 32 nt, Human
acgaggucaggagaucgagaccagccugacca

SEQ ID NO: 37855 - RNA, 32 nt, Human
acgaggucaggagaucgagaccagccuggcua

SEQ ID NO: 37856 - RNA, 32 nt, Human
acgaggucaggagauggagaccauccuggcua

SEQ ID NO: 37857 - RNA, 32 nt, Human
acgaggucaggaguucaaaaccagccugacca

SEQ ID NO: 37858 - RNA, 32 nt, Human
acgaggucaggaguucaaaaccagccugucca

SEQ ID NO: 37859 - RNA, 32 nt, Human
acgaggucaggaguucaagaccacccuggcca

SEQ ID NO: 37860 - RNA, 32 nt, Human
acgaggucaggaguucaagaccagccuggcca

SEQ ID NO: 37861 - RNA, 32 nt, Human
acgaggucaggaguucaagaccagccuugcca

SEQ ID NO: 37862 - RNA, 32 nt, Human
acgaggucaggaguuccagaccagccuggcca

SEQ ID NO: 37863 - RNA, 32 nt, Human
acgaggucaggaguucgaaaccagccuggcca

SEQ ID NO: 37864 - RNA, 32 nt, Human
acgaggucaggaguucgagaccagccugacca

SEQ ID NO: 37865 - RNA, 32 nt, Human
acgaggucaggaguucgagaccagccugccca

SEQ ID NO: 37866 - RNA, 32 nt, Human
acgaggucaggaguucgagaccagccuggcca

SEQ ID NO: 37867 - RNA, 32 nt, Human
acgaggucaggaguucgagggcagccugacca

SEQ ID NO: 37868 - RNA, 32 nt, Human
acgaggucaggaguuugagaccagccugacca

SEQ ID NO: 37869 - RNA, 32 nt, Human
acgaggucaggaguuugagaccagccugauca

SEQ ID NO: 37870 - RNA, 32 nt, Human
acgaggucaggauauugagaccauccuggcua

SEQ ID NO: 37871 - RNA, 32 nt, Human
acgaggucaggcguuuaagaccagcuugacca

SEQ ID NO: 37872 - RNA, 32 nt, Human
acgaggucagggguucaagaccagccugacca

SEQ ID NO: 37873 - RNA, 32 nt, Human
acgaggucaguaguucgagaccagccugguca

SEQ ID NO: 37874 - RNA, 24 nt, Human
acgaggucuacaaugccauuccca

SEQ ID NO: 37875 - RNA, 32 nt, Human
acgaggucucacuauguugcccaggcuggucu

SEQ ID NO: 37876 - RNA, 32 nt, Human
acgaggucuugcuauguugcccaggcuggucc

SEQ ID NO: 37877 - RNA, 32 nt, Human
acgaggugacacacucaggagacacaggugug

SEQ ID NO: 37878 - RNA, 32 nt, Human
acgagguggaaagggcuccugaagcagcugca

SEQ ID NO: 37879 - RNA, 32 nt, Human
acgaggugggagcggagagggaaggaggagga

SEQ ID NO: 37880 - RNA, 32 nt, Human
acgagguggggaagcugcuaacccgacccgga

SEQ ID NO: 37881 - RNA, 32 nt, Human
acgagguuaggaguucgagaccagccuggcca

SEQ ID NO: 37882 - RNA, 32 nt, Human
acgagguucacugguccgcaggggagggccgg

SEQ ID NO: 37883 - RNA, 32 nt, Human
acgagguuucuugucucucuggcuccaccaga

SEQ ID NO: 37884 - RNA, 32 nt, Human
acgaguaucugaaggcauuuucagcucuagca

SEQ ID NO: 37885 - RNA, 21 nt, Human
acgagucacgcacccccuuca

SEQ ID NO: 37886 - RNA, 32 nt, Human
acgagucauuucugccugacugcuccagcuaa

SEQ ID NO: 37887 - RNA, 32 nt, Human
acgagugacccucaacuuccagccucugagca

SEQ ID NO: 37888 - RNA, 32 nt, Human
acgagugcagcacagucugggaagaaaggcgu

SEQ ID NO: 37889 - RNA, 32 nt, Human
acgagugguaucuugagaaaugggauugugag

SEQ ID NO: 37890 - RNA, 32 nt, Human
acgagugucaaugauugcuggaacaggugggg

SEQ ID NO: 37891 - RNA, 32 nt, Human
acgagugucugucagugagcgggcgggaggaa

SEQ ID NO: 37892 - RNA, 32 nt, Human
acgagugugcgugagugugagccaccuuggca

SEQ ID NO: 37893 - RNA, 29 nt, Human
acgagugugcugucagugccuggccaugu

SEQ ID NO: 37894 - RNA, 32 nt, Human
acgagugugggagagggaggagaggggaucac

SEQ ID NO: 37895 - RNA, 32 nt, Human
acgaguucaagaccagccuggccaaggcggca

SEQ ID NO: 37896 - RNA, 32 nt, Human
acgaguucaggaguucaagaccagccuggcca

SEQ ID NO: 37897 - RNA, 32 nt, Human
acgaguuccagggagcucuguccuggugaccg

SEQ ID NO: 37898 - RNA, 32 nt, Human
acgaguuccccagggcugcacucuagauucca

SEQ ID NO: 37899 - RNA, 32 nt, Human
acgaguucgagaccagccugaccaacauggag

SEQ ID NO: 37900 - RNA, 32 nt, Human
acgaguucuaacucaguggcguuugcccugau

SEQ ID NO: 37901 - RNA, 32 nt, Human
acgaguucugaugaaccauacauaucauuaaa

SEQ ID NO: 37902 - RNA, 32 nt, Human
acgaguucuguucuggccggagcaccagaccc

SEQ ID NO: 37903 - RNA, 32 nt, Human
acgaguuggaucucgaggaaucugcaguggag

SEQ ID NO: 37904 - RNA, 32 nt, Human
acgaguugguuugggagcugccagucuccugg

SEQ ID NO: 37905 - RNA, 32 nt, Human
acgaguuguacucccuccuccuggaagccaag

SEQ ID NO: 37906 - RNA, 32 nt, Human
acgaguuuaagaccagccugggcaacauggug

SEQ ID NO: 37907 - RNA, 32 nt, Human
acgaguuugagaccagccugaccaacguuaag

SEQ ID NO: 37908 - RNA, 32 nt, Human
acgaguuuucaguuguucggcaacaugaggaa

SEQ ID NO: 37909 - RNA, 32 nt, Human
acgauaagccugggaaagggaggcugggugag

SEQ ID NO: 37910 - RNA, 32 nt, Human
acgauaaugauccacgcaaagaggaggaaauu

SEQ ID NO: 37911 - RNA, 32 nt, Human
acgauacagucagcaagaggaagccaggaaug

SEQ ID NO: 37912 - RNA, 32 nt, Human
acgauacagucagcaagaggaagccgggaaug

SEQ ID NO: 37913 - RNA, 32 nt, Human
acgauaggaaggaggaaagaagaaagagaaaa

SEQ ID NO: 37914 - RNA, 32 nt, Human
acgauauaaauacaagauaaauuaucacugga

SEQ ID NO: 37915 - RNA, 32 nt, Human
acgauauacuccugagcuuucacucugcuggc

SEQ ID NO: 37916 - RNA, 32 nt, Human
acgauaucucuagcuccuauaccaccaccacc

SEQ ID NO: 37917 - RNA, 32 nt, Human
acgaucaaagagacaccuggcucaaggaccaa

SEQ ID NO: 37918 - RNA, 32 nt, Human
acgaucaagccacugcacuccagccugggcga

SEQ ID NO: 37919 - RNA, 32 nt, Human
acgaucacaccacugcacucuggccugcaugc

SEQ ID NO: 37920 - RNA, 32 nt, Human
acgaucacggacagguaugcacugguaacaug

SEQ ID NO: 37921 - RNA, 32 nt, Human
acgaucaguccaucccagagggaccggaguua

SEQ ID NO: 37922 - RNA, 32 nt, Human
acgaucaugccacugcacuccacucugggcaa

SEQ ID NO: 37923 - RNA, 32 nt, Human
acgauccucacugcaacauuccuuauccaauc

SEQ ID NO: 37924 - RNA, 32 nt, Human
acgauccucccgccucagccuccgaguagcug

SEQ ID NO: 37925 - RNA, 32 nt, Human
acgauccucuuucugggcauuccuaggggaga

SEQ ID NO: 37926 - RNA, 32 nt, Human
acgauccugcacuccagccugggcaacagaga

SEQ ID NO: 37927 - RNA, 32 nt, Human
acgauccuucugauuuaaguacagcuggaaag

SEQ ID NO: 37928 - RNA, 32 nt, Human
acgaucgaggagagagacaagcggcagcagag

SEQ ID NO: 37929 - RNA, 32 nt, Human
acgaucgcaccacugcauucuagccuuaguga

SEQ ID NO: 37930 - RNA, 32 nt, Human
acgaucgcuugagccuuggaggcggagguugc

SEQ ID NO: 37931 - RNA, 32 nt, Human
acgaucguaccacuacacuccagccugggcaa

SEQ ID NO: 37932 - RNA, 32 nt, Human
acgaucuagcugugcaaaggcauuucaaagaa

SEQ ID NO: 37933 - RNA, 32 nt, Human
acgaucugaagugggguccccaacaagaucag

SEQ ID NO: 37934 - RNA, 32 nt, Human
acgaucugcaaacuccgccuccuggguucaag

SEQ ID NO: 37935 - RNA, 32 nt, Human
acgaucuggaugaagagagagggggugagaga

SEQ ID NO: 37936 - RNA, 32 nt, Human
acgaucugggcuuugucaugguguuuuacguu

SEQ ID NO: 37937 - RNA, 32 nt, Human
acgaucuugcucccaggaccugccucuuccca

SEQ ID NO: 37938 - RNA, 32 nt, Human
acgaugaaaugcucccuccacugccgggccuu

SEQ ID NO: 37939 - RNA, 32 nt, Human
acgaugaacuauacauauuuguauuucuacuu

SEQ ID NO: 37940 - RNA, 32 nt, Human
acgaugacaaacacacauuacacacacaacau

SEQ ID NO: 37941 - RNA, 32 nt, Human
acgaugacaaacacacauuacacacacaucac

SEQ ID NO: 37942 - RNA, 32 nt, Human
acgaugacacacaaguucaugaaacauuucac

SEQ ID NO: 37943 - RNA, 28 nt, Human
acgaugacagaaaaggaggugcuggagu

SEQ ID NO: 37944 - RNA, 24 nt, Human
acgaugacugaaggcuccuuugac

SEQ ID NO: 37945 - RNA, 32 nt, Human
acgaugagcuuuucacaucaccuuuaugguuu

SEQ ID NO: 37946 - RNA, 32 nt, Human
acgaugaggucccagaggaggggccgggggcc

SEQ ID NO: 37947 - RNA, 32 nt, Human
acgaugcacccaccgcccugagggcccguccu

SEQ ID NO: 37948 - RNA, 32 nt, Human
acgaugccaucgucuguccaggaaaagaaagg

SEQ ID NO: 37949 - RNA, 32 nt, Human
acgaugcccccaggaaccucagcccgggugcu

SEQ ID NO: 37950 - RNA, 32 nt, Human
acgaugcccugccuuuuacuagcuacuuuaga

SEQ ID NO: 37951 - RNA, 32 nt, Human
acgaugcggggcugugugccggccuucuugcu

SEQ ID NO: 37952 - RNA, 20 nt, Human
acgaugcuacaaaagaaauu

SEQ ID NO: 37953 - RNA, 32 nt, Human
acgauggcagugcagucaucaucuucaggaug

SEQ ID NO: 37954 - RNA, 28 nt, Human
acgauggcggaggaagaaggaccaccug

SEQ ID NO: 37955 - RNA, 28 nt, Human
acgaugggggccaggacaccuuugccuu

SEQ ID NO: 37956 - RNA, 28 nt, Human
acgaugguggaccacuuggccaacacgg

SEQ ID NO: 37957 - RNA, 32 nt, Human
acgaugucaggaguucgagaccagccuggcca

SEQ ID NO: 37958 - RNA, 21 nt, Human
acgauguggcugcccggcaga

SEQ ID NO: 37959 - RNA, 32 nt, Human
acgaugugggguguggaggaggagaacaggcc

SEQ ID NO: 37960 - RNA, 32 nt, Human
acgauguuugaaaaucaacacauaacugaaau

SEQ ID NO: 37961 - RNA, 32 nt, Human
acgauguuuggcuaugugugugugcaugugug

SEQ ID NO: 37962 - RNA, 32 nt, Human
acgauuaauggaagcccaggaggaaagacuug

SEQ ID NO: 37963 - RNA, 32 nt, Human
acgauucugcccaguguccucagucugucccc

SEQ ID NO: 37964 - RNA, 32 nt, Human
acgauugaaaugaaaucacauaguucgugcuc

SEQ ID NO: 37965 - RNA, 32 nt, Human
acgauugcaccacuucaucccagccugggaga

SEQ ID NO: 37966 - RNA, 32 nt, Human
acgauugcagagccuuggggugcccggugcgg

SEQ ID NO: 37967 - RNA, 20 nt, Human
acgauuggaaacuacauuua

SEQ ID NO: 37968 - RNA, 32 nt, Human
acgauuggccagacaucaccucagaucugaga

SEQ ID NO: 37969 - RNA, 32 nt, Human
acgauuuccacugggaagagacaggaauucua

SEQ ID NO: 37970 - RNA, 32 nt, Human
acgauuugagacaacuuguuguauugagggac

SEQ ID NO: 37971 - RNA, 32 nt, Human
acgauuuguguaucuuuuuguuuuugguugug

SEQ ID NO: 37972 - RNA, 32 nt, Human
acgcaaauaagaaaccaagggauaaaacuguu

SEQ ID NO: 37973 - RNA, 32 nt, Human
acgcaacacaggcuacacagaugagaaaaugg

SEQ ID NO: 37974 - RNA, 32 nt, Human
acgcaaccaggaugugggagccgguacaaggc

SEQ ID NO: 37975 - RNA, 32 nt, Human
acgcaacccuuccaucagugucuuccagccug

SEQ ID NO: 37976 - RNA, 32 nt, Human
acgcaaccgccaggaggaaaggcgggacacag

SEQ ID NO: 37977 - RNA, 32 nt, Human
acgcaacuuugcuauauuucucuccaacaagg

SEQ ID NO: 37978 - RNA, 32 nt, Human
acgcaagagguuucagcauucccaauuaucaa

SEQ ID NO: 37979 - RNA, 32 nt, Human
acgcaagcacgccuuaaacacacagauauaga

SEQ ID NO: 37980 - RNA, 32 nt, Human
acgcaagccuuaaaauuuuucuuaagacagag

SEQ ID NO: 37981 - RNA, 32 nt, Human
acgcaagugaagccgagucacaggacccggau

SEQ ID NO: 37982 - RNA, 32 nt, Human
acgcaaguucccaguuggagcuccagccugac

SEQ ID NO: 37983 - RNA, 32 nt, Human
acgcaaguucccaguuggagcugcagccuaac

SEQ ID NO: 37984 - RNA, 32 nt, Human
acgcaauccuccugccacagcuucccaaguag

SEQ ID NO: 37985 - RNA, 32 nt, Human
acgcaaucgauggauuguguccuaggaagacu

SEQ ID NO: 37986 - RNA, 32 nt, Human
acgcacaauggcacgugugcgcuuauugucuc

SEQ ID NO: 37987 - RNA, 32 nt, Human
acgcacacaccacacacauacacacacgcauu

SEQ ID NO: 37988 - RNA, 32 nt, Human
acgcacacagaagccugcuggaagacaggucu

SEQ ID NO: 37989 - RNA, 32 nt, Human
acgcacacaugcacgcacacacacauaugggg

SEQ ID NO: 37990 - RNA, 32 nt, Human
acgcacagaggcugggcugcgguccagaugcg

SEQ ID NO: 37991 - RNA, 32 nt, Human
acgcacagccaaggacuccaaaaucacaacag

SEQ ID NO: 37992 - RNA, 17 nt, Human
acgcacauauauacaca

SEQ ID NO: 37993 - RNA, 32 nt, Human
acgcacaucccaugagagugcauaccagggag

SEQ ID NO: 37994 - RNA, 32 nt, Human
acgcaccacaaacacaugcgcaggcuccugca

SEQ ID NO: 37995 - RNA, 32 nt, Human
acgcaccaccuugcccugcauuuccccggcuu

SEQ ID NO: 37996 - RNA, 32 nt, Human
acgcaccagcagccgccuccaugcccuagguu

SEQ ID NO: 37997 - RNA, 32 nt, Human
acgcaccaguagucccagcuacucgggaggcu

SEQ ID NO: 37998 - RNA, 32 nt, Human
acgcaccauuuugucaggugggagauuuggaa

SEQ ID NO: 37999 - RNA, 32 nt, Human
acgcacccccacugcuguuuucacauccuuuc

SEQ ID NO: 38000 - RNA, 32 nt, Human
acgcaccccggcgauuuuugcgcaccgggagc

SEQ ID NO: 38001 - RNA, 32 nt, Human
acgcaccccuucccccgugugaacacgaguga

SEQ ID NO: 38002 - RNA, 32 nt, Human
acgcaccccuugcuugccaaauugcaggcaag

SEQ ID NO: 38003 - RNA, 32 nt, Human
acgcacccgcagggaggguggggagagcuggc

SEQ ID NO: 38004 - RNA, 32 nt, Human
acgcacccguaguuccagcuacuugggaggcu

SEQ ID NO: 38005 - RNA, 32 nt, Human
acgcacccuccaggaugcucgcugggauuccc

SEQ ID NO: 38006 - RNA, 32 nt, Human
acgcaccuauagucccagcuacucgggagucu

SEQ ID NO: 38007 - RNA, 32 nt, Human
acgcaccuccccuccgcuuguggccauguacc

SEQ ID NO: 38008 - RNA, 32 nt, Human
acgcaccugcaagcuuugcucuagggauugaa

SEQ ID NO: 38009 - RNA, 32 nt, Human
acgcaccugcagucccagcuacuugggaggcu

SEQ ID NO: 38010 - RNA, 32 nt, Human
acgcaccugcauucccagcuacuugggaggcu

SEQ ID NO: 38011 - RNA, 32 nt, Human
acgcaccuguaaucccagcuacucaggaggcc

SEQ ID NO: 38012 - RNA, 32 nt, Human
acgcaccuguaaucccagcuacucgggaggcu

SEQ ID NO: 38013 - RNA, 32 nt, Human
acgcaccuguaaucccagcugcucuggaggcu

SEQ ID NO: 38014 - RNA, 32 nt, Human
acgcaccuguagucccagcuacucgggaggcu

SEQ ID NO: 38015 - RNA, 32 nt, Human
acgcaccugugaucccagcuacuuaggagguu

SEQ ID NO: 38016 - RNA, 32 nt, Human
acgcaccuuagaggagugggaaaggccaccag

SEQ ID NO: 38017 - RNA, 32 nt, Human
acgcaccuugcugcaguguccagaagcggccu

SEQ ID NO: 38018 - RNA, 32 nt, Human
acgcacgcacacacacauacagagcucucuga

SEQ ID NO: 38019 - RNA, 32 nt, Human
acgcacgcacacacgaugcacacgcaugcaca

SEQ ID NO: 38020 - RNA, 32 nt, Human
acgcacgcacacacucuuacacgagagcacac

SEQ ID NO: 38021 - RNA, 32 nt, Human
acgcacguguaguuccagcuacucaggaagcu

SEQ ID NO: 38022 - RNA, 32 nt, Human
acgcacuccagccugggcgacagagcgagacc

SEQ ID NO: 38023 - RNA, 32 nt, Human
acgcacuccagccugggugacagagcgagacu

SEQ ID NO: 38024 - RNA, 19 nt, Human
acgcacucuggccugcaug

SEQ ID NO: 38025 - RNA, 32 nt, Human
acgcacugacacugcccaggccaagcaaaagc

SEQ ID NO: 38026 - RNA, 32 nt, Human
acgcacugcagaauuuguuuauccugcucuuu

SEQ ID NO: 38027 - RNA, 32 nt, Human
acgcacugcagccucuaccuccugggcucaag

SEQ ID NO: 38028 - RNA, 32 nt, Human
acgcacugcauggucuguuuauucucuaauuc

SEQ ID NO: 38029 - RNA, 31 nt, Human
acgcacugccucucuaagcuggccucagguu

SEQ ID NO: 38030 - RNA, 32 nt, Human
acgcacugucacaccucugcauuuccagcccc

SEQ ID NO: 38031 - RNA, 32 nt, Human
acgcacuucgggaggucgaggcaggaggauca

SEQ ID NO: 38032 - RNA, 32 nt, Human
acgcacuugaucccaugcucccagccucuguu

SEQ ID NO: 38033 - RNA, 32 nt, Human
acgcacuuucagggauguggucagauucgagg

SEQ ID NO: 38034 - RNA, 32 nt, Human
acgcagaagguauucauuuuuccuaguauuug

SEQ ID NO: 38035 - RNA, 32 nt, Human
acgcagacacacacaaauauacgcauauggac

SEQ ID NO: 38036 - RNA, 32 nt, Human
acgcagacagcaaaagcuaaaucagcaugaca

SEQ ID NO: 38037 - RNA, 32 nt, Human
acgcagaccaguacuggaguucguggugcugg

SEQ ID NO: 38038 - RNA, 32 nt, Human
acgcagagccccggagcaccacggggucgggg

SEQ ID NO: 38039 - RNA, 32 nt, Human
acgcagaggcagugucaugaggggacacgugg

SEQ ID NO: 38040 - RNA, 32 nt, Human
acgcagagguccaacuugccacccgcgucccu

SEQ ID NO: 38041 - RNA, 32 nt, Human
acgcagauagaagauccaagaaaacaauggag

SEQ ID NO: 38042 - RNA, 32 nt, Human
acgcagcaaagagaggagagaccccaagucag

SEQ ID NO: 38043 - RNA, 32 nt, Human
acgcagcacagcaucagacagcucugucacgg

SEQ ID NO: 38044 - RNA, 32 nt, Human
acgcagcacagcccuccagcuggggucaggug

SEQ ID NO: 38045 - RNA, 32 nt, Human
acgcagcaccuuggaaguuguuuucaaccaua

SEQ ID NO: 38046 - RNA, 32 nt, Human
acgcagcacucccaugucugccgguuccccug

SEQ ID NO: 38047 - RNA, 32 nt, Human
acgcagcagcaaccuugggcuuccugcggggu

SEQ ID NO: 38048 - RNA, 32 nt, Human
acgcagcagcaccccagcuagggauagggcuc

SEQ ID NO: 38049 - RNA, 19 nt, Human
acgcagcaggcucugggug

SEQ ID NO: 38050 - RNA, 20 nt, Human
acgcagcagguaucugggug

SEQ ID NO: 38051 - RNA, 32 nt, Human
acgcagcauguggcuucauugaggcaguugau

SEQ ID NO: 38052 - RNA, 23 nt, Human
acgcagcccaucuucaugucauc

SEQ ID NO: 38053 - RNA, 32 nt, Human
acgcagccccaucccacacacacaggcccggu

SEQ ID NO: 38054 - RNA, 26 nt, Human
acgcagccgcuccgggagccagggaa

SEQ ID NO: 38055 - RNA, 32 nt, Human
acgcagccuauagguccgcaggccaguccucc

SEQ ID NO: 38056 - RNA, 32 nt, Human
acgcagccuggguggcagagggcagggucauc

SEQ ID NO: 38057 - RNA, 32 nt, Human
acgcagccugggugggugaggggagagacggu

SEQ ID NO: 38058 - RNA, 32 nt, Human
acgcagcuccacccucaccacuagcccacccu

SEQ ID NO: 38059 - RNA, 32 nt, Human
acgcagcuggagcagggcugagcccaggagca

SEQ ID NO: 38060 - RNA, 32 nt, Human
acgcagcugggaacaugugcaggcugaugaag

SEQ ID NO: 38061 - RNA, 32 nt, Human
acgcagcugggugcagaagcuguggggucgga

SEQ ID NO: 38062 - RNA, 32 nt, Human
acgcagcuuuuagguuuguuugaauaagagau

SEQ ID NO: 38063 - RNA, 32 nt, Human
acgcaggaaacuauggcugagcacggggcuca

SEQ ID NO: 38064 - RNA, 32 nt, Human
acgcaggaagugagugguugagccagaaugaa

SEQ ID NO: 38065 - RNA, 32 nt, Human
acgcaggacagaguggacucugccugugaugg

SEQ ID NO: 38066 - RNA, 32 nt, Human
acgcaggacaggcaggagagauucuuccuaaa

SEQ ID NO: 38067 - RNA, 32 nt, Human
acgcaggacgccgccucacgcaagccgggaca

SEQ ID NO: 38068 - RNA, 32 nt, Human
acgcaggagcugcugcugcaguugcagaagga

SEQ ID NO: 38069 - RNA, 32 nt, Human
acgcaggagcuguggaaauggugagcgcugug

SEQ ID NO: 38070 - RNA, 32 nt, Human
acgcaggaggcugaggcugcagugaguuguga

SEQ ID NO: 38071 - RNA, 32 nt, Human
acgcaggaggggccgacguuucccuggcgugc

SEQ ID NO: 38072 - RNA, 32 nt, Human
acgcaggcacucacauucacacacauacacac

SEQ ID NO: 38073 - RNA, 32 nt, Human
acgcaggcagaacuccuuauugugggacuuga

SEQ ID NO: 38074 - RNA, 32 nt, Human
acgcaggcaggcggcgggcagcgggaggcggc

SEQ ID NO: 38075 - RNA, 32 nt, Human
acgcaggccaggagucuucacacucaggcacc

SEQ ID NO: 38076 - RNA, 32 nt, Human
acgcaggccuccauaacaauuauuucagugca

SEQ ID NO: 38077 - RNA, 32 nt, Human
acgcaggcguggagugcagcgucugcccggaa

SEQ ID NO: 38078 - RNA, 32 nt, Human
acgcaggcugccaggcuggcguacaguggcgc

SEQ ID NO: 38079 - RNA, 32 nt, Human
acgcagggaggguggagguguccugaggcuga

SEQ ID NO: 38080 - RNA, 32 nt, Human
acgcagggcucucccaaguucccaccgagccg

SEQ ID NO: 38081 - RNA, 32 nt, Human
acgcaggggagaagaaggggaaagaggcuugu

SEQ ID NO: 38082 - RNA, 32 nt, Human
acgcagggggcucggaggacucaggccgcagc

SEQ ID NO: 38083 - RNA, 32 nt, Human
acgcagguggcugaagcagaagaaucacuuga

SEQ ID NO: 38084 - RNA, 32 nt, Human
acgcagguggugagccuuaaggacaagcuaga

SEQ ID NO: 38085 - RNA, 32 nt, Human
acgcaguaaggucugugcugggccaagagcag

SEQ ID NO: 38086 - RNA, 19 nt, Human
acgcagucccgggccucca

SEQ ID NO: 38087 - RNA, 32 nt, Human
acgcagucucauuugaccccuuugcuuccaga

SEQ ID NO: 38088 - RNA, 32 nt, Human
acgcagugcagagccccaaagcucaggcuauu

SEQ ID NO: 38089 - RNA, 24 nt, Human
acgcaguggcucacgccuguaauc

SEQ ID NO: 38090 - RNA, 24 nt, Human
acgcaguggcucaugccuguaauc

SEQ ID NO: 38091 - RNA, 32 nt, Human
acgcaguguaaacccaguggcuucucugaccu

SEQ ID NO: 38092 - RNA, 32 nt, Human
acgcagugugacccucaaaaagcuuuuagccu

SEQ ID NO: 38093 - RNA, 32 nt, Human
acgcaguucuuuccaugggcauagguaagcug

SEQ ID NO: 38094 - RNA, 32 nt, Human
acgcauacacacacagacacacagaugugggg

SEQ ID NO: 38095 - RNA, 32 nt, Human
acgcauccgccccaggacuggagcucacacug

SEQ ID NO: 38096 - RNA, 32 nt, Human
acgcauccugugucccugucucuguagcuccu

SEQ ID NO: 38097 - RNA, 32 nt, Human
acgcaucucuacuccucugcgugagugcgugu

SEQ ID NO: 38098 - RNA, 32 nt, Human
acgcaucuguggucccagcuacucgggagacu

SEQ ID NO: 38099 - RNA, 32 nt, Human
acgcaugcacacacacaaagccuuaagcagaa

SEQ ID NO: 38100 - RNA, 32 nt, Human
acgcaugcacacacacauucaguauuuuaaaa

SEQ ID NO: 38101 - RNA, 32 nt, Human
acgcaugcacacacgcacacaugcacacacac

SEQ ID NO: 38102 - RNA, 32 nt, Human
acgcaugcacacacgugcgcacgcacacacac

SEQ ID NO: 38103 - RNA, 32 nt, Human
acgcaugccuguaaucccagcuacucgggagg

SEQ ID NO: 38104 - RNA, 32 nt, Human
acgcauguauaugcaucaccacguagccagga

SEQ ID NO: 38105 - RNA, 32 nt, Human
acgcaugugcaggggacccaagcugggaggua

SEQ ID NO: 38106 - RNA, 32 nt, Human
acgcaugugccaugugugcagauauguaucgu

SEQ ID NO: 38107 - RNA, 32 nt, Human
acgcauguggcuccagcccggccuggccgcca

SEQ ID NO: 38108 - RNA, 32 nt, Human
acgcauguugacugagaccuagagucauggau

SEQ ID NO: 38109 - RNA, 32 nt, Human
acgcauucuacagaacacagguuccaggaggc

SEQ ID NO: 38110 - RNA, 32 nt, Human
acgcauugccacggaaacauacagaggaugcc

SEQ ID NO: 38111 - RNA, 32 nt, Human
acgcauugggcuuuagcuguuuuucucauuug

SEQ ID NO: 38112 - RNA, 32 nt, Human
acgccaagaaaaucacugacgaccucucggca

SEQ ID NO: 38113 - RNA, 32 nt, Human
acgccaagaaggagaaccuacucuccacucuu

SEQ ID NO: 38114 - RNA, 32 nt, Human
acgccaagauggcgccacuacacuccagccug

SEQ ID NO: 38115 - RNA, 19 nt, Human
acgccaagccugacuuuaa

SEQ ID NO: 38116 - RNA, 32 nt, Human
acgccaaggcuucuuacugguccuccucuugu

SEQ ID NO: 38117 - RNA, 24 nt, Human
acgccaaguuguccgagcuggagg

SEQ ID NO: 38118 - RNA, 32 nt, Human
acgccaaucccaaaggcaugcagauggcugug

SEQ ID NO: 38119 - RNA, 32 nt, Human
acgccacagcacuccagccugggcgacagagu

SEQ ID NO: 38120 - RNA, 19 nt, Human
acgccacagcuggcugcug

SEQ ID NO: 38121 - RNA, 32 nt, Human
acgccaccacaguggccguggcgcauggcugc

SEQ ID NO: 38122 - RNA, 32 nt, Human
acgccaccaccaggagagaggcagaggggcug

SEQ ID NO: 38123 - RNA, 32 nt, Human
acgccaccacugggaagguugugugcaggaac

SEQ ID NO: 38124 - RNA, 32 nt, Human
acgccaccaugcagugcagacuacccauugaa

SEQ ID NO: 38125 - RNA, 32 nt, Human
acgccaccauucagucaccagacugggugccc

SEQ ID NO: 38126 - RNA, 19 nt, Human
acgccacccccacccgccu

SEQ ID NO: 38127 - RNA, 32 nt, Human
acgccaccguggaaguggaugugcaggugccu

SEQ ID NO: 38128 - RNA, 32 nt, Human
acgccacuacacuccagccugggcaacagagg

SEQ ID NO: 38129 - RNA, 32 nt, Human
acgccacuacacuccagccugggcgacagagc

SEQ ID NO: 38130 - RNA, 32 nt, Human
acgccacucacugccuccuuccuccugguguu

SEQ ID NO: 38131 - RNA, 32 nt, Human
acgccacugaacuccagccugggagacagcaa

SEQ ID NO: 38132 - RNA, 32 nt, Human
acgccacugaacuccagccugggugacagagu

SEQ ID NO: 38133 - RNA, 32 nt, Human
acgccacugcaacuccagcuugggugacagag

SEQ ID NO: 38134 - RNA, 32 nt, Human
acgccacugcacuaaugucuggugacagaguu

SEQ ID NO: 38135 - RNA, 32 nt, Human
acgccacugcacuacagccuggacgacagagc

SEQ ID NO: 38136 - RNA, 32 nt, Human
acgccacugcacuauagccuaggugacagagu

SEQ ID NO: 38137 - RNA, 32 nt, Human
acgccacugcacucaagccugggcgacagagc

SEQ ID NO: 38138 - RNA, 32 nt, Human
acgccacugcacuccaaccugggugacagagc

SEQ ID NO: 38139 - RNA, 32 nt, Human
acgccacugcacuccaacuugggcaacagaca

SEQ ID NO: 38140 - RNA, 32 nt, Human
acgccacugcacuccaccugggcaacaagaac

SEQ ID NO: 38141 - RNA, 32 nt, Human
acgccacugcacuccagcacccugggcgacag

SEQ ID NO: 38142 - RNA, 32 nt, Human
acgccacugcacuccagcccgggcgacaguuc

SEQ ID NO: 38143 - RNA, 32 nt, Human
acgccacugcacuccagcccgggcggcagagg

SEQ ID NO: 38144 - RNA, 32 nt, Human
acgccacugcacuccagcccggggacagagca

SEQ ID NO: 38145 - RNA, 32 nt, Human
acgccacugcacuccagcccgggugacagagc

SEQ ID NO: 38146 - RNA, 32 nt, Human
acgccacugcacuccagccuaggcgacagagc

SEQ ID NO: 38147 - RNA, 32 nt, Human
acgccacugcacuccagccucggugacagagc

SEQ ID NO: 38148 - RNA, 32 nt, Human
acgccacugcacuccagccugagugacagagc

SEQ ID NO: 38149 - RNA, 32 nt, Human
acgccacugcacuccagccugcggacagacca

SEQ ID NO: 38150 - RNA, 32 nt, Human
acgccacugcacuccagccuggacaacagagu

SEQ ID NO: 38151 - RNA, 32 nt, Human
acgccacugcacuccagccuggaggccagagu

SEQ ID NO: 38152 - RNA, 32 nt, Human
acgccacugcacuccagccuggaugacagagc

SEQ ID NO: 38153 - RNA, 32 nt, Human
acgccacugcacuccagccuggcgacagagcg

SEQ ID NO: 38154 - RNA, 32 nt, Human
acgccacugcacuccagccugggagacagagc

SEQ ID NO: 38155 - RNA, 32 nt, Human
acgccacugcacuccagccugggagacagagu

SEQ ID NO: 38156 - RNA, 32 nt, Human
acgccacugcacuccagccugggcaacaagag

SEQ ID NO: 38157 - RNA, 32 nt, Human
acgccacugcacuccagccugggcaacacagc

SEQ ID NO: 38158 - RNA, 32 nt, Human
acgccacugcacuccagccugggcaacagaga

SEQ ID NO: 38159 - RNA, 32 nt, Human
acgccacugcacuccagccugggcaacagagc

SEQ ID NO: 38160 - RNA, 32 nt, Human
acgccacugcacuccagccugggcaacagagu

SEQ ID NO: 38161 - RNA, 32 nt, Human
acgccacugcacuccagccugggcaacaguga

SEQ ID NO: 38162 - RNA, 32 nt, Human
acgccacugcacuccagccugggcaacggauu

SEQ ID NO: 38163 - RNA, 32 nt, Human
acgccacugcacuccagccugggccacagaau

SEQ ID NO: 38164 - RNA, 32 nt, Human
acgccacugcacuccagccugggcgacagaau

SEQ ID NO: 38165 - RNA, 32 nt, Human
acgccacugcacuccagccugggcgacagaga

SEQ ID NO: 38166 - RNA, 32 nt, Human
acgccacugcacuccagccugggcgacagagc

SEQ ID NO: 38167 - RNA, 32 nt, Human
acgccacugcacuccagccugggcgacagagu

SEQ ID NO: 38168 - RNA, 32 nt, Human
acgccacugcacuccagccugggcgacaguga

SEQ ID NO: 38169 - RNA, 32 nt, Human
acgccacugcacuccagccugggcgauggagc

SEQ ID NO: 38170 - RNA, 32 nt, Human
acgccacugcacuccagccugggcugcagggu

SEQ ID NO: 38171 - RNA, 32 nt, Human
acgccacugcacuccagccuggguaacaagag

SEQ ID NO: 38172 - RNA, 32 nt, Human
acgccacugcacuccagccuggguaacagagc

SEQ ID NO: 38173 - RNA, 32 nt, Human
acgccacugcacuccagccugggugacagaac

SEQ ID NO: 38174 - RNA, 32 nt, Human
acgccacugcacuccagccugggugacagaga

SEQ ID NO: 38175 - RNA, 32 nt, Human
acgccacugcacuccagccugggugacagagc

SEQ ID NO: 38176 - RNA, 32 nt, Human
acgccacugcacuccagccugggugacagagu

SEQ ID NO: 38177 - RNA, 32 nt, Human
acgccacugcacuccagccugggugacaguga

SEQ ID NO: 38178 - RNA, 32 nt, Human
acgccacugcacuccagccugggugacggagc

SEQ ID NO: 38179 - RNA, 32 nt, Human
acgccacugcacuccagccuggucaacagagu

SEQ ID NO: 38180 - RNA, 32 nt, Human
acgccacugcacuccagccuggugacagagca

SEQ ID NO: 38181 - RNA, 32 nt, Human
acgccacugcacuccagccuggugacagcgug

SEQ ID NO: 38182 - RNA, 32 nt, Human
acgccacugcacuccagccuguugacaaagca

SEQ ID NO: 38183 - RNA, 32 nt, Human
acgccacugcacuccagcgugggcaacagagc

SEQ ID NO: 38184 - RNA, 32 nt, Human
acgccacugcacuccagcuggagugacagagc

SEQ ID NO: 38185 - RNA, 32 nt, Human
acgccacugcacuccagcuugggugacaaagu

SEQ ID NO: 38186 - RNA, 32 nt, Human
acgccacugcacuccagucugggugacagaga

SEQ ID NO: 38187 - RNA, 32 nt, Human
acgccacugcacuccaguguaggcaacagagu

SEQ ID NO: 38188 - RNA, 32 nt, Human
acgccacugcacuccauccagccugggugaca

SEQ ID NO: 38189 - RNA, 32 nt, Human
acgccacugcacucuagccuaggcgacagagu

SEQ ID NO: 38190 - RNA, 32 nt, Human
acgccacugcacucuagccugggauacagagc

SEQ ID NO: 38191 - RNA, 32 nt, Human
acgccacugcacucuagccugggcaacaagag

SEQ ID NO: 38192 - RNA, 32 nt, Human
acgccacugcacucuagccugggcaauaagag

SEQ ID NO: 38193 - RNA, 32 nt, Human
acgccacugcacuugagccugggcgacacagc

SEQ ID NO: 38194 - RNA, 32 nt, Human
acgccacugcauuccagccugggcgacagagc

SEQ ID NO: 38195 - RNA, 32 nt, Human
acgccacugcauuccagccuggugacagagcg

SEQ ID NO: 38196 - RNA, 32 nt, Human
acgccacugcauuccagccugugcgacagaau

SEQ ID NO: 38197 - RNA, 32 nt, Human
acgccacugcccuccagccuggggagacagag

SEQ ID NO: 38198 - RNA, 32 nt, Human
acgccacugcgcuccagccugggcgaaagagu

SEQ ID NO: 38199 - RNA, 32 nt, Human
acgccacuguacuccagccuggaugacacagc

SEQ ID NO: 38200 - RNA, 32 nt, Human
acgccacuguacuccagccugggagacacagu

SEQ ID NO: 38201 - RNA, 32 nt, Human
acgccacuguacuucuagccuggguuacagag

SEQ ID NO: 38202 - RNA, 32 nt, Human
acgccacugugcuccagccugggcaacaaagu

SEQ ID NO: 38203 - RNA, 32 nt, Human
acgccagaacuccaggcaguggccugagcugu

SEQ ID NO: 38204 - RNA, 32 nt, Human
acgccagaaucuggccggguucugagcuuguu

SEQ ID NO: 38205 - RNA, 32 nt, Human
acgccagagccagcaggggcuguuucgggccg

SEQ ID NO: 38206 - RNA, 32 nt, Human
acgccagagucccagcccuggaaccguucaga

SEQ ID NO: 38207 - RNA, 32 nt, Human
acgccagauccucugucccaccccaggccuug

SEQ ID NO: 38208 - RNA, 26 nt, Human
acgccagccuggccaacauggugaaa

SEQ ID NO: 38209 - RNA, 32 nt, Human
acgccaggaaugcugcacgcugggcagucccu

SEQ ID NO: 38210 - RNA, 32 nt, Human
acgccaggacagacgauggcagaggagagggc

SEQ ID NO: 38211 - RNA, 32 nt, Human
acgccaggaggaggacacggccgccgagagca

SEQ ID NO: 38212 - RNA, 30 nt, Human
acgccaggcgagcccagggcacagaugcug

SEQ ID NO: 38213 - RNA, 32 nt, Human
acgccagggcagcagccguugcucagagagaa

SEQ ID NO: 38214 - RNA, 32 nt, Human
acgccaguaauugauugauaacaggaagcuau

SEQ ID NO: 38215 - RNA, 32 nt, Human
acgccagugcacuccagccugagagacagagu

SEQ ID NO: 38216 - RNA, 32 nt, Human
acgccauagcaauugcacuccggccugggcaa

SEQ ID NO: 38217 - RNA, 32 nt, Human
acgccaucacugcugguggugaggaaauggug

SEQ ID NO: 38218 - RNA, 32 nt, Human
acgccauccuccugccucagcuacucaggaga

SEQ ID NO: 38219 - RNA, 32 nt, Human
acgccaucuccacucuuguggucaucauggcc

SEQ ID NO: 38220 - RNA, 32 nt, Human
acgccauuacacuccagccuggcugacagugc

SEQ ID NO: 38221 - RNA, 32 nt, Human
acgccauuacacuccagccugggcaacagagc

SEQ ID NO: 38222 - RNA, 32 nt, Human
acgccauucuccugccucagcuacucaggagg

SEQ ID NO: 38223 - RNA, 32 nt, Human
acgccauugaguugagcuggccuagcgaugga

SEQ ID NO: 38224 - RNA, 32 nt, Human
acgccauugcacuccaaccugggugacaagag

SEQ ID NO: 38225 - RNA, 32 nt, Human
acgccauugcacuccagccuaggcaacgagag

SEQ ID NO: 38226 - RNA, 32 nt, Human
acgccauugcacuccagccuaggcaauaagag

SEQ ID NO: 38227 - RNA, 32 nt, Human
acgccauugcacuccagccuaggcgacagagu

SEQ ID NO: 38228 - RNA, 32 nt, Human
acgccauugcacuccagccugggcaacaagag

SEQ ID NO: 38229 - RNA, 32 nt, Human
acgccauugcacuccagccugggcaacaagcg

SEQ ID NO: 38230 - RNA, 32 nt, Human
acgccauugcacuccagccugggcaacagagc

SEQ ID NO: 38231 - RNA, 32 nt, Human
acgccauugcacuccagccugggcaacagagu

SEQ ID NO: 38232 - RNA, 32 nt, Human
acgccauugcacuccagccugggcaacagugu

SEQ ID NO: 38233 - RNA, 32 nt, Human
acgccauugcacuccagccugggcaacgagag

SEQ ID NO: 38234 - RNA, 32 nt, Human
acgccauugcacuccagccugggcaauaagag

SEQ ID NO: 38235 - RNA, 32 nt, Human
acgccauugcacuccagccugggcgacagagu

SEQ ID NO: 38236 - RNA, 32 nt, Human
acgccauugcacuccagccugggggacagagc

SEQ ID NO: 38237 - RNA, 32 nt, Human
acgccauugcacuccagccugggugacaagag

SEQ ID NO: 38238 - RNA, 32 nt, Human
acgccauugcacuccagccugggugacacagu

SEQ ID NO: 38239 - RNA, 32 nt, Human
acgccauugcacuccagccugggugacagaac

SEQ ID NO: 38240 - RNA, 32 nt, Human
acgccauugcacuccagccugggugacagagu

SEQ ID NO: 38241 - RNA, 32 nt, Human
acgccauugcacuccagccugggugagaagag

SEQ ID NO: 38242 - RNA, 32 nt, Human
acgccauugcacuccagccugugcgacaagag

SEQ ID NO: 38243 - RNA, 32 nt, Human
acgccauugcacuccagcuugggcaauaagaa

SEQ ID NO: 38244 - RNA, 32 nt, Human
acgccauugcacuccagucugagcaacaagag

SEQ ID NO: 38245 - RNA, 32 nt, Human
acgccauugcacuccagucugguugacagagu

SEQ ID NO: 38246 - RNA, 32 nt, Human
acgccauuguacuccagccuggcaacagagcg

SEQ ID NO: 38247 - RNA, 32 nt, Human
acgccauuguacuccagccugggcaacaagag

SEQ ID NO: 38248 - RNA, 32 nt, Human
acgccauuguacuccagccugggcgacagagc

SEQ ID NO: 38249 - RNA, 32 nt, Human
acgcccaaacuaaacuccucauuccuacccuu

SEQ ID NO: 38250 - RNA, 32 nt, Human
acgcccaagccacccauugucauucauugugu

SEQ ID NO: 38251 - RNA, 32 nt, Human
acgcccaaucagcugcuggugacauugucucc

SEQ ID NO: 38252 - RNA, 32 nt, Human
acgcccacacucauugcacaucuucucuucag

SEQ ID NO: 38253 - RNA, 32 nt, Human
acgcccagccacagcaagcccugucccuuugc

SEQ ID NO: 38254 - RNA, 32 nt, Human
acgcccagcuaauuuuuauauucuuuaguaaa

SEQ ID NO: 38255 - RNA, 21 nt, Human
acgcccagcugaggcuggggg

SEQ ID NO: 38256 - RNA, 24 nt, Human
acgcccagguacucagcuggccca

SEQ ID NO: 38257 - RNA, 24 nt, Human
acgcccaggucggugcucggccca

SEQ ID NO: 38258 - RNA, 32 nt, Human
acgcccagugccuucacagccaaggccagacu

SEQ ID NO: 38259 - RNA, 32 nt, Human
acgcccaucuucugccucauaguggucacuca

SEQ ID NO: 38260 - RNA, 32 nt, Human
acgcccaugugccucuggucucagggacuaca

SEQ ID NO: 38261 - RNA, 32 nt, Human
acgccccagacccaggcucaggaggacugaga

SEQ ID NO: 38262 - RNA, 32 nt, Human
acgcccccaccagcucaaauuccgagugcaga

SEQ ID NO: 38263 - RNA, 32 nt, Human
acgcccccacucucccuccacacuuccagggu

SEQ ID NO: 38264 - RNA, 32 nt, Human
acgcccccaguuccacaccauggguguuggau

SEQ ID NO: 38265 - RNA, 28 nt, Human
acgcccccaucugcugccuuuucuauug

SEQ ID NO: 38266 - RNA, 32 nt, Human
acgcccccguugagguucacuuccuggauccu

SEQ ID NO: 38267 - RNA, 32 nt, Human
acgccccuaccugcuccuuccugggcccucag

SEQ ID NO: 38268 - RNA, 20 nt, Human
acgccccuccaaaccuccag

SEQ ID NO: 38269 - RNA, 32 nt, Human
acgccccucuacugcuauguggcuucaaccag

SEQ ID NO: 38270 - RNA, 32 nt, Human
acgccccugcaccucugcuccggugcacaaau

SEQ ID NO: 38271 - RNA, 32 nt, Human
acgccccugcccuggccgcacaggguuggguu

SEQ ID NO: 38272 - RNA, 32 nt, Human
acgccccugguggacaggaugguucggcaaag

SEQ ID NO: 38273 - RNA, 32 nt, Human
acgcccgccauggaaggcuuucagcuccaaga

SEQ ID NO: 38274 - RNA, 32 nt, Human
acgcccgcccucucgccuucgccgaaccaaag

SEQ ID NO: 38275 - RNA, 32 nt, Human
acgcccggccuggaguuuuuaggguaaaacgu

SEQ ID NO: 38276 - RNA, 32 nt, Human
acgcccggcuaauuuuuguguuuuaguagaga

SEQ ID NO: 38277 - RNA, 32 nt, Human
acgcccgguugcaggccaggaccgaguuggac

SEQ ID NO: 38278 - RNA, 32 nt, Human
acgcccuauacaacuuggcuucacauacuuuu

SEQ ID NO: 38279 - RNA, 32 nt, Human
acgcccucacugcaggcuccccuccucggcuu

SEQ ID NO: 38280 - RNA, 32 nt, Human
acgcccucagcccuccgggcacacgugccgcc

SEQ ID NO: 38281 - RNA, 24 nt, Human
acgcccucccccaagcccacccag

SEQ ID NO: 38282 - RNA, 32 nt, Human
acgcccucccuggcccccgccugggccuccuu

SEQ ID NO: 38283 - RNA, 32 nt, Human
acgcccuccugguuugggaagcugcugcucuu

SEQ ID NO: 38284 - RNA, 32 nt, Human
acgcccucgacucuuggaucugcuccgagacc

SEQ ID NO: 38285 - RNA, 32 nt, Human
acgcccucuaucugcagguccccagccugggu

SEQ ID NO: 38286 - RNA, 32 nt, Human
acgcccugaggguggccacgcugccagguguu

SEQ ID NO: 38287 - RNA, 32 nt, Human
acgcccugagguggaacagaggugagaggaag

SEQ ID NO: 38288 - RNA, 19 nt, Human
acgcccugcccagucccau

SEQ ID NO: 38289 - RNA, 32 nt, Human
acgcccugcuucgucgccuccuuucucuccca

SEQ ID NO: 38290 - RNA, 32 nt, Human
acgcccuggaacgucuguggcagccucuguca

SEQ ID NO: 38291 - RNA, 32 nt, Human
acgcccuggcaggacacaggcacuuuuccaau

SEQ ID NO: 38292 - RNA, 32 nt, Human
acgcccuuguccccgcccuccugagcuaugaa

SEQ ID NO: 38293 - RNA, 32 nt, Human
acgccgagaaguucccgcggcagccgcggauc

SEQ ID NO: 38294 - RNA, 32 nt, Human
acgccgagagccagagagaugucggauuucga

SEQ ID NO: 38295 - RNA, 32 nt, Human
acgccgagugccugugacgcgccggcuugacu

SEQ ID NO: 38296 - RNA, 32 nt, Human
acgccgcagcgcucgcuuucccuucccuccuc

SEQ ID NO: 38297 - RNA, 32 nt, Human
acgccgccacggucaucuucgccugccccgcc

SEQ ID NO: 38298 - RNA, 21 nt, Human
acgccgccgccgccgccgccg

SEQ ID NO: 38299 - RNA, 20 nt, Human
acgccgccgccgccgcugcc

SEQ ID NO: 38300 - RNA, 32 nt, Human
acgccgccuggaggccagaggggucaguggcc

SEQ ID NO: 38301 - RNA, 32 nt, Human
acgccgcgacgggaacuugaggugggaacuuu

SEQ ID NO: 38302 - RNA, 32 nt, Human
acgccgcggccaccgggcccacggccaccaga

SEQ ID NO: 38303 - RNA, 32 nt, Human
acgccgcgugcuccuguucagcccugccgagg

SEQ ID NO: 38304 - RNA, 32 nt, Human
acgccgcugcacuccagcuugaaugacagagg

SEQ ID NO: 38305 - RNA, 32 nt, Human
acgccggcaagucccaacaggcugccagcagu

SEQ ID NO: 38306 - RNA, 32 nt, Human
acgccggggaccccuccccagagccggccgga

SEQ ID NO: 38307 - RNA, 32 nt, Human
acgccgggggugaaaauguacgucuguagcau

SEQ ID NO: 38308 - RNA, 32 nt, Human
acgccgggugcucugguaaugggcccugccgc

SEQ ID NO: 38309 - RNA, 32 nt, Human
acgccggguucacacguguguucacagagcua

SEQ ID NO: 38310 - RNA, 32 nt, Human
acgccgucagcugagaagagugaggcagcgcc

SEQ ID NO: 38311 - RNA, 32 nt, Human
acgccgucugcacgugccugugccucacccag

SEQ ID NO: 38312 - RNA, 32 nt, Human
acgccgugucagucgggagggagggagcgagc

SEQ ID NO: 38313 - RNA, 32 nt, Human
acgccguugcacuccagccugggcaacaagag

SEQ ID NO: 38314 - RNA, 32 nt, Human
acgccucaagcacgggcaccagccgucaucuc

SEQ ID NO: 38315 - RNA, 32 nt, Human
acgccucagauggggaaacugaagcccaaugu

SEQ ID NO: 38316 - RNA, 32 nt, Human
acgccucagucgccucacuccugggccugcug

SEQ ID NO: 38317 - RNA, 32 nt, Human
acgccucccuccuggccaggcuguucgagcac

SEQ ID NO: 38318 - RNA, 32 nt, Human
acgccuccgggagcugugucccugagcccccu

SEQ ID NO: 38319 - RNA, 32 nt, Human
acgccuccuggacuccagcgccuggaggaggc

SEQ ID NO: 38320 - RNA, 32 nt, Human
acgccucgcucaccgccgccgcuucucccugc

SEQ ID NO: 38321 - RNA, 32 nt, Human
acgccucguuacccuucuuccuuccgcuucaa

SEQ ID NO: 38322 - RNA, 32 nt, Human
acgccucucccugcacucccuccuggagcucu

SEQ ID NO: 38323 - RNA, 32 nt, Human
acgccucugcacuccagccugggcaacaagag

SEQ ID NO: 38324 - RNA, 32 nt, Human
acgccucugcagcugcagcccucguucucuug

SEQ ID NO: 38325 - RNA, 26 nt, Human
acgccugaccucagaugauccaccca

SEQ ID NO: 38326 - RNA, 32 nt, Human
acgccugacucugugcgagcuucuuucugugu

SEQ ID NO: 38327 - RNA, 29 nt, Human
acgccugcacaaugaaggcuuguucacac

SEQ ID NO: 38328 - RNA, 32 nt, Human
acgccugcagagacucaaauauugagaggacu

SEQ ID NO: 38329 - RNA, 32 nt, Human
acgccugccuguagucccagcuacucgggagg

SEQ ID NO: 38330 - RNA, 32 nt, Human
acgccugcgcccaucuuucacacacauucugg

SEQ ID NO: 38331 - RNA, 32 nt, Human
acgccugcgccuguaaucccagcacuuuggga

SEQ ID NO: 38332 - RNA, 32 nt, Human
acgccuggagaguuguggacuggggcaaccuu

SEQ ID NO: 38333 - RNA, 32 nt, Human
acgccuggauccugccuccgccaggccggcug

SEQ ID NO: 38334 - RNA, 32 nt, Human
acgccuggccgaaaaacccacucucauaacag

SEQ ID NO: 38335 - RNA, 32 nt, Human
acgccugggaggauguaccagagccuggcgcu

SEQ ID NO: 38336 - RNA, 32 nt, Human
acgccugggccuugcugccaggaagcuucggc

SEQ ID NO: 38337 - RNA, 32 nt, Human
acgccuggguuuuccacucgaagaggaagucc

SEQ ID NO: 38338 - RNA, 32 nt, Human
acgccuguaaucccagcacuugggaggccaag

SEQ ID NO: 38339 - RNA, 32 nt, Human
acgccuguaaucccuuagcuacucaggaggcu

SEQ ID NO: 38340 - RNA, 23 nt, Human
acgccugucugcaggcgcugcug

SEQ ID NO: 38341 - RNA, 32 nt, Human
acgccuguggcucaucggcuucccucuuaacc

SEQ ID NO: 38342 - RNA, 32 nt, Human
acgccuguggguucaccaccuccuaggagggu

SEQ ID NO: 38343 - RNA, 32 nt, Human
acgccuguggucccagcacuuuggcaggugug

SEQ ID NO: 38344 - RNA, 32 nt, Human
acgccuuaggaaggggacaaccaggccccgcc

SEQ ID NO: 38345 - RNA, 32 nt, Human
acgccuuccaccugccccacugcuucuucgcu

SEQ ID NO: 38346 - RNA, 32 nt, Human
acgccuuccauucauuguauuacggauuuggu

SEQ ID NO: 38347 - RNA, 32 nt, Human
acgccuucuucaccuguguccucugccucuga

SEQ ID NO: 38348 - RNA, 19 nt, Human
acgccuuggaaccguccuu

SEQ ID NO: 38349 - RNA, 32 nt, Human
acgccuuguucuucucaagagaaaguuguaac

SEQ ID NO: 38350 - RNA, 32 nt, Human
acgccuuucccucugcugauggggccuccggg

SEQ ID NO: 38351 - RNA, 32 nt, Human
acgcgaaagaaaugggcauaaguagaaugaag

SEQ ID NO: 38352 - RNA, 32 nt, Human
acgcgaccagaggacagcucugugcugauccc

SEQ ID NO: 38353 - RNA, 32 nt, Human
acgcgacccaaaaccaaaugacccaccaccac

SEQ ID NO: 38354 - RNA, 32 nt, Human
acgcgacccucgagacgacagcgcggcuacug

SEQ ID NO: 38355 - RNA, 32 nt, Human
acgcgagggcaccucuggaggggagcgccugc

SEQ ID NO: 38356 - RNA, 30 nt, Human
acgcgaugcuauucgacaaggugaaagcgu

SEQ ID NO: 38357 - RNA, 32 nt, Human
acgcgcacacacucacgcacacacaagcagag

SEQ ID NO: 38358 - RNA, 32 nt, Human
acgcgcagagugaaaaugguccaccauucagg

SEQ ID NO: 38359 - RNA, 32 nt, Human
acgcgcaggcgcagagagccccagccacgccg

SEQ ID NO: 38360 - RNA, 32 nt, Human
acgcgcauguguuugccagggauggggccacc

SEQ ID NO: 38361 - RNA, 32 nt, Human
acgcgccccacgcauccucuuccauccccagg

SEQ ID NO: 38362 - RNA, 32 nt, Human
acgcgccccagccccggagcagggucaggguc

SEQ ID NO: 38363 - RNA, 32 nt, Human
acgcgcccugcucucacggccucggcacaggc

SEQ ID NO: 38364 - RNA, 32 nt, Human
acgcgccgcaggaggcugggacugguccaguu

SEQ ID NO: 38365 - RNA, 32 nt, Human
acgcgccgccgagccaccaucaugccugggca

SEQ ID NO: 38366 - RNA, 32 nt, Human
acgcgccucggggaacagccuggcccaaagcc

SEQ ID NO: 38367 - RNA, 32 nt, Human
acgcgccuguaauaccagcuacucaggaggcu

SEQ ID NO: 38368 - RNA, 32 nt, Human
acgcgccuguaaucccagccacucaggaagcu

SEQ ID NO: 38369 - RNA, 32 nt, Human
acgcgccuguaaucccagcuacccaggaggcu

SEQ ID NO: 38370 - RNA, 32 nt, Human
acgcgccuguaaucccagcuacucaagaggcu

SEQ ID NO: 38371 - RNA, 32 nt, Human
acgcgccuguaaucccagcuacucaggaggcu

SEQ ID NO: 38372 - RNA, 32 nt, Human
acgcgccuguaaucccagcuacucgggaggcu

SEQ ID NO: 38373 - RNA, 32 nt, Human
acgcgccuguaaucccagcuacuugggaggcu

SEQ ID NO: 38374 - RNA, 32 nt, Human
acgcgccuguaaucccagcuauucgggaggcu

SEQ ID NO: 38375 - RNA, 20 nt, Human
acgcgccuguagucccagcu

SEQ ID NO: 38376 - RNA, 32 nt, Human
acgcgccuguagucccagcuacacgggaggcu

SEQ ID NO: 38377 - RNA, 32 nt, Human
acgcgccuguagucccagcuacucaggaggcu

SEQ ID NO: 38378 - RNA, 32 nt, Human
acgcgccuguagucccagcuacucgggaggcu

SEQ ID NO: 38379 - RNA, 32 nt, Human
acgcgccuguagucccagcugcucaggaggcu

SEQ ID NO: 38380 - RNA, 32 nt, Human
acgcgccuguaguccuagcuacuccggaggcu

SEQ ID NO: 38381 - RNA, 32 nt, Human
acgcgccuucuaaaccugagggagugggcacg

SEQ ID NO: 38382 - RNA, 32 nt, Human
acgcgcggcggcggaggcugcgcgcgggccac

SEQ ID NO: 38383 - RNA, 32 nt, Human
acgcgcucagccccuucucggccucgggaggg

SEQ ID NO: 38384 - RNA, 32 nt, Human
acgcgcuccugacagcccccaaggauugagca

SEQ ID NO: 38385 - RNA, 32 nt, Human
acgcgcucuccaccacccaacccaaaccauga

SEQ ID NO: 38386 - RNA, 32 nt, Human
acgcgcugcagccuccagcccgcggcaagcgg

SEQ ID NO: 38387 - RNA, 32 nt, Human
acgcgcugcucaccugucuuuuuggcuucucc

SEQ ID NO: 38388 - RNA, 32 nt, Human
acgcgcuggcccugccacuccagccuggccuc

SEQ ID NO: 38389 - RNA, 32 nt, Human
acgcgcuggguguccagcucucugucacagcu

SEQ ID NO: 38390 - RNA, 32 nt, Human
acgcgcuguccuggcuggaggagguggagcag

SEQ ID NO: 38391 - RNA, 32 nt, Human
acgcgcuucguauuucagaaggcgcugcguuc

SEQ ID NO: 38392 - RNA, 32 nt, Human
acgcgcuuguagucccagcuacucgggaggcu

SEQ ID NO: 38393 - RNA, 32 nt, Human
acgcggaagaggagcugugggaagggggagga

SEQ ID NO: 38394 - RNA, 32 nt, Human
acgcggagaagaggagaggaccuacaagaacg

SEQ ID NO: 38395 - RNA, 32 nt, Human
acgcggagaggaggagaggcugagggagggag

SEQ ID NO: 38396 - RNA, 32 nt, Human
acgcggagcugggaaaagggaggcagaggagg

SEQ ID NO: 38397 - RNA, 21 nt, Human
acgcggccaccgagcuggagg

SEQ ID NO: 38398 - RNA, 32 nt, Human
acgcggcccacuguggcguucccagugcccgg

SEQ ID NO: 38399 - RNA, 32 nt, Human
acgcggccucuggaggugcacccuggaccccc

SEQ ID NO: 38400 - RNA, 21 nt, Human
acgcggcugcaagccaaggag

SEQ ID NO: 38401 - RNA, 21 nt, Human
acgcggcugccuuaucgggaa

SEQ ID NO: 38402 - RNA, 32 nt, Human
acgcggcuggguccaagaaugccucaggaugg

SEQ ID NO: 38403 - RNA, 32 nt, Human
acgcgggaggcagagacugcagugagccgaga

SEQ ID NO: 38404 - RNA, 32 nt, Human
acgcgggagggguggaggcugcggggagccgg

SEQ ID NO: 38405 - RNA, 32 nt, Human
acgcgggagucgcagagagggaccccgggcgc

SEQ ID NO: 38406 - RNA, 32 nt, Human
acgcgggcaugcugguggccucaggaauacga

SEQ ID NO: 38407 - RNA, 32 nt, Human
acgcgggccagccucagcaccgacagccgacg

SEQ ID NO: 38408 - RNA, 32 nt, Human
acgcgggcgaggaagaccagccccggggcccc

SEQ ID NO: 38409 - RNA, 32 nt, Human
acgcgggcgccacaugcccagccugggagcaa

SEQ ID NO: 38410 - RNA, 32 nt, Human
acgcggggaagaggaggcggaaaaggacgcaa

SEQ ID NO: 38411 - RNA, 32 nt, Human
acgcggggccugggacucgaccagccucuccc

SEQ ID NO: 38412 - RNA, 32 nt, Human
acgcggguggcaccgugcgagcuccaggagcc

SEQ ID NO: 38413 - RNA, 32 nt, Human
acgcgguacagcugcccaagggcguucguaac

SEQ ID NO: 38414 - RNA, 32 nt, Human
acgcguccagccaggagaggcagagggaggca

SEQ ID NO: 38415 - RNA, 32 nt, Human
acgcgucccaccccaggcucucacugggcgcu

SEQ ID NO: 38416 - RNA, 32 nt, Human
acgcguccggccgccuccuagcggcccgggcc

SEQ ID NO: 38417 - RNA, 32 nt, Human
acgcguccuccauccucucucuccuuggcacu

SEQ ID NO: 38418 - RNA, 23 nt, Human
acgcgugacccagccaucgggga

SEQ ID NO: 38419 - RNA, 32 nt, Human
acgcgugagcaugcauguguguguacacgugu

SEQ ID NO: 38420 - RNA, 24 nt, Human
acgcgugauauugaccaucgggga

SEQ ID NO: 38421 - RNA, 32 nt, Human
acgcgugcauaugcuacacauaugugcuucuc

SEQ ID NO: 38422 - RNA, 32 nt, Human
acgcgugggcaggcagcagccgggcagggaug

SEQ ID NO: 38423 - RNA, 32 nt, Human
acgcgugguagccccaggaugggugaguucaa

SEQ ID NO: 38424 - RNA, 32 nt, Human
acgcgugugcaggagcggcagauggggagaca

SEQ ID NO: 38425 - RNA, 32 nt, Human
acgcuaagugagguccuauggguggggcccua

SEQ ID NO: 38426 - RNA, 32 nt, Human
acgcuaagugucugagacugacaucggaacca

SEQ ID NO: 38427 - RNA, 32 nt, Human
acgcuaauguucaugacuccuggccuugggau

SEQ ID NO: 38428 - RNA, 32 nt, Human
acgcuacugcgcuccagccugagugauagagu

SEQ ID NO: 38429 - RNA, 32 nt, Human
acgcuacuggcaacacggcaguauuuagccac

SEQ ID NO: 38430 - RNA, 30 nt, Human
acgcuauguccagcaaaggcuccgugguuc

SEQ ID NO: 38431 - RNA, 22 nt, Human
acgcuauuuacucagcuaccca

SEQ ID NO: 38432 - RNA, 32 nt, Human
acgcucaggcagugcuuccuuccagaugggcu

SEQ ID NO: 38433 - RNA, 32 nt, Human
acgcucagggagcaaaccugguuaagauugga

SEQ ID NO: 38434 - RNA, 32 nt, Human
acgcucaguccucaggcgucgaggguagcucc

SEQ ID NO: 38435 - RNA, 32 nt, Human
acgcucaguucugcccaggcccggcuccaccc

SEQ ID NO: 38436 - RNA, 32 nt, Human
acgcucaucucuggaaggggcagcccugagug

SEQ ID NO: 38437 - RNA, 32 nt, Human
acgcuccaagccccauagacugauucaggaag

SEQ ID NO: 38438 - RNA, 32 nt, Human
acgcuccagaauggagguccugagggagaagg

SEQ ID NO: 38439 - RNA, 32 nt, Human
acgcuccagcacaguggccaggaaaagaaaua

SEQ ID NO: 38440 - RNA, 32 nt, Human
acgcucccagggccuggcugggccagcuuccc

SEQ ID NO: 38441 - RNA, 32 nt, Human
acgcucccauuuuaccgagguggaucugaggc

SEQ ID NO: 38442 - RNA, 32 nt, Human
acgcuccccucccagggauguguccgccagau

SEQ ID NO: 38443 - RNA, 32 nt, Human
acgcuccccugagagguuucuggggcccgcug

SEQ ID NO: 38444 - RNA, 32 nt, Human
acgcucccuccacccccugcgcaaaaagaccc

SEQ ID NO: 38445 - RNA, 32 nt, Human
acgcucccucccccugccuccuccuccuccuc

SEQ ID NO: 38446 - RNA, 32 nt, Human
acgcuccgcagccucaggucuuggcucucacu

SEQ ID NO: 38447 - RNA, 32 nt, Human
acgcuccggauaguucccgagggucauccgcg

SEQ ID NO: 38448 - RNA, 32 nt, Human
acgcuccucaccuagccccuguccugagggug

SEQ ID NO: 38449 - RNA, 32 nt, Human
acgcuccucuacucuuugagacaucacuggcc

SEQ ID NO: 38450 - RNA, 32 nt, Human
acgcuccucuucuccccuccuccuccugccgg

SEQ ID NO: 38451 - RNA, 32 nt, Human
acgcuccugcacccucuccccguccauaccgc

SEQ ID NO: 38452 - RNA, 32 nt, Human
acgcuccugccuggugcccgugggcuugaauu

SEQ ID NO: 38453 - RNA, 32 nt, Human
acgcuccuguccagacuacuaacagcacaaga

SEQ ID NO: 38454 - RNA, 32 nt, Human
acgcuccugugcugcugaccaacacagcugcu

SEQ ID NO: 38455 - RNA, 32 nt, Human
acgcuccuugccucaccaaccuucccauacac

SEQ ID NO: 38456 - RNA, 32 nt, Human
acgcucggugccuguaucuacuccggggccua

SEQ ID NO: 38457 - RNA, 32 nt, Human
acgcucgugagcugacugcucugcuccacugg

SEQ ID NO: 38458 - RNA, 32 nt, Human
acgcucucagcagacuugaguccugguccuuc

SEQ ID NO: 38459 - RNA, 32 nt, Human
acgcucuccuguccucccugugcucagggcug

SEQ ID NO: 38460 - RNA, 32 nt, Human
acgcucugagcugagagagaagaaauagcuau

SEQ ID NO: 38461 - RNA, 32 nt, Human
acgcucugucuccucaaccucuaccuggcgga

SEQ ID NO: 38462 - RNA, 32 nt, Human
acgcucugugguuugucagaccugcaagcaag

SEQ ID NO: 38463 - RNA, 32 nt, Human
acgcucuugggucgucucaugagacccagggg

SEQ ID NO: 38464 - RNA, 21 nt, Human
acgcugaagcccaggagagcg

SEQ ID NO: 38465 - RNA, 32 nt, Human
acgcugacacuuggccaaaggguccucaccuc

SEQ ID NO: 38466 - RNA, 32 nt, Human
acgcugacccuccugacaguggcaggacugga

SEQ ID NO: 38467 - RNA, 32 nt, Human
acgcugagacgguuugggggugggugggcggg

SEQ ID NO: 38468 - RNA, 32 nt, Human
acgcugaggaggaggaggaggcggaggaggcg

SEQ ID NO: 38469 - RNA, 32 nt, Human
acgcugaggccugggagucucuugagcuccac

SEQ ID NO: 38470 - RNA, 22 nt, Human
acgcugaggucaggaguucgag

SEQ ID NO: 38471 - RNA, 32 nt, Human
acgcugcagcucucuccagcccuguuggcauc

SEQ ID NO: 38472 - RNA, 32 nt, Human
acgcugcccagcccuggcgauggcaacggcga

SEQ ID NO: 38473 - RNA, 32 nt, Human
acgcugcccagccuucaaccugaacugccccc

SEQ ID NO: 38474 - RNA, 32 nt, Human
acgcugcccuagcgggaucugaagggauuuug

SEQ ID NO: 38475 - RNA, 32 nt, Human
acgcugccucaggcccuaggcuggccuaggaa

SEQ ID NO: 38476 - RNA, 32 nt, Human
acgcugccuccguuccuaggagagaagacuuc

SEQ ID NO: 38477 - RNA, 32 nt, Human
acgcugccucuguggaagucucuccucgcggg

SEQ ID NO: 38478 - RNA, 32 nt, Human
acgcugccucugugguucccucccucauuuuu

SEQ ID NO: 38479 - RNA, 32 nt, Human
acgcugcugggcaaccugcucaucauggccac

SEQ ID NO: 38480 - RNA, 32 nt, Human
acgcugcuuaggaaccggggacucaggagugc

SEQ ID NO: 38481 - RNA, 32 nt, Human
acgcugcuuccccacucucuccccuccccuca

SEQ ID NO: 38482 - RNA, 22 nt, Human
acgcugcuugcguagacgcugc

SEQ ID NO: 38483 - RNA, 32 nt, Human
acgcuggaagucugcagggggagggagagggg

SEQ ID NO: 38484 - RNA, 32 nt, Human
acgcuggaauuuuucuccccauggaauguaag

SEQ ID NO: 38485 - RNA, 24 nt, Human
acgcuggaccagugaaaacugagg

SEQ ID NO: 38486 - RNA, 23 nt, Human
acgcuggacgagucggaccgagg

SEQ ID NO: 38487 - RNA, 32 nt, Human
acgcuggacuuccagccccacaccucugacaa

SEQ ID NO: 38488 - RNA, 22 nt, Human
acgcuggagcuggagugcgagg

SEQ ID NO: 38489 - RNA, 32 nt, Human
acgcuggaggaggagugggagcucccagccug

SEQ ID NO: 38490 - RNA, 23 nt, Human
acgcuggagugcagugagccgag

SEQ ID NO: 38491 - RNA, 24 nt, Human
acgcuggaucagggggagcccgag

SEQ ID NO: 38492 - RNA, 32 nt, Human
acgcuggcccucuccuuccccgaacacagcac

SEQ ID NO: 38493 - RNA, 31 nt, Human
acgcuggcccuucucccaugcaggguccagg

SEQ ID NO: 38494 - RNA, 32 nt, Human
acgcuggcugcagggacccggugacagcguga

SEQ ID NO: 38495 - RNA, 32 nt, Human
acgcugggagguggaugcugcagugagcagug

SEQ ID NO: 38496 - RNA, 32 nt, Human
acgcugggccagcugcuuacuuauccacugcu

SEQ ID NO: 38497 - RNA, 32 nt, Human
acgcugggccgcggccucuggagcugggauuu

SEQ ID NO: 38498 - RNA, 32 nt, Human
acgcuggguccccucuguuggggguuuggggu

SEQ ID NO: 38499 - RNA, 32 nt, Human
acgcuggucucaaacuccuggacucaugggau

SEQ ID NO: 38500 - RNA, 32 nt, Human
acgcuggucucgaauuccuggccucaaaugau

SEQ ID NO: 38501 - RNA, 32 nt, Human
acgcuggucuuaaacuccugaccucaagugau

SEQ ID NO: 38502 - RNA, 32 nt, Human
acgcuggucuugaacuccugggcucaagcgau

SEQ ID NO: 38503 - RNA, 32 nt, Human
acgcuggugcagcucucgcugcagcagcucgu

SEQ ID NO: 38504 - RNA, 32 nt, Human
acgcuggugggagcuugagucuggucugaguc

SEQ ID NO: 38505 - RNA, 32 nt, Human
acgcuggugggccuguuguggaguacgcuuug

SEQ ID NO: 38506 - RNA, 32 nt, Human
acgcugguuucgaacuccugaccacauguggu

SEQ ID NO: 38507 - RNA, 32 nt, Human
acgcuguagacaccuucaccuccaucgugccc

SEQ ID NO: 38508 - RNA, 32 nt, Human
acgcugucaccaggcuggagugcaguggcgcg

SEQ ID NO: 38509 - RNA, 32 nt, Human
acgcugugaagagaggagccgcggcggucagu

SEQ ID NO: 38510 - RNA, 32 nt, Human
acgcugugcucccuccucggcggccacgcgcg

SEQ ID NO: 38511 - RNA, 32 nt, Human
acgcuguguggagaguccaggaugacgggauc

SEQ ID NO: 38512 - RNA, 32 nt, Human
acgcuguuccaucacagucuccaacuaaggcu

SEQ ID NO: 38513 - RNA, 32 nt, Human
acgcuuacugccagggugaccccagcccuggg

SEQ ID NO: 38514 - RNA, 32 nt, Human
acgcuuagcaggcugcacugaggcggagaaau

SEQ ID NO: 38515 - RNA, 32 nt, Human
acgcuuauucagucugcagagaagccaaaagg

SEQ ID NO: 38516 - RNA, 32 nt, Human
acgcuuauugcccaggcuggagugcaauggca

SEQ ID NO: 38517 - RNA, 32 nt, Human
acgcuuccacuaacuagcuucugaccuguuug

SEQ ID NO: 38518 - RNA, 32 nt, Human
acgcuuccaucuuuauccagagguaaucauag

SEQ ID NO: 38519 - RNA, 32 nt, Human
acgcuucccaaagcuuuucuuuaauucugacu

SEQ ID NO: 38520 - RNA, 32 nt, Human
acgcuuccuccaccucagcucagagcacagug

SEQ ID NO: 38521 - RNA, 18 nt, Human
acgcuucuaccccuucca

SEQ ID NO: 38522 - RNA, 32 nt, Human
acgcuucugcauccaccucugcccucauucug

SEQ ID NO: 38523 - RNA, 32 nt, Human
acgcuugaacccaggaggcagagguugcagug

SEQ ID NO: 38524 - RNA, 24 nt, Human
acgcuugaacccaggaggcggagg

SEQ ID NO: 38525 - RNA, 32 nt, Human
acgcuugaacccaggaggcggagguugcagug

SEQ ID NO: 38526 - RNA, 32 nt, Human
acgcuugcacacaugcacacagaccacauagc

SEQ ID NO: 38527 - RNA, 32 nt, Human
acgcuugcaugucaaaccccugucuuugcgga

SEQ ID NO: 38528 - RNA, 32 nt, Human
acgcuugcuagccaccccggagcacugcucuc

SEQ ID NO: 38529 - RNA, 32 nt, Human
acgcuugucacguccucagccucccagcauuc

SEQ ID NO: 38530 - RNA, 32 nt, Human
acgcuuucccacccuccuacuucacacccauu

SEQ ID NO: 38531 - RNA, 32 nt, Human
acgcuuucucccagcaugcagcgggaggaggg

SEQ ID NO: 38532 - RNA, 32 nt, Human
acgcuuuggacugagaagcaucgaggcuauag

SEQ ID NO: 38533 - RNA, 32 nt, Human
acgcuuuggucuucagccuugcacuggcucuu

SEQ ID NO: 38534 - RNA, 32 nt, Human
acgcuuuugugggagagaaaaucauugcaaaa

SEQ ID NO: 38535 - RNA, 32 nt, Human
acggaaaauggcgccucacggcccggguaguc

SEQ ID NO: 38536 - RNA, 32 nt, Human
acggaaacugaucaaaucacaugugaacaaau

SEQ ID NO: 38537 - RNA, 32 nt, Human
acggaaagagaccagaccuggaaaagacagag

SEQ ID NO: 38538 - RNA, 32 nt, Human
acggaaccacgcaaacuccuucuguaggcuuu

SEQ ID NO: 38539 - RNA, 32 nt, Human
acggaaccaucgacccacaggguuaaucccaa

SEQ ID NO: 38540 - RNA, 32 nt, Human
acggaacuccaccccugccggucagccugccu

SEQ ID NO: 38541 - RNA, 21 nt, Human
acggaacugccauccugugag

SEQ ID NO: 38542 - RNA, 32 nt, Human
acggaagaaaacccuaugaauguaaugaaugu

SEQ ID NO: 38543 - RNA, 32 nt, Human
acggaagacgacaaggaggagccggaagaugc

SEQ ID NO: 38544 - RNA, 32 nt, Human
acggaagagccagcaggagcagcguggucauu

SEQ ID NO: 38545 - RNA, 32 nt, Human
acggaagcagagggugcuguuucaacgccacc

SEQ ID NO: 38546 - RNA, 23 nt, Human
acggaagcagcagcgggccggca

SEQ ID NO: 38547 - RNA, 32 nt, Human
acggaagcaugucacaccacugcuuggucuug

SEQ ID NO: 38548 - RNA, 16 nt, Human
acggaagccaguucca

SEQ ID NO: 38549 - RNA, 20 nt, Human
acggaagccgagacugcgcu

SEQ ID NO: 38550 - RNA, 32 nt, Human
acggaaggaucuccagaggagccugggcuucg

SEQ ID NO: 38551 - RNA, 32 nt, Human
acggaaggcugaauguagggucauuuuguaug

SEQ ID NO: 38552 - RNA, 32 nt, Human
acggaagggcucuuucacagcuggcagagcga

SEQ ID NO: 38553 - RNA, 32 nt, Human
acggaagugaagauuccugggaucuaacuugc

SEQ ID NO: 38554 - RNA, 32 nt, Human
acggaauaagagaccuguuuuaaaaaggaacu

SEQ ID NO: 38555 - RNA, 32 nt, Human
acggaauagaaccagcugggcccaguggcuca

SEQ ID NO: 38556 - RNA, 32 nt, Human
acggaauccuaugugaagcaucagggccugaa

SEQ ID NO: 38557 - RNA, 32 nt, Human
acggaaucggagcucuggaggcugggcuggcc

SEQ ID NO: 38558 - RNA, 32 nt, Human
acggaaucucucugucagccaggcuggagugu

SEQ ID NO: 38559 - RNA, 32 nt, Human
acggaaugccagauccuacugccuuguugguu

SEQ ID NO: 38560 - RNA, 32 nt, Human
acggaauuccaauauuuauaauuaaagaaaau

SEQ ID NO: 38561 - RNA, 18 nt, Human
acggaauugaagagcaag

SEQ ID NO: 38562 - RNA, 32 nt, Human
acggacaaggaggcggggccugcagcuggcuu

SEQ ID NO: 38563 - RNA, 32 nt, Human
acggacacagaaugucuggagagggcagcagg

SEQ ID NO: 38564 - RNA, 32 nt, Human
acggacagcugagaugggagacaggagagaug

SEQ ID NO: 38565 - RNA, 32 nt, Human
acggacaggaagcacagcagguuuauccagau

SEQ ID NO: 38566 - RNA, 32 nt, Human
acggacagggaaugagacugaguuuauagcug

SEQ ID NO: 38567 - RNA, 32 nt, Human
acggacagggcagagggcagcgggcagcucca

SEQ ID NO: 38568 - RNA, 32 nt, Human
acggacauccuuuuucuuucucucuuucuuuu

SEQ ID NO: 38569 - RNA, 32 nt, Human
acggacauggccccuggcugugcuaacagagg

SEQ ID NO: 38570 - RNA, 32 nt, Human
acggaccaacagcaagagaccugcuagcacag

SEQ ID NO: 38571 - RNA, 32 nt, Human
acggaccacucggacccccaccccugcccgcc

SEQ ID NO: 38572 - RNA, 32 nt, Human
acggaccaggccugggcuccagcugggacaac

SEQ ID NO: 38573 - RNA, 21 nt, Human
acggacccaacggccagguca

SEQ ID NO: 38574 - RNA, 32 nt, Human
acggaccccagccacucucgggggcagacguc

SEQ ID NO: 38575 - RNA, 32 nt, Human
acggacccucauuccucccagggaccccagac

SEQ ID NO: 38576 - RNA, 23 nt, Human
acggaccuacccagcuuggccca

SEQ ID NO: 38577 - RNA, 32 nt, Human
acggaccuggagauuaggaaagagaaaagguu

SEQ ID NO: 38578 - RNA, 32 nt, Human
acggaccuggggacugggcugagaggguggac

SEQ ID NO: 38579 - RNA, 21 nt, Human
acggaccuucggcgccugggg

SEQ ID NO: 38580 - RNA, 32 nt, Human
acggaccuuggcugacauauguugguagguac

SEQ ID NO: 38581 - RNA, 32 nt, Human
acggacgaggcagaggaguggccggucccaug

SEQ ID NO: 38582 - RNA, 32 nt, Human
acggacggcaggucaggaaagccaggacucag

SEQ ID NO: 38583 - RNA, 32 nt, Human
acggacggggcagccgugcucacagcucagca

SEQ ID NO: 38584 - RNA, 32 nt, Human
acggacgugugauacacacaugcauguacagg

SEQ ID NO: 38585 - RNA, 32 nt, Human
acggacuacaauucuaucccucccagagggag

SEQ ID NO: 38586 - RNA, 32 nt, Human
acggacuaguucuuccugcgugaccacggaug

SEQ ID NO: 38587 - RNA, 23 nt, Human
acggacucccugggcccugggga

SEQ ID NO: 38588 - RNA, 32 nt, Human
acggacucguggagacgcgccgccgccgccgc

SEQ ID NO: 38589 - RNA, 32 nt, Human
acggacucuccauuccagaaccauggcccaau

SEQ ID NO: 38590 - RNA, 32 nt, Human
acggacucucccaggccugccugcauggcauc

SEQ ID NO: 38591 - RNA, 32 nt, Human
acggacucugccugugugacucccaggccccg

SEQ ID NO: 38592 - RNA, 32 nt, Human
acggacucuggccccggacucugcuuacccug

SEQ ID NO: 38593 - RNA, 32 nt, Human
acggacucuugcuauguugcccaggcuggucu

SEQ ID NO: 38594 - RNA, 32 nt, Human
acggacugcguuccgcagcuccuggguggggu

SEQ ID NO: 38595 - RNA, 32 nt, Human
acggacuuugggaggccgaggcaggcagauca

SEQ ID NO: 38596 - RNA, 32 nt, Human
acggagaagaggagagagaagccagggccgag

SEQ ID NO: 38597 - RNA, 32 nt, Human
acggagaagaggagaggcagagagggcgcggg

SEQ ID NO: 38598 - RNA, 32 nt, Human
acggagaccuauuugaaagaucaaagauugau

SEQ ID NO: 38599 - RNA, 32 nt, Human
acggagacugcggguccaagcugcaguagaac

SEQ ID NO: 38600 - RNA, 32 nt, Human
acggagagaggcagcagcaggaggaacagaaa

SEQ ID NO: 38601 - RNA, 32 nt, Human
acggagagcacugugacuccagcccuggcucg

SEQ ID NO: 38602 - RNA, 32 nt, Human
acggagagcucugcugugaugggcuaggcacu

SEQ ID NO: 38603 - RNA, 32 nt, Human
acggagaggcaggugagagggagguggcuaag

SEQ ID NO: 38604 - RNA, 32 nt, Human
acggagaguauuaagaaauggagagaaaaaua

SEQ ID NO: 38605 - RNA, 32 nt, Human
acggagagucugacuuaacuacauacaucuuc

SEQ ID NO: 38606 - RNA, 32 nt, Human
acggagagugggggacuagcugugcauggcac

SEQ ID NO: 38607 - RNA, 32 nt, Human
acggagcaagcugaaacugagacaagauuaua

SEQ ID NO: 38608 - RNA, 32 nt, Human
acggagcagggaaaccgcaggagccugcagga

SEQ ID NO: 38609 - RNA, 32 nt, Human
acggagccagggcuguagcagagaggcuaguc

SEQ ID NO: 38610 - RNA, 32 nt, Human
acggagcccagccuggauuccugugccugcuc

SEQ ID NO: 38611 - RNA, 32 nt, Human
acggagccccaucgcacacacacaagcccggu

SEQ ID NO: 38612 - RNA, 32 nt, Human
acggagccucccaggcuggggcagugggcaug

SEQ ID NO: 38613 - RNA, 32 nt, Human
acggagccucuuuguguccacuguggaaagga

SEQ ID NO: 38614 - RNA, 32 nt, Human
acggagccugccccucccuccuggcccacgug

SEQ ID NO: 38615 - RNA, 21 nt, Human
acggagccugggcaaccuccu

SEQ ID NO: 38616 - RNA, 32 nt, Human
acggagcucacugcagacucgccauccccguc

SEQ ID NO: 38617 - RNA, 32 nt, Human
acggagcugugcuuagggaagagcagagaugc

SEQ ID NO: 38618 - RNA, 32 nt, Human
acggaggagaacugagcagagcagagcaucga

SEQ ID NO: 38619 - RNA, 32 nt, Human
acggaggagcccacggaggagccccagcgucc

SEQ ID NO: 38620 - RNA, 32 nt, Human
acggaggagcgguuggccaacgcaguggcggc

SEQ ID NO: 38621 - RNA, 32 nt, Human
acggaggagcuagcugaguaugcugaaauccg

SEQ ID NO: 38622 - RNA, 32 nt, Human
acggaggaggggcagagccaggaggcaguggg

SEQ ID NO: 38623 - RNA, 32 nt, Human
acggaggcaaaaggaaaaagcagcccgcauca

SEQ ID NO: 38624 - RNA, 32 nt, Human
acggagggacuggccagggcacccugugcugc

SEQ ID NO: 38625 - RNA, 32 nt, Human
acggagggagcuacgaccuugaccauccccug

SEQ ID NO: 38626 - RNA, 32 nt, Human
acggaggggccaggagucucacaguggagggc

SEQ ID NO: 38627 - RNA, 32 nt, Human
acggaggguggagggcccugcgccugcgcgga

SEQ ID NO: 38628 - RNA, 32 nt, Human
acggaguaggagcagagggaagagagagggau

SEQ ID NO: 38629 - RNA, 32 nt, Human
acggaguauuucugucccucgugaagucacgu

SEQ ID NO: 38630 - RNA, 32 nt, Human
acggagucucacuccauugcccaggcuggagu

SEQ ID NO: 38631 - RNA, 32 nt, Human
acggagucucacucuugucacucaggcuggag

SEQ ID NO: 38632 - RNA, 32 nt, Human
acggagucuuccagaacaccucccucugaacu

SEQ ID NO: 38633 - RNA, 32 nt, Human
acggagucuuccucugucgcccaggcuggagu

SEQ ID NO: 38634 - RNA, 32 nt, Human
acggagucuugcuauguugcccaggcuggucu

SEQ ID NO: 38635 - RNA, 32 nt, Human
acggaguggauggucaccuuccucacuuauug

SEQ ID NO: 38636 - RNA, 32 nt, Human
acggaguucugggaugggaggggugggagcau

SEQ ID NO: 38637 - RNA, 32 nt, Human
acggaguugcccaggcuggagugcagcgcaug

SEQ ID NO: 38638 - RNA, 32 nt, Human
acggauaaguacuguucuuuucccucuuagau

SEQ ID NO: 38639 - RNA, 32 nt, Human
acggauaccucauuugaaacucagccuaguaa

SEQ ID NO: 38640 - RNA, 32 nt, Human
acggauaguucagacaauucagaaaagacugg

SEQ ID NO: 38641 - RNA, 32 nt, Human
acggauauaguauuuccuccucuuuguuuuua

SEQ ID NO: 38642 - RNA, 32 nt, Human
acggauccuccuccucccuuauucccuugcuc

SEQ ID NO: 38643 - RNA, 32 nt, Human
acggauccugcacugacucuggaaaaggcaua

SEQ ID NO: 38644 - RNA, 32 nt, Human
acggauccugcugugugagcccuucagcugca

SEQ ID NO: 38645 - RNA, 32 nt, Human
acggaugacucugccccucagagcuugcagac

SEQ ID NO: 38646 - RNA, 32 nt, Human
acggaugcaauuuccaggcugugcuguggacu

SEQ ID NO: 38647 - RNA, 32 nt, Human
acggaugcacacacagauggucacacagagau

SEQ ID NO: 38648 - RNA, 23 nt, Human
acggaugccagagggacugggga

SEQ ID NO: 38649 - RNA, 32 nt, Human
acggauggaagaggaaaacacugagaacaaca

SEQ ID NO: 38650 - RNA, 32 nt, Human
acggauggcaggcaagggacuuaagugaugga

SEQ ID NO: 38651 - RNA, 32 nt, Human
acggaugggaccugggcccagacagucccccu

SEQ ID NO: 38652 - RNA, 32 nt, Human
acggaugggcccugugucucaggagugggguu

SEQ ID NO: 38653 - RNA, 32 nt, Human
acggauguagcccguagguggggagggcagca

SEQ ID NO: 38654 - RNA, 32 nt, Human
acggaugugcccuugggggcaggugugggagc

SEQ ID NO: 38655 - RNA, 32 nt, Human
acggauucaaagacuuauuuugaaaguuggaa

SEQ ID NO: 38656 - RNA, 23 nt, Human
acggauuccuguggauaugggga

SEQ ID NO: 38657 - RNA, 32 nt, Human
acggauucucuauguugcccaggcuggucuca

SEQ ID NO: 38658 - RNA, 32 nt, Human
acggauuggagacucccucucccuggugggcc

SEQ ID NO: 38659 - RNA, 32 nt, Human
acggauuuccuugaagccucucuccuucucug

SEQ ID NO: 38660 - RNA, 32 nt, Human
acggcaaaaggcagagaucaguuccuugagua

SEQ ID NO: 38661 - RNA, 32 nt, Human
acggcaaaggcagccuuuuucuggccuugacu

SEQ ID NO: 38662 - RNA, 32 nt, Human
acggcaacuuggaccagugcaagugcgcacag

SEQ ID NO: 38663 - RNA, 32 nt, Human
acggcaagaggaaaggaggggucucgggacau

SEQ ID NO: 38664 - RNA, 32 nt, Human
acggcaagaggagcaagagcaaggaccgcaag

SEQ ID NO: 38665 - RNA, 32 nt, Human
acggcaaggagagaacgagugaugauguguag

SEQ ID NO: 38666 - RNA, 32 nt, Human
acggcaaugccuuugaacuuggcagcucuggc

SEQ ID NO: 38667 - RNA, 32 nt, Human
acggcacaaguagagagaaacuaccuaccuca

SEQ ID NO: 38668 - RNA, 32 nt, Human
acggcacagagggagggagcgagcgagcagug

SEQ ID NO: 38669 - RNA, 32 nt, Human
acggcaccaugccauccucugccuucugugca

SEQ ID NO: 38670 - RNA, 21 nt, Human
acggcacccaccacgacgccc

SEQ ID NO: 38671 - RNA, 32 nt, Human
acggcacccuuucccuaccuuuuccuucuuua

SEQ ID NO: 38672 - RNA, 32 nt, Human
acggcacguuccaucucuccccaugccacuga

SEQ ID NO: 38673 - RNA, 32 nt, Human
acggcacuccagccugggcagcagagugagac

SEQ ID NO: 38674 - RNA, 32 nt, Human
acggcacuccagccugggugacagagugagac

SEQ ID NO: 38675 - RNA, 32 nt, Human
acggcacuggguggggccgagcuccagggcug

SEQ ID NO: 38676 - RNA, 32 nt, Human
acggcagaaguagagagaaacuaccuaccuca

SEQ ID NO: 38677 - RNA, 32 nt, Human
acggcagacccuggugucccuggaccucaccg

SEQ ID NO: 38678 - RNA, 32 nt, Human
acggcagagacaguuucccuccccgcuauacc

SEQ ID NO: 38679 - RNA, 32 nt, Human
acggcagaggaacaaaggugugcucugagcuu

SEQ ID NO: 38680 - RNA, 32 nt, Human
acggcagaggcccugaggauccagcagggcuc

SEQ ID NO: 38681 - RNA, 19 nt, Human
acggcagaugccugacaga

SEQ ID NO: 38682 - RNA, 32 nt, Human
acggcagcagaacugucucuucugaaaaccag

SEQ ID NO: 38683 - RNA, 32 nt, Human
acggcagccucagagccccgcggggagcgcgc

SEQ ID NO: 38684 - RNA, 31 nt, Human
acggcagcgacagcgggcaggagggagaaag

SEQ ID NO: 38685 - RNA, 32 nt, Human
acggcagcuguucuuggaacagggcgacaaug

SEQ ID NO: 38686 - RNA, 32 nt, Human
acggcaggccgagagcgcggcgcccgggccug

SEQ ID NO: 38687 - RNA, 32 nt, Human
acggcaggcguguggcagccacacacaggcgg

SEQ ID NO: 38688 - RNA, 32 nt, Human
acggcagggcugggaaguucagugccuggaaa

SEQ ID NO: 38689 - RNA, 32 nt, Human
acggcaguauauuuguccccacccucaucucu

SEQ ID NO: 38690 - RNA, 32 nt, Human
acggcagugaggaagccagccgggaagagagg

SEQ ID NO: 38691 - RNA, 32 nt, Human
acggcauaguccagugucaucugaaggggcca

SEQ ID NO: 38692 - RNA, 32 nt, Human
acggcauccucuucauuccucucagccaaaaa

SEQ ID NO: 38693 - RNA, 32 nt, Human
acggcaugccuguacuggcacuuugguuuuug

SEQ ID NO: 38694 - RNA, 32 nt, Human
acggcauuacauuccauccagccugggcgaca

SEQ ID NO: 38695 - RNA, 32 nt, Human
acggcauuauagagagaggagaggaggggaag

SEQ ID NO: 38696 - RNA, 32 nt, Human
acggccacaggcaaggggguugcaguggccgc

SEQ ID NO: 38697 - RNA, 20 nt, Human
acggccacaggggcgcacgg

SEQ ID NO: 38698 - RNA, 32 nt, Human
acggccaccaugccuggcuaaucuuuuaaauu

SEQ ID NO: 38699 - RNA, 24 nt, Human
acggccacccaccauggccgcaga

SEQ ID NO: 38700 - RNA, 32 nt, Human
acggccacccacccuucuccccugccccgucc

SEQ ID NO: 38701 - RNA, 32 nt, Human
acggccacugaauacuguuaagaaggagguuu

SEQ ID NO: 38702 - RNA, 32 nt, Human
acggccacuuuccuguuucucaguaucugccg

SEQ ID NO: 38703 - RNA, 32 nt, Human
acggccagcgccagcaggagggcggcuaccag

SEQ ID NO: 38704 - RNA, 32 nt, Human
acggccaggcagagaagaccaugggaguuccc

SEQ ID NO: 38705 - RNA, 32 nt, Human
acggccagggagaagcuccucuccccagccca

SEQ ID NO: 38706 - RNA, 23 nt, Human
acggccaucaaccuggccauccc

SEQ ID NO: 38707 - RNA, 32 nt, Human
acggccaucccuuugcucccagccuggcucca

SEQ ID NO: 38708 - RNA, 18 nt, Human
acggccaugccccacaga

SEQ ID NO: 38709 - RNA, 32 nt, Human
acggcccaacauccagucuuuccccaggacag

SEQ ID NO: 38710 - RNA, 32 nt, Human
acggcccacacugucuaagacgcccccacgaa

SEQ ID NO: 38711 - RNA, 32 nt, Human
acggcccagcuggauuuuggacuucuggccuc

SEQ ID NO: 38712 - RNA, 32 nt, Human
acggcccagguggcaggauguccuggucuggc

SEQ ID NO: 38713 - RNA, 21 nt, Human
acggccccaccaccaccacca

SEQ ID NO: 38714 - RNA, 32 nt, Human
acggccccgugaggacacagggagaggacacc

SEQ ID NO: 38715 - RNA, 32 nt, Human
acggccccuacaggcuggcccugcaauggggc

SEQ ID NO: 38716 - RNA, 32 nt, Human
acggccccuccaggagggagccgggagauuac

SEQ ID NO: 38717 - RNA, 32 nt, Human
acggcccggggguucccuucugcuccauggag

SEQ ID NO: 38718 - RNA, 22 nt, Human
acggcccgugaacgcgcgcgga

SEQ ID NO: 38719 - RNA, 32 nt, Human
acggcccugcagccagcucacguccagguuca

SEQ ID NO: 38720 - RNA, 32 nt, Human
acggcccugcagcucccccugccgugcccugg

SEQ ID NO: 38721 - RNA, 32 nt, Human
acggcccugcucuguucccugggacacccccg

SEQ ID NO: 38722 - RNA, 32 nt, Human
acggcccugcugcggacggagcgcggaaacug

SEQ ID NO: 38723 - RNA, 32 nt, Human
acggcccuggggacuguggcccuggcccuggc

SEQ ID NO: 38724 - RNA, 32 nt, Human
acggcccuggguggaauugauguugggaagau

SEQ ID NO: 38725 - RNA, 32 nt, Human
acggcccuuccaggagccaguggcugggagca

SEQ ID NO: 38726 - RNA, 32 nt, Human
acggccgcaccucccccaugcaccccacccuc

SEQ ID NO: 38727 - RNA, 32 nt, Human
acggccgcagagucccagcccccagcccugcu

SEQ ID NO: 38728 - RNA, 24 nt, Human
acggccgccuccccgcccgccccc

SEQ ID NO: 38729 - RNA, 20 nt, Human
acggccgcggcugcacagga

SEQ ID NO: 38730 - RNA, 20 nt, Human
acggccgcugugccacagga

SEQ ID NO: 38731 - RNA, 32 nt, Human
acggccggaagccaggugaggccaggccggcg

SEQ ID NO: 38732 - RNA, 32 nt, Human
acggccggcaccugggggcacacacaugcagg

SEQ ID NO: 38733 - RNA, 32 nt, Human
acggccgggaagggucaguuggaggcaggcgc

SEQ ID NO: 38734 - RNA, 32 nt, Human
acggccguccuggccaugccucugccuugaug

SEQ ID NO: 38735 - RNA, 20 nt, Human
acggccgucgcuccgucucc

SEQ ID NO: 38736 - RNA, 32 nt, Human
acggccuauaggauuguuaagacugaauauuu

SEQ ID NO: 38737 - RNA, 32 nt, Human
acggccucagucccucccagcugcaguaccag

SEQ ID NO: 38738 - RNA, 32 nt, Human
acggccucccaaagugcugugauuaccggugu

SEQ ID NO: 38739 - RNA, 32 nt, Human
acggccucccaaguagcugggauuacaggugc

SEQ ID NO: 38740 - RNA, 32 nt, Human
acggccucuccuucaucacaggccggggauuc

SEQ ID NO: 38741 - RNA, 32 nt, Human
acggccuggaggagggagguugugguuggaug

SEQ ID NO: 38742 - RNA, 23 nt, Human
acggccuggccaacauggugaaa

SEQ ID NO: 38743 - RNA, 32 nt, Human
acggccuggcgacgguuucccugcugcugcag

SEQ ID NO: 38744 - RNA, 32 nt, Human
acggccuggguuucuggccucugugaucuccc

SEQ ID NO: 38745 - RNA, 32 nt, Human
acggccuguggcuggacugccugcugcugccc

SEQ ID NO: 38746 - RNA, 32 nt, Human
acggccuguucccagcuucucuccugguuccc

SEQ ID NO: 38747 - RNA, 32 nt, Human
acggccuuagcgugcauacggccagguguuca

SEQ ID NO: 38748 - RNA, 32 nt, Human
acggccuucacucugucuggggcacauucacu

SEQ ID NO: 38749 - RNA, 19 nt, Human
acggcgaaacucugucucu

SEQ ID NO: 38750 - RNA, 22 nt, Human
acggcgagccccaggagccggg

SEQ ID NO: 38751 - RNA, 32 nt, Human
acggcgagccuccagcccucuccuacuuugau

SEQ ID NO: 38752 - RNA, 23 nt, Human
acggcgagccucccguccaggug

SEQ ID NO: 38753 - RNA, 32 nt, Human
acggcgagcgccuggugcuggggaguggaggg

SEQ ID NO: 38754 - RNA, 32 nt, Human
acggcgaugaggcccuugaauguggucacuuu

SEQ ID NO: 38755 - RNA, 32 nt, Human
acggcgcccacauaggcgagguugagcugcug

SEQ ID NO: 38756 - RNA, 19 nt, Human
acggcgcgaccccgacaga

SEQ ID NO: 38757 - RNA, 32 nt, Human
acggcgcugagccugcacggccgcuuccggcu

SEQ ID NO: 38758 - RNA, 32 nt, Human
acggcggaggcagcggagcccugggccaucgu

SEQ ID NO: 38759 - RNA, 32 nt, Human
acggcggcacggcugcagccuggaugggaagu

SEQ ID NO: 38760 - RNA, 32 nt, Human
acggcggcaggacggcggcaggaugugugacc

SEQ ID NO: 38761 - RNA, 32 nt, Human
acggcggcagucgucccuccccacgcgggcgc

SEQ ID NO: 38762 - RNA, 32 nt, Human
acggcggcggcagaggcggcggcggccgggcc

SEQ ID NO: 38763 - RNA, 32 nt, Human
acggcggcuuugacucggacugcagcgaggac

SEQ ID NO: 38764 - RNA, 32 nt, Human
acggcgggagcuugcaggggugcgggggugug

SEQ ID NO: 38765 - RNA, 32 nt, Human
acggcgggcucgcagcuccugucaaaucugga

SEQ ID NO: 38766 - RNA, 32 nt, Human
acggcggggccagcccagcccacagcagucuc

SEQ ID NO: 38767 - RNA, 32 nt, Human
acggcgggggcuguggccggguccccaugggg

SEQ ID NO: 38768 - RNA, 32 nt, Human
acggcgggugccuggagggcagcucugggcuc

SEQ ID NO: 38769 - RNA, 32 nt, Human
acggcggguggguggaggaugcggugcgcggg

SEQ ID NO: 38770 - RNA, 32 nt, Human
acggcgguggucuugcgggaggcgugggcugg

SEQ ID NO: 38771 - RNA, 32 nt, Human
acggcgguuucuggacucuuccuugcccuguu

SEQ ID NO: 38772 - RNA, 32 nt, Human
acggcgucagcagaucugccugugcugggacu

SEQ ID NO: 38773 - RNA, 32 nt, Human
acggcuaaccuggaccuggaacuguagggcca

SEQ ID NO: 38774 - RNA, 32 nt, Human
acggcuacaagaagguugugaaaauucacucu

SEQ ID NO: 38775 - RNA, 32 nt, Human
acggcuacagacgccgcggggccaggucguug

SEQ ID NO: 38776 - RNA, 32 nt, Human
acggcuacuggggccgccuccuccaggcgggg

SEQ ID NO: 38777 - RNA, 32 nt, Human
acggcuagccugggcaacagagugagaccccg

SEQ ID NO: 38778 - RNA, 32 nt, Human
acggcucacgccuguaucccagcacuuuggaa

SEQ ID NO: 38779 - RNA, 32 nt, Human
acggcucacugcaaccuccaccuccugaguuc

SEQ ID NO: 38780 - RNA, 32 nt, Human
acggcucacugcagccucuaccuccccaggcu

SEQ ID NO: 38781 - RNA, 32 nt, Human
acggcucacugcagccugcgccucccagcguc

SEQ ID NO: 38782 - RNA, 32 nt, Human
acggcucacugcagccuugacgcccugggcuc

SEQ ID NO: 38783 - RNA, 32 nt, Human
acggcucagcauggacugcagcaccggauggu

SEQ ID NO: 38784 - RNA, 32 nt, Human
acggcuccaccagggucaccccgaguguccag

SEQ ID NO: 38785 - RNA, 32 nt, Human
acggcuccuccaccauccucagccagugcaac

SEQ ID NO: 38786 - RNA, 32 nt, Human
acggcugagaacuaacccucucugguuuuacu

SEQ ID NO: 38787 - RNA, 32 nt, Human
acggcugagccaagagcuugcuuucagcuuua

SEQ ID NO: 38788 - RNA, 32 nt, Human
acggcugcauaccugcacuuucaguuucuaag

SEQ ID NO: 38789 - RNA, 32 nt, Human
acggcugcggcgcuuugugcuccagucgcucc

SEQ ID NO: 38790 - RNA, 32 nt, Human
acggcugcucacuggcccccacuuuguuucuu

SEQ ID NO: 38791 - RNA, 32 nt, Human
acggcugcuccaguucauggccucccaggggu

SEQ ID NO: 38792 - RNA, 32 nt, Human
acggcuggaaauucuuauuuccccuuuccaau

SEQ ID NO: 38793 - RNA, 32 nt, Human
acggcuggagagaaauagggagaugcaggaag

SEQ ID NO: 38794 - RNA, 32 nt, Human
acggcuggagaguucagcugugugugcauagu

SEQ ID NO: 38795 - RNA, 32 nt, Human
acggcuggaggccaccgagaagaaggaggaag

SEQ ID NO: 38796 - RNA, 32 nt, Human
acggcugggcuccugggcugccuucagugucu

SEQ ID NO: 38797 - RNA, 32 nt, Human
acggcugggugguccuaagccacuggguggau

SEQ ID NO: 38798 - RNA, 32 nt, Human
acggcugucccucauggagaccucaugccaug

SEQ ID NO: 38799 - RNA, 19 nt, Human
acggcugucucccccugaa

SEQ ID NO: 38800 - RNA, 32 nt, Human
acggcugugucaccaucauccagagcuugggc

SEQ ID NO: 38801 - RNA, 32 nt, Human
acggcuuagccgcggugcagacugcggcggcg

SEQ ID NO: 38802 - RNA, 32 nt, Human
acggcuucguucuucaccauguuugucaccag

SEQ ID NO: 38803 - RNA, 32 nt, Human
acggcuucucacugggacuggagaccucguuc

SEQ ID NO: 38804 - RNA, 32 nt, Human
acggcuucucaugcuauuucuaccucacuuug

SEQ ID NO: 38805 - RNA, 32 nt, Human
acggcuucuccuccuccucuugcuccuccagc

SEQ ID NO: 38806 - RNA, 32 nt, Human
acggcuuuggagacaaucaaguaacaacugaa

SEQ ID NO: 38807 - RNA, 32 nt, Human
acgggaaaaugagaaacacuggguaccaagug

SEQ ID NO: 38808 - RNA, 32 nt, Human
acgggaaaggcagcccuuugacacgcacgcga

SEQ ID NO: 38809 - RNA, 32 nt, Human
acgggaaaggcgcagagcaggcgcgggcggcg

SEQ ID NO: 38810 - RNA, 32 nt, Human
acgggaacacgugcugcugggccgggcuaggg

SEQ ID NO: 38811 - RNA, 32 nt, Human
acgggaaccagccugcuguucagaccagucug

SEQ ID NO: 38812 - RNA, 32 nt, Human
acgggaaccugaccagcgacaccaucuucauu

SEQ ID NO: 38813 - RNA, 32 nt, Human
acgggaagcaucuuccagaagugugauuggga

SEQ ID NO: 38814 - RNA, 21 nt, Human
acgggaaggacggcugccggg

SEQ ID NO: 38815 - RNA, 32 nt, Human
acgggaaguacacgcccgugaaauucacggag

SEQ ID NO: 38816 - RNA, 32 nt, Human
acgggaaguucugcaaguguucuccaggggca

SEQ ID NO: 38817 - RNA, 18 nt, Human
acgggacacccugacaga

SEQ ID NO: 38818 - RNA, 32 nt, Human
acgggacagagccagggcacucaccaggcugc

SEQ ID NO: 38819 - RNA, 22 nt, Human
acgggacaggccuccuuggcaa

SEQ ID NO: 38820 - RNA, 32 nt, Human
acgggaccagcugcuggccacauuuccugcuu

SEQ ID NO: 38821 - RNA, 32 nt, Human
acgggaccagcuguacuacgagugcuacucgg

SEQ ID NO: 38822 - RNA, 32 nt, Human
acgggacccagcuguagugagguugcagugau

SEQ ID NO: 38823 - RNA, 32 nt, Human
acgggaccucucauggugcaccaccugcacga

SEQ ID NO: 38824 - RNA, 32 nt, Human
acgggacgcuccgucuuugaagaaagaagaga

SEQ ID NO: 38825 - RNA, 32 nt, Human
acgggacucuacugccgagaccaggcucacgc

SEQ ID NO: 38826 - RNA, 32 nt, Human
acgggacugggcccugaaccaauaaagccguc

SEQ ID NO: 38827 - RNA, 32 nt, Human
acgggagaggagaagagggagacccgccgccu

SEQ ID NO: 38828 - RNA, 32 nt, Human
acgggagagggaggggcaacagagguccaggg

SEQ ID NO: 38829 - RNA, 32 nt, Human
acgggagagguggagaaaaaugagagauaugc

SEQ ID NO: 38830 - RNA, 32 nt, Human
acgggagauuaccagugaaauaguuugguucu

SEQ ID NO: 38831 - RNA, 32 nt, Human
acgggagcaauguugccgcuguacggagagug

SEQ ID NO: 38832 - RNA, 32 nt, Human
acgggagcagaggaagcacagagcugggcaua

SEQ ID NO: 38833 - RNA, 32 nt, Human
acgggagcaggaggagaagauacgagagcagg

SEQ ID NO: 38834 - RNA, 32 nt, Human
acgggagcagugagggagauagagaggguugg

SEQ ID NO: 38835 - RNA, 32 nt, Human
acgggagcaucucuugagccugagaaguggag

SEQ ID NO: 38836 - RNA, 32 nt, Human
acgggagccagccuguggcccccagccuccug

SEQ ID NO: 38837 - RNA, 32 nt, Human
acgggagcccaggagcucuggccggcaggucc

SEQ ID NO: 38838 - RNA, 32 nt, Human
acgggagcugcgagcaggugggcagaugaggg

SEQ ID NO: 38839 - RNA, 32 nt, Human
acgggagcuguggacagagcucccucacuuca

SEQ ID NO: 38840 - RNA, 32 nt, Human
acgggaggaggcagcugcggcggggccgaauc

SEQ ID NO: 38841 - RNA, 32 nt, Human
acgggaggaucacgaggucaagagaucgacag

SEQ ID NO: 38842 - RNA, 32 nt, Human
acgggaggauccugucucacacccuacgaugg

SEQ ID NO: 38843 - RNA, 32 nt, Human
acgggaggaugaggugggagaaucacucgaac

SEQ ID NO: 38844 - RNA, 32 nt, Human
acgggaggcagaggugggagaaucgcuugaac

SEQ ID NO: 38845 - RNA, 32 nt, Human
acgggaggcccgagaugggcucaggggcccga

SEQ ID NO: 38846 - RNA, 32 nt, Human
acgggaggcugaggcaggagaauggcaugaac

SEQ ID NO: 38847 - RNA, 32 nt, Human
acgggaggcugaggcaggagaauggcgugagc

SEQ ID NO: 38848 - RNA, 32 nt, Human
acgggaggcugcaggauggucaagcugacggc

SEQ ID NO: 38849 - RNA, 32 nt, Human
acgggaggcuuaggcaggagaauuccuugaac

SEQ ID NO: 38850 - RNA, 32 nt, Human
acgggagguggcggagguggcggcggaggcga

SEQ ID NO: 38851 - RNA, 32 nt, Human
acgggaggugugagcccaaaggucuggaccca

SEQ ID NO: 38852 - RNA, 32 nt, Human
acgggaucccuucacaucucauacccaguaag

SEQ ID NO: 38853 - RNA, 32 nt, Human
acgggaugauugcuugagcucaggaguuugag

SEQ ID NO: 38854 - RNA, 32 nt, Human
acgggaugccaagcccugccugauguggcucu

SEQ ID NO: 38855 - RNA, 30 nt, Human
acgggauggaggcgggagagccaggaggcc

SEQ ID NO: 38856 - RNA, 32 nt, Human
acgggauuuaguugugagcauccucccgaugc

SEQ ID NO: 38857 - RNA, 32 nt, Human
acgggauuuguugauucucuccauuuuggugu

SEQ ID NO: 38858 - RNA, 32 nt, Human
acgggcaaauccaucccucucucccucacagu

SEQ ID NO: 38859 - RNA, 32 nt, Human
acgggcacaggugggaguugggagcaaagcgg

SEQ ID NO: 38860 - RNA, 32 nt, Human
acgggcaccuaaaagaagcaucucugaccaga

SEQ ID NO: 38861 - RNA, 32 nt, Human
acgggcagaccucucuucucuccccagucccu

SEQ ID NO: 38862 - RNA, 32 nt, Human
acgggcagaguggaucagggagggagggucga

SEQ ID NO: 38863 - RNA, 32 nt, Human
acgggcagcuagugagccagagggcgaucccg

SEQ ID NO: 38864 - RNA, 32 nt, Human
acgggcaggcagcgcgacuggcagcggugagc

SEQ ID NO: 38865 - RNA, 19 nt, Human
acgggcaggcgcgcgcggg

SEQ ID NO: 38866 - RNA, 32 nt, Human
acgggcaggcucaggcgggaagaaggaggcau

SEQ ID NO: 38867 - RNA, 32 nt, Human
acgggcaguggcugcucguguccucugccacc

SEQ ID NO: 38868 - RNA, 32 nt, Human
acgggcaucaucucuuaauccucagaacaucc

SEQ ID NO: 38869 - RNA, 32 nt, Human
acgggcaugguggcucacaccuguaaucccag

SEQ ID NO: 38870 - RNA, 32 nt, Human
acgggccaaauacuacagccaccaaggccaua

SEQ ID NO: 38871 - RNA, 22 nt, Human
acgggccacuggcugcugggga

SEQ ID NO: 38872 - RNA, 32 nt, Human
acgggccaugggcugagccccgcugagcccgc

SEQ ID NO: 38873 - RNA, 32 nt, Human
acgggcccauaccacacagacugcucuccaau

SEQ ID NO: 38874 - RNA, 32 nt, Human
acgggccccaggagggaagcgcugucuaggca

SEQ ID NO: 38875 - RNA, 32 nt, Human
acgggccccgccucagacuccaacacucacaa

SEQ ID NO: 38876 - RNA, 17 nt, Human
acgggcccggacauccc

SEQ ID NO: 38877 - RNA, 32 nt, Human
acgggcccucccccaaccucucucugauccaa

SEQ ID NO: 38878 - RNA, 32 nt, Human
acgggccgccgccugcccuggagcacaggcua

SEQ ID NO: 38879 - RNA, 32 nt, Human
acgggccgucugcuccuccuuggacaguugca

SEQ ID NO: 38880 - RNA, 32 nt, Human
acgggccuuccaggagcaagcacuaccuguuc

SEQ ID NO: 38881 - RNA, 32 nt, Human
acgggcgaagccgccugcugccgcccaggaag

SEQ ID NO: 38882 - RNA, 32 nt, Human
acgggcgacagucccgcccagccccggaccug

SEQ ID NO: 38883 - RNA, 32 nt, Human
acgggcgcccgccaccacgcccggcuaauuuu

SEQ ID NO: 38884 - RNA, 28 nt, Human
acgggcggcaaugcugccuccuuccccg

SEQ ID NO: 38885 - RNA, 32 nt, Human
acgggcggcacagucacuucugccuguugcuc

SEQ ID NO: 38886 - RNA, 32 nt, Human
acgggcggcgggauagcgggaccccggcggcg

SEQ ID NO: 38887 - RNA, 32 nt, Human
acgggcggcucacccuggacacugugaugcgc

SEQ ID NO: 38888 - RNA, 32 nt, Human
acgggcggcuggugcuuuuuccuugccggcgu

SEQ ID NO: 38889 - RNA, 32 nt, Human
acgggcgggcugggaaggucuccuccccucac

SEQ ID NO: 38890 - RNA, 32 nt, Human
acgggcuaugcugcuguugcguguggguaccc

SEQ ID NO: 38891 - RNA, 32 nt, Human
acgggcucagcagccagaggaggccggugaag

SEQ ID NO: 38892 - RNA, 32 nt, Human
acgggcucagcccaggaagaggagaaacgauc

SEQ ID NO: 38893 - RNA, 29 nt, Human
acgggcuccaggagucgucgccacacucg

SEQ ID NO: 38894 - RNA, 32 nt, Human
acgggcugaauaacauacucuuuugucuugga

SEQ ID NO: 38895 - RNA, 32 nt, Human
acgggcugagccagacagcaggcuccaggcuc

SEQ ID NO: 38896 - RNA, 32 nt, Human
acgggcugccagaagagagagaggcagagagc

SEQ ID NO: 38897 - RNA, 32 nt, Human
acgggcugggcccugugucccagguuucacag

SEQ ID NO: 38898 - RNA, 32 nt, Human
acgggcugggggcuucucaggauuccacagcc

SEQ ID NO: 38899 - RNA, 32 nt, Human
acgggcuuagugggcuucagccagcuuuucuc

SEQ ID NO: 38900 - RNA, 27 nt, Human
acgggcuuauaauuugccauuugugaa

SEQ ID NO: 38901 - RNA, 32 nt, Human
acgggcuugcacacagcaggugcucagcaaau

SEQ ID NO: 38902 - RNA, 31 nt, Human
acgggcuugggggaaagaugguggggaccaa

SEQ ID NO: 38903 - RNA, 32 nt, Human
acgggcuuguguucugcuccauacuuuuucuc

SEQ ID NO: 38904 - RNA, 24 nt, Human
acgggcuuuccacagcgcggggga

SEQ ID NO: 38905 - RNA, 32 nt, Human
acggggaagccuguccuugugcgccuucagac

SEQ ID NO: 38906 - RNA, 32 nt, Human
acggggaauucuuaaaacugugcucaacuauu

SEQ ID NO: 38907 - RNA, 32 nt, Human
acggggaccgggccgcacuccagccugcccuu

SEQ ID NO: 38908 - RNA, 32 nt, Human
acggggacuauacucacuucuacuucugcuac

SEQ ID NO: 38909 - RNA, 32 nt, Human
acggggacuggagggagccaggugacauggag

SEQ ID NO: 38910 - RNA, 20 nt, Human
acggggacuuccuugugcga

SEQ ID NO: 38911 - RNA, 32 nt, Human
acggggagagcagaaagcuuugggcguccugg

SEQ ID NO: 38912 - RNA, 32 nt, Human
acggggagaggccuucaccccaugcucaagcc

SEQ ID NO: 38913 - RNA, 32 nt, Human
acggggagcucccaagcagcagccaggaugcu

SEQ ID NO: 38914 - RNA, 21 nt, Human
acggggaggacggggccaggg

SEQ ID NO: 38915 - RNA, 20 nt, Human
acggggaggccaccaccagg

SEQ ID NO: 38916 - RNA, 32 nt, Human
acggggaggugaggaauaagauccuuaaaaua

SEQ ID NO: 38917 - RNA, 23 nt, Human
acggggagguuuguuugugugaa

SEQ ID NO: 38918 - RNA, 25 nt, Human
acggggaugaccuguggcgcacaaa

SEQ ID NO: 38919 - RNA, 32 nt, Human
acggggcacaucuggcugggaagucacaugga

SEQ ID NO: 38920 - RNA, 32 nt, Human
acggggcacugcccuggcucuggguaaggacg

SEQ ID NO: 38921 - RNA, 32 nt, Human
acggggcagaugucuacuuguucaguuuuuca

SEQ ID NO: 38922 - RNA, 32 nt, Human
acggggccagagccaaggaagcuuccacuucu

SEQ ID NO: 38923 - RNA, 32 nt, Human
acggggccaggccugcagccaggucuccuauc

SEQ ID NO: 38924 - RNA, 32 nt, Human
acggggccaggggaggcauagcagaaagacug

SEQ ID NO: 38925 - RNA, 22 nt, Human
acggggccauccagccugugaa

SEQ ID NO: 38926 - RNA, 32 nt, Human
acggggcccaggaccagccucaguuucucacc

SEQ ID NO: 38927 - RNA, 32 nt, Human
acggggcccaggaggucaggagagcagcccgu

SEQ ID NO: 38928 - RNA, 32 nt, Human
acggggcccaggcuagagugcaguggcgugag

SEQ ID NO: 38929 - RNA, 32 nt, Human
acggggcccgaccaggauggugcaguggcggc

SEQ ID NO: 38930 - RNA, 32 nt, Human
acggggcccgcgccugccucccuuccccgcca

SEQ ID NO: 38931 - RNA, 32 nt, Human
acggggcccuuaccugugacccucuuugcuga

SEQ ID NO: 38932 - RNA, 32 nt, Human
acggggccugcucugagccccuugcuggcaag

SEQ ID NO: 38933 - RNA, 32 nt, Human
acggggccugggcucccgggcccgaggaggaa

SEQ ID NO: 38934 - RNA, 32 nt, Human
acggggcgcugccucuguagggguuaaaucca

SEQ ID NO: 38935 - RNA, 32 nt, Human
acggggcggauggcgcccagcccagcccuaac

SEQ ID NO: 38936 - RNA, 32 nt, Human
acggggcgggggcggggcggcagugagcucgg

SEQ ID NO: 38937 - RNA, 32 nt, Human
acggggcggucucuuccgccuccugccugguu

SEQ ID NO: 38938 - RNA, 32 nt, Human
acggggcgucggcugcugcggccccgcagugu

SEQ ID NO: 38939 - RNA, 32 nt, Human
acggggcucugcuuccucaucauuccagcuca

SEQ ID NO: 38940 - RNA, 32 nt, Human
acggggcugggaaaaugaauaagaauuauaac

SEQ ID NO: 38941 - RNA, 32 nt, Human
acgggggaagugagaggaaagaggcgggggcg

SEQ ID NO: 38942 - RNA, 22 nt, Human
acgggggcacuuggaggaccug

SEQ ID NO: 38943 - RNA, 32 nt, Human
acgggggcagccugcucuccuccuggggcccu

SEQ ID NO: 38944 - RNA, 32 nt, Human
acgggggcaguguggggaaugcagcccuggug

SEQ ID NO: 38945 - RNA, 32 nt, Human
acgggggccuucuccauaggaagaggaggcga

SEQ ID NO: 38946 - RNA, 32 nt, Human
acgggggcucacgccugucaccccagagcuuu

SEQ ID NO: 38947 - RNA, 32 nt, Human
acgggggcugcacgcggcuggccggcuuccuc

SEQ ID NO: 38948 - RNA, 32 nt, Human
acgggggugagaaaggggaggccgccucugag

SEQ ID NO: 38949 - RNA, 32 nt, Human
acgggggugcuggaauuggcacuucagggcca

SEQ ID NO: 38950 - RNA, 32 nt, Human
acggggguggguggggugaagagaucuuguga

SEQ ID NO: 38951 - RNA, 32 nt, Human
acgggguacugaggcggaagguuugaagguua

SEQ ID NO: 38952 - RNA, 32 nt, Human
acgggguauuagguggaacugagggaaacaga

SEQ ID NO: 38953 - RNA, 32 nt, Human
acggggucaggagaucaagaccauccuggcua

SEQ ID NO: 38954 - RNA, 32 nt, Human
acggggucagggcuggagggcacaggcagagg

SEQ ID NO: 38955 - RNA, 32 nt, Human
acggggucauacuacauacaagcauaagcaaa

SEQ ID NO: 38956 - RNA, 32 nt, Human
acggggucauuuccucuaaggaccaccauaau

SEQ ID NO: 38957 - RNA, 32 nt, Human
acgggguccaccuucugcuccagccagaggag

SEQ ID NO: 38958 - RNA, 32 nt, Human
acggggucgccacugcacccagccugugucuu

SEQ ID NO: 38959 - RNA, 32 nt, Human
acggggucugggugggcugggugcugggaaug

SEQ ID NO: 38960 - RNA, 19 nt, Human
acggggucuuaccauguug

SEQ ID NO: 38961 - RNA, 32 nt, Human
acggggugagucaaccugggacucggucucag

SEQ ID NO: 38962 - RNA, 32 nt, Human
acgggguggaguggucaguggagccagcaccc

SEQ ID NO: 38963 - RNA, 32 nt, Human
acgggguggccgggaacucucuaggcaagaau

SEQ ID NO: 38964 - RNA, 32 nt, Human
acgggguggcugugugggauguggucauggag

SEQ ID NO: 38965 - RNA, 32 nt, Human
acgggguggggaggggaauggggaggggguuu

SEQ ID NO: 38966 - RNA, 32 nt, Human
acgggguggguugaggccucucugccacccgu

SEQ ID NO: 38967 - RNA, 32 nt, Human
acgggguuaggaguucaggaccagccuggcca

SEQ ID NO: 38968 - RNA, 20 nt, Human
acgggguuucaccauauugg

SEQ ID NO: 38969 - RNA, 19 nt, Human
acgggguuucaccauguug

SEQ ID NO: 38970 - RNA, 20 nt, Human
acgggguuucaccauguugg

SEQ ID NO: 38971 - RNA, 19 nt, Human
acgggguuucaccguguua

SEQ ID NO: 38972 - RNA, 32 nt, Human
acgggguuugaccauguuggucaggguggucu

SEQ ID NO: 38973 - RNA, 32 nt, Human
acgggguuuuacuauguugcccaggcaggucu

SEQ ID NO: 38974 - RNA, 32 nt, Human
acgggguuuugccauguugcccaggcuggaag

SEQ ID NO: 38975 - RNA, 32 nt, Human
acgggguuuugccauguugcccaggcuggucu

SEQ ID NO: 38976 - RNA, 32 nt, Human
acggguaagggagggcaggggugagggggagc

SEQ ID NO: 38977 - RNA, 32 nt, Human
acgggucacagccugguagucccacaugugcc

SEQ ID NO: 38978 - RNA, 32 nt, Human
acgggucaccagcucugccggcugaggcagag

SEQ ID NO: 38979 - RNA, 32 nt, Human
acgggugaaaucuguugcccugccugguuucu

SEQ ID NO: 38980 - RNA, 32 nt, Human
acgggugagcagagccuggagccccgggcagg

SEQ ID NO: 38981 - RNA, 32 nt, Human
acgggugagguagcucacaccuguaaucccag

SEQ ID NO: 38982 - RNA, 32 nt, Human
acgggugccacagcccaggucggaguggccca

SEQ ID NO: 38983 - RNA, 19 nt, Human
acgggugccuguaguccca

SEQ ID NO: 38984 - RNA, 32 nt, Human
acgggugcgguggaggcggccuugcgguggug

SEQ ID NO: 38985 - RNA, 32 nt, Human
acgggugcucugaccugcuuggaagaggccaa

SEQ ID NO: 38986 - RNA, 32 nt, Human
acggguggaagagaggcagccuccugcuccgg

SEQ ID NO: 38987 - RNA, 32 nt, Human
acggguggcuguagccugcgcguuuguguaaa

SEQ ID NO: 38988 - RNA, 32 nt, Human
acgggugggcccuguccaaucaguugaaggca

SEQ ID NO: 38989 - RNA, 32 nt, Human
acggguucaagcaauucuccugccucagccuc

SEQ ID NO: 38990 - RNA, 32 nt, Human
acggguucagcccagugcgguggggcuggggc

SEQ ID NO: 38991 - RNA, 32 nt, Human
acgguacccaacugccaccucccuucaaccau

SEQ ID NO: 38992 - RNA, 32 nt, Human
acgguaccugccaccagccauggcagugcauc

SEQ ID NO: 38993 - RNA, 32 nt, Human
acgguacugggcccugugauucucccagcccu

SEQ ID NO: 38994 - RNA, 32 nt, Human
acgguagcaaugggauauaauaccuuucuaag

SEQ ID NO: 38995 - RNA, 32 nt, Human
acgguagggcugggcagaggugucucuccuug

SEQ ID NO: 38996 - RNA, 19 nt, Human
acgguauccucgcuaguuu

SEQ ID NO: 38997 - RNA, 32 nt, Human
acggucaaaacuuucaaaagacaugaaacguc

SEQ ID NO: 38998 - RNA, 32 nt, Human
acggucacuccucugcccugcauuggccuuga

SEQ ID NO: 38999 - RNA, 32 nt, Human
acggucaggcucuggccagggcagagggcugc

SEQ ID NO: 39000 - RNA, 32 nt, Human
acggucaugacauacugaagcuccagccaggg

SEQ ID NO: 39001 - RNA, 32 nt, Human
acgguccaagcaaaggcucuuuucagagccac

SEQ ID NO: 39002 - RNA, 32 nt, Human
acgguccaggagcugugauguggcuguggucu

SEQ ID NO: 39003 - RNA, 32 nt, Human
acgguccaucagcgcucugccuuccagcuaga

SEQ ID NO: 39004 - RNA, 32 nt, Human
acgguccaugaguugccauccuucccucuucc

SEQ ID NO: 39005 - RNA, 32 nt, Human
acggucccaccauguuacccagccuggucuca

SEQ ID NO: 39006 - RNA, 32 nt, Human
acggucccagcaccggggaggacuggagagcg

SEQ ID NO: 39007 - RNA, 32 nt, Human
acggucccgagccauggggguguugaugucca

SEQ ID NO: 39008 - RNA, 24 nt, Human
acggucccgccggcgccaccaccg

SEQ ID NO: 39009 - RNA, 32 nt, Human
acggucccugcucuuccaagguggggacagug

SEQ ID NO: 39010 - RNA, 32 nt, Human
acggucccuuuaugcuaagucagugguucuca

SEQ ID NO: 39011 - RNA, 32 nt, Human
acgguccggagcaagcccagaggcagaggagg

SEQ ID NO: 39012 - RNA, 18 nt, Human
acgguccucgccaucuuc

SEQ ID NO: 39013 - RNA, 20 nt, Human
acgguccucggcccaucucc

SEQ ID NO: 39014 - RNA, 28 nt, Human
acgguccugagaugagccucaucccugg

SEQ ID NO: 39015 - RNA, 32 nt, Human
acgguccugaugcggcagccugggcgggugca

SEQ ID NO: 39016 - RNA, 32 nt, Human
acgguccuuggcuauguauugggcguuggagg

SEQ ID NO: 39017 - RNA, 32 nt, Human
acggucgcagggccgagggaggaccugugggc

SEQ ID NO: 39018 - RNA, 21 nt, Human
acggucgccaccugagucucc

SEQ ID NO: 39019 - RNA, 32 nt, Human
acggucgccagauuucugcuccugggcacauu

SEQ ID NO: 39020 - RNA, 32 nt, Human
acggucuccagccacgauaccugggccaaucc

SEQ ID NO: 39021 - RNA, 32 nt, Human
acggucugauuuucucuuuggauucuuccaaa

SEQ ID NO: 39022 - RNA, 32 nt, Human
acggucuguucuguuucaaggcacucuagauu

SEQ ID NO: 39023 - RNA, 32 nt, Human
acggucuucccucuucccucagucccaaaucc

SEQ ID NO: 39024 - RNA, 32 nt, Human
acggucuuggucuugacugcaaguuguccagg

SEQ ID NO: 39025 - RNA, 32 nt, Human
acggugaaaaggcaaauagguauagcuauuuu

SEQ ID NO: 39026 - RNA, 19 nt, Human
acggugaaacccugucucu

SEQ ID NO: 39027 - RNA, 19 nt, Human
acggugaaacuccgucucu

SEQ ID NO: 39028 - RNA, 32 nt, Human
acggugaaaugacaugcaaaggccauaguugu

SEQ ID NO: 39029 - RNA, 20 nt, Human
acggugaagugaucugugaa

SEQ ID NO: 39030 - RNA, 19 nt, Human
acggugacccaugccuaga

SEQ ID NO: 39031 - RNA, 32 nt, Human
acggugaccccuuuuagucaggagagugcaga

SEQ ID NO: 39032 - RNA, 22 nt, Human
acggugacuaaaagccccugaa

SEQ ID NO: 39033 - RNA, 20 nt, Human
acggugacuccagugcugga

SEQ ID NO: 39034 - RNA, 21 nt, Human
acggugacuccagugcuggac

SEQ ID NO: 39035 - RNA, 22 nt, Human
acggugacucucauucuuuaac

SEQ ID NO: 39036 - RNA, 20 nt, Human
acggugacuguggccuugaa

SEQ ID NO: 39037 - RNA, 32 nt, Human
acggugagaagcagagaaggcacuugcauccu

SEQ ID NO: 39038 - RNA, 32 nt, Human
acggugaggccccagcgccugcagccaaagcu

SEQ ID NO: 39039 - RNA, 32 nt, Human
acggugaguuacuaauuaacuuuuggcaggua

SEQ ID NO: 39040 - RNA, 32 nt, Human
acggugauccaggaggcucaaagagaagccaa

SEQ ID NO: 39041 - RNA, 32 nt, Human
acggugccaccaccaaggucucagccugggcc

SEQ ID NO: 39042 - RNA, 32 nt, Human
acggugccacugcacuccagcuugggugacag

SEQ ID NO: 39043 - RNA, 32 nt, Human
acggugccagggagguggcggccagggccagg

SEQ ID NO: 39044 - RNA, 32 nt, Human
acggugccauugcucuccagccugggcgacaa

SEQ ID NO: 39045 - RNA, 32 nt, Human
acggugcccaugcugcccagccuggagguaaa

SEQ ID NO: 39046 - RNA, 32 nt, Human
acggugcguggugugcagacagcaggagcuca

SEQ ID NO: 39047 - RNA, 32 nt, Human
acggugcucaggacagggggcgggggcagggg

SEQ ID NO: 39048 - RNA, 32 nt, Human
acggugcucccagggcguuggagcaggcggag

SEQ ID NO: 39049 - RNA, 32 nt, Human
acggugcugaagccugcagcagggcaggaugg

SEQ ID NO: 39050 - RNA, 32 nt, Human
acggugcugcugcugcacggccuaucgcagaa

SEQ ID NO: 39051 - RNA, 32 nt, Human
acgguggaagggagagaaagagaaagaaggua

SEQ ID NO: 39052 - RNA, 32 nt, Human
acgguggagccccauccaaggagccagggccc

SEQ ID NO: 39053 - RNA, 32 nt, Human
acgguggaggcagaggugacaguucccagagu

SEQ ID NO: 39054 - RNA, 24 nt, Human
acgguggcagagucuccuuggcaa

SEQ ID NO: 39055 - RNA, 32 nt, Human
acgguggcaggcagguggaggcugcgcacagc

SEQ ID NO: 39056 - RNA, 19 nt, Human
acgguggccacccccugag

SEQ ID NO: 39057 - RNA, 21 nt, Human
acgguggccccuccucagcaa

SEQ ID NO: 39058 - RNA, 29 nt, Human
acgguggcggucaucauccccuuuaacac

SEQ ID NO: 39059 - RNA, 32 nt, Human
acgguggcggucaucauccccuuuaacaccgg

SEQ ID NO: 39060 - RNA, 32 nt, Human
acgguggcucacaccuguaaccccagcacugu

SEQ ID NO: 39061 - RNA, 22 nt, Human
acgguggcucacaccuguaauc

SEQ ID NO: 39062 - RNA, 32 nt, Human
acgguggcucacaccugucaucccagcacuuu

SEQ ID NO: 39063 - RNA, 22 nt, Human
acgguggcucacacuuauaauc

SEQ ID NO: 39064 - RNA, 22 nt, Human
acgguggcucacgccuauaauc

SEQ ID NO: 39065 - RNA, 22 nt, Human
acgguggcucacgccuguaauc

SEQ ID NO: 39066 - RNA, 32 nt, Human
acgguggcuccaccacuuccgcaggccuggaa

SEQ ID NO: 39067 - RNA, 32 nt, Human
acgguggcuuacaccuguaacccuggcauuuu

SEQ ID NO: 39068 - RNA, 22 nt, Human
acgguggcuuacaccuguaauc

SEQ ID NO: 39069 - RNA, 32 nt, Human
acggugggaaaauaaguugacuuucaaaucac

SEQ ID NO: 39070 - RNA, 32 nt, Human
acggugggacgggacugcagccucccagaggc

SEQ ID NO: 39071 - RNA, 32 nt, Human
acggugggcggggagagcucgaggggaggccc

SEQ ID NO: 39072 - RNA, 21 nt, Human
acggugggggaaucccuugag

SEQ ID NO: 39073 - RNA, 21 nt, Human
acggugggggcaccccgugga

SEQ ID NO: 39074 - RNA, 32 nt, Human
acgguggucgccagggcgagaggcgggagccg

SEQ ID NO: 39075 - RNA, 32 nt, Human
acgguggucucgaucuccugaccucgugaucc

SEQ ID NO: 39076 - RNA, 32 nt, Human
acgguggucuucucccugcuuggcacccugcg

SEQ ID NO: 39077 - RNA, 21 nt, Human
acgguggugcaccauccugaa

SEQ ID NO: 39078 - RNA, 32 nt, Human
acgguggugcgaucaaagcucacugcagccuu

SEQ ID NO: 39079 - RNA, 22 nt, Human
acggugguucacaccuguaauc

SEQ ID NO: 39080 - RNA, 32 nt, Human
acggugguucacaccuguaaucccggcauuuu

SEQ ID NO: 39081 - RNA, 32 nt, Human
acgguguaccugcugcucagagcccccaaggc

SEQ ID NO: 39082 - RNA, 32 nt, Human
acggugucacccaggguggaauacaguggugu

SEQ ID NO: 39083 - RNA, 32 nt, Human
acggugucacugcacuccagccugggugacag

SEQ ID NO: 39084 - RNA, 32 nt, Human
acggugucuucaauaaauggugcugggaaagc

SEQ ID NO: 39085 - RNA, 32 nt, Human
acggugucuuucuuuccuuccuccuucuucuc

SEQ ID NO: 39086 - RNA, 32 nt, Human
acggugugcccuggccugccuucuucuugugu

SEQ ID NO: 39087 - RNA, 32 nt, Human
acgguguuagccacuacaccuggccuggauug

SEQ ID NO: 39088 - RNA, 32 nt, Human
acgguguucaucucaauagaaaucgggcaccu

SEQ ID NO: 39089 - RNA, 32 nt, Human
acgguuaaacugugcauuucucauuuugaugu

SEQ ID NO: 39090 - RNA, 32 nt, Human
acgguuacagcugguucuguagaaagagggaa

SEQ ID NO: 39091 - RNA, 32 nt, Human
acgguucaagacugagcaacucccugaauuuu

SEQ ID NO: 39092 - RNA, 32 nt, Human
acgguucaucugacaccuguguaaagcugacc

SEQ ID NO: 39093 - RNA, 32 nt, Human
acgguuccacuccugaguggucuugggugaau

SEQ ID NO: 39094 - RNA, 32 nt, Human
acgguucccagcgucugcucccacggugucca

SEQ ID NO: 39095 - RNA, 32 nt, Human
acgguugcaacaguguuccuuuucuugguuuu

SEQ ID NO: 39096 - RNA, 22 nt, Human
acgguugcucacgccuguaauc

SEQ ID NO: 39097 - RNA, 32 nt, Human
acgguugggggaggcagagguggcacuggagg

SEQ ID NO: 39098 - RNA, 32 nt, Human
acgguuguuugcuaacguauccuugaauucug

SEQ ID NO: 39099 - RNA, 32 nt, Human
acgguuuaugugugugccucauuccuuuccca

SEQ ID NO: 39100 - RNA, 32 nt, Human
acgguuucaguuaacacauugcaacuaacuuu

SEQ ID NO: 39101 - RNA, 32 nt, Human
acgguuuccucgggccgguggagggaaacaug

SEQ ID NO: 39102 - RNA, 32 nt, Human
acgguuugugcugcuguuucuggggcucugaa

SEQ ID NO: 39103 - RNA, 32 nt, Human
acgguuuugagcguagggggaggcgugagagg

SEQ ID NO: 39104 - RNA, 32 nt, Human
acgguuuugguugaggcuuguggcaaugcaca

SEQ ID NO: 39105 - RNA, 32 nt, Human
acgguuuuucuucugccaaggcuacuuccuuu

SEQ ID NO: 39106 - RNA, 32 nt, Human
acguaaaaccaaaaacuauaaaaacccuagaa

SEQ ID NO: 39107 - RNA, 32 nt, Human
acguaaacaguauuuauuauaaauuacuaccg

SEQ ID NO: 39108 - RNA, 32 nt, Human
acguaaaggcaugacuuccuggcaccacaggg

SEQ ID NO: 39109 - RNA, 32 nt, Human
acguaaagucauaauuugcaaaauauuuggca

SEQ ID NO: 39110 - RNA, 32 nt, Human
acguaaauagcugucaucaucauuaucuuuua

SEQ ID NO: 39111 - RNA, 32 nt, Human
acguaacaaaccugcacauugugcacauguac

SEQ ID NO: 39112 - RNA, 32 nt, Human
acguaagaacuggccaugacagccuguguuuc

SEQ ID NO: 39113 - RNA, 32 nt, Human
acguaagaccuccugcccuuagcucucuugcu

SEQ ID NO: 39114 - RNA, 32 nt, Human
acguaagauguggcuaguucugagaugugaaa

SEQ ID NO: 39115 - RNA, 32 nt, Human
acguaagauuccaacuguagccacuuucacua

SEQ ID NO: 39116 - RNA, 32 nt, Human
acguaaggcucaauaucugcguugaccaccua

SEQ ID NO: 39117 - RNA, 32 nt, Human
acguaaguauaugaaauagugcagacuguuuc

SEQ ID NO: 39118 - RNA, 32 nt, Human
acguaagugauacucuguccacucuuuugauu

SEQ ID NO: 39119 - RNA, 32 nt, Human
acguaauuacucagugcuuugaagggacaucc

SEQ ID NO: 39120 - RNA, 32 nt, Human
acguacaaggcagauggagcauugacguuuuc

SEQ ID NO: 39121 - RNA, 32 nt, Human
acguacacaaugcacacaugcacacacgcaca

SEQ ID NO: 39122 - RNA, 32 nt, Human
acguacaguacaacauuucaaggaaaugaaua

SEQ ID NO: 39123 - RNA, 32 nt, Human
acguacauuccuuuuuccuuuuucugccucuu

SEQ ID NO: 39124 - RNA, 19 nt, Human
acguaccacacugacccug

SEQ ID NO: 39125 - RNA, 32 nt, Human
acguaccaucagagaaggcauacuggagagau

SEQ ID NO: 39126 - RNA, 32 nt, Human
acguaccuguaaucucagcuacucaggaggcu

SEQ ID NO: 39127 - RNA, 32 nt, Human
acguaccuguagucccagcuacuugggaggcu

SEQ ID NO: 39128 - RNA, 32 nt, Human
acguacgcacacacgcacaugcacagauaugc

SEQ ID NO: 39129 - RNA, 32 nt, Human
acguacucaagggagcgcgcccgcguuauccu

SEQ ID NO: 39130 - RNA, 32 nt, Human
acguacucagucauuggugucuuuggagugac

SEQ ID NO: 39131 - RNA, 32 nt, Human
acguacuccaugcgcuaccugcugcccagcgu

SEQ ID NO: 39132 - RNA, 32 nt, Human
acguacugcagccucaaccuccugggcucaag

SEQ ID NO: 39133 - RNA, 32 nt, Human
acguacugggauuacaggcgugagccaccgcg

SEQ ID NO: 39134 - RNA, 23 nt, Human
acguacugugguuaccccuguga

SEQ ID NO: 39135 - RNA, 32 nt, Human
acguacuuccuuggagaccugcauuugccaac

SEQ ID NO: 39136 - RNA, 32 nt, Human
acguacuuccuuucuuucuucccucuguuauu

SEQ ID NO: 39137 - RNA, 32 nt, Human
acguagaggcagacccaugugcugcuguugca

SEQ ID NO: 39138 - RNA, 32 nt, Human
acguagccauuagagaugacagagguaauauc

SEQ ID NO: 39139 - RNA, 32 nt, Human
acguagcucugccugccugucaaccccucacu

SEQ ID NO: 39140 - RNA, 32 nt, Human
acguagcugugggcggggucuuggggaugagg

SEQ ID NO: 39141 - RNA, 32 nt, Human
acguaggaaaauguccuuucucagggaguggg

SEQ ID NO: 39142 - RNA, 32 nt, Human
acguaggaggggccguggggucccuaagugau

SEQ ID NO: 39143 - RNA, 32 nt, Human
acguaggccaccggccucauccagggccccac

SEQ ID NO: 39144 - RNA, 32 nt, Human
acguaggccaggagccucagcgcugccccuuc

SEQ ID NO: 39145 - RNA, 32 nt, Human
acguaggcuaccacucuccgggcaccggcugg

SEQ ID NO: 39146 - RNA, 32 nt, Human
acguauaauguucuacaauuuuuguuaucaca

SEQ ID NO: 39147 - RNA, 32 nt, Human
acguauccuguuguugaguucucugggucaga

SEQ ID NO: 39148 - RNA, 32 nt, Human
acguaugccacauagccccugcgaagaaaagg

SEQ ID NO: 39149 - RNA, 32 nt, Human
acguauggcaggcagacugggagcaggaaaac

SEQ ID NO: 39150 - RNA, 32 nt, Human
acguauugggacaagcauuguacuggcaggca

SEQ ID NO: 39151 - RNA, 32 nt, Human
acguauugguucuuuauuaaauaauuuuugaa

SEQ ID NO: 39152 - RNA, 32 nt, Human
acguauuugguccucugaugaaugacuguccc

SEQ ID NO: 39153 - RNA, 22 nt, Human
acgucaaagcacacaagacaua

SEQ ID NO: 39154 - RNA, 32 nt, Human
acgucaacuuccuauccuugccugacacuguc

SEQ ID NO: 39155 - RNA, 32 nt, Human
acgucaagguggugaugcugggcaaggaguac

SEQ ID NO: 39156 - RNA, 32 nt, Human
acgucaaguugaaauuagguacagcuguugcu

SEQ ID NO: 39157 - RNA, 32 nt, Human
acgucacacucccagaccccugaggggcccac

SEQ ID NO: 39158 - RNA, 32 nt, Human
acgucacaguuuuucugcucuggucauuugca

SEQ ID NO: 39159 - RNA, 32 nt, Human
acgucaccagagagacagcuguugagaccgcu

SEQ ID NO: 39160 - RNA, 32 nt, Human
acgucacugaagggcugaaggaagccaacgac

SEQ ID NO: 39161 - RNA, 32 nt, Human
acgucacugcacuccagcuugggcaacagagc

SEQ ID NO: 39162 - RNA, 32 nt, Human
acgucacugcacuccggccugggugacagagc

SEQ ID NO: 39163 - RNA, 32 nt, Human
acgucacugcacucuagccugggcaacagagu

SEQ ID NO: 39164 - RNA, 32 nt, Human
acgucacugcauuccagccuggauaauagagu

SEQ ID NO: 39165 - RNA, 32 nt, Human
acgucacugcauuccagccugggugacagagc

SEQ ID NO: 39166 - RNA, 27 nt, Human
acgucacuggggcuuuggggucagcua

SEQ ID NO: 39167 - RNA, 32 nt, Human
acgucacuguacuccagccugggugacagagu

SEQ ID NO: 39168 - RNA, 32 nt, Human
acgucagauacaaaugucucuauccaauuuca

SEQ ID NO: 39169 - RNA, 32 nt, Human
acgucagcauuuucuucucugcacuuauaaga

SEQ ID NO: 39170 - RNA, 32 nt, Human
acgucagccagcacugcacagacagcugcgac

SEQ ID NO: 39171 - RNA, 32 nt, Human
acgucagcuucuucauuuuaauucuccuuuua

SEQ ID NO: 39172 - RNA, 32 nt, Human
acgucaggaccuccccacacacccacacgaug

SEQ ID NO: 39173 - RNA, 32 nt, Human
acgucaggcagccgggacaccggagugucccc

SEQ ID NO: 39174 - RNA, 32 nt, Human
acgucauagaauauucuucuuccucucaggag

SEQ ID NO: 39175 - RNA, 32 nt, Human
acgucaucuccagcuccagccugcuggggccu

SEQ ID NO: 39176 - RNA, 32 nt, Human
acgucaugccacgcuuaacaccucuaacaacu

SEQ ID NO: 39177 - RNA, 32 nt, Human
acgucauugcacuccagccuggucaacaagag

SEQ ID NO: 39178 - RNA, 32 nt, Human
acgucauugcacuccauccugagccacaagag

SEQ ID NO: 39179 - RNA, 32 nt, Human
acgucauugcucuccagccugggcaacagagc

SEQ ID NO: 39180 - RNA, 32 nt, Human
acguccaccccagccucacauugccagauguu

SEQ ID NO: 39181 - RNA, 32 nt, Human
acguccaccuccuggguucaagcgauucuccu

SEQ ID NO: 39182 - RNA, 32 nt, Human
acguccaccucuugaguucaagcgauucuccu

SEQ ID NO: 39183 - RNA, 22 nt, Human
acguccaccuggguguguucau

SEQ ID NO: 39184 - RNA, 32 nt, Human
acguccacgcagcagagggacaugggccauuc

SEQ ID NO: 39185 - RNA, 18 nt, Human
acguccagccugugucca

SEQ ID NO: 39186 - RNA, 32 nt, Human
acguccaggacacaccuguaucccagagagca

SEQ ID NO: 39187 - RNA, 32 nt, Human
acguccagucauaguaacuucccuugaacuuc

SEQ ID NO: 39188 - RNA, 32 nt, Human
acguccaucucgcucaucaucaccgacacguc

SEQ ID NO: 39189 - RNA, 32 nt, Human
acguccaugaggaaaacucccagugaugaucu

SEQ ID NO: 39190 - RNA, 32 nt, Human
acgucccagggagggaggggcggcccacaccc

SEQ ID NO: 39191 - RNA, 32 nt, Human
acgucccaggucucugcacacccguggaauuc

SEQ ID NO: 39192 - RNA, 32 nt, Human
acguccccacuauguucugucuugagaagggg

SEQ ID NO: 39193 - RNA, 32 nt, Human
acguccccaugccugggugcugugaggccuga

SEQ ID NO: 39194 - RNA, 32 nt, Human
acgucccccacuccuggcaccaugaaggcggc

SEQ ID NO: 39195 - RNA, 32 nt, Human
acguccccgcgccgggccucaggcuccuuccu

SEQ ID NO: 39196 - RNA, 32 nt, Human
acguccccuccagggccuagagcuggggacca

SEQ ID NO: 39197 - RNA, 32 nt, Human
acguccccucccaccucuccccaaaccccugc

SEQ ID NO: 39198 - RNA, 32 nt, Human
acgucccgcaggcggagguaggccgcgggagg

SEQ ID NO: 39199 - RNA, 32 nt, Human
acgucccgggcacugucaugcccagcuuggag

SEQ ID NO: 39200 - RNA, 32 nt, Human
acguccgagcagccgccuugacuggggaaggg

SEQ ID NO: 39201 - RNA, 32 nt, Human
acguccgccucccagguucaagcgauucucau

SEQ ID NO: 39202 - RNA, 32 nt, Human
acguccgccuccuggguucaagugauucuucu

SEQ ID NO: 39203 - RNA, 32 nt, Human
acguccgcuacaccgaagccuggugagcuccc

SEQ ID NO: 39204 - RNA, 32 nt, Human
acguccgggcaguggagggagggacacagccu

SEQ ID NO: 39205 - RNA, 32 nt, Human
acguccuacuccucacacugcucuacugcuca

SEQ ID NO: 39206 - RNA, 32 nt, Human
acguccuccuacuuaauucuucuucaagauug

SEQ ID NO: 39207 - RNA, 32 nt, Human
acguccuccugaauaccuguacuuccaagagg

SEQ ID NO: 39208 - RNA, 32 nt, Human
acguccucuccaggaagggaccccggguucac

SEQ ID NO: 39209 - RNA, 32 nt, Human
acguccucuccaggaggggaccccggguucac

SEQ ID NO: 39210 - RNA, 21 nt, Human
acguccugagccucccuguga

SEQ ID NO: 39211 - RNA, 32 nt, Human
acguccugggguagcuccugaccuccgaccuu

SEQ ID NO: 39212 - RNA, 32 nt, Human
acguccugggugcugucaugcccagcuuggag

SEQ ID NO: 39213 - RNA, 32 nt, Human
acguccugguauuucuauccuugcccuccaug

SEQ ID NO: 39214 - RNA, 32 nt, Human
acguccuguuuucccaccuaccccuguaacgc

SEQ ID NO: 39215 - RNA, 32 nt, Human
acguccuugccuucuugggagcuccaagcggc

SEQ ID NO: 39216 - RNA, 32 nt, Human
acgucgaaaccaguggagauuacuaaaccgua

SEQ ID NO: 39217 - RNA, 31 nt, Human
acgucgacuucaucagccaggagggagagcu

SEQ ID NO: 39218 - RNA, 32 nt, Human
acgucgcaaagcagaaacugaaaacugaucca

SEQ ID NO: 39219 - RNA, 32 nt, Human
acgucgccuccccuucauccaccucucucuca

SEQ ID NO: 39220 - RNA, 32 nt, Human
acgucggacuccgucuccgcggcagggaagca

SEQ ID NO: 39221 - RNA, 32 nt, Human
acgucggcagccccagccccagaaaaggaacc

SEQ ID NO: 39222 - RNA, 32 nt, Human
acgucggccauuccaggccccguuuuucccuu

SEQ ID NO: 39223 - RNA, 21 nt, Human
acgucgucgccgccgccgccg

SEQ ID NO: 39224 - RNA, 32 nt, Human
acgucuaaggagagaugcccagcugggagucc

SEQ ID NO: 39225 - RNA, 32 nt, Human
acgucuagcaaagcccuugcccucucugagcc

SEQ ID NO: 39226 - RNA, 32 nt, Human
acgucuagcucucagcagagcugggagcaaag

SEQ ID NO: 39227 - RNA, 32 nt, Human
acgucuauuucccucagacacagggauccuug

SEQ ID NO: 39228 - RNA, 32 nt, Human
acgucucaaugccaucgucgccgccaccauga

SEQ ID NO: 39229 - RNA, 32 nt, Human
acgucuccacccagcgcucauccuggcaaggg

SEQ ID NO: 39230 - RNA, 32 nt, Human
acgucuccuccagggauggcgcuggcggcuuu

SEQ ID NO: 39231 - RNA, 32 nt, Human
acgucuccugucuucuuuaccugauccacagg

SEQ ID NO: 39232 - RNA, 32 nt, Human
acgucuccuuuucugagugagucuaggauagu

SEQ ID NO: 39233 - RNA, 32 nt, Human
acgucucucccgaggaucuggcccuggacuuc

SEQ ID NO: 39234 - RNA, 32 nt, Human
acgucucugucucugggccuuuguuccccuau

SEQ ID NO: 39235 - RNA, 32 nt, Human
acgucugacuuagugggcaccugaccacuuug

SEQ ID NO: 39236 - RNA, 32 nt, Human
acgucugcacggccuccaccuucuguacagug

SEQ ID NO: 39237 - RNA, 32 nt, Human
acgucugcccuggguguuaggagcgaggugca

SEQ ID NO: 39238 - RNA, 32 nt, Human
acgucugccucagccacugccuccgagaagca

SEQ ID NO: 39239 - RNA, 32 nt, Human
acgucugccuccuggguucaagcaauucuccu

SEQ ID NO: 39240 - RNA, 32 nt, Human
acgucugcgcagcaagaaaagaaucucaguug

SEQ ID NO: 39241 - RNA, 32 nt, Human
acgucugcuucaugacucccuaaugccuuccc

SEQ ID NO: 39242 - RNA, 32 nt, Human
acgucuggccacacugacucagucccaguaac

SEQ ID NO: 39243 - RNA, 32 nt, Human
acgucuguaaucuuugggagcacuuugggagg

SEQ ID NO: 39244 - RNA, 32 nt, Human
acgucugugcacuguccuccugcugguuaucc

SEQ ID NO: 39245 - RNA, 32 nt, Human
acgucuguggcagcuucugucucgcugggacc

SEQ ID NO: 39246 - RNA, 32 nt, Human
acgucuguguccaccaguccugcucagaaucu

SEQ ID NO: 39247 - RNA, 32 nt, Human
acgucugugugagcuguucuaggccgagggcc

SEQ ID NO: 39248 - RNA, 32 nt, Human
acgucuuaacucugcugcuucccaaggauggc

SEQ ID NO: 39249 - RNA, 32 nt, Human
acgucuucggcggaugucauggugcugaacca

SEQ ID NO: 39250 - RNA, 32 nt, Human
acgucuugagucugggauuauccgcauuguau

SEQ ID NO: 39251 - RNA, 32 nt, Human
acgucuuggucuccacagaaccacagugccuu

SEQ ID NO: 39252 - RNA, 32 nt, Human
acgucuuuccaucauggucuuaacaaccauga

SEQ ID NO: 39253 - RNA, 32 nt, Human
acgucuuuggaaggaggaagggggugagggag

SEQ ID NO: 39254 - RNA, 32 nt, Human
acgucuuuggacucagcuccugcccagcuccc

SEQ ID NO: 39255 - RNA, 32 nt, Human
acgugaaaaacauaggauacaaaacuuuaaag

SEQ ID NO: 39256 - RNA, 32 nt, Human
acgugaaaacacucaaggccuagggggaggac

SEQ ID NO: 39257 - RNA, 32 nt, Human
acgugaaaaccaacaaauaaugcuuaaaggcc

SEQ ID NO: 39258 - RNA, 32 nt, Human
acgugaaaucagugaggugagacuucccagac

SEQ ID NO: 39259 - RNA, 31 nt, Human
acgugaagcucaagauaccuguagaaagaaa

SEQ ID NO: 39260 - RNA, 32 nt, Human
acgugaagucacggguaggggccaggccccuc

SEQ ID NO: 39261 - RNA, 32 nt, Human
acgugaagugaggaggggguugggaggggaga

SEQ ID NO: 39262 - RNA, 32 nt, Human
acgugaaugaaaccaggccauagcugucauaa

SEQ ID NO: 39263 - RNA, 32 nt, Human
acgugaauggccaggaucagauugugcccggc

SEQ ID NO: 39264 - RNA, 32 nt, Human
acgugaccacuagccuccuggagccagagagu

SEQ ID NO: 39265 - RNA, 32 nt, Human
acgugaccaucaaccaaccagcggucagaauc

SEQ ID NO: 39266 - RNA, 32 nt, Human
acgugacccaggcuggaguguaguagcuauuc

SEQ ID NO: 39267 - RNA, 32 nt, Human
acgugaccccuccuagccucaggcucccucgu

SEQ ID NO: 39268 - RNA, 32 nt, Human
acgugacccugacccaauaaggguggaaggcu

SEQ ID NO: 39269 - RNA, 32 nt, Human
acgugacccugugccccgccucccggggugcc

SEQ ID NO: 39270 - RNA, 32 nt, Human
acgugaccgcucaguacauggagcggcugaac

SEQ ID NO: 39271 - RNA, 32 nt, Human
acgugaccuccaggaaagcaguucuggccgag

SEQ ID NO: 39272 - RNA, 32 nt, Human
acgugaccuggugacagugcugacuuggcugu

SEQ ID NO: 39273 - RNA, 32 nt, Human
acgugacucccacauguaaucaggagaaaggg

SEQ ID NO: 39274 - RNA, 32 nt, Human
acgugacuguguguuuccacacuugagaaguc

SEQ ID NO: 39275 - RNA, 32 nt, Human
acgugacuuuuuagauccucaccauuucugcu

SEQ ID NO: 39276 - RNA, 32 nt, Human
acgugagaaaggacaugaggagacuaaagacc

SEQ ID NO: 39277 - RNA, 32 nt, Human
acgugagaccugcgacaaagacagguuagaga

SEQ ID NO: 39278 - RNA, 32 nt, Human
acgugagagcacugccgcgguggguugugggg

SEQ ID NO: 39279 - RNA, 32 nt, Human
acgugagcccaggaauucaaggcugcagugaa

SEQ ID NO: 39280 - RNA, 32 nt, Human
acgugagcuaauuauaucaaauaaguaucaca

SEQ ID NO: 39281 - RNA, 32 nt, Human
acgugagcuggugcuucgugugcuccaaaggg

SEQ ID NO: 39282 - RNA, 32 nt, Human
acgugaggaggcugcaacucagcacuaaguag

SEQ ID NO: 39283 - RNA, 32 nt, Human
acgugaggcaccacaaccagccuggaugauuc

SEQ ID NO: 39284 - RNA, 32 nt, Human
acgugagggaaagauauugaagaggaguugga

SEQ ID NO: 39285 - RNA, 32 nt, Human
acgugagggagauggauuaaugugaguaacag

SEQ ID NO: 39286 - RNA, 32 nt, Human
acgugagggcaugaaugguucauucaggcagc

SEQ ID NO: 39287 - RNA, 32 nt, Human
acgugaggucaccuugggaggguggguggaug

SEQ ID NO: 39288 - RNA, 22 nt, Human
acgugaguccaggaggucaagg

SEQ ID NO: 39289 - RNA, 32 nt, Human
acgugauaaagugcaagcacuuuuccauuuua

SEQ ID NO: 39290 - RNA, 32 nt, Human
acgugauaugacucuguuuuccuugcuuguuu

SEQ ID NO: 39291 - RNA, 32 nt, Human
acgugaucaucaccacugacagaugauucaca

SEQ ID NO: 39292 - RNA, 32 nt, Human
acgugaucugcuggcccucaggcugcugcucu

SEQ ID NO: 39293 - RNA, 32 nt, Human
acgugaugaagaguaucgaagugaagauauuc

SEQ ID NO: 39294 - RNA, 32 nt, Human
acgugauggacgcggucccagcgcggcgcugg

SEQ ID NO: 39295 - RNA, 19 nt, Human
acgugaugugcugcucugu

SEQ ID NO: 39296 - RNA, 32 nt, Human
acgugauguucuacaaugacauugagaaaagg

SEQ ID NO: 39297 - RNA, 18 nt, Human
acgugauucuggagccuu

SEQ ID NO: 39298 - RNA, 32 nt, Human
acgugauugaccuuggcgagaucauguuucua

SEQ ID NO: 39299 - RNA, 31 nt, Human
acgugauugacucucccuuagcugagagggc

SEQ ID NO: 39300 - RNA, 32 nt, Human
acgugcaaacagccacuucccagccccacucc

SEQ ID NO: 39301 - RNA, 32 nt, Human
acgugcaauaaagaagcacauuauuuuagcuu

SEQ ID NO: 39302 - RNA, 32 nt, Human
acgugcagagugagagugguaugaauuuuccu

SEQ ID NO: 39303 - RNA, 30 nt, Human
acgugcagccucuccaugucugauuacaaa

SEQ ID NO: 39304 - RNA, 32 nt, Human
acgugcaguggugaauggaggcugccagcagc

SEQ ID NO: 39305 - RNA, 32 nt, Human
acgugcauacuccugaaucggauguaaaugca

SEQ ID NO: 39306 - RNA, 31 nt, Human
acgugcauuuuuacucaacuaccucagguau

SEQ ID NO: 39307 - RNA, 32 nt, Human
acgugccaagacuagcucagaaaagccggcag

SEQ ID NO: 39308 - RNA, 32 nt, Human
acgugcccacuggucuggggucaggguuuucu

SEQ ID NO: 39309 - RNA, 32 nt, Human
acgugccccuucccaggcuccuggggccccuu

SEQ ID NO: 39310 - RNA, 32 nt, Human
acgugccccuugucgcgcgucucccauccuga

SEQ ID NO: 39311 - RNA, 32 nt, Human
acgugcccuccccaccucacuagacucuccgg

SEQ ID NO: 39312 - RNA, 32 nt, Human
acgugcccuguguuccggccccggcuggggcu

SEQ ID NO: 39313 - RNA, 32 nt, Human
acgugccuaagcugcugcagcuggcacccggu

SEQ ID NO: 39314 - RNA, 32 nt, Human
acgugccuagcauggcucaucaacaucugaac

SEQ ID NO: 39315 - RNA, 32 nt, Human
acgugccuccuuccucuucaccuugugcccug

SEQ ID NO: 39316 - RNA, 32 nt, Human
acgugccugccugcuaccccugcccagcugcu

SEQ ID NO: 39317 - RNA, 32 nt, Human
acgugccuggggagagaagcaagagcaggcug

SEQ ID NO: 39318 - RNA, 32 nt, Human
acgugccuguaaucccagcuaccugggaggcu

SEQ ID NO: 39319 - RNA, 32 nt, Human
acgugccuguaaucccagcuacucaggaggcu

SEQ ID NO: 39320 - RNA, 32 nt, Human
acgugccuguaaucccagcuacucgcaaggcu

SEQ ID NO: 39321 - RNA, 32 nt, Human
acgugccuguaaucccagcuacucgggaggcu

SEQ ID NO: 39322 - RNA, 32 nt, Human
acgugccuguaaucccaguuacucaggaggcu

SEQ ID NO: 39323 - RNA, 32 nt, Human
acgugccuguaaucccaguuacuugggaggcu

SEQ ID NO: 39324 - RNA, 32 nt, Human
acgugccuguaaucucagcaacucaggaggcu

SEQ ID NO: 39325 - RNA, 32 nt, Human
acgugccuguaaucucagcuacucaggaggau

SEQ ID NO: 39326 - RNA, 32 nt, Human
acgugccuguaauuccagcuacuugggaggcu

SEQ ID NO: 39327 - RNA, 32 nt, Human
acgugccuguagccccagcuacuugggaggcu

SEQ ID NO: 39328 - RNA, 32 nt, Human
acgugccuguagucccagcuacaugggaggcu

SEQ ID NO: 39329 - RNA, 32 nt, Human
acgugccuguagucccagcuacucaggaggcu

SEQ ID NO: 39330 - RNA, 32 nt, Human
acgugccuguagucccagcuacuccggaggcu

SEQ ID NO: 39331 - RNA, 32 nt, Human
acgugccuguagucccagcuacucgggaagcu

SEQ ID NO: 39332 - RNA, 32 nt, Human
acgugccuguagucccagcuacucgggaggcu

SEQ ID NO: 39333 - RNA, 32 nt, Human
acgugccuguagucccagcuacucuauagccu

SEQ ID NO: 39334 - RNA, 32 nt, Human
acgugccuguagucccagcuacucuggaggcu

SEQ ID NO: 39335 - RNA, 32 nt, Human
acgugccuguagucccagcuacuucggggacu

SEQ ID NO: 39336 - RNA, 32 nt, Human
acgugccuguagucccagcuccuugggaggcu

SEQ ID NO: 39337 - RNA, 32 nt, Human
acgugccuguagucccagcuguccuggaggcu

SEQ ID NO: 39338 - RNA, 32 nt, Human
acgugccuguagucucagcuacuugggaggcu

SEQ ID NO: 39339 - RNA, 20 nt, Human
acgugccuguaguuccagcu

SEQ ID NO: 39340 - RNA, 32 nt, Human
acgugccuguaguuccagcuacuugggaggca

SEQ ID NO: 39341 - RNA, 32 nt, Human
acgugccugugaucccagcuacuugggaggcu

SEQ ID NO: 39342 - RNA, 32 nt, Human
acgugccuguggucccagcuacucgagaggcu

SEQ ID NO: 39343 - RNA, 32 nt, Human
acgugccuguggucccagcuacuugggaggcu

SEQ ID NO: 39344 - RNA, 32 nt, Human
acgugccuguuaucucagcuacuugggaagcu

SEQ ID NO: 39345 - RNA, 32 nt, Human
acgugccuguucugauucucauuugugucucu

SEQ ID NO: 39346 - RNA, 32 nt, Human
acgugccuuuaguuccagcuacucaggaggcu

SEQ ID NO: 39347 - RNA, 32 nt, Human
acgugcgaguguccgcgguccugcugcugucu

SEQ ID NO: 39348 - RNA, 32 nt, Human
acgugcggagcacguccccuccagacugaagg

SEQ ID NO: 39349 - RNA, 32 nt, Human
acgugcucagccacccucuggcucagcggggc

SEQ ID NO: 39350 - RNA, 32 nt, Human
acgugcuccacuccagcucccugccagugcag

SEQ ID NO: 39351 - RNA, 32 nt, Human
acgugcuccccuucccagccacugacucacag

SEQ ID NO: 39352 - RNA, 32 nt, Human
acgugcuccugugucuaccccaacacaaaggu

SEQ ID NO: 39353 - RNA, 32 nt, Human
acgugcugggauuacagccgguggucaugcca

SEQ ID NO: 39354 - RNA, 32 nt, Human
acgugcugggauuacaggcaugagccaccacg

SEQ ID NO: 39355 - RNA, 32 nt, Human
acgugcugggauuacaggcaugagccacuacg

SEQ ID NO: 39356 - RNA, 32 nt, Human
acgugcugggauuacaggugugagccacuacg

SEQ ID NO: 39357 - RNA, 32 nt, Human
acgugcuggguggaccuaagguuccuucccac

SEQ ID NO: 39358 - RNA, 32 nt, Human
acgugcuguccaccaggccuuggagacaggcu

SEQ ID NO: 39359 - RNA, 32 nt, Human
acgugcuuguagucccagcuacuugggaggcu

SEQ ID NO: 39360 - RNA, 32 nt, Human
acgugcuuguggucccagcuacucaggaggcu

SEQ ID NO: 39361 - RNA, 32 nt, Human
acguggaacugaggcagcuguauggaggccaa

SEQ ID NO: 39362 - RNA, 32 nt, Human
acguggacagcgacuccuccuccagucacagc

SEQ ID NO: 39363 - RNA, 32 nt, Human
acguggaccucaacuucugauuccagaacacg

SEQ ID NO: 39364 - RNA, 32 nt, Human
acguggagcugcucaacuuagagugaggcagg

SEQ ID NO: 39365 - RNA, 32 nt, Human
acguggagcugcugccccggggaggccuggcc

SEQ ID NO: 39366 - RNA, 32 nt, Human
acguggagcuggaccacgccacccuggugcgc

SEQ ID NO: 39367 - RNA, 32 nt, Human
acguggaggcagagguugcagugagccgagau

SEQ ID NO: 39368 - RNA, 32 nt, Human
acguggaggcccuguccuagugcugaggacac

SEQ ID NO: 39369 - RNA, 32 nt, Human
acguggagguuagaauagagggcagaguaaaa

SEQ ID NO: 39370 - RNA, 32 nt, Human
acguggaguuacagaagccauugaaaaguuua

SEQ ID NO: 39371 - RNA, 32 nt, Human
acguggaguuuuccuucccagaaucucacugc

SEQ ID NO: 39372 - RNA, 32 nt, Human
acguggaugagcuccuggacauggagagugac

SEQ ID NO: 39373 - RNA, 32 nt, Human
acguggaugcccaggacaggacuguucuacau

SEQ ID NO: 39374 - RNA, 32 nt, Human
acguggaugcugguuagaaaugcaacaucagg

SEQ ID NO: 39375 - RNA, 32 nt, Human
acguggcagccugcgucugcuugucuaugucu

SEQ ID NO: 39376 - RNA, 32 nt, Human
acguggcaggcaggccucaguugaggacguga

SEQ ID NO: 39377 - RNA, 32 nt, Human
acguggcaugaucuugauaacuguugaaucug

SEQ ID NO: 39378 - RNA, 32 nt, Human
acguggcauguggccuguggccugugucccau

SEQ ID NO: 39379 - RNA, 32 nt, Human
acguggcauguguaggugaauuacaggggcca

SEQ ID NO: 39380 - RNA, 32 nt, Human
acguggccaaccuggggacucuggccuuaaga

SEQ ID NO: 39381 - RNA, 32 nt, Human
acguggccaccugcccagcuucacaccucccc

SEQ ID NO: 39382 - RNA, 32 nt, Human
acguggcccgcccccggcagggcacagcgcgc

SEQ ID NO: 39383 - RNA, 32 nt, Human
acguggccuuucacugguugugaauugguaug

SEQ ID NO: 39384 - RNA, 32 nt, Human
acguggcucaggcaguggguagaaaggggcag

SEQ ID NO: 39385 - RNA, 32 nt, Human
acguggcucgacuauagaaaacuccacugacu

SEQ ID NO: 39386 - RNA, 32 nt, Human
acguggcugccacgcugacacacccacauuca

SEQ ID NO: 39387 - RNA, 32 nt, Human
acguggcuggagagagaagugggagggagggg

SEQ ID NO: 39388 - RNA, 17 nt, Human
acguggcuggcauugca

SEQ ID NO: 39389 - RNA, 32 nt, Human
acguggcuucacuuggcacagcuccucugagu

SEQ ID NO: 39390 - RNA, 32 nt, Human
acguggcuuccagauuugcaucugugcugcag

SEQ ID NO: 39391 - RNA, 32 nt, Human
acgugggaaccgccgcagcuccacacuccagg

SEQ ID NO: 39392 - RNA, 32 nt, Human
acgugggacagaggacacagagguggaagauu

SEQ ID NO: 39393 - RNA, 22 nt, Human
acgugggagaaggagccuacca

SEQ ID NO: 39394 - RNA, 32 nt, Human
acgugggaggcagaaguugcagugagccaaga

SEQ ID NO: 39395 - RNA, 25 nt, Human
acgugggaggcagagguugcaguga

SEQ ID NO: 39396 - RNA, 32 nt, Human
acgugggaggcagagguugcagugagccgaga

SEQ ID NO: 39397 - RNA, 32 nt, Human
acgugggaggcagagguugcagugaguggaga

SEQ ID NO: 39398 - RNA, 32 nt, Human
acgugggaggcggagguugcagcgagcugaga

SEQ ID NO: 39399 - RNA, 25 nt, Human
acgugggaggcggagguugcaguga

SEQ ID NO: 39400 - RNA, 32 nt, Human
acgugggaggcggagguugcagugagcugaga

SEQ ID NO: 39401 - RNA, 25 nt, Human
acgugggaggcggagguuguaguga

SEQ ID NO: 39402 - RNA, 32 nt, Human
acgugggaggcggagguuguagugagccagga

SEQ ID NO: 39403 - RNA, 32 nt, Human
acgugggaggcugaggcaggagaaucacuuga

SEQ ID NO: 39404 - RNA, 32 nt, Human
acgugggauagauaacugagaggcucagaauc

SEQ ID NO: 39405 - RNA, 32 nt, Human
acgugggaugugaaaaucaaagaacacaugac

SEQ ID NO: 39406 - RNA, 32 nt, Human
acgugggcagaggcgcagggccacugcgccga

SEQ ID NO: 39407 - RNA, 32 nt, Human
acgugggcccagcaguccugugcuuggaaaug

SEQ ID NO: 39408 - RNA, 32 nt, Human
acgugggcggcgugguuccaagcacagugaag

SEQ ID NO: 39409 - RNA, 32 nt, Human
acgugggcuccagggacuggaguguaaugcuc

SEQ ID NO: 39410 - RNA, 18 nt, Human
acgugggcugucuucaca

SEQ ID NO: 39411 - RNA, 32 nt, Human
acguggggaaacugaggcccggagggggccga

SEQ ID NO: 39412 - RNA, 32 nt, Human
acguggggagcguguuaaaauuacagauuccu

SEQ ID NO: 39413 - RNA, 32 nt, Human
acguggggaggguggaggggugacaguggagg

SEQ ID NO: 39414 - RNA, 32 nt, Human
acguggggaugcugcuguggcuucuugucuuc

SEQ ID NO: 39415 - RNA, 32 nt, Human
acguggggcagccaccccugcccagcgagagc

SEQ ID NO: 39416 - RNA, 32 nt, Human
acgugguccuuucucuugccugugagcuggug

SEQ ID NO: 39417 - RNA, 32 nt, Human
acguggugaggguggccugggccugggcaccc

SEQ ID NO: 39418 - RNA, 32 nt, Human
acgugguguggggcucugggggugggguggaa

SEQ ID NO: 39419 - RNA, 32 nt, Human
acgugguugccuggccugggcugcgcccagca

SEQ ID NO: 39420 - RNA, 32 nt, Human
acguguaaaacacaguuccuacugcacaagua

SEQ ID NO: 39421 - RNA, 32 nt, Human
acguguaaucccaguacuuuggaagguggagg

SEQ ID NO: 39422 - RNA, 32 nt, Human
acguguaccuagaagggauggaagaggccucc

SEQ ID NO: 39423 - RNA, 32 nt, Human
acguguaccuggagggccgcugccucaauugc

SEQ ID NO: 39424 - RNA, 32 nt, Human
acguguaucacuucaucucucugcucuccaag

SEQ ID NO: 39425 - RNA, 32 nt, Human
acguguauucauugaugucugccuguaacuuc

SEQ ID NO: 39426 - RNA, 32 nt, Human
acgugucaacucugcuuaauuaagcacuuuga

SEQ ID NO: 39427 - RNA, 32 nt, Human
acguguccacacaugcuccagacccuggggca

SEQ ID NO: 39428 - RNA, 32 nt, Human
acgugucccaaaggaaacuggucuccacccac

SEQ ID NO: 39429 - RNA, 32 nt, Human
acguguccccagagcuuuacagugccacgaca

SEQ ID NO: 39430 - RNA, 32 nt, Human
acgugucccugaauuccaucugacucuaauuu

SEQ ID NO: 39431 - RNA, 32 nt, Human
acgugucccuucugaacugaugcuuucucacu

SEQ ID NO: 39432 - RNA, 23 nt, Human
acguguccgaggggcccccgggu

SEQ ID NO: 39433 - RNA, 32 nt, Human
acguguccguccacccuuccaucagcgggucu

SEQ ID NO: 39434 - RNA, 32 nt, Human
acguguccucagccaagguggccuguccaguc

SEQ ID NO: 39435 - RNA, 32 nt, Human
acgugucggcgcucacacacacaugcuagccc

SEQ ID NO: 39436 - RNA, 32 nt, Human
acgugucgucuggaaugggcuugggggccacg

SEQ ID NO: 39437 - RNA, 32 nt, Human
acgugucuccuccuccucaucuuagcuuccag

SEQ ID NO: 39438 - RNA, 32 nt, Human
acgugucuguaaucccagcuacccgggaggcu

SEQ ID NO: 39439 - RNA, 32 nt, Human
acgugucuguaaucccagcuacucuggagacu

SEQ ID NO: 39440 - RNA, 32 nt, Human
acgugugcacacacaaugcacacaacuccuau

SEQ ID NO: 39441 - RNA, 32 nt, Human
acgugugcacacgcaugcacacacacauucag

SEQ ID NO: 39442 - RNA, 32 nt, Human
acgugugcaguggggagaaugaugcuauccug

SEQ ID NO: 39443 - RNA, 32 nt, Human
acgugugcauuucagcuacaucaugccgcgcu

SEQ ID NO: 39444 - RNA, 32 nt, Human
acgugugcccucucccuguccuuccuuuccau

SEQ ID NO: 39445 - RNA, 32 nt, Human
acgugugcucaguuuggcaugugugaucguca

SEQ ID NO: 39446 - RNA, 32 nt, Human
acgugugcugggaucuacuuucccucugggau

SEQ ID NO: 39447 - RNA, 32 nt, Human
acgugugcugggugggagaaggcgaggcggca

SEQ ID NO: 39448 - RNA, 32 nt, Human
acguguggacucuugguggcucugcugucuca

SEQ ID NO: 39449 - RNA, 32 nt, Human
acguguggagccaggccuggccaggcaggggc

SEQ ID NO: 39450 - RNA, 32 nt, Human
acgugugggcuuuauuugggccacuuucuuua

SEQ ID NO: 39451 - RNA, 32 nt, Human
acguguggggaaggcuauuuguuugcagcauu

SEQ ID NO: 39452 - RNA, 32 nt, Human
acguguguaaauaggcuguggcuacggugggu

SEQ ID NO: 39453 - RNA, 24 nt, Human
acguguguauauacacacacauaa

SEQ ID NO: 39454 - RNA, 32 nt, Human
acguguguccccauggcuuguggaucagcuaa

SEQ ID NO: 39455 - RNA, 32 nt, Human
acgugugugcacgcaugugcacaugccuccag

SEQ ID NO: 39456 - RNA, 32 nt, Human
acgugugugcacguacacacacauacacacac

SEQ ID NO: 39457 - RNA, 32 nt, Human
acgugugugcaggaaacggggacguggggagg

SEQ ID NO: 39458 - RNA, 32 nt, Human
acgugugugcugcgugcuucacauccucuauu

SEQ ID NO: 39459 - RNA, 32 nt, Human
acgugugugguguuugugugucugugccuggc

SEQ ID NO: 39460 - RNA, 32 nt, Human
acguguguguaaggggaggcugccucacuuug

SEQ ID NO: 39461 - RNA, 32 nt, Human
acguguucuagagugaagggggugcgggugug

SEQ ID NO: 39462 - RNA, 32 nt, Human
acguguugggacagaugcucaugugugccaca

SEQ ID NO: 39463 - RNA, 17 nt, Human
acguguuugguauuaca

SEQ ID NO: 39464 - RNA, 32 nt, Human
acguguuuuugagccucucucccuccuuucag

SEQ ID NO: 39465 - RNA, 32 nt, Human
acguuaaauuccacauuuuccucugagaacac

SEQ ID NO: 39466 - RNA, 32 nt, Human
acguuaaccaauauaucuauagcuuuagauua

SEQ ID NO: 39467 - RNA, 32 nt, Human
acguuaauguuuucagucauuguguguccuuu

SEQ ID NO: 39468 - RNA, 32 nt, Human
acguuaauuuaaaagaacauuaugaggauuag

SEQ ID NO: 39469 - RNA, 32 nt, Human
acguuacaucggaacccagauggcuguauuca

SEQ ID NO: 39470 - RNA, 32 nt, Human
acguuacuuagacugcaagcuagaaagccacc

SEQ ID NO: 39471 - RNA, 32 nt, Human
acguuaggccaggccuuaucugaaaggccagc

SEQ ID NO: 39472 - RNA, 32 nt, Human
acguuagguguuguuuggcaagaaaccacacu

SEQ ID NO: 39473 - RNA, 32 nt, Human
acguuagguucugcggauaaaggaggaauaag

SEQ ID NO: 39474 - RNA, 32 nt, Human
acguuauauaaagagaaaauugaauuuaacaa

SEQ ID NO: 39475 - RNA, 32 nt, Human
acguuaucacauuucuaaugaggauucacauu

SEQ ID NO: 39476 - RNA, 32 nt, Human
acguuauccaaggacauggaaaagccaacacc

SEQ ID NO: 39477 - RNA, 32 nt, Human
acguuaugauaguacaagacagagguugagcc

SEQ ID NO: 39478 - RNA, 32 nt, Human
acguuaugccagccagagucaggcuggaaagu

SEQ ID NO: 39479 - RNA, 32 nt, Human
acguuaugguggcuucagcuucacuaggaaug

SEQ ID NO: 39480 - RNA, 32 nt, Human
acguucaccgagcuggccaacaucgccauccc

SEQ ID NO: 39481 - RNA, 32 nt, Human
acguucacuuccuagguccucuccuucugaug

SEQ ID NO: 39482 - RNA, 32 nt, Human
acguucagcaccaugaaggcuuuccgggaccu

SEQ ID NO: 39483 - RNA, 32 nt, Human
acguucagcuucuuuuuauuugccuccuaguc

SEQ ID NO: 39484 - RNA, 32 nt, Human
acguucaucggagcaggccggggccuggccuu

SEQ ID NO: 39485 - RNA, 32 nt, Human
acguucauguggccaccaugaccccgucggca

SEQ ID NO: 39486 - RNA, 32 nt, Human
acguuccacugcccuggcccagggcccaggcc

SEQ ID NO: 39487 - RNA, 32 nt, Human
acguuccaggcacgcaucuaggaaaaggagcu

SEQ ID NO: 39488 - RNA, 32 nt, Human
acguucccucuuuccuccuugucuuccacuau

SEQ ID NO: 39489 - RNA, 32 nt, Human
acguuccugcaaucccagcuacucauaaggcu

SEQ ID NO: 39490 - RNA, 32 nt, Human
acguuccuggagaguccggccaaccuguccca

SEQ ID NO: 39491 - RNA, 32 nt, Human
acguuccuuguuucuuuucucccaugacacug

SEQ ID NO: 39492 - RNA, 32 nt, Human
acguuccuuuaaucccagcuacucgggagguu

SEQ ID NO: 39493 - RNA, 32 nt, Human
acguucuccauuuuccugucauugggucaugu

SEQ ID NO: 39494 - RNA, 32 nt, Human
acguucucuccguuccuucuuccuucauacau

SEQ ID NO: 39495 - RNA, 32 nt, Human
acguucucuccuaaucucaguaacuuuguuaa

SEQ ID NO: 39496 - RNA, 32 nt, Human
acguucucucugccugugagccagucuaguuc

SEQ ID NO: 39497 - RNA, 32 nt, Human
acguucucuuucucccucccgccuccgucccc

SEQ ID NO: 39498 - RNA, 32 nt, Human
acguucuggacugucuucucccugcacaagcc

SEQ ID NO: 39499 - RNA, 32 nt, Human
acguucuguaauagaaaaccugaaacgaugau

SEQ ID NO: 39500 - RNA, 31 nt, Human
acguucuugcauccucagccugugucagcac

SEQ ID NO: 39501 - RNA, 32 nt, Human
acguugccaccacucaucgcaggaugaggaua

SEQ ID NO: 39502 - RNA, 32 nt, Human
acguugccuguagaauccuccucugccuggga

SEQ ID NO: 39503 - RNA, 32 nt, Human
acguugccuuauacucucuacuucagaugaug

SEQ ID NO: 39504 - RNA, 32 nt, Human
acguugcugaguaaagagguguuacucaccuu

SEQ ID NO: 39505 - RNA, 32 nt, Human
acguugcuggugguuuuucagcucccuucccu

SEQ ID NO: 39506 - RNA, 32 nt, Human
acguuggaggggaagugaauucaccccagacc

SEQ ID NO: 39507 - RNA, 32 nt, Human
acguuggagugggggcaccaggcuggagggga

SEQ ID NO: 39508 - RNA, 32 nt, Human
acguuggaguuugggcuggagcuccucccucc

SEQ ID NO: 39509 - RNA, 32 nt, Human
acguuggcucugacugccuuuggagguggaga

SEQ ID NO: 39510 - RNA, 32 nt, Human
acguugggacuggccaggaacugcugcaaaga

SEQ ID NO: 39511 - RNA, 32 nt, Human
acguugggauggauuacagaggaugugcccuc

SEQ ID NO: 39512 - RNA, 32 nt, Human
acguugggggcccugcccugaauggucaauuu

SEQ ID NO: 39513 - RNA, 32 nt, Human
acguuggguaggggguguaacuggggaggagg

SEQ ID NO: 39514 - RNA, 32 nt, Human
acguugggugguguuugguagguuucccucca

SEQ ID NO: 39515 - RNA, 32 nt, Human
acguuggucuugaacuccugaccuugugaucc

SEQ ID NO: 39516 - RNA, 32 nt, Human
acguuguagagugcuuaucagagaguaccauu

SEQ ID NO: 39517 - RNA, 32 nt, Human
acguuuacacgacuugaguuuugaaccccgau

SEQ ID NO: 39518 - RNA, 32 nt, Human
acguuucccucucugcuucccaccccaucucu

SEQ ID NO: 39519 - RNA, 32 nt, Human
acguuucuccccggcuccucugggcuaaggca

SEQ ID NO: 39520 - RNA, 32 nt, Human
acguuucugaacagggucugugcuauguguaa

SEQ ID NO: 39521 - RNA, 32 nt, Human
acguuucugcagcuauucugagcacaccuuga

SEQ ID NO: 39522 - RNA, 32 nt, Human
acguuucuggcaugguggauguuuucauguug

SEQ ID NO: 39523 - RNA, 32 nt, Human
acguuucuggccuggguuuuguggucaucuau

SEQ ID NO: 39524 - RNA, 32 nt, Human
acguuucuuccaucucccuugcaggcacaggg

SEQ ID NO: 39525 - RNA, 32 nt, Human
acguuugagagcuguguuggcaagaccucagg

SEQ ID NO: 39526 - RNA, 32 nt, Human
acguuugagauggguauaucaguaagaagagg

SEQ ID NO: 39527 - RNA, 32 nt, Human
acguuugcaaacaugucccggaucgaaaagau

SEQ ID NO: 39528 - RNA, 32 nt, Human
acguuugcuacaaaugaugagccaacagccau

SEQ ID NO: 39529 - RNA, 32 nt, Human
acguuuuaacaugcucaccucagcaaaaguua

SEQ ID NO: 39530 - RNA, 32 nt, Human
acguuuuauucagucuguaaauuaacuggccc

SEQ ID NO: 39531 - RNA, 30 nt, Human
acguuuucuuuuuaccuaguugcuauagug

SEQ ID NO: 39532 - RNA, 32 nt, Human
acguuuugggcccuggaaucagaucauaguuc

SEQ ID NO: 39533 - RNA, 32 nt, Human
acguuuuguagcccacugcaucuggauauaua

SEQ ID NO: 39534 - RNA, 32 nt, Human
acguuuuucuguugcugauuguuaacauagag

SEQ ID NO: 39535 - RNA, 32 nt, Human
acguuuuuguaguguggccgugcugcgcugag

SEQ ID NO: 39536 - RNA, 32 nt, Human
acuaaaaauacaaaaagauuagccaggcaugg

SEQ ID NO: 39537 - RNA, 32 nt, Human
acuaaaaauacaaaacaauuagccgggcgugg

SEQ ID NO: 39538 - RNA, 32 nt, Human
acuaaaaauacaaaauuagcugggcauggugg

SEQ ID NO: 39539 - RNA, 32 nt, Human
acuaaaaauacaaaauuagcugggcguggugg

SEQ ID NO: 39540 - RNA, 32 nt, Human
acuaaaaauacaaaauuagcuggguuuggugg

SEQ ID NO: 39541 - RNA, 32 nt, Human
acuaaaaauacaaacaaauuagccgggcgugg

SEQ ID NO: 39542 - RNA, 32 nt, Human
acuaaaaauacagaaaaauuagccaggguugg

SEQ ID NO: 39543 - RNA, 32 nt, Human
acuaaaaauacagaaauuaggccaggcgcggu

SEQ ID NO: 39544 - RNA, 32 nt, Human
acuaaaaaugcggaagaguuagccaggcgugg

SEQ ID NO: 39545 - RNA, 32 nt, Human
acuaaaaaugucccagcagcugggagcccaac

SEQ ID NO: 39546 - RNA, 32 nt, Human
acuaaaaauguucugugaaaacaagcagcuag

SEQ ID NO: 39547 - RNA, 32 nt, Human
acuaaaacauaccaaccuacuucauuuccuag

SEQ ID NO: 39548 - RNA, 32 nt, Human
acuaaaacggcaucugcauacaaugggaaaag

SEQ ID NO: 39549 - RNA, 21 nt, Human
acuaaaacuauggagaaacuu

SEQ ID NO: 39550 - RNA, 32 nt, Human
acuaaaacugauuugaguuggauuuaugauuu

SEQ ID NO: 39551 - RNA, 23 nt, Human
acuaaaacuguguggaaaagguu

SEQ ID NO: 39552 - RNA, 32 nt, Human
acuaaaaggcagggguuaaaaaugauuauaua

SEQ ID NO: 39553 - RNA, 32 nt, Human
acuaaaaguggcauagagaauacacauauaaa

SEQ ID NO: 39554 - RNA, 32 nt, Human
acuaaaauaauuagaaaguagcuuauuuauug

SEQ ID NO: 39555 - RNA, 32 nt, Human
acuaaaauacaaaaaguuagcugggcuuggcg

SEQ ID NO: 39556 - RNA, 32 nt, Human
acuaaaauacaaaaauuagcugggcaugauga

SEQ ID NO: 39557 - RNA, 32 nt, Human
acuaaaauacaaaaauuagcugggcaugaugg

SEQ ID NO: 39558 - RNA, 32 nt, Human
acuaaaauacaaaaauuagcugggcauggugg

SEQ ID NO: 39559 - RNA, 32 nt, Human
acuaaaauacaaaaauuagcugggcaugguug

SEQ ID NO: 39560 - RNA, 32 nt, Human
acuaaaauacaaaaauuagcuggguguggugg

SEQ ID NO: 39561 - RNA, 32 nt, Human
acuaaaauacccccucaugccacccaccccag

SEQ ID NO: 39562 - RNA, 32 nt, Human
acuaaaauaggaacauccgacacacaccguuu

SEQ ID NO: 39563 - RNA, 32 nt, Human
acuaaaauaguacaaaaauuagccgggcgugg

SEQ ID NO: 39564 - RNA, 22 nt, Human
acuaaaaucuauaauaaagcuu

SEQ ID NO: 39565 - RNA, 32 nt, Human
acuaaaaucugccauuuggcucucugguuaac

SEQ ID NO: 39566 - RNA, 32 nt, Human
acuaaaaucuuucucucuagucuuucucacuu

SEQ ID NO: 39567 - RNA, 32 nt, Human
acuaaaauggaaagcuaguuuugagaaauuau

SEQ ID NO: 39568 - RNA, 32 nt, Human
acuaaaauuggaaugacacagaggagauuagc

SEQ ID NO: 39569 - RNA, 32 nt, Human
acuaaaauuucccuguugcucuuuggaaucaa

SEQ ID NO: 39570 - RNA, 32 nt, Human
acuaaacagguuacagaauaucuguauguacu

SEQ ID NO: 39571 - RNA, 32 nt, Human
acuaaacaguuuggauggucagucucuacugg

SEQ ID NO: 39572 - RNA, 32 nt, Human
acuaaacauacaaaauuagcugggcauggugg

SEQ ID NO: 39573 - RNA, 32 nt, Human
acuaaacaucacagcaagcucuaucucugagc

SEQ ID NO: 39574 - RNA, 32 nt, Human
acuaaacauggcugaggcugggcuccagccag

SEQ ID NO: 39575 - RNA, 32 nt, Human
acuaaaccaccugaaucuagcacuaaaccacc

SEQ ID NO: 39576 - RNA, 32 nt, Human
acuaaaccuguacaaaauagcugacaguuuua

SEQ ID NO: 39577 - RNA, 32 nt, Human
acuaaacuagugaaugaacccaggauuugaac

SEQ ID NO: 39578 - RNA, 32 nt, Human
acuaaacucauccuaggcugggcauggugacu

SEQ ID NO: 39579 - RNA, 32 nt, Human
acuaaacucuggggcuuguccugugcuugcuu

SEQ ID NO: 39580 - RNA, 32 nt, Human
acuaaacucuguggaagggaagggguugccuc

SEQ ID NO: 39581 - RNA, 32 nt, Human
acuaaacugcaacuucuaaauuccauguggca

SEQ ID NO: 39582 - RNA, 32 nt, Human
acuaaacuguuuuucucacagcagaggaaccu

SEQ ID NO: 39583 - RNA, 31 nt, Human
acuaaacuuuaauauuuccauuuaaaauuaa

SEQ ID NO: 39584 - RNA, 32 nt, Human
acuaaagaaagggagagaaagagaagcuauau

SEQ ID NO: 39585 - RNA, 32 nt, Human
acuaaagaaaucccaucaagcaaauggugugu

SEQ ID NO: 39586 - RNA, 32 nt, Human
acuaaagaaccaauucaaauggaugcugaaca

SEQ ID NO: 39587 - RNA, 32 nt, Human
acuaaagaauaacauauaagcacacaaauugg

SEQ ID NO: 39588 - RNA, 20 nt, Human
acuaaagagaaucccaggaa

SEQ ID NO: 39589 - RNA, 32 nt, Human
acuaaagagaugggaguucaccugagggcaag

SEQ ID NO: 39590 - RNA, 31 nt, Human
acuaaagagcccucugggccuguguugcugu

SEQ ID NO: 39591 - RNA, 32 nt, Human
acuaaagagcuucuaugcuuccuuguuuccau

SEQ ID NO: 39592 - RNA, 32 nt, Human
acuaaagagggaagauaaagaggcucccaacc

SEQ ID NO: 39593 - RNA, 32 nt, Human
acuaaagauaaauaaggagaaaacauuuagga

SEQ ID NO: 39594 - RNA, 32 nt, Human
acuaaagcaaaauuuccagggguagggacugg

SEQ ID NO: 39595 - RNA, 32 nt, Human
acuaaagcaguuugguggccuuuucacauucu

SEQ ID NO: 39596 - RNA, 32 nt, Human
acuaaagccagccugaccuuccuuccuguuag

SEQ ID NO: 39597 - RNA, 32 nt, Human
acuaaaggaagugggaacuuagaaccagacag

SEQ ID NO: 39598 - RNA, 32 nt, Human
acuaaaggagcccccacuccagcuucagaacc

SEQ ID NO: 39599 - RNA, 32 nt, Human
acuaaaggauccagagagcagcucccuuucuc

SEQ ID NO: 39600 - RNA, 32 nt, Human
acuaaaggcugcagggggugcuaaggaaggaa

SEQ ID NO: 39601 - RNA, 32 nt, Human
acuaaaggggagaagagccacccccagcaucc

SEQ ID NO: 39602 - RNA, 32 nt, Human
acuaaaggucuggccaaugucuugccccaccc

SEQ ID NO: 39603 - RNA, 22 nt, Human
acuaaaguuaguuggaaaagcu

SEQ ID NO: 39604 - RNA, 32 nt, Human
acuaaaguuaucuccccauucuaugguuacau

SEQ ID NO: 39605 - RNA, 21 nt, Human
acuaaaguugguagaaaaguu

SEQ ID NO: 39606 - RNA, 32 nt, Human
acuaaaguuuuuaaaauauacuuauuucuaag

SEQ ID NO: 39607 - RNA, 32 nt, Human
acuaaauacacaaagcaugccuuaaacccagu

SEQ ID NO: 39608 - RNA, 32 nt, Human
acuaaauaccaguuaucacagacuucacuggc

SEQ ID NO: 39609 - RNA, 32 nt, Human
acuaaauacccacucuggugagcauauuccau

SEQ ID NO: 39610 - RNA, 32 nt, Human
acuaaauauauguacaaagaacuaugcugucu

SEQ ID NO: 39611 - RNA, 32 nt, Human
acuaaauauuuuuaucggcuaggcgugguggu

SEQ ID NO: 39612 - RNA, 32 nt, Human
acuaaauccaucucagaaugcugcaggcacca

SEQ ID NO: 39613 - RNA, 32 nt, Human
acuaaaucuccaagaccuggugugcggaggca

SEQ ID NO: 39614 - RNA, 32 nt, Human
acuaaaucugcugccagaacucaagcaacagu

SEQ ID NO: 39615 - RNA, 32 nt, Human
acuaaaugaaguucucauuucucuccaacaga

SEQ ID NO: 39616 - RNA, 32 nt, Human
acuaaaugaauccacagcuacuuacucaucuu

SEQ ID NO: 39617 - RNA, 32 nt, Human
acuaaaugcaccugggucaggcugucuguggg

SEQ ID NO: 39618 - RNA, 32 nt, Human
acuaaauguaugucaguauggaaguacuuaua

SEQ ID NO: 39619 - RNA, 32 nt, Human
acuaaauuaaugccaugguaacauaaguuaga

SEQ ID NO: 39620 - RNA, 32 nt, Human
acuaaauucuccccagaaugcuuuuaaauuuu

SEQ ID NO: 39621 - RNA, 32 nt, Human
acuaacaaaagguacuaggauuagcugcaauc

SEQ ID NO: 39622 - RNA, 32 nt, Human
acuaacaaacuacauuccccagccuccuucac

SEQ ID NO: 39623 - RNA, 32 nt, Human
acuaacaaaggagaccuggugaucugccgacc

SEQ ID NO: 39624 - RNA, 32 nt, Human
acuaacaaaguggucgcaggagauuuuggaac

SEQ ID NO: 39625 - RNA, 32 nt, Human
acuaacacaccauucuuuagugcagugaaauu

SEQ ID NO: 39626 - RNA, 32 nt, Human
acuaacacagcccuggaaagaaaagcaaaaag

SEQ ID NO: 39627 - RNA, 32 nt, Human
acuaacacuaaaugugcuguuuuccuuguuuu

SEQ ID NO: 39628 - RNA, 32 nt, Human
acuaacacucccccuccuccaccccagccugc

SEQ ID NO: 39629 - RNA, 32 nt, Human
acuaacagagggcuagagaaagcaucuucugc

SEQ ID NO: 39630 - RNA, 32 nt, Human
acuaacagugaggggacaaagcauugauagga

SEQ ID NO: 39631 - RNA, 32 nt, Human
acuaacagugggcugaaaccaaccuuggguug

SEQ ID NO: 39632 - RNA, 32 nt, Human
acuaacaguucccuccucacagggucgcuaua

SEQ ID NO: 39633 - RNA, 32 nt, Human
acuaacaucucuagugaucccuuugucagugg

SEQ ID NO: 39634 - RNA, 32 nt, Human
acuaacaugaaugacuacuggagugucuucaa

SEQ ID NO: 39635 - RNA, 32 nt, Human
acuaacauggcacacacauacacuccugcgug

SEQ ID NO: 39636 - RNA, 32 nt, Human
acuaacauggugaaacccccaucuacacuaaa

SEQ ID NO: 39637 - RNA, 32 nt, Human
acuaaccaccaccaccaccaccgccgccacca

SEQ ID NO: 39638 - RNA, 32 nt, Human
acuaaccaguacucauguauggagauuauaaa

SEQ ID NO: 39639 - RNA, 32 nt, Human
acuaaccauuauaaaaagaagaaaaauaaagg

SEQ ID NO: 39640 - RNA, 32 nt, Human
acuaacccagaagagaggggugggcuggggca

SEQ ID NO: 39641 - RNA, 32 nt, Human
acuaacccaguuugaacccuggcacugccacg

SEQ ID NO: 39642 - RNA, 32 nt, Human
acuaaccucaaggauccugagucuccuucagc

SEQ ID NO: 39643 - RNA, 32 nt, Human
acuaaccuccaggucagcugcagcugcaaaau

SEQ ID NO: 39644 - RNA, 32 nt, Human
acuaaccugcagaaaaacacaaacaaaaacag

SEQ ID NO: 39645 - RNA, 32 nt, Human
acuaaccugggugacagaaugagacccuguuu

SEQ ID NO: 39646 - RNA, 32 nt, Human
acuaaccugugagcuuccccaggucagguauc

SEQ ID NO: 39647 - RNA, 32 nt, Human
acuaaccuuacauacacucuagaccaaaauaa

SEQ ID NO: 39648 - RNA, 32 nt, Human
acuaacgcccugcuccaucggcacuggugucc

SEQ ID NO: 39649 - RNA, 32 nt, Human
acuaacucaccacugugcuucccugcagacac

SEQ ID NO: 39650 - RNA, 32 nt, Human
acuaacuccuuuccauuccccugggugucuca

SEQ ID NO: 39651 - RNA, 32 nt, Human
acuaacugucuuuuuaacaaaacauuuucagu

SEQ ID NO: 39652 - RNA, 32 nt, Human
acuaacugugugaccuuaggcuggagugcaau

SEQ ID NO: 39653 - RNA, 32 nt, Human
acuaacuucauacauuuaucggcauuguccaa

SEQ ID NO: 39654 - RNA, 32 nt, Human
acuaacuucauuagcauuuccauacauuguuu

SEQ ID NO: 39655 - RNA, 32 nt, Human
acuaacuuggcccugacugguugugcaaccau

SEQ ID NO: 39656 - RNA, 32 nt, Human
acuaagaacaacugguuccuuccuucagaaga

SEQ ID NO: 39657 - RNA, 32 nt, Human
acuaagaacagagcaggugacaaggaugacua

SEQ ID NO: 39658 - RNA, 32 nt, Human
acuaagaacccuuggauguaacauacuaguua

SEQ ID NO: 39659 - RNA, 32 nt, Human
acuaagaagacagaaacaagcaaagccgccac

SEQ ID NO: 39660 - RNA, 32 nt, Human
acuaagaauacaaaauuagcugggcauggugg

SEQ ID NO: 39661 - RNA, 32 nt, Human
acuaagaauucacugcagcagcagguuacaua

SEQ ID NO: 39662 - RNA, 32 nt, Human
acuaagacagacuguagaugcauuuuaaauau

SEQ ID NO: 39663 - RNA, 32 nt, Human
acuaagaccagagggaggauuauccuugaccu

SEQ ID NO: 39664 - RNA, 32 nt, Human
acuaagacuuggaaauuauucucuccaguguc

SEQ ID NO: 39665 - RNA, 21 nt, Human
acuaagagccaaggcccacca

SEQ ID NO: 39666 - RNA, 32 nt, Human
acuaagagggaaaugagauauuuggggcagaa

SEQ ID NO: 39667 - RNA, 31 nt, Human
acuaagagggcgaucaccaugccaggacaag

SEQ ID NO: 39668 - RNA, 32 nt, Human
acuaagaucucagggaaugacuguguucugua

SEQ ID NO: 39669 - RNA, 32 nt, Human
acuaagaugauauuucagaagaguuggcugcc

SEQ ID NO: 39670 - RNA, 23 nt, Human
acuaagcaagcuuugaggaggca

SEQ ID NO: 39671 - RNA, 32 nt, Human
acuaagcaugcuguacccccucagcuuagauc

SEQ ID NO: 39672 - RNA, 32 nt, Human
acuaagcauugacagaauaucuuaaaauggua

SEQ ID NO: 39673 - RNA, 32 nt, Human
acuaagccaacaaaagagagcaucucuucuca

SEQ ID NO: 39674 - RNA, 32 nt, Human
acuaagccaaccuccucucacagccucuguau

SEQ ID NO: 39675 - RNA, 32 nt, Human
acuaagccaggcauaaccacagccaagcagau

SEQ ID NO: 39676 - RNA, 32 nt, Human
acuaagcccaggagccagaccuggcccgggga

SEQ ID NO: 39677 - RNA, 32 nt, Human
acuaagccuaagaaguucccugguuuuuccca

SEQ ID NO: 39678 - RNA, 32 nt, Human
acuaagccuccuaucacuaguaaccuuccagc

SEQ ID NO: 39679 - RNA, 32 nt, Human
acuaagcucacugcugucucacccucaccaga

SEQ ID NO: 39680 - RNA, 32 nt, Human
acuaagcucugauuuuucaucuugcccaaauu

SEQ ID NO: 39681 - RNA, 32 nt, Human
acuaagcugcaagcacaggccauuucucaugg

SEQ ID NO: 39682 - RNA, 32 nt, Human
acuaagcuggccccagccuugucuugauauua

SEQ ID NO: 39683 - RNA, 32 nt, Human
acuaagcugguuucccccuccgcaggguuuug

SEQ ID NO: 39684 - RNA, 17 nt, Human
acuaaggacccaaggca

SEQ ID NO: 39685 - RNA, 32 nt, Human
acuaaggaggcugaggcaggagaaucacuuga

SEQ ID NO: 39686 - RNA, 32 nt, Human
acuaaggagggucuggccagaggaacagacca

SEQ ID NO: 39687 - RNA, 32 nt, Human
acuaaggaugcugaaguuccgaacaguccaug

SEQ ID NO: 39688 - RNA, 32 nt, Human
acuaaggcccaagcucuuucucucggcaccuu

SEQ ID NO: 39689 - RNA, 32 nt, Human
acuaaggcucagagcaguugggguucaaugcc

SEQ ID NO: 39690 - RNA, 32 nt, Human
acuaaggcuucugcuuccuugcugcuguggug

SEQ ID NO: 39691 - RNA, 32 nt, Human
acuaagggaggcagcuuuaaacucccagaagg

SEQ ID NO: 39692 - RNA, 32 nt, Human
acuaagggauggggcagucucugcccaaacau

SEQ ID NO: 39693 - RNA, 32 nt, Human
acuaagggcaucuagcagcaguagccagagag

SEQ ID NO: 39694 - RNA, 32 nt, Human
acuaaggggguaggaauggaagaugguaucuu

SEQ ID NO: 39695 - RNA, 32 nt, Human
acuaaggguaaacucaggguucccugagcuau

SEQ ID NO: 39696 - RNA, 32 nt, Human
acuaaggguguaaguaauuaucgggaacagug

SEQ ID NO: 39697 - RNA, 32 nt, Human
acuaagguaauuucucacacaccaguuuaucu

SEQ ID NO: 39698 - RNA, 32 nt, Human
acuaaggugggauggauagcagggucucaggc

SEQ ID NO: 39699 - RNA, 32 nt, Human
acuaagguucuugagcuuaucucccaagguac

SEQ ID NO: 39700 - RNA, 32 nt, Human
acuaaguaggaaaucccuugagcuuagaccug

SEQ ID NO: 39701 - RNA, 32 nt, Human
acuaaguauaaauauuauggacuuuguuaaac

SEQ ID NO: 39702 - RNA, 32 nt, Human
acuaaguauaccaaaauaauugacucuauuau

SEQ ID NO: 39703 - RNA, 23 nt, Human
acuaagucauccauauacuccca

SEQ ID NO: 39704 - RNA, 32 nt, Human
acuaagucccaccaauucauguuuucacccuu

SEQ ID NO: 39705 - RNA, 25 nt, Human
acuaagucuugcaucauaaauucua

SEQ ID NO: 39706 - RNA, 32 nt, Human
acuaagugauucagacuuuccuuacuuuuaaa

SEQ ID NO: 39707 - RNA, 31 nt, Human
acuaagugcauuuucaucacagaaaagaguu

SEQ ID NO: 39708 - RNA, 32 nt, Human
acuaagugccuccccaagacccugacugaguc

SEQ ID NO: 39709 - RNA, 32 nt, Human
acuaagugggccugaauagggagugugggaga

SEQ ID NO: 39710 - RNA, 32 nt, Human
acuaagugggugucaccuggugggccucccuu

SEQ ID NO: 39711 - RNA, 32 nt, Human
acuaagugguuuucuugcucccacucccuacc

SEQ ID NO: 39712 - RNA, 32 nt, Human
acuaaguucuuggugcccucuucggcagccaa

SEQ ID NO: 39713 - RNA, 32 nt, Human
acuaauaaaauauuuccuguguguucuaugca

SEQ ID NO: 39714 - RNA, 32 nt, Human
acuaauaaccauuugucuuucccauuuugugc

SEQ ID NO: 39715 - RNA, 32 nt, Human
acuaauaagccaaggaaucgacauauauuagg

SEQ ID NO: 39716 - RNA, 32 nt, Human
acuaauaauaaauaugucuaucaaauaccucu

SEQ ID NO: 39717 - RNA, 32 nt, Human
acuaauaaucccugaucugugugauuguacug

SEQ ID NO: 39718 - RNA, 32 nt, Human
acuaauacaugguuuaaagucacagccguuug

SEQ ID NO: 39719 - RNA, 32 nt, Human
acuaauacuaaagaaguugggggagcucgaga

SEQ ID NO: 39720 - RNA, 32 nt, Human
acuaauagauuagcugggugggauggcccaug

SEQ ID NO: 39721 - RNA, 32 nt, Human
acuaauauacauuguuuaugcuuucuuuaaaa

SEQ ID NO: 39722 - RNA, 32 nt, Human
acuaauauuuggaauuuucauauaaguggauu

SEQ ID NO: 39723 - RNA, 32 nt, Human
acuaaucaaagacacuauuuucauacuagauu

SEQ ID NO: 39724 - RNA, 19 nt, Human
acuaaucaaugcugaggug

SEQ ID NO: 39725 - RNA, 32 nt, Human
acuaaucacagaauccacucccuacaccuuuu

SEQ ID NO: 39726 - RNA, 32 nt, Human
acuaauccagugccugguagacagcgggccuc

SEQ ID NO: 39727 - RNA, 32 nt, Human
acuaaucccugcgcaggacuucccaggacccc

SEQ ID NO: 39728 - RNA, 32 nt, Human
acuaaucuccagaacauuuuuccucuuaccaa

SEQ ID NO: 39729 - RNA, 32 nt, Human
acuaaucuuccauccagacccacaugaagcaa

SEQ ID NO: 39730 - RNA, 32 nt, Human
acuaaugaaaucaaacccccaagcugcuuguu

SEQ ID NO: 39731 - RNA, 32 nt, Human
acuaaugagaccuacaauuaugcuaacauuuu

SEQ ID NO: 39732 - RNA, 32 nt, Human
acuaaugagaggaucaccugagcccaggaguu

SEQ ID NO: 39733 - RNA, 32 nt, Human
acuaaugccauguaggaugguaugacaaggca

SEQ ID NO: 39734 - RNA, 32 nt, Human
acuaaugcuccacuccauuggcacuaacgccc

SEQ ID NO: 39735 - RNA, 32 nt, Human
acuaaugcuuugauuggauuugccaguucacc

SEQ ID NO: 39736 - RNA, 32 nt, Human
acuaauggaagcgauucucccaugcucaugug

SEQ ID NO: 39737 - RNA, 29 nt, Human
acuaauggaauguuuuaccagcacuuuug

SEQ ID NO: 39738 - RNA, 32 nt, Human
acuaauggauacaggcauguaucugccguaca

SEQ ID NO: 39739 - RNA, 32 nt, Human
acuaauggggaugagguucugguacaagauga

SEQ ID NO: 39740 - RNA, 32 nt, Human
acuaaugggucuuguccucaagcagcacuauu

SEQ ID NO: 39741 - RNA, 32 nt, Human
acuaauguaaccauuuuaugaagguugaagug

SEQ ID NO: 39742 - RNA, 29 nt, Human
acuaauguucacuagaucugugccacugc

SEQ ID NO: 39743 - RNA, 31 nt, Human
acuaauuaggcauauacuaugccaagcagug

SEQ ID NO: 39744 - RNA, 32 nt, Human
acuaauucagaucucucccagagaacuacugg

SEQ ID NO: 39745 - RNA, 31 nt, Human
acuaauuccagcuagaggaccagccucccug

SEQ ID NO: 39746 - RNA, 21 nt, Human
acuaauuccuauuucugccac

SEQ ID NO: 39747 - RNA, 32 nt, Human
acuaauucuacaaugccuuucucuuuagucag

SEQ ID NO: 39748 - RNA, 32 nt, Human
acuaauugacucuuaguuucuuugcucagauu

SEQ ID NO: 39749 - RNA, 32 nt, Human
acuaauugagguacaucugcaagugagacuuu

SEQ ID NO: 39750 - RNA, 32 nt, Human
acuaauugggaugucauaguacuuggcugccg

SEQ ID NO: 39751 - RNA, 32 nt, Human
acuaauugguauccacuacuuguacagcuuac

SEQ ID NO: 39752 - RNA, 32 nt, Human
acuaauuucuccgaguggugcauaaucuuauu

SEQ ID NO: 39753 - RNA, 32 nt, Human
acuaauuuucacugcuaauaauucuguaagga

SEQ ID NO: 39754 - RNA, 32 nt, Human
acuacaaacaccugccuugggggugaagugaa

SEQ ID NO: 39755 - RNA, 32 nt, Human
acuacaaaccaccaucuaccaucugccaggcc

SEQ ID NO: 39756 - RNA, 32 nt, Human
acuacaaagaaaacauguuuuccugcuuggaa

SEQ ID NO: 39757 - RNA, 32 nt, Human
acuacaaagaacagcaggacacagaggugacc

SEQ ID NO: 39758 - RNA, 32 nt, Human
acuacaacagcuacagugugucauaagcugga

SEQ ID NO: 39759 - RNA, 21 nt, Human
acuacaacauacaucucuuca

SEQ ID NO: 39760 - RNA, 32 nt, Human
acuacaacauuaugaagacauucuuuuguacc

SEQ ID NO: 39761 - RNA, 24 nt, Human
acuacaaccuccaccuccuggguu

SEQ ID NO: 39762 - RNA, 24 nt, Human
acuacaacuuccgccucccggguu

SEQ ID NO: 39763 - RNA, 32 nt, Human
acuacaagcaugcacagcugcacuuggcuuag

SEQ ID NO: 39764 - RNA, 32 nt, Human
acuacaagcggcugccaccacaccuggcuauu

SEQ ID NO: 39765 - RNA, 24 nt, Human
acuacaagcucugccucccgaguu

SEQ ID NO: 39766 - RNA, 32 nt, Human
acuacaagucuugacuaagaaggaaagaggaa

SEQ ID NO: 39767 - RNA, 32 nt, Human
acuacaagugugagccacugugccaggcacaa

SEQ ID NO: 39768 - RNA, 32 nt, Human
acuacaauagaagacauuuucacuggaauuac

SEQ ID NO: 39769 - RNA, 32 nt, Human
acuacaauauuuggccaauaagaaauauacac

SEQ ID NO: 39770 - RNA, 32 nt, Human
acuacaauggcugcuggaaagaggcguaagga

SEQ ID NO: 39771 - RNA, 32 nt, Human
acuacaauguaaucuguuucccagggaaauaa

SEQ ID NO: 39772 - RNA, 32 nt, Human
acuacaauugcuuguuaaaauauuuuauaagu

SEQ ID NO: 39773 - RNA, 32 nt, Human
acuacacaaaaauagaacaauuagucugaauu

SEQ ID NO: 39774 - RNA, 32 nt, Human
acuacacaacuugcuacuuucagaaaacuuuu

SEQ ID NO: 39775 - RNA, 32 nt, Human
acuacacagauggagggcaugggauaggacag

SEQ ID NO: 39776 - RNA, 32 nt, Human
acuacacauuggguacagugugcacugcuugg

SEQ ID NO: 39777 - RNA, 15 nt, Human
acuacaccugcccca

SEQ ID NO: 39778 - RNA, 32 nt, Human
acuacaccugcuccaggaccaaucagugaaac

SEQ ID NO: 39779 - RNA, 32 nt, Human
acuacaccuugccuugcuguuuguccugagau

SEQ ID NO: 39780 - RNA, 32 nt, Human
acuacaccuuggagacugcacacaauuuccuu

SEQ ID NO: 39781 - RNA, 32 nt, Human
acuacacuccagccuggaugacagagugagac

SEQ ID NO: 39782 - RNA, 32 nt, Human
acuacacuccagccugggcaacagagugagac

SEQ ID NO: 39783 - RNA, 32 nt, Human
acuacacuccagccugggcgacagagugaccc

SEQ ID NO: 39784 - RNA, 32 nt, Human
acuacacuccagccugggugacagagugagau

SEQ ID NO: 39785 - RNA, 32 nt, Human
acuacacugcacuggauugcuauauuuuuaac

SEQ ID NO: 39786 - RNA, 32 nt, Human
acuacagaaucaccuccucuugaagauauuga

SEQ ID NO: 39787 - RNA, 32 nt, Human
acuacagagcagcuccccaggagcucaggugg

SEQ ID NO: 39788 - RNA, 32 nt, Human
acuacagauacuugaaaacagaaccaaauaaa

SEQ ID NO: 39789 - RNA, 32 nt, Human
acuacagaucucccaguaauuuuucuuauuua

SEQ ID NO: 39790 - RNA, 32 nt, Human
acuacagcaaacaagcuaccccugccaguccu

SEQ ID NO: 39791 - RNA, 32 nt, Human
acuacagcaagccuggcacgaccucuaaggcg

SEQ ID NO: 39792 - RNA, 32 nt, Human
acuacagcacagauuucaccucugucuugaau

SEQ ID NO: 39793 - RNA, 32 nt, Human
acuacagcauagaauuuugccugggugccacc

SEQ ID NO: 39794 - RNA, 32 nt, Human
acuacagccuaaagccuugccuuuguaauuug

SEQ ID NO: 39795 - RNA, 32 nt, Human
acuacagccucgaacuccuaggcucaagcgau

SEQ ID NO: 39796 - RNA, 26 nt, Human
acuacagccugggugacagagcaaga

SEQ ID NO: 39797 - RNA, 32 nt, Human
acuacagcguguacaugggcaggugugucccc

SEQ ID NO: 39798 - RNA, 22 nt, Human
acuacaggacgggcaccagcca

SEQ ID NO: 39799 - RNA, 32 nt, Human
acuacaggcacacaccaccacgcccagcuaau

SEQ ID NO: 39800 - RNA, 32 nt, Human
acuacaggcacacaccaccacgcccagcucua

SEQ ID NO: 39801 - RNA, 32 nt, Human
acuacaggcacacgcugccacgcccagcugau

SEQ ID NO: 39802 - RNA, 32 nt, Human
acuacaggcacccaccaccacgcccagcuaau

SEQ ID NO: 39803 - RNA, 32 nt, Human
acuacaggcacccgccaacacgcccggcuaau

SEQ ID NO: 39804 - RNA, 32 nt, Human
acuacaggcacccgccacagugccugggcuaa

SEQ ID NO: 39805 - RNA, 32 nt, Human
acuacaggcaccugccaacacgcccggcuaau

SEQ ID NO: 39806 - RNA, 32 nt, Human
acuacaggcaccugccaccacgcccagcuaau

SEQ ID NO: 39807 - RNA, 32 nt, Human
acuacaggcaccugccacgaugccuagcuaau

SEQ ID NO: 39808 - RNA, 25 nt, Human
acuacaggcacgcaccaccaugcca

SEQ ID NO: 39809 - RNA, 32 nt, Human
acuacaggcacgugccaccacgcccagcuaau

SEQ ID NO: 39810 - RNA, 32 nt, Human
acuacaggcagcuccccucuguaccccaacuc

SEQ ID NO: 39811 - RNA, 22 nt, Human
acuacaggcaugaaauacugug

SEQ ID NO: 39812 - RNA, 32 nt, Human
acuacaggcaugagccaccgugcccggccucu

SEQ ID NO: 39813 - RNA, 32 nt, Human
acuacaggcaugagccacugugcccagccugu

SEQ ID NO: 39814 - RNA, 32 nt, Human
acuacaggcaugagucaccacaccuggcugau

SEQ ID NO: 39815 - RNA, 32 nt, Human
acuacaggcaugcaccaccacgcccagcuaau

SEQ ID NO: 39816 - RNA, 32 nt, Human
acuacaggcaugcgccaccacgcccagcuaau

SEQ ID NO: 39817 - RNA, 32 nt, Human
acuacaggcaugcgccaccacgcccagcugau

SEQ ID NO: 39818 - RNA, 32 nt, Human
acuacaggcaugugccaccacgcccagcuaag

SEQ ID NO: 39819 - RNA, 32 nt, Human
acuacaggcgcaugccaucacgcacagcuaau

SEQ ID NO: 39820 - RNA, 32 nt, Human
acuacaggcgcccaccaccacgcccagcuaau

SEQ ID NO: 39821 - RNA, 32 nt, Human
acuacaggcgcccgccaccacgcccagcuaau

SEQ ID NO: 39822 - RNA, 32 nt, Human
acuacaggcgcccgcuaccguacccggcuaau

SEQ ID NO: 39823 - RNA, 32 nt, Human
acuacaggcgcgcaccaccacgcccagcuaau

SEQ ID NO: 39824 - RNA, 32 nt, Human
acuacaggcgugagccacagugccuggccuga

SEQ ID NO: 39825 - RNA, 32 nt, Human
acuacaggcgugagccaccacgcccggccagc

SEQ ID NO: 39826 - RNA, 32 nt, Human
acuacaggcgugagccaccaugcccggcuaau

SEQ ID NO: 39827 - RNA, 32 nt, Human
acuacaggcgugagccagcacgcccagcuaau

SEQ ID NO: 39828 - RNA, 32 nt, Human
acuacaggcuccugccaccacgcccagcaauu

SEQ ID NO: 39829 - RNA, 32 nt, Human
acuacaggcuugugccaccacacucagcuaau

SEQ ID NO: 39830 - RNA, 32 nt, Human
acuacagguacccaccaccacgcccagcuaau

SEQ ID NO: 39831 - RNA, 32 nt, Human
acuacagguaccccaucauacccagcuuaaca

SEQ ID NO: 39832 - RNA, 32 nt, Human
acuacaggugagugccaccacacucagcuaau

SEQ ID NO: 39833 - RNA, 32 nt, Human
acuacaggugcaugccaccacgcacagcuacu

SEQ ID NO: 39834 - RNA, 32 nt, Human
acuacaggugcaugccaccacgcccagcuaau

SEQ ID NO: 39835 - RNA, 25 nt, Human
acuacaggugcaugccaccaugcca

SEQ ID NO: 39836 - RNA, 32 nt, Human
acuacaggugcccaccaacacgcccggcuaau

SEQ ID NO: 39837 - RNA, 32 nt, Human
acuacaggugcccaccaccaugcccagcuaau

SEQ ID NO: 39838 - RNA, 32 nt, Human
acuacaggugcccgccaccacgcccagcuaau

SEQ ID NO: 39839 - RNA, 32 nt, Human
acuacaggugcccgcuaccacacccggcuaau

SEQ ID NO: 39840 - RNA, 32 nt, Human
acuacaggugcgcaccaccaugcccagcuaau

SEQ ID NO: 39841 - RNA, 32 nt, Human
acuacaggugcgcaccaccaugcccggcuuuu

SEQ ID NO: 39842 - RNA, 32 nt, Human
acuacaggugcgugccaccacacccagcuaaa

SEQ ID NO: 39843 - RNA, 32 nt, Human
acuacaggugcgugcuaccacgcccagcuacu

SEQ ID NO: 39844 - RNA, 32 nt, Human
acuacaggugugagccaccacucccagccuga

SEQ ID NO: 39845 - RNA, 32 nt, Human
acuacaggugugagccaccaugcccggccuuc

SEQ ID NO: 39846 - RNA, 32 nt, Human
acuacaggugugagucaccaaagcccaguuaa

SEQ ID NO: 39847 - RNA, 32 nt, Human
acuacaggugugcaccaccaugcccagcuagu

SEQ ID NO: 39848 - RNA, 32 nt, Human
acuacaggugugcaccaccaugcccagguaau

SEQ ID NO: 39849 - RNA, 32 nt, Human
acuacaggugugcgccaccacgcccagcuaau

SEQ ID NO: 39850 - RNA, 32 nt, Human
acuacaggugugugccaccacacccagagagu

SEQ ID NO: 39851 - RNA, 32 nt, Human
acuacagguguucuuaggaggcugcuggagaa

SEQ ID NO: 39852 - RNA, 32 nt, Human
acuacaguacagugagugaccccagccuccug

SEQ ID NO: 39853 - RNA, 32 nt, Human
acuacaguagacacaagggcuggacaugcaga

SEQ ID NO: 39854 - RNA, 17 nt, Human
acuacaguauuuacuga

SEQ ID NO: 39855 - RNA, 32 nt, Human
acuacaguauuuuuaaguagcccucuaaauac

SEQ ID NO: 39856 - RNA, 31 nt, Human
acuacagucaccaaggagggauuuggggaau

SEQ ID NO: 39857 - RNA, 32 nt, Human
acuacaguucaucacaggguucagcagaguac

SEQ ID NO: 39858 - RNA, 20 nt, Human
acuacaguugcugucacuga

SEQ ID NO: 39859 - RNA, 20 nt, Human
acuacaguuuccuacaugug

SEQ ID NO: 39860 - RNA, 32 nt, Human
acuacaguuuuaaaaagaagaaaggagagcgu

SEQ ID NO: 39861 - RNA, 32 nt, Human
acuacauaaaacuugauucuguuucucuacuu

SEQ ID NO: 39862 - RNA, 32 nt, Human
acuacauacaucuucugcugguguuuuguuca

SEQ ID NO: 39863 - RNA, 32 nt, Human
acuacauccauaguuucuggugaaccuguaau

SEQ ID NO: 39864 - RNA, 32 nt, Human
acuacaucccacauuaguguucuuuauauacc

SEQ ID NO: 39865 - RNA, 32 nt, Human
acuacauccgcaugggcacccaacccaucuau

SEQ ID NO: 39866 - RNA, 32 nt, Human
acuacaucugagauggagaccuuuccucugcu

SEQ ID NO: 39867 - RNA, 32 nt, Human
acuacaucuguaacuagugaauacucuguuga

SEQ ID NO: 39868 - RNA, 22 nt, Human
acuacaugcacuuggcugcaua

SEQ ID NO: 39869 - RNA, 32 nt, Human
acuacaugcgugacucacaggcagccaaggac

SEQ ID NO: 39870 - RNA, 32 nt, Human
acuacauggaacauucuccaggauagccauau

SEQ ID NO: 39871 - RNA, 32 nt, Human
acuacauguuaaguuacacugaaaguucaugu

SEQ ID NO: 39872 - RNA, 32 nt, Human
acuacauuagaagagagcauuucuccauuguc

SEQ ID NO: 39873 - RNA, 32 nt, Human
acuacauuuauuggucccuccuccuuuccagc

SEQ ID NO: 39874 - RNA, 32 nt, Human
acuaccaaagaaacaaauacuccucaguuuga

SEQ ID NO: 39875 - RNA, 32 nt, Human
acuaccaaguauacuggugaaaucucgauggg

SEQ ID NO: 39876 - RNA, 32 nt, Human
acuaccaauuccagguuaacuuuguuggagaa

SEQ ID NO: 39877 - RNA, 32 nt, Human
acuaccaccucaccugguccucagucagaaac

SEQ ID NO: 39878 - RNA, 32 nt, Human
acuaccaccuccuggguucaagcgauucgccu

SEQ ID NO: 39879 - RNA, 32 nt, Human
acuaccaccugugucuggacacaugcuuaugu

SEQ ID NO: 39880 - RNA, 32 nt, Human
acuaccacuccaagccuggccccaccagugcu

SEQ ID NO: 39881 - RNA, 32 nt, Human
acuaccagaccucacguguugcagugauaaca

SEQ ID NO: 39882 - RNA, 24 nt, Human
acuaccagccugggaggcccaggu

SEQ ID NO: 39883 - RNA, 32 nt, Human
acuaccaggaaggggagcggcugggauggcgc

SEQ ID NO: 39884 - RNA, 32 nt, Human
acuaccaguccucugcaguuacauggccacau

SEQ ID NO: 39885 - RNA, 32 nt, Human
acuaccauccauccuauuugaauuaucaagca

SEQ ID NO: 39886 - RNA, 32 nt, Human
acuaccaucccaccaccugcugaggagaaaaa

SEQ ID NO: 39887 - RNA, 32 nt, Human
acuaccaucggugggccaguucugccucucug

SEQ ID NO: 39888 - RNA, 32 nt, Human
acuacccaaccccaccaccacugccaccucca

SEQ ID NO: 39889 - RNA, 32 nt, Human
acuacccacaugcaccaccaugcacggcuaau

SEQ ID NO: 39890 - RNA, 32 nt, Human
acuacccacaugcugaucuauuggggaacaga

SEQ ID NO: 39891 - RNA, 32 nt, Human
acuacccacguagugaaucuuuugucugcaau

SEQ ID NO: 39892 - RNA, 32 nt, Human
acuacccaugucuccacgaaggcguccuggag

SEQ ID NO: 39893 - RNA, 32 nt, Human
acuaccccacaggauuucagacuugcaugggg

SEQ ID NO: 39894 - RNA, 32 nt, Human
acuaccccaucaaccuugcugccaucaagaug

SEQ ID NO: 39895 - RNA, 20 nt, Human
acuacccccggagggaggag

SEQ ID NO: 39896 - RNA, 32 nt, Human
acuaccccggccccagcacccgccaggaugug

SEQ ID NO: 39897 - RNA, 32 nt, Human
acuaccccuccagcaacugggaggugggacug

SEQ ID NO: 39898 - RNA, 32 nt, Human
acuaccccugcaccuguuccccugcugucccc

SEQ ID NO: 39899 - RNA, 32 nt, Human
acuaccccuguagcugugaaccuccgggcuca

SEQ ID NO: 39900 - RNA, 32 nt, Human
acuacccugcuuacuggugccugcugccagcc

SEQ ID NO: 39901 - RNA, 32 nt, Human
acuacccuucuccuuuccuucccaggcccuuu

SEQ ID NO: 39902 - RNA, 19 nt, Human
acuaccgcccugggaggaa

SEQ ID NO: 39903 - RNA, 32 nt, Human
acuaccggcgcacgccaccacgcccagcuaau

SEQ ID NO: 39904 - RNA, 32 nt, Human
acuaccgggcugcaaucaaagcagaaaggauc

SEQ ID NO: 39905 - RNA, 20 nt, Human
acuaccguuuauuuuacuga

SEQ ID NO: 39906 - RNA, 32 nt, Human
acuaccuaacggauagcauuuguaaauacucu

SEQ ID NO: 39907 - RNA, 32 nt, Human
acuaccuaauuuaaaagaagaagacauuuuga

SEQ ID NO: 39908 - RNA, 32 nt, Human
acuaccuaccggcuccaguggugggacuucac

SEQ ID NO: 39909 - RNA, 32 nt, Human
acuaccuaggaggcagaagcuaagugauuugc

SEQ ID NO: 39910 - RNA, 32 nt, Human
acuaccuauaguccaaaauccccaccucacag

SEQ ID NO: 39911 - RNA, 32 nt, Human
acuaccuauaguccaaaauccccaucucacag

SEQ ID NO: 39912 - RNA, 32 nt, Human
acuaccuauauguaugugcuguaugugggcau

SEQ ID NO: 39913 - RNA, 32 nt, Human
acuaccuccuuuccccuagauuuccuuucauu

SEQ ID NO: 39914 - RNA, 32 nt, Human
acuaccucgacuucucuuucugcuccacacgu

SEQ ID NO: 39915 - RNA, 32 nt, Human
acuaccucuagacugcccucccgggcuggcgu

SEQ ID NO: 39916 - RNA, 31 nt, Human
acuaccucucucuucuggccugugucuaagg

SEQ ID NO: 39917 - RNA, 32 nt, Human
acuaccugacucaggaaucggcucuggaaggu

SEQ ID NO: 39918 - RNA, 32 nt, Human
acuaccugagaguuaucagagcugggguugug

SEQ ID NO: 39919 - RNA, 32 nt, Human
acuaccugaugccaggagcuuagggcuuugca

SEQ ID NO: 39920 - RNA, 32 nt, Human
acuaccugaugggcacauggacaggcugcaga

SEQ ID NO: 39921 - RNA, 22 nt, Human
acuaccugcauaggagacccug

SEQ ID NO: 39922 - RNA, 32 nt, Human
acuaccugcccagaaaaaugcuggaggcuggg

SEQ ID NO: 39923 - RNA, 20 nt, Human
acuaccugccuuguaacccu

SEQ ID NO: 39924 - RNA, 19 nt, Human
acuaccugggacaagguga

SEQ ID NO: 39925 - RNA, 18 nt, Human
acuaccugggugacagga

SEQ ID NO: 39926 - RNA, 32 nt, Human
acuaccugucccaguacacgaaagggcgcugg

SEQ ID NO: 39927 - RNA, 32 nt, Human
acuaccuguucugcaggcggguccuggccucc

SEQ ID NO: 39928 - RNA, 32 nt, Human
acuaccuuccaaagugcugggauuacaggcgu

SEQ ID NO: 39929 - RNA, 32 nt, Human
acuaccuucccacccauacacauccauguuca

SEQ ID NO: 39930 - RNA, 32 nt, Human
acuaccuugucaugauccuccuucuuuuuccu

SEQ ID NO: 39931 - RNA, 25 nt, Human
acuaccuugugauucaaccauuuca

SEQ ID NO: 39932 - RNA, 32 nt, Human
acuaccuuucaaaaccagcacugugugggaau

SEQ ID NO: 39933 - RNA, 32 nt, Human
acuaccuuucccagcagcucaggcucaacugg

SEQ ID NO: 39934 - RNA, 32 nt, Human
acuaccuuuguccaggccugggugguauaggg

SEQ ID NO: 39935 - RNA, 32 nt, Human
acuacgagcaggcgaacgccacccucaaucag

SEQ ID NO: 39936 - RNA, 32 nt, Human
acuacgagugagugaggcugggaggaacacca

SEQ ID NO: 39937 - RNA, 32 nt, Human
acuacgcacagacucgacggugccaucagcau

SEQ ID NO: 39938 - RNA, 32 nt, Human
acuacgccaaaaccacacugaccaggcacuug

SEQ ID NO: 39939 - RNA, 32 nt, Human
acuacgccacugcacuccagccuggaggccag

SEQ ID NO: 39940 - RNA, 22 nt, Human
acuacgcccaucuccuaccuca

SEQ ID NO: 39941 - RNA, 32 nt, Human
acuacgcuacuugguugagccuggugaagaau

SEQ ID NO: 39942 - RNA, 32 nt, Human
acuacggagcccaugcccuggaggaacucugu

SEQ ID NO: 39943 - RNA, 32 nt, Human
acuacggaggggaacugcagagccagaagagc

SEQ ID NO: 39944 - RNA, 32 nt, Human
acuacggcacugcuccaggcaggccugguuau

SEQ ID NO: 39945 - RNA, 32 nt, Human
acuacgggcacacaccaccaugccuggcuaau

SEQ ID NO: 39946 - RNA, 32 nt, Human
acuacggggcggugccugcuguggaaaugccu

SEQ ID NO: 39947 - RNA, 32 nt, Human
acuacgggugugcgccaccacgcccagcuaau

SEQ ID NO: 39948 - RNA, 32 nt, Human
acuacgguaggugccuggcggaagggaguggg

SEQ ID NO: 39949 - RNA, 32 nt, Human
acuacgugaucugauugagauguacauaguuu

SEQ ID NO: 39950 - RNA, 32 nt, Human
acuacuacagaaguccagauaccacagucuga

SEQ ID NO: 39951 - RNA, 32 nt, Human
acuacuacccauucagaagagcagaaagcauc

SEQ ID NO: 39952 - RNA, 32 nt, Human
acuacuacccauucagaagagcagaaaguauc

SEQ ID NO: 39953 - RNA, 32 nt, Human
acuacuaucaccgaccuucccuagccgcugga

SEQ ID NO: 39954 - RNA, 32 nt, Human
acuacuauggaaugcaaagauuuggaaccaca

SEQ ID NO: 39955 - RNA, 32 nt, Human
acuacucagcuuucuuucagucaacccauaag

SEQ ID NO: 39956 - RNA, 32 nt, Human
acuacuccagaggcugaggugggaggauggcu

SEQ ID NO: 39957 - RNA, 32 nt, Human
acuacuccagccugggugacaaaguaagaccc

SEQ ID NO: 39958 - RNA, 32 nt, Human
acuacuccggagacaggguuuggcugugucua

SEQ ID NO: 39959 - RNA, 32 nt, Human
acuacuccggagucaggaggcagcagcggcgg

SEQ ID NO: 39960 - RNA, 32 nt, Human
acuacuccuccaggcccccagccugggacagc

SEQ ID NO: 39961 - RNA, 32 nt, Human
acuacuccucuccuccuccuccuccucuuccu

SEQ ID NO: 39962 - RNA, 32 nt, Human
acuacucucucucagaucccaggauuggcaug

SEQ ID NO: 39963 - RNA, 32 nt, Human
acuacucugccuuuuaaugucucauuuugccu

SEQ ID NO: 39964 - RNA, 32 nt, Human
acuacugaggugucaaguccugccuuuccuuu

SEQ ID NO: 39965 - RNA, 32 nt, Human
acuacugaucacuggggcaaaucaaagcaucc

SEQ ID NO: 39966 - RNA, 32 nt, Human
acuacugauguucacgaugccacacagucaca

SEQ ID NO: 39967 - RNA, 32 nt, Human
acuacugcacuccagccugggugacagaguaa

SEQ ID NO: 39968 - RNA, 32 nt, Human
acuacugcacuccagccugggugacagaguga

SEQ ID NO: 39969 - RNA, 32 nt, Human
acuacugcacuugagcaugaauggguaguagc

SEQ ID NO: 39970 - RNA, 32 nt, Human
acuacugcacuugcacugcccuuacuuugaag

SEQ ID NO: 39971 - RNA, 32 nt, Human
acuacugcagcagucccugaaccacuaaacuu

SEQ ID NO: 39972 - RNA, 32 nt, Human
acuacugcauuccagccugggugacagaguga

SEQ ID NO: 39973 - RNA, 32 nt, Human
acuacugcccugccuugggccuugcugcugcu

SEQ ID NO: 39974 - RNA, 32 nt, Human
acuacugccucaccucaggaagcacauaaugu

SEQ ID NO: 39975 - RNA, 32 nt, Human
acuacugccucuaccagaaaugucuuuuaaua

SEQ ID NO: 39976 - RNA, 32 nt, Human
acuacugccugccugccugccugcuacggcuc

SEQ ID NO: 39977 - RNA, 32 nt, Human
acuacugccugccugccugccugcuacgguga

SEQ ID NO: 39978 - RNA, 32 nt, Human
acuacugccuggcuaauuuuuauguuuuuagu

SEQ ID NO: 39979 - RNA, 32 nt, Human
acuacugcuggggccuuccuucauccucugag

SEQ ID NO: 39980 - RNA, 32 nt, Human
acuacugcuggggcugccaccuccuccuccag

SEQ ID NO: 39981 - RNA, 32 nt, Human
acuacugcuuuuccuaaaugcauacuguauau

SEQ ID NO: 39982 - RNA, 32 nt, Human
acuacuggcaaagcacuugcauuuuucauuag

SEQ ID NO: 39983 - RNA, 32 nt, Human
acuacugggcaaagaguguagaucagagcagc

SEQ ID NO: 39984 - RNA, 32 nt, Human
acuacugguguuuuucugccuugagaaaacaa

SEQ ID NO: 39985 - RNA, 32 nt, Human
acuacuguaaguuuuguuuuucacaaagcucu

SEQ ID NO: 39986 - RNA, 32 nt, Human
acuacuguacuacuguacuccagccuggggga

SEQ ID NO: 39987 - RNA, 32 nt, Human
acuacugugacuuugucugcagaagagcugga

SEQ ID NO: 39988 - RNA, 17 nt, Human
acuacugugcuucuugg

SEQ ID NO: 39989 - RNA, 18 nt, Human
acuacugugggccacugg

SEQ ID NO: 39990 - RNA, 16 nt, Human
acuacuguguuccugg

SEQ ID NO: 39991 - RNA, 18 nt, Human
acuacuguguugcacugg

SEQ ID NO: 39992 - RNA, 18 nt, Human
acuacuguguuucacuga

SEQ ID NO: 39993 - RNA, 32 nt, Human
acuacuguuuauuuuucccugcugugcccaga

SEQ ID NO: 39994 - RNA, 32 nt, Human
acuacuguuuccaagauaaaugagcuaauaag

SEQ ID NO: 39995 - RNA, 32 nt, Human
acuacuucaaugaucauuucacaagaaaaaga

SEQ ID NO: 39996 - RNA, 32 nt, Human
acuacuucauuuuaaugugagggauuuguuua

SEQ ID NO: 39997 - RNA, 32 nt, Human
acuacuuccucacacuuacugaacauguacuc

SEQ ID NO: 39998 - RNA, 32 nt, Human
acuacuucucccugguuucauucauguucuga

SEQ ID NO: 39999 - RNA, 32 nt, Human
acuacuugaucuugugaacacuggaaagacug

SEQ ID NO: 40000 - RNA, 32 nt, Human
acuacuuguuacugccaugcugcuugcccucc

SEQ ID NO: 40001 - RNA, 32 nt, Human
acuacuuucaagguauuuuucuuccaagcuga

SEQ ID NO: 40002 - RNA, 32 nt, Human
acuacuuucauucaggcuggagugcaguggca

SEQ ID NO: 40003 - RNA, 32 nt, Human
acuacuuuguucuuugguuaagauccaaaaga

SEQ ID NO: 40004 - RNA, 32 nt, Human
acuacuuuuaaaaaguuugaaaauuagaggac

SEQ ID NO: 40005 - RNA, 32 nt, Human
acuacuuuugacaacgccucaaacuuuucuaa

SEQ ID NO: 40006 - RNA, 32 nt, Human
acuagaaaagagacaguucuucugcugacaac

SEQ ID NO: 40007 - RNA, 32 nt, Human
acuagaaaaggcagaaagcaguguauuaaggu

SEQ ID NO: 40008 - RNA, 19 nt, Human
acuagaaaaucuaaucuua

SEQ ID NO: 40009 - RNA, 32 nt, Human
acuagaaaaugagaaaauugucuggguuccaa

SEQ ID NO: 40010 - RNA, 32 nt, Human
acuagaaacauacauuauucaucaaaagaaau

SEQ ID NO: 40011 - RNA, 32 nt, Human
acuagaaauacagaaaaauuagcugggugugg

SEQ ID NO: 40012 - RNA, 32 nt, Human
acuagaacccugucuccuacuuccuaguguaa

SEQ ID NO: 40013 - RNA, 32 nt, Human
acuagaacccuugucuuccucuuacccaaauu

SEQ ID NO: 40014 - RNA, 32 nt, Human
acuagaaccgggaggcggaaguugcagugagc

SEQ ID NO: 40015 - RNA, 32 nt, Human
acuagaagaccuucauccuccccuuccucugc

SEQ ID NO: 40016 - RNA, 32 nt, Human
acuagaagcugcauaagcuacacaggaugugc

SEQ ID NO: 40017 - RNA, 32 nt, Human
acuagaagcuucagcccggaagacaggcugcu

SEQ ID NO: 40018 - RNA, 32 nt, Human
acuagaaucaauuuguuccuuguuaaaggccu

SEQ ID NO: 40019 - RNA, 32 nt, Human
acuagaauggcagcggcagcaaauagggcucc

SEQ ID NO: 40020 - RNA, 32 nt, Human
acuagaaugugagcuccuuaagggcaggaaaa

SEQ ID NO: 40021 - RNA, 24 nt, Human
acuagaauuagaagcagagccuga

SEQ ID NO: 40022 - RNA, 32 nt, Human
acuagaauuuugaagacaggaaaguggagguu

SEQ ID NO: 40023 - RNA, 32 nt, Human
acuagacaaagaaccugcaucaauaucaggac

SEQ ID NO: 40024 - RNA, 32 nt, Human
acuagacagccaggagcccagcagaacaagug

SEQ ID NO: 40025 - RNA, 32 nt, Human
acuagacagccccucugagcacaugcauagug

SEQ ID NO: 40026 - RNA, 32 nt, Human
acuagacagccuguccguccgccauggcuucc

SEQ ID NO: 40027 - RNA, 32 nt, Human
acuagacaucucaucagccacuugugugaaga

SEQ ID NO: 40028 - RNA, 32 nt, Human
acuagacccacagacaugaaaagcaaccuuag

SEQ ID NO: 40029 - RNA, 32 nt, Human
acuagacccacuggacucaccucccccaucuc

SEQ ID NO: 40030 - RNA, 32 nt, Human
acuagaccccacaccagggcacccuaagaggg

SEQ ID NO: 40031 - RNA, 32 nt, Human
acuagaccucaagacuccauaaguagcucuca

SEQ ID NO: 40032 - RNA, 32 nt, Human
acuagaccucugucugugucgguccagugucu

SEQ ID NO: 40033 - RNA, 32 nt, Human
acuagacucuaacccagcaccagggugcccac

SEQ ID NO: 40034 - RNA, 32 nt, Human
acuagacuugaaaagaaaccauuugagauuug

SEQ ID NO: 40035 - RNA, 32 nt, Human
acuagacuuuucuauuggccugugccaucgcc

SEQ ID NO: 40036 - RNA, 32 nt, Human
acuagagaauucugugcaaacauaucaucucu

SEQ ID NO: 40037 - RNA, 32 nt, Human
acuagagacgggcacccaggcugcagugugug

SEQ ID NO: 40038 - RNA, 32 nt, Human
acuagagaggcugaggcaggagaaucacuuga

SEQ ID NO: 40039 - RNA, 32 nt, Human
acuagagagggagggggaagagcagaaguuag

SEQ ID NO: 40040 - RNA, 32 nt, Human
acuagagagguugaggugggaggaucacuuga

SEQ ID NO: 40041 - RNA, 32 nt, Human
acuagagcauccugccugccuucuccacugag

SEQ ID NO: 40042 - RNA, 32 nt, Human
acuagagcgacugucagugugguuggcaguga

SEQ ID NO: 40043 - RNA, 32 nt, Human
acuagagggagugggguugcaguggcugccug

SEQ ID NO: 40044 - RNA, 32 nt, Human
acuagagugagcaaucauaccuuauaaaugac

SEQ ID NO: 40045 - RNA, 32 nt, Human
acuagaguuccuugugggauuggaccagcauu

SEQ ID NO: 40046 - RNA, 32 nt, Human
acuagaugacucuguaaagacucuccaggcca

SEQ ID NO: 40047 - RNA, 32 nt, Human
acuagauggcuccaucccaaggcaucuuguca

SEQ ID NO: 40048 - RNA, 32 nt, Human
acuagaugugugugugcacacacacagaaacc

SEQ ID NO: 40049 - RNA, 32 nt, Human
acuagauuagcaggcaaaacuaugaugguuug

SEQ ID NO: 40050 - RNA, 32 nt, Human
acuagauuagugcuuucuagcaaacgguucug

SEQ ID NO: 40051 - RNA, 32 nt, Human
acuagauugcaugcuuccuccuuugcucuugg

SEQ ID NO: 40052 - RNA, 32 nt, Human
acuagauugugagcuccuugagggaaaggaac

SEQ ID NO: 40053 - RNA, 32 nt, Human
acuagcaauauaggguuuuguuugguugguug

SEQ ID NO: 40054 - RNA, 32 nt, Human
acuagcaauguucauacuuaauaaaaacauua

SEQ ID NO: 40055 - RNA, 32 nt, Human
acuagcacaccacugcaugucucuagaaugcu

SEQ ID NO: 40056 - RNA, 32 nt, Human
acuagcagaggcacuuucgcagcccacccugc

SEQ ID NO: 40057 - RNA, 32 nt, Human
acuagcagaggcuagacccagaaagagggaac

SEQ ID NO: 40058 - RNA, 32 nt, Human
acuagcaggaacagacuugggaccaaaaaucc

SEQ ID NO: 40059 - RNA, 32 nt, Human
acuagcaggagaaaggccacaaggccugcgug

SEQ ID NO: 40060 - RNA, 32 nt, Human
acuagcauccaccaaaugcaagaagaauaaac

SEQ ID NO: 40061 - RNA, 32 nt, Human
acuagcaugcagauacccaugcucugacuuuc

SEQ ID NO: 40062 - RNA, 32 nt, Human
acuagcaugccuguguucccagcuacuuggga

SEQ ID NO: 40063 - RNA, 32 nt, Human
acuagcauguguuucugcaguuuguuacacac

SEQ ID NO: 40064 - RNA, 32 nt, Human
acuagcauuuauuaggggaaaaugagguucuc

SEQ ID NO: 40065 - RNA, 31 nt, Human
acuagccacagcuaagcuccacaaagccuag

SEQ ID NO: 40066 - RNA, 32 nt, Human
acuagccacuccugccaggccgccgggauggu

SEQ ID NO: 40067 - RNA, 32 nt, Human
acuagccagaugcagugcaagguguacgacuc

SEQ ID NO: 40068 - RNA, 32 nt, Human
acuagccagcugugggcucuucagcaaaccac

SEQ ID NO: 40069 - RNA, 32 nt, Human
acuagccagcuuccucgcaucuucaccagcau

SEQ ID NO: 40070 - RNA, 32 nt, Human
acuagccaggcagggcugggcgcgguggcuca

SEQ ID NO: 40071 - RNA, 19 nt, Human
acuagcccaaccaacaugg

SEQ ID NO: 40072 - RNA, 32 nt, Human
acuagcccaggcccuggaaaagggagggcacu

SEQ ID NO: 40073 - RNA, 32 nt, Human
acuagccgaagagauuccucugaaaaucuugg

SEQ ID NO: 40074 - RNA, 32 nt, Human
acuagccgccccaaggcccccaaaaggcaacc

SEQ ID NO: 40075 - RNA, 32 nt, Human
acuagccuaggcaacauagugagacccugucu

SEQ ID NO: 40076 - RNA, 32 nt, Human
acuagccuagguaacauagugagacccugucu

SEQ ID NO: 40077 - RNA, 32 nt, Human
acuagccucuagccacacagguuccaucccaa

SEQ ID NO: 40078 - RNA, 24 nt, Human
acuagccugaccaacauggugaaa

SEQ ID NO: 40079 - RNA, 32 nt, Human
acuagccugcacaacauacugagacccugacu

SEQ ID NO: 40080 - RNA, 32 nt, Human
acuagccuggacaacauacuaaaaccucaucu

SEQ ID NO: 40081 - RNA, 32 nt, Human
acuagccuggacaacaucgugaaaccuugucu

SEQ ID NO: 40082 - RNA, 32 nt, Human
acuagccuggacaacuaagugagacuccaucu

SEQ ID NO: 40083 - RNA, 32 nt, Human
acuagccuggacagcauggcaaaacccuaucu

SEQ ID NO: 40084 - RNA, 32 nt, Human
acuagccuggagcuacccgucuggacucgcag

SEQ ID NO: 40085 - RNA, 21 nt, Human
acuagccuggccaacacggug

SEQ ID NO: 40086 - RNA, 24 nt, Human
acuagccuggccaacacggugaaa

SEQ ID NO: 40087 - RNA, 21 nt, Human
acuagccuggccaacauagca

SEQ ID NO: 40088 - RNA, 24 nt, Human
acuagccuggccaacauagugaaa

SEQ ID NO: 40089 - RNA, 19 nt, Human
acuagccuggccaacaugg

SEQ ID NO: 40090 - RNA, 24 nt, Human
acuagccuggccaacauggugaaa

SEQ ID NO: 40091 - RNA, 24 nt, Human
acuagccuggccaagauggugaaa

SEQ ID NO: 40092 - RNA, 20 nt, Human
acuagccuggccaauauggu

SEQ ID NO: 40093 - RNA, 32 nt, Human
acuagccugggcaacauaaugagaccccaucu

SEQ ID NO: 40094 - RNA, 24 nt, Human
acuagccugggcaacaugaugaaa

SEQ ID NO: 40095 - RNA, 24 nt, Human
acuagccugggcaacauggugaaa

SEQ ID NO: 40096 - RNA, 32 nt, Human
acuagccugggcaacauggugagaccccaucu

SEQ ID NO: 40097 - RNA, 32 nt, Human
acugaaaggagguggggucacagugaauuuca

SEQ ID NO: 40098 - RNA, 32 nt, Human
acugaaaggcugugaccagccugguggcgcga

SEQ ID NO: 40099 - RNA, 27 nt, Human
acugaaagggaaaacaaaauacuugac

SEQ ID NO: 40100 - RNA, 32 nt, Human
acugaaaggggucccaacagaggugaagaucc

SEQ ID NO: 40101 - RNA, 32 nt, Human
acugaaaggucuguggccaucugugagguaga

SEQ ID NO: 40102 - RNA, 32 nt, Human
acugaaauacaaaacuuaaccgggcuuggugg

SEQ ID NO: 40103 - RNA, 32 nt, Human
acugaaauacaaaagaaauuagccaggugugg

SEQ ID NO: 40104 - RNA, 32 nt, Human
acugaaaucuccugcugacuuugagagcugag

SEQ ID NO: 40105 - RNA, 19 nt, Human
acugaaauggaagauccug

SEQ ID NO: 40106 - RNA, 32 nt, Human
acugaaauggcugaggugggguuugggguauc

SEQ ID NO: 40107 - RNA, 32 nt, Human
acugaaauuguuuuaccagcucccagggugga

SEQ ID NO: 40108 - RNA, 21 nt, Human
acugaaauuuggaaaaaggca

SEQ ID NO: 40109 - RNA, 32 nt, Human
acugaacaaccugcuccugaaugacuacuggg

SEQ ID NO: 40110 - RNA, 19 nt, Human
acugaacaacuguugggau

SEQ ID NO: 40111 - RNA, 32 nt, Human
acugaacaaugagacaauguugaggacucaaa

SEQ ID NO: 40112 - RNA, 32 nt, Human
acugaacacaaggggagggaaagaucauuaca

SEQ ID NO: 40113 - RNA, 32 nt, Human
acugaacacauccagccacaggcaccagcugg

SEQ ID NO: 40114 - RNA, 23 nt, Human
acugaacaccacagugcccgcca

SEQ ID NO: 40115 - RNA, 32 nt, Human
acugaacaccuugagaggaaggacugugucuu

SEQ ID NO: 40116 - RNA, 32 nt, Human
acugaacaggcaggccacuuugccucuaaauu

SEQ ID NO: 40117 - RNA, 32 nt, Human
acugaacauagcuguauagguuugugauuauu

SEQ ID NO: 40118 - RNA, 32 nt, Human
acugaacccauuacuuuuccaagaccagaaaa

SEQ ID NO: 40119 - RNA, 32 nt, Human
acugaacccgggaggcggaggcugcagugggc

SEQ ID NO: 40120 - RNA, 32 nt, Human
acugaaccucucucuaguagccuggauuuauc

SEQ ID NO: 40121 - RNA, 32 nt, Human
acugaaccucugccgguuaagaugguguuagg

SEQ ID NO: 40122 - RNA, 32 nt, Human
acugaacgcugagccggggagguccaacucca

SEQ ID NO: 40123 - RNA, 32 nt, Human
acugaacgcugcagggcagggaagaaauaaau

SEQ ID NO: 40124 - RNA, 32 nt, Human
acugaacuauuuucaaagcagaaaaauugaca

SEQ ID NO: 40125 - RNA, 32 nt, Human
acugaacucacaccugguaccacucagaaccu

SEQ ID NO: 40126 - RNA, 32 nt, Human
acugaacucaguguccaguauaaugcagaauu

SEQ ID NO: 40127 - RNA, 32 nt, Human
acugaacuccagccugggcaacagagugagau

SEQ ID NO: 40128 - RNA, 32 nt, Human
acugaacuccagccugggcaacaggugagauu

SEQ ID NO: 40129 - RNA, 32 nt, Human
acugaacuccagccugggugacagagugagac

SEQ ID NO: 40130 - RNA, 32 nt, Human
acugaacucugggcugcuucucuguguguaaa

SEQ ID NO: 40131 - RNA, 32 nt, Human
acugaacuguagaagcagagcagcagcaguua

SEQ ID NO: 40132 - RNA, 32 nt, Human
acugaacuuauaaaugugggcuguaauuccac

SEQ ID NO: 40133 - RNA, 32 nt, Human
acugaacuuauucaaccuacaggaggccacug

SEQ ID NO: 40134 - RNA, 32 nt, Human
acugaagaaaaaugccaaugugacguuugugu

SEQ ID NO: 40135 - RNA, 32 nt, Human
acugaagaaaaccacuaauaacaacaagaaua

SEQ ID NO: 40136 - RNA, 32 nt, Human
acugaagaaagagaacuccagaggguuugaca

SEQ ID NO: 40137 - RNA, 32 nt, Human
acugaagaacauccagaaaagauuuugacuga

SEQ ID NO: 40138 - RNA, 32 nt, Human
acugaagaaggugcauugauacauuuuuaaau

SEQ ID NO: 40139 - RNA, 32 nt, Human
acugaagacaccuuuugcaucucccccaucca

SEQ ID NO: 40140 - RNA, 32 nt, Human
acugaagagauagcuuucaagggcccaacacu

SEQ ID NO: 40141 - RNA, 32 nt, Human
acugaagagauugccugguucaucuuguaguc

SEQ ID NO: 40142 - RNA, 32 nt, Human
acugaagagcaucuccccacccagucaccuga

SEQ ID NO: 40143 - RNA, 32 nt, Human
acugaagaggaaaaggauacuggagaucuaaa

SEQ ID NO: 40144 - RNA, 32 nt, Human
acugaagaggcugaggugggaggaucgcuuga

SEQ ID NO: 40145 - RNA, 32 nt, Human
acugaagagggagggagggaggagugcugaag

SEQ ID NO: 40146 - RNA, 32 nt, Human
acugaagauuuuauuuauucuucucucugauu

SEQ ID NO: 40147 - RNA, 32 nt, Human
acugaagcagcaaacccacaaagcaucaaaag

SEQ ID NO: 40148 - RNA, 32 nt, Human
acugaagcagccccggagaaggagaaccgagu

SEQ ID NO: 40149 - RNA, 32 nt, Human
acugaagcaugucugaaaucuuccugccauca

SEQ ID NO: 40150 - RNA, 32 nt, Human
acugaagccacaggcugguggccauguucucu

SEQ ID NO: 40151 - RNA, 32 nt, Human
acugaagccucaaccucccuggguuugagcaa

SEQ ID NO: 40152 - RNA, 23 nt, Human
acugaagcucgagaagggccuga

SEQ ID NO: 40153 - RNA, 32 nt, Human
acugaagcugaaccucugccuuuaggaguccc

SEQ ID NO: 40154 - RNA, 32 nt, Human
acugaagcugcacucugaaaacugggcaguuu

SEQ ID NO: 40155 - RNA, 32 nt, Human
acugaaggaaccguaggagccugcucucagaa

SEQ ID NO: 40156 - RNA, 32 nt, Human
acugaaggcauggcggcggggugcaggggaaa

SEQ ID NO: 40157 - RNA, 32 nt, Human
acugaagggaccuuagcaaucaucucauccau

SEQ ID NO: 40158 - RNA, 32 nt, Human
acugaagggguaagcaaaccagauggauuuca

SEQ ID NO: 40159 - RNA, 32 nt, Human
acugaaggugaagauccaagauucuaaauucc

SEQ ID NO: 40160 - RNA, 19 nt, Human
acugaaggugggcaaggug

SEQ ID NO: 40161 - RNA, 32 nt, Human
acugaagguugcgaugccuuacucugacggga

SEQ ID NO: 40162 - RNA, 23 nt, Human
acugaaguaugggaggcuucuga

SEQ ID NO: 40163 - RNA, 32 nt, Human
acugaagucccaggcugggggugucaauggac

SEQ ID NO: 40164 - RNA, 28 nt, Human
acugaagucguacucuggggcccugcag

SEQ ID NO: 40165 - RNA, 32 nt, Human
acugaagugggucugugucacacagguauuuc

SEQ ID NO: 40166 - RNA, 32 nt, Human
acugaaguguugggcagagagggggcuuaagg

SEQ ID NO: 40167 - RNA, 32 nt, Human
acugaaguuagcugggugugguggcucaugcc

SEQ ID NO: 40168 - RNA, 32 nt, Human
acugaaguugcagauaaugaggacuuaccauu

SEQ ID NO: 40169 - RNA, 32 nt, Human
acugaaguuguggcauaugaaaaaggugcuuu

SEQ ID NO: 40170 - RNA, 32 nt, Human
acugaaguuuuguggcagagaagaacuuguua

SEQ ID NO: 40171 - RNA, 32 nt, Human
acugaauaaagaaaauaugguacauauucacc

SEQ ID NO: 40172 - RNA, 32 nt, Human
acugaauaaugugaggaagcagugauguuucu

SEQ ID NO: 40173 - RNA, 32 nt, Human
acugaauaauguuuuaaugauaggguauuaug

SEQ ID NO: 40174 - RNA, 32 nt, Human
acugaauacuauaggcaauugcagcacaaugg

SEQ ID NO: 40175 - RNA, 32 nt, Human
acugaauauaucauguccacaguagauuuuca

SEQ ID NO: 40176 - RNA, 28 nt, Human
acugaauauauuaaacacuaaaaaccug

SEQ ID NO: 40177 - RNA, 32 nt, Human
acugaauaucagauuugucaucaggaauacuc

SEQ ID NO: 40178 - RNA, 32 nt, Human
acugaaucaccaccccagaagagcgagaggcu

SEQ ID NO: 40179 - RNA, 32 nt, Human
acugaauccaacauauccacaagcaaguuauc

SEQ ID NO: 40180 - RNA, 32 nt, Human
acugaaucccugaacagagaauaucucuugua

SEQ ID NO: 40181 - RNA, 32 nt, Human
acugaauccuuuaacuuggccaaaggacccuu

SEQ ID NO: 40182 - RNA, 21 nt, Human
acugaaucgaagcaggccuga

SEQ ID NO: 40183 - RNA, 32 nt, Human
acugaaucgccacuacagccugggugcaaaau

SEQ ID NO: 40184 - RNA, 32 nt, Human
acugaaucuaccugccuaagggacuuaacuug

SEQ ID NO: 40185 - RNA, 32 nt, Human
acugaaucucagggauaaugggucaacccaga

SEQ ID NO: 40186 - RNA, 32 nt, Human
acugaaucuguagcuuccggauaccguagccc

SEQ ID NO: 40187 - RNA, 32 nt, Human
acugaaucugucuacccuucauucaugagaac

SEQ ID NO: 40188 - RNA, 32 nt, Human
acugaaucuucaagaccaaagcagaaaagaaa

SEQ ID NO: 40189 - RNA, 32 nt, Human
acugaaugacaugcaacaggugaagguuuaua

SEQ ID NO: 40190 - RNA, 32 nt, Human
acugaaugacucucugucuuacacagcuacuc

SEQ ID NO: 40191 - RNA, 32 nt, Human
acugaaugaguggagggcagagacaggccugg

SEQ ID NO: 40192 - RNA, 32 nt, Human
acugaaugcaaaccacaggguuucgcagcgug

SEQ ID NO: 40193 - RNA, 32 nt, Human
acugaaugccaggcuaggaaggaggcggcucu

SEQ ID NO: 40194 - RNA, 21 nt, Human
acugaaugccuccccaaaggc

SEQ ID NO: 40195 - RNA, 23 nt, Human
acugaauggagggcccccaggaa

SEQ ID NO: 40196 - RNA, 32 nt, Human
acugaaugggaaggaauguggauagcuuugga

SEQ ID NO: 40197 - RNA, 32 nt, Human
acugaauggggguggaccuggcauuuaucugg

SEQ ID NO: 40198 - RNA, 32 nt, Human
acugaauucugaacuuuucaggagguacugug

SEQ ID NO: 40199 - RNA, 32 nt, Human
acugaauuucaggaaaugggauagagcuucua

SEQ ID NO: 40200 - RNA, 32 nt, Human
acugaauuuccugcuuuccugguugaauuuuc

SEQ ID NO: 40201 - RNA, 32 nt, Human
acugaauuuucaguauuuuaucucaaguagau

SEQ ID NO: 40202 - RNA, 32 nt, Human
acugacaaaagcaaaucaauaacucuaaauuc

SEQ ID NO: 40203 - RNA, 32 nt, Human
acugacaaaucaugauaagggcacaaaagcug

SEQ ID NO: 40204 - RNA, 32 nt, Human
acugacaacucuuacgacagagggagaguggu

SEQ ID NO: 40205 - RNA, 32 nt, Human
acugacaaguagaaucaaaggugcagcugacu

SEQ ID NO: 40206 - RNA, 31 nt, Human
acugacaauugugucuccacagcagaggugg

SEQ ID NO: 40207 - RNA, 32 nt, Human
acugacacacagauugcaaagguccucggcca

SEQ ID NO: 40208 - RNA, 32 nt, Human
acugacacagccacaguuuccaaaaagugcag

SEQ ID NO: 40209 - RNA, 32 nt, Human
acugacaccuguaaucccagcacauugggagg

SEQ ID NO: 40210 - RNA, 32 nt, Human
acugacacuacccuuaguuuuaauuuucccug

SEQ ID NO: 40211 - RNA, 32 nt, Human
acugacacugucagcucuccuggguggcaaga

SEQ ID NO: 40212 - RNA, 32 nt, Human
acugacacuugguuccauccauuuaggggccu

SEQ ID NO: 40213 - RNA, 32 nt, Human
acugacagacggagugacagacggacugacca

SEQ ID NO: 40214 - RNA, 32 nt, Human
acugacagacuuagaaccugaggucucauuca

SEQ ID NO: 40215 - RNA, 32 nt, Human
acugacagauuguccgggcaaaccuggaaauu

SEQ ID NO: 40216 - RNA, 32 nt, Human
acugacagccagagacagcaggagaaggguug

SEQ ID NO: 40217 - RNA, 32 nt, Human
acugacagcccagaccccauacuuuaggucau

SEQ ID NO: 40218 - RNA, 32 nt, Human
acugacagcccgcagucuucuggacuucuuuu

SEQ ID NO: 40219 - RNA, 32 nt, Human
acugacagccucccacccccaucucucccucc

SEQ ID NO: 40220 - RNA, 32 nt, Human
acugacagccucugccccaggccugaguccuu

SEQ ID NO: 40221 - RNA, 32 nt, Human
acugacaggaggaaccaaggaggcacguaucu

SEQ ID NO: 40222 - RNA, 18 nt, Human
acugacaggaggcaaggu

SEQ ID NO: 40223 - RNA, 32 nt, Human
acugacaggcagagaauaggaauaugcagcug

SEQ ID NO: 40224 - RNA, 32 nt, Human
acugacaggccugauggagcuuguggcuggcc

SEQ ID NO: 40225 - RNA, 32 nt, Human
acugacaggugcugacuuuacaugcacugugg

SEQ ID NO: 40226 - RNA, 32 nt, Human
acugacaguauuaaggguaggauguugcucug

SEQ ID NO: 40227 - RNA, 32 nt, Human
acugacaguuucugaggcagaagccguaucau

SEQ ID NO: 40228 - RNA, 32 nt, Human
acugacauaagaaucaauaaaaugauuguuuu

SEQ ID NO: 40229 - RNA, 32 nt, Human
acugacauaccccauguacacacacagaucua

SEQ ID NO: 40230 - RNA, 24 nt, Human
acugacauaguaaagcucaacaaa

SEQ ID NO: 40231 - RNA, 32 nt, Human
acugacaugacuuggcuuucucauccagaaau

SEQ ID NO: 40232 - RNA, 32 nt, Human
acugacaugcauuauuuucacugugaauucac

SEQ ID NO: 40233 - RNA, 32 nt, Human
acugacaugccucugcugcuuuugcuuuguac

SEQ ID NO: 40234 - RNA, 31 nt, Human
acugacaugcucuucugacaucagacucaag

SEQ ID NO: 40235 - RNA, 23 nt, Human
acugacauuggaucacugacaaa

SEQ ID NO: 40236 - RNA, 32 nt, Human
acugaccaaguugggucccggguggggagccu

SEQ ID NO: 40237 - RNA, 32 nt, Human
acugaccacagccuuugugcuuuugaagccua

SEQ ID NO: 40238 - RNA, 32 nt, Human
acugaccacugaucucuggccuagcagccauu

SEQ ID NO: 40239 - RNA, 32 nt, Human
acugaccagcaaaauggagaagaucagagaau

SEQ ID NO: 40240 - RNA, 32 nt, Human
acugaccagcggcugcucaagccgcaagcucu

SEQ ID NO: 40241 - RNA, 32 nt, Human
acugaccaggauugugaaagaguucuucuguu

SEQ ID NO: 40242 - RNA, 32 nt, Human
acugaccaggggauagguugaggcagauggug

SEQ ID NO: 40243 - RNA, 32 nt, Human
acugaccagguaaucuggaccucagagauaga

SEQ ID NO: 40244 - RNA, 32 nt, Human
acugaccaucaucucaggaugucucuuucugg

SEQ ID NO: 40245 - RNA, 32 nt, Human
acugaccaucuccgacacagaaacccaucgaa

SEQ ID NO: 40246 - RNA, 32 nt, Human
acugaccaucuggacacacccugcugcgaauc

SEQ ID NO: 40247 - RNA, 32 nt, Human
acugaccaugaacaggauuucugcacgaaugu

SEQ ID NO: 40248 - RNA, 32 nt, Human
acugaccauggcccaacagcaaacaaaugaug

SEQ ID NO: 40249 - RNA, 32 nt, Human
acugacccacauuggcaccuguuaggagaccu

SEQ ID NO: 40250 - RNA, 32 nt, Human
acugacccacugcauuccagccuggcgacaga

SEQ ID NO: 40251 - RNA, 32 nt, Human
acugacccagaacaagcucaucuugaaggggg

SEQ ID NO: 40252 - RNA, 32 nt, Human
acugacccagaacacuggcccucggaaaccug

SEQ ID NO: 40253 - RNA, 32 nt, Human
acugacccaggaggagaaagcagccauuggca

SEQ ID NO: 40254 - RNA, 32 nt, Human
acugaccccagccaccacuucagugugauuua

SEQ ID NO: 40255 - RNA, 32 nt, Human
acugaccccagggcugaccaccagccucucau

SEQ ID NO: 40256 - RNA, 32 nt, Human
acugaccccucuuagaucuacuuccccugccc

SEQ ID NO: 40257 - RNA, 32 nt, Human
acugaccccuggcugcgacuucuccagcccag

SEQ ID NO: 40258 - RNA, 32 nt, Human
acugacccugcucucuccuuucccuguuagac

SEQ ID NO: 40259 - RNA, 32 nt, Human
acugacccuggucaccagaggcugcaauucag

SEQ ID NO: 40260 - RNA, 32 nt, Human
acugaccguaaaccacagacgcucuccagguu

SEQ ID NO: 40261 - RNA, 32 nt, Human
acugaccucaaauaaucccagcacuuugggag

SEQ ID NO: 40262 - RNA, 32 nt, Human
acugaccugccuguagccccagugacagcuag

SEQ ID NO: 40263 - RNA, 32 nt, Human
acugaccuguucuguugacuggggcccugcag

SEQ ID NO: 40264 - RNA, 20 nt, Human
acugaccuuaauauugggau

SEQ ID NO: 40265 - RNA, 32 nt, Human
acugacgcucacucugggcuucccaagcaccc

SEQ ID NO: 40266 - RNA, 32 nt, Human
acugacgguucccugaggauggggcuguuucu

SEQ ID NO: 40267 - RNA, 32 nt, Human
acugacguauguuucccuuugugaauuaauaa

SEQ ID NO: 40268 - RNA, 32 nt, Human
acugacgucuaccucauggggcugcugugugg

SEQ ID NO: 40269 - RNA, 32 nt, Human
acugacuaaaaauguugggcuaaagccauuaa

SEQ ID NO: 40270 - RNA, 31 nt, Human
acugacuacagcuagaaagccaggcgcacaa

SEQ ID NO: 40271 - RNA, 32 nt, Human
acugacuagauuuauucauaccaugagacaac

SEQ ID NO: 40272 - RNA, 32 nt, Human
acugacuagcugugccacucugggcaaaugcu

SEQ ID NO: 40273 - RNA, 32 nt, Human
acugacuaggguaguggggugcauuugguuuu

SEQ ID NO: 40274 - RNA, 22 nt, Human
acugacuaguacuccugggaug

SEQ ID NO: 40275 - RNA, 32 nt, Human
acugacuaguacuccugggaugccaugccacg

SEQ ID NO: 40276 - RNA, 32 nt, Human
acugacucaaagccaggggccgacagccuugu

SEQ ID NO: 40277 - RNA, 32 nt, Human
acugacucaccucucucuuucucagucccaaa

SEQ ID NO: 40278 - RNA, 32 nt, Human
acugacucaggaaaguuugucuaauuuggcac

SEQ ID NO: 40279 - RNA, 32 nt, Human
acugacuccagccaagaaaccugagccccuuu

SEQ ID NO: 40280 - RNA, 32 nt, Human
acugacuccagccucugcuccgggaggcccuc

SEQ ID NO: 40281 - RNA, 32 nt, Human
acugacuccauacauaaccuccuugaaaaacc

SEQ ID NO: 40282 - RNA, 32 nt, Human
acugacuccuguuugcucgcuggaccaacccc

SEQ ID NO: 40283 - RNA, 32 nt, Human
acugacucggcagugugcaguggugcaugcac

SEQ ID NO: 40284 - RNA, 32 nt, Human
acugacucuuccugcuuccucacuuucccagc

SEQ ID NO: 40285 - RNA, 32 nt, Human
acugacugacugcggccgccuccggccaggac

SEQ ID NO: 40286 - RNA, 32 nt, Human
acugacugcauggcagcugugugcucagcccg

SEQ ID NO: 40287 - RNA, 32 nt, Human
acugacugcccacugaccagagcccgggccag

SEQ ID NO: 40288 - RNA, 32 nt, Human
acugacugcccuuuuccaugugucuucauucu

SEQ ID NO: 40289 - RNA, 32 nt, Human
acugacuggaagggaaguucaggcucugagac

SEQ ID NO: 40290 - RNA, 32 nt, Human
acugacuggagcaggcauggcccaccaggcuu

SEQ ID NO: 40291 - RNA, 32 nt, Human
acugacuggauguguggggaguuuauaucacu

SEQ ID NO: 40292 - RNA, 32 nt, Human
acugacuggcagagacaggagagguagauguc

SEQ ID NO: 40293 - RNA, 29 nt, Human
acugacuggcugcagccuucccacgccaa

SEQ ID NO: 40294 - RNA, 32 nt, Human
acugacugggcaaggcuucuugggcaucgaug

SEQ ID NO: 40295 - RNA, 32 nt, Human
acugacugggucucaguauguugcccaggcug

SEQ ID NO: 40296 - RNA, 32 nt, Human
acugacugguccagaagacagaggguacaaca

SEQ ID NO: 40297 - RNA, 32 nt, Human
acugacuguaguuaauuuugucacagaaucua

SEQ ID NO: 40298 - RNA, 32 nt, Human
acugacuguguggcauggagcauggcuguucc

SEQ ID NO: 40299 - RNA, 32 nt, Human
acugacuuaugagaaagcaaagcacugguaca

SEQ ID NO: 40300 - RNA, 32 nt, Human
acugacuucaaaaugaggucacuugggcacag

SEQ ID NO: 40301 - RNA, 32 nt, Human
acugacuucucccacccuucugucucccccau

SEQ ID NO: 40302 - RNA, 32 nt, Human
acugacuugcuaugucacccugggcaagucac

SEQ ID NO: 40303 - RNA, 32 nt, Human
acugacuugcuccccucuccuuuucuucucuu

SEQ ID NO: 40304 - RNA, 32 nt, Human
acugacuuugauccuguuccacuuuugaaauu

SEQ ID NO: 40305 - RNA, 32 nt, Human
acugacuuugccuacggcaaagaaggaaaaac

SEQ ID NO: 40306 - RNA, 32 nt, Human
acugagaaaggagccacgggccagaucuuuug

SEQ ID NO: 40307 - RNA, 32 nt, Human
acugagaaaggagccacgguccagaucuuuug

SEQ ID NO: 40308 - RNA, 32 nt, Human
acugagaaaggggaaagggaagggugccacgu

SEQ ID NO: 40309 - RNA, 32 nt, Human
acugagaaaugccacagaaugugcaggaagcc

SEQ ID NO: 40310 - RNA, 32 nt, Human
acugagaacagaggacggccagugaguccaag

SEQ ID NO: 40311 - RNA, 24 nt, Human
acugagaaccaaaggaaggaucca

SEQ ID NO: 40312 - RNA, 32 nt, Human
acugagaagaguguauugacucugaguguaag

SEQ ID NO: 40313 - RNA, 32 nt, Human
acugagaagcaagaggaggagaaaaagauguc

SEQ ID NO: 40314 - RNA, 32 nt, Human
acugagaagcaugcacugugaccugcacaccc

SEQ ID NO: 40315 - RNA, 32 nt, Human
acugagaaggauggaagaaggagccaggcacc

SEQ ID NO: 40316 - RNA, 32 nt, Human
acugagaaguuuuaagagaugauaggguugga

SEQ ID NO: 40317 - RNA, 32 nt, Human
acugagaaucccugagugcccucugccccuuc

SEQ ID NO: 40318 - RNA, 32 nt, Human
acugagaaugugccacuggacucccagccugg

SEQ ID NO: 40319 - RNA, 32 nt, Human
acugagacaacaaugcaaguggguaauaguca

SEQ ID NO: 40320 - RNA, 21 nt, Human
acugagacaagcagggcuuga

SEQ ID NO: 40321 - RNA, 32 nt, Human
acugagacagccugagauauggccucauggga

SEQ ID NO: 40322 - RNA, 32 nt, Human
acugagaccaaggauucagcauuagaacaucu

SEQ ID NO: 40323 - RNA, 32 nt, Human
acugagaccagccugggcaacauagagagacc

SEQ ID NO: 40324 - RNA, 32 nt, Human
acugagaccauccuagccaacauggugaaaac

SEQ ID NO: 40325 - RNA, 32 nt, Human
acugagaccauccuagccaacauggugaaacc

SEQ ID NO: 40326 - RNA, 32 nt, Human
acugagaccauccuggccaacauggugaacac

SEQ ID NO: 40327 - RNA, 32 nt, Human
acugagacccaggccuggcaggaccgugccua

SEQ ID NO: 40328 - RNA, 32 nt, Human
acugagaccuguacugaauaagacaagagaaa

SEQ ID NO: 40329 - RNA, 32 nt, Human
acugagacggugggacacacgccccuaccugc

SEQ ID NO: 40330 - RNA, 32 nt, Human
acugagacuccagccucuccuccuggggccac

SEQ ID NO: 40331 - RNA, 32 nt, Human
acugagacugacacuucugcucccggccgccc

SEQ ID NO: 40332 - RNA, 32 nt, Human
acugagagacagaggcagcaucugccauucua

SEQ ID NO: 40333 - RNA, 32 nt, Human
acugagagagccagaggcagagaggugagggu

SEQ ID NO: 40334 - RNA, 32 nt, Human
acugagagagggcugauaaacuaggguccucc

SEQ ID NO: 40335 - RNA, 32 nt, Human
acugagagagggcuuaucacuauauccagcua

SEQ ID NO: 40336 - RNA, 32 nt, Human
acugagagagugaggagccagacgacaagcac

SEQ ID NO: 40337 - RNA, 22 nt, Human
acugagagccagauaccugcca

SEQ ID NO: 40338 - RNA, 32 nt, Human
acugagagcuggagaguuggugauaagcgaga

SEQ ID NO: 40339 - RNA, 32 nt, Human
acugagagcuuccaaaaugcccaggcaggcuc

SEQ ID NO: 40340 - RNA, 32 nt, Human
acugagaggcagcaaaggcggugacacucccc

SEQ ID NO: 40341 - RNA, 32 nt, Human
acugagaggccgaucacuugaggucaggaguu

SEQ ID NO: 40342 - RNA, 32 nt, Human
acugagaucauggcuaggaaacggagccugac

SEQ ID NO: 40343 - RNA, 32 nt, Human
acugagauccuccagccuggacaugcugccca

SEQ ID NO: 40344 - RNA, 32 nt, Human
acugagaucuaggcccucagcaaccagcucug

SEQ ID NO: 40345 - RNA, 32 nt, Human
acugagauugugccacuacacuccagccuggg

SEQ ID NO: 40346 - RNA, 32 nt, Human
acugagauugugccacugcacuccagccuggg

SEQ ID NO: 40347 - RNA, 32 nt, Human
acugagcaaucagcacaggccucuccucccaa

SEQ ID NO: 40348 - RNA, 32 nt, Human
acugagcacacagcaaugguaucaccuagaga

SEQ ID NO: 40349 - RNA, 32 nt, Human
acugagcaccgccaccauggggaaggggguug

SEQ ID NO: 40350 - RNA, 20 nt, Human
acugagcaccugcugggcug

SEQ ID NO: 40351 - RNA, 32 nt, Human
acugagcaccugcugggcugagcuucuaccua

SEQ ID NO: 40352 - RNA, 32 nt, Human
acugagcaccuguccuccgccucggccucugc

SEQ ID NO: 40353 - RNA, 32 nt, Human
acugagcaccuuaucuugccaccuuagccuua

SEQ ID NO: 40354 - RNA, 32 nt, Human
acugagcacgguagggcagccuggugagaggg

SEQ ID NO: 40355 - RNA, 32 nt, Human
acugagcagcgggaacugggggcucugcucau

SEQ ID NO: 40356 - RNA, 32 nt, Human
acugagcagcuggaagcacacuggcuaucugc

SEQ ID NO: 40357 - RNA, 32 nt, Human
acugagcaggaagaggauggaucaacaagggu

SEQ ID NO: 40358 - RNA, 32 nt, Human
acugagcaggguggcaaaauggaaaaggaaca

SEQ ID NO: 40359 - RNA, 32 nt, Human
acugagcagggugggaccagaggauaccucug

SEQ ID NO: 40360 - RNA, 22 nt, Human
acugagcaucaugccuggcaca

SEQ ID NO: 40361 - RNA, 32 nt, Human
acugagcauguggcuuucuauuucuauggaaa

SEQ ID NO: 40362 - RNA, 32 nt, Human
acugagccaaggaauacaaagauagcuaacac

SEQ ID NO: 40363 - RNA, 32 nt, Human
acugagccaaugacuuuaccagcugcugacua

SEQ ID NO: 40364 - RNA, 32 nt, Human
acugagccacagccugggccucccgggaggga

SEQ ID NO: 40365 - RNA, 32 nt, Human
acugagccacaggucccugaagaguccgcaga

SEQ ID NO: 40366 - RNA, 32 nt, Human
acugagccacagugaugcaugcuuuucgggga

SEQ ID NO: 40367 - RNA, 31 nt, Human
acugagccacccaaggagguggggacugcuc

SEQ ID NO: 40368 - RNA, 21 nt, Human
acugagccaccccagcauccu

SEQ ID NO: 40369 - RNA, 22 nt, Human
acugagccacgaucacaccauu

SEQ ID NO: 40370 - RNA, 32 nt, Human
acugagccacugcacuccagccugggcaauag

SEQ ID NO: 40371 - RNA, 21 nt, Human
acugagccgagaucacaccac

SEQ ID NO: 40372 - RNA, 32 nt, Human
acugagccgugcagcugggauuugaaccaggc

SEQ ID NO: 40373 - RNA, 32 nt, Human
acugagccuccagaugguagugaauggucucu

SEQ ID NO: 40374 - RNA, 32 nt, Human
acugagccuuucucccauugguagcuugcucu

SEQ ID NO: 40375 - RNA, 32 nt, Human
acugagcgccauggcccugccucugcugccgg

SEQ ID NO: 40376 - RNA, 32 nt, Human
acugagcgguaaugucauuagaucagauacaa

SEQ ID NO: 40377 - RNA, 32 nt, Human
acugagcuauugaaggccuuacuuuccagauc

SEQ ID NO: 40378 - RNA, 32 nt, Human
acugagcuccauaacacaagagaggcucugaa

SEQ ID NO: 40379 - RNA, 32 nt, Human
acugagcuccuuuguuccucccccuccagccu

SEQ ID NO: 40380 - RNA, 32 nt, Human
acugagcugacaguaaagcugcagugauugag

SEQ ID NO: 40381 - RNA, 32 nt, Human
acugagcugagcuguggcaugugggguccgag

SEQ ID NO: 40382 - RNA, 28 nt, Human
acugagcugagugcugcccuuuauuaaa

SEQ ID NO: 40383 - RNA, 32 nt, Human
acugagcugccuccugucucuccacucuggag

SEQ ID NO: 40384 - RNA, 32 nt, Human
acugagcugcuaaaauaaaccuguuuaagaga

SEQ ID NO: 40385 - RNA, 32 nt, Human
acugagcugggcaggacacaggcgagcucagg

SEQ ID NO: 40386 - RNA, 32 nt, Human
acugagcugucuucaguggaagcccgaggcag

SEQ ID NO: 40387 - RNA, 22 nt, Human
acugagcugugaucacaccacu

SEQ ID NO: 40388 - RNA, 32 nt, Human
acugagcuuccucuccccaggacccgcauggg

SEQ ID NO: 40389 - RNA, 32 nt, Human
acugagcuucuuucuccucccuuaguacauuc

SEQ ID NO: 40390 - RNA, 32 nt, Human
acugagcuuggaagaggaucuugcuguccugg

SEQ ID NO: 40391 - RNA, 32 nt, Human
acugaggaaaaccagaggaagccuguguagau

SEQ ID NO: 40392 - RNA, 25 nt, Human
acugaggaaagcagagggguuccug

SEQ ID NO: 40393 - RNA, 32 nt, Human
acugaggaaccaugcagauugugcccaagagu

SEQ ID NO: 40394 - RNA, 32 nt, Human
acugaggaauguugaagauugcagugauggaa

SEQ ID NO: 40395 - RNA, 32 nt, Human
acugaggacacaggcacccaggauaaggacaa

SEQ ID NO: 40396 - RNA, 32 nt, Human
acugaggacccggugccggaggccgugggcgg

SEQ ID NO: 40397 - RNA, 32 nt, Human
acugaggacccugcuacuccccaagccagagc

SEQ ID NO: 40398 - RNA, 32 nt, Human
acugaggacugagucugucacuagaggacuug

SEQ ID NO: 40399 - RNA, 22 nt, Human
acugaggagacaacgcccacca

SEQ ID NO: 40400 - RNA, 32 nt, Human
acugaggagacuggagcaaaauucagcuugaa

SEQ ID NO: 40401 - RNA, 32 nt, Human
acugaggagaugaagguuacagugagccaagu

SEQ ID NO: 40402 - RNA, 32 nt, Human
acugaggagcacagagcagagagcagacucug

SEQ ID NO: 40403 - RNA, 32 nt, Human
acugaggagcgcagagcagagagcagacucug

SEQ ID NO: 40404 - RNA, 32 nt, Human
acugaggaggccuuuguucagcaaagaaaccu

SEQ ID NO: 40405 - RNA, 32 nt, Human
acugaggaggcugacggaggaggaucacuuga

SEQ ID NO: 40406 - RNA, 32 nt, Human
acugaggaggcugaggcaggagaaucacuuga

SEQ ID NO: 40407 - RNA, 32 nt, Human
acugaggaggcugaggugggaggauugcuuga

SEQ ID NO: 40408 - RNA, 32 nt, Human
acugaggagguggagguugcagugagccgaga

SEQ ID NO: 40409 - RNA, 32 nt, Human
acugaggaguugagcaaaucuguucuauucug

SEQ ID NO: 40410 - RNA, 32 nt, Human
acugaggaugaaacugacuuuugucuuuugga

SEQ ID NO: 40411 - RNA, 32 nt, Human
acugaggauggagagaaagaagaugagucugg

SEQ ID NO: 40412 - RNA, 19 nt, Human
acugaggcaauggaugcug

SEQ ID NO: 40413 - RNA, 32 nt, Human
acugaggcaccaauggcugagcaggaagggcg

SEQ ID NO: 40414 - RNA, 18 nt, Human
acugaggcagagcaaggu

SEQ ID NO: 40415 - RNA, 32 nt, Human
acugaggcaggcggagcugcuaagagccugcu

SEQ ID NO: 40416 - RNA, 32 nt, Human
acugaggcagggaguuggcucucuugguggag

SEQ ID NO: 40417 - RNA, 32 nt, Human
acugaggccacugcacccuuucucggggaaga

SEQ ID NO: 40418 - RNA, 32 nt, Human
acugaggccagcauggcugggcccaggaugcu

SEQ ID NO: 40419 - RNA, 32 nt, Human
acugaggcccagaauugcuaaguggcuugcuu

SEQ ID NO: 40420 - RNA, 32 nt, Human
acugaggcccagagcggggaaguggcuugcuc

SEQ ID NO: 40421 - RNA, 23 nt, Human
acugaggccgaaagugccugcca

SEQ ID NO: 40422 - RNA, 32 nt, Human
acugaggccuggagaaguggaaucacuggccu

SEQ ID NO: 40423 - RNA, 32 nt, Human
acugaggcuacagcugcuaucacaugccgaac

SEQ ID NO: 40424 - RNA, 32 nt, Human
acugaggcucagagaaaugacauaacucagcu

SEQ ID NO: 40425 - RNA, 32 nt, Human
acugaggcucagauaaguccaaaugaaaugaa

SEQ ID NO: 40426 - RNA, 32 nt, Human
acugaggcugcuuuuuaguuggugcuaaccua

SEQ ID NO: 40427 - RNA, 32 nt, Human
acugaggcuggccgagccacacugucucccca

SEQ ID NO: 40428 - RNA, 32 nt, Human
acugagggagccagaggaguccuguaggcagg

SEQ ID NO: 40429 - RNA, 30 nt, Human
acugagggagcuuguacagaaagaauuaaa

SEQ ID NO: 40430 - RNA, 32 nt, Human
acugagggcagggaucacagggccagguuuuu

SEQ ID NO: 40431 - RNA, 32 nt, Human
acugagggcaguccuguggcugaggggcacag

SEQ ID NO: 40432 - RNA, 32 nt, Human
acugagggcucuggacgggcuccaggaacccu

SEQ ID NO: 40433 - RNA, 32 nt, Human
acugaggggauucucuacugccaagccccugc

SEQ ID NO: 40434 - RNA, 32 nt, Human
acugaggggcaggcuacuggggugggguagcu

SEQ ID NO: 40435 - RNA, 32 nt, Human
acugaggggcucagggugaggguugccuauug

SEQ ID NO: 40436 - RNA, 32 nt, Human
acugaggggcugggcacccaacccuuuuccac

SEQ ID NO: 40437 - RNA, 32 nt, Human
acugagggggcagaggcaguggcucuuuagaa

SEQ ID NO: 40438 - RNA, 32 nt, Human
acugagggggccugaagcuacaugcaccuccc

SEQ ID NO: 40439 - RNA, 32 nt, Human
acugagggggcuggaggcgaagggugggagca

SEQ ID NO: 40440 - RNA, 32 nt, Human
acugaggguaggggacagggaggcucaggacg

SEQ ID NO: 40441 - RNA, 32 nt, Human
acugaggguggugggaggggaucaccuggguu

SEQ ID NO: 40442 - RNA, 32 nt, Human
acugaggguugagacaaaacuuuaaggauaca

SEQ ID NO: 40443 - RNA, 32 nt, Human
acugagguacaggcacguucaccacaguccca

SEQ ID NO: 40444 - RNA, 32 nt, Human
acugagguauggagccuccaucaucaugcucu

SEQ ID NO: 40445 - RNA, 32 nt, Human
acugaggucucgaacugccgaccucaggcugu

SEQ ID NO: 40446 - RNA, 32 nt, Human
acugaggugcagcagauggcagugguaaccaa

SEQ ID NO: 40447 - RNA, 32 nt, Human
acugaggugccccacagcagcagguguugagc

SEQ ID NO: 40448 - RNA, 32 nt, Human
acugaggugcuggcuagcucaugugugaauuc

SEQ ID NO: 40449 - RNA, 32 nt, Human
acugagguguuuguuuguuuguuaggcagugc

SEQ ID NO: 40450 - RNA, 32 nt, Human
acugagguuucuguucaaacugugaguucugu

SEQ ID NO: 40451 - RNA, 32 nt, Human
acugaguagacaggacuggaaauccauucucu

SEQ ID NO: 40452 - RNA, 32 nt, Human
acugagucaccacaccccucuccccugaucaa

SEQ ID NO: 40453 - RNA, 32 nt, Human
acugagucagaaacuggggauguggcccaggc

SEQ ID NO: 40454 - RNA, 32 nt, Human
acugagucauaauaaauaugugcugaaccguu

SEQ ID NO: 40455 - RNA, 32 nt, Human
acugaguccacucacucgaagaaugucaguac

SEQ ID NO: 40456 - RNA, 32 nt, Human
acugaguccccaguccugucccuucccugacu

SEQ ID NO: 40457 - RNA, 22 nt, Human
acugaguccccuaccagccccu

SEQ ID NO: 40458 - RNA, 32 nt, Human
acugagucggccggaagaagauaaagaaaaca

SEQ ID NO: 40459 - RNA, 32 nt, Human
acugagucucugaggggcuaccaggaaagcgc

SEQ ID NO: 40460 - RNA, 32 nt, Human
acugagugaaacuugcccucuggcuugauuca

SEQ ID NO: 40461 - RNA, 32 nt, Human
acugagugacaucaguuagagagguuaccuca

SEQ ID NO: 40462 - RNA, 32 nt, Human
acugagugagccuuuugcaggaaaaggcuaag

SEQ ID NO: 40463 - RNA, 32 nt, Human
acugagugcugggagugaguugguaauaugag

SEQ ID NO: 40464 - RNA, 32 nt, Human
acugagugcugggauccaaggcauucuacagg

SEQ ID NO: 40465 - RNA, 32 nt, Human
acugaguggggaaaggaguuacacccgugagu

SEQ ID NO: 40466 - RNA, 32 nt, Human
acugagugucggcaucagcacugagcuagaca

SEQ ID NO: 40467 - RNA, 32 nt, Human
acugagugugcacugguagaugccguuucuuc

SEQ ID NO: 40468 - RNA, 32 nt, Human
acugaguuacuaaacaacagacuccaugcuga

SEQ ID NO: 40469 - RNA, 32 nt, Human
acugaguuccagugauaugacaggcuuucaau

SEQ ID NO: 40470 - RNA, 32 nt, Human
acugaguugcgggggccuuggagaccuccagg

SEQ ID NO: 40471 - RNA, 32 nt, Human
acugaguugcgugucuguaaaugucugcgcag

SEQ ID NO: 40472 - RNA, 32 nt, Human
acugaguugcugguugacugaggccagucacu

SEQ ID NO: 40473 - RNA, 32 nt, Human
acugaguuucgcucuugucauccuggcuggag

SEQ ID NO: 40474 - RNA, 32 nt, Human
acugauaaaauacucuagccugggccagagaa

SEQ ID NO: 40475 - RNA, 32 nt, Human
acugauaaaaucugaaaguaacucugacauag

SEQ ID NO: 40476 - RNA, 32 nt, Human
acugauaagcggccacuuuaggaguguagcaa

SEQ ID NO: 40477 - RNA, 32 nt, Human
acugauaauaagcuuugaauggugcuaauaag

SEQ ID NO: 40478 - RNA, 32 nt, Human
acugauaaucagcuuuauuuuacaaaagaguu

SEQ ID NO: 40479 - RNA, 32 nt, Human
acugauaaucuagccauuuauuagacuuuaag

SEQ ID NO: 40480 - RNA, 32 nt, Human
acugauacauuccaagcauacaugcacacuga

SEQ ID NO: 40481 - RNA, 32 nt, Human
acugauaccaccugcgugucccuuccuccccg

SEQ ID NO: 40482 - RNA, 32 nt, Human
acugauaccauguuggcagcaacagauguugg

SEQ ID NO: 40483 - RNA, 23 nt, Human
acugauaggaauacauuucuuca

SEQ ID NO: 40484 - RNA, 32 nt, Human
acugauagggacaggaaggaaaggaggauuag

SEQ ID NO: 40485 - RNA, 32 nt, Human
acugauaguuucuuucuuucauaucacaugua

SEQ ID NO: 40486 - RNA, 32 nt, Human
acugauauucugguuagcagggccaggacaag

SEQ ID NO: 40487 - RNA, 32 nt, Human
acugaucaaauacauuagcuucaucagaugaa

SEQ ID NO: 40488 - RNA, 32 nt, Human
acugaucacagauucuuucccaccucacaauc

SEQ ID NO: 40489 - RNA, 32 nt, Human
acugaucacccauggcugccucuccuauuauc

SEQ ID NO: 40490 - RNA, 32 nt, Human
acugaucacucucaucaguggcagauuuuggu

SEQ ID NO: 40491 - RNA, 27 nt, Human
acugaucacugcagccuccacuuccca

SEQ ID NO: 40492 - RNA, 32 nt, Human
acugaucacuuaccuucuucucuuucagacuu

SEQ ID NO: 40493 - RNA, 19 nt, Human
acugaucagcagacuggga

SEQ ID NO: 40494 - RNA, 32 nt, Human
acugaucaguucucugaaaauauuuccaaaau

SEQ ID NO: 40495 - RNA, 32 nt, Human
acugaucauaccacugcacuccagucugggca

SEQ ID NO: 40496 - RNA, 19 nt, Human
acugaucauccgcgggaug

SEQ ID NO: 40497 - RNA, 32 nt, Human
acugaucauccucccuuucuccuuggcuugaa

SEQ ID NO: 40498 - RNA, 32 nt, Human
acugaucauggaaacucaccccaaaccuugaa

SEQ ID NO: 40499 - RNA, 32 nt, Human
acugaucauucaugggaaauggucaaaagaca

SEQ ID NO: 40500 - RNA, 32 nt, Human
acugauccagcaguuccacuccuggguaugua

SEQ ID NO: 40501 - RNA, 32 nt, Human
acugauccucccucccugucaacuccuaaucu

SEQ ID NO: 40502 - RNA, 32 nt, Human
acugauccucgaggccuccugccguggcuggg

SEQ ID NO: 40503 - RNA, 23 nt, Human
acugauccuuauuuugcugggau

SEQ ID NO: 40504 - RNA, 32 nt, Human
acugaucucacagaugaggagagagaagaaac

SEQ ID NO: 40505 - RNA, 32 nt, Human
acugaucucuccucccacccuacauucucuug

SEQ ID NO: 40506 - RNA, 32 nt, Human
acugaucugagccuuguucugcccuuccacuu

SEQ ID NO: 40507 - RNA, 32 nt, Human
acugaucugauaaugucaacuuuugaaaacag

SEQ ID NO: 40508 - RNA, 32 nt, Human
acugaucugcacuaaugugggcaaacagaggg

SEQ ID NO: 40509 - RNA, 32 nt, Human
acugaucugcuugacagacgugggaucucagu

SEQ ID NO: 40510 - RNA, 32 nt, Human
acugaucuuccuauuugagucucuugagacaa

SEQ ID NO: 40511 - RNA, 32 nt, Human
acugaucuuggguuuccuauucugccuccccu

SEQ ID NO: 40512 - RNA, 32 nt, Human
acugaugaaauggcacagcauaacauuuaauu

SEQ ID NO: 40513 - RNA, 32 nt, Human
acugaugaaggcagacaguaggagguuggcag

SEQ ID NO: 40514 - RNA, 32 nt, Human
acugaugaauauagggcccagauggaccaagu

SEQ ID NO: 40515 - RNA, 32 nt, Human
acugaugacccacccaggcugaccaggccagc

SEQ ID NO: 40516 - RNA, 32 nt, Human
acugaugaggucuuaacaaaaaccaguguggc

SEQ ID NO: 40517 - RNA, 32 nt, Human
acugaugauucugagcugugcuucuucaagua

SEQ ID NO: 40518 - RNA, 32 nt, Human
acugaugcagggguauacuugcccucacuugc

SEQ ID NO: 40519 - RNA, 32 nt, Human
acugaugccagcugccccugaggaugccagua

SEQ ID NO: 40520 - RNA, 21 nt, Human
acugaugccauaccugggaug

SEQ ID NO: 40521 - RNA, 32 nt, Human
acugaugccccagggaaguaugcauuagccuu

SEQ ID NO: 40522 - RNA, 32 nt, Human
acugaugccccagggauucccaccccacuucu

SEQ ID NO: 40523 - RNA, 32 nt, Human
acugaugccuguaaucccaacacuuuguuggg

SEQ ID NO: 40524 - RNA, 32 nt, Human
acugaugcugccauuugcccagccucuuccau

SEQ ID NO: 40525 - RNA, 29 nt, Human
acugaugcuggaugacaacagacucucca

SEQ ID NO: 40526 - RNA, 32 nt, Human
acugauggaagcacacaaguggagagaaguug

SEQ ID NO: 40527 - RNA, 29 nt, Human
acugauggacaggcucaagagauucagag

SEQ ID NO: 40528 - RNA, 32 nt, Human
acugauggagugaaauccccaggagaugcaga

SEQ ID NO: 40529 - RNA, 32 nt, Human
acugauggaguggcacaaauucccagugucug

SEQ ID NO: 40530 - RNA, 32 nt, Human
acugauggcaugugccuguaaucccagcuucu

SEQ ID NO: 40531 - RNA, 29 nt, Human
acugauggccuccugggguggagaaaagc

SEQ ID NO: 40532 - RNA, 32 nt, Human
acugauggccuguccuggaugccaggcacuug

SEQ ID NO: 40533 - RNA, 32 nt, Human
acugaugggaaagggaaggcuggcagcaguga

SEQ ID NO: 40534 - RNA, 32 nt, Human
acugaugggaccagggaagugggauggggcca

SEQ ID NO: 40535 - RNA, 32 nt, Human
acugaugggcuucugccccugcccuuccucac

SEQ ID NO: 40536 - RNA, 32 nt, Human
acugaugucccugugaacaccugcacuaugag

SEQ ID NO: 40537 - RNA, 32 nt, Human
acugaugugugaaugacauugcagugagcuag

SEQ ID NO: 40538 - RNA, 32 nt, Human
acugauguuuacucucugggcacuguuguaag

SEQ ID NO: 40539 - RNA, 32 nt, Human
acugauuacauacccaaaggcucuuuucagag

SEQ ID NO: 40540 - RNA, 32 nt, Human
acugauuagggaggggauuugcacagggaggu

SEQ ID NO: 40541 - RNA, 32 nt, Human
acugauuauuaaaaugacauguauuuaucaga

SEQ ID NO: 40542 - RNA, 32 nt, Human
acugauucaaucugcaugccagccuggaggag

SEQ ID NO: 40543 - RNA, 32 nt, Human
acugauucagaaacugacuuggggaaggaauu

SEQ ID NO: 40544 - RNA, 32 nt, Human
acugauucagcccuuugugguuugcaguccug

SEQ ID NO: 40545 - RNA, 32 nt, Human
acugauucccuccaggcauaaauguucaaucu

SEQ ID NO: 40546 - RNA, 32 nt, Human
acugauucucucuuguccuucacaucaccauu

SEQ ID NO: 40547 - RNA, 32 nt, Human
acugauucugccaccauauagugaacacgauu

SEQ ID NO: 40548 - RNA, 32 nt, Human
acugauucuguguaacuuacuauuuuuccagg

SEQ ID NO: 40549 - RNA, 32 nt, Human
acugauucuuacccagcccuggucaagaaucu

SEQ ID NO: 40550 - RNA, 32 nt, Human
acugauugcauuccagccugggugacagagcu

SEQ ID NO: 40551 - RNA, 32 nt, Human
acugauuggcacuuaagcuuuuucugauuguu

SEQ ID NO: 40552 - RNA, 32 nt, Human
acugauugggcuucauacuuuaugcuggcugu

SEQ ID NO: 40553 - RNA, 32 nt, Human
acugauugugcugucucccucucccacccgug

SEQ ID NO: 40554 - RNA, 18 nt, Human
acugauuguuuucacuga

SEQ ID NO: 40555 - RNA, 32 nt, Human
acugauuuccccuggccacccucucaccuaau

SEQ ID NO: 40556 - RNA, 24 nt, Human
acugauuucuggguuucugccacg

SEQ ID NO: 40557 - RNA, 32 nt, Human
acugauuugcacucuugguucuuuggagccuu

SEQ ID NO: 40558 - RNA, 32 nt, Human
acugauuugcuucccuuccugccauggcugga

SEQ ID NO: 40559 - RNA, 32 nt, Human
acugauuugggcugaauguauguaaauagguu

SEQ ID NO: 40560 - RNA, 32 nt, Human
acugauuuuaaucugacuaugacacugagcau

SEQ ID NO: 40561 - RNA, 32 nt, Human
acugauuuuguagagcugcugggagaaccgga

SEQ ID NO: 40562 - RNA, 32 nt, Human
acugcaaaaacucaaaaauuagccaggcgugc

SEQ ID NO: 40563 - RNA, 32 nt, Human
acugcaaaaauagaacguagcaaaauggcuuc

SEQ ID NO: 40564 - RNA, 32 nt, Human
acugcaaaacacaagcuggagaguuuuaggua

SEQ ID NO: 40565 - RNA, 24 nt, Human
acugcaaaaucugccucccggguu

SEQ ID NO: 40566 - RNA, 32 nt, Human
acugcaaaauguguccugucuaaaaaugauuc

SEQ ID NO: 40567 - RNA, 23 nt, Human
acugcaaacccgccucccagguu

SEQ ID NO: 40568 - RNA, 22 nt, Human
acugcaaaccgccucccggguu

SEQ ID NO: 40569 - RNA, 32 nt, Human
acugcaaacucauaccuucccuaucacaauca

SEQ ID NO: 40570 - RNA, 24 nt, Human
acugcaaacuccgccucccagguu

SEQ ID NO: 40571 - RNA, 24 nt, Human
acugcaaacuccgccucccggguu

SEQ ID NO: 40572 - RNA, 24 nt, Human
acugcaaacuccgccuuccagguu

SEQ ID NO: 40573 - RNA, 24 nt, Human
acugcaaacuccgcuuccuggguu

SEQ ID NO: 40574 - RNA, 20 nt, Human
acugcaaacucuuucucuua

SEQ ID NO: 40575 - RNA, 25 nt, Human
acugcaaacuggauuaguucuuuua

SEQ ID NO: 40576 - RNA, 32 nt, Human
acugcaaagcaguuugaugacacuguuuuaau

SEQ ID NO: 40577 - RNA, 32 nt, Human
acugcaaaggaaagagagagaaaacaagcaaa

SEQ ID NO: 40578 - RNA, 32 nt, Human
acugcaaaggcugugguggcugugaggacacu

SEQ ID NO: 40579 - RNA, 25 nt, Human
acugcaaaucuccgccucccagguu

SEQ ID NO: 40580 - RNA, 32 nt, Human
acugcaaauguccccuugauggggaauccgug

SEQ ID NO: 40581 - RNA, 32 nt, Human
acugcaacaauucagugccaggaaaggagcau

SEQ ID NO: 40582 - RNA, 32 nt, Human
acugcaacacaaagcuccaccaggaggcuggu

SEQ ID NO: 40583 - RNA, 32 nt, Human
acugcaacacaugcaggcagcuauuuggggau

SEQ ID NO: 40584 - RNA, 24 nt, Human
acugcaacauccgccucccggguu

SEQ ID NO: 40585 - RNA, 24 nt, Human
acugcaacccccacaucccggguu

SEQ ID NO: 40586 - RNA, 24 nt, Human
acugcaacccccaucucccagguu

SEQ ID NO: 40587 - RNA, 24 nt, Human
acugcaacccccgccccccggguu

SEQ ID NO: 40588 - RNA, 24 nt, Human
acugcaacccccgccucccggguu

SEQ ID NO: 40589 - RNA, 23 nt, Human
acugcaaccccgccucccagguu

SEQ ID NO: 40590 - RNA, 23 nt, Human
acugcaacccucccucccggguu

SEQ ID NO: 40591 - RNA, 19 nt, Human
acugcaaccucaaccuucu

SEQ ID NO: 40592 - RNA, 23 nt, Human
acugcaaccucaccucccggguu

SEQ ID NO: 40593 - RNA, 19 nt, Human
acugcaaccucagccuccu

SEQ ID NO: 40594 - RNA, 24 nt, Human
acugcaaccuccaccucacagguu

SEQ ID NO: 40595 - RNA, 24 nt, Human
acugcaaccuccaccuccaggguu

SEQ ID NO: 40596 - RNA, 23 nt, Human
acugcaaccuccaccuccagguu

SEQ ID NO: 40597 - RNA, 22 nt, Human
acugcaaccuccaccucccagg

SEQ ID NO: 40598 - RNA, 23 nt, Human
acugcaaccuccaccucccaggu

SEQ ID NO: 40599 - RNA, 24 nt, Human
acugcaaccuccaccucccagguu

SEQ ID NO: 40600 - RNA, 25 nt, Human
acugcaaccuccaccuccccggguu

SEQ ID NO: 40601 - RNA, 24 nt, Human
acugcaaccuccaccucccgaguu

SEQ ID NO: 40602 - RNA, 21 nt, Human
acugcaaccuccaccucccgg

SEQ ID NO: 40603 - RNA, 22 nt, Human
acugcaaccuccaccucccggg

SEQ ID NO: 40604 - RNA, 23 nt, Human
acugcaaccuccaccucccgggu

SEQ ID NO: 40605 - RNA, 24 nt, Human
acugcaaccuccaccucccggguu

SEQ ID NO: 40606 - RNA, 24 nt, Human
acugcaaccuccaccucccugguu

SEQ ID NO: 40607 - RNA, 23 nt, Human
acugcaaccuccaccuccggguu

SEQ ID NO: 40608 - RNA, 19 nt, Human
acugcaaccuccaccuccu

SEQ ID NO: 40609 - RNA, 24 nt, Human
acugcaaccuccaccuccuagguu

SEQ ID NO: 40610 - RNA, 24 nt, Human
acugcaaccuccaccuccugaguu

SEQ ID NO: 40611 - RNA, 21 nt, Human
acugcaaccuccaccuccugg

SEQ ID NO: 40612 - RNA, 22 nt, Human
acugcaaccuccaccuccuggg

SEQ ID NO: 40613 - RNA, 24 nt, Human
acugcaaccuccaccuccuggguu

SEQ ID NO: 40614 - RNA, 24 nt, Human
acugcaaccuccaccucgcagguu

SEQ ID NO: 40615 - RNA, 24 nt, Human
acugcaaccuccaccucgcggguu

SEQ ID NO: 40616 - RNA, 24 nt, Human
acugcaaccuccaccucucagguu

SEQ ID NO: 40617 - RNA, 24 nt, Human
acugcaaccuccacuucccagguu

SEQ ID NO: 40618 - RNA, 32 nt, Human
acugcaaccuccgccucacagcuucaagauuc

SEQ ID NO: 40619 - RNA, 24 nt, Human
acugcaaccuccgccucccagguu

SEQ ID NO: 40620 - RNA, 24 nt, Human
acugcaaccuccgccucccgaguu

SEQ ID NO: 40621 - RNA, 22 nt, Human
acugcaaccuccgccucccggg

SEQ ID NO: 40622 - RNA, 24 nt, Human
acugcaaccuccgccucccggguu

SEQ ID NO: 40623 - RNA, 24 nt, Human
acugcaaccuccuccucccggguu

SEQ ID NO: 40624 - RNA, 24 nt, Human
acugcaaccucuaccucccagguu

SEQ ID NO: 40625 - RNA, 21 nt, Human
acugcaaccucugcccucccg

SEQ ID NO: 40626 - RNA, 32 nt, Human
acugcaaccucuuccuccugguucaagcgauu

SEQ ID NO: 40627 - RNA, 32 nt, Human
acugcaaccugacacaaugcucagaaacagaa

SEQ ID NO: 40628 - RNA, 32 nt, Human
acugcaaccugacagaugagacacauggacuc

SEQ ID NO: 40629 - RNA, 32 nt, Human
acugcaaccugacaggaugcucagacaagaau

SEQ ID NO: 40630 - RNA, 23 nt, Human
acugcaaccuucaccuccagguu

SEQ ID NO: 40631 - RNA, 24 nt, Human
acugcaaccuucgccucccagguu

SEQ ID NO: 40632 - RNA, 24 nt, Human
acugcaaccuucgccucccgaguu

SEQ ID NO: 40633 - RNA, 24 nt, Human
acugcaacguccgccucccagguu

SEQ ID NO: 40634 - RNA, 24 nt, Human
acugcaacguccgccucccggguu

SEQ ID NO: 40635 - RNA, 23 nt, Human
acugcaacuccaccucccggguu

SEQ ID NO: 40636 - RNA, 32 nt, Human
acugcaacucuacaaaaauacaaaaauuagcc

SEQ ID NO: 40637 - RNA, 23 nt, Human
acugcaacucugugaagcagggu

SEQ ID NO: 40638 - RNA, 24 nt, Human
acugcaacuuccaccucccagguu

SEQ ID NO: 40639 - RNA, 24 nt, Human
acugcaacuuccaccucccggguu

SEQ ID NO: 40640 - RNA, 24 nt, Human
acugcaacuuccaccuccuggguu

SEQ ID NO: 40641 - RNA, 24 nt, Human
acugcaacuuccacuucccggguu

SEQ ID NO: 40642 - RNA, 32 nt, Human
acugcaacuucugccucccaugcuuacgugau

SEQ ID NO: 40643 - RNA, 32 nt, Human
acugcaacuucuguauccuuccuuccccucca

SEQ ID NO: 40644 - RNA, 32 nt, Human
acugcaacuugccuuuuccauuacagaaauuu

SEQ ID NO: 40645 - RNA, 24 nt, Human
acugcaacuugcgccucccggguu

SEQ ID NO: 40646 - RNA, 32 nt, Human
acugcaagaagaggcgggauacuuucagcuuu

SEQ ID NO: 40647 - RNA, 24 nt, Human
acugcaagauccgccucccggguu

SEQ ID NO: 40648 - RNA, 24 nt, Human
acugcaagccccaccuucugaguu

SEQ ID NO: 40649 - RNA, 24 nt, Human
acugcaagcccugccuccuggguu

SEQ ID NO: 40650 - RNA, 24 nt, Human
acugcaagcuccaacucccggguu

SEQ ID NO: 40651 - RNA, 24 nt, Human
acugcaagcuccaccucccagguu

SEQ ID NO: 40652 - RNA, 24 nt, Human
acugcaagcuccaccucccggguu

SEQ ID NO: 40653 - RNA, 24 nt, Human
acugcaagcuccaccuccuggguu

SEQ ID NO: 40654 - RNA, 24 nt, Human
acugcaagcuccacuuccuggguu

SEQ ID NO: 40655 - RNA, 24 nt, Human
acugcaagcuccaucucccagguu

SEQ ID NO: 40656 - RNA, 22 nt, Human
acugcaagcuccgccucccagg

SEQ ID NO: 40657 - RNA, 24 nt, Human
acugcaagcuccgccucccagguu

SEQ ID NO: 40658 - RNA, 24 nt, Human
acugcaagcuccgccucccgaguu

SEQ ID NO: 40659 - RNA, 24 nt, Human
acugcaagcuccgccucccggguu

SEQ ID NO: 40660 - RNA, 24 nt, Human
acugcaagcuccgccuccgggguu

SEQ ID NO: 40661 - RNA, 24 nt, Human
acugcaagcuccgccuccuggguu

SEQ ID NO: 40662 - RNA, 24 nt, Human
acugcaagcuccgccucucggguu

SEQ ID NO: 40663 - RNA, 24 nt, Human
acugcaagcuccggcucccagguu

SEQ ID NO: 40664 - RNA, 24 nt, Human
acugcaagcucggccuccuggguu

SEQ ID NO: 40665 - RNA, 26 nt, Human
acugcaagcucugcccuccccggguu

SEQ ID NO: 40666 - RNA, 24 nt, Human
acugcaagcucugccucccagguu

SEQ ID NO: 40667 - RNA, 22 nt, Human
acugcaagcucugccucccggg

SEQ ID NO: 40668 - RNA, 24 nt, Human
acugcaagcucugccucccggguu

SEQ ID NO: 40669 - RNA, 24 nt, Human
acugcaagcucugccucccguguu

SEQ ID NO: 40670 - RNA, 24 nt, Human
acugcaagcucugccuccuggguu

SEQ ID NO: 40671 - RNA, 24 nt, Human
acugcaagcucugccucucagguu

SEQ ID NO: 40672 - RNA, 24 nt, Human
acugcaagcucugcguccuggguu

SEQ ID NO: 40673 - RNA, 24 nt, Human
acugcaagcucugcuucccagguu

SEQ ID NO: 40674 - RNA, 24 nt, Human
acugcaagcucugcuuccuggguu

SEQ ID NO: 40675 - RNA, 24 nt, Human
acugcaagcuuccccuuccggguu

SEQ ID NO: 40676 - RNA, 24 nt, Human
acugcaagcuucgccucccggguu

SEQ ID NO: 40677 - RNA, 18 nt, Human
acugcaaggagcagggug

SEQ ID NO: 40678 - RNA, 32 nt, Human
acugcaaggcugggacugggaggcagagccgc

SEQ ID NO: 40679 - RNA, 32 nt, Human
acugcaaguggaaugaggcaggaagcagaaac

SEQ ID NO: 40680 - RNA, 24 nt, Human
acugcaaguuccgccucccggguu

SEQ ID NO: 40681 - RNA, 21 nt, Human
acugcaauaaacauacaugug

SEQ ID NO: 40682 - RNA, 24 nt, Human
acugcaaucuccaccuccuggguu

SEQ ID NO: 40683 - RNA, 24 nt, Human
acugcaaucuccaucucccggguu

SEQ ID NO: 40684 - RNA, 24 nt, Human
acugcaaucuccgccucccagguu

SEQ ID NO: 40685 - RNA, 24 nt, Human
acugcaaucuccgccucccggguu

SEQ ID NO: 40686 - RNA, 32 nt, Human
acugcaaugauguucuuccuggaauucaugaa

SEQ ID NO: 40687 - RNA, 32 nt, Human
acugcacaaaaauaaaaauuccaagcugugga

SEQ ID NO: 40688 - RNA, 32 nt, Human
acugcacaaaggagaacuaguccuaagauccu

SEQ ID NO: 40689 - RNA, 32 nt, Human
acugcacacaagugccaugcuuugccaccacc

SEQ ID NO: 40690 - RNA, 32 nt, Human
acugcacacagggucccugaaauccacuuuua

SEQ ID NO: 40691 - RNA, 32 nt, Human
acugcacaccacugccucaugcuuccuggggc

SEQ ID NO: 40692 - RNA, 32 nt, Human
acugcacacucuggaccucaccugcagauaca

SEQ ID NO: 40693 - RNA, 32 nt, Human
acugcacacugcacuccauccugggcgacagu

SEQ ID NO: 40694 - RNA, 32 nt, Human
acugcacagagcaggagagccuguccugccuc

SEQ ID NO: 40695 - RNA, 22 nt, Human
acugcacagagcgcacaaggug

SEQ ID NO: 40696 - RNA, 32 nt, Human
acugcacagcgggcagaggcagaggaacacag

SEQ ID NO: 40697 - RNA, 19 nt, Human
acugcacaggugagcaagg

SEQ ID NO: 40698 - RNA, 32 nt, Human
acugcacauaugcaagccauuugcacucugga

SEQ ID NO: 40699 - RNA, 32 nt, Human
acugcaccacugcacuccacccugggcagagg

SEQ ID NO: 40700 - RNA, 32 nt, Human
acugcaccacugcacuccagccugggcaacaa

SEQ ID NO: 40701 - RNA, 32 nt, Human
acugcaccacugcacuucagccugggugacag

SEQ ID NO: 40702 - RNA, 32 nt, Human
acugcaccaucuggacaacagagcaagacucc

SEQ ID NO: 40703 - RNA, 32 nt, Human
acugcaccauugcauuccagccugggcaacaa

SEQ ID NO: 40704 - RNA, 32 nt, Human
acugcacccacugucaucaccuagaagacagg

SEQ ID NO: 40705 - RNA, 32 nt, Human
acugcacccagccugugucuuccagcucuaau

SEQ ID NO: 40706 - RNA, 32 nt, Human
acugcacccucaaccuccuggguucaagcaau

SEQ ID NO: 40707 - RNA, 32 nt, Human
acugcacccugguccucuccccaguccccagu

SEQ ID NO: 40708 - RNA, 32 nt, Human
acugcacccuuguccccacaagcagaagcaca

SEQ ID NO: 40709 - RNA, 21 nt, Human
acugcaccuccaccuuccggg

SEQ ID NO: 40710 - RNA, 23 nt, Human
acugcaccuccgccucccagguu

SEQ ID NO: 40711 - RNA, 31 nt, Human
acugcaccucugucucccaaguucaagugau

SEQ ID NO: 40712 - RNA, 32 nt, Human
acugcaccuuaaccugggcacugggagccugu

SEQ ID NO: 40713 - RNA, 32 nt, Human
acugcacgcacuccagccugggcgacagagcg

SEQ ID NO: 40714 - RNA, 32 nt, Human
acugcacgcacuccagccugggugacagagcg

SEQ ID NO: 40715 - RNA, 32 nt, Human
acugcacgcugcagcagggcccagggaguuga

SEQ ID NO: 40716 - RNA, 32 nt, Human
acugcacguaacacuccuccuuaggccuggag

SEQ ID NO: 40717 - RNA, 32 nt, Human
acugcacucaggcuggagugcagugguacgau

SEQ ID NO: 40718 - RNA, 20 nt, Human
acugcacuccaaccugggca

SEQ ID NO: 40719 - RNA, 32 nt, Human
acugcacuccagcacuccagccugggugacag

SEQ ID NO: 40720 - RNA, 32 nt, Human
acugcacuccagccagggcaacagugagacuc

SEQ ID NO: 40721 - RNA, 32 nt, Human
acugcacuccagccccagcugggugacagagu

SEQ ID NO: 40722 - RNA, 32 nt, Human
acugcacuccagccuaggcaacagagugagac

SEQ ID NO: 40723 - RNA, 32 nt, Human
acugcacuccagccuaggcgacagagugagac

SEQ ID NO: 40724 - RNA, 32 nt, Human
acugcacuccagccuaggugacagagugagac

SEQ ID NO: 40725 - RNA, 32 nt, Human
acugcacuccagccugccuggaugacagagcg

SEQ ID NO: 40726 - RNA, 32 nt, Human
acugcacuccagccuggaaaacggagugagag

SEQ ID NO: 40727 - RNA, 32 nt, Human
acugcacuccagccuggacaacagagugagaa

SEQ ID NO: 40728 - RNA, 32 nt, Human
acugcacuccagccuggacaacagagugagac

SEQ ID NO: 40729 - RNA, 32 nt, Human
acugcacuccagccuggacaacggagugagac

SEQ ID NO: 40730 - RNA, 32 nt, Human
acugcacuccagccuggacgacagagugagac

SEQ ID NO: 40731 - RNA, 32 nt, Human
acugcacuccagccuggacgacagagugagau

SEQ ID NO: 40732 - RNA, 32 nt, Human
acugcacuccagccuggaggccagagugagac

SEQ ID NO: 40733 - RNA, 32 nt, Human
acugcacuccagccuggaugacagagugaaac

SEQ ID NO: 40734 - RNA, 32 nt, Human
acugcacuccagccuggaugacagagugagac

SEQ ID NO: 40735 - RNA, 32 nt, Human
acugcacuccagccuggccugggcaacagagc

SEQ ID NO: 40736 - RNA, 32 nt, Human
acugcacuccagccuggcgacaaagugagacu

SEQ ID NO: 40737 - RNA, 32 nt, Human
acugcacuccagccuggcgacacagugagacu

SEQ ID NO: 40738 - RNA, 32 nt, Human
acugcacuccagccuggcgacagagugagacu

SEQ ID NO: 40739 - RNA, 32 nt, Human
acugcacuccagccuggcuacagagugagauu

SEQ ID NO: 40740 - RNA, 32 nt, Human
acugcacuccagccuggcugacagugagacac

SEQ ID NO: 40741 - RNA, 20 nt, Human
acugcacuccagccugggca

SEQ ID NO: 40742 - RNA, 32 nt, Human
acugcacuccagccugggcaacaagugcgaaa

SEQ ID NO: 40743 - RNA, 32 nt, Human
acugcacuccagccugggcaacagagugaaac

SEQ ID NO: 40744 - RNA, 32 nt, Human
acugcacuccagccugggcaacagagugacac

SEQ ID NO: 40745 - RNA, 32 nt, Human
acugcacuccagccugggcaacagagugagac

SEQ ID NO: 40746 - RNA, 32 nt, Human
acugcacuccagccugggcaacagagugagau

SEQ ID NO: 40747 - RNA, 32 nt, Human
acugcacuccagccugggcaacagagugaggc

SEQ ID NO: 40748 - RNA, 32 nt, Human
acugcacuccagccugggcaacagaguggacu

SEQ ID NO: 40749 - RNA, 32 nt, Human
acugcacuccagccugggcaaccaggugagac

SEQ ID NO: 40750 - RNA, 32 nt, Human
acugcacuccagccugggcaacguggugagac

SEQ ID NO: 40751 - RNA, 32 nt, Human
acugcacuccagccugggcaauagagugagac

SEQ ID NO: 40752 - RNA, 32 nt, Human
acugcacuccagccugggcaauagagugagcc

SEQ ID NO: 40753 - RNA, 32 nt, Human
acugcacuccagccugggcaauggagugagac

SEQ ID NO: 40754 - RNA, 32 nt, Human
acugcacuccagccugggcagcagagugagac

SEQ ID NO: 40755 - RNA, 32 nt, Human
acugcacuccagccugggccacagagugagau

SEQ ID NO: 40756 - RNA, 32 nt, Human
acugcacuccagccugggcgacagagugacuc

SEQ ID NO: 40757 - RNA, 32 nt, Human
acugcacuccagccugggcgacagagugagac

SEQ ID NO: 40758 - RNA, 32 nt, Human
acugcacuccagccugggcgacagagugaggc

SEQ ID NO: 40759 - RNA, 32 nt, Human
acugcacuccagccugggcgacagcgugagau

SEQ ID NO: 40760 - RNA, 32 nt, Human
acugcacuccagccugggcgacgagugaaacu

SEQ ID NO: 40761 - RNA, 32 nt, Human
acugcacuccagccugggcgacggagugagac

SEQ ID NO: 40762 - RNA, 32 nt, Human
acugcacuccagccugggcgauggagugagac

SEQ ID NO: 40763 - RNA, 32 nt, Human
acugcacuccagccugggcgucagagugagaa

SEQ ID NO: 40764 - RNA, 32 nt, Human
acugcacuccagccugggcugcagggugaggu

SEQ ID NO: 40765 - RNA, 32 nt, Human
acugcacuccagccugggugacagaguaagac

SEQ ID NO: 40766 - RNA, 32 nt, Human
acugcacuccagccugggugacagaguaauac

SEQ ID NO: 40767 - RNA, 32 nt, Human
acugcacuccagccugggugacagaguaggac

SEQ ID NO: 40768 - RNA, 32 nt, Human
acugcacuccagccugggugacagagugagac

SEQ ID NO: 40769 - RNA, 32 nt, Human
acugcacuccagccugggugacagagugagau

SEQ ID NO: 40770 - RNA, 32 nt, Human
acugcacuccagccugggugacagagugaggc

SEQ ID NO: 40771 - RNA, 32 nt, Human
acugcacuccagccugggugacagagugagug

SEQ ID NO: 40772 - RNA, 32 nt, Human
acugcacuccagccugggugacagugugaaac

SEQ ID NO: 40773 - RNA, 32 nt, Human
acugcacuccagccugggugacggugagacuu

SEQ ID NO: 40774 - RNA, 32 nt, Human
acugcacuccagccugggugacugagugagac

SEQ ID NO: 40775 - RNA, 32 nt, Human
acugcacuccagccugggugauagagugagaa

SEQ ID NO: 40776 - RNA, 32 nt, Human
acugcacuccagccugggugauagagugagac

SEQ ID NO: 40777 - RNA, 32 nt, Human
acugcacuccagccugggugauagagugagau

SEQ ID NO: 40778 - RNA, 32 nt, Human
acugcacuccagccuggguggcagagugagac

SEQ ID NO: 40779 - RNA, 32 nt, Human
acugcacuccagccugggugucagagcgagaa

SEQ ID NO: 40780 - RNA, 32 nt, Human
acugcacuccagccuggucaauggagugcgac

SEQ ID NO: 40781 - RNA, 32 nt, Human
acugcacuccagccuggugacagggcgagacu

SEQ ID NO: 40782 - RNA, 32 nt, Human
acugcacuccagcuggagugacagagccaaac

SEQ ID NO: 40783 - RNA, 32 nt, Human
acugcacuccagcuugggcaacagggcgagac

SEQ ID NO: 40784 - RNA, 32 nt, Human
acugcacuccagcuugggcgacggagugagac

SEQ ID NO: 40785 - RNA, 32 nt, Human
acugcacuccauccagccugggugacagggcg

SEQ ID NO: 40786 - RNA, 32 nt, Human
acugcacuccauccagccugggugacagggug

SEQ ID NO: 40787 - RNA, 32 nt, Human
acugcacugcacgccagccuaggcgacagagu

SEQ ID NO: 40788 - RNA, 32 nt, Human
acugcacugcacuccagccugggugacaaagc

SEQ ID NO: 40789 - RNA, 32 nt, Human
acugcacugccccuucucccuccugagagcuc

SEQ ID NO: 40790 - RNA, 32 nt, Human
acugcacugccuggcucagcugcacgcugcag

SEQ ID NO: 40791 - RNA, 17 nt, Human
acugcacuggcagggug

SEQ ID NO: 40792 - RNA, 19 nt, Human
acugcacugggaaacacag

SEQ ID NO: 40793 - RNA, 32 nt, Human
acugcacugggaacuguggaaccacccagcuc

SEQ ID NO: 40794 - RNA, 32 nt, Human
acugcacuguugcugacuacuacucugccaau

SEQ ID NO: 40795 - RNA, 32 nt, Human
acugcacuguuucucccucccuuggacgacac

SEQ ID NO: 40796 - RNA, 32 nt, Human
acugcagaaaccagugagauacccaccugcuu

SEQ ID NO: 40797 - RNA, 32 nt, Human
acugcagaaagugggccugagccucgaggaug

SEQ ID NO: 40798 - RNA, 32 nt, Human
acugcagaagaaaagucccacugaggaaaaga

SEQ ID NO: 40799 - RNA, 32 nt, Human
acugcagaaggguguugugaugaccaguuuua

SEQ ID NO: 40800 - RNA, 32 nt, Human
acugcagaagguguauguuggggagaacugaa

SEQ ID NO: 40801 - RNA, 32 nt, Human
acugcagacuccaacuccuggccucaaacuau

SEQ ID NO: 40802 - RNA, 32 nt, Human
acugcagacucucaaacuugcucauuuaaaaa

SEQ ID NO: 40803 - RNA, 32 nt, Human
acugcagagaacacagaagccagcaagcagca

SEQ ID NO: 40804 - RNA, 17 nt, Human
acugcagaggcagggug

SEQ ID NO: 40805 - RNA, 32 nt, Human
acugcagaggcugaggcaggaaaauugcuuga

SEQ ID NO: 40806 - RNA, 32 nt, Human
acugcagaggggcaguggcuggcagugccagg

SEQ ID NO: 40807 - RNA, 32 nt, Human
acugcagaguguauuuuucuuccuccucaacu

SEQ ID NO: 40808 - RNA, 21 nt, Human
acugcagaucaaaaauauuga

SEQ ID NO: 40809 - RNA, 32 nt, Human
acugcagaucuugagauaugucagccucuaca

SEQ ID NO: 40810 - RNA, 32 nt, Human
acugcagcaaaacugcauuuuauguccugugu

SEQ ID NO: 40811 - RNA, 21 nt, Human
acugcagcaaaucucuccuua

SEQ ID NO: 40812 - RNA, 32 nt, Human
acugcagcacaaaauuaucgacucuggcgaga

SEQ ID NO: 40813 - RNA, 32 nt, Human
acugcagcagaaaggcucugaagguccaaaga

SEQ ID NO: 40814 - RNA, 32 nt, Human
acugcagcagaccugggguugugcacaacagc

SEQ ID NO: 40815 - RNA, 32 nt, Human
acugcagcaggccacuggggacagaagggccc

SEQ ID NO: 40816 - RNA, 32 nt, Human
acugcagcagggaaggguggcuggcuggcucc

SEQ ID NO: 40817 - RNA, 32 nt, Human
acugcagcagucuggccagcuccagggacaga

SEQ ID NO: 40818 - RNA, 32 nt, Human
acugcagccagcuuugcugcacuugcuggugc

SEQ ID NO: 40819 - RNA, 32 nt, Human
acugcagccaugagcagcaaugagugcuucaa

SEQ ID NO: 40820 - RNA, 32 nt, Human
acugcagcccagccagugguuccagguccagc

SEQ ID NO: 40821 - RNA, 32 nt, Human
acugcagccccagcuggcaucuugacugcaac

SEQ ID NO: 40822 - RNA, 32 nt, Human
acugcagccggggagagcaggacgcgccaucu

SEQ ID NO: 40823 - RNA, 32 nt, Human
acugcagccucaaacuccuaggcucaggugau

SEQ ID NO: 40824 - RNA, 32 nt, Human
acugcagccucaaacuccugggcucaagcaau

SEQ ID NO: 40825 - RNA, 32 nt, Human
acugcagccucaaacuccugggcucaagcgau

SEQ ID NO: 40826 - RNA, 32 nt, Human
acugcagccucaaacuccugggcucaagugau

SEQ ID NO: 40827 - RNA, 32 nt, Human
acugcagccucaaacuccugggcucaggccau

SEQ ID NO: 40828 - RNA, 19 nt, Human
acugcagccucaaccuccu

SEQ ID NO: 40829 - RNA, 32 nt, Human
acugcagccucaaccuccuggacucagagaug

SEQ ID NO: 40830 - RNA, 32 nt, Human
acugcagccucaaccuccugggcuaagugauc

SEQ ID NO: 40831 - RNA, 32 nt, Human
acugcagccucaaccuccugggcucaagugau

SEQ ID NO: 40832 - RNA, 32 nt, Human
acugcagccucaaccuccugggcucaggugau

SEQ ID NO: 40833 - RNA, 32 nt, Human
acugcagccucaaccuccuggggccaagugau

SEQ ID NO: 40834 - RNA, 32 nt, Human
acugcagccucaaccuccuggguucaagugau

SEQ ID NO: 40835 - RNA, 32 nt, Human
acugcagccucaaccugcagugcucaaggaau

SEQ ID NO: 40836 - RNA, 24 nt, Human
acugcagccuccaccuccagaguu

SEQ ID NO: 40837 - RNA, 24 nt, Human
acugcagccuccaccuccaggguu

SEQ ID NO: 40838 - RNA, 22 nt, Human
acugcagccuccaccucccagg

SEQ ID NO: 40839 - RNA, 24 nt, Human
acugcagccuccaccucccagguu

SEQ ID NO: 40840 - RNA, 24 nt, Human
acugcagccuccaccuccccgguu

SEQ ID NO: 40841 - RNA, 22 nt, Human
acugcagccuccaccucccggg

SEQ ID NO: 40842 - RNA, 24 nt, Human
acugcagccuccaccucccggguu

SEQ ID NO: 40843 - RNA, 22 nt, Human
acugcagccuccaccuccuggg

SEQ ID NO: 40844 - RNA, 32 nt, Human
acugcagccuccaccuccugggcucaaaguga

SEQ ID NO: 40845 - RNA, 32 nt, Human
acugcagccuccaccuccugggcucaagcgau

SEQ ID NO: 40846 - RNA, 32 nt, Human
acugcagccuccaccuccugggcucaugugau

SEQ ID NO: 40847 - RNA, 32 nt, Human
acugcagccuccaccuccugggcucuccagcg

SEQ ID NO: 40848 - RNA, 24 nt, Human
acugcagccuccaccuccuggguu

SEQ ID NO: 40849 - RNA, 32 nt, Human
acugcagccuccacuuccuggguucacaugau

SEQ ID NO: 40850 - RNA, 32 nt, Human
acugcagccuccauccucuggguucaagcaau

SEQ ID NO: 40851 - RNA, 24 nt, Human
acugcagccuccaucucccggguu

SEQ ID NO: 40852 - RNA, 24 nt, Human
acugcagccuccgccucccgaguu

SEQ ID NO: 40853 - RNA, 24 nt, Human
acugcagccuccgccucccggguu

SEQ ID NO: 40854 - RNA, 22 nt, Human
acugcagccucgaccucccggg

SEQ ID NO: 40855 - RNA, 32 nt, Human
acugcagccuggaacuccugggcucaggaucc

SEQ ID NO: 40856 - RNA, 26 nt, Human
acugcagccuggaugacagagcgaga

SEQ ID NO: 40857 - RNA, 26 nt, Human
acugcagccugggcgacagagcgaga

SEQ ID NO: 40858 - RNA, 24 nt, Human
acugcagccuucaccucccggguu

SEQ ID NO: 40859 - RNA, 32 nt, Human
acugcagccuugaacuccuaggcucaucaugc

SEQ ID NO: 40860 - RNA, 32 nt, Human
acugcagccuugacccccucccugaccucccc

SEQ ID NO: 40861 - RNA, 32 nt, Human
acugcagccuuguggauuuuccacacagcagc

SEQ ID NO: 40862 - RNA, 32 nt, Human
acugcagcgagcauuucuggugccucaaguga

SEQ ID NO: 40863 - RNA, 21 nt, Human
acugcagcgcagaguugggug

SEQ ID NO: 40864 - RNA, 32 nt, Human
acugcagcggccggcucucaccucuccccugu

SEQ ID NO: 40865 - RNA, 32 nt, Human
acugcagcgggaaguggcuucucuccagaaua

SEQ ID NO: 40866 - RNA, 32 nt, Human
acugcagcgucaccucuucccugggccuccca

SEQ ID NO: 40867 - RNA, 32 nt, Human
acugcagcuaucucucgccucagccccucaag

SEQ ID NO: 40868 - RNA, 30 nt, Human
acugcagcucuccaucagcuccugucucca

SEQ ID NO: 40869 - RNA, 32 nt, Human
acugcagcugaucugggcacagugguuuucac

SEQ ID NO: 40870 - RNA, 32 nt, Human
acugcagcuucaggacccuauggaugaggccg

SEQ ID NO: 40871 - RNA, 24 nt, Human
acugcagcuuccaucucccagguu

SEQ ID NO: 40872 - RNA, 32 nt, Human
acugcagcuucuacuugagcccucucucucug

SEQ ID NO: 40873 - RNA, 32 nt, Human
acugcagcuuugccaaggucugugauaugguu

SEQ ID NO: 40874 - RNA, 32 nt, Human
acugcaggaaagcgaagguggagagagaagag

SEQ ID NO: 40875 - RNA, 32 nt, Human
acugcaggaauuacaaacugaagaggacucug

SEQ ID NO: 40876 - RNA, 32 nt, Human
acugcaggacaagccucccuggaugaucgagg

SEQ ID NO: 40877 - RNA, 32 nt, Human
acugcaggacugccccucacuugaccaguccc

SEQ ID NO: 40878 - RNA, 32 nt, Human
acugcaggagggccaacaggugagaugggaag

SEQ ID NO: 40879 - RNA, 32 nt, Human
acugcaggcagcuucagccauguugugaaacu

SEQ ID NO: 40880 - RNA, 32 nt, Human
acugcaggcaugagccaucacacccggcuggu

SEQ ID NO: 40881 - RNA, 32 nt, Human
acugcaggcgugagccaccgcgcccggccaac

SEQ ID NO: 40882 - RNA, 32 nt, Human
acugcaggcucuuuccccagaccugcuucuag

SEQ ID NO: 40883 - RNA, 23 nt, Human
acugcaggcugguuuuaggucuu

SEQ ID NO: 40884 - RNA, 27 nt, Human
acugcaggcuuuccugugguuggucag

SEQ ID NO: 40885 - RNA, 32 nt, Human
acugcagggaaugcaucggggauagcugaugg

SEQ ID NO: 40886 - RNA, 32 nt, Human
acugcagggcacugugccugagcucugacagu

SEQ ID NO: 40887 - RNA, 32 nt, Human
acugcagggcugggaagaagcugcacuuccag

SEQ ID NO: 40888 - RNA, 32 nt, Human
acugcaggggaaguccagggaggcucauggac

SEQ ID NO: 40889 - RNA, 32 nt, Human
acugcaggggacggccagagcgagcugugcaa

SEQ ID NO: 40890 - RNA, 32 nt, Human
acugcaggggagggaaggaggagcagccuggg

SEQ ID NO: 40891 - RNA, 32 nt, Human
acugcaggggccaggugcagccaccgugcagc

SEQ ID NO: 40892 - RNA, 32 nt, Human
acugcagggguguuccaccacacccagccaau

SEQ ID NO: 40893 - RNA, 32 nt, Human
acugcagggucuggggcugaagcugaugcugg

SEQ ID NO: 40894 - RNA, 32 nt, Human
acugcagguaaugccuuucccuucaggaagcc

SEQ ID NO: 40895 - RNA, 32 nt, Human
acugcaggucuugggacuugucagccuccaca

SEQ ID NO: 40896 - RNA, 21 nt, Human
acugcaggugcagagcauccu

SEQ ID NO: 40897 - RNA, 17 nt, Human
acugcagguguaccuua

SEQ ID NO: 40898 - RNA, 32 nt, Human
acugcaggugugcaccaccaugcccagcuaau

SEQ ID NO: 40899 - RNA, 32 nt, Human
acugcaguaggcuuccucuguagagcucugaa

SEQ ID NO: 40900 - RNA, 32 nt, Human
acugcaguauucccaauugcacuggcccuggg

SEQ ID NO: 40901 - RNA, 32 nt, Human
acugcaguauugauguuuuacugcaaaucuua

SEQ ID NO: 40902 - RNA, 32 nt, Human
acugcagucaccaaguaaaacaacaaauagcu

SEQ ID NO: 40903 - RNA, 32 nt, Human
acugcagucagcuguccuuccuugugugucug

SEQ ID NO: 40904 - RNA, 32 nt, Human
acugcaguccacagugugcugcuggaauaauu

SEQ ID NO: 40905 - RNA, 32 nt, Human
acugcaguccgcagcccagccugggcgacaga

SEQ ID NO: 40906 - RNA, 16 nt, Human
acugcagucgucaagg

SEQ ID NO: 40907 - RNA, 32 nt, Human
acugcagucuccaacuccuggccucaagggau

SEQ ID NO: 40908 - RNA, 24 nt, Human
acugcagucuccaccuccuggguu

SEQ ID NO: 40909 - RNA, 32 nt, Human
acugcagucucgaacuccuggacucaagcagu

SEQ ID NO: 40910 - RNA, 32 nt, Human
acugcagucuucaacuccugaccucaagcaau

SEQ ID NO: 40911 - RNA, 32 nt, Human
acugcagucuugaacuccugggcucaagggau

SEQ ID NO: 40912 - RNA, 32 nt, Human
acugcagugagcuaugguggcaccacugcacu

SEQ ID NO: 40913 - RNA, 20 nt, Human
acugcagugagggucaaagg

SEQ ID NO: 40914 - RNA, 16 nt, Human
acugcagugcaaggug

SEQ ID NO: 40915 - RNA, 23 nt, Human
acugcagugcugcagugccaggu

SEQ ID NO: 40916 - RNA, 22 nt, Human
acugcagugcuuuggcaaggug

SEQ ID NO: 40917 - RNA, 32 nt, Human
acugcaguggauacaaggaagggccuuucucg

SEQ ID NO: 40918 - RNA, 18 nt, Human
acugcaguggcaauagug

SEQ ID NO: 40919 - RNA, 32 nt, Human
acugcaguggcaggucuggaccaaaugacacc

SEQ ID NO: 40920 - RNA, 32 nt, Human
acugcaguggcugcugcuugcuugccuccucg

SEQ ID NO: 40921 - RNA, 20 nt, Human
acugcaguggcuggagagug

SEQ ID NO: 40922 - RNA, 17 nt, Human
acugcagugggaaggug

SEQ ID NO: 40923 - RNA, 18 nt, Human
acugcaguguaguaaugg

SEQ ID NO: 40924 - RNA, 18 nt, Human
acugcagugucguuggug

SEQ ID NO: 40925 - RNA, 18 nt, Human
acugcagugucuaaaggu

SEQ ID NO: 40926 - RNA, 32 nt, Human
acugcagugucuggagguugcgggaaggagac

SEQ ID NO: 40927 - RNA, 18 nt, Human
acugcaguguuaucagug

SEQ ID NO: 40928 - RNA, 32 nt, Human
acugcaguucgaggagcucgucuaccucugga

SEQ ID NO: 40929 - RNA, 16 nt, Human
acugcaguugaaaggg

SEQ ID NO: 40930 - RNA, 17 nt, Human
acugcaguugcucaagg

SEQ ID NO: 40931 - RNA, 32 nt, Human
acugcaguugcugcugcagcugagguacagcg

SEQ ID NO: 40932 - RNA, 17 nt, Human
acugcaguuggccaagg

SEQ ID NO: 40933 - RNA, 32 nt, Human
acugcaguugggucgcccccaggccaacgcuc

SEQ ID NO: 40934 - RNA, 20 nt, Human
acugcaguuucagaaaggug

SEQ ID NO: 40935 - RNA, 32 nt, Human
acugcauaaugucagcauuuugugcuuuuggc

SEQ ID NO: 40936 - RNA, 32 nt, Human
acugcauauacaaaucaacucacugcauaugc

SEQ ID NO: 40937 - RNA, 32 nt, Human
acugcauaugcacaucaacucacugcauaugc

SEQ ID NO: 40938 - RNA, 32 nt, Human
acugcauauucacuuuaugugguuucagaaua

SEQ ID NO: 40939 - RNA, 22 nt, Human
acugcaucaaaguuggggaacc

SEQ ID NO: 40940 - RNA, 32 nt, Human
acugcaucacugcacuccagccugggcaacac

SEQ ID NO: 40941 - RNA, 32 nt, Human
acugcaucaugucccgguauagcuaccagagu

SEQ ID NO: 40942 - RNA, 19 nt, Human
acugcauccucaaccuccu

SEQ ID NO: 40943 - RNA, 32 nt, Human
acugcauccucaaccuccuggguucagauuau

SEQ ID NO: 40944 - RNA, 24 nt, Human
acugcauccuccaccuccuggguu

SEQ ID NO: 40945 - RNA, 24 nt, Human
acugcauccuccgccucccggguu

SEQ ID NO: 40946 - RNA, 32 nt, Human
acugcaucgggacuuuuuaauucuucagacac

SEQ ID NO: 40947 - RNA, 32 nt, Human
acugcaucugcagcucucgcucugccucuucc

SEQ ID NO: 40948 - RNA, 24 nt, Human
acugcaucuuccgccucccggguu

SEQ ID NO: 40949 - RNA, 32 nt, Human
acugcaucuucuccccuugccaccccauggcc

SEQ ID NO: 40950 - RNA, 32 nt, Human
acugcaugaagaaggucuggggacucacacag

SEQ ID NO: 40951 - RNA, 32 nt, Human
acugcaugauuuauuaguuucucuccacucug

SEQ ID NO: 40952 - RNA, 32 nt, Human
acugcaugccauguaauucugaaucauuugau

SEQ ID NO: 40953 - RNA, 21 nt, Human
acugcaugcugaugagcaagg

SEQ ID NO: 40954 - RNA, 29 nt, Human
acugcauggcugcuuuccuuuccuuuacu

SEQ ID NO: 40955 - RNA, 32 nt, Human
acugcauguaccauuugcauggcuccagaaau

SEQ ID NO: 40956 - RNA, 32 nt, Human
acugcaugugccacaccugucuguucgccauu

SEQ ID NO: 40957 - RNA, 32 nt, Human
acugcauuacuuuuguaaaaacacugguuaau

SEQ ID NO: 40958 - RNA, 32 nt, Human
acugcauuagauucuccagcgcacgcacgcgc

SEQ ID NO: 40959 - RNA, 32 nt, Human
acugcauuccagccugggcacuagagugagac

SEQ ID NO: 40960 - RNA, 32 nt, Human
acugcauuccccucuacuuuaaagcuuauauc

SEQ ID NO: 40961 - RNA, 32 nt, Human
acugcauucccuacccugcuucccuagagaga

SEQ ID NO: 40962 - RNA, 32 nt, Human
acugcauucuguuucuccuuuugugcccugau

SEQ ID NO: 40963 - RNA, 32 nt, Human
acugcauuggcugggugcaguggcucaugccu

SEQ ID NO: 40964 - RNA, 18 nt, Human
acugcauuguuucacugg

SEQ ID NO: 40965 - RNA, 32 nt, Human
acugcauuuaaaacaaaacaaaacagaaaaau

SEQ ID NO: 40966 - RNA, 32 nt, Human
acugcauuuccuucuugcucugucuacagccu

SEQ ID NO: 40967 - RNA, 32 nt, Human
acugccaaagugagagcugcuggagaacucau

SEQ ID NO: 40968 - RNA, 32 nt, Human
acugccaaccaccgggucacacugcugccuag

SEQ ID NO: 40969 - RNA, 32 nt, Human
acugccaaccugacccugucaucccgauugac

SEQ ID NO: 40970 - RNA, 32 nt, Human
acugccaagagcccugaacaggagccaccaug

SEQ ID NO: 40971 - RNA, 25 nt, Human
acugccaagauuaucugaugcucuc

SEQ ID NO: 40972 - RNA, 32 nt, Human
acugccaagcagggggacaaguauucuggcgg

SEQ ID NO: 40973 - RNA, 22 nt, Human
acugccaaggcacgaccacggg

SEQ ID NO: 40974 - RNA, 32 nt, Human
acugccaaggguggggucucaggagucaggca

SEQ ID NO: 40975 - RNA, 32 nt, Human
acugccaauuucugaggcugaagccauuucac

SEQ ID NO: 40976 - RNA, 32 nt, Human
acugccacacaguagcuguuacccacaggcag

SEQ ID NO: 40977 - RNA, 32 nt, Human
acugccacacgcagcucagccugggcggcaca

SEQ ID NO: 40978 - RNA, 32 nt, Human
acugccacacgcugggacuucggagacggcuc

SEQ ID NO: 40979 - RNA, 32 nt, Human
acugccacagacaaaccacccccacuccuacc

SEQ ID NO: 40980 - RNA, 32 nt, Human
acugccacaguuuuagaauaagcacugucacu

SEQ ID NO: 40981 - RNA, 32 nt, Human
acugccacauuggugcuguuguauugaaggug

SEQ ID NO: 40982 - RNA, 32 nt, Human
acugccaccacuggcggccugggaccagcugg

SEQ ID NO: 40983 - RNA, 32 nt, Human
acugccaccagcaaugcccugccuugcugccu

SEQ ID NO: 40984 - RNA, 32 nt, Human
acugccaccauccuggagacauuuugcagggc

SEQ ID NO: 40985 - RNA, 32 nt, Human
acugccaccaugcugcucacuuaugucaucca

SEQ ID NO: 40986 - RNA, 32 nt, Human
acugccaccgcacacgugcacacacgccaaca

SEQ ID NO: 40987 - RNA, 32 nt, Human
acugccaccgcuccugccccagaagguuguuu

SEQ ID NO: 40988 - RNA, 24 nt, Human
acugccaccuccaccucccgaguu

SEQ ID NO: 40989 - RNA, 24 nt, Human
acugccaccuccaccuccuggguu

SEQ ID NO: 40990 - RNA, 32 nt, Human
acugccaccugcagccgcagccuggacugcug

SEQ ID NO: 40991 - RNA, 32 nt, Human
acugccacuacccgcuccagagcuuuaaggaa

SEQ ID NO: 40992 - RNA, 32 nt, Human
acugccacuccacuccaggugggccacuccaa

SEQ ID NO: 40993 - RNA, 32 nt, Human
acugccacuccauuucauuaagcuauugacua

SEQ ID NO: 40994 - RNA, 32 nt, Human
acugccacugcaacucugcacguccaggaggg

SEQ ID NO: 40995 - RNA, 32 nt, Human
acugccacugggugacacagacugucguuugg

SEQ ID NO: 40996 - RNA, 32 nt, Human
acugccacuuuugcauaaauaaaacucuagac

SEQ ID NO: 40997 - RNA, 32 nt, Human
acugccagagcagguggggaaaaagaggagaa

SEQ ID NO: 40998 - RNA, 32 nt, Human
acugccagcauuucccuuccuuccucuccugu

SEQ ID NO: 40999 - RNA, 23 nt, Human
acugccagccaucgggcccaggu

SEQ ID NO: 41000 - RNA, 32 nt, Human
acugccagcucuuccuagcuggagaggagccc

SEQ ID NO: 41001 - RNA, 21 nt, Human
acugccaggaaggcccagggu

SEQ ID NO: 41002 - RNA, 32 nt, Human
acugccaggaccaaggcugagcccagcugugg

SEQ ID NO: 41003 - RNA, 24 nt, Human
acugccaggagccaaggccuaggu

SEQ ID NO: 41004 - RNA, 32 nt, Human
acugccaggaggaggagaggaggaggggagga

SEQ ID NO: 41005 - RNA, 32 nt, Human
acugccaggaugcccaggacaccagcucccug

SEQ ID NO: 41006 - RNA, 32 nt, Human
acugccaggccgaggcucagccccagacucuc

SEQ ID NO: 41007 - RNA, 32 nt, Human
acugccaggcugggugcaguggcucacaccug

SEQ ID NO: 41008 - RNA, 32 nt, Human
acugccaggcuuagacgcuuuaucuuuauuuu

SEQ ID NO: 41009 - RNA, 32 nt, Human
acugccaggcuucauucuuccauaugauccuc

SEQ ID NO: 41010 - RNA, 32 nt, Human
acugccagggaagggaagggggaccugggucu

SEQ ID NO: 41011 - RNA, 32 nt, Human
acugccagggcccaaagaaaugggugagcagu

SEQ ID NO: 41012 - RNA, 32 nt, Human
acugccagguaugggccagcaguuuccugcca

SEQ ID NO: 41013 - RNA, 32 nt, Human
acugccaucacagcagguuuccucauccagau

SEQ ID NO: 41014 - RNA, 32 nt, Human
acugccaucaggaaggugcuacuggccucgag

SEQ ID NO: 41015 - RNA, 32 nt, Human
acugccaucaucaucccaaggcaggcugcuac

SEQ ID NO: 41016 - RNA, 32 nt, Human
acugccaucauuucagcuucuggccacuggga

SEQ ID NO: 41017 - RNA, 32 nt, Human
acugccauccagcuuuggugcaauggcugagu

SEQ ID NO: 41018 - RNA, 32 nt, Human
acugccaucuucaagcugggugcaguggcuca

SEQ ID NO: 41019 - RNA, 32 nt, Human
acugccaugccaguggcugccaccacaaugcc

SEQ ID NO: 41020 - RNA, 32 nt, Human
acugccaugcugcaagagcagaauugaguagu

SEQ ID NO: 41021 - RNA, 32 nt, Human
acugccauguaucucaggcuuggguucacacc

SEQ ID NO: 41022 - RNA, 32 nt, Human
acugccauugccgccuccugccaccaggcuca

SEQ ID NO: 41023 - RNA, 32 nt, Human
acugcccaaacaggggccaagugcgccccaau

SEQ ID NO: 41024 - RNA, 32 nt, Human
acugcccacucugauaugccugggugagccua

SEQ ID NO: 41025 - RNA, 32 nt, Human
acugcccagaguccguccagccacucagcagc

SEQ ID NO: 41026 - RNA, 32 nt, Human
acugcccagcaacccggucacugcccaggacc

SEQ ID NO: 41027 - RNA, 32 nt, Human
acugcccaggcagagggcagggcuggaccaug

SEQ ID NO: 41028 - RNA, 32 nt, Human
acugcccaggccagaggguagagcacaggggu

SEQ ID NO: 41029 - RNA, 32 nt, Human
acugcccagggaggggccuggggcugggagca

SEQ ID NO: 41030 - RNA, 32 nt, Human
acugcccagggaguucaccuugcccgcuaccu

SEQ ID NO: 41031 - RNA, 32 nt, Human
acugcccagugcccacuacuucccagggacuc

SEQ ID NO: 41032 - RNA, 32 nt, Human
acugcccaugaccugaaggcuccagguggcuu

SEQ ID NO: 41033 - RNA, 32 nt, Human
acugcccaugucauuuguuuccagaaacgagg

SEQ ID NO: 41034 - RNA, 21 nt, Human
acugccccacaaaggccuggg

SEQ ID NO: 41035 - RNA, 32 nt, Human
acugccccacaagcuccagucauggguagugu

SEQ ID NO: 41036 - RNA, 32 nt, Human
acugccccaucuuuaucugggacuuagccucc

SEQ ID NO: 41037 - RNA, 32 nt, Human
acugccccauuggugccuuuucagccaucuga

SEQ ID NO: 41038 - RNA, 32 nt, Human
acugcccccacaccuccugacaccuccauaua

SEQ ID NO: 41039 - RNA, 32 nt, Human
acugcccccacugucccccuacccaccgaugg

SEQ ID NO: 41040 - RNA, 32 nt, Human
acugcccccugagauguacacccugauugcca

SEQ ID NO: 41041 - RNA, 32 nt, Human
acugcccccugccugcuccggcacugccccag

SEQ ID NO: 41042 - RNA, 32 nt, Human
acugcccccuggcugaagagucugcuuuaaau

SEQ ID NO: 41043 - RNA, 32 nt, Human
acugcccccuuuccuuuucugaccuccuuuug

SEQ ID NO: 41044 - RNA, 32 nt, Human
acugccccuagauacacaaucaccucaaguga

SEQ ID NO: 41045 - RNA, 22 nt, Human
acugccccucucauucucuuca

SEQ ID NO: 41046 - RNA, 32 nt, Human
acugccccucucugggcuucaguuuccuccuu

SEQ ID NO: 41047 - RNA, 32 nt, Human
acugccccuguccuccccacccugucaugugu

SEQ ID NO: 41048 - RNA, 32 nt, Human
acugccccuuuccucucccucagaauuugugu

SEQ ID NO: 41049 - RNA, 32 nt, Human
acugcccggccaagccccagccucagccugcg

SEQ ID NO: 41050 - RNA, 21 nt, Human
acugcccucacccucagccgu

SEQ ID NO: 41051 - RNA, 20 nt, Human
acugcccucagagcccucug

SEQ ID NO: 41052 - RNA, 32 nt, Human
acugcccuccagccuggaugacagagugagau

SEQ ID NO: 41053 - RNA, 32 nt, Human
acugcccuccucuccacccagcugcugccuau

SEQ ID NO: 41054 - RNA, 21 nt, Human
acugcccucgccuuccgggug

SEQ ID NO: 41055 - RNA, 32 nt, Human
acugcccucuagccuagacgacagagugagac

SEQ ID NO: 41056 - RNA, 32 nt, Human
acugcccucuccccaaccucuccucuaaccca

SEQ ID NO: 41057 - RNA, 32 nt, Human
acugcccucuccccgucucuagcucagaggcc

SEQ ID NO: 41058 - RNA, 32 nt, Human
acugcccugaguauuguaguuuacauacagga

SEQ ID NO: 41059 - RNA, 32 nt, Human
acugcccugcagccagccccagguaauguggu

SEQ ID NO: 41060 - RNA, 32 nt, Human
acugcccuggagguggcggccugcugcuguua

SEQ ID NO: 41061 - RNA, 32 nt, Human
acugcccuggaugugguggagcugggcuggga

SEQ ID NO: 41062 - RNA, 32 nt, Human
acugcccuggccagggcuggucucagccccga

SEQ ID NO: 41063 - RNA, 17 nt, Human
acugcccuguuuacuga

SEQ ID NO: 41064 - RNA, 32 nt, Human
acugcccuuauggagcuugcaguccagugagg

SEQ ID NO: 41065 - RNA, 32 nt, Human
acugcccuucuccaucucuuccuccuuguuca

SEQ ID NO: 41066 - RNA, 32 nt, Human
acugcccuucucuugcugccuccugggcaggg

SEQ ID NO: 41067 - RNA, 32 nt, Human
acugcccuucuuggaaguuugcaggauuggau

SEQ ID NO: 41068 - RNA, 32 nt, Human
acugcccuugccccuuucaucucccagcagcc

SEQ ID NO: 41069 - RNA, 32 nt, Human
acugcccuuuaggcucccagggccagaggagc

SEQ ID NO: 41070 - RNA, 32 nt, Human
acugcccuuuccaacugcuccagaacucuugg

SEQ ID NO: 41071 - RNA, 32 nt, Human
acugccgagcuugugagaaggaagggauggau

SEQ ID NO: 41072 - RNA, 32 nt, Human
acugccgcaagucugcagcccggcgccaccau

SEQ ID NO: 41073 - RNA, 32 nt, Human
acugccgccucccggguucaagcaauucucau

SEQ ID NO: 41074 - RNA, 32 nt, Human
acugccggagacucgggaggcugagcuuuccu

SEQ ID NO: 41075 - RNA, 32 nt, Human
acugccggaggugagagcgcagcaguagcuuc

SEQ ID NO: 41076 - RNA, 31 nt, Human
acugccggcagcaggcagaggagggaggggg

SEQ ID NO: 41077 - RNA, 32 nt, Human
acugccggcugguucccugcgcgcaguagcuc

SEQ ID NO: 41078 - RNA, 32 nt, Human
acugccgggcgaccgcgggaaaauuccaaaaa

SEQ ID NO: 41079 - RNA, 32 nt, Human
acugccgucaucucauuuuauagaugaggaaa

SEQ ID NO: 41080 - RNA, 32 nt, Human
acugccgucauuucagcuucuggccacuggga

SEQ ID NO: 41081 - RNA, 32 nt, Human
acugccguuucuuuggggcugccugugauacu

SEQ ID NO: 41082 - RNA, 32 nt, Human
acugccuaauaucuauuuaccuaacaacaaaa

SEQ ID NO: 41083 - RNA, 32 nt, Human
acugccuaauuguugcuguuguuguugcuguu

SEQ ID NO: 41084 - RNA, 32 nt, Human
acugccuacagaugcagcugaagguuccaugg

SEQ ID NO: 41085 - RNA, 32 nt, Human
acugccuacccaagccugucuuucccagcguc

SEQ ID NO: 41086 - RNA, 32 nt, Human
acugccuacccagcacuaccccaaacccccag

SEQ ID NO: 41087 - RNA, 32 nt, Human
acugccuacuacuaggagaaagaggcaaauga

SEQ ID NO: 41088 - RNA, 32 nt, Human
acugccuaguggagcugagagaagagggucac

SEQ ID NO: 41089 - RNA, 32 nt, Human
acugccuaugccaagucccuggaaaaggagcu

SEQ ID NO: 41090 - RNA, 32 nt, Human
acugccucagaagggagccacugugaaccucu

SEQ ID NO: 41091 - RNA, 32 nt, Human
acugccucagccacacacggcuuaggagauug

SEQ ID NO: 41092 - RNA, 32 nt, Human
acugccucagccaccaggacccuucucaguag

SEQ ID NO: 41093 - RNA, 32 nt, Human
acugccucagcccaugugcccugccggccagg

SEQ ID NO: 41094 - RNA, 32 nt, Human
acugccuccaacugccccaugcugccugagaa

SEQ ID NO: 41095 - RNA, 19 nt, Human
acugccuccaccacaggca

SEQ ID NO: 41096 - RNA, 21 nt, Human
acugccucccccagggauccu

SEQ ID NO: 41097 - RNA, 32 nt, Human
acugccuccucucaccaaccaaauugucuagc

SEQ ID NO: 41098 - RNA, 32 nt, Human
acugccuccuguuccagcuccugcugcugcuc

SEQ ID NO: 41099 - RNA, 21 nt, Human
acugccuccuguuuucucccu

SEQ ID NO: 41100 - RNA, 32 nt, Human
acugccuccuuuucccugucaugcucaucagc

SEQ ID NO: 41101 - RNA, 32 nt, Human
acugccucgauguuccagcugcccaucuugaa

SEQ ID NO: 41102 - RNA, 32 nt, Human
acugccucuaagacauccugcuuggcagguuc

SEQ ID NO: 41103 - RNA, 32 nt, Human
acugccucuccucucugggacaggcugggacc

SEQ ID NO: 41104 - RNA, 32 nt, Human
acugccucugcugcccugggaucauuacugug

SEQ ID NO: 41105 - RNA, 32 nt, Human
acugccucugcuuccaggaaaggcaaggggga

SEQ ID NO: 41106 - RNA, 32 nt, Human
acugccucuguggacuuagguuccaguccagu

SEQ ID NO: 41107 - RNA, 32 nt, Human
acugccucuuccugccucuccccacccugccc

SEQ ID NO: 41108 - RNA, 32 nt, Human
acugccugaacccaggaggcagagguugcggu

SEQ ID NO: 41109 - RNA, 32 nt, Human
acugccugaauacaggcuuuagguuccccugg

SEQ ID NO: 41110 - RNA, 32 nt, Human
acugccugacucaggugccucucgugguccaa

SEQ ID NO: 41111 - RNA, 32 nt, Human
acugccugcccagagccaucaggaugagcagu

SEQ ID NO: 41112 - RNA, 32 nt, Human
acugccugccucucuccuuuccuuccucaucc

SEQ ID NO: 41113 - RNA, 31 nt, Human
acugccugccucuugcggaacuggguuacac

SEQ ID NO: 41114 - RNA, 32 nt, Human
acugccugccugggcacguugcuguugcugcc

SEQ ID NO: 41115 - RNA, 32 nt, Human
acugccugcucuuccauaucauggcccuccac

SEQ ID NO: 41116 - RNA, 32 nt, Human
acugccugcugccuuuccacagcuauaaugga

SEQ ID NO: 41117 - RNA, 32 nt, Human
acugccugcuugaaagcacuuucugaccuaca

SEQ ID NO: 41118 - RNA, 32 nt, Human
acugccuggcagaacauaccacugaacuagua

SEQ ID NO: 41119 - RNA, 24 nt, Human
acugccuggccaaucaccugcaga

SEQ ID NO: 41120 - RNA, 32 nt, Human
acugccuggccuugaaaaucucagcuuggugu

SEQ ID NO: 41121 - RNA, 32 nt, Human
acugccugggaccgcccugccucaccagggcu

SEQ ID NO: 41122 - RNA, 20 nt, Human
acugccugggcucaagugau

SEQ ID NO: 41123 - RNA, 32 nt, Human
acugccugggcuccagccaccgacaugccuga

SEQ ID NO: 41124 - RNA, 32 nt, Human
acugccugggugccaugaaagaggccagcgug

SEQ ID NO: 41125 - RNA, 32 nt, Human
acugccugggugugcgccaguuugcugagaca

SEQ ID NO: 41126 - RNA, 32 nt, Human
acugccuguagagacaauacaguaagcauagu

SEQ ID NO: 41127 - RNA, 32 nt, Human
acugccuguagucccagcuauuccagggggcu

SEQ ID NO: 41128 - RNA, 31 nt, Human
acugccuguuccccacugccuguguucgcag

SEQ ID NO: 41129 - RNA, 32 nt, Human
acugccuuacagccacauuggcagcugugacc

SEQ ID NO: 41130 - RNA, 24 nt, Human
acugccuucauaguuuuagcuuuu

SEQ ID NO: 41131 - RNA, 32 nt, Human
acugccuucccauggcgaucuauaaguugaaa

SEQ ID NO: 41132 - RNA, 32 nt, Human
acugccuucucccguccuccccuccccuuccc

SEQ ID NO: 41133 - RNA, 32 nt, Human
acugccuucuccucucugggccuuuguuuccu

SEQ ID NO: 41134 - RNA, 32 nt, Human
acugccuucuguccaccaacauuuagugccag

SEQ ID NO: 41135 - RNA, 32 nt, Human
acugccuuggcaggaggguuuggggcuuccac

SEQ ID NO: 41136 - RNA, 32 nt, Human
acugccuugugagcauccccggucugggcagg

SEQ ID NO: 41137 - RNA, 32 nt, Human
acugccuuuauuuucccuccucccucuuguuu

SEQ ID NO: 41138 - RNA, 18 nt, Human
acugccuuucagccuugg

SEQ ID NO: 41139 - RNA, 32 nt, Human
acugccuuucugaaggcuggggagaggcuuug

SEQ ID NO: 41140 - RNA, 32 nt, Human
acugccuuugacuuccugacuguccccuggcu

SEQ ID NO: 41141 - RNA, 32 nt, Human
acugccuuugccuggcuuguuuugucucuuug

SEQ ID NO: 41142 - RNA, 21 nt, Human
acugccuuugugagcaaagug

SEQ ID NO: 41143 - RNA, 32 nt, Human
acugccuuugugcuuuccuccucucuccgcug

SEQ ID NO: 41144 - RNA, 32 nt, Human
acugccuuuucuuccuccuccugaccuuauuu

SEQ ID NO: 41145 - RNA, 32 nt, Human
acugcgacaguguggcguucccagcgcggcaa

SEQ ID NO: 41146 - RNA, 32 nt, Human
acugcgaccagaagauguuuccauguccuaau

SEQ ID NO: 41147 - RNA, 24 nt, Human
acugcgaccuccaccuccuggguu

SEQ ID NO: 41148 - RNA, 32 nt, Human
acugcgagagugaggcacauggccccugcaga

SEQ ID NO: 41149 - RNA, 32 nt, Human
acugcgaggcgaaggugaccggggaccgagca

SEQ ID NO: 41150 - RNA, 32 nt, Human
acugcgcacacagcugccugccucgccagaug

SEQ ID NO: 41151 - RNA, 32 nt, Human
acugcgccaccacaucacaugaccuuaacaug

SEQ ID NO: 41152 - RNA, 32 nt, Human
acugcgccaccgcgcuccagccugggugacag

SEQ ID NO: 41153 - RNA, 32 nt, Human
acugcgccacggcacuccagccugggcgacag

SEQ ID NO: 41154 - RNA, 32 nt, Human
acugcgccacugcacuccagccugggcaacag

SEQ ID NO: 41155 - RNA, 32 nt, Human
acugcgccacugcacuccagucugggacaaca

SEQ ID NO: 41156 - RNA, 32 nt, Human
acugcgccacugccaucggacaggaggauucc

SEQ ID NO: 41157 - RNA, 32 nt, Human
acugcgccauugcacuccagcccgggcaacaa

SEQ ID NO: 41158 - RNA, 32 nt, Human
acugcgcccagccuguuccuuauacucuuuaa

SEQ ID NO: 41159 - RNA, 32 nt, Human
acugcgccccaccucccugccuguguguguua

SEQ ID NO: 41160 - RNA, 32 nt, Human
acugcgcccgagaggcagcgcucagacagcgg

SEQ ID NO: 41161 - RNA, 32 nt, Human
acugcgcccuccacccucacucugccauuguu

SEQ ID NO: 41162 - RNA, 32 nt, Human
acugcgcccuggaggacgcgggcuggcugcug

SEQ ID NO: 41163 - RNA, 32 nt, Human
acugcgcccuggcccaagagccccagagacug

SEQ ID NO: 41164 - RNA, 32 nt, Human
acugcgcccuuaacugcauccagccuggggcu

SEQ ID NO: 41165 - RNA, 32 nt, Human
acugcgcgccucucccaggucucagcucuggg

SEQ ID NO: 41166 - RNA, 32 nt, Human
acugcgcggucauuuagcaaaucugcaagaga

SEQ ID NO: 41167 - RNA, 32 nt, Human
acugcgcuccagccugggcaacagagugagac

SEQ ID NO: 41168 - RNA, 32 nt, Human
acugcgcuccagccugggcgacagagugguau

SEQ ID NO: 41169 - RNA, 24 nt, Human
acugcgcugccgccgccgccgccg

SEQ ID NO: 41170 - RNA, 32 nt, Human
acugcgcuuacuccucugacccuccuucuauu

SEQ ID NO: 41171 - RNA, 32 nt, Human
acugcggaagggacgaggguucccuggagucu

SEQ ID NO: 41172 - RNA, 32 nt, Human
acugcggacagugugggccagggaggaaaacc

SEQ ID NO: 41173 - RNA, 32 nt, Human
acugcggagucugagaaaaggcagaagaaggg

SEQ ID NO: 41174 - RNA, 32 nt, Human
acugcggaugagaccggugcgacucaugaagg

SEQ ID NO: 41175 - RNA, 32 nt, Human
acugcggauggugcugcuguccccagccucuc

SEQ ID NO: 41176 - RNA, 32 nt, Human
acugcggccacagcuucugccucaggugcauc

SEQ ID NO: 41177 - RNA, 32 nt, Human
acugcggcccucaccagguccugggcucggac

SEQ ID NO: 41178 - RNA, 21 nt, Human
acugcggcgcggggcaaggug

SEQ ID NO: 41179 - RNA, 32 nt, Human
acugcgggaggcaggggaugcauggguguccc

SEQ ID NO: 41180 - RNA, 32 nt, Human
acugcgggccaccaugagggaggacuucuugg

SEQ ID NO: 41181 - RNA, 32 nt, Human
acugcgggcgagauggagcugagggaaggcag

SEQ ID NO: 41182 - RNA, 32 nt, Human
acugcggggaggugagggguggguuugggacu

SEQ ID NO: 41183 - RNA, 32 nt, Human
acugcggggcuuuuuaaaugcuucccuggacu

SEQ ID NO: 41184 - RNA, 32 nt, Human
acugcggguguucaccacaggccaggcccuaa

SEQ ID NO: 41185 - RNA, 32 nt, Human
acugcggucuccugccugugcuucagugacug

SEQ ID NO: 41186 - RNA, 32 nt, Human
acugcgguuaaaguggcuggaguggagucuug

SEQ ID NO: 41187 - RNA, 32 nt, Human
acugcguaggagagggagaugauccagagaca

SEQ ID NO: 41188 - RNA, 17 nt, Human
acugcgucccacgcggg

SEQ ID NO: 41189 - RNA, 31 nt, Human
acugcgugagagaaaacagcugguguuuaug

SEQ ID NO: 41190 - RNA, 32 nt, Human
acugcgugagagugugugcgugcaugggagug

SEQ ID NO: 41191 - RNA, 32 nt, Human
acugcgugcaagguggccucugccuggggccg

SEQ ID NO: 41192 - RNA, 32 nt, Human
acugcgugguccugcaacccugguuccagucu

SEQ ID NO: 41193 - RNA, 32 nt, Human
acugcuaaaauuaccaaauaauuuaaauaaag

SEQ ID NO: 41194 - RNA, 32 nt, Human
acugcuacaguuauccagguucuuuuaaauua

SEQ ID NO: 41195 - RNA, 31 nt, Human
acugcuacaguucagcaccuguuuuaugugc

SEQ ID NO: 41196 - RNA, 32 nt, Human
acugcuacauggugguacccaagauaauucuc

SEQ ID NO: 41197 - RNA, 32 nt, Human
acugcuaccgccagcacuagaccuggggcccu

SEQ ID NO: 41198 - RNA, 21 nt, Human
acugcuacggcgcaagagccu

SEQ ID NO: 41199 - RNA, 32 nt, Human
acugcuacuaccucggcuaccuggaggaggug

SEQ ID NO: 41200 - RNA, 32 nt, Human
acugcuacuuggaacaaaucgccccuuggcug

SEQ ID NO: 41201 - RNA, 32 nt, Human
acugcuacuuggagcucagaagccacuuuauc

SEQ ID NO: 41202 - RNA, 32 nt, Human
acugcuagagagagauaccaggcccuuagccu

SEQ ID NO: 41203 - RNA, 32 nt, Human
acugcuaggaagcaaggaugcaacaagaugau

SEQ ID NO: 41204 - RNA, 32 nt, Human
acugcuagggaaaugauuuugguguuuugggu

SEQ ID NO: 41205 - RNA, 32 nt, Human
acugcuaucuucuccauccgaggacaguuuuc

SEQ ID NO: 41206 - RNA, 32 nt, Human
acugcucacaggagacagaguagggacucgug

SEQ ID NO: 41207 - RNA, 32 nt, Human
acugcucacugcagccuccaccuccugggcuc

SEQ ID NO: 41208 - RNA, 32 nt, Human
acugcucacugcagccucgaccucccaaggcc

SEQ ID NO: 41209 - RNA, 32 nt, Human
acugcucagugcaaccucugccucccaggauc

SEQ ID NO: 41210 - RNA, 32 nt, Human
acugcucauagauaacaacuggaacauuauaa

SEQ ID NO: 41211 - RNA, 32 nt, Human
acugcucauccuccuccgccugucgccgccgu

SEQ ID NO: 41212 - RNA, 32 nt, Human
acugcuccaucuccugauguaggaggucaucu

SEQ ID NO: 41213 - RNA, 32 nt, Human
acugcuccccuucaucucuuacccuugccccc

SEQ ID NO: 41214 - RNA, 32 nt, Human
acugcuccgcauccugcuguguguccuguucc

SEQ ID NO: 41215 - RNA, 32 nt, Human
acugcuccuaccacuccagcaacgccagauaa

SEQ ID NO: 41216 - RNA, 32 nt, Human
acugcuccugcucuuugcccuguaucccauga

SEQ ID NO: 41217 - RNA, 32 nt, Human
acugcuccugggccuggagcaguauucccacc

SEQ ID NO: 41218 - RNA, 32 nt, Human
acugcucgccggccuacaugggguuaauucaa

SEQ ID NO: 41219 - RNA, 32 nt, Human
acugcucggaagacauugguagauggaccaua

SEQ ID NO: 41220 - RNA, 32 nt, Human
acugcucgugccaguuuggaagugacccuucu

SEQ ID NO: 41221 - RNA, 32 nt, Human
acugcucuacacaacagaagugaggcccaggg

SEQ ID NO: 41222 - RNA, 32 nt, Human
acugcucuaccugaauuuagacuaagcaguaa

SEQ ID NO: 41223 - RNA, 32 nt, Human
acugcucuccaaggaacuggaccuguccagac

SEQ ID NO: 41224 - RNA, 32 nt, Human
acugcucugcgggcggguggucuuagcuccag

SEQ ID NO: 41225 - RNA, 32 nt, Human
acugcucuggaaggggccccucagcugggcag

SEQ ID NO: 41226 - RNA, 32 nt, Human
acugcucuggacugacauugcucagguucgga

SEQ ID NO: 41227 - RNA, 32 nt, Human
acugcucuggggcccaugugcaagugaccugu

SEQ ID NO: 41228 - RNA, 32 nt, Human
acugcucuucccuccccucuccagcuacauac

SEQ ID NO: 41229 - RNA, 32 nt, Human
acugcucuuggagcuccucuccuagcuggagc

SEQ ID NO: 41230 - RNA, 32 nt, Human
acugcucuuggucccugugccugcugggggug

SEQ ID NO: 41231 - RNA, 32 nt, Human
acugcugacaaauaauuccugagguucuccac

SEQ ID NO: 41232 - RNA, 32 nt, Human
acugcugacaccaggcaccagcagguugcuga

SEQ ID NO: 41233 - RNA, 32 nt, Human
acugcugacagcuugggagcugcugugcccag

SEQ ID NO: 41234 - RNA, 32 nt, Human
acugcugaccacccuccccucagccauggaca

SEQ ID NO: 41235 - RNA, 32 nt, Human
acugcugaccucggccgccccuccucaccgaa

SEQ ID NO: 41236 - RNA, 26 nt, Human
acugcugacuucaggugauccacccg

SEQ ID NO: 41237 - RNA, 32 nt, Human
acugcugagaaggcuguccuuccuaacuugug

SEQ ID NO: 41238 - RNA, 32 nt, Human
acugcugagauuacaggcgugagccaccgcac

SEQ ID NO: 41239 - RNA, 32 nt, Human
acugcugagccaugcagggcagccugguggcg

SEQ ID NO: 41240 - RNA, 32 nt, Human
acugcugagcuggcccuuggggagaggugauu

SEQ ID NO: 41241 - RNA, 32 nt, Human
acugcugagugauucauaaacauaucaaccaa

SEQ ID NO: 41242 - RNA, 19 nt, Human
acugcugaugcaaauuggc

SEQ ID NO: 41243 - RNA, 32 nt, Human
acugcugcaaacauuguacauccaaauuaaag

SEQ ID NO: 41244 - RNA, 32 nt, Human
acugcugcaaccucccccuccuggguucaagc

SEQ ID NO: 41245 - RNA, 32 nt, Human
acugcugcacacagcaccaugacaaagucagu

SEQ ID NO: 41246 - RNA, 32 nt, Human
acugcugcagaggccguggcacuugucauggg

SEQ ID NO: 41247 - RNA, 32 nt, Human
acugcugcauuccagccagggugacagaguga

SEQ ID NO: 41248 - RNA, 32 nt, Human
acugcugccaucuucgcugcuagucaggguuc

SEQ ID NO: 41249 - RNA, 32 nt, Human
acugcugcgccgugccucacacagccgaggcg

SEQ ID NO: 41250 - RNA, 32 nt, Human
acugcugcggcuccuccugcaggccugagggg

SEQ ID NO: 41251 - RNA, 32 nt, Human
acugcugcuacugcuucuacaauguaaaaugu

SEQ ID NO: 41252 - RNA, 32 nt, Human
acugcugcugacugggcagggcccuggacccc

SEQ ID NO: 41253 - RNA, 24 nt, Human
acugcugcugcugcugcucagggc

SEQ ID NO: 41254 - RNA, 32 nt, Human
acugcugcuggggcuggcagagcaguuggcug

SEQ ID NO: 41255 - RNA, 32 nt, Human
acugcugcugucacugccauccauuggagccc

SEQ ID NO: 41256 - RNA, 32 nt, Human
acugcugcuucucagggaauccgacaccagcc

SEQ ID NO: 41257 - RNA, 32 nt, Human
acugcuggaagugguggcccaccagagccucc

SEQ ID NO: 41258 - RNA, 32 nt, Human
acugcuggacugcuccuggcucugucagcaaa

SEQ ID NO: 41259 - RNA, 32 nt, Human
acugcuggacuuacccugggcugcaguccauu

SEQ ID NO: 41260 - RNA, 32 nt, Human
acugcuggagagagucguacuggggaggcagc

SEQ ID NO: 41261 - RNA, 32 nt, Human
acugcuggagccugagagguggaggaguucug

SEQ ID NO: 41262 - RNA, 32 nt, Human
acugcuggcaugcagugcccucacagagaccc

SEQ ID NO: 41263 - RNA, 32 nt, Human
acugcuggcauuacaggugugagccaccaugc

SEQ ID NO: 41264 - RNA, 32 nt, Human
acugcuggccagggguaggauaguauaggaag

SEQ ID NO: 41265 - RNA, 32 nt, Human
acugcugggauuacaggcgugaaccacugcac

SEQ ID NO: 41266 - RNA, 32 nt, Human
acugcugggauuacaggcgugagccaccacac

SEQ ID NO: 41267 - RNA, 32 nt, Human
acugcugggauuacaggcgugagccaccgcac

SEQ ID NO: 41268 - RNA, 32 nt, Human
acugcugggauuacaggcgugagccaccgcgc

SEQ ID NO: 41269 - RNA, 32 nt, Human
acugcugggauuacaggcgugagccacucugc

SEQ ID NO: 41270 - RNA, 32 nt, Human
acugcugggauuacaggcgugugccaccaugc

SEQ ID NO: 41271 - RNA, 32 nt, Human
acugcugggauuacaggugugagccaccaugc

SEQ ID NO: 41272 - RNA, 32 nt, Human
acugcugggauuacaggugugagccaccguga

SEQ ID NO: 41273 - RNA, 32 nt, Human
acugcugggauuauaggcaugagccacugcgc

SEQ ID NO: 41274 - RNA, 32 nt, Human
acugcugggauuauaggcgugagccaccguac

SEQ ID NO: 41275 - RNA, 32 nt, Human
acugcuggggacggcgccugagcucucagggg

SEQ ID NO: 41276 - RNA, 32 nt, Human
acugcuggggagaggagggcagugaggagcga

SEQ ID NO: 41277 - RNA, 32 nt, Human
acugcuggggaugcugaaggguggugacuaau

SEQ ID NO: 41278 - RNA, 32 nt, Human
acugcuggggccgauugaacacuggacuuuug

SEQ ID NO: 41279 - RNA, 32 nt, Human
acugcugggugguggaggugggcaguggcacc

SEQ ID NO: 41280 - RNA, 32 nt, Human
acugcuggugggguagggaugagggagggagg

SEQ ID NO: 41281 - RNA, 32 nt, Human
acugcugucagugcaaagaugggauggacuuu

SEQ ID NO: 41282 - RNA, 32 nt, Human
acugcuguccagccacagccccagcccaggca

SEQ ID NO: 41283 - RNA, 32 nt, Human
acugcuguccauaaaccagaagccugacaugu

SEQ ID NO: 41284 - RNA, 32 nt, Human
acugcugucccagaggagaguccugugcgacc

SEQ ID NO: 41285 - RNA, 32 nt, Human
acugcuguccggagaggagggagccugaaguc

SEQ ID NO: 41286 - RNA, 32 nt, Human
acugcugugacgggggcucccugcugccccgg

SEQ ID NO: 41287 - RNA, 32 nt, Human
acugcugugauggaauaacaagggucagauuu

SEQ ID NO: 41288 - RNA, 32 nt, Human
acugcuguguuugagcucugcagcccagggac

SEQ ID NO: 41289 - RNA, 32 nt, Human
acugcuguuaaagacauaccugagacugggua

SEQ ID NO: 41290 - RNA, 32 nt, Human
acugcuguuuguacugucugucuucacauuca

SEQ ID NO: 41291 - RNA, 32 nt, Human
acugcuuacaauaucuuuagguuccugaaacu

SEQ ID NO: 41292 - RNA, 32 nt, Human
acugcuuagagcgagagcagagcaaacugcgc

SEQ ID NO: 41293 - RNA, 32 nt, Human
acugcuucaaggguaaaagagugcaucgcuuu

SEQ ID NO: 41294 - RNA, 32 nt, Human
acugcuucaugugcccccuacccuccacccca

SEQ ID NO: 41295 - RNA, 32 nt, Human
acugcuucauucugccucuaguaccagcgguu

SEQ ID NO: 41296 - RNA, 32 nt, Human
acugcuuccacuggacagaaaaagcaaacuga

SEQ ID NO: 41297 - RNA, 32 nt, Human
acugcuuccccguaauuccuucagagguugcu

SEQ ID NO: 41298 - RNA, 32 nt, Human
acugcuuccucacauccaucugauugcaccau

SEQ ID NO: 41299 - RNA, 32 nt, Human
acugcuuccuccuuggccccucaggcccuugg

SEQ ID NO: 41300 - RNA, 32 nt, Human
acugcuuccucuccagcuguggcuccaucugc

SEQ ID NO: 41301 - RNA, 32 nt, Human
acugcuuccugggcucucaugaucucagcuga

SEQ ID NO: 41302 - RNA, 32 nt, Human
acugcuucugcccucugccugccagugcccau

SEQ ID NO: 41303 - RNA, 25 nt, Human
acugcuucugugaaagaaaagucaa

SEQ ID NO: 41304 - RNA, 32 nt, Human
acugcuucugugaacagucuuugucuccuccc

SEQ ID NO: 41305 - RNA, 32 nt, Human
acugcuucuuaacaccuccaccagggggaagg

SEQ ID NO: 41306 - RNA, 21 nt, Human
acugcuucuuggagcuuugga

SEQ ID NO: 41307 - RNA, 32 nt, Human
acugcuugaacccagaaggcagagguugcagu

SEQ ID NO: 41308 - RNA, 32 nt, Human
acugcuugaacccaggaggcagagguugcagu

SEQ ID NO: 41309 - RNA, 32 nt, Human
acugcuugaacccgagaggcggagcuugcagu

SEQ ID NO: 41310 - RNA, 32 nt, Human
acugcuugagccuggaagacauagguugcagu

SEQ ID NO: 41311 - RNA, 32 nt, Human
acugcuugagcucaggagguugaggcugcaga

SEQ ID NO: 41312 - RNA, 32 nt, Human
acugcuugcccagggugcagugugagugugau

SEQ ID NO: 41313 - RNA, 32 nt, Human
acugcuugcugguccuguggcagaucaagaag

SEQ ID NO: 41314 - RNA, 32 nt, Human
acugcuuggaagaaggaaacggaagcugacau

SEQ ID NO: 41315 - RNA, 19 nt, Human
acugcuugguccucaggua

SEQ ID NO: 41316 - RNA, 32 nt, Human
acugcuuguugcucccugucgucugcaccaua

SEQ ID NO: 41317 - RNA, 32 nt, Human
acugcuuguuuugcacaagaagugauuuugug

SEQ ID NO: 41318 - RNA, 32 nt, Human
acugcuuuaccuccccuccuacugagucaggu

SEQ ID NO: 41319 - RNA, 32 nt, Human
acugcuuuacuaaggagaugugcaaugcugaa

SEQ ID NO: 41320 - RNA, 32 nt, Human
acugcuuuccaggggcuaauguuauucugcca

SEQ ID NO: 41321 - RNA, 32 nt, Human
acugcuuucccuccccugucaggucucuccug

SEQ ID NO: 41322 - RNA, 32 nt, Human
acugcuuugaagccugaagccaugaaaaugca

SEQ ID NO: 41323 - RNA, 32 nt, Human
acugcuuugcagcugucugcaugccuaauaua

SEQ ID NO: 41324 - RNA, 32 nt, Human
acugcuuugcauaaaacugggaagaaagagaa

SEQ ID NO: 41325 - RNA, 32 nt, Human
acugcuuugccuggccgggcgcgguggcucac

SEQ ID NO: 41326 - RNA, 32 nt, Human
acugcuuuggauuggggucaauugcaguccac

SEQ ID NO: 41327 - RNA, 32 nt, Human
acugcuuuguguccuuauggacuuuaguauua

SEQ ID NO: 41328 - RNA, 32 nt, Human
acugcuuuuucaucaagugaauauuuaaaaag

SEQ ID NO: 41329 - RNA, 32 nt, Human
acugcuuuuuguauuuggagagagugacuauu

SEQ ID NO: 41330 - RNA, 32 nt, Human
acuggaaaacaaauucccccaaaacacaugga

SEQ ID NO: 41331 - RNA, 32 nt, Human
acuggaaaagaugccugccccugcugccacau

SEQ ID NO: 41332 - RNA, 32 nt, Human
acuggaaacagccuuuuccucauuuucugugu

SEQ ID NO: 41333 - RNA, 32 nt, Human
acuggaaaccagcacugucagcacuuugagcc

SEQ ID NO: 41334 - RNA, 32 nt, Human
acuggaaaggacagcccuugaccuggguucug

SEQ ID NO: 41335 - RNA, 32 nt, Human
acuggaaaggccauuagaauugccccagcaga

SEQ ID NO: 41336 - RNA, 32 nt, Human
acuggaaauacugauggaagcacacaagugga

SEQ ID NO: 41337 - RNA, 32 nt, Human
acuggaaaucccucucugcugcuuuuguuggu

SEQ ID NO: 41338 - RNA, 32 nt, Human
acuggaaauguucaacuguaguuuuauuaagg

SEQ ID NO: 41339 - RNA, 32 nt, Human
acuggaacaaagaagagagggagugagagaaa

SEQ ID NO: 41340 - RNA, 32 nt, Human
acuggaacauaguucuccuucaaguguuggcg

SEQ ID NO: 41341 - RNA, 32 nt, Human
acuggaacccggaagguggagguugcagugag

SEQ ID NO: 41342 - RNA, 32 nt, Human
acuggaaccuaccgcuacacagccacuaacca

SEQ ID NO: 41343 - RNA, 32 nt, Human
acuggaaccugggagccggaggcugcagugag

SEQ ID NO: 41344 - RNA, 32 nt, Human
acuggaacgucgggggcaaagcauacacacac

SEQ ID NO: 41345 - RNA, 32 nt, Human
acuggaacucacaaaggucuccuucaccgaaa

SEQ ID NO: 41346 - RNA, 32 nt, Human
acuggaacucucaugcguugcuggugggaaug

SEQ ID NO: 41347 - RNA, 32 nt, Human
acuggaacugaacugccuucucugcacgcuug

SEQ ID NO: 41348 - RNA, 32 nt, Human
acuggaacugcaacuccagcguccucagcacc

SEQ ID NO: 41349 - RNA, 32 nt, Human
acuggaagaaagagacagagaaggagugucaa

SEQ ID NO: 41350 - RNA, 32 nt, Human
acuggaagauccaccuccccacugccuuuucu

SEQ ID NO: 41351 - RNA, 23 nt, Human
acuggaagccagaaaaucagguu

SEQ ID NO: 41352 - RNA, 32 nt, Human
acuggaagccaggggacuccagccugggcggg

SEQ ID NO: 41353 - RNA, 32 nt, Human
acuggaagcucccuccgcggucggauucugga

SEQ ID NO: 41354 - RNA, 32 nt, Human
acuggaaggauucucauaagaugcaggauagu

SEQ ID NO: 41355 - RNA, 32 nt, Human
acuggaaggcagagguugcagugagccaagau

SEQ ID NO: 41356 - RNA, 32 nt, Human
acuggaaggcagagguugcagugagccgagau

SEQ ID NO: 41357 - RNA, 32 nt, Human
acuggaaggccucagcccccagccacugggcu

SEQ ID NO: 41358 - RNA, 32 nt, Human
acuggaagggagcagaggccagcugggggcca

SEQ ID NO: 41359 - RNA, 32 nt, Human
acuggaaggggaaaggaagggaagggagggag

SEQ ID NO: 41360 - RNA, 32 nt, Human
acuggaagguccuugccugaacuccagaggug

SEQ ID NO: 41361 - RNA, 32 nt, Human
acuggaagugaugucauaagguugugaugugu

SEQ ID NO: 41362 - RNA, 32 nt, Human
acuggaaucaaggggagggggaagggaaugaa

SEQ ID NO: 41363 - RNA, 32 nt, Human
acuggaaucucucauuaaaguucuuggaacau

SEQ ID NO: 41364 - RNA, 32 nt, Human
acuggaaucucuccaccucaucguaucuaagg

SEQ ID NO: 41365 - RNA, 21 nt, Human
acuggaaucuguaaaccuuga

SEQ ID NO: 41366 - RNA, 32 nt, Human
acuggaaugaccuccugaccacucccucccgg

SEQ ID NO: 41367 - RNA, 32 nt, Human
acuggaauggcuguguccuagucugcuggggc

SEQ ID NO: 41368 - RNA, 32 nt, Human
acuggaauuacaaaugagaagagucuacaaua

SEQ ID NO: 41369 - RNA, 22 nt, Human
acuggaauucucagaugccuga

SEQ ID NO: 41370 - RNA, 22 nt, Human
acuggaauuuaaagacagcgca

SEQ ID NO: 41371 - RNA, 22 nt, Human
acuggacaaguacgggauccug

SEQ ID NO: 41372 - RNA, 32 nt, Human
acuggacaaugccacuccuccuguacaccugu

SEQ ID NO: 41373 - RNA, 32 nt, Human
acuggacacaguacuggugaaacugaggagag

SEQ ID NO: 41374 - RNA, 32 nt, Human
acuggacacugcaggcaagguguugguaacug

SEQ ID NO: 41375 - RNA, 32 nt, Human
acuggacagauggaguuaaaaagagcuuuugu

SEQ ID NO: 41376 - RNA, 19 nt, Human
acuggacagauggauucua

SEQ ID NO: 41377 - RNA, 27 nt, Human
acuggacaggacauccaccccaaaggg

SEQ ID NO: 41378 - RNA, 31 nt, Human
acuggacaggugggaagaugggaaugaggac

SEQ ID NO: 41379 - RNA, 32 nt, Human
acuggacaugccacuccccggccucguggcag

SEQ ID NO: 41380 - RNA, 32 nt, Human
acuggaccacugcaccguggagcagaggugaa

SEQ ID NO: 41381 - RNA, 32 nt, Human
acuggaccagcuccaaaaggaaaaagaugaac

SEQ ID NO: 41382 - RNA, 32 nt, Human
acuggaccauuuaaaugugcauggcccaugag

SEQ ID NO: 41383 - RNA, 32 nt, Human
acuggacccauucaaucucaucuugauaaaga

SEQ ID NO: 41384 - RNA, 32 nt, Human
acuggacccccagagggucaagaucgaggaua

SEQ ID NO: 41385 - RNA, 32 nt, Human
acuggacccugaccacuggcucuugggcaaac

SEQ ID NO: 41386 - RNA, 32 nt, Human
acuggaccgcugccaccucuugguagccaucg

SEQ ID NO: 41387 - RNA, 32 nt, Human
acuggaccuauguaucagccguacacacagaa

SEQ ID NO: 41388 - RNA, 32 nt, Human
acuggaccugaggagaccucagccucggugcu

SEQ ID NO: 41389 - RNA, 32 nt, Human
acuggaccugccuuggcuucuuugaucccaac

SEQ ID NO: 41390 - RNA, 32 nt, Human
acuggaccuucucauauuacguuuaaggaaga

SEQ ID NO: 41391 - RNA, 32 nt, Human
acuggacgcauuuuuauacauaggguaagcgc

SEQ ID NO: 41392 - RNA, 21 nt, Human
acuggacggcugccaaggagg

SEQ ID NO: 41393 - RNA, 18 nt, Human
acuggacggggaaaccua

SEQ ID NO: 41394 - RNA, 32 nt, Human
acuggacuaagccuccugggccuuguaugaaa

SEQ ID NO: 41395 - RNA, 32 nt, Human
acuggacuaggggagucaggagacccggguuc

SEQ ID NO: 41396 - RNA, 32 nt, Human
acuggacuaugaaccuggaccgcuaggauacc

SEQ ID NO: 41397 - RNA, 32 nt, Human
acuggacuccagccugggcgacagagugagac

SEQ ID NO: 41398 - RNA, 32 nt, Human
acuggacuccaggagcagggaucuugagucaa

SEQ ID NO: 41399 - RNA, 32 nt, Human
acuggacugccacaacagaucacugaaauucu

SEQ ID NO: 41400 - RNA, 32 nt, Human
acuggacugggugagaggacagagguggcucg

SEQ ID NO: 41401 - RNA, 32 nt, Human
acuggacuguaguagaggcauuuggaauacuu

SEQ ID NO: 41402 - RNA, 32 nt, Human
acuggacugugagcugccugaggucagggauu

SEQ ID NO: 41403 - RNA, 32 nt, Human
acuggacuucauuuugauacuugucuauccuu

SEQ ID NO: 41404 - RNA, 32 nt, Human
acuggacuugcaguguaaacagagacgcugca

SEQ ID NO: 41405 - RNA, 32 nt, Human
acuggagaaaaaugaauuuuguugggcaggaa

SEQ ID NO: 41406 - RNA, 21 nt, Human
acuggagaaagcagcucuuga

SEQ ID NO: 41407 - RNA, 32 nt, Human
acuggagaaagggaaccacagagccaggagga

SEQ ID NO: 41408 - RNA, 32 nt, Human
acuggagaagcagcagggcaacuucaaggcca

SEQ ID NO: 41409 - RNA, 32 nt, Human
acuggagaaggugagcgcugaagaaccaggau

SEQ ID NO: 41410 - RNA, 32 nt, Human
acuggagacacaaguggagaaaaccuccagcu

SEQ ID NO: 41411 - RNA, 32 nt, Human
acuggagacccaggacccugugcaggagcagc

SEQ ID NO: 41412 - RNA, 19 nt, Human
acuggagacgcacagaucc

SEQ ID NO: 41413 - RNA, 32 nt, Human
acuggagagaggcauuaaagaaccagggaagg

SEQ ID NO: 41414 - RNA, 32 nt, Human
acuggagagagguggaaugaaguggcaagggg

SEQ ID NO: 41415 - RNA, 32 nt, Human
acuggagagcagggggaggccacgugagguug

SEQ ID NO: 41416 - RNA, 32 nt, Human
acuggagagccaaggccucuguuuuagucuuu

SEQ ID NO: 41417 - RNA, 32 nt, Human
acuggagagcuccaaggaaagccccucgguaa

SEQ ID NO: 41418 - RNA, 32 nt, Human
acuggagaggcugacccaggggauggacauuc

SEQ ID NO: 41419 - RNA, 32 nt, Human
acuggagaggcugaggcaggagaaucacuuag

SEQ ID NO: 41420 - RNA, 32 nt, Human
acuggagagggaugcccuagcccucgaggggc

SEQ ID NO: 41421 - RNA, 32 nt, Human
acuggagagggcggucgcaggagccugcgagg

SEQ ID NO: 41422 - RNA, 32 nt, Human
acuggagagugaggaggaggaggagccuuggu

SEQ ID NO: 41423 - RNA, 32 nt, Human
acuggagaugcugagauuuaaacccgggugcu

SEQ ID NO: 41424 - RNA, 32 nt, Human
acuggagauggggagucccaggaagcucaugu

SEQ ID NO: 41425 - RNA, 32 nt, Human
acuggagcaaaagguccuucugugcacccugg

SEQ ID NO: 41426 - RNA, 32 nt, Human
acuggagcacagccuccugccucccagcccgg

SEQ ID NO: 41427 - RNA, 32 nt, Human
acuggagcaguggugcaauuauggcucacugc

SEQ ID NO: 41428 - RNA, 32 nt, Human
acuggagccaagugcgcugagcucucacauga

SEQ ID NO: 41429 - RNA, 32 nt, Human
acuggagccaggcuggaagucaaguggcuucu

SEQ ID NO: 41430 - RNA, 32 nt, Human
acuggagcccaggaggucaaggcugcagugag

SEQ ID NO: 41431 - RNA, 32 nt, Human
acuggagcccaggaguuugaggcugcagcgag

SEQ ID NO: 41432 - RNA, 32 nt, Human
acuggagcccaggauuggcagcguggaaucag

SEQ ID NO: 41433 - RNA, 32 nt, Human
acuggagccuccauuuacuggggagaauagaa

SEQ ID NO: 41434 - RNA, 32 nt, Human
acuggagccugcaaaugcauuguguuugcucu

SEQ ID NO: 41435 - RNA, 32 nt, Human
acuggagccuggaccccgccucccaggacaug

SEQ ID NO: 41436 - RNA, 32 nt, Human
acuggagcggccccgcccugcccuugccugcc

SEQ ID NO: 41437 - RNA, 32 nt, Human
acuggagcuccaggagccauccuggaauuucu

SEQ ID NO: 41438 - RNA, 32 nt, Human
acuggagcugcuaagacacaugguugcacaga

SEQ ID NO: 41439 - RNA, 32 nt, Human
acuggaggaacagcagcucugggaggcacaga

SEQ ID NO: 41440 - RNA, 32 nt, Human
acuggaggaaccucuggagcagcuguuggcug

SEQ ID NO: 41441 - RNA, 32 nt, Human
acuggaggaggugaggucgagagccagguuca

SEQ ID NO: 41442 - RNA, 32 nt, Human
acuggaggcaacagaaagaaaugaagugacuc

SEQ ID NO: 41443 - RNA, 32 nt, Human
acuggaggccaagaguuggagagcagacuggg

SEQ ID NO: 41444 - RNA, 32 nt, Human
acuggaggccaucaacccucuugguugaggcc

SEQ ID NO: 41445 - RNA, 32 nt, Human
acuggaggcccagaugugcccaucacguuuuu

SEQ ID NO: 41446 - RNA, 32 nt, Human
acuggaggccuccugaggccaggaacgugcaa

SEQ ID NO: 41447 - RNA, 23 nt, Human
acuggaggcggagguugcaguga

SEQ ID NO: 41448 - RNA, 32 nt, Human
acuggaggcgggaucacucaggcuccagccca

SEQ ID NO: 41449 - RNA, 32 nt, Human
acuggaggcucuguucugccucuuaucagcca

SEQ ID NO: 41450 - RNA, 32 nt, Human
acuggaggcugagucaggagaaucacuugaac

SEQ ID NO: 41451 - RNA, 32 nt, Human
acuggaggcuucagccuugcuguuuacacaca

SEQ ID NO: 41452 - RNA, 32 nt, Human
acuggagggaaagagugaggccagccugcccg

SEQ ID NO: 41453 - RNA, 32 nt, Human
acuggagggagagacgugggcacaaaggucgc

SEQ ID NO: 41454 - RNA, 32 nt, Human
acuggaggguaaacaagguggagagaagcuuc

SEQ ID NO: 41455 - RNA, 32 nt, Human
acuggaggguuccgggaaaagagcagaggaaa

SEQ ID NO: 41456 - RNA, 32 nt, Human
acuggagguccaguaggccuggccggggcccu

SEQ ID NO: 41457 - RNA, 32 nt, Human
acuggagguccccagaagacuauguuccuguc

SEQ ID NO: 41458 - RNA, 32 nt, Human
acuggagguggcagugccuguuuaugaacuaa

SEQ ID NO: 41459 - RNA, 32 nt, Human
acuggagguguccucuggaugaagggaaagug

SEQ ID NO: 41460 - RNA, 32 nt, Human
acuggaguacaggaguuuggggcuguagugug

SEQ ID NO: 41461 - RNA, 32 nt, Human
acuggagucaucugaaggcucaacuggaccgg

SEQ ID NO: 41462 - RNA, 32 nt, Human
acuggaguccaggaguucaagguggcagugag

SEQ ID NO: 41463 - RNA, 32 nt, Human
acuggagucugagaggaggagguggagacuau

SEQ ID NO: 41464 - RNA, 32 nt, Human
acuggagugcaggaguucaagaccagccuggg

SEQ ID NO: 41465 - RNA, 32 nt, Human
acuggauaaagccacacaauaagcaccucuaa

SEQ ID NO: 41466 - RNA, 32 nt, Human
acuggauaaggagagaauagcuuuuauguacu

SEQ ID NO: 41467 - RNA, 18 nt, Human
acuggauacuagaucuua

SEQ ID NO: 41468 - RNA, 32 nt, Human
acuggaucacaaaaugugauaaaacuuuaaau

SEQ ID NO: 41469 - RNA, 32 nt, Human
acuggaucccagcugccuuccugggcuugugc

SEQ ID NO: 41470 - RNA, 32 nt, Human
acuggaucugcaggugggaugagggagacaga

SEQ ID NO: 41471 - RNA, 32 nt, Human
acuggaugagagugugggagguggaugcggga

SEQ ID NO: 41472 - RNA, 32 nt, Human
acuggaugagaugguaucucacugugguuuuu

SEQ ID NO: 41473 - RNA, 32 nt, Human
acuggaugagggcagaugaggacaggaagaga

SEQ ID NO: 41474 - RNA, 32 nt, Human
acuggaugcaaagcuagaaaauauugcaauaa

SEQ ID NO: 41475 - RNA, 32 nt, Human
acuggauggaaagaugaguuguguagguuauc

SEQ ID NO: 41476 - RNA, 32 nt, Human
acuggauggaguuagggaaacugaggcaaaag

SEQ ID NO: 41477 - RNA, 32 nt, Human
acuggauggauaaugaugccacugagugagug

SEQ ID NO: 41478 - RNA, 32 nt, Human
acuggauggcaucagaauugucuggaaguuuu

SEQ ID NO: 41479 - RNA, 32 nt, Human
acuggaugucuccugaucccaggcugggaccc

SEQ ID NO: 41480 - RNA, 32 nt, Human
acuggauguguccugaucuacuccuucuccuu

SEQ ID NO: 41481 - RNA, 32 nt, Human
acuggauuauaacauggacaaaucuuauuuug

SEQ ID NO: 41482 - RNA, 32 nt, Human
acuggauucucuuccugaagcgaaggggcucc

SEQ ID NO: 41483 - RNA, 32 nt, Human
acuggauuugaagucagaagaccuggguucuu

SEQ ID NO: 41484 - RNA, 32 nt, Human
acuggauuuguuguucuuucagaaagcuuuga

SEQ ID NO: 41485 - RNA, 32 nt, Human
acuggauuuuccagauccuugugguccuggaa

SEQ ID NO: 41486 - RNA, 32 nt, Human
acuggcaaagcaguccagccuccgucuucugg

SEQ ID NO: 41487 - RNA, 32 nt, Human
acuggcaaaggcagaucuccccuccuuccagu

SEQ ID NO: 41488 - RNA, 31 nt, Human
acuggcaaccacacaacucagggaaaggaau

SEQ ID NO: 41489 - RNA, 32 nt, Human
acuggcaagagggagaaaggacgcugccgccu

SEQ ID NO: 41490 - RNA, 32 nt, Human
acuggcaagguuuuuaaaaaugagguaaaugc

SEQ ID NO: 41491 - RNA, 32 nt, Human
acuggcaauacuccagccuggugacagaguga

SEQ ID NO: 41492 - RNA, 32 nt, Human
acuggcacacacacauacacacauaugcacaa

SEQ ID NO: 41493 - RNA, 32 nt, Human
acuggcacagcaacaucaggguugugacagag

SEQ ID NO: 41494 - RNA, 32 nt, Human
acuggcacagccagucccuggugaaggcuuaa

SEQ ID NO: 41495 - RNA, 32 nt, Human
acuggcacaggaccucuucauugcaggaagau

SEQ ID NO: 41496 - RNA, 32 nt, Human
acuggcacauuuucucuguuucucucuccgau

SEQ ID NO: 41497 - RNA, 22 nt, Human
acuggcacccaccacgacgccc

SEQ ID NO: 41498 - RNA, 32 nt, Human
acuggcaccucacacuccuucuugucaggagc

SEQ ID NO: 41499 - RNA, 32 nt, Human
acuggcaccuggagagcccuuaagucuguccu

SEQ ID NO: 41500 - RNA, 19 nt, Human
acuggcacgcaugagcacc

SEQ ID NO: 41501 - RNA, 32 nt, Human
acuggcacucaacaccagcccaugaaaagagc

SEQ ID NO: 41502 - RNA, 32 nt, Human
acuggcacugcacgaggggccaggagagcagc

SEQ ID NO: 41503 - RNA, 32 nt, Human
acuggcacugugaccuuagcauuuaguuuucu

SEQ ID NO: 41504 - RNA, 32 nt, Human
acuggcagagacgcagaagggaaaguguccag

SEQ ID NO: 41505 - RNA, 32 nt, Human
acuggcagagauucaaagaagccacuaaagca

SEQ ID NO: 41506 - RNA, 32 nt, Human
acuggcagagccuguaguuggaaaggggacag

SEQ ID NO: 41507 - RNA, 32 nt, Human
acuggcagagcuggaggaggaggagggcaaac

SEQ ID NO: 41508 - RNA, 32 nt, Human
acuggcagccaucuaugguaccacugaaaccc

SEQ ID NO: 41509 - RNA, 32 nt, Human
acuggcagccuugccacacuguccucauuccc

SEQ ID NO: 41510 - RNA, 32 nt, Human
acuggcagcuggccgggcgcucgcagugggag

SEQ ID NO: 41511 - RNA, 19 nt, Human
acuggcagcuguggaaaug

SEQ ID NO: 41512 - RNA, 32 nt, Human
acuggcaggaggcaggugcagggaggccuggg

SEQ ID NO: 41513 - RNA, 21 nt, Human
acuggcaggcagaaagugcaa

SEQ ID NO: 41514 - RNA, 32 nt, Human
acuggcaggcagcucuaccugcagccccugug

SEQ ID NO: 41515 - RNA, 32 nt, Human
acuggcagggcggucacgggaccugcgggcug

SEQ ID NO: 41516 - RNA, 32 nt, Human
acuggcaggggagacaggagccuagcggagcc

SEQ ID NO: 41517 - RNA, 32 nt, Human
acuggcagguuugugagccucuucccaccccc

SEQ ID NO: 41518 - RNA, 32 nt, Human
acuggcagucgaauuauauccuagcguuaucu

SEQ ID NO: 41519 - RNA, 22 nt, Human
acuggcaguuucaaggaugcaa

SEQ ID NO: 41520 - RNA, 32 nt, Human
acuggcaguuuugaacuucccuuccuuaaagu

SEQ ID NO: 41521 - RNA, 32 nt, Human
acuggcauacuauguggaugugacaguggcgu

SEQ ID NO: 41522 - RNA, 32 nt, Human
acuggcaucaagauuccucagacuccaugagu

SEQ ID NO: 41523 - RNA, 32 nt, Human
acuggcaucgcagcuuccugucuguuuauaua

SEQ ID NO: 41524 - RNA, 32 nt, Human
acuggcaugguggcaugcgccuguaaucccag

SEQ ID NO: 41525 - RNA, 32 nt, Human
acuggcauuguuagcuggggacauggaagugg

SEQ ID NO: 41526 - RNA, 32 nt, Human
acuggccaacacagcgagacccccaucucuaa

SEQ ID NO: 41527 - RNA, 32 nt, Human
acuggccaagcuucuuuccuucauacaggggu

SEQ ID NO: 41528 - RNA, 32 nt, Human
acuggccacagagauauccuggaagacacgug

SEQ ID NO: 41529 - RNA, 22 nt, Human
acuggccacagggcgcuggggg

SEQ ID NO: 41530 - RNA, 23 nt, Human
acuggccaccucugaacccuuug

SEQ ID NO: 41531 - RNA, 32 nt, Human
acuggccacgcacaggcucuggcucuggaagg

SEQ ID NO: 41532 - RNA, 32 nt, Human
acuggccacgcgggggcaguggaggcacaggc

SEQ ID NO: 41533 - RNA, 32 nt, Human
acuggccagcucaagagguuuggauauggacc

SEQ ID NO: 41534 - RNA, 32 nt, Human
acuggccaguacuuagucacguggcuacaucu

SEQ ID NO: 41535 - RNA, 32 nt, Human
acuggccagugugggguuagcagaucgaauaa

SEQ ID NO: 41536 - RNA, 32 nt, Human
acuggccauaaaccacagacucucuccaggcu

SEQ ID NO: 41537 - RNA, 32 nt, Human
acuggccauggagccgcgcacaggggacgccg

SEQ ID NO: 41538 - RNA, 32 nt, Human
acuggccauucuggucaucucagucuggaacu

SEQ ID NO: 41539 - RNA, 32 nt, Human
acuggccauugaggaggcucucagcggagucg

SEQ ID NO: 41540 - RNA, 32 nt, Human
acuggcccaaccacaggagcugccaguaucca

SEQ ID NO: 41541 - RNA, 32 nt, Human
acuggcccaagauuugguaaagagauuucauu

SEQ ID NO: 41542 - RNA, 32 nt, Human
acuggcccacguccccaugccugggugcugug

SEQ ID NO: 41543 - RNA, 32 nt, Human
acuggcccagaagucugggugccugaguucua

SEQ ID NO: 41544 - RNA, 32 nt, Human
acuggcccagcagaggguggauaugugggcug

SEQ ID NO: 41545 - RNA, 32 nt, Human
acuggcccagggccaccucuugcuuggggagc

SEQ ID NO: 41546 - RNA, 32 nt, Human
acuggcccaguucacuguaccuggacuuaccc

SEQ ID NO: 41547 - RNA, 32 nt, Human
acuggccccaggugaugcugccuuugcugucc

SEQ ID NO: 41548 - RNA, 32 nt, Human
acuggcccccagugucaggcaggaggugaccc

SEQ ID NO: 41549 - RNA, 32 nt, Human
acuggccccuguccuuggccagucccaagccc

SEQ ID NO: 41550 - RNA, 32 nt, Human
acuggccccuuugccugaccuggacuuggaga

SEQ ID NO: 41551 - RNA, 32 nt, Human
acuggcccucaccuccacgccuaccucauagc

SEQ ID NO: 41552 - RNA, 32 nt, Human
acuggcccugaccacauagaugcugcgccgcc

SEQ ID NO: 41553 - RNA, 32 nt, Human
acuggcccugcagcuugucuccauggugggcu

SEQ ID NO: 41554 - RNA, 32 nt, Human
acuggcccugcagggcgcccacccugcggccc

SEQ ID NO: 41555 - RNA, 32 nt, Human
acuggcccugccaccugaccucagccucaggg

SEQ ID NO: 41556 - RNA, 32 nt, Human
acuggcccuggccugucuccagcucugcgccu

SEQ ID NO: 41557 - RNA, 32 nt, Human
acuggccgcugcuggucuuccugcugcccgcc

SEQ ID NO: 41558 - RNA, 32 nt, Human
acuggccggcagccuggugagcccucaccucc

SEQ ID NO: 41559 - RNA, 32 nt, Human
acuggccuaccuagcagaccuggauuuuucuu

SEQ ID NO: 41560 - RNA, 32 nt, Human
acuggccuccuagcccaacuacuuugucagcu

SEQ ID NO: 41561 - RNA, 32 nt, Human
acuggccuccuccagggaugaucaacagggca

SEQ ID NO: 41562 - RNA, 20 nt, Human
acuggccugaggagcagcag

SEQ ID NO: 41563 - RNA, 32 nt, Human
acuggccugcagcuuugccaacauuaccugaa

SEQ ID NO: 41564 - RNA, 32 nt, Human
acuggccugccuggccccucccuccaggccag

SEQ ID NO: 41565 - RNA, 32 nt, Human
acuggccuggccacacugcucuccaguagcac

SEQ ID NO: 41566 - RNA, 32 nt, Human
acuggccugggcagguggcgggaacguugcug

SEQ ID NO: 41567 - RNA, 32 nt, Human
acuggccugggugacagagcaggacaugagac

SEQ ID NO: 41568 - RNA, 32 nt, Human
acuggccuguggugacugcacacagcucgcaa

SEQ ID NO: 41569 - RNA, 32 nt, Human
acuggccuguggugaugcaaagcugcuuugcu

SEQ ID NO: 41570 - RNA, 32 nt, Human
acuggccuugagauaagcaaugcugaagcacu

SEQ ID NO: 41571 - RNA, 32 nt, Human
acuggccuuuguuucacauguccucauucuca

SEQ ID NO: 41572 - RNA, 32 nt, Human
acuggcgaggcugaggcuggaggaucacugga

SEQ ID NO: 41573 - RNA, 32 nt, Human
acuggcgaggcugcugggguugcagcgggaca

SEQ ID NO: 41574 - RNA, 32 nt, Human
acuggcgaucaucaagcaaaagcugccaauua

SEQ ID NO: 41575 - RNA, 32 nt, Human
acuggcgcaguggcucaugccgguaauccagu

SEQ ID NO: 41576 - RNA, 32 nt, Human
acuggcggagccagagagauguaacuucaccc

SEQ ID NO: 41577 - RNA, 20 nt, Human
acuggcggccaggggcacag

SEQ ID NO: 41578 - RNA, 32 nt, Human
acuggcggucugcacuucucucccggguucca

SEQ ID NO: 41579 - RNA, 22 nt, Human
acuggcguccauagucagaccc

SEQ ID NO: 41580 - RNA, 24 nt, Human
acuggcguccguccacagaagccc

SEQ ID NO: 41581 - RNA, 23 nt, Human
acuggcgucuaagacagugaccu

SEQ ID NO: 41582 - RNA, 32 nt, Human
acuggcguuagcugauuaacccauguaaauag

SEQ ID NO: 41583 - RNA, 32 nt, Human
acuggcuaacuagguugagaaaccggcgccac

SEQ ID NO: 41584 - RNA, 24 nt, Human
acuggcuacacaacagagaugcaa

SEQ ID NO: 41585 - RNA, 32 nt, Human
acuggcucaagcaaucugcccaccucggucuc

SEQ ID NO: 41586 - RNA, 32 nt, Human
acuggcucauuucucgcaaauaccucgaaggg

SEQ ID NO: 41587 - RNA, 32 nt, Human
acuggcuccaacacugcaacauggggacauuu

SEQ ID NO: 41588 - RNA, 16 nt, Human
acuggcuccaacugcc

SEQ ID NO: 41589 - RNA, 32 nt, Human
acuggcuccaucauacauauucaccacuugag

SEQ ID NO: 41590 - RNA, 32 nt, Human
acuggcucccugcagcucugcggcuacacgcg

SEQ ID NO: 41591 - RNA, 32 nt, Human
acuggcuccuccagugcacagauuugcaaccg

SEQ ID NO: 41592 - RNA, 32 nt, Human
acuggcuccuggaagggaugaggguccagaga

SEQ ID NO: 41593 - RNA, 32 nt, Human
acuggcuccugggcguuagaugaaugaaucga

SEQ ID NO: 41594 - RNA, 32 nt, Human
acuggcucgcuacacacaacacugaccccugc

SEQ ID NO: 41595 - RNA, 32 nt, Human
acuggcucgugugccauccauauccaucuuuc

SEQ ID NO: 41596 - RNA, 32 nt, Human
acuggcucucaggggccagcuccccaugggcg

SEQ ID NO: 41597 - RNA, 32 nt, Human
acuggcucucugagagagaguagcccuaccua

SEQ ID NO: 41598 - RNA, 32 nt, Human
acuggcugaaggaagccaagaggaucacugcu

SEQ ID NO: 41599 - RNA, 32 nt, Human
acuggcugaccccuccuuguaauguagacaga

SEQ ID NO: 41600 - RNA, 32 nt, Human
acuggcugaccugguggccgugguggagauga

SEQ ID NO: 41601 - RNA, 32 nt, Human
acuggcugagcaccugcugugugugcacugcu

SEQ ID NO: 41602 - RNA, 32 nt, Human
acuggcugaucuguagcugcuuucacuccaag

SEQ ID NO: 41603 - RNA, 32 nt, Human
acuggcugcccaggcugaauggcagugccugg

SEQ ID NO: 41604 - RNA, 32 nt, Human
acuggcugccuuguuccuggccuaggacuuag

SEQ ID NO: 41605 - RNA, 32 nt, Human
acuggcugcguuccgggagacucggggcaaga

SEQ ID NO: 41606 - RNA, 32 nt, Human
acuggcugcugcugcccugcgcgcugcuggcu

SEQ ID NO: 41607 - RNA, 32 nt, Human
acuggcuggacccucugcccugggcaggaggu

SEQ ID NO: 41608 - RNA, 32 nt, Human
acuggcuggaggccugccugugucuagagcuc

SEQ ID NO: 41609 - RNA, 32 nt, Human
acuggcuggccaucuggccugccuggaggaga

SEQ ID NO: 41610 - RNA, 32 nt, Human
acuggcuggcugucuugcaucagucccaggcc

SEQ ID NO: 41611 - RNA, 32 nt, Human
acuggcuggugcugggggagcugcagauggcc

SEQ ID NO: 41612 - RNA, 32 nt, Human
acuggcugguugcugggggcaggugucacagc

SEQ ID NO: 41613 - RNA, 32 nt, Human
acuggcugugagagccgcagugaauggcugga

SEQ ID NO: 41614 - RNA, 32 nt, Human
acuggcugugcauaaaaccacccaucuagguc

SEQ ID NO: 41615 - RNA, 32 nt, Human
acuggcuguggcuggaaucugccuuuuaucac

SEQ ID NO: 41616 - RNA, 32 nt, Human
acuggcugugugaccuuaggcccggagcugcc

SEQ ID NO: 41617 - RNA, 18 nt, Human
acuggcugugugaucuca

SEQ ID NO: 41618 - RNA, 32 nt, Human
acuggcuuaagccaggagccacuggcugcugg

SEQ ID NO: 41619 - RNA, 32 nt, Human
acuggcuuacagauuuacaugugcacacacac

SEQ ID NO: 41620 - RNA, 32 nt, Human
acuggcuucagccuccccaccuucuucagcca

SEQ ID NO: 41621 - RNA, 32 nt, Human
acuggcuucccauugccucucuugagugucag

SEQ ID NO: 41622 - RNA, 32 nt, Human
acuggcuucccccuaccaaguuaugcuuaaaa

SEQ ID NO: 41623 - RNA, 32 nt, Human
acuggcuucccucugcugcugccuuggcuucc

SEQ ID NO: 41624 - RNA, 32 nt, Human
acuggcuuccuccaaagucccaauacucuagc

SEQ ID NO: 41625 - RNA, 32 nt, Human
acuggcuucuaggguucugggcucaggcagga

SEQ ID NO: 41626 - RNA, 32 nt, Human
acuggcuucucaauuuucuuccuucucugccc

SEQ ID NO: 41627 - RNA, 32 nt, Human
acuggcuucucccuuucuuacucacacugacc

SEQ ID NO: 41628 - RNA, 32 nt, Human
acuggcuugauggaucacccccaggaggggaa

SEQ ID NO: 41629 - RNA, 32 nt, Human
acuggcuuguuugccuuaacuuguaguaccag

SEQ ID NO: 41630 - RNA, 32 nt, Human
acuggcuuugagcucucuggguacagugucug

SEQ ID NO: 41631 - RNA, 32 nt, Human
acuggcuuuggaauuaaauagcuuagauugua

SEQ ID NO: 41632 - RNA, 31 nt, Human
acuggcuuuuccucugggccuggguuggugc

SEQ ID NO: 41633 - RNA, 32 nt, Human
acuggcuuuucucuccccuggccuuugcugaa

SEQ ID NO: 41634 - RNA, 32 nt, Human
acugggaaaccagugacugaggccuggaccca

SEQ ID NO: 41635 - RNA, 27 nt, Human
acugggaaacuguguugaagcuccuga

SEQ ID NO: 41636 - RNA, 32 nt, Human
acugggaaagccccagguaaccccggacuggu

SEQ ID NO: 41637 - RNA, 32 nt, Human
acugggaaaugggagcacaguacuggaaaaug

SEQ ID NO: 41638 - RNA, 32 nt, Human
acugggaaccacagaggaaggaugagguggga

SEQ ID NO: 41639 - RNA, 32 nt, Human
acugggaacucaguuucuagccccagguuccu

SEQ ID NO: 41640 - RNA, 32 nt, Human
acugggaacuccagaaguuguggggagagugg

SEQ ID NO: 41641 - RNA, 32 nt, Human
acugggaacugcaccagaugcucagacuuggu

SEQ ID NO: 41642 - RNA, 32 nt, Human
acugggaagaucuagccuaaagaggcuucucu

SEQ ID NO: 41643 - RNA, 32 nt, Human
acugggaaggagggccccacagcuucagacug

SEQ ID NO: 41644 - RNA, 32 nt, Human
acugggaagggcccuucaggucaccaaacauc

SEQ ID NO: 41645 - RNA, 32 nt, Human
acugggaaguccauuugcaagcugagcgccag

SEQ ID NO: 41646 - RNA, 26 nt, Human
acugggaagucugaugugggcaggua

SEQ ID NO: 41647 - RNA, 32 nt, Human
acugggaauggggucagucacagcagaaccgu

SEQ ID NO: 41648 - RNA, 21 nt, Human
acugggaaugucaggcuccug

SEQ ID NO: 41649 - RNA, 32 nt, Human
acugggaccaaagggguggggauaauggggag

SEQ ID NO: 41650 - RNA, 32 nt, Human
acugggaccagcugaacgagacggucuucacu

SEQ ID NO: 41651 - RNA, 32 nt, Human
acugggaccccaggcaugcaccaccucaccaa

SEQ ID NO: 41652 - RNA, 32 nt, Human
acugggacccuccccagccuggagaguucauc

SEQ ID NO: 41653 - RNA, 32 nt, Human
acugggacccucugccccaagccucaguuccu

SEQ ID NO: 41654 - RNA, 32 nt, Human
acugggacuaaaugcuaccaucuucuguauug

SEQ ID NO: 41655 - RNA, 32 nt, Human
acugggacuguggccuggccugcuccaggaug

SEQ ID NO: 41656 - RNA, 32 nt, Human
acugggagacugcuugguguucccugaggaca

SEQ ID NO: 41657 - RNA, 32 nt, Human
acugggagacuugccuggguucccaggacuug

SEQ ID NO: 41658 - RNA, 32 nt, Human
acugggagccuucuggaauccugcagaggguc

SEQ ID NO: 41659 - RNA, 32 nt, Human
acugggagcugcagaccggagcuguuccuauu

SEQ ID NO: 41660 - RNA, 32 nt, Human
acugggagcugcagaccggagcuguucuucag

SEQ ID NO: 41661 - RNA, 32 nt, Human
acugggagcugcagaccggagcuguucuucuu

SEQ ID NO: 41662 - RNA, 32 nt, Human
acugggaggagagaauguuccaggcagaggaa

SEQ ID NO: 41663 - RNA, 32 nt, Human
acugggaggaggcggugcggcgaagcgcucag

SEQ ID NO: 41664 - RNA, 32 nt, Human
acugggaggcagggguuggagugagccaggac

SEQ ID NO: 41665 - RNA, 32 nt, Human
acugggaggcagguuuggaggcugcaguggga

SEQ ID NO: 41666 - RNA, 32 nt, Human
acugggaggcggagcuugcagugagccgagau

SEQ ID NO: 41667 - RNA, 32 nt, Human
acugggaggcucagaggacccuuccugcccac

SEQ ID NO: 41668 - RNA, 32 nt, Human
acugggaggcugcugccuccuuccugcccaug

SEQ ID NO: 41669 - RNA, 32 nt, Human
acugggaggggcccuggcagcaugaaaccccc

SEQ ID NO: 41670 - RNA, 32 nt, Human
acugggaggguccccuccuccuucccuacucc

SEQ ID NO: 41671 - RNA, 32 nt, Human
acugggagguggagguugcagugagccaagau

SEQ ID NO: 41672 - RNA, 32 nt, Human
acugggagguugaagcagaauugcuugaaccc

SEQ ID NO: 41673 - RNA, 32 nt, Human
acugggagugggcuccucggggucgggcaucu

SEQ ID NO: 41674 - RNA, 32 nt, Human
acugggagugggggucagagaggcagauuccu

SEQ ID NO: 41675 - RNA, 32 nt, Human
acugggauaaagcaagaagacugauuuuauga

SEQ ID NO: 41676 - RNA, 32 nt, Human
acugggauccaucucccacuaguaggaagaag

SEQ ID NO: 41677 - RNA, 32 nt, Human
acugggaugaugagaggcaaugcuggaguguu

SEQ ID NO: 41678 - RNA, 32 nt, Human
acugggauggauccacuguggguggggaggag

SEQ ID NO: 41679 - RNA, 32 nt, Human
acugggcaacagagcaagacccugucucuuga

SEQ ID NO: 41680 - RNA, 32 nt, Human
acugggcaacauagcaagaccccgucucuaca

SEQ ID NO: 41681 - RNA, 19 nt, Human
acugggcaccguggaucug

SEQ ID NO: 41682 - RNA, 20 nt, Human
acugggcacucuuggaucug

SEQ ID NO: 41683 - RNA, 32 nt, Human
acugggcacucuuggaucuggagcucacaacu

SEQ ID NO: 41684 - RNA, 32 nt, Human
acugggcacuugggguccagaggcagggccuu

SEQ ID NO: 41685 - RNA, 32 nt, Human
acugggcagaucccaggcugggcaugggggug

SEQ ID NO: 41686 - RNA, 32 nt, Human
acugggcagcaguucugggugucuggaauggg

SEQ ID NO: 41687 - RNA, 30 nt, Human
acugggcagcaucaccagcuccuguaccgu

SEQ ID NO: 41688 - RNA, 32 nt, Human
acugggcagcgggcauccuacuuccaaggcua

SEQ ID NO: 41689 - RNA, 32 nt, Human
acugggcaggaggcaggagauggcaauggaag

SEQ ID NO: 41690 - RNA, 32 nt, Human
acugggcaggcacagagcaggggcugcccagg

SEQ ID NO: 41691 - RNA, 32 nt, Human
acugggcaggcugcaaaugucuguguuaaaac

SEQ ID NO: 41692 - RNA, 32 nt, Human
acugggcaggggccuuggugggcagauggcaa

SEQ ID NO: 41693 - RNA, 32 nt, Human
acugggcagggugggggcaacccagaggaccc

SEQ ID NO: 41694 - RNA, 32 nt, Human
acugggcauaggcagagaucucuggaguguug

SEQ ID NO: 41695 - RNA, 32 nt, Human
acugggcauaugguucacgccuguaauuccag

SEQ ID NO: 41696 - RNA, 32 nt, Human
acugggcaucuccugagccuaggcaauagcug

SEQ ID NO: 41697 - RNA, 32 nt, Human
acugggcaucuucugcacuuucucugcauuug

SEQ ID NO: 41698 - RNA, 32 nt, Human
acugggcaugaagaagggagcacagcagguac

SEQ ID NO: 41699 - RNA, 32 nt, Human
acugggcaugagggguuccuccccuccagcuc

SEQ ID NO: 41700 - RNA, 18 nt, Human
acugggcauuugccaaag

SEQ ID NO: 41701 - RNA, 32 nt, Human
acugggccacugcacuccagccuggaugacag

SEQ ID NO: 41702 - RNA, 32 nt, Human
acugggccagcccugcagcccaaaacccaggg

SEQ ID NO: 41703 - RNA, 32 nt, Human
acugggccaggaucuguaucauccuucgcaga

SEQ ID NO: 41704 - RNA, 32 nt, Human
acugggccaggcaccucccucacaggacaauc

SEQ ID NO: 41705 - RNA, 32 nt, Human
acugggccauuuuagacccccagggaaacagc

SEQ ID NO: 41706 - RNA, 32 nt, Human
acugggccauuuuguucucagagggacaaaac

SEQ ID NO: 41707 - RNA, 32 nt, Human
acugggcccaggaguucgaggugcaguuuggc

SEQ ID NO: 41708 - RNA, 32 nt, Human
acugggccccaccuccacaguucccagaagca

SEQ ID NO: 41709 - RNA, 32 nt, Human
acugggccccgacugcagccugcauucugcac

SEQ ID NO: 41710 - RNA, 32 nt, Human
acugggccccucgcccccuccuccagcggccu

SEQ ID NO: 41711 - RNA, 32 nt, Human
acugggcccuuccagagggagcucuuuggcca

SEQ ID NO: 41712 - RNA, 32 nt, Human
acugggcccuugacaguguccuuugacauucc

SEQ ID NO: 41713 - RNA, 32 nt, Human
acugggccuccgcuucccagcaacgcagccag

SEQ ID NO: 41714 - RNA, 32 nt, Human
acugggccugcagccuuccucuucugggacug

SEQ ID NO: 41715 - RNA, 32 nt, Human
acugggccugcagcucccuucuccugggacuu

SEQ ID NO: 41716 - RNA, 32 nt, Human
acugggccuguugcccuuucuguaccauuuau

SEQ ID NO: 41717 - RNA, 32 nt, Human
acugggcgacagagcaagacucugucucucuc

SEQ ID NO: 41718 - RNA, 32 nt, Human
acugggcgagccugccggccucuagauggccu

SEQ ID NO: 41719 - RNA, 32 nt, Human
acugggcgagggacugggaaagaggcauauuu

SEQ ID NO: 41720 - RNA, 32 nt, Human
acugggcggccaggggaugacaguauggacuu

SEQ ID NO: 41721 - RNA, 32 nt, Human
acugggcuaaucucccccuagcuucaagcugu

SEQ ID NO: 41722 - RNA, 32 nt, Human
acugggcuacagcuucuaucacaugccgaacu

SEQ ID NO: 41723 - RNA, 32 nt, Human
acugggcuagccugcacugccugggaaagucg

SEQ ID NO: 41724 - RNA, 32 nt, Human
acugggcuaggcugcaacuuuaucucauuuaa

SEQ ID NO: 41725 - RNA, 32 nt, Human
acugggcucacugcagccuagaccugcugggc

SEQ ID NO: 41726 - RNA, 32 nt, Human
acugggcucacuggcagcccugacccucuauu

SEQ ID NO: 41727 - RNA, 32 nt, Human
acugggcucagccugucccccacuccugccug

SEQ ID NO: 41728 - RNA, 32 nt, Human
acugggcuccagccugggcgacagagugagag

SEQ ID NO: 41729 - RNA, 23 nt, Human
acugggcucccacucagccccug

SEQ ID NO: 41730 - RNA, 32 nt, Human
acugggcucugcccucauuuucuguuuauugc

SEQ ID NO: 41731 - RNA, 32 nt, Human
acugggcugacccuuuugauuuccaaacucag

SEQ ID NO: 41732 - RNA, 32 nt, Human
acugggcugcagaaucucacaugggcaccaug

SEQ ID NO: 41733 - RNA, 18 nt, Human
acugggcugcaggugcug

SEQ ID NO: 41734 - RNA, 32 nt, Human
acugggcugcagguuccagcuguugcugcuag

SEQ ID NO: 41735 - RNA, 32 nt, Human
acugggcugcauucucaggagauuaggcauuc

SEQ ID NO: 41736 - RNA, 32 nt, Human
acugggcugggagagaagauggggaagugugu

SEQ ID NO: 41737 - RNA, 32 nt, Human
acugggcugggcaggugcaggccaccgccguc

SEQ ID NO: 41738 - RNA, 32 nt, Human
acugggcuggggaagcagaugcuugcuggcca

SEQ ID NO: 41739 - RNA, 32 nt, Human
acugggcugugugaggguggggugggaggggg

SEQ ID NO: 41740 - RNA, 32 nt, Human
acugggcuuagcugggccucugaggccuguau

SEQ ID NO: 41741 - RNA, 32 nt, Human
acugggcuucaagguacagccuaauggcuugc

SEQ ID NO: 41742 - RNA, 32 nt, Human
acugggcuuccuaccaguuucucagaauuaca

SEQ ID NO: 41743 - RNA, 24 nt, Human
acuggggaaaguggaggcuccuga

SEQ ID NO: 41744 - RNA, 22 nt, Human
acuggggaaauaaaaccucuga

SEQ ID NO: 41745 - RNA, 20 nt, Human
acuggggaacuucaggcucc

SEQ ID NO: 41746 - RNA, 32 nt, Human
acuggggaagcagagguuguagugagccgaga

SEQ ID NO: 41747 - RNA, 32 nt, Human
acuggggaauaauauaccuuacacucuagggu

SEQ ID NO: 41748 - RNA, 32 nt, Human
acuggggaccagcccccuucucccacaaauaa

SEQ ID NO: 41749 - RNA, 22 nt, Human
acuggggagacgaggaccccga

SEQ ID NO: 41750 - RNA, 19 nt, Human
acuggggagcacugccaaa

SEQ ID NO: 41751 - RNA, 32 nt, Human
acuggggagcgggaccagagagacaggcugcu

SEQ ID NO: 41752 - RNA, 32 nt, Human
acuggggaggagaagguugcagugagccgaga

SEQ ID NO: 41753 - RNA, 32 nt, Human
acuggggaggagagacaggauaaagggcagau

SEQ ID NO: 41754 - RNA, 32 nt, Human
acuggggaggcagagguugcagugagacaaga

SEQ ID NO: 41755 - RNA, 32 nt, Human
acuggggaggcagagguugcaguggcccgaga

SEQ ID NO: 41756 - RNA, 32 nt, Human
acuggggaggcagagguugcggugagcccaga

SEQ ID NO: 41757 - RNA, 32 nt, Human
acuggggaggcugaggcacgagaaucacuuga

SEQ ID NO: 41758 - RNA, 32 nt, Human
acuggggaggcugaggcaggaaaaugguguca

SEQ ID NO: 41759 - RNA, 32 nt, Human
acuggggaggcugaggcaggacaaugacguga

SEQ ID NO: 41760 - RNA, 32 nt, Human
acuggggaggcugaggcaggacaauggcguga

SEQ ID NO: 41761 - RNA, 26 nt, Human
acuggggaggcugaggcaggagaauc

SEQ ID NO: 41762 - RNA, 32 nt, Human
acuggggaggcugaggcaggagaaucacuuga

SEQ ID NO: 41763 - RNA, 32 nt, Human
acuggggaggcugaggcaggagaaucgcuuga

SEQ ID NO: 41764 - RNA, 32 nt, Human
acuggggaggcugaggcaggagaaucguuuua

SEQ ID NO: 41765 - RNA, 32 nt, Human
acuggggaggcugaggcgggagaaucgcuuga

SEQ ID NO: 41766 - RNA, 32 nt, Human
acuggggaggcugaggugggaggauugcuuga

SEQ ID NO: 41767 - RNA, 32 nt, Human
acuggggagggaacuccgccccucgcgggaga

SEQ ID NO: 41768 - RNA, 32 nt, Human
acuggggagggcugcagucacauugauguaag

SEQ ID NO: 41769 - RNA, 32 nt, Human
acuggggaggggcauccuggagugcuggucua

SEQ ID NO: 41770 - RNA, 32 nt, Human
acuggggaggucuagcauguggcguaggaggg

SEQ ID NO: 41771 - RNA, 32 nt, Human
acuggggaggugugugucagggccaagguccu

SEQ ID NO: 41772 - RNA, 32 nt, Human
acuggggcagagggacagggaagccaggucga

SEQ ID NO: 41773 - RNA, 32 nt, Human
acuggggcaggcggaccuuguagucuugugag

SEQ ID NO: 41774 - RNA, 32 nt, Human
acuggggcaggcggagggcccugcgugcuccu

SEQ ID NO: 41775 - RNA, 32 nt, Human
acuggggccacugcucugccgcggagauaagu

SEQ ID NO: 41776 - RNA, 32 nt, Human
acuggggccacugcucugcugcggagauaagu

SEQ ID NO: 41777 - RNA, 32 nt, Human
acuggggccaggcaggcggaaaagagaacaga

SEQ ID NO: 41778 - RNA, 32 nt, Human
acuggggcccacccuucucaccagcacuaaau

SEQ ID NO: 41779 - RNA, 32 nt, Human
acuggggcccagcagcugccuccugaggugac

SEQ ID NO: 41780 - RNA, 21 nt, Human
acuggggccucccccaaagga

SEQ ID NO: 41781 - RNA, 32 nt, Human
acuggggcucuugagcagcuugcuuuagccug

SEQ ID NO: 41782 - RNA, 32 nt, Human
acuggggcuuggcucacugcuaccuccgccuc

SEQ ID NO: 41783 - RNA, 32 nt, Human
acuggggcuuugauuuggaggaauggggcagg

SEQ ID NO: 41784 - RNA, 32 nt, Human
acugggggaagaggagccaaugacaggguagg

SEQ ID NO: 41785 - RNA, 32 nt, Human
acugggggacuugggguagggggacagacggg

SEQ ID NO: 41786 - RNA, 32 nt, Human
acugggggaggcagggcacagggagaugcuca

SEQ ID NO: 41787 - RNA, 32 nt, Human
acugggggcuccccaccuccuugcucucccca

SEQ ID NO: 41788 - RNA, 32 nt, Human
acuggggguugcggcggcugcccacgccggaa

SEQ ID NO: 41789 - RNA, 32 nt, Human
acugggguacagcaaagggacgauccuccaga

SEQ ID NO: 41790 - RNA, 32 nt, Human
acugggguagggcugaacagcugcauucgaga

SEQ ID NO: 41791 - RNA, 32 nt, Human
acugggguagggcugaacagcugcauucgagg

SEQ ID NO: 41792 - RNA, 32 nt, Human
acugggguagggucauaccacagggaaauacc

SEQ ID NO: 41793 - RNA, 32 nt, Human
acuggggucagggcacagcaacuuagcgaggc

SEQ ID NO: 41794 - RNA, 32 nt, Human
acugggguccucuugguucugccugcagccug

SEQ ID NO: 41795 - RNA, 32 nt, Human
acuggggucucccacaagguggggucaggaga

SEQ ID NO: 41796 - RNA, 32 nt, Human
acuggggucuccugcccucucuguugagccag

SEQ ID NO: 41797 - RNA, 32 nt, Human
acuggggugggagggggcagggggcuuggcuc

SEQ ID NO: 41798 - RNA, 32 nt, Human
acugggguuuguacaugcuggggaggagccuu

SEQ ID NO: 41799 - RNA, 32 nt, Human
acugggguuuuauuucugaagcauuuuauagg

SEQ ID NO: 41800 - RNA, 32 nt, Human
acuggguacagaugaggagcaggugcauugga

SEQ ID NO: 41801 - RNA, 32 nt, Human
acuggguacaguaccuccagccccagggcccu

SEQ ID NO: 41802 - RNA, 32 nt, Human
acuggguagcuggugugaacacaggggguacu

SEQ ID NO: 41803 - RNA, 32 nt, Human
acuggguaugaaacuauuugauuucuagucuu

SEQ ID NO: 41804 - RNA, 32 nt, Human
acuggguaugccucucuauccucucuccuccc

SEQ ID NO: 41805 - RNA, 32 nt, Human
acuggguauggagggucuugagugucagcagg

SEQ ID NO: 41806 - RNA, 32 nt, Human
acugggucaaagcugcaugaaaccaggcccug

SEQ ID NO: 41807 - RNA, 32 nt, Human
acugggucaaagcuuauuuaaguauacggaca

SEQ ID NO: 41808 - RNA, 32 nt, Human
acugggucagcccucagaaacugcagcagcca

SEQ ID NO: 41809 - RNA, 32 nt, Human
acugggucaggaguuugagaccagccuggcca

SEQ ID NO: 41810 - RNA, 19 nt, Human
acugggucucacuauguug

SEQ ID NO: 41811 - RNA, 19 nt, Human
acugggucucaguauguug

SEQ ID NO: 41812 - RNA, 32 nt, Human
acugggucucucucaaggccacucggcuacuc

SEQ ID NO: 41813 - RNA, 32 nt, Human
acugggucucucuccacccgggagcugaggag

SEQ ID NO: 41814 - RNA, 32 nt, Human
acugggucugggggcucccuggagcuccuccu

SEQ ID NO: 41815 - RNA, 32 nt, Human
acugggucuuggcuggguugaagguuccaagc

SEQ ID NO: 41816 - RNA, 32 nt, Human
acugggugaaucuggcaggaaucuauccauug

SEQ ID NO: 41817 - RNA, 32 nt, Human
acugggugagaaaggaacagguggauuuugaa

SEQ ID NO: 41818 - RNA, 32 nt, Human
acugggugccguggagcuuagccucagcgagu

SEQ ID NO: 41819 - RNA, 18 nt, Human
acugggugcguucacuga

SEQ ID NO: 41820 - RNA, 32 nt, Human
acuggguggagaaaggagacuugcccaccugu

SEQ ID NO: 41821 - RNA, 32 nt, Human
acuggguggagcuguggcagggggcacugagc

SEQ ID NO: 41822 - RNA, 32 nt, Human
acugggugucuuuuucuuuucaucuggcaacc

SEQ ID NO: 41823 - RNA, 32 nt, Human
acugggugugaggcacacagccuaaagucagc

SEQ ID NO: 41824 - RNA, 32 nt, Human
acuggguguggccuggcuucugggacaggcac

SEQ ID NO: 41825 - RNA, 32 nt, Human
acugggugugggccgugagguuuaggaggcuu

SEQ ID NO: 41826 - RNA, 32 nt, Human
acuggguuaaauauuuugcuaacugguuaaac

SEQ ID NO: 41827 - RNA, 32 nt, Human
acuggguuucgcuguguuagccuggauggucu

SEQ ID NO: 41828 - RNA, 32 nt, Human
acuggguuucuagcccauggacuucacauaag

SEQ ID NO: 41829 - RNA, 32 nt, Human
acugguaaaauuauaugguuuauuuuaaaugc

SEQ ID NO: 41830 - RNA, 32 nt, Human
acugguaacaggcugggugcaauggcucacac

SEQ ID NO: 41831 - RNA, 20 nt, Human
acugguaauuccaggugcug

SEQ ID NO: 41832 - RNA, 32 nt, Human
acugguaauuccaggugcugcgcuuggcagag

SEQ ID NO: 41833 - RNA, 32 nt, Human
acugguaccaaaacagauauagaucaauggaa

SEQ ID NO: 41834 - RNA, 32 nt, Human
acugguaccaacacagauauagagaccucaga

SEQ ID NO: 41835 - RNA, 32 nt, Human
acugguacgugggugaggggauggaggaaggc

SEQ ID NO: 41836 - RNA, 23 nt, Human
acugguacuauagcauuuugcua

SEQ ID NO: 41837 - RNA, 32 nt, Human
acugguacuguugccaagcaaucugcuuggaa

SEQ ID NO: 41838 - RNA, 32 nt, Human
acugguacuuccuuucaguagggcgcuaaugu

SEQ ID NO: 41839 - RNA, 32 nt, Human
acugguagcucccugcuaguuugcugucuucc

SEQ ID NO: 41840 - RNA, 32 nt, Human
acugguaggaugagggauauuauggugggaaa

SEQ ID NO: 41841 - RNA, 32 nt, Human
acugguauaaauacaucucucuccaauuuggc

SEQ ID NO: 41842 - RNA, 32 nt, Human
acugguauagcuguggagagggagacauuucu

SEQ ID NO: 41843 - RNA, 32 nt, Human
acugguauccacuccauaccacagcccuuggc

SEQ ID NO: 41844 - RNA, 32 nt, Human
acugguaugaacagaucugauuucuuacagag

SEQ ID NO: 41845 - RNA, 32 nt, Human
acugguauugcugcuggagggcugugggcucc

SEQ ID NO: 41846 - RNA, 28 nt, Human
acuggucaagugaaugccucauguuucu

SEQ ID NO: 41847 - RNA, 32 nt, Human
acuggucagacucuauagcuuccaaaccaucg

SEQ ID NO: 41848 - RNA, 31 nt, Human
acuggucagagaguucgcaguggggagaagu

SEQ ID NO: 41849 - RNA, 18 nt, Human
acuggucagcuuagcucu

SEQ ID NO: 41850 - RNA, 32 nt, Human
acuggucaggcugugccuucaccucuguagcu

SEQ ID NO: 41851 - RNA, 32 nt, Human
acuggucaggggcagagucugggugcuguccu

SEQ ID NO: 41852 - RNA, 32 nt, Human
acuggucaguuauuuaaaauacuggcauaccu

SEQ ID NO: 41853 - RNA, 32 nt, Human
acuggucauacaggguaagcaccagggacaau

SEQ ID NO: 41854 - RNA, 32 nt, Human
acuggucaugccaggcacacacugcugcccaa

SEQ ID NO: 41855 - RNA, 32 nt, Human
acugguccagauguccccgccccacaucccuu

SEQ ID NO: 41856 - RNA, 32 nt, Human
acugguccagcucugacaucccuuccuggaaa

SEQ ID NO: 41857 - RNA, 32 nt, Human
acugguccagcugcccugggcuccuuuucuau

SEQ ID NO: 41858 - RNA, 32 nt, Human
acuggucccacacgcaccccaggccccacucc

SEQ ID NO: 41859 - RNA, 32 nt, Human
acugguccccaccuuucccuugccuaucccua

SEQ ID NO: 41860 - RNA, 32 nt, Human
acuggucccugccugacagcaccugcugggcc

SEQ ID NO: 41861 - RNA, 32 nt, Human
acugguccuuucucagccucucucgugcuuuu

SEQ ID NO: 41862 - RNA, 32 nt, Human
acuggucgagcuguuugaggccaucgagcaga

SEQ ID NO: 41863 - RNA, 32 nt, Human
acuggucggaagagagaaagaacaguuucagu

SEQ ID NO: 41864 - RNA, 32 nt, Human
acuggucggugcugccugguccuggccugggg

SEQ ID NO: 41865 - RNA, 32 nt, Human
acuggucuacacacacagaggaugcuggauac

SEQ ID NO: 41866 - RNA, 32 nt, Human
acuggucuccacugccaugccuuuucaagguu

SEQ ID NO: 41867 - RNA, 32 nt, Human
acuggucucccugcuucauucuugccccacac

SEQ ID NO: 41868 - RNA, 32 nt, Human
acuggucucucagaggagucccccagggcccg

SEQ ID NO: 41869 - RNA, 32 nt, Human
acuggucucugccugggcucaaccucugugau

SEQ ID NO: 41870 - RNA, 32 nt, Human
acuggucugcugcugcaggcuucaucuaaaac

SEQ ID NO: 41871 - RNA, 32 nt, Human
acuggugaacacuucagccuuaaugaguguau

SEQ ID NO: 41872 - RNA, 32 nt, Human
acuggugaacagugucugugggcugcuguggg

SEQ ID NO: 41873 - RNA, 32 nt, Human
acuggugaccaccaccccuucuugucacuguc

SEQ ID NO: 41874 - RNA, 32 nt, Human
acuggugacuccaggaaccauuuucaccuauu

SEQ ID NO: 41875 - RNA, 32 nt, Human
acuggugagauuacaggcaugagccaccacaa

SEQ ID NO: 41876 - RNA, 31 nt, Human
acuggugagggggcagcaugggugaagccca

SEQ ID NO: 41877 - RNA, 32 nt, Human
acuggugcaaauggguccagaauuuucaaauc

SEQ ID NO: 41878 - RNA, 32 nt, Human
acuggugcaggcucguuguaccacugcaaccg

SEQ ID NO: 41879 - RNA, 32 nt, Human
acuggugcauuuucauguauguuguaccucaa

SEQ ID NO: 41880 - RNA, 32 nt, Human
acuggugccugccucccacauuugcccuuggu

SEQ ID NO: 41881 - RNA, 32 nt, Human
acuggugcuccaggaaccagguggugacgaac

SEQ ID NO: 41882 - RNA, 32 nt, Human
acuggugcugugcuccagccuuaucaguuagg

SEQ ID NO: 41883 - RNA, 18 nt, Human
acugguggaaagcagcag

SEQ ID NO: 41884 - RNA, 32 nt, Human
acugguggaggaacugcccuggccuagagacc

SEQ ID NO: 41885 - RNA, 32 nt, Human
acugguggcacguuccuuuaaucccagcuacu

SEQ ID NO: 41886 - RNA, 32 nt, Human
acugguggcauuuugccccugcccugagaucu

SEQ ID NO: 41887 - RNA, 32 nt, Human
acugguggccagugggaggugaugguggaccu

SEQ ID NO: 41888 - RNA, 32 nt, Human
acugguggcuacagcuacaucacgggaggagg

SEQ ID NO: 41889 - RNA, 32 nt, Human
acuggugggaggcuggcggagucagugacuau

SEQ ID NO: 41890 - RNA, 32 nt, Human
acuggugggccaucuguucuucuggcugacau

SEQ ID NO: 41891 - RNA, 32 nt, Human
acugguggucacggcucacucuagccuugaau

SEQ ID NO: 41892 - RNA, 32 nt, Human
acuggugguggugggagaucaggaaaauaacu

SEQ ID NO: 41893 - RNA, 32 nt, Human
acuggugucuucaggggccacaccaaccuucu

SEQ ID NO: 41894 - RNA, 32 nt, Human
acugguguggauggcccaggaggugcuggagc

SEQ ID NO: 41895 - RNA, 32 nt, Human
acugguguugggggcagugggaagaggguggu

SEQ ID NO: 41896 - RNA, 32 nt, Human
acugguguuuauauuugcacaaaguauugaua

SEQ ID NO: 41897 - RNA, 32 nt, Human
acugguguuuauccgucacucgccgagguucc

SEQ ID NO: 41898 - RNA, 32 nt, Human
acugguuaaguacagggucaccagagaaaguu

SEQ ID NO: 41899 - RNA, 32 nt, Human
acugguuaguauaucucaguaguuucaugaaa

SEQ ID NO: 41900 - RNA, 32 nt, Human
acugguuauagugggauaggaggcagaaaaug

SEQ ID NO: 41901 - RNA, 32 nt, Human
acugguucauucuccauuacugcaagagaaug

SEQ ID NO: 41902 - RNA, 32 nt, Human
acugguuccucugcucugaggguggguccagg

SEQ ID NO: 41903 - RNA, 32 nt, Human
acugguuccuucagaucagccacaccuuuucc

SEQ ID NO: 41904 - RNA, 32 nt, Human
acugguucucaaacuuuuuggucucagacccc

SEQ ID NO: 41905 - RNA, 32 nt, Human
acugguucucagugggagguaauggaaaguag

SEQ ID NO: 41906 - RNA, 32 nt, Human
acugguucugcagcuuguccuuuugcccacau

SEQ ID NO: 41907 - RNA, 32 nt, Human
acugguugaaaccucuggaaguacagaaggga

SEQ ID NO: 41908 - RNA, 32 nt, Human
acugguugaggguggaaccuccaggcaggaac

SEQ ID NO: 41909 - RNA, 32 nt, Human
acugguugcagaggcuggaagugaaauaaaga

SEQ ID NO: 41910 - RNA, 32 nt, Human
acugguuguagcuuucauggguucugaacuaa

SEQ ID NO: 41911 - RNA, 32 nt, Human
acugguuucacucugucucccagggccaggcc

SEQ ID NO: 41912 - RNA, 32 nt, Human
acugguuuccucagccuuccuucagccuguaa

SEQ ID NO: 41913 - RNA, 32 nt, Human
acugguuucucuccuuagaaaaguagguuucu

SEQ ID NO: 41914 - RNA, 32 nt, Human
acugguuuuccccaaagcuggcaguuuugugg

SEQ ID NO: 41915 - RNA, 32 nt, Human
acugguuuugcugugguuggauacagauacca

SEQ ID NO: 41916 - RNA, 19 nt, Human
acuguaaacauuagcucuu

SEQ ID NO: 41917 - RNA, 32 nt, Human
acuguaaagcagguggugggagaaguaccaau

SEQ ID NO: 41918 - RNA, 32 nt, Human
acuguaacaaaggagcuucuuguccccuuggu

SEQ ID NO: 41919 - RNA, 32 nt, Human
acuguaacacuuuccucugccuuuuucucuua

SEQ ID NO: 41920 - RNA, 32 nt, Human
acuguaaccuaaauguauuacuucugauaaaa

SEQ ID NO: 41921 - RNA, 32 nt, Human
acuguaacuaugacaguagaguuugauaccug

SEQ ID NO: 41922 - RNA, 32 nt, Human
acuguaagaaauaaaucucuguucuuuauaaa

SEQ ID NO: 41923 - RNA, 32 nt, Human
acuguaagcagucuggguugggcagaaggcag

SEQ ID NO: 41924 - RNA, 32 nt, Human
acuguaagccaguuuuagcugcacugauuuca

SEQ ID NO: 41925 - RNA, 24 nt, Human
acuguaagcuccgccucccggguu

SEQ ID NO: 41926 - RNA, 32 nt, Human
acuguaaggcagcaguguuagcaugggaguaa

SEQ ID NO: 41927 - RNA, 32 nt, Human
acuguaaggcguggaauaggaguugcucagug

SEQ ID NO: 41928 - RNA, 23 nt, Human
acuguaaguuccuagcuggcuag

SEQ ID NO: 41929 - RNA, 18 nt, Human
acuguaauaagcucauca

SEQ ID NO: 41930 - RNA, 32 nt, Human
acuguaaucacagugacucaggaggcugaggu

SEQ ID NO: 41931 - RNA, 32 nt, Human
acuguaaucccagcuacucaggaggcugaggc

SEQ ID NO: 41932 - RNA, 32 nt, Human
acuguaaugucaucaaaugcaauguuuuuauu

SEQ ID NO: 41933 - RNA, 32 nt, Human
acuguacaaucaguaaugggaugcucuaaaga

SEQ ID NO: 41934 - RNA, 32 nt, Human
acuguacagaggaaacucaagccuuaaauguu

SEQ ID NO: 41935 - RNA, 32 nt, Human
acuguacaguaauggucaacuuugccacuugc

SEQ ID NO: 41936 - RNA, 32 nt, Human
acuguacaucaggagauuguguuguuuucuuc

SEQ ID NO: 41937 - RNA, 32 nt, Human
acuguacaugugcugagagaagcauccugccc

SEQ ID NO: 41938 - RNA, 32 nt, Human
acuguaccaagcuuugcagaucuuuuccgaca

SEQ ID NO: 41939 - RNA, 32 nt, Human
acuguaccagagggccagggaggaggagaaag

SEQ ID NO: 41940 - RNA, 32 nt, Human
acuguacccagaggugccugagguccuaaaac

SEQ ID NO: 41941 - RNA, 32 nt, Human
acuguacccugagacagguccccaccacccca

SEQ ID NO: 41942 - RNA, 32 nt, Human
acuguacccuguuccuccugggcucaagugau

SEQ ID NO: 41943 - RNA, 32 nt, Human
acuguaccugccugcugaacagccugcccccg

SEQ ID NO: 41944 - RNA, 32 nt, Human
acuguacgacagagcaagacuccgucucaaaa

SEQ ID NO: 41945 - RNA, 32 nt, Human
acuguacgcaaguugagugccagaccucuagu

SEQ ID NO: 41946 - RNA, 32 nt, Human
acuguacuaaccuacagagaugcuaagagaaa

SEQ ID NO: 41947 - RNA, 32 nt, Human
acuguacuaauucuuacacugccuguauacuu

SEQ ID NO: 41948 - RNA, 32 nt, Human
acuguacuacuguacuccagccugggggaaag

SEQ ID NO: 41949 - RNA, 32 nt, Human
acuguacuccagccuggaugacagaguggaga

SEQ ID NO: 41950 - RNA, 32 nt, Human
acuguacuccagccugggcaacagagugagac

SEQ ID NO: 41951 - RNA, 32 nt, Human
acuguacuccagccugggcgacggagugagac

SEQ ID NO: 41952 - RNA, 32 nt, Human
acuguacuccagccugggugacagagugagac

SEQ ID NO: 41953 - RNA, 32 nt, Human
acuguacuccagccugggugacagagugaggc

SEQ ID NO: 41954 - RNA, 32 nt, Human
acuguacuccagccugggugacagagugauac

SEQ ID NO: 41955 - RNA, 32 nt, Human
acuguacuccagccugggugacgagcgaaacu

SEQ ID NO: 41956 - RNA, 32 nt, Human
acuguacuccagccugggugaggagagcgaga

SEQ ID NO: 41957 - RNA, 32 nt, Human
acuguacuccagccugggugauaggaugagac

SEQ ID NO: 41958 - RNA, 32 nt, Human
acuguacuccugggauaugggggcgggggcgg

SEQ ID NO: 41959 - RNA, 32 nt, Human
acuguacucuccaauaaagcaccuuguugaaa

SEQ ID NO: 41960 - RNA, 32 nt, Human
acuguacucuucucagcuugagcuuaacauag

SEQ ID NO: 41961 - RNA, 32 nt, Human
acuguacuguucaagucaauguuaauaaagca

SEQ ID NO: 41962 - RNA, 32 nt, Human
acuguacuugcagccccugccaugaggucaau

SEQ ID NO: 41963 - RNA, 32 nt, Human
acuguagaagugaaaguaauuucacaauuaaa

SEQ ID NO: 41964 - RNA, 32 nt, Human
acuguagacuccugcauagccuuccaaaguuc

SEQ ID NO: 41965 - RNA, 31 nt, Human
acuguagacuuucagcagcaaucucagaagc

SEQ ID NO: 41966 - RNA, 32 nt, Human
acuguagaggugagguuucaccauguugccca

SEQ ID NO: 41967 - RNA, 23 nt, Human
acuguagaugaucacaugaugaa

SEQ ID NO: 41968 - RNA, 24 nt, Human
acuguagaugccccaaggaaccaa

SEQ ID NO: 41969 - RNA, 32 nt, Human
acuguagauugcuucuguaguacuccuuaaga

SEQ ID NO: 41970 - RNA, 32 nt, Human
acuguagcacuggccucugugccacagcuacu

SEQ ID NO: 41971 - RNA, 32 nt, Human
acuguagcagcaaaagcaaauuggucuccaca

SEQ ID NO: 41972 - RNA, 32 nt, Human
acuguagcauucuaucacaauaucaucuggaa

SEQ ID NO: 41973 - RNA, 32 nt, Human
acuguagcccaggucauuguauuucagacaua

SEQ ID NO: 41974 - RNA, 32 nt, Human
acuguagccccugcuggcugagcuccagccug

SEQ ID NO: 41975 - RNA, 32 nt, Human
acuguagccuaaacuccaguccgagguuggau

SEQ ID NO: 41976 - RNA, 32 nt, Human
acuguagccuuuuaagcuucagucucagcaga

SEQ ID NO: 41977 - RNA, 32 nt, Human
acuguagcgucugccugcucccuggacucgca

SEQ ID NO: 41978 - RNA, 32 nt, Human
acuguagcuucaguuauuggugagucuaagga

SEQ ID NO: 41979 - RNA, 32 nt, Human
acuguagcuuguuguuugggggaccaaauuuu

SEQ ID NO: 41980 - RNA, 32 nt, Human
acuguagggcugggcagcugggagacaggcuc

SEQ ID NO: 41981 - RNA, 32 nt, Human
acuguagggcugggcgcagcaucccuaggucu

SEQ ID NO: 41982 - RNA, 32 nt, Human
acuguagguccagaaaacuaauuauuggcauc

SEQ ID NO: 41983 - RNA, 32 nt, Human
acuguaggugggagggagcugauuuuggggug

SEQ ID NO: 41984 - RNA, 32 nt, Human
acuguaguaaagcccugaaauagauaaucucu

SEQ ID NO: 41985 - RNA, 32 nt, Human
acuguagucagcugggaauggggaaggugcau

SEQ ID NO: 41986 - RNA, 32 nt, Human
acuguagucccagcuacucaggagacugaggc

SEQ ID NO: 41987 - RNA, 32 nt, Human
acuguagucccagcuacucaggcugaggcagg

SEQ ID NO: 41988 - RNA, 32 nt, Human
acuguagucccagcuacucgcgagacugaggc

SEQ ID NO: 41989 - RNA, 32 nt, Human
acuguagucccagcuacucgggaggcugaggc

SEQ ID NO: 41990 - RNA, 32 nt, Human
acuguagucccagcuacucgggagguugaggc

SEQ ID NO: 41991 - RNA, 32 nt, Human
acuguagucccagcuauucagaaggcugaggc

SEQ ID NO: 41992 - RNA, 32 nt, Human
acuguagucucaaccuccugggcucaagagau

SEQ ID NO: 41993 - RNA, 32 nt, Human
acuguagucucccacugugggaguugccuugc

SEQ ID NO: 41994 - RNA, 22 nt, Human
acuguagucucugaguccuuug

SEQ ID NO: 41995 - RNA, 32 nt, Human
acuguaguggagcugcucaaccaccugcccag

SEQ ID NO: 41996 - RNA, 32 nt, Human
acuguaguggcuguaauacaugaugauguggg

SEQ ID NO: 41997 - RNA, 32 nt, Human
acuguaguucaagugacuuuccuacuuuugua

SEQ ID NO: 41998 - RNA, 32 nt, Human
acuguaguuucuucaugcuuuccagaguuaga

SEQ ID NO: 41999 - RNA, 32 nt, Human
acuguaguuugucagagacuccaguuuacauc

SEQ ID NO: 42000 - RNA, 32 nt, Human
acuguauaccaggaacacaaauucauuaaauc

SEQ ID NO: 42001 - RNA, 32 nt, Human
acuguauaugaccuuaaucuuugugcagccug

SEQ ID NO: 42002 - RNA, 32 nt, Human
acuguaucacccaggccagaguguaguggcac

SEQ ID NO: 42003 - RNA, 32 nt, Human
acuguaucagccccaagcaggugguggucccu

SEQ ID NO: 42004 - RNA, 32 nt, Human
acuguaucagguacauuccagccuguuggcaa

SEQ ID NO: 42005 - RNA, 32 nt, Human
acuguaucuaccgaagaugguuugcugaaagc

SEQ ID NO: 42006 - RNA, 32 nt, Human
acuguaucugccucugugccugugcacaugaa

SEQ ID NO: 42007 - RNA, 32 nt, Human
acuguaucuggaaugcuuuguaauacuugcau

SEQ ID NO: 42008 - RNA, 32 nt, Human
acuguaugacaauuaccaggugcucuacugcu

SEQ ID NO: 42009 - RNA, 32 nt, Human
acuguaugagacagaggggacuucagucuuuc

SEQ ID NO: 42010 - RNA, 32 nt, Human
acuguaugaggaggaggaggaggaggauguga

SEQ ID NO: 42011 - RNA, 32 nt, Human
acuguaugcucacaacuuaguguaauauacca

SEQ ID NO: 42012 - RNA, 32 nt, Human
acuguauggcuacaguucaugguauaagguca

SEQ ID NO: 42013 - RNA, 32 nt, Human
acuguauguaauucuaauuaccuuauaacagu

SEQ ID NO: 42014 - RNA, 32 nt, Human
acuguaugugcaugcauucacacacacauaug

SEQ ID NO: 42015 - RNA, 32 nt, Human
acuguauguggacuguggagaaaguaagucac

SEQ ID NO: 42016 - RNA, 32 nt, Human
acuguaugugugugccuugcacacacacccau

SEQ ID NO: 42017 - RNA, 32 nt, Human
acuguauguguguuccuugaagccaggugcag

SEQ ID NO: 42018 - RNA, 32 nt, Human
acuguauuaguccauucucacacugcuauaaa

SEQ ID NO: 42019 - RNA, 32 nt, Human
acuguauuccagccuggacgacugagugagac

SEQ ID NO: 42020 - RNA, 32 nt, Human
acuguauucugugccuuccaucaugauuucca

SEQ ID NO: 42021 - RNA, 32 nt, Human
acuguauuugacaaaggaaacucuuaaauuau

SEQ ID NO: 42022 - RNA, 32 nt, Human
acuguauuuuuauuaaauaaaauuuaaacauc

SEQ ID NO: 42023 - RNA, 32 nt, Human
acugucaaacaauaaagggagaauggugcugu

SEQ ID NO: 42024 - RNA, 32 nt, Human
acugucaaacuuugucacccuaacuucguauu

SEQ ID NO: 42025 - RNA, 32 nt, Human
acugucaaauagccuccuaaaagaugaguuug

SEQ ID NO: 42026 - RNA, 32 nt, Human
acugucaaccaggccagagugcagugaagauc

SEQ ID NO: 42027 - RNA, 32 nt, Human
acugucaagggaggugcuggagagggauuaac

SEQ ID NO: 42028 - RNA, 32 nt, Human
acugucaauuguucucagauuuggcauggaua

SEQ ID NO: 42029 - RNA, 30 nt, Human
acugucacaagaaauauuuccaccucaaaa

SEQ ID NO: 42030 - RNA, 32 nt, Human
acugucacagcccuccccaccccacauccagg

SEQ ID NO: 42031 - RNA, 32 nt, Human
acugucacagccggguccucaaacagcuccga

SEQ ID NO: 42032 - RNA, 32 nt, Human
acugucacagguauuuuugcugugcugugcaa

SEQ ID NO: 42033 - RNA, 32 nt, Human
acugucaccaaacagaccaucuucccaggccu

SEQ ID NO: 42034 - RNA, 32 nt, Human
acugucaccaggcuggagugcaguggugcaau

SEQ ID NO: 42035 - RNA, 32 nt, Human
acugucacccaggcugcuggaguacaguggca

SEQ ID NO: 42036 - RNA, 32 nt, Human
acugucacccaugagguauggaaggagcgggc

SEQ ID NO: 42037 - RNA, 32 nt, Human
acugucaccuaggcuggagugcagugguaaau

SEQ ID NO: 42038 - RNA, 23 nt, Human
acugucaccuucucuucaucaca

SEQ ID NO: 42039 - RNA, 32 nt, Human
acugucacgccuguaaucccaguacuuuggga

SEQ ID NO: 42040 - RNA, 32 nt, Human
acugucacugcacauggaccucugggaagacg

SEQ ID NO: 42041 - RNA, 24 nt, Human
acugucacuucuuuggcugggcag

SEQ ID NO: 42042 - RNA, 32 nt, Human
acugucagaccacaucugcagcucugauuagu

SEQ ID NO: 42043 - RNA, 32 nt, Human
acugucagauuugccaagucacagaggcgcag

SEQ ID NO: 42044 - RNA, 32 nt, Human
acugucagccaugcaagccucaguuuucccau

SEQ ID NO: 42045 - RNA, 24 nt, Human
acugucagcucucauauucuucca

SEQ ID NO: 42046 - RNA, 32 nt, Human
acugucagcuggguuucaugucaucuucugcu

SEQ ID NO: 42047 - RNA, 32 nt, Human
acugucagcuguaaguggaagcaauauuacuu

SEQ ID NO: 42048 - RNA, 32 nt, Human
acugucagggagggccagggaggcagagcggg

SEQ ID NO: 42049 - RNA, 32 nt, Human
acugucagggcccagagagaagaaaaagacag

SEQ ID NO: 42050 - RNA, 32 nt, Human
acugucaggggcccuguccucaaccccggguc

SEQ ID NO: 42051 - RNA, 32 nt, Human
acugucaggggcccuguccucaacccuggguc

SEQ ID NO: 42052 - RNA, 32 nt, Human
acugucagguaucaugucugcuuucuaagugg

SEQ ID NO: 42053 - RNA, 32 nt, Human
acugucagucucacuucugcugucccaguccu

SEQ ID NO: 42054 - RNA, 32 nt, Human
acugucagugaguguucuuuaggugguaggac

SEQ ID NO: 42055 - RNA, 32 nt, Human
acugucagugcuagauuuagcacaguauuuug

SEQ ID NO: 42056 - RNA, 32 nt, Human
acugucaguuuaugcugacguaaugaacugcg

SEQ ID NO: 42057 - RNA, 32 nt, Human
acugucaucacuggggcagggaaguccuguuc

SEQ ID NO: 42058 - RNA, 32 nt, Human
acugucauccuaacguuugucauuccaguuug

SEQ ID NO: 42059 - RNA, 21 nt, Human
acugucaucuggacagcuguu

SEQ ID NO: 42060 - RNA, 32 nt, Human
acugucaucuugcuucccaaucuaagaaccug

SEQ ID NO: 42061 - RNA, 19 nt, Human
acugucaucuuuucucaug

SEQ ID NO: 42062 - RNA, 32 nt, Human
acugucauggugcuggcaggaauggcuaaggg

SEQ ID NO: 42063 - RNA, 25 nt, Human
acugucauuaugcguuuuagccucu

SEQ ID NO: 42064 - RNA, 32 nt, Human
acugucauuccuuggugucugugcugggcaug

SEQ ID NO: 42065 - RNA, 20 nt, Human
acugucauuguucagcgcuu

SEQ ID NO: 42066 - RNA, 24 nt, Human
acugucauuguuguugcccagagc

SEQ ID NO: 42067 - RNA, 32 nt, Human
acuguccaaaaacagaagaagaagaagagaau

SEQ ID NO: 42068 - RNA, 32 nt, Human
acuguccaaguuacgacuuccaaccaaacuau

SEQ ID NO: 42069 - RNA, 32 nt, Human
acuguccagaucuagucuguaaacccagcuua

SEQ ID NO: 42070 - RNA, 32 nt, Human
acuguccagccaagggccccuacgucucagcc

SEQ ID NO: 42071 - RNA, 32 nt, Human
acuguccaggagaugcaugucuuuguauugga

SEQ ID NO: 42072 - RNA, 32 nt, Human
acuguccagggaaagagccaggaauggcagug

SEQ ID NO: 42073 - RNA, 32 nt, Human
acuguccauauucuccagaggauuaccuggcu

SEQ ID NO: 42074 - RNA, 32 nt, Human
acuguccauuucucccugucugucccaugggc

SEQ ID NO: 42075 - RNA, 32 nt, Human
acugucccaccgccuccugccucucuccucuc

SEQ ID NO: 42076 - RNA, 32 nt, Human
acugucccacuccaucacccaggcuggagucc

SEQ ID NO: 42077 - RNA, 32 nt, Human
acugucccagagacaccugagccaccccacag

SEQ ID NO: 42078 - RNA, 32 nt, Human
acugucccauccccagguccccaaacuuaugg

SEQ ID NO: 42079 - RNA, 32 nt, Human
acuguccccacagcaggugccuggugggccag

SEQ ID NO: 42080 - RNA, 32 nt, Human
acuguccccagagccuguggagauagagccug

SEQ ID NO: 42081 - RNA, 32 nt, Human
acuguccccagccugccugccuccguuucccu

SEQ ID NO: 42082 - RNA, 32 nt, Human
acugucccccauuaguucuguccccuucacaa

SEQ ID NO: 42083 - RNA, 19 nt, Human
acugucccccuggccggcu

SEQ ID NO: 42084 - RNA, 32 nt, Human
acugucccccuuccucuucuucugccccuuca

SEQ ID NO: 42085 - RNA, 32 nt, Human
acuguccccgcccccuauuuguggacuaaaga

SEQ ID NO: 42086 - RNA, 32 nt, Human
acuguccccuggcaguaccacagccuuauccu

SEQ ID NO: 42087 - RNA, 32 nt, Human
acugucccuaguaguugggauuacaggcacau

SEQ ID NO: 42088 - RNA, 32 nt, Human
acugucccugcuccucggugugacuugcuccc

SEQ ID NO: 42089 - RNA, 32 nt, Human
acugucccugucccuauuuauccaccauccaa

SEQ ID NO: 42090 - RNA, 32 nt, Human
acuguccggagcacuccuucccuucccugguu

SEQ ID NO: 42091 - RNA, 32 nt, Human
acuguccguaauggaaugguaaaacuccauga

SEQ ID NO: 42092 - RNA, 32 nt, Human
acuguccucacacuccuggaucacugagcaga

SEQ ID NO: 42093 - RNA, 32 nt, Human
acuguccucaggaaguggagaucuagccaggu

SEQ ID NO: 42094 - RNA, 32 nt, Human
acuguccuccacugcuagacacccccagaaug

SEQ ID NO: 42095 - RNA, 32 nt, Human
acuguccucccaucucugcccaugagccacag

SEQ ID NO: 42096 - RNA, 19 nt, Human
acuguccucuuuggcucuu

SEQ ID NO: 42097 - RNA, 17 nt, Human
acuguccugagcaaggu

SEQ ID NO: 42098 - RNA, 32 nt, Human
acuguccugcuuguacaacaugguuuggggug

SEQ ID NO: 42099 - RNA, 24 nt, Human
acuguccuggacaacauggugaaa

SEQ ID NO: 42100 - RNA, 32 nt, Human
acuguccuggacaacauggugaaacccugucu

SEQ ID NO: 42101 - RNA, 32 nt, Human
acuguccuggguggagggcaggugaacacaag

SEQ ID NO: 42102 - RNA, 32 nt, Human
acuguccugucaccccuccucgcuacagugau

SEQ ID NO: 42103 - RNA, 32 nt, Human
acuguccugugagcuuuaugucaggagacugu

SEQ ID NO: 42104 - RNA, 32 nt, Human
acuguccugugaggacagcugaggccaaggag

SEQ ID NO: 42105 - RNA, 32 nt, Human
acuguccuguuguggggcuggagcugcuccca

SEQ ID NO: 42106 - RNA, 32 nt, Human
acuguccuuccuggcccuugcauggaugcagu

SEQ ID NO: 42107 - RNA, 32 nt, Human
acuguccuucuuuuucuccucucccucccucc

SEQ ID NO: 42108 - RNA, 32 nt, Human
acuguccuuuaaacuccaguggcuggccaggc

SEQ ID NO: 42109 - RNA, 31 nt, Human
acuguccuuucuucugggccccuggucccag

SEQ ID NO: 42110 - RNA, 18 nt, Human
acuguccuuuucauccca

SEQ ID NO: 42111 - RNA, 32 nt, Human
acugucgaccagauugcuugggccaucggaau

SEQ ID NO: 42112 - RNA, 32 nt, Human
acugucgacuucuuccucuggugaaguggguu

SEQ ID NO: 42113 - RNA, 32 nt, Human
acugucgccaggcuggagugcaguggugcgau

SEQ ID NO: 42114 - RNA, 32 nt, Human
acugucggcucagagcccucugccucaaugcc

SEQ ID NO: 42115 - RNA, 32 nt, Human
acugucgucuucuguuagugccaugcgagucc

SEQ ID NO: 42116 - RNA, 32 nt, Human
acugucuaccuugccagauccucagugcguau

SEQ ID NO: 42117 - RNA, 32 nt, Human
acugucuaggauucagcugaaccaccaggaac

SEQ ID NO: 42118 - RNA, 32 nt, Human
acugucuauuugccugcaguccagccuauggc

SEQ ID NO: 42119 - RNA, 32 nt, Human
acugucucaagcugagagauguuuuuaguagc

SEQ ID NO: 42120 - RNA, 32 nt, Human
acugucucacgugacuauuaagcaacuauaca

SEQ ID NO: 42121 - RNA, 32 nt, Human
acugucucaggaguggaaggcaauggcccacu

SEQ ID NO: 42122 - RNA, 32 nt, Human
acugucucauuuccuuuucccaccucuccccu

SEQ ID NO: 42123 - RNA, 32 nt, Human
acugucuccagaacagcaaccacauugaauuc

SEQ ID NO: 42124 - RNA, 32 nt, Human
acugucuccccuuuaccagcaaaccugacuuc

SEQ ID NO: 42125 - RNA, 32 nt, Human
acugucuccuaggcuggagugcagugguguga

SEQ ID NO: 42126 - RNA, 32 nt, Human
acugucuccucugcuccucccaccucaucccu

SEQ ID NO: 42127 - RNA, 32 nt, Human
acugucuccuggcggaccacccccucugacag

SEQ ID NO: 42128 - RNA, 32 nt, Human
acugucucggguuggcucccagccuggagguc

SEQ ID NO: 42129 - RNA, 32 nt, Human
acugucucucggcugcagcccuggugcgaccc

SEQ ID NO: 42130 - RNA, 32 nt, Human
acugucugauuugggcuuucugcuuuacuucc

SEQ ID NO: 42131 - RNA, 32 nt, Human
acugucugcucaggcugguggugacaggaucc

SEQ ID NO: 42132 - RNA, 32 nt, Human
acugucugcuuuucuuuucccuuccacaggcu

SEQ ID NO: 42133 - RNA, 32 nt, Human
acugucuggaaaccacaggcuccagcauauca

SEQ ID NO: 42134 - RNA, 32 nt, Human
acugucuggcccugucugccucugguuccugc

SEQ ID NO: 42135 - RNA, 32 nt, Human
acugucugggcugagagagggggcugcagguu

SEQ ID NO: 42136 - RNA, 28 nt, Human
acugucugguagcucucuagcuggcugg

SEQ ID NO: 42137 - RNA, 32 nt, Human
acugucuuaaauaaaaacucaauguuuaguug

SEQ ID NO: 42138 - RNA, 32 nt, Human
acugucuucccuuggacaauaaugaauguauc

SEQ ID NO: 42139 - RNA, 32 nt, Human
acugucuucuaaccuucccuugccugcuauga

SEQ ID NO: 42140 - RNA, 32 nt, Human
acugucuucucuuccuccuccaccgagucgug

SEQ ID NO: 42141 - RNA, 32 nt, Human
acugucuugacugucacggaacagaucuuguu

SEQ ID NO: 42142 - RNA, 20 nt, Human
acugucuugcacaugccgga

SEQ ID NO: 42143 - RNA, 32 nt, Human
acugucuugcccaggcuggagugcaguggccu

SEQ ID NO: 42144 - RNA, 32 nt, Human
acugucuugcccagguaagcuggggcagagcc

SEQ ID NO: 42145 - RNA, 32 nt, Human
acugucuuggcuguggggcuaggggcuggggc

SEQ ID NO: 42146 - RNA, 32 nt, Human
acugucuugguggcccugggcgagucuugaac

SEQ ID NO: 42147 - RNA, 32 nt, Human
acugucuuugagggaucagagcagaaaccucc

SEQ ID NO: 42148 - RNA, 32 nt, Human
acugugaaaagacacaucacacaaucaccuug

SEQ ID NO: 42149 - RNA, 32 nt, Human
acugugaaagagacaauuugauuggggaagaa

SEQ ID NO: 42150 - RNA, 32 nt, Human
acugugaacauggaagccucagccugaaugug

SEQ ID NO: 42151 - RNA, 32 nt, Human
acugugaacuuucaacuacuaucaaggauaau

SEQ ID NO: 42152 - RNA, 32 nt, Human
acugugaagagagcaggaaaguagugcacagu

SEQ ID NO: 42153 - RNA, 32 nt, Human
acugugacacacuacaccacacacaacagcca

SEQ ID NO: 42154 - RNA, 32 nt, Human
acugugacacugcacuccagccugggcaacag

SEQ ID NO: 42155 - RNA, 32 nt, Human
acugugacacuggcccucccacuucccucuuu

SEQ ID NO: 42156 - RNA, 32 nt, Human
acugugaccacagccccgacgcggggcuguuu

SEQ ID NO: 42157 - RNA, 32 nt, Human
acugugacccucucccuucccugcugccuugc

SEQ ID NO: 42158 - RNA, 22 nt, Human
acugugacccucugcuggccgg

SEQ ID NO: 42159 - RNA, 32 nt, Human
acugugaccugccgaaguccacugccuuugcc

SEQ ID NO: 42160 - RNA, 32 nt, Human
acugugaccugugacaaaucgcugcauuuuua

SEQ ID NO: 42161 - RNA, 32 nt, Human
acugugaccuugagaagauucuucccauucuc

SEQ ID NO: 42162 - RNA, 32 nt, Human
acugugagacugugggagauuuacugcgacau

SEQ ID NO: 42163 - RNA, 32 nt, Human
acugugagcaccacugcacuaagccagugcgg

SEQ ID NO: 42164 - RNA, 32 nt, Human
acugugagccguaccaguaccccuacgugcau

SEQ ID NO: 42165 - RNA, 32 nt, Human
acugugagcucuacagaccgauuugcacccau

SEQ ID NO: 42166 - RNA, 32 nt, Human
acugugagcuguucccgccuagccagggccau

SEQ ID NO: 42167 - RNA, 32 nt, Human
acugugaggaagagcaggcaccagcagcagaa

SEQ ID NO: 42168 - RNA, 32 nt, Human
acugugaggagagaggcggacugugaggcagc

SEQ ID NO: 42169 - RNA, 32 nt, Human
acugugaggagcuugugccugccugugcagag

SEQ ID NO: 42170 - RNA, 32 nt, Human
acugugaggagguggagaacguggcagggauc

SEQ ID NO: 42171 - RNA, 32 nt, Human
acugugagggcgcacuggguccuuugggguuu

SEQ ID NO: 42172 - RNA, 32 nt, Human
acugugaguucauuaaaccucuuuccuuuaua

SEQ ID NO: 42173 - RNA, 32 nt, Human
acugugaguuucccuccuuccuucccucuaau

SEQ ID NO: 42174 - RNA, 32 nt, Human
acugugaucaaggcugaggccaccugggauga

SEQ ID NO: 42175 - RNA, 32 nt, Human
acugugaugccgaggguggagugcaguggcac

SEQ ID NO: 42176 - RNA, 32 nt, Human
acugugaugggcaguggaaagaagagggaaag

SEQ ID NO: 42177 - RNA, 32 nt, Human
acugugauuagacggcagccucgaugaucacc

SEQ ID NO: 42178 - RNA, 32 nt, Human
acugugauugcacucccagcccagaucagcau

SEQ ID NO: 42179 - RNA, 18 nt, Human
acugugauuuuuaucaca

SEQ ID NO: 42180 - RNA, 32 nt, Human
acugugcaacacagacaagucuucugccagac

SEQ ID NO: 42181 - RNA, 19 nt, Human
acugugcaauaauuucugu

SEQ ID NO: 42182 - RNA, 32 nt, Human
acugugcacaccauuggacugcugaccacagu

SEQ ID NO: 42183 - RNA, 32 nt, Human
acugugcaccugcagcuccacacccucuaggc

SEQ ID NO: 42184 - RNA, 32 nt, Human
acugugcacucuaauccuccaucuucacaugg

SEQ ID NO: 42185 - RNA, 32 nt, Human
acugugcauguaaauuuuaaauggguacuuug

SEQ ID NO: 42186 - RNA, 32 nt, Human
acugugccaccaacaagucuuccucuuggcgc

SEQ ID NO: 42187 - RNA, 32 nt, Human
acugugccaccaagaguccaacucacuggcua

SEQ ID NO: 42188 - RNA, 32 nt, Human
acugugccacucuacuccagccugggcaacac

SEQ ID NO: 42189 - RNA, 32 nt, Human
acugugccacugcaccucuagucugggugaca

SEQ ID NO: 42190 - RNA, 32 nt, Human
acugugccacugcacuccagccugggcaacac

SEQ ID NO: 42191 - RNA, 32 nt, Human
acugugccacugcacuccagccugggugacag

SEQ ID NO: 42192 - RNA, 32 nt, Human
acugugccacugcacuccagccuggucaacaa

SEQ ID NO: 42193 - RNA, 32 nt, Human
acugugccacugcaguccagccugggugacag

SEQ ID NO: 42194 - RNA, 32 nt, Human
acugugccaguacaauacaugccucagccccc

SEQ ID NO: 42195 - RNA, 32 nt, Human
acugugccaguggaagcagguguauugugggc

SEQ ID NO: 42196 - RNA, 32 nt, Human
acugugccauuaaaccucuuuuucuuuauaaa

SEQ ID NO: 42197 - RNA, 32 nt, Human
acugugccauuauguaaauacagguuauuccc

SEQ ID NO: 42198 - RNA, 32 nt, Human
acugugccauugcacuccaagccugggcaaca

SEQ ID NO: 42199 - RNA, 32 nt, Human
acugugccauugcacuccagucggguuaacag

SEQ ID NO: 42200 - RNA, 32 nt, Human
acugugcccacucuuucuggguuuuccaaggg

SEQ ID NO: 42201 - RNA, 32 nt, Human
acugugcccagccgaugagcucauuuagaugg

SEQ ID NO: 42202 - RNA, 32 nt, Human
acugugcccagccuguuccacugacauuucuu

SEQ ID NO: 42203 - RNA, 32 nt, Human
acugugcccagccuuuucuguauuaaauuuuu

SEQ ID NO: 42204 - RNA, 32 nt, Human
acugugcccugccuucagcuuuggugaaaggg

SEQ ID NO: 42205 - RNA, 32 nt, Human
acugugcccugcuggggaggugccagggaaug

SEQ ID NO: 42206 - RNA, 32 nt, Human
acugugcccuggagggcuccacauggcccccg

SEQ ID NO: 42207 - RNA, 32 nt, Human
acugugccuagccauucccuagccuuuucguc

SEQ ID NO: 42208 - RNA, 32 nt, Human
acugugccucgccuaauuuuuguauuuucguu

SEQ ID NO: 42209 - RNA, 32 nt, Human
acugugccugcaggagagccacugccuccccu

SEQ ID NO: 42210 - RNA, 32 nt, Human
acugugccuguccaagaaaacagauuucuuga

SEQ ID NO: 42211 - RNA, 32 nt, Human
acugugccuucauccccauccugggcccugac

SEQ ID NO: 42212 - RNA, 32 nt, Human
acugugccuuuuccuuucuuuuuacacauccu

SEQ ID NO: 42213 - RNA, 32 nt, Human
acugugcggaggcaggauuucccuggggaaag

SEQ ID NO: 42214 - RNA, 32 nt, Human
acugugcgugccacuaccaaagccuucugggc

SEQ ID NO: 42215 - RNA, 32 nt, Human
acugugcuacugcacuccagccugggcaacag

SEQ ID NO: 42216 - RNA, 32 nt, Human
acugugcuccagccugggcaacagagugagac

SEQ ID NO: 42217 - RNA, 32 nt, Human
acugugcugcugcuguggagcggcgccgaccu

SEQ ID NO: 42218 - RNA, 32 nt, Human
acugugcuggcccccauggucacagcugcugc

SEQ ID NO: 42219 - RNA, 32 nt, Human
acugugcuugagugccuggugaagaaugugau

SEQ ID NO: 42220 - RNA, 32 nt, Human
acugugcuuuguuuccucuguuucuuccaauu

SEQ ID NO: 42221 - RNA, 32 nt, Human
acuguggaaaccagaucuguuuagucuccugu

SEQ ID NO: 42222 - RNA, 32 nt, Human
acuguggaacacaaggggagucucagcaucug

SEQ ID NO: 42223 - RNA, 32 nt, Human
acuguggaacugcugcuucuaucagaagaccu

SEQ ID NO: 42224 - RNA, 32 nt, Human
acuguggaaggcugucuuuggcauuuuaauau

SEQ ID NO: 42225 - RNA, 32 nt, Human
acuguggacacauccucuccacccucugggcc

SEQ ID NO: 42226 - RNA, 32 nt, Human
acuguggacacguauggaaagacuggaccccc

SEQ ID NO: 42227 - RNA, 32 nt, Human
acuguggaccuugaaguuagcagcgugggcuu

SEQ ID NO: 42228 - RNA, 32 nt, Human
acuguggaccuuuuauaugugccuucacuuua

SEQ ID NO: 42229 - RNA, 32 nt, Human
acuguggacuccacgacccuguccucggcccu

SEQ ID NO: 42230 - RNA, 32 nt, Human
acuguggacugagaggauggaggcagguccaa

SEQ ID NO: 42231 - RNA, 32 nt, Human
acuguggacuuugcccugaaaccuucugggag

SEQ ID NO: 42232 - RNA, 32 nt, Human
acuguggagcucuaacaguauuuguuuccuga

SEQ ID NO: 42233 - RNA, 32 nt, Human
acuguggagcucuggaaggcuuggugggagug

SEQ ID NO: 42234 - RNA, 23 nt, Human
acuguggaggaauggggaccagg

SEQ ID NO: 42235 - RNA, 32 nt, Human
acuguggaggcugaggugagaggauaccuuga

SEQ ID NO: 42236 - RNA, 32 nt, Human
acuguggagguggagugcagcauuugaccuuu

SEQ ID NO: 42237 - RNA, 20 nt, Human
acuguggagguggcugguca

SEQ ID NO: 42238 - RNA, 32 nt, Human
acuguggagugacaccaguaacacagccaaag

SEQ ID NO: 42239 - RNA, 32 nt, Human
acuguggauccagagacacaggcacgacuaga

SEQ ID NO: 42240 - RNA, 32 nt, Human
acuguggauuguacauuuaacuuuggaauggc

SEQ ID NO: 42241 - RNA, 32 nt, Human
acuguggcaaagccucacaaagcccccucucc

SEQ ID NO: 42242 - RNA, 32 nt, Human
acuguggcacaguccugcucaguuucuagucc

SEQ ID NO: 42243 - RNA, 32 nt, Human
acuguggcagcuccuuguuacuuuccauacca

SEQ ID NO: 42244 - RNA, 32 nt, Human
acuguggcaggugggaauaauccugcccuuga

SEQ ID NO: 42245 - RNA, 32 nt, Human
acuguggccacccggcuugcugccuuccgggg

SEQ ID NO: 42246 - RNA, 32 nt, Human
acuguggccaggucuggaaagccaggcaagac

SEQ ID NO: 42247 - RNA, 23 nt, Human
acuguggccccaccccaagccgu

SEQ ID NO: 42248 - RNA, 32 nt, Human
acuguggcggcggcuccucuucugccugugua

SEQ ID NO: 42249 - RNA, 32 nt, Human
acuguggcuaaguguggggaccagacaggacu

SEQ ID NO: 42250 - RNA, 20 nt, Human
acuguggcucacgccuguaa

SEQ ID NO: 42251 - RNA, 32 nt, Human
acuguggcugccuccccuccacggccuccagg

SEQ ID NO: 42252 - RNA, 32 nt, Human
acuguggcuucaggaugaagacaugagagaaa

SEQ ID NO: 42253 - RNA, 32 nt, Human
acuguggcuucucaauaaauauucagaugucc

SEQ ID NO: 42254 - RNA, 32 nt, Human
acugugggagagagaacaggacccgggaugga

SEQ ID NO: 42255 - RNA, 32 nt, Human
acugugggaggccaagggggcagaucacuuca

SEQ ID NO: 42256 - RNA, 32 nt, Human
acugugggaggcggaggcgggaggaucaugag

SEQ ID NO: 42257 - RNA, 21 nt, Human
acugugggagugauuggccag

SEQ ID NO: 42258 - RNA, 23 nt, Human
acugugggcaaagcggcugcuag

SEQ ID NO: 42259 - RNA, 32 nt, Human
acugugggcagcaucuaagccauguccaaggu

SEQ ID NO: 42260 - RNA, 32 nt, Human
acugugggcaguaucacauggcucucaaaauu

SEQ ID NO: 42261 - RNA, 32 nt, Human
acugugggccacucgcugcagaaauguagaug

SEQ ID NO: 42262 - RNA, 32 nt, Human
acugugggccuccaccaggcgcaggugacccu

SEQ ID NO: 42263 - RNA, 21 nt, Human
acugugggcuaggguggucag

SEQ ID NO: 42264 - RNA, 32 nt, Human
acugugggcugggaggagggaggcaggggaga

SEQ ID NO: 42265 - RNA, 32 nt, Human
acuguggggacaucucgugaggggacacgaaa

SEQ ID NO: 42266 - RNA, 32 nt, Human
acuguggggaggagcaugucagguuugggcuu

SEQ ID NO: 42267 - RNA, 32 nt, Human
acuguggggaggaggaggaagaagaggaggag

SEQ ID NO: 42268 - RNA, 20 nt, Human
acuguggggaggcuggccgg

SEQ ID NO: 42269 - RNA, 32 nt, Human
acuguggggauccccaucuggccucgacaggg

SEQ ID NO: 42270 - RNA, 32 nt, Human
acuguggggccaggcaugaccacucucagguu

SEQ ID NO: 42271 - RNA, 32 nt, Human
acuguggggcuggagcguggugggcaagagga

SEQ ID NO: 42272 - RNA, 23 nt, Human
acuguggggcuucugccggccgg

SEQ ID NO: 42273 - RNA, 32 nt, Human
acugugggguaggucggggagaggguaaggga

SEQ ID NO: 42274 - RNA, 32 nt, Human
acuguggggugagggaaggagcgcuuggaguc

SEQ ID NO: 42275 - RNA, 20 nt, Human
acuguggguacaccuauaaa

SEQ ID NO: 42276 - RNA, 32 nt, Human
acuguggguagccugggauuaggccucaucau

SEQ ID NO: 42277 - RNA, 32 nt, Human
acuguggguauugugacauaaugcugggccca

SEQ ID NO: 42278 - RNA, 32 nt, Human
acuguggucaaagauuuguguguauuuguaag

SEQ ID NO: 42279 - RNA, 32 nt, Human
acuguggucaauaugaauuuaaaccacguagu

SEQ ID NO: 42280 - RNA, 32 nt, Human
acugugguccauggacuacacagugaguagag

SEQ ID NO: 42281 - RNA, 32 nt, Human
acuguggucccagcuacaggggaggcugagac

SEQ ID NO: 42282 - RNA, 32 nt, Human
acuguggucccagcuacucgggaggcugaggg

SEQ ID NO: 42283 - RNA, 32 nt, Human
acuguggucucaaucuccugacuucauggucc

SEQ ID NO: 42284 - RNA, 32 nt, Human
acuguggucuggguccgaaggcugcaagacgc

SEQ ID NO: 42285 - RNA, 32 nt, Human
acuguggugaaauggcuccagaggucuguaca

SEQ ID NO: 42286 - RNA, 32 nt, Human
acuguggugaauuuagcaacacuuaugaaguu

SEQ ID NO: 42287 - RNA, 32 nt, Human
acuguggugagaaaccucacuguccaugguua

SEQ ID NO: 42288 - RNA, 32 nt, Human
acuguggugcggcuucaugugauaugacagug

SEQ ID NO: 42289 - RNA, 32 nt, Human
acuguggugugugcugggcaaauguggccuga

SEQ ID NO: 42290 - RNA, 32 nt, Human
acugugguucuucgagagaagcugcccauccg

SEQ ID NO: 42291 - RNA, 32 nt, Human
acugugguugccugccuucccagcuccacgcg

SEQ ID NO: 42292 - RNA, 32 nt, Human
acuguguaaagaaagaaaaagggaaguaccaa

SEQ ID NO: 42293 - RNA, 32 nt, Human
acuguguaaccuggagaggcaggugugagcgg

SEQ ID NO: 42294 - RNA, 32 nt, Human
acuguguaccagaaucaguuguuggagaaaau

SEQ ID NO: 42295 - RNA, 24 nt, Human
acuguguacccccaggcuggcuag

SEQ ID NO: 42296 - RNA, 21 nt, Human
acuguguacuugucuggucag

SEQ ID NO: 42297 - RNA, 32 nt, Human
acuguguagagacauuuuccacacagccagaa

SEQ ID NO: 42298 - RNA, 32 nt, Human
acuguguagcuaccucacaaccaguccugucu

SEQ ID NO: 42299 - RNA, 32 nt, Human
acuguguauacccuacgagccugcacuccuua

SEQ ID NO: 42300 - RNA, 32 nt, Human
acuguguaugcuggcauucacacucuacucac

SEQ ID NO: 42301 - RNA, 32 nt, Human
acugugucaacaacaggaaacuauuuguauuu

SEQ ID NO: 42302 - RNA, 32 nt, Human
acugugucacccagacuggaaugcagugacac

SEQ ID NO: 42303 - RNA, 32 nt, Human
acugugucacccaggcuggagugcaguggcac

SEQ ID NO: 42304 - RNA, 32 nt, Human
acugugucacccaggcuggagugcaguggcgc

SEQ ID NO: 42305 - RNA, 32 nt, Human
acugugucacccaggcuggagugcaguggugc

SEQ ID NO: 42306 - RNA, 31 nt, Human
acugugucacuuugagggccugucucugggg

SEQ ID NO: 42307 - RNA, 32 nt, Human
acugugucagcaagcugagagggaaacugaag

SEQ ID NO: 42308 - RNA, 32 nt, Human
acugugucauccagagcuggagugcagcggca

SEQ ID NO: 42309 - RNA, 32 nt, Human
acugugucaugcaggcuggagugaagucgugu

SEQ ID NO: 42310 - RNA, 32 nt, Human
acugugucaugcaggcuggagugcaguggcau

SEQ ID NO: 42311 - RNA, 32 nt, Human
acugugucauugcacuccagccugggcgacaa

SEQ ID NO: 42312 - RNA, 32 nt, Human
acuguguccagagacaugggccucccacuccu

SEQ ID NO: 42313 - RNA, 32 nt, Human
acugugucccccaggcuggagugcaguggcac

SEQ ID NO: 42314 - RNA, 32 nt, Human
acuguguccuagagagccucuaugcauuucaa

SEQ ID NO: 42315 - RNA, 32 nt, Human
acugugucgcccaggcuggagugcaaguggca

SEQ ID NO: 42316 - RNA, 32 nt, Human
acugugucgcccaggcuggagugcaguggcgu

SEQ ID NO: 42317 - RNA, 32 nt, Human
acugugucucugaauuccugucuuccaaauug

SEQ ID NO: 42318 - RNA, 32 nt, Human
acugugugaauccaguguucacauucacacuu

SEQ ID NO: 42319 - RNA, 32 nt, Human
acugugugaccagcggaaacagguguguguga

SEQ ID NO: 42320 - RNA, 32 nt, Human
acugugugaccuuaggcuggagugcaauggca

SEQ ID NO: 42321 - RNA, 32 nt, Human
acugugugacugugugggagccuggacugaca

SEQ ID NO: 42322 - RNA, 32 nt, Human
acugugugagagaagaagagaaagcagcagaa

SEQ ID NO: 42323 - RNA, 32 nt, Human
acugugugagccuugggcaaguuacucagccu

SEQ ID NO: 42324 - RNA, 22 nt, Human
acugugugccccaagggccagg

SEQ ID NO: 42325 - RNA, 32 nt, Human
acugugugcucaagguguccaggcuuuugggg

SEQ ID NO: 42326 - RNA, 32 nt, Human
acugugugcuuuuggugggguggagagguggg

SEQ ID NO: 42327 - RNA, 32 nt, Human
acuguguggacugugaugccacacagaguggu

SEQ ID NO: 42328 - RNA, 32 nt, Human
acugugugggaaauagaguuuaagucaucaaa

SEQ ID NO: 42329 - RNA, 32 nt, Human
acuguguguauguguguauauguauguuuuga

SEQ ID NO: 42330 - RNA, 32 nt, Human
acugugugugaggaacagucacuacccacugg

SEQ ID NO: 42331 - RNA, 32 nt, Human
acuguguuacucaggagguuucuauaaugcca

SEQ ID NO: 42332 - RNA, 32 nt, Human
acuguguucuauuuaccaguggagauuuucug

SEQ ID NO: 42333 - RNA, 32 nt, Human
acuguguugcaucauccuccaguuugccuggu

SEQ ID NO: 42334 - RNA, 32 nt, Human
acuguguugcccaggcuagagugcaguggugc

SEQ ID NO: 42335 - RNA, 32 nt, Human
acuguguugcccaggcuggagugcaaauggcu

SEQ ID NO: 42336 - RNA, 32 nt, Human
acuguguugcccaggcuggagugcaguagugc

SEQ ID NO: 42337 - RNA, 32 nt, Human
acuguguugguggugcugaugaaucugccaga

SEQ ID NO: 42338 - RNA, 32 nt, Human
acuguguugugcacucaugcacugaccuuaca

SEQ ID NO: 42339 - RNA, 32 nt, Human
acuguguuuaguugcaaggauuuuuccaugug

SEQ ID NO: 42340 - RNA, 32 nt, Human
acuguguuuaucucccuuuaaaacccuaccua

SEQ ID NO: 42341 - RNA, 32 nt, Human
acuguguuucuggugccaaggcucuugagggc

SEQ ID NO: 42342 - RNA, 32 nt, Human
acuguguuuucacucaaaccacugacuuaaca

SEQ ID NO: 42343 - RNA, 32 nt, Human
acuguguuuucagucacuuccuuucugugaaa

SEQ ID NO: 42344 - RNA, 32 nt, Human
acuguguuuuuagcccuucaccucucagcuuu

SEQ ID NO: 42345 - RNA, 32 nt, Human
acuguuaaauaccaccaguccagcuuuggcaa

SEQ ID NO: 42346 - RNA, 32 nt, Human
acuguuaaaucagccagaguugguguucaagu

SEQ ID NO: 42347 - RNA, 31 nt, Human
acuguuaauuucauacuauguugaaacuagu

SEQ ID NO: 42348 - RNA, 32 nt, Human
acuguuacagaauccuagccugugguaaaugc

SEQ ID NO: 42349 - RNA, 32 nt, Human
acuguuacaggguagaagaugcagcucaggga

SEQ ID NO: 42350 - RNA, 32 nt, Human
acuguuaccuugaauucugggcucaggugauc

SEQ ID NO: 42351 - RNA, 32 nt, Human
acuguuacuggcagcauuguauaaaagacacg

SEQ ID NO: 42352 - RNA, 32 nt, Human
acuguuagaaaauggacacugugcccagcccg

SEQ ID NO: 42353 - RNA, 32 nt, Human
acuguuagagucaggcaaaucagcaaagcacu

SEQ ID NO: 42354 - RNA, 32 nt, Human
acuguuagagugggaagucugagggaacugga

SEQ ID NO: 42355 - RNA, 32 nt, Human
acuguuagauuacugauaacgcggauagauuu

SEQ ID NO: 42356 - RNA, 32 nt, Human
acuguuaucccucccucuugcuggcuuugcug

SEQ ID NO: 42357 - RNA, 32 nt, Human
acuguucagggccacggagaauucucgaaguc

SEQ ID NO: 42358 - RNA, 32 nt, Human
acuguucaggggauccuucuguuucucacggg

SEQ ID NO: 42359 - RNA, 32 nt, Human
acuguucaucagcugucacuaaacuuauuuua

SEQ ID NO: 42360 - RNA, 32 nt, Human
acuguucauggaggagcugggcccugcagauc

SEQ ID NO: 42361 - RNA, 32 nt, Human
acuguuccaaacgccucccaccuggugugcac

SEQ ID NO: 42362 - RNA, 32 nt, Human
acuguuccagagaaggugcggggccagcugcu

SEQ ID NO: 42363 - RNA, 32 nt, Human
acuguuccaggacaguccugaccucggccugg

SEQ ID NO: 42364 - RNA, 32 nt, Human
acuguuccauuuuccguaucugcuucgggcuu

SEQ ID NO: 42365 - RNA, 32 nt, Human
acuguucccuggcaaauucugaccacaccugg

SEQ ID NO: 42366 - RNA, 32 nt, Human
acuguucccuuagguuuuuccccaccucaauu

SEQ ID NO: 42367 - RNA, 32 nt, Human
acuguuccuaguuucuuagacuuaucugcaua

SEQ ID NO: 42368 - RNA, 32 nt, Human
acuguuccucugggaaaggagcagggaccucu

SEQ ID NO: 42369 - RNA, 32 nt, Human
acuguuccuuggaaacuguagucuuauggaga

SEQ ID NO: 42370 - RNA, 18 nt, Human
acuguuccuuugcucaua

SEQ ID NO: 42371 - RNA, 32 nt, Human
acuguucgaucaugugggguccuuauuuacaa

SEQ ID NO: 42372 - RNA, 19 nt, Human
acuguucucugaguccuuu

SEQ ID NO: 42373 - RNA, 32 nt, Human
acuguucucugccugccugauacccucaccac

SEQ ID NO: 42374 - RNA, 32 nt, Human
acuguucucuucucuacccugcccuaaccagg

SEQ ID NO: 42375 - RNA, 32 nt, Human
acuguucugaacaccaguaccaaccacagaga

SEQ ID NO: 42376 - RNA, 21 nt, Human
acuguucugcaaagguggcaa

SEQ ID NO: 42377 - RNA, 32 nt, Human
acuguucugcugcugaucacgagggcaccaga

SEQ ID NO: 42378 - RNA, 32 nt, Human
acuguucuguucuguauuuuggcaucuguguu

SEQ ID NO: 42379 - RNA, 32 nt, Human
acuguucuguucugucuucucuguccauuuua

SEQ ID NO: 42380 - RNA, 32 nt, Human
acuguucuuucaaucucagcaauguuuccuuc

SEQ ID NO: 42381 - RNA, 32 nt, Human
acuguugaauacuauuuauccaagguaucaag

SEQ ID NO: 42382 - RNA, 32 nt, Human
acuguugaauaucuuugaacuugcuguuuuca

SEQ ID NO: 42383 - RNA, 32 nt, Human
acuguugaccuucucagcaucucccuuuugcc

SEQ ID NO: 42384 - RNA, 32 nt, Human
acuguugagcccuuuugguguugcgaguugaa

SEQ ID NO: 42385 - RNA, 32 nt, Human
acuguugaucaaagcacagaacagguucaaau

SEQ ID NO: 42386 - RNA, 32 nt, Human
acuguugcaccaggcugagaaagcagcaauau

SEQ ID NO: 42387 - RNA, 32 nt, Human
acuguugcaguuuacaaccugcccuccaggga

SEQ ID NO: 42388 - RNA, 32 nt, Human
acuguugccacaaguauuuucuugagagauuu

SEQ ID NO: 42389 - RNA, 32 nt, Human
acuguugccacggugaugaagggagacaucca

SEQ ID NO: 42390 - RNA, 32 nt, Human
acuguugccaggcuggagugcaguggcacaau

SEQ ID NO: 42391 - RNA, 32 nt, Human
acuguugcccaggcuggagugcagugacgcga

SEQ ID NO: 42392 - RNA, 32 nt, Human
acuguugcccaugcuuuuuaagccacaucccu

SEQ ID NO: 42393 - RNA, 32 nt, Human
acuguugccugggcuggaaugcaguggugcga

SEQ ID NO: 42394 - RNA, 32 nt, Human
acuguugccugggcuggaaugcagugguguga

SEQ ID NO: 42395 - RNA, 32 nt, Human
acuguugccuuauuaaccccucccucucccac

SEQ ID NO: 42396 - RNA, 32 nt, Human
acuguugcucuuggugggcuuggcagggacua

SEQ ID NO: 42397 - RNA, 32 nt, Human
acuguugcugcacuccagccugagugacagag

SEQ ID NO: 42398 - RNA, 32 nt, Human
acuguugcugcugcgggagacugugggcuguu

SEQ ID NO: 42399 - RNA, 32 nt, Human
acuguuggacaguuaguuuagauguguugcau

SEQ ID NO: 42400 - RNA, 18 nt, Human
acuguuggaguucacuga

SEQ ID NO: 42401 - RNA, 32 nt, Human
acuguuggcuccuucccauuuaugagagagcc

SEQ ID NO: 42402 - RNA, 32 nt, Human
acuguugggauuacaggcaugagccaccacgc

SEQ ID NO: 42403 - RNA, 32 nt, Human
acuguuggugugagaccagugcuccugguggu

SEQ ID NO: 42404 - RNA, 32 nt, Human
acuguuguaucuugaauaaacgcugcugcuuc

SEQ ID NO: 42405 - RNA, 32 nt, Human
acuguugucacuuuugaaacuaggccuaugaa

SEQ ID NO: 42406 - RNA, 32 nt, Human
acuguugucccuguuuuccuuugggggaauuu

SEQ ID NO: 42407 - RNA, 21 nt, Human
acuguugucuuguuucacuga

SEQ ID NO: 42408 - RNA, 32 nt, Human
acuguuguugcccaggcuggagugcaguggcg

SEQ ID NO: 42409 - RNA, 32 nt, Human
acuguuguuucucuguggacugggcaaggugg

SEQ ID NO: 42410 - RNA, 32 nt, Human
acuguuguuugcccagccugggcugcagaaag

SEQ ID NO: 42411 - RNA, 32 nt, Human
acuguuuaaagaaaucacagaacaguacuuuu

SEQ ID NO: 42412 - RNA, 32 nt, Human
acuguuuaaaucacaggaagaagcggcuuuaa

SEQ ID NO: 42413 - RNA, 32 nt, Human
acuguuuaccauucuuccacugugcuguuaua

SEQ ID NO: 42414 - RNA, 32 nt, Human
acuguuuaugagacacauccaggaguuauguu

SEQ ID NO: 42415 - RNA, 32 nt, Human
acuguuuaugcugcuggaacuuagcacugucu

SEQ ID NO: 42416 - RNA, 32 nt, Human
acuguuucacacacaggagauugugagcugug

SEQ ID NO: 42417 - RNA, 32 nt, Human
acuguuucacaggcagccaccaugcccaugcu

SEQ ID NO: 42418 - RNA, 32 nt, Human
acuguuucaguuaauaugcugcacaccacaca

SEQ ID NO: 42419 - RNA, 32 nt, Human
acuguuucauaaggggucaaguuacauuuucc

SEQ ID NO: 42420 - RNA, 32 nt, Human
acuguuucauugcuuuuuaaauuuuucacgug

SEQ ID NO: 42421 - RNA, 32 nt, Human
acuguuuccucuuucugcuucuuucaucacau

SEQ ID NO: 42422 - RNA, 32 nt, Human
acuguuucuacuccucccuccuccuccacugc

SEQ ID NO: 42423 - RNA, 32 nt, Human
acuguuucucucuaagacaccauuguuuuccc

SEQ ID NO: 42424 - RNA, 32 nt, Human
acuguuucugaacaacaaccuucuucgguccu

SEQ ID NO: 42425 - RNA, 32 nt, Human
acuguuugccaaugguuguauuuaguaagauu

SEQ ID NO: 42426 - RNA, 32 nt, Human
acuguuugcuuucuccugucaugguuaagaga

SEQ ID NO: 42427 - RNA, 32 nt, Human
acuguuuggggugccucucugcagccuccccg

SEQ ID NO: 42428 - RNA, 32 nt, Human
acuguuuguaucugcgcccagaauucucagug

SEQ ID NO: 42429 - RNA, 32 nt, Human
acuguuuguuuaccuugagcaguaaacccgaa

SEQ ID NO: 42430 - RNA, 32 nt, Human
acuguuuguuugccaguccugcccuaaggcag

SEQ ID NO: 42431 - RNA, 32 nt, Human
acuguuuuagagugaauccugggguguucugc

SEQ ID NO: 42432 - RNA, 32 nt, Human
acuguuuuaggugagccaugcacacaauguga

SEQ ID NO: 42433 - RNA, 32 nt, Human
acuguuuuauuugaaggaaaccugugugauuu

SEQ ID NO: 42434 - RNA, 32 nt, Human
acuguuuucaaggaggugcuuaggauuguggg

SEQ ID NO: 42435 - RNA, 16 nt, Human
acuguuuucaucuaca

SEQ ID NO: 42436 - RNA, 32 nt, Human
acuguuuucccuugagauuuccuucuccuaug

SEQ ID NO: 42437 - RNA, 19 nt, Human
acuguuuucuuucaccgca

SEQ ID NO: 42438 - RNA, 32 nt, Human
acuguuuucuuucugcccucuuccuaaugccc

SEQ ID NO: 42439 - RNA, 32 nt, Human
acuguuuugccuggcgcugcugccccacugca

SEQ ID NO: 42440 - RNA, 32 nt, Human
acuguuuuuaacaugcuugggguuugauaaaa

SEQ ID NO: 42441 - RNA, 32 nt, Human
acuguuuuuagguuuugcuauuacaaaauacu

SEQ ID NO: 42442 - RNA, 23 nt, Human
acuuaaaaauauauaaauaauuc

SEQ ID NO: 42443 - RNA, 32 nt, Human
acuuaaaacacugcuacacugaugcuuuugug

SEQ ID NO: 42444 - RNA, 32 nt, Human
acuuaaaacauggugccuauaucugagagacc

SEQ ID NO: 42445 - RNA, 32 nt, Human
acuuaaaacuauuuaagaacugauguuccgau

SEQ ID NO: 42446 - RNA, 32 nt, Human
acuuaaaagcagcugcaggccuguggggaacg

SEQ ID NO: 42447 - RNA, 32 nt, Human
acuuaaaauaccucaugcauuguaaaagcuau

SEQ ID NO: 42448 - RNA, 32 nt, Human
acuuaaaauauccacuggacacugugaaauac

SEQ ID NO: 42449 - RNA, 32 nt, Human
acuuaaaccagggcaggaaggaauggaaggau

SEQ ID NO: 42450 - RNA, 32 nt, Human
acuuaaacccaggaggcggagguugcagugag

SEQ ID NO: 42451 - RNA, 32 nt, Human
acuuaaacccaggagguggagguugcagugag

SEQ ID NO: 42452 - RNA, 32 nt, Human
acuuaaacccgggaggugaaggaugcagugag

SEQ ID NO: 42453 - RNA, 32 nt, Human
acuuaaaccugaauuggaauuacuucuguaca

SEQ ID NO: 42454 - RNA, 32 nt, Human
acuuaaagaaguccagcuagagagggaugaau

SEQ ID NO: 42455 - RNA, 32 nt, Human
acuuaaaggaagcacaggcaaguguucagugu

SEQ ID NO: 42456 - RNA, 32 nt, Human
acuuaaaugcuuguugaaugagugagauguuu

SEQ ID NO: 42457 - RNA, 32 nt, Human
acuuaacaacuaaagggcaacauauagacuuu

SEQ ID NO: 42458 - RNA, 31 nt, Human
acuuaacaaguguacugcagaauaaacuacc

SEQ ID NO: 42459 - RNA, 32 nt, Human
acuuaacacagaaacgcaauaaacacacacaa

SEQ ID NO: 42460 - RNA, 32 nt, Human
acuuaacagaggagguaaagggagguuuucac

SEQ ID NO: 42461 - RNA, 32 nt, Human
acuuaacagaugccuccucuccaaagagaauu

SEQ ID NO: 42462 - RNA, 32 nt, Human
acuuaacauaccauggccugagcuaaguacca

SEQ ID NO: 42463 - RNA, 32 nt, Human
acuuaacauguuuucugucauaguuagaugug

SEQ ID NO: 42464 - RNA, 32 nt, Human
acuuaaccacuguuaagugaucugugaucaag

SEQ ID NO: 42465 - RNA, 32 nt, Human
acuuaacccauguuuucucuuuauauaaucac

SEQ ID NO: 42466 - RNA, 32 nt, Human
acuuaaccucucugugcuucagucucccuguc

SEQ ID NO: 42467 - RNA, 32 nt, Human
acuuaaccucucugugcuuugugugccuaagc

SEQ ID NO: 42468 - RNA, 32 nt, Human
acuuaacgugucacuucuccucccagaggcag

SEQ ID NO: 42469 - RNA, 32 nt, Human
acuuaacucaaaggcguuguggcucuaagauu

SEQ ID NO: 42470 - RNA, 32 nt, Human
acuuaacuugcaaggaaguuacaaggucccag

SEQ ID NO: 42471 - RNA, 32 nt, Human
acuuaagagagggaagugggcuggggagagua

SEQ ID NO: 42472 - RNA, 32 nt, Human
acuuaagaguuuucaagaugucaaacuuaagg

SEQ ID NO: 42473 - RNA, 32 nt, Human
acuuaagcaagauacaaaugugcugccugcag

SEQ ID NO: 42474 - RNA, 32 nt, Human
acuuaagcccaggagugauuugugcagccaag

SEQ ID NO: 42475 - RNA, 32 nt, Human
acuuaagcccgggaggucgaggcugcugugag

SEQ ID NO: 42476 - RNA, 32 nt, Human
acuuaagccuggaagguggaaguugcagugag

SEQ ID NO: 42477 - RNA, 32 nt, Human
acuuaagccugggaagucaagccugcagugaa

SEQ ID NO: 42478 - RNA, 32 nt, Human
acuuaaggccaugaguuugaggcuacagagag

SEQ ID NO: 42479 - RNA, 32 nt, Human
acuuaaggggccaaggcaggaggaucacuuga

SEQ ID NO: 42480 - RNA, 32 nt, Human
acuuaaguaucuccuaaaugugauacagaaga

SEQ ID NO: 42481 - RNA, 32 nt, Human
acuuaaguguguuguuccugaacuuucuguaa

SEQ ID NO: 42482 - RNA, 32 nt, Human
acuuaaguuuuccagagaacuaaauaguaaua

SEQ ID NO: 42483 - RNA, 32 nt, Human
acuuaauaaccagggaaccagccaaauacugu

SEQ ID NO: 42484 - RNA, 32 nt, Human
acuuaauacccauugaaauuucaccucaggug

SEQ ID NO: 42485 - RNA, 32 nt, Human
acuuaauacuauacuuaauuauuggacuauca

SEQ ID NO: 42486 - RNA, 32 nt, Human
acuuaauauucuccacaguuaccuuuagagag

SEQ ID NO: 42487 - RNA, 32 nt, Human
acuuaauauuuuuauaaaguauuguaauauug

SEQ ID NO: 42488 - RNA, 32 nt, Human
acuuaaucaccacuucaucuaauuuuagcaag

SEQ ID NO: 42489 - RNA, 32 nt, Human
acuuaaucgcacuguuucuaauucuuuuuaca

SEQ ID NO: 42490 - RNA, 32 nt, Human
acuuaaucuuucuccauccugugcuccaaaaa

SEQ ID NO: 42491 - RNA, 32 nt, Human
acuuaaugcucaguauuaccuuccucacuaug

SEQ ID NO: 42492 - RNA, 32 nt, Human
acuuaauggaaagguaaauggucagauaaaaa

SEQ ID NO: 42493 - RNA, 32 nt, Human
acuuaauguugguuccaguccuucaacuguuc

SEQ ID NO: 42494 - RNA, 32 nt, Human
acuuaauuccuguaaucccagcauuuugagag

SEQ ID NO: 42495 - RNA, 32 nt, Human
acuuaauucuuucuaaagaugaaaugggauug

SEQ ID NO: 42496 - RNA, 32 nt, Human
acuuacaaaguacacuauguaagaacugaggu

SEQ ID NO: 42497 - RNA, 32 nt, Human
acuuacaagcaaagcaguuccacccaugacca

SEQ ID NO: 42498 - RNA, 32 nt, Human
acuuacaaggcugagggcuguggugugcauua

SEQ ID NO: 42499 - RNA, 32 nt, Human
acuuacaaugaagagcauuuggaguuguaugc

SEQ ID NO: 42500 - RNA, 23 nt, Human
acuuacacuucccuuccccuuca

SEQ ID NO: 42501 - RNA, 32 nt, Human
acuuacagaccaaccaaccaccuugcuggaac

SEQ ID NO: 42502 - RNA, 32 nt, Human
acuuacagagcuggcccaaugagacaaauaag

SEQ ID NO: 42503 - RNA, 32 nt, Human
acuuacagaggauuuuuauuugugaauauuuc

SEQ ID NO: 42504 - RNA, 32 nt, Human
acuuacagccugacagauuaggaguccgauaa

SEQ ID NO: 42505 - RNA, 32 nt, Human
acuuacagcucacgccuguaaucccagcacuu

SEQ ID NO: 42506 - RNA, 32 nt, Human
acuuacagggcuaggauuucaguguugucaga

SEQ ID NO: 42507 - RNA, 32 nt, Human
acuuacagugacuaucuaagguugugauaaau

SEQ ID NO: 42508 - RNA, 32 nt, Human
acuuacaguggguccaguggguccccagacuc

SEQ ID NO: 42509 - RNA, 32 nt, Human
acuuacaugagcagcuaaauaaaugaugggau

SEQ ID NO: 42510 - RNA, 32 nt, Human
acuuacauggugcagcugcuacaaggccugga

SEQ ID NO: 42511 - RNA, 32 nt, Human
acuuaccaaggagaaagaggagagacagcagu

SEQ ID NO: 42512 - RNA, 32 nt, Human
acuuaccacaacuugugccuccuggguucaag

SEQ ID NO: 42513 - RNA, 32 nt, Human
acuuaccacucugccuaagagccaccuacugg

SEQ ID NO: 42514 - RNA, 32 nt, Human
acuuaccauagcagugacaauggcagucuugg

SEQ ID NO: 42515 - RNA, 32 nt, Human
acuuacccaaggcucuucuccuuggaggacag

SEQ ID NO: 42516 - RNA, 32 nt, Human
acuuacccagaacauucugcccccggaaugca

SEQ ID NO: 42517 - RNA, 32 nt, Human
acuuacccagcuguuauacauguuuucaguuc

SEQ ID NO: 42518 - RNA, 32 nt, Human
acuuacccugggcuggagaguugguuucaggu

SEQ ID NO: 42519 - RNA, 32 nt, Human
acuuacccuuuaaauuauucagaaggaugucc

SEQ ID NO: 42520 - RNA, 32 nt, Human
acuuaccuaaggccacacaguuagcaacaagc

SEQ ID NO: 42521 - RNA, 32 nt, Human
acuuaccucuacuguuagacuaggcgacucac

SEQ ID NO: 42522 - RNA, 32 nt, Human
acuuaccugagagugagagauguguaggaaga

SEQ ID NO: 42523 - RNA, 17 nt, Human
acuuaccuguaguccca

SEQ ID NO: 42524 - RNA, 32 nt, Human
acuuaccuguagucccagcuacuugggaagca

SEQ ID NO: 42525 - RNA, 19 nt, Human
acuuaccugucugcccuca

SEQ ID NO: 42526 - RNA, 32 nt, Human
acuuaccuuccccucaugccgcucccaucucu

SEQ ID NO: 42527 - RNA, 32 nt, Human
acuuacgccuguaaucucagcacuuugggagg

SEQ ID NO: 42528 - RNA, 32 nt, Human
acuuacguuacugucaucaccauuaaaagaau

SEQ ID NO: 42529 - RNA, 32 nt, Human
acuuacuacugcacuccugcuuuugugggaaa

SEQ ID NO: 42530 - RNA, 32 nt, Human
acuuacucaaggccacacagcaaguaggugag

SEQ ID NO: 42531 - RNA, 32 nt, Human
acuuacucauuugacuuuugcacugacuguau

SEQ ID NO: 42532 - RNA, 32 nt, Human
acuuacucauuuuucucccccaagugagcugc

SEQ ID NO: 42533 - RNA, 32 nt, Human
acuuacugaccggccugggcugcucugagaca

SEQ ID NO: 42534 - RNA, 32 nt, Human
acuuacugaugacugaccacacugucuuguga

SEQ ID NO: 42535 - RNA, 32 nt, Human
acuuacugccuccccugcugcuccuccugagc

SEQ ID NO: 42536 - RNA, 32 nt, Human
acuuacugccugggccccugcccagcagccuc

SEQ ID NO: 42537 - RNA, 32 nt, Human
acuuacugcggccgcccggcucuugggaacca

SEQ ID NO: 42538 - RNA, 32 nt, Human
acuuacugcugcucagaaccucaggccuccaa

SEQ ID NO: 42539 - RNA, 32 nt, Human
acuuacuggccuuggcuggcucuucagcucuu

SEQ ID NO: 42540 - RNA, 32 nt, Human
acuuacuguggacuucauagcuuacugacaga

SEQ ID NO: 42541 - RNA, 32 nt, Human
acuuacugugugacuuugggcaaguuccuucc

SEQ ID NO: 42542 - RNA, 32 nt, Human
acuuacuucccauccaggucucagaggucuca

SEQ ID NO: 42543 - RNA, 32 nt, Human
acuuacuuccccaagauauugagaggucauau

SEQ ID NO: 42544 - RNA, 15 nt, Human
acuuacuucgugucc

SEQ ID NO: 42545 - RNA, 32 nt, Human
acuuacuugccaccagcuugugcauuuagugu

SEQ ID NO: 42546 - RNA, 32 nt, Human
acuuagaaaaccagcucagcacugccugcucc

SEQ ID NO: 42547 - RNA, 32 nt, Human
acuuagaaagcaugguaugagcacaggucaug

SEQ ID NO: 42548 - RNA, 32 nt, Human
acuuagaaauuccaggaacacaauuaggauau

SEQ ID NO: 42549 - RNA, 20 nt, Human
acuuagaacacucacugcac

SEQ ID NO: 42550 - RNA, 32 nt, Human
acuuagaaccucuguuggaauguggcugaguc

SEQ ID NO: 42551 - RNA, 32 nt, Human
acuuagaagaaaaggcagagacaggcaagaca

SEQ ID NO: 42552 - RNA, 32 nt, Human
acuuagaagcugaagaaaauagacauagccgg

SEQ ID NO: 42553 - RNA, 21 nt, Human
acuuagaauauauuuuauuua

SEQ ID NO: 42554 - RNA, 24 nt, Human
acuuagaaugagaaaaauaaugca

SEQ ID NO: 42555 - RNA, 32 nt, Human
acuuagaaugauguaauauuccaggaugcugc

SEQ ID NO: 42556 - RNA, 32 nt, Human
acuuagaauguacacagauccaaaauagaauc

SEQ ID NO: 42557 - RNA, 32 nt, Human
acuuagagaaccuauagcaucuucucauuccc

SEQ ID NO: 42558 - RNA, 32 nt, Human
acuuagagaagaggaagagaauaggaaaacca

SEQ ID NO: 42559 - RNA, 32 nt, Human
acuuagagauacaaucacgucacaggucucuu

SEQ ID NO: 42560 - RNA, 32 nt, Human
acuuagaggaggaucgcuugaucucaggaggu

SEQ ID NO: 42561 - RNA, 32 nt, Human
acuuagagguggagcaguuggauucugugcag

SEQ ID NO: 42562 - RNA, 32 nt, Human
acuuagaugcuuccagcacauacguagguagc

SEQ ID NO: 42563 - RNA, 32 nt, Human
acuuagauuguauugcucacauguucguuccu

SEQ ID NO: 42564 - RNA, 32 nt, Human
acuuagcacuuguauaaucagacuggaaaugg

SEQ ID NO: 42565 - RNA, 32 nt, Human
acuuagcagagcaguuccuccuggggccugcg

SEQ ID NO: 42566 - RNA, 24 nt, Human
acuuagcauaaagucuuuaagaug

SEQ ID NO: 42567 - RNA, 32 nt, Human
acuuagccagcccuggcuguuguauuaccaaa

SEQ ID NO: 42568 - RNA, 32 nt, Human
acuuagcccaagagugcaaaucugccagccua

SEQ ID NO: 42569 - RNA, 32 nt, Human
acuuagccuugaucuguacccucguagucaau

SEQ ID NO: 42570 - RNA, 24 nt, Human
acuuagccuuggcauuugugcaga

SEQ ID NO: 42571 - RNA, 32 nt, Human
acuuagccuuucugguuucccuuccugugcau

SEQ ID NO: 42572 - RNA, 32 nt, Human
acuuagcucaccgcaaccuccaccucccgggu

SEQ ID NO: 42573 - RNA, 32 nt, Human
acuuagcucccuuuuaaaaggagcacauuaaa

SEQ ID NO: 42574 - RNA, 32 nt, Human
acuuagcuggugggaaaggaggguucuggaag

SEQ ID NO: 42575 - RNA, 24 nt, Human
acuuagcugugauacugacaggua

SEQ ID NO: 42576 - RNA, 32 nt, Human
acuuagcuucucagggguaaagacagacagac

SEQ ID NO: 42577 - RNA, 32 nt, Human
acuuaggaagagauaaggcaagagcuagauuu

SEQ ID NO: 42578 - RNA, 32 nt, Human
acuuaggacuuccucugggcaccagggcagug

SEQ ID NO: 42579 - RNA, 32 nt, Human
acuuaggaggcugaggcaggagaaucacauca

SEQ ID NO: 42580 - RNA, 32 nt, Human
acuuaggaggcugaggcaggagaaucgcuuga

SEQ ID NO: 42581 - RNA, 32 nt, Human
acuuaggaggcugaggcaggagaaucucuuga

SEQ ID NO: 42582 - RNA, 32 nt, Human
acuuaggaggcugaggcaggaggaucauuuga

SEQ ID NO: 42583 - RNA, 32 nt, Human
acuuaggaggcugaggcaugagaaucacuuaa

SEQ ID NO: 42584 - RNA, 32 nt, Human
agaaaugggguuuuaccguguuggccaggcug

SEQ ID NO: 42585 - RNA, 32 nt, Human
agaaaugggguuuugccauguuggccaggcug

SEQ ID NO: 42586 - RNA, 32 nt, Human
agaaaugucacacuaaaagguauaucaaaagc

SEQ ID NO: 42587 - RNA, 29 nt, Human
agaaaugucauccucaggcacgccagacu

SEQ ID NO: 42588 - RNA, 32 nt, Human
agaaaugucaucucucuucuaucugugguugc

SEQ ID NO: 42589 - RNA, 32 nt, Human
agaaaugucaucugcaaauacagaccauuuuu

SEQ ID NO: 42590 - RNA, 32 nt, Human
agaaaugucaucugcauugugcagauggaaaa

SEQ ID NO: 42591 - RNA, 32 nt, Human
agaaauguccaguuuugagugacuguaguaug

SEQ ID NO: 42592 - RNA, 32 nt, Human
agaaauguccccagaguggagaaguucaguuc

SEQ ID NO: 42593 - RNA, 32 nt, Human
agaaauguccugaagucacacagcuaauggca

SEQ ID NO: 42594 - RNA, 32 nt, Human
agaaaugucuaaagcugcuucucccaacaccg

SEQ ID NO: 42595 - RNA, 32 nt, Human
agaaaugucuauguuuucuacuccaauucaua

SEQ ID NO: 42596 - RNA, 32 nt, Human
agaaaugugcaggagcggagggacagcgacac

SEQ ID NO: 42597 - RNA, 32 nt, Human
agaaaugugccguggugugcagcaucccuuga

SEQ ID NO: 42598 - RNA, 21 nt, Human
agaaaugugccucauuugcca

SEQ ID NO: 42599 - RNA, 32 nt, Human
agaaaugugguauguggagaaguucuguaugu

SEQ ID NO: 42600 - RNA, 31 nt, Human
agaaaugugguggaaacaggagugaauaaag

SEQ ID NO: 42601 - RNA, 32 nt, Human
agaaauguguaacucuccaagagaugcagaca

SEQ ID NO: 42602 - RNA, 32 nt, Human
agaaauguuagacauugagcuaccacaggacc

SEQ ID NO: 42603 - RNA, 22 nt, Human
agaaauguuuuaaaagggacuu

SEQ ID NO: 42604 - RNA, 18 nt, Human
agaaauguuuuucuucca

SEQ ID NO: 42605 - RNA, 32 nt, Human
agaaauuaaaguccguuuuacugugaauauag

SEQ ID NO: 42606 - RNA, 32 nt, Human
agaaauuacuggagaaaagcuugugagcucgc

SEQ ID NO: 42607 - RNA, 22 nt, Human
agaaauuagaacaaacuggaga

SEQ ID NO: 42608 - RNA, 32 nt, Human
agaaauuauaacggagauguuugaacuaaugu

SEQ ID NO: 42609 - RNA, 32 nt, Human
agaaauuaucaaagcaauagaaauagcuuggu

SEQ ID NO: 42610 - RNA, 32 nt, Human
agaaauuauugguuuguguugcucuggggaaa

SEQ ID NO: 42611 - RNA, 32 nt, Human
agaaauucagcaguauuauaucugccaacaau

SEQ ID NO: 42612 - RNA, 32 nt, Human
agaaauucauguuuacuuuucuagguguauga

SEQ ID NO: 42613 - RNA, 32 nt, Human
agaaauucauuuccucaccuguaguggccacc

SEQ ID NO: 42614 - RNA, 32 nt, Human
agaaauuccugccucguucaaugcggcaaguu

SEQ ID NO: 42615 - RNA, 32 nt, Human
agaaauucuuaagaugccaauguaauaaaugu

SEQ ID NO: 42616 - RNA, 32 nt, Human
agaaauucuucagucaguccaggacagacgag

SEQ ID NO: 42617 - RNA, 32 nt, Human
agaaauugagccagcacuaucuguacuccaac

SEQ ID NO: 42618 - RNA, 32 nt, Human
agaaauugaguauuuucugacauaagaauaua

SEQ ID NO: 42619 - RNA, 32 nt, Human
agaaauugcaagauggaagcagacaguacagg

SEQ ID NO: 42620 - RNA, 32 nt, Human
agaaauugcccuuuuaaaagcauguacgugaa

SEQ ID NO: 42621 - RNA, 23 nt, Human
agaaauuggccuucagcuggaga

SEQ ID NO: 42622 - RNA, 32 nt, Human
agaaauuggcucaccuugggaaacccagggaa

SEQ ID NO: 42623 - RNA, 32 nt, Human
agaaauugggagagagaaauagaaggcuugau

SEQ ID NO: 42624 - RNA, 32 nt, Human
agaaauugggugauguuuuugugcccagcaac

SEQ ID NO: 42625 - RNA, 32 nt, Human
agaaauuguauuucaaccacauccaugaaaau

SEQ ID NO: 42626 - RNA, 32 nt, Human
agaaauuguccaugccaccaauuccacugcua

SEQ ID NO: 42627 - RNA, 32 nt, Human
agaaauuguuaacugcaagugagagcucaucc

SEQ ID NO: 42628 - RNA, 32 nt, Human
agaaauuguucccaguugaugucuuuugggga

SEQ ID NO: 42629 - RNA, 32 nt, Human
agaaauuguugacauaaaauaaagaauugaag

SEQ ID NO: 42630 - RNA, 32 nt, Human
agaaauuguuggaucuggcagucuaggaauga

SEQ ID NO: 42631 - RNA, 32 nt, Human
agaaauuucauuuacuauuuuaguauguaaau

SEQ ID NO: 42632 - RNA, 32 nt, Human
agaaauuuccacugcuguucuucacuuucauc

SEQ ID NO: 42633 - RNA, 32 nt, Human
agaaauuuccuuuacuucauaauuauuuguua

SEQ ID NO: 42634 - RNA, 32 nt, Human
agaaauuucugugguggggagggggcaaucuc

SEQ ID NO: 42635 - RNA, 32 nt, Human
agaaauuugagaccagccugggcaacauagca

SEQ ID NO: 42636 - RNA, 32 nt, Human
agaaauuugucaggcugggugcaguggcucau

SEQ ID NO: 42637 - RNA, 32 nt, Human
agaaauuuuggauuuuucaucacuuucucuuu

SEQ ID NO: 42638 - RNA, 32 nt, Human
agaacaaaaagaaccaaguagagagaguggag

SEQ ID NO: 42639 - RNA, 21 nt, Human
agaacaaaacaaaacaaaaca

SEQ ID NO: 42640 - RNA, 32 nt, Human
agaacaaaacauuagcauuucucugccgugga

SEQ ID NO: 42641 - RNA, 32 nt, Human
agaacaaacccugccaagugcugcuuuggaaa

SEQ ID NO: 42642 - RNA, 32 nt, Human
agaacaaacgggagugaccuagugcagcccug

SEQ ID NO: 42643 - RNA, 32 nt, Human
agaacaaacuauucuuuacccauuuuguagcu

SEQ ID NO: 42644 - RNA, 32 nt, Human
agaacaaacuauugcugacucaugagcacuau

SEQ ID NO: 42645 - RNA, 32 nt, Human
agaacaaagcaggugagaucauguaugugacu

SEQ ID NO: 42646 - RNA, 32 nt, Human
agaacaaauaugauucuccucucccaaauaaa

SEQ ID NO: 42647 - RNA, 32 nt, Human
agaacaaauggcacagcaucccugccaggauc

SEQ ID NO: 42648 - RNA, 32 nt, Human
agaacaacagcaggcuuccuggagccacaugg

SEQ ID NO: 42649 - RNA, 32 nt, Human
agaacaacagccacuuuugugggagcccaaga

SEQ ID NO: 42650 - RNA, 32 nt, Human
agaacaacagggugaaaccccaucucuaauaa

SEQ ID NO: 42651 - RNA, 20 nt, Human
agaacaacaucccucuuccu

SEQ ID NO: 42652 - RNA, 32 nt, Human
agaacaacccagcaauugucucuuaaugcgau

SEQ ID NO: 42653 - RNA, 32 nt, Human
agaacaaccugaccaacauggagaaacccugu

SEQ ID NO: 42654 - RNA, 32 nt, Human
agaacaacuggucugguuuccacuggaguacc

SEQ ID NO: 42655 - RNA, 32 nt, Human
agaacaacuucugccaucuucuggggccugua

SEQ ID NO: 42656 - RNA, 32 nt, Human
agaacaagaguauauaaaguuauucuuugaau

SEQ ID NO: 42657 - RNA, 32 nt, Human
agaacaagcagcacaaacagacgcucagcgag

SEQ ID NO: 42658 - RNA, 32 nt, Human
agaacaagccagacuuggugguuuccaagcaa

SEQ ID NO: 42659 - RNA, 31 nt, Human
agaacaaggcacuucaguccuauucaacaua

SEQ ID NO: 42660 - RNA, 32 nt, Human
agaacaaggccuguuucuuuucugccauccaa

SEQ ID NO: 42661 - RNA, 32 nt, Human
agaacaaggggaggaggaagcuauggauacag

SEQ ID NO: 42662 - RNA, 32 nt, Human
agaacaaguucagaguccuuuacgagaaggag

SEQ ID NO: 42663 - RNA, 20 nt, Human
agaacaauaaauaugugcca

SEQ ID NO: 42664 - RNA, 32 nt, Human
agaacaauacuccauucccuccccucuacccc

SEQ ID NO: 42665 - RNA, 32 nt, Human
agaacaauauagucugggaaucccagaauguc

SEQ ID NO: 42666 - RNA, 32 nt, Human
agaacaaucccuccccuugcacuugugaaaac

SEQ ID NO: 42667 - RNA, 20 nt, Human
agaacaaugcaaggaaguca

SEQ ID NO: 42668 - RNA, 23 nt, Human
agaacaaugccagggcccaggag

SEQ ID NO: 42669 - RNA, 32 nt, Human
agaacaaugucagaaacucgaugaauguguug

SEQ ID NO: 42670 - RNA, 32 nt, Human
agaacacaauuuggggaacagaagggcuuuug

SEQ ID NO: 42671 - RNA, 32 nt, Human
agaacacacaaaccaugcucuacuccaccccc

SEQ ID NO: 42672 - RNA, 32 nt, Human
agaacacacacguuuucccuacagcagaggcc

SEQ ID NO: 42673 - RNA, 21 nt, Human
agaacacagagaaaucagaga

SEQ ID NO: 42674 - RNA, 32 nt, Human
agaacacagcuggaggcaucacauuaccugac

SEQ ID NO: 42675 - RNA, 32 nt, Human
agaacacaucuaggcucuuuuccccaggagag

SEQ ID NO: 42676 - RNA, 32 nt, Human
agaacaccaaauaucaccagacugccuaagag

SEQ ID NO: 42677 - RNA, 32 nt, Human
agaacacccacugccuagaggccaucuuaaag

SEQ ID NO: 42678 - RNA, 32 nt, Human
agaacacccacuggccaguccuagagcuccug

SEQ ID NO: 42679 - RNA, 32 nt, Human
agaacacccuggccuccuccaucaugucggcc

SEQ ID NO: 42680 - RNA, 32 nt, Human
agaacaccgcgcagcgugacugugaguugcuc

SEQ ID NO: 42681 - RNA, 19 nt, Human
agaacaccggacccagggg

SEQ ID NO: 42682 - RNA, 32 nt, Human
agaacaccuccauggauucagggaagggcuga

SEQ ID NO: 42683 - RNA, 32 nt, Human
agaacacgcuagaaugggauucccucuggacu

SEQ ID NO: 42684 - RNA, 32 nt, Human
agaacacggguuuucauggcugccuuugguuu

SEQ ID NO: 42685 - RNA, 32 nt, Human
agaacacuagcuaaggaagggaaagggaagug

SEQ ID NO: 42686 - RNA, 32 nt, Human
agaacacugcacuccaauuuccucgggcagcc

SEQ ID NO: 42687 - RNA, 32 nt, Human
agaacacugcucugucugccucccuggaccca

SEQ ID NO: 42688 - RNA, 19 nt, Human
agaacacuggacccagggg

SEQ ID NO: 42689 - RNA, 32 nt, Human
agaacacuguuuuaauguauuuccuugaucug

SEQ ID NO: 42690 - RNA, 20 nt, Human
agaacacuuacuguuccuga

SEQ ID NO: 42691 - RNA, 32 nt, Human
agaacacuucucugugcucagugggagccagg

SEQ ID NO: 42692 - RNA, 32 nt, Human
agaacacuugacugacucuugggccaccucug

SEQ ID NO: 42693 - RNA, 32 nt, Human
agaacacuugcuggucuugaaaaugaagccau

SEQ ID NO: 42694 - RNA, 32 nt, Human
agaacacuuucugggcuaacauaguccucaca

SEQ ID NO: 42695 - RNA, 19 nt, Human
agaacagaacaugugccaa

SEQ ID NO: 42696 - RNA, 32 nt, Human
agaacagaacccucuccagccugcugacccga

SEQ ID NO: 42697 - RNA, 19 nt, Human
agaacagaagaaggaucug

SEQ ID NO: 42698 - RNA, 32 nt, Human
agaacagaaggugggcagggcgggggaggcag

SEQ ID NO: 42699 - RNA, 32 nt, Human
agaacagaccaccaccauccauagccuggaug

SEQ ID NO: 42700 - RNA, 18 nt, Human
agaacagacuggaaacug

SEQ ID NO: 42701 - RNA, 32 nt, Human
agaacagagaggaggaggagggagaaauggcc

SEQ ID NO: 42702 - RNA, 32 nt, Human
agaacagagcaggacccaggaugcaagacccu

SEQ ID NO: 42703 - RNA, 32 nt, Human
agaacagaggugcacaccaccauaucuggcuu

SEQ ID NO: 42704 - RNA, 32 nt, Human
agaacagauaccaucauccugccuuuguuagc

SEQ ID NO: 42705 - RNA, 32 nt, Human
agaacagaucaaagcccaagagagcugcuggc

SEQ ID NO: 42706 - RNA, 32 nt, Human
agaacagcaagcucucugucccugcaccccca

SEQ ID NO: 42707 - RNA, 32 nt, Human
agaacagcaauauauucuuucuugcagaccga

SEQ ID NO: 42708 - RNA, 32 nt, Human
agaacagcaccucagagcucuuaaaugcuuau

SEQ ID NO: 42709 - RNA, 32 nt, Human
agaacagcagagaauuuugaucucuugagcag

SEQ ID NO: 42710 - RNA, 32 nt, Human
agaacagcagagccuccugcacccucagcaag

SEQ ID NO: 42711 - RNA, 32 nt, Human
agaacagcagcucuuuaaguguuugcauuuuc

SEQ ID NO: 42712 - RNA, 32 nt, Human
agaacagcagugguggcaacuaugccuugccu

SEQ ID NO: 42713 - RNA, 32 nt, Human
agaacagccaggccuggugagucacuccuggg

SEQ ID NO: 42714 - RNA, 32 nt, Human
agaacagccugaccaacauggugaaacuccau

SEQ ID NO: 42715 - RNA, 32 nt, Human
agaacagcugccuggucuucucucccagucug

SEQ ID NO: 42716 - RNA, 32 nt, Human
agaacagcuggaucuugcucagucucugccag

SEQ ID NO: 42717 - RNA, 32 nt, Human
agaacagcugucuggucuaaccucucacuggu

SEQ ID NO: 42718 - RNA, 32 nt, Human
agaacagcuguuccaagaaaagaaggauccug

SEQ ID NO: 42719 - RNA, 17 nt, Human
agaacagcuuguucuca

SEQ ID NO: 42720 - RNA, 22 nt, Human
agaacaggaccuaggcccugug

SEQ ID NO: 42721 - RNA, 32 nt, Human
agaacaggaccuaggcccugugcaauggcuca

SEQ ID NO: 42722 - RNA, 32 nt, Human
agaacaggacuccagcaaagcacuuuucagcc

SEQ ID NO: 42723 - RNA, 32 nt, Human
agaacaggagauggagaaagcaaguggaagac

SEQ ID NO: 42724 - RNA, 32 nt, Human
agaacaggagucugaaagagcucauguucucc

SEQ ID NO: 42725 - RNA, 32 nt, Human
agaacaggauguggcaucccccaaagcccauc

SEQ ID NO: 42726 - RNA, 30 nt, Human
agaacaggcagagacagggcacagucucua

SEQ ID NO: 42727 - RNA, 18 nt, Human
agaacaggccucauucca

SEQ ID NO: 42728 - RNA, 30 nt, Human
agaacaggccucuccauuugcucuucagau

SEQ ID NO: 42729 - RNA, 32 nt, Human
agaacagggcaggcacgggcagcuccuguucu

SEQ ID NO: 42730 - RNA, 32 nt, Human
agaacaggggcuuccccaaguugcccagaaag

SEQ ID NO: 42731 - RNA, 32 nt, Human
agaacagguaauuuacuccugccugcagaaua

SEQ ID NO: 42732 - RNA, 32 nt, Human
agaacaguaagggagcagagugguuaaggacu

SEQ ID NO: 42733 - RNA, 32 nt, Human
agaacaguaauuggcccagacagguaggugug

SEQ ID NO: 42734 - RNA, 32 nt, Human
agaacagugagguucugauagccccggacacu

SEQ ID NO: 42735 - RNA, 32 nt, Human
agaacagugaucucucagcucuccagcuguaa

SEQ ID NO: 42736 - RNA, 32 nt, Human
agaacagugccauuaagacaacuacagcccuc

SEQ ID NO: 42737 - RNA, 32 nt, Human
agaacaguggcacaccaccagugaggcacaug

SEQ ID NO: 42738 - RNA, 18 nt, Human
agaacaguuccaagcaca

SEQ ID NO: 42739 - RNA, 32 nt, Human
agaacaguucuauccuggugccuuacgaauaa

SEQ ID NO: 42740 - RNA, 32 nt, Human
agaacaguuggaucuugcucagucucugucag

SEQ ID NO: 42741 - RNA, 32 nt, Human
agaacaguuguccaggaugcuggcugguggaa

SEQ ID NO: 42742 - RNA, 32 nt, Human
agaacauagcaaaaauauaaccgaaaguuggc

SEQ ID NO: 42743 - RNA, 32 nt, Human
agaacauauuuuaagagacagaacuuagacau

SEQ ID NO: 42744 - RNA, 22 nt, Human
agaacaucagccucaucuuccu

SEQ ID NO: 42745 - RNA, 32 nt, Human
agaacauccauuauaaaaggugcaaugguguc

SEQ ID NO: 42746 - RNA, 32 nt, Human
agaacaucccacccucaacucauuccaaccac

SEQ ID NO: 42747 - RNA, 32 nt, Human
agaacauccccuugacaguugcagccucuuga

SEQ ID NO: 42748 - RNA, 32 nt, Human
agaacauccguccguccaucugcaucucuguc

SEQ ID NO: 42749 - RNA, 32 nt, Human
agaacauccuguuugugaauucugaguuugaa

SEQ ID NO: 42750 - RNA, 32 nt, Human
agaacauccuuaaaugucuaacaacaagggcu

SEQ ID NO: 42751 - RNA, 32 nt, Human
agaacaucuggaccaggcaggcucggccaacc

SEQ ID NO: 42752 - RNA, 32 nt, Human
agaacaugaugggccugaacucggacaaguga

SEQ ID NO: 42753 - RNA, 32 nt, Human
agaacaugcauauaaaggaaacauaucuguaa

SEQ ID NO: 42754 - RNA, 32 nt, Human
agaacauggaaagaaaauuuaacagguuaauu

SEQ ID NO: 42755 - RNA, 32 nt, Human
agaacauggacucauguggaugugguuuggcu

SEQ ID NO: 42756 - RNA, 32 nt, Human
agaacauggggaggggacuagaugggcaaggg

SEQ ID NO: 42757 - RNA, 32 nt, Human
agaacauggugacagacagacaugcuucgaag

SEQ ID NO: 42758 - RNA, 32 nt, Human
agaacauguuuuaaaaagauacacucuaucac

SEQ ID NO: 42759 - RNA, 32 nt, Human
agaacauuaacaaaagcaauuguauuacuucc

SEQ ID NO: 42760 - RNA, 17 nt, Human
agaacauuccaaguaca

SEQ ID NO: 42761 - RNA, 32 nt, Human
agaacauuccagaacccguuguggaaaaaccc

SEQ ID NO: 42762 - RNA, 32 nt, Human
agaacauucccccagauguuccaacugugacu

SEQ ID NO: 42763 - RNA, 32 nt, Human
agaacauuccuccuggcuuaguuguagcagac

SEQ ID NO: 42764 - RNA, 32 nt, Human
agaacauugcauaggaaugucuggaaaaagcc

SEQ ID NO: 42765 - RNA, 32 nt, Human
agaacauugccucugggugucauguggaccag

SEQ ID NO: 42766 - RNA, 32 nt, Human
agaacauugugguaggggaagggacucacuuu

SEQ ID NO: 42767 - RNA, 32 nt, Human
agaacauuuacaauuuugucuccuucaauaac

SEQ ID NO: 42768 - RNA, 32 nt, Human
agaacauuugacuucccugcaaaccuugguau

SEQ ID NO: 42769 - RNA, 32 nt, Human
agaacauuuuagccauugauguucacacgugg

SEQ ID NO: 42770 - RNA, 32 nt, Human
agaacauuuucagauuccccuccuuacauccu

SEQ ID NO: 42771 - RNA, 32 nt, Human
agaacauuuuuaaaaugucuuuuucuauguca

SEQ ID NO: 42772 - RNA, 32 nt, Human
agaaccaaacucaaagaauucugcagguucag

SEQ ID NO: 42773 - RNA, 32 nt, Human
agaaccaaaguggcauccuaagaguuguuaaa

SEQ ID NO: 42774 - RNA, 21 nt, Human
agaaccaaccaaacucaggag

SEQ ID NO: 42775 - RNA, 32 nt, Human
agaaccaaggaagugccuucauucugcuuugu

SEQ ID NO: 42776 - RNA, 32 nt, Human
agaaccaaugauuucuaagucuucuccuggau

SEQ ID NO: 42777 - RNA, 32 nt, Human
agaaccaaugucguaguucaucagccuccgaa

SEQ ID NO: 42778 - RNA, 32 nt, Human
agaaccacagcagcucuauuugccuauuccuc

SEQ ID NO: 42779 - RNA, 21 nt, Human
agaaccacaggagauccagga

SEQ ID NO: 42780 - RNA, 32 nt, Human
agaaccacaggcccuggccugccuugggccgg

SEQ ID NO: 42781 - RNA, 20 nt, Human
agaaccacagggcccaggag

SEQ ID NO: 42782 - RNA, 32 nt, Human
agaaccacaguugaaaccugcuuuuaucauuu

SEQ ID NO: 42783 - RNA, 32 nt, Human
agaaccacccagcccagaaguuccagggaagg

SEQ ID NO: 42784 - RNA, 20 nt, Human
agaaccacccagcgucuccc

SEQ ID NO: 42785 - RNA, 19 nt, Human
agaaccacuccuccaggag

SEQ ID NO: 42786 - RNA, 18 nt, Human
agaaccacugagaacccc

SEQ ID NO: 42787 - RNA, 32 nt, Human
agaaccacugauuuaaagugugacaguuccag

SEQ ID NO: 42788 - RNA, 17 nt, Human
agaaccacuguccuccu

SEQ ID NO: 42789 - RNA, 32 nt, Human
agaaccacuugcaggaagaacucuagagaauu

SEQ ID NO: 42790 - RNA, 32 nt, Human
agaaccacuuggcugcucauuccuucuggagg

SEQ ID NO: 42791 - RNA, 21 nt, Human
agaaccagaacccaccaggag

SEQ ID NO: 42792 - RNA, 32 nt, Human
agaaccagaagugcagccccucucacaggcag

SEQ ID NO: 42793 - RNA, 32 nt, Human
agaaccagagcaucucgaggcaacuguuagaa

SEQ ID NO: 42794 - RNA, 32 nt, Human
agaaccagagguccaaagaggcccagacccag

SEQ ID NO: 42795 - RNA, 22 nt, Human
agaaccagaggugcugccuucc

SEQ ID NO: 42796 - RNA, 28 nt, Human
agaaccagaggugcugccuucccugucu

SEQ ID NO: 42797 - RNA, 32 nt, Human
agaaccagaguccucagccucacccugaagug

SEQ ID NO: 42798 - RNA, 32 nt, Human
agaaccagccaguucgcuuuuucuccuaaggu

SEQ ID NO: 42799 - RNA, 32 nt, Human
agaaccagccuggacaacauagugagaccccg

SEQ ID NO: 42800 - RNA, 18 nt, Human
agaaccagcgcaagcaca

SEQ ID NO: 42801 - RNA, 21 nt, Human
agaaccagcuacgcccaugag

SEQ ID NO: 42802 - RNA, 18 nt, Human
agaaccagcucaaguaca

SEQ ID NO: 42803 - RNA, 32 nt, Human
agaaccagcugaaccaugaaacaaacaaaaau

SEQ ID NO: 42804 - RNA, 32 nt, Human
agaaccaggagagaugauggugugauuacagc

SEQ ID NO: 42805 - RNA, 32 nt, Human
agaaccaggagggagagugcagccaggcucag

SEQ ID NO: 42806 - RNA, 32 nt, Human
agaaccaggagguaagagucucuggagacagu

SEQ ID NO: 42807 - RNA, 32 nt, Human
agaaccaggauccugagaugagcuugagcuuu

SEQ ID NO: 42808 - RNA, 18 nt, Human
agaaccaggcuacaagag

SEQ ID NO: 42809 - RNA, 19 nt, Human
agaaccaggcuggcaggag

SEQ ID NO: 42810 - RNA, 32 nt, Human
agaaccagggcagcuucugccccuagagggcc

SEQ ID NO: 42811 - RNA, 32 nt, Human
agaaccaggucugcuccccaccuuacucggau

SEQ ID NO: 42812 - RNA, 32 nt, Human
agaaccaguccuuccuuuugacccaccccagg

SEQ ID NO: 42813 - RNA, 32 nt, Human
agaaccagugacaccaucacugagcuuccuaa

SEQ ID NO: 42814 - RNA, 20 nt, Human
agaaccagugagaucuggag

SEQ ID NO: 42815 - RNA, 19 nt, Human
agaaccagugcaccucagg

SEQ ID NO: 42816 - RNA, 32 nt, Human
agaaccagugcccggccccacacugccucugu

SEQ ID NO: 42817 - RNA, 19 nt, Human
agaaccagugccuaaagag

SEQ ID NO: 42818 - RNA, 19 nt, Human
agaaccaguggcugagcgg

SEQ ID NO: 42819 - RNA, 20 nt, Human
agaaccagugggcgaggggg

SEQ ID NO: 42820 - RNA, 19 nt, Human
agaaccaguuaccccggga

SEQ ID NO: 42821 - RNA, 32 nt, Human
agaaccaguucuggagcucaggccuuccugag

SEQ ID NO: 42822 - RNA, 32 nt, Human
agaaccauaaaacgcuaugcagaaggaacauu

SEQ ID NO: 42823 - RNA, 32 nt, Human
agaaccauaguuguuuuguucacuacuguaua

SEQ ID NO: 42824 - RNA, 17 nt, Human
agaaccauauccaagca

SEQ ID NO: 42825 - RNA, 32 nt, Human
agaaccaucaacacaagugacaugucauagca

SEQ ID NO: 42826 - RNA, 32 nt, Human
agaaccaugaggaggaaaugaacgcccuuuga

SEQ ID NO: 42827 - RNA, 18 nt, Human
agaaccaugcugucuucc

SEQ ID NO: 42828 - RNA, 32 nt, Human
agaaccauggucgccacuguuuucccucugua

SEQ ID NO: 42829 - RNA, 32 nt, Human
agaaccauuugcaauauggauuucuuagagau

SEQ ID NO: 42830 - RNA, 31 nt, Human
agaaccauuuuuacuuuacauccuaaaacug

SEQ ID NO: 42831 - RNA, 32 nt, Human
agaacccaaaaaucaggaauaggugauagacc

SEQ ID NO: 42832 - RNA, 19 nt, Human
agaacccaagagccaggag

SEQ ID NO: 42833 - RNA, 21 nt, Human
agaacccaagcccacauccaa

SEQ ID NO: 42834 - RNA, 32 nt, Human
agaacccaagguugagugcaacugggguugca

SEQ ID NO: 42835 - RNA, 32 nt, Human
agaacccaagucuccugacuccuggccuucua

SEQ ID NO: 42836 - RNA, 32 nt, Human
agaacccacagucaguuccugccuccugcaga

SEQ ID NO: 42837 - RNA, 19 nt, Human
agaacccaccagucuuucu

SEQ ID NO: 42838 - RNA, 32 nt, Human
agaacccaccucucccccaagggccucagccu

SEQ ID NO: 42839 - RNA, 32 nt, Human
agaacccaccuguagcccugagguucuuuucc

SEQ ID NO: 42840 - RNA, 23 nt, Human
agaacccaccuugcagcuuuucu

SEQ ID NO: 42841 - RNA, 21 nt, Human
agaacccagaaauaaagccaa

SEQ ID NO: 42842 - RNA, 20 nt, Human
agaacccagcaacccaggag

SEQ ID NO: 42843 - RNA, 32 nt, Human
agaacccagcagcgauguggagguggagaccc

SEQ ID NO: 42844 - RNA, 32 nt, Human
agaacccagcagugcccugcccugcagucuga

SEQ ID NO: 42845 - RNA, 32 nt, Human
agaacccagccucugcucacacccgccccagc

SEQ ID NO: 42846 - RNA, 32 nt, Human
agaacccaggagacggagguugcagugagccg

SEQ ID NO: 42847 - RNA, 32 nt, Human
agaacccaggaggcagagcuugcagugagccg

SEQ ID NO: 42848 - RNA, 32 nt, Human
agaacccaggagguggagacugcagugagcca

SEQ ID NO: 42849 - RNA, 20 nt, Human
agaacccagggauccaggag

SEQ ID NO: 42850 - RNA, 22 nt, Human
agaacccaggggcacgcucugg

SEQ ID NO: 42851 - RNA, 32 nt, Human
agaacccagggugguggcgaggugggagcugg

SEQ ID NO: 42852 - RNA, 24 nt, Human
agaacccagguaagcucggucuca

SEQ ID NO: 42853 - RNA, 20 nt, Human
agaacccaggucgucuuucu

SEQ ID NO: 42854 - RNA, 32 nt, Human
agaacccaugugcugauucccuguaaucuucc

SEQ ID NO: 42855 - RNA, 32 nt, Human
agaaccccaaaccacuaaaaacuaccuaaaca

SEQ ID NO: 42856 - RNA, 32 nt, Human
agaaccccagagggugagacaucagugcugag

SEQ ID NO: 42857 - RNA, 21 nt, Human
agaaccccagcggugcugguc

SEQ ID NO: 42858 - RNA, 32 nt, Human
agaaccccaugggggugugggggugaaguugg

SEQ ID NO: 42859 - RNA, 32 nt, Human
agaacccccaggagcgcccaggcuugggcagc

SEQ ID NO: 42860 - RNA, 32 nt, Human
agaacccccuagugaggagcugaacuugcuca

SEQ ID NO: 42861 - RNA, 32 nt, Human
agaaccccuccagggccggccugcggaggagc

SEQ ID NO: 42862 - RNA, 32 nt, Human
agaaccccugccaagaccuuugcucacugccu

SEQ ID NO: 42863 - RNA, 22 nt, Human
agaaccccugccagaaggcugg

SEQ ID NO: 42864 - RNA, 32 nt, Human
agaaccccugcucccccuguccccaccccagg

SEQ ID NO: 42865 - RNA, 32 nt, Human
agaaccccugggcugggccugcagugacccac

SEQ ID NO: 42866 - RNA, 21 nt, Human
agaaccccuugaacccgggag

SEQ ID NO: 42867 - RNA, 32 nt, Human
agaacccgcagacgaggccgagcugcugccgu

SEQ ID NO: 42868 - RNA, 20 nt, Human
agaacccgccaaugcugggg

SEQ ID NO: 42869 - RNA, 19 nt, Human
agaacccgcugggacuggc

SEQ ID NO: 42870 - RNA, 32 nt, Human
agaacccgggaggcggagcuugcagugagccg

SEQ ID NO: 42871 - RNA, 32 nt, Human
agaacccgggaggcggagguugcagugagccg

SEQ ID NO: 42872 - RNA, 32 nt, Human
agaacccgggagguggagcuugcggugagcug

SEQ ID NO: 42873 - RNA, 32 nt, Human
agaacccggucuccagugucacaaacaggccu

SEQ ID NO: 42874 - RNA, 32 nt, Human
agaacccuccaccccuacccccaacccucaga

SEQ ID NO: 42875 - RNA, 20 nt, Human
agaacccuccugaauuuucc

SEQ ID NO: 42876 - RNA, 32 nt, Human
agaacccuccugcuguuacggaggcagcacaa

SEQ ID NO: 42877 - RNA, 17 nt, Human
agaacccucuguuuucc

SEQ ID NO: 42878 - RNA, 32 nt, Human
agaacccugggaacgggaggcgaagggauaau

SEQ ID NO: 42879 - RNA, 19 nt, Human
agaacccugggagccagga

SEQ ID NO: 42880 - RNA, 18 nt, Human
agaacccuggggacccag

SEQ ID NO: 42881 - RNA, 32 nt, Human
agaacccuggggacccuaauguuggacucucg

SEQ ID NO: 42882 - RNA, 21 nt, Human
agaaccgcugccccacccccu

SEQ ID NO: 42883 - RNA, 21 nt, Human
agaaccgcuggaacccgggag

SEQ ID NO: 42884 - RNA, 21 nt, Human
agaaccgcuugaacccgggag

SEQ ID NO: 42885 - RNA, 21 nt, Human
agaaccgcuuguacccaggag

SEQ ID NO: 42886 - RNA, 20 nt, Human
agaaccggaaacacccagga

SEQ ID NO: 42887 - RNA, 32 nt, Human
agaaccggaaggcauccaguggggaagggaaa

SEQ ID NO: 42888 - RNA, 32 nt, Human
agaaccgggaggcggaaguugcagugagccaa

SEQ ID NO: 42889 - RNA, 32 nt, Human
agaaccgggaugcaaggagcugccugugacac

SEQ ID NO: 42890 - RNA, 32 nt, Human
agaaccgugaacugaagggacagggaacagcc

SEQ ID NO: 42891 - RNA, 32 nt, Human
agaaccuacaucuuucaugcuuucauugucuc

SEQ ID NO: 42892 - RNA, 32 nt, Human
agaaccuacuuaagauagaacaugguuuuggc

SEQ ID NO: 42893 - RNA, 32 nt, Human
agaaccuagaagccaaaagccacacagaaggg

SEQ ID NO: 42894 - RNA, 32 nt, Human
agaaccuaggagggaaaggaagauugagcaac

SEQ ID NO: 42895 - RNA, 32 nt, Human
agaaccuaucgaugacuuacugugcauggucu

SEQ ID NO: 42896 - RNA, 32 nt, Human
agaaccucaaacaggauggaacaucaguggau

SEQ ID NO: 42897 - RNA, 18 nt, Human
agaaccucaagagccuga

SEQ ID NO: 42898 - RNA, 32 nt, Human
agaaccucacguccuucugccugggcaagagc

SEQ ID NO: 42899 - RNA, 32 nt, Human
agaaccucagccagaaaggcaaggaggaaauc

SEQ ID NO: 42900 - RNA, 32 nt, Human
agaaccucagcccuaucuccauuucccuaucu

SEQ ID NO: 42901 - RNA, 32 nt, Human
agaaccucaggcuccaccucagaccuacuaug

SEQ ID NO: 42902 - RNA, 32 nt, Human
agaaccucccuaguugcugcuauaucaaacac

SEQ ID NO: 42903 - RNA, 32 nt, Human
agaaccucccuugaaugucugucacacucaca

SEQ ID NO: 42904 - RNA, 32 nt, Human
agaaccuccucuccucccuuguccaggugugu

SEQ ID NO: 42905 - RNA, 32 nt, Human
agaaccuccucucugcugaaagcugaacacuc

SEQ ID NO: 42906 - RNA, 19 nt, Human
agaaccuccucuguccucc

SEQ ID NO: 42907 - RNA, 32 nt, Human
agaaccucuccucuggaagcagcucugagggg

SEQ ID NO: 42908 - RNA, 19 nt, Human
agaaccucugcaucuggca

SEQ ID NO: 42909 - RNA, 32 nt, Human
agaaccucugccuccgagacaggcuggcccac

SEQ ID NO: 42910 - RNA, 32 nt, Human
agaaccucuugggagacagaagaggcaucugu

SEQ ID NO: 42911 - RNA, 21 nt, Human
agaaccugacaacuccaggag

SEQ ID NO: 42912 - RNA, 32 nt, Human
agaaccugauccugaagaguggcacaacugug

SEQ ID NO: 42913 - RNA, 32 nt, Human
agaaccugcccacagcucuccccgcuacaggc

SEQ ID NO: 42914 - RNA, 32 nt, Human
agaaccuggaccugacagccaaccuccuccac

SEQ ID NO: 42915 - RNA, 32 nt, Human
agaaccuggagcuuccugaagaagcaaagccu

SEQ ID NO: 42916 - RNA, 32 nt, Human
agaaccugggaaggaaaaccaguagcaucagc

SEQ ID NO: 42917 - RNA, 32 nt, Human
agaaccugggaggcggagcuugcagugagcca

SEQ ID NO: 42918 - RNA, 32 nt, Human
agaaccugggaggcggagguugcagucagcca

SEQ ID NO: 42919 - RNA, 32 nt, Human
agaaccugucaugggcuggggcucagauuuuc

SEQ ID NO: 42920 - RNA, 18 nt, Human
agaaccuguccaggcaca

SEQ ID NO: 42921 - RNA, 20 nt, Human
agaaccuuaaggaguccuug

SEQ ID NO: 42922 - RNA, 19 nt, Human
agaaccuucaaguccuucc

SEQ ID NO: 42923 - RNA, 32 nt, Human
agaaccuucuccccaccucugaguuauucucu

SEQ ID NO: 42924 - RNA, 32 nt, Human
agaaccuucuuugguuccauguugacugacuu

SEQ ID NO: 42925 - RNA, 32 nt, Human
agaaccuugcugggguuggagguuucacuugc

SEQ ID NO: 42926 - RNA, 32 nt, Human
agaaccuuggaguucauauuucacaaauauua

SEQ ID NO: 42927 - RNA, 32 nt, Human
agaaccuuguguccaaggagguccuucaggag

SEQ ID NO: 42928 - RNA, 32 nt, Human
agaacgacuuuccagguuugaagauuaugaaa

SEQ ID NO: 42929 - RNA, 32 nt, Human
agaacgagaagccagcuccuggaguuguuugc

SEQ ID NO: 42930 - RNA, 32 nt, Human
agaacgagagcaaagcaugugggugaagagaa

SEQ ID NO: 42931 - RNA, 32 nt, Human
agaacgagcugaugcucaacuccagccucaug

SEQ ID NO: 42932 - RNA, 32 nt, Human
agaacgaggaagaagaaacccuaggcagacac

SEQ ID NO: 42933 - RNA, 32 nt, Human
agaacgaggaggaaggagagaaaauggcaucc

SEQ ID NO: 42934 - RNA, 32 nt, Human
agaacgaggaggaaggagagaaaauggcgucc

SEQ ID NO: 42935 - RNA, 20 nt, Human
agaacgaugucaagugaaga

SEQ ID NO: 42936 - RNA, 32 nt, Human
agaacgauucugagugauuggcaccaagccuu

SEQ ID NO: 42937 - RNA, 32 nt, Human
agaacgcccgcuccagcgaucucuccacugug

SEQ ID NO: 42938 - RNA, 32 nt, Human
agaacgccgccuccuccgcuugcggccggucu

SEQ ID NO: 42939 - RNA, 32 nt, Human
agaacgccucagggucuugccugcugugagug

SEQ ID NO: 42940 - RNA, 32 nt, Human
agaacgcguccagcaaccgcgacccacgacga

SEQ ID NO: 42941 - RNA, 32 nt, Human
agaacggaagaagagaucaggaagagaaggag

SEQ ID NO: 42942 - RNA, 32 nt, Human
agaacggagagggaugcaggccagccagggau

SEQ ID NO: 42943 - RNA, 32 nt, Human
agaacggagggccuauggaggcccaugagggg

SEQ ID NO: 42944 - RNA, 32 nt, Human
agaacggauauaaucagucuggccucuacaac

SEQ ID NO: 42945 - RNA, 32 nt, Human
agaacggccacuggugugggaggggagcgcac

SEQ ID NO: 42946 - RNA, 21 nt, Human
agaacggcgugaacccgggag

SEQ ID NO: 42947 - RNA, 32 nt, Human
agaacgggagaggcaguuccuaccuugggaau

SEQ ID NO: 42948 - RNA, 32 nt, Human
agaacgggcccagggugcuguggagaucaacu

SEQ ID NO: 42949 - RNA, 32 nt, Human
agaacgggcuugauccuagccaugcgggagag

SEQ ID NO: 42950 - RNA, 32 nt, Human
agaacggggaagauaaccgaagggugguuuga

SEQ ID NO: 42951 - RNA, 32 nt, Human
agaacggggcccuguccaucacgcuggccaca

SEQ ID NO: 42952 - RNA, 32 nt, Human
agaacgggggcccuacccucuguuucuccuag

SEQ ID NO: 42953 - RNA, 32 nt, Human
agaacggugggaacugaggcggcacugcaggc

SEQ ID NO: 42954 - RNA, 32 nt, Human
agaacguaaaacugaggacagaggaggaaagc

SEQ ID NO: 42955 - RNA, 32 nt, Human
agaacguaccauugaagucgcaugcuauguuu

SEQ ID NO: 42956 - RNA, 32 nt, Human
agaacgucuaucuauccauaccaauaaucugg

SEQ ID NO: 42957 - RNA, 32 nt, Human
agaacgugcccagccacaucaucuuuaucucc

SEQ ID NO: 42958 - RNA, 32 nt, Human
agaacguggagugcgggggagcuguggauggu

SEQ ID NO: 42959 - RNA, 32 nt, Human
agaacgugucagagacaguggacagggaagcg

SEQ ID NO: 42960 - RNA, 25 nt, Human
agaacguuuuccuggacugcccugg

SEQ ID NO: 42961 - RNA, 19 nt, Human
agaacuaaaacuaagcaua

SEQ ID NO: 42962 - RNA, 32 nt, Human
agaacuaaaaggcucuguggcuuacauuucaa

SEQ ID NO: 42963 - RNA, 17 nt, Human
agaacuaaacuaagaca

SEQ ID NO: 42964 - RNA, 18 nt, Human
agaacuaaacuuagcaua

SEQ ID NO: 42965 - RNA, 32 nt, Human
agaacuaaaugcuguaccacagagccgggugu

SEQ ID NO: 42966 - RNA, 16 nt, Human
agaacuaacaccugca

SEQ ID NO: 42967 - RNA, 32 nt, Human
agaacuaacuauucaacacacaccuagaggag

SEQ ID NO: 42968 - RNA, 32 nt, Human
agaacuaagaagaaggaggaagaaagaaggag

SEQ ID NO: 42969 - RNA, 32 nt, Human
agaacuaagacaucugugcuaaggcaucuauu

SEQ ID NO: 42970 - RNA, 18 nt, Human
agaacuaagaccaaaaca

SEQ ID NO: 42971 - RNA, 32 nt, Human
agaacuaaggcugaaaccucggaggaacaacc

SEQ ID NO: 42972 - RNA, 32 nt, Human
agaacuaagggaggucugugcauuuuaaacac

SEQ ID NO: 42973 - RNA, 19 nt, Human
agaacuaauacgccaagca

SEQ ID NO: 42974 - RNA, 18 nt, Human
agaacuaaucauucagca

SEQ ID NO: 42975 - RNA, 32 nt, Human
agaacuacaagugacauaacagaagaaaaaua

SEQ ID NO: 42976 - RNA, 20 nt, Human
agaacuaccagacgagcaca

SEQ ID NO: 42977 - RNA, 20 nt, Human
agaacuacuaccuccaggag

SEQ ID NO: 42978 - RNA, 32 nt, Human
agaacuacucauccagcaucuccuggguugag

SEQ ID NO: 42979 - RNA, 32 nt, Human
agaacuacuucacaguaguugcagugaggauu

SEQ ID NO: 42980 - RNA, 32 nt, Human
agaacuagagaagcaagagcaaacacauucaa

SEQ ID NO: 42981 - RNA, 32 nt, Human
agaacuagagaagcaagagcaaacacauugaa

SEQ ID NO: 42982 - RNA, 32 nt, Human
agaacuagaguuccuauuuucagcuaguugaa

SEQ ID NO: 42983 - RNA, 32 nt, Human
agaacuagauaacaugguaacagagaauugau

SEQ ID NO: 42984 - RNA, 32 nt, Human
agaacuagauagagccucccaacccugauuua

SEQ ID NO: 42985 - RNA, 32 nt, Human
agaacuagauaggauuucaccauguugcccag

SEQ ID NO: 42986 - RNA, 32 nt, Human
agaacuagcuggagaaggcaagagugaaggug

SEQ ID NO: 42987 - RNA, 32 nt, Human
agaacuaggguacugaucagcuaauuuccgug

SEQ ID NO: 42988 - RNA, 32 nt, Human
agaacuauaaauuuuguuuaagcaauuuauaa

SEQ ID NO: 42989 - RNA, 32 nt, Human
agaacuaugacuguaagccucaguacuguaca

SEQ ID NO: 42990 - RNA, 23 nt, Human
agaacuauggugugaauaccaca

SEQ ID NO: 42991 - RNA, 32 nt, Human
agaacuauuuuauucuaaacagacucauuaca

SEQ ID NO: 42992 - RNA, 32 nt, Human
agaacucaagcuccaugaggagauguuucaug

SEQ ID NO: 42993 - RNA, 32 nt, Human
agaacucaagggacaggaaggagaugaguugg

SEQ ID NO: 42994 - RNA, 32 nt, Human
agaacucaagugaagggcaaucagggcagacu

SEQ ID NO: 42995 - RNA, 32 nt, Human
agaacucaaugcagaugcauugguuauuaccc

SEQ ID NO: 42996 - RNA, 22 nt, Human
agaacucacaacccccucucug

SEQ ID NO: 42997 - RNA, 32 nt, Human
agaacucaccauugcacuccagccuggaugac

SEQ ID NO: 42998 - RNA, 24 nt, Human
agaacucaccccagugcccucugg

SEQ ID NO: 42999 - RNA, 32 nt, Human
agaacucacuggggccuacagcuuugaucccu

SEQ ID NO: 43000 - RNA, 32 nt, Human
agaacucagaguugugugugcaaugcacaccc

SEQ ID NO: 43001 - RNA, 32 nt, Human
agaacucagcagcugccaccgcagcugccucc

SEQ ID NO: 43002 - RNA, 32 nt, Human
agaacucaggaaaugugucugaagccagagcg

SEQ ID NO: 43003 - RNA, 32 nt, Human
agaacucaggcugccuccagccagccuuugcc

SEQ ID NO: 43004 - RNA, 32 nt, Human
agaacucagucauucugaucugcuuuggccau

SEQ ID NO: 43005 - RNA, 32 nt, Human
agaacucaucacagaaaugaaauacagugguc

SEQ ID NO: 43006 - RNA, 32 nt, Human
agaacucauguaacccuccuguuucuuacauc

SEQ ID NO: 43007 - RNA, 32 nt, Human
agaacucauuagcugugugacucugggugagu

SEQ ID NO: 43008 - RNA, 32 nt, Human
agaacucauuuuacagaacuugguuuccuuug

SEQ ID NO: 43009 - RNA, 23 nt, Human
agaacuccagaauccagagcaaa

SEQ ID NO: 43010 - RNA, 32 nt, Human
agaacuccagcaaauccaauggcuacaaacua

SEQ ID NO: 43011 - RNA, 32 nt, Human
agaacuccaggauauaggaagccagagaaagu

SEQ ID NO: 43012 - RNA, 32 nt, Human
agaacuccaucuugagaugaaauaacaucuac

SEQ ID NO: 43013 - RNA, 32 nt, Human
agaacuccaucuuuguacucuucagaugaaua

SEQ ID NO: 43014 - RNA, 32 nt, Human
agaacuccauuccggccaaccuaggaggucuc

SEQ ID NO: 43015 - RNA, 32 nt, Human
agaacuccauuugacagaugaggaaacggcga

SEQ ID NO: 43016 - RNA, 32 nt, Human
agaacuccccugucuguucucuuugcucuauc

SEQ ID NO: 43017 - RNA, 32 nt, Human
agaacucccuagugaggagcugaacuugcuca

SEQ ID NO: 43018 - RNA, 32 nt, Human
agaacucccuuucaacagaauucacuuguggc

SEQ ID NO: 43019 - RNA, 32 nt, Human
agaacuccgaggcugagacuaggguuuuagcg

SEQ ID NO: 43020 - RNA, 32 nt, Human
agaacuccugcauggcucacacagacuggggg

SEQ ID NO: 43021 - RNA, 32 nt, Human
agaacuccuucauuauaacuaaauuguucaca

SEQ ID NO: 43022 - RNA, 32 nt, Human
agaacucuauuucacugucacuucauccauua

SEQ ID NO: 43023 - RNA, 32 nt, Human
agaacucucacauaagcggccaccucacuuca

SEQ ID NO: 43024 - RNA, 24 nt, Human
agaacucuccaccccagcucccac

SEQ ID NO: 43025 - RNA, 32 nt, Human
agaacucuccacccucaucucucugcguauuu

SEQ ID NO: 43026 - RNA, 32 nt, Human
agaacucucucccuggucucugccagcccaag

SEQ ID NO: 43027 - RNA, 32 nt, Human
agaacucucuggcacuaugggcacuugcacau

SEQ ID NO: 43028 - RNA, 26 nt, Human
agaacucucuugccuucaccaaccca

SEQ ID NO: 43029 - RNA, 32 nt, Human
agaacucugacugcagaacugccgcucucagu

SEQ ID NO: 43030 - RNA, 32 nt, Human
agaacucugagcagugcuugaaugaaguugua

SEQ ID NO: 43031 - RNA, 32 nt, Human
agaacucugauugccagaggcuuuucauuaau

SEQ ID NO: 43032 - RNA, 32 nt, Human
agaacucuggaaggccaaguucaucgcagcau

SEQ ID NO: 43033 - RNA, 32 nt, Human
agaacucuggauccugaacuggaagaaaaugu

SEQ ID NO: 43034 - RNA, 32 nt, Human
agaacucugggcuuggguaaugagcaggaaga

SEQ ID NO: 43035 - RNA, 32 nt, Human
agaacucuguaacccagcugcagcuucagucu

SEQ ID NO: 43036 - RNA, 32 nt, Human
agaacucuguauccaucagagaauauggaacu

SEQ ID NO: 43037 - RNA, 19 nt, Human
agaacucugugcccaggag

SEQ ID NO: 43038 - RNA, 32 nt, Human
agaacucugugccugguuucugaggacuguuu

SEQ ID NO: 43039 - RNA, 32 nt, Human
agaacucuguuacacauauuuuugacccauau

SEQ ID NO: 43040 - RNA, 32 nt, Human
agaacucuuaacgugaacauuuugucagccca

SEQ ID NO: 43041 - RNA, 21 nt, Human
agaacucuucauugucagcaa

SEQ ID NO: 43042 - RNA, 18 nt, Human
agaacucuuccuaaaagc

SEQ ID NO: 43043 - RNA, 32 nt, Human
agaacucuucuuuuucuuucuagagacuccau

SEQ ID NO: 43044 - RNA, 18 nt, Human
agaacucuugcucuuccu

SEQ ID NO: 43045 - RNA, 32 nt, Human
agaacugaaagcacuagagcagccuuggggac

SEQ ID NO: 43046 - RNA, 32 nt, Human
agaacugaaaguguuuucagguaucuuuguag

SEQ ID NO: 43047 - RNA, 32 nt, Human
agaacugaagauuccuggugcuuuuguuaaca

SEQ ID NO: 43048 - RNA, 32 nt, Human
agaacugaauggcagucugccuuuguguugau

SEQ ID NO: 43049 - RNA, 32 nt, Human
agaacugacucaaagcccuguggccuccuuga

SEQ ID NO: 43050 - RNA, 32 nt, Human
agaacugagguuucaauaaacaguuucaguug

SEQ ID NO: 43051 - RNA, 32 nt, Human
agaacugauagagagaacugaacgaaugaaga

SEQ ID NO: 43052 - RNA, 32 nt, Human
agaacugaucuucacauuggaacaaggagaag

SEQ ID NO: 43053 - RNA, 19 nt, Human
agaacugauggccagcaca

SEQ ID NO: 43054 - RNA, 32 nt, Human
agaacugcaaugugcggcccuccuggaggcag

SEQ ID NO: 43055 - RNA, 32 nt, Human
agaacugcacagucuagcugcuucuagucagc

SEQ ID NO: 43056 - RNA, 20 nt, Human
agaacugcacucuucaggaa

SEQ ID NO: 43057 - RNA, 32 nt, Human
agaacugcagccccuggaaaagaagagacagc

SEQ ID NO: 43058 - RNA, 32 nt, Human
agaacugccaacguguucaucagugagagggu

SEQ ID NO: 43059 - RNA, 32 nt, Human
agaacugcccagccacggguuuuuaacccacc

SEQ ID NO: 43060 - RNA, 16 nt, Human
agaacugccgcucuca

SEQ ID NO: 43061 - RNA, 21 nt, Human
agaacugccugaacccaggag

SEQ ID NO: 43062 - RNA, 32 nt, Human
agaacugccuuugcacuaaauuagugacuugg

SEQ ID NO: 43063 - RNA, 32 nt, Human
agaacugcucagggacauuaaaggucaaaagu

SEQ ID NO: 43064 - RNA, 23 nt, Human
agaacugcuccccaaaucaguga

SEQ ID NO: 43065 - RNA, 32 nt, Human
agaacugcuccuucaucguaaauuuagaagac

SEQ ID NO: 43066 - RNA, 32 nt, Human
agaacugcugaaagagacaaacucagccaaaa

SEQ ID NO: 43067 - RNA, 32 nt, Human
agaacugcugcgcgggaggccauggccggcaa

SEQ ID NO: 43068 - RNA, 32 nt, Human
agaacugcuggcauauugagcccucucucuuu

SEQ ID NO: 43069 - RNA, 32 nt, Human
agaacugcugggaggcuguggcgcgaggcggg

SEQ ID NO: 43070 - RNA, 21 nt, Human
agaacugcuugaacccaggag

SEQ ID NO: 43071 - RNA, 32 nt, Human
agaacugcuugaaccugggaggcggagguugc

SEQ ID NO: 43072 - RNA, 32 nt, Human
agaacugcuugaaccugggagguggagguugc

SEQ ID NO: 43073 - RNA, 21 nt, Human
agaacugcuugagcccaggag

SEQ ID NO: 43074 - RNA, 32 nt, Human
agaacuggacagacgaccaccauauucacuga

SEQ ID NO: 43075 - RNA, 32 nt, Human
agaacuggacuugaguuugcaaggugggaggc

SEQ ID NO: 43076 - RNA, 32 nt, Human
agaacuggagccaggacuaagugagaaaaacu

SEQ ID NO: 43077 - RNA, 17 nt, Human
agaacuggagcgaagug

SEQ ID NO: 43078 - RNA, 32 nt, Human
agaacuggagguggcagcagugguaccugcau

SEQ ID NO: 43079 - RNA, 18 nt, Human
agaacuggcacacacaca

SEQ ID NO: 43080 - RNA, 32 nt, Human
agaacuggcagguuccugccuccugacguacc

SEQ ID NO: 43081 - RNA, 32 nt, Human
agaacuggcccaaacaccucagcucugguccc

SEQ ID NO: 43082 - RNA, 32 nt, Human
agaacuggccuccagccgguguccucauucca

SEQ ID NO: 43083 - RNA, 21 nt, Human
agaacuggccuccccagccca

SEQ ID NO: 43084 - RNA, 32 nt, Human
agaacuggcucaggccaagaucaccaaagacc

SEQ ID NO: 43085 - RNA, 32 nt, Human
agaacuggcuggagcugcuuauucuuggccuu

SEQ ID NO: 43086 - RNA, 32 nt, Human
agaacugggaaggccacagggguggggcagcc

SEQ ID NO: 43087 - RNA, 32 nt, Human
agaacugggauuacaggcaugaggcaccgugc

SEQ ID NO: 43088 - RNA, 32 nt, Human
agaacugggauugcaggcgugagccaccgcgc

SEQ ID NO: 43089 - RNA, 21 nt, Human
agaacuggggacacucugggc

SEQ ID NO: 43090 - RNA, 22 nt, Human
agaacugggguacagccugggc

SEQ ID NO: 43091 - RNA, 32 nt, Human
agaacugggucuccagcacucacuaagacgga

SEQ ID NO: 43092 - RNA, 30 nt, Human
agaacuggucucuacagggcacaguucagc

SEQ ID NO: 43093 - RNA, 32 nt, Human
agaacuggucuucucacacuuucucugaauca

SEQ ID NO: 43094 - RNA, 32 nt, Human
agaacuggugcagcuucucucucccucccucc

SEQ ID NO: 43095 - RNA, 32 nt, Human
agaacuguagaaagccacacacuacuacaucc

SEQ ID NO: 43096 - RNA, 32 nt, Human
agaacuguaugucagacauccauguuuguaaa

SEQ ID NO: 43097 - RNA, 32 nt, Human
agaacuguauuuuuaagguuguuuuccccuaa

SEQ ID NO: 43098 - RNA, 19 nt, Human
agaacugucgggaccagga

SEQ ID NO: 43099 - RNA, 32 nt, Human
agaacugugaaaacuuuuauuccuucaugauc

SEQ ID NO: 43100 - RNA, 32 nt, Human
agaacugugaaagagagcagucaggaaugcua

SEQ ID NO: 43101 - RNA, 32 nt, Human
agaacugugaaauaauaaauguguauuguugg

SEQ ID NO: 43102 - RNA, 20 nt, Human
agaacugugacccccaaccc

SEQ ID NO: 43103 - RNA, 32 nt, Human
agaacugugguuuugacuuccuuaucucuugg

SEQ ID NO: 43104 - RNA, 32 nt, Human
agaacuguguuuuuaaacuguaggagaauuua

SEQ ID NO: 43105 - RNA, 32 nt, Human
agaacuguugauuuauuacaguucucaaauua

SEQ ID NO: 43106 - RNA, 32 nt, Human
agaacuuaaaaaguaauuuuuggaaaugaggc

SEQ ID NO: 43107 - RNA, 32 nt, Human
agaacuuaaaggcccauaguaacugcgaauga

SEQ ID NO: 43108 - RNA, 32 nt, Human
agaacuuaagaccugauucuagcaauaaacgu

SEQ ID NO: 43109 - RNA, 21 nt, Human
agaacuuaauggaaaacaaga

SEQ ID NO: 43110 - RNA, 25 nt, Human
agaacuuaccaaaaugaaagcaaca

SEQ ID NO: 43111 - RNA, 32 nt, Human
agaacuuaccauugaaaacagagcuuuuaggc

SEQ ID NO: 43112 - RNA, 32 nt, Human
agaacuuacucacccaucccacugacaccaug

SEQ ID NO: 43113 - RNA, 17 nt, Human
agaacuuacuggaagug

SEQ ID NO: 43114 - RNA, 32 nt, Human
agaacuuaucucacuccugugaacuuucaggc

SEQ ID NO: 43115 - RNA, 32 nt, Human
agaacuucagggacccguguccuagagucgga

SEQ ID NO: 43116 - RNA, 32 nt, Human
agaacuucagggacugggagcagaggccccuc

SEQ ID NO: 43117 - RNA, 32 nt, Human
agaacuucccugccuccuccagucucuccauc

SEQ ID NO: 43118 - RNA, 32 nt, Human
agaacuuccguuuaaaccuuccuugccugccg

SEQ ID NO: 43119 - RNA, 32 nt, Human
agaacuugaagccaccaugggagaugaagauu

SEQ ID NO: 43120 - RNA, 32 nt, Human
agaacuugaccacugccacaccagcccugggg

SEQ ID NO: 43121 - RNA, 32 nt, Human
agaacuugaggccagggaccaggccuucaaga

SEQ ID NO: 43122 - RNA, 32 nt, Human
agaacuugcaaaacaacacagcuuuucaguuc

SEQ ID NO: 43123 - RNA, 32 nt, Human
agaacuugcauucuguguucaucaccaggaua

SEQ ID NO: 43124 - RNA, 32 nt, Human
agaacuugccagauagaaaagacuuaaaugga

SEQ ID NO: 43125 - RNA, 19 nt, Human
agaacuuggcaaguuuucu

SEQ ID NO: 43126 - RNA, 19 nt, Human
agaacuuguaccaaguaca

SEQ ID NO: 43127 - RNA, 32 nt, Human
agaacuuguuuccagaccagcauccaguggcc

SEQ ID NO: 43128 - RNA, 32 nt, Human
agaacuuguuuuggaugugauuauauguacga

SEQ ID NO: 43129 - RNA, 32 nt, Human
agaacuuuaaccggagcuucaucuagugauug

SEQ ID NO: 43130 - RNA, 19 nt, Human
agaacuuuagcuccaggga

SEQ ID NO: 43131 - RNA, 32 nt, Human
agaacuuuaguauuaaaucaguucucaauuuc

SEQ ID NO: 43132 - RNA, 32 nt, Human
agaacuuuccucacccgccccugcccagacag

SEQ ID NO: 43133 - RNA, 32 nt, Human
agaacuuuccuuucugccucuucaauccaucu

SEQ ID NO: 43134 - RNA, 32 nt, Human
agaacuuucucuugcuaucauugcuccuuuug

SEQ ID NO: 43135 - RNA, 19 nt, Human
agaacuuugaaccuaggag

SEQ ID NO: 43136 - RNA, 32 nt, Human
agaacuuugagcuaugugaggcacgcagaauu

SEQ ID NO: 43137 - RNA, 32 nt, Human
agaacuuugggaggccgaggugaguggauugc

SEQ ID NO: 43138 - RNA, 32 nt, Human
agaacuuuuccucaucauaggacaccuuaaag

SEQ ID NO: 43139 - RNA, 32 nt, Human
agaacuuuuugcuuccccuccuccaaguuuua

SEQ ID NO: 43140 - RNA, 23 nt, Human
agaacuuuuuugggaaccaggag

SEQ ID NO: 43141 - RNA, 32 nt, Human
agaagaaaaagaggaggaaaaagguagggaga

SEQ ID NO: 43142 - RNA, 32 nt, Human
agaagaaaaagaggaggaaaaaguggauuaca

SEQ ID NO: 43143 - RNA, 32 nt, Human
agaagaaaaagggcuucucucugggcuccaca

SEQ ID NO: 43144 - RNA, 32 nt, Human
agaagaaaacuagaacuuuagagcaggaguaa

SEQ ID NO: 43145 - RNA, 32 nt, Human
agaagaaaaggcaugggucuuuguuugagauc

SEQ ID NO: 43146 - RNA, 32 nt, Human
agaagaaaaguaaaaguacccauuguuucacu

SEQ ID NO: 43147 - RNA, 32 nt, Human
agaagaaaaucagagagggaagaucugguauu

SEQ ID NO: 43148 - RNA, 24 nt, Human
agaagaaacacugaggaaagaaga

SEQ ID NO: 43149 - RNA, 32 nt, Human
agaagaaacauggugaaaacaggcugagguug

SEQ ID NO: 43150 - RNA, 32 nt, Human
agaagaaagcuucaguuuacuguuuccaugcu

SEQ ID NO: 43151 - RNA, 32 nt, Human
agaagaaagcuuccaguuguccccagcugcca

SEQ ID NO: 43152 - RNA, 32 nt, Human
agaagaaaggaaacaaugugauucaagauauu

SEQ ID NO: 43153 - RNA, 32 nt, Human
agaagaaaggagcugaggaggagaagccaaag

SEQ ID NO: 43154 - RNA, 32 nt, Human
agaagaaagggaggggaggggagaaucgagga

SEQ ID NO: 43155 - RNA, 32 nt, Human
agaagaaaguccagaggaggcuggccuggagg

SEQ ID NO: 43156 - RNA, 32 nt, Human
agaagaaaguggaggaagugcuagaagaggag

SEQ ID NO: 43157 - RNA, 32 nt, Human
agaagaaauaccaauaacacacacagaacaaa

SEQ ID NO: 43158 - RNA, 32 nt, Human
agaagaaaugugccuccggaccaacuggucug

SEQ ID NO: 43159 - RNA, 32 nt, Human
agaagaaccagcuccacggcuccugcuucugc

SEQ ID NO: 43160 - RNA, 32 nt, Human
agaagaagaaacuguuucuccaggcgacuuug

SEQ ID NO: 43161 - RNA, 32 nt, Human
agaagaagaagaggaagaaagaacaguagaaa

SEQ ID NO: 43162 - RNA, 32 nt, Human
agaagaagaagaggaggaagagagggaaagag

SEQ ID NO: 43163 - RNA, 32 nt, Human
agaagaagaagaggaggaggaggaggaggaag

SEQ ID NO: 43164 - RNA, 32 nt, Human
agaagaagaccacccccauuguucugcauccu

SEQ ID NO: 43165 - RNA, 32 nt, Human
agaagaagagacacaaaucucuaccucccaug

SEQ ID NO: 43166 - RNA, 32 nt, Human
agaagaagagagcauagccaccuaggggagga

SEQ ID NO: 43167 - RNA, 32 nt, Human
agaagaagaggaagaagaggaggcggcggcgc

SEQ ID NO: 43168 - RNA, 32 nt, Human
agaagaagaggaagagaggccugagcgagcau

SEQ ID NO: 43169 - RNA, 32 nt, Human
agaagaagaggaggaggaggaggaggaagaag

SEQ ID NO: 43170 - RNA, 32 nt, Human
agaagaagaggguggagcaggaggcucucacu

SEQ ID NO: 43171 - RNA, 32 nt, Human
agaagaagcaaaccuguuucuccucauuugga

SEQ ID NO: 43172 - RNA, 32 nt, Human
agaagaagccagggaagcagugcaauggcuuc

SEQ ID NO: 43173 - RNA, 32 nt, Human
agaagaagcugaacuucagacugugaaaggua

SEQ ID NO: 43174 - RNA, 32 nt, Human
agaagaagcugaugcccugaggcugggcacag

SEQ ID NO: 43175 - RNA, 32 nt, Human
agaagaaggaaagagagggauggggaaagaca

SEQ ID NO: 43176 - RNA, 32 nt, Human
agaagaaggaagcuggaccaggaaccuuggaa

SEQ ID NO: 43177 - RNA, 32 nt, Human
agaagaaggagaaagggagaaagcucaagaaa

SEQ ID NO: 43178 - RNA, 32 nt, Human
agaagaaggagaagaagagggagagaagaaag

SEQ ID NO: 43179 - RNA, 32 nt, Human
agaagaaggaggaggaggaggaggaggaggag

SEQ ID NO: 43180 - RNA, 32 nt, Human
agaagaaggcacaggaggaucucuaagcagua

SEQ ID NO: 43181 - RNA, 32 nt, Human
agaagaaggcagcacaggaucuguagcugagg

SEQ ID NO: 43182 - RNA, 32 nt, Human
agaagaaggcgcugucugggggagacagguua

SEQ ID NO: 43183 - RNA, 32 nt, Human
agaagaaggcggagaggcaguucuccagccgc

SEQ ID NO: 43184 - RNA, 32 nt, Human
agaagaaggcucaagaauuuauucaccaguuc

SEQ ID NO: 43185 - RNA, 32 nt, Human
agaagaaggcugggucucaguccuaugggaga

SEQ ID NO: 43186 - RNA, 32 nt, Human
agaagaagggaagagagcagcaguagcuuaag

SEQ ID NO: 43187 - RNA, 31 nt, Human
agaagaaguaagaaagaaaaagccuguuggc

SEQ ID NO: 43188 - RNA, 32 nt, Human
agaagaagugaguguuucuaugaguggaaaaa

SEQ ID NO: 43189 - RNA, 32 nt, Human
agaagaaucaaccugcacugccauccacacag

SEQ ID NO: 43190 - RNA, 32 nt, Human
agaagaaucagccuggcagcagcauugugauu

SEQ ID NO: 43191 - RNA, 32 nt, Human
agaagaaucauccacaccacucuucgccaccc

SEQ ID NO: 43192 - RNA, 32 nt, Human
agaagaaucuggaucauuagauaaaaauggcu

SEQ ID NO: 43193 - RNA, 32 nt, Human
agaagaaucuuuccuuuguccuguucuaaccu

SEQ ID NO: 43194 - RNA, 32 nt, Human
agaagaaugaagcaaguucacuuucaaucaag

SEQ ID NO: 43195 - RNA, 22 nt, Human
agaagaaugagaagacaggaga

SEQ ID NO: 43196 - RNA, 32 nt, Human
agaagaaugauacuguuuaugaugaauccaua

SEQ ID NO: 43197 - RNA, 32 nt, Human
agaagaaugccaccaugccagucaccauguug

SEQ ID NO: 43198 - RNA, 22 nt, Human
agaagaauguuggccucucuuc

SEQ ID NO: 43199 - RNA, 32 nt, Human
agaagacaaaucugguagacacuacugugaca

SEQ ID NO: 43200 - RNA, 32 nt, Human
agaagacaaggcacagugcagcuuggugaagc

SEQ ID NO: 43201 - RNA, 32 nt, Human
agaagacaaugagacgagaacacuucuaaggc

SEQ ID NO: 43202 - RNA, 32 nt, Human
agaagacacaguguccauccucccagauugga

SEQ ID NO: 43203 - RNA, 19 nt, Human
agaagacacugaagaauuu

SEQ ID NO: 43204 - RNA, 32 nt, Human
agaagacacugucucaugggccugugcuguca

SEQ ID NO: 43205 - RNA, 32 nt, Human
agaagacagaaacgacaugagcacagcaggaa

SEQ ID NO: 43206 - RNA, 32 nt, Human
agaagacagaaucaacaugagcacagcaggaa

SEQ ID NO: 43207 - RNA, 32 nt, Human
agaagacagaaucaauaugagcacagcaggaa

SEQ ID NO: 43208 - RNA, 32 nt, Human
agaagacagagcuauuucagaggcucugugug

SEQ ID NO: 43209 - RNA, 32 nt, Human
agaagacagcaaauacugcuugagcccuggau

SEQ ID NO: 43210 - RNA, 16 nt, Human
agaagacagcagggga

SEQ ID NO: 43211 - RNA, 32 nt, Human
agaagacagccaugcacugagcuggggacaug

SEQ ID NO: 43212 - RNA, 32 nt, Human
agaagacagccgaagucaaagccacauccucu

SEQ ID NO: 43213 - RNA, 24 nt, Human
agaagacaggaggaagaaagggag

SEQ ID NO: 43214 - RNA, 18 nt, Human
agaagacagucccaggag

SEQ ID NO: 43215 - RNA, 32 nt, Human
agaagacauacaaaagccucuucugaaggaaa

SEQ ID NO: 43216 - RNA, 32 nt, Human
agaagacaugcugcuauggucacugagggguu

SEQ ID NO: 43217 - RNA, 32 nt, Human
agaagacauggcuuccagaaaagagaaugcga

SEQ ID NO: 43218 - RNA, 32 nt, Human
agaagacauguuccucuaugcuaagaugauua

SEQ ID NO: 43219 - RNA, 32 nt, Human
agaagaccaaggggaagaggugcaguggggag

SEQ ID NO: 43220 - RNA, 32 nt, Human
agaagaccaccugaauucucaucccaucuaag

SEQ ID NO: 43221 - RNA, 21 nt, Human
agaagaccacgagacuuggua

SEQ ID NO: 43222 - RNA, 26 nt, Human
agaagaccagcacccucaaccuggua

SEQ ID NO: 43223 - RNA, 32 nt, Human
agaagaccauguccauagcccugaagcaggua

SEQ ID NO: 43224 - RNA, 32 nt, Human
agaagacccucgggaagcagucagacugcacu

SEQ ID NO: 43225 - RNA, 32 nt, Human
agaagacccugggaguucccuggggacccuga

SEQ ID NO: 43226 - RNA, 32 nt, Human
agaagaccucagaaaccgaaagaaaaccacca

SEQ ID NO: 43227 - RNA, 32 nt, Human
agaagaccuccaggugccgguugcugggcuca

SEQ ID NO: 43228 - RNA, 32 nt, Human
agaagaccucgucccuuccuagucagggcauc

SEQ ID NO: 43229 - RNA, 32 nt, Human
agaagaccucuggcuuuccuggaacacagaug

SEQ ID NO: 43230 - RNA, 32 nt, Human
agaagaccugaguucuucucucaguuccaagc

SEQ ID NO: 43231 - RNA, 32 nt, Human
agaagaccugggacagaggacugcugucugcc

SEQ ID NO: 43232 - RNA, 24 nt, Human
agaagaccuuucuagaaccuggua

SEQ ID NO: 43233 - RNA, 32 nt, Human
agaagacgacauccagcugcucaaaucagcuc

SEQ ID NO: 43234 - RNA, 32 nt, Human
agaagacgcccgcgccccagccccaggcgccu

SEQ ID NO: 43235 - RNA, 32 nt, Human
agaagacgcccucaccuaucuggaccagguga

SEQ ID NO: 43236 - RNA, 32 nt, Human
agaagacggaggucaagccugaagauaguggc

SEQ ID NO: 43237 - RNA, 32 nt, Human
agaagacguaguguaugagaaagggccauuuu

SEQ ID NO: 43238 - RNA, 32 nt, Human
agaagacgucuccccuucucugccucaccugg

SEQ ID NO: 43239 - RNA, 20 nt, Human
agaagacguggaggggagcc

SEQ ID NO: 43240 - RNA, 32 nt, Human
agaagacuaucauaugaaccagaaaggguaac

SEQ ID NO: 43241 - RNA, 32 nt, Human
agaagacuaugcugaaacuaucgcucacauuc

SEQ ID NO: 43242 - RNA, 32 nt, Human
agaagacucaaggaaguggggauuagauuagg

SEQ ID NO: 43243 - RNA, 32 nt, Human
agaagacucuuacuugcaugugucucaggguc

SEQ ID NO: 43244 - RNA, 32 nt, Human
agaagacugaaagaguagaaagaaguugcugu

SEQ ID NO: 43245 - RNA, 32 nt, Human
agaagacugagggagcacaggagaagccacaa

SEQ ID NO: 43246 - RNA, 32 nt, Human
agaagacuggaauuccuuucucccagaugauc

SEQ ID NO: 43247 - RNA, 32 nt, Human
agaagacugugacaacucaugaccugcauccu

SEQ ID NO: 43248 - RNA, 32 nt, Human
agaagacuguucugcaauuugcugccaaaugc

SEQ ID NO: 43249 - RNA, 17 nt, Human
agaagacuguuuuuagu

SEQ ID NO: 43250 - RNA, 32 nt, Human
agaagagaaaauuugaaaauguccuuaugcuu

SEQ ID NO: 43251 - RNA, 23 nt, Human
agaagagaaaccaguacaaaaga

SEQ ID NO: 43252 - RNA, 32 nt, Human
agaagagaaacuuggcuucuguuuucgcaaag

SEQ ID NO: 43253 - RNA, 32 nt, Human
agaagagaaagaaguccucuuggggcuuuuua

SEQ ID NO: 43254 - RNA, 32 nt, Human
agaagagaaaggugagaaagaagaggaagaua

SEQ ID NO: 43255 - RNA, 32 nt, Human
agaagagaaauguucaccauguagggaauguu

SEQ ID NO: 43256 - RNA, 32 nt, Human
agaagagaagaaaaagggaggagagagaagga

SEQ ID NO: 43257 - RNA, 32 nt, Human
agaagagaagaauggggacaacagaaaccugc

SEQ ID NO: 43258 - RNA, 22 nt, Human
agaagagaagguugaaaagaga

SEQ ID NO: 43259 - RNA, 32 nt, Human
agaagagaauacucauuuuuguccaguguuuu

SEQ ID NO: 43260 - RNA, 20 nt, Human
agaagagaaugcaccccuga

SEQ ID NO: 43261 - RNA, 32 nt, Human
agaagagacacagaucacagaugaucaaguag

SEQ ID NO: 43262 - RNA, 24 nt, Human
agaagagacacugaggacaagaga

SEQ ID NO: 43263 - RNA, 32 nt, Human
agaagagacagaggagaggaaagggaaguagu

SEQ ID NO: 43264 - RNA, 22 nt, Human
agaagagacaggagaucagaga

SEQ ID NO: 43265 - RNA, 32 nt, Human
agaagagacagugaccaccuuuugaagagcuc

SEQ ID NO: 43266 - RNA, 32 nt, Human
agaagagacucugcugggcuuuuucaugucug

SEQ ID NO: 43267 - RNA, 32 nt, Human
agaagagacuugcagugaacuguuuuugugcc

SEQ ID NO: 43268 - RNA, 23 nt, Human
agaagagacuuuaaaauaagaga

SEQ ID NO: 43269 - RNA, 32 nt, Human
agaagagagaaaagagaugggaagacucugug

SEQ ID NO: 43270 - RNA, 32 nt, Human
agaagagaggagacaugucaggaauagauuag

SEQ ID NO: 43271 - RNA, 32 nt, Human
agaagagaggccauccucucaccagaucuaca

SEQ ID NO: 43272 - RNA, 32 nt, Human
agaagagagggucucccuggggugggguugcu

SEQ ID NO: 43273 - RNA, 32 nt, Human
agaagagagugucuccugacacugugugcaug

SEQ ID NO: 43274 - RNA, 21 nt, Human
agaagagaucaguccacccag

SEQ ID NO: 43275 - RNA, 25 nt, Human
agaagagaugagaagaggcacaaga

SEQ ID NO: 43276 - RNA, 32 nt, Human
agaagagauggaagggcauggcccugcaggcg

SEQ ID NO: 43277 - RNA, 32 nt, Human
agaagagauggucucuccccagccaugggcca

SEQ ID NO: 43278 - RNA, 32 nt, Human
agaagagaugucagcaaagcaagugaugaagc

SEQ ID NO: 43279 - RNA, 32 nt, Human
agaagagauuccagaaucaucaucugugauga

SEQ ID NO: 43280 - RNA, 21 nt, Human
agaagagauugaagacagaga

SEQ ID NO: 43281 - RNA, 32 nt, Human
agaagagcaaacugaggcuuucuuggacagca

SEQ ID NO: 43282 - RNA, 32 nt, Human
agaagagcacagagcccugaggggcugggcug

SEQ ID NO: 43283 - RNA, 32 nt, Human
agaagagcagugaccccagcagagaggggccu

SEQ ID NO: 43284 - RNA, 32 nt, Human
agaagagccaagaguccaggaggcccuggucc

SEQ ID NO: 43285 - RNA, 32 nt, Human
agaagagccacaggaacaucauuccucucccg

SEQ ID NO: 43286 - RNA, 24 nt, Human
agaagagcccuugaaaacaaggga

SEQ ID NO: 43287 - RNA, 32 nt, Human
agaagagccuccuauucuucucuguccucaua

SEQ ID NO: 43288 - RNA, 21 nt, Human
agaagagcgagcccgagugcc

SEQ ID NO: 43289 - RNA, 32 nt, Human
agaagagcggagagagaaggaagaggcgaugu

SEQ ID NO: 43290 - RNA, 32 nt, Human
agaagagcuguucacagccagacuggcacagu

SEQ ID NO: 43291 - RNA, 32 nt, Human
agaagagcuuuguggugauaauuuuguaucuu

SEQ ID NO: 43292 - RNA, 32 nt, Human
agaagaggaaaaucacuguuuuugucaaggau

SEQ ID NO: 43293 - RNA, 32 nt, Human
agaagaggaaagggaggaaaccuagcagagga

SEQ ID NO: 43294 - RNA, 32 nt, Human
agaagaggaagagaugagggaaggccuggcuc

SEQ ID NO: 43295 - RNA, 32 nt, Human
agaagaggaagaggaaagaaaaggagucaggg

SEQ ID NO: 43296 - RNA, 32 nt, Human
agaagaggaagaggaaagaaagacaagucagg

SEQ ID NO: 43297 - RNA, 32 nt, Human
agaagaggaagaggaaagcaaaggagucaggg

SEQ ID NO: 43298 - RNA, 32 nt, Human
agaagaggaagaggaagaggaagagaggaagc

SEQ ID NO: 43299 - RNA, 32 nt, Human
agaagaggaagauggagguggaguacugguuu

SEQ ID NO: 43300 - RNA, 32 nt, Human
agaagaggagaaacuucaacgccuuccagaaa

SEQ ID NO: 43301 - RNA, 22 nt, Human
agaagaggagaggacacagaga

SEQ ID NO: 43302 - RNA, 32 nt, Human
agaagaggagcaggagaaacaaaucguuaaaa

SEQ ID NO: 43303 - RNA, 32 nt, Human
agaagaggagccaaaacaucauaguugaaccg

SEQ ID NO: 43304 - RNA, 32 nt, Human
agaagaggaggaaaaugcccaucaagccacug

SEQ ID NO: 43305 - RNA, 32 nt, Human
agaagaggaggaggagaaagaagcagcaacga

SEQ ID NO: 43306 - RNA, 32 nt, Human
agaagaggaggaggaggaagaggaggaggagg

SEQ ID NO: 43307 - RNA, 32 nt, Human
agaagaggaggaggaggaggaggaagaagaaa

SEQ ID NO: 43308 - RNA, 32 nt, Human
agaagaggaggaggaggaggaggaggaggagg

SEQ ID NO: 43309 - RNA, 18 nt, Human
agaagaggaggaggcaga

SEQ ID NO: 43310 - RNA, 32 nt, Human
agaagaggaucagcagugcagccccaggaugc

SEQ ID NO: 43311 - RNA, 32 nt, Human
agaagaggcagggggcgaagugcaguggcuca

SEQ ID NO: 43312 - RNA, 32 nt, Human
agaagaggcagggucacccucucuccacguca

SEQ ID NO: 43313 - RNA, 32 nt, Human
agaagaggccauacugcuccagccggggcucc

SEQ ID NO: 43314 - RNA, 32 nt, Human
agaagaggcgggcacuggagcacuguucggac

SEQ ID NO: 43315 - RNA, 32 nt, Human
agaagaggcugcaggcaaugcagaaacggcgc

SEQ ID NO: 43316 - RNA, 32 nt, Human
agaagaggcuuccaaucaguguggaaagugac

SEQ ID NO: 43317 - RNA, 32 nt, Human
agaagagggaagaggaaggaaggugggugggg

SEQ ID NO: 43318 - RNA, 32 nt, Human
agaagagggaauaugcauugcaguucagcaaa

SEQ ID NO: 43319 - RNA, 32 nt, Human
agaagagggagaagcacgucacugugguugua

SEQ ID NO: 43320 - RNA, 32 nt, Human
agaagagggaggaggagcccaggcgucuguuu

SEQ ID NO: 43321 - RNA, 32 nt, Human
agaagagggccaccauccuccagaccccagaa

SEQ ID NO: 43322 - RNA, 32 nt, Human
agaagagggcggaggaaaagcccuagcuccug

SEQ ID NO: 43323 - RNA, 21 nt, Human
agaagaggggaaagcaagaga

SEQ ID NO: 43324 - RNA, 32 nt, Human
agaagaggguccaggcuggaaaccugaacuuu

SEQ ID NO: 43325 - RNA, 32 nt, Human
agaagaggguggagcaggaggcucucacuggu

SEQ ID NO: 43326 - RNA, 32 nt, Human
agaagagguacucggagcuggagcagcagcug

SEQ ID NO: 43327 - RNA, 32 nt, Human
agaagaggucacuagauguugcagugaaaaau

SEQ ID NO: 43328 - RNA, 32 nt, Human
agaagaguaagccgccaugugacuguuuagaa

SEQ ID NO: 43329 - RNA, 21 nt, Human
agaagaguaccuagcacaaag

SEQ ID NO: 43330 - RNA, 32 nt, Human
agaagaguaccuugaaccuauaguuuccugaa

SEQ ID NO: 43331 - RNA, 18 nt, Human
agaagaguagcccaggag

SEQ ID NO: 43332 - RNA, 32 nt, Human
agaagaguauaagugggaagucuuguuuguug

SEQ ID NO: 43333 - RNA, 32 nt, Human
agaagaguaucagaaagaguccucagccuucc

SEQ ID NO: 43334 - RNA, 32 nt, Human
agaagaguauugaaaguauuuggaggaaaaug

SEQ ID NO: 43335 - RNA, 32 nt, Human
agaagagucagugagaccagcacucucaaaca

SEQ ID NO: 43336 - RNA, 32 nt, Human
agaagaguccucuggggaggaccccaagggcc

SEQ ID NO: 43337 - RNA, 32 nt, Human
agaagagucugaggcagcuggagaugggguug

SEQ ID NO: 43338 - RNA, 32 nt, Human
agaagagucuguggucacuugaggaggcgagu

SEQ ID NO: 43339 - RNA, 32 nt, Human
agaagagugagccugcaugccaauucuaagcu

SEQ ID NO: 43340 - RNA, 32 nt, Human
agaagagugcaucuccagccuaugaaacagcu

SEQ ID NO: 43341 - RNA, 32 nt, Human
agaagagugccacauuuauuuuuauaucuaua

SEQ ID NO: 43342 - RNA, 18 nt, Human
agaagagugcgcugcagg

SEQ ID NO: 43343 - RNA, 32 nt, Human
agaagaguggcagugggcucaugcuccuggaa

SEQ ID NO: 43344 - RNA, 23 nt, Human
agaagaguuaaagcugcgcccuc

SEQ ID NO: 43345 - RNA, 32 nt, Human
agaagaguuaacauuuacacagugcuuuuuac

SEQ ID NO: 43346 - RNA, 32 nt, Human
agaagaguuacagaaaaugaaaaagaaaauga

SEQ ID NO: 43347 - RNA, 32 nt, Human
agaagaguuagaagucauugcuccagagaauu

SEQ ID NO: 43348 - RNA, 23 nt, Human
agaagaguuaggaaugccucccu

SEQ ID NO: 43349 - RNA, 24 nt, Human
agaagaguugacaacaucucacuc

SEQ ID NO: 43350 - RNA, 32 nt, Human
agaagauaccagaugccucuguccucauuuug

SEQ ID NO: 43351 - RNA, 32 nt, Human
agaagauagaauggucagaauuucgagaacug

SEQ ID NO: 43352 - RNA, 32 nt, Human
agaagauagggucaacuucuucaguugaguua

SEQ ID NO: 43353 - RNA, 21 nt, Human
agaagauagugggagggggcc

SEQ ID NO: 43354 - RNA, 32 nt, Human
agaagauaucacugcagccugcuuugugcuuu

SEQ ID NO: 43355 - RNA, 32 nt, Human
agaagaucaaaaccagccuggccaacauggug

SEQ ID NO: 43356 - RNA, 32 nt, Human
agaagaucaagaccagccugggaaauauagca

SEQ ID NO: 43357 - RNA, 32 nt, Human
agaagaucaccacugcuguuguggacccucua

SEQ ID NO: 43358 - RNA, 32 nt, Human
agaagaucacuugaggccaggaguucgagacc

SEQ ID NO: 43359 - RNA, 32 nt, Human
agaagaucauccagacuuaaauguuugggccu

SEQ ID NO: 43360 - RNA, 32 nt, Human
agaagauccaaguuuaaaauugccugcggaau

SEQ ID NO: 43361 - RNA, 32 nt, Human
agaagauccucagaccaggacaguaacugcca

SEQ ID NO: 43362 - RNA, 22 nt, Human
agaagaucuauggaaacacaga

SEQ ID NO: 43363 - RNA, 32 nt, Human
agaagaugaaagaaggaaguggcauccuuuug

SEQ ID NO: 43364 - RNA, 32 nt, Human
agaagaugaacaaaggauccggcucucaaaag

SEQ ID NO: 43365 - RNA, 32 nt, Human
agaagaugaagauaaggaaaagaaaaggccau

SEQ ID NO: 43366 - RNA, 32 nt, Human
agaagaugacaagcccugcuccagucacccgg

SEQ ID NO: 43367 - RNA, 32 nt, Human
agaagaugccagcuucucucuccagggugcuu

SEQ ID NO: 43368 - RNA, 32 nt, Human
agaagaugccauugcacuccagccugggcaac

SEQ ID NO: 43369 - RNA, 32 nt, Human
agaagaugcccagggcccagaagccaucagaa

SEQ ID NO: 43370 - RNA, 30 nt, Human
agaagaugccuggggguccaggaguccucc

SEQ ID NO: 43371 - RNA, 30 nt, Human
agaagaugcggaaggagaauggggaggcga

SEQ ID NO: 43372 - RNA, 32 nt, Human
agaagaugcuccagcaacacagccugggcccc

SEQ ID NO: 43373 - RNA, 32 nt, Human
agaagaugcugaugcugcugauccaagagcca

SEQ ID NO: 43374 - RNA, 30 nt, Human
agaagaugcugcagucccuggccggcagcu

SEQ ID NO: 43375 - RNA, 32 nt, Human
agaagauggaaauggauacaguaagaugcugc

SEQ ID NO: 43376 - RNA, 31 nt, Human
agaagauggacaagcucugcucagaacaaag

SEQ ID NO: 43377 - RNA, 32 nt, Human
agaagauggaccugaggagcugguggagaaac

SEQ ID NO: 43378 - RNA, 32 nt, Human
agaagauggcagagaagaaccgcaaggaugcc

SEQ ID NO: 43379 - RNA, 29 nt, Human
agaagauggcugcugauauauucccccgu

SEQ ID NO: 43380 - RNA, 30 nt, Human
agaagauggggaggaaaaagauucagaucc

SEQ ID NO: 43381 - RNA, 32 nt, Human
agaagaugggucugcugaucuggucauccaac

SEQ ID NO: 43382 - RNA, 30 nt, Human
agaagauggguggagaggaugaugaacuca

SEQ ID NO: 43383 - RNA, 32 nt, Human
agaagaugguuucuuuuauaauaaucuuguug

SEQ ID NO: 43384 - RNA, 32 nt, Human
agaagauguucaaaagaaaacauucacaaaau

SEQ ID NO: 43385 - RNA, 32 nt, Human
agaagauguuugacuugcucaaagucaagcag

SEQ ID NO: 43386 - RNA, 32 nt, Human
agaagauucucgccccuucccucucucccugc

SEQ ID NO: 43387 - RNA, 20 nt, Human
agaagauucuguauuaguua

SEQ ID NO: 43388 - RNA, 32 nt, Human
agaagauugaagaacagaagacuuuagacaaa

SEQ ID NO: 43389 - RNA, 23 nt, Human
agaagauugggccgccucuccuc

SEQ ID NO: 43390 - RNA, 32 nt, Human
agaagauuuacaccacuaucuccguuccaucu

SEQ ID NO: 43391 - RNA, 32 nt, Human
agaagauuuagcaccacuaucucuguuccauc

SEQ ID NO: 43392 - RNA, 32 nt, Human
agaagcaaaaggagggaguuucuggaacugca

SEQ ID NO: 43393 - RNA, 32 nt, Human
agaagcaaaugcccaagcugugcucagaacug

SEQ ID NO: 43394 - RNA, 32 nt, Human
agaagcaagaauugcuuuugaaggaaauggau

SEQ ID NO: 43395 - RNA, 32 nt, Human
agaagcaagaggaggagaaaaagaugucuuuu

SEQ ID NO: 43396 - RNA, 32 nt, Human
agaagcaagccagccaauagaauggggugauu

SEQ ID NO: 43397 - RNA, 32 nt, Human
agaagcaagcuauuggagcugaaggaaccuga

SEQ ID NO: 43398 - RNA, 32 nt, Human
agaagcaaguggcuuucaacacacaacagcag

SEQ ID NO: 43399 - RNA, 32 nt, Human
agaagcaaguuucacaguuaaacacagaaaua

SEQ ID NO: 43400 - RNA, 22 nt, Human
agaagcacaauggcccuucgcu

SEQ ID NO: 43401 - RNA, 32 nt, Human
agaagcacagaagaauugguuccuuccauuau

SEQ ID NO: 43402 - RNA, 32 nt, Human
agaagcacaucaaauaccagcaccccaccugc

SEQ ID NO: 43403 - RNA, 32 nt, Human
agaagcacaugaacuacagccuggagguggag

SEQ ID NO: 43404 - RNA, 32 nt, Human
agaagcaccagcagaccucuaagaacugcucu

SEQ ID NO: 43405 - RNA, 32 nt, Human
agaagcaccagccugcugccagcggggcagcc

SEQ ID NO: 43406 - RNA, 32 nt, Human
agaagcaccagcugaucugcagacuccaagga

SEQ ID NO: 43407 - RNA, 32 nt, Human
agaagcaccugaggccuugguucaugcagugu

SEQ ID NO: 43408 - RNA, 31 nt, Human
agaagcacucauuucugaccaccaggcuaug

SEQ ID NO: 43409 - RNA, 32 nt, Human
agaagcagaaacuggcaggccauggaccuuaa

SEQ ID NO: 43410 - RNA, 32 nt, Human
agaagcagaaaguaggagagaucacgaucuca

SEQ ID NO: 43411 - RNA, 32 nt, Human
agaagcagaaugcagaaggagaaugauccuuu

SEQ ID NO: 43412 - RNA, 32 nt, Human
agaagcagaggaaggagaggagaggggcacag

SEQ ID NO: 43413 - RNA, 32 nt, Human
agaagcagaguuucauuaccuguauuguagcc

SEQ ID NO: 43414 - RNA, 32 nt, Human
agaagcagcaacaacagcagaguuguuaagaa

SEQ ID NO: 43415 - RNA, 21 nt, Human
agaagcagcaacuugcaaggg

SEQ ID NO: 43416 - RNA, 32 nt, Human
agaagcagcaggugacaggagcagggccccug

SEQ ID NO: 43417 - RNA, 32 nt, Human
agaagcagccaagagcuggagccagaccagga

SEQ ID NO: 43418 - RNA, 32 nt, Human
agaagcagccaagauuccgggaagcgcgucuu

SEQ ID NO: 43419 - RNA, 32 nt, Human
agaagcagccuggguguguaaagagauaguca

SEQ ID NO: 43420 - RNA, 32 nt, Human
agaagcagcuccaggaguuagcugagacaccc

SEQ ID NO: 43421 - RNA, 17 nt, Human
agaagcagcucccagag

SEQ ID NO: 43422 - RNA, 32 nt, Human
agaagcagcuccucuuuaaacuccucaucucu

SEQ ID NO: 43423 - RNA, 32 nt, Human
agaagcagcucucugaggguucugaaaucaau

SEQ ID NO: 43424 - RNA, 32 nt, Human
agaagcagcugacaguggucguggaaguugga

SEQ ID NO: 43425 - RNA, 32 nt, Human
agaagcagcuuugaauaccuucauuuuaugua

SEQ ID NO: 43426 - RNA, 32 nt, Human
agaagcaggaagcagacaguaagugacagccg

SEQ ID NO: 43427 - RNA, 32 nt, Human
agaagcaggagaaggcaacugagauccuucag

SEQ ID NO: 43428 - RNA, 32 nt, Human
agaagcaggaggaucauuugagcccagaaguu

SEQ ID NO: 43429 - RNA, 32 nt, Human
agaagcaggagggagaguggcgcugcuguugu

SEQ ID NO: 43430 - RNA, 32 nt, Human
agaagcaggagguggagaagacccagugaagu

SEQ ID NO: 43431 - RNA, 32 nt, Human
agaagcagucaagcccaugaacuacaaccccg

SEQ ID NO: 43432 - RNA, 32 nt, Human
agaagcagugccugggucccucacggaggaaa

SEQ ID NO: 43433 - RNA, 32 nt, Human
agaagcaguggccaagacuaccuuggugcugg

SEQ ID NO: 43434 - RNA, 32 nt, Human
agaagcaguggccaccaccauggauacaggcc

SEQ ID NO: 43435 - RNA, 32 nt, Human
agaagcaguguuuucugccaaguagcggacgc

SEQ ID NO: 43436 - RNA, 32 nt, Human
agaagcaguuccagucagccccugccacugug

SEQ ID NO: 43437 - RNA, 32 nt, Human
agaagcauacaacaugagcaaagcuuuuucuc

SEQ ID NO: 43438 - RNA, 32 nt, Human
agaagcaucaggagcccagcugucugcagugg

SEQ ID NO: 43439 - RNA, 22 nt, Human
agaagcaucccaacucuucucu

SEQ ID NO: 43440 - RNA, 32 nt, Human
agaagcauccucugccaagaccaaaaggaaag

SEQ ID NO: 43441 - RNA, 32 nt, Human
agaagcaugcagcaccuccugcuucacucucu

SEQ ID NO: 43442 - RNA, 32 nt, Human
agaagcauggcaacaguacaauauugccgaug

SEQ ID NO: 43443 - RNA, 19 nt, Human
agaagcaugggauccagga

SEQ ID NO: 43444 - RNA, 32 nt, Human
agaagccaaagaggaggaggcaggagaagcag

SEQ ID NO: 43445 - RNA, 32 nt, Human
agaagccaaucagcaugcacucccccauucug

SEQ ID NO: 43446 - RNA, 32 nt, Human
agaagccacaggggcagggggagcagccgagc

SEQ ID NO: 43447 - RNA, 32 nt, Human
agaagccacaguccuucagccuccaauuggug

SEQ ID NO: 43448 - RNA, 32 nt, Human
agaagccaccacuggcuuucaggcuugggggu

SEQ ID NO: 43449 - RNA, 32 nt, Human
agaagccacugaggaacggccuggugaaggac

SEQ ID NO: 43450 - RNA, 32 nt, Human
agaagccagaggauucccgaguguggcugucu

SEQ ID NO: 43451 - RNA, 32 nt, Human
agaagccagcaagcagcagggaagggaggcga

SEQ ID NO: 43452 - RNA, 32 nt, Human
agaagccagcacuguggcagggugcuggggag

SEQ ID NO: 43453 - RNA, 32 nt, Human
agaagccagcagagaggcaugggacagguucc

SEQ ID NO: 43454 - RNA, 22 nt, Human
agaagccagcagggggcagcgu

SEQ ID NO: 43455 - RNA, 32 nt, Human
agaagccagcccccaaccccagcccuuccgua

SEQ ID NO: 43456 - RNA, 21 nt, Human
agaagccagccggcuggcagc

SEQ ID NO: 43457 - RNA, 32 nt, Human
agaagccaggaggcagagguugcagugagcca

SEQ ID NO: 43458 - RNA, 32 nt, Human
agaagccaggcacaaaaggccacauaguauau

SEQ ID NO: 43459 - RNA, 32 nt, Human
agaagccaggcugcguguguaaguggcaggga

SEQ ID NO: 43460 - RNA, 32 nt, Human
agaagccaggguguuucuccccucuauucuuu

SEQ ID NO: 43461 - RNA, 32 nt, Human
agaagccauaguccuucagccuccaauugaua

SEQ ID NO: 43462 - RNA, 32 nt, Human
agaagccaucaucuagaaacaauguugauaac

SEQ ID NO: 43463 - RNA, 32 nt, Human
agaagccauccuaaggugcuuaccucacacgc

SEQ ID NO: 43464 - RNA, 32 nt, Human
agaagccauccugaaaugaaacuagucuaaaa

SEQ ID NO: 43465 - RNA, 32 nt, Human
agaagcccaaacuuuauuuuuauaaagggaga

SEQ ID NO: 43466 - RNA, 32 nt, Human
agaagcccaccaugcagagcugugaucuagag

SEQ ID NO: 43467 - RNA, 20 nt, Human
agaagcccagagggggccug

SEQ ID NO: 43468 - RNA, 32 nt, Human
agaagcccaggccggccggaagaggagccgag

SEQ ID NO: 43469 - RNA, 32 nt, Human
agaagcccaggggagaaacaaagggaaugauc

SEQ ID NO: 43470 - RNA, 31 nt, Human
agaagcccaguacuggagcuaauguuugugu

SEQ ID NO: 43471 - RNA, 32 nt, Human
agaagcccaguucucaggagaugaggcuacca

SEQ ID NO: 43472 - RNA, 32 nt, Human
agaagccccaagaaggagguuggggccagcuc

SEQ ID NO: 43473 - RNA, 19 nt, Human
agaagccccacaucuuccu

SEQ ID NO: 43474 - RNA, 32 nt, Human
agaagcccccuucacgauccacccuuucaggc

SEQ ID NO: 43475 - RNA, 32 nt, Human
agaagccccucaggaagagaaucgaggccaag

SEQ ID NO: 43476 - RNA, 32 nt, Human
agaagccccuuuccccuuuguuuuccuuccuu

SEQ ID NO: 43477 - RNA, 32 nt, Human
agaagcccugcaggcugggugggcaggacacg

SEQ ID NO: 43478 - RNA, 32 nt, Human
agaagcccugccagcagagcaggcuggcguuu

SEQ ID NO: 43479 - RNA, 32 nt, Human
agaagcccugcuccucuucuccccaccaaggc

SEQ ID NO: 43480 - RNA, 26 nt, Human
agaagccgcagcgccgccucuucucu

SEQ ID NO: 43481 - RNA, 32 nt, Human
agaagccgccagccccuuucucccucugccug

SEQ ID NO: 43482 - RNA, 32 nt, Human
agaagccgccucuggacuaucuccccagacca

SEQ ID NO: 43483 - RNA, 19 nt, Human
agaagccggagcuggcagc

SEQ ID NO: 43484 - RNA, 32 nt, Human
agaagccggcucugagccacgcccuuucaccc

SEQ ID NO: 43485 - RNA, 32 nt, Human
agaagccgggcgaaguggcccaugccuguaau

SEQ ID NO: 43486 - RNA, 32 nt, Human
agaagccggugggcaaugagaucaugucugcu

SEQ ID NO: 43487 - RNA, 32 nt, Human
agaagccuacaucuucuuauucuauuuaggaa

SEQ ID NO: 43488 - RNA, 32 nt, Human
agaagccuccacugccauggagacugccuggc

SEQ ID NO: 43489 - RNA, 32 nt, Human
agaagccuccuugaaccagucugcaacccugc

SEQ ID NO: 43490 - RNA, 32 nt, Human
agaagccucugccucccuagcuuuucugcuau

SEQ ID NO: 43491 - RNA, 32 nt, Human
agaagccugccuggugcccacagccgucuggc

SEQ ID NO: 43492 - RNA, 32 nt, Human
agaagccugcgaggaagccuauggaauaguuu

SEQ ID NO: 43493 - RNA, 32 nt, Human
agaagccuggagaagagagaacuauuuaaaag

SEQ ID NO: 43494 - RNA, 32 nt, Human
agaagccuggcuuauuucaggcugacagcugg

SEQ ID NO: 43495 - RNA, 32 nt, Human
agaagccuggggagucggggagguagggagag

SEQ ID NO: 43496 - RNA, 32 nt, Human
agaagccuguaucuuuuuccucuucaguagau

SEQ ID NO: 43497 - RNA, 32 nt, Human
agaagccuguguggucugggccagucucugcc

SEQ ID NO: 43498 - RNA, 32 nt, Human
agaagccuguuccagccgcagccgcugcagcc

SEQ ID NO: 43499 - RNA, 32 nt, Human
agaagccuuagcaacacugcucaccacaguau

SEQ ID NO: 43500 - RNA, 32 nt, Human
agaagccuuccagccugcggugcugucugcug

SEQ ID NO: 43501 - RNA, 22 nt, Human
agaagcgaccgcagcgggagcc

SEQ ID NO: 43502 - RNA, 32 nt, Human
agaagcgagccacacccccaucgcaugcccua

SEQ ID NO: 43503 - RNA, 32 nt, Human
agaagcgauggaaacuuauuucuaugggacag

SEQ ID NO: 43504 - RNA, 32 nt, Human
agaagcgcagaggcugagcccgcccccgcccc

SEQ ID NO: 43505 - RNA, 32 nt, Human
agaagcgccagccugccuggcugucuuccacc

SEQ ID NO: 43506 - RNA, 19 nt, Human
agaagcggaacccagagcu

SEQ ID NO: 43507 - RNA, 19 nt, Human
agaagcggaggcccaggag

SEQ ID NO: 43508 - RNA, 32 nt, Human
agaagcggcaggcggaggcgcgguccgggcgc

SEQ ID NO: 43509 - RNA, 20 nt, Human
agaagcggccggagcccgcc

SEQ ID NO: 43510 - RNA, 32 nt, Human
agaagcggcgggccaccaggcugcagucuccc

SEQ ID NO: 43511 - RNA, 32 nt, Human
agaagcggcuaguggcggcugccugcgucccc

SEQ ID NO: 43512 - RNA, 32 nt, Human
agaagcgggaguggcugauggaagcaccuaaa

SEQ ID NO: 43513 - RNA, 32 nt, Human
agaagcgggcucugagccacgcccuuucaccc

SEQ ID NO: 43514 - RNA, 32 nt, Human
agaagcggggagaagagcgagacagagaugcu

SEQ ID NO: 43515 - RNA, 32 nt, Human
agaagcgugcgugcguuugcaaguaagagaac

SEQ ID NO: 43516 - RNA, 32 nt, Human
agaagcguuugucagcccuggagcccagagcg

SEQ ID NO: 43517 - RNA, 32 nt, Human
agaagcuaaggcagguggaucacuugaggcca

SEQ ID NO: 43518 - RNA, 32 nt, Human
agaagcuacgaaaaagggagcuguuuaaauuu

SEQ ID NO: 43519 - RNA, 32 nt, Human
agaagcuacugcuaucugcugcucugggaaau

SEQ ID NO: 43520 - RNA, 32 nt, Human
agaagcuacugguuuauucccaauuguugaug

SEQ ID NO: 43521 - RNA, 32 nt, Human
agaagcuagugagcaugugagcaagcggugug

SEQ ID NO: 43522 - RNA, 32 nt, Human
agaagcuauauagagaaaaggaaaccacugaa

SEQ ID NO: 43523 - RNA, 32 nt, Human
agaagcucaaagccaaaaucaggcaacugacg

SEQ ID NO: 43524 - RNA, 32 nt, Human
agaagcucagauguuccucagagcuacgauau

SEQ ID NO: 43525 - RNA, 32 nt, Human
agaagcucagccgccuuugaugaccuagaagc

SEQ ID NO: 43526 - RNA, 32 nt, Human
agaagcucaguagccuuuggggacggccacuc

SEQ ID NO: 43527 - RNA, 32 nt, Human
agaagcucaucugaccuccugacucucagccc

SEQ ID NO: 43528 - RNA, 18 nt, Human
agaagcucauuccaggaa

SEQ ID NO: 43529 - RNA, 32 nt, Human
agaagcucccagaacacucaggaaacuucucc

SEQ ID NO: 43530 - RNA, 32 nt, Human
agaagcuccgugagccucagccaccccucaga

SEQ ID NO: 43531 - RNA, 17 nt, Human
agaagcuccuucaggaa

SEQ ID NO: 43532 - RNA, 32 nt, Human
agaagcucuagcgucagguaacaaauagacag

SEQ ID NO: 43533 - RNA, 22 nt, Human
agaagcucugccucucuucucu

SEQ ID NO: 43534 - RNA, 32 nt, Human
agaagcucuggccccaggcuugucacuagcag

SEQ ID NO: 43535 - RNA, 32 nt, Human
agaagcugaaaaagcuggagugcaauggcacc

SEQ ID NO: 43536 - RNA, 32 nt, Human
agaagcugaacaggagaaagacaaacagaaag

SEQ ID NO: 43537 - RNA, 32 nt, Human
agaagcugaagaggauaagagcaaggaaacaa

SEQ ID NO: 43538 - RNA, 32 nt, Human
agaagcugaagcacaagaauugcuugaacccu

SEQ ID NO: 43539 - RNA, 32 nt, Human
agaagcugaagcccagaguggggaaggggagu

SEQ ID NO: 43540 - RNA, 32 nt, Human
agaagcugagacccuuccccagugucugaggc

SEQ ID NO: 43541 - RNA, 32 nt, Human
agaagcugagauuacaggcaugugccaccaca

SEQ ID NO: 43542 - RNA, 32 nt, Human
agaagcugagauuacggaugaccaccaccacu

SEQ ID NO: 43543 - RNA, 32 nt, Human
agaagcugaggcaccuccuacucccaucugaa

SEQ ID NO: 43544 - RNA, 32 nt, Human
agaagcugauucuaucacauuguaagaugccu

SEQ ID NO: 43545 - RNA, 32 nt, Human
agaagcugccauuuaccagcccucugugauuu

SEQ ID NO: 43546 - RNA, 19 nt, Human
agaagcugcuacaagauga

SEQ ID NO: 43547 - RNA, 32 nt, Human
agaagcugcuauuccuacuggcuaucuaagaa

SEQ ID NO: 43548 - RNA, 32 nt, Human
agaagcuggaggaggagggggaagaggagugg

SEQ ID NO: 43549 - RNA, 32 nt, Human
agaagcuggcaaagaacauggaagagauguuu

SEQ ID NO: 43550 - RNA, 18 nt, Human
agaagcuggcaggacugg

SEQ ID NO: 43551 - RNA, 17 nt, Human
agaagcuggccuggggu

SEQ ID NO: 43552 - RNA, 32 nt, Human
agaagcuggcuaaccuccacuuccacauucca

SEQ ID NO: 43553 - RNA, 29 nt, Human
agaagcuggcugcuaagaugucacugggg

SEQ ID NO: 43554 - RNA, 32 nt, Human
agaagcugggagggagggggaggugaaaaggg

SEQ ID NO: 43555 - RNA, 32 nt, Human
agaagcugggauuacaggcaugcgccaccacg

SEQ ID NO: 43556 - RNA, 32 nt, Human
agaagcugggcagaagcaggaggaucauuuga

SEQ ID NO: 43557 - RNA, 32 nt, Human
agaagcugggcccagccgcggugccugcuggc

SEQ ID NO: 43558 - RNA, 32 nt, Human
agaagcugggcugcaccugcgggggugggcau

SEQ ID NO: 43559 - RNA, 25 nt, Human
agaagcuggugcagccacacaggga

SEQ ID NO: 43560 - RNA, 32 nt, Human
agaagcugguuugugaagcaccugccaugaaa

SEQ ID NO: 43561 - RNA, 32 nt, Human
agaagcugucuaaaccuccuacuccucaacuc

SEQ ID NO: 43562 - RNA, 32 nt, Human
agaagcuguggggucggagaggcguuuggaga

SEQ ID NO: 43563 - RNA, 32 nt, Human
agaagcuguucauuccauucacguaugguaau

SEQ ID NO: 43564 - RNA, 32 nt, Human
agaagcuuacuuccugcugcaugcuuugccga

SEQ ID NO: 43565 - RNA, 32 nt, Human
agaagcuucagaggagggaagggggugggaag

SEQ ID NO: 43566 - RNA, 32 nt, Human
agaagcuuccagcacugguucaucagaucagg

SEQ ID NO: 43567 - RNA, 32 nt, Human
agaagcuucuguggcggcuggaaguggacgga

SEQ ID NO: 43568 - RNA, 30 nt, Human
agaagcuugcaaauuacagaaagaauaaaa

SEQ ID NO: 43569 - RNA, 32 nt, Human
agaagcuuggccugagucucccagcagagaaa

SEQ ID NO: 43570 - RNA, 32 nt, Human
agaagcuugugcaaagcagccaccuuggacca

SEQ ID NO: 43571 - RNA, 32 nt, Human
agaagcuuuagagguaugaggcugcagaaccg

SEQ ID NO: 43572 - RNA, 32 nt, Human
agaagcuuuccucugcuauucccauucucuuu

SEQ ID NO: 43573 - RNA, 32 nt, Human
agaagcuuuccugcccccucuuccucuaguag

SEQ ID NO: 43574 - RNA, 32 nt, Human
agaagcuuucuuccaaacuccugggccuccga

SEQ ID NO: 43575 - RNA, 32 nt, Human
agaagcuuuguaggugcaacuuccccuuggag

SEQ ID NO: 43576 - RNA, 19 nt, Human
agaaggaaagaagggggcc

SEQ ID NO: 43577 - RNA, 32 nt, Human
agaaggaaagaggguacucucuggcugggcug

SEQ ID NO: 43578 - RNA, 18 nt, Human
agaaggaaauccaagcca

SEQ ID NO: 43579 - RNA, 32 nt, Human
agaaggaaauugucccgaaucccugcagucuu

SEQ ID NO: 43580 - RNA, 32 nt, Human
agaaggaaauugucccgaaucccugcaguggg

SEQ ID NO: 43581 - RNA, 32 nt, Human
agaaggaacccucacacaccacugauaggaau

SEQ ID NO: 43582 - RNA, 21 nt, Human
agaaggaacgccuuccaggaa

SEQ ID NO: 43583 - RNA, 32 nt, Human
agaaggaagaagcacccucuccccggccuccu

SEQ ID NO: 43584 - RNA, 32 nt, Human
agaaggaagaggaggaagaacuaaagaaggag

SEQ ID NO: 43585 - RNA, 32 nt, Human
agaaggaagaggaggaagcugagaagcuggaa

SEQ ID NO: 43586 - RNA, 32 nt, Human
agaaggaagaggaggaagcugagggcccgcug

SEQ ID NO: 43587 - RNA, 32 nt, Human
agaaggaagaggagguggaggcuugaugagga

SEQ ID NO: 43588 - RNA, 32 nt, Human
agaaggaagaggauuccaggcugagagcacug

SEQ ID NO: 43589 - RNA, 32 nt, Human
agaaggaagccaccauggaugcagugaugaca

SEQ ID NO: 43590 - RNA, 32 nt, Human
agaaggaaggaaggagaaagagaaggaaagaa

SEQ ID NO: 43591 - RNA, 32 nt, Human
agaaggaaggcagcuuguuccagaccuuggug

SEQ ID NO: 43592 - RNA, 32 nt, Human
agaaggaaggcugagccucuccccagccuuca

SEQ ID NO: 43593 - RNA, 32 nt, Human
agaaggaagggccuugcagccacagagacacu

SEQ ID NO: 43594 - RNA, 32 nt, Human
agaaggaaggggauaggcagcuuugacaggug

SEQ ID NO: 43595 - RNA, 32 nt, Human
agaaggaagguauguaccuuccuuccaccagg

SEQ ID NO: 43596 - RNA, 32 nt, Human
agaaggaagguggcgaaggcagugagugcucu

SEQ ID NO: 43597 - RNA, 32 nt, Human
agaaggaauggcugguccagaggcuuuugucc

SEQ ID NO: 43598 - RNA, 32 nt, Human
agaaggaaugugccaguauggcucccugggug

SEQ ID NO: 43599 - RNA, 32 nt, Human
agaaggaauuggcaacacugaaaccuccagaa

SEQ ID NO: 43600 - RNA, 32 nt, Human
agaaggacaacaaaggccaauuugccaucacc

SEQ ID NO: 43601 - RNA, 32 nt, Human
agaaggacaagcuguuauuuuccuuuuuauua

SEQ ID NO: 43602 - RNA, 32 nt, Human
agaaggacagucagaggaguggccaccuguuu

SEQ ID NO: 43603 - RNA, 32 nt, Human
agaaggacauuuuacugcagugagaaugaggg

SEQ ID NO: 43604 - RNA, 20 nt, Human
agaaggaccccacacuuggu

SEQ ID NO: 43605 - RNA, 32 nt, Human
agaaggaccccagcucuugaagggcugagugg

SEQ ID NO: 43606 - RNA, 21 nt, Human
agaaggacccggaggggccug

SEQ ID NO: 43607 - RNA, 32 nt, Human
agaaggacccuccccaacccuggagacacccu

SEQ ID NO: 43608 - RNA, 32 nt, Human
agaaggaccucccagcccccaaaggaucuccc

SEQ ID NO: 43609 - RNA, 32 nt, Human
agaaggagacaccuccuggaggccccaguccc

SEQ ID NO: 43610 - RNA, 32 nt, Human
agaaggagagagaagaagaugaaguuugccag

SEQ ID NO: 43611 - RNA, 32 nt, Human
agaaggagagagacccgagggagccaccugcc

SEQ ID NO: 43612 - RNA, 21 nt, Human
agaaggagaggaaugggggag

SEQ ID NO: 43613 - RNA, 32 nt, Human
agaaggagaggagaaaaugaagaggcaugaag

SEQ ID NO: 43614 - RNA, 20 nt, Human
agaaggagagugauggggag

SEQ ID NO: 43615 - RNA, 32 nt, Human
agaaggagcaagaagcaacugggauggcucag

SEQ ID NO: 43616 - RNA, 32 nt, Human
agaaggagcacccaccucccucccucugugac

SEQ ID NO: 43617 - RNA, 18 nt, Human
agaaggagcagcugggga

SEQ ID NO: 43618 - RNA, 32 nt, Human
agaaggagccacggaagaggcggaagguggac

SEQ ID NO: 43619 - RNA, 32 nt, Human
agaaggagccaucuccaucuugaaggaacuca

SEQ ID NO: 43620 - RNA, 18 nt, Human
agaaggagcccaggcaca

SEQ ID NO: 43621 - RNA, 32 nt, Human
agaaggagccucugcugccucccaggcugcug

SEQ ID NO: 43622 - RNA, 32 nt, Human
agaaggagccuggagcccaugaggcagccagc

SEQ ID NO: 43623 - RNA, 32 nt, Human
agaaggaggaaaugcauucucagagaagccaa

SEQ ID NO: 43624 - RNA, 32 nt, Human
agaaggaggaaccuuuuccuucugcagccccu

SEQ ID NO: 43625 - RNA, 32 nt, Human
agaaggaggaggaggaagagagugugaaacag

SEQ ID NO: 43626 - RNA, 32 nt, Human
agaaggaggaggaggaagaggaggagcgcagu

SEQ ID NO: 43627 - RNA, 32 nt, Human
agaaggaggaggaggagagaaaggcggcucuu

SEQ ID NO: 43628 - RNA, 32 nt, Human
agaaggaggaggaggagagaggaaagagcgga

SEQ ID NO: 43629 - RNA, 32 nt, Human
agaaggaggaggaggaggaggaggaggagggg

SEQ ID NO: 43630 - RNA, 32 nt, Human
agaaggaggaggaggaggucggaaagugggaa

SEQ ID NO: 43631 - RNA, 32 nt, Human
agaaggaggaggaggagguuuaggucaagaag

SEQ ID NO: 43632 - RNA, 19 nt, Human
agaaggaggaggcagaaug

SEQ ID NO: 43633 - RNA, 18 nt, Human
agaaggaggcagcaggga

SEQ ID NO: 43634 - RNA, 20 nt, Human
agaaggaggcaggaagggag

SEQ ID NO: 43635 - RNA, 32 nt, Human
agaaggaggcggaagagagccaccggccagac

SEQ ID NO: 43636 - RNA, 19 nt, Human
agaaggaggucagccugga

SEQ ID NO: 43637 - RNA, 19 nt, Human
agaaggaggugagggggcc

SEQ ID NO: 43638 - RNA, 32 nt, Human
agaaggagguggcgcaagagccuggacgcacg

SEQ ID NO: 43639 - RNA, 32 nt, Human
agaaggagguguuggggugagguggugguguu

SEQ ID NO: 43640 - RNA, 32 nt, Human
agaaggagucccccaugcccugccugaaauga

SEQ ID NO: 43641 - RNA, 32 nt, Human
agaaggagugaaacaugugaacuuucuggcga

SEQ ID NO: 43642 - RNA, 32 nt, Human
agaaggagugcucuucaucaacuaauagagca

SEQ ID NO: 43643 - RNA, 32 nt, Human
agaaggauagaaccuggaagaucaauaucucc

SEQ ID NO: 43644 - RNA, 32 nt, Human
agaaggaucaccugaguccaggaauuugagac

SEQ ID NO: 43645 - RNA, 32 nt, Human
agaaggaucaccuugaggccaggaguuuaagg

SEQ ID NO: 43646 - RNA, 32 nt, Human
agaaggaucuagucugcccacuacauucucaa

SEQ ID NO: 43647 - RNA, 32 nt, Human
agaaggaugccaugaaggaaaugacugcuuug

SEQ ID NO: 43648 - RNA, 32 nt, Human
agaaggaugggaagagaaaaggagcaguuuua

SEQ ID NO: 43649 - RNA, 22 nt, Human
agaaggaugggggccaucuauc

SEQ ID NO: 43650 - RNA, 22 nt, Human
agaaggauuguuaaauguggga

SEQ ID NO: 43651 - RNA, 32 nt, Human
agaaggcaaacacacccaccuucauccugagc

SEQ ID NO: 43652 - RNA, 25 nt, Human
agaaggcaacacaaauugcaaggga

SEQ ID NO: 43653 - RNA, 32 nt, Human
agaaggcaaguuggcaggaguggagaccacag

SEQ ID NO: 43654 - RNA, 32 nt, Human
agaaggcacaauaugggcacuuuaaaugaagc

SEQ ID NO: 43655 - RNA, 32 nt, Human
agaaggcacacagagauucuggaucuccugcu

SEQ ID NO: 43656 - RNA, 32 nt, Human
agaaggcacuagcuuccugggccccucacccc

SEQ ID NO: 43657 - RNA, 32 nt, Human
agaaggcagaagggagagaugaagcccaagaa

SEQ ID NO: 43658 - RNA, 20 nt, Human
agaaggcagagaaaggagga

SEQ ID NO: 43659 - RNA, 32 nt, Human
agaaggcagagcagugucugugcugccagguc

SEQ ID NO: 43660 - RNA, 32 nt, Human
agaaggcagaggaggagggagggagggaagga

SEQ ID NO: 43661 - RNA, 22 nt, Human
agaaggcagagggagagggaga

SEQ ID NO: 43662 - RNA, 32 nt, Human
agaaggcagaucugggagacugcugcaguguc

SEQ ID NO: 43663 - RNA, 32 nt, Human
agaaggcagcugagacugggcccagugagggc

SEQ ID NO: 43664 - RNA, 31 nt, Human
agaaggcaggagagagacacaagcuggcaaa

SEQ ID NO: 43665 - RNA, 32 nt, Human
agaaggcaggagagagacacaagcuggcaaag

SEQ ID NO: 43666 - RNA, 27 nt, Human
agaaggcaggagggcaaaaggggccug

SEQ ID NO: 43667 - RNA, 32 nt, Human
agaaggcaggcaggaagagacagagauggaug

SEQ ID NO: 43668 - RNA, 32 nt, Human
agaaggcaggcagggcccagugagaggggagc

SEQ ID NO: 43669 - RNA, 32 nt, Human
agaaggcagggugagggaucugggagagcagg

SEQ ID NO: 43670 - RNA, 32 nt, Human
agaaggcagguuuugugaaggccaggcagggu

SEQ ID NO: 43671 - RNA, 22 nt, Human
agaaggcaguagaaaggaggaa

SEQ ID NO: 43672 - RNA, 32 nt, Human
agaaggcaguuccaguuuuagcacagauuugu

SEQ ID NO: 43673 - RNA, 31 nt, Human
agaaggcaguuuccucuacuugcccaagagc

SEQ ID NO: 43674 - RNA, 32 nt, Human
agaaggcauccagcaagaacugcacaagaaac

SEQ ID NO: 43675 - RNA, 32 nt, Human
agaaggcaugaaauugucuagcagagcagggg

SEQ ID NO: 43676 - RNA, 32 nt, Human
agaaggcauggcuggggaagccucaggaaaug

SEQ ID NO: 43677 - RNA, 32 nt, Human
agaaggcauuguucuccagacacaucuaugga

SEQ ID NO: 43678 - RNA, 32 nt, Human
agaaggccaagaaggaggaugaagcccagccu

SEQ ID NO: 43679 - RNA, 32 nt, Human
agaaggccaccccgccuggaggcacaggccau

SEQ ID NO: 43680 - RNA, 25 nt, Human
agaaggccaccucuaauggggccug

SEQ ID NO: 43681 - RNA, 32 nt, Human
agaaggccacuggugugcaggugugggcuccu

SEQ ID NO: 43682 - RNA, 32 nt, Human
agaaggccagagcagagaggggcacacagaga

SEQ ID NO: 43683 - RNA, 32 nt, Human
agaaggccagcccacugggcccuggggcugcc

SEQ ID NO: 43684 - RNA, 32 nt, Human
agaaggccagccccagcggcuuccccagccuc

SEQ ID NO: 43685 - RNA, 23 nt, Human
agaaggccagggccaggagccug

SEQ ID NO: 43686 - RNA, 32 nt, Human
agaaggccagugcccaggcauaggguuagcuc

SEQ ID NO: 43687 - RNA, 32 nt, Human
agaaggcccacuguggagccagccucccuaug

SEQ ID NO: 43688 - RNA, 32 nt, Human
agaaggcccagccugggacccucugggcugcu

SEQ ID NO: 43689 - RNA, 32 nt, Human
agaaggcccaggaagugacggccgccucccgg

SEQ ID NO: 43690 - RNA, 23 nt, Human
agaaggccccuccagggggacug

SEQ ID NO: 43691 - RNA, 24 nt, Human
agaaggcccggaagaggggaccug

SEQ ID NO: 43692 - RNA, 32 nt, Human
agaaggcccucaauaaaggcuuccugaggaac

SEQ ID NO: 43693 - RNA, 20 nt, Human
agaaggccgagggcggggcu

SEQ ID NO: 43694 - RNA, 32 nt, Human
agaaggccgggggcucaagaccuaccuguuga

SEQ ID NO: 43695 - RNA, 32 nt, Human
agaaggccguggggagugggggccagugccug

SEQ ID NO: 43696 - RNA, 32 nt, Human
agaaggccuccugucccugccugcucugggug

SEQ ID NO: 43697 - RNA, 32 nt, Human
agaaggccucucucuucuguggcccccaccug

SEQ ID NO: 43698 - RNA, 32 nt, Human
agaaggccugggaggggaauggggcuggagac

SEQ ID NO: 43699 - RNA, 32 nt, Human
agaaggccugggggaaggaugggaggaugcuu

SEQ ID NO: 43700 - RNA, 28 nt, Human
agaaggccuggugcugcccuggcaucag

SEQ ID NO: 43701 - RNA, 32 nt, Human
agaaggccuguaugcugggccaguggagcagu

SEQ ID NO: 43702 - RNA, 32 nt, Human
agaaggccuuggugggggugggggaggagguu

SEQ ID NO: 43703 - RNA, 32 nt, Human
agaaggccuuucuccccauggucagccacacg

SEQ ID NO: 43704 - RNA, 32 nt, Human
agaaggccuuugugcccccaaaaagaggcgaa

SEQ ID NO: 43705 - RNA, 20 nt, Human
agaaggcggcugcugggcag

SEQ ID NO: 43706 - RNA, 24 nt, Human
agaaggcggggcuggcagccucca

SEQ ID NO: 43707 - RNA, 32 nt, Human
agaaggcucuuaucaauguuauuuauuugauu

SEQ ID NO: 43708 - RNA, 32 nt, Human
agaaggcugaggcagcuggagcuacuucuggg

SEQ ID NO: 43709 - RNA, 32 nt, Human
agaaggcugcagcccagcccgccugagacacg

SEQ ID NO: 43710 - RNA, 32 nt, Human
agaaggcugcccgcgcggccagccugcaggag

SEQ ID NO: 43711 - RNA, 22 nt, Human
agaaggcugccuccugcugcug

SEQ ID NO: 43712 - RNA, 32 nt, Human
agaaggcugcuacgaggaguacagaggccgcu

SEQ ID NO: 43713 - RNA, 32 nt, Human
agaaggcuggacugcauaagcauggcaguuuu

SEQ ID NO: 43714 - RNA, 22 nt, Human
agaaggcuggggcuauuuacca

SEQ ID NO: 43715 - RNA, 22 nt, Human
agaaggcugguggaaaaaggcc

SEQ ID NO: 43716 - RNA, 20 nt, Human
agaaggcuguucacuuacua

SEQ ID NO: 43717 - RNA, 32 nt, Human
agaaggcuugcagcccagaaggagccagaaga

SEQ ID NO: 43718 - RNA, 19 nt, Human
agaagggaaaagacuggaa

SEQ ID NO: 43719 - RNA, 32 nt, Human
agaagggaaaagguauuuuuguuuuuguuguu

SEQ ID NO: 43720 - RNA, 32 nt, Human
agaagggaaacugaggagagacccgcaacuca

SEQ ID NO: 43721 - RNA, 32 nt, Human
agaagggaaaggcagagggugugauuauggug

SEQ ID NO: 43722 - RNA, 32 nt, Human
agaagggaaauaccaucaaaagacugaacauc

SEQ ID NO: 43723 - RNA, 32 nt, Human
agaagggaaggaaggaaagaagagaggaaaga

SEQ ID NO: 43724 - RNA, 32 nt, Human
agaagggaaggcggagggcggcggggacaaga

SEQ ID NO: 43725 - RNA, 32 nt, Human
agaagggaaggugggugggcaccugagagauu

SEQ ID NO: 43726 - RNA, 31 nt, Human
agaagggaagugucccacaccaggacagaac

SEQ ID NO: 43727 - RNA, 32 nt, Human
agaagggaauacuguauuuuuccacuagaaac

SEQ ID NO: 43728 - RNA, 32 nt, Human
agaagggacagacagagguucucagugaugag

SEQ ID NO: 43729 - RNA, 32 nt, Human
agaagggacccgaggaggaggcuuccaucacg

SEQ ID NO: 43730 - RNA, 18 nt, Human
agaagggagagccgggga

SEQ ID NO: 43731 - RNA, 32 nt, Human
agaagggagagggaggaggccggggcgggagu

SEQ ID NO: 43732 - RNA, 32 nt, Human
agaagggagagggcccgucggacagccacagc

SEQ ID NO: 43733 - RNA, 32 nt, Human
agaagggagauugaagaaggugggcccagggg

SEQ ID NO: 43734 - RNA, 32 nt, Human
agaagggagcucuggagcaggaccagcugggg

SEQ ID NO: 43735 - RNA, 16 nt, Human
agaagggagcugggga

SEQ ID NO: 43736 - RNA, 32 nt, Human
agaagggagcuuccaaccuuuuaacuugagga

SEQ ID NO: 43737 - RNA, 22 nt, Human
agaagggaggcauggcaaggga

SEQ ID NO: 43738 - RNA, 32 nt, Human
agaagggaggggcuggggguucccaggagcca

SEQ ID NO: 43739 - RNA, 32 nt, Human
agaagggauaccgucuccuugaagaggaaacu

SEQ ID NO: 43740 - RNA, 32 nt, Human
agaagggauccggaugggggagcucuguacag

SEQ ID NO: 43741 - RNA, 18 nt, Human
agaagggaucuaagcaca

SEQ ID NO: 43742 - RNA, 32 nt, Human
agaagggauggagagaaagaaugaaguagaug

SEQ ID NO: 43743 - RNA, 21 nt, Human
agaagggauuucaccauguug

SEQ ID NO: 43744 - RNA, 32 nt, Human
agaagggcagcaccucuguguuuaauggaaau

SEQ ID NO: 43745 - RNA, 32 nt, Human
agaagggcagggaggagguuguccuggagagg

SEQ ID NO: 43746 - RNA, 32 nt, Human
agaagggcagggcugaggccucucauuccaga

SEQ ID NO: 43747 - RNA, 32 nt, Human
agaagggcaguuacuggagacuguaucugcag

SEQ ID NO: 43748 - RNA, 32 nt, Human
agaagggccaguccugccuggccaggcagauc

SEQ ID NO: 43749 - RNA, 32 nt, Human
agaagggccccaaugccaacucuuagucuuuu

SEQ ID NO: 43750 - RNA, 32 nt, Human
agaagggccuggugccggccugcugccccggc

SEQ ID NO: 43751 - RNA, 32 nt, Human
agaagggcucagggcaccagcaaccaagccag

SEQ ID NO: 43752 - RNA, 32 nt, Human
agaagggcugagcugaaaacuucacuccuccu

SEQ ID NO: 43753 - RNA, 32 nt, Human
agaagggcugggaggcgggcagcagccucugg

SEQ ID NO: 43754 - RNA, 32 nt, Human
agaagggcugggaggcgggcagcagccucuug

SEQ ID NO: 43755 - RNA, 32 nt, Human
agaagggcuuacaggcauggacaugcagguug

SEQ ID NO: 43756 - RNA, 32 nt, Human
agaaggggaaacugaggcccagggaggagagu

SEQ ID NO: 43757 - RNA, 32 nt, Human
agaaggggagaaacaggauggaagggugguuu

SEQ ID NO: 43758 - RNA, 32 nt, Human
agaaggggagaaagcuuauggcugggucuggu

SEQ ID NO: 43759 - RNA, 32 nt, Human
agaaggggagggguaggaggagagggaggagg

SEQ ID NO: 43760 - RNA, 32 nt, Human
agaaggggagugagaguucagggaggcccuuc

SEQ ID NO: 43761 - RNA, 32 nt, Human
agaaggggaguuccacuucucagucccgcaug

SEQ ID NO: 43762 - RNA, 32 nt, Human
agaaggggcaacucgugugucuucccaguguc

SEQ ID NO: 43763 - RNA, 32 nt, Human
agaaggggcagaagaaccacauuuuucauuua

SEQ ID NO: 43764 - RNA, 32 nt, Human
agaaggggcgaacugcuugucuugaggagguc

SEQ ID NO: 43765 - RNA, 22 nt, Human
agaaggggcuggagagggccug

SEQ ID NO: 43766 - RNA, 32 nt, Human
agaagggggcagguaaagcagagauuuuagca

SEQ ID NO: 43767 - RNA, 32 nt, Human
agaagggggcuggccccaggaggaggaggaaa

SEQ ID NO: 43768 - RNA, 32 nt, Human
agaagggggcuggguaggcaagcacuccuugg

SEQ ID NO: 43769 - RNA, 32 nt, Human
agaagggggcuuucaaccaggcucacccaggc

SEQ ID NO: 43770 - RNA, 21 nt, Human
agaaggggucucacuauguug

SEQ ID NO: 43771 - RNA, 32 nt, Human
agaaggggugaugagugagaggcgagugguag

SEQ ID NO: 43772 - RNA, 21 nt, Human
agaagggguuucaccacauug

SEQ ID NO: 43773 - RNA, 32 nt, Human
agaagggucauggauggugaggucaguacugc

SEQ ID NO: 43774 - RNA, 32 nt, Human
agaaggguccuucccucuccccaagacuuggu

SEQ ID NO: 43775 - RNA, 32 nt, Human
agaagggugccacauuuuuccagcuuuaagug

SEQ ID NO: 43776 - RNA, 31 nt, Human
agaaggguggagagagaaucugggaagagaa

SEQ ID NO: 43777 - RNA, 21 nt, Human
agaagggugggaacccgggag

SEQ ID NO: 43778 - RNA, 32 nt, Human
agaaggguguaauuaaggauuuccacccccga

SEQ ID NO: 43779 - RNA, 22 nt, Human
agaagguaaaccccacuuacca

SEQ ID NO: 43780 - RNA, 32 nt, Human
agaagguacagauaccucagauucgggaaacu

SEQ ID NO: 43781 - RNA, 32 nt, Human
agaagguaccuugcccaggucuggcacauagu

SEQ ID NO: 43782 - RNA, 32 nt, Human
agaagguacugugggccauggccacaccugau

SEQ ID NO: 43783 - RNA, 32 nt, Human
agaagguagauaagaauuaaaaggguuuaauu

SEQ ID NO: 43784 - RNA, 32 nt, Human
agaagguagauccuaaaaagcauggugagagg

SEQ ID NO: 43785 - RNA, 32 nt, Human
agaagguagcagacagacagacggaucuaacc

SEQ ID NO: 43786 - RNA, 32 nt, Human
agaagguagguauauugguggcugaggucucu

SEQ ID NO: 43787 - RNA, 32 nt, Human
agaagguaguacaggcuucacuuccucaccaa

SEQ ID NO: 43788 - RNA, 32 nt, Human
agaagguauguacugccugaggucacaugaca

SEQ ID NO: 43789 - RNA, 32 nt, Human
agaagguauguggcauuuauuuggauaaaauu

SEQ ID NO: 43790 - RNA, 32 nt, Human
agaagguccaauaggcaggguuaguauaaugg

SEQ ID NO: 43791 - RNA, 32 nt, Human
agaaggucccauuccaggucuugcccaagucu

SEQ ID NO: 43792 - RNA, 22 nt, Human
agaaggucccucccaucugcca

SEQ ID NO: 43793 - RNA, 31 nt, Human
agaagguccuggucucccaugcccaagggau

SEQ ID NO: 43794 - RNA, 23 nt, Human
agaaggucuacaccugcaaggga

SEQ ID NO: 43795 - RNA, 19 nt, Human
agaaggucucacuauguug

SEQ ID NO: 43796 - RNA, 32 nt, Human
agaaggucucccauguguagacagugcgugga

SEQ ID NO: 43797 - RNA, 32 nt, Human
agaaggucucugaagaucuggacugaggaccc

SEQ ID NO: 43798 - RNA, 19 nt, Human
agaaggucugagagggaag

SEQ ID NO: 43799 - RNA, 32 nt, Human
agaaggucugcagcuucacuccugagccagcg

SEQ ID NO: 43800 - RNA, 32 nt, Human
agaaggucuucaguuuccagaagaaccaaagc

SEQ ID NO: 43801 - RNA, 32 nt, Human
agaaggugaacccagaugaggcucaucaggaa

SEQ ID NO: 43802 - RNA, 32 nt, Human
agaaggugaaggcucugaaagcaaagaugcag

SEQ ID NO: 43803 - RNA, 32 nt, Human
agaaggugaaugacguccucaagagcggcugg

SEQ ID NO: 43804 - RNA, 32 nt, Human
agaaggugaguuccuggaccucagggaggaag

SEQ ID NO: 43805 - RNA, 32 nt, Human
agaaggugaguuuauguaaagauauggcaucu

SEQ ID NO: 43806 - RNA, 32 nt, Human
agaaggugaugaggcagagagugaacaugaca

SEQ ID NO: 43807 - RNA, 32 nt, Human
agaaggugccaggucagcaggagcagcagcag

SEQ ID NO: 43808 - RNA, 32 nt, Human
agaaggugcccagcgcuacuucccagguuuuu

SEQ ID NO: 43809 - RNA, 32 nt, Human
agaaggugccccuucaggcaccuaggggagag

SEQ ID NO: 43810 - RNA, 32 nt, Human
agaaggugccugaagaagucucucuucucucu

SEQ ID NO: 43811 - RNA, 32 nt, Human
agaaggugcugcaggacaaccuggacaaguug

SEQ ID NO: 43812 - RNA, 26 nt, Human
agaaggugcuugguguucgccugcca

SEQ ID NO: 43813 - RNA, 32 nt, Human
agaagguggaaggucccagagccccggagccu

SEQ ID NO: 43814 - RNA, 32 nt, Human
agaagguggagggagacgagaagccgccgaga

SEQ ID NO: 43815 - RNA, 32 nt, Human
agaagguggagguggcagugagccgagaucac

SEQ ID NO: 43816 - RNA, 32 nt, Human
agaagguggcaucugacugcggcucauacagg

SEQ ID NO: 43817 - RNA, 32 nt, Human
agaagguguguaggguggguaguggaagugac

SEQ ID NO: 43818 - RNA, 32 nt, Human
agaagguguuugcuagacaaaggggcuugcuu

SEQ ID NO: 43819 - RNA, 32 nt, Human
agaagguuaaagcugacaacaugugaaacauc

SEQ ID NO: 43820 - RNA, 32 nt, Human
agaagguuauucuagcaggaguaccaguacag

SEQ ID NO: 43821 - RNA, 32 nt, Human
agaagguuccaagaacucuggugucugaccua

SEQ ID NO: 43822 - RNA, 32 nt, Human
agaagguucugaccagcuucugcagaggauaa

SEQ ID NO: 43823 - RNA, 32 nt, Human
agaagguucuucuuauuuugugggcugguugc

SEQ ID NO: 43824 - RNA, 32 nt, Human
agaagguugggguuccagaaaggcaucugugu

SEQ ID NO: 43825 - RNA, 32 nt, Human
agaagguugucaagcaaagccuuugagcguuu

SEQ ID NO: 43826 - RNA, 32 nt, Human
agaagguuucacuaagugauuugggccugagg

SEQ ID NO: 43827 - RNA, 32 nt, Human
agaagguuuccagagauagaagauaacucagg

SEQ ID NO: 43828 - RNA, 32 nt, Human
agaagguuuccuucucuuuuucaacuucaugu

SEQ ID NO: 43829 - RNA, 32 nt, Human
agaagguuuggguguccuccugggguucuuuu

SEQ ID NO: 43830 - RNA, 32 nt, Human
agaaguaaacucauccacuuugcucagagaag

SEQ ID NO: 43831 - RNA, 32 nt, Human
agaaguaaauugcaaacaaaucugucaguugu

SEQ ID NO: 43832 - RNA, 32 nt, Human
agaaguaacaaaucaguggccuuauggagaca

SEQ ID NO: 43833 - RNA, 32 nt, Human
agaaguaacagcauguguuuauccugauggaa

SEQ ID NO: 43834 - RNA, 32 nt, Human
agaaguaagccuuggacuguagcugauuauaa

SEQ ID NO: 43835 - RNA, 32 nt, Human
agaaguaaugcuuuccaucaggguaaauaaga

SEQ ID NO: 43836 - RNA, 32 nt, Human
agaaguacucacugguaauuagcuaccaucuu

SEQ ID NO: 43837 - RNA, 32 nt, Human
agaaguacugacuggucuccucuaucguguuu

SEQ ID NO: 43838 - RNA, 32 nt, Human
agaaguacugggugcuggagggagagcucggg

SEQ ID NO: 43839 - RNA, 18 nt, Human
agaaguagauggagcaga

SEQ ID NO: 43840 - RNA, 32 nt, Human
agaaguagcccaaacucuucccucugcugaca

SEQ ID NO: 43841 - RNA, 32 nt, Human
agaaguaggcuggaggaugaguugggacaguc

SEQ ID NO: 43842 - RNA, 32 nt, Human
agaaguagguccugucggcccugcugcugucc

SEQ ID NO: 43843 - RNA, 32 nt, Human
agaaguaguaaggcugggcacuguggcucacg

SEQ ID NO: 43844 - RNA, 32 nt, Human
agaaguaguacaccuugucaucaucacccacu

SEQ ID NO: 43845 - RNA, 32 nt, Human
agaaguagugagucaguguggaagagagguga

SEQ ID NO: 43846 - RNA, 32 nt, Human
agaaguaguuccuguccuuaaggaauuuccuu

SEQ ID NO: 43847 - RNA, 18 nt, Human
agaaguaucugccuuuag

SEQ ID NO: 43848 - RNA, 32 nt, Human
agaaguauucuuuccauuuuucuucugggaaa

SEQ ID NO: 43849 - RNA, 32 nt, Human
agaagucaacucuggcacccacccucaucaaa

SEQ ID NO: 43850 - RNA, 32 nt, Human
agaagucacagaggcccugggcacccagagcc

SEQ ID NO: 43851 - RNA, 32 nt, Human
agaagucacugcuugaggcucagcugcugugu

SEQ ID NO: 43852 - RNA, 32 nt, Human
agaagucagacucacuagacuuuugguucgag

SEQ ID NO: 43853 - RNA, 32 nt, Human
agaagucaggagagagggugaagcggagcagc

SEQ ID NO: 43854 - RNA, 32 nt, Human
agaagucaggguggaauccacacagagcgcau

SEQ ID NO: 43855 - RNA, 32 nt, Human
agaagucagugaucauucaaaagacucagaga

SEQ ID NO: 43856 - RNA, 32 nt, Human
agaagucauccuggagcacagcucuucccacg

SEQ ID NO: 43857 - RNA, 32 nt, Human
agaagucaugcagguacugagcacagguggcc

SEQ ID NO: 43858 - RNA, 32 nt, Human
agaagucauguaacuguggcugccucuuuuca

SEQ ID NO: 43859 - RNA, 32 nt, Human
agaaguccaaaccucagcagcacacaauauac

SEQ ID NO: 43860 - RNA, 32 nt, Human
agaaguccaagaccagccuggccaacauggug

SEQ ID NO: 43861 - RNA, 32 nt, Human
agaaguccagcaugcuugaugggugaagagag

SEQ ID NO: 43862 - RNA, 32 nt, Human
agaaguccagccgccaagcccagccuuccccg

SEQ ID NO: 43863 - RNA, 32 nt, Human
agaaguccagcugugagucucuccccaaagca

SEQ ID NO: 43864 - RNA, 32 nt, Human
agaaguccagggcugcacuguggugugagggu

SEQ ID NO: 43865 - RNA, 18 nt, Human
agaaguccaggguugcuu

SEQ ID NO: 43866 - RNA, 32 nt, Human
agaagucccaagacugucacucugugcaagac

SEQ ID NO: 43867 - RNA, 32 nt, Human
agaagucccagggaguggaggccccugccaug

SEQ ID NO: 43868 - RNA, 32 nt, Human
agaagucccuuuccuguucugucucuucauug

SEQ ID NO: 43869 - RNA, 32 nt, Human
agaaguccgaucucccuagggccccaccugga

SEQ ID NO: 43870 - RNA, 32 nt, Human
agaaguccuagggguuuaacuguacauacuac

SEQ ID NO: 43871 - RNA, 32 nt, Human
agaaguccuauuguucacgcugggcaguugcu

SEQ ID NO: 43872 - RNA, 32 nt, Human
agaaguccuguagggagaugggcaguuaccuu

SEQ ID NO: 43873 - RNA, 19 nt, Human
agaagucggccagcagcuc

SEQ ID NO: 43874 - RNA, 32 nt, Human
agaagucgugagccugcgguccagucagucca

SEQ ID NO: 43875 - RNA, 21 nt, Human
agaagucuuaagucuguggca

SEQ ID NO: 43876 - RNA, 32 nt, Human
agaagucuugugggacagagacuugaguuagg

SEQ ID NO: 43877 - RNA, 32 nt, Human
agaagugaaaagguccucugaggaucagauca

SEQ ID NO: 43878 - RNA, 32 nt, Human
agaagugaauacugcaacacugucucaaaggu

SEQ ID NO: 43879 - RNA, 32 nt, Human
agaagugacagccugcuggcaguccucacagc

SEQ ID NO: 43880 - RNA, 19 nt, Human
agaagugaccuagaaggca

SEQ ID NO: 43881 - RNA, 32 nt, Human
agaagugacuccccuucucccaucagcccaaa

SEQ ID NO: 43882 - RNA, 32 nt, Human
agaagugagccagccacugagaucacauugca

SEQ ID NO: 43883 - RNA, 22 nt, Human
agaagugaggauguagaagcca

SEQ ID NO: 43884 - RNA, 32 nt, Human
agaagugaguaccugcagaaaaguagguaaag

SEQ ID NO: 43885 - RNA, 32 nt, Human
agaagugaugcccaacuuucugccagauguag

SEQ ID NO: 43886 - RNA, 32 nt, Human
agaagugaugcuuuugccaguggaugaucugg

SEQ ID NO: 43887 - RNA, 32 nt, Human
agaagugcaagaccagccugcgcaaacagcaa

SEQ ID NO: 43888 - RNA, 32 nt, Human
agaagugcaauuuuaucuccugccuuucauuc

SEQ ID NO: 43889 - RNA, 32 nt, Human
agaagugcagagaguaagguguccuuauguug

SEQ ID NO: 43890 - RNA, 32 nt, Human
agaagugcagcucuguuaggagccuugaaggu

SEQ ID NO: 43891 - RNA, 31 nt, Human
agaagugcagcugcugcgccugugucgggac

SEQ ID NO: 43892 - RNA, 31 nt, Human
agaagugcagcugcugugccuguguccggac

SEQ ID NO: 43893 - RNA, 32 nt, Human
agaagugcagcugcugugccuguguccggaca

SEQ ID NO: 43894 - RNA, 31 nt, Human
agaagugcagcugcugugccugugucgggac

SEQ ID NO: 43895 - RNA, 32 nt, Human
agaagugcagcugcugugccugugucgggaca

SEQ ID NO: 43896 - RNA, 31 nt, Human
agaagugccgcugcugugccuguguugggag

SEQ ID NO: 43897 - RNA, 32 nt, Human
agaagugccgcugcugugccuguguugggaga

SEQ ID NO: 43898 - RNA, 32 nt, Human
agaagugcgaacccuuugcaguggggaggagc

SEQ ID NO: 43899 - RNA, 32 nt, Human
agaagugcucugccugccagugcagugcccag

SEQ ID NO: 43900 - RNA, 32 nt, Human
agaagugcugggagcagcagcuggggaagcug

SEQ ID NO: 43901 - RNA, 32 nt, Human
agaagugcuguaagucugaagcuguuccccgc

SEQ ID NO: 43902 - RNA, 23 nt, Human
agaaguggacaucccacauguuc

SEQ ID NO: 43903 - RNA, 22 nt, Human
agaaguggagaagcagaggcca

SEQ ID NO: 43904 - RNA, 19 nt, Human
agaaguggagcguaagcca

SEQ ID NO: 43905 - RNA, 31 nt, Human
agaaguggaguugguggaugggugggcaugg

SEQ ID NO: 43906 - RNA, 21 nt, Human
agaaguggaugcccacaugcc

SEQ ID NO: 43907 - RNA, 32 nt, Human
agaaguggcacguccuggagcugcagaggcga

SEQ ID NO: 43908 - RNA, 32 nt, Human
agaaguggcagugcccaacagcuuugggaugg

SEQ ID NO: 43909 - RNA, 32 nt, Human
agaaguggcugaaaaugaauucugagcuuucu

SEQ ID NO: 43910 - RNA, 32 nt, Human
agaaguggcugcagauuggagcccaaagccuu

SEQ ID NO: 43911 - RNA, 32 nt, Human
agaaguggcuuccuuuggaggugggagugggc

SEQ ID NO: 43912 - RNA, 22 nt, Human
agaaguggcuuggagggaacuu

SEQ ID NO: 43913 - RNA, 32 nt, Human
agaagugggaaagagagaggaaugggauggag

SEQ ID NO: 43914 - RNA, 32 nt, Human
agaagugggacaucgagggcucugcuguccuc

SEQ ID NO: 43915 - RNA, 32 nt, Human
agaagugggaggauagcuugggcccaggagau

SEQ ID NO: 43916 - RNA, 20 nt, Human
agaagugggauuagaagaca

SEQ ID NO: 43917 - RNA, 32 nt, Human
agaagugggcaggcuuggcugaaaugagaacu

SEQ ID NO: 43918 - RNA, 32 nt, Human
agaagugggcuuagagggguuuucccugcucu

SEQ ID NO: 43919 - RNA, 32 nt, Human
agaagugggugguggcagccuccacccuuucu

SEQ ID NO: 43920 - RNA, 32 nt, Human
agaaguggugaaugucauggagcccagcugaa

SEQ ID NO: 43921 - RNA, 23 nt, Human
agaaguggugcgccaagcacagc

SEQ ID NO: 43922 - RNA, 32 nt, Human
agaagugucagauggcaguggaagcaugugug

SEQ ID NO: 43923 - RNA, 19 nt, Human
agaagugucccagaaguca

SEQ ID NO: 43924 - RNA, 32 nt, Human
agaagugugagucccaguuccacccacaacca

SEQ ID NO: 43925 - RNA, 32 nt, Human
agaagugugcauguacacacaccacacacaca

SEQ ID NO: 43926 - RNA, 20 nt, Human
agaaguguggcacugcuaua

SEQ ID NO: 43927 - RNA, 32 nt, Human
agaaguguuuauuuucuucccuucccuucccu

SEQ ID NO: 43928 - RNA, 32 nt, Human
agaaguguuucuggugggcucugcgggagaag

SEQ ID NO: 43929 - RNA, 32 nt, Human
agaaguguuugcccacacagcaaaugguccau

SEQ ID NO: 43930 - RNA, 32 nt, Human
agaaguuaaaaaggagagguggaaccuuccca

SEQ ID NO: 43931 - RNA, 32 nt, Human
agaaguuagaguccagccuggccaacauggug

SEQ ID NO: 43932 - RNA, 32 nt, Human
agaaguuagggagggauaggagcccuggguag

SEQ ID NO: 43933 - RNA, 32 nt, Human
agaaguuauacaacauacaggcuucuaggucu

SEQ ID NO: 43934 - RNA, 32 nt, Human
agaaguuaucucccucucccugugaugccuug

SEQ ID NO: 43935 - RNA, 32 nt, Human
agaaguuaugccacugccacuuuugcuugccc

SEQ ID NO: 43936 - RNA, 32 nt, Human
agaaguuauuuuucccuuccagaggggucuau

SEQ ID NO: 43937 - RNA, 32 nt, Human
agaaguucaagaccagccugaccaacaucgug

SEQ ID NO: 43938 - RNA, 32 nt, Human
agaaguucaagaccagccugagcaacaugaug

SEQ ID NO: 43939 - RNA, 32 nt, Human
agaaguucaagaccagccugcacaucacgaga

SEQ ID NO: 43940 - RNA, 32 nt, Human
agaaguucaagaccagccuggccaacaugggg

SEQ ID NO: 43941 - RNA, 32 nt, Human
agaaguucaagaccagccuggccaacauggug

SEQ ID NO: 43942 - RNA, 32 nt, Human
agaaguucaaggccagccuggacgacauagcg

SEQ ID NO: 43943 - RNA, 32 nt, Human
agaaguucacuggagggcccagccuggggaaa

SEQ ID NO: 43944 - RNA, 32 nt, Human
agaaguucaggagagaaagaagucauaaccau

SEQ ID NO: 43945 - RNA, 32 nt, Human
agaaguucaucaauggcuuggcuggaggacaa

SEQ ID NO: 43946 - RNA, 32 nt, Human
agaaguucauguccaaacguccucuuuaguuu

SEQ ID NO: 43947 - RNA, 32 nt, Human
agaaguucauuugcugaaucgcugaaguucau

SEQ ID NO: 43948 - RNA, 32 nt, Human
agaaguuccacugcacuccagccuggguuaca

SEQ ID NO: 43949 - RNA, 32 nt, Human
agaaguuccuggggcuccguguugcaguucag

SEQ ID NO: 43950 - RNA, 32 nt, Human
agaaguucgagaccagccuaaccaacauggug

SEQ ID NO: 43951 - RNA, 32 nt, Human
agaaguucgagaccagccugagcaacauggug

SEQ ID NO: 43952 - RNA, 32 nt, Human
agaaguucgagaccagccuggccaacauggug

SEQ ID NO: 43953 - RNA, 32 nt, Human
agaaguucgagaccagccuuggccaacauggc

SEQ ID NO: 43954 - RNA, 32 nt, Human
agaaguucgaggccagccuggccaacaugaca

SEQ ID NO: 43955 - RNA, 32 nt, Human
agaaguugcacacagaagucccagggaccuuu

SEQ ID NO: 43956 - RNA, 32 nt, Human
agaaguugcuggaaggcccacuguccagcagc

SEQ ID NO: 43957 - RNA, 32 nt, Human
agaaguuggagguggagcugugacuggcugag

SEQ ID NO: 43958 - RNA, 32 nt, Human
agaaguuggcauuaucuuccuggcagauugcu

SEQ ID NO: 43959 - RNA, 32 nt, Human
agaaguuggccaaaauacugccuguacuguua

SEQ ID NO: 43960 - RNA, 17 nt, Human
agaaguugggggagcuc

SEQ ID NO: 43961 - RNA, 32 nt, Human
agaaguugugcaaacugaagacaaaacuguuu

SEQ ID NO: 43962 - RNA, 32 nt, Human
agaaguuguuucugguuuuuccuugccccugu

SEQ ID NO: 43963 - RNA, 32 nt, Human
agaaguuuagagggggaagaaaagaaugauaa

SEQ ID NO: 43964 - RNA, 20 nt, Human
agaaguuuauccggaagcca

SEQ ID NO: 43965 - RNA, 32 nt, Human
agaaguuuauguguagggacugugggaaggcu

SEQ ID NO: 43966 - RNA, 32 nt, Human
agaaguuucugcacucagccaggcggcaucaa

SEQ ID NO: 43967 - RNA, 32 nt, Human
agaaguuugaaaccagccuggacuacauggug

SEQ ID NO: 43968 - RNA, 31 nt, Human
agaaguuugagaaaaagacugaauaauaucu

SEQ ID NO: 43969 - RNA, 32 nt, Human
agaaguuugagaccagccuaggcaacauugca

SEQ ID NO: 43970 - RNA, 32 nt, Human
agaaguuugagaccagccugaccaacauggug

SEQ ID NO: 43971 - RNA, 32 nt, Human
agaaguuugagaccagccuggcaaacauggca

SEQ ID NO: 43972 - RNA, 32 nt, Human
agaaguuugagaccagccuggccaacauaauu

SEQ ID NO: 43973 - RNA, 32 nt, Human
agaaguuugagaccagccuggccaacauggug

SEQ ID NO: 43974 - RNA, 32 nt, Human
agaaguuugagaccagccuggccaauauggcg

SEQ ID NO: 43975 - RNA, 32 nt, Human
agaaguuugagaccagccugggcaacauagug

SEQ ID NO: 43976 - RNA, 32 nt, Human
agaaguuugagaccagccugugcaacauaucu

SEQ ID NO: 43977 - RNA, 32 nt, Human
agaaguuugagaccagccuugccaacacagug

SEQ ID NO: 43978 - RNA, 24 nt, Human
agaaguuugcuguccaggagccag

SEQ ID NO: 43979 - RNA, 32 nt, Human
agaaguuugugagaauguggccgcccuuuucc

SEQ ID NO: 43980 - RNA, 32 nt, Human
agaaguuuugacugcaggaccgggagcucccu

SEQ ID NO: 43981 - RNA, 32 nt, Human
agaaguuuuggacaagccuccccaaauguggc

SEQ ID NO: 43982 - RNA, 32 nt, Human
agaauaaaaauuagaguuagacaaaguauuaa

SEQ ID NO: 43983 - RNA, 32 nt, Human
agaauaaaaauuagaguuagacaaaguauuag

SEQ ID NO: 43984 - RNA, 32 nt, Human
agaauaaaaugagaacucuggagugagcuaaa

SEQ ID NO: 43985 - RNA, 24 nt, Human
agaauaaacacauuuagccuuaua

SEQ ID NO: 43986 - RNA, 32 nt, Human
agaauaaauaugcucagccacccugugggccg

SEQ ID NO: 43987 - RNA, 32 nt, Human
agaauaacacccuucuaggggaggcggguggg

SEQ ID NO: 43988 - RNA, 32 nt, Human
agaauaacacuggcuuuggguagugccauggc

SEQ ID NO: 43989 - RNA, 32 nt, Human
agaauaaccacagccucagauacuggggacuu

SEQ ID NO: 43990 - RNA, 32 nt, Human
agaauaaccacugcacuccaaccugggcaaca

SEQ ID NO: 43991 - RNA, 21 nt, Human
agaauaaccaugaaaauacaa

SEQ ID NO: 43992 - RNA, 32 nt, Human
agaauaaccuaggcugcuggaaagcacccuuu

SEQ ID NO: 43993 - RNA, 22 nt, Human
agaauaaccuucaaauaaaaua

SEQ ID NO: 43994 - RNA, 32 nt, Human
agaauaacugguuuuaaaauuuucugcaauac

SEQ ID NO: 43995 - RNA, 18 nt, Human
agaauaacuuuccaggaa

SEQ ID NO: 43996 - RNA, 32 nt, Human
agaauaagcagcugccuggagccuauucacua

SEQ ID NO: 43997 - RNA, 22 nt, Human
agaauaaggaggaggagggaga

SEQ ID NO: 43998 - RNA, 32 nt, Human
agaauaaggaggaggagggagaagagaaaaug

SEQ ID NO: 43999 - RNA, 32 nt, Human
agaauaagggacaaauggguucccugugcuuc

SEQ ID NO: 44000 - RNA, 32 nt, Human
agaauaaguccuucuguuuucucuuuaacauu

SEQ ID NO: 44001 - RNA, 32 nt, Human
agaauaauacaugaucacagaaaugcauacca

SEQ ID NO: 44002 - RNA, 18 nt, Human
agaauaauacuccgagua

SEQ ID NO: 44003 - RNA, 32 nt, Human
agaauaaugaaugagauuaauuaagaaaugaa

SEQ ID NO: 44004 - RNA, 32 nt, Human
agaauaaugucacuucauuugauuaugacuac

SEQ ID NO: 44005 - RNA, 32 nt, Human
agaauacaaaggauggucugugggaaaauaua

SEQ ID NO: 44006 - RNA, 32 nt, Human
agaauacaaaugcugggcugggcacaguggcu

SEQ ID NO: 44007 - RNA, 22 nt, Human
agaauacaaccucaugcucccu

SEQ ID NO: 44008 - RNA, 32 nt, Human
agaauacaucauucacagacuuugguguuuua

SEQ ID NO: 44009 - RNA, 32 nt, Human
agaauaccuguguggugcuguccuuccucaag

SEQ ID NO: 44010 - RNA, 32 nt, Human
agaauacucugccucugcuucauguagcaaau

SEQ ID NO: 44011 - RNA, 32 nt, Human
agaauacuggagaagagagagggugggcagag

SEQ ID NO: 44012 - RNA, 32 nt, Human
agaauacuuuagagcuaccaaaauuagcagca

SEQ ID NO: 44013 - RNA, 32 nt, Human
agaauacuuucaauucugaagaugucuggcua

SEQ ID NO: 44014 - RNA, 32 nt, Human
agaauagaaagccacaggucuagcagggaagc

SEQ ID NO: 44015 - RNA, 32 nt, Human
agaauagaaggaaggugauaggaugugaugau

SEQ ID NO: 44016 - RNA, 32 nt, Human
agaauagaaggugggcagggcgggggaggcag

SEQ ID NO: 44017 - RNA, 20 nt, Human
agaauagacgaagaccccga

SEQ ID NO: 44018 - RNA, 32 nt, Human
agaauagacuccuggguuguuuuacaaaugug

SEQ ID NO: 44019 - RNA, 32 nt, Human
agaauagagaacaggaacgagguggagagcaa

SEQ ID NO: 44020 - RNA, 32 nt, Human
agaauagaugcucaauaaacaccagcugcuac

SEQ ID NO: 44021 - RNA, 32 nt, Human
agaauagcaagggggaagucugcccccauguu

SEQ ID NO: 44022 - RNA, 32 nt, Human
agaauagcacaaugaacaugcauauacccuuc

SEQ ID NO: 44023 - RNA, 32 nt, Human
agaauagcaugaaccagggagguggagggugc

SEQ ID NO: 44024 - RNA, 22 nt, Human
agaauagccugggcaacauagc

SEQ ID NO: 44025 - RNA, 21 nt, Human
agaauagcgugaacccgggag

SEQ ID NO: 44026 - RNA, 21 nt, Human
agaauagcuggaacccaggag

SEQ ID NO: 44027 - RNA, 21 nt, Human
agaauagcuggaacccgggag

SEQ ID NO: 44028 - RNA, 32 nt, Human
agaauagcuugaaccugggaggcggauguugc

SEQ ID NO: 44029 - RNA, 21 nt, Human
agaauagggagaaggaggaga

SEQ ID NO: 44030 - RNA, 32 nt, Human
agaauagggagguggagaaugaugacuuaccc

SEQ ID NO: 44031 - RNA, 32 nt, Human
agaauagggcccugacuuugugcuggucuggc

SEQ ID NO: 44032 - RNA, 32 nt, Human
agaauagggcugggcacaguggcucacgccug

SEQ ID NO: 44033 - RNA, 32 nt, Human
agaauaggucaaaauuccaaaaccauggacau

SEQ ID NO: 44034 - RNA, 21 nt, Human
agaauagugugaacccaggag

SEQ ID NO: 44035 - RNA, 32 nt, Human
agaauauaaggagauggacaaaccgugugggu

SEQ ID NO: 44036 - RNA, 32 nt, Human
agaauauaaggaggcagaaaaauaugaaaaga

SEQ ID NO: 44037 - RNA, 32 nt, Human
agaauauacaugcacaucagcucaaugucuuu

SEQ ID NO: 44038 - RNA, 32 nt, Human
agaauauaugaaugacuaauauacaaaagauu

SEQ ID NO: 44039 - RNA, 32 nt, Human
agaauaucaauggaaaaggagaaggaccuccu

SEQ ID NO: 44040 - RNA, 32 nt, Human
agaauaucacacacggaauccucauucauucc

SEQ ID NO: 44041 - RNA, 32 nt, Human
agaauauccaaagaauaaggaggaggaugaac

SEQ ID NO: 44042 - RNA, 32 nt, Human
agaauaucccagaguaauuggaguuuuucuuu

SEQ ID NO: 44043 - RNA, 32 nt, Human
agaauaucucaaagacguggauuuucauuuca

SEQ ID NO: 44044 - RNA, 32 nt, Human
agaauaugacaugcugaaccaggcaugguggc

SEQ ID NO: 44045 - RNA, 32 nt, Human
agaauaugcccuuuauuaugcuaucauugcua

SEQ ID NO: 44046 - RNA, 32 nt, Human
agaauaugccuuuugcuagccugcugugaugc

SEQ ID NO: 44047 - RNA, 19 nt, Human
agaauauggaacucaggag

SEQ ID NO: 44048 - RNA, 32 nt, Human
agaauauggagccaggcccugccugguuacua

SEQ ID NO: 44049 - RNA, 32 nt, Human
agaauaugggaucucucaccuagucauuguau

SEQ ID NO: 44050 - RNA, 32 nt, Human
agaauaugguccauuccaucugaguuuucaaa

SEQ ID NO: 44051 - RNA, 32 nt, Human
agaauauguauucuauucacaagacucaacaa

SEQ ID NO: 44052 - RNA, 32 nt, Human
agaauauuagggaugagauggaagaggagagg

SEQ ID NO: 44053 - RNA, 32 nt, Human
agaauauuauccugguuuaacaacagugcccu

SEQ ID NO: 44054 - RNA, 32 nt, Human
agaauauuucugcagauaauuucuauugaaau

SEQ ID NO: 44055 - RNA, 18 nt, Human
agaauauuugguuuuccu

SEQ ID NO: 44056 - RNA, 32 nt, Human
agaauauuuuaacuuccuuggacucauuuuaa

SEQ ID NO: 44057 - RNA, 32 nt, Human
agaaucaaacaacauggggacugagggaggga

SEQ ID NO: 44058 - RNA, 32 nt, Human
agaaucaaaggcagagaagaccagccgugcuc

SEQ ID NO: 44059 - RNA, 32 nt, Human
agaaucaaccaaggagccugagcccaggaagg

SEQ ID NO: 44060 - RNA, 32 nt, Human
agaaucaagcuagaaggccacaugucaccgug

SEQ ID NO: 44061 - RNA, 32 nt, Human
agaaucaaggagugugcucucaaaugagagga

SEQ ID NO: 44062 - RNA, 21 nt, Human
agaaucaauagaacccaggag

SEQ ID NO: 44063 - RNA, 32 nt, Human
agaaucaauuauauuugaaaagcugccugugu

SEQ ID NO: 44064 - RNA, 32 nt, Human
agaaucacaaagguccuagaaaccacuuggcu

SEQ ID NO: 44065 - RNA, 32 nt, Human
agaaucacaauccuagucuaucuagcuccuca

SEQ ID NO: 44066 - RNA, 32 nt, Human
agaaucaccagcuguuccuaguggcugcuggg

SEQ ID NO: 44067 - RNA, 21 nt, Human
agaaucaccugaacccaggag

SEQ ID NO: 44068 - RNA, 21 nt, Human
agaaucaccugagcccaggag

SEQ ID NO: 44069 - RNA, 24 nt, Human
agaaucacucacaaaacucucaca

SEQ ID NO: 44070 - RNA, 21 nt, Human
agaaucacucgaacccaggag

SEQ ID NO: 44071 - RNA, 32 nt, Human
agaaucacucgaaccugggagguggagguugc

SEQ ID NO: 44072 - RNA, 21 nt, Human
agaaucacucgccauucuccu

SEQ ID NO: 44073 - RNA, 21 nt, Human
agaaucacuuaaacccaggag

SEQ ID NO: 44074 - RNA, 20 nt, Human
agaaucacuucagcccagga

SEQ ID NO: 44075 - RNA, 20 nt, Human
agaaucacuucagcccggga

SEQ ID NO: 44076 - RNA, 32 nt, Human
agaaucacuugaacccaaaaggcagacauugc

SEQ ID NO: 44077 - RNA, 21 nt, Human
agaaucacuugaacccaggag

SEQ ID NO: 44078 - RNA, 32 nt, Human
agaaucacuugaacccaggagguguugcagug

SEQ ID NO: 44079 - RNA, 20 nt, Human
agaaucacuugaaccgggga

SEQ ID NO: 44080 - RNA, 32 nt, Human
agaaucacuugaaccugggaggcggaggcugc

SEQ ID NO: 44081 - RNA, 32 nt, Human
agaaucacuugaaccugggaggcggagguugc

SEQ ID NO: 44082 - RNA, 32 nt, Human
agaaucacuugaaccugggaggcggagguugu

SEQ ID NO: 44083 - RNA, 32 nt, Human
agaaucacuugaaccugggaggcggauguuga

SEQ ID NO: 44084 - RNA, 32 nt, Human
agaaucacuugaaccugggagguggagacugc

SEQ ID NO: 44085 - RNA, 32 nt, Human
agaaucacuugaaccugggagguggagguuau

SEQ ID NO: 44086 - RNA, 32 nt, Human
agaaucacuugaaccugggagguggagguugc

SEQ ID NO: 44087 - RNA, 32 nt, Human
agaaucacuugaaccugggagguggagguuuc

SEQ ID NO: 44088 - RNA, 32 nt, Human
agaaucacuugaaccugggagguggauguugc

SEQ ID NO: 44089 - RNA, 32 nt, Human
agaaucacuugaagcugggaggcggagguugc

SEQ ID NO: 44090 - RNA, 22 nt, Human
agaaucacuugaaucccaggag

SEQ ID NO: 44091 - RNA, 32 nt, Human
agaaucacuugaaucugggagguggagguugc

SEQ ID NO: 44092 - RNA, 21 nt, Human
agaaucacuugagcccaggag

SEQ ID NO: 44093 - RNA, 32 nt, Human
agaaucacuuuuccucaauuguccucuguguc

SEQ ID NO: 44094 - RNA, 32 nt, Human
agaaucagaacaggcucuguauguggaucaaa

SEQ ID NO: 44095 - RNA, 32 nt, Human
agaaucagagacuuuaaucuugaacucacagc

SEQ ID NO: 44096 - RNA, 32 nt, Human
agaaucagaucccagaccuuuggggagaagga

SEQ ID NO: 44097 - RNA, 32 nt, Human
agaaucagaucugcuccccagcaucuucuguu

SEQ ID NO: 44098 - RNA, 32 nt, Human
agaaucagccugcagaagcagagcaagcauau

SEQ ID NO: 44099 - RNA, 32 nt, Human
agaaucagccuggagauugggcaggaacagag

SEQ ID NO: 44100 - RNA, 32 nt, Human
agaaucaggaaagccuuuaugguguggcuaaa

SEQ ID NO: 44101 - RNA, 32 nt, Human
agaaucaggaacaguuucuagaauacacuuga

SEQ ID NO: 44102 - RNA, 32 nt, Human
agaaucaggugaugacucaugggaucugauca

SEQ ID NO: 44103 - RNA, 32 nt, Human
agaaucaguucugagccuccucgccucccggc

SEQ ID NO: 44104 - RNA, 17 nt, Human
agaaucauacaagcaca

SEQ ID NO: 44105 - RNA, 32 nt, Human
agaaucauacauacuuucaagagaauuccaca

SEQ ID NO: 44106 - RNA, 20 nt, Human
agaaucauacucuccaggaa

SEQ ID NO: 44107 - RNA, 32 nt, Human
agaaucauaugacuugcuuuuuccauuccagu

SEQ ID NO: 44108 - RNA, 32 nt, Human
agaaucaucaucgccacugaaaaccaggcccu

SEQ ID NO: 44109 - RNA, 32 nt, Human
agaaucauccacaagucaccccaaaccuugga

SEQ ID NO: 44110 - RNA, 32 nt, Human
agaaucaucuccccugccccacaaacaugaaa

SEQ ID NO: 44111 - RNA, 21 nt, Human
agaaucaucugaacccaggag

SEQ ID NO: 44112 - RNA, 21 nt, Human
agaaucaugaaaccacaggag

SEQ ID NO: 44113 - RNA, 32 nt, Human
agaaucaugcaagcuuccucccucagccauug

SEQ ID NO: 44114 - RNA, 31 nt, Human
agaaucaugccacccucaaagccucauccac

SEQ ID NO: 44115 - RNA, 23 nt, Human
agaaucaugccuccccaucuccu

SEQ ID NO: 44116 - RNA, 32 nt, Human
agaaucauggcggaaggugaaugaggagcaaa

SEQ ID NO: 44117 - RNA, 32 nt, Human
agaaucauguuaacuauuggguugugacugaa

SEQ ID NO: 44118 - RNA, 18 nt, Human
agaaucauuguccaggag

SEQ ID NO: 44119 - RNA, 20 nt, Human
agaaucauuucaacccggga

SEQ ID NO: 44120 - RNA, 18 nt, Human
agaaucauuuuucuuccu

SEQ ID NO: 44121 - RNA, 22 nt, Human
agaauccaagaucugccaggaa

SEQ ID NO: 44122 - RNA, 32 nt, Human
agaauccacagcaaccagcaccaugcccauga

SEQ ID NO: 44123 - RNA, 21 nt, Human
agaauccaccuuaggccucag

SEQ ID NO: 44124 - RNA, 32 nt, Human
agaauccacugauuuucuguggcuccagugag

SEQ ID NO: 44125 - RNA, 32 nt, Human
agaauccagagcucguagcuguccucagcugu

SEQ ID NO: 44126 - RNA, 32 nt, Human
agaauccagcugggcuagaggcugagcaccuu

SEQ ID NO: 44127 - RNA, 32 nt, Human
agaauccaggccccaucucccccaacuccaca

SEQ ID NO: 44128 - RNA, 32 nt, Human
agaauccagggaugggaggggaagggacggau

SEQ ID NO: 44129 - RNA, 32 nt, Human
agaauccaguguuucugcuuucaguuucuugg

SEQ ID NO: 44130 - RNA, 32 nt, Human
agaauccauaacugccuagagccuggggcccu

SEQ ID NO: 44131 - RNA, 20 nt, Human
agaaucccaagggcccagga

SEQ ID NO: 44132 - RNA, 21 nt, Human
agaaucccagaauucuaggaa

SEQ ID NO: 44133 - RNA, 23 nt, Human
agaaucccagcccagaaucccga

SEQ ID NO: 44134 - RNA, 32 nt, Human
agaaucccagccccagcaucuccaagcauagg

SEQ ID NO: 44135 - RNA, 21 nt, Human
agaaucccaggacagaaagau

SEQ ID NO: 44136 - RNA, 32 nt, Human
agaaucccagguccugggccugguuuucuaau

SEQ ID NO: 44137 - RNA, 32 nt, Human
agaaucccaucuuugccagauacguuaacuuu

SEQ ID NO: 44138 - RNA, 32 nt, Human
agaauccccaaaagugucaugcuuuuaaacaa

SEQ ID NO: 44139 - RNA, 19 nt, Human
agaauccccggcguuuuuc

SEQ ID NO: 44140 - RNA, 32 nt, Human
agaauccccuccagauaagagauuuugaguga

SEQ ID NO: 44141 - RNA, 32 nt, Human
agaauccccuugacacucccaccaucuucacc

SEQ ID NO: 44142 - RNA, 32 nt, Human
agaaucccuacuggaagccugcaagucuaaga

SEQ ID NO: 44143 - RNA, 32 nt, Human
agaaucccuagcugccccagcccagucuuucu

SEQ ID NO: 44144 - RNA, 18 nt, Human
agaaucccucacucuucc

SEQ ID NO: 44145 - RNA, 32 nt, Human
agaaucccugguucagccuggaaggcgagggg

SEQ ID NO: 44146 - RNA, 21 nt, Human
agaaucccuugaacccaggag

SEQ ID NO: 44147 - RNA, 32 nt, Human
agaaucccuugaaccugggaggcggagguugc

SEQ ID NO: 44148 - RNA, 32 nt, Human
agaaucccuugaaccugggaggcggagguugu

SEQ ID NO: 44149 - RNA, 32 nt, Human
agaaucccuugaaccugggagguggagguugc

SEQ ID NO: 44150 - RNA, 18 nt, Human
agaauccggcuccaggaa

SEQ ID NO: 44151 - RNA, 32 nt, Human
agaauccuaagcucuggaaauauuucaugaca

SEQ ID NO: 44152 - RNA, 18 nt, Human
agaauccuaaugcuucuu

SEQ ID NO: 44153 - RNA, 20 nt, Human
agaauccuagauaguuuucc

SEQ ID NO: 44154 - RNA, 32 nt, Human
agaauccuagaugaaccacacgcuuuacuaag

SEQ ID NO: 44155 - RNA, 32 nt, Human
agaauccuagccccacuaaugccaagucuguu

SEQ ID NO: 44156 - RNA, 20 nt, Human
agaauccuagugacaaaguc

SEQ ID NO: 44157 - RNA, 18 nt, Human
agaauccucagcucuccu

SEQ ID NO: 44158 - RNA, 18 nt, Human
agaauccucagcuggaga

SEQ ID NO: 44159 - RNA, 32 nt, Human
agaauccucaguuggaaucauugcuaauauuu

SEQ ID NO: 44160 - RNA, 32 nt, Human
agaauccuccacccccugauccucccugggga

SEQ ID NO: 44161 - RNA, 18 nt, Human
agaauccucccggaaccu

SEQ ID NO: 44162 - RNA, 18 nt, Human
agaauccuccuguggccu

SEQ ID NO: 44163 - RNA, 15 nt, Human
agaauccuccuuccu

SEQ ID NO: 44164 - RNA, 19 nt, Human
agaauccucuccauuuucc

SEQ ID NO: 44165 - RNA, 17 nt, Human
agaauccucuccuuucu

SEQ ID NO: 44166 - RNA, 18 nt, Human
agaauccucucucccccu

SEQ ID NO: 44167 - RNA, 19 nt, Human
agaauccucucuuucuucu

SEQ ID NO: 44168 - RNA, 19 nt, Human
agaauccucugaccuaccu

SEQ ID NO: 44169 - RNA, 17 nt, Human
agaauccucuuuccucc

SEQ ID NO: 44170 - RNA, 32 nt, Human
agaauccugaggaccuggagugcaaugagaau

SEQ ID NO: 44171 - RNA, 17 nt, Human
agaauccugccucuccc

SEQ ID NO: 44172 - RNA, 17 nt, Human
agaauccugcucuuccu

SEQ ID NO: 44173 - RNA, 19 nt, Human
agaauccuggcccuucucc

SEQ ID NO: 44174 - RNA, 19 nt, Human
agaauccugguccuucucc

SEQ ID NO: 44175 - RNA, 32 nt, Human
agaauccuguuaggucgguuuagaugaaugcu

SEQ ID NO: 44176 - RNA, 32 nt, Human
agaauccuguuuccauccuccugguuccuucu

SEQ ID NO: 44177 - RNA, 17 nt, Human
agaauccuuccucuccu

SEQ ID NO: 44178 - RNA, 32 nt, Human
agaauccuuuaaggaggguggcggugcugacu

SEQ ID NO: 44179 - RNA, 21 nt, Human
agaauccuuucagcucuuccu

SEQ ID NO: 44180 - RNA, 19 nt, Human
agaauccuuuccucuucuu

SEQ ID NO: 44181 - RNA, 17 nt, Human
agaauccuuugucuucc

SEQ ID NO: 44182 - RNA, 32 nt, Human
agaaucgacaccuugcaacugugccuucaaag

SEQ ID NO: 44183 - RNA, 32 nt, Human
agaaucgcaugcuguagaaaugcucaaaagug

SEQ ID NO: 44184 - RNA, 32 nt, Human
agaaucgccuaccugugccugcguguaaacca

SEQ ID NO: 44185 - RNA, 21 nt, Human
agaaucgccugaacccaggag

SEQ ID NO: 44186 - RNA, 21 nt, Human
agaaucgcgugaacccaggag

SEQ ID NO: 44187 - RNA, 21 nt, Human
agaaucgcuagaacccaggag

SEQ ID NO: 44188 - RNA, 21 nt, Human
agaaucgcuagaacccgggag

SEQ ID NO: 44189 - RNA, 21 nt, Human
agaaucgcucgaacccaggag

SEQ ID NO: 44190 - RNA, 21 nt, Human
agaaucgcuggaacccaggag

SEQ ID NO: 44191 - RNA, 21 nt, Human
agaaucgcuuaaacccaggag

SEQ ID NO: 44192 - RNA, 32 nt, Human
agaaucgcuugaaacugggagguggagguugc

SEQ ID NO: 44193 - RNA, 32 nt, Human
agaaucgcuugaaccagggaagcggagguugc

SEQ ID NO: 44194 - RNA, 32 nt, Human
agaaucgcuugaacccacagggcagaggucac

SEQ ID NO: 44195 - RNA, 20 nt, Human
agaaucgcuugaacccagau

SEQ ID NO: 44196 - RNA, 21 nt, Human
agaaucgcuugaacccaggag

SEQ ID NO: 44197 - RNA, 32 nt, Human
agaaucgcuugaaccugggaggcggaaguugc

SEQ ID NO: 44198 - RNA, 32 nt, Human
agaaucgcuugaaccugggaggcggagauugc

SEQ ID NO: 44199 - RNA, 32 nt, Human
agaaucgcuugaaccugggaggcggaggaggu

SEQ ID NO: 44200 - RNA, 32 nt, Human
agaaucgcuugaaccugggaggcggagguugc

SEQ ID NO: 44201 - RNA, 32 nt, Human
agaaucgcuugaaccugggagguggaaguugc

SEQ ID NO: 44202 - RNA, 32 nt, Human
agaaucgcuugaaccugggagguggagauugc

SEQ ID NO: 44203 - RNA, 32 nt, Human
agaaucgcuugaaccugggagguggaggcagu

SEQ ID NO: 44204 - RNA, 32 nt, Human
agaaucgcuugaaccugggagguggaggggag

SEQ ID NO: 44205 - RNA, 32 nt, Human
agaaucgcuugaaccugggagguggagguuac

SEQ ID NO: 44206 - RNA, 32 nt, Human
agaaucgcuugaaccugggagguggagguugc

SEQ ID NO: 44207 - RNA, 32 nt, Human
agaaucgcuugaaccugggagguggagguugu

SEQ ID NO: 44208 - RNA, 32 nt, Human
agaaucgcuugaaccugggagguggaguugca

SEQ ID NO: 44209 - RNA, 32 nt, Human
agaaucgcuugaaucugggaggcggagauugc

SEQ ID NO: 44210 - RNA, 32 nt, Human
agaaucgcuugaaucugggaggcggagguugc

SEQ ID NO: 44211 - RNA, 21 nt, Human
agaaucgcuugacuccaggag

SEQ ID NO: 44212 - RNA, 21 nt, Human
agaaucgcuugagcccaggag

SEQ ID NO: 44213 - RNA, 20 nt, Human
agaaucgcuugagccgggga

SEQ ID NO: 44214 - RNA, 32 nt, Human
agaaucgcuugagccugggagguggagguugc

SEQ ID NO: 44215 - RNA, 32 nt, Human
agaaucgcuugagucugggaggcggagguugc

SEQ ID NO: 44216 - RNA, 32 nt, Human
agaaucgcuuggaccugggagguggagguugc

SEQ ID NO: 44217 - RNA, 21 nt, Human
agaaucgcuugggcccaggag

SEQ ID NO: 44218 - RNA, 18 nt, Human
agaaucguuuaucuuucu

SEQ ID NO: 44219 - RNA, 21 nt, Human
agaaucguuugaacccaggag

SEQ ID NO: 44220 - RNA, 32 nt, Human
agaaucuaaaaauucauguugaaagggaauga

SEQ ID NO: 44221 - RNA, 32 nt, Human
agaaucuaaagccaguggcuugaggcuacagg

SEQ ID NO: 44222 - RNA, 32 nt, Human
agaaucuaaccucaagaauaagaaauacaagu

SEQ ID NO: 44223 - RNA, 24 nt, Human
agaaucuacaacauagggccccag

SEQ ID NO: 44224 - RNA, 17 nt, Human
agaaucuacccaaagga

SEQ ID NO: 44225 - RNA, 18 nt, Human
agaaucuacuaucuggaa

SEQ ID NO: 44226 - RNA, 20 nt, Human
agaaucuacuuauccuuccu

SEQ ID NO: 44227 - RNA, 20 nt, Human
agaaucuacuuuccacagaa

SEQ ID NO: 44228 - RNA, 32 nt, Human
agaaucuagucuaugugguugcgccaucugug

SEQ ID NO: 44229 - RNA, 20 nt, Human
agaaucuauauccucaggaa

SEQ ID NO: 44230 - RNA, 21 nt, Human
agaaucuauauuccaagcaca

SEQ ID NO: 44231 - RNA, 32 nt, Human
agaaucuaucuuuugcccuacagugucccggc

SEQ ID NO: 44232 - RNA, 32 nt, Human
agaaucuaugcaagccucaucaacaccacuuu

SEQ ID NO: 44233 - RNA, 31 nt, Human
agaaucucaauaaauuuaugugaagagaaug

SEQ ID NO: 44234 - RNA, 32 nt, Human
agaaucucacauggaccccauaaauguguaca

SEQ ID NO: 44235 - RNA, 32 nt, Human
agaaucucauuuucuucuuucuuccauucccu

SEQ ID NO: 44236 - RNA, 32 nt, Human
agaaucucccucugucccccaggcuggagugc

SEQ ID NO: 44237 - RNA, 19 nt, Human
agaaucucgaacccaggag

SEQ ID NO: 44238 - RNA, 32 nt, Human
agaaucucgcucuauggcccaggcuggaguac

SEQ ID NO: 44239 - RNA, 32 nt, Human
agaaucucgcucugcacuccagccuaggugac

SEQ ID NO: 44240 - RNA, 19 nt, Human
agaaucucguccccucccu

SEQ ID NO: 44241 - RNA, 32 nt, Human
agaaucucuaccagggcaguguggaggggaaa

SEQ ID NO: 44242 - RNA, 16 nt, Human
agaaucucugcaggaa

SEQ ID NO: 44243 - RNA, 32 nt, Human
agaaucucuggacggagcugcuggcagcuucu

SEQ ID NO: 44244 - RNA, 32 nt, Human
agaaucucuguggggcgaugcugcagcggcug

SEQ ID NO: 44245 - RNA, 19 nt, Human
agaaucucuuauucuuccu

SEQ ID NO: 44246 - RNA, 21 nt, Human
agaaucucuugaacccaggag

SEQ ID NO: 44247 - RNA, 32 nt, Human
agaaucucuugaaccugggaggcggagguugc

SEQ ID NO: 44248 - RNA, 21 nt, Human
agaaucucuugaauccaggag

SEQ ID NO: 44249 - RNA, 18 nt, Human
agaaucugaacccaggaa

SEQ ID NO: 44250 - RNA, 32 nt, Human
agaaucugaagauagaaagggaagaaaaguaa

SEQ ID NO: 44251 - RNA, 20 nt, Human
agaaucugacacugucuucc

SEQ ID NO: 44252 - RNA, 32 nt, Human
agaaucugccugaaagggcuggagaggggcag

SEQ ID NO: 44253 - RNA, 32 nt, Human
agaaucugccuuucagcccuuccuucugguca

SEQ ID NO: 44254 - RNA, 32 nt, Human
agaaucuggaacaaagcaauguuaacaaagaa

SEQ ID NO: 44255 - RNA, 32 nt, Human
agaaucuggcacuuuacucauuuccuuugaua

SEQ ID NO: 44256 - RNA, 32 nt, Human
agaaucugggaagagaaauggagaauaagcag

SEQ ID NO: 44257 - RNA, 32 nt, Human
agaaucuggggucugcugaauuggcuucuuuu

SEQ ID NO: 44258 - RNA, 19 nt, Human
agaaucuggucuguuuccu

SEQ ID NO: 44259 - RNA, 32 nt, Human
agaaucuguacagcucuccguuuaugacaguu

SEQ ID NO: 44260 - RNA, 32 nt, Human
agaaucuguaccaauaccaugaaguucaggcu

SEQ ID NO: 44261 - RNA, 32 nt, Human
agaaucuucagagccacaggcuuuucaagaca

SEQ ID NO: 44262 - RNA, 32 nt, Human
agaaucuucauucaucucucucuuucagcgaa

SEQ ID NO: 44263 - RNA, 32 nt, Human
agaaucuuccaaaacuaauacagacuugcaua

SEQ ID NO: 44264 - RNA, 32 nt, Human
agaaucuuccacaugcuccaagccacaggucc

SEQ ID NO: 44265 - RNA, 32 nt, Human
agaaucuuucacaccccacuccugcuaucagu

SEQ ID NO: 44266 - RNA, 18 nt, Human
agaaucuuucauuuuccu

SEQ ID NO: 44267 - RNA, 17 nt, Human
agaaucuuucggucucc

SEQ ID NO: 44268 - RNA, 32 nt, Human
agaaucuuucuuuccauccugcauggcugaga

SEQ ID NO: 44269 - RNA, 32 nt, Human
agaaugaaagaguaaccugucccagaggagag

SEQ ID NO: 44270 - RNA, 32 nt, Human
agaaugaaagggcccagagaggguggugaccu

SEQ ID NO: 44271 - RNA, 31 nt, Human
agaaugaacaacacaaccggaagcgggauuc

SEQ ID NO: 44272 - RNA, 32 nt, Human
agaaugaacauguaaaguuacaaaaugaacuc

SEQ ID NO: 44273 - RNA, 32 nt, Human
agaaugaacugcuccucuguguguacuucaua

SEQ ID NO: 44274 - RNA, 32 nt, Human
agaaugaacuucugucugccucguggagccaa

SEQ ID NO: 44275 - RNA, 28 nt, Human
agaaugaagccaauucaaaaacuccuag

SEQ ID NO: 44276 - RNA, 32 nt, Human
agaaugaagggccuaccugagcacacaagccc

SEQ ID NO: 44277 - RNA, 32 nt, Human
agaaugaagggggugaggccugagggagggag

SEQ ID NO: 44278 - RNA, 32 nt, Human
agaaugaaguccaggaggagaagggcucauug

SEQ ID NO: 44279 - RNA, 22 nt, Human
agaaugaauuauguaucccuuc

SEQ ID NO: 44280 - RNA, 24 nt, Human
agaaugaauuauuuuaucuccucc

SEQ ID NO: 44281 - RNA, 32 nt, Human
agaaugaauucaaccugcucuguccauuaugu

SEQ ID NO: 44282 - RNA, 32 nt, Human
agaaugacaaaggaggcacucguucucuuuuc

SEQ ID NO: 44283 - RNA, 32 nt, Human
agaaugacaagauagauggagaggagggacuc

SEQ ID NO: 44284 - RNA, 32 nt, Human
agaaugacagaugcaauucuuccugccaugca

SEQ ID NO: 44285 - RNA, 32 nt, Human
agaaugacauacuagucugcaggaugaauuuc

SEQ ID NO: 44286 - RNA, 21 nt, Human
agaaugacaugaacccaggag

SEQ ID NO: 44287 - RNA, 32 nt, Human
agaaugaccaaaauggccucuaaaagauguua

SEQ ID NO: 44288 - RNA, 28 nt, Human
agaaugaccacagcccuggaaccugagg

SEQ ID NO: 44289 - RNA, 32 nt, Human
agaaugacccagagucaaggccaagucugcag

SEQ ID NO: 44290 - RNA, 28 nt, Human
agaaugacugaaaaagccccagagccac

SEQ ID NO: 44291 - RNA, 32 nt, Human
agaaugacugcguuuguaaaagaaggaccacc

SEQ ID NO: 44292 - RNA, 32 nt, Human
agaaugagacuccagcacagucauuccuccac

SEQ ID NO: 44293 - RNA, 32 nt, Human
agaaugagacuugccaccagggacauccaggc

SEQ ID NO: 44294 - RNA, 32 nt, Human
agaaugagacuuugcuugcauccaggcauuca

SEQ ID NO: 44295 - RNA, 32 nt, Human
agaaugagauggggauacaagcaugguggugu

SEQ ID NO: 44296 - RNA, 32 nt, Human
agaaugagaugggguuuugccguguuacccag

SEQ ID NO: 44297 - RNA, 32 nt, Human
agaaugagauucaccaguaggggagggagggg

SEQ ID NO: 44298 - RNA, 32 nt, Human
agaaugagcaggaaggagagccaagccuacag

SEQ ID NO: 44299 - RNA, 32 nt, Human
agaaugagccaguggcaugagaucagucugca

SEQ ID NO: 44300 - RNA, 32 nt, Human
agaaugagcgcagaggugacagacagccacug

SEQ ID NO: 44301 - RNA, 32 nt, Human
agaaugagcggguggagaaacuggaaugucgc

SEQ ID NO: 44302 - RNA, 32 nt, Human
agaaugagcuggagcuugagcuggagcaggac

SEQ ID NO: 44303 - RNA, 32 nt, Human
agaaugagcuguacacaucuugggacaaucug

SEQ ID NO: 44304 - RNA, 32 nt, Human
agaaugaggaagacagagggccuccaagugag

SEQ ID NO: 44305 - RNA, 32 nt, Human
agaaugaggagaaaaaggagaaaagggaaaag

SEQ ID NO: 44306 - RNA, 32 nt, Human
agaaugaggagaaagcaagaagagugaccccc

SEQ ID NO: 44307 - RNA, 32 nt, Human
agaaugaggagaagauuucauugcagagcgag

SEQ ID NO: 44308 - RNA, 32 nt, Human
agaaugaggagcacugguucugggcaggcagu

SEQ ID NO: 44309 - RNA, 23 nt, Human
agaaugaggcagacaccaggcca

SEQ ID NO: 44310 - RNA, 32 nt, Human
agaaugagguuagaagacugcagcuuggaguc

SEQ ID NO: 44311 - RNA, 32 nt, Human
agaaugaguuugacaaauugacagaaguaggc

SEQ ID NO: 44312 - RNA, 32 nt, Human
agaaugauauccaguaagcacauguuuauuca

SEQ ID NO: 44313 - RNA, 32 nt, Human
agaaugaucuuuacugaauuugcccuuuauaa

SEQ ID NO: 44314 - RNA, 21 nt, Human
agaaugaugggaacccgggag

SEQ ID NO: 44315 - RNA, 32 nt, Human
agaaugauucaaagcagaggaauuuauuaugc

SEQ ID NO: 44316 - RNA, 32 nt, Human
agaaugcaccacugcaguccagccuaggcaac

SEQ ID NO: 44317 - RNA, 31 nt, Human
agaaugcaguuuccaaguacggcucucaguu

SEQ ID NO: 44318 - RNA, 32 nt, Human
agaaugcauacaaacuccagggcugcucucuc

SEQ ID NO: 44319 - RNA, 32 nt, Human
agaaugcauauguaacccaugcacauaaccag

SEQ ID NO: 44320 - RNA, 32 nt, Human
agaaugcauucccugaaucugugccugcacug

SEQ ID NO: 44321 - RNA, 32 nt, Human
agaaugccacagucccccaacccuccacagag

SEQ ID NO: 44322 - RNA, 32 nt, Human
agaaugccacugcacuacagccugggcgacaa

SEQ ID NO: 44323 - RNA, 32 nt, Human
agaaugccacuuuuucuuuuauuucauaccaa

SEQ ID NO: 44324 - RNA, 22 nt, Human
agaaugccaggaagggggccug

SEQ ID NO: 44325 - RNA, 32 nt, Human
agaaugccaucuauuaaaaacaugguuaauau

SEQ ID NO: 44326 - RNA, 32 nt, Human
agaaugccauguugcugaucgugguaauaagc

SEQ ID NO: 44327 - RNA, 19 nt, Human
agaaugcccugcccugcga

SEQ ID NO: 44328 - RNA, 32 nt, Human
agaaugcccugccugccugccugccaggccaa

SEQ ID NO: 44329 - RNA, 32 nt, Human
agaaugccucuucuccuccaaaggaucacaac

SEQ ID NO: 44330 - RNA, 32 nt, Human
agaaugccuggcauuagcccuagaaaggaggu

SEQ ID NO: 44331 - RNA, 28 nt, Human
agaaugcggccacuccaaggaggccggg

SEQ ID NO: 44332 - RNA, 32 nt, Human
agaaugcucacugcaccacguucaagccugag

SEQ ID NO: 44333 - RNA, 32 nt, Human
agaaugcucauuuugacagaggcccaaauccu

SEQ ID NO: 44334 - RNA, 23 nt, Human
agaaugcucuucccuugcuguua

SEQ ID NO: 44335 - RNA, 21 nt, Human
agaaugcugagguuacaggca

SEQ ID NO: 44336 - RNA, 32 nt, Human
agaaugcugcaacuucucuucucucuggacuu

SEQ ID NO: 44337 - RNA, 21 nt, Human
agaaugcugcucgguccuccu

SEQ ID NO: 44338 - RNA, 28 nt, Human
agaaugcuggagccuuugcccuguuggg

SEQ ID NO: 44339 - RNA, 32 nt, Human
agaaugcuucugaguuagugggacucuguguc

SEQ ID NO: 44340 - RNA, 32 nt, Human
agaaugcuuuaauccuuucuuuagaaugcugu

SEQ ID NO: 44341 - RNA, 21 nt, Human
agaauggaacccagaguccug

SEQ ID NO: 44342 - RNA, 32 nt, Human
agaauggaaccucuggcauucuucccagaaag

SEQ ID NO: 44343 - RNA, 32 nt, Human
agaauggaacucaaggaaaucugugucagugg

SEQ ID NO: 44344 - RNA, 28 nt, Human
agaauggaauccguaaaacaaaggauuu

SEQ ID NO: 44345 - RNA, 21 nt, Human
agaauggacaccauccaggaa

SEQ ID NO: 44346 - RNA, 32 nt, Human
agaauggacagugugucuaaggaugugauuua

SEQ ID NO: 44347 - RNA, 32 nt, Human
agaauggacaucuuugcugaagacuucaaaau

SEQ ID NO: 44348 - RNA, 23 nt, Human
agaauggacccagggacaagaga

SEQ ID NO: 44349 - RNA, 32 nt, Human
agaauggagacagaaagccacugcugucagug

SEQ ID NO: 44350 - RNA, 32 nt, Human
agaauggagacggcauucuuggacuucacugg

SEQ ID NO: 44351 - RNA, 32 nt, Human
agaauggagcaguacaugggaaaggaggcaug

SEQ ID NO: 44352 - RNA, 32 nt, Human
agaauggaggcaggggacaagggaggcagugg

SEQ ID NO: 44353 - RNA, 32 nt, Human
agaauggagucuaaucccagcacuuugggagg

SEQ ID NO: 44354 - RNA, 32 nt, Human
agaauggaugaaauagacccaaagcugaauuc

SEQ ID NO: 44355 - RNA, 32 nt, Human
agaauggauggcuggggagagguggaggcuga

SEQ ID NO: 44356 - RNA, 32 nt, Human
agaauggcacuuccaaugggcgggcaccgcuc

SEQ ID NO: 44357 - RNA, 32 nt, Human
agaauggcagcaucuauuuccucuuuuguuug

SEQ ID NO: 44358 - RNA, 32 nt, Human
agaauggcaggagaggaugugggggcuccacc

SEQ ID NO: 44359 - RNA, 21 nt, Human
agaauggcaugaacccaggag

SEQ ID NO: 44360 - RNA, 21 nt, Human
agaauggcaugaacccgggag

SEQ ID NO: 44361 - RNA, 32 nt, Human
agaauggcgagugauugcuuuccuucagagaa

SEQ ID NO: 44362 - RNA, 21 nt, Human
agaauggcgugaacccaggag

SEQ ID NO: 44363 - RNA, 21 nt, Human
agaauggcgugaacccgggag

SEQ ID NO: 44364 - RNA, 21 nt, Human
agaauggcgugaaccuaggag

SEQ ID NO: 44365 - RNA, 32 nt, Human
agaauggcgugaacuugggagguggagcuuac

SEQ ID NO: 44366 - RNA, 21 nt, Human
agaauggcgugaauccaggag

SEQ ID NO: 44367 - RNA, 32 nt, Human
agaauggcgugagagcagcugaccucaucaaa

SEQ ID NO: 44368 - RNA, 32 nt, Human
agaauggcugcuugcccugccaaugcaauaau

SEQ ID NO: 44369 - RNA, 21 nt, Human
agaauggcuggaacccgggag

SEQ ID NO: 44370 - RNA, 32 nt, Human
agaauggcuucaggcuggggcugcagucaccu

SEQ ID NO: 44371 - RNA, 32 nt, Human
agaauggcuugaaccugggagguggagguugc

SEQ ID NO: 44372 - RNA, 32 nt, Human
agaaugggaaaaagacagggagagaaagcagg

SEQ ID NO: 44373 - RNA, 32 nt, Human
agaaugggaaagagaauguuccugguaaaacu

SEQ ID NO: 44374 - RNA, 32 nt, Human
agaaugggaagcugugcucugggcauuaucga

SEQ ID NO: 44375 - RNA, 32 nt, Human
agaaugggaaguuuccucuggguuggagccuc

SEQ ID NO: 44376 - RNA, 32 nt, Human
agaaugggcagacugaagacuguguccaaauu

SEQ ID NO: 44377 - RNA, 32 nt, Human
agaaugggcccagugggggcugggcaggccca

SEQ ID NO: 44378 - RNA, 32 nt, Human
agaaugggcugcagaagauuuagauguuuucc

SEQ ID NO: 44379 - RNA, 32 nt, Human
agaauggggaaaggguaacuuauugcagcagc

SEQ ID NO: 44380 - RNA, 32 nt, Human
agaauggggaauggagaggugggcagggguuc

SEQ ID NO: 44381 - RNA, 32 nt, Human
agaauggggaggcaagaucucagggacaccaa

SEQ ID NO: 44382 - RNA, 32 nt, Human
agaauggggauaauuaugucccagggguauau

SEQ ID NO: 44383 - RNA, 32 nt, Human
agaaugggggacaaggguggcuuuguaaauag

SEQ ID NO: 44384 - RNA, 32 nt, Human
agaauggggugagaggagacaugaggaaagac

SEQ ID NO: 44385 - RNA, 18 nt, Human
agaauggguuuccaggaa

SEQ ID NO: 44386 - RNA, 21 nt, Human
agaaugguaugaauccaggag

SEQ ID NO: 44387 - RNA, 28 nt, Human
agaauggugagguuggcaagcggcggag

SEQ ID NO: 44388 - RNA, 26 nt, Human
agaauggugccaccacucaagcaaca

SEQ ID NO: 44389 - RNA, 21 nt, Human
agaauggugcgaacccgggag

SEQ ID NO: 44390 - RNA, 32 nt, Human
agaauggugcggagcuugcagugagccgagau

SEQ ID NO: 44391 - RNA, 32 nt, Human
agaaugguggcagaaugagugagcaagcagau

SEQ ID NO: 44392 - RNA, 22 nt, Human
agaaugguguaaaacccaggag

SEQ ID NO: 44393 - RNA, 32 nt, Human
agaaugguguaaaacccaggaggcagagcuug

SEQ ID NO: 44394 - RNA, 21 nt, Human
agaauggugugaacccaggag

SEQ ID NO: 44395 - RNA, 20 nt, Human
agaauggugugaacccggga

SEQ ID NO: 44396 - RNA, 21 nt, Human
agaauggugugaacccgggag

SEQ ID NO: 44397 - RNA, 21 nt, Human
agaaugguguggacccaggag

SEQ ID NO: 44398 - RNA, 32 nt, Human
agaaugguguggccaccuccucccuuucaagc

SEQ ID NO: 44399 - RNA, 32 nt, Human
agaaugguugggaaugucaucaugagcagccu

SEQ ID NO: 44400 - RNA, 32 nt, Human
agaaugguuugggguaucacacaaaacaccag

SEQ ID NO: 44401 - RNA, 32 nt, Human
agaauguaagguauaucauucuaaagauagag

SEQ ID NO: 44402 - RNA, 32 nt, Human
agaauguaaugaaagaccuguacuggugccgg

SEQ ID NO: 44403 - RNA, 32 nt, Human
agaauguacacuuggccaggugcaguggcuca

SEQ ID NO: 44404 - RNA, 31 nt, Human
agaaugucaauaaauuugcuuuuugagaugu

SEQ ID NO: 44405 - RNA, 32 nt, Human
agaaugucaggccacuuuggggacuuggcaaa

SEQ ID NO: 44406 - RNA, 32 nt, Human
agaaugucaguucuguuuuaaguaacagaauu

SEQ ID NO: 44407 - RNA, 32 nt, Human
agaauguccacaggccuggccugggggcugug

SEQ ID NO: 44408 - RNA, 28 nt, Human
agaaugucccguuuucgaggcugcagua

SEQ ID NO: 44409 - RNA, 32 nt, Human
agaaugucucuuccuugugcuaccacaacccu

SEQ ID NO: 44410 - RNA, 32 nt, Human
agaaugucuguuucuaacaaauccacaaauag

SEQ ID NO: 44411 - RNA, 32 nt, Human
agaaugucuuucuccucuccuaagucuuugcu

SEQ ID NO: 44412 - RNA, 32 nt, Human
agaaugucuuucugcauauuacugaacagaau

SEQ ID NO: 44413 - RNA, 32 nt, Human
agaaugugaaauucugaccaccuuuuggcuuu

SEQ ID NO: 44414 - RNA, 32 nt, Human
agaaugugagacaauuuucuauugaauacgau

SEQ ID NO: 44415 - RNA, 32 nt, Human
agaaugugagacaauuuucuauugaauaugau

SEQ ID NO: 44416 - RNA, 32 nt, Human
agaaugugaggucuucuuccagaagcuucugc

SEQ ID NO: 44417 - RNA, 23 nt, Human
agaaugugccaagagucccgcca

SEQ ID NO: 44418 - RNA, 32 nt, Human
agaaugugccacuggacucccagccuggguga

SEQ ID NO: 44419 - RNA, 32 nt, Human
agaaugugcuaaugugauuaccucauauuagc

SEQ ID NO: 44420 - RNA, 32 nt, Human
agaaugugcuuugguguauugagucugaugag

SEQ ID NO: 44421 - RNA, 32 nt, Human
agaauguggcaaagccuuuaaccaguuuucaa

SEQ ID NO: 44422 - RNA, 32 nt, Human
agaauguggcuucauccucuuccucuguggga

SEQ ID NO: 44423 - RNA, 29 nt, Human
agaaugugucugucuuugccuggugucuu

SEQ ID NO: 44424 - RNA, 28 nt, Human
agaaugugugggcgaacauccugucacu

SEQ ID NO: 44425 - RNA, 32 nt, Human
agaauguuauuguugacucucucccaagugcc

SEQ ID NO: 44426 - RNA, 32 nt, Human
agaauguucuuuuggccacugugaagccucag

SEQ ID NO: 44427 - RNA, 32 nt, Human
agaauguugacacacaaggcuuggggauuaga

SEQ ID NO: 44428 - RNA, 32 nt, Human
agaauguugcaccugcucuaguaccauagguc

SEQ ID NO: 44429 - RNA, 32 nt, Human
agaauuaaaagcuucccaaaaaccaaucagaa

SEQ ID NO: 44430 - RNA, 32 nt, Human
agaauuaaaaggcaguugcuguggaaacaguu

SEQ ID NO: 44431 - RNA, 32 nt, Human
agaauuaaaggccauggaugaagaugggcuug

SEQ ID NO: 44432 - RNA, 32 nt, Human
agaauuaacuccauuccagucucugcauguaa

SEQ ID NO: 44433 - RNA, 26 nt, Human
agaauuaacugaucugaagugacugg

SEQ ID NO: 44434 - RNA, 32 nt, Human
agaauuaacuuagucuguaauguggcuucaaa

SEQ ID NO: 44435 - RNA, 32 nt, Human
agaauuacacaagugugacuauacaaauugua

SEQ ID NO: 44436 - RNA, 32 nt, Human
agaauuacagaagccccugcccagugaacaga

SEQ ID NO: 44437 - RNA, 32 nt, Human
agaauuacaguacacaucuccagaauccauaa

SEQ ID NO: 44438 - RNA, 32 nt, Human
agaauuacugcacugggcagacuaaguuggau

SEQ ID NO: 44439 - RNA, 21 nt, Human
agaauuacuugaacccaggag

SEQ ID NO: 44440 - RNA, 21 nt, Human
agaauuacuugagcccaggag

SEQ ID NO: 44441 - RNA, 32 nt, Human
agaauuagcaugugcguagugaagagcacagg

SEQ ID NO: 44442 - RNA, 32 nt, Human
agaauuagccugggcaacagagcaagacucug

SEQ ID NO: 44443 - RNA, 31 nt, Human
agaauuaggcacuuggaacguuuuugcuggc

SEQ ID NO: 44444 - RNA, 31 nt, Human
agaauuaggcacuuggagcguuuuugcuggc

SEQ ID NO: 44445 - RNA, 32 nt, Human
agaauuaggggccuugaaaauaugacaaacuc

SEQ ID NO: 44446 - RNA, 32 nt, Human
agaauuauagagccauggaaggucaggcuaca

SEQ ID NO: 44447 - RNA, 32 nt, Human
agaauuauagucuuuggugcucuguuuucaau

SEQ ID NO: 44448 - RNA, 32 nt, Human
agaauuaugucuguaaguuggaagagaauuaa

SEQ ID NO: 44449 - RNA, 32 nt, Human
agaauuauguuuaguuaggaaaaaggaaaguc

SEQ ID NO: 44450 - RNA, 32 nt, Human
agaauuauuugaaccugggaggcggagguugc

SEQ ID NO: 44451 - RNA, 32 nt, Human
agaauucacauaugaacuauuucuaggcuuug

SEQ ID NO: 44452 - RNA, 32 nt, Human
agaauucacccaggcuccagcuagaucaucag

SEQ ID NO: 44453 - RNA, 32 nt, Human
agaauucacuguaauggaaucuugccucuaau

SEQ ID NO: 44454 - RNA, 32 nt, Human
agaauucagaacuuggguuucaauuguagaau

SEQ ID NO: 44455 - RNA, 32 nt, Human
agaauucagagccaauaugugcuugcuuauua

SEQ ID NO: 44456 - RNA, 32 nt, Human
agaauucagcagcucaacaguaaugaaaguga

SEQ ID NO: 44457 - RNA, 32 nt, Human
agaauucaucugggacuggcuuuugcuuuagg

SEQ ID NO: 44458 - RNA, 32 nt, Human
agaauucauggacacggcccccagucaggggg

SEQ ID NO: 44459 - RNA, 19 nt, Human
agaauuccaaaaacccuga

SEQ ID NO: 44460 - RNA, 32 nt, Human
agaauuccaagaacuguuacauauaaucauau

SEQ ID NO: 44461 - RNA, 32 nt, Human
agaauuccagaaggaggccagggcauaaguug

SEQ ID NO: 44462 - RNA, 20 nt, Human
agaauuccaugaacccagga

SEQ ID NO: 44463 - RNA, 32 nt, Human
agaauuccgagccagcccauuucuagaauguc

SEQ ID NO: 44464 - RNA, 32 nt, Human
agaauuccucccuggauggaagugguccuuau

SEQ ID NO: 44465 - RNA, 32 nt, Human
agaauuccuguguggcccuccugucuggagug

SEQ ID NO: 44466 - RNA, 32 nt, Human
agaauuccuuuaaucauugcugcccaggggcu

SEQ ID NO: 44467 - RNA, 32 nt, Human
agaauucgguggggugaaugccacuccaaaug

SEQ ID NO: 44468 - RNA, 32 nt, Human
agaauucuaggcagcaccuuagggagggacug

SEQ ID NO: 44469 - RNA, 32 nt, Human
agaauucucauuggaagaaaugacaggaaagc

SEQ ID NO: 44470 - RNA, 32 nt, Human
agaauucucccaucgcacaccugggggcaagu

SEQ ID NO: 44471 - RNA, 32 nt, Human
agaauucucugcacuccucucugcuucacauu

SEQ ID NO: 44472 - RNA, 32 nt, Human
agaauucugaguuuuucaaacacuagucuaga

SEQ ID NO: 44473 - RNA, 32 nt, Human
agaauucugggcaagucacccaggaugcuggg

SEQ ID NO: 44474 - RNA, 32 nt, Human
agaauucuuaccaucuuacuccugccucccca

SEQ ID NO: 44475 - RNA, 32 nt, Human
agaauucuuaucucuagcuugguuuccacaug

SEQ ID NO: 44476 - RNA, 32 nt, Human
agaauucuucauccuccacgguucacuagcuc

SEQ ID NO: 44477 - RNA, 21 nt, Human
agaauucuuugaacccaggag

SEQ ID NO: 44478 - RNA, 32 nt, Human
agaauugaaagaagaacuugaaaccagaguga

SEQ ID NO: 44479 - RNA, 32 nt, Human
agaauugaaagagaccugagguucauccaguc

SEQ ID NO: 44480 - RNA, 32 nt, Human
agaauugaaaucaagacuauuucuuuggaaua

SEQ ID NO: 44481 - RNA, 32 nt, Human
agaauugaacccaggagguggagguugcagug

SEQ ID NO: 44482 - RNA, 32 nt, Human
agaauugacacccaugagaguguuuuguggua

SEQ ID NO: 44483 - RNA, 32 nt, Human
agaauugacggcucuggacccaggacagacag

SEQ ID NO: 44484 - RNA, 18 nt, Human
agaauugagacucaggag

SEQ ID NO: 44485 - RNA, 32 nt, Human
agaauugagcccagauaugacauugugcaugc

SEQ ID NO: 44486 - RNA, 32 nt, Human
agaauugaggaaaugcaaagugaagaauucua

SEQ ID NO: 44487 - RNA, 32 nt, Human
agaauugaggagggguuguguuaaccaauuag

SEQ ID NO: 44488 - RNA, 32 nt, Human
agaauugagggaagagagagaccuucuuauau

SEQ ID NO: 44489 - RNA, 32 nt, Human
agaauugaguccauuuucuagcugccuuuauu

SEQ ID NO: 44490 - RNA, 32 nt, Human
agaauugauaaauguguacaacaggguccuuu

SEQ ID NO: 44491 - RNA, 32 nt, Human
agaauugauugcucagccgagugugggaacag

SEQ ID NO: 44492 - RNA, 32 nt, Human
agaauugcacacaguuuccaggaauaucuuuu

SEQ ID NO: 44493 - RNA, 31 nt, Human
agaauugcacuuuccugcuugucaugacuuu

SEQ ID NO: 44494 - RNA, 32 nt, Human
agaauugccuagauuccuucucucaucaacgg

SEQ ID NO: 44495 - RNA, 21 nt, Human
agaauugccugaacccaggag

SEQ ID NO: 44496 - RNA, 21 nt, Human
agaauugccugagcccaggag

SEQ ID NO: 44497 - RNA, 32 nt, Human
agaauugcgcugcuucagccccaucuccagcc

SEQ ID NO: 44498 - RNA, 21 nt, Human
agaauugcgugaauccaggag

SEQ ID NO: 44499 - RNA, 21 nt, Human
agaauugcugaaacccgggag

SEQ ID NO: 44500 - RNA, 21 nt, Human
agaauugcuggaacccaggag

SEQ ID NO: 44501 - RNA, 32 nt, Human
agaauugcuugaacagggaggcagagguugca

SEQ ID NO: 44502 - RNA, 21 nt, Human
agaauugcuugaacccaggag

SEQ ID NO: 44503 - RNA, 32 nt, Human
agaauugcuugaaccugggaggaggagguugc

SEQ ID NO: 44504 - RNA, 32 nt, Human
agaauugcuugaaccugggaggcggaaguugc

SEQ ID NO: 44505 - RNA, 32 nt, Human
agaauugcuugaaccugggaggcggagguugc

SEQ ID NO: 44506 - RNA, 32 nt, Human
agaauugcuugaaccugggaggcggagguugu

SEQ ID NO: 44507 - RNA, 32 nt, Human
agaauugcuugaaccugggagguggagguugc

SEQ ID NO: 44508 - RNA, 32 nt, Human
agaauugcuugacccugggagguggagguggc

SEQ ID NO: 44509 - RNA, 21 nt, Human
agaauugcuugagcccaggag

SEQ ID NO: 44510 - RNA, 32 nt, Human
agaauugcuugagccugggaggcagagauugc

SEQ ID NO: 44511 - RNA, 32 nt, Human
agaauugcuugagccugggagguggagguugc

SEQ ID NO: 44512 - RNA, 32 nt, Human
agaauugcuugagccugggagguggagguuuc

SEQ ID NO: 44513 - RNA, 32 nt, Human
agaauugcuuggaccuaggagguggagguugc

SEQ ID NO: 44514 - RNA, 21 nt, Human
agaauugcuugggcccaggag

SEQ ID NO: 44515 - RNA, 32 nt, Human
agaauugcuuugaacccgggaggcagagguug

SEQ ID NO: 44516 - RNA, 32 nt, Human
agaauugcuuuguggcugggugcagugguuca

SEQ ID NO: 44517 - RNA, 32 nt, Human
agaauuggaagaggaggcagaagaggagcagc

SEQ ID NO: 44518 - RNA, 32 nt, Human
agaauuggagagcaguaaaagacugaagauaa

SEQ ID NO: 44519 - RNA, 32 nt, Human
agaauuggauccuaggugcuuagcccugcaau

SEQ ID NO: 44520 - RNA, 32 nt, Human
agaauuggaucuggcagccccuccucaggaag

SEQ ID NO: 44521 - RNA, 32 nt, Human
agaauuggcccagccucagauccugucuuuag

SEQ ID NO: 44522 - RNA, 32 nt, Human
agaauuggcucaauaaagauuucaagauccuc

SEQ ID NO: 44523 - RNA, 32 nt, Human
agaauuggcuuguauaguuauaacaaccacag

SEQ ID NO: 44524 - RNA, 32 nt, Human
agaauugggcugggaccucucuccccaacugc

SEQ ID NO: 44525 - RNA, 32 nt, Human
agaauugggcugggguuucuccuucuuuucag

SEQ ID NO: 44526 - RNA, 32 nt, Human
agaauuggguuauauuugaaauugcugauacu

SEQ ID NO: 44527 - RNA, 32 nt, Human
agaauuggguucugucaugaagggaguagcac

SEQ ID NO: 44528 - RNA, 32 nt, Human
agaauugguggucugggcuggauuccagagaa

SEQ ID NO: 44529 - RNA, 21 nt, Human
agaauugguugaacccaggag

SEQ ID NO: 44530 - RNA, 32 nt, Human
agaauuguaaacagaacaaaaugagugaugug

SEQ ID NO: 44531 - RNA, 20 nt, Human
agaauuguaaacucuaggaa

SEQ ID NO: 44532 - RNA, 32 nt, Human
agaauuguagcaccaugaaacagaccucuggg

SEQ ID NO: 44533 - RNA, 32 nt, Human
agaauugucgugcuuugagaaaacaccugagg

SEQ ID NO: 44534 - RNA, 32 nt, Human
agaauugugccuugcauauuacuugagcuuaa

SEQ ID NO: 44535 - RNA, 32 nt, Human
agaauugugugaauguucugaucacuaccacc

SEQ ID NO: 44536 - RNA, 32 nt, Human
agaauuguuccugccuuuagcuuuucagaacu

SEQ ID NO: 44537 - RNA, 32 nt, Human
agaauuguuguugggcugggcgcaguggaucg

SEQ ID NO: 44538 - RNA, 32 nt, Human
agaauuguuugaaccugggaggcggaggcugc

SEQ ID NO: 44539 - RNA, 32 nt, Human
agaauuguuuuuagaaauuuauucuuaucuua

SEQ ID NO: 44540 - RNA, 32 nt, Human
agaauuuagagagugcauuggugaggauucuu

SEQ ID NO: 44541 - RNA, 18 nt, Human
agaauuuagcuuccagga

SEQ ID NO: 44542 - RNA, 32 nt, Human
agaauuuaguuuguacucaguggacagugcug

SEQ ID NO: 44543 - RNA, 32 nt, Human
agaauuuauguucaccuuuauuacaauuucaa

SEQ ID NO: 44544 - RNA, 32 nt, Human
agaauuucauucuuucaugcucuguaccucaa

SEQ ID NO: 44545 - RNA, 32 nt, Human
agaauuucauucuuugucauuauaauccaaaa

SEQ ID NO: 44546 - RNA, 19 nt, Human
agaauuuccccaucuuucu

SEQ ID NO: 44547 - RNA, 32 nt, Human
agaauuuccugcaugcucacacagcccuuccc

SEQ ID NO: 44548 - RNA, 32 nt, Human
agaauuucgagaccagccuggccaacauggug

SEQ ID NO: 44549 - RNA, 32 nt, Human
agaauuucucucugucgcccaggcuggaguac

SEQ ID NO: 44550 - RNA, 32 nt, Human
agaauuucugaaagagaaagagaaguagaugg

SEQ ID NO: 44551 - RNA, 32 nt, Human
agaauuucuggaaguggucacuuuaaaaauua

SEQ ID NO: 44552 - RNA, 32 nt, Human
agaauuugaagucacugucugaggagcuggug

SEQ ID NO: 44553 - RNA, 32 nt, Human
agaauuugaggaacuggaugugacugucauug

SEQ ID NO: 44554 - RNA, 32 nt, Human
agaauuugccaauauuuuucaaggagaggcuu

SEQ ID NO: 44555 - RNA, 32 nt, Human
agaauuuggagaugguucugcccacucugauu

SEQ ID NO: 44556 - RNA, 32 nt, Human
agaauuuggagaugguucugcccacucugguu

SEQ ID NO: 44557 - RNA, 18 nt, Human
agaauuuggagucuucuu

SEQ ID NO: 44558 - RNA, 32 nt, Human
agaauuuggcuuaauucucacuccagguaagu

SEQ ID NO: 44559 - RNA, 32 nt, Human
agaauuuggggaagaagucacauaucaguccu

SEQ ID NO: 44560 - RNA, 32 nt, Human
agaauuugugaacccacaagaacauuaauguc

SEQ ID NO: 44561 - RNA, 32 nt, Human
agaauuuuaaauacaauaaacacuucauauua

SEQ ID NO: 44562 - RNA, 19 nt, Human
agaauuuuaucuucuuccu

SEQ ID NO: 44563 - RNA, 32 nt, Human
agaauuuucacuguagugucauccccucacag

SEQ ID NO: 44564 - RNA, 32 nt, Human
agaauuuuccaaagucaaugggcuuagcauga

SEQ ID NO: 44565 - RNA, 21 nt, Human
agaauuuucuccccgucuucc

SEQ ID NO: 44566 - RNA, 32 nt, Human
agaauuuucuguuuuaaugcauguuauacuuu

SEQ ID NO: 44567 - RNA, 19 nt, Human
agaauuuugaaaaucccga

SEQ ID NO: 44568 - RNA, 32 nt, Human
agaauuuugcagaaucuaagagucacaccucu

SEQ ID NO: 44569 - RNA, 32 nt, Human
agaauuuuuaaaacaaaaucucucauuccagc

SEQ ID NO: 44570 - RNA, 18 nt, Human
agaauuuuuagucuucuu

SEQ ID NO: 44571 - RNA, 20 nt, Human
agacaaaaagacagacaagg

SEQ ID NO: 44572 - RNA, 32 nt, Human
agacaaaaauaagagccugaagcaaugcuuac

SEQ ID NO: 44573 - RNA, 32 nt, Human
agacaaaaaugaaagagacacaggguguauau

SEQ ID NO: 44574 - RNA, 32 nt, Human
agacaaaaaugagaaccugaagcaaugcuuac

SEQ ID NO: 44575 - RNA, 32 nt, Human
agacaaaaaugagagccugaagcaaugcuuac

SEQ ID NO: 44576 - RNA, 32 nt, Human
agacaaaaaugagggccugaagcaaugcuuac

SEQ ID NO: 44577 - RNA, 32 nt, Human
agacaaaaauuagcugggcguggugguacaug

SEQ ID NO: 44578 - RNA, 32 nt, Human
agacaaaacuccagcacauaaaggacaaugac

SEQ ID NO: 44579 - RNA, 32 nt, Human
agacaaaagagaaagaugacaaguaggacuua

SEQ ID NO: 44580 - RNA, 32 nt, Human
agacaaaaggaccugggucugcauuucccaaa

SEQ ID NO: 44581 - RNA, 32 nt, Human
agacaaaauaaagguuaaagagggcauaaagg

SEQ ID NO: 44582 - RNA, 32 nt, Human
agacaaaauagaggagagaaagagagcaugag

SEQ ID NO: 44583 - RNA, 32 nt, Human
agacaaacaaaacgcacaaagccuaugagcuc

SEQ ID NO: 44584 - RNA, 23 nt, Human
agacaaaccaaucaaccacgaca

SEQ ID NO: 44585 - RNA, 32 nt, Human
agacaaacccuugaugcuccuugcucggcguu

SEQ ID NO: 44586 - RNA, 32 nt, Human
agacaaacccuugugcaccuuucucccaccuc

SEQ ID NO: 44587 - RNA, 32 nt, Human
agacaaacgagaaaauccuggcuacccaaguc

SEQ ID NO: 44588 - RNA, 32 nt, Human
agacaaagacaccugaggacuaugcugacucg

SEQ ID NO: 44589 - RNA, 32 nt, Human
agacaaagagggugaggucuucaugagucucc

SEQ ID NO: 44590 - RNA, 32 nt, Human
agacaaagaggguggaaaacucugaauuagcc

SEQ ID NO: 44591 - RNA, 32 nt, Human
agacaaagaucauuccacucagccugggacga

SEQ ID NO: 44592 - RNA, 32 nt, Human
agacaaagcaaagccacauuuugcauuagaca

SEQ ID NO: 44593 - RNA, 32 nt, Human
agacaaagcaguuccagguggucaagggcagu

SEQ ID NO: 44594 - RNA, 32 nt, Human
agacaaagccgcgguaaugaauggagcguccg

SEQ ID NO: 44595 - RNA, 24 nt, Human
agacaaagcugauggcacuauguu

SEQ ID NO: 44596 - RNA, 32 nt, Human
agacaaagcugcagagcacauuccaugccaga

SEQ ID NO: 44597 - RNA, 32 nt, Human
agacaaagcugugggagccaagaauaagacag

SEQ ID NO: 44598 - RNA, 32 nt, Human
agacaaaggccaccaucuuccagaccccagaa

SEQ ID NO: 44599 - RNA, 24 nt, Human
agacaaaggcuaaaaaacaugcca

SEQ ID NO: 44600 - RNA, 32 nt, Human
agacaaaggcucuacacauacugcaugcucag

SEQ ID NO: 44601 - RNA, 32 nt, Human
agacaaagggcacccuuguggcuuugggaccu

SEQ ID NO: 44602 - RNA, 21 nt, Human
agacaaaguaguauuauguug

SEQ ID NO: 44603 - RNA, 21 nt, Human
agacaaagucucacucuguug

SEQ ID NO: 44604 - RNA, 21 nt, Human
agacaaagucucacuguguca

SEQ ID NO: 44605 - RNA, 21 nt, Human
agacaaagucucgcucuguca

SEQ ID NO: 44606 - RNA, 21 nt, Human
agacaaagucuuguucuguug

SEQ ID NO: 44607 - RNA, 32 nt, Human
agacaaaguucagauagcugcuaaugaagaga

SEQ ID NO: 44608 - RNA, 32 nt, Human
agacaaauaaacagcagaagcaaauggucacc

SEQ ID NO: 44609 - RNA, 32 nt, Human
agacaaauaauuuugggagcugccuuugcaaa

SEQ ID NO: 44610 - RNA, 22 nt, Human
agacaaauacucuagauuccac

SEQ ID NO: 44611 - RNA, 32 nt, Human
agacaaauagugaaccagagagccagaagccc

SEQ ID NO: 44612 - RNA, 20 nt, Human
agacaaaucuuacuaucuug

SEQ ID NO: 44613 - RNA, 32 nt, Human
agacaaauggauucccuuagaaguaagauuuc

SEQ ID NO: 44614 - RNA, 32 nt, Human
agacaacaagcagacucaaccaggccucuuug

SEQ ID NO: 44615 - RNA, 31 nt, Human
agacaacacaacacaggaggggauaaguacc

SEQ ID NO: 44616 - RNA, 32 nt, Human
agacaacacuucagaagcauacuacagccugc

SEQ ID NO: 44617 - RNA, 32 nt, Human
agacaacagagugagacccccaucucuccaaa

SEQ ID NO: 44618 - RNA, 32 nt, Human
agacaacagauugagguuagaggaucaguagg

SEQ ID NO: 44619 - RNA, 32 nt, Human
agacaacauggugaaaccuugucucuaugaaa

SEQ ID NO: 44620 - RNA, 32 nt, Human
agacaacauuguaagagagaugagcacuucua

SEQ ID NO: 44621 - RNA, 31 nt, Human
agacaaccaggguccaucaguagagggaacc

SEQ ID NO: 44622 - RNA, 32 nt, Human
agacaaccucauucagccucuugggcuccuuu

SEQ ID NO: 44623 - RNA, 32 nt, Human
agacaaccuggggaugccuguccccuaccugc

SEQ ID NO: 44624 - RNA, 32 nt, Human
agacaacuccuccaaaagaugaaccacauucu

SEQ ID NO: 44625 - RNA, 21 nt, Human
agacaacuguugaaaacucca

SEQ ID NO: 44626 - RNA, 32 nt, Human
agacaacuucccucauuccaucaucaccaucu

SEQ ID NO: 44627 - RNA, 21 nt, Human
agacaagaaagggugcuuuca

SEQ ID NO: 44628 - RNA, 32 nt, Human
agacaagaagugagacuggagggaaaggguag

SEQ ID NO: 44629 - RNA, 32 nt, Human
agacaagaauuugaccuagagaacaaauucaa

SEQ ID NO: 44630 - RNA, 32 nt, Human
agacaagaauuuuccauucuguuuucauaacu

SEQ ID NO: 44631 - RNA, 32 nt, Human
agacaagacacauggacccugccuuuauggua

SEQ ID NO: 44632 - RNA, 32 nt, Human
agacaagacaucugaaaagcucuccugcagca

SEQ ID NO: 44633 - RNA, 32 nt, Human
agacaagaccagccuggccaacauggugaaac

SEQ ID NO: 44634 - RNA, 32 nt, Human
agacaagaccagggcuggagcugggguggaag

SEQ ID NO: 44635 - RNA, 32 nt, Human
agacaagacuuugacaggggugccuaauuuuu

SEQ ID NO: 44636 - RNA, 32 nt, Human
agacaagagaaauuuggccagauggggaaggu

SEQ ID NO: 44637 - RNA, 23 nt, Human
agacaagagaguagccucuccag

SEQ ID NO: 44638 - RNA, 32 nt, Human
agacaagaggagaaggagagccugggacggga

SEQ ID NO: 44639 - RNA, 32 nt, Human
agacaagaggcggcuccccagccuggguuucc

SEQ ID NO: 44640 - RNA, 22 nt, Human
agacaagaguuucaccauguug

SEQ ID NO: 44641 - RNA, 20 nt, Human
agacaagaguuucucucugu

SEQ ID NO: 44642 - RNA, 32 nt, Human
agacaagauggcuaggccaucaccaaccaacg

SEQ ID NO: 44643 - RNA, 32 nt, Human
agacaagauuccugggcccugccuuccauaca

SEQ ID NO: 44644 - RNA, 32 nt, Human
agacaagcagaauuauuaauguagguaaugcc

SEQ ID NO: 44645 - RNA, 32 nt, Human
agacaagcagguggaggcauccagugauuucu

SEQ ID NO: 44646 - RNA, 32 nt, Human
agacaagcguguuuggcagugccaggccucuu

SEQ ID NO: 44647 - RNA, 32 nt, Human
agacaagcucugcccagcuacauugagauccc

SEQ ID NO: 44648 - RNA, 32 nt, Human
agacaaggaaacugaggccagagggaggagag

SEQ ID NO: 44649 - RNA, 32 nt, Human
agacaaggaaacugaggcucagggaagccaag

SEQ ID NO: 44650 - RNA, 32 nt, Human
agacaaggaagcagggccagcagugagacuau

SEQ ID NO: 44651 - RNA, 32 nt, Human
agacaaggaccagcuuuggggccuccaccugc

SEQ ID NO: 44652 - RNA, 32 nt, Human
agacaaggacuuugauccuguccccuuuggca

SEQ ID NO: 44653 - RNA, 32 nt, Human
agacaaggagaaaccugaaagcagcccaguua

SEQ ID NO: 44654 - RNA, 32 nt, Human
agacaaggauggacuguagcagugaguuggca

SEQ ID NO: 44655 - RNA, 32 nt, Human
agacaaggcucuggacagccgguccagccaca

SEQ ID NO: 44656 - RNA, 32 nt, Human
agacaaggcugcagucaaaugggaggguccag

SEQ ID NO: 44657 - RNA, 32 nt, Human
agacaaggcuucagaagaagugucuaaaucac

SEQ ID NO: 44658 - RNA, 32 nt, Human
agacaagggaaagcaggugagggagagaguag

SEQ ID NO: 44659 - RNA, 23 nt, Human
agacaagggaaauguagacuuca

SEQ ID NO: 44660 - RNA, 22 nt, Human
agacaagggucuuaccauguug

SEQ ID NO: 44661 - RNA, 32 nt, Human
agacaagggugguggccgcucuggaggugccu

SEQ ID NO: 44662 - RNA, 21 nt, Human
agacaaggucucacuacauug

SEQ ID NO: 44663 - RNA, 19 nt, Human
agacaaggucucacuaugu

SEQ ID NO: 44664 - RNA, 32 nt, Human
agacaaggucucacuauguggcccaggcuggu

SEQ ID NO: 44665 - RNA, 21 nt, Human
agacaaggucucacucuguca

SEQ ID NO: 44666 - RNA, 21 nt, Human
agacaaggucucgccauguug

SEQ ID NO: 44667 - RNA, 21 nt, Human
agacaaggucucgcuaugcug

SEQ ID NO: 44668 - RNA, 32 nt, Human
agacaaggugcaaagcgaaacugguugcucaa

SEQ ID NO: 44669 - RNA, 21 nt, Human
agacaagguuucaccauauug

SEQ ID NO: 44670 - RNA, 25 nt, Human
agacaagguuucaccauauuggcca

SEQ ID NO: 44671 - RNA, 20 nt, Human
agacaagguuucaccauguu

SEQ ID NO: 44672 - RNA, 21 nt, Human
agacaagguuucaccauguua

SEQ ID NO: 44673 - RNA, 21 nt, Human
agacaagguuucaccauguug

SEQ ID NO: 44674 - RNA, 21 nt, Human
agacaagguuucacccuguug

SEQ ID NO: 44675 - RNA, 21 nt, Human
agacaagguuucacuauguug

SEQ ID NO: 44676 - RNA, 21 nt, Human
agacaagguuucgccauguug

SEQ ID NO: 44677 - RNA, 25 nt, Human
agacaagguuucgccauguuggcca

SEQ ID NO: 44678 - RNA, 21 nt, Human
agacaagguuucgcuauguug

SEQ ID NO: 44679 - RNA, 21 nt, Human
agacaagguuuugccauguug

SEQ ID NO: 44680 - RNA, 32 nt, Human
agacaaguccccuugccucccucuacugagag

SEQ ID NO: 44681 - RNA, 32 nt, Human
agacaagugcagcugcugugccugugccagga

SEQ ID NO: 44682 - RNA, 22 nt, Human
agacaagugugggcaacacagc

SEQ ID NO: 44683 - RNA, 32 nt, Human
agacaagugugggcaacacagcaagaccccau

SEQ ID NO: 44684 - RNA, 32 nt, Human
agacaaguuccggcaagggagcagggaagaug

SEQ ID NO: 44685 - RNA, 32 nt, Human
agacaauaaggguuuuuaguuuuaucuacucu

SEQ ID NO: 44686 - RNA, 32 nt, Human
agacaauacccuucaaacuuugagaguuuaca

SEQ ID NO: 44687 - RNA, 32 nt, Human
agacaauacugugccuagccugugcaagggau

SEQ ID NO: 44688 - RNA, 32 nt, Human
agacaauaggaagagaugucagcucugcucuc

SEQ ID NO: 44689 - RNA, 32 nt, Human
agacaauaugggauggucggaggcagaggugu

SEQ ID NO: 44690 - RNA, 32 nt, Human
agacaauggaaacuguaccauacacauuggaa

SEQ ID NO: 44691 - RNA, 32 nt, Human
agacaaugggagacggcuuugaugaguggaga

SEQ ID NO: 44692 - RNA, 30 nt, Human
agacaaugugcccagugcccgcugcagcua

SEQ ID NO: 44693 - RNA, 32 nt, Human
agacaauguugacuaaugaauuaagauacauu

SEQ ID NO: 44694 - RNA, 32 nt, Human
agacaauucaagaucagcccugaaaaggggua

SEQ ID NO: 44695 - RNA, 32 nt, Human
agacaauucuucuuccaauguggcucagggaa

SEQ ID NO: 44696 - RNA, 32 nt, Human
agacaauucuucuuccaguguugcucagggaa

SEQ ID NO: 44697 - RNA, 32 nt, Human
agacaauucuuucucacuccugcccagagggu

SEQ ID NO: 44698 - RNA, 32 nt, Human
agacaauugugccuuuuaggagcuuuauguuu

SEQ ID NO: 44699 - RNA, 32 nt, Human
agacaauuuccuuuuuguccuuuuauauuuuu

SEQ ID NO: 44700 - RNA, 32 nt, Human
agacacaagcgcgcacacaggcuccgcacaca

SEQ ID NO: 44701 - RNA, 32 nt, Human
agacacacaagaaaucuggcuuggccaggauu

SEQ ID NO: 44702 - RNA, 32 nt, Human
agacacacacauauaucaauucucaugagugu

SEQ ID NO: 44703 - RNA, 32 nt, Human
agacacacaccuacccuccccagcuuuccagg

SEQ ID NO: 44704 - RNA, 32 nt, Human
agacacacagucagugucaggccauggacagg

SEQ ID NO: 44705 - RNA, 32 nt, Human
agacacacaguucuuccugcucugccuuuuuc

SEQ ID NO: 44706 - RNA, 32 nt, Human
agacacacauaaacucgcuucugagcguccac

SEQ ID NO: 44707 - RNA, 32 nt, Human
agacacaccaugagccuccucgucacccuucu

SEQ ID NO: 44708 - RNA, 32 nt, Human
agacacacgagaccaggcuuuaccaugaaagc

SEQ ID NO: 44709 - RNA, 32 nt, Human
agacacacgggaccuaaucagccucaaguuag

SEQ ID NO: 44710 - RNA, 32 nt, Human
agacacacucagcaaccacacggaucugacag

SEQ ID NO: 44711 - RNA, 32 nt, Human
agacacagaacagugcuuggcacauuguaaua

SEQ ID NO: 44712 - RNA, 32 nt, Human
agacacagaagcaccaggcuugccuggggugc

SEQ ID NO: 44713 - RNA, 32 nt, Human
agacacagaaggcagacugggugaggagaccu

SEQ ID NO: 44714 - RNA, 32 nt, Human
agacacagagagaagagggccgaggagagagg

SEQ ID NO: 44715 - RNA, 32 nt, Human
agacacagccauugccuccaccuccaccacag

SEQ ID NO: 44716 - RNA, 32 nt, Human
agacacagccuucugccuccucgccucuccug

SEQ ID NO: 44717 - RNA, 31 nt, Human
agacacaggcacuucucuccacagccugcua

SEQ ID NO: 44718 - RNA, 32 nt, Human
agacacagggaaaugggucuuagccuggggcc

SEQ ID NO: 44719 - RNA, 32 nt, Human
agacacagggccugugccccgagauuccagau

SEQ ID NO: 44720 - RNA, 32 nt, Human
agacacagggucucaccauguugcccagccug

SEQ ID NO: 44721 - RNA, 32 nt, Human
agacacagggucucacuauguugcccaggccg

SEQ ID NO: 44722 - RNA, 32 nt, Human
agacacagggucucgcuguguugcccaggcug

SEQ ID NO: 44723 - RNA, 32 nt, Human
agacacaggguuucaccauauuggccaggcug

SEQ ID NO: 44724 - RNA, 32 nt, Human
agacacaggguuucauaauguuccccaggcug

SEQ ID NO: 44725 - RNA, 32 nt, Human
agacacaggguuucuccauguuggucaggcug

SEQ ID NO: 44726 - RNA, 32 nt, Human
agacacaggucuuccccagaaucucacguggc

SEQ ID NO: 44727 - RNA, 21 nt, Human
agacacagucucacucuguca

SEQ ID NO: 44728 - RNA, 32 nt, Human
agacacaguggacaauggcauccuggaacacc

SEQ ID NO: 44729 - RNA, 32 nt, Human
agacacaguggacugaaaggacugguugaaag

SEQ ID NO: 44730 - RNA, 32 nt, Human
agacacaguucugugguggccaggccuguggg

SEQ ID NO: 44731 - RNA, 20 nt, Human
agacacaguuucacucguug

SEQ ID NO: 44732 - RNA, 32 nt, Human
agacacauaaugaagacuaagaaaaggaagaa

SEQ ID NO: 44733 - RNA, 32 nt, Human
agacacauauccacacagauacccacagaugc

SEQ ID NO: 44734 - RNA, 32 nt, Human
agacacauaugcacgagagagacagaggagga

SEQ ID NO: 44735 - RNA, 32 nt, Human
agacacaucacccagucucugcccucauguuc

SEQ ID NO: 44736 - RNA, 32 nt, Human
agacacaucauuuauacacaggcacaggggcc

SEQ ID NO: 44737 - RNA, 32 nt, Human
agacacaucggcuguucacacguuccccgcaa

SEQ ID NO: 44738 - RNA, 32 nt, Human
agacacaucuuccuuuuacuaacuggauaaaa

SEQ ID NO: 44739 - RNA, 32 nt, Human
agacacauggccuucuuuguguacaugacaug

SEQ ID NO: 44740 - RNA, 32 nt, Human
agacacauggcuugaaaauggaagacacaaaa

SEQ ID NO: 44741 - RNA, 32 nt, Human
agacacauguuucuccccagccuaaguguagu

SEQ ID NO: 44742 - RNA, 32 nt, Human
agacacauuacguggaccuggucccaggcuca

SEQ ID NO: 44743 - RNA, 32 nt, Human
agacaccaaacagagguaauggcacuuuacug

SEQ ID NO: 44744 - RNA, 32 nt, Human
agacaccaaaccagagguggaggaagaacggu

SEQ ID NO: 44745 - RNA, 27 nt, Human
agacaccaagccuuuagacuccagcag

SEQ ID NO: 44746 - RNA, 24 nt, Human
agacaccacucugguuucuucacu

SEQ ID NO: 44747 - RNA, 32 nt, Human
agacaccacugccaccaccaccaaccacgacc

SEQ ID NO: 44748 - RNA, 32 nt, Human
agacaccacuucucaugcuucucccucccuac

SEQ ID NO: 44749 - RNA, 32 nt, Human
agacaccagaacuuggguugagggcacuacca

SEQ ID NO: 44750 - RNA, 32 nt, Human
agacaccagacagacagauacugugaacuugg

SEQ ID NO: 44751 - RNA, 32 nt, Human
agacaccagacugaaguaaacagcugugcauc

SEQ ID NO: 44752 - RNA, 32 nt, Human
agacaccagaguagcugggaccacaggugugu

SEQ ID NO: 44753 - RNA, 32 nt, Human
agacaccagaugcucacggagaugcuggacac

SEQ ID NO: 44754 - RNA, 32 nt, Human
agacaccagcacuucugcuugcugggcuggcu

SEQ ID NO: 44755 - RNA, 32 nt, Human
agacaccagcagguggcugcagugacguuagg

SEQ ID NO: 44756 - RNA, 32 nt, Human
agacaccagccuagccuggcucugccccgcag

SEQ ID NO: 44757 - RNA, 32 nt, Human
agacaccagcucugaggccaguuaaucauccc

SEQ ID NO: 44758 - RNA, 32 nt, Human
agacaccagggcagccuggcccagaggagcaa

SEQ ID NO: 44759 - RNA, 32 nt, Human
agacaccagguguggagaugggucacuuaauu

SEQ ID NO: 44760 - RNA, 32 nt, Human
agacaccagugccucagaaacugcucggucag

SEQ ID NO: 44761 - RNA, 32 nt, Human
agacaccaugaaggaguaugugcuccuauuau

SEQ ID NO: 44762 - RNA, 32 nt, Human
agacaccaugaccacccuugaugauaaguugc

SEQ ID NO: 44763 - RNA, 25 nt, Human
agacacccaaccccaacuccagcag

SEQ ID NO: 44764 - RNA, 32 nt, Human
agacaccccagccaccuggcucagagagggac

SEQ ID NO: 44765 - RNA, 32 nt, Human
agacacccccaccuuccuccagccugugcgca

SEQ ID NO: 44766 - RNA, 32 nt, Human
agacacccccuaaaauucucacccucagcuau

SEQ ID NO: 44767 - RNA, 32 nt, Human
agacaccccugcccagcccacagcugccagag

SEQ ID NO: 44768 - RNA, 32 nt, Human
agacaccccugccuagcgugcugcuggcuguu

SEQ ID NO: 44769 - RNA, 32 nt, Human
agacacccucauuccuguaucuccaggacugg

SEQ ID NO: 44770 - RNA, 32 nt, Human
agacaccgaggcaggaggauugguugaggcca

SEQ ID NO: 44771 - RNA, 32 nt, Human
agacaccgcuggcugcuggacacccucuucac

SEQ ID NO: 44772 - RNA, 32 nt, Human
agacaccuaauguaacaaagucguucggcuuc

SEQ ID NO: 44773 - RNA, 32 nt, Human
agacaccuaucagagaagcagcaucaaccuag

SEQ ID NO: 44774 - RNA, 32 nt, Human
agacaccucugaguaaacucccagaaagccug

SEQ ID NO: 44775 - RNA, 32 nt, Human
agacaccucugucugccccacuguccuggggu

SEQ ID NO: 44776 - RNA, 32 nt, Human
agacaccugaaggaggugaggaagagagcccu

SEQ ID NO: 44777 - RNA, 32 nt, Human
agacaccugccacucgugaaugcaucugauaa

SEQ ID NO: 44778 - RNA, 32 nt, Human
agacaccugggcagacacugcaagaugagcuu

SEQ ID NO: 44779 - RNA, 32 nt, Human
agacaccuguagucccagcuacuuggagggca

SEQ ID NO: 44780 - RNA, 20 nt, Human
agacaccuguccccugcccu

SEQ ID NO: 44781 - RNA, 32 nt, Human
agacaccugugggagccggaagccagggggcc

SEQ ID NO: 44782 - RNA, 32 nt, Human
agacaccuguggucccagcuauucgggaggcu

SEQ ID NO: 44783 - RNA, 32 nt, Human
agacaccuuucagcucccuccugaagcaggcu

SEQ ID NO: 44784 - RNA, 32 nt, Human
agacacgaaagaacccggucuccagugucaca

SEQ ID NO: 44785 - RNA, 32 nt, Human
agacacgagcccccucccccagcccgucaccc

SEQ ID NO: 44786 - RNA, 31 nt, Human
agacacgcaaugucaggccauggcuggguca

SEQ ID NO: 44787 - RNA, 32 nt, Human
agacacgcaucccuugucuggccccaggcugc

SEQ ID NO: 44788 - RNA, 32 nt, Human
agacacggcccagggccccgaagaucaauaac

SEQ ID NO: 44789 - RNA, 32 nt, Human
agacacgggguuucaccauguuggccaggcug

SEQ ID NO: 44790 - RNA, 32 nt, Human
agacacggguuuucaccauguuggucaggcug

SEQ ID NO: 44791 - RNA, 32 nt, Human
agacacgucuuuucauuccaguccaguucagg

SEQ ID NO: 44792 - RNA, 32 nt, Human
agacacgugcuguuccaccucccuucagacua

SEQ ID NO: 44793 - RNA, 25 nt, Human
agacacguggacagggauagacaga

SEQ ID NO: 44794 - RNA, 32 nt, Human
agacacguguuuacuauguuacccaggcugga

SEQ ID NO: 44795 - RNA, 32 nt, Human
agacacuaagcagauuacaugaccuuauuuua

SEQ ID NO: 44796 - RNA, 32 nt, Human
agacacuaccuauucaugcagggcagaaacca

SEQ ID NO: 44797 - RNA, 32 nt, Human
agacacuaccugggagaugguggaggaugaag

SEQ ID NO: 44798 - RNA, 32 nt, Human
agacacuacuccuacuuaucuugcucauaaag

SEQ ID NO: 44799 - RNA, 32 nt, Human
agacacuaucagcagggacagaugugugggag

SEQ ID NO: 44800 - RNA, 32 nt, Human
agacacucaacaaccagaacaguuuuauuauu

SEQ ID NO: 44801 - RNA, 29 nt, Human
agacacucaauaaauaauuguugaauuca

SEQ ID NO: 44802 - RNA, 31 nt, Human
agacacucaauaaauacuuguugaauucaaa

SEQ ID NO: 44803 - RNA, 31 nt, Human
agacacucaauaaauauugccugaaaaugaa

SEQ ID NO: 44804 - RNA, 32 nt, Human
agacacucaaugccagccuguuaaagcagcug

SEQ ID NO: 44805 - RNA, 32 nt, Human
agacacucacacaauucucaauccacauuuca

SEQ ID NO: 44806 - RNA, 32 nt, Human
agacacucagacacccucacaaacacaguagu

SEQ ID NO: 44807 - RNA, 32 nt, Human
agacacucagccagacaggaggaaacugugac

SEQ ID NO: 44808 - RNA, 32 nt, Human
agacacucagcccuccccacccuggcucuccu

SEQ ID NO: 44809 - RNA, 31 nt, Human
agacacucaguaaauagcuguugaaugaaug

SEQ ID NO: 44810 - RNA, 32 nt, Human
agacacucaugcccuggcaauguggcugccag

SEQ ID NO: 44811 - RNA, 32 nt, Human
agacacuccaccacaaacuuuucacuuuagag

SEQ ID NO: 44812 - RNA, 32 nt, Human
agacacucggcgagguggaggugagggcgggc

SEQ ID NO: 44813 - RNA, 21 nt, Human
agacacucucaggccuggagg

SEQ ID NO: 44814 - RNA, 32 nt, Human
agacacugacaagcacgcacacacacgcaaau

SEQ ID NO: 44815 - RNA, 32 nt, Human
agacacugacugggcgaugggagcugcccacc

SEQ ID NO: 44816 - RNA, 32 nt, Human
agacacugauugacuggaagaccuggauuucu

SEQ ID NO: 44817 - RNA, 32 nt, Human
agacacugcaacaacaggagugcaaacuucuc

SEQ ID NO: 44818 - RNA, 32 nt, Human
agacacugcagagccugggagcaggggagggg

SEQ ID NO: 44819 - RNA, 32 nt, Human
agacacuggagcugcucugucccugaagaggc

SEQ ID NO: 44820 - RNA, 32 nt, Human
agacacugggagacagaaggggccggucccca

SEQ ID NO: 44821 - RNA, 32 nt, Human
agacacuguucuggacauuaaggcaacaaaau

SEQ ID NO: 44822 - RNA, 32 nt, Human
agacacuguugaauauugauguccuuauaaau

SEQ ID NO: 44823 - RNA, 32 nt, Human
agacacuuaaaauguuggggaaacguaagcgu

SEQ ID NO: 44824 - RNA, 32 nt, Human
agacacuuagaaguuauugaggacuuuaaaga

SEQ ID NO: 44825 - RNA, 32 nt, Human
agacacuucaugcuccaaggcuuuugagacac

SEQ ID NO: 44826 - RNA, 32 nt, Human
agacacuucccagcgauuccagccugggcucc

SEQ ID NO: 44827 - RNA, 32 nt, Human
agacacuuccgucacaucccaccccauccucc

SEQ ID NO: 44828 - RNA, 32 nt, Human
agacacuuuacagauaaccaguucucaugaaa

SEQ ID NO: 44829 - RNA, 19 nt, Human
agacacuuucacuguguug

SEQ ID NO: 44830 - RNA, 32 nt, Human
agacagaaaaggauuccaaugagaacuucagg

SEQ ID NO: 44831 - RNA, 32 nt, Human
agacagaaacccagaaaccaccugccacgaug

SEQ ID NO: 44832 - RNA, 19 nt, Human
agacagaaacucaagcagg

SEQ ID NO: 44833 - RNA, 32 nt, Human
agacagaaauauuuugccacuguuguuacuau

SEQ ID NO: 44834 - RNA, 32 nt, Human
agacagaagaagagaaacugggccagcauuau

SEQ ID NO: 44835 - RNA, 32 nt, Human
agacagaagaagucagagaagugaagagagau

SEQ ID NO: 44836 - RNA, 32 nt, Human
agacagaagagugagaagcagauggaggagaa

SEQ ID NO: 44837 - RNA, 32 nt, Human
agacagaaggggaggaagagaggccucguguc

SEQ ID NO: 44838 - RNA, 22 nt, Human
agacagaagucaaaaggaagag

SEQ ID NO: 44839 - RNA, 32 nt, Human
agacagaaguugagaaagguaacucuuaaacu

SEQ ID NO: 44840 - RNA, 32 nt, Human
agacagaaucaacauggaaagcacgacccaca

SEQ ID NO: 44841 - RNA, 32 nt, Human
agacagaaucucacuccagccugggcaacaga

SEQ ID NO: 44842 - RNA, 32 nt, Human
agacagaaugacagagagagaaaaugauucuc

SEQ ID NO: 44843 - RNA, 23 nt, Human
agacagacaagaagaggaagaga

SEQ ID NO: 44844 - RNA, 32 nt, Human
agacagacagacagacaggggguuguacagaa

SEQ ID NO: 44845 - RNA, 32 nt, Human
agacagacagcaagacacagaggcagagagac

SEQ ID NO: 44846 - RNA, 32 nt, Human
agacagacagcuagguggcugcagcccagcgc

SEQ ID NO: 44847 - RNA, 32 nt, Human
agacagacaugagagacaagcaucuucuuucc

SEQ ID NO: 44848 - RNA, 32 nt, Human
agacagaccacacaaacaccacugaaggaacg

SEQ ID NO: 44849 - RNA, 32 nt, Human
agacagaccagaaauuacccacccaaccaggc

SEQ ID NO: 44850 - RNA, 32 nt, Human
agacagaccaucucccugugguuguuugacug

SEQ ID NO: 44851 - RNA, 32 nt, Human
agacagacggcacgauggcacugagcucccag

SEQ ID NO: 44852 - RNA, 19 nt, Human
agacagacgggcacugcua

SEQ ID NO: 44853 - RNA, 32 nt, Human
agacagacuuccaagaguuacuguccacccgg

SEQ ID NO: 44854 - RNA, 32 nt, Human
agacagagaagauccuguguguuucucuguac

SEQ ID NO: 44855 - RNA, 32 nt, Human
agacagagaagccucucucaggagccagauga

SEQ ID NO: 44856 - RNA, 32 nt, Human
agacagagacaaagaggagacacuccaggaag

SEQ ID NO: 44857 - RNA, 32 nt, Human
agacagagacagagagagacugagggagagac

SEQ ID NO: 44858 - RNA, 32 nt, Human
agacagagagaaagaggagacacuccaggaag

SEQ ID NO: 44859 - RNA, 32 nt, Human
agacagagaggaggggacgaaggacgagccau

SEQ ID NO: 44860 - RNA, 32 nt, Human
agacagagagggcugaagccuugucagcaccu

SEQ ID NO: 44861 - RNA, 20 nt, Human
agacagagcacugacuaugu

SEQ ID NO: 44862 - RNA, 22 nt, Human
agacagagccaagcacugcuca

SEQ ID NO: 44863 - RNA, 32 nt, Human
agacagagccccacccucagaugcacaugagc

SEQ ID NO: 44864 - RNA, 32 nt, Human
agacagagccgauggggccagagcaggcagaa

SEQ ID NO: 44865 - RNA, 19 nt, Human
agacagagccucgcucguu

SEQ ID NO: 44866 - RNA, 17 nt, Human
agacagagcuagacugu

SEQ ID NO: 44867 - RNA, 19 nt, Human
agacagagcucgccuccua

SEQ ID NO: 44868 - RNA, 32 nt, Human
agacagagcugaccccuccaccaccaaaggcc

SEQ ID NO: 44869 - RNA, 18 nt, Human
agacagagcugggauguu

SEQ ID NO: 44870 - RNA, 32 nt, Human
agacagagcugguucuaagauuuaauacagug

SEQ ID NO: 44871 - RNA, 21 nt, Human
agacagagcuucuccauguug

SEQ ID NO: 44872 - RNA, 19 nt, Human
agacagagcuucucucugu

SEQ ID NO: 44873 - RNA, 21 nt, Human
agacagagcuucucucuguug

SEQ ID NO: 44874 - RNA, 32 nt, Human
agacagaggaagcagagccaggugccgagcgc

SEQ ID NO: 44875 - RNA, 32 nt, Human
agacagaggagaaaguggagcggggagggaau

SEQ ID NO: 44876 - RNA, 32 nt, Human
agacagaggaggcagagagggagagaaacaga

SEQ ID NO: 44877 - RNA, 32 nt, Human
agacagaggcaggaggaugacccagggucuag

SEQ ID NO: 44878 - RNA, 32 nt, Human
agacagaggccugaagcaaagacaucuggguc

SEQ ID NO: 44879 - RNA, 17 nt, Human
agacagaggcgcauguu

SEQ ID NO: 44880 - RNA, 15 nt, Human
agacagaggcucugu

SEQ ID NO: 44881 - RNA, 32 nt, Human
agacagagggagcagugaauagcaauagggug

SEQ ID NO: 44882 - RNA, 19 nt, Human
agacagagguugcagugag

SEQ ID NO: 44883 - RNA, 32 nt, Human
agacagaguagggacucgugugcacuggccac

SEQ ID NO: 44884 - RNA, 20 nt, Human
agacagagucacaaaugcug

SEQ ID NO: 44885 - RNA, 21 nt, Human
agacagagucaugcucuguca

SEQ ID NO: 44886 - RNA, 21 nt, Human
agacagagucccacucuguca

SEQ ID NO: 44887 - RNA, 16 nt, Human
agacagaguccucugu

SEQ ID NO: 44888 - RNA, 20 nt, Human
agacagagucucacacugug

SEQ ID NO: 44889 - RNA, 21 nt, Human
agacagagucucacacuguug

SEQ ID NO: 44890 - RNA, 21 nt, Human
agacagagucucacccuguug

SEQ ID NO: 44891 - RNA, 21 nt, Human
agacagagucucaccuuguca

SEQ ID NO: 44892 - RNA, 19 nt, Human
agacagagucucacucugu

SEQ ID NO: 44893 - RNA, 21 nt, Human
agacagagucucacucuguca

SEQ ID NO: 44894 - RNA, 21 nt, Human
agacagagucucacucugucc

SEQ ID NO: 44895 - RNA, 21 nt, Human
agacagagucucacucuguug

SEQ ID NO: 44896 - RNA, 20 nt, Human
agacagagucucacucuugu

SEQ ID NO: 44897 - RNA, 21 nt, Human
agacagagucucacugucuug

SEQ ID NO: 44898 - RNA, 19 nt, Human
agacagagucucacuguug

SEQ ID NO: 44899 - RNA, 18 nt, Human
agacagagucucacuuug

SEQ ID NO: 44900 - RNA, 19 nt, Human
agacagagucucacuuugu

SEQ ID NO: 44901 - RNA, 21 nt, Human
agacagagucucacuuuguca

SEQ ID NO: 44902 - RNA, 21 nt, Human
agacagagucucacuuuguug

SEQ ID NO: 44903 - RNA, 21 nt, Human
agacagagucucaugcuguug

SEQ ID NO: 44904 - RNA, 21 nt, Human
agacagagucucauucuguca

SEQ ID NO: 44905 - RNA, 21 nt, Human
agacagagucucccucuguca

SEQ ID NO: 44906 - RNA, 18 nt, Human
agacagagucuccuaguu

SEQ ID NO: 44907 - RNA, 19 nt, Human
agacagagucucgcacugu

SEQ ID NO: 44908 - RNA, 21 nt, Human
agacagagucucgcacuguug

SEQ ID NO: 44909 - RNA, 21 nt, Human
agacagagucucgccuuguca

SEQ ID NO: 44910 - RNA, 21 nt, Human
agacagagucucgcgcuguug

SEQ ID NO: 44911 - RNA, 20 nt, Human
agacagagucucgcuauugu

SEQ ID NO: 44912 - RNA, 19 nt, Human
agacagagucucgcucugu

SEQ ID NO: 44913 - RNA, 21 nt, Human
agacagagucucgcucuguca

SEQ ID NO: 44914 - RNA, 20 nt, Human
agacagagucucgcucuguu

SEQ ID NO: 44915 - RNA, 21 nt, Human
agacagagucucgcucuguug

SEQ ID NO: 44916 - RNA, 21 nt, Human
agacagagucucgcuuuguug

SEQ ID NO: 44917 - RNA, 19 nt, Human
agacagagucucguucugu

SEQ ID NO: 44918 - RNA, 21 nt, Human
agacagagucucucucugucc

SEQ ID NO: 44919 - RNA, 17 nt, Human
agacagagucucuguug

SEQ ID NO: 44920 - RNA, 19 nt, Human
agacagagucucuuucugu

SEQ ID NO: 44921 - RNA, 19 nt, Human
agacagagucuggcucugu

SEQ ID NO: 44922 - RNA, 21 nt, Human
agacagagucuggcucuguca

SEQ ID NO: 44923 - RNA, 20 nt, Human
agacagagucugguucuguu

SEQ ID NO: 44924 - RNA, 19 nt, Human
agacagagucuuacucugu

SEQ ID NO: 44925 - RNA, 21 nt, Human
agacagagucuuacucuguca

SEQ ID NO: 44926 - RNA, 21 nt, Human
agacagagucuuacucuguug

SEQ ID NO: 44927 - RNA, 21 nt, Human
agacagagucuuauucuguca

SEQ ID NO: 44928 - RNA, 19 nt, Human
agacagagucuuccucugu

SEQ ID NO: 44929 - RNA, 19 nt, Human
agacagagucuugcucugu

SEQ ID NO: 44930 - RNA, 21 nt, Human
agacagagucuugcucuguca

SEQ ID NO: 44931 - RNA, 21 nt, Human
agacagagucuugcucuguug

SEQ ID NO: 44932 - RNA, 22 nt, Human
agacagagucuugcucuuguug

SEQ ID NO: 44933 - RNA, 21 nt, Human
agacagagucuugcuuuguca

SEQ ID NO: 44934 - RNA, 21 nt, Human
agacagagucuugcuuuguug

SEQ ID NO: 44935 - RNA, 20 nt, Human
agacagagucuuggucuguu

SEQ ID NO: 44936 - RNA, 21 nt, Human
agacagagucuuggucuguug

SEQ ID NO: 44937 - RNA, 21 nt, Human
agacagagucuuucucuguca

SEQ ID NO: 44938 - RNA, 32 nt, Human
agacagagugagccaaugcucaccagccccag

SEQ ID NO: 44939 - RNA, 32 nt, Human
agacagagugauggccagcuuggggacauuug

SEQ ID NO: 44940 - RNA, 32 nt, Human
agacagagugcuuagaauuagauuugugauca

SEQ ID NO: 44941 - RNA, 32 nt, Human
agacagaguuaggaaguguggagucagaaugc

SEQ ID NO: 44942 - RNA, 21 nt, Human
agacagaguuucaccauguug

SEQ ID NO: 44943 - RNA, 25 nt, Human
agacagaguuucaccauguuggcca

SEQ ID NO: 44944 - RNA, 19 nt, Human
agacagaguuucacucugu

SEQ ID NO: 44945 - RNA, 21 nt, Human
agacagaguuucacucuguca

SEQ ID NO: 44946 - RNA, 22 nt, Human
agacagaguuucauucuuguug

SEQ ID NO: 44947 - RNA, 19 nt, Human
agacagaguuucauuguca

SEQ ID NO: 44948 - RNA, 19 nt, Human
agacagaguuucgcuuugu

SEQ ID NO: 44949 - RNA, 21 nt, Human
agacagaguuucgucauguug

SEQ ID NO: 44950 - RNA, 19 nt, Human
agacagaguuucucucugu

SEQ ID NO: 44951 - RNA, 21 nt, Human
agacagaguuucucucuguug

SEQ ID NO: 44952 - RNA, 22 nt, Human
agacagaguuuggcucuuguug

SEQ ID NO: 44953 - RNA, 21 nt, Human
agacagaguuuuaccauguug

SEQ ID NO: 44954 - RNA, 25 nt, Human
agacagaguuuuaccauguuggcca

SEQ ID NO: 44955 - RNA, 21 nt, Human
agacagaguuuugccauguug

SEQ ID NO: 44956 - RNA, 21 nt, Human
agacagaguuuugcuauguug

SEQ ID NO: 44957 - RNA, 21 nt, Human
agacagaguuuugcuguguug

SEQ ID NO: 44958 - RNA, 32 nt, Human
agacagaucugaauguucaguucuagccaagg

SEQ ID NO: 44959 - RNA, 32 nt, Human
agacagaugagcuccugccugcucugagacaa

SEQ ID NO: 44960 - RNA, 32 nt, Human
agacagaugcugggacaucauccuuggguacu

SEQ ID NO: 44961 - RNA, 32 nt, Human
agacagauggccuuauagauuuggaaaaugag

SEQ ID NO: 44962 - RNA, 32 nt, Human
agacagaugggacucaagcaggaugggugcua

SEQ ID NO: 44963 - RNA, 32 nt, Human
agacagaugugaaggaaauggaaaugaggcaa

SEQ ID NO: 44964 - RNA, 32 nt, Human
agacagauuuccauguaaaugugcacaagcca

SEQ ID NO: 44965 - RNA, 32 nt, Human
agacagauuugggccagacuccuguguccuug

SEQ ID NO: 44966 - RNA, 32 nt, Human
agacagcaauagaaaacuaauaaaccucccuc

SEQ ID NO: 44967 - RNA, 32 nt, Human
agacagcaccacugcacuccagccugggugac

SEQ ID NO: 44968 - RNA, 32 nt, Human
agacagcaccauugcaccccagccugagcaac

SEQ ID NO: 44969 - RNA, 32 nt, Human
agacagcagaagcagacaccuccagugaacua

SEQ ID NO: 44970 - RNA, 32 nt, Human
agacagcagcacgaggcaggcacuuuuacuuc

SEQ ID NO: 44971 - RNA, 32 nt, Human
agacagcagcuguacagacaaugcuggggcgg

SEQ ID NO: 44972 - RNA, 32 nt, Human
agacagcaggcagagcuccagaugggcaagga

SEQ ID NO: 44973 - RNA, 31 nt, Human
agacagcaguuucccuauauuauuuggaguc

SEQ ID NO: 44974 - RNA, 21 nt, Human
agacagcaucucacuauguug

SEQ ID NO: 44975 - RNA, 32 nt, Human
agacagcaucucuagaucuccagggaggagag

SEQ ID NO: 44976 - RNA, 32 nt, Human
agacagcaucuucucuauuggccucucaggga

SEQ ID NO: 44977 - RNA, 32 nt, Human
agacagcauggaggacuuucugcucuccaaug

SEQ ID NO: 44978 - RNA, 27 nt, Human
agacagcauugcuccccagcccuccag

SEQ ID NO: 44979 - RNA, 32 nt, Human
agacagccaagcucauguuuucuccugaucaa

SEQ ID NO: 44980 - RNA, 32 nt, Human
agacagccacggacacagcacauggcgggaga

SEQ ID NO: 44981 - RNA, 32 nt, Human
agacagcccaguagcugugagucggucugaca

SEQ ID NO: 44982 - RNA, 32 nt, Human
agacagccccaacacaugcacauguguguaca

SEQ ID NO: 44983 - RNA, 32 nt, Human
agacagccccaggucacuucuggcacagaagu

SEQ ID NO: 44984 - RNA, 32 nt, Human
agacagcccccaggacccugagaggcagagug

SEQ ID NO: 44985 - RNA, 32 nt, Human
agacagccccuauccuccauucuugagucagg

SEQ ID NO: 44986 - RNA, 32 nt, Human
agacagcccuccacuccagcucugagacccuu

SEQ ID NO: 44987 - RNA, 32 nt, Human
agacagcccugccuauccucuguauauaggcc

SEQ ID NO: 44988 - RNA, 32 nt, Human
agacagccucuucuccucuggggccucaagaa

SEQ ID NO: 44989 - RNA, 32 nt, Human
agacagccugagcccuggcccugcugcuuggu

SEQ ID NO: 44990 - RNA, 32 nt, Human
agacagccugaguaaaaggcuuggaaguugga

SEQ ID NO: 44991 - RNA, 32 nt, Human
agacagccugggccgguccucacucacugucu

SEQ ID NO: 44992 - RNA, 32 nt, Human
agacagccuuucugcugccuuggguuucugug

SEQ ID NO: 44993 - RNA, 32 nt, Human
agacagcgccgggaagaugagcacggaaggug

SEQ ID NO: 44994 - RNA, 32 nt, Human
agacagcggacagacgcucacgcccaggggau

SEQ ID NO: 44995 - RNA, 32 nt, Human
agacagcggggccugggcuaaggccaagggcu

SEQ ID NO: 44996 - RNA, 32 nt, Human
agacagcgucagggcaucaucuguagaaacgc

SEQ ID NO: 44997 - RNA, 20 nt, Human
agacagcgucucacucuguu

SEQ ID NO: 44998 - RNA, 21 nt, Human
agacagcgucuuacuauguug

SEQ ID NO: 44999 - RNA, 20 nt, Human
agacagcguuucaccauguu

SEQ ID NO: 45000 - RNA, 32 nt, Human
agacagcuaccagccacaggugugcagacuca

SEQ ID NO: 45001 - RNA, 32 nt, Human
agacagcucuacugcaccaccccagcccuucc

SEQ ID NO: 45002 - RNA, 32 nt, Human
agacagcugcugucugcuucagguccagaguu

SEQ ID NO: 45003 - RNA, 32 nt, Human
agacagcugggcaggcuccuggagcugauggc

SEQ ID NO: 45004 - RNA, 32 nt, Human
agacagcugggggaguggggagacaggaggaa

SEQ ID NO: 45005 - RNA, 32 nt, Human
agacagcuguuccacuugcacacacgcacaca

SEQ ID NO: 45006 - RNA, 30 nt, Human
agacagcuuuaaaaucuguucacuuucaaa

SEQ ID NO: 45007 - RNA, 32 nt, Human
agacaggaaaugaccugaccucaaaccagaug

SEQ ID NO: 45008 - RNA, 21 nt, Human
agacaggaagaaaagaagaga

SEQ ID NO: 45009 - RNA, 32 nt, Human
agacaggaagcauggguuugcccacagaccug

SEQ ID NO: 45010 - RNA, 32 nt, Human
agacaggaaggaaggaaggaaggaaggaagga

SEQ ID NO: 45011 - RNA, 32 nt, Human
agacaggaauugaugcuucaguccuggggcag

SEQ ID NO: 45012 - RNA, 32 nt, Human
agacaggaccccuauguccaggaaaggggaaa

SEQ ID NO: 45013 - RNA, 32 nt, Human
agacaggaccccuggggccaggagaggugggu

SEQ ID NO: 45014 - RNA, 32 nt, Human
agacaggacucaccaucucugccucccaugag

SEQ ID NO: 45015 - RNA, 21 nt, Human
agacaggagaaucgcuugaac

SEQ ID NO: 45016 - RNA, 32 nt, Human
agacaggagaaucgcuugagcuggagugcagu

SEQ ID NO: 45017 - RNA, 32 nt, Human
agacaggagacuggaagaaggggccagaaauu

SEQ ID NO: 45018 - RNA, 32 nt, Human
agacaggagagagagggagggagcgagaggga

SEQ ID NO: 45019 - RNA, 32 nt, Human
agacaggagagggggaucggugggcggucccg

SEQ ID NO: 45020 - RNA, 23 nt, Human
agacaggagcagguagcaucuca

SEQ ID NO: 45021 - RNA, 32 nt, Human
agacaggagggcaagggccaugcugaagggac

SEQ ID NO: 45022 - RNA, 32 nt, Human
agacaggagggcccuggcugugcaccugggga

SEQ ID NO: 45023 - RNA, 32 nt, Human
agacaggagggugggagcaggacagagaaacu

SEQ ID NO: 45024 - RNA, 32 nt, Human
agacaggaguccauucacuccucugcucucua

SEQ ID NO: 45025 - RNA, 20 nt, Human
agacaggaucucacuauguu

SEQ ID NO: 45026 - RNA, 21 nt, Human
agacaggaucucacuauguug

SEQ ID NO: 45027 - RNA, 32 nt, Human
agacaggaucucaggcuggagugcaguggcac

SEQ ID NO: 45028 - RNA, 21 nt, Human
agacaggauuucaccauguug

SEQ ID NO: 45029 - RNA, 25 nt, Human
agacaggauuucaccauguuggcca

SEQ ID NO: 45030 - RNA, 21 nt, Human
agacaggauuucacuauguug

SEQ ID NO: 45031 - RNA, 25 nt, Human
agacaggauuucacuauguuggcca

SEQ ID NO: 45032 - RNA, 25 nt, Human
agacaggauuucacuauguugguca

SEQ ID NO: 45033 - RNA, 20 nt, Human
agacaggauuucacuguguu

SEQ ID NO: 45034 - RNA, 21 nt, Human
agacaggauuucaucauguug

SEQ ID NO: 45035 - RNA, 25 nt, Human
agacaggauuucaucauguuggcca

SEQ ID NO: 45036 - RNA, 21 nt, Human
agacaggauuucaucguguug

SEQ ID NO: 45037 - RNA, 21 nt, Human
agacaggauuucuccauguug

SEQ ID NO: 45038 - RNA, 25 nt, Human
agacaggauuucuccauguugguca

SEQ ID NO: 45039 - RNA, 21 nt, Human
agacaggauuuuaccauguug

SEQ ID NO: 45040 - RNA, 25 nt, Human
agacaggauuuuaccauguuggcca

SEQ ID NO: 45041 - RNA, 21 nt, Human
agacaggauuuuacuguguug

SEQ ID NO: 45042 - RNA, 21 nt, Human
agacaggauuuugcuguguug

SEQ ID NO: 45043 - RNA, 32 nt, Human
agacaggcaagcugagccucuauguggcacca

SEQ ID NO: 45044 - RNA, 32 nt, Human
agacaggcagagaaggagagaggcagagaggg

SEQ ID NO: 45045 - RNA, 21 nt, Human
agacaggcagaucacaagguc

SEQ ID NO: 45046 - RNA, 32 nt, Human
agacaggcaguguaguguaauggcuaagaaca

SEQ ID NO: 45047 - RNA, 32 nt, Human
agacaggccaccggaagauggggaaagagcua

SEQ ID NO: 45048 - RNA, 32 nt, Human
agacaggccagagcaucccccuccuccaccau

SEQ ID NO: 45049 - RNA, 32 nt, Human
agacaggccauggaggcagcacugagccagca

SEQ ID NO: 45050 - RNA, 32 nt, Human
agacaggcccucagagugcucuguagagcugu

SEQ ID NO: 45051 - RNA, 32 nt, Human
agacaggccugaugccaaaggcuuugggcuca

SEQ ID NO: 45052 - RNA, 32 nt, Human
agacaggccugggacgggcucucccucacagc

SEQ ID NO: 45053 - RNA, 32 nt, Human
agacaggcucagugacgguugaaggaaucgga

SEQ ID NO: 45054 - RNA, 21 nt, Human
agacaggcucucaccauguug

SEQ ID NO: 45055 - RNA, 32 nt, Human
agacaggcugucucgcugacccuucuggccuu

SEQ ID NO: 45056 - RNA, 25 nt, Human
agacaggcuuucgcuguguuggcca

SEQ ID NO: 45057 - RNA, 32 nt, Human
agacagggaagacagcauaaagagcuagugug

SEQ ID NO: 45058 - RNA, 32 nt, Human
agacagggacgaagcagagaccucuacagacc

SEQ ID NO: 45059 - RNA, 32 nt, Human
agacagggacuauaacagggaggcagaauuca

SEQ ID NO: 45060 - RNA, 32 nt, Human
agacagggagacagacagagaggcagagagaa

SEQ ID NO: 45061 - RNA, 32 nt, Human
agacagggagacagggucucacuguguugccu

SEQ ID NO: 45062 - RNA, 32 nt, Human
agacagggagggcugaaggcugugcagcaccc

SEQ ID NO: 45063 - RNA, 21 nt, Human
agacagggauucaacauguug

SEQ ID NO: 45064 - RNA, 19 nt, Human
agacagggcaaaaggaaga

SEQ ID NO: 45065 - RNA, 21 nt, Human
agacagggcaucacuguguug

SEQ ID NO: 45066 - RNA, 32 nt, Human
agacagggccagggagaaauuagccagugcag

SEQ ID NO: 45067 - RNA, 21 nt, Human
agacagggccucacucuguug

SEQ ID NO: 45068 - RNA, 32 nt, Human
agacagggccuuccaucuagagcccagcaccu

SEQ ID NO: 45069 - RNA, 19 nt, Human
agacagggccuugcucugu

SEQ ID NO: 45070 - RNA, 21 nt, Human
agacagggcuucaccauguug

SEQ ID NO: 45071 - RNA, 22 nt, Human
agacagggcuucaccauguugg

SEQ ID NO: 45072 - RNA, 24 nt, Human
agacagggcuucaccauguuggca

SEQ ID NO: 45073 - RNA, 20 nt, Human
agacagggcuucacuguguu

SEQ ID NO: 45074 - RNA, 32 nt, Human
agacaggggagaagaaaauucagauggagcgu

SEQ ID NO: 45075 - RNA, 32 nt, Human
agacaggggagagagaaagacaaagaggggac

SEQ ID NO: 45076 - RNA, 32 nt, Human
agacaggggaucucauuauguugcccaaacug

SEQ ID NO: 45077 - RNA, 22 nt, Human
agacagggguuucaccacguug

SEQ ID NO: 45078 - RNA, 22 nt, Human
agacagggguuucaccauauug

SEQ ID NO: 45079 - RNA, 32 nt, Human
agacagggguuucuuccauguugcccaggcug

SEQ ID NO: 45080 - RNA, 21 nt, Human
agacaggguaucuccauguug

SEQ ID NO: 45081 - RNA, 21 nt, Human
agacaggguauugccguguug

SEQ ID NO: 45082 - RNA, 32 nt, Human
agacagggucucaacucuguuacccaggcugg

SEQ ID NO: 45083 - RNA, 21 nt, Human
agacagggucucaccauguca

SEQ ID NO: 45084 - RNA, 25 nt, Human
agacagggucucaccaugucauuca

SEQ ID NO: 45085 - RNA, 20 nt, Human
agacagggucucaccauguu

SEQ ID NO: 45086 - RNA, 21 nt, Human
agacagggucucaccauguug

SEQ ID NO: 45087 - RNA, 22 nt, Human
agacagggucucaccauguugg

SEQ ID NO: 45088 - RNA, 21 nt, Human
agacagggucucacuauauug

SEQ ID NO: 45089 - RNA, 32 nt, Human
agacagggucucacuauguggcccaggcuggu

SEQ ID NO: 45090 - RNA, 21 nt, Human
agacagggucucacuauguug

SEQ ID NO: 45091 - RNA, 19 nt, Human
agacagggucucacucugu

SEQ ID NO: 45092 - RNA, 21 nt, Human
agacagggucucacucuguca

SEQ ID NO: 45093 - RNA, 20 nt, Human
agacagggucucacucuguu

SEQ ID NO: 45094 - RNA, 21 nt, Human
agacagggucucacucuguug

SEQ ID NO: 45095 - RNA, 21 nt, Human
agacagggucucacugcauug

SEQ ID NO: 45096 - RNA, 19 nt, Human
agacagggucucacugugu

SEQ ID NO: 45097 - RNA, 21 nt, Human
agacagggucucacuguguug

SEQ ID NO: 45098 - RNA, 21 nt, Human
agacagggucucacuuuguug

SEQ ID NO: 45099 - RNA, 32 nt, Human
agacagggucuccagcccaaacuuggcuuccu

SEQ ID NO: 45100 - RNA, 21 nt, Human
agacagggucucccuauguug

SEQ ID NO: 45101 - RNA, 21 nt, Human
agacagggucucgccauguug

SEQ ID NO: 45102 - RNA, 19 nt, Human
agacagggucucgcucugu

SEQ ID NO: 45103 - RNA, 32 nt, Human
agacagggucucucucuguggcccaggcugaa

SEQ ID NO: 45104 - RNA, 19 nt, Human
agacagggucuggcucugu

SEQ ID NO: 45105 - RNA, 32 nt, Human
agacagggucuugacuggagugcaguggugcg

SEQ ID NO: 45106 - RNA, 19 nt, Human
agacagggucuugcucugu

SEQ ID NO: 45107 - RNA, 19 nt, Human
agacagggugucacucugu

SEQ ID NO: 45108 - RNA, 22 nt, Human
agacaggguucuuaccauguug

SEQ ID NO: 45109 - RNA, 26 nt, Human
agacaggguucuuaccauguuggcca

SEQ ID NO: 45110 - RNA, 21 nt, Human
agacaggguuucacaauguug

SEQ ID NO: 45111 - RNA, 21 nt, Human
agacaggguuucaccacauug

SEQ ID NO: 45112 - RNA, 25 nt, Human
agacaggguuucaccacauuggcca

SEQ ID NO: 45113 - RNA, 21 nt, Human
agacaggguuucaccacguug

SEQ ID NO: 45114 - RNA, 25 nt, Human
agacaggguuucaccacguuggcca

SEQ ID NO: 45115 - RNA, 21 nt, Human
agacaggguuucaccagguug

SEQ ID NO: 45116 - RNA, 25 nt, Human
agacaggguuucaccagguuggcca

SEQ ID NO: 45117 - RNA, 21 nt, Human
agacaggguuucaccauauug

SEQ ID NO: 45118 - RNA, 22 nt, Human
agacaggguuucaccauauugg

SEQ ID NO: 45119 - RNA, 25 nt, Human
agacaggguuucaccauauuggcca

SEQ ID NO: 45120 - RNA, 25 nt, Human
agacaggguuucaccauauugguca

SEQ ID NO: 45121 - RNA, 21 nt, Human
agacaggguuucaccaucuug

SEQ ID NO: 45122 - RNA, 18 nt, Human
agacaggguuucaccaug

SEQ ID NO: 45123 - RNA, 19 nt, Human
agacaggguuucaccaugu

SEQ ID NO: 45124 - RNA, 21 nt, Human
agacaggguuucaccauguca

SEQ ID NO: 45125 - RNA, 32 nt, Human
agacaggguuucaccaugucagccaggauggu

SEQ ID NO: 45126 - RNA, 20 nt, Human
agacaggguuucaccauguu

SEQ ID NO: 45127 - RNA, 25 nt, Human
agacaggguuucaccauguuaguca

SEQ ID NO: 45128 - RNA, 21 nt, Human
agacaggguuucaccauguug

SEQ ID NO: 45129 - RNA, 25 nt, Human
agacaggguuucaccauguugccca

SEQ ID NO: 45130 - RNA, 22 nt, Human
agacaggguuucaccauguugg

SEQ ID NO: 45131 - RNA, 25 nt, Human
agacaggguuucaccauguuggcca

SEQ ID NO: 45132 - RNA, 25 nt, Human
agacaggguuucaccauguuggccg

SEQ ID NO: 45133 - RNA, 24 nt, Human
agacaggguuucaccauguugguc

SEQ ID NO: 45134 - RNA, 25 nt, Human
agacaggguuucaccauguugguca

SEQ ID NO: 45135 - RNA, 25 nt, Human
agacaggguuucaccauguugguua

SEQ ID NO: 45136 - RNA, 25 nt, Human
agacaggguuucaccauguugucca

SEQ ID NO: 45137 - RNA, 25 nt, Human
agacaggguuucaccauguuuguca

SEQ ID NO: 45138 - RNA, 21 nt, Human
agacaggguuucaccauuuug

SEQ ID NO: 45139 - RNA, 25 nt, Human
agacaggguuucaccauuuuggcca

SEQ ID NO: 45140 - RNA, 20 nt, Human
agacaggguuucacccuguu

SEQ ID NO: 45141 - RNA, 32 nt, Human
agacaggguuucaccgucuuggcuagcugguc

SEQ ID NO: 45142 - RNA, 20 nt, Human
agacaggguuucaccguguu

SEQ ID NO: 45143 - RNA, 21 nt, Human
agacaggguuucaccguguua

SEQ ID NO: 45144 - RNA, 21 nt, Human
agacaggguuucaccguguug

SEQ ID NO: 45145 - RNA, 25 nt, Human
agacaggguuucaccguguugguca

SEQ ID NO: 45146 - RNA, 21 nt, Human
agacaggguuucacuacguug

SEQ ID NO: 45147 - RNA, 25 nt, Human
agacaggguuucacuacguuggcca

SEQ ID NO: 45148 - RNA, 21 nt, Human
agacaggguuucacuaugcug

SEQ ID NO: 45149 - RNA, 32 nt, Human
agagagaggagaaaggcgaaggagaaggagga

SEQ ID NO: 45150 - RNA, 32 nt, Human
agagagaggagaagaggaggaggcagaggaag

SEQ ID NO: 45151 - RNA, 32 nt, Human
agagagaggagaagggaggcaagggaggggca

SEQ ID NO: 45152 - RNA, 32 nt, Human
agagagaggagaagggaggcaggggaggggca

SEQ ID NO: 45153 - RNA, 32 nt, Human
agagagaggagagagaaggaaauauguguaug

SEQ ID NO: 45154 - RNA, 32 nt, Human
agagagaggagagagaggagagaggagagagg

SEQ ID NO: 45155 - RNA, 32 nt, Human
agagagaggagaggaggggaagagccucaguc

SEQ ID NO: 45156 - RNA, 32 nt, Human
agagagaggagggacugucacacuggugcuga

SEQ ID NO: 45157 - RNA, 32 nt, Human
agagagaggcagagagggagagagggagagug

SEQ ID NO: 45158 - RNA, 32 nt, Human
agagagaggccgcggccgccagcguggggaug

SEQ ID NO: 45159 - RNA, 32 nt, Human
agagagaggccugggggccaccaaauauuccc

SEQ ID NO: 45160 - RNA, 32 nt, Human
agagagaggcugcagaggucaccaggaaaguu

SEQ ID NO: 45161 - RNA, 32 nt, Human
agagagagggagagagacagagagagcaggga

SEQ ID NO: 45162 - RNA, 31 nt, Human
agagagagggagagagagugagagagacuga

SEQ ID NO: 45163 - RNA, 32 nt, Human
agagagagggagcaggcggagcgagagaggga

SEQ ID NO: 45164 - RNA, 32 nt, Human
agagagagggccagggcugaguucacgggcuc

SEQ ID NO: 45165 - RNA, 32 nt, Human
agagagagggccaguaagggcaacuccuauca

SEQ ID NO: 45166 - RNA, 32 nt, Human
agagagagggucucacuauauugcccaaguug

SEQ ID NO: 45167 - RNA, 32 nt, Human
agagagagugugacagaggaucugccugugaa

SEQ ID NO: 45168 - RNA, 32 nt, Human
agagagaguuucagcgucauccuugaacgcag

SEQ ID NO: 45169 - RNA, 32 nt, Human
agagagaguuugggucuuucuccucugugccu

SEQ ID NO: 45170 - RNA, 32 nt, Human
agagagauaguauguaguaggaagagagacau

SEQ ID NO: 45171 - RNA, 32 nt, Human
agagagaugacacggcaagaagaaggaugcua

SEQ ID NO: 45172 - RNA, 32 nt, Human
agagagaugcuguugaaucagaaacagaucaa

SEQ ID NO: 45173 - RNA, 32 nt, Human
agagagauggccuggguuaucauugcugauag

SEQ ID NO: 45174 - RNA, 31 nt, Human
agagagaugggugaggggaccuggagaggua

SEQ ID NO: 45175 - RNA, 32 nt, Human
agagagcaaccuccucccucguagagggagau

SEQ ID NO: 45176 - RNA, 32 nt, Human
agagagcaagacugcaggaacggagggguccu

SEQ ID NO: 45177 - RNA, 32 nt, Human
agagagcaagcgguaccagagguaccagcuuc

SEQ ID NO: 45178 - RNA, 24 nt, Human
agagagcaaggggcuuucuuacca

SEQ ID NO: 45179 - RNA, 32 nt, Human
agagagcacagcccuugccuggagcccaggaa

SEQ ID NO: 45180 - RNA, 18 nt, Human
agagagcacaucgccuga

SEQ ID NO: 45181 - RNA, 20 nt, Human
agagagcacgucacacucuu

SEQ ID NO: 45182 - RNA, 32 nt, Human
agagagcacugcacuuccccaaaacggaaggg

SEQ ID NO: 45183 - RNA, 32 nt, Human
agagagcacugugcaagccaaaugguucaaua

SEQ ID NO: 45184 - RNA, 32 nt, Human
agagagcagagcccagaaaugucuuuugcagg

SEQ ID NO: 45185 - RNA, 32 nt, Human
agagagcagagcuuagucaguggaggaaauca

SEQ ID NO: 45186 - RNA, 32 nt, Human
agagagcagagggggucaugcagugagugggu

SEQ ID NO: 45187 - RNA, 32 nt, Human
agagagcagccaggagcuuccugucaguaacc

SEQ ID NO: 45188 - RNA, 32 nt, Human
agagagcagcccuggagcaggagcggcaggag

SEQ ID NO: 45189 - RNA, 24 nt, Human
agagagcagccgggagaagcagag

SEQ ID NO: 45190 - RNA, 32 nt, Human
agagagcagccuggcccucaccagugcgcaag

SEQ ID NO: 45191 - RNA, 32 nt, Human
agagagcagcuucugccacuucccagguaagc

SEQ ID NO: 45192 - RNA, 32 nt, Human
agagagcagcuuuaaacucagggacagagcca

SEQ ID NO: 45193 - RNA, 32 nt, Human
agagagcaggacaaggcagacagaaggucagg

SEQ ID NO: 45194 - RNA, 32 nt, Human
agagagcaggagacggagagucgguggagugu

SEQ ID NO: 45195 - RNA, 23 nt, Human
agagagcaggcaggcccacugcu

SEQ ID NO: 45196 - RNA, 32 nt, Human
agagagcagggugggguaaggaggagaaaaua

SEQ ID NO: 45197 - RNA, 32 nt, Human
agagagcagguggcggaugcagcugagagcuc

SEQ ID NO: 45198 - RNA, 32 nt, Human
agagagcagguguacacccaaccaaagugauu

SEQ ID NO: 45199 - RNA, 32 nt, Human
agagagcaucucccccugguccaugccccucc

SEQ ID NO: 45200 - RNA, 32 nt, Human
agagagccagggccauggaggccaacaugccg

SEQ ID NO: 45201 - RNA, 32 nt, Human
agagagccaggucuguagcuccuggcccucca

SEQ ID NO: 45202 - RNA, 32 nt, Human
agagagcccagcacccaagauccagcagggga

SEQ ID NO: 45203 - RNA, 32 nt, Human
agagagccccucauccuuccucugggaccaga

SEQ ID NO: 45204 - RNA, 32 nt, Human
agagagcccucagcuacucugugaaugacuug

SEQ ID NO: 45205 - RNA, 32 nt, Human
agagagcccugagaccagugcaccgcugcugc

SEQ ID NO: 45206 - RNA, 32 nt, Human
agagagcccugagacccgccccagcugccacc

SEQ ID NO: 45207 - RNA, 32 nt, Human
agagagccgcucccuccacugcccgaggggag

SEQ ID NO: 45208 - RNA, 32 nt, Human
agagagccgggaguuggggaggggguauuuau

SEQ ID NO: 45209 - RNA, 32 nt, Human
agagagccucacucaccuccccaacuaagcaa

SEQ ID NO: 45210 - RNA, 32 nt, Human
agagagccugcaauuggaaauaugagaaauuc

SEQ ID NO: 45211 - RNA, 32 nt, Human
agagagccuggcaggaccagagccuuaccuuu

SEQ ID NO: 45212 - RNA, 21 nt, Human
agagagccuuaucucugcccu

SEQ ID NO: 45213 - RNA, 32 nt, Human
agagagccuuucuccagcccaugcuggcuggg

SEQ ID NO: 45214 - RNA, 32 nt, Human
agagagccuuucucccagcuuugccgccugug

SEQ ID NO: 45215 - RNA, 32 nt, Human
agagagccuuucuuccuguucuucuucgucuu

SEQ ID NO: 45216 - RNA, 32 nt, Human
agagagccuuuucaaaggacuuuucauccagc

SEQ ID NO: 45217 - RNA, 20 nt, Human
agagagcgagcgccaccgcc

SEQ ID NO: 45218 - RNA, 32 nt, Human
agagagcgcugggagccggaggggagcgcagc

SEQ ID NO: 45219 - RNA, 21 nt, Human
agagagcgggcagaccuggca

SEQ ID NO: 45220 - RNA, 32 nt, Human
agagagcuacagucuucauuuuagugcuuuac

SEQ ID NO: 45221 - RNA, 24 nt, Human
agagagcucugccgccaccuuccu

SEQ ID NO: 45222 - RNA, 32 nt, Human
agagagcucugccgccaccuuccuucagagcu

SEQ ID NO: 45223 - RNA, 23 nt, Human
agagagcucugggccuucuuccu

SEQ ID NO: 45224 - RNA, 20 nt, Human
agagagcucugggcugcucc

SEQ ID NO: 45225 - RNA, 32 nt, Human
agagagcugaaccugcaucccggaccugcggc

SEQ ID NO: 45226 - RNA, 32 nt, Human
agagagcugccuuguuccuuguggccauguga

SEQ ID NO: 45227 - RNA, 32 nt, Human
agagagcugcgaugugaacugccccuccccuc

SEQ ID NO: 45228 - RNA, 32 nt, Human
agagagcuggcgggaccccagcaaugcgugca

SEQ ID NO: 45229 - RNA, 32 nt, Human
agagagcugggacaguggaggcuggcagaagc

SEQ ID NO: 45230 - RNA, 32 nt, Human
agagagcugggaggggcacaggcagcaagguc

SEQ ID NO: 45231 - RNA, 32 nt, Human
agagagcuguggcacaccaucaugcauaccaa

SEQ ID NO: 45232 - RNA, 32 nt, Human
agagagcugugguucuccaucauugggggagu

SEQ ID NO: 45233 - RNA, 32 nt, Human
agagagcuucagcagacucaggaagacaccuu

SEQ ID NO: 45234 - RNA, 32 nt, Human
agagagcuugaugcuuucugccuucugucuca

SEQ ID NO: 45235 - RNA, 32 nt, Human
agagagcuuuguccccggccuccuggacacau

SEQ ID NO: 45236 - RNA, 32 nt, Human
agagaggaaagcauuaggcagauggaauguac

SEQ ID NO: 45237 - RNA, 32 nt, Human
agagaggaaaguugaguuccaccucugaaaug

SEQ ID NO: 45238 - RNA, 32 nt, Human
agagaggaaaguuuaagcagggugcauuagaa

SEQ ID NO: 45239 - RNA, 32 nt, Human
agagaggaaauccaaugacaaugguacuggca

SEQ ID NO: 45240 - RNA, 32 nt, Human
agagaggaagaaacaaaggcagcuguggccuc

SEQ ID NO: 45241 - RNA, 32 nt, Human
agagaggaagcacaaugagcagugauacuaaa

SEQ ID NO: 45242 - RNA, 23 nt, Human
agagaggaaggaggugacguuca

SEQ ID NO: 45243 - RNA, 32 nt, Human
agagaggaaggccgcugcauccugccugcccg

SEQ ID NO: 45244 - RNA, 32 nt, Human
agagaggaagucagaggguagggaccuuugcc

SEQ ID NO: 45245 - RNA, 32 nt, Human
agagaggaaugagaaagaaggaagugaugcaa

SEQ ID NO: 45246 - RNA, 17 nt, Human
agagaggacagagcaua

SEQ ID NO: 45247 - RNA, 15 nt, Human
agagaggacuuucau

SEQ ID NO: 45248 - RNA, 32 nt, Human
agagaggagagaggagaggaaagggaaggaga

SEQ ID NO: 45249 - RNA, 32 nt, Human
agagaggagaggaggaagauugagcuggggca

SEQ ID NO: 45250 - RNA, 32 nt, Human
agagaggagaggggguacgggcaguggcugcu

SEQ ID NO: 45251 - RNA, 32 nt, Human
agagaggagaggggucagggaaggccucccug

SEQ ID NO: 45252 - RNA, 32 nt, Human
agagaggagagggugagugggguauagggccc

SEQ ID NO: 45253 - RNA, 32 nt, Human
agagaggagagugaacagggagcggggcuuuu

SEQ ID NO: 45254 - RNA, 32 nt, Human
agagaggagccaaguucuaguaguuucaguuc

SEQ ID NO: 45255 - RNA, 23 nt, Human
agagaggagcgggccuucuauca

SEQ ID NO: 45256 - RNA, 32 nt, Human
agagaggaggacguguacuccaggcgaggccu

SEQ ID NO: 45257 - RNA, 32 nt, Human
agagaggaggagaaggagggugagaggagcaa

SEQ ID NO: 45258 - RNA, 32 nt, Human
agagaggaggcagaggcugggaaugggagcag

SEQ ID NO: 45259 - RNA, 32 nt, Human
agagaggaggcuggguuugacuccagggaagg

SEQ ID NO: 45260 - RNA, 32 nt, Human
agagaggagggcacugguggucuccugcuuag

SEQ ID NO: 45261 - RNA, 32 nt, Human
agagaggaguuccuucccuuucaacgagggcu

SEQ ID NO: 45262 - RNA, 32 nt, Human
agagaggauggagagggagagacugaauuguu

SEQ ID NO: 45263 - RNA, 32 nt, Human
agagaggaugugccaucaugauuaaugaaaac

SEQ ID NO: 45264 - RNA, 32 nt, Human
agagaggcaaagaaacauugugaaaucuccaa

SEQ ID NO: 45265 - RNA, 32 nt, Human
agagaggcacagaaugugccaggggugugcug

SEQ ID NO: 45266 - RNA, 32 nt, Human
agagaggcacagaccugucuccugggugcauc

SEQ ID NO: 45267 - RNA, 32 nt, Human
agagaggcacgcucacccucacccucaugggc

SEQ ID NO: 45268 - RNA, 32 nt, Human
agagaggcacggccacuggagcugucucagag

SEQ ID NO: 45269 - RNA, 32 nt, Human
agagaggcagagagacagagagggagagaggg

SEQ ID NO: 45270 - RNA, 32 nt, Human
agagaggcagagagagacagagaagcagagac

SEQ ID NO: 45271 - RNA, 32 nt, Human
agagaggcagagagagauagagacagaguccu

SEQ ID NO: 45272 - RNA, 32 nt, Human
agagaggcagagagggaaagaggcagagaagg

SEQ ID NO: 45273 - RNA, 32 nt, Human
agagaggcagagagggagagaggcagagagac

SEQ ID NO: 45274 - RNA, 32 nt, Human
agagaggcagagagggagagaggcagagaggg

SEQ ID NO: 45275 - RNA, 24 nt, Human
agagaggcaggauuccugcugacu

SEQ ID NO: 45276 - RNA, 22 nt, Human
agagaggcauuggugcgaggga

SEQ ID NO: 45277 - RNA, 32 nt, Human
agagaggccagagagacagcgggccccagcgc

SEQ ID NO: 45278 - RNA, 32 nt, Human
agagaggccaggaugguggaagagggccagac

SEQ ID NO: 45279 - RNA, 32 nt, Human
agagaggcccaggaugguggaggcugaggaac

SEQ ID NO: 45280 - RNA, 32 nt, Human
agagaggccccaggaguggguggagaguggag

SEQ ID NO: 45281 - RNA, 21 nt, Human
agagaggcccgcccgcccacc

SEQ ID NO: 45282 - RNA, 21 nt, Human
agagaggcccgccugcccacc

SEQ ID NO: 45283 - RNA, 21 nt, Human
agagaggcccggccgccggcc

SEQ ID NO: 45284 - RNA, 32 nt, Human
agagaggccgccgccuccgcccggugguucuc

SEQ ID NO: 45285 - RNA, 23 nt, Human
agagaggccugaaccuguugacu

SEQ ID NO: 45286 - RNA, 24 nt, Human
agagaggccuuggcccagcugacc

SEQ ID NO: 45287 - RNA, 32 nt, Human
agagaggcggagcggccaggagagaggggauu

SEQ ID NO: 45288 - RNA, 23 nt, Human
agagaggcggccguccugucaac

SEQ ID NO: 45289 - RNA, 32 nt, Human
agagaggcucagagagcugggaagcagacagg

SEQ ID NO: 45290 - RNA, 32 nt, Human
agagagggacuagagugccagauggaggagcu

SEQ ID NO: 45291 - RNA, 32 nt, Human
agagagggagacacccggaggagcagguggga

SEQ ID NO: 45292 - RNA, 32 nt, Human
agagagggagagaaacagaggagacagagagg

SEQ ID NO: 45293 - RNA, 32 nt, Human
agagagggagagaaagggagagagggagggag

SEQ ID NO: 45294 - RNA, 32 nt, Human
agagagggagagaagggcuccccagaucuaca

SEQ ID NO: 45295 - RNA, 32 nt, Human
agagagggagagagacagagagagcagggauc

SEQ ID NO: 45296 - RNA, 32 nt, Human
agagagggagagagaggaaagggaaggaagaa

SEQ ID NO: 45297 - RNA, 32 nt, Human
agagagggagagagagggagagaaagggagag

SEQ ID NO: 45298 - RNA, 32 nt, Human
agagagggagagagcgagcgagcaacagcgag

SEQ ID NO: 45299 - RNA, 32 nt, Human
agagagggagagaggcagagagacagagaggg

SEQ ID NO: 45300 - RNA, 32 nt, Human
agagagggagagaggcagagagggagagaggc

SEQ ID NO: 45301 - RNA, 32 nt, Human
agagagggagagagggacagagagagauagag

SEQ ID NO: 45302 - RNA, 32 nt, Human
agagagggaggcacguaggaacaagcaaugag

SEQ ID NO: 45303 - RNA, 32 nt, Human
agagagggaggcagaaguaaagaggcccggga

SEQ ID NO: 45304 - RNA, 32 nt, Human
agagagggagggaagagagugacggagaagga

SEQ ID NO: 45305 - RNA, 32 nt, Human
agagagggagggaggaaggaaggaagggagga

SEQ ID NO: 45306 - RNA, 32 nt, Human
agagagggaguuucaccauguuggccagguug

SEQ ID NO: 45307 - RNA, 32 nt, Human
agagagggaguuucaccauguuggucagguug

SEQ ID NO: 45308 - RNA, 32 nt, Human
agagagggaguuucgccauguuggccaggcug

SEQ ID NO: 45309 - RNA, 21 nt, Human
agagagggcacagagcucaug

SEQ ID NO: 45310 - RNA, 32 nt, Human
agagagggcacgagaacccaaagggaauagag

SEQ ID NO: 45311 - RNA, 32 nt, Human
agagagggccaggcagucgcacugugaacaga

SEQ ID NO: 45312 - RNA, 32 nt, Human
agagagggccuggggcagacuuaggaucagga

SEQ ID NO: 45313 - RNA, 32 nt, Human
agagagggcgcgguggccuggccaagacuuua

SEQ ID NO: 45314 - RNA, 32 nt, Human
agagagggcguuuugccauguuggcuaggcug

SEQ ID NO: 45315 - RNA, 32 nt, Human
agagagggcugcagccagggcccugccagccu

SEQ ID NO: 45316 - RNA, 32 nt, Human
agagaggggaaaauggguguugacugaggaau

SEQ ID NO: 45317 - RNA, 32 nt, Human
agagaggggaccccuuuuacuacagggcacac

SEQ ID NO: 45318 - RNA, 32 nt, Human
agagaggggagggagagagaagagcaccagaa

SEQ ID NO: 45319 - RNA, 31 nt, Human
agagaggggccugguguaucacuggaggaaa

SEQ ID NO: 45320 - RNA, 32 nt, Human
agagaggggccugguguaucacuggaggaaau

SEQ ID NO: 45321 - RNA, 32 nt, Human
agagagggggagagguuucuccaugcuacucu

SEQ ID NO: 45322 - RNA, 32 nt, Human
agagagggggcgcggaaggaaggaggcgggac

SEQ ID NO: 45323 - RNA, 32 nt, Human
agagaggggguucaggaugcugcgugguucca

SEQ ID NO: 45324 - RNA, 32 nt, Human
agagaggggguuucaccacguuggccagguug

SEQ ID NO: 45325 - RNA, 32 nt, Human
agagaggggguuucaccguggucucgaucucc

SEQ ID NO: 45326 - RNA, 32 nt, Human
agagaggggguuucaccguguuagccaggaug

SEQ ID NO: 45327 - RNA, 32 nt, Human
agagaggggguuucacuauguugcucaagcug

SEQ ID NO: 45328 - RNA, 32 nt, Human
agagaggggguuucaucauguuaccuaggcug

SEQ ID NO: 45329 - RNA, 32 nt, Human
agagaggggguuucuccauguuggucaggcug

SEQ ID NO: 45330 - RNA, 32 nt, Human
agagaggggguuuuuccauguuggccaggcug

SEQ ID NO: 45331 - RNA, 32 nt, Human
agagaggggugaugccuggugcugguggaacc

SEQ ID NO: 45332 - RNA, 17 nt, Human
agagaggguauuucaua

SEQ ID NO: 45333 - RNA, 32 nt, Human
agagaggguauuuugccauguugcccaggcua

SEQ ID NO: 45334 - RNA, 32 nt, Human
agagagguagguggcacagaagauggggcuuu

SEQ ID NO: 45335 - RNA, 32 nt, Human
agagaggugacaacccacccagacugcaguuc

SEQ ID NO: 45336 - RNA, 32 nt, Human
agagaggugaggcagcugcggaagaaaaguag

SEQ ID NO: 45337 - RNA, 32 nt, Human
agagaggugcugccuuuucuaagucauaauga

SEQ ID NO: 45338 - RNA, 31 nt, Human
agagagguggagaaaccuaaagacugaggag

SEQ ID NO: 45339 - RNA, 32 nt, Human
agagagguggaggaggccagcucgcuccaaaa

SEQ ID NO: 45340 - RNA, 20 nt, Human
agagaggugggacugcaagg

SEQ ID NO: 45341 - RNA, 32 nt, Human
agagaggugggugggagggugggagggugggg

SEQ ID NO: 45342 - RNA, 32 nt, Human
agagaggugugagccccuugucucacaccggc

SEQ ID NO: 45343 - RNA, 19 nt, Human
agagagguuucaccauguu

SEQ ID NO: 45344 - RNA, 23 nt, Human
agagagucaaauaucacacucuu

SEQ ID NO: 45345 - RNA, 32 nt, Human
agagaguccuaggggacuacagaaggaaaaag

SEQ ID NO: 45346 - RNA, 32 nt, Human
agagagucgcaucucagugcaggagagacagu

SEQ ID NO: 45347 - RNA, 32 nt, Human
agagagucucucucuaccacauagcccaauga

SEQ ID NO: 45348 - RNA, 32 nt, Human
agagagucuuccagguacugauccuguuucuu

SEQ ID NO: 45349 - RNA, 23 nt, Human
agagagugaaccccccaccacca

SEQ ID NO: 45350 - RNA, 32 nt, Human
agagagugaagaacaggagcaugaagaggaug

SEQ ID NO: 45351 - RNA, 32 nt, Human
agagagugaagacacaaugaacagaaacuucc

SEQ ID NO: 45352 - RNA, 21 nt, Human
agagagugaggaagagaagga

SEQ ID NO: 45353 - RNA, 32 nt, Human
agagagugcgcuuuggaaauuuauuccaguuu

SEQ ID NO: 45354 - RNA, 32 nt, Human
agagagugcuccugaauggucacgagugguug

SEQ ID NO: 45355 - RNA, 31 nt, Human
agagaguggagaggagagagagcaaauauug

SEQ ID NO: 45356 - RNA, 32 nt, Human
agagaguggccagauguggugccuggagcgac

SEQ ID NO: 45357 - RNA, 24 nt, Human
agagaguggggaucuccauuugcc

SEQ ID NO: 45358 - RNA, 32 nt, Human
agagaguggguuucacuauguuggccaggcug

SEQ ID NO: 45359 - RNA, 31 nt, Human
agagagugguaaaucucagaaagcacaagca

SEQ ID NO: 45360 - RNA, 32 nt, Human
agagagugguuacaugaggcaggugugaggga

SEQ ID NO: 45361 - RNA, 32 nt, Human
agagagugucuagggcaggugagcuacagggu

SEQ ID NO: 45362 - RNA, 32 nt, Human
agagagugucuucaugccaaccacagccuguu

SEQ ID NO: 45363 - RNA, 32 nt, Human
agagagugugugugcccacugcugcccaacau

SEQ ID NO: 45364 - RNA, 32 nt, Human
agagaguucccaucuucucucaccccuuucau

SEQ ID NO: 45365 - RNA, 32 nt, Human
agagauaaaaccugaguaccagagccacuuuu

SEQ ID NO: 45366 - RNA, 32 nt, Human
agagauaaaccaguucacgccggagccccgug

SEQ ID NO: 45367 - RNA, 32 nt, Human
agagauaacauacauucccuuugguaucacag

SEQ ID NO: 45368 - RNA, 32 nt, Human
agagauaagaggaggaagcuaauaagagacug

SEQ ID NO: 45369 - RNA, 32 nt, Human
agagauaaucccuaucaaagcuucugggauca

SEQ ID NO: 45370 - RNA, 32 nt, Human
agagauaaugcagacugucauggguggggaau

SEQ ID NO: 45371 - RNA, 23 nt, Human
agagauacugguuuccugcccuu

SEQ ID NO: 45372 - RNA, 32 nt, Human
agagauagaggaaguggaaccagagagcuggg

SEQ ID NO: 45373 - RNA, 32 nt, Human
agagauagaggaggaggagggggaggaagagg

SEQ ID NO: 45374 - RNA, 32 nt, Human
agagauagagucuugcuauguuguccaggcug

SEQ ID NO: 45375 - RNA, 32 nt, Human
agagauagauaacgccuucauuccaauuaauu

SEQ ID NO: 45376 - RNA, 19 nt, Human
agagauagccuguggcccu

SEQ ID NO: 45377 - RNA, 32 nt, Human
agagauagggauucaccauguuggccaggcug

SEQ ID NO: 45378 - RNA, 32 nt, Human
agagauaggguccugcuacauugcccaggcug

SEQ ID NO: 45379 - RNA, 32 nt, Human
agagauagggucucaccauguuggccaggcug

SEQ ID NO: 45380 - RNA, 32 nt, Human
agagauagggucuugcuauguugcccaggcug

SEQ ID NO: 45381 - RNA, 32 nt, Human
agagauagggucuugcuguguugcccaggcua

SEQ ID NO: 45382 - RNA, 32 nt, Human
agagauaggguuucacauguuggccaagcugg

SEQ ID NO: 45383 - RNA, 32 nt, Human
agagauaggguuucaccaugucucccaggcug

SEQ ID NO: 45384 - RNA, 32 nt, Human
agagauaggguuucaccauguugcccaggcug

SEQ ID NO: 45385 - RNA, 32 nt, Human
agagauaggguuucaccauguugcuuaggcug

SEQ ID NO: 45386 - RNA, 32 nt, Human
agagauaggguuucaccauguuggccaggcug

SEQ ID NO: 45387 - RNA, 32 nt, Human
agagauaggguuucaccguguuggccaggcug

SEQ ID NO: 45388 - RNA, 32 nt, Human
agagauaggguuucauuacauugcucaggcug

SEQ ID NO: 45389 - RNA, 32 nt, Human
agagauaggguuuuaccauauugcccaggcug

SEQ ID NO: 45390 - RNA, 32 nt, Human
agagauagguucuugcuaugaugcccaagcug

SEQ ID NO: 45391 - RNA, 32 nt, Human
agagauagugacagccuggggugaggacuuua

SEQ ID NO: 45392 - RNA, 32 nt, Human
agagauauacuuuggaauguuucccaaaauua

SEQ ID NO: 45393 - RNA, 32 nt, Human
agagauauagaccaauggaacagaacagggcc

SEQ ID NO: 45394 - RNA, 32 nt, Human
agagauauuccaggaaugugggugacggccua

SEQ ID NO: 45395 - RNA, 32 nt, Human
agagauauuuccucaaauuugccucaagaugg

SEQ ID NO: 45396 - RNA, 32 nt, Human
agagaucaagccaucggagcugcuagaguucu

SEQ ID NO: 45397 - RNA, 32 nt, Human
agagaucaaucaggugcugcuuugauucuacu

SEQ ID NO: 45398 - RNA, 32 nt, Human
agagaucacaacauugcacuucagccugguga

SEQ ID NO: 45399 - RNA, 32 nt, Human
agagaucacaccacugcacuacagccucggca

SEQ ID NO: 45400 - RNA, 32 nt, Human
agagaucacaccacugcacuccagccugggca

SEQ ID NO: 45401 - RNA, 32 nt, Human
agagaucacaccacugcacuccagccugggug

SEQ ID NO: 45402 - RNA, 32 nt, Human
agagaucacaccacugcacucuagccugggug

SEQ ID NO: 45403 - RNA, 32 nt, Human
agagaucacaccagaguacaugucucugccuc

SEQ ID NO: 45404 - RNA, 32 nt, Human
agagaucacaugcuucacaagguauaagauau

SEQ ID NO: 45405 - RNA, 32 nt, Human
agagaucacgccacugcacuccagccuggaug

SEQ ID NO: 45406 - RNA, 32 nt, Human
agagaucacggucaugaagaucagcccccaag

SEQ ID NO: 45407 - RNA, 32 nt, Human
agagaucacuagaacagaaaaacaacccagau

SEQ ID NO: 45408 - RNA, 32 nt, Human
agagaucagagaccuaaagugccagaccaaag

SEQ ID NO: 45409 - RNA, 32 nt, Human
agagaucagcccuacuagaugcagagaacccg

SEQ ID NO: 45410 - RNA, 32 nt, Human
agagaucaggccacugcacuccagccugaaca

SEQ ID NO: 45411 - RNA, 23 nt, Human
agagaucaguggcacggaagcuc

SEQ ID NO: 45412 - RNA, 32 nt, Human
agagaucaugccacugcacuagagccugggca

SEQ ID NO: 45413 - RNA, 32 nt, Human
agagaucaugccacugcacuccagccugggca

SEQ ID NO: 45414 - RNA, 32 nt, Human
agagaucaugccacugcacuccagccugggcc

SEQ ID NO: 45415 - RNA, 32 nt, Human
agagaucaugccacugcacuccagccugggcg

SEQ ID NO: 45416 - RNA, 32 nt, Human
agagauccagcacauucucaguacuguggugc

SEQ ID NO: 45417 - RNA, 32 nt, Human
agagaucccggcucccagcccacugaguggcu

SEQ ID NO: 45418 - RNA, 32 nt, Human
agagaucccgggagaacuccagagcuccgggg

SEQ ID NO: 45419 - RNA, 32 nt, Human
agagauccgccucccuugcccuucccccgccc

SEQ ID NO: 45420 - RNA, 32 nt, Human
agagauccugagccacagccgcccagcccugc

SEQ ID NO: 45421 - RNA, 32 nt, Human
agagauccugcgcgcucccugugugggcucca

SEQ ID NO: 45422 - RNA, 32 nt, Human
agagauccuuccauuccaucuaguuuuuggaa

SEQ ID NO: 45423 - RNA, 32 nt, Human
agagaucgcgccaccgcacuccagccucgccg

SEQ ID NO: 45424 - RNA, 32 nt, Human
agagaucgcgccacugcaacccagccugggug

SEQ ID NO: 45425 - RNA, 32 nt, Human
agagaucgcgccacugcacuccagccugggug

SEQ ID NO: 45426 - RNA, 32 nt, Human
agagaucgugccacugcacuccagccugggug

SEQ ID NO: 45427 - RNA, 32 nt, Human
agagaucgugccacugcacuccagccugguga

SEQ ID NO: 45428 - RNA, 32 nt, Human
agagaucgugccacugcacuccagcuugggca

SEQ ID NO: 45429 - RNA, 32 nt, Human
agagaucugagcugucucuuaaaggggacagu

SEQ ID NO: 45430 - RNA, 32 nt, Human
agagaucugcugucagucugcuuauccuucca

SEQ ID NO: 45431 - RNA, 32 nt, Human
agagaucugucagagaaggcauuuccuaagug

SEQ ID NO: 45432 - RNA, 32 nt, Human
agagaucugugggcaaaagcccaggacgugac

SEQ ID NO: 45433 - RNA, 32 nt, Human
agagaucuugucucaucuucugagaggugccu

SEQ ID NO: 45434 - RNA, 29 nt, Human
agagaugaaaaaggaagggaggaaaaggu

SEQ ID NO: 45435 - RNA, 25 nt, Human
agagaugaaaagccggcuuuuucuu

SEQ ID NO: 45436 - RNA, 32 nt, Human
agagaugaaagaaagaaagaguggguuucaga

SEQ ID NO: 45437 - RNA, 23 nt, Human
agagaugaaaggcauauuuucuu

SEQ ID NO: 45438 - RNA, 23 nt, Human
agagaugaaaguguggcuuuuua

SEQ ID NO: 45439 - RNA, 19 nt, Human
agagaugaaauguuuuuuc

SEQ ID NO: 45440 - RNA, 25 nt, Human
agagaugaacagaaaacuuuuucuu

SEQ ID NO: 45441 - RNA, 32 nt, Human
agagaugaacauacacaucucuauuaacucca

SEQ ID NO: 45442 - RNA, 25 nt, Human
agagaugaagagaaaacuuuuucuu

SEQ ID NO: 45443 - RNA, 32 nt, Human
agagaugaagugaaccagagggauggagacuu

SEQ ID NO: 45444 - RNA, 32 nt, Human
agagaugaaguuucaccguguuggccaggaug

SEQ ID NO: 45445 - RNA, 26 nt, Human
agagaugaccaauggaauuuuucuua

SEQ ID NO: 45446 - RNA, 31 nt, Human
agagaugacuuccucccuugaaaacgaagca

SEQ ID NO: 45447 - RNA, 23 nt, Human
agagaugagaaaucgaccuauac

SEQ ID NO: 45448 - RNA, 32 nt, Human
agagaugagaagcagagggcuuggggaaagcc

SEQ ID NO: 45449 - RNA, 32 nt, Human
agagaugagcucuugcuauguugcccaggcug

SEQ ID NO: 45450 - RNA, 32 nt, Human
agagaugaggucucaccauguugcccaggcug

SEQ ID NO: 45451 - RNA, 32 nt, Human
agagaugaggucucacuauguugcccagcugg

SEQ ID NO: 45452 - RNA, 32 nt, Human
agagaugaggucucacuauguugcccaggcug

SEQ ID NO: 45453 - RNA, 32 nt, Human
agagaugaggucucacuguguugcccacggug

SEQ ID NO: 45454 - RNA, 32 nt, Human
agagaugaggucucacuuuguugcccaggcua

SEQ ID NO: 45455 - RNA, 32 nt, Human
agagaugaggucucccuauguugcccaggcug

SEQ ID NO: 45456 - RNA, 32 nt, Human
agagaugaggucuugccauguuacccaggcug

SEQ ID NO: 45457 - RNA, 32 nt, Human
agagaugaggucuugcuauguugcccaagcua

SEQ ID NO: 45458 - RNA, 32 nt, Human
agagaugaggucuugcuuuguugucuaggcug

SEQ ID NO: 45459 - RNA, 32 nt, Human
agagaugaggugggaaggauggguugggugaa

SEQ ID NO: 45460 - RNA, 32 nt, Human
agagaugagguuucaccauauuggccaggcug

SEQ ID NO: 45461 - RNA, 32 nt, Human
agagaugagguuucaccaugauggccaggcug

SEQ ID NO: 45462 - RNA, 32 nt, Human
agagaugagguuucaccauguuggccaggcug

SEQ ID NO: 45463 - RNA, 32 nt, Human
agagaugagguuucaccauuuuggccaggcug

SEQ ID NO: 45464 - RNA, 32 nt, Human
agagaugagguuucaccguguuggccaggcug

SEQ ID NO: 45465 - RNA, 32 nt, Human
agagaugagguuucaccuuguuggccaggaug

SEQ ID NO: 45466 - RNA, 32 nt, Human
agagaugagguuucaccuuguuggucaggcug

SEQ ID NO: 45467 - RNA, 32 nt, Human
agagaugagguuucacuguguuggccaggcug

SEQ ID NO: 45468 - RNA, 32 nt, Human
agagaugagguuucgccauguuggccaggcug

SEQ ID NO: 45469 - RNA, 32 nt, Human
agagaugagguuucgcuauauugaccaggcug

SEQ ID NO: 45470 - RNA, 32 nt, Human
agagaugagguuucuccauguuggucaggcug

SEQ ID NO: 45471 - RNA, 32 nt, Human
agagaugauggaaguccucaucuacugccauc

SEQ ID NO: 45472 - RNA, 32 nt, Human
agagaugaugggcaaaccaaacuccuacugag

SEQ ID NO: 45473 - RNA, 32 nt, Human
agagaugaugguuccauugcucuuggcuucau

SEQ ID NO: 45474 - RNA, 32 nt, Human
agagaugauucugucucauccaaucaagacuu

SEQ ID NO: 45475 - RNA, 32 nt, Human
agagaugauuuggaagaugggggugaaggaca

SEQ ID NO: 45476 - RNA, 29 nt, Human
agagaugcacccggagccuuugcucaauu

SEQ ID NO: 45477 - RNA, 32 nt, Human
agagaugcagaacugggcccguggagcagcag

SEQ ID NO: 45478 - RNA, 20 nt, Human
agagaugccagugugcacug

SEQ ID NO: 45479 - RNA, 32 nt, Human
agagaugccauccacccccaucuaggugaggg

SEQ ID NO: 45480 - RNA, 32 nt, Human
agagaugccccaggguggagggggugggaaug

SEQ ID NO: 45481 - RNA, 32 nt, Human
agagaugccguccacccccaucuaggugaggg

SEQ ID NO: 45482 - RNA, 32 nt, Human
agagaugccuguaauggugagacuuuggaucc

SEQ ID NO: 45483 - RNA, 32 nt, Human
agagaugcggccuugcucuguugcccaggcug

SEQ ID NO: 45484 - RNA, 32 nt, Human
agagaugcgguauuuggccugggaaauucugc

SEQ ID NO: 45485 - RNA, 32 nt, Human
agagaugcggucuugcuguguugccuaggcug

SEQ ID NO: 45486 - RNA, 32 nt, Human
agagaugcucuccugggaccucaguacccugc

SEQ ID NO: 45487 - RNA, 32 nt, Human
agagaugcuuugccagucucauauauaaauga

SEQ ID NO: 45488 - RNA, 32 nt, Human
agagauggagucucgcucugucacccagccug

SEQ ID NO: 45489 - RNA, 32 nt, Human
agagauggagucuugcuauauugcccaggcug

SEQ ID NO: 45490 - RNA, 32 nt, Human
agagauggaguuucaccacguuggccaagcug

SEQ ID NO: 45491 - RNA, 32 nt, Human
agagauggaguuucaccacguuggucaggcug

SEQ ID NO: 45492 - RNA, 32 nt, Human
agagauggaguuucaccauauugcccaggcug

SEQ ID NO: 45493 - RNA, 32 nt, Human
agagauggaguuucaccaugguggucaggcug

SEQ ID NO: 45494 - RNA, 32 nt, Human
agagauggaguuucaccauguuacccaggaug

SEQ ID NO: 45495 - RNA, 32 nt, Human
agagauggaguuucaccauguugcccaggcug

SEQ ID NO: 45496 - RNA, 32 nt, Human
agagauggaguuucaccauguuggccaggaug

SEQ ID NO: 45497 - RNA, 32 nt, Human
agagauggaguuucaccauguuggccaggcug

SEQ ID NO: 45498 - RNA, 32 nt, Human
agagauggcaucucacuauguugcccaggcug

SEQ ID NO: 45499 - RNA, 32 nt, Human
agagauggcaucucacuuuguugcccaggcua

SEQ ID NO: 45500 - RNA, 32 nt, Human
agagauggcaucuugcuaugucguccaggcug

SEQ ID NO: 45501 - RNA, 32 nt, Human
agagauggccaugcauacuucugccucuaucc

SEQ ID NO: 45502 - RNA, 29 nt, Human
agagauggccugguggaaagccuggauug

SEQ ID NO: 45503 - RNA, 32 nt, Human
agagauggcguuucaccauguuggccaggcug

SEQ ID NO: 45504 - RNA, 32 nt, Human
agagauggcuuccaggcaaggaaguucuaucu

SEQ ID NO: 45505 - RNA, 32 nt, Human
agagaugggaggauacuugaauccaggcauuu

SEQ ID NO: 45506 - RNA, 32 nt, Human
agagaugggaggggcacaaagaggaggacccc

SEQ ID NO: 45507 - RNA, 32 nt, Human
agagaugggaucccacuauauugcacaggcug

SEQ ID NO: 45508 - RNA, 32 nt, Human
agagaugggaucgaggcugcaccaccaccauc

SEQ ID NO: 45509 - RNA, 32 nt, Human
agagaugggaucucaccauguugcccaggcua

SEQ ID NO: 45510 - RNA, 32 nt, Human
agagaugggaucucacuagguugcccaggcug

SEQ ID NO: 45511 - RNA, 32 nt, Human
agagaugggaucuugcuauuuugcccaggcug

SEQ ID NO: 45512 - RNA, 32 nt, Human
agagaugggauuucaccauguuacucaggcug

SEQ ID NO: 45513 - RNA, 32 nt, Human
agagaugggauuucaccauguugcccaggcug

SEQ ID NO: 45514 - RNA, 32 nt, Human
agagaugggauuucaccauguuggccaggcug

SEQ ID NO: 45515 - RNA, 32 nt, Human
agagaugggauuucaccauguuggcuaggcug

SEQ ID NO: 45516 - RNA, 32 nt, Human
agagaugggauuucgccauguuggccaggcug

SEQ ID NO: 45517 - RNA, 32 nt, Human
agagaugggauuuugccauguugcccaggcug

SEQ ID NO: 45518 - RNA, 32 nt, Human
agagaugggcauaagucaggaacuugggagga

SEQ ID NO: 45519 - RNA, 32 nt, Human
agagaugggcccaucauuaggggccagcaucc

SEQ ID NO: 45520 - RNA, 32 nt, Human
agagauggggacuugcuauguugcccagacug

SEQ ID NO: 45521 - RNA, 21 nt, Human
agagauggggauggaguccca

SEQ ID NO: 45522 - RNA, 32 nt, Human
agagauggggcagaggugggccucccacuccu

SEQ ID NO: 45523 - RNA, 32 nt, Human
agagauggggcuucaccaucuugaccaggcug

SEQ ID NO: 45524 - RNA, 32 nt, Human
agagauggggcuucaccauguuggccaggcug

SEQ ID NO: 45525 - RNA, 32 nt, Human
agagaugggggcucccuauguugcccaggcug

SEQ ID NO: 45526 - RNA, 32 nt, Human
agagauggggguuuuccauauugcccaggcug

SEQ ID NO: 45527 - RNA, 32 nt, Human
agagauggggucuagcucuaucacccaggcug

SEQ ID NO: 45528 - RNA, 32 nt, Human
agagauggggucucacaguguugcccaggcug

SEQ ID NO: 45529 - RNA, 32 nt, Human
agagauggggucucaccauguuacccaggcug

SEQ ID NO: 45530 - RNA, 32 nt, Human
agagauggggucucaccauguuggccagacug

SEQ ID NO: 45531 - RNA, 32 nt, Human
agagauggggucucacccuguuggccaggcug

SEQ ID NO: 45532 - RNA, 32 nt, Human
agagauggggucucacuaugucgcccagggua

SEQ ID NO: 45533 - RNA, 32 nt, Human
agagauggggucucacuauguugcccaggcua

SEQ ID NO: 45534 - RNA, 32 nt, Human
agagauggggucucacuauguugcccaggcug

SEQ ID NO: 45535 - RNA, 32 nt, Human
agagauggggucucacuauguugcccagucua

SEQ ID NO: 45536 - RNA, 32 nt, Human
agagauggggucucacuguuguucaaacuggu

SEQ ID NO: 45537 - RNA, 32 nt, Human
agagauggggucucccuauguugcccaggcug

SEQ ID NO: 45538 - RNA, 32 nt, Human
agagauggggucucgccauguugcccgggcug

SEQ ID NO: 45539 - RNA, 32 nt, Human
agagauggggucucgccguguugcacagacug

SEQ ID NO: 45540 - RNA, 32 nt, Human
agagauggggucucguuuugucgcccaggcug

SEQ ID NO: 45541 - RNA, 32 nt, Human
agagauggggucucuccauguuggucaggcug

SEQ ID NO: 45542 - RNA, 29 nt, Human
agagauggggucuggcuauguugcccagg

SEQ ID NO: 45543 - RNA, 32 nt, Human
agagauggggucuggcuguguugcccaggcug

SEQ ID NO: 45544 - RNA, 32 nt, Human
agagauggggucuuacuauguugcccaggcug

SEQ ID NO: 45545 - RNA, 32 nt, Human
agagauggggucuuacuauguuguccaggcua

SEQ ID NO: 45546 - RNA, 32 nt, Human
agagauggggucuugccauauuugccaggcug

SEQ ID NO: 45547 - RNA, 32 nt, Human
agagauggggucuugcuauauugcccaggcug

SEQ ID NO: 45548 - RNA, 32 nt, Human
agagauggggucuugcuguguuaccugggcua

SEQ ID NO: 45549 - RNA, 32 nt, Human
agagauggggucuugcuguguugcccaggcua

SEQ ID NO: 45550 - RNA, 32 nt, Human
agagauggggucuugcuguguugcccagguug

SEQ ID NO: 45551 - RNA, 32 nt, Human
agagauggggucuugcuuuguugcccaggcug

SEQ ID NO: 45552 - RNA, 32 nt, Human
agagauggggucuugcuuuguugcccagguua

SEQ ID NO: 45553 - RNA, 32 nt, Human
agagauggggucuuguucugucaccuagggug

SEQ ID NO: 45554 - RNA, 32 nt, Human
agagaugggguuccaccauguuggccaggcug

SEQ ID NO: 45555 - RNA, 32 nt, Human
agagaugggguugaaacccccauguuggccag

SEQ ID NO: 45556 - RNA, 32 nt, Human
agagaugggguuuauccauguuggucaggcug

SEQ ID NO: 45557 - RNA, 32 nt, Human
agagaugggguuucaacauauuggccaggcug

SEQ ID NO: 45558 - RNA, 32 nt, Human
agagaugggguuucacaauuuuggccaggcug

SEQ ID NO: 45559 - RNA, 32 nt, Human
agagaugggguuucaccaaguuagccaggaug

SEQ ID NO: 45560 - RNA, 32 nt, Human
agagaugggguuucaccaaguuggcuagacua

SEQ ID NO: 45561 - RNA, 32 nt, Human
agagaugggguuucaccacauuggccaggaug

SEQ ID NO: 45562 - RNA, 32 nt, Human
agagaugggguuucaccacauuggccaggcug

SEQ ID NO: 45563 - RNA, 32 nt, Human
agagaugggguuucaccacguuagccaggaug

SEQ ID NO: 45564 - RNA, 32 nt, Human
agagaugggguuucaccacguugcccaggcug

SEQ ID NO: 45565 - RNA, 32 nt, Human
agagaugggguuucaccacguuggccacacug

SEQ ID NO: 45566 - RNA, 32 nt, Human
agagaugggguuucaccacguuggccaggaug

SEQ ID NO: 45567 - RNA, 32 nt, Human
agagaugggguuucaccacguuggccaggcua

SEQ ID NO: 45568 - RNA, 32 nt, Human
agagaugggguuucaccacguuggccagggug

SEQ ID NO: 45569 - RNA, 32 nt, Human
agagaugggguuucaccauacuggcuaggcug

SEQ ID NO: 45570 - RNA, 32 nt, Human
agagaugggguuucaccauauuggccaagcug

SEQ ID NO: 45571 - RNA, 32 nt, Human
agagaugggguuucaccauauuggccaggcug

SEQ ID NO: 45572 - RNA, 32 nt, Human
agagaugggguuucaccauauuggucacguca

SEQ ID NO: 45573 - RNA, 32 nt, Human
agagaugggguuucaccauauuggucaggcug

SEQ ID NO: 45574 - RNA, 32 nt, Human
agagaugggguuucaccaucuuggccaggcug

SEQ ID NO: 45575 - RNA, 32 nt, Human
agagaugggguuucaccaugcuggccaagcug

SEQ ID NO: 45576 - RNA, 32 nt, Human
agagaugggguuucaccaugcuggccaggcug

SEQ ID NO: 45577 - RNA, 32 nt, Human
agagaugggguuucaccauggccaggcugguc

SEQ ID NO: 45578 - RNA, 32 nt, Human
agagaugggguuucaccauguaggccaggaug

SEQ ID NO: 45579 - RNA, 32 nt, Human
agagaugggguuucaccaugucucaaacuccu

SEQ ID NO: 45580 - RNA, 32 nt, Human
agagaugggguuucaccaugugggccgggcug

SEQ ID NO: 45581 - RNA, 32 nt, Human
agagaugggguuucaccauguuaaccaggaug

SEQ ID NO: 45582 - RNA, 32 nt, Human
agagaugggguuucaccauguuaccaggaugg

SEQ ID NO: 45583 - RNA, 32 nt, Human
agagaugggguuucaccauguuagccaggaug

SEQ ID NO: 45584 - RNA, 32 nt, Human
agagaugggguuucaccauguuagccaggcug

SEQ ID NO: 45585 - RNA, 32 nt, Human
agagaugggguuucaccauguuagucaggaug

SEQ ID NO: 45586 - RNA, 32 nt, Human
agagaugggguuucaccauguugaccaggaug

SEQ ID NO: 45587 - RNA, 32 nt, Human
agagaugggguuucaccauguugaucaggcug

SEQ ID NO: 45588 - RNA, 32 nt, Human
agagaugggguuucaccauguugcccaggcug

SEQ ID NO: 45589 - RNA, 32 nt, Human
agagaugggguuucaccauguugccuaggcug

SEQ ID NO: 45590 - RNA, 32 nt, Human
agagaugggguuucaccauguugccugggcug

SEQ ID NO: 45591 - RNA, 32 nt, Human
agagaugggguuucaccauguuggacaggcug

SEQ ID NO: 45592 - RNA, 32 nt, Human
agagaugggguuucaccauguuggccagacug

SEQ ID NO: 45593 - RNA, 32 nt, Human
agagaugggguuucaccauguuggccagauga

SEQ ID NO: 45594 - RNA, 32 nt, Human
agagaugggguuucaccauguuggccaggaug

SEQ ID NO: 45595 - RNA, 32 nt, Human
agagaugggguuucaccauguuggccaggauu

SEQ ID NO: 45596 - RNA, 32 nt, Human
agagaugggguuucaccauguuggccaggcag

SEQ ID NO: 45597 - RNA, 32 nt, Human
agagaugggguuucaccauguuggccaggccg

SEQ ID NO: 45598 - RNA, 32 nt, Human
agagaugggguuucaccauguuggccaggcua

SEQ ID NO: 45599 - RNA, 32 nt, Human
agagaugggguuucaccauguuggccaggcug

SEQ ID NO: 45600 - RNA, 32 nt, Human
agagaugggguuucaccauguuggccagggug

SEQ ID NO: 45601 - RNA, 32 nt, Human
agagaugggguuucaccauguuggccagguug

SEQ ID NO: 45602 - RNA, 32 nt, Human
agagaugggguuucaccauguuggcuaggaug

SEQ ID NO: 45603 - RNA, 32 nt, Human
agagaugggguuucaccauguuggcuaggcug

SEQ ID NO: 45604 - RNA, 32 nt, Human
agagaugggguuucaccauguuggcugggcug

SEQ ID NO: 45605 - RNA, 32 nt, Human
agagaugggguuucaccauguuggucaggcag

SEQ ID NO: 45606 - RNA, 32 nt, Human
agagaugggguuucaccauguuggucaggcua

SEQ ID NO: 45607 - RNA, 32 nt, Human
agagaugggguuucaccauguuggucaggcug

SEQ ID NO: 45608 - RNA, 32 nt, Human
agagaugggguuucaccauguugguuaggcug

SEQ ID NO: 45609 - RNA, 32 nt, Human
agagaugggguuucaccauguuguccaggcug

SEQ ID NO: 45610 - RNA, 32 nt, Human
agagaugggguuucaccauguugucuaggcug

SEQ ID NO: 45611 - RNA, 32 nt, Human
agagaugggguuucaccauguuugccaggaug

SEQ ID NO: 45612 - RNA, 32 nt, Human
agagaugggguuucaccauuuuggccauucua

SEQ ID NO: 45613 - RNA, 32 nt, Human
agagaugggguuucacccagcuacucaggagg

SEQ ID NO: 45614 - RNA, 32 nt, Human
agagaugggguuucacccuauuggucaggcug

SEQ ID NO: 45615 - RNA, 32 nt, Human
agagaugggguuucacccuguuagccaggaag

SEQ ID NO: 45616 - RNA, 32 nt, Human
agagaugggguuucaccggguuagccaggaug

SEQ ID NO: 45617 - RNA, 32 nt, Human
agagaugggguuucaccguauuagccaggaug

SEQ ID NO: 45618 - RNA, 32 nt, Human
agagaugggguuucaccgugcuggccaggcug

SEQ ID NO: 45619 - RNA, 32 nt, Human
agagaugggguuucaccguguuaccaggaugg

SEQ ID NO: 45620 - RNA, 32 nt, Human
agagaugggguuucaccguguuagccaggaug

SEQ ID NO: 45621 - RNA, 32 nt, Human
agagaugggguuucaccguguuagccaggcug

SEQ ID NO: 45622 - RNA, 32 nt, Human
agagaugggguuucaccguguuaggcaggaug

SEQ ID NO: 45623 - RNA, 32 nt, Human
agagaugggguuucaccguguuagucaggaug

SEQ ID NO: 45624 - RNA, 32 nt, Human
agagaugggguuucaccguguuggccagaaug

SEQ ID NO: 45625 - RNA, 32 nt, Human
agagaugggguuucaccguguuggccaggcug

SEQ ID NO: 45626 - RNA, 32 nt, Human
agagaugggguuucaccuuguuggccagacug

SEQ ID NO: 45627 - RNA, 32 nt, Human
agagaugggguuucaccuuguuggccaggcug

SEQ ID NO: 45628 - RNA, 32 nt, Human
agagaugggguuucaccuuguuggguggccag

SEQ ID NO: 45629 - RNA, 32 nt, Human
agagaugggguuucaccuuguuggucaagcug

SEQ ID NO: 45630 - RNA, 32 nt, Human
agagaugggguuucacgauguuggccaggcug

SEQ ID NO: 45631 - RNA, 32 nt, Human
agagaugggguuucacguuguuagccaggaug

SEQ ID NO: 45632 - RNA, 32 nt, Human
agagaugggguuucacuauguugccuaggcug

SEQ ID NO: 45633 - RNA, 32 nt, Human
agagaugggguuucacuauguuggccaggcua

SEQ ID NO: 45634 - RNA, 32 nt, Human
agagaugggguuucacuauguuggccaggcug

SEQ ID NO: 45635 - RNA, 32 nt, Human
agagaugggguuucacuauguuggucaggcua

SEQ ID NO: 45636 - RNA, 32 nt, Human
agagaugggguuucacuguguuagccgggaug

SEQ ID NO: 45637 - RNA, 32 nt, Human
agagaugggguuucacuguguuggccaggcug

SEQ ID NO: 45638 - RNA, 32 nt, Human
agagaugggguuucacuguuuuggccaggcug

SEQ ID NO: 45639 - RNA, 32 nt, Human
agagaugggguuucaucacguugaccaggcug

SEQ ID NO: 45640 - RNA, 32 nt, Human
agagaugggguuucaucacguugcccaggcug

SEQ ID NO: 45641 - RNA, 32 nt, Human
agagaugggguuucaucauauuggucagggug

SEQ ID NO: 45642 - RNA, 32 nt, Human
agagaugggguuucaucauguugcccaggcug

SEQ ID NO: 45643 - RNA, 32 nt, Human
agagaugggguuucaucauguuggccaggcua

SEQ ID NO: 45644 - RNA, 32 nt, Human
agagaugggguuucaucauguuggccaggcug

SEQ ID NO: 45645 - RNA, 32 nt, Human
agagaugggguuucaucauguuggccagguug

SEQ ID NO: 45646 - RNA, 32 nt, Human
agagaugggguuucaucauguuugccagacug

SEQ ID NO: 45647 - RNA, 32 nt, Human
agagaugggguuucaucguguuagccaggaug

SEQ ID NO: 45648 - RNA, 32 nt, Human
agagaugggguuucauuauguuggccaggcug

SEQ ID NO: 45649 - RNA, 32 nt, Human
agagaugggguuuccccauguuggccaggcug

SEQ ID NO: 45650 - RNA, 32 nt, Human
agagaugggguuucgccacauugcccagguug

SEQ ID NO: 45651 - RNA, 32 nt, Human
agagaugggguuucgccagguuggccaggcug

SEQ ID NO: 45652 - RNA, 32 nt, Human
agagaugggguuucgccauguugaccaggcug

SEQ ID NO: 45653 - RNA, 32 nt, Human
agagaugggguuucgccauguugcccagcagg

SEQ ID NO: 45654 - RNA, 32 nt, Human
agagaugggguuucgccauguugcccaggcua

SEQ ID NO: 45655 - RNA, 32 nt, Human
agagaugggguuucgccauguuggccaagcug

SEQ ID NO: 45656 - RNA, 32 nt, Human
agagaugggguuucgccauguuggccacgcug

SEQ ID NO: 45657 - RNA, 32 nt, Human
agagaugggguuucgccauguuggccaggcca

SEQ ID NO: 45658 - RNA, 32 nt, Human
agagaugggguuucgccauguuggccaggcug

SEQ ID NO: 45659 - RNA, 32 nt, Human
agagaugggguuucgccauguuugucaggcug

SEQ ID NO: 45660 - RNA, 32 nt, Human
agagaugggguuucgcguguuggucaggcugg

SEQ ID NO: 45661 - RNA, 29 nt, Human
agagaugggguuucgcuauguuggccaag

SEQ ID NO: 45662 - RNA, 32 nt, Human
agagaugggguuucgcuauguuggccaggcug

SEQ ID NO: 45663 - RNA, 32 nt, Human
agagaugggguuucgucauguugcccaggcug

SEQ ID NO: 45664 - RNA, 32 nt, Human
agagaugggguuucgucauguuggccagacug

SEQ ID NO: 45665 - RNA, 32 nt, Human
agagaugggguuucucauauuggucaggcugg

SEQ ID NO: 45666 - RNA, 32 nt, Human
agagaugggguuucuccaugguggucaggcug

SEQ ID NO: 45667 - RNA, 32 nt, Human
agagaugggguuucuccauguauugcccaggc

SEQ ID NO: 45668 - RNA, 32 nt, Human
agagaugggguuucuccauguugaucagacua

SEQ ID NO: 45669 - RNA, 32 nt, Human
agagaugggguuucuccauguuggccagaaug

SEQ ID NO: 45670 - RNA, 32 nt, Human
agagaugggguuucuccauguuggccaggcug

SEQ ID NO: 45671 - RNA, 29 nt, Human
agagaugggguuucuccauguuggucagg

SEQ ID NO: 45672 - RNA, 32 nt, Human
agagaugggguuucuccauguuggucaggcug

SEQ ID NO: 45673 - RNA, 32 nt, Human
agagaugggguuucuccuuauugcccaggaug

SEQ ID NO: 45674 - RNA, 32 nt, Human
agagaugggguuucucgauguuggccaggcug

SEQ ID NO: 45675 - RNA, 32 nt, Human
agagaugggguuucucuguguugcccagucuu

SEQ ID NO: 45676 - RNA, 32 nt, Human
agagaugggguuugaccauguuggccaggaug

SEQ ID NO: 45677 - RNA, 32 nt, Human
agagaugggguuugaccauguuggccaggcug

SEQ ID NO: 45678 - RNA, 32 nt, Human
agagaugggguuugaccguguuagccaggaug

SEQ ID NO: 45679 - RNA, 32 nt, Human
agagaugggguuuggccaugauggccaggcug

SEQ ID NO: 45680 - RNA, 32 nt, Human
agagaugggguuuuaccauauugcccaggcug

SEQ ID NO: 45681 - RNA, 32 nt, Human
agagaugggguuuuaccauguggccaggcugg

SEQ ID NO: 45682 - RNA, 32 nt, Human
agagaugggguuuuaccauguuaggauggucu

SEQ ID NO: 45683 - RNA, 32 nt, Human
agagaugggguuuuaccauguuggccaggcug

SEQ ID NO: 45684 - RNA, 32 nt, Human
agagaugggguuuuaccauguuggucaggcug

SEQ ID NO: 45685 - RNA, 32 nt, Human
agagaugggguuuugccauauuggccaggcug

SEQ ID NO: 45686 - RNA, 32 nt, Human
agagaugggguuuugccauguugcccaggcug

SEQ ID NO: 45687 - RNA, 32 nt, Human
agagaugggguuuugccauguugcccaggcuu

SEQ ID NO: 45688 - RNA, 32 nt, Human
agagaugggguuuugccauguugcucaggcug

SEQ ID NO: 45689 - RNA, 32 nt, Human
agagaugggguuuugccauguuggccagacug

SEQ ID NO: 45690 - RNA, 32 nt, Human
agagaugggguuuugccauguuggccaggcug

SEQ ID NO: 45691 - RNA, 32 nt, Human
agagaugggguuuugccauguuggucaggcug

SEQ ID NO: 45692 - RNA, 32 nt, Human
agagaugggguuuugccauguuugccgggcug

SEQ ID NO: 45693 - RNA, 32 nt, Human
agagaugggguuuugccguguugcccagacug

SEQ ID NO: 45694 - RNA, 32 nt, Human
agagaugggguuuugccuuguuggccaggcug

SEQ ID NO: 45695 - RNA, 32 nt, Human
agagaugggguuuugcucugucgcccaggcug

SEQ ID NO: 45696 - RNA, 29 nt, Human
agagaugggugaggggaccuggagaggua

SEQ ID NO: 45697 - RNA, 32 nt, Human
agagauggguuuucaccauauuggucaggcug

SEQ ID NO: 45698 - RNA, 32 nt, Human
agagauggguuuucaccaugguggccaggcug

SEQ ID NO: 45699 - RNA, 32 nt, Human
agagauggguuuucgccauguugcccaggcug

SEQ ID NO: 45700 - RNA, 32 nt, Human
agagaugguaacuugcuauguuguccagauug

SEQ ID NO: 45701 - RNA, 32 nt, Human
agagaugguagcaucagcacuuaaucuuuauc

SEQ ID NO: 45702 - RNA, 32 nt, Human
agagauggucacagagggcagcagggacagga

SEQ ID NO: 45703 - RNA, 22 nt, Human
agagauggugaagagacugcau

SEQ ID NO: 45704 - RNA, 32 nt, Human
agagaugguguuucaccauguuggccaggaug

SEQ ID NO: 45705 - RNA, 32 nt, Human
agagauguauggggaucaccuuugccagagcu

SEQ ID NO: 45706 - RNA, 32 nt, Human
agagaugucauugcccuggugagccaggucuu

SEQ ID NO: 45707 - RNA, 32 nt, Human
agagaugugaaggagggaaggagcaggagagc

SEQ ID NO: 45708 - RNA, 32 nt, Human
agagaugugccaucuugcauuuggaaaguacu

SEQ ID NO: 45709 - RNA, 32 nt, Human
agagaugugcccccacccccacccucgaccac

SEQ ID NO: 45710 - RNA, 32 nt, Human
agagaugugccucauucugugccuccuucugu

SEQ ID NO: 45711 - RNA, 32 nt, Human
agagaugugccuggggaucaggccaugagaau

SEQ ID NO: 45712 - RNA, 32 nt, Human
agagauguggagaaccagggguauaacuaagg

SEQ ID NO: 45713 - RNA, 32 nt, Human
agagauguggucacacuguguugcccaggcug

SEQ ID NO: 45714 - RNA, 32 nt, Human
agagauguggucucccuguauugcccagucug

SEQ ID NO: 45715 - RNA, 32 nt, Human
agagaugugguuucuccauguuggccaggcug

SEQ ID NO: 45716 - RNA, 32 nt, Human
agagauguucaccuuuuccuugcugauugcua

SEQ ID NO: 45717 - RNA, 32 nt, Human
agagauguugagugcugagauuucaaggcuca

SEQ ID NO: 45718 - RNA, 32 nt, Human
agagauguuguuucaccauguugcccgggcug

SEQ ID NO: 45719 - RNA, 32 nt, Human
agagauguuuaaaauuuuaaacuuuuucuacc

SEQ ID NO: 45720 - RNA, 32 nt, Human
agagauguuucagaauacaaaauuaguauaug

SEQ ID NO: 45721 - RNA, 32 nt, Human
agagauuaagacuauucucccagucccacuac

SEQ ID NO: 45722 - RNA, 32 nt, Human
agagauuaaucagggaaugaaauccaggugga

SEQ ID NO: 45723 - RNA, 32 nt, Human
agagauuaccaccaccacccccuccuucagac

SEQ ID NO: 45724 - RNA, 32 nt, Human
agagauuacuccugagaugcaaacuggaguuc

SEQ ID NO: 45725 - RNA, 32 nt, Human
agagauuaguuauaccuuauaccauuauguug

SEQ ID NO: 45726 - RNA, 32 nt, Human
agagauuauuuggaauaacgugcugaguuugu

SEQ ID NO: 45727 - RNA, 32 nt, Human
agagauucaaaaccaggaucuuuaauaaucua

SEQ ID NO: 45728 - RNA, 22 nt, Human
agagauucaauuucccuggagg

SEQ ID NO: 45729 - RNA, 32 nt, Human
agagauuccaacugacagaaucugccagaagc

SEQ ID NO: 45730 - RNA, 32 nt, Human
agagauuccagaagccucuccuccccgccgcc

SEQ ID NO: 45731 - RNA, 32 nt, Human
agagauuccagugaguugagaucaugccccug

SEQ ID NO: 45732 - RNA, 32 nt, Human
agagauuccucuccuuuuacugugucuuguau

SEQ ID NO: 45733 - RNA, 32 nt, Human
agagauucuaaaacauguucagcacuuucugg

SEQ ID NO: 45734 - RNA, 32 nt, Human
agagauucuccaaggacagauggcaguggagc

SEQ ID NO: 45735 - RNA, 32 nt, Human
agagauucucuccagcggcagcagaaaacggg

SEQ ID NO: 45736 - RNA, 32 nt, Human
agagauucugaugccacugaaguuugaggagc

SEQ ID NO: 45737 - RNA, 32 nt, Human
agagauucuucuggugauguuuacuuaaaaag

SEQ ID NO: 45738 - RNA, 32 nt, Human
agagauugagagggaugucgggcaguucccau

SEQ ID NO: 45739 - RNA, 32 nt, Human
agagauugagccacugcacuccagccugggug

SEQ ID NO: 45740 - RNA, 32 nt, Human
agagauugaggcaugaggauugcuugagcuug

SEQ ID NO: 45741 - RNA, 32 nt, Human
agagauugcaccacugcacuccagucugggca

SEQ ID NO: 45742 - RNA, 32 nt, Human
agagauugcaccacugcauuccaaccugggcg

SEQ ID NO: 45743 - RNA, 32 nt, Human
agagauugcaucuggccugggagaucaggaaa

SEQ ID NO: 45744 - RNA, 20 nt, Human
agagauugcccacacucugc

SEQ ID NO: 45745 - RNA, 32 nt, Human
agagauugccugguucaucuuguagucuucca

SEQ ID NO: 45746 - RNA, 32 nt, Human
agagauugcgccacugcacucaagucugggcg

SEQ ID NO: 45747 - RNA, 32 nt, Human
agagauugcggaaaccuggugccggaaacaga

SEQ ID NO: 45748 - RNA, 32 nt, Human
agagauuggaggccaggauggagaauugguug

SEQ ID NO: 45749 - RNA, 32 nt, Human
agagauuggguuucaccauguuggccaggaug

SEQ ID NO: 45750 - RNA, 32 nt, Human
agagauugugccacugcacuccagccuggcaa

SEQ ID NO: 45751 - RNA, 32 nt, Human
agagauuucagccaaggcugggccagccuuuu

SEQ ID NO: 45752 - RNA, 32 nt, Human
agagauuucuagauugacagcuguuuuaguac

SEQ ID NO: 45753 - RNA, 32 nt, Human
agagauuugcagcccucgccccucccugagaa

SEQ ID NO: 45754 - RNA, 32 nt, Human
agagauuuuaaaggagaaaguacucuggguuu

SEQ ID NO: 45755 - RNA, 32 nt, Human
agagauuuugaaaaccaauuguauuuaaccag

SEQ ID NO: 45756 - RNA, 32 nt, Human
agagauuuugccuugaguauagcaauaauaaa

SEQ ID NO: 45757 - RNA, 32 nt, Human
agagauuuuucuuaacuaaggagugcaaguag

SEQ ID NO: 45758 - RNA, 32 nt, Human
agagcaaaaacuguaucauuucuuauaugauu

SEQ ID NO: 45759 - RNA, 32 nt, Human
agagcaaaaagggagagagcaggaaagcgagc

SEQ ID NO: 45760 - RNA, 32 nt, Human
agagcaaaaccuuccagccuugccugcuuggu

SEQ ID NO: 45761 - RNA, 32 nt, Human
agagcaaaacuaagugauagaaaauauuucac

SEQ ID NO: 45762 - RNA, 32 nt, Human
agagcaaaauggagggggaggggccagaaaua

SEQ ID NO: 45763 - RNA, 16 nt, Human
agagcaaaccauguca

SEQ ID NO: 45764 - RNA, 32 nt, Human
agagcaaacgaggucccugagagcuccaccua

SEQ ID NO: 45765 - RNA, 32 nt, Human
agagcaaagcagcgcaggggucagggaggugg

SEQ ID NO: 45766 - RNA, 32 nt, Human
agagcaaaggaaagccccugaagaaguaaaaa

SEQ ID NO: 45767 - RNA, 32 nt, Human
agagcaaaggcccagccaggagagaggacaga

SEQ ID NO: 45768 - RNA, 32 nt, Human
agagcaaagggaacccagcaguucugagugag

SEQ ID NO: 45769 - RNA, 32 nt, Human
agagcaaaugcuggcuaaagcaucuaaucacc

SEQ ID NO: 45770 - RNA, 32 nt, Human
agagcaacacaaaauggacucagcacggauca

SEQ ID NO: 45771 - RNA, 32 nt, Human
agagcaacagcagcugcaagacauuguuucuc

SEQ ID NO: 45772 - RNA, 32 nt, Human
agagcaacagcccaguccugaggaugggaggg

SEQ ID NO: 45773 - RNA, 25 nt, Human
agagcaacagccccagagccugggc

SEQ ID NO: 45774 - RNA, 32 nt, Human
agagcaacagggcaaggccuggggaagcuggg

SEQ ID NO: 45775 - RNA, 32 nt, Human
agagcaaccauguuuuagcauaaugggaugac

SEQ ID NO: 45776 - RNA, 32 nt, Human
agagcaaccuaagcuaagucacucugcgauau

SEQ ID NO: 45777 - RNA, 32 nt, Human
agagcaacggucacaaucaagucuuaaugaug

SEQ ID NO: 45778 - RNA, 32 nt, Human
agagcaacucugcagggucugcuccaagaggc

SEQ ID NO: 45779 - RNA, 20 nt, Human
agagcaacuuauuuuccaca

SEQ ID NO: 45780 - RNA, 32 nt, Human
agagcaacuucugcuugcucugagcccccugc

SEQ ID NO: 45781 - RNA, 32 nt, Human
agagcaagaagaaaggagaagccucuucuauc

SEQ ID NO: 45782 - RNA, 23 nt, Human
agagcaagaaggcguacacgagg

SEQ ID NO: 45783 - RNA, 21 nt, Human
agagcaagacccugucucuug

SEQ ID NO: 45784 - RNA, 32 nt, Human
agagcaagagaggaccuugggccccguccuag

SEQ ID NO: 45785 - RNA, 32 nt, Human
agagcaagagauucauacaggccaagugauga

SEQ ID NO: 45786 - RNA, 32 nt, Human
agagcaagcagacccagccacacugcucaaag

SEQ ID NO: 45787 - RNA, 32 nt, Human
agagcaaggccuuggcagccagcuuuucagag

SEQ ID NO: 45788 - RNA, 32 nt, Human
agagcaagggacguggacggggcagugagcca

SEQ ID NO: 45789 - RNA, 32 nt, Human
agagcaagggagggaggaaggcggugagagag

SEQ ID NO: 45790 - RNA, 32 nt, Human
agagcaaggucuucauucaugguccugagcag

SEQ ID NO: 45791 - RNA, 32 nt, Human
agagcaagguuauuguuggcucaggccuuguu

SEQ ID NO: 45792 - RNA, 32 nt, Human
agagcaaguuguacucaaagcauucaguuaaa

SEQ ID NO: 45793 - RNA, 32 nt, Human
agagcaaguuucuaaaugggagacugcugagg

SEQ ID NO: 45794 - RNA, 32 nt, Human
agagcaauauguuuccuucucuguaacagugu

SEQ ID NO: 45795 - RNA, 32 nt, Human
agagcaaucacugcacccagccaccucuauau

SEQ ID NO: 45796 - RNA, 31 nt, Human
agagcaaugaacaggagaaggagggagagag

SEQ ID NO: 45797 - RNA, 32 nt, Human
agagcaaugguacgaaaacaaggacuagagcu

SEQ ID NO: 45798 - RNA, 22 nt, Human
agagcacaagugcugcauggaa

SEQ ID NO: 45799 - RNA, 32 nt, Human
agagcacaauguaguuauucuaaugcccaguu

SEQ ID NO: 45800 - RNA, 32 nt, Human
agagcacaauuucaaaagucucugugcagugg

SEQ ID NO: 45801 - RNA, 32 nt, Human
agagcacacaagcgugaagaaaaggaucuuaa

SEQ ID NO: 45802 - RNA, 32 nt, Human
agagcacaccacugcacuccagccugggcaac

SEQ ID NO: 45803 - RNA, 32 nt, Human
agagcacacccagggcuggaaagcccuggaac

SEQ ID NO: 45804 - RNA, 32 nt, Human
agagcacacuuuaagaauccuaaagcacuaag

SEQ ID NO: 45805 - RNA, 32 nt, Human
agagcacagagaagcucccagcuuugaagguc

SEQ ID NO: 45806 - RNA, 32 nt, Human
agagcacagcuggccccggcguuucaugaagu

SEQ ID NO: 45807 - RNA, 32 nt, Human
agagcacaggcagaggaugggcggagcaaagc

SEQ ID NO: 45808 - RNA, 32 nt, Human
agagcacaguaguucagaaacuauuuagagcu

SEQ ID NO: 45809 - RNA, 32 nt, Human
agagcacaugagauguccucagcugggcuugg

SEQ ID NO: 45810 - RNA, 32 nt, Human
agagcacauggcccccagaggcuuccagucuc

SEQ ID NO: 45811 - RNA, 32 nt, Human
agagcacaugucaggggcaguggaggcuggcu

SEQ ID NO: 45812 - RNA, 32 nt, Human
agagcaccaccaggaccgggugagugagaagg

SEQ ID NO: 45813 - RNA, 32 nt, Human
agagcaccaccuucucuuuuugcccauauugc

SEQ ID NO: 45814 - RNA, 32 nt, Human
agagcaccacugaacuuagaccucucaacaca

SEQ ID NO: 45815 - RNA, 32 nt, Human
agagcaccagagaguuuucugguaauccacgc

SEQ ID NO: 45816 - RNA, 21 nt, Human
agagcaccagccugcauggaa

SEQ ID NO: 45817 - RNA, 32 nt, Human
agagcaccauaacauagcuccgaaagggagag

SEQ ID NO: 45818 - RNA, 32 nt, Human
agagcacccacuguccugaccagagucucagu

SEQ ID NO: 45819 - RNA, 32 nt, Human
agagcacccacugugaaguccuacaggaagua

SEQ ID NO: 45820 - RNA, 32 nt, Human
agagcacccgggcuugcccucaacuuugcucu

SEQ ID NO: 45821 - RNA, 22 nt, Human
agagcaccgccggggccacagg

SEQ ID NO: 45822 - RNA, 32 nt, Human
agagcaccgcugcacucgcggccggcgaugcg

SEQ ID NO: 45823 - RNA, 32 nt, Human
agagcaccugcagaggagcaggaggccggagc

SEQ ID NO: 45824 - RNA, 32 nt, Human
agagcaccugcaggaaggggcggcuguaggcg

SEQ ID NO: 45825 - RNA, 32 nt, Human
agagcaccugccugcccugccgauguguccug

SEQ ID NO: 45826 - RNA, 32 nt, Human
agagcaccuggugaugauggagaagauccuag

SEQ ID NO: 45827 - RNA, 32 nt, Human
agagcacgccacugcacuccagccugggugac

SEQ ID NO: 45828 - RNA, 32 nt, Human
agagcacgccauugcacuccacacuccagccu

SEQ ID NO: 45829 - RNA, 32 nt, Human
agagcacggcugaccauuucugcuccgggauc

SEQ ID NO: 45830 - RNA, 32 nt, Human
agagcacgugccugcauguacuugcacacagg

SEQ ID NO: 45831 - RNA, 32 nt, Human
agagcacguguuucgcggccugggcagccugg

SEQ ID NO: 45832 - RNA, 32 nt, Human
agagcacuaagauaacaccuucaagagacuug

SEQ ID NO: 45833 - RNA, 32 nt, Human
agagcacugagucucugggauucuggcaaggu

SEQ ID NO: 45834 - RNA, 32 nt, Human
agagcacugccaggacccaccacuggaagcag

SEQ ID NO: 45835 - RNA, 32 nt, Human
agagcacuggagcuggagggagcuccagccaa

SEQ ID NO: 45836 - RNA, 19 nt, Human
agagcacuggcauuuggca

SEQ ID NO: 45837 - RNA, 32 nt, Human
agagcacuggcucuccagccccaggaggagaa

SEQ ID NO: 45838 - RNA, 32 nt, Human
agagcacugugacuccagcccuggcucggagc

SEQ ID NO: 45839 - RNA, 32 nt, Human
agagcacuuccuuccagggcaaggagcaggcg

SEQ ID NO: 45840 - RNA, 32 nt, Human
agagcacuuggagauggcaaugcugaaccuca

SEQ ID NO: 45841 - RNA, 32 nt, Human
agagcacuuggagauggcaaugcugaccuaau

SEQ ID NO: 45842 - RNA, 32 nt, Human
agagcacuuggagauggcaaugcugaccucac

SEQ ID NO: 45843 - RNA, 32 nt, Human
agagcacuuuuccuugcaugaguaauuuucug

SEQ ID NO: 45844 - RNA, 32 nt, Human
agagcagaaaagcugaaaauucuaaacaucag

SEQ ID NO: 45845 - RNA, 18 nt, Human
agagcagaaauuauacug

SEQ ID NO: 45846 - RNA, 18 nt, Human
agagcagaacguuuggga

SEQ ID NO: 45847 - RNA, 32 nt, Human
agagcagaacuccaagcugcugugcugggcgu

SEQ ID NO: 45848 - RNA, 32 nt, Human
agagcagaacuccaggccucaggaaaggacug

SEQ ID NO: 45849 - RNA, 32 nt, Human
agagcagaauugagggagagaccuuucuuccu

SEQ ID NO: 45850 - RNA, 32 nt, Human
agagcagacagaaauaccccacacauucccca

SEQ ID NO: 45851 - RNA, 32 nt, Human
agagcagacauauauccugccuuuagacaaga

SEQ ID NO: 45852 - RNA, 32 nt, Human
agagcagaccaggcccgguggagaauuaggug

SEQ ID NO: 45853 - RNA, 32 nt, Human
agagcagacgccgggauccaggagaaugcucg

SEQ ID NO: 45854 - RNA, 32 nt, Human
agagcagagcagagaacuguggggaacgcugu

SEQ ID NO: 45855 - RNA, 32 nt, Human
agagcagagccgcggagucugcggcgcgggug

SEQ ID NO: 45856 - RNA, 32 nt, Human
agagcagagcugcagacaggaauaagaagaac

SEQ ID NO: 45857 - RNA, 17 nt, Human
agagcagagcuuuggga

SEQ ID NO: 45858 - RNA, 20 nt, Human
agagcagaggagggccuggg

SEQ ID NO: 45859 - RNA, 18 nt, Human
agagcagaggcccaggag

SEQ ID NO: 45860 - RNA, 32 nt, Human
agagcagaggcugaggcacggggagccagccc

SEQ ID NO: 45861 - RNA, 32 nt, Human
agagcagagggaaaggaggcuggagaggcuuc

SEQ ID NO: 45862 - RNA, 32 nt, Human
agagcagagggcaagggcugccugagccuugu

SEQ ID NO: 45863 - RNA, 32 nt, Human
agagcagaggucuucucugcaccaaccacucu

SEQ ID NO: 45864 - RNA, 32 nt, Human
agagcagagguuuagaggcacaauucugcuuu

SEQ ID NO: 45865 - RNA, 32 nt, Human
agagcagauccaggccccagaaagccucaccu

SEQ ID NO: 45866 - RNA, 32 nt, Human
agagcagaugccauuuuguacauguaugaaau

SEQ ID NO: 45867 - RNA, 32 nt, Human
agagcagauggaaacuuccuucucuaugcaca

SEQ ID NO: 45868 - RNA, 32 nt, Human
agagcagcaagucggccucccugggcccagcu

SEQ ID NO: 45869 - RNA, 32 nt, Human
agagcagcaaguucauacaacaugcauguucu

SEQ ID NO: 45870 - RNA, 32 nt, Human
agagcagcacagaaacaagcuacucugacauu

SEQ ID NO: 45871 - RNA, 32 nt, Human
agagcagcacagcucaucaguccccaaagccc

SEQ ID NO: 45872 - RNA, 32 nt, Human
agagcagcacuaccccucccaccuccaaagca

SEQ ID NO: 45873 - RNA, 32 nt, Human
agagcagcagagaaaagcugaugggagugaga

SEQ ID NO: 45874 - RNA, 22 nt, Human
agagcagcagcagagcugagua

SEQ ID NO: 45875 - RNA, 26 nt, Human
agagcagcagcauucaggccugggca

SEQ ID NO: 45876 - RNA, 23 nt, Human
agagcagcagcgacaacucagca

SEQ ID NO: 45877 - RNA, 21 nt, Human
agagcagcagcggcccaagca

SEQ ID NO: 45878 - RNA, 20 nt, Human
agagcagcagcuaccuggca

SEQ ID NO: 45879 - RNA, 19 nt, Human
agagcagcagcuacgggca

SEQ ID NO: 45880 - RNA, 31 nt, Human
agagcagcaggacccuucacagcagguccuu

SEQ ID NO: 45881 - RNA, 23 nt, Human
agagcagcaguuuucuccugggc

SEQ ID NO: 45882 - RNA, 32 nt, Human
agagcagcauaaucuacagagagacagggaca

SEQ ID NO: 45883 - RNA, 20 nt, Human
agagcagcauggggccuggg

SEQ ID NO: 45884 - RNA, 32 nt, Human
agagcagccacagaagcugugccugaagggug

SEQ ID NO: 45885 - RNA, 32 nt, Human
agagcagccacugcuacugcuaaugccaccac

SEQ ID NO: 45886 - RNA, 32 nt, Human
agagcagcccaggccaugacccugccgagcac

SEQ ID NO: 45887 - RNA, 32 nt, Human
agagcagcccauuuuccucuggauucauugau

SEQ ID NO: 45888 - RNA, 32 nt, Human
agagcagccucaccaggcagggcucuggcuag

SEQ ID NO: 45889 - RNA, 22 nt, Human
agagcagcgcuggcaucgggca

SEQ ID NO: 45890 - RNA, 32 nt, Human
agagcagcggccuguaccugcaggcagguaga

SEQ ID NO: 45891 - RNA, 32 nt, Human
agagcagcgggcacuccuuccugggcagggug

SEQ ID NO: 45892 - RNA, 32 nt, Human
agagcagcgucccagcccuguuuuccaggacu

SEQ ID NO: 45893 - RNA, 32 nt, Human
agagcagcgucuucuguguuuccuucaugugu

SEQ ID NO: 45894 - RNA, 32 nt, Human
agagcagcucacuucucuguguucugccuccc

SEQ ID NO: 45895 - RNA, 32 nt, Human
agagcagcucuggcagagaccucugcccuccu

SEQ ID NO: 45896 - RNA, 32 nt, Human
agagcagcugaaaucacaaaaccuggaagacu

SEQ ID NO: 45897 - RNA, 24 nt, Human
agagcagcuggccggccccaggca

SEQ ID NO: 45898 - RNA, 32 nt, Human
agagcagcuggcuccauuggcuucucccugca

SEQ ID NO: 45899 - RNA, 32 nt, Human
agagcagcugggggcccugccugugccgucgc

SEQ ID NO: 45900 - RNA, 32 nt, Human
agagcagcuuagaggaucucccaaggaugaaa

SEQ ID NO: 45901 - RNA, 23 nt, Human
agagcaggaagaggcgcccugug

SEQ ID NO: 45902 - RNA, 32 nt, Human
agagcaggaaggacaggaagcuggcagaacgg

SEQ ID NO: 45903 - RNA, 22 nt, Human
agagcaggaaggagaguccugu

SEQ ID NO: 45904 - RNA, 32 nt, Human
agagcaggacagugaugguguccccagggcug

SEQ ID NO: 45905 - RNA, 32 nt, Human
agagcaggacaugagacauagauacagugggg

SEQ ID NO: 45906 - RNA, 32 nt, Human
agagcaggaccacaucgauaguauuuaauaau

SEQ ID NO: 45907 - RNA, 32 nt, Human
agagcaggacucacagguuggaagagaaucac

SEQ ID NO: 45908 - RNA, 32 nt, Human
agagcaggagcaggaaaaggaggcucagcacu

SEQ ID NO: 45909 - RNA, 32 nt, Human
agagcaggagccaggccaggcgggagggaaag

SEQ ID NO: 45910 - RNA, 32 nt, Human
agagcaggaggcagagcccgcgggaagcucgg

SEQ ID NO: 45911 - RNA, 19 nt, Human
agagcaggagggagacuga

SEQ ID NO: 45912 - RNA, 22 nt, Human
agagcaggaggggccugucucc

SEQ ID NO: 45913 - RNA, 32 nt, Human
agagcaggauagcucuuccuccccaggacuug

SEQ ID NO: 45914 - RNA, 32 nt, Human
agagcaggcaggcagaguggagagggagagac

SEQ ID NO: 45915 - RNA, 32 nt, Human
agagcaggcagggcacagcagagcaggcugga

SEQ ID NO: 45916 - RNA, 32 nt, Human
agagcaggccccaguccuccugggaggcuggc

SEQ ID NO: 45917 - RNA, 21 nt, Human
agagcaggccugccagccccu

SEQ ID NO: 45918 - RNA, 22 nt, Human
agagcaggcucagacucugggu

SEQ ID NO: 45919 - RNA, 32 nt, Human
agagcagggaaaggcagccccagagggauccc

SEQ ID NO: 45920 - RNA, 32 nt, Human
agagcagggaggaaaaguuaggguagauuauu

SEQ ID NO: 45921 - RNA, 32 nt, Human
agagcagggaggaagcagagcagugcuuagaa

SEQ ID NO: 45922 - RNA, 32 nt, Human
agagcagggcugcauuuccagcaggagcugcg

SEQ ID NO: 45923 - RNA, 32 nt, Human
agagcagggcuggagggaaggagccaggaggg

SEQ ID NO: 45924 - RNA, 32 nt, Human
agagcagggcugggcgccucuguccuggcccg

SEQ ID NO: 45925 - RNA, 32 nt, Human
agagcaggggagccaccagccacaggcagcca

SEQ ID NO: 45926 - RNA, 32 nt, Human
agagcagggucugggcuccugccucaccgcug

SEQ ID NO: 45927 - RNA, 32 nt, Human
agagcaggguuccgagucugaggaagacauaa

SEQ ID NO: 45928 - RNA, 32 nt, Human
agagcaggugacaaggaugacuaaggucagag

SEQ ID NO: 45929 - RNA, 32 nt, Human
agagcagguuccugucaauguucugaguucga

SEQ ID NO: 45930 - RNA, 32 nt, Human
agagcagguuguaggcacagaggaugggcagc

SEQ ID NO: 45931 - RNA, 32 nt, Human
agagcagucgcuccagccggggcugcaggugg

SEQ ID NO: 45932 - RNA, 32 nt, Human
agagcagugagccagccccuccuccgaccaag

SEQ ID NO: 45933 - RNA, 32 nt, Human
agagcagugagggggagacucacccacccucu

SEQ ID NO: 45934 - RNA, 32 nt, Human
agagcagugcacuccagucugcagguacugca

SEQ ID NO: 45935 - RNA, 32 nt, Human
agagcagugcugaucacuggauccuguaugug

SEQ ID NO: 45936 - RNA, 32 nt, Human
agagcaguggacacaucucagcaggucggucu

SEQ ID NO: 45937 - RNA, 32 nt, Human
agagcauaaggcuucagggcccaaguugggag

SEQ ID NO: 45938 - RNA, 32 nt, Human
agagcauacaccaaugauuauuucucacaguu

SEQ ID NO: 45939 - RNA, 32 nt, Human
agagcauacgccaggagccuccugccucaaag

SEQ ID NO: 45940 - RNA, 32 nt, Human
agagcauaggaaaccacacagacuugggcagg

SEQ ID NO: 45941 - RNA, 32 nt, Human
agagcauccaugagucaagcccccuccccaca

SEQ ID NO: 45942 - RNA, 32 nt, Human
agagcaucccauagccaggaugauaguggacu

SEQ ID NO: 45943 - RNA, 32 nt, Human
agagcauccccuuccuccuuucccuggccacu

SEQ ID NO: 45944 - RNA, 22 nt, Human
agagcaucccguguggauauga

SEQ ID NO: 45945 - RNA, 32 nt, Human
agagcauccuccuuagagaaaggucaguguug

SEQ ID NO: 45946 - RNA, 32 nt, Human
agagcaucgauucucauucucucccucucccu

SEQ ID NO: 45947 - RNA, 26 nt, Human
agagcaucuaaccugaugcucuugga

SEQ ID NO: 45948 - RNA, 32 nt, Human
agagcaucuccucuuaaggauacgugccuugg

SEQ ID NO: 45949 - RNA, 32 nt, Human
agagcaucucugaggaacaaaggugccagggc

SEQ ID NO: 45950 - RNA, 32 nt, Human
agagcaucuuggacacauuucuccccugagaa

SEQ ID NO: 45951 - RNA, 32 nt, Human
agagcaugaaugggccuacaccugccaaggcu

SEQ ID NO: 45952 - RNA, 22 nt, Human
agagcaugaucaugaguccugu

SEQ ID NO: 45953 - RNA, 32 nt, Human
agagcaugaucuguuuggccacaugcaagugu

SEQ ID NO: 45954 - RNA, 32 nt, Human
agagcaugccgcugcacuccagccugggagac

SEQ ID NO: 45955 - RNA, 32 nt, Human
agagcaugcucacccagcucugcuccaaggcc

SEQ ID NO: 45956 - RNA, 32 nt, Human
agagcaugcugggucugcaucuccucucgucu

SEQ ID NO: 45957 - RNA, 23 nt, Human
agagcaugggcugggccugggca

SEQ ID NO: 45958 - RNA, 32 nt, Human
agagcauugaucauuucucuccccuucaugaa

SEQ ID NO: 45959 - RNA, 32 nt, Human
agagcauugccauccauucaaaccagauuagg

SEQ ID NO: 45960 - RNA, 32 nt, Human
agagcauugccauucccugccuggggcgggcc

SEQ ID NO: 45961 - RNA, 32 nt, Human
agagcauuggggcuggaguguuccggcaaaga

SEQ ID NO: 45962 - RNA, 20 nt, Human
agagcauuucagccagagga

SEQ ID NO: 45963 - RNA, 32 nt, Human
agagcauuuuaaauucaggaagugguucugga

SEQ ID NO: 45964 - RNA, 32 nt, Human
agagcauuuuacaagaguucugaccuggaugg

SEQ ID NO: 45965 - RNA, 32 nt, Human
agagcauuuugacaaagacagaggacuuggac

SEQ ID NO: 45966 - RNA, 32 nt, Human
agagccaaaaacaaauagugccaucugcccca

SEQ ID NO: 45967 - RNA, 32 nt, Human
agagccaaaaucagagcuggaaccugaggaga

SEQ ID NO: 45968 - RNA, 32 nt, Human
agagccaaaaugucacaguuccuaucugugag

SEQ ID NO: 45969 - RNA, 21 nt, Human
agagccaagacccucggccuc

SEQ ID NO: 45970 - RNA, 32 nt, Human
agagccaagcaacacacaccuccuugggccca

SEQ ID NO: 45971 - RNA, 32 nt, Human
agagccaagccgccagcgcugcgaugugggcc

SEQ ID NO: 45972 - RNA, 21 nt, Human
agagccaagccucucaaccuc

SEQ ID NO: 45973 - RNA, 32 nt, Human
agagccaaggguuuauugugaagaacugucau

SEQ ID NO: 45974 - RNA, 32 nt, Human
agagccaaggugcaauguagcaggacaacuca

SEQ ID NO: 45975 - RNA, 32 nt, Human
agagccaaguaaagacagaggcagggacugaa

SEQ ID NO: 45976 - RNA, 24 nt, Human
agagccacaaaacaaaacacaaca

SEQ ID NO: 45977 - RNA, 32 nt, Human
agagccacaagaagagccggagagggaaugag

SEQ ID NO: 45978 - RNA, 32 nt, Human
agagccacagaaucaugagugcagagcugugg

SEQ ID NO: 45979 - RNA, 32 nt, Human
agagccacaggccagacccggcgagggcaccg

SEQ ID NO: 45980 - RNA, 32 nt, Human
agagccacagucaggggccuucugagaccugu

SEQ ID NO: 45981 - RNA, 32 nt, Human
agagccacaucaggacuugcugugcauuucaa

SEQ ID NO: 45982 - RNA, 32 nt, Human
agagccaccaagagaggaaggagaaggguccc

SEQ ID NO: 45983 - RNA, 20 nt, Human
agagccaccaagccugccag

SEQ ID NO: 45984 - RNA, 32 nt, Human
agagccaccagccaugcccgggaucguggugu

SEQ ID NO: 45985 - RNA, 32 nt, Human
agagccaccgccccggacuucucccucuguca

SEQ ID NO: 45986 - RNA, 22 nt, Human
agagccaccugccagccucgcu

SEQ ID NO: 45987 - RNA, 32 nt, Human
agagccacuaguggacgccagguccagccagc

SEQ ID NO: 45988 - RNA, 32 nt, Human
agagccacucacugucauucugcucugaccuu

SEQ ID NO: 45989 - RNA, 32 nt, Human
agagccacugccuccccugccuccccugccug

SEQ ID NO: 45990 - RNA, 32 nt, Human
agagccacugggggaauaggggcuugcucuca

SEQ ID NO: 45991 - RNA, 17 nt, Human
agagccacugucugagc

SEQ ID NO: 45992 - RNA, 20 nt, Human
agagccagaaauauuuuccu

SEQ ID NO: 45993 - RNA, 22 nt, Human
agagccagaagcugcccuuccu

SEQ ID NO: 45994 - RNA, 23 nt, Human
agagccagaaguagccgcccgcu

SEQ ID NO: 45995 - RNA, 24 nt, Human
agagccagaaguucuaugccuccu

SEQ ID NO: 45996 - RNA, 32 nt, Human
agagccagaaugacuuuuccacccucgggcug

SEQ ID NO: 45997 - RNA, 18 nt, Human
agagccagagacccaaga

SEQ ID NO: 45998 - RNA, 27 nt, Human
agagccagagacuucuugggccuuccu

SEQ ID NO: 45999 - RNA, 22 nt, Human
agagccagagauuccuccuccu

SEQ ID NO: 46000 - RNA, 32 nt, Human
agagccagagcugugcagggaggaagggguga

SEQ ID NO: 46001 - RNA, 24 nt, Human
agagccagaggugcuugcuguccu

SEQ ID NO: 46002 - RNA, 23 nt, Human
agagccagaguguacacauuccu

SEQ ID NO: 46003 - RNA, 32 nt, Human
agagccagcgagcauaugcugcaugaggaccu

SEQ ID NO: 46004 - RNA, 21 nt, Human
agagccagcgcugcgcuguca

SEQ ID NO: 46005 - RNA, 32 nt, Human
agagccagcugcuugcucacagccacauuucc

SEQ ID NO: 46006 - RNA, 32 nt, Human
agagccaggaaaugcauccucccacagagccc

SEQ ID NO: 46007 - RNA, 32 nt, Human
agagccaggagcccuucaaggucuccacagag

SEQ ID NO: 46008 - RNA, 26 nt, Human
agagccaggagucaagugcagugcca

SEQ ID NO: 46009 - RNA, 20 nt, Human
agagccaggcccggcccucc

SEQ ID NO: 46010 - RNA, 32 nt, Human
agagccaggguaaggggaucugcuagaaguug

SEQ ID NO: 46011 - RNA, 32 nt, Human
agagccagggucucacuauguugcccaggcag

SEQ ID NO: 46012 - RNA, 32 nt, Human
agagccaggguuuugccauguuggccaggcug

SEQ ID NO: 46013 - RNA, 24 nt, Human
agagccaggugcugccagccugcc

SEQ ID NO: 46014 - RNA, 32 nt, Human
agagccaguagagacagcuguagauaacaaua

SEQ ID NO: 46015 - RNA, 32 nt, Human
agagccagucucuagcccaugaccagcacuca

SEQ ID NO: 46016 - RNA, 32 nt, Human
agagccagucuucugcgguuucuugaagaaug

SEQ ID NO: 46017 - RNA, 32 nt, Human
agagccagugucucccagcccacauaggaggu

SEQ ID NO: 46018 - RNA, 32 nt, Human
agagccaguuggagccaggaacaggcaggagc

SEQ ID NO: 46019 - RNA, 24 nt, Human
agagccaucacggugcggaagcuc

SEQ ID NO: 46020 - RNA, 21 nt, Human
agagccaucuuccccagugga

SEQ ID NO: 46021 - RNA, 32 nt, Human
agagccaugcgguucaugagugcagcgugcug

SEQ ID NO: 46022 - RNA, 32 nt, Human
agagccaugcugucuagucuugaagucccuca

SEQ ID NO: 46023 - RNA, 22 nt, Human
agagccauggcugacagugcca

SEQ ID NO: 46024 - RNA, 32 nt, Human
agagccauuucaaucuugacuuccuagucgag

SEQ ID NO: 46025 - RNA, 32 nt, Human
agagcccaagauggaauggaaggugaaaauua

SEQ ID NO: 46026 - RNA, 20 nt, Human
agagcccaaggaccaugccu

SEQ ID NO: 46027 - RNA, 32 nt, Human
agagcccaaggaguucugggagagggaccaga

SEQ ID NO: 46028 - RNA, 32 nt, Human
agagcccaaggguuugaggagccuucuaugac

SEQ ID NO: 46029 - RNA, 19 nt, Human
agagcccacacccaugccc

SEQ ID NO: 46030 - RNA, 32 nt, Human
agagcccacauguagcccugagguucccuucc

SEQ ID NO: 46031 - RNA, 32 nt, Human
agagcccacauguagcccugagguuuccuucc

SEQ ID NO: 46032 - RNA, 32 nt, Human
agagcccaccaccaccauggcccaggauggag

SEQ ID NO: 46033 - RNA, 32 nt, Human
agagcccaccuguggaaggacauggcggggcg

SEQ ID NO: 46034 - RNA, 32 nt, Human
agagcccagaagccacgugcagagaccuagcc

SEQ ID NO: 46035 - RNA, 32 nt, Human
agagcccagaggugccuggggcugagugugag

SEQ ID NO: 46036 - RNA, 23 nt, Human
agagcccagccaucuuucacuga

SEQ ID NO: 46037 - RNA, 18 nt, Human
agagcccagcuugccagg

SEQ ID NO: 46038 - RNA, 32 nt, Human
agagcccaggagguugagaaugcagugagcuu

SEQ ID NO: 46039 - RNA, 32 nt, Human
agagcccaggcuccgggguccacagcacagga

SEQ ID NO: 46040 - RNA, 32 nt, Human
agagcccaguaggaggggcaggaggccgacac

SEQ ID NO: 46041 - RNA, 32 nt, Human
agagcccauacagcacagugagagagacagau

SEQ ID NO: 46042 - RNA, 21 nt, Human
agagcccaugccugccuuccu

SEQ ID NO: 46043 - RNA, 32 nt, Human
agagcccaugguguguuucugauuugagucca

SEQ ID NO: 46044 - RNA, 32 nt, Human
agagcccaugugcugagccacugugcuauacu

SEQ ID NO: 46045 - RNA, 32 nt, Human
agagcccauucugcaagaccuggcugagccag

SEQ ID NO: 46046 - RNA, 32 nt, Human
agagccccaagcaggacgaaaaagaggcauac

SEQ ID NO: 46047 - RNA, 32 nt, Human
agagccccacccauccuuccucugcgcccacc

SEQ ID NO: 46048 - RNA, 32 nt, Human
agagccccaccgcgaaccacaggaagccaucc

SEQ ID NO: 46049 - RNA, 32 nt, Human
agagccccagagagaggagcugggagcggagg

SEQ ID NO: 46050 - RNA, 32 nt, Human
agagccccagcagcaagagcaacgacacccug

SEQ ID NO: 46051 - RNA, 32 nt, Human
agagccccagccacagagacaggcuacgugua

SEQ ID NO: 46052 - RNA, 32 nt, Human
agagccccagccccagaauucccaggaauuuc

SEQ ID NO: 46053 - RNA, 32 nt, Human
agagccccagccccucaugucuugccgcccuu

SEQ ID NO: 46054 - RNA, 32 nt, Human
agagccccaggcucccccuccaccgccuccgc

SEQ ID NO: 46055 - RNA, 28 nt, Human
agagccccaggugcugccccuucucucc

SEQ ID NO: 46056 - RNA, 32 nt, Human
agagccccagucuccagccccuucccuagcac

SEQ ID NO: 46057 - RNA, 32 nt, Human
agagcccccacccggcaccacacagaccccau

SEQ ID NO: 46058 - RNA, 32 nt, Human
agagcccccagaggagugugagucccaggggu

SEQ ID NO: 46059 - RNA, 32 nt, Human
agagcccccaggagacugggacccaaagaacu

SEQ ID NO: 46060 - RNA, 32 nt, Human
agagcccccggagcccucccagcccucaggcc

SEQ ID NO: 46061 - RNA, 32 nt, Human
agagcccccggugggagccaggccgggacgcg

SEQ ID NO: 46062 - RNA, 32 nt, Human
agagcccccucgggcaaugcgacccagaaccg

SEQ ID NO: 46063 - RNA, 32 nt, Human
agagcccccugagcucagcccucugccuggag

SEQ ID NO: 46064 - RNA, 32 nt, Human
agagcccccugcccugcccugccccgugucca

SEQ ID NO: 46065 - RNA, 32 nt, Human
agagcccccugcucugcugcucugccuguccg

SEQ ID NO: 46066 - RNA, 32 nt, Human
agagccccucauccuuccucugggaccagaug

SEQ ID NO: 46067 - RNA, 32 nt, Human
agagccccuccaccucaggccccagccccugc

SEQ ID NO: 46068 - RNA, 32 nt, Human
agagccccuccccaucuuccucucucuaaaaa

SEQ ID NO: 46069 - RNA, 32 nt, Human
agagccccugaacaguaaaguuuugcuccagc

SEQ ID NO: 46070 - RNA, 32 nt, Human
agagcccgauuuccucaggaggcaugucgggc

SEQ ID NO: 46071 - RNA, 32 nt, Human
agagcccuaagaaggacacagagccggggagc

SEQ ID NO: 46072 - RNA, 32 nt, Human
agagcccuauccagcacacugcuccuuccccc

SEQ ID NO: 46073 - RNA, 24 nt, Human
agagcccucagcccagacccugug

SEQ ID NO: 46074 - RNA, 32 nt, Human
agagcccucagucggggcaggccaggggaggg

SEQ ID NO: 46075 - RNA, 32 nt, Human
agagcccuccagaauacccaucauauagcccc

SEQ ID NO: 46076 - RNA, 32 nt, Human
agagcccugaccucaucuuccaccucagcaac

SEQ ID NO: 46077 - RNA, 32 nt, Human
agagcccugcaaccagcaguccagggagaagu

SEQ ID NO: 46078 - RNA, 32 nt, Human
agagcccugcaagcugagccaccgggagggga

SEQ ID NO: 46079 - RNA, 32 nt, Human
agagcccugcagcucuaagauauuagcuacuu

SEQ ID NO: 46080 - RNA, 32 nt, Human
agagcccuggagagguggggagcugcugaagg

SEQ ID NO: 46081 - RNA, 21 nt, Human
agagcccugggggugcuguuc

SEQ ID NO: 46082 - RNA, 32 nt, Human
agagcccuucaagaggagagucuggggaugga

SEQ ID NO: 46083 - RNA, 32 nt, Human
agagcccuucacaaaugugaacuuuaaaauca

SEQ ID NO: 46084 - RNA, 32 nt, Human
agagcccuuucucccauccauuggagguccca

SEQ ID NO: 46085 - RNA, 32 nt, Human
agagccgagaaggaggaggaggagagaggaaa

SEQ ID NO: 46086 - RNA, 32 nt, Human
agagccgagaggagggaagccaggggucccag

SEQ ID NO: 46087 - RNA, 32 nt, Human
agagccgcaggugugugcugcuaugacaucuc

SEQ ID NO: 46088 - RNA, 32 nt, Human
agagccgcaguccagucuuggauccuucagag

SEQ ID NO: 46089 - RNA, 32 nt, Human
agagccgccaggaccuggagcugcacgguugc

SEQ ID NO: 46090 - RNA, 32 nt, Human
agagccgccauccacaggaucucccucgagac

SEQ ID NO: 46091 - RNA, 32 nt, Human
agagccgcccaagaugauagacaggagcugaa

SEQ ID NO: 46092 - RNA, 32 nt, Human
agagccgccuccaugugguuucggagucgagg

SEQ ID NO: 46093 - RNA, 32 nt, Human
agagccgcucagcuccguucacucucugccuu

SEQ ID NO: 46094 - RNA, 32 nt, Human
agagccgcugcucugggaagugaguucgccug

SEQ ID NO: 46095 - RNA, 32 nt, Human
agagccgcuguuccucuccugccuuuagagag

SEQ ID NO: 46096 - RNA, 22 nt, Human
agagccgcuuaugggugugguc

SEQ ID NO: 46097 - RNA, 32 nt, Human
agagccggaaccgggcgggcagaggggcgcuc

SEQ ID NO: 46098 - RNA, 32 nt, Human
agagccggcaggcggcggcggugguggcgggg

SEQ ID NO: 46099 - RNA, 21 nt, Human
agagccggcccgccucuccuc

SEQ ID NO: 46100 - RNA, 32 nt, Human
agagccggcucaaucaaauccuacggauaaag

SEQ ID NO: 46101 - RNA, 32 nt, Human
agagccgggaggcagagggaguagugaccgcc

SEQ ID NO: 46102 - RNA, 32 nt, Human
agagccgggccuggccuguccuacugugugug

SEQ ID NO: 46103 - RNA, 32 nt, Human
agagccgggguuucaccaucuuggccaggcug

SEQ ID NO: 46104 - RNA, 24 nt, Human
agagccgucccgcgccgcccgcuc

SEQ ID NO: 46105 - RNA, 32 nt, Human
agagccguggccaggagaaccccuugccaccu

SEQ ID NO: 46106 - RNA, 32 nt, Human
agagccguucuucaccacgccugggcccaugu

SEQ ID NO: 46107 - RNA, 32 nt, Human
agagccuaagccgccuccauggccccaggaag

SEQ ID NO: 46108 - RNA, 32 nt, Human
agagccuacaagcacagaaacuaguuauagau

SEQ ID NO: 46109 - RNA, 32 nt, Human
agagccuaugguauguggaugugaucaaacca

SEQ ID NO: 46110 - RNA, 32 nt, Human
agagccucaaagcuuccaggccaagacaagca

SEQ ID NO: 46111 - RNA, 32 nt, Human
agagccucacaggcugaguucuugccucugug

SEQ ID NO: 46112 - RNA, 32 nt, Human
agagccucagccacuagcugcgaugcauguga

SEQ ID NO: 46113 - RNA, 32 nt, Human
agagccucagccagcccaggauccguccucau

SEQ ID NO: 46114 - RNA, 32 nt, Human
agagccucagggguuucuagccccagaucuag

SEQ ID NO: 46115 - RNA, 26 nt, Human
agagccucaguaaacccauggaacac

SEQ ID NO: 46116 - RNA, 32 nt, Human
agagccucauuucccgcuggaucguccucugc

SEQ ID NO: 46117 - RNA, 32 nt, Human
agagccuccagaggaaugcagcccuguugauc

SEQ ID NO: 46118 - RNA, 32 nt, Human
agagccuccaucugccaagaacauucaguugg

SEQ ID NO: 46119 - RNA, 32 nt, Human
agagccucccaaagugcuggcuaccugcugag

SEQ ID NO: 46120 - RNA, 32 nt, Human
agagccucccaaaguguugggauuacaggcau

SEQ ID NO: 46121 - RNA, 32 nt, Human
agagccuccuauucuucucuguccucauaaau

SEQ ID NO: 46122 - RNA, 32 nt, Human
agagccuccugggugucaaguacucuguugug

SEQ ID NO: 46123 - RNA, 32 nt, Human
agagccucgcugucuguccuccguccucccga

SEQ ID NO: 46124 - RNA, 32 nt, Human
agagccucguaccaaucucucugucuuuaaaa

SEQ ID NO: 46125 - RNA, 32 nt, Human
agagccucucaguaggagcagaaaaguuacug

SEQ ID NO: 46126 - RNA, 32 nt, Human
agagccucucucuuuuccuguuucuuggcucu

SEQ ID NO: 46127 - RNA, 32 nt, Human
agagccucugugggaaugcuuggcagcccaug

SEQ ID NO: 46128 - RNA, 32 nt, Human
agagccucuuucuccccagagcccccggccca

SEQ ID NO: 46129 - RNA, 31 nt, Human
agagccugaaaacuguuuucacuggguucca

SEQ ID NO: 46130 - RNA, 32 nt, Human
agagccugaagacauugggaaaggcugggccu

SEQ ID NO: 46131 - RNA, 32 nt, Human
agagccugacaccucugcagggaauucuacca

SEQ ID NO: 46132 - RNA, 32 nt, Human
agagccugagccacugcgccccgccagacguc

SEQ ID NO: 46133 - RNA, 32 nt, Human
agagccugagcucccagccacugaggaggggu

SEQ ID NO: 46134 - RNA, 32 nt, Human
agagccugagucacucuccccaggagacccag

SEQ ID NO: 46135 - RNA, 32 nt, Human
agagccugcaaggagcucccgagucugaggac

SEQ ID NO: 46136 - RNA, 32 nt, Human
agagccugcaggugccuuggccgcgugcauag

SEQ ID NO: 46137 - RNA, 32 nt, Human
agagccugccacccucccccuucaaugcaccu

SEQ ID NO: 46138 - RNA, 32 nt, Human
agagccugccagccacagcaaucaggacucac

SEQ ID NO: 46139 - RNA, 32 nt, Human
agagccugcgaggucaagcugcagagaacaug

SEQ ID NO: 46140 - RNA, 32 nt, Human
agagccugcucuaugcggaucuggaccaucua

SEQ ID NO: 46141 - RNA, 32 nt, Human
agagccugcugcagugcagcccagggagaugc

SEQ ID NO: 46142 - RNA, 32 nt, Human
agagccugcuguccucccugccuuccaccuug

SEQ ID NO: 46143 - RNA, 32 nt, Human
agagccuggaaagauucgaagugucacagaga

SEQ ID NO: 46144 - RNA, 32 nt, Human
agagccuggacaccuccagccuucaauaaaua

SEQ ID NO: 46145 - RNA, 32 nt, Human
agagccuggacagauguaaugagaacuaaaga

SEQ ID NO: 46146 - RNA, 32 nt, Human
agagccuggaccuacagcgcuguugguggagg

SEQ ID NO: 46147 - RNA, 32 nt, Human
agagccuggcaagagcuccugaaccaguuuca

SEQ ID NO: 46148 - RNA, 32 nt, Human
agagccuggccuccaaaccccauaaagugguc

SEQ ID NO: 46149 - RNA, 32 nt, Human
agagccuggccugcucuugugggcugugguug

SEQ ID NO: 46150 - RNA, 32 nt, Human
agagccuggccuggccccuggccuuggcugca

SEQ ID NO: 46151 - RNA, 32 nt, Human
agagccuggccugggagccaggauggccaucc

SEQ ID NO: 46152 - RNA, 29 nt, Human
agagccugggaacuuucaucccccacuga

SEQ ID NO: 46153 - RNA, 32 nt, Human
agagccugggcaacaagagcgaaacuccgucu

SEQ ID NO: 46154 - RNA, 21 nt, Human
agagccugggcaacauaguga

SEQ ID NO: 46155 - RNA, 32 nt, Human
agagccugggcaacauagugagaccccaucuc

SEQ ID NO: 46156 - RNA, 32 nt, Human
agagccugggcugggcccgguggaggcuccug

SEQ ID NO: 46157 - RNA, 32 nt, Human
agagccuggggcaucccagagcccagggcauc

SEQ ID NO: 46158 - RNA, 32 nt, Human
agagccugggggucaaguguucccuggcucgc

SEQ ID NO: 46159 - RNA, 32 nt, Human
agagccuggggucugggugggagaagcgugac

SEQ ID NO: 46160 - RNA, 32 nt, Human
agagccugguacgcugggaggcuggucugggg

SEQ ID NO: 46161 - RNA, 32 nt, Human
agagccugguuggccauucucaugcccaccag

SEQ ID NO: 46162 - RNA, 32 nt, Human
agagccuguaccaccaauguuucaagaggagc

SEQ ID NO: 46163 - RNA, 32 nt, Human
agagccuguaucuggauuuagcacuugaaaga

SEQ ID NO: 46164 - RNA, 24 nt, Human
agagccuguccauugggugcaguc

SEQ ID NO: 46165 - RNA, 23 nt, Human
agagccugucgagggugccaguu

SEQ ID NO: 46166 - RNA, 32 nt, Human
agagccugucguuccucccgcuaaggucagcc

SEQ ID NO: 46167 - RNA, 32 nt, Human
agagccuguggggugacucggagcagcaggug

SEQ ID NO: 46168 - RNA, 32 nt, Human
agagccugugugugugcaugcaggggugaggu

SEQ ID NO: 46169 - RNA, 32 nt, Human
agagccuuagacccagcacgccuuggauuagc

SEQ ID NO: 46170 - RNA, 32 nt, Human
agagccuuagacccagcacuccuuggauuggc

SEQ ID NO: 46171 - RNA, 32 nt, Human
agagccuugaagggaaccucacaggcuuagcc

SEQ ID NO: 46172 - RNA, 32 nt, Human
agagccuuggccgggaaggagcgcggccaguc

SEQ ID NO: 46173 - RNA, 32 nt, Human
agagccuuggugggugagagagggagcucuuc

SEQ ID NO: 46174 - RNA, 19 nt, Human
agagccuuuagucauuuua

SEQ ID NO: 46175 - RNA, 32 nt, Human
agagccuuuccucugcaagugggacugaaacu

SEQ ID NO: 46176 - RNA, 32 nt, Human
agagcgaccgcugcucggccugcugugccaca

SEQ ID NO: 46177 - RNA, 32 nt, Human
agagcgacuucuuuugcuaugaguaauacauu

SEQ ID NO: 46178 - RNA, 32 nt, Human
agagcgagaagagagagagggcgagcugggcc

SEQ ID NO: 46179 - RNA, 32 nt, Human
agagcgagcaggggagagcgagaccaguuuua

SEQ ID NO: 46180 - RNA, 31 nt, Human
agagcgagcgagagagaaaggguucuggauu

SEQ ID NO: 46181 - RNA, 32 nt, Human
agagcgagcgagagagauuuccuuggaaauuu

SEQ ID NO: 46182 - RNA, 32 nt, Human
agagcgagcucccacugcuccuugggaauggu

SEQ ID NO: 46183 - RNA, 32 nt, Human
agagcgagcugccaaccugcugugcugagacu

SEQ ID NO: 46184 - RNA, 32 nt, Human
agagcgaggcggggcagugaggacuccgcgac

SEQ ID NO: 46185 - RNA, 20 nt, Human
agagcgagggccccacacug

SEQ ID NO: 46186 - RNA, 16 nt, Human
agagcgaguacuuuug

SEQ ID NO: 46187 - RNA, 32 nt, Human
agagcgagucucggagaagaugugguggcuuc

SEQ ID NO: 46188 - RNA, 32 nt, Human
agagcgauuuguguccuuucuuaugaaccuuc

SEQ ID NO: 46189 - RNA, 32 nt, Human
agagcgcaaagugcuagccacuggaaaugcau

SEQ ID NO: 46190 - RNA, 32 nt, Human
agagcgcaccauugcacuccagccuugggcga

SEQ ID NO: 46191 - RNA, 32 nt, Human
agagcgcacugaggggcuccaggucggcccgc

SEQ ID NO: 46192 - RNA, 32 nt, Human
agagcgcagugcacucccgugcucugggacac

SEQ ID NO: 46193 - RNA, 17 nt, Human
agagcgcccuccaggga

SEQ ID NO: 46194 - RNA, 16 nt, Human
agagcgccggccccuc

SEQ ID NO: 46195 - RNA, 32 nt, Human
agagcgccgucuccacaagaguuuacaaauga

SEQ ID NO: 46196 - RNA, 15 nt, Human
agagcgccucuccuc

SEQ ID NO: 46197 - RNA, 32 nt, Human
agagcgccugggacagcuuguccgccaggcuu

SEQ ID NO: 46198 - RNA, 32 nt, Human
agagcgccuucgggggccgcggcggaaggcca

SEQ ID NO: 46199 - RNA, 32 nt, Human
agagcgcgaggccgggcagggggccagacucg

SEQ ID NO: 46200 - RNA, 32 nt, Human
agagcgcggcccugcgucagagcgagacucag

SEQ ID NO: 46201 - RNA, 32 nt, Human
agagcgcggucccagcccggccacugcggauc

SEQ ID NO: 46202 - RNA, 32 nt, Human
agagcgcucaucacuggcuggggacagagccg

SEQ ID NO: 46203 - RNA, 32 nt, Human
agagcggagcccaaaggaaggaugggagcccu

SEQ ID NO: 46204 - RNA, 32 nt, Human
agagcggagccugcacccuccaccucccgccc

SEQ ID NO: 46205 - RNA, 32 nt, Human
agagcggagcggagcugccgcugagcaaaggc

SEQ ID NO: 46206 - RNA, 17 nt, Human
agagcggaggaccagga

SEQ ID NO: 46207 - RNA, 32 nt, Human
agagcggaggagagagaggcagaagaacccug

SEQ ID NO: 46208 - RNA, 32 nt, Human
agagcggaggcugggcuuggccaggggcccga

SEQ ID NO: 46209 - RNA, 32 nt, Human
agagcggaucugccacuggcccaggucuggac

SEQ ID NO: 46210 - RNA, 32 nt, Human
agagcggcccugggugacagcgccgcggggcc

SEQ ID NO: 46211 - RNA, 32 nt, Human
agagcggcugagggcugccucacugcaaaucc

SEQ ID NO: 46212 - RNA, 32 nt, Human
agagcgggagugagagcaggaacgacgcagag

SEQ ID NO: 46213 - RNA, 32 nt, Human
agagcgggcaggagguuggauaacaaaaauag

SEQ ID NO: 46214 - RNA, 32 nt, Human
agagcgggcccaggcucugugaggaggcaagg

SEQ ID NO: 46215 - RNA, 32 nt, Human
agagcggggaaggcugaguccacacugcaagu

SEQ ID NO: 46216 - RNA, 32 nt, Human
agagcggggagcugcagcacagcaacagugau

SEQ ID NO: 46217 - RNA, 32 nt, Human
agagcggggaggaggagaggucggaaugucuc

SEQ ID NO: 46218 - RNA, 21 nt, Human
agagcggguuucaccauguug

SEQ ID NO: 46219 - RNA, 22 nt, Human
agagcggguuucaccauguugg

SEQ ID NO: 46220 - RNA, 32 nt, Human
agagcguaagguuuccgggcaguaauucuauc

SEQ ID NO: 46221 - RNA, 32 nt, Human
agagcguccugcaaccccagcccucaccagga

SEQ ID NO: 46222 - RNA, 32 nt, Human
agagcgugagccaccagggaagccacucgccu

SEQ ID NO: 46223 - RNA, 32 nt, Human
agagcgugcugcagaucauccccagcucuucg

SEQ ID NO: 46224 - RNA, 32 nt, Human
agagcgugcugugugagguggagggcgguuuu

SEQ ID NO: 46225 - RNA, 32 nt, Human
agagcguguggaccccaaacaagucugcgcaa

SEQ ID NO: 46226 - RNA, 32 nt, Human
agagcguguggcaucuccaccucaagggugca

SEQ ID NO: 46227 - RNA, 32 nt, Human
agagcguucuccauggaucugccuuacuacca

SEQ ID NO: 46228 - RNA, 32 nt, Human
agagcuaaaauuagggagaagagaggagucau

SEQ ID NO: 46229 - RNA, 32 nt, Human
agagcuaaagcagcccacccagcucccagaga

SEQ ID NO: 46230 - RNA, 32 nt, Human
agagcuaacauaaaggacaggccacaccacag

SEQ ID NO: 46231 - RNA, 32 nt, Human
agagcuaacgugggcccagcaguccugugcuu

SEQ ID NO: 46232 - RNA, 32 nt, Human
agagcuaagcauggagucaaggagaacuacau

SEQ ID NO: 46233 - RNA, 31 nt, Human
agagcuaaggggagagaaauuggggcugagu

SEQ ID NO: 46234 - RNA, 32 nt, Human
agagcuaaguuuuuaugcugaagaggagaaug

SEQ ID NO: 46235 - RNA, 32 nt, Human
agagcuaauaauuaucccucugucagagauga

SEQ ID NO: 46236 - RNA, 32 nt, Human
agagcuacagccgcggaacaaccacgccuggg

SEQ ID NO: 46237 - RNA, 32 nt, Human
agagcuacaggaguucaagaaacccaugaaaa

SEQ ID NO: 46238 - RNA, 32 nt, Human
agagcuaccagcugcccuguuggcuucgcugg

SEQ ID NO: 46239 - RNA, 32 nt, Human
agagcuaccauguccucuuggagcagacagcg

SEQ ID NO: 46240 - RNA, 19 nt, Human
agagcuaccuccccgggga

SEQ ID NO: 46241 - RNA, 32 nt, Human
agagcuacucagaaauggacaaagaaaacggg

SEQ ID NO: 46242 - RNA, 32 nt, Human
agagcuacugcuggcccuggcuccgcagccug

SEQ ID NO: 46243 - RNA, 18 nt, Human
agagcuagaaacucagga

SEQ ID NO: 46244 - RNA, 32 nt, Human
agagcuagagaagggaaagacuuuaucauccc

SEQ ID NO: 46245 - RNA, 32 nt, Human
agagcuagagcuaggcccugcccuuaccuagg

SEQ ID NO: 46246 - RNA, 32 nt, Human
agagcuagaugaagguauguugccaaaauuua

SEQ ID NO: 46247 - RNA, 32 nt, Human
agagcuagcccaggccaggggucaauguucau

SEQ ID NO: 46248 - RNA, 32 nt, Human
agagcuaggaguuugagaccagccugggcaau

SEQ ID NO: 46249 - RNA, 32 nt, Human
agagcuaggcuguggugcuggaagccaggaca

SEQ ID NO: 46250 - RNA, 32 nt, Human
agagcuagggacccugagcugcucucaggacg

SEQ ID NO: 46251 - RNA, 32 nt, Human
agagcuagggcagugggcucugcaggccaccu

SEQ ID NO: 46252 - RNA, 32 nt, Human
agagcuagggcugcugcuucugcuccagcccc

SEQ ID NO: 46253 - RNA, 32 nt, Human
agagcuaguuuuaaaauaaugaucucagauuu

SEQ ID NO: 46254 - RNA, 32 nt, Human
agagcuaugagauacgcacaauacuugcuguu

SEQ ID NO: 46255 - RNA, 32 nt, Human
agagcuauuggcucagcuguuucccaucagcu

SEQ ID NO: 46256 - RNA, 32 nt, Human
agagcuauuugugguuguugagguuugaaaag

SEQ ID NO: 46257 - RNA, 32 nt, Human
agagcucaacacaguaccagaugcuccagaaa

SEQ ID NO: 46258 - RNA, 32 nt, Human
agagcucaagagccuuccuacucuuuggaacu

SEQ ID NO: 46259 - RNA, 32 nt, Human
agagcucacccagaaagcaucuugccgggggc

SEQ ID NO: 46260 - RNA, 32 nt, Human
agagcucacccaggcggggguguuguggguac

SEQ ID NO: 46261 - RNA, 32 nt, Human
agagcucaccugcugggaggagguggcccaga

SEQ ID NO: 46262 - RNA, 32 nt, Human
agagcucacgcuccugucccccggcugguccg

SEQ ID NO: 46263 - RNA, 32 nt, Human
agagcucacugagccuccaccuggggucucug

SEQ ID NO: 46264 - RNA, 32 nt, Human
agagcucacugcagcuucaaucuccuggcuca

SEQ ID NO: 46265 - RNA, 32 nt, Human
agagcucacugcauccuugaccucccagacuc

SEQ ID NO: 46266 - RNA, 32 nt, Human
agagcucagagcucugaauuuccucauuuggg

SEQ ID NO: 46267 - RNA, 32 nt, Human
agagcucagcagggcccuggagagauggccac

SEQ ID NO: 46268 - RNA, 32 nt, Human
agagcucagcaugggcagggguucuggguagg

SEQ ID NO: 46269 - RNA, 32 nt, Human
agagcucagccaucuuucucauccgucaggca

SEQ ID NO: 46270 - RNA, 23 nt, Human
agagcucagcccgcuggacuugu

SEQ ID NO: 46271 - RNA, 32 nt, Human
agagcucaggaugagggaaaagaaaaagauug

SEQ ID NO: 46272 - RNA, 32 nt, Human
agagcucaguguggguccagagauggugucag

SEQ ID NO: 46273 - RNA, 32 nt, Human
agagcucaucuacccugucuguuggucagacu

SEQ ID NO: 46274 - RNA, 32 nt, Human
agagcucaugcugcugcuccuggguggacccg

SEQ ID NO: 46275 - RNA, 32 nt, Human
agagcucauggacuucaagucccgccgggucu

SEQ ID NO: 46276 - RNA, 32 nt, Human
agagcucauuccccaggaaucucuaagaccag

SEQ ID NO: 46277 - RNA, 32 nt, Human
agagcuccaguucuuuauaacaaaacagggau

SEQ ID NO: 46278 - RNA, 32 nt, Human
agagcuccauguccaagugcugugcucagucu

SEQ ID NO: 46279 - RNA, 32 nt, Human
agagcucccaucugccccacucgccuuugccc

SEQ ID NO: 46280 - RNA, 32 nt, Human
agagcuccccuuguauccucucuaagccacuc

SEQ ID NO: 46281 - RNA, 32 nt, Human
agagcucccugccucuggcuucuccaccuuug

SEQ ID NO: 46282 - RNA, 32 nt, Human
agagcucccuugccuuaccuggaggaagaaug

SEQ ID NO: 46283 - RNA, 32 nt, Human
agagcuccgagaguucaacaccagccugggcc

SEQ ID NO: 46284 - RNA, 32 nt, Human
agagcuccucacccucuuuccaccaugugagg

SEQ ID NO: 46285 - RNA, 32 nt, Human
agagcuccucauguucuugcauggcccaagau

SEQ ID NO: 46286 - RNA, 32 nt, Human
agagcuccugacaggauugaugguccuucccc

SEQ ID NO: 46287 - RNA, 32 nt, Human
agagcuccugaggggcagaggagcagagaugc

SEQ ID NO: 46288 - RNA, 32 nt, Human
agagcuccugggccugcugccugcacaccaca

SEQ ID NO: 46289 - RNA, 32 nt, Human
agagcuccuucacucaccgacucucaucagga

SEQ ID NO: 46290 - RNA, 32 nt, Human
agagcucguaguucaauaacauuccaaagaac

SEQ ID NO: 46291 - RNA, 32 nt, Human
agagcucgugggauuccugcugcuccaggugu

SEQ ID NO: 46292 - RNA, 32 nt, Human
agagcucguguccucugucucuugccucggug

SEQ ID NO: 46293 - RNA, 32 nt, Human
agagcucuaaagauggggcuucggggguagga

SEQ ID NO: 46294 - RNA, 28 nt, Human
agagcucucaaugcugccuaucgggcgg

SEQ ID NO: 46295 - RNA, 32 nt, Human
agagcucucacagaugaagcaggaacugcucu

SEQ ID NO: 46296 - RNA, 32 nt, Human
agagcucuccacgaguguucagucuuagaacu

SEQ ID NO: 46297 - RNA, 21 nt, Human
agagcucuccccagccccgug

SEQ ID NO: 46298 - RNA, 32 nt, Human
agagcucucugagggugauggggcugagcagg

SEQ ID NO: 46299 - RNA, 32 nt, Human
agagcucucuucaauaaauucgucaggucaaa

SEQ ID NO: 46300 - RNA, 32 nt, Human
agagcucugcacccagccugcccgcccacacc

SEQ ID NO: 46301 - RNA, 32 nt, Human
agagcucugccucccucgauucguuaugugaa

SEQ ID NO: 46302 - RNA, 32 nt, Human
agagcucugccuuacagcuagagcaagagugu

SEQ ID NO: 46303 - RNA, 32 nt, Human
agagcucuggccaggcugugccaguguguccc

SEQ ID NO: 46304 - RNA, 32 nt, Human
agagcucugggagccaaccgggucuguacugu

SEQ ID NO: 46305 - RNA, 32 nt, Human
agagcucugggagccuuucggcaaaucuugaa

SEQ ID NO: 46306 - RNA, 32 nt, Human
agagcucuguuaguguccccucuuggggguca

SEQ ID NO: 46307 - RNA, 32 nt, Human
agagcucuuaacugcuaugcugcacugccuca

SEQ ID NO: 46308 - RNA, 32 nt, Human
agagcucuucccuccuccuuuuucuuccuccu

SEQ ID NO: 46309 - RNA, 32 nt, Human
agagcucuucuuucuaccuuucugcucccggc

SEQ ID NO: 46310 - RNA, 32 nt, Human
agagcugaaaacacaagcccaggagugcagac

SEQ ID NO: 46311 - RNA, 32 nt, Human
agagcugaaguacugcacccagcaucaccagc

SEQ ID NO: 46312 - RNA, 32 nt, Human
agagcugaauaacauguuaggcucacacaugc

SEQ ID NO: 46313 - RNA, 32 nt, Human
agagcugaccaaggcuagagagggaucaaugu

SEQ ID NO: 46314 - RNA, 32 nt, Human
agagcugacgcuccaccucccaccuccaaguc

SEQ ID NO: 46315 - RNA, 32 nt, Human
agagcugacuccaggcccaggcuguggucccc

SEQ ID NO: 46316 - RNA, 32 nt, Human
agagcugacucugaagagagucuucacuuacu

SEQ ID NO: 46317 - RNA, 32 nt, Human
agagcugagacuguuggcuccuucccauuuau

SEQ ID NO: 46318 - RNA, 32 nt, Human
agagcugagauuacaggcgugagccaccaugc

SEQ ID NO: 46319 - RNA, 32 nt, Human
agagcugaggcagaaucccuuuuucauucauu

SEQ ID NO: 46320 - RNA, 18 nt, Human
agagcugaggccagucca

SEQ ID NO: 46321 - RNA, 32 nt, Human
agagcugaggggacagggaggagcagaagcca

SEQ ID NO: 46322 - RNA, 32 nt, Human
agagcugaggggaugugggggccccaaacuca

SEQ ID NO: 46323 - RNA, 32 nt, Human
agagcugaucagcagcuugugccuggcauccc

SEQ ID NO: 46324 - RNA, 19 nt, Human
agagcugauccagagcaca

SEQ ID NO: 46325 - RNA, 32 nt, Human
agagcugaucugccucucacacagguccuggu

SEQ ID NO: 46326 - RNA, 32 nt, Human
agagcugauuccugccuugucuucuccacugu

SEQ ID NO: 46327 - RNA, 32 nt, Human
agagcugcaagugccuggcagaaugcccugcc

SEQ ID NO: 46328 - RNA, 32 nt, Human
agagcugcacagcugcucccagagccugagca

SEQ ID NO: 46329 - RNA, 32 nt, Human
agagcugcacgccgguccacagacacacucac

SEQ ID NO: 46330 - RNA, 32 nt, Human
agagcugcagaaaaggguggggucgcuuccca

SEQ ID NO: 46331 - RNA, 32 nt, Human
agagcugcagaaccagucccucugagugaagu

SEQ ID NO: 46332 - RNA, 32 nt, Human
agagcugcagcccugcccugucacucaccuca

SEQ ID NO: 46333 - RNA, 32 nt, Human
agagcugcaggaugucuggggucugggcaagu

SEQ ID NO: 46334 - RNA, 32 nt, Human
agagcugcaguuucagccgcgacagcaagaac

SEQ ID NO: 46335 - RNA, 32 nt, Human
agagcugcccggcucacugcagccugguuacg

SEQ ID NO: 46336 - RNA, 32 nt, Human
agagcugccucugccuuuauccugggagaugg

SEQ ID NO: 46337 - RNA, 32 nt, Human
agagcugccuguaaacacguuugacugcuuga

SEQ ID NO: 46338 - RNA, 32 nt, Human
agagcugcggagggggaggggaagaagaaggc

SEQ ID NO: 46339 - RNA, 32 nt, Human
agagcugcugaguucaggaugccugcgugugg

SEQ ID NO: 46340 - RNA, 32 nt, Human
agagcugcuggagaacaccauggaggccaugg

SEQ ID NO: 46341 - RNA, 32 nt, Human
agagcugcuucugcagggaguuuucuggaaug

SEQ ID NO: 46342 - RNA, 32 nt, Human
agagcuggaaaagcuucagacagagcuuggua

SEQ ID NO: 46343 - RNA, 32 nt, Human
agagcuggaaagagcagcguuuugaaaugagg

SEQ ID NO: 46344 - RNA, 32 nt, Human
agagcuggaagcugcaaaggagcccagagcuc

SEQ ID NO: 46345 - RNA, 32 nt, Human
agagcuggaaggcaggaugaggagagguauga

SEQ ID NO: 46346 - RNA, 32 nt, Human
agagcuggaccccgcagcugaagcggaaaugu

SEQ ID NO: 46347 - RNA, 32 nt, Human
agagcuggacuaauccagugccugguagacag

SEQ ID NO: 46348 - RNA, 32 nt, Human
agagcuggagacaccaucucccaccgagaguc

SEQ ID NO: 46349 - RNA, 32 nt, Human
agagcuggagagccaugggugaggcagcuugu

SEQ ID NO: 46350 - RNA, 32 nt, Human
agagcuggagccagaccaggaaccugagccag

SEQ ID NO: 46351 - RNA, 32 nt, Human
agagcuggagcccaucuuucugccuccaucca

SEQ ID NO: 46352 - RNA, 32 nt, Human
agagcuggaggagaagaggagugaggggccuc

SEQ ID NO: 46353 - RNA, 32 nt, Human
agagcuggaggagggggugaccagcuuggagu

SEQ ID NO: 46354 - RNA, 32 nt, Human
agagcuggagugacaugggaggggaggcggau

SEQ ID NO: 46355 - RNA, 32 nt, Human
agagcuggcaagcaucuucucauuauguuugg

SEQ ID NO: 46356 - RNA, 32 nt, Human
agagcuggcaggaggaaaagcggguucgaguc

SEQ ID NO: 46357 - RNA, 32 nt, Human
agagcuggcauaucuggucagaacugcagggc

SEQ ID NO: 46358 - RNA, 32 nt, Human
agagcuggccugguugaaggaaggguggaggu

SEQ ID NO: 46359 - RNA, 32 nt, Human
agagcugggaagcagacaggaaggagagaagc

SEQ ID NO: 46360 - RNA, 23 nt, Human
agagcugggacucaguucuuggc

SEQ ID NO: 46361 - RNA, 32 nt, Human
agagcugggaggccaaggguucacugggcuug

SEQ ID NO: 46362 - RNA, 32 nt, Human
agagcugggaggcggcgaucgcagcugggccg

SEQ ID NO: 46363 - RNA, 32 nt, Human
agagcugggauaaaaggcgugagccaccgcgc

SEQ ID NO: 46364 - RNA, 32 nt, Human
agagcugggauuacaagugugagccaccgcgc

SEQ ID NO: 46365 - RNA, 32 nt, Human
agagcugggauuacaggcaugagccacugugc

SEQ ID NO: 46366 - RNA, 32 nt, Human
agagcugggauuacaggcaugagucaccacgc

SEQ ID NO: 46367 - RNA, 32 nt, Human
agagcugggauuacaggcgugagacaccgcgc

SEQ ID NO: 46368 - RNA, 32 nt, Human
agagcugggauuacaggugugagcuaccgcgc

SEQ ID NO: 46369 - RNA, 32 nt, Human
agagcugggauugguggagggagcaggugcca

SEQ ID NO: 46370 - RNA, 18 nt, Human
agagcugggcccccuggg

SEQ ID NO: 46371 - RNA, 32 nt, Human
agagcugggcgagaggccuagagccaggacca

SEQ ID NO: 46372 - RNA, 23 nt, Human
agagcugggcucaggcccugggc

SEQ ID NO: 46373 - RNA, 32 nt, Human
agagcugggcuggggcagggggcagcuccuca

SEQ ID NO: 46374 - RNA, 32 nt, Human
agagcuggggaccacagccaggcucuggcaug

SEQ ID NO: 46375 - RNA, 32 nt, Human
agagcuggggcaagcaaggagccuuccugucc

SEQ ID NO: 46376 - RNA, 32 nt, Human
agagcuggggcagaggcaggaagcaggggccc

SEQ ID NO: 46377 - RNA, 18 nt, Human
agagcuggggcucuggga

SEQ ID NO: 46378 - RNA, 32 nt, Human
agagcuggggcuuguuacagaaaaauaaucau

SEQ ID NO: 46379 - RNA, 32 nt, Human
agagcuggggucuggcaaacaggcuggguuug

SEQ ID NO: 46380 - RNA, 32 nt, Human
agagcugggucuggcugagcaccagcugcgcu

SEQ ID NO: 46381 - RNA, 19 nt, Human
agagcuggguuccuuggga

SEQ ID NO: 46382 - RNA, 32 nt, Human
agagcuggucacagugcugcucugcacaccag

SEQ ID NO: 46383 - RNA, 31 nt, Human
agagcuggugagagaggagucagguggccuu

SEQ ID NO: 46384 - RNA, 32 nt, Human
agagcugguggaagugugucugaacucggagu

SEQ ID NO: 46385 - RNA, 22 nt, Human
agagcugguggugcagccuucc

SEQ ID NO: 46386 - RNA, 32 nt, Human
agagcugguucugaggcucgcauccggaggga

SEQ ID NO: 46387 - RNA, 32 nt, Human
agagcugucuuccuccuccgaggcucugggcu

SEQ ID NO: 46388 - RNA, 32 nt, Human
agagcugugaagccucugagggccuggcuucu

SEQ ID NO: 46389 - RNA, 32 nt, Human
agagcugugaggagaagucagugaagaacacc

SEQ ID NO: 46390 - RNA, 32 nt, Human
agagcugugauggcuaacugauguuuauaaug

SEQ ID NO: 46391 - RNA, 32 nt, Human
agagcuguggcugaggccuacccuggcggccu

SEQ ID NO: 46392 - RNA, 32 nt, Human
agagcugugguuuugaagauuuuccuucccca

SEQ ID NO: 46393 - RNA, 32 nt, Human
agagcuguuacuuaugugugagggcuuuauuc

SEQ ID NO: 46394 - RNA, 32 nt, Human
agagcuguucaacaucacugaaaccuuuaaga

SEQ ID NO: 46395 - RNA, 32 nt, Human
agagcuguuccccaccgcccugccucuuccgg

SEQ ID NO: 46396 - RNA, 32 nt, Human
agagcuguucugucuucucuucugucucuucu

SEQ ID NO: 46397 - RNA, 22 nt, Human
agagcuguugccaaaucaguga

SEQ ID NO: 46398 - RNA, 32 nt, Human
agagcuguuuggaaacuucuccuucacacacc

SEQ ID NO: 46399 - RNA, 32 nt, Human
agagcuguuuuuaaugauguuauucuagaaug

SEQ ID NO: 46400 - RNA, 32 nt, Human
agagcuuacugucacagcaacuccuuugcaag

SEQ ID NO: 46401 - RNA, 32 nt, Human
agagcuucaagcaauggccccauccucaaaga

SEQ ID NO: 46402 - RNA, 32 nt, Human
agagcuucacgauccccaucccugaacaacca

SEQ ID NO: 46403 - RNA, 32 nt, Human
agagcuucauggcuugcuuaaauuacuuagcu

SEQ ID NO: 46404 - RNA, 32 nt, Human
agagcuuccagccugagaaccccaggcccguc

SEQ ID NO: 46405 - RNA, 32 nt, Human
agagcuucccugcuuccaacacuuguuauuug

SEQ ID NO: 46406 - RNA, 32 nt, Human
agagcuuccucuugaucucuguuuuuaagcag

SEQ ID NO: 46407 - RNA, 32 nt, Human
agagcuucggaagaaagagcagcagcucucuc

SEQ ID NO: 46408 - RNA, 22 nt, Human
agagcuucuccccagccuuccu

SEQ ID NO: 46409 - RNA, 32 nt, Human
agagcuucuccucauuccaauguguuuugcuu

SEQ ID NO: 46410 - RNA, 32 nt, Human
agagcuucucucuguugcccaggcuggagugc

SEQ ID NO: 46411 - RNA, 32 nt, Human
agagcuucugaguuuccaagcucugagucacc

SEQ ID NO: 46412 - RNA, 32 nt, Human
agagcuucugaucccagcuauuagggacagaa

SEQ ID NO: 46413 - RNA, 32 nt, Human
agagcuugagaggcaggucccuggagaucauc

SEQ ID NO: 46414 - RNA, 32 nt, Human
agagcuugaggugggagcggggcugggaggaa

SEQ ID NO: 46415 - RNA, 32 nt, Human
agagcuugaguuaaaucuagguacaguuacag

SEQ ID NO: 46416 - RNA, 20 nt, Human
agagcuuggaagacuggaga

SEQ ID NO: 46417 - RNA, 32 nt, Human
agagcuuggccagggguccugccccuccccca

SEQ ID NO: 46418 - RNA, 32 nt, Human
agagcuuggcucucuggcagauuuccucuagu

SEQ ID NO: 46419 - RNA, 22 nt, Human
agagcuugggagagugcugguc

SEQ ID NO: 46420 - RNA, 32 nt, Human
agagcuugggcuguagcuucggggagugcaag

SEQ ID NO: 46421 - RNA, 32 nt, Human
agagcuuggggaggggaugacagcccugaauu

SEQ ID NO: 46422 - RNA, 32 nt, Human
agagcuugugacuggacuccagccugggcaac

SEQ ID NO: 46423 - RNA, 32 nt, Human
agagcuugugggagccaaggagcaccuuggac

SEQ ID NO: 46424 - RNA, 22 nt, Human
agagcuuguuccuguucaguga

SEQ ID NO: 46425 - RNA, 32 nt, Human
agagcuuuaucugaaaucagaggggaacuauc

SEQ ID NO: 46426 - RNA, 32 nt, Human
agagcuuucaccuuuuuacauuucccuucuga

SEQ ID NO: 46427 - RNA, 32 nt, Human
agagcuuuccucuccucucucuugcucucaga

SEQ ID NO: 46428 - RNA, 32 nt, Human
agagcuuucggagcugacacugacagcuucag

SEQ ID NO: 46429 - RNA, 32 nt, Human
agagcuuucuucccgaaccccaaggagggaga

SEQ ID NO: 46430 - RNA, 23 nt, Human
agagcuuugaguccugucugcug

SEQ ID NO: 46431 - RNA, 32 nt, Human
agagcuuugcagauaacaaaauagccuauccu

SEQ ID NO: 46432 - RNA, 32 nt, Human
agagcuuugccaccucuccauuuuugccuugg

SEQ ID NO: 46433 - RNA, 32 nt, Human
agagcuuuugacugaguucuuggacaagauac

SEQ ID NO: 46434 - RNA, 20 nt, Human
agaggaaaaaacauaguuga

SEQ ID NO: 46435 - RNA, 32 nt, Human
agaggaaaaagcuugaagagcuggagccacug

SEQ ID NO: 46436 - RNA, 32 nt, Human
agaggaaaacucaagugaaaagugcuagacau

SEQ ID NO: 46437 - RNA, 32 nt, Human
agaggaaaagagaguaguuuugucuucaagua

SEQ ID NO: 46438 - RNA, 32 nt, Human
agaggaaaagucacuugcccaaagucacacag

SEQ ID NO: 46439 - RNA, 32 nt, Human
agaggaaacagaauaucagagagagucaaugg

SEQ ID NO: 46440 - RNA, 32 nt, Human
agaggaaacaggcugagagaagaaaaaugacu

SEQ ID NO: 46441 - RNA, 32 nt, Human
agaggaaacaugagagcagaauucagcaugag

SEQ ID NO: 46442 - RNA, 32 nt, Human
agaggaaaccuauccuccucaccagaagagcc

SEQ ID NO: 46443 - RNA, 32 nt, Human
agaggaaagaaacacuucucgaaauugugcaa

SEQ ID NO: 46444 - RNA, 32 nt, Human
agaggaaagaacccugggaacgggaggcgaag

SEQ ID NO: 46445 - RNA, 31 nt, Human
agaggaaagagacucauguugcucaauguga

SEQ ID NO: 46446 - RNA, 32 nt, Human
agaggaaagaggaauucuucaucugcccuauc

SEQ ID NO: 46447 - RNA, 23 nt, Human
agaggaaagaugccaagcugcuu

SEQ ID NO: 46448 - RNA, 32 nt, Human
agaggaaaggacaggaggacagguggugauuu

SEQ ID NO: 46449 - RNA, 32 nt, Human
agaggaaaggccugugacagagcagggcacca

SEQ ID NO: 46450 - RNA, 24 nt, Human
agaggaaaggcuggaaggaaagga

SEQ ID NO: 46451 - RNA, 24 nt, Human
agaggaaagggaaggagaggggag

SEQ ID NO: 46452 - RNA, 32 nt, Human
agaggaaagggaggggugccccagaggcacca

SEQ ID NO: 46453 - RNA, 32 nt, Human
agaggaaaggggucuucccuggaacgcuucag

SEQ ID NO: 46454 - RNA, 27 nt, Human
agaggaaauggauccaggagaaggaga

SEQ ID NO: 46455 - RNA, 32 nt, Human
agaggaaauggcccugagccucacccgagcag

SEQ ID NO: 46456 - RNA, 31 nt, Human
agaggaaaugugucucccuccaaggccccaa

SEQ ID NO: 46457 - RNA, 32 nt, Human
agaggaaauucuguaaucaaugcuggaaaucg

SEQ ID NO: 46458 - RNA, 32 nt, Human
agaggaaauuucacaugcaaagccacagucau

SEQ ID NO: 46459 - RNA, 32 nt, Human
agaggaacagagaacccagagucaggguccua

SEQ ID NO: 46460 - RNA, 32 nt, Human
agaggaacagagaagaggccccagagcaaggc

SEQ ID NO: 46461 - RNA, 17 nt, Human
agaggaacccaaguaca

SEQ ID NO: 46462 - RNA, 32 nt, Human
agaggaacccuuuagcuguuucugcagcugag

SEQ ID NO: 46463 - RNA, 23 nt, Human
agaggaaccuguaguuuuuucca

SEQ ID NO: 46464 - RNA, 21 nt, Human
agaggaacggugggagaaggg

SEQ ID NO: 46465 - RNA, 32 nt, Human
agaggaacuaaggccuucuaucagacugccug

SEQ ID NO: 46466 - RNA, 32 nt, Human
agaggaacuggguguaaccccaggaaggagag

SEQ ID NO: 46467 - RNA, 32 nt, Human
agaggaacuuaagaaguauggagugacgacuu

SEQ ID NO: 46468 - RNA, 20 nt, Human
agaggaacuuuauucuucca

SEQ ID NO: 46469 - RNA, 32 nt, Human
agaggaagaaaggagagaggggagccagggga

SEQ ID NO: 46470 - RNA, 21 nt, Human
agaggaagaaagugaagggga

SEQ ID NO: 46471 - RNA, 23 nt, Human
agaggaagaagaagaaggaggag

SEQ ID NO: 46472 - RNA, 32 nt, Human
agaggaagaagaggagauggcugaaacauaua

SEQ ID NO: 46473 - RNA, 32 nt, Human
agaggaagacgagggagcaggagcuuggcuga

SEQ ID NO: 46474 - RNA, 32 nt, Human
agaggaagacguucuugcauccucagccugug

SEQ ID NO: 46475 - RNA, 21 nt, Human
agaggaagagaggaagcggag

SEQ ID NO: 46476 - RNA, 32 nt, Human
agaggaagagcauccucaauagacucacuccc

SEQ ID NO: 46477 - RNA, 32 nt, Human
agaggaagagccaaugugugaggaguugggag

SEQ ID NO: 46478 - RNA, 23 nt, Human
agaggaagaggaaagaaaaggag

SEQ ID NO: 46479 - RNA, 32 nt, Human
agaggaagaggaaagaaagaagaggagggaau

SEQ ID NO: 46480 - RNA, 32 nt, Human
agaggaagaggaagaagaggagauggcugaaa

SEQ ID NO: 46481 - RNA, 32 nt, Human
agaggaagaggaagagaggaagcggagggaac

SEQ ID NO: 46482 - RNA, 22 nt, Human
agaggaagaggaagaggaagag

SEQ ID NO: 46483 - RNA, 32 nt, Human
agaggaagaggaagaggaagagaggaagcgga

SEQ ID NO: 46484 - RNA, 32 nt, Human
agaggaagaggaggaggaggagaccggcagca

SEQ ID NO: 46485 - RNA, 32 nt, Human
agaggaagauagagauuuccuuucuccccuga

SEQ ID NO: 46486 - RNA, 32 nt, Human
agaggaagccagcuggcuuugcacuugaccuc

SEQ ID NO: 46487 - RNA, 32 nt, Human
agaggaagcugaaggcagaaagagaugcagag

SEQ ID NO: 46488 - RNA, 18 nt, Human
agaggaagcugggagaag

SEQ ID NO: 46489 - RNA, 32 nt, Human
agaggaaggaagcacgccaaguuaggccuggg

SEQ ID NO: 46490 - RNA, 22 nt, Human
agaggaaggagaaagaggagga

SEQ ID NO: 46491 - RNA, 25 nt, Human
agaggaaggagaaagaggaggagag

SEQ ID NO: 46492 - RNA, 32 nt, Human
agaggaaggagaggagaggggcacagggucuc

SEQ ID NO: 46493 - RNA, 15 nt, Human
agaggaaggagccca

SEQ ID NO: 46494 - RNA, 32 nt, Human
agaggaaggaggaggaaugagaggggcaggaa

SEQ ID NO: 46495 - RNA, 32 nt, Human
agaggaaggaggcacugcugaauggcuauggc

SEQ ID NO: 46496 - RNA, 24 nt, Human
agaggaaggccgggagaaggggag

SEQ ID NO: 46497 - RNA, 22 nt, Human
agaggaaggccuccugagggag

SEQ ID NO: 46498 - RNA, 22 nt, Human
agaggaagggaaggaaggagag

SEQ ID NO: 46499 - RNA, 32 nt, Human
agaggaagggaggccugaggggcagauugguu

SEQ ID NO: 46500 - RNA, 32 nt, Human
agaggaagggauggguggacucacaggaaguc

SEQ ID NO: 46501 - RNA, 26 nt, Human
agaggaagggcacagagaggaaggga

SEQ ID NO: 46502 - RNA, 22 nt, Human
agaggaagguaaagaagaagag

SEQ ID NO: 46503 - RNA, 32 nt, Human
agaggaaggucuagauuuccugcucuuaauaa

SEQ ID NO: 46504 - RNA, 21 nt, Human
agaggaaggucugaagaugag

SEQ ID NO: 46505 - RNA, 32 nt, Human
agaggaaguaaucaaccuuuacuucccaagcu

SEQ ID NO: 46506 - RNA, 24 nt, Human
agaggaaguagcgagagaagagag

SEQ ID NO: 46507 - RNA, 32 nt, Human
agaggaagucuuguuuaauaaaaaccuuuuga

SEQ ID NO: 46508 - RNA, 32 nt, Human
agaggaagugcugcuguaauugggagcacaag

SEQ ID NO: 46509 - RNA, 32 nt, Human
agaggaaguggaucugcuucuccaguuuuuga

SEQ ID NO: 46510 - RNA, 32 nt, Human
agaggaaguugugagagaaauugauaagcuuu

SEQ ID NO: 46511 - RNA, 23 nt, Human
agaggaauaacuuagcuugcaca

SEQ ID NO: 46512 - RNA, 32 nt, Human
agaggaaucagacaguucucacccucaagggg

SEQ ID NO: 46513 - RNA, 32 nt, Human
agaggaaucuuccuuuucuauuuaugaagauu

SEQ ID NO: 46514 - RNA, 21 nt, Human
agaggaaugaaacuacuuaca

SEQ ID NO: 46515 - RNA, 32 nt, Human
agaggaaugaguguccaggcagaguucagaag

SEQ ID NO: 46516 - RNA, 32 nt, Human
agaggaauggauuugacuuuucugcuaggauu

SEQ ID NO: 46517 - RNA, 32 nt, Human
agaggaauuuacaaauggguuuuuaacaaaug

SEQ ID NO: 46518 - RNA, 32 nt, Human
agaggacaaaacugaauaaagugaauguuaau

SEQ ID NO: 46519 - RNA, 32 nt, Human
agaggacaaaggugccuucuguagacacuccu

SEQ ID NO: 46520 - RNA, 32 nt, Human
agaggacaaagguugugucuugcuuuugucuc

SEQ ID NO: 46521 - RNA, 32 nt, Human
agaggacacagcaagugaguccuccccacucu

SEQ ID NO: 46522 - RNA, 32 nt, Human
agaggacacagccucugcugggacagggaaca

SEQ ID NO: 46523 - RNA, 32 nt, Human
agaggacacagccucugcugggacagggaaua

SEQ ID NO: 46524 - RNA, 32 nt, Human
agaggacacaggagccuggggugcaggugccu

SEQ ID NO: 46525 - RNA, 32 nt, Human
agaggacacagucugucauccccacuggaaag

SEQ ID NO: 46526 - RNA, 32 nt, Human
agaggacaccaacuccaugcagauggcagccc

SEQ ID NO: 46527 - RNA, 20 nt, Human
agaggacaccaggaagagcg

SEQ ID NO: 46528 - RNA, 32 nt, Human
agaggacacugaggacuaguuugggaaaugaa

SEQ ID NO: 46529 - RNA, 32 nt, Human
agaggacagcaacuggugauuguuucagagaa

SEQ ID NO: 46530 - RNA, 32 nt, Human
agaggacagggaggguggaggaguggauagaa

SEQ ID NO: 46531 - RNA, 32 nt, Human
agaggacaggguggagaggaggagaacccuga

SEQ ID NO: 46532 - RNA, 32 nt, Human
agaggacagugaauuacuccuaggucggcucu

SEQ ID NO: 46533 - RNA, 32 nt, Human
agaggacauguuuucucccuggagcugagcug

SEQ ID NO: 46534 - RNA, 32 nt, Human
agaggaccaagaaaaaucaacaaacaaaucaa

SEQ ID NO: 46535 - RNA, 32 nt, Human
agaggaccaaugcuugcauggagaauggacga

SEQ ID NO: 46536 - RNA, 20 nt, Human
agaggaccaggagaaggggg

SEQ ID NO: 46537 - RNA, 32 nt, Human
agaggacccauggcuagcagggaagggccugg

SEQ ID NO: 46538 - RNA, 32 nt, Human
agaggaccccaggcgaccagaguccaggcuga

SEQ ID NO: 46539 - RNA, 32 nt, Human
agaggacccugaggccuucugcaguguuugug

SEQ ID NO: 46540 - RNA, 32 nt, Human
agaggacccugaguccccaccugcggcucccc

SEQ ID NO: 46541 - RNA, 32 nt, Human
agaggacccuugccucagccucgggaagcccc

SEQ ID NO: 46542 - RNA, 32 nt, Human
agaggaccgaggacaggggccggacauugggg

SEQ ID NO: 46543 - RNA, 32 nt, Human
agaggaccgggaggcaccccacccuccccacc

SEQ ID NO: 46544 - RNA, 32 nt, Human
agaggaccucagaacccaggagccagaggaac

SEQ ID NO: 46545 - RNA, 32 nt, Human
agaggaccuggcugggccccaagccuuggaca

SEQ ID NO: 46546 - RNA, 24 nt, Human
agaggaccugggccucugcuguca

SEQ ID NO: 46547 - RNA, 32 nt, Human
agaggacgaagaggaggaggaugaggaggaca

SEQ ID NO: 46548 - RNA, 32 nt, Human
agaggacgaucucuugagaaaggaaagacuuc

SEQ ID NO: 46549 - RNA, 32 nt, Human
agaggacgccuccacccacaggaaggagccag

SEQ ID NO: 46550 - RNA, 32 nt, Human
agaggacgggggcagagaagugaugaagggaa

SEQ ID NO: 46551 - RNA, 32 nt, Human
agaggacuauagaaauuccugcucuucacaga

SEQ ID NO: 46552 - RNA, 19 nt, Human
agaggacucggaagucaga

SEQ ID NO: 46553 - RNA, 32 nt, Human
agaggacugaaaccuccacugcaggcugguuu

SEQ ID NO: 46554 - RNA, 32 nt, Human
agaggacugaccacagccuggcuggcagcugc

SEQ ID NO: 46555 - RNA, 25 nt, Human
agaggacugacuauacccuggcuga

SEQ ID NO: 46556 - RNA, 32 nt, Human
agaggacugcagcugccuaggucugcggccac

SEQ ID NO: 46557 - RNA, 32 nt, Human
agaggacugcugucugcccucucuggucaccc

SEQ ID NO: 46558 - RNA, 32 nt, Human
agaggacuggacccugggucucagguuccagc

SEQ ID NO: 46559 - RNA, 32 nt, Human
agaggacugggaggagaauggaggcaagaaaa

SEQ ID NO: 46560 - RNA, 32 nt, Human
agaggacugugucuccuggagcuguucaccag

SEQ ID NO: 46561 - RNA, 32 nt, Human
agaggacuucuccuuuuucucucccuccagag

SEQ ID NO: 46562 - RNA, 32 nt, Human
agaggacuugaggccaugaggucuggccucuu

SEQ ID NO: 46563 - RNA, 32 nt, Human
agaggacuugcuauuugccaggugcuuuaugu

SEQ ID NO: 46564 - RNA, 32 nt, Human
agaggagaaaugcaggcuggcagagcaauuuc

SEQ ID NO: 46565 - RNA, 32 nt, Human
agaggagaaccuucggcgcucugacaaggagu

SEQ ID NO: 46566 - RNA, 32 nt, Human
agaggagaacggcuguuccaccugccagcaga

SEQ ID NO: 46567 - RNA, 32 nt, Human
agaggagaagaagggccuuccuaguagaggca

SEQ ID NO: 46568 - RNA, 19 nt, Human
agaggagaagagacuggaa

SEQ ID NO: 46569 - RNA, 32 nt, Human
agaggagaagagcaaacaggcacuuugaggaa

SEQ ID NO: 46570 - RNA, 32 nt, Human
agaggagaagaggaggaggcagaggaagaaag

SEQ ID NO: 46571 - RNA, 21 nt, Human
agaggagaaggaggaggagag

SEQ ID NO: 46572 - RNA, 32 nt, Human
agaggagaaggaugccugggugccaggcaaga

SEQ ID NO: 46573 - RNA, 32 nt, Human
agaggagaaggccgcggcggaggcaggugaga

SEQ ID NO: 46574 - RNA, 32 nt, Human
agaggagaccaugggcccugccccacccacuc

SEQ ID NO: 46575 - RNA, 32 nt, Human
agaggagacccaggcagugucagcagugaagg

SEQ ID NO: 46576 - RNA, 32 nt, Human
agaggagacuaaaucacaucaauuugcccaaa

SEQ ID NO: 46577 - RNA, 32 nt, Human
agaggagagaaaagaacucaagggggaaacug

SEQ ID NO: 46578 - RNA, 32 nt, Human
agaggagagagaggagagaggagagagggagg

SEQ ID NO: 46579 - RNA, 22 nt, Human
agaggagagaggagagagggag

SEQ ID NO: 46580 - RNA, 32 nt, Human
agaggagagaggaggaggaggaggcugagaga

SEQ ID NO: 46581 - RNA, 32 nt, Human
agaggagagagggagggaagagagugacggag

SEQ ID NO: 46582 - RNA, 32 nt, Human
agaggagagccacaugccugaguaagaacagu

SEQ ID NO: 46583 - RNA, 32 nt, Human
agaggagagcccagaaggccacaaacauuaac

SEQ ID NO: 46584 - RNA, 32 nt, Human
agaggagaggaaagggaaggagaggggagggc

SEQ ID NO: 46585 - RNA, 32 nt, Human
agaggagaggcagagagggcgcggggaccguc

SEQ ID NO: 46586 - RNA, 32 nt, Human
agaggagaggcagcagcauggcgaguguccug

SEQ ID NO: 46587 - RNA, 32 nt, Human
agaggagaggccugauggggcagagcuggacg

SEQ ID NO: 46588 - RNA, 20 nt, Human
agaggagagggagaaaggga

SEQ ID NO: 46589 - RNA, 32 nt, Human
agaggagaggggcacagggucucuaccauccc

SEQ ID NO: 46590 - RNA, 32 nt, Human
agaggagaguucuaaggucaccucuggcugca

SEQ ID NO: 46591 - RNA, 18 nt, Human
agaggagauccuaaccca

SEQ ID NO: 46592 - RNA, 32 nt, Human
agaggagaugaaggccaaggaggaggagcuca

SEQ ID NO: 46593 - RNA, 32 nt, Human
agaggagaugauugaugaggccaggugcggug

SEQ ID NO: 46594 - RNA, 32 nt, Human
agaggagauggaaacugacauacccaacccac

SEQ ID NO: 46595 - RNA, 32 nt, Human
agaggagaugggggugggagggacugaguuga

SEQ ID NO: 46596 - RNA, 32 nt, Human
agaggagcaaacuggggcccauugaaggguga

SEQ ID NO: 46597 - RNA, 18 nt, Human
agaggagcaaagcugccu

SEQ ID NO: 46598 - RNA, 21 nt, Human
agaggagcagagaggaaggag

SEQ ID NO: 46599 - RNA, 32 nt, Human
agaggagcagagaggaaggagaaagaggagga

SEQ ID NO: 46600 - RNA, 32 nt, Human
agaggagcagcagggucagggugcuggguucc

SEQ ID NO: 46601 - RNA, 22 nt, Human
agaggagcaggaagcaaggcca

SEQ ID NO: 46602 - RNA, 19 nt, Human
agaggagcaggagggggcc

SEQ ID NO: 46603 - RNA, 32 nt, Human
agaggagccacuucgcccagacuuuguuuccc

SEQ ID NO: 46604 - RNA, 32 nt, Human
agaggagcccacacaaagcuugaaagccugug

SEQ ID NO: 46605 - RNA, 32 nt, Human
agaggagccccaugcccagccuggcugagccc

SEQ ID NO: 46606 - RNA, 32 nt, Human
agaggagcccuagagagagaaaaagaaagaaa

SEQ ID NO: 46607 - RNA, 32 nt, Human
agaggagccgcgcgaaggucaccccgcgcccg

SEQ ID NO: 46608 - RNA, 22 nt, Human
agaggagccggagacgagacca

SEQ ID NO: 46609 - RNA, 32 nt, Human
agaggagccugagaagaggcagaggaagggcg

SEQ ID NO: 46610 - RNA, 23 nt, Human
agaggagcgagccaagcuggcca

SEQ ID NO: 46611 - RNA, 32 nt, Human
agaggagcgcugggcuggaggcauuuucccca

SEQ ID NO: 46612 - RNA, 32 nt, Human
agaggagcggucuguuacaucuucccauuugg

SEQ ID NO: 46613 - RNA, 32 nt, Human
agaggagcuugucuuccuuguccucuguuccc

SEQ ID NO: 46614 - RNA, 32 nt, Human
agaggaggaaacugaggcagggacaggggcuu

SEQ ID NO: 46615 - RNA, 19 nt, Human
agaggaggaaagagcaggc

SEQ ID NO: 46616 - RNA, 32 nt, Human
agaggaggaaagggaaaggguaggccuguaga

SEQ ID NO: 46617 - RNA, 22 nt, Human
agaggaggaagaagaggaggag

SEQ ID NO: 46618 - RNA, 22 nt, Human
agaggaggaagaggaaggggag

SEQ ID NO: 46619 - RNA, 32 nt, Human
agaggaggaagaggaaggggagagggacgaga

SEQ ID NO: 46620 - RNA, 32 nt, Human
agaggaggaagaggaggagaaggcgaggccac

SEQ ID NO: 46621 - RNA, 32 nt, Human
agaggaggaagugagacggggaagggaggagc

SEQ ID NO: 46622 - RNA, 25 nt, Human
agaggaggaaucguggaaaacaaga

SEQ ID NO: 46623 - RNA, 22 nt, Human
agaggaggacaaaaagggggag

SEQ ID NO: 46624 - RNA, 32 nt, Human
agaggaggacaguggaggugagcaugugaaag

SEQ ID NO: 46625 - RNA, 32 nt, Human
agaggaggacuccuccugggccuggugcuucg

SEQ ID NO: 46626 - RNA, 32 nt, Human
agaggaggacuggggcuugacaaggacacggg

SEQ ID NO: 46627 - RNA, 32 nt, Human
agaggaggagaaagaugacccagaaguggauu

SEQ ID NO: 46628 - RNA, 19 nt, Human
agaggaggagaaggaggag

SEQ ID NO: 46629 - RNA, 32 nt, Human
agaggaggagacccggccagaggagcagagcg

SEQ ID NO: 46630 - RNA, 20 nt, Human
agaggaggagacgaagggga

SEQ ID NO: 46631 - RNA, 32 nt, Human
agaggaggagcagcuuuacacugaugaagugu

SEQ ID NO: 46632 - RNA, 32 nt, Human
agaggaggagccaaggcagucagugggccgca

SEQ ID NO: 46633 - RNA, 21 nt, Human
agaggaggaggaaagggggag

SEQ ID NO: 46634 - RNA, 22 nt, Human
agaggaggaggaagaacgggag

SEQ ID NO: 46635 - RNA, 32 nt, Human
agaggaggaggaagaggaggaagaggaugacc

SEQ ID NO: 46636 - RNA, 22 nt, Human
agaggaggaggaggaagaggag

SEQ ID NO: 46637 - RNA, 21 nt, Human
agaggaggaggaggaagggag

SEQ ID NO: 46638 - RNA, 21 nt, Human
agaggaggaggaggaggaaga

SEQ ID NO: 46639 - RNA, 32 nt, Human
agaggaggaggaggaggaagaaagaaaaccaa

SEQ ID NO: 46640 - RNA, 32 nt, Human
agaggaggaggaggaggaagaauaggaggaaa

SEQ ID NO: 46641 - RNA, 32 nt, Human
agaggaggaggaggaggaggaagaagaaagau

SEQ ID NO: 46642 - RNA, 32 nt, Human
agaggaggaggaggaggaggaagagguggagg

SEQ ID NO: 46643 - RNA, 32 nt, Human
agaggaggaggaggaggaggaagcugaagacg

SEQ ID NO: 46644 - RNA, 32 nt, Human
agaggaggaggaggaggaggaaggggcuugga

SEQ ID NO: 46645 - RNA, 32 nt, Human
agaggaggaggaggaggaggagaaggcucugg

SEQ ID NO: 46646 - RNA, 32 nt, Human
agaggaggaggaggaggaggaggaggaggagg

SEQ ID NO: 46647 - RNA, 32 nt, Human
agaggaggaggccaucaccucuggccucuucc

SEQ ID NO: 46648 - RNA, 32 nt, Human
agaggaggaggcggcggcggggcagugaaacu

SEQ ID NO: 46649 - RNA, 32 nt, Human
agaggaggagguggagcaggaguggggagaga

SEQ ID NO: 46650 - RNA, 32 nt, Human
agaggaggaugagagcuucuccccagccuucc

SEQ ID NO: 46651 - RNA, 21 nt, Human
agaggaggcagagagagggag

SEQ ID NO: 46652 - RNA, 32 nt, Human
agaggaggccaaggagagguuguuuguucaug

SEQ ID NO: 46653 - RNA, 32 nt, Human
agaggaggcccaggcaauaucaggagucaagg

SEQ ID NO: 46654 - RNA, 32 nt, Human
agaggaggcccaggcagugccaggagucaagg

SEQ ID NO: 46655 - RNA, 32 nt, Human
agaggaggccucagcaagugucagccacacga

SEQ ID NO: 46656 - RNA, 32 nt, Human
agaggaggcgcgagaauggagguggaggccgu

SEQ ID NO: 46657 - RNA, 32 nt, Human
agaggaggcugacugggaugggguggcagcug

SEQ ID NO: 46658 - RNA, 32 nt, Human
agaggaggcuggcagagcuggggacugagggc

SEQ ID NO: 46659 - RNA, 32 nt, Human
agaggagggaaacugcccaguuuucccccggc

SEQ ID NO: 46660 - RNA, 32 nt, Human
agaggagggaaagggguggcucuggcaggaaa

SEQ ID NO: 46661 - RNA, 32 nt, Human
agaggagggagaggaggaagaggaaggggagg

SEQ ID NO: 46662 - RNA, 32 nt, Human
agaggagggagcaguuugcagugcccagccac

SEQ ID NO: 46663 - RNA, 32 nt, Human
agaggagggaggaggaauaaggggaaggaaga

SEQ ID NO: 46664 - RNA, 32 nt, Human
agaggagggaggaggcgcgccgcgccauggug

SEQ ID NO: 46665 - RNA, 32 nt, Human
agaggagggaggaucacuugaacccaggaauu

SEQ ID NO: 46666 - RNA, 32 nt, Human
agaggagggaggcaggcugcagcuucagccac

SEQ ID NO: 46667 - RNA, 32 nt, Human
agaggagggcacggggaagggcaaacggucca

SEQ ID NO: 46668 - RNA, 32 nt, Human
agaggagggcagugaauaugcugagaggaguu

SEQ ID NO: 46669 - RNA, 26 nt, Human
agaggagggcaugccauugcaagaga

SEQ ID NO: 46670 - RNA, 32 nt, Human
agaggagggccaagaaaaugagcuugguuucc

SEQ ID NO: 46671 - RNA, 32 nt, Human
agaggagggcccuguccggcauguguggguau

SEQ ID NO: 46672 - RNA, 32 nt, Human
agaggagggcuggaggcagagaguguaagugu

SEQ ID NO: 46673 - RNA, 32 nt, Human
agaggaggggaaggggaggcagaggaggaaca

SEQ ID NO: 46674 - RNA, 32 nt, Human
agaggaggggagagaggcaccuggcacucugc

SEQ ID NO: 46675 - RNA, 32 nt, Human
agaggaggggaggaggaggaggaggaggaggu

SEQ ID NO: 46676 - RNA, 32 nt, Human
agaggagggggaaggaaguaugacagauguua

SEQ ID NO: 46677 - RNA, 32 nt, Human
agaggagggggaccagcaccagcugggaggca

SEQ ID NO: 46678 - RNA, 19 nt, Human
agaggagggggcggaggca

SEQ ID NO: 46679 - RNA, 32 nt, Human
agaggagggggcuccaaugacacuccgggguu

SEQ ID NO: 46680 - RNA, 23 nt, Human
agaggagggggcuuccccaagga

SEQ ID NO: 46681 - RNA, 32 nt, Human
agaggaggggugaagauuggggccaguaucga

SEQ ID NO: 46682 - RNA, 32 nt, Human
agaggaggguggggucagggccgccccuucuc

SEQ ID NO: 46683 - RNA, 32 nt, Human
agaggagguagacucuuuggcacuuuggcaca

SEQ ID NO: 46684 - RNA, 32 nt, Human
agaggaggugaggagggaggaagcguccggag

SEQ ID NO: 46685 - RNA, 32 nt, Human
agaggaggugaguggcuuguugggaggaagcu

SEQ ID NO: 46686 - RNA, 32 nt, Human
agaggagguggaccagaacuuuuggaacuagu

SEQ ID NO: 46687 - RNA, 32 nt, Human
agaggagguggaggcuugaugaggagguggug

SEQ ID NO: 46688 - RNA, 32 nt, Human
agaggaggugugagcagcugaagggucgguca

SEQ ID NO: 46689 - RNA, 32 nt, Human
agaggaguagaagguaaaagaaaaugcuggga

SEQ ID NO: 46690 - RNA, 32 nt, Human
agaggagucaggaggugggaggccgugggcuu

SEQ ID NO: 46691 - RNA, 32 nt, Human
agaggaguccuuuccucucugccugcccuuuc

SEQ ID NO: 46692 - RNA, 32 nt, Human
agaggagucuauucaaaccucuugccuauuuu

SEQ ID NO: 46693 - RNA, 18 nt, Human
agaggagucucguucugu

SEQ ID NO: 46694 - RNA, 32 nt, Human
agaggagucugcucaggagccagcacaggaca

SEQ ID NO: 46695 - RNA, 32 nt, Human
agaggagugcacuugccagacacuucggggcu

SEQ ID NO: 46696 - RNA, 32 nt, Human
agaggagugccaccccgagcuuacccuucugg

SEQ ID NO: 46697 - RNA, 19 nt, Human
agaggagugcuuuucuucu

SEQ ID NO: 46698 - RNA, 21 nt, Human
agaggaguggccacaaggcca

SEQ ID NO: 46699 - RNA, 32 nt, Human
agaggaguggugguagagauagugacagccug

SEQ ID NO: 46700 - RNA, 32 nt, Human
agaggaguguaggccuuccagugcaggaaggu

SEQ ID NO: 46701 - RNA, 32 nt, Human
agaggagugucagacagcuguugucaacaggc

SEQ ID NO: 46702 - RNA, 32 nt, Human
agaggagugugagaggugaguccaagguugag

SEQ ID NO: 46703 - RNA, 24 nt, Human
agaggauagcacuggcaucuggca

SEQ ID NO: 46704 - RNA, 32 nt, Human
agaggaucaaaaccaucagcaacaacauaaua

SEQ ID NO: 46705 - RNA, 32 nt, Human
agaggaucaagacuucuuugugcucaaauacc

SEQ ID NO: 46706 - RNA, 32 nt, Human
agaggaucacuugaggccaggaguuccagacc

SEQ ID NO: 46707 - RNA, 32 nt, Human
agaggauccccgagagccacaccagcucugga

SEQ ID NO: 46708 - RNA, 32 nt, Human
agaggauccuugagcccaggagguugaggcug

SEQ ID NO: 46709 - RNA, 32 nt, Human
agaggaucugcuccacugucuccuggggcagu

SEQ ID NO: 46710 - RNA, 32 nt, Human
agaggaucugcuuuauagaauuuccuuucagu

SEQ ID NO: 46711 - RNA, 32 nt, Human
agaggaugaaguauauccuguaagucuaagga

SEQ ID NO: 46712 - RNA, 32 nt, Human
agaggaugaauacccauccuauccaaagggaa

SEQ ID NO: 46713 - RNA, 32 nt, Human
agaggaugaccagcaauuaauuauccccagaa

SEQ ID NO: 46714 - RNA, 32 nt, Human
agaggaugacucuagggugcucucccacuugc

SEQ ID NO: 46715 - RNA, 32 nt, Human
agaggaugacucuguucacacccaauccagcg

SEQ ID NO: 46716 - RNA, 32 nt, Human
agaggaugaggagaaacggaaugaggaagugc

SEQ ID NO: 46717 - RNA, 32 nt, Human
agaggaugcauauuauucagcaucagacagcc

SEQ ID NO: 46718 - RNA, 32 nt, Human
agaggaugcaucuggggagagcaaagcacuaa

SEQ ID NO: 46719 - RNA, 20 nt, Human
agaggaugcauuuucuucca

SEQ ID NO: 46720 - RNA, 30 nt, Human
agaggaugccccaggcccuggagcgugcag

SEQ ID NO: 46721 - RNA, 32 nt, Human
agaggaugcugaggccuucuuccaagaccaaa

SEQ ID NO: 46722 - RNA, 23 nt, Human
agaggaugcugcucaggagccag

SEQ ID NO: 46723 - RNA, 32 nt, Human
agaggaugugggguuguaguaccucuggguga

SEQ ID NO: 46724 - RNA, 32 nt, Human
agaggauuagguacuuaggagcaaagaaagaa

SEQ ID NO: 46725 - RNA, 32 nt, Human
agaggauugcuugaggccaggaguuuguuacc

SEQ ID NO: 46726 - RNA, 32 nt, Human
agaggcaaaaggaugcucugaaaugacugucc

SEQ ID NO: 46727 - RNA, 32 nt, Human
agaggcaaauggagaguaacagaagagugucu

SEQ ID NO: 46728 - RNA, 21 nt, Human
agaggcaacccugggggccag

SEQ ID NO: 46729 - RNA, 32 nt, Human
agaggcaacgggcggcagguugcaguggaggg

SEQ ID NO: 46730 - RNA, 32 nt, Human
agaggcaagaacucugcagcuuccugccuucu

SEQ ID NO: 46731 - RNA, 32 nt, Human
agaggcaagcagggcgggcuggauacggagcg

SEQ ID NO: 46732 - RNA, 32 nt, Human
agaggcaagggaaagccgaagacugaaaauug

SEQ ID NO: 46733 - RNA, 32 nt, Human
agaggcaagguuucaccaucuuggucaaguug

SEQ ID NO: 46734 - RNA, 32 nt, Human
agaggcaauacugauuauccacugggaaacag

SEQ ID NO: 46735 - RNA, 32 nt, Human
agaggcacagacauggcaggagagggaggggu

SEQ ID NO: 46736 - RNA, 32 nt, Human
agaggcacagucuguaucccaucucuaacuuc

SEQ ID NO: 46737 - RNA, 32 nt, Human
agaggcacauggucaggggacaauuguauaag

SEQ ID NO: 46738 - RNA, 32 nt, Human
agaggcacaugugcacgcacacacaacuugug

SEQ ID NO: 46739 - RNA, 32 nt, Human
agaggcaccaccuggggaagacugccuuggag

SEQ ID NO: 46740 - RNA, 32 nt, Human
agaggcaccagaggauuccugcucuguccccu

SEQ ID NO: 46741 - RNA, 32 nt, Human
agaggcacugagaguggaggucucagacucuu

SEQ ID NO: 46742 - RNA, 32 nt, Human
agaggcacuggcugcacuggacccaagcauag

SEQ ID NO: 46743 - RNA, 32 nt, Human
agaggcagaaaccaugugcagaggcugggaga

SEQ ID NO: 46744 - RNA, 32 nt, Human
agaggcagaagagacagacgaggcagagacaa

SEQ ID NO: 46745 - RNA, 32 nt, Human
agaggcagaagauuaagauaagaaauauaaga

SEQ ID NO: 46746 - RNA, 32 nt, Human
agaggcagacaggcgcuggacagaggggcagg

SEQ ID NO: 46747 - RNA, 19 nt, Human
agaggcagagacccagggg

SEQ ID NO: 46748 - RNA, 32 nt, Human
agaggcagagagaaacagagacagagagacag

SEQ ID NO: 46749 - RNA, 32 nt, Human
agaggcagagagaaacagagacagagaggcag

SEQ ID NO: 46750 - RNA, 32 nt, Human
agaggcagagccaagaccagaacccagguuuc

SEQ ID NO: 46751 - RNA, 32 nt, Human
agaggcagagccucuguggccuagcuagugac

SEQ ID NO: 46752 - RNA, 32 nt, Human
agaggcagaggcaggagaaucgcuugaaccug

SEQ ID NO: 46753 - RNA, 32 nt, Human
agaggcagagucucaccauguugccuaggcug

SEQ ID NO: 46754 - RNA, 32 nt, Human
agaggcagaguuucaccauguuggccaggaug

SEQ ID NO: 46755 - RNA, 32 nt, Human
agaggcagaguuugcagugagcugagaucgug

SEQ ID NO: 46756 - RNA, 32 nt, Human
agaggcagcaaagcagcccuuauaggguauuu

SEQ ID NO: 46757 - RNA, 18 nt, Human
agaggcagcacccaggag

SEQ ID NO: 46758 - RNA, 32 nt, Human
agaggcagcagugauggcuacagccauaccuu

SEQ ID NO: 46759 - RNA, 19 nt, Human
agaggcagccacucaugga

SEQ ID NO: 46760 - RNA, 32 nt, Human
agaggcagcccagccccggccucccagcuuac

SEQ ID NO: 46761 - RNA, 21 nt, Human
agaggcagccccaagaaccua

SEQ ID NO: 46762 - RNA, 32 nt, Human
agaggcagcucagaguggaggcucuaggcagg

SEQ ID NO: 46763 - RNA, 23 nt, Human
agaggcagcugcuccaggaacag

SEQ ID NO: 46764 - RNA, 32 nt, Human
agaggcagcugggggcagggaggacucauuaa

SEQ ID NO: 46765 - RNA, 32 nt, Human
agaggcaggaagagcuagucuuagcauuuaua

SEQ ID NO: 46766 - RNA, 32 nt, Human
agaggcaggaggaucacuugagcccaggaguu

SEQ ID NO: 46767 - RNA, 32 nt, Human
agaggcaggaggaucgcuugagcccagcaugg

SEQ ID NO: 46768 - RNA, 32 nt, Human
agaggcaggaugucaccauguuuuccaggcug

SEQ ID NO: 46769 - RNA, 32 nt, Human
agaggcaggauuucaccauguuuuccaggcug

SEQ ID NO: 46770 - RNA, 32 nt, Human
agaggcaggcacaagacaaaaugaaucucucc

SEQ ID NO: 46771 - RNA, 32 nt, Human
agaggcaggcagaccugggccucccaggaugg

SEQ ID NO: 46772 - RNA, 32 nt, Human
agaggcagggucuugcuauauugcucggaggu

SEQ ID NO: 46773 - RNA, 32 nt, Human
agaggcagggucuugcucuaucacccaagcug

SEQ ID NO: 46774 - RNA, 32 nt, Human
agaggcagggucuugcuguauugcccaggcug

SEQ ID NO: 46775 - RNA, 32 nt, Human
agaggcaggguuuagccauguugaucaggcug

SEQ ID NO: 46776 - RNA, 32 nt, Human
agaggcaggguuucaccauguuagccaggaug

SEQ ID NO: 46777 - RNA, 32 nt, Human
agaggcaggguuucaccauguugaccaggcug

SEQ ID NO: 46778 - RNA, 32 nt, Human
agaggcaggguuucaccauguuggccaggcug

SEQ ID NO: 46779 - RNA, 32 nt, Human
agaggcaggguuucuccauguuggucaggcug

SEQ ID NO: 46780 - RNA, 32 nt, Human
agaggcaggucucugagucuccuggccaggaa

SEQ ID NO: 46781 - RNA, 32 nt, Human
agaggcagguuuucaccauguuggcuaggcug

SEQ ID NO: 46782 - RNA, 32 nt, Human
agaggcaguaggaacccagcucucagggcugu

SEQ ID NO: 46783 - RNA, 21 nt, Human
agaggcaguuaacccuguagc

SEQ ID NO: 46784 - RNA, 32 nt, Human
agaggcauggcugggccuccaucucugccuaa

SEQ ID NO: 46785 - RNA, 27 nt, Human
agaggcauuucagaguaggagaugcag

SEQ ID NO: 46786 - RNA, 32 nt, Human
agaggcauuugcaccagcucccugcacacucg

SEQ ID NO: 46787 - RNA, 32 nt, Human
agaggcauuugugucaugaggaaucucuccug

SEQ ID NO: 46788 - RNA, 32 nt, Human
agaggccaaaaccaggcuucagguucgggaag

SEQ ID NO: 46789 - RNA, 32 nt, Human
agaggccaaagaaggaggauggcuugagccca

SEQ ID NO: 46790 - RNA, 32 nt, Human
agaggccaaggcaggaggauugcuugaguuca

SEQ ID NO: 46791 - RNA, 32 nt, Human
agaggccaaggcaugagaaucgcuugaaccug

SEQ ID NO: 46792 - RNA, 32 nt, Human
agaggccaaggcugauaguuuagaugaaaaga

SEQ ID NO: 46793 - RNA, 32 nt, Human
agaggccaaggugggagaauugcuugaggcca

SEQ ID NO: 46794 - RNA, 32 nt, Human
agaggccacaaagacauuacaguuuuuguucc

SEQ ID NO: 46795 - RNA, 32 nt, Human
agaggccacagcugcuggcuuccugggcuucu

SEQ ID NO: 46796 - RNA, 32 nt, Human
agaggccacaugcuuuccucacaguuucucuc

SEQ ID NO: 46797 - RNA, 32 nt, Human
agaggccaccacugcuuuucaugcaggaguua

SEQ ID NO: 46798 - RNA, 32 nt, Human
agaggccaccccggcccggccuccaggcagag

SEQ ID NO: 46799 - RNA, 32 nt, Human
agaggccaccucuccugggcuucucagugucu

SEQ ID NO: 46800 - RNA, 32 nt, Human
agaggccacucgggggcaucgcgaguacacgg

SEQ ID NO: 46801 - RNA, 32 nt, Human
agaggccacugcaccugggcuagggguccaca

SEQ ID NO: 46802 - RNA, 32 nt, Human
agaggccacuggccaggccucccaggcaggug

SEQ ID NO: 46803 - RNA, 32 nt, Human
agaggccacuggcuuccagaugucccagccuc

SEQ ID NO: 46804 - RNA, 32 nt, Human
agaggccacugucccuuaagacugccggaguc

SEQ ID NO: 46805 - RNA, 32 nt, Human
agaggccagcagaggagccagcuuacaggaug

SEQ ID NO: 46806 - RNA, 32 nt, Human
agaggccagcugcacuccugcacgggguuccu

SEQ ID NO: 46807 - RNA, 32 nt, Human
agaggccagcuguguucgaguccucugugccu

SEQ ID NO: 46808 - RNA, 32 nt, Human
agaggccagggaggguuuaggggaugguucug

SEQ ID NO: 46809 - RNA, 32 nt, Human
agaggccaggguggccagcaguggcugggucc

SEQ ID NO: 46810 - RNA, 15 nt, Human
agaggccaggugcuc

SEQ ID NO: 46811 - RNA, 32 nt, Human
agaggccagguugaggggauuacuugagccca

SEQ ID NO: 46812 - RNA, 17 nt, Human
agaggccaucaagcaca

SEQ ID NO: 46813 - RNA, 32 nt, Human
agaggccaucugcagggccaagccacaggaag

SEQ ID NO: 46814 - RNA, 32 nt, Human
agaggccaugaaggagcaaguuuuguauuugu

SEQ ID NO: 46815 - RNA, 22 nt, Human
agaggccaugcgcaaugugugg

SEQ ID NO: 46816 - RNA, 32 nt, Human
agaggccauuacuguaucucauggccucuuga

SEQ ID NO: 46817 - RNA, 32 nt, Human
agaggccauucaaccgucaaacaccauuuggu

SEQ ID NO: 46818 - RNA, 32 nt, Human
agaggcccaagucccuaggagacgccaguccc

SEQ ID NO: 46819 - RNA, 32 nt, Human
agaggcccagcccucagaaacccuucagugcu

SEQ ID NO: 46820 - RNA, 19 nt, Human
agaggcccaggaaucggag

SEQ ID NO: 46821 - RNA, 28 nt, Human
agaggcccaggaugagccucaucuuguc

SEQ ID NO: 46822 - RNA, 32 nt, Human
agaggcccaggaugguggaggcugaggaacug

SEQ ID NO: 46823 - RNA, 32 nt, Human
agaggcccaggcagccaccagcacagagaaga

SEQ ID NO: 46824 - RNA, 32 nt, Human
agaggcccaguagacaugcaccaccugcuuga

SEQ ID NO: 46825 - RNA, 32 nt, Human
agaggcccaugcuggagacuggaaggguuccc

SEQ ID NO: 46826 - RNA, 32 nt, Human
agaggccccacgcccccacucucccuccacac

SEQ ID NO: 46827 - RNA, 32 nt, Human
agaggccccagccgacaagugucgcccacaag

SEQ ID NO: 46828 - RNA, 32 nt, Human
agaggccccagccugcggcccuggagcgcuac

SEQ ID NO: 46829 - RNA, 19 nt, Human
agaggccccgggcccagga

SEQ ID NO: 46830 - RNA, 17 nt, Human
agaggccccuucuuggg

SEQ ID NO: 46831 - RNA, 32 nt, Human
agaggccccuugcccaccaugaagggaaccug

SEQ ID NO: 46832 - RNA, 32 nt, Human
agaggcccggggccaggaaagcagagacagac

SEQ ID NO: 46833 - RNA, 18 nt, Human
agaggcccuccucugccu

SEQ ID NO: 46834 - RNA, 21 nt, Human
agaggcccucgggccuggaga

SEQ ID NO: 46835 - RNA, 21 nt, Human
agaggcccucucucagaugaa

SEQ ID NO: 46836 - RNA, 32 nt, Human
agaggcccucucuccucccugccuccugaccc

SEQ ID NO: 46837 - RNA, 32 nt, Human
agaggcccugcagagcggcaggauggagauau

SEQ ID NO: 46838 - RNA, 32 nt, Human
agaggcccugcagagcggcaggauggagaugu

SEQ ID NO: 46839 - RNA, 32 nt, Human
agaggcccugccugaacccacagugccaggca

SEQ ID NO: 46840 - RNA, 32 nt, Human
agaggcccuggaauugugggugaggcugucug

SEQ ID NO: 46841 - RNA, 32 nt, Human
agaggcccuggaggaggguggggcuggccggg

SEQ ID NO: 46842 - RNA, 32 nt, Human
agaggcccugggccgaggugcagugacccugc

SEQ ID NO: 46843 - RNA, 32 nt, Human
agaggccgaaacaggaggauccuuugagccua

SEQ ID NO: 46844 - RNA, 32 nt, Human
agaggccgacucagaggagacucugcugcuug

SEQ ID NO: 46845 - RNA, 32 nt, Human
agaggccgacuggagcaagguuugcuggcaga

SEQ ID NO: 46846 - RNA, 32 nt, Human
agaggccgagauaggcggauugcuugagccca

SEQ ID NO: 46847 - RNA, 32 nt, Human
agaggccgaggugagacgggaagauggcuuga

SEQ ID NO: 46848 - RNA, 32 nt, Human
agaggccggagggagaggaggcgaggggcggc

SEQ ID NO: 46849 - RNA, 32 nt, Human
agaggccggcagaucacuugagcccaggaguu

SEQ ID NO: 46850 - RNA, 32 nt, Human
agaggccgucaacauggaaaagcagccccaga

SEQ ID NO: 46851 - RNA, 27 nt, Human
agaggccuaagaggcucacugcccuau

SEQ ID NO: 46852 - RNA, 24 nt, Human
agaggccuaaguuugcuggccugu

SEQ ID NO: 46853 - RNA, 32 nt, Human
agaggccuccacucacuccagaccccuauagc

SEQ ID NO: 46854 - RNA, 32 nt, Human
agaggccuccugccggcaaccagcacuagugg

SEQ ID NO: 46855 - RNA, 32 nt, Human
agaggccugacccccugcuccuggccugaaau

SEQ ID NO: 46856 - RNA, 32 nt, Human
agaggccugagagcgggagggccaggcugcca

SEQ ID NO: 46857 - RNA, 32 nt, Human
agaggccugcagccucccacaugccuuaaggg

SEQ ID NO: 46858 - RNA, 32 nt, Human
agaggccuggaccaccuggggcucccugagga

SEQ ID NO: 46859 - RNA, 32 nt, Human
agaggccuggcaggcaggcuuggcaugguugg

SEQ ID NO: 46860 - RNA, 32 nt, Human
agaggccugggaaaggagauagccuugcuccg

SEQ ID NO: 46861 - RNA, 32 nt, Human
agaggccugggccugcacugccugcagccgac

SEQ ID NO: 46862 - RNA, 32 nt, Human
agaggccuggggugggacagggagggccggcg

SEQ ID NO: 46863 - RNA, 32 nt, Human
agaggccuguaaucccagcuacuugggaggcu

SEQ ID NO: 46864 - RNA, 32 nt, Human
agaggccuguaaucccaguuccuugggaggcu

SEQ ID NO: 46865 - RNA, 32 nt, Human
agaggccuucaucugccaucacucgugucucu

SEQ ID NO: 46866 - RNA, 32 nt, Human
agaggccuuguccuguuucuguguucuguuuc

SEQ ID NO: 46867 - RNA, 32 nt, Human
agaggcgaacagcucaggcagcgcagguguga

SEQ ID NO: 46868 - RNA, 32 nt, Human
agaggcgaaguuuccccauguuggccaggcug

SEQ ID NO: 46869 - RNA, 23 nt, Human
agaggcgaccugucaggggccag

SEQ ID NO: 46870 - RNA, 32 nt, Human
agaggcgagagggagagcgugcgcgagaggag

SEQ ID NO: 46871 - RNA, 19 nt, Human
agaggcgagcagagcccgc

SEQ ID NO: 46872 - RNA, 32 nt, Human
agaggcgcagagguggccgcugugcugucccg

SEQ ID NO: 46873 - RNA, 19 nt, Human
agaggcgccccggggggug

SEQ ID NO: 46874 - RNA, 32 nt, Human
agaggcgccgugccucgggccccuggugggag

SEQ ID NO: 46875 - RNA, 32 nt, Human
agaggcgccugccaccuccuccucaucuccgg

SEQ ID NO: 46876 - RNA, 32 nt, Human
agaggcgccuucucuucucugggcauuccccg

SEQ ID NO: 46877 - RNA, 32 nt, Human
agaggcgcuacgguggcaucacagauccuggc

SEQ ID NO: 46878 - RNA, 32 nt, Human
agaggcgcugggaagauggcuggugaggagcu

SEQ ID NO: 46879 - RNA, 32 nt, Human
agaggcgcuuggcugggcucucagcccgccac

SEQ ID NO: 46880 - RNA, 17 nt, Human
agaggcggaagaggagg

SEQ ID NO: 46881 - RNA, 32 nt, Human
agaggcggagagaaugugggagcacuucagag

SEQ ID NO: 46882 - RNA, 24 nt, Human
agaggcggagccgccgcccugccg

SEQ ID NO: 46883 - RNA, 20 nt, Human
agaggcggagcgagcccccg

SEQ ID NO: 46884 - RNA, 21 nt, Human
agaggcggagcuggcccggcg

SEQ ID NO: 46885 - RNA, 32 nt, Human
agaggcggagucugaggagcuggggaaggaac

SEQ ID NO: 46886 - RNA, 32 nt, Human
agaggcggaguuucaccauguuggccaggaug

SEQ ID NO: 46887 - RNA, 32 nt, Human
agaggcggaguuucgccauguuggucaggcug

SEQ ID NO: 46888 - RNA, 32 nt, Human
agaggcggcaggaggagcaggagaggcugcug

SEQ ID NO: 46889 - RNA, 32 nt, Human
agaggcgggaggauugagugaggccaggaguu

SEQ ID NO: 46890 - RNA, 32 nt, Human
agaggcgggaggauugagugggccaggaguuc

SEQ ID NO: 46891 - RNA, 32 nt, Human
agaggcgggaggauugagugggccaggaguuu

SEQ ID NO: 46892 - RNA, 32 nt, Human
agaggcgggaggauugcuugaggccgaggguu

SEQ ID NO: 46893 - RNA, 32 nt, Human
agaggcgggcagaucacuugaggucaggaguu

SEQ ID NO: 46894 - RNA, 32 nt, Human
agaggcgggcggaucacuugagacaggccugg

SEQ ID NO: 46895 - RNA, 31 nt, Human
agaggcgggcuucucccagccaugguguccc

SEQ ID NO: 46896 - RNA, 32 nt, Human
agaggcgggggacagcagaggcugcagacugg

SEQ ID NO: 46897 - RNA, 32 nt, Human
agaggcgggguuucaccaugcuggucaggaug

SEQ ID NO: 46898 - RNA, 32 nt, Human
agaggcgggguuucaccauguuagccaggaug

SEQ ID NO: 46899 - RNA, 32 nt, Human
agaggcgggguuucaccauguugcccagacug

SEQ ID NO: 46900 - RNA, 32 nt, Human
agaggcgggguuucaccauguuggccaggaug

SEQ ID NO: 46901 - RNA, 32 nt, Human
agaggcgggguuucaccauguuggccaggcug

SEQ ID NO: 46902 - RNA, 32 nt, Human
agaggcgggguuucaccauguuggcuaggaug

SEQ ID NO: 46903 - RNA, 32 nt, Human
agaggcgggguuucaucauguugaacuccuga

SEQ ID NO: 46904 - RNA, 32 nt, Human
agaggcgggguuucaucauguuggccaggcug

SEQ ID NO: 46905 - RNA, 32 nt, Human
agaggcgggguuucgccauguuacacuggcug

SEQ ID NO: 46906 - RNA, 32 nt, Human
agaggcgggguuucgccauguugcccaggcua

SEQ ID NO: 46907 - RNA, 32 nt, Human
agaggcgggguuucgucauguuggccaggcug

SEQ ID NO: 46908 - RNA, 32 nt, Human
agaggcgugaccaaggccacagagcuaugggu

SEQ ID NO: 46909 - RNA, 32 nt, Human
agaggcgugagcccucucagucucacaguccc

SEQ ID NO: 46910 - RNA, 32 nt, Human
agaggcgugaggagaggaaagcagggaggucu

SEQ ID NO: 46911 - RNA, 32 nt, Human
agaggcgugauaucuggauggaaguugggcug

SEQ ID NO: 46912 - RNA, 32 nt, Human
agaggcuaaaaguuuuuaaauuagcugugugg

SEQ ID NO: 46913 - RNA, 32 nt, Human
agaggcuaagacgggaggauugcuugaaucca

SEQ ID NO: 46914 - RNA, 32 nt, Human
agaggcuaagccauaauagaaagaauggagaa

SEQ ID NO: 46915 - RNA, 32 nt, Human
agaggcuaaggcaggaaaaucgcuugaaccca

SEQ ID NO: 46916 - RNA, 32 nt, Human
agaggcuaaggcaggagaauugcuugaaccug

SEQ ID NO: 46917 - RNA, 32 nt, Human
agaggcuacaaggacuuagugcaucagaugua

SEQ ID NO: 46918 - RNA, 23 nt, Human
agaggcuagaaucaucuuuccua

SEQ ID NO: 46919 - RNA, 32 nt, Human
agaggcuaggagaggcugggcccggugaaaag

SEQ ID NO: 46920 - RNA, 21 nt, Human
agaggcuauuuuugcuccaca

SEQ ID NO: 46921 - RNA, 32 nt, Human
agaggcucacugcccuaucuccuucuuuccuc

SEQ ID NO: 46922 - RNA, 32 nt, Human
agaggcucagcaaugucuucgaccacguggug

SEQ ID NO: 46923 - RNA, 32 nt, Human
agaggcucagcauccugcacaugcccuuucca

SEQ ID NO: 46924 - RNA, 32 nt, Human
agaggcucagccagcucagagcgcagccugga

SEQ ID NO: 46925 - RNA, 32 nt, Human
agaggcucagcccuagggaaaggcugcucuug

SEQ ID NO: 46926 - RNA, 32 nt, Human
agaggcucagcugaggcaagaagagcaccauc

SEQ ID NO: 46927 - RNA, 32 nt, Human
agaggcucagucuguugagucuguugugacug

SEQ ID NO: 46928 - RNA, 32 nt, Human
agaggcucccuaaugugcuccuguccuccaug

SEQ ID NO: 46929 - RNA, 32 nt, Human
agaggcucccucugccaagaaagcagagaucu

SEQ ID NO: 46930 - RNA, 32 nt, Human
agaggcuccuuucauaugccugaggccacacc

SEQ ID NO: 46931 - RNA, 32 nt, Human
agaggcucguauuguguuucugcugaccaaag

SEQ ID NO: 46932 - RNA, 32 nt, Human
agaggcucuagcugugugcggggccugaaggg

SEQ ID NO: 46933 - RNA, 32 nt, Human
agaggcucucuccuggugccugcaccugcacu

SEQ ID NO: 46934 - RNA, 24 nt, Human
agaggcucugugccgccgcuguca

SEQ ID NO: 46935 - RNA, 32 nt, Human
agaggcucuguggcgggggucccugagagugc

SEQ ID NO: 46936 - RNA, 32 nt, Human
agaggcugaacaugaauccacagaucagaaac

SEQ ID NO: 46937 - RNA, 32 nt, Human
agaggcugaacaugaauccacagaucagaaau

SEQ ID NO: 46938 - RNA, 32 nt, Human
agaggcugaaccgccccugccugccgcgcauc

SEQ ID NO: 46939 - RNA, 32 nt, Human
agaggcugaaggacagggaacucuccauuauu

SEQ ID NO: 46940 - RNA, 32 nt, Human
agaggcugacugcucacaccugggcagcacuc

SEQ ID NO: 46941 - RNA, 31 nt, Human
agaggcugacuucugcccccuugucaaggag

SEQ ID NO: 46942 - RNA, 32 nt, Human
agaggcugagagaagaaggaagaaucagccca

SEQ ID NO: 46943 - RNA, 32 nt, Human
agaggcugagccaggaggaucgcuugagccca

SEQ ID NO: 46944 - RNA, 32 nt, Human
agaggcugagccgggaagauugcuugagccca

SEQ ID NO: 46945 - RNA, 32 nt, Human
agaggcugagcugagugcgcgugagaaagagg

SEQ ID NO: 46946 - RNA, 32 nt, Human
agaggcugaggcacgagaauugcuugaaccca

SEQ ID NO: 46947 - RNA, 32 nt, Human
agaggcugaggcagcagaauugcuugaacccg

SEQ ID NO: 46948 - RNA, 32 nt, Human
agaggcugaggcaggaaaaucgcuugaacccg

SEQ ID NO: 46949 - RNA, 32 nt, Human
agaggcugaggcaggaaaaucgcuugaaccug

SEQ ID NO: 46950 - RNA, 32 nt, Human
agaggcugaggcaggaaaauugcuugaaccug

SEQ ID NO: 46951 - RNA, 32 nt, Human
agaggcugaggcaggagaaucgccugaaccca

SEQ ID NO: 46952 - RNA, 32 nt, Human
agaggcugaggcaggagaaucgcuugaaccca

SEQ ID NO: 46953 - RNA, 32 nt, Human
agaggcugaggcaggagaaucgcuugaaccug

SEQ ID NO: 46954 - RNA, 32 nt, Human
agaggcugaggcaggagaaucgcuugaacuug

SEQ ID NO: 46955 - RNA, 32 nt, Human
agaggcugaggcaggagaauugcuugaaccca

SEQ ID NO: 46956 - RNA, 32 nt, Human
agaggcugaggcaggagaauugcuugaaccug

SEQ ID NO: 46957 - RNA, 32 nt, Human
agaggcugaggcaggagaauugcuugaacgcg

SEQ ID NO: 46958 - RNA, 32 nt, Human
agaggcugaggcaggaggacugcuugagccca

SEQ ID NO: 46959 - RNA, 32 nt, Human
agaggcugaggcaggaggaucccuugagccca

SEQ ID NO: 46960 - RNA, 32 nt, Human
agaggcugaggcaggaggaucgcuugaacccg

SEQ ID NO: 46961 - RNA, 32 nt, Human
agaggcugaggcaggaggauugcuggaggcca

SEQ ID NO: 46962 - RNA, 32 nt, Human
agaggcugaggcaggaggauugcuugagcccu

SEQ ID NO: 46963 - RNA, 32 nt, Human
agaggcugaggcaggaggauugcuugagucca

SEQ ID NO: 46964 - RNA, 32 nt, Human
agaggcugaggcaugaggaucucuugaacccg

SEQ ID NO: 46965 - RNA, 32 nt, Human
agaggcugaggccagagaaucgcuugaaccug

SEQ ID NO: 46966 - RNA, 32 nt, Human
agaggcugaggcgggaggaucgcuugagccaa

SEQ ID NO: 46967 - RNA, 32 nt, Human
agaggcugaggcgggaggauugcuugagccca

SEQ ID NO: 46968 - RNA, 32 nt, Human
agaggcugaggcuggagaaucgcuugaacccg

SEQ ID NO: 46969 - RNA, 32 nt, Human
agaggcugagguaggaggaucgccugaccagg

SEQ ID NO: 46970 - RNA, 32 nt, Human
agaggcugaggugagaggagcaagugagccca

SEQ ID NO: 46971 - RNA, 32 nt, Human
agaggcugaggugggagaaucgcuugaacccg

SEQ ID NO: 46972 - RNA, 32 nt, Human
agaggcugaggugggaggaucgcuugagcccc

SEQ ID NO: 46973 - RNA, 32 nt, Human
agaggcugaggugggaggauugcuugagccca

SEQ ID NO: 46974 - RNA, 32 nt, Human
agaggcugagucaggagaauugcuugaacccu

SEQ ID NO: 46975 - RNA, 31 nt, Human
agaggcugaguggaaagguggucuggagccc

SEQ ID NO: 46976 - RNA, 32 nt, Human
agaggcugauugaggaguccugcuggcccacu

SEQ ID NO: 46977 - RNA, 32 nt, Human
agaggcugauuucuccccucuccugggccagg

SEQ ID NO: 46978 - RNA, 32 nt, Human
agaggcugcaauaaggugccaugaaaucaaaa

SEQ ID NO: 46979 - RNA, 32 nt, Human
agaggcugcaauauuccauccugggugucugg

SEQ ID NO: 46980 - RNA, 32 nt, Human
agaggcugcaauauuccguccugggugucugg

SEQ ID NO: 46981 - RNA, 32 nt, Human
agaggcugcacccuccaaccucccauuggcuc

SEQ ID NO: 46982 - RNA, 32 nt, Human
agaggcugcacucuagccugggcaacagagca

SEQ ID NO: 46983 - RNA, 23 nt, Human
agaggcugcaggaacuugugugg

SEQ ID NO: 46984 - RNA, 32 nt, Human
agaggcugcaggacugggcacagcaugagauc

SEQ ID NO: 46985 - RNA, 32 nt, Human
agaggcugcaucacucagcucuuuuucuugca

SEQ ID NO: 46986 - RNA, 32 nt, Human
agaggcugccucugugugugguuuaaguaaac

SEQ ID NO: 46987 - RNA, 32 nt, Human
agaggcugccuuucugguuccaucuccuuggg

SEQ ID NO: 46988 - RNA, 32 nt, Human
agaggcugcuccugccugcuucgaucauuucu

SEQ ID NO: 46989 - RNA, 32 nt, Human
agaggcugcucuggagaacaaugagguccuca

SEQ ID NO: 46990 - RNA, 32 nt, Human
agaggcugcugaggccugggccccaggggcgu

SEQ ID NO: 46991 - RNA, 32 nt, Human
agaggcugcugagggcagaggaugcaacacua

SEQ ID NO: 46992 - RNA, 32 nt, Human
agaggcuggaaugggugucccagcaagagaug

SEQ ID NO: 46993 - RNA, 32 nt, Human
agaggcuggacagagggaggauucaagucggg

SEQ ID NO: 46994 - RNA, 32 nt, Human
agaggcuggaggaucauuucagcccaggaggu

SEQ ID NO: 46995 - RNA, 32 nt, Human
agaggcuggcaaugcuguuucacuggaggaca

SEQ ID NO: 46996 - RNA, 32 nt, Human
agaggcuggcacugagccugcuuguugggaaa

SEQ ID NO: 46997 - RNA, 32 nt, Human
agaggcugggccaggcuucaguucaggccugu

SEQ ID NO: 46998 - RNA, 32 nt, Human
agaggcugggcugguuuaucuccucugccuag

SEQ ID NO: 46999 - RNA, 32 nt, Human
agaggcuggggugggcagauugcuugagcuga

SEQ ID NO: 47000 - RNA, 19 nt, Human
agaggcugggugggccagg

SEQ ID NO: 47001 - RNA, 32 nt, Human
agaggcuggugagggagcaggaagcagugugu

SEQ ID NO: 47002 - RNA, 32 nt, Human
agaggcuguagacccuccgcucuugggcacgu

SEQ ID NO: 47003 - RNA, 32 nt, Human
agaggcugucauauaucaaagcagcucaggug

SEQ ID NO: 47004 - RNA, 32 nt, Human
agaggcugucccuggaccuggagcugcaggca

SEQ ID NO: 47005 - RNA, 32 nt, Human
agaggcugucccuugcagacacaugccccuuu

SEQ ID NO: 47006 - RNA, 32 nt, Human
agaggcugugaagugcugaaucaccuuuaaug

SEQ ID NO: 47007 - RNA, 31 nt, Human
agaggcugugggcugucacagaugcuguguc

SEQ ID NO: 47008 - RNA, 32 nt, Human
agaggcugugugagaagcugcagccgccggca

SEQ ID NO: 47009 - RNA, 32 nt, Human
agaggcuuaccccuguaagaacagauauaagu

SEQ ID NO: 47010 - RNA, 32 nt, Human
agaggcuuagaggcgagugggaagggacucag

SEQ ID NO: 47011 - RNA, 32 nt, Human
agaggcuucaccagcugaauucugugccuaac

SEQ ID NO: 47012 - RNA, 32 nt, Human
agaggcuuccacccugcucacauguugggaau

SEQ ID NO: 47013 - RNA, 32 nt, Human
agaggcuucccuggcuggugccugagcccggc

SEQ ID NO: 47014 - RNA, 32 nt, Human
agaggcuuccuugagccacccuucccacccca

SEQ ID NO: 47015 - RNA, 32 nt, Human
agaggcuucuccccagcucugugcuuccacug

SEQ ID NO: 47016 - RNA, 32 nt, Human
agaggcuugaaccuggcaccacaggggucugg

SEQ ID NO: 47017 - RNA, 32 nt, Human
agaggcuugacucgucucaggugcaauccuua

SEQ ID NO: 47018 - RNA, 32 nt, Human
agaggcuugccuggcuauuccuguucuggugu

SEQ ID NO: 47019 - RNA, 32 nt, Human
agaggcuuggaccugggcagcuccugccccuc

SEQ ID NO: 47020 - RNA, 32 nt, Human
agaggcuugggaugaagggugggugaaguuga

SEQ ID NO: 47021 - RNA, 32 nt, Human
agaggcuuguaaccugaacuucuguguggugg

SEQ ID NO: 47022 - RNA, 32 nt, Human
agaggcuuguaagagcagauugacaggugaau

SEQ ID NO: 47023 - RNA, 32 nt, Human
agaggcuuguuggaaucaauucugcacaauag

SEQ ID NO: 47024 - RNA, 32 nt, Human
agaggcuuuccagauuguucuaaagaagacuu

SEQ ID NO: 47025 - RNA, 32 nt, Human
agaggcuuucucucugaccucauuccaagauc

SEQ ID NO: 47026 - RNA, 32 nt, Human
agagggaaaauaaccuguccaaagucacacag

SEQ ID NO: 47027 - RNA, 32 nt, Human
agagggaaaaugacugcgcccagccugauuua

SEQ ID NO: 47028 - RNA, 20 nt, Human
agagggaaaauugcagggac

SEQ ID NO: 47029 - RNA, 32 nt, Human
agagggaaacacagcagcaucucuccacugaa

SEQ ID NO: 47030 - RNA, 32 nt, Human
agagggaaacauuugugcuuuuagggauaauc

SEQ ID NO: 47031 - RNA, 32 nt, Human
agagggaaagcgacccagacagcagccccucc

SEQ ID NO: 47032 - RNA, 32 nt, Human
agagggaaagcgagagggagacggacguugag

SEQ ID NO: 47033 - RNA, 32 nt, Human
agagggaaagucacuugcccaaagucacccag

SEQ ID NO: 47034 - RNA, 21 nt, Human
agagggaaauuuauagcacua

SEQ ID NO: 47035 - RNA, 32 nt, Human
agagggaacaguugggacuagaagcaaaagug

SEQ ID NO: 47036 - RNA, 32 nt, Human
agagggaagagagagggaugagagggagggag

SEQ ID NO: 47037 - RNA, 32 nt, Human
agagggaagagcaaaccccagcgagauccccc

SEQ ID NO: 47038 - RNA, 32 nt, Human
agagggaagaggagagaaaagacagggacuuu

SEQ ID NO: 47039 - RNA, 32 nt, Human
agagggaagcccuugcugccugccauucccag

SEQ ID NO: 47040 - RNA, 32 nt, Human
agagggaagccuauuuuguuaacugguuuggg

SEQ ID NO: 47041 - RNA, 32 nt, Human
agagggaaggaggaggaggaggagcaaaggug

SEQ ID NO: 47042 - RNA, 32 nt, Human
agagggaaguggagaggguaggcugggaccag

SEQ ID NO: 47043 - RNA, 32 nt, Human
agagggacaacauccaaacuguuugcaguagg

SEQ ID NO: 47044 - RNA, 32 nt, Human
agagggaccagaacuuccccucccuuccccuu

SEQ ID NO: 47045 - RNA, 32 nt, Human
agagggaccuggcaggcagagcuccagaaggg

SEQ ID NO: 47046 - RNA, 32 nt, Human
agagggacguggggagaaagaagccagaagcc

SEQ ID NO: 47047 - RNA, 32 nt, Human
agagggacugagacccagggaggcugaaugac

SEQ ID NO: 47048 - RNA, 32 nt, Human
agagggacugcacucuugucagggaagcccua

SEQ ID NO: 47049 - RNA, 32 nt, Human
agagggacugccuucucccaaaaggagcuccc

SEQ ID NO: 47050 - RNA, 32 nt, Human
agagggacugggcggcuugucccaggcugcug

SEQ ID NO: 47051 - RNA, 32 nt, Human
agagggacugugugagaagggaagagacugcu

SEQ ID NO: 47052 - RNA, 22 nt, Human
agagggagaaaacgaaggggag

SEQ ID NO: 47053 - RNA, 32 nt, Human
agagggagaaauguucauugcacagagaaugu

SEQ ID NO: 47054 - RNA, 32 nt, Human
agagggagaccccauuccaagcucccucuucc

SEQ ID NO: 47055 - RNA, 32 nt, Human
agagggagagaagggcuccccagaucuacacc

SEQ ID NO: 47056 - RNA, 20 nt, Human
agagggagagagaagaagag

SEQ ID NO: 47057 - RNA, 32 nt, Human
agagggagagagaagaagaggaagaagaggag

SEQ ID NO: 47058 - RNA, 32 nt, Human
agagggagagagaagcaggagagggggaggaa

SEQ ID NO: 47059 - RNA, 32 nt, Human
agagggagagagaaggugacacggauggaaga

SEQ ID NO: 47060 - RNA, 32 nt, Human
agagggagagagaggcccgcccgcucgccggc

SEQ ID NO: 47061 - RNA, 23 nt, Human
agagggagagaggcagagaggga

SEQ ID NO: 47062 - RNA, 32 nt, Human
agagggagaggacaggaggaggagccuucccc

SEQ ID NO: 47063 - RNA, 32 nt, Human
agagggagaggcugcuggacgagguggaggag

SEQ ID NO: 47064 - RNA, 32 nt, Human
agagggagagguuuucuagucugcaaacugaa

SEQ ID NO: 47065 - RNA, 32 nt, Human
agagggagagugagaucuuggggcuuagagga

SEQ ID NO: 47066 - RNA, 32 nt, Human
agagggagaugagagagcucucuggacaggaa

SEQ ID NO: 47067 - RNA, 32 nt, Human
agagggagauuauauccccaacuccagggacc

SEQ ID NO: 47068 - RNA, 32 nt, Human
agagggagauucuugacuagggccaaggcuaa

SEQ ID NO: 47069 - RNA, 32 nt, Human
agagggagcaacacccuuccacccuccugcuc

SEQ ID NO: 47070 - RNA, 32 nt, Human
agagggagcaccaggcccugcaggaccucgug

SEQ ID NO: 47071 - RNA, 32 nt, Human
agagggagcacucgauacacaccgaugggcug

SEQ ID NO: 47072 - RNA, 32 nt, Human
agagggagcagcgggcacgaucaaagagacac

SEQ ID NO: 47073 - RNA, 32 nt, Human
agagggagcaggcagagggugggggaccuggc

SEQ ID NO: 47074 - RNA, 32 nt, Human
agagggagcccaugggcuguuugaauuuggga

SEQ ID NO: 47075 - RNA, 19 nt, Human
agagggagcccuccaggag

SEQ ID NO: 47076 - RNA, 32 nt, Human
agagggagccuccugcucccugcuccaggaug

SEQ ID NO: 47077 - RNA, 32 nt, Human
agagggagccuguaccagccugccuucuccag

SEQ ID NO: 47078 - RNA, 32 nt, Human
agagggagcgagagaauggcuccaaccuggcc

SEQ ID NO: 47079 - RNA, 32 nt, Human
agagggagcugggaaggaaggaagggggcgcu

SEQ ID NO: 47080 - RNA, 32 nt, Human
agagggagcuggucuccagccaggugagcaac

SEQ ID NO: 47081 - RNA, 20 nt, Human
agagggaggaagaaagggag

SEQ ID NO: 47082 - RNA, 32 nt, Human
agagggaggaagcagggaagaaauggccagaa

SEQ ID NO: 47083 - RNA, 32 nt, Human
agagggaggagaggcgcggggagccaggccuc

SEQ ID NO: 47084 - RNA, 32 nt, Human
agagggaggaggaaaggaaggagagagaugcc

SEQ ID NO: 47085 - RNA, 32 nt, Human
agagggaggaggccacggagacuuggagcauu

SEQ ID NO: 47086 - RNA, 32 nt, Human
agagggaggcaggugggaauugagggugaggg

SEQ ID NO: 47087 - RNA, 32 nt, Human
agagggaggcggggcggaaaggcgagaggugu

SEQ ID NO: 47088 - RNA, 20 nt, Human
agagggagggaaggcagagc

SEQ ID NO: 47089 - RNA, 32 nt, Human
agagggagggagaagagagauaguggguaugc

SEQ ID NO: 47090 - RNA, 32 nt, Human
agagggagggagagagaaagacgaagggagag

SEQ ID NO: 47091 - RNA, 32 nt, Human
agagggagggaggaaggaaggaagggaggaag

SEQ ID NO: 47092 - RNA, 20 nt, Human
agagggagggccgggccagg

SEQ ID NO: 47093 - RNA, 32 nt, Human
agagggaggggaggggcugagcugugaggaga

SEQ ID NO: 47094 - RNA, 32 nt, Human
agagggaggguuuaguacaugggagggcuagc

SEQ ID NO: 47095 - RNA, 32 nt, Human
agagggagugcuuccuggaggagguggcauca

SEQ ID NO: 47096 - RNA, 32 nt, Human
agagggaguggagcccagggagagggagcgcg

SEQ ID NO: 47097 - RNA, 32 nt, Human
agagggaguggagggucaggugagaucucaga

SEQ ID NO: 47098 - RNA, 32 nt, Human
agagggaguugucacgcuacagugaguggcug

SEQ ID NO: 47099 - RNA, 32 nt, Human
agagggaucaagcacaggcuaaggagaggaaa

SEQ ID NO: 47100 - RNA, 32 nt, Human
agagggaucacgaccucagcagagccaggaga

SEQ ID NO: 47101 - RNA, 32 nt, Human
agagggaugagggggagcaggagggcaggcgu

SEQ ID NO: 47102 - RNA, 32 nt, Human
agagggaugaggugcugggagggauagagggg

SEQ ID NO: 47103 - RNA, 32 nt, Human
agagggauguguggggacuaugggcaaacaga

SEQ ID NO: 47104 - RNA, 32 nt, Human
agagggauugagccaagaggugagggugcacg

SEQ ID NO: 47105 - RNA, 32 nt, Human
agagggcaaggagagagcagagaacacacuuu

SEQ ID NO: 47106 - RNA, 32 nt, Human
agagggcaaggcagagcgcaagccccaugacu

SEQ ID NO: 47107 - RNA, 32 nt, Human
agagggcaaguggaugggaauuugucagcguu

SEQ ID NO: 47108 - RNA, 32 nt, Human
agagggcaaugggauuaaaccaaccugcuugg

SEQ ID NO: 47109 - RNA, 19 nt, Human
agagggcacagcccuccuc

SEQ ID NO: 47110 - RNA, 32 nt, Human
agagggcagaaaaggccuauauggauggagaa

SEQ ID NO: 47111 - RNA, 32 nt, Human
agagggcagaugcagagcaggugguaguggga

SEQ ID NO: 47112 - RNA, 32 nt, Human
agagggcagccuggcucccucccaggccaagg

SEQ ID NO: 47113 - RNA, 32 nt, Human
agagggcaggcugagccagggagcaaaaaggc

SEQ ID NO: 47114 - RNA, 32 nt, Human
agagggcaggguggugacugaggaccagcucc

SEQ ID NO: 47115 - RNA, 32 nt, Human
agagggcauauggggcccugccaacaccacuu

SEQ ID NO: 47116 - RNA, 32 nt, Human
agagggccacacccacccuguccagaguagag

SEQ ID NO: 47117 - RNA, 32 nt, Human
agagggccacacugcaaccucagcuuaacaug

SEQ ID NO: 47118 - RNA, 32 nt, Human
agagggccagagcgucggggaggcaagaugau

SEQ ID NO: 47119 - RNA, 32 nt, Human
agagggccagcucccagccucuugcuuccugg

SEQ ID NO: 47120 - RNA, 32 nt, Human
agagggccagggcugaguucacgggcucuuuc

SEQ ID NO: 47121 - RNA, 32 nt, Human
agagggccauuuucaugaccagagggaucugu

SEQ ID NO: 47122 - RNA, 32 nt, Human
agagggcccacagggggaugggcuggcugugg

SEQ ID NO: 47123 - RNA, 32 nt, Human
agagggcccagaguuccuucuccacccccgcu

SEQ ID NO: 47124 - RNA, 17 nt, Human
agagggcccuccaggaa

SEQ ID NO: 47125 - RNA, 32 nt, Human
agagggcccuggaaggaagggucuccugcugc

SEQ ID NO: 47126 - RNA, 32 nt, Human
agagggccuaggacagagucuuaaauaauacu

SEQ ID NO: 47127 - RNA, 32 nt, Human
agagggccuccuuccagggaggaguaggaugg

SEQ ID NO: 47128 - RNA, 32 nt, Human
agagggccuggagugaggacugaacacugggg

SEQ ID NO: 47129 - RNA, 32 nt, Human
agagggccugggagaagagucugacgagcaag

SEQ ID NO: 47130 - RNA, 32 nt, Human
agagggccugggccaccaucggccgcacccac

SEQ ID NO: 47131 - RNA, 32 nt, Human
agagggcgaaggcaggaaggggagugagaaag

SEQ ID NO: 47132 - RNA, 32 nt, Human
agagggcgacucugguggugcuuuuguauguu

SEQ ID NO: 47133 - RNA, 32 nt, Human
agagggcggcacagcuucuauaggagcacagg

SEQ ID NO: 47134 - RNA, 32 nt, Human
agagggcggggugcaggcggaauggcccucgu

SEQ ID NO: 47135 - RNA, 32 nt, Human
agagggcucuauacuccuuaugugacugcagc

SEQ ID NO: 47136 - RNA, 20 nt, Human
agagggcugagcaacucagg

SEQ ID NO: 47137 - RNA, 32 nt, Human
agagggcugagcagcucaggaagccuguaaug

SEQ ID NO: 47138 - RNA, 32 nt, Human
agagggcuggauggacuggcccauggaaguaa

SEQ ID NO: 47139 - RNA, 32 nt, Human
agagggcugggcggggaggagcugcuacugcu

SEQ ID NO: 47140 - RNA, 32 nt, Human
agagggcugggcucccagacuccugggugcug

SEQ ID NO: 47141 - RNA, 32 nt, Human
agagggcugggugggagcccagaaggauagaa

SEQ ID NO: 47142 - RNA, 32 nt, Human
agagggcuugcaucacgucacuccagugguuc

SEQ ID NO: 47143 - RNA, 32 nt, Human
agagggcuuuuguaaauuaugcauuuauugua

SEQ ID NO: 47144 - RNA, 32 nt, Human
agaggggaaaugagaggguccugcaggcagag

SEQ ID NO: 47145 - RNA, 32 nt, Human
agaggggaagccccagcgccgagaagcccgcu

SEQ ID NO: 47146 - RNA, 32 nt, Human
agaggggaaggaggaggaagaaguguaagaag

SEQ ID NO: 47147 - RNA, 32 nt, Human
agaggggaaggaggugcgacgccccuuacauc

SEQ ID NO: 47148 - RNA, 32 nt, Human
agaggggaaggccuucgggaagaggcuuccug

SEQ ID NO: 47149 - RNA, 32 nt, Human
agaggggaaugagggcugaguuaugaaaagau

SEQ ID NO: 47150 - RNA, 32 nt, Human
agaggggacacauggguguccagggagaaggc

SEQ ID NO: 47151 - RNA, 32 nt, Human
agaggggagacugugguagaaggaagacagaa

SEQ ID NO: 47152 - RNA, 32 nt, Human
agaggggagagggacgcacagcacugccugcc

SEQ ID NO: 47153 - RNA, 32 nt, Human
agaggggagcccacugcccugaagggagagac

SEQ ID NO: 47154 - RNA, 32 nt, Human
agaggggagcugcgggccagagccccggaggg

SEQ ID NO: 47155 - RNA, 32 nt, Human
agaggggaggaaagccaagggaagggaccuaa

SEQ ID NO: 47156 - RNA, 32 nt, Human
agaggggaggcaggggccccugugcucucuga

SEQ ID NO: 47157 - RNA, 32 nt, Human
agaggggaggcuggggucacagcuggccacug

SEQ ID NO: 47158 - RNA, 32 nt, Human
agaggggagggaugccugggaagugguuaaca

SEQ ID NO: 47159 - RNA, 32 nt, Human
agaggggaggggagaggccauggccgucccag

SEQ ID NO: 47160 - RNA, 32 nt, Human
agaggggaggggccuagggagccccaccuugu

SEQ ID NO: 47161 - RNA, 32 nt, Human
agaggggagguggaguuggaaauguggguguu

SEQ ID NO: 47162 - RNA, 32 nt, Human
agaggggauaggaggagggaaacacuagacaa

SEQ ID NO: 47163 - RNA, 32 nt, Human
agaggggcacaagauggagggagcaugucagg

SEQ ID NO: 47164 - RNA, 32 nt, Human
agaggggcagcuuuauacagaggaggggcaca

SEQ ID NO: 47165 - RNA, 22 nt, Human
agaggggcaggaccugcaggga

SEQ ID NO: 47166 - RNA, 32 nt, Human
agaggggcaggaccugcagggaagaagcagcc

SEQ ID NO: 47167 - RNA, 23 nt, Human
agaggggcaguguuugcaaggga

SEQ ID NO: 47168 - RNA, 32 nt, Human
agaggggccacuucuucagggugagccccggc

SEQ ID NO: 47169 - RNA, 32 nt, Human
agaggggccauccucagggugaggacgggauc

SEQ ID NO: 47170 - RNA, 17 nt, Human
agaggggcccauucaua

SEQ ID NO: 47171 - RNA, 32 nt, Human
agaggggcccuagagcccccacagaaaggacu

SEQ ID NO: 47172 - RNA, 32 nt, Human
agaggggcccuggcgcaaacauuuauccuggg

SEQ ID NO: 47173 - RNA, 23 nt, Human
agaggggcggaagccgcaaggga

SEQ ID NO: 47174 - RNA, 32 nt, Human
agaggggcgggggcgagagggaagugggcggg

SEQ ID NO: 47175 - RNA, 32 nt, Human
agaggggcucaggaacugggagccucgugggu

SEQ ID NO: 47176 - RNA, 32 nt, Human
agaggggcugccaguccucucugggccgcagc

SEQ ID NO: 47177 - RNA, 32 nt, Human
agaggggcuggcugggucccuuugucagacuc

SEQ ID NO: 47178 - RNA, 32 nt, Human
agaggggcugggccucucuuugcacauggaca

SEQ ID NO: 47179 - RNA, 20 nt, Human
agagggggagagaaggagag

SEQ ID NO: 47180 - RNA, 22 nt, Human
agagggggaggaagaggaggag

SEQ ID NO: 47181 - RNA, 21 nt, Human
agagggggaggagaaggagga

SEQ ID NO: 47182 - RNA, 32 nt, Human
agagggggaggcagcccuucccagggacucgg

SEQ ID NO: 47183 - RNA, 32 nt, Human
agagggggaggccuucgggaagaggcuuccug

SEQ ID NO: 47184 - RNA, 32 nt, Human
agagggggcaucugaacgcagagcagggagcu

SEQ ID NO: 47185 - RNA, 32 nt, Human
agagggggccugggacuuccaugccuuaaacc

SEQ ID NO: 47186 - RNA, 32 nt, Human
agagggggcugcagguuuuuaagagagcagcu

SEQ ID NO: 47187 - RNA, 32 nt, Human
agagggggcuggggcgcacggagaagcagguc

SEQ ID NO: 47188 - RNA, 32 nt, Human
agagggggcugggggugggugggcagggcuuu

SEQ ID NO: 47189 - RNA, 32 nt, Human
agaggggguaagaccuuccugggaccgcaaaa

SEQ ID NO: 47190 - RNA, 32 nt, Human
agaggggguagguuuggagggaggccauuuuc

SEQ ID NO: 47191 - RNA, 21 nt, Human
agagggggucagagaagggga

SEQ ID NO: 47192 - RNA, 32 nt, Human
agagggggucuauuugggaggaaagguguggc

SEQ ID NO: 47193 - RNA, 31 nt, Human
agagggggugagagagggcaggcggggacug

SEQ ID NO: 47194 - RNA, 32 nt, Human
agagggggugggggagccagccucccagcgug

SEQ ID NO: 47195 - RNA, 32 nt, Human
agagggggugggggugggggaggggagagggg

SEQ ID NO: 47196 - RNA, 21 nt, Human
agaggggguuucaccacguug

SEQ ID NO: 47197 - RNA, 20 nt, Human
agaggggguuucaccauguu

SEQ ID NO: 47198 - RNA, 21 nt, Human
agaggggguuucaccauguug

SEQ ID NO: 47199 - RNA, 32 nt, Human
agaggggguuucaccauguuggcuagcugguc

SEQ ID NO: 47200 - RNA, 32 nt, Human
agagggguauacacagggaggccaggcagccu

SEQ ID NO: 47201 - RNA, 32 nt, Human
agaggggucaaagaaggaggaggagggugggg

SEQ ID NO: 47202 - RNA, 32 nt, Human
agaggggucgcuugugugcaugugugugcuau

SEQ ID NO: 47203 - RNA, 19 nt, Human
agaggggugagcuggagga

SEQ ID NO: 47204 - RNA, 32 nt, Human
agaggggugaggcccuggggaggcagggguug

SEQ ID NO: 47205 - RNA, 32 nt, Human
agaggggugcaaggcccugccugcuccacuuu

SEQ ID NO: 47206 - RNA, 32 nt, Human
agaggggugcagaagagagagcagagccccuu

SEQ ID NO: 47207 - RNA, 32 nt, Human
agaggggugcuggugggcucugcagggcccgc

SEQ ID NO: 47208 - RNA, 32 nt, Human
agaggggugcugucugccacuugcucccugcc

SEQ ID NO: 47209 - RNA, 32 nt, Human
agagggguggccuggggugcuucaugagaaau

SEQ ID NO: 47210 - RNA, 32 nt, Human
agaggggugggcaggugggaguagcugaggaa

SEQ ID NO: 47211 - RNA, 32 nt, Human
agagggguggggcuccugccugcuccauggag

SEQ ID NO: 47212 - RNA, 32 nt, Human
agagggguuccugcccaggaucuuacaacaca

SEQ ID NO: 47213 - RNA, 32 nt, Human
agagggguucuuuagggagugcuucuggggaa

SEQ ID NO: 47214 - RNA, 32 nt, Human
agagggguugcuggaggugacaaggauugggu

SEQ ID NO: 47215 - RNA, 32 nt, Human
agaggguaaaaauguaugagcagcuuaacuga

SEQ ID NO: 47216 - RNA, 32 nt, Human
agaggguagggagggguggacaaaaguauuua

SEQ ID NO: 47217 - RNA, 32 nt, Human
agaggguaguaucuguggguccuggccuuucu

SEQ ID NO: 47218 - RNA, 22 nt, Human
agaggguagugggugggcuagg

SEQ ID NO: 47219 - RNA, 32 nt, Human
agagggucacaguccaugaucugaccaacuaa

SEQ ID NO: 47220 - RNA, 32 nt, Human
agaggguccccaguccuggccucugcccgccc

SEQ ID NO: 47221 - RNA, 32 nt, Human
agaggguccuggaggugggguugauggguuuc

SEQ ID NO: 47222 - RNA, 32 nt, Human
agagggucggggcuugcccuccaccuuggacu

SEQ ID NO: 47223 - RNA, 32 nt, Human
agagggugaacaaauggggcauucaaguugug

SEQ ID NO: 47224 - RNA, 32 nt, Human
agagggugaaggagaaauaagguaaaggggaa

SEQ ID NO: 47225 - RNA, 21 nt, Human
agagggugagagccaccauca

SEQ ID NO: 47226 - RNA, 32 nt, Human
agagggugagagccaccaucacucauguucuu

SEQ ID NO: 47227 - RNA, 32 nt, Human
agagggugagcgacaugugcagaacggccccu

SEQ ID NO: 47228 - RNA, 32 nt, Human
agagggugaggcaggagaaucgcuugaaccug

SEQ ID NO: 47229 - RNA, 32 nt, Human
agagggugaugagacaggacuagaaaguagug

SEQ ID NO: 47230 - RNA, 32 nt, Human
agagggugcuaguaccaacacagggaaaacgg

SEQ ID NO: 47231 - RNA, 32 nt, Human
agagggugcuuacaaccuugacucccuuucuc

SEQ ID NO: 47232 - RNA, 32 nt, Human
agaggguggcagaaggaaugcgugggugacuu

SEQ ID NO: 47233 - RNA, 32 nt, Human
agaggguggccguccucacaccugugcgcagc

SEQ ID NO: 47234 - RNA, 31 nt, Human
agaggguggguggcagaggggagcagagcca

SEQ ID NO: 47235 - RNA, 32 nt, Human
agagggugugugagcgacaugggcccagcauc

SEQ ID NO: 47236 - RNA, 32 nt, Human
agaggguguuuguggugaagaggcagaaccga

SEQ ID NO: 47237 - RNA, 32 nt, Human
agaggguuaagggaacaacagagauggggcug

SEQ ID NO: 47238 - RNA, 32 nt, Human
agaggguugaggagaugagggagaagcagcaa

SEQ ID NO: 47239 - RNA, 32 nt, Human
agaggguuucacuugcucugaagacccugguc

SEQ ID NO: 47240 - RNA, 32 nt, Human
agaggguuugaguuuccacauggcugaucccu

SEQ ID NO: 47241 - RNA, 32 nt, Human
agagguaaaaagaugauggaagguguggugac

SEQ ID NO: 47242 - RNA, 32 nt, Human
agagguaaaggaggcagggugggggagcccug

SEQ ID NO: 47243 - RNA, 19 nt, Human
agagguaaaggguggggca

SEQ ID NO: 47244 - RNA, 32 nt, Human
agagguaagacagagagaggggcacaggaugu

SEQ ID NO: 47245 - RNA, 21 nt, Human
agagguaagaggaagaggcag

SEQ ID NO: 47246 - RNA, 32 nt, Human
agagguaaggggugaggaugugauugauuucc

SEQ ID NO: 47247 - RNA, 32 nt, Human
agagguacagccugacgcuauggcaggcugcc

SEQ ID NO: 47248 - RNA, 32 nt, Human
agagguacgagaugcccaaguuugucaguuga

SEQ ID NO: 47249 - RNA, 32 nt, Human
agagguacuagucaugcagucugguaccgacu

SEQ ID NO: 47250 - RNA, 32 nt, Human
agagguagaaaagauugggucuaggauauggu

SEQ ID NO: 47251 - RNA, 32 nt, Human
agagguagaaaggacauuggaaagagacagca

SEQ ID NO: 47252 - RNA, 32 nt, Human
agagguagcccaaaaaggggagugaucuuuca

SEQ ID NO: 47253 - RNA, 32 nt, Human
agagguagccccgggagaggcccucagggacc

SEQ ID NO: 47254 - RNA, 32 nt, Human
agagguagugagccaguguccugggccucugg

SEQ ID NO: 47255 - RNA, 32 nt, Human
agagguagugguagaacauccuacugauuuca

SEQ ID NO: 47256 - RNA, 32 nt, Human
agagguaucuuugucaaaagcuucugguucaa

SEQ ID NO: 47257 - RNA, 32 nt, Human
agagguaugugcugauuuguuuggauauuuga

SEQ ID NO: 47258 - RNA, 32 nt, Human
agaggucaagaguuugagaccagcuuggugaa

SEQ ID NO: 47259 - RNA, 32 nt, Human
agaggucacuaaaagaccaagaugggaaacgu

SEQ ID NO: 47260 - RNA, 32 nt, Human
agaggucagagggucugggcagaggagggacc

SEQ ID NO: 47261 - RNA, 32 nt, Human
agaggucagggaacuccuuacccuagccaggg

SEQ ID NO: 47262 - RNA, 32 nt, Human
agaggucaggggucagcuggagaggggcuggg

SEQ ID NO: 47263 - RNA, 32 nt, Human
agaggucagguguucaagaccagccugaccaa

SEQ ID NO: 47264 - RNA, 32 nt, Human
agagguccagaaggaaugaccauggagcggaa

SEQ ID NO: 47265 - RNA, 32 nt, Human
agaggucccuuagggucucuagaguugaaaau

SEQ ID NO: 47266 - RNA, 32 nt, Human
agaggucgccaaagccugcagccuggccuggg

SEQ ID NO: 47267 - RNA, 32 nt, Human
agaggucuauuuuuaccuacugugucuuggaa

SEQ ID NO: 47268 - RNA, 32 nt, Human
agaggucucccucaauccuccccuuuagggaa

SEQ ID NO: 47269 - RNA, 32 nt, Human
agaggucuccuggcagcccucauuaggaauuc

SEQ ID NO: 47270 - RNA, 32 nt, Human
agaggucucuccccagccucaggcagggauuu

SEQ ID NO: 47271 - RNA, 21 nt, Human
agaggucucucccuguccucc

SEQ ID NO: 47272 - RNA, 32 nt, Human
agaggucugaagccuuccuggccacaggcauc

SEQ ID NO: 47273 - RNA, 32 nt, Human
agaggucugcaggaagugacucccgggcaagg

SEQ ID NO: 47274 - RNA, 32 nt, Human
agaggucugcauucucauuggaaaugucuguu

SEQ ID NO: 47275 - RNA, 32 nt, Human
agaggucugcccagggugggagcagugucacu

SEQ ID NO: 47276 - RNA, 32 nt, Human
agaggucugcuccuuccugccaccuuucuccu

SEQ ID NO: 47277 - RNA, 32 nt, Human
agaggucuggaaaauuuugaugcaaagauggc

SEQ ID NO: 47278 - RNA, 32 nt, Human
agaggucugggacucaagagagacaucucagc

SEQ ID NO: 47279 - RNA, 32 nt, Human
agaggucuggggaggaugaagagcagaaagaa

SEQ ID NO: 47280 - RNA, 32 nt, Human
agaggucuguacaucacauacauaugcacaca

SEQ ID NO: 47281 - RNA, 32 nt, Human
agaggugaaaauggagguuucagggaaacugc

SEQ ID NO: 47282 - RNA, 32 nt, Human
agaggugaaagagaagccuggcucuguucacg

SEQ ID NO: 47283 - RNA, 32 nt, Human
agaggugaaaucuugcaaguuguagcaagagc

SEQ ID NO: 47284 - RNA, 32 nt, Human
agaggugaaggacauggagcagcugcuggccc

SEQ ID NO: 47285 - RNA, 32 nt, Human
agaggugaaggagucagagaggcgacaggaua

SEQ ID NO: 47286 - RNA, 32 nt, Human
agaggugaaguauucaggcugaucuggaacuc

SEQ ID NO: 47287 - RNA, 32 nt, Human
agaggugacaccauaaaguccugcugauaaug

SEQ ID NO: 47288 - RNA, 32 nt, Human
agaggugacaggaaggcugggagcagcuuugu

SEQ ID NO: 47289 - RNA, 32 nt, Human
agaggugacaucucccucccaccccucaucca

SEQ ID NO: 47290 - RNA, 32 nt, Human
agaggugagaagggagaaaggagggagugggc

SEQ ID NO: 47291 - RNA, 32 nt, Human
agaggugagaggaugggaaggagcagccaggc

SEQ ID NO: 47292 - RNA, 32 nt, Human
agaggugagggugugcuuuacuuuuugauaaa

SEQ ID NO: 47293 - RNA, 32 nt, Human
agaggugagguuucaccauguugcccaggcug

SEQ ID NO: 47294 - RNA, 32 nt, Human
agaggugcagagcgaggaggccggcaaauccc

SEQ ID NO: 47295 - RNA, 21 nt, Human
agaggugcagggaagaggcag

SEQ ID NO: 47296 - RNA, 32 nt, Human
agaggugccauccagccccugccgucuaucca

SEQ ID NO: 47297 - RNA, 32 nt, Human
agaggugccugggaggaguggcccugauccag

SEQ ID NO: 47298 - RNA, 32 nt, Human
agaggugcggacacuuuccagcaccugaaagc

SEQ ID NO: 47299 - RNA, 17 nt, Human
agaggugcggccgggga

SEQ ID NO: 47300 - RNA, 32 nt, Human
agaggugcucugaggauccagggccuuguguu

SEQ ID NO: 47301 - RNA, 32 nt, Human
agaggugcugugcugcuccacaaggcaaaaca

SEQ ID NO: 47302 - RNA, 32 nt, Human
agagguggaagagacagugugggcugagagca

SEQ ID NO: 47303 - RNA, 32 nt, Human
agagguggacagagaagacagcagagaccaug

SEQ ID NO: 47304 - RNA, 32 nt, Human
agagguggacccaggaggaguggcagguggug

SEQ ID NO: 47305 - RNA, 32 nt, Human
agagguggagaacgacaagcagcagcgcugca

SEQ ID NO: 47306 - RNA, 31 nt, Human
agagguggagcaaucucagguaaaggcaaaa

SEQ ID NO: 47307 - RNA, 32 nt, Human
agagguggaggaggaggaggaagagguggagg

SEQ ID NO: 47308 - RNA, 32 nt, Human
agagguggaggaggaggaggaggagguggugg

SEQ ID NO: 47309 - RNA, 32 nt, Human
agagguggagucuugcucuguuauccaggcug

SEQ ID NO: 47310 - RNA, 32 nt, Human
agagguggagucuugcuguguugcccaggaug

SEQ ID NO: 47311 - RNA, 32 nt, Human
agagguggauccuguaggcuaaaaggcuucca

SEQ ID NO: 47312 - RNA, 32 nt, Human
agagguggcagaggcagggccauaccaucauc

SEQ ID NO: 47313 - RNA, 32 nt, Human
agagguggcaggagaauuucuacugagcgagc

SEQ ID NO: 47314 - RNA, 32 nt, Human
agagguggcaggucuugcccuuuggccaacag

SEQ ID NO: 47315 - RNA, 32 nt, Human
agagguggcaguggagguuuguuaucgaccca

SEQ ID NO: 47316 - RNA, 32 nt, Human
agagguggcccugggcucacagcugguguuug

SEQ ID NO: 47317 - RNA, 32 nt, Human
agagguggcuuacaccuguaaucccaacacuu

SEQ ID NO: 47318 - RNA, 32 nt, Human
agaggugggaggacugauugaggccaggaguu

SEQ ID NO: 47319 - RNA, 32 nt, Human
agaggugggaggacugcuugaggccaggaguu

SEQ ID NO: 47320 - RNA, 32 nt, Human
agaggugggaggaugccuugagcuugagaggu

SEQ ID NO: 47321 - RNA, 32 nt, Human
agaggugggaggauggcuugagcccauaauca

SEQ ID NO: 47322 - RNA, 32 nt, Human
agaggugggaggauugagugaggccagaaguu

SEQ ID NO: 47323 - RNA, 32 nt, Human
agaggugggaggauugcuuggucccaggaguu

SEQ ID NO: 47324 - RNA, 32 nt, Human
agaggugggaggucagaggagaugggggccgg

SEQ ID NO: 47325 - RNA, 32 nt, Human
agaggugggaggucagaggagaugggggcugg

SEQ ID NO: 47326 - RNA, 32 nt, Human
agaggugggaggugggaggggaagggagaaau

SEQ ID NO: 47327 - RNA, 32 nt, Human
agaggugggagugagguuuucuggccugaagc

SEQ ID NO: 47328 - RNA, 32 nt, Human
agaggugggauagaggaagggagguuugagcc

SEQ ID NO: 47329 - RNA, 22 nt, Human
agaggugggcgugggugcuggu

SEQ ID NO: 47330 - RNA, 32 nt, Human
agagguggggguaaacaaugagcucaguuuua

SEQ ID NO: 47331 - RNA, 32 nt, Human
agagguggggucuugccacauugcccaggcug

SEQ ID NO: 47332 - RNA, 32 nt, Human
agagguggggugcuggggcugcaugauuuuug

SEQ ID NO: 47333 - RNA, 32 nt, Human
agaggugggguuucaccagguuggccaggcuu

SEQ ID NO: 47334 - RNA, 32 nt, Human
agaggugggguuucaccauauugcccagggug

SEQ ID NO: 47335 - RNA, 32 nt, Human
agaggugggguuucaccaucuuggccaggcug

SEQ ID NO: 47336 - RNA, 32 nt, Human
agaggugggguuucaccaugcuggucaggaug

SEQ ID NO: 47337 - RNA, 32 nt, Human
agaggugggguuucaccguguuggucaggcug

SEQ ID NO: 47338 - RNA, 32 nt, Human
agaggugggguuucaucguguuaccaggaugg

SEQ ID NO: 47339 - RNA, 32 nt, Human
agaggugggguuuuacuaugcuguccagacug

SEQ ID NO: 47340 - RNA, 32 nt, Human
agaggugggguuuugccauguuggccaggcug

SEQ ID NO: 47341 - RNA, 32 nt, Human
agagguggguggaucacucaaguccaggaguu

SEQ ID NO: 47342 - RNA, 32 nt, Human
agagguguacauucuagaaacagcuguuaaca

SEQ ID NO: 47343 - RNA, 32 nt, Human
agagguguauauacagggaggccaggcagccu

SEQ ID NO: 47344 - RNA, 32 nt, Human
agaggugucaugaagaaaguucuguucaauaa

SEQ ID NO: 47345 - RNA, 32 nt, Human
agaggugucuuugcuugguuugguggggcugc

SEQ ID NO: 47346 - RNA, 32 nt, Human
agaggugugaaguuagacucuaugaugaaaca

SEQ ID NO: 47347 - RNA, 32 nt, Human
agaggugugggaugucagaacauccaagucag

SEQ ID NO: 47348 - RNA, 32 nt, Human
agagguguggugaaucagcaugucacauucca

SEQ ID NO: 47349 - RNA, 32 nt, Human
agagguguuacgagaaugcaguuaauuuuaac

SEQ ID NO: 47350 - RNA, 32 nt, Human
agagguuacugugauuuugccccugaaggauc

SEQ ID NO: 47351 - RNA, 32 nt, Human
agagguuacuuuugacaaaugggugguuugug

SEQ ID NO: 47352 - RNA, 32 nt, Human
agagguuagacuuacccuccucccucuuucca

SEQ ID NO: 47353 - RNA, 32 nt, Human
agagguuagagagaagagagucagcaacagca

SEQ ID NO: 47354 - RNA, 32 nt, Human
agagguuagucuagacugggccugcucauucu

SEQ ID NO: 47355 - RNA, 32 nt, Human
agagguucaagaccagccugggcaacacagug

SEQ ID NO: 47356 - RNA, 32 nt, Human
agagguucaggcaccugcccaaggucacacag

SEQ ID NO: 47357 - RNA, 32 nt, Human
agagguuccagagaaaucaguguugcaguaaa

SEQ ID NO: 47358 - RNA, 32 nt, Human
agagguuccugaucuagccccagaccuggcca

SEQ ID NO: 47359 - RNA, 32 nt, Human
agagguucuaggugaugcugagaccuuggugu

SEQ ID NO: 47360 - RNA, 32 nt, Human
agagguucuguggggacagagcugggaguccu

SEQ ID NO: 47361 - RNA, 32 nt, Human
agagguucuugcaaccauacaggauccagaag

SEQ ID NO: 47362 - RNA, 32 nt, Human
agagguucuuuucaaaggggcaucuuaguagg

SEQ ID NO: 47363 - RNA, 32 nt, Human
agagguugaguaagcugagaacaggucauugc

SEQ ID NO: 47364 - RNA, 32 nt, Human
agagguugcaggagcugagaucacgccauugc

SEQ ID NO: 47365 - RNA, 32 nt, Human
agagguugcaguaagccaagaucgugccauug

SEQ ID NO: 47366 - RNA, 32 nt, Human
agagguugcaguaagccaagaucgugccucug

SEQ ID NO: 47367 - RNA, 32 nt, Human
agagguugcagugagccgagaucaugucacug

SEQ ID NO: 47368 - RNA, 32 nt, Human
agagguugcagugagcugagaucaugucacug

SEQ ID NO: 47369 - RNA, 32 nt, Human
agagguugcagugagcugagaucauguuucug

SEQ ID NO: 47370 - RNA, 20 nt, Human
agagguugcugaacuuuaaa

SEQ ID NO: 47371 - RNA, 32 nt, Human
agagguuggaaagagaagagaggcugggagcg

SEQ ID NO: 47372 - RNA, 32 nt, Human
agagguuggaagggaaauggcucugggcugga

SEQ ID NO: 47373 - RNA, 19 nt, Human
agagguuggaagggaagag

SEQ ID NO: 47374 - RNA, 32 nt, Human
agagguugggaagugaccauuuggaugucugg

SEQ ID NO: 47375 - RNA, 32 nt, Human
agagguugggccugaugggagcaacacucauc

SEQ ID NO: 47376 - RNA, 32 nt, Human
agagguuguguacacaggaccuggccuggaug

SEQ ID NO: 47377 - RNA, 32 nt, Human
agagguuuaaacacuggccuuggcggcugagg

SEQ ID NO: 47378 - RNA, 32 nt, Human
agagguuuagugccauguucagugggcuguuu

SEQ ID NO: 47379 - RNA, 32 nt, Human
agagguuuccugaagaaacagaccuaacugua

SEQ ID NO: 47380 - RNA, 32 nt, Human
agagguuucucacaccucuguucccagggccc

SEQ ID NO: 47381 - RNA, 32 nt, Human
agagguuugcagggguacacguguccuuuccc

SEQ ID NO: 47382 - RNA, 32 nt, Human
agagguuugcagggguacacguguccuuuccg

SEQ ID NO: 47383 - RNA, 32 nt, Human
agagguuugccaugccccagcuucuuuucuca

SEQ ID NO: 47384 - RNA, 32 nt, Human
agagguuugguuugauaccucugccucccucc

SEQ ID NO: 47385 - RNA, 32 nt, Human
agaguaaaaagaaaguaacccaaacugcagug

SEQ ID NO: 47386 - RNA, 32 nt, Human
agaguaaaaagcuaaugacgaggaaccgaaaa

SEQ ID NO: 47387 - RNA, 32 nt, Human
agaguaaaaauuaggugugaaaauaggaaaau

SEQ ID NO: 47388 - RNA, 20 nt, Human
agaguaaaaggaugauggga

SEQ ID NO: 47389 - RNA, 32 nt, Human
agaguaaagaagcagaaagagaaagaauuugc

SEQ ID NO: 47390 - RNA, 32 nt, Human
agaguaacacacuggaccgaggaaaagucaga

SEQ ID NO: 47391 - RNA, 32 nt, Human
agaguaacacgauucccugcugaccccuuaac

SEQ ID NO: 47392 - RNA, 32 nt, Human
agaguaacugauuaaaaugaggucauuagcag

SEQ ID NO: 47393 - RNA, 32 nt, Human
agaguaagacaaaacuccagcacauaaaggac

SEQ ID NO: 47394 - RNA, 32 nt, Human
agaguaagcuggaccugcaaccugccugagcc

SEQ ID NO: 47395 - RNA, 32 nt, Human
agaguaagggaaguuuuggaaaagaauagaaa

SEQ ID NO: 47396 - RNA, 23 nt, Human
agaguaauauuuuuaauguaaua

SEQ ID NO: 47397 - RNA, 32 nt, Human
agaguaaucaauauauuguauuucagcacgaa

SEQ ID NO: 47398 - RNA, 32 nt, Human
agaguaauuccuauccugugugccucagaagc

SEQ ID NO: 47399 - RNA, 32 nt, Human
agaguacaagucugagguggagggagucaugg

SEQ ID NO: 47400 - RNA, 32 nt, Human
agaguacacagcuggcaccagagcaucacaga

SEQ ID NO: 47401 - RNA, 21 nt, Human
agaguacacccuuuccaggaa

SEQ ID NO: 47402 - RNA, 32 nt, Human
agaguacagaaauucauuaugcugcuaauuua

SEQ ID NO: 47403 - RNA, 32 nt, Human
agaguaccaggaugccaccgcagaagaggagg

SEQ ID NO: 47404 - RNA, 32 nt, Human
agaguaccccucugagcugcaggcuggaaggg

SEQ ID NO: 47405 - RNA, 32 nt, Human
agaguaccuagcacaaaguagacauucaauaa

SEQ ID NO: 47406 - RNA, 32 nt, Human
agaguacgguucccuccugucucccucuucuu

SEQ ID NO: 47407 - RNA, 32 nt, Human
agaguacgugccuuaaucuuuaucuuuguaau

SEQ ID NO: 47408 - RNA, 32 nt, Human
agaguacuaauucacuaugaacacuuuuguca

SEQ ID NO: 47409 - RNA, 32 nt, Human
agaguacugccuucaugugcaggauggggaca

SEQ ID NO: 47410 - RNA, 32 nt, Human
agaguacugugugcugagagaccauggcaaag

SEQ ID NO: 47411 - RNA, 32 nt, Human
agaguacuugcucucguccugugaauuuucuu

SEQ ID NO: 47412 - RNA, 32 nt, Human
agaguacuugguaucuggaugaaucgacacuc

SEQ ID NO: 47413 - RNA, 30 nt, Human
agaguagacuucuccaugcccuucaguuau

SEQ ID NO: 47414 - RNA, 32 nt, Human
agaguagaggugccuugaggggaccaggaagc

SEQ ID NO: 47415 - RNA, 32 nt, Human
agaguagaugcugaccugggcacuccaccauu

SEQ ID NO: 47416 - RNA, 32 nt, Human
agaguagcucucugccagccaggcuggagugc

SEQ ID NO: 47417 - RNA, 31 nt, Human
agaguaggaaauacugugucacuggaggccu

SEQ ID NO: 47418 - RNA, 32 nt, Human
agaguaggacagugggguggagcugagaugga

SEQ ID NO: 47419 - RNA, 32 nt, Human
agaguaggagagaaguuagggcuggcacaccu

SEQ ID NO: 47420 - RNA, 32 nt, Human
agaguaggaugcugggcacucaggugugugug

SEQ ID NO: 47421 - RNA, 32 nt, Human
agaguagggaaucucauccaucacagaucgca

SEQ ID NO: 47422 - RNA, 32 nt, Human
agaguagggcggcgcuggaggagggcggugcg

SEQ ID NO: 47423 - RNA, 32 nt, Human
agaguaggguguaauugagugaaggaauccug

SEQ ID NO: 47424 - RNA, 32 nt, Human
agaguaguccuaggaagcccacugauccccaa

SEQ ID NO: 47425 - RNA, 32 nt, Human
agaguaguucaauggauugagaaaaauauguu

SEQ ID NO: 47426 - RNA, 32 nt, Human
agaguauaaaaagccaaaggucaaagucaaag

SEQ ID NO: 47427 - RNA, 32 nt, Human
agaguauaugaggaggcaguauggcugugcag

SEQ ID NO: 47428 - RNA, 32 nt, Human
agaguauccuaccaggaguaauauuuggaaua

SEQ ID NO: 47429 - RNA, 32 nt, Human
agaguaucuuuguugcuugcucugccaaaugc

SEQ ID NO: 47430 - RNA, 21 nt, Human
agaguaugaggaugaguccca

SEQ ID NO: 47431 - RNA, 32 nt, Human
agaguauggaggcugagccaggccuuggguuu

SEQ ID NO: 47432 - RNA, 32 nt, Human
agaguauguaguggcuucuuuugaacuguuag

SEQ ID NO: 47433 - RNA, 32 nt, Human
agaguauguauuaaaagcaaaaauucccauga

SEQ ID NO: 47434 - RNA, 19 nt, Human
agaguauuacaucaucuua

SEQ ID NO: 47435 - RNA, 32 nt, Human
agaguauucagugcuuucuaaguagcagcccc

SEQ ID NO: 47436 - RNA, 32 nt, Human
agaguauucguggucagggaggugacccgugg

SEQ ID NO: 47437 - RNA, 32 nt, Human
agaguauugccucauguuaccuaccugcuauu

SEQ ID NO: 47438 - RNA, 32 nt, Human
agaguauugcuaaaccaaggaggcagaccuca

SEQ ID NO: 47439 - RNA, 32 nt, Human
agaguauuggagagcaccccagcugagucauc

SEQ ID NO: 47440 - RNA, 32 nt, Human
agagucaaaggcagaggggcuuccaggcccug

SEQ ID NO: 47441 - RNA, 32 nt, Human
agagucaaugagaacacacacaaccuacaaau

SEQ ID NO: 47442 - RNA, 32 nt, Human
agagucacaagccucgaggugccuucuucagg

SEQ ID NO: 47443 - RNA, 32 nt, Human
agagucacagcuucagguguuugcugaaucca

SEQ ID NO: 47444 - RNA, 32 nt, Human
agagucacagucaagggccuucugagaccugu

SEQ ID NO: 47445 - RNA, 32 nt, Human
agagucaccaaacacguggauauuuuuggucu

SEQ ID NO: 47446 - RNA, 19 nt, Human
agagucaccaccuugccgg

SEQ ID NO: 47447 - RNA, 32 nt, Human
agagucacccaggcuggagugcaguggugaga

SEQ ID NO: 47448 - RNA, 32 nt, Human
agagucacucaguaucagggaucuacugucuu

SEQ ID NO: 47449 - RNA, 32 nt, Human
agagucacuccugccuucaccaugaaguccag

SEQ ID NO: 47450 - RNA, 32 nt, Human
agagucagaagaggagaaggccacgguacaga

SEQ ID NO: 47451 - RNA, 32 nt, Human
agagucagaagcugaguccaggcaacugcuug

SEQ ID NO: 47452 - RNA, 32 nt, Human
agagucagaagugggaagagugagccaggcaa

SEQ ID NO: 47453 - RNA, 32 nt, Human
agagucagacacuggagaaaucuuaggauuua

SEQ ID NO: 47454 - RNA, 32 nt, Human
agagucagacugcuccuggugccaugaacgga

SEQ ID NO: 47455 - RNA, 32 nt, Human
agagucagaggacccugugcuugcugguggug

SEQ ID NO: 47456 - RNA, 32 nt, Human
agagucagccagcucuggaauggucuggaaau

SEQ ID NO: 47457 - RNA, 32 nt, Human
agagucagccucauccccuccucagccuugug

SEQ ID NO: 47458 - RNA, 32 nt, Human
agagucagcugaugaguucuguaccaaacacu

SEQ ID NO: 47459 - RNA, 32 nt, Human
agagucagcugccgaacggagaucagaauaga

SEQ ID NO: 47460 - RNA, 31 nt, Human
agagucaggaaacuuccuuugacugauguuc

SEQ ID NO: 47461 - RNA, 32 nt, Human
agagucaggaaggugggaguuggcugcugagg

SEQ ID NO: 47462 - RNA, 32 nt, Human
agagucaggggacagggagggagcuccacacu

SEQ ID NO: 47463 - RNA, 32 nt, Human
agagucaggguuucacccuguugcccacucug

SEQ ID NO: 47464 - RNA, 32 nt, Human
agagucagguuccacaguuucaagcauggcca

SEQ ID NO: 47465 - RNA, 32 nt, Human
agagucaguauaguuggagcugucuucauuua

SEQ ID NO: 47466 - RNA, 32 nt, Human
agagucauauuuugauuauuguauuuauucca

SEQ ID NO: 47467 - RNA, 32 nt, Human
agagucaucaugccacuugagcagaggaguca

SEQ ID NO: 47468 - RNA, 18 nt, Human
agagucauucuuuccuca

SEQ ID NO: 47469 - RNA, 32 nt, Human
agagucauuuacauaguucaguuuuuaccuca

SEQ ID NO: 47470 - RNA, 32 nt, Human
agagucauuuacucuccucugccuccauuugu

SEQ ID NO: 47471 - RNA, 32 nt, Human
agaguccaaacaccuacccacaccugcuuugu

SEQ ID NO: 47472 - RNA, 32 nt, Human
agaguccaaguggcaggacuugagguuggcuu

SEQ ID NO: 47473 - RNA, 32 nt, Human
agaguccaauuuaaggaacacagagcagcgcu

SEQ ID NO: 47474 - RNA, 32 nt, Human
agaguccacccuuugugcaaggcgagaaccaa

SEQ ID NO: 47475 - RNA, 32 nt, Human
agaguccagcacuuggccgcucaugggccuuc

SEQ ID NO: 47476 - RNA, 32 nt, Human
agaguccagccaccaucuuccugacuguccca

SEQ ID NO: 47477 - RNA, 32 nt, Human
agaguccaggaaggggcggggagaagccuggg

SEQ ID NO: 47478 - RNA, 32 nt, Human
agaguccagggagagugcgcgggcggccgccg

SEQ ID NO: 47479 - RNA, 32 nt, Human
agaguccaugggcagugagacccuggauauga

SEQ ID NO: 47480 - RNA, 32 nt, Human
agagucccacucugucacccaggcuggagugc

SEQ ID NO: 47481 - RNA, 32 nt, Human
agagucccagccccaaauagaccccaucucuu

SEQ ID NO: 47482 - RNA, 32 nt, Human
agagucccaguuauucuugcugccuuugauaa

SEQ ID NO: 47483 - RNA, 32 nt, Human
agagucccaucuuuggugaggcuguuucugga

SEQ ID NO: 47484 - RNA, 32 nt, Human
agagucccauggaaaaauggcaccaggccggg

SEQ ID NO: 47485 - RNA, 32 nt, Human
agaguccccggcgcucugagguuggagagaaa

SEQ ID NO: 47486 - RNA, 32 nt, Human
agagucccugcagucccuuucgacuugcauuu

SEQ ID NO: 47487 - RNA, 32 nt, Human
agaguccggccugggagccgucagagcagccc

SEQ ID NO: 47488 - RNA, 32 nt, Human
agaguccguggcugaugucugcacugaccaga

SEQ ID NO: 47489 - RNA, 32 nt, Human
agaguccuaaggagcaccaacucuagaaaagg

SEQ ID NO: 47490 - RNA, 32 nt, Human
agaguccuccaccccaucacuagagugcucug

SEQ ID NO: 47491 - RNA, 32 nt, Human
agaguccuccagagcugggaucccaugggcgc

SEQ ID NO: 47492 - RNA, 18 nt, Human
agaguccucccauccccu

SEQ ID NO: 47493 - RNA, 32 nt, Human
agaguccucgggccuccugggucugggacgug

SEQ ID NO: 47494 - RNA, 32 nt, Human
agaguccucguggggagagggacagagacaga

SEQ ID NO: 47495 - RNA, 32 nt, Human
agaguccugaguaccucgugggaacuugggca

SEQ ID NO: 47496 - RNA, 32 nt, Human
agaguccugccuggcccuacgaugaggccacu

SEQ ID NO: 47497 - RNA, 32 nt, Human
agaguccuggagaagguggaguagucagaaaa

SEQ ID NO: 47498 - RNA, 32 nt, Human
agaguccugugggcugaaauaucagacuggga

SEQ ID NO: 47499 - RNA, 32 nt, Human
agaguccuguucugcugagguuugaacuccug

SEQ ID NO: 47500 - RNA, 32 nt, Human
agaguccuuccucuccccuuuugaggcauccc

SEQ ID NO: 47501 - RNA, 32 nt, Human
agaguccuuucaggaagguggagcugcauugg

SEQ ID NO: 47502 - RNA, 32 nt, Human
agaguccuuugaacugcugagucacuucuagg

SEQ ID NO: 47503 - RNA, 32 nt, Human
agagucgcccuugccaggaaaauuccacccag

SEQ ID NO: 47504 - RNA, 32 nt, Human
agagucgcugcuggccucaggcauuugaauua

SEQ ID NO: 47505 - RNA, 32 nt, Human
agagucgcuugaaccugggagggcggagguug

SEQ ID NO: 47506 - RNA, 32 nt, Human
agagucgcuugagccugggaggcggggguugu

SEQ ID NO: 47507 - RNA, 32 nt, Human
agagucggagcuuuaccauguuggucaggcug

SEQ ID NO: 47508 - RNA, 20 nt, Human
agagucggaguugagacugg

SEQ ID NO: 47509 - RNA, 32 nt, Human
agagucgggguuucaccauguugcccaggcug

SEQ ID NO: 47510 - RNA, 23 nt, Human
agagucggucccugcuccuguga

SEQ ID NO: 47511 - RNA, 20 nt, Human
agagucgucuccucgauacc

SEQ ID NO: 47512 - RNA, 32 nt, Human
agagucuacuucagaagcggaggcacugggag

SEQ ID NO: 47513 - RNA, 32 nt, Human
agagucuagaggaauuuuuguuuccuugauua

SEQ ID NO: 47514 - RNA, 32 nt, Human
agagucucacccugucacccaggcuggaaugc

SEQ ID NO: 47515 - RNA, 32 nt, Human
agagucucacccuguugcccaggcuggagugc

SEQ ID NO: 47516 - RNA, 32 nt, Human
agagucucacucuguugcccagccuggagugc

SEQ ID NO: 47517 - RNA, 32 nt, Human
agagucucacuuugacacccaggcuggagugc

SEQ ID NO: 47518 - RNA, 32 nt, Human
agagucucagaauaugcucugcugggccagcu

SEQ ID NO: 47519 - RNA, 32 nt, Human
agagucucauaaggagcacgcaaccuagaucc

SEQ ID NO: 47520 - RNA, 32 nt, Human
agagucuccagaugggggcaucagggugaggu

SEQ ID NO: 47521 - RNA, 32 nt, Human
agagucucccaaaguugcccaggcuggucuca

SEQ ID NO: 47522 - RNA, 32 nt, Human
agagucuccuucucuucucuucuuugggaugc

SEQ ID NO: 47523 - RNA, 32 nt, Human
agagucucgcuccauugcccaggcuggacugc

SEQ ID NO: 47524 - RNA, 32 nt, Human
agagucucgcuccgucacccaggcuggagugc

SEQ ID NO: 47525 - RNA, 32 nt, Human
agagucucgcucucuuguccaggcuggagugc

SEQ ID NO: 47526 - RNA, 32 nt, Human
agagucucgcucuguugcccagccuggagugc

SEQ ID NO: 47527 - RNA, 32 nt, Human
agagucucuagagguagaaauuugccuugcug

SEQ ID NO: 47528 - RNA, 32 nt, Human
agagucucucucugucacccaggcuggagugc

SEQ ID NO: 47529 - RNA, 32 nt, Human
agagucucucucuguugcccaggcuggagugc

SEQ ID NO: 47530 - RNA, 32 nt, Human
agagucucuugguguuggcuucgugcuuccgg

SEQ ID NO: 47531 - RNA, 32 nt, Human
agagucugaagcaggagaauugcuugaaccug

SEQ ID NO: 47532 - RNA, 32 nt, Human
agagucugagccugagcaacauaaugagaccc

SEQ ID NO: 47533 - RNA, 32 nt, Human
agagucugagggaggggagugggagucucagc

SEQ ID NO: 47534 - RNA, 32 nt, Human
agagucugcugcugucuguucugcagagagua

SEQ ID NO: 47535 - RNA, 32 nt, Human
agagucuggaauagguuauccacuccaucuuc

SEQ ID NO: 47536 - RNA, 32 nt, Human
agagucugggagaacuccaaugcugaauggag

SEQ ID NO: 47537 - RNA, 32 nt, Human
agagucugggagagaacacagggagccagccg

SEQ ID NO: 47538 - RNA, 32 nt, Human
agagucuggggagagaaaagguggccaggauc

SEQ ID NO: 47539 - RNA, 32 nt, Human
agagucuggggcuguguguugagcagccuuaa

SEQ ID NO: 47540 - RNA, 32 nt, Human
agagucugggguccugagaggccgagaccuga

SEQ ID NO: 47541 - RNA, 32 nt, Human
agagucuugcccugucgccuggcuggagugga

SEQ ID NO: 47542 - RNA, 32 nt, Human
agagucuugcucugcuggagugcgguggugca

SEQ ID NO: 47543 - RNA, 32 nt, Human
agagucuuggcugggcugaaucugcugcuugu

SEQ ID NO: 47544 - RNA, 32 nt, Human
agagucuuucagcugaaacuuuugccaugaag

SEQ ID NO: 47545 - RNA, 32 nt, Human
agagucuuucucugucacccaggcuggagugc

SEQ ID NO: 47546 - RNA, 32 nt, Human
agagucuuucuucuuuggcuuguuuuguuuuu

SEQ ID NO: 47547 - RNA, 32 nt, Human
agagugaaaaggagggagacuaguuagaaauu

SEQ ID NO: 47548 - RNA, 23 nt, Human
agagugaaaccccaucucuacua

SEQ ID NO: 47549 - RNA, 32 nt, Human
agagugaaacucugucucaaaauaauauuaau

SEQ ID NO: 47550 - RNA, 32 nt, Human
agagugaagagcacaccgccacccugauuaag

SEQ ID NO: 47551 - RNA, 32 nt, Human
agagugaagaggaggaggcagccuggacucca

SEQ ID NO: 47552 - RNA, 32 nt, Human
agagugaaugcugccaagaguuccucagauua

SEQ ID NO: 47553 - RNA, 32 nt, Human
agagugaaugucccccaucauguggcccaacu

SEQ ID NO: 47554 - RNA, 32 nt, Human
agagugaauucccucacucgucucccccaaca

SEQ ID NO: 47555 - RNA, 32 nt, Human
agagugacagagcugaaaaacucacuuugaga

SEQ ID NO: 47556 - RNA, 32 nt, Human
agagugacagugcuagaagaccccagagagag

SEQ ID NO: 47557 - RNA, 32 nt, Human
agagugacgaggccuaucaguacuggaggaca

SEQ ID NO: 47558 - RNA, 32 nt, Human
agagugacuggcagaguaagagaaggggagag

SEQ ID NO: 47559 - RNA, 32 nt, Human
agagugacuuggggagggagaaauaggaggag

SEQ ID NO: 47560 - RNA, 32 nt, Human
agagugagaagcauauaucugaaggaaacgua

SEQ ID NO: 47561 - RNA, 32 nt, Human
agagugagaaguggggagagugagccagguga

SEQ ID NO: 47562 - RNA, 32 nt, Human
agagugagagggcuugagacccucccucaacc

SEQ ID NO: 47563 - RNA, 32 nt, Human
agagugagccuucugucccauuccuguuagac

SEQ ID NO: 47564 - RNA, 32 nt, Human
agagugaggacagcagcaccugccucggggug

SEQ ID NO: 47565 - RNA, 32 nt, Human
agagugaggaggacgcaggggucagagguggc

SEQ ID NO: 47566 - RNA, 32 nt, Human
agagugagggaaaugagcuuggcuucugggac

SEQ ID NO: 47567 - RNA, 32 nt, Human
agagugagggacgcaaccacaagccaaggaac

SEQ ID NO: 47568 - RNA, 32 nt, Human
agagugagggcagaugucuccagccaggacug

SEQ ID NO: 47569 - RNA, 32 nt, Human
agagugagggccugaggucuggcugcuugccc

SEQ ID NO: 47570 - RNA, 32 nt, Human
agagugaggguuucaccauguuggccaggcug

SEQ ID NO: 47571 - RNA, 32 nt, Human
agagugagguaguggcgagaaagcugacucca

SEQ ID NO: 47572 - RNA, 32 nt, Human
agagugagugccugagucauccaaggccagua

SEQ ID NO: 47573 - RNA, 32 nt, Human
agagugaguggcgauccccauccuggagacug

SEQ ID NO: 47574 - RNA, 32 nt, Human
agagugaugaaugauuuuauugguggcagcug

SEQ ID NO: 47575 - RNA, 32 nt, Human
agagugaugaggugguguggggagggugggga

SEQ ID NO: 47576 - RNA, 32 nt, Human
agagugauuauacaacuuccauucucucacuu

SEQ ID NO: 47577 - RNA, 32 nt, Human
agagugcaaaucugccagccuaggcaacauag

SEQ ID NO: 47578 - RNA, 32 nt, Human
agagugcaaucccaaagccacagagaaaugaa

SEQ ID NO: 47579 - RNA, 32 nt, Human
agagugcacacaguggggccucaaagguuaug

SEQ ID NO: 47580 - RNA, 32 nt, Human
agagugcacagcccuuguucugccagcuggag

SEQ ID NO: 47581 - RNA, 32 nt, Human
agagugcaccauugcacuccagccugggcaaa

SEQ ID NO: 47582 - RNA, 32 nt, Human
agagugcacuacuguacuccagccagggcaag

SEQ ID NO: 47583 - RNA, 23 nt, Human
agagugcagaaccgucccaggca

SEQ ID NO: 47584 - RNA, 32 nt, Human
agagugcagagacgaaggugcgagaugagcac

SEQ ID NO: 47585 - RNA, 32 nt, Human
agagugcagcccagggcaggcaucaggacagg

SEQ ID NO: 47586 - RNA, 32 nt, Human
agagugcagccuggaucucucgccuggguuuc

SEQ ID NO: 47587 - RNA, 32 nt, Human
agagugcagcugcagugccaaacagaagggac

SEQ ID NO: 47588 - RNA, 32 nt, Human
agagugcagggcgcuguguccagccgggggaa

SEQ ID NO: 47589 - RNA, 32 nt, Human
agagugcaggggguugggaggaagcauguaag

SEQ ID NO: 47590 - RNA, 32 nt, Human
agagugcagggugggggcaagacugggcugua

SEQ ID NO: 47591 - RNA, 32 nt, Human
agagugcaggugauuucgcagcagguuucuug

SEQ ID NO: 47592 - RNA, 32 nt, Human
agagugccacgccuccacagcuugccccaagc

SEQ ID NO: 47593 - RNA, 32 nt, Human
agagugcccaggagagggucugagggguggga

SEQ ID NO: 47594 - RNA, 32 nt, Human
agagugcccauguugugcuuugucuuguugag

SEQ ID NO: 47595 - RNA, 32 nt, Human
agagugccccacugcacuccagccugggugac

SEQ ID NO: 47596 - RNA, 32 nt, Human
agagugccugguagagacagagcggaacggcc

SEQ ID NO: 47597 - RNA, 32 nt, Human
agagugccugguggagacagagcggaacgccc

SEQ ID NO: 47598 - RNA, 32 nt, Human
agagugccuuucucuuuuuauagcugagaaag

SEQ ID NO: 47599 - RNA, 32 nt, Human
agagugcgauaugaggguacagugaguuuggc

SEQ ID NO: 47600 - RNA, 32 nt, Human
agagugcgccacuucacuccagccugggcaac

SEQ ID NO: 47601 - RNA, 32 nt, Human
agagugcugacauacuaugugaagcuacuauu

SEQ ID NO: 47602 - RNA, 32 nt, Human
agagugcugcaaggugaggccugcugugcugc

SEQ ID NO: 47603 - RNA, 32 nt, Human
agagugcugcagcuguuucugucucgaacggc

SEQ ID NO: 47604 - RNA, 19 nt, Human
agagugcugcugguuccuu

SEQ ID NO: 47605 - RNA, 32 nt, Human
agagugcuggguugggauuacaggcgugagcc

SEQ ID NO: 47606 - RNA, 32 nt, Human
agagugcuuuaauaggggcugcuuugggggac

SEQ ID NO: 47607 - RNA, 32 nt, Human
agaguggaaccaggaaggauucuggagccaca

SEQ ID NO: 47608 - RNA, 32 nt, Human
agaguggaaugcaggggcaugccaucaaauaa

SEQ ID NO: 47609 - RNA, 32 nt, Human
agaguggacguugcacaucacugugaaaccuu

SEQ ID NO: 47610 - RNA, 19 nt, Human
agaguggacucuucccucu

SEQ ID NO: 47611 - RNA, 32 nt, Human
agaguggagggccgcugaauaagcuuccaaaa

SEQ ID NO: 47612 - RNA, 32 nt, Human
agaguggaguggcaugaacacaacgcacugca

SEQ ID NO: 47613 - RNA, 32 nt, Human
agaguggauaagaggcaaacagcacauaacuc

SEQ ID NO: 47614 - RNA, 32 nt, Human
agaguggaucgcugggcugggcuaacggcgac

SEQ ID NO: 47615 - RNA, 32 nt, Human
agaguggauuacaggcaugagccacuguaccu

SEQ ID NO: 47616 - RNA, 32 nt, Human
agaguggcaaagccuuuaauuauagcucacuc

SEQ ID NO: 47617 - RNA, 32 nt, Human
agaguggcaccaggcugaguuaagugggacug

SEQ ID NO: 47618 - RNA, 32 nt, Human
agaguggcagagcugugggcucugcuguucuc

SEQ ID NO: 47619 - RNA, 19 nt, Human
agaguggcaggccuggaga

SEQ ID NO: 47620 - RNA, 32 nt, Human
agaguggcaguugccucugagggaaggugggu

SEQ ID NO: 47621 - RNA, 32 nt, Human
agaguggcauuggcagcaggugcugcuacccu

SEQ ID NO: 47622 - RNA, 32 nt, Human
agaguggcugaugucaaggagaacaaggaugc

SEQ ID NO: 47623 - RNA, 32 nt, Human
agaguggcuggaagaaugcuucaggugucaga

SEQ ID NO: 47624 - RNA, 32 nt, Human
agaguggcuuucuaccacacacagccuguccc

SEQ ID NO: 47625 - RNA, 32 nt, Human
agagugggaagcuuccugggggaccucagcca

SEQ ID NO: 47626 - RNA, 32 nt, Human
agagugggagaaagggagucaggcgcauuggg

SEQ ID NO: 47627 - RNA, 32 nt, Human
agagugggagagaagaggagagggcuuggaua

SEQ ID NO: 47628 - RNA, 32 nt, Human
agagugggagagugggagacagaggaaggaag

SEQ ID NO: 47629 - RNA, 32 nt, Human
agagugggaggaagcagagggagggacugggc

SEQ ID NO: 47630 - RNA, 21 nt, Human
agagugggaggagaaaucuga

SEQ ID NO: 47631 - RNA, 32 nt, Human
agagugggaggcagagugugauggggaggagg

SEQ ID NO: 47632 - RNA, 19 nt, Human
agagugggagggagacuga

SEQ ID NO: 47633 - RNA, 32 nt, Human
agauugcaccauugcacuccagcuugggugac

SEQ ID NO: 47634 - RNA, 32 nt, Human
agauugcaccauugcauuccagccugggcaac

SEQ ID NO: 47635 - RNA, 32 nt, Human
agauugcaccauugcauuccagccugggugac

SEQ ID NO: 47636 - RNA, 32 nt, Human
agauugcaccauugcccuccagccugagcaac

SEQ ID NO: 47637 - RNA, 32 nt, Human
agauugcaccauuguacuccagccugggcaau

SEQ ID NO: 47638 - RNA, 32 nt, Human
agauugcaccauuucauuccagccugggcaac

SEQ ID NO: 47639 - RNA, 32 nt, Human
agauugcaccccugcacuccaggcugggcaac

SEQ ID NO: 47640 - RNA, 32 nt, Human
agauugcacccugcacucuagccugggcaaca

SEQ ID NO: 47641 - RNA, 32 nt, Human
agauugcaccgcugcacuccagccuggcgaca

SEQ ID NO: 47642 - RNA, 32 nt, Human
agauugcaccuuuguacuccagccugggcaac

SEQ ID NO: 47643 - RNA, 32 nt, Human
agauugcacuacuacacuccagccuggugaca

SEQ ID NO: 47644 - RNA, 32 nt, Human
agauugcacuacugcacuccagacuggugacg

SEQ ID NO: 47645 - RNA, 32 nt, Human
agauugcacuacugcacuccagccugggugac

SEQ ID NO: 47646 - RNA, 32 nt, Human
agauugcacuauugcacuccagccugggcaac

SEQ ID NO: 47647 - RNA, 32 nt, Human
agauugcagaagcaccagaacuaggagcagcc

SEQ ID NO: 47648 - RNA, 32 nt, Human
agauugcaguaagccaggaucaugccacugca

SEQ ID NO: 47649 - RNA, 32 nt, Human
agauugcaguaagccgagaucgugccacugca

SEQ ID NO: 47650 - RNA, 32 nt, Human
agauugcagugaaccgagaucgcgccacugca

SEQ ID NO: 47651 - RNA, 32 nt, Human
agauugcagugagccgagaucacgccauugca

SEQ ID NO: 47652 - RNA, 32 nt, Human
agauugcagugagccgagaucacgcuacugcg

SEQ ID NO: 47653 - RNA, 32 nt, Human
agauugcagugagccgagaucccgccacugca

SEQ ID NO: 47654 - RNA, 32 nt, Human
agauugcagugagccgagaucgugucacugca

SEQ ID NO: 47655 - RNA, 32 nt, Human
agauugcaucacugcacuccagccugggcgau

SEQ ID NO: 47656 - RNA, 32 nt, Human
agauugcaucacugcacuccagcuugggugac

SEQ ID NO: 47657 - RNA, 32 nt, Human
agauugcaucauugcacuccagccugggcaac

SEQ ID NO: 47658 - RNA, 20 nt, Human
agauugcaugagcccaggag

SEQ ID NO: 47659 - RNA, 32 nt, Human
agauugcauggcugcacucuagccugggugac

SEQ ID NO: 47660 - RNA, 32 nt, Human
agauugccaagugccagcagcugcagcaagaa

SEQ ID NO: 47661 - RNA, 32 nt, Human
agauugccacugcacuccagccugggcaacaa

SEQ ID NO: 47662 - RNA, 32 nt, Human
agauugccauuuuuaucuuggaagaacuagug

SEQ ID NO: 47663 - RNA, 32 nt, Human
agauugcccacugcacuccagccugggcaaca

SEQ ID NO: 47664 - RNA, 32 nt, Human
agauugcccagggaugauguuauggagauauc

SEQ ID NO: 47665 - RNA, 32 nt, Human
agauugccccacugcacuccacccugggcaau

SEQ ID NO: 47666 - RNA, 32 nt, Human
agauugccccacugcacuccagccuaggcaac

SEQ ID NO: 47667 - RNA, 32 nt, Human
agauugcccccgcuacacuccagccuggucga

SEQ ID NO: 47668 - RNA, 32 nt, Human
agauugccgugagccgagaucaugccacugca

SEQ ID NO: 47669 - RNA, 32 nt, Human
agauugccugagcucaggaguuugagaccaac

SEQ ID NO: 47670 - RNA, 32 nt, Human
agauugccugagcucaggaguuugagaccagc

SEQ ID NO: 47671 - RNA, 32 nt, Human
agauugccugcucucucugugccuagccucaa

SEQ ID NO: 47672 - RNA, 32 nt, Human
agauugccugggacccagccgugcaggggcag

SEQ ID NO: 47673 - RNA, 32 nt, Human
agauugccuguguccugccucuugccucuugu

SEQ ID NO: 47674 - RNA, 32 nt, Human
agauugcgccaccgcacuccagccugggcaac

SEQ ID NO: 47675 - RNA, 32 nt, Human
agauugcgccaccgcacuccagccugggcgac

SEQ ID NO: 47676 - RNA, 32 nt, Human
agauugcgccacugcacaccagucuggagaca

SEQ ID NO: 47677 - RNA, 32 nt, Human
agauugcgccacugcacacuagcuugggugac

SEQ ID NO: 47678 - RNA, 32 nt, Human
agauugcgccacugcaccccagcaugagcgac

SEQ ID NO: 47679 - RNA, 32 nt, Human
agauugcgccacugcaccccagccuggacaac

SEQ ID NO: 47680 - RNA, 32 nt, Human
agauugcgccacugcaccccagccugggcgac

SEQ ID NO: 47681 - RNA, 32 nt, Human
agauugcgccacugcaccccagccugggugac

SEQ ID NO: 47682 - RNA, 32 nt, Human
agauugcgccacugcacucaagucugggcgac

SEQ ID NO: 47683 - RNA, 32 nt, Human
agauugcgccacugcacuccaaccugggcaau

SEQ ID NO: 47684 - RNA, 32 nt, Human
agauugcgccacugcacuccacccugggugac

SEQ ID NO: 47685 - RNA, 32 nt, Human
agauugcgccacugcacuccagccagggcgaa

SEQ ID NO: 47686 - RNA, 32 nt, Human
agauugcgccacugcacuccagcccuggcgac

SEQ ID NO: 47687 - RNA, 32 nt, Human
agauugcgccacugcacuccagccuaggugau

SEQ ID NO: 47688 - RNA, 32 nt, Human
agauugcgccacugcacuccagccugacgaca

SEQ ID NO: 47689 - RNA, 32 nt, Human
agauugcgccacugcacuccagccuggcgaca

SEQ ID NO: 47690 - RNA, 32 nt, Human
agauugcgccacugcacuccagccugggagac

SEQ ID NO: 47691 - RNA, 32 nt, Human
agauugcgccacugcacuccagccugggcaac

SEQ ID NO: 47692 - RNA, 32 nt, Human
agauugcgccacugcacuccagccugggcaau

SEQ ID NO: 47693 - RNA, 32 nt, Human
agauugcgccacugcacuccagccugggcagc

SEQ ID NO: 47694 - RNA, 32 nt, Human
agauugcgccacugcacuccagccugggcgac

SEQ ID NO: 47695 - RNA, 32 nt, Human
agauugcgccacugcacuccagccugggcuac

SEQ ID NO: 47696 - RNA, 32 nt, Human
agauugcgccacugcacuccagccugggggac

SEQ ID NO: 47697 - RNA, 32 nt, Human
agauugcgccacugcacuccagccuggguaac

SEQ ID NO: 47698 - RNA, 32 nt, Human
agauugcgccacugcacuccagccugggugac

SEQ ID NO: 47699 - RNA, 32 nt, Human
agauugcgccacugcacuccagccugguugac

SEQ ID NO: 47700 - RNA, 32 nt, Human
agauugcgccacugcacuccagcgugggcuac

SEQ ID NO: 47701 - RNA, 32 nt, Human
agauugcgccacugcacuccagucugggcgac

SEQ ID NO: 47702 - RNA, 32 nt, Human
agauugcgccacugcacuccagucuggucggc

SEQ ID NO: 47703 - RNA, 32 nt, Human
agauugcgccacugcacucuagccuaagcaau

SEQ ID NO: 47704 - RNA, 32 nt, Human
agauugcgccacugcacuucagccuggaugac

SEQ ID NO: 47705 - RNA, 32 nt, Human
agauugcgccacugcacuucagccugggcaac

SEQ ID NO: 47706 - RNA, 32 nt, Human
agauugcgccacugcaguccgcaguccagccu

SEQ ID NO: 47707 - RNA, 32 nt, Human
agauugcgccacugcaguccgcaguccggccu

SEQ ID NO: 47708 - RNA, 32 nt, Human
agauugcgccacugcaguccgcagucuggccu

SEQ ID NO: 47709 - RNA, 32 nt, Human
agauugcgccacugcauuccagccugggugac

SEQ ID NO: 47710 - RNA, 32 nt, Human
agauugcgccacugcauucuagccuggaugac

SEQ ID NO: 47711 - RNA, 32 nt, Human
agauugcgccacugcgcuccagccugggcaac

SEQ ID NO: 47712 - RNA, 32 nt, Human
agauugcgccacuggacuccagccugcgugac

SEQ ID NO: 47713 - RNA, 32 nt, Human
agauugcgccacuguacuccagccuggcaaca

SEQ ID NO: 47714 - RNA, 32 nt, Human
agauugcgccacuguacuccagccugggugac

SEQ ID NO: 47715 - RNA, 32 nt, Human
agauugcgccacuguacuccagcuugggcaac

SEQ ID NO: 47716 - RNA, 32 nt, Human
agauugcgccacuguacuccugggcaacagcg

SEQ ID NO: 47717 - RNA, 32 nt, Human
agauugcgccacuucacuccagccugggugac

SEQ ID NO: 47718 - RNA, 32 nt, Human
agauugcgccauugcacuccagccuagguaac

SEQ ID NO: 47719 - RNA, 32 nt, Human
agauugcgccauugcacuccagccugggcaaa

SEQ ID NO: 47720 - RNA, 32 nt, Human
agauugcgccauugcacuccagccugggcaac

SEQ ID NO: 47721 - RNA, 32 nt, Human
agauugcgccauugcacuccagccuggggaca

SEQ ID NO: 47722 - RNA, 32 nt, Human
agauugcgccauugcagcacagccugguuaca

SEQ ID NO: 47723 - RNA, 32 nt, Human
agauugcgccauugcagggcagccugguuaca

SEQ ID NO: 47724 - RNA, 32 nt, Human
agauugcgccauugcauuccagccugggcaac

SEQ ID NO: 47725 - RNA, 32 nt, Human
agauugcgccauugcauuccagccugggugac

SEQ ID NO: 47726 - RNA, 32 nt, Human
agauugcgccauuguacuccagccugggcaac

SEQ ID NO: 47727 - RNA, 32 nt, Human
agauugcgccauuguacuccagccugggggac

SEQ ID NO: 47728 - RNA, 32 nt, Human
agauugcgccauugugcuccagccugggugac

SEQ ID NO: 47729 - RNA, 32 nt, Human
agauugcgcccccugcacuccagccugggcuu

SEQ ID NO: 47730 - RNA, 32 nt, Human
agauugcgccccugcacuccaaccuggacaac

SEQ ID NO: 47731 - RNA, 32 nt, Human
agauugcgccgcuacauuccagccugggcaac

SEQ ID NO: 47732 - RNA, 32 nt, Human
agauugcgccgcugcacuccagccugggcgac

SEQ ID NO: 47733 - RNA, 32 nt, Human
agauugcgccguuguacuccagccugggcaac

SEQ ID NO: 47734 - RNA, 32 nt, Human
agauugcgcuacuacgcuacagccugggugac

SEQ ID NO: 47735 - RNA, 32 nt, Human
agauugcgcuacugaacuccagccuggguuac

SEQ ID NO: 47736 - RNA, 32 nt, Human
agauugcgcuacugcacuccagccuaggcaac

SEQ ID NO: 47737 - RNA, 32 nt, Human
agauugcgcuacugcacuccagccugggcgac

SEQ ID NO: 47738 - RNA, 32 nt, Human
agauugcgcugcugcacuccaaccugggcgac

SEQ ID NO: 47739 - RNA, 32 nt, Human
agauugcggugagccuagaucuugccacugcu

SEQ ID NO: 47740 - RNA, 32 nt, Human
agauugcgucacugcacuccaaccugggugac

SEQ ID NO: 47741 - RNA, 32 nt, Human
agauugcgucacugcacuccagccugagcaac

SEQ ID NO: 47742 - RNA, 32 nt, Human
agauugcgucacugcacuccagccugggcgac

SEQ ID NO: 47743 - RNA, 32 nt, Human
agauugcgucacugcacugcagccugggugac

SEQ ID NO: 47744 - RNA, 32 nt, Human
agauugcuccauugcacuccagccugggcaac

SEQ ID NO: 47745 - RNA, 32 nt, Human
agauugcuccauugcacuccagccugggcgau

SEQ ID NO: 47746 - RNA, 32 nt, Human
agauugcucuuaaaauguauucaguuauuuag

SEQ ID NO: 47747 - RNA, 19 nt, Human
agauugcuucagcccagga

SEQ ID NO: 47748 - RNA, 20 nt, Human
agauugcuugaacccaggag

SEQ ID NO: 47749 - RNA, 20 nt, Human
agauugcuugagcccaggag

SEQ ID NO: 47750 - RNA, 32 nt, Human
agauugcuugagcucaggaguucgagaccagc

SEQ ID NO: 47751 - RNA, 32 nt, Human
agauugcuuuugaacuuuggcucucuucacuu

SEQ ID NO: 47752 - RNA, 32 nt, Human
agauuggaacauccuagagacuuguugaaugg

SEQ ID NO: 47753 - RNA, 32 nt, Human
agauuggaacccagacuugcaguccagcgcug

SEQ ID NO: 47754 - RNA, 32 nt, Human
agauuggaccaauccuuuuugcaccaaagugc

SEQ ID NO: 47755 - RNA, 32 nt, Human
agauuggaccacugcucuccagccugggcaac

SEQ ID NO: 47756 - RNA, 32 nt, Human
agauuggagccauggcuuuggaacagaaccag

SEQ ID NO: 47757 - RNA, 32 nt, Human
agauuggaguuaaucugagcauggaagacuau

SEQ ID NO: 47758 - RNA, 22 nt, Human
agauuggauaaugauggcugua

SEQ ID NO: 47759 - RNA, 32 nt, Human
agauuggaugaaacugugcacguuuuuguccc

SEQ ID NO: 47760 - RNA, 32 nt, Human
agauuggcacccaggcugggagcuugccagga

SEQ ID NO: 47761 - RNA, 32 nt, Human
agauuggcacuucccuguccagcacuacaacu

SEQ ID NO: 47762 - RNA, 32 nt, Human
agauuggccauugcacuccagccugggugaca

SEQ ID NO: 47763 - RNA, 32 nt, Human
agauuggccgggaauuugaggcugcaaggaua

SEQ ID NO: 47764 - RNA, 32 nt, Human
agauuggcgaaauuuaacauuuacagauuagu

SEQ ID NO: 47765 - RNA, 32 nt, Human
agauuggcuacaggagcggggugcaggacugg

SEQ ID NO: 47766 - RNA, 32 nt, Human
agauuggcuuggcaucugcacuccagcccagg

SEQ ID NO: 47767 - RNA, 32 nt, Human
agauuggcuugucucagggugggaagugggag

SEQ ID NO: 47768 - RNA, 32 nt, Human
agauugggaaggagguauuuucugguuuucgc

SEQ ID NO: 47769 - RNA, 32 nt, Human
agauugggaaggcucagaagggcagaguugaa

SEQ ID NO: 47770 - RNA, 32 nt, Human
agauugggccacugcacuccacccugggcgac

SEQ ID NO: 47771 - RNA, 32 nt, Human
agauugggccaggugggauuacaggcgcgagc

SEQ ID NO: 47772 - RNA, 32 nt, Human
agauugggccugggcgcuggagcugcuguggc

SEQ ID NO: 47773 - RNA, 32 nt, Human
agauuggggacucugguucccucgccaagugu

SEQ ID NO: 47774 - RNA, 32 nt, Human
agauugggggaguggggagggggaagaagaac

SEQ ID NO: 47775 - RNA, 32 nt, Human
agauuggggugguggaggcaguagggagaugg

SEQ ID NO: 47776 - RNA, 24 nt, Human
agauuggguugccagccacuuccu

SEQ ID NO: 47777 - RNA, 21 nt, Human
agauuggguuucaccauguug

SEQ ID NO: 47778 - RNA, 25 nt, Human
agauuggguuucaccauguuggcca

SEQ ID NO: 47779 - RNA, 32 nt, Human
agauugguauauuucauacaaagugauggcuu

SEQ ID NO: 47780 - RNA, 32 nt, Human
agauuggucccaccgcacuccagccugggcaa

SEQ ID NO: 47781 - RNA, 32 nt, Human
agauuggucucaaacuccuggacucaagugau

SEQ ID NO: 47782 - RNA, 32 nt, Human
agauuggucucaaacuccuggccucucacucc

SEQ ID NO: 47783 - RNA, 32 nt, Human
agauugguggggagggagggcgggagguagau

SEQ ID NO: 47784 - RNA, 32 nt, Human
agauuguaccacugcacuccaaccuggguuac

SEQ ID NO: 47785 - RNA, 32 nt, Human
agauuguaccacugcacuccagccugggcaac

SEQ ID NO: 47786 - RNA, 32 nt, Human
agauuguaccacugcacuccagccuggucaau

SEQ ID NO: 47787 - RNA, 32 nt, Human
agauuguaccacugcacuccagucugggcaac

SEQ ID NO: 47788 - RNA, 32 nt, Human
agauuguaccacugcacuccaguuuggcaaca

SEQ ID NO: 47789 - RNA, 32 nt, Human
agauuguaccacugcgcuccaaacugggugac

SEQ ID NO: 47790 - RNA, 32 nt, Human
agauuguaccacuguacuccagccugggcugg

SEQ ID NO: 47791 - RNA, 32 nt, Human
agauuguaccaugcacuccagccuggguaaca

SEQ ID NO: 47792 - RNA, 32 nt, Human
agauuguaccauggcacuccagccuggacaac

SEQ ID NO: 47793 - RNA, 32 nt, Human
agauuguaccauugcacuccagccugggcaac

SEQ ID NO: 47794 - RNA, 21 nt, Human
agauugucagcuugguccaca

SEQ ID NO: 47795 - RNA, 32 nt, Human
agauuguccauguccagaaacaacagugucuu

SEQ ID NO: 47796 - RNA, 32 nt, Human
agauuguccuggccgcgaccuggaccuccaug

SEQ ID NO: 47797 - RNA, 32 nt, Human
agauugucuucugcuaauuccucugguauguu

SEQ ID NO: 47798 - RNA, 18 nt, Human
agauugucuuuaucacca

SEQ ID NO: 47799 - RNA, 32 nt, Human
agauugugaauagcuccauccagccugagaaa

SEQ ID NO: 47800 - RNA, 32 nt, Human
agauugugacacugcacuccagccugggcaac

SEQ ID NO: 47801 - RNA, 32 nt, Human
agauugugaugaagugaaaaacugcucccuau

SEQ ID NO: 47802 - RNA, 32 nt, Human
agauugugcacugcacucuagccugggggaag

SEQ ID NO: 47803 - RNA, 32 nt, Human
agauugugccaccacacuccagccugggcgac

SEQ ID NO: 47804 - RNA, 32 nt, Human
agauugugccacggcacuccagccugggcagc

SEQ ID NO: 47805 - RNA, 32 nt, Human
agauugugccacuacacuccagccuggccaca

SEQ ID NO: 47806 - RNA, 32 nt, Human
agauugugccacuacacuccagccugggagac

SEQ ID NO: 47807 - RNA, 32 nt, Human
agauugugccacuacacuccagccugggcaac

SEQ ID NO: 47808 - RNA, 32 nt, Human
agauugugccacuacacuccagccugggugac

SEQ ID NO: 47809 - RNA, 32 nt, Human
agauugugccacuccccuccagccugggcgac

SEQ ID NO: 47810 - RNA, 32 nt, Human
agauugugccacugcacaccagccuggacaac

SEQ ID NO: 47811 - RNA, 32 nt, Human
agauugugccacugcacaccggccugggugac

SEQ ID NO: 47812 - RNA, 32 nt, Human
agauugugccacugcacacuccaaucugggug

SEQ ID NO: 47813 - RNA, 32 nt, Human
agauugugccacugcaccccagccuuggcaac

SEQ ID NO: 47814 - RNA, 32 nt, Human
agauugugccacugcacgcacuccagccuggg

SEQ ID NO: 47815 - RNA, 32 nt, Human
agauugugccacugcacuccaaccugggugac

SEQ ID NO: 47816 - RNA, 32 nt, Human
agauugugccacugcacuccacccugggcaac

SEQ ID NO: 47817 - RNA, 32 nt, Human
agauugugccacugcacuccagccagagugac

SEQ ID NO: 47818 - RNA, 32 nt, Human
agauugugccacugcacuccagccuaggcaac

SEQ ID NO: 47819 - RNA, 32 nt, Human
agauugugccacugcacuccagccuaggcgac

SEQ ID NO: 47820 - RNA, 32 nt, Human
agauugugccacugcacuccagccugagcaac

SEQ ID NO: 47821 - RNA, 32 nt, Human
agauugugccacugcacuccagccuggacgac

SEQ ID NO: 47822 - RNA, 32 nt, Human
agauugugccacugcacuccagccuggcaaca

SEQ ID NO: 47823 - RNA, 32 nt, Human
agauugugccacugcacuccagccugggagac

SEQ ID NO: 47824 - RNA, 32 nt, Human
agauugugccacugcacuccagccugggcaac

SEQ ID NO: 47825 - RNA, 32 nt, Human
agauugugccacugcacuccagccugggcaau

SEQ ID NO: 47826 - RNA, 32 nt, Human
agauugugccacugcacuccagccugggccac

SEQ ID NO: 47827 - RNA, 32 nt, Human
agauugugccacugcacuccagccugggcgac

SEQ ID NO: 47828 - RNA, 32 nt, Human
agauugugccacugcacuccagccugggcgau

SEQ ID NO: 47829 - RNA, 32 nt, Human
agauugugccacugcacuccagccuggguaac

SEQ ID NO: 47830 - RNA, 32 nt, Human
agauugugccacugcacuccagccugggugaa

SEQ ID NO: 47831 - RNA, 32 nt, Human
agauugugccacugcacuccagccugggugac

SEQ ID NO: 47832 - RNA, 32 nt, Human
agauugugccacugcacuccagccuuggcaac

SEQ ID NO: 47833 - RNA, 32 nt, Human
agauugugccacugcacuccagcgugggcaac

SEQ ID NO: 47834 - RNA, 32 nt, Human
agauugugccacugcacuccagcuggguggca

SEQ ID NO: 47835 - RNA, 32 nt, Human
agauugugccacugcacucccgccugggcgac

SEQ ID NO: 47836 - RNA, 32 nt, Human
agauugugccacugcacucgagccugggugac

SEQ ID NO: 47837 - RNA, 32 nt, Human
agauugugccacugcacucuagccuagguggc

SEQ ID NO: 47838 - RNA, 32 nt, Human
agauugugccacugcacucuagccucggugac

SEQ ID NO: 47839 - RNA, 32 nt, Human
agauugugccacugcacucuagccuggacagc

SEQ ID NO: 47840 - RNA, 32 nt, Human
agauugugccacugcacucuagccugggcaau

SEQ ID NO: 47841 - RNA, 32 nt, Human
agauugugccacugcacucuagccugggugac

SEQ ID NO: 47842 - RNA, 32 nt, Human
agauugugccacugcacugcaggcugggugac

SEQ ID NO: 47843 - RNA, 32 nt, Human
agauugugccacugcacuucagccugggcgac

SEQ ID NO: 47844 - RNA, 32 nt, Human
agauugugccacugcacuucagcuugggugac

SEQ ID NO: 47845 - RNA, 32 nt, Human
agauugugccacugcauucuagccugggcgau

SEQ ID NO: 47846 - RNA, 32 nt, Human
agauugugccacugcccuccagccugggugac

SEQ ID NO: 47847 - RNA, 32 nt, Human
agauugugccacugcgcuccagccugggcgac

SEQ ID NO: 47848 - RNA, 32 nt, Human
agauugugccacugcucuccagccugggaggc

SEQ ID NO: 47849 - RNA, 32 nt, Human
agauugugccacuguacaccagccugggugac

SEQ ID NO: 47850 - RNA, 32 nt, Human
agauugugccacuguacuccagccaggccaca

SEQ ID NO: 47851 - RNA, 32 nt, Human
agauugugccacuguacuccagccuggaagac

SEQ ID NO: 47852 - RNA, 32 nt, Human
agauugugccacuguacuccagccugggugac

SEQ ID NO: 47853 - RNA, 32 nt, Human
agauugugccacuguacuccagccuggugaca

SEQ ID NO: 47854 - RNA, 32 nt, Human
agauugugccacuguacugcagccugggugac

SEQ ID NO: 47855 - RNA, 32 nt, Human
agauugugccacuucacuccagccugggugac

SEQ ID NO: 47856 - RNA, 32 nt, Human
agauugugccacuucauuccagccugggcgac

SEQ ID NO: 47857 - RNA, 32 nt, Human
agauugugccauugcacuacagccuggucaac

SEQ ID NO: 47858 - RNA, 32 nt, Human
agauugugccauugcacuccaaccugggcaac

SEQ ID NO: 47859 - RNA, 32 nt, Human
agauugugccauugcacuccagccugggcaac

SEQ ID NO: 47860 - RNA, 32 nt, Human
agauugugccauugcacuccagccugggcgac

SEQ ID NO: 47861 - RNA, 32 nt, Human
agauugugccauugcacuccagccugggcuac

SEQ ID NO: 47862 - RNA, 32 nt, Human
agauugugccauugcacuccagccugggugac

SEQ ID NO: 47863 - RNA, 32 nt, Human
agauugugccauugcacuccagccugggugau

SEQ ID NO: 47864 - RNA, 32 nt, Human
agauugugccauugcacugcagccuggaugac

SEQ ID NO: 47865 - RNA, 32 nt, Human
agauugugccccugcacuccagccugagcgac

SEQ ID NO: 47866 - RNA, 32 nt, Human
agauugugccgcugcacuccagccuggcgaca

SEQ ID NO: 47867 - RNA, 32 nt, Human
agauugugcuaaggcuugagugcauugagccc

SEQ ID NO: 47868 - RNA, 32 nt, Human
agauugugcuacugcacucuagauugggugac

SEQ ID NO: 47869 - RNA, 32 nt, Human
agauugugcugcugcacuccagccugggagac

SEQ ID NO: 47870 - RNA, 32 nt, Human
agauugugcugcugcacuccagccugggugaa

SEQ ID NO: 47871 - RNA, 32 nt, Human
agauuguggcacugcacuccagucugggugac

SEQ ID NO: 47872 - RNA, 32 nt, Human
agauugugggcaaagaguugagucagugagaa

SEQ ID NO: 47873 - RNA, 32 nt, Human
agauuguggggagggguagagagaauaaucau

SEQ ID NO: 47874 - RNA, 32 nt, Human
agauugugucauugcacuccagccugggcaac

SEQ ID NO: 47875 - RNA, 32 nt, Human
agauuguuaagucauuuugcugccaccagacc

SEQ ID NO: 47876 - RNA, 32 nt, Human
agauuguuucaacuagacucccccucuccccu

SEQ ID NO: 47877 - RNA, 18 nt, Human
agauuguuucugcccuca

SEQ ID NO: 47878 - RNA, 32 nt, Human
agauuuaaagaagaaagggcacagauguacug

SEQ ID NO: 47879 - RNA, 32 nt, Human
agauuuaacagcuuuuaacagugaguuucguu

SEQ ID NO: 47880 - RNA, 32 nt, Human
agauuuaaccauuuucauacucuuagaugauu

SEQ ID NO: 47881 - RNA, 32 nt, Human
agauuuaaguaaaggagguaaaugcuaaauuc

SEQ ID NO: 47882 - RNA, 32 nt, Human
agauuuacauaguaaguuucacacuaccuuau

SEQ ID NO: 47883 - RNA, 32 nt, Human
agauuuaccagaaacaguccuuugucuagaug

SEQ ID NO: 47884 - RNA, 32 nt, Human
agauuuacccagcacucugagauaaauaccau

SEQ ID NO: 47885 - RNA, 18 nt, Human
agauuuaccccgucuucc

SEQ ID NO: 47886 - RNA, 32 nt, Human
agauuuacuaaacaaaagaaacucuccaccua

SEQ ID NO: 47887 - RNA, 32 nt, Human
agauuuagaaaccaguguguggugccagcucu

SEQ ID NO: 47888 - RNA, 32 nt, Human
agauuuagaggccgcuacagaaguccuuacug

SEQ ID NO: 47889 - RNA, 32 nt, Human
agauuuagagggagggagagucugaccuggau

SEQ ID NO: 47890 - RNA, 32 nt, Human
agauuuagguuuacauaacuacucugacauac

SEQ ID NO: 47891 - RNA, 20 nt, Human
agauuuaguacuagcuucau

SEQ ID NO: 47892 - RNA, 32 nt, Human
agauuuauauccuuucuuuuggguuaggaucu

SEQ ID NO: 47893 - RNA, 32 nt, Human
agauuuauauuuagcaaaauguuagcauguau

SEQ ID NO: 47894 - RNA, 32 nt, Human
agauuuaucccuguggagaguggguggauuca

SEQ ID NO: 47895 - RNA, 32 nt, Human
agauuuauggugcuugaaauguugcuaaacgu

SEQ ID NO: 47896 - RNA, 32 nt, Human
agauuuauuucaguguauuucagucuguuaua

SEQ ID NO: 47897 - RNA, 32 nt, Human
agauuuauuucugcuuugccucccuucagcua

SEQ ID NO: 47898 - RNA, 32 nt, Human
agauuucaaacagugauagacuugccauuuua

SEQ ID NO: 47899 - RNA, 32 nt, Human
agauuucaaauaguccuccccaccucaacugu

SEQ ID NO: 47900 - RNA, 32 nt, Human
agauuucaacaucagaugguugaagcuggaag

SEQ ID NO: 47901 - RNA, 32 nt, Human
agauuucaauccauagccucacuuaacuguag

SEQ ID NO: 47902 - RNA, 32 nt, Human
agauuucaccaaccccagugcccagaagaggg

SEQ ID NO: 47903 - RNA, 32 nt, Human
agauuucaccagugcacuccagccugggugac

SEQ ID NO: 47904 - RNA, 32 nt, Human
agauuucacugccccacuggauuuugggcuug

SEQ ID NO: 47905 - RNA, 32 nt, Human
agauuucacuucuaaggaguugauugauuaaa

SEQ ID NO: 47906 - RNA, 32 nt, Human
agauuucagacacagaagucuguccauggcuc

SEQ ID NO: 47907 - RNA, 32 nt, Human
agauuuccaauacuguauaaucuagaaauggc

SEQ ID NO: 47908 - RNA, 32 nt, Human
agauuucccacauucccaugaauaucaagaau

SEQ ID NO: 47909 - RNA, 32 nt, Human
agauuucccacuggucugcugggagaaucaag

SEQ ID NO: 47910 - RNA, 32 nt, Human
agauuuccuccccucagucaacccccauaacc

SEQ ID NO: 47911 - RNA, 32 nt, Human
agauuuccucuguuccagagccugcucuggag

SEQ ID NO: 47912 - RNA, 32 nt, Human
agauuuccuggugagguugcguggguggauua

SEQ ID NO: 47913 - RNA, 32 nt, Human
agauuuccuuucuccccugacaaagcccucaa

SEQ ID NO: 47914 - RNA, 32 nt, Human
agauuucucaaaggcugaaguuuucaaccuag

SEQ ID NO: 47915 - RNA, 32 nt, Human
agauuucucaaggcaucuuaaguguagcaugc

SEQ ID NO: 47916 - RNA, 32 nt, Human
agauuucuccucaaggccucuggagcaaccag

SEQ ID NO: 47917 - RNA, 32 nt, Human
agauuucuccuccaaaauacaucucaugggca

SEQ ID NO: 47918 - RNA, 32 nt, Human
agauuucugaagagugcagcugccugaaccga

SEQ ID NO: 47919 - RNA, 32 nt, Human
agauuucugacugguaggguuucuccaggcuc

SEQ ID NO: 47920 - RNA, 19 nt, Human
agauuucuucccgccuucu

SEQ ID NO: 47921 - RNA, 32 nt, Human
agauuucuucuuucucuuauuccuccuguuuc

SEQ ID NO: 47922 - RNA, 32 nt, Human
agauuugaaaacaaacuucucgcaacugaagg

SEQ ID NO: 47923 - RNA, 32 nt, Human
agauuugacuaacagugagccuuauuaagaac

SEQ ID NO: 47924 - RNA, 32 nt, Human
agauuugacugguuuugcagaagauuacaguu

SEQ ID NO: 47925 - RNA, 32 nt, Human
agauuugagggaggggagauggagaggagagg

SEQ ID NO: 47926 - RNA, 32 nt, Human
agauuugaguaugauaugauaaaggcuuucua

SEQ ID NO: 47927 - RNA, 32 nt, Human
agauuugaguggggacacagauccaaaccaua

SEQ ID NO: 47928 - RNA, 32 nt, Human
agauuugauuugccuggagucuuuuggaggca

SEQ ID NO: 47929 - RNA, 32 nt, Human
agauuugcaaacaugagugcugagggguacca

SEQ ID NO: 47930 - RNA, 32 nt, Human
agauuugcaauggcuggcaucugcuuuauucc

SEQ ID NO: 47931 - RNA, 32 nt, Human
agauuugcaccgcuguacuccagccugggcaa

SEQ ID NO: 47932 - RNA, 31 nt, Human
agauuugcacuuuccuaagggcagaagcaug

SEQ ID NO: 47933 - RNA, 32 nt, Human
agauuugcaugggcuggccgggcacaguggcu

SEQ ID NO: 47934 - RNA, 32 nt, Human
agauuugccaguaggaacugagauucaacguc

SEQ ID NO: 47935 - RNA, 32 nt, Human
agauuugccaugucccccagacccugcuucug

SEQ ID NO: 47936 - RNA, 32 nt, Human
agauuugcccauagguuaaacaugguuagaaa

SEQ ID NO: 47937 - RNA, 32 nt, Human
agauuugcccccgccuuguuuugaaagccccu

SEQ ID NO: 47938 - RNA, 32 nt, Human
agauuugccuggacuucccuucccagggaggg

SEQ ID NO: 47939 - RNA, 32 nt, Human
agauuugccuuguucucccagaaaagcucauu

SEQ ID NO: 47940 - RNA, 32 nt, Human
agauuugcuaucuaccagcuuguuacuuuggg

SEQ ID NO: 47941 - RNA, 32 nt, Human
agauuugcucccagacccucugaucucccucc

SEQ ID NO: 47942 - RNA, 32 nt, Human
agauuugcugugugaugcugucuccucuccag

SEQ ID NO: 47943 - RNA, 32 nt, Human
agauuugcuugaaccugggagguggagguugc

SEQ ID NO: 47944 - RNA, 32 nt, Human
agauuuggaaugggaccagaggcccuugaaaa

SEQ ID NO: 47945 - RNA, 32 nt, Human
agauuuggacugcuuuucacaguugagguugu

SEQ ID NO: 47946 - RNA, 32 nt, Human
agauuuggagaccugggcuugaguuccagcug

SEQ ID NO: 47947 - RNA, 32 nt, Human
agauuuggagcaggguggucacacugaccuug

SEQ ID NO: 47948 - RNA, 32 nt, Human
agauuuggauggggacacagcuaaaucauauc

SEQ ID NO: 47949 - RNA, 32 nt, Human
agauuugggaccuucauaucagcacuuuggac

SEQ ID NO: 47950 - RNA, 32 nt, Human
agauuugggccagacuccuguguccuugcuug

SEQ ID NO: 47951 - RNA, 32 nt, Human
agauuugggccauacguuggaaaauaagacau

SEQ ID NO: 47952 - RNA, 18 nt, Human
agauuuggggucacagca

SEQ ID NO: 47953 - RNA, 32 nt, Human
agauuugggugaggacacagagccauaccaua

SEQ ID NO: 47954 - RNA, 32 nt, Human
agauuugggugaggacacagauccaaacuguc

SEQ ID NO: 47955 - RNA, 32 nt, Human
agauuugggugaggacacagccaaaccaguca

SEQ ID NO: 47956 - RNA, 32 nt, Human
agauuugggugagggcacggccaaaccauguc

SEQ ID NO: 47957 - RNA, 32 nt, Human
agauuugggugggaacacagagccaaaccaua

SEQ ID NO: 47958 - RNA, 32 nt, Human
agauuuggguggggacacagccaaaccauaac

SEQ ID NO: 47959 - RNA, 32 nt, Human
agauuuggguggggacacagccaaaccauauc

SEQ ID NO: 47960 - RNA, 32 nt, Human
agauuuggguggggacacagccaaaccauguc

SEQ ID NO: 47961 - RNA, 32 nt, Human
agauuuggucagaauuugaggccaguuuccua

SEQ ID NO: 47962 - RNA, 32 nt, Human
agauuugguccccaguagagagccaggugaac

SEQ ID NO: 47963 - RNA, 32 nt, Human
agauuuggugcaggaaaacuaccuggaguacc

SEQ ID NO: 47964 - RNA, 32 nt, Human
agauuuguaauauuucucucuuuuuagagaaa

SEQ ID NO: 47965 - RNA, 32 nt, Human
agauuugucagcugucagggugcagugggacg

SEQ ID NO: 47966 - RNA, 32 nt, Human
agauuuguccuuuuauuucuccaucuuuauag

SEQ ID NO: 47967 - RNA, 32 nt, Human
agauuugugucacucuucugccuucgugaaaa

SEQ ID NO: 47968 - RNA, 32 nt, Human
agauuuguuguaagaaagacugugcagaggag

SEQ ID NO: 47969 - RNA, 32 nt, Human
agauuuuaaauggguugugcaagcauuaaaau

SEQ ID NO: 47970 - RNA, 32 nt, Human
agauuuuaacauccuuugcggucccaguccaa

SEQ ID NO: 47971 - RNA, 32 nt, Human
agauuuuacuaaaaugcaaaaauguaguuuca

SEQ ID NO: 47972 - RNA, 32 nt, Human
agauuuuagaaaaacauuuaaacuuuuuaaaa

SEQ ID NO: 47973 - RNA, 32 nt, Human
agauuuuagcaggaagagacaggcaaggaaag

SEQ ID NO: 47974 - RNA, 32 nt, Human
agauuuuauugaaugaaacaagcagguguuua

SEQ ID NO: 47975 - RNA, 32 nt, Human
agauuuucauucuucuucuggccaaagcucag

SEQ ID NO: 47976 - RNA, 32 nt, Human
agauuuuccagcggaucccccgguggccucau

SEQ ID NO: 47977 - RNA, 32 nt, Human
agauuuucucagaaaugugugaaagaaccuca

SEQ ID NO: 47978 - RNA, 32 nt, Human
agauuuucuccucaucucugaauggcugggug

SEQ ID NO: 47979 - RNA, 32 nt, Human
agauuuucuccucuucuggagucaauuuuguc

SEQ ID NO: 47980 - RNA, 32 nt, Human
agauuuucucugcaguuugcugaggcccagga

SEQ ID NO: 47981 - RNA, 24 nt, Human
agauuuucuucuguuuucuuugcu

SEQ ID NO: 47982 - RNA, 32 nt, Human
agauuuucuugggcaucucccggaaagugcgu

SEQ ID NO: 47983 - RNA, 20 nt, Human
agauuuugaggaaucagaga

SEQ ID NO: 47984 - RNA, 32 nt, Human
agauuuugcaacugcacuccagccugggcuac

SEQ ID NO: 47985 - RNA, 32 nt, Human
agauuuugcagcuguaaagcagagguagcaua

SEQ ID NO: 47986 - RNA, 32 nt, Human
agauuuugcccagaggaguaaauggagguggg

SEQ ID NO: 47987 - RNA, 32 nt, Human
agauuuugcucuucaauguugccuguaaacuu

SEQ ID NO: 47988 - RNA, 32 nt, Human
agauuuugggcaacaaguaccuacuaaguaaa

SEQ ID NO: 47989 - RNA, 32 nt, Human
agauuuugguacugcaacugcuuuccucuugc

SEQ ID NO: 47990 - RNA, 32 nt, Human
agauuuuggugaggaaacuugcuggaguuuuc

SEQ ID NO: 47991 - RNA, 32 nt, Human
agauuuugguggggacacagccaaaccauauc

SEQ ID NO: 47992 - RNA, 32 nt, Human
agauuuugucuguggauggagacaguggcagc

SEQ ID NO: 47993 - RNA, 21 nt, Human
agauuuuguuucccucuguaa

SEQ ID NO: 47994 - RNA, 32 nt, Human
agauuuuuacccaggccagugcagagaggugu

SEQ ID NO: 47995 - RNA, 32 nt, Human
agauuuuuauuugagccuacuaauuugugguu

SEQ ID NO: 47996 - RNA, 32 nt, Human
agauuuuucaaaggauggugacccugcuugua

SEQ ID NO: 47997 - RNA, 32 nt, Human
agauuuuuccauccugucucucuuacuguuuu

SEQ ID NO: 47998 - RNA, 32 nt, Human
agauuuuucuauucuuuucccuugacguuuac

SEQ ID NO: 47999 - RNA, 32 nt, Human
agauuuuucugauuuuuaaacuccugaaaaau

SEQ ID NO: 48000 - RNA, 32 nt, Human
agauuuuugcaaccuccuccugagccgggauu

SEQ ID NO: 48001 - RNA, 31 nt, Human
agauuuuugggaacguuacagaugcuaccuu

SEQ ID NO: 48002 - RNA, 32 nt, Human
agauuuuuguagccaagcagaguuguagaggg

SEQ ID NO: 48003 - RNA, 23 nt, Human
agauuuuugucuguucucuuugu

SEQ ID NO: 48004 - RNA, 24 nt, Human
agauuuuuuaaaucccucuucgcu

SEQ ID NO: 48005 - RNA, 27 nt, Human
agauuuuuucuagaugguuuuuucauu

SEQ ID NO: 48006 - RNA, 32 nt, Human
agcaaaaacccccacucugugccucugcugag

SEQ ID NO: 48007 - RNA, 31 nt, Human
agcaaaaagagacuugaauguuguggacaaa

SEQ ID NO: 48008 - RNA, 32 nt, Human
agcaaaaagaggaggaggaagaggagcucagg

SEQ ID NO: 48009 - RNA, 32 nt, Human
agcaaaaagaggagggggcauaaagacuggau

SEQ ID NO: 48010 - RNA, 32 nt, Human
agcaaaaagggagagagcaggaaagcgagcac

SEQ ID NO: 48011 - RNA, 32 nt, Human
agcaaaaaguuucuuuucugaggcugccauac

SEQ ID NO: 48012 - RNA, 32 nt, Human
agcaaaaaguuuuccagggagugagaaaagca

SEQ ID NO: 48013 - RNA, 18 nt, Human
agcaaaaauaacuuugga

SEQ ID NO: 48014 - RNA, 32 nt, Human
agcaaaaaugucagaugauaucaggaaaaggu

SEQ ID NO: 48015 - RNA, 32 nt, Human
agcaaaaauuggaugcauaaaguaauauuuac

SEQ ID NO: 48016 - RNA, 32 nt, Human
agcaaaacacuggauuuccuccccucagcagc

SEQ ID NO: 48017 - RNA, 32 nt, Human
agcaaaaccuauaauuaagccaaaauucaaau

SEQ ID NO: 48018 - RNA, 32 nt, Human
agcaaaaccuuacaaaugugaagaauguggca

SEQ ID NO: 48019 - RNA, 32 nt, Human
agcaaaacuccccggugugacugaggcacaca

SEQ ID NO: 48020 - RNA, 32 nt, Human
agcaaaacucgccuguuuuuguccucaauggc

SEQ ID NO: 48021 - RNA, 32 nt, Human
agcaaaagaacagcaggugcagccagcucuag

SEQ ID NO: 48022 - RNA, 32 nt, Human
agcaaaagaagagaugagaagaggcacaagaa

SEQ ID NO: 48023 - RNA, 25 nt, Human
agcaaaagcaaaggagcguggggaa

SEQ ID NO: 48024 - RNA, 20 nt, Human
agcaaaagcagaaacgugaa

SEQ ID NO: 48025 - RNA, 32 nt, Human
agcaaaagcaucuaugugagaccauuuagcac

SEQ ID NO: 48026 - RNA, 32 nt, Human
agcaaaagcuggaagcauuccccuugagaacu

SEQ ID NO: 48027 - RNA, 32 nt, Human
agcaaaaguauggagcaagaccuguagugaca

SEQ ID NO: 48028 - RNA, 22 nt, Human
agcaaaagucagucagggugaa

SEQ ID NO: 48029 - RNA, 19 nt, Human
agcaaaagucuuaggugaa

SEQ ID NO: 48030 - RNA, 32 nt, Human
agcaaaaguguucacauuacugagcaaacuau

SEQ ID NO: 48031 - RNA, 32 nt, Human
agcaaaauaaagaagaagaagaggaggaagag

SEQ ID NO: 48032 - RNA, 32 nt, Human
agcaaaauaaugaauggccacugugaaaaauu

SEQ ID NO: 48033 - RNA, 32 nt, Human
agcaaaauacuucaaaugaauaguauuaacuu

SEQ ID NO: 48034 - RNA, 32 nt, Human
agcaaaaucacuuaucuguucuuuucggcuaa

SEQ ID NO: 48035 - RNA, 32 nt, Human
agcaaaauccuccccuggccuccugggacugc

SEQ ID NO: 48036 - RNA, 23 nt, Human
agcaaaaugaacauuacuacuca

SEQ ID NO: 48037 - RNA, 31 nt, Human
agcaaaaugggaaaugaggcaaguuauccuu

SEQ ID NO: 48038 - RNA, 32 nt, Human
agcaaacaacaaacaaaccaaaauguggggaa

SEQ ID NO: 48039 - RNA, 32 nt, Human
agcaaacacagcacagaaaaugacucaccaac

SEQ ID NO: 48040 - RNA, 32 nt, Human
agcaaacaccacugccugcaggagccugggcu

SEQ ID NO: 48041 - RNA, 32 nt, Human
agcaaacacccaccccagaacaagccgacaca

SEQ ID NO: 48042 - RNA, 32 nt, Human
agcaaacacuccacccuccaccuuccauuuuc

SEQ ID NO: 48043 - RNA, 32 nt, Human
agcaaacagagggucagucacaggauguucug

SEQ ID NO: 48044 - RNA, 32 nt, Human
agcaaacagagugaaaugccauuuuucauauu

SEQ ID NO: 48045 - RNA, 32 nt, Human
agcaaacagauggcaggaugggcacugccgag

SEQ ID NO: 48046 - RNA, 32 nt, Human
agcaaacagcacaaucucacccucacaggaaa

SEQ ID NO: 48047 - RNA, 32 nt, Human
agcaaacaggcagcgcgcgacaauggcggucg

SEQ ID NO: 48048 - RNA, 32 nt, Human
agcaaacauuuggaauuuacaugugggcagac

SEQ ID NO: 48049 - RNA, 32 nt, Human
agcaaaccaagugccggagcaccagcgccgcc

SEQ ID NO: 48050 - RNA, 32 nt, Human
agcaaacccucacaucucccaccaauaacaca

SEQ ID NO: 48051 - RNA, 32 nt, Human
agcaaacccuugucaagccuaccagagcagcu

SEQ ID NO: 48052 - RNA, 32 nt, Human
agcaaaccuccaggaaggccuuugggcauggc

SEQ ID NO: 48053 - RNA, 32 nt, Human
agcaaaccugcaggaagagaucauggaaaaac

SEQ ID NO: 48054 - RNA, 32 nt, Human
agcaaaccugcccccucugccucccagugcac

SEQ ID NO: 48055 - RNA, 32 nt, Human
agcaaaccugcuguuuaacaucagggugacca

SEQ ID NO: 48056 - RNA, 32 nt, Human
agcaaaccuugauuuagcuccaagaaauugag

SEQ ID NO: 48057 - RNA, 32 nt, Human
agcaaacggcagaacuaacaauaaccaaacua

SEQ ID NO: 48058 - RNA, 32 nt, Human
agcaaacgucacagcaaaaacagccuuaaaag

SEQ ID NO: 48059 - RNA, 32 nt, Human
agcaaacuagggucucaguauugagaaacgca

SEQ ID NO: 48060 - RNA, 22 nt, Human
agcaaacuauugcaaggacaaa

SEQ ID NO: 48061 - RNA, 32 nt, Human
agcaaacucuucuccauagcaguccaguagug

SEQ ID NO: 48062 - RNA, 32 nt, Human
agcaaacugcagaggucacuccaggcuguggc

SEQ ID NO: 48063 - RNA, 32 nt, Human
agcaaacugcucccagauguccuuucucccug

SEQ ID NO: 48064 - RNA, 32 nt, Human
agcaaacugcuggcaccuauucuggguugcuu

SEQ ID NO: 48065 - RNA, 32 nt, Human
agcaaacuguaaacugucagggugauaaaaug

SEQ ID NO: 48066 - RNA, 32 nt, Human
agcaaagaaagaagguugguagugaaacacaa

SEQ ID NO: 48067 - RNA, 32 nt, Human
agcaaagaacuaaaggaggggaagaaaagcac

SEQ ID NO: 48068 - RNA, 32 nt, Human
agcaaagaaucuuugucacaccccaggaaguc

SEQ ID NO: 48069 - RNA, 32 nt, Human
agcaaagacaagguggcuuuggccgaugucca

SEQ ID NO: 48070 - RNA, 32 nt, Human
agcaaagacagaaacugauguuccaugcaugu

SEQ ID NO: 48071 - RNA, 24 nt, Human
agcaaagacagccagcgugcucag

SEQ ID NO: 48072 - RNA, 20 nt, Human
agcaaagacauucugcucag

SEQ ID NO: 48073 - RNA, 23 nt, Human
agcaaagacuugcuaauguuuga

SEQ ID NO: 48074 - RNA, 32 nt, Human
agcaaagagaagagcauuggggcuggaguguu

SEQ ID NO: 48075 - RNA, 32 nt, Human
agcaaagagcugagugaguccucugcucucca

SEQ ID NO: 48076 - RNA, 32 nt, Human
agcaaagaggaaggaagggaggucugugguca

SEQ ID NO: 48077 - RNA, 32 nt, Human
agcaaagaggcagagaugcguguguggcuucu

SEQ ID NO: 48078 - RNA, 32 nt, Human
agcaaagaggggcaauggcugcuuucagcuuu

SEQ ID NO: 48079 - RNA, 32 nt, Human
agcaaagaugaauuuaaaauauugauauacau

SEQ ID NO: 48080 - RNA, 22 nt, Human
agcaaagaugacagugcugcag

SEQ ID NO: 48081 - RNA, 32 nt, Human
agcaaagaugugaaaauaucugcucaaaacuu

SEQ ID NO: 48082 - RNA, 32 nt, Human
agcaaagcaagagcugaaaacugugugcauaa

SEQ ID NO: 48083 - RNA, 32 nt, Human
agcaaagcaagccacaccaugggugagaucaa

SEQ ID NO: 48084 - RNA, 24 nt, Human
agcaaagcacugugcugugcucag

SEQ ID NO: 48085 - RNA, 32 nt, Human
agcaaagcagaaaacagugccccaaauggaaa

SEQ ID NO: 48086 - RNA, 32 nt, Human
agcaaagcagacaaucuuuuucuugaaauuac

SEQ ID NO: 48087 - RNA, 32 nt, Human
agcaaagcagcaucucuuaaaauucaauauga

SEQ ID NO: 48088 - RNA, 32 nt, Human
agcaaagcagcaugauaaggacugcagcgggg

SEQ ID NO: 48089 - RNA, 18 nt, Human
agcaaagcagcauggggg

SEQ ID NO: 48090 - RNA, 32 nt, Human
agcaaagccagccuggggcuugcauguugauc

SEQ ID NO: 48091 - RNA, 32 nt, Human
agcaaagcccagaaagcagaacccaggaaccc

SEQ ID NO: 48092 - RNA, 32 nt, Human
agcaaagccccagcuuuuacagguuauucgcg

SEQ ID NO: 48093 - RNA, 32 nt, Human
agcaaagccgacccuauccaguccuugggacu

SEQ ID NO: 48094 - RNA, 32 nt, Human
agcaaagccucuguagccagacugccucucua

SEQ ID NO: 48095 - RNA, 32 nt, Human
agcaaagccuuaugaguguggccaguguggga

SEQ ID NO: 48096 - RNA, 32 nt, Human
agcaaagcuguauccuggaguuggucugugau

SEQ ID NO: 48097 - RNA, 32 nt, Human
agcaaaggaaaccuccacaagugcugcaacag

SEQ ID NO: 48098 - RNA, 32 nt, Human
agcaaaggaaguggcuugaaggaugugcuagu

SEQ ID NO: 48099 - RNA, 32 nt, Human
agcaaaggacaguaagaaguuggcuggcaaaa

SEQ ID NO: 48100 - RNA, 32 nt, Human
agcaaaggagagaagccuggaagaaccagucc

SEQ ID NO: 48101 - RNA, 22 nt, Human
agcaaaggagagcaggaaguug

SEQ ID NO: 48102 - RNA, 32 nt, Human
agcaaaggagccugagaguuagcuggccacag

SEQ ID NO: 48103 - RNA, 32 nt, Human
agcaaaggagcugagcugguggaggaagaaga

SEQ ID NO: 48104 - RNA, 32 nt, Human
agcaaaggagguggagcacaagcuggaccucu

SEQ ID NO: 48105 - RNA, 21 nt, Human
agcaaaggcugcuggugucag

SEQ ID NO: 48106 - RNA, 32 nt, Human
agcaaaggcugcuucuccuccagugcugaucu

SEQ ID NO: 48107 - RNA, 32 nt, Human
agcaaagggaaagaaaugcuuggaggaggcuc

SEQ ID NO: 48108 - RNA, 32 nt, Human
agcaaagggacaagaaggauucccuggagaaa

SEQ ID NO: 48109 - RNA, 32 nt, Human
agcaaaggggcagguggggacacuccaagugg

SEQ ID NO: 48110 - RNA, 23 nt, Human
agcaaagggugcauuucagggug

SEQ ID NO: 48111 - RNA, 32 nt, Human
agcaaaggugcacuccagacucugggggugga

SEQ ID NO: 48112 - RNA, 24 nt, Human
agcaaagguuaauuuaaggacaaa

SEQ ID NO: 48113 - RNA, 32 nt, Human
agcaaagguucaauuuaaaagaaaaauuaucu

SEQ ID NO: 48114 - RNA, 32 nt, Human
agcaaagucaagacaggagaccagcugccuuu

SEQ ID NO: 48115 - RNA, 32 nt, Human
agcaaagucuacagcacauagucuuuguaagg

SEQ ID NO: 48116 - RNA, 32 nt, Human
agcaaagugagccauagugggccaggcugccc

SEQ ID NO: 48117 - RNA, 26 nt, Human
agcaaaguguaacggccaacacuuug

SEQ ID NO: 48118 - RNA, 20 nt, Human
agcaaauaagccagcagaug

SEQ ID NO: 48119 - RNA, 21 nt, Human
agcaaauaaugccuacuacuc

SEQ ID NO: 48120 - RNA, 32 nt, Human
agcaaauacaaaccuuuauacuaauggauuaa

SEQ ID NO: 48121 - RNA, 32 nt, Human
agcaaauacauuggcaauacagcugcuuuugc

SEQ ID NO: 48122 - RNA, 23 nt, Human
agcaaaucagcccuucucugaac

SEQ ID NO: 48123 - RNA, 32 nt, Human
agcaaauccaucuccaaacaugauacucuugg

SEQ ID NO: 48124 - RNA, 32 nt, Human
agcaaauccuggcaagugacccagcucuucuc

SEQ ID NO: 48125 - RNA, 32 nt, Human
agcaaaucucuggguaugucucugguaaagac

SEQ ID NO: 48126 - RNA, 32 nt, Human
agcaaaucugcaucuucucuuauuucugaccu

SEQ ID NO: 48127 - RNA, 32 nt, Human
agcaaaugaacccagaauggaacaguggggag

SEQ ID NO: 48128 - RNA, 21 nt, Human
agcaaaugaaccuacuucuca

SEQ ID NO: 48129 - RNA, 31 nt, Human
agcaaaugccacucugggcagucuuuugugu

SEQ ID NO: 48130 - RNA, 18 nt, Human
agcaaaugccaggucuag

SEQ ID NO: 48131 - RNA, 32 nt, Human
agcaaauggaagagaauggaccaguaauuucu

SEQ ID NO: 48132 - RNA, 32 nt, Human
agcaaaugggcccugacuguaaauuagugaag

SEQ ID NO: 48133 - RNA, 30 nt, Human
agcaaaugguucagcaggauguucagggcc

SEQ ID NO: 48134 - RNA, 32 nt, Human
agcaaauguccucuucuccuugcugcuagagu

SEQ ID NO: 48135 - RNA, 32 nt, Human
agcaaaugucuauccaguuaagucacaugccc

SEQ ID NO: 48136 - RNA, 32 nt, Human
agcaaaugucucugcuaccauuuccuuaaggu

SEQ ID NO: 48137 - RNA, 32 nt, Human
agcaaauuaaauccaugcugcaauacaauucu

SEQ ID NO: 48138 - RNA, 32 nt, Human
agcaaauuagggacugagucauggcagaaaua

SEQ ID NO: 48139 - RNA, 32 nt, Human
agcaaauuauguuaagagacagugauggcuag

SEQ ID NO: 48140 - RNA, 32 nt, Human
agcaaauugguugaucuuuaaggcaguagguu

SEQ ID NO: 48141 - RNA, 32 nt, Human
agcaaauuguuauuuuaaaaaguuuucuuguu

SEQ ID NO: 48142 - RNA, 32 nt, Human
agcaacaaaggcgugaaagaagugaaaagaag

SEQ ID NO: 48143 - RNA, 32 nt, Human
agcaacaacgcuccccuugcucugccuuuggu

SEQ ID NO: 48144 - RNA, 32 nt, Human
agcaacacacagauuugucgccucuguccccg

SEQ ID NO: 48145 - RNA, 32 nt, Human
agcaacacacaugcuccgucugacaagguggu

SEQ ID NO: 48146 - RNA, 32 nt, Human
agcaacacagugagacccccaucucuacaaaa

SEQ ID NO: 48147 - RNA, 32 nt, Human
agcaacacccaccccugcccuucuuggcccau

SEQ ID NO: 48148 - RNA, 32 nt, Human
agcaacacccuuccacccuccugcuccagccu

SEQ ID NO: 48149 - RNA, 32 nt, Human
agcaacaccucucugcccucccucccuuuguc

SEQ ID NO: 48150 - RNA, 32 nt, Human
agcaacacuggggagagccuggagcagccgga

SEQ ID NO: 48151 - RNA, 32 nt, Human
agcaacagaaguaaauugaagauacuggcuaa

SEQ ID NO: 48152 - RNA, 32 nt, Human
agcaacagauuugagguaccagugcauagcag

SEQ ID NO: 48153 - RNA, 32 nt, Human
agcaacagcaaaagcccuaacuucuuauacgu

SEQ ID NO: 48154 - RNA, 24 nt, Human
agcaacagcagcagauccaagaag

SEQ ID NO: 48155 - RNA, 32 nt, Human
agcaacaggcgcagggccugcccacgcccuuu

SEQ ID NO: 48156 - RNA, 32 nt, Human
agcaacaggcuggagggagagggaagcaagac

SEQ ID NO: 48157 - RNA, 32 nt, Human
agcaacagguaucgaggacucuccaaaccccc

SEQ ID NO: 48158 - RNA, 32 nt, Human
agcaacaggugaggacagacgucuggaagccc

SEQ ID NO: 48159 - RNA, 32 nt, Human
agcaacaguaauggaguacaugagcacuggaa

SEQ ID NO: 48160 - RNA, 20 nt, Human
agcaacaguccacagcccuu

SEQ ID NO: 48161 - RNA, 32 nt, Human
agcaacaguccucaggagggccaagggagucu

SEQ ID NO: 48162 - RNA, 32 nt, Human
agcaacaguguagugagaacagcacccaugaa

SEQ ID NO: 48163 - RNA, 32 nt, Human
agcaacauacagaagaaaaagaauuuguugag

SEQ ID NO: 48164 - RNA, 32 nt, Human
agcaacauagugaggaucccaucucuacgccc

SEQ ID NO: 48165 - RNA, 32 nt, Human
agcaacaugcgauucuggaggcacggggguaa

SEQ ID NO: 48166 - RNA, 32 nt, Human
agcaacauggacaacauguuugagagcuacgu

SEQ ID NO: 48167 - RNA, 31 nt, Human
agcaacaugggagaaacugagaaaagaauug

SEQ ID NO: 48168 - RNA, 32 nt, Human
agcaacaugugcaacacauacaaggacaaaaa

SEQ ID NO: 48169 - RNA, 32 nt, Human
agcaacauuaaauuugguuuguuuugcuaugu

SEQ ID NO: 48170 - RNA, 32 nt, Human
agcaacauugggugacagaacuucuuagcacc

SEQ ID NO: 48171 - RNA, 32 nt, Human
agcaaccaaacuuggagugguuauugcagaca

SEQ ID NO: 48172 - RNA, 32 nt, Human
agcaaccaagagugucaguuguacccgaggcg

SEQ ID NO: 48173 - RNA, 32 nt, Human
agcaaccaaucacaaccauaaagcuacaagca

SEQ ID NO: 48174 - RNA, 21 nt, Human
agcaaccagcaacuccagggu

SEQ ID NO: 48175 - RNA, 32 nt, Human
agcaaccaggcccugcugcagcuugaggcggc

SEQ ID NO: 48176 - RNA, 32 nt, Human
agcaaccaugacugacuuaagcagaaaaggaa

SEQ ID NO: 48177 - RNA, 32 nt, Human
agcaacccaucuuucuucaguauguauguucu

SEQ ID NO: 48178 - RNA, 32 nt, Human
agcaacccaucuuuguucagcaucccaggaga

SEQ ID NO: 48179 - RNA, 32 nt, Human
agcaaccccagccucuguucugcccuuuccaa

SEQ ID NO: 48180 - RNA, 23 nt, Human
agcaacccccugccccaagagug

SEQ ID NO: 48181 - RNA, 32 nt, Human
agcaaccccugcaugccauucuuuuugggcuc

SEQ ID NO: 48182 - RNA, 18 nt, Human
agcaacccucagcucagg

SEQ ID NO: 48183 - RNA, 20 nt, Human
agcaacccucugaagaaggg

SEQ ID NO: 48184 - RNA, 32 nt, Human
agcaacccugggaaaagugacuucaucccuuc

SEQ ID NO: 48185 - RNA, 32 nt, Human
agcaacccuucuuuuucccuuugacuucuaca

SEQ ID NO: 48186 - RNA, 32 nt, Human
agcaaccgcgagcaauuucuugggaccaaagu

SEQ ID NO: 48187 - RNA, 22 nt, Human
agcaaccgugcagccacgaaca

SEQ ID NO: 48188 - RNA, 32 nt, Human
agcaaccuaaguguccaucaacagaugaaugg

SEQ ID NO: 48189 - RNA, 32 nt, Human
agcaaccuaaugaucucuaucucugaacaucu

SEQ ID NO: 48190 - RNA, 32 nt, Human
agcaaccuccacuucuucagcaccacacacac

SEQ ID NO: 48191 - RNA, 32 nt, Human
agcaaccuccuccccagugccuccuggaucaa

SEQ ID NO: 48192 - RNA, 32 nt, Human
agcaaccucuuagaugugcacacaccacuuug

SEQ ID NO: 48193 - RNA, 32 nt, Human
agcaaccugcacuccagccugggugacagagc

SEQ ID NO: 48194 - RNA, 32 nt, Human
agcaaccugcagcugaggucgccggcgccuuu

SEQ ID NO: 48195 - RNA, 32 nt, Human
agcaaccugucuggcaagggacaggaagcuga

SEQ ID NO: 48196 - RNA, 32 nt, Human
agcaaccuguuuugacaaaucugauuaaaaug

SEQ ID NO: 48197 - RNA, 32 nt, Human
agcaaccuuugaauccagcucuagucagucua

SEQ ID NO: 48198 - RNA, 32 nt, Human
agcaaccuuuguauauuggagacuucagagua

SEQ ID NO: 48199 - RNA, 32 nt, Human
agcaacgacugcugcugguguguauuuuugua

SEQ ID NO: 48200 - RNA, 32 nt, Human
agcaacgccagccugggucacaguccaucaaa

SEQ ID NO: 48201 - RNA, 32 nt, Human
agcaacgcuacuuucuaagggcauuuuucccu

SEQ ID NO: 48202 - RNA, 32 nt, Human
agcaacgcuaguggcucaugccuguaauccag

SEQ ID NO: 48203 - RNA, 32 nt, Human
agcaacggaaauuucauugcuccuggguggaa

SEQ ID NO: 48204 - RNA, 32 nt, Human
agcaacggcagcaacuggcccucccaggaccc

SEQ ID NO: 48205 - RNA, 32 nt, Human
agcaacgggagguggaggauccuggagguguc

SEQ ID NO: 48206 - RNA, 32 nt, Human
agcaacgggcuggggcagccugcagcugccca

SEQ ID NO: 48207 - RNA, 32 nt, Human
agcaacgugauggaggacuugggggaaaagga

SEQ ID NO: 48208 - RNA, 24 nt, Human
agcaacuaaaauggccucguccuu

SEQ ID NO: 48209 - RNA, 32 nt, Human
agcaacuaauucuggugcucaggcugggcucu

SEQ ID NO: 48210 - RNA, 23 nt, Human
agcaacuagaaaauugucauuuc

SEQ ID NO: 48211 - RNA, 32 nt, Human
agcaacuagcaggugucucagcagagcaagaa

SEQ ID NO: 48212 - RNA, 32 nt, Human
agcaacuagcuuagaguaaaucuucaguaauu

SEQ ID NO: 48213 - RNA, 32 nt, Human
agcaacuaugcuguucauguccccaggaaugg

SEQ ID NO: 48214 - RNA, 32 nt, Human
agcaacuccuggcuucccagcagccggaacac

SEQ ID NO: 48215 - RNA, 32 nt, Human
agcaacucggaagaggaaagaaaggaagucag

SEQ ID NO: 48216 - RNA, 32 nt, Human
agcaacucuccucuggcgugacagccggcaug

SEQ ID NO: 48217 - RNA, 32 nt, Human
agcaacucuuuuucaaccacugcucaucaguu

SEQ ID NO: 48218 - RNA, 32 nt, Human
agcaacuggaaagaagaaaugcagagauuugc

SEQ ID NO: 48219 - RNA, 32 nt, Human
agcaacuggagaaauguuuuuccuucaagaaa

SEQ ID NO: 48220 - RNA, 32 nt, Human
agcaacuggguggaggcugcccaggugguggc

SEQ ID NO: 48221 - RNA, 32 nt, Human
agcaacuggugcugcugaccgaggcccccgag

SEQ ID NO: 48222 - RNA, 32 nt, Human
agcaacugugaccacagcgaggaugcggggcu

SEQ ID NO: 48223 - RNA, 32 nt, Human
agcaacugugggcaucaggcuguggggcggca

SEQ ID NO: 48224 - RNA, 32 nt, Human
agcaacuuaguggcaaaaaguaauguuguacu

SEQ ID NO: 48225 - RNA, 23 nt, Human
agcaacuucauauaagcauggug

SEQ ID NO: 48226 - RNA, 32 nt, Human
agcaacuucauccagggcaucaagcaagccag

SEQ ID NO: 48227 - RNA, 32 nt, Human
agcaacuugcccaaguccuucuucuuuuccca

SEQ ID NO: 48228 - RNA, 32 nt, Human
agcaacuuggaagaggaaagaaaagaagucag

SEQ ID NO: 48229 - RNA, 32 nt, Human
agcaacuuucugagagcagaaugccagaauau

SEQ ID NO: 48230 - RNA, 19 nt, Human
agcaagaaaacaccugcug

SEQ ID NO: 48231 - RNA, 32 nt, Human
agcaagaaaagugaagaaagaaugcagaauug

SEQ ID NO: 48232 - RNA, 32 nt, Human
agcaagaaacaguauccacaguggacuccggg

SEQ ID NO: 48233 - RNA, 32 nt, Human
agcaagaaagaaaaagacagaaaacaaaugcg

SEQ ID NO: 48234 - RNA, 32 nt, Human
agcaagaaagaaaagaaggaaggaagagaggu

SEQ ID NO: 48235 - RNA, 24 nt, Human
agcaagaaagcacgaaagcaagca

SEQ ID NO: 48236 - RNA, 32 nt, Human
agcaagaaaguggaggggcgggcagagccaga

SEQ ID NO: 48237 - RNA, 32 nt, Human
agcaagaacagagccagcacacacauuggagc

SEQ ID NO: 48238 - RNA, 27 nt, Human
agcaagaacugcacaagaaacggaguc

SEQ ID NO: 48239 - RNA, 32 nt, Human
agcaagaagaaagacguggcagcaagcgggag

SEQ ID NO: 48240 - RNA, 32 nt, Human
agcaagaagaugguguuucugccccucaaaug

SEQ ID NO: 48241 - RNA, 32 nt, Human
agcaagaagauugggagaaaguagcuguggga

SEQ ID NO: 48242 - RNA, 32 nt, Human
agcaagaaguaggaagaaguugagacagggag

SEQ ID NO: 48243 - RNA, 32 nt, Human
agcaagaaugacugucagaacaugugcaguaa

SEQ ID NO: 48244 - RNA, 32 nt, Human
agcaagacaagccagagaucucccacaccucc

SEQ ID NO: 48245 - RNA, 32 nt, Human
agcaagacaggacgggagaacaaggacaagcu

SEQ ID NO: 48246 - RNA, 32 nt, Human
agcaagacaugucuucacaaggccaacaggag

SEQ ID NO: 48247 - RNA, 23 nt, Human
agcaagaccagccccuccuccuc

SEQ ID NO: 48248 - RNA, 32 nt, Human
agcaagacccaauauuuggcuaguucagggag

SEQ ID NO: 48249 - RNA, 32 nt, Human
agcaagacccaccccacacugccuucaccauc

SEQ ID NO: 48250 - RNA, 32 nt, Human
agcaagaccccaaacagggcguggcugccacg

SEQ ID NO: 48251 - RNA, 32 nt, Human
agcaagaccccuggcaaacugggcacuuggcc

SEQ ID NO: 48252 - RNA, 23 nt, Human
agcaagacccugcuuuccccucu

SEQ ID NO: 48253 - RNA, 32 nt, Human
agcaagacccugcuuuccccucuuguccucca

SEQ ID NO: 48254 - RNA, 31 nt, Human
agcaagacgaaaacacacaggagggaaaauc

SEQ ID NO: 48255 - RNA, 32 nt, Human
agcaagacucgaauaggcugguggugacacuu

SEQ ID NO: 48256 - RNA, 22 nt, Human
agcaagacuugaggacagcuca

SEQ ID NO: 48257 - RNA, 32 nt, Human
agcaagacuuuauaauuccuucugccuaacuu

SEQ ID NO: 48258 - RNA, 32 nt, Human
agcaagagacuccccaggugugccuggccugg

SEQ ID NO: 48259 - RNA, 32 nt, Human
agcaagagacuggccuagcagccaggcccggc

SEQ ID NO: 48260 - RNA, 32 nt, Human
agcaagagaggcuuuccacuucaacggcaaag

SEQ ID NO: 48261 - RNA, 32 nt, Human
agcaagagaugaacuuaaguacucugaaguac

SEQ ID NO: 48262 - RNA, 23 nt, Human
agcaagagcaccccaucuucagg

SEQ ID NO: 48263 - RNA, 32 nt, Human
agcaagagcuccagagagaagucgaggaagag

SEQ ID NO: 48264 - RNA, 32 nt, Human
agcaagagcuuugugggcuguuuugucauggu

SEQ ID NO: 48265 - RNA, 32 nt, Human
agcaagaggaagagauggggucgcaggggccc

SEQ ID NO: 48266 - RNA, 32 nt, Human
agcaagaggauugcauucagccuaguuccugg

SEQ ID NO: 48267 - RNA, 22 nt, Human
agcaagagguagcccccucucc

SEQ ID NO: 48268 - RNA, 32 nt, Human
agcaagagguggaauggcuagacacugaauca

SEQ ID NO: 48269 - RNA, 32 nt, Human
agcaagaguagagagagugccuggauuucaug

SEQ ID NO: 48270 - RNA, 32 nt, Human
agcaagaguaggguuguggaaagaccaagcug

SEQ ID NO: 48271 - RNA, 31 nt, Human
agcaagagucauuccaucacagggacugcau

SEQ ID NO: 48272 - RNA, 18 nt, Human
agcaagagugaaacucca

SEQ ID NO: 48273 - RNA, 32 nt, Human
agcaagagugugaggcaagagaagcuggaacc

SEQ ID NO: 48274 - RNA, 32 nt, Human
agcaagauaacggcauauaacacugccauuac

SEQ ID NO: 48275 - RNA, 22 nt, Human
agcaagauggagucccaugaga

SEQ ID NO: 48276 - RNA, 31 nt, Human
agcaagauggcugacuccaaagaggguguuu

SEQ ID NO: 48277 - RNA, 31 nt, Human
agcaagauggguaacaucacaguagauucgu

SEQ ID NO: 48278 - RNA, 32 nt, Human
agcaagauuuccucuuugcaaaaucauauuuu

SEQ ID NO: 48279 - RNA, 32 nt, Human
agcaagcaacccagugauagcagcccagcucu

SEQ ID NO: 48280 - RNA, 28 nt, Human
agcaagcaaguugcugccuauucuauag

SEQ ID NO: 48281 - RNA, 32 nt, Human
agcaagcaccugggugugcuccaggcuuccug

SEQ ID NO: 48282 - RNA, 32 nt, Human
agcaagcacugcaagcagcacauucucaagag

SEQ ID NO: 48283 - RNA, 32 nt, Human
agcaagcacuugaagagaaggaaggggagaaa

SEQ ID NO: 48284 - RNA, 23 nt, Human
agcaagcagaucacuugagguca

SEQ ID NO: 48285 - RNA, 32 nt, Human
agcaagcaggcagcaggcugccggcgggcggg

SEQ ID NO: 48286 - RNA, 32 nt, Human
agcaagcaggugugagcaccuauuucacuacc

SEQ ID NO: 48287 - RNA, 32 nt, Human
agcaagcaguacaguggcauucccagggggac

SEQ ID NO: 48288 - RNA, 32 nt, Human
agcaagcaucacaguaauggaucucugucaga

SEQ ID NO: 48289 - RNA, 32 nt, Human
agcaagcaugacaauccucacuucacugaguu

SEQ ID NO: 48290 - RNA, 32 nt, Human
agcaagcauguugaauuuaaaauaugaauaac

SEQ ID NO: 48291 - RNA, 18 nt, Human
agcaagccagugagcagc

SEQ ID NO: 48292 - RNA, 32 nt, Human
agcaagccauuuaauccgguucuuggagaaac

SEQ ID NO: 48293 - RNA, 32 nt, Human
agcaagcccaggagaagacucuccgccccacg

SEQ ID NO: 48294 - RNA, 32 nt, Human
agcaagccgguaagucucuccagguaggacuu

SEQ ID NO: 48295 - RNA, 32 nt, Human
agcaagccucacugccacugugccuuuggggc

SEQ ID NO: 48296 - RNA, 32 nt, Human
agcaagccuguccuuccugacccggcgguuaa

SEQ ID NO: 48297 - RNA, 17 nt, Human
agcaagcgcgggcggca

SEQ ID NO: 48298 - RNA, 32 nt, Human
agcaagcguguauuuuccuugucugcugcuau

SEQ ID NO: 48299 - RNA, 32 nt, Human
agcaagcuagacaaggcauggaagagagagug

SEQ ID NO: 48300 - RNA, 32 nt, Human
agcaagcucaacuacauuccagggcgcccagg

SEQ ID NO: 48301 - RNA, 32 nt, Human
agcaagcucugcccuggcuguggguaucagga

SEQ ID NO: 48302 - RNA, 32 nt, Human
agcaagcugagucugaacaaauggaucuuucu

SEQ ID NO: 48303 - RNA, 32 nt, Human
agcaagcugcuuuuguuacaccugccaucugc

SEQ ID NO: 48304 - RNA, 32 nt, Human
agcaagcuggcguacugcgaggggaagcucac

SEQ ID NO: 48305 - RNA, 32 nt, Human
agcaagcuggcuuuuggaaaugaaucaggaac

SEQ ID NO: 48306 - RNA, 24 nt, Human
agcaagcuucaaagaagcccagug

SEQ ID NO: 48307 - RNA, 32 nt, Human
agcaaggaaagaaauuaaggaaagaaguuaag

SEQ ID NO: 48308 - RNA, 32 nt, Human
agcaaggaaaguguuucuaucacuggaaggag

SEQ ID NO: 48309 - RNA, 32 nt, Human
agcaaggaccaucccaacucaggaugaacccu

SEQ ID NO: 48310 - RNA, 32 nt, Human
agcaaggacgcugcaaacuugcgcagcgcggg

SEQ ID NO: 48311 - RNA, 32 nt, Human
agcaaggacugcuguguguggguguguuccuc

SEQ ID NO: 48312 - RNA, 32 nt, Human
agcaaggagagugcaugacucacuggaaccgc

SEQ ID NO: 48313 - RNA, 32 nt, Human
agcaaggagggugugguggguugaaagccauc

SEQ ID NO: 48314 - RNA, 32 nt, Human
agcaaggagguccacugcuccaguuggcugca

SEQ ID NO: 48315 - RNA, 19 nt, Human
agcaaggaggugggcagca

SEQ ID NO: 48316 - RNA, 32 nt, Human
agcaaggagugaccugcucagcaaaggcauca

SEQ ID NO: 48317 - RNA, 32 nt, Human
agcaaggaucuuucacccacagaaagagagca

SEQ ID NO: 48318 - RNA, 17 nt, Human
agcaaggaugagcagca

SEQ ID NO: 48319 - RNA, 32 nt, Human
agcaaggaugcagucucccaggagaggaugca

SEQ ID NO: 48320 - RNA, 32 nt, Human
agcaaggcaccugcagguugggccauacuggc

SEQ ID NO: 48321 - RNA, 32 nt, Human
agcaaggcagaauggccaccccugccaaaguu

SEQ ID NO: 48322 - RNA, 32 nt, Human
agcaaggcagaauggccaccccugccaagguu

SEQ ID NO: 48323 - RNA, 32 nt, Human
agcaaggcaguaacaccacaaaagcaaaacca

SEQ ID NO: 48324 - RNA, 32 nt, Human
agcaaggcaugucugcacagggccuagcauga

SEQ ID NO: 48325 - RNA, 32 nt, Human
agcaaggcauguuuuaguugagugcucugguc

SEQ ID NO: 48326 - RNA, 32 nt, Human
agcaaggccaaagacuuuugagaauguguaug

SEQ ID NO: 48327 - RNA, 32 nt, Human
agcaaggcccacugcugcuccugggugagaag

SEQ ID NO: 48328 - RNA, 32 nt, Human
agcaaggcccagccaaggagguacagauuccu

SEQ ID NO: 48329 - RNA, 32 nt, Human
agcaaggccggccgcccugccggugugccgcc

SEQ ID NO: 48330 - RNA, 22 nt, Human
agcaaggcgcggggccccgguc

SEQ ID NO: 48331 - RNA, 32 nt, Human
agcaaggcugcacccuccuugaucaucacagg

SEQ ID NO: 48332 - RNA, 24 nt, Human
agcaaggcuguacccucaaugcag

SEQ ID NO: 48333 - RNA, 32 nt, Human
agcaagggaaggaaagcggggaaaggaggaag

SEQ ID NO: 48334 - RNA, 32 nt, Human
agcaagggaaggaggaagaaaggaaagaggag

SEQ ID NO: 48335 - RNA, 32 nt, Human
agcaagggaagugacaggaaauggagcugggg

SEQ ID NO: 48336 - RNA, 32 nt, Human
agcaagggacguggacggggcagugagccagg

SEQ ID NO: 48337 - RNA, 32 nt, Human
agcaagggagggaggaaggcggugagagaggc

SEQ ID NO: 48338 - RNA, 32 nt, Human
agcaagggagggagggagcgcgaguccgagag

SEQ ID NO: 48339 - RNA, 32 nt, Human
agcaagggaucacugugcuggguuuaaaugcg

SEQ ID NO: 48340 - RNA, 32 nt, Human
agcaagggcagcuugacucuauccugggauga

SEQ ID NO: 48341 - RNA, 32 nt, Human
agcaagggcaggguucagaaagacugaaugua

SEQ ID NO: 48342 - RNA, 32 nt, Human
agcaagggccaaacauucuuuaucccucccac

SEQ ID NO: 48343 - RNA, 32 nt, Human
agcaagggccuccgucuucccuuccuuaacuc

SEQ ID NO: 48344 - RNA, 32 nt, Human
agcaaggggaagugccugaagacauacacugg

SEQ ID NO: 48345 - RNA, 32 nt, Human
agcaaggggcccugaccucgggaugagauaac

SEQ ID NO: 48346 - RNA, 32 nt, Human
agcaaggggcuggggccagggagcagagcuuc

SEQ ID NO: 48347 - RNA, 32 nt, Human
agcaagguagagugagccaauggcgagagauc

SEQ ID NO: 48348 - RNA, 32 nt, Human
agcaaggucagcugccccacgccuguaucugg

SEQ ID NO: 48349 - RNA, 32 nt, Human
agcaaggucccugcggccaccaccuccuccuc

SEQ ID NO: 48350 - RNA, 32 nt, Human
agcaaggugaagcacaaggccggcaagcaggg

SEQ ID NO: 48351 - RNA, 32 nt, Human
agcaagguggcugaacuauagucuggaagccc

SEQ ID NO: 48352 - RNA, 32 nt, Human
agcaagguuaucaugcagaauuggguaagaau

SEQ ID NO: 48353 - RNA, 32 nt, Human
agcaagguuuguucaucuuccuuuccugucau

SEQ ID NO: 48354 - RNA, 32 nt, Human
agcaaguagugguuugguuucuaucauauaga

SEQ ID NO: 48355 - RNA, 32 nt, Human
agcaagucaaugucaccgacagugaugaggag

SEQ ID NO: 48356 - RNA, 22 nt, Human
agcaagucacacaugagcagca

SEQ ID NO: 48357 - RNA, 32 nt, Human
agcaagucacaccugccagugcccucauccuu

SEQ ID NO: 48358 - RNA, 32 nt, Human
agcaagucagcuuuuagugaaaugugaaaauu

SEQ ID NO: 48359 - RNA, 24 nt, Human
agcaagucccccagccccacccca

SEQ ID NO: 48360 - RNA, 32 nt, Human
agcaagucccugcagugagcacuagggacagu

SEQ ID NO: 48361 - RNA, 32 nt, Human
agcaaguccguauccuggaaguguuauuuuau

SEQ ID NO: 48362 - RNA, 32 nt, Human
agcaaguccucccaacugcaguaagucugagg

SEQ ID NO: 48363 - RNA, 32 nt, Human
agcaagucguccaaaccuuccaaaaagaagca

SEQ ID NO: 48364 - RNA, 32 nt, Human
agcaagucuuuuuaaaugcugcuuuauuucac

SEQ ID NO: 48365 - RNA, 32 nt, Human
agcaagugaacaaaacaaguugcagaacggag

SEQ ID NO: 48366 - RNA, 32 nt, Human
agcaagugcacuuuuaaauguguuacuaagau

SEQ ID NO: 48367 - RNA, 32 nt, Human
agcaagugugcaagacuccagaagcagaagcc

SEQ ID NO: 48368 - RNA, 32 nt, Human
agcaaguguuauuucuuaaauuucucaaaugc

SEQ ID NO: 48369 - RNA, 32 nt, Human
agcaaguguucacugcuccuugcugcauugau

SEQ ID NO: 48370 - RNA, 32 nt, Human
agcaaguuacuuuugagcgccuacuguguguc

SEQ ID NO: 48371 - RNA, 24 nt, Human
agcaaguugaagagaugaguaaca

SEQ ID NO: 48372 - RNA, 21 nt, Human
agcaaguuggcaaaacagaca

SEQ ID NO: 48373 - RNA, 32 nt, Human
agcaauaaaagcuucccccugauauccauccc

SEQ ID NO: 48374 - RNA, 32 nt, Human
agcaauaaauugguggggaagaggagguuuua

SEQ ID NO: 48375 - RNA, 32 nt, Human
agcaauaacuucagaggaggugaagacaucug

SEQ ID NO: 48376 - RNA, 32 nt, Human
agcaauaaggcccagccccgccuucugcuguu

SEQ ID NO: 48377 - RNA, 32 nt, Human
agcaauaaguaggaaguacuguaaaagaauua

SEQ ID NO: 48378 - RNA, 32 nt, Human
agcaauaaugguuugguucacuuuaugaaaaa

SEQ ID NO: 48379 - RNA, 32 nt, Human
agcaauacagagaaaaacaaacaaacauaauu

SEQ ID NO: 48380 - RNA, 32 nt, Human
agcaauacaggagaggaugaagggaggagcuc

SEQ ID NO: 48381 - RNA, 32 nt, Human
agcaauacuacacaacuugcuacuuucagaaa

SEQ ID NO: 48382 - RNA, 32 nt, Human
agcaauacucacugaccuacuaguuuauuuug

SEQ ID NO: 48383 - RNA, 32 nt, Human
agcaauacuguguaacaaauccgccaacacuc

SEQ ID NO: 48384 - RNA, 32 nt, Human
agcaauacuguugccagaaaggacacuccaua

SEQ ID NO: 48385 - RNA, 19 nt, Human
agcaauagacaguguuggu

SEQ ID NO: 48386 - RNA, 32 nt, Human
agcaauagacaguguugguaaugguugugcug

SEQ ID NO: 48387 - RNA, 32 nt, Human
agcaauagauggggcuuccuaccauuuguugg

SEQ ID NO: 48388 - RNA, 32 nt, Human
agcaauaggaagagaguguuauucugagacag

SEQ ID NO: 48389 - RNA, 31 nt, Human
agcaauaggcuucuccccugagcagagaccg

SEQ ID NO: 48390 - RNA, 32 nt, Human
agcaauagugaugcagaaccugucauuagcau

SEQ ID NO: 48391 - RNA, 32 nt, Human
agcaauauacauaggaguggaauugcuagguc

SEQ ID NO: 48392 - RNA, 32 nt, Human
agcaauaucccacaauaccucugacaaugaaa

SEQ ID NO: 48393 - RNA, 32 nt, Human
agcaaucaaaguguuuguuaauaaaagaaaaa

SEQ ID NO: 48394 - RNA, 32 nt, Human
agcaaucaagccacaggccuuauuucauaugu

SEQ ID NO: 48395 - RNA, 32 nt, Human
agcaaucaagcuuaucuggauauuucuuucuu

SEQ ID NO: 48396 - RNA, 32 nt, Human
agcaaucacgugcacacaggcagcauuaaugg

SEQ ID NO: 48397 - RNA, 32 nt, Human
agcaaucacugcacccagccaccucuauauac

SEQ ID NO: 48398 - RNA, 32 nt, Human
agcaaucagcccaccucugccucccaaagcgu

SEQ ID NO: 48399 - RNA, 32 nt, Human
agcaaucaggagagacagggcucggggaaggc

SEQ ID NO: 48400 - RNA, 22 nt, Human
agcaaucagucagggcugcagu

SEQ ID NO: 48401 - RNA, 32 nt, Human
agcaauccaagugauccucccaccucaaccuu

SEQ ID NO: 48402 - RNA, 32 nt, Human
agcaauccacccaccucugccucccaaagugc

SEQ ID NO: 48403 - RNA, 23 nt, Human
agcaauccaggcuuaugaagaug

SEQ ID NO: 48404 - RNA, 32 nt, Human
agcaaucccacaugcuuuucacaaacauuaaa

SEQ ID NO: 48405 - RNA, 32 nt, Human
agcaaucccccagccucggccucccaaagugc

SEQ ID NO: 48406 - RNA, 32 nt, Human
agcaauccuuggcuaacagaagauucuuccag

SEQ ID NO: 48407 - RNA, 32 nt, Human
agcaaucuaguacaaaccucucauuuuacaga

SEQ ID NO: 48408 - RNA, 32 nt, Human
agcaaucucaaccucuauuucuagaucacauu

SEQ ID NO: 48409 - RNA, 32 nt, Human
agcaaucugcauuuuaacaagcaccccaguca

SEQ ID NO: 48410 - RNA, 32 nt, Human
agcaaucuggaaggaacaaaaauguuuucugu

SEQ ID NO: 48411 - RNA, 32 nt, Human
agcaaucuucacuccagucucugccucugugu

SEQ ID NO: 48412 - RNA, 20 nt, Human
agcaaucuucauuaaugcag

SEQ ID NO: 48413 - RNA, 32 nt, Human
agcaaucuuccuuaauagcauuucaagccaug

SEQ ID NO: 48414 - RNA, 32 nt, Human
agcaaucuuccuuaauagcauuucaagccgug

SEQ ID NO: 48415 - RNA, 32 nt, Human
agcaaucuuugcuguucugcagccucugcugg

SEQ ID NO: 48416 - RNA, 32 nt, Human
agcaaugaaggcuggagaaugcagccuggauu

SEQ ID NO: 48417 - RNA, 21 nt, Human
agcaaugaccuguccacuuca

SEQ ID NO: 48418 - RNA, 32 nt, Human
agcaaugagaggagggagugagacuguuggcu

SEQ ID NO: 48419 - RNA, 32 nt, Human
agcaaugaggucuugcuguguugcccaggcug

SEQ ID NO: 48420 - RNA, 32 nt, Human
agcaaugaucguaccacugcacuccagccuag

SEQ ID NO: 48421 - RNA, 32 nt, Human
agcaaugcacaaugugucugggucaucacagc

SEQ ID NO: 48422 - RNA, 32 nt, Human
agcaaugcagagcccccauggagggcaggugg

SEQ ID NO: 48423 - RNA, 32 nt, Human
agcaaugcagcucaggagugccugggagcaca

SEQ ID NO: 48424 - RNA, 32 nt, Human
agcaaugcuaucuaccuucacacuccugagcu

SEQ ID NO: 48425 - RNA, 32 nt, Human
agcaauggcaccugggcagugccagggcuuaa

SEQ ID NO: 48426 - RNA, 32 nt, Human
agcaauggccagagcauuucucaccaguucug

SEQ ID NO: 48427 - RNA, 32 nt, Human
agcaaugggaugcaggaagaagaggcaggaga

SEQ ID NO: 48428 - RNA, 32 nt, Human
agcaaugggguuucaccaugcuggccaggcuu

SEQ ID NO: 48429 - RNA, 32 nt, Human
agcaaugguccaucagcucucugccuuccagc

SEQ ID NO: 48430 - RNA, 32 nt, Human
agcaauggucucaccauagcugcuggaaucac

SEQ ID NO: 48431 - RNA, 32 nt, Human
agcaaugugguuuugcagcucugacuucugcu

SEQ ID NO: 48432 - RNA, 22 nt, Human
agcaauguugggaaacaguguc

SEQ ID NO: 48433 - RNA, 21 nt, Human
agcaauguuuguugcuugcca

SEQ ID NO: 48434 - RNA, 32 nt, Human
agcaauuaaagaaaauagaauguggccacuua

SEQ ID NO: 48435 - RNA, 23 nt, Human
agcaauuacuugaggacaguuca

SEQ ID NO: 48436 - RNA, 32 nt, Human
agcaauuaggaaggaaggagaacaggaggagg

SEQ ID NO: 48437 - RNA, 32 nt, Human
agcaauuaggagaccuuuuguauucagacucu

SEQ ID NO: 48438 - RNA, 32 nt, Human
agcaauucaacagauaauagagcaauguuuag

SEQ ID NO: 48439 - RNA, 32 nt, Human
agcaauucauucucucugaacacacauugcua

SEQ ID NO: 48440 - RNA, 32 nt, Human
agcaauuccacuucuaggaauguacauacuca

SEQ ID NO: 48441 - RNA, 32 nt, Human
agcaauucccaggucauagcucaagaauuguu

SEQ ID NO: 48442 - RNA, 32 nt, Human
agcaauucucaugccucugccucucgggcagc

SEQ ID NO: 48443 - RNA, 32 nt, Human
agcaauucucauuccucucagccaaaggccug

SEQ ID NO: 48444 - RNA, 32 nt, Human
agcaauucuccagccucagccucccaaguagc

SEQ ID NO: 48445 - RNA, 32 nt, Human
agcaauucuccagccucugccucccgaguagc

SEQ ID NO: 48446 - RNA, 32 nt, Human
agcaauucuccugccucagccucccagauagc

SEQ ID NO: 48447 - RNA, 32 nt, Human
agcaauucuccugccucagccucccagguggc

SEQ ID NO: 48448 - RNA, 32 nt, Human
agcaauucucugccucagccuccugaguaacu

SEQ ID NO: 48449 - RNA, 32 nt, Human
agcaauucuguccucugauucccaccccuacc

SEQ ID NO: 48450 - RNA, 32 nt, Human
agcaauugcacaguuacauacacagucaauua

SEQ ID NO: 48451 - RNA, 32 nt, Human
agcaauugcaccacugcacuccagccugggug

SEQ ID NO: 48452 - RNA, 32 nt, Human
agcaauugcacuccggccugggcaacaagagc

SEQ ID NO: 48453 - RNA, 32 nt, Human
agcaauugguugucauuguccuaaacagagca

SEQ ID NO: 48454 - RNA, 32 nt, Human
agcaauugucugccucucccucugccucccuc

SEQ ID NO: 48455 - RNA, 32 nt, Human
agcaauuucccaaguguguguuuguuuuauau

SEQ ID NO: 48456 - RNA, 32 nt, Human
agcaauuuggugauucauuugcagcaaaauac

SEQ ID NO: 48457 - RNA, 32 nt, Human
agcaauuuuagguauauagaaguaggaagaag

SEQ ID NO: 48458 - RNA, 32 nt, Human
agcacaaacacaaggucauggccacacuguga

SEQ ID NO: 48459 - RNA, 32 nt, Human
agcacaaaggauuugaguaggaagaugaccag

SEQ ID NO: 48460 - RNA, 32 nt, Human
agcacaaagugcugggauuacaggcaugacca

SEQ ID NO: 48461 - RNA, 22 nt, Human
agcacaaaugcuguccauggcc

SEQ ID NO: 48462 - RNA, 32 nt, Human
agcacaacacaaauuccauccaagaggagaau

SEQ ID NO: 48463 - RNA, 32 nt, Human
agcacaaccuuuuccucaccagucccaugcug

SEQ ID NO: 48464 - RNA, 32 nt, Human
agcacaacucagccucccaggcugccagcaau

SEQ ID NO: 48465 - RNA, 32 nt, Human
agcacaacuuggcccugcguucccaggaaggg

SEQ ID NO: 48466 - RNA, 32 nt, Human
agcacaagaaguccuggagucuuuggaaggua

SEQ ID NO: 48467 - RNA, 32 nt, Human
agcacaagacaggcacauuccgcucacagcau

SEQ ID NO: 48468 - RNA, 32 nt, Human
agcacaagaggaagagagagacccucacugcu

SEQ ID NO: 48469 - RNA, 23 nt, Human
agcacaagauccuugcaugcaca

SEQ ID NO: 48470 - RNA, 32 nt, Human
agcacaagcagccugaggguuccaugggcuca

SEQ ID NO: 48471 - RNA, 23 nt, Human
agcacaagccauacaucgcaggu

SEQ ID NO: 48472 - RNA, 32 nt, Human
agcacaagccugauuuaugucacugcacuucu

SEQ ID NO: 48473 - RNA, 32 nt, Human
agcacaagccugggagugacgggaugggggag

SEQ ID NO: 48474 - RNA, 20 nt, Human
agcacaagcugccaggccug

SEQ ID NO: 48475 - RNA, 32 nt, Human
agcacaaggacucugugcaucuugacugcacc

SEQ ID NO: 48476 - RNA, 32 nt, Human
agcacaaggcauuggcccucuggacuccuuuc

SEQ ID NO: 48477 - RNA, 32 nt, Human
agcacaaggcccagaucggaaaccccaaacuc

SEQ ID NO: 48478 - RNA, 26 nt, Human
agcacaaggugggaucaggcugccuc

SEQ ID NO: 48479 - RNA, 32 nt, Human
agcacaaguaccacucuuggucagcuuuuguu

SEQ ID NO: 48480 - RNA, 32 nt, Human
agcacaaguuagggaggaagaggcaggcgaug

SEQ ID NO: 48481 - RNA, 32 nt, Human
agcacaaugaacagauuuaccaucccgaagaa

SEQ ID NO: 48482 - RNA, 32 nt, Human
agcacaauucugucccugucccugccccgccc

SEQ ID NO: 48483 - RNA, 32 nt, Human
agcacaauuggcagagaugaggcggguggugg

SEQ ID NO: 48484 - RNA, 21 nt, Human
agcacacaacugcacugaagc

SEQ ID NO: 48485 - RNA, 32 nt, Human
agcacacaagcgcauuucagaaacuuaucaaa

SEQ ID NO: 48486 - RNA, 32 nt, Human
agcacacacagaauaacccugcauccaaauuc

SEQ ID NO: 48487 - RNA, 31 nt, Human
agcacacacagcuaagagauaagaaggcugc

SEQ ID NO: 48488 - RNA, 32 nt, Human
agcacacacaugcaaggcauauacauggacac

SEQ ID NO: 48489 - RNA, 32 nt, Human
agcacacacaugcuuaccuaaugcaucacugu

SEQ ID NO: 48490 - RNA, 18 nt, Human
agcacacacaugugcaca

SEQ ID NO: 48491 - RNA, 20 nt, Human
agcacacaccauauuucaaa

SEQ ID NO: 48492 - RNA, 32 nt, Human
agcacacaccaugaagaucaccagcuuggaug

SEQ ID NO: 48493 - RNA, 23 nt, Human
agcacacacccugcgggccuuca

SEQ ID NO: 48494 - RNA, 32 nt, Human
agcacacaccucuuugccaucuaugccagcau

SEQ ID NO: 48495 - RNA, 32 nt, Human
agcacacaccuguaaucccagcuacuugagag

SEQ ID NO: 48496 - RNA, 32 nt, Human
agcacacacucaucauggauugcucagaguuc

SEQ ID NO: 48497 - RNA, 32 nt, Human
agcacacacuucccugcuucugagcccauuaa

SEQ ID NO: 48498 - RNA, 32 nt, Human
agcacacagaagcaugagguucaugacucucc

SEQ ID NO: 48499 - RNA, 32 nt, Human
agcacacagcacaggcgccguccuauaacauc

SEQ ID NO: 48500 - RNA, 32 nt, Human
agcacacaggccugccccucuccagccagcuc

SEQ ID NO: 48501 - RNA, 32 nt, Human
agcacacaggguauccacauguuacccugcag

SEQ ID NO: 48502 - RNA, 32 nt, Human
agcacacaugcgcacacacacuugcauucaug

SEQ ID NO: 48503 - RNA, 32 nt, Human
agcacacauuugcagugcaccuacuguguuug

SEQ ID NO: 48504 - RNA, 32 nt, Human
agcacaccaacccggcuuucuucugagggaca

SEQ ID NO: 48505 - RNA, 32 nt, Human
agcacaccacugcacuccagccugggcaacaa

SEQ ID NO: 48506 - RNA, 32 nt, Human
agcacaccauccuuagcacucugggugucugg

SEQ ID NO: 48507 - RNA, 32 nt, Human
agcacaccccggggagacagugcaaugaaagg

SEQ ID NO: 48508 - RNA, 32 nt, Human
agcacacccugaaucaccccuacuacagcacg

SEQ ID NO: 48509 - RNA, 32 nt, Human
agcacacccugaaucaccccuacuggcugacc

SEQ ID NO: 48510 - RNA, 21 nt, Human
agcacaccgagcuggcccgca

SEQ ID NO: 48511 - RNA, 32 nt, Human
agcacaccggcauccccaccugcugcagggac

SEQ ID NO: 48512 - RNA, 32 nt, Human
agcacaccguuuccuguugcucagggacucau

SEQ ID NO: 48513 - RNA, 32 nt, Human
agcacaccucaccuccaugccccacacuugcc

SEQ ID NO: 48514 - RNA, 32 nt, Human
agcacaccuccaggaacaaacucccuggccug

SEQ ID NO: 48515 - RNA, 32 nt, Human
agcacaccugcacucccacacgcccacccagc

SEQ ID NO: 48516 - RNA, 32 nt, Human
agcacacgacuugcccuagagccauggcuggg

SEQ ID NO: 48517 - RNA, 32 nt, Human
agcacacgcaugcugccugcugugcuggagua

SEQ ID NO: 48518 - RNA, 32 nt, Human
agcacacgccuguaaucccagcuacuugggag

SEQ ID NO: 48519 - RNA, 32 nt, Human
agcacacgucggagaacaggaggcucacaaaa

SEQ ID NO: 48520 - RNA, 32 nt, Human
agcacacuacagccuccaacucuugggcucaa

SEQ ID NO: 48521 - RNA, 32 nt, Human
agcacacuacagccuccaacucuuggguucaa

SEQ ID NO: 48522 - RNA, 32 nt, Human
agcacacucggagcuugugcuuugucuccacg

SEQ ID NO: 48523 - RNA, 18 nt, Human
agcacacucucagucaua

SEQ ID NO: 48524 - RNA, 32 nt, Human
agcacacucuucuugggcccuagaaggucagu

SEQ ID NO: 48525 - RNA, 32 nt, Human
agcacacugcagccuggaacuccugggaucag

SEQ ID NO: 48526 - RNA, 32 nt, Human
agcacacugcaggcugcugcuauucccugucu

SEQ ID NO: 48527 - RNA, 32 nt, Human
agcacacugccaggaugggagcugcugggagg

SEQ ID NO: 48528 - RNA, 32 nt, Human
agcacacugggcccuggcugggaguagagggg

SEQ ID NO: 48529 - RNA, 32 nt, Human
agcacacuuccccuccccaucuucccacuuaa

SEQ ID NO: 48530 - RNA, 22 nt, Human
agcacagaaaugcaaggucuaa

SEQ ID NO: 48531 - RNA, 19 nt, Human
agcacagaacguugccuaa

SEQ ID NO: 48532 - RNA, 32 nt, Human
agcacagaacugcucccucuucaucuccauau

SEQ ID NO: 48533 - RNA, 21 nt, Human
agcacagaacuuugaaccuag

SEQ ID NO: 48534 - RNA, 32 nt, Human
agcacagaagcugccuuuccuugaguaauaau

SEQ ID NO: 48535 - RNA, 32 nt, Human
agcacagaagucagcgggcaucuccuggagac

SEQ ID NO: 48536 - RNA, 17 nt, Human
agcacagaauaauaucu

SEQ ID NO: 48537 - RNA, 19 nt, Human
agcacagaaugaguauuua

SEQ ID NO: 48538 - RNA, 31 nt, Human
agcacagaauuuuagaauacuaugggggcug

SEQ ID NO: 48539 - RNA, 32 nt, Human
agcacagacguggggcauccccagaaagacuc

SEQ ID NO: 48540 - RNA, 32 nt, Human
agcacagacuggacuaagccuccugggccuug

SEQ ID NO: 48541 - RNA, 23 nt, Human
agcacagacuguucuauauuuga

SEQ ID NO: 48542 - RNA, 32 nt, Human
agcacagagaacagccaacggguucagggaac

SEQ ID NO: 48543 - RNA, 32 nt, Human
agcacagagcucgggaggacuccaccugcucu

SEQ ID NO: 48544 - RNA, 15 nt, Human
agcacagagcugccu

SEQ ID NO: 48545 - RNA, 21 nt, Human
agcacagagcugggauauuua

SEQ ID NO: 48546 - RNA, 22 nt, Human
agcacagaucaaacauauuuaa

SEQ ID NO: 48547 - RNA, 32 nt, Human
agcacagauggccaugaauugucauuuauagu

SEQ ID NO: 48548 - RNA, 20 nt, Human
agcacagauuaucauaucug

SEQ ID NO: 48549 - RNA, 32 nt, Human
agcacagauucacuggcugggucuccagucuc

SEQ ID NO: 48550 - RNA, 20 nt, Human
agcacagauugcagugaacc

SEQ ID NO: 48551 - RNA, 17 nt, Human
agcacagauugcugccc

SEQ ID NO: 48552 - RNA, 32 nt, Human
agcacagcaaagccgcuauagccagacuaccu

SEQ ID NO: 48553 - RNA, 20 nt, Human
agcacagcagagauaucuaa

SEQ ID NO: 48554 - RNA, 32 nt, Human
agcacagcagcauccacccagccugggcucaa

SEQ ID NO: 48555 - RNA, 32 nt, Human
agcacagcagccgcucagagacaggaauagaa

SEQ ID NO: 48556 - RNA, 32 nt, Human
agcacagcaggcagcugcaggagcagugggag

SEQ ID NO: 48557 - RNA, 32 nt, Human
agcacagcaguaggaagcccagugucccccaa

SEQ ID NO: 48558 - RNA, 19 nt, Human
agcacagccacaggagcgg

SEQ ID NO: 48559 - RNA, 32 nt, Human
agcacagccaguuaaaagaugcagccucacug

SEQ ID NO: 48560 - RNA, 18 nt, Human
agcacagccuuccaugcc

SEQ ID NO: 48561 - RNA, 18 nt, Human
agcacagcucagguuccc

SEQ ID NO: 48562 - RNA, 18 nt, Human
agcacagcucggguuccc

SEQ ID NO: 48563 - RNA, 32 nt, Human
agcacaggaacggucagaaacugggcucauca

SEQ ID NO: 48564 - RNA, 32 nt, Human
agcacaggaagccgaagcuggggucagaugag

SEQ ID NO: 48565 - RNA, 32 nt, Human
agcacaggaagucacacugaggggacacauuc

SEQ ID NO: 48566 - RNA, 32 nt, Human
agcacaggaaucuucuucuuggcagcugcagu

SEQ ID NO: 48567 - RNA, 32 nt, Human
agcacaggaauguuaacauguaugacagggga

SEQ ID NO: 48568 - RNA, 32 nt, Human
agcacaggagacggagguugcugugagcugag

SEQ ID NO: 48569 - RNA, 32 nt, Human
agcacaggaguuggaggauacagugagccaug

SEQ ID NO: 48570 - RNA, 21 nt, Human
agcacaggauaaaauacuuga

SEQ ID NO: 48571 - RNA, 18 nt, Human
agcacaggauuguuccug

SEQ ID NO: 48572 - RNA, 32 nt, Human
agcacaggcaacaguucagagguagugguaga

SEQ ID NO: 48573 - RNA, 22 nt, Human
agcacaggcagaggaugggcgg

SEQ ID NO: 48574 - RNA, 32 nt, Human
agcacaggcccagguggaucaucucaugcuaa

SEQ ID NO: 48575 - RNA, 18 nt, Human
agcacaggcugagaccug

SEQ ID NO: 48576 - RNA, 32 nt, Human
agcacaggcugucugcagucucaggcuuccua

SEQ ID NO: 48577 - RNA, 32 nt, Human
agcacagggaaaggacaaauacuugucaacua

SEQ ID NO: 48578 - RNA, 32 nt, Human
agcacagggaggcagaggcuuggguaaacuca

SEQ ID NO: 48579 - RNA, 32 nt, Human
agcacagggauucucaagaccugaguauuuuu

SEQ ID NO: 48580 - RNA, 32 nt, Human
agcacagggcccuggggcccuggcuggcagga

SEQ ID NO: 48581 - RNA, 32 nt, Human
agcacagggcuggaccacuaugcccuggagga

SEQ ID NO: 48582 - RNA, 32 nt, Human
agcacagggcugggugauacguacacccuaag

SEQ ID NO: 48583 - RNA, 32 nt, Human
agcacaggggacgcaaugggaggcagggacac

SEQ ID NO: 48584 - RNA, 21 nt, Human
agcacaggggaggauaccuga

SEQ ID NO: 48585 - RNA, 21 nt, Human
agcacagggggacaugccugg

SEQ ID NO: 48586 - RNA, 32 nt, Human
agcacagggggucccaccaaggacaaggacaa

SEQ ID NO: 48587 - RNA, 32 nt, Human
agcacaggguggacagucucugcggugggcag

SEQ ID NO: 48588 - RNA, 32 nt, Human
agcacagguauuucaggugugaaagaaucagu

SEQ ID NO: 48589 - RNA, 19 nt, Human
agcacaggucacugccuga

SEQ ID NO: 48590 - RNA, 20 nt, Human
agcacagguggcagcggcug

SEQ ID NO: 48591 - RNA, 19 nt, Human
agcacaggugucugccuag

SEQ ID NO: 48592 - RNA, 20 nt, Human
agcacagguucucagucuaa

SEQ ID NO: 48593 - RNA, 23 nt, Human
agcacaguaauguggcacugagc

SEQ ID NO: 48594 - RNA, 20 nt, Human
agcacaguauuaauauuuag

SEQ ID NO: 48595 - RNA, 23 nt, Human
agcacagucuuccuggugccuag

SEQ ID NO: 48596 - RNA, 32 nt, Human
agcacagugacuugcaccaaacagguguugca

SEQ ID NO: 48597 - RNA, 32 nt, Human
agcacagugagggcugguaccacccacuccug

SEQ ID NO: 48598 - RNA, 32 nt, Human
agcacaguggagauaaauuaacaggcauauuc

SEQ ID NO: 48599 - RNA, 32 nt, Human
agcacagugugggcaaccggacaggauggauu

SEQ ID NO: 48600 - RNA, 32 nt, Human
agcacaguuagcagauggugguuggcucccuc

SEQ ID NO: 48601 - RNA, 32 nt, Human
agcacaguucugcugcuguggcuucagcuuug

SEQ ID NO: 48602 - RNA, 32 nt, Human
agcacaguuuuuaauaaaugcuuguuacauuc

SEQ ID NO: 48603 - RNA, 32 nt, Human
agcacauaccuguaaucccagcuacucaggag

SEQ ID NO: 48604 - RNA, 32 nt, Human
agcacauacucagaccuguuuuguuaacuaga

SEQ ID NO: 48605 - RNA, 31 nt, Human
agcacauaggacagacugaaagacuguaauu

SEQ ID NO: 48606 - RNA, 32 nt, Human
agcacauaggcucaggcuucuguaggcuuccu

SEQ ID NO: 48607 - RNA, 20 nt, Human
agcacauaugcaaugccuga

SEQ ID NO: 48608 - RNA, 19 nt, Human
agcacauauuuaguaucua

SEQ ID NO: 48609 - RNA, 32 nt, Human
agcacaucacacaccauccccacugucauuca

SEQ ID NO: 48610 - RNA, 32 nt, Human
agcacaucacauuuaggacguugaagauuuuu

SEQ ID NO: 48611 - RNA, 32 nt, Human
agcacaucaucuuccuaggcagucucuucccc

SEQ ID NO: 48612 - RNA, 25 nt, Human
agcacauccacuggagaugcugggc

SEQ ID NO: 48613 - RNA, 32 nt, Human
agcacauccugccugcuguugcagccuggcug

SEQ ID NO: 48614 - RNA, 32 nt, Human
agcacaucuuucucacacuuugcucuuuggaa

SEQ ID NO: 48615 - RNA, 32 nt, Human
agcacaugagauguccucagcugggcuuggcu

SEQ ID NO: 48616 - RNA, 32 nt, Human
agcacaugcauaguggcaucagcagcuuccug

SEQ ID NO: 48617 - RNA, 32 nt, Human
agcacaugcaugcacaccaguacacacacagu

SEQ ID NO: 48618 - RNA, 32 nt, Human
agcacaugcccaggaucguguguguggggcuu

SEQ ID NO: 48619 - RNA, 32 nt, Human
agcacaugccccagcugggcuguuaccgggcc

SEQ ID NO: 48620 - RNA, 32 nt, Human
agcacaugccuauaaucccagcacuuugggag

SEQ ID NO: 48621 - RNA, 32 nt, Human
agcacaugccuguggucccagcuacucagagg

SEQ ID NO: 48622 - RNA, 20 nt, Human
agcacauggcagauuugcaa

SEQ ID NO: 48623 - RNA, 32 nt, Human
agcacauggcaggccauugcugagggcacagg

SEQ ID NO: 48624 - RNA, 30 nt, Human
agcacauggugacagugaugccgcuggaga

SEQ ID NO: 48625 - RNA, 32 nt, Human
agcacaugguuucugccuccagcaugcuagau

SEQ ID NO: 48626 - RNA, 32 nt, Human
agcacauguacacugguguuggacagagcagc

SEQ ID NO: 48627 - RNA, 18 nt, Human
agcacauguccuauccca

SEQ ID NO: 48628 - RNA, 32 nt, Human
agcacauguguaucagccuguccuggcugauu

SEQ ID NO: 48629 - RNA, 32 nt, Human
agcacauguuucagagagcacaggguugggga

SEQ ID NO: 48630 - RNA, 32 nt, Human
agcacauguuucagagagcacaggguuggggg

SEQ ID NO: 48631 - RNA, 32 nt, Human
agcacauugacccauagcacacacauacacac

SEQ ID NO: 48632 - RNA, 32 nt, Human
agcacauugcugcaaugugguacgugaauugc

SEQ ID NO: 48633 - RNA, 32 nt, Human
agcacauuucagcccccacccccucggggcuc

SEQ ID NO: 48634 - RNA, 19 nt, Human
agcaccaaagcagaggggc

SEQ ID NO: 48635 - RNA, 18 nt, Human
agcaccaaagccccuggc

SEQ ID NO: 48636 - RNA, 22 nt, Human
agcaccaacacgucccacgcug

SEQ ID NO: 48637 - RNA, 20 nt, Human
agcaccaacccggaaguggc

SEQ ID NO: 48638 - RNA, 32 nt, Human
agcaccaacucaaccuuugcuuuuuggaugag

SEQ ID NO: 48639 - RNA, 32 nt, Human
agcaccaagcaggggucaggcccugguggagg

SEQ ID NO: 48640 - RNA, 32 nt, Human
agcaccaagcggugguggcuguggaggaagcc

SEQ ID NO: 48641 - RNA, 32 nt, Human
agcaccaaggcgagcuccgggcucagaccaac

SEQ ID NO: 48642 - RNA, 32 nt, Human
agcaccaagggcccccgacacuccacuccugc

SEQ ID NO: 48643 - RNA, 28 nt, Human
agcaccaagggcuugcugccuuguuucc

SEQ ID NO: 48644 - RNA, 32 nt, Human
agcaccaaucccaacaugaaauuauauuacuc

SEQ ID NO: 48645 - RNA, 32 nt, Human
agcaccacacagacacucugcagagcacguag

SEQ ID NO: 48646 - RNA, 32 nt, Human
agcaccacacugggugcgucuccagucaucug

SEQ ID NO: 48647 - RNA, 32 nt, Human
agcaccacagaaugauccggguucagguugcg

SEQ ID NO: 48648 - RNA, 32 nt, Human
agcaccacagcagaggaggcccaggcagugcc

SEQ ID NO: 48649 - RNA, 32 nt, Human
agcaccacaguauaaaauacuacagcacucug

SEQ ID NO: 48650 - RNA, 32 nt, Human
agcaccaccaggucggaaggaggagacccacg

SEQ ID NO: 48651 - RNA, 21 nt, Human
agcaccaccccggccacggcg

SEQ ID NO: 48652 - RNA, 20 nt, Human
agcaccacggcagcaggagg

SEQ ID NO: 48653 - RNA, 25 nt, Human
agcaccacucugcugccccaccacg

SEQ ID NO: 48654 - RNA, 32 nt, Human
agcaccacugcacagagcuuugggaggcugca

SEQ ID NO: 48655 - RNA, 32 nt, Human
agcaccacugcacuaagccagugcggagcugu

SEQ ID NO: 48656 - RNA, 32 nt, Human
agcaccacugcacuccagccaggaaugaggca

SEQ ID NO: 48657 - RNA, 32 nt, Human
agcaccacugcacuccagccugggagacagag

SEQ ID NO: 48658 - RNA, 32 nt, Human
agcaccacugcacuccagccugggcaacagag

SEQ ID NO: 48659 - RNA, 32 nt, Human
agcaccacugcacuccagccugggugacagag

SEQ ID NO: 48660 - RNA, 32 nt, Human
agcaccacugcacuccaggcugggugacagag

SEQ ID NO: 48661 - RNA, 32 nt, Human
agcaccacugcacuucagccuggacaacagag

SEQ ID NO: 48662 - RNA, 32 nt, Human
agcaccacugcacuucuaguugacagagugag

SEQ ID NO: 48663 - RNA, 32 nt, Human
agcaccacugcacuuuagccugggcgacaaga

SEQ ID NO: 48664 - RNA, 32 nt, Human
agcaccacugcaguccagccugggcgacagag

SEQ ID NO: 48665 - RNA, 32 nt, Human
agcaccacugcaugcaagccugggcaauagag

SEQ ID NO: 48666 - RNA, 32 nt, Human
agcaccacugcgcuccagccugggugaggaga

SEQ ID NO: 48667 - RNA, 32 nt, Human
agcaccacuugagacugggggcagcauggagu

SEQ ID NO: 48668 - RNA, 32 nt, Human
agcaccagaguccccggaccugugucugcccu

SEQ ID NO: 48669 - RNA, 32 nt, Human
agcaccagcagcuccuggccuaccucaaaagc

SEQ ID NO: 48670 - RNA, 32 nt, Human
agcaccagcaucaguccugccucccaggaacc

SEQ ID NO: 48671 - RNA, 18 nt, Human
agcaccagccaggccacg

SEQ ID NO: 48672 - RNA, 32 nt, Human
agcaccagcucccuccugccugaagauguucc

SEQ ID NO: 48673 - RNA, 32 nt, Human
agcaccagcugaucugcagacuccaaggaggu

SEQ ID NO: 48674 - RNA, 32 nt, Human
agcaccaggacugcaagaggccauagagaaua

SEQ ID NO: 48675 - RNA, 32 nt, Human
agcaccaggaugcccauucgggugccugcuga

SEQ ID NO: 48676 - RNA, 32 nt, Human
agcaccaggcacagggauuuccuagccgagca

SEQ ID NO: 48677 - RNA, 32 nt, Human
agcaccaggcacgaacccaccugcugagagac

SEQ ID NO: 48678 - RNA, 32 nt, Human
agcaccaggccagggguugauuugaaacguga

SEQ ID NO: 48679 - RNA, 32 nt, Human
agcaccaggcccuuugccaucuguggagcaag

SEQ ID NO: 48680 - RNA, 32 nt, Human
agcaccaggcugggagaugaggugcacacagu

SEQ ID NO: 48681 - RNA, 32 nt, Human
agcaccagggcccugguggaggcugcuguggg

SEQ ID NO: 48682 - RNA, 19 nt, Human
agcaccaucccacgguggc

SEQ ID NO: 48683 - RNA, 32 nt, Human
agcaccaucccuggccuccucacauaggaauc

SEQ ID NO: 48684 - RNA, 31 nt, Human
agcaccaugccugcuugucgccuaggcccgc

SEQ ID NO: 48685 - RNA, 32 nt, Human
agcaccaugccuggcuaauuuuguauuuguag

SEQ ID NO: 48686 - RNA, 32 nt, Human
agcaccauggcaguaacccuauccuugggaau

SEQ ID NO: 48687 - RNA, 31 nt, Human
agcaccaugucccugcaguacggggcggagg

SEQ ID NO: 48688 - RNA, 32 nt, Human
agcaccauuagcccauuucccccaaauuaaac

SEQ ID NO: 48689 - RNA, 32 nt, Human
agcaccauugcaccccagccugagcaacaaga

SEQ ID NO: 48690 - RNA, 32 nt, Human
agcaccauugcacuccagccugggcgacucca

SEQ ID NO: 48691 - RNA, 32 nt, Human
agcacccaaaccgcaggcccugcucuggcagg

SEQ ID NO: 48692 - RNA, 32 nt, Human
agcacccaaccugacccccaucugccacaggg

SEQ ID NO: 48693 - RNA, 32 nt, Human
agcacccaagcuuggcugaguccuugggagcc

SEQ ID NO: 48694 - RNA, 24 nt, Human
agcacccacacccaccuccucucc

SEQ ID NO: 48695 - RNA, 32 nt, Human
agcacccacagcaccgcggcagcagcuagugc

SEQ ID NO: 48696 - RNA, 32 nt, Human
agcacccaccaucacuaccugcaccugcugug

SEQ ID NO: 48697 - RNA, 32 nt, Human
agcacccaccccuguguggcccccaggcccuc

SEQ ID NO: 48698 - RNA, 32 nt, Human
agcacccacccucucugugcucccgucugcac

SEQ ID NO: 48699 - RNA, 32 nt, Human
agcacccaccucccuacucucccucauggcgu

SEQ ID NO: 48700 - RNA, 32 nt, Human
agcacccacgugucaggcuuuguggugucugu

SEQ ID NO: 48701 - RNA, 32 nt, Human
agcacccagaacuccauaccaucggccgggug

SEQ ID NO: 48702 - RNA, 32 nt, Human
agcacccagagugagcuggaguggguccccau

SEQ ID NO: 48703 - RNA, 32 nt, Human
agcacccagaucaagaaauggaacauaaccag

SEQ ID NO: 48704 - RNA, 16 nt, Human
agcacccagcaugggc

SEQ ID NO: 48705 - RNA, 32 nt, Human
agcacccagccaggagaccugcagcccugcgc

SEQ ID NO: 48706 - RNA, 22 nt, Human
agcacccagcccaccccuuccu

SEQ ID NO: 48707 - RNA, 32 nt, Human
agcacccagcucauggcuuacauccccaugcc

SEQ ID NO: 48708 - RNA, 32 nt, Human
agcacccaggagaaacagggcaguggaccaau

SEQ ID NO: 48709 - RNA, 32 nt, Human
agcacccaggagaugcugagaagaucacccag

SEQ ID NO: 48710 - RNA, 32 nt, Human
agcacccaggagcggggaagcgaagugcgaga

SEQ ID NO: 48711 - RNA, 32 nt, Human
agcaccccaucaaaaguaguucaucaaauguc

SEQ ID NO: 48712 - RNA, 32 nt, Human
agcacccccaacagccagcacucuucuccuag

SEQ ID NO: 48713 - RNA, 32 nt, Human
agcacccccagccaggucagagucggcccgua

SEQ ID NO: 48714 - RNA, 32 nt, Human
agcacccccagccugccuuugccaccagcccc

SEQ ID NO: 48715 - RNA, 32 nt, Human
agcacccccuccggugugcacacaggccagug

SEQ ID NO: 48716 - RNA, 32 nt, Human
agcacccccucuccucuucaccucuuccugcu

SEQ ID NO: 48717 - RNA, 32 nt, Human
agcaccccuauucccaggagcuucuggccuga

SEQ ID NO: 48718 - RNA, 32 nt, Human
agcaccccugguacucagcacacacaugcuua

SEQ ID NO: 48719 - RNA, 32 nt, Human
agcaccccuugccucuguggcagcugcgagug

SEQ ID NO: 48720 - RNA, 32 nt, Human
agcacccgagcccuggaguggcccaguacccu

SEQ ID NO: 48721 - RNA, 32 nt, Human
agcacccgcucugauuccccacagccuuucuc

SEQ ID NO: 48722 - RNA, 32 nt, Human
agcacccgcugaacaucagccugggagacgcg

SEQ ID NO: 48723 - RNA, 32 nt, Human
agcacccucaggagaaguggcgccgcaggggu

SEQ ID NO: 48724 - RNA, 32 nt, Human
agcacccuccacuucucuccuaggcaaugaga

SEQ ID NO: 48725 - RNA, 32 nt, Human
agcacccuccagggcaguccugugacuguuuc

SEQ ID NO: 48726 - RNA, 19 nt, Human
agcacccucccagcaacca

SEQ ID NO: 48727 - RNA, 32 nt, Human
agcacccucccaggcgcuccuggagccagggu

SEQ ID NO: 48728 - RNA, 18 nt, Human
agcacccucccugcucuc

SEQ ID NO: 48729 - RNA, 32 nt, Human
agcacccucuaaguggaggacagaacauuguu

SEQ ID NO: 48730 - RNA, 32 nt, Human
agcacccucugcagccccacuccugggccuuc

SEQ ID NO: 48731 - RNA, 23 nt, Human
agcacccucuuaugucccauggc

SEQ ID NO: 48732 - RNA, 25 nt, Human
agcacccucuuguauuccuauggca

SEQ ID NO: 48733 - RNA, 21 nt, Human
agcacccugaaccccauggca

SEQ ID NO: 48734 - RNA, 32 nt, Human
agcacccugagcugcugagauggggcgggccg

SEQ ID NO: 48735 - RNA, 21 nt, Human
agcacccugccucaauggaga

SEQ ID NO: 48736 - RNA, 32 nt, Human
agcacccugggcgacagagugagacccugucu

SEQ ID NO: 48737 - RNA, 32 nt, Human
agcacccuggggaggagguguugcuguccagg

SEQ ID NO: 48738 - RNA, 32 nt, Human
agcacccuguaaggcaggagcaggcagcucag

SEQ ID NO: 48739 - RNA, 32 nt, Human
agcacccuuuacugcuguguauggggcuucac

SEQ ID NO: 48740 - RNA, 32 nt, Human
agcaccgacagaaacccacacaccugcaggga

SEQ ID NO: 48741 - RNA, 32 nt, Human
agcaccgagagccacuuccuggagcaugcucc

SEQ ID NO: 48742 - RNA, 32 nt, Human
agcaccgagaugggugaugugucccugcgucu

SEQ ID NO: 48743 - RNA, 32 nt, Human
agcaccgaugucccuuugauaaccugcacuca

SEQ ID NO: 48744 - RNA, 32 nt, Human
agcaccgcccacccugccccucagucaugcag

SEQ ID NO: 48745 - RNA, 32 nt, Human
agcaccgcguucccguccucuuccgcuuggcc

SEQ ID NO: 48746 - RNA, 32 nt, Human
agcaccgcugcacucgcggccggcgaugcggg

SEQ ID NO: 48747 - RNA, 32 nt, Human
agcaccgcugcccucaggcuugaggggugcuu

SEQ ID NO: 48748 - RNA, 32 nt, Human
agcaccggaaguccagggagggccaaguccac

SEQ ID NO: 48749 - RNA, 32 nt, Human
agcaccggaggaagaaagaggaggggcuggcu

SEQ ID NO: 48750 - RNA, 32 nt, Human
agcaccggcacuaagcucccaccgcucagcga

SEQ ID NO: 48751 - RNA, 32 nt, Human
agcaccggcuccaggccagcgugggccgcucu

SEQ ID NO: 48752 - RNA, 20 nt, Human
agcaccgggccgacggcggc

SEQ ID NO: 48753 - RNA, 21 nt, Human
agcaccgucugcuccuccuca

SEQ ID NO: 48754 - RNA, 32 nt, Human
agcaccgucugguucauugucuugaacucugc

SEQ ID NO: 48755 - RNA, 32 nt, Human
agcaccgugcagcuuuggccugggcacagacc

SEQ ID NO: 48756 - RNA, 32 nt, Human
agcaccuaaaacagugcuugacauauaccuaa

SEQ ID NO: 48757 - RNA, 18 nt, Human
agcaccuaaggggcacca

SEQ ID NO: 48758 - RNA, 32 nt, Human
agcaccuacugucugccaggccccagagcuca

SEQ ID NO: 48759 - RNA, 32 nt, Human
agcaccuagguugaagcaccugguuuauaggc

SEQ ID NO: 48760 - RNA, 32 nt, Human
agcaccucaccugagaccuccacuccacaucu

SEQ ID NO: 48761 - RNA, 32 nt, Human
agcaccucacugccguccuguuccuacucacc

SEQ ID NO: 48762 - RNA, 32 nt, Human
agcaccucagacagucaggcagugaugaacau

SEQ ID NO: 48763 - RNA, 22 nt, Human
agcaccucaugccuuccauuaa

SEQ ID NO: 48764 - RNA, 32 nt, Human
agcaccucaugggaucagaaaagagaaagaug

SEQ ID NO: 48765 - RNA, 32 nt, Human
agcaccuccccaagccgcuaccaccagcccuc

SEQ ID NO: 48766 - RNA, 32 nt, Human
agcaccuccugccucgaacuggcugcaaaggg

SEQ ID NO: 48767 - RNA, 32 nt, Human
agcaccuccuuugcuggucagacauggagccu

SEQ ID NO: 48768 - RNA, 32 nt, Human
agcaccucuccgcucacucucuuccuccugcu

SEQ ID NO: 48769 - RNA, 32 nt, Human
agcaccucugcagccucugcucugcugccuug

SEQ ID NO: 48770 - RNA, 32 nt, Human
agcaccucugcagccugcugggccucagguuc

SEQ ID NO: 48771 - RNA, 32 nt, Human
agcaccucuucaaccaccuccggcuuccagga

SEQ ID NO: 48772 - RNA, 32 nt, Human
agcaccucuugaaauccagauguucauauuag

SEQ ID NO: 48773 - RNA, 32 nt, Human
agcaccugagacugaagcuccucccaagacag

SEQ ID NO: 48774 - RNA, 32 nt, Human
agcaccugcaggaaggggcggcuguaggcgca

SEQ ID NO: 48775 - RNA, 32 nt, Human
agcaccugcaugcucagacuucuuguggcgcc

SEQ ID NO: 48776 - RNA, 32 nt, Human
agcaccugcccaggguaggccuggcaugaggg

SEQ ID NO: 48777 - RNA, 32 nt, Human
agcaccugccccaccugcccacagagaacaca

SEQ ID NO: 48778 - RNA, 32 nt, Human
agcaccugcccuucucacccauggcccaccca

SEQ ID NO: 48779 - RNA, 32 nt, Human
agcaccugccggcagaguuccccagccuggag

SEQ ID NO: 48780 - RNA, 32 nt, Human
agcaccugccuccccgacccucgcuggggcgg

SEQ ID NO: 48781 - RNA, 32 nt, Human
agcaccuggagccucuggaggaagaggaggga

SEQ ID NO: 48782 - RNA, 19 nt, Human
agcaccuggaggggcacca

SEQ ID NO: 48783 - RNA, 32 nt, Human
agcaccuggccccaggacugagguccugagaa

SEQ ID NO: 48784 - RNA, 32 nt, Human
agcaccugggagggcagggaggcuuuggugac

SEQ ID NO: 48785 - RNA, 32 nt, Human
agcaccugggccagcggcugagcuguacauac

SEQ ID NO: 48786 - RNA, 32 nt, Human
agcaccugggcuccugccaguuucaugugugc

SEQ ID NO: 48787 - RNA, 32 nt, Human
agcaccuggggaggggcaguggcgggcuccag

SEQ ID NO: 48788 - RNA, 32 nt, Human
agcaccuguaaucccagcuacucgggaggcug

SEQ ID NO: 48789 - RNA, 32 nt, Human
agcaccuguaaucccagcuacucgggagggug

SEQ ID NO: 48790 - RNA, 32 nt, Human
agcaccuguaaucccagcuacucuggaggcug

SEQ ID NO: 48791 - RNA, 32 nt, Human
agcaccuguagucccagcuacucgggaggcug

SEQ ID NO: 48792 - RNA, 32 nt, Human
agcaccugugacuccaguaccuacuacugguu

SEQ ID NO: 48793 - RNA, 32 nt, Human
agcaccuuaagccaccacccucagccacaauu

SEQ ID NO: 48794 - RNA, 32 nt, Human
agcaccuuaguguugcucugccucagccagcu

SEQ ID NO: 48795 - RNA, 32 nt, Human
agcaccuuccaaggagccaacuuuuauucccu

SEQ ID NO: 48796 - RNA, 32 nt, Human
agcaccuuccccuggagcccucagggagcgcg

SEQ ID NO: 48797 - RNA, 31 nt, Human
agcaccuuccuacagagaugacuuuaaaagg

SEQ ID NO: 48798 - RNA, 32 nt, Human
agcaccuuccucuccagccagaggcugaccug

SEQ ID NO: 48799 - RNA, 21 nt, Human
agcaccuuccucucccaggca

SEQ ID NO: 48800 - RNA, 32 nt, Human
agcaccuucguuucuccucuagaccagggaca

SEQ ID NO: 48801 - RNA, 32 nt, Human
agcaccuucugucucgcugucucccucugugc

SEQ ID NO: 48802 - RNA, 32 nt, Human
agcaccuugcagagguuaaagccagcgggucc

SEQ ID NO: 48803 - RNA, 32 nt, Human
agcaccuugccuggccccuccccaggcucccu

SEQ ID NO: 48804 - RNA, 32 nt, Human
agcaccuuguuuccucagcacuuuaucucuau

SEQ ID NO: 48805 - RNA, 32 nt, Human
agcaccuuucauucaggcaugaugccaggugc

SEQ ID NO: 48806 - RNA, 32 nt, Human
agcaccuuucuacagacuggacugcccagcuc

SEQ ID NO: 48807 - RNA, 32 nt, Human
agcaccuuucuccccuccccucuuuccucacc

SEQ ID NO: 48808 - RNA, 32 nt, Human
agcacgaagucacaucccagccccagagucac

SEQ ID NO: 48809 - RNA, 32 nt, Human
agcacgaaguuucuagugccacacacaguauu

SEQ ID NO: 48810 - RNA, 32 nt, Human
agcacgaaucacugcacccagccuauggaaca

SEQ ID NO: 48811 - RNA, 32 nt, Human
agcacgacucagcguggcaggcuguagcuuuc

SEQ ID NO: 48812 - RNA, 32 nt, Human
agcacgauggagauuuggacacugugugcuuu

SEQ ID NO: 48813 - RNA, 32 nt, Human
agcacgcacgcuccgaaugacuccuggugcua

SEQ ID NO: 48814 - RNA, 24 nt, Human
agcacgcacgugugugagcacgca

SEQ ID NO: 48815 - RNA, 32 nt, Human
agcacgcaugcaucacaugcauugucaucagu

SEQ ID NO: 48816 - RNA, 32 nt, Human
agcacgccacugcacuccagccugggugacag

SEQ ID NO: 48817 - RNA, 32 nt, Human
agcacgcccuaguggaccugcgccuggauuau

SEQ ID NO: 48818 - RNA, 32 nt, Human
agcacgccguccagauccccaggauaagagac

SEQ ID NO: 48819 - RNA, 32 nt, Human
agcacgccugugcucugugcuugccucaccag

SEQ ID NO: 48820 - RNA, 32 nt, Human
agcacgcuaugacauccaugugcgcguggcag

SEQ ID NO: 48821 - RNA, 32 nt, Human
agcacgcuccaucccucaugcucagcugccuc

SEQ ID NO: 48822 - RNA, 32 nt, Human
agcacggaagaugcccacgugccugagccacc

SEQ ID NO: 48823 - RNA, 32 nt, Human
agcacggagcggaagggagagcaggggagaga

SEQ ID NO: 48824 - RNA, 32 nt, Human
agcacggagcgggagagcguggcgagagaaug

SEQ ID NO: 48825 - RNA, 32 nt, Human
agcacggcacuucagccuaggugacagaguga

SEQ ID NO: 48826 - RNA, 18 nt, Human
agcacggcccgcgggcgg

SEQ ID NO: 48827 - RNA, 19 nt, Human
agcacggcuccccauggcc

SEQ ID NO: 48828 - RNA, 32 nt, Human
agcacggcucuguccccagccugggaaagccc

SEQ ID NO: 48829 - RNA, 32 nt, Human
agcacgggcaggcaugggguccccugggugga

SEQ ID NO: 48830 - RNA, 32 nt, Human
agcacgggcaugccuuggaauauugccaagcu

SEQ ID NO: 48831 - RNA, 32 nt, Human
agcacgggccauaugaauaacauggugugcuu

SEQ ID NO: 48832 - RNA, 32 nt, Human
agcacgggcucccucucgcguggccucgccgg

SEQ ID NO: 48833 - RNA, 32 nt, Human
agcacggggaggcggcggcggcggcggcggcc

SEQ ID NO: 48834 - RNA, 32 nt, Human
agcacggggcccaggcuagagugcaguggcgu

SEQ ID NO: 48835 - RNA, 32 nt, Human
agcacgggugacuucuuuuucucuucauuagc

SEQ ID NO: 48836 - RNA, 32 nt, Human
agcacgggugaggugccucccuucucugggca

SEQ ID NO: 48837 - RNA, 32 nt, Human
agcacguaguuuauguuccugaggcagcacuu

SEQ ID NO: 48838 - RNA, 32 nt, Human
agcacguauuucuccccucuaguaccucugca

SEQ ID NO: 48839 - RNA, 19 nt, Human
agcacguccccugcaccac

SEQ ID NO: 48840 - RNA, 22 nt, Human
agcacguccccugcaccacggc

SEQ ID NO: 48841 - RNA, 32 nt, Human
agcacgugagcaucuguccuuucuacccguuc

SEQ ID NO: 48842 - RNA, 32 nt, Human
agcacgugcacaaauucaugugccgugccuua

SEQ ID NO: 48843 - RNA, 32 nt, Human
agcacgugcaccaaggaguggagggagggccc

SEQ ID NO: 48844 - RNA, 32 nt, Human
agcacgugccuguagucccagcuacucgggag

SEQ ID NO: 48845 - RNA, 27 nt, Human
agcacguuggcgaggaaaaacaaaaca

SEQ ID NO: 48846 - RNA, 32 nt, Human
agcacuaaaggaagcaucacagcaacuggcug

SEQ ID NO: 48847 - RNA, 27 nt, Human
agcacuaaaugcuuuggugguguuugc

SEQ ID NO: 48848 - RNA, 32 nt, Human
agcacuaagggagccagcgcacagcacagcca

SEQ ID NO: 48849 - RNA, 32 nt, Human
agcacuaaucuacugccagcugucccacccua

SEQ ID NO: 48850 - RNA, 24 nt, Human
agcacuacagaaacccugguucuu

SEQ ID NO: 48851 - RNA, 25 nt, Human
agcacuacauucuguaaccuuguuu

SEQ ID NO: 48852 - RNA, 21 nt, Human
agcacuacauucuuuuaucuu

SEQ ID NO: 48853 - RNA, 32 nt, Human
agcacuacccauacuggauggagcuaccaaga

SEQ ID NO: 48854 - RNA, 32 nt, Human
agcacuacccuccucucuccccagaugugacu

SEQ ID NO: 48855 - RNA, 32 nt, Human
agcacuacugcacuuaguagcuaugugauuuu

SEQ ID NO: 48856 - RNA, 17 nt, Human
agcacuacugcuggcca

SEQ ID NO: 48857 - RNA, 32 nt, Human
agcacuacuguggcugaaaaacuucucuucaa

SEQ ID NO: 48858 - RNA, 16 nt, Human
agcacuagaugcagca

SEQ ID NO: 48859 - RNA, 23 nt, Human
agcacuagcaacauuuggcuaua

SEQ ID NO: 48860 - RNA, 32 nt, Human
agcacuagccagccaggaauugcccaucccag

SEQ ID NO: 48861 - RNA, 32 nt, Human
agcacuaggauuacaggugugagccaccaugc

SEQ ID NO: 48862 - RNA, 32 nt, Human
agcacuaucacugcaaccuccgccuccugggu

SEQ ID NO: 48863 - RNA, 32 nt, Human
agcacuauccucaucucuccccagaugugacu

SEQ ID NO: 48864 - RNA, 32 nt, Human
agcacuaugcaagcccaggcccucugcugagc

SEQ ID NO: 48865 - RNA, 32 nt, Human
agcacuauuaucaguucugccuagguaaaugu

SEQ ID NO: 48866 - RNA, 32 nt, Human
agcacucacccucucugugcucccgucugcac

SEQ ID NO: 48867 - RNA, 32 nt, Human
agcacucacucuugaaggcacacacauacaca

SEQ ID NO: 48868 - RNA, 22 nt, Human
agcacucacuggagacccuugg

SEQ ID NO: 48869 - RNA, 32 nt, Human
agcacucagcucagccuccuguccccaugagc

SEQ ID NO: 48870 - RNA, 32 nt, Human
agcacucagcugugucagauuugauuaauauu

SEQ ID NO: 48871 - RNA, 32 nt, Human
agcacucaggagaggggagaaaggaggugcac

SEQ ID NO: 48872 - RNA, 32 nt, Human
agcacucauccagaaggcccugaggaagaaga

SEQ ID NO: 48873 - RNA, 32 nt, Human
agcacuccagaaaucucucugccaucauuacc

SEQ ID NO: 48874 - RNA, 32 nt, Human
agcacuccagccugggcgacagagugagacuc

SEQ ID NO: 48875 - RNA, 32 nt, Human
agcacucccaggagaaccagcaucuucaugug

SEQ ID NO: 48876 - RNA, 32 nt, Human
agcacucccucagagacccaaacagugggggc

SEQ ID NO: 48877 - RNA, 32 nt, Human
agcacucccuuuccucuagaucggccugaggc

SEQ ID NO: 48878 - RNA, 32 nt, Human
agcacuccgaggaauggccaagcccucaucgc

SEQ ID NO: 48879 - RNA, 32 nt, Human
agcacuccuccuuccugaccuccaggcuucca

SEQ ID NO: 48880 - RNA, 32 nt, Human
agcacuccucuguagagaggugggauccuugu

SEQ ID NO: 48881 - RNA, 32 nt, Human
agcacuccuggagcuugccaccagcuuggacu

SEQ ID NO: 48882 - RNA, 32 nt, Human
agcacuccugggcacucuggaagcaggcuguu

SEQ ID NO: 48883 - RNA, 32 nt, Human
agcacuccuuuccccugcuguccccuucgacc

SEQ ID NO: 48884 - RNA, 32 nt, Human
agcacucggggucccuggagggcaagcccugc

SEQ ID NO: 48885 - RNA, 32 nt, Human
agcacucgugggagccacagggcaggggcagc

SEQ ID NO: 48886 - RNA, 32 nt, Human
agcacucucagccuccccgccuucagcuguca

SEQ ID NO: 48887 - RNA, 32 nt, Human
agcacucugaaugcuccagucacaccuuauag

SEQ ID NO: 48888 - RNA, 32 nt, Human
agcacucugcaugacuuuaauucuugggacaa

SEQ ID NO: 48889 - RNA, 32 nt, Human
agcacucugccgcucaagagcugguuuguuaa

SEQ ID NO: 48890 - RNA, 32 nt, Human
agcacucuuucugcaagugucuugcucacagu

SEQ ID NO: 48891 - RNA, 32 nt, Human
agcacugaaaaccucuccaccugggccagggu

SEQ ID NO: 48892 - RNA, 32 nt, Human
agcacugacccaaggaguucuguuaugguacu

SEQ ID NO: 48893 - RNA, 32 nt, Human
agcacugaccccagcaaccucuuucucuugcc

SEQ ID NO: 48894 - RNA, 32 nt, Human
agcacugacucagagguucaggcuuuuuccaa

SEQ ID NO: 48895 - RNA, 32 nt, Human
agcacugagccagcaggaaggaucucacaggu

SEQ ID NO: 48896 - RNA, 32 nt, Human
agcacugagcuggcugucugucauucgaauga

SEQ ID NO: 48897 - RNA, 32 nt, Human
agcacugagcugugugcacugugccagggaca

SEQ ID NO: 48898 - RNA, 32 nt, Human
agcacugagguuuccugauuccuggguggagc

SEQ ID NO: 48899 - RNA, 32 nt, Human
agcacugagucucugggauucuggcaagguac

SEQ ID NO: 48900 - RNA, 32 nt, Human
agcacugaucuagggcaggagucagcagucug

SEQ ID NO: 48901 - RNA, 32 nt, Human
agcacugaugggacacagcagguggcaacggg

SEQ ID NO: 48902 - RNA, 32 nt, Human
agcacugaugggggcccucugcaccaaccaga

SEQ ID NO: 48903 - RNA, 32 nt, Human
agcacugauuuuagcucugagaacaaacaaau

SEQ ID NO: 48904 - RNA, 32 nt, Human
agcacugcaaucaauaccucacaaagcgacuc

SEQ ID NO: 48905 - RNA, 32 nt, Human
agcacugcacugacgguuuggagaccugagcc

SEQ ID NO: 48906 - RNA, 32 nt, Human
agcacugcagccacaagccauggcagucgugg

SEQ ID NO: 48907 - RNA, 32 nt, Human
agcacugcagccucaaccuccugggcucaagc

SEQ ID NO: 48908 - RNA, 19 nt, Human
agcacugcagcgagcagca

SEQ ID NO: 48909 - RNA, 32 nt, Human
agcacugccacccuggccauugcuguggugcc

SEQ ID NO: 48910 - RNA, 20 nt, Human
agcacugccagcaccagcgg

SEQ ID NO: 48911 - RNA, 21 nt, Human
agcacugccagccuccucucc

SEQ ID NO: 48912 - RNA, 32 nt, Human
agcacugccaguuaaagagcauuagaagaggu

SEQ ID NO: 48913 - RNA, 17 nt, Human
agcacugccauuggcca

SEQ ID NO: 48914 - RNA, 32 nt, Human
agcacugcccuauuagcaauguuaacaaaaau

SEQ ID NO: 48915 - RNA, 32 nt, Human
agcacugccuuugccagcauccuaaaucugga

SEQ ID NO: 48916 - RNA, 32 nt, Human
agcacugcucuuccccuccuauaaucauaaua

SEQ ID NO: 48917 - RNA, 32 nt, Human
agcacugcugggugguggaggugggcaguggc

SEQ ID NO: 48918 - RNA, 32 nt, Human
agcacugcuguuccauggcugugugacuuucg

SEQ ID NO: 48919 - RNA, 32 nt, Human
agcacugcuguugggaaggugacugcaggaaa

SEQ ID NO: 48920 - RNA, 32 nt, Human
agcacugcuuccucccuucuucaacggcaucu

SEQ ID NO: 48921 - RNA, 32 nt, Human
agcacugcuucuugguccuuguuuucuuuugc

SEQ ID NO: 48922 - RNA, 32 nt, Human
agcacugcuuugccaagguuggaacauuggcu

SEQ ID NO: 48923 - RNA, 32 nt, Human
agcacuggaauuucacacuuuaaugauaauau

SEQ ID NO: 48924 - RNA, 32 nt, Human
agcacuggaggaagagcgccugugcugugguc

SEQ ID NO: 48925 - RNA, 32 nt, Human
agcacuggagggcagaggccucaguguccagc

SEQ ID NO: 48926 - RNA, 32 nt, Human
agcacuggagguggaaggggucaugggggucu

SEQ ID NO: 48927 - RNA, 32 nt, Human
agcacuggagugcagggaggagaggggaaggg

SEQ ID NO: 48928 - RNA, 32 nt, Human
agcacuggauuccucaguccaccagcucagac

SEQ ID NO: 48929 - RNA, 32 nt, Human
agcacuggcccagggaugcuagcaaagcccag

SEQ ID NO: 48930 - RNA, 32 nt, Human
agcacuggcccccucuccccagccucagcugc

SEQ ID NO: 48931 - RNA, 32 nt, Human
agcacuggccccuuggugcacacacauucccu

SEQ ID NO: 48932 - RNA, 32 nt, Human
agcacuggccuccccuggcuccugccuggaag

SEQ ID NO: 48933 - RNA, 32 nt, Human
agcacuggccucugccccuccuccuuccagca

SEQ ID NO: 48934 - RNA, 32 nt, Human
agcacugggaggaaaagcugaguuaagaaaau

SEQ ID NO: 48935 - RNA, 32 nt, Human
agcacugggauuacaagcaugagccacugugc

SEQ ID NO: 48936 - RNA, 32 nt, Human
agcacugggauuacaggcaugagccaccaugc

SEQ ID NO: 48937 - RNA, 32 nt, Human
agcacugggauuacaggcaugagccaccgcgc

SEQ ID NO: 48938 - RNA, 32 nt, Human
agcacugggauuacaggcgugagccaccacau

SEQ ID NO: 48939 - RNA, 32 nt, Human
agcacugggauuacaggcgugagccacccggc

SEQ ID NO: 48940 - RNA, 32 nt, Human
agcacugggauuacaggcgugagccaccgcgc

SEQ ID NO: 48941 - RNA, 32 nt, Human
agcacugggauuacaggcuugaggcacugcac

SEQ ID NO: 48942 - RNA, 32 nt, Human
agcacugggauuacaggugugaaccaccguac

SEQ ID NO: 48943 - RNA, 32 nt, Human
agcacugggauuacaggugugagccaccgcgc

SEQ ID NO: 48944 - RNA, 32 nt, Human
agcacugggcaggcacagagcaggggcugccc

SEQ ID NO: 48945 - RNA, 32 nt, Human
agcacugggcuucugcuuucugcucuggccca

SEQ ID NO: 48946 - RNA, 32 nt, Human
agcacuggggugggggagcaggagaaagccag

SEQ ID NO: 48947 - RNA, 32 nt, Human
agcacugucacugcaaguccagcccccuuugc

SEQ ID NO: 48948 - RNA, 32 nt, Human
agcacugucagagaaugaccacugcagccagc

SEQ ID NO: 48949 - RNA, 32 nt, Human
agcacugucaugagccucacuaagcuauuuug

SEQ ID NO: 48950 - RNA, 32 nt, Human
agcacugucaugccugcuugggugauagauaa

SEQ ID NO: 48951 - RNA, 32 nt, Human
agcacuguccccuggcaguaccacagccuuau

SEQ ID NO: 48952 - RNA, 32 nt, Human
agcacugucucaggcuggaggucagcgaaccu

SEQ ID NO: 48953 - RNA, 16 nt, Human
agcacugucugagcug

SEQ ID NO: 48954 - RNA, 32 nt, Human
agcacugucugcacuuucuuguuuacuguuug

SEQ ID NO: 48955 - RNA, 32 nt, Human
agcacugugaaaccaacauuucuucagugaaa

SEQ ID NO: 48956 - RNA, 32 nt, Human
agcacugugacuccagcccuggcucggagcac

SEQ ID NO: 48957 - RNA, 32 nt, Human
agcacugugagguuucagggauuggcagaggg

SEQ ID NO: 48958 - RNA, 32 nt, Human
agcacugugcuccggcaaggcuugccuuagga

SEQ ID NO: 48959 - RNA, 32 nt, Human
agcacugugggcaugguguuucccucucuggg

SEQ ID NO: 48960 - RNA, 32 nt, Human
agcacugugguuuuccuuuugcacuugaagga

SEQ ID NO: 48961 - RNA, 31 nt, Human
agcacuguuggggcucccauggcagggagaa

SEQ ID NO: 48962 - RNA, 32 nt, Human
agcacuuaaccagccacccagaguucccucac

SEQ ID NO: 48963 - RNA, 32 nt, Human
agcacuuacccuccacuuccuccuccuguuug

SEQ ID NO: 48964 - RNA, 32 nt, Human
agcacuuacuucuaccauucagagaugagcac

SEQ ID NO: 48965 - RNA, 32 nt, Human
agcacuuagggaggccgaggcagguggaucac

SEQ ID NO: 48966 - RNA, 32 nt, Human
agcacuuagggaggcuggggcgggcgaaucgc

SEQ ID NO: 48967 - RNA, 32 nt, Human
agcacuuagggaggucaacguaggaggaucac

SEQ ID NO: 48968 - RNA, 32 nt, Human
agcacuucacccagagccuggcacacaguagg

SEQ ID NO: 48969 - RNA, 32 nt, Human
agcacuucaggauaugcuguuuugcugugugc

SEQ ID NO: 48970 - RNA, 32 nt, Human
agcacuucauggagucuuguuuugaagaugac

SEQ ID NO: 48971 - RNA, 32 nt, Human
agcacuuccaaacccaaaggcucuuuucagag

SEQ ID NO: 48972 - RNA, 32 nt, Human
agcacuuccaagggaguggcuuuucuugaaaa

SEQ ID NO: 48973 - RNA, 32 nt, Human
agcacuucccgcugcugccugccugugauguc

SEQ ID NO: 48974 - RNA, 32 nt, Human
agcacuucccuugccaggcacucacccauccu

SEQ ID NO: 48975 - RNA, 32 nt, Human
agcacuuccuacgcugcaaagcagcaaagaaa

SEQ ID NO: 48976 - RNA, 32 nt, Human
agcacuuccucgaugugccugcccugaaggag

SEQ ID NO: 48977 - RNA, 32 nt, Human
agcacuucgaggaggaggaggaggccggggug

SEQ ID NO: 48978 - RNA, 32 nt, Human
agcacuucuacacaccuccucacugacacccc

SEQ ID NO: 48979 - RNA, 32 nt, Human
agcacuucugcucuccucuaccagaaucacuc

SEQ ID NO: 48980 - RNA, 32 nt, Human
agcacuucuguaaccuucagcauuucuuacag

SEQ ID NO: 48981 - RNA, 32 nt, Human
agcacuucuguaaccuucagcauuucuuugaa

SEQ ID NO: 48982 - RNA, 32 nt, Human
agcacuugaaaggaaacaaaacucccuuucac

SEQ ID NO: 48983 - RNA, 32 nt, Human
agcacuugaacccaggaggcagugguugcaau

SEQ ID NO: 48984 - RNA, 32 nt, Human
agcacuugaacccgggagguggagguugcagu

SEQ ID NO: 48985 - RNA, 32 nt, Human
agcacuugaaucugggaucucgccuuauucuc

SEQ ID NO: 48986 - RNA, 32 nt, Human
agcacuugagccuaggagguuaaggcuauagu

SEQ ID NO: 48987 - RNA, 32 nt, Human
agcacuugagucgacuggaggcugccaggaau

SEQ ID NO: 48988 - RNA, 32 nt, Human
agcacuugccggcauuuggccugcugcuggug

SEQ ID NO: 48989 - RNA, 32 nt, Human
agcacuugccuguagucccaacuacuugggag

SEQ ID NO: 48990 - RNA, 32 nt, Human
agcacuuggggaggacaaugugggguggauca

SEQ ID NO: 48991 - RNA, 32 nt, Human
agcacuuguauuuuccagccuaggcuuugugu

SEQ ID NO: 48992 - RNA, 32 nt, Human
agcacuugucuuucuccugccucagcagcacg

SEQ ID NO: 48993 - RNA, 32 nt, Human
agcacuuguuuuguucauuuguggacuuggca

SEQ ID NO: 48994 - RNA, 32 nt, Human
agcacuuuaaaaggcugaggcaggcaguucac

SEQ ID NO: 48995 - RNA, 32 nt, Human
agcacuuuaggagccccagacaggaggaucac

SEQ ID NO: 48996 - RNA, 32 nt, Human
agcacuuuccaucgaggacuuggguggcagag

SEQ ID NO: 48997 - RNA, 20 nt, Human
agcacuuucugccuuguccu

SEQ ID NO: 48998 - RNA, 32 nt, Human
agcacuuugagaggccaagacaggcagaucac

SEQ ID NO: 48999 - RNA, 32 nt, Human
agcacuuugaugcucauauuaccccaaaucac

SEQ ID NO: 49000 - RNA, 32 nt, Human
agcacuuugggaggcaggggcggguggaucac

SEQ ID NO: 49001 - RNA, 32 nt, Human
agcacuuugggaggccgaggugaguggaucac

SEQ ID NO: 49002 - RNA, 32 nt, Human
agcacuuugggaggccggugggcagaucauga

SEQ ID NO: 49003 - RNA, 32 nt, Human
agcacuuugggaggccuaggcaaguggaucac

SEQ ID NO: 49004 - RNA, 32 nt, Human
agcacuuugggaggccuaggcagguggaucac

SEQ ID NO: 49005 - RNA, 32 nt, Human
agcacuuugggaggcggguggaucaccuaagg

SEQ ID NO: 49006 - RNA, 32 nt, Human
agcacuuugggagguugaggcaggcgugucac

SEQ ID NO: 49007 - RNA, 32 nt, Human
agcacuuuuaaagagcauuuagguaauaccag

SEQ ID NO: 49008 - RNA, 32 nt, Human
agcacuuuuaugagagacauuuuccaugacua

SEQ ID NO: 49009 - RNA, 32 nt, Human
agcacuuuugggaggcagagaugggaggauac

SEQ ID NO: 49010 - RNA, 32 nt, Human
agcacuuuugggaggccaagacaggaggauca

SEQ ID NO: 49011 - RNA, 32 nt, Human
agcacuuuugggaggcugagguugggaguuca

SEQ ID NO: 49012 - RNA, 21 nt, Human
agcacuuuuuacauuugcgaa

SEQ ID NO: 49013 - RNA, 32 nt, Human
agcagaaaaaggcugugcugcccugaagaaug

SEQ ID NO: 49014 - RNA, 20 nt, Human
agcagaaaacauucaaugca

SEQ ID NO: 49015 - RNA, 32 nt, Human
agcagaaaaguggaccuugggggcugguucug

SEQ ID NO: 49016 - RNA, 32 nt, Human
agcagaaaauaacauacccuguauucaaaauu

SEQ ID NO: 49017 - RNA, 23 nt, Human
agcagaaacaauagccaaugcag

SEQ ID NO: 49018 - RNA, 32 nt, Human
agcagaaaccgaaauggcuuucugguguucuc

SEQ ID NO: 49019 - RNA, 32 nt, Human
agcagaaacugaaugacugcucagggaggugu

SEQ ID NO: 49020 - RNA, 32 nt, Human
agcagaaacuucuuuucauucuuccaaagcau

SEQ ID NO: 49021 - RNA, 32 nt, Human
agcagaaagacccugaaggcaggcugcaaaug

SEQ ID NO: 49022 - RNA, 32 nt, Human
agcagaaaggccauugacgcugccacucaaac

SEQ ID NO: 49023 - RNA, 32 nt, Human
agcagaaagggcugcggaggcagugagugguu

SEQ ID NO: 49024 - RNA, 20 nt, Human
agcagaaaguucaacuucca

SEQ ID NO: 49025 - RNA, 32 nt, Human
agcagaaauaggguuuucucaucuucaccauc

SEQ ID NO: 49026 - RNA, 32 nt, Human
agcagaaauccaagcaccaccaaacacagugu

SEQ ID NO: 49027 - RNA, 32 nt, Human
agcagaaauggcuccaaaauggcagcucauca

SEQ ID NO: 49028 - RNA, 32 nt, Human
agcagaaauguccuucugaguacuggccucau

SEQ ID NO: 49029 - RNA, 32 nt, Human
agcagaaauguuccugcacuagacaauuaaag

SEQ ID NO: 49030 - RNA, 32 nt, Human
agcagaaauuagucuagcucccaaucaguggg

SEQ ID NO: 49031 - RNA, 32 nt, Human
agcagaacagaauccuuuuccucuuuuccuuc

SEQ ID NO: 49032 - RNA, 32 nt, Human
agcagaaccagcucccccaacuccagcagagc

SEQ ID NO: 49033 - RNA, 32 nt, Human
agcagaaccauaggccuuuccuuuguuuuggg

SEQ ID NO: 49034 - RNA, 32 nt, Human
agcagaacccagacccugaguccuugggccag

SEQ ID NO: 49035 - RNA, 32 nt, Human
agcagaaccucacaucuuccccaaaccugaua

SEQ ID NO: 49036 - RNA, 21 nt, Human
agcagaaccuccacucccucc

SEQ ID NO: 49037 - RNA, 32 nt, Human
agcagaaccugaggagaaaagcagguggaagg

SEQ ID NO: 49038 - RNA, 32 nt, Human
agcagaacuacaaagaugagaaauuaccagaa

SEQ ID NO: 49039 - RNA, 32 nt, Human
agcagaacucuguucccaggcaccacaagaau

SEQ ID NO: 49040 - RNA, 21 nt, Human
agcagaacugcccucagggug

SEQ ID NO: 49041 - RNA, 32 nt, Human
agcagaagaaucugugaaagaauaugaaauga

SEQ ID NO: 49042 - RNA, 32 nt, Human
agcagaagagaucuacccaucucaccugcucu

SEQ ID NO: 49043 - RNA, 32 nt, Human
agcagaagagccuccuucagcagcuacugacu

SEQ ID NO: 49044 - RNA, 32 nt, Human
agcagaagagggaggcuuccugacugacacag

SEQ ID NO: 49045 - RNA, 32 nt, Human
agcagaagcagcugagugucuccugauacccg

SEQ ID NO: 49046 - RNA, 32 nt, Human
agcagaaggaagaagaugcgcugagaguccuc

SEQ ID NO: 49047 - RNA, 32 nt, Human
agcagaagggagagagggagggcgcaagggga

SEQ ID NO: 49048 - RNA, 32 nt, Human
agcagaaggugaagcaggaagcacuugguuuu

SEQ ID NO: 49049 - RNA, 20 nt, Human
agcagaaggugucugggcca

SEQ ID NO: 49050 - RNA, 32 nt, Human
agcagaagucacgcuccccaucccccagggga

SEQ ID NO: 49051 - RNA, 32 nt, Human
agcagaauauuugcaacauuuguuuuguauag

SEQ ID NO: 49052 - RNA, 32 nt, Human
agcagaaucaaaggagggagcccugcagggca

SEQ ID NO: 49053 - RNA, 32 nt, Human
agcagaaucauagcucugaaaagagaagcucc

SEQ ID NO: 49054 - RNA, 25 nt, Human
agcagaaucccccacucccacccca

SEQ ID NO: 49055 - RNA, 23 nt, Human
agcagaaucguaagagcuuugaa

SEQ ID NO: 49056 - RNA, 32 nt, Human
agcagaaugcuauaauaugcuaugaugacugg

SEQ ID NO: 49057 - RNA, 32 nt, Human
agcagaauguacuugauauuauuucagggucc

SEQ ID NO: 49058 - RNA, 32 nt, Human
agcagaaugugcuucucucuggcagcuggccu

SEQ ID NO: 49059 - RNA, 32 nt, Human
agcagaauuucucagcauuccagagagagauu

SEQ ID NO: 49060 - RNA, 32 nt, Human
agcagacaaagaggcccugcuccagggcgcac

SEQ ID NO: 49061 - RNA, 32 nt, Human
agcagacaaagucaauaaaagagcugucugac

SEQ ID NO: 49062 - RNA, 32 nt, Human
agcagacaagaaagggcaugcaaggccuucuc

SEQ ID NO: 49063 - RNA, 32 nt, Human
agcagacaagguugagaauccauugcuggaau

SEQ ID NO: 49064 - RNA, 24 nt, Human
agcagacaaucacagugcccauca

SEQ ID NO: 49065 - RNA, 32 nt, Human
agcagacaauccaggcugaugcuuuugcugag

SEQ ID NO: 49066 - RNA, 32 nt, Human
agcagacacagcccuuccaggaccagaggcca

SEQ ID NO: 49067 - RNA, 32 nt, Human
agcagacacugcaacagaugccuccuagaaaa

SEQ ID NO: 49068 - RNA, 32 nt, Human
agcagacagaagcagaacagagcccggggcuc

SEQ ID NO: 49069 - RNA, 32 nt, Human
agcagacagagagaggagguugucugggacag

SEQ ID NO: 49070 - RNA, 32 nt, Human
agcagacagcaucuacuccuuauuuauaguaa

SEQ ID NO: 49071 - RNA, 32 nt, Human
agcagacagccaggccaggguaggcagugccu

SEQ ID NO: 49072 - RNA, 32 nt, Human
agcagacaggcagggcuugcuguguugcucug

SEQ ID NO: 49073 - RNA, 32 nt, Human
agcagacagggccaagaaucuccaugcugucu

SEQ ID NO: 49074 - RNA, 32 nt, Human
agcagacauugguuuacucugcagccuguguu

SEQ ID NO: 49075 - RNA, 32 nt, Human
agcagaccagaugcccagcaacuccuaggcuc

SEQ ID NO: 49076 - RNA, 32 nt, Human
agcagaccagccuggccaaugccuaugggugg

SEQ ID NO: 49077 - RNA, 32 nt, Human
agcagacccugggccuuucucuagacugagca

SEQ ID NO: 49078 - RNA, 32 nt, Human
agcagaccuaccacucuccaggcagauagugc

SEQ ID NO: 49079 - RNA, 32 nt, Human
agcagaccugaaaaguccaugaccugagcuuu

SEQ ID NO: 49080 - RNA, 32 nt, Human
agcagaccuggguguggugcugccuggcacug

SEQ ID NO: 49081 - RNA, 32 nt, Human
agcagaccuguugccacggugacugaagcccc

SEQ ID NO: 49082 - RNA, 32 nt, Human
agcagaccuugccugccuacugcccaggccug

SEQ ID NO: 49083 - RNA, 32 nt, Human
agcagacggcucggagcaacauggacaacaug

SEQ ID NO: 49084 - RNA, 32 nt, Human
agcagacuccagccccuggaccccuggggugg

SEQ ID NO: 49085 - RNA, 32 nt, Human
agcagacugggagccacuugaggcuaucauuu

SEQ ID NO: 49086 - RNA, 32 nt, Human
agcagacugugcaugcuccuguccccacucac

SEQ ID NO: 49087 - RNA, 32 nt, Human
agcagacuguggugaauuuagcaacacuuaug

SEQ ID NO: 49088 - RNA, 21 nt, Human
agcagacuguuaggagcagua

SEQ ID NO: 49089 - RNA, 32 nt, Human
agcagacuuuccugccagugucagaaaauccu

SEQ ID NO: 49090 - RNA, 32 nt, Human
agcagagaaacccauguccucucuccauagag

SEQ ID NO: 49091 - RNA, 32 nt, Human
agcagagaaacccauguccucucuccauaggg

SEQ ID NO: 49092 - RNA, 32 nt, Human
agcagagaaaccugacugggaggcagaaaaga

SEQ ID NO: 49093 - RNA, 32 nt, Human
agcagagaaauuaaguggcuugcucaagguca

SEQ ID NO: 49094 - RNA, 32 nt, Human
agcagagaacacagcaaauuuguccagacuuc

SEQ ID NO: 49095 - RNA, 32 nt, Human
agcagagaacagaggugcacaccaccauaucu

SEQ ID NO: 49096 - RNA, 32 nt, Human
agcagagaacguguguguuaggagaacucggc

SEQ ID NO: 49097 - RNA, 32 nt, Human
agcagagaagcucagcgcccagccuggggaau

SEQ ID NO: 49098 - RNA, 32 nt, Human
agcagagaaggcacuugcauccuaugcagccc

SEQ ID NO: 49099 - RNA, 32 nt, Human
agcagagacaacugccacccagccugggccuu

SEQ ID NO: 49100 - RNA, 32 nt, Human
agcagagagacuccuccagacccacucagacc

SEQ ID NO: 49101 - RNA, 32 nt, Human
agcagagagaggaggcagaggcugggaauggg

SEQ ID NO: 49102 - RNA, 32 nt, Human
agcagagagagggagcugcaccagccucucac

SEQ ID NO: 49103 - RNA, 32 nt, Human
agcagagagccugggagagccaucucuuaacc

SEQ ID NO: 49104 - RNA, 32 nt, Human
agcagagaggaaggagaaagaggaggagagag

SEQ ID NO: 49105 - RNA, 32 nt, Human
agcagagaggagcggcaccagcagagggaagu

SEQ ID NO: 49106 - RNA, 32 nt, Human
agcagagagggagggcaggcgggagggagggc

SEQ ID NO: 49107 - RNA, 32 nt, Human
agcagagaggggugaauggaagaaggagcgag

SEQ ID NO: 49108 - RNA, 32 nt, Human
agcagagauagggagaggaggugaggggcacc

SEQ ID NO: 49109 - RNA, 32 nt, Human
agcagagaucuuccagagugucagccuccagc

SEQ ID NO: 49110 - RNA, 19 nt, Human
agcagagaugcagccagug

SEQ ID NO: 49111 - RNA, 32 nt, Human
agcagagauggggguuucaccauguuggccag

SEQ ID NO: 49112 - RNA, 32 nt, Human
agcagagauugcccccgcuacacuccagccug

SEQ ID NO: 49113 - RNA, 32 nt, Human
agcagagcaaacugcuuuccagccugaagccu

SEQ ID NO: 49114 - RNA, 32 nt, Human
agcagagcaagucugcaggugcaccacuuccc

SEQ ID NO: 49115 - RNA, 32 nt, Human
agcagagcacugggugagagggagaagaccuu

SEQ ID NO: 49116 - RNA, 32 nt, Human
agcagagcauuuaacccagaaucugaaaucuc

SEQ ID NO: 49117 - RNA, 32 nt, Human
agcagagccaggagagguugggugacacccac

SEQ ID NO: 49118 - RNA, 21 nt, Human
agcagagccagggcagggcga

SEQ ID NO: 49119 - RNA, 32 nt, Human
agcagagccauggagaauaagcauugacuacc

SEQ ID NO: 49120 - RNA, 22 nt, Human
agcagagcccacagaggcucgu

SEQ ID NO: 49121 - RNA, 32 nt, Human
agcagagcccaggaaucuggauuuuguacccg

SEQ ID NO: 49122 - RNA, 32 nt, Human
agcagagcccuggaugaaguggacgagcagcu

SEQ ID NO: 49123 - RNA, 32 nt, Human
agcagagccgggaagguggguggcccauuaca

SEQ ID NO: 49124 - RNA, 32 nt, Human
agcagagccgggagcuggagguucugcgggag

SEQ ID NO: 49125 - RNA, 32 nt, Human
agcagagccuggggcugguucacagcuaaacc

SEQ ID NO: 49126 - RNA, 32 nt, Human
agcagagcgaauacucagcagagauggugccc

SEQ ID NO: 49127 - RNA, 32 nt, Human
agcagagcgugccgcuacacuccagccugaug

SEQ ID NO: 49128 - RNA, 17 nt, Human
agcagagcuccugggaa

SEQ ID NO: 49129 - RNA, 32 nt, Human
agcagagcugaccuuaggaccgagcaccaggg

SEQ ID NO: 49130 - RNA, 32 nt, Human
agcagagcugccugacccucuugauuucugcu

SEQ ID NO: 49131 - RNA, 32 nt, Human
agcagagcuggguuuaaugagcauuuaaucua

SEQ ID NO: 49132 - RNA, 32 nt, Human
agcagagcuuacuucauugucuguccccaccc

SEQ ID NO: 49133 - RNA, 32 nt, Human
agcagagcuuccccugaaggugccaucagcca

SEQ ID NO: 49134 - RNA, 32 nt, Human
agcagagcuucucagugggcacagucucuuac

SEQ ID NO: 49135 - RNA, 32 nt, Human
agcagaggaaggcaggggauuuaggaucgccc

SEQ ID NO: 49136 - RNA, 32 nt, Human
agcagaggaaggggcuggugacccuggugcug

SEQ ID NO: 49137 - RNA, 32 nt, Human
agcagaggaggaagaggaagaguggggaugga

SEQ ID NO: 49138 - RNA, 32 nt, Human
agcagaggaggaagaggaggaagaaggaaaga

SEQ ID NO: 49139 - RNA, 32 nt, Human
agcagaggaggcagguggguggagggggaugc

SEQ ID NO: 49140 - RNA, 32 nt, Human
agcagaggaggggccgcugccacccaccuccc

SEQ ID NO: 49141 - RNA, 32 nt, Human
agcagaggcaaggggugccaggaguccccagc

SEQ ID NO: 49142 - RNA, 32 nt, Human
agcagaggcagcaggagcaggaggagcgugaa

SEQ ID NO: 49143 - RNA, 19 nt, Human
agcagaggcauccuugagc

SEQ ID NO: 49144 - RNA, 32 nt, Human
agcagaggccaagaguuugagggagaaauagu

SEQ ID NO: 49145 - RNA, 32 nt, Human
agcagaggccacgauugggaagacagacccag

SEQ ID NO: 49146 - RNA, 23 nt, Human
agcagaggccgagacccugcagg

SEQ ID NO: 49147 - RNA, 32 nt, Human
agcagaggccggcaguggaggcugagcaggga

SEQ ID NO: 49148 - RNA, 32 nt, Human
agcagaggccuccucuggagugagaggcucca

SEQ ID NO: 49149 - RNA, 32 nt, Human
agcagaggcuccagcgagggcaccagugccug

SEQ ID NO: 49150 - RNA, 32 nt, Human
agcagaggcugagugggcuucuggcuccuaga

SEQ ID NO: 49151 - RNA, 32 nt, Human
agcagaggcugcaggaacuuguguggggaucu

SEQ ID NO: 49152 - RNA, 19 nt, Human
agcagaggcuuuccuuggu

SEQ ID NO: 49153 - RNA, 32 nt, Human
agcagagggaauucacaggacccccugagaag

SEQ ID NO: 49154 - RNA, 32 nt, Human
agcagagggagagagaaggugacacggaugga

SEQ ID NO: 49155 - RNA, 32 nt, Human
agcagagggaggcagaagcguggaggaagggg

SEQ ID NO: 49156 - RNA, 32 nt, Human
agcagagggaggugggcugaggccucgguggg

SEQ ID NO: 49157 - RNA, 32 nt, Human
agcagagggaggugggggagagggaaauaaag

SEQ ID NO: 49158 - RNA, 32 nt, Human
agcagaggggaggcuggggucacagcuggcca

SEQ ID NO: 49159 - RNA, 32 nt, Human
agcagaggggcagaggcccacauuggaagagc

SEQ ID NO: 49160 - RNA, 32 nt, Human
agcagaggggcagcgauagacucuggggaugg

SEQ ID NO: 49161 - RNA, 20 nt, Human
agcagagggggcgcccgguc

SEQ ID NO: 49162 - RNA, 32 nt, Human
agcagaggggucggaaagggaaaacaacuacg

SEQ ID NO: 49163 - RNA, 32 nt, Human
agcagaggucgcggagguggcgagcgaggccg

SEQ ID NO: 49164 - RNA, 32 nt, Human
agcagaggugagcugagugcagugagccaaga

SEQ ID NO: 49165 - RNA, 32 nt, Human
agcagagguugagauucugccucccaggagag

SEQ ID NO: 49166 - RNA, 20 nt, Human
agcagaguauggaagcaccu

SEQ ID NO: 49167 - RNA, 21 nt, Human
agcagaguccacuagcccgug

SEQ ID NO: 49168 - RNA, 32 nt, Human
agcagaguccaugagaaagaaggagggauggg

SEQ ID NO: 49169 - RNA, 32 nt, Human
agcagagucucccgcugcaaucugggugguaa

SEQ ID NO: 49170 - RNA, 32 nt, Human
agcagagugggaggcaggcaucauaguugcug

SEQ ID NO: 49171 - RNA, 32 nt, Human
agcagaguggggugauguugguuguaugugca

SEQ ID NO: 49172 - RNA, 22 nt, Human
agcagaguguaggucccacuuc

SEQ ID NO: 49173 - RNA, 23 nt, Human
agcagagugucugugacccaccu

SEQ ID NO: 49174 - RNA, 32 nt, Human
agcagaguuccugcccauggucuugagcugaa

SEQ ID NO: 49175 - RNA, 19 nt, Human
agcagaguucuggccagug

SEQ ID NO: 49176 - RNA, 32 nt, Human
agcagaguugggggaggagggggagcccuggu

SEQ ID NO: 49177 - RNA, 32 nt, Human
agcagaguuguuaaagaguacuggaauagggg

SEQ ID NO: 49178 - RNA, 32 nt, Human
agcagaguuugugaccaaagucagaguggauc

SEQ ID NO: 49179 - RNA, 32 nt, Human
agcagauaaugcuuucuuuuccagucaucuuu

SEQ ID NO: 49180 - RNA, 32 nt, Human
agcagauacaggaguggggagggggcuguaac

SEQ ID NO: 49181 - RNA, 32 nt, Human
agcagauacuaaaacaaacaaaacuuuggacc

SEQ ID NO: 49182 - RNA, 32 nt, Human
agcagauacuagaaacaaacaaaacuuuggac

SEQ ID NO: 49183 - RNA, 32 nt, Human
agcagauagaaaacuaauauacucccuuuaau

SEQ ID NO: 49184 - RNA, 32 nt, Human
agcagauagaaucaugaacgaaaaugagagca

SEQ ID NO: 49185 - RNA, 18 nt, Human
agcagauagaugguccag

SEQ ID NO: 49186 - RNA, 18 nt, Human
agcagauauuacuuccau

SEQ ID NO: 49187 - RNA, 32 nt, Human
agcagaucaaaaagcacaaagagcuggggcag

SEQ ID NO: 49188 - RNA, 19 nt, Human
agcagaucacuugagguca

SEQ ID NO: 49189 - RNA, 32 nt, Human
agcagauccaucuccaccaacacagacaacac

SEQ ID NO: 49190 - RNA, 32 nt, Human
agcagaucccaauucaucccacaaacagaugc

SEQ ID NO: 49191 - RNA, 32 nt, Human
agcagaucgagaccagccuggccaacauggug

SEQ ID NO: 49192 - RNA, 32 nt, Human
agcagaucgagauggagaaggucuagcaccuu

SEQ ID NO: 49193 - RNA, 32 nt, Human
agcagaucuccuguggccaggaguucaagccu

SEQ ID NO: 49194 - RNA, 32 nt, Human
agcagaugaaaugucaugauugguguccaggc

SEQ ID NO: 49195 - RNA, 32 nt, Human
agcagaugaacagaaggaguagaguaaaacug

SEQ ID NO: 49196 - RNA, 32 nt, Human
agcagaugaagagagggccagaguaguguucu

SEQ ID NO: 49197 - RNA, 32 nt, Human
agcagaugagccaggguagagggcuggccccu

SEQ ID NO: 49198 - RNA, 32 nt, Human
agcagaugaggugaaaaggccaagagguuugg

SEQ ID NO: 49199 - RNA, 30 nt, Human
agcagaugcccagcuguagcugugcauuga

SEQ ID NO: 49200 - RNA, 32 nt, Human
agcagauggaaacuuccuucucuaugcacacu

SEQ ID NO: 49201 - RNA, 32 nt, Human
agcagauggaaaugcuaaugaggucaaacgua

SEQ ID NO: 49202 - RNA, 32 nt, Human
agcagaugggccuucuccgggaugaggcccug

SEQ ID NO: 49203 - RNA, 32 nt, Human
agcagaugguuuugacugucuuuuugcucuuu

SEQ ID NO: 49204 - RNA, 31 nt, Human
agcagaugugagagaggaaaaggaucuguuu

SEQ ID NO: 49205 - RNA, 32 nt, Human
agcagauguugcaaacuuucauaccacugcug

SEQ ID NO: 49206 - RNA, 32 nt, Human
agcagauuaacaggccaggcgcaguggcucac

SEQ ID NO: 49207 - RNA, 32 nt, Human
agcagauucaauggcucacauucuuucaaaag

SEQ ID NO: 49208 - RNA, 32 nt, Human
agcagauucuucacgcccagcuucuaccucac

SEQ ID NO: 49209 - RNA, 21 nt, Human
agcagauuuuaagaaauuaua

SEQ ID NO: 49210 - RNA, 32 nt, Human
agcagcaaaaagagcauggagcugaggaguac

SEQ ID NO: 49211 - RNA, 32 nt, Human
agcagcaaacuaaauucugagaaauaaacgag

SEQ ID NO: 49212 - RNA, 32 nt, Human
agcagcaaaggaugagcggaaccuuggaaaag

SEQ ID NO: 49213 - RNA, 32 nt, Human
agcagcaaaucgcuucaccuucuugaagccuc

SEQ ID NO: 49214 - RNA, 32 nt, Human
agcagcaacagcaacaaaugacuuaucaacaa

SEQ ID NO: 49215 - RNA, 32 nt, Human
agcagcaacaguugucuguccagcccccaccc

SEQ ID NO: 49216 - RNA, 32 nt, Human
agcagcaacauuaaaccagcccugccaacauc

SEQ ID NO: 49217 - RNA, 27 nt, Human
agcagcaacauuagcaagaccccguuu

SEQ ID NO: 49218 - RNA, 23 nt, Human
agcagcaagaucacuugagccca

SEQ ID NO: 49219 - RNA, 32 nt, Human
agcagcaaggccaccuuccagcuggagcuccc

SEQ ID NO: 49220 - RNA, 32 nt, Human
agcagcaauaugccacuguacaaaacugaaga

SEQ ID NO: 49221 - RNA, 32 nt, Human
agcagcacaaagaaacagccuuacacugggca

SEQ ID NO: 49222 - RNA, 32 nt, Human
agcagcacaaccuugaccagagcuuggguccu

SEQ ID NO: 49223 - RNA, 32 nt, Human
agcagcacaagaaaccaguuucuucaucugaa

SEQ ID NO: 49224 - RNA, 18 nt, Human
agcagcacagaugcgcug

SEQ ID NO: 49225 - RNA, 32 nt, Human
agcagcacaggcagaggccuggggagaguuua

SEQ ID NO: 49226 - RNA, 19 nt, Human
agcagcacagucucaggca

SEQ ID NO: 49227 - RNA, 32 nt, Human
agcagcacauucaaccauuuguuuucagucag

SEQ ID NO: 49228 - RNA, 32 nt, Human
agcagcacauuuccugguucaguggcuugagc

SEQ ID NO: 49229 - RNA, 32 nt, Human
agcagcaccagcccuguggggcauggagugga

SEQ ID NO: 49230 - RNA, 32 nt, Human
agcagcaccccgcaugcacuacccccauuuca

SEQ ID NO: 49231 - RNA, 32 nt, Human
agcagcaccuacccuguuccuagcucugcccc

SEQ ID NO: 49232 - RNA, 32 nt, Human
agcagcaccucacccucacuugccgggguguu

SEQ ID NO: 49233 - RNA, 32 nt, Human
agcagcaccuccucuucuagcagccaguccuc

SEQ ID NO: 49234 - RNA, 32 nt, Human
agcagcaccuccugucccuugaccuuaacucu

SEQ ID NO: 49235 - RNA, 26 nt, Human
agcagcaccuguaugaagccucagug

SEQ ID NO: 49236 - RNA, 32 nt, Human
agcagcaccuuaauaccucuugugacaguuac

SEQ ID NO: 49237 - RNA, 23 nt, Human
agcagcacgugugagcugggcca

SEQ ID NO: 49238 - RNA, 32 nt, Human
agcagcacugcacccucacuagccagaguguu

SEQ ID NO: 49239 - RNA, 32 nt, Human
agcagcacuggaagcaguuccaccacaugugc

SEQ ID NO: 49240 - RNA, 32 nt, Human
agcagcacuucagaggaugacgacagugagag

SEQ ID NO: 49241 - RNA, 32 nt, Human
agcagcacuuuuugcacagucuggggcggggu

SEQ ID NO: 49242 - RNA, 32 nt, Human
agcagcagaaggcagggguuaaaucaggauaa

SEQ ID NO: 49243 - RNA, 32 nt, Human
agcagcagaaggugaagcaggaagcacuuggu

SEQ ID NO: 49244 - RNA, 32 nt, Human
agcagcagaagugccccuucuccaggaucaag

SEQ ID NO: 49245 - RNA, 32 nt, Human
agcagcagaauggggaauggagaggugggcag

SEQ ID NO: 49246 - RNA, 32 nt, Human
agcagcagacagggucuccagagcacacgaca

SEQ ID NO: 49247 - RNA, 32 nt, Human
agcagcagagacagagccaggagcaguccagu

SEQ ID NO: 49248 - RNA, 32 nt, Human
agcagcagagaccucaucagcagaccaaggaa

SEQ ID NO: 49249 - RNA, 32 nt, Human
agcagcagagcaucuccucuuaaggauacgug

SEQ ID NO: 49250 - RNA, 25 nt, Human
agcagcagaggcagcaggagcagga

SEQ ID NO: 49251 - RNA, 32 nt, Human
agcagcagaguauaaggugcuuuaauuuaaua

SEQ ID NO: 49252 - RNA, 32 nt, Human
agcagcagagugaacugcagaggcagagauag

SEQ ID NO: 49253 - RNA, 32 nt, Human
agcagcagagugaacugcagagucagagauag

SEQ ID NO: 49254 - RNA, 32 nt, Human
agcagcagaguugcaagaggucuuggaaccug

SEQ ID NO: 49255 - RNA, 23 nt, Human
agcagcagaucuccgggauucug

SEQ ID NO: 49256 - RNA, 32 nt, Human
agcagcagauuguaaaaagugugacaaacaca

SEQ ID NO: 49257 - RNA, 20 nt, Human
agcagcagcaacggaccuug

SEQ ID NO: 49258 - RNA, 32 nt, Human
agcagcagcacccugcaagccagccuggccag

SEQ ID NO: 49259 - RNA, 19 nt, Human
agcagcagcagcacuugaa

SEQ ID NO: 49260 - RNA, 32 nt, Human
agcagcagcagcagcaagaguaacucugacuu

SEQ ID NO: 49261 - RNA, 21 nt, Human
agcagcagcagcagcaggcgg

SEQ ID NO: 49262 - RNA, 19 nt, Human
agcagcagcagcaggagcg

SEQ ID NO: 49263 - RNA, 21 nt, Human
agcagcagcagcguucugcug

SEQ ID NO: 49264 - RNA, 16 nt, Human
agcagcagcauguaca

SEQ ID NO: 49265 - RNA, 32 nt, Human
agcagcagccaagauacacaggagauggagcc

SEQ ID NO: 49266 - RNA, 32 nt, Human
agcagcagccgacugagcugagcccagcaggu

SEQ ID NO: 49267 - RNA, 32 nt, Human
agcagcagccggcgaggagggagcagcagcag

SEQ ID NO: 49268 - RNA, 32 nt, Human
agcagcagccucuaucaccggaugcugcccac

SEQ ID NO: 49269 - RNA, 32 nt, Human
agcagcagccugagcguggagggcaaggagcu

SEQ ID NO: 49270 - RNA, 32 nt, Human
agcagcagcgcccccugagaaauguucacucu

SEQ ID NO: 49271 - RNA, 22 nt, Human
agcagcagcgcuacagcccaga

SEQ ID NO: 49272 - RNA, 32 nt, Human
agcagcagcgggcugaagccauccgugucccg

SEQ ID NO: 49273 - RNA, 32 nt, Human
agcagcagcuagccaggcaaagggggcaaugg

SEQ ID NO: 49274 - RNA, 32 nt, Human
agcagcagcucccuccagggaggcccuggguc

SEQ ID NO: 49275 - RNA, 20 nt, Human
agcagcagcugcaggcccag

SEQ ID NO: 49276 - RNA, 22 nt, Human
agcagcagcuggacccccaaag

SEQ ID NO: 49277 - RNA, 32 nt, Human
agcagcagcuuccccacccaggacaaggccua

SEQ ID NO: 49278 - RNA, 32 nt, Human
agcagcaggaagcacucccagccaccagugcc

SEQ ID NO: 49279 - RNA, 32 nt, Human
agcagcaggaaggaugugggacucuguccaag

SEQ ID NO: 49280 - RNA, 25 nt, Human
agcagcaggaccaguaccuggguca

SEQ ID NO: 49281 - RNA, 18 nt, Human
agcagcaggaccccggaa

SEQ ID NO: 49282 - RNA, 32 nt, Human
agcagcaggagaaaaucgggacuccgaccuca

SEQ ID NO: 49283 - RNA, 32 nt, Human
agcagcaggagaagcaguggccagaggggaga

SEQ ID NO: 49284 - RNA, 32 nt, Human
agcagcaggagaauaggaugccucucacucac

SEQ ID NO: 49285 - RNA, 32 nt, Human
agcagcaggcagccggagggagugagagccac

SEQ ID NO: 49286 - RNA, 23 nt, Human
agcagcagggaagcucugggcca

SEQ ID NO: 49287 - RNA, 32 nt, Human
agcagcagguuguggagguggccaugacagug

SEQ ID NO: 49288 - RNA, 32 nt, Human
agcagcagugacggggcaccuugcuguguguc

SEQ ID NO: 49289 - RNA, 32 nt, Human
agcagcagugccucgcaccccagcacgcccgc

SEQ ID NO: 49290 - RNA, 32 nt, Human
agcagcauaagaguagucacaaacauguuuug

SEQ ID NO: 49291 - RNA, 32 nt, Human
agcagcauaccuccauguugugaaggcaucug

SEQ ID NO: 49292 - RNA, 32 nt, Human
agcagcauaggcuuuaucucccuacuuccucc

SEQ ID NO: 49293 - RNA, 32 nt, Human
agcagcaucaggacagcagagcagagcccccg

SEQ ID NO: 49294 - RNA, 32 nt, Human
agcagcauccaccccaccccaucuuugcugcc

SEQ ID NO: 49295 - RNA, 18 nt, Human
agcagcauccgccgaggc

SEQ ID NO: 49296 - RNA, 19 nt, Human
agcagcaucuacucuaggc

SEQ ID NO: 49297 - RNA, 32 nt, Human
agcagcaucucuaggacccuucugauugacau

SEQ ID NO: 49298 - RNA, 32 nt, Human
agcagcaucugaacugaggcuucuucaguccu

SEQ ID NO: 49299 - RNA, 32 nt, Human
agcagcaucugccccaauuucagcugaagauu

SEQ ID NO: 49300 - RNA, 19 nt, Human
agcagcaucuuugcugggc

SEQ ID NO: 49301 - RNA, 22 nt, Human
agcagcaugagcaucuggguca

SEQ ID NO: 49302 - RNA, 32 nt, Human
agcagcauggccagguccuccagugcccaggu

SEQ ID NO: 49303 - RNA, 32 nt, Human
agcagcauugacugguuuacaggcccugcucc

SEQ ID NO: 49304 - RNA, 32 nt, Human
agcagcauuuacagaaaugccaaaaaugugcc

SEQ ID NO: 49305 - RNA, 32 nt, Human
agcagccaaaauggauccccagugcacuaugg

SEQ ID NO: 49306 - RNA, 31 nt, Human
agcagccaacuuuucugacaaaauggauguu

SEQ ID NO: 49307 - RNA, 32 nt, Human
agcagccaagcccccauucccagagcagaccc

SEQ ID NO: 49308 - RNA, 25 nt, Human
agcagccaaucaaagcagcuagcag

SEQ ID NO: 49309 - RNA, 20 nt, Human
agcagccacaagucuuuacu

SEQ ID NO: 49310 - RNA, 32 nt, Human
agcagccacaguuucagacaaauguucagugu

SEQ ID NO: 49311 - RNA, 32 nt, Human
agcagccacauuugcaaccuuggccaucuguc

SEQ ID NO: 49312 - RNA, 32 nt, Human
agcagccaccagcaaacaccacugccugcagg

SEQ ID NO: 49313 - RNA, 32 nt, Human
agcagccaccagcccaaccacuugugucuucu

SEQ ID NO: 49314 - RNA, 32 nt, Human
agcagccaccuggccucacucuggccacaggu

SEQ ID NO: 49315 - RNA, 32 nt, Human
agcagccacgggacgggguagagccaggggug

SEQ ID NO: 49316 - RNA, 32 nt, Human
agcagccacuccucaaugcucaauggcucccc

SEQ ID NO: 49317 - RNA, 32 nt, Human
agcagccacugaacucccccaucccagggcuc

SEQ ID NO: 49318 - RNA, 32 nt, Human
agcagccacugcacaggaggaggugacaaacc

SEQ ID NO: 49319 - RNA, 32 nt, Human
agcagccacugucauuucucagugguuuugcc

SEQ ID NO: 49320 - RNA, 32 nt, Human
agcagccagagcuccuggaggaaaggcagucg

SEQ ID NO: 49321 - RNA, 32 nt, Human
agcagccagaggacgagccggagcagcccccg

SEQ ID NO: 49322 - RNA, 24 nt, Human
agcagccagaggaggccggugaag

SEQ ID NO: 49323 - RNA, 32 nt, Human
agcagccagagggguuuaacaggagugcagag

SEQ ID NO: 49324 - RNA, 23 nt, Human
agcagccagagugaccccgaaag

SEQ ID NO: 49325 - RNA, 17 nt, Human
agcagccagaugggcug

SEQ ID NO: 49326 - RNA, 32 nt, Human
agcagccagcacaaagggcccaggaagccagc

SEQ ID NO: 49327 - RNA, 21 nt, Human
agcagccagcagagcgugaug

SEQ ID NO: 49328 - RNA, 18 nt, Human
agcagccagcagcugcau

SEQ ID NO: 49329 - RNA, 24 nt, Human
agcagccagcagcugcauggugaa

SEQ ID NO: 49330 - RNA, 22 nt, Human
agcagccagcccuuugaagaug

SEQ ID NO: 49331 - RNA, 32 nt, Human
agcagccagcuccugguagcugaugaggauca

SEQ ID NO: 49332 - RNA, 32 nt, Human
agcagccaggaggcgggcggaagagugggugg

SEQ ID NO: 49333 - RNA, 32 nt, Human
agcagccaggcagaaccaggacaggugaggug

SEQ ID NO: 49334 - RNA, 32 nt, Human
agcagccaggcuguggagaggaggcgggcggg

SEQ ID NO: 49335 - RNA, 32 nt, Human
agcagccagguaauuacuagaugaaggaaugc

SEQ ID NO: 49336 - RNA, 20 nt, Human
agcagccaguagccccgaaa

SEQ ID NO: 49337 - RNA, 32 nt, Human
agcagccagucacccuggccagucccacuucc

SEQ ID NO: 49338 - RNA, 19 nt, Human
agcagccauagauaauaca

SEQ ID NO: 49339 - RNA, 32 nt, Human
agcagccauagcuguguggaggcuucagcaua

SEQ ID NO: 49340 - RNA, 21 nt, Human
agcagccauaggcagauaaag

SEQ ID NO: 49341 - RNA, 32 nt, Human
agcagccauggcagucauuaaagagaaaggag

SEQ ID NO: 49342 - RNA, 32 nt, Human
agcagccauguggugggcaugugugacuacuc

SEQ ID NO: 49343 - RNA, 32 nt, Human
agcagcccaaggcaccuguccucugacccacc

SEQ ID NO: 49344 - RNA, 28 nt, Human
agcagcccaagugcuccugaguccuugc

SEQ ID NO: 49345 - RNA, 28 nt, Human
agcagcccaagugucaucccauucaccc

SEQ ID NO: 49346 - RNA, 22 nt, Human
agcagcccacuccuucccaugg

SEQ ID NO: 49347 - RNA, 32 nt, Human
agcagcccacucuuguguucucaggcagggga

SEQ ID NO: 49348 - RNA, 32 nt, Human
agcagcccagaacagcacaugugggggaggug

SEQ ID NO: 49349 - RNA, 23 nt, Human
agcagcccagcaccuccacuggg

SEQ ID NO: 49350 - RNA, 32 nt, Human
agcagcccagcucuggugaguguccuugagcu

SEQ ID NO: 49351 - RNA, 32 nt, Human
agcagcccaggggauuucaaagagcucagacu

SEQ ID NO: 49352 - RNA, 32 nt, Human
agcagcccaguaaacugcgggcgaagagaucu

SEQ ID NO: 49353 - RNA, 32 nt, Human
agcagcccaugcacacagaauggcagccacau

SEQ ID NO: 49354 - RNA, 32 nt, Human
agcagccccaggagcacaaccugagauuucua

SEQ ID NO: 49355 - RNA, 32 nt, Human
agcagccccaggaggggaccagaggggaugcu

SEQ ID NO: 49356 - RNA, 19 nt, Human
agcagccccaggaguccca

SEQ ID NO: 49357 - RNA, 32 nt, Human
agcagccccaggagucccagacccgugccgau

SEQ ID NO: 49358 - RNA, 23 nt, Human
agcagccccauguauucucuggg

SEQ ID NO: 49359 - RNA, 25 nt, Human
agcagcccccagguugccugggcca

SEQ ID NO: 49360 - RNA, 32 nt, Human
agcagcccccuucauucaauuaccucccgccg

SEQ ID NO: 49361 - RNA, 32 nt, Human
agcagccccgcacuugcuguaggaauuauuag

SEQ ID NO: 49362 - RNA, 32 nt, Human
agcagccccggguaugagaggcaggacucaga

SEQ ID NO: 49363 - RNA, 24 nt, Human
agcagccccucgcggcagccccga

SEQ ID NO: 49364 - RNA, 28 nt, Human
agcagccccugcgcugccucaucuacau

SEQ ID NO: 49365 - RNA, 32 nt, Human
agcagccccuggcaaugagcugccugaugaug

SEQ ID NO: 49366 - RNA, 32 nt, Human
agcagcccuccccucccuccccuuaugagguc

SEQ ID NO: 49367 - RNA, 32 nt, Human
agcagcccuccgagucgagccucugcccccga

SEQ ID NO: 49368 - RNA, 32 nt, Human
agcagcccucgaggcccucacagaugucuagg

SEQ ID NO: 49369 - RNA, 32 nt, Human
agcagcccugaugucauuuuuguauuucagga

SEQ ID NO: 49370 - RNA, 32 nt, Human
agcagcccugcacuccacgcuggccaagaagg

SEQ ID NO: 49371 - RNA, 32 nt, Human
agcagcccugcagccucugccucucucagccg

SEQ ID NO: 49372 - RNA, 32 nt, Human
agcagcccugggaaaaggcuguggccucaggg

SEQ ID NO: 49373 - RNA, 32 nt, Human
agcagcccugggugccuggcugaauuugguuu

SEQ ID NO: 49374 - RNA, 32 nt, Human
agcagcccugugaggcugaggcugcagccagc

SEQ ID NO: 49375 - RNA, 32 nt, Human
agcagcccuucccugcucaaagccuuuccgca

SEQ ID NO: 49376 - RNA, 17 nt, Human
agcagcccuucuuuacu

SEQ ID NO: 49377 - RNA, 18 nt, Human
agcagccgagcgagagca

SEQ ID NO: 49378 - RNA, 23 nt, Human
agcagccgaggcuggccgggaga

SEQ ID NO: 49379 - RNA, 32 nt, Human
agcagccgaggcuggccgggagagggaggaag

SEQ ID NO: 49380 - RNA, 18 nt, Human
agcagccgccuccugccc

SEQ ID NO: 49381 - RNA, 32 nt, Human
agcagccgcgauggccagcaccaggaguaucg

SEQ ID NO: 49382 - RNA, 32 nt, Human
agcagccgcucggcgccugccugcucagaagc

SEQ ID NO: 49383 - RNA, 22 nt, Human
agcagccgggacugcaggcaca

SEQ ID NO: 49384 - RNA, 32 nt, Human
agcagccggguuggaagugucucuccacaguc

SEQ ID NO: 49385 - RNA, 19 nt, Human
agcagccgucauacugaug

SEQ ID NO: 49386 - RNA, 32 nt, Human
agcagccgucauacugauggccaucggcacgg

SEQ ID NO: 49387 - RNA, 20 nt, Human
agcagccuauuccucucugg

SEQ ID NO: 49388 - RNA, 32 nt, Human
agcagccucaaauuccagaaguggaggcucca

SEQ ID NO: 49389 - RNA, 32 nt, Human
agcagccucacugcaucuuucucuucccaugc

SEQ ID NO: 49390 - RNA, 32 nt, Human
agcagccucagcaaucaaacuauucccucacu

SEQ ID NO: 49391 - RNA, 32 nt, Human
agcagccucagccucugccuguccagcgccaa

SEQ ID NO: 49392 - RNA, 23 nt, Human
agcagccucccggcgcgaugaag

SEQ ID NO: 49393 - RNA, 32 nt, Human
agcagccucccuucuccucucccuccacuccc

SEQ ID NO: 49394 - RNA, 32 nt, Human
agcagccuccucucuuccugccugagcaccgc

SEQ ID NO: 49395 - RNA, 32 nt, Human
agcagccucgggcaggggucucaggcccgugg

SEQ ID NO: 49396 - RNA, 32 nt, Human
agcagccucuacccucagcauccuggccacaa

SEQ ID NO: 49397 - RNA, 32 nt, Human
agcagccucuccccaucuaccuagcaacuguc

SEQ ID NO: 49398 - RNA, 32 nt, Human
agcagccucugaggccgcccccagagagcauc

SEQ ID NO: 49399 - RNA, 32 nt, Human
agcagccucuucaugaauuacagcugaggggg

SEQ ID NO: 49400 - RNA, 32 nt, Human
agcagccugaacugagaguccaugccgaguuu

SEQ ID NO: 49401 - RNA, 21 nt, Human
agcagccugacaguccagcug

SEQ ID NO: 49402 - RNA, 32 nt, Human
agcagccugagcaacauagugagaccccaucc

SEQ ID NO: 49403 - RNA, 32 nt, Human
agcagccugcaagcugggagcuugcaugggug

SEQ ID NO: 49404 - RNA, 32 nt, Human
agcagccugcagcugccccaagccauggcuga

SEQ ID NO: 49405 - RNA, 32 nt, Human
agcagccugccccaugcuuccagccugcagaa

SEQ ID NO: 49406 - RNA, 32 nt, Human
agcagccugccuggcuggcucccuuggcugug

SEQ ID NO: 49407 - RNA, 32 nt, Human
agcagccuggaacagacccaggcggaggacac

SEQ ID NO: 49408 - RNA, 32 nt, Human
agcagccuggaacccacgccuccugaggacac

SEQ ID NO: 49409 - RNA, 32 nt, Human
agcagccuggacugcagcucucagaggccagg

SEQ ID NO: 49410 - RNA, 21 nt, Human
agcagccuggcuccccugggg

SEQ ID NO: 49411 - RNA, 32 nt, Human
agcagccuggcugccuugucauggccuccugg

SEQ ID NO: 49412 - RNA, 32 nt, Human
agcagccugggugacagagcgagacucuuguc

SEQ ID NO: 49413 - RNA, 32 nt, Human
agcagccuggguuccaaaguccuggccccagc

SEQ ID NO: 49414 - RNA, 32 nt, Human
agcagccuguagaugggguaagugcuguggau

SEQ ID NO: 49415 - RNA, 32 nt, Human
agcagccuguguauauuccuaacacuuuguuc

SEQ ID NO: 49416 - RNA, 32 nt, Human
agcagccuguucccaguucccugggccucugg

SEQ ID NO: 49417 - RNA, 32 nt, Human
agcagccuguuccugcacuccacccugcuggc

SEQ ID NO: 49418 - RNA, 32 nt, Human
agcagccuuaacuucccuugggcggcucuagg

SEQ ID NO: 49419 - RNA, 32 nt, Human
agcagccuuggcuuuuccucuccugggugcuc

SEQ ID NO: 49420 - RNA, 22 nt, Human
agcagccuugguuccucugggg

SEQ ID NO: 49421 - RNA, 32 nt, Human
agcagccuuuugucccagcucagcuuugaucu

SEQ ID NO: 49422 - RNA, 32 nt, Human
agcagcgaccuccacucccgccaccgucugag

SEQ ID NO: 49423 - RNA, 32 nt, Human
agcagcgagaggcagaggcggcggcggcgggg

SEQ ID NO: 49424 - RNA, 32 nt, Human
agcagcgagagggagaggcgagaguaaggcgc

SEQ ID NO: 49425 - RNA, 32 nt, Human
agcagcgagcucggaugcaucucuccaaaagc

SEQ ID NO: 49426 - RNA, 32 nt, Human
agcagcgaggcaggaggaagaagggggcacug

SEQ ID NO: 49427 - RNA, 32 nt, Human
agcagcgagggcucuaagaccacccagcucuc

SEQ ID NO: 49428 - RNA, 32 nt, Human
agcagcgaguccuugccucccggcggcucagg

SEQ ID NO: 49429 - RNA, 32 nt, Human
agcagcgcacuaaguuacaucuugccuuaucu

SEQ ID NO: 49430 - RNA, 32 nt, Human
agcagcgcacugcaaccuggaccuccugggcu

SEQ ID NO: 49431 - RNA, 32 nt, Human
agcagcgcagaggcuuuggaggcugcaguguc

SEQ ID NO: 49432 - RNA, 32 nt, Human
agcagcgcaggauccagguuuccugccccagu

SEQ ID NO: 49433 - RNA, 32 nt, Human
agcagcgcaggggucagggagguggagacacu

SEQ ID NO: 49434 - RNA, 32 nt, Human
agcagcgcagucucagaucacugcaaccuccg

SEQ ID NO: 49435 - RNA, 32 nt, Human
agcagcgcaugcagacucacguguagggccag

SEQ ID NO: 49436 - RNA, 32 nt, Human
agcagcgccaggauuccucggcagucgucccc

SEQ ID NO: 49437 - RNA, 32 nt, Human
agcagcgccauggaggacucugaagcacuggg

SEQ ID NO: 49438 - RNA, 32 nt, Human
agcagcgccuccuucaggguuggcugggagcu

SEQ ID NO: 49439 - RNA, 24 nt, Human
agcagcgcggagagcugacuauua

SEQ ID NO: 49440 - RNA, 32 nt, Human
agcagcgcgggcagcgagaugcagcaccgagg

SEQ ID NO: 49441 - RNA, 32 nt, Human
agcagcgcggucgcuggaaacugaggcuucau

SEQ ID NO: 49442 - RNA, 32 nt, Human
agcagcgcuucucacagacgugcacagaccug

SEQ ID NO: 49443 - RNA, 32 nt, Human
agcagcggagaaacguuucucuuuccucucag

SEQ ID NO: 49444 - RNA, 32 nt, Human
agcagcggcaggcccagcuugugugcagcggc

SEQ ID NO: 49445 - RNA, 22 nt, Human
agcagcggcaucaggaggagga

SEQ ID NO: 49446 - RNA, 32 nt, Human
agcagcggccagcaucaccacacccgcggcac

SEQ ID NO: 49447 - RNA, 32 nt, Human
agcagcggcgccgccucccagaguucagaccc

SEQ ID NO: 49448 - RNA, 19 nt, Human
agcagcggcggccgagggg

SEQ ID NO: 49449 - RNA, 32 nt, Human
agcagcggcucucgccuguaaucccagcacuu

SEQ ID NO: 49450 - RNA, 19 nt, Human
agcagcggcuggagcagca

SEQ ID NO: 49451 - RNA, 23 nt, Human
agcagcgggaacugggggcucug

SEQ ID NO: 49452 - RNA, 32 nt, Human
agcagcgggcugggcacauccucuccucucuc

SEQ ID NO: 49453 - RNA, 32 nt, Human
agcagcgguggagucuguguugcaccuaggac

SEQ ID NO: 49454 - RNA, 32 nt, Human
agcagcgucccuuugguuuggcccagaggggc

SEQ ID NO: 49455 - RNA, 23 nt, Human
agcagcguggagacauuagguca

SEQ ID NO: 49456 - RNA, 17 nt, Human
agcagcguggaggggcc

SEQ ID NO: 49457 - RNA, 24 nt, Human
agcagcguggaggugucugggcca

SEQ ID NO: 49458 - RNA, 20 nt, Human
agcagcguggggagcuggcc

SEQ ID NO: 49459 - RNA, 23 nt, Human
agcagcguuccaaccugaggcca

SEQ ID NO: 49460 - RNA, 32 nt, Human
agcagcguucugagagacgcacaggagaccaa

SEQ ID NO: 49461 - RNA, 32 nt, Human
agcagcuaagagaaauuugagaggaaaagugg

SEQ ID NO: 49462 - RNA, 32 nt, Human
agcagcuacagaucguccuacucaccagcugg

SEQ ID NO: 49463 - RNA, 32 nt, Human
agcagcuacuucuaguuggucaccuuggcccc

SEQ ID NO: 49464 - RNA, 32 nt, Human
agcagcuagaguccgggauccccagccuacug

SEQ ID NO: 49465 - RNA, 32 nt, Human
agcagcuagcaugcguggcugugcacaguggc

SEQ ID NO: 49466 - RNA, 32 nt, Human
agcagcuaggaguacaguugggagccacugua

SEQ ID NO: 49467 - RNA, 32 nt, Human
agcagcuauggacagcagaguagcuaugguca

SEQ ID NO: 49468 - RNA, 18 nt, Human
agcagcucaaaggcacag

SEQ ID NO: 49469 - RNA, 32 nt, Human
agcagcucaaugagugccuacagcagaaagcc

SEQ ID NO: 49470 - RNA, 32 nt, Human
agcagcucagcaacccuugcugugcucaaguu

SEQ ID NO: 49471 - RNA, 32 nt, Human
agcagcuccacaaccaccuccagccugggaga

SEQ ID NO: 49472 - RNA, 32 nt, Human
agcagcuccagagcaugggacaccuggcugac

SEQ ID NO: 49473 - RNA, 32 nt, Human
agcagcuccagcagcgccagcaggcgggaucg

SEQ ID NO: 49474 - RNA, 32 nt, Human
agcagcuccagcccagagcacucggccagcag

SEQ ID NO: 49475 - RNA, 19 nt, Human
agcagcuccaggagcccag

SEQ ID NO: 49476 - RNA, 32 nt, Human
agcagcuccaggagucaggcaaccuccaauca

SEQ ID NO: 49477 - RNA, 32 nt, Human
agcagcuccaggcuggaguucugguucuucca

SEQ ID NO: 49478 - RNA, 32 nt, Human
agcagcucccacaaugcaccagggcauaugca

SEQ ID NO: 49479 - RNA, 17 nt, Human
agcagcucccagugcca

SEQ ID NO: 49480 - RNA, 32 nt, Human
agcagcuccgaauuuuuaccuggaauauuuug

SEQ ID NO: 49481 - RNA, 32 nt, Human
agcagcuccgagaagaugaacuccuuggucug

SEQ ID NO: 49482 - RNA, 32 nt, Human
agcagcuccggcggccgagacgggggcggcgg

SEQ ID NO: 49483 - RNA, 32 nt, Human
agcagcuccgucaugagucuagcuaccaagau

SEQ ID NO: 49484 - RNA, 32 nt, Human
agcagcuccuaggagccuggcagggaaaggca

SEQ ID NO: 49485 - RNA, 32 nt, Human
agcagcuccucugcaggcacagccuggacuau

SEQ ID NO: 49486 - RNA, 32 nt, Human
agcagcuccugcuugaguucugagggcaucau

SEQ ID NO: 49487 - RNA, 32 nt, Human
agcagcuccuggcugggcugggcagacucagc

SEQ ID NO: 49488 - RNA, 32 nt, Human
agcagcuccuucuggacccagucuggaagguc

SEQ ID NO: 49489 - RNA, 32 nt, Human
agcagcucuccuuccccugccuucagcucaag

SEQ ID NO: 49490 - RNA, 32 nt, Human
agcagcucugagucuuuuggaggacagggacg

SEQ ID NO: 49491 - RNA, 32 nt, Human
agcagcucugggaggcacagagugcaggucuc

SEQ ID NO: 49492 - RNA, 32 nt, Human
agcagcucugugaugggaucccagacuguccc

SEQ ID NO: 49493 - RNA, 17 nt, Human
agcagcucuucagcaca

SEQ ID NO: 49494 - RNA, 32 nt, Human
agcagcucuucccacgccuaugaaguugaagc

SEQ ID NO: 49495 - RNA, 32 nt, Human
agcagcugaaggagcagcaggagaugcagcag

SEQ ID NO: 49496 - RNA, 32 nt, Human
agcagcugaaggaggaguuuguggaaaauuua

SEQ ID NO: 49497 - RNA, 32 nt, Human
agcagcugacacuuuuucccagaagggagaga

SEQ ID NO: 49498 - RNA, 32 nt, Human
agcagcugagauuacaggugcaugccaccacu

SEQ ID NO: 49499 - RNA, 32 nt, Human
agcagcugcacguccgaggcuuggggaggacc

SEQ ID NO: 49500 - RNA, 32 nt, Human
agcagcugcagcguuuucucuccugggaaccc

SEQ ID NO: 49501 - RNA, 32 nt, Human
agcagcugcauccagaucucauuaugcaucag

SEQ ID NO: 49502 - RNA, 20 nt, Human
agcagcugccagccccggca

SEQ ID NO: 49503 - RNA, 32 nt, Human
agcagcugccgaggccggagcaauggcggaac

SEQ ID NO: 49504 - RNA, 32 nt, Human
agcagcugccguggcgucuggccacauggagc

SEQ ID NO: 49505 - RNA, 32 nt, Human
agcagcugccuucaccauggacagcauaagca

SEQ ID NO: 49506 - RNA, 32 nt, Human
agcagcugcuccauugugccucgaggccccga

SEQ ID NO: 49507 - RNA, 32 nt, Human
agcagcugcuccugacagggaugcucaugccc

SEQ ID NO: 49508 - RNA, 32 nt, Human
agcagcugcucuggagcagggauccaccagau

SEQ ID NO: 49509 - RNA, 32 nt, Human
agcagcugcugcgggccagggcgggccaggac

SEQ ID NO: 49510 - RNA, 20 nt, Human
agcagcugcugcugccagua

SEQ ID NO: 49511 - RNA, 32 nt, Human
agcagcugcugucucuccaaugcagcuccaca

SEQ ID NO: 49512 - RNA, 20 nt, Human
agcagcuggaagaagcccag

SEQ ID NO: 49513 - RNA, 32 nt, Human
agcagcuggaggaggagcagggaggcaaguca

SEQ ID NO: 49514 - RNA, 32 nt, Human
agcagcuggaggaggaggaggaggauacgcca

SEQ ID NO: 49515 - RNA, 32 nt, Human
agcagcuggaggugacgccgggcagauuacgc

SEQ ID NO: 49516 - RNA, 32 nt, Human
agcagcuggcagaacccccguguuggcucccu

SEQ ID NO: 49517 - RNA, 23 nt, Human
agcagcuggcagagagcccagug

SEQ ID NO: 49518 - RNA, 17 nt, Human
agcagcuggcagcgcug

SEQ ID NO: 49519 - RNA, 32 nt, Human
agcagcuggcagcggagagagcagcccuggag

SEQ ID NO: 49520 - RNA, 16 nt, Human
agcagcuggcagggga

SEQ ID NO: 49521 - RNA, 32 nt, Human
agcagcuggcugucauggcaacaggaggcugu

SEQ ID NO: 49522 - RNA, 32 nt, Human
agcagcuggcuguguuugcagugcaaauagcu

SEQ ID NO: 49523 - RNA, 32 nt, Human
agcagcugggagagugccuugugugcagugac

SEQ ID NO: 49524 - RNA, 32 nt, Human
agcagcugggauuacaggcaaacgccaccaca

SEQ ID NO: 49525 - RNA, 32 nt, Human
agcagcugggauuacaggcgcacgccacuaug

SEQ ID NO: 49526 - RNA, 32 nt, Human
agcagcugggauuacaggcgcccacuaauuuu

SEQ ID NO: 49527 - RNA, 32 nt, Human
agcagcugggauuacaggcgcuggccacacac

SEQ ID NO: 49528 - RNA, 32 nt, Human
agcagcugggauuacagguaugcgccaccaug

SEQ ID NO: 49529 - RNA, 32 nt, Human
agcagcugggauuacaggugcccgccaccacg

SEQ ID NO: 49530 - RNA, 32 nt, Human
agcagcugggauuacaggugcgugccaccaca

SEQ ID NO: 49531 - RNA, 32 nt, Human
agcagcugggcagucacaucuggaaauggaaa

SEQ ID NO: 49532 - RNA, 32 nt, Human
agcagcugggcuggggagcagaaaacacacuu

SEQ ID NO: 49533 - RNA, 32 nt, Human
agcagcuggggguuccaccucaggguggggcg

SEQ ID NO: 49534 - RNA, 23 nt, Human
agcagcugguacuucugcuaggg

SEQ ID NO: 49535 - RNA, 32 nt, Human
agcagcugucugggagucaaggcugcaguagc

SEQ ID NO: 49536 - RNA, 32 nt, Human
agcagcugugacaugaagugaaugaaguccac

SEQ ID NO: 49537 - RNA, 32 nt, Human
agcagcugugagcagccagagcugaugcccgg

SEQ ID NO: 49538 - RNA, 32 nt, Human
agcagcugugagcuggagacagcagagggacc

SEQ ID NO: 49539 - RNA, 32 nt, Human
agcagcuguuucaaacaccaaugucaccucuc

SEQ ID NO: 49540 - RNA, 32 nt, Human
agcagcuuagaaucccagcugcuggcucgggc

SEQ ID NO: 49541 - RNA, 23 nt, Human
agcagcuuagacuuccgccgggg

SEQ ID NO: 49542 - RNA, 32 nt, Human
agcagcuuccacauaggguugagccugugggu

SEQ ID NO: 49543 - RNA, 32 nt, Human
agcagcuuccaucaggaacauggagcaggcag

SEQ ID NO: 49544 - RNA, 32 nt, Human
agcagcuucucccugucuuccucuccucucuu

SEQ ID NO: 49545 - RNA, 32 nt, Human
agcagcuucuccugcugacuggccaaucacug

SEQ ID NO: 49546 - RNA, 32 nt, Human
agcagcuugcccagcuaggagcagcagcaaca

SEQ ID NO: 49547 - RNA, 32 nt, Human
agcagcuugcccagcucuugaguacaguggug

SEQ ID NO: 49548 - RNA, 32 nt, Human
agcagcuugcugcucaaccucuagugucccuc

SEQ ID NO: 49549 - RNA, 32 nt, Human
agcagcuuggcccuuuucacagagguggccuu

SEQ ID NO: 49550 - RNA, 32 nt, Human
agcagcuugguauucauaaauauugggauugg

SEQ ID NO: 49551 - RNA, 32 nt, Human
agcagcuugguucuccccucuggccccuggag

SEQ ID NO: 49552 - RNA, 32 nt, Human
agcagcuuguguugucacgcuucuucuuuuga

SEQ ID NO: 49553 - RNA, 32 nt, Human
agcagcuuugagaugaccagucugguuuuugu

SEQ ID NO: 49554 - RNA, 17 nt, Human
agcagcuuuucuccuuu

SEQ ID NO: 49555 - RNA, 32 nt, Human
agcaggaaacauagaacucagagccagauccc

SEQ ID NO: 49556 - RNA, 32 nt, Human
agcaggaaacauggugaugcugggugacggcu

SEQ ID NO: 49557 - RNA, 32 nt, Human
agcaggaaagaacaacuccagaugggaggaac

SEQ ID NO: 49558 - RNA, 32 nt, Human
agcaggaaagagagcucccuggucuccuggga

SEQ ID NO: 49559 - RNA, 32 nt, Human
agcaggaaauaucugugggcuugugcacggac

SEQ ID NO: 49560 - RNA, 32 nt, Human
agcaggaaaucauucugaccucagguuaggca

SEQ ID NO: 49561 - RNA, 19 nt, Human
agcaggaacagcagccggg

SEQ ID NO: 49562 - RNA, 32 nt, Human
agcaggaacagcuugggucccguggaugacau

SEQ ID NO: 49563 - RNA, 32 nt, Human
agcaggaacagggagagaguagggacagcgac

SEQ ID NO: 49564 - RNA, 32 nt, Human
agcaggaaccacaggcaggcaccaccauaccc

SEQ ID NO: 49565 - RNA, 31 nt, Human
agcaggaaccagggccuacuccucuuauggu

SEQ ID NO: 49566 - RNA, 32 nt, Human
agcaggaaccuaaaauaucugccaucaucugc

SEQ ID NO: 49567 - RNA, 32 nt, Human
agcaggaaccucuccauccucacuuuccaucc

SEQ ID NO: 49568 - RNA, 32 nt, Human
agcaggaaccuugucuguguuguucauggcua

SEQ ID NO: 49569 - RNA, 32 nt, Human
agcaggaacuauaggcaugugccaccaugccc

SEQ ID NO: 49570 - RNA, 32 nt, Human
agcaggaacugagagcuucccacccagcaccu

SEQ ID NO: 49571 - RNA, 32 nt, Human
agcaggaagaaggcuccucucuccaucgcacc

SEQ ID NO: 49572 - RNA, 32 nt, Human
agcaggaagcagcucaggacagggaagacaaa

SEQ ID NO: 49573 - RNA, 32 nt, Human
agcaggaagccgccuaccaccaugagcagcac

SEQ ID NO: 49574 - RNA, 19 nt, Human
agcaggaagcggggcagca

SEQ ID NO: 49575 - RNA, 32 nt, Human
agcaggaagcuccaaagggaauggggguaugg

SEQ ID NO: 49576 - RNA, 23 nt, Human
agcaggaaggaccagguucugcu

SEQ ID NO: 49577 - RNA, 32 nt, Human
agcaggaaggagagcagaaaaggggaugggcu

SEQ ID NO: 49578 - RNA, 32 nt, Human
agcaggaaggccuggguggaucggccuccucu

SEQ ID NO: 49579 - RNA, 32 nt, Human
agcaggaaggcggccuccugcccacccgccgc

SEQ ID NO: 49580 - RNA, 32 nt, Human
agcaggaagggccaggaccagaaccuugccca

SEQ ID NO: 49581 - RNA, 32 nt, Human
agcaggaagggcucccugcccuugggguuuug

SEQ ID NO: 49582 - RNA, 32 nt, Human
agcaggaaggucucaccugaggugaaccuucg

SEQ ID NO: 49583 - RNA, 23 nt, Human
agcaggaauccuagaagcaaaug

SEQ ID NO: 49584 - RNA, 32 nt, Human
agcaggaauugccccuguucagagcagccgga

SEQ ID NO: 49585 - RNA, 32 nt, Human
agcaggacaacgaagaggcagaaggaucuggg

SEQ ID NO: 49586 - RNA, 32 nt, Human
agcaggacacgugaacacccagacacccacuc

SEQ ID NO: 49587 - RNA, 16 nt, Human
agcaggacagcaagca

SEQ ID NO: 49588 - RNA, 25 nt, Human
agcaggacaguccgcgccuggggga

SEQ ID NO: 49589 - RNA, 32 nt, Human
agcaggacaugagacauagauacaguggggag

SEQ ID NO: 49590 - RNA, 20 nt, Human
agcaggaccagcaggcacag

SEQ ID NO: 49591 - RNA, 32 nt, Human
agcaggaccagcugccuuucucaccaccacag

SEQ ID NO: 49592 - RNA, 32 nt, Human
agcaggacccuagaggagacucucauucgauu

SEQ ID NO: 49593 - RNA, 22 nt, Human
agcaggaccgcguccucccgcc

SEQ ID NO: 49594 - RNA, 23 nt, Human
agcaggacucaugggucccaguu

SEQ ID NO: 49595 - RNA, 32 nt, Human
agcaggacuggguagcagagccgggaaggugg

SEQ ID NO: 49596 - RNA, 32 nt, Human
agcaggagaagacauacugcagggcucaguga

SEQ ID NO: 49597 - RNA, 32 nt, Human
agcaggagacuccacuuucuuccuuuguacag

SEQ ID NO: 49598 - RNA, 32 nt, Human
agcaggagagagaagaaacaggccagcuguga

SEQ ID NO: 49599 - RNA, 32 nt, Human
agcaggagagaggugguagggagcagccagcc

SEQ ID NO: 49600 - RNA, 31 nt, Human
agcaggagagccccuguuuccuggccgggga

SEQ ID NO: 49601 - RNA, 32 nt, Human
agcaggagagggaggcuuccugacugacacag

SEQ ID NO: 49602 - RNA, 32 nt, Human
agcaggagcagcagagcagcagcuaagacccc

SEQ ID NO: 49603 - RNA, 32 nt, Human
agcaggagccuguaaucccagcuguucgggag

SEQ ID NO: 49604 - RNA, 32 nt, Human
agcaggagcgagagaugagaaagggaauccag

SEQ ID NO: 49605 - RNA, 32 nt, Human
agcaggagcugcagcgagccggguaccuggac

SEQ ID NO: 49606 - RNA, 24 nt, Human
agcaggagcuuccgccuccucucc

SEQ ID NO: 49607 - RNA, 32 nt, Human
agcaggaggaagaggaggaggcccguuggcgu

SEQ ID NO: 49608 - RNA, 32 nt, Human
agcaggaggaccucacccacacccauggcaaa

SEQ ID NO: 49609 - RNA, 32 nt, Human
agcaggaggagaaagagaagcuugucucagaa

SEQ ID NO: 49610 - RNA, 32 nt, Human
agcaggaggagaagauacgagagcaggaggag

SEQ ID NO: 49611 - RNA, 32 nt, Human
agcaggaggagaagauaugggagcaggaggag

SEQ ID NO: 49612 - RNA, 32 nt, Human
agcaggaggagaagaugugugagcaggaagag

SEQ ID NO: 49613 - RNA, 32 nt, Human
agcaggaggagagagccccugaagugaggaaa

SEQ ID NO: 49614 - RNA, 32 nt, Human
agcaggaggagcggagaaaggagagggcgggg

SEQ ID NO: 49615 - RNA, 32 nt, Human
agcaggaggagguggcggcggcgggaagaugc

SEQ ID NO: 49616 - RNA, 32 nt, Human
agcaggaggagguggguggggugaaggaggag

SEQ ID NO: 49617 - RNA, 32 nt, Human
agcaggaggaggugguggcggcgggaagaugc

SEQ ID NO: 49618 - RNA, 32 nt, Human
agcaggaggaguuuggauaaagcugaaguucc

SEQ ID NO: 49619 - RNA, 32 nt, Human
agcaggaggcggaggugcaggggccgcccgag

SEQ ID NO: 49620 - RNA, 32 nt, Human
agcaggaggcggaggugguggaaggcuguuuc

SEQ ID NO: 49621 - RNA, 32 nt, Human
agcaggagggccuggcugggugaggggaggcc

SEQ ID NO: 49622 - RNA, 32 nt, Human
agcaggaggggagaaacaggagaggagaggcc

SEQ ID NO: 49623 - RNA, 32 nt, Human
agcaggaggggcgagcugggaggcaggaggca

SEQ ID NO: 49624 - RNA, 32 nt, Human
agcaggagucgccccggggcagcagcggcagc

SEQ ID NO: 49625 - RNA, 32 nt, Human
agcaggaguggaugcagccugaucagggucug

SEQ ID NO: 49626 - RNA, 32 nt, Human
agcaggagugugaggaggagacagccucagcg

SEQ ID NO: 49627 - RNA, 32 nt, Human
agcaggaguuaauggaccggccauccauagcg

SEQ ID NO: 49628 - RNA, 32 nt, Human
agcaggaucacucccuagcuucucugagcaca

SEQ ID NO: 49629 - RNA, 32 nt, Human
agcaggauccuggggccgaggcugcagcucag

SEQ ID NO: 49630 - RNA, 32 nt, Human
agcaggaucugucucaccauacacugagaacu

SEQ ID NO: 49631 - RNA, 32 nt, Human
agcaggaugaccucuucagcuucuggggcccg

SEQ ID NO: 49632 - RNA, 32 nt, Human
agcaggauugcaggggacacagggaagcacug

SEQ ID NO: 49633 - RNA, 32 nt, Human
agcaggcaagaagcggaggcagugaguacagc

SEQ ID NO: 49634 - RNA, 32 nt, Human
agcaggcaagacuuuuucucuguguuaggaaa

SEQ ID NO: 49635 - RNA, 32 nt, Human
agcaggcaagaugcugaaaaugcugaggcaaa

SEQ ID NO: 49636 - RNA, 32 nt, Human
agcaggcaaucaauaaauauuuguugacugau

SEQ ID NO: 49637 - RNA, 32 nt, Human
agcaggcaauuucaccaccaaaugccaagaaa

SEQ ID NO: 49638 - RNA, 22 nt, Human
agcaggcacacagcaggggcuc

SEQ ID NO: 49639 - RNA, 32 nt, Human
agcaggcacagagccagcagcagaucacacuu

SEQ ID NO: 49640 - RNA, 32 nt, Human
agcaggcaccuguaaucccagcuacuugggag

SEQ ID NO: 49641 - RNA, 32 nt, Human
agcaggcacuggcugagaaugaggugaacugu

SEQ ID NO: 49642 - RNA, 32 nt, Human
agcaggcagaagaaaaggcagcuguggugugu

SEQ ID NO: 49643 - RNA, 32 nt, Human
agcaggcagagcggggaggugccugagcuggg

SEQ ID NO: 49644 - RNA, 23 nt, Human
agcaggcagaucaccugagguca

SEQ ID NO: 49645 - RNA, 23 nt, Human
agcaggcagaucaccugagguua

SEQ ID NO: 49646 - RNA, 32 nt, Human
agcaggcagcaccccucugccagccgggcccc

SEQ ID NO: 49647 - RNA, 32 nt, Human
agcaggcagcaccccucugccagccgggcucc

SEQ ID NO: 49648 - RNA, 32 nt, Human
agcaggcagccugucuggguuccugaggccug

SEQ ID NO: 49649 - RNA, 32 nt, Human
agcaggcagcggcagagagggaauggugcagg

SEQ ID NO: 49650 - RNA, 32 nt, Human
agcaggcagcgggcggcggggagcagcaugga

SEQ ID NO: 49651 - RNA, 32 nt, Human
agcaggcagcuccugugcuguaaagaaaauug

SEQ ID NO: 49652 - RNA, 32 nt, Human
agcaggcagcuccuguguuuucuugagggugg

SEQ ID NO: 49653 - RNA, 32 nt, Human
agcaggcaggacacaggagggauggcacugcc

SEQ ID NO: 49654 - RNA, 32 nt, Human
agcaggcaggagagagaggggaaggagguaug

SEQ ID NO: 49655 - RNA, 25 nt, Human
agcaggcaggagcaggggaggcucg

SEQ ID NO: 49656 - RNA, 32 nt, Human
agcaggcaggcaggagguccuguuagcccugc

SEQ ID NO: 49657 - RNA, 32 nt, Human
agcaggcaggccucccggucagggagccucug

SEQ ID NO: 49658 - RNA, 24 nt, Human
agcaggcaggcuggggaggccagu

SEQ ID NO: 49659 - RNA, 32 nt, Human
agcaggcaggggacccagggggacuguggcac

SEQ ID NO: 49660 - RNA, 32 nt, Human
agcaggcagggugggagugagcguggcugagg

SEQ ID NO: 49661 - RNA, 32 nt, Human
agcaggcaguccagagaacuggccuccccagc

SEQ ID NO: 49662 - RNA, 18 nt, Human
agcaggcauaggguagca

SEQ ID NO: 49663 - RNA, 32 nt, Human
agcaggcauggaaggggaauugcagugucccu

SEQ ID NO: 49664 - RNA, 32 nt, Human
agcaggcaugguccuggaaaauuggggaauga

SEQ ID NO: 49665 - RNA, 18 nt, Human
agcaggccaccaagagca

SEQ ID NO: 49666 - RNA, 32 nt, Human
agcaggccagacacagucugaugccagcuggg

SEQ ID NO: 49667 - RNA, 15 nt, Human
agcaggccaggcaca

SEQ ID NO: 49668 - RNA, 18 nt, Human
agcaggcccagccuuccu

SEQ ID NO: 49669 - RNA, 32 nt, Human
agcaggcccaggagaauuaggaaggccauggg

SEQ ID NO: 49670 - RNA, 20 nt, Human
agcaggcccagugggaggcu

SEQ ID NO: 49671 - RNA, 32 nt, Human
agcaggcccauugcaccccucugccuccucuc

SEQ ID NO: 49672 - RNA, 32 nt, Human
agcaggcccccuuguccuuccugggcccuggu

SEQ ID NO: 49673 - RNA, 32 nt, Human
agcaggcccggcaguuggaggaaggccagagg

SEQ ID NO: 49674 - RNA, 32 nt, Human
agcaggcccgggagccgggaggcugcgggcgg

SEQ ID NO: 49675 - RNA, 32 nt, Human
agcaggcccggggagggugguuaccgcugagg

SEQ ID NO: 49676 - RNA, 17 nt, Human
agcaggcccuccugccc

SEQ ID NO: 49677 - RNA, 32 nt, Human
agcaggcccugggccuccaccucugugcaggg

SEQ ID NO: 49678 - RNA, 32 nt, Human
agcaggccgaggaggaagaagaggggcagugg

SEQ ID NO: 49679 - RNA, 16 nt, Human
agcaggccgggcagca

SEQ ID NO: 49680 - RNA, 32 nt, Human
agcaggccucccgugccucugccagcaaggag

SEQ ID NO: 49681 - RNA, 17 nt, Human
agcaggccucugaggca

SEQ ID NO: 49682 - RNA, 32 nt, Human
agcaggccuggauggaggccuagaaagcccuu

SEQ ID NO: 49683 - RNA, 32 nt, Human
agcaggccugugccuccacaucaucuuguugu

SEQ ID NO: 49684 - RNA, 32 nt, Human
agcaggccuuccucccucccacccccaauguc

SEQ ID NO: 49685 - RNA, 32 nt, Human
agcaggccuuggggcucacugaaggcucgaag

SEQ ID NO: 49686 - RNA, 32 nt, Human
agcaggcgagcugacauucugcagccuggacg

SEQ ID NO: 49687 - RNA, 32 nt, Human
agcaggcgccagcgguggaggcugagucgcag

SEQ ID NO: 49688 - RNA, 32 nt, Human
agcaggcgcuuguaaucccagcuacuugggag

SEQ ID NO: 49689 - RNA, 32 nt, Human
agcaggcggagcgagagagggagaaacaggcg

SEQ ID NO: 49690 - RNA, 23 nt, Human
agcaggcggaucaccugagguca

SEQ ID NO: 49691 - RNA, 32 nt, Human
agcaggcggcuccugugcuguaaagaaaauug

SEQ ID NO: 49692 - RNA, 19 nt, Human
agcaggcggggaggaggcu

SEQ ID NO: 49693 - RNA, 32 nt, Human
agcaggcgugggugccaccacccucuagcccc

SEQ ID NO: 49694 - RNA, 32 nt, Human
agcaggcucagcccaaggguccgcauuagugg

SEQ ID NO: 49695 - RNA, 32 nt, Human
agcaggcucccugagugaugagcuugaaccug

SEQ ID NO: 49696 - RNA, 32 nt, Human
agcaggcuccgaaucaccaucucccucacaug

SEQ ID NO: 49697 - RNA, 32 nt, Human
agcaggcuccugggguucccaauuccaggcau

SEQ ID NO: 49698 - RNA, 32 nt, Human
agcaggcucuacuccagaacagaacccacagu

SEQ ID NO: 49699 - RNA, 32 nt, Human
agcaggcugcagcugcuggaugaagcccccag

SEQ ID NO: 49700 - RNA, 32 nt, Human
agcaggcugccaccccuucuaccucaccacug

SEQ ID NO: 49701 - RNA, 32 nt, Human
agcaggcugccugucugugguccaggcuucag

SEQ ID NO: 49702 - RNA, 32 nt, Human
agcaggcuggagaagcgaggccagcaggccag

SEQ ID NO: 49703 - RNA, 32 nt, Human
agcaggcugggcccuaggcaggaagcuggcuu

SEQ ID NO: 49704 - RNA, 22 nt, Human
agcaggcuggggaccuccuccc

SEQ ID NO: 49705 - RNA, 32 nt, Human
agcaggcuguccaggcugggcuugguggucag

SEQ ID NO: 49706 - RNA, 32 nt, Human
agcaggcuguggcccaggccuccugggugaca

SEQ ID NO: 49707 - RNA, 32 nt, Human
agcaggcugugggguggagcacuggacuccgg

SEQ ID NO: 49708 - RNA, 32 nt, Human
agcaggcuuacugccaucaacauugcuugaaa

SEQ ID NO: 49709 - RNA, 32 nt, Human
agcaggcuuccaugcugcugugggcguccuug

SEQ ID NO: 49710 - RNA, 32 nt, Human
agcaggcuugggccugucauggcuggccggaa

SEQ ID NO: 49711 - RNA, 32 nt, Human
agcagggaacaaaggagcggagaggggagggg

SEQ ID NO: 49712 - RNA, 32 nt, Human
agcagggaacugcucguguccuccaucuuugc

SEQ ID NO: 49713 - RNA, 32 nt, Human
agcagggaagaugagaacaaucagggcuagaa

SEQ ID NO: 49714 - RNA, 32 nt, Human
agcagggaauacagucguuccaucagagcugg

SEQ ID NO: 49715 - RNA, 32 nt, Human
agcagggacagcacagacccucuggcuggggc

SEQ ID NO: 49716 - RNA, 32 nt, Human
agcagggacagcccacaccugaagagcacgcc

SEQ ID NO: 49717 - RNA, 32 nt, Human
agcagggacccaggcaguggggcuguuagguu

SEQ ID NO: 49718 - RNA, 20 nt, Human
agcagggacccugguuucca

SEQ ID NO: 49719 - RNA, 32 nt, Human
agcagggaccugccacaagugggggcaccauc

SEQ ID NO: 49720 - RNA, 32 nt, Human
agcagggacuacaggcaugcgccaccacgccc

SEQ ID NO: 49721 - RNA, 24 nt, Human
agcagggagaggagucuuuccucc

SEQ ID NO: 49722 - RNA, 32 nt, Human
agcagggagagggagucggacaugaggcugag

SEQ ID NO: 49723 - RNA, 32 nt, Human
agcagggagaggggcggagaggcagcgaaccu

SEQ ID NO: 49724 - RNA, 32 nt, Human
agcagggagcacuuggcuccuggcagagggag

SEQ ID NO: 49725 - RNA, 32 nt, Human
agcagggagcaguguucagaggcaaagcagcc

SEQ ID NO: 49726 - RNA, 32 nt, Human
agcagggagcuuugggacagggcuggggcccc

SEQ ID NO: 49727 - RNA, 32 nt, Human
agcagggaggccaugugcucagccuggccacg

SEQ ID NO: 49728 - RNA, 32 nt, Human
agcagggaggcuggggccugcaguuucacgca

SEQ ID NO: 49729 - RNA, 32 nt, Human
agcagggaggguguugaggaggcuucugcgag

SEQ ID NO: 49730 - RNA, 32 nt, Human
agcagggaucagccuggagaucauccgcucag

SEQ ID NO: 49731 - RNA, 32 nt, Human
agcagggauccaagaaugugccaagagucccg

SEQ ID NO: 49732 - RNA, 32 nt, Human
agcagggaucguaccacugcacuccagccugg

SEQ ID NO: 49733 - RNA, 32 nt, Human
agcagggaucugcucccuaucuagacagaucu

SEQ ID NO: 49734 - RNA, 32 nt, Human
agcagggauuacaggcaugcaccaccaugccu

SEQ ID NO: 49735 - RNA, 32 nt, Human
agcagggauuacaggcaugcacccacaugcca

SEQ ID NO: 49736 - RNA, 32 nt, Human
agcagggauuacaggugugugccaccaugccu

SEQ ID NO: 49737 - RNA, 32 nt, Human
agcagggauuaccggugugcaccaccaugccu

SEQ ID NO: 49738 - RNA, 32 nt, Human
agcagggcaccguguaugaaugcaguuuggug

SEQ ID NO: 49739 - RNA, 18 nt, Human
agcagggcagaacugggg

SEQ ID NO: 49740 - RNA, 32 nt, Human
agcagggcaggcagggguuggagugggcauag

SEQ ID NO: 49741 - RNA, 32 nt, Human
agcagggcagggaccccucuccccugcugucu

SEQ ID NO: 49742 - RNA, 32 nt, Human
agcagggcagggcuccaccaggaggcuucggu

SEQ ID NO: 49743 - RNA, 15 nt, Human
agcagggcaggggcu

SEQ ID NO: 49744 - RNA, 32 nt, Human
agcagggcagugagccgugaaguuccuagugg

SEQ ID NO: 49745 - RNA, 21 nt, Human
agcagggcaucagcugaggga

SEQ ID NO: 49746 - RNA, 32 nt, Human
agcagggcaucucugaaacaaaggcagcagcc

SEQ ID NO: 49747 - RNA, 32 nt, Human
agcagggcaugguggugcaugccaguaauucc

SEQ ID NO: 49748 - RNA, 16 nt, Human
agcagggcauguagca

SEQ ID NO: 49749 - RNA, 18 nt, Human
agcagggccaagaugggg

SEQ ID NO: 49750 - RNA, 18 nt, Human
agcagggccacucccggc

SEQ ID NO: 49751 - RNA, 20 nt, Human
agcagggccacucggccggc

SEQ ID NO: 49752 - RNA, 19 nt, Human
agcagggccagccccgguc

SEQ ID NO: 49753 - RNA, 20 nt, Human
agcagggccagccccgguca

SEQ ID NO: 49754 - RNA, 21 nt, Human
agcagggccaggacaagggga

SEQ ID NO: 49755 - RNA, 24 nt, Human
agcagggccaggcgggcucggggg

SEQ ID NO: 49756 - RNA, 20 nt, Human
agcagggccagguccugguc

SEQ ID NO: 49757 - RNA, 32 nt, Human
agcagggccagucucagggcccggagacgaac

SEQ ID NO: 49758 - RNA, 23 nt, Human
agcagggcccaugaccgggugga

SEQ ID NO: 49759 - RNA, 19 nt, Human
agcagggccccccgcccgg

SEQ ID NO: 49760 - RNA, 21 nt, Human
agcagggcccgcugccccagg

SEQ ID NO: 49761 - RNA, 32 nt, Human
agcagggcccgcugccccaggcaccuaccgcu

SEQ ID NO: 49762 - RNA, 16 nt, Human
agcagggcccgguccc

SEQ ID NO: 49763 - RNA, 19 nt, Human
agcagggccgccugguccc

SEQ ID NO: 49764 - RNA, 21 nt, Human
agcagggccgccuugggcagg

SEQ ID NO: 49765 - RNA, 32 nt, Human
agcagggccuccucuuccuccugguguuugaa

SEQ ID NO: 49766 - RNA, 21 nt, Human
agcagggccucgugccccggc

SEQ ID NO: 49767 - RNA, 32 nt, Human
agcagggccuggccaggcagaguguuaucacc

SEQ ID NO: 49768 - RNA, 32 nt, Human
agcagggcgcaaacccaggacaucugugccag

SEQ ID NO: 49769 - RNA, 17 nt, Human
agcagggcgccugggaa

SEQ ID NO: 49770 - RNA, 20 nt, Human
agcagggcuccagucccagg

SEQ ID NO: 49771 - RNA, 16 nt, Human
agcagggcuccuggga

SEQ ID NO: 49772 - RNA, 16 nt, Human
agcagggcucugggaa

SEQ ID NO: 49773 - RNA, 32 nt, Human
agcagggcuggggaagaaauggcaaacuaggg

SEQ ID NO: 49774 - RNA, 22 nt, Human
agcagggcugugcugccugggg

SEQ ID NO: 49775 - RNA, 32 nt, Human
agcaggggaagaggugcucucagagacagcag

SEQ ID NO: 49776 - RNA, 32 nt, Human
agcaggggacaagcaggcucaccccgcccuug

SEQ ID NO: 49777 - RNA, 32 nt, Human
agcaggggacagugcagggaggugugggguaa

SEQ ID NO: 49778 - RNA, 32 nt, Human
agcaggggagagagugagcgugagcuuggcau

SEQ ID NO: 49779 - RNA, 32 nt, Human
agcaggggagccaccagccacaggcagccacu

SEQ ID NO: 49780 - RNA, 32 nt, Human
agcaggggagggaacccagaggcuggggauga

SEQ ID NO: 49781 - RNA, 32 nt, Human
agcaggggaggugagacagagaugaggaggga

SEQ ID NO: 49782 - RNA, 32 nt, Human
agcaggggagguuuaguuggucucagcacauc

SEQ ID NO: 49783 - RNA, 23 nt, Human
agcaggggcacagcaggccucaa

SEQ ID NO: 49784 - RNA, 32 nt, Human
agcaggggcacagcaggccucaagagccccua

SEQ ID NO: 49785 - RNA, 32 nt, Human
agcaggggcaucugggaggcucuggcugccuu

SEQ ID NO: 49786 - RNA, 32 nt, Human
agcaggggcucaauaaaugcuuguugaacuug

SEQ ID NO: 49787 - RNA, 32 nt, Human
agcaggggcucagacuaccacacuccugcaga

SEQ ID NO: 49788 - RNA, 24 nt, Human
agcaggggcucccagcagugugua

SEQ ID NO: 49789 - RNA, 32 nt, Human
agcaggggcugacaggguggcaggugacuuuc

SEQ ID NO: 49790 - RNA, 32 nt, Human
agcaggggcugggagagcagaagggcaggccc

SEQ ID NO: 49791 - RNA, 32 nt, Human
agcagggggaaagguaggaaaaagagguaauu

SEQ ID NO: 49792 - RNA, 32 nt, Human
agcagggggacacagaccugcccaagccaccc

SEQ ID NO: 49793 - RNA, 32 nt, Human
agcagggggcagcagaggccaacagggagcuc

SEQ ID NO: 49794 - RNA, 32 nt, Human
agcaggggugaggagagcaggagaguaggggu

SEQ ID NO: 49795 - RNA, 24 nt, Human
agcagggguuggggaaacagcauc

SEQ ID NO: 49796 - RNA, 32 nt, Human
agcaggguaagcaggcuggcccaggguaaggg

SEQ ID NO: 49797 - RNA, 32 nt, Human
agcaggguacagcccauucccccagcccuggc

SEQ ID NO: 49798 - RNA, 32 nt, Human
agcagggucaagccucuuauuccaggagaagg

SEQ ID NO: 49799 - RNA, 32 nt, Human
agcagggucaccaacccagaucuccaggccca

SEQ ID NO: 49800 - RNA, 32 nt, Human
agcagggucacuucucauuuucuuugcugacu

SEQ ID NO: 49801 - RNA, 32 nt, Human
agcagggucaucuguagggccaccccacagcu

SEQ ID NO: 49802 - RNA, 32 nt, Human
agcaggguccauugcuggcaauggauggccca

SEQ ID NO: 49803 - RNA, 32 nt, Human
agcagggucccaaggauugggagaucuagugu

SEQ ID NO: 49804 - RNA, 32 nt, Human
agcaggguccuuccuugcaaaguacuauacag

SEQ ID NO: 49805 - RNA, 32 nt, Human
agcaggguggccguggugaaggagaacguguu

SEQ ID NO: 49806 - RNA, 31 nt, Human
agcagggugggaaggccucagauggcaucag

SEQ ID NO: 49807 - RNA, 32 nt, Human
agcagggugugugcagguuccuccucuacggu

SEQ ID NO: 49808 - RNA, 32 nt, Human
agcaggguucuccucaaagccucacaaccaua

SEQ ID NO: 49809 - RNA, 32 nt, Human
agcagguaaaacagggcuugccaugcugaggc

SEQ ID NO: 49810 - RNA, 32 nt, Human
agcagguaaagauggcagcuaccauguuccgg

SEQ ID NO: 49811 - RNA, 32 nt, Human
agcagguaaagucuacugacagaaagucagca

SEQ ID NO: 49812 - RNA, 32 nt, Human
agcagguaauuguucguggcacguuguggcag

SEQ ID NO: 49813 - RNA, 32 nt, Human
agcagguacagaggcccugcagcagggcaccc

SEQ ID NO: 49814 - RNA, 32 nt, Human
agcagguacaguuaaggaauaaguagaacuaa

SEQ ID NO: 49815 - RNA, 32 nt, Human
agcagguagcugccaugugcagcccaggccca

SEQ ID NO: 49816 - RNA, 32 nt, Human
agcagguagggagagcgcacugggaagcucgg

SEQ ID NO: 49817 - RNA, 19 nt, Human
agcaggucacugcugguuu

SEQ ID NO: 49818 - RNA, 20 nt, Human
agcaggucagaagagggaga

SEQ ID NO: 49819 - RNA, 32 nt, Human
agcaggucagugcaucgaguucuguuuccgug

SEQ ID NO: 49820 - RNA, 32 nt, Human
agcagguccaaagaaggggugggaggagggaa

SEQ ID NO: 49821 - RNA, 32 nt, Human
agcagguccaccagaccacccgcugggacuca

SEQ ID NO: 49822 - RNA, 18 nt, Human
agcagguccgaggcacag

SEQ ID NO: 49823 - RNA, 32 nt, Human
agcagguccgccagaccacccgcugggacuca

SEQ ID NO: 49824 - RNA, 30 nt, Human
agcagguccucaauaaauacucgcuggauc

SEQ ID NO: 49825 - RNA, 32 nt, Human
agcagguccuggcaagugcauuccacccgaac

SEQ ID NO: 49826 - RNA, 32 nt, Human
agcaggucgagaaaaugucuuuccuuucacuu

SEQ ID NO: 49827 - RNA, 32 nt, Human
agcaggucgcccagggcuuggcuacuguaggu

SEQ ID NO: 49828 - RNA, 32 nt, Human
agcaggucgccuccagccugaccagcaucggc

SEQ ID NO: 49829 - RNA, 24 nt, Human
agcaggucggccgcccucccgucc

SEQ ID NO: 49830 - RNA, 24 nt, Human
agcaggucuaggaauucgccuggu

SEQ ID NO: 49831 - RNA, 18 nt, Human
agcaggucucaggcacag

SEQ ID NO: 49832 - RNA, 32 nt, Human
agcaggucugaaugacaccaggucgcugcugu

SEQ ID NO: 49833 - RNA, 32 nt, Human
agcaggucuuccagacccugcgauccuuucug

SEQ ID NO: 49834 - RNA, 32 nt, Human
agcaggucuuuuaguugaaugcagcaugugca

SEQ ID NO: 49835 - RNA, 32 nt, Human
agcaggugaaagccaccauggcagauccugau

SEQ ID NO: 49836 - RNA, 32 nt, Human
agcaggugacauccuuccccuuccacccugcu

SEQ ID NO: 49837 - RNA, 32 nt, Human
agcaggugagaggcucugcuucugcugccgcu

SEQ ID NO: 49838 - RNA, 32 nt, Human
agcaggugaggagagagauugagaacuaugag

SEQ ID NO: 49839 - RNA, 19 nt, Human
agcaggugcacgggcaaca

SEQ ID NO: 49840 - RNA, 32 nt, Human
agcaggugcagaggcacugcagcugcucgguu

SEQ ID NO: 49841 - RNA, 32 nt, Human
agcaggugccaccaccaccacaaaagacacca

SEQ ID NO: 49842 - RNA, 23 nt, Human
agcaggugccacggcccgccccg

SEQ ID NO: 49843 - RNA, 32 nt, Human
agcaggugcccaggagagaggggauaaugaag

SEQ ID NO: 49844 - RNA, 32 nt, Human
agcaggugccuguaaucacagcuacucgggag

SEQ ID NO: 49845 - RNA, 32 nt, Human
agcaggugccuguaaucccagcuacuggggaa

SEQ ID NO: 49846 - RNA, 32 nt, Human
agcaggugcucaauaaauaucugccgacugga

SEQ ID NO: 49847 - RNA, 32 nt, Human
agcaggugcucaauaaaugauucuuagugacu

SEQ ID NO: 49848 - RNA, 32 nt, Human
agcagguggaguuuucaguaauuuguucaagu

SEQ ID NO: 49849 - RNA, 32 nt, Human
agcagguggaucaucugaggucgggagauuga

SEQ ID NO: 49850 - RNA, 32 nt, Human
agcagguggaugaggucagaucaccuuuggua

SEQ ID NO: 49851 - RNA, 32 nt, Human
agcagguggauuugggcccaggcccuguucac

SEQ ID NO: 49852 - RNA, 19 nt, Human
agcagguggcaggcuguua

SEQ ID NO: 49853 - RNA, 32 nt, Human
agcagguggcccagggaggcagauacagcaca

SEQ ID NO: 49854 - RNA, 32 nt, Human
agcagguggccuggucugugagccgcaggcac

SEQ ID NO: 49855 - RNA, 32 nt, Human
agcaggugggcagaucaaagcugcucagugcc

SEQ ID NO: 49856 - RNA, 32 nt, Human
agcaggugguagugggacaggacaauuggagc

SEQ ID NO: 49857 - RNA, 32 nt, Human
agcaggugugguuugagccaggaccuggggcg

SEQ ID NO: 49858 - RNA, 32 nt, Human
agcaggugugugccaccaugcccagcuaauuu

SEQ ID NO: 49859 - RNA, 32 nt, Human
agcagguucaguuaaaaguauaucagagauac

SEQ ID NO: 49860 - RNA, 20 nt, Human
agcagguuccugcccuugaa

SEQ ID NO: 49861 - RNA, 32 nt, Human
agcagguucuagaagguggauguguucuaugg

SEQ ID NO: 49862 - RNA, 32 nt, Human
agcagguucugccucccguccccucggagggc

SEQ ID NO: 49863 - RNA, 32 nt, Human
agcagguugcagcugcuggcacaaauagccug

SEQ ID NO: 49864 - RNA, 32 nt, Human
agcagguugcccaccaagcuggaaggcaguga

SEQ ID NO: 49865 - RNA, 18 nt, Human
agcagguuguaggcacag

SEQ ID NO: 49866 - RNA, 32 nt, Human
agcagguuuccuggcauguucuaaacuguuuu

SEQ ID NO: 49867 - RNA, 32 nt, Human
agcagguuuugcggaacccccaugacgcaggc

SEQ ID NO: 49868 - RNA, 32 nt, Human
agcaguaaaauggcucugucuucuacaggaua

SEQ ID NO: 49869 - RNA, 32 nt, Human
agcaguaaaggagugagcacuuuggguccuua

SEQ ID NO: 49870 - RNA, 32 nt, Human
agcaguaaaggcugauugacacacagggggau

SEQ ID NO: 49871 - RNA, 32 nt, Human
agcaguaacaggaaaccacuuaucacauggag

SEQ ID NO: 49872 - RNA, 32 nt, Human
agcaguacaauuucagcauaucucuggcucag

SEQ ID NO: 49873 - RNA, 32 nt, Human
agcaguacagaagugccuuuuacucauuugag

SEQ ID NO: 49874 - RNA, 21 nt, Human
agcaguagacagcccuggaca

SEQ ID NO: 49875 - RNA, 24 nt, Human
agcaguagacagcccuggacacuc

SEQ ID NO: 49876 - RNA, 32 nt, Human
agcaguagauaccccggggcugugcuuuagcg

SEQ ID NO: 49877 - RNA, 31 nt, Human
agcaguagcaagucucccaugugaggccaga

SEQ ID NO: 49878 - RNA, 32 nt, Human
agcaguaggaucucgguuuccagcccagugca

SEQ ID NO: 49879 - RNA, 32 nt, Human
agcaguaggcaugacagucaccaggaaggaca

SEQ ID NO: 49880 - RNA, 32 nt, Human
agcaguagugcgcaggcaagacuuuucaguga

SEQ ID NO: 49881 - RNA, 32 nt, Human
agcaguaucuaggagaccacgaaggaauacca

SEQ ID NO: 49882 - RNA, 32 nt, Human
agcaguaucucaaugguacuaguaaauaaaua

SEQ ID NO: 49883 - RNA, 32 nt, Human
agcaguaugagaaugaacuaacacaguaaauu

SEQ ID NO: 49884 - RNA, 32 nt, Human
agcaguauggcauccccuccccaggaucucgg

SEQ ID NO: 49885 - RNA, 32 nt, Human
agcagucaaaggacacacauggugggaccugu

SEQ ID NO: 49886 - RNA, 32 nt, Human
agcagucagccaauucauaugcuuugucucug

SEQ ID NO: 49887 - RNA, 32 nt, Human
agcagucaggcagacccagugauaugguaaga

SEQ ID NO: 49888 - RNA, 32 nt, Human
agcagucagggagagacagaacugggggaaag

SEQ ID NO: 49889 - RNA, 32 nt, Human
agcagucauaauuccacauaagccugagacuc

SEQ ID NO: 49890 - RNA, 32 nt, Human
agcagucaucccugccaccagccagagcacag

SEQ ID NO: 49891 - RNA, 32 nt, Human
agcagucauccuguggcucuggcuccagagga

SEQ ID NO: 49892 - RNA, 32 nt, Human
agcaguccacaaagugcugggauuacaggugu

SEQ ID NO: 49893 - RNA, 21 nt, Human
agcaguccauuucuaccaagg

SEQ ID NO: 49894 - RNA, 32 nt, Human
agcagucccagagggcccaucuguaaagaucg

SEQ ID NO: 49895 - RNA, 25 nt, Human
agcagucccucugcaccccagagug

SEQ ID NO: 49896 - RNA, 32 nt, Human
agcaguccuaucacaagcucauggccuuggac

SEQ ID NO: 49897 - RNA, 32 nt, Human
agcaguccucccaccuuggccucccagaaugc

SEQ ID NO: 49898 - RNA, 32 nt, Human
agcaguccugagggcccugccucccagucccu

SEQ ID NO: 49899 - RNA, 20 nt, Human
agcaguccugcccccacccc

SEQ ID NO: 49900 - RNA, 22 nt, Human
agcaguccugugcuuggaaaug

SEQ ID NO: 49901 - RNA, 32 nt, Human
agcaguccuugcaggugccuuucuuguaccuc

SEQ ID NO: 49902 - RNA, 32 nt, Human
agcagucgccuaguuagggcucagaguggaag

SEQ ID NO: 49903 - RNA, 32 nt, Human
agcagucggcuuucugcugggcucggagccag

SEQ ID NO: 49904 - RNA, 32 nt, Human
agcagucguggugaaaccggucagcuguggac

SEQ ID NO: 49905 - RNA, 32 nt, Human
agcagucuaggagcuugcagccacccuguuag

SEQ ID NO: 49906 - RNA, 32 nt, Human
agcagucucacagaaggcaggcuaguccauuc

SEQ ID NO: 49907 - RNA, 32 nt, Human
agcagucucacugcagucuuauuuccaaguaa

SEQ ID NO: 49908 - RNA, 32 nt, Human
agcagucucagcccucuucucgucucauuccc

SEQ ID NO: 49909 - RNA, 32 nt, Human
agcagucucaggccagcuucucugugaccccu

SEQ ID NO: 49910 - RNA, 32 nt, Human
agcagucuccacugcaaccacucuggccaagg

SEQ ID NO: 49911 - RNA, 32 nt, Human
agcagucucugccuugccuuuagccccuccca

SEQ ID NO: 49912 - RNA, 32 nt, Human
agcagucucuggucccagcccaccccauggcc

SEQ ID NO: 49913 - RNA, 32 nt, Human
agcagucugggcaacauggugagaccccaucu

SEQ ID NO: 49914 - RNA, 32 nt, Human
agcagucugggcacacacgagcagguggcauc

SEQ ID NO: 49915 - RNA, 32 nt, Human
agcagucuuacuauccacagcaguauaugucu

SEQ ID NO: 49916 - RNA, 32 nt, Human
agcagucuuaguccuugcccugccucaguuua

SEQ ID NO: 49917 - RNA, 18 nt, Human
agcagucuucccaccuca

SEQ ID NO: 49918 - RNA, 32 nt, Human
agcagucuuuacaugcagccuuuuguugcaca

SEQ ID NO: 49919 - RNA, 32 nt, Human
agcagugaaaaguagagguugcccauguggau

SEQ ID NO: 49920 - RNA, 32 nt, Human
agcagugacacucccgucgcucggugaggacg

SEQ ID NO: 49921 - RNA, 31 nt, Human
agcagugaccacagccuuaccaaagcagacg

SEQ ID NO: 49922 - RNA, 32 nt, Human
agcagugacccucccuacucuucuuuuuaaug

SEQ ID NO: 49923 - RNA, 32 nt, Human
agcagugacccucccuucuagucuuuauuuau

SEQ ID NO: 49924 - RNA, 32 nt, Human
agcagugagcugcaggcuuagaggggugacca

SEQ ID NO: 49925 - RNA, 32 nt, Human
agcagugaggaagagaaaagcagagauaagca

SEQ ID NO: 49926 - RNA, 32 nt, Human
agcagugaggagaaugaauaccuuccaagacc

SEQ ID NO: 49927 - RNA, 32 nt, Human
agcagugaggccuucugcccuggccuugggga

SEQ ID NO: 49928 - RNA, 32 nt, Human
agcagugagggaguuaacacagcagcugacuc

SEQ ID NO: 49929 - RNA, 32 nt, Human
agcagugaguguccugaaacaucacagggcuc

SEQ ID NO: 49930 - RNA, 32 nt, Human
agcagugauaaacagagaccacugcagcagcc

SEQ ID NO: 49931 - RNA, 32 nt, Human
agcagugaucacucagccauuuuaccucaccc

SEQ ID NO: 49932 - RNA, 32 nt, Human
agcagugaugcucucaaugggaagaugugcaa

SEQ ID NO: 49933 - RNA, 32 nt, Human
agcagugccaugggacauuucuagguguagag

SEQ ID NO: 49934 - RNA, 32 nt, Human
agcagugcccagccacuaaccugcacaagauc

SEQ ID NO: 49935 - RNA, 32 nt, Human
agcagugccccuggcccaguucugagccaacc

SEQ ID NO: 49936 - RNA, 32 nt, Human
agcagugccuucuugcugcauccucuggagag

SEQ ID NO: 49937 - RNA, 32 nt, Human
agcagugcucacgccuuguaaucccagcacuu

SEQ ID NO: 49938 - RNA, 32 nt, Human
agcagugcucugggaauaaacagcugcccuag

SEQ ID NO: 49939 - RNA, 32 nt, Human
agcagugcugaggagaugccaaggucaggcau

SEQ ID NO: 49940 - RNA, 32 nt, Human
agcagugcugcuuggaaaauagcaaacucaaa

SEQ ID NO: 49941 - RNA, 32 nt, Human
agcagugcuggguggagagagccagaaaacag

SEQ ID NO: 49942 - RNA, 32 nt, Human
agcagugcuguccuuuuguucucuccauugga

SEQ ID NO: 49943 - RNA, 32 nt, Human
agcagugcuucccuccuccacccuccacucau

SEQ ID NO: 49944 - RNA, 32 nt, Human
agcagugcuuuaucucauguccuugaauauag

SEQ ID NO: 49945 - RNA, 32 nt, Human
agcaguggacuacagcucacuaccacacaggc

SEQ ID NO: 49946 - RNA, 32 nt, Human
agcaguggaggccugagggcuugagggaggcu

SEQ ID NO: 49947 - RNA, 32 nt, Human
agcaguggaguugagugaggaggcagaugucc

SEQ ID NO: 49948 - RNA, 32 nt, Human
agcaguggaguuuaaaaauugucucuuuucaa

SEQ ID NO: 49949 - RNA, 32 nt, Human
agcaguggcaaccccuuuuggccagggccagg

SEQ ID NO: 49950 - RNA, 23 nt, Human
agcaguggccacaaggcugcuuu

SEQ ID NO: 49951 - RNA, 25 nt, Human
agcaguggccaggccacccaaagga

SEQ ID NO: 49952 - RNA, 32 nt, Human
agcaguggcccaggaaggaggucaagcaucuu

SEQ ID NO: 49953 - RNA, 32 nt, Human
agcaguggcgccuccuagcucaggacaguggc

SEQ ID NO: 49954 - RNA, 32 nt, Human
agcaguggcuaacaccuguaaucccaacaguu

SEQ ID NO: 49955 - RNA, 32 nt, Human
agcaguggcucacaccuauagucccagcacuc

SEQ ID NO: 49956 - RNA, 32 nt, Human
agcaguggcucacaccuguaaucccaacacuu

SEQ ID NO: 49957 - RNA, 32 nt, Human
agcaguggcucacgccuguaaucccagaacuu

SEQ ID NO: 49958 - RNA, 32 nt, Human
agcaguggcucacgccuguaaucccagcacuu

SEQ ID NO: 49959 - RNA, 32 nt, Human
agcaguggcucaugcccguaaucccagcacuu

SEQ ID NO: 49960 - RNA, 32 nt, Human
agcaguggcucaugccuguaaucccagcacuu

SEQ ID NO: 49961 - RNA, 32 nt, Human
agcaguggcuggggcuuuguuuuuaaauuuug

SEQ ID NO: 49962 - RNA, 32 nt, Human
agcagugggagaccgaggugggcagaucacuu

SEQ ID NO: 49963 - RNA, 32 nt, Human
agcagugggaggagcugucgagucagguacgu

SEQ ID NO: 49964 - RNA, 32 nt, Human
agcagugggaggaggagaaggaggaggaggag

SEQ ID NO: 49965 - RNA, 32 nt, Human
agcagugggcagugagcccccgagaggauaaa

SEQ ID NO: 49966 - RNA, 32 nt, Human
agcagugggcugaagggcuccucaagugcugc

SEQ ID NO: 49967 - RNA, 32 nt, Human
agcagugggugaggccgagggacugcccagag

SEQ ID NO: 49968 - RNA, 32 nt, Human
agcagugguggagaguccccagcugggagacc

SEQ ID NO: 49969 - RNA, 32 nt, Human
agcagugguuccuguuucuagguuguggaucu

SEQ ID NO: 49970 - RNA, 32 nt, Human
agcaguguacagugaagcggaggcagagcggc

SEQ ID NO: 49971 - RNA, 32 nt, Human
agcaguguagugagaagaaagccagacuuaag

SEQ ID NO: 49972 - RNA, 32 nt, Human
agcaguguccagugcaguaccuggaccggagc

SEQ ID NO: 49973 - RNA, 32 nt, Human
agcagugucucccacuccuugugaagucugag

SEQ ID NO: 49974 - RNA, 32 nt, Human
agcagugugaccuugggcaaggccuuccuaag

SEQ ID NO: 49975 - RNA, 32 nt, Human
agcagugugcagagaguguggugggccuggga

SEQ ID NO: 49976 - RNA, 32 nt, Human
agcagugugcuccuagcauacaugcauauagg

SEQ ID NO: 49977 - RNA, 32 nt, Human
agcagugugggaggcaguggggcagguagagc

SEQ ID NO: 49978 - RNA, 32 nt, Human
agcagugugggugggggcgcucuggguggagg

SEQ ID NO: 49979 - RNA, 32 nt, Human
agcaguguggucaccuggauacucgaguauag

SEQ ID NO: 49980 - RNA, 32 nt, Human
agcagugugguguuucaggcagagcucuggcc

SEQ ID NO: 49981 - RNA, 32 nt, Human
agcaguguuaccccuggcugggagucaguauu

SEQ ID NO: 49982 - RNA, 32 nt, Human
agcaguguuccagugugugaacaaaucuuuug

SEQ ID NO: 49983 - RNA, 32 nt, Human
agcaguguuccuggccaucuuugcuacuuucc

SEQ ID NO: 49984 - RNA, 31 nt, Human
agcaguguugcucagcuccuaccucugugcc

SEQ ID NO: 49985 - RNA, 20 nt, Human
agcaguuaacccagaggcca

SEQ ID NO: 49986 - RNA, 32 nt, Human
agcaguuagaaaagcagacucccugugguggc

SEQ ID NO: 49987 - RNA, 25 nt, Human
agcaguuagaaucuaccaggcacag

SEQ ID NO: 49988 - RNA, 32 nt, Human
agcaguucaaagagcagagagguggggccaga

SEQ ID NO: 49989 - RNA, 32 nt, Human
agcaguucaagaccagccugaccaacauggug

SEQ ID NO: 49990 - RNA, 32 nt, Human
agcaguucaagaccagccuggccagcauagug

SEQ ID NO: 49991 - RNA, 32 nt, Human
agcaguucaagaccagccugggcaacacaggg

SEQ ID NO: 49992 - RNA, 32 nt, Human
agcaguucaguuacagcauucucuccauaccc

SEQ ID NO: 49993 - RNA, 22 nt, Human
agcaguucaugauacagccuca

SEQ ID NO: 49994 - RNA, 32 nt, Human
agcaguucauugucaaguuggacuuuaaguga

SEQ ID NO: 49995 - RNA, 20 nt, Human
agcaguuccaauuccucuca

SEQ ID NO: 49996 - RNA, 32 nt, Human
agcaguuccacagcacagccuggucaguccug

SEQ ID NO: 49997 - RNA, 32 nt, Human
agcaguucccaauccuagguauuuaaguggac

SEQ ID NO: 49998 - RNA, 24 nt, Human
agcaguuccggcacggcagcccca

SEQ ID NO: 49999 - RNA, 32 nt, Human
agcaguuccgggagcggauggagaagcagcag

SEQ ID NO: 50000 - RNA, 22 nt, Human
agcaguuccucauucacaucaa

SEQ ID NO: 50001 - RNA, 32 nt, Human
agcaguucgagaccagccugaccaacauggug

SEQ ID NO: 50002 - RNA, 32 nt, Human
agcaguucgagaccagccuggacaacaucgug

SEQ ID NO: 50003 - RNA, 32 nt, Human
agcaguucgagaccagccuggacaacauugug

SEQ ID NO: 50004 - RNA, 32 nt, Human
agcaguucgagaccagccuggccaacauggca

SEQ ID NO: 50005 - RNA, 32 nt, Human
agcaguucgagaccagccuggccaacauggcg

SEQ ID NO: 50006 - RNA, 32 nt, Human
agcaguucgagaccagccugggcaacacagag

SEQ ID NO: 50007 - RNA, 32 nt, Human
agcaguucgagaccagccuggucaacauggug

SEQ ID NO: 50008 - RNA, 32 nt, Human
agcaguucugguuccuccuggccauccgccug

SEQ ID NO: 50009 - RNA, 32 nt, Human
agcaguucuuccccaucagccucccaaguagg

SEQ ID NO: 50010 - RNA, 32 nt, Human
agcaguugagccccgaaggagaucaggcagcc

SEQ ID NO: 50011 - RNA, 32 nt, Human
agcaguugccuguaaucucaacuacuugggag

SEQ ID NO: 50012 - RNA, 32 nt, Human
agcaguugcucccgcacuccaggccugugcua

SEQ ID NO: 50013 - RNA, 32 nt, Human
agcaguuggccacacuguguggagggcaccuc

SEQ ID NO: 50014 - RNA, 32 nt, Human
agcaguuuaguccauacuuugcacugacauac

SEQ ID NO: 50015 - RNA, 31 nt, Human
agcaguuucaggacuucauucauuagugguu

SEQ ID NO: 50016 - RNA, 32 nt, Human
agcaguuucaggacuucauucauuagugguua

SEQ ID NO: 50017 - RNA, 32 nt, Human
agcaguuuccaggaacaucaauguggggaacu

SEQ ID NO: 50018 - RNA, 16 nt, Human
agcaguuucugagcug

SEQ ID NO: 50019 - RNA, 32 nt, Human
agcaguuugagaccagccuggccaacaugaug

SEQ ID NO: 50020 - RNA, 32 nt, Human
agcaguuugagaccagccuggccaacaugccg

SEQ ID NO: 50021 - RNA, 32 nt, Human
agcaguuugagaccagccuggccaacaugcug

SEQ ID NO: 50022 - RNA, 32 nt, Human
agcaguuugagaccagccuggccaacauggca

SEQ ID NO: 50023 - RNA, 32 nt, Human
agcaguuugcuccccuccugaugcccucuggu

SEQ ID NO: 50024 - RNA, 32 nt, Human
agcaguuuuacaucacaugcagccaagaucag

SEQ ID NO: 50025 - RNA, 32 nt, Human
agcaguuuucuggaacucuccaccuccgucuc

SEQ ID NO: 50026 - RNA, 32 nt, Human
agcaguuuugagaagagagggacauaggcuag

SEQ ID NO: 50027 - RNA, 32 nt, Human
agcaguuuuuaaaauaguguaggauaauauaa

SEQ ID NO: 50028 - RNA, 32 nt, Human
agcauaaaauucuuaaaauauauuucagauau

SEQ ID NO: 50029 - RNA, 32 nt, Human
agcauaaagcaaggagguuugaaggaaguucg

SEQ ID NO: 50030 - RNA, 32 nt, Human
agcauaaagcaggggucguggacuccaaggcu

SEQ ID NO: 50031 - RNA, 32 nt, Human
agcauaaauuuagaaaaaucacuucugaccuu

SEQ ID NO: 50032 - RNA, 32 nt, Human
agcauaacuguacuaaauccuuuuaccagauc

SEQ ID NO: 50033 - RNA, 32 nt, Human
agcauaacuguacuaaauccuuuuuccauauc

SEQ ID NO: 50034 - RNA, 32 nt, Human
agcauaacuguacuaaaucuuuuuccagauca

SEQ ID NO: 50035 - RNA, 21 nt, Human
agcauaagaagugguugcuuc

SEQ ID NO: 50036 - RNA, 32 nt, Human
agcauaaucugaaaacaucuagcccaaaggua

SEQ ID NO: 50037 - RNA, 32 nt, Human
agcauaauuccaagguggccaagcagauguca

SEQ ID NO: 50038 - RNA, 31 nt, Human
agcauaauuucugaucuacauuuaaauacua

SEQ ID NO: 50039 - RNA, 32 nt, Human
agcauacacacccauguuccucacucaggaca

SEQ ID NO: 50040 - RNA, 32 nt, Human
agcauacacacguuuuucuagguacagcuccc

SEQ ID NO: 50041 - RNA, 32 nt, Human
agcauacacagaugaaggugggaaggaugguc

SEQ ID NO: 50042 - RNA, 32 nt, Human
agcauaccgugcaacaguucugggaaaugcca

SEQ ID NO: 50043 - RNA, 32 nt, Human
agcauacuauaauuuuaauuguccucacuuuu

SEQ ID NO: 50044 - RNA, 32 nt, Human
agcauacugucacgccuguaaucccaguacuu

SEQ ID NO: 50045 - RNA, 32 nt, Human
agcauacuuggccucccccaccucccugcccu

SEQ ID NO: 50046 - RNA, 32 nt, Human
agcauacuuuaaaggccacuguugcaaagucu

SEQ ID NO: 50047 - RNA, 20 nt, Human
agcauagaacugauacuuga

SEQ ID NO: 50048 - RNA, 32 nt, Human
agcauagaagcggacaccagaggcuccuggac

SEQ ID NO: 50049 - RNA, 32 nt, Human
agcauagaaguuaagaaugaagaucagauuca

SEQ ID NO: 50050 - RNA, 32 nt, Human
agcauagagcuuucuccgcagcauccugccug

SEQ ID NO: 50051 - RNA, 19 nt, Human
agcauagaucuugacuuga

SEQ ID NO: 50052 - RNA, 32 nt, Human
agcauagauucacaauaggagcaacuuucaaa

SEQ ID NO: 50053 - RNA, 32 nt, Human
agcauagauucuauuuacaaaauguuuguuua

SEQ ID NO: 50054 - RNA, 21 nt, Human
agcauagauugucaaauguaa

SEQ ID NO: 50055 - RNA, 32 nt, Human
agcauagcauacugccuucugacagacugggu

SEQ ID NO: 50056 - RNA, 32 nt, Human
agcauagccaagggacguugaccuggacugaa

SEQ ID NO: 50057 - RNA, 32 nt, Human
agcauagccacacccauucauuuaugguauug

SEQ ID NO: 50058 - RNA, 32 nt, Human
agcauagccagcucccccuccuucaccuagug

SEQ ID NO: 50059 - RNA, 32 nt, Human
agcauaggcugcauaugagucuuuaacaucuu

SEQ ID NO: 50060 - RNA, 32 nt, Human
agcauagggaccucagggauggggaagaaacc

SEQ ID NO: 50061 - RNA, 32 nt, Human
agcauaguaagugcuuucuuucuuuuuaagcu

SEQ ID NO: 50062 - RNA, 32 nt, Human
agcauagucuagaggcuggaggggcucuguga

SEQ ID NO: 50063 - RNA, 32 nt, Human
agcauagucucugcaagauuuuguucuuugaa

SEQ ID NO: 50064 - RNA, 32 nt, Human
agcauaguguauaagugaguacacucuaauua

SEQ ID NO: 50065 - RNA, 32 nt, Human
agcauaguuucuuaagacagaggccauuuggu

SEQ ID NO: 50066 - RNA, 32 nt, Human
agcauauaaaaaggcauguuuggaaagcaaca

SEQ ID NO: 50067 - RNA, 32 nt, Human
agcauauaucggagccacacauggacaccucu

SEQ ID NO: 50068 - RNA, 32 nt, Human
agcauaucuaauaucuagguuacuugagagac

SEQ ID NO: 50069 - RNA, 32 nt, Human
agcauaugcauacacacauauauacauguaua

SEQ ID NO: 50070 - RNA, 21 nt, Human
agcauaugccaaugccaaaaa

SEQ ID NO: 50071 - RNA, 32 nt, Human
agcauaugccuguggucccagcuacugaggag

SEQ ID NO: 50072 - RNA, 32 nt, Human
agcauauggaaagaugggaacagaauuucagu

SEQ ID NO: 50073 - RNA, 21 nt, Human
agcauauguaaccucuccaaa

SEQ ID NO: 50074 - RNA, 32 nt, Human
agcauauguguauguaugcguauguauguaug

SEQ ID NO: 50075 - RNA, 32 nt, Human
agcauauuccccucagucuucuaggagggcag

SEQ ID NO: 50076 - RNA, 32 nt, Human
agcauauucucuaaaugagauauuguguggcu

SEQ ID NO: 50077 - RNA, 23 nt, Human
agcauauugcaacacauguucuu

SEQ ID NO: 50078 - RNA, 32 nt, Human
agcauauugugguaaauuuucucccaaaacuu

SEQ ID NO: 50079 - RNA, 32 nt, Human
agcauauuuacaccaauuauuuuauguaaucc

SEQ ID NO: 50080 - RNA, 32 nt, Human
agcauauuucccaaucauugucuucauuccac

SEQ ID NO: 50081 - RNA, 32 nt, Human
agcaucaaaaugucaagauucaucagcucuuc

SEQ ID NO: 50082 - RNA, 32 nt, Human
agcaucaacaggcuguccagaucaauuggcac

SEQ ID NO: 50083 - RNA, 32 nt, Human
agcaucaagccuuggccucucggaggccucug

SEQ ID NO: 50084 - RNA, 32 nt, Human
agcaucaaggccagaggaggccacaugcugac

SEQ ID NO: 50085 - RNA, 23 nt, Human
agcaucaaugcacacaccugcug

SEQ ID NO: 50086 - RNA, 32 nt, Human
agcaucacauaaaaaugaugggacaauaaauu

SEQ ID NO: 50087 - RNA, 32 nt, Human
agcaucacaucaacuaaugaccaacuguaaug

SEQ ID NO: 50088 - RNA, 32 nt, Human
agcaucaccacugugguguguugccccuugag

SEQ ID NO: 50089 - RNA, 31 nt, Human
agcaucaccagcuagaaaguggcagagccag

SEQ ID NO: 50090 - RNA, 32 nt, Human
agcaucaccucaggccaggugcaguggcucac

SEQ ID NO: 50091 - RNA, 32 nt, Human
agcaucaccucuaucugccucaucucacacug

SEQ ID NO: 50092 - RNA, 32 nt, Human
agcaucagaggagcacaugaaccgaaugcuuc

SEQ ID NO: 50093 - RNA, 32 nt, Human
agcaucagagggcugauggauuccaaaccagg

SEQ ID NO: 50094 - RNA, 32 nt, Human
agcaucagauggggaaaggcaguucuccucua

SEQ ID NO: 50095 - RNA, 32 nt, Human
agcaucagcaacccuuuccagguagaaauucc

SEQ ID NO: 50096 - RNA, 21 nt, Human
agcaucagcaugguuuagggg

SEQ ID NO: 50097 - RNA, 32 nt, Human
agcaucagcugcgucuuccauguggccugggg

SEQ ID NO: 50098 - RNA, 32 nt, Human
agcaucagcuucagccccagacccugcaguuu

SEQ ID NO: 50099 - RNA, 32 nt, Human
agcaucaggaagggaaaggccugcaucuugug

SEQ ID NO: 50100 - RNA, 32 nt, Human
agcaucagggcugcucucugaggagcugcccc

SEQ ID NO: 50101 - RNA, 32 nt, Human
agcaucaguccagucugugguguccuggcacu

SEQ ID NO: 50102 - RNA, 32 nt, Human
agcaucagucuacaccaacaccaugcgggguu

SEQ ID NO: 50103 - RNA, 32 nt, Human
agcaucauaagccacaggguggggcagccaag

SEQ ID NO: 50104 - RNA, 32 nt, Human
agcaucauaagggaauguagccuuccaacaga

SEQ ID NO: 50105 - RNA, 32 nt, Human
agcaucauccuuuccccuccccucucuuccuc

SEQ ID NO: 50106 - RNA, 21 nt, Human
agcaucauggagacccgcagg

SEQ ID NO: 50107 - RNA, 32 nt, Human
agcaucauuaagaucaguuuuaagggguauag

SEQ ID NO: 50108 - RNA, 26 nt, Human
agcaucauuacaauacaguauuucuu

SEQ ID NO: 50109 - RNA, 32 nt, Human
agcauccacaucaacauucaccagcuagaaau

SEQ ID NO: 50110 - RNA, 32 nt, Human
agcauccagcaagucaaugucaccgacaguga

SEQ ID NO: 50111 - RNA, 32 nt, Human
agcauccaggaaccccagagcaggcaguggau

SEQ ID NO: 50112 - RNA, 32 nt, Human
agcauccaggacaacaauguggaccugauucu

SEQ ID NO: 50113 - RNA, 32 nt, Human
agcauccaggcagguauuagugcccagugaug

SEQ ID NO: 50114 - RNA, 19 nt, Human
agcauccaggcgguucuga

SEQ ID NO: 50115 - RNA, 23 nt, Human
agcauccaggcugaccucaagga

SEQ ID NO: 50116 - RNA, 32 nt, Human
agcauccaguggcugcuggcauacagccucau

SEQ ID NO: 50117 - RNA, 32 nt, Human
agcauccaucaucaucgucgucugucaaugau

SEQ ID NO: 50118 - RNA, 32 nt, Human
agcauccauguucacuuauggcugguuuugcu

SEQ ID NO: 50119 - RNA, 32 nt, Human
agcauccauucauauauucauucagucagcua

SEQ ID NO: 50120 - RNA, 32 nt, Human
agcauccauuuugccaauuuuaaagacauucu

SEQ ID NO: 50121 - RNA, 32 nt, Human
agcaucccaaagugcugggauuacaggcauga

SEQ ID NO: 50122 - RNA, 32 nt, Human
agcaucccaaaguguugggauuacagccguga

SEQ ID NO: 50123 - RNA, 32 nt, Human
agcaucccaagacuggaccugggagacccuga

SEQ ID NO: 50124 - RNA, 32 nt, Human
agcaucccaaguagcugggauaacaggugcca

SEQ ID NO: 50125 - RNA, 32 nt, Human
agcaucccaaguagcugggauuacaggcaccc

SEQ ID NO: 50126 - RNA, 32 nt, Human
agcaucccaauuuagaaaacagaggaguuugu

SEQ ID NO: 50127 - RNA, 32 nt, Human
agcaucccagagagacaguaggaaauuucucc

SEQ ID NO: 50128 - RNA, 32 nt, Human
agcaucccagggcuuugugcagucucuaauuc

SEQ ID NO: 50129 - RNA, 23 nt, Human
agcauccccaccccaccccuccu

SEQ ID NO: 50130 - RNA, 32 nt, Human
agcauccccaccccucuccucugcccacccga

SEQ ID NO: 50131 - RNA, 32 nt, Human
agcauccccagcugccccacaucuugccucug

SEQ ID NO: 50132 - RNA, 32 nt, Human
agcaucccccagcugcucccaucuugcuggaa

SEQ ID NO: 50133 - RNA, 32 nt, Human
agcauccccuccacuccagaguuggguggcac

SEQ ID NO: 50134 - RNA, 32 nt, Human
agcauccccuccacuccagaguugggugguac

SEQ ID NO: 50135 - RNA, 17 nt, Human
agcauccccuccaggga

SEQ ID NO: 50136 - RNA, 32 nt, Human
agcauccccucggggcagucagcccaacugag

SEQ ID NO: 50137 - RNA, 32 nt, Human
agcccuuccuccucugggggccugggcaucag

SEQ ID NO: 50138 - RNA, 24 nt, Human
agcccuuccugaucccccagcuga

SEQ ID NO: 50139 - RNA, 32 nt, Human
agcccuuccugcagggaaccucaggcuucaga

SEQ ID NO: 50140 - RNA, 18 nt, Human
agcccuuccuggcuccca

SEQ ID NO: 50141 - RNA, 32 nt, Human
agcccuucucccacugugcuggcagaggcacu

SEQ ID NO: 50142 - RNA, 32 nt, Human
agcccuucuccuccaccaguuccccagagcag

SEQ ID NO: 50143 - RNA, 32 nt, Human
agcccuucuccuccccuggcucuuagggcacc

SEQ ID NO: 50144 - RNA, 32 nt, Human
agcccuucugcccuuaaaugcuuccuugggca

SEQ ID NO: 50145 - RNA, 32 nt, Human
agcccuucugccuuuugcugguguuucuggaa

SEQ ID NO: 50146 - RNA, 32 nt, Human
agcccuucuucagacacggcuacuucugcuuc

SEQ ID NO: 50147 - RNA, 32 nt, Human
agcccuucuuucuacuuugucaaacaguucuu

SEQ ID NO: 50148 - RNA, 32 nt, Human
agcccuugaacuugaguaaauaacaacucccu

SEQ ID NO: 50149 - RNA, 32 nt, Human
agcccuugaaucugagaaucccccaguuaaga

SEQ ID NO: 50150 - RNA, 18 nt, Human
agcccuugagcccccaga

SEQ ID NO: 50151 - RNA, 32 nt, Human
agcccuugaggcagaggugccgagugacugcc

SEQ ID NO: 50152 - RNA, 32 nt, Human
agcccuugcauccagggcucucaagaggcaaa

SEQ ID NO: 50153 - RNA, 32 nt, Human
agcccuugccuccgagcucuggcuucaagggg

SEQ ID NO: 50154 - RNA, 32 nt, Human
agcccuuggcucugcuggguuuccugacugua

SEQ ID NO: 50155 - RNA, 20 nt, Human
agcccuugggacuccaggag

SEQ ID NO: 50156 - RNA, 32 nt, Human
agcccuuggguggggccaggaggaggugaugg

SEQ ID NO: 50157 - RNA, 32 nt, Human
agcccuugguagagcuugaaccaccuucuaua

SEQ ID NO: 50158 - RNA, 32 nt, Human
agcccuugugugugcaggggugcacauguuug

SEQ ID NO: 50159 - RNA, 32 nt, Human
agcccuuguucacgagaagcaagaagcccccu

SEQ ID NO: 50160 - RNA, 32 nt, Human
agcccuuucaaccaugagauagugggauuuaa

SEQ ID NO: 50161 - RNA, 32 nt, Human
agcccuuuccagcacuguuggucugaugaaca

SEQ ID NO: 50162 - RNA, 32 nt, Human
agcccuuucccaggcgguagcgggggcagugg

SEQ ID NO: 50163 - RNA, 32 nt, Human
agcccuuucucaggguuggacccccugagauc

SEQ ID NO: 50164 - RNA, 17 nt, Human
agcccuuucuccccaca

SEQ ID NO: 50165 - RNA, 32 nt, Human
agcccuuucuguagugggggaaagguggcugg

SEQ ID NO: 50166 - RNA, 32 nt, Human
agcccuuucuugccucuccagugcuauuuucc

SEQ ID NO: 50167 - RNA, 32 nt, Human
agcccuuugcccugucccugcugccugaggug

SEQ ID NO: 50168 - RNA, 32 nt, Human
agcccuuugccuguagagccagccuugguugg

SEQ ID NO: 50169 - RNA, 32 nt, Human
agcccuuugcuccccuggcgacugccuggaca

SEQ ID NO: 50170 - RNA, 22 nt, Human
agcccuuugggaggcugaggcg

SEQ ID NO: 50171 - RNA, 32 nt, Human
agcccuuugucagaugaguagguugcgaaaau

SEQ ID NO: 50172 - RNA, 32 nt, Human
agcccuuuguguguaauagcccccaggggugg

SEQ ID NO: 50173 - RNA, 32 nt, Human
agcccuuuuagauuuuggcacugugaaacccc

SEQ ID NO: 50174 - RNA, 32 nt, Human
agccgaaauuacagacgugugccaccaugcuu

SEQ ID NO: 50175 - RNA, 32 nt, Human
agccgaacuuugaguuacugugcaagauuuuu

SEQ ID NO: 50176 - RNA, 32 nt, Human
agccgaaggaguaaggugcugcaaugauguua

SEQ ID NO: 50177 - RNA, 32 nt, Human
agccgacacuccugaccucucuguucacccug

SEQ ID NO: 50178 - RNA, 21 nt, Human
agccgaccaagaucccucccu

SEQ ID NO: 50179 - RNA, 21 nt, Human
agccgacccccaugcccggca

SEQ ID NO: 50180 - RNA, 32 nt, Human
agccgaccuccaccuccuccuccuccuucucc

SEQ ID NO: 50181 - RNA, 32 nt, Human
agccgaccuugccuaccagcuccugggugucc

SEQ ID NO: 50182 - RNA, 32 nt, Human
agccgacgacgucuguggagugcauugugcac

SEQ ID NO: 50183 - RNA, 32 nt, Human
agccgacucacuugcaacuccaccucagcagu

SEQ ID NO: 50184 - RNA, 22 nt, Human
agccgacucgcagggccugcuc

SEQ ID NO: 50185 - RNA, 32 nt, Human
agccgacucugggugcggacugugggagcuga

SEQ ID NO: 50186 - RNA, 32 nt, Human
agccgacugcaugaaccaaaguucucaccuaa

SEQ ID NO: 50187 - RNA, 32 nt, Human
agccgagaaggaggaggaggagagaggaaaga

SEQ ID NO: 50188 - RNA, 32 nt, Human
agccgagacacugccaccuccacauagcucuc

SEQ ID NO: 50189 - RNA, 32 nt, Human
agccgagaccauaccacugcauuccagccugg

SEQ ID NO: 50190 - RNA, 22 nt, Human
agccgagaccccggggcucugc

SEQ ID NO: 50191 - RNA, 32 nt, Human
agccgagacugugcuccagccugggcgacaga

SEQ ID NO: 50192 - RNA, 32 nt, Human
agccgagagcaggagucggcucugaguucccu

SEQ ID NO: 50193 - RNA, 32 nt, Human
agccgagagccgggggcagacgggcggggguu

SEQ ID NO: 50194 - RNA, 32 nt, Human
agccgagaggaagggagggcagcucgggccga

SEQ ID NO: 50195 - RNA, 32 nt, Human
agccgagaggagcugggcugaaucuccaggcg

SEQ ID NO: 50196 - RNA, 32 nt, Human
agccgagaucacaccauugcacugcagccugg

SEQ ID NO: 50197 - RNA, 32 nt, Human
agccgagaucacgccaucacacugcagccuag

SEQ ID NO: 50198 - RNA, 32 nt, Human
agccgagaucauaccacugcacuccagccugg

SEQ ID NO: 50199 - RNA, 32 nt, Human
agccgagaucauaccauugcacuccagccuag

SEQ ID NO: 50200 - RNA, 32 nt, Human
agccgagaucauaccauugcacuccagccugg

SEQ ID NO: 50201 - RNA, 32 nt, Human
agccgagaucgcgccaccacacuccagccuga

SEQ ID NO: 50202 - RNA, 23 nt, Human
agccgagaucgcgcuacugcacu

SEQ ID NO: 50203 - RNA, 32 nt, Human
agccgagauuacuccagccuaggcaacagagc

SEQ ID NO: 50204 - RNA, 32 nt, Human
agccgagauuaugucacuccagccugggcaac

SEQ ID NO: 50205 - RNA, 23 nt, Human
agccgagauugcaccacugcacu

SEQ ID NO: 50206 - RNA, 32 nt, Human
agccgagauugcgcuacugaacuccagccugg

SEQ ID NO: 50207 - RNA, 32 nt, Human
agccgagauugugcacuccagccuggguaaca

SEQ ID NO: 50208 - RNA, 32 nt, Human
agccgagauugugccacugaacuccaaccugc

SEQ ID NO: 50209 - RNA, 32 nt, Human
agccgagcagaggggccgccuccgcccgcacc

SEQ ID NO: 50210 - RNA, 32 nt, Human
agccgagcagccuggcaacggcgguggcgccc

SEQ ID NO: 50211 - RNA, 32 nt, Human
agccgagcgcagggggcggggaagggaccugc

SEQ ID NO: 50212 - RNA, 32 nt, Human
agccgaggaaggggagaaagccacaaccuuca

SEQ ID NO: 50213 - RNA, 32 nt, Human
agccgaggaccaucucugccacccuggcaccu

SEQ ID NO: 50214 - RNA, 23 nt, Human
agccgaggagcccggagccccgc

SEQ ID NO: 50215 - RNA, 32 nt, Human
agccgaggaguuugagucugcagugagcuaug

SEQ ID NO: 50216 - RNA, 32 nt, Human
agccgaggcauuccagccugggcaacagagug

SEQ ID NO: 50217 - RNA, 19 nt, Human
agccgaggccagcccugcc

SEQ ID NO: 50218 - RNA, 21 nt, Human
agccgaggcccggccccgccg

SEQ ID NO: 50219 - RNA, 32 nt, Human
agccgaggccucggaagcagguuuuucccaga

SEQ ID NO: 50220 - RNA, 32 nt, Human
agccgaggcuucuuccucugaacuuuugggcc

SEQ ID NO: 50221 - RNA, 24 nt, Human
agccgagggaacaagccccaaccg

SEQ ID NO: 50222 - RNA, 32 nt, Human
agccgagggcaagaagagaacaaggacccucu

SEQ ID NO: 50223 - RNA, 23 nt, Human
agccgaggggcucuggagugccu

SEQ ID NO: 50224 - RNA, 32 nt, Human
agccgaggggguggggguugcagugagccaag

SEQ ID NO: 50225 - RNA, 32 nt, Human
agccgagguggcgcggcggcaccagcuccagg

SEQ ID NO: 50226 - RNA, 32 nt, Human
agccgagucacaggacccggauguugucaguu

SEQ ID NO: 50227 - RNA, 32 nt, Human
agccgagugcucauggaguuuccucaaagacu

SEQ ID NO: 50228 - RNA, 32 nt, Human
agccgagugugcuggggucuccgaagaggguc

SEQ ID NO: 50229 - RNA, 32 nt, Human
agccgagugugggaacaguccagcccuggcau

SEQ ID NO: 50230 - RNA, 21 nt, Human
agccgaucgugccacugcacu

SEQ ID NO: 50231 - RNA, 32 nt, Human
agccgaucucuaggcccuucuugcacugccac

SEQ ID NO: 50232 - RNA, 32 nt, Human
agccgauggagcgugguguagcagaacagcuc

SEQ ID NO: 50233 - RNA, 30 nt, Human
agccgauggcaucuccgggcucuggcuuuu

SEQ ID NO: 50234 - RNA, 32 nt, Human
agccgaugggcccuggaggcagcccauuaaag

SEQ ID NO: 50235 - RNA, 32 nt, Human
agccgauggggaggggauggagaaacaagaca

SEQ ID NO: 50236 - RNA, 30 nt, Human
agccgauggggagggggaggaggaugcuaa

SEQ ID NO: 50237 - RNA, 32 nt, Human
agccgauggggcccugagcaggacgugccucu

SEQ ID NO: 50238 - RNA, 32 nt, Human
agccgauucauguacugaugccaaucagcuag

SEQ ID NO: 50239 - RNA, 32 nt, Human
agccgauuugugcugcucucagcagccaccgg

SEQ ID NO: 50240 - RNA, 32 nt, Human
agccgauuuuguguuaaaauguugacaacagc

SEQ ID NO: 50241 - RNA, 32 nt, Human
agccgcaauacugaugaagcugagaagcagcc

SEQ ID NO: 50242 - RNA, 22 nt, Human
agccgcacagcccuccccuccu

SEQ ID NO: 50243 - RNA, 32 nt, Human
agccgcacagcccuccccuccugcgcuggaaa

SEQ ID NO: 50244 - RNA, 32 nt, Human
agccgcacagucggaggaagggccggagcgag

SEQ ID NO: 50245 - RNA, 32 nt, Human
agccgcacaugcagcacacaggucugcagagu

SEQ ID NO: 50246 - RNA, 32 nt, Human
agccgcaccccuccacccccacccugcccacg

SEQ ID NO: 50247 - RNA, 32 nt, Human
agccgcacccgagaggagguguggguguuccg

SEQ ID NO: 50248 - RNA, 32 nt, Human
agccgcaccuggagaagcugacccugggcauc

SEQ ID NO: 50249 - RNA, 32 nt, Human
agccgcacuguuuuacaagugaagaguuaugc

SEQ ID NO: 50250 - RNA, 22 nt, Human
agccgcagaagggaguccacuc

SEQ ID NO: 50251 - RNA, 32 nt, Human
agccgcagacugaaggcugcacugugagccuc

SEQ ID NO: 50252 - RNA, 32 nt, Human
agccgcagagggccugggcacgccauccgucc

SEQ ID NO: 50253 - RNA, 32 nt, Human
agccgcagccaaguagagggggcugggccgcg

SEQ ID NO: 50254 - RNA, 21 nt, Human
agccgcagccaccagccgccc

SEQ ID NO: 50255 - RNA, 22 nt, Human
agccgcagccagccccucccgc

SEQ ID NO: 50256 - RNA, 24 nt, Human
agccgcagccaggcgaggccacuc

SEQ ID NO: 50257 - RNA, 32 nt, Human
agccgcagccccugugcacaccuaacacaggg

SEQ ID NO: 50258 - RNA, 20 nt, Human
agccgcagcccgccgcgcgc

SEQ ID NO: 50259 - RNA, 21 nt, Human
agccgcagccgccgcccccuc

SEQ ID NO: 50260 - RNA, 32 nt, Human
agccgcagccuccucgugauccucccuagcau

SEQ ID NO: 50261 - RNA, 32 nt, Human
agccgcagccuucuggaagcuccaggcggucu

SEQ ID NO: 50262 - RNA, 21 nt, Human
agccgcagcgcagaggcccgc

SEQ ID NO: 50263 - RNA, 32 nt, Human
agccgcagcugcaggaguccugcccgcccaga

SEQ ID NO: 50264 - RNA, 32 nt, Human
agccgcaggaggaaggagguugugcagggucu

SEQ ID NO: 50265 - RNA, 32 nt, Human
agccgcaggaggaggaggaggucgucgggggc

SEQ ID NO: 50266 - RNA, 32 nt, Human
agccgcagggcugagaccacguccaugcuggc

SEQ ID NO: 50267 - RNA, 32 nt, Human
agccgccaacagcagcgcuguuagugagcuaa

SEQ ID NO: 50268 - RNA, 20 nt, Human
agccgccaagugauuuucuc

SEQ ID NO: 50269 - RNA, 22 nt, Human
agccgccacacccugggccugg

SEQ ID NO: 50270 - RNA, 21 nt, Human
agccgccaccgccgcugccgc

SEQ ID NO: 50271 - RNA, 31 nt, Human
agccgccagcucucuggguauguuccuugca

SEQ ID NO: 50272 - RNA, 32 nt, Human
agccgccaggagcguugcuucucaaccuagga

SEQ ID NO: 50273 - RNA, 22 nt, Human
agccgccaucacuucaggccgc

SEQ ID NO: 50274 - RNA, 32 nt, Human
agccgcccaaaguguugggauuacaggcauga

SEQ ID NO: 50275 - RNA, 32 nt, Human
agccgcccaaguaucugggaccacaggcgugc

SEQ ID NO: 50276 - RNA, 32 nt, Human
agccgcccaccagguugccaggaggaggcggg

SEQ ID NO: 50277 - RNA, 32 nt, Human
agccgcccacggucuguucucagauuccuaau

SEQ ID NO: 50278 - RNA, 32 nt, Human
agccgcccaggccuuuagggagggaggguuuc

SEQ ID NO: 50279 - RNA, 32 nt, Human
agccgcccauugaucguguccugugcugaaga

SEQ ID NO: 50280 - RNA, 32 nt, Human
agccgccccaucugccccacagucuccggccu

SEQ ID NO: 50281 - RNA, 32 nt, Human
agccgcccccaccccauaccuugaucuaccau

SEQ ID NO: 50282 - RNA, 32 nt, Human
agccgccccucuccuccugggcugcagagcca

SEQ ID NO: 50283 - RNA, 32 nt, Human
agccgcccgccaccccagaggggugccagaug

SEQ ID NO: 50284 - RNA, 32 nt, Human
agccgcccgcccaccugggccugggccccggu

SEQ ID NO: 50285 - RNA, 32 nt, Human
agccgcccgcugaggucagaaggaggcgucug

SEQ ID NO: 50286 - RNA, 22 nt, Human
agccgcccgugccuccaggggc

SEQ ID NO: 50287 - RNA, 31 nt, Human
agccgcccugagagagaauagagcugccacu

SEQ ID NO: 50288 - RNA, 32 nt, Human
agccgccgagacugcagggagccuggccccgg

SEQ ID NO: 50289 - RNA, 32 nt, Human
agccgccgccgcuggccagggugcuggacaag

SEQ ID NO: 50290 - RNA, 23 nt, Human
agccgccgcgccgagcauggcca

SEQ ID NO: 50291 - RNA, 32 nt, Human
agccgccgcgggccugcugagcuccggagcgc

SEQ ID NO: 50292 - RNA, 32 nt, Human
agccgccggccuccggccuccugggccccucc

SEQ ID NO: 50293 - RNA, 32 nt, Human
agccgccggcugccccucgcucccaggcgcca

SEQ ID NO: 50294 - RNA, 23 nt, Human
agccgccgugaugagcacagcca

SEQ ID NO: 50295 - RNA, 22 nt, Human
agccgccgugccggggccgcca

SEQ ID NO: 50296 - RNA, 24 nt, Human
agccgccguggaguaacacagcca

SEQ ID NO: 50297 - RNA, 32 nt, Human
agccgccucacaggucggcggacgggccaggc

SEQ ID NO: 50298 - RNA, 32 nt, Human
agccgccuccggaaugcacaggcgagucccug

SEQ ID NO: 50299 - RNA, 20 nt, Human
agccgccucgcuccucuuca

SEQ ID NO: 50300 - RNA, 32 nt, Human
agccgccucggggaugagaggggacucguggg

SEQ ID NO: 50301 - RNA, 32 nt, Human
agccgccugaguagcugcacuauaggcaccac

SEQ ID NO: 50302 - RNA, 32 nt, Human
agccgccugaguagcugggaccacaguuucag

SEQ ID NO: 50303 - RNA, 32 nt, Human
agccgccugcagagccggaagccacccaaccu

SEQ ID NO: 50304 - RNA, 32 nt, Human
agccgccugcagcggggcccuccugaggcccc

SEQ ID NO: 50305 - RNA, 32 nt, Human
agccgccugccugcccugcucugcggcugugg

SEQ ID NO: 50306 - RNA, 20 nt, Human
agccgccuuucucggaacug

SEQ ID NO: 50307 - RNA, 32 nt, Human
agccgcgacuccuggcccugagcccgggcuua

SEQ ID NO: 50308 - RNA, 32 nt, Human
agccgcgagcccagggaugggagcacgcgggg

SEQ ID NO: 50309 - RNA, 32 nt, Human
agccgcgagguggacggggcgguggggccugc

SEQ ID NO: 50310 - RNA, 32 nt, Human
agccgcgauugcaccaccacacuccagccugc

SEQ ID NO: 50311 - RNA, 32 nt, Human
agccgcgccagcugccgggacacugcugccag

SEQ ID NO: 50312 - RNA, 32 nt, Human
agccgcgcucccaccacccacacccaccgcgc

SEQ ID NO: 50313 - RNA, 32 nt, Human
agccgcgcuugcagcgucugggagaaucuuuc

SEQ ID NO: 50314 - RNA, 32 nt, Human
agccgcggccgcggccacagucaugcucaguc

SEQ ID NO: 50315 - RNA, 19 nt, Human
agccgcggcggccgagggg

SEQ ID NO: 50316 - RNA, 32 nt, Human
agccgcggcucgcgccuuucuuggccuccggg

SEQ ID NO: 50317 - RNA, 32 nt, Human
agccgcgggaccagcgccugaggugccccgga

SEQ ID NO: 50318 - RNA, 32 nt, Human
agccgcgggccgcugggaacuccacucgggga

SEQ ID NO: 50319 - RNA, 32 nt, Human
agccgcgggucccugugaaccggcacauuccu

SEQ ID NO: 50320 - RNA, 32 nt, Human
agccgcgggucggaaggaaggacguggggagc

SEQ ID NO: 50321 - RNA, 32 nt, Human
agccgcuaguccccucccuccugggggagcag

SEQ ID NO: 50322 - RNA, 32 nt, Human
agccgcucauagaccccgccugccguccgguc

SEQ ID NO: 50323 - RNA, 22 nt, Human
agccgcucccggagcccggccg

SEQ ID NO: 50324 - RNA, 32 nt, Human
agccgcuccugguucuggagucuuaggagguu

SEQ ID NO: 50325 - RNA, 32 nt, Human
agccgcucuccucugacggguccugccucagu

SEQ ID NO: 50326 - RNA, 32 nt, Human
agccgcucugcccgcugaccugagugcuucuc

SEQ ID NO: 50327 - RNA, 31 nt, Human
agccgcucuguaaauccuuguugaaagaaug

SEQ ID NO: 50328 - RNA, 32 nt, Human
agccgcucugugcaucccaggcugcccuguua

SEQ ID NO: 50329 - RNA, 32 nt, Human
agccgcugagcccagaggucccgcuggccccu

SEQ ID NO: 50330 - RNA, 21 nt, Human
agccgcugcaaaaucaugcca

SEQ ID NO: 50331 - RNA, 32 nt, Human
agccgcugcagccaccaccgccaccauguccu

SEQ ID NO: 50332 - RNA, 32 nt, Human
agccgcugccaaggacagagccccagaauaac

SEQ ID NO: 50333 - RNA, 32 nt, Human
agccgcugcccaggggaguggcuguggggagg

SEQ ID NO: 50334 - RNA, 16 nt, Human
agccgcugcugagcug

SEQ ID NO: 50335 - RNA, 32 nt, Human
agccgcuggcucccagccuggcugaagcgggg

SEQ ID NO: 50336 - RNA, 32 nt, Human
agccgcugggcccagccugguuaucucuguuu

SEQ ID NO: 50337 - RNA, 32 nt, Human
agccgcuggugcaguggcauagcagguggcag

SEQ ID NO: 50338 - RNA, 32 nt, Human
agccgcugugggcuccuggggagauggagggg

SEQ ID NO: 50339 - RNA, 32 nt, Human
agccgcuguugccucccagccccugcuagcug

SEQ ID NO: 50340 - RNA, 32 nt, Human
agccgcuuccggauggcucuucccaagggagg

SEQ ID NO: 50341 - RNA, 32 nt, Human
agccgcuuccucuccacugaagagcuaugaga

SEQ ID NO: 50342 - RNA, 32 nt, Human
agccgcuucugcgaggaggacgaggcggcgcu

SEQ ID NO: 50343 - RNA, 32 nt, Human
agccgcuugccucugugagcuuucuaggccug

SEQ ID NO: 50344 - RNA, 32 nt, Human
agccggaaccacuccugguucagagaggcagc

SEQ ID NO: 50345 - RNA, 32 nt, Human
agccggaauaucuaaaugccucuccuuggcga

SEQ ID NO: 50346 - RNA, 32 nt, Human
agccggaccagccuugggcaacagcgugcgac

SEQ ID NO: 50347 - RNA, 21 nt, Human
agccggagccggagccccaca

SEQ ID NO: 50348 - RNA, 19 nt, Human
agccggagcggcgggcuga

SEQ ID NO: 50349 - RNA, 32 nt, Human
agccggagcuaguggaagacucugccucaccu

SEQ ID NO: 50350 - RNA, 32 nt, Human
agccggaggagcccucagacagcaguggcauc

SEQ ID NO: 50351 - RNA, 32 nt, Human
agccggaggaggaggaggaggaggaggcaaag

SEQ ID NO: 50352 - RNA, 32 nt, Human
agccggaggaucgcggagucccaaugaaacgg

SEQ ID NO: 50353 - RNA, 32 nt, Human
agccggaggcugcaggaugaugcgguucaugc

SEQ ID NO: 50354 - RNA, 17 nt, Human
agccggagucugaacug

SEQ ID NO: 50355 - RNA, 32 nt, Human
agccggagugaucucugcuuagggugguuuga

SEQ ID NO: 50356 - RNA, 32 nt, Human
agccggaguuggccugaacuuuaggaaaugag

SEQ ID NO: 50357 - RNA, 27 nt, Human
agccggauaccucuggcccccacccca

SEQ ID NO: 50358 - RNA, 32 nt, Human
agccggauccccucagccuuccagguccucaa

SEQ ID NO: 50359 - RNA, 32 nt, Human
agccggaucuccccaucuccccuacucacucu

SEQ ID NO: 50360 - RNA, 32 nt, Human
agccggcaagagaagaaaggcuaccaggacag

SEQ ID NO: 50361 - RNA, 32 nt, Human
agccggcacagggucugcucuuucucugccag

SEQ ID NO: 50362 - RNA, 32 nt, Human
agccggcagggaggggccgcggcggagccuua

SEQ ID NO: 50363 - RNA, 32 nt, Human
agccggcaguaagcccagaggucuccacccca

SEQ ID NO: 50364 - RNA, 23 nt, Human
agccggcauuccuccaggaccug

SEQ ID NO: 50365 - RNA, 32 nt, Human
agccggccaccagucccggcagagccacuagg

SEQ ID NO: 50366 - RNA, 32 nt, Human
agccggccagacucucaucuugaugucuugau

SEQ ID NO: 50367 - RNA, 32 nt, Human
agccggccauggaagguaauggccccgcugcu

SEQ ID NO: 50368 - RNA, 32 nt, Human
agccggcccagcgggagccaggucagggccug

SEQ ID NO: 50369 - RNA, 19 nt, Human
agccggcccaggcccacag

SEQ ID NO: 50370 - RNA, 32 nt, Human
agccggcccaggcucggugaggaggcaagguu

SEQ ID NO: 50371 - RNA, 32 nt, Human
agccggccccugcugcugcucgggcagcugca

SEQ ID NO: 50372 - RNA, 32 nt, Human
agccggcccugaggacaguccugcccauccac

SEQ ID NO: 50373 - RNA, 32 nt, Human
agccggcccuggaaccagguggaggggaggca

SEQ ID NO: 50374 - RNA, 32 nt, Human
agccggccggccagggcagcggcaggcgcggc

SEQ ID NO: 50375 - RNA, 32 nt, Human
agccggccuggggaccugggggagacacggag

SEQ ID NO: 50376 - RNA, 22 nt, Human
agccggcguggacccagggcug

SEQ ID NO: 50377 - RNA, 32 nt, Human
agccggcuagaggccagcgccgccgccgccgc

SEQ ID NO: 50378 - RNA, 32 nt, Human
agccggcucacugcacuacccccgcccccuuc

SEQ ID NO: 50379 - RNA, 32 nt, Human
agccggcucccagaccguuggcaccgauugcc

SEQ ID NO: 50380 - RNA, 32 nt, Human
agccggcucccgcuccuacccugcaaacagac

SEQ ID NO: 50381 - RNA, 32 nt, Human
agccggcugcagcugccacaucccuggguuua

SEQ ID NO: 50382 - RNA, 19 nt, Human
agccggcugcccugggcac

SEQ ID NO: 50383 - RNA, 32 nt, Human
agccgggaacagagaaguguggggaagagaua

SEQ ID NO: 50384 - RNA, 32 nt, Human
agccgggaacagcugcgauggggaagcucugg

SEQ ID NO: 50385 - RNA, 23 nt, Human
agccgggacgcggagccccgccg

SEQ ID NO: 50386 - RNA, 32 nt, Human
agccgggacuacaggcaugcaccaccaugccc

SEQ ID NO: 50387 - RNA, 32 nt, Human
agccgggacuacaggcgcccaccaccaugccc

SEQ ID NO: 50388 - RNA, 32 nt, Human
agccgggacuacaggugccugccaccacgccu

SEQ ID NO: 50389 - RNA, 32 nt, Human
agccgggagacacccaggugcccagcccagcc

SEQ ID NO: 50390 - RNA, 32 nt, Human
agccgggagcccagcgaagagagcgagcaagc

SEQ ID NO: 50391 - RNA, 32 nt, Human
agccgggagccgggggcagacgggcggggguu

SEQ ID NO: 50392 - RNA, 32 nt, Human
agccgggagcuagcggccgccgccauguccca

SEQ ID NO: 50393 - RNA, 32 nt, Human
agccgggagcuggagguucugcgggagcagcu

SEQ ID NO: 50394 - RNA, 32 nt, Human
agccgggaggcagagggaguagugaccgccuu

SEQ ID NO: 50395 - RNA, 32 nt, Human
agccgggaggggcgcugcggggaagccaccug

SEQ ID NO: 50396 - RNA, 32 nt, Human
agccgggagguggggguugcagugagccgaga

SEQ ID NO: 50397 - RNA, 32 nt, Human
agccgggaucacgccacugaacuccagccugg

SEQ ID NO: 50398 - RNA, 20 nt, Human
agccgggaugagcaggaggc

SEQ ID NO: 50399 - RNA, 24 nt, Human
agccgggaugugacccuccagggu

SEQ ID NO: 50400 - RNA, 32 nt, Human
agccgggcacuggggagggaaagggcaccagg

SEQ ID NO: 50401 - RNA, 32 nt, Human
agccgggcagaggcgccccucaccucccggac

SEQ ID NO: 50402 - RNA, 32 nt, Human
agccgggcagaggcgccccucaccucccggau

SEQ ID NO: 50403 - RNA, 32 nt, Human
agccgggcagaggcgccccucaccuccuggac

SEQ ID NO: 50404 - RNA, 32 nt, Human
agccgggcaggugggaggcacgggguugcgga

SEQ ID NO: 50405 - RNA, 32 nt, Human
agccgggcagguuuugagcugcagagacccgu

SEQ ID NO: 50406 - RNA, 32 nt, Human
agccgggcaugguggcacacaucucuaguccc

SEQ ID NO: 50407 - RNA, 21 nt, Human
agccgggccaacauggugaaa

SEQ ID NO: 50408 - RNA, 32 nt, Human
agccgggccaaggacagccaccguugccccgc

SEQ ID NO: 50409 - RNA, 32 nt, Human
agccgggccgggaagcagagccuggucgugag

SEQ ID NO: 50410 - RNA, 16 nt, Human
agccgggccugagcug

SEQ ID NO: 50411 - RNA, 32 nt, Human
agccgggccuggccagagaagcaacacacacg

SEQ ID NO: 50412 - RNA, 32 nt, Human
agccgggcgccucaccugucagccgcaccggc

SEQ ID NO: 50413 - RNA, 32 nt, Human
agccgggcgggcggaggggcgguugggacggc

SEQ ID NO: 50414 - RNA, 32 nt, Human
agccgggcggggacagacagagccggaagcgc

SEQ ID NO: 50415 - RNA, 32 nt, Human
agccgggcgggugggaggggccggagcaaaag

SEQ ID NO: 50416 - RNA, 32 nt, Human
agccgggcgucacgccuguaaucccagcacuu

SEQ ID NO: 50417 - RNA, 32 nt, Human
agccgggcguggcaccuguagucccagcuacu

SEQ ID NO: 50418 - RNA, 32 nt, Human
agccgggcgugguccuagcuacucgggagacu

SEQ ID NO: 50419 - RNA, 32 nt, Human
agccgggcgugguggcgggugccugggaggcu

SEQ ID NO: 50420 - RNA, 19 nt, Human
agccgggcucuuuauggug

SEQ ID NO: 50421 - RNA, 32 nt, Human
agccgggcuggcaggagcaggauggcggcggc

SEQ ID NO: 50422 - RNA, 32 nt, Human
agccgggcuuccuggguguuucaggcaaggaa

SEQ ID NO: 50423 - RNA, 20 nt, Human
agccgggcuuuccugagcug

SEQ ID NO: 50424 - RNA, 32 nt, Human
agccggggacacaccauccugcucgcaggugc

SEQ ID NO: 50425 - RNA, 23 nt, Human
agccggggacggagccgccgccg

SEQ ID NO: 50426 - RNA, 32 nt, Human
agccggggaggaggggguugcagugagccgag

SEQ ID NO: 50427 - RNA, 26 nt, Human
agccggggaggcagagguugcaguga

SEQ ID NO: 50428 - RNA, 32 nt, Human
agccggggaggcagagguugcagugagccgag

SEQ ID NO: 50429 - RNA, 32 nt, Human
agccggggagguggaggcugcagugaacugag

SEQ ID NO: 50430 - RNA, 32 nt, Human
agccggggcagacacccagcuggcuggguccu

SEQ ID NO: 50431 - RNA, 32 nt, Human
agccggggccuggguggcgggugggggccggg

SEQ ID NO: 50432 - RNA, 20 nt, Human
agccggggcucccccugccu

SEQ ID NO: 50433 - RNA, 32 nt, Human
agccgggggcagucccgaacucugugcuuggc

SEQ ID NO: 50434 - RNA, 32 nt, Human
agccgggggccgguggccagagcgagggcacc

SEQ ID NO: 50435 - RNA, 32 nt, Human
agccgggguccucggaucuggcccaggugagg

SEQ ID NO: 50436 - RNA, 21 nt, Human
agccggggugggaaccaggag

SEQ ID NO: 50437 - RNA, 32 nt, Human
agccggguccugcugcucacaagcccagagcu

SEQ ID NO: 50438 - RNA, 32 nt, Human
agccgggucugccucuucugggagggcagcag

SEQ ID NO: 50439 - RNA, 32 nt, Human
agccgggugacagcacuaaccagaccuccagc

SEQ ID NO: 50440 - RNA, 32 nt, Human
agccgggugcugcugcuccugcugcugcugcc

SEQ ID NO: 50441 - RNA, 32 nt, Human
agccggguuggaagugucucuccacagucacc

SEQ ID NO: 50442 - RNA, 32 nt, Human
agccgguagggagaggauaggagaagaggagg

SEQ ID NO: 50443 - RNA, 32 nt, Human
agccgguagggguggaaaggggacucagauga

SEQ ID NO: 50444 - RNA, 32 nt, Human
agccggucaucacccagccucugagagcaguu

SEQ ID NO: 50445 - RNA, 32 nt, Human
agccggucucaaacuccugagcucaagugauc

SEQ ID NO: 50446 - RNA, 32 nt, Human
agccggugcgcaucaccaugcgcggccuggcu

SEQ ID NO: 50447 - RNA, 32 nt, Human
agccggugcgcgaccucgcagugagcagggag

SEQ ID NO: 50448 - RNA, 32 nt, Human
agccgguggugaggaagcaugguggggucucc

SEQ ID NO: 50449 - RNA, 25 nt, Human
agccgguggugguggcacacaccua

SEQ ID NO: 50450 - RNA, 32 nt, Human
agccgguucccuccucuccaggcccccucccc

SEQ ID NO: 50451 - RNA, 32 nt, Human
agccgguugcccaccccagcccucugguccau

SEQ ID NO: 50452 - RNA, 32 nt, Human
agccguaaucacucugugccucaguuuccucg

SEQ ID NO: 50453 - RNA, 23 nt, Human
agccguaaucccagcuacucggg

SEQ ID NO: 50454 - RNA, 32 nt, Human
agccguagagacaaacccccacccugagcccg

SEQ ID NO: 50455 - RNA, 32 nt, Human
agccguagcccuugugcucaggagcugcuccu

SEQ ID NO: 50456 - RNA, 32 nt, Human
agccgucauucucuccccacuccacgcucccc

SEQ ID NO: 50457 - RNA, 32 nt, Human
agccguccaaagugcugggauuacaagcguga

SEQ ID NO: 50458 - RNA, 32 nt, Human
agccguccaccaacuagccagcugccaccgug

SEQ ID NO: 50459 - RNA, 32 nt, Human
agccguccauucauugugcuucaucaagugcu

SEQ ID NO: 50460 - RNA, 32 nt, Human
agccgucccugaccaggcuuaguugcuuccca

SEQ ID NO: 50461 - RNA, 32 nt, Human
agccgucucaacaaugguuacagagaugaauc

SEQ ID NO: 50462 - RNA, 32 nt, Human
agccgucuccacccugucugccucccgaacag

SEQ ID NO: 50463 - RNA, 32 nt, Human
agccgucugcugcugcugcaggaggcuccacu

SEQ ID NO: 50464 - RNA, 24 nt, Human
agccgucugugacaucccaccucg

SEQ ID NO: 50465 - RNA, 32 nt, Human
agccgugaaccacugcacccagccaaugggug

SEQ ID NO: 50466 - RNA, 32 nt, Human
agccgugaaccuuugcaccccauguucccaga

SEQ ID NO: 50467 - RNA, 32 nt, Human
agccgugaccuugccuucauugcuucauccag

SEQ ID NO: 50468 - RNA, 32 nt, Human
agccgugagccaaguaaaccucuuuaauuacc

SEQ ID NO: 50469 - RNA, 32 nt, Human
agccgugagccacugcacccagccccaaucca

SEQ ID NO: 50470 - RNA, 32 nt, Human
agccgugccaggccaucugccugcucaugggg

SEQ ID NO: 50471 - RNA, 19 nt, Human
agccgugccaucucugccc

SEQ ID NO: 50472 - RNA, 32 nt, Human
agccgugcuguggguuuccuucccucuggcuc

SEQ ID NO: 50473 - RNA, 18 nt, Human
agccguggcuccauggcc

SEQ ID NO: 50474 - RNA, 32 nt, Human
agccguggcugaggccacccccagaggagccc

SEQ ID NO: 50475 - RNA, 32 nt, Human
agccgugggaggaagggggcguggcaaggggu

SEQ ID NO: 50476 - RNA, 32 nt, Human
agccguggggcagaggcugcagagccccagga

SEQ ID NO: 50477 - RNA, 32 nt, Human
agccguggggcagaggcugcggagccccagaa

SEQ ID NO: 50478 - RNA, 32 nt, Human
agccguggggcagaggcugcggagccccagga

SEQ ID NO: 50479 - RNA, 32 nt, Human
agccguggguugagcugcucuccucugaaggu

SEQ ID NO: 50480 - RNA, 32 nt, Human
agccguguaaaaccugcagugccugaaaccug

SEQ ID NO: 50481 - RNA, 32 nt, Human
agccguguggcuguggcagagacaguggccgg

SEQ ID NO: 50482 - RNA, 32 nt, Human
agccguuaggcugaauguuacugcuugccaua

SEQ ID NO: 50483 - RNA, 32 nt, Human
agccguucccuguccauguccacagaaggaga

SEQ ID NO: 50484 - RNA, 32 nt, Human
agccguuccggaugcuuuaggcugccggaugu

SEQ ID NO: 50485 - RNA, 32 nt, Human
agccguucucacagaugcuccugggccaccgu

SEQ ID NO: 50486 - RNA, 32 nt, Human
agccguucucaugcaaaauaccugugucagaa

SEQ ID NO: 50487 - RNA, 32 nt, Human
agccguugaccaugguugcaacuggcaguuug

SEQ ID NO: 50488 - RNA, 32 nt, Human
agccguugugcuccagccugggcgacagaagu

SEQ ID NO: 50489 - RNA, 32 nt, Human
agccuaaaacaaacacucagauguggguguau

SEQ ID NO: 50490 - RNA, 32 nt, Human
agccuaacagcaaaggcucuuuucagagccac

SEQ ID NO: 50491 - RNA, 32 nt, Human
agccuaagacacaucugugaauacuuagauuu

SEQ ID NO: 50492 - RNA, 32 nt, Human
agccuaagagaucaaggcugcagugagccaug

SEQ ID NO: 50493 - RNA, 20 nt, Human
agccuaaggagcuagaacug

SEQ ID NO: 50494 - RNA, 32 nt, Human
agccuaagggcuauccucugaagcagagucac

SEQ ID NO: 50495 - RNA, 32 nt, Human
agccuaaggggagggggcugccaggagcccug

SEQ ID NO: 50496 - RNA, 32 nt, Human
agccuaagggggugggagacgccggccccuug

SEQ ID NO: 50497 - RNA, 21 nt, Human
agccuaauuugguucuggacu

SEQ ID NO: 50498 - RNA, 32 nt, Human
agccuacaacuacucgccacacuggcucuucc

SEQ ID NO: 50499 - RNA, 32 nt, Human
agccuacacugcacccuggcuggcaggggugc

SEQ ID NO: 50500 - RNA, 28 nt, Human
agccuacagaguagcugggaauacaagu

SEQ ID NO: 50501 - RNA, 32 nt, Human
agccuacaucuucuuauucuauuuaggaaucg

SEQ ID NO: 50502 - RNA, 32 nt, Human
agccuacauggugaaaccccuucucuacuaaa

SEQ ID NO: 50503 - RNA, 32 nt, Human
agccuaccaaagugcugggauuacaggcguga

SEQ ID NO: 50504 - RNA, 32 nt, Human
agccuaccaagcagcugggacuacaggucugc

SEQ ID NO: 50505 - RNA, 32 nt, Human
agccuaccaaguagcugggaccaugggugugu

SEQ ID NO: 50506 - RNA, 32 nt, Human
agccuaccaaguagcugggauaauacaccacc

SEQ ID NO: 50507 - RNA, 32 nt, Human
agccuaccaaguagcugggauuacaggagugc

SEQ ID NO: 50508 - RNA, 32 nt, Human
agccuaccaaguagcugggauuacaggugugu

SEQ ID NO: 50509 - RNA, 18 nt, Human
agccuaccaggcuugccc

SEQ ID NO: 50510 - RNA, 21 nt, Human
agccuacccaacauggugaaa

SEQ ID NO: 50511 - RNA, 32 nt, Human
agccuacccguaaacugccacccaagaaggac

SEQ ID NO: 50512 - RNA, 32 nt, Human
agccuacccugccugcacuccuccaccaucac

SEQ ID NO: 50513 - RNA, 32 nt, Human
agccuaccuucaccaccuauauccagaagggg

SEQ ID NO: 50514 - RNA, 32 nt, Human
agccuacgaucacuuccgcuccugccugcacg

SEQ ID NO: 50515 - RNA, 20 nt, Human
agccuacgccugugcugcug

SEQ ID NO: 50516 - RNA, 23 nt, Human
agccuacguguugguaaauccaa

SEQ ID NO: 50517 - RNA, 32 nt, Human
agccuacucuaaauuauugauaaccucuuccu

SEQ ID NO: 50518 - RNA, 32 nt, Human
agccuacucuccuaccucgccuccaggccucg

SEQ ID NO: 50519 - RNA, 32 nt, Human
agccuacugcuggcucagguuccagucuucgu

SEQ ID NO: 50520 - RNA, 32 nt, Human
agccuacuggguagcugggacuacaggggugc

SEQ ID NO: 50521 - RNA, 32 nt, Human
agccuacuugcaggagauauggaaggcagaag

SEQ ID NO: 50522 - RNA, 22 nt, Human
agccuagaccugcugggcucaa

SEQ ID NO: 50523 - RNA, 32 nt, Human
agccuagagccaggacugaagcuucaagaugg

SEQ ID NO: 50524 - RNA, 32 nt, Human
agccuagaggagcuguuccuuccuucacagau

SEQ ID NO: 50525 - RNA, 32 nt, Human
agccuagaucccucgcaugcacaguucauagu

SEQ ID NO: 50526 - RNA, 31 nt, Human
agccuagaugagagagauagagagugaguac

SEQ ID NO: 50527 - RNA, 32 nt, Human
agccuagcacugcagagugcuggugaguccag

SEQ ID NO: 50528 - RNA, 21 nt, Human
agccuagccaacauggugaaa

SEQ ID NO: 50529 - RNA, 21 nt, Human
agccuagccaacguggugaaa

SEQ ID NO: 50530 - RNA, 22 nt, Human
agccuagccaccucccacccca

SEQ ID NO: 50531 - RNA, 32 nt, Human
agccuagccaugggggugagggggagugggug

SEQ ID NO: 50532 - RNA, 32 nt, Human
agccuagcccuggccuugaccucccaggagcg

SEQ ID NO: 50533 - RNA, 32 nt, Human
agccuagcccugggacaucaggagacugggcu

SEQ ID NO: 50534 - RNA, 32 nt, Human
agccuagcugggugggaagacggagcccugaa

SEQ ID NO: 50535 - RNA, 18 nt, Human
agccuagcuucuggccug

SEQ ID NO: 50536 - RNA, 24 nt, Human
agccuaggaagucgaggcugcagu

SEQ ID NO: 50537 - RNA, 32 nt, Human
agccuaggaagucgaggcugcagugagcugag

SEQ ID NO: 50538 - RNA, 32 nt, Human
agccuaggacguugaggcugcagugagcugug

SEQ ID NO: 50539 - RNA, 32 nt, Human
agccuaggacucaggcuggaggcaauuccuug

SEQ ID NO: 50540 - RNA, 26 nt, Human
agccuaggaggcagagguugcaguga

SEQ ID NO: 50541 - RNA, 24 nt, Human
agccuaggaggucaaggcugcagu

SEQ ID NO: 50542 - RNA, 32 nt, Human
agccuaggaggucaaggcugcagugagccaug

SEQ ID NO: 50543 - RNA, 32 nt, Human
agccuaggagguugaggcugcagugagcuaug

SEQ ID NO: 50544 - RNA, 32 nt, Human
agccuaggaguggucagggucccgggaguggc

SEQ ID NO: 50545 - RNA, 32 nt, Human
agccuaggcaaagcuuuaaacccuucucugug

SEQ ID NO: 50546 - RNA, 21 nt, Human
agccuaggcaacauggugaaa

SEQ ID NO: 50547 - RNA, 32 nt, Human
agccuaggcauggugagacuccaucucaaaaa

SEQ ID NO: 50548 - RNA, 32 nt, Human
agccuaggccagagcacuuuacuccaggcagg

SEQ ID NO: 50549 - RNA, 18 nt, Human
agccuaggcccugagcug

SEQ ID NO: 50550 - RNA, 32 nt, Human
agccuagggaaaaggcuuaggaagauggagaa

SEQ ID NO: 50551 - RNA, 32 nt, Human
agccuagggcagcagggagucuugaagugauc

SEQ ID NO: 50552 - RNA, 32 nt, Human
agccuagggcauaggucaucacugcaggggug

SEQ ID NO: 50553 - RNA, 17 nt, Human
agccuagggcugagcug

SEQ ID NO: 50554 - RNA, 32 nt, Human
agccuaggugguaggagcuugaucuuuguuuc

SEQ ID NO: 50555 - RNA, 32 nt, Human
agccuaggugucucaggccccugggccccgca

SEQ ID NO: 50556 - RNA, 32 nt, Human
agccuagugccagaaauguccaagaugccagg

SEQ ID NO: 50557 - RNA, 32 nt, Human
agccuaguuccuuccuggccccucucucacug

SEQ ID NO: 50558 - RNA, 32 nt, Human
agccuauaaauaaguuccaaaauaucgaauuc

SEQ ID NO: 50559 - RNA, 23 nt, Human
agccuauaaucccagcacuucgg

SEQ ID NO: 50560 - RNA, 24 nt, Human
agccuauaaucccagcacuuuggg

SEQ ID NO: 50561 - RNA, 32 nt, Human
agccuauacugauggccuuagcuuuguucagu

SEQ ID NO: 50562 - RNA, 32 nt, Human
agccuauaucacagcuaacuucuucagucuca

SEQ ID NO: 50563 - RNA, 32 nt, Human
agccuaucuucugguuucuuccucuccgcugg

SEQ ID NO: 50564 - RNA, 32 nt, Human
agccuaugauuuugcagaggugucacacugua

SEQ ID NO: 50565 - RNA, 31 nt, Human
agccuaugccagccugggccugucuccaccg

SEQ ID NO: 50566 - RNA, 32 nt, Human
agccuauguaguucaauuaauauauaaggaaa

SEQ ID NO: 50567 - RNA, 32 nt, Human
agccuauugggcagcugggacuacaggcaugc

SEQ ID NO: 50568 - RNA, 32 nt, Human
agccuauuuuagugauauggcagcacggauau

SEQ ID NO: 50569 - RNA, 32 nt, Human
agccuauuuugcugaguguucccacuggaucc

SEQ ID NO: 50570 - RNA, 32 nt, Human
agccucaaaaauaugagugaagcacaaucaaa

SEQ ID NO: 50571 - RNA, 32 nt, Human
agccucaaaccucauauaccacucucuuccga

SEQ ID NO: 50572 - RNA, 22 nt, Human
agccucaaacuacugggcucaa

SEQ ID NO: 50573 - RNA, 22 nt, Human
agccucaaacuccugggcucaa

SEQ ID NO: 50574 - RNA, 22 nt, Human
agccucaaacuccugggcucag

SEQ ID NO: 50575 - RNA, 22 nt, Human
agccucaaacuucuggccucaa

SEQ ID NO: 50576 - RNA, 32 nt, Human
agccucaaagauggccagcuggaggugaucuu

SEQ ID NO: 50577 - RNA, 32 nt, Human
agccucaaauuacuggacugagguguccuccu

SEQ ID NO: 50578 - RNA, 22 nt, Human
agccucaaauuccugggcucaa

SEQ ID NO: 50579 - RNA, 32 nt, Human
agccucaacauggagaaaccccaucucuacua

SEQ ID NO: 50580 - RNA, 32 nt, Human
agccucaacauggagaaaccccgucucuacua

SEQ ID NO: 50581 - RNA, 22 nt, Human
agccucaaccucccuggcucaa

SEQ ID NO: 50582 - RNA, 22 nt, Human
agccucaaccuccugagcucaa

SEQ ID NO: 50583 - RNA, 32 nt, Human
agccucaaccuccuggacucagagaugucggc

SEQ ID NO: 50584 - RNA, 22 nt, Human
agccucaaccuccugggcucaa

SEQ ID NO: 50585 - RNA, 22 nt, Human
agccucaaccuccugggcucag

SEQ ID NO: 50586 - RNA, 22 nt, Human
agccucaaccugcagugcucaa

SEQ ID NO: 50587 - RNA, 22 nt, Human
agccucaaccugcugggcucaa

SEQ ID NO: 50588 - RNA, 22 nt, Human
agccucaaccuucuggguucaa

SEQ ID NO: 50589 - RNA, 23 nt, Human
agccucaacucugccccacccca

SEQ ID NO: 50590 - RNA, 22 nt, Human
agccucaacuucccaggcucaa

SEQ ID NO: 50591 - RNA, 21 nt, Human
agccucaacuuccuggacuca

SEQ ID NO: 50592 - RNA, 22 nt, Human
agccucaacuuccuggacucaa

SEQ ID NO: 50593 - RNA, 32 nt, Human
agccucaagcccaugaaugccaccccagucau

SEQ ID NO: 50594 - RNA, 32 nt, Human
agccucaaguaguucccuuuuuguauuaauaa

SEQ ID NO: 50595 - RNA, 22 nt, Human
agccucaaucuuccaggcucaa

SEQ ID NO: 50596 - RNA, 32 nt, Human
agccucacaaguagcugggauuacaggugccc

SEQ ID NO: 50597 - RNA, 28 nt, Human
agccucacaccagcugccuccuccacuc

SEQ ID NO: 50598 - RNA, 18 nt, Human
agccucacaggccuggcc

SEQ ID NO: 50599 - RNA, 20 nt, Human
agccucacaggcggugcacg

SEQ ID NO: 50600 - RNA, 19 nt, Human
agccucacaggcucugcug

SEQ ID NO: 50601 - RNA, 19 nt, Human
agccucacagggcuuugcc

SEQ ID NO: 50602 - RNA, 32 nt, Human
agccucaccacucacaagcugugugacuucaa

SEQ ID NO: 50603 - RNA, 32 nt, Human
agccucacccaccuaugaucuguccuuuccca

SEQ ID NO: 50604 - RNA, 32 nt, Human
agccucacccagccugagcgggguucccuggu

SEQ ID NO: 50605 - RNA, 21 nt, Human
agccucaccucauuccaacac

SEQ ID NO: 50606 - RNA, 20 nt, Human
agccucaccucugccccagg

SEQ ID NO: 50607 - RNA, 32 nt, Human
agccucaccuucucuggugauaacuccagcac

SEQ ID NO: 50608 - RNA, 32 nt, Human
agccucaccuuuccugccgucccuccuguugu

SEQ ID NO: 50609 - RNA, 32 nt, Human
agccucacgaguagcuggaauuacaggcaggc

SEQ ID NO: 50610 - RNA, 32 nt, Human
agccucacgaguagcugggacuacaggcaugc

SEQ ID NO: 50611 - RNA, 32 nt, Human
agccucacgaguagcugggacuacaggcgccu

SEQ ID NO: 50612 - RNA, 32 nt, Human
agccucacgaguagcugggauuacaggcaugc

SEQ ID NO: 50613 - RNA, 23 nt, Human
agccucacgccccgcccccaggc

SEQ ID NO: 50614 - RNA, 32 nt, Human
agccucacgugagacuccuuuuaagacuaaac

SEQ ID NO: 50615 - RNA, 18 nt, Human
agccucacuccuggacug

SEQ ID NO: 50616 - RNA, 32 nt, Human
agccucacugaacgccugcucugguugaaggu

SEQ ID NO: 50617 - RNA, 24 nt, Human
agccucacuggcauccccaaacac

SEQ ID NO: 50618 - RNA, 32 nt, Human
agccucacuuccagcccagccugggcccgcag

SEQ ID NO: 50619 - RNA, 32 nt, Human
agccucacuuuccugucucugcccuuaauggg

SEQ ID NO: 50620 - RNA, 32 nt, Human
agccucagaagcagacucugaagccggagagc

SEQ ID NO: 50621 - RNA, 32 nt, Human
agccucagaaggaggaguaugugggaaguuua

SEQ ID NO: 50622 - RNA, 32 nt, Human
agccucagaccagcuauggggagaggacaaca

SEQ ID NO: 50623 - RNA, 22 nt, Human
agccucagacuccuggguucaa

SEQ ID NO: 50624 - RNA, 32 nt, Human
agccucagagacagagaaggagagggggagau

SEQ ID NO: 50625 - RNA, 32 nt, Human
agccucagagagauuaguaccccacuugcaaa

SEQ ID NO: 50626 - RNA, 32 nt, Human
agccucagaggggcaggcauccccgcacagac

SEQ ID NO: 50627 - RNA, 32 nt, Human
agccucagaucuuccccauucaggaaggguuu

SEQ ID NO: 50628 - RNA, 32 nt, Human
agccucagaugggaagaagucagaggaaccag

SEQ ID NO: 50629 - RNA, 32 nt, Human
agccucagcccugucuguacugcucguccagc

SEQ ID NO: 50630 - RNA, 32 nt, Human
agccucagccucauguaacccauuguuuccaa

SEQ ID NO: 50631 - RNA, 32 nt, Human
agccucagccuccugaguagcuggaauuacag

SEQ ID NO: 50632 - RNA, 32 nt, Human
agccucagccuccugaguagcugggauuacag

SEQ ID NO: 50633 - RNA, 32 nt, Human
agccucagccuccuuagacugaccccucaggc

SEQ ID NO: 50634 - RNA, 32 nt, Human
agccucagcggaccacucuucucuccaaggaa

SEQ ID NO: 50635 - RNA, 22 nt, Human
agccucagcguccugggcucaa

SEQ ID NO: 50636 - RNA, 32 nt, Human
agccucagcuacucaggggguugaggugggaa

SEQ ID NO: 50637 - RNA, 32 nt, Human
agccucagcuacucggguggcagaggagaaga

SEQ ID NO: 50638 - RNA, 32 nt, Human
agccucagcucagccucccccugcugcucauc

SEQ ID NO: 50639 - RNA, 32 nt, Human
agccucagcucucuuuucagagaagaucaaag

SEQ ID NO: 50640 - RNA, 32 nt, Human
agccucaggagaaggaaggagaucccuuuuca

SEQ ID NO: 50641 - RNA, 32 nt, Human
agccucaggagguugaggcugcagugagcugu

SEQ ID NO: 50642 - RNA, 32 nt, Human
agccucaggggcuccagauccuagccagaggc

SEQ ID NO: 50643 - RNA, 32 nt, Human
agccucagguaacugcauccugcccagcauga

SEQ ID NO: 50644 - RNA, 32 nt, Human
agccucaguccccagcagagccugugucucac

SEQ ID NO: 50645 - RNA, 32 nt, Human
agccucaguucugcuugugggcgggccugucu

SEQ ID NO: 50646 - RNA, 18 nt, Human
agccucaguuucugacug

SEQ ID NO: 50647 - RNA, 22 nt, Human
agccucauacuccugggcucaa

SEQ ID NO: 50648 - RNA, 22 nt, Human
agccucauagaacaggaggcug

SEQ ID NO: 50649 - RNA, 32 nt, Human
agccucaucacagacaugaaacucacugccgc

SEQ ID NO: 50650 - RNA, 32 nt, Human
agccucaucagacccuucuccaugcacauccu

SEQ ID NO: 50651 - RNA, 32 nt, Human
agccucaucugcuccuuuccuccccugccuca

SEQ ID NO: 50652 - RNA, 32 nt, Human
agccucaugaauagcugggauuacaggugccc

SEQ ID NO: 50653 - RNA, 32 nt, Human
agccucaugaguagcugggacuacaggcacca

SEQ ID NO: 50654 - RNA, 32 nt, Human
agccucaugaguagcugggauuacagguaugu

SEQ ID NO: 50655 - RNA, 32 nt, Human
agccucauugugaaaggcacuggacuuggacc

SEQ ID NO: 50656 - RNA, 32 nt, Human
agccuccaaaagugcugggauuauagguguga

SEQ ID NO: 50657 - RNA, 32 nt, Human
agccuccaaaguagcugggauuacaggcaccc

SEQ ID NO: 50658 - RNA, 32 nt, Human
agccuccaaaguagcugggauuacaggcaugc

SEQ ID NO: 50659 - RNA, 32 nt, Human
agccuccaaaguagcugggauuacagguuugc

SEQ ID NO: 50660 - RNA, 32 nt, Human
agccuccaaaguagcugggauugcaggugccu

SEQ ID NO: 50661 - RNA, 21 nt, Human
agccuccaaaguuucugcacc

SEQ ID NO: 50662 - RNA, 32 nt, Human
agccuccaacccaggaggggaaguggagauaa

SEQ ID NO: 50663 - RNA, 22 nt, Human
agccuccaacuccugggcucaa

SEQ ID NO: 50664 - RNA, 22 nt, Human
agccuccaacucuugggcucaa

SEQ ID NO: 50665 - RNA, 32 nt, Human
agccuccaacuucucccgaaucccacuggauu

SEQ ID NO: 50666 - RNA, 32 nt, Human
agccuccacccagccacaucuugggaaaagaa

SEQ ID NO: 50667 - RNA, 32 nt, Human
agccuccacccuuucucuaugccugcaacaaa

SEQ ID NO: 50668 - RNA, 22 nt, Human
agccuccaccuccugggcucaa

SEQ ID NO: 50669 - RNA, 32 nt, Human
agccuccaccuccugggcucaaguguccuccc

SEQ ID NO: 50670 - RNA, 22 nt, Human
agccuccaccuccuggguucaa

SEQ ID NO: 50671 - RNA, 32 nt, Human
agccuccaccugccaaacccgagugauuccuu

SEQ ID NO: 50672 - RNA, 21 nt, Human
agccuccacuguguccagaga

SEQ ID NO: 50673 - RNA, 32 nt, Human
agccuccagaacugugggacauaaauuccugu

SEQ ID NO: 50674 - RNA, 22 nt, Human
agccuccagaagccaaaaccau

SEQ ID NO: 50675 - RNA, 22 nt, Human
agccuccagaagcuggaaccau

SEQ ID NO: 50676 - RNA, 32 nt, Human
agccuccagaauagcugggauuacaggcguac

SEQ ID NO: 50677 - RNA, 22 nt, Human
agccuccagacccugcuaacca

SEQ ID NO: 50678 - RNA, 22 nt, Human
agccuccagagaaaagauucaa

SEQ ID NO: 50679 - RNA, 32 nt, Human
agccuccagagcagcugggauuacagcagcuu

SEQ ID NO: 50680 - RNA, 32 nt, Human
agccuccagaguaacagggauuacaggcauac

SEQ ID NO: 50681 - RNA, 32 nt, Human
agccuccagaguagcuaggacuacaggcagug

SEQ ID NO: 50682 - RNA, 32 nt, Human
agccuccagaguagcuaggauuacagauacgu

SEQ ID NO: 50683 - RNA, 32 nt, Human
agccuccagaguagcucagauuacaguguuuu

SEQ ID NO: 50684 - RNA, 32 nt, Human
agccuccagaguagcuggaacuacaggugccc

SEQ ID NO: 50685 - RNA, 32 nt, Human
agccuccagaguagcuggaauuacaggcacau

SEQ ID NO: 50686 - RNA, 32 nt, Human
agccuccagaguagcugggaccgcaggcacuu

SEQ ID NO: 50687 - RNA, 32 nt, Human
agccuccagaguagcugggacuacaggcacac

SEQ ID NO: 50688 - RNA, 32 nt, Human
agccuccagaguagcugggacuacaggcaccc

SEQ ID NO: 50689 - RNA, 32 nt, Human
agccuccagaguagcugggacuacaggcaugu

SEQ ID NO: 50690 - RNA, 32 nt, Human
agccuccagaguagcugggacuacaggugccc

SEQ ID NO: 50691 - RNA, 32 nt, Human
agccuccagaguagcugggacugcgggcgccc

SEQ ID NO: 50692 - RNA, 32 nt, Human
agccuccagaguagcugggauuacaggcaccu

SEQ ID NO: 50693 - RNA, 32 nt, Human
agccuccagaguagcugggauuacaggcacgc

SEQ ID NO: 50694 - RNA, 32 nt, Human
agccuccagaguagcugggauuacaggcacgu

SEQ ID NO: 50695 - RNA, 32 nt, Human
agccuccagaguagcugggauuacaggcaugc

SEQ ID NO: 50696 - RNA, 32 nt, Human
agccuccagaguagcugggauuacaggcgccc

SEQ ID NO: 50697 - RNA, 32 nt, Human
agccuccagaguagcugggauuuuaggugugc

SEQ ID NO: 50698 - RNA, 32 nt, Human
agccuccagaguaucugggauuacauaugucg

SEQ ID NO: 50699 - RNA, 21 nt, Human
agccuccagcaggccacacca

SEQ ID NO: 50700 - RNA, 22 nt, Human
agccuccagcauuugcacacca

SEQ ID NO: 50701 - RNA, 22 nt, Human
agccuccagccucucccuccag

SEQ ID NO: 50702 - RNA, 21 nt, Human
agccuccagccucucucgggg

SEQ ID NO: 50703 - RNA, 32 nt, Human
agccuccagcuccucagaccuccugggugggg

SEQ ID NO: 50704 - RNA, 32 nt, Human
agccuccagcuggcuccugagcucugcaccag

SEQ ID NO: 50705 - RNA, 20 nt, Human
agccuccagggaucuacacc

SEQ ID NO: 50706 - RNA, 32 nt, Human
agccuccagguaacaggcuucagagagaauag

SEQ ID NO: 50707 - RNA, 32 nt, Human
agccuccauauagcugguggggaccaaguuuc

SEQ ID NO: 50708 - RNA, 22 nt, Human
agccuccaucuccugggcucaa

SEQ ID NO: 50709 - RNA, 32 nt, Human
agccuccaucugccaagaacauucaguuggau

SEQ ID NO: 50710 - RNA, 32 nt, Human
agccuccauggcugaugaccucagcuuucaca

SEQ ID NO: 50711 - RNA, 32 nt, Human
agccuccaugugggaaccucuaaccugggaaa

SEQ ID NO: 50712 - RNA, 22 nt, Human
agccuccauugcccacccgcca

SEQ ID NO: 50713 - RNA, 32 nt, Human
agccucccaaaaagcugggauuacuagcauga

SEQ ID NO: 50714 - RNA, 32 nt, Human
agccucccaaaauacugggauuacaggcuuga

SEQ ID NO: 50715 - RNA, 32 nt, Human
agccucccaaaaugcugggauuacaggcauga

SEQ ID NO: 50716 - RNA, 32 nt, Human
agccucccaaaaugcugggauuacaggcguga

SEQ ID NO: 50717 - RNA, 32 nt, Human
agccucccaaaaugcugggauuacaggcuuga

SEQ ID NO: 50718 - RNA, 32 nt, Human
agccucccaaaaugcugggauuacagguauga

SEQ ID NO: 50719 - RNA, 32 nt, Human
agccucccaaaaugcuuggauuacaggcauga

SEQ ID NO: 50720 - RNA, 32 nt, Human
agccucccaaaauggugggauuacaggugugu

SEQ ID NO: 50721 - RNA, 32 nt, Human
agccucccaaaauucugggauuacaggcauaa

SEQ ID NO: 50722 - RNA, 32 nt, Human
agccucccaaacuacugggauuacagguugua

SEQ ID NO: 50723 - RNA, 32 nt, Human
agccucccaaacugcugggauuacaggcguga

SEQ ID NO: 50724 - RNA, 32 nt, Human
agccucccaaacugcugggauuacaggcgugu

SEQ ID NO: 50725 - RNA, 32 nt, Human
agccucccaaacugcugggauuacagguguga

SEQ ID NO: 50726 - RNA, 32 nt, Human
agccucccaaagagcugggauuacagguguga

SEQ ID NO: 50727 - RNA, 32 nt, Human
agccucccaaagcgcugggauuacagguguga

SEQ ID NO: 50728 - RNA, 32 nt, Human
agccucccaaaggguugggauuaccggcauga

SEQ ID NO: 50729 - RNA, 32 nt, Human
agccucccaaaguacugggauuacaaacauaa

SEQ ID NO: 50730 - RNA, 32 nt, Human
agccucccaaaguacugggauuacaggcauga

SEQ ID NO: 50731 - RNA, 32 nt, Human
agccucccaaaguacugggauuacaggcguga

SEQ ID NO: 50732 - RNA, 32 nt, Human
agccucccaaaguacugggauuacaggugaga

SEQ ID NO: 50733 - RNA, 32 nt, Human
agccucccaaaguacugggauuauaggcauga

SEQ ID NO: 50734 - RNA, 32 nt, Human
agccucccaaaguacugggauuauagguguga

SEQ ID NO: 50735 - RNA, 32 nt, Human
agccucccaaaguccugggauuacaggcguga

SEQ ID NO: 50736 - RNA, 32 nt, Human
agccucccaaaguccugggauuacaggcugag

SEQ ID NO: 50737 - RNA, 32 nt, Human
agccucccaaagugcagggauuacaggcacaa

SEQ ID NO: 50738 - RNA, 32 nt, Human
agccucccaaagugcagggauuacaggcauga

SEQ ID NO: 50739 - RNA, 32 nt, Human
agccucccaaagugccgggauuacaggcguga

SEQ ID NO: 50740 - RNA, 32 nt, Human
agccucccaaagugcuaagauuacaggcguga

SEQ ID NO: 50741 - RNA, 32 nt, Human
agccucccaaagugcuagaauuacaggcauua

SEQ ID NO: 50742 - RNA, 32 nt, Human
agccucccaaagugcuaggauuacacagcccu

SEQ ID NO: 50743 - RNA, 32 nt, Human
agccucccaaagugcuaggauuacaggauaag

SEQ ID NO: 50744 - RNA, 32 nt, Human
agccucccaaagugcuaggauuacaggcauaa

SEQ ID NO: 50745 - RNA, 32 nt, Human
agccucccaaagugcuaggauuacaggcauga

SEQ ID NO: 50746 - RNA, 32 nt, Human
agccucccaaagugcuaggauuacaggcaugg

SEQ ID NO: 50747 - RNA, 32 nt, Human
agccucccaaagugcuaggauuacaggccuga

SEQ ID NO: 50748 - RNA, 32 nt, Human
agccucccaaagugcuaggauuacaggcguga

SEQ ID NO: 50749 - RNA, 32 nt, Human
agccucccaaagugcuaggauuacaggcgugu

SEQ ID NO: 50750 - RNA, 32 nt, Human
agccucccaaagugcuaggauuacagguguaa

SEQ ID NO: 50751 - RNA, 32 nt, Human
agccucccaaagugcuaggauuacagguguga

SEQ ID NO: 50752 - RNA, 32 nt, Human
agccucccaaagugcugacauuacagguguga

SEQ ID NO: 50753 - RNA, 32 nt, Human
agccucccaaagugcugagauuacagacauga

SEQ ID NO: 50754 - RNA, 32 nt, Human
agccucccaaagugcugagauuacaggcauaa

SEQ ID NO: 50755 - RNA, 32 nt, Human
agccucccaaagugcugagauuacaggcauga

SEQ ID NO: 50756 - RNA, 32 nt, Human
agccucccaaagugcugagauuacaggcguga

SEQ ID NO: 50757 - RNA, 32 nt, Human
agccucccaaagugcugagauuacagggguga

SEQ ID NO: 50758 - RNA, 32 nt, Human
agccucccaaagugcugagauuacagguguga

SEQ ID NO: 50759 - RNA, 32 nt, Human
agccucccaaagugcugagauuacuggcuuga

SEQ ID NO: 50760 - RNA, 32 nt, Human
agccucccaaagugcugagauuauaggcacga

SEQ ID NO: 50761 - RNA, 32 nt, Human
agccucccaaagugcugauauuacaggcguga

SEQ ID NO: 50762 - RNA, 32 nt, Human
agccucccaaagugcuggaauuacaggcguga

SEQ ID NO: 50763 - RNA, 32 nt, Human
agccucccaaagugcuggcauuacaggcgugu

SEQ ID NO: 50764 - RNA, 32 nt, Human
agccucccaaagugcugggaucacaggcauga

SEQ ID NO: 50765 - RNA, 32 nt, Human
agccucccaaagugcugggaugacaggcguga

SEQ ID NO: 50766 - RNA, 32 nt, Human
agccucccaaagugcugggaugacaggcgugc

SEQ ID NO: 50767 - RNA, 32 nt, Human
agccucccaaagugcugggaugacagguguga

SEQ ID NO: 50768 - RNA, 32 nt, Human
agccucccaaagugcugggaugauaggcguga

SEQ ID NO: 50769 - RNA, 32 nt, Human
agccucccaaagugcugggauuaacagguaug

SEQ ID NO: 50770 - RNA, 32 nt, Human
agccucccaaagugcugggauuacaagcauga

SEQ ID NO: 50771 - RNA, 32 nt, Human
agccucccaaagugcugggauuacaagcguga

SEQ ID NO: 50772 - RNA, 32 nt, Human
agccucccaaagugcugggauuacaaguauga

SEQ ID NO: 50773 - RNA, 32 nt, Human
agccucccaaagugcugggauuacaaguguga

SEQ ID NO: 50774 - RNA, 32 nt, Human
agccucccaaagugcugggauuacagaccuga

SEQ ID NO: 50775 - RNA, 32 nt, Human
agccucccaaagugcugggauuacagacguga

SEQ ID NO: 50776 - RNA, 32 nt, Human
agccucccaaagugcugggauuacagaugaua

SEQ ID NO: 50777 - RNA, 32 nt, Human
agccucccaaagugcugggauuacagauguga

SEQ ID NO: 50778 - RNA, 32 nt, Human
agccucccaaagugcugggauuacagcccuga

SEQ ID NO: 50779 - RNA, 32 nt, Human
agccucccaaagugcugggauuacagcgaaga

SEQ ID NO: 50780 - RNA, 32 nt, Human
agccucccaaagugcugggauuacagcgugag

SEQ ID NO: 50781 - RNA, 32 nt, Human
agccucccaaagugcugggauuacagcuguga

SEQ ID NO: 50782 - RNA, 32 nt, Human
agccucccaaagugcugggauuacaggaauuu

SEQ ID NO: 50783 - RNA, 32 nt, Human
agccucccaaagugcugggauuacaggaguga

SEQ ID NO: 50784 - RNA, 32 nt, Human
agccucccaaagugcugggauuacaggaugag

SEQ ID NO: 50785 - RNA, 32 nt, Human
agccucccaaagugcugggauuacaggcaacu

SEQ ID NO: 50786 - RNA, 32 nt, Human
agccucccaaagugcugggauuacaggcauaa

SEQ ID NO: 50787 - RNA, 32 nt, Human
agccucccaaagugcugggauuacaggcauca

SEQ ID NO: 50788 - RNA, 32 nt, Human
agccucccaaagugcugggauuacaggcauga

SEQ ID NO: 50789 - RNA, 32 nt, Human
agccucccaaagugcugggauuacaggccacu

SEQ ID NO: 50790 - RNA, 32 nt, Human
agccucccaaagugcugggauuacaggccccu

SEQ ID NO: 50791 - RNA, 32 nt, Human
agccucccaaagugcugggauuacaggccuga

SEQ ID NO: 50792 - RNA, 32 nt, Human
agccucccaaagugcugggauuacaggcgcaa

SEQ ID NO: 50793 - RNA, 32 nt, Human
agccucccaaagugcugggauuacaggcgcga

SEQ ID NO: 50794 - RNA, 32 nt, Human
agccucccaaagugcugggauuacaggcggcc

SEQ ID NO: 50795 - RNA, 32 nt, Human
agccucccaaagugcugggauuacaggcguga

SEQ ID NO: 50796 - RNA, 32 nt, Human
agccucccaaagugcugggauuacaggcgugu

SEQ ID NO: 50797 - RNA, 32 nt, Human
agccucccaaagugcugggauuacaggcuuaa

SEQ ID NO: 50798 - RNA, 32 nt, Human
agccucccaaagugcugggauuacaggcuuca

SEQ ID NO: 50799 - RNA, 32 nt, Human
agccucccaaagugcugggauuacaggcuuga

SEQ ID NO: 50800 - RNA, 32 nt, Human
agccucccaaagugcugggauuacaggcuugg

SEQ ID NO: 50801 - RNA, 32 nt, Human
agccucccaaagugcugggauuacagggguga

SEQ ID NO: 50802 - RNA, 32 nt, Human
agccucccaaagugcugggauuacagguauga

SEQ ID NO: 50803 - RNA, 32 nt, Human
agccucccaaagugcugggauuacagguggga

SEQ ID NO: 50804 - RNA, 32 nt, Human
agccucccaaagugcugggauuacagguguaa

SEQ ID NO: 50805 - RNA, 32 nt, Human
agccucccaaagugcugggauuacagguguga

SEQ ID NO: 50806 - RNA, 32 nt, Human
agccucccaaagugcugggauuacagucauga

SEQ ID NO: 50807 - RNA, 32 nt, Human
agccucccaaagugcugggauuacaguugcga

SEQ ID NO: 50808 - RNA, 32 nt, Human
agccucccaaagugcugggauuaccggcuuga

SEQ ID NO: 50809 - RNA, 32 nt, Human
agccucccaaagugcugggauuaccgguauga

SEQ ID NO: 50810 - RNA, 32 nt, Human
agccucccaaagugcugggauuacugguguga

SEQ ID NO: 50811 - RNA, 32 nt, Human
agccucccaaagugcugggauuaggugugagc

SEQ ID NO: 50812 - RNA, 32 nt, Human
agccucccaaagugcugggauuauacguaugg

SEQ ID NO: 50813 - RNA, 32 nt, Human
agccucccaaagugcugggauuauaggcauga

SEQ ID NO: 50814 - RNA, 32 nt, Human
agccucccaaagugcugggauuauaggcguga

SEQ ID NO: 50815 - RNA, 32 nt, Human
agccucccaaagugcugggauuauaggcuggg

SEQ ID NO: 50816 - RNA, 32 nt, Human
agccucccaaagugcugggauuauagguguga

SEQ ID NO: 50817 - RNA, 32 nt, Human
agccucccaaagugcugggauugcaggcauga

SEQ ID NO: 50818 - RNA, 32 nt, Human
agccucccaaagugcugggauugcaggugcga

SEQ ID NO: 50819 - RNA, 32 nt, Human
agccucccaaagugcugggauugcagguguga

SEQ ID NO: 50820 - RNA, 32 nt, Human
agccucccaaagugcuuggauuacaggcauaa

SEQ ID NO: 50821 - RNA, 32 nt, Human
agccucccaaagugguaggauuacaggcguga

SEQ ID NO: 50822 - RNA, 32 nt, Human
agccucccaaaguggugggauuacagguguga

SEQ ID NO: 50823 - RNA, 32 nt, Human
agccucccaaaguggugggauuauaggcauga

SEQ ID NO: 50824 - RNA, 32 nt, Human
agccucccaaaguguggggauuacaggugcga

SEQ ID NO: 50825 - RNA, 32 nt, Human
agccucccaaaguguugagauuacaggcauga

SEQ ID NO: 50826 - RNA, 32 nt, Human
agccucccaaaguguugggauuacagacauua

SEQ ID NO: 50827 - RNA, 32 nt, Human
agccucccaaaguguugggauuacaggcauga

SEQ ID NO: 50828 - RNA, 32 nt, Human
agccucccaaaguguugggauuacaggcguga

SEQ ID NO: 50829 - RNA, 32 nt, Human
agccucccaaaguguugggauuacagguguga

SEQ ID NO: 50830 - RNA, 32 nt, Human
agccucccaaaguguugggauuauaagcguga

SEQ ID NO: 50831 - RNA, 32 nt, Human
agccucccaaaguucugggauuacaggcauga

SEQ ID NO: 50832 - RNA, 32 nt, Human
agccucccaaaguucugggauuacagguguga

SEQ ID NO: 50833 - RNA, 32 nt, Human
agccucccaaauagcggggauuacuggugcgu

SEQ ID NO: 50834 - RNA, 32 nt, Human
agccucccaaauagcugggacuacaaggugcc

SEQ ID NO: 50835 - RNA, 32 nt, Human
agccucccaaauagcugggacuacaggcacag

SEQ ID NO: 50836 - RNA, 32 nt, Human
agccucccaaauagcugggacuacaggucuac

SEQ ID NO: 50837 - RNA, 32 nt, Human
agccucccaaauagcugggaucacuggcacaa

SEQ ID NO: 50838 - RNA, 32 nt, Human
agccucccaaauagcugggauuacaggcaccc

SEQ ID NO: 50839 - RNA, 32 nt, Human
agccucccaaauagcugggauuacaggugcau

SEQ ID NO: 50840 - RNA, 32 nt, Human
agccucccaaauagcugggauuacaguugccu

SEQ ID NO: 50841 - RNA, 32 nt, Human
agccucccaaauagcuggggcuaccaugguau

SEQ ID NO: 50842 - RNA, 32 nt, Human
agccucccaaauagcugugauuacaggcgugc

SEQ ID NO: 50843 - RNA, 32 nt, Human
agccucccaaauuacugggauuacaggcauga

SEQ ID NO: 50844 - RNA, 32 nt, Human
agccucccaaauugcugggauuacaggcauga

SEQ ID NO: 50845 - RNA, 32 nt, Human
agccucccaaauugcugggauuacaggcguga

SEQ ID NO: 50846 - RNA, 32 nt, Human
agccucccaaauugcugggauuuacaggcaug

SEQ ID NO: 50847 - RNA, 32 nt, Human
agccucccaaccacacaacacaucaaacagga

SEQ ID NO: 50848 - RNA, 32 nt, Human
agccucccaacguacugggauuacaggcguga

SEQ ID NO: 50849 - RNA, 32 nt, Human
agccucccaacgugcugggauuacagccggug

SEQ ID NO: 50850 - RNA, 32 nt, Human
agccucccaacuagcugggauuacaggcgugc

SEQ ID NO: 50851 - RNA, 32 nt, Human
agccucccaacuugcugggauuacagguguga

SEQ ID NO: 50852 - RNA, 32 nt, Human
agccucccaagaagcugggauuacaggcaugc

SEQ ID NO: 50853 - RNA, 32 nt, Human
agccucccaagagggccgggugagggaugagg

SEQ ID NO: 50854 - RNA, 32 nt, Human
agccucccaagcagcugagauuacaggugcau

SEQ ID NO: 50855 - RNA, 32 nt, Human
agccucccaagcagcugggaagauaggcacgu

SEQ ID NO: 50856 - RNA, 32 nt, Human
agccucccaagcagcugggacuacaccaccac

SEQ ID NO: 50857 - RNA, 32 nt, Human
agccucccaagcagcugggacuacauguaugu

SEQ ID NO: 50858 - RNA, 32 nt, Human
agccucccaagcagcugggauuacaggcgcac

SEQ ID NO: 50859 - RNA, 32 nt, Human
agccucccaagcagcugggauuauagacaccc

SEQ ID NO: 50860 - RNA, 32 nt, Human
agccucccaagcuuucaccaucauggaccaga

SEQ ID NO: 50861 - RNA, 32 nt, Human
agccucccaaggagcugggauuacaggcacgc

SEQ ID NO: 50862 - RNA, 32 nt, Human
agccucccaaggugcugggauuacaggcacga

SEQ ID NO: 50863 - RNA, 32 nt, Human
agccucccaaggugcugggauuacaggcauga

SEQ ID NO: 50864 - RNA, 32 nt, Human
agccucccaaggugcugggauuacagguguga

SEQ ID NO: 50865 - RNA, 32 nt, Human
agccucccaaggugcugggauugcaggccggc

SEQ ID NO: 50866 - RNA, 32 nt, Human
agccucccaaguaacugggacugcaggcacau

SEQ ID NO: 50867 - RNA, 32 nt, Human
agccucccaaguaacugggauuacaggcaugc

SEQ ID NO: 50868 - RNA, 32 nt, Human
agccucccaaguaacugggauuacaggcaugu

SEQ ID NO: 50869 - RNA, 32 nt, Human
agccucccaaguaccugggacuacaggcacgc

SEQ ID NO: 50870 - RNA, 32 nt, Human
agccucccaaguaccugggacuacaggcguga

SEQ ID NO: 50871 - RNA, 32 nt, Human
agccucccaaguaccugggacuacaggugcgu

SEQ ID NO: 50872 - RNA, 32 nt, Human
agccucccaaguaccugggacuacaggugugc

SEQ ID NO: 50873 - RNA, 32 nt, Human
agccucccaaguaccugggauuacaggagcuc

SEQ ID NO: 50874 - RNA, 32 nt, Human
agccucccaaguaccugggauuacaggcaugu

SEQ ID NO: 50875 - RNA, 32 nt, Human
agccucccaaguacugggauuacagcuuccau

SEQ ID NO: 50876 - RNA, 32 nt, Human
agccucccaaguacugggauuacaggugccca

SEQ ID NO: 50877 - RNA, 32 nt, Human
agccucccaaguagauuacaggauuacaggag

SEQ ID NO: 50878 - RNA, 32 nt, Human
agccucccaaguagcagggacuauaggugugc

SEQ ID NO: 50879 - RNA, 32 nt, Human
agccucccaaguagccaggauuacaggcaccc

SEQ ID NO: 50880 - RNA, 32 nt, Human
agccucccaaguagccgggacuacaggcgcgc

SEQ ID NO: 50881 - RNA, 32 nt, Human
agccucccaaguagccgggacuacaggugccu

SEQ ID NO: 50882 - RNA, 32 nt, Human
agccucccaaguagccgggauugcaggcgcgc

SEQ ID NO: 50883 - RNA, 32 nt, Human
agccucccaaguagccggggccacaggugugu

SEQ ID NO: 50884 - RNA, 32 nt, Human
agccucccaaguagcuagaacuacaggugugu

SEQ ID NO: 50885 - RNA, 32 nt, Human
agccucccaaguagcuagcugggacuacaggc

SEQ ID NO: 50886 - RNA, 32 nt, Human
agccucccaaguagcuaggaccacaggugcgu

SEQ ID NO: 50887 - RNA, 32 nt, Human
agccucccaaguagcuaggacuacaggcacuc

SEQ ID NO: 50888 - RNA, 32 nt, Human
agccucccaaguagcuaggacuacaggcgccc

SEQ ID NO: 50889 - RNA, 32 nt, Human
agccucccaaguagcuaggacuacaggcgugu

SEQ ID NO: 50890 - RNA, 32 nt, Human
agccucccaaguagcuaggacuacaggugccc

SEQ ID NO: 50891 - RNA, 32 nt, Human
agccucccaaguagcuaggacuacaggugugc

SEQ ID NO: 50892 - RNA, 32 nt, Human
agccucccaaguagcuaggacugcaggcacca

SEQ ID NO: 50893 - RNA, 32 nt, Human
agccucccaaguagcuaggauuacagacaccc

SEQ ID NO: 50894 - RNA, 32 nt, Human
agccucccaaguagcuaggauuacaggcaugu

SEQ ID NO: 50895 - RNA, 32 nt, Human
agccucccaaguagcuagggauacagacacau

SEQ ID NO: 50896 - RNA, 32 nt, Human
agccucccaaguagcuccgauuacaggcaccc

SEQ ID NO: 50897 - RNA, 32 nt, Human
agccucccaaguagcucggacuacaggcgucc

SEQ ID NO: 50898 - RNA, 32 nt, Human
agccucccaaguagcugagacuacaggcacau

SEQ ID NO: 50899 - RNA, 32 nt, Human
agccucccaaguagcugagacuacaggcgugc

SEQ ID NO: 50900 - RNA, 32 nt, Human
agccucccaaguagcugagacuacaggugugc

SEQ ID NO: 50901 - RNA, 32 nt, Human
agccucccaaguagcugagacuacaggugugu

SEQ ID NO: 50902 - RNA, 32 nt, Human
agccucccaaguagcugagacuacagguucac

SEQ ID NO: 50903 - RNA, 32 nt, Human
agccucccaaguagcugagacuccagguauau

SEQ ID NO: 50904 - RNA, 32 nt, Human
agccucccaaguagcugagacugcaggcacga

SEQ ID NO: 50905 - RNA, 32 nt, Human
agccucccaaguagcugagauuacagaugcaa

SEQ ID NO: 50906 - RNA, 32 nt, Human
agccucccaaguagcugagauuacaggcacau

SEQ ID NO: 50907 - RNA, 32 nt, Human
agccucccaaguagcugagauuacaggugugc

SEQ ID NO: 50908 - RNA, 32 nt, Human
agccucccaaguagcugcgacuauggguguga

SEQ ID NO: 50909 - RNA, 32 nt, Human
agccucccaaguagcuggaacuacaggcucau

SEQ ID NO: 50910 - RNA, 32 nt, Human
agccucccaaguagcuggaacuauaggcacaa

SEQ ID NO: 50911 - RNA, 32 nt, Human
agccucccaaguagcuggaauuacaggagccc

SEQ ID NO: 50912 - RNA, 32 nt, Human
agccucccaaguagcuggaauuacaggcacau

SEQ ID NO: 50913 - RNA, 32 nt, Human
agccucccaaguagcuggaauuacaggcaccu

SEQ ID NO: 50914 - RNA, 32 nt, Human
agccucccaaguagcuggaauuacaggcgugu

SEQ ID NO: 50915 - RNA, 32 nt, Human
agccucccaaguagcuggaauuacagggaccc

SEQ ID NO: 50916 - RNA, 32 nt, Human
agccucccaaguagcuggauuacaggugcaug

SEQ ID NO: 50917 - RNA, 32 nt, Human
agccucccaaguagcuggcacuacagacacgc

SEQ ID NO: 50918 - RNA, 32 nt, Human
agccucccaaguagcugggaaaacaggccugu

SEQ ID NO: 50919 - RNA, 32 nt, Human
agccucccaaguagcugggaauacaggcacgc

SEQ ID NO: 50920 - RNA, 32 nt, Human
agccucccaaguagcugggaauacaggugucu

SEQ ID NO: 50921 - RNA, 32 nt, Human
agccucccaaguagcugggaauauagguguga

SEQ ID NO: 50922 - RNA, 32 nt, Human
agccucccaaguagcugggacaacaggugaaa

SEQ ID NO: 50923 - RNA, 32 nt, Human
agccucccaaguagcugggacaacaggugugc

SEQ ID NO: 50924 - RNA, 32 nt, Human
agccucccaaguagcugggaccacacgcaugc

SEQ ID NO: 50925 - RNA, 32 nt, Human
agccucccaaguagcugggaccacaggcagau

SEQ ID NO: 50926 - RNA, 32 nt, Human
agccucccaaguagcugggaccacaggcaugc

SEQ ID NO: 50927 - RNA, 32 nt, Human
agccucccaaguagcugggaccacaggcgccc

SEQ ID NO: 50928 - RNA, 32 nt, Human
agccucccaaguagcugggaccaccaugccca

SEQ ID NO: 50929 - RNA, 32 nt, Human
agccucccaaguagcugggaccgcaggcacac

SEQ ID NO: 50930 - RNA, 32 nt, Human
agccucccaaguagcugggacuacaagugcac

SEQ ID NO: 50931 - RNA, 32 nt, Human
agccucccaaguagcugggacuacaagugugu

SEQ ID NO: 50932 - RNA, 32 nt, Human
agccucccaaguagcugggacuacagaaucaa

SEQ ID NO: 50933 - RNA, 32 nt, Human
agccucccaaguagcugggacuacagaugcac

SEQ ID NO: 50934 - RNA, 32 nt, Human
agccucccaaguagcugggacuacaggcacac

SEQ ID NO: 50935 - RNA, 32 nt, Human
agccucccaaguagcugggacuacaggcaccc

SEQ ID NO: 50936 - RNA, 32 nt, Human
agccucccaaguagcugggacuacaggcaccu

SEQ ID NO: 50937 - RNA, 32 nt, Human
agccucccaaguagcugggacuacaggcacgu

SEQ ID NO: 50938 - RNA, 32 nt, Human
agccucccaaguagcugggacuacaggcauga

SEQ ID NO: 50939 - RNA, 32 nt, Human
agccucccaaguagcugggacuacaggcaugc

SEQ ID NO: 50940 - RNA, 32 nt, Human
agccucccaaguagcugggacuacaggcaugu

SEQ ID NO: 50941 - RNA, 32 nt, Human
agccucccaaguagcugggacuacaggcgccc

SEQ ID NO: 50942 - RNA, 32 nt, Human
agccucccaaguagcugggacuacaggcgccu

SEQ ID NO: 50943 - RNA, 32 nt, Human
agccucccaaguagcugggacuacaggcuuuc

SEQ ID NO: 50944 - RNA, 32 nt, Human
agccucccaaguagcugggacuacaggugcac

SEQ ID NO: 50945 - RNA, 32 nt, Human
agccucccaaguagcugggacuacaggugcau

SEQ ID NO: 50946 - RNA, 32 nt, Human
agccucccaaguagcugggacuacaggugcuc

SEQ ID NO: 50947 - RNA, 32 nt, Human
agccucccaaguagcugggacuacagguguac

SEQ ID NO: 50948 - RNA, 32 nt, Human
agccucccaaguagcugggacuacagguguau

SEQ ID NO: 50949 - RNA, 32 nt, Human
agccucccaaguagcugggacuacaggugugc

SEQ ID NO: 50950 - RNA, 32 nt, Human
agccucccaaguagcugggacuacaggugugu

SEQ ID NO: 50951 - RNA, 32 nt, Human
agccucccaaguagcugggacuacagguugcu

SEQ ID NO: 50952 - RNA, 32 nt, Human
agccucccaaguagcugggacuacagucaugu

SEQ ID NO: 50953 - RNA, 32 nt, Human
agccucccaaguagcugggacuacaguugugc

SEQ ID NO: 50954 - RNA, 32 nt, Human
agccucccaaguagcugggacuacaugcacau

SEQ ID NO: 50955 - RNA, 32 nt, Human
agccucccaaguagcugggacuacccgugcau

SEQ ID NO: 50956 - RNA, 32 nt, Human
agccucccaaguagcugggacuacggaugccu

SEQ ID NO: 50957 - RNA, 32 nt, Human
agccucccaaguagcugggacuacgggcacac

SEQ ID NO: 50958 - RNA, 32 nt, Human
agccucccaaguagcugggacuacgggcacau

SEQ ID NO: 50959 - RNA, 32 nt, Human
agccucccaaguagcugggacuacuggcaccc

SEQ ID NO: 50960 - RNA, 32 nt, Human
agccucccaaguagcugggacuauaggcacac

SEQ ID NO: 50961 - RNA, 32 nt, Human
agccucccaaguagcugggacuauaggcaccu

SEQ ID NO: 50962 - RNA, 32 nt, Human
agccucccaaguagcugggacuauaggcgccc

SEQ ID NO: 50963 - RNA, 32 nt, Human
agccucccaaguagcugggacuauaggugcgu

SEQ ID NO: 50964 - RNA, 32 nt, Human
agccucccaaguagcugggacuauagucacuu

SEQ ID NO: 50965 - RNA, 32 nt, Human
agccucccaaguagcugggacugcaggcauga

SEQ ID NO: 50966 - RNA, 32 nt, Human
agccucccaaguagcugggacugcaggugugc

SEQ ID NO: 50967 - RNA, 32 nt, Human
agccucccaaguagcugggacuucagacgccc

SEQ ID NO: 50968 - RNA, 32 nt, Human
agccucccaaguagcugggagccugggcaugc

SEQ ID NO: 50969 - RNA, 32 nt, Human
agccucccaaguagcugggaggacagguguga

SEQ ID NO: 50970 - RNA, 32 nt, Human
agccucccaaguagcugggaguacagcgucug

SEQ ID NO: 50971 - RNA, 32 nt, Human
agccucccaaguagcugggauaacaggcgccc

SEQ ID NO: 50972 - RNA, 32 nt, Human
agccucccaaguagcugggaugacaggcgcac

SEQ ID NO: 50973 - RNA, 32 nt, Human
agccucccaaguagcugggauuaaaggcacgu

SEQ ID NO: 50974 - RNA, 32 nt, Human
agccucccaaguagcugggauuacaccaccau

SEQ ID NO: 50975 - RNA, 32 nt, Human
agccucccaaguagcugggauuacagacucau

SEQ ID NO: 50976 - RNA, 32 nt, Human
agccucccaaguagcugggauuacagaucaug

SEQ ID NO: 50977 - RNA, 32 nt, Human
agccucccaaguagcugggauuacagaugugu

SEQ ID NO: 50978 - RNA, 32 nt, Human
agccucccaaguagcugggauuacagauugau

SEQ ID NO: 50979 - RNA, 32 nt, Human
agccucccaaguagcugggauuacagcgauug

SEQ ID NO: 50980 - RNA, 32 nt, Human
agccucccaaguagcugggauuacaggcacaa

SEQ ID NO: 50981 - RNA, 32 nt, Human
agccucccaaguagcugggauuacaggcacag

SEQ ID NO: 50982 - RNA, 32 nt, Human
agccucccaaguagcugggauuacaggcacau

SEQ ID NO: 50983 - RNA, 32 nt, Human
agccucccaaguagcugggauuacaggcaccc

SEQ ID NO: 50984 - RNA, 32 nt, Human
agccucccaaguagcugggauuacaggcaccu

SEQ ID NO: 50985 - RNA, 32 nt, Human
agccucccaaguagcugggauuacaggcacgc

SEQ ID NO: 50986 - RNA, 32 nt, Human
agccucccaaguagcugggauuacaggcagac

SEQ ID NO: 50987 - RNA, 32 nt, Human
agccucccaaguagcugggauuacaggcagca

SEQ ID NO: 50988 - RNA, 32 nt, Human
agccucccaaguagcugggauuacaggcauac

SEQ ID NO: 50989 - RNA, 32 nt, Human
agccucccaaguagcugggauuacaggcaugc

SEQ ID NO: 50990 - RNA, 32 nt, Human
agccucccaaguagcugggauuacaggcaugg

SEQ ID NO: 50991 - RNA, 32 nt, Human
agccucccaaguagcugggauuacaggcaugu

SEQ ID NO: 50992 - RNA, 32 nt, Human
agccucccaaguagcugggauuacaggcgcac

SEQ ID NO: 50993 - RNA, 32 nt, Human
agccucccaaguagcugggauuacaggcgcau

SEQ ID NO: 50994 - RNA, 32 nt, Human
agccucccaaguagcugggauuacaggcgccu

SEQ ID NO: 50995 - RNA, 32 nt, Human
agccucccaaguagcugggauuacaggcgcgu

SEQ ID NO: 50996 - RNA, 32 nt, Human
agccucccaaguagcugggauuacaggcgucc

SEQ ID NO: 50997 - RNA, 32 nt, Human
agccucccaaguagcugggauuacaggcgugc

SEQ ID NO: 50998 - RNA, 32 nt, Human
agccucccaaguagcugggauuacaggcgugu

SEQ ID NO: 50999 - RNA, 32 nt, Human
agccucccaaguagcugggauuacaggugcac

SEQ ID NO: 51000 - RNA, 32 nt, Human
agccucccaaguagcugggauuacaggugcag

SEQ ID NO: 51001 - RNA, 32 nt, Human
agccucccaaguagcugggauuacaggugccc

SEQ ID NO: 51002 - RNA, 32 nt, Human
agccucccaaguagcugggauuacaggugccu

SEQ ID NO: 51003 - RNA, 32 nt, Human
agccucccaaguagcugggauuacaggugcuc

SEQ ID NO: 51004 - RNA, 32 nt, Human
agccucccaaguagcugggauuacaggugucc

SEQ ID NO: 51005 - RNA, 32 nt, Human
agccucccaaguagcugggauuacagguguga

SEQ ID NO: 51006 - RNA, 32 nt, Human
agccucccaaguagcugggauuacaggugugc

SEQ ID NO: 51007 - RNA, 32 nt, Human
agccucccaaguagcugggauuacaggugugu

SEQ ID NO: 51008 - RNA, 32 nt, Human
agccucccaaguagcugggauuacagucaggc

SEQ ID NO: 51009 - RNA, 32 nt, Human
agccucccaaguagcugggauuacagugccug

SEQ ID NO: 51010 - RNA, 32 nt, Human
agccucccaaguagcugggauuacaguuccca

SEQ ID NO: 51011 - RNA, 32 nt, Human
agccucccaaguagcugggauuacaguuucca

SEQ ID NO: 51012 - RNA, 32 nt, Human
agccucccaaguagcugggauuacaugugugu

SEQ ID NO: 51013 - RNA, 32 nt, Human
agccucccaaguagcugggauuacgggcaugc

SEQ ID NO: 51014 - RNA, 32 nt, Human
agccucccaaguagcugggauuacuggugcac

SEQ ID NO: 51015 - RNA, 32 nt, Human
agccucccaaguagcugggauuauaggcaccu

SEQ ID NO: 51016 - RNA, 32 nt, Human
agccucccaaguagcugggauuauaggugccc

SEQ ID NO: 51017 - RNA, 32 nt, Human
agccucccaaguagcugggauuauaggugugu

SEQ ID NO: 51018 - RNA, 32 nt, Human
agccucccaaguagcugggauugcaggcgccc

SEQ ID NO: 51019 - RNA, 32 nt, Human
agccucccaaguagcuggggacuacaggugcg

SEQ ID NO: 51020 - RNA, 32 nt, Human
agccucccaaguagcuggggcuacaggcaccc

SEQ ID NO: 51021 - RNA, 32 nt, Human
agccucccaaguagcugggguuacaggcauuu

SEQ ID NO: 51022 - RNA, 32 nt, Human
agccucccaaguagcuggguuuauaggugccc

SEQ ID NO: 51023 - RNA, 32 nt, Human
agccucccaaguagcuggguuuauaugugccc

SEQ ID NO: 51024 - RNA, 32 nt, Human
agccucccaaguagcugguaccacaggcgcca

SEQ ID NO: 51025 - RNA, 32 nt, Human
agccucccaaguagcugguacuacaggugcgu

SEQ ID NO: 51026 - RNA, 32 nt, Human
agccucccaaguagcugugacuaaaggugcac

SEQ ID NO: 51027 - RNA, 32 nt, Human
agccucccaaguagcugugacuacaggcgcau

SEQ ID NO: 51028 - RNA, 32 nt, Human
agccucccaaguagcuuggacuacaggcccug

SEQ ID NO: 51029 - RNA, 32 nt, Human
agccucccaaguagcuuggacuauaggugcau

SEQ ID NO: 51030 - RNA, 32 nt, Human
agccucccaaguagcuuggauuacagagguug

SEQ ID NO: 51031 - RNA, 32 nt, Human
agccucccaaguaggugggacuacaggugccc

SEQ ID NO: 51032 - RNA, 32 nt, Human
agccucccaaguaggugggacuauagguucgc

SEQ ID NO: 51033 - RNA, 32 nt, Human
agccucccaaguaggugggauuacaggcaugc

SEQ ID NO: 51034 - RNA, 32 nt, Human
agccucccaaguaggugggauuacaggcgccc

SEQ ID NO: 51035 - RNA, 32 nt, Human
agccucccaaguaguugggacuacaggcaugc

SEQ ID NO: 51036 - RNA, 32 nt, Human
agccucccaaguaguugggauuacaggcaccu

SEQ ID NO: 51037 - RNA, 32 nt, Human
agccucccaaguaguugggauuacaggcaugc

SEQ ID NO: 51038 - RNA, 32 nt, Human
agccucccaaguaguugggauuacgggcaugc

SEQ ID NO: 51039 - RNA, 32 nt, Human
agccucccaaguaucugggacuacaggcaugc

SEQ ID NO: 51040 - RNA, 32 nt, Human
agccucccaagucacugggauuacaggugccc

SEQ ID NO: 51041 - RNA, 32 nt, Human
agccucccaaguggcuaagacuuaacaaacag

SEQ ID NO: 51042 - RNA, 32 nt, Human
agccucccaaguggcugggauuacaggcgcaa

SEQ ID NO: 51043 - RNA, 32 nt, Human
agccucccaaguggcugggauuauaggugccc

SEQ ID NO: 51044 - RNA, 32 nt, Human
agccucccaaguggcugggauugcaggcauga

SEQ ID NO: 51045 - RNA, 32 nt, Human
agccucccaaugugcugagauugcaggcauga

SEQ ID NO: 51046 - RNA, 32 nt, Human
agccucccaaugugcugggauuacaggcauga

SEQ ID NO: 51047 - RNA, 32 nt, Human
agccucccacaagaccuggggcucagggcagc

SEQ ID NO: 51048 - RNA, 32 nt, Human
agccucccacagugcugggauuacaggcaugg

SEQ ID NO: 51049 - RNA, 32 nt, Human
agccucccacagugcugggauuacaggcguga

SEQ ID NO: 51050 - RNA, 32 nt, Human
agccucccacagugcugggauuagaggcauga

SEQ ID NO: 51051 - RNA, 32 nt, Human
agccucccaccucggucuucugaguagcuggg

SEQ ID NO: 51052 - RNA, 32 nt, Human
agccucccagacggcugggauuccaggcguga

SEQ ID NO: 51053 - RNA, 32 nt, Human
agccucccagacugcugagauuacaggcguga

SEQ ID NO: 51054 - RNA, 32 nt, Human
agccucccagacuguugggauuacaggcauga

SEQ ID NO: 51055 - RNA, 32 nt, Human
agccucccagaguacugggauuacaggcucuu

SEQ ID NO: 51056 - RNA, 32 nt, Human
agccucccagagugcuaggauuacaggcauga

SEQ ID NO: 51057 - RNA, 32 nt, Human
agccucccagagugcuaggauuacaggccuuu

SEQ ID NO: 51058 - RNA, 32 nt, Human
agccucccagagugcugggauuacaauuguga

SEQ ID NO: 51059 - RNA, 32 nt, Human
agccucccagagugcugggauuacagguguga

SEQ ID NO: 51060 - RNA, 32 nt, Human
agccucccagauagcugggacuacaggcacac

SEQ ID NO: 51061 - RNA, 29 nt, Human
agccucccaggagggagacgcuggggugc

SEQ ID NO: 51062 - RNA, 32 nt, Human
agccucccaggagggagacgcuggggugcaaa

SEQ ID NO: 51063 - RNA, 32 nt, Human
agccucccagguagcugggaauacaagcgugu

SEQ ID NO: 51064 - RNA, 32 nt, Human
agccucccagguagcugggacuacaggcacac

SEQ ID NO: 51065 - RNA, 32 nt, Human
agccucccagguagcugggacuacaggcgugc

SEQ ID NO: 51066 - RNA, 32 nt, Human
agccucccagguagcugggacuauaggcacgu

SEQ ID NO: 51067 - RNA, 32 nt, Human
agccucccagguagcugggacuaugggugcac

SEQ ID NO: 51068 - RNA, 32 nt, Human
agccucccagguagcugggauagcaggugugu

SEQ ID NO: 51069 - RNA, 32 nt, Human
agccucccagguagcugggauuacaggcaccc

SEQ ID NO: 51070 - RNA, 32 nt, Human
agccucccagguagcugggauuacaggcaugc

SEQ ID NO: 51071 - RNA, 32 nt, Human
agccucccagguagcugggauuacaggcuccc

SEQ ID NO: 51072 - RNA, 32 nt, Human
agccucccagguagcugggauuucaggugugc

SEQ ID NO: 51073 - RNA, 32 nt, Human
agccucccagguggcugggauuacaggcaugc

SEQ ID NO: 51074 - RNA, 32 nt, Human
agccucccagugugcugggauuacaggcauga

SEQ ID NO: 51075 - RNA, 32 nt, Human
agccucccauauagcugggauuauaggugccu

SEQ ID NO: 51076 - RNA, 32 nt, Human
agccucccaucgccuucaaccuggcugcauuc

SEQ ID NO: 51077 - RNA, 32 nt, Human
agccuccccaacuacuccagacuguccugcuc

SEQ ID NO: 51078 - RNA, 32 nt, Human
agccuccccaagugcugggauuacaggcguga

SEQ ID NO: 51079 - RNA, 21 nt, Human
agccuccccaaucccagccca

SEQ ID NO: 51080 - RNA, 32 nt, Human
agccuccccagcagcugggacuacaggcacac

SEQ ID NO: 51081 - RNA, 32 nt, Human
agccuccccagcagcugggacuacaggcaccc

SEQ ID NO: 51082 - RNA, 32 nt, Human
agccuccccagcagcugggacuacaggugcac

SEQ ID NO: 51083 - RNA, 32 nt, Human
agccuccccaguagcugagacuauacaggugc

SEQ ID NO: 51084 - RNA, 32 nt, Human
agccuccccaguagcugagauugcaggcacau

SEQ ID NO: 51085 - RNA, 32 nt, Human
agccuccccaguagcuggaacuacaggcaugc

SEQ ID NO: 51086 - RNA, 32 nt, Human
agccuccccaguagcuggaacuacaggcgugc

SEQ ID NO: 51087 - RNA, 32 nt, Human
agccuccccaguagcuggaacuacaggugugu

SEQ ID NO: 51088 - RNA, 32 nt, Human
agccuccccaguagcugggaauacaggcaccc

SEQ ID NO: 51089 - RNA, 32 nt, Human
agccuccccaguagcugggaccacaggcucau

SEQ ID NO: 51090 - RNA, 32 nt, Human
agccuccccaguagcugggacuacagacgugu

SEQ ID NO: 51091 - RNA, 32 nt, Human
agccuccccaguagcugggacuacaggcaugu

SEQ ID NO: 51092 - RNA, 32 nt, Human
agccuccccaguagcugggacuacaggccucc

SEQ ID NO: 51093 - RNA, 32 nt, Human
agccuccccaguagcugggacuacaggcgccc

SEQ ID NO: 51094 - RNA, 32 nt, Human
agccuccccaguagcugggacuacaggcgccu

SEQ ID NO: 51095 - RNA, 32 nt, Human
agccuccccaguagcugggacuacaggugugc

SEQ ID NO: 51096 - RNA, 32 nt, Human
agccuccccaguagcugggacuacggggucgc

SEQ ID NO: 51097 - RNA, 32 nt, Human
agccuccccaguagcugggacuccaggcaccc

SEQ ID NO: 51098 - RNA, 32 nt, Human
agccuccccaguagcugggaucacaggugccc

SEQ ID NO: 51099 - RNA, 32 nt, Human
agccuccccaguagcugggauuacaggcacca

SEQ ID NO: 51100 - RNA, 32 nt, Human
agccuccccaguagcugggauuacaggcaccc

SEQ ID NO: 51101 - RNA, 32 nt, Human
agccuccccaguagcugggauuacaggcaccu

SEQ ID NO: 51102 - RNA, 32 nt, Human
agccuccccaguagcugggauuacaggcgccc

SEQ ID NO: 51103 - RNA, 32 nt, Human
agccuccccaguagcugggauuacaggcgccg

SEQ ID NO: 51104 - RNA, 32 nt, Human
agccuccccaguagcugggauuacaggcgugg

SEQ ID NO: 51105 - RNA, 32 nt, Human
agccuccccaguagcugggauuacaggcucau

SEQ ID NO: 51106 - RNA, 32 nt, Human
agccuccccaguagcugggauuacaguguuau

SEQ ID NO: 51107 - RNA, 32 nt, Human
agccuccccaguagcugugauuaaaggcgccu

SEQ ID NO: 51108 - RNA, 32 nt, Human
agccucccccaagcuccuccacugacccagga

SEQ ID NO: 51109 - RNA, 32 nt, Human
agccucccccgcagcuaggauuacaggcacgc

SEQ ID NO: 51110 - RNA, 32 nt, Human
agccucccccguugccccucuggauccacugc

SEQ ID NO: 51111 - RNA, 32 nt, Human
agccuccccgagugcugggauuaaagacguga

SEQ ID NO: 51112 - RNA, 20 nt, Human
agccuccccuagcccacccc

SEQ ID NO: 51113 - RNA, 32 nt, Human
agccuccccucaggcuuuccagucaccaggga

SEQ ID NO: 51114 - RNA, 32 nt, Human
agccuccccucggcgaucgcgcagccccaucu

SEQ ID NO: 51115 - RNA, 23 nt, Human
agccuccccucuuccccucccca

SEQ ID NO: 51116 - RNA, 32 nt, Human
agccuccccugccccugccugcccacccugcc

SEQ ID NO: 51117 - RNA, 32 nt, Human
agccuccccuggugaagacacaaacugucacc

SEQ ID NO: 51118 - RNA, 23 nt, Human
agccuccccuucuucccgcccca

SEQ ID NO: 51119 - RNA, 32 nt, Human
agccucccgaaaugcuuugggauuacgggugu

SEQ ID NO: 51120 - RNA, 32 nt, Human
agccucccgaagagcugggauuacacgcauac

SEQ ID NO: 51121 - RNA, 32 nt, Human
agccucccgaagugcugggauuacaggcguaa

SEQ ID NO: 51122 - RNA, 32 nt, Human
agccucccgaagugcugggauuacaggcguga

SEQ ID NO: 51123 - RNA, 32 nt, Human
agccucccgaaguguugggauuacaggcacga

SEQ ID NO: 51124 - RNA, 32 nt, Human
agccucccgaauagcugggacuacagguguga

SEQ ID NO: 51125 - RNA, 32 nt, Human
agccucccgaauagcugggauuacacgugccc

SEQ ID NO: 51126 - RNA, 32 nt, Human
agccucccgaauagcugggauuacaggcgccc

SEQ ID NO: 51127 - RNA, 32 nt, Human
agccucccgaauaucugggauuacaggugccc

SEQ ID NO: 51128 - RNA, 32 nt, Human
agccucccgagcagcugggacuacaggcgccc

SEQ ID NO: 51129 - RNA, 32 nt, Human
agccucccgagcagcugggacuacaggcgugc

SEQ ID NO: 51130 - RNA, 32 nt, Human
agccucccgagcagcugggauuacaggcgccc

SEQ ID NO: 51131 - RNA, 32 nt, Human
agccucccgaguaacugggacuacagcugcag

SEQ ID NO: 51132 - RNA, 32 nt, Human
agccucccgaguaacugggacuacaggcgcgu

SEQ ID NO: 51133 - RNA, 32 nt, Human
agccucccgaguaacugggacuacaggugccc

SEQ ID NO: 51134 - RNA, 32 nt, Human
agccucccgaguaacugggauuacaggcgggc

SEQ ID NO: 51135 - RNA, 32 nt, Human
agccucccgaguaacugggauuacaggcuugu

SEQ ID NO: 51136 - RNA, 32 nt, Human
agccucccgaguaacugggauuauaggcaugc

SEQ ID NO: 51137 - RNA, 32 nt, Human
agccucccgaguaccugagauuagcccaggua

SEQ ID NO: 51138 - RNA, 32 nt, Human
agccucccgaguaccugggacuacaggcacuc

SEQ ID NO: 51139 - RNA, 32 nt, Human
agccucccgaguaccugggauuacaggcaugc

SEQ ID NO: 51140 - RNA, 32 nt, Human
agccucccgaguaccugggauuacaggcaugu

SEQ ID NO: 51141 - RNA, 32 nt, Human
agccucccgaguacugggaauauaggugcacg

SEQ ID NO: 51142 - RNA, 32 nt, Human
agccucccgaguacugggacuacaggcgcccg

SEQ ID NO: 51143 - RNA, 32 nt, Human
agccucccgaguagcagggauuaccggugugc

SEQ ID NO: 51144 - RNA, 32 nt, Human
agccucccgaguagccaggauuaaaggugccu

SEQ ID NO: 51145 - RNA, 32 nt, Human
agccucccgaguagccgggacuacaggcgccc

SEQ ID NO: 51146 - RNA, 32 nt, Human
agccucccgaguagcggggauuacaggcacgc

SEQ ID NO: 51147 - RNA, 32 nt, Human
agccucccgaguagcggggauuacaggcgcac

SEQ ID NO: 51148 - RNA, 32 nt, Human
agccucccgaguagcuaggacuacaggcacgu

SEQ ID NO: 51149 - RNA, 32 nt, Human
agccucccgaguagcuaggauuacagaagcau

SEQ ID NO: 51150 - RNA, 32 nt, Human
agccucccgaguagcuaggauuacaggcgccc

SEQ ID NO: 51151 - RNA, 32 nt, Human
agccucccgaguagcucagauuacaggcaugu

SEQ ID NO: 51152 - RNA, 32 nt, Human
agccucccgaguagcugagaccacaggugcgu

SEQ ID NO: 51153 - RNA, 32 nt, Human
agccucccgaguagcugagacuacaggcaccu

SEQ ID NO: 51154 - RNA, 32 nt, Human
agccucccgaguagcugagacuacaggcaugc

SEQ ID NO: 51155 - RNA, 32 nt, Human
agccucccgaguagcugagacuacaggugcau

SEQ ID NO: 51156 - RNA, 32 nt, Human
agccucccgaguagcugagacuucaggugcau

SEQ ID NO: 51157 - RNA, 32 nt, Human
agccucccgaguagcugagauuacaggcgccc

SEQ ID NO: 51158 - RNA, 32 nt, Human
agccucccgaguagcugagauuacaggugcac

SEQ ID NO: 51159 - RNA, 32 nt, Human
agccucccgaguagcugagauuacaggugcgc

SEQ ID NO: 51160 - RNA, 32 nt, Human
agccucccgaguagcugagauuacagguuuuu

SEQ ID NO: 51161 - RNA, 32 nt, Human
agccucccgaguagcugagauuauaggcaccu

SEQ ID NO: 51162 - RNA, 32 nt, Human
agccucccgaguagcugagauuauaggcgugc

SEQ ID NO: 51163 - RNA, 32 nt, Human
agccucccgaguagcugcaauuacaggagccu

SEQ ID NO: 51164 - RNA, 32 nt, Human
agccucccgaguagcugcgacuacaggcgccg

SEQ ID NO: 51165 - RNA, 32 nt, Human
agccucccgaguagcuggaaccacagaacauc

SEQ ID NO: 51166 - RNA, 32 nt, Human
agccucccgaguagcuggaacuacaggcacac

SEQ ID NO: 51167 - RNA, 32 nt, Human
agccucccgaguagcuggaauuacaggcaccu

SEQ ID NO: 51168 - RNA, 32 nt, Human
agccucccgaguagcuggaauuacaggcaugc

SEQ ID NO: 51169 - RNA, 32 nt, Human
agccucccgaguagcuggaauuauaggcgugc

SEQ ID NO: 51170 - RNA, 32 nt, Human
agccucccgaguagcuggaauugcagacaccc

SEQ ID NO: 51171 - RNA, 32 nt, Human
agccucccgaguagcuggacuaacaggcacac

SEQ ID NO: 51172 - RNA, 32 nt, Human
agccucccgaguagcuggauuuacagaugcau

SEQ ID NO: 51173 - RNA, 32 nt, Human
agccucccgaguagcuggcacuacaggcaccc

SEQ ID NO: 51174 - RNA, 32 nt, Human
agccucccgaguagcuggcauuacaggcaugu

SEQ ID NO: 51175 - RNA, 32 nt, Human
agccucccgaguagcuggcauuacaggcgccc

SEQ ID NO: 51176 - RNA, 32 nt, Human
agccucccgaguagcuggcauuacaggcgccu

SEQ ID NO: 51177 - RNA, 32 nt, Human
agccucccgaguagcugggacaacagguacgc

SEQ ID NO: 51178 - RNA, 32 nt, Human
agccucccgaguagcugggaccacaggggccc

SEQ ID NO: 51179 - RNA, 32 nt, Human
agccucccgaguagcugggaccacaggugccu

SEQ ID NO: 51180 - RNA, 32 nt, Human
agccucccgaguagcugggaccacagguguau

SEQ ID NO: 51181 - RNA, 32 nt, Human
agccucccgaguagcugggaccgcgggugugu

SEQ ID NO: 51182 - RNA, 32 nt, Human
agccucccgaguagcugggacuacaagcggcu

SEQ ID NO: 51183 - RNA, 32 nt, Human
agccucccgaguagcugggacuacaagugugc

SEQ ID NO: 51184 - RNA, 32 nt, Human
agccucccgaguagcugggacuacacccagcu

SEQ ID NO: 51185 - RNA, 32 nt, Human
agccucccgaguagcugggacuacagaagugc

SEQ ID NO: 51186 - RNA, 32 nt, Human
agccucccgaguagcugggacuacagacaccc

SEQ ID NO: 51187 - RNA, 32 nt, Human
agccucccgaguagcugggacuacagagucuu

SEQ ID NO: 51188 - RNA, 32 nt, Human
agccucccgaguagcugggacuacaggagcgu

SEQ ID NO: 51189 - RNA, 32 nt, Human
agccucccgaguagcugggacuacaggcacaa

SEQ ID NO: 51190 - RNA, 32 nt, Human
agccucccgaguagcugggacuacaggcaccc

SEQ ID NO: 51191 - RNA, 32 nt, Human
agccucccgaguagcugggacuacaggcaccu

SEQ ID NO: 51192 - RNA, 32 nt, Human
agccucccgaguagcugggacuacaggcacgu

SEQ ID NO: 51193 - RNA, 32 nt, Human
agccucccgaguagcugggacuacaggcaggc

SEQ ID NO: 51194 - RNA, 32 nt, Human
agccucccgaguagcugggacuacaggcaugc

SEQ ID NO: 51195 - RNA, 32 nt, Human
agccucccgaguagcugggacuacaggcaugu

SEQ ID NO: 51196 - RNA, 32 nt, Human
agccucccgaguagcugggacuacaggcgcca

SEQ ID NO: 51197 - RNA, 32 nt, Human
agccucccgaguagcugggacuacaggcgccc

SEQ ID NO: 51198 - RNA, 32 nt, Human
agccucccgaguagcugggacuacaggcgccu

SEQ ID NO: 51199 - RNA, 32 nt, Human
agccucccgaguagcugggacuacaggcgcgc

SEQ ID NO: 51200 - RNA, 32 nt, Human
agccucccgaguagcugggacuacaggcgcgu

SEQ ID NO: 51201 - RNA, 32 nt, Human
agccucccgaguagcugggacuacaggcggcc

SEQ ID NO: 51202 - RNA, 32 nt, Human
agccucccgaguagcugggacuacaggcgucc

SEQ ID NO: 51203 - RNA, 32 nt, Human
agccucccgaguagcugggacuacaggcgugc

SEQ ID NO: 51204 - RNA, 32 nt, Human
agccucccgaguagcugggacuacaggcgugu

SEQ ID NO: 51205 - RNA, 32 nt, Human
agccucccgaguagcugggacuacaggggccc

SEQ ID NO: 51206 - RNA, 32 nt, Human
agccucccgaguagcugggacuacaggugcac

SEQ ID NO: 51207 - RNA, 32 nt, Human
agccucccgaguagcugggacuacaggugcau

SEQ ID NO: 51208 - RNA, 32 nt, Human
agccucccgaguagcugggacuacaggugcca

SEQ ID NO: 51209 - RNA, 32 nt, Human
agccucccgaguagcugggacuacaggugccc

SEQ ID NO: 51210 - RNA, 32 nt, Human
agccucccgaguagcugggacuacaggugccu

SEQ ID NO: 51211 - RNA, 32 nt, Human
agccucccgaguagcugggacuacaggugucc

SEQ ID NO: 51212 - RNA, 32 nt, Human
agccucccgaguagcugggacuacaggugugc

SEQ ID NO: 51213 - RNA, 32 nt, Human
agccucccgaguagcugggacuacaggugugg

SEQ ID NO: 51214 - RNA, 32 nt, Human
agccucccgaguagcugggacuacgggcacgc

SEQ ID NO: 51215 - RNA, 32 nt, Human
agccucccgaguagcugggacuacugguacau

SEQ ID NO: 51216 - RNA, 32 nt, Human
agccucccgaguagcugggacuagaggaacgu

SEQ ID NO: 51217 - RNA, 32 nt, Human
agccucccgaguagcugggacuauagaugcgc

SEQ ID NO: 51218 - RNA, 32 nt, Human
agccucccgaguagcugggacuauaggcgccc

SEQ ID NO: 51219 - RNA, 32 nt, Human
agccucccgaguagcugggacuauaggugggc

SEQ ID NO: 51220 - RNA, 32 nt, Human
agccucccgaguagcugggacuauaggugugu

SEQ ID NO: 51221 - RNA, 32 nt, Human
agccucccgaguagcugggacugcaggcacac

SEQ ID NO: 51222 - RNA, 32 nt, Human
agccucccgaguagcugggacugcaggugugu

SEQ ID NO: 51223 - RNA, 32 nt, Human
agccucccgaguagcugggaguacaggcacac

SEQ ID NO: 51224 - RNA, 32 nt, Human
agccucccgaguagcugggaguacaggugcac

SEQ ID NO: 51225 - RNA, 32 nt, Human
agccucccgaguagcugggagugcaggugcac

SEQ ID NO: 51226 - RNA, 32 nt, Human
agccucccgaguagcugggaucacaggugugc

SEQ ID NO: 51227 - RNA, 32 nt, Human
agccucccgaguagcugggauuacaagcaccc

SEQ ID NO: 51228 - RNA, 32 nt, Human
agccucccgaguagcugggauuacaagugcac

SEQ ID NO: 51229 - RNA, 32 nt, Human
agccucccgaguagcugggauuacaagugcgc

SEQ ID NO: 51230 - RNA, 32 nt, Human
agccucccgaguagcugggauuacagacaugu

SEQ ID NO: 51231 - RNA, 32 nt, Human
agccucccgaguagcugggauuacagccugaa

SEQ ID NO: 51232 - RNA, 32 nt, Human
agccucccgaguagcugggauuacaggaagau

SEQ ID NO: 51233 - RNA, 32 nt, Human
agccucccgaguagcugggauuacaggaaucu

SEQ ID NO: 51234 - RNA, 32 nt, Human
agccucccgaguagcugggauuacaggagcgu

SEQ ID NO: 51235 - RNA, 32 nt, Human
agccucccgaguagcugggauuacaggaggcu

SEQ ID NO: 51236 - RNA, 32 nt, Human
agccucccgaguagcugggauuacaggaugac

SEQ ID NO: 51237 - RNA, 32 nt, Human
agccucccgaguagcugggauuacaggcacac

SEQ ID NO: 51238 - RNA, 32 nt, Human
agccucccgaguagcugggauuacaggcaccc

SEQ ID NO: 51239 - RNA, 32 nt, Human
agccucccgaguagcugggauuacaggcaccu

SEQ ID NO: 51240 - RNA, 32 nt, Human
agccucccgaguagcugggauuacaggcacgc

SEQ ID NO: 51241 - RNA, 32 nt, Human
agccucccgaguagcugggauuacaggcaucu

SEQ ID NO: 51242 - RNA, 32 nt, Human
agccucccgaguagcugggauuacaggcauga

SEQ ID NO: 51243 - RNA, 32 nt, Human
agccucccgaguagcugggauuacaggcaugc

SEQ ID NO: 51244 - RNA, 32 nt, Human
agccucccgaguagcugggauuacaggcaugu

SEQ ID NO: 51245 - RNA, 32 nt, Human
agccucccgaguagcugggauuacaggcgcac

SEQ ID NO: 51246 - RNA, 32 nt, Human
agccucccgaguagcugggauuacaggcgccc

SEQ ID NO: 51247 - RNA, 32 nt, Human
agccucccgaguagcugggauuacaggcgccu

SEQ ID NO: 51248 - RNA, 32 nt, Human
agccucccgaguagcugggauuacaggcgugc

SEQ ID NO: 51249 - RNA, 32 nt, Human
agccucccgaguagcugggauuacaggcgugu

SEQ ID NO: 51250 - RNA, 32 nt, Human
agccucccgaguagcugggauuacagggugaa

SEQ ID NO: 51251 - RNA, 32 nt, Human
agccucccgaguagcugggauuacaggugagc

SEQ ID NO: 51252 - RNA, 32 nt, Human
agccucccgaguagcugggauuacaggugcau

SEQ ID NO: 51253 - RNA, 32 nt, Human
agccucccgaguagcugggauuacaggugccc

SEQ ID NO: 51254 - RNA, 32 nt, Human
agccucccgaguagcugggauuacaggugccu

SEQ ID NO: 51255 - RNA, 32 nt, Human
agccucccgaguagcugggauuacaggugcgc

SEQ ID NO: 51256 - RNA, 32 nt, Human
agccucccgaguagcugggauuacagguggug

SEQ ID NO: 51257 - RNA, 32 nt, Human
agccucccgaguagcugggauuacaggugugc

SEQ ID NO: 51258 - RNA, 32 nt, Human
agccucccgaguagcugggauuacaggugugg

SEQ ID NO: 51259 - RNA, 32 nt, Human
agccucccgaguagcugggauuacgggcauau

SEQ ID NO: 51260 - RNA, 32 nt, Human
agccucccgaguagcugggauuacgggcgccc

SEQ ID NO: 51261 - RNA, 32 nt, Human
agccucccgaguagcugggauuacuggugccc

SEQ ID NO: 51262 - RNA, 32 nt, Human
agccucccgaguagcugggauuagaggcgcca

SEQ ID NO: 51263 - RNA, 32 nt, Human
agccucccgaguagcugggauuagaggcgugu

SEQ ID NO: 51264 - RNA, 32 nt, Human
agccucccgaguagcugggauuauagacacgu

SEQ ID NO: 51265 - RNA, 32 nt, Human
agccucccgaguagcugggauuauaggcaccc

SEQ ID NO: 51266 - RNA, 32 nt, Human
agccucccgaguagcugggauuauaggcaccu

SEQ ID NO: 51267 - RNA, 32 nt, Human
agccucccgaguagcugggauuauaggcgagu

SEQ ID NO: 51268 - RNA, 32 nt, Human
agccucccgaguagcugggauuaugggcgccc

SEQ ID NO: 51269 - RNA, 32 nt, Human
agccucccgaguagcugggauuccaggcgccc

SEQ ID NO: 51270 - RNA, 32 nt, Human
agccucccgaguagcugggauuccaggugccc

SEQ ID NO: 51271 - RNA, 32 nt, Human
agccucccgaguagcugggauugcaggagccu

SEQ ID NO: 51272 - RNA, 32 nt, Human
agccucccgaguagcugggauugcaggcgccc

SEQ ID NO: 51273 - RNA, 32 nt, Human
agccucccgaguagcugggauugcagguaccc

SEQ ID NO: 51274 - RNA, 32 nt, Human
agccucccgaguagcugggauugcaggugccc

SEQ ID NO: 51275 - RNA, 32 nt, Human
agccucccgaguagcugggccuaaaggugccc

SEQ ID NO: 51276 - RNA, 32 nt, Human
agccucccgaguagcugggcuuacgggcacau

SEQ ID NO: 51277 - RNA, 32 nt, Human
agccucccgaguagcuggggcuacaggugugu

SEQ ID NO: 51278 - RNA, 32 nt, Human
agccucccgaguagcugggguuacaggcaugc

SEQ ID NO: 51279 - RNA, 32 nt, Human
agccucccgaguagcuggguuuacagguaugc

SEQ ID NO: 51280 - RNA, 32 nt, Human
agccucccgaguagcugguaaaacaggucaac

SEQ ID NO: 51281 - RNA, 32 nt, Human
agccucccgaguagcugguacuacaggcacac

SEQ ID NO: 51282 - RNA, 32 nt, Human
agccucccgaguagcuuggacuacaggcgugc

SEQ ID NO: 51283 - RNA, 32 nt, Human
agccucccgaguagggaggaccacagguguga

SEQ ID NO: 51284 - RNA, 32 nt, Human
agccucccgaguaggugggaccacaggcaugc

SEQ ID NO: 51285 - RNA, 32 nt, Human
agccucccgaguaggugggacuacaggugccc

SEQ ID NO: 51286 - RNA, 32 nt, Human
agccucccgaguaggugggauuauaggagcgu

SEQ ID NO: 51287 - RNA, 32 nt, Human
agccucccgaguaguugggauuacaggcgccu

SEQ ID NO: 51288 - RNA, 32 nt, Human
agccucccgaguaguugggauuacaggugacu

SEQ ID NO: 51289 - RNA, 32 nt, Human
agccucccgaguaucugggauuauaagcaaga

SEQ ID NO: 51290 - RNA, 32 nt, Human
agccucccgaguaucuggggcuacaggcaugu

SEQ ID NO: 51291 - RNA, 32 nt, Human
agccucccgagugacucggauuacaggcaugu

SEQ ID NO: 51292 - RNA, 32 nt, Human
agccucccgaguggcugggauuagcggcaugc

SEQ ID NO: 51293 - RNA, 32 nt, Human
agccucccgaguugcugggauugcgggcaugg

SEQ ID NO: 51294 - RNA, 32 nt, Human
agccucccgauaagcugagauuacaggaguuu

SEQ ID NO: 51295 - RNA, 32 nt, Human
agccucccgauuagcugggacuacaggcgccc

SEQ ID NO: 51296 - RNA, 32 nt, Human
agccucccgauuagcugggaucacaggugugc

SEQ ID NO: 51297 - RNA, 32 nt, Human
agccucccgcgcagcugggacugcaggggugu

SEQ ID NO: 51298 - RNA, 32 nt, Human
agccucccggggagcugggaccacaggcacgu

SEQ ID NO: 51299 - RNA, 32 nt, Human
agccucccggguagcugggacuacaggcgccu

SEQ ID NO: 51300 - RNA, 32 nt, Human
agccucccggguagcugggauuacaggcaugu

SEQ ID NO: 51301 - RNA, 32 nt, Human
agccucccggguagcugggauugcagacgugc

SEQ ID NO: 51302 - RNA, 32 nt, Human
agccucccggguagcugguacuacaggcuccu

SEQ ID NO: 51303 - RNA, 32 nt, Human
agccucccggguggcugggaucacaggcgugc

SEQ ID NO: 51304 - RNA, 32 nt, Human
agccucccggguggcugggauuguaggagugu

SEQ ID NO: 51305 - RNA, 32 nt, Human
agccucccguguagcugggacuacaggcacgc

SEQ ID NO: 51306 - RNA, 32 nt, Human
agccucccguguagcugggacuacaggcgccc

SEQ ID NO: 51307 - RNA, 32 nt, Human
agccucccguguagcugggauuacaggcgcgc

SEQ ID NO: 51308 - RNA, 32 nt, Human
agccucccuaagugcggggauuacaggcuuga

SEQ ID NO: 51309 - RNA, 32 nt, Human
agccucccuaagugcugggauugcaggcguga

SEQ ID NO: 51310 - RNA, 32 nt, Human
agccucccuaauagcugggacuacaggcaacc

SEQ ID NO: 51311 - RNA, 32 nt, Human
agccucccuaauaguugggauuacaggcaccc

SEQ ID NO: 51312 - RNA, 32 nt, Human
agccucccuagcagcugggacuauuagugcac

SEQ ID NO: 51313 - RNA, 32 nt, Human
agccucccuaguagcugggacuacaggcaccc

SEQ ID NO: 51314 - RNA, 32 nt, Human
agccucccuaguagcugggacuacaggcaugc

SEQ ID NO: 51315 - RNA, 32 nt, Human
agccucccuaguagcugggacuacagggaugu

SEQ ID NO: 51316 - RNA, 32 nt, Human
agccucccuaguagcugggacuacagguaugc

SEQ ID NO: 51317 - RNA, 32 nt, Human
agccucccuaguagcugggacuacaggugcgu

SEQ ID NO: 51318 - RNA, 32 nt, Human
agccucccuaguagcugggacuuuaaguguac

SEQ ID NO: 51319 - RNA, 32 nt, Human
agccucccuaguagcugggaugacaagcacac

SEQ ID NO: 51320 - RNA, 32 nt, Human
agccucccuaguagcugggaugacaggcgccu

SEQ ID NO: 51321 - RNA, 32 nt, Human
agccucccuaguagcugggauuacagccaugc

SEQ ID NO: 51322 - RNA, 32 nt, Human
agccucccuaguagcugggauuacaggcacac

SEQ ID NO: 51323 - RNA, 32 nt, Human
agccucccuaguagcugggauuacaggcaugc

SEQ ID NO: 51324 - RNA, 32 nt, Human
agccucccuaguagcugggauuacaggcaugu

SEQ ID NO: 51325 - RNA, 32 nt, Human
agccucccuaguagcugggauuacaggcgccc

SEQ ID NO: 51326 - RNA, 32 nt, Human
agccucccuaguagcugggauuacaggcgcgc

SEQ ID NO: 51327 - RNA, 32 nt, Human
agccucccuaguagcugggauuacaggugcac

SEQ ID NO: 51328 - RNA, 32 nt, Human
agccucccuaguagcugggauuauaggcgccc

SEQ ID NO: 51329 - RNA, 32 nt, Human
agccucccuaguggcugggauuacaggcgccu

SEQ ID NO: 51330 - RNA, 32 nt, Human
agccucccucagagcugggacuacaggcgugc

SEQ ID NO: 51331 - RNA, 32 nt, Human
agccucccuccacccccagaaaauugcuucca

SEQ ID NO: 51332 - RNA, 24 nt, Human
agccucccuccccaccucacccca

SEQ ID NO: 51333 - RNA, 32 nt, Human
agccucccuccccucuccacccuucagugcug

SEQ ID NO: 51334 - RNA, 22 nt, Human
agccucccuccugugcuugcca

SEQ ID NO: 51335 - RNA, 32 nt, Human
agccucccugcgcacccgguugcccggagccc

SEQ ID NO: 51336 - RNA, 32 nt, Human
agccucccuggcagcugggauuacaggugcac

SEQ ID NO: 51337 - RNA, 32 nt, Human
agccucccugguagcugggauuacagguguga

SEQ ID NO: 51338 - RNA, 32 nt, Human
agccucccuuguagcugggaccacaggugcau

SEQ ID NO: 51339 - RNA, 32 nt, Human
agccucccuuucucucccauguuuccauuccu

SEQ ID NO: 51340 - RNA, 32 nt, Human
agccuccgaaagugcugggaucacagguggga

SEQ ID NO: 51341 - RNA, 32 nt, Human
agccuccgaaagugcugggauuacaggcguga

SEQ ID NO: 51342 - RNA, 32 nt, Human
agccuccgaaguagcugggaauuacaggcacc

SEQ ID NO: 51343 - RNA, 32 nt, Human
agccuccgaaguagcugggauuacaggcgccc

SEQ ID NO: 51344 - RNA, 32 nt, Human
agccuccgagguagcugggaccauaggcgugc

SEQ ID NO: 51345 - RNA, 32 nt, Human
agccuccgcaguagcugggacuacaggcaugc

SEQ ID NO: 51346 - RNA, 23 nt, Human
agccuccgcauugcccccacccc

SEQ ID NO: 51347 - RNA, 21 nt, Human
agccuccgcccggcccgggca

SEQ ID NO: 51348 - RNA, 22 nt, Human
agccuccgccuccugggcucaa

SEQ ID NO: 51349 - RNA, 22 nt, Human
agccuccgcuuccuggguucaa

SEQ ID NO: 51350 - RNA, 32 nt, Human
agccuccggaagggaggcggccucuggccccg

SEQ ID NO: 51351 - RNA, 32 nt, Human
agccuccggaggaggaggcggaggccgaggac

SEQ ID NO: 51352 - RNA, 32 nt, Human
agccuccggaguaacuggcauuacaggcgccu

SEQ ID NO: 51353 - RNA, 32 nt, Human
agccuccggaguagcugcgacuacaggcgcgc

SEQ ID NO: 51354 - RNA, 32 nt, Human
agccuccggaguagcugggaauacaggugcag

SEQ ID NO: 51355 - RNA, 32 nt, Human
agccuccggaguagcugggaccacaggcgccc

SEQ ID NO: 51356 - RNA, 32 nt, Human
agccuccggaguagcugggaccacagguucau

SEQ ID NO: 51357 - RNA, 32 nt, Human
agccuccggaguagcugggauuacaggcacau

SEQ ID NO: 51358 - RNA, 32 nt, Human
agccuccggaguagcugggauuacaggcacgu

SEQ ID NO: 51359 - RNA, 32 nt, Human
agccuccggaguagcugggauuacaggcaugc

SEQ ID NO: 51360 - RNA, 32 nt, Human
agccuccggaguagcugggauuacaggcgugc

SEQ ID NO: 51361 - RNA, 32 nt, Human
agccuccggaguagcugggauugcaggcaccc

SEQ ID NO: 51362 - RNA, 32 nt, Human
agccuccggaguagcugggguuacaggcacgg

SEQ ID NO: 51363 - RNA, 32 nt, Human
agccuccggaugagguggcugccaccaggccc

SEQ ID NO: 51364 - RNA, 32 nt, Human
agccuccggggcaccuucaggcaagcgggugg

SEQ ID NO: 51365 - RNA, 32 nt, Human
agccuccgggguagcugggaccacaggcacgc

SEQ ID NO: 51366 - RNA, 32 nt, Human
agccuccguuagggggugggaaaggacuuugc

SEQ ID NO: 51367 - RNA, 32 nt, Human
agccuccuaaagcacugggauuacaggcuuga

SEQ ID NO: 51368 - RNA, 32 nt, Human
agccuccuaaagcacugggauuacagguguga

SEQ ID NO: 51369 - RNA, 32 nt, Human
agccuccuaaagugcugcgauuacaggcauga

SEQ ID NO: 51370 - RNA, 32 nt, Human
agccuccuaaagugcugggauuacaggccuga

SEQ ID NO: 51371 - RNA, 32 nt, Human
agccuccuaaagugcugggauuauaggcauga

SEQ ID NO: 51372 - RNA, 32 nt, Human
agccuccuaaguaccugggauuacaggcaugu

SEQ ID NO: 51373 - RNA, 32 nt, Human
agccuccuaaguagcugagaccacagggacac

SEQ ID NO: 51374 - RNA, 32 nt, Human
agccuccuaaguagcugagacuacagacgugc

SEQ ID NO: 51375 - RNA, 32 nt, Human
agccuccuaaguagcugggaccacagugaggu

SEQ ID NO: 51376 - RNA, 32 nt, Human
agccuccuaaguagcugggauuacaagugccc

SEQ ID NO: 51377 - RNA, 32 nt, Human
agccuccuaaguagcugggauuacaggaaaug

SEQ ID NO: 51378 - RNA, 32 nt, Human
agccuccuaaguagcugggauuacaggcaccc

SEQ ID NO: 51379 - RNA, 32 nt, Human
agccuccuaaguagcugggauuacaggcaugc

SEQ ID NO: 51380 - RNA, 32 nt, Human
agccuccuaaguagcugggauuacaggcgcgu

SEQ ID NO: 51381 - RNA, 32 nt, Human
agccuccuaaguaucugggauuacaggcaugu

SEQ ID NO: 51382 - RNA, 32 nt, Human
agccuccuaaugcagucuucugcacaguccug

SEQ ID NO: 51383 - RNA, 32 nt, Human
agccuccuacguccuggcugggccugguccca

SEQ ID NO: 51384 - RNA, 32 nt, Human
agccuccuagagugcugggauuacagacauga

SEQ ID NO: 51385 - RNA, 32 nt, Human
agccuccuagauaacugggauuacaggugccc

SEQ ID NO: 51386 - RNA, 32 nt, Human
agccuccucacaacaugacagcuggcuuagua

SEQ ID NO: 51387 - RNA, 32 nt, Human
agccuccucacaggugggcugggcuggcaagg

SEQ ID NO: 51388 - RNA, 32 nt, Human
agccuccucaggagcugggauuacaggcgccc

SEQ ID NO: 51389 - RNA, 32 nt, Human
agccuccucaguagcugagauuacaggcaugc

SEQ ID NO: 51390 - RNA, 32 nt, Human
agccuccucaguagcugggauuacaggcaugu

SEQ ID NO: 51391 - RNA, 32 nt, Human
agccuccuccacuccaggccaugcaacagccu

SEQ ID NO: 51392 - RNA, 22 nt, Human
agccuccuccagcccccaggca

SEQ ID NO: 51393 - RNA, 32 nt, Human
agccuccucccgccuaagagcaacaaugccug

SEQ ID NO: 51394 - RNA, 32 nt, Human
agccuccuccugggccagcucuugugcuacag

SEQ ID NO: 51395 - RNA, 32 nt, Human
agccuccuccuuggagcucuguagccaucgug

SEQ ID NO: 51396 - RNA, 32 nt, Human
agccuccucucuccuucugucccacugcccuc

SEQ ID NO: 51397 - RNA, 18 nt, Human
agccuccucugcaugcca

SEQ ID NO: 51398 - RNA, 32 nt, Human
agccuccucuuagagcuccugaauucuggagc

SEQ ID NO: 51399 - RNA, 32 nt, Human
agccuccucuugcccaaacaugaagggugcuu

SEQ ID NO: 51400 - RNA, 32 nt, Human
agccuccugaaaagcugggauuacagggcccu

SEQ ID NO: 51401 - RNA, 32 nt, Human
agccuccugaacagcugggaccacaggugcac

SEQ ID NO: 51402 - RNA, 32 nt, Human
agccuccugaauagccgggauuacagucgucc

SEQ ID NO: 51403 - RNA, 32 nt, Human
agccuccugaauagcugggaauacaggugcac

SEQ ID NO: 51404 - RNA, 32 nt, Human
agccuccugaauagcugggacuacaggcuugc

SEQ ID NO: 51405 - RNA, 32 nt, Human
agccuccugaauagcugggacuacagguucua

SEQ ID NO: 51406 - RNA, 32 nt, Human
agccuccugaauagcugggauuacaggcaccc

SEQ ID NO: 51407 - RNA, 32 nt, Human
agccuccugaauagcugggauuacaggcaccu

SEQ ID NO: 51408 - RNA, 32 nt, Human
agccuccugaauagcugggauuacaggugcac

SEQ ID NO: 51409 - RNA, 32 nt, Human
agccuccugaauaucugggauuacagagacug

SEQ ID NO: 51410 - RNA, 32 nt, Human
agccuccugaauaucugggauuacaggugccc

SEQ ID NO: 51411 - RNA, 32 nt, Human
agccuccugagaagcugagauuacaggcaugu

SEQ ID NO: 51412 - RNA, 32 nt, Human
agccuccugagcagcugggaccgcgggagugu

SEQ ID NO: 51413 - RNA, 32 nt, Human
agccuccugagcagcugggacuacagacacac

SEQ ID NO: 51414 - RNA, 32 nt, Human
agccuccugagcagcugggacuacaggcgcau

SEQ ID NO: 51415 - RNA, 32 nt, Human
agccuccugagcagcugggacuacaggcgccu

SEQ ID NO: 51416 - RNA, 32 nt, Human
agccuccugagcagcugggauuacaggcgcac

SEQ ID NO: 51417 - RNA, 32 nt, Human
agccuccugagcagcugggauuacaggcgcug

SEQ ID NO: 51418 - RNA, 32 nt, Human
agccuccugagcagcugggauuacaggugcgu

SEQ ID NO: 51419 - RNA, 32 nt, Human
agccuccugagccuguggguccccacucaccc

SEQ ID NO: 51420 - RNA, 32 nt, Human
agccuccugaggagcugcgauuacagguaacc

SEQ ID NO: 51421 - RNA, 32 nt, Human
agccuccugaggagcugggacuacaggugcgu

SEQ ID NO: 51422 - RNA, 32 nt, Human
agccuccugaguaacugagauuacaggcacaa

SEQ ID NO: 51423 - RNA, 32 nt, Human
agccuccugaguaacuggaauugcaggucaga

SEQ ID NO: 51424 - RNA, 32 nt, Human
agccuccugaguaacugggacuacaggcacag

SEQ ID NO: 51425 - RNA, 32 nt, Human
agccuccugaguaacugggacuacaggcgccc

SEQ ID NO: 51426 - RNA, 32 nt, Human
agccuccugaguaacugggacuauaggauuuc

SEQ ID NO: 51427 - RNA, 32 nt, Human
agccuccugaguaacugggacuguaaacauga

SEQ ID NO: 51428 - RNA, 32 nt, Human
agccuccugaguaacugggaucauaggcgcac

SEQ ID NO: 51429 - RNA, 32 nt, Human
agccuccugaguaacugggauuacagagccca

SEQ ID NO: 51430 - RNA, 32 nt, Human
agccuccugaguaacugggguuacaggcgcgc

SEQ ID NO: 51431 - RNA, 32 nt, Human
agccuccugaguaccugagacuacagaugugc

SEQ ID NO: 51432 - RNA, 32 nt, Human
agccuccugaguaccugagauuacaggcaccc

SEQ ID NO: 51433 - RNA, 32 nt, Human
agccuccugaguaccugggacuacaggugcau

SEQ ID NO: 51434 - RNA, 32 nt, Human
agccuccugaguaccugggauuacaggcgcgc

SEQ ID NO: 51435 - RNA, 32 nt, Human
agccuccugaguaccugggauuacaggugcac

SEQ ID NO: 51436 - RNA, 32 nt, Human
agccuccugaguagauggaacuacagggcaug

SEQ ID NO: 51437 - RNA, 32 nt, Human
agccuccugaguagaugggacuacaggcacag

SEQ ID NO: 51438 - RNA, 32 nt, Human
agccuccugaguagaugggacuguaggcaccu

SEQ ID NO: 51439 - RNA, 32 nt, Human
agccuccugaguagcaauuacagggagcauuu

SEQ ID NO: 51440 - RNA, 32 nt, Human
agccuccugaguagcagagacuacagagccuc

SEQ ID NO: 51441 - RNA, 32 nt, Human
agccuccugaguagccaggacuauggcaugua

SEQ ID NO: 51442 - RNA, 32 nt, Human
agccuccugaguagccgaaauuacagacgugu

SEQ ID NO: 51443 - RNA, 32 nt, Human
agccuccugaguagcuaaggacuacagggcga

SEQ ID NO: 51444 - RNA, 32 nt, Human
agccuccugaguagcuaggaccauaggcacau

SEQ ID NO: 51445 - RNA, 32 nt, Human
agccuccugaguagcuaggacuacaggcaugu

SEQ ID NO: 51446 - RNA, 32 nt, Human
agccuccugaguagcuaggacuacaggugcau

SEQ ID NO: 51447 - RNA, 32 nt, Human
agccuccugaguagcuaggacuacaggugugc

SEQ ID NO: 51448 - RNA, 32 nt, Human
agccuccugaguagcuaggacuauaggcacac

SEQ ID NO: 51449 - RNA, 32 nt, Human
agccuccugaguagcuaggacuauaggcaugc

SEQ ID NO: 51450 - RNA, 32 nt, Human
agccuccugaguagcuaggacugcaggugcuc

SEQ ID NO: 51451 - RNA, 32 nt, Human
agccuccugaguagcuaggacuguaggcaugu

SEQ ID NO: 51452 - RNA, 32 nt, Human
agccuccugaguagcuaggauuacaggcaugu

SEQ ID NO: 51453 - RNA, 32 nt, Human
agccuccugaguagcuaggauuacaggugccu

SEQ ID NO: 51454 - RNA, 32 nt, Human
agccuccugaguagcuaggauuacaggugugu

SEQ ID NO: 51455 - RNA, 32 nt, Human
agccuccugaguagcuaggguuaccugccacc

SEQ ID NO: 51456 - RNA, 32 nt, Human
agccuccugaguagcuaugacuacagguaugu

SEQ ID NO: 51457 - RNA, 32 nt, Human
agccuccugaguagcugagaccacaggcgugu

SEQ ID NO: 51458 - RNA, 32 nt, Human
agccuccugaguagcugagacuacaggugagu

SEQ ID NO: 51459 - RNA, 32 nt, Human
agccuccugaguagcugagauuacaggcacac

SEQ ID NO: 51460 - RNA, 32 nt, Human
agccuccugaguagcugagauuacaggugccc

SEQ ID NO: 51461 - RNA, 32 nt, Human
agccuccugaguagcugagauuacaggugugu

SEQ ID NO: 51462 - RNA, 32 nt, Human
agccuccugaguagcugagauuauaggccuac

SEQ ID NO: 51463 - RNA, 32 nt, Human
agccuccugaguagcugauacuacaggcaccc

SEQ ID NO: 51464 - RNA, 32 nt, Human
agccuccugaguagcugcgacuacaggugcau

SEQ ID NO: 51465 - RNA, 32 nt, Human
agccuccugaguagcuggaaccacaggcaugu

SEQ ID NO: 51466 - RNA, 32 nt, Human
agccuccugaguagcuggaacugcagaugugc

SEQ ID NO: 51467 - RNA, 32 nt, Human
agccuccugaguagcuggaauuacaggaggau

SEQ ID NO: 51468 - RNA, 32 nt, Human
agccuccugaguagcuggaauuacaggcaccc

SEQ ID NO: 51469 - RNA, 32 nt, Human
agccuccugaguagcuggaauuacaggcgccc

SEQ ID NO: 51470 - RNA, 32 nt, Human
agccuccugaguagcuggaauuauaggcacau

SEQ ID NO: 51471 - RNA, 32 nt, Human
agccuccugaguagcuggauuacaggcaugug

SEQ ID NO: 51472 - RNA, 32 nt, Human
agccuccugaguagcuggauuacagggccugg

SEQ ID NO: 51473 - RNA, 32 nt, Human
agccuccugaguagcuggcacuguaggcaugu

SEQ ID NO: 51474 - RNA, 32 nt, Human
agccuccugaguagcuggcauuauaggugccc

SEQ ID NO: 51475 - RNA, 32 nt, Human
agccuccugaguagcugggaauacagcaugcg

SEQ ID NO: 51476 - RNA, 32 nt, Human
agccuccugaguagcugggaccacaggcgacu

SEQ ID NO: 51477 - RNA, 32 nt, Human
agccuccugaguagcugggaccacaggcgagu

SEQ ID NO: 51478 - RNA, 32 nt, Human
agccuccugaguagcugggaccacagguaugc

SEQ ID NO: 51479 - RNA, 32 nt, Human
agccuccugaguagcugggaccacaggugugu

SEQ ID NO: 51480 - RNA, 32 nt, Human
agccuccugaguagcugggaccauaggcucac

SEQ ID NO: 51481 - RNA, 32 nt, Human
agccuccugaguagcugggaccauagguguga

SEQ ID NO: 51482 - RNA, 32 nt, Human
agccuccugaguagcugggacuacaagcaugc

SEQ ID NO: 51483 - RNA, 32 nt, Human
agccuccugaguagcugggacuacaagugugc

SEQ ID NO: 51484 - RNA, 32 nt, Human
agccuccugaguagcugggacuacagaugcau

SEQ ID NO: 51485 - RNA, 32 nt, Human
agccuccugaguagcugggacuacagauguag

SEQ ID NO: 51486 - RNA, 32 nt, Human
agccuccugaguagcugggacuacaggaauua

SEQ ID NO: 51487 - RNA, 32 nt, Human
agccuccugaguagcugggacuacaggagcuc

SEQ ID NO: 51488 - RNA, 32 nt, Human
agccuccugaguagcugggacuacaggcacac

SEQ ID NO: 51489 - RNA, 32 nt, Human
agccuccugaguagcugggacuacaggcacau

SEQ ID NO: 51490 - RNA, 32 nt, Human
agccuccugaguagcugggacuacaggcaccc

SEQ ID NO: 51491 - RNA, 32 nt, Human
agccuccugaguagcugggacuacaggcaccu

SEQ ID NO: 51492 - RNA, 32 nt, Human
agccuccugaguagcugggacuacaggcacgc

SEQ ID NO: 51493 - RNA, 32 nt, Human
agccuccugaguagcugggacuacaggcacgu

SEQ ID NO: 51494 - RNA, 32 nt, Human
agccuccugaguagcugggacuacaggcauga

SEQ ID NO: 51495 - RNA, 32 nt, Human
agccuccugaguagcugggacuacaggcaugc

SEQ ID NO: 51496 - RNA, 32 nt, Human
agccuccugaguagcugggacuacaggcaugu

SEQ ID NO: 51497 - RNA, 32 nt, Human
agccuccugaguagcugggacuacaggccccu

SEQ ID NO: 51498 - RNA, 32 nt, Human
agccuccugaguagcugggacuacaggcgcca

SEQ ID NO: 51499 - RNA, 32 nt, Human
agccuccugaguagcugggacuacaggcgccc

SEQ ID NO: 51500 - RNA, 32 nt, Human
agccuccugaguagcugggacuacaggcgccu

SEQ ID NO: 51501 - RNA, 32 nt, Human
agccuccugaguagcugggacuacaggcgcuc

SEQ ID NO: 51502 - RNA, 32 nt, Human
agccuccugaguagcugggacuacaggcgugu

SEQ ID NO: 51503 - RNA, 32 nt, Human
agccuccugaguagcugggacuacaggcucau

SEQ ID NO: 51504 - RNA, 32 nt, Human
agccuccugaguagcugggacuacaggcuugc

SEQ ID NO: 51505 - RNA, 32 nt, Human
agccuccugaguagcugggacuacaggcuugu

SEQ ID NO: 51506 - RNA, 32 nt, Human
agccuccugaguagcugggacuacagguaugc

SEQ ID NO: 51507 - RNA, 32 nt, Human
agccuccugaguagcugggacuacaggugccc

SEQ ID NO: 51508 - RNA, 32 nt, Human
agccuccugaguagcugggacuacaggugccu

SEQ ID NO: 51509 - RNA, 32 nt, Human
agccuccugaguagcugggacuacaggugcgu

SEQ ID NO: 51510 - RNA, 32 nt, Human
agccuccugaguagcugggacuacagguguac

SEQ ID NO: 51511 - RNA, 32 nt, Human
agccuccugaguagcugggacuacaggugugc

SEQ ID NO: 51512 - RNA, 32 nt, Human
agccuccugaguagcugggacuacaggugugu

SEQ ID NO: 51513 - RNA, 32 nt, Human
agccuccugaguagcugggacuacaguugugc

SEQ ID NO: 51514 - RNA, 32 nt, Human
agccuccugaguagcugggacuacaguuucgu

SEQ ID NO: 51515 - RNA, 32 nt, Human
agccuccugaguagcugggacuacaugcgcac

SEQ ID NO: 51516 - RNA, 32 nt, Human
agccuccugaguagcugggacuagaggcacgc

SEQ ID NO: 51517 - RNA, 32 nt, Human
agccuccugaguagcugggacuagaggcaugu

SEQ ID NO: 51518 - RNA, 32 nt, Human
agccuccugaguagcugggacuagaggcgugu

SEQ ID NO: 51519 - RNA, 32 nt, Human
agccuccugaguagcugggacuauaggcaugu

SEQ ID NO: 51520 - RNA, 32 nt, Human
agccuccugaguagcugggacuauaggccugu

SEQ ID NO: 51521 - RNA, 32 nt, Human
agccuccugaguagcugggacuauaggcgcgu

SEQ ID NO: 51522 - RNA, 32 nt, Human
agccuccugaguagcugggacuauaggcuccc

SEQ ID NO: 51523 - RNA, 32 nt, Human
agccuccugaguagcugggacuauaggugcau

SEQ ID NO: 51524 - RNA, 32 nt, Human
agccuccugaguagcugggacuauagguugcu

SEQ ID NO: 51525 - RNA, 32 nt, Human
agccuccugaguagcugggacugcagaagugc

SEQ ID NO: 51526 - RNA, 32 nt, Human
agccuccugaguagcugggacugcaggcaccc

SEQ ID NO: 51527 - RNA, 32 nt, Human
agccuccugaguagcugggacugcaggcacgc

SEQ ID NO: 51528 - RNA, 32 nt, Human
agccuccugaguagcugggaggacaggcauau

SEQ ID NO: 51529 - RNA, 32 nt, Human
agccuccugaguagcugggaguacaggcgugc

SEQ ID NO: 51530 - RNA, 32 nt, Human
agccuccugaguagcugggauaacagacaugc

SEQ ID NO: 51531 - RNA, 32 nt, Human
agccuccugaguagcugggauaacaggugugg

SEQ ID NO: 51532 - RNA, 32 nt, Human
agccuccugaguagcugggaucacaggcacac

SEQ ID NO: 51533 - RNA, 32 nt, Human
agccuccugaguagcugggaucacaggugugu

SEQ ID NO: 51534 - RNA, 32 nt, Human
agccuccugaguagcugggaucauagaugccu

SEQ ID NO: 51535 - RNA, 32 nt, Human
agccuccugaguagcugggaucauaggcacgc

SEQ ID NO: 51536 - RNA, 32 nt, Human
agccuccugaguagcugggaugacaggcgugc

SEQ ID NO: 51537 - RNA, 32 nt, Human
agccuccugaguagcugggaugacaggugcac

SEQ ID NO: 51538 - RNA, 32 nt, Human
agccuccugaguagcugggauuacaaccgugu

SEQ ID NO: 51539 - RNA, 32 nt, Human
agccuccugaguagcugggauuacaagggcac

SEQ ID NO: 51540 - RNA, 32 nt, Human
agccuccugaguagcugggauuacagaaaauc

SEQ ID NO: 51541 - RNA, 32 nt, Human
agccuccugaguagcugggauuacagacaccc

SEQ ID NO: 51542 - RNA, 32 nt, Human
agccuccugaguagcugggauuacagacaugc

SEQ ID NO: 51543 - RNA, 32 nt, Human
agccuccugaguagcugggauuacagacgcac

SEQ ID NO: 51544 - RNA, 32 nt, Human
agccuccugaguagcugggauuacagacucca

SEQ ID NO: 51545 - RNA, 32 nt, Human
agccuccugaguagcugggauuacagauccug

SEQ ID NO: 51546 - RNA, 32 nt, Human
agccuccugaguagcugggauuacagauguau

SEQ ID NO: 51547 - RNA, 32 nt, Human
agccuccugaguagcugggauuacagaugugc

SEQ ID NO: 51548 - RNA, 32 nt, Human
agccuccugaguagcugggauuacagcacccg

SEQ ID NO: 51549 - RNA, 32 nt, Human
agccuccugaguagcugggauuacagcucugg

SEQ ID NO: 51550 - RNA, 32 nt, Human
agccuccugaguagcugggauuacaggaccag

SEQ ID NO: 51551 - RNA, 32 nt, Human
agccuccugaguagcugggauuacaggcaacu

SEQ ID NO: 51552 - RNA, 32 nt, Human
agccuccugaguagcugggauuacaggcacac

SEQ ID NO: 51553 - RNA, 32 nt, Human
agccuccugaguagcugggauuacaggcacau

SEQ ID NO: 51554 - RNA, 32 nt, Human
agccuccugaguagcugggauuacaggcaccc

SEQ ID NO: 51555 - RNA, 32 nt, Human
agccuccugaguagcugggauuacaggcaccu

SEQ ID NO: 51556 - RNA, 32 nt, Human
agccuccugaguagcugggauuacaggcacgc

SEQ ID NO: 51557 - RNA, 32 nt, Human
agccuccugaguagcugggauuacaggcagac

SEQ ID NO: 51558 - RNA, 32 nt, Human
agccuccugaguagcugggauuacaggcauac

SEQ ID NO: 51559 - RNA, 32 nt, Human
agccuccugaguagcugggauuacaggcaucc

SEQ ID NO: 51560 - RNA, 32 nt, Human
agccuccugaguagcugggauuacaggcauga

SEQ ID NO: 51561 - RNA, 32 nt, Human
agccuccugaguagcugggauuacaggcaugc

SEQ ID NO: 51562 - RNA, 32 nt, Human
agccuccugaguagcugggauuacaggcaugu

SEQ ID NO: 51563 - RNA, 32 nt, Human
agccuccugaguagcugggauuacaggcgcac

SEQ ID NO: 51564 - RNA, 32 nt, Human
agccuccugaguagcugggauuacaggcgccc

SEQ ID NO: 51565 - RNA, 32 nt, Human
agccuccugaguagcugggauuacaggcgccu

SEQ ID NO: 51566 - RNA, 32 nt, Human
agccuccugaguagcugggauuacaggcgcgu

SEQ ID NO: 51567 - RNA, 32 nt, Human
agccuccugaguagcugggauuacaggcgucc

SEQ ID NO: 51568 - RNA, 32 nt, Human
agccuccugaguagcugggauuacaggcgugc

SEQ ID NO: 51569 - RNA, 32 nt, Human
agccuccugaguagcugggauuacaggcgugu

SEQ ID NO: 51570 - RNA, 32 nt, Human
agccuccugaguagcugggauuacaggcuccu

SEQ ID NO: 51571 - RNA, 32 nt, Human
agccuccugaguagcugggauuacagggcgcu

SEQ ID NO: 51572 - RNA, 32 nt, Human
agccuccugaguagcugggauuacagguaugu

SEQ ID NO: 51573 - RNA, 32 nt, Human
agccuccugaguagcugggauuacaggugccc

SEQ ID NO: 51574 - RNA, 32 nt, Human
agccuccugaguagcugggauuacaggugccu

SEQ ID NO: 51575 - RNA, 32 nt, Human
agccuccugaguagcugggauuacaggugcgc

SEQ ID NO: 51576 - RNA, 32 nt, Human
agccuccugaguagcugggauuacaggugcgu

SEQ ID NO: 51577 - RNA, 32 nt, Human
agccuccugaguagcugggauuacagguguau

SEQ ID NO: 51578 - RNA, 32 nt, Human
agccuccugaguagcugggauuacaggugucg

SEQ ID NO: 51579 - RNA, 32 nt, Human
agccuccugaguagcugggauuacaggugugc

SEQ ID NO: 51580 - RNA, 32 nt, Human
agccuccugaguagcugggauuacaggugugu

SEQ ID NO: 51581 - RNA, 32 nt, Human
agccuccugaguagcugggauuacagguuccu

SEQ ID NO: 51582 - RNA, 32 nt, Human
agccuccugaguagcugggauuaccagugcac

SEQ ID NO: 51583 - RNA, 32 nt, Human
agccuccugaguagcugggauuacgggcaugu

SEQ ID NO: 51584 - RNA, 32 nt, Human
agccuccugaguagcugggauuauaggcacac

SEQ ID NO: 51585 - RNA, 32 nt, Human
agccuccugaguagcugggauuauaggcacau

SEQ ID NO: 51586 - RNA, 32 nt, Human
agccuccugaguagcugggauuauaggcacgu

SEQ ID NO: 51587 - RNA, 32 nt, Human
agccuccugaguagcugggauuauaggcaugc

SEQ ID NO: 51588 - RNA, 32 nt, Human
agccuccugaguagcugggauuauaggcgaga

SEQ ID NO: 51589 - RNA, 32 nt, Human
agccuccugaguagcugggauuauaggcgucu

SEQ ID NO: 51590 - RNA, 32 nt, Human
agccuccugaguagcugggauuauaggcgugc

SEQ ID NO: 51591 - RNA, 32 nt, Human
agccuccugaguagcugggauuauaggcgugu

SEQ ID NO: 51592 - RNA, 32 nt, Human
agccuccugaguagcugggauuauagguacau

SEQ ID NO: 51593 - RNA, 32 nt, Human
agccuccugaguagcugggauuauaggugcau

SEQ ID NO: 51594 - RNA, 32 nt, Human
agccuccugaguagcugggauuauaggugcga

SEQ ID NO: 51595 - RNA, 32 nt, Human
agccuccugaguagcugggauuauggacaaau

SEQ ID NO: 51596 - RNA, 32 nt, Human
agccuccugaguagcugggauuaugggcgccc

SEQ ID NO: 51597 - RNA, 32 nt, Human
agccuccugaguagcugggauuaugggugccu

SEQ ID NO: 51598 - RNA, 32 nt, Human
agccuccugaguagcugggauugcaggcaccc

SEQ ID NO: 51599 - RNA, 32 nt, Human
agccuccugaguagcugggauugcaggugccc

SEQ ID NO: 51600 - RNA, 32 nt, Human
agccuccugaguagcugggcacgguguuguac

SEQ ID NO: 51601 - RNA, 32 nt, Human
agccuccugaguagcugggccuauagguuccc

SEQ ID NO: 51602 - RNA, 32 nt, Human
agccuccugaguagcugggcugacaggcaccc

SEQ ID NO: 51603 - RNA, 32 nt, Human
agccuccugaguagcugggcuuacaggcaccc

SEQ ID NO: 51604 - RNA, 32 nt, Human
agccuccugaguagcuggggcuacaggcgccu

SEQ ID NO: 51605 - RNA, 32 nt, Human
agccuccugaguagcuggggcuacaggugugu

SEQ ID NO: 51606 - RNA, 32 nt, Human
agccuccugaguagcuggguuuacaggugccu

SEQ ID NO: 51607 - RNA, 32 nt, Human
agccuccugaguagcugguagcugggacuaua

SEQ ID NO: 51608 - RNA, 32 nt, Human
agccuccugaguagcuggugcgcacgaccaua

SEQ ID NO: 51609 - RNA, 32 nt, Human
agccuccugaguagcuguacuacaggaaugca

SEQ ID NO: 51610 - RNA, 32 nt, Human
agccuccugaguagcugugacuacaggcgccc

SEQ ID NO: 51611 - RNA, 32 nt, Human
agccuccugaguagcugugauuacaggcaugc

SEQ ID NO: 51612 - RNA, 32 nt, Human
agccuccugaguagcuuggauuacaggcacaa

SEQ ID NO: 51613 - RNA, 32 nt, Human
agccuccugaguaggugggauuacagaugccc

SEQ ID NO: 51614 - RNA, 32 nt, Human
agccuccugaguaguugggacuacaggcauau

SEQ ID NO: 51615 - RNA, 32 nt, Human
agccuccugaguaguugggacuaccaguagau

SEQ ID NO: 51616 - RNA, 32 nt, Human
agccuccugaguaguugggauuacagaugccc

SEQ ID NO: 51617 - RNA, 32 nt, Human
agccuccugaguaucugggacuacagaugcgu

SEQ ID NO: 51618 - RNA, 32 nt, Human
agccuccugaguaucugggauuacaggcgugc

SEQ ID NO: 51619 - RNA, 32 nt, Human
agccuccugaguaucuggguuuacaggugugu

SEQ ID NO: 51620 - RNA, 32 nt, Human
agccuccugagucgcugggauuacugagauug

SEQ ID NO: 51621 - RNA, 32 nt, Human
agccuccugaguggcugggauuacaggcaugc

SEQ ID NO: 51622 - RNA, 32 nt, Human
agccuccugaguggcugggauuacaggcgccc

SEQ ID NO: 51623 - RNA, 32 nt, Human
agccuccugaguggcugggauuauaggugugu

SEQ ID NO: 51624 - RNA, 32 nt, Human
agccuccugauuaccugggauuacaggcaugu

SEQ ID NO: 51625 - RNA, 32 nt, Human
agccuccugauuagcugggacuacagguucag

SEQ ID NO: 51626 - RNA, 32 nt, Human
agccuccugauuagcugggacuauaggcgugu

SEQ ID NO: 51627 - RNA, 32 nt, Human
agccuccugauuagcugggauuacaggcaugc

SEQ ID NO: 51628 - RNA, 32 nt, Human
agccuccugauuagcugggauuacaggcgugu

SEQ ID NO: 51629 - RNA, 32 nt, Human
agccuccugcaccuccucaccucccagccugc

SEQ ID NO: 51630 - RNA, 32 nt, Human
agccuccugcagcagcagcagacggcucggag

SEQ ID NO: 51631 - RNA, 32 nt, Human
agccuccugcagcgcccgccugccaaugugag

SEQ ID NO: 51632 - RNA, 23 nt, Human
agccuccugccacccacacacca

SEQ ID NO: 51633 - RNA, 32 nt, Human
agccuccugcccacccagggcccuuuacucuc

SEQ ID NO: 51634 - RNA, 32 nt, Human
agccuccugccccugcuuucugcccagggagg

SEQ ID NO: 51635 - RNA, 32 nt, Human
agccuccugccugcacccuccaccucuucuaa

SEQ ID NO: 51636 - RNA, 32 nt, Human
agccuccugccugcccuggccuugcuggggcc

SEQ ID NO: 51637 - RNA, 32 nt, Human
agccuccugcgcuccgguaccugggcguccca

SEQ ID NO: 51638 - RNA, 32 nt, Human
agccuccugcguagcugggacuacaggcacac

SEQ ID NO: 51639 - RNA, 23 nt, Human
agccuccugcucacuccacccca

SEQ ID NO: 51640 - RNA, 32 nt, Human
agccuccugcucaugcugcacgggccuccccu

SEQ ID NO: 51641 - RNA, 32 nt, Human
agccuccugcucauguugugcaggccuccccu

SEQ ID NO: 51642 - RNA, 19 nt, Human
agccuccugcucuuaacug

SEQ ID NO: 51643 - RNA, 32 nt, Human
agccuccugggcagucguaaggguugcggcgu

SEQ ID NO: 51644 - RNA, 32 nt, Human
agccuccugggcauguuugucugugugcugua

SEQ ID NO: 51645 - RNA, 23 nt, Human
agccuccugggguccccaggcac

SEQ ID NO: 51646 - RNA, 32 nt, Human
agccuccuggguagcugggacuacaggcuugc

SEQ ID NO: 51647 - RNA, 32 nt, Human
agccuccuggguagcugggauuacaagcaccc

SEQ ID NO: 51648 - RNA, 32 nt, Human
agccuccuggguagcugggauuacaggcacgc

SEQ ID NO: 51649 - RNA, 32 nt, Human
agccuccuggguagcugggauuacaggugccc

SEQ ID NO: 51650 - RNA, 32 nt, Human
agccuccuguaaucccagcuacuugggaggcu

SEQ ID NO: 51651 - RNA, 32 nt, Human
agccuccuguguaacugggauuacaggcuccc

SEQ ID NO: 51652 - RNA, 32 nt, Human
agccuccuguguagcugggauuauagauugga

SEQ ID NO: 51653 - RNA, 32 nt, Human
agccuccuuagacugaccccucaggccccuag

SEQ ID NO: 51654 - RNA, 22 nt, Human
agccuccuucgaggcugugcug

SEQ ID NO: 51655 - RNA, 32 nt, Human
agccuccuugguuguucuugggccacaggagc

SEQ ID NO: 51656 - RNA, 32 nt, Human
agccucgaaaagugcugggauuacaggcguga

SEQ ID NO: 51657 - RNA, 32 nt, Human
agccucgaaaucagauaggcaccaccaaccuc

SEQ ID NO: 51658 - RNA, 22 nt, Human
agccucgaacuccugggcucaa

SEQ ID NO: 51659 - RNA, 22 nt, Human
agccucgaacuccugggcuuaa

SEQ ID NO: 51660 - RNA, 22 nt, Human
agccucgaaucccugggcucaa

SEQ ID NO: 51661 - RNA, 21 nt, Human
agccucgacaccuggguucaa

SEQ ID NO: 51662 - RNA, 22 nt, Human
agccucgaccucccgggcucaa

SEQ ID NO: 51663 - RNA, 23 nt, Human
agccucgaccucccugggcucaa

SEQ ID NO: 51664 - RNA, 22 nt, Human
agccucgaccuccugggcucaa

SEQ ID NO: 51665 - RNA, 32 nt, Human
agccucgaccuccugggcucaaguguccuccu

SEQ ID NO: 51666 - RNA, 22 nt, Human
agccucgaccucuggggcucaa

SEQ ID NO: 51667 - RNA, 22 nt, Human
agccucgaccuuccaggcuuaa

SEQ ID NO: 51668 - RNA, 17 nt, Human
agccucgacuguccccu

SEQ ID NO: 51669 - RNA, 22 nt, Human
agccucgacuuccugggcucaa

SEQ ID NO: 51670 - RNA, 31 nt, Human
agccucgagaaaaugucuacagcagaucuga

SEQ ID NO: 51671 - RNA, 32 nt, Human
agccucgaguagcugggacuacaggcgcaugc

SEQ ID NO: 51672 - RNA, 32 nt, Human
agccucgagucucccauguuguaguacauucu

SEQ ID NO: 51673 - RNA, 32 nt, Human
agccucgaguuagugcucuggaagaggacaug

SEQ ID NO: 51674 - RNA, 32 nt, Human
agccucgauauccuuaauucaccaaggauccu

SEQ ID NO: 51675 - RNA, 32 nt, Human
agccucgauccucugcucacucagcccagcca

SEQ ID NO: 51676 - RNA, 32 nt, Human
agccucgauuguaccacugcacuccagccugg

SEQ ID NO: 51677 - RNA, 32 nt, Human
agccucgcaaguagcugggacuacagccgugc

SEQ ID NO: 51678 - RNA, 21 nt, Human
agccucgccaacauggcgaaa

SEQ ID NO: 51679 - RNA, 32 nt, Human
agccucgccagccugcugccaguacacccagg

SEQ ID NO: 51680 - RNA, 19 nt, Human
agccucgcccccugcccac

SEQ ID NO: 51681 - RNA, 32 nt, Human
agccucgccugacagaaugagcggcucggacg

SEQ ID NO: 51682 - RNA, 19 nt, Human
agccucgccugcugugcug

SEQ ID NO: 51683 - RNA, 32 nt, Human
agccucgccuggguucuggaggcugcggggcc

SEQ ID NO: 51684 - RNA, 32 nt, Human
agccucgcgagcagcugggacuacaggugccc

SEQ ID NO: 51685 - RNA, 32 nt, Human
agccucgcgaguagcuaggacuacaggcgcau

SEQ ID NO: 51686 - RNA, 32 nt, Human
agccucgcgaguagcuggaauuacaggaagcu

SEQ ID NO: 51687 - RNA, 32 nt, Human
agccucgcuccugggggcgcugcugggaaagc

SEQ ID NO: 51688 - RNA, 32 nt, Human
agccucggaagcagggccuggccggcagagca

SEQ ID NO: 51689 - RNA, 32 nt, Human
agccucggaggcggagguugcagugagcugag

SEQ ID NO: 51690 - RNA, 32 nt, Human
agccucggcaaaccaauuuggggaagaagcaa

SEQ ID NO: 51691 - RNA, 20 nt, Human
agccucggccuucugaagug

SEQ ID NO: 51692 - RNA, 32 nt, Human
agccucggcucagcacaucccuugccaaaauc

SEQ ID NO: 51693 - RNA, 32 nt, Human
agccucgggccucaccacccagcugcagccca

SEQ ID NO: 51694 - RNA, 32 nt, Human
agccucgggggcagaggugauagauguggggu

SEQ ID NO: 51695 - RNA, 32 nt, Human
agccucguaaagugcugggauuacagggguga

SEQ ID NO: 51696 - RNA, 32 nt, Human
agccucguaaauugcugggauuacaggcauga

SEQ ID NO: 51697 - RNA, 32 nt, Human
agccucgugaguagcugagauuacaggcgccc

SEQ ID NO: 51698 - RNA, 32 nt, Human
agccucuaaacagacaggaauuuagaaaaagu

SEQ ID NO: 51699 - RNA, 22 nt, Human
agccucuaacuccugggcucaa

SEQ ID NO: 51700 - RNA, 32 nt, Human
agccucuacaaugaaaugcagaagaguucauu

SEQ ID NO: 51701 - RNA, 26 nt, Human
agccucuacacacccagcuccugcca

SEQ ID NO: 51702 - RNA, 32 nt, Human
agccucuacuaaaaauacaaaaauuagcuggg

SEQ ID NO: 51703 - RNA, 22 nt, Human
agccucuacuuucuucuugcca

SEQ ID NO: 51704 - RNA, 22 nt, Human
agccucuagggaccccuccucc

SEQ ID NO: 51705 - RNA, 22 nt, Human
agccucuagucgccuccugcca

SEQ ID NO: 51706 - RNA, 32 nt, Human
agccucuauaaauauguaauaucaucauggga

SEQ ID NO: 51707 - RNA, 32 nt, Human
agccucucaaaaugcugggauuacagguguga

SEQ ID NO: 51708 - RNA, 32 nt, Human
agccucucaaacugcugggauuauaggcauga

SEQ ID NO: 51709 - RNA, 32 nt, Human
agccucucaaagagcugggauuacaggcauga

SEQ ID NO: 51710 - RNA, 32 nt, Human
agccucucaaagcgcugggauuacaggcauga

SEQ ID NO: 51711 - RNA, 32 nt, Human
agccucucaaagugcugggauuacaagcauga

SEQ ID NO: 51712 - RNA, 32 nt, Human
agccucucaaagugcugggauuacaggccuga

SEQ ID NO: 51713 - RNA, 32 nt, Human
agccucucaaagugcugggauuacaggcguga

SEQ ID NO: 51714 - RNA, 32 nt, Human
agccucucaaagugcugggauuacagguguga

SEQ ID NO: 51715 - RNA, 32 nt, Human
agccucucaaagugcugggauuacaggugugc

SEQ ID NO: 51716 - RNA, 32 nt, Human
agccucucaaagugcugggauuacaguaggga

SEQ ID NO: 51717 - RNA, 32 nt, Human
agccucucaaagugcugggauuacagucuccg

SEQ ID NO: 51718 - RNA, 32 nt, Human
agccucucaaagugcugggauuacgggcauga

SEQ ID NO: 51719 - RNA, 32 nt, Human
agccucucaaagugcugggauuauaggcguga

SEQ ID NO: 51720 - RNA, 32 nt, Human
agccucucaaagugcugggauuauaggcuuga

SEQ ID NO: 51721 - RNA, 32 nt, Human
agccucucaaauagcugggacuacaggcagca

SEQ ID NO: 51722 - RNA, 32 nt, Human
agccucucaaguaacugggauuacaggcaugc

SEQ ID NO: 51723 - RNA, 32 nt, Human
agccucucaaguagcggauuacaggcgcccac

SEQ ID NO: 51724 - RNA, 32 nt, Human
agccucucaaguagcugggacuacagaugugg

SEQ ID NO: 51725 - RNA, 32 nt, Human
agccucucaaguagcugggacuacaggcaugu

SEQ ID NO: 51726 - RNA, 32 nt, Human
agccucucaaguagcugggacuacaggcgccc

SEQ ID NO: 51727 - RNA, 32 nt, Human
agccucucaaguagcugggacuacaggugcac

SEQ ID NO: 51728 - RNA, 32 nt, Human
agccucucaaguagcugggauuacaagcaugc

SEQ ID NO: 51729 - RNA, 32 nt, Human
agccucucaaguagcugggauuacaggcgccc

SEQ ID NO: 51730 - RNA, 32 nt, Human
agccucucaaguagcugggauuacagggcacc

SEQ ID NO: 51731 - RNA, 32 nt, Human
agccucucaaguagcugggauuacagggcuuc

SEQ ID NO: 51732 - RNA, 32 nt, Human
agccucucagaggaggaggagcuggagacagg

SEQ ID NO: 51733 - RNA, 32 nt, Human
agccucucagagugcugggaucacaggcguga

SEQ ID NO: 51734 - RNA, 32 nt, Human
agccucucauagaaauugccuccaguccaguu

SEQ ID NO: 51735 - RNA, 32 nt, Human
agccucuccaagugcugggauuacaggcauca

SEQ ID NO: 51736 - RNA, 32 nt, Human
agccucuccacucaccagcaggcggucucugu

SEQ ID NO: 51737 - RNA, 21 nt, Human
agccucuccagacccacuugc

SEQ ID NO: 51738 - RNA, 32 nt, Human
agccucuccaguagcuggaacuacaggcaugc

SEQ ID NO: 51739 - RNA, 32 nt, Human
agccucuccaguagcuggaacuacaggcgugc

SEQ ID NO: 51740 - RNA, 32 nt, Human
agccucuccaguagcugggauuacaggugugu

SEQ ID NO: 51741 - RNA, 32 nt, Human
agccucuccauacuuacuccucucacagccca

SEQ ID NO: 51742 - RNA, 23 nt, Human
agccucucccuacucccauccca

SEQ ID NO: 51743 - RNA, 32 nt, Human
agccucucccucucccccagcuaguccccuga

SEQ ID NO: 51744 - RNA, 32 nt, Human
agccucuccugaaacaagaggggccgguggaa

SEQ ID NO: 51745 - RNA, 16 nt, Human
agccucuccugaauug

SEQ ID NO: 51746 - RNA, 32 nt, Human
agccucuccugccucugcaggccuggcagcua

SEQ ID NO: 51747 - RNA, 32 nt, Human
agccucucgagcagcuggaauuacaggcacgu

SEQ ID NO: 51748 - RNA, 32 nt, Human
agccucucgagcagcugggauuacagguaugc

SEQ ID NO: 51749 - RNA, 32 nt, Human
agccucucgaguagcuaggacuacaggcacau

SEQ ID NO: 51750 - RNA, 32 nt, Human
agccucucgaguagcuaggauuacaggcaugc

SEQ ID NO: 51751 - RNA, 32 nt, Human
agccucucgaguagcugcgacuacaggugccc

SEQ ID NO: 51752 - RNA, 32 nt, Human
agccucucgaguagcuggaauuacaggucugg

SEQ ID NO: 51753 - RNA, 32 nt, Human
agccucucgaguagcugggaccacaguugugu

SEQ ID NO: 51754 - RNA, 32 nt, Human
agccucucgaguagcugggacuacaggcguga

SEQ ID NO: 51755 - RNA, 32 nt, Human
agccucucgaguagcugggacuacaggcgugc

SEQ ID NO: 51756 - RNA, 32 nt, Human
agccucucgaguagcugggaguacagaugcac

SEQ ID NO: 51757 - RNA, 32 nt, Human
agccucucgaguagcugggauuacaggcaccu

SEQ ID NO: 51758 - RNA, 32 nt, Human
agccucucgaguagcugggauuacaggcaugc

SEQ ID NO: 51759 - RNA, 32 nt, Human
agccucucgaguagcugggauuacaggcgcau

SEQ ID NO: 51760 - RNA, 32 nt, Human
agccucucgaguagcugggauuauaggcgucc

SEQ ID NO: 51761 - RNA, 32 nt, Human
agccucucgaguagcuggggcuacagcuaugc

SEQ ID NO: 51762 - RNA, 32 nt, Human
agccucucgaguggcugggauuacaggcaucc

SEQ ID NO: 51763 - RNA, 32 nt, Human
agccucucuaguagcugagauuacaggcaugc

SEQ ID NO: 51764 - RNA, 32 nt, Human
agccucucuaguagcuggggcuccaggcauga

SEQ ID NO: 51765 - RNA, 17 nt, Human
agccucucucugaacug

SEQ ID NO: 51766 - RNA, 32 nt, Human
agccucucugcagccccucuuuuccuucaauc

SEQ ID NO: 51767 - RNA, 32 nt, Human
agccucucuggaagagaaaggaagagccagca

SEQ ID NO: 51768 - RNA, 32 nt, Human
agccucucuggccauugcagagcugcuggccu

SEQ ID NO: 51769 - RNA, 32 nt, Human
agccucucugguagcugggauuacagggaagg

SEQ ID NO: 51770 - RNA, 32 nt, Human
agccucucuuucuccuccacauacugcagccu

SEQ ID NO: 51771 - RNA, 32 nt, Human
agccucucuuugauagaauuuugaggccaugc

SEQ ID NO: 51772 - RNA, 32 nt, Human
agccucucuuuuccaggaaccuugccacaccu

SEQ ID NO: 51773 - RNA, 32 nt, Human
agccucugaaauugcugggauuacaggcauga

SEQ ID NO: 51774 - RNA, 32 nt, Human
agccucugaacaguaaaguuuugcuccagcca

SEQ ID NO: 51775 - RNA, 32 nt, Human
agccucugaaguagcugggacuacaggcguua

SEQ ID NO: 51776 - RNA, 32 nt, Human
agccucugaaguagcugggauuacaggcaugu

SEQ ID NO: 51777 - RNA, 32 nt, Human
agccucugagcugucauggacccacucugaug

SEQ ID NO: 51778 - RNA, 32 nt, Human
agccucugcaacagcucugccuccucuccagu

SEQ ID NO: 51779 - RNA, 32 nt, Human
agccucugcaccuggcuagggccaguguuuuu

SEQ ID NO: 51780 - RNA, 32 nt, Human
agccucugccaagcugaguauaugagaccuuu

SEQ ID NO: 51781 - RNA, 32 nt, Human
agccucugccacccuccaccuccucggucagc

SEQ ID NO: 51782 - RNA, 32 nt, Human
agccucugccauccacuugaggguauugagag

SEQ ID NO: 51783 - RNA, 32 nt, Human
agccucugcccaucccccucaagggcugcagg

SEQ ID NO: 51784 - RNA, 32 nt, Human
agccucugcccuccuccagcccggauggcucu

SEQ ID NO: 51785 - RNA, 32 nt, Human
agccucugccucuuccucugucuccugugggc

SEQ ID NO: 51786 - RNA, 32 nt, Human
agccucugcucccuccuggggacccacagcag

SEQ ID NO: 51787 - RNA, 32 nt, Human
agccucugcugcaaaugcucagcccugcuguu

SEQ ID NO: 51788 - RNA, 32 nt, Human
agccucugcugcaggugaggguugggggcagg

SEQ ID NO: 51789 - RNA, 32 nt, Human
agccucugcugcuccugcuccuggguuugaag

SEQ ID NO: 51790 - RNA, 32 nt, Human
agccucugcuguacacagaaacuacaggcucu

SEQ ID NO: 51791 - RNA, 32 nt, Human
agccucugcuuucccuuccuguccugagcaca

SEQ ID NO: 51792 - RNA, 32 nt, Human
agccucuggaguagcuggaacuacaggcuaaa

SEQ ID NO: 51793 - RNA, 32 nt, Human
agccucuggaguagcugggaccucaggcgcgc

SEQ ID NO: 51794 - RNA, 32 nt, Human
agccucuggaguagcugggacuacagacaugc

SEQ ID NO: 51795 - RNA, 32 nt, Human
agccucuggaguagcugggacuacaggcgugu

SEQ ID NO: 51796 - RNA, 32 nt, Human
agccucuggaguagcugggauuacagauggga

SEQ ID NO: 51797 - RNA, 32 nt, Human
agccucuggaguagcugggauuacaggcacgc

SEQ ID NO: 51798 - RNA, 32 nt, Human
agccucuggaguagcugggauuacaggugcgc

SEQ ID NO: 51799 - RNA, 32 nt, Human
agccucuggcugcaucugugcagccacauccu

SEQ ID NO: 51800 - RNA, 29 nt, Human
agccucuggcugcucuccuucccaauagu

SEQ ID NO: 51801 - RNA, 32 nt, Human
agccucugggaggguggcauguggcagcugca

SEQ ID NO: 51802 - RNA, 32 nt, Human
agccucuggggaggggaggugugaagccagag

SEQ ID NO: 51803 - RNA, 32 nt, Human
agccucugguggguuaucuccucuuugagaug

SEQ ID NO: 51804 - RNA, 32 nt, Human
agccucugucaugaggaacggaaaugcgaggg

SEQ ID NO: 51805 - RNA, 19 nt, Human
agccucugucccugaacug

SEQ ID NO: 51806 - RNA, 22 nt, Human
agccucugucucccgggcucaa

SEQ ID NO: 51807 - RNA, 32 nt, Human
agccucugucugccuagugagacauuuuugag

SEQ ID NO: 51808 - RNA, 32 nt, Human
agccucuguuccuccuggacauaggaaggucc

SEQ ID NO: 51809 - RNA, 19 nt, Human
agccucuguuggccugagg

SEQ ID NO: 51810 - RNA, 32 nt, Human
agccucuuaaguagcugagacuacaggugcgc

SEQ ID NO: 51811 - RNA, 32 nt, Human
agccucuuacguagcugggauuacaggcauga

SEQ ID NO: 51812 - RNA, 32 nt, Human
agccucuucacacccaccuggcuugcaucccc

SEQ ID NO: 51813 - RNA, 32 nt, Human
agccucuucauccucaaacaggaccaggccuc

SEQ ID NO: 51814 - RNA, 26 nt, Human
agccucuucccagcacccaccugcca

SEQ ID NO: 51815 - RNA, 32 nt, Human
agccucuuccucccucagaucccaccagaccc

SEQ ID NO: 51816 - RNA, 32 nt, Human
agccucuucucccaggggagcuacucaggacu

SEQ ID NO: 51817 - RNA, 32 nt, Human
agccucuucuccccaugcuucuaggaacugcc

SEQ ID NO: 51818 - RNA, 32 nt, Human
agccucuucugcgcacccaccugcugcaucuu

SEQ ID NO: 51819 - RNA, 32 nt, Human
agccucuucugggagaccccucuccccacgua

SEQ ID NO: 51820 - RNA, 32 nt, Human
agccucuucugugucuccuggguggcacuucu

SEQ ID NO: 51821 - RNA, 32 nt, Human
agccucuugaauagcugggacuagaagcaugc

SEQ ID NO: 51822 - RNA, 32 nt, Human
agccucuugaauagcugggauuacaggcgccc

SEQ ID NO: 51823 - RNA, 32 nt, Human
agccucuugaguagcuaggauuaccagugcac

SEQ ID NO: 51824 - RNA, 32 nt, Human
agccucuugaguagcuagguacaggcaccugc

SEQ ID NO: 51825 - RNA, 32 nt, Human
agccucuugaguagcugggacuacaggcgcac

SEQ ID NO: 51826 - RNA, 32 nt, Human
agccucuugaguagcugggacuacaggugccc

SEQ ID NO: 51827 - RNA, 32 nt, Human
agccucuugaguagcugggauuacaggaacgc

SEQ ID NO: 51828 - RNA, 32 nt, Human
agccucuugaguagcugggauuacaggcaugc

SEQ ID NO: 51829 - RNA, 32 nt, Human
agccucuugaguagcugggauuacaggcgccc

SEQ ID NO: 51830 - RNA, 32 nt, Human
agccucuugaguagcuugguuuauaggcgcau

SEQ ID NO: 51831 - RNA, 32 nt, Human
agccucuugaguggcugggauugcaggcgccc

SEQ ID NO: 51832 - RNA, 32 nt, Human
agccucuugaguggcugggauugcgggcacau

SEQ ID NO: 51833 - RNA, 32 nt, Human
agccucuugccuggcccugcugagaccacugc

SEQ ID NO: 51834 - RNA, 32 nt, Human
agccucuugccuggcugccagugggaguagcc

SEQ ID NO: 51835 - RNA, 32 nt, Human
agccucuugucagagcccucaggcaggcagau

SEQ ID NO: 51836 - RNA, 32 nt, Human
agccucuuguggugguggcugugcccccuaug

SEQ ID NO: 51837 - RNA, 23 nt, Human
agccucuuuccgcccugcccucc

SEQ ID NO: 51838 - RNA, 32 nt, Human
agccucuuuccucaccaaauggcaugcuggga

SEQ ID NO: 51839 - RNA, 32 nt, Human
agccucuuucuggagaccccaaagcuggaggg

SEQ ID NO: 51840 - RNA, 32 nt, Human
agccucuuuugcuuccuuuucuugcccaugcc

SEQ ID NO: 51841 - RNA, 28 nt, Human
agccugaaaagugcugucacgucagcgg

SEQ ID NO: 51842 - RNA, 32 nt, Human
agccugaacugaggccuugugugucaggcccu

SEQ ID NO: 51843 - RNA, 19 nt, Human
agccugaacuuccugaagg

SEQ ID NO: 51844 - RNA, 31 nt, Human
agccugaagagaccagugagcucacugugac

SEQ ID NO: 51845 - RNA, 20 nt, Human
agccugaagagcuuggacug

SEQ ID NO: 51846 - RNA, 32 nt, Human
agccugaaguacacucucgcugugcugucauu

SEQ ID NO: 51847 - RNA, 32 nt, Human
agccugaaguagugaugaguagucugggcccu

SEQ ID NO: 51848 - RNA, 32 nt, Human
agccugacauggugaaaccccaucucuacgaa

SEQ ID NO: 51849 - RNA, 32 nt, Human
agccugaccaaacauggcgaaaccccaucugu

SEQ ID NO: 51850 - RNA, 32 nt, Human
agccugaccaacacugagaaaccccaucucua

SEQ ID NO: 51851 - RNA, 21 nt, Human
agccugaccaacaugaugaaa

SEQ ID NO: 51852 - RNA, 21 nt, Human
agccugaccaacauggagaaa

SEQ ID NO: 51853 - RNA, 21 nt, Human
agccugaccaacaugguagaa

SEQ ID NO: 51854 - RNA, 21 nt, Human
agccugaccaacauggugaaa

SEQ ID NO: 51855 - RNA, 32 nt, Human
agccugaccaacauggugaaaaccccaucucu

SEQ ID NO: 51856 - RNA, 21 nt, Human
agccugaccaacguggcgaaa

SEQ ID NO: 51857 - RNA, 21 nt, Human
agccugaccaacguggugaaa

SEQ ID NO: 51858 - RNA, 21 nt, Human
agccugaccaauauggugaaa

SEQ ID NO: 51859 - RNA, 21 nt, Human
agccugaccaucauggugaaa

SEQ ID NO: 51860 - RNA, 32 nt, Human
agccugaccccaugccugucauggaacccucc

SEQ ID NO: 51861 - RNA, 32 nt, Human
agccugaccuuccagucucucuucccacucag

SEQ ID NO: 51862 - RNA, 32 nt, Human
agccugacgccgugccccuccuggcccauacg

SEQ ID NO: 51863 - RNA, 32 nt, Human
agccugacucuucccuuccccucucucauucc

SEQ ID NO: 51864 - RNA, 32 nt, Human
agccugacugcaacucaccucgaaggcggacc

SEQ ID NO: 51865 - RNA, 32 nt, Human
agccugagaagaggcagaggaagggcgaaaca

SEQ ID NO: 51866 - RNA, 32 nt, Human
agccugagaagcugcuggaggagaugcccaag

SEQ ID NO: 51867 - RNA, 32 nt, Human
agccugagaaugaccugcccuggccccagccc

SEQ ID NO: 51868 - RNA, 32 nt, Human
agccugagaccccagcccuggccuccccacuc

SEQ ID NO: 51869 - RNA, 32 nt, Human
agccugagagaugaagguugcagugagccgug

SEQ ID NO: 51870 - RNA, 32 nt, Human
agccugagaguuaggagaaauauuucagagcc

SEQ ID NO: 51871 - RNA, 21 nt, Human
agccugagcaacacugugaga

SEQ ID NO: 51872 - RNA, 32 nt, Human
agccugagcaacauagaccccaucucuaaaaa

SEQ ID NO: 51873 - RNA, 21 nt, Human
agccugagcaacauggugaaa

SEQ ID NO: 51874 - RNA, 32 nt, Human
agccugagcaaugacucgcaagcaauguuaga

SEQ ID NO: 51875 - RNA, 20 nt, Human
agccugagccagcacuugcc

SEQ ID NO: 51876 - RNA, 32 nt, Human
agccugagcccuggcccugcugcuuggugaau

SEQ ID NO: 51877 - RNA, 32 nt, Human
agccugagccgcugcggugagccaacccaaac

SEQ ID NO: 51878 - RNA, 32 nt, Human
agccugagcgagagacggggaagcacggagga

SEQ ID NO: 51879 - RNA, 32 nt, Human
agccugagcucuuccccaugcuugggacacgu

SEQ ID NO: 51880 - RNA, 32 nt, Human
agccugagcuuuguguagcucgagcuuugugu

SEQ ID NO: 51881 - RNA, 31 nt, Human
agccugaggagaccuggguaguggagacgcu

SEQ ID NO: 51882 - RNA, 32 nt, Human
agccugaggaggagggagagggaggaacaacc

SEQ ID NO: 51883 - RNA, 32 nt, Human
agccugaggcccgaggucagaggauucaggaa

SEQ ID NO: 51884 - RNA, 21 nt, Human
agccugaggcucuggagugcc

SEQ ID NO: 51885 - RNA, 32 nt, Human
agccugaggggaaggaaggaaguacgggcgaa

SEQ ID NO: 51886 - RNA, 32 nt, Human
agccugaggugaucuuucccuccucugaacua

SEQ ID NO: 51887 - RNA, 32 nt, Human
agccugaggugcagcuuuuauuuauguuuucc

SEQ ID NO: 51888 - RNA, 32 nt, Human
agccugagguggguggaggggacaguguucug

SEQ ID NO: 51889 - RNA, 32 nt, Human
agccugagguuugcucucuucccuucaucagg

SEQ ID NO: 51890 - RNA, 32 nt, Human
agccugagucuccagcccaaaccugccuuccu

SEQ ID NO: 51891 - RNA, 32 nt, Human
agccugaguggagcagagaugggcaccaguug

SEQ ID NO: 51892 - RNA, 32 nt, Human
agccugagugggguggugcaggccgguagucu

SEQ ID NO: 51893 - RNA, 32 nt, Human
agccugauagaaaucagugguguggggcacug

SEQ ID NO: 51894 - RNA, 32 nt, Human
agccugaugauggggaacccagagccacccgc

SEQ ID NO: 51895 - RNA, 32 nt, Human
agccugaugcauugugauggccaucugcccag

SEQ ID NO: 51896 - RNA, 32 nt, Human
agccugaugccaccuccucuguucuuggaaca

SEQ ID NO: 51897 - RNA, 32 nt, Human
agccugauuuuggggaggaggaaggggcgauu

SEQ ID NO: 51898 - RNA, 32 nt, Human
agccugcaaaacugauguaacuggagagcuac

SEQ ID NO: 51899 - RNA, 32 nt, Human
agccugcaaaucucccucuuguggaauuccac

SEQ ID NO: 51900 - RNA, 32 nt, Human
agccugcaacaugccagccacugugauagagg

SEQ ID NO: 51901 - RNA, 32 nt, Human
agccugcaaccaggacgcucuccaggaggcgg

SEQ ID NO: 51902 - RNA, 32 nt, Human
agccugcaaccuuugcacuccacugugcaaug

SEQ ID NO: 51903 - RNA, 32 nt, Human
agccugcaagauggagguugcagugagcucag

SEQ ID NO: 51904 - RNA, 32 nt, Human
agccugcaauaucuuuccuuccuuccuugcua

SEQ ID NO: 51905 - RNA, 22 nt, Human
agccugcaaucccagcuacuug

SEQ ID NO: 51906 - RNA, 32 nt, Human
agccugcacacacacuuccuguccacaggggg

SEQ ID NO: 51907 - RNA, 24 nt, Human
agccugcacagcuucuugcacuca

SEQ ID NO: 51908 - RNA, 32 nt, Human
agccugcacugggagcacagccagguuccccc

SEQ ID NO: 51909 - RNA, 22 nt, Human
agccugcagaaccagcacacca

SEQ ID NO: 51910 - RNA, 32 nt, Human
agccugcagaagcagagcaagcauaugaaaca

SEQ ID NO: 51911 - RNA, 32 nt, Human
agccugcagagaagaaagugaggccgggagcc

SEQ ID NO: 51912 - RNA, 32 nt, Human
agccugcagcaacagaacacuugaccuuaaaa

SEQ ID NO: 51913 - RNA, 32 nt, Human
agccugcagcagcugcaguaagccaagaucau

SEQ ID NO: 51914 - RNA, 32 nt, Human
agccugcagcauggcccagcuguuccugcccc

SEQ ID NO: 51915 - RNA, 32 nt, Human
agccugcagccugccagagcagagccacccgc

SEQ ID NO: 51916 - RNA, 32 nt, Human
agccugcaggaccucgugccaccccgagggcu

SEQ ID NO: 51917 - RNA, 32 nt, Human
agccugcaggccagaagcaguguuacacacuu

SEQ ID NO: 51918 - RNA, 32 nt, Human
agccugcagggugggugucgggacaugcugau

SEQ ID NO: 51919 - RNA, 32 nt, Human
agccugcaggguggugcugggacugagccagu

SEQ ID NO: 51920 - RNA, 32 nt, Human
agccugcagggugugggcagagaagggcaucu

SEQ ID NO: 51921 - RNA, 32 nt, Human
agccugcagguaggaccauugcagugaugggc

SEQ ID NO: 51922 - RNA, 32 nt, Human
agccugcagguggcaccgguggcccuggcugc

SEQ ID NO: 51923 - RNA, 24 nt, Human
agccugcagucccagcuacuuggg

SEQ ID NO: 51924 - RNA, 32 nt, Human
agccugcagugagccgagaucgcgccacugca

SEQ ID NO: 51925 - RNA, 32 nt, Human
agccugcaucugucuguccuuccuuccauugc

SEQ ID NO: 51926 - RNA, 32 nt, Human
agccugcauggaacuuccuuccucacucagcu

SEQ ID NO: 51927 - RNA, 18 nt, Human
agccugcauucugagcug

SEQ ID NO: 51928 - RNA, 32 nt, Human
agccugccaaagcacugggauuacaggcauga

SEQ ID NO: 51929 - RNA, 32 nt, Human
agccugccaaagugcugggauuacuggcguga

SEQ ID NO: 51930 - RNA, 19 nt, Human
agccugccaacaccugccu

SEQ ID NO: 51931 - RNA, 20 nt, Human
agccugccaacauggugaaa

SEQ ID NO: 51932 - RNA, 32 nt, Human
agccugccaagcagcgugccccgguugcaggc

SEQ ID NO: 51933 - RNA, 32 nt, Human
agccugccaaguagcuggauuacaggcacgug

SEQ ID NO: 51934 - RNA, 32 nt, Human
agccugccaaguagcugggacuaccggcgccc

SEQ ID NO: 51935 - RNA, 32 nt, Human
agccugccaaguagcugggauuacagacaggc

SEQ ID NO: 51936 - RNA, 32 nt, Human
agccugccaaguagcugggauuacaggcaugc

SEQ ID NO: 51937 - RNA, 31 nt, Human
agccugccacccucugggccuccuaccugug

SEQ ID NO: 51938 - RNA, 32 nt, Human
agccugccaccugaacuacucauaggaaauga

SEQ ID NO: 51939 - RNA, 32 nt, Human
agccugccacuaccccgagucucuccagguca

SEQ ID NO: 51940 - RNA, 32 nt, Human
agccugccacuugccucccugccugcuucugg

SEQ ID NO: 51941 - RNA, 32 nt, Human
agccugccauguccacaguuccuugggcugcu

SEQ ID NO: 51942 - RNA, 21 nt, Human
agccugcccaacauggugaaa

SEQ ID NO: 51943 - RNA, 32 nt, Human
agccugcccacagcagccuccuagaguuagca

SEQ ID NO: 51944 - RNA, 32 nt, Human
agccugcccaccucucagcccugggccaggga

SEQ ID NO: 51945 - RNA, 32 nt, Human
agccugcccacuacauccagccuguggcuuug

SEQ ID NO: 51946 - RNA, 32 nt, Human
agccugcccagccugcaccacccugcccgccc

SEQ ID NO: 51947 - RNA, 32 nt, Human
agccugcccaggaugcaggagccuuugaugag

SEQ ID NO: 51948 - RNA, 32 nt, Human
agccugcccaggugcugagauuacauguauga

SEQ ID NO: 51949 - RNA, 32 nt, Human
agccugcccgcagccuuauaguggggagggaa

SEQ ID NO: 51950 - RNA, 32 nt, Human
agccugcccugagaagguuuucuuccuucugu

SEQ ID NO: 51951 - RNA, 32 nt, Human
agccugcccugccuccuccaucagauccuuug

SEQ ID NO: 51952 - RNA, 32 nt, Human
agccugcccuggaggggaaggaaguccaugca

SEQ ID NO: 51953 - RNA, 32 nt, Human
agccugccgaguagcugggacuacaggucuaa

SEQ ID NO: 51954 - RNA, 32 nt, Human
agccugccgagugccugcgauuacaggcgcgc

SEQ ID NO: 51955 - RNA, 20 nt, Human
agccugccgcuccuggacug

SEQ ID NO: 51956 - RNA, 32 nt, Human
agccugccuaacucugccugguggcagugagc

SEQ ID NO: 51957 - RNA, 32 nt, Human
agccugccuaguagcugggacuacaggcgcgc

SEQ ID NO: 51958 - RNA, 32 nt, Human
agccugccuauaagguugggauuagcaugcaa

SEQ ID NO: 51959 - RNA, 32 nt, Human
agccugccucccagguuucuggcuuguggggg

SEQ ID NO: 51960 - RNA, 16 nt, Human
agccugccuccuccca

SEQ ID NO: 51961 - RNA, 32 nt, Human
agccugccugcagggauggucuccuuuuaaag

SEQ ID NO: 51962 - RNA, 32 nt, Human
agccugccugucgucuguggccaugcccauca

SEQ ID NO: 51963 - RNA, 32 nt, Human
agccugccuucccaacaucaugcccauagucu

SEQ ID NO: 51964 - RNA, 32 nt, Human
agccugcgaggaagguggggucucagugcuuu

SEQ ID NO: 51965 - RNA, 23 nt, Human
agccugcgaggccaaggcugcag

SEQ ID NO: 51966 - RNA, 26 nt, Human
agccugcgccccccucccuccucucc

SEQ ID NO: 51967 - RNA, 17 nt, Human
agccugcgccugagcug

SEQ ID NO: 51968 - RNA, 32 nt, Human
agccugcgcgcaucugucacucagggacuuuc

SEQ ID NO: 51969 - RNA, 32 nt, Human
agccugcgcuuuccgccuuccuucccucacaa

SEQ ID NO: 51970 - RNA, 22 nt, Human
agccugcggacccgcccaggga

SEQ ID NO: 51971 - RNA, 32 nt, Human
agccugcggcgccagccucacggagggccgug

SEQ ID NO: 51972 - RNA, 32 nt, Human
agccugcgucuggucugugucacacacagcag

SEQ ID NO: 51973 - RNA, 32 nt, Human
agccugcgugacacaaccacacuguagccugu

SEQ ID NO: 51974 - RNA, 20 nt, Human
agccugcgugagccgaggcg

SEQ ID NO: 51975 - RNA, 25 nt, Human
agccugcuagaacccccacccacca

SEQ ID NO: 51976 - RNA, 23 nt, Human
agccugcucagccuucucugagc

SEQ ID NO: 51977 - RNA, 32 nt, Human
agccugcuccagugacagcccaagauagaauc

SEQ ID NO: 51978 - RNA, 32 nt, Human
agccugcuccccgcaccccauggaggcgcaau

SEQ ID NO: 51979 - RNA, 32 nt, Human
agccugcucccucacccaggcacugggcaagu

SEQ ID NO: 51980 - RNA, 32 nt, Human
agccugcucccuccuaagaagaucccaagaau

SEQ ID NO: 51981 - RNA, 32 nt, Human
agccugcucuccccaaccacucuccccagauc

SEQ ID NO: 51982 - RNA, 32 nt, Human
agccugcucucggugugggccuaugucuaggc

SEQ ID NO: 51983 - RNA, 32 nt, Human
agccugcugaccagcugggaugauaggcaggc

SEQ ID NO: 51984 - RNA, 32 nt, Human
agccugcugagacucccuagccacagaaacag

SEQ ID NO: 51985 - RNA, 32 nt, Human
agccugcugagcuccacugguuuauccggggc

SEQ ID NO: 51986 - RNA, 32 nt, Human
agccugcugaguagcugggacuacaggcacau

SEQ ID NO: 51987 - RNA, 32 nt, Human
agccugcugaguagcugggauugcaggugugu

SEQ ID NO: 51988 - RNA, 32 nt, Human
agccugcugccuccccuccaucagccacagcu

SEQ ID NO: 51989 - RNA, 32 nt, Human
agccugcugcgcaccuucuccugcugcuaccc

SEQ ID NO: 51990 - RNA, 32 nt, Human
agccugcugucucaggaagcuguagaaggagu

SEQ ID NO: 51991 - RNA, 32 nt, Human
agccugcugugugccaggcuuugugcugagug

SEQ ID NO: 51992 - RNA, 32 nt, Human
agccugcuucagggcuucaggcugcuucugcu

SEQ ID NO: 51993 - RNA, 32 nt, Human
agccugcuugagcaucccuugugagcugugaa

SEQ ID NO: 51994 - RNA, 32 nt, Human
agccugcuuucagccaucaccuugccacagug

SEQ ID NO: 51995 - RNA, 32 nt, Human
agccuggaaaaaucacacuucuuugucauugu

SEQ ID NO: 51996 - RNA, 32 nt, Human
agccuggaaauguugacccucaaagggcauaa

SEQ ID NO: 51997 - RNA, 32 nt, Human
agccuggaacuccugggcucaggauccuucug

SEQ ID NO: 51998 - RNA, 32 nt, Human
agccuggaagacagaguaagauccaauuucac

SEQ ID NO: 51999 - RNA, 32 nt, Human
agccuggaaggucaagacugcagugagcugug

SEQ ID NO: 52000 - RNA, 32 nt, Human
agccuggaagguggaaguugcagugagucgag

SEQ ID NO: 52001 - RNA, 32 nt, Human
agccuggaaguguuacuggugccuggaacuga

SEQ ID NO: 52002 - RNA, 32 nt, Human
agccuggaaucagcuggagaacaucugcccuc

SEQ ID NO: 52003 - RNA, 22 nt, Human
agccuggaauuccugggcucaa

SEQ ID NO: 52004 - RNA, 32 nt, Human
agccuggacaacacagugagaccucaucucua

SEQ ID NO: 52005 - RNA, 21 nt, Human
agccuggacaacauggugaaa

SEQ ID NO: 52006 - RNA, 18 nt, Human
agccuggacacccaggag

SEQ ID NO: 52007 - RNA, 32 nt, Human
agccuggacucggcacucacagcugcugugca

SEQ ID NO: 52008 - RNA, 18 nt, Human
agccuggacucugagcug

SEQ ID NO: 52009 - RNA, 32 nt, Human
agccuggacuggccuccaggaugaggaugggg

SEQ ID NO: 52010 - RNA, 32 nt, Human
agccuggagaacugcaggggccaagguggagg

SEQ ID NO: 52011 - RNA, 32 nt, Human
agccuggagacguucuuggugaaagcuguggu

SEQ ID NO: 52012 - RNA, 32 nt, Human
agccuggagauguagaggcugcaaugagcugu

SEQ ID NO: 52013 - RNA, 32 nt, Human
agccuggagauguagaggcugcagugagcugu

SEQ ID NO: 52014 - RNA, 18 nt, Human
agccuggagauuggacug

SEQ ID NO: 52015 - RNA, 32 nt, Human
agccuggagccagaaccugugaagagcggaag

SEQ ID NO: 52016 - RNA, 23 nt, Human
agccuggaggucaaggcugcagu

SEQ ID NO: 52017 - RNA, 32 nt, Human
agccuggaggucaaggcugcagugagccaugu

SEQ ID NO: 52018 - RNA, 32 nt, Human
agccuggagucgggggacccagcuggaggcca

SEQ ID NO: 52019 - RNA, 32 nt, Human
agccuggaugacagagaaggucaugggaacau

SEQ ID NO: 52020 - RNA, 32 nt, Human
  misc_feature (28)..(28): n is a, c, g, or u
agccuggaugacagagugagaccuuaunucaa

SEQ ID NO: 52021 - RNA, 32 nt, Human
agccuggaugacagagugagaccuugucucaa

SEQ ID NO: 52022 - RNA, 32 nt, Human
agccuggaugacagagugagacuccaucucaa

SEQ ID NO: 52023 - RNA, 32 nt, Human
agccuggaugacagagugagacuccgucucaa

SEQ ID NO: 52024 - RNA, 32 nt, Human
agccuggaugagggucuuuagcaaagauggaa

SEQ ID NO: 52025 - RNA, 18 nt, Human
agccuggauucgaaucug

SEQ ID NO: 52026 - RNA, 32 nt, Human
agccuggauugcuuaguaggggaauaaggcau

SEQ ID NO: 52027 - RNA, 32 nt, Human
agccuggauuuuuauuucugccaugaaaccca

SEQ ID NO: 52028 - RNA, 21 nt, Human
agccuggcaaacaugaugaaa

SEQ ID NO: 52029 - RNA, 21 nt, Human
agccuggcaaacauggcgaaa

SEQ ID NO: 52030 - RNA, 32 nt, Human
agccuggcacuucccauucaggccaccugcuu

SEQ ID NO: 52031 - RNA, 32 nt, Human
agccuggcagaggcacccauuccauucccagc

SEQ ID NO: 52032 - RNA, 17 nt, Human
agccuggcagcuagcug

SEQ ID NO: 52033 - RNA, 32 nt, Human
agccuggcaucuuccuguucuaccuccucauu

SEQ ID NO: 52034 - RNA, 21 nt, Human
agccuggccaacacggugaaa

SEQ ID NO: 52035 - RNA, 32 nt, Human
agccuggccaacagacgugagccauuuuccca

SEQ ID NO: 52036 - RNA, 21 nt, Human
agccuggccaacauagcgaaa

SEQ ID NO: 52037 - RNA, 21 nt, Human
agccuggccaacauagggaaa

SEQ ID NO: 52038 - RNA, 32 nt, Human
agccuggccaacauauagugaaacccagucuc

SEQ ID NO: 52039 - RNA, 21 nt, Human
agccuggccaacaucaugaaa

SEQ ID NO: 52040 - RNA, 21 nt, Human
agccuggccaacaugaugaaa

SEQ ID NO: 52041 - RNA, 21 nt, Human
agccuggccaacaugaugaag

SEQ ID NO: 52042 - RNA, 21 nt, Human
agccuggccaacauggagaaa

SEQ ID NO: 52043 - RNA, 32 nt, Human
agccuggccaacauggcagaaaccccaucucu

SEQ ID NO: 52044 - RNA, 20 nt, Human
agccuggccaacauggcgaa

SEQ ID NO: 52045 - RNA, 21 nt, Human
agccuggccaacauggcgaaa

SEQ ID NO: 52046 - RNA, 21 nt, Human
agccuggccaacauggcggaa

SEQ ID NO: 52047 - RNA, 21 nt, Human
agccuggccaacauggggaaa

SEQ ID NO: 52048 - RNA, 18 nt, Human
agccuggccaacauggug

SEQ ID NO: 52049 - RNA, 20 nt, Human
agccuggccaacauggugaa

SEQ ID NO: 52050 - RNA, 21 nt, Human
agccuggccaacauggugaaa

SEQ ID NO: 52051 - RNA, 21 nt, Human
agccuggccaacauggugaag

SEQ ID NO: 52052 - RNA, 21 nt, Human
agccuggccaacaugguggaa

SEQ ID NO: 52053 - RNA, 32 nt, Human
agccuggccaacaugucagaacuacuaaaaau

SEQ ID NO: 52054 - RNA, 21 nt, Human
agccuggccaacauugugaaa

SEQ ID NO: 52055 - RNA, 32 nt, Human
agccuggccaacccagccuggucaacauggug

SEQ ID NO: 52056 - RNA, 21 nt, Human
agccuggccaaccuggugaaa

SEQ ID NO: 52057 - RNA, 21 nt, Human
agccuggccaacgugaugaaa

SEQ ID NO: 52058 - RNA, 21 nt, Human
agccuggccaacguggugaaa

SEQ ID NO: 52059 - RNA, 21 nt, Human
agccuggccaacuuagugaaa

SEQ ID NO: 52060 - RNA, 21 nt, Human
agccuggccaacuugaugaaa

SEQ ID NO: 52061 - RNA, 21 nt, Human
agccuggccaacuuggugaaa

SEQ ID NO: 52062 - RNA, 21 nt, Human
agccuggccaagauggugaaa

SEQ ID NO: 52063 - RNA, 21 nt, Human
agccuggccaauauggugaaa

SEQ ID NO: 52064 - RNA, 32 nt, Human
agccuggccaauauggugaaaccacgucucua

SEQ ID NO: 52065 - RNA, 20 nt, Human
agccuggccacauggugaaa

SEQ ID NO: 52066 - RNA, 32 nt, Human
agccuggccaccaucucccuggagauggagcg

SEQ ID NO: 52067 - RNA, 21 nt, Human
agccuggccaccauggugaaa

SEQ ID NO: 52068 - RNA, 32 nt, Human
agccuggccacugccuagcuggaaugggagga

SEQ ID NO: 52069 - RNA, 21 nt, Human
agccuggccagcacggugaaa

SEQ ID NO: 52070 - RNA, 21 nt, Human
agccuggccagcauagugaaa

SEQ ID NO: 52071 - RNA, 21 nt, Human
agccuggccagcauggcgaaa

SEQ ID NO: 52072 - RNA, 21 nt, Human
agccuggccagcauggugaaa

SEQ ID NO: 52073 - RNA, 32 nt, Human
agccuggccagcugcucagaccagcuugcaga

SEQ ID NO: 52074 - RNA, 21 nt, Human
agccuggccaucauggugaaa

SEQ ID NO: 52075 - RNA, 25 nt, Human
agccuggcccagcccaccucccccu

SEQ ID NO: 52076 - RNA, 32 nt, Human
agccuggccccagggacuucacggauccccug

SEQ ID NO: 52077 - RNA, 19 nt, Human
agccuggccccucaccaca

SEQ ID NO: 52078 - RNA, 32 nt, Human
agccuggccccucugcugagcacuuugcgcug

SEQ ID NO: 52079 - RNA, 18 nt, Human
agccuggccccuggaacu

SEQ ID NO: 52080 - RNA, 17 nt, Human
agccuggcccugagcug

SEQ ID NO: 52081 - RNA, 32 nt, Human
agccuggcccuggaggguggucacggccccuc

SEQ ID NO: 52082 - RNA, 18 nt, Human
agccuggcccuggcacug

SEQ ID NO: 52083 - RNA, 15 nt, Human
agccuggccuaauug

SEQ ID NO: 52084 - RNA, 32 nt, Human
agccuggccuacaugguugaaaccccaucucu

SEQ ID NO: 52085 - RNA, 22 nt, Human
agccuggccuccagccccagca

SEQ ID NO: 52086 - RNA, 32 nt, Human
agccuggccuccugaugcugugcucuucaucu

SEQ ID NO: 52087 - RNA, 17 nt, Human
agccuggccucugccug

SEQ ID NO: 52088 - RNA, 17 nt, Human
agccuggccugacgcug

SEQ ID NO: 52089 - RNA, 32 nt, Human
agccuggccugaggcaggcugcgcgggaggcc

SEQ ID NO: 52090 - RNA, 18 nt, Human
agccuggccugccaaacu

SEQ ID NO: 52091 - RNA, 32 nt, Human
agccuggccugcuccccucuggucaccgacac

SEQ ID NO: 52092 - RNA, 18 nt, Human
agccuggccuggagccug

SEQ ID NO: 52093 - RNA, 17 nt, Human
agccuggccuggcacug

SEQ ID NO: 52094 - RNA, 17 nt, Human
agccuggccuggcucug

SEQ ID NO: 52095 - RNA, 32 nt, Human
agccuggccugggccucuuacccacuugguug

SEQ ID NO: 52096 - RNA, 17 nt, Human
agccuggccuguggcug

SEQ ID NO: 52097 - RNA, 18 nt, Human
agccuggccuucaugacu

SEQ ID NO: 52098 - RNA, 17 nt, Human
agccuggccuugaaucc

SEQ ID NO: 52099 - RNA, 32 nt, Human
agccuggccuugagggaggggugcaggugugg

SEQ ID NO: 52100 - RNA, 21 nt, Human
agccuggcuaacacagugaaa

SEQ ID NO: 52101 - RNA, 21 nt, Human
agccuggcuaacacggugaaa

SEQ ID NO: 52102 - RNA, 21 nt, Human
agccuggcuaacauggcgaaa

SEQ ID NO: 52103 - RNA, 21 nt, Human
agccuggcuaacauggugaaa

SEQ ID NO: 52104 - RNA, 32 nt, Human
agccuggcuauacagugcauccuugaacuguc

SEQ ID NO: 52105 - RNA, 32 nt, Human
agccuggcucaggccuuucugggcugcuucuc

SEQ ID NO: 52106 - RNA, 18 nt, Human
agccuggcuccugaaucc

SEQ ID NO: 52107 - RNA, 17 nt, Human
agccuggcucugaagug

SEQ ID NO: 52108 - RNA, 17 nt, Human
agccuggcucugcuuug

SEQ ID NO: 52109 - RNA, 17 nt, Human
agccuggcucuggccug

SEQ ID NO: 52110 - RNA, 18 nt, Human
agccuggcucuugugcug

SEQ ID NO: 52111 - RNA, 32 nt, Human
agccuggcugacacaggugugaagaggccauc

SEQ ID NO: 52112 - RNA, 16 nt, Human
agccuggcugcugcug

SEQ ID NO: 52113 - RNA, 15 nt, Human
agccuggcuggacug

SEQ ID NO: 52114 - RNA, 18 nt, Human
agccuggcuggagagcug

SEQ ID NO: 52115 - RNA, 32 nt, Human
agccuggcuggcuuagugccucuuaguccauc

SEQ ID NO: 52116 - RNA, 16 nt, Human
agccuggcugggacug

SEQ ID NO: 52117 - RNA, 17 nt, Human
agccuggcugugggcug

SEQ ID NO: 52118 - RNA, 20 nt, Human
agccuggcuguuguguggua

SEQ ID NO: 52119 - RNA, 17 nt, Human
agccuggcuucaaauug

SEQ ID NO: 52120 - RNA, 18 nt, Human
agccuggcuucagagcug

SEQ ID NO: 52121 - RNA, 18 nt, Human
agccuggcuuccccggau

SEQ ID NO: 52122 - RNA, 17 nt, Human
agccuggcuucuagcug

SEQ ID NO: 52123 - RNA, 15 nt, Human
agccuggcuucucug

SEQ ID NO: 52124 - RNA, 32 nt, Human
agccuggcuucugguugucauggaugcacugg

SEQ ID NO: 52125 - RNA, 17 nt, Human
agccuggcuucugucug

SEQ ID NO: 52126 - RNA, 17 nt, Human
agccuggcuucuuacug

SEQ ID NO: 52127 - RNA, 17 nt, Human
agccuggcuugaaccug

SEQ ID NO: 52128 - RNA, 32 nt, Human
agccuggcuugaaccugggaggcggagguugc

SEQ ID NO: 52129 - RNA, 17 nt, Human
agccuggcuugagacug

SEQ ID NO: 52130 - RNA, 15 nt, Human
agccuggcuuggcug

SEQ ID NO: 52131 - RNA, 32 nt, Human
agccuggcuuuggguacagcauguggaugaag

SEQ ID NO: 52132 - RNA, 18 nt, Human
agccuggcuuuuauaacu

SEQ ID NO: 52133 - RNA, 15 nt, Human
agccuggcuuuucug

SEQ ID NO: 52134 - RNA, 17 nt, Human
agccuggcuuuugccug

SEQ ID NO: 52135 - RNA, 32 nt, Human
agccugggaaagaggcugggcugccugugauc

SEQ ID NO: 52136 - RNA, 24 nt, Human
agccugggaacucaaggcugcagu

SEQ ID NO: 52137 - RNA, 32 nt, Human
agccugggaaggcagccggugccugaauacuu

SEQ ID NO: 52138 - RNA, 24 nt, Human
agccugggaagucaagccugcagu

SEQ ID NO: 52139 - RNA, 32 nt, Human
agccugggaagucaagccugcagugagccaug

SEQ ID NO: 52140 - RNA, 32 nt, Human
agccugggaaguggaaguugcagugagccaag

SEQ ID NO: 52141 - RNA, 32 nt, Human
agccugggaaguggaggcugcagugagccuag

SEQ ID NO: 52142 - RNA, 32 nt, Human
agccugggaaguggagguugcaguaggcugaa

SEQ ID NO: 52143 - RNA, 32 nt, Human
agccugggaaguugaggcugcagugagccgug

SEQ ID NO: 52144 - RNA, 32 nt, Human
agccugggaauucgaagcugcagugagcuaug

SEQ ID NO: 52145 - RNA, 32 nt, Human
agccugggaauuugcauuuccacaggcauccg

SEQ ID NO: 52146 - RNA, 24 nt, Human
agccugggagaccaccccuugcca

SEQ ID NO: 52147 - RNA, 32 nt, Human
agccugggagaucgaggcugcagugagccaag

SEQ ID NO: 52148 - RNA, 32 nt, Human
agccugggagauggagguugcagugagcugag

SEQ ID NO: 52149 - RNA, 32 nt, Human
agccugggagcaaggguugcagugagcugaga

SEQ ID NO: 52150 - RNA, 32 nt, Human
agccugggagcgcagguugcaaugagccaaga

SEQ ID NO: 52151 - RNA, 32 nt, Human
agccugggaggaagagguugcagugagccgag

SEQ ID NO: 52152 - RNA, 32 nt, Human
agccugggaggagaaggagccgggaggggcgc

SEQ ID NO: 52153 - RNA, 32 nt, Human
agccugggaggcagagauugcacugagccgag

SEQ ID NO: 52154 - RNA, 32 nt, Human
agccugggaggcagaggcugcagugagccgag

SEQ ID NO: 52155 - RNA, 32 nt, Human
agccugggaggcagagguugcagugagccaag

SEQ ID NO: 52156 - RNA, 32 nt, Human
agccugggaggcagagguugcagugagccgag

SEQ ID NO: 52157 - RNA, 32 nt, Human
agccugggaggcagagguugcagugagcugag

SEQ ID NO: 52158 - RNA, 32 nt, Human
agccugggaggcagagguugcugugagccgag

SEQ ID NO: 52159 - RNA, 26 nt, Human
agccugggaggcggagguugcaguga

SEQ ID NO: 52160 - RNA, 32 nt, Human
agccugggaggcggagguugcagugagccgag

SEQ ID NO: 52161 - RNA, 32 nt, Human
agccugggaggcggggguuguggugagccgag

SEQ ID NO: 52162 - RNA, 32 nt, Human
agccugggaggucaagccuacagugagccaug

SEQ ID NO: 52163 - RNA, 24 nt, Human
agccugggaggucaaggcugcagu

SEQ ID NO: 52164 - RNA, 32 nt, Human
agccugggaggucaaggcugcagugaaccaug

SEQ ID NO: 52165 - RNA, 32 nt, Human
agccugggaggucaaggcugcagugagccaug

SEQ ID NO: 52166 - RNA, 32 nt, Human
agccugggaggucaaggcugcagugagccgag

SEQ ID NO: 52167 - RNA, 32 nt, Human
agccugggaggucaaggcugcagugagccgug

SEQ ID NO: 52168 - RNA, 32 nt, Human
agccugggaggucaaggcugcagugagcugug

SEQ ID NO: 52169 - RNA, 32 nt, Human
agccugggaggucgaggcugcagugagcugug

SEQ ID NO: 52170 - RNA, 32 nt, Human
agccugggagguggaggcuacugugagccaug

SEQ ID NO: 52171 - RNA, 32 nt, Human
agccugggagguggagguugcacugaguagag

SEQ ID NO: 52172 - RNA, 26 nt, Human
agccugggagguggagguugcaguga

SEQ ID NO: 52173 - RNA, 32 nt, Human
agccugggagguggagguugcagugagcuaag

SEQ ID NO: 52174 - RNA, 32 nt, Human
agccugggagguggagguugcagugaguggag

SEQ ID NO: 52175 - RNA, 32 nt, Human
agccugggagguggagguugccagugagucga

SEQ ID NO: 52176 - RNA, 32 nt, Human
agccugggagguggagguuucagugagcuggg

SEQ ID NO: 52177 - RNA, 32 nt, Human
agccugggagguggaguuugcagugagcuaag

SEQ ID NO: 52178 - RNA, 32 nt, Human
agccugggagguugaggcugcagugagccaug

SEQ ID NO: 52179 - RNA, 32 nt, Human
agccugggagguugaggcugcaguggcuauga

SEQ ID NO: 52180 - RNA, 32 nt, Human
agccugggagguugugguugcagugagcuaug

SEQ ID NO: 52181 - RNA, 32 nt, Human
agccugggaguucgaggcugcagugagcaaug

SEQ ID NO: 52182 - RNA, 32 nt, Human
agccugggaguuugaggcugcagugagcuaug

SEQ ID NO: 52183 - RNA, 32 nt, Human
agccugggaugucaaggcugcagugagcugug

SEQ ID NO: 52184 - RNA, 32 nt, Human
agccugggcaacaacagcaaaacuccaucuca

SEQ ID NO: 52185 - RNA, 22 nt, Human
agccugggcaacaagagcgaaa

SEQ ID NO: 52186 - RNA, 19 nt, Human
agccugggcaacacagaga

SEQ ID NO: 52187 - RNA, 19 nt, Human
agccugggcaacacaggga

SEQ ID NO: 52188 - RNA, 19 nt, Human
agccugggcaacacaguga

SEQ ID NO: 52189 - RNA, 32 nt, Human
agccugggcaacagagagagacagucccuggc

SEQ ID NO: 52190 - RNA, 19 nt, Human
agccugggcaacagagcga

SEQ ID NO: 52191 - RNA, 32 nt, Human
agccugggcaacaggugagauucugucuccaa

SEQ ID NO: 52192 - RNA, 19 nt, Human
agccugggcaacauagcga

SEQ ID NO: 52193 - RNA, 21 nt, Human
agccugggcaacauggugaaa

SEQ ID NO: 52194 - RNA, 30 nt, Human
agccugggcagcagagcaagacucugucuc

SEQ ID NO: 52195 - RNA, 32 nt, Human
agccugggcagccugcgcugcugaccacccuc

SEQ ID NO: 52196 - RNA, 32 nt, Human
agccugggcagcuguccccacccuuuuucaug

SEQ ID NO: 52197 - RNA, 32 nt, Human
agccugggcaggcagauguaccauuguuagug

SEQ ID NO: 52198 - RNA, 32 nt, Human
agccugggccagaaucccggaccccucaccuc

SEQ ID NO: 52199 - RNA, 32 nt, Human
agccugggccagaaugagacuccgucucaaaa

SEQ ID NO: 52200 - RNA, 32 nt, Human
agccugggcccggcuggggaggggguggcagg

SEQ ID NO: 52201 - RNA, 19 nt, Human
agccugggcgacacagcga

SEQ ID NO: 52202 - RNA, 21 nt, Human
agccugggcgacagagcgaga

SEQ ID NO: 52203 - RNA, 32 nt, Human
agccugggcgacagagugacccugccucaaaa

SEQ ID NO: 52204 - RNA, 21 nt, Human
agccugggcggccugagagcg

SEQ ID NO: 52205 - RNA, 32 nt, Human
agccugggcgggugcaggagaucgugggcgcc

SEQ ID NO: 52206 - RNA, 32 nt, Human
agccugggcgucggagccaccuccugggcagc

SEQ ID NO: 52207 - RNA, 32 nt, Human
agccugggcuacagagcaagaccucaucuuuc

SEQ ID NO: 52208 - RNA, 32 nt, Human
agccugggcucccagccccucucuccuuuucc

SEQ ID NO: 52209 - RNA, 32 nt, Human
agccugggcugugccacacaagcacuucaucg

SEQ ID NO: 52210 - RNA, 18 nt, Human
agccugggcuuccaggcc

SEQ ID NO: 52211 - RNA, 17 nt, Human
agccugggcuugagcug

SEQ ID NO: 52212 - RNA, 32 nt, Human
agccuggggacccccugggaucacccagccau

SEQ ID NO: 52213 - RNA, 24 nt, Human
agccuggggacugcagcccaggga

SEQ ID NO: 52214 - RNA, 32 nt, Human
agccuggggaucuuguuaaaaugcagauccug

SEQ ID NO: 52215 - RNA, 32 nt, Human
agccuggggcaggcccuagcaggccaggccac

SEQ ID NO: 52216 - RNA, 32 nt, Human
agccuggggcccugugauccucugguuucuuc

SEQ ID NO: 52217 - RNA, 32 nt, Human
agccuggggcugccucugcucuccaagaccca

SEQ ID NO: 52218 - RNA, 32 nt, Human
agccugggggacugaggcugcagugagccaug

SEQ ID NO: 52219 - RNA, 32 nt, Human
agccuggggucuccagccuggcugcugcuggg

SEQ ID NO: 52220 - RNA, 32 nt, Human
agccuggggugaggguaagggguagggggcuu

SEQ ID NO: 52221 - RNA, 32 nt, Human
agccugggguggagaggagggagccggcaucu

SEQ ID NO: 52222 - RNA, 32 nt, Human
agccugggucugccuuuuguccagaucagcug

SEQ ID NO: 52223 - RNA, 32 nt, Human
agccugggugacacuccagccugggugacaaa

SEQ ID NO: 52224 - RNA, 32 nt, Human
agccugggugacagagcaaacucucucuuaaa

SEQ ID NO: 52225 - RNA, 21 nt, Human
agccugggugacagagcaaga

SEQ ID NO: 52226 - RNA, 32 nt, Human
agccugggugacagagugaaacccuuaaucaa

SEQ ID NO: 52227 - RNA, 32 nt, Human
agccugggugacagagugagacuccaccucaa

SEQ ID NO: 52228 - RNA, 32 nt, Human
agccugggugacagagugagacuccaucucaa

SEQ ID NO: 52229 - RNA, 32 nt, Human
agccugggugacagagugagaucuugucucaa

SEQ ID NO: 52230 - RNA, 31 nt, Human
agccugggugagagagcaagacccugccuca

SEQ ID NO: 52231 - RNA, 31 nt, Human
agccugggugagagagugagacacuguccca

SEQ ID NO: 52232 - RNA, 32 nt, Human
agccuggguguccucugaggccagccucucca

SEQ ID NO: 52233 - RNA, 32 nt, Human
agccugguaggcugaggcugcagugagccaag

SEQ ID NO: 52234 - RNA, 32 nt, Human
agccugguauaaccucuggcuccaugggcagc

SEQ ID NO: 52235 - RNA, 21 nt, Human
agccuggucaacauagugaaa

SEQ ID NO: 52236 - RNA, 21 nt, Human
agccuggucaacauggugaaa

SEQ ID NO: 52237 - RNA, 32 nt, Human
agccuggucagccugguggguacccucuaugc

SEQ ID NO: 52238 - RNA, 32 nt, Human
agccuggucuacugaguaagcccacuguugag

SEQ ID NO: 52239 - RNA, 32 nt, Human
agccuggucucaaacuccugaccucaagugac

SEQ ID NO: 52240 - RNA, 32 nt, Human
agccuggucucaaacuccuguccucaagugau

SEQ ID NO: 52241 - RNA, 32 nt, Human
agccuggucucgaacuccugaccucaggugau

SEQ ID NO: 52242 - RNA, 32 nt, Human
agccuggucucgaacucuugaccuccugaucc

SEQ ID NO: 52243 - RNA, 16 nt, Human
agccuggucugcacug

SEQ ID NO: 52244 - RNA, 32 nt, Human
agccuggucuugaacuccugaccucaagugau

SEQ ID NO: 52245 - RNA, 32 nt, Human
agccuggucuugaacuccugaccucaggugau

SEQ ID NO: 52246 - RNA, 32 nt, Human
agccuggugagguuuguacucuaaggagccca

SEQ ID NO: 52247 - RNA, 32 nt, Human
agccuggugcccauccucccgaccccuaccca

SEQ ID NO: 52248 - RNA, 32 nt, Human
agccuggugccuguaaucccagcuacucggga

SEQ ID NO: 52249 - RNA, 32 nt, Human
agccugguggacccaaggagaaggucccauuu

SEQ ID NO: 52250 - RNA, 32 nt, Human
agccugguggcagaggaagcagguggcaccaa

SEQ ID NO: 52251 - RNA, 21 nt, Human
agccugguggcugcugcccca

SEQ ID NO: 52252 - RNA, 32 nt, Human
agccuggugguacuggccacgccccucaaggc

SEQ ID NO: 52253 - RNA, 32 nt, Human
agccugguguucaccaggccugguagaugaga

SEQ ID NO: 52254 - RNA, 32 nt, Human
agccugguucaaaaucagucacucccuucaga

SEQ ID NO: 52255 - RNA, 32 nt, Human
agccugguucacaggcuuagugauggagauau

SEQ ID NO: 52256 - RNA, 32 nt, Human
agccugguuggaccauuguccaugccucagga

SEQ ID NO: 52257 - RNA, 32 nt, Human
agccugguuuccugggcugggcucaggaaagc

SEQ ID NO: 52258 - RNA, 24 nt, Human
agccuguaaucccaacacuuuggg

SEQ ID NO: 52259 - RNA, 24 nt, Human
agccuguaaucccagcacguuggg

SEQ ID NO: 52260 - RNA, 24 nt, Human
agccuguaaucccagcacuuuggg

SEQ ID NO: 52261 - RNA, 24 nt, Human
agccuguaaucccagcaguuuggg

SEQ ID NO: 52262 - RNA, 24 nt, Human
agccuguaaucccagcuacucagg

SEQ ID NO: 52263 - RNA, 24 nt, Human
agccuguaaucccagcuauuuggg

SEQ ID NO: 52264 - RNA, 19 nt, Human
agccuguaaucccagcugc

SEQ ID NO: 52265 - RNA, 24 nt, Human
agccuguaaucccagcuguucggg

SEQ ID NO: 52266 - RNA, 24 nt, Human
agccuguaaucccaguacuuuggg

SEQ ID NO: 52267 - RNA, 24 nt, Human
agccuguaauccuagcacuuuggg

SEQ ID NO: 52268 - RNA, 24 nt, Human
agccuguaauccuagcuacucagg

SEQ ID NO: 52269 - RNA, 24 nt, Human
agccuguaaucucagcuacucagg

SEQ ID NO: 52270 - RNA, 24 nt, Human
agccuguaaucucugcacuuuggg

SEQ ID NO: 52271 - RNA, 32 nt, Human
agccuguaccuacaggccauauugcucaggcu

SEQ ID NO: 52272 - RNA, 32 nt, Human
agccuguacuagcuuuugaaauccagaaguuu

SEQ ID NO: 52273 - RNA, 32 nt, Human
agccuguacucccagcacuuuuggaggccgag

SEQ ID NO: 52274 - RNA, 32 nt, Human
agccuguagccccugagcugacgcagacacaa

SEQ ID NO: 52275 - RNA, 24 nt, Human
agccuguagucccagauacucagg

SEQ ID NO: 52276 - RNA, 24 nt, Human
agccuguagucccagcuacacggg

SEQ ID NO: 52277 - RNA, 24 nt, Human
agccuguagucccagcuacucagg

SEQ ID NO: 52278 - RNA, 24 nt, Human
agccuguagucccagcuacuccgg

SEQ ID NO: 52279 - RNA, 24 nt, Human
agccuguagucccagcuacucggg

SEQ ID NO: 52280 - RNA, 24 nt, Human
agccuguaguccuagcuacucggg

SEQ ID NO: 52281 - RNA, 24 nt, Human
agccuguaguuccagcuacucggg

SEQ ID NO: 52282 - RNA, 32 nt, Human
agccuguauguacugcuuuaacuccuggaaga

SEQ ID NO: 52283 - RNA, 32 nt, Human
agccugucaaguagcugggauuacaggcgugu

SEQ ID NO: 52284 - RNA, 32 nt, Human
agccugucaccacugccauauuccugccugcu

SEQ ID NO: 52285 - RNA, 32 nt, Human
agccugucacccgugugaagaugaaggggcuc

SEQ ID NO: 52286 - RNA, 32 nt, Human
agccugucaggcugggcggguccauauccggg

SEQ ID NO: 52287 - RNA, 21 nt, Human
agccuguccaacauggugaaa

SEQ ID NO: 52288 - RNA, 32 nt, Human
agccuguccccacuaucccucuugucagcacg

SEQ ID NO: 52289 - RNA, 32 nt, Human
agccugucccuccaauuuacugcacauaagau

SEQ ID NO: 52290 - RNA, 32 nt, Human
agccugucccugcgcugcgccuccaggcugga

SEQ ID NO: 52291 - RNA, 32 nt, Human
agccuguccgcaaauacuaggagaaguggcug

SEQ ID NO: 52292 - RNA, 32 nt, Human
agccuguccgcuaugcggcuccugccucuagc

SEQ ID NO: 52293 - RNA, 32 nt, Human
agccuguccugccuccaguccaccuguggccu

SEQ ID NO: 52294 - RNA, 32 nt, Human
agccuguccugucucuauucuaggcaagagag

SEQ ID NO: 52295 - RNA, 24 nt, Human
agccugucgucccagcuacucagg

SEQ ID NO: 52296 - RNA, 32 nt, Human
agccugucguggccgugaccuccaacugggag

SEQ ID NO: 52297 - RNA, 32 nt, Human
agccugucucagaggacaccagaauggagcgc

SEQ ID NO: 52298 - RNA, 17 nt, Human
agccugucucugaauug

SEQ ID NO: 52299 - RNA, 32 nt, Human
agccugucucugcuaagggcaaauccuccggu

SEQ ID NO: 52300 - RNA, 32 nt, Human
agccugucugccuggaaaccaugccaugucuu

SEQ ID NO: 52301 - RNA, 32 nt, Human
agccugucugcucuccccacauuagcccuuag

SEQ ID NO: 52302 - RNA, 32 nt, Human
agccugucugugcaucccccaucccagccagg

SEQ ID NO: 52303 - RNA, 21 nt, Human
agccugucuuagccugagcug

SEQ ID NO: 52304 - RNA, 32 nt, Human
agccugucuugcucauucaugcagccucaaca

SEQ ID NO: 52305 - RNA, 32 nt, Human
agccugugaccucucagucagacuggggugca

SEQ ID NO: 52306 - RNA, 32 nt, Human
agccugugacuuuccucccuggacaaaggcau

SEQ ID NO: 52307 - RNA, 32 nt, Human
agccugugagggagguggcggguccccacugu

SEQ ID NO: 52308 - RNA, 32 nt, Human
agccugugaggucgaggcuacagugagcaaag

SEQ ID NO: 52309 - RNA, 32 nt, Human
agccugugaggucgaggcugcagugagccgag

SEQ ID NO: 52310 - RNA, 32 nt, Human
agccugugcagaaggggcaggacugcagugca

SEQ ID NO: 52311 - RNA, 21 nt, Human
agccugugcccuucugaagug

SEQ ID NO: 52312 - RNA, 32 nt, Human
agccuguggcagcugcugccccagccacagcu

SEQ ID NO: 52313 - RNA, 32 nt, Human
agccuguggcauuuuuccuccuucucccuaac

SEQ ID NO: 52314 - RNA, 32 nt, Human
agccuguggcuaaaguuuccacaucccauuaa

SEQ ID NO: 52315 - RNA, 20 nt, Human
agccugugggaccucaggag

SEQ ID NO: 52316 - RNA, 18 nt, Human
agccugugggcccaggag

SEQ ID NO: 52317 - RNA, 32 nt, Human
agccuguggggaugaggaaggagagccacagg

SEQ ID NO: 52318 - RNA, 24 nt, Human
agccuguggucucaacuacucagg

SEQ ID NO: 52319 - RNA, 32 nt, Human
agccuguggucuccauggcaauggguguccau

SEQ ID NO: 52320 - RNA, 32 nt, Human
agccuguggugaucccagcagcuuuggagggc

SEQ ID NO: 52321 - RNA, 32 nt, Human
agccugugguggccuugcauccugacuggaug

SEQ ID NO: 52322 - RNA, 32 nt, Human
agccugugguugauggaaauucacaaagugag

SEQ ID NO: 52323 - RNA, 20 nt, Human
agccugugguuucugagcug

SEQ ID NO: 52324 - RNA, 23 nt, Human
agccuguguaacagcuccuuggg

SEQ ID NO: 52325 - RNA, 32 nt, Human
agccuguguccaggcuggggagcccgugucug

SEQ ID NO: 52326 - RNA, 21 nt, Human
agccugugugcuacugaacug

SEQ ID NO: 52327 - RNA, 32 nt, Human
agccugugugugugcaugcaggggugagguau

SEQ ID NO: 52328 - RNA, 21 nt, Human
agccuguguguucacacacca

SEQ ID NO: 52329 - RNA, 32 nt, Human
agccuguguguucuucaccugugccugcuccu

SEQ ID NO: 52330 - RNA, 24 nt, Human
agccuguguucccagcugcuuagg

SEQ ID NO: 52331 - RNA, 32 nt, Human
agccuguucuguaguucaagguggcagagaaa

SEQ ID NO: 52332 - RNA, 25 nt, Human
agccuguuggaaaagaagcccugug

SEQ ID NO: 52333 - RNA, 32 nt, Human
agccuguuugcuagggagagugagugagugcu

SEQ ID NO: 52334 - RNA, 25 nt, Human
agccuuaaacaugcccccacuccca

SEQ ID NO: 52335 - RNA, 32 nt, Human
agccuuaaauacacacugaguuuagaaaaaug

SEQ ID NO: 52336 - RNA, 32 nt, Human
agccuuaaguaggaagaaauugcagugucuau

SEQ ID NO: 52337 - RNA, 32 nt, Human
agccuuaauuccuucccuaucuccuuaccaaa

SEQ ID NO: 52338 - RNA, 32 nt, Human
agccuuacaaguggcgagggaaagcacacaaa

SEQ ID NO: 52339 - RNA, 32 nt, Human
agccuuaccaacaccaaagaaacauccaagca

SEQ ID NO: 52340 - RNA, 32 nt, Human
agccuuacuggguccuuacccugggccaaaca

SEQ ID NO: 52341 - RNA, 32 nt, Human
agccuuagaacuccucauucucauguugcuau

SEQ ID NO: 52342 - RNA, 32 nt, Human
agccuuagaagaggaagcaaaggcagauucag

SEQ ID NO: 52343 - RNA, 32 nt, Human
agccuuagagguggggguucaucaggagcacu

SEQ ID NO: 52344 - RNA, 32 nt, Human
agccuuagaugaccuccagcaacuucaguucu

SEQ ID NO: 52345 - RNA, 32 nt, Human
agccuuagccuccugaguagcuaggacuguag

SEQ ID NO: 52346 - RNA, 32 nt, Human
agccuuagccugggcgacagagcgagaccaca

SEQ ID NO: 52347 - RNA, 32 nt, Human
agccuuagcuggcugccaugucuccugccugu

SEQ ID NO: 52348 - RNA, 32 nt, Human
agccuuagguuagugcccagugcagugccaga

SEQ ID NO: 52349 - RNA, 19 nt, Human
agccuuagucccugagcug

SEQ ID NO: 52350 - RNA, 32 nt, Human
agccuuauccaaggaggaagagauggagaccg

SEQ ID NO: 52351 - RNA, 32 nt, Human
agccuucaagugggcggagcugagggcagcag

SEQ ID NO: 52352 - RNA, 22 nt, Human
agccuucaauuccugggcucag

SEQ ID NO: 52353 - RNA, 32 nt, Human
agccuucaccaauggguaccacugagcagggg

SEQ ID NO: 52354 - RNA, 32 nt, Human
agccuucacccuggcuggaagcucuuuucugc

SEQ ID NO: 52355 - RNA, 23 nt, Human
agccuucaccuucccccacccca

SEQ ID NO: 52356 - RNA, 32 nt, Human
agccuucacucugcccagaugugcuuccugug

SEQ ID NO: 52357 - RNA, 32 nt, Human
agccuucacuuccagcugcucuccccaacggc

SEQ ID NO: 52358 - RNA, 32 nt, Human
agccuucagcagcagcucacacccuaccuucc

SEQ ID NO: 52359 - RNA, 32 nt, Human
agccuucagccaaaccucauugcuuuauaaac

SEQ ID NO: 52360 - RNA, 32 nt, Human
agccuucagcuccuuccuuucuccuuaaagag

SEQ ID NO: 52361 - RNA, 32 nt, Human
agccuucagggugggaggcacaagaucauucc

SEQ ID NO: 52362 - RNA, 32 nt, Human
agccuucaguuggaggaacacagccagcuccu

SEQ ID NO: 52363 - RNA, 32 nt, Human
agccuucaguuuccucccuuggaauaaucacu

SEQ ID NO: 52364 - RNA, 32 nt, Human
agccuucauccagccgcagcccuuuagaguuc

SEQ ID NO: 52365 - RNA, 32 nt, Human
agccuucaugccacgaacaugcuccacagccu

SEQ ID NO: 52366 - RNA, 32 nt, Human
agccuucauuucuucuaguucccuucaauauc

SEQ ID NO: 52367 - RNA, 32 nt, Human
agccuuccaaaauguugggauuacaggcguga

SEQ ID NO: 52368 - RNA, 32 nt, Human
agccuuccaaagugcuaggauuacaggcguga

SEQ ID NO: 52369 - RNA, 32 nt, Human
agccuuccaaagugcugggaugacagcgugag

SEQ ID NO: 52370 - RNA, 32 nt, Human
agccuuccaaagugcugggauuacaggcauga

SEQ ID NO: 52371 - RNA, 32 nt, Human
agccuuccaaagugcugggauuacaggcguga

SEQ ID NO: 52372 - RNA, 32 nt, Human
agccuuccaaagugcugggauuacagguguca

SEQ ID NO: 52373 - RNA, 32 nt, Human
agccuuccaaagugcugggauuacuggcagga

SEQ ID NO: 52374 - RNA, 32 nt, Human
agccuuccaaagugcugggauucuggguguga

SEQ ID NO: 52375 - RNA, 32 nt, Human
agccuuccaaagugcugguauuacagguguga

SEQ ID NO: 52376 - RNA, 32 nt, Human
agccuuccaaaguguugggauuauaggcguga

SEQ ID NO: 52377 - RNA, 32 nt, Human
agccuuccaacauuucuuguugauagugaugu

SEQ ID NO: 52378 - RNA, 32 nt, Human
agccuuccaacuagcugggacuacaggugcgc

SEQ ID NO: 52379 - RNA, 32 nt, Human
agccuuccaagaagcugggauuacaagcgccc

SEQ ID NO: 52380 - RNA, 32 nt, Human
agccuuccaaguagcuaggacaacaggugcgu

SEQ ID NO: 52381 - RNA, 32 nt, Human
agccuuccaaguagcugggacuacaggcaugc

SEQ ID NO: 52382 - RNA, 32 nt, Human
agccuuccaaguagcugggacuacaggugccc

SEQ ID NO: 52383 - RNA, 32 nt, Human
agccuuccaaguagcugggacuacaggugugc

SEQ ID NO: 52384 - RNA, 32 nt, Human
agccuuccaaguagcugggaguacaagcauau

SEQ ID NO: 52385 - RNA, 32 nt, Human
agccuuccaaguagcugggauuacaagugccc

SEQ ID NO: 52386 - RNA, 32 nt, Human
agccuuccaaguagcugggauuacaggaguua

SEQ ID NO: 52387 - RNA, 32 nt, Human
agccuuccaaguagcugggauuacaggugugc

SEQ ID NO: 52388 - RNA, 32 nt, Human
agccuuccaaguagcugggucuacaggugcau

SEQ ID NO: 52389 - RNA, 32 nt, Human
agccuuccaaguaguugggacuacccacaugc

SEQ ID NO: 52390 - RNA, 32 nt, Human
agccuuccagcuccuccuccugacugaccgcu

SEQ ID NO: 52391 - RNA, 28 nt, Human
agccuuccaugccccgacccccacccca

SEQ ID NO: 52392 - RNA, 32 nt, Human
agccuuccaugguagagauuucucuuaagagu

SEQ ID NO: 52393 - RNA, 32 nt, Human
agccuucccaagugcugggauuacagguguga

SEQ ID NO: 52394 - RNA, 32 nt, Human
agccuucccaguagcugggacuacagcuggau

SEQ ID NO: 52395 - RNA, 32 nt, Human
agccuucccauuagcugggauuacaggcaugc

SEQ ID NO: 52396 - RNA, 32 nt, Human
agccuucccccgugaucccuguggaccccgau

SEQ ID NO: 52397 - RNA, 32 nt, Human
agccuuccccuugagcuccuuuucacuccuga

SEQ ID NO: 52398 - RNA, 32 nt, Human
agccuucccgccacaccaaccaaccaauagac

SEQ ID NO: 52399 - RNA, 22 nt, Human
agccuucccuaauuccacccca

SEQ ID NO: 52400 - RNA, 24 nt, Human
agccuucccugcagccccucccca

SEQ ID NO: 52401 - RNA, 32 nt, Human
agccuucccugccgucaagguggcgucuuacu

SEQ ID NO: 52402 - RNA, 32 nt, Human
agccuucccuguucuccagccuaggugguuca

SEQ ID NO: 52403 - RNA, 32 nt, Human
agccuucccuugcccaugugaaaagauccgcu

SEQ ID NO: 52404 - RNA, 32 nt, Human
agccuuccgagcagcugggacuacaggagccu

SEQ ID NO: 52405 - RNA, 32 nt, Human
agccuuccgaguagcugggaccacaggcaugc

SEQ ID NO: 52406 - RNA, 32 nt, Human
agccuuccgaguagcugggacuacaggcgcau

SEQ ID NO: 52407 - RNA, 32 nt, Human
agccuuccgaguagcugggacuacagugcuuc

SEQ ID NO: 52408 - RNA, 32 nt, Human
agccuuccgaguagcugggaucgcaggcgccu

SEQ ID NO: 52409 - RNA, 32 nt, Human
agccuuccgaguagcugggauuacaggcaccc

SEQ ID NO: 52410 - RNA, 32 nt, Human
agccuuccgaguagcugggauuacaggcaccu

SEQ ID NO: 52411 - RNA, 32 nt, Human
agccuuccgaguagcugggauuacaggcgccc

SEQ ID NO: 52412 - RNA, 32 nt, Human
agccuuccgaguagcugggauuacaggcuccu

SEQ ID NO: 52413 - RNA, 32 nt, Human
agccuuccgaguagcugggauuacagggaugu

SEQ ID NO: 52414 - RNA, 32 nt, Human
agccuuccgaguagcugggauuacaggugccc

SEQ ID NO: 52415 - RNA, 32 nt, Human
agccuuccgaguagcugggauuacaggugugu

SEQ ID NO: 52416 - RNA, 32 nt, Human
agccuuccgcaggccagcaggcaggucagcuu

SEQ ID NO: 52417 - RNA, 32 nt, Human
agccuuccgggggcucuuuaccaggaaccgcu

SEQ ID NO: 52418 - RNA, 32 nt, Human
agccuuccuaguagcugggacuacagguaugc

SEQ ID NO: 52419 - RNA, 32 nt, Human
agccuuccugcuaggccacccuccucccuucc

SEQ ID NO: 52420 - RNA, 32 nt, Human
agccuuccuggugaguuucuacagucaucccu

SEQ ID NO: 52421 - RNA, 32 nt, Human
agccuuccuguguucccagcaguuucucucuc

SEQ ID NO: 52422 - RNA, 24 nt, Human
agccuuccuucugcucccacccca

SEQ ID NO: 52423 - RNA, 32 nt, Human
agccuuccuuucuccugccccaagggcccaga

SEQ ID NO: 52424 - RNA, 32 nt, Human
agccuucgaacucugacuggucgauccucuuu

SEQ ID NO: 52425 - RNA, 32 nt, Human
agccuucgccuccuggguucaaguguuuccgg

SEQ ID NO: 52426 - RNA, 32 nt, Human
agccuucggaguggcugggauuacaggugugc

SEQ ID NO: 52427 - RNA, 32 nt, Human
agccuucuaaagugcugggauuacaggcguga

SEQ ID NO: 52428 - RNA, 22 nt, Human
agccuucuacaguuugauagcu

SEQ ID NO: 52429 - RNA, 32 nt, Human
agccuucucauagcucaagcuuucccuucuug

SEQ ID NO: 52430 - RNA, 32 nt, Human
agccuucuccacugucucauuuccuuuuccca

SEQ ID NO: 52431 - RNA, 32 nt, Human
agccuucuccaggacaaccugcuggaacgcag

SEQ ID NO: 52432 - RNA, 32 nt, Human
agccuucuccucgacucucucuuccauugaua

SEQ ID NO: 52433 - RNA, 32 nt, Human
agccuucucugccugucccuccgauccuuguc

SEQ ID NO: 52434 - RNA, 32 nt, Human
agccuucugagcagcugggauuaugaaggggu

SEQ ID NO: 52435 - RNA, 32 nt, Human
agccuucugaguagcuggaauuacaggcuguc

SEQ ID NO: 52436 - RNA, 32 nt, Human
agccuucugaguagcugggaccacaggcgugc

SEQ ID NO: 52437 - RNA, 32 nt, Human
agccuucugaguagcugggacuacaggcacac

SEQ ID NO: 52438 - RNA, 32 nt, Human
agccuucugaguagcugggacuacaggcacau

SEQ ID NO: 52439 - RNA, 32 nt, Human
agccuucugaguagcugggacuacaggugugc

SEQ ID NO: 52440 - RNA, 32 nt, Human
agccuucugaguagcugggacuacaguugguu

SEQ ID NO: 52441 - RNA, 32 nt, Human
agccuucugaguagcugggaguacaggcgccc

SEQ ID NO: 52442 - RNA, 32 nt, Human
agccuucugaguagcugggauuacacgcgugu

SEQ ID NO: 52443 - RNA, 32 nt, Human
agccuucugaguagcugggauuacaggcaagc

SEQ ID NO: 52444 - RNA, 32 nt, Human
agccuucugaguagcugggauuacaggcaugc

SEQ ID NO: 52445 - RNA, 32 nt, Human
agccuucugaguaguuuggacuacagguacau

SEQ ID NO: 52446 - RNA, 23 nt, Human
agccuucugaugaucccacucca

SEQ ID NO: 52447 - RNA, 32 nt, Human
agccuucugcacucacagccgaagggaaagca

SEQ ID NO: 52448 - RNA, 32 nt, Human
agccuucugcaugccuguccucccucugcaag

SEQ ID NO: 52449 - RNA, 32 nt, Human
agccuucugcguaaagauggacuugcaggagg

SEQ ID NO: 52450 - RNA, 32 nt, Human
agccuucugcuccccaauucucucuguugcag

SEQ ID NO: 52451 - RNA, 32 nt, Human
agccuucuggaagguaggcuuugcgcuuggug

SEQ ID NO: 52452 - RNA, 21 nt, Human
agccuucuucacccacuucca

SEQ ID NO: 52453 - RNA, 32 nt, Human
agccuucuucagcucagcccucuucuauuucu

SEQ ID NO: 52454 - RNA, 18 nt, Human
agccuucuucccaacuca

SEQ ID NO: 52455 - RNA, 32 nt, Human
agccuucuucccucacggcucuucucccgguc

SEQ ID NO: 52456 - RNA, 32 nt, Human
agccuucuugauggcaccuugaaagugaacuu

SEQ ID NO: 52457 - RNA, 32 nt, Human
agccuucuugcuuucauuuuccuugaauguac

SEQ ID NO: 52458 - RNA, 32 nt, Human
agccuucuuuccccaucaguccaaaugucccu

SEQ ID NO: 52459 - RNA, 32 nt, Human
agccuugaaccaggaauauccaggaagaggaa

SEQ ID NO: 52460 - RNA, 21 nt, Human
agccuugaacucugggcucaa

SEQ ID NO: 52461 - RNA, 32 nt, Human
agccuugaagccagggugccgggaggaaggga

SEQ ID NO: 52462 - RNA, 32 nt, Human
agccuugacaaaacguuccuggaacucaagcu

SEQ ID NO: 52463 - RNA, 21 nt, Human
agccuugacaacauggugaaa

SEQ ID NO: 52464 - RNA, 32 nt, Human
agccuugaccauucuccaccuuccagggacag

SEQ ID NO: 52465 - RNA, 22 nt, Human
agccuugaccuccugggcucaa

SEQ ID NO: 52466 - RNA, 22 nt, Human
agccuugaccuucuaggcucaa

SEQ ID NO: 52467 - RNA, 32 nt, Human
agccuugacucugccagacucuccucugaacu

SEQ ID NO: 52468 - RNA, 22 nt, Human
agccuugacuuccugggcucaa

SEQ ID NO: 52469 - RNA, 32 nt, Human
agccuugagacugugcuauacacacacagcug

SEQ ID NO: 52470 - RNA, 32 nt, Human
agccuugagccucugagggucaguaagugaag

SEQ ID NO: 52471 - RNA, 32 nt, Human
agccuugagcuucagcccauuucucuccauuu

SEQ ID NO: 52472 - RNA, 32 nt, Human
agccuugaggccaggagggcagugagcuguga

SEQ ID NO: 52473 - RNA, 32 nt, Human
agccuugauguuaaaagacacagccaugcucu

SEQ ID NO: 52474 - RNA, 32 nt, Human
agccuugauuauaccacugcacuccagccugg

SEQ ID NO: 52475 - RNA, 32 nt, Human
agccuugcaaauagccagugcuaguucugacc

SEQ ID NO: 52476 - RNA, 32 nt, Human
agccuugcacagaaaagccugcuuguugguuu

SEQ ID NO: 52477 - RNA, 32 nt, Human
agccuugcagggccacugggaguuugugccca

SEQ ID NO: 52478 - RNA, 32 nt, Human
agccuugcaucaaccucuugggccucagccaa

SEQ ID NO: 52479 - RNA, 32 nt, Human
agccuugcaugucaguaaacaggaaggaagga

SEQ ID NO: 52480 - RNA, 21 nt, Human
agccuugccaacauagugaaa

SEQ ID NO: 52481 - RNA, 21 nt, Human
agccuugccaacauggugaaa

SEQ ID NO: 52482 - RNA, 32 nt, Human
agccuugccccaggacccuugggugcaugagu

SEQ ID NO: 52483 - RNA, 32 nt, Human
agccuugcuguugggugaauaguuugacucua

SEQ ID NO: 52484 - RNA, 32 nt, Human
agccuugcuuuccucuuuuuagaauuuauuuu

SEQ ID NO: 52485 - RNA, 32 nt, Human
agccuuggaaagaaaccagggggccaggggaa

SEQ ID NO: 52486 - RNA, 32 nt, Human
agccuuggaggcggagguugcagugagcugag

SEQ ID NO: 52487 - RNA, 32 nt, Human
agccuuggauacuccaugggguggggguggaa

SEQ ID NO: 52488 - RNA, 21 nt, Human
agccuuggcaacauggugaaa

SEQ ID NO: 52489 - RNA, 23 nt, Human
agccuuggcaccucccaagacug

SEQ ID NO: 52490 - RNA, 22 nt, Human
agccuuggccaacauggcgaaa

SEQ ID NO: 52491 - RNA, 32 nt, Human
agccuuggccaacauggcgaaaccccaucgcu

SEQ ID NO: 52492 - RNA, 32 nt, Human
agccuuggccuccagcagcccuucccugccca

SEQ ID NO: 52493 - RNA, 23 nt, Human
agccuuggcuucccugggcucaa

SEQ ID NO: 52494 - RNA, 32 nt, Human
agccuugggcuccagcccucugccuuuucauc

SEQ ID NO: 52495 - RNA, 32 nt, Human
agccuugggcugggcagcugcuggccuggauc

SEQ ID NO: 52496 - RNA, 32 nt, Human
agccuugggggugugauguggggaagagcuau

SEQ ID NO: 52497 - RNA, 32 nt, Human
agccuugggguccuguuaaaccacagacaguu

SEQ ID NO: 52498 - RNA, 32 nt, Human
agccuugggugaggucgccucccaggaagucc

SEQ ID NO: 52499 - RNA, 32 nt, Human
agccuugguaacccagacaugccuucagucag

SEQ ID NO: 52500 - RNA, 32 nt, Human
agccuuggugccugugagcucaucucccagga

SEQ ID NO: 52501 - RNA, 16 nt, Human
agccuugguuuaacug

SEQ ID NO: 52502 - RNA, 18 nt, Human
agccuugguuuccugaac

SEQ ID NO: 52503 - RNA, 32 nt, Human
agccuuguacagucugcuccucuuguuccuga

SEQ ID NO: 52504 - RNA, 32 nt, Human
agccuuguccuuccugugugcucccugagagc

SEQ ID NO: 52505 - RNA, 32 nt, Human
agccuugucuuccucuuuccucugucaguuca

SEQ ID NO: 52506 - RNA, 32 nt, Human
agccuugugagguuuccaggcaggcugauugc

SEQ ID NO: 52507 - RNA, 22 nt, Human
agccuugugcagaggcccagug

SEQ ID NO: 52508 - RNA, 24 nt, Human
agccuuguggccaguuccucuuca

SEQ ID NO: 52509 - RNA, 32 nt, Human
agccuugugugugaucuuuucugucuucccca

SEQ ID NO: 52510 - RNA, 32 nt, Human
agccuuguucugcccuuccacuuuccacuuua

SEQ ID NO: 52511 - RNA, 22 nt, Human
agccuuuaacuacugggcucaa

SEQ ID NO: 52512 - RNA, 32 nt, Human
agccuuuagugccagcagggccuguguccugg

SEQ ID NO: 52513 - RNA, 32 nt, Human
agccuuucaagcagcuaggaguacaguuggga

SEQ ID NO: 52514 - RNA, 32 nt, Human
agccuuucaaguggcugggaugacuacaggca

SEQ ID NO: 52515 - RNA, 32 nt, Human
agccuuucagcccuucugaguccccggcccuu

SEQ ID NO: 52516 - RNA, 21 nt, Human
agccuuucaucuucuuucuca

SEQ ID NO: 52517 - RNA, 32 nt, Human
agccuuucccacccccuucccugcugagcacg

SEQ ID NO: 52518 - RNA, 32 nt, Human
agccuuuccccuccccuccacuucuuggguaa

SEQ ID NO: 52519 - RNA, 32 nt, Human
agccuuuccgcagccgcauccacccaccaugg

SEQ ID NO: 52520 - RNA, 32 nt, Human
agccuuucgaguagcuggaaugacuacaggca

SEQ ID NO: 52521 - RNA, 32 nt, Human
agccuuucgaguagcugggacuacaggugugu

SEQ ID NO: 52522 - RNA, 32 nt, Human
agccuuucguucugcugaccaaauggccaguu

SEQ ID NO: 52523 - RNA, 17 nt, Human
agccuuucuccaccagg

SEQ ID NO: 52524 - RNA, 32 nt, Human
agccuuucuccaccaggccccucaucugaaua

SEQ ID NO: 52525 - RNA, 32 nt, Human
agccuuucuccaggugggagugcaguggcaug

SEQ ID NO: 52526 - RNA, 32 nt, Human
agccuuucuccucuucucuucuugggacagga

SEQ ID NO: 52527 - RNA, 18 nt, Human
agccuuucucugccauca

SEQ ID NO: 52528 - RNA, 32 nt, Human
agccuuucuggcagguccuccccucucuuguc

SEQ ID NO: 52529 - RNA, 32 nt, Human
agccuuucugugguaucugaugcaggaaggac

SEQ ID NO: 52530 - RNA, 32 nt, Human
agccuuugagaaaaucucguggucacgaauuu

SEQ ID NO: 52531 - RNA, 21 nt, Human
agccuuugauuuccuggacug

SEQ ID NO: 52532 - RNA, 19 nt, Human
agccuuugcaacuggacug

SEQ ID NO: 52533 - RNA, 32 nt, Human
agccuuugcacaggcuggcugcguguucuuga

SEQ ID NO: 52534 - RNA, 32 nt, Human
agccuuugcaggagccucccugggcuuagcug

SEQ ID NO: 52535 - RNA, 32 nt, Human
agccuuuggaacgugagccacugugggcuggc

SEQ ID NO: 52536 - RNA, 32 nt, Human
agccuuuggauuccggacugggauggaaagag

SEQ ID NO: 52537 - RNA, 32 nt, Human
agccuuuggggguugggguuucugccacuucc

SEQ ID NO: 52538 - RNA, 32 nt, Human
agccuuuguucuggaaaccccagagagggcug

SEQ ID NO: 52539 - RNA, 32 nt, Human
agccuuuguuguccucccauccauccauuaag

SEQ ID NO: 52540 - RNA, 20 nt, Human
agccuuuguuucuugaacug

SEQ ID NO: 52541 - RNA, 32 nt, Human
agccuuuuaaaacuggagguaggauaauugcg

SEQ ID NO: 52542 - RNA, 32 nt, Human
agccuuuuacccucuugccuccugccuccgcg

SEQ ID NO: 52543 - RNA, 32 nt, Human
agccuuuuccaauauuuaguauuguagucuuc

SEQ ID NO: 52544 - RNA, 23 nt, Human
agccuuuugaccaccuggugcca

SEQ ID NO: 52545 - RNA, 32 nt, Human
agccuuuugcuuucagcaccucuacagaccuu

SEQ ID NO: 52546 - RNA, 32 nt, Human
agccuuuugucacccaggcuggagugccaugg

SEQ ID NO: 52547 - RNA, 32 nt, Human
agccuuuuucauuaaggauacaaccuauuugu

SEQ ID NO: 52548 - RNA, 32 nt, Human
agccuuuuugaaggggacacagucuaggaggg

SEQ ID NO: 52549 - RNA, 20 nt, Human
agccuuuuugccuugaacug

SEQ ID NO: 52550 - RNA, 32 nt, Human
agcgaaaauugcacuaaaugaaucucguucca

SEQ ID NO: 52551 - RNA, 32 nt, Human
agcgaaacacacaaaccagccucaacuuacac

SEQ ID NO: 52552 - RNA, 32 nt, Human
agcgaaaccagcuucaucucccagagaauggg

SEQ ID NO: 52553 - RNA, 32 nt, Human
agcgaaacuuccucacaccucuuggucuuggu

SEQ ID NO: 52554 - RNA, 32 nt, Human
agcgaaacuucuguggaaguuccaguguucuc

SEQ ID NO: 52555 - RNA, 32 nt, Human
agcgaaagaaaagagaagugacagaaacaacu

SEQ ID NO: 52556 - RNA, 32 nt, Human
agcgaaaggauuagcaguguguggaaagaaca

SEQ ID NO: 52557 - RNA, 32 nt, Human
agcgaacaggaggcaagggcuagauugcagcu

SEQ ID NO: 52558 - RNA, 32 nt, Human
agcgaacaugcugugugggcucagccgggaga

SEQ ID NO: 52559 - RNA, 32 nt, Human
agcgaacugaugugccacccagucacagagug

SEQ ID NO: 52560 - RNA, 32 nt, Human
agcgaacugucagccucagccucccagugugc

SEQ ID NO: 52561 - RNA, 32 nt, Human
agcgaagaaauggcaucaaucuaggcaucuuu

SEQ ID NO: 52562 - RNA, 32 nt, Human
agcgaagacagggcacagccugggcagauggg

SEQ ID NO: 52563 - RNA, 18 nt, Human
agcgaagagcggccuccu

SEQ ID NO: 52564 - RNA, 32 nt, Human
agcgaagcaaaaccacccggcccacaagagac

SEQ ID NO: 52565 - RNA, 32 nt, Human
agcgaagcacgaggccgccaggagcaaaccca

SEQ ID NO: 52566 - RNA, 32 nt, Human
agcgaagcuacaccgcacuuccgacagcacac

SEQ ID NO: 52567 - RNA, 32 nt, Human
agcgaagcuguggccuuggugaagcugcccuc

SEQ ID NO: 52568 - RNA, 32 nt, Human
agcgaagggaaugccugaugaaaacaacauuc

SEQ ID NO: 52569 - RNA, 32 nt, Human
agcgaaguaaagggaguaggggagacugagac

SEQ ID NO: 52570 - RNA, 32 nt, Human
agcgaagugugguggcuuccaaggaauacaaa

SEQ ID NO: 52571 - RNA, 32 nt, Human
agcgaauagagagagaaucagcuauugaaagg

SEQ ID NO: 52572 - RNA, 32 nt, Human
agcgaaugauaagggaaaaguucucagggaau

SEQ ID NO: 52573 - RNA, 32 nt, Human
agcgaauguaugaaugaaaaugcaucuauuuc

SEQ ID NO: 52574 - RNA, 32 nt, Human
agcgaauuauagcgaacugcggaaaggugagg

SEQ ID NO: 52575 - RNA, 32 nt, Human
agcgaauucauacuaugacagcagaaacaaaa

SEQ ID NO: 52576 - RNA, 32 nt, Human
agcgacaagccgcuggcagccgcggaucucac

SEQ ID NO: 52577 - RNA, 32 nt, Human
agcgacacaagugcccugggcgcgugcagccc

SEQ ID NO: 52578 - RNA, 32 nt, Human
agcgacacguagggacgggcugaaccagcuuu

SEQ ID NO: 52579 - RNA, 32 nt, Human
agcgacacuuuacucacagccuggcuugaguc

SEQ ID NO: 52580 - RNA, 32 nt, Human
agcgacagagccaaaaucagagcuggaaccug

SEQ ID NO: 52581 - RNA, 32 nt, Human
agcgacagccacuuuuuacucucccuccugac

SEQ ID NO: 52582 - RNA, 32 nt, Human
agcgacagcugcagacgggcugaaccagcuuu

SEQ ID NO: 52583 - RNA, 32 nt, Human
agcgacaggguuguaccauguuggccauccug

SEQ ID NO: 52584 - RNA, 32 nt, Human
agcgacaggugaggacagacgucuggaagccc

SEQ ID NO: 52585 - RNA, 32 nt, Human
agcgacaugugcagaacggccccuuggcugca

SEQ ID NO: 52586 - RNA, 32 nt, Human
agcgaccagucggaggaugaggugacgccguc

SEQ ID NO: 52587 - RNA, 32 nt, Human
agcgacccaaagugcugggauuacagguguga

SEQ ID NO: 52588 - RNA, 32 nt, Human
agcgacccacacagcugggauggagggcucca

SEQ ID NO: 52589 - RNA, 32 nt, Human
agcgaccccugccuggccguggcuagcauggc

SEQ ID NO: 52590 - RNA, 32 nt, Human
agcgacccugcagcugcucgcucugauguacc

SEQ ID NO: 52591 - RNA, 32 nt, Human
agcgaccuccagggccuccuaccugcugagga

SEQ ID NO: 52592 - RNA, 32 nt, Human
agcgaccugccccgcggcaagcgcggccgcgg

SEQ ID NO: 52593 - RNA, 28 nt, Human
agcgacucaccaguugccucaucuuucc

SEQ ID NO: 52594 - RNA, 32 nt, Human
agcgacuccgaagaucagccccaaugaacaug

SEQ ID NO: 52595 - RNA, 32 nt, Human
agcgacuccgauccucccucugagccuugcuc

SEQ ID NO: 52596 - RNA, 32 nt, Human
agcgacuccuuggacagaggccugggcccuca

SEQ ID NO: 52597 - RNA, 32 nt, Human
agcgacugaaucuggcggagaugcucagccuc

SEQ ID NO: 52598 - RNA, 32 nt, Human
agcgacugauguuaguuguuacccagaucccc

SEQ ID NO: 52599 - RNA, 32 nt, Human
agcgacuggggcuugcuggacccgcuccccug

SEQ ID NO: 52600 - RNA, 32 nt, Human
agcgacugucuccgaaccuucuggaccugccc

SEQ ID NO: 52601 - RNA, 32 nt, Human
agcgacuuccaauauucauguuucugagaauu

SEQ ID NO: 52602 - RNA, 32 nt, Human
agcgacuuuuaugacauccaccaggagaucgg

SEQ ID NO: 52603 - RNA, 32 nt, Human
agcgagaagcccggagguugcgcuggcuuggc

SEQ ID NO: 52604 - RNA, 32 nt, Human
agcgagacaagaagaauggagaagggggcagc

SEQ ID NO: 52605 - RNA, 32 nt, Human
agcgagaccaaaacagguggaauccgggcugg

SEQ ID NO: 52606 - RNA, 32 nt, Human
agcgagacugucucaaaacaaaacaaaacaaa

SEQ ID NO: 52607 - RNA, 32 nt, Human
agcgagagaggaggggagagacccuggccagg

SEQ ID NO: 52608 - RNA, 19 nt, Human
agcgagagcgagugccuga

SEQ ID NO: 52609 - RNA, 32 nt, Human
agcgagaggcagcaagguggccacagugucac

SEQ ID NO: 52610 - RNA, 32 nt, Human
agcgagaguggggcgggcugagcccggauccg

SEQ ID NO: 52611 - RNA, 32 nt, Human
agcgagaucacccugcucugcccagcccccag

SEQ ID NO: 52612 - RNA, 32 nt, Human
agcgagaucgguucgcagcccagcuccgugag

SEQ ID NO: 52613 - RNA, 20 nt, Human
agcgagaugccagccuuccu

SEQ ID NO: 52614 - RNA, 32 nt, Human
agcgagaugggaagagaaaacuggccagaggc

SEQ ID NO: 52615 - RNA, 31 nt, Human
agcgagauggguaacaucacaguagauucgu

SEQ ID NO: 52616 - RNA, 32 nt, Human
agcgagauuccacccccgccaccuguagaggu

SEQ ID NO: 52617 - RNA, 32 nt, Human
agcgagcacagcuguucuccgacauggcuacg

SEQ ID NO: 52618 - RNA, 21 nt, Human
agcgagcagcgccgcgggaga

SEQ ID NO: 52619 - RNA, 21 nt, Human
agcgagcagcggccgagcgga

SEQ ID NO: 52620 - RNA, 32 nt, Human
agcgagcagggcuccccgccuuaacuuccucc

SEQ ID NO: 52621 - RNA, 32 nt, Human
agcgagcagguguguguggguccuccaccacu

SEQ ID NO: 52622 - RNA, 32 nt, Human
agcgagcaugaccauaugccauucucgucucc

SEQ ID NO: 52623 - RNA, 32 nt, Human
agcgagcaugucguggacacacacagacuauu

SEQ ID NO: 52624 - RNA, 32 nt, Human
agcgagccaggccgccuggacgcccagcccuu

SEQ ID NO: 52625 - RNA, 19 nt, Human
agcgagccaucacuggaca

SEQ ID NO: 52626 - RNA, 32 nt, Human
agcgagcccagagggauuuugccgcugcuucc

SEQ ID NO: 52627 - RNA, 32 nt, Human
agcgagccccugacucugggccugcguccugc

SEQ ID NO: 52628 - RNA, 22 nt, Human
agcgagccgccgccgggcagcg

SEQ ID NO: 52629 - RNA, 32 nt, Human
agcgagccuagccuccccgcgcccugggcagu

SEQ ID NO: 52630 - RNA, 32 nt, Human
agcgagccucucucccugaucuuacgugcuca

SEQ ID NO: 52631 - RNA, 32 nt, Human
agcgagccuuucagcuauucagugccagcggu

SEQ ID NO: 52632 - RNA, 32 nt, Human
agcgagccuuuucccugguguugcagcuguug

SEQ ID NO: 52633 - RNA, 32 nt, Human
agcgagcgccagcuccggccagccugggacag

SEQ ID NO: 52634 - RNA, 32 nt, Human
agcgagcgcccagcuccugacacugcuggaga

SEQ ID NO: 52635 - RNA, 32 nt, Human
agcgagcggaaggcuucccgacugcauuuugc

SEQ ID NO: 52636 - RNA, 32 nt, Human
agcgagcuuaaggaguggggugcagcgucugg

SEQ ID NO: 52637 - RNA, 32 nt, Human
agcgagcuuugcugggagaggggguagcuagc

SEQ ID NO: 52638 - RNA, 32 nt, Human
agcgaggagagcccuggcugaggcaucaggaa

SEQ ID NO: 52639 - RNA, 32 nt, Human
agcgaggagccgcggcggcguggagccggcgg

SEQ ID NO: 52640 - RNA, 32 nt, Human
agcgaggagcggcggcagaggaaaggccaggc

SEQ ID NO: 52641 - RNA, 32 nt, Human
agcgaggagcgggcagaggcagcuccggcggc

SEQ ID NO: 52642 - RNA, 32 nt, Human
agcgaggaggggcggagcccugcuuccggaau

SEQ ID NO: 52643 - RNA, 32 nt, Human
agcugcugacaggggaccuggccauucucagg

SEQ ID NO: 52644 - RNA, 32 nt, Human
agcugcugaccuggccccuuucugcggcugcg

SEQ ID NO: 52645 - RNA, 32 nt, Human
agcugcugagccaccaacucccaaagccagcc

SEQ ID NO: 52646 - RNA, 24 nt, Human
agcugcugagcucccucaaccugc

SEQ ID NO: 52647 - RNA, 23 nt, Human
agcugcugcaaaagcugaugaag

SEQ ID NO: 52648 - RNA, 32 nt, Human
agcugcugcaaccuccaccucccggguucaag

SEQ ID NO: 52649 - RNA, 32 nt, Human
agcugcugcaagacagcaaugacaguccaccu

SEQ ID NO: 52650 - RNA, 32 nt, Human
agcugcugcaggggacccucaggcuggauggu

SEQ ID NO: 52651 - RNA, 32 nt, Human
agcugcugccacuccagcaagggaaauaaugc

SEQ ID NO: 52652 - RNA, 32 nt, Human
agcugcugcccagccaugagagauguaaaguc

SEQ ID NO: 52653 - RNA, 31 nt, Human
agcugcugccucucuccugggaccguggggu

SEQ ID NO: 52654 - RNA, 32 nt, Human
agcugcugcuaugucucucuucugucuuauuc

SEQ ID NO: 52655 - RNA, 32 nt, Human
agcugcugcuccaaggccuggccacaugcaga

SEQ ID NO: 52656 - RNA, 32 nt, Human
agcugcugcucccauguuauuuuauugggguc

SEQ ID NO: 52657 - RNA, 32 nt, Human
agcugcugcucugggaggcuaaggcucaucuc

SEQ ID NO: 52658 - RNA, 32 nt, Human
agcugcugcuuccagugggccugggcccagga

SEQ ID NO: 52659 - RNA, 32 nt, Human
agcugcugcuuuggcgggaguuggaagcuggu

SEQ ID NO: 52660 - RNA, 32 nt, Human
agcugcuggaaccucuucccuaugaauucaug

SEQ ID NO: 52661 - RNA, 32 nt, Human
agcugcuggagacagagucagagcagucaagg

SEQ ID NO: 52662 - RNA, 32 nt, Human
agcugcuggaggaggcggagaggcagagggag

SEQ ID NO: 52663 - RNA, 19 nt, Human
agcugcuggagugcagugg

SEQ ID NO: 52664 - RNA, 32 nt, Human
agcugcuggcaggugggccugccuguggagga

SEQ ID NO: 52665 - RNA, 32 nt, Human
agcugcuggccacauuuccugcuuuauuuuaa

SEQ ID NO: 52666 - RNA, 32 nt, Human
agcugcuggcuuugaagaaagagcugauggug

SEQ ID NO: 52667 - RNA, 32 nt, Human
agcugcugggcccagaggugacauuugacuuu

SEQ ID NO: 52668 - RNA, 32 nt, Human
agcugcugggccggcccugccuugcgcuagca

SEQ ID NO: 52669 - RNA, 32 nt, Human
agcugcugggcugcgagccagggguuggacuc

SEQ ID NO: 52670 - RNA, 32 nt, Human
agcugcugggcugcggcuguggggcugggggc

SEQ ID NO: 52671 - RNA, 32 nt, Human
agcugcugggcugcggggaagaggggcugcac

SEQ ID NO: 52672 - RNA, 32 nt, Human
agcugcuggucccagagagugcagcccagggc

SEQ ID NO: 52673 - RNA, 31 nt, Human
agcugcugguccucugggcuuggucauggga

SEQ ID NO: 52674 - RNA, 32 nt, Human
agcugcugguuagugggcagccccugcucauc

SEQ ID NO: 52675 - RNA, 32 nt, Human
agcugcugguucuguacugcaggccucaguga

SEQ ID NO: 52676 - RNA, 32 nt, Human
agcugcuguccaggaacuuuccagcaguaucc

SEQ ID NO: 52677 - RNA, 32 nt, Human
agcugcugucugcagagccugcucggauccug

SEQ ID NO: 52678 - RNA, 27 nt, Human
agcugcugugccucacagcgcugugag

SEQ ID NO: 52679 - RNA, 32 nt, Human
agcugcuguggaggcuggguggccacacaggc

SEQ ID NO: 52680 - RNA, 32 nt, Human
agcugcuguguccuccuccuuggugauggaca

SEQ ID NO: 52681 - RNA, 32 nt, Human
agcugcugugugaccugggagugauuuugaca

SEQ ID NO: 52682 - RNA, 32 nt, Human
agcugcuguugcucccccgccugcuguugcuc

SEQ ID NO: 52683 - RNA, 32 nt, Human
agcugcuguuuucuuccaugcaauauuguaua

SEQ ID NO: 52684 - RNA, 32 nt, Human
agcugcuucccagugcucacagauggcuggcc

SEQ ID NO: 52685 - RNA, 32 nt, Human
agcugcuucucagucaugaauguggccauggc

SEQ ID NO: 52686 - RNA, 32 nt, Human
agcugcuucucccccaugccucacugguccca

SEQ ID NO: 52687 - RNA, 21 nt, Human
agcugcuugacccccaggcac

SEQ ID NO: 52688 - RNA, 32 nt, Human
agcugcuugagagacaucaccuggagaagaag

SEQ ID NO: 52689 - RNA, 32 nt, Human
agcugcuugcccauguuucccugcccccuuca

SEQ ID NO: 52690 - RNA, 32 nt, Human
agcugcuugcuuguacuguccauccuucaggc

SEQ ID NO: 52691 - RNA, 32 nt, Human
agcugcuugggaggcugaggcagagaauugcu

SEQ ID NO: 52692 - RNA, 32 nt, Human
agcugcuugugaugaaucagagcugcucgugc

SEQ ID NO: 52693 - RNA, 32 nt, Human
agcugcuuuucaccaucucaagaagccuaaga

SEQ ID NO: 52694 - RNA, 32 nt, Human
agcugcuuuuucuaaucuccugccucucccca

SEQ ID NO: 52695 - RNA, 32 nt, Human
agcuggaaaagauacucccagcugacagggug

SEQ ID NO: 52696 - RNA, 32 nt, Human
agcuggaaagagagagaagggccucacaguga

SEQ ID NO: 52697 - RNA, 32 nt, Human
agcuggaaccacaggcaugugccaccaugccu

SEQ ID NO: 52698 - RNA, 32 nt, Human
agcuggaaccacgggggugugccaccacgccu

SEQ ID NO: 52699 - RNA, 32 nt, Human
agcuggaacccagcuuacauuuuguuauuucu

SEQ ID NO: 52700 - RNA, 32 nt, Human
agcuggaacuacagacaugcaccaccaugccu

SEQ ID NO: 52701 - RNA, 32 nt, Human
agcuggaacuacaggcacgcaccaccgcaccu

SEQ ID NO: 52702 - RNA, 32 nt, Human
agcuggaacuacaggcaugcaccaauuuuugu

SEQ ID NO: 52703 - RNA, 32 nt, Human
agcuggaacuacaggcaugcaccaccaugccu

SEQ ID NO: 52704 - RNA, 32 nt, Human
agcuggaacuacaggcaugcaucaccaugucc

SEQ ID NO: 52705 - RNA, 32 nt, Human
agcuggaacuacaggcgugugccaccaugucu

SEQ ID NO: 52706 - RNA, 32 nt, Human
agcuggaacuacaggugcccgccacuaugccc

SEQ ID NO: 52707 - RNA, 32 nt, Human
agcuggaacuacaggugugcaccaccaugccu

SEQ ID NO: 52708 - RNA, 32 nt, Human
agcuggaacuauaggggcaugccaccaugccu

SEQ ID NO: 52709 - RNA, 32 nt, Human
agcuggaacuuggguggggaggggacaugagg

SEQ ID NO: 52710 - RNA, 32 nt, Human
agcuggaagagaggcuuuggaauguucccagc

SEQ ID NO: 52711 - RNA, 32 nt, Human
agcuggaagaggaggaggaggagaggcggcgg

SEQ ID NO: 52712 - RNA, 32 nt, Human
agcuggaagauaccucucuggccccggcacau

SEQ ID NO: 52713 - RNA, 32 nt, Human
agcuggaagcacacuggcuaucugcggaagga

SEQ ID NO: 52714 - RNA, 32 nt, Human
agcuggaaggagggagguuagagccacccaug

SEQ ID NO: 52715 - RNA, 32 nt, Human
agcuggaaggcgggcaccagccucuggggagg

SEQ ID NO: 52716 - RNA, 32 nt, Human
agcuggaaggcgucguucuccuuucccagcuc

SEQ ID NO: 52717 - RNA, 31 nt, Human
agcuggaagucaaggcuccucacuuagcuuu

SEQ ID NO: 52718 - RNA, 32 nt, Human
agcuggaaucgcugcacuuuacacacucaaaa

SEQ ID NO: 52719 - RNA, 32 nt, Human
agcuggaaugugccacagaggccccaccugaa

SEQ ID NO: 52720 - RNA, 32 nt, Human
agcuggaauuacaagcaugcacugcuaugccc

SEQ ID NO: 52721 - RNA, 32 nt, Human
agcuggaauuacagacgccugccaccacgcac

SEQ ID NO: 52722 - RNA, 32 nt, Human
agcuggaauuacaggcacacaccaccacgccu

SEQ ID NO: 52723 - RNA, 32 nt, Human
agcuggaauuacaggcacauaccacugcaccc

SEQ ID NO: 52724 - RNA, 32 nt, Human
agcuggaauuacaggcacaugacacugugccc

SEQ ID NO: 52725 - RNA, 32 nt, Human
agcuggaauuacaggcacccaccaccacaccc

SEQ ID NO: 52726 - RNA, 32 nt, Human
agcuggaauuacaggcaccugccaccacaucc

SEQ ID NO: 52727 - RNA, 32 nt, Human
agcuggaauuacaggcaccugccaccacgccu

SEQ ID NO: 52728 - RNA, 32 nt, Human
agcuggaauuacaggcaccugccacuaugccc

SEQ ID NO: 52729 - RNA, 32 nt, Human
agcuggaauuacaggcaggcgccaccaggccc

SEQ ID NO: 52730 - RNA, 32 nt, Human
agcuggaauuacaggcaugcgccagcacgccc

SEQ ID NO: 52731 - RNA, 32 nt, Human
agcuggaauuacaggcaugcgccaugacgccu

SEQ ID NO: 52732 - RNA, 32 nt, Human
agcuggaauuacaggcaugugccgccaugccu

SEQ ID NO: 52733 - RNA, 32 nt, Human
agcuggaauuacaggugcccaccaccaugccu

SEQ ID NO: 52734 - RNA, 32 nt, Human
agcuggaauuacaggugccugccaccaugccc

SEQ ID NO: 52735 - RNA, 32 nt, Human
agcuggaauuauaggcacaugccaccacgacu

SEQ ID NO: 52736 - RNA, 32 nt, Human
agcuggaauuauaggcgugcaccaccacgccc

SEQ ID NO: 52737 - RNA, 32 nt, Human
agcuggacauacugcuggaguccagugcuuuc

SEQ ID NO: 52738 - RNA, 17 nt, Human
agcuggaccagaaucua

SEQ ID NO: 52739 - RNA, 32 nt, Human
agcuggaccaggagguggaggcucaggggacc

SEQ ID NO: 52740 - RNA, 32 nt, Human
agcuggaccaggugcucagacugaggcggccg

SEQ ID NO: 52741 - RNA, 32 nt, Human
agcuggaccgagagaugagcaggagcguggac

SEQ ID NO: 52742 - RNA, 32 nt, Human
agcuggaccuaguuucacaaucuguugucucc

SEQ ID NO: 52743 - RNA, 32 nt, Human
agcuggaccucagcccugggugcugggccuug

SEQ ID NO: 52744 - RNA, 32 nt, Human
agcuggaccugcagggguggucccgccacaac

SEQ ID NO: 52745 - RNA, 20 nt, Human
agcuggacgccccucccggg

SEQ ID NO: 52746 - RNA, 32 nt, Human
agcuggacgcugcagcuggaacuagcgugcca

SEQ ID NO: 52747 - RNA, 32 nt, Human
agcuggacuaaaucacuaguuaauucuacaau

SEQ ID NO: 52748 - RNA, 32 nt, Human
agcuggacugaggauggugggcaggaggccgg

SEQ ID NO: 52749 - RNA, 32 nt, Human
agcuggacuggccuuacuucugccuuuuucac

SEQ ID NO: 52750 - RNA, 26 nt, Human
agcuggacuguguggcuggggccuga

SEQ ID NO: 52751 - RNA, 32 nt, Human
agcuggagaagcuccaccugggaugggaagcu

SEQ ID NO: 52752 - RNA, 32 nt, Human
agcuggagagcaaguuucugggccuguuccca

SEQ ID NO: 52753 - RNA, 32 nt, Human
agcuggagaggaaggggugaggcgugggaucg

SEQ ID NO: 52754 - RNA, 32 nt, Human
agcuggagagggugcguuucacuguggggugu

SEQ ID NO: 52755 - RNA, 32 nt, Human
agcuggagagguagucagaaauucagucuugc

SEQ ID NO: 52756 - RNA, 32 nt, Human
agcuggagaguugaggcaggcagcaaagacug

SEQ ID NO: 52757 - RNA, 32 nt, Human
agcuggagaugaggcaggagaggaaggcaagg

SEQ ID NO: 52758 - RNA, 32 nt, Human
agcuggagaugaggcugagauccagaguuucc

SEQ ID NO: 52759 - RNA, 32 nt, Human
agcuggagcacgcucuaagagagaugccugcu

SEQ ID NO: 52760 - RNA, 32 nt, Human
agcuggagcacuacugcccugccuugggccuu

SEQ ID NO: 52761 - RNA, 21 nt, Human
agcuggagcaggguugcggug

SEQ ID NO: 52762 - RNA, 32 nt, Human
agcuggagccaaccuacgugccaggccccgug

SEQ ID NO: 52763 - RNA, 32 nt, Human
agcuggagccaggaugcgaagcagcuguaaug

SEQ ID NO: 52764 - RNA, 18 nt, Human
agcuggagccucuugagg

SEQ ID NO: 52765 - RNA, 32 nt, Human
agcuggagccuugccuagcuggugaucacaca

SEQ ID NO: 52766 - RNA, 32 nt, Human
agcuggagcgggaaacuggagcuuaaauucug

SEQ ID NO: 52767 - RNA, 17 nt, Human
agcuggagcucccggug

SEQ ID NO: 52768 - RNA, 18 nt, Human
agcuggagcucucccagg

SEQ ID NO: 52769 - RNA, 17 nt, Human
agcuggagcugggcuga

SEQ ID NO: 52770 - RNA, 32 nt, Human
agcuggaggacacaucuagcugccauugcaac

SEQ ID NO: 52771 - RNA, 32 nt, Human
agcuggaggacauugcccugcccugcgcggcc

SEQ ID NO: 52772 - RNA, 32 nt, Human
agcuggaggaccaggcaagcugaggcgggggc

SEQ ID NO: 52773 - RNA, 32 nt, Human
agcuggaggaggaggaggaggauacgccaguc

SEQ ID NO: 52774 - RNA, 32 nt, Human
agcuggaggaggaggagggcaaacccgagggc

SEQ ID NO: 52775 - RNA, 32 nt, Human
agcuggaggagggcaggggcugagggagugag

SEQ ID NO: 52776 - RNA, 32 nt, Human
agcuggaggagggggugaccagcuuggagucu

SEQ ID NO: 52777 - RNA, 32 nt, Human
agcuggaggcaggaggauggauccucaucucc

SEQ ID NO: 52778 - RNA, 32 nt, Human
agcuggaggcccgggcuggaggggcaguguug

SEQ ID NO: 52779 - RNA, 32 nt, Human
agcuggaggcggagcuuggcaacaugcagccg

SEQ ID NO: 52780 - RNA, 32 nt, Human
agcuggagggacaugagugucccugggccguc

SEQ ID NO: 52781 - RNA, 32 nt, Human
agcuggagggauagaccauggccacaccugcu

SEQ ID NO: 52782 - RNA, 32 nt, Human
agcuggagggcagaggaggcggcgcggggugu

SEQ ID NO: 52783 - RNA, 32 nt, Human
agcuggagggcagggggcuggggaaggggguc

SEQ ID NO: 52784 - RNA, 32 nt, Human
agcuggagggccacaugcacacacagccuagc

SEQ ID NO: 52785 - RNA, 32 nt, Human
agcuggagggugcugggcaggagcuggccagu

SEQ ID NO: 52786 - RNA, 32 nt, Human
agcuggaggugagcuucugaggccuuugccau

SEQ ID NO: 52787 - RNA, 32 nt, Human
agcuggagguggaaaauggugccuggagcuac

SEQ ID NO: 52788 - RNA, 31 nt, Human
agcuggagguggagagaaaucaggcugggac

SEQ ID NO: 52789 - RNA, 32 nt, Human
agcuggagugaaaauuuuguuuugaaaaggug

SEQ ID NO: 52790 - RNA, 32 nt, Human
agcuggagugaugcagggaggaaaggcagagu

SEQ ID NO: 52791 - RNA, 32 nt, Human
agcuggaguguuggucuccuaggaccaaggcc

SEQ ID NO: 52792 - RNA, 32 nt, Human
agcuggaucaacugauggcccaaccaacugga

SEQ ID NO: 52793 - RNA, 32 nt, Human
agcuggaucuacuacagggaagggaagagggu

SEQ ID NO: 52794 - RNA, 32 nt, Human
agcuggaucuguuugcaugcaggaugaagagg

SEQ ID NO: 52795 - RNA, 32 nt, Human
agcuggaucuuagagaaaaugaauauuuaaau

SEQ ID NO: 52796 - RNA, 21 nt, Human
agcuggaugccugggaaccac

SEQ ID NO: 52797 - RNA, 20 nt, Human
agcuggaugugccucccagg

SEQ ID NO: 52798 - RNA, 24 nt, Human
agcuggaugugccucccaggccug

SEQ ID NO: 52799 - RNA, 21 nt, Human
agcuggauuaucuugaaccug

SEQ ID NO: 52800 - RNA, 21 nt, Human
agcuggauuaugguggccuga

SEQ ID NO: 52801 - RNA, 32 nt, Human
agcuggauuggccagugcaccuuguauucagu

SEQ ID NO: 52802 - RNA, 32 nt, Human
agcuggauuuaaucaucccugcccuacauaua

SEQ ID NO: 52803 - RNA, 32 nt, Human
agcuggauuuacagaugcaugccaccacgccc

SEQ ID NO: 52804 - RNA, 17 nt, Human
agcuggauuuugaacug

SEQ ID NO: 52805 - RNA, 32 nt, Human
agcuggcaaccuccguugucccuucccauuug

SEQ ID NO: 52806 - RNA, 32 nt, Human
agcuggcaacuucucccccaggugccuucccc

SEQ ID NO: 52807 - RNA, 32 nt, Human
agcuggcaaucaggagaagaagcacuuuguuu

SEQ ID NO: 52808 - RNA, 32 nt, Human
agcuggcaaugccaccacacgcuucagagaaa

SEQ ID NO: 52809 - RNA, 32 nt, Human
agcuggcagaguuguguuugcaguguaguccu

SEQ ID NO: 52810 - RNA, 32 nt, Human
agcuggcagcugguuggugcuuacaccuuggc

SEQ ID NO: 52811 - RNA, 32 nt, Human
agcuggcaggacugccggucacacaccagcac

SEQ ID NO: 52812 - RNA, 32 nt, Human
agcuggcaggaggugggcugagcugcuccggg

SEQ ID NO: 52813 - RNA, 32 nt, Human
agcuggcaggcagaguggucacauuacagaug

SEQ ID NO: 52814 - RNA, 32 nt, Human
agcuggcagggcagaaagcagugucgaucaac

SEQ ID NO: 52815 - RNA, 32 nt, Human
agcuggcagugaaugugccacuguaugucaac

SEQ ID NO: 52816 - RNA, 32 nt, Human
agcuggcauccauauccacuucuccggguuug

SEQ ID NO: 52817 - RNA, 32 nt, Human
agcuggcaucugaccuuggcacucgaacugac

SEQ ID NO: 52818 - RNA, 32 nt, Human
agcuggcaugcuuggcugugugcaguggccag

SEQ ID NO: 52819 - RNA, 32 nt, Human
agcuggcauuacaggcacaugccaccacgccc

SEQ ID NO: 52820 - RNA, 32 nt, Human
agcuggcauuacaggcaugugucaccaugccc

SEQ ID NO: 52821 - RNA, 32 nt, Human
agcuggcauuacaggcgcccaccaccacgcuc

SEQ ID NO: 52822 - RNA, 32 nt, Human
agcuggcauuacaggcgccugccaccagaccu

SEQ ID NO: 52823 - RNA, 32 nt, Human
agcuggcauuauaggugcccaccaccaugccu

SEQ ID NO: 52824 - RNA, 32 nt, Human
agcuggccaagugcuugugccagcagcaugga

SEQ ID NO: 52825 - RNA, 32 nt, Human
agcuggccaauacuuccuggccuagaaaaaua

SEQ ID NO: 52826 - RNA, 32 nt, Human
agcuggccaaucagcccaggaggggcagguuc

SEQ ID NO: 52827 - RNA, 32 nt, Human
agcuggccacaccugugaggcugcagugauug

SEQ ID NO: 52828 - RNA, 22 nt, Human
agcuggccacacuucuccagga

SEQ ID NO: 52829 - RNA, 32 nt, Human
agcuggccaccaacacagaggcccugcagagc

SEQ ID NO: 52830 - RNA, 25 nt, Human
agcuggccaccggcccaacugcagc

SEQ ID NO: 52831 - RNA, 32 nt, Human
agcuggccaccuggccacccucuacacggcuc

SEQ ID NO: 52832 - RNA, 20 nt, Human
agcuggcccacugggcaggu

SEQ ID NO: 52833 - RNA, 32 nt, Human
agcuggcccagccuggagcuggcgcugugcag

SEQ ID NO: 52834 - RNA, 32 nt, Human
agcuggcccaggaaaggcugccugcagaggac

SEQ ID NO: 52835 - RNA, 32 nt, Human
agcuggccccauccuggagaccagccuuuugc

SEQ ID NO: 52836 - RNA, 32 nt, Human
agcuggcccccuucuguuuuauguuugguuuu

SEQ ID NO: 52837 - RNA, 32 nt, Human
agcuggccccuggcugccuggaggacccuggg

SEQ ID NO: 52838 - RNA, 32 nt, Human
agcuggcccuccaccaucuucacauuccaaga

SEQ ID NO: 52839 - RNA, 32 nt, Human
agcuggcccuccacuccugcuccugugcggag

SEQ ID NO: 52840 - RNA, 32 nt, Human
agcuggcccucggggaacccgcacacacagca

SEQ ID NO: 52841 - RNA, 16 nt, Human
agcuggcccugaacug

SEQ ID NO: 52842 - RNA, 32 nt, Human
agcuggcccugccucugccuggccggcgccgc

SEQ ID NO: 52843 - RNA, 18 nt, Human
agcuggcccugcggcuga

SEQ ID NO: 52844 - RNA, 32 nt, Human
agcuggcccuggcuggagauggcuagccccug

SEQ ID NO: 52845 - RNA, 32 nt, Human
agcuggcccuucccaucuccccucuccccucu

SEQ ID NO: 52846 - RNA, 32 nt, Human
agcuggccgagcugcaagcaccugaguuaccu

SEQ ID NO: 52847 - RNA, 17 nt, Human
agcuggccgcgggcugg

SEQ ID NO: 52848 - RNA, 32 nt, Human
agcuggccgugcaggacagccuggagagugac

SEQ ID NO: 52849 - RNA, 20 nt, Human
agcuggccgugucucuggga

SEQ ID NO: 52850 - RNA, 32 nt, Human
agcuggccucacuguguccugccugaauuccu

SEQ ID NO: 52851 - RNA, 32 nt, Human
agcuggccucuaaaggauggcacugaggcacc

SEQ ID NO: 52852 - RNA, 32 nt, Human
agcuggccucugcuucacuuuuguuucagcuc

SEQ ID NO: 52853 - RNA, 32 nt, Human
agcuggccugggagcagaaguuucggugagga

SEQ ID NO: 52854 - RNA, 32 nt, Human
agcuggccugggagggagaaggggcuggagag

SEQ ID NO: 52855 - RNA, 17 nt, Human
agcuggcgggcugaggc

SEQ ID NO: 52856 - RNA, 31 nt, Human
agcuggcuaaugucucccuaguagccaauua

SEQ ID NO: 52857 - RNA, 32 nt, Human
agcuggcucugacaucaaccugggagguaaca

SEQ ID NO: 52858 - RNA, 32 nt, Human
agcuggcucugagcgccuccauccaaggccag

SEQ ID NO: 52859 - RNA, 32 nt, Human
agcuggcucuucugcugaccucagauaccagc

SEQ ID NO: 52860 - RNA, 32 nt, Human
agcuggcugacagcuuucgagagugggccugc

SEQ ID NO: 52861 - RNA, 23 nt, Human
agcuggcugcaaacccagugcug

SEQ ID NO: 52862 - RNA, 32 nt, Human
agcuggcugcagccuccaccucccuggcucaa

SEQ ID NO: 52863 - RNA, 32 nt, Human
agcuggcugcagguguccugggccaaggagca

SEQ ID NO: 52864 - RNA, 32 nt, Human
agcuggcugccaugucuccugccuguaauccc

SEQ ID NO: 52865 - RNA, 32 nt, Human
agcuggcuggcucugagccaggaagccuuguu

SEQ ID NO: 52866 - RNA, 32 nt, Human
agcuggcuggcugggagccucggggaccgccc

SEQ ID NO: 52867 - RNA, 32 nt, Human
agcuggcugggaacugggagaagagcuggagc

SEQ ID NO: 52868 - RNA, 32 nt, Human
agcuggcugggagcagagguggcuuugucuuu

SEQ ID NO: 52869 - RNA, 20 nt, Human
agcuggcuggggcccaggag

SEQ ID NO: 52870 - RNA, 32 nt, Human
agcuggcugucgaaaucacagcucuucauuuu

SEQ ID NO: 52871 - RNA, 32 nt, Human
agcuggcuucugggacuguccugggcccaagu

SEQ ID NO: 52872 - RNA, 32 nt, Human
agcuggcuuuguggggcugcaaaggacuuuua

SEQ ID NO: 52873 - RNA, 32 nt, Human
agcugggaaaacaggccugugccaccacaccg

SEQ ID NO: 52874 - RNA, 32 nt, Human
agcugggaacagcuucagagucaggcucagcc

SEQ ID NO: 52875 - RNA, 32 nt, Human
agcugggaaccacugacccagacucaguuccu

SEQ ID NO: 52876 - RNA, 32 nt, Human
agcugggaaccagcaucucagcgccagcucua

SEQ ID NO: 52877 - RNA, 32 nt, Human
agcugggaagauaggcacgugccaccacaccc

SEQ ID NO: 52878 - RNA, 32 nt, Human
agcugggaaggcgucucccggaagacgaacuc

SEQ ID NO: 52879 - RNA, 32 nt, Human
agcugggaauacaagcauacaccaccaugccc

SEQ ID NO: 52880 - RNA, 32 nt, Human
agcugggaauacaagcgugugcccccacagcc

SEQ ID NO: 52881 - RNA, 32 nt, Human
agcugggaauacagcaugcgccacuacaccug

SEQ ID NO: 52882 - RNA, 32 nt, Human
agcugggaauacaggcacccgccaccaugccc

SEQ ID NO: 52883 - RNA, 32 nt, Human
agcugggaauacaggcacgccaccaugcccag

SEQ ID NO: 52884 - RNA, 32 nt, Human
agcugggaauacaggugcacgccacuaugcau

SEQ ID NO: 52885 - RNA, 32 nt, Human
agcugggaauacaggugcaggcugccacgccc

SEQ ID NO: 52886 - RNA, 32 nt, Human
agcugggaauacaggugcgcgccgccgcaccu

SEQ ID NO: 52887 - RNA, 32 nt, Human
agcugggaauacaggugucugccaccauaccc

SEQ ID NO: 52888 - RNA, 32 nt, Human
agcugggacaacagguacgcaccaccacggcc

SEQ ID NO: 52889 - RNA, 32 nt, Human
agcugggacaacaggugcccgccaccacgcuc

SEQ ID NO: 52890 - RNA, 32 nt, Human
agcugggacaacaggugugcaccaccaugccc

SEQ ID NO: 52891 - RNA, 32 nt, Human
agcugggacagguggagaaggaaguaggaaug

SEQ ID NO: 52892 - RNA, 32 nt, Human
agcugggaccaaaagugugugccaccauggcc

SEQ ID NO: 52893 - RNA, 32 nt, Human
agcugggaccacagacgucugccaccaagccc

SEQ ID NO: 52894 - RNA, 32 nt, Human
agcugggaccacaggcacgugccaccacaccc

SEQ ID NO: 52895 - RNA, 32 nt, Human
agcugggaccacaggcacgugccaccauguug

SEQ ID NO: 52896 - RNA, 32 nt, Human
agcugggaccacaggcagaugccaccacacca

SEQ ID NO: 52897 - RNA, 32 nt, Human
agcugggaccacaggcaugcacaaccacgccu

SEQ ID NO: 52898 - RNA, 32 nt, Human
agcugggaccacaggcaugcaccacuacgcau

SEQ ID NO: 52899 - RNA, 32 nt, Human
agcugggaccacaggcaugcgccaccacuccu

SEQ ID NO: 52900 - RNA, 32 nt, Human
agcugggaccacaggcgacugccaccacaccc

SEQ ID NO: 52901 - RNA, 32 nt, Human
agcugggaccacaggcgcccaccaccacgccc

SEQ ID NO: 52902 - RNA, 32 nt, Human
agcugggaccacaggcgugcaccaccaugccc

SEQ ID NO: 52903 - RNA, 32 nt, Human
agcugggaccacagggguaugccaccacaccu

SEQ ID NO: 52904 - RNA, 32 nt, Human
agcugggaccacagguaugcaccaccacgccc

SEQ ID NO: 52905 - RNA, 18 nt, Human
agcugggaccacaggugc

SEQ ID NO: 52906 - RNA, 32 nt, Human
agcugggaccacaggugcacgccaccacaccu

SEQ ID NO: 52907 - RNA, 32 nt, Human
agcugggaccacaggugcaugccaccacgccu

SEQ ID NO: 52908 - RNA, 32 nt, Human
agcugggaccacaggugcaugccaccaugccu

SEQ ID NO: 52909 - RNA, 32 nt, Human
agcugggaccacaggugcccgccaccacaccc

SEQ ID NO: 52910 - RNA, 32 nt, Human
agcugggaccacaggugcccgccaccacgccu

SEQ ID NO: 52911 - RNA, 32 nt, Human
agcugggaccacaggugccuaccaccaugcca

SEQ ID NO: 52912 - RNA, 32 nt, Human
agcugggaccacaggugugcaccaccacgccc

SEQ ID NO: 52913 - RNA, 32 nt, Human
agcugggaccacaggugugugccaccacaccu

SEQ ID NO: 52914 - RNA, 32 nt, Human
agcugggaccacagguucaugccaccauggcc

SEQ ID NO: 52915 - RNA, 32 nt, Human
agcugggaccacaguugugugccaccacacuu

SEQ ID NO: 52916 - RNA, 32 nt, Human
agcugggaccauaggcgugcaccaccauacuc

SEQ ID NO: 52917 - RNA, 32 nt, Human
agcugggaccccggggagggcgagggaggcca

SEQ ID NO: 52918 - RNA, 32 nt, Human
agcugggaccgcaggcacuugccaccacgccc

SEQ ID NO: 52919 - RNA, 32 nt, Human
agcugggaccgcgggagugugccaccacaccc

SEQ ID NO: 52920 - RNA, 32 nt, Human
agcugggaccgcgggugugugccaccacacca

SEQ ID NO: 52921 - RNA, 32 nt, Human
agcugggaccuccucugccacucccgccuccu

SEQ ID NO: 52922 - RNA, 32 nt, Human
agcugggacgacaggcgugcaccacugcgccu

SEQ ID NO: 52923 - RNA, 32 nt, Human
agcugggacuacaagcacaugccaccaugccc

SEQ ID NO: 52924 - RNA, 32 nt, Human
agcugggacuacaagcaugcaccaccacgccc

SEQ ID NO: 52925 - RNA, 32 nt, Human
agcugggacuacaagcaugcaccacuacacuc

SEQ ID NO: 52926 - RNA, 32 nt, Human
agcugggacuacaagcgcacaccaccacgccu

SEQ ID NO: 52927 - RNA, 32 nt, Human
agcugggacuacaagcgcgcaccaccacuccc

SEQ ID NO: 52928 - RNA, 32 nt, Human
agcugggacuacaagcggcugccaccacaccu

SEQ ID NO: 52929 - RNA, 32 nt, Human
agcugggacuacaagugcaugcugccacacca

SEQ ID NO: 52930 - RNA, 32 nt, Human
agcugggacuacaagugccugccaccacgccu

SEQ ID NO: 52931 - RNA, 32 nt, Human
agcugggacuacaagugugcaccaccaugccu

SEQ ID NO: 52932 - RNA, 32 nt, Human
agcugggacuacaagugugcaccaccauggcu

SEQ ID NO: 52933 - RNA, 32 nt, Human
agcugggacuacagaagugcaccaccacaccc

SEQ ID NO: 52934 - RNA, 32 nt, Human
agcugggacuacagacaugcaccaccacaccu

SEQ ID NO: 52935 - RNA, 32 nt, Human
agcugggacuacagacgugugccaccacgccu

SEQ ID NO: 52936 - RNA, 32 nt, Human
agcugggacuacagccgugcaccacuacaucc

SEQ ID NO: 52937 - RNA, 32 nt, Human
agcugggacuacaggagccugccaccacaucu

SEQ ID NO: 52938 - RNA, 32 nt, Human
agcugggacuacaggcaaccaccaccacuccu

SEQ ID NO: 52939 - RNA, 32 nt, Human
agcugggacuacaggcacacaccaccacaccu

SEQ ID NO: 52940 - RNA, 32 nt, Human
agcugggacuacaggcacacaccaccacgccc

SEQ ID NO: 52941 - RNA, 32 nt, Human
agcugggacuacaggcacacaccaccaugccc

SEQ ID NO: 52942 - RNA, 32 nt, Human
agcugggacuacaggcacacaccaucacccuc

SEQ ID NO: 52943 - RNA, 32 nt, Human
agcugggacuacaggcacacaccaucaugccc

SEQ ID NO: 52944 - RNA, 32 nt, Human
agcugggacuacaggcacacaucaccacaucc

SEQ ID NO: 52945 - RNA, 32 nt, Human
agcugggacuacaggcacacaucgccacaccc

SEQ ID NO: 52946 - RNA, 32 nt, Human
agcugggacuacaggcacacgccaccacaccc

SEQ ID NO: 52947 - RNA, 32 nt, Human
agcugggacuacaggcacacgccaccacgcgu

SEQ ID NO: 52948 - RNA, 32 nt, Human
agcugggacuacaggcacacgccaccucgccc

SEQ ID NO: 52949 - RNA, 32 nt, Human
agcugggacuacaggcacacgcugccacgccc

SEQ ID NO: 52950 - RNA, 32 nt, Human
agcugggacuacaggcacaggccaccacaccu

SEQ ID NO: 52951 - RNA, 32 nt, Human
agcugggacuacaggcacaugccaccaaacuu

SEQ ID NO: 52952 - RNA, 32 nt, Human
agcugggacuacaggcacaugccaccacgccc

SEQ ID NO: 52953 - RNA, 32 nt, Human
agcugggacuacaggcacaugccaccaugccc

SEQ ID NO: 52954 - RNA, 32 nt, Human
agcugggacuacaggcacccacaaccacaccc

SEQ ID NO: 52955 - RNA, 32 nt, Human
agcugggacuacaggcacccaccaccacaccc

SEQ ID NO: 52956 - RNA, 32 nt, Human
agcugggacuacaggcacccaccaccuccauu

SEQ ID NO: 52957 - RNA, 32 nt, Human
agcugggacuacaggcacccaccaucaugcuu

SEQ ID NO: 52958 - RNA, 32 nt, Human
agcugggacuacaggcacccaccaucaugucu

SEQ ID NO: 52959 - RNA, 32 nt, Human
agcugggacuacaggcacccaccgucacgccc

SEQ ID NO: 52960 - RNA, 32 nt, Human
agcugggacuacaggcacccacuaccacgccu

SEQ ID NO: 52961 - RNA, 32 nt, Human
agcugggacuacaggcacccgccaacacgccc

SEQ ID NO: 52962 - RNA, 32 nt, Human
agcugggacuacaggcacccgccaccacaccc

SEQ ID NO: 52963 - RNA, 32 nt, Human
agcugggacuacaggcacccgccaccacaucc

SEQ ID NO: 52964 - RNA, 32 nt, Human
agcugggacuacaggcacccgccaccacgccc

SEQ ID NO: 52965 - RNA, 32 nt, Human
agcugggacuacaggcacccgccaccacgccu

SEQ ID NO: 52966 - RNA, 32 nt, Human
agcugggacuacaggcacccgccaccaugccc

SEQ ID NO: 52967 - RNA, 32 nt, Human
agcugggacuacaggcaccugccaccacaccc

SEQ ID NO: 52968 - RNA, 32 nt, Human
agcugggacuacaggcaccugccaccaccacc

SEQ ID NO: 52969 - RNA, 32 nt, Human
agcugggacuacaggcaccugccaccaccccc

SEQ ID NO: 52970 - RNA, 32 nt, Human
agcugggacuacaggcaccugccaccacgccc

SEQ ID NO: 52971 - RNA, 32 nt, Human
agcugggacuacaggcaccugccaccacgccu

SEQ ID NO: 52972 - RNA, 32 nt, Human
agcugggacuacaggcaccugccaccaugccc

SEQ ID NO: 52973 - RNA, 32 nt, Human
agcugggacuacaggcaccugccaccaugcgc

SEQ ID NO: 52974 - RNA, 32 nt, Human
agcugggacuacaggcacgcaccaccacaccu

SEQ ID NO: 52975 - RNA, 32 nt, Human
agcugggacuacaggcacgcaccaccaugcca

SEQ ID NO: 52976 - RNA, 32 nt, Human
agcugggacuacaggcacgcgccaccacagcc

SEQ ID NO: 52977 - RNA, 32 nt, Human
agcugggacuacaggcacgcgccaccaugccc

SEQ ID NO: 52978 - RNA, 32 nt, Human
agcugggacuacaggcacgcgccacuacacuc

SEQ ID NO: 52979 - RNA, 32 nt, Human
agcugggacuacaggcacgugccaccacaccu

SEQ ID NO: 52980 - RNA, 32 nt, Human
agcugggacuacaggcacgugccaccacgccc

SEQ ID NO: 52981 - RNA, 32 nt, Human
agcugggacuacaggcacgugccaccaugccu

SEQ ID NO: 52982 - RNA, 32 nt, Human
agcugggacuacaggcacgugcuaccacgccc

SEQ ID NO: 52983 - RNA, 32 nt, Human
agcugggacuacaggcaggcgccuaccaccac

SEQ ID NO: 52984 - RNA, 32 nt, Human
agcugggacuacaggcaggugccaccaugccu

SEQ ID NO: 52985 - RNA, 32 nt, Human
agcugggacuacaggcauaugccaucacaccc

SEQ ID NO: 52986 - RNA, 32 nt, Human
agcugggacuacaggcaugaaccaccacgccu

SEQ ID NO: 52987 - RNA, 32 nt, Human
agcugggacuacaggcaugagccaccaugccu

SEQ ID NO: 52988 - RNA, 32 nt, Human
agcugggacuacaggcaugagccaccgugccc

SEQ ID NO: 52989 - RNA, 32 nt, Human
agcugggacuacaggcaugagucaccacaccu

SEQ ID NO: 52990 - RNA, 32 nt, Human
agcugggacuacaggcaugcaacaccacacca

SEQ ID NO: 52991 - RNA, 32 nt, Human
agcugggacuacaggcaugcaccaccacaccc

SEQ ID NO: 52992 - RNA, 32 nt, Human
agcugggacuacaggcaugcaccaccacaucc

SEQ ID NO: 52993 - RNA, 32 nt, Human
agcugggacuacaggcaugcaccaccacgcca

SEQ ID NO: 52994 - RNA, 32 nt, Human
agcugggacuacaggcaugcaccaccacgccc

SEQ ID NO: 52995 - RNA, 32 nt, Human
agcugggacuacaggcaugcaccaccaugccc

SEQ ID NO: 52996 - RNA, 32 nt, Human
agcugggacuacaggcaugcaccaccaugccu

SEQ ID NO: 52997 - RNA, 32 nt, Human
agcugggacuacaggcaugcaccagcacacug

SEQ ID NO: 52998 - RNA, 32 nt, Human
agcugggacuacaggcaugcacuaccaaaccu

SEQ ID NO: 52999 - RNA, 32 nt, Human
agcugggacuacaggcaugcauaaccacaucc

SEQ ID NO: 53000 - RNA, 32 nt, Human
agcugggacuacaggcaugcaucacuaugcuc

SEQ ID NO: 53001 - RNA, 32 nt, Human
agcugggacuacaggcaugcgccaccacaccc

SEQ ID NO: 53002 - RNA, 32 nt, Human
agcugggacuacaggcaugcgccaccacgcca

SEQ ID NO: 53003 - RNA, 32 nt, Human
agcugggacuacaggcaugcgccacugcgccc

SEQ ID NO: 53004 - RNA, 32 nt, Human
agcugggacuacaggcauguaacaccauacuu

SEQ ID NO: 53005 - RNA, 32 nt, Human
agcugggacuacaggcauguaccagcacaccc

SEQ ID NO: 53006 - RNA, 32 nt, Human
agcugggacuacaggcauguaccgccaugccu

SEQ ID NO: 53007 - RNA, 32 nt, Human
agcugggacuacaggcaugugccaccacaccu

SEQ ID NO: 53008 - RNA, 32 nt, Human
agcugggacuacaggcaugugccaccacgccc

SEQ ID NO: 53009 - RNA, 32 nt, Human
agcugggacuacaggcaugugccaccaugccc

SEQ ID NO: 53010 - RNA, 32 nt, Human
agcugggacuacaggcaugugccaccaugccu

SEQ ID NO: 53011 - RNA, 32 nt, Human
agcugggacuacaggcaugugccaccaugucc

SEQ ID NO: 53012 - RNA, 32 nt, Human
agcugggacuacaggcgcacaccaccacacug

SEQ ID NO: 53013 - RNA, 32 nt, Human
agcugggacuacaggcgcacaccaccacgcca

SEQ ID NO: 53014 - RNA, 32 nt, Human
agcugggacuacaggcgcaugccaccacaccc

SEQ ID NO: 53015 - RNA, 32 nt, Human
agcugggacuacaggcgcaugccaccaugccc

SEQ ID NO: 53016 - RNA, 32 nt, Human
agcugggacuacaggcgcccaccaccacacau

SEQ ID NO: 53017 - RNA, 32 nt, Human
agcugggacuacaggcgcccaccaccacaguu

SEQ ID NO: 53018 - RNA, 32 nt, Human
agcugggacuacaggcgcccaccaccacgccc

SEQ ID NO: 53019 - RNA, 32 nt, Human
agcugggacuacaggcgcccaccaccacgccu

SEQ ID NO: 53020 - RNA, 32 nt, Human
agcugggacuacaggcgcccaccaccaugccc

SEQ ID NO: 53021 - RNA, 32 nt, Human
agcugggacuacaggcgccugccaccacaccc

SEQ ID NO: 53022 - RNA, 32 nt, Human
agcugggacuacaggcgccugccaccacaucc

SEQ ID NO: 53023 - RNA, 32 nt, Human
agcugggacuacaggcgccugccaccacuccu

SEQ ID NO: 53024 - RNA, 32 nt, Human
agcugggacuacaggcgccugccaccagccug

SEQ ID NO: 53025 - RNA, 32 nt, Human
agcugggacuacaggcgccugccaccaugccc

SEQ ID NO: 53026 - RNA, 32 nt, Human
agcugggacuacaggcgcgcaccaccacgccc

SEQ ID NO: 53027 - RNA, 32 nt, Human
agcugggacuacaggcgcgugccaccacaacc

SEQ ID NO: 53028 - RNA, 32 nt, Human
agcugggacuacaggcgcgugccaccacgccc

SEQ ID NO: 53029 - RNA, 32 nt, Human
agcugggacuacaggcguccaccaccacgccc

SEQ ID NO: 53030 - RNA, 32 nt, Human
agcugggacuacaggcgugcaccaccacaccc

SEQ ID NO: 53031 - RNA, 32 nt, Human
agcugggacuacaggcgugcaccaccacgccu

SEQ ID NO: 53032 - RNA, 32 nt, Human
agcugggacuacaggcgugugccaccaagccc

SEQ ID NO: 53033 - RNA, 32 nt, Human
agcugggacuacaggcgugugccaccacaccu

SEQ ID NO: 53034 - RNA, 32 nt, Human
agcugggacuacaggcgugugccaccaugccc

SEQ ID NO: 53035 - RNA, 32 nt, Human
agcugggacuacaggcucaugccaccacaccu

SEQ ID NO: 53036 - RNA, 32 nt, Human
agcugggacuacaggcuugcaccaccacaccc

SEQ ID NO: 53037 - RNA, 32 nt, Human
agcugggacuacaggcuugugccaccacacuc

SEQ ID NO: 53038 - RNA, 32 nt, Human
agcugggacuacaggggugcaccaccaugccc

SEQ ID NO: 53039 - RNA, 32 nt, Human
agcugggacuacagguacccaccaccacgccc

SEQ ID NO: 53040 - RNA, 32 nt, Human
agcugggacuacagguaccugccaccacgccu

SEQ ID NO: 53041 - RNA, 32 nt, Human
agcugggacuacagguacgugccaccacaccc

SEQ ID NO: 53042 - RNA, 32 nt, Human
agcugggacuacagguaugcaccacagcucca

SEQ ID NO: 53043 - RNA, 32 nt, Human
agcugggacuacagguaugcaccaccaugccu

SEQ ID NO: 53044 - RNA, 32 nt, Human
agcugggacuacagguaugcaccacgaccagc

SEQ ID NO: 53045 - RNA, 32 nt, Human
agcugggacuacaggucuacaccaccacuccc

SEQ ID NO: 53046 - RNA, 32 nt, Human
agcugggacuacaggucugcaccacugcaccc

SEQ ID NO: 53047 - RNA, 32 nt, Human
agcugggacuacaggugcacaccaccacaccu

SEQ ID NO: 53048 - RNA, 32 nt, Human
agcugggacuacaggugcaccaccacaccugg

SEQ ID NO: 53049 - RNA, 32 nt, Human
agcugggacuacaggugcacgccaccacaacu

SEQ ID NO: 53050 - RNA, 32 nt, Human
agcugggacuacaggugcacgccaccacgccu

SEQ ID NO: 53051 - RNA, 32 nt, Human
agcugggacuacaggugcacgcuaccaugccc

SEQ ID NO: 53052 - RNA, 32 nt, Human
agcugggacuacaggugcacgcuaccaugccu

SEQ ID NO: 53053 - RNA, 32 nt, Human
agcugggacuacaggugcaugccaccacaccu

SEQ ID NO: 53054 - RNA, 32 nt, Human
agcugggacuacaggugcaugccaccacgcac

SEQ ID NO: 53055 - RNA, 32 nt, Human
agcugggacuacaggugcaugccaccacgccc

SEQ ID NO: 53056 - RNA, 32 nt, Human
agcugggacuacaggugcaugccaccacgccu

SEQ ID NO: 53057 - RNA, 32 nt, Human
agcugggacuacaggugcaugccaccaugcca

SEQ ID NO: 53058 - RNA, 32 nt, Human
agcugggacuacaggugcaugccacgacgccc

SEQ ID NO: 53059 - RNA, 32 nt, Human
agcugggacuacaggugcaugccacuaagccc

SEQ ID NO: 53060 - RNA, 32 nt, Human
agcugggacuacaggugcaugcuaccaugccc

SEQ ID NO: 53061 - RNA, 32 nt, Human
agcugggacuacaggugccaucagaccuggcu

SEQ ID NO: 53062 - RNA, 32 nt, Human
agcugggacuacaggugcccaccaacacgccc

SEQ ID NO: 53063 - RNA, 32 nt, Human
agcugggacuacaggugcccaccaccacaccc

SEQ ID NO: 53064 - RNA, 32 nt, Human
agcugggacuacaggugcccaccaccacgccu

SEQ ID NO: 53065 - RNA, 32 nt, Human
agcugggacuacaggugcccaccaccacgcuu

SEQ ID NO: 53066 - RNA, 32 nt, Human
agcugggacuacaggugcccaccaccaugccc

SEQ ID NO: 53067 - RNA, 32 nt, Human
agcugggacuacaggugcccgccaccacacca

SEQ ID NO: 53068 - RNA, 32 nt, Human
agcugggacuacaggugcccgccaccaccacg

SEQ ID NO: 53069 - RNA, 32 nt, Human
agcugggacuacaggugcccgccaccacgccc

SEQ ID NO: 53070 - RNA, 32 nt, Human
agcugggacuacaggugcccgccaccacgguc

SEQ ID NO: 53071 - RNA, 32 nt, Human
agcugggacuacaggugcccgccaccaugccc

SEQ ID NO: 53072 - RNA, 32 nt, Human
agcugggacuacaggugcccgccaccgugccc

SEQ ID NO: 53073 - RNA, 32 nt, Human
agcugggacuacaggugcccgccccgacaccu

SEQ ID NO: 53074 - RNA, 32 nt, Human
agcugggacuacaggugcccgcuaccacaccc

SEQ ID NO: 53075 - RNA, 32 nt, Human
agcugggacuacaggugcccuccaccacgcuu

SEQ ID NO: 53076 - RNA, 32 nt, Human
agcugggacuacaggugccugccaccaagcuc

SEQ ID NO: 53077 - RNA, 32 nt, Human
agcugggacuacaggugccugccaccacaccc

SEQ ID NO: 53078 - RNA, 32 nt, Human
agcugggacuacaggugccugccaccacgccu

SEQ ID NO: 53079 - RNA, 32 nt, Human
agcugggacuacaggugccugcgaccacaccc

SEQ ID NO: 53080 - RNA, 32 nt, Human
agcugggacuacaggugcgcaccaccaugccc

SEQ ID NO: 53081 - RNA, 32 nt, Human
agcugggacuacaggugcgcacuaccacgccu

SEQ ID NO: 53082 - RNA, 32 nt, Human
agcugggacuacaggugcgcgccaccgugccu

SEQ ID NO: 53083 - RNA, 32 nt, Human
agcugggacuacaggugcgugccaccaugccc

SEQ ID NO: 53084 - RNA, 32 nt, Human
agcugggacuacaggugcgugccaccaugccu

SEQ ID NO: 53085 - RNA, 32 nt, Human
agcugggacuacaggugcgugccacuaugcca

SEQ ID NO: 53086 - RNA, 32 nt, Human
agcugggacuacaggugcgugcuaccacgccc

SEQ ID NO: 53087 - RNA, 32 nt, Human
agcugggacuacaggugcucaccaccacaccc

SEQ ID NO: 53088 - RNA, 32 nt, Human
agcugggacuacaggugcuccauuaaaucagg

SEQ ID NO: 53089 - RNA, 32 nt, Human
agcugggacuacagguguacaccaccacgccu

SEQ ID NO: 53090 - RNA, 32 nt, Human
agcugggacuacagguguacaccaccaugccu

SEQ ID NO: 53091 - RNA, 32 nt, Human
agcugggacuacagguguccaccaccaugccu

SEQ ID NO: 53092 - RNA, 32 nt, Human
agcugggacuacaggugugcaccaccacaccc

SEQ ID NO: 53093 - RNA, 32 nt, Human
agcugggacuacaggugugcaccaccacaccu

SEQ ID NO: 53094 - RNA, 32 nt, Human
agcugggacuacaggugugcaccaccacagcu

SEQ ID NO: 53095 - RNA, 32 nt, Human
agcugggacuacaggugugcaccaccaugccc

SEQ ID NO: 53096 - RNA, 32 nt, Human
agcugggacuacaggugugcaccacuacuccu

SEQ ID NO: 53097 - RNA, 32 nt, Human
agcugggacuacaggugugcaccacuaugccu

SEQ ID NO: 53098 - RNA, 32 nt, Human
agcugggacuacaggugugcaccacugcgucu

SEQ ID NO: 53099 - RNA, 32 nt, Human
agcugggacuacaggugugugccaccacaccc

SEQ ID NO: 53100 - RNA, 32 nt, Human
agcugggacuacaggugugugccaccaugccc

SEQ ID NO: 53101 - RNA, 32 nt, Human
agcugggacuacagucaugugccaccacgccc

SEQ ID NO: 53102 - RNA, 32 nt, Human
agcugggacuacaguugugcaccaccacacca

SEQ ID NO: 53103 - RNA, 32 nt, Human
agcugggacuacaugcgcacaccaccacgucc

SEQ ID NO: 53104 - RNA, 32 nt, Human
agcugggacuacauguaugugccaccacaccu

SEQ ID NO: 53105 - RNA, 32 nt, Human
agcugggacuaccggcgcccaccaccacgccu

SEQ ID NO: 53106 - RNA, 32 nt, Human
agcugggacuacggaugccugccaccacgccu

SEQ ID NO: 53107 - RNA, 32 nt, Human
agcugggacuacgggcacacaccaccaugccu

SEQ ID NO: 53108 - RNA, 32 nt, Human
agcugggacuacgggcacgcaccaccacgucu

SEQ ID NO: 53109 - RNA, 32 nt, Human
agcugggacuacugguacaugccaccaggccu

SEQ ID NO: 53110 - RNA, 32 nt, Human
agcugggacuacuggugugcaccaccacaccc

SEQ ID NO: 53111 - RNA, 32 nt, Human
agcugggacuagaagcaugcaccaccaugccc

SEQ ID NO: 53112 - RNA, 32 nt, Human
agcugggacuagagaugugugccaccaugccc

SEQ ID NO: 53113 - RNA, 32 nt, Human
agcugggacuagaggaacgugccaccaugacu

SEQ ID NO: 53114 - RNA, 32 nt, Human
agcugggacuagaggcaugcgccaccacaccc

SEQ ID NO: 53115 - RNA, 32 nt, Human
agcugggacuauaaacgugcaccaccacaccc

SEQ ID NO: 53116 - RNA, 32 nt, Human
agcugggacuauaggcacgcaccaccaugccu

SEQ ID NO: 53117 - RNA, 32 nt, Human
agcugggacuauaggcacgugccaccacaccc

SEQ ID NO: 53118 - RNA, 32 nt, Human
agcugggacuauaggcgcgugccaccacaacc

SEQ ID NO: 53119 - RNA, 32 nt, Human
agcugggacuauaggcgugugccaccaugccc

SEQ ID NO: 53120 - RNA, 32 nt, Human
agcugggacuauaggugcacaccaccacaccu

SEQ ID NO: 53121 - RNA, 32 nt, Human
agcugggacuauaggugcaugccaccaugccc

SEQ ID NO: 53122 - RNA, 32 nt, Human
agcugggacuauaggugcgugccaccacaccc

SEQ ID NO: 53123 - RNA, 32 nt, Human
agcugggacuauaggugcgugccaccaugccc

SEQ ID NO: 53124 - RNA, 32 nt, Human
agcugggacuauagucacuugccaccaugccc

SEQ ID NO: 53125 - RNA, 32 nt, Human
agcugggacuaugggugcacaccaccacgccu

SEQ ID NO: 53126 - RNA, 32 nt, Human
agcugggacuauuagugcacaccaccacaccu

SEQ ID NO: 53127 - RNA, 32 nt, Human
agcugggacuccaggcacccaccaccacuccc

SEQ ID NO: 53128 - RNA, 32 nt, Human
agcugggacugcaggcaugagccaucacaccc

SEQ ID NO: 53129 - RNA, 32 nt, Human
agcugggacugcaggcaugcgccaccaugcca

SEQ ID NO: 53130 - RNA, 32 nt, Human
agcugggacugcaggcaugugccaccaggccu

SEQ ID NO: 53131 - RNA, 32 nt, Human
agcugggacugcaggugcacaccaccacgccc

SEQ ID NO: 53132 - RNA, 32 nt, Human
agcugggacugcaggugcauaccaccacgccc

SEQ ID NO: 53133 - RNA, 32 nt, Human
agcugggacuggaggcgugugccaccaugccc

SEQ ID NO: 53134 - RNA, 31 nt, Human
agcugggacuucuccaggccuguguucccuc

SEQ ID NO: 53135 - RNA, 32 nt, Human
agcugggagaaagagagagcuucuguugcugc

SEQ ID NO: 53136 - RNA, 32 nt, Human
agcugggagagcagagaaaaggggccaccggu

SEQ ID NO: 53137 - RNA, 32 nt, Human
agcugggagagggacagcagcagcggcuguuc

SEQ ID NO: 53138 - RNA, 32 nt, Human
agcugggagaguccaggagcuagggacacaga

SEQ ID NO: 53139 - RNA, 32 nt, Human
agcugggagcaggugccggagccccggccugc

SEQ ID NO: 53140 - RNA, 32 nt, Human
agcugggagccccgucuccaggaaaaggagag

SEQ ID NO: 53141 - RNA, 32 nt, Human
agcugggagccugggcaugcaucgccacgucu

SEQ ID NO: 53142 - RNA, 32 nt, Human
agcugggaggacaggcauaugccaccacauca

SEQ ID NO: 53143 - RNA, 32 nt, Human
agcugggaggacaggcaugcgccaccacgccc

SEQ ID NO: 53144 - RNA, 32 nt, Human
agcugggaggagagaagaaagcggggauggug

SEQ ID NO: 53145 - RNA, 32 nt, Human
agcugggaggagcagggugagggugggcgacc

SEQ ID NO: 53146 - RNA, 32 nt, Human
agcugggaggcagaguuuucagugagccaaga

SEQ ID NO: 53147 - RNA, 32 nt, Human
agcugggaggcagauagccuugggcaaauuuu

SEQ ID NO: 53148 - RNA, 31 nt, Human
agcugggaggccaaggguucacugggcuuga

SEQ ID NO: 53149 - RNA, 22 nt, Human
agcugggaggcggagguugcag

SEQ ID NO: 53150 - RNA, 32 nt, Human
agcugggaggcggagguugcagugagccaaga

SEQ ID NO: 53151 - RNA, 32 nt, Human
agcugggagggagcagugcaccugccagcgug

SEQ ID NO: 53152 - RNA, 32 nt, Human
agcugggagggagggggaggugaaaagggcag

SEQ ID NO: 53153 - RNA, 32 nt, Human
agcugggagggggaggaggaggagcucacacc

SEQ ID NO: 53154 - RNA, 32 nt, Human
agcugggaggguccccagcccaggagguggcu

SEQ ID NO: 53155 - RNA, 32 nt, Human
agcugggaggguggaggugugggagcugaugg

SEQ ID NO: 53156 - RNA, 32 nt, Human
agcugggaguacagaugcacaccaccacaccc

SEQ ID NO: 53157 - RNA, 32 nt, Human
agcugggaguacaggcacacaccaccacaccc

SEQ ID NO: 53158 - RNA, 32 nt, Human
agcugggaguacaggcauguggcaccaugccu

SEQ ID NO: 53159 - RNA, 32 nt, Human
agcugggaguacaggugcacaccaccaugccu

SEQ ID NO: 53160 - RNA, 32 nt, Human
agcugggaguccccuuccccagcccuggguca

SEQ ID NO: 53161 - RNA, 32 nt, Human
agcugggagugagcagucagagagggagacag

SEQ ID NO: 53162 - RNA, 32 nt, Human
agcugggagugcaggugcacaccgccaugccu

SEQ ID NO: 53163 - RNA, 32 nt, Human
agcugggagugggcugggggaggggaacagga

SEQ ID NO: 53164 - RNA, 32 nt, Human
agcugggauaacaggugccagccaccaugccc

SEQ ID NO: 53165 - RNA, 16 nt, Human
agcugggauaccagca

SEQ ID NO: 53166 - RNA, 32 nt, Human
agcugggauagcaggugugugccaccaugccc

SEQ ID NO: 53167 - RNA, 32 nt, Human
agcugggauauaggauuuuuguuguuuuuguu

SEQ ID NO: 53168 - RNA, 32 nt, Human
agcugggaucacaggcacacaccaccaugccc

SEQ ID NO: 53169 - RNA, 32 nt, Human
agcugggaucacaggcaugcaccaccaugccu

SEQ ID NO: 53170 - RNA, 32 nt, Human
agcugggaucacaggugcccaccaccauggug

SEQ ID NO: 53171 - RNA, 32 nt, Human
agcugggaucacaggugugcaccaccaugccc

SEQ ID NO: 53172 - RNA, 32 nt, Human
agcugggaucauagaugccugccaccacaccc

SEQ ID NO: 53173 - RNA, 32 nt, Human
agcugggaucgcaggcgccugccaccacgccu

SEQ ID NO: 53174 - RNA, 32 nt, Human
agcugggaucguaccacugcacuccagccugg

SEQ ID NO: 53175 - RNA, 32 nt, Human
agcugggaugacaggcacaugccaccacaccu

SEQ ID NO: 53176 - RNA, 32 nt, Human
agcugggaugacaggcgcacaccaccacgccc

SEQ ID NO: 53177 - RNA, 32 nt, Human
agcugggaugacaggugcacgccaccacgccc

SEQ ID NO: 53178 - RNA, 32 nt, Human
agcugggaugauaggcaggcaccaccacaccu

SEQ ID NO: 53179 - RNA, 32 nt, Human
agcugggauuaaaggcacgugccaccaugacu

SEQ ID NO: 53180 - RNA, 32 nt, Human
agcugggauuacaaccgugugccaccacaccc

SEQ ID NO: 53181 - RNA, 32 nt, Human
agcugggauuacaagcgcccaccaccacaccc

SEQ ID NO: 53182 - RNA, 32 nt, Human
agcugggauuacaagggcacaccaccacgccc

SEQ ID NO: 53183 - RNA, 32 nt, Human
agcugggauuacaagugcccaccaccacaccc

SEQ ID NO: 53184 - RNA, 32 nt, Human
agcugggauuacaagugcccaccaccacaccu

SEQ ID NO: 53185 - RNA, 32 nt, Human
agcugggauuacaagugcccaccaccaugccc

SEQ ID NO: 53186 - RNA, 32 nt, Human
agcugggauuacaccaccaugcccagcuacua

SEQ ID NO: 53187 - RNA, 32 nt, Human
agcugggauuacacgcacaugccaccacaccc

SEQ ID NO: 53188 - RNA, 32 nt, Human
agcugggauuacacgcgugugccaccacgcuc

SEQ ID NO: 53189 - RNA, 32 nt, Human
agcugggauuacacgugcccaccaccaugccc

SEQ ID NO: 53190 - RNA, 32 nt, Human
agcugggauuacagacaggcaccaccacaccc

SEQ ID NO: 53191 - RNA, 32 nt, Human
agcugggauuacagacaugugccaccacgccc

SEQ ID NO: 53192 - RNA, 32 nt, Human
agcugggauuacagacucaugccaccacgcca

SEQ ID NO: 53193 - RNA, 32 nt, Human
agcugggauuacagaugcccaccaccaugccu

SEQ ID NO: 53194 - RNA, 32 nt, Human
agcugggauuacagaugccugccaccaugucu

SEQ ID NO: 53195 - RNA, 32 nt, Human
agcugggauuacagaugugcaccaccacgccu

SEQ ID NO: 53196 - RNA, 32 nt, Human
agcugggauuacagccaugcaccaccacaccu

SEQ ID NO: 53197 - RNA, 32 nt, Human
agcugggauuacagcgauugguuguuucguua

SEQ ID NO: 53198 - RNA, 32 nt, Human
agcugggauuacaggagcgugccaccacuccg

SEQ ID NO: 53199 - RNA, 32 nt, Human
agcugggauuacaggagugugccaccacaccu

SEQ ID NO: 53200 - RNA, 32 nt, Human
agcugggauuacaggcaaacgccaccacaccc

SEQ ID NO: 53201 - RNA, 32 nt, Human
agcugggauuacaggcaacugccaccaugccc

SEQ ID NO: 53202 - RNA, 32 nt, Human
agcugggauuacaggcaagcaccaccaugccu

SEQ ID NO: 53203 - RNA, 32 nt, Human
agcugggauuacaggcacaaaccaccaugccu

SEQ ID NO: 53204 - RNA, 32 nt, Human
agcugggauuacaggcacaagccaccaugccu

SEQ ID NO: 53205 - RNA, 32 nt, Human
agcugggauuacaggcacacacaaccacgccc

SEQ ID NO: 53206 - RNA, 32 nt, Human
agcugggauuacaggcacacaccaccacaccu

SEQ ID NO: 53207 - RNA, 32 nt, Human
agcugggauuacaggcacacaccaccacgccc

SEQ ID NO: 53208 - RNA, 32 nt, Human
agcugggauuacaggcacacaccaccacgcuu

SEQ ID NO: 53209 - RNA, 32 nt, Human
agcugggauuacaggcacacaccaccagccag

SEQ ID NO: 53210 - RNA, 32 nt, Human
agcugggauuacaggcacacaccaccauaccu

SEQ ID NO: 53211 - RNA, 32 nt, Human
agcugggauuacaggcacacaccaccaugccc

SEQ ID NO: 53212 - RNA, 32 nt, Human
agcugggauuacaggcacacacuaccacgccu

SEQ ID NO: 53213 - RNA, 32 nt, Human
agcugggauuacaggcacacgccaccacaccc

SEQ ID NO: 53214 - RNA, 32 nt, Human
agcugggauuacaggcacacgccaccacacgc

SEQ ID NO: 53215 - RNA, 32 nt, Human
agcugggauuacaggcacacgccaccaugccc

SEQ ID NO: 53216 - RNA, 32 nt, Human
agcugggauuacaggcacaggccgccacgccc

SEQ ID NO: 53217 - RNA, 32 nt, Human
agcugggauuacaggcacauaccaucaugccu

SEQ ID NO: 53218 - RNA, 32 nt, Human
agcugggauuacaggcacaugccaccacaccc

SEQ ID NO: 53219 - RNA, 32 nt, Human
agcugggauuacaggcacaugccaccacaccu

SEQ ID NO: 53220 - RNA, 32 nt, Human
agcugggauuacaggcacaugccaccaugccu

SEQ ID NO: 53221 - RNA, 32 nt, Human
agcugggauuacaggcacaugccaccaugcuc

SEQ ID NO: 53222 - RNA, 32 nt, Human
agcugggauuacaggcaccagccaccaugccu

SEQ ID NO: 53223 - RNA, 32 nt, Human
agcugggauuacaggcacccaccaacaugccc

SEQ ID NO: 53224 - RNA, 32 nt, Human
agcugggauuacaggcacccaccaccacaccu

SEQ ID NO: 53225 - RNA, 32 nt, Human
agcugggauuacaggcacccaccaccacgcac

SEQ ID NO: 53226 - RNA, 32 nt, Human
agcugggauuacaggcacccaccaccacgccc

SEQ ID NO: 53227 - RNA, 32 nt, Human
agcugggauuacaggcacccaccaccacgccu

SEQ ID NO: 53228 - RNA, 32 nt, Human
agcugggauuacaggcacccaccaccacgcuc

SEQ ID NO: 53229 - RNA, 32 nt, Human
agcugggauuacaggcacccaccaccauaucu

SEQ ID NO: 53230 - RNA, 32 nt, Human
agcugggauuacaggcacccaccaccaugccc

SEQ ID NO: 53231 - RNA, 32 nt, Human
agcugggauuacaggcacccaccaccaugccu

SEQ ID NO: 53232 - RNA, 32 nt, Human
agcugggauuacaggcacccaccaccucaccc

SEQ ID NO: 53233 - RNA, 32 nt, Human
agcugggauuacaggcacccaccacuaugccc

SEQ ID NO: 53234 - RNA, 32 nt, Human
agcugggauuacaggcacccaccaucacgcca

SEQ ID NO: 53235 - RNA, 32 nt, Human
agcugggauuacaggcacccacgaccacgcuc

SEQ ID NO: 53236 - RNA, 32 nt, Human
agcugggauuacaggcacccaucaccacaccc

SEQ ID NO: 53237 - RNA, 32 nt, Human
agcugggauuacaggcacccgccaccacaccu

SEQ ID NO: 53238 - RNA, 32 nt, Human
agcugggauuacaggcacccgccaccacgccc

SEQ ID NO: 53239 - RNA, 32 nt, Human
agcugggauuacaggcacccgccaccacgucc

SEQ ID NO: 53240 - RNA, 32 nt, Human
agcugggauuacaggcacccgccaccguaccu

SEQ ID NO: 53241 - RNA, 32 nt, Human
agcugggauuacaggcacccgccaccgugccc

SEQ ID NO: 53242 - RNA, 32 nt, Human
agcugggauuacaggcacccgccaucaugccc

SEQ ID NO: 53243 - RNA, 32 nt, Human
agcugggauuacaggcacccgcuaccacaccc

SEQ ID NO: 53244 - RNA, 32 nt, Human
agcugggauuacaggcaccuaccaccagggcc

SEQ ID NO: 53245 - RNA, 32 nt, Human
agcugggauuacaggcaccuaccaccuugccc

SEQ ID NO: 53246 - RNA, 32 nt, Human
agcugggauuacaggcaccugccaccacaccu

SEQ ID NO: 53247 - RNA, 32 nt, Human
agcugggauuacaggcaccugccaccacaucu

SEQ ID NO: 53248 - RNA, 32 nt, Human
agcugggauuacaggcaccugccaccacgccc

SEQ ID NO: 53249 - RNA, 32 nt, Human
agcugggauuacaggcaccugccaccacgccu

SEQ ID NO: 53250 - RNA, 32 nt, Human
agcugggauuacaggcaccugccaccaugccc

SEQ ID NO: 53251 - RNA, 32 nt, Human
agcugggauuacaggcaccugccauuaugccc

SEQ ID NO: 53252 - RNA, 32 nt, Human
agcugggauuacaggcaccugucaccacaccc

SEQ ID NO: 53253 - RNA, 32 nt, Human
agcugggauuacaggcaccugucaccaugccu

SEQ ID NO: 53254 - RNA, 32 nt, Human
agcugggauuacaggcacgcacaaccaugccc

SEQ ID NO: 53255 - RNA, 32 nt, Human
agcugggauuacaggcacgcaccaccacaccu

SEQ ID NO: 53256 - RNA, 32 nt, Human
agcugggauuacaggcacgcaccaccaugccu

SEQ ID NO: 53257 - RNA, 32 nt, Human
agcugggauuacaggcacgcaccuccacgucc

SEQ ID NO: 53258 - RNA, 32 nt, Human
agcugggauuacaggcacgcgccaccacaccu

SEQ ID NO: 53259 - RNA, 32 nt, Human
agcugggauuacaggcacgcgccaccacgccu

SEQ ID NO: 53260 - RNA, 32 nt, Human
agcugggauuacaggcacgcgccaccacucug

SEQ ID NO: 53261 - RNA, 32 nt, Human
agcugggauuacaggcacgcgcugccacaccc

SEQ ID NO: 53262 - RNA, 32 nt, Human
agcugggauuacaggcacgcuccaccacaccc

SEQ ID NO: 53263 - RNA, 32 nt, Human
agcugggauuacaggcacguaccaccacgccu

SEQ ID NO: 53264 - RNA, 32 nt, Human
agcugggauuacaggcacgugacaccaggccc

SEQ ID NO: 53265 - RNA, 32 nt, Human
agcugggauuacaggcacgugccaacacaccc

SEQ ID NO: 53266 - RNA, 32 nt, Human
agcugggauuacaggcacgugccaccaagccc

SEQ ID NO: 53267 - RNA, 32 nt, Human
agcugggauuacaggcacgugccaccacgccc

SEQ ID NO: 53268 - RNA, 32 nt, Human
agcugggauuacaggcacgugccaccaugucu

SEQ ID NO: 53269 - RNA, 32 nt, Human
agcugggauuacaggcacuugccaccauuccc

SEQ ID NO: 53270 - RNA, 32 nt, Human
agcugggauuacaggcagacaccaucacgccc

SEQ ID NO: 53271 - RNA, 32 nt, Human
agcugggauuacaggcagacacgccaugcccg

SEQ ID NO: 53272 - RNA, 32 nt, Human
agcugggauuacaggcagcaccacaccuggcu

SEQ ID NO: 53273 - RNA, 32 nt, Human
agcugggauuacaggcaggugccaccaugccu

SEQ ID NO: 53274 - RNA, 32 nt, Human
agcugggauuacaggcauacaccaccacaccc

SEQ ID NO: 53275 - RNA, 32 nt, Human
agcugggauuacaggcauacaccaccacgccc

SEQ ID NO: 53276 - RNA, 32 nt, Human
agcugggauuacaggcauccgccaccacgccc

SEQ ID NO: 53277 - RNA, 32 nt, Human
agcugggauuacaggcaucugccaaccaugcc

SEQ ID NO: 53278 - RNA, 32 nt, Human
agcugggauuacaggcaucugcuaccacgccu

SEQ ID NO: 53279 - RNA, 32 nt, Human
agcugggauuacaggcaugaaucaccacacuc

SEQ ID NO: 53280 - RNA, 32 nt, Human
agcugggauuacaggcaugagccacugagccc

SEQ ID NO: 53281 - RNA, 32 nt, Human
agcugggauuacaggcaugagccacugugccc

SEQ ID NO: 53282 - RNA, 32 nt, Human
agcugggauuacaggcaugagccacugugccu

SEQ ID NO: 53283 - RNA, 32 nt, Human
agcugggauuacaggcaugagucaccacgccc

SEQ ID NO: 53284 - RNA, 32 nt, Human
agcugggauuacaggcaugcaacaccacacau

SEQ ID NO: 53285 - RNA, 32 nt, Human
agcugggauuacaggcaugcaccaccacacac

SEQ ID NO: 53286 - RNA, 32 nt, Human
agcugggauuacaggcaugcaccaccacacca

SEQ ID NO: 53287 - RNA, 32 nt, Human
agcugggauuacaggcaugcaccaccacaccc

SEQ ID NO: 53288 - RNA, 32 nt, Human
agcugggauuacaggcaugcaccaccacaccu

SEQ ID NO: 53289 - RNA, 32 nt, Human
agcugggauuacaggcaugcaccaccacagcc

SEQ ID NO: 53290 - RNA, 32 nt, Human
agcugggauuacaggcaugcaccaccacgccc

SEQ ID NO: 53291 - RNA, 32 nt, Human
agcugggauuacaggcaugcaccaccacgccu

SEQ ID NO: 53292 - RNA, 32 nt, Human
agcugggauuacaggcaugcaccaccacgcuc

SEQ ID NO: 53293 - RNA, 32 nt, Human
agcugggauuacaggcaugcaccaccacgucu

SEQ ID NO: 53294 - RNA, 32 nt, Human
agcugggauuacaggcaugcaccaccacuccu

SEQ ID NO: 53295 - RNA, 32 nt, Human
agcugggauuacaggcaugcaccaccaugccc

SEQ ID NO: 53296 - RNA, 32 nt, Human
agcugggauuacaggcaugcaccaccaugccu

SEQ ID NO: 53297 - RNA, 32 nt, Human
agcugggauuacaggcaugcacuaccacaccc

SEQ ID NO: 53298 - RNA, 32 nt, Human
agcugggauuacaggcaugcacuaccacgcuu

SEQ ID NO: 53299 - RNA, 32 nt, Human
agcugggauuacaggcaugcgccaccacaccc

SEQ ID NO: 53300 - RNA, 32 nt, Human
agcugggauuacaggcaugcgccaccacaccu

SEQ ID NO: 53301 - RNA, 32 nt, Human
agcugggauuacaggcaugcgccaccacgccc

SEQ ID NO: 53302 - RNA, 32 nt, Human
agcugggauuacaggcaugcgccaccacgccu

SEQ ID NO: 53303 - RNA, 32 nt, Human
agcugggauuacaggcaugcgccaccaggccc

SEQ ID NO: 53304 - RNA, 32 nt, Human
agcugggauuacaggcaugcgccaccaugacc

SEQ ID NO: 53305 - RNA, 32 nt, Human
agcugggauuacaggcaugcgccaccaugcca

SEQ ID NO: 53306 - RNA, 32 nt, Human
agcugggauuacaggcaugcgccaccaugccc

SEQ ID NO: 53307 - RNA, 32 nt, Human
agcugggauuacaggcaugcgccaccaugccu

SEQ ID NO: 53308 - RNA, 32 nt, Human
agcugggauuacaggcaugcgccacuaugccc

SEQ ID NO: 53309 - RNA, 32 nt, Human
agcugggauuacaggcaugcgccaucaugccu

SEQ ID NO: 53310 - RNA, 32 nt, Human
agcugggauuacaggcaugcgcuaacacaccc

SEQ ID NO: 53311 - RNA, 32 nt, Human
agcugggauuacaggcaugcuccaccaugccc

SEQ ID NO: 53312 - RNA, 32 nt, Human
agcugggauuacaggcaugggccaccaugccc

SEQ ID NO: 53313 - RNA, 32 nt, Human
agcugggauuacaggcauguaccaccacaccc

SEQ ID NO: 53314 - RNA, 32 nt, Human
agcugggauuacaggcauguaccaucacaccc

SEQ ID NO: 53315 - RNA, 32 nt, Human
agcugggauuacaggcauguacuaccaugccu

SEQ ID NO: 53316 - RNA, 32 nt, Human
agcugggauuacaggcaugugagaccacgccc

SEQ ID NO: 53317 - RNA, 32 nt, Human
agcugggauuacaggcaugugcaacucaccca

SEQ ID NO: 53318 - RNA, 32 nt, Human
agcugggauuacaggcaugugccaccacaccc

SEQ ID NO: 53319 - RNA, 32 nt, Human
agcugggauuacaggcaugugccaccacaccu

SEQ ID NO: 53320 - RNA, 32 nt, Human
agcugggauuacaggcaugugccaccacacua

SEQ ID NO: 53321 - RNA, 32 nt, Human
agcugggauuacaggcaugugccaccacacuc

SEQ ID NO: 53322 - RNA, 32 nt, Human
agcugggauuacaggcaugugccaccacgcca

SEQ ID NO: 53323 - RNA, 32 nt, Human
agcugggauuacaggcaugugccaccacgccc

SEQ ID NO: 53324 - RNA, 32 nt, Human
agcugggauuacaggcaugugccaccaugccc

SEQ ID NO: 53325 - RNA, 32 nt, Human
agcugggauuacaggcaugugccaccaugccu

SEQ ID NO: 53326 - RNA, 32 nt, Human
agcugggauuacaggcaugugccacccaccac

SEQ ID NO: 53327 - RNA, 32 nt, Human
agcugggauuacaggcaugugccacuacccgg

SEQ ID NO: 53328 - RNA, 32 nt, Human
agcugggauuacaggcaugugccagcaugccc

SEQ ID NO: 53329 - RNA, 32 nt, Human
agcugggauuacaggcaugugccaucaccccg

SEQ ID NO: 53330 - RNA, 32 nt, Human
agcugggauuacaggcaugugucaccacgccc

SEQ ID NO: 53331 - RNA, 32 nt, Human
agcugggauuacaggcgcacaccaccacacac

SEQ ID NO: 53332 - RNA, 32 nt, Human
agcugggauuacaggcgcaugccaccacaccu

SEQ ID NO: 53333 - RNA, 32 nt, Human
agcugggauuacaggcgcaugccaccaugcca

SEQ ID NO: 53334 - RNA, 32 nt, Human
agcugggauuacaggcgcccaccaccacaccu

SEQ ID NO: 53335 - RNA, 32 nt, Human
agcugggauuacaggcgcccaccaccacagcc

SEQ ID NO: 53336 - RNA, 32 nt, Human
agcugggauuacaggcgcccaccaccacgucu

SEQ ID NO: 53337 - RNA, 32 nt, Human
agcugggauuacaggcgcccaccaccaugccc

SEQ ID NO: 53338 - RNA, 32 nt, Human
agcugggauuacaggcgccugccaccacaccc

SEQ ID NO: 53339 - RNA, 32 nt, Human
agcugggauuacaggcgccugccaccacaccu

SEQ ID NO: 53340 - RNA, 32 nt, Human
agcugggauuacaggcgccugccaccacgccc

SEQ ID NO: 53341 - RNA, 32 nt, Human
agcugggauuacaggcgccugccaccacgccu

SEQ ID NO: 53342 - RNA, 32 nt, Human
agcugggauuacaggcgccugccaccaugccu

SEQ ID NO: 53343 - RNA, 32 nt, Human
agcugggauuacaggcgccugccaccaugcug

SEQ ID NO: 53344 - RNA, 32 nt, Human
agcugggauuacaggcgcgugccaccacaccc

SEQ ID NO: 53345 - RNA, 32 nt, Human
agcugggauuacaggcgcgugccaccauaccg

SEQ ID NO: 53346 - RNA, 32 nt, Human
agcugggauuacaggcgcuggccacacaccca

SEQ ID NO: 53347 - RNA, 32 nt, Human
agcugggauuacaggcguacaccaccaugccu

SEQ ID NO: 53348 - RNA, 32 nt, Human
agcugggauuacaggcgugcaccacaacgccu

SEQ ID NO: 53349 - RNA, 32 nt, Human
agcugggauuacaggcgugcaccaccacgccc

SEQ ID NO: 53350 - RNA, 32 nt, Human
agcugggauuacaggcgugugccaccacaccu

SEQ ID NO: 53351 - RNA, 32 nt, Human
agcugggauuacaggcgugugccaccacgccu

SEQ ID NO: 53352 - RNA, 32 nt, Human
agcugggauuacaggcgugugccaccaugccc

SEQ ID NO: 53353 - RNA, 32 nt, Human
agcugggauuacaggcucaugccaccaugccc

SEQ ID NO: 53354 - RNA, 32 nt, Human
agcugggauuacaggcuccugccaccacgccc

SEQ ID NO: 53355 - RNA, 32 nt, Human
agcugggauuacaggcuccugccaccacgccu

SEQ ID NO: 53356 - RNA, 32 nt, Human
agcugggauuacagggcccugccaccaagccc

SEQ ID NO: 53357 - RNA, 32 nt, Human
agcugggauuacagguaccugccaccaugccc

SEQ ID NO: 53358 - RNA, 32 nt, Human
agcugggauuacagguaugugccaccacgccu

SEQ ID NO: 53359 - RNA, 32 nt, Human
agcugggauuacagguaugugccaccaugccu

SEQ ID NO: 53360 - RNA, 32 nt, Human
agcugggauuacaggugcacaccaccacaccu

SEQ ID NO: 53361 - RNA, 32 nt, Human
agcugggauuacaggugcacaccaccaugccc

SEQ ID NO: 53362 - RNA, 32 nt, Human
agcugggauuacaggugcacaccaccaugccu

SEQ ID NO: 53363 - RNA, 32 nt, Human
agcugggauuacaggugcaccacgcccggcca

SEQ ID NO: 53364 - RNA, 32 nt, Human
agcugggauuacaggugcacgccaccaugcuu

SEQ ID NO: 53365 - RNA, 32 nt, Human
agcugggauuacaggugcaggccaccaugccc

SEQ ID NO: 53366 - RNA, 32 nt, Human
agcugggauuacaggugcaugccaccacaccc

SEQ ID NO: 53367 - RNA, 32 nt, Human
agcugggauuacaggugcaugccaccacgcuc

SEQ ID NO: 53368 - RNA, 32 nt, Human
agcugggauuacaggugcaugccaccaugccu

SEQ ID NO: 53369 - RNA, 32 nt, Human
agcugggauuacaggugcaugccaccauggcu

SEQ ID NO: 53370 - RNA, 32 nt, Human
agcugggauuacaggugcaugccaucacagcu

SEQ ID NO: 53371 - RNA, 32 nt, Human
agcugggauuacaggugcccaccaacaugccu

SEQ ID NO: 53372 - RNA, 32 nt, Human
agcugggauuacaggugcccaccaccacaucc

SEQ ID NO: 53373 - RNA, 32 nt, Human
agcugggauuacaggugcccaccaccaccccu

SEQ ID NO: 53374 - RNA, 32 nt, Human
agcugggauuacaggugcccaccaccaugcca

SEQ ID NO: 53375 - RNA, 32 nt, Human
agcugggauuacaggugcccaccaccaugccc

SEQ ID NO: 53376 - RNA, 32 nt, Human
agcugggauuacaggugcccaccaccaugccu

SEQ ID NO: 53377 - RNA, 32 nt, Human
agcugggauuacaggugcccaccaccauguca

SEQ ID NO: 53378 - RNA, 32 nt, Human
agcugggauuacaggugcccaccacugcgccc

SEQ ID NO: 53379 - RNA, 32 nt, Human
agcugggauuacaggugcccaccagcacgccc

SEQ ID NO: 53380 - RNA, 32 nt, Human
agcugggauuacaggugcccgccaccacacca

SEQ ID NO: 53381 - RNA, 32 nt, Human
agcugggauuacaggugcccgccaccacaccg

SEQ ID NO: 53382 - RNA, 32 nt, Human
agcugggauuacaggugcccgccaccacaucu

SEQ ID NO: 53383 - RNA, 32 nt, Human
agcugggauuacaggugcccgccaccacgccc

SEQ ID NO: 53384 - RNA, 32 nt, Human
agcugggauuacaggugcccgccaccacgcuc

SEQ ID NO: 53385 - RNA, 32 nt, Human
agcugggauuacaggugcccgccaccaugcuc

SEQ ID NO: 53386 - RNA, 32 nt, Human
agcugggauuacaggugccugccaccacaccc

SEQ ID NO: 53387 - RNA, 32 nt, Human
agcugggauuacaggugccugccaccacgcug

SEQ ID NO: 53388 - RNA, 32 nt, Human
agcugggauuacaggugccugccaccauaccu

SEQ ID NO: 53389 - RNA, 32 nt, Human
agcugggauuacaggugccugccaccaugccc

SEQ ID NO: 53390 - RNA, 32 nt, Human
agcugggauuacaggugccugccaccaugccu

SEQ ID NO: 53391 - RNA, 32 nt, Human
agcugggauuacaggugccugccaccauuccu

SEQ ID NO: 53392 - RNA, 32 nt, Human
agcugggauuacaggugccugccacugcgucu

SEQ ID NO: 53393 - RNA, 32 nt, Human
agcugggauuacaggugccugccagcacaccu

SEQ ID NO: 53394 - RNA, 32 nt, Human
agcugggauuacaggugcgcaccaccaugccc

SEQ ID NO: 53395 - RNA, 32 nt, Human
agcugggauuacaggugcgcaccacuacgccu

SEQ ID NO: 53396 - RNA, 32 nt, Human
agcugggauuacaggugcgcaccauuacaucc

SEQ ID NO: 53397 - RNA, 32 nt, Human
agcugggauuacaggugcgcacuaccacgcca

SEQ ID NO: 53398 - RNA, 32 nt, Human
agcugggauuacaggugcgccccaccaugccc

SEQ ID NO: 53399 - RNA, 32 nt, Human
agcugggauuacaggugcgcgccaucacgccc

SEQ ID NO: 53400 - RNA, 32 nt, Human
agcugggauuacaggugcgugccaccacacca

SEQ ID NO: 53401 - RNA, 32 nt, Human
agcugggauuacaggugcgugccaccacgcac

SEQ ID NO: 53402 - RNA, 32 nt, Human
agcugggauuacaggugcgugccaccacgccc

SEQ ID NO: 53403 - RNA, 32 nt, Human
agcugggauuacaggugcucaccaccacgucc

SEQ ID NO: 53404 - RNA, 32 nt, Human
agcugggauuacagguguaugccaccacgccu

SEQ ID NO: 53405 - RNA, 32 nt, Human
agcugggauuacaggugugcaccaccacaccc

SEQ ID NO: 53406 - RNA, 32 nt, Human
agcugggauuacaggugugcaccaccacgccu

SEQ ID NO: 53407 - RNA, 32 nt, Human
agcugggauuacaggugugcaccaccauuccu

SEQ ID NO: 53408 - RNA, 32 nt, Human
agcugggauuacaggugugcaccacccguacc

SEQ ID NO: 53409 - RNA, 32 nt, Human
agcugggauuacaggugugcaccacuaccacu

SEQ ID NO: 53410 - RNA, 32 nt, Human
agcugggauuacaggugugugccaccacaccc

SEQ ID NO: 53411 - RNA, 32 nt, Human
agcugggauuacaggugugugccaccaugcuu

SEQ ID NO: 53412 - RNA, 32 nt, Human
agcugggauuacagguuugcaccaccaugccc

SEQ ID NO: 53413 - RNA, 32 nt, Human
agcugggauuacagucaggcaccaccacaccc

SEQ ID NO: 53414 - RNA, 32 nt, Human
agcugggauuacaguugccugccaccacgccc

SEQ ID NO: 53415 - RNA, 32 nt, Human
agcugggauuacaugugugugccaccacagcc

SEQ ID NO: 53416 - RNA, 32 nt, Human
agcugggauuacgggcauaugccaccacaccc

SEQ ID NO: 53417 - RNA, 32 nt, Human
agcugggauuacgggcaugugccaccacgccu

SEQ ID NO: 53418 - RNA, 32 nt, Human
agcugggauuacgggcgcccaccaccaugccc

SEQ ID NO: 53419 - RNA, 32 nt, Human
agcugggauuacgggugcgugccaccaugccu

SEQ ID NO: 53420 - RNA, 32 nt, Human
agcugggauuacuggcacacaccaccaugcac

SEQ ID NO: 53421 - RNA, 32 nt, Human
agcugggauuacuggugcacaccaccacacuc

SEQ ID NO: 53422 - RNA, 32 nt, Human
agcugggauuacuggugcccaccaccaugccc

SEQ ID NO: 53423 - RNA, 32 nt, Human
agcugggauuagaggcgugugccaccaugccu

SEQ ID NO: 53424 - RNA, 32 nt, Human
agcugggauuauagacacgugccaccacgccc

SEQ ID NO: 53425 - RNA, 32 nt, Human
agcugggauuauaggcacacaccaccacaucc

SEQ ID NO: 53426 - RNA, 32 nt, Human
agcugggauuauaggcacacaccaccauaccc

SEQ ID NO: 53427 - RNA, 32 nt, Human
agcugggauuauaggcacacaccaccaugucc

SEQ ID NO: 53428 - RNA, 32 nt, Human
agcugggauuauaggcacccaccaccacaccu

SEQ ID NO: 53429 - RNA, 32 nt, Human
agcugggauuauaggcaccugccaccacgguc

SEQ ID NO: 53430 - RNA, 32 nt, Human
agcugggauuauaggcacgugccaccacaccc

SEQ ID NO: 53431 - RNA, 32 nt, Human
agcugggauuauaggcaugcaccaccaccacc

SEQ ID NO: 53432 - RNA, 32 nt, Human
agcugggauuauaggcaugcaccaccaugccc

SEQ ID NO: 53433 - RNA, 32 nt, Human
agcugggauuauaggcgucugccaccacgccc

SEQ ID NO: 53434 - RNA, 32 nt, Human
agcugggauuauaggcgugcaccaccaugccc

SEQ ID NO: 53435 - RNA, 32 nt, Human
agcugggauuauaggcgugugccaccaugccc

SEQ ID NO: 53436 - RNA, 32 nt, Human
agcugggauuauaggugcaugccaccaugccc

SEQ ID NO: 53437 - RNA, 32 nt, Human
agcugggauuauaggugcaugcuaccacgcuc

SEQ ID NO: 53438 - RNA, 32 nt, Human
agcugggauuauaggugcccaccaccaagccc

SEQ ID NO: 53439 - RNA, 32 nt, Human
agcugggauuauaggugccugccaccaugccc

SEQ ID NO: 53440 - RNA, 32 nt, Human
agcugggauuauaggugcgcaccaccacaccc

SEQ ID NO: 53441 - RNA, 32 nt, Human
agcugggauuaugggcgcccaccaccaugccc

SEQ ID NO: 53442 - RNA, 32 nt, Human
agcugggauuaugggcgcccaccaccaugccu

SEQ ID NO: 53443 - RNA, 32 nt, Human
agcugggauuaugggugccugccaccacaccc

SEQ ID NO: 53444 - RNA, 32 nt, Human
agcugggauugcagacgugcaccaccacgcca

SEQ ID NO: 53445 - RNA, 32 nt, Human
agcugggauugcaggcacucaccaccaugccc

SEQ ID NO: 53446 - RNA, 32 nt, Human
agcugggauugcaggcgugugccaccacgccc

SEQ ID NO: 53447 - RNA, 32 nt, Human
agcugggauugcagguaugcaccaccacaccu

SEQ ID NO: 53448 - RNA, 32 nt, Human
agcugggauugcaggugcaugccaccaugccu

SEQ ID NO: 53449 - RNA, 32 nt, Human
agcugggauugcaggugcccaccaccacgccc

SEQ ID NO: 53450 - RNA, 32 nt, Human
agcugggauugcaggugcccaccaccaggccu

SEQ ID NO: 53451 - RNA, 32 nt, Human
agcugggauugcaggugccugccaccaugccu

SEQ ID NO: 53452 - RNA, 32 nt, Human
agcugggauuguaagaguaugccaccacgccc

SEQ ID NO: 53453 - RNA, 32 nt, Human
agcugggauuguagguacacaccaccaugccu

SEQ ID NO: 53454 - RNA, 32 nt, Human
agcugggauuuuaggugugcaccaccaugccu

SEQ ID NO: 53455 - RNA, 32 nt, Human
agcugggcaauuggcgggcauggaggugggug

SEQ ID NO: 53456 - RNA, 32 nt, Human
agcugggcagagcccugggggcgcggugcugc

SEQ ID NO: 53457 - RNA, 32 nt, Human
agcugggcagaggcgccccucaccucccggac

SEQ ID NO: 53458 - RNA, 32 nt, Human
agcugggcagcagggguagggguagggagccu

SEQ ID NO: 53459 - RNA, 32 nt, Human
agcugggcagcuaugagaagugccaggaccuu

SEQ ID NO: 53460 - RNA, 32 nt, Human
agcugggcaggcuggggacuccagggccuccu

SEQ ID NO: 53461 - RNA, 32 nt, Human
agcugggcagggaagagagcgcccggcucagu

SEQ ID NO: 53462 - RNA, 32 nt, Human
agcugggccacaggcuggcugugugaucuugg

SEQ ID NO: 53463 - RNA, 20 nt, Human
agcugggccacuccucuuca

SEQ ID NO: 53464 - RNA, 32 nt, Human
agcugggcccccacccggccuggguaggauga

SEQ ID NO: 53465 - RNA, 18 nt, Human
agcugggccccucccagg

SEQ ID NO: 53466 - RNA, 18 nt, Human
agcugggccccuggggca

SEQ ID NO: 53467 - RNA, 32 nt, Human
agcugggccgagccggagguuguggugucuga

SEQ ID NO: 53468 - RNA, 20 nt, Human
agcugggccucaccccggca

SEQ ID NO: 53469 - RNA, 16 nt, Human
agcugggccucugggc

SEQ ID NO: 53470 - RNA, 20 nt, Human
agcugggccugccacguggg

SEQ ID NO: 53471 - RNA, 21 nt, Human
agcugggccugccccagggca

SEQ ID NO: 53472 - RNA, 32 nt, Human
agcugggccuggagugucccugcuccagcccu

SEQ ID NO: 53473 - RNA, 32 nt, Human
agcugggccugggaacagcccuggcuugguuc

SEQ ID NO: 53474 - RNA, 17 nt, Human
agcugggccuggggaca

SEQ ID NO: 53475 - RNA, 32 nt, Human
agcugggccuuccucaccuccgcauaauguac

SEQ ID NO: 53476 - RNA, 32 nt, Human
agcugggccuucugguuugcccucucuugacu

SEQ ID NO: 53477 - RNA, 32 nt, Human
agcugggcgagaaggcggaugagcugcagcug

SEQ ID NO: 53478 - RNA, 32 nt, Human
agcugggcgaguagcugguacuacaggugcgu

SEQ ID NO: 53479 - RNA, 32 nt, Human
agcugggcgccgacaucugggcccuguggcgc

SEQ ID NO: 53480 - RNA, 32 nt, Human
agcugggcggagcuggacagccagucucagcc

SEQ ID NO: 53481 - RNA, 32 nt, Human
agcugggcugacaggcacccaccaccacaccc

SEQ ID NO: 53482 - RNA, 32 nt, Human
agcugggcuggagaagcggccacccacucauu

SEQ ID NO: 53483 - RNA, 32 nt, Human
agcugggcugggccagccuggcccugcagggc

SEQ ID NO: 53484 - RNA, 32 nt, Human
agcugggcugugguagggggugucucaggcca

SEQ ID NO: 53485 - RNA, 32 nt, Human
agcugggcuuacaggcacccaccaccaugccc

SEQ ID NO: 53486 - RNA, 32 nt, Human
agcugggcuuacgggcacaugccaccacgccu

SEQ ID NO: 53487 - RNA, 32 nt, Human
agcuggggacugccugcugucugccaguacaa

SEQ ID NO: 53488 - RNA, 32 nt, Human
agcuggggagagaaaggaaggaaacgggaccc

SEQ ID NO: 53489 - RNA, 32 nt, Human
agcuggggagagaggggacucuccggacuccc

SEQ ID NO: 53490 - RNA, 32 nt, Human
agcuggggagaggugggcucugcuuuucagag

SEQ ID NO: 53491 - RNA, 32 nt, Human
agcuggggagauggaggcugcagugagcuaua

SEQ ID NO: 53492 - RNA, 32 nt, Human
agcuggggagccagggcugaucuaggaggcug

SEQ ID NO: 53493 - RNA, 32 nt, Human
agcuggggagggaaguggauccauuucugcua

SEQ ID NO: 53494 - RNA, 32 nt, Human
agcuggggaggucgaggcagcagugagccgag

SEQ ID NO: 53495 - RNA, 32 nt, Human
agcuggggaggugggaggccaggcgagccuga

SEQ ID NO: 53496 - RNA, 25 nt, Human
agcuggggagucacccugggccugg

SEQ ID NO: 53497 - RNA, 32 nt, Human
agcuggggcacuggagccuggcccccaggaca

SEQ ID NO: 53498 - RNA, 32 nt, Human
agcuggggcaggaagacagugaagaaggaagg

SEQ ID NO: 53499 - RNA, 32 nt, Human
agcuggggcaucucacuggagcuguuccaggc

SEQ ID NO: 53500 - RNA, 32 nt, Human
agcuggggccaggcuucucuccccaccaccug

SEQ ID NO: 53501 - RNA, 21 nt, Human
agcuggggcccagggcagcau

SEQ ID NO: 53502 - RNA, 32 nt, Human
agcuggggccuccugcuggguugaagaaggag

SEQ ID NO: 53503 - RNA, 32 nt, Human
agcuggggcuacaggcacccaccaccacgccu

SEQ ID NO: 53504 - RNA, 32 nt, Human
agcuggggcuacaggcgccugccaccacaccc

SEQ ID NO: 53505 - RNA, 32 nt, Human
agcuggggcuacaggugugugccaccauacuu

SEQ ID NO: 53506 - RNA, 32 nt, Human
agcuggggcugggcauggaggcucacaccugu

SEQ ID NO: 53507 - RNA, 32 nt, Human
agcuggggcuuagcugggagguggucugaagc

SEQ ID NO: 53508 - RNA, 32 nt, Human
agcugggggaggagggaggggugggaauugaa

SEQ ID NO: 53509 - RNA, 32 nt, Human
agcugggggaggcaguggcggcuggaguaggu

SEQ ID NO: 53510 - RNA, 32 nt, Human
agcugggggaugugugggcaagagguggauug

SEQ ID NO: 53511 - RNA, 32 nt, Human
agcugggggcccuaacacuugcaccugccuug

SEQ ID NO: 53512 - RNA, 21 nt, Human
agcugggggccuccucugagc

SEQ ID NO: 53513 - RNA, 32 nt, Human
agcugggggcggaugguggcccaggagacagc

SEQ ID NO: 53514 - RNA, 32 nt, Human
agcugggggcuccugacuguagcaggugguag

SEQ ID NO: 53515 - RNA, 32 nt, Human
agcugggggcugggacugaggccuccugcagg

SEQ ID NO: 53516 - RNA, 32 nt, Human
agcugggggcuggggcgucccucuccucucuc

SEQ ID NO: 53517 - RNA, 32 nt, Human
agcugggggugggccaggcugaugggacagaa

SEQ ID NO: 53518 - RNA, 32 nt, Human
agcugggguguuccuggaagaggucggggagc

SEQ ID NO: 53519 - RNA, 32 nt, Human
agcugggguuacaggcacgggccaccagccca

SEQ ID NO: 53520 - RNA, 32 nt, Human
agcugggguuacaggcaugcaccaccaugccu

SEQ ID NO: 53521 - RNA, 32 nt, Human
agcugggguuacaggcauuugccaccgggccc

SEQ ID NO: 53522 - RNA, 32 nt, Human
agcugggguuacaggugcacgccaccacgccu

SEQ ID NO: 53523 - RNA, 32 nt, Human
agcugggguugcaucauuuccccaaguggauc

SEQ ID NO: 53524 - RNA, 32 nt, Human
agcuggguaaaggggauucugggaguugagag

SEQ ID NO: 53525 - RNA, 32 nt, Human
agcuggguaaguaggucucagcuguucuguag

SEQ ID NO: 53526 - RNA, 32 nt, Human
agcugggucuacaggugcauaccaccaugccu

SEQ ID NO: 53527 - RNA, 32 nt, Human
agcugggucucgaacuccugaccucaggugau

SEQ ID NO: 53528 - RNA, 32 nt, Human
agcugggucugaggauucaggauuguggcguu

SEQ ID NO: 53529 - RNA, 32 nt, Human
agcugggugccaggcugaggaucacugaggaa

SEQ ID NO: 53530 - RNA, 19 nt, Human
agcugggugggccugggca

SEQ ID NO: 53531 - RNA, 32 nt, Human
agcugggugggguggcucacacccgacguaau

SEQ ID NO: 53532 - RNA, 32 nt, Human
agcugggugucaggcugggguuagugagcagg

SEQ ID NO: 53533 - RNA, 32 nt, Human
agcuggguucagacuucacacugugaguucag

SEQ ID NO: 53534 - RNA, 32 nt, Human
agcuggguugccccacugugcuuguaucugca

SEQ ID NO: 53535 - RNA, 32 nt, Human
agcuggguuuacaggcacccaccaccaugccc

SEQ ID NO: 53536 - RNA, 32 nt, Human
agcuggguuuacagguaugcaccaccacgccc

SEQ ID NO: 53537 - RNA, 32 nt, Human
agcuggguuuacaggugccugccagcacgccc

SEQ ID NO: 53538 - RNA, 30 nt, Human
agcuggguuucugagucagaaagacuuggu

SEQ ID NO: 53539 - RNA, 32 nt, Human
agcugguaaauuguuccauccagaccuugggc

SEQ ID NO: 53540 - RNA, 32 nt, Human
agcugguaccucaguggggaggcuuccuuacc

SEQ ID NO: 53541 - RNA, 32 nt, Human
agcugguacuacaggcuccugccaccacgccc

SEQ ID NO: 53542 - RNA, 32 nt, Human
agcugguacuacaggugcgugccaccacaccu

SEQ ID NO: 53543 - RNA, 32 nt, Human
agcugguacuacaggugcgugccaccaugcuu

SEQ ID NO: 53544 - RNA, 32 nt, Human
agcugguaggagagggaaggcaaaaucuuucu

SEQ ID NO: 53545 - RNA, 32 nt, Human
agcugguaucacaggcgucccccaccacgccu

SEQ ID NO: 53546 - RNA, 32 nt, Human
agcugguauuagacacgauaaagacucugugg

SEQ ID NO: 53547 - RNA, 32 nt, Human
agcugguauugauguagaaccagugcauaacu

SEQ ID NO: 53548 - RNA, 21 nt, Human
agcuggucauuucgccuggga

SEQ ID NO: 53549 - RNA, 32 nt, Human
agcuggucccaaugcuagaaugaucuuuguuc

SEQ ID NO: 53550 - RNA, 32 nt, Human
agcuggucgccaccccugggccuuuccaucuc

SEQ ID NO: 53551 - RNA, 32 nt, Human
agcuggucuaccgaugcacagcaaccagccaa

SEQ ID NO: 53552 - RNA, 32 nt, Human
agcuggucuagacuguuugcugauccccaacc

SEQ ID NO: 53553 - RNA, 32 nt, Human
agcuggucucaaaccccugggcucaagcaagc

SEQ ID NO: 53554 - RNA, 32 nt, Human
agcuggucucaaacuccugaccucagguaauc

SEQ ID NO: 53555 - RNA, 32 nt, Human
agcuggucucaaacuccugaccucaggugauc

SEQ ID NO: 53556 - RNA, 32 nt, Human
agcuggucucaaacuccugaccucaggugaug

SEQ ID NO: 53557 - RNA, 32 nt, Human
agcuggucucaaacuccugaccuuaguugauc

SEQ ID NO: 53558 - RNA, 32 nt, Human
agcuggucucaaacuccuggccucaagcaguc

SEQ ID NO: 53559 - RNA, 32 nt, Human
agcuggucucaaacuccugggcucaagcgauc

SEQ ID NO: 53560 - RNA, 32 nt, Human
agcuggucucaaacuccuggguucaagccauc

SEQ ID NO: 53561 - RNA, 32 nt, Human
agcuggucucaaacugcugggcuuaugggauc

SEQ ID NO: 53562 - RNA, 32 nt, Human
agcuggucucaagcuccugggcucaagcaauc

SEQ ID NO: 53563 - RNA, 32 nt, Human
agcuggucuccccaggcaagaagguauccucu

SEQ ID NO: 53564 - RNA, 32 nt, Human
agcuggucuccucucuguugcucaauguuacc

SEQ ID NO: 53565 - RNA, 32 nt, Human
agcuggucucgaacuccugaccucaggcgauc

SEQ ID NO: 53566 - RNA, 32 nt, Human
agcuggucucgaacuccugaccucgugauccg

SEQ ID NO: 53567 - RNA, 32 nt, Human
agcuggucuggggagcauugacugccugggag

SEQ ID NO: 53568 - RNA, 32 nt, Human
agcuggucuugaacuccugacccucaugaucc

SEQ ID NO: 53569 - RNA, 32 nt, Human
agcuggucuugaacuccugaccucaggugauc

SEQ ID NO: 53570 - RNA, 32 nt, Human
agcuggucuugaacuccugacuucaugaucug

SEQ ID NO: 53571 - RNA, 22 nt, Human
agcuggugcagucugggccuga

SEQ ID NO: 53572 - RNA, 32 nt, Human
agcuggugccaaauagccccagacugggccca

SEQ ID NO: 53573 - RNA, 32 nt, Human
agcuggugccccaaaacuuccaccucccuccc

SEQ ID NO: 53574 - RNA, 18 nt, Human
agcuggugcggcuggcca

SEQ ID NO: 53575 - RNA, 32 nt, Human
agcuggugcuauggucuguucuuuaguucuag

SEQ ID NO: 53576 - RNA, 20 nt, Human
agcuggugcuggccugaggc

SEQ ID NO: 53577 - RNA, 21 nt, Human
agcuggugcuguucucagaug

SEQ ID NO: 53578 - RNA, 32 nt, Human
agcugguggacuccuguggcuaccccaucaga

SEQ ID NO: 53579 - RNA, 32 nt, Human
agcugguggcacccuccccugggccggaagac

SEQ ID NO: 53580 - RNA, 32 nt, Human
agcugguggccaggaccucauggaucagcaag

SEQ ID NO: 53581 - RNA, 31 nt, Human
agcugguggcucucuggugagcuagugucuc

SEQ ID NO: 53582 - RNA, 32 nt, Human
agcuggugggaaaggaggguucuggaaggcuu

SEQ ID NO: 53583 - RNA, 32 nt, Human
agcuggugggccgagaggcaggaagcagccuu

SEQ ID NO: 53584 - RNA, 32 nt, Human
agcuggugggcgggcaggaucugcugggcugg

SEQ ID NO: 53585 - RNA, 18 nt, Human
agcuggugggggagcuga

SEQ ID NO: 53586 - RNA, 32 nt, Human
agcugguggugccugcugucccagggagaguu

SEQ ID NO: 53587 - RNA, 32 nt, Human
agcuggugguuugaucauuucugccaugaugu

SEQ ID NO: 53588 - RNA, 32 nt, Human
agcuggugucagggagagaaacccaaccccac

SEQ ID NO: 53589 - RNA, 32 nt, Human
agcugguguccuagcaggagacuaacuagcug

SEQ ID NO: 53590 - RNA, 29 nt, Human
agcuggugucugugggugccaagggcagc

SEQ ID NO: 53591 - RNA, 32 nt, Human
agcugguuaccuuucugccugcccugugucgu

SEQ ID NO: 53592 - RNA, 32 nt, Human
agcugguuccaucugaggauacauacucuggg

SEQ ID NO: 53593 - RNA, 19 nt, Human
agcugguuccucccuggga

SEQ ID NO: 53594 - RNA, 18 nt, Human
agcugguugcuugaacug

SEQ ID NO: 53595 - RNA, 32 nt, Human
agcugguugguguggagggaaaggcuuacaca

SEQ ID NO: 53596 - RNA, 32 nt, Human
agcugguugucuucuugccugcccuguguugu

SEQ ID NO: 53597 - RNA, 32 nt, Human
agcugguuucucucauugcuuuuucuaaaucu

SEQ ID NO: 53598 - RNA, 32 nt, Human
agcugguuugaaugagacugggucauaaguga

SEQ ID NO: 53599 - RNA, 32 nt, Human
agcuguaaaccucacuggugaacguucaccuu

SEQ ID NO: 53600 - RNA, 22 nt, Human
agcuguaagaaaauaaauuucu

SEQ ID NO: 53601 - RNA, 22 nt, Human
agcuguaaggcccuacuacaga

SEQ ID NO: 53602 - RNA, 32 nt, Human
agcuguaaucacacuaaagauaucccugcccu

SEQ ID NO: 53603 - RNA, 23 nt, Human
agcuguaaucccagcuacuuggg

SEQ ID NO: 53604 - RNA, 32 nt, Human
agcuguacauaaaaguagcugauauuaguuag

SEQ ID NO: 53605 - RNA, 32 nt, Human
agcuguaccaaaacaaaaagccuguacucaca

SEQ ID NO: 53606 - RNA, 32 nt, Human
agcuguaccccacauucauuaggaaucuuggc

SEQ ID NO: 53607 - RNA, 21 nt, Human
agcuguaccugccccacccca

SEQ ID NO: 53608 - RNA, 32 nt, Human
agcuguacuacaaggaagaagggcagcaggag

SEQ ID NO: 53609 - RNA, 32 nt, Human
agcuguacuguugcucaauaaagcaccucuuc

SEQ ID NO: 53610 - RNA, 32 nt, Human
agcuguacuguugcucaauaaagcaccucuuu

SEQ ID NO: 53611 - RNA, 32 nt, Human
agcuguacuuuugauagcugugccaggaaggg

SEQ ID NO: 53612 - RNA, 32 nt, Human
agcuguagaccaacuuaacacugaacccauua

SEQ ID NO: 53613 - RNA, 18 nt, Human
agcuguagaggaccagga

SEQ ID NO: 53614 - RNA, 32 nt, Human
agcuguagugccauuagaaacugugaauuucc

SEQ ID NO: 53615 - RNA, 32 nt, Human
agcuguaucccaagugcacuguccuucugucc

SEQ ID NO: 53616 - RNA, 32 nt, Human
agcuguauuuagaacaaaucacuccgaagcaa

SEQ ID NO: 53617 - RNA, 32 nt, Human
agcugucaacacagcauccgccuugugggacu

SEQ ID NO: 53618 - RNA, 32 nt, Human
agcugucaacauccuggaagcuuugaagcuca

SEQ ID NO: 53619 - RNA, 31 nt, Human
agcugucacagcugggcagccagcugcaggg

SEQ ID NO: 53620 - RNA, 32 nt, Human
agcugucaccuucucccugucucagcugaggg

SEQ ID NO: 53621 - RNA, 32 nt, Human
agcugucaccuugcucccuccaccuccccucg

SEQ ID NO: 53622 - RNA, 32 nt, Human
agcugucagaggacugugucuccuggagcugu

SEQ ID NO: 53623 - RNA, 32 nt, Human
agcugucaggaaaucuggcucaguccccagac

SEQ ID NO: 53624 - RNA, 32 nt, Human
agcugucagucaacucugcuucccaggggcag

SEQ ID NO: 53625 - RNA, 22 nt, Human
agcugucaucagaagcugugag

SEQ ID NO: 53626 - RNA, 32 nt, Human
agcugucaucugcagccucugccuccagcccg

SEQ ID NO: 53627 - RNA, 32 nt, Human
agcugucaugcaccaugagacaaagcccaagc

SEQ ID NO: 53628 - RNA, 32 nt, Human
agcugucauguuuauaauucaaacauguagua

SEQ ID NO: 53629 - RNA, 24 nt, Human
agcugucauucaggacacuaggag

SEQ ID NO: 53630 - RNA, 32 nt, Human
agcugucauucugcugguggcuuccugcgucu

SEQ ID NO: 53631 - RNA, 32 nt, Human
agcugucauugagccucuuggaggaugguggg

SEQ ID NO: 53632 - RNA, 32 nt, Human
agcuguccacacugaagaacauguccuacaac

SEQ ID NO: 53633 - RNA, 32 nt, Human
agcugucccacccaggcccauccucugcagcc

SEQ ID NO: 53634 - RNA, 32 nt, Human
agcuguccccaggucacagaagggagaggaca

SEQ ID NO: 53635 - RNA, 23 nt, Human
agcuguccccccguccuccuccc

SEQ ID NO: 53636 - RNA, 32 nt, Human
agcugucccucacucugccauuucagcagcuc

SEQ ID NO: 53637 - RNA, 32 nt, Human
agcugucccugccucaauucaacaccaccagc

SEQ ID NO: 53638 - RNA, 18 nt, Human
agcugucccuugcuugcc

SEQ ID NO: 53639 - RNA, 32 nt, Human
agcugucccuuuccaagcagucucuggugcuu

SEQ ID NO: 53640 - RNA, 32 nt, Human
agcuguccgcaggcaccagccccagccuccca

SEQ ID NO: 53641 - RNA, 23 nt, Human
agcuguccguucaggaccaugag

SEQ ID NO: 53642 - RNA, 32 nt, Human
agcuguccuauggugaccucaggacuuggcug

SEQ ID NO: 53643 - RNA, 32 nt, Human
agcuguccuccccuuggugcuccucuuccucc

SEQ ID NO: 53644 - RNA, 19 nt, Human
agcuguccuguguguggua

SEQ ID NO: 53645 - RNA, 32 nt, Human
agcuguccuugaggaaccuuugguguguggug

SEQ ID NO: 53646 - RNA, 32 nt, Human
agcuguccuuuccccauuguguguucuuggca

SEQ ID NO: 53647 - RNA, 32 nt, Human
agcugucgagagcagcccugcccagauugcgg

SEQ ID NO: 53648 - RNA, 32 nt, Human
agcugucggaaugcagccuaaccaaaggucaa

SEQ ID NO: 53649 - RNA, 32 nt, Human
agcugucgggcaucccugucucagggacuucu

SEQ ID NO: 53650 - RNA, 32 nt, Human
agcugucuauguauguuauagauauguagaua

SEQ ID NO: 53651 - RNA, 32 nt, Human
agcugucucaaaccuccaaaagcccugaguuu

SEQ ID NO: 53652 - RNA, 32 nt, Human
agcugucucagaauuccuccuccugggacucu

SEQ ID NO: 53653 - RNA, 32 nt, Human
agcugucucagggcucugggcuucauucccug

SEQ ID NO: 53654 - RNA, 32 nt, Human
agcugucuccaucccccuuuuccgccucucuc

SEQ ID NO: 53655 - RNA, 32 nt, Human
agcugucucccuucugacauuuccuaggaagc

SEQ ID NO: 53656 - RNA, 32 nt, Human
agcugucuccguaaauggaggaaaugugggga

SEQ ID NO: 53657 - RNA, 32 nt, Human
agcugucuccuggcccugacuuuucuaagaug

SEQ ID NO: 53658 - RNA, 32 nt, Human
agcugucugaagaacagugagguggagugccu

SEQ ID NO: 53659 - RNA, 32 nt, Human
agcugucugaguuuuuaaauagcuaauacgac

SEQ ID NO: 53660 - RNA, 31 nt, Human
agcugucugcccucugggcuuggguaggggc

SEQ ID NO: 53661 - RNA, 32 nt, Human
agcugucuggacugcaaggaggcugggcacgg

SEQ ID NO: 53662 - RNA, 22 nt, Human
agcugucugugccucucuggga

SEQ ID NO: 53663 - RNA, 32 nt, Human
agcugucuguuccugcucacacugccagaauc

SEQ ID NO: 53664 - RNA, 32 nt, Human
agcugucuugcccaggcuggaguucaggggcu

SEQ ID NO: 53665 - RNA, 32 nt, Human
agcugucuuguccuugcugguuuucuggaugg

SEQ ID NO: 53666 - RNA, 32 nt, Human
agcugugaaauguuuuucucuuuuggaaaagg

SEQ ID NO: 53667 - RNA, 32 nt, Human
agcugugaacaaccaugggcaugaagauuucu

SEQ ID NO: 53668 - RNA, 32 nt, Human
agcugugaacacugcugccucuucccagccuc

SEQ ID NO: 53669 - RNA, 32 nt, Human
agcugugaacccaugaggcuugccaaguaggg

SEQ ID NO: 53670 - RNA, 32 nt, Human
agcugugaagcauaugcugugagacaacacag

SEQ ID NO: 53671 - RNA, 23 nt, Human
agcugugaaucagccagcaauau

SEQ ID NO: 53672 - RNA, 32 nt, Human
agcugugacuacaggcgcaugccaucacgcac

SEQ ID NO: 53673 - RNA, 32 nt, Human
agcugugacuccaagguuuuccuuucccauag

SEQ ID NO: 53674 - RNA, 23 nt, Human
agcugugagaaauaaauuucugu

SEQ ID NO: 53675 - RNA, 24 nt, Human
agcugugagacaauaaauuucugu

SEQ ID NO: 53676 - RNA, 32 nt, Human
agcugugagccccagccccaccugacuccagc

SEQ ID NO: 53677 - RNA, 32 nt, Human
agcugugaggaggaguuccagcaacagaaguu

SEQ ID NO: 53678 - RNA, 32 nt, Human
agcugugaggcugcgcucugcguguugugcgu

SEQ ID NO: 53679 - RNA, 32 nt, Human
agcugugagugaggggacaaggggcagguccc

SEQ ID NO: 53680 - RNA, 18 nt, Human
agcugugaucacaccacu

SEQ ID NO: 53681 - RNA, 18 nt, Human
agcugugaucauaccacu

SEQ ID NO: 53682 - RNA, 32 nt, Human
agcugugaucauaccacugcacuccagccugg

SEQ ID NO: 53683 - RNA, 18 nt, Human
agcugugaucgcaccacu

SEQ ID NO: 53684 - RNA, 32 nt, Human
agcugugauuaaaggcgccugccaccaugacu

SEQ ID NO: 53685 - RNA, 18 nt, Human
agcugugauuacaccacu

SEQ ID NO: 53686 - RNA, 23 nt, Human
agcugugauuacaccacugcacu

SEQ ID NO: 53687 - RNA, 32 nt, Human
agcugugauuacaggcaugcgccaccaugccu

SEQ ID NO: 53688 - RNA, 32 nt, Human
agcugugauuacaggcgugcaccaccacgccc

SEQ ID NO: 53689 - RNA, 32 nt, Human
agcugugauuguaccacugcacuccagcucgg

SEQ ID NO: 53690 - RNA, 23 nt, Human
agcugugauugugccacugcacu

SEQ ID NO: 53691 - RNA, 32 nt, Human
agcugugcaacuacuacugagaucagauacag

SEQ ID NO: 53692 - RNA, 32 nt, Human
agcugugccacucugggcaaaugcucuuccuu

SEQ ID NO: 53693 - RNA, 32 nt, Human
agcugugccagcugcuucugcccaccccgccu

SEQ ID NO: 53694 - RNA, 32 nt, Human
agcugugccccagcuguuccagcagcuugucu

SEQ ID NO: 53695 - RNA, 32 nt, Human
agcugugccuggaggcagucggccugcagugc

SEQ ID NO: 53696 - RNA, 32 nt, Human
agcugugccuucauuaguuugcuauagaaauc

SEQ ID NO: 53697 - RNA, 20 nt, Human
agcugugcguuuugcuauca

SEQ ID NO: 53698 - RNA, 32 nt, Human
agcugugcuccugguggaagcaagggagccca

SEQ ID NO: 53699 - RNA, 32 nt, Human
agcugugcugccgccaccucugcuccagagug

SEQ ID NO: 53700 - RNA, 32 nt, Human
agcugugcugccugcccucuaguaaguacuua

SEQ ID NO: 53701 - RNA, 32 nt, Human
agcugugcuucaguuucucucacuuugcccug

SEQ ID NO: 53702 - RNA, 32 nt, Human
agcuguggaagucugcagucuacaggagccua

SEQ ID NO: 53703 - RNA, 32 nt, Human
agcuguggaaugcagaggcaugggguugugug

SEQ ID NO: 53704 - RNA, 32 nt, Human
agcuguggagccaaugaaguaacaguagagau

SEQ ID NO: 53705 - RNA, 32 nt, Human
agcuguggagcugccuccucuccaggccuggc

SEQ ID NO: 53706 - RNA, 32 nt, Human
agcuguggaggcuggauuccaggcucccuccg

SEQ ID NO: 53707 - RNA, 32 nt, Human
agcuguggcaggcagaucacgaggucaggagu

SEQ ID NO: 53708 - RNA, 32 nt, Human
agcuguggcauggcgucacauaugcauuuaag

SEQ ID NO: 53709 - RNA, 32 nt, Human
agcuguggcccuuuccacucucuccuggccuc

SEQ ID NO: 53710 - RNA, 32 nt, Human
agcuguggccucccccuugccuuuaaccucua

SEQ ID NO: 53711 - RNA, 32 nt, Human
agcuguggcucacaccuguaaucccagcauuu

SEQ ID NO: 53712 - RNA, 32 nt, Human
agcuguggcucugccaugccgggcuguguuug

SEQ ID NO: 53713 - RNA, 32 nt, Human
agcuguggcuucucuagguucuaggggugcaa

SEQ ID NO: 53714 - RNA, 32 nt, Human
agcugugggaccuugggcaaguugccuuugug

SEQ ID NO: 53715 - RNA, 32 nt, Human
agcugugggaggagcuggaggcuucaccgugg

SEQ ID NO: 53716 - RNA, 32 nt, Human
agcugugggcggagcuaguaggggcgggcuac

SEQ ID NO: 53717 - RNA, 31 nt, Human
agcuguggggacacggcccagaugcucuggu

SEQ ID NO: 53718 - RNA, 32 nt, Human
agcuguggggcugguccauguugcccacucac

SEQ ID NO: 53719 - RNA, 32 nt, Human
agcugugggggcaguggggugggggagaccca

SEQ ID NO: 53720 - RNA, 32 nt, Human
agcugugggugaggacggcucuagcuagguga

SEQ ID NO: 53721 - RNA, 32 nt, Human
agcugugggugaggacggcucuagcuaguucc

SEQ ID NO: 53722 - RNA, 32 nt, Human
agcuguggguucgagguggaggcugcagcuga

SEQ ID NO: 53723 - RNA, 32 nt, Human
agcuguggugagccacuggcauugggcaggcg

SEQ ID NO: 53724 - RNA, 32 nt, Human
agcuguggugugagagggugaagccagagaac

SEQ ID NO: 53725 - RNA, 32 nt, Human
agcuguggugugagagggugaaggcggcgcug

SEQ ID NO: 53726 - RNA, 32 nt, Human
agcuguggugugugauggacauggaagcagug

SEQ ID NO: 53727 - RNA, 32 nt, Human
agcugugguugauuccuguguggcaguaaauu

SEQ ID NO: 53728 - RNA, 32 nt, Human
agcuguguacuaauaaagacugcagcaagcac

SEQ ID NO: 53729 - RNA, 32 nt, Human
agcuguguagaaguccuagcauuauaggaucu

SEQ ID NO: 53730 - RNA, 32 nt, Human
agcuguguccagggcuggagucagagccugcu

SEQ ID NO: 53731 - RNA, 32 nt, Human
agcugugucccagcaaggaagggaaaccauca

SEQ ID NO: 53732 - RNA, 32 nt, Human
agcugugucccccaguccgugucuuuuuagaa

SEQ ID NO: 53733 - RNA, 32 nt, Human
agcuguguccuucuauucaucuuccuaucccc

SEQ ID NO: 53734 - RNA, 31 nt, Human
agcugugugacugacugacaugacagaagug

SEQ ID NO: 53735 - RNA, 32 nt, Human
agcugugugagcucuucugccaaggggguccu

SEQ ID NO: 53736 - RNA, 32 nt, Human
agcugugugauggaagaacaaaaccaaacaua

SEQ ID NO: 53737 - RNA, 32 nt, Human
agcuguguggugcucuugccgccccuuccugg

SEQ ID NO: 53738 - RNA, 32 nt, Human
agcuguguucccugucucaggucaagcagugg

SEQ ID NO: 53739 - RNA, 32 nt, Human
agcuguguucuucccagcucccaagcccugug

SEQ ID NO: 53740 - RNA, 20 nt, Human
agcuguuacccacucuggga

SEQ ID NO: 53741 - RNA, 32 nt, Human
agcuguuacccacucugggaccagcagucuuu

SEQ ID NO: 53742 - RNA, 32 nt, Human
agcuguuacugcuccagagaagccacagaagc

SEQ ID NO: 53743 - RNA, 32 nt, Human
agcuguuagaggcccaggcugucugccugcgg

SEQ ID NO: 53744 - RNA, 32 nt, Human
agcuguuaguaauacacgaaguugauugaggc

SEQ ID NO: 53745 - RNA, 32 nt, Human
agcuguucaccauggauuccgacuggggcagg

SEQ ID NO: 53746 - RNA, 32 nt, Human
agcuguucaugcugggacugacagccugcagg

SEQ ID NO: 53747 - RNA, 32 nt, Human
agcuguuccauuuccauauucucccuuauuag

SEQ ID NO: 53748 - RNA, 32 nt, Human
agcuguucccacucuucucucuuccuccagag

SEQ ID NO: 53749 - RNA, 32 nt, Human
agcuguuccccagcugcagggagacuggagug

SEQ ID NO: 53750 - RNA, 32 nt, Human
agcuguuccugccucuuccgucaagcaagggg

SEQ ID NO: 53751 - RNA, 19 nt, Human
agcuguucuccaggugcgu

SEQ ID NO: 53752 - RNA, 32 nt, Human
agcuguucucugcuuuuccauucuggguguuu

SEQ ID NO: 53753 - RNA, 32 nt, Human
agcuguucugguggcuuccacucugaggugug

SEQ ID NO: 53754 - RNA, 32 nt, Human
agcuguucuucagcccucuauacuuuuucaua

SEQ ID NO: 53755 - RNA, 32 nt, Human
agcuguuggacaccugccuucucauguggaca

SEQ ID NO: 53756 - RNA, 32 nt, Human
agcuguuggacuggcugccucaccuaggaccc

SEQ ID NO: 53757 - RNA, 32 nt, Human
agcuguuggcggugcagggaggaggacgccgg

SEQ ID NO: 53758 - RNA, 21 nt, Human
agcuguuggcuuucucugagg

SEQ ID NO: 53759 - RNA, 32 nt, Human
agcuguuggggagggguggcaggcaggguggg

SEQ ID NO: 53760 - RNA, 32 nt, Human
agcuguuuaucaugaugcugucccuccugaug

SEQ ID NO: 53761 - RNA, 32 nt, Human
agcuguuucacucgcauccagagggccaccug

SEQ ID NO: 53762 - RNA, 32 nt, Human
agcuguuucagggguuuccuggaccacccacu

SEQ ID NO: 53763 - RNA, 32 nt, Human
agcuguuuccagggugacagaguggcgaccuc

SEQ ID NO: 53764 - RNA, 32 nt, Human
agcuguuucccaucagcuuccugcaugcuucc

SEQ ID NO: 53765 - RNA, 32 nt, Human
agcuguuucucagcccagaggugcuaagagga

SEQ ID NO: 53766 - RNA, 32 nt, Human
agcuguuucucugacuccuuguggcaucagau

SEQ ID NO: 53767 - RNA, 32 nt, Human
agcuguuucuguaccuuggaacagucuucccu

SEQ ID NO: 53768 - RNA, 32 nt, Human
agcuguuugaaggaaagaauauggauuuuuca

SEQ ID NO: 53769 - RNA, 32 nt, Human
agcuuaaacucaugauaaugcugcgaugugug

SEQ ID NO: 53770 - RNA, 32 nt, Human
agcuuaaagcuuggcacuagagcccagugcug

SEQ ID NO: 53771 - RNA, 32 nt, Human
agcuuaacaacuuccuccuacucucauuggcc

SEQ ID NO: 53772 - RNA, 32 nt, Human
agcuuaacaugaauaacaaagacuggcucagg

SEQ ID NO: 53773 - RNA, 32 nt, Human
agcuuaacccaaggcuuuuuaaauaagaucau

SEQ ID NO: 53774 - RNA, 32 nt, Human
agcuuaacuucauguaaagucuucacugccag

SEQ ID NO: 53775 - RNA, 32 nt, Human
agcuuaagacacaccugccuucauuucaacca

SEQ ID NO: 53776 - RNA, 32 nt, Human
agcuuaagccgggcaggcgagcgaaugacgga

SEQ ID NO: 53777 - RNA, 32 nt, Human
agcuuaagggaggcggcggcagcgcggcggug

SEQ ID NO: 53778 - RNA, 23 nt, Human
agcuuaaugcaaccucuaccucc

SEQ ID NO: 53779 - RNA, 32 nt, Human
agcuuaaugcaaccucuaccucccagguucaa

SEQ ID NO: 53780 - RNA, 32 nt, Human
agcuuaauucugcaaucauuugucuuuuauaa

SEQ ID NO: 53781 - RNA, 32 nt, Human
agcuuacaccuauaaucccagcacuuugggag

SEQ ID NO: 53782 - RNA, 32 nt, Human
agcuuacaccuguaaucugagcgcuuugggag

SEQ ID NO: 53783 - RNA, 32 nt, Human
agcuuacagugagccgagaucacaccacugca

SEQ ID NO: 53784 - RNA, 32 nt, Human
agcuuaccaagaaacccaugucagcaaccgca

SEQ ID NO: 53785 - RNA, 16 nt, Human
agcuuaccuacuguua

SEQ ID NO: 53786 - RNA, 32 nt, Human
agcuuaccuuccuggagaugacaugcauagaa

SEQ ID NO: 53787 - RNA, 20 nt, Human
agcuuaccuuucugcuagga

SEQ ID NO: 53788 - RNA, 32 nt, Human
agcuuaccuuuugccuuucuguugauguuaca

SEQ ID NO: 53789 - RNA, 32 nt, Human
agcuuacgccuguaaucccagcacuuugagag

SEQ ID NO: 53790 - RNA, 32 nt, Human
agcuuacgccuguuaucccagcacuuugggag

SEQ ID NO: 53791 - RNA, 32 nt, Human
agcuuacuacagccaggucuccucucugcggc

SEQ ID NO: 53792 - RNA, 32 nt, Human
agcuuacuauguguugggucugguuuuguuug

SEQ ID NO: 53793 - RNA, 32 nt, Human
agcuuacucaggaaaugaaaacaaaugauggu

SEQ ID NO: 53794 - RNA, 24 nt, Human
agcuuacugcaaccuccaccuccu

SEQ ID NO: 53795 - RNA, 32 nt, Human
agcuuacugcaaccucugccucccggguucaa

SEQ ID NO: 53796 - RNA, 32 nt, Human
agcuuacugcaaccucugucucccggguucaa

SEQ ID NO: 53797 - RNA, 32 nt, Human
agcuuacugcaagcuccgccuccuggguucac

SEQ ID NO: 53798 - RNA, 32 nt, Human
agcuuacugcacccucaaccuccugggcucaa

SEQ ID NO: 53799 - RNA, 32 nt, Human
agcuuacugcacccucugccucccgguuucaa

SEQ ID NO: 53800 - RNA, 24 nt, Human
agcuuacugcagccucaaccuccu

SEQ ID NO: 53801 - RNA, 32 nt, Human
agcuuacugcagccucaaccuccugggcucag

SEQ ID NO: 53802 - RNA, 32 nt, Human
agcuuacugcagccucgaacuccugagcucaa

SEQ ID NO: 53803 - RNA, 32 nt, Human
agcuuacugcagccuugaccucccaggcucag

SEQ ID NO: 53804 - RNA, 32 nt, Human
agcuuacugcagcuuccaucucccagguucaa

SEQ ID NO: 53805 - RNA, 32 nt, Human
agcuuacuguaaccucugccuccuggauucaa

SEQ ID NO: 53806 - RNA, 32 nt, Human
agcuuacuguaccuuccaacuccuggguucaa

SEQ ID NO: 53807 - RNA, 32 nt, Human
agcuuagaaguggugugugcucugucugucug

SEQ ID NO: 53808 - RNA, 32 nt, Human
agcuuagagaaaccuccaggagacugcuacca

SEQ ID NO: 53809 - RNA, 32 nt, Human
agcuuagagaaaccuccaggagacugcuauca

SEQ ID NO: 53810 - RNA, 32 nt, Human
agcuuagagccacgccugguaccauuuacaug

SEQ ID NO: 53811 - RNA, 32 nt, Human
agcuuagagccaguauuuauacuuugugguua

SEQ ID NO: 53812 - RNA, 32 nt, Human
agcuuagcaagucugcagcccagccccaccuc

SEQ ID NO: 53813 - RNA, 32 nt, Human
agcuuagcacagugccugguaaugagcaagca

SEQ ID NO: 53814 - RNA, 32 nt, Human
agcuuagcagggagcuaugcuucaccuccaug

SEQ ID NO: 53815 - RNA, 32 nt, Human
agcuuagcccaguuuccagggaagcauuguuu

SEQ ID NO: 53816 - RNA, 19 nt, Human
agcuuagcugccucagaga

SEQ ID NO: 53817 - RNA, 32 nt, Human
agcuuaggaccggaagagagaauuggagcugu

SEQ ID NO: 53818 - RNA, 32 nt, Human
agcuuaggagguugaggcugcagugagcugug

SEQ ID NO: 53819 - RNA, 32 nt, Human
agcuuagggaaagagaauaaauuuuagauuau

SEQ ID NO: 53820 - RNA, 32 nt, Human
agcuuagugaugacgaccacugucagccauaa

SEQ ID NO: 53821 - RNA, 32 nt, Human
agcuuagugcugggacuagcccagaaacuuga

SEQ ID NO: 53822 - RNA, 32 nt, Human
agcuuaguggaagcucugcucuggguggagag

SEQ ID NO: 53823 - RNA, 32 nt, Human
agcuuaguuccaaugcauuuggcuccagaaag

SEQ ID NO: 53824 - RNA, 32 nt, Human
agcuuaguuggcagcacucuccacacuucugu

SEQ ID NO: 53825 - RNA, 32 nt, Human
agcuuauaagagggcauauacagugaagagua

SEQ ID NO: 53826 - RNA, 32 nt, Human
agcuuauaccuguaauccuagcacuuugggag

SEQ ID NO: 53827 - RNA, 32 nt, Human
agcuuauaucccugaauucugauacuuaagag

SEQ ID NO: 53828 - RNA, 32 nt, Human
agcuuauauucagauccuaucuucauuugaau

SEQ ID NO: 53829 - RNA, 32 nt, Human
agcuuaucaaaggcaggagcuaccagcgaggg

SEQ ID NO: 53830 - RNA, 32 nt, Human
agcuuauccgagagaaagaugaggagcugcgg

SEQ ID NO: 53831 - RNA, 32 nt, Human
agcuuaucugcaggauguuucagaucugauaa

SEQ ID NO: 53832 - RNA, 31 nt, Human
agcuuaucugggagagaaacaaggccuggug

SEQ ID NO: 53833 - RNA, 32 nt, Human
agcuuaugacuuucccaccugugucauccauu

SEQ ID NO: 53834 - RNA, 32 nt, Human
agcuuaugagggcaaugggggcaccuaaacuc

SEQ ID NO: 53835 - RNA, 31 nt, Human
agcuuauggguggaugggggugggauggaag

SEQ ID NO: 53836 - RNA, 32 nt, Human
agcuuaugucuguaaucccagcacuuuugaga

SEQ ID NO: 53837 - RNA, 32 nt, Human
agcuuauuacaaccucugccuccugggcucaa

SEQ ID NO: 53838 - RNA, 32 nt, Human
agcuuauugcagucuccaccuccugaguucaa

SEQ ID NO: 53839 - RNA, 32 nt, Human
agcuuauuguacuggccugcaccagaagaugu

SEQ ID NO: 53840 - RNA, 32 nt, Human
agcuuauuuuggugaagcacaucuucuaguaa

SEQ ID NO: 53841 - RNA, 32 nt, Human
agcuucaaaccagacucugugcugcuucugcu

SEQ ID NO: 53842 - RNA, 22 nt, Human
agcuucaaacucuugggcucaa

SEQ ID NO: 53843 - RNA, 32 nt, Human
agcuucaaagagaagcuguauuuacaggagaa

SEQ ID NO: 53844 - RNA, 32 nt, Human
agcuucaaagagaagcugucuuuacaggagaa

SEQ ID NO: 53845 - RNA, 32 nt, Human
agcuucaaaggauugguggagacuaugcaugg

SEQ ID NO: 53846 - RNA, 22 nt, Human
agcuucaacuuccugggcucaa

SEQ ID NO: 53847 - RNA, 32 nt, Human
agcuucaagaucaagacugccuacgaggaguc

SEQ ID NO: 53848 - RNA, 32 nt, Human
agcuucaagccaagggcugaccuucucccagg

SEQ ID NO: 53849 - RNA, 32 nt, Human
agcuucaaggcagaaggaaaaacaggaaaagc

SEQ ID NO: 53850 - RNA, 32 nt, Human
agcuucaagguuuggauucaggauuuguuccu

SEQ ID NO: 53851 - RNA, 32 nt, Human
agcuucaccaccaaggagagagguugacauga

SEQ ID NO: 53852 - RNA, 32 nt, Human
agcuucaccacugcccaggugggugacuuuga

SEQ ID NO: 53853 - RNA, 32 nt, Human
agcuucaccgaggggagagggaaaguaagccu

SEQ ID NO: 53854 - RNA, 32 nt, Human
agcuucaccuggagagcugcuuuugcucagua

SEQ ID NO: 53855 - RNA, 32 nt, Human
agcuucacucacugucaaugauuauuuucauu

SEQ ID NO: 53856 - RNA, 32 nt, Human
agcuucacucuccaccaccuggauggcauggc

SEQ ID NO: 53857 - RNA, 32 nt, Human
agcuucacuuccucuuugaggauggagucgca

SEQ ID NO: 53858 - RNA, 32 nt, Human
agcuucagagcccaacuuucagccagacagga

SEQ ID NO: 53859 - RNA, 32 nt, Human
agcuucagaugggaagaagucagaggaaccag

SEQ ID NO: 53860 - RNA, 20 nt, Human
agcuucagccccagcagcuc

SEQ ID NO: 53861 - RNA, 32 nt, Human
agcuucagccuccagcuuuaacuucugucugc

SEQ ID NO: 53862 - RNA, 32 nt, Human
agcuucagccuccugaguagcugagauuacag

SEQ ID NO: 53863 - RNA, 32 nt, Human
agcuucagccugaagacaagggagcagucccu

SEQ ID NO: 53864 - RNA, 32 nt, Human
agcuucagcucacagcaacacaaugcagcuga

SEQ ID NO: 53865 - RNA, 32 nt, Human
agcuucagcuguagccaccccaguuucaggag

SEQ ID NO: 53866 - RNA, 32 nt, Human
agcuucaggcugggcacgguggcucacagcua

SEQ ID NO: 53867 - RNA, 32 nt, Human
agcuucaguauuacagagccacaggccgccuc

SEQ ID NO: 53868 - RNA, 32 nt, Human
agcuucauccuauccggaggcacagcacauga

SEQ ID NO: 53869 - RNA, 32 nt, Human
agcuucauggagccaugaaaauacagauuagg

SEQ ID NO: 53870 - RNA, 32 nt, Human
agcuucaugguggaauuaauuucugccagcuc

SEQ ID NO: 53871 - RNA, 32 nt, Human
agcuucauuaacacaaucaagaccaugcacau

SEQ ID NO: 53872 - RNA, 32 nt, Human
agcuucauuuccugucuuaaaaucucguuuuc

SEQ ID NO: 53873 - RNA, 32 nt, Human
agcuucauuuuaaagaagguucuuauuguguu

SEQ ID NO: 53874 - RNA, 32 nt, Human
agcuuccaaacggcauccccaggaucacuggg

SEQ ID NO: 53875 - RNA, 32 nt, Human
agcuuccaaacugcacugaggaacugggagga

SEQ ID NO: 53876 - RNA, 32 nt, Human
agcuuccaaauggcauccccaggaucacuggg

SEQ ID NO: 53877 - RNA, 32 nt, Human
agcuuccaaauggugcucagugcuccaaggaa

SEQ ID NO: 53878 - RNA, 32 nt, Human
agcuuccaacacucacuggcugugugacuuug

SEQ ID NO: 53879 - RNA, 32 nt, Human
agcuuccaaccaggauacgggaagaagaaaug

SEQ ID NO: 53880 - RNA, 32 nt, Human
agcuuccaagggcugcaucaagugcgaagcgc

SEQ ID NO: 53881 - RNA, 32 nt, Human
agcuuccaaugccucuugucuuccuauuucag

SEQ ID NO: 53882 - RNA, 32 nt, Human
agcuuccacaaacaccaucuucagcuguauga

SEQ ID NO: 53883 - RNA, 32 nt, Human
agcuuccacaagaacagagaauuguuugucca

SEQ ID NO: 53884 - RNA, 32 nt, Human
agcuuccaccugcuccccaucugcccacccac

SEQ ID NO: 53885 - RNA, 32 nt, Human
agcuuccaccuucucagggcucuggaggggga

SEQ ID NO: 53886 - RNA, 22 nt, Human
agcuuccacuuccugggcucaa

SEQ ID NO: 53887 - RNA, 32 nt, Human
agcuuccagcaacucugggcugccccacagcg

SEQ ID NO: 53888 - RNA, 18 nt, Human
agcuuccagccagccagg

SEQ ID NO: 53889 - RNA, 21 nt, Human
agcuuccagccuccccucagg

SEQ ID NO: 53890 - RNA, 32 nt, Human
agcuuccagcucuaauaaaacagcugucucua

SEQ ID NO: 53891 - RNA, 32 nt, Human
agcuuccaggauccugagauccggagcagccg

SEQ ID NO: 53892 - RNA, 32 nt, Human
agcuuccagugagccgagaucgcgccacugca

SEQ ID NO: 53893 - RNA, 32 nt, Human
agcuuccaucccugacaccucugcacucccuu

SEQ ID NO: 53894 - RNA, 32 nt, Human
agcuucccaaagugcugagauuacaggcauga

SEQ ID NO: 53895 - RNA, 32 nt, Human
agcuucccaaagugcuggcauuacaggcguga

SEQ ID NO: 53896 - RNA, 32 nt, Human
agcuucccaaagugcugggauuacagacauga

SEQ ID NO: 53897 - RNA, 32 nt, Human
agcuucccaaagugcugggauuacaggcauga

SEQ ID NO: 53898 - RNA, 32 nt, Human
agcuucccaaagugcugggauuacagguguga

SEQ ID NO: 53899 - RNA, 32 nt, Human
agcuucccaagcagcugggacuacagguaccu

SEQ ID NO: 53900 - RNA, 32 nt, Human
agcuucccaagcagcugggauuacaggugccc

SEQ ID NO: 53901 - RNA, 32 nt, Human
agcuucccaaggagcugggacugcaggcaugu

SEQ ID NO: 53902 - RNA, 32 nt, Human
agcuucccaaguagcggggaucacaggcauga

SEQ ID NO: 53903 - RNA, 32 nt, Human
agcuucccaaguagcuaggaccacaggcacgu

SEQ ID NO: 53904 - RNA, 32 nt, Human
agcuucccaaguagcugagauuacaggcgcac

SEQ ID NO: 53905 - RNA, 32 nt, Human
agcuucccaaguagcugcaacaacaggcacac

SEQ ID NO: 53906 - RNA, 32 nt, Human
agcuucccaaguagcugggaccacaggcguga

SEQ ID NO: 53907 - RNA, 32 nt, Human
agcuucccaaguagcugggacugcaagugugu

SEQ ID NO: 53908 - RNA, 32 nt, Human
agcuucccaaguagcugggacugcggguguuc

SEQ ID NO: 53909 - RNA, 32 nt, Human
agcuucccaaguagcugggauuacaggcaccc

SEQ ID NO: 53910 - RNA, 32 nt, Human
agcuucccaaguagcugggauuacaggcacgu

SEQ ID NO: 53911 - RNA, 32 nt, Human
agcuucccaaguagcugggauuacaggcguac

SEQ ID NO: 53912 - RNA, 32 nt, Human
agcuucccaaguagcugggauuuacaggugug

SEQ ID NO: 53913 - RNA, 32 nt, Human
agcuucccaaguaguugggauuacaggcgccu

SEQ ID NO: 53914 - RNA, 32 nt, Human
agcuucccaaguggcugggauuacaggcaugu

SEQ ID NO: 53915 - RNA, 32 nt, Human
agcuucccaaguggcugggauuacaggcgccc

SEQ ID NO: 53916 - RNA, 32 nt, Human
agcuucccacugcagcagcaccagucugggga

SEQ ID NO: 53917 - RNA, 32 nt, Human
agcuucccagauagcugggccacaggcgugug

SEQ ID NO: 53918 - RNA, 32 nt, Human
agcuucccaggagucuggggcucaaccucucc

SEQ ID NO: 53919 - RNA, 32 nt, Human
agcuucccauaugccacauucaccggccaccu

SEQ ID NO: 53920 - RNA, 32 nt, Human
agcuuccccagaccccaacucacugcaguuca

SEQ ID NO: 53921 - RNA, 32 nt, Human
agcuuccccagcagcugggacuacaggcacgc

SEQ ID NO: 53922 - RNA, 32 nt, Human
agcuuccccaggagcaagaccucugagcccgc

SEQ ID NO: 53923 - RNA, 32 nt, Human
agcuuccccaguagcuaggauuacagguacgc

SEQ ID NO: 53924 - RNA, 32 nt, Human
agcuuccccaguagcugggaccacaggugccc

SEQ ID NO: 53925 - RNA, 32 nt, Human
agcuuccccugccccgggccuggggcugucac

SEQ ID NO: 53926 - RNA, 32 nt, Human
agcuuccccugccuccuacauccagucuguuc

SEQ ID NO: 53927 - RNA, 32 nt, Human
agcuuccccugccuucugcggcggcagaagug

SEQ ID NO: 53928 - RNA, 32 nt, Human
agcuuccccugggguucaccccuggcugccag

SEQ ID NO: 53929 - RNA, 32 nt, Human
agcuucccgacuagcugggauuacagcugccu

SEQ ID NO: 53930 - RNA, 32 nt, Human
agcuucccgaguaacugagauuacaggcaccc

SEQ ID NO: 53931 - RNA, 32 nt, Human
agcuucccgaguagcuggaauuacaggugccc

SEQ ID NO: 53932 - RNA, 32 nt, Human
agcuucccgaguagcugggacuacaggcgccc

SEQ ID NO: 53933 - RNA, 32 nt, Human
agcuucccgaguagcugggacuacaggggccc

SEQ ID NO: 53934 - RNA, 32 nt, Human
agcuucccgaguagcugggacuauaggugcgu

SEQ ID NO: 53935 - RNA, 32 nt, Human
agcuucccgaguagcugggauuacagauguga

SEQ ID NO: 53936 - RNA, 32 nt, Human
agcuucccgaguagcugggauuacaggcacac

SEQ ID NO: 53937 - RNA, 32 nt, Human
agcuucccgaguagcugggauuacaggcgccu

SEQ ID NO: 53938 - RNA, 32 nt, Human
agcuucccgaguagcugggauuacaggcgugc

SEQ ID NO: 53939 - RNA, 32 nt, Human
agcuucccgaguagcugggauuacagguauga

SEQ ID NO: 53940 - RNA, 32 nt, Human
agcuucccgaguagcugggauuauaggcacac

SEQ ID NO: 53941 - RNA, 32 nt, Human
agcuucccgaguagcugggauuauaggcaccc

SEQ ID NO: 53942 - RNA, 32 nt, Human
agcuucccgggcagacacucucucccucagga

SEQ ID NO: 53943 - RNA, 32 nt, Human
agcuucccuaauagcuaggauuacaggugugu

SEQ ID NO: 53944 - RNA, 32 nt, Human
agcuucccucgaccuggggaggccguggccug

SEQ ID NO: 53945 - RNA, 17 nt, Human
agcuucccucuggacug

SEQ ID NO: 53946 - RNA, 32 nt, Human
agcuucccuggacucucauuuguucacuuuac

SEQ ID NO: 53947 - RNA, 32 nt, Human
agcuucccugucucuuccugccuguguaccuc

SEQ ID NO: 53948 - RNA, 32 nt, Human
agcuucccuucccuucuggggcugccacagca

SEQ ID NO: 53949 - RNA, 32 nt, Human
agcuuccgaaacugcuggagguuccagaguuu

SEQ ID NO: 53950 - RNA, 32 nt, Human
agcuuccgcugucccccugccuggagcaguuu

SEQ ID NO: 53951 - RNA, 32 nt, Human
agcuuccgggagaaggggccagagcccgguau

SEQ ID NO: 53952 - RNA, 32 nt, Human
agcuuccgucccugaggcaaaaggacacgagg

SEQ ID NO: 53953 - RNA, 32 nt, Human
agcuuccuaaagugcugggauuacaggcguga

SEQ ID NO: 53954 - RNA, 32 nt, Human
agcuuccuaaagugcugggauuacuggcauga

SEQ ID NO: 53955 - RNA, 32 nt, Human
agcuuccuaaauagcuggaauuacagguguga

SEQ ID NO: 53956 - RNA, 32 nt, Human
agcuuccuaaguagcugggauuacaggcgugc

SEQ ID NO: 53957 - RNA, 32 nt, Human
agcuuccuaaguagcuggguuuacaggcaccc

SEQ ID NO: 53958 - RNA, 32 nt, Human
agcuuccucaaauuggcagagcucuuugaacg

SEQ ID NO: 53959 - RNA, 32 nt, Human
agcuuccucagagcucaggagugggcugcuga

SEQ ID NO: 53960 - RNA, 32 nt, Human
agcuuccuccaccccucucuuuauaggccuag

SEQ ID NO: 53961 - RNA, 32 nt, Human
agcuuccucccuacucucuccaacaccugcau

SEQ ID NO: 53962 - RNA, 32 nt, Human
agcuuccuccuuggagaccccucagcgcaggg

SEQ ID NO: 53963 - RNA, 32 nt, Human
agcuuccucuacugcaaccaggcccguggcag

SEQ ID NO: 53964 - RNA, 32 nt, Human
agcuuccugaagugcugggauuacaggcauga

SEQ ID NO: 53965 - RNA, 32 nt, Human
agcuuccugacacuagagcugaccucacuacu

SEQ ID NO: 53966 - RNA, 32 nt, Human
agcuuccugacuagcugggacuacuggugugc

SEQ ID NO: 53967 - RNA, 32 nt, Human
agcuuccugaggagcugggauuauaggugcau

SEQ ID NO: 53968 - RNA, 32 nt, Human
agcuuccugaguacugggacuacaggaagaga

SEQ ID NO: 53969 - RNA, 32 nt, Human
agcuuccugaguagaugggauuacaggcgccu

SEQ ID NO: 53970 - RNA, 32 nt, Human
agcuuccugaguagcucgggccucagggcugg

SEQ ID NO: 53971 - RNA, 32 nt, Human
agcuuccugaguagcuggaaccacaggugugu

SEQ ID NO: 53972 - RNA, 32 nt, Human
agcuuccugaguagcuggaacuacagguggug

SEQ ID NO: 53973 - RNA, 32 nt, Human
agcuuccugaguagcugggacaacagguguga

SEQ ID NO: 53974 - RNA, 32 nt, Human
agcuuccugaguagcugggacuacaggagcgc

SEQ ID NO: 53975 - RNA, 32 nt, Human
agcuuccugaguagcugggacuacaggcaccc

SEQ ID NO: 53976 - RNA, 32 nt, Human
agcuuccugaguagcugggacuacaggugcgc

SEQ ID NO: 53977 - RNA, 32 nt, Human
agcuuccugaguagcugggacuacagguguac

SEQ ID NO: 53978 - RNA, 32 nt, Human
agcuuccugaguagcugggaggacaggcaugc

SEQ ID NO: 53979 - RNA, 32 nt, Human
agcuuccugaguagcugggauuacaggagcau

SEQ ID NO: 53980 - RNA, 32 nt, Human
agcuuccugaguagcugggauuacaggugcgc

SEQ ID NO: 53981 - RNA, 32 nt, Human
agcuuccugaguaggugggacuacagaugugu

SEQ ID NO: 53982 - RNA, 32 nt, Human
agcuuccugaguaggugggauuacaagcaugc

SEQ ID NO: 53983 - RNA, 32 nt, Human
agcuuccugaugccucauucaccaggaugggu

SEQ ID NO: 53984 - RNA, 32 nt, Human
agcuuccugcagccuccuacgcaggguccacg

SEQ ID NO: 53985 - RNA, 32 nt, Human
agcuuccugcagcuugcucugacacuccugag

SEQ ID NO: 53986 - RNA, 32 nt, Human
agcuuccugccugacccuagagcucccucacc

SEQ ID NO: 53987 - RNA, 32 nt, Human
agcuuccugccugcgguguucuugcaauugcc

SEQ ID NO: 53988 - RNA, 32 nt, Human
agcuuccugccugcugucagugcuggacgaag

SEQ ID NO: 53989 - RNA, 32 nt, Human
agcuuccugccuguuacucuccacaguaugcg

SEQ ID NO: 53990 - RNA, 32 nt, Human
agcuuccugcucugucacccaggcuggagugc

SEQ ID NO: 53991 - RNA, 18 nt, Human
agcuuccuggccucccag

SEQ ID NO: 53992 - RNA, 32 nt, Human
agcuuccuggggagcaggaacagaggacaggc

SEQ ID NO: 53993 - RNA, 32 nt, Human
agcuuccugucaguaaccauguuuucaauaaa

SEQ ID NO: 53994 - RNA, 32 nt, Human
agcuuccuguucucuuuccuugacugugccau

SEQ ID NO: 53995 - RNA, 32 nt, Human
agcuuccuuagaccaggcagggcugccauggu

SEQ ID NO: 53996 - RNA, 19 nt, Human
agcuuccuucgguguggua

SEQ ID NO: 53997 - RNA, 32 nt, Human
agcuucgaggccagugggaggagggaggggcc

SEQ ID NO: 53998 - RNA, 32 nt, Human
agcuucggagagaagauuaacugacggcuucu

SEQ ID NO: 53999 - RNA, 32 nt, Human
agcuucggcaguaucacaagaagauuaaagug

SEQ ID NO: 54000 - RNA, 32 nt, Human
agcuucggcugcagccugagguguguccuggg

SEQ ID NO: 54001 - RNA, 32 nt, Human
agcuucgugucugugcuggagcugcagccugc

SEQ ID NO: 54002 - RNA, 32 nt, Human
agcuucuaagggaggaaggcagcauuggggag

SEQ ID NO: 54003 - RNA, 32 nt, Human
agcuucuacacccuucugcccucucuccauug

SEQ ID NO: 54004 - RNA, 31 nt, Human
agcuucuaggauaaauacuucugaugaaaaa

SEQ ID NO: 54005 - RNA, 32 nt, Human
agcuucuagggaggcuucaagaagcuuauaau

SEQ ID NO: 54006 - RNA, 32 nt, Human
agcuucucaaaguacugggauuauauaggcau

SEQ ID NO: 54007 - RNA, 32 nt, Human
agcuucucaaagugcugggauuacaggcguga

SEQ ID NO: 54008 - RNA, 32 nt, Human
agcuucucagccuccagaacugugagaaauaa

SEQ ID NO: 54009 - RNA, 32 nt, Human
agcuucucauacaaaugucuacuccuucauuu

SEQ ID NO: 54010 - RNA, 32 nt, Human
agcuucuccacucauggccugcccugaggacu

SEQ ID NO: 54011 - RNA, 25 nt, Human
agcuucucccagccccucuuccagg

SEQ ID NO: 54012 - RNA, 18 nt, Human
agcuucucccaggcacag

SEQ ID NO: 54013 - RNA, 32 nt, Human
agcuucucccccuuccuucccaccccaguccc

SEQ ID NO: 54014 - RNA, 32 nt, Human
agcuucucccggucauggcacacaccugugcc

SEQ ID NO: 54015 - RNA, 32 nt, Human
agcuucuccugcuccucucugccucaucuccc

SEQ ID NO: 54016 - RNA, 21 nt, Human
agcuucucgcucucgccugcc

SEQ ID NO: 54017 - RNA, 32 nt, Human
agcuucucuguuuugcaguugagauaguaacc

SEQ ID NO: 54018 - RNA, 32 nt, Human
agcuucugagacgucaugaggagauucugccu

SEQ ID NO: 54019 - RNA, 32 nt, Human
agcuucugagcaagacugagcagggaaagaaa

SEQ ID NO: 54020 - RNA, 17 nt, Human
agcuucugauccuccca

SEQ ID NO: 54021 - RNA, 32 nt, Human
agcuucugcagggcuucucuuguuuacacagc

SEQ ID NO: 54022 - RNA, 32 nt, Human
agcuucugccagcugcuuuugccaguagauua

SEQ ID NO: 54023 - RNA, 32 nt, Human
agcuucugcccagcuccugguggccuuuguag

SEQ ID NO: 54024 - RNA, 32 nt, Human
agcuucugcccagggugggugggacugagcag

SEQ ID NO: 54025 - RNA, 32 nt, Human
agcuucugccuccucaccuggccgucgguacu

SEQ ID NO: 54026 - RNA, 32 nt, Human
agcuucugcugcugcuccuccucccagccccg

SEQ ID NO: 54027 - RNA, 32 nt, Human
agcuucugggagagagcaagagaggaccuugg

SEQ ID NO: 54028 - RNA, 19 nt, Human
agcuucuggggcccaggag

SEQ ID NO: 54029 - RNA, 32 nt, Human
agcuucugggguccccagggcugucaucugaa

SEQ ID NO: 54030 - RNA, 27 nt, Human
agcuucugguuuaaacgccuccuucaa

SEQ ID NO: 54031 - RNA, 32 nt, Human
agcuucugucgcucuguaaccugcacugugac

SEQ ID NO: 54032 - RNA, 32 nt, Human
agcuucuguggacugugacgcuggcagagggg

SEQ ID NO: 54033 - RNA, 32 nt, Human
agcuucuguggcuugagagccucuggggccuu

SEQ ID NO: 54034 - RNA, 32 nt, Human
agcuucuguggggagagaaguugaaggauccc

SEQ ID NO: 54035 - RNA, 32 nt, Human
agcuucuguuuuaaggaauuucucuuccuucu

SEQ ID NO: 54036 - RNA, 22 nt, Human
agcuucuuaugguccugaggcg

SEQ ID NO: 54037 - RNA, 32 nt, Human
agcuucuuauuuuucuccacugcuuggauaug

SEQ ID NO: 54038 - RNA, 32 nt, Human
agcuucuucagaaaggagaccucccggcccuc

SEQ ID NO: 54039 - RNA, 32 nt, Human
agcuucuucagccaccuucugccugcagacaa

SEQ ID NO: 54040 - RNA, 32 nt, Human
agcuucuucucagaucuauccuguucguugga

SEQ ID NO: 54041 - RNA, 32 nt, Human
agcuucuugcccaggcagagagagcaggagcg

SEQ ID NO: 54042 - RNA, 32 nt, Human
agcuucuugggaggcugagaugggaaucacuu

SEQ ID NO: 54043 - RNA, 32 nt, Human
agcuucuuucaagacguaggucagggcaguca

SEQ ID NO: 54044 - RNA, 32 nt, Human
agcuucuuucuucaucugcaaaauggaacccc

SEQ ID NO: 54045 - RNA, 32 nt, Human
agcuucuuugcagcuuccucuucuaccauuuc

SEQ ID NO: 54046 - RNA, 32 nt, Human
agcuugaacccaguggcggaggcugcagugag

SEQ ID NO: 54047 - RNA, 32 nt, Human
agcuugaagcagcuugaggccagaccuacugu

SEQ ID NO: 54048 - RNA, 32 nt, Human
agcuugacauugugguuccucacgaaggagau

SEQ ID NO: 54049 - RNA, 21 nt, Human
agcuugaccaacauggagaaa

SEQ ID NO: 54050 - RNA, 21 nt, Human
agcuugaccaacauggugaaa

SEQ ID NO: 54051 - RNA, 32 nt, Human
agcuugaccagcccagccagggcaguggcuga

SEQ ID NO: 54052 - RNA, 32 nt, Human
agcuugaccagugucugcucgccuuugugccc

SEQ ID NO: 54053 - RNA, 32 nt, Human
agcuugaccccuggacauuugcacugacuuua

SEQ ID NO: 54054 - RNA, 32 nt, Human
agcuugaccgcuggcucgcuguguggccuugg

SEQ ID NO: 54055 - RNA, 32 nt, Human
agcuugacuauggaccaaacagcucuggccua

SEQ ID NO: 54056 - RNA, 32 nt, Human
agcuugacucuauccugggaugacugaggccu

SEQ ID NO: 54057 - RNA, 32 nt, Human
agcuugagcauucagucuucugaccuguucca

SEQ ID NO: 54058 - RNA, 32 nt, Human
agcuugaguguucuguucucuuccugcccauu

SEQ ID NO: 54059 - RNA, 32 nt, Human
agcuugaguuccugccuuucccaccacaaauu

SEQ ID NO: 54060 - RNA, 32 nt, Human
agcuugaguuugaugcagggaggaggaaggcu

SEQ ID NO: 54061 - RNA, 32 nt, Human
agcuugaugcuggcagcaacuguccaugaaga

SEQ ID NO: 54062 - RNA, 32 nt, Human
agcuugauuagaagccaagacaguggcagcaa

SEQ ID NO: 54063 - RNA, 32 nt, Human
agcuugcacaaacugggcuggguugcgacugu

SEQ ID NO: 54064 - RNA, 32 nt, Human
agcuugcaccaccaaaaauggcaaacaucacc

SEQ ID NO: 54065 - RNA, 32 nt, Human
agcuugcaccauugcacuccagccugggcgac

SEQ ID NO: 54066 - RNA, 32 nt, Human
agcuugcacuacugcacuccagccugggugac

SEQ ID NO: 54067 - RNA, 21 nt, Human
agcuugcagcagcacacccca

SEQ ID NO: 54068 - RNA, 32 nt, Human
agcuugcagccccucuuucucacacgugugau

SEQ ID NO: 54069 - RNA, 32 nt, Human
agcuugcagccucaccgacgagucucaacuaa

SEQ ID NO: 54070 - RNA, 19 nt, Human
agcuugcagggguugggga

SEQ ID NO: 54071 - RNA, 32 nt, Human
agcuugcagggguuggggagggagacauccag

SEQ ID NO: 54072 - RNA, 32 nt, Human
agcuugcaguaagccgagacugagccacugca

SEQ ID NO: 54073 - RNA, 32 nt, Human
agcuugcaguaagccgagaucgcaccacugca

SEQ ID NO: 54074 - RNA, 29 nt, Human
agcuugcaguaagccgagaucgcgccacu

SEQ ID NO: 54075 - RNA, 32 nt, Human
agcuugcagucagccgagaucacgccacugca

SEQ ID NO: 54076 - RNA, 32 nt, Human
agcuugcagugaaccgagaucugccacugcac

SEQ ID NO: 54077 - RNA, 32 nt, Human
agcuugcagugagccgagaccgugccacugca

SEQ ID NO: 54078 - RNA, 32 nt, Human
agcuugcagugagccgagacugcgccaccgcg

SEQ ID NO: 54079 - RNA, 32 nt, Human
agcuugcagugagccgagauagcgccacugca

SEQ ID NO: 54080 - RNA, 32 nt, Human
agcuugcagugagccgagauaucgccacugca

SEQ ID NO: 54081 - RNA, 32 nt, Human
agcuugcagugagccgagaucacaccaccacu

SEQ ID NO: 54082 - RNA, 31 nt, Human
agcuugcagugagccgagaucacaccacugc

SEQ ID NO: 54083 - RNA, 32 nt, Human
agcuugcagugagccgagaucacaccacugca

SEQ ID NO: 54084 - RNA, 32 nt, Human
agcuugcagugagccgagaucacgccacugca

SEQ ID NO: 54085 - RNA, 32 nt, Human
agcuugcagugagccgagaucaggccauugca

SEQ ID NO: 54086 - RNA, 32 nt, Human
agcuugcagugagccgagaucaugccacaccg

SEQ ID NO: 54087 - RNA, 32 nt, Human
agcuugcagugagccgagaucaugccacugca

SEQ ID NO: 54088 - RNA, 32 nt, Human
agcuugcagugagccgagaucccgccacugca

SEQ ID NO: 54089 - RNA, 32 nt, Human
agcuugcagugagccgagaucgcaccacugca

SEQ ID NO: 54090 - RNA, 32 nt, Human
agcuugcagugagccgagaucgcgccaaugca

SEQ ID NO: 54091 - RNA, 32 nt, Human
agcuugcagugagccgagaucgcgccaccaca

SEQ ID NO: 54092 - RNA, 32 nt, Human
agcuugcagugagccgagaucgcgccaccgca

SEQ ID NO: 54093 - RNA, 32 nt, Human
agcuugcagugagccgagaucgcgccacggca

SEQ ID NO: 54094 - RNA, 32 nt, Human
agcuugcagugagccgagaucgcgccacugca

SEQ ID NO: 54095 - RNA, 32 nt, Human
agcuugcagugagccgagaucgcgccaucaca

SEQ ID NO: 54096 - RNA, 32 nt, Human
agcuugcagugagccgagaucgugccacugca

SEQ ID NO: 54097 - RNA, 32 nt, Human
agcuugcagugagccgagaucgugucacugca

SEQ ID NO: 54098 - RNA, 32 nt, Human
agcuugcagugagccgagauggagccacugca

SEQ ID NO: 54099 - RNA, 32 nt, Human
agcuugcagugagccgagauggcgccacugca

SEQ ID NO: 54100 - RNA, 32 nt, Human
agcuugcagugagccgagauggcgccacugcg

SEQ ID NO: 54101 - RNA, 32 nt, Human
agcuugcagugagccgagauggcgccauugca

SEQ ID NO: 54102 - RNA, 32 nt, Human
agcuugcagugagccgagauggugccacugca

SEQ ID NO: 54103 - RNA, 32 nt, Human
agcuugcagugagccgagauugcaccacagca

SEQ ID NO: 54104 - RNA, 32 nt, Human
agcuugcagugagccgagauugcaccacugca

SEQ ID NO: 54105 - RNA, 32 nt, Human
agcuugcagugagccgagauugcgccacugca

SEQ ID NO: 54106 - RNA, 32 nt, Human
agcuugcagugagccgagauugcgccacugcg

SEQ ID NO: 54107 - RNA, 32 nt, Human
agcuugcagugagccgagauugcgucacugca

SEQ ID NO: 54108 - RNA, 32 nt, Human
agcuugcagugagccgagauugugccacugca

SEQ ID NO: 54109 - RNA, 32 nt, Human
agcuugccaagcagcugggacuacaggugcgc

SEQ ID NO: 54110 - RNA, 32 nt, Human
agcuugccaagguccgugccucccagggcacc

SEQ ID NO: 54111 - RNA, 32 nt, Human
agcuugccacccccuccucucccuucacccag

SEQ ID NO: 54112 - RNA, 31 nt, Human
agcuugccacuucuccugccagggcugugcc

SEQ ID NO: 54113 - RNA, 32 nt, Human
agcuugccauccugugaguauaacuccuguau

SEQ ID NO: 54114 - RNA, 19 nt, Human
agcuugccccaccccgccc

SEQ ID NO: 54115 - RNA, 32 nt, Human
agcuugcccuccccucuccgccuaagccugcc

SEQ ID NO: 54116 - RNA, 32 nt, Human
agcuugccuccaggaccaccugcuuggagaac

SEQ ID NO: 54117 - RNA, 32 nt, Human
agcuugccugaccucccuuccugggcugggua

SEQ ID NO: 54118 - RNA, 17 nt, Human
agcuugccuuugaacug

SEQ ID NO: 54119 - RNA, 32 nt, Human
agcuugcgccuggcggggaggggugaaacacu

SEQ ID NO: 54120 - RNA, 32 nt, Human
agcuugcggaagggcgccccugccuggucuug

SEQ ID NO: 54121 - RNA, 32 nt, Human
agcuugcggggcgcaggaagggcgcgggccgc

SEQ ID NO: 54122 - RNA, 32 nt, Human
agcuugcggugagccgagauugcgcuacugca

SEQ ID NO: 54123 - RNA, 31 nt, Human
agcuugcgugcugcugggccugagcugucug

SEQ ID NO: 54124 - RNA, 32 nt, Human
agcuugcuaauaauagaaaacuacccauauuc

SEQ ID NO: 54125 - RNA, 32 nt, Human
agcuugcucauuucuguccugacacagcucac

SEQ ID NO: 54126 - RNA, 32 nt, Human
agcuugcuccccacugugccuuuguuagagca

SEQ ID NO: 54127 - RNA, 32 nt, Human
agcuugcucucugagugugucucauugauuca

SEQ ID NO: 54128 - RNA, 32 nt, Human
agcuugcugcaaacuccgccucccagguucaa

SEQ ID NO: 54129 - RNA, 32 nt, Human
agcuugcugcacaaugcagaccugugucuugc

SEQ ID NO: 54130 - RNA, 32 nt, Human
agcuugcugcagcuucagacagggagccagga

SEQ ID NO: 54131 - RNA, 32 nt, Human
agcuugcugggaaaagacaggagaaguacuga

SEQ ID NO: 54132 - RNA, 32 nt, Human
agcuugcuugaggcuugaguccugggcuaacu

SEQ ID NO: 54133 - RNA, 32 nt, Human
agcuugcuuuguugcacgccugggcaauuuca

SEQ ID NO: 54134 - RNA, 32 nt, Human
agcuugcuuuucgggcccuuuaucucuguguu

SEQ ID NO: 54135 - RNA, 32 nt, Human
agcuuggacuacaggcccugccaccacgcccg

SEQ ID NO: 54136 - RNA, 32 nt, Human
agcuuggacuacaggcgugcaccaccacaccu

SEQ ID NO: 54137 - RNA, 32 nt, Human
agcuuggacuauaggugcaugccaccaugccu

SEQ ID NO: 54138 - RNA, 32 nt, Human
agcuuggacuuagugggaguguuuacaccaug

SEQ ID NO: 54139 - RNA, 32 nt, Human
agcuuggacuuuggugggcaucugcggaugau

SEQ ID NO: 54140 - RNA, 32 nt, Human
agcuuggagauugaggugggaggaucaccuga

SEQ ID NO: 54141 - RNA, 32 nt, Human
agcuuggaggggcaaguuagguuucuauuuua

SEQ ID NO: 54142 - RNA, 32 nt, Human
agcuuggaggucccugaaccagaggcacuagg

SEQ ID NO: 54143 - RNA, 32 nt, Human
agcuuggauuacaggcacaagccaucaugacu

SEQ ID NO: 54144 - RNA, 32 nt, Human
agcuuggauuccagggaacacuguccagauuu

SEQ ID NO: 54145 - RNA, 32 nt, Human
agcuuggcaccaacaaugucucagccuuucag

SEQ ID NO: 54146 - RNA, 21 nt, Human
agcuuggccaacauagugaaa

SEQ ID NO: 54147 - RNA, 21 nt, Human
agcuuggccaacauggagaaa

SEQ ID NO: 54148 - RNA, 21 nt, Human
agcuuggccaacauggcgaaa

SEQ ID NO: 54149 - RNA, 20 nt, Human
agcuuggccaacaugggaaa

SEQ ID NO: 54150 - RNA, 21 nt, Human
agcuuggccaacauggugaaa

SEQ ID NO: 54151 - RNA, 21 nt, Human
agcuuggccaacauggugaag

SEQ ID NO: 54152 - RNA, 21 nt, Human
agcuuggccaagauggugaaa

SEQ ID NO: 54153 - RNA, 21 nt, Human
agcuuggccaauauagugaaa

SEQ ID NO: 54154 - RNA, 32 nt, Human
agcuuggcuuuuccucaccucaugccccuugc

SEQ ID NO: 54155 - RNA, 24 nt, Human
agcuugggaaaucaagguugcagu

SEQ ID NO: 54156 - RNA, 32 nt, Human
agcuugggaaaucaagguugcagugagcuaug

SEQ ID NO: 54157 - RNA, 24 nt, Human
agcuugggaagucgaggcugcagu

SEQ ID NO: 54158 - RNA, 32 nt, Human
agcuugggaucagaagucagaaguuuggaaug

SEQ ID NO: 54159 - RNA, 32 nt, Human
agcuugggcacagcagacuggccuggcccuga

SEQ ID NO: 54160 - RNA, 32 nt, Human
agcuugggcaggaaagggaugagggaguagga

SEQ ID NO: 54161 - RNA, 32 nt, Human
agcuugggccaggcuuccccuguccucccacc

SEQ ID NO: 54162 - RNA, 32 nt, Human
agcuuggggaaauauggaggggugugugucug

SEQ ID NO: 54163 - RNA, 21 nt, Human
agcuuggggacccuccagggu

SEQ ID NO: 54164 - RNA, 32 nt, Human
agcuuggggcuuggagaggaucuggaagucug

SEQ ID NO: 54165 - RNA, 32 nt, Human
agcuugggguccaauccaucugucccuggcau

SEQ ID NO: 54166 - RNA, 32 nt, Human
agcuuggggucccacggacaaugggugggaug

SEQ ID NO: 54167 - RNA, 32 nt, Human
agcuuggggugaggaagagggagggauggaca

SEQ ID NO: 54168 - RNA, 32 nt, Human
agcuugggguuucuuugguguuaccaucccag

SEQ ID NO: 54169 - RNA, 32 nt, Human
agcuugggugacagagugagacuccaucucaa

SEQ ID NO: 54170 - RNA, 32 nt, Human
agcuugguaauuacugcucauuucucaaccuu

SEQ ID NO: 54171 - RNA, 32 nt, Human
agcuuggucaucuaugacaccacaccagcaca

SEQ ID NO: 54172 - RNA, 32 nt, Human
agcuugguccucacccuccuguuccugggcuc

SEQ ID NO: 54173 - RNA, 32 nt, Human
agcuugguggcaaagcaggggugcaggggccu

SEQ ID NO: 54174 - RNA, 32 nt, Human
agcuugguucuuuaaagauuuggagaagauau

SEQ ID NO: 54175 - RNA, 32 nt, Human
agcuugguuuauaggcgcaugccaccaugccu

SEQ ID NO: 54176 - RNA, 32 nt, Human
agcuugguuucauguuacaaacagaaaagcuc

SEQ ID NO: 54177 - RNA, 32 nt, Human
agcuugguuuguuucccuaacuucugauuaac

SEQ ID NO: 54178 - RNA, 31 nt, Human
agcuuguacauuuucugagcugucagacauu

SEQ ID NO: 54179 - RNA, 32 nt, Human
agcuuguacuugucccccucuuugcccgagug

SEQ ID NO: 54180 - RNA, 32 nt, Human
agcuuguaggagacagaggaugugauggagcu

SEQ ID NO: 54181 - RNA, 32 nt, Human
agcuuguagggaggcaucaggaaguuuccaac

SEQ ID NO: 54182 - RNA, 29 nt, Human
agcuuguagguguuggcaucccccuuuuu

SEQ ID NO: 54183 - RNA, 32 nt, Human
agcuuguagugagccgagauugcgccacugca

SEQ ID NO: 54184 - RNA, 32 nt, Human
agcuuguauguaaggagguuuauauaaguaau

SEQ ID NO: 54185 - RNA, 32 nt, Human
agcuugucacccgcuggguuucuugaggucug

SEQ ID NO: 54186 - RNA, 32 nt, Human
agcuuguccaacaacuccaggaaaacuguuuu

SEQ ID NO: 54187 - RNA, 32 nt, Human
agcuugucuacugaagaauuacuccaguugua

SEQ ID NO: 54188 - RNA, 32 nt, Human
agcuugucucauccccagucuaccuccuuccu

SEQ ID NO: 54189 - RNA, 32 nt, Human
agcuugucuccucuccugucacccuaagagcc

SEQ ID NO: 54190 - RNA, 32 nt, Human
agcuugucugucucuggguccugggccagcca

SEQ ID NO: 54191 - RNA, 19 nt, Human
agcuugucuuuguguggua

SEQ ID NO: 54192 - RNA, 32 nt, Human
agcuugugacccugaugagcugugggaccuug

SEQ ID NO: 54193 - RNA, 32 nt, Human
agcuugugaggcaugagggcgcgggagccaca

SEQ ID NO: 54194 - RNA, 32 nt, Human
agcuuguggcggcagugggcaguccguggcau

SEQ ID NO: 54195 - RNA, 32 nt, Human
agcuuguggcugggaaagagggaugugcagug

SEQ ID NO: 54196 - RNA, 32 nt, Human
agcuugugggcuugcacugggggagggaaggg

SEQ ID NO: 54197 - RNA, 32 nt, Human
agcuuguggugagccgagaucgcgccacugca

SEQ ID NO: 54198 - RNA, 32 nt, Human
agcuuguguaucauccauuaucguauguaauc

SEQ ID NO: 54199 - RNA, 32 nt, Human
agcuuguguuaguuucagggagggguguauau

SEQ ID NO: 54200 - RNA, 32 nt, Human
agcuuguuccacugcaaauaaagccuuuuaaa

SEQ ID NO: 54201 - RNA, 32 nt, Human
agcuuguucccaagaggauaauucuuuauacu

SEQ ID NO: 54202 - RNA, 32 nt, Human
agcuuguucuaauuuuggccacuuuggcuguu

SEQ ID NO: 54203 - RNA, 18 nt, Human
agcuuguuuccuggacug

SEQ ID NO: 54204 - RNA, 32 nt, Human
agcuuuaaaauauaucuggaacuuuuuagauu

SEQ ID NO: 54205 - RNA, 32 nt, Human
agcuuuaaccuggauguggaggaggaugacau

SEQ ID NO: 54206 - RNA, 32 nt, Human
agcuuuaacuauagcucagcugcugcaagauu

SEQ ID NO: 54207 - RNA, 32 nt, Human
agcuuuaacucaguugugcucccuucaaacau

SEQ ID NO: 54208 - RNA, 32 nt, Human
agcuuuaagucuaaauacaaagcuguucugug

SEQ ID NO: 54209 - RNA, 17 nt, Human
agcuuuacauccuccca

SEQ ID NO: 54210 - RNA, 32 nt, Human
agcuuuaccacuaacuagcuguguggccuuga

SEQ ID NO: 54211 - RNA, 32 nt, Human
agcuuuaccacuugcuggcugugugacuuaag

SEQ ID NO: 54212 - RNA, 32 nt, Human
agcuuuacucaucuugagcuuugaggauguuc

SEQ ID NO: 54213 - RNA, 32 nt, Human
agcuuuacuguuucucaaguguuuuggagaaa

SEQ ID NO: 54214 - RNA, 32 nt, Human
agcuuuagaauagagauuuucucagaaaugug

SEQ ID NO: 54215 - RNA, 32 nt, Human
agcuuuagauagagacuuuagacccugcccug

SEQ ID NO: 54216 - RNA, 18 nt, Human
agcuuuagcuuccauggc

SEQ ID NO: 54217 - RNA, 31 nt, Human
agcuuuaggaaacuacuaaaaugcuguggga

SEQ ID NO: 54218 - RNA, 32 nt, Human
agcuuuaggauaauuguugauaguugacuuag

SEQ ID NO: 54219 - RNA, 32 nt, Human
agcuuuagggaaaaggcauuguucucucaauu

SEQ ID NO: 54220 - RNA, 32 nt, Human
agcuuuauacaauuuuucuuugugcacuaaau

SEQ ID NO: 54221 - RNA, 32 nt, Human
agcuuuaucacuauucucuuugcucacuggcu

SEQ ID NO: 54222 - RNA, 32 nt, Human
agcuuuauguucugagaagcacuuuaaggaau

SEQ ID NO: 54223 - RNA, 32 nt, Human
agcuuuauuaaauuaugcaugcuaagauuuaa

SEQ ID NO: 54224 - RNA, 32 nt, Human
agcuuuauugggcuuucuuugugucuugugug

SEQ ID NO: 54225 - RNA, 32 nt, Human
agcuuuauuuaaacugaauuuccaguauauuu

SEQ ID NO: 54226 - RNA, 32 nt, Human
agcuuucaaacacacaugcacacagcacaauu

SEQ ID NO: 54227 - RNA, 32 nt, Human
agcuuucacaguggacaguaagguccauccau

SEQ ID NO: 54228 - RNA, 32 nt, Human
agcuuucaccucugcauuccucaggcuguaaa

SEQ ID NO: 54229 - RNA, 20 nt, Human
agcuuucagagccagugaag

SEQ ID NO: 54230 - RNA, 31 nt, Human
agcuuucaguuucaaaucaaaccuuaaaaga

SEQ ID NO: 54231 - RNA, 32 nt, Human
agcuuucauguaaacugugcaccaagcaggaa

SEQ ID NO: 54232 - RNA, 32 nt, Human
agcuuuccaaguagcugagacuacaggccugu

SEQ ID NO: 54233 - RNA, 32 nt, Human
agcuuuccaaguagcugggauuacaggcaccc

SEQ ID NO: 54234 - RNA, 32 nt, Human
agcuuuccccauggagcuuacccagccugcag

SEQ ID NO: 54235 - RNA, 32 nt, Human
agcuuucccucccucacuuuuuccuuuguaaa

SEQ ID NO: 54236 - RNA, 32 nt, Human
agcuuuccggaagaaagggaucugggagcgag

SEQ ID NO: 54237 - RNA, 21 nt, Human
agcuuucgcccucugcuuuga

SEQ ID NO: 54238 - RNA, 32 nt, Human
agcuuucgucucucuauguggagggaaaaaga

SEQ ID NO: 54239 - RNA, 32 nt, Human
agcuuucuaugggaaugcuuuaguguuagcag

SEQ ID NO: 54240 - RNA, 32 nt, Human
agcuuucucaaaggaaacacauucucugagca

SEQ ID NO: 54241 - RNA, 32 nt, Human
agcuuucuccaaggaauauguaugaaauaacu

SEQ ID NO: 54242 - RNA, 32 nt, Human
agcuuucuccacccuggcucccaaggcuuggc

SEQ ID NO: 54243 - RNA, 32 nt, Human
agcuuucugaggaagagaaaauucagcgcuac

SEQ ID NO: 54244 - RNA, 32 nt, Human
agcuuucugaugcauccucugaaaucuaggug

SEQ ID NO: 54245 - RNA, 32 nt, Human
agcuuucugcauggauggucagucucuugccc

SEQ ID NO: 54246 - RNA, 20 nt, Human
agcuuucuggucaaaucuca

SEQ ID NO: 54247 - RNA, 32 nt, Human
agcuuucugguuggcagguggcagcaggaugg

SEQ ID NO: 54248 - RNA, 17 nt, Human
agcuuucuguuguccca

SEQ ID NO: 54249 - RNA, 32 nt, Human
agcuuucuuacagcgucuuugaaagugacugg

SEQ ID NO: 54250 - RNA, 32 nt, Human
agcuuucuucuccaaguccaaagagguacccg

SEQ ID NO: 54251 - RNA, 32 nt, Human
agcuuucuucuccaccaccaccaccuuccuuc

SEQ ID NO: 54252 - RNA, 16 nt, Human
agcuuucuucugacug

SEQ ID NO: 54253 - RNA, 32 nt, Human
agcuuucuucuugaacaccucauacccacagu

SEQ ID NO: 54254 - RNA, 32 nt, Human
agcuuucuuugcucacucgaugccacugaggc

SEQ ID NO: 54255 - RNA, 32 nt, Human
agcuuugaagaaacugauucaugcugcuaacu

SEQ ID NO: 54256 - RNA, 32 nt, Human
agcuuugaagauuaggaggagaaaaagaggag

SEQ ID NO: 54257 - RNA, 32 nt, Human
agcuuugaaggccgaaggcagugcaagagacu

SEQ ID NO: 54258 - RNA, 32 nt, Human
agcuuugaauauuagaucugaccaauaugggu

SEQ ID NO: 54259 - RNA, 21 nt, Human
agcuuugaaucugagcuucau

SEQ ID NO: 54260 - RNA, 32 nt, Human
agcuuugaccacugugauccagaagagaggug

SEQ ID NO: 54261 - RNA, 32 nt, Human
agcuuugacccgaaguaguugaagagcuacuu

SEQ ID NO: 54262 - RNA, 22 nt, Human
agcuuugacuuccugggcucaa

SEQ ID NO: 54263 - RNA, 32 nt, Human
agcuuugagacugugggccgccagucuagauc

SEQ ID NO: 54264 - RNA, 32 nt, Human
agcuuugagagaggaggaagagggagucugag

SEQ ID NO: 54265 - RNA, 32 nt, Human
agcuuugauucuguguacacacuccagcaugg

SEQ ID NO: 54266 - RNA, 32 nt, Human
agcuuugcaaacccauuaaggggaagaaugaa

SEQ ID NO: 54267 - RNA, 32 nt, Human
agcuuugcaauuucacuuacuacuuuuauccu

SEQ ID NO: 54268 - RNA, 32 nt, Human
agcuuugcagcaaccucugugcccagaacaua

SEQ ID NO: 54269 - RNA, 32 nt, Human
agcuuugcaggcgggggucugagaucagggug

SEQ ID NO: 54270 - RNA, 32 nt, Human
agcuuugcagguuugaaucucuguaauuuaac

SEQ ID NO: 54271 - RNA, 32 nt, Human
agcuuugcagugagugcugcucauguccuccc

SEQ ID NO: 54272 - RNA, 32 nt, Human
agcuuugcccaggauccauugcugcagcuucc

SEQ ID NO: 54273 - RNA, 32 nt, Human
agcuuugccgcuuuugugccucucacaggcgc

SEQ ID NO: 54274 - RNA, 32 nt, Human
agcuuugccuugcuuucuggacagcugaacac

SEQ ID NO: 54275 - RNA, 21 nt, Human
agcuuuggaagcugcuuucga

SEQ ID NO: 54276 - RNA, 22 nt, Human
agcuuuggacaauaacugcuuu

SEQ ID NO: 54277 - RNA, 32 nt, Human
agcuuuggacuaagaggguaagagaggcccag

SEQ ID NO: 54278 - RNA, 32 nt, Human
agcuuuggagcccagaggugcgggauucugac

SEQ ID NO: 54279 - RNA, 22 nt, Human
agcuuuggccagcagugagcgg

SEQ ID NO: 54280 - RNA, 32 nt, Human
agcuuuggcucgagaggcacagcuccaggcug

SEQ ID NO: 54281 - RNA, 32 nt, Human
agcuuuggcugguuccauuaggcaauauucag

SEQ ID NO: 54282 - RNA, 32 nt, Human
agcuuuggcuguuccaacucaccacagccucu

SEQ ID NO: 54283 - RNA, 23 nt, Human
agcuuugggaaaacuucauuccu

SEQ ID NO: 54284 - RNA, 32 nt, Human
agcuuugggaaaggggaaagagagcauggagg

SEQ ID NO: 54285 - RNA, 32 nt, Human
agcuuugggaggagacggggaggacagacugg

SEQ ID NO: 54286 - RNA, 32 nt, Human
agcuuugggaggccaaggugggaggaucgcuu

SEQ ID NO: 54287 - RNA, 32 nt, Human
agcuuugggcacauguauguccauucacuuuc

SEQ ID NO: 54288 - RNA, 22 nt, Human
agcuuugggcuuuccugcucug

SEQ ID NO: 54289 - RNA, 32 nt, Human
agcuuuggggugcugaggaaccucuaaucauc

SEQ ID NO: 54290 - RNA, 31 nt, Human
agcuuugggucaaauaacucgucuguccagg

SEQ ID NO: 54291 - RNA, 32 nt, Human
agcuuugguauucauguauauacaugcauuua

SEQ ID NO: 54292 - RNA, 32 nt, Human
agcuuugguucugccaucucucccacucugcc

SEQ ID NO: 54293 - RNA, 32 nt, Human
agcuuugucauccagagccagaacugcugcag

SEQ ID NO: 54294 - RNA, 32 nt, Human
agcuuugugcauccucucccaguggagcgauc

SEQ ID NO: 54295 - RNA, 32 nt, Human
agcuuuguggcuuugugaaauucuaaaggaau

SEQ ID NO: 54296 - RNA, 32 nt, Human
agcuuuguguggguuggaagagacugaagaua

SEQ ID NO: 54297 - RNA, 32 nt, Human
agcuuuguucaagaggacacagaaggauucug

SEQ ID NO: 54298 - RNA, 32 nt, Human
agcuuuguuuggcuaaugaaugaauuuacuaa

SEQ ID NO: 54299 - RNA, 32 nt, Human
agcuuuuacaguuucagaccucagcagcugua

SEQ ID NO: 54300 - RNA, 32 nt, Human
agcuuuuacccaagcccuuucuugccucucca

SEQ ID NO: 54301 - RNA, 32 nt, Human
agcuuuuacuaaaagauuuucagcugaaugga

SEQ ID NO: 54302 - RNA, 32 nt, Human
agcuuuuauuccccuagccacauggaacuuuu

SEQ ID NO: 54303 - RNA, 32 nt, Human
agcuuuuccacuuaguaaucacugugugcuuu

SEQ ID NO: 54304 - RNA, 32 nt, Human
agcuuuuccaguuaaauuggagcacugaacgu

SEQ ID NO: 54305 - RNA, 32 nt, Human
agcuuuuccauaucagcucaaccacgccgcca

SEQ ID NO: 54306 - RNA, 32 nt, Human
agcuuuucccaaaggccaaggaagggauggug

SEQ ID NO: 54307 - RNA, 32 nt, Human
agcuuuucccaaugcuaauuuccaaacaacaa

SEQ ID NO: 54308 - RNA, 32 nt, Human
agcuuuucccacaggcugcagggcaggaaagg

SEQ ID NO: 54309 - RNA, 32 nt, Human
agcuuuuccgcugaagcuuaacaggcauuaac

SEQ ID NO: 54310 - RNA, 32 nt, Human
agcuuuuccgugccucuccuccaccucucccu

SEQ ID NO: 54311 - RNA, 32 nt, Human
agcuuuucucacauggcaucacugugacacug

SEQ ID NO: 54312 - RNA, 32 nt, Human
agcuuuucucacccucuucugugcugggagga

SEQ ID NO: 54313 - RNA, 32 nt, Human
agcuuuucucccaccauaacaugaaaacagug

SEQ ID NO: 54314 - RNA, 32 nt, Human
agcuuuucuccuccccucugguugggagcacu

SEQ ID NO: 54315 - RNA, 32 nt, Human
agcuuuucuccuccucuugcagggcauggggc

SEQ ID NO: 54316 - RNA, 32 nt, Human
agcuuuucucuucugucaaccccacacgccuu

SEQ ID NO: 54317 - RNA, 32 nt, Human
agcuuuucugaaggagcuuuccuggcagggac

SEQ ID NO: 54318 - RNA, 32 nt, Human
agcuuuugaagauggcacaauaaccguccagu

SEQ ID NO: 54319 - RNA, 32 nt, Human
agcuuuugaugaagccauugcugaacuugaua

SEQ ID NO: 54320 - RNA, 21 nt, Human
agcuuuugccccauuauccca

SEQ ID NO: 54321 - RNA, 32 nt, Human
agcuuuuggaugaccucagcuugaguuucucc

SEQ ID NO: 54322 - RNA, 21 nt, Human
agcuuuugguagccgauucca

SEQ ID NO: 54323 - RNA, 32 nt, Human
agcuuuugucuccagugcaugaucucauauuu

SEQ ID NO: 54324 - RNA, 32 nt, Human
agcuuuuuaaauaucuuuuuccuucuacuccu

SEQ ID NO: 54325 - RNA, 32 nt, Human
agcuuuuuauucagauucucuuuguggccaga

SEQ ID NO: 54326 - RNA, 32 nt, Human
agcuuuuucacuccacugcccuaggggaguuc

SEQ ID NO: 54327 - RNA, 32 nt, Human
agcuuuuucauaauuaaaucuuauccaagaau

SEQ ID NO: 54328 - RNA, 32 nt, Human
agcuuuuuccagcagaacauguucccucaucu

SEQ ID NO: 54329 - RNA, 32 nt, Human
agcuuuuuccggcuaugcuucugugauaugga

SEQ ID NO: 54330 - RNA, 32 nt, Human
agcuuuuucuaacuucucaaguucuagagaaa

SEQ ID NO: 54331 - RNA, 32 nt, Human
agcuuuuucuuuccuuccuuccuuccucucuu

SEQ ID NO: 54332 - RNA, 32 nt, Human
agcuuuuuggaagaaagaacaagcuucuuuug

SEQ ID NO: 54333 - RNA, 32 nt, Human
aggaaaaaccaaaaaccaggaacaacccggau

SEQ ID NO: 54334 - RNA, 32 nt, Human
aggaaaaacuauuuaauacaugaccuagggga

SEQ ID NO: 54335 - RNA, 32 nt, Human
aggaaaaacucauguuccaguauauuucucuu

SEQ ID NO: 54336 - RNA, 32 nt, Human
aggaaaaacucuagagcaaagcagaggaacgg

SEQ ID NO: 54337 - RNA, 23 nt, Human
aggaaaaacuucagagccuaaga

SEQ ID NO: 54338 - RNA, 23 nt, Human
aggaaaaacuuguuacugaaaga

SEQ ID NO: 54339 - RNA, 32 nt, Human
aggaaaaacuuucuuccucucucuccaagagg

SEQ ID NO: 54340 - RNA, 32 nt, Human
aggaaaaagcuuuacucuuucaugccauuuua

SEQ ID NO: 54341 - RNA, 32 nt, Human
aggaaaaaguugaguaaauuucuugucauaua

SEQ ID NO: 54342 - RNA, 32 nt, Human
aggaaaaauauuaggaauaaaauaugauaaaa

SEQ ID NO: 54343 - RNA, 32 nt, Human
aggaaaaauggaaacauuuauuccuuugcaua

SEQ ID NO: 54344 - RNA, 32 nt, Human
aggaaaaauuagcucuuugaagagaaaguagu

SEQ ID NO: 54345 - RNA, 32 nt, Human
aggaaaacaaaacccaaagcuuuucaaacuuc

SEQ ID NO: 54346 - RNA, 32 nt, Human
aggaaaacacagcuccccagacuggaggcugg

SEQ ID NO: 54347 - RNA, 32 nt, Human
aggaaaacaugcuaguuuuaugcagggcauuc

SEQ ID NO: 54348 - RNA, 32 nt, Human
aggaaaaccaacaugaaacaccaaauagugug

SEQ ID NO: 54349 - RNA, 32 nt, Human
aggaaaaccagaaacgccuugccuucagcuga

SEQ ID NO: 54350 - RNA, 32 nt, Human
aggaaaaccgaguaaaggagguuauucauaag

SEQ ID NO: 54351 - RNA, 32 nt, Human
aggaaaacgaggagggagggagagggaaauug

SEQ ID NO: 54352 - RNA, 32 nt, Human
aggaaaacgguacaaacacgacacugaaauuc

SEQ ID NO: 54353 - RNA, 32 nt, Human
aggaaaacucaaaucuuuggcaaccaaggaaa

SEQ ID NO: 54354 - RNA, 32 nt, Human
aggaaaacucccucuucgucaugccaacguga

SEQ ID NO: 54355 - RNA, 32 nt, Human
aggaaaacuguuaagagaaaugagcacgcaug

SEQ ID NO: 54356 - RNA, 32 nt, Human
aggaaaagaaacagcagcagguuugauauuca

SEQ ID NO: 54357 - RNA, 32 nt, Human
aggaaaagaacaguuguaauuuguguaaacuc

SEQ ID NO: 54358 - RNA, 21 nt, Human
aggaaaagaacauuccaggca

SEQ ID NO: 54359 - RNA, 32 nt, Human
aggaaaagaagagacuaggaaagcugggccca

SEQ ID NO: 54360 - RNA, 32 nt, Human
aggaaaagacaauacccuucaaacuuugagag

SEQ ID NO: 54361 - RNA, 32 nt, Human
aggaaaagacuuauauaagaagaaaagcauuu

SEQ ID NO: 54362 - RNA, 32 nt, Human
aggaaaagagggagauuuccaggccuggguaa

SEQ ID NO: 54363 - RNA, 18 nt, Human
aggaaaagcagggcccug

SEQ ID NO: 54364 - RNA, 32 nt, Human
aggaaaagcaguuggaggucucuuccagauug

SEQ ID NO: 54365 - RNA, 32 nt, Human
aggaaaagcccaaacuccuuccacccuccagg

SEQ ID NO: 54366 - RNA, 32 nt, Human
aggaaaagcugaugcuaccugcuguggccgau

SEQ ID NO: 54367 - RNA, 32 nt, Human
aggaaaagcugauguugugcagugccaaacua

SEQ ID NO: 54368 - RNA, 32 nt, Human
aggaaaagcuguucccaugucuaacaggacuu

SEQ ID NO: 54369 - RNA, 32 nt, Human
aggaaaaggagagggaagagguagaggaugag

SEQ ID NO: 54370 - RNA, 32 nt, Human
aggaaaagggcucugcagagcuugcacauaaa

SEQ ID NO: 54371 - RNA, 20 nt, Human
aggaaaaggggacaggaaca

SEQ ID NO: 54372 - RNA, 32 nt, Human
aggaaaaggggcuuucaagccauguugaagug

SEQ ID NO: 54373 - RNA, 32 nt, Human
aggaaaagguuccuguaacaaaugugguuauc

SEQ ID NO: 54374 - RNA, 32 nt, Human
aggaaaagugaaaucagagaggcguacccuag

SEQ ID NO: 54375 - RNA, 32 nt, Human
aggaaaagugaauugcaccaucaaagaacaaa

SEQ ID NO: 54376 - RNA, 32 nt, Human
aggaaaauacaaaugcacagacugucagcaug

SEQ ID NO: 54377 - RNA, 17 nt, Human
aggaaaauccucuggcu

SEQ ID NO: 54378 - RNA, 32 nt, Human
aggaaaaucgguuccaaggacagcugccaaga

SEQ ID NO: 54379 - RNA, 32 nt, Human
aggaaaaugggcagcugucuucugccuaaugu

SEQ ID NO: 54380 - RNA, 32 nt, Human
aggaaaauuagcugggugugguggcgcaugcc

SEQ ID NO: 54381 - RNA, 32 nt, Human
aggaaaauuaucuccccugcaaagcccgguuc

SEQ ID NO: 54382 - RNA, 32 nt, Human
aggaaaauuuguaccugccguauuuaugcuuu

SEQ ID NO: 54383 - RNA, 32 nt, Human
aggaaacaaauggucaccaauguccuucaccc

SEQ ID NO: 54384 - RNA, 32 nt, Human
aggaaacaccuccagcccgcgaccuccuccca

SEQ ID NO: 54385 - RNA, 32 nt, Human
aggaaacacugcaacuuuccuuaacagccugu

SEQ ID NO: 54386 - RNA, 31 nt, Human
aggaaacacuguuuccuacucacuuagcuua

SEQ ID NO: 54387 - RNA, 32 nt, Human
aggaaacagagggucagagugguucaguggcc

SEQ ID NO: 54388 - RNA, 32 nt, Human
aggaaacagcaacccagagaggagaacuaacc

SEQ ID NO: 54389 - RNA, 18 nt, Human
aggaaacagccuggcaaa

SEQ ID NO: 54390 - RNA, 30 nt, Human
aggaaacagcugauccugcuccuguggccu

SEQ ID NO: 54391 - RNA, 32 nt, Human
aggaaacagcuggcuaagcucaucauuguuac

SEQ ID NO: 54392 - RNA, 32 nt, Human
aggaaacaggaaagagaaagaaaaggaaggaa

SEQ ID NO: 54393 - RNA, 32 nt, Human
aggaaacaggaaauguggccgggaagcagagu

SEQ ID NO: 54394 - RNA, 32 nt, Human
aggaaacaggaagaaguauggugggggcuggg

SEQ ID NO: 54395 - RNA, 32 nt, Human
aggaaacaggaagggauaggauucaagaacag

SEQ ID NO: 54396 - RNA, 20 nt, Human
aggaaacaggaccugagaaa

SEQ ID NO: 54397 - RNA, 32 nt, Human
aggaaacaggcuccuucucuucucccaucugc

SEQ ID NO: 54398 - RNA, 32 nt, Human
aggaaacaggggcagaguaauucaggcacaug

SEQ ID NO: 54399 - RNA, 32 nt, Human
aggaaacaggggcagccuggauuuuuauggua

SEQ ID NO: 54400 - RNA, 32 nt, Human
aggaaacagguaaacagauguaauuagagaca

SEQ ID NO: 54401 - RNA, 32 nt, Human
aggaaacaguagugccuguuugaguuggcaga

SEQ ID NO: 54402 - RNA, 32 nt, Human
aggaaacaguuaaaaucuugcagcagcugcaa

SEQ ID NO: 54403 - RNA, 32 nt, Human
aggaaacaucacaaaacugagcacucuucugu

SEQ ID NO: 54404 - RNA, 32 nt, Human
aggaaacaucaucugaugaugucugggaagcg

SEQ ID NO: 54405 - RNA, 21 nt, Human
aggaaacauccacacugaaga

SEQ ID NO: 54406 - RNA, 32 nt, Human
aggaaacaugucccucagguguagaagcugca

SEQ ID NO: 54407 - RNA, 32 nt, Human
aggaaaccacaguggcacagagugcagugccu

SEQ ID NO: 54408 - RNA, 32 nt, Human
aggaaaccagcagaugcccagcuguagcugug

SEQ ID NO: 54409 - RNA, 23 nt, Human
aggaaaccagggucuuccuguuc

SEQ ID NO: 54410 - RNA, 32 nt, Human
aggaaaccauguccaaaacccuagcagcggua

SEQ ID NO: 54411 - RNA, 32 nt, Human
aggaaaccccacccuuuucuccucacugugcc

SEQ ID NO: 54412 - RNA, 32 nt, Human
aggaaaccucauuccuaccuacacuggaagga

SEQ ID NO: 54413 - RNA, 32 nt, Human
aggaaaccuguagcuucaaucaugucugguaa

SEQ ID NO: 54414 - RNA, 32 nt, Human
aggaaaccuucaggaaccuggcuucugaaaaa

SEQ ID NO: 54415 - RNA, 32 nt, Human
aggaaaccuucccauucuuaauugccuuuaau

SEQ ID NO: 54416 - RNA, 32 nt, Human
aggaaacgcccuauuuccaagcauaccuguac

SEQ ID NO: 54417 - RNA, 32 nt, Human
aggaaacggugccaccaccaaggucucagccu

SEQ ID NO: 54418 - RNA, 32 nt, Human
aggaaacgucacuuucacacacacagauggaa

SEQ ID NO: 54419 - RNA, 32 nt, Human
aggaaacgugccacagagcaguagugcgcagg

SEQ ID NO: 54420 - RNA, 18 nt, Human
aggaaacuaccucuggcu

SEQ ID NO: 54421 - RNA, 20 nt, Human
aggaaacuccagggcacugc

SEQ ID NO: 54422 - RNA, 32 nt, Human
aggaaacucuuucauaaagcacuuuuguggcc

SEQ ID NO: 54423 - RNA, 32 nt, Human
aggaaacugaacacugagaucugcugcgucac

SEQ ID NO: 54424 - RNA, 32 nt, Human
aggaaacugcccaaaguggccgcuguggagga

SEQ ID NO: 54425 - RNA, 19 nt, Human
aggaaacugcccagagcca

SEQ ID NO: 54426 - RNA, 32 nt, Human
aggaaacuggaacccagugaauacucagaacc

SEQ ID NO: 54427 - RNA, 32 nt, Human
aggaaagaaacagauccacgcacucugauacc

SEQ ID NO: 54428 - RNA, 32 nt, Human
aggaaagaaaccagauuugcuuaaaucuguuc

SEQ ID NO: 54429 - RNA, 32 nt, Human
aggaaagaaacugaagaaagaagauaauagac

SEQ ID NO: 54430 - RNA, 32 nt, Human
aggaaagaaagaaagaaaagaaaagaaaaucc

SEQ ID NO: 54431 - RNA, 32 nt, Human
aggaaagaaagaaagacuguaauaaguuaccu

SEQ ID NO: 54432 - RNA, 32 nt, Human
aggaaagaaagauccucugcugaccccuggag

SEQ ID NO: 54433 - RNA, 32 nt, Human
aggaaagaaagccaagauuuagguaaugagug

SEQ ID NO: 54434 - RNA, 32 nt, Human
aggaaagaagaaaagcgagcgaggaagacgga

SEQ ID NO: 54435 - RNA, 32 nt, Human
aggaaagaagaaaagggccaggagucagacgu

SEQ ID NO: 54436 - RNA, 23 nt, Human
aggaaagaagaccuguuuauaca

SEQ ID NO: 54437 - RNA, 32 nt, Human
aggaaagaagagagaagagagacaaagaucac

SEQ ID NO: 54438 - RNA, 32 nt, Human
aggaaagaaggaaggaaggaaggaaggaagga

SEQ ID NO: 54439 - RNA, 32 nt, Human
aggaaagaaguuaagagagugagagugagugg

SEQ ID NO: 54440 - RNA, 32 nt, Human
aggaaagacagcagugaugacacugucugucu

SEQ ID NO: 54441 - RNA, 32 nt, Human
aggaaagacuuccuggccaacaugagguuucu

SEQ ID NO: 54442 - RNA, 19 nt, Human
aggaaagagaagaaacccu

SEQ ID NO: 54443 - RNA, 32 nt, Human
aggaaagagagaaggaaggaagcugaggacuu

SEQ ID NO: 54444 - RNA, 31 nt, Human
aggaaagagagaccuuucuuguuucuggacu

SEQ ID NO: 54445 - RNA, 32 nt, Human
aggaaagagagaggaggagggggaaagagcaa

SEQ ID NO: 54446 - RNA, 32 nt, Human
aggaaagagagggaagagaggcagccugccug

SEQ ID NO: 54447 - RNA, 32 nt, Human
aggaaagagccgcucacacagagaugcgcauc

SEQ ID NO: 54448 - RNA, 24 nt, Human
aggaaagagcugguagaaggggag

SEQ ID NO: 54449 - RNA, 32 nt, Human
aggaaagaggagagaaagaaagaaagggcacg

SEQ ID NO: 54450 - RNA, 32 nt, Human
aggaaagaguuggaagccuccucaaaucugcc

SEQ ID NO: 54451 - RNA, 32 nt, Human
aggaaagauccaaaauugacacccuaacauca

SEQ ID NO: 54452 - RNA, 32 nt, Human
aggaaagaucgagaaaucaaaugaaguucucc

SEQ ID NO: 54453 - RNA, 25 nt, Human
aggaaagaugaggcaucgugccuca

SEQ ID NO: 54454 - RNA, 32 nt, Human
aggaaagaugcugccagguguaguggcucacg

SEQ ID NO: 54455 - RNA, 32 nt, Human
aggaaagcaaacagucagcagugcucaaagga

SEQ ID NO: 54456 - RNA, 32 nt, Human
aggaaagcaauuagccagagaggcagagacac

SEQ ID NO: 54457 - RNA, 32 nt, Human
aggaaagcacagaggacaaaguuaauucaaaa

SEQ ID NO: 54458 - RNA, 32 nt, Human
aggaaagcacagaggccuccuguggccugcca

SEQ ID NO: 54459 - RNA, 21 nt, Human
aggaaagcacuguuucccuca

SEQ ID NO: 54460 - RNA, 32 nt, Human
aggaaagcagagggguuccugccgcuugccuc

SEQ ID NO: 54461 - RNA, 32 nt, Human
aggaaagcagcauucuggaggggagagcuuug

SEQ ID NO: 54462 - RNA, 32 nt, Human
aggaaagcagggagccacugcauccagcacau

SEQ ID NO: 54463 - RNA, 32 nt, Human
aggaaagcauuuauacuugagauaaauuauac

SEQ ID NO: 54464 - RNA, 32 nt, Human
aggaaagccaagguggaggcugagguggcugc

SEQ ID NO: 54465 - RNA, 32 nt, Human
aggaaagccacgacaguaacccaugcgaccac

SEQ ID NO: 54466 - RNA, 32 nt, Human
aggaaagccacuccaccaguagugcugguugc

SEQ ID NO: 54467 - RNA, 22 nt, Human
aggaaagccacuggaauuguca

SEQ ID NO: 54468 - RNA, 32 nt, Human
aggaaagccagcagccccagacugcccaaaaa

SEQ ID NO: 54469 - RNA, 32 nt, Human
aggaaagcccucccccuuccccuucuguguca

SEQ ID NO: 54470 - RNA, 32 nt, Human
aggaaagccgaaggcggagcagcuggaggcga

SEQ ID NO: 54471 - RNA, 32 nt, Human
aggaaagccgucucccugcuugacucgacugc

SEQ ID NO: 54472 - RNA, 32 nt, Human
aggaaagcucaggcaagcccacccucaggcau

SEQ ID NO: 54473 - RNA, 32 nt, Human
aggaaagcugcaggaaccucgugggcuccagg

SEQ ID NO: 54474 - RNA, 32 nt, Human
aggaaaggaagcagauaccuugcaaagcaacu

SEQ ID NO: 54475 - RNA, 31 nt, Human
aggaaaggaaggagagaaagaaaagcuggaa

SEQ ID NO: 54476 - RNA, 32 nt, Human
aggaaaggacugcuucagaaacucccaauucc

SEQ ID NO: 54477 - RNA, 32 nt, Human
aggaaaggacugugaauguugcaauggaaugc

SEQ ID NO: 54478 - RNA, 32 nt, Human
aggaaaggagagaagugaugucagggacaggc

SEQ ID NO: 54479 - RNA, 25 nt, Human
aggaaaggagagggcucacuuauca

SEQ ID NO: 54480 - RNA, 32 nt, Human
aggaaaggagcagaaggucuuggugaagaagg

SEQ ID NO: 54481 - RNA, 32 nt, Human
aggaaaggaggcacagcccagagaaccccuuu

SEQ ID NO: 54482 - RNA, 32 nt, Human
aggaaaggagugaaagggaaguaggaccagag

SEQ ID NO: 54483 - RNA, 32 nt, Human
aggaaaggaugggggcugaagagcagaaggga

SEQ ID NO: 54484 - RNA, 32 nt, Human
aggaaaggauugccuuucgaugaaccccagca

SEQ ID NO: 54485 - RNA, 32 nt, Human
aggaaaggcaaauucuucucuccucuggagcu

SEQ ID NO: 54486 - RNA, 32 nt, Human
aggaaaggcagaaacacaaccacucaccaguc

SEQ ID NO: 54487 - RNA, 32 nt, Human
aggaaaggcccucugcuuuucuucccagcaaa

SEQ ID NO: 54488 - RNA, 32 nt, Human
aggaaaggcugaacagaagggcuaguguauug

SEQ ID NO: 54489 - RNA, 32 nt, Human
aggaaagggaaagguagaaaccccauagcccg

SEQ ID NO: 54490 - RNA, 32 nt, Human
aggaaagggaaaggugaggccccagaggacuu

SEQ ID NO: 54491 - RNA, 32 nt, Human
aggaaagggaagcaccuccaccagccagggca

SEQ ID NO: 54492 - RNA, 32 nt, Human
aggaaagggagaccagccugaccaauauggag

SEQ ID NO: 54493 - RNA, 32 nt, Human
aggaaagggauuaggguaggggaugacagggg

SEQ ID NO: 54494 - RNA, 32 nt, Human
aggaaagggcaggccgggugagcagacggauc

SEQ ID NO: 54495 - RNA, 19 nt, Human
aggaaagggccagaagcca

SEQ ID NO: 54496 - RNA, 32 nt, Human
aggaaagggcugcuugagaugacugugguccc

SEQ ID NO: 54497 - RNA, 32 nt, Human
aggaaagggcugcuuucggcacucugcgugga

SEQ ID NO: 54498 - RNA, 32 nt, Human
aggaaaggggcacggccucccucacagcccuu

SEQ ID NO: 54499 - RNA, 32 nt, Human
aggaaaggggcaggcggcagugcacagggauu

SEQ ID NO: 54500 - RNA, 32 nt, Human
aggaaaggggcugggugcaguggcucacaccu

SEQ ID NO: 54501 - RNA, 32 nt, Human
aggaaagggggaggcggcuggggaaggggaaa

SEQ ID NO: 54502 - RNA, 32 nt, Human
aggaaagggugccucaucccagcaaccugucc

SEQ ID NO: 54503 - RNA, 32 nt, Human
aggaaagguagaaguuguucauugccgaagaa

SEQ ID NO: 54504 - RNA, 24 nt, Human
aggaaagguuuguaaaugguguca

SEQ ID NO: 54505 - RNA, 32 nt, Human
aggaaagucguacuguucacacacacaguuug

SEQ ID NO: 54506 - RNA, 32 nt, Human
aggaaagucuugaucuccugaccucgugaucc

SEQ ID NO: 54507 - RNA, 32 nt, Human
aggaaagugccugguaggacugacggcugccu

SEQ ID NO: 54508 - RNA, 32 nt, Human
aggaaaguugacuuguagagugaucuagaaca

SEQ ID NO: 54509 - RNA, 32 nt, Human
aggaaaguuguuucaaugcuguaaguaggugu

SEQ ID NO: 54510 - RNA, 32 nt, Human
aggaaaguuugcaucuaugaaaagccaauagg

SEQ ID NO: 54511 - RNA, 32 nt, Human
aggaaauaagagcagucacaacagagugaaaa

SEQ ID NO: 54512 - RNA, 32 nt, Human
aggaaauaccuacacugcagucuaagaauauu

SEQ ID NO: 54513 - RNA, 32 nt, Human
aggaaauacuauaucacuauucaagaucaucu

SEQ ID NO: 54514 - RNA, 32 nt, Human
aggaaauacucacuucccuccacccucaacag

SEQ ID NO: 54515 - RNA, 32 nt, Human
aggaaauagaucucuuucccugacugagaaug

SEQ ID NO: 54516 - RNA, 32 nt, Human
aggaaauagaugucugcacuccuggcugcagc

SEQ ID NO: 54517 - RNA, 31 nt, Human
aggaaauaguuucagucuucauuugagcaug

SEQ ID NO: 54518 - RNA, 32 nt, Human
aggaaauauaauugugccacacacacauuacu

SEQ ID NO: 54519 - RNA, 32 nt, Human
aggaaauaucagugaagcuggacuugagcugu

SEQ ID NO: 54520 - RNA, 32 nt, Human
aggaaauaucuugccaggauaccuacccaucc

SEQ ID NO: 54521 - RNA, 32 nt, Human
aggaaauauguguaugugcauguauguguaug

SEQ ID NO: 54522 - RNA, 21 nt, Human
aggaaaucacuguacuucugg

SEQ ID NO: 54523 - RNA, 32 nt, Human
aggaaauccccacccccguccaccccagagac

SEQ ID NO: 54524 - RNA, 32 nt, Human
aggaaaucccuaaaacuuccagccucacauag

SEQ ID NO: 54525 - RNA, 32 nt, Human
aggaaaucccucaaggaccacccccuacucag

SEQ ID NO: 54526 - RNA, 32 nt, Human
aggaaaucuaucucccuaucuuggguccuuga

SEQ ID NO: 54527 - RNA, 32 nt, Human
aggaaaucucucuauggauucccucaucuccu

SEQ ID NO: 54528 - RNA, 32 nt, Human
aggaaaucucuuacacacauacagcagggucc

SEQ ID NO: 54529 - RNA, 22 nt, Human
aggaaaugaaggcacaggagca

SEQ ID NO: 54530 - RNA, 32 nt, Human
aggaaaugaauccagcagccaacucgaauccc

SEQ ID NO: 54531 - RNA, 32 nt, Human
aggaaaugaccaagcucacacaugcuggcuga

SEQ ID NO: 54532 - RNA, 32 nt, Human
aggaaaugaccaggccccagagagccugugca

SEQ ID NO: 54533 - RNA, 30 nt, Human
aggaaaugagauccauguauaaaagagaua

SEQ ID NO: 54534 - RNA, 32 nt, Human
aggaaaugccaggcauccucaguggcuuaaau

SEQ ID NO: 54535 - RNA, 19 nt, Human
aggaaauggaacaggguca

SEQ ID NO: 54536 - RNA, 22 nt, Human
aggaaauggaauugguauuuca

SEQ ID NO: 54537 - RNA, 23 nt, Human
aggaaauggaauuugacuuuuua

SEQ ID NO: 54538 - RNA, 31 nt, Human
aggaaauggacaaggucaguuugaauauccc

SEQ ID NO: 54539 - RNA, 26 nt, Human
aggaaauggagaaguuugguuuguua

SEQ ID NO: 54540 - RNA, 32 nt, Human
aggaaauggagacggagaaauggcacuaaugg

SEQ ID NO: 54541 - RNA, 21 nt, Human
aggaaauggaguugaagaugu

SEQ ID NO: 54542 - RNA, 32 nt, Human
aggaaauggcgucguggcauugaggggcaucc

SEQ ID NO: 54543 - RNA, 32 nt, Human
aggaaaugggagguggaggguuguacugugac

SEQ ID NO: 54544 - RNA, 32 nt, Human
aggaaaugggcaaggcagaguaagcaggggag

SEQ ID NO: 54545 - RNA, 32 nt, Human
aggaaaugggcuuuucaggaagugaauugaug

SEQ ID NO: 54546 - RNA, 32 nt, Human
aggaaauggugaaagcuccuaucagaacuaua

SEQ ID NO: 54547 - RNA, 32 nt, Human
aggaaaugguguuaggccccuuuuccagaaga

SEQ ID NO: 54548 - RNA, 32 nt, Human
aggaaaugguugaaaacugaagguagauggug

SEQ ID NO: 54549 - RNA, 32 nt, Human
aggaaaugucgaguuuguucaucacucugaag

SEQ ID NO: 54550 - RNA, 32 nt, Human
aggaaauguuguggaauauuuuuccaaguagu

SEQ ID NO: 54551 - RNA, 32 nt, Human
aggaaauucccugaccucucaauccucaccau

SEQ ID NO: 54552 - RNA, 32 nt, Human
aggaaauugcugucuugugcuuugugucucuc

SEQ ID NO: 54553 - RNA, 32 nt, Human
aggaaauuguaggagaugucuccugaguguga

SEQ ID NO: 54554 - RNA, 32 nt, Human
aggaaauuguagggaagaucgaugaagugguc

SEQ ID NO: 54555 - RNA, 32 nt, Human
aggaaauuugaccuccaagcagcccugacagg

SEQ ID NO: 54556 - RNA, 32 nt, Human
aggaaauuugcagcuuccaaugccucuugucu

SEQ ID NO: 54557 - RNA, 32 nt, Human
aggaacaacuggacuuuuucaaagggaccuug

SEQ ID NO: 54558 - RNA, 31 nt, Human
aggaacaagcgaccuguuuggcaaggaauac

SEQ ID NO: 54559 - RNA, 21 nt, Human
aggaacaaggagaaagcaaug

SEQ ID NO: 54560 - RNA, 32 nt, Human
aggaacaaggcccacagacuggggagcuucac

SEQ ID NO: 54561 - RNA, 32 nt, Human
aggaacaagggacucuuccauggccauggcag

SEQ ID NO: 54562 - RNA, 32 nt, Human
aggaacaagguccacagacuggggagcuucac

SEQ ID NO: 54563 - RNA, 32 nt, Human
aggaacaaguaugggaugagaucaauaagccu

SEQ ID NO: 54564 - RNA, 32 nt, Human
aggaacaagugcugggaucuggcgugugugcu

SEQ ID NO: 54565 - RNA, 32 nt, Human
aggaacacaagaacacuguucaccauucugcu

SEQ ID NO: 54566 - RNA, 24 nt, Human
aggaacacagccuuguucuucucu

SEQ ID NO: 54567 - RNA, 32 nt, Human
aggaacacagugccagugcagaaguuucucca

SEQ ID NO: 54568 - RNA, 32 nt, Human
aggaacaccacugcuuuucagcauuguacugg

SEQ ID NO: 54569 - RNA, 32 nt, Human
aggaacaccuguccaucaccuccuggauggau

SEQ ID NO: 54570 - RNA, 32 nt, Human
aggaacacuagaauccccaccucagcgugagg

SEQ ID NO: 54571 - RNA, 32 nt, Human
aggaacagaagaggaaagagagacacagcugc

SEQ ID NO: 54572 - RNA, 32 nt, Human
aggaacagaaggucuggccacccuggaaggag

SEQ ID NO: 54573 - RNA, 23 nt, Human
aggaacagagaagaggccccaga

SEQ ID NO: 54574 - RNA, 32 nt, Human
aggaacagaggugccaugcagccccggguacu

SEQ ID NO: 54575 - RNA, 32 nt, Human
aggaacagccagugggagguuccagcugagcg

SEQ ID NO: 54576 - RNA, 32 nt, Human
aggaacagcccuuuugaaagugucccaguaac

SEQ ID NO: 54577 - RNA, 32 nt, Human
aggaacagccugagauaugagcaugagcccau

SEQ ID NO: 54578 - RNA, 32 nt, Human
aggaacagccuucuccugccuccucugcaccu

SEQ ID NO: 54579 - RNA, 32 nt, Human
aggaacagcucuggucugcagcucccagugag

SEQ ID NO: 54580 - RNA, 32 nt, Human
aggaacagcucuucacucagccacaccccaca

SEQ ID NO: 54581 - RNA, 30 nt, Human
aggaacagcugauucaugcuccucccgcaa

SEQ ID NO: 54582 - RNA, 32 nt, Human
aggaacagcuuugugcuccggcuuucccucag

SEQ ID NO: 54583 - RNA, 32 nt, Human
aggaacaggaagagaagaugugggagcaggag

SEQ ID NO: 54584 - RNA, 32 nt, Human
aggaacaggaauguguuggugccugagacacc

SEQ ID NO: 54585 - RNA, 18 nt, Human
aggaacaggcaguggcug

SEQ ID NO: 54586 - RNA, 31 nt, Human
aggaacaggcguuucugacgagcgggacgca

SEQ ID NO: 54587 - RNA, 32 nt, Human
aggaacagggguuugaggggaacauggggacu

SEQ ID NO: 54588 - RNA, 32 nt, Human
aggaacagugugcuucaggaaguggguugcac

SEQ ID NO: 54589 - RNA, 32 nt, Human
aggaacaucaagaagaaccggggccuguacag

SEQ ID NO: 54590 - RNA, 32 nt, Human
aggaacaucgauaaguaguguaaaaacuugca

SEQ ID NO: 54591 - RNA, 19 nt, Human
aggaacaugcccagagcca

SEQ ID NO: 54592 - RNA, 32 nt, Human
aggaacaugcucccucccucccucccauaaaa

SEQ ID NO: 54593 - RNA, 32 nt, Human
aggaacauucgcuucucucaccaggaacauuu

SEQ ID NO: 54594 - RNA, 32 nt, Human
aggaacauugccucucuggaucugcugugacc

SEQ ID NO: 54595 - RNA, 32 nt, Human
aggaacauuuuuccuguaguagcuagagugcc

SEQ ID NO: 54596 - RNA, 32 nt, Human
aggaaccacagcguucuugcgcuugagaccgc

SEQ ID NO: 54597 - RNA, 32 nt, Human
aggaaccagcacugucucugugccugacucac

SEQ ID NO: 54598 - RNA, 32 nt, Human
aggaaccagcccugccaacaccuggauuuuag

SEQ ID NO: 54599 - RNA, 32 nt, Human
aggaaccaguaggaagaugguuaaguggguac

SEQ ID NO: 54600 - RNA, 32 nt, Human
aggaaccagugaauucuuuccuggcauuuaaa

SEQ ID NO: 54601 - RNA, 32 nt, Human
aggaaccaugaagaaacaggccaacaaaacug

SEQ ID NO: 54602 - RNA, 32 nt, Human
aggaacccaagaaaggcgcgcgacaaugguag

SEQ ID NO: 54603 - RNA, 20 nt, Human
aggaacccaaggcccuggga

SEQ ID NO: 54604 - RNA, 22 nt, Human
aggaacccaaucugccuucaug

SEQ ID NO: 54605 - RNA, 32 nt, Human
aggaacccagacuggacuucagucucccucca

SEQ ID NO: 54606 - RNA, 32 nt, Human
aggaacccaucuccagaugccaaaggacuuga

SEQ ID NO: 54607 - RNA, 21 nt, Human
aggaaccccaccccuuauguc

SEQ ID NO: 54608 - RNA, 23 nt, Human
aggaaccccaugaggaaggugua

SEQ ID NO: 54609 - RNA, 32 nt, Human
aggaacccccagggaaaaccaggcugggacag

SEQ ID NO: 54610 - RNA, 32 nt, Human
aggaacccccuccauaaaauggaccauaucgg

SEQ ID NO: 54611 - RNA, 19 nt, Human
aggaaccccucucccuucc

SEQ ID NO: 54612 - RNA, 32 nt, Human
aggaacccugcuccucucuguccugccucagg

SEQ ID NO: 54613 - RNA, 20 nt, Human
aggaacccugcuucuccuca

SEQ ID NO: 54614 - RNA, 32 nt, Human
aggaacccuggagguugagguugcagugagcu

SEQ ID NO: 54615 - RNA, 32 nt, Human
aggaaccgcugcuuggauggugccauucaggc

SEQ ID NO: 54616 - RNA, 32 nt, Human
aggaaccuauggcuggcuuuccuuagcagcaa

SEQ ID NO: 54617 - RNA, 32 nt, Human
aggaaccucagaggagggggcucuggggacug

SEQ ID NO: 54618 - RNA, 32 nt, Human
aggaaccuccagcgcugagauguggccgugag

SEQ ID NO: 54619 - RNA, 18 nt, Human
aggaaccucccuccuccu

SEQ ID NO: 54620 - RNA, 32 nt, Human
aggaaccugaaccugggaaccaugaagcugga

SEQ ID NO: 54621 - RNA, 32 nt, Human
aggaaccugccugaauuuauggcauuaguggu

SEQ ID NO: 54622 - RNA, 24 nt, Human
aggaaccugggcucugcuuccucc

SEQ ID NO: 54623 - RNA, 32 nt, Human
aggaaccuguaaucccagcuacaggggaggcu

SEQ ID NO: 54624 - RNA, 32 nt, Human
aggaaccuguucuacggccagaagaacaagua

SEQ ID NO: 54625 - RNA, 32 nt, Human
aggaaccuucgccacagacuccuguacuauua

SEQ ID NO: 54626 - RNA, 32 nt, Human
aggaaccuuugguguguggugggaagcuauca

SEQ ID NO: 54627 - RNA, 32 nt, Human
aggaaccuuugucccccaaugccugcauggau

SEQ ID NO: 54628 - RNA, 32 nt, Human
aggaacgagauggcgguucuccggaggcugag

SEQ ID NO: 54629 - RNA, 32 nt, Human
aggaacgaggucucacuauauugcccagacug

SEQ ID NO: 54630 - RNA, 32 nt, Human
aggaacgccucaucucagcagccugggcucgg

SEQ ID NO: 54631 - RNA, 32 nt, Human
aggaacgcuucauuuccuuggggcugcaguuu

SEQ ID NO: 54632 - RNA, 32 nt, Human
aggaacggagauugacaaggaggcagaggccu

SEQ ID NO: 54633 - RNA, 22 nt, Human
aggaacggcacaggcguccagg

SEQ ID NO: 54634 - RNA, 19 nt, Human
aggaacgggcagccacagg

SEQ ID NO: 54635 - RNA, 32 nt, Human
aggaacgguggaggcagaggugacaguuccca

SEQ ID NO: 54636 - RNA, 32 nt, Human
aggaacgucaaggucaugggaaauaaaggcag

SEQ ID NO: 54637 - RNA, 32 nt, Human
aggaacguguaauccucagcgugcuccagccc

SEQ ID NO: 54638 - RNA, 32 nt, Human
aggaacuaauuucuucuccuggaguugcauug

SEQ ID NO: 54639 - RNA, 32 nt, Human
aggaacuacaucugacugcucuucccauaaug

SEQ ID NO: 54640 - RNA, 32 nt, Human
aggaacuacuugccuuaaauguuaauaucaaa

SEQ ID NO: 54641 - RNA, 32 nt, Human
aggaacuaggaaucaaaacccaaaaaggccca

SEQ ID NO: 54642 - RNA, 32 nt, Human
aggaacuagguaggagaggaaggauuugagaa

SEQ ID NO: 54643 - RNA, 32 nt, Human
aggaacuagucuuucuccaagaagaacucgac

SEQ ID NO: 54644 - RNA, 32 nt, Human
aggaacuauccucugcucugccacugccccag

SEQ ID NO: 54645 - RNA, 32 nt, Human
aggaacuauuugaacagcugaagaugaagaaa

SEQ ID NO: 54646 - RNA, 31 nt, Human
aggaacucaauaaagugcuuugaaaaugcug

SEQ ID NO: 54647 - RNA, 32 nt, Human
aggaacucaccuuucaaacccugguagagcau

SEQ ID NO: 54648 - RNA, 32 nt, Human
aggaacucagaugugauuuuagccagggcuug

SEQ ID NO: 54649 - RNA, 32 nt, Human
aggaacucaguuaaaaugcaguugaagaaugu

SEQ ID NO: 54650 - RNA, 21 nt, Human
aggaacucauacagcacaaga

SEQ ID NO: 54651 - RNA, 32 nt, Human
aggaacucauuaugcuacugguuguuugggga

SEQ ID NO: 54652 - RNA, 32 nt, Human
aggaacuccaggcuugucuuggcuccaaaugg

SEQ ID NO: 54653 - RNA, 32 nt, Human
aggaacuccuggugccuuucugagccugcgug

SEQ ID NO: 54654 - RNA, 32 nt, Human
aggaacucucauaagagacucaugacuucccc

SEQ ID NO: 54655 - RNA, 32 nt, Human
aggaacugaaaaugggccccuuguacaagcug

SEQ ID NO: 54656 - RNA, 32 nt, Human
aggaacugaacccaaaggaucaccugguauuc

SEQ ID NO: 54657 - RNA, 32 nt, Human
aggaacugaauacauuuccuuuaagcaugaaa

SEQ ID NO: 54658 - RNA, 32 nt, Human
aggaacugagccagaaacgcagauugggcugg

SEQ ID NO: 54659 - RNA, 32 nt, Human
aggaacugagcgaggaaggaagggagggaaag

SEQ ID NO: 54660 - RNA, 23 nt, Human
aggaacugcccaucccaccagac

SEQ ID NO: 54661 - RNA, 32 nt, Human
aggaacuggaagaagaaaaauucccagacuca

SEQ ID NO: 54662 - RNA, 32 nt, Human
aggaacuggcaaccuucaucucacuccugagg

SEQ ID NO: 54663 - RNA, 32 nt, Human
aggaacuggccgggguccggaggcagagacgg

SEQ ID NO: 54664 - RNA, 31 nt, Human
aggaacuggcuucucuuaugccaaaggaaua

SEQ ID NO: 54665 - RNA, 32 nt, Human
aggaacugggaggcagguuuggaggcugcagu

SEQ ID NO: 54666 - RNA, 32 nt, Human
aggaacugguccugggggcaccaugguuucgg

SEQ ID NO: 54667 - RNA, 32 nt, Human
aggaacugugggcuuugggagcuuucuugggu

SEQ ID NO: 54668 - RNA, 32 nt, Human
aggaacuguguguguccuacacaauggugcua

SEQ ID NO: 54669 - RNA, 32 nt, Human
aggaacuguuuuuauccagcagugaagcucuu

SEQ ID NO: 54670 - RNA, 32 nt, Human
aggaacuuagcuuuuucaacaagcuucagaau

SEQ ID NO: 54671 - RNA, 32 nt, Human
aggaacuucacucugcugcuuccgagaaccuc

SEQ ID NO: 54672 - RNA, 32 nt, Human
aggaacuucucaucuugcugaaaauuucacca

SEQ ID NO: 54673 - RNA, 32 nt, Human
aggaacuucucuaaacuuuuugcucagaggac

SEQ ID NO: 54674 - RNA, 32 nt, Human
aggaacuugagggggacaaaauucagcccaua

SEQ ID NO: 54675 - RNA, 32 nt, Human
aggaacuuggaacaauuuccccagggacuggu

SEQ ID NO: 54676 - RNA, 32 nt, Human
aggaacuuugagaaaggcaggagaagcaaaaa

SEQ ID NO: 54677 - RNA, 32 nt, Human
aggaacuuugccucucugucccucucuguagg

SEQ ID NO: 54678 - RNA, 32 nt, Human
aggaagaaaagauuugguuuucauggcagucu

SEQ ID NO: 54679 - RNA, 32 nt, Human
aggaagaaaaggaggaaggaaggaaaagguga

SEQ ID NO: 54680 - RNA, 32 nt, Human
aggaagaaaaugaagaaggagugauugaaugu

SEQ ID NO: 54681 - RNA, 32 nt, Human
aggaagaaacaaaggcagcuguggccucggcg

SEQ ID NO: 54682 - RNA, 32 nt, Human
aggaagaaacagaagagagaaggggcgggaau

SEQ ID NO: 54683 - RNA, 32 nt, Human
aggaagaaacaggaucaaaugaauaaauggug

SEQ ID NO: 54684 - RNA, 32 nt, Human
aggaagaaagaagccaauaguagaucagucca

SEQ ID NO: 54685 - RNA, 32 nt, Human
aggaagaaagaauggcuguugggcuucuuaaa

SEQ ID NO: 54686 - RNA, 32 nt, Human
aggaagaaaggaaggaaggaaagaaggaaggg

SEQ ID NO: 54687 - RNA, 32 nt, Human
aggaagaaaggaaggaaggaaggcgagagaga

SEQ ID NO: 54688 - RNA, 20 nt, Human
aggaagaaauauuuacaaug

SEQ ID NO: 54689 - RNA, 32 nt, Human
aggaagaaaugagagucuagacucaagggaca

SEQ ID NO: 54690 - RNA, 32 nt, Human
aggaagaaccgcaguccagacaggaggcuugc

SEQ ID NO: 54691 - RNA, 32 nt, Human
aggaagaaccugccaagcuuggucaucuauga

SEQ ID NO: 54692 - RNA, 32 nt, Human
aggaagaaccuguagaagaugaccucguuccg

SEQ ID NO: 54693 - RNA, 32 nt, Human
aggaagaacgugcacacauaggcgcacacauc

SEQ ID NO: 54694 - RNA, 32 nt, Human
aggaagaacugaaaggcuuuucaaccacaaaa

SEQ ID NO: 54695 - RNA, 32 nt, Human
aggaagaagaagaaggaggaggaggaggagga

SEQ ID NO: 54696 - RNA, 32 nt, Human
aggaagaagagaagagacuugcagugaacugu

SEQ ID NO: 54697 - RNA, 32 nt, Human
aggaagaagaggagaggggagaggccaccguc

SEQ ID NO: 54698 - RNA, 32 nt, Human
aggaagaagaggaggaagauggacuuucagag

SEQ ID NO: 54699 - RNA, 32 nt, Human
aggaagaagaggaggaggaggaagaggaggag

SEQ ID NO: 54700 - RNA, 32 nt, Human
aggaagaagaggaggaggaggagaugguggcc

SEQ ID NO: 54701 - RNA, 32 nt, Human
aggaagaagaggaggaggaggaggaggaggag

SEQ ID NO: 54702 - RNA, 32 nt, Human
aggaagaagaggaggaugagaaguuggaaaga

SEQ ID NO: 54703 - RNA, 23 nt, Human
aggaagaagaggcucgccuccca

SEQ ID NO: 54704 - RNA, 32 nt, Human
aggaagaagauaagcuacuaauagaaaauguu

SEQ ID NO: 54705 - RNA, 32 nt, Human
aggaagaagaugacuaaucauucuaagaccag

SEQ ID NO: 54706 - RNA, 32 nt, Human
aggaagaagccgcggggacuggcugcgcuuga

SEQ ID NO: 54707 - RNA, 32 nt, Human
aggaagaaggggcuagggcaggggagauucuc

SEQ ID NO: 54708 - RNA, 32 nt, Human
aggaagaaguuaggaggaagaagggggaaaaa

SEQ ID NO: 54709 - RNA, 32 nt, Human
aggaagaaguugagacagggaggcaggagaca

SEQ ID NO: 54710 - RNA, 32 nt, Human
aggaagaaguugaggacggucugccuucccuc

SEQ ID NO: 54711 - RNA, 32 nt, Human
aggaagaaugauuuucuuuguacuuagguuuu

SEQ ID NO: 54712 - RNA, 32 nt, Human
aggaagaauggggccucuaaggggaguguggg

SEQ ID NO: 54713 - RNA, 32 nt, Human
aggaagaauuaguuacugacuucaccugagaa

SEQ ID NO: 54714 - RNA, 32 nt, Human
aggaagacaagccacaguuguaugguugcugc

SEQ ID NO: 54715 - RNA, 32 nt, Human
aggaagacacuggcuuuacauggguucaauug

SEQ ID NO: 54716 - RNA, 32 nt, Human
aggaagacagaacauggagaaccgucagggca

SEQ ID NO: 54717 - RNA, 20 nt, Human
aggaagacagcccaccugcc

SEQ ID NO: 54718 - RNA, 32 nt, Human
aggaagacaggaaggaaggaaggaaggaagga

SEQ ID NO: 54719 - RNA, 32 nt, Human
aggaagacauuuggaaaaugauacucuagcac

SEQ ID NO: 54720 - RNA, 32 nt, Human
aggaagaccagccuggccaacauggcgaaacc

SEQ ID NO: 54721 - RNA, 18 nt, Human
aggaagaccccgcggcgg

SEQ ID NO: 54722 - RNA, 32 nt, Human
aggaagacucuugccuuuuuccugggcaacuc

SEQ ID NO: 54723 - RNA, 32 nt, Human
aggaagacugccucuccaucgcugucagagag

SEQ ID NO: 54724 - RNA, 32 nt, Human
aggaagagaaaagaugaaccuuuaagcaaaua

SEQ ID NO: 54725 - RNA, 32 nt, Human
aggaagagaagcuucccuuaaccagaggggcc

SEQ ID NO: 54726 - RNA, 22 nt, Human
aggaagagaaugaaacuugugg

SEQ ID NO: 54727 - RNA, 32 nt, Human
aggaagagacacaccugaccagccccuccccc

SEQ ID NO: 54728 - RNA, 32 nt, Human
aggaagagaccuuuccucugacggaccacuaa

SEQ ID NO: 54729 - RNA, 24 nt, Human
aggaagagacuguggaacggugca

SEQ ID NO: 54730 - RNA, 32 nt, Human
aggaagagagacauagauauuauucuucauuu

SEQ ID NO: 54731 - RNA, 24 nt, Human
aggaagagagcaggcagccucuga

SEQ ID NO: 54732 - RNA, 24 nt, Human
aggaagagagcgaggcaucccuga

SEQ ID NO: 54733 - RNA, 32 nt, Human
aggaagagagcugagcauugauggggaugggg

SEQ ID NO: 54734 - RNA, 18 nt, Human
aggaagagagcuguguug

SEQ ID NO: 54735 - RNA, 32 nt, Human
aggaagagagggagggaggcgggaggagcgcg

SEQ ID NO: 54736 - RNA, 19 nt, Human
aggaagagaggucaccccu

SEQ ID NO: 54737 - RNA, 32 nt, Human
aggaagagaugaggaguggggguccuuuaccu

SEQ ID NO: 54738 - RNA, 32 nt, Human
aggaagagaugggcagggagagugacggggag

SEQ ID NO: 54739 - RNA, 18 nt, Human
aggaagagcagccugacu

SEQ ID NO: 54740 - RNA, 32 nt, Human
aggaagagccagacugccugugaagguauaaa

SEQ ID NO: 54741 - RNA, 32 nt, Human
aggaagagccggcgccaugguggagaaggagg

SEQ ID NO: 54742 - RNA, 32 nt, Human
aggaagagccuugccaggaccugcucccagcu

SEQ ID NO: 54743 - RNA, 32 nt, Human
aggaagaggaagaccuccagcauuggucauaa

SEQ ID NO: 54744 - RNA, 32 nt, Human
aggaagaggaagggcaaauuuguuggcugcuu

SEQ ID NO: 54745 - RNA, 32 nt, Human
aggaagaggaaggggagggaagcuucccaaga

SEQ ID NO: 54746 - RNA, 32 nt, Human
aggaagaggaaggggccucauccacugucugc

SEQ ID NO: 54747 - RNA, 24 nt, Human
aggaagaggacgggaacgguguua

SEQ ID NO: 54748 - RNA, 32 nt, Human
aggaagaggagaaaagggaauuuugucuuuau

SEQ ID NO: 54749 - RNA, 32 nt, Human
aggaagaggagaaagagggagggagaugggag

SEQ ID NO: 54750 - RNA, 32 nt, Human
aggaagaggagaaagccagagagucacucuua

SEQ ID NO: 54751 - RNA, 32 nt, Human
aggaagaggagaauaaggaggagcaggaggaa

SEQ ID NO: 54752 - RNA, 32 nt, Human
aggaagaggagacauugucuccccaguugguu

SEQ ID NO: 54753 - RNA, 32 nt, Human
aggaagaggagagagaagagauggacagaccu

SEQ ID NO: 54754 - RNA, 32 nt, Human
aggaagaggagcgggagcaggagcgcggagcg

SEQ ID NO: 54755 - RNA, 32 nt, Human
aggaagaggaggaagaaggaaagaaaaagaag

SEQ ID NO: 54756 - RNA, 32 nt, Human
aggaagaggaggaagacagugggagucaucag

SEQ ID NO: 54757 - RNA, 32 nt, Human
aggaagaggaggaggaagaggacuucucacag

SEQ ID NO: 54758 - RNA, 32 nt, Human
aggaagaggaggaggaagaggaggaagaggau

SEQ ID NO: 54759 - RNA, 32 nt, Human
aggaagaggaggaggacagcggcccucugagc

SEQ ID NO: 54760 - RNA, 32 nt, Human
aggaagaggaggaggaggaagaggggagcaca

SEQ ID NO: 54761 - RNA, 32 nt, Human
aggaagaggaggaggaggaagggagcaccagu

SEQ ID NO: 54762 - RNA, 32 nt, Human
aggaagaggaggaggaggagaccggcagcaac

SEQ ID NO: 54763 - RNA, 32 nt, Human
aggaagaggaggaggaggaggaggaagcugaa

SEQ ID NO: 54764 - RNA, 32 nt, Human
aggaagaggaggaggaggaggaggcuggguug

SEQ ID NO: 54765 - RNA, 32 nt, Human
aggaagaggagggaggagggaggccgaggagg

SEQ ID NO: 54766 - RNA, 32 nt, Human
aggaagaggagguggaggcuugaugaggaggu

SEQ ID NO: 54767 - RNA, 32 nt, Human
aggaagaggagucggaagggaggcgggguauc

SEQ ID NO: 54768 - RNA, 24 nt, Human
aggaagaggaguggggugguguca

SEQ ID NO: 54769 - RNA, 32 nt, Human
aggaagaggaugaagaugaagaauaauggcua

SEQ ID NO: 54770 - RNA, 32 nt, Human
aggaagaggcagcaggagcuguuggccuuggu

SEQ ID NO: 54771 - RNA, 32 nt, Human
aggaagaggcagcaugaggaaccagagagcuu

SEQ ID NO: 54772 - RNA, 32 nt, Human
aggaagaggcaggcacaagacaaaaugaaucu

SEQ ID NO: 54773 - RNA, 32 nt, Human
aggaagaggcuuuccagggaacacuggacauu

SEQ ID NO: 54774 - RNA, 32 nt, Human
aggaagagggauagcauuuucuauuuguccag

SEQ ID NO: 54775 - RNA, 25 nt, Human
aggaagaguacucuuuggcuuguug

SEQ ID NO: 54776 - RNA, 23 nt, Human
aggaagagugggaggaggagggg

SEQ ID NO: 54777 - RNA, 22 nt, Human
aggaagaguucuuggugguguc

SEQ ID NO: 54778 - RNA, 32 nt, Human
aggaagaguugcugagaagacuacagcaaacu

SEQ ID NO: 54779 - RNA, 32 nt, Human
aggaagaugaaacugaauguccuggaugcccg

SEQ ID NO: 54780 - RNA, 32 nt, Human
aggaagaugagagaaaauuaguaggauuaguu

SEQ ID NO: 54781 - RNA, 32 nt, Human
aggaagaugagagauggucagauggaagagag

SEQ ID NO: 54782 - RNA, 32 nt, Human
aggaagaugaggggaggaaggaggugaggcgg

SEQ ID NO: 54783 - RNA, 32 nt, Human
aggaagaugcagccccuuccuccagccugaga

SEQ ID NO: 54784 - RNA, 32 nt, Human
aggaagauggacuuucagaggagugcgaggag

SEQ ID NO: 54785 - RNA, 31 nt, Human
aggaagauggccagagcuuuguguccacugc

SEQ ID NO: 54786 - RNA, 32 nt, Human
aggaagauggccugagugugcacuuuggcucu

SEQ ID NO: 54787 - RNA, 31 nt, Human
aggaagauguuaccgaguacuucagugaauu

SEQ ID NO: 54788 - RNA, 32 nt, Human
aggaagauuccagagcacgcuguggcugacaa

SEQ ID NO: 54789 - RNA, 32 nt, Human
aggaagauucuuagguccucuucaauccagca

SEQ ID NO: 54790 - RNA, 32 nt, Human
aggaagauugagccuaggaguucgagacugac

SEQ ID NO: 54791 - RNA, 20 nt, Human
aggaagauugcuugaggcca

SEQ ID NO: 54792 - RNA, 32 nt, Human
aggaagcaacagugaacucuaccuguucugga

SEQ ID NO: 54793 - RNA, 32 nt, Human
aggaagcaacccagcagugucagagaggaugg

SEQ ID NO: 54794 - RNA, 32 nt, Human
aggaagcaacucggaagaggaaagaaaggaag

SEQ ID NO: 54795 - RNA, 32 nt, Human
aggaagcaagaaaggaaggaagaaaggguggg

SEQ ID NO: 54796 - RNA, 32 nt, Human
aggaagcaagcggagguugcagugaguugaga

SEQ ID NO: 54797 - RNA, 32 nt, Human
aggaagcaagggaaggaggaagaaaggaaaga

SEQ ID NO: 54798 - RNA, 32 nt, Human
aggaagcaaucagcuaugcauuugucucacgu

SEQ ID NO: 54799 - RNA, 32 nt, Human
aggaagcacaacugugccuuuuucugaaaauc

SEQ ID NO: 54800 - RNA, 21 nt, Human
aggaagcacaugagcgccugg

SEQ ID NO: 54801 - RNA, 21 nt, Human
aggaagcacaugcacaacuga

SEQ ID NO: 54802 - RNA, 32 nt, Human
aggaagcacgugcugggcugugccucagacag

SEQ ID NO: 54803 - RNA, 32 nt, Human
aggaagcacugaagauuggggccccgccucau

SEQ ID NO: 54804 - RNA, 32 nt, Human
aggaagcacuugccaagcuuggucaucuauga

SEQ ID NO: 54805 - RNA, 32 nt, Human
aggaagcagagagacccacagagcaggaggga

SEQ ID NO: 54806 - RNA, 32 nt, Human
aggaagcagagucuuuaaugagcaugcuaauu

SEQ ID NO: 54807 - RNA, 32 nt, Human
aggaagcagcugguuggacaggauuucuugaa

SEQ ID NO: 54808 - RNA, 32 nt, Human
aggaagcaggcaggccuuggucugagacagug

SEQ ID NO: 54809 - RNA, 32 nt, Human
aggaagcaggcuuugccacaaaugucagugca

SEQ ID NO: 54810 - RNA, 32 nt, Human
aggaagcagggaagaaauggccagaagugagc

SEQ ID NO: 54811 - RNA, 32 nt, Human
aggaagcagggagggggccgggagguuuuccu

SEQ ID NO: 54812 - RNA, 23 nt, Human
aggaagcagugauguuucugcuc

SEQ ID NO: 54813 - RNA, 32 nt, Human
aggaagcagugggaggugguggcagauaugcu

SEQ ID NO: 54814 - RNA, 32 nt, Human
aggaagcauagugccagcaucugcuucuggug

SEQ ID NO: 54815 - RNA, 32 nt, Human
aggaagcauccaggaaccccagagcaggcagu

SEQ ID NO: 54816 - RNA, 32 nt, Human
aggaagcaucugaguuugagaccauggcuguu

SEQ ID NO: 54817 - RNA, 32 nt, Human
aggaagcaugacuggggaggccucaggaaacu

SEQ ID NO: 54818 - RNA, 32 nt, Human
aggaagcauggcuggggaggccucaggaaacu

SEQ ID NO: 54819 - RNA, 32 nt, Human
aggaagcauggugcuaacaucugaucagcuug

SEQ ID NO: 54820 - RNA, 32 nt, Human
aggaagccacugcaaccaggaccggaguggag

SEQ ID NO: 54821 - RNA, 22 nt, Human
aggaagccagacuccacugcuu

SEQ ID NO: 54822 - RNA, 32 nt, Human
aggaagccauuugagucuggccacuagacauc

SEQ ID NO: 54823 - RNA, 32 nt, Human
aggaagccccuggaucuuugggguaaaaggag

SEQ ID NO: 54824 - RNA, 28 nt, Human
aggaagccgacugcugccuggucugcaa

SEQ ID NO: 54825 - RNA, 32 nt, Human
aggaagccuagagagaaagaguuggaccuccu

SEQ ID NO: 54826 - RNA, 32 nt, Human
aggaagccuccaccucauguuuucaaacuuaa

SEQ ID NO: 54827 - RNA, 32 nt, Human
aggaagccugcaacccccuccaggcucagacc

SEQ ID NO: 54828 - RNA, 22 nt, Human
aggaagccuggcugcagcuucc

SEQ ID NO: 54829 - RNA, 32 nt, Human
aggaagccugggaaccuggucuguuccuucca

SEQ ID NO: 54830 - RNA, 32 nt, Human
aggaagccugggacauauuuguaccccaucuc

SEQ ID NO: 54831 - RNA, 32 nt, Human
aggaagccuggggaaaccagagcugagaccuc

SEQ ID NO: 54832 - RNA, 32 nt, Human
aggaagccuucccauuccccuucaucugauaa

SEQ ID NO: 54833 - RNA, 32 nt, Human
aggaagccuucucaagugugcauggggaguac

SEQ ID NO: 54834 - RNA, 32 nt, Human
aggaagccuucuuauuuaucuuccugcaaaca

SEQ ID NO: 54835 - RNA, 32 nt, Human
aggaagccuuucuccccaggcacguggcuuca

SEQ ID NO: 54836 - RNA, 23 nt, Human
aggaagcgagagagcugcugcca

SEQ ID NO: 54837 - RNA, 32 nt, Human
aggaagcgagagagcugcugccacugcugcua

SEQ ID NO: 54838 - RNA, 23 nt, Human
aggaagcgaggaggcggccggcc

SEQ ID NO: 54839 - RNA, 25 nt, Human
aggaagcgaggaugcgugccugcca

SEQ ID NO: 54840 - RNA, 22 nt, Human
aggaagcgcagugacagugccu

SEQ ID NO: 54841 - RNA, 21 nt, Human
aggaagcgcgguucccagcca

SEQ ID NO: 54842 - RNA, 20 nt, Human
aggaagcggcacgccugcca

SEQ ID NO: 54843 - RNA, 21 nt, Human
aggaagcggcgccaccaacca

SEQ ID NO: 54844 - RNA, 32 nt, Human
aggaagcggcgccaccaaccagccucgcagag

SEQ ID NO: 54845 - RNA, 32 nt, Human
aggaagcgggagaagugcuggggccggagcag

SEQ ID NO: 54846 - RNA, 21 nt, Human
aggaagcgggcuccaggagca

SEQ ID NO: 54847 - RNA, 32 nt, Human
aggaagcggggcuggggaggcugcaggcauca

SEQ ID NO: 54848 - RNA, 21 nt, Human
aggaagcggugccggcagcgu

SEQ ID NO: 54849 - RNA, 28 nt, Human
aggaagcuaagugcugcuguuucuuuaa

SEQ ID NO: 54850 - RNA, 32 nt, Human
aggaagcuaugccuccccgucugucagaaugg

SEQ ID NO: 54851 - RNA, 32 nt, Human
aggaagcucagccucagccuucaggccugagc

SEQ ID NO: 54852 - RNA, 32 nt, Human
aggaagcucagccuucuccucccaagguuuga

SEQ ID NO: 54853 - RNA, 32 nt, Human
aggaagcucggagccuuugguggagccgggga

SEQ ID NO: 54854 - RNA, 32 nt, Human
aggaagcucugaggaugguugcagugaggaag

SEQ ID NO: 54855 - RNA, 32 nt, Human
aggaagcucugccgcccccucccugucccuca

SEQ ID NO: 54856 - RNA, 21 nt, Human
aggaagcucuucuuccugcuu

SEQ ID NO: 54857 - RNA, 32 nt, Human
aggaagcugaccagagcaagaucugggcaagc

SEQ ID NO: 54858 - RNA, 32 nt, Human
aggaagcugcagcugucccaucauccccagca

SEQ ID NO: 54859 - RNA, 32 nt, Human
aggaagcugcaugcaugagacccacagacucu

SEQ ID NO: 54860 - RNA, 32 nt, Human
aggaagcugggaagggagaugucagguggggu

SEQ ID NO: 54861 - RNA, 32 nt, Human
aggaagcuguaggugaggagaucuguauaaua

SEQ ID NO: 54862 - RNA, 32 nt, Human
aggaagcuguucuccccaccccaggugccuuu

SEQ ID NO: 54863 - RNA, 32 nt, Human
aggaagcuuaagaaccugcuucuuucugcagu

SEQ ID NO: 54864 - RNA, 32 nt, Human
aggaagcuuggcugagcuggccuuuuaacaua

SEQ ID NO: 54865 - RNA, 32 nt, Human
aggaaggaaagaaagaugggaggaagugcagc

SEQ ID NO: 54866 - RNA, 23 nt, Human
aggaaggaaagcgacccccuaca

SEQ ID NO: 54867 - RNA, 32 nt, Human
aggaaggaaaggaggagaaaaaugugucuuca

SEQ ID NO: 54868 - RNA, 20 nt, Human
aggaaggaaccaggcccuca

SEQ ID NO: 54869 - RNA, 31 nt, Human
aggaaggaacucaagguggcuggagauggcu

SEQ ID NO: 54870 - RNA, 31 nt, Human
aggaaggaacucaaggugguggcuggagaug

SEQ ID NO: 54871 - RNA, 32 nt, Human
aggaaggaacuugaagacuaaagauuuuacuc

SEQ ID NO: 54872 - RNA, 32 nt, Human
aggaaggaagaaugugcaagauaggccgagug

SEQ ID NO: 54873 - RNA, 23 nt, Human
aggaaggaagagagggaggcggg

SEQ ID NO: 54874 - RNA, 32 nt, Human
aggaaggaagagagguagacagauacaagaug

SEQ ID NO: 54875 - RNA, 32 nt, Human
aggaaggaagauucagucuccacugagaggug

SEQ ID NO: 54876 - RNA, 32 nt, Human
aggaaggaaggaaagaaagaaaggucagcuuu

SEQ ID NO: 54877 - RNA, 32 nt, Human
aggaaggaaggaaaggaggaaagggaaacgga

SEQ ID NO: 54878 - RNA, 32 nt, Human
aggaaggaaggaagaaggaugggucaaugaaa

SEQ ID NO: 54879 - RNA, 32 nt, Human
aggaaggaaggaaggaaggaaggaagaaagaa

SEQ ID NO: 54880 - RNA, 32 nt, Human
aggaaggaaggaaggaaggaaggaaggaagaa

SEQ ID NO: 54881 - RNA, 32 nt, Human
aggaaggaaggaaggaaggaaggaaggaagga

SEQ ID NO: 54882 - RNA, 32 nt, Human
aggaaggaaggaaggaaggaaggaaggagaaa

SEQ ID NO: 54883 - RNA, 32 nt, Human
aggaaggaaggaaggaaggaaggagaaaggaa

SEQ ID NO: 54884 - RNA, 32 nt, Human
aggaaggaaggaaggaaggagaaaggaaagga

SEQ ID NO: 54885 - RNA, 32 nt, Human
aggaaggaaggacggaaggaaggaaggaagga

SEQ ID NO: 54886 - RNA, 32 nt, Human
aggaaggaaggagcaguugguucaaucucugg

SEQ ID NO: 54887 - RNA, 32 nt, Human
aggaaggaaggagcgugaccagccuguggacu

SEQ ID NO: 54888 - RNA, 21 nt, Human
aggaaggaaggauggagacgg

SEQ ID NO: 54889 - RNA, 32 nt, Human
aggaaggaagggaggaaggaaggaagaaggau

SEQ ID NO: 54890 - RNA, 32 nt, Human
aggaaggaagggagggaaagaaaggaagaaag

SEQ ID NO: 54891 - RNA, 32 nt, Human
aggaaggaagucaaggcugcagugagcuaugg

SEQ ID NO: 54892 - RNA, 32 nt, Human
aggaaggaagugacccagacaguccagccuga

SEQ ID NO: 54893 - RNA, 32 nt, Human
aggaaggaauccccuucuuagagcagaggcac

SEQ ID NO: 54894 - RNA, 18 nt, Human
aggaaggacacacaggga

SEQ ID NO: 54895 - RNA, 32 nt, Human
aggaaggaccuugccauacuccuacaaacuua

SEQ ID NO: 54896 - RNA, 32 nt, Human
aggaaggacggaaggaaggaaggaaggaagga

SEQ ID NO: 54897 - RNA, 32 nt, Human
aggaaggacuccucucccuguggcuccaugcc

SEQ ID NO: 54898 - RNA, 32 nt, Human
aggaaggacuugcugggcucuguggccagcug

SEQ ID NO: 54899 - RNA, 32 nt, Human
aggaaggacuugggaaggggagcgagaaauug

SEQ ID NO: 54900 - RNA, 32 nt, Human
aggaaggagaaagagaaggaaagaaggagccu

SEQ ID NO: 54901 - RNA, 32 nt, Human
aggaaggagaaagaggaggagagagaaaaagg

SEQ ID NO: 54902 - RNA, 32 nt, Human
aggaaggagaaaggaaaggaaggcaggaggga

SEQ ID NO: 54903 - RNA, 32 nt, Human
aggaaggagagagugcgccggagcagcguggg

SEQ ID NO: 54904 - RNA, 32 nt, Human
aggaaggagaggaggaugaaggagaagaugac

SEQ ID NO: 54905 - RNA, 32 nt, Human
aggaaggagagggagggcaggaaggaaaagaa

SEQ ID NO: 54906 - RNA, 32 nt, Human
aggaaggagagggagggggaggauagagccca

SEQ ID NO: 54907 - RNA, 20 nt, Human
aggaaggagagggcagcggg

SEQ ID NO: 54908 - RNA, 32 nt, Human
aggaaggagagggcagcggggccgccugcagc

SEQ ID NO: 54909 - RNA, 32 nt, Human
aggaaggagagggggacgugccggccgcaucc

SEQ ID NO: 54910 - RNA, 32 nt, Human
aggaaggagauagggaaaaggggcuccuugcu

SEQ ID NO: 54911 - RNA, 32 nt, Human
aggaaggagaugauagaggaaaagcaggguga

SEQ ID NO: 54912 - RNA, 21 nt, Human
aggaaggagcacacuccaggc

SEQ ID NO: 54913 - RNA, 32 nt, Human
aggaaggagcccaggagcagaggaaguagaga

SEQ ID NO: 54914 - RNA, 21 nt, Human
aggaaggaggaaaggagaggg

SEQ ID NO: 54915 - RNA, 22 nt, Human
aggaaggaggaacacugagggg

SEQ ID NO: 54916 - RNA, 18 nt, Human
aggaaggagggagccggg

SEQ ID NO: 54917 - RNA, 32 nt, Human
aggaaggagggagggaggggcagaguggagug

SEQ ID NO: 54918 - RNA, 32 nt, Human
aggaaggaguuuucacagaaacccucccucau

SEQ ID NO: 54919 - RNA, 24 nt, Human
aggaaggcaaaucacaaggucagg

SEQ ID NO: 54920 - RNA, 32 nt, Human
aggaaggcagaacuauccgcugaggaaccugg

SEQ ID NO: 54921 - RNA, 32 nt, Human
aggaaggcagagccaccuccucuccucuccca

SEQ ID NO: 54922 - RNA, 32 nt, Human
aggaaggcagagccugagauccggcaccccau

SEQ ID NO: 54923 - RNA, 19 nt, Human
aggaaggcaggagacagga

SEQ ID NO: 54924 - RNA, 32 nt, Human
aggaaggcagggaggugcugucugcugccucc

SEQ ID NO: 54925 - RNA, 32 nt, Human
aggaaggcaggugggccccagcaaaggaguag

SEQ ID NO: 54926 - RNA, 32 nt, Human
aggaaggcaguugggccccagcaaaggagugg

SEQ ID NO: 54927 - RNA, 17 nt, Human
aggaaggccacuccaca

SEQ ID NO: 54928 - RNA, 20 nt, Human
aggaaggcgaaggaggggag

SEQ ID NO: 54929 - RNA, 23 nt, Human
aggaaggcucugaguggcuagca

SEQ ID NO: 54930 - RNA, 22 nt, Human
aggaaggcucuggugcagagca

SEQ ID NO: 54931 - RNA, 24 nt, Human
aggaaggcucugucacuccaggca

SEQ ID NO: 54932 - RNA, 32 nt, Human
aggaaggcugaggaggacaggagaagggccca

SEQ ID NO: 54933 - RNA, 32 nt, Human
aggaaggcugggugcuucuugcucugacagcc

SEQ ID NO: 54934 - RNA, 32 nt, Human
aggaaggcuggugcuucucucccaggcugucc

SEQ ID NO: 54935 - RNA, 23 nt, Human
aggaaggcuguccacgcuucagg

SEQ ID NO: 54936 - RNA, 32 nt, Human
aggaagggaaaggccugcaucuugugcucagu

SEQ ID NO: 54937 - RNA, 32 nt, Human
aggaagggaaggagggagagacgggagggagg

SEQ ID NO: 54938 - RNA, 32 nt, Human
aggaagggaaggugggacaggcaggcaggacu

SEQ ID NO: 54939 - RNA, 32 nt, Human
aggaagggaccuguggcagcucacaggcauga

SEQ ID NO: 54940 - RNA, 32 nt, Human
aggaagggagaaagggaaaaagcgggaagagu

SEQ ID NO: 54941 - RNA, 32 nt, Human
aggaagggagaagggcaggugggcagggagca

SEQ ID NO: 54942 - RNA, 32 nt, Human
aggaagggagaggcagcucuuccuucagcugg

SEQ ID NO: 54943 - RNA, 32 nt, Human
aggaagggaggaaggaaggaagaaggaugggu

SEQ ID NO: 54944 - RNA, 32 nt, Human
aggaagggagggcagagggggcuguggccguc

SEQ ID NO: 54945 - RNA, 32 nt, Human
aggaagggaguuaaagacccuccuggggcucu

SEQ ID NO: 54946 - RNA, 32 nt, Human
aggaagggcacacccuuuccucaccacccgag

SEQ ID NO: 54947 - RNA, 32 nt, Human
aggaagggcacaggggcugagcacuacagaag

SEQ ID NO: 54948 - RNA, 32 nt, Human
aggaagggcaccugagccccacugccuguccc

SEQ ID NO: 54949 - RNA, 32 nt, Human
aggaagggcaggaaggagagccugcugcaugg

SEQ ID NO: 54950 - RNA, 32 nt, Human
aggaagggcguggaccagggaggcuggggcgg

SEQ ID NO: 54951 - RNA, 32 nt, Human
aggaagggcuggguagagaagaaguuccacuu

SEQ ID NO: 54952 - RNA, 32 nt, Human
aggaagggcuguaggaauggaagcuucagggc

SEQ ID NO: 54953 - RNA, 32 nt, Human
aggaaggggaagagaaaauccaaagagcaaag

SEQ ID NO: 54954 - RNA, 32 nt, Human
aggaaggggagaaagggucccccuugcugucu

SEQ ID NO: 54955 - RNA, 32 nt, Human
aggaaggggagagggacgagacccccuguccu

SEQ ID NO: 54956 - RNA, 32 nt, Human
aggaaggggagcaaggagaggaagcucucucu

SEQ ID NO: 54957 - RNA, 32 nt, Human
aggaaggggaggucaugagccaaggaaugugg

SEQ ID NO: 54958 - RNA, 21 nt, Human
aggaaggggcagagugaguca

SEQ ID NO: 54959 - RNA, 32 nt, Human
aggaaggggcucaccugucacccuuaggcagc

SEQ ID NO: 54960 - RNA, 32 nt, Human
aggaaggggcuucaguuguuccuccauggcua

SEQ ID NO: 54961 - RNA, 32 nt, Human
aggaagggggcacugaguguccgugggggaau

SEQ ID NO: 54962 - RNA, 20 nt, Human
aggaaggggggcaaagcggg

SEQ ID NO: 54963 - RNA, 32 nt, Human
aggaaggggguuucaaccauguccccuuuccc

SEQ ID NO: 54964 - RNA, 32 nt, Human
aggaagggguaccugggcugggugcagggcca

SEQ ID NO: 54965 - RNA, 31 nt, Human
aggaaggggugaauggaaaaagaguggcaac

SEQ ID NO: 54966 - RNA, 32 nt, Human
aggaaggggugagacaaggaagaggaugucug

SEQ ID NO: 54967 - RNA, 32 nt, Human
aggaaggggugaggagagcagccagaggaaaa

SEQ ID NO: 54968 - RNA, 32 nt, Human
aggaagggguguggagguccagggagagggug

SEQ ID NO: 54969 - RNA, 20 nt, Human
aggaaggguccacuccaggc

SEQ ID NO: 54970 - RNA, 32 nt, Human
aggaaggguggagaaggagagagaaauaugug

SEQ ID NO: 54971 - RNA, 32 nt, Human
aggaagggugggaaagagcgggccaguguccu

SEQ ID NO: 54972 - RNA, 32 nt, Human
aggaagguacuaagaagacagaaacaagcaaa

SEQ ID NO: 54973 - RNA, 32 nt, Human
aggaagguaguaacuuagaaagacuuaccuuu

SEQ ID NO: 54974 - RNA, 32 nt, Human
aggaaggucagggcuccugagcagcaauaaag

SEQ ID NO: 54975 - RNA, 20 nt, Human
aggaaggucauuuggagaug

SEQ ID NO: 54976 - RNA, 19 nt, Human
aggaaggucucaugccuga

SEQ ID NO: 54977 - RNA, 32 nt, Human
aggaaggucucccauugauccuggcuucaggc

SEQ ID NO: 54978 - RNA, 32 nt, Human
aggaaggugcaggagaggaggugggcaagcuu

SEQ ID NO: 54979 - RNA, 32 nt, Human
aggaaggugccuggccaugucaccuggcugcu

SEQ ID NO: 54980 - RNA, 32 nt, Human
aggaaggugcuuagauggugagggcucuagaa

SEQ ID NO: 54981 - RNA, 32 nt, Human
aggaagguggaagaaaccaugggcaggaguag

SEQ ID NO: 54982 - RNA, 32 nt, Human
aggaaggugggaagccaucagagcaggaagau

SEQ ID NO: 54983 - RNA, 32 nt, Human
aggaagguggguggcuuuuggaagguggaaaa

SEQ ID NO: 54984 - RNA, 32 nt, Human
aggaaggugucugucugggaggauggggcagu

SEQ ID NO: 54985 - RNA, 32 nt, Human
aggaagguguuauuuucauuccuggguggcaa

SEQ ID NO: 54986 - RNA, 31 nt, Human
aggaagguugagagagaggugcuggggucug

SEQ ID NO: 54987 - RNA, 21 nt, Human
aggaagguuggaccuucauca

SEQ ID NO: 54988 - RNA, 22 nt, Human
aggaaguaaaauggcaggggca

SEQ ID NO: 54989 - RNA, 32 nt, Human
aggaaguaaacagaagcaaauauuuaccgaau

SEQ ID NO: 54990 - RNA, 32 nt, Human
aggaaguaagcaucaccucaggcacagaagaa

SEQ ID NO: 54991 - RNA, 32 nt, Human
aggaaguacaccagcugccaucuuguuggucc

SEQ ID NO: 54992 - RNA, 32 nt, Human
aggaaguacagaagaugcaggggugugguauc

SEQ ID NO: 54993 - RNA, 32 nt, Human
aggaaguacuucugaacuuuggcccugagcuc

SEQ ID NO: 54994 - RNA, 22 nt, Human
aggaaguagguuucaucuauca

SEQ ID NO: 54995 - RNA, 21 nt, Human
aggaaguauacuggucuguua

SEQ ID NO: 54996 - RNA, 32 nt, Human
aggaaguaucuauucacugugaaaaucugaaa

SEQ ID NO: 54997 - RNA, 32 nt, Human
aggaaguauuuaaaggaugauagagaccauca

SEQ ID NO: 54998 - RNA, 22 nt, Human
aggaaguauuuuuggcuuuuug

SEQ ID NO: 54999 - RNA, 32 nt, Human
aggaagucaaagcaaggaaacuauguaacaug

SEQ ID NO: 55000 - RNA, 23 nt, Human
aggaagucacaguggugcccagg

SEQ ID NO: 55001 - RNA, 32 nt, Human
aggaagucacccagcuguuucucagucccaga

SEQ ID NO: 55002 - RNA, 32 nt, Human
aggaagucaccuacgacguggcccaguauaua

SEQ ID NO: 55003 - RNA, 23 nt, Human
aggaagucagcuuuugccccagg

SEQ ID NO: 55004 - RNA, 32 nt, Human
aggaagucagcuuuugccccaggugggaaucc

SEQ ID NO: 55005 - RNA, 20 nt, Human
aggaagucaugcaucuucag

SEQ ID NO: 55006 - RNA, 21 nt, Human
aggaagucauugucauucagg

SEQ ID NO: 55007 - RNA, 23 nt, Human
aggaaguccagggacagcucccu

SEQ ID NO: 55008 - RNA, 19 nt, Human
aggaagucgagccauucca

SEQ ID NO: 55009 - RNA, 23 nt, Human
aggaagucgagccauuccaggca

SEQ ID NO: 55010 - RNA, 32 nt, Human
aggaagucugagccaccucuggcuacaccaac

SEQ ID NO: 55011 - RNA, 32 nt, Human
aggaagugaauagagccuuuaggaacuuccug

SEQ ID NO: 55012 - RNA, 32 nt, Human
aggaagugacaugcccuggagacuugugggaa

SEQ ID NO: 55013 - RNA, 23 nt, Human
aggaagugacgugcuuaucacca

SEQ ID NO: 55014 - RNA, 32 nt, Human
aggaagugagaaaaggggugaggaaagagaaa

SEQ ID NO: 55015 - RNA, 32 nt, Human
aggaagugagaggugaacucagccugggacug

SEQ ID NO: 55016 - RNA, 24 nt, Human
aggaagugaggagcgucucugcca

SEQ ID NO: 55017 - RNA, 26 nt, Human
aggaagugagucagagcccauuuuca

SEQ ID NO: 55018 - RNA, 32 nt, Human
aggaagugaguguucuuggacgaacaggcucc

SEQ ID NO: 55019 - RNA, 32 nt, Human
aggaagugcccuggagggggccagcaggucac

SEQ ID NO: 55020 - RNA, 18 nt, Human
aggaagugcuauuucuca

SEQ ID NO: 55021 - RNA, 22 nt, Human
aggaaguggaggucuaucuuca

SEQ ID NO: 55022 - RNA, 32 nt, Human
aggaaguggagucauuuugccuuugaaggcug

SEQ ID NO: 55023 - RNA, 32 nt, Human
aggaaguggaucccccucagccaccucaauuc

SEQ ID NO: 55024 - RNA, 22 nt, Human
aggaaguggcaccccuccccuc

SEQ ID NO: 55025 - RNA, 32 nt, Human
aggaagugggaaguaucucagagaaucagcua

SEQ ID NO: 55026 - RNA, 25 nt, Human
aggaagugggacggcccgccugcca

SEQ ID NO: 55027 - RNA, 32 nt, Human
aggaagugggagaaggaaggggaggacagacg

SEQ ID NO: 55028 - RNA, 32 nt, Human
aggaaguggggccaacagagaggucagcagcc

SEQ ID NO: 55029 - RNA, 32 nt, Human
aggaagugggguccagacaggaguggggagcc

SEQ ID NO: 55030 - RNA, 23 nt, Human
aggaaguggggucuggccuguug

SEQ ID NO: 55031 - RNA, 32 nt, Human
aggaagugggucaagcccugggaacccucauc

SEQ ID NO: 55032 - RNA, 31 nt, Human
aggaaguggguggacuuggaggaggaacggc

SEQ ID NO: 55033 - RNA, 31 nt, Human
aggaaguggguggcaggugugaggggaugcu

SEQ ID NO: 55034 - RNA, 32 nt, Human
aggaaguguuuguaaucccagcacuuugggag

SEQ ID NO: 55035 - RNA, 32 nt, Human
aggaaguuaauguccuggaagcauugccagag

SEQ ID NO: 55036 - RNA, 23 nt, Human
aggaaguuacugucuucccauuc

SEQ ID NO: 55037 - RNA, 32 nt, Human
aggaaguuaggagguugaggcacagccugugc

SEQ ID NO: 55038 - RNA, 32 nt, Human
aggaaguuauggcagugaugccgaggaggagg

SEQ ID NO: 55039 - RNA, 32 nt, Human
aggaaguuccucgggacacggcugcuuuggga

SEQ ID NO: 55040 - RNA, 32 nt, Human
aggaaguucugacuuuucagggcuaccuuauu

SEQ ID NO: 55041 - RNA, 32 nt, Human
aggaaguucugcuaugaggaugcagcuggccc

SEQ ID NO: 55042 - RNA, 32 nt, Human
aggaaguucuggaauuacuaggaacaggguuu

SEQ ID NO: 55043 - RNA, 32 nt, Human
aggaaguucuuucuacuuccacaggugcagcc

SEQ ID NO: 55044 - RNA, 32 nt, Human
aggaaguugcucaugggagcagaccccuagag

SEQ ID NO: 55045 - RNA, 32 nt, Human
aggaaguuggagaccuugggagcuccagggaa

SEQ ID NO: 55046 - RNA, 32 nt, Human
aggaaguugucuuuguggacucugccugcaug

SEQ ID NO: 55047 - RNA, 32 nt, Human
aggaaguugugggguuggggaggccuaggguu

SEQ ID NO: 55048 - RNA, 32 nt, Human
aggaaguuuagagccacguaaaaagcugguag

SEQ ID NO: 55049 - RNA, 32 nt, Human
aggaaguuuaggaagcagcccaggaggucugu

SEQ ID NO: 55050 - RNA, 32 nt, Human
aggaaguuuccagauucauccuguucuaccug

SEQ ID NO: 55051 - RNA, 32 nt, Human
aggaaguuuucagguccuugugauaaaaccuc

SEQ ID NO: 55052 - RNA, 32 nt, Human
aggaaguuuuggcugcugcaccaucccucugg

SEQ ID NO: 55053 - RNA, 32 nt, Human
aggaauaaaauggcaccucuccagggaaagug

SEQ ID NO: 55054 - RNA, 23 nt, Human
aggaauaaagggccuacuuacca

SEQ ID NO: 55055 - RNA, 32 nt, Human
aggaauaacugcucugagcagagaugaguggu

SEQ ID NO: 55056 - RNA, 32 nt, Human
aggaauaacuuccuuauguggaggggacccca

SEQ ID NO: 55057 - RNA, 32 nt, Human
aggaauacacauacacacacaaacauacaugu

SEQ ID NO: 55058 - RNA, 32 nt, Human
aggaauacagcgacagaccuaucugaaaaguc

SEQ ID NO: 55059 - RNA, 32 nt, Human
aggaauaccugcagcguagugaccucagaucc

SEQ ID NO: 55060 - RNA, 32 nt, Human
aggaauacuguuguaagaaagggauuguucag

SEQ ID NO: 55061 - RNA, 32 nt, Human
aggaauagagccaaaugagguaggugucugag

SEQ ID NO: 55062 - RNA, 32 nt, Human
aggaauaguggugggaggaaggggaaagggcu

SEQ ID NO: 55063 - RNA, 32 nt, Human
aggaauaucucuucucagaaggaaagaauaac

SEQ ID NO: 55064 - RNA, 20 nt, Human
aggaauauggagagaagcca

SEQ ID NO: 55065 - RNA, 32 nt, Human
aggaauauucaauauucugccuuucagaaagu

SEQ ID NO: 55066 - RNA, 32 nt, Human
aggaauauuucuccaaacacaauuagcuggcu

SEQ ID NO: 55067 - RNA, 32 nt, Human
aggaauauuuuucugccccagucgucguguug

SEQ ID NO: 55068 - RNA, 32 nt, Human
aggaaucaagagcugcccuccuuguccaccca

SEQ ID NO: 55069 - RNA, 32 nt, Human
aggaaucaaugagagaucugugaagagagagg

SEQ ID NO: 55070 - RNA, 32 nt, Human
aggaaucacuggcuguuaaucuuucaaagugu

SEQ ID NO: 55071 - RNA, 32 nt, Human
aggaaucagacuccuagcuuuuguuccagaau

SEQ ID NO: 55072 - RNA, 32 nt, Human
aggaaucagagcucuguucccaucuccacuuu

SEQ ID NO: 55073 - RNA, 32 nt, Human
aggaaucagaugguauugagauuuucaguagc

SEQ ID NO: 55074 - RNA, 32 nt, Human
aggaaucaggcacuggaucacagccauacccu

SEQ ID NO: 55075 - RNA, 32 nt, Human
aggaaucauaugcagacuauaccacuguaccc

SEQ ID NO: 55076 - RNA, 32 nt, Human
aggaaucaugaggaugagggaagaagaaagag

SEQ ID NO: 55077 - RNA, 32 nt, Human
aggaaucaugucaggccugugugugaaaggaa

SEQ ID NO: 55078 - RNA, 32 nt, Human
aggaaucauuguccuuucuccaguuuuuguuc

SEQ ID NO: 55079 - RNA, 20 nt, Human
aggaauccacccccaccccc

SEQ ID NO: 55080 - RNA, 22 nt, Human
aggaaucccagggggcagcaca

SEQ ID NO: 55081 - RNA, 32 nt, Human
aggaauccucauuuuucucugcccucucacug

SEQ ID NO: 55082 - RNA, 32 nt, Human
aggaauccugccucccugucaucccaggaggg

SEQ ID NO: 55083 - RNA, 32 nt, Human
aggaauccugccugccuucagcagagaauuca

SEQ ID NO: 55084 - RNA, 32 nt, Human
aggaauccuggagaggaggacagugacaacag

SEQ ID NO: 55085 - RNA, 32 nt, Human
aggaaucgaaaaccagccugaccaacguggag

SEQ ID NO: 55086 - RNA, 32 nt, Human
aggaaucggagccggcccugcccucucggcac

SEQ ID NO: 55087 - RNA, 32 nt, Human
aggaaucguuggcagaggaucagagaccagca

SEQ ID NO: 55088 - RNA, 24 nt, Human
aggaaucucaaaaacaaacaaaca

SEQ ID NO: 55089 - RNA, 23 nt, Human
aggaaucucaagugggacaaaca

SEQ ID NO: 55090 - RNA, 32 nt, Human
aggaaucucacccucuggggugcuggcaagga

SEQ ID NO: 55091 - RNA, 32 nt, Human
aggaaucuccagggaccagccaccccaugcuc

SEQ ID NO: 55092 - RNA, 32 nt, Human
aggaaucugagaccagccugagcaacaugaug

SEQ ID NO: 55093 - RNA, 32 nt, Human
aggaaucugagauguacuucuggacucacggg

SEQ ID NO: 55094 - RNA, 32 nt, Human
aggaaucugagcccagccugggcgacaaagca

SEQ ID NO: 55095 - RNA, 32 nt, Human
aggaaucugcaguuaaaggcucccaggugacu

SEQ ID NO: 55096 - RNA, 32 nt, Human
aggaaucugcauuuuaacuagucgcggggauu

SEQ ID NO: 55097 - RNA, 32 nt, Human
aggaaucuugccaucuugcccaggcuggucuc

SEQ ID NO: 55098 - RNA, 32 nt, Human
aggaaugaaaacacacccacgccuuggaaccg

SEQ ID NO: 55099 - RNA, 32 nt, Human
aggaaugaaagagagcucuaaccagauggaac

SEQ ID NO: 55100 - RNA, 32 nt, Human
aggaaugaaagaggagaagaaacgcaacuacc

SEQ ID NO: 55101 - RNA, 32 nt, Human
aggaaugaaagccuaaaccucuuccuuuagcu

SEQ ID NO: 55102 - RNA, 32 nt, Human
aggaaugaacuaacaccaaccaaccaaauaau

SEQ ID NO: 55103 - RNA, 32 nt, Human
aggaaugaagaacauacacuggggaaaagaua

SEQ ID NO: 55104 - RNA, 32 nt, Human
aggaaugaagagccagagacuugcugugcagg

SEQ ID NO: 55105 - RNA, 18 nt, Human
aggaaugaaguacugaca

SEQ ID NO: 55106 - RNA, 32 nt, Human
aggaaugaagucaguggacuuucuuguauauu

SEQ ID NO: 55107 - RNA, 29 nt, Human
aggaaugaccucagcuguuugcuccgugu

SEQ ID NO: 55108 - RNA, 32 nt, Human
aggaaugacuguccuugagagaaccauuaguu

SEQ ID NO: 55109 - RNA, 32 nt, Human
aggaaugagagauggcaacaaucccugucccu

SEQ ID NO: 55110 - RNA, 23 nt, Human
aggaaugagauauguggaccuca

SEQ ID NO: 55111 - RNA, 19 nt, Human
aggaaugagcaggaagcca

SEQ ID NO: 55112 - RNA, 32 nt, Human
aggaaugaggggcauuggugguuaggccgguu

SEQ ID NO: 55113 - RNA, 32 nt, Human
aggaaugcaugagagacccuggacguuuuucu

SEQ ID NO: 55114 - RNA, 32 nt, Human
aggaaugcauuuuccuuggcuucaaacauacg

SEQ ID NO: 55115 - RNA, 32 nt, Human
aggaaugccacuccagggguacaguuuuuggc

SEQ ID NO: 55116 - RNA, 32 nt, Human
aggaaugccaucaucucuaguucccagggccc

SEQ ID NO: 55117 - RNA, 32 nt, Human
aggaaugccugauucuuuaauauugccuaaau

SEQ ID NO: 55118 - RNA, 32 nt, Human
aggaaugccugggagugggggugcaggcgggc

SEQ ID NO: 55119 - RNA, 32 nt, Human
aggaaugcuguugaaaugucccuucuguccuc

SEQ ID NO: 55120 - RNA, 20 nt, Human
aggaauggaaccuggagcua

SEQ ID NO: 55121 - RNA, 32 nt, Human
aggaauggaacuccaucagggaacagggcagc

SEQ ID NO: 55122 - RNA, 31 nt, Human
aggauggggcuucucccuuacggggcucaca

SEQ ID NO: 55123 - RNA, 32 nt, Human
aggaugggggcacagccuucacccucaccccc

SEQ ID NO: 55124 - RNA, 32 nt, Human
aggauggguggagcagggaagagccaggaugg

SEQ ID NO: 55125 - RNA, 26 nt, Human
aggaugguauggaauuuuguuuguua

SEQ ID NO: 55126 - RNA, 32 nt, Human
aggaugguauuacaucagcuccauuguuugag

SEQ ID NO: 55127 - RNA, 32 nt, Human
aggauggucagcauuaggcugauggggacuga

SEQ ID NO: 55128 - RNA, 32 nt, Human
aggauggucgcauuuucccugccuaccucaca

SEQ ID NO: 55129 - RNA, 32 nt, Human
aggauggucucaaacuccugaccucgugaucc

SEQ ID NO: 55130 - RNA, 32 nt, Human
aggauggucucaaucuccugaccucauauucc

SEQ ID NO: 55131 - RNA, 32 nt, Human
aggauggucucaaucuccugaccucaugaucc

SEQ ID NO: 55132 - RNA, 32 nt, Human
aggauggucucaaucuccugaccucaugaucu

SEQ ID NO: 55133 - RNA, 32 nt, Human
aggauggucucaaucuccugaccucgugaucc

SEQ ID NO: 55134 - RNA, 32 nt, Human
aggauggucucaaucuccugacuucaugaucc

SEQ ID NO: 55135 - RNA, 32 nt, Human
aggauggucucaaucucuugaccucauuauca

SEQ ID NO: 55136 - RNA, 32 nt, Human
aggauggucuccaacuccugacuucaugaucc

SEQ ID NO: 55137 - RNA, 32 nt, Human
aggauggucuccaucuccugaccucaugaucc

SEQ ID NO: 55138 - RNA, 32 nt, Human
aggauggucuccaucuccugaccucaugaugu

SEQ ID NO: 55139 - RNA, 32 nt, Human
aggauggucuccaucucuugaccucaugaucu

SEQ ID NO: 55140 - RNA, 32 nt, Human
aggauggucucgaacuccugaccucaagugau

SEQ ID NO: 55141 - RNA, 32 nt, Human
aggauggucucgaacuccugaccucaggugau

SEQ ID NO: 55142 - RNA, 32 nt, Human
aggauggucucgaacuccugacuucaugaucc

SEQ ID NO: 55143 - RNA, 32 nt, Human
aggauggucucgaacucuugaccucagguagu

SEQ ID NO: 55144 - RNA, 32 nt, Human
aggauggucucgaacucuugaccuugugaucc

SEQ ID NO: 55145 - RNA, 32 nt, Human
aggauggucucgaacucuugacuucaugaucc

SEQ ID NO: 55146 - RNA, 32 nt, Human
aggauggucucgagucuccugaccucgugauc

SEQ ID NO: 55147 - RNA, 32 nt, Human
aggauggucucgauauccugaccuugugaucc

SEQ ID NO: 55148 - RNA, 32 nt, Human
aggauggucucgaucuccucaccucgugaucc

SEQ ID NO: 55149 - RNA, 32 nt, Human
aggauggucucgaucuccugaccucaugaucc

SEQ ID NO: 55150 - RNA, 32 nt, Human
aggauggucucgaucuccugaccucaugaucu

SEQ ID NO: 55151 - RNA, 32 nt, Human
aggauggucucgaucuccugaccuccugaugc

SEQ ID NO: 55152 - RNA, 32 nt, Human
aggauggucucgaucuccugaccucgcgaucc

SEQ ID NO: 55153 - RNA, 32 nt, Human
aggauggucucgaucuccugaccucgugaucc

SEQ ID NO: 55154 - RNA, 32 nt, Human
aggauggucucgaucuccugaccucgugaucu

SEQ ID NO: 55155 - RNA, 32 nt, Human
aggauggucucgaucuccugaccucgugaugc

SEQ ID NO: 55156 - RNA, 32 nt, Human
aggauggucucgaucuccugaccucgugaugg

SEQ ID NO: 55157 - RNA, 32 nt, Human
aggauggucucgaucuccugaccucuugaucu

SEQ ID NO: 55158 - RNA, 32 nt, Human
aggauggucucgaucuccugaccuucugaucu

SEQ ID NO: 55159 - RNA, 32 nt, Human
aggauggucucgaucuccugaccuugaaucac

SEQ ID NO: 55160 - RNA, 32 nt, Human
aggauggucucgaucuccugaccuugugaucc

SEQ ID NO: 55161 - RNA, 32 nt, Human
aggauggucucgaucuccugaccuugugaucu

SEQ ID NO: 55162 - RNA, 32 nt, Human
aggauggucucgaucuccugacuucgugaucc

SEQ ID NO: 55163 - RNA, 32 nt, Human
aggauggucucgaucuccugacuucguuaucc

SEQ ID NO: 55164 - RNA, 32 nt, Human
aggauggucucgaucuccugaucucgugaucu

SEQ ID NO: 55165 - RNA, 32 nt, Human
aggauggucucgaucucuugaccucaugaucc

SEQ ID NO: 55166 - RNA, 32 nt, Human
aggauggucucgaucucuugaccucgugaucc

SEQ ID NO: 55167 - RNA, 32 nt, Human
aggauggucucgaucucuugaccucgugaucu

SEQ ID NO: 55168 - RNA, 32 nt, Human
aggauggucucgaucucuugaccucgugauuc

SEQ ID NO: 55169 - RNA, 32 nt, Human
aggauggucucgaucucuugaccuugugaucc

SEQ ID NO: 55170 - RNA, 32 nt, Human
aggauggucucgaucugcugaccucgugaucc

SEQ ID NO: 55171 - RNA, 32 nt, Human
aggauggucucgaucuucugaccucgugaucc

SEQ ID NO: 55172 - RNA, 32 nt, Human
aggauggucucgaucuucuguccuuaaaaucc

SEQ ID NO: 55173 - RNA, 32 nt, Human
aggauggucucgauuuccugaccucgugaucc

SEQ ID NO: 55174 - RNA, 32 nt, Human
aggauggucucgauuuccugaccuugugaucc

SEQ ID NO: 55175 - RNA, 32 nt, Human
aggauggucucgcucuccugaccucgugaucc

SEQ ID NO: 55176 - RNA, 32 nt, Human
aggauggucucggucuccugaccucgugaucu

SEQ ID NO: 55177 - RNA, 32 nt, Human
aggauggucuggaucucuugaccucaggugau

SEQ ID NO: 55178 - RNA, 32 nt, Human
aggauggucuugaaccccugaccucaugaucu

SEQ ID NO: 55179 - RNA, 32 nt, Human
aggauggucuugaucuccugaccgcauaaucc

SEQ ID NO: 55180 - RNA, 32 nt, Human
aggauggucuugaucuccugaccucaugaucc

SEQ ID NO: 55181 - RNA, 32 nt, Human
aggauggucuugaucuccugaccucaugaucu

SEQ ID NO: 55182 - RNA, 32 nt, Human
aggauggucuugaucuccugaccucgugaucc

SEQ ID NO: 55183 - RNA, 32 nt, Human
aggauggucuugaucuccugaccucgugauuc

SEQ ID NO: 55184 - RNA, 32 nt, Human
aggauggucuugaucuccugaccucguggauc

SEQ ID NO: 55185 - RNA, 32 nt, Human
aggauggucuugaucuccugaccuugugaucc

SEQ ID NO: 55186 - RNA, 32 nt, Human
aggauggucuugaucuccugaccuugugaucu

SEQ ID NO: 55187 - RNA, 32 nt, Human
aggauggucuugaucucuugaccucaugaucc

SEQ ID NO: 55188 - RNA, 32 nt, Human
aggauggucuugaucucuugaccucaugaucu

SEQ ID NO: 55189 - RNA, 32 nt, Human
aggauggucuugauuuccugaccucaugaucc

SEQ ID NO: 55190 - RNA, 32 nt, Human
aggauggucuugauuuccugaccucgugaucc

SEQ ID NO: 55191 - RNA, 32 nt, Human
aggauggucuuuaucuccugaccucaugaucc

SEQ ID NO: 55192 - RNA, 32 nt, Human
aggaugguugagcucaggaguucgagaucagc

SEQ ID NO: 55193 - RNA, 32 nt, Human
aggaugguuucaaacuccuggccucaagcaau

SEQ ID NO: 55194 - RNA, 32 nt, Human
aggaugguuucaauaaaccuaauaaucugaag

SEQ ID NO: 55195 - RNA, 32 nt, Human
aggaugguuucgaucuccugaccucgugaucc

SEQ ID NO: 55196 - RNA, 32 nt, Human
aggaugguuucgaucuccugaccuugugaucc

SEQ ID NO: 55197 - RNA, 32 nt, Human
aggaugguuucggucucuugaccucaugaucu

SEQ ID NO: 55198 - RNA, 22 nt, Human
aggaugguuuggaagaugagga

SEQ ID NO: 55199 - RNA, 32 nt, Human
aggaugguuuugaucuccugacuucaugaucc

SEQ ID NO: 55200 - RNA, 32 nt, Human
aggauguagcuggucacuguucuggagcuggc

SEQ ID NO: 55201 - RNA, 32 nt, Human
aggauguaggagaaaguuguuaucauuguuuu

SEQ ID NO: 55202 - RNA, 24 nt, Human
aggaugucagccguagcccuggga

SEQ ID NO: 55203 - RNA, 32 nt, Human
aggaugucaggccuggaccuccugggcaggaa

SEQ ID NO: 55204 - RNA, 32 nt, Human
aggaugucaucuuccuucacuuuuaggguccu

SEQ ID NO: 55205 - RNA, 32 nt, Human
aggauguccccaccaucccucagcccacacuc

SEQ ID NO: 55206 - RNA, 32 nt, Human
aggaugucccccagguccugccagcugggaag

SEQ ID NO: 55207 - RNA, 32 nt, Human
aggaugugacaucugugcugugaucuggauga

SEQ ID NO: 55208 - RNA, 32 nt, Human
aggaugugcacugugacugccugguggccuuu

SEQ ID NO: 55209 - RNA, 32 nt, Human
aggaugugcuuugguguauugagucugaagag

SEQ ID NO: 55210 - RNA, 32 nt, Human
aggaugugcuuugguguauugagucugaugag

SEQ ID NO: 55211 - RNA, 32 nt, Human
aggauguggaacauaaccagcacuccagaaau

SEQ ID NO: 55212 - RNA, 32 nt, Human
aggauguggaccaccugcggccccauggggug

SEQ ID NO: 55213 - RNA, 32 nt, Human
aggauguggagccugugugcuuuggugaguca

SEQ ID NO: 55214 - RNA, 32 nt, Human
aggauguggaggggcggggcagagggguccag

SEQ ID NO: 55215 - RNA, 32 nt, Human
aggauguggcacaugacagugccugaagggcu

SEQ ID NO: 55216 - RNA, 32 nt, Human
aggauguggcucaggcugggagggacuucagu

SEQ ID NO: 55217 - RNA, 32 nt, Human
aggauguggcucuccagcuuggcuucagugug

SEQ ID NO: 55218 - RNA, 32 nt, Human
aggaugugggccccagcccaaacacaucuugu

SEQ ID NO: 55219 - RNA, 32 nt, Human
aggauguggggcgagggcacagcuggggaacg

SEQ ID NO: 55220 - RNA, 29 nt, Human
aggaugugucugucuuugucacgguggac

SEQ ID NO: 55221 - RNA, 32 nt, Human
aggauguguuugcuucuucuucugccaugauu

SEQ ID NO: 55222 - RNA, 32 nt, Human
aggauguucagcaccucugccuugcagggugc

SEQ ID NO: 55223 - RNA, 32 nt, Human
aggauguucucaucucaccauucuacucauuu

SEQ ID NO: 55224 - RNA, 32 nt, Human
aggauguucucgaacuccugaacucaaguaau

SEQ ID NO: 55225 - RNA, 32 nt, Human
aggauguucucgaucuccugaccucaugaucc

SEQ ID NO: 55226 - RNA, 32 nt, Human
aggauguuuggaaggacaagacaggaaagugu

SEQ ID NO: 55227 - RNA, 32 nt, Human
aggauguuuuacuacagaucuggauggcuauu

SEQ ID NO: 55228 - RNA, 32 nt, Human
aggauguuuuagaaacccugaccugagcuggg

SEQ ID NO: 55229 - RNA, 32 nt, Human
aggauuaaaugaguuaauauauacaaauauuu

SEQ ID NO: 55230 - RNA, 32 nt, Human
aggauuaaccauuucucugaacuccaguaaga

SEQ ID NO: 55231 - RNA, 23 nt, Human
aggauuaacccuuuaagugcuga

SEQ ID NO: 55232 - RNA, 32 nt, Human
aggauuaaguccaccugucccuccugggcugc

SEQ ID NO: 55233 - RNA, 20 nt, Human
aggauuaaucauuuugacug

SEQ ID NO: 55234 - RNA, 32 nt, Human
aggauuacaagugccaugcgguagaagaggaa

SEQ ID NO: 55235 - RNA, 32 nt, Human
aggauuacauaagggacacugauauacugaaa

SEQ ID NO: 55236 - RNA, 32 nt, Human
aggauuacaucaucugcuguaacaacugcucu

SEQ ID NO: 55237 - RNA, 32 nt, Human
aggauuacgcagccaugaaggcccaggagaaa

SEQ ID NO: 55238 - RNA, 32 nt, Human
aggauuacuugacuaucucaaacacauaaauc

SEQ ID NO: 55239 - RNA, 32 nt, Human
aggauuacuugaggccagacugggcaauauag

SEQ ID NO: 55240 - RNA, 32 nt, Human
aggauuagaagaggaaacagaaacagguaaca

SEQ ID NO: 55241 - RNA, 32 nt, Human
aggauuaggaaaguuugcugaagaggaucuuu

SEQ ID NO: 55242 - RNA, 32 nt, Human
aggauuaggagaaggaagagggaacgccacau

SEQ ID NO: 55243 - RNA, 32 nt, Human
aggauuaggagguaaagccauugggagguaau

SEQ ID NO: 55244 - RNA, 32 nt, Human
aggauuaguugaguuccagcuggguuuuggga

SEQ ID NO: 55245 - RNA, 32 nt, Human
aggauuaugguggcucacgccuguaaucccag

SEQ ID NO: 55246 - RNA, 22 nt, Human
aggauuauuaauaaaagccaca

SEQ ID NO: 55247 - RNA, 32 nt, Human
aggauuauugagaggugaaggagccagguggc

SEQ ID NO: 55248 - RNA, 32 nt, Human
aggauucacagauucacauacgacugaucuug

SEQ ID NO: 55249 - RNA, 22 nt, Human
aggauucacaugccacugaagc

SEQ ID NO: 55250 - RNA, 32 nt, Human
aggauucacggaucagccugagaugucccagc

SEQ ID NO: 55251 - RNA, 32 nt, Human
aggauucacucccagccccucgccuucuaggg

SEQ ID NO: 55252 - RNA, 17 nt, Human
aggauucagagaacccc

SEQ ID NO: 55253 - RNA, 32 nt, Human
aggauucagagcagaugugaucugcgcuaggu

SEQ ID NO: 55254 - RNA, 32 nt, Human
aggauucaggaagaagaaaacucaacucagug

SEQ ID NO: 55255 - RNA, 32 nt, Human
aggauucagggacugaagccagcaugggaauu

SEQ ID NO: 55256 - RNA, 32 nt, Human
aggauucagggccggagguucuggugggggcc

SEQ ID NO: 55257 - RNA, 32 nt, Human
aggauucagguagaaaaaguauuuagcauaau

SEQ ID NO: 55258 - RNA, 32 nt, Human
aggauucaugguuguagcaagugugaggaugg

SEQ ID NO: 55259 - RNA, 32 nt, Human
aggauuccagccucccagccccucucuccgcc

SEQ ID NO: 55260 - RNA, 17 nt, Human
aggauucccagcacccc

SEQ ID NO: 55261 - RNA, 20 nt, Human
aggauucccaucuacccuga

SEQ ID NO: 55262 - RNA, 18 nt, Human
aggauuccccgaccuucc

SEQ ID NO: 55263 - RNA, 20 nt, Human
aggauuccccgaccuucccg

SEQ ID NO: 55264 - RNA, 32 nt, Human
aggauucccguagcucuucacagcugaacuca

SEQ ID NO: 55265 - RNA, 32 nt, Human
aggauuccgcccucugacacacaugccauugc

SEQ ID NO: 55266 - RNA, 32 nt, Human
aggauuccugcucuguccccugguuugcggcu

SEQ ID NO: 55267 - RNA, 19 nt, Human
aggauuccugggaccccga

SEQ ID NO: 55268 - RNA, 32 nt, Human
aggauuccuucccacccucaaagcauuaauag

SEQ ID NO: 55269 - RNA, 22 nt, Human
aggauuccuuuagaaccuccga

SEQ ID NO: 55270 - RNA, 32 nt, Human
aggauucgggucugagacuugugugucuggga

SEQ ID NO: 55271 - RNA, 32 nt, Human
aggauucucaauccuguucugcagcugaggaa

SEQ ID NO: 55272 - RNA, 32 nt, Human
aggauucugcagcuccuuuugugccaagcccg

SEQ ID NO: 55273 - RNA, 32 nt, Human
aggauucugcagcugcuuuugcauuucucuuc

SEQ ID NO: 55274 - RNA, 32 nt, Human
aggauucuguuacccagcugugcucaaaacag

SEQ ID NO: 55275 - RNA, 32 nt, Human
aggauucuuaaggagcuuuaagcuaaggaaac

SEQ ID NO: 55276 - RNA, 32 nt, Human
aggauucuuagccagucugugaaagugggccu

SEQ ID NO: 55277 - RNA, 18 nt, Human
aggauucuucugaacccc

SEQ ID NO: 55278 - RNA, 32 nt, Human
aggauucuuucagcugggaacauggcagguga

SEQ ID NO: 55279 - RNA, 32 nt, Human
aggauugaagaaaagggacugggggaaggaaa

SEQ ID NO: 55280 - RNA, 32 nt, Human
aggauugaagaaaauaguggugaugagggcuu

SEQ ID NO: 55281 - RNA, 32 nt, Human
aggauugaagaaugccgcguugggugggugcu

SEQ ID NO: 55282 - RNA, 32 nt, Human
aggauugagcuucggccucccuggcccugggu

SEQ ID NO: 55283 - RNA, 32 nt, Human
aggauugaggaagagguugcaaaguuagccga

SEQ ID NO: 55284 - RNA, 32 nt, Human
aggauugaguuucacuuccucacugacauuuu

SEQ ID NO: 55285 - RNA, 32 nt, Human
aggauugaucgaucgcuugagccugggaggug

SEQ ID NO: 55286 - RNA, 32 nt, Human
aggauugauggacaccacacaccagcuauauu

SEQ ID NO: 55287 - RNA, 32 nt, Human
aggauugauugcauagcuccucauguuucuac

SEQ ID NO: 55288 - RNA, 32 nt, Human
aggauugcagagaagaugcaagagcacuuugg

SEQ ID NO: 55289 - RNA, 32 nt, Human
aggauugcagcaaagguggucagggugauggg

SEQ ID NO: 55290 - RNA, 32 nt, Human
aggauugcagugagccaagaucgcuccauugc

SEQ ID NO: 55291 - RNA, 32 nt, Human
aggauugcgagggggacccugcuucaucuaca

SEQ ID NO: 55292 - RNA, 32 nt, Human
aggauugcgccaccacacuccagccugggcaa

SEQ ID NO: 55293 - RNA, 32 nt, Human
aggauugcgccacugcaccccagcccggguga

SEQ ID NO: 55294 - RNA, 32 nt, Human
aggauugcuaucuggaggccuuccagcugcug

SEQ ID NO: 55295 - RNA, 32 nt, Human
aggauugcuugagaccagccugggugacacag

SEQ ID NO: 55296 - RNA, 32 nt, Human
aggauugcuugaggccagccugggcaacauag

SEQ ID NO: 55297 - RNA, 32 nt, Human
aggauugcuuuguccaucuccugcuuucauuu

SEQ ID NO: 55298 - RNA, 32 nt, Human
aggauugcuuuucuguaucauaauuuuagaau

SEQ ID NO: 55299 - RNA, 32 nt, Human
aggauuggaagagauuuuaaaggccacauagg

SEQ ID NO: 55300 - RNA, 32 nt, Human
aggauuggcccccauuauggugcuucugaaua

SEQ ID NO: 55301 - RNA, 32 nt, Human
aggauuggcugcagugagguccgcaaagcccc

SEQ ID NO: 55302 - RNA, 32 nt, Human
aggauuggcuuguuaguuuaacacagccguau

SEQ ID NO: 55303 - RNA, 32 nt, Human
aggauugggggcaggaggagucuggaacacag

SEQ ID NO: 55304 - RNA, 32 nt, Human
aggauugugccacuacacuccagccuggccga

SEQ ID NO: 55305 - RNA, 32 nt, Human
aggauugugccacugcacucaagccuggguga

SEQ ID NO: 55306 - RNA, 32 nt, Human
aggauugugccacuguacuccagccugggcga

SEQ ID NO: 55307 - RNA, 32 nt, Human
aggauugugccauugcacuccagccugggcaa

SEQ ID NO: 55308 - RNA, 32 nt, Human
aggauugugggguggucaggaggccggcugcc

SEQ ID NO: 55309 - RNA, 32 nt, Human
aggauuguuucuggugacugcagccgcugccg

SEQ ID NO: 55310 - RNA, 32 nt, Human
aggauuuaaauuugaaccuggcuuucucacag

SEQ ID NO: 55311 - RNA, 32 nt, Human
aggauuuagggagagagcaagauuucuguuga

SEQ ID NO: 55312 - RNA, 18 nt, Human
aggauuuauucuccggga

SEQ ID NO: 55313 - RNA, 32 nt, Human
aggauuucaaggaaguguuugcuauucaggaa

SEQ ID NO: 55314 - RNA, 32 nt, Human
aggauuucaaguccagccugggcuacauagug

SEQ ID NO: 55315 - RNA, 32 nt, Human
aggauuucagaacacugcucuuggggucugaa

SEQ ID NO: 55316 - RNA, 32 nt, Human
aggauuucagggaaaaguguccaagcuuucag

SEQ ID NO: 55317 - RNA, 32 nt, Human
aggauuuccagaauuaggaagggaaaccaggc

SEQ ID NO: 55318 - RNA, 32 nt, Human
aggauuucgagaccagccuggccaacauggcg

SEQ ID NO: 55319 - RNA, 32 nt, Human
aggauuucuaacuccagcuguucccauacugu

SEQ ID NO: 55320 - RNA, 32 nt, Human
aggauuucuccauguuggucaggcuggucuug

SEQ ID NO: 55321 - RNA, 32 nt, Human
aggauuucucucuccuuccuccuccuuucuuu

SEQ ID NO: 55322 - RNA, 32 nt, Human
aggauuugaacccagauccccaugacgccaga

SEQ ID NO: 55323 - RNA, 32 nt, Human
aggauuugaacccagauccccaugaugccaga

SEQ ID NO: 55324 - RNA, 32 nt, Human
aggauuugaaucugcugcucucugauccuaaa

SEQ ID NO: 55325 - RNA, 32 nt, Human
aggauuugacucugaaagaagcuuugccaauu

SEQ ID NO: 55326 - RNA, 32 nt, Human
aggauuugacuuaccaccagagcauagaaaag

SEQ ID NO: 55327 - RNA, 32 nt, Human
aggauuugcucacauaguuccugcaaacuuca

SEQ ID NO: 55328 - RNA, 32 nt, Human
aggauuugcucuggacagagauggaagagccg

SEQ ID NO: 55329 - RNA, 32 nt, Human
aggauuugcuugagccugggaggcagagguug

SEQ ID NO: 55330 - RNA, 32 nt, Human
aggauuuggaaagagagcuugaugaaacagaa

SEQ ID NO: 55331 - RNA, 32 nt, Human
aggauuuggaauuaguccugggcgaccugaag

SEQ ID NO: 55332 - RNA, 32 nt, Human
aggauuuggcagcugcuccacuguuacgguug

SEQ ID NO: 55333 - RNA, 32 nt, Human
aggauuugggagagagaacaaauuuggggcag

SEQ ID NO: 55334 - RNA, 32 nt, Human
aggauuugguguuuagcuguuucucucuuuaa

SEQ ID NO: 55335 - RNA, 31 nt, Human
aggauuugguuucagcauuaguaccuacaua

SEQ ID NO: 55336 - RNA, 32 nt, Human
aggauuuguaaaccccggagcgagguucugcu

SEQ ID NO: 55337 - RNA, 32 nt, Human
aggauuuucacaaugcugcacugggcuagaaa

SEQ ID NO: 55338 - RNA, 32 nt, Human
aggauuuucacucucuuucacugggcugcuuu

SEQ ID NO: 55339 - RNA, 32 nt, Human
aggauuuucacuucuuuucucuagacuuggaa

SEQ ID NO: 55340 - RNA, 32 nt, Human
aggauuuucauugcuuauuuuaaagugucuua

SEQ ID NO: 55341 - RNA, 21 nt, Human
aggauuuucucugccccaggg

SEQ ID NO: 55342 - RNA, 32 nt, Human
aggauuuugagaccagccugaccaacauggug

SEQ ID NO: 55343 - RNA, 32 nt, Human
aggauuuugccauguuugccagccuggucucg

SEQ ID NO: 55344 - RNA, 32 nt, Human
aggauuuuguuuuguaguuugcagaugagcau

SEQ ID NO: 55345 - RNA, 32 nt, Human
aggauuuuuccagauaaauuuguacucaagga

SEQ ID NO: 55346 - RNA, 32 nt, Human
aggauuuuugacacauuuucucagggaagaau

SEQ ID NO: 55347 - RNA, 32 nt, Human
aggcaaaaacacccuucccuuuugagaaaccu

SEQ ID NO: 55348 - RNA, 32 nt, Human
aggcaaaagauaaaacagggucuagugaucca

SEQ ID NO: 55349 - RNA, 32 nt, Human
aggcaaaagccaaggcccauuagccaguuuag

SEQ ID NO: 55350 - RNA, 32 nt, Human
aggcaaaaggcagaggcugauaagaaugacaa

SEQ ID NO: 55351 - RNA, 23 nt, Human
aggcaaaaggcaucgggaagcag

SEQ ID NO: 55352 - RNA, 32 nt, Human
aggcaaaagggagagagaggggaagggggucu

SEQ ID NO: 55353 - RNA, 32 nt, Human
aggcaaaagggauuuuuacaguuagagauaaa

SEQ ID NO: 55354 - RNA, 32 nt, Human
aggcaaaauuguugccuuggccccaucaugga

SEQ ID NO: 55355 - RNA, 32 nt, Human
aggcaaacagcugugcccucuuugccuuuuug

SEQ ID NO: 55356 - RNA, 26 nt, Human
aggcaaacccagugguuucagaaaug

SEQ ID NO: 55357 - RNA, 22 nt, Human
aggcaaacugacugccauucuc

SEQ ID NO: 55358 - RNA, 32 nt, Human
aggcaaacuugaggaagcccugguucuauuuc

SEQ ID NO: 55359 - RNA, 31 nt, Human
aggcaaagaaaaggaacggacauucgguccu

SEQ ID NO: 55360 - RNA, 32 nt, Human
aggcaaagaggagcugcuccugccuccauggu

SEQ ID NO: 55361 - RNA, 32 nt, Human
aggcaaagagggugggugaaccaggccauaca

SEQ ID NO: 55362 - RNA, 22 nt, Human
aggcaaagaugaaaacuuccca

SEQ ID NO: 55363 - RNA, 22 nt, Human
aggcaaagaugagaacuuccca

SEQ ID NO: 55364 - RNA, 32 nt, Human
aggcaaagcugaagagagucaaggucacuguc

SEQ ID NO: 55365 - RNA, 32 nt, Human
aggcaaagcuuuauuuucaucucucaucuuuu

SEQ ID NO: 55366 - RNA, 21 nt, Human
aggcaaaggcagaggaauuug

SEQ ID NO: 55367 - RNA, 24 nt, Human
aggcaaaggcagguggaucaccug

SEQ ID NO: 55368 - RNA, 32 nt, Human
aggcaaaggccuggacagcuugacuugugggg

SEQ ID NO: 55369 - RNA, 24 nt, Human
aggcaaaggcgggaggaucacuug

SEQ ID NO: 55370 - RNA, 24 nt, Human
aggcaaaggcgggcggaucaccug

SEQ ID NO: 55371 - RNA, 24 nt, Human
aggcaaaggcuaaagaacuugcca

SEQ ID NO: 55372 - RNA, 32 nt, Human
aggcaaagggcgcagaggugagcacggaucac

SEQ ID NO: 55373 - RNA, 32 nt, Human
aggcaaaggugauggauucugcagugaacauu

SEQ ID NO: 55374 - RNA, 32 nt, Human
aggcaaaugaaguuaggugggguggggugggg

SEQ ID NO: 55375 - RNA, 32 nt, Human
aggcaaaugccacauugcccauuuuucagaua

SEQ ID NO: 55376 - RNA, 32 nt, Human
aggcaaauggcacugcaggugagaaccccgcc

SEQ ID NO: 55377 - RNA, 32 nt, Human
aggcaaauggcuggcguggaagcacaacccgc

SEQ ID NO: 55378 - RNA, 32 nt, Human
aggcaacaacaaaaucgcacagacacugcgug

SEQ ID NO: 55379 - RNA, 32 nt, Human
aggcaacaaccaucacccucccuccuuaagcu

SEQ ID NO: 55380 - RNA, 32 nt, Human
aggcaacaacugccccuucuuuaugcagaggu

SEQ ID NO: 55381 - RNA, 32 nt, Human
aggcaacacagccagcacggugcucuccaggg

SEQ ID NO: 55382 - RNA, 32 nt, Human
aggcaacacaggcugaaguauaagaguugaag

SEQ ID NO: 55383 - RNA, 32 nt, Human
aggcaacacagugaaacccugucucuacaaaa

SEQ ID NO: 55384 - RNA, 32 nt, Human
aggcaacacggugaaaccccaucucuacaaaa

SEQ ID NO: 55385 - RNA, 32 nt, Human
aggcaacagaacuuguuccguggauauuugga

SEQ ID NO: 55386 - RNA, 32 nt, Human
aggcaacagggugaccagcuguccugguuucc

SEQ ID NO: 55387 - RNA, 32 nt, Human
aggcaacaguucagagguagugguagaacauc

SEQ ID NO: 55388 - RNA, 32 nt, Human
aggcaacauagggagacccccaucucuacaaa

SEQ ID NO: 55389 - RNA, 32 nt, Human
aggcaacauaguaagaccucaucucuacuaaa

SEQ ID NO: 55390 - RNA, 32 nt, Human
aggcaacauagugaggccccaucuuuacaaaa

SEQ ID NO: 55391 - RNA, 32 nt, Human
aggcaacauggagaaaccccgucucuaucaga

SEQ ID NO: 55392 - RNA, 32 nt, Human
aggcaacauggcaaaaccccaucucgacaaaa

SEQ ID NO: 55393 - RNA, 32 nt, Human
aggcaacauggugaaaccccaucucuacaaaa

SEQ ID NO: 55394 - RNA, 32 nt, Human
aggcaacauggugaaacccuaucuuuucuaaa

SEQ ID NO: 55395 - RNA, 32 nt, Human
aggcaacauggugaaaccuugucucuaccaaa

SEQ ID NO: 55396 - RNA, 32 nt, Human
aggcaacauggugaaauccugucuuuaccaaa

SEQ ID NO: 55397 - RNA, 27 nt, Human
aggcaacauggugaccccaucucuacc

SEQ ID NO: 55398 - RNA, 32 nt, Human
aggcaacauugcaagacuccaucucuacaaaa

SEQ ID NO: 55399 - RNA, 32 nt, Human
aggcaacccaugugugaccaguucuccccaag

SEQ ID NO: 55400 - RNA, 32 nt, Human
aggcaaccccaccucccccucucccuccuccc

SEQ ID NO: 55401 - RNA, 32 nt, Human
aggcaaccuucuccuguuucacacagaggugg

SEQ ID NO: 55402 - RNA, 32 nt, Human
aggcaaccuuugccuucuucagaagcuuggaa

SEQ ID NO: 55403 - RNA, 32 nt, Human
aggcaacgcggaugaaacucacaaagcaaugc

SEQ ID NO: 55404 - RNA, 32 nt, Human
aggcaacgggcggcagguugcaguggaggggc

SEQ ID NO: 55405 - RNA, 32 nt, Human
aggcaacguggcugcugcccugcccaacacuc

SEQ ID NO: 55406 - RNA, 32 nt, Human
aggcaacuacagccaaaaucacuguuaaaauc

SEQ ID NO: 55407 - RNA, 32 nt, Human
aggcaacucacugucuggcagucccagccuca

SEQ ID NO: 55408 - RNA, 32 nt, Human
aggcaacucuacugucgacugccucaagggcu

SEQ ID NO: 55409 - RNA, 32 nt, Human
aggcaacugaaauaugcacccaaucaauguga

SEQ ID NO: 55410 - RNA, 23 nt, Human
aggcaacugcagagucuuagggg

SEQ ID NO: 55411 - RNA, 32 nt, Human
aggcaagaaagagauaccaagaugccaucugu

SEQ ID NO: 55412 - RNA, 32 nt, Human
aggcaagaaagcuuccuucaaccugcauagcc

SEQ ID NO: 55413 - RNA, 32 nt, Human
aggcaagaaauccuacuaauccaguuuuguuu

SEQ ID NO: 55414 - RNA, 32 nt, Human
aggcaagaacauccuggaggccaggaguucga

SEQ ID NO: 55415 - RNA, 32 nt, Human
aggcaagaacaugauuuaucuuccauaagccu

SEQ ID NO: 55416 - RNA, 32 nt, Human
aggcaagacucaggacugcucuggacauucag

SEQ ID NO: 55417 - RNA, 32 nt, Human
aggcaagacuggccuagccucccagccuacau

SEQ ID NO: 55418 - RNA, 24 nt, Human
aggcaagagaauugcuuggacuca

SEQ ID NO: 55419 - RNA, 32 nt, Human
aggcaagagccgcaccaugcaggauggggagg

SEQ ID NO: 55420 - RNA, 32 nt, Human
aggcaagaggacugcuugaggccaggaguuuc

SEQ ID NO: 55421 - RNA, 32 nt, Human
aggcaagaggagugggacaggggaguaaagga

SEQ ID NO: 55422 - RNA, 23 nt, Human
aggcaagaggauugcuugagucc

SEQ ID NO: 55423 - RNA, 23 nt, Human
aggcaagaggauugcuugggccc

SEQ ID NO: 55424 - RNA, 32 nt, Human
aggcaagagguggaaggguacugacuggguuu

SEQ ID NO: 55425 - RNA, 32 nt, Human
aggcaagaucugcagagaugccugugagauau

SEQ ID NO: 55426 - RNA, 32 nt, Human
aggcaagaugcugaaaaugcugaggcaaagcu

SEQ ID NO: 55427 - RNA, 32 nt, Human
aggcaagcaaaggagaugaaaucuguucuggg

SEQ ID NO: 55428 - RNA, 32 nt, Human
aggcaagcaauauuuucuugaucauaaauauu

SEQ ID NO: 55429 - RNA, 21 nt, Human
aggcaagcacgauggcgcuca

SEQ ID NO: 55430 - RNA, 24 nt, Human
aggcaagcagaucaugaggucagg

SEQ ID NO: 55431 - RNA, 32 nt, Human
aggcaagcagccugcaccacccugccacuggc

SEQ ID NO: 55432 - RNA, 32 nt, Human
aggcaagcauggacaggagccaagggagcagg

SEQ ID NO: 55433 - RNA, 32 nt, Human
aggcaagcccaggaguugacauuucucugccc

SEQ ID NO: 55434 - RNA, 32 nt, Human
aggcaagcccagggcacagaugcugcgauggc

SEQ ID NO: 55435 - RNA, 32 nt, Human
aggcaagccucagcagagguucuugacaguuu

SEQ ID NO: 55436 - RNA, 32 nt, Human
aggcaagccugggcauuucugcauuugugcca

SEQ ID NO: 55437 - RNA, 32 nt, Human
aggcaagcugaguuaguacaagaacagucuga

SEQ ID NO: 55438 - RNA, 32 nt, Human
aggcaagcuguaccagcagcuccuggggacgu

SEQ ID NO: 55439 - RNA, 32 nt, Human
aggcaagcuugcgacucuucuccuggaaagcu

SEQ ID NO: 55440 - RNA, 32 nt, Human
aggcaaggaaggaaaauuaauggggaagcuga

SEQ ID NO: 55441 - RNA, 32 nt, Human
aggcaaggacagugccaaaagguucugugagc

SEQ ID NO: 55442 - RNA, 32 nt, Human
aggcaaggaugucccacagaaacccaaacaag

SEQ ID NO: 55443 - RNA, 32 nt, Human
aggcaaggcaaggguuaaaaagaaaagaacaa

SEQ ID NO: 55444 - RNA, 32 nt, Human
aggcaaggcccagaccuggccucugccauccu

SEQ ID NO: 55445 - RNA, 21 nt, Human
aggcaaggccuggggugccca

SEQ ID NO: 55446 - RNA, 32 nt, Human
aggcaaggcucagagacccaggagcugguucg

SEQ ID NO: 55447 - RNA, 32 nt, Human
aggcaaggcugcaggucuggcccaggggaauu

SEQ ID NO: 55448 - RNA, 32 nt, Human
aggcaagggcaggaaaguggucuccagcccuu

SEQ ID NO: 55449 - RNA, 32 nt, Human
aggcaaggggcugcuuuccacuguggguaccu

SEQ ID NO: 55450 - RNA, 32 nt, Human
aggcaaggguuugcccaguuugcagaugagaa

SEQ ID NO: 55451 - RNA, 20 nt, Human
aggcaaggucuggccucagg

SEQ ID NO: 55452 - RNA, 32 nt, Human
aggcaagguuuucaggggacaggccaacccag

SEQ ID NO: 55453 - RNA, 32 nt, Human
aggcaagucucgaacucaugaccucaagugau

SEQ ID NO: 55454 - RNA, 26 nt, Human
aggcaagugaagcacuugaggucagg

SEQ ID NO: 55455 - RNA, 32 nt, Human
aggcaagugauggagaacuaaacaaagaacag

SEQ ID NO: 55456 - RNA, 32 nt, Human
aggcaagugauggagaacuaaauaaagaacag

SEQ ID NO: 55457 - RNA, 26 nt, Human
aggcaaguggaucacuugaggucagg

SEQ ID NO: 55458 - RNA, 24 nt, Human
aggcaaguggauuagggggucugg

SEQ ID NO: 55459 - RNA, 32 nt, Human
aggcaaguucuguaagcuuacauugcuauuug

SEQ ID NO: 55460 - RNA, 27 nt, Human
aggcaauaauggagaagagguucugga

SEQ ID NO: 55461 - RNA, 32 nt, Human
aggcaauaccucaacugccucucacuucccaa

SEQ ID NO: 55462 - RNA, 19 nt, Human
aggcaauauccucuugccc

SEQ ID NO: 55463 - RNA, 32 nt, Human
aggcaaucacggucauuuccacagccucaacc

SEQ ID NO: 55464 - RNA, 32 nt, Human
aggcaaugagccaccacgcccggguuaccuuc

SEQ ID NO: 55465 - RNA, 32 nt, Human
aggcaaugcccaggcgggccugggcacuguau

SEQ ID NO: 55466 - RNA, 19 nt, Human
aggcaauggcagcauuuca

SEQ ID NO: 55467 - RNA, 26 nt, Human
aggcaauggcagggagaaguccugga

SEQ ID NO: 55468 - RNA, 32 nt, Human
aggcaauggccacugguuuguagacagagagu

SEQ ID NO: 55469 - RNA, 31 nt, Human
aggcaauggguggaaaucaggggaacguuuc

SEQ ID NO: 55470 - RNA, 32 nt, Human
aggcaauguagaaauucuccaggggagaguga

SEQ ID NO: 55471 - RNA, 32 nt, Human
aggcaaugucucacuguuauccaggcuggagu

SEQ ID NO: 55472 - RNA, 32 nt, Human
aggcaauguucuucucauuugaauccuuaugg

SEQ ID NO: 55473 - RNA, 32 nt, Human
aggcaauuaaagaaauccacucagagaggacu

SEQ ID NO: 55474 - RNA, 32 nt, Human
aggcaauuacuggccucaaaagaggaacagag

SEQ ID NO: 55475 - RNA, 32 nt, Human
aggcaauucuaagaucuuccacaaaacaucua

SEQ ID NO: 55476 - RNA, 32 nt, Human
aggcaauucuccugccuuugccuccagaagca

SEQ ID NO: 55477 - RNA, 32 nt, Human
aggcaauuugucaaagauuguuguuggauuuu

SEQ ID NO: 55478 - RNA, 32 nt, Human
aggcacaagggggugagggaaagggaaggcuu

SEQ ID NO: 55479 - RNA, 32 nt, Human
aggcacacacaaaaggcagauucucguaaacg

SEQ ID NO: 55480 - RNA, 32 nt, Human
aggcacacacauguaugcacacacacaugcac

SEQ ID NO: 55481 - RNA, 32 nt, Human
aggcacacagaggaccacagaggcagagccuc

SEQ ID NO: 55482 - RNA, 32 nt, Human
aggcacacagcccagccccuugugaguccugg

SEQ ID NO: 55483 - RNA, 32 nt, Human
aggcacacaguccgcuucuucguccucagggu

SEQ ID NO: 55484 - RNA, 32 nt, Human
aggcacacgaagcacaagucucaggggaccau

SEQ ID NO: 55485 - RNA, 32 nt, Human
aggcacacgaaggagguggggaggugaagaug

SEQ ID NO: 55486 - RNA, 32 nt, Human
aggcacacuacagucaucacuaggcaauucug

SEQ ID NO: 55487 - RNA, 32 nt, Human
aggcacacuauuacuucugcaacucagacuga

SEQ ID NO: 55488 - RNA, 32 nt, Human
aggcacacucacaaucaacuuccugauuucac

SEQ ID NO: 55489 - RNA, 32 nt, Human
aggcacacugucagaggugaccggagaacuga

SEQ ID NO: 55490 - RNA, 32 nt, Human
aggcacacuuggggccuugagcuccagggagu

SEQ ID NO: 55491 - RNA, 32 nt, Human
aggcacagaagggcugagagaccuggccuagu

SEQ ID NO: 55492 - RNA, 32 nt, Human
aggcacagaagguugucaugggcuguuccuug

SEQ ID NO: 55493 - RNA, 18 nt, Human
aggcacagaaucgcugaa

SEQ ID NO: 55494 - RNA, 20 nt, Human
aggcacagaccagggcucca

SEQ ID NO: 55495 - RNA, 32 nt, Human
aggcacagacuuuucuuguucucuucucuauc

SEQ ID NO: 55496 - RNA, 32 nt, Human
aggcacagagaaaggaaguaaaaagaaagaaa

SEQ ID NO: 55497 - RNA, 32 nt, Human
aggcacagagcuaaggaacuugcuuaagguca

SEQ ID NO: 55498 - RNA, 21 nt, Human
aggcacagagcuggucccuag

SEQ ID NO: 55499 - RNA, 21 nt, Human
aggcacagagggcugcucaca

SEQ ID NO: 55500 - RNA, 22 nt, Human
aggcacagaugcaggcucagca

SEQ ID NO: 55501 - RNA, 32 nt, Human
aggcacagcacagcaguacuccacauuguuuc

SEQ ID NO: 55502 - RNA, 32 nt, Human
aggcacagcacagcagugacucggugagggga

SEQ ID NO: 55503 - RNA, 32 nt, Human
aggcacagcauggacaaaggcucacaggggug

SEQ ID NO: 55504 - RNA, 32 nt, Human
aggcacagccacuuccugccuccugggacucc

SEQ ID NO: 55505 - RNA, 19 nt, Human
aggcacagcuccucggggg

SEQ ID NO: 55506 - RNA, 30 nt, Human
aggcacagcuugcagacugagggcgguggg

SEQ ID NO: 55507 - RNA, 30 nt, Human
aggcacagcuugcagugagcgaagaucgca

SEQ ID NO: 55508 - RNA, 32 nt, Human
aggcacaggacuggccccuuguccucauaaaa

SEQ ID NO: 55509 - RNA, 32 nt, Human
aggcacaggcaaaggguguggcuucagagaag

SEQ ID NO: 55510 - RNA, 24 nt, Human
aggcacaggcgggaggaucacuug

SEQ ID NO: 55511 - RNA, 32 nt, Human
aggcacaggcugggauggagcacuucuucugg

SEQ ID NO: 55512 - RNA, 32 nt, Human
aggcacagucagaacucacugcagccucuaca

SEQ ID NO: 55513 - RNA, 32 nt, Human
aggcacagugaguccacuggggcacggcagcg

SEQ ID NO: 55514 - RNA, 32 nt, Human
aggcacagugugaggggcauggggaggcagga

SEQ ID NO: 55515 - RNA, 32 nt, Human
aggcacaguucacccuuagccugcacuaaggg

SEQ ID NO: 55516 - RNA, 32 nt, Human
aggcacaugagguugggggccuuugaggcugu

SEQ ID NO: 55517 - RNA, 32 nt, Human
aggcacaugucuauaauuccagcuacucagga

SEQ ID NO: 55518 - RNA, 32 nt, Human
aggcacaugugaggguccagagagaagggagu

SEQ ID NO: 55519 - RNA, 32 nt, Human
aggcaccaaacagcccaggacugccgagacuc

SEQ ID NO: 55520 - RNA, 32 nt, Human
aggcaccaaaucucccucaucuucuagugcca

SEQ ID NO: 55521 - RNA, 32 nt, Human
aggcaccaacagcacagagcaggccaguguac

SEQ ID NO: 55522 - RNA, 32 nt, Human
aggcaccaacagccagcgagccaucauuccca

SEQ ID NO: 55523 - RNA, 31 nt, Human
aggcaccaagugucucaggcagcgaggaaau

SEQ ID NO: 55524 - RNA, 32 nt, Human
aggcaccaaguucugucccccguagaaauccc

SEQ ID NO: 55525 - RNA, 32 nt, Human
aggcaccaaucaggagaaggguucugccuccc

SEQ ID NO: 55526 - RNA, 24 nt, Human
aggcaccacagagccccuugcccu

SEQ ID NO: 55527 - RNA, 32 nt, Human
aggcaccacccaugggcuucacccucagaacc

SEQ ID NO: 55528 - RNA, 32 nt, Human
aggcaccacugcacucuagccugggcaagaga

SEQ ID NO: 55529 - RNA, 32 nt, Human
aggcaccacuguggaccccugcucugcacccc

SEQ ID NO: 55530 - RNA, 32 nt, Human
aggcaccagaaugugccucagagcugugacau

SEQ ID NO: 55531 - RNA, 20 nt, Human
aggcaccagcuaccucaggg

SEQ ID NO: 55532 - RNA, 32 nt, Human
aggcaccagcugguugggaccagcagccccca

SEQ ID NO: 55533 - RNA, 32 nt, Human
aggcaccaggcagggucuagaaggcuguggug

SEQ ID NO: 55534 - RNA, 32 nt, Human
aggcaccaugaagcaggagucugcagccccga

SEQ ID NO: 55535 - RNA, 32 nt, Human
aggcaccauucaggaaccuggaccaaagcuga

SEQ ID NO: 55536 - RNA, 23 nt, Human
aggcacccacaggcacaagcuga

SEQ ID NO: 55537 - RNA, 32 nt, Human
aggcacccacccucucuggcccaggccugcug

SEQ ID NO: 55538 - RNA, 32 nt, Human
aggcacccacugacuccagccucauggaacca

SEQ ID NO: 55539 - RNA, 32 nt, Human
aggcacccaguuccugacuucccagaggcuuc

SEQ ID NO: 55540 - RNA, 32 nt, Human
aggcacccauccugacccccaggcuggagagg

SEQ ID NO: 55541 - RNA, 21 nt, Human
aggcacccaugccccagguga

SEQ ID NO: 55542 - RNA, 32 nt, Human
aggcaccccaccuugcuccugaugcaguuucu

SEQ ID NO: 55543 - RNA, 32 nt, Human
aggcacccccuucuucauugcucucuccagaa

SEQ ID NO: 55544 - RNA, 32 nt, Human
aggcaccccgggggcuggaggggcguguaccc

SEQ ID NO: 55545 - RNA, 32 nt, Human
aggcaccccucaggccugguggccacugucca

SEQ ID NO: 55546 - RNA, 32 nt, Human
aggcacccggccuuucuuucucccucuugcaa

SEQ ID NO: 55547 - RNA, 32 nt, Human
aggcacccguaaucccagcuacuugggaggcu

SEQ ID NO: 55548 - RNA, 32 nt, Human
aggcacccucauuccccucucccacccacccc

SEQ ID NO: 55549 - RNA, 32 nt, Human
aggcacccuccagcgucaggugcggauccccc

SEQ ID NO: 55550 - RNA, 32 nt, Human
aggcacccugccucugcagagcagaaagauca

SEQ ID NO: 55551 - RNA, 32 nt, Human
aggcacccugggcagagagaugcagugggugc

SEQ ID NO: 55552 - RNA, 26 nt, Human
aggcacccuucuuuccucuuccccuu

SEQ ID NO: 55553 - RNA, 23 nt, Human
aggcaccgagggggcacuggaug

SEQ ID NO: 55554 - RNA, 32 nt, Human
aggcaccgcagccugucagccaacauugccuu

SEQ ID NO: 55555 - RNA, 32 nt, Human
aggcaccgcugcucccuccagucccuccgugc

SEQ ID NO: 55556 - RNA, 32 nt, Human
aggcaccgcuguugagcagccuggugguacug

SEQ ID NO: 55557 - RNA, 20 nt, Human
aggcaccuaccaccugcccu

SEQ ID NO: 55558 - RNA, 32 nt, Human
aggcaccuauaaucccagcuacaugggaggcu

SEQ ID NO: 55559 - RNA, 32 nt, Human
aggcaccuaugguuccagcuacucaggaggcu

SEQ ID NO: 55560 - RNA, 32 nt, Human
aggcaccuauucucuuugccacccugacacca

SEQ ID NO: 55561 - RNA, 32 nt, Human
aggcaccucacagaaaugagaucaggcucugc

SEQ ID NO: 55562 - RNA, 22 nt, Human
aggcaccugacgccucuuuccc

SEQ ID NO: 55563 - RNA, 32 nt, Human
aggcaccugcaaucccagcuacaugggaggcu

SEQ ID NO: 55564 - RNA, 32 nt, Human
aggcaccugcagcccuccuuccucagcaggaa

SEQ ID NO: 55565 - RNA, 32 nt, Human
aggcaccugcagcuuccagugcuguaacagag

SEQ ID NO: 55566 - RNA, 32 nt, Human
aggcaccugccuguuuuuguuggugcacagag

SEQ ID NO: 55567 - RNA, 23 nt, Human
aggcaccugcuccucuugcccuu

SEQ ID NO: 55568 - RNA, 32 nt, Human
aggcaccugcuuaccguaaaugaucauguuau

SEQ ID NO: 55569 - RNA, 32 nt, Human
aggcaccuggcaucccagcuacuccaggggcu

SEQ ID NO: 55570 - RNA, 23 nt, Human
aggcaccugggcauccuuccccu

SEQ ID NO: 55571 - RNA, 32 nt, Human
aggcaccuguaaccccagcuacucaggagguu

SEQ ID NO: 55572 - RNA, 32 nt, Human
aggcaccuguaauccagguaugugggaggcug

SEQ ID NO: 55573 - RNA, 32 nt, Human
aggcaccuguaaucccaccuacucaggaggcu

SEQ ID NO: 55574 - RNA, 32 nt, Human
aggcaccuguaaucccagccaccugggaggcu

SEQ ID NO: 55575 - RNA, 32 nt, Human
aggcaccuguaaucccagcuaccugagaggcu

SEQ ID NO: 55576 - RNA, 32 nt, Human
aggcaccuguaaucccagcuacucaggaagcu

SEQ ID NO: 55577 - RNA, 32 nt, Human
aggcaccuguaaucccagcuacucaggaggcu

SEQ ID NO: 55578 - RNA, 32 nt, Human
aggcaccuguaaucccagcuacucgggaggcu

SEQ ID NO: 55579 - RNA, 32 nt, Human
aggcaccuguaaucccagcuacuugggagacu

SEQ ID NO: 55580 - RNA, 32 nt, Human
aggcaccuguaaucccagcuacuugggaggcu

SEQ ID NO: 55581 - RNA, 32 nt, Human
aggcaccuguaaucccagcugcccaggaggcu

SEQ ID NO: 55582 - RNA, 32 nt, Human
aggcaccuguaaucccagguacuagggaggcu

SEQ ID NO: 55583 - RNA, 32 nt, Human
aggcaccuguaaucccaguuacuugggaggcu

SEQ ID NO: 55584 - RNA, 32 nt, Human
aggcaccuguaaucccaucuacugaggcagga

SEQ ID NO: 55585 - RNA, 32 nt, Human
aggcaccuguacucccagcuacucaggaggcu

SEQ ID NO: 55586 - RNA, 32 nt, Human
aggcaccuguagucccagcuacacgggaggcu

SEQ ID NO: 55587 - RNA, 32 nt, Human
aggcaccuguagucccagcuacccgggaggcu

SEQ ID NO: 55588 - RNA, 32 nt, Human
aggcaccuguagucccagcuacucaggaggcu

SEQ ID NO: 55589 - RNA, 32 nt, Human
aggcaccuguagucccagcuacucgggaggcu

SEQ ID NO: 55590 - RNA, 32 nt, Human
aggcaccuguagucccagcuacuugggaggcu

SEQ ID NO: 55591 - RNA, 32 nt, Human
aggcaccuguagucuuagcuacucgagaggcc

SEQ ID NO: 55592 - RNA, 21 nt, Human
aggcaccugucguccugccuu

SEQ ID NO: 55593 - RNA, 21 nt, Human
aggcaccugucucccuucugc

SEQ ID NO: 55594 - RNA, 32 nt, Human
aggcaccugugaucccagcuacuuggaggcug

SEQ ID NO: 55595 - RNA, 32 nt, Human
aggcaccuguugucccagcuacucgggaggcu

SEQ ID NO: 55596 - RNA, 32 nt, Human
aggcaccuuagcaaucagccauugccugcaag

SEQ ID NO: 55597 - RNA, 32 nt, Human
aggcaccuuccacuagcaacagucuccccagg

SEQ ID NO: 55598 - RNA, 32 nt, Human
aggcacgacccucagaucucagucuagugaag

SEQ ID NO: 55599 - RNA, 22 nt, Human
aggcacgagccacugugcccgg

SEQ ID NO: 55600 - RNA, 32 nt, Human
aggcacgcacacaagccucuggacgucaagag

SEQ ID NO: 55601 - RNA, 32 nt, Human
aggcacgcacacacaaaacaagcaaauguaac

SEQ ID NO: 55602 - RNA, 32 nt, Human
aggcacgcaccacugcuucccacuggggccgg

SEQ ID NO: 55603 - RNA, 18 nt, Human
aggcacgccgugugcucu

SEQ ID NO: 55604 - RNA, 32 nt, Human
aggcacgccuguaaucccagcacuuugggagg

SEQ ID NO: 55605 - RNA, 23 nt, Human
aggcacggaggcucgugcaugua

SEQ ID NO: 55606 - RNA, 32 nt, Human
aggcacggcuggggccgcucugugcuggcgcc

SEQ ID NO: 55607 - RNA, 32 nt, Human
aggcacgggaugagucugggugaccucugcgc

SEQ ID NO: 55608 - RNA, 32 nt, Human
aggcacgggccagggaccuaggaaaagcggca

SEQ ID NO: 55609 - RNA, 32 nt, Human
aggcacgugugcuggggaaggcacugaguccu

SEQ ID NO: 55610 - RNA, 32 nt, Human
aggcacuagccucuguagcuggugguggcagc

SEQ ID NO: 55611 - RNA, 32 nt, Human
aggcacuaggcauggaugccagugagccuccc

SEQ ID NO: 55612 - RNA, 31 nt, Human
aggcacucaauaaauacuuguuuguugaaaa

SEQ ID NO: 55613 - RNA, 32 nt, Human
aggcacucacacgcccuccuguccacaacccu

SEQ ID NO: 55614 - RNA, 32 nt, Human
aggcacuccagccuggcgacagagcgagacuc

SEQ ID NO: 55615 - RNA, 32 nt, Human
aggcacuccagccugggugacagagugagacu

SEQ ID NO: 55616 - RNA, 31 nt, Human
aggcacuccauaaauaucuguugaaccuuca

SEQ ID NO: 55617 - RNA, 32 nt, Human
aggcacucucaaaucuugaacccuggaccaaa

SEQ ID NO: 55618 - RNA, 32 nt, Human
aggcacucuuucucaaacuggccucccgggac

SEQ ID NO: 55619 - RNA, 32 nt, Human
aggcacugaaggcggcggcggggccagaggcu

SEQ ID NO: 55620 - RNA, 32 nt, Human
aggcacugacccacgagcccacugccucccuc

SEQ ID NO: 55621 - RNA, 32 nt, Human
aggcacugagccacugcgcccagucaacaauc

SEQ ID NO: 55622 - RNA, 32 nt, Human
aggcacugaggguuugcaaauacuuuccuacu

SEQ ID NO: 55623 - RNA, 18 nt, Human
aggcacugcagccucggg

SEQ ID NO: 55624 - RNA, 32 nt, Human
aggcacugcagcuaugggcacugccucagccu

SEQ ID NO: 55625 - RNA, 32 nt, Human
aggcacugcagcugcucgguugcccagccucc

SEQ ID NO: 55626 - RNA, 32 nt, Human
aggcacugcaggcugggcgcaggggcucacac

SEQ ID NO: 55627 - RNA, 32 nt, Human
aggcacugcagucuccaacuccuggccucaag

SEQ ID NO: 55628 - RNA, 32 nt, Human
aggcacugcccugaggcagccucugccuaccu

SEQ ID NO: 55629 - RNA, 32 nt, Human
aggcacugcugccaugcugccuccccaggcug

SEQ ID NO: 55630 - RNA, 32 nt, Human
aggcacugcugccuuccugccucccaaggccu

SEQ ID NO: 55631 - RNA, 32 nt, Human
aggcacuggcauugugcuugacauacaucauc

SEQ ID NO: 55632 - RNA, 32 nt, Human
aggcacuggcgugggagcccugggagaccccu

SEQ ID NO: 55633 - RNA, 32 nt, Human
aggcacugggaggacaguggcugaguggaggc

SEQ ID NO: 55634 - RNA, 32 nt, Human
aggcacugggcugcggcaagugggcaggggag

SEQ ID NO: 55635 - RNA, 32 nt, Human
aggcacugggcuuagcaccacagggaacuucc

SEQ ID NO: 55636 - RNA, 32 nt, Human
aggcacuggggagggggcuucaaggagggagu

SEQ ID NO: 55637 - RNA, 32 nt, Human
aggcacuggggauacaaauuagccggggacuc

SEQ ID NO: 55638 - RNA, 18 nt, Human
aggcacuggggcuggggc

SEQ ID NO: 55639 - RNA, 32 nt, Human
aggcacugggguucggauccugggcaaaguuu

SEQ ID NO: 55640 - RNA, 32 nt, Human
aggcacuguaccaccagccuacugagauugug

SEQ ID NO: 55641 - RNA, 32 nt, Human
aggcacugucacugcccaccuccuugggccuc

SEQ ID NO: 55642 - RNA, 32 nt, Human
aggcacugugccaggugcgaggguaccaugac

SEQ ID NO: 55643 - RNA, 32 nt, Human
aggcacuguuaggcugagcaugguggcucaug

SEQ ID NO: 55644 - RNA, 32 nt, Human
aggcacuguucauauuuuagggcuuguauuau

SEQ ID NO: 55645 - RNA, 32 nt, Human
aggcacuucacucacaggccugugggaugcuc

SEQ ID NO: 55646 - RNA, 32 nt, Human
aggcacuucagccugggcgacagagcgagacu

SEQ ID NO: 55647 - RNA, 32 nt, Human
aggcacuucccaggggaagaccagagaagacc

SEQ ID NO: 55648 - RNA, 32 nt, Human
aggcacuuccucacccccucagcgccacggac

SEQ ID NO: 55649 - RNA, 32 nt, Human
aggcacuugcguggauguuucucacuugagca

SEQ ID NO: 55650 - RNA, 21 nt, Human
aggcacuugggcugccaggaa

SEQ ID NO: 55651 - RNA, 32 nt, Human
aggcacuuuccagcccugugcaguguugcuac

SEQ ID NO: 55652 - RNA, 32 nt, Human
aggcacuuugcaccacagacagauagcaagaa

SEQ ID NO: 55653 - RNA, 32 nt, Human
aggcacuuugggaggccgaggcaggcagauca

SEQ ID NO: 55654 - RNA, 32 nt, Human
aggcagaaaagcuuccucuuagaucuggccac

SEQ ID NO: 55655 - RNA, 32 nt, Human
aggcagaaaauguuuuaaggauuuucuucaaa

SEQ ID NO: 55656 - RNA, 32 nt, Human
aggcagaaacagcagaagcguuaacagcagca

SEQ ID NO: 55657 - RNA, 32 nt, Human
aggcagaaacaguaccacuggacuggaagcuc

SEQ ID NO: 55658 - RNA, 32 nt, Human
aggcagaaaggccacaacccacccuagguuga

SEQ ID NO: 55659 - RNA, 32 nt, Human
aggcagaacagugauaaagacaaggaucuaaa

SEQ ID NO: 55660 - RNA, 19 nt, Human
aggcagaacccagaaacca

SEQ ID NO: 55661 - RNA, 32 nt, Human
aggcagaagaauugcuugaacuggggaggcag

SEQ ID NO: 55662 - RNA, 32 nt, Human
aggcagaagagcuuccucauuugcugagggcu

SEQ ID NO: 55663 - RNA, 32 nt, Human
aggcagaagcccccgcccccacccucgagcuc

SEQ ID NO: 55664 - RNA, 32 nt, Human
aggcagaagccuugaacccagaaguuacucua

SEQ ID NO: 55665 - RNA, 32 nt, Human
aggcagaaggagcuauuaagccuacagcagug

SEQ ID NO: 55666 - RNA, 21 nt, Human
aggcagaaggaucgcuuaaac

SEQ ID NO: 55667 - RNA, 24 nt, Human
aggcagaaggauugcuggagccca

SEQ ID NO: 55668 - RNA, 24 nt, Human
aggcagaaggauugcuugagccca

SEQ ID NO: 55669 - RNA, 24 nt, Human
aggcagaaggauugcuuggaccca

SEQ ID NO: 55670 - RNA, 18 nt, Human
aggcagaauaauugcaga

SEQ ID NO: 55671 - RNA, 32 nt, Human
aggcagaauggaggaggcagguuuagggucug

SEQ ID NO: 55672 - RNA, 32 nt, Human
aggcagacaaacauucagaguugcuggaaugc

SEQ ID NO: 55673 - RNA, 21 nt, Human
aggcagacaaagguucauuug

SEQ ID NO: 55674 - RNA, 26 nt, Human
aggcagacagaucaccugaggucagg

SEQ ID NO: 55675 - RNA, 19 nt, Human
aggcagacagccucagcaa

SEQ ID NO: 55676 - RNA, 32 nt, Human
aggcagacaguaaacaaaacaagcaagucaau

SEQ ID NO: 55677 - RNA, 32 nt, Human
aggcagacaguaggagguuggcagaugguggg

SEQ ID NO: 55678 - RNA, 32 nt, Human
aggcagacaucagaggccagagugccuagccc

SEQ ID NO: 55679 - RNA, 22 nt, Human
aggcagacaucagcucagccug

SEQ ID NO: 55680 - RNA, 32 nt, Human
aggcagacaucuaacccugaaaaccacucgcu

SEQ ID NO: 55681 - RNA, 32 nt, Human
aggcagacccaggcaguuuggcaccagagucc

SEQ ID NO: 55682 - RNA, 18 nt, Human
aggcagaccugcccagag

SEQ ID NO: 55683 - RNA, 32 nt, Human
aggcagacgagugaguuucacacagaagaauu

SEQ ID NO: 55684 - RNA, 32 nt, Human
aggcagacgcugcggguggagacaguccuuag

SEQ ID NO: 55685 - RNA, 26 nt, Human
aggcagacggaucacuugaggucagg

SEQ ID NO: 55686 - RNA, 32 nt, Human
aggcagacugagcucaggagcuugagaccagc

SEQ ID NO: 55687 - RNA, 32 nt, Human
aggcagacuggguuucuagcccauggacuuca

SEQ ID NO: 55688 - RNA, 32 nt, Human
aggcagagaaggugugcucagcaccaaaagca

SEQ ID NO: 55689 - RNA, 32 nt, Human
aggcagagaaguaccacucucuggccuuaaac

SEQ ID NO: 55690 - RNA, 23 nt, Human
aggcagagaauugcuugaaccca

SEQ ID NO: 55691 - RNA, 32 nt, Human
aggcagagacaggcaggucgcuugagcucagg

SEQ ID NO: 55692 - RNA, 32 nt, Human
aggcagagaccaccgcgggcaccgugacgccc

SEQ ID NO: 55693 - RNA, 32 nt, Human
aggcagagacccuuugccccugccuuucuccc

SEQ ID NO: 55694 - RNA, 20 nt, Human
aggcagagaggcccggcaag

SEQ ID NO: 55695 - RNA, 32 nt, Human
aggcagagagugagggaaagggccuggccggc

SEQ ID NO: 55696 - RNA, 32 nt, Human
aggcagagaucucucaccuggaagaugggucu

SEQ ID NO: 55697 - RNA, 32 nt, Human
aggcagagaucucuggaguguugcaguuagag

SEQ ID NO: 55698 - RNA, 19 nt, Human
aggcagagauugcagugag

SEQ ID NO: 55699 - RNA, 32 nt, Human
aggcagagcagggagaggggccagcucacccu

SEQ ID NO: 55700 - RNA, 32 nt, Human
aggcagagcccaggcgugcggugcuucucggg

SEQ ID NO: 55701 - RNA, 25 nt, Human
aggcagagcccuggcagggcgcuca

SEQ ID NO: 55702 - RNA, 32 nt, Human
aggcagagcggcaagagccaggugagcuucca

SEQ ID NO: 55703 - RNA, 32 nt, Human
aggcagagcuggacagauucugugaugccaug

SEQ ID NO: 55704 - RNA, 30 nt, Human
aggcagagcuugcagucagccgagaucacg

SEQ ID NO: 55705 - RNA, 19 nt, Human
aggcagagcuugcagugag

SEQ ID NO: 55706 - RNA, 30 nt, Human
aggcagagcuugcagugagcagagaucgcg

SEQ ID NO: 55707 - RNA, 30 nt, Human
aggcagagcuugcagugagccaagaucgca

SEQ ID NO: 55708 - RNA, 30 nt, Human
aggcagagcuugcagugagccaagaucgcg

SEQ ID NO: 55709 - RNA, 30 nt, Human
aggcagagcuugcagugagccaagaucgug

SEQ ID NO: 55710 - RNA, 30 nt, Human
aggcagagcuugcagugagccgagacugcg

SEQ ID NO: 55711 - RNA, 30 nt, Human
aggcagagcuugcagugaguggagaugcgc

SEQ ID NO: 55712 - RNA, 32 nt, Human
aggcagaggaagaagggugaggacagcaccag

SEQ ID NO: 55713 - RNA, 32 nt, Human
aggcagaggaaggaaaauggggauggcugggg

SEQ ID NO: 55714 - RNA, 32 nt, Human
aggcagaggagaaguuugaagaugcauaugag

SEQ ID NO: 55715 - RNA, 32 nt, Human
aggcagaggauucuccaggaagcauggaaaau

SEQ ID NO: 55716 - RNA, 32 nt, Human
aggcagaggcagcaagaggcggcggcggggag

SEQ ID NO: 55717 - RNA, 32 nt, Human
aggcagaggccggggaagcagcgcggcauccc

SEQ ID NO: 55718 - RNA, 32 nt, Human
aggcagaggccuggggagaguuuaaggagugu

SEQ ID NO: 55719 - RNA, 19 nt, Human
aggcagaggcuacagugag

SEQ ID NO: 55720 - RNA, 23 nt, Human
aggcagaggcugagaaucagaag

SEQ ID NO: 55721 - RNA, 32 nt, Human
aggcagaggcuggaaugcaaugaugcgaucuc

SEQ ID NO: 55722 - RNA, 21 nt, Human
aggcagaggggacccagcgaa

SEQ ID NO: 55723 - RNA, 19 nt, Human
aggcagagguggcagugag

SEQ ID NO: 55724 - RNA, 24 nt, Human
aggcagagguggguggaucacuca

SEQ ID NO: 55725 - RNA, 32 nt, Human
aggcagaggugguuuucucuguuugacucuca

SEQ ID NO: 55726 - RNA, 32 nt, Human
aggcagagguuacagguuacagugagcaaaga

SEQ ID NO: 55727 - RNA, 23 nt, Human
aggcagagguugcacugagcuga

SEQ ID NO: 55728 - RNA, 19 nt, Human
aggcagagguugcagucag

SEQ ID NO: 55729 - RNA, 18 nt, Human
aggcagagguugcaguga

SEQ ID NO: 55730 - RNA, 19 nt, Human
aggcagagguugcagugag

SEQ ID NO: 55731 - RNA, 20 nt, Human
aggcagagguugcagugagc

SEQ ID NO: 55732 - RNA, 19 nt, Human
aggcagagguuguagugag

SEQ ID NO: 55733 - RNA, 32 nt, Human
aggcagagguuguagugagcugagauggggcc

SEQ ID NO: 55734 - RNA, 32 nt, Human
aggcagaguauaacccagugaagagagcauua

SEQ ID NO: 55735 - RNA, 32 nt, Human
aggcagaguccggggaagcagcgcggcauccc

SEQ ID NO: 55736 - RNA, 19 nt, Human
aggcagagucucacucugu

SEQ ID NO: 55737 - RNA, 32 nt, Human
aggcagagugagcagguaagagagggauauac

SEQ ID NO: 55738 - RNA, 32 nt, Human
aggcagagugcacaguggucaagggugcagcu

SEQ ID NO: 55739 - RNA, 32 nt, Human
aggcagagugugacagagcagagccagggcca

SEQ ID NO: 55740 - RNA, 32 nt, Human
aggcagagugugauggggaggagggacaggaa

SEQ ID NO: 55741 - RNA, 24 nt, Human
aggcagaguugggaggaucaccug

SEQ ID NO: 55742 - RNA, 19 nt, Human
aggcagaguuugcagugag

SEQ ID NO: 55743 - RNA, 21 nt, Human
aggcagaucaccugaggccag

SEQ ID NO: 55744 - RNA, 22 nt, Human
aggcagaucaccugaggucagg

SEQ ID NO: 55745 - RNA, 32 nt, Human
aggcagaucacugauccagaacacuucaagaa

SEQ ID NO: 55746 - RNA, 22 nt, Human
aggcagaucacuugaggccagg

SEQ ID NO: 55747 - RNA, 22 nt, Human
aggcagaucacuugaggucagg

SEQ ID NO: 55748 - RNA, 32 nt, Human
aggcagaucucaaacuccaggcucagaacugu

SEQ ID NO: 55749 - RNA, 32 nt, Human
aggcagaucucaaacuccugaccucgugaugc

SEQ ID NO: 55750 - RNA, 32 nt, Human
aggcagaugaacuacaagucugccuuucuucc

SEQ ID NO: 55751 - RNA, 26 nt, Human
aggcagauggaacacuugaggucagg

SEQ ID NO: 55752 - RNA, 32 nt, Human
aggcagauggaggcagggcucacacuggccuc

SEQ ID NO: 55753 - RNA, 24 nt, Human
aggcagauggaucacgaggucagg

SEQ ID NO: 55754 - RNA, 21 nt, Human
aggcagauggaucaugagguc

SEQ ID NO: 55755 - RNA, 24 nt, Human
aggcagauggaucaugaggucagg

SEQ ID NO: 55756 - RNA, 19 nt, Human
aggcagaugggacuaagug

SEQ ID NO: 55757 - RNA, 32 nt, Human
aggcagaugggggucaaaccacugccuuggcc

SEQ ID NO: 55758 - RNA, 32 nt, Human
aggcagauguggguauggggcccagugugaga

SEQ ID NO: 55759 - RNA, 32 nt, Human
aggcagauguugcagugagccgagauggcacc

SEQ ID NO: 55760 - RNA, 32 nt, Human
aggcagauuucgaauuccugaccucaagugau

SEQ ID NO: 55761 - RNA, 22 nt, Human
aggcagcaaggcagugagcuau

SEQ ID NO: 55762 - RNA, 32 nt, Human
aggcagcacagcuugcagcuucaagagagagg

SEQ ID NO: 55763 - RNA, 32 nt, Human
aggcagcaccaccacacagucaccccucccuc

SEQ ID NO: 55764 - RNA, 18 nt, Human
aggcagcaccagggcucc

SEQ ID NO: 55765 - RNA, 32 nt, Human
aggcagcaccagggcugcggagcugcugggag

SEQ ID NO: 55766 - RNA, 32 nt, Human
aggcagcacccaggaauggcagcucuguguuc

SEQ ID NO: 55767 - RNA, 32 nt, Human
aggcagcaccugccccagauggacggggcugu

SEQ ID NO: 55768 - RNA, 32 nt, Human
aggcagcagagccgaggagagcagguccacac

SEQ ID NO: 55769 - RNA, 32 nt, Human
aggcagcagcacucccaccuggcugcucugau

SEQ ID NO: 55770 - RNA, 32 nt, Human
aggcagcagcagagggagagcucggggcuugg

SEQ ID NO: 55771 - RNA, 32 nt, Human
aggcagcagcauguaauuaucaacauuaguau

SEQ ID NO: 55772 - RNA, 32 nt, Human
aggcagcagccccagucagggacuuauagaua

SEQ ID NO: 55773 - RNA, 32 nt, Human
aggcagcagcuggaguaguuacauugucauca

SEQ ID NO: 55774 - RNA, 32 nt, Human
aggcagcagcuggcaccaucagagccaggaga

SEQ ID NO: 55775 - RNA, 32 nt, Human
aggcagcaggaaggagaaaggagggaagguaa

SEQ ID NO: 55776 - RNA, 32 nt, Human
aggcagcaggagagaggagagggcagaacagg

SEQ ID NO: 55777 - RNA, 32 nt, Human
aggcagcaggauucaugcugggcauucugugu

SEQ ID NO: 55778 - RNA, 32 nt, Human
aggcagcaggcaccaguccaggagagcuucgu

SEQ ID NO: 55779 - RNA, 32 nt, Human
aggcagcagguggcagaauggggugcaugaag

SEQ ID NO: 55780 - RNA, 32 nt, Human
aggcagcagugagccgagauugcgccacuuca

SEQ ID NO: 55781 - RNA, 32 nt, Human
aggcagcagugccuggaaaaccagucccgccc

SEQ ID NO: 55782 - RNA, 32 nt, Human
aggcagcaguggcagccacucagugugagaca

SEQ ID NO: 55783 - RNA, 32 nt, Human
aggcagcagugucuguaccucgggugggaggg

SEQ ID NO: 55784 - RNA, 32 nt, Human
aggcagcaucacacuggggucacugacagacu

SEQ ID NO: 55785 - RNA, 20 nt, Human
aggcagcauccacgcccucc

SEQ ID NO: 55786 - RNA, 32 nt, Human
aggcagcaugagaugcuguccucugaucccca

SEQ ID NO: 55787 - RNA, 32 nt, Human
aggcagcauggcagagaaccagaaggaagucc

SEQ ID NO: 55788 - RNA, 32 nt, Human
aggcagcauuccaugaccagaaacagggacaa

SEQ ID NO: 55789 - RNA, 32 nt, Human
aggcagcauuggggagcaggaggcugaugguc

SEQ ID NO: 55790 - RNA, 32 nt, Human
aggcagccaaucauauccuuccugccucaccu

SEQ ID NO: 55791 - RNA, 32 nt, Human
aggcagccacagcagaacgcugaccccucacu

SEQ ID NO: 55792 - RNA, 32 nt, Human
aggcagccacccacaccuucccucucugaaug

SEQ ID NO: 55793 - RNA, 32 nt, Human
aggcagccacccugcucugccugccagcggcc

SEQ ID NO: 55794 - RNA, 32 nt, Human
aggcagccacuggccaagacucuguucugaau

SEQ ID NO: 55795 - RNA, 32 nt, Human
aggcagccagcugugcagccaggugugacugu

SEQ ID NO: 55796 - RNA, 32 nt, Human
aggcagccagugugacacugcuuuaacugcau

SEQ ID NO: 55797 - RNA, 32 nt, Human
aggcagcccaagagcucagggagccagggacc

SEQ ID NO: 55798 - RNA, 32 nt, Human
aggcagcccaccuguccugccucccaggagcc

SEQ ID NO: 55799 - RNA, 32 nt, Human
aggcagcccaggacucagaaauccagguccug

SEQ ID NO: 55800 - RNA, 32 nt, Human
aggcagccccuugccagcauccccacacccac

SEQ ID NO: 55801 - RNA, 32 nt, Human
aggcagcccuacuucuuugcuuugcccagcau

SEQ ID NO: 55802 - RNA, 32 nt, Human
aggcagcccugagaagacucugucugcccuac

SEQ ID NO: 55803 - RNA, 32 nt, Human
aggcagcccuggcaaaugaaucaaagacccau

SEQ ID NO: 55804 - RNA, 19 nt, Human
aggcagccgaggcgccggg

SEQ ID NO: 55805 - RNA, 24 nt, Human
aggcagccggaucaugaggucagg

SEQ ID NO: 55806 - RNA, 32 nt, Human
aggcagccgggaugacagcucuccccaggaau

SEQ ID NO: 55807 - RNA, 20 nt, Human
aggcagccuaggcccugggg

SEQ ID NO: 55808 - RNA, 32 nt, Human
aggcagccucucgcugcuguucaucagcagcc

SEQ ID NO: 55809 - RNA, 32 nt, Human
aggcagccugaguuuucuguccccugguaugc

SEQ ID NO: 55810 - RNA, 21 nt, Human
aggcagccugcaaggcgcuca

SEQ ID NO: 55811 - RNA, 32 nt, Human
aggcagccugcaggcuaggaaguggccuagug

SEQ ID NO: 55812 - RNA, 32 nt, Human
aggcagccugcaggcuggggacccugggugca

SEQ ID NO: 55813 - RNA, 32 nt, Human
aggcagccugcucuccucuuaugauggccuug

SEQ ID NO: 55814 - RNA, 32 nt, Human
aggcagccugcugccguaugcuucaguggcac

SEQ ID NO: 55815 - RNA, 32 nt, Human
aggcagccuucugcugaggacauaggcagaag

SEQ ID NO: 55816 - RNA, 19 nt, Human
aggcagcgaagccucgggg

SEQ ID NO: 55817 - RNA, 18 nt, Human
aggcagcgcagcggcggg

SEQ ID NO: 55818 - RNA, 32 nt, Human
aggcagcgcuggucgucaccugggcggccaga

SEQ ID NO: 55819 - RNA, 32 nt, Human
aggcagcuagcuaccuaccuugcccagugcug

SEQ ID NO: 55820 - RNA, 32 nt, Human
aggcagcucaagcugaauaaauagcugcagac

SEQ ID NO: 55821 - RNA, 32 nt, Human
aggcagcucacuggagagccuacauuccuuac

SEQ ID NO: 55822 - RNA, 32 nt, Human
aggcagcucagcccagccugggcacagccagu

SEQ ID NO: 55823 - RNA, 32 nt, Human
aggcagcucaugccagggacugggccgcuccu

SEQ ID NO: 55824 - RNA, 32 nt, Human
aggcagcuccagccugggggacaggugacccc

SEQ ID NO: 55825 - RNA, 32 nt, Human
aggcagcucccauccagcgguugaagccugau

SEQ ID NO: 55826 - RNA, 32 nt, Human
aggcagcucucuacaugccuguccugggcuag

SEQ ID NO: 55827 - RNA, 20 nt, Human
aggcagcugaaaguggaggg

SEQ ID NO: 55828 - RNA, 19 nt, Human
aggcagcugagaggcaggg

SEQ ID NO: 55829 - RNA, 18 nt, Human
aggcagcugcccucaggg

SEQ ID NO: 55830 - RNA, 32 nt, Human
aggcagcugccuggugcccagcuugcuucucg

SEQ ID NO: 55831 - RNA, 18 nt, Human
aggcagcugcuccaggaa

SEQ ID NO: 55832 - RNA, 32 nt, Human
aggcagcugcucccaggacacugaggccaaga

SEQ ID NO: 55833 - RNA, 21 nt, Human
aggcagcugcugggcugcggg

SEQ ID NO: 55834 - RNA, 32 nt, Human
aggcagcuggagugggagaaagguggcucgga

SEQ ID NO: 55835 - RNA, 32 nt, Human
aggcagcuggggagaggccccgccucuggugg

SEQ ID NO: 55836 - RNA, 32 nt, Human
aggcagcugguucucuucuggcccagggugug

SEQ ID NO: 55837 - RNA, 32 nt, Human
aggcagcuguguggcgguggggccacagggca

SEQ ID NO: 55838 - RNA, 32 nt, Human
aggcagcuuaaggccuggcucacaggcugugg

SEQ ID NO: 55839 - RNA, 32 nt, Human
aggcagcuuagcccauccagacugguccugaa

SEQ ID NO: 55840 - RNA, 21 nt, Human
aggcagcuucccacuaggggg

SEQ ID NO: 55841 - RNA, 32 nt, Human
aggcagcuuccugggcaggaggguuccauggg

SEQ ID NO: 55842 - RNA, 32 nt, Human
aggcagcuugacuugagaggacgacccuaggg

SEQ ID NO: 55843 - RNA, 32 nt, Human
aggcagcuuggcaagaccccaucucuacaaaa

SEQ ID NO: 55844 - RNA, 32 nt, Human
aggcagcuuggguggaggaagcaugcaggggc

SEQ ID NO: 55845 - RNA, 32 nt, Human
aggcagcuugugagccccucucccucuccgcc

SEQ ID NO: 55846 - RNA, 32 nt, Human
aggcagcuuugguagcuggugggacugacgcc

SEQ ID NO: 55847 - RNA, 21 nt, Human
aggcaggaaaaucgcuugaac

SEQ ID NO: 55848 - RNA, 32 nt, Human
aggcaggaacaguucugaagucaaaggcugau

SEQ ID NO: 55849 - RNA, 32 nt, Human
aggcaggaacugggaauaggcuuggagguggc

SEQ ID NO: 55850 - RNA, 32 nt, Human
aggcaggaagaaaggaaggaaggaaagaagga

SEQ ID NO: 55851 - RNA, 20 nt, Human
aggcaggaagacugcuugaa

SEQ ID NO: 55852 - RNA, 20 nt, Human
aggcaggaagauggcuugaa

SEQ ID NO: 55853 - RNA, 24 nt, Human
aggcaggaagauugcuucagccca

SEQ ID NO: 55854 - RNA, 24 nt, Human
aggcaggaagauugcuugaacuca

SEQ ID NO: 55855 - RNA, 32 nt, Human
aggcaggaagauugcuugagccuagcaguucg

SEQ ID NO: 55856 - RNA, 32 nt, Human
aggcaggaagcccaggaggagugcgggcaggg

SEQ ID NO: 55857 - RNA, 32 nt, Human
aggcaggaaggcgcuccucuccugccccgccg

SEQ ID NO: 55858 - RNA, 32 nt, Human
aggcaggaauaagaagucagacagagacagca

SEQ ID NO: 55859 - RNA, 20 nt, Human
aggcaggaccaggguuccau

SEQ ID NO: 55860 - RNA, 32 nt, Human
aggcaggacucugccaaaaguccccugccagg

SEQ ID NO: 55861 - RNA, 32 nt, Human
aggcaggacucugcuguccccugcugcuccug

SEQ ID NO: 55862 - RNA, 32 nt, Human
aggcaggagaaacaccugagcccaggaggugg

SEQ ID NO: 55863 - RNA, 21 nt, Human
aggcaggagaauagcaugaac

SEQ ID NO: 55864 - RNA, 21 nt, Human
aggcaggagaaucacuugaac

SEQ ID NO: 55865 - RNA, 21 nt, Human
aggcaggagaaucacuugaau

SEQ ID NO: 55866 - RNA, 32 nt, Human
aggcaggagaaucagagguugcagugaaccga

SEQ ID NO: 55867 - RNA, 21 nt, Human
aggcaggagaaucgccugaac

SEQ ID NO: 55868 - RNA, 20 nt, Human
aggcaggagaaucgcucgaa

SEQ ID NO: 55869 - RNA, 21 nt, Human
aggcaggagaaucgcuugaac

SEQ ID NO: 55870 - RNA, 32 nt, Human
aggcaggagaaucgcuugaaccugugggucag

SEQ ID NO: 55871 - RNA, 21 nt, Human
aggcaggagaauggcgugaac

SEQ ID NO: 55872 - RNA, 21 nt, Human
aggcaggagaauugccugaac

SEQ ID NO: 55873 - RNA, 21 nt, Human
aggcaggagaauugcucgaac

SEQ ID NO: 55874 - RNA, 21 nt, Human
aggcaggagaauugcuggaac

SEQ ID NO: 55875 - RNA, 21 nt, Human
aggcaggagaauugcuugaac

SEQ ID NO: 55876 - RNA, 23 nt, Human
aggcaggagaauugcuugaacca

SEQ ID NO: 55877 - RNA, 24 nt, Human
aggcaggagaauugcuugaaccca

SEQ ID NO: 55878 - RNA, 24 nt, Human
aggcaggagaauugcuugaacuca

SEQ ID NO: 55879 - RNA, 24 nt, Human
aggcaggagaauugcuugaaucca

SEQ ID NO: 55880 - RNA, 24 nt, Human
aggcaggagaauugcuugaauccc

SEQ ID NO: 55881 - RNA, 23 nt, Human
aggcaggagaauugcuugaccca

SEQ ID NO: 55882 - RNA, 24 nt, Human
aggcaggagaauugcuugagccca

SEQ ID NO: 55883 - RNA, 23 nt, Human
aggcaggagaauugcuugagucc

SEQ ID NO: 55884 - RNA, 32 nt, Human
aggcaggagagggaaaggcagcagcggcggca

SEQ ID NO: 55885 - RNA, 32 nt, Human
aggcaggagcagcagacaagagugcaguggug

SEQ ID NO: 55886 - RNA, 32 nt, Human
aggcaggagcaggauucgagagacaggacccc

SEQ ID NO: 55887 - RNA, 22 nt, Human
aggcaggagccccgcccuccca

SEQ ID NO: 55888 - RNA, 32 nt, Human
aggcaggagcccucucauggugaacagcaacu

SEQ ID NO: 55889 - RNA, 32 nt, Human
aggcaggaggacuaggaggaggaggaggagcc

SEQ ID NO: 55890 - RNA, 21 nt, Human
aggcaggaggaucacuugaac

SEQ ID NO: 55891 - RNA, 32 nt, Human
aggcaggaggaucgcuugagugugugaguuca

SEQ ID NO: 55892 - RNA, 24 nt, Human
aggcaggaggauugccugagccca

SEQ ID NO: 55893 - RNA, 23 nt, Human
aggcaggaggauugcuggagccu

SEQ ID NO: 55894 - RNA, 24 nt, Human
aggcaggaggauugcuugaauuca

SEQ ID NO: 55895 - RNA, 20 nt, Human
aggcaggaggauugcuugag

SEQ ID NO: 55896 - RNA, 23 nt, Human
aggcaggaggauugcuugagacc

SEQ ID NO: 55897 - RNA, 23 nt, Human
aggcaggaggauugcuugagccc

SEQ ID NO: 55898 - RNA, 24 nt, Human
aggcaggaggauugcuugagccca

SEQ ID NO: 55899 - RNA, 23 nt, Human
aggcaggaggauugcuugagccu

SEQ ID NO: 55900 - RNA, 24 nt, Human
aggcaggaggauugcuugagcuca

SEQ ID NO: 55901 - RNA, 23 nt, Human
aggcaggaggauugcuugagguc

SEQ ID NO: 55902 - RNA, 23 nt, Human
aggcaggaggauugcuugagucc

SEQ ID NO: 55903 - RNA, 23 nt, Human
aggcaggaggauugcuugagucu

SEQ ID NO: 55904 - RNA, 32 nt, Human
aggcaggaggcagagcgcggcccugcgucaga

SEQ ID NO: 55905 - RNA, 32 nt, Human
aggcaggaggcagugggcuucauggcuccuug

SEQ ID NO: 55906 - RNA, 32 nt, Human
aggcaggaggcuggggugcugugugggggcca

SEQ ID NO: 55907 - RNA, 32 nt, Human
aggcaggaggugggggaagagcugaaucucuu

SEQ ID NO: 55908 - RNA, 32 nt, Human
aggcaggaguagaagugaaaggaaaggucuga

SEQ ID NO: 55909 - RNA, 32 nt, Human
aggcaggaguggagaggcauggagaggcccca

SEQ ID NO: 55910 - RNA, 32 nt, Human
aggcaggaguuucucucggugacuacuaucgc

SEQ ID NO: 55911 - RNA, 21 nt, Human
aggcaggauaaucacuugaac

SEQ ID NO: 55912 - RNA, 32 nt, Human
aggcaggauauccccagggaaacccaucuuca

SEQ ID NO: 55913 - RNA, 24 nt, Human
aggcaggaugauugcuuaagccca

SEQ ID NO: 55914 - RNA, 32 nt, Human
aggcaggauguucaaaugauugcaguucacua

SEQ ID NO: 55915 - RNA, 31 nt, Human
aggcaggcaaugucacauuuuaaggacaugg

SEQ ID NO: 55916 - RNA, 24 nt, Human
aggcaggcacaguuuauggcguca

SEQ ID NO: 55917 - RNA, 32 nt, Human
aggcaggcacuauccaaucaccugagggccca

SEQ ID NO: 55918 - RNA, 24 nt, Human
aggcaggcagaccacgaggucagg

SEQ ID NO: 55919 - RNA, 32 nt, Human
aggcaggcagaggcugaggcugauuccacccc

SEQ ID NO: 55920 - RNA, 32 nt, Human
aggcaggcagaguggagagggagagacggagc

SEQ ID NO: 55921 - RNA, 24 nt, Human
aggcaggcagaucacaaggucagg

SEQ ID NO: 55922 - RNA, 25 nt, Human
aggcaggcagaucaccugaggucag

SEQ ID NO: 55923 - RNA, 26 nt, Human
aggcaggcagaucaccugaggucagg

SEQ ID NO: 55924 - RNA, 26 nt, Human
aggcaggcagaucaccugaggucggg

SEQ ID NO: 55925 - RNA, 32 nt, Human
aggcaggcagaucaccugagguugggaguuca

SEQ ID NO: 55926 - RNA, 26 nt, Human
aggcaggcagaucaccuggggucagg

SEQ ID NO: 55927 - RNA, 26 nt, Human
aggcaggcagaucaccuuaggucagg

SEQ ID NO: 55928 - RNA, 21 nt, Human
aggcaggcagaucacgagguc

SEQ ID NO: 55929 - RNA, 24 nt, Human
aggcaggcagaucacgaggucagg

SEQ ID NO: 55930 - RNA, 24 nt, Human
aggcaggcagaucacggggucagg

SEQ ID NO: 55931 - RNA, 26 nt, Human
aggcaggcagaucacgugaggucagg

SEQ ID NO: 55932 - RNA, 26 nt, Human
aggcaggcagaucacuugaggucagg

SEQ ID NO: 55933 - RNA, 26 nt, Human
aggcaggcagaucacuugaggucggg

SEQ ID NO: 55934 - RNA, 26 nt, Human
aggcaggcagaucagcugaggucagg

SEQ ID NO: 55935 - RNA, 26 nt, Human
aggcaggcagaucaucugaggucagg

SEQ ID NO: 55936 - RNA, 24 nt, Human
aggcaggcagaucaugaggucagg

SEQ ID NO: 55937 - RNA, 26 nt, Human
aggcaggcagaucauuugaggucagg

SEQ ID NO: 55938 - RNA, 26 nt, Human
aggcaggcagaucgccugaggucagg

SEQ ID NO: 55939 - RNA, 26 nt, Human
aggcaggcagaucgcuugaggucagg

SEQ ID NO: 55940 - RNA, 21 nt, Human
aggcaggcagcccaggcccug

SEQ ID NO: 55941 - RNA, 32 nt, Human
aggcaggcagcccuguaccccacccacauaga

SEQ ID NO: 55942 - RNA, 22 nt, Human
aggcaggcagcugcaggcgcuc

SEQ ID NO: 55943 - RNA, 32 nt, Human
aggcaggcaggcaggcaugugucagagcccuu

SEQ ID NO: 55944 - RNA, 32 nt, Human
aggcaggcaggcaggugguuggauggggaggc

SEQ ID NO: 55945 - RNA, 32 nt, Human
aggcaggcaggcaugugucagagcccuucaca

SEQ ID NO: 55946 - RNA, 32 nt, Human
aggcaggcagggcaguugggucccuugccagc

SEQ ID NO: 55947 - RNA, 23 nt, Human
aggcaggcagugcggggugccca

SEQ ID NO: 55948 - RNA, 32 nt, Human
aggcaggcagugcugguuccucugccuguguc

SEQ ID NO: 55949 - RNA, 32 nt, Human
aggcaggcauaucaacuugaggccaggaguua

SEQ ID NO: 55950 - RNA, 32 nt, Human
aggcaggccaagacuugaguuggcaacucagc

SEQ ID NO: 55951 - RNA, 24 nt, Human
aggcaggccgauugcuugagccca

SEQ ID NO: 55952 - RNA, 17 nt, Human
aggcaggccugaggcag

SEQ ID NO: 55953 - RNA, 32 nt, Human
aggcaggccuggggcugcccugcucacucuca

SEQ ID NO: 55954 - RNA, 24 nt, Human
aggcaggcgaaucacgaggucagg

SEQ ID NO: 55955 - RNA, 23 nt, Human
aggcaggcggaccacgaggucag

SEQ ID NO: 55956 - RNA, 21 nt, Human
aggcaggcggaucacaagguc

SEQ ID NO: 55957 - RNA, 24 nt, Human
aggcaggcggaucacaaggucagg

SEQ ID NO: 55958 - RNA, 24 nt, Human
aggcaggcggaucacagggucggg

SEQ ID NO: 55959 - RNA, 26 nt, Human
aggcaggcggaucaccugaggucagg

SEQ ID NO: 55960 - RNA, 26 nt, Human
aggcaggcggaucaccugaggucggg

SEQ ID NO: 55961 - RNA, 26 nt, Human
aggcaggcggaucaccugagguuagg

SEQ ID NO: 55962 - RNA, 26 nt, Human
aggcaggcggaucaccuuaggucagg

SEQ ID NO: 55963 - RNA, 21 nt, Human
aggcaggcggaucacgaaguc

SEQ ID NO: 55964 - RNA, 24 nt, Human
aggcaggcggaucacgaagucagg

SEQ ID NO: 55965 - RNA, 21 nt, Human
aggcaggcggaucacgagguc

SEQ ID NO: 55966 - RNA, 22 nt, Human
aggcaggcggaucacgagguca

SEQ ID NO: 55967 - RNA, 24 nt, Human
aggcaggcggaucacgaggucagg

SEQ ID NO: 55968 - RNA, 32 nt, Human
aggcaggcggaucacuugaggccaggaguucg

SEQ ID NO: 55969 - RNA, 26 nt, Human
aggcaggcggaucacuugaggucagg

SEQ ID NO: 55970 - RNA, 26 nt, Human
aggcaggcggaucacuugagguuagg

SEQ ID NO: 55971 - RNA, 26 nt, Human
aggcaggcggaucaucugaggucagg

SEQ ID NO: 55972 - RNA, 24 nt, Human
aggcaggcggaucaugagaucagg

SEQ ID NO: 55973 - RNA, 24 nt, Human
aggcaggcggaucaugaggucagg

SEQ ID NO: 55974 - RNA, 23 nt, Human
aggcaggcggaucaugaggucgg

SEQ ID NO: 55975 - RNA, 26 nt, Human
aggcaggcggaucuccugaggucagg

SEQ ID NO: 55976 - RNA, 26 nt, Human
aggcaggcggauuaccugaggucagg

SEQ ID NO: 55977 - RNA, 26 nt, Human
aggcaggcggauuaccuuaggucagg

SEQ ID NO: 55978 - RNA, 26 nt, Human
aggcaggcggauugccugaggucagg

SEQ ID NO: 55979 - RNA, 32 nt, Human
aggcaggcggcagcaggcucugacuuaaccac

SEQ ID NO: 55980 - RNA, 24 nt, Human
aggcaggcggcucacgaggucagg

SEQ ID NO: 55981 - RNA, 32 nt, Human
aggcaggcgggaggccaggggugcagaauugg

SEQ ID NO: 55982 - RNA, 26 nt, Human
aggcaggcgggucaccugaggucagg

SEQ ID NO: 55983 - RNA, 24 nt, Human
aggcaggcgggucaugaggucagg

SEQ ID NO: 55984 - RNA, 32 nt, Human
aggcaggcucacuggccauuuucccuagaguc

SEQ ID NO: 55985 - RNA, 32 nt, Human
aggcaggcugcaaaugacccagaagagggacc

SEQ ID NO: 55986 - RNA, 18 nt, Human
aggcaggcugccucaggg

SEQ ID NO: 55987 - RNA, 32 nt, Human
aggcaggcuucaaccagccacuccagcuuugu

SEQ ID NO: 55988 - RNA, 24 nt, Human
aggcaggcuugaugggagcgccca

SEQ ID NO: 55989 - RNA, 32 nt, Human
aggcagggaagaauugggccugugcugaucca

SEQ ID NO: 55990 - RNA, 25 nt, Human
aggcagggagaauugcuugaaccca

SEQ ID NO: 55991 - RNA, 32 nt, Human
aggcagggagaggauucuccagugagugcaca

SEQ ID NO: 55992 - RNA, 32 nt, Human
aggcagggagcuagggcagggaccaaaugaac

SEQ ID NO: 55993 - RNA, 32 nt, Human
aggcagggaggaaaagcggucuucggccuccg

SEQ ID NO: 55994 - RNA, 32 nt, Human
aggcagggaggaauccuccccacaaagaagaa

SEQ ID NO: 55995 - RNA, 32 nt, Human
aggcagggaggcagggaggcagggaggaacgg

SEQ ID NO: 55996 - RNA, 32 nt, Human
aggcagggagggggugguguccccagccgguu

SEQ ID NO: 55997 - RNA, 32 nt, Human
aggcagggagugaaucagcagagcagagggag

SEQ ID NO: 55998 - RNA, 19 nt, Human
aggcagggcaagccggggu

SEQ ID NO: 55999 - RNA, 22 nt, Human
aggcagggcagagccucagggg

SEQ ID NO: 56000 - RNA, 18 nt, Human
aggcagggcagaggggga

SEQ ID NO: 56001 - RNA, 32 nt, Human
aggcagggcagccaggggcugcagugaaauga

SEQ ID NO: 56002 - RNA, 32 nt, Human
aggcagggcagccaggggcugcagugaaaugg

SEQ ID NO: 56003 - RNA, 32 nt, Human
aggcagggccaucaggcaccagaaggauuuug

SEQ ID NO: 56004 - RNA, 24 nt, Human
aggcagggccgaggggccugcggg

SEQ ID NO: 56005 - RNA, 32 nt, Human
aggcagggccgcugcccgcccugggccggcac

SEQ ID NO: 56006 - RNA, 32 nt, Human
aggcagggcggcaggccagggaaggagaggcc

SEQ ID NO: 56007 - RNA, 32 nt, Human
aggcagggcucaaaugaggaacugguccauag

SEQ ID NO: 56008 - RNA, 32 nt, Human
aggcagggcucucuuuccuucuugccuucaga

SEQ ID NO: 56009 - RNA, 32 nt, Human
aggcagggcuggagggggaaaauaaaucauua

SEQ ID NO: 56010 - RNA, 23 nt, Human
aggcaggggaacacaaggucagg

SEQ ID NO: 56011 - RNA, 32 nt, Human
aggcaggggagguggcugguuuaaggggaacu

SEQ ID NO: 56012 - RNA, 21 nt, Human
aggcaggggaucuuccuccca

SEQ ID NO: 56013 - RNA, 32 nt, Human
aggcaggggaugaccgggacaggccugggcug

SEQ ID NO: 56014 - RNA, 32 nt, Human
aggcaggggcggggcucggagcggggccuugg

SEQ ID NO: 56015 - RNA, 32 nt, Human
aggcagggggcaagaggaaggagaagcagcuc

SEQ ID NO: 56016 - RNA, 32 nt, Human
aggcaggggugggagagccagcucucucuacc

SEQ ID NO: 56017 - RNA, 32 nt, Human
aggcagggguggggguggaggcuuccugcguc

SEQ ID NO: 56018 - RNA, 19 nt, Human
aggcagggguugcagugag

SEQ ID NO: 56019 - RNA, 32 nt, Human
aggcagggucagcagaggcuccagcgagggca

SEQ ID NO: 56020 - RNA, 32 nt, Human
aggcagggucucacucugguugcccaggcugg

SEQ ID NO: 56021 - RNA, 32 nt, Human
aggcagggugcagacagcacagucagcucugc

SEQ ID NO: 56022 - RNA, 19 nt, Human
aggcaggguggccucaggg

SEQ ID NO: 56023 - RNA, 20 nt, Human
aggcaggguuucaccauguu

SEQ ID NO: 56024 - RNA, 21 nt, Human
aggcaggguuucaccauguug

SEQ ID NO: 56025 - RNA, 21 nt, Human
aggcaggguuucuccauguug

SEQ ID NO: 56026 - RNA, 21 nt, Human
aggcagguagaucacaagguc

SEQ ID NO: 56027 - RNA, 24 nt, Human
aggcagguagaucacaaggucagg

SEQ ID NO: 56028 - RNA, 24 nt, Human
aggcagguagaucacgaggucagg

SEQ ID NO: 56029 - RNA, 24 nt, Human
aggcagguagaucaugaggucagg

SEQ ID NO: 56030 - RNA, 32 nt, Human
aggcagguaguggcacaugggcacuugacaag

SEQ ID NO: 56031 - RNA, 24 nt, Human
aggcaggucgaucacgaggucagg

SEQ ID NO: 56032 - RNA, 32 nt, Human
aggcaggucgggaggaagaagagguggaggug

SEQ ID NO: 56033 - RNA, 32 nt, Human
aggcaggucucaaaguccugaccucaggugau

SEQ ID NO: 56034 - RNA, 32 nt, Human
aggcaggucuccaacuccugaccucaagugau

SEQ ID NO: 56035 - RNA, 16 nt, Human
aggcaggucugagcca

SEQ ID NO: 56036 - RNA, 32 nt, Human
aggcaggucuugaacuccuggccucaagugau

SEQ ID NO: 56037 - RNA, 32 nt, Human
aggcaggugagaaaggcagggccacuccucag

SEQ ID NO: 56038 - RNA, 32 nt, Human
aggcaggugagaggaggaaggaagcggcggcg

SEQ ID NO: 56039 - RNA, 18 nt, Human
aggcaggugaggauguca

SEQ ID NO: 56040 - RNA, 32 nt, Human
aggcaggugaucugcugcagagcaguaaggga

SEQ ID NO: 56041 - RNA, 32 nt, Human
aggcaggugcggagauaaaggagaagcagauu

SEQ ID NO: 56042 - RNA, 32 nt, Human
aggcaggugcugccucacaauggucucuuuag

SEQ ID NO: 56043 - RNA, 32 nt, Human
aggcagguggaggcugcgcacagcuucucccg

SEQ ID NO: 56044 - RNA, 26 nt, Human
aggcagguggaucaacugaggucagg

SEQ ID NO: 56045 - RNA, 24 nt, Human
aggcagguggaucacaagaucagg

SEQ ID NO: 56046 - RNA, 24 nt, Human
aggcagguggaucacaaggucagg

SEQ ID NO: 56047 - RNA, 24 nt, Human
aggcagguggaucacaagguuggg

SEQ ID NO: 56048 - RNA, 26 nt, Human
aggcagguggaucaccuaaggucagg

SEQ ID NO: 56049 - RNA, 26 nt, Human
aggcagguggaucaccucaggucagg

SEQ ID NO: 56050 - RNA, 24 nt, Human
aggcagguggaucaccugagguca

SEQ ID NO: 56051 - RNA, 25 nt, Human
aggcagguggaucaccugaggucag

SEQ ID NO: 56052 - RNA, 26 nt, Human
aggcagguggaucaccugaggucagg

SEQ ID NO: 56053 - RNA, 26 nt, Human
aggcagguggaucaccugaggucggg

SEQ ID NO: 56054 - RNA, 26 nt, Human
aggcagguggaucaccugagguuagg

SEQ ID NO: 56055 - RNA, 26 nt, Human
aggcagguggaucaccuuaggucagg

SEQ ID NO: 56056 - RNA, 24 nt, Human
aggcagguggaucacgaggccagg

SEQ ID NO: 56057 - RNA, 21 nt, Human
aggcagguggaucacgagguc

SEQ ID NO: 56058 - RNA, 22 nt, Human
aggcagguggaucacgagguca

SEQ ID NO: 56059 - RNA, 23 nt, Human
aggcagguggaucacgaggucag

SEQ ID NO: 56060 - RNA, 24 nt, Human
aggcagguggaucacgaggucagg

SEQ ID NO: 56061 - RNA, 24 nt, Human
aggcagguggaucacgaugucagg

SEQ ID NO: 56062 - RNA, 26 nt, Human
aggcagguggaucacgugaggucagg

SEQ ID NO: 56063 - RNA, 27 nt, Human
aggcagguggaucacucugaggucagg

SEQ ID NO: 56064 - RNA, 25 nt, Human
aggcagguggaucacugaggucagg

SEQ ID NO: 56065 - RNA, 32 nt, Human
aggcagguggaucacugaggucagggguucaa

SEQ ID NO: 56066 - RNA, 26 nt, Human
aggcagguggaucacuggaggucagg

SEQ ID NO: 56067 - RNA, 26 nt, Human
aggcagguggaucacuugaggucagg

SEQ ID NO: 56068 - RNA, 26 nt, Human
aggcagguggaucacuugagguuagg

SEQ ID NO: 56069 - RNA, 21 nt, Human
aggcagguggaucauagguca

SEQ ID NO: 56070 - RNA, 23 nt, Human
aggcagguggaucaugagaucag

SEQ ID NO: 56071 - RNA, 24 nt, Human
aggcagguggaucaugagaucagg

SEQ ID NO: 56072 - RNA, 22 nt, Human
aggcagguggaucaugagguca

SEQ ID NO: 56073 - RNA, 24 nt, Human
aggcagguggaucaugaggucagg

SEQ ID NO: 56074 - RNA, 26 nt, Human
aggcagguggaucauuugaggucagg

SEQ ID NO: 56075 - RNA, 26 nt, Human
aggcagguggaucgccugaggucagg

SEQ ID NO: 56076 - RNA, 24 nt, Human
aggcagguggaucgugaggucagg

SEQ ID NO: 56077 - RNA, 25 nt, Human
aggcagguggauugccugaggucag

SEQ ID NO: 56078 - RNA, 26 nt, Human
aggcagguggauugccugaggucagg

SEQ ID NO: 56079 - RNA, 24 nt, Human
aggcagguggauugcuugaaccca

SEQ ID NO: 56080 - RNA, 24 nt, Human
aggcagguggauugcuugagccca

SEQ ID NO: 56081 - RNA, 26 nt, Human
aggcagguggauugucugaggucagg

SEQ ID NO: 56082 - RNA, 18 nt, Human
aggcaggugggccucagg

SEQ ID NO: 56083 - RNA, 32 nt, Human
aggcagguugugcagcuuaggggaggacccca

SEQ ID NO: 56084 - RNA, 32 nt, Human
aggcaguacaaggagguugccaacugcagccg

SEQ ID NO: 56085 - RNA, 32 nt, Human
aggcaguagaaaggaggaaggagggagaggga

SEQ ID NO: 56086 - RNA, 32 nt, Human
aggcaguagagggaggcgagagcccggcagcc

SEQ ID NO: 56087 - RNA, 32 nt, Human
aggcaguagccuccuccugggcuccagagggc

SEQ ID NO: 56088 - RNA, 18 nt, Human
aggcaguagccuuagggg

SEQ ID NO: 56089 - RNA, 32 nt, Human
aggcaguauggcaggcaccagcaaagaguuga

SEQ ID NO: 56090 - RNA, 31 nt, Human
aggcagucaauaaauacaugagaaauucagc

SEQ ID NO: 56091 - RNA, 32 nt, Human
aggcagucagcaccagccucagcaacugugca

SEQ ID NO: 56092 - RNA, 32 nt, Human
aggcagucagccacaggaaguguccagacagg

SEQ ID NO: 56093 - RNA, 32 nt, Human
aggcagucaggugaagaugcaggcuaggaagg

SEQ ID NO: 56094 - RNA, 32 nt, Human
aggcagucagugggccgcagccccagaccccc

SEQ ID NO: 56095 - RNA, 32 nt, Human
aggcagucaucuuuauccuguagcccaauugg

SEQ ID NO: 56096 - RNA, 32 nt, Human
aggcagucauucacgaugguuuugugccagcu

SEQ ID NO: 56097 - RNA, 32 nt, Human
aggcaguccaacagcaccagcacggcuaugac

SEQ ID NO: 56098 - RNA, 32 nt, Human
aggcaguccaagagaguucagugaggaccagc

SEQ ID NO: 56099 - RNA, 32 nt, Human
aggcagucccugaaugaccaggccaguguugu

SEQ ID NO: 56100 - RNA, 32 nt, Human
aggcagucucgaacuccugaccucaggugauc

SEQ ID NO: 56101 - RNA, 32 nt, Human
aggcagucugcaaaugaggagucagcuggaag

SEQ ID NO: 56102 - RNA, 32 nt, Human
aggcagucugcucucucucaggaucaccacgc

SEQ ID NO: 56103 - RNA, 32 nt, Human
aggcagucuggcaccucagucuggauucuaac

SEQ ID NO: 56104 - RNA, 32 nt, Human
aggcagugaccucccaaaccagccugccuggu

SEQ ID NO: 56105 - RNA, 32 nt, Human
aggcagugaccuucaaggauguggcugugguc

SEQ ID NO: 56106 - RNA, 32 nt, Human
aggcagugacuuucaguacagcuacagucacc

SEQ ID NO: 56107 - RNA, 32 nt, Human
aggcagugagccuucucuccaccaccauagac

SEQ ID NO: 56108 - RNA, 32 nt, Human
aggcagugagggagguggacggugccagcuga

SEQ ID NO: 56109 - RNA, 23 nt, Human
aggcagugagggcgaggcgcuca

SEQ ID NO: 56110 - RNA, 32 nt, Human
aggcagugcacugggcaugucacaaaggacug

SEQ ID NO: 56111 - RNA, 21 nt, Human
aggcagugcgacgaggucagg

SEQ ID NO: 56112 - RNA, 32 nt, Human
aggcagugcucaauaaaugcuucgaggcugau

SEQ ID NO: 56113 - RNA, 32 nt, Human
aggcagugcucaccucuucuuuaccagaacgg

SEQ ID NO: 56114 - RNA, 32 nt, Human
aggcagugcugguuccucugccugugucccca

SEQ ID NO: 56115 - RNA, 19 nt, Human
aggcaguggaugugacuca

SEQ ID NO: 56116 - RNA, 21 nt, Human
aggcaguggccauggcugccu

SEQ ID NO: 56117 - RNA, 32 nt, Human
aggcagugggagaagaggugguggucguuucu

SEQ ID NO: 56118 - RNA, 32 nt, Human
aggcaguggggcccgacacagacagcgccgcc

SEQ ID NO: 56119 - RNA, 31 nt, Human
aggcaguggguggagagagaauggggagacg

SEQ ID NO: 56120 - RNA, 32 nt, Human
aggcaguggugggaugggagggcaggaggcgg

SEQ ID NO: 56121 - RNA, 32 nt, Human
aggcaguguggacccaaagagugagcagcagc

SEQ ID NO: 56122 - RNA, 32 nt, Human
aggcaguguggguggagagaguggaggccucg

SEQ ID NO: 56123 - RNA, 32 nt, Human
aggcaguuaccugaaacugccuucauucacuc

SEQ ID NO: 56124 - RNA, 32 nt, Human
aggcaguucucauggaauaaaagcuaccugaa

SEQ ID NO: 56125 - RNA, 32 nt, Human
aggcaguugaaggaggcagagaagggguuggu

SEQ ID NO: 56126 - RNA, 32 nt, Human
aggcaguugcaagcgcggaggcugcgagaaau

SEQ ID NO: 56127 - RNA, 32 nt, Human
aggcaguugcggguugcaggaguucaggaaag

SEQ ID NO: 56128 - RNA, 32 nt, Human
aggcaguugugguuuuccugcccagccugcca

SEQ ID NO: 56129 - RNA, 32 nt, Human
aggcaguuuugguggguggugcugaagucugg

SEQ ID NO: 56130 - RNA, 32 nt, Human
aggcauaagcuaccacgcugggccucaauuaa

SEQ ID NO: 56131 - RNA, 32 nt, Human
aggcauaagcuaccaugcugggccugaacaua

SEQ ID NO: 56132 - RNA, 32 nt, Human
aggcauaccgcaugaugcuguacaguacaaau

SEQ ID NO: 56133 - RNA, 20 nt, Human
aggcauagacguccacggac

SEQ ID NO: 56134 - RNA, 21 nt, Human
aggcauagagagauuaaguga

SEQ ID NO: 56135 - RNA, 32 nt, Human
aggcauagagcagauaagaaaaugaauguauc

SEQ ID NO: 56136 - RNA, 19 nt, Human
aggcauagauuauuuccau

SEQ ID NO: 56137 - RNA, 32 nt, Human
aggcauagcacgaacuccuuccucacugcuau

SEQ ID NO: 56138 - RNA, 30 nt, Human
aggcauagcuugcagugagccgagauugcg

SEQ ID NO: 56139 - RNA, 32 nt, Human
aggcauaucucugccaucacauaguauuaugu

SEQ ID NO: 56140 - RNA, 32 nt, Human
aggcauauuuaguauuuuucccccaggccaga

SEQ ID NO: 56141 - RNA, 32 nt, Human
aggcaucacagaagcacaggaggccaguucug

SEQ ID NO: 56142 - RNA, 32 nt, Human
aggcaucacauugugaggaagggagcuuucug

SEQ ID NO: 56143 - RNA, 32 nt, Human
aggcaucaccuuccuucucuacccaacaaccc

SEQ ID NO: 56144 - RNA, 32 nt, Human
aggcaucagaagcacugugaagugauggagac

SEQ ID NO: 56145 - RNA, 22 nt, Human
aggcaucagagaccaguuuuaa

SEQ ID NO: 56146 - RNA, 32 nt, Human
aggcaucagcuuucagagaaugcagcugcguc

SEQ ID NO: 56147 - RNA, 32 nt, Human
aggcaucaggagugaccuccagaagcuccggg

SEQ ID NO: 56148 - RNA, 32 nt, Human
aggcaucaucccuaccucugcaggcucaggug

SEQ ID NO: 56149 - RNA, 24 nt, Human
aggcaucauuggcuccaauuuuag

SEQ ID NO: 56150 - RNA, 32 nt, Human
aggcauccccgagcagcaccaugcuuggugag

SEQ ID NO: 56151 - RNA, 32 nt, Human
aggcaucccucaccucugcauugaacuuacgu

SEQ ID NO: 56152 - RNA, 17 nt, Human
aggcauccgcucaguuc

SEQ ID NO: 56153 - RNA, 32 nt, Human
aggcauccuaccagcagcaccaucaaggcaug

SEQ ID NO: 56154 - RNA, 32 nt, Human
aggcauccuggaccuuggcguugccgcuccgc

SEQ ID NO: 56155 - RNA, 32 nt, Human
aggcaucggagcuuccagccuggggagaccuu

SEQ ID NO: 56156 - RNA, 32 nt, Human
aggcaucggaggugggcgggguugcagugacu

SEQ ID NO: 56157 - RNA, 32 nt, Human
aggcaucucaaucaugauuacaugaagcagau

SEQ ID NO: 56158 - RNA, 32 nt, Human
aggcaucuccuuucccuuccugucuuccucuc

SEQ ID NO: 56159 - RNA, 32 nt, Human
aggcaucucggcuugcaggaggccaacugcug

SEQ ID NO: 56160 - RNA, 32 nt, Human
aggcaucucuaaaagaaaggcagcagccccag

SEQ ID NO: 56161 - RNA, 32 nt, Human
aggcaucucuauaaggaugugauguuggaaaa

SEQ ID NO: 56162 - RNA, 32 nt, Human
aggcaucucuuuggcugaacaucgagaggccc

SEQ ID NO: 56163 - RNA, 32 nt, Human
aggcaucugaggauaaaucacugugaaacagc

SEQ ID NO: 56164 - RNA, 32 nt, Human
aggcaucugcaaucucagcuacucaggaggcu

SEQ ID NO: 56165 - RNA, 32 nt, Human
aggcaucugcuccccgucucccccuccaaaaa

SEQ ID NO: 56166 - RNA, 32 nt, Human
aggcaucugcugcugcuccuggcugccacuca

SEQ ID NO: 56167 - RNA, 32 nt, Human
aggcaucuggaacuuucucugccugcaggggc

SEQ ID NO: 56168 - RNA, 32 nt, Human
aggcaucugggagggcccugcccccaugggcu

SEQ ID NO: 56169 - RNA, 32 nt, Human
aggcaucuguagucccagcuacuugggaagcu

SEQ ID NO: 56170 - RNA, 31 nt, Human
aggcaucuuaauagacuucuguugaaaacuu

SEQ ID NO: 56171 - RNA, 32 nt, Human
aggcaucuucaaguaccagagaugucuccaag

SEQ ID NO: 56172 - RNA, 32 nt, Human
aggcaucuuuccaaguacucaucuaauuuaau

SEQ ID NO: 56173 - RNA, 22 nt, Human
aggcaugaaccaccgugcccgg

SEQ ID NO: 56174 - RNA, 22 nt, Human
aggcaugaaccaccgugccugg

SEQ ID NO: 56175 - RNA, 32 nt, Human
aggcaugacaggcccugcucagaggucagagg

SEQ ID NO: 56176 - RNA, 32 nt, Human
aggcaugaccucugggcucucuagguggcccu

SEQ ID NO: 56177 - RNA, 32 nt, Human
aggcaugacucugcagagaugacucagcacug

SEQ ID NO: 56178 - RNA, 32 nt, Human
aggcaugacuugcagcugucuccuggauugug

SEQ ID NO: 56179 - RNA, 21 nt, Human
aggcaugagaauugcuugaac

SEQ ID NO: 56180 - RNA, 32 nt, Human
aggcaugagcauguguguaucacuuugaagaa

SEQ ID NO: 56181 - RNA, 22 nt, Human
aggcaugagccacagugcccgg

SEQ ID NO: 56182 - RNA, 32 nt, Human
aggcaugagccaccacacccagccuucagcug

SEQ ID NO: 56183 - RNA, 32 nt, Human
aggcaugagccaccacacccagccuuuauugc

SEQ ID NO: 56184 - RNA, 23 nt, Human
aggcaugagccaccacauccggu

SEQ ID NO: 56185 - RNA, 22 nt, Human
aggcaugagccaccacaucugg

SEQ ID NO: 56186 - RNA, 23 nt, Human
aggcaugagccaccacgccuggu

SEQ ID NO: 56187 - RNA, 27 nt, Human
aggcaugagccaccacgccuguccggu

SEQ ID NO: 56188 - RNA, 22 nt, Human
aggcaugagccaccacuccugg

SEQ ID NO: 56189 - RNA, 21 nt, Human
aggcaugagccaccaggccgg

SEQ ID NO: 56190 - RNA, 32 nt, Human
aggcaugagccaccaugcccagccuccuucuc

SEQ ID NO: 56191 - RNA, 22 nt, Human
aggcaugagccaccaugcccgg

SEQ ID NO: 56192 - RNA, 22 nt, Human
aggcaugagccaccaugccugg

SEQ ID NO: 56193 - RNA, 32 nt, Human
aggcaugagccaccgcacccagccucucuugu

SEQ ID NO: 56194 - RNA, 32 nt, Human
aggcaugagccaccgcacccagccugcauucc

SEQ ID NO: 56195 - RNA, 32 nt, Human
aggcaugagccaccgcacccagccugguuauu

SEQ ID NO: 56196 - RNA, 22 nt, Human
aggcaugagccaccgcacccgg

SEQ ID NO: 56197 - RNA, 21 nt, Human
aggcaugagccaccgcaccgg

SEQ ID NO: 56198 - RNA, 23 nt, Human
aggcaugagccaccgcaccuggu

SEQ ID NO: 56199 - RNA, 22 nt, Human
aggcaugagccaccgcgcccgg

SEQ ID NO: 56200 - RNA, 32 nt, Human
aggcaugagccaccgcucccagccuuugauuu

SEQ ID NO: 56201 - RNA, 22 nt, Human
aggcaugagccaccgcucucgg

SEQ ID NO: 56202 - RNA, 19 nt, Human
aggcaugagccaccgugcc

SEQ ID NO: 56203 - RNA, 22 nt, Human
aggcaugagccaccgugcccgg

SEQ ID NO: 56204 - RNA, 22 nt, Human
aggcaugagccaccgugccugg

SEQ ID NO: 56205 - RNA, 22 nt, Human
aggcaugagccaccgugccugu

SEQ ID NO: 56206 - RNA, 22 nt, Human
aggcaugagccaccguggccgg

SEQ ID NO: 56207 - RNA, 20 nt, Human
aggcaugagccaccgugucc

SEQ ID NO: 56208 - RNA, 32 nt, Human
aggcaugagccaccucacccagcuccggucac

SEQ ID NO: 56209 - RNA, 32 nt, Human
aggcaugagccaccugcccagccauguuuggg

SEQ ID NO: 56210 - RNA, 32 nt, Human
aggcaugagccacggcacccagccucauuugc

SEQ ID NO: 56211 - RNA, 32 nt, Human
aggcaugagccacugcacccaaccccuggaaa

SEQ ID NO: 56212 - RNA, 32 nt, Human
aggcaugagccacugcacccagcccuguauuc

SEQ ID NO: 56213 - RNA, 32 nt, Human
aggcaugagccacugcacccagccucuuaaca

SEQ ID NO: 56214 - RNA, 32 nt, Human
aggcaugagccacugcacccagccuuggcggg

SEQ ID NO: 56215 - RNA, 32 nt, Human
aggcaugagccacugcacccggccuuucucau

SEQ ID NO: 56216 - RNA, 32 nt, Human
aggcaugagccacugcacccggcuugaaucau

SEQ ID NO: 56217 - RNA, 32 nt, Human
aggcaugagccacugcaccugaccugcugaau

SEQ ID NO: 56218 - RNA, 32 nt, Human
aggcaugagccacugcaccuggccuguguauu

SEQ ID NO: 56219 - RNA, 22 nt, Human
aggcaugagccacugcauccgg

SEQ ID NO: 56220 - RNA, 32 nt, Human
aggcaugagccacugcauccggccuguuaagg

SEQ ID NO: 56221 - RNA, 21 nt, Human
aggcaugagccacugcgccgg

SEQ ID NO: 56222 - RNA, 22 nt, Human
aggcaugagccacuguacccgg

SEQ ID NO: 56223 - RNA, 22 nt, Human
aggcaugagccacugugccagg

SEQ ID NO: 56224 - RNA, 22 nt, Human
aggcaugagccacugugcccgg

SEQ ID NO: 56225 - RNA, 23 nt, Human
aggcaugagccacuguguccggu

SEQ ID NO: 56226 - RNA, 32 nt, Human
aggcaugagccauugcacccagccuuaagcua

SEQ ID NO: 56227 - RNA, 32 nt, Human
aggcaugagcuacugugcccagccucuaugau

SEQ ID NO: 56228 - RNA, 32 nt, Human
aggcaugagucuccacacucugccuuuucauu

SEQ ID NO: 56229 - RNA, 29 nt, Human
aggcaugauuucaccuucacuugaacugc

SEQ ID NO: 56230 - RNA, 32 nt, Human
aggcaugcaagccaaaagggaggacagucugc

SEQ ID NO: 56231 - RNA, 32 nt, Human
aggcaugcagacaaccccacacggccacacca

SEQ ID NO: 56232 - RNA, 32 nt, Human
aggcaugcagagccauauaagccaguccgaua

SEQ ID NO: 56233 - RNA, 32 nt, Human
aggcaugcagguaaauuacugccuugucagcc

SEQ ID NO: 56234 - RNA, 32 nt, Human
aggcaugccugggaaaugcucccuuggcauaa

SEQ ID NO: 56235 - RNA, 32 nt, Human
aggcaugccuggguccugccucugccuggcag

SEQ ID NO: 56236 - RNA, 32 nt, Human
aggcaugccuguacugcccucucccaagaaug

SEQ ID NO: 56237 - RNA, 32 nt, Human
aggcaugcgaaugagcugggcccugggugagg

SEQ ID NO: 56238 - RNA, 32 nt, Human
aggcaugcugggucucuuccacagacuuuaag

SEQ ID NO: 56239 - RNA, 32 nt, Human
aggcauggaagagagccaggcagccccgaaag

SEQ ID NO: 56240 - RNA, 32 nt, Human
aggcauggagugaagacacuagcagagucagg

SEQ ID NO: 56241 - RNA, 32 nt, Human
aggcauggcaguacacaucugugguuccaguu

SEQ ID NO: 56242 - RNA, 29 nt, Human
aggcauggccagaugggccugcucugggc

SEQ ID NO: 56243 - RNA, 32 nt, Human
aggcauggcggcugcauuucauaccacaucaa

SEQ ID NO: 56244 - RNA, 32 nt, Human
aggcaugggaaugucaccuccuuugccacugu

SEQ ID NO: 56245 - RNA, 32 nt, Human
aggcaugggcagggacuuggcugcaguucugc

SEQ ID NO: 56246 - RNA, 32 nt, Human
aggcaugggggaaggggcgucuuugggagaag

SEQ ID NO: 56247 - RNA, 32 nt, Human
aggcaugggggaggcacagaaugcuggagaga

SEQ ID NO: 56248 - RNA, 32 nt, Human
aggcaugguggugugggccugcagucccagcu

SEQ ID NO: 56249 - RNA, 32 nt, Human
aggcauguacccaaacauaacggauguaaggc

SEQ ID NO: 56250 - RNA, 32 nt, Human
aggcauguauuccucagaggcgaaacugccaa

SEQ ID NO: 56251 - RNA, 29 nt, Human
aggcaugucauccgaaaagucaggacucc

SEQ ID NO: 56252 - RNA, 32 nt, Human
aggcauguccuaggcucugggugcaguaguga

SEQ ID NO: 56253 - RNA, 32 nt, Human
aggcaugucuucacuagaaagaaugagaagcc

SEQ ID NO: 56254 - RNA, 32 nt, Human
aggcaugucuuuccagaacuuucccuggcagg

SEQ ID NO: 56255 - RNA, 32 nt, Human
aggcaugugcaggguccuaggaagcauacgaa

SEQ ID NO: 56256 - RNA, 32 nt, Human
aggcaugugcaggguccuaggaagcauaugaa

SEQ ID NO: 56257 - RNA, 32 nt, Human
aggcaugugcugcaacacugaagacagaaaga

SEQ ID NO: 56258 - RNA, 32 nt, Human
aggcaugugcugguauccacaguuaauucccu

SEQ ID NO: 56259 - RNA, 32 nt, Human
aggcauguucaaagacacuacacugccucucc

SEQ ID NO: 56260 - RNA, 22 nt, Human
aggcauuaaccacacacuuuaa

SEQ ID NO: 56261 - RNA, 31 nt, Human
aggcauuacagcuagacuccgagcuuacugg

SEQ ID NO: 56262 - RNA, 32 nt, Human
aggcauuagagucucauaaggagcacgcaacc

SEQ ID NO: 56263 - RNA, 32 nt, Human
aggcauuagaugcucauaaggagugcacaacc

SEQ ID NO: 56264 - RNA, 32 nt, Human
aggcauuagauucucauaaggagugcacaauc

SEQ ID NO: 56265 - RNA, 32 nt, Human
aggcauuagauucucauaaggagugugcaauc

SEQ ID NO: 56266 - RNA, 32 nt, Human
aggcauuagauucucauaaggaguucacagcc

SEQ ID NO: 56267 - RNA, 32 nt, Human
aggcauuauucuuuuagggaaggugagagcuu

SEQ ID NO: 56268 - RNA, 32 nt, Human
aggcauucaagaccagccuaggcaggauaaua

SEQ ID NO: 56269 - RNA, 31 nt, Human
aggcauucaauaaauguugaaauaaugacac

SEQ ID NO: 56270 - RNA, 32 nt, Human
aggcauucaguuacagagcaguugguacuuug

SEQ ID NO: 56271 - RNA, 32 nt, Human
aggcauuccagccugggcaacagagugaggcu

SEQ ID NO: 56272 - RNA, 32 nt, Human
aggcauucccagcuguggcuuacuggaugcca

SEQ ID NO: 56273 - RNA, 32 nt, Human
aggcauucgaaagucugcucugccuuuacaau

SEQ ID NO: 56274 - RNA, 23 nt, Human
aggcauucgggaauaccaaguga

SEQ ID NO: 56275 - RNA, 32 nt, Human
aggcauucugcagcugggaucagccucagcuu

SEQ ID NO: 56276 - RNA, 32 nt, Human
aggcauucuugcugugcguugugaaaggguag

SEQ ID NO: 56277 - RNA, 32 nt, Human
aggcauugaggugagggaucauuuugggucag

SEQ ID NO: 56278 - RNA, 32 nt, Human
aggcauugcccagccugggaaucuuuucuuug

SEQ ID NO: 56279 - RNA, 32 nt, Human
aggcauugggagaagcagucugggggaggcca

SEQ ID NO: 56280 - RNA, 32 nt, Human
aggcauuggucaccaagagucuugcaggggga

SEQ ID NO: 56281 - RNA, 32 nt, Human
aggcauuguaccugacauugcuacguuucuac

SEQ ID NO: 56282 - RNA, 32 nt, Human
aggcauuuaaucaccaccacgaucaagaugua

SEQ ID NO: 56283 - RNA, 32 nt, Human
aggcauuuacucugaccuuaauuaagugaucc

SEQ ID NO: 56284 - RNA, 32 nt, Human
aggcauuucuucccuuccuuccuuccuucauc

SEQ ID NO: 56285 - RNA, 21 nt, Human
aggcauuucuuuucagcagug

SEQ ID NO: 56286 - RNA, 32 nt, Human
aggcauuugaauccagccugagcaauauaaca

SEQ ID NO: 56287 - RNA, 32 nt, Human
aggcauuugagaccagccuggccaacauagug

SEQ ID NO: 56288 - RNA, 32 nt, Human
aggcauuugagaccagccuggguaacauagug

SEQ ID NO: 56289 - RNA, 32 nt, Human
aggcauuugaguuugccucuucugcuuuaauc

SEQ ID NO: 56290 - RNA, 32 nt, Human
aggcauuugcaggguccucuucugggccugac

SEQ ID NO: 56291 - RNA, 32 nt, Human
aggcauuugccuggcagcuuuuguuguagauc

SEQ ID NO: 56292 - RNA, 32 nt, Human
aggcauuuucauagaggaaaguuuacagaaac

SEQ ID NO: 56293 - RNA, 32 nt, Human
aggcauuuugugaauaaguuaugucauuaauu

SEQ ID NO: 56294 - RNA, 32 nt, Human
aggcauuuuugucacugaagcugcuguuccca

SEQ ID NO: 56295 - RNA, 32 nt, Human
aggccaaaacuguccucaggucagccucucca

SEQ ID NO: 56296 - RNA, 32 nt, Human
aggccaaaauuguccucaggucagccucucca

SEQ ID NO: 56297 - RNA, 32 nt, Human
aggccaaacaaaacacaucugugggcuggaug

SEQ ID NO: 56298 - RNA, 18 nt, Human
aggccaaaccuuugggcu

SEQ ID NO: 56299 - RNA, 22 nt, Human
aggccaaagcaggacgaucacu

SEQ ID NO: 56300 - RNA, 24 nt, Human
aggccaaaucacagagggaagcaa

SEQ ID NO: 56301 - RNA, 32 nt, Human
aggccaaaugugucaccuucagccugcucuuc

SEQ ID NO: 56302 - RNA, 32 nt, Human
aggccaacagcauuggccuggccagaccaggu

SEQ ID NO: 56303 - RNA, 32 nt, Human
aggccaacagccgccucagaaaccagauucag

SEQ ID NO: 56304 - RNA, 32 nt, Human
aggccaacaggaagagcagcaaaaagauucag

SEQ ID NO: 56305 - RNA, 32 nt, Human
aggccaacauggugaaaccccgucucuacuaa

SEQ ID NO: 56306 - RNA, 32 nt, Human
aggccaaccccagccaccgccagccugagacc

SEQ ID NO: 56307 - RNA, 21 nt, Human
aggccaaccgccacccagaga

SEQ ID NO: 56308 - RNA, 32 nt, Human
aggccaacugcccagagccacagaaaauggag

SEQ ID NO: 56309 - RNA, 32 nt, Human
aggccaacugccucuaggguugcuuggugccu

SEQ ID NO: 56310 - RNA, 32 nt, Human
aggccaacuugcugcuggcacgcccagaacuu

SEQ ID NO: 56311 - RNA, 32 nt, Human
aggccaacuuggcaaaaccccaucucuacuaa

SEQ ID NO: 56312 - RNA, 32 nt, Human
aggccaagaaggucagagcccagugagaucug

SEQ ID NO: 56313 - RNA, 32 nt, Human
aggccaagagccuucucuaaggaagggagagg

SEQ ID NO: 56314 - RNA, 32 nt, Human
aggccaagagugagagaaacgggggagcaaga

SEQ ID NO: 56315 - RNA, 32 nt, Human
aggccaagcaagaaaagucaauguauggagug

SEQ ID NO: 56316 - RNA, 25 nt, Human
aggccaagcaagccaagcccaagga

SEQ ID NO: 56317 - RNA, 22 nt, Human
aggccaagcagagcucagaaga

SEQ ID NO: 56318 - RNA, 20 nt, Human
aggccaagcagaugaucgcc

SEQ ID NO: 56319 - RNA, 32 nt, Human
aggccaagccacgaccuccaccuauucaaucu

SEQ ID NO: 56320 - RNA, 24 nt, Human
aggccaagccggccugggcugcuu

SEQ ID NO: 56321 - RNA, 19 nt, Human
aggccaagcucuuccuccc

SEQ ID NO: 56322 - RNA, 20 nt, Human
aggccaagcucuugguuacc

SEQ ID NO: 56323 - RNA, 32 nt, Human
aggccaagcugaugauguuaccaagcucaaac

SEQ ID NO: 56324 - RNA, 23 nt, Human
aggccaagcugccaucccagggg

SEQ ID NO: 56325 - RNA, 32 nt, Human
aggccaaggaaggaggaaugcuugagcccaag

SEQ ID NO: 56326 - RNA, 18 nt, Human
aggccaaggacaaacgcc

SEQ ID NO: 56327 - RNA, 32 nt, Human
aggccaaggacuuacacaucaaaaguggagaa

SEQ ID NO: 56328 - RNA, 32 nt, Human
aggccaaggagacagacaucugacaaagcauu

SEQ ID NO: 56329 - RNA, 32 nt, Human
aggccaaggaggucuccgaggcuuccaaagag

SEQ ID NO: 56330 - RNA, 32 nt, Human
aggccaaggcagcauugcuugaauuugaagaa

SEQ ID NO: 56331 - RNA, 26 nt, Human
aggccaaggcaggaggaccgcuugag

SEQ ID NO: 56332 - RNA, 32 nt, Human
aggccaaggcaggcacaucaccugaguucagg

SEQ ID NO: 56333 - RNA, 21 nt, Human
aggccaaggcagguggaucac

SEQ ID NO: 56334 - RNA, 32 nt, Human
aggccaaggccagaggauugcuugagucuagc

SEQ ID NO: 56335 - RNA, 21 nt, Human
aggccaaggccugagggccuc

SEQ ID NO: 56336 - RNA, 24 nt, Human
aggccaaggcgggaggaucacuug

SEQ ID NO: 56337 - RNA, 20 nt, Human
aggccaaggcggguggauca

SEQ ID NO: 56338 - RNA, 24 nt, Human
aggccaaggcggguggcucacuug

SEQ ID NO: 56339 - RNA, 25 nt, Human
aggccaaggcuauuguugcugggga

SEQ ID NO: 56340 - RNA, 23 nt, Human
aggccaaggggcggaagagccuc

SEQ ID NO: 56341 - RNA, 32 nt, Human
aggccaaggugcaaggcgggcagaucauuuga

SEQ ID NO: 56342 - RNA, 23 nt, Human
aggccaaggugggaggaucgcuu

SEQ ID NO: 56343 - RNA, 23 nt, Human
aggccaaggugggaggauugcuu

SEQ ID NO: 56344 - RNA, 22 nt, Human
aggccaaggugggucgaucacu

SEQ ID NO: 56345 - RNA, 32 nt, Human
aggccaaguagaaugagaugagacugaguuug

SEQ ID NO: 56346 - RNA, 32 nt, Human
aggccaaguagagagcaucaggguaaauggcg

SEQ ID NO: 56347 - RNA, 32 nt, Human
aggccaaguagcucgggagaacagggcaacau

SEQ ID NO: 56348 - RNA, 22 nt, Human
aggccaaguccacaggcuggug

SEQ ID NO: 56349 - RNA, 23 nt, Human
aggccaagugggaacccaggaga

SEQ ID NO: 56350 - RNA, 18 nt, Human
aggccaagugggaggcug

SEQ ID NO: 56351 - RNA, 22 nt, Human
aggccaagugugcguccagggg

SEQ ID NO: 56352 - RNA, 19 nt, Human
aggccaaguucggggccag

SEQ ID NO: 56353 - RNA, 23 nt, Human
aggccaaguuggcugcuccgagg

SEQ ID NO: 56354 - RNA, 22 nt, Human
aggccaaguuuccagaagccuc

SEQ ID NO: 56355 - RNA, 32 nt, Human
aggccaauggagaagacagggagauggugcug

SEQ ID NO: 56356 - RNA, 23 nt, Human
aggccaauuucauacccauguca

SEQ ID NO: 56357 - RNA, 32 nt, Human
aggccacaaaggagagcuccguggagagaaga

SEQ ID NO: 56358 - RNA, 32 nt, Human
aggccacaacccugguguccacugccucaggc

SEQ ID NO: 56359 - RNA, 32 nt, Human
aggccacacagcaaaagucaccaacucaaacc

SEQ ID NO: 56360 - RNA, 32 nt, Human
aggccacacagccugggaggcgcaggggcugg

SEQ ID NO: 56361 - RNA, 32 nt, Human
aggccacacccacuccaggacacccacacggg

SEQ ID NO: 56362 - RNA, 32 nt, Human
aggccacaccggccuugcauugccugccuggc

SEQ ID NO: 56363 - RNA, 32 nt, Human
aggccacacucaagggcugacuguccaggcgc

SEQ ID NO: 56364 - RNA, 31 nt, Human
aggccacacuuucagcaaacuucacauuaaa

SEQ ID NO: 56365 - RNA, 32 nt, Human
aggccacagauucgaggcaacaauaagauuua

SEQ ID NO: 56366 - RNA, 20 nt, Human
aggccacagccagggcucca

SEQ ID NO: 56367 - RNA, 32 nt, Human
aggccacagccccuggcacugcagguggccuc

SEQ ID NO: 56368 - RNA, 32 nt, Human
aggccacagcuauuuuccuggcugugggaauc

SEQ ID NO: 56369 - RNA, 32 nt, Human
aggccacaggagcuggagggauugcaaagacc

SEQ ID NO: 56370 - RNA, 32 nt, Human
aggccacaggggcagaggcuucuccggcaggc

SEQ ID NO: 56371 - RNA, 32 nt, Human
aggccacaggggcggggacaccugccaggaug

SEQ ID NO: 56372 - RNA, 32 nt, Human
aggccacaugggcugaugcagcuuugagugcu

SEQ ID NO: 56373 - RNA, 32 nt, Human
aggccaccacaccuggcuaauguuuaaauuuu

SEQ ID NO: 56374 - RNA, 20 nt, Human
aggccaccaggcccuuggca

SEQ ID NO: 56375 - RNA, 28 nt, Human
aggccaccauugucugccucaucaggaa

SEQ ID NO: 56376 - RNA, 32 nt, Human
aggccaccauuuucuuuucuuuucuuuuucuc

SEQ ID NO: 56377 - RNA, 32 nt, Human
aggccacccacacuaaccaggucagucacugg

SEQ ID NO: 56378 - RNA, 32 nt, Human
aggccacccacagagccaacgauugcugcacg

SEQ ID NO: 56379 - RNA, 32 nt, Human
aggccacccagccgugggaggaagggggcgug

SEQ ID NO: 56380 - RNA, 32 nt, Human
aggccacccaucccuuuucauucuccagcaga

SEQ ID NO: 56381 - RNA, 22 nt, Human
aggccacccugcccaggaccca

SEQ ID NO: 56382 - RNA, 32 nt, Human
aggccacccugccucuacccaaccagggcccc

SEQ ID NO: 56383 - RNA, 32 nt, Human
aggccaccucuagcuuucuuccuaccccauuc

SEQ ID NO: 56384 - RNA, 32 nt, Human
aggccaccuggaccagcugcucagcugucuga

SEQ ID NO: 56385 - RNA, 32 nt, Human
aggccaccuggacuuccagucuggcuccaaac

SEQ ID NO: 56386 - RNA, 18 nt, Human
aggccaccugugcuucac

SEQ ID NO: 56387 - RNA, 32 nt, Human
aggccaccuuguguguuuucucacucucgaau

SEQ ID NO: 56388 - RNA, 32 nt, Human
aggccaccuuugcagcccauagggaagaaggc

SEQ ID NO: 56389 - RNA, 32 nt, Human
aggccacgacccuccugaucacucugaggaca

SEQ ID NO: 56390 - RNA, 20 nt, Human
aggccacgcaggccugaagc

SEQ ID NO: 56391 - RNA, 32 nt, Human
aggccacggugccagagguucagggagaacag

SEQ ID NO: 56392 - RNA, 32 nt, Human
aggccacgugagguuggaggccagcagggguu

SEQ ID NO: 56393 - RNA, 32 nt, Human
aggccacucccaggaggcugcggagcaaauga

SEQ ID NO: 56394 - RNA, 32 nt, Human
aggccacucccagggacccagggaggcgaugg

SEQ ID NO: 56395 - RNA, 32 nt, Human
aggccacugcaccugggcuagggguccacagg

SEQ ID NO: 56396 - RNA, 32 nt, Human
aggccacugcacuccagccugaacaacaaaga

SEQ ID NO: 56397 - RNA, 32 nt, Human
aggccacugcacuccagccugagugacagaau

SEQ ID NO: 56398 - RNA, 32 nt, Human
aggccacugcacuccagccugggcaacagagc

SEQ ID NO: 56399 - RNA, 32 nt, Human
aggccacugcacuccagccuggguaacagacg

SEQ ID NO: 56400 - RNA, 32 nt, Human
aggccacugcagcucuaccgauacuugcugcg

SEQ ID NO: 56401 - RNA, 32 nt, Human
aggccacugcauuuagccugggcgacagagcg

SEQ ID NO: 56402 - RNA, 32 nt, Human
aggccacugcccacccuggccuggacagccuc

SEQ ID NO: 56403 - RNA, 32 nt, Human
aggccacuggccaguggggaccagccucugag

SEQ ID NO: 56404 - RNA, 32 nt, Human
aggccacugguggcugagcaacgaggucgacg

SEQ ID NO: 56405 - RNA, 32 nt, Human
aggccacugguuagcucaucucagccuccucu

SEQ ID NO: 56406 - RNA, 32 nt, Human
aggccacugugagcucagcacagaguaggaag

SEQ ID NO: 56407 - RNA, 32 nt, Human
aggccacugugccaggugccucccuggccugu

SEQ ID NO: 56408 - RNA, 32 nt, Human
aggccacugugcccggccugaaucuugucuuu

SEQ ID NO: 56409 - RNA, 32 nt, Human
aggccacuucugcuguuacauaacuccucccu

SEQ ID NO: 56410 - RNA, 32 nt, Human
aggccacuuggucauucuggcauuuuauggua

SEQ ID NO: 56411 - RNA, 32 nt, Human
aggccagaacccgacccugcugugucucucuu

SEQ ID NO: 56412 - RNA, 32 nt, Human
aggccagaagcaaaccaaauuuaccagguuug

SEQ ID NO: 56413 - RNA, 23 nt, Human
aggccagaagggagguucaccug

SEQ ID NO: 56414 - RNA, 21 nt, Human
aggccagaccagggcuggggg

SEQ ID NO: 56415 - RNA, 19 nt, Human
aggccagacccaggagcca

SEQ ID NO: 56416 - RNA, 18 nt, Human
aggccagacgccugagcu

SEQ ID NO: 56417 - RNA, 32 nt, Human
aggccagacgcugauuuuauuuucucauuucc

SEQ ID NO: 56418 - RNA, 32 nt, Human
aggccagagaaaaugcacaaacuguaggaaac

SEQ ID NO: 56419 - RNA, 32 nt, Human
aggccagagaaaggcaaagcccaaugcaagaa

SEQ ID NO: 56420 - RNA, 32 nt, Human
aggccagagagggaaaaggcaggugcuuuugg

SEQ ID NO: 56421 - RNA, 32 nt, Human
aggccagagccuggcccuccugucaucugcug

SEQ ID NO: 56422 - RNA, 32 nt, Human
aggccagagcucugacaggcggugccccgccc

SEQ ID NO: 56423 - RNA, 32 nt, Human
aggccagagcugggacuggugccucuuggaau

SEQ ID NO: 56424 - RNA, 32 nt, Human
aggccagaggacuuggggaaaaugagauggag

SEQ ID NO: 56425 - RNA, 32 nt, Human
aggccagaggcagaggggugcagaagagagag

SEQ ID NO: 56426 - RNA, 32 nt, Human
aggccagaggcucguauuguguuucugcugac

SEQ ID NO: 56427 - RNA, 32 nt, Human
aggccagauggugaaaccccaucucuacaaaa

SEQ ID NO: 56428 - RNA, 32 nt, Human
aggccagauucccuuucucucccuccacauag

SEQ ID NO: 56429 - RNA, 32 nt, Human
aggccagcaacaugugccccagaucuggaagg

SEQ ID NO: 56430 - RNA, 32 nt, Human
aggccagcaaggaagagaguuugaguuguuua

SEQ ID NO: 56431 - RNA, 32 nt, Human
aggccagcaaguggcgcugggccacacuggcu

SEQ ID NO: 56432 - RNA, 32 nt, Human
aggccagcacagaggcaccagggcagcagugc

SEQ ID NO: 56433 - RNA, 26 nt, Human
aggccagcagacaggccggccagagg

SEQ ID NO: 56434 - RNA, 31 nt, Human
aggccagcauuuuucugaaaaguuggggaaa

SEQ ID NO: 56435 - RNA, 32 nt, Human
aggccagccagcaccucugccuucucagggac

SEQ ID NO: 56436 - RNA, 32 nt, Human
aggccagccagccuaucccucucuccccuaac

SEQ ID NO: 56437 - RNA, 32 nt, Human
aggccagccagccugccugccugccugccugc

SEQ ID NO: 56438 - RNA, 32 nt, Human
aggccagcccaggggucaggggcagaggugca

SEQ ID NO: 56439 - RNA, 32 nt, Human
aggccagcccagugacaugacguuauuaguuu

SEQ ID NO: 56440 - RNA, 32 nt, Human
aggccagcccucccuggcugugagcagccucc

SEQ ID NO: 56441 - RNA, 32 nt, Human
aggccagccucuguaaguuggccacacuuggg

SEQ ID NO: 56442 - RNA, 32 nt, Human
aggccagccugaccaacauggagaaaccccau

SEQ ID NO: 56443 - RNA, 22 nt, Human
aggccagccugaccaacauggu

SEQ ID NO: 56444 - RNA, 32 nt, Human
aggccagccugaccaacauggugaaacccugu

SEQ ID NO: 56445 - RNA, 32 nt, Human
aggccagccugaccaacguggagaaaugccau

SEQ ID NO: 56446 - RNA, 32 nt, Human
aggccagccuggcgaaaccccaucucuacuaa

SEQ ID NO: 56447 - RNA, 22 nt, Human
aggccagccugggcaacacagc

SEQ ID NO: 56448 - RNA, 20 nt, Human
aggccagccugggcaacaua

SEQ ID NO: 56449 - RNA, 32 nt, Human
aggccagcgccagaacccagauuuccuaacuc

SEQ ID NO: 56450 - RNA, 32 nt, Human
aggccagcuaguucugucaugaguagucggcc

SEQ ID NO: 56451 - RNA, 32 nt, Human
aggccagcuauuuuccuuuuccugugcuuucu

SEQ ID NO: 56452 - RNA, 32 nt, Human
aggccagcuccucugcccacaugucauacaag

SEQ ID NO: 56453 - RNA, 32 nt, Human
aggccagcugcucacccugccaccuccaugug

SEQ ID NO: 56454 - RNA, 32 nt, Human
aggccagcugggucucaaggaggcagguggca

SEQ ID NO: 56455 - RNA, 32 nt, Human
aggccaggaagaccagccuggccaacauggcg

SEQ ID NO: 56456 - RNA, 32 nt, Human
aggccaggaagcggaagucgccagcagcgaga

SEQ ID NO: 56457 - RNA, 32 nt, Human
aggccaggaaggaggggaaaagagugagagaa

SEQ ID NO: 56458 - RNA, 32 nt, Human
aggccaggaagggagagggagaaaaggaggag

SEQ ID NO: 56459 - RNA, 18 nt, Human
aggccaggaaugagcacc

SEQ ID NO: 56460 - RNA, 32 nt, Human
aggccaggacagaucacuugaggucaggaguu

SEQ ID NO: 56461 - RNA, 32 nt, Human
aggccaggacaguggugcaugccagucauccc

SEQ ID NO: 56462 - RNA, 19 nt, Human
aggccaggagaucgacacc

SEQ ID NO: 56463 - RNA, 20 nt, Human
aggccaggagccccgccacc

SEQ ID NO: 56464 - RNA, 23 nt, Human
aggccaggaggcagcuggcacag

SEQ ID NO: 56465 - RNA, 32 nt, Human
aggccaggaggcggagcuugcagugagccgag

SEQ ID NO: 56466 - RNA, 22 nt, Human
aggccaggaggcuucccagagg

SEQ ID NO: 56467 - RNA, 25 nt, Human
aggccaggagggacccugcccaguc

SEQ ID NO: 56468 - RNA, 32 nt, Human
aggccaggagguugaggcugcagugagcugug

SEQ ID NO: 56469 - RNA, 32 nt, Human
aggccaggagugaggcccugccggagccugag

SEQ ID NO: 56470 - RNA, 32 nt, Human
aggccaggaguuagagacugcagugagcuaug

SEQ ID NO: 56471 - RNA, 32 nt, Human
aggccaggaguucugagaccagccuggcuuac

SEQ ID NO: 56472 - RNA, 32 nt, Human
aggccaggaguugcagaccagccuggguaaca

SEQ ID NO: 56473 - RNA, 32 nt, Human
aggccaggaguuucagaucagcccaagcaaua

SEQ ID NO: 56474 - RNA, 23 nt, Human
aggccaggaguuugagaccagcu

SEQ ID NO: 56475 - RNA, 32 nt, Human
aggccaggaguuugaggcugcagugagcuaug

SEQ ID NO: 56476 - RNA, 32 nt, Human
aggccaggaguuugaggcugcagugaguuaug

SEQ ID NO: 56477 - RNA, 32 nt, Human
aggccaggaguuuugagaccagccugggaaac

SEQ ID NO: 56478 - RNA, 32 nt, Human
aggccaggauaaccugccuccacucacucgcc

SEQ ID NO: 56479 - RNA, 32 nt, Human
aggccaggaugcaggcauccacaugcccuccu

SEQ ID NO: 56480 - RNA, 22 nt, Human
aggccaggaugcuugccauggc

SEQ ID NO: 56481 - RNA, 32 nt, Human
aggccaggauucuaaauagacggcccaggcuc

SEQ ID NO: 56482 - RNA, 32 nt, Human
aggccaggcagagagaggagccugcucugcgg

SEQ ID NO: 56483 - RNA, 32 nt, Human
aggccaggcaggcagggaucccgcagcgaggg

SEQ ID NO: 56484 - RNA, 32 nt, Human
aggccaggcaggcgccgccugcggagagcacc

SEQ ID NO: 56485 - RNA, 24 nt, Human
aggccaggcauggccaccacguga

SEQ ID NO: 56486 - RNA, 25 nt, Human
aggccaggcauggcccagccuggag

SEQ ID NO: 56487 - RNA, 32 nt, Human
aggccaggcauggugagucacaccuauagucu

SEQ ID NO: 56488 - RNA, 19 nt, Human
aggccaggccaccagcacc

SEQ ID NO: 56489 - RNA, 32 nt, Human
aggccaggccaggccagguggggaaagggaca

SEQ ID NO: 56490 - RNA, 19 nt, Human
aggccaggcccagcacgcc

SEQ ID NO: 56491 - RNA, 21 nt, Human
aggccaggcccaggccagaga

SEQ ID NO: 56492 - RNA, 19 nt, Human
aggccaggcccccacggcc

SEQ ID NO: 56493 - RNA, 19 nt, Human
aggccaggcccccagacgc

SEQ ID NO: 56494 - RNA, 18 nt, Human
aggccaggccccucugcc

SEQ ID NO: 56495 - RNA, 20 nt, Human
aggccaggcccgauccuacc

SEQ ID NO: 56496 - RNA, 20 nt, Human
aggccaggcccgcgcccgcc

SEQ ID NO: 56497 - RNA, 18 nt, Human
aggccaggcccucugcac

SEQ ID NO: 56498 - RNA, 20 nt, Human
aggccaggcccugccccacc

SEQ ID NO: 56499 - RNA, 20 nt, Human
aggccaggcccugugcuggg

SEQ ID NO: 56500 - RNA, 18 nt, Human
aggccaggccgggcaacc

SEQ ID NO: 56501 - RNA, 20 nt, Human
aggccaggccuagaaucucc

SEQ ID NO: 56502 - RNA, 32 nt, Human
aggccaggccuccucaaguuggccucucagac

SEQ ID NO: 56503 - RNA, 32 nt, Human
aggccaggccucuccuggaaccaccucucugc

SEQ ID NO: 56504 - RNA, 19 nt, Human
aggccaggccuggaguccc

SEQ ID NO: 56505 - RNA, 21 nt, Human
aggccaggccuggcacggugg

SEQ ID NO: 56506 - RNA, 18 nt, Human
aggccaggcgacaucauc

SEQ ID NO: 56507 - RNA, 16 nt, Human
aggccaggcgcagugg

SEQ ID NO: 56508 - RNA, 21 nt, Human
aggccaggcgggagaacuacc

SEQ ID NO: 56509 - RNA, 20 nt, Human
aggccaggcgggcggaucac

SEQ ID NO: 56510 - RNA, 23 nt, Human
aggccaggcucagcccugugcca

SEQ ID NO: 56511 - RNA, 19 nt, Human
aggccaggcucaugccacc

SEQ ID NO: 56512 - RNA, 18 nt, Human
aggccaggcuccagcacu

SEQ ID NO: 56513 - RNA, 21 nt, Human
aggccaggcuccauccggagg

SEQ ID NO: 56514 - RNA, 20 nt, Human
aggccaggcuccgggacgcc

SEQ ID NO: 56515 - RNA, 20 nt, Human
aggccaggcuccuauaugcu

SEQ ID NO: 56516 - RNA, 20 nt, Human
aggccaggcuccuccccacu

SEQ ID NO: 56517 - RNA, 19 nt, Human
aggccaggcuccucuagcc

SEQ ID NO: 56518 - RNA, 18 nt, Human
aggccaggcuccuucacc

SEQ ID NO: 56519 - RNA, 19 nt, Human
aggccaggcucuccucacc

SEQ ID NO: 56520 - RNA, 19 nt, Human
aggccaggcugaccccacc

SEQ ID NO: 56521 - RNA, 18 nt, Human
aggccaggcugagccgcc

SEQ ID NO: 56522 - RNA, 18 nt, Human
aggccaggcugaugcacc

SEQ ID NO: 56523 - RNA, 23 nt, Human
aggccaggcugaugcaccaggga

SEQ ID NO: 56524 - RNA, 22 nt, Human
aggccaggcugccacuccggga

SEQ ID NO: 56525 - RNA, 19 nt, Human
aggccaggcugugguuucc

SEQ ID NO: 56526 - RNA, 21 nt, Human
aggccaggcuuccccgaggcc

SEQ ID NO: 56527 - RNA, 28 nt, Human
aggccaggcuucggugcuaccucagagg

SEQ ID NO: 56528 - RNA, 32 nt, Human
aggccaggcuuggaguuuggccagucuuguuu

SEQ ID NO: 56529 - RNA, 22 nt, Human
aggccagggaaagcccguguca

SEQ ID NO: 56530 - RNA, 32 nt, Human
aggccagggaagcagaggaggccagggaggca

SEQ ID NO: 56531 - RNA, 32 nt, Human
aggccagggaggcaggggaggcaggagaggcu

SEQ ID NO: 56532 - RNA, 32 nt, Human
aggccagggaggcaguggaggcaggagaggcu

SEQ ID NO: 56533 - RNA, 22 nt, Human
aggccagggagguccccgggga

SEQ ID NO: 56534 - RNA, 19 nt, Human
aggccagggauggugggga

SEQ ID NO: 56535 - RNA, 32 nt, Human
aggccagggcucaggggaaacugaggcaggaa

SEQ ID NO: 56536 - RNA, 32 nt, Human
aggccagggcugggcugugcaccugccuccca

SEQ ID NO: 56537 - RNA, 32 nt, Human
aggccaggggagagaccaggaggaaagggcag

SEQ ID NO: 56538 - RNA, 32 nt, Human
aggccaggguaaaaugucucaggcaagcaaaa

SEQ ID NO: 56539 - RNA, 32 nt, Human
aggccagguaacucuaguuacacagaaacugu

SEQ ID NO: 56540 - RNA, 24 nt, Human
aggccagguaggacauuccagagg

SEQ ID NO: 56541 - RNA, 32 nt, Human
aggccagguaggcaacacagagccaaggcggg

SEQ ID NO: 56542 - RNA, 19 nt, Human
aggccaggugagguccacc

SEQ ID NO: 56543 - RNA, 32 nt, Human
aggccaggugcaaggcagggaggcagagagaa

SEQ ID NO: 56544 - RNA, 20 nt, Human
aggccaggugcagugacuca

SEQ ID NO: 56545 - RNA, 30 nt, Human
aggccagguggccacagggacgaugcagau

SEQ ID NO: 56546 - RNA, 32 nt, Human
aggccagguggucuucaaggggaccagcuaac

SEQ ID NO: 56547 - RNA, 22 nt, Human
aggccagguguuggccuggggg

SEQ ID NO: 56548 - RNA, 24 nt, Human
aggccagguguuggugcauggaga

SEQ ID NO: 56549 - RNA, 23 nt, Human
aggccagguugggcaccugggga

SEQ ID NO: 56550 - RNA, 32 nt, Human
aggccaguaguuuugacacuucccaguggaag

SEQ ID NO: 56551 - RNA, 32 nt, Human
aggccaguccugcccuccugacuuucgguggc

SEQ ID NO: 56552 - RNA, 23 nt, Human
aggccagucucaaacuccugacc

SEQ ID NO: 56553 - RNA, 32 nt, Human
aggccagucucaaacuccugaccucaggugau

SEQ ID NO: 56554 - RNA, 32 nt, Human
aggccagucucaaacuccugaccucgugaucc

SEQ ID NO: 56555 - RNA, 32 nt, Human
aggccagucucaaacuccuggccucaugugau

SEQ ID NO: 56556 - RNA, 32 nt, Human
aggccagucuugaacuccugagcucaagcaau

SEQ ID NO: 56557 - RNA, 32 nt, Human
aggccagugcccagguuagugagcagugcccg

SEQ ID NO: 56558 - RNA, 32 nt, Human
aggccagugccccagcccagggugcuccggag

SEQ ID NO: 56559 - RNA, 18 nt, Human
aggccagugcugcacucu

SEQ ID NO: 56560 - RNA, 32 nt, Human
aggccagugggaggagggaggggccaggcagc

SEQ ID NO: 56561 - RNA, 32 nt, Human
aggccaguggugaguuagagguaugcuaucac

SEQ ID NO: 56562 - RNA, 32 nt, Human
aggccaguguccggccgaccagccugccuugg

SEQ ID NO: 56563 - RNA, 32 nt, Human
aggccaguugucaagugucaauaaaagcgcau

SEQ ID NO: 56564 - RNA, 32 nt, Human
aggccaguugugagccagggagaauguuccag

SEQ ID NO: 56565 - RNA, 32 nt, Human
aggccaguuuguuccacugaagcuuuucccac

SEQ ID NO: 56566 - RNA, 32 nt, Human
aggccauacugcuccagccggggcuccggggc

SEQ ID NO: 56567 - RNA, 24 nt, Human
aggccauacugcuggagcccauuc

SEQ ID NO: 56568 - RNA, 32 nt, Human
aggccauauauagggcuacaucuuguuaauug

SEQ ID NO: 56569 - RNA, 32 nt, Human
aggccauaugacuguaaggaauuuguaaaauu

SEQ ID NO: 56570 - RNA, 32 nt, Human
aggccaucaccaaccaacggacuuaccuuaca

SEQ ID NO: 56571 - RNA, 22 nt, Human
aggccaucagacaaccagaagc

SEQ ID NO: 56572 - RNA, 32 nt, Human
aggccaucagagauggccaggagaagggccag

SEQ ID NO: 56573 - RNA, 22 nt, Human
aggccaucagcugccaugcaca

SEQ ID NO: 56574 - RNA, 32 nt, Human
aggccaucaugcugggcuuugacagccacgag

SEQ ID NO: 56575 - RNA, 32 nt, Human
aggccauccagcgcuuuuucaguggcuauggc

SEQ ID NO: 56576 - RNA, 32 nt, Human
aggccaucccuaaugucacaguccccaacacc

SEQ ID NO: 56577 - RNA, 32 nt, Human
aggccauccuagaccagccagcuccagcugau

SEQ ID NO: 56578 - RNA, 32 nt, Human
aggccauccuuaugcuuugcaaagcacccuca

SEQ ID NO: 56579 - RNA, 32 nt, Human
aggccauccuugcugagcaucuuugagccugc

SEQ ID NO: 56580 - RNA, 32 nt, Human
aggccaucugaagagcguccugggugauggug

SEQ ID NO: 56581 - RNA, 32 nt, Human
aggccaucugcugucauugucauugucauagu

SEQ ID NO: 56582 - RNA, 22 nt, Human
aggccaucuggccgccuagcga

SEQ ID NO: 56583 - RNA, 32 nt, Human
aggccaugaauagaccuuucucaaaagaauac

SEQ ID NO: 56584 - RNA, 31 nt, Human
aggccaugacuucugccuggguccuagggcu

SEQ ID NO: 56585 - RNA, 32 nt, Human
aggccaugagccugcuacugggacccaggaag

SEQ ID NO: 56586 - RNA, 32 nt, Human
aggccaugaggguggaucacuugaggucagaa

SEQ ID NO: 56587 - RNA, 32 nt, Human
aggccauggaaaugacucuaaagauacaaaau

SEQ ID NO: 56588 - RNA, 19 nt, Human
aggccauggaagcccaugg

SEQ ID NO: 56589 - RNA, 30 nt, Human
aggccauggacaccuucagcaccaagagcc

SEQ ID NO: 56590 - RNA, 32 nt, Human
aggccauggagcagugucuggcuagguggaug

SEQ ID NO: 56591 - RNA, 22 nt, Human
aggccauggccccucaugaagu

SEQ ID NO: 56592 - RNA, 32 nt, Human
aggccauggccugcucucagcaguuugaucga

SEQ ID NO: 56593 - RNA, 20 nt, Human
aggccauggggcagccucca

SEQ ID NO: 56594 - RNA, 32 nt, Human
aggccauguccagcgggggaggcugugaguca

SEQ ID NO: 56595 - RNA, 32 nt, Human
aggccaugugagccaccgcugccagcacagag

SEQ ID NO: 56596 - RNA, 32 nt, Human
aggccauguuccauuaucucuuaaaauuggaa

SEQ ID NO: 56597 - RNA, 32 nt, Human
aggccauucagugcccuccacauggccuugcc

SEQ ID NO: 56598 - RNA, 32 nt, Human
aggccauucccccaggccugugucuucaccca

SEQ ID NO: 56599 - RNA, 32 nt, Human
aggccauucucuuccccugugugccucagugu

SEQ ID NO: 56600 - RNA, 32 nt, Human
aggccauugcacuccagccucagcaacaagag

SEQ ID NO: 56601 - RNA, 32 nt, Human
aggccauugcacuccagccugggcaauagggc

SEQ ID NO: 56602 - RNA, 32 nt, Human
aggccauuucuaaaagugcuacagaggacaga

SEQ ID NO: 56603 - RNA, 32 nt, Human
aggccauuugucucccugucuuccuuguccuc

SEQ ID NO: 56604 - RNA, 32 nt, Human
aggcccaaaagccacagaugagcauuggguug

SEQ ID NO: 56605 - RNA, 32 nt, Human
aggcccaaaggagaggccaaaagggaaaccaa

SEQ ID NO: 56606 - RNA, 18 nt, Human
aggcccaacccaccccca

SEQ ID NO: 56607 - RNA, 32 nt, Human
aggcccaacccuggggcucugaggauugggca

SEQ ID NO: 56608 - RNA, 32 nt, Human
aggcccaagcccagggcaggaaccuggagcaa

SEQ ID NO: 56609 - RNA, 32 nt, Human
aggcccaaggagguggaguggagagugggcuc

SEQ ID NO: 56610 - RNA, 20 nt, Human
aggcccaaggccgcccaggg

SEQ ID NO: 56611 - RNA, 32 nt, Human
aggcccaagguauccaagccuggggaagggca

SEQ ID NO: 56612 - RNA, 32 nt, Human
aggcccaagucaacuuucuguccagugggauu

SEQ ID NO: 56613 - RNA, 32 nt, Human
aggcccaaugcagaagaguauuaagaaagaug

SEQ ID NO: 56614 - RNA, 21 nt, Human
aggcccacaaccucaauguac

SEQ ID NO: 56615 - RNA, 32 nt, Human
aggcccacagcccagcgagggagaggucguga

SEQ ID NO: 56616 - RNA, 19 nt, Human
aggcccacagcccucagca

SEQ ID NO: 56617 - RNA, 32 nt, Human
aggcccacagcuggccccuguuggagucucuu

SEQ ID NO: 56618 - RNA, 32 nt, Human
aggcccacaggccacaccaucuguuucacuga

SEQ ID NO: 56619 - RNA, 32 nt, Human
aggcccacaggucugucaucccauaggccacc

SEQ ID NO: 56620 - RNA, 21 nt, Human
aggcccacccucucgguccgg

SEQ ID NO: 56621 - RNA, 31 nt, Human
aggcccacccucuguggcccuguguccugua

SEQ ID NO: 56622 - RNA, 32 nt, Human
aggcccaccugccucccugccugcuucgcccu

SEQ ID NO: 56623 - RNA, 32 nt, Human
aggcccaccugggcucuguccucugccaagca

SEQ ID NO: 56624 - RNA, 32 nt, Human
aggcccacucacaagcccuuggccacaacuau

SEQ ID NO: 56625 - RNA, 20 nt, Human
aggcccacugcugcugagaa

SEQ ID NO: 56626 - RNA, 32 nt, Human
aggcccacuggcugcaacaaguaccacugaca

SEQ ID NO: 56627 - RNA, 23 nt, Human
aggcccacugguuagcucagaga

SEQ ID NO: 56628 - RNA, 32 nt, Human
aggcccacuguaauacguagcucucuuaaaua

SEQ ID NO: 56629 - RNA, 32 nt, Human
aggcccacuucccagaggcuccugggccugug

SEQ ID NO: 56630 - RNA, 32 nt, Human
aggcccacuugccauaaccucuuuuggucuau

SEQ ID NO: 56631 - RNA, 32 nt, Human
aggcccagaaaaugccuggcgugagagccagc

SEQ ID NO: 56632 - RNA, 32 nt, Human
aggcccagaagcccagcagcugugggaaggaa

SEQ ID NO: 56633 - RNA, 32 nt, Human
aggcccagacacacggucccucaggucaggag

SEQ ID NO: 56634 - RNA, 32 nt, Human
aggcccagacagaggagccaggggagcccugu

SEQ ID NO: 56635 - RNA, 16 nt, Human
aggcccagaccaugca

SEQ ID NO: 56636 - RNA, 32 nt, Human
aggcccagagaagggaaauuacuugcccaaga

SEQ ID NO: 56637 - RNA, 19 nt, Human
aggcccagagaccagcaga

SEQ ID NO: 56638 - RNA, 32 nt, Human
aggcccagaggagccaagucauuaaaauggaa

SEQ ID NO: 56639 - RNA, 32 nt, Human
aggcccagaucagcuuugcacauggugcugac

SEQ ID NO: 56640 - RNA, 32 nt, Human
aggcccagaucucuaccacagaauacacccug

SEQ ID NO: 56641 - RNA, 32 nt, Human
aggcccagaugcagggcggcuuuuccaaggcc

SEQ ID NO: 56642 - RNA, 32 nt, Human
aggcccagcaaccugccagucacucaguggcc

SEQ ID NO: 56643 - RNA, 25 nt, Human
aggcccagcaccacccuccuuccca

SEQ ID NO: 56644 - RNA, 21 nt, Human
aggcccagcagcagcuggagg

SEQ ID NO: 56645 - RNA, 32 nt, Human
aggcccagccgacccccucucccugcauggca

SEQ ID NO: 56646 - RNA, 32 nt, Human
aggcccagccucggugagcacacacgcccucc

SEQ ID NO: 56647 - RNA, 19 nt, Human
aggcccagccucugugcug

SEQ ID NO: 56648 - RNA, 31 nt, Human
aggcccagccucuguggcccuguguccugca

SEQ ID NO: 56649 - RNA, 32 nt, Human
aggcccagccuggcagcuucucacaugguaaa

SEQ ID NO: 56650 - RNA, 32 nt, Human
aggcccagcgcccguccgcagcgcggccggca

SEQ ID NO: 56651 - RNA, 32 nt, Human
aggcccagcgugcagcugcagaaagguuuaga

SEQ ID NO: 56652 - RNA, 22 nt, Human
aggcccagcucagcugggccag

SEQ ID NO: 56653 - RNA, 32 nt, Human
aggcccagcucaguguggaggcugcuggcccu

SEQ ID NO: 56654 - RNA, 32 nt, Human
aggcccagcuccugcaucuugguggccccucc

SEQ ID NO: 56655 - RNA, 32 nt, Human
aggcccagcugaccaccuccugcugcagcucu

SEQ ID NO: 56656 - RNA, 32 nt, Human
aggcccagcugcagccacccggccucagggca

SEQ ID NO: 56657 - RNA, 32 nt, Human
aggcccagcuucagccucaccuucccuguggu

SEQ ID NO: 56658 - RNA, 30 nt, Human
aggcccagcuugcagcaggaggagcugcag

SEQ ID NO: 56659 - RNA, 32 nt, Human
aggcccaggaacauguuuauuuuagucaccuu

SEQ ID NO: 56660 - RNA, 32 nt, Human
aggcccaggaagggcacaggggcugagcacua

SEQ ID NO: 56661 - RNA, 32 nt, Human
aggcccaggagagggcgcugaccuguggucgu

SEQ ID NO: 56662 - RNA, 32 nt, Human
aggcccaggcagcggcggcggcggcggcucuc

SEQ ID NO: 56663 - RNA, 32 nt, Human
aggcccaggcaucggaguagaccauggccucc

SEQ ID NO: 56664 - RNA, 32 nt, Human
aggcccaggccuggguuuguacuuccaccucc

SEQ ID NO: 56665 - RNA, 32 nt, Human
aggcccaggcucuggugggccugcucucugua

SEQ ID NO: 56666 - RNA, 32 nt, Human
aggcccaggcugggguucagaccugcagagga

SEQ ID NO: 56667 - RNA, 32 nt, Human
aggcccaggcuggucucaaacuucugggcuca

SEQ ID NO: 56668 - RNA, 32 nt, Human
aggcccagggguggagguuagggguggagcuu

SEQ ID NO: 56669 - RNA, 32 nt, Human
aggcccagguacuggggaggccugaggagccc

SEQ ID NO: 56670 - RNA, 19 nt, Human
aggcccaggucccacccca

SEQ ID NO: 56671 - RNA, 32 nt, Human
aggcccaggugcuucuccuuuaugauuugagu

SEQ ID NO: 56672 - RNA, 32 nt, Human
aggcccagugaugccagaagaugggagggagg

SEQ ID NO: 56673 - RNA, 32 nt, Human
aggcccaguuuuucccuuccagcggccucucc

SEQ ID NO: 56674 - RNA, 24 nt, Human
aggcccauacccuaccucacggca

SEQ ID NO: 56675 - RNA, 24 nt, Human
aggcccauacccuacgucacggca

SEQ ID NO: 56676 - RNA, 21 nt, Human
aggcccauccaucccaugccu

SEQ ID NO: 56677 - RNA, 32 nt, Human
aggcccaucccucucuggccauggccccaagu

SEQ ID NO: 56678 - RNA, 32 nt, Human
aggcccauccugguugucaccaugaggacaau

SEQ ID NO: 56679 - RNA, 32 nt, Human
aggcccaucugccucugcccuuucuagccaag

SEQ ID NO: 56680 - RNA, 19 nt, Human
aggcccaucuuuugccuca

SEQ ID NO: 56681 - RNA, 21 nt, Human
aggcccauggcacuggggcag

SEQ ID NO: 56682 - RNA, 32 nt, Human
aggcccauguaucugcacgagcacuuagcuug

SEQ ID NO: 56683 - RNA, 19 nt, Human
aggcccaugucacugguca

SEQ ID NO: 56684 - RNA, 32 nt, Human
aggcccaugugaugaggagcugagaggacuug

SEQ ID NO: 56685 - RNA, 32 nt, Human
aggcccauuuggggcucccugugagugauucc

SEQ ID NO: 56686 - RNA, 32 nt, Human
aggccccaaaacagucuacacagcaggaggga

SEQ ID NO: 56687 - RNA, 32 nt, Human
aggccccaaacagggagccacgccagccagac

SEQ ID NO: 56688 - RNA, 32 nt, Human
aggccccaacagcaggaauccccauggagcuc

SEQ ID NO: 56689 - RNA, 32 nt, Human
aggccccacacacccaagugccccucacaccu

SEQ ID NO: 56690 - RNA, 32 nt, Human
aggccccacagcaacagaaguccaggacccac

SEQ ID NO: 56691 - RNA, 32 nt, Human
aggccccacgcccccacucucccuccacacuu

SEQ ID NO: 56692 - RNA, 32 nt, Human
aggccccacucccaguccuccugggauccugc

SEQ ID NO: 56693 - RNA, 32 nt, Human
aggccccacuggcugugcgugcccucuacaca

SEQ ID NO: 56694 - RNA, 32 nt, Human
aggccccacuuccccauaccaucaccuugggg

SEQ ID NO: 56695 - RNA, 32 nt, Human
aggccccagaggcccuggaggucuccaggggc

SEQ ID NO: 56696 - RNA, 32 nt, Human
aggccccagauggacacccaggccuguggugg

SEQ ID NO: 56697 - RNA, 19 nt, Human
aggccccaggcucagaagc

SEQ ID NO: 56698 - RNA, 22 nt, Human
aggccccagggcgagcuugcca

SEQ ID NO: 56699 - RNA, 32 nt, Human
aggccccagggcuguggguggggaaggaaggc

SEQ ID NO: 56700 - RNA, 32 nt, Human
aggccccaggggagcugugcagacugacucuc

SEQ ID NO: 56701 - RNA, 21 nt, Human
aggccccaggguggcugccuc

SEQ ID NO: 56702 - RNA, 20 nt, Human
aggccccagugugugccuca

SEQ ID NO: 56703 - RNA, 32 nt, Human
aggccccauccucccugugcccucucugcugc

SEQ ID NO: 56704 - RNA, 32 nt, Human
aggccccaucuuuacaaaaauacaaaaauuag

SEQ ID NO: 56705 - RNA, 32 nt, Human
aggccccaugcaggacaguagguuccaugggg

SEQ ID NO: 56706 - RNA, 32 nt, Human
aggcccccaagaggggcgaggccggggaggug

SEQ ID NO: 56707 - RNA, 28 nt, Human
aggcccccaaguguggucuuuuucuuuc

SEQ ID NO: 56708 - RNA, 21 nt, Human
aggcccccaccccccuuccca

SEQ ID NO: 56709 - RNA, 32 nt, Human
aggcccccagaaccacucucugcagagacagg

SEQ ID NO: 56710 - RNA, 32 nt, Human
aggcccccagaaccuggcuccagccagggggc

SEQ ID NO: 56711 - RNA, 32 nt, Human
aggcccccagcaggcucuccagucccaggaug

SEQ ID NO: 56712 - RNA, 32 nt, Human
aggcccccagcccagggcuccugcacuuacuu

SEQ ID NO: 56713 - RNA, 32 nt, Human
aggcccccagggugggaugguggggagauaag

SEQ ID NO: 56714 - RNA, 32 nt, Human
aggcccccaucuccuuaaagaguguggcaaaa

SEQ ID NO: 56715 - RNA, 18 nt, Human
aggcccccauguccaguu

SEQ ID NO: 56716 - RNA, 22 nt, Human
aggccccccggggccggggcag

SEQ ID NO: 56717 - RNA, 28 nt, Human
aggcccccgcaggcugccucuucccaac

SEQ ID NO: 56718 - RNA, 32 nt, Human
aggcccccggcccacguguccccugcccucug

SEQ ID NO: 56719 - RNA, 32 nt, Human
aggcccccuaguagcuggcauuacaggcacau

SEQ ID NO: 56720 - RNA, 32 nt, Human
aggcccccuccucuccccagaccacagggggc

SEQ ID NO: 56721 - RNA, 18 nt, Human
aggcccccugggccagcu

SEQ ID NO: 56722 - RNA, 32 nt, Human
aggccccgagacuggaguguguuccugaagag

SEQ ID NO: 56723 - RNA, 32 nt, Human
aggccccgaggcugaagaggagccaugucucc

SEQ ID NO: 56724 - RNA, 32 nt, Human
aggccccgcaggcagcccacagagccacuucg

SEQ ID NO: 56725 - RNA, 32 nt, Human
aggccccgccagcaggcgaagcagggagaugu

SEQ ID NO: 56726 - RNA, 32 nt, Human
aggccccgcccaggcuuagucacugagacagc

SEQ ID NO: 56727 - RNA, 19 nt, Human
aggccccgcccuccgcucc

SEQ ID NO: 56728 - RNA, 18 nt, Human
aggccccgcccuccuccc

SEQ ID NO: 56729 - RNA, 32 nt, Human
aggccccgccucucccuggcagcccggagccc

SEQ ID NO: 56730 - RNA, 32 nt, Human
aggccccggcagggagcugggccccgcagacg

SEQ ID NO: 56731 - RNA, 32 nt, Human
aggccccggcgcccuggugaggcccaaaccuc

SEQ ID NO: 56732 - RNA, 20 nt, Human
aggccccgggccagugucca

SEQ ID NO: 56733 - RNA, 32 nt, Human
aggccccgggcccugcgcugccugucauggcu

SEQ ID NO: 56734 - RNA, 24 nt, Human
aggccccuacagccaauggaacgg

SEQ ID NO: 56735 - RNA, 32 nt, Human
aggccccuagggccacuuccaaaggaguguga

SEQ ID NO: 56736 - RNA, 32 nt, Human
aggccccuccaggccgucacuggccugcacag

SEQ ID NO: 56737 - RNA, 32 nt, Human
aggccccucccccuggccucaggcaggcccug

SEQ ID NO: 56738 - RNA, 21 nt, Human
aggccccuccuggccaggcag

SEQ ID NO: 56739 - RNA, 19 nt, Human
aggccccuccuguccuccu

SEQ ID NO: 56740 - RNA, 32 nt, Human
aggccccucgguuugaguccaucauggaggac

SEQ ID NO: 56741 - RNA, 32 nt, Human
aggccccucuauuuuauuuuucuugaaaacau

SEQ ID NO: 56742 - RNA, 32 nt, Human
aggccccucugggcugaucuugugccauucuu

SEQ ID NO: 56743 - RNA, 19 nt, Human
aggccccugaggcccagcu

SEQ ID NO: 56744 - RNA, 32 nt, Human
aggccccugaguagcugggauuacaggcacgu

SEQ ID NO: 56745 - RNA, 18 nt, Human
aggccccugcaacugggg

SEQ ID NO: 56746 - RNA, 24 nt, Human
aggccccugcaaggguaggggaca

SEQ ID NO: 56747 - RNA, 20 nt, Human
aggccccugcagagcagggg

SEQ ID NO: 56748 - RNA, 32 nt, Human
aggccccugcagcugccucacaccgccccuug

SEQ ID NO: 56749 - RNA, 18 nt, Human
aggccccugccaccaccu

SEQ ID NO: 56750 - RNA, 20 nt, Human
aggccccugccacccugggg

SEQ ID NO: 56751 - RNA, 21 nt, Human
aggccccugcccaugcggggc

SEQ ID NO: 56752 - RNA, 32 nt, Human
aggccccugcuccuguccacagagcccacccu

SEQ ID NO: 56753 - RNA, 32 nt, Human
aggccccugcugcagagagugcagaaccgucc

SEQ ID NO: 56754 - RNA, 32 nt, Human
aggccccugcuucucccucuaggagccuaaag

SEQ ID NO: 56755 - RNA, 32 nt, Human
aggccccuggacaauugaggaugcccaucccc

SEQ ID NO: 56756 - RNA, 32 nt, Human
aggccccuggauggaugcauggggaagguuag

SEQ ID NO: 56757 - RNA, 32 nt, Human
aggccccuguaaucccagcuaauugggaggcu

SEQ ID NO: 56758 - RNA, 21 nt, Human
aggccccuguuuccugagcag

SEQ ID NO: 56759 - RNA, 32 nt, Human
aggccccuuccaggcaaagcugcuucucuucc

SEQ ID NO: 56760 - RNA, 19 nt, Human
aggccccuuugagugacuc

SEQ ID NO: 56761 - RNA, 27 nt, Human
aggcccgaaagccgccucccccuccca

SEQ ID NO: 56762 - RNA, 32 nt, Human
aggcccgaaagucccugaggcccuacuggggu

SEQ ID NO: 56763 - RNA, 32 nt, Human
aggcccgaaccauggaccuccgcaccgccgug

SEQ ID NO: 56764 - RNA, 32 nt, Human
aggcccgacuccggccucccaacaaggucuuu

SEQ ID NO: 56765 - RNA, 20 nt, Human
aggcccgagagaggcugcug

SEQ ID NO: 56766 - RNA, 32 nt, Human
aggcccgagggaucaggagcuaugggaccaga

SEQ ID NO: 56767 - RNA, 32 nt, Human
aggcccgcaggaggaggaggaucggcggacug

SEQ ID NO: 56768 - RNA, 32 nt, Human
aggcccgcagggaagugucugcacaucaccga

SEQ ID NO: 56769 - RNA, 32 nt, Human
aggcccgcccuccuggccagcagaguggggca

SEQ ID NO: 56770 - RNA, 20 nt, Human
aggcccgccuggcagugucc

SEQ ID NO: 56771 - RNA, 19 nt, Human
aggcccgcgcccgcgcccg

SEQ ID NO: 56772 - RNA, 32 nt, Human
aggcccgcgccgaggaccuggccaggccagcc

SEQ ID NO: 56773 - RNA, 32 nt, Human
aggcccggaagagagcccucaccaggaaauga

SEQ ID NO: 56774 - RNA, 28 nt, Human
aggcccggaagugcugacgcagccauca

SEQ ID NO: 56775 - RNA, 32 nt, Human
aggcccggacacacccaggaggccccucacag

SEQ ID NO: 56776 - RNA, 32 nt, Human
aggcccggaccagugccucaccuucagguagc

SEQ ID NO: 56777 - RNA, 32 nt, Human
aggcccggccuccugccucucgaaggucugca

SEQ ID NO: 56778 - RNA, 32 nt, Human
aggcccggccuccugcgucucgaaggccugca

SEQ ID NO: 56779 - RNA, 32 nt, Human
aggcccgggaaagggaagcgacguggcagggc

SEQ ID NO: 56780 - RNA, 32 nt, Human
aggcccgggaggacgcggcggcgggaaccugg

SEQ ID NO: 56781 - RNA, 32 nt, Human
aggcccgggaggcgcaggcgcaggcgcagugg

SEQ ID NO: 56782 - RNA, 32 nt, Human
aggcccgggccggcgcaggguggugcaacuuu

SEQ ID NO: 56783 - RNA, 32 nt, Human
aggcccgggcuggaggggcaguguugcuguuc

SEQ ID NO: 56784 - RNA, 32 nt, Human
aggcccggggaagggaagagcaggucaguaca

SEQ ID NO: 56785 - RNA, 32 nt, Human
aggcccggggcuuccucaucaaaguguuggug

SEQ ID NO: 56786 - RNA, 32 nt, Human
aggcccgggggcuccggcaucucgacgcggcu

SEQ ID NO: 56787 - RNA, 32 nt, Human
aggcccgggguccugguccaccccaggucccu

SEQ ID NO: 56788 - RNA, 32 nt, Human
aggcccgguggaccugccgccaugcaggacgg

SEQ ID NO: 56789 - RNA, 32 nt, Human
aggcccgguggagaauuaggugcugcugggag

SEQ ID NO: 56790 - RNA, 32 nt, Human
aggcccgguuuaaaugcaggaggaaucuggug

SEQ ID NO: 56791 - RNA, 24 nt, Human
aggcccgugaccaggccacaggga

SEQ ID NO: 56792 - RNA, 32 nt, Human
aggcccgugccucaccagacgccaugcucuca

SEQ ID NO: 56793 - RNA, 32 nt, Human
aggcccuaagaccuccuccuccaggucaggcu

SEQ ID NO: 56794 - RNA, 32 nt, Human
aggcccuacccugcccuccaccgccggcucca

SEQ ID NO: 56795 - RNA, 32 nt, Human
aggcccuagcaguccugcuaccacagauccca

SEQ ID NO: 56796 - RNA, 32 nt, Human
aggcccuagggugcuggagcugcggaggaggg

SEQ ID NO: 56797 - RNA, 32 nt, Human
aggcccuauuacccucuccagcugccacugcc

SEQ ID NO: 56798 - RNA, 32 nt, Human
aggcccucaaauagccccuccugggacucccu

SEQ ID NO: 56799 - RNA, 32 nt, Human
aggcccucaagugcccuagggaagaagcaaga

SEQ ID NO: 56800 - RNA, 32 nt, Human
aggcccucagaucccugcucuuccugccuuuc

SEQ ID NO: 56801 - RNA, 32 nt, Human
aggcccucauuuccugcacuguguucucaggu

SEQ ID NO: 56802 - RNA, 32 nt, Human
aggcccuccaaccauaaacaguccaggaugga

SEQ ID NO: 56803 - RNA, 25 nt, Human
aggcccuccagcuggaugcugggga

SEQ ID NO: 56804 - RNA, 32 nt, Human
aggcccucccugcacucucugccacauguccc

SEQ ID NO: 56805 - RNA, 32 nt, Human
aggcccuccucccaggagguagggucuuggcu

SEQ ID NO: 56806 - RNA, 32 nt, Human
aggcccuccucccccucuccccacucccucau

SEQ ID NO: 56807 - RNA, 17 nt, Human
aggcccuccuggccagg

SEQ ID NO: 56808 - RNA, 32 nt, Human
aggcccuccugguucugguugccuaaaaggug

SEQ ID NO: 56809 - RNA, 32 nt, Human
aggcccuccuuccagggaugucucuccagcuc

SEQ ID NO: 56810 - RNA, 32 nt, Human
aggcccuccuuccuuccacauuuaauugcuua

SEQ ID NO: 56811 - RNA, 32 nt, Human
aggcccucggcagagacacaggaagcggaacu

SEQ ID NO: 56812 - RNA, 32 nt, Human
aggcccucuaaugccauuuuucuaaacaguaa

SEQ ID NO: 56813 - RNA, 32 nt, Human
aggcccucucaggcaccuccugccucagccca

SEQ ID NO: 56814 - RNA, 32 nt, Human
aggcccucuucaggcuuuggcagccacagaua

SEQ ID NO: 56815 - RNA, 32 nt, Human
aggcccugaccucacugccugccuccucuacc

SEQ ID NO: 56816 - RNA, 18 nt, Human
aggcccugaccucagggg

SEQ ID NO: 56817 - RNA, 21 nt, Human
aggcccugaccuucauggugu

SEQ ID NO: 56818 - RNA, 20 nt, Human
aggcccugagcaggcagcug

SEQ ID NO: 56819 - RNA, 32 nt, Human
aggcccugagcuggggagguggggaagauucg

SEQ ID NO: 56820 - RNA, 32 nt, Human
aggcccugcacuccaccuggggacggccccuc

SEQ ID NO: 56821 - RNA, 32 nt, Human
aggcccugcaucccuugccucaggccgggcug

SEQ ID NO: 56822 - RNA, 18 nt, Human
aggcccugcucaccugca

SEQ ID NO: 56823 - RNA, 32 nt, Human
aggcccugcuccagcaucuacuucagccccag

SEQ ID NO: 56824 - RNA, 32 nt, Human
aggcccugcuccugaagccucugugaccuugg

SEQ ID NO: 56825 - RNA, 32 nt, Human
aggcccugcucuccacggccucccucuggccc

SEQ ID NO: 56826 - RNA, 32 nt, Human
aggcccugcucuuccucgucuucugggacaag

SEQ ID NO: 56827 - RNA, 32 nt, Human
aggcccugcugggacaucccacgugugauccc

SEQ ID NO: 56828 - RNA, 32 nt, Human
aggcccugcuucugcugaaccugacagccagu

SEQ ID NO: 56829 - RNA, 32 nt, Human
aggcccuggagcucggccucccuaccuucucc

SEQ ID NO: 56830 - RNA, 32 nt, Human
aggcccuggaggcugcaacauaccucaauccu

SEQ ID NO: 56831 - RNA, 32 nt, Human
aggcccuggagugggaguucugaggcagggug

SEQ ID NO: 56832 - RNA, 32 nt, Human
aggcccuggcgacugggcugagcccccaagug

SEQ ID NO: 56833 - RNA, 32 nt, Human
aggcccuggcuggagggggacccuggacugga

SEQ ID NO: 56834 - RNA, 32 nt, Human
aggcccuggcuguggagaaugcugaaggaaga

SEQ ID NO: 56835 - RNA, 32 nt, Human
aggcccugggagaggccaugagagccaccccg

SEQ ID NO: 56836 - RNA, 32 nt, Human
aggcccugggcuccuggcugggccagcagcug

SEQ ID NO: 56837 - RNA, 32 nt, Human
aggcccugggcuggaggaagacaucccagauc

SEQ ID NO: 56838 - RNA, 32 nt, Human
aggcccugggcugggugcagggacacaagggu

SEQ ID NO: 56839 - RNA, 32 nt, Human
aggcccugggcugggugcugggaagggagggu

SEQ ID NO: 56840 - RNA, 32 nt, Human
aggcccuggggagcccaguccacugagcaagc

SEQ ID NO: 56841 - RNA, 32 nt, Human
aggcccuguccaccaccuuuccuggccuugcu

SEQ ID NO: 56842 - RNA, 32 nt, Human
aggcccuguccaucuucuccccaccaccgccc

SEQ ID NO: 56843 - RNA, 32 nt, Human
aggcccugucccaucaugcauucaugucuguc

SEQ ID NO: 56844 - RNA, 32 nt, Human
aggcccugugaaggaaauggcccaugguucac

SEQ ID NO: 56845 - RNA, 32 nt, Human
aggcccugugggaacgguccaggcugguccug

SEQ ID NO: 56846 - RNA, 30 nt, Human
aggcccuuaauaaacaccuguuggauaagc

SEQ ID NO: 56847 - RNA, 32 nt, Human
aggcccuuagggaaguugucuccuuccauuca

SEQ ID NO: 56848 - RNA, 22 nt, Human
aggcccuucagagccagggcag

SEQ ID NO: 56849 - RNA, 21 nt, Human
aggcccuucaucuucauggcc

SEQ ID NO: 56850 - RNA, 32 nt, Human
aggcccuucccaagccccuaacgcaacugcca

SEQ ID NO: 56851 - RNA, 32 nt, Human
aggcccuucccaagguguggugacugugccuu

SEQ ID NO: 56852 - RNA, 32 nt, Human
aggcccuuccucucccccugucuguuuccuuc

SEQ ID NO: 56853 - RNA, 32 nt, Human
aggcccuuccucucugugccgugcuugcuccu

SEQ ID NO: 56854 - RNA, 32 nt, Human
aggcccuucuauuccugagggcucagagcuga

SEQ ID NO: 56855 - RNA, 32 nt, Human
aggcccuugacucugcccugagcuugcagcug

SEQ ID NO: 56856 - RNA, 32 nt, Human
aggcccuugaggaccacuugagcccaggagau

SEQ ID NO: 56857 - RNA, 32 nt, Human
aggcccuuuaugauuguugagcauuaauccuc

SEQ ID NO: 56858 - RNA, 32 nt, Human
aggccgaaggcagugcaagagacucuggccuc

SEQ ID NO: 56859 - RNA, 32 nt, Human
aggccgacacaccacaccuacacucccgcguc

SEQ ID NO: 56860 - RNA, 32 nt, Human
aggccgacaugcuggauuaccugcugagccug

SEQ ID NO: 56861 - RNA, 32 nt, Human
aggccgagagcauguaccagaucaaguaugag

SEQ ID NO: 56862 - RNA, 32 nt, Human
aggccgagagccccaagaagacccccgcgucu

SEQ ID NO: 56863 - RNA, 19 nt, Human
aggccgagagucagacuga

SEQ ID NO: 56864 - RNA, 20 nt, Human
aggccgagccagcccagaga

SEQ ID NO: 56865 - RNA, 32 nt, Human
aggccgagccggggcguaucaccugaggucag

SEQ ID NO: 56866 - RNA, 32 nt, Human
aggccgagcuuuguuuccuguguuugugugga

SEQ ID NO: 56867 - RNA, 32 nt, Human
aggccgaggagaaggcgcugaacgaggagaag

SEQ ID NO: 56868 - RNA, 32 nt, Human
aggccgaggcagcagauugcuugagcccagga

SEQ ID NO: 56869 - RNA, 19 nt, Human
aggccgaggcaggccggcu

SEQ ID NO: 56870 - RNA, 20 nt, Human
aggccgaggcaggcggauca

SEQ ID NO: 56871 - RNA, 20 nt, Human
aggccgaggcagguggauca

SEQ ID NO: 56872 - RNA, 21 nt, Human
aggccgaggcagguggaucac

SEQ ID NO: 56873 - RNA, 32 nt, Human
aggccgaggccggggcgggauccagagcggga

SEQ ID NO: 56874 - RNA, 26 nt, Human
aggccgaggcggaucacgaggucagg

SEQ ID NO: 56875 - RNA, 26 nt, Human
aggccgaggcggaucauaaggucagg

SEQ ID NO: 56876 - RNA, 24 nt, Human
aggccgaggcgggaggaucaccug

SEQ ID NO: 56877 - RNA, 24 nt, Human
aggccgaggcgggaggaucacuug

SEQ ID NO: 56878 - RNA, 20 nt, Human
aggccgaggcgggcggauca

SEQ ID NO: 56879 - RNA, 32 nt, Human
aggccgagggccuguggaacgagggcuccguu

SEQ ID NO: 56880 - RNA, 23 nt, Human
aggccgaggugggaggaucgcuu

SEQ ID NO: 56881 - RNA, 32 nt, Human
aggccgaggugggcggaucaccagaggucaag

SEQ ID NO: 56882 - RNA, 19 nt, Human
aggccgagguugcagugag

SEQ ID NO: 56883 - RNA, 32 nt, Human
aggccgagucuguccuggaaccaggcuugccu

SEQ ID NO: 56884 - RNA, 32 nt, Human
aggccgaguugggggcgaucaccugaggucag

SEQ ID NO: 56885 - RNA, 32 nt, Human
aggccgauggugguuucggucccuggagcccg

SEQ ID NO: 56886 - RNA, 32 nt, Human
aggccgaugugggcagaucacaaggucaggag

SEQ ID NO: 56887 - RNA, 24 nt, Human
aggccgcaagcagcugccuagggg

SEQ ID NO: 56888 - RNA, 32 nt, Human
aggccgcaagggaaguucacgggcucggcacc

SEQ ID NO: 56889 - RNA, 32 nt, Human
aggccgcacacagcggucugacccgguuuggu

SEQ ID NO: 56890 - RNA, 32 nt, Human
aggccgcaccacugcacuccagccugggugac

SEQ ID NO: 56891 - RNA, 32 nt, Human
aggccgcaccugcuggagggggacugaagggc

SEQ ID NO: 56892 - RNA, 32 nt, Human
aggccgcagaccccuucucaccucuugagggg

SEQ ID NO: 56893 - RNA, 32 nt, Human
aggccgcagagggagcaggaagaguugcugau

SEQ ID NO: 56894 - RNA, 32 nt, Human
aggccgcaggcaggugguucagugguuagggc

SEQ ID NO: 56895 - RNA, 32 nt, Human
aggccgcagggugggugauggagaaggcugag

SEQ ID NO: 56896 - RNA, 32 nt, Human
aggccgcagguguugugaagaccacucguucu

SEQ ID NO: 56897 - RNA, 32 nt, Human
aggccgcauauggacacacaugaggucgcucg

SEQ ID NO: 56898 - RNA, 32 nt, Human
aggccgccagcccggaggcugcagcccagaaa

SEQ ID NO: 56899 - RNA, 32 nt, Human
aggccgccauccagggcggggaagggagcgga

SEQ ID NO: 56900 - RNA, 32 nt, Human
aggccgcccuggagggcccggaggucccaagg

SEQ ID NO: 56901 - RNA, 32 nt, Human
aggccgccgccgccucuccuugcugcagccau

SEQ ID NO: 56902 - RNA, 32 nt, Human
aggccgccgcgaugccgcacuuccuggacugg

SEQ ID NO: 56903 - RNA, 32 nt, Human
aggccgccgugaccuauucacccuccacuucc

SEQ ID NO: 56904 - RNA, 32 nt, Human
aggccgccucagcucuccucugcgccggcccg

SEQ ID NO: 56905 - RNA, 32 nt, Human
aggccgcgacugccucucccaucugucuaucu

SEQ ID NO: 56906 - RNA, 32 nt, Human
aggccgcgccaagauggcagaggauggaggcu

SEQ ID NO: 56907 - RNA, 32 nt, Human
aggccgcgcucugugggccucugagggcggca

SEQ ID NO: 56908 - RNA, 32 nt, Human
aggccgcucccaggccccugugagugugggca

SEQ ID NO: 56909 - RNA, 32 nt, Human
aggccgcugacugccagcuccagccuggcccc

SEQ ID NO: 56910 - RNA, 32 nt, Human
aggccgcugcagcugcacagccucugcuacac

SEQ ID NO: 56911 - RNA, 32 nt, Human
aggccgcuggaugcuggagugaaaggaaggga

SEQ ID NO: 56912 - RNA, 32 nt, Human
aggccgcuuccaggaagccccgggccaggccc

SEQ ID NO: 56913 - RNA, 32 nt, Human
aggccgcuucccuaagaggcuuggaggagcug

SEQ ID NO: 56914 - RNA, 22 nt, Human
aggccggaagugcgggcgcuca

SEQ ID NO: 56915 - RNA, 32 nt, Human
aggccggacagaaaacaugacccaucaaugug

SEQ ID NO: 56916 - RNA, 32 nt, Human
aggccggacaggagagggaggggugggggaca

SEQ ID NO: 56917 - RNA, 20 nt, Human
aggccggagcaucucagggg

SEQ ID NO: 56918 - RNA, 32 nt, Human
aggccggagccuugcccucccaagacacuguu

SEQ ID NO: 56919 - RNA, 32 nt, Human
aggccggagcuguccaucagcaccaaaggccg

SEQ ID NO: 56920 - RNA, 18 nt, Human
aggccggagcugugggga

SEQ ID NO: 56921 - RNA, 24 nt, Human
aggccggaggauugcuuaaaccca

SEQ ID NO: 56922 - RNA, 24 nt, Human
aggccggaggauugcuugagccca

SEQ ID NO: 56923 - RNA, 22 nt, Human
aggccggagugcagugguguca

SEQ ID NO: 56924 - RNA, 24 nt, Human
aggccggaguggggcucccagagg

SEQ ID NO: 56925 - RNA, 32 nt, Human
aggccggcagcagcagcagagagcagagagca

SEQ ID NO: 56926 - RNA, 32 nt, Human
aggccggcaggcgggugcgcggagggcuggua

SEQ ID NO: 56927 - RNA, 32 nt, Human
aggccggcaguggaggcugagcagggacucuc

SEQ ID NO: 56928 - RNA, 32 nt, Human
aggccggcaguggcugccucucuugguucugc

SEQ ID NO: 56929 - RNA, 32 nt, Human
aggccggcauggugccugggcugccgggaacc

SEQ ID NO: 56930 - RNA, 32 nt, Human
aggccggccagccucacaucagucucuccgcc

SEQ ID NO: 56931 - RNA, 32 nt, Human
aggccggcccgagcagcacacagugauccaca

SEQ ID NO: 56932 - RNA, 32 nt, Human
aggccggcgccagccgugccucaccaggucca

SEQ ID NO: 56933 - RNA, 24 nt, Human
aggccggcggaucacgaggucagg

SEQ ID NO: 56934 - RNA, 32 nt, Human
aggccggcgguggauggggccaggaagcaugc

SEQ ID NO: 56935 - RNA, 32 nt, Human
aggccggcucuggccuccugacccagacagcg

SEQ ID NO: 56936 - RNA, 21 nt, Human
aggccgggacagaccaggagc

SEQ ID NO: 56937 - RNA, 32 nt, Human
aggccgggacaguggugcaugccagucauccc

SEQ ID NO: 56938 - RNA, 32 nt, Human
aggccgggagaaggggagccaggaccuucuca

SEQ ID NO: 56939 - RNA, 17 nt, Human
aggccgggagcaggcgc

SEQ ID NO: 56940 - RNA, 32 nt, Human
aggccgggaguggcaucugaggccaggagugg

SEQ ID NO: 56941 - RNA, 21 nt, Human
aggccgggcacgguggcucau

SEQ ID NO: 56942 - RNA, 32 nt, Human
aggccgggcacuguagcucaaaccuauaaucc

SEQ ID NO: 56943 - RNA, 19 nt, Human
aggccgggccgggcggcca

SEQ ID NO: 56944 - RNA, 21 nt, Human
aggccgggccgggcucggggg

SEQ ID NO: 56945 - RNA, 32 nt, Human
aggccgggccuccucaagucggccucucagac

SEQ ID NO: 56946 - RNA, 27 nt, Human
aggccgggcgcagccgccacccggggg

SEQ ID NO: 56947 - RNA, 23 nt, Human
aggccgggcgccugcccagcagg

SEQ ID NO: 56948 - RNA, 21 nt, Human
aggccgggcgcgguggcucau

SEQ ID NO: 56949 - RNA, 19 nt, Human
aggccgggcgggugacuca

SEQ ID NO: 56950 - RNA, 32 nt, Human
aggccgggcugagacguggccaggggaacacg

SEQ ID NO: 56951 - RNA, 32 nt, Human
aggccggggaaggagcccucccucucucccuu

SEQ ID NO: 56952 - RNA, 32 nt, Human
aggccggggaucuccaggucccaggcugggcg

SEQ ID NO: 56953 - RNA, 32 nt, Human
aggccggggccaggcucugggucaaggcagga

SEQ ID NO: 56954 - RNA, 32 nt, Human
aggccggggccauggagaaagcgcggccgcug

SEQ ID NO: 56955 - RNA, 19 nt, Human
aggccggggcucccaggaa

SEQ ID NO: 56956 - RNA, 32 nt, Human
aggccggguaccugggcugggauccggagcaa

SEQ ID NO: 56957 - RNA, 32 nt, Human
aggccgggucacaacucacugcagccuggacc

SEQ ID NO: 56958 - RNA, 21 nt, Human
aggccgggugcgguggcucau

SEQ ID NO: 56959 - RNA, 25 nt, Human
aggccgggugggccgggucaggaga

SEQ ID NO: 56960 - RNA, 23 nt, Human
aggccggucucaaacuccugacc

SEQ ID NO: 56961 - RNA, 32 nt, Human
aggccggucucaaacuccugaccucaggugau

SEQ ID NO: 56962 - RNA, 32 nt, Human
aggccggucucgaacuccuggccuuaagccac

SEQ ID NO: 56963 - RNA, 32 nt, Human
aggccggucuugaacuccuggacucaagcaau

SEQ ID NO: 56964 - RNA, 32 nt, Human
aggccggucuugaacuccugggcucaagugau

SEQ ID NO: 56965 - RNA, 24 nt, Human
aggccggugauucacaaggucagg

SEQ ID NO: 56966 - RNA, 32 nt, Human
aggccggugguggauuuccuccccgcaucuca

SEQ ID NO: 56967 - RNA, 32 nt, Human
aggccgguucuccgccgcucaggcugggagag

SEQ ID NO: 56968 - RNA, 32 nt, Human
aggccguacacaccucuguuaggaggcaaauu

SEQ ID NO: 56969 - RNA, 32 nt, Human
aggccgucccaccaggaaaucucucuauuccg

SEQ ID NO: 56970 - RNA, 32 nt, Human
aggccgucucccaaggagcagagcagagcaga

SEQ ID NO: 56971 - RNA, 32 nt, Human
aggccgugcuuaacaggaaaggaccuaccaaa

SEQ ID NO: 56972 - RNA, 32 nt, Human
aggccguggaggaagccaggaggaggguggcu

SEQ ID NO: 56973 - RNA, 18 nt, Human
aggccguggaggaugcua

SEQ ID NO: 56974 - RNA, 32 nt, Human
aggccgugugcuggcccugccccagccuagcu

SEQ ID NO: 56975 - RNA, 32 nt, Human
aggccguucagcugugacgaaggccugaagca

SEQ ID NO: 56976 - RNA, 32 nt, Human
aggccguuguccugcucugaccacagaguuuu

SEQ ID NO: 56977 - RNA, 32 nt, Human
aggccuaaaauuaugugguuuaaacaaaauua

SEQ ID NO: 56978 - RNA, 32 nt, Human
aggccuaaaccugagacuuccucugcaguuga

SEQ ID NO: 56979 - RNA, 32 nt, Human
aggccuaaaugagaggcauucugacugguugg

SEQ ID NO: 56980 - RNA, 32 nt, Human
aggccuaaccaccucccugcagucucuuauau

SEQ ID NO: 56981 - RNA, 32 nt, Human
aggccuaagcugccucccagguucuuagggcc

SEQ ID NO: 56982 - RNA, 24 nt, Human
aggccuaaucauguugugauucuc

SEQ ID NO: 56983 - RNA, 32 nt, Human
aggccuacaaaaccacaugggaguuucuuuau

SEQ ID NO: 56984 - RNA, 32 nt, Human
aggccuacacagacaaaucaggagggaacaga

SEQ ID NO: 56985 - RNA, 32 nt, Human
aggccuacagccgccggcaccggccgcgggga

SEQ ID NO: 56986 - RNA, 32 nt, Human
aggccuacagcggggaaaggacuugccagauu

SEQ ID NO: 56987 - RNA, 32 nt, Human
aggccuaccaccuguccugccugggccuuggc

SEQ ID NO: 56988 - RNA, 32 nt, Human
aggccuacccagggaggaugcagagagcuggu

SEQ ID NO: 56989 - RNA, 32 nt, Human
aggccuacccuugaggggaaugucacgugcaa

SEQ ID NO: 56990 - RNA, 32 nt, Human
aggccuacugaagggacuuaacauacucuuaa

SEQ ID NO: 56991 - RNA, 32 nt, Human
aggccuacuguugcacauggggccaaaaccag

SEQ ID NO: 56992 - RNA, 32 nt, Human
aggccuagacaggcaaggggauggagagggcu

SEQ ID NO: 56993 - RNA, 32 nt, Human
aggccuagcacaauagagacccugucaaugga

SEQ ID NO: 56994 - RNA, 32 nt, Human
aggccuagugccagguucccuggcguugguga

SEQ ID NO: 56995 - RNA, 32 nt, Human
aggccuaugaauuuaauguggaaaaauaaaaa

SEQ ID NO: 56996 - RNA, 32 nt, Human
aggccuauuaacaucauacauugucauuaguc

SEQ ID NO: 56997 - RNA, 32 nt, Human
aggccucaaaggugccuggugauaguaggcac

SEQ ID NO: 56998 - RNA, 32 nt, Human
aggccucaaccccuuucucccacccagcccca

SEQ ID NO: 56999 - RNA, 25 nt, Human
aggccucacacaggccucagaaaug

SEQ ID NO: 57000 - RNA, 32 nt, Human
aggccucacagaaacagagaucccaucuugga

SEQ ID NO: 57001 - RNA, 31 nt, Human
aggccucacagcuggcauauggaggcuguua

SEQ ID NO: 57002 - RNA, 32 nt, Human
aggccucacugcaccuuuccguguggagccca

SEQ ID NO: 57003 - RNA, 32 nt, Human
aggccucagacagcagcacgaggcaggcacuu

SEQ ID NO: 57004 - RNA, 19 nt, Human
aggccucagagagagccca

SEQ ID NO: 57005 - RNA, 32 nt, Human
aggccucagagcuguguggcagggcccccugc

SEQ ID NO: 57006 - RNA, 20 nt, Human
aggccucagauucagcagug

SEQ ID NO: 57007 - RNA, 32 nt, Human
aggccucagcaggcaggagcaucucugccucc

SEQ ID NO: 57008 - RNA, 25 nt, Human
aggccucagcgguggccguccgaga

SEQ ID NO: 57009 - RNA, 32 nt, Human
aggccucaggaaggcaaagccgggugaagcug

SEQ ID NO: 57010 - RNA, 32 nt, Human
aggccucaggcucuuaccuccuuggggcagug

SEQ ID NO: 57011 - RNA, 32 nt, Human
aggccucagggugucugggauugcuggggagg

SEQ ID NO: 57012 - RNA, 32 nt, Human
aggccucagguagaauggaagcuguucugcau

SEQ ID NO: 57013 - RNA, 32 nt, Human
aggccucagugaggcaucuaccaccuucuaca

SEQ ID NO: 57014 - RNA, 32 nt, Human
aggccucaguuuaaucaccuauccaaugagga

SEQ ID NO: 57015 - RNA, 32 nt, Human
aggccucauaacuacccugcugguaaacugca

SEQ ID NO: 57016 - RNA, 32 nt, Human
aggccucauuuccuuccucugccaccaucccu

SEQ ID NO: 57017 - RNA, 32 nt, Human
aggccuccaacauuucucuaguagccacugcu

SEQ ID NO: 57018 - RNA, 32 nt, Human
aggccuccaagucccuaagcgguuccaguuug

SEQ ID NO: 57019 - RNA, 32 nt, Human
aggccuccacccagugcugggaggugucccgc

SEQ ID NO: 57020 - RNA, 21 nt, Human
aggccuccaccugccauggag

SEQ ID NO: 57021 - RNA, 32 nt, Human
aggccuccacuccuuccaucucuuccuucaga

SEQ ID NO: 57022 - RNA, 32 nt, Human
aggccuccacugcaccuucuuagggaagggca

SEQ ID NO: 57023 - RNA, 20 nt, Human
aggccuccagcucagcagug

SEQ ID NO: 57024 - RNA, 32 nt, Human
aggccucccaggaggagagcaaggaccuggca

SEQ ID NO: 57025 - RNA, 32 nt, Human
aggccucccaugcagaggucagugagagccca

SEQ ID NO: 57026 - RNA, 32 nt, Human
aggccucccccuuccuccucgccauccuacuc

SEQ ID NO: 57027 - RNA, 32 nt, Human
aggccucccugucacuccuccuggggaccuca

SEQ ID NO: 57028 - RNA, 32 nt, Human
aggccuccgagccucaguuuccucguuugcaa

SEQ ID NO: 57029 - RNA, 19 nt, Human
aggccuccgcccuccuccc

SEQ ID NO: 57030 - RNA, 32 nt, Human
aggccuccuccaccuccaccuccaccccgccu

SEQ ID NO: 57031 - RNA, 32 nt, Human
aggccuccuccacgccuggcuccccaggacgc

SEQ ID NO: 57032 - RNA, 32 nt, Human
aggccuccuccaucauccuccauguagcgccu

SEQ ID NO: 57033 - RNA, 19 nt, Human
aggccuccucccuccuccc

SEQ ID NO: 57034 - RNA, 32 nt, Human
aggccuccucccucugaccacagggucaugcc

SEQ ID NO: 57035 - RNA, 32 nt, Human
aggccuccugacuuuucucacugccuucguua

SEQ ID NO: 57036 - RNA, 32 nt, Human
aggccuccugggaaagggagaauggcaaagac

SEQ ID NO: 57037 - RNA, 32 nt, Human
aggccuccuguggcuguuggguuccagaugcu

SEQ ID NO: 57038 - RNA, 22 nt, Human
aggccuccuugaccuucagcaa

SEQ ID NO: 57039 - RNA, 32 nt, Human
aggccucgacuuugcuggcacagggucccagg

SEQ ID NO: 57040 - RNA, 32 nt, Human
aggccucgcacuugcagaggagcccagugggc

SEQ ID NO: 57041 - RNA, 32 nt, Human
aggccucgcuagggaauugaguacagucaucu

SEQ ID NO: 57042 - RNA, 32 nt, Human
aggccucggcccccguccgcccucucucccug

SEQ ID NO: 57043 - RNA, 32 nt, Human
aggccucggugugagccagggcugcuucaaac

SEQ ID NO: 57044 - RNA, 32 nt, Human
aggccucuaaaaugcugggauuacaggcguga

SEQ ID NO: 57045 - RNA, 32 nt, Human
aggccucuagaggacagauggccaggccugug

SEQ ID NO: 57046 - RNA, 32 nt, Human
aggccucucaauccucccuccaugaucuucgc

SEQ ID NO: 57047 - RNA, 32 nt, Human
aggccucucaccucugugccucugucuccuug

SEQ ID NO: 57048 - RNA, 32 nt, Human
aggccucuccagcccuccucuggccacccaaa

SEQ ID NO: 57049 - RNA, 32 nt, Human
aggccucucccuccuccaggaagccuuccccu

SEQ ID NO: 57050 - RNA, 32 nt, Human
aggccucuccuccaaccucccacuccuucuca

SEQ ID NO: 57051 - RNA, 32 nt, Human
aggccucuccuccccucugcccccggcucuua

SEQ ID NO: 57052 - RNA, 28 nt, Human
aggccucucgcugccucauccucugaca

SEQ ID NO: 57053 - RNA, 32 nt, Human
aggccucucucucgcucucucucccucuaauc

SEQ ID NO: 57054 - RNA, 32 nt, Human
aggccucugaccccaucucccccuagcuccuc

SEQ ID NO: 57055 - RNA, 32 nt, Human
aggccucugccucugggccuuugcuuuguggc

SEQ ID NO: 57056 - RNA, 32 nt, Human
aggccucugcuccacccuccauuccuccuccc

SEQ ID NO: 57057 - RNA, 32 nt, Human
aggccucugcuccugcuccugccugcauguuc

SEQ ID NO: 57058 - RNA, 32 nt, Human
aggccucugcuccuugucuuucuuaccuguaa

SEQ ID NO: 57059 - RNA, 32 nt, Human
aggccucugcucucacugucccucucugucug

SEQ ID NO: 57060 - RNA, 32 nt, Human
aggccucugcucugccuccugaggcagguuuu

SEQ ID NO: 57061 - RNA, 32 nt, Human
aggccucugggguccagccugggagcccagac

SEQ ID NO: 57062 - RNA, 32 nt, Human
aggccucugugccaaucccagcacuccuuucc

SEQ ID NO: 57063 - RNA, 32 nt, Human
aggccucuguggccuccacuccgggaaagccc

SEQ ID NO: 57064 - RNA, 32 nt, Human
aggccucuucccuuccccaacacccucccauc

SEQ ID NO: 57065 - RNA, 32 nt, Human
aggccucuuuacaaggcccagcuccuugacaa

SEQ ID NO: 57066 - RNA, 32 nt, Human
aggccucuuugcucuccccucuugccucagga

SEQ ID NO: 57067 - RNA, 32 nt, Human
aggccugaaagcuagugaugaagaacuaaaug

SEQ ID NO: 57068 - RNA, 21 nt, Human
aggccugaaaggccauuacua

SEQ ID NO: 57069 - RNA, 32 nt, Human
aggccugaauauuuggacaagauggcagauuc

SEQ ID NO: 57070 - RNA, 32 nt, Human
aggccugacaaacauggagaaaugucaucccu

SEQ ID NO: 57071 - RNA, 32 nt, Human
aggccugaccuccagagcccagcguucaguua

SEQ ID NO: 57072 - RNA, 32 nt, Human
aggccugaccugugccucaucccgugccgcuc

SEQ ID NO: 57073 - RNA, 31 nt, Human
aggccugacuucucugggcugaggcuggucg

SEQ ID NO: 57074 - RNA, 32 nt, Human
aggccugagaagggguugcagcuguucugggc

SEQ ID NO: 57075 - RNA, 22 nt, Human
aggccugagccaccgcgcccgg

SEQ ID NO: 57076 - RNA, 22 nt, Human
aggccugagccaccgcguccgg

SEQ ID NO: 57077 - RNA, 32 nt, Human
aggccugagcugccccucccacugccuuuccu

SEQ ID NO: 57078 - RNA, 32 nt, Human
aggccugaggagcccuccuggagcucaggagg

SEQ ID NO: 57079 - RNA, 32 nt, Human
aggccugaggagggaauggaagguggaguuuc

SEQ ID NO: 57080 - RNA, 32 nt, Human
aggccugaggcaggcuguggccaggcucaggc

SEQ ID NO: 57081 - RNA, 32 nt, Human
aggccugagggagggaggcgcauggaagccgc

SEQ ID NO: 57082 - RNA, 27 nt, Human
aggccugaggugugugccacucagaga

SEQ ID NO: 57083 - RNA, 21 nt, Human
aggccugaguagcuccccucc

SEQ ID NO: 57084 - RNA, 32 nt, Human
aggccugagucaugauuggcucuggugugcuu

SEQ ID NO: 57085 - RNA, 32 nt, Human
aggccugaguuagcuguuuacugacauggugc

SEQ ID NO: 57086 - RNA, 32 nt, Human
aggccugaugaagccuaucugcagagguuggc

SEQ ID NO: 57087 - RNA, 32 nt, Human
aggccugauggagcuuguggcuggccucagau

SEQ ID NO: 57088 - RNA, 32 nt, Human
aggccugcacacaagcccacagcacagcuccc

SEQ ID NO: 57089 - RNA, 32 nt, Human
aggccugcacaucgaagguggggugggaccag

SEQ ID NO: 57090 - RNA, 32 nt, Human
aggccugcagauccagccuuccugucaacagc

SEQ ID NO: 57091 - RNA, 32 nt, Human
aggccugcagcaggagcggccaugaagaagcu

SEQ ID NO: 57092 - RNA, 32 nt, Human
aggccugcagcccagcacaggaaggaggggug

SEQ ID NO: 57093 - RNA, 32 nt, Human
aggccugcagggguggagggcagucccucaga

SEQ ID NO: 57094 - RNA, 32 nt, Human
aggccugcauguggagagauaaaacccagaca

SEQ ID NO: 57095 - RNA, 32 nt, Human
aggccugccacuggucauggguagcuagagcu

SEQ ID NO: 57096 - RNA, 22 nt, Human
aggccugcccacaacaccccag

SEQ ID NO: 57097 - RNA, 32 nt, Human
aggccugcccacuaaggaggaggagucauugc

SEQ ID NO: 57098 - RNA, 32 nt, Human
aggccugccccagcuacgccacgugcccagug

SEQ ID NO: 57099 - RNA, 22 nt, Human
aggccugccccucuccagccag

SEQ ID NO: 57100 - RNA, 32 nt, Human
aggccugcccggagccccagccccaggggacc

SEQ ID NO: 57101 - RNA, 32 nt, Human
aggccugcccucacgcucuccaucauaggcug

SEQ ID NO: 57102 - RNA, 24 nt, Human
aggccugcccucggccugguccag

SEQ ID NO: 57103 - RNA, 21 nt, Human
aggccugcccugaaacuccag

SEQ ID NO: 57104 - RNA, 32 nt, Human
aggccugcccuuccuuucucuguuucuauuag

SEQ ID NO: 57105 - RNA, 32 nt, Human
aggccugccugauuugggccacauagaucugg

SEQ ID NO: 57106 - RNA, 32 nt, Human
aggccugccuggggagucgugucccucagcug

SEQ ID NO: 57107 - RNA, 24 nt, Human
aggccugccuuccccucccuccca

SEQ ID NO: 57108 - RNA, 24 nt, Human
aggccugccuuuugccuggcccag

SEQ ID NO: 57109 - RNA, 32 nt, Human
aggccugcguguggcccuggccgugagugugc

SEQ ID NO: 57110 - RNA, 32 nt, Human
aggccugcucacaacugccccucaaguucaac

SEQ ID NO: 57111 - RNA, 32 nt, Human
aggccugcucaccaaucuuucuuucacaccgu

SEQ ID NO: 57112 - RNA, 32 nt, Human
aggccugcuccuggaccucuuuaugauauugu

SEQ ID NO: 57113 - RNA, 32 nt, Human
aggccugcuccuggggcccgugggggcccugu

SEQ ID NO: 57114 - RNA, 32 nt, Human
aggccugcucuaggaaggcagcaugcucagug

SEQ ID NO: 57115 - RNA, 32 nt, Human
aggccugcuggcaucaggucugggcaaguagc

SEQ ID NO: 57116 - RNA, 32 nt, Human
aggccugcugugcaguugccucuaggugacuu

SEQ ID NO: 57117 - RNA, 32 nt, Human
aggccugcuugacuuuccagaaugaccuugag

SEQ ID NO: 57118 - RNA, 32 nt, Human
aggccugcuuucuuugcuuucucuucucaccu

SEQ ID NO: 57119 - RNA, 32 nt, Human
aggccuggaagaggccgcccucgucuugucuc

SEQ ID NO: 57120 - RNA, 32 nt, Human
aggccuggaauccugcagcccuccccaaaaac

SEQ ID NO: 57121 - RNA, 23 nt, Human
aggccuggacacugguucaacac

SEQ ID NO: 57122 - RNA, 18 nt, Human
aggccuggacucuccuca

SEQ ID NO: 57123 - RNA, 32 nt, Human
aggccuggagagugccugucugggaaaagguc

SEQ ID NO: 57124 - RNA, 32 nt, Human
aggccuggagcuuggggugaggaagagggagg

SEQ ID NO: 57125 - RNA, 32 nt, Human
aggccuggaggaggggaacgagaggcuagagg

SEQ ID NO: 57126 - RNA, 32 nt, Human
aggccuggagucggcccccaaaaguuucacau

SEQ ID NO: 57127 - RNA, 32 nt, Human
aggccuggauucuuuugaguggugcuacugcc

SEQ ID NO: 57128 - RNA, 17 nt, Human
aggccuggcaccuacuc

SEQ ID NO: 57129 - RNA, 32 nt, Human
aggccuggcagagagcguccccgcggucgcgg

SEQ ID NO: 57130 - RNA, 32 nt, Human
aggccuggcaggcagaagcagcuguggucccu

SEQ ID NO: 57131 - RNA, 32 nt, Human
aggccuggcaggcaggcuuggcaugguuggcc

SEQ ID NO: 57132 - RNA, 32 nt, Human
aggccuggcccagccuggcccagaucuucuca

SEQ ID NO: 57133 - RNA, 32 nt, Human
aggccuggcuccuuauucacacccugcuucua

SEQ ID NO: 57134 - RNA, 32 nt, Human
aggccuggcuuccucucuugggagaccccuuc

SEQ ID NO: 57135 - RNA, 32 nt, Human
aggccugggaaccuggcugcagccugggaagg

SEQ ID NO: 57136 - RNA, 21 nt, Human
aggccugggacuuuccaacac

SEQ ID NO: 57137 - RNA, 32 nt, Human
aggccugggaggaaagugggcgcagagcccuc

SEQ ID NO: 57138 - RNA, 32 nt, Human
aggccugggcaaaugcagcccugggucuuugg

SEQ ID NO: 57139 - RNA, 32 nt, Human
aggccugggcaggguuccgggugggagcucag

SEQ ID NO: 57140 - RNA, 32 nt, Human
aggccugggccagcugccacggaggggguccg

SEQ ID NO: 57141 - RNA, 20 nt, Human
aggccugggcccccucaggg

SEQ ID NO: 57142 - RNA, 32 nt, Human
aggccugggccgaccucacaccucagcccuug

SEQ ID NO: 57143 - RNA, 32 nt, Human
aggccugggcugggcacacuccaccuucccua

SEQ ID NO: 57144 - RNA, 32 nt, Human
aggccuggggaccucagagaacucugccuugc

SEQ ID NO: 57145 - RNA, 32 nt, Human
aggccuggggagccuguccuuccaugcccuug

SEQ ID NO: 57146 - RNA, 32 nt, Human
aggccuggggcacugcuuucugcuacaccucu

SEQ ID NO: 57147 - RNA, 32 nt, Human
aggccuggggcucaggugaguccucacaggcg

SEQ ID NO: 57148 - RNA, 32 nt, Human
aggccugggggcagggagaggagugacugagc

SEQ ID NO: 57149 - RNA, 32 nt, Human
aggccugggggucgcuuccagcugccagaucc

SEQ ID NO: 57150 - RNA, 32 nt, Human
aggccuggggugaaaugagaaaggcccagaac

SEQ ID NO: 57151 - RNA, 31 nt, Human
aggccugggguggaaaggcaggggagggagg

SEQ ID NO: 57152 - RNA, 32 nt, Human
aggccuggguagggacagggugguggucccug

SEQ ID NO: 57153 - RNA, 22 nt, Human
aggccuggguccugcccuccca

SEQ ID NO: 57154 - RNA, 32 nt, Human
aggccugggucuggagccguccuggccuuccc

SEQ ID NO: 57155 - RNA, 22 nt, Human
aggccuggucuccacccuccca

SEQ ID NO: 57156 - RNA, 32 nt, Human
aggccugguggagggggaggggagaagccaag

SEQ ID NO: 57157 - RNA, 32 nt, Human
aggccugguguguucaagaccagccuggucaa

SEQ ID NO: 57158 - RNA, 32 nt, Human
aggccugguuccugguuaauaagcucucagua

SEQ ID NO: 57159 - RNA, 32 nt, Human
aggccuguaaucccagcacuuuccaaggcagg

SEQ ID NO: 57160 - RNA, 22 nt, Human
aggccugucccuccagcagugg

SEQ ID NO: 57161 - RNA, 32 nt, Human
aggccugucucucaccaacaagccaacugcuc

SEQ ID NO: 57162 - RNA, 32 nt, Human
aggccugucuuaagaggacuugugcuuccagg

SEQ ID NO: 57163 - RNA, 32 nt, Human
aggccugucuuccaccccuccugacccguaua

SEQ ID NO: 57164 - RNA, 32 nt, Human
aggccugugaagccacgggcugggucauaagg

SEQ ID NO: 57165 - RNA, 21 nt, Human
aggccugugccacccgcugcc

SEQ ID NO: 57166 - RNA, 20 nt, Human
aggccugugccacuggugcc

SEQ ID NO: 57167 - RNA, 32 nt, Human
aggccugugccacuggugccagccuggaugca

SEQ ID NO: 57168 - RNA, 32 nt, Human
aggccugugcugcugccccacgcucaaacugu

SEQ ID NO: 57169 - RNA, 23 nt, Human
aggccuguggcucucagcagugg

SEQ ID NO: 57170 - RNA, 21 nt, Human
aggccugugggagcuucugcc

SEQ ID NO: 57171 - RNA, 32 nt, Human
aggccuguggguggaaggucucuggccuugga

SEQ ID NO: 57172 - RNA, 32 nt, Human
aggccuguggucccaggaaaaggucugggggu

SEQ ID NO: 57173 - RNA, 32 nt, Human
aggccuguggucccaggagaaggucugggggu

SEQ ID NO: 57174 - RNA, 32 nt, Human
aggccuguggugugacuucugccccgaaguuc

SEQ ID NO: 57175 - RNA, 18 nt, Human
aggccuguguccuaccca

SEQ ID NO: 57176 - RNA, 32 nt, Human
aggccugugugauucccggucugcaccacaug

SEQ ID NO: 57177 - RNA, 32 nt, Human
aggccuguugaagggcccuccuguagguuuca

SEQ ID NO: 57178 - RNA, 32 nt, Human
aggccuuacaucuggcuggaaagcagagccuc

SEQ ID NO: 57179 - RNA, 32 nt, Human
aggccuucaaggggucuuuccaugacugaguc

SEQ ID NO: 57180 - RNA, 32 nt, Human
aggccuucaaguccuuuccaccucucacccau

SEQ ID NO: 57181 - RNA, 32 nt, Human
aggccuucacagugucacccacauucaccucu

SEQ ID NO: 57182 - RNA, 32 nt, Human
aggccuucacccagacuuuaccgcggaggcgg

SEQ ID NO: 57183 - RNA, 32 nt, Human
aggccuucacugaucccagccaccccagaaaa

SEQ ID NO: 57184 - RNA, 32 nt, Human
aggccuucacugcagccccaucuccuccuccu

SEQ ID NO: 57185 - RNA, 32 nt, Human
aggccuucagacuuggacugugucacacugcc

SEQ ID NO: 57186 - RNA, 32 nt, Human
aggccuucagggccagugucuccaugcagauc

SEQ ID NO: 57187 - RNA, 32 nt, Human
aggccuuccaaggggguuucagucuggacuua

SEQ ID NO: 57188 - RNA, 32 nt, Human
aggccuuccacgcagaaugacaagacugcaaa

SEQ ID NO: 57189 - RNA, 32 nt, Human
aggccuuccuaaguuuuuguuaguugugucuu

SEQ ID NO: 57190 - RNA, 20 nt, Human
aggccuuccuuccucagcuc

SEQ ID NO: 57191 - RNA, 17 nt, Human
aggccuucuaggugaga

SEQ ID NO: 57192 - RNA, 32 nt, Human
aggccuucucucugccuaccagcccucaccag

SEQ ID NO: 57193 - RNA, 32 nt, Human
aggccuugaacucugucgguugugcugacucc

SEQ ID NO: 57194 - RNA, 32 nt, Human
aggccuugaagaacuccgauauuuauguuugg

SEQ ID NO: 57195 - RNA, 32 nt, Human
aggccuugagcagcgggcugagcaggcggcag

SEQ ID NO: 57196 - RNA, 32 nt, Human
aggccuugagggaaguagaggcugggagcaaa

SEQ ID NO: 57197 - RNA, 22 nt, Human
aggccuugccccugcccuccca

SEQ ID NO: 57198 - RNA, 21 nt, Human
aggccuugcggcuccucaggg

SEQ ID NO: 57199 - RNA, 32 nt, Human
aggccuuggaaccugagcugccaaugccagcc

SEQ ID NO: 57200 - RNA, 26 nt, Human
aggccuuggacggaguccaggccaga

SEQ ID NO: 57201 - RNA, 32 nt, Human
aggccuuggauucucauaagaagcacgcaacc

SEQ ID NO: 57202 - RNA, 32 nt, Human
aggccuuggcauccugagcuucggucugucca

SEQ ID NO: 57203 - RNA, 32 nt, Human
aggccuugggaccuggggguuggugauuuggg

SEQ ID NO: 57204 - RNA, 32 nt, Human
aggccuugggcuguggaccuggggguuggaag

SEQ ID NO: 57205 - RNA, 32 nt, Human
aggccuuggggcuccgagucccuuccucuccc

SEQ ID NO: 57206 - RNA, 32 nt, Human
aggccuuggugacuuccuggggccaagaaacu

SEQ ID NO: 57207 - RNA, 32 nt, Human
aggccuuguacggggagggcccaggggcagga

SEQ ID NO: 57208 - RNA, 32 nt, Human
aggccuugugagaacugaaaggucucuuucau

SEQ ID NO: 57209 - RNA, 24 nt, Human
aggccuuuagcauaauacuguaaa

SEQ ID NO: 57210 - RNA, 32 nt, Human
aggccuuuagugugcucaacucaggccuuaaa

SEQ ID NO: 57211 - RNA, 32 nt, Human
aggccuuucgcuuccuccucagguuuuccagg

SEQ ID NO: 57212 - RNA, 32 nt, Human
aggccuuucugaaggaguuauucugcuaaaaa

SEQ ID NO: 57213 - RNA, 32 nt, Human
aggccuuugagcauauggguccagccacucag

SEQ ID NO: 57214 - RNA, 32 nt, Human
aggccuuuucccucgcccaugugggucagugg

SEQ ID NO: 57215 - RNA, 32 nt, Human
aggccuuuuugguauuucaggagggguugcua

SEQ ID NO: 57216 - RNA, 32 nt, Human
aggcgaagaggaagggcaagguggcucccucc

SEQ ID NO: 57217 - RNA, 32 nt, Human
aggcgaagccgcggcuccccagcccuuugcug

SEQ ID NO: 57218 - RNA, 32 nt, Human
aggcgaagcugcagaugccauuccagagcggg

SEQ ID NO: 57219 - RNA, 32 nt, Human
aggcgaaggaagggagguggcuccugggucau

SEQ ID NO: 57220 - RNA, 32 nt, Human
aggcgaaggugaccggggaccgagcauuucag

SEQ ID NO: 57221 - RNA, 32 nt, Human
aggcgaaucuggcuuugggggaagaggaagaa

SEQ ID NO: 57222 - RNA, 32 nt, Human
aggcgaauuggcugcccggggugcaggaggga

SEQ ID NO: 57223 - RNA, 32 nt, Human
aggcgacaggagaccguugcuccagugcaugu

SEQ ID NO: 57224 - RNA, 32 nt, Human
aggcgacagggagggucagagggaggccggcu

SEQ ID NO: 57225 - RNA, 19 nt, Human
aggcgacgcuaaaccaaga

SEQ ID NO: 57226 - RNA, 32 nt, Human
aggcgacggaggaggaagaagcagguuggucc

SEQ ID NO: 57227 - RNA, 23 nt, Human
aggcgacuagggcaccauacuca

SEQ ID NO: 57228 - RNA, 32 nt, Human
aggcgacucacacaccacaccugauuccuguu

SEQ ID NO: 57229 - RNA, 32 nt, Human
aggcgacugcugggccuccugccuggccgccc

SEQ ID NO: 57230 - RNA, 29 nt, Human
aggcgacuguagucccagcuacucaggag

SEQ ID NO: 57231 - RNA, 32 nt, Human
aggcgacuuugguggagguaguucuuuggcag

SEQ ID NO: 57232 - RNA, 32 nt, Human
aggcgagacacaaaaaggccugggacaggguc

SEQ ID NO: 57233 - RNA, 24 nt, Human
aggcgagagccacugcauccagug

SEQ ID NO: 57234 - RNA, 32 nt, Human
aggcgagaggaggaggaggaggaggagaaggc

SEQ ID NO: 57235 - RNA, 32 nt, Human
aggcgagaggggucaggagaggcgggagcaau

SEQ ID NO: 57236 - RNA, 32 nt, Human
aggcgagcacccgggagccagcgggaccuggg

SEQ ID NO: 57237 - RNA, 32 nt, Human
aggcgagcagaacucccccuggggaggaagcu

SEQ ID NO: 57238 - RNA, 26 nt, Human
aggcgagcagaucaccgaaggucagg

SEQ ID NO: 57239 - RNA, 24 nt, Human
aggcgagcagaucacgaggucagg

SEQ ID NO: 57240 - RNA, 32 nt, Human
aggcgagcagcuccuggcugggcugggcagac

SEQ ID NO: 57241 - RNA, 32 nt, Human
aggcgagcagcucugcaguuaaugcacguauu

SEQ ID NO: 57242 - RNA, 32 nt, Human
aggcgagcccaggacucgugcugcacgccggg

SEQ ID NO: 57243 - RNA, 19 nt, Human
aggcgagcccuccccagca

SEQ ID NO: 57244 - RNA, 32 nt, Human
aggcgagccgagccgagcgagcgcggcggugg

SEQ ID NO: 57245 - RNA, 32 nt, Human
aggcgagccugugacagagcgagacccugucu

SEQ ID NO: 57246 - RNA, 32 nt, Human
aggcgagcgagcccagccagcccagccagccc

SEQ ID NO: 57247 - RNA, 23 nt, Human
aggcgagcggaucaugaggucag

SEQ ID NO: 57248 - RNA, 32 nt, Human
aggcgaggaaacugaggcucggcugguggcgc

SEQ ID NO: 57249 - RNA, 32 nt, Human
aggcgaggaaggagggagugugugagaggagg

SEQ ID NO: 57250 - RNA, 32 nt, Human
aggcgaggaggaagauggcgggacggcugccg

SEQ ID NO: 57251 - RNA, 32 nt, Human
aggcgaggcagguagaucaugaggucaggaga

SEQ ID NO: 57252 - RNA, 32 nt, Human
aggcgaggcccaggccgcggccgacaugaacc

SEQ ID NO: 57253 - RNA, 32 nt, Human
aggcgaggcugagcgaaagaaggaaggacaga

SEQ ID NO: 57254 - RNA, 32 nt, Human
aggcgaggcugcagccagagggcugggaaggg

SEQ ID NO: 57255 - RNA, 32 nt, Human
aggcgagggaaaggacccuuuucucugaguaa

SEQ ID NO: 57256 - RNA, 32 nt, Human
aggcgagggcaagaagccugguggcgggucaa

SEQ ID NO: 57257 - RNA, 32 nt, Human
aggcgaggucgauggaacuggccacgcacagg

SEQ ID NO: 57258 - RNA, 32 nt, Human
aggcgagucagccuaggaggaggcagggcucc

SEQ ID NO: 57259 - RNA, 32 nt, Human
aggcgagucagggugccacaagagauagguuc

SEQ ID NO: 57260 - RNA, 26 nt, Human
aggcgagugaaucacuugaggucagg

SEQ ID NO: 57261 - RNA, 24 nt, Human
aggcgaguggaucacgaggucagg

SEQ ID NO: 57262 - RNA, 26 nt, Human
aggcgaguggaucacuugaggucagg

SEQ ID NO: 57263 - RNA, 26 nt, Human
aggcgaguggauuuccuaaggucagg

SEQ ID NO: 57264 - RNA, 32 nt, Human
aggcgaguggugcugaggugcucuguggugau

SEQ ID NO: 57265 - RNA, 32 nt, Human
aggcgaguugcauuucugaaagcccgggaaga

SEQ ID NO: 57266 - RNA, 19 nt, Human
aggcgaucagugggccagg

SEQ ID NO: 57267 - RNA, 19 nt, Human
aggcgaugaaccucggggg

SEQ ID NO: 57268 - RNA, 32 nt, Human
aggcgaugcccuuugugcuguaugacuggagg

SEQ ID NO: 57269 - RNA, 32 nt, Human
aggcgaugcugaugcugccaguccaggaacca

SEQ ID NO: 57270 - RNA, 32 nt, Human
aggcgauggccaccccagaggccaccuuuugc

SEQ ID NO: 57271 - RNA, 32 nt, Human
aggcgauguacaaaugaaagcgcgcuuucuaa

SEQ ID NO: 57272 - RNA, 32 nt, Human
aggcgauguggaccacgggauuuguagccagc

SEQ ID NO: 57273 - RNA, 32 nt, Human
aggcgcaaacuggaggcccucacagcccacua

SEQ ID NO: 57274 - RNA, 32 nt, Human
aggcgcaggaagcagaagcgcagagcgaggac

SEQ ID NO: 57275 - RNA, 32 nt, Human
aggcgcaggagcagugucgggccugggccggg

SEQ ID NO: 57276 - RNA, 32 nt, Human
aggcgcaggauccacggaagucaaagucaagc

SEQ ID NO: 57277 - RNA, 32 nt, Human
aggcgcaggcagcuggggguguguggggaaga

SEQ ID NO: 57278 - RNA, 32 nt, Human
aggcgcaggccgcggcggcgggggcgggcgug

SEQ ID NO: 57279 - RNA, 32 nt, Human
aggcgcauccugcagcccaugcuugaugccag

SEQ ID NO: 57280 - RNA, 32 nt, Human
aggcgcauucgcccuuccuaguuugcagcaau

SEQ ID NO: 57281 - RNA, 32 nt, Human
aggcgccaccacugaugccacccaggaccucg

SEQ ID NO: 57282 - RNA, 18 nt, Human
aggcgccacuguugagaa

SEQ ID NO: 57283 - RNA, 21 nt, Human
aggcgccagccccucccuccc

SEQ ID NO: 57284 - RNA, 32 nt, Human
aggcgccaguagucccagcuacuugggaggcc

SEQ ID NO: 57285 - RNA, 32 nt, Human
aggcgccauggacuggaagacacuccaggccc

SEQ ID NO: 57286 - RNA, 32 nt, Human
aggcgcccagcccuggcucuuccaugcucugc

SEQ ID NO: 57287 - RNA, 32 nt, Human
aggcgccccaagacggacaguguacauaagag

SEQ ID NO: 57288 - RNA, 32 nt, Human
aggcgcccccacacccgggcccggcuaagcgc

SEQ ID NO: 57289 - RNA, 32 nt, Human
aggcgcccugcucuucccacugcugucccugg

SEQ ID NO: 57290 - RNA, 32 nt, Human
aggcgccgaggaggaagagcgagcccggacgg

SEQ ID NO: 57291 - RNA, 20 nt, Human
aggcgccggagaaccagggg

SEQ ID NO: 57292 - RNA, 32 nt, Human
aggcgccggcagugaccaggagcaaugugcag

SEQ ID NO: 57293 - RNA, 32 nt, Human
aggcgccuauaaccccagcuauuugggaggcu

SEQ ID NO: 57294 - RNA, 32 nt, Human
aggcgccuauaaucccagcuacucaggaggcu

SEQ ID NO: 57295 - RNA, 32 nt, Human
aggcgccuauaaucccagcuacucaggagucu

SEQ ID NO: 57296 - RNA, 32 nt, Human
aggcgccuauaaucccagcuacuggggaggcu

SEQ ID NO: 57297 - RNA, 32 nt, Human
aggcgccuauagucccagcuacucaggaggcc

SEQ ID NO: 57298 - RNA, 32 nt, Human
aggcgccugaaaucccagcuacucaagaggcu

SEQ ID NO: 57299 - RNA, 32 nt, Human
aggcgccugcaaucacagcuacucaggaggcu

SEQ ID NO: 57300 - RNA, 32 nt, Human
aggcgccugcagccgcacucgccagcgacuca

SEQ ID NO: 57301 - RNA, 32 nt, Human
aggcgccugcucauguugaagugcgcuguuca

SEQ ID NO: 57302 - RNA, 32 nt, Human
aggcgccuguaauccagcuacucgggaggcug

SEQ ID NO: 57303 - RNA, 32 nt, Human
aggcgccuguaaucccagcuaaaggaggcuga

SEQ ID NO: 57304 - RNA, 32 nt, Human
aggcgccuguaaucccagcuacucaggaggcu

SEQ ID NO: 57305 - RNA, 32 nt, Human
aggcgccuguaaucccagcuacucgggaggcc

SEQ ID NO: 57306 - RNA, 32 nt, Human
aggcgccuguaaucccagcuacuggggaggcu

SEQ ID NO: 57307 - RNA, 32 nt, Human
aggcgccuguaaucccagcuacuuggaaggcu

SEQ ID NO: 57308 - RNA, 32 nt, Human
aggcgccuguaaucccagcuacuugggaggcu

SEQ ID NO: 57309 - RNA, 32 nt, Human
aggcgccuguaaucccagcuauuugggaggcu

SEQ ID NO: 57310 - RNA, 32 nt, Human
aggcgccuguaaucccaguuacucaguagcug

SEQ ID NO: 57311 - RNA, 32 nt, Human
aggcgccuguaaucucagcuacuugaaaggcu

SEQ ID NO: 57312 - RNA, 32 nt, Human
aggcgccuguagucccagcuacucaggaggcu

SEQ ID NO: 57313 - RNA, 32 nt, Human
aggcgccuguagucccagcuacucggaggcug

SEQ ID NO: 57314 - RNA, 32 nt, Human
aggcgccuguagucccagcuacucgggaggcu

SEQ ID NO: 57315 - RNA, 32 nt, Human
aggcgccuguagucccagcuacuggggaggcu

SEQ ID NO: 57316 - RNA, 32 nt, Human
aggcgccuguagucccagcuacuugggaggcc

SEQ ID NO: 57317 - RNA, 32 nt, Human
aggcgccuguagucccagcuacuugggaggcu

SEQ ID NO: 57318 - RNA, 32 nt, Human
aggcgccuguagucucagcuacucgggaggcu

SEQ ID NO: 57319 - RNA, 32 nt, Human
aggcgccuguaucccagcuacuugggaggcag

SEQ ID NO: 57320 - RNA, 32 nt, Human
aggcgccuguggucccagcuacucgggaggcu

SEQ ID NO: 57321 - RNA, 32 nt, Human
aggcgccuuugguaacagaagagaagacugug

SEQ ID NO: 57322 - RNA, 32 nt, Human
aggcgcgaccagaucugggugcgcggagagcg

SEQ ID NO: 57323 - RNA, 32 nt, Human
aggcgcgagaggaggggaugggcggggcgcgc

SEQ ID NO: 57324 - RNA, 22 nt, Human
aggcgcgagccacugcguccgg

SEQ ID NO: 57325 - RNA, 32 nt, Human
aggcgcgaggugucuuuauuuaaucugcuccg

SEQ ID NO: 57326 - RNA, 32 nt, Human
aggcgcgcagcggcucaugccuguaaucccag

SEQ ID NO: 57327 - RNA, 32 nt, Human
aggcgcgcaucccuccugacugggacgucgcc

SEQ ID NO: 57328 - RNA, 22 nt, Human
aggcgcgccgacgccugugcca

SEQ ID NO: 57329 - RNA, 32 nt, Human
aggcgcgcucggagggaagccgccaccgcgcc

SEQ ID NO: 57330 - RNA, 32 nt, Human
aggcgcggaaccugcgcugggcugaccuugag

SEQ ID NO: 57331 - RNA, 32 nt, Human
aggcgcggagcgagcuuauuccccgcucccgg

SEQ ID NO: 57332 - RNA, 32 nt, Human
aggcgcggcaggcggcaggucccggccgaagg

SEQ ID NO: 57333 - RNA, 32 nt, Human
aggcgcgggaggcggcagccgcagcgaggagg

SEQ ID NO: 57334 - RNA, 32 nt, Human
aggcgcggugggcuccgggcccaggcaccgag

SEQ ID NO: 57335 - RNA, 32 nt, Human
aggcgcguuccauggcccugcccacccaggca

SEQ ID NO: 57336 - RNA, 32 nt, Human
aggcgcguuccuuccucuuccucucuccucuc

SEQ ID NO: 57337 - RNA, 32 nt, Human
aggcgcuagauuuggugcugggcugauggguc

SEQ ID NO: 57338 - RNA, 31 nt, Human
aggcgcucaauaaauacuuguuuguugaaug

SEQ ID NO: 57339 - RNA, 32 nt, Human
aggcgcuccagccccagagccagcgucuucau

SEQ ID NO: 57340 - RNA, 32 nt, Human
aggcgcuccucccucacgcaggagacucaguu

SEQ ID NO: 57341 - RNA, 20 nt, Human
aggcgcucgccgccucgggg

SEQ ID NO: 57342 - RNA, 32 nt, Human
aggcgcucuccuccuucucugccuguuucccu

SEQ ID NO: 57343 - RNA, 32 nt, Human
aggcgcugcagcugugcuacagacacaagagg

SEQ ID NO: 57344 - RNA, 32 nt, Human
aggcgcuggagcaacagcuccccacacugcac

SEQ ID NO: 57345 - RNA, 31 nt, Human
aggcgcuggccuccugggccuugccguccag

SEQ ID NO: 57346 - RNA, 32 nt, Human
aggcgcugggagaaagaaccggcucccgaguu

SEQ ID NO: 57347 - RNA, 32 nt, Human
aggcgcugggggagggccagcccacaccuagc

SEQ ID NO: 57348 - RNA, 32 nt, Human
aggcgcuguagcuucggggaucccccgaggcu

SEQ ID NO: 57349 - RNA, 32 nt, Human
aggcgcugucauggaggacgccgccgcgccgg

SEQ ID NO: 57350 - RNA, 32 nt, Human
aggcgcugugcuucugugaggugguuuagcuu

SEQ ID NO: 57351 - RNA, 32 nt, Human
aggcgcuuacucuccuccgcucaggcccccaa

SEQ ID NO: 57352 - RNA, 32 nt, Human
aggcgcuucuagguugcuggggcucugcuggu

SEQ ID NO: 57353 - RNA, 32 nt, Human
aggcgcuuguaaucccagcuacuugggaggcu

SEQ ID NO: 57354 - RNA, 32 nt, Human
aggcgcuuguuuuggaccauugcacaaacccg

SEQ ID NO: 57355 - RNA, 19 nt, Human
aggcggaaguugcagugag

SEQ ID NO: 57356 - RNA, 32 nt, Human
aggcggaauugcuuucuucugagccggguggg

SEQ ID NO: 57357 - RNA, 32 nt, Human
aggcggacacugguccagugaggcccagagcc

SEQ ID NO: 57358 - RNA, 26 nt, Human
aggcggacagaccaccugaggucagg

SEQ ID NO: 57359 - RNA, 24 nt, Human
aggcggacagaucacgaggucagg

SEQ ID NO: 57360 - RNA, 32 nt, Human
aggcggaccagccugccucugugaugacugca

SEQ ID NO: 57361 - RNA, 32 nt, Human
aggcggaccaggagaagagcaaagaaaagcag

SEQ ID NO: 57362 - RNA, 32 nt, Human
aggcggaccaguggcccaggagccaugaggac

SEQ ID NO: 57363 - RNA, 32 nt, Human
aggcggaccucacccuucucuucccaggucua

SEQ ID NO: 57364 - RNA, 20 nt, Human
aggcggacgcugucucaggg

SEQ ID NO: 57365 - RNA, 26 nt, Human
aggcggacggaucaccugaggucagg

SEQ ID NO: 57366 - RNA, 24 nt, Human
aggcggacggaucacgaggucagg

SEQ ID NO: 57367 - RNA, 26 nt, Human
aggcggacggaucacuugagguuagg

SEQ ID NO: 57368 - RNA, 32 nt, Human
aggcggacgugaggacagccagcucccccucc

SEQ ID NO: 57369 - RNA, 19 nt, Human
aggcggagauugcagugag

SEQ ID NO: 57370 - RNA, 32 nt, Human
aggcggagcaggaggcagaggagcagauggag

SEQ ID NO: 57371 - RNA, 32 nt, Human
aggcggagcucaacgaccucauguggcgcggg

SEQ ID NO: 57372 - RNA, 19 nt, Human
aggcggagcuugcagggag

SEQ ID NO: 57373 - RNA, 30 nt, Human
aggcggagcuugcaguaagccgagacugag

SEQ ID NO: 57374 - RNA, 18 nt, Human
aggcggagcuugcaguga

SEQ ID NO: 57375 - RNA, 19 nt, Human
aggcggagcuugcagugag

SEQ ID NO: 57376 - RNA, 30 nt, Human
aggcggagcuugcagugagcagagaucacg

SEQ ID NO: 57377 - RNA, 30 nt, Human
aggcggagcuugcagugagcagagauugag

SEQ ID NO: 57378 - RNA, 30 nt, Human
aggcggagcuugcagugagccaagaccgca

SEQ ID NO: 57379 - RNA, 30 nt, Human
aggcggagcuugcagugagccaagauagug

SEQ ID NO: 57380 - RNA, 30 nt, Human
aggcggagcuugcagugagccaagaucaca

SEQ ID NO: 57381 - RNA, 30 nt, Human
aggcggagcuugcagugagccaagaucgca

SEQ ID NO: 57382 - RNA, 30 nt, Human
aggcggagcuugcagugagccaagaucgcg

SEQ ID NO: 57383 - RNA, 30 nt, Human
aggcggagcuugcagugagccaagauuacg

SEQ ID NO: 57384 - RNA, 30 nt, Human
aggcggagcuugcagugagccgagacugug

SEQ ID NO: 57385 - RNA, 30 nt, Human
aggcggagcuugcagugagcggagaucacg

SEQ ID NO: 57386 - RNA, 19 nt, Human
aggcggagcuugcggugag

SEQ ID NO: 57387 - RNA, 19 nt, Human
aggcggagcuuguagugag

SEQ ID NO: 57388 - RNA, 32 nt, Human
aggcggaggaacucccgagcugagaugcggaa

SEQ ID NO: 57389 - RNA, 24 nt, Human
aggcggaggcaggagaaucacuug

SEQ ID NO: 57390 - RNA, 32 nt, Human
aggcggaggcggaggcggagggcgaggggcgg

SEQ ID NO: 57391 - RNA, 32 nt, Human
aggcggaggcggaggcggcgggggcaggagga

SEQ ID NO: 57392 - RNA, 24 nt, Human
aggcggaggcggagguugcaguga

SEQ ID NO: 57393 - RNA, 32 nt, Human
aggcggaggcggagguugcagugagccaagau

SEQ ID NO: 57394 - RNA, 19 nt, Human
aggcggaggcugcagugag

SEQ ID NO: 57395 - RNA, 32 nt, Human
aggcggaggcugcuggugugaggaccaugcug

SEQ ID NO: 57396 - RNA, 19 nt, Human
aggcggagguggcagugag

SEQ ID NO: 57397 - RNA, 18 nt, Human
aggcggagguugcaguaa

SEQ ID NO: 57398 - RNA, 18 nt, Human
aggcggagguugcaguga

SEQ ID NO: 57399 - RNA, 19 nt, Human
aggcggagguugcagugag

SEQ ID NO: 57400 - RNA, 32 nt, Human
aggcggagguugcagugagccacugcacucca

SEQ ID NO: 57401 - RNA, 32 nt, Human
aggcggagguugcagugagccuggaucaugcc

SEQ ID NO: 57402 - RNA, 32 nt, Human
aggcggagguugcagugagcugagauugggcc

SEQ ID NO: 57403 - RNA, 32 nt, Human
aggcggagguugcagugaguugcagucacacc

SEQ ID NO: 57404 - RNA, 19 nt, Human
aggcggagguugcauugag

SEQ ID NO: 57405 - RNA, 19 nt, Human
aggcggagguugcggugag

SEQ ID NO: 57406 - RNA, 19 nt, Human
aggcggagguuguagugag

SEQ ID NO: 57407 - RNA, 32 nt, Human
aggcggagucugaggagcuggggaaggaacaa

SEQ ID NO: 57408 - RNA, 32 nt, Human
aggcggagugggaggagcuggagccaggcccg

SEQ ID NO: 57409 - RNA, 32 nt, Human
aggcggaguuuccaagacuugggugucaucau

SEQ ID NO: 57410 - RNA, 21 nt, Human
aggcggaguuucgccauguug

SEQ ID NO: 57411 - RNA, 19 nt, Human
aggcggaguuugcagugag

SEQ ID NO: 57412 - RNA, 32 nt, Human
aggcggaucgucucucagacuuggguuugcag

SEQ ID NO: 57413 - RNA, 32 nt, Human
aggcggaucugaggggcugggugcaggccccu

SEQ ID NO: 57414 - RNA, 26 nt, Human
aggcggauggaucaccugaggucagg

SEQ ID NO: 57415 - RNA, 26 nt, Human
aggcggauggaucaccugaggucggg

SEQ ID NO: 57416 - RNA, 32 nt, Human
aggcggauuagcuaucuuccaacaaugcugac

SEQ ID NO: 57417 - RNA, 32 nt, Human
aggcggcaaugcucccuccuucccagggucca

SEQ ID NO: 57418 - RNA, 32 nt, Human
aggcggcaccacugccgucauuucagcuucug

SEQ ID NO: 57419 - RNA, 32 nt, Human
aggcggcacgaccacaccaaauaacagcagca

SEQ ID NO: 57420 - RNA, 32 nt, Human
aggcggcacucugguggggcugcuccaggcau

SEQ ID NO: 57421 - RNA, 32 nt, Human
aggcggcagccgcggcggcggcggcugcagcg

SEQ ID NO: 57422 - RNA, 32 nt, Human
aggcggcagcuagccuggccaguggcuguccc

SEQ ID NO: 57423 - RNA, 32 nt, Human
aggcggcaggcagagaaguggagugacuauuu

SEQ ID NO: 57424 - RNA, 32 nt, Human
aggcggccacagcaggacuggccacacccacg

SEQ ID NO: 57425 - RNA, 32 nt, Human
aggcggccagggacucugccgaggcccugaga

SEQ ID NO: 57426 - RNA, 32 nt, Human
aggcggccagggugggagacuguucgccccgc

SEQ ID NO: 57427 - RNA, 32 nt, Human
aggcggcccugagcaccuggguucugacuuug

SEQ ID NO: 57428 - RNA, 20 nt, Human
aggcggcccuuuccucgggg

SEQ ID NO: 57429 - RNA, 32 nt, Human
aggcggccuaaggagauuccacacaugcguau

SEQ ID NO: 57430 - RNA, 32 nt, Human
aggcggccucagaacucagcugugacucuugc

SEQ ID NO: 57431 - RNA, 18 nt, Human
aggcggccucgccgggga

SEQ ID NO: 57432 - RNA, 32 nt, Human
aggcggccucgugccaugaucuguauuuaaug

SEQ ID NO: 57433 - RNA, 19 nt, Human
aggcggccuggggcggcgg

SEQ ID NO: 57434 - RNA, 32 nt, Human
aggcggccuugccacauauucuggcuccaggc

SEQ ID NO: 57435 - RNA, 32 nt, Human
aggcggcgacgguggcgccccuccucaucaug

SEQ ID NO: 57436 - RNA, 19 nt, Human
aggcggcgaggagaggcag

SEQ ID NO: 57437 - RNA, 32 nt, Human
aggcggcgccacagcccauggagcucgagaac

SEQ ID NO: 57438 - RNA, 32 nt, Human
aggcggcggcagcagaggcggcacuggcggca

SEQ ID NO: 57439 - RNA, 32 nt, Human
aggcggcggcagcagcggcggcaugaaccacu

SEQ ID NO: 57440 - RNA, 32 nt, Human
aggcggcggccauggcgggacaggaggauccg

SEQ ID NO: 57441 - RNA, 19 nt, Human
aggcggcggcggcggcgaa

SEQ ID NO: 57442 - RNA, 20 nt, Human
aggcggcggcggcucagggg

SEQ ID NO: 57443 - RNA, 32 nt, Human
aggcggcgggaugggagccgggucgucgugcg

SEQ ID NO: 57444 - RNA, 18 nt, Human
aggcggcuccggccaggg

SEQ ID NO: 57445 - RNA, 20 nt, Human
aggcggcucuccccaggcgg

SEQ ID NO: 57446 - RNA, 20 nt, Human
aggcggcucucgaucacggg

SEQ ID NO: 57447 - RNA, 18 nt, Human
aggcggcucugccgggga

SEQ ID NO: 57448 - RNA, 17 nt, Human
aggcggcugacguaagg

SEQ ID NO: 57449 - RNA, 18 nt, Human
aggcggcugagccggagg

SEQ ID NO: 57450 - RNA, 19 nt, Human
aggcggcugauccucaugg

SEQ ID NO: 57451 - RNA, 19 nt, Human
aggcggcugcagcaagcag

SEQ ID NO: 57452 - RNA, 18 nt, Human
aggcggcugcaguuucag

SEQ ID NO: 57453 - RNA, 20 nt, Human
aggcggcugccgggaagggg

SEQ ID NO: 57454 - RNA, 18 nt, Human
aggcggcugcggcucagg

SEQ ID NO: 57455 - RNA, 17 nt, Human
aggcggcugcggcugcu

SEQ ID NO: 57456 - RNA, 20 nt, Human
aggcggcugcgggucguggg

SEQ ID NO: 57457 - RNA, 19 nt, Human
aggcggcugcucgcggagg

SEQ ID NO: 57458 - RNA, 32 nt, Human
aggcggcugcuggggagccaggagaccgcgcg

SEQ ID NO: 57459 - RNA, 19 nt, Human
aggcggcuggcggaggugg

SEQ ID NO: 57460 - RNA, 32 nt, Human
aggcggcugggcagggcggcguggggcuucgc

SEQ ID NO: 57461 - RNA, 18 nt, Human
aggcggcugggccuaggg

SEQ ID NO: 57462 - RNA, 18 nt, Human
aggcggcugucccggagg

SEQ ID NO: 57463 - RNA, 17 nt, Human
aggcggcugucugaggg

SEQ ID NO: 57464 - RNA, 16 nt, Human
aggcggcuucccaggg

SEQ ID NO: 57465 - RNA, 20 nt, Human
aggcggcuuguguccacggg

SEQ ID NO: 57466 - RNA, 32 nt, Human
aggcggcuuuccucccccuggugugaggucgc

SEQ ID NO: 57467 - RNA, 32 nt, Human
aggcgggaacgcacuccuccggcuuuauucag

SEQ ID NO: 57468 - RNA, 21 nt, Human
aggcgggaagaucacaagguc

SEQ ID NO: 57469 - RNA, 24 nt, Human
aggcgggaagaucacaaggucagg

SEQ ID NO: 57470 - RNA, 32 nt, Human
aggcgggacucugaguuaucuaaugucagaca

SEQ ID NO: 57471 - RNA, 23 nt, Human
aggcgggagaauugcuugaaccc

SEQ ID NO: 57472 - RNA, 32 nt, Human
aggcgggagacagagcgcggcgaagagccauu

SEQ ID NO: 57473 - RNA, 19 nt, Human
aggcgggagcccgcagcgg

SEQ ID NO: 57474 - RNA, 24 nt, Human
aggcgggaggaucacaaggucagg

SEQ ID NO: 57475 - RNA, 24 nt, Human
aggcgggaggaucacaugagccca

SEQ ID NO: 57476 - RNA, 24 nt, Human
aggcgggaggaucacuugaaccua

SEQ ID NO: 57477 - RNA, 24 nt, Human
aggcgggaggaucacuugagccca

SEQ ID NO: 57478 - RNA, 24 nt, Human
aggcgggaggaucaugaggucagg

SEQ ID NO: 57479 - RNA, 24 nt, Human
aggcgggaggaucgcuugagccca

SEQ ID NO: 57480 - RNA, 24 nt, Human
aggcgggaggauggcaugagccca

SEQ ID NO: 57481 - RNA, 24 nt, Human
aggcgggaggauggcgugggccca

SEQ ID NO: 57482 - RNA, 24 nt, Human
aggcgggaggauggcuuuagccca

SEQ ID NO: 57483 - RNA, 24 nt, Human
aggcgggaggauuacuugagccca

SEQ ID NO: 57484 - RNA, 24 nt, Human
aggcgggaggauugcuugagccca

SEQ ID NO: 57485 - RNA, 23 nt, Human
aggcgggaggauugcuugaggcc

SEQ ID NO: 57486 - RNA, 23 nt, Human
aggcgggaggauugcuugagucc

SEQ ID NO: 57487 - RNA, 32 nt, Human
aggcgggaggcccgaggaagggagccugcugc

SEQ ID NO: 57488 - RNA, 32 nt, Human
aggcgggauacuuucagcuuuccauguaacug

SEQ ID NO: 57489 - RNA, 32 nt, Human
aggcgggauugcuugaguccagccugggcagu

SEQ ID NO: 57490 - RNA, 25 nt, Human
aggcgggcaaaucaccugaggucag

SEQ ID NO: 57491 - RNA, 32 nt, Human
aggcgggcacuggccucucaggagcaugcacc

SEQ ID NO: 57492 - RNA, 24 nt, Human
aggcgggcagaccaugaggucagg

SEQ ID NO: 57493 - RNA, 26 nt, Human
aggcgggcagauaaccugaggucagg

SEQ ID NO: 57494 - RNA, 24 nt, Human
aggcgggcagaucacaaggucagg

SEQ ID NO: 57495 - RNA, 26 nt, Human
aggcgggcagaucaccagaggucagg

SEQ ID NO: 57496 - RNA, 24 nt, Human
aggcgggcagaucaccugagguca

SEQ ID NO: 57497 - RNA, 26 nt, Human
aggcgggcagaucaccugaggucagg

SEQ ID NO: 57498 - RNA, 26 nt, Human
aggcgggcagaucaccugagguuagg

SEQ ID NO: 57499 - RNA, 24 nt, Human
aggcgggcagaucacgagaucagg

SEQ ID NO: 57500 - RNA, 21 nt, Human
aggcgggcagaucacgagguc

SEQ ID NO: 57501 - RNA, 22 nt, Human
aggcgggcagaucacgagguca

SEQ ID NO: 57502 - RNA, 23 nt, Human
aggcgggcagaucacgaggucag

SEQ ID NO: 57503 - RNA, 24 nt, Human
aggcgggcagaucacgaggucagg

SEQ ID NO: 57504 - RNA, 24 nt, Human
aggcgggcagaucacgagguuagg

SEQ ID NO: 57505 - RNA, 24 nt, Human
aggcgggcagaucacgaguucagg

SEQ ID NO: 57506 - RNA, 24 nt, Human
aggcgggcagaucacggggucagg

SEQ ID NO: 57507 - RNA, 26 nt, Human
aggcgggcagaucacuagaggucagg

SEQ ID NO: 57508 - RNA, 25 nt, Human
aggcgggcagaucacugaggucagg

SEQ ID NO: 57509 - RNA, 26 nt, Human
aggcgggcagaucacuugaggucagg

SEQ ID NO: 57510 - RNA, 26 nt, Human
aggcgggcagaucacuugaggucggg

SEQ ID NO: 57511 - RNA, 26 nt, Human
aggcgggcagaucaucugaggucagg

SEQ ID NO: 57512 - RNA, 26 nt, Human
aggcgggcagaucaucuggggucagg

SEQ ID NO: 57513 - RNA, 23 nt, Human
aggcgggcagaucaugaggucag

SEQ ID NO: 57514 - RNA, 24 nt, Human
aggcgggcagaucaugaggucagg

SEQ ID NO: 57515 - RNA, 25 nt, Human
aggcgggcagaucauuugaggucag

SEQ ID NO: 57516 - RNA, 26 nt, Human
aggcgggcagaugacuugaggucagg

SEQ ID NO: 57517 - RNA, 24 nt, Human
aggcgggcagauuacgaggucagg

SEQ ID NO: 57518 - RNA, 24 nt, Human
aggcgggcagauugcuugaaccca

SEQ ID NO: 57519 - RNA, 32 nt, Human
aggcgggcagcagccucuggggaggggaggua

SEQ ID NO: 57520 - RNA, 32 nt, Human
aggcgggcagcagccucuugggaggggaggug

SEQ ID NO: 57521 - RNA, 26 nt, Human
aggcgggcagcucaccugaggucagg

SEQ ID NO: 57522 - RNA, 32 nt, Human
aggcgggcagggcagacugacggacggacgac

SEQ ID NO: 57523 - RNA, 32 nt, Human
aggcgggcagggcagugggagagguggugugu

SEQ ID NO: 57524 - RNA, 24 nt, Human
aggcgggccgaucacgaggucagg

SEQ ID NO: 57525 - RNA, 32 nt, Human
aggcgggccuccucccaggcugcuccagacau

SEQ ID NO: 57526 - RNA, 24 nt, Human
aggcgggcgaaucacgaggucagg

SEQ ID NO: 57527 - RNA, 24 nt, Human
aggcgggcgcaucacgaggucagg

SEQ ID NO: 57528 - RNA, 32 nt, Human
aggcgggcgcucuggcccucccuuccuuaagc

SEQ ID NO: 57529 - RNA, 26 nt, Human
aggcgggcggaacaccugaggucagg

SEQ ID NO: 57530 - RNA, 26 nt, Human
aggcgggcggauagcuugaggucagg

SEQ ID NO: 57531 - RNA, 26 nt, Human
aggcgggcggaucaacugaggucggg

SEQ ID NO: 57532 - RNA, 24 nt, Human
aggcgggcggaucaauaggucagg

SEQ ID NO: 57533 - RNA, 21 nt, Human
aggcgggcggaucacaagguc

SEQ ID NO: 57534 - RNA, 24 nt, Human
aggcgggcggaucacaaggucagg

SEQ ID NO: 57535 - RNA, 24 nt, Human
aggcgggcggaucaccaggucagg

SEQ ID NO: 57536 - RNA, 26 nt, Human
aggcgggcggaucaccggaggucggg

SEQ ID NO: 57537 - RNA, 24 nt, Human
aggcgggcggaucaccugagguca

SEQ ID NO: 57538 - RNA, 25 nt, Human
aggcgggcggaucaccugaggucag

SEQ ID NO: 57539 - RNA, 26 nt, Human
aggcgggcggaucaccugaggucagg

SEQ ID NO: 57540 - RNA, 26 nt, Human
aggcgggcggaucaccugaggucggg

SEQ ID NO: 57541 - RNA, 24 nt, Human
aggcgggcggaucacgaaaucagg

SEQ ID NO: 57542 - RNA, 24 nt, Human
aggcgggcggaucacgaagucggg

SEQ ID NO: 57543 - RNA, 21 nt, Human
aggcgggcggaucacgagguc

SEQ ID NO: 57544 - RNA, 22 nt, Human
aggcgggcggaucacgagguca

SEQ ID NO: 57545 - RNA, 23 nt, Human
aggcgggcggaucacgaggucag

SEQ ID NO: 57546 - RNA, 24 nt, Human
aggcgggcggaucacgaggucagg

SEQ ID NO: 57547 - RNA, 24 nt, Human
aggcgggcggaucacgagguuagg

SEQ ID NO: 57548 - RNA, 24 nt, Human
aggcgggcggaucacuaggucagg

SEQ ID NO: 57549 - RNA, 26 nt, Human
aggcgggcggaucacucgaggucagg

SEQ ID NO: 57550 - RNA, 26 nt, Human
aggcgggcggaucacuugaggucagg

SEQ ID NO: 57551 - RNA, 26 nt, Human
aggcgggcggaucaucugaggucagg

SEQ ID NO: 57552 - RNA, 24 nt, Human
aggcgggcggaucaugaggucagg

SEQ ID NO: 57553 - RNA, 24 nt, Human
aggcgggcggaucaugagguuagg

SEQ ID NO: 57554 - RNA, 24 nt, Human
aggcgggcggaucgcagggucagg

SEQ ID NO: 57555 - RNA, 26 nt, Human
aggcgggcggaucgcuugaggucagg

SEQ ID NO: 57556 - RNA, 24 nt, Human
aggcgggcggaucucgaggucagg

SEQ ID NO: 57557 - RNA, 26 nt, Human
aggcgggcggaugaccugaggucagg

SEQ ID NO: 57558 - RNA, 26 nt, Human
aggcgggcggaugaguugaggucggg

SEQ ID NO: 57559 - RNA, 22 nt, Human
aggcgggcgggucacgagguca

SEQ ID NO: 57560 - RNA, 32 nt, Human
aggcgggcgugagacaagcccagcccgcacgc

SEQ ID NO: 57561 - RNA, 32 nt, Human
aggcgggcuggcgugggcucuucccccagccc

SEQ ID NO: 57562 - RNA, 32 nt, Human
aggcgggcuuccugccuggagcuguuuaauuu

SEQ ID NO: 57563 - RNA, 32 nt, Human
aggcggggaagcuccacuucagacagggcuug

SEQ ID NO: 57564 - RNA, 32 nt, Human
aggcggggaagcuuccucagccuugcagauau

SEQ ID NO: 57565 - RNA, 32 nt, Human
aggcggggacacaccuguguccuccgggagag

SEQ ID NO: 57566 - RNA, 32 nt, Human
aggcggggacaguggccaggaggcgagggcag

SEQ ID NO: 57567 - RNA, 32 nt, Human
aggcggggagagagugcuggaggcucuggggc

SEQ ID NO: 57568 - RNA, 24 nt, Human
aggcggggagaucacaaggucagg

SEQ ID NO: 57569 - RNA, 18 nt, Human
aggcggggaggaggcugc

SEQ ID NO: 57570 - RNA, 32 nt, Human
aggcggggagggagggaggguuggaggguuga

SEQ ID NO: 57571 - RNA, 20 nt, Human
aggcggggaggucucagggg

SEQ ID NO: 57572 - RNA, 32 nt, Human
aggcggggauugcaaaagucuccaguuaccag

SEQ ID NO: 57573 - RNA, 22 nt, Human
aggcggggcagcgggccugcag

SEQ ID NO: 57574 - RNA, 32 nt, Human
aggcggggcgugguggcucacacuuguaaucc

SEQ ID NO: 57575 - RNA, 32 nt, Human
aggcggggcuguacuguccgcuguuuggggag

SEQ ID NO: 57576 - RNA, 18 nt, Human
aggcgggggcccccgggg

SEQ ID NO: 57577 - RNA, 24 nt, Human
aggcggggggaucacaaggucagg

SEQ ID NO: 57578 - RNA, 21 nt, Human
aggcggggucucacuauauug

SEQ ID NO: 57579 - RNA, 23 nt, Human
aggcggggugggacuuccuuccu

SEQ ID NO: 57580 - RNA, 21 nt, Human
aggcgggguuucaccaugcug

SEQ ID NO: 57581 - RNA, 20 nt, Human
aggcgggguuucaccauguu

SEQ ID NO: 57582 - RNA, 21 nt, Human
aggcgggguuucaccauguug

SEQ ID NO: 57583 - RNA, 20 nt, Human
aggcgggguuucgccauguu

SEQ ID NO: 57584 - RNA, 21 nt, Human
aggcgggguuucgccauguug

SEQ ID NO: 57585 - RNA, 24 nt, Human
aggcggguagaucacaaggucagg

SEQ ID NO: 57586 - RNA, 32 nt, Human
aggcggguccaggacaucugagggcugacccu

SEQ ID NO: 57587 - RNA, 32 nt, Human
aggcgggucucgaacuccugaccucgugaucc

SEQ ID NO: 57588 - RNA, 26 nt, Human
aggcgggugaaucaccugaggucagg

SEQ ID NO: 57589 - RNA, 24 nt, Human
aggcgggugaaucacgaggucagg

SEQ ID NO: 57590 - RNA, 24 nt, Human
aggcgggugaaucaugaggucagg

SEQ ID NO: 57591 - RNA, 26 nt, Human
aggcgggugaaucccuuaaggucagg

SEQ ID NO: 57592 - RNA, 32 nt, Human
aggcgggugaggugaggagcagccccucgcgg

SEQ ID NO: 57593 - RNA, 32 nt, Human
aggcgggugagguuggugugagacugacggug

SEQ ID NO: 57594 - RNA, 32 nt, Human
aggcgggugcuggaagccagacggaacagugu

SEQ ID NO: 57595 - RNA, 26 nt, Human
aggcggguggaacacuugaggucagg

SEQ ID NO: 57596 - RNA, 26 nt, Human
aggcggguggaccaccugaggucagg

SEQ ID NO: 57597 - RNA, 24 nt, Human
aggcggguggaucaagaggucagg

SEQ ID NO: 57598 - RNA, 24 nt, Human
aggcggguggaucacaagcucagg

SEQ ID NO: 57599 - RNA, 21 nt, Human
aggcggguggaucacaagguc

SEQ ID NO: 57600 - RNA, 22 nt, Human
aggcggguggaucacaagguca

SEQ ID NO: 57601 - RNA, 24 nt, Human
aggcggguggaucacaaggucagg

SEQ ID NO: 57602 - RNA, 26 nt, Human
aggcggguggaucacccgaggucagg

SEQ ID NO: 57603 - RNA, 26 nt, Human
aggcggguggaucaccuaaggucagg

SEQ ID NO: 57604 - RNA, 32 nt, Human
aggcggguggaucaccugaggccagguguuug

SEQ ID NO: 57605 - RNA, 22 nt, Human
aggcggguggaucaccugaggu

SEQ ID NO: 57606 - RNA, 24 nt, Human
aggcggguggaucaccugagguca

SEQ ID NO: 57607 - RNA, 26 nt, Human
aggcggguggaucaccugaggucagg

SEQ ID NO: 57608 - RNA, 26 nt, Human
aggcggguggaucaccugaggucggg

SEQ ID NO: 57609 - RNA, 26 nt, Human
aggcggguggaucaccugagguuagg

SEQ ID NO: 57610 - RNA, 24 nt, Human
aggcggguggaucacgacgucagg

SEQ ID NO: 57611 - RNA, 24 nt, Human
aggcggguggaucacgagaucagg

SEQ ID NO: 57612 - RNA, 21 nt, Human
aggcggguggaucacgagguc

SEQ ID NO: 57613 - RNA, 22 nt, Human
aggcggguggaucacgagguca

SEQ ID NO: 57614 - RNA, 24 nt, Human
aggcggguggaucacgaggucagg

SEQ ID NO: 57615 - RNA, 24 nt, Human
aggcggguggaucacuaggucagg

SEQ ID NO: 57616 - RNA, 26 nt, Human
aggcggguggaucacucaaggucagg

SEQ ID NO: 57617 - RNA, 32 nt, Human
aggcggguggaucacuugaggccagguguuca

SEQ ID NO: 57618 - RNA, 25 nt, Human
aggcggguggaucacuugaggucag

SEQ ID NO: 57619 - RNA, 26 nt, Human
aggcggguggaucacuugaggucagg

SEQ ID NO: 57620 - RNA, 24 nt, Human
aggcggguggaucagaaggucagg

SEQ ID NO: 57621 - RNA, 26 nt, Human
aggcggguggaucaucugaggucagg

SEQ ID NO: 57622 - RNA, 24 nt, Human
aggcggguggaucaugaggucagg

SEQ ID NO: 57623 - RNA, 26 nt, Human
aggcggguggauccauugaggucagg

SEQ ID NO: 57624 - RNA, 24 nt, Human
aggcggguggauuacgaggucagg

SEQ ID NO: 57625 - RNA, 24 nt, Human
aggcggguggauugcuugagccca

SEQ ID NO: 57626 - RNA, 32 nt, Human
aggcggguggccuggcugugcuucauaugccc

SEQ ID NO: 57627 - RNA, 26 nt, Human
aggcgggugggucaccugaggucagg

SEQ ID NO: 57628 - RNA, 24 nt, Human
aggcggguguaucacgaggucagg

SEQ ID NO: 57629 - RNA, 32 nt, Human
aggcggguuucgaaauccugaccucaaaugau

SEQ ID NO: 57630 - RNA, 18 nt, Human
aggcgguaccuucagggg

SEQ ID NO: 57631 - RNA, 32 nt, Human
aggcgguagcgcuccucuuuacagccagauca

SEQ ID NO: 57632 - RNA, 32 nt, Human
aggcgguccccagcugccagggugcuugggga

SEQ ID NO: 57633 - RNA, 32 nt, Human
aggcggucuccccuccgagcgucucucuuggu

SEQ ID NO: 57634 - RNA, 32 nt, Human
aggcggugaccagcagcaggaggagaaagaac

SEQ ID NO: 57635 - RNA, 32 nt, Human
aggcggugcccagccggaagggggcucuggaa

SEQ ID NO: 57636 - RNA, 32 nt, Human
aggcgguggagaggaggaaggggcgggguggg

SEQ ID NO: 57637 - RNA, 32 nt, Human
aggcgguggcggcggaggcggcaccgauugcu

SEQ ID NO: 57638 - RNA, 31 nt, Human
aggcgguggcuucucccugcgaggaggggag

SEQ ID NO: 57639 - RNA, 20 nt, Human
aggcggugggaccucggggg

SEQ ID NO: 57640 - RNA, 32 nt, Human
aggcggugguagggagugugcgguggugaaaa

SEQ ID NO: 57641 - RNA, 32 nt, Human
aggcgguugagugggguccugggaagagcgcu

SEQ ID NO: 57642 - RNA, 24 nt, Human
aggcgguuggaucacgaggucagg

SEQ ID NO: 57643 - RNA, 19 nt, Human
aggcguagcuugcagugag

SEQ ID NO: 57644 - RNA, 30 nt, Human
aggcguagcuugcagugagcugagaucaca

SEQ ID NO: 57645 - RNA, 32 nt, Human
aggcguccagagugagugugaccugcgggugc

SEQ ID NO: 57646 - RNA, 32 nt, Human
aggcguccggcugcuguccccugccggggagc

SEQ ID NO: 57647 - RNA, 32 nt, Human
aggcguccgguucauucuuaccuguguuaggc

SEQ ID NO: 57648 - RNA, 32 nt, Human
aggcguccuccaccaugccuggcuaauauuuu

SEQ ID NO: 57649 - RNA, 32 nt, Human
aggcguccuccacccacgcccacuagccugcc

SEQ ID NO: 57650 - RNA, 32 nt, Human
aggcgucgagggcgccagaaguggcggcagca

SEQ ID NO: 57651 - RNA, 32 nt, Human
aggcgucggauacgcuaaaaaucaagcaguug

SEQ ID NO: 57652 - RNA, 32 nt, Human
aggcgucuccucaucccucacccugaccuuuc

SEQ ID NO: 57653 - RNA, 20 nt, Human
aggcgucuggccuucagggg

SEQ ID NO: 57654 - RNA, 32 nt, Human
aggcgucuguaaucccagcugcuugggaggcu

SEQ ID NO: 57655 - RNA, 22 nt, Human
aggcgugaaccaccacuccugg

SEQ ID NO: 57656 - RNA, 22 nt, Human
aggcgugaaccaccgcccccgg

SEQ ID NO: 57657 - RNA, 32 nt, Human
aggcgugaaccacugcacccagccuaucuuuu

SEQ ID NO: 57658 - RNA, 32 nt, Human
aggcgugaaccacugcacccagccugcugauc

SEQ ID NO: 57659 - RNA, 22 nt, Human
aggcgugaaccacugcacccgg

SEQ ID NO: 57660 - RNA, 21 nt, Human
aggcgugaaccacugugccgg

SEQ ID NO: 57661 - RNA, 20 nt, Human
aggcgugaaccacugugucc

SEQ ID NO: 57662 - RNA, 32 nt, Human
aggcgugaauccucuggaaggaacuguuugca

SEQ ID NO: 57663 - RNA, 32 nt, Human
aggcgugacacagacuguccacugcagagacc

SEQ ID NO: 57664 - RNA, 32 nt, Human
aggcgugacuagaagcggaaguaguugugggc

SEQ ID NO: 57665 - RNA, 20 nt, Human
aggcgugagacaccgugccc

SEQ ID NO: 57666 - RNA, 22 nt, Human
aggcgugagacaucgcgcccgg

SEQ ID NO: 57667 - RNA, 22 nt, Human
aggcgugagcaaccgcacccgg

SEQ ID NO: 57668 - RNA, 32 nt, Human
aggcgugagccaacacaccggaccuucauuuu

SEQ ID NO: 57669 - RNA, 22 nt, Human
aggcgugagccacagcgcccgg

SEQ ID NO: 57670 - RNA, 22 nt, Human
aggcgugagccaccaaacccgg

SEQ ID NO: 57671 - RNA, 32 nt, Human
aggcgugagccaccacacccagcccuuucacu

SEQ ID NO: 57672 - RNA, 32 nt, Human
aggcgugagccaccacacccagcucagggagg

SEQ ID NO: 57673 - RNA, 22 nt, Human
aggcgugagccaccacacccgg

SEQ ID NO: 57674 - RNA, 22 nt, Human
aggcgugagccaccacaccugg

SEQ ID NO: 57675 - RNA, 22 nt, Human
aggcgugagccaccacacuugg

SEQ ID NO: 57676 - RNA, 22 nt, Human
aggcgugagccaccacauccgg

SEQ ID NO: 57677 - RNA, 22 nt, Human
aggcgugagccaccacccccgg

SEQ ID NO: 57678 - RNA, 18 nt, Human
aggcgugagccaccaccg

SEQ ID NO: 57679 - RNA, 22 nt, Human
aggcgugagccaccacgccagg

SEQ ID NO: 57680 - RNA, 21 nt, Human
aggcgugagccaccacgcccg

SEQ ID NO: 57681 - RNA, 22 nt, Human
aggcgugagccaccacgcccgg

SEQ ID NO: 57682 - RNA, 23 nt, Human
aggcgugagccaccacgcccggu

SEQ ID NO: 57683 - RNA, 22 nt, Human
aggcgugagccaccacgccugg

SEQ ID NO: 57684 - RNA, 23 nt, Human
aggcgugagccaccacgcuuggu

SEQ ID NO: 57685 - RNA, 20 nt, Human
aggcgugagccaccacgucc

SEQ ID NO: 57686 - RNA, 22 nt, Human
aggcgugagccaccacucuugg

SEQ ID NO: 57687 - RNA, 22 nt, Human
aggcgugagccaccacugcugg

SEQ ID NO: 57688 - RNA, 21 nt, Human
aggcgugagccaccagccagg

SEQ ID NO: 57689 - RNA, 22 nt, Human
aggcgugagccaccauacccgg

SEQ ID NO: 57690 - RNA, 22 nt, Human
aggcgugagccaccaucuccgg

SEQ ID NO: 57691 - RNA, 19 nt, Human
aggcgugagccaccaugcc

SEQ ID NO: 57692 - RNA, 20 nt, Human
aggcgugagccaccaugccc

SEQ ID NO: 57693 - RNA, 22 nt, Human
aggcgugagccaccaugccccg

SEQ ID NO: 57694 - RNA, 22 nt, Human
aggcgugagccaccaugcccgg

SEQ ID NO: 57695 - RNA, 22 nt, Human
aggcgugagccaccaugccugg

SEQ ID NO: 57696 - RNA, 22 nt, Human
aggcgugagccaccaugcucgg

SEQ ID NO: 57697 - RNA, 20 nt, Human
aggcgugagccaccaugucc

SEQ ID NO: 57698 - RNA, 22 nt, Human
aggcgugagccaccauguccgg

SEQ ID NO: 57699 - RNA, 22 nt, Human
agggccgagcgaggcgcaggca

SEQ ID NO: 57700 - RNA, 32 nt, Human
agggccgaggggagagggugaccauggggaau

SEQ ID NO: 57701 - RNA, 19 nt, Human
agggccgccacacgggcgg

SEQ ID NO: 57702 - RNA, 32 nt, Human
agggccgcuccccucacccgcccccuucgagu

SEQ ID NO: 57703 - RNA, 32 nt, Human
agggccgcugcccgcccugggccggcacauug

SEQ ID NO: 57704 - RNA, 32 nt, Human
agggccgcugcccgcccugggccggcaccuug

SEQ ID NO: 57705 - RNA, 32 nt, Human
agggccgcugugcccacugcaggacaugcagc

SEQ ID NO: 57706 - RNA, 32 nt, Human
agggccggaacagcagguggcuucucaguucc

SEQ ID NO: 57707 - RNA, 23 nt, Human
agggccggaaccaucucugccga

SEQ ID NO: 57708 - RNA, 32 nt, Human
agggccggaagaggaaagaaaccagaguuucu

SEQ ID NO: 57709 - RNA, 25 nt, Human
agggccggacccccuacuugcccuu

SEQ ID NO: 57710 - RNA, 23 nt, Human
agggccggagaagcgagcggcca

SEQ ID NO: 57711 - RNA, 23 nt, Human
agggccggagcaggagcaugcua

SEQ ID NO: 57712 - RNA, 32 nt, Human
agggccggccucaccucuccccagcccccgcu

SEQ ID NO: 57713 - RNA, 22 nt, Human
agggccggcggggcagcccccu

SEQ ID NO: 57714 - RNA, 32 nt, Human
agggccggcuggggccuggggugcagcuggug

SEQ ID NO: 57715 - RNA, 20 nt, Human
agggccgggagcagaugcug

SEQ ID NO: 57716 - RNA, 18 nt, Human
agggccgggccucuggga

SEQ ID NO: 57717 - RNA, 22 nt, Human
agggccgggcgcucugugcgga

SEQ ID NO: 57718 - RNA, 27 nt, Human
agggccgggcuuggccuccugcuucau

SEQ ID NO: 57719 - RNA, 32 nt, Human
agggccggggccugaagcuggaagccaucgug

SEQ ID NO: 57720 - RNA, 21 nt, Human
agggccgggucucuccgcgga

SEQ ID NO: 57721 - RNA, 24 nt, Human
agggccgggugguggcucugagga

SEQ ID NO: 57722 - RNA, 32 nt, Human
agggccggguucccuggagaaggagaaagacu

SEQ ID NO: 57723 - RNA, 22 nt, Human
agggccggguuucagcuccggg

SEQ ID NO: 57724 - RNA, 24 nt, Human
agggccguaugcauccugccaagc

SEQ ID NO: 57725 - RNA, 32 nt, Human
agggccgucucaauggucugggaguggacacu

SEQ ID NO: 57726 - RNA, 32 nt, Human
agggccgugaagaugggaugaggagcuauaug

SEQ ID NO: 57727 - RNA, 19 nt, Human
agggccguguacacucucc

SEQ ID NO: 57728 - RNA, 32 nt, Human
agggccuacccagagaccagagagagucagcc

SEQ ID NO: 57729 - RNA, 32 nt, Human
agggccuacuggaugcgagaccuguguggcug

SEQ ID NO: 57730 - RNA, 32 nt, Human
agggccuagaagggaaagacugugcguugaua

SEQ ID NO: 57731 - RNA, 32 nt, Human
agggccuagcuuucauuugacacacagacuac

SEQ ID NO: 57732 - RNA, 32 nt, Human
agggccuagggagggugggagcugcugcugga

SEQ ID NO: 57733 - RNA, 32 nt, Human
agggccuaguacagaaggugcacacaaauguu

SEQ ID NO: 57734 - RNA, 32 nt, Human
agggccuauugaccguagaggccaggugcggu

SEQ ID NO: 57735 - RNA, 32 nt, Human
agggccucacuauggucagcucaggccaugug

SEQ ID NO: 57736 - RNA, 32 nt, Human
agggccucacucugucacccaggcugggaugc

SEQ ID NO: 57737 - RNA, 32 nt, Human
agggccucagacucugaacuucccucaagugc

SEQ ID NO: 57738 - RNA, 32 nt, Human
agggccuccagcugcccucagacacugauguc

SEQ ID NO: 57739 - RNA, 32 nt, Human
agggccuccccuuccccucucccucagaguuu

SEQ ID NO: 57740 - RNA, 31 nt, Human
agggccucccucucugccaguguuugggugg

SEQ ID NO: 57741 - RNA, 32 nt, Human
agggccuccuggaguuucaaaaggaggaagug

SEQ ID NO: 57742 - RNA, 26 nt, Human
agggccuccuuuccaaccucacaaug

SEQ ID NO: 57743 - RNA, 32 nt, Human
agggccucucccucccucccucccucucuguc

SEQ ID NO: 57744 - RNA, 32 nt, Human
agggccucuccucacugcuguugucauugcuc

SEQ ID NO: 57745 - RNA, 32 nt, Human
agggccucuccugucgccucuggacacaagug

SEQ ID NO: 57746 - RNA, 32 nt, Human
agggccucugcagauaaaugugcaggauagca

SEQ ID NO: 57747 - RNA, 32 nt, Human
agggccucugcgggacugucuguuugcagagg

SEQ ID NO: 57748 - RNA, 18 nt, Human
agggccugaacccugggu

SEQ ID NO: 57749 - RNA, 32 nt, Human
agggccugaaugugaaagaagacccucuauuu

SEQ ID NO: 57750 - RNA, 32 nt, Human
agggccugacaagaggaugggguggggguggc

SEQ ID NO: 57751 - RNA, 32 nt, Human
agggccugacacgggaagagugcaguagggag

SEQ ID NO: 57752 - RNA, 22 nt, Human
agggccugacuguccugcucac

SEQ ID NO: 57753 - RNA, 32 nt, Human
agggccugacuugagccacuccuuccuucagg

SEQ ID NO: 57754 - RNA, 32 nt, Human
agggccugagagaagcagggacaggagggagc

SEQ ID NO: 57755 - RNA, 32 nt, Human
agggccugagccuggccagccuacaaugggga

SEQ ID NO: 57756 - RNA, 32 nt, Human
agggccugagucucaacauggcugcugaucca

SEQ ID NO: 57757 - RNA, 32 nt, Human
agggccugaucuuuaccacugcaggggcugca

SEQ ID NO: 57758 - RNA, 32 nt, Human
agggccugcaagcagccagggucagagacagg

SEQ ID NO: 57759 - RNA, 18 nt, Human
agggccugcagcagugcc

SEQ ID NO: 57760 - RNA, 32 nt, Human
agggccugcagccucucccacgcugccgccgc

SEQ ID NO: 57761 - RNA, 32 nt, Human
agggccugcaggaagcuggugucagggagaga

SEQ ID NO: 57762 - RNA, 18 nt, Human
agggccugcccacgcccu

SEQ ID NO: 57763 - RNA, 32 nt, Human
agggccugcuuccugaaucuccuggguguguc

SEQ ID NO: 57764 - RNA, 32 nt, Human
agggccuggagcccagagcggggccagcugcu

SEQ ID NO: 57765 - RNA, 32 nt, Human
agggccuggcagcugcugcgcccucgcuuucu

SEQ ID NO: 57766 - RNA, 32 nt, Human
agggccuggcauguuugcccugcucugccugg

SEQ ID NO: 57767 - RNA, 22 nt, Human
agggccuggccuggcagcucug

SEQ ID NO: 57768 - RNA, 32 nt, Human
agggccuggccuugguccccacucugcgauga

SEQ ID NO: 57769 - RNA, 21 nt, Human
agggccuggcucucccuggga

SEQ ID NO: 57770 - RNA, 32 nt, Human
agggccuggcugagagacaaggguagcagcag

SEQ ID NO: 57771 - RNA, 32 nt, Human
agggccuggcuugucagcucucuagguuugau

SEQ ID NO: 57772 - RNA, 32 nt, Human
agggccugggcuggcccugcuaggcuggagaa

SEQ ID NO: 57773 - RNA, 32 nt, Human
agggccugggcugggagggagagaccggagca

SEQ ID NO: 57774 - RNA, 32 nt, Human
agggccuggguggcaggggguggguggccugu

SEQ ID NO: 57775 - RNA, 32 nt, Human
agggccugguggccccagcacacacuugggau

SEQ ID NO: 57776 - RNA, 32 nt, Human
agggccugucccuacugagagugcagggaacu

SEQ ID NO: 57777 - RNA, 32 nt, Human
agggccugugagcugcucacaacugggucaac

SEQ ID NO: 57778 - RNA, 32 nt, Human
agggccugugccuggggaggcuucagggugua

SEQ ID NO: 57779 - RNA, 32 nt, Human
agggccuguggccuauggaauauguccuccag

SEQ ID NO: 57780 - RNA, 17 nt, Human
agggccuguguccuggg

SEQ ID NO: 57781 - RNA, 32 nt, Human
agggccuguuucucccugcaggaagcccacag

SEQ ID NO: 57782 - RNA, 32 nt, Human
agggccuucaauggaucucaauaugaccuaua

SEQ ID NO: 57783 - RNA, 32 nt, Human
agggccuuccaaagugcugggauuacggacgu

SEQ ID NO: 57784 - RNA, 32 nt, Human
agggccuuccacccucggcuccugugcuggga

SEQ ID NO: 57785 - RNA, 32 nt, Human
agggccuucccccuagcaccuccucaggccag

SEQ ID NO: 57786 - RNA, 32 nt, Human
agggccuuccugggaggagucccaccagccag

SEQ ID NO: 57787 - RNA, 32 nt, Human
agggccuuccuugacagaauuguguccucucc

SEQ ID NO: 57788 - RNA, 32 nt, Human
agggccuucucaggaacacugacauugccuac

SEQ ID NO: 57789 - RNA, 32 nt, Human
agggccuugaaggaugagaaagaucuggcuga

SEQ ID NO: 57790 - RNA, 32 nt, Human
agggccuugagugcccaggagugccccacguu

SEQ ID NO: 57791 - RNA, 32 nt, Human
agggccuugagugccuggaggugcuuggccuc

SEQ ID NO: 57792 - RNA, 32 nt, Human
agggccuuuaacauuucugagguuuggagauu

SEQ ID NO: 57793 - RNA, 32 nt, Human
agggcgagagguggaaggucagaggagauggg

SEQ ID NO: 57794 - RNA, 32 nt, Human
agggcgagaggugggaggucagaggagaugga

SEQ ID NO: 57795 - RNA, 32 nt, Human
agggcgagaggugggaggucagaggagauggg

SEQ ID NO: 57796 - RNA, 32 nt, Human
agggcgagaucaggacucugucuuuguuaauc

SEQ ID NO: 57797 - RNA, 30 nt, Human
agggcgagccucucugugacucuucuguaa

SEQ ID NO: 57798 - RNA, 32 nt, Human
agggcgagcuguucucggguuccacaugccug

SEQ ID NO: 57799 - RNA, 32 nt, Human
agggcgagcuguucuuggguuccacaugccug

SEQ ID NO: 57800 - RNA, 32 nt, Human
agggcgaggagauggugcuggagccagggagc

SEQ ID NO: 57801 - RNA, 32 nt, Human
agggcgaggcaagggcgcuuucugccgacgcu

SEQ ID NO: 57802 - RNA, 32 nt, Human
agggcgaggccuggcagcuguagugcuucugg

SEQ ID NO: 57803 - RNA, 32 nt, Human
agggcgaggggcugaggucacaccucgggcac

SEQ ID NO: 57804 - RNA, 32 nt, Human
agggcgagguggggccucugcagccauccugg

SEQ ID NO: 57805 - RNA, 32 nt, Human
agggcgauggacgccuucagccccaggcaccc

SEQ ID NO: 57806 - RNA, 32 nt, Human
agggcgauucugggccuuucugaccuacuccu

SEQ ID NO: 57807 - RNA, 32 nt, Human
agggcgcaaggcgccuuucagggaaggugucu

SEQ ID NO: 57808 - RNA, 32 nt, Human
agggcgcaggccgcgcggagaugaggaggagg

SEQ ID NO: 57809 - RNA, 32 nt, Human
agggcgccagcggcuggcgaagaaggaaagag

SEQ ID NO: 57810 - RNA, 32 nt, Human
agggcgcccgggcucuggcuuccucauugagc

SEQ ID NO: 57811 - RNA, 21 nt, Human
agggcgcccuggacgccugcg

SEQ ID NO: 57812 - RNA, 32 nt, Human
agggcgccgccgcaaucucaccucucccaggc

SEQ ID NO: 57813 - RNA, 19 nt, Human
agggcgccgggagccagcu

SEQ ID NO: 57814 - RNA, 25 nt, Human
agggcgccucugggaagccugggca

SEQ ID NO: 57815 - RNA, 32 nt, Human
agggcgccuguugacaaguguggagaaacucc

SEQ ID NO: 57816 - RNA, 23 nt, Human
agggcgcgugguucggcgugcca

SEQ ID NO: 57817 - RNA, 32 nt, Human
agggcgcuccaugccucucuguccucuucuuu

SEQ ID NO: 57818 - RNA, 32 nt, Human
agggcgcucugcccucccuccuuccuucuugc

SEQ ID NO: 57819 - RNA, 32 nt, Human
agggcgcugcgaggaggagcggaaggcggaga

SEQ ID NO: 57820 - RNA, 32 nt, Human
agggcgcuguugcugccaauacagcugucaug

SEQ ID NO: 57821 - RNA, 32 nt, Human
agggcgcuugaguuggucgggggcagcggcag

SEQ ID NO: 57822 - RNA, 22 nt, Human
agggcggaaacaucacauacaa

SEQ ID NO: 57823 - RNA, 32 nt, Human
agggcggagaguucuguggugaaauaguggga

SEQ ID NO: 57824 - RNA, 32 nt, Human
agggcggagcggggcugucaccuggagaucac

SEQ ID NO: 57825 - RNA, 32 nt, Human
agggcggagcugcagaagcguguggagggccu

SEQ ID NO: 57826 - RNA, 32 nt, Human
agggcggaggaaggagaaggagggcccacagg

SEQ ID NO: 57827 - RNA, 32 nt, Human
agggcggagggcggaggggcggcgggaggagg

SEQ ID NO: 57828 - RNA, 32 nt, Human
agggcggagguggugcgugcgugcgugugugu

SEQ ID NO: 57829 - RNA, 32 nt, Human
agggcggcagcgguggcggcgguagccagcgc

SEQ ID NO: 57830 - RNA, 32 nt, Human
agggcggcaggcagggguuauccggccccacu

SEQ ID NO: 57831 - RNA, 32 nt, Human
agggcggcgggggugcggagagacaggcggag

SEQ ID NO: 57832 - RNA, 32 nt, Human
agggcgggagagagggaacggaggauguguga

SEQ ID NO: 57833 - RNA, 32 nt, Human
agggcgggaggcagcgcgggaguggggcguug

SEQ ID NO: 57834 - RNA, 32 nt, Human
agggcgggcagcacccuccgacccucccaugc

SEQ ID NO: 57835 - RNA, 32 nt, Human
agggcgggccuggagcugcgugagagugaaac

SEQ ID NO: 57836 - RNA, 32 nt, Human
agggcgggcgggcugcucggaggcagaggcag

SEQ ID NO: 57837 - RNA, 32 nt, Human
agggcgggcuccaagcgcuuugcuuccggaac

SEQ ID NO: 57838 - RNA, 32 nt, Human
agggcggggcuggaggaaugugggggauugaa

SEQ ID NO: 57839 - RNA, 32 nt, Human
agggcggggcuggccagcugugcgagaacaca

SEQ ID NO: 57840 - RNA, 32 nt, Human
agggcggggugaggaggggcggagcuuccaga

SEQ ID NO: 57841 - RNA, 32 nt, Human
agggcggucacggcggccugcccagggcgcag

SEQ ID NO: 57842 - RNA, 32 nt, Human
agggcggugggaggggaggaguggagauggcg

SEQ ID NO: 57843 - RNA, 32 nt, Human
agggcguagggugggggcagugaggaaugggu

SEQ ID NO: 57844 - RNA, 32 nt, Human
agggcgucguaccucugugagacauggcucgc

SEQ ID NO: 57845 - RNA, 32 nt, Human
agggcgucucaucuccccacaggcaucugcug

SEQ ID NO: 57846 - RNA, 18 nt, Human
agggcgugaacccgggag

SEQ ID NO: 57847 - RNA, 16 nt, Human
agggcgugggcagcuu

SEQ ID NO: 57848 - RNA, 31 nt, Human
agggcgugggucucugggguuggggucccuu

SEQ ID NO: 57849 - RNA, 32 nt, Human
agggcguguaggggguggagguucuaagacag

SEQ ID NO: 57850 - RNA, 32 nt, Human
agggcgugucagcagcaaaccuaagugugugc

SEQ ID NO: 57851 - RNA, 22 nt, Human
agggcguguggccaucguguca

SEQ ID NO: 57852 - RNA, 32 nt, Human
agggcuaagggagggggcgcuggagcuuccaa

SEQ ID NO: 57853 - RNA, 22 nt, Human
agggcuaagugcauauugugga

SEQ ID NO: 57854 - RNA, 32 nt, Human
agggcuacaggacuacaaucccaacaugugcc

SEQ ID NO: 57855 - RNA, 32 nt, Human
agggcuacaggacuacaaucccagcaugugcc

SEQ ID NO: 57856 - RNA, 23 nt, Human
agggcuacauguuucuuuuucau

SEQ ID NO: 57857 - RNA, 32 nt, Human
agggcuacugacguuucauucuugcccuuuug

SEQ ID NO: 57858 - RNA, 21 nt, Human
agggcuacuugauccuccuca

SEQ ID NO: 57859 - RNA, 32 nt, Human
agggcuagaauuacaggugugagccacugcaa

SEQ ID NO: 57860 - RNA, 32 nt, Human
agggcuagacuuacccugggaucuucuucauc

SEQ ID NO: 57861 - RNA, 32 nt, Human
agggcuagagaugucaaauggaagagacuuag

SEQ ID NO: 57862 - RNA, 32 nt, Human
agggcuagcugagcucuucaccugcauccugg

SEQ ID NO: 57863 - RNA, 32 nt, Human
agggcuaguugccaccaaccaauuuacugaug

SEQ ID NO: 57864 - RNA, 32 nt, Human
agggcuaucuaaaaauaauaaggaauuuggac

SEQ ID NO: 57865 - RNA, 32 nt, Human
agggcuaugauccuagcuggaauuacaccugc

SEQ ID NO: 57866 - RNA, 16 nt, Human
agggcuaugccugugu

SEQ ID NO: 57867 - RNA, 23 nt, Human
agggcucaacagccacgcucugu

SEQ ID NO: 57868 - RNA, 32 nt, Human
agggcucaagcaguccucccaccucagccucc

SEQ ID NO: 57869 - RNA, 32 nt, Human
agggcucaagggauccucccaccucagccucu

SEQ ID NO: 57870 - RNA, 32 nt, Human
agggcucaagugagcaaggguuucuucuggau

SEQ ID NO: 57871 - RNA, 32 nt, Human
agggcucaauccaggaccacacucuuauuggc

SEQ ID NO: 57872 - RNA, 22 nt, Human
agggcucacagggcaggccuug

SEQ ID NO: 57873 - RNA, 32 nt, Human
agggcucaccuaacuugggagggaaggggcug

SEQ ID NO: 57874 - RNA, 22 nt, Human
agggcucacgccuguaaucuca

SEQ ID NO: 57875 - RNA, 32 nt, Human
agggcucacugcagccuugaccucccaggcuc

SEQ ID NO: 57876 - RNA, 32 nt, Human
agggcucacugcagcuuugacuucccaggcuc

SEQ ID NO: 57877 - RNA, 32 nt, Human
agggcucagaagaagacaggaaaaugggggaa

SEQ ID NO: 57878 - RNA, 32 nt, Human
agggcucagaagcaggggccacagcuggagua

SEQ ID NO: 57879 - RNA, 32 nt, Human
agggcucagacgggggccauuuugccagaggc

SEQ ID NO: 57880 - RNA, 32 nt, Human
agggcucagagagguuuaguuacuuuccaaga

SEQ ID NO: 57881 - RNA, 32 nt, Human
agggcucagcagagaacaguaugggacccccu

SEQ ID NO: 57882 - RNA, 32 nt, Human
agggcucagccaagcccugcaguguguccccg

SEQ ID NO: 57883 - RNA, 32 nt, Human
agggcucagcccagggcauccaggaacaggcu

SEQ ID NO: 57884 - RNA, 24 nt, Human
agggcucagccuggcaggcuuugu

SEQ ID NO: 57885 - RNA, 18 nt, Human
agggcucaggacccggag

SEQ ID NO: 57886 - RNA, 24 nt, Human
agggcucagggcacaaggcuccgu

SEQ ID NO: 57887 - RNA, 32 nt, Human
agggcucagggugggcucagaggccacugaga

SEQ ID NO: 57888 - RNA, 32 nt, Human
agggcucaggugauccucccaccucagccacc

SEQ ID NO: 57889 - RNA, 32 nt, Human
agggcucaucccucugcagagcgcggggucac

SEQ ID NO: 57890 - RNA, 32 nt, Human
agggcucaucccuuauuaagcaucagaaaauu

SEQ ID NO: 57891 - RNA, 32 nt, Human
agggcuccacuccccuuccuuuucuuggugaa

SEQ ID NO: 57892 - RNA, 32 nt, Human
agggcuccagcuguugucucacacuuccuuga

SEQ ID NO: 57893 - RNA, 20 nt, Human
agggcuccagggccuggaca

SEQ ID NO: 57894 - RNA, 32 nt, Human
agggcucccagaggagcaucaacuccaggaga

SEQ ID NO: 57895 - RNA, 32 nt, Human
agggcucccagccugcaccgccucccacugcc

SEQ ID NO: 57896 - RNA, 32 nt, Human
agggcucccuccggcuuggcagacucagccug

SEQ ID NO: 57897 - RNA, 17 nt, Human
agggcuccgcggcgcug

SEQ ID NO: 57898 - RNA, 32 nt, Human
agggcuccgucauggccauggagaccuggggg

SEQ ID NO: 57899 - RNA, 32 nt, Human
agggcuccucaagugcccccaaagugggagcc

SEQ ID NO: 57900 - RNA, 32 nt, Human
agggcuccuccuuuacaauugaucucauuuuu

SEQ ID NO: 57901 - RNA, 32 nt, Human
agggcuccugggaggccugugggagccucccg

SEQ ID NO: 57902 - RNA, 32 nt, Human
agggcuccuggugcuccccaugugggaauagg

SEQ ID NO: 57903 - RNA, 32 nt, Human
agggcuccuguagacuucaucaacaucagcac

SEQ ID NO: 57904 - RNA, 23 nt, Human
agggcuccuuucuaccuccagug

SEQ ID NO: 57905 - RNA, 32 nt, Human
agggcucgaaggguuagagaagaaaggcagac

SEQ ID NO: 57906 - RNA, 20 nt, Human
agggcucgccacgggccuug

SEQ ID NO: 57907 - RNA, 32 nt, Human
agggcucuaagaccacccagcucucuuccugg

SEQ ID NO: 57908 - RNA, 32 nt, Human
agggcucucagccacugcuccaacacacuugc

SEQ ID NO: 57909 - RNA, 32 nt, Human
agggcucucccagagggaagcugggaaguuaa

SEQ ID NO: 57910 - RNA, 32 nt, Human
agggcucuccuuccugucccuucgaucuccuu

SEQ ID NO: 57911 - RNA, 32 nt, Human
agggcucucgagaacagauucuccccuccagu

SEQ ID NO: 57912 - RNA, 32 nt, Human
agggcucucuccccauggccucuuccccaccu

SEQ ID NO: 57913 - RNA, 32 nt, Human
agggcucucugaugccuucuaaaagaacaacu

SEQ ID NO: 57914 - RNA, 32 nt, Human
agggcucucuggaugccuuccugcugccccag

SEQ ID NO: 57915 - RNA, 32 nt, Human
agggcucugagcgggaggccugagcgggaagc

SEQ ID NO: 57916 - RNA, 20 nt, Human
agggcucugauuugcacaau

SEQ ID NO: 57917 - RNA, 32 nt, Human
agggcucugcaguaaaaacaaaggacaaccca

SEQ ID NO: 57918 - RNA, 32 nt, Human
agggcucugcuggucuuucugagucacagcug

SEQ ID NO: 57919 - RNA, 24 nt, Human
agggcucugcuguucccuccuccu

SEQ ID NO: 57920 - RNA, 19 nt, Human
agggcucuggacgcuacuc

SEQ ID NO: 57921 - RNA, 32 nt, Human
agggcucuggagccaccaucccagggcccgcu

SEQ ID NO: 57922 - RNA, 32 nt, Human
agggcucugggagccaggccuagcucucaggg

SEQ ID NO: 57923 - RNA, 32 nt, Human
agggcucuguuccaugccucucuccuuggcuu

SEQ ID NO: 57924 - RNA, 32 nt, Human
agggcucuucggcaaauguacaugggcaccuc

SEQ ID NO: 57925 - RNA, 32 nt, Human
agggcucuugagccacuugcucuagcccacuc

SEQ ID NO: 57926 - RNA, 32 nt, Human
agggcucuuucuccaugggagcuccuggugcc

SEQ ID NO: 57927 - RNA, 32 nt, Human
agggcucuuugauuugagucucagguuaaucc

SEQ ID NO: 57928 - RNA, 32 nt, Human
agggcucuuuguguucugugacagcauuuggg

SEQ ID NO: 57929 - RNA, 21 nt, Human
agggcugaaagccccaagccc

SEQ ID NO: 57930 - RNA, 32 nt, Human
agggcugaagagaagauggaggagcugguggu

SEQ ID NO: 57931 - RNA, 32 nt, Human
agggcugagauguggcaggagcucccagggaa

SEQ ID NO: 57932 - RNA, 32 nt, Human
agggcugagccauggggguuuggggcuaagaa

SEQ ID NO: 57933 - RNA, 20 nt, Human
agggcugagcucucuguggg

SEQ ID NO: 57934 - RNA, 32 nt, Human
agggcugaggaagucuuugaggugaaagugga

SEQ ID NO: 57935 - RNA, 32 nt, Human
agggcugagggagagacugaggugcagcagau

SEQ ID NO: 57936 - RNA, 32 nt, Human
agggcugaggggcagcggcuuaggcuccggcg

SEQ ID NO: 57937 - RNA, 24 nt, Human
agggcugaggucuguuucucuggg

SEQ ID NO: 57938 - RNA, 32 nt, Human
agggcugauuuucaucaaaaccaagaccuuuc

SEQ ID NO: 57939 - RNA, 32 nt, Human
agggcugcaacaccacgacuucugcccauucu

SEQ ID NO: 57940 - RNA, 32 nt, Human
agggcugcaaggggacaccacgcacagagaca

SEQ ID NO: 57941 - RNA, 32 nt, Human
agggcugcaggcgggcggagguuccaggagau

SEQ ID NO: 57942 - RNA, 32 nt, Human
agggcugcagugagccaugaggcaccacugca

SEQ ID NO: 57943 - RNA, 32 nt, Human
agggcugcagugagccgagauugugccacugc

SEQ ID NO: 57944 - RNA, 32 nt, Human
agggcugcagugagccuugauugcaccacugc

SEQ ID NO: 57945 - RNA, 32 nt, Human
agggcugcagugagguacgaucaagccacugc

SEQ ID NO: 57946 - RNA, 32 nt, Human
agggcugccaggcguauuccugccugggccuc

SEQ ID NO: 57947 - RNA, 32 nt, Human
agggcugccaggcugcagccugcugcuccagg

SEQ ID NO: 57948 - RNA, 32 nt, Human
agggcugcccacaggccucagcucuuuccagc

SEQ ID NO: 57949 - RNA, 32 nt, Human
agggcugcccgcagaggcugaggucccugcaa

SEQ ID NO: 57950 - RNA, 32 nt, Human
agggcugcccgccgcgcugccugcgccggacc

SEQ ID NO: 57951 - RNA, 20 nt, Human
agggcugccggcacuaggcg

SEQ ID NO: 57952 - RNA, 32 nt, Human
agggcugccuccaaggacacagaaggaugcca

SEQ ID NO: 57953 - RNA, 32 nt, Human
agggcugcggaugagccagggacagaagagca

SEQ ID NO: 57954 - RNA, 32 nt, Human
agggcugcguggcaauuuccacaccugugcac

SEQ ID NO: 57955 - RNA, 31 nt, Human
agggcugcucggagucaccuguuggaaugga

SEQ ID NO: 57956 - RNA, 32 nt, Human
agggcugcugccauccuggccugguggagguu

SEQ ID NO: 57957 - RNA, 32 nt, Human
agggcugcuucuaacggaugugguuuguugcu

SEQ ID NO: 57958 - RNA, 32 nt, Human
agggcuggaaccugggagcaacucuggccaau

SEQ ID NO: 57959 - RNA, 32 nt, Human
agggcuggaagggggagcugcaggccacccuc

SEQ ID NO: 57960 - RNA, 23 nt, Human
agggcuggaccucaacccugagg

SEQ ID NO: 57961 - RNA, 20 nt, Human
agggcuggaccuggaccugg

SEQ ID NO: 57962 - RNA, 32 nt, Human
agggcuggacggcgagcugggagccagcccca

SEQ ID NO: 57963 - RNA, 32 nt, Human
agggcuggagaacuuagcuggugggaaaggag

SEQ ID NO: 57964 - RNA, 32 nt, Human
agggcuggagcagaagggccaagagggccugu

SEQ ID NO: 57965 - RNA, 32 nt, Human
agggcuggagcagaggaccacaaggcagcaga

SEQ ID NO: 57966 - RNA, 32 nt, Human
agggcuggagccaaggagaacacaguugagca

SEQ ID NO: 57967 - RNA, 32 nt, Human
agggcuggaggaucgcuccuguggaaagggag

SEQ ID NO: 57968 - RNA, 32 nt, Human
agggcuggagggacaggagggcggaucaggug

SEQ ID NO: 57969 - RNA, 32 nt, Human
agggcuggagggacagggagcagggcagaaaa

SEQ ID NO: 57970 - RNA, 32 nt, Human
agggcuggauguagcugggauugaguccaugu

SEQ ID NO: 57971 - RNA, 32 nt, Human
agggcuggcagcugccgcugcaccggagagcc

SEQ ID NO: 57972 - RNA, 32 nt, Human
agggcuggcaggaaggggcgagaaaucccagg

SEQ ID NO: 57973 - RNA, 32 nt, Human
agggcuggcccauggcuucacacugggcucag

SEQ ID NO: 57974 - RNA, 32 nt, Human
agggcuggcccucaguagcugcagggagcuuu

SEQ ID NO: 57975 - RNA, 32 nt, Human
agggcuggccuuccucugugcaucacucugcu

SEQ ID NO: 57976 - RNA, 23 nt, Human
agggcuggcggcgagcucugagc

SEQ ID NO: 57977 - RNA, 31 nt, Human
agggcuggcuuaguuauuugccaaagccccu

SEQ ID NO: 57978 - RNA, 19 nt, Human
agggcugggacauccuggg

SEQ ID NO: 57979 - RNA, 22 nt, Human
agggcugggaccagcacggggc

SEQ ID NO: 57980 - RNA, 32 nt, Human
agggcugggacugcugucccuuguacaguuuu

SEQ ID NO: 57981 - RNA, 22 nt, Human
agggcugggacuggguuccagc

SEQ ID NO: 57982 - RNA, 32 nt, Human
agggcugggaggauggaaugcugggcaugaaa

SEQ ID NO: 57983 - RNA, 32 nt, Human
agggcugggauuaaaggcaugagccaccgcac

SEQ ID NO: 57984 - RNA, 32 nt, Human
agggcugggcaaggaaaaagaaaauaaagaca

SEQ ID NO: 57985 - RNA, 32 nt, Human
agggcugggcagcugggagacaggcucauggc

SEQ ID NO: 57986 - RNA, 32 nt, Human
agggcugggcaggacagagcugagggugggca

SEQ ID NO: 57987 - RNA, 32 nt, Human
agggcugggcaggcucagguggcaaggacgga

SEQ ID NO: 57988 - RNA, 32 nt, Human
agggcugggcagguccuggggaggcugagacu

SEQ ID NO: 57989 - RNA, 32 nt, Human
agggcugggcuuuggaguggggcagugcggug

SEQ ID NO: 57990 - RNA, 17 nt, Human
agggcuggggaccccug

SEQ ID NO: 57991 - RNA, 22 nt, Human
agggcuggggcagccucugggc

SEQ ID NO: 57992 - RNA, 25 nt, Human
agggcuggggcagugccagacucug

SEQ ID NO: 57993 - RNA, 18 nt, Human
agggcuggggcggagcug

SEQ ID NO: 57994 - RNA, 19 nt, Human
agggcuggggguucaggga

SEQ ID NO: 57995 - RNA, 32 nt, Human
agggcuggggucuccuggauacaauggagcag

SEQ ID NO: 57996 - RNA, 32 nt, Human
agggcuggggugagauccugaccugugcagag

SEQ ID NO: 57997 - RNA, 32 nt, Human
agggcugggguguggaagggcaagcugcacca

SEQ ID NO: 57998 - RNA, 32 nt, Human
agggcugggguuuugcuacuuguuccuauuua

SEQ ID NO: 57999 - RNA, 32 nt, Human
agggcugggugcccaccaugccccuuccucuu

SEQ ID NO: 58000 - RNA, 32 nt, Human
agggcugguauuccuacccaggaaccuccuuu

SEQ ID NO: 58001 - RNA, 24 nt, Human
agggcuggucuugaacuccugagc

SEQ ID NO: 58002 - RNA, 32 nt, Human
agggcuggugcuggggcuucuucuccugaagg

SEQ ID NO: 58003 - RNA, 32 nt, Human
agggcugucccaagucaauggaaagggaaagg

SEQ ID NO: 58004 - RNA, 32 nt, Human
agggcugucuuuggaagcagggguccugggcu

SEQ ID NO: 58005 - RNA, 32 nt, Human
agggcugugacaccuucuuuggggcucugcag

SEQ ID NO: 58006 - RNA, 32 nt, Human
agggcugugacucuggcugagcccaggaaagc

SEQ ID NO: 58007 - RNA, 17 nt, Human
agggcugugcggagcug

SEQ ID NO: 58008 - RNA, 32 nt, Human
agggcuguggucagccaagaauagaggucaua

SEQ ID NO: 58009 - RNA, 32 nt, Human
agggcuguguaagaaaagucauagguggauac

SEQ ID NO: 58010 - RNA, 32 nt, Human
agggcuguguguuccagaaggcugauaccaug

SEQ ID NO: 58011 - RNA, 25 nt, Human
agggcuguucugucaagguucagcu

SEQ ID NO: 58012 - RNA, 32 nt, Human
agggcuguuggauguauggggagcuggcagag

SEQ ID NO: 58013 - RNA, 32 nt, Human
agggcuguugggggcccucagggaggguucaa

SEQ ID NO: 58014 - RNA, 32 nt, Human
agggcuguuggugagagcagacuugaggugau

SEQ ID NO: 58015 - RNA, 32 nt, Human
agggcuuaaaguuccgggaaucaaagaucaac

SEQ ID NO: 58016 - RNA, 32 nt, Human
agggcuuaucugcaguacacucugccaugugg

SEQ ID NO: 58017 - RNA, 32 nt, Human
agggcuucaaagacuucucagcuucgagcaug

SEQ ID NO: 58018 - RNA, 32 nt, Human
agggcuucaaggcaccaccagugguauuuaau

SEQ ID NO: 58019 - RNA, 32 nt, Human
agggcuucacacccuucaggcugcacccgggc

SEQ ID NO: 58020 - RNA, 32 nt, Human
agggcuucacccaggaugacguacaggcugca

SEQ ID NO: 58021 - RNA, 32 nt, Human
agggcuucaccccgaagcuccaccuucgcucc

SEQ ID NO: 58022 - RNA, 32 nt, Human
agggcuucacucuucuuucacuggauaccaga

SEQ ID NO: 58023 - RNA, 32 nt, Human
agggcuucagccacagcacucgcaaaacccca

SEQ ID NO: 58024 - RNA, 32 nt, Human
agggcuucaggaggaggcugugaggcuggagg

SEQ ID NO: 58025 - RNA, 32 nt, Human
agggcuucaugugucuggaagggagccauuag

SEQ ID NO: 58026 - RNA, 32 nt, Human
agggcuuccaaacagaugcagaagaacccaga

SEQ ID NO: 58027 - RNA, 20 nt, Human
agggcuucccucaucuuccu

SEQ ID NO: 58028 - RNA, 32 nt, Human
agggcuuccgcucuuggcuuccagaaaaguuu

SEQ ID NO: 58029 - RNA, 32 nt, Human
agggcuuccuggagaacauuugcccguauacu

SEQ ID NO: 58030 - RNA, 32 nt, Human
agggcuuccuuccugugugcagccuagggacu

SEQ ID NO: 58031 - RNA, 32 nt, Human
agggcuucgccuucaaggguucuggaggaggg

SEQ ID NO: 58032 - RNA, 32 nt, Human
agggcuucuccuccucugucuuuuggagaacc

SEQ ID NO: 58033 - RNA, 32 nt, Human
agggcuugaagacauggccgaauaggcuacug

SEQ ID NO: 58034 - RNA, 32 nt, Human
agggcuugagacccucccucaaccggacuaau

SEQ ID NO: 58035 - RNA, 32 nt, Human
agggcuugcccaggcaugguggaucaccggag

SEQ ID NO: 58036 - RNA, 32 nt, Human
agggcuugcccccagccuuaggauuucagggu

SEQ ID NO: 58037 - RNA, 24 nt, Human
agggcuugcuuuguuuucuguuga

SEQ ID NO: 58038 - RNA, 32 nt, Human
agggcuugggcuugaacccaaccuucucccuc

SEQ ID NO: 58039 - RNA, 32 nt, Human
agggcuuguggccagccauuucucacagagag

SEQ ID NO: 58040 - RNA, 32 nt, Human
agggcuuuagcaaugagacugcagccugugac

SEQ ID NO: 58041 - RNA, 32 nt, Human
agggcuuuaugugaggauuuuuaaaaauuacc

SEQ ID NO: 58042 - RNA, 32 nt, Human
agggcuuuccaugcccccuccccaccuaaacu

SEQ ID NO: 58043 - RNA, 32 nt, Human
agggcuuucucaauaagccucagcuuucuaag

SEQ ID NO: 58044 - RNA, 32 nt, Human
agggcuuucuuuguaugcaugaucucagugaa

SEQ ID NO: 58045 - RNA, 32 nt, Human
agggcuuugagcugcacuggccccggugcugg

SEQ ID NO: 58046 - RNA, 32 nt, Human
agggcuuuucccagggcuucugauggucagca

SEQ ID NO: 58047 - RNA, 32 nt, Human
agggcuuuucucucacuuacauuuauuucuca

SEQ ID NO: 58048 - RNA, 32 nt, Human
aggggaaaccuacgugcccagagcaggaaacg

SEQ ID NO: 58049 - RNA, 32 nt, Human
aggggaaacugaguuucauccaauguggagag

SEQ ID NO: 58050 - RNA, 32 nt, Human
aggggaaagcaaagggcgucucagggaacccc

SEQ ID NO: 58051 - RNA, 32 nt, Human
aggggaaaggaucuacccuucuccuggcuccc

SEQ ID NO: 58052 - RNA, 32 nt, Human
aggggaaaggguugucucucuccuuucuguug

SEQ ID NO: 58053 - RNA, 32 nt, Human
aggggaacaagaaacuacuucuaacgggaaga

SEQ ID NO: 58054 - RNA, 32 nt, Human
aggggaacagcauuaaaguaucagcuggagcu

SEQ ID NO: 58055 - RNA, 32 nt, Human
aggggaacaggcagaggggcgguaaggaaggg

SEQ ID NO: 58056 - RNA, 32 nt, Human
aggggaacaguuaacaggggagggauacuggg

SEQ ID NO: 58057 - RNA, 32 nt, Human
aggggaaccagcugaacagagccuuucaugug

SEQ ID NO: 58058 - RNA, 32 nt, Human
aggggaacggcucaaagcuaaaaagaaauaaa

SEQ ID NO: 58059 - RNA, 31 nt, Human
aggggaacgucuucacuggguggugucagcu

SEQ ID NO: 58060 - RNA, 20 nt, Human
aggggaagaaaagaagggga

SEQ ID NO: 58061 - RNA, 32 nt, Human
aggggaagaagagagacgagaggaaacaccua

SEQ ID NO: 58062 - RNA, 32 nt, Human
aggggaagaaugaacccaagggcaaugcagag

SEQ ID NO: 58063 - RNA, 32 nt, Human
aggggaagagccucagucaggaggcucugugg

SEQ ID NO: 58064 - RNA, 32 nt, Human
aggggaagagguguuggggcaggaagugaguc

SEQ ID NO: 58065 - RNA, 32 nt, Human
aggggaagcagagggaaauggggccaugugaa

SEQ ID NO: 58066 - RNA, 32 nt, Human
aggggaagccaagauuuggcuaagugugucug

SEQ ID NO: 58067 - RNA, 32 nt, Human
aggggaagcccccagcccugugggucaugguc

SEQ ID NO: 58068 - RNA, 32 nt, Human
aggggaagccuagugggccuggccccucccag

SEQ ID NO: 58069 - RNA, 32 nt, Human
aggggaagcugagagacagaggaggaacucag

SEQ ID NO: 58070 - RNA, 32 nt, Human
aggggaaggaagagaggacaaccuguaacuuu

SEQ ID NO: 58071 - RNA, 32 nt, Human
aggggaaggaaggggcuuugggaucuggaaac

SEQ ID NO: 58072 - RNA, 32 nt, Human
aggggaaggagaaagccuuccucuucucucau

SEQ ID NO: 58073 - RNA, 32 nt, Human
aggggaaggagaagagggagaauggagcagga

SEQ ID NO: 58074 - RNA, 32 nt, Human
aggggaaggagaggcuggcauugguggagcca

SEQ ID NO: 58075 - RNA, 32 nt, Human
aggggaaggaggaggaagaaguguaagaagag

SEQ ID NO: 58076 - RNA, 32 nt, Human
aggggaaggaggaggagcuuaaaagaggcuac

SEQ ID NO: 58077 - RNA, 32 nt, Human
aggggaaggaggcggugguggaggaggcaaag

SEQ ID NO: 58078 - RNA, 32 nt, Human
aggggaaggcuccuggagggcagcccuaccuc

SEQ ID NO: 58079 - RNA, 32 nt, Human
aggggaaggcugaugucaggagagggagaggg

SEQ ID NO: 58080 - RNA, 32 nt, Human
aggggaagggaaugugaccaggucuaggucug

SEQ ID NO: 58081 - RNA, 32 nt, Human
aggggaagggagcuugcaugccuccagccagg

SEQ ID NO: 58082 - RNA, 32 nt, Human
aggggaagggaucauggagagcccucuaaagc

SEQ ID NO: 58083 - RNA, 32 nt, Human
aggggaagggcacacccccugcccaugcaugg

SEQ ID NO: 58084 - RNA, 32 nt, Human
aggggaaggguacugaaaacaccauccauuug

SEQ ID NO: 58085 - RNA, 32 nt, Human
aggggaaggguggucagggugaggauggugag

SEQ ID NO: 58086 - RNA, 32 nt, Human
aggggaaggguugccagaguccugggggcccc

SEQ ID NO: 58087 - RNA, 32 nt, Human
aggggaagugcccucuuucuucacaggauguu

SEQ ID NO: 58088 - RNA, 32 nt, Human
aggggaaugcaccaaggcucucauugaggcca

SEQ ID NO: 58089 - RNA, 32 nt, Human
aggggaaugcuuccagcuuuugcccauucagu

SEQ ID NO: 58090 - RNA, 32 nt, Human
aggggaauggaagagaaaagacagggugggag

SEQ ID NO: 58091 - RNA, 32 nt, Human
aggggaauggcuugaacccaggaggcagaggu

SEQ ID NO: 58092 - RNA, 32 nt, Human
aggggacaacaucuacccucucuuggccugcu

SEQ ID NO: 58093 - RNA, 32 nt, Human
aggggacaagagaaagaggaaaaggagccacu

SEQ ID NO: 58094 - RNA, 32 nt, Human
aggggacaagggaggcaguggcuaguggggug

SEQ ID NO: 58095 - RNA, 32 nt, Human
aggggacacaaccugcuggagugcaauggcac

SEQ ID NO: 58096 - RNA, 32 nt, Human
aggggacacaggccacacaggugugcuuugaa

SEQ ID NO: 58097 - RNA, 32 nt, Human
aggggacacaucugguugccuuggaggcagaa

SEQ ID NO: 58098 - RNA, 17 nt, Human
aggggacagauaaggac

SEQ ID NO: 58099 - RNA, 32 nt, Human
aggggacagcacauaccacccccacccaaccu

SEQ ID NO: 58100 - RNA, 32 nt, Human
aggggacagcagagcagagaggcccagggagg

SEQ ID NO: 58101 - RNA, 32 nt, Human
aggggacagcuuuuggaagaugacaucugcaa

SEQ ID NO: 58102 - RNA, 32 nt, Human
aggggacaggccggggugagugcagcucccca

SEQ ID NO: 58103 - RNA, 32 nt, Human
aggggacaggccugugcgugccauccagaguc

SEQ ID NO: 58104 - RNA, 32 nt, Human
aggggacaguggaggcuggagcuacagcugaa

SEQ ID NO: 58105 - RNA, 32 nt, Human
aggggacauggcagagaugaaagaaagaaaga

SEQ ID NO: 58106 - RNA, 18 nt, Human
aggggacccaaggagcuc

SEQ ID NO: 58107 - RNA, 32 nt, Human
aggggaccccucucacuccugcugcugcccau

SEQ ID NO: 58108 - RNA, 32 nt, Human
aggggacccuccugcacaacaucuccagggga

SEQ ID NO: 58109 - RNA, 32 nt, Human
aggggaccgugugccccaguguuuccaucuug

SEQ ID NO: 58110 - RNA, 20 nt, Human
aggggaccuccuuccagcuc

SEQ ID NO: 58111 - RNA, 32 nt, Human
aggggaccuggaccaggaaccgagccugcucu

SEQ ID NO: 58112 - RNA, 32 nt, Human
aggggaccuggagcugccagcaccaagcguga

SEQ ID NO: 58113 - RNA, 32 nt, Human
aggggaccuggugacagacgaggcugcaggcu

SEQ ID NO: 58114 - RNA, 32 nt, Human
aggggaccuucaauaaacacuuguccagugaa

SEQ ID NO: 58115 - RNA, 32 nt, Human
aggggacgagcucagcccugcgccuuggcucu

SEQ ID NO: 58116 - RNA, 32 nt, Human
aggggacgcagccugcacuacgcgccccaaga

SEQ ID NO: 58117 - RNA, 32 nt, Human
aggggacgcugguagagauggaggaggaggca

SEQ ID NO: 58118 - RNA, 32 nt, Human
aggggacgcugugugugcugcaagugaccccg

SEQ ID NO: 58119 - RNA, 32 nt, Human
aggggacggagcugugcuuagggaagagcaga

SEQ ID NO: 58120 - RNA, 32 nt, Human
aggggacggcucugguuccccacgcugccccu

SEQ ID NO: 58121 - RNA, 32 nt, Human
aggggacgugggcccugcaggcugcaggaggg

SEQ ID NO: 58122 - RNA, 32 nt, Human
aggggacuccaaugacuguugugcucuccccc

SEQ ID NO: 58123 - RNA, 32 nt, Human
aggggacuccagccugggcggggugauaauga

SEQ ID NO: 58124 - RNA, 32 nt, Human
aggggacuccuggaaugugucugugaauaaag

SEQ ID NO: 58125 - RNA, 32 nt, Human
aggggacugccuggccuuccagaugcgaacug

SEQ ID NO: 58126 - RNA, 32 nt, Human
aggggacuggggugggcugagggaacagggca

SEQ ID NO: 58127 - RNA, 32 nt, Human
aggggacuuccgagagaaaaggggcagcugga

SEQ ID NO: 58128 - RNA, 32 nt, Human
aggggagaaaaaugacaaaugacgucuucacc

SEQ ID NO: 58129 - RNA, 21 nt, Human
aggggagaaaaggagccgcuu

SEQ ID NO: 58130 - RNA, 32 nt, Human
aggggagaaauggcgaaugucauacacaugag

SEQ ID NO: 58131 - RNA, 32 nt, Human
aggggagaagcauagagggccugugagcucac

SEQ ID NO: 58132 - RNA, 19 nt, Human
aggggagaagugggacaaa

SEQ ID NO: 58133 - RNA, 32 nt, Human
aggggagaaguguccccaggagguugggggag

SEQ ID NO: 58134 - RNA, 32 nt, Human
aggggagaaguuugggguuucagucccagggc

SEQ ID NO: 58135 - RNA, 32 nt, Human
aggggagaccuggccaagggagccagccagcg

SEQ ID NO: 58136 - RNA, 32 nt, Human
aggggagacgaaggagaagcaaacacugcgca

SEQ ID NO: 58137 - RNA, 32 nt, Human
aggggagacgccgcggggccgugaccuuggcg

SEQ ID NO: 58138 - RNA, 32 nt, Human
aggggagacuagccuggaaagacugcagagcu

SEQ ID NO: 58139 - RNA, 32 nt, Human
aggggagacugaggcugaggcuggggaacauc

SEQ ID NO: 58140 - RNA, 22 nt, Human
aggggagagaagggucauagcu

SEQ ID NO: 58141 - RNA, 21 nt, Human
aggggagagaagguggucugc

SEQ ID NO: 58142 - RNA, 32 nt, Human
aggggagagaccagcucuccagccuggcagga

SEQ ID NO: 58143 - RNA, 32 nt, Human
aggggagagagaaagagagguggggagagggg

SEQ ID NO: 58144 - RNA, 32 nt, Human
aggggagagcccacuggguagaaggaacaggg

SEQ ID NO: 58145 - RNA, 32 nt, Human
aggggagagcggacugugccagugagucggcg

SEQ ID NO: 58146 - RNA, 32 nt, Human
aggggagaggagaaggaauacugcuucaaguu

SEQ ID NO: 58147 - RNA, 20 nt, Human
aggggagagggaaacgugcc

SEQ ID NO: 58148 - RNA, 32 nt, Human
aggggagaguccauugaguuugccuuucagug

SEQ ID NO: 58149 - RNA, 21 nt, Human
aggggagauccugggaucaaa

SEQ ID NO: 58150 - RNA, 32 nt, Human
aggggagaugaagcccacagagcuggaaagag

SEQ ID NO: 58151 - RNA, 32 nt, Human
aggggagaugaguuugucuguccucugcugag

SEQ ID NO: 58152 - RNA, 32 nt, Human
aggggagcaaaagagaaaaggagccaggcugg

SEQ ID NO: 58153 - RNA, 19 nt, Human
aggggagcacccugggcca

SEQ ID NO: 58154 - RNA, 32 nt, Human
aggggagcaguggagguaagggcuccacccca

SEQ ID NO: 58155 - RNA, 32 nt, Human
aggggagcaguggccaucauccucccgccagg

SEQ ID NO: 58156 - RNA, 32 nt, Human
aggggagcagugugaggggaccaccuguuuua

SEQ ID NO: 58157 - RNA, 32 nt, Human
aggggagcccaagggcuguuucugccacuugc

SEQ ID NO: 58158 - RNA, 32 nt, Human
aggggagccccaggaaggcagcauucauaagc

SEQ ID NO: 58159 - RNA, 32 nt, Human
aggggagcccuucuccgcucagucuccaggag

SEQ ID NO: 58160 - RNA, 32 nt, Human
aggggagccggggcuuugcccugcugcugucc

SEQ ID NO: 58161 - RNA, 32 nt, Human
aggggagcgggguggagggaacacgugcagug

SEQ ID NO: 58162 - RNA, 32 nt, Human
aggggagcgugggauggggaccgugggaaaga

SEQ ID NO: 58163 - RNA, 32 nt, Human
aggggagcucaguuuucaacucuucccugaac

SEQ ID NO: 58164 - RNA, 17 nt, Human
aggggagcuccaagccc

SEQ ID NO: 58165 - RNA, 32 nt, Human
aggggagcucugagaggccagcacaggaaacc

SEQ ID NO: 58166 - RNA, 32 nt, Human
aggggagcucugucuguccguguuauuuauug

SEQ ID NO: 58167 - RNA, 32 nt, Human
aggggagcuucugcaaugggaguugccacaac

SEQ ID NO: 58168 - RNA, 32 nt, Human
aggggagcuugggucccugaacacugucauuc

SEQ ID NO: 58169 - RNA, 32 nt, Human
aggggaggaaaggcuccucucuuuagucacca

SEQ ID NO: 58170 - RNA, 32 nt, Human
aggggaggaggaggaggaggagaggagcaguc

SEQ ID NO: 58171 - RNA, 32 nt, Human
aggggaggaggaggaggaggaggaggucgugg

SEQ ID NO: 58172 - RNA, 32 nt, Human
aggggaggagggagcccugaaaagagguacua

SEQ ID NO: 58173 - RNA, 32 nt, Human
aggggaggagggaggaagaauagaggaaaaca

SEQ ID NO: 58174 - RNA, 32 nt, Human
aggggaggaguggccccagaauucagcacgca

SEQ ID NO: 58175 - RNA, 32 nt, Human
aggggaggagugucauuuuugagaaucuuggg

SEQ ID NO: 58176 - RNA, 32 nt, Human
aggggaggcagaaaggagaggucuauagcucc

SEQ ID NO: 58177 - RNA, 32 nt, Human
aggggaggcaggaagaaaggaaggaaggaaag

SEQ ID NO: 58178 - RNA, 32 nt, Human
aggggaggcccagccuccgaggagaccaggaa

SEQ ID NO: 58179 - RNA, 32 nt, Human
aggggaggccgaggugggaggaucauuggauc

SEQ ID NO: 58180 - RNA, 32 nt, Human
aggggaggcugaagcaggaggaucacuugagg

SEQ ID NO: 58181 - RNA, 32 nt, Human
aggggaggcugaggcaggagaaucgcuugaac

SEQ ID NO: 58182 - RNA, 30 nt, Human
aggggagggagccacagaaagcagaguggg

SEQ ID NO: 58183 - RNA, 32 nt, Human
aggggagggaggaggaggcggcgugcagggag

SEQ ID NO: 58184 - RNA, 32 nt, Human
aggggagggaggcggggguggacagggaggca

SEQ ID NO: 58185 - RNA, 32 nt, Human
aggggagggagggagaaggaaaagugugagau

SEQ ID NO: 58186 - RNA, 32 nt, Human
aggggagggagggagaguggaggguuugacgg

SEQ ID NO: 58187 - RNA, 32 nt, Human
aggggagggcaggcccggccuggaggggugcu

SEQ ID NO: 58188 - RNA, 32 nt, Human
aggggagggccagagcagggccuucuaaauca

SEQ ID NO: 58189 - RNA, 32 nt, Human
aggggaggggcaagugggacccugccaccugg

SEQ ID NO: 58190 - RNA, 32 nt, Human
aggggaggggcgauaaauaccuuugauuguaa

SEQ ID NO: 58191 - RNA, 32 nt, Human
aggggagggucugggugcccaggaguagaaua

SEQ ID NO: 58192 - RNA, 32 nt, Human
aggggagguggaggccagaggacagggagaca

SEQ ID NO: 58193 - RNA, 32 nt, Human
aggggagguggaguuggaaauguggguguucc

SEQ ID NO: 58194 - RNA, 32 nt, Human
aggggaguagauaugagagggagccgcuccug

SEQ ID NO: 58195 - RNA, 32 nt, Human
aggggagucucaaagcuggagaguuuaccaac

SEQ ID NO: 58196 - RNA, 32 nt, Human
aggggagugccaccccacccgugcuccacgag

SEQ ID NO: 58197 - RNA, 32 nt, Human
aggggagugggauguagggcugguauucuuug

SEQ ID NO: 58198 - RNA, 32 nt, Human
aggggagugggccggagcugagccccagcgug

SEQ ID NO: 58199 - RNA, 32 nt, Human
aggggaguucuccugggacagugggcucugca

SEQ ID NO: 58200 - RNA, 32 nt, Human
aggggaguuucugcuucuucccugccucugcc

SEQ ID NO: 58201 - RNA, 24 nt, Human
aggggauagcguuuggcuguguug

SEQ ID NO: 58202 - RNA, 32 nt, Human
aggggauauggggacgugacugggacagguuc

SEQ ID NO: 58203 - RNA, 32 nt, Human
aggggaucacuugaggccaggaguuuaagacc

SEQ ID NO: 58204 - RNA, 32 nt, Human
aggggaucaggaccagccucgcaagcauuuua

SEQ ID NO: 58205 - RNA, 32 nt, Human
aggggaucccagggggcacagagcagccccuu

SEQ ID NO: 58206 - RNA, 32 nt, Human
aggggauccgggccuugcgugcagccucccaa

SEQ ID NO: 58207 - RNA, 32 nt, Human
aggggaucggagggggauugaagaaugcgcca

SEQ ID NO: 58208 - RNA, 32 nt, Human
aggggaucuaaauccucauuuaucucuucuau

SEQ ID NO: 58209 - RNA, 32 nt, Human
aggggaucucauuauguugcccaaacuggucg

SEQ ID NO: 58210 - RNA, 32 nt, Human
aggggaugacaugcccaggugucagcucaaag

SEQ ID NO: 58211 - RNA, 32 nt, Human
aggggaugcagagcccugcccagcaccaccac

SEQ ID NO: 58212 - RNA, 19 nt, Human
aggggaugccgccaccaga

SEQ ID NO: 58213 - RNA, 32 nt, Human
aggggaugcugaggccgguccccagaggagca

SEQ ID NO: 58214 - RNA, 20 nt, Human
aggggauggaccaagaauuu

SEQ ID NO: 58215 - RNA, 32 nt, Human
aggggauggccagccuauguugcugacuccau

SEQ ID NO: 58216 - RNA, 32 nt, Human
aggggauggcgcuaggggacuuggggauuucu

SEQ ID NO: 58217 - RNA, 32 nt, Human
aggggauggggacccagaggugcaguggccgc

SEQ ID NO: 58218 - RNA, 32 nt, Human
aggggaugggggcaucccugugccucacucag

SEQ ID NO: 58219 - RNA, 32 nt, Human
aggggauggugcgauagauucaagauggagag

SEQ ID NO: 58220 - RNA, 24 nt, Human
aggggaugugcagcaucugugugg

SEQ ID NO: 58221 - RNA, 32 nt, Human
aggggaugugcuguagccuggugcagaguccc

SEQ ID NO: 58222 - RNA, 32 nt, Human
aggggauuaaaaccagcccaauugucccauag

SEQ ID NO: 58223 - RNA, 32 nt, Human
aggggauuacugagacagggaagagaagugca

SEQ ID NO: 58224 - RNA, 32 nt, Human
aggggauuacugugagcucacagcaggauagg

SEQ ID NO: 58225 - RNA, 32 nt, Human
aggggauucuggcuuuuccugccagagccacc

SEQ ID NO: 58226 - RNA, 32 nt, Human
aggggauuggggagcccaggaggcagccuucc

SEQ ID NO: 58227 - RNA, 32 nt, Human
aggggauuuccuccucuccuuccuccugucga

SEQ ID NO: 58228 - RNA, 32 nt, Human
aggggauuugggcuccaugagcuccuugaggg

SEQ ID NO: 58229 - RNA, 32 nt, Human
aggggauuuuaguuccaagcagggacccuggu

SEQ ID NO: 58230 - RNA, 32 nt, Human
aggggcaaaaugugcagauacuucauuuuugu

SEQ ID NO: 58231 - RNA, 32 nt, Human
aggggcaaagagaagaagggcccccgucagau

SEQ ID NO: 58232 - RNA, 22 nt, Human
aggggcaacugagaaagaacag

SEQ ID NO: 58233 - RNA, 21 nt, Human
aggggcaaggagccccgcggc

SEQ ID NO: 58234 - RNA, 32 nt, Human
aggggcaaguaggcacaguaagggaauuuucu

SEQ ID NO: 58235 - RNA, 19 nt, Human
aggggcaagugggacccug

SEQ ID NO: 58236 - RNA, 32 nt, Human
aggggcaauggcugcuuucagcuuugaggaca

SEQ ID NO: 58237 - RNA, 18 nt, Human
aggggcacacagaaauuu

SEQ ID NO: 58238 - RNA, 32 nt, Human
aggggcacagcccaguaggaagauaguaucuu

SEQ ID NO: 58239 - RNA, 20 nt, Human
aggggcaccaagaaccugcu

SEQ ID NO: 58240 - RNA, 32 nt, Human
aggggcaccacagcccuuaaggcacgagggaa

SEQ ID NO: 58241 - RNA, 32 nt, Human
aggggcaccacuacuccagcccagaaggaaag

SEQ ID NO: 58242 - RNA, 20 nt, Human
aggggcaccucuggaggcag

SEQ ID NO: 58243 - RNA, 32 nt, Human
aggggcacgagaagagaggagcagggaggagg

SEQ ID NO: 58244 - RNA, 32 nt, Human
aggggcacgcaggccgaccuguccucgagauc

SEQ ID NO: 58245 - RNA, 32 nt, Human
aggggcacgcaggccguccuguccucgagauc

SEQ ID NO: 58246 - RNA, 32 nt, Human
aggggcacucauuucuuagcagccucucuaca

SEQ ID NO: 58247 - RNA, 32 nt, Human
aggggcacuccaggcucugggcucagacggcu

SEQ ID NO: 58248 - RNA, 32 nt, Human
aggggcacuggguggggagggagguggaggag

SEQ ID NO: 58249 - RNA, 32 nt, Human
aggggcacugucugaacuccugacugucagga

SEQ ID NO: 58250 - RNA, 32 nt, Human
aggggcacuguggccagagaaaugcuuccacg

SEQ ID NO: 58251 - RNA, 19 nt, Human
aggggcacuucagaugaga

SEQ ID NO: 58252 - RNA, 32 nt, Human
aggggcagaagagcgcgagggagcgcggggca

SEQ ID NO: 58253 - RNA, 32 nt, Human
aggggcagaagcaagaagagauuguuuugaag

SEQ ID NO: 58254 - RNA, 32 nt, Human
aggggcagagcuggggcucugggaagaggcug

SEQ ID NO: 58255 - RNA, 32 nt, Human
aggggcagagucagggcuggagguagagaccu

SEQ ID NO: 58256 - RNA, 32 nt, Human
aggggcagagucaggggcuggccagagggucu

SEQ ID NO: 58257 - RNA, 32 nt, Human
aggggcagagugagucacggcccagacugcga

SEQ ID NO: 58258 - RNA, 22 nt, Human
aggggcagcaggagaagaugca

SEQ ID NO: 58259 - RNA, 32 nt, Human
aggggcagcaggaggccagggacccgggcugg

SEQ ID NO: 58260 - RNA, 32 nt, Human
aggggcagcagucuugaggagcagggagagga

SEQ ID NO: 58261 - RNA, 32 nt, Human
aggggcagccaggaguuuuugaggcagguggu

SEQ ID NO: 58262 - RNA, 32 nt, Human
aggggcagcccaucccucuucucccuccuggg

SEQ ID NO: 58263 - RNA, 32 nt, Human
aggggcagccuggggacuugagggaggaugca

SEQ ID NO: 58264 - RNA, 32 nt, Human
aggggcagccugguggccagagcugggggcac

SEQ ID NO: 58265 - RNA, 32 nt, Human
aggggcagcuacugcgagaacuucaggccaau

SEQ ID NO: 58266 - RNA, 32 nt, Human
aggggcagcucccgagggcacugugaaggcuc

SEQ ID NO: 58267 - RNA, 18 nt, Human
aggggcagcucucuggga

SEQ ID NO: 58268 - RNA, 32 nt, Human
aggggcagcugugagcuuugcagccagccccg

SEQ ID NO: 58269 - RNA, 32 nt, Human
aggggcaggaggagcugggcagaggagcccgu

SEQ ID NO: 58270 - RNA, 32 nt, Human
aggggcaggaugggggcaggagaguuagcaaa

SEQ ID NO: 58271 - RNA, 32 nt, Human
aggggcaggcagcuaggcagggagggggcugg

SEQ ID NO: 58272 - RNA, 23 nt, Human
aggggcaggccucaaagcccgcc

SEQ ID NO: 58273 - RNA, 32 nt, Human
aggggcaggcuggcugggaaacucagcccaga

SEQ ID NO: 58274 - RNA, 32 nt, Human
aggggcaggcuuugcgagcugcauuuggccuu

SEQ ID NO: 58275 - RNA, 32 nt, Human
aggggcagggagggcgcagaacuccgcuucug

SEQ ID NO: 58276 - RNA, 18 nt, Human
aggggcagggcccaggag

SEQ ID NO: 58277 - RNA, 20 nt, Human
aggggcagggccggcccgcc

SEQ ID NO: 58278 - RNA, 32 nt, Human
aggggcaggggagagacucucuccccaccacc

SEQ ID NO: 58279 - RNA, 18 nt, Human
aggggcaggucccaggag

SEQ ID NO: 58280 - RNA, 32 nt, Human
aggggcaggugcgagggagggaagagaagaaa

SEQ ID NO: 58281 - RNA, 32 nt, Human
aggggcagugaugccuuugaggggaaggagga

SEQ ID NO: 58282 - RNA, 32 nt, Human
aggggcaguguuagagcagggcuggucauacc

SEQ ID NO: 58283 - RNA, 32 nt, Human
aggggcaguuccucuuuccuucccaagcaccg

SEQ ID NO: 58284 - RNA, 32 nt, Human
aggggcaguuuaugagaaauucagagaaacau

SEQ ID NO: 58285 - RNA, 22 nt, Human
aggggcaucguuugaagaacag

SEQ ID NO: 58286 - RNA, 32 nt, Human
aggggcaucugugugucccgucacacacugca

SEQ ID NO: 58287 - RNA, 21 nt, Human
aggggcaugaggguauuuuuu

SEQ ID NO: 58288 - RNA, 32 nt, Human
aggggcauggacacgugaugugcugcucugua

SEQ ID NO: 58289 - RNA, 32 nt, Human
aggggcauggggcaccuggugcugcugagggg

SEQ ID NO: 58290 - RNA, 18 nt, Human
aggggcauuuucauugca

SEQ ID NO: 58291 - RNA, 23 nt, Human
aggggccaaggcaggaggaucac

SEQ ID NO: 58292 - RNA, 32 nt, Human
aggggccaaggcaggaggaucacuugaggcca

SEQ ID NO: 58293 - RNA, 32 nt, Human
aggggccaauccagccuccaacucuccuagcc

SEQ ID NO: 58294 - RNA, 32 nt, Human
aggggccacagcguuagacagugcagagagaa

SEQ ID NO: 58295 - RNA, 32 nt, Human
aggggccaccaccacacaugccuuucuggggu

SEQ ID NO: 58296 - RNA, 32 nt, Human
aggggccacccggggcacaggaaagggccgcu

SEQ ID NO: 58297 - RNA, 22 nt, Human
aggggccaccggggucuaaugg

SEQ ID NO: 58298 - RNA, 32 nt, Human
aggggccacugagacguuucugccucccucuu

SEQ ID NO: 58299 - RNA, 32 nt, Human
aggggccagaaaccugcauuuuuaacauggag

SEQ ID NO: 58300 - RNA, 32 nt, Human
aggggccagacuccagccuguuuccccagccc

SEQ ID NO: 58301 - RNA, 32 nt, Human
aggggccaggagaggaagcugaggggcagagg

SEQ ID NO: 58302 - RNA, 32 nt, Human
aggggccaggcagagggcgcggggcugggcug

SEQ ID NO: 58303 - RNA, 20 nt, Human
aggggccagggacugaguga

SEQ ID NO: 58304 - RNA, 32 nt, Human
aggggccaggggaaguuuucaggccuucauca

SEQ ID NO: 58305 - RNA, 32 nt, Human
aggggccaggggaucccucucucccuagugcc

SEQ ID NO: 58306 - RNA, 18 nt, Human
aggggccaggugcagugg

SEQ ID NO: 58307 - RNA, 23 nt, Human
aggggccaugcagcuggcguagg

SEQ ID NO: 58308 - RNA, 21 nt, Human
aggggccaugcauucagaugg

SEQ ID NO: 58309 - RNA, 28 nt, Human
aggggccauggugcugccuguccaacau

SEQ ID NO: 58310 - RNA, 22 nt, Human
aggggccauguggaaaucaaga

SEQ ID NO: 58311 - RNA, 24 nt, Human
aggggccauuauuuaaccugugug

SEQ ID NO: 58312 - RNA, 32 nt, Human
aggggccauucaacuaugcugguuugguuuga

SEQ ID NO: 58313 - RNA, 21 nt, Human
aggggccauuucugccuugug

SEQ ID NO: 58314 - RNA, 32 nt, Human
aggggcccacaccucaagccuggaccagccac

SEQ ID NO: 58315 - RNA, 23 nt, Human
aggggcccacucaggacaggaac

SEQ ID NO: 58316 - RNA, 20 nt, Human
aggggcccagaccugggccc

SEQ ID NO: 58317 - RNA, 32 nt, Human
aggggcccagggcaggacccagccuggacuug

SEQ ID NO: 58318 - RNA, 32 nt, Human
aggggcccaguucucagcagcagacacucugu

SEQ ID NO: 58319 - RNA, 32 nt, Human
aggggccccaacuuagcaucccuucccuuccg

SEQ ID NO: 58320 - RNA, 32 nt, Human
aggggcccccaacacaccaccugccuugggaa

SEQ ID NO: 58321 - RNA, 32 nt, Human
aggggcccccuuggugaccccagcacauucac

SEQ ID NO: 58322 - RNA, 21 nt, Human
aggggccccgcacacccgcga

SEQ ID NO: 58323 - RNA, 32 nt, Human
aggggccccugcuucuccagccuggaccccca

SEQ ID NO: 58324 - RNA, 32 nt, Human
aggggccccuggcgagaaccgcacacaccccu

SEQ ID NO: 58325 - RNA, 32 nt, Human
aggggcccgaggagaccgugaggcucuggccu

SEQ ID NO: 58326 - RNA, 32 nt, Human
aggggcccgagguggcagaggaagggggcugc

SEQ ID NO: 58327 - RNA, 32 nt, Human
aggggcccgggccagggccacagggagccaug

SEQ ID NO: 58328 - RNA, 32 nt, Human
aggggcccugaaugucaugaaggcuugagguc

SEQ ID NO: 58329 - RNA, 21 nt, Human
aggggcccugaauuuaugugg

SEQ ID NO: 58330 - RNA, 32 nt, Human
aggggcccugcaccacagcucuccaggacaua

SEQ ID NO: 58331 - RNA, 32 nt, Human
aggggcccugcaggcaggucuguggguucugg

SEQ ID NO: 58332 - RNA, 19 nt, Human
aggggccgagcccgcgcgg

SEQ ID NO: 58333 - RNA, 32 nt, Human
aggggccgagggggcuugcccacccaccccga

SEQ ID NO: 58334 - RNA, 32 nt, Human
aggggccggaggucucacgcugggaaggagcc

SEQ ID NO: 58335 - RNA, 32 nt, Human
aggggccggccugcuggccuggggcgugcgga

SEQ ID NO: 58336 - RNA, 32 nt, Human
aggggccggcuuugcgagcugcauuuggccuu

SEQ ID NO: 58337 - RNA, 32 nt, Human
aggggccggcuuuugcuuuaaaagcuuuaaaa

SEQ ID NO: 58338 - RNA, 21 nt, Human
aggggccgguaaaccuggugg

SEQ ID NO: 58339 - RNA, 32 nt, Human
aggggccguggcuucauucuugaagucaguga

SEQ ID NO: 58340 - RNA, 32 nt, Human
aggggccuaaccuagagcagguuuccauagug

SEQ ID NO: 58341 - RNA, 19 nt, Human
aggggccuacccagaagcc

SEQ ID NO: 58342 - RNA, 32 nt, Human
aggggccuacggaggcgcaggagcggugguga

SEQ ID NO: 58343 - RNA, 32 nt, Human
aggggccucacagagggcagggccagggucca

SEQ ID NO: 58344 - RNA, 32 nt, Human
aggggccuccaucccucuuacucauuuguagu

SEQ ID NO: 58345 - RNA, 32 nt, Human
aggggccuccaucccuuuuacucauuuguagu

SEQ ID NO: 58346 - RNA, 22 nt, Human
aggggccuccgggggcuuccug

SEQ ID NO: 58347 - RNA, 32 nt, Human
aggggccuccuugugucugaugcacagaugug

SEQ ID NO: 58348 - RNA, 32 nt, Human
aggggccucgggggaagagaaggggccacuuc

SEQ ID NO: 58349 - RNA, 32 nt, Human
aggggccucuacugccugucgcuggaccaccc

SEQ ID NO: 58350 - RNA, 25 nt, Human
aggggccugagcaguccuuggccug

SEQ ID NO: 58351 - RNA, 19 nt, Human
aggggccugagcccaggcc

SEQ ID NO: 58352 - RNA, 32 nt, Human
aggggccugccacccagccccuccagugcccu

SEQ ID NO: 58353 - RNA, 32 nt, Human
aggggccugcucccagcugccacgcucuauca

SEQ ID NO: 58354 - RNA, 32 nt, Human
aggggccugcugggugguggccaucugcgacc

SEQ ID NO: 58355 - RNA, 32 nt, Human
aggggccuggacugcaggccugaccugcuccc

SEQ ID NO: 58356 - RNA, 32 nt, Human
aggggccuggagcuaucuccaucuucagcucc

SEQ ID NO: 58357 - RNA, 20 nt, Human
aggggccuggagucguggcc

SEQ ID NO: 58358 - RNA, 22 nt, Human
aggggccuggaucuauugccua

SEQ ID NO: 58359 - RNA, 22 nt, Human
aggggccuggcacagcuggccu

SEQ ID NO: 58360 - RNA, 18 nt, Human
aggggccuggccucagcc

SEQ ID NO: 58361 - RNA, 32 nt, Human
aggggccuggccuggguggggcagggccuggc

SEQ ID NO: 58362 - RNA, 21 nt, Human
aggggccuggcuguggccugu

SEQ ID NO: 58363 - RNA, 32 nt, Human
aggggccuggcuugauggggucuugaagaggg

SEQ ID NO: 58364 - RNA, 22 nt, Human
aggggccugggagcccuguggc

SEQ ID NO: 58365 - RNA, 32 nt, Human
aggggccugggagcccuguggcuggaucugag

SEQ ID NO: 58366 - RNA, 32 nt, Human
aggggccugggcagagggccuggaccugggau

SEQ ID NO: 58367 - RNA, 32 nt, Human
aggggccugggcagggcggugucuggcagcag

SEQ ID NO: 58368 - RNA, 20 nt, Human
aggggccugggcugcugcuc

SEQ ID NO: 58369 - RNA, 32 nt, Human
aggggccuggggagacggaagggcgccagggg

SEQ ID NO: 58370 - RNA, 19 nt, Human
aggggccuggggcugggcc

SEQ ID NO: 58371 - RNA, 32 nt, Human
aggggccuguaacccagcuacucgugaggcca

SEQ ID NO: 58372 - RNA, 21 nt, Human
aggggccugugcagugacuga

SEQ ID NO: 58373 - RNA, 32 nt, Human
aggggccuguguucucagccuccugaguacuu

SEQ ID NO: 58374 - RNA, 32 nt, Human
aggggccuguuuccuguucucaucuccgaagc

SEQ ID NO: 58375 - RNA, 32 nt, Human
aggggccuuaucuauucuuuggauaauucugg

SEQ ID NO: 58376 - RNA, 29 nt, Human
aggggccuugugucugugccugccugucu

SEQ ID NO: 58377 - RNA, 32 nt, Human
aggggccuugugucugugccugccugucugac

SEQ ID NO: 58378 - RNA, 20 nt, Human
aggggcgaguagcagcucug

SEQ ID NO: 58379 - RNA, 32 nt, Human
aggggcgcagcgggaccagccccacauuccac

SEQ ID NO: 58380 - RNA, 32 nt, Human
aggggcgccagccugaagcugccaggcccuga

SEQ ID NO: 58381 - RNA, 22 nt, Human
aggggcgccggggcagugucca

SEQ ID NO: 58382 - RNA, 19 nt, Human
aggggcgcgcaaaggggga

SEQ ID NO: 58383 - RNA, 32 nt, Human
aggggcgcuagccuggcccgacugggcgaguc

SEQ ID NO: 58384 - RNA, 32 nt, Human
aggggcgcuccaggagccucugcaugaggcgg

SEQ ID NO: 58385 - RNA, 32 nt, Human
aggggcgcucuugacacugugccuucauuuuc

SEQ ID NO: 58386 - RNA, 32 nt, Human
aggggcgcugauuucauaggaucuggugcugu

SEQ ID NO: 58387 - RNA, 32 nt, Human
aggggcggaggaaaggagggggccggucccgg

SEQ ID NO: 58388 - RNA, 32 nt, Human
aggggcggaggacccgcgguugaaggaggcag

SEQ ID NO: 58389 - RNA, 21 nt, Human
aggggcggaggacugcccacc

SEQ ID NO: 58390 - RNA, 32 nt, Human
aggggcggaggcacagcugcuuccagcagcca

SEQ ID NO: 58391 - RNA, 32 nt, Human
aggggcggaggcggaggcagagguggaggcgc

SEQ ID NO: 58392 - RNA, 32 nt, Human
aggggcggaugcagccuaccuccugggcagug

SEQ ID NO: 58393 - RNA, 21 nt, Human
aggggcggcccggagccagcc

SEQ ID NO: 58394 - RNA, 22 nt, Human
aggggcggcggagagcgcgccg

SEQ ID NO: 58395 - RNA, 32 nt, Human
aggggcggcggagagcgcgccgagccgcggcc

SEQ ID NO: 58396 - RNA, 32 nt, Human
aggggcggcugaaguguggggucgcugguugg

SEQ ID NO: 58397 - RNA, 32 nt, Human
aggggcggcuguaggcgcagcuucagcagacu

SEQ ID NO: 58398 - RNA, 32 nt, Human
aggggcgggagagaggcaagggguggacggag

SEQ ID NO: 58399 - RNA, 22 nt, Human
aggggcggggacaccugccagg

SEQ ID NO: 58400 - RNA, 32 nt, Human
aggggcggggagaaggcgggggcgcugcaugc

SEQ ID NO: 58401 - RNA, 23 nt, Human
aggggcggggcagggagcccgcc

SEQ ID NO: 58402 - RNA, 32 nt, Human
aggggcggggucaaacacuguugcccaggcug

SEQ ID NO: 58403 - RNA, 22 nt, Human
aggggcgugaguucauccuucu

SEQ ID NO: 58404 - RNA, 32 nt, Human
aggggcgugcuggggugguuugggagugcaca

SEQ ID NO: 58405 - RNA, 32 nt, Human
aggggcguggagcccccagagcuggaagaggg

SEQ ID NO: 58406 - RNA, 22 nt, Human
aggggcguggguucauccuucu

SEQ ID NO: 58407 - RNA, 32 nt, Human
aggggcuaaagaggaggacgaagaaaagcaga

SEQ ID NO: 58408 - RNA, 32 nt, Human
aggggcuaggacuagggugagagggagugggg

SEQ ID NO: 58409 - RNA, 32 nt, Human
aggggcuauccagagauucccaguaggagaca

SEQ ID NO: 58410 - RNA, 32 nt, Human
aggggcuauuccugucuuaggcgauuuguggg

SEQ ID NO: 58411 - RNA, 32 nt, Human
aggggcucaagaccagccuggccaacuuggug

SEQ ID NO: 58412 - RNA, 31 nt, Human
aggggcucaauaaaugcuuguugaacuugaa

SEQ ID NO: 58413 - RNA, 18 nt, Human
aggggcucaaucucagca

SEQ ID NO: 58414 - RNA, 32 nt, Human
aggggcucaccuaggugagugcacagccugug

SEQ ID NO: 58415 - RNA, 32 nt, Human
aggggcuccagccuggcaguuucugcguguua

SEQ ID NO: 58416 - RNA, 32 nt, Human
aggggcuccaggcccagcuagguggaucucca

SEQ ID NO: 58417 - RNA, 32 nt, Human
aggggcuccagguagaaugagcuguauccuug

SEQ ID NO: 58418 - RNA, 32 nt, Human
aggggcucccacugcuucuggucuccagggac

SEQ ID NO: 58419 - RNA, 32 nt, Human
aggggcuccccgggggcagacaccugugcacc

SEQ ID NO: 58420 - RNA, 32 nt, Human
aggggcucccugauuccccuaaagcuaugcac

SEQ ID NO: 58421 - RNA, 32 nt, Human
aggggcucccuucagguggcccccucuguggu

SEQ ID NO: 58422 - RNA, 32 nt, Human
aggggcuccuagugggccaggcugaccgcaga

SEQ ID NO: 58423 - RNA, 29 nt, Human
aggggcucggcugccucauccccuggcgg

SEQ ID NO: 58424 - RNA, 32 nt, Human
aggggcucucuccccucucccaucucaagaug

SEQ ID NO: 58425 - RNA, 32 nt, Human
aggggcucugccacucccagccugggaaugaa

SEQ ID NO: 58426 - RNA, 32 nt, Human
aggggcucuggagugccuuagagcagagcugc

SEQ ID NO: 58427 - RNA, 32 nt, Human
aggggcucuucagaccacacagcccugaccgg

SEQ ID NO: 58428 - RNA, 32 nt, Human
aggggcugaagaggaagguggaaggagauaaa

SEQ ID NO: 58429 - RNA, 32 nt, Human
aggggcugacagugccuggggccagagcuggg

SEQ ID NO: 58430 - RNA, 32 nt, Human
aggggcugacugccgggagacggagccaggcu

SEQ ID NO: 58431 - RNA, 26 nt, Human
aggggcugagcuggucuuucacugca

SEQ ID NO: 58432 - RNA, 32 nt, Human
aggggcugcacucagacucccuggccaagcaa

SEQ ID NO: 58433 - RNA, 32 nt, Human
aggggcugcaggaagggggaaugaggaaugau

SEQ ID NO: 58434 - RNA, 32 nt, Human
aggggcugccgcagaggccggagaccuccugg

SEQ ID NO: 58435 - RNA, 32 nt, Human
aggggcugcuacugcugccgcugcugccgcug

SEQ ID NO: 58436 - RNA, 32 nt, Human
aggggcugcuccaugcggcauucuuggagguc

SEQ ID NO: 58437 - RNA, 32 nt, Human
aggggcugcugggcaguggccugggaaugggg

SEQ ID NO: 58438 - RNA, 32 nt, Human
aggggcuggaaagaauggacuggcagagugug

SEQ ID NO: 58439 - RNA, 20 nt, Human
aggggcuggaggaccgagag

SEQ ID NO: 58440 - RNA, 32 nt, Human
aggggcuggaggccuuuuccugacugauuacu

SEQ ID NO: 58441 - RNA, 32 nt, Human
aggggcuggccucugcugagcugcuucccagu

SEQ ID NO: 58442 - RNA, 32 nt, Human
aggggcuggcuaaugugcaguggagcggggau

SEQ ID NO: 58443 - RNA, 32 nt, Human
aggggcuggcuaguggggaaauauguaguacc

SEQ ID NO: 58444 - RNA, 31 nt, Human
aggggcuggcuguugagauggguggacagga

SEQ ID NO: 58445 - RNA, 21 nt, Human
aggggcugggaagaaggggga

SEQ ID NO: 58446 - RNA, 32 nt, Human
aggggcugggcacaagcaaauaaagucuggcu

SEQ ID NO: 58447 - RNA, 32 nt, Human
aggggcugggcccgggguccugcaggcggcac

SEQ ID NO: 58448 - RNA, 32 nt, Human
aggggcugggcuggacaccagggcccgcccuc

SEQ ID NO: 58449 - RNA, 32 nt, Human
aggggcuggggagggggacagggagugagugu

SEQ ID NO: 58450 - RNA, 32 nt, Human
aggggcuggggagggggaggggcaggagcuug

SEQ ID NO: 58451 - RNA, 32 nt, Human
aggggcugggggaaaugacccgggaggguccc

SEQ ID NO: 58452 - RNA, 32 nt, Human
aggggcuggggguacacacagcucaggagaca

SEQ ID NO: 58453 - RNA, 32 nt, Human
aggggcugggguguuuaccuggagccuggaca

SEQ ID NO: 58454 - RNA, 32 nt, Human
aggggcugggugagcaggccagcugggcuaug

SEQ ID NO: 58455 - RNA, 23 nt, Human
aggggcugggugugguggcucau

SEQ ID NO: 58456 - RNA, 32 nt, Human
aggggcuggugggcaccaagagccaauggagu

SEQ ID NO: 58457 - RNA, 32 nt, Human
aggggcuggugugugggagcugcuaccuggca

SEQ ID NO: 58458 - RNA, 32 nt, Human
aggggcuguaaggugggcucugggccuuccag

SEQ ID NO: 58459 - RNA, 32 nt, Human
aggggcuguccacuuccuguggguucacagcu

SEQ ID NO: 58460 - RNA, 16 nt, Human
aggggcuguccagccc

SEQ ID NO: 58461 - RNA, 32 nt, Human
aggggcugucuauuagcauauuuccuuugagg

SEQ ID NO: 58462 - RNA, 32 nt, Human
aggggcuguggggagggaaaaugaggaguuac

SEQ ID NO: 58463 - RNA, 32 nt, Human
aggggcugugucugggugagggauggcggggu

SEQ ID NO: 58464 - RNA, 32 nt, Human
aggggcuguuauauacauauauacacaaccaa

SEQ ID NO: 58465 - RNA, 16 nt, Human
aggggcuguugcugaa

SEQ ID NO: 58466 - RNA, 32 nt, Human
aggggcuuagaggcaugggcuugcuguggguu

SEQ ID NO: 58467 - RNA, 32 nt, Human
aggggcuuccuaaccccugccugauaggugca

SEQ ID NO: 58468 - RNA, 32 nt, Human
aggggcuuccuuggacaaacuuuccagcucuc

SEQ ID NO: 58469 - RNA, 32 nt, Human
aggggcuucucccccucagcucucccucacac

SEQ ID NO: 58470 - RNA, 32 nt, Human
aggggcuucucccuuuccuugagcucucugga

SEQ ID NO: 58471 - RNA, 32 nt, Human
aggggcuucucccuuugcuugacucucauucu

SEQ ID NO: 58472 - RNA, 32 nt, Human
aggggcuugagaggaacgcccacccacgaagg

SEQ ID NO: 58473 - RNA, 32 nt, Human
aggggcuugaucuggguuagucugggggcaag

SEQ ID NO: 58474 - RNA, 32 nt, Human
aggggcuugccuggcuuggcugcagugcacuu

SEQ ID NO: 58475 - RNA, 32 nt, Human
aggggcuuggaccacacugcagccuggcuucu

SEQ ID NO: 58476 - RNA, 32 nt, Human
aggggcuugggcuucccuuugacccucuuccu

SEQ ID NO: 58477 - RNA, 32 nt, Human
aggggcuugggugggaugucgggugggauguu

SEQ ID NO: 58478 - RNA, 32 nt, Human
aggggcuuugugaccagaaagcuucauccaca

SEQ ID NO: 58479 - RNA, 32 nt, Human
agggggaaaagcuuccagaaagcagccaugaa

SEQ ID NO: 58480 - RNA, 18 nt, Human
agggggaaacuacaugaa

SEQ ID NO: 58481 - RNA, 20 nt, Human
agggggaaacugaccaagaa

SEQ ID NO: 58482 - RNA, 32 nt, Human
agggggaaagaaggagaaaggaaagaaaaacc

SEQ ID NO: 58483 - RNA, 32 nt, Human
agggggaaccagccugagugcagcugccaacu

SEQ ID NO: 58484 - RNA, 32 nt, Human
agggggaacguggcugguuggaggagguagau

SEQ ID NO: 58485 - RNA, 24 nt, Human
agggggaagaauugcuugggccca

SEQ ID NO: 58486 - RNA, 32 nt, Human
agggggaagagaggaggggagaggagaaggga

SEQ ID NO: 58487 - RNA, 32 nt, Human
agggggaagaggagaggguauggggcggcaga

SEQ ID NO: 58488 - RNA, 19 nt, Human
agggggaagcauaaggaac

SEQ ID NO: 58489 - RNA, 32 nt, Human
agggggaagccaaccccuccugugcugccggu

SEQ ID NO: 58490 - RNA, 32 nt, Human
agggggaagccaaccccuccugugcugcuggu

SEQ ID NO: 58491 - RNA, 32 nt, Human
agggggaccucaccuccugugcacagcccacc

SEQ ID NO: 58492 - RNA, 32 nt, Human
agggggacgacuucacacucacugccucaugu

SEQ ID NO: 58493 - RNA, 21 nt, Human
agggggacgagugccugggca

SEQ ID NO: 58494 - RNA, 32 nt, Human
agggggagaaaacuguacucuguccagacaug

SEQ ID NO: 58495 - RNA, 32 nt, Human
agggggagacaaaacuccuacucucaaccuca

SEQ ID NO: 58496 - RNA, 32 nt, Human
agggggagagcaucacacaugcccugaaucau

SEQ ID NO: 58497 - RNA, 32 nt, Human
agggggagaggcaccaccuggggaagacugcc

SEQ ID NO: 58498 - RNA, 32 nt, Human
agggggagagugaacugacagacucagucacu

SEQ ID NO: 58499 - RNA, 32 nt, Human
agggggagcaucccuagugaauacucacacca

SEQ ID NO: 58500 - RNA, 32 nt, Human
agggggagcccaauuccuuucucacccccucc

SEQ ID NO: 58501 - RNA, 32 nt, Human
agggggagcccaggagaccagaacaugaacuc

SEQ ID NO: 58502 - RNA, 32 nt, Human
agggggagccugggugcagcagagacagagga

SEQ ID NO: 58503 - RNA, 32 nt, Human
agggggagcuggaggcuggagccuguaacacc

SEQ ID NO: 58504 - RNA, 32 nt, Human
agggggaggaaaaggagagggaagagguagag

SEQ ID NO: 58505 - RNA, 32 nt, Human
agggggaggaagaaguaugcgcugcacauuuc

SEQ ID NO: 58506 - RNA, 32 nt, Human
agggggaggagaaggaggaagagggggaggag

SEQ ID NO: 58507 - RNA, 32 nt, Human
agggggaggagagagguaggagcuggagauga

SEQ ID NO: 58508 - RNA, 32 nt, Human
agggggaggagaggagaaagggaggaagcugg

SEQ ID NO: 58509 - RNA, 32 nt, Human
agggggaggaggaggaggaucaugaaggccgg

SEQ ID NO: 58510 - RNA, 31 nt, Human
agggggaggcacuuuaggacaccccuuaggc

SEQ ID NO: 58511 - RNA, 32 nt, Human
agggggaggcagcaagagucacuuugggggac

SEQ ID NO: 58512 - RNA, 32 nt, Human
agggggaggcccuuccgagccugggccugggu

SEQ ID NO: 58513 - RNA, 32 nt, Human
agggggagggagcacaacucagaacucaucuu

SEQ ID NO: 58514 - RNA, 32 nt, Human
agggggaggguugcccacuaggaggagcuucu

SEQ ID NO: 58515 - RNA, 32 nt, Human
agggggagguucacauguuugcagugaaaagc

SEQ ID NO: 58516 - RNA, 32 nt, Human
agggggaguggaagagguaccaggagucacuc

SEQ ID NO: 58517 - RNA, 18 nt, Human
agggggagugggggccag

SEQ ID NO: 58518 - RNA, 32 nt, Human
agggggaguucauuguugaguaugaauuuaaa

SEQ ID NO: 58519 - RNA, 32 nt, Human
agggggauagcggguggugagggaaggggcac

SEQ ID NO: 58520 - RNA, 32 nt, Human
agggggaucgcuugaguccaggaguuugagac

SEQ ID NO: 58521 - RNA, 32 nt, Human
agggggaugggcuggcuguggccagguuuagg

SEQ ID NO: 58522 - RNA, 32 nt, Human
agggggaugucaacaacagaucaagccgucau

SEQ ID NO: 58523 - RNA, 32 nt, Human
agggggcaaccaggagcacauucuggggagca

SEQ ID NO: 58524 - RNA, 32 nt, Human
agggggcacuauaguguucuuggacuugucgu

SEQ ID NO: 58525 - RNA, 32 nt, Human
agggggcacugaggaagcagaggccccuuggg

SEQ ID NO: 58526 - RNA, 20 nt, Human
agggggcacugcccgcuggu

SEQ ID NO: 58527 - RNA, 32 nt, Human
agggggcagacagcaccccuggaguccuccua

SEQ ID NO: 58528 - RNA, 32 nt, Human
agggggcagccuggccacugccuagcuggaau

SEQ ID NO: 58529 - RNA, 32 nt, Human
agggggcaggaacagcaggccuggccagccca

SEQ ID NO: 58530 - RNA, 32 nt, Human
agggggcagggacuggccagacugccugccuc

SEQ ID NO: 58531 - RNA, 19 nt, Human
agggggcaggggcugcugg

SEQ ID NO: 58532 - RNA, 32 nt, Human
agggggcaguccugugccuugugggcccucag

SEQ ID NO: 58533 - RNA, 32 nt, Human
agggggcagucuugcuuuauucauccuccauc

SEQ ID NO: 58534 - RNA, 32 nt, Human
agggggcagugaggugccccugccuggagcac

SEQ ID NO: 58535 - RNA, 21 nt, Human
agggggcaguggcaccuguug

SEQ ID NO: 58536 - RNA, 32 nt, Human
agggggcauuaugggcccugccuccccauagg

SEQ ID NO: 58537 - RNA, 32 nt, Human
agggggccaaaccagugcuccugccaccucuc

SEQ ID NO: 58538 - RNA, 32 nt, Human
agggggccaaggacacagcacugggcuggggc

SEQ ID NO: 58539 - RNA, 32 nt, Human
agggggccaaggacuuuagagcuguuuccucc

SEQ ID NO: 58540 - RNA, 32 nt, Human
agggggccaccaauaucuagcuauggaucgug

SEQ ID NO: 58541 - RNA, 17 nt, Human
agggggccagcugggga

SEQ ID NO: 58542 - RNA, 32 nt, Human
agggggccauucuuaccaguucuguuucuguu

SEQ ID NO: 58543 - RNA, 32 nt, Human
agggggcccagccucagguccucugcuucucc

SEQ ID NO: 58544 - RNA, 32 nt, Human
agggggccccaagaggagaggagaagugcuga

SEQ ID NO: 58545 - RNA, 32 nt, Human
agggggcccccugaagcgucaggcugggggca

SEQ ID NO: 58546 - RNA, 32 nt, Human
agggggcccucuuacuccuuccucucuccucc

SEQ ID NO: 58547 - RNA, 32 nt, Human
agggggcccuggaggaauggaugguggcggaa

SEQ ID NO: 58548 - RNA, 32 nt, Human
agggggccucacugccuuguuggucuccaccu

SEQ ID NO: 58549 - RNA, 32 nt, Human
agggggccuccccugcuaucccuccucccauc

SEQ ID NO: 58550 - RNA, 32 nt, Human
agggggccugcagggagccagaggguggaaau

SEQ ID NO: 58551 - RNA, 32 nt, Human
agggggccugggaggagggucuguaggaccug

SEQ ID NO: 58552 - RNA, 32 nt, Human
agggggccuucccagccugaucccuguccucc

SEQ ID NO: 58553 - RNA, 32 nt, Human
agggggccuuucucccaccaucaccgccugug

SEQ ID NO: 58554 - RNA, 32 nt, Human
agggggccuuucugcuucuuagccagcuaccu

SEQ ID NO: 58555 - RNA, 23 nt, Human
agggggcgaaucacgaggucagg

SEQ ID NO: 58556 - RNA, 21 nt, Human
agggggcgcagggacagcccc

SEQ ID NO: 58557 - RNA, 32 nt, Human
agggggcgcggaaggaaggaggcgggacggua

SEQ ID NO: 58558 - RNA, 32 nt, Human
agggggcgcugcagccacgcugggucaggcuc

SEQ ID NO: 58559 - RNA, 32 nt, Human
agggggcgcugggguguugcacuuugggggau

SEQ ID NO: 58560 - RNA, 32 nt, Human
agggggcgggcaggccggcgggcggugaugug

SEQ ID NO: 58561 - RNA, 32 nt, Human
agggggcgggucuugcucgaauguucucacuc

SEQ ID NO: 58562 - RNA, 32 nt, Human
agggggcgugagccaacagccgacggcugagg

SEQ ID NO: 58563 - RNA, 32 nt, Human
agggggcuaaagaggaaggaggggaggagguc

SEQ ID NO: 58564 - RNA, 32 nt, Human
agggggcuccuccauucccugcucacucagcc

SEQ ID NO: 58565 - RNA, 32 nt, Human
agggggcucgagaccagaccacacugccaucu

SEQ ID NO: 58566 - RNA, 32 nt, Human
agggggcucgccgguucuccagcccggacugc

SEQ ID NO: 58567 - RNA, 20 nt, Human
agggggcucuucccccagag

SEQ ID NO: 58568 - RNA, 32 nt, Human
agggggcugaggcuggacaauggugugaaccc

SEQ ID NO: 58569 - RNA, 32 nt, Human
agggggcugagggccaauugcaguggccuuug

SEQ ID NO: 58570 - RNA, 32 nt, Human
agggggcugccaggcuggcugccgaugcuccg

SEQ ID NO: 58571 - RNA, 32 nt, Human
agggggcugccauccccugccugccaccugcc

SEQ ID NO: 58572 - RNA, 21 nt, Human
agggggcugcugcccaccagc

SEQ ID NO: 58573 - RNA, 32 nt, Human
agggggcugcuuggugaugagccagccugaug

SEQ ID NO: 58574 - RNA, 32 nt, Human
agggggcugcuuugggcuuugcaccugcacuu

SEQ ID NO: 58575 - RNA, 32 nt, Human
agggggcugggcagaggguggaggagguccug

SEQ ID NO: 58576 - RNA, 32 nt, Human
agggggcugggucggcagcccaggcauccuca

SEQ ID NO: 58577 - RNA, 32 nt, Human
agggggcuguugugguuccgacuauaaacagu

SEQ ID NO: 58578 - RNA, 32 nt, Human
agggggcuuccaccauucccagaacugaucaa

SEQ ID NO: 58579 - RNA, 32 nt, Human
agggggcuuccucucuuaggggugagaaagca

SEQ ID NO: 58580 - RNA, 21 nt, Human
agggggcuucuucccugcugg

SEQ ID NO: 58581 - RNA, 32 nt, Human
agggggcuugcagcaucugcaggggccagaaa

SEQ ID NO: 58582 - RNA, 32 nt, Human
agggggcuugccuugcucucuccagggccagu

SEQ ID NO: 58583 - RNA, 32 nt, Human
agggggcuuucaaccaggcucacccaggcugg

SEQ ID NO: 58584 - RNA, 32 nt, Human
agggggcuuuguguugcuggugguguuccugg

SEQ ID NO: 58585 - RNA, 20 nt, Human
aggggggucucacuauguug

SEQ ID NO: 58586 - RNA, 20 nt, Human
agggggguuucaccguguug

SEQ ID NO: 58587 - RNA, 32 nt, Human
aggggguaaaugcuugccgcuuuagaggugga

SEQ ID NO: 58588 - RNA, 32 nt, Human
aggggguacagcuguuauacuuuaugaaccua

SEQ ID NO: 58589 - RNA, 32 nt, Human
aggggguagagggagccaggagcacuggguuc

SEQ ID NO: 58590 - RNA, 32 nt, Human
aggggguagguuuggagggaggccauuuucca

SEQ ID NO: 58591 - RNA, 32 nt, Human
aggggguaugaggaggaggagggggaggagca

SEQ ID NO: 58592 - RNA, 32 nt, Human
aggggguccagcucugcuucccuucccaccug

SEQ ID NO: 58593 - RNA, 32 nt, Human
aggggguccauaguuggacuucagagggucua

SEQ ID NO: 58594 - RNA, 32 nt, Human
agggggucucagauuggcggggaugggcagca

SEQ ID NO: 58595 - RNA, 32 nt, Human
agggggucucccucucacacugccucagugcu

SEQ ID NO: 58596 - RNA, 32 nt, Human
agggggucuggggugcagcccugccagcauca

SEQ ID NO: 58597 - RNA, 32 nt, Human
agggggugaggcagaggaucacuugagcccag

SEQ ID NO: 58598 - RNA, 32 nt, Human
agggggugagggaugaguaaggagaacacaug

SEQ ID NO: 58599 - RNA, 32 nt, Human
agggggugcaaagaagagacagcagcgcccag

SEQ ID NO: 58600 - RNA, 32 nt, Human
agggggugcagacugagcagugaacagaagga

SEQ ID NO: 58601 - RNA, 32 nt, Human
agggggugcccaggugguggcugcaagguggc

SEQ ID NO: 58602 - RNA, 31 nt, Human
agggggugccucucggaggagccugugucca

SEQ ID NO: 58603 - RNA, 32 nt, Human
agggggugcgggccacacagguagccacccug

SEQ ID NO: 58604 - RNA, 32 nt, Human
agggggugcgggugugugcuguccuggggaca

SEQ ID NO: 58605 - RNA, 32 nt, Human
aggggguggaaaaggugauggugcuggggugu

SEQ ID NO: 58606 - RNA, 31 nt, Human
aggggguggaaacugcaucacagauguuuuc

SEQ ID NO: 58607 - RNA, 32 nt, Human
aggggguggagcugcccugucccuggaggcgc

SEQ ID NO: 58608 - RNA, 32 nt, Human
aggggguggaucaccugaggucgggaguucua

SEQ ID NO: 58609 - RNA, 25 nt, Human
agggggugggaauggggugggguca

SEQ ID NO: 58610 - RNA, 18 nt, Human
agggggugggacagggac

SEQ ID NO: 58611 - RNA, 32 nt, Human
agggggugggauggagagaaugcugaaucuuu

SEQ ID NO: 58612 - RNA, 32 nt, Human
agggggugggcaggaaaggucucacuaagaac

SEQ ID NO: 58613 - RNA, 32 nt, Human
agggggugggccagccccagggccaggguccc

SEQ ID NO: 58614 - RNA, 32 nt, Human
agggggugggcccaccaccgcccagcccuccu

SEQ ID NO: 58615 - RNA, 32 nt, Human
agggggugggcugccugccugcucugagcucu

SEQ ID NO: 58616 - RNA, 32 nt, Human
aggggguggggaggggcaugugcaggaagagg

SEQ ID NO: 58617 - RNA, 32 nt, Human
aggggguggggagggggcccacaagcacgccc

SEQ ID NO: 58618 - RNA, 23 nt, Human
agggggugucaccauguuggcca

SEQ ID NO: 58619 - RNA, 20 nt, Human
agggggugugccaggccuga

SEQ ID NO: 58620 - RNA, 32 nt, Human
agggggugugccaggccugaacugagcuaagc

SEQ ID NO: 58621 - RNA, 32 nt, Human
aggggguguggaaagagcaggcuuccaggaga

SEQ ID NO: 58622 - RNA, 21 nt, Human
agggggugugucccacaaacg

SEQ ID NO: 58623 - RNA, 18 nt, Human
aggggguucuugcuccau

SEQ ID NO: 58624 - RNA, 23 nt, Human
aggggguuucaccacguuggcca

SEQ ID NO: 58625 - RNA, 23 nt, Human
aggggguuucaccauguuggcca

SEQ ID NO: 58626 - RNA, 23 nt, Human
aggggguuucaccauguuuguca

SEQ ID NO: 58627 - RNA, 32 nt, Human
aggggguuucugcgcacccacagucgccaccg

SEQ ID NO: 58628 - RNA, 32 nt, Human
agggguaagggagggcaggggugagggggagc

SEQ ID NO: 58629 - RNA, 32 nt, Human
agggguaagggcccgugggcgcagcccuagcc

SEQ ID NO: 58630 - RNA, 32 nt, Human
agggguaauggcaucuccccacuuuaggcuuc

SEQ ID NO: 58631 - RNA, 22 nt, Human
agggguacacucuccuacaaaa

SEQ ID NO: 58632 - RNA, 32 nt, Human
agggguaccaaaacaggaagccucacuaggaa

SEQ ID NO: 58633 - RNA, 32 nt, Human
agggguaccaaagugauccuccaucuuaaaga

SEQ ID NO: 58634 - RNA, 32 nt, Human
agggguacccaccccugcccuucaaccacgug

SEQ ID NO: 58635 - RNA, 32 nt, Human
agggguagcugccgaugugucuugagauuguu

SEQ ID NO: 58636 - RNA, 32 nt, Human
agggguaggacugcaggggccacuccaaacuc

SEQ ID NO: 58637 - RNA, 32 nt, Human
agggguaggcaggcacagagugcugucugcug

SEQ ID NO: 58638 - RNA, 32 nt, Human
agggguagggagaggagccgagagggagggga

SEQ ID NO: 58639 - RNA, 32 nt, Human
agggguauggcacuggugcuuaugauaccacc

SEQ ID NO: 58640 - RNA, 32 nt, Human
agggguaugguauggcagcuguggcagaggga

SEQ ID NO: 58641 - RNA, 32 nt, Human
agggguauguugggggauuggaagcacuugaa

SEQ ID NO: 58642 - RNA, 32 nt, Human
aggggucaaaccugugguguguggaagugacc

SEQ ID NO: 58643 - RNA, 32 nt, Human
aggggucacugaggccugagacccaggacucc

SEQ ID NO: 58644 - RNA, 32 nt, Human
aggggucagaagcagggacuggggcaggcgag

SEQ ID NO: 58645 - RNA, 32 nt, Human
aggggucagcaacuucauccagggcaucaagc

SEQ ID NO: 58646 - RNA, 32 nt, Human
aggggucagcagaggagagcucugggguuggg

SEQ ID NO: 58647 - RNA, 32 nt, Human
aggggucagcccaggcugcugggcuguagcca

SEQ ID NO: 58648 - RNA, 32 nt, Human
aggggucaggcagcugugucuccccacacugg

SEQ ID NO: 58649 - RNA, 32 nt, Human
aggggucagugguucucucgggucucgggaca

SEQ ID NO: 58650 - RNA, 32 nt, Human
aggggucauccagcugggccuaggggugcagg

SEQ ID NO: 58651 - RNA, 32 nt, Human
aggggucaucgcugcccagagccuggggauuc

SEQ ID NO: 58652 - RNA, 32 nt, Human
agggguccagagaggcaggcuggggaggcaag

SEQ ID NO: 58653 - RNA, 32 nt, Human
agggguccagcagaggcugacagaguggccuc

SEQ ID NO: 58654 - RNA, 20 nt, Human
agggguccagccagaagcca

SEQ ID NO: 58655 - RNA, 32 nt, Human
agggguccagugguguggggccuguugagaua

SEQ ID NO: 58656 - RNA, 32 nt, Human
aggggucccagguagucccugcucuuggcuuc

SEQ ID NO: 58657 - RNA, 32 nt, Human
aggggucccgcuuuccucagccuggaugugcc

SEQ ID NO: 58658 - RNA, 32 nt, Human
agggguccggcaugcugcuggcauuuugcugu

SEQ ID NO: 58659 - RNA, 32 nt, Human
agggguccucucucccugguugugcccucccc

SEQ ID NO: 58660 - RNA, 32 nt, Human
agggguccugaucuuaacccuuuccugggucu

SEQ ID NO: 58661 - RNA, 32 nt, Human
agggguccugggaggggauggggcugggggau

SEQ ID NO: 58662 - RNA, 32 nt, Human
aggggucgacuucgggcuggccaucugguuag

SEQ ID NO: 58663 - RNA, 32 nt, Human
aggggucggggaaaggagggagugccuccaac

SEQ ID NO: 58664 - RNA, 32 nt, Human
aggggucuaagccuucccuccugggcuaggga

SEQ ID NO: 58665 - RNA, 32 nt, Human
aggggucuaggugaugacugggauuucuaggg

SEQ ID NO: 58666 - RNA, 32 nt, Human
aggggucuccagugcuccugacuccucacagc

SEQ ID NO: 58667 - RNA, 32 nt, Human
aggggucucucccaacauauuucucuuccuug

SEQ ID NO: 58668 - RNA, 32 nt, Human
aggggucucucccuauuuuacccaagcuggcc

SEQ ID NO: 58669 - RNA, 32 nt, Human
aggggucugcauucaagcacgauguucuagaa

SEQ ID NO: 58670 - RNA, 32 nt, Human
aggggucugcuuguaguacucucaguccugau

SEQ ID NO: 58671 - RNA, 32 nt, Human
aggggucugggagucaggcccggccuauugcu

SEQ ID NO: 58672 - RNA, 32 nt, Human
aggggucugggagugugacguuguaaucuuca

SEQ ID NO: 58673 - RNA, 32 nt, Human
aggggucugggcccucuccccaucgccccggg

SEQ ID NO: 58674 - RNA, 32 nt, Human
aggggucuuggagggaccacagaggaaggugg

SEQ ID NO: 58675 - RNA, 32 nt, Human
aggggucuuggcagcauggaagugagagguga

SEQ ID NO: 58676 - RNA, 32 nt, Human
aggggucuuucugcuucuuucuugucaugcac

SEQ ID NO: 58677 - RNA, 32 nt, Human
aggggugaauucacugggucauggaagggaca

SEQ ID NO: 58678 - RNA, 21 nt, Human
aggggugacaggaccagggca

SEQ ID NO: 58679 - RNA, 21 nt, Human
aggggugacgccacgagcuaa

SEQ ID NO: 58680 - RNA, 32 nt, Human
aggggugagagagcaggagagcaggggugagg

SEQ ID NO: 58681 - RNA, 32 nt, Human
aggggugaggagagagcaagagggcaggggug

SEQ ID NO: 58682 - RNA, 32 nt, Human
aggggugagguauuuucacugcccucccugga

SEQ ID NO: 58683 - RNA, 32 nt, Human
aggggugauacagauggugauuuuaaagagca

SEQ ID NO: 58684 - RNA, 32 nt, Human
aggggugauguuagcguggcaggggagugugu

SEQ ID NO: 58685 - RNA, 32 nt, Human
aggggugauguuugcauuucccaucauuaucc

SEQ ID NO: 58686 - RNA, 32 nt, Human
aggggugcagccaggagggcagggggacacgg

SEQ ID NO: 58687 - RNA, 32 nt, Human
aggggugcagcccucauggauggaugaaugcc

SEQ ID NO: 58688 - RNA, 32 nt, Human
aggggugcaguggguguuaccaggcaaagcac

SEQ ID NO: 58689 - RNA, 32 nt, Human
aggggugccuggcgagccucugguuuuccucu

SEQ ID NO: 58690 - RNA, 32 nt, Human
aggggugcggcagcuucaggaggcagaaacga

SEQ ID NO: 58691 - RNA, 32 nt, Human
aggggugcggggcagugaugcccaggcagcuc

SEQ ID NO: 58692 - RNA, 18 nt, Human
aggggugcucuguggaaa

SEQ ID NO: 58693 - RNA, 32 nt, Human
agggguggaaaggaagagagcuugggcuggga

SEQ ID NO: 58694 - RNA, 32 nt, Human
agggguggaccuguuucucuuucacuuucauu

SEQ ID NO: 58695 - RNA, 31 nt, Human
agggguggagagaaaagaggggagggauggg

SEQ ID NO: 58696 - RNA, 32 nt, Human
agggguggagagaaaagaggggagggaugggg

SEQ ID NO: 58697 - RNA, 32 nt, Human
agggguggagcaggcaguggccagcuuugccc

SEQ ID NO: 58698 - RNA, 32 nt, Human
agggguggagcugaggcuggagggaggaaggu

SEQ ID NO: 58699 - RNA, 32 nt, Human
agggguggaggcagcaggaugagcagaaagga

SEQ ID NO: 58700 - RNA, 32 nt, Human
agggguggaggcggcccaggaggcugaagaca

SEQ ID NO: 58701 - RNA, 32 nt, Human
agggguggauuagcacccugugccucgggggu

SEQ ID NO: 58702 - RNA, 32 nt, Human
agggguggcaggcaggguggggcacugugagc

SEQ ID NO: 58703 - RNA, 32 nt, Human
aggggugggaaacuggcauacuguguguauag

SEQ ID NO: 58704 - RNA, 22 nt, Human
aggggugggagagaagauacag

SEQ ID NO: 58705 - RNA, 32 nt, Human
aggggugggagcccucacaggcaagggggcug

SEQ ID NO: 58706 - RNA, 32 nt, Human
aggggugggaggcucccagacccagggcagug

SEQ ID NO: 58707 - RNA, 32 nt, Human
aggggugggagggucaggagggcagggugaag

SEQ ID NO: 58708 - RNA, 25 nt, Human
aggggugggaguugggauaauuuuu

SEQ ID NO: 58709 - RNA, 32 nt, Human
aggggugggcaggcccagcuggaggcagcugg

SEQ ID NO: 58710 - RNA, 32 nt, Human
aggggugggcagucaggguugcaggacuguaa

SEQ ID NO: 58711 - RNA, 18 nt, Human
aggggugggccacagcca

SEQ ID NO: 58712 - RNA, 32 nt, Human
aggggugggcuggaucggaagcaacacccauu

SEQ ID NO: 58713 - RNA, 32 nt, Human
aggggugggcuggggcaaggcuuauccugggc

SEQ ID NO: 58714 - RNA, 32 nt, Human
agggguggggacggcgaggagguggaggccgg

SEQ ID NO: 58715 - RNA, 32 nt, Human
agggguggggcugcggggguuccguguccacc

SEQ ID NO: 58716 - RNA, 32 nt, Human
agggguggggcugugagcucuuaauuuguuuu

SEQ ID NO: 58717 - RNA, 32 nt, Human
aggggugggggacacuggcaaggucugccuuc

SEQ ID NO: 58718 - RNA, 32 nt, Human
aggggugggggcuggggagaggcguggcccga

SEQ ID NO: 58719 - RNA, 32 nt, Human
aggggugggggugggcaccagcucaggggcuu

SEQ ID NO: 58720 - RNA, 32 nt, Human
agggguggguggggaagugaaauguuaggcga

SEQ ID NO: 58721 - RNA, 32 nt, Human
aggggugguagaagcugcuguuuaugauaaaa

SEQ ID NO: 58722 - RNA, 32 nt, Human
aggggugguagaugcuggaagccagacacaac

SEQ ID NO: 58723 - RNA, 32 nt, Human
agggguggucaggcugaacgcagcacagaagg

SEQ ID NO: 58724 - RNA, 32 nt, Human
aggggugguggagagauggaagggcaucaggu

SEQ ID NO: 58725 - RNA, 32 nt, Human
aggggugguggagggggcugggcucacaggcc

SEQ ID NO: 58726 - RNA, 32 nt, Human
agggguguccccuugccccauccucugcccua

SEQ ID NO: 58727 - RNA, 32 nt, Human
agggguguccuccucagaccaugcccccagau

SEQ ID NO: 58728 - RNA, 32 nt, Human
agggguguccugcagugccaccagaaguggca

SEQ ID NO: 58729 - RNA, 32 nt, Human
aggggugugaggaagcagacucccuguuauau

SEQ ID NO: 58730 - RNA, 32 nt, Human
aggggugugccaccccuuggcuucccaggaag

SEQ ID NO: 58731 - RNA, 32 nt, Human
aggggugugcugcguacagccccgaugaccac

SEQ ID NO: 58732 - RNA, 32 nt, Human
agggguguucuagcuuuuugaggacagcuccu

SEQ ID NO: 58733 - RNA, 32 nt, Human
agggguuaaaggcaggaauagcaaagagugca

SEQ ID NO: 58734 - RNA, 32 nt, Human
agggguuaaugaauaaucacagugaugagcuc

SEQ ID NO: 58735 - RNA, 32 nt, Human
agggguucaaagagacagggugguaugaaaac

SEQ ID NO: 58736 - RNA, 32 nt, Human
agggguucaagaccagccugaccaacauggug

SEQ ID NO: 58737 - RNA, 32 nt, Human
agggguucaagaccagccuggccaacauggug

SEQ ID NO: 58738 - RNA, 32 nt, Human
agggguucacaucucuuuaaaggaaaggaaag

SEQ ID NO: 58739 - RNA, 32 nt, Human
agggguucagacuugggaagaaucugucagug

SEQ ID NO: 58740 - RNA, 32 nt, Human
agggguucaggacuuuggaggugguggaacag

SEQ ID NO: 58741 - RNA, 32 nt, Human
agggguucaugcuuaauaaacaugucacaaua

SEQ ID NO: 58742 - RNA, 32 nt, Human
agggguuccagaccagccuggccaacauggug

SEQ ID NO: 58743 - RNA, 32 nt, Human
agggguucgaaaccagccaggccaacuuggca

SEQ ID NO: 58744 - RNA, 32 nt, Human
agggguucgacaccagccuggccaacauggug

SEQ ID NO: 58745 - RNA, 32 nt, Human
agggguucgagaccagccuggccaacaugacg

SEQ ID NO: 58746 - RNA, 32 nt, Human
agggguucgagaccagccuggccaacauggug

SEQ ID NO: 58747 - RNA, 32 nt, Human
agggguucgagaccagccuggucaacauggca

SEQ ID NO: 58748 - RNA, 32 nt, Human
agggguucucacucugaacuuucccucucuac

SEQ ID NO: 58749 - RNA, 31 nt, Human
agggguucucuguggggcccuguguccccug

SEQ ID NO: 58750 - RNA, 32 nt, Human
agggguucucuucauagguacuugcuauaugu

SEQ ID NO: 58751 - RNA, 32 nt, Human
agggguucugaagaacucuggccaagaggacg

SEQ ID NO: 58752 - RNA, 32 nt, Human
agggguucuuaacuugggguccaucaccccag

SEQ ID NO: 58753 - RNA, 21 nt, Human
agggguugagagaggaagcag

SEQ ID NO: 58754 - RNA, 32 nt, Human
agggguugaggugggaggauugcuugagccca

SEQ ID NO: 58755 - RNA, 32 nt, Human
agggguugcugguacuucaucuggggaccccg

SEQ ID NO: 58756 - RNA, 32 nt, Human
agggguuggagguggcagauaaaagaggauuu

SEQ ID NO: 58757 - RNA, 32 nt, Human
agggguuggggagggagacauccagcuugggc

SEQ ID NO: 58758 - RNA, 32 nt, Human
agggguugucaagagagagucaaagccggaug

SEQ ID NO: 58759 - RNA, 31 nt, Human
agggguuuaauaaauaacccuugaaaacugg

SEQ ID NO: 58760 - RNA, 32 nt, Human
agggguuuaccuccuuacuuucauccaagacc

SEQ ID NO: 58761 - RNA, 32 nt, Human
agggguuucugccuccuccccacccaggucag

SEQ ID NO: 58762 - RNA, 32 nt, Human
agggguuucuuccauguugcccaggcuggucu

SEQ ID NO: 58763 - RNA, 26 nt, Human
agggguuugaacuggacauccuaaug

SEQ ID NO: 58764 - RNA, 32 nt, Human
agggguuugagaccagccugaccaacauggug

SEQ ID NO: 58765 - RNA, 32 nt, Human
agggguuugagaccagccugagcaacauagcg

SEQ ID NO: 58766 - RNA, 32 nt, Human
agggguuugagaccagccuggccaacauggug

SEQ ID NO: 58767 - RNA, 32 nt, Human
agggguuugagaccagccugggcaacauggug

SEQ ID NO: 58768 - RNA, 32 nt, Human
agggguuugagaccagccuggucaacauugca

SEQ ID NO: 58769 - RNA, 32 nt, Human
agggguuugcagcugcuccgucaucgugcggc

SEQ ID NO: 58770 - RNA, 32 nt, Human
agggguuugcagugugggaauguggcccugca

SEQ ID NO: 58771 - RNA, 32 nt, Human
agggguuugcccacuuuccucuuuuugggguu

SEQ ID NO: 58772 - RNA, 32 nt, Human
agggguuugcguucgcccuugugggcugaagc

SEQ ID NO: 58773 - RNA, 32 nt, Human
agggguuugugguccccucucagccaccccga

SEQ ID NO: 58774 - RNA, 32 nt, Human
agggguuuucuuggagcucaaguuuggaugac

SEQ ID NO: 58775 - RNA, 32 nt, Human
aggguaaaacuaggacacagaaaacauuggga

SEQ ID NO: 58776 - RNA, 32 nt, Human
aggguaaaccaguagggaauacaguacaaucc

SEQ ID NO: 58777 - RNA, 32 nt, Human
aggguaaacuaacuugaguuacacuugaauuu

SEQ ID NO: 58778 - RNA, 32 nt, Human
aggguaaagcuggguuaaaaaugcagguuucc

SEQ ID NO: 58779 - RNA, 32 nt, Human
aggguaaaucagcgguaagaacagugaacaca

SEQ ID NO: 58780 - RNA, 32 nt, Human
aggguaaccagcucuucccagcuggcugggac

SEQ ID NO: 58781 - RNA, 32 nt, Human
aggguaaccgauugggguagguggugguaguu

SEQ ID NO: 58782 - RNA, 32 nt, Human
aggguaacuaauucuggaucuuugggugcaca

SEQ ID NO: 58783 - RNA, 32 nt, Human
aggguaaggagcuagcgccaugguggccugca

SEQ ID NO: 58784 - RNA, 32 nt, Human
aggguaaggaggcuaguuacagugucuuacuu

SEQ ID NO: 58785 - RNA, 32 nt, Human
aggguaaggcaggaggaagugggugagcuccg

SEQ ID NO: 58786 - RNA, 32 nt, Human
aggguaagggaauuuaauacuuuuccacagau

SEQ ID NO: 58787 - RNA, 32 nt, Human
aggguaauaaauagcaugcaucaaagacguua

SEQ ID NO: 58788 - RNA, 32 nt, Human
aggguaauauuaucugcuacacuggaaggccg

SEQ ID NO: 58789 - RNA, 32 nt, Human
aggguaaugccacucccacaaucucaggccug

SEQ ID NO: 58790 - RNA, 32 nt, Human
aggguacagcugggcuggggaggaccugaccc

SEQ ID NO: 58791 - RNA, 32 nt, Human
aggguacaggaggaagcugggacagguccccu

SEQ ID NO: 58792 - RNA, 32 nt, Human
aggguacauacuccuuucuggggagagaaugc

SEQ ID NO: 58793 - RNA, 32 nt, Human
aggguaccgccggguauugaaggauucguagg

SEQ ID NO: 58794 - RNA, 32 nt, Human
aggguaccugaagcgaauuggcaccaaagcag

SEQ ID NO: 58795 - RNA, 32 nt, Human
aggguacugccucguaucucuuguaggcucuc

SEQ ID NO: 58796 - RNA, 32 nt, Human
aggguacuggggaggcagcggcuuuaaacaau

SEQ ID NO: 58797 - RNA, 32 nt, Human
aggguacuuggcuugcuuugcuauguguguga

SEQ ID NO: 58798 - RNA, 32 nt, Human
aggguagaaagccacagcagggggcaguccag

SEQ ID NO: 58799 - RNA, 32 nt, Human
aggguagaagggaggagguuggguagaaggcu

SEQ ID NO: 58800 - RNA, 32 nt, Human
aggguagacucuguaaacaccuccuuacucac

SEQ ID NO: 58801 - RNA, 32 nt, Human
aggguagacugggaguccugaccacgcaggcc

SEQ ID NO: 58802 - RNA, 32 nt, Human
aggguagaggagagacguggguugagaauagu

SEQ ID NO: 58803 - RNA, 32 nt, Human
aggguagaggauucagggggccuccucuccua

SEQ ID NO: 58804 - RNA, 31 nt, Human
aggguagcaagggcaguuucacugcggaggc

SEQ ID NO: 58805 - RNA, 32 nt, Human
aggguagcagcagguggcaggcuguuaaaaga

SEQ ID NO: 58806 - RNA, 32 nt, Human
aggguagcaguauuuuaauagcuauuauagac

SEQ ID NO: 58807 - RNA, 32 nt, Human
aggguaggaaaugaaucauaggguaaaaugga

SEQ ID NO: 58808 - RNA, 32 nt, Human
aggguaggagagcucagccucggauggccaac

SEQ ID NO: 58809 - RNA, 32 nt, Human
aggguaggagcagcuggagacucugcucuacc

SEQ ID NO: 58810 - RNA, 31 nt, Human
aggguaggagugccuguuuccccugcugggc

SEQ ID NO: 58811 - RNA, 32 nt, Human
aggguaggcagugggcugggccaccguggguu

SEQ ID NO: 58812 - RNA, 32 nt, Human
aggguaggcugagcuccccacccuggagcccc

SEQ ID NO: 58813 - RNA, 32 nt, Human
aggguagggaaugccucauuacucacugggcc

SEQ ID NO: 58814 - RNA, 32 nt, Human
aggguagggggaggggcuggggaagaucuguc

SEQ ID NO: 58815 - RNA, 32 nt, Human
aggguagggugagggaggacaggccaguaggg

SEQ ID NO: 58816 - RNA, 32 nt, Human
aggguaggguguggagguguggaggcccccug

SEQ ID NO: 58817 - RNA, 19 nt, Human
aggguagguggagguggga

SEQ ID NO: 58818 - RNA, 32 nt, Human
aggguagucccgaacuccugaccucaagugau

SEQ ID NO: 58819 - RNA, 32 nt, Human
aggguagugaagcucaccacuguccuuuguuu

SEQ ID NO: 58820 - RNA, 32 nt, Human
aggguagugauggauugaucagggcaagcaau

SEQ ID NO: 58821 - RNA, 32 nt, Human
aggguaguuucccuaagucuguccugagaaaa

SEQ ID NO: 58822 - RNA, 20 nt, Human
aggguaucaccaagaagcca

SEQ ID NO: 58823 - RNA, 32 nt, Human
aggguaucaccacuucaauuuuaucaagccac

SEQ ID NO: 58824 - RNA, 32 nt, Human
aggguaucuccauguuggucaggcuggucuug

SEQ ID NO: 58825 - RNA, 32 nt, Human
aggguaugaagcugcgcuccuccaucggguuu

SEQ ID NO: 58826 - RNA, 31 nt, Human
aggguaugaguggaaagaggaugggcgagga

SEQ ID NO: 58827 - RNA, 32 nt, Human
aggguauggagcucacaucaguucaucauggu

SEQ ID NO: 58828 - RNA, 30 nt, Human
aggguaugggaagagaaaugaagaagacug

SEQ ID NO: 58829 - RNA, 32 nt, Human
aggguauguuuguuuaaccucugucucuuauc

SEQ ID NO: 58830 - RNA, 32 nt, Human
aggguauguuuuuagagaaauggaaguuugag

SEQ ID NO: 58831 - RNA, 22 nt, Human
aggguauuggacacggcagcgu

SEQ ID NO: 58832 - RNA, 32 nt, Human
aggguauuuugccauguugcccaggcuagucu

SEQ ID NO: 58833 - RNA, 32 nt, Human
agggucaaaagaaccaggauugcauuugaagu

SEQ ID NO: 58834 - RNA, 32 nt, Human
agggucaaagcacaauacugggcaauucagag

SEQ ID NO: 58835 - RNA, 22 nt, Human
agggucaagugaucuuuauggg

SEQ ID NO: 58836 - RNA, 19 nt, Human
agggucacaaaguguucuu

SEQ ID NO: 58837 - RNA, 20 nt, Human
agggucacaagaggcuccag

SEQ ID NO: 58838 - RNA, 32 nt, Human
agggucacagcaaggcugggaccauggcaagc

SEQ ID NO: 58839 - RNA, 25 nt, Human
agggucacaguugagucauuugcca

SEQ ID NO: 58840 - RNA, 32 nt, Human
agggucacaugaacagauguugcaguguaccu

SEQ ID NO: 58841 - RNA, 32 nt, Human
agggucacaugcccuggcaugggcagaaacug

SEQ ID NO: 58842 - RNA, 21 nt, Human
agggucacauuugugccucac

SEQ ID NO: 58843 - RNA, 32 nt, Human
agggucaccacugccagccucaggcaacauag

SEQ ID NO: 58844 - RNA, 31 nt, Human
agggucaccagagugaugguuggagaacaug

SEQ ID NO: 58845 - RNA, 32 nt, Human
agggucacccaaauagcugagugcaguccuug

SEQ ID NO: 58846 - RNA, 32 nt, Human
agggucacccacggacagagaccaagagaggu

SEQ ID NO: 58847 - RNA, 32 nt, Human
agggucaccuggaggcagacguuguggggaag

SEQ ID NO: 58848 - RNA, 32 nt, Human
agggucacugacacagcugagaccaagcugag

SEQ ID NO: 58849 - RNA, 32 nt, Human
agggucagaagugccaagucacuggccguuaa

SEQ ID NO: 58850 - RNA, 32 nt, Human
agggucagcaagacaagcagguugcggcaagg

SEQ ID NO: 58851 - RNA, 32 nt, Human
agggucagcagccgccagacuuccugccgaag

SEQ ID NO: 58852 - RNA, 32 nt, Human
agggucagccauucacacccauccacucaccu

SEQ ID NO: 58853 - RNA, 32 nt, Human
agggucagcccuggacagaccucugcccaggg

SEQ ID NO: 58854 - RNA, 32 nt, Human
agggucagccuaaggagaugggaauaaagagg

SEQ ID NO: 58855 - RNA, 32 nt, Human
agggucagccugcugugcccacacacacccac

SEQ ID NO: 58856 - RNA, 32 nt, Human
agggucagcucuccucggaggcugcuggggag

SEQ ID NO: 58857 - RNA, 32 nt, Human
agggucaggaaggggcggcuggcuuuggggga

SEQ ID NO: 58858 - RNA, 32 nt, Human
agggucaggagagaaugggggaggaggcgguc

SEQ ID NO: 58859 - RNA, 32 nt, Human
agggucaggaugaagcagaucugcuguagacu

SEQ ID NO: 58860 - RNA, 32 nt, Human
agggucaggcaccugagauugcagucacccag

SEQ ID NO: 58861 - RNA, 32 nt, Human
agggucaggcagaaagcgugauagaggagaga

SEQ ID NO: 58862 - RNA, 32 nt, Human
agggucaggcccccuccucuccccaguuuccc

SEQ ID NO: 58863 - RNA, 20 nt, Human
agggucagggcuucugugga

SEQ ID NO: 58864 - RNA, 24 nt, Human
agggucaggucauggguaugugga

SEQ ID NO: 58865 - RNA, 32 nt, Human
agggucagguccugucaagaggagcugggugu

SEQ ID NO: 58866 - RNA, 24 nt, Human
agggucagugcugaggccugggca

SEQ ID NO: 58867 - RNA, 32 nt, Human
agggucaucuuucuuuuuaaagaauuaagcca

SEQ ID NO: 58868 - RNA, 32 nt, Human
agggucaugaagaauacugcaagugaaacugc

SEQ ID NO: 58869 - RNA, 22 nt, Human
agggucaugaguuuucugcagg

SEQ ID NO: 58870 - RNA, 16 nt, Human
agggucaugcaugaaa

SEQ ID NO: 58871 - RNA, 21 nt, Human
agggucauguccuaccugcca

SEQ ID NO: 58872 - RNA, 32 nt, Human
aggguccaccagcaggaagaaaccccaggagg

SEQ ID NO: 58873 - RNA, 32 nt, Human
aggguccacggcuucauucuugaagucaguga

SEQ ID NO: 58874 - RNA, 31 nt, Human
aggguccagagagccggcaggaggggacccu

SEQ ID NO: 58875 - RNA, 32 nt, Human
aggguccagcagcaggaagaaaccccaggagg

SEQ ID NO: 58876 - RNA, 32 nt, Human
aggguccagccucuucugccaggaagcccuuc

SEQ ID NO: 58877 - RNA, 32 nt, Human
aggguccagcugaaggugaggggauggaguag

SEQ ID NO: 58878 - RNA, 19 nt, Human
aggguccagggcccaggag

SEQ ID NO: 58879 - RNA, 32 nt, Human
aggguccagggcuucguucuugaagucaguga

SEQ ID NO: 58880 - RNA, 32 nt, Human
aggguccauggcuucauucuugaagucaguga

SEQ ID NO: 58881 - RNA, 32 nt, Human
agggucccaacugucuacuaaccggcuucccg

SEQ ID NO: 58882 - RNA, 32 nt, Human
agggucccaagugcuggucccaaccugaagcu

SEQ ID NO: 58883 - RNA, 28 nt, Human
agggucccaagugguacaucgucauagc

SEQ ID NO: 58884 - RNA, 32 nt, Human
agggucccaaguguccgggcccccagcuaccc

SEQ ID NO: 58885 - RNA, 32 nt, Human
agggucccacuauguugcucaggcugguuuug

SEQ ID NO: 58886 - RNA, 17 nt, Human
aggguccccaccuuccu

SEQ ID NO: 58887 - RNA, 23 nt, Human
aggguccccaucaccugcuucac

SEQ ID NO: 58888 - RNA, 20 nt, Human
agggucccgggcccagagcc

SEQ ID NO: 58889 - RNA, 32 nt, Human
agggucccguccuugacaccucagccucuaca

SEQ ID NO: 58890 - RNA, 32 nt, Human
agggucccuaggccuccacuucugagggcagc

SEQ ID NO: 58891 - RNA, 32 nt, Human
agggucccuccagcaaagcucccgcggaaaac

SEQ ID NO: 58892 - RNA, 19 nt, Human
agggucccuggacuggggg

SEQ ID NO: 58893 - RNA, 32 nt, Human
agggucccuguggaggugcugaagcccacagu

SEQ ID NO: 58894 - RNA, 32 nt, Human
agggucccuguuccuguuuggccaaggaaggg

SEQ ID NO: 58895 - RNA, 32 nt, Human
aggguccgccuucugcaggguucccaggcccc

SEQ ID NO: 58896 - RNA, 32 nt, Human
aggguccgcggcuucauucuugaagucaguga

SEQ ID NO: 58897 - RNA, 32 nt, Human
aggguccgcggcuucauucuugaagucgacag

SEQ ID NO: 58898 - RNA, 32 nt, Human
aggguccgcggcuucauuuuugaagucaguga

SEQ ID NO: 58899 - RNA, 32 nt, Human
aggguccgcggcuucguucuugaagucaguga

SEQ ID NO: 58900 - RNA, 32 nt, Human
aggguccgggccugaggcuggcgcccgauucu

SEQ ID NO: 58901 - RNA, 32 nt, Human
aggguccguggcuucauucuugaagucaggga

SEQ ID NO: 58902 - RNA, 32 nt, Human
aggguccguggcuucauucuugaagucaguga

SEQ ID NO: 58903 - RNA, 32 nt, Human
aggguccuccacccucccccugaccacauaca

SEQ ID NO: 58904 - RNA, 32 nt, Human
aggguccuccagcaucgugggcucaagaguug

SEQ ID NO: 58905 - RNA, 32 nt, Human
aggguccuccuugucugguucugcacccgucu

SEQ ID NO: 58906 - RNA, 32 nt, Human
aggguccugaaccuuguuucucacuggcuacu

SEQ ID NO: 58907 - RNA, 32 nt, Human
aggguccugaguaaauguguucuguauaaaca

SEQ ID NO: 58908 - RNA, 32 nt, Human
aggguccugcugucugucauguugccuuguaa

SEQ ID NO: 58909 - RNA, 32 nt, Human
aggguccuguccugcccugccacgacgcugcu

SEQ ID NO: 58910 - RNA, 19 nt, Human
aggguccuuccaccucccu

SEQ ID NO: 58911 - RNA, 32 nt, Human
aggguccuucucucccuggcccguccuccucc

SEQ ID NO: 58912 - RNA, 32 nt, Human
aggguccuuguccugcucaggcaucccugccc

SEQ ID NO: 58913 - RNA, 32 nt, Human
aggguccuuucaaggagguugaaugagacaaa

SEQ ID NO: 58914 - RNA, 32 nt, Human
agggucgcggccgccagcuaggggcgcgggaa

SEQ ID NO: 58915 - RNA, 32 nt, Human
agggucgcucagcccuggcguccuccaccacc

SEQ ID NO: 58916 - RNA, 32 nt, Human
agggucggaccugccucaauaccgccaagguc

SEQ ID NO: 58917 - RNA, 32 nt, Human
agggucggccgcuuucccucuggaccaccucc

SEQ ID NO: 58918 - RNA, 32 nt, Human
agggucgggccagccccugcacugccucgcag

SEQ ID NO: 58919 - RNA, 32 nt, Human
agggucguggccagcccugcagcuucagcacc

SEQ ID NO: 58920 - RNA, 32 nt, Human
agggucguuuacuguaucaggagugccuccua

SEQ ID NO: 58921 - RNA, 32 nt, Human
agggucuaccagccacagucucugcacguuuc

SEQ ID NO: 58922 - RNA, 32 nt, Human
agggucuagaaugcugucuccagguagcugga

SEQ ID NO: 58923 - RNA, 32 nt, Human
agggucuaggagguaagaccagcugggaugac

SEQ ID NO: 58924 - RNA, 32 nt, Human
agggucucaaacuccugaccucaggcgaucca

SEQ ID NO: 58925 - RNA, 32 nt, Human
agggucucaccacuucauuagauaaguguugu

SEQ ID NO: 58926 - RNA, 32 nt, Human
agggucucaccauguugcccagccuggucuca

SEQ ID NO: 58927 - RNA, 32 nt, Human
agggucucaccauguugcccaggcuggucuug

SEQ ID NO: 58928 - RNA, 32 nt, Human
agggucucaccauguuguccagccuggucuca

SEQ ID NO: 58929 - RNA, 32 nt, Human
agggucucacccugucacucaggcuggagcac

SEQ ID NO: 58930 - RNA, 32 nt, Human
agggucucacucuguuacccaggcuggagugc

SEQ ID NO: 58931 - RNA, 32 nt, Human
agggucucagccagaaggcaggcaggaagaga

SEQ ID NO: 58932 - RNA, 32 nt, Human
agggucuccaaggcauuuccacacuauuggug

SEQ ID NO: 58933 - RNA, 32 nt, Human
agggucuccagccucagggccuggcuucuguu

SEQ ID NO: 58934 - RNA, 32 nt, Human
agggucuccagggcccacaccugagucaugcc

SEQ ID NO: 58935 - RNA, 32 nt, Human
agggucucccacugcugugugauucuaaaagc

SEQ ID NO: 58936 - RNA, 32 nt, Human
agggucucccagagugaacuuggugcucuaag

SEQ ID NO: 58937 - RNA, 32 nt, Human
agggucucccuauguugcccaggcuggucuug

SEQ ID NO: 58938 - RNA, 32 nt, Human
agggucucccucagucgcucaggcuggagugc

SEQ ID NO: 58939 - RNA, 32 nt, Human
agggucucccucugucauccaggcuggagugc

SEQ ID NO: 58940 - RNA, 32 nt, Human
agggucucccucuguugcccaggcuggagugc

SEQ ID NO: 58941 - RNA, 32 nt, Human
agggucuccugcaggcccuugugggcuccuug

SEQ ID NO: 58942 - RNA, 32 nt, Human
agggucuccugcagugccauucugccuucuca

SEQ ID NO: 58943 - RNA, 32 nt, Human
agggucucgccauguugcccaggcugguuuaa

SEQ ID NO: 58944 - RNA, 32 nt, Human
agggucucgcucuauggcccaggcuggagcgc

SEQ ID NO: 58945 - RNA, 32 nt, Human
agggucucgcuuugacacccaggcuggagugc

SEQ ID NO: 58946 - RNA, 32 nt, Human
agggucucuccucccugcugaagucccucucc

SEQ ID NO: 58947 - RNA, 32 nt, Human
agggucucucuccuggcauccgucuuuaccca

SEQ ID NO: 58948 - RNA, 32 nt, Human
agggucucucucuuacaaccaagaacauuauc

SEQ ID NO: 58949 - RNA, 32 nt, Human
agggucucuugcccaucucuccggccaccccg

SEQ ID NO: 58950 - RNA, 32 nt, Human
agggucugaaaccuuagugagcaaaaacugau

SEQ ID NO: 58951 - RNA, 32 nt, Human
agggucugaaagguugggggaggcugggagag

SEQ ID NO: 58952 - RNA, 32 nt, Human
agggucugacucuguccuccaggccggagucc

SEQ ID NO: 58953 - RNA, 32 nt, Human
agggucugagcaccucccucaugcagacagag

SEQ ID NO: 58954 - RNA, 32 nt, Human
agggucugcacucuaacccuaggcaucacaug

SEQ ID NO: 58955 - RNA, 32 nt, Human
agggucugcagccaguucauucccagggcccc

SEQ ID NO: 58956 - RNA, 32 nt, Human
agggucugccaaggugggggucaggggccaug

SEQ ID NO: 58957 - RNA, 32 nt, Human
agggucugcccuuucccugccugaguugcuac

SEQ ID NO: 58958 - RNA, 32 nt, Human
agggucugcucugccuugaccuccuccaagag

SEQ ID NO: 58959 - RNA, 32 nt, Human
agggucuggaagcaugggggagggggagagag

SEQ ID NO: 58960 - RNA, 32 nt, Human
agggucuggagagagcgcgcaguuugcgcggc

SEQ ID NO: 58961 - RNA, 32 nt, Human
agggucugggagaacaggugggaggcuuuugu

SEQ ID NO: 58962 - RNA, 32 nt, Human
agggucugggagaggacggagcuggcucugug

SEQ ID NO: 58963 - RNA, 32 nt, Human
agggucugggcugcuggacuugaggcagagcc

SEQ ID NO: 58964 - RNA, 32 nt, Human
agggucuggggcugaagcugaugcuggcaugg

SEQ ID NO: 58965 - RNA, 31 nt, Human
agggucuggguggaaggaccgcgggugucgc

SEQ ID NO: 58966 - RNA, 16 nt, Human
agggucuguccagccc

SEQ ID NO: 58967 - RNA, 32 nt, Human
agggucugugccagcccugucagugcugcuca

SEQ ID NO: 58968 - RNA, 32 nt, Human
agggucuguuucuccccugcugugcggcuugg

SEQ ID NO: 58969 - RNA, 32 nt, Human
agggucuuaccauguugcccaggcuggucucg

SEQ ID NO: 58970 - RNA, 18 nt, Human
agggucuucagcugggga

SEQ ID NO: 58971 - RNA, 32 nt, Human
agggucuuccacccucgcccugacccuggaca

SEQ ID NO: 58972 - RNA, 32 nt, Human
agggucuucccauguugcccaggcuggucuca

SEQ ID NO: 58973 - RNA, 32 nt, Human
agggucuuccuauuaauggaagaagguaauuu

SEQ ID NO: 58974 - RNA, 32 nt, Human
agggucuugacuugggaaaaucaagccacgug

SEQ ID NO: 58975 - RNA, 32 nt, Human
agggucuugcacuccagcccaggcgagagagc

SEQ ID NO: 58976 - RNA, 32 nt, Human
agggucuugcuauauugcucggagguuugcua

SEQ ID NO: 58977 - RNA, 32 nt, Human
agggucuugcucucucacccaggcuggagugu

SEQ ID NO: 58978 - RNA, 32 nt, Human
agggucuugcucuggcgcccaggcuggaguac

SEQ ID NO: 58979 - RNA, 32 nt, Human
agggucuuggccugccuccuugcggcccuggu

SEQ ID NO: 58980 - RNA, 22 nt, Human
agggucuuggggacagcccucc

SEQ ID NO: 58981 - RNA, 32 nt, Human
agggugaaaggcgagagguugcacaggacaug

SEQ ID NO: 58982 - RNA, 32 nt, Human
agggugaagcagaggaccucagugcugaacau

SEQ ID NO: 58983 - RNA, 32 nt, Human
agggugaagcugaccuccuuccugcucucaug

SEQ ID NO: 58984 - RNA, 32 nt, Human
agggugaaggcaaggaacaaccaccuggccuc

SEQ ID NO: 58985 - RNA, 32 nt, Human
agggugaaggcggcgcuggaggcgugggucag

SEQ ID NO: 58986 - RNA, 32 nt, Human
agggugaaugugcccaggacggcugggacgag

SEQ ID NO: 58987 - RNA, 32 nt, Human
agggugaauugggguuccaccaugucacccuc

SEQ ID NO: 58988 - RNA, 32 nt, Human
agggugacagaagugggacaggagaaguuuuc

SEQ ID NO: 58989 - RNA, 32 nt, Human
agggugacgauguuugaaaaucaacacauaac

SEQ ID NO: 58990 - RNA, 32 nt, Human
agggugagaaagcacaagaggggccagcucgg

SEQ ID NO: 58991 - RNA, 32 nt, Human
agggugagaaccaguacaucugcuguccauca

SEQ ID NO: 58992 - RNA, 32 nt, Human
agggugagaagaggcugagagagaaggggaaa

SEQ ID NO: 58993 - RNA, 32 nt, Human
agggugagagagaagcugggagagcagagaaa

SEQ ID NO: 58994 - RNA, 32 nt, Human
agggugagaggcagugcuguggaaggggccug

SEQ ID NO: 58995 - RNA, 32 nt, Human
agggugagaggggagagcuggacaaacaggug

SEQ ID NO: 58996 - RNA, 32 nt, Human
agggugagaucugcacgggaggacccgagcga

SEQ ID NO: 58997 - RNA, 32 nt, Human
agggugagcagguuuggaggcaaggcggaggg

SEQ ID NO: 58998 - RNA, 21 nt, Human
agggugagccaccaugcccgg

SEQ ID NO: 58999 - RNA, 32 nt, Human
agggugagccggcacaacagccccucggccgc

SEQ ID NO: 59000 - RNA, 32 nt, Human
agggugagcuccagggauuugccuggauuuug

SEQ ID NO: 59001 - RNA, 32 nt, Human
agggugagcucuguauugaucugcagugacuc

SEQ ID NO: 59002 - RNA, 32 nt, Human
agggugaggagcagcugccagccccggcaggc

SEQ ID NO: 59003 - RNA, 32 nt, Human
agggugaggagguggaaggagccggguggaug

SEQ ID NO: 59004 - RNA, 32 nt, Human
agggugagggagugaguguucaaggaggaagg

SEQ ID NO: 59005 - RNA, 32 nt, Human
agggugagggauuaaugguggagccagaggga

SEQ ID NO: 59006 - RNA, 32 nt, Human
agggugaggggcugaggucacaccuugggcac

SEQ ID NO: 59007 - RNA, 32 nt, Human
agggugagguauaagcucacagaauucagaua

SEQ ID NO: 59008 - RNA, 32 nt, Human
agggugaggucuggcuccuggcccaggacucu

SEQ ID NO: 59009 - RNA, 32 nt, Human
agggugaguauggggccaggccccagaguccc

SEQ ID NO: 59010 - RNA, 32 nt, Human
agggugagucugaguugaaaaugcagaagagg

SEQ ID NO: 59011 - RNA, 32 nt, Human
agggugauaagaaguggucagacucugguugu

SEQ ID NO: 59012 - RNA, 32 nt, Human
agggugaucuguguguucuuagacaaacucgc

SEQ ID NO: 59013 - RNA, 21 nt, Human
agggugaugcagaggccacag

SEQ ID NO: 59014 - RNA, 32 nt, Human
agggugcacacagcaggugcagugcugucacc

SEQ ID NO: 59015 - RNA, 32 nt, Human
agggugcacacaguagguucugagcuccuggc

SEQ ID NO: 59016 - RNA, 32 nt, Human
agggugcacagcauuaguuucaaugugguuau

SEQ ID NO: 59017 - RNA, 32 nt, Human
agggugcacggccggcccugggcaggcgguag

SEQ ID NO: 59018 - RNA, 32 nt, Human
agggugcagccugaucuuccucuucucccuug

SEQ ID NO: 59019 - RNA, 32 nt, Human
agggugcaggcagaggcucgggaggccggacu

SEQ ID NO: 59020 - RNA, 32 nt, Human
agggugcaggcagaggcuggggcagaauguuu

SEQ ID NO: 59021 - RNA, 32 nt, Human
agggugcagggaagcccagcugugcucaacuc

SEQ ID NO: 59022 - RNA, 32 nt, Human
agggugcaggugcuguaugcauugguuuauau

SEQ ID NO: 59023 - RNA, 32 nt, Human
agggugcaguaagccgagauugcaccacugca

SEQ ID NO: 59024 - RNA, 32 nt, Human
agggugcauuuuccucucauuauugagaacug

SEQ ID NO: 59025 - RNA, 32 nt, Human
agggugccaaggagacagggcagggcagggac

SEQ ID NO: 59026 - RNA, 32 nt, Human
agggugcccagccugugaggcacuggcaaggu

SEQ ID NO: 59027 - RNA, 21 nt, Human
agggugccccaggccugccca

SEQ ID NO: 59028 - RNA, 32 nt, Human
agggugcccgggcuucccacaccuuccgcggc

SEQ ID NO: 59029 - RNA, 32 nt, Human
agggugcccuggauaggaggguguguacaggg

SEQ ID NO: 59030 - RNA, 32 nt, Human
agggugcccuuacccccuccccagaccuguuc

SEQ ID NO: 59031 - RNA, 32 nt, Human
agggugccggaggcaggguucgggugcguagu

SEQ ID NO: 59032 - RNA, 32 nt, Human
agggugccguuuccugcuccagcuccagaccu

SEQ ID NO: 59033 - RNA, 32 nt, Human
agggugccucggaucaucccugagaugcaggc

SEQ ID NO: 59034 - RNA, 32 nt, Human
agggugccucugcauguccuccaaggcaaagu

SEQ ID NO: 59035 - RNA, 32 nt, Human
agggugccugcucuccuugcccugggccagcc

SEQ ID NO: 59036 - RNA, 32 nt, Human
agggugccuggacccgugggguugcuucauug

SEQ ID NO: 59037 - RNA, 32 nt, Human
agggugccugggaggccagguucuggggaucc

SEQ ID NO: 59038 - RNA, 32 nt, Human
agggugccugggagguggguguggggguggug

SEQ ID NO: 59039 - RNA, 32 nt, Human
agggugccuguccaggaagagcuguguggccu

SEQ ID NO: 59040 - RNA, 32 nt, Human
agggugccuuaugggcccuccucauagguugu

SEQ ID NO: 59041 - RNA, 32 nt, Human
agggugcggcuuccaagcuggccggcccuagc

SEQ ID NO: 59042 - RNA, 32 nt, Human
agggugcggugcagagcagagcaggcaggggu

SEQ ID NO: 59043 - RNA, 32 nt, Human
agggugcucaaggauuggagaggagacaaaac

SEQ ID NO: 59044 - RNA, 32 nt, Human
agggugcucacuggcaccccaucuuccuguga

SEQ ID NO: 59045 - RNA, 32 nt, Human
agggugcucugcccacuccaucaccaugaagc

SEQ ID NO: 59046 - RNA, 32 nt, Human
agggugcugcugccacccgccccagccagcca

SEQ ID NO: 59047 - RNA, 32 nt, Human
agggugcuggacuguauggcugagggcugguu

SEQ ID NO: 59048 - RNA, 32 nt, Human
agggugcugggggcugggguucccuggcccaa

SEQ ID NO: 59049 - RNA, 32 nt, Human
agggugcugucuucccugucugauccuuagca

SEQ ID NO: 59050 - RNA, 32 nt, Human
agggugcugugucuccccuugccugugcccag

SEQ ID NO: 59051 - RNA, 32 nt, Human
agggugcuucccgggcccugcccacacacggu

SEQ ID NO: 59052 - RNA, 32 nt, Human
aggguggaaaugguguggacaggcagauucug

SEQ ID NO: 59053 - RNA, 32 nt, Human
aggguggaagguaagagguugguguggaguug

SEQ ID NO: 59054 - RNA, 32 nt, Human
aggguggaaguagaaaagcaucaacaggcugu

SEQ ID NO: 59055 - RNA, 32 nt, Human
aggguggagaggaggcaggggccgagggggug

SEQ ID NO: 59056 - RNA, 32 nt, Human
aggguggagagggagacuccugggcagccguu

SEQ ID NO: 59057 - RNA, 32 nt, Human
aggguggagagggcggugggaggcgugugccu

SEQ ID NO: 59058 - RNA, 32 nt, Human
aggguggaggcagagcacgccgagcgaguccu

SEQ ID NO: 59059 - RNA, 32 nt, Human
aggguggaggcaguguuucuccccagcaucaa

SEQ ID NO: 59060 - RNA, 32 nt, Human
aggguggaggcaguucugccagccguggcagg

SEQ ID NO: 59061 - RNA, 32 nt, Human
aggguggaggcugggcugaggauuaccauaau

SEQ ID NO: 59062 - RNA, 32 nt, Human
aggguggaggggaagggugggucucaguuagc

SEQ ID NO: 59063 - RNA, 32 nt, Human
aggguggaggggcgacaauggagggaaaucca

SEQ ID NO: 59064 - RNA, 19 nt, Human
aggguggagugagggcgga

SEQ ID NO: 59065 - RNA, 32 nt, Human
aggguggaugaaaaggagggagagaaggugga

SEQ ID NO: 59066 - RNA, 32 nt, Human
aggguggaugguggugaguggaucauuucuuu

SEQ ID NO: 59067 - RNA, 32 nt, Human
aggguggcacacagcagucuuugugccagaac

SEQ ID NO: 59068 - RNA, 32 nt, Human
aggguggcacagaagcucaucucagucauccu

SEQ ID NO: 59069 - RNA, 32 nt, Human
aggguggcaggcagugguuguggcaguggagc

SEQ ID NO: 59070 - RNA, 32 nt, Human
aggguggcaggucacugucacugccgacaucc

SEQ ID NO: 59071 - RNA, 32 nt, Human
aggguggcauggcuccccaucucggguccauc

SEQ ID NO: 59072 - RNA, 32 nt, Human
aggguggccaccacagccuuggcuccauggug

SEQ ID NO: 59073 - RNA, 32 nt, Human
aggguggccacuggaggaugggugggggccuc

SEQ ID NO: 59074 - RNA, 20 nt, Human
aggguggccccagggcuucu

SEQ ID NO: 59075 - RNA, 24 nt, Human
aggguggccucgacaucaaacugc

SEQ ID NO: 59076 - RNA, 18 nt, Human
aggguggcgaggugcgga

SEQ ID NO: 59077 - RNA, 32 nt, Human
aggguggcuacgagguagagggguggggguug

SEQ ID NO: 59078 - RNA, 32 nt, Human
aggguggcucaguuggucccagucagauacgu

SEQ ID NO: 59079 - RNA, 32 nt, Human
aggguggcuggcacgagaugugugggacuggg

SEQ ID NO: 59080 - RNA, 32 nt, Human
aggguggcuggcccggccuccacagcacccca

SEQ ID NO: 59081 - RNA, 32 nt, Human
aggguggcuggcuggcucccuggcaucagugg

SEQ ID NO: 59082 - RNA, 17 nt, Human
aggguggcuggugugga

SEQ ID NO: 59083 - RNA, 32 nt, Human
aggguggcugugggggcucaggaagcucgccc

SEQ ID NO: 59084 - RNA, 32 nt, Human
agggugggagaaggggaaagaaucucacuggc

SEQ ID NO: 59085 - RNA, 32 nt, Human
agggugggagagaagaaaagggaaagaagcug

SEQ ID NO: 59086 - RNA, 32 nt, Human
agggugggagccugggcugggcucaggcagcu

SEQ ID NO: 59087 - RNA, 32 nt, Human
agggugggagcugcugcuggacuggcccgagg

SEQ ID NO: 59088 - RNA, 32 nt, Human
agggugggagggaggaagaacggaagggaggg

SEQ ID NO: 59089 - RNA, 32 nt, Human
agggugggaggggaggcucucuggcuuuaguu

SEQ ID NO: 59090 - RNA, 32 nt, Human
agggugggagucuggagccagacagccaagcc

SEQ ID NO: 59091 - RNA, 32 nt, Human
agggugggcaaacuguaccucuuuguaucaau

SEQ ID NO: 59092 - RNA, 32 nt, Human
agggugggcaggucaaucagcacuuuguggac

SEQ ID NO: 59093 - RNA, 32 nt, Human
agggugggcaguuaucacuggggaagagagga

SEQ ID NO: 59094 - RNA, 32 nt, Human
agggugggcuguguguuaguucugagcaaauc

SEQ ID NO: 59095 - RNA, 32 nt, Human
agggugggcuuuguggucccaccaagaagcuu

SEQ ID NO: 59096 - RNA, 32 nt, Human
aggguggggaacaagaucgccucccagggcca

SEQ ID NO: 59097 - RNA, 32 nt, Human
aggguggggacggguguuccuucugggugggg

SEQ ID NO: 59098 - RNA, 32 nt, Human
aggguggggagucagagcaggucccagcccac

SEQ ID NO: 59099 - RNA, 32 nt, Human
aggguggggcauguagagucuccagggagcca

SEQ ID NO: 59100 - RNA, 32 nt, Human
aggguggggccagcccugacacccucaucccc

SEQ ID NO: 59101 - RNA, 32 nt, Human
aggguggggcccagguaaagugaacagaguua

SEQ ID NO: 59102 - RNA, 32 nt, Human
aggguggggcugggaagcauccuguuuugcau

SEQ ID NO: 59103 - RNA, 32 nt, Human
aggguggggcugucccuuccaggaguuuugcc

SEQ ID NO: 59104 - RNA, 32 nt, Human
aggguggggcuuagaauggggcuuccauggug

SEQ ID NO: 59105 - RNA, 32 nt, Human
aggguggggcuuagggacagggcccagggagg

SEQ ID NO: 59106 - RNA, 32 nt, Human
agggugggggcaagacugggcuguaggggagc

SEQ ID NO: 59107 - RNA, 32 nt, Human
aggguggggguggacgccaggguucugggaac

SEQ ID NO: 59108 - RNA, 24 nt, Human
aggguggggugaagcccguggcca

SEQ ID NO: 59109 - RNA, 32 nt, Human
aggguggggugccccagcuaggaagcaagauc

SEQ ID NO: 59110 - RNA, 32 nt, Human
agggugggguuucugaugcauccacagccaaa

SEQ ID NO: 59111 - RNA, 32 nt, Human
aggguggguacauuuaaaacugacaaguauug

SEQ ID NO: 59112 - RNA, 32 nt, Human
aggguggguaccucugagucccagggaccugg

SEQ ID NO: 59113 - RNA, 32 nt, Human
agggugggucaccagcagaagaagccgaaccc

SEQ ID NO: 59114 - RNA, 32 nt, Human
agggugggucuagacauacuauauucagagaa

SEQ ID NO: 59115 - RNA, 32 nt, Human
agggugggucugccuuucccaguccacugacu

SEQ ID NO: 59116 - RNA, 32 nt, Human
aggguggguggagggguuugcagugugggaau

SEQ ID NO: 59117 - RNA, 23 nt, Human
aggguggguggaucaccugaggu

SEQ ID NO: 59118 - RNA, 32 nt, Human
aggguggucacugccugugauacauuccucag

SEQ ID NO: 59119 - RNA, 32 nt, Human
aggguggucagaggaagccagcagggaagauc

SEQ ID NO: 59120 - RNA, 19 nt, Human
aggguggucagggugagga

SEQ ID NO: 59121 - RNA, 32 nt, Human
agggugguccagccuaggugacaggguggucc

SEQ ID NO: 59122 - RNA, 32 nt, Human
agggugguccaucuuggcacugaagauggaac

SEQ ID NO: 59123 - RNA, 32 nt, Human
agggugguccugcaccugucggggagggggcc

SEQ ID NO: 59124 - RNA, 32 nt, Human
aggguggucgccacugggacacugugaaccag

SEQ ID NO: 59125 - RNA, 32 nt, Human
aggguggucucaaacuccugaccugaggcgau

SEQ ID NO: 59126 - RNA, 32 nt, Human
aggguggucucaaacuccugggcucaagcgaa

SEQ ID NO: 59127 - RNA, 32 nt, Human
aggguggucucaaacuccugggcucaagugau

SEQ ID NO: 59128 - RNA, 32 nt, Human
aggguggucucgaacuccuggccucaagcgau

SEQ ID NO: 59129 - RNA, 32 nt, Human
aggguggucucgaauuccugaccucaguugag

SEQ ID NO: 59130 - RNA, 32 nt, Human
aggguggucucgaauuccuggacucaagcagu

SEQ ID NO: 59131 - RNA, 32 nt, Human
aggguggucucgaucuccugaccucgugaucu

SEQ ID NO: 59132 - RNA, 32 nt, Human
aggguggucucgaucucuugaccucgugaucc

SEQ ID NO: 59133 - RNA, 32 nt, Human
aggguggucucuaacuccuggccucaaaugau

SEQ ID NO: 59134 - RNA, 32 nt, Human
aggguggucuguaacuccugagcucagaugau

SEQ ID NO: 59135 - RNA, 32 nt, Human
aggguggucuugagcuccugaccucaggugau

SEQ ID NO: 59136 - RNA, 32 nt, Human
aggguggucuugaucuccugaccucgugaucc

SEQ ID NO: 59137 - RNA, 32 nt, Human
aggguggugagcugcugggguuggauuauuug

SEQ ID NO: 59138 - RNA, 32 nt, Human
aggguggugcuaagauccuccugaccucaaag

SEQ ID NO: 59139 - RNA, 32 nt, Human
agggugguggagaggagagggagaaagggaag

SEQ ID NO: 59140 - RNA, 32 nt, Human
agggugguguggccugggcauuggagucaaua

SEQ ID NO: 59141 - RNA, 32 nt, Human
agggugguuuacaggggugcucugugcagccc

SEQ ID NO: 59142 - RNA, 32 nt, Human
agggugguuucacucuccucucuccuucuuuc

SEQ ID NO: 59143 - RNA, 32 nt, Human
aggguguaggggauauuaguuuuccauuuuuc

SEQ ID NO: 59144 - RNA, 32 nt, Human
agggugucacccacugcaucuggaguacagcu

SEQ ID NO: 59145 - RNA, 32 nt, Human
agggugucccgauuaccagcaggcucccugca

SEQ ID NO: 59146 - RNA, 32 nt, Human
aggguguccugcaccggggccugggcaggagg

SEQ ID NO: 59147 - RNA, 32 nt, Human
agggugucgggcgaggcaaagugcaaagcauu

SEQ ID NO: 59148 - RNA, 32 nt, Human
agggugucuccucugcuucugggggccacagg

SEQ ID NO: 59149 - RNA, 32 nt, Human
agggugucuguagaucaagauguguauacagc

SEQ ID NO: 59150 - RNA, 32 nt, Human
agggugugagccacugcaccuggccgauaaca

SEQ ID NO: 59151 - RNA, 32 nt, Human
agggugugcccaggcccagagaugauguccag

SEQ ID NO: 59152 - RNA, 32 nt, Human
agggugugcugcacucaugggccuggucucac

SEQ ID NO: 59153 - RNA, 32 nt, Human
agggugugcuuugguguauugagucugaugag

SEQ ID NO: 59154 - RNA, 32 nt, Human
aggguguggacucugggcuccugcugccuggg

SEQ ID NO: 59155 - RNA, 32 nt, Human
aggguguggcauggcucagucuggcccccuug

SEQ ID NO: 59156 - RNA, 32 nt, Human
aggguguggccaccaggugcugugaguuucug

SEQ ID NO: 59157 - RNA, 32 nt, Human
aggguguggcuuggaacauuugggagacugag

SEQ ID NO: 59158 - RNA, 32 nt, Human
agggugugggcuggguggcggggccaggccag

SEQ ID NO: 59159 - RNA, 32 nt, Human
aggguguggggagggguggggcagggagcccc

SEQ ID NO: 59160 - RNA, 23 nt, Human
aggguguggguccugggcuguca

SEQ ID NO: 59161 - RNA, 32 nt, Human
aggguguugaaggaagguagaggguggggcuu

SEQ ID NO: 59162 - RNA, 21 nt, Human
aggguguugacccagaaucca

SEQ ID NO: 59163 - RNA, 32 nt, Human
aggguguugcccaugcuuuuggguggguccca

SEQ ID NO: 59164 - RNA, 32 nt, Human
aggguguugggauacugcagggccaggacuga

SEQ ID NO: 59165 - RNA, 32 nt, Human
aggguguuuguagacgugggggaggagaaucu

SEQ ID NO: 59166 - RNA, 32 nt, Human
aggguuaaagccgcuggagcuuggggagagaa

SEQ ID NO: 59167 - RNA, 32 nt, Human
aggguuaaauuacuucaccucuugcacuuuua

SEQ ID NO: 59168 - RNA, 32 nt, Human
aggguuaagcaacauggugcaucuguggauag

SEQ ID NO: 59169 - RNA, 32 nt, Human
aggguuaauuccugguggggcagcucggcugu

SEQ ID NO: 59170 - RNA, 32 nt, Human
aggguuacaguuucucucacaugcuuuccuca

SEQ ID NO: 59171 - RNA, 32 nt, Human
aggguuacuguagucugauguguccuucccaa

SEQ ID NO: 59172 - RNA, 32 nt, Human
aggguuaggauuacaggcgugagccaccaggc

SEQ ID NO: 59173 - RNA, 17 nt, Human
aggguuaggguuggaga

SEQ ID NO: 59174 - RNA, 32 nt, Human
aggguuaggugucagaaagaaaaggaaguaau

SEQ ID NO: 59175 - RNA, 32 nt, Human
aggguuauuccaggggcuacugaagaucuaau

SEQ ID NO: 59176 - RNA, 32 nt, Human
aggguuauugccccaaccauugcaaugggagg

SEQ ID NO: 59177 - RNA, 32 nt, Human
aggguuauuugacuauuauauaauccguuugc

SEQ ID NO: 59178 - RNA, 32 nt, Human
aggguucaaauacagaagggcccagggcccag

SEQ ID NO: 59179 - RNA, 32 nt, Human
aggguucacagacaggguuucccaccagccac

SEQ ID NO: 59180 - RNA, 32 nt, Human
aggguucagaguagcugggacuacaggcccac

SEQ ID NO: 59181 - RNA, 32 nt, Human
aggguucaggaaacacaggaauuaguagacag

SEQ ID NO: 59182 - RNA, 32 nt, Human
aggguucauguggcauuuuagagaaaagauaa

SEQ ID NO: 59183 - RNA, 32 nt, Human
aggguuccacccugcucugccugccuggggcc

SEQ ID NO: 59184 - RNA, 32 nt, Human
aggguuccagcagccuggggcaguaugucuca

SEQ ID NO: 59185 - RNA, 32 nt, Human
aggguuccagcucugggacauugugcucagga

SEQ ID NO: 59186 - RNA, 32 nt, Human
aggguuccaggcuguguguggggcccaagcau

SEQ ID NO: 59187 - RNA, 20 nt, Human
aggguuccugaccccugccc

SEQ ID NO: 59188 - RNA, 32 nt, Human
aggguucgccccaguccuccugccuggagaca

SEQ ID NO: 59189 - RNA, 32 nt, Human
aggguucuccccacgacaaccccacugcacag

SEQ ID NO: 59190 - RNA, 32 nt, Human
aggguucuccgcaggacaaccccacugcacag

SEQ ID NO: 59191 - RNA, 32 nt, Human
aggguucuccucaaagccucacaaccauagga

SEQ ID NO: 59192 - RNA, 32 nt, Human
aggguucucugaguuugcccugccuuauaaug

SEQ ID NO: 59193 - RNA, 32 nt, Human
aggguucucuuggagccaccucucagccugcc

SEQ ID NO: 59194 - RNA, 32 nt, Human
aggguucugagcagugucggccuuguggccac

SEQ ID NO: 59195 - RNA, 21 nt, Human
aggguucugccucuccaggca

SEQ ID NO: 59196 - RNA, 32 nt, Human
aggguucugccuggcgucgggcuugggccggc

SEQ ID NO: 59197 - RNA, 32 nt, Human
aggguucugggaacgcgcuggcagcccugacg

SEQ ID NO: 59198 - RNA, 32 nt, Human
aggguucugggagcucccuguggccugucugg

SEQ ID NO: 59199 - RNA, 32 nt, Human
aggguucugggcagcagagucugugauaaagg

SEQ ID NO: 59200 - RNA, 32 nt, Human
aggguucugggugggaguggggagggcgaggg

SEQ ID NO: 59201 - RNA, 32 nt, Human
aggguugaaaauccucuggacgaacagaaguc

SEQ ID NO: 59202 - RNA, 32 nt, Human
aggguugaaggaugagacuacacauuggguac

SEQ ID NO: 59203 - RNA, 32 nt, Human
aggguugacuacaucucaucaucucacgaauc

SEQ ID NO: 59204 - RNA, 32 nt, Human
aggguugacucagggggaugaucuggguccca

SEQ ID NO: 59205 - RNA, 32 nt, Human
aggguugagaagaggaaaagaacuucucauuu

SEQ ID NO: 59206 - RNA, 32 nt, Human
aggguugaggggaagauaaacuuuuaaaaagc

SEQ ID NO: 59207 - RNA, 19 nt, Human
aggguugaugcaggucugc

SEQ ID NO: 59208 - RNA, 32 nt, Human
aggguugaugggggaggcguggggaagggaaa

SEQ ID NO: 59209 - RNA, 32 nt, Human
aggguugcagugagcugagauugugccauugc

SEQ ID NO: 59210 - RNA, 32 nt, Human
aggguugcccaggguggagugcaguggcagga

SEQ ID NO: 59211 - RNA, 32 nt, Human
aggguugccugggaacagucucuccccaagau

SEQ ID NO: 59212 - RNA, 32 nt, Human
aggguugccugggcacaguggcucacaccugu

SEQ ID NO: 59213 - RNA, 32 nt, Human
aggguugcucaaguggaaauuuugucagcugu

SEQ ID NO: 59214 - RNA, 32 nt, Human
aggguugcuugagacuagccuagguaacauag

SEQ ID NO: 59215 - RNA, 32 nt, Human
aggguuggagacugucugucuuuguagaaaua

SEQ ID NO: 59216 - RNA, 22 nt, Human
aggguuggccucccuucuuggg

SEQ ID NO: 59217 - RNA, 32 nt, Human
aggguugggaggaccucuuggcgcaggagcug

SEQ ID NO: 59218 - RNA, 32 nt, Human
aggguugggauuacagguguaagccacugcuc

SEQ ID NO: 59219 - RNA, 32 nt, Human
aggguugggauuaccauuuacugaccacaucu

SEQ ID NO: 59220 - RNA, 32 nt, Human
aggguugggauuaccggcaugagccacugcac

SEQ ID NO: 59221 - RNA, 32 nt, Human
aggguugggcugaaucaaaugggagcccucca

SEQ ID NO: 59222 - RNA, 32 nt, Human
aggguugggggugggagggcaacuuacuggag

SEQ ID NO: 59223 - RNA, 32 nt, Human
aggguuggguuagaggugagcuggggccggag

SEQ ID NO: 59224 - RNA, 32 nt, Human
aggguugucaggcggagcugguaggggagcug

SEQ ID NO: 59225 - RNA, 32 nt, Human
aggguuguuagugacccacaggacaguauaga

SEQ ID NO: 59226 - RNA, 32 nt, Human
aggguuguuggaacaucugaccugugcaucca

SEQ ID NO: 59227 - RNA, 32 nt, Human
aggguuguugugaggacuaaaugaguaaagug

SEQ ID NO: 59228 - RNA, 32 nt, Human
aggguuuacacaaagugccacuuauuaaagag

SEQ ID NO: 59229 - RNA, 32 nt, Human
aggguuuacucccagcugcaguucuguucaga

SEQ ID NO: 59230 - RNA, 32 nt, Human
aggguuuaggaggucugaacacacacagugga

SEQ ID NO: 59231 - RNA, 32 nt, Human
aggguuuaggggagggccaugggcaggcuggu

SEQ ID NO: 59232 - RNA, 32 nt, Human
aggguuucaccacguuggccaggauggucucg

SEQ ID NO: 59233 - RNA, 32 nt, Human
aggguuucaccauguuggccagccuggucuug

SEQ ID NO: 59234 - RNA, 32 nt, Human
aggguuucaccauguuggucauguuggucucg

SEQ ID NO: 59235 - RNA, 32 nt, Human
aggguuuccaugggguaggaggaugggcucgc

SEQ ID NO: 59236 - RNA, 32 nt, Human
aggguuuccuggcaacacccacuugggcucua

SEQ ID NO: 59237 - RNA, 32 nt, Human
aggguuucgggagaguccuggcuuugcacuua

SEQ ID NO: 59238 - RNA, 32 nt, Human
aggguuucuccaugcuggacaggcuggucuug

SEQ ID NO: 59239 - RNA, 32 nt, Human
aggguuucuccauguuggucaggcuggucuca

SEQ ID NO: 59240 - RNA, 32 nt, Human
aggguuucuccauguuggucaggcuggucucg

SEQ ID NO: 59241 - RNA, 32 nt, Human
aggguuucuccauguuggucaggcuggucuug

SEQ ID NO: 59242 - RNA, 32 nt, Human
aggguuucugagguccaggaaucuggggacag

SEQ ID NO: 59243 - RNA, 32 nt, Human
aggguuucugcugucuccagacugucuaccaa

SEQ ID NO: 59244 - RNA, 32 nt, Human
aggguuugagagagcagccaggagagcuuagg

SEQ ID NO: 59245 - RNA, 32 nt, Human
aggguuugagcuaggcugaagcagcagaacca

SEQ ID NO: 59246 - RNA, 32 nt, Human
aggguuugcauuuaucagucuguuuuccgaug

SEQ ID NO: 59247 - RNA, 32 nt, Human
aggguuugcccaguuugcagaugagaaaccca

SEQ ID NO: 59248 - RNA, 32 nt, Human
aggguuugcugagcuucuuaaccaguggguua

SEQ ID NO: 59249 - RNA, 32 nt, Human
aggguuugcuggggccaacaccagccuaagug

SEQ ID NO: 59250 - RNA, 32 nt, Human
aggguuuggaaaccaggauuggggucugccca

SEQ ID NO: 59251 - RNA, 31 nt, Human
aggguuugggcuugauuccuguugaauaaua

SEQ ID NO: 59252 - RNA, 32 nt, Human
aggguuuggggagcagagagagccaagaaguu

SEQ ID NO: 59253 - RNA, 32 nt, Human
aggguuugggugcugggaaccaggaagagugg

SEQ ID NO: 59254 - RNA, 32 nt, Human
aggguuuguaacccagggccugugcuggcgug

SEQ ID NO: 59255 - RNA, 32 nt, Human
aggguuugucucauggucagcucgccucucaa

SEQ ID NO: 59256 - RNA, 32 nt, Human
aggguuugugcaaguuugcaaacauguucacc

SEQ ID NO: 59257 - RNA, 24 nt, Human
aggguuuuacuguucauuguguca

SEQ ID NO: 59258 - RNA, 32 nt, Human
aggguuuucagaucacaaccaggauuuaaauc

SEQ ID NO: 59259 - RNA, 32 nt, Human
aggguuuuccauuuaacaagagcacuaguaug

SEQ ID NO: 59260 - RNA, 32 nt, Human
aggguuuucucagauuccuuuuuaaucucuau

SEQ ID NO: 59261 - RNA, 32 nt, Human
aggguuuugguggcuggcgaagcuggggcgug

SEQ ID NO: 59262 - RNA, 32 nt, Human
aggguuuuucaggcugggcacagugacucaca

SEQ ID NO: 59263 - RNA, 32 nt, Human
aggguuuuuccauguugcccaggcugguuucg

SEQ ID NO: 59264 - RNA, 32 nt, Human
agguaaaacuaaaucauugcucucuauacuag

SEQ ID NO: 59265 - RNA, 32 nt, Human
agguaaaagauuagugugagaccaucauggug

SEQ ID NO: 59266 - RNA, 32 nt, Human
agguaaaaggugguagcaaggccaggcgcggu

SEQ ID NO: 59267 - RNA, 21 nt, Human
agguaaaauuuuucuuuggca

SEQ ID NO: 59268 - RNA, 32 nt, Human
agguaaacugggugaagaaggcaagagaagac

SEQ ID NO: 59269 - RNA, 32 nt, Human
agguaaagaaccacucagcaugguuuuuguca

SEQ ID NO: 59270 - RNA, 31 nt, Human
agguaaagaagaccugucugcaguaggaagg

SEQ ID NO: 59271 - RNA, 24 nt, Human
agguaaagacgggaggaucacuug

SEQ ID NO: 59272 - RNA, 32 nt, Human
agguaaagagagagagccagcccagcccuguu

SEQ ID NO: 59273 - RNA, 32 nt, Human
agguaaagauaaccuccucuuucuaugacucc

SEQ ID NO: 59274 - RNA, 32 nt, Human
agguaaaggagccauauauugaagaccauguc

SEQ ID NO: 59275 - RNA, 32 nt, Human
agguaaauucagcugcaucugaaggggcuuca

SEQ ID NO: 59276 - RNA, 17 nt, Human
agguaaauuguccugaa

SEQ ID NO: 59277 - RNA, 32 nt, Human
agguaacauacagcacuuagaagacggccuga

SEQ ID NO: 59278 - RNA, 32 nt, Human
agguaaccaagugccucuaagucaugcuuauu

SEQ ID NO: 59279 - RNA, 32 nt, Human
agguaaccaggauggcuaacaggcuuugauag

SEQ ID NO: 59280 - RNA, 20 nt, Human
agguaaccuuccuuuccucu

SEQ ID NO: 59281 - RNA, 32 nt, Human
agguaacuagacugcagcuaaccaccaccaac

SEQ ID NO: 59282 - RNA, 32 nt, Human
agguaacucaguaaacaguggagcuggaauuc

SEQ ID NO: 59283 - RNA, 32 nt, Human
agguaacuguugucugugccuuuuugaaaaac

SEQ ID NO: 59284 - RNA, 24 nt, Human
agguaagaggauugcuugagccca

SEQ ID NO: 59285 - RNA, 32 nt, Human
agguaagagucauaucacaaaaagccauuaag

SEQ ID NO: 59286 - RNA, 32 nt, Human
agguaagauaaauaaauacauacacauauguu

SEQ ID NO: 59287 - RNA, 19 nt, Human
agguaagcccugggcccug

SEQ ID NO: 59288 - RNA, 24 nt, Human
agguaagcugcguucccugggcug

SEQ ID NO: 59289 - RNA, 32 nt, Human
agguaagggagaggagaggauugauagagugu

SEQ ID NO: 59290 - RNA, 32 nt, Human
agguaaggucccuagagcagcagaacaagaug

SEQ ID NO: 59291 - RNA, 32 nt, Human
agguaaguauggggcuuucccacccacaguag

SEQ ID NO: 59292 - RNA, 32 nt, Human
agguaagucacugcagaccgaccucccugcag

SEQ ID NO: 59293 - RNA, 32 nt, Human
agguaaguggcaggacccugucaggauugcag

SEQ ID NO: 59294 - RNA, 32 nt, Human
agguaaguuugcauccaagcaaugucgucuga

SEQ ID NO: 59295 - RNA, 32 nt, Human
agguaauaaucaggaaagcaaccuuacuacug

SEQ ID NO: 59296 - RNA, 32 nt, Human
agguaauauaugcacauuguacaaaaaucaga

SEQ ID NO: 59297 - RNA, 32 nt, Human
agguaauccauggagagagaaaaagaagaggg

SEQ ID NO: 59298 - RNA, 32 nt, Human
agguaaucuuucccaccuucccaaaccuaauu

SEQ ID NO: 59299 - RNA, 32 nt, Human
agguaaugucauggaauagaaugcugucacca

SEQ ID NO: 59300 - RNA, 32 nt, Human
agguaauguguacuuuucuuaugauaagauca

SEQ ID NO: 59301 - RNA, 32 nt, Human
agguaauuaguguggucccacccuccaucuuc

SEQ ID NO: 59302 - RNA, 32 nt, Human
agguaauugaaucacagggacgggucuuuccc

SEQ ID NO: 59303 - RNA, 32 nt, Human
agguaauuugguuuuaugggguauucuggaaa

SEQ ID NO: 59304 - RNA, 32 nt, Human
agguaauuuuggcugugguggaaacuuuggug

SEQ ID NO: 59305 - RNA, 32 nt, Human
agguacaaacacauucauguuucuuuuugucu

SEQ ID NO: 59306 - RNA, 32 nt, Human
agguacaaaugaugcaaaaugugcaccuggcu

SEQ ID NO: 59307 - RNA, 32 nt, Human
agguacacagaguagcugagcaguucacuuca

SEQ ID NO: 59308 - RNA, 32 nt, Human
agguacacagccauccaggcugugcugucccu

SEQ ID NO: 59309 - RNA, 32 nt, Human
agguacacaguucaauccaucuggaaggugga

SEQ ID NO: 59310 - RNA, 31 nt, Human
agguacacaucacucuuuacauuuuucuaag

SEQ ID NO: 59311 - RNA, 32 nt, Human
agguacaccacuacacuccagccugggcaaca

SEQ ID NO: 59312 - RNA, 32 nt, Human
agguacaccauuaucacauaagugcugucagu

SEQ ID NO: 59313 - RNA, 31 nt, Human
agguacagaaagaagagaaaagacugaacug

SEQ ID NO: 59314 - RNA, 32 nt, Human
agguacagaaagaagagaaaagacugaacuga

SEQ ID NO: 59315 - RNA, 32 nt, Human
agguacagacuggagggcucguccugcuacag

SEQ ID NO: 59316 - RNA, 32 nt, Human
agguacagcacauagcccaggagccagggggu

SEQ ID NO: 59317 - RNA, 32 nt, Human
agguacagcagaaaggagaacuauccaaaacu

SEQ ID NO: 59318 - RNA, 32 nt, Human
agguacagcccugucugcgguggcugcuuugu

SEQ ID NO: 59319 - RNA, 30 nt, Human
agguacagccugacgcuauggcaggcugcc

SEQ ID NO: 59320 - RNA, 32 nt, Human
agguacaucucuaaaguggagcacuuacacca

SEQ ID NO: 59321 - RNA, 32 nt, Human
agguacaugccuguaaucccagcuacucagga

SEQ ID NO: 59322 - RNA, 32 nt, Human
agguaccaaauaccccacauaaggaaaguacu

SEQ ID NO: 59323 - RNA, 32 nt, Human
agguaccacaaaccaggugcuauguuaagugc

SEQ ID NO: 59324 - RNA, 32 nt, Human
agguaccacacagcugggcuucccaccaggcu

SEQ ID NO: 59325 - RNA, 23 nt, Human
agguaccacauugucucugagcu

SEQ ID NO: 59326 - RNA, 32 nt, Human
agguaccagccuggccgggacccggcuguggg

SEQ ID NO: 59327 - RNA, 32 nt, Human
agguaccagguagagagagggccagggcugag

SEQ ID NO: 59328 - RNA, 32 nt, Human
agguacccaaguggccugaaacaguguaggga

SEQ ID NO: 59329 - RNA, 18 nt, Human
agguaccgcugugugcau

SEQ ID NO: 59330 - RNA, 32 nt, Human
agguaccgggagugaggcugagcugccacaca

SEQ ID NO: 59331 - RNA, 32 nt, Human
agguaccuagagaggaagugagggaggccacg

SEQ ID NO: 59332 - RNA, 32 nt, Human
agguaccuccucccuuucaucucagcaagaau

SEQ ID NO: 59333 - RNA, 32 nt, Human
agguaccuguaaucccagcuacucgggaggug

SEQ ID NO: 59334 - RNA, 32 nt, Human
agguacgcaccaccaugcccagcuuguguggg

SEQ ID NO: 59335 - RNA, 32 nt, Human
agguacgcucacuguacagccaaugccuccau

SEQ ID NO: 59336 - RNA, 32 nt, Human
agguacggagucucgcucugucgcccaggcug

SEQ ID NO: 59337 - RNA, 32 nt, Human
agguacggcggcacggcugcagccuggauggg

SEQ ID NO: 59338 - RNA, 32 nt, Human
agguacggcuggggguucuguccugcucaucc

SEQ ID NO: 59339 - RNA, 32 nt, Human
agguacguagugggagaggggugugauggggc

SEQ ID NO: 59340 - RNA, 32 nt, Human
agguacuaauuacugcccagccuggggagauc

SEQ ID NO: 59341 - RNA, 32 nt, Human
agguacuacagauuuucaaaacugaaugagag

SEQ ID NO: 59342 - RNA, 32 nt, Human
agguacuacuauuauugcuauuuucaaaugag

SEQ ID NO: 59343 - RNA, 32 nt, Human
agguacuagagaccucugagaucugcacacau

SEQ ID NO: 59344 - RNA, 32 nt, Human
agguacuaucgauuuccuaaaggaccgugagu

SEQ ID NO: 59345 - RNA, 32 nt, Human
agguacucacagaacaaucaggugugaccaua

SEQ ID NO: 59346 - RNA, 32 nt, Human
agguacucccugagcaggaccccacacuuggg

SEQ ID NO: 59347 - RNA, 32 nt, Human
agguacuccugccggccucccacccggccugc

SEQ ID NO: 59348 - RNA, 32 nt, Human
agguacucgggaggcugaggcagagaauugcu

SEQ ID NO: 59349 - RNA, 32 nt, Human
agguacucuggccacagccucuggggugggag

SEQ ID NO: 59350 - RNA, 32 nt, Human
agguacugaaagcagagguggcgggaagggga

SEQ ID NO: 59351 - RNA, 32 nt, Human
agguacugaaggcuucugcagcuuuggcugca

SEQ ID NO: 59352 - RNA, 32 nt, Human
agguacugagcacagguggccccucuggaaau

SEQ ID NO: 59353 - RNA, 32 nt, Human
agguacugauccuguuucuugcucugagugcu

SEQ ID NO: 59354 - RNA, 32 nt, Human
agguacugcccaggacugggcccagauaauga

SEQ ID NO: 59355 - RNA, 32 nt, Human
agguacugggcccagaggcuuugccuugacag

SEQ ID NO: 59356 - RNA, 32 nt, Human
agguacugucaauaucucacucuuggggauau

SEQ ID NO: 59357 - RNA, 32 nt, Human
agguacugucaugggcuaggcaugguggcuca

SEQ ID NO: 59358 - RNA, 32 nt, Human
agguacuuaguucucacaccugcacuuaccag

SEQ ID NO: 59359 - RNA, 32 nt, Human
agguacuucccgaggcuauggugugagagccc

SEQ ID NO: 59360 - RNA, 32 nt, Human
agguacuucucucuccuuccuccuucuccucc

SEQ ID NO: 59361 - RNA, 18 nt, Human
agguacuuugcagucaua

SEQ ID NO: 59362 - RNA, 32 nt, Human
agguagaaagagaagacccagagugaagaagu

SEQ ID NO: 59363 - RNA, 32 nt, Human
agguagaacauccugcagcuaaaguucuuugu

SEQ ID NO: 59364 - RNA, 32 nt, Human
agguagaagagaaaggcuuccccuacacccca

SEQ ID NO: 59365 - RNA, 22 nt, Human
agguagaauuugaguuuuagca

SEQ ID NO: 59366 - RNA, 22 nt, Human
agguagagaccccacccuccca

SEQ ID NO: 59367 - RNA, 32 nt, Human
agguagagcaucaccagcuccuguggccuugu

SEQ ID NO: 59368 - RNA, 32 nt, Human
agguagagcuccaggacauucagguaccaggu

SEQ ID NO: 59369 - RNA, 32 nt, Human
agguagagcuguucgccggggcgccugcagag

SEQ ID NO: 59370 - RNA, 30 nt, Human
agguagagcuugcaguaagcagagaucaug

SEQ ID NO: 59371 - RNA, 32 nt, Human
agguagaggcacgggauaaggggccaggguca

SEQ ID NO: 59372 - RNA, 32 nt, Human
agguagagggcugucagcccugaaaaacacac

SEQ ID NO: 59373 - RNA, 32 nt, Human
agguagaggugagaauggggaggcaagaucuc

SEQ ID NO: 59374 - RNA, 18 nt, Human
agguagagguugcaguga

SEQ ID NO: 59375 - RNA, 19 nt, Human
agguagagguugcagugag

SEQ ID NO: 59376 - RNA, 32 nt, Human
agguagagguugcagugagcugagaucguagc

SEQ ID NO: 59377 - RNA, 32 nt, Human
agguagaguaagagguugaagauaacagagug

SEQ ID NO: 59378 - RNA, 32 nt, Human
agguagaguuaccaaagagcucagggaugcag

SEQ ID NO: 59379 - RNA, 23 nt, Human
agguagaugaaguugcuuugcca

SEQ ID NO: 59380 - RNA, 32 nt, Human
agguagaugcagcucuuacagauauuuacuug

SEQ ID NO: 59381 - RNA, 32 nt, Human
agguagaugcuucugauuuacuucucucaaag

SEQ ID NO: 59382 - RNA, 32 nt, Human
agguagcaagagcuccagagagaagucgagga

SEQ ID NO: 59383 - RNA, 32 nt, Human
agguagcagaacucacguucccacuauagcaa

SEQ ID NO: 59384 - RNA, 32 nt, Human
agguagcagcugugcugucucuuaaagucuga

SEQ ID NO: 59385 - RNA, 32 nt, Human
agguagcagugagccgagaucacuccacugca

SEQ ID NO: 59386 - RNA, 32 nt, Human
agguagcagugagccgagaucgcgccacugcg

SEQ ID NO: 59387 - RNA, 32 nt, Human
agguagcaucuugccauuuucuuccugcacag

SEQ ID NO: 59388 - RNA, 32 nt, Human
agguagccaacacgcugugcucagcuugcuau

SEQ ID NO: 59389 - RNA, 32 nt, Human
agguagccaaucugaauccuaaggaccucucg

SEQ ID NO: 59390 - RNA, 32 nt, Human
agguagccagugccaaggaguuccagaucgug

SEQ ID NO: 59391 - RNA, 32 nt, Human
agguagcccaggagcagggcggccaccccaag

SEQ ID NO: 59392 - RNA, 32 nt, Human
agguagccucugguggcuaugcauuuauuacu

SEQ ID NO: 59393 - RNA, 32 nt, Human
agguagcuacacagcaucuguuacgguuaaug

SEQ ID NO: 59394 - RNA, 32 nt, Human
agguagcuaccacuggugugggcugcuggcug

SEQ ID NO: 59395 - RNA, 32 nt, Human
agguagcucucuagggagaguugcaggcagag

SEQ ID NO: 59396 - RNA, 32 nt, Human
agguaggaagaaaaugggaguaagagaacaau

SEQ ID NO: 59397 - RNA, 32 nt, Human
agguaggaagauugcuugaggccaggaguccc

SEQ ID NO: 59398 - RNA, 32 nt, Human
agguaggacaggaaugucccugccugguacug

SEQ ID NO: 59399 - RNA, 24 nt, Human
agguaggagaauugcuugaaccca

SEQ ID NO: 59400 - RNA, 32 nt, Human
agguaggaggaucgcuugagccuggguagagg

SEQ ID NO: 59401 - RNA, 24 nt, Human
agguaggaggauugcuugagccca

SEQ ID NO: 59402 - RNA, 23 nt, Human
agguaggaggauugcuugagucc

SEQ ID NO: 59403 - RNA, 32 nt, Human
agguaggagggugagguccauccagguagaca

SEQ ID NO: 59404 - RNA, 32 nt, Human
agguaggaucgcuuuagcccaggaguucaaga

SEQ ID NO: 59405 - RNA, 32 nt, Human
agguaggcacaaauacauuccuuuuagaguua

SEQ ID NO: 59406 - RNA, 32 nt, Human
agguaggcaccagccacagaacuggaaagccc

SEQ ID NO: 59407 - RNA, 26 nt, Human
agguaggcagaucaccugaggucagg

SEQ ID NO: 59408 - RNA, 22 nt, Human
agguaggcagaucacgagguca

SEQ ID NO: 59409 - RNA, 26 nt, Human
agguaggcagaucacuugaggucagg

SEQ ID NO: 59410 - RNA, 32 nt, Human
agguaggcgaaaagaugacaggauacagaguc

SEQ ID NO: 59411 - RNA, 25 nt, Human
agguaggcggaucaccugaggucgg

SEQ ID NO: 59412 - RNA, 26 nt, Human
agguaggcggaucaccugagguuagg

SEQ ID NO: 59413 - RNA, 25 nt, Human
agguaggcggaucacuggggucagg

SEQ ID NO: 59414 - RNA, 32 nt, Human
agguaggcucacuucucuuucccuucaaaaug

SEQ ID NO: 59415 - RNA, 32 nt, Human
agguagggcuggauccaggaauucaaaugaug

SEQ ID NO: 59416 - RNA, 32 nt, Human
agguaggggcaggcaagagagaggauucagac

SEQ ID NO: 59417 - RNA, 25 nt, Human
agguaggggggaucacuugagccca

SEQ ID NO: 59418 - RNA, 32 nt, Human
agguaggguucaggugagcaaaaagaaagugg

SEQ ID NO: 59419 - RNA, 24 nt, Human
agguagguagauugcuugagccca

SEQ ID NO: 59420 - RNA, 32 nt, Human
agguagguagcuaugauaggcaccuaaugcuu

SEQ ID NO: 59421 - RNA, 32 nt, Human
agguaggugaagccuggccaggcgggaggcuu

SEQ ID NO: 59422 - RNA, 25 nt, Human
agguagguggauaccugaggucagg

SEQ ID NO: 59423 - RNA, 26 nt, Human
agguagguggaucacccaaggucagg

SEQ ID NO: 59424 - RNA, 26 nt, Human
agguagguggaucaccuaaggucagg

SEQ ID NO: 59425 - RNA, 26 nt, Human
agguagguggaucaccugaggucggg

SEQ ID NO: 59426 - RNA, 24 nt, Human
agguagguggaucaugaggucagg

SEQ ID NO: 59427 - RNA, 25 nt, Human
agguagguggaucgccugaggucag

SEQ ID NO: 59428 - RNA, 32 nt, Human
agguaguauugugcuuuaaaaaccagaggcuc

SEQ ID NO: 59429 - RNA, 32 nt, Human
agguagugacugagauuuggugaucuggcuga

SEQ ID NO: 59430 - RNA, 32 nt, Human
agguaguggcuguuaggcacacaguauaauuc

SEQ ID NO: 59431 - RNA, 32 nt, Human
agguagugggagagaggaaaggagggaaggca

SEQ ID NO: 59432 - RNA, 32 nt, Human
agguaguuaccugaauauagguugaaaagguu

SEQ ID NO: 59433 - RNA, 32 nt, Human
agguaguucuggugcagguaaguggcccugag

SEQ ID NO: 59434 - RNA, 32 nt, Human
agguaguugguuuguccauagcauccugagcu

SEQ ID NO: 59435 - RNA, 32 nt, Human
agguauaaaagugaugaccuaucaugaggaaa

SEQ ID NO: 59436 - RNA, 32 nt, Human
agguauaaaggccauccacauuuuaaaggguu

SEQ ID NO: 59437 - RNA, 32 nt, Human
agguauacagcaguaaucuccuauuuuggugu

SEQ ID NO: 59438 - RNA, 32 nt, Human
agguauacaggguggaguagggagaagcugcc

SEQ ID NO: 59439 - RNA, 32 nt, Human
agguauacccugcucugccacccaugaaccag

SEQ ID NO: 59440 - RNA, 32 nt, Human
agguauacuaccucagagaucagugagcagaa

SEQ ID NO: 59441 - RNA, 31 nt, Human
agguauacuuauaaauaccugcagggauuuc

SEQ ID NO: 59442 - RNA, 32 nt, Human
agguauagggcugccuuccucuuauuuauuug

SEQ ID NO: 59443 - RNA, 32 nt, Human
agguauaucggguggaaaaagauuuggaaaau

SEQ ID NO: 59444 - RNA, 19 nt, Human
agguaucaacccagaagcc

SEQ ID NO: 59445 - RNA, 32 nt, Human
agguaucaagucaacaugaaauuggaaugcaa

SEQ ID NO: 59446 - RNA, 32 nt, Human
agguaucaauauguuuucaaugccugaugacc

SEQ ID NO: 59447 - RNA, 32 nt, Human
agguaucaaucaggauugagcacugaauucca

SEQ ID NO: 59448 - RNA, 32 nt, Human
agguaucacugcacuuuaagaaacuggaggcu

SEQ ID NO: 59449 - RNA, 32 nt, Human
agguaucacugcagucaccucuucuacccuca

SEQ ID NO: 59450 - RNA, 32 nt, Human
agguaucauggacuguucaaccaguucuggac

SEQ ID NO: 59451 - RNA, 32 nt, Human
agguaucccagcuuugggcacauguaugucca

SEQ ID NO: 59452 - RNA, 32 nt, Human
agguauccugaagcaaaagacaggaguucucu

SEQ ID NO: 59453 - RNA, 32 nt, Human
agguaucuaccucccaccuucuccucaucugu

SEQ ID NO: 59454 - RNA, 32 nt, Human
agguaucucagaauuccuccuccugggacucu

SEQ ID NO: 59455 - RNA, 32 nt, Human
agguaucuuuguccuuucaccugggccucaua

SEQ ID NO: 59456 - RNA, 32 nt, Human
agguaucuuuuaaaaaucagaacagagacuua

SEQ ID NO: 59457 - RNA, 32 nt, Human
agguaucuuuuucuaaaaacuucaaguguuug

SEQ ID NO: 59458 - RNA, 32 nt, Human
agguaugaaccaccgcgcccagccuuuuuguu

SEQ ID NO: 59459 - RNA, 20 nt, Human
agguaugaagccagaagcca

SEQ ID NO: 59460 - RNA, 32 nt, Human
agguaugaaggagccugagccaugaaguggga

SEQ ID NO: 59461 - RNA, 32 nt, Human
agguaugacugauauuuagagaacaagacuaa

SEQ ID NO: 59462 - RNA, 32 nt, Human
agguaugagccacaacacccagccuuuaacgu

SEQ ID NO: 59463 - RNA, 23 nt, Human
agguaugagccaccacgcccggu

SEQ ID NO: 59464 - RNA, 22 nt, Human
agguaugagccaccgugcccgg

SEQ ID NO: 59465 - RNA, 29 nt, Human
agguaugaugaugcuguguaucaggaagg

SEQ ID NO: 59466 - RNA, 32 nt, Human
agguaugcguaggagcaagaagggacagggaa

SEQ ID NO: 59467 - RNA, 21 nt, Human
agguaugcuuucuuccagccc

SEQ ID NO: 59468 - RNA, 32 nt, Human
agguauggaaagaaccaugcagaggaauauua

SEQ ID NO: 59469 - RNA, 32 nt, Human
agguauggaaggagcgggcacuggccugagca

SEQ ID NO: 59470 - RNA, 32 nt, Human
agguauggaucacccacaaauguagcuuucag

SEQ ID NO: 59471 - RNA, 32 nt, Human
agguauggcagaggugcaagaccuaguccccu

SEQ ID NO: 59472 - RNA, 32 nt, Human
agguaugggaagcagacacggagaguggcagg

SEQ ID NO: 59473 - RNA, 32 nt, Human
agguaugggccagagaggacugggucagagag

SEQ ID NO: 59474 - RNA, 32 nt, Human
  misc_feature (8)..(10): n is a, c, g, or u
agguaugnnncacgccuguaaucccagcacuu

SEQ ID NO: 59475 - RNA, 32 nt, Human
agguauguagacauaucuaauagugguuuucc

SEQ ID NO: 59476 - RNA, 32 nt, Human
agguauguagcccugucacaggacagcucacu

SEQ ID NO: 59477 - RNA, 32 nt, Human
agguauguucacagauuaauuauagggccauc

SEQ ID NO: 59478 - RNA, 32 nt, Human
agguauuaaaacuaaauuucacuacuagauug

SEQ ID NO: 59479 - RNA, 32 nt, Human
agguauuacaaaguguuaauauacaaaauucu

SEQ ID NO: 59480 - RNA, 32 nt, Human
agguauucaaaaccuuugaccacauggcccgu

SEQ ID NO: 59481 - RNA, 32 nt, Human
agguauucaagaccagccugggaaacgugggg

SEQ ID NO: 59482 - RNA, 32 nt, Human
agguauucaagcaccaccuccacccagccccu

SEQ ID NO: 59483 - RNA, 32 nt, Human
agguauucaagugauucucccaucucggucuc

SEQ ID NO: 59484 - RNA, 19 nt, Human
agguauucccagucuuccu

SEQ ID NO: 59485 - RNA, 32 nt, Human
agguauuccucaccuuucuugccuuuaccaga

SEQ ID NO: 59486 - RNA, 32 nt, Human
agguauucuuuccugacauuguuuucagaaua

SEQ ID NO: 59487 - RNA, 32 nt, Human
agguauugagcagcagauagagacacaggccu

SEQ ID NO: 59488 - RNA, 32 nt, Human
agguauugagccugauggcccagguauugagg

SEQ ID NO: 59489 - RNA, 32 nt, Human
agguauuggucuuuccuguggucccugauguu

SEQ ID NO: 59490 - RNA, 32 nt, Human
agguauuuaaagagccacccacauagcuucac

SEQ ID NO: 59491 - RNA, 32 nt, Human
agguauuucucccacagaaaugaugaaaguga

SEQ ID NO: 59492 - RNA, 18 nt, Human
agguauuugaacauuuca

SEQ ID NO: 59493 - RNA, 32 nt, Human
agguauuugcauaggaaucagaggaguuaauc

SEQ ID NO: 59494 - RNA, 32 nt, Human
agguauuuuauucucaaagugaucucaaacug

SEQ ID NO: 59495 - RNA, 32 nt, Human
agguauuuucacccucuucgccugguacagcc

SEQ ID NO: 59496 - RNA, 32 nt, Human
aggucaaaaguggcggguguggcgcggggcug

SEQ ID NO: 59497 - RNA, 32 nt, Human
aggucaaacgaccucaucacagucuuccuucc

SEQ ID NO: 59498 - RNA, 20 nt, Human
aggucaaacguaggcuucau

SEQ ID NO: 59499 - RNA, 32 nt, Human
aggucaaagaugaugcauaacagccucucuag

SEQ ID NO: 59500 - RNA, 32 nt, Human
aggucaaauucaggagauaagaaugguuuuua

SEQ ID NO: 59501 - RNA, 32 nt, Human
aggucaaauuugagauucucuguggcuucagu

SEQ ID NO: 59502 - RNA, 19 nt, Human
aggucaacacugcacucca

SEQ ID NO: 59503 - RNA, 32 nt, Human
aggucaacacugcacuccagccugggcgacag

SEQ ID NO: 59504 - RNA, 32 nt, Human
aggucaacccuugguucuuauagaugcucaga

SEQ ID NO: 59505 - RNA, 32 nt, Human
aggucaacugcggccucacagcugggccuguc

SEQ ID NO: 59506 - RNA, 32 nt, Human
aggucaagacugugguauuggggucuuuuggc

SEQ ID NO: 59507 - RNA, 32 nt, Human
aggucaagagagagcucaguuucccucucccc

SEQ ID NO: 59508 - RNA, 32 nt, Human
aggucaagcgauugagaucauccuggccaaca

SEQ ID NO: 59509 - RNA, 32 nt, Human
aggucaagcuccaaggaagggacucucuacau

SEQ ID NO: 59510 - RNA, 32 nt, Human
aggucaagcuccaaggaagggauucucuacau

SEQ ID NO: 59511 - RNA, 32 nt, Human
aggucaaggaagcaacacaauagucugugagc

SEQ ID NO: 59512 - RNA, 32 nt, Human
aggucaagggguggaaguuacaccuggugcag

SEQ ID NO: 59513 - RNA, 21 nt, Human
aggucacaagaaaggcucuau

SEQ ID NO: 59514 - RNA, 31 nt, Human
aggucacacagcaaggagguggcagagccaa

SEQ ID NO: 59515 - RNA, 32 nt, Human
aggucacacagcagcagucacuguaacagacu

SEQ ID NO: 59516 - RNA, 31 nt, Human
aggucacacagcuaguuagcggcagagccug

SEQ ID NO: 59517 - RNA, 31 nt, Human
aggucacacagcuaguuugaguagagccagu

SEQ ID NO: 59518 - RNA, 32 nt, Human
aggucacaccaccacuggaguggaugggcagu

SEQ ID NO: 59519 - RNA, 32 nt, Human
aggucacaccacugcacuccagccugggcuac

SEQ ID NO: 59520 - RNA, 32 nt, Human
aggucacaccauugcacuccaaccugggcgac

SEQ ID NO: 59521 - RNA, 32 nt, Human
aggucacacccacucccagagcaacccugggc

SEQ ID NO: 59522 - RNA, 32 nt, Human
aggucacaccgcugcacuccagccugggcaac

SEQ ID NO: 59523 - RNA, 32 nt, Human
aggucacaccuggccucacacuuugagcugag

SEQ ID NO: 59524 - RNA, 32 nt, Human
aggucacagaaaccucugccugccagguaggc

SEQ ID NO: 59525 - RNA, 32 nt, Human
aggucacagaacugccacuaugguuaaauguc

SEQ ID NO: 59526 - RNA, 32 nt, Human
aggucacagcacaacuaaauccaggacaggac

SEQ ID NO: 59527 - RNA, 32 nt, Human
aggucacagcacaagugcacaucagcacuaug

SEQ ID NO: 59528 - RNA, 32 nt, Human
aggucacagcuacuuggaaggcugagauguga

SEQ ID NO: 59529 - RNA, 32 nt, Human
aggucacagcuauggauguggaagagauagga

SEQ ID NO: 59530 - RNA, 32 nt, Human
aggucacaggcagaaaauaggagcaggauuuc

SEQ ID NO: 59531 - RNA, 32 nt, Human
aggucacaggcagagagaaucacagcagcaga

SEQ ID NO: 59532 - RNA, 32 nt, Human
aggucacaggcaggggcugcccuggacggggg

SEQ ID NO: 59533 - RNA, 32 nt, Human
aggucacaguaagccuugcagcuugagcugaa

SEQ ID NO: 59534 - RNA, 32 nt, Human
aggucacaguauucaugacaaaugugguggga

SEQ ID NO: 59535 - RNA, 19 nt, Human
aggucaccaugacaaggag

SEQ ID NO: 59536 - RNA, 32 nt, Human
aggucaccccuccacuucagcuugcccugacc

SEQ ID NO: 59537 - RNA, 32 nt, Human
aggucaccgcucgcccuaguucccaggcuuug

SEQ ID NO: 59538 - RNA, 32 nt, Human
aggucaccgcuugcucuaguucccaggcuuug

SEQ ID NO: 59539 - RNA, 24 nt, Human
aggucaccgucuccuuccaccccu

SEQ ID NO: 59540 - RNA, 32 nt, Human
aggucaccugaccuagaaucaccagaaguguu

SEQ ID NO: 59541 - RNA, 32 nt, Human
aggucaccugcacucccagccaaguggugaug

SEQ ID NO: 59542 - RNA, 32 nt, Human
aggucaccuggacucugcucccaggaagcugu

SEQ ID NO: 59543 - RNA, 32 nt, Human
aggucaccugggaucucgggguagccaggcug

SEQ ID NO: 59544 - RNA, 32 nt, Human
aggucaccuugcaggccugcuugcaggaaaug

SEQ ID NO: 59545 - RNA, 32 nt, Human
aggucaccuuggugggucgcccauggcgagau

SEQ ID NO: 59546 - RNA, 32 nt, Human
aggucacgucacugcacucuagccugggcaac

SEQ ID NO: 59547 - RNA, 31 nt, Human
aggucacucaauaaaugugcuggaguaacac

SEQ ID NO: 59548 - RNA, 32 nt, Human
aggucacucagggucaauacucagggucagug

SEQ ID NO: 59549 - RNA, 32 nt, Human
aggucacugaauggccaugggguccucaauga

SEQ ID NO: 59550 - RNA, 32 nt, Human
aggucacugcaaccuccaccucccggguucaa

SEQ ID NO: 59551 - RNA, 32 nt, Human
aggucacugcaaccucugccucccagguucaa

SEQ ID NO: 59552 - RNA, 32 nt, Human
aggucacugcaaccucugccuccuggguucaa

SEQ ID NO: 59553 - RNA, 32 nt, Human
aggucacugcacugggagguccuggcugcugc

SEQ ID NO: 59554 - RNA, 32 nt, Human
aggucacugcagcccugaccuccugggcucaa

SEQ ID NO: 59555 - RNA, 32 nt, Human
aggucacugccuggaccuggugcccuggcugc

SEQ ID NO: 59556 - RNA, 32 nt, Human
aggucacugcggccuugauuucccaggcucaa

SEQ ID NO: 59557 - RNA, 32 nt, Human
aggucacuggacuguacguuuuuaugguugug

SEQ ID NO: 59558 - RNA, 32 nt, Human
aggucacuguagccuccgccuccagggcucaa

SEQ ID NO: 59559 - RNA, 32 nt, Human
aggucacuucuucccagcccugccucaacugu

SEQ ID NO: 59560 - RNA, 32 nt, Human
aggucacuugccugccuucucuggacugcacu

SEQ ID NO: 59561 - RNA, 32 nt, Human
aggucagaagcaucugcugucaugacaccgcu

SEQ ID NO: 59562 - RNA, 32 nt, Human
aggucagaagguucccaaaccccuggggcugg

SEQ ID NO: 59563 - RNA, 32 nt, Human
aggucagacugcaagauuguuuguucagaugu

SEQ ID NO: 59564 - RNA, 32 nt, Human
aggucagagaagaggaaaagagacucagagaa

SEQ ID NO: 59565 - RNA, 32 nt, Human
aggucagagaaggucagagcugagugacguuu

SEQ ID NO: 59566 - RNA, 32 nt, Human
aggucagagaauggagagagccugugcaugau

SEQ ID NO: 59567 - RNA, 32 nt, Human
aggucagagacagagugguagagccaguccau

SEQ ID NO: 59568 - RNA, 32 nt, Human
aggucagaguuucuuuucauaacugccugaaa

SEQ ID NO: 59569 - RNA, 32 nt, Human
aggucagauaccggagaggagccaagaucccu

SEQ ID NO: 59570 - RNA, 32 nt, Human
aggucagaugaugacagcuguguccuuaacaa

SEQ ID NO: 59571 - RNA, 24 nt, Human
aggucagcaaaggccugccccguc

SEQ ID NO: 59572 - RNA, 32 nt, Human
aggucagcaaccuaaagacacuacccaagggc

SEQ ID NO: 59573 - RNA, 32 nt, Human
aggucagcagaagaaggaacugagcaguugaa

SEQ ID NO: 59574 - RNA, 32 nt, Human
aggucagcagcucccgucuccuucccucuuga

SEQ ID NO: 59575 - RNA, 32 nt, Human
aggucagccagcuccuagcagagaagagccag

SEQ ID NO: 59576 - RNA, 25 nt, Human
aggucagccaggccuccuccugguc

SEQ ID NO: 59577 - RNA, 32 nt, Human
aggucagcccaggaauuggcagaggaaguagg

SEQ ID NO: 59578 - RNA, 32 nt, Human
aggucagccgcccugcacugcccagagaccag

SEQ ID NO: 59579 - RNA, 21 nt, Human
aggucagccugacccacgguu

SEQ ID NO: 59580 - RNA, 32 nt, Human
aggucagccuuucucacaaacucuuuugaacu

SEQ ID NO: 59581 - RNA, 26 nt, Human
aggucagcuucuuccucugcccaguc

SEQ ID NO: 59582 - RNA, 32 nt, Human
aggucaggaaccugggugcagcuucauggggu

SEQ ID NO: 59583 - RNA, 23 nt, Human
aggucaggaguucaagaccagcu

SEQ ID NO: 59584 - RNA, 22 nt, Human
aggucaggaguuccagaucagc

SEQ ID NO: 59585 - RNA, 32 nt, Human
aggucaggaguuugagaccacccuggccaaca

SEQ ID NO: 59586 - RNA, 32 nt, Human
aggucaggaguuugagaucagccuggacaaca

SEQ ID NO: 59587 - RNA, 32 nt, Human
aggucaggaguuugagaucagccuggcaaaca

SEQ ID NO: 59588 - RNA, 32 nt, Human
aggucaggaguuugagaucagccuggccaaca

SEQ ID NO: 59589 - RNA, 32 nt, Human
aggucaggaguuugagaucagccuggccaaua

SEQ ID NO: 59590 - RNA, 32 nt, Human
aggucaggaguuugagaucagccuggccaaug

SEQ ID NO: 59591 - RNA, 32 nt, Human
aggucaggaguuugagccugaccaacaugcua

SEQ ID NO: 59592 - RNA, 32 nt, Human
aggucaggaguuuugagaccagccuggccaac

SEQ ID NO: 59593 - RNA, 32 nt, Human
aggucaggccaaggcagguggaucaccugagg

SEQ ID NO: 59594 - RNA, 32 nt, Human
aggucaggcuccaggagcaugagaauugaucc

SEQ ID NO: 59595 - RNA, 32 nt, Human
aggucagggagccugagcuggagccagggccc

SEQ ID NO: 59596 - RNA, 32 nt, Human
aggucagucugugccguauuccuugaaaguga

SEQ ID NO: 59597 - RNA, 32 nt, Human
aggucagugauggaggcuguggacagaaacag

SEQ ID NO: 59598 - RNA, 32 nt, Human
aggucagugcaucgaguucuguuuccguggaa

SEQ ID NO: 59599 - RNA, 32 nt, Human
aggucaguuugagaccagccugggcaacaugg

SEQ ID NO: 59600 - RNA, 32 nt, Human
aggucauaaggaugagauauauuugggguacu

SEQ ID NO: 59601 - RNA, 32 nt, Human
aggucauacagggauauauaaaagccaugcuc

SEQ ID NO: 59602 - RNA, 32 nt, Human
aggucauaccagugcacuccaggcgggugaca

SEQ ID NO: 59603 - RNA, 32 nt, Human
aggucauacucugccauuuugucucuuaaugc

SEQ ID NO: 59604 - RNA, 32 nt, Human
aggucauagauucuugagcuguugugguuuuu

SEQ ID NO: 59605 - RNA, 32 nt, Human
aggucauaucacgccugcuguagucacuucug

SEQ ID NO: 59606 - RNA, 25 nt, Human
aggucauauccugccacucccgucg

SEQ ID NO: 59607 - RNA, 32 nt, Human
aggucaucaacaucugauucaggaagcagcag

SEQ ID NO: 59608 - RNA, 20 nt, Human
aggucaucaagcaguguuca

SEQ ID NO: 59609 - RNA, 32 nt, Human
aggucaucuaggguuuuauaaaggaggaggag

SEQ ID NO: 59610 - RNA, 32 nt, Human
aggucaucucugcucuggcuuuucuccaagca

SEQ ID NO: 59611 - RNA, 32 nt, Human
aggucaucugcugucauggauuuuucaauaau

SEQ ID NO: 59612 - RNA, 32 nt, Human
aggucaugcagcuggugguggggagagcugga

SEQ ID NO: 59613 - RNA, 32 nt, Human
aggucaugccacugcacuccagccuggccugg

SEQ ID NO: 59614 - RNA, 32 nt, Human
aggucaugccacugcacuccagccugggagac

SEQ ID NO: 59615 - RNA, 32 nt, Human
aggucaugccacugcacucuagccugggugac

SEQ ID NO: 59616 - RNA, 32 nt, Human
aggucaugccacugcacugcagccugggcgac

SEQ ID NO: 59617 - RNA, 32 nt, Human
aggucaugccauuguacuccagccugggcaac

SEQ ID NO: 59618 - RNA, 32 nt, Human
aggucaugggggccuuggcaggagcgguuuug

SEQ ID NO: 59619 - RNA, 32 nt, Human
aggucauggugcuuagaggaggagccucagcu

SEQ ID NO: 59620 - RNA, 32 nt, Human
aggucauuaaauagauuuuugaagacgguucu

SEQ ID NO: 59621 - RNA, 32 nt, Human
aggucauuacucugcagugugggaagcggggc

SEQ ID NO: 59622 - RNA, 32 nt, Human
aggucauuagcaaacaugaacucacagggauc

SEQ ID NO: 59623 - RNA, 23 nt, Human
aggucauuagugucucuggggug

SEQ ID NO: 59624 - RNA, 32 nt, Human
aggucauugaucaguuuggagaguagggccac

SEQ ID NO: 59625 - RNA, 32 nt, Human
agguccaaaagcugcccacugccucuggagug

SEQ ID NO: 59626 - RNA, 32 nt, Human
agguccaaaccugggcuugucuccacuucacg

SEQ ID NO: 59627 - RNA, 32 nt, Human
agguccaaauacugaaugucuccuuuacuuuu

SEQ ID NO: 59628 - RNA, 31 nt, Human
agguccaagcugagagaaaagagucaugauc

SEQ ID NO: 59629 - RNA, 23 nt, Human
agguccaaggacacccucccucc

SEQ ID NO: 59630 - RNA, 18 nt, Human
agguccaaggacccagga

SEQ ID NO: 59631 - RNA, 32 nt, Human
agguccaaggcugcagugagccauguucacac

SEQ ID NO: 59632 - RNA, 32 nt, Human
agguccaaugggcuaggcagaguugucccagg

SEQ ID NO: 59633 - RNA, 32 nt, Human
agguccacacccgccucagaguccggagucug

SEQ ID NO: 59634 - RNA, 32 nt, Human
agguccacgggaagccuacacgcccaagguca

SEQ ID NO: 59635 - RNA, 32 nt, Human
agguccacuggacaguugggaaaacaccugac

SEQ ID NO: 59636 - RNA, 32 nt, Human
agguccacugggcugagugucccuugggccca

SEQ ID NO: 59637 - RNA, 32 nt, Human
agguccacuucuccacccacugagaccccuuu

SEQ ID NO: 59638 - RNA, 32 nt, Human
agguccagagaaggaaggagacuuagcagcca

SEQ ID NO: 59639 - RNA, 32 nt, Human
agguccagaucagaguucaggacucugagugc

SEQ ID NO: 59640 - RNA, 32 nt, Human
agguccagcaggcagcagacgguaugaccauc

SEQ ID NO: 59641 - RNA, 32 nt, Human
agguccagcaguccuggcgggcugaggagaag

SEQ ID NO: 59642 - RNA, 32 nt, Human
agguccagccuguucacacugcaccucaggua

SEQ ID NO: 59643 - RNA, 32 nt, Human
agguccagcuguucccccuggcauacaagcuu

SEQ ID NO: 59644 - RNA, 32 nt, Human
agguccaggacucagcuuucugcuucagccua

SEQ ID NO: 59645 - RNA, 32 nt, Human
agguccaggccuguguugccagagcuggcagu

SEQ ID NO: 59646 - RNA, 32 nt, Human
agguccaggcugcuguggaagcugcuguccca

SEQ ID NO: 59647 - RNA, 32 nt, Human
agguccaggggccacauggcugagggggacgc

SEQ ID NO: 59648 - RNA, 32 nt, Human
agguccagugaggacgagggugaaauuuauau

SEQ ID NO: 59649 - RNA, 32 nt, Human
agguccauaccccuuccucucucccuccuacc

SEQ ID NO: 59650 - RNA, 32 nt, Human
agguccaucaucauguaccaagccacagguca

SEQ ID NO: 59651 - RNA, 32 nt, Human
agguccaucuaggagggugccgggaggagcug

SEQ ID NO: 59652 - RNA, 32 nt, Human
agguccaucucuccacccacugaggccccuuu

SEQ ID NO: 59653 - RNA, 32 nt, Human
aggucccacagcccugagaugggccggccccc

SEQ ID NO: 59654 - RNA, 32 nt, Human
aggucccacaucuggugcugaaacucagagca

SEQ ID NO: 59655 - RNA, 32 nt, Human
aggucccacccuggacuucugaaggggugugg

SEQ ID NO: 59656 - RNA, 32 nt, Human
aggucccacugcagcccuccaagcaggugugc

SEQ ID NO: 59657 - RNA, 32 nt, Human
aggucccagcacauguguuuucaagaggccac

SEQ ID NO: 59658 - RNA, 32 nt, Human
aggucccagcccuguugccaagugaccuuguc

SEQ ID NO: 59659 - RNA, 32 nt, Human
aggucccaggcucagcagggagcugcuggaug

SEQ ID NO: 59660 - RNA, 32 nt, Human
aggucccagggugggagggcuagggaaaggga

SEQ ID NO: 59661 - RNA, 19 nt, Human
aggucccaguuuggccagg

SEQ ID NO: 59662 - RNA, 32 nt, Human
aggucccaguuuggccaggggugagggagaga

SEQ ID NO: 59663 - RNA, 32 nt, Human
aggucccaucuccaaaaacagucacauagcag

SEQ ID NO: 59664 - RNA, 32 nt, Human
aggucccaucuucacuucaagcucauuuacag

SEQ ID NO: 59665 - RNA, 32 nt, Human
aggucccauuucgugcacacucaggccagcug

SEQ ID NO: 59666 - RNA, 32 nt, Human
aggucccauuuucccccuguguuuucacgcag

SEQ ID NO: 59667 - RNA, 22 nt, Human
agguccccaccccuccccucca

SEQ ID NO: 59668 - RNA, 32 nt, Human
agguccccacuuucugcuuuccuugcccaugu

SEQ ID NO: 59669 - RNA, 32 nt, Human
agguccccagauggggagacugaggccguggc

SEQ ID NO: 59670 - RNA, 32 nt, Human
aggucccccugccuucucccacuccucacacu

SEQ ID NO: 59671 - RNA, 19 nt, Human
agguccccgccccgccacu

SEQ ID NO: 59672 - RNA, 32 nt, Human
agguccccuccacaucccagcagcccaagcuu

SEQ ID NO: 59673 - RNA, 31 nt, Human
agguccccugaucuugggccuguuucccaug

SEQ ID NO: 59674 - RNA, 32 nt, Human
agguccccugcagguuccuucuagcuggagca

SEQ ID NO: 59675 - RNA, 32 nt, Human
agguccccuggaccauccagggugcuaggggg

SEQ ID NO: 59676 - RNA, 32 nt, Human
agguccccuggcagugcugagggaccgagccc

SEQ ID NO: 59677 - RNA, 32 nt, Human
aggucccgcacuccagccucucgcugccaggg

SEQ ID NO: 59678 - RNA, 32 nt, Human
aggucccgccacugcacuccagccugggugac

SEQ ID NO: 59679 - RNA, 32 nt, Human
aggucccgucgccggugagcacgggcucccuc

SEQ ID NO: 59680 - RNA, 24 nt, Human
aggucccuacagcaagugggacag

SEQ ID NO: 59681 - RNA, 19 nt, Human
aggucccucacccugccug

SEQ ID NO: 59682 - RNA, 32 nt, Human
aggucccucccucccucugacucuuugcccag

SEQ ID NO: 59683 - RNA, 32 nt, Human
aggucccucggccuccugacugacugacugcg

SEQ ID NO: 59684 - RNA, 32 nt, Human
aggucccucugccucugcugcagacauggcgu

SEQ ID NO: 59685 - RNA, 32 nt, Human
aggucccugaguacugacggucacaggcugcc

SEQ ID NO: 59686 - RNA, 32 nt, Human
aggucccugcagcucacuguguccagcugggc

SEQ ID NO: 59687 - RNA, 32 nt, Human
aggucccugccuccuaccacucuuguuugccc

SEQ ID NO: 59688 - RNA, 21 nt, Human
aggucccugccuuaaauuuuc

SEQ ID NO: 59689 - RNA, 32 nt, Human
aggucccugcguggggaggugucacaccaggg

SEQ ID NO: 59690 - RNA, 32 nt, Human
aggucccuggugcuuccaguacugcacuuugc

SEQ ID NO: 59691 - RNA, 32 nt, Human
aggucccuuugacuucucuuggagucagucug

SEQ ID NO: 59692 - RNA, 32 nt, Human
agguccgaaagcuucguuccagagcccagcau

SEQ ID NO: 59693 - RNA, 32 nt, Human
agguccgacgcuugaccuuccugggccucaag

SEQ ID NO: 59694 - RNA, 32 nt, Human
agguccggaaggcggaggccaaucggcggcgg

SEQ ID NO: 59695 - RNA, 32 nt, Human
agguccuaaccagcugaccuugaguuaaucaa

SEQ ID NO: 59696 - RNA, 32 nt, Human
agguccuagaggagccacagcccaggggcaga

SEQ ID NO: 59697 - RNA, 27 nt, Human
agguccuaggugugaccugauaccacc

SEQ ID NO: 59698 - RNA, 32 nt, Human
agguccucacccagguuggcugugagcuccag

SEQ ID NO: 59699 - RNA, 32 nt, Human
agguccucagcaauaggguuagaaggcugcug

SEQ ID NO: 59700 - RNA, 21 nt, Human
agguccucagcccuccugccu

SEQ ID NO: 59701 - RNA, 32 nt, Human
agguccucagcccuccugccugggcuauggcu

SEQ ID NO: 59702 - RNA, 32 nt, Human
agguccuccuccuccuccuucuccucuucuuc

SEQ ID NO: 59703 - RNA, 32 nt, Human
agguccucggacaaccucucuccagcucuccg

SEQ ID NO: 59704 - RNA, 23 nt, Human
agguccucguucaggacgaugua

SEQ ID NO: 59705 - RNA, 32 nt, Human
agguccucuccccucauuuccaucucccagcc

SEQ ID NO: 59706 - RNA, 32 nt, Human
agguccucugccccaggacccccacaccaccc

SEQ ID NO: 59707 - RNA, 32 nt, Human
agguccugcccgaggcgccagcccgaggagga

SEQ ID NO: 59708 - RNA, 32 nt, Human
agguccugcccuuuuugaccagcagccaacag

SEQ ID NO: 59709 - RNA, 32 nt, Human
agguccugccuuauuuucaucucaccaugcac

SEQ ID NO: 59710 - RNA, 32 nt, Human
agguccugcgcucugggccagcgcucggccau

SEQ ID NO: 59711 - RNA, 32 nt, Human
agguccugcucccuccucggauuugauugucu

SEQ ID NO: 59712 - RNA, 32 nt, Human
agguccugcugccucucuuucacacaaugccc

SEQ ID NO: 59713 - RNA, 29 nt, Human
agguccuggcugccagcuuuccuccucug

SEQ ID NO: 59714 - RNA, 32 nt, Human
agguccugggagggacacuggaugucuuaccc

SEQ ID NO: 59715 - RNA, 32 nt, Human
agguccugggcuuucuaaagaagauuauuuuu

SEQ ID NO: 59716 - RNA, 31 nt, Human
agguccuggguggaggaagaagugguggagc

SEQ ID NO: 59717 - RNA, 31 nt, Human
agguccugguucucugggaucugcgguucaa

SEQ ID NO: 59718 - RNA, 32 nt, Human
agguccuguaugccaccagucacugcagucug

SEQ ID NO: 59719 - RNA, 31 nt, Human
agguccuguccuuaugggccugugucugguu

SEQ ID NO: 59720 - RNA, 32 nt, Human
agguccuuaccucucugacaguuacagugauc

SEQ ID NO: 59721 - RNA, 32 nt, Human
agguccuuagguccucacccucccgucuccuu

SEQ ID NO: 59722 - RNA, 32 nt, Human
agguccuuuaguuugcuucuguaagcaacggg

SEQ ID NO: 59723 - RNA, 22 nt, Human
agguccuuuauguguuguucuc

SEQ ID NO: 59724 - RNA, 32 nt, Human
agguccuuucugccaucucuguuccagcugcu

SEQ ID NO: 59725 - RNA, 32 nt, Human
agguccuuugcuccuguucccuggaggcauaa

SEQ ID NO: 59726 - RNA, 32 nt, Human
agguccuuuuggaggguggaaguuaggagcag

SEQ ID NO: 59727 - RNA, 32 nt, Human
aggucgaaacagcccuccaccucccagccaag

SEQ ID NO: 59728 - RNA, 32 nt, Human
aggucgacccuccaaguccagaugagaagagu

SEQ ID NO: 59729 - RNA, 23 nt, Human
aggucgacucgccggcgcuuccu

SEQ ID NO: 59730 - RNA, 32 nt, Human
aggucgagaagcacgaggauugcuugaggcca

SEQ ID NO: 59731 - RNA, 20 nt, Human
aggucgaggcaggcggauca

SEQ ID NO: 59732 - RNA, 32 nt, Human
aggucgaggguagauaggccuuaacuuagucc

SEQ ID NO: 59733 - RNA, 32 nt, Human
aggucgagguggggagggggaggcgggcuucc

SEQ ID NO: 59734 - RNA, 32 nt, Human
aggucgcaccacugcacuccagccugggugac

SEQ ID NO: 59735 - RNA, 32 nt, Human
aggucgcaccacugcacuccagucuggguaac

SEQ ID NO: 59736 - RNA, 32 nt, Human
aggucgcaccacugcacugcagccugggugac

SEQ ID NO: 59737 - RNA, 32 nt, Human
aggucgcaccgcuacacuccagccugggugac

SEQ ID NO: 59738 - RNA, 32 nt, Human
aggucgcaccguuguacuccagccuggugaua

SEQ ID NO: 59739 - RNA, 32 nt, Human
aggucgcagcaaauggcuucagccugggacgc

SEQ ID NO: 59740 - RNA, 32 nt, Human
aggucgcagugagccgagaucgugccacugca

SEQ ID NO: 59741 - RNA, 32 nt, Human
aggucgcaguucagcccagcugaggccugucu

SEQ ID NO: 59742 - RNA, 32 nt, Human
aggucgccacugccugcugcagagaaaacaca

SEQ ID NO: 59743 - RNA, 32 nt, Human
aggucgcgagggaagcgcugaggaucaggaag

SEQ ID NO: 59744 - RNA, 32 nt, Human
aggucgcgccacugcacuccagccugggagaa

SEQ ID NO: 59745 - RNA, 32 nt, Human
aggucgcgccacugcacuccagccugggcagc

SEQ ID NO: 59746 - RNA, 32 nt, Human
aggucgcgccacugcacuccagccugggcgac

SEQ ID NO: 59747 - RNA, 32 nt, Human
aggucgcgccacugcacuucagccugggugac

SEQ ID NO: 59748 - RNA, 32 nt, Human
aggucgcgccacugcgcuccagccuggacaac

SEQ ID NO: 59749 - RNA, 32 nt, Human
aggucgcgccauugcacuccagccugggcaac

SEQ ID NO: 59750 - RNA, 32 nt, Human
aggucgcgccauugcacuccagccugggcgac

SEQ ID NO: 59751 - RNA, 32 nt, Human
aggucgcgguaagccgagaucacaccauugca

SEQ ID NO: 59752 - RNA, 32 nt, Human
aggucgcggugagccgagaucgagccauugca

SEQ ID NO: 59753 - RNA, 32 nt, Human
aggucgcuccauugcacuccagccugggcaac

SEQ ID NO: 59754 - RNA, 32 nt, Human
aggucgcuggcgucugugccaucucugcucca

SEQ ID NO: 59755 - RNA, 32 nt, Human
aggucgcuguaaccuccgucuccuggguucaa

SEQ ID NO: 59756 - RNA, 32 nt, Human
aggucgcuguggccccagccucgccugacaga

SEQ ID NO: 59757 - RNA, 32 nt, Human
aggucggcaaagcaacauggcagagcagucau

SEQ ID NO: 59758 - RNA, 32 nt, Human
aggucggcacacacauccucauaauggcauuu

SEQ ID NO: 59759 - RNA, 32 nt, Human
aggucggcaggcagcacacagagggaccuacg

SEQ ID NO: 59760 - RNA, 32 nt, Human
aggucggcagugugaggagcugcuauggugcu

SEQ ID NO: 59761 - RNA, 32 nt, Human
aggucggcuggcagcacuggccaaggugaugg

SEQ ID NO: 59762 - RNA, 32 nt, Human
aggucgggaaggggcgcugggagaagcggggc

SEQ ID NO: 59763 - RNA, 32 nt, Human
aggucgggagcacagccgcuccccaaacccag

SEQ ID NO: 59764 - RNA, 32 nt, Human
aggucgggaggaagaagagguggagguguggu

SEQ ID NO: 59765 - RNA, 32 nt, Human
aggucgggaggcaccucuagcaugagacagug

SEQ ID NO: 59766 - RNA, 22 nt, Human
aggucgggaguuccagaccagc

SEQ ID NO: 59767 - RNA, 32 nt, Human
aggucgggaguuugagaucagccuggccaaug

SEQ ID NO: 59768 - RNA, 32 nt, Human
aggucgggccagccgccccauucuuuuaacau

SEQ ID NO: 59769 - RNA, 32 nt, Human
aggucggggaagcccucccuaagcaagacacg

SEQ ID NO: 59770 - RNA, 32 nt, Human
aggucgguggaauccugggguccuccaaaucu

SEQ ID NO: 59771 - RNA, 32 nt, Human
aggucgguuuggguuugaauucugccucuucu

SEQ ID NO: 59772 - RNA, 32 nt, Human
aggucgucaaugaugaguccucucuggucaga

SEQ ID NO: 59773 - RNA, 32 nt, Human
aggucgugccacugcacuccagccugggcaac

SEQ ID NO: 59774 - RNA, 32 nt, Human
aggucgugccacugcacuccagccugggcagc

SEQ ID NO: 59775 - RNA, 32 nt, Human
aggucgugccacugcacuccagccugggcgac

SEQ ID NO: 59776 - RNA, 32 nt, Human
aggucgugccacugcacuucagccugggugac

SEQ ID NO: 59777 - RNA, 32 nt, Human
aggucgugccacugcaugccagccugggcaac

SEQ ID NO: 59778 - RNA, 32 nt, Human
aggucgugccacugcgcuccagccugggugac

SEQ ID NO: 59779 - RNA, 32 nt, Human
aggucgugccauugcacuccagccugggugac

SEQ ID NO: 59780 - RNA, 32 nt, Human
aggucgugcuacugcacucccgccugggugac

SEQ ID NO: 59781 - RNA, 32 nt, Human
aggucgugugggccccagugcuagaucucucc

SEQ ID NO: 59782 - RNA, 32 nt, Human
aggucguuccuacuguuuuacaacagcauguc

SEQ ID NO: 59783 - RNA, 32 nt, Human
aggucuaaaaagguguuccccaucguuaaacc

SEQ ID NO: 59784 - RNA, 32 nt, Human
aggucuaaagagagaagaauccagggaacagg

SEQ ID NO: 59785 - RNA, 32 nt, Human
aggucuaccccgacucagguucugccgaugau

SEQ ID NO: 59786 - RNA, 32 nt, Human
aggucuagaaaaccagcuuguggcuaacaguc

SEQ ID NO: 59787 - RNA, 32 nt, Human
aggucuagaaaauaagccuuuggcagggaaaa

SEQ ID NO: 59788 - RNA, 32 nt, Human
aggucuagcccagccuauuuguuagggaggau

SEQ ID NO: 59789 - RNA, 32 nt, Human
aggucuaggaagagggucugcagagcagaaag

SEQ ID NO: 59790 - RNA, 32 nt, Human
aggucuaggaugugugaaguuuggaaaaauau

SEQ ID NO: 59791 - RNA, 22 nt, Human
aggucucaaaguccugaccuca

SEQ ID NO: 59792 - RNA, 32 nt, Human
aggucucaaguccuucccagcauacacacagg

SEQ ID NO: 59793 - RNA, 31 nt, Human
aggucucagagaguuaauaggaguauuuuug

SEQ ID NO: 59794 - RNA, 32 nt, Human
aggucucagcacacacuggugcagagagacau

SEQ ID NO: 59795 - RNA, 19 nt, Human
aggucucagcagggcucca

SEQ ID NO: 59796 - RNA, 32 nt, Human
aggucucagcuacucaggaggcugagaugaga

SEQ ID NO: 59797 - RNA, 32 nt, Human
aggucucagcuguucuguaggcacuuugagaa

SEQ ID NO: 59798 - RNA, 32 nt, Human
aggucucauagugagugucuucacucaagggu

SEQ ID NO: 59799 - RNA, 32 nt, Human
aggucucaucuugcaucucauccuggccugga

SEQ ID NO: 59800 - RNA, 32 nt, Human
aggucuccaaaccagacggugacgccugcggg

SEQ ID NO: 59801 - RNA, 32 nt, Human
aggucuccaagacccgccuccaugucaguguu

SEQ ID NO: 59802 - RNA, 32 nt, Human
aggucuccaauugcuuuccuccagaaagugug

SEQ ID NO: 59803 - RNA, 32 nt, Human
aggucucccacccaacuccacccgguccucug

SEQ ID NO: 59804 - RNA, 32 nt, Human
aggucuccccgagaaggagaaguucuuuaauu

SEQ ID NO: 59805 - RNA, 32 nt, Human
aggucuccgccuccucugcuucuccuuucucc

SEQ ID NO: 59806 - RNA, 32 nt, Human
aggucuccggggaggcagggguccugcagguc

SEQ ID NO: 59807 - RNA, 32 nt, Human
aggucuccuacaccgccaccaugccauucggu

SEQ ID NO: 59808 - RNA, 32 nt, Human
aggucuccuaucucucccuauccaaggcucua

SEQ ID NO: 59809 - RNA, 32 nt, Human
aggucuccuccaccauuggccguagccagcag

SEQ ID NO: 59810 - RNA, 32 nt, Human
aggucuccucuuccucucccugaagaaaccau

SEQ ID NO: 59811 - RNA, 32 nt, Human
aggucuccugcagaucugucugggcugugaug

SEQ ID NO: 59812 - RNA, 32 nt, Human
aggucuccugggaacccugucugccccuuccc

SEQ ID NO: 59813 - RNA, 31 nt, Human
aggucucgccuucacugcccuguguccucug

SEQ ID NO: 59814 - RNA, 32 nt, Human
aggucucuccacugcucucagccucccaaccc

SEQ ID NO: 59815 - RNA, 32 nt, Human
aggucucuccugcauaggcagccacuguccgu

SEQ ID NO: 59816 - RNA, 19 nt, Human
aggucucugcugaauucuc

SEQ ID NO: 59817 - RNA, 32 nt, Human
aggucucugggaacccucagaauacggcucag

SEQ ID NO: 59818 - RNA, 32 nt, Human
aggucucugggaagggcuggggcagagcaucu

SEQ ID NO: 59819 - RNA, 32 nt, Human
aggucucugguuuucucauucaugccaaugcu

SEQ ID NO: 59820 - RNA, 32 nt, Human
aggucucugugcaaauggaccaucuguuggag

SEQ ID NO: 59821 - RNA, 32 nt, Human
aggucucuucugccauugugcuggucccaucc

SEQ ID NO: 59822 - RNA, 32 nt, Human
aggucucuugugcccuguucucuuguccccac

SEQ ID NO: 59823 - RNA, 32 nt, Human
aggucugaaauggagguccuucugcuggauaa

SEQ ID NO: 59824 - RNA, 32 nt, Human
aggucugaagcugguccugggcuccgggggug

SEQ ID NO: 59825 - RNA, 19 nt, Human
aggucugacauccaagaca

SEQ ID NO: 59826 - RNA, 25 nt, Human
aggucugaccuaggguucccuccca

SEQ ID NO: 59827 - RNA, 32 nt, Human
aggucugagcagagggcggggugcaggcggaa

SEQ ID NO: 59828 - RNA, 32 nt, Human
aggucugagcccagaguugacggagggaguau

SEQ ID NO: 59829 - RNA, 32 nt, Human
aggucugaggagcagcuucaguccccgccgag

SEQ ID NO: 59830 - RNA, 32 nt, Human
aggucugauaguccucugcuaaaacaacacga

SEQ ID NO: 59831 - RNA, 32 nt, Human
aggucugaucuggguuuugccucugcccuugg

SEQ ID NO: 59832 - RNA, 32 nt, Human
aggucugaugaauggaaucugaaggggcucug

SEQ ID NO: 59833 - RNA, 32 nt, Human
aggucugaugaucacacacaaaauguaauucc

SEQ ID NO: 59834 - RNA, 32 nt, Human
aggucugaugugaaaauucaaucacgacguua

SEQ ID NO: 59835 - RNA, 32 nt, Human
aggucugauguguagcagccucuccccaucua

SEQ ID NO: 59836 - RNA, 32 nt, Human
aggucugcacacauaacacacaucaguccacc

SEQ ID NO: 59837 - RNA, 32 nt, Human
aggucugcacugcaacuucuguauccuuccuu

SEQ ID NO: 59838 - RNA, 20 nt, Human
aggucugccaagccagaagc

SEQ ID NO: 59839 - RNA, 32 nt, Human
aggucugccagcugccccggccaggcuugcgg

SEQ ID NO: 59840 - RNA, 32 nt, Human
aggucugccucccaccagacccucuccagugu

SEQ ID NO: 59841 - RNA, 32 nt, Human
aggucugccugguucccuccccaaggccacag

SEQ ID NO: 59842 - RNA, 32 nt, Human
aggucugccuguaaaugacacugugaauaaac

SEQ ID NO: 59843 - RNA, 18 nt, Human
aggucuggaaagugucca

SEQ ID NO: 59844 - RNA, 32 nt, Human
aggucuggaaggagggggcgggcagggagagg

SEQ ID NO: 59845 - RNA, 32 nt, Human
aggucuggaccaaucucccuucccagauaagc

SEQ ID NO: 59846 - RNA, 32 nt, Human
aggucuggagcagcugccucucuggggagaug

SEQ ID NO: 59847 - RNA, 32 nt, Human
aggucuggagccaggcccagagcuggcuucag

SEQ ID NO: 59848 - RNA, 32 nt, Human
aggucuggagggcugagaaugaaccugacuag

SEQ ID NO: 59849 - RNA, 24 nt, Human
aggucuggcauauacuugauuaca

SEQ ID NO: 59850 - RNA, 32 nt, Human
aggucuggcucaugccuguaaucccagcacuu

SEQ ID NO: 59851 - RNA, 32 nt, Human
aggucuggcucugccacuugccuggccauguc

SEQ ID NO: 59852 - RNA, 32 nt, Human
aggucugggagagagagcagagggcggcaggg

SEQ ID NO: 59853 - RNA, 22 nt, Human
aggucuguaagucagguuacaa

SEQ ID NO: 59854 - RNA, 32 nt, Human
aggucugugggccaaagaacagguguauauaa

SEQ ID NO: 59855 - RNA, 32 nt, Human
aggucuguuccgcaugaaacuccugcugggga

SEQ ID NO: 59856 - RNA, 32 nt, Human
aggucuguugacugagacuggccggccugugg

SEQ ID NO: 59857 - RNA, 32 nt, Human
aggucuguuuccccaucacuuucaguuugcac

SEQ ID NO: 59858 - RNA, 32 nt, Human
aggucuguuuuuccuuucaugccucuuaaaaa

SEQ ID NO: 59859 - RNA, 32 nt, Human
aggucuuacauucagucagaccuguucaauaa

SEQ ID NO: 59860 - RNA, 31 nt, Human
aggucuucaauaaauauuuaauggaagguuc

SEQ ID NO: 59861 - RNA, 32 nt, Human
aggucuucaaucagaaacaaaaggacauuaau

SEQ ID NO: 59862 - RNA, 32 nt, Human
aggucuucaguaucucuggcacuggcaauaca

SEQ ID NO: 59863 - RNA, 32 nt, Human
aggucuucccagaggcuggauaccacaguaaa

SEQ ID NO: 59864 - RNA, 32 nt, Human
aggucuucccauaggccugcaguagggcuguu

SEQ ID NO: 59865 - RNA, 17 nt, Human
aggucuucccccagagg

SEQ ID NO: 59866 - RNA, 32 nt, Human
aggucuucccuugagccacuggcgcccaggag

SEQ ID NO: 59867 - RNA, 32 nt, Human
aggucuuccugggggauuucagucuccacaua

SEQ ID NO: 59868 - RNA, 32 nt, Human
aggucuuccuguggcucccucucuccuggacu

SEQ ID NO: 59869 - RNA, 32 nt, Human
aggucuuccuguuuucaccaucuuucuaaucu

SEQ ID NO: 59870 - RNA, 32 nt, Human
aggucuucuccuccucuccaucccuauucccu

SEQ ID NO: 59871 - RNA, 32 nt, Human
aggucuucucuccuccccuccugcagaggcac

SEQ ID NO: 59872 - RNA, 32 nt, Human
aggucuugagaggugugcuggggaagguggca

SEQ ID NO: 59873 - RNA, 19 nt, Human
aggucuugagucccccacc

SEQ ID NO: 59874 - RNA, 32 nt, Human
aggucuuggagccucccuucugcucccagaag

SEQ ID NO: 59875 - RNA, 32 nt, Human
aggucuuggccaagaaauguagaccuuucccc

SEQ ID NO: 59876 - RNA, 32 nt, Human
aggucuugguucucccaggagcucagggccug

SEQ ID NO: 59877 - RNA, 32 nt, Human
aggucuuguuugcccagacucuguacauuucc

SEQ ID NO: 59878 - RNA, 32 nt, Human
aggucuuuagaauaugcucuagccaagucuaa

SEQ ID NO: 59879 - RNA, 32 nt, Human
aggucuuuccacccucuuugagaucagcguuc

SEQ ID NO: 59880 - RNA, 32 nt, Human
aggucuuuccuaaggcugcaagguuuaggcug

SEQ ID NO: 59881 - RNA, 32 nt, Human
aggucuuuccucaccccucucccaccgcuguc

SEQ ID NO: 59882 - RNA, 32 nt, Human
aggucuuuccucugcucugcugcccagcggcc

SEQ ID NO: 59883 - RNA, 32 nt, Human
aggucuuucucuucucaucaagcuccucuccu

SEQ ID NO: 59884 - RNA, 32 nt, Human
aggucuuugccugcucacccucccagaugcua

SEQ ID NO: 59885 - RNA, 32 nt, Human
aggucuuuugcaacugugccucccucugucug

SEQ ID NO: 59886 - RNA, 32 nt, Human
aggucuuuuucagugugcucaauauggucacc

SEQ ID NO: 59887 - RNA, 32 nt, Human
aggugaaaagccagauccugaccaaacauuua

SEQ ID NO: 59888 - RNA, 32 nt, Human
aggugaaacagacgagaccacugugagccaga

SEQ ID NO: 59889 - RNA, 22 nt, Human
aggugaaaccccaucucuacua

SEQ ID NO: 59890 - RNA, 31 nt, Human
aggugaaaggacuugccucagcugcucggcg

SEQ ID NO: 59891 - RNA, 22 nt, Human
aggugaaaggauugcuugagcc

SEQ ID NO: 59892 - RNA, 32 nt, Human
aggugaaagggcugccgugcagccaggcagag

SEQ ID NO: 59893 - RNA, 31 nt, Human
aggugaaaguccuccccuugccggaggccag

SEQ ID NO: 59894 - RNA, 32 nt, Human
aggugaaaugauuagacccugcccccaaacca

SEQ ID NO: 59895 - RNA, 32 nt, Human
aggugaaaugcacaagcugcuggagaaggggu

SEQ ID NO: 59896 - RNA, 32 nt, Human
aggugaacaaacagcuaacugcaucagcaaau

SEQ ID NO: 59897 - RNA, 32 nt, Human
aggugaacagguccucacgcccagcuccgccc

SEQ ID NO: 59898 - RNA, 32 nt, Human
aggugaacccaaaagaaaaacucuugaaaaca

SEQ ID NO: 59899 - RNA, 32 nt, Human
aggugaacuaugaccacuuuacucuggguuuu

SEQ ID NO: 59900 - RNA, 23 nt, Human
aggugaacucugccaggaagcag

SEQ ID NO: 59901 - RNA, 32 nt, Human
aggugaacugcaggaagaucccagcccuauac

SEQ ID NO: 59902 - RNA, 32 nt, Human
aggugaagaccaccagcuucuuugagaaacag

SEQ ID NO: 59903 - RNA, 32 nt, Human
aggugaagagcaucgggggcugagggauggaa

SEQ ID NO: 59904 - RNA, 32 nt, Human
aggugaagagccagaagugaagagugacuagu

SEQ ID NO: 59905 - RNA, 32 nt, Human
aggugaagaugugauuucuuccauccagaaag

SEQ ID NO: 59906 - RNA, 22 nt, Human
aggugaagcucacggggccagg

SEQ ID NO: 59907 - RNA, 32 nt, Human
aggugaaggaagagagacuuuaggcaagcagc

SEQ ID NO: 59908 - RNA, 32 nt, Human
aggugaaggaagaggaugagcuccagcagccu

SEQ ID NO: 59909 - RNA, 32 nt, Human
aggugaaggagacggaaaccuccaccccaucc

SEQ ID NO: 59910 - RNA, 32 nt, Human
aggugaaggaggucagaaagagauagaauuug

SEQ ID NO: 59911 - RNA, 32 nt, Human
aggugaaggauacucccuucuuucauacagaa

SEQ ID NO: 59912 - RNA, 32 nt, Human
aggugaaggcagcaggggccauggccgggagc

SEQ ID NO: 59913 - RNA, 32 nt, Human
aggugaaggcucaaggguggauccagcucgag

SEQ ID NO: 59914 - RNA, 32 nt, Human
aggugaaggugucugcagcacacacagugaga

SEQ ID NO: 59915 - RNA, 32 nt, Human
aggugaaguauucaggcugaucuggaacucug

SEQ ID NO: 59916 - RNA, 32 nt, Human
aggugacaaaggaaugagugaaugaguaagga

SEQ ID NO: 59917 - RNA, 32 nt, Human
aggugacaaagugagaccccaucucuacaaaa

SEQ ID NO: 59918 - RNA, 32 nt, Human
aggugacaauauacacaugugcgcuaaucgua

SEQ ID NO: 59919 - RNA, 21 nt, Human
aggugacagaaccuuucugga

SEQ ID NO: 59920 - RNA, 21 nt, Human
aggugacagagcagugcugga

SEQ ID NO: 59921 - RNA, 32 nt, Human
aggugacagcagguaaagagugagccacaauc

SEQ ID NO: 59922 - RNA, 32 nt, Human
aggugacaggagcuuuccaaagacaccuaggg

SEQ ID NO: 59923 - RNA, 32 nt, Human
aggugacaggaucagguuuccaugcagcauuu

SEQ ID NO: 59924 - RNA, 32 nt, Human
aggugacaggcuguuggcuggaauugcuuggu

SEQ ID NO: 59925 - RNA, 21 nt, Human
aggugacagugagguccuggg

SEQ ID NO: 59926 - RNA, 32 nt, Human
aggugacauagugagaccccaucucuacaaaa

SEQ ID NO: 59927 - RNA, 31 nt, Human
aggugacaucauaaauacuugcugaaugaau

SEQ ID NO: 59928 - RNA, 32 nt, Human
aggugacaucgccgggggagguugugggcaac

SEQ ID NO: 59929 - RNA, 23 nt, Human
aggugacaugacacagggucagg

SEQ ID NO: 59930 - RNA, 32 nt, Human
aggugaccaaaaagaccacacugcaugaccag

SEQ ID NO: 59931 - RNA, 32 nt, Human
aggugaccaagaugucaugccagaucccucag

SEQ ID NO: 59932 - RNA, 32 nt, Human
aggugaccaggccacguggaggagagucaagg

SEQ ID NO: 59933 - RNA, 32 nt, Human
aggugacccacacucuggacagucugggacau

SEQ ID NO: 59934 - RNA, 32 nt, Human
aggugacccaggagagaagggaugaaggccuu

SEQ ID NO: 59935 - RNA, 32 nt, Human
aggugacccugacagugcuuaaugaccucaga

SEQ ID NO: 59936 - RNA, 32 nt, Human
aggugacccugccuggccucccacacccccug

SEQ ID NO: 59937 - RNA, 32 nt, Human
aggugaccugaacagcagaaauuuauuuucuu

SEQ ID NO: 59938 - RNA, 32 nt, Human
aggugaccugcucucuuuccugggcccugccc

SEQ ID NO: 59939 - RNA, 24 nt, Human
aggugaccuugcaacuucauguca

SEQ ID NO: 59940 - RNA, 32 nt, Human
aggugacgccggaagagaagccagcaggcggc

SEQ ID NO: 59941 - RNA, 22 nt, Human
aggugacggacagaggccugga

SEQ ID NO: 59942 - RNA, 32 nt, Human
aggugacuaagggcuggcagaagauuagaaug

SEQ ID NO: 59943 - RNA, 21 nt, Human
aggugacuccgaguccagccc

SEQ ID NO: 59944 - RNA, 32 nt, Human
aggugacugcacugcagcccacauggagagcu

SEQ ID NO: 59945 - RNA, 32 nt, Human
aggugacugcauccuccagcaucucaacuccg

SEQ ID NO: 59946 - RNA, 32 nt, Human
aggugacuggggacuuggaacccuaggaccug

SEQ ID NO: 59947 - RNA, 32 nt, Human
aggugagaaagagaauggagaguuuugcuaca

SEQ ID NO: 59948 - RNA, 32 nt, Human
aggugagaaccagcuugucauuuucagggaau

SEQ ID NO: 59949 - RNA, 32 nt, Human
aggugagaagcagaggaaggagaggagagggg

SEQ ID NO: 59950 - RNA, 32 nt, Human
aggugagaaguuaaaccugagacagagagcaa

SEQ ID NO: 59951 - RNA, 32 nt, Human
aggugagacauauucuccauaaagcuacugua

SEQ ID NO: 59952 - RNA, 32 nt, Human
aggugagacuacagguacaugccacugugccu

SEQ ID NO: 59953 - RNA, 32 nt, Human
aggugagacuccaucugcccugggcagguucc

SEQ ID NO: 59954 - RNA, 31 nt, Human
aggugagagaggaugugugcugggccuugga

SEQ ID NO: 59955 - RNA, 32 nt, Human
aggugagaggagaaguuggagggugugaugau

SEQ ID NO: 59956 - RNA, 24 nt, Human
aggugagaggauugcccgaaccca

SEQ ID NO: 59957 - RNA, 23 nt, Human
aggugagaggauugcuugaggcc

SEQ ID NO: 59958 - RNA, 32 nt, Human
aggugagcacugcccugggcucuggcugguuc

SEQ ID NO: 59959 - RNA, 32 nt, Human
aggugagcagaggaguccagggcgggaguggg

SEQ ID NO: 59960 - RNA, 32 nt, Human
aggugagcagaggcacuggugugccugccagg

SEQ ID NO: 59961 - RNA, 26 nt, Human
aggugagcagaucaccugaggucagg

SEQ ID NO: 59962 - RNA, 26 nt, Human
aggugagcagaucaccugagguuagg

SEQ ID NO: 59963 - RNA, 32 nt, Human
aggugagcagaugccagcaccauguuuccugu

SEQ ID NO: 59964 - RNA, 24 nt, Human
aggugagcagguugcuugagccca

SEQ ID NO: 59965 - RNA, 32 nt, Human
aggugagcauguugaguuggggagcagcagga

SEQ ID NO: 59966 - RNA, 32 nt, Human
aggugagccgggcaaggcugccuccaguccua

SEQ ID NO: 59967 - RNA, 24 nt, Human
aggugagcggaucacaaggucagg

SEQ ID NO: 59968 - RNA, 26 nt, Human
aggugagcggaucaccugaggucagg

SEQ ID NO: 59969 - RNA, 32 nt, Human
aggugagcuauggugcugcaccuacugcucuu

SEQ ID NO: 59970 - RNA, 32 nt, Human
aggugagcuccuggaggccacggggacagaga

SEQ ID NO: 59971 - RNA, 32 nt, Human
aggugagcucucugacggucaggugccuuccc

SEQ ID NO: 59972 - RNA, 32 nt, Human
aggugagcugagagcugagauugcaccacugc

SEQ ID NO: 59973 - RNA, 32 nt, Human
aggugagcugccucugccccugggcaaggaag

SEQ ID NO: 59974 - RNA, 32 nt, Human
aggugagcuguguccucuaggcugccagcuca

SEQ ID NO: 59975 - RNA, 32 nt, Human
aggugaggaaacugagcccagugaaguuaaau

SEQ ID NO: 59976 - RNA, 32 nt, Human
aggugaggaauuuuaaauuggaacaagagcaa

SEQ ID NO: 59977 - RNA, 32 nt, Human
aggugaggagagaagcaucugggggcacucca

SEQ ID NO: 59978 - RNA, 32 nt, Human
aggugaggagagaaggggacacucgaguccag

SEQ ID NO: 59979 - RNA, 18 nt, Human
aggugaggagaggucagg

SEQ ID NO: 59980 - RNA, 32 nt, Human
aggugaggcaggacaggaugggggaggagggc

SEQ ID NO: 59981 - RNA, 23 nt, Human
aggugaggcccaaugaggucagg

SEQ ID NO: 59982 - RNA, 32 nt, Human
aggugagggaaacugcugguucugcuggugcc

SEQ ID NO: 59983 - RNA, 32 nt, Human
aggugagggcccugcccuggaagacuggaggg

SEQ ID NO: 59984 - RNA, 32 nt, Human
aggugagggugggaggcagaaaagaggcacag

SEQ ID NO: 59985 - RNA, 32 nt, Human
aggugaggucucucuaagucaggcugggguug

SEQ ID NO: 59986 - RNA, 32 nt, Human
aggugaggugcgucugugccacccuugucagg

SEQ ID NO: 59987 - RNA, 32 nt, Human
aggugaggugggagguuggagagccaggugag

SEQ ID NO: 59988 - RNA, 21 nt, Human
aggugagguuucaccauguug

SEQ ID NO: 59989 - RNA, 32 nt, Human
aggugaguaauuuaauuuuguucagucagauu

SEQ ID NO: 59990 - RNA, 32 nt, Human
aggugaguccuccagagcuuccuggccgggcc

SEQ ID NO: 59991 - RNA, 23 nt, Human
aggugaguggagcagagguccug

SEQ ID NO: 59992 - RNA, 25 nt, Human
aggugaguggaucaccugaggucag

SEQ ID NO: 59993 - RNA, 26 nt, Human
aggugaguggaucaccugaggucagg

SEQ ID NO: 59994 - RNA, 24 nt, Human
aggugaguggaucacgaggucagg

SEQ ID NO: 59995 - RNA, 24 nt, Human
aggugaguggauuacaaggucagg

SEQ ID NO: 59996 - RNA, 32 nt, Human
aggugaguuccagauguggagcaacuugggcu

SEQ ID NO: 59997 - RNA, 32 nt, Human
aggugauaaacaaugcuuuuugugcacuacau

SEQ ID NO: 59998 - RNA, 32 nt, Human
aggugauaaauuuuucuuuaauuccuuugguu

SEQ ID NO: 59999 - RNA, 32 nt, Human
aggugauaagccugcaugugucuggacaccaa

SEQ ID NO: 60000 - RNA, 32 nt, Human
aggugaucaugcugcaaguucuuucuggaccu

SEQ ID NO: 60001 - RNA, 18 nt, Human
aggugauccacccaccuc

SEQ ID NO: 60002 - RNA, 32 nt, Human
aggugaucccgacccucaccagucccauuugc

SEQ ID NO: 60003 - RNA, 32 nt, Human
aggugauccgcccgccuccaccucccagggug

SEQ ID NO: 60004 - RNA, 32 nt, Human
aggugauccucccaucucagccugccuccgag

SEQ ID NO: 60005 - RNA, 32 nt, Human
aggugaucuacccgccuccaccucccaaagug

SEQ ID NO: 60006 - RNA, 32 nt, Human
aggugaugaagacacagaacaggcucagucag

SEQ ID NO: 60007 - RNA, 22 nt, Human
aggugaugcagcagcaggggca

SEQ ID NO: 60008 - RNA, 31 nt, Human
aggugaugcauucucccuuaugcagggacau

SEQ ID NO: 60009 - RNA, 32 nt, Human
aggugaugcccaaggcacagggcugcagaaaa

SEQ ID NO: 60010 - RNA, 32 nt, Human
aggugauggggcugggcugagccagggaggaa

SEQ ID NO: 60011 - RNA, 30 nt, Human
aggugaugguuauccuggaacuggagauua

SEQ ID NO: 60012 - RNA, 32 nt, Human
aggugaugugauucaaaagaugccauucauag

SEQ ID NO: 60013 - RNA, 32 nt, Human
aggugauucgggcagccagggacaggagccac

SEQ ID NO: 60014 - RNA, 32 nt, Human
aggugauugauaagguuuucccagggaucucu

SEQ ID NO: 60015 - RNA, 32 nt, Human
aggugauuguguguuuuacacauugcugcauu

SEQ ID NO: 60016 - RNA, 32 nt, Human
aggugcaaacuauuuauccaucuggaaauaag

SEQ ID NO: 60017 - RNA, 32 nt, Human
aggugcaaagaggcagaucuuugcugccagcc

SEQ ID NO: 60018 - RNA, 32 nt, Human
aggugcaaucauagcucacugcagccucaaac

SEQ ID NO: 60019 - RNA, 32 nt, Human
aggugcaauggaagacacuacgcuacuugguu

SEQ ID NO: 60020 - RNA, 32 nt, Human
aggugcacagagaguccucagagcacaagcgu

SEQ ID NO: 60021 - RNA, 32 nt, Human
aggugcacaucacauucccuuguccacacugc

SEQ ID NO: 60022 - RNA, 32 nt, Human
aggugcaccacugccgucauuucagcuucugg

SEQ ID NO: 60023 - RNA, 32 nt, Human
aggugcaccacugggcuccuggguagugugug

SEQ ID NO: 60024 - RNA, 32 nt, Human
aggugcacugaggagaugaaggccgggacccc

SEQ ID NO: 60025 - RNA, 32 nt, Human
aggugcagacugccccgugcucuggcuugcag

SEQ ID NO: 60026 - RNA, 32 nt, Human
aggugcagagacgugggagacagugaaaggcu

SEQ ID NO: 60027 - RNA, 32 nt, Human
aggugcagaucagcauagaucugugauucaga

SEQ ID NO: 60028 - RNA, 32 nt, Human
aggugcagcauggacugaguucuugacaacag

SEQ ID NO: 60029 - RNA, 19 nt, Human
aggugcagccggcaggcca

SEQ ID NO: 60030 - RNA, 32 nt, Human
aggugcagccuccuuaucuaucucuuugcacu

SEQ ID NO: 60031 - RNA, 32 nt, Human
aggugcagccuggacaacaugaugagaucccc

SEQ ID NO: 60032 - RNA, 32 nt, Human
aggugcagccuggcaugggggagcguggaggc

SEQ ID NO: 60033 - RNA, 32 nt, Human
aggugcagcucagugauccucucagauuccgc

SEQ ID NO: 60034 - RNA, 32 nt, Human
aggugcagcuccagcagcaauggcagugacgg

SEQ ID NO: 60035 - RNA, 32 nt, Human
aggugcagcugcagcaguguucuaccggaagu

SEQ ID NO: 60036 - RNA, 32 nt, Human
aggugcagcuucgaggcccacagucugcgacc

SEQ ID NO: 60037 - RNA, 32 nt, Human
aggugcaggaggaacucuggaagcacugcucu

SEQ ID NO: 60038 - RNA, 32 nt, Human
aggugcagggagcaggcgagggaaggauccgu

SEQ ID NO: 60039 - RNA, 32 nt, Human
aggugcagggcaaaggucagauucugaauaua

SEQ ID NO: 60040 - RNA, 32 nt, Human
aggugcagucacucacaccugcuugcgcucac

SEQ ID NO: 60041 - RNA, 32 nt, Human
aggugcauauguauacauacacacacauauau

SEQ ID NO: 60042 - RNA, 32 nt, Human
aggugcauguguucccuaggagcucaacagga

SEQ ID NO: 60043 - RNA, 23 nt, Human
aggugcauugcagggaccaguga

SEQ ID NO: 60044 - RNA, 32 nt, Human
aggugcauuucacagcacucugggcgaaaauu

SEQ ID NO: 60045 - RNA, 32 nt, Human
aggugcauuugguccuuuccauggccaggaag

SEQ ID NO: 60046 - RNA, 32 nt, Human
aggugccaaggagccaaacagauggcuuucca

SEQ ID NO: 60047 - RNA, 32 nt, Human
aggugccaaucuccagucccaggaucccccag

SEQ ID NO: 60048 - RNA, 32 nt, Human
aggugccacagcccuggggagccagacaggcu

SEQ ID NO: 60049 - RNA, 32 nt, Human
aggugccacuguaguccggccugggcaacaga

SEQ ID NO: 60050 - RNA, 32 nt, Human
aggugccaggcuguaagcauucugagcugggc

SEQ ID NO: 60051 - RNA, 32 nt, Human
aggugccaucagcaggaggcacugugaagcac

SEQ ID NO: 60052 - RNA, 20 nt, Human
aggugccaugccugcucccu

SEQ ID NO: 60053 - RNA, 32 nt, Human
aggugcccaaagagguuauagugaaguuaacc

SEQ ID NO: 60054 - RNA, 32 nt, Human
aggugcccaacacccauucaucucaagugcuu

SEQ ID NO: 60055 - RNA, 32 nt, Human
aggugcccaagaggagaggaaugggaagagug

SEQ ID NO: 60056 - RNA, 20 nt, Human
aggugcccaccugcccggag

SEQ ID NO: 60057 - RNA, 20 nt, Human
aggugcccagcuauaccugu

SEQ ID NO: 60058 - RNA, 32 nt, Human
aggugcccccuucucgccucucuucucuucuc

SEQ ID NO: 60059 - RNA, 32 nt, Human
aggugccccugccuggagcacagggucccacg

SEQ ID NO: 60060 - RNA, 32 nt, Human
aggugccccuuccugaggguguugggggaugg

SEQ ID NO: 60061 - RNA, 32 nt, Human
aggugcccgacuccagccaugcuggcgcuacu

SEQ ID NO: 60062 - RNA, 32 nt, Human
aggugcccguguccuaugcacacaccgucaag

SEQ ID NO: 60063 - RNA, 32 nt, Human
aggugcccuccuggccugggacugcuguggca

SEQ ID NO: 60064 - RNA, 32 nt, Human
aggugcccuuggagugccacacaugcccagac

SEQ ID NO: 60065 - RNA, 32 nt, Human
aggugccgcggaucuugagaaggaggcguggc

SEQ ID NO: 60066 - RNA, 32 nt, Human
aggugccggacccggaugcggggccagaugga

SEQ ID NO: 60067 - RNA, 32 nt, Human
aggugccggggaggggcagagaggaagugguc

SEQ ID NO: 60068 - RNA, 32 nt, Human
aggugccguuauuuuccuccccucuugcucag

SEQ ID NO: 60069 - RNA, 32 nt, Human
aggugccguugcagcaguuggaugugaggcca

SEQ ID NO: 60070 - RNA, 32 nt, Human
aggugccuauaaucccagcuacuccagaggcu

SEQ ID NO: 60071 - RNA, 32 nt, Human
aggugccuccacacagccccucuccccgacca

SEQ ID NO: 60072 - RNA, 32 nt, Human
aggugccuccugacacaccugcagccucccuc

SEQ ID NO: 60073 - RNA, 32 nt, Human
aggugccucucuggcccuccacugacuguacc

SEQ ID NO: 60074 - RNA, 32 nt, Human
aggugccucugccucucgacuugcacccuggu

SEQ ID NO: 60075 - RNA, 22 nt, Human
aggugccucuguucuuugugga

SEQ ID NO: 60076 - RNA, 32 nt, Human
aggugccugagugugugggccugcugccugca

SEQ ID NO: 60077 - RNA, 32 nt, Human
aggugccugcagcgcucggcacugugggcaga

SEQ ID NO: 60078 - RNA, 32 nt, Human
aggugccugcagcuccuggcuauguccugcuu

SEQ ID NO: 60079 - RNA, 32 nt, Human
aggugccugcauuuccagccucguggcucacc

SEQ ID NO: 60080 - RNA, 32 nt, Human
aggugccugcugcugcuguauacacuugagug

SEQ ID NO: 60081 - RNA, 32 nt, Human
aggugccuggccaggcccaccugcugcagaug

SEQ ID NO: 60082 - RNA, 32 nt, Human
aggugccugggaggaguggcccugauccagga

SEQ ID NO: 60083 - RNA, 32 nt, Human
aggugccugggagggcugcugcaguggggucu

SEQ ID NO: 60084 - RNA, 32 nt, Human
aggugccugggcacagaugucuguucagcagg

SEQ ID NO: 60085 - RNA, 32 nt, Human
aggugccuguaaucacagcuacucgggaggcu

SEQ ID NO: 60086 - RNA, 32 nt, Human
aggugccuguaaucccaacuacucaggaggcu

SEQ ID NO: 60087 - RNA, 32 nt, Human
aggugccuguaaucccagcacuuugggaagcc

SEQ ID NO: 60088 - RNA, 32 nt, Human
aggugccuguaaucccagcuacucaggaggcu

SEQ ID NO: 60089 - RNA, 32 nt, Human
aggugccuguaaucccagcuacucagggggcu

SEQ ID NO: 60090 - RNA, 32 nt, Human
aggugccuguaaucccagcuacucgggaggcu

SEQ ID NO: 60091 - RNA, 32 nt, Human
aggugccuguaaucccagcuacucgguaggcu

SEQ ID NO: 60092 - RNA, 32 nt, Human
aggugccuguaaucccagcuacucugucucaa

SEQ ID NO: 60093 - RNA, 32 nt, Human
aggugccuguaaucccagcuacuggggaaagc

SEQ ID NO: 60094 - RNA, 32 nt, Human
aggugccuguaaucccagcuacuugagagucu

SEQ ID NO: 60095 - RNA, 32 nt, Human
aggugccuguaaucccagcuacuugggagacu

SEQ ID NO: 60096 - RNA, 32 nt, Human
aggugccuguaaucccagcuacuugggaggcc

SEQ ID NO: 60097 - RNA, 32 nt, Human
aggugccuguaaucccagcuacuugggaggcu

SEQ ID NO: 60098 - RNA, 32 nt, Human
aggugccuguaaucccauguacucuggaggcu

SEQ ID NO: 60099 - RNA, 32 nt, Human
aggugccuguaaucccggcuauucagaaggcc

SEQ ID NO: 60100 - RNA, 32 nt, Human
aggugccuguaauccuagcuacuuggcaggcu

SEQ ID NO: 60101 - RNA, 32 nt, Human
aggugccuguagucccagcuacucggcaggcu

SEQ ID NO: 60102 - RNA, 32 nt, Human
aggugccuguagucccagcuacucgggaagcu

SEQ ID NO: 60103 - RNA, 32 nt, Human
aggugccuguagucccagcuacucgggaggcu

SEQ ID NO: 60104 - RNA, 32 nt, Human
aggugccuguagucccagcuacucuggaggcu

SEQ ID NO: 60105 - RNA, 32 nt, Human
aggugccuguagucccagcuacuugggacacc

SEQ ID NO: 60106 - RNA, 32 nt, Human
aggugccuguagucccagcuacuugggaggcu

SEQ ID NO: 60107 - RNA, 32 nt, Human
aggugccuguagucccagcuagucgggaggcu

SEQ ID NO: 60108 - RNA, 32 nt, Human
aggugccuguagucucagcuacucaggaggcu

SEQ ID NO: 60109 - RNA, 22 nt, Human
aggugccuguaucauuggcaca

SEQ ID NO: 60110 - RNA, 32 nt, Human
aggugccuguggucccagcugcucgggaggcu

SEQ ID NO: 60111 - RNA, 32 nt, Human
aggugccuguguuuggccgaggccugugugau

SEQ ID NO: 60112 - RNA, 32 nt, Human
aggugccuuccucugcugaagccuuaccuccu

SEQ ID NO: 60113 - RNA, 32 nt, Human
aggugccuuucuuguaccucagcacuccuggg

SEQ ID NO: 60114 - RNA, 32 nt, Human
aggugcgagccaccggguccagccucucaggc

SEQ ID NO: 60115 - RNA, 22 nt, Human
aggugcgagccaccgugcccgg

SEQ ID NO: 60116 - RNA, 32 nt, Human
aggugcgcccuccacccgcugggcuaggcugg

SEQ ID NO: 60117 - RNA, 32 nt, Human
aggugcggcucuauccccaacucugugucaca

SEQ ID NO: 60118 - RNA, 32 nt, Human
aggugcggcugcaggccguuguuggucgagcu

SEQ ID NO: 60119 - RNA, 21 nt, Human
aggugcggcugcugcggcugc

SEQ ID NO: 60120 - RNA, 32 nt, Human
aggugcgggaccaucugaugugaugugaauac

SEQ ID NO: 60121 - RNA, 18 nt, Human
aggugcggggccucaggg

SEQ ID NO: 60122 - RNA, 32 nt, Human
aggugcuaccuggccuuccugccaggagcucu

SEQ ID NO: 60123 - RNA, 32 nt, Human
aggugcuagaagccaggcccaggaagguuccu

SEQ ID NO: 60124 - RNA, 24 nt, Human
aggugcuaggauuacaggcaugag

SEQ ID NO: 60125 - RNA, 32 nt, Human
aggugcuaggauuacaggcaugagccaccgca

SEQ ID NO: 60126 - RNA, 32 nt, Human
aggugcuaguacaucauucaugaucaccuuaa

SEQ ID NO: 60127 - RNA, 32 nt, Human
aggugcuaucuagaccugaaguagcgggaaga

SEQ ID NO: 60128 - RNA, 32 nt, Human
aggugcucaaaaacaaaugccuucagaggcca

SEQ ID NO: 60129 - RNA, 28 nt, Human
aggugcucaauaaagacuuguugaauga

SEQ ID NO: 60130 - RNA, 31 nt, Human
aggugcucaauaaauguugaaaccaacugaa

SEQ ID NO: 60131 - RNA, 32 nt, Human
aggugcucagccagugcgcacaggaagggcug

SEQ ID NO: 60132 - RNA, 32 nt, Human
aggugcucaguggaggccaggaaggccuugag

SEQ ID NO: 60133 - RNA, 32 nt, Human
aggugcucuccucccugccaccaugcucauca

SEQ ID NO: 60134 - RNA, 32 nt, Human
aggugcucuccuccuuucucagccauggcccc

SEQ ID NO: 60135 - RNA, 32 nt, Human
aggugcucugugagaagugcaagagcacgcug

SEQ ID NO: 60136 - RNA, 32 nt, Human
aggugcugaagaugugugucagccugaggcuu

SEQ ID NO: 60137 - RNA, 32 nt, Human
aggugcugagagaggugaccugccggaguaag

SEQ ID NO: 60138 - RNA, 32 nt, Human
aggugcugagaggggagggagacucugcggcc

SEQ ID NO: 60139 - RNA, 32 nt, Human
aggugcugagauuacaggccugaaccaccaca

SEQ ID NO: 60140 - RNA, 32 nt, Human
aggugcugagauuacaggcgugagccaccgug

SEQ ID NO: 60141 - RNA, 32 nt, Human
aggugcugagauuacauguaugagccacugca

SEQ ID NO: 60142 - RNA, 32 nt, Human
aggugcugagcgaguauccacaagcacagacc

SEQ ID NO: 60143 - RNA, 32 nt, Human
aggugcugauaguacaggcaugaaccacugug

SEQ ID NO: 60144 - RNA, 32 nt, Human
aggugcugcacaggagcccaagcacaagagca

SEQ ID NO: 60145 - RNA, 31 nt, Human
aggugcugccucucccugauccuggaucuga

SEQ ID NO: 60146 - RNA, 32 nt, Human
aggugcugccucucccugauccuggaucugag

SEQ ID NO: 60147 - RNA, 32 nt, Human
aggugcugcggcuugugagaaaaggcccacaa

SEQ ID NO: 60148 - RNA, 32 nt, Human
aggugcugcucagcagaggauaugggugggag

SEQ ID NO: 60149 - RNA, 32 nt, Human
aggugcugcugaggacauggaugaggauaucu

SEQ ID NO: 60150 - RNA, 32 nt, Human
aggugcugcugccucugagcccucccugcuaa

SEQ ID NO: 60151 - RNA, 32 nt, Human
aggugcuggaagguauuggcuccuuguuuugg

SEQ ID NO: 60152 - RNA, 24 nt, Human
aggugcuggaauuacaggcgugag

SEQ ID NO: 60153 - RNA, 24 nt, Human
aggugcuggaauuacaggugugag

SEQ ID NO: 60154 - RNA, 23 nt, Human
aggugcuggauuacaggcaugag

SEQ ID NO: 60155 - RNA, 32 nt, Human
aggugcuggauuacaggcaugagccaccucgc

SEQ ID NO: 60156 - RNA, 20 nt, Human
aggugcuggauuacaggugu

SEQ ID NO: 60157 - RNA, 32 nt, Human
aggugcuggcacuauuuucacuccaggaaagc

SEQ ID NO: 60158 - RNA, 32 nt, Human
aggugcuggcaggcaggcagggccaggagggu

SEQ ID NO: 60159 - RNA, 32 nt, Human
aggugcuggcaugauggagguggugcaccuug

SEQ ID NO: 60160 - RNA, 24 nt, Human
aggugcugggacuacaggcguggg

SEQ ID NO: 60161 - RNA, 32 nt, Human
aggugcugggagcguccucuucagcgucuuuu

SEQ ID NO: 60162 - RNA, 24 nt, Human
aggugcugggauuacaagcgugag

SEQ ID NO: 60163 - RNA, 24 nt, Human
aggugcugggauuacaggcacgag

SEQ ID NO: 60164 - RNA, 32 nt, Human
aggugcugggauuacaggcacgagccacugug

SEQ ID NO: 60165 - RNA, 32 nt, Human
aggugcugggauuacaggcauaagcuaccacg

SEQ ID NO: 60166 - RNA, 24 nt, Human
aggugcugggauuacaggcaugag

SEQ ID NO: 60167 - RNA, 32 nt, Human
aggugcugggauuacaggcaugagccaccgug

SEQ ID NO: 60168 - RNA, 32 nt, Human
aggugcugggauuacaggcaugagggaccaag

SEQ ID NO: 60169 - RNA, 24 nt, Human
aggugcugggauuacaggugugag

SEQ ID NO: 60170 - RNA, 32 nt, Human
aggugcugggauuacaggugugagccaccaca

SEQ ID NO: 60171 - RNA, 32 nt, Human
aggugcugggauuacaggugugcugcacagag

SEQ ID NO: 60172 - RNA, 21 nt, Human
aggugcugggauuauaggcgu

SEQ ID NO: 60173 - RNA, 24 nt, Human
aggugcugggauugcagacgugag

SEQ ID NO: 60174 - RNA, 24 nt, Human
aggugcugggauugcaggcgugag

SEQ ID NO: 60175 - RNA, 32 nt, Human
aggugcugggggcaccugcacacucacagcug

SEQ ID NO: 60176 - RNA, 32 nt, Human
aggugcuguuaucucguaccuccugggauggc

SEQ ID NO: 60177 - RNA, 31 nt, Human
aggugcuuaaagggacauuguaggagguacu

SEQ ID NO: 60178 - RNA, 22 nt, Human
aggugcuuacaucccaggggcc

SEQ ID NO: 60179 - RNA, 32 nt, Human
aggugcuuauaaucccagcuacucugggggcc

SEQ ID NO: 60180 - RNA, 22 nt, Human
aggugcuucagugacuuacuca

SEQ ID NO: 60181 - RNA, 32 nt, Human
aggugcuucgggagggggagagacugacccug

SEQ ID NO: 60182 - RNA, 22 nt, Human
aggugcuucuagcccugucuca

SEQ ID NO: 60183 - RNA, 23 nt, Human
aggugcuucucagaaguccugga

SEQ ID NO: 60184 - RNA, 32 nt, Human
aggugcuucucggcuuccucccccucauggcg

SEQ ID NO: 60185 - RNA, 32 nt, Human
aggugcuucuguacuuuuccagccuggaaaug

SEQ ID NO: 60186 - RNA, 32 nt, Human
aggugcuugaaggacugguuuggaaacagacc

SEQ ID NO: 60187 - RNA, 32 nt, Human
aggugcuugccugggaccaguggcagggaccc

SEQ ID NO: 60188 - RNA, 23 nt, Human
aggugcuuggaugaagcugaaaa

SEQ ID NO: 60189 - RNA, 22 nt, Human
aggugcuuggcugccucagagg

SEQ ID NO: 60190 - RNA, 32 nt, Human
aggugcuugggaacugcugguuaugagcauuc

SEQ ID NO: 60191 - RNA, 32 nt, Human
aggugcuuguaaucccagcuacuugggaggcu

SEQ ID NO: 60192 - RNA, 21 nt, Human
aggugcuuuaggucugguuca

SEQ ID NO: 60193 - RNA, 32 nt, Human
aggugcuuugggagggggagagacugauccug

SEQ ID NO: 60194 - RNA, 23 nt, Human
agguggaacgggaacagcuuccu

SEQ ID NO: 60195 - RNA, 32 nt, Human
agguggaacuacaggcauguaccaccacaccu

SEQ ID NO: 60196 - RNA, 31 nt, Human
agguggaacuggaaacuuaggagggaaagac

SEQ ID NO: 60197 - RNA, 22 nt, Human
agucagccaguugguugcugug

SEQ ID NO: 60198 - RNA, 32 nt, Human
agucagccaugucgccagcacaggucuauguc

SEQ ID NO: 60199 - RNA, 22 nt, Human
agucagccauucuuuuuccuca

SEQ ID NO: 60200 - RNA, 32 nt, Human
agucagcccaacauuuuccaccagucuguccc

SEQ ID NO: 60201 - RNA, 32 nt, Human
agucagcccgggaggucaggagcgcggcgggc

SEQ ID NO: 60202 - RNA, 32 nt, Human
agucagccuaggaggaggcagggcucccggaa

SEQ ID NO: 60203 - RNA, 32 nt, Human
agucagccuccacagaccaagcucaugacuca

SEQ ID NO: 60204 - RNA, 32 nt, Human
agucagccucuccaggcccagcuccugccuuc

SEQ ID NO: 60205 - RNA, 32 nt, Human
agucagccucuuuggggcacccucucucagcc

SEQ ID NO: 60206 - RNA, 32 nt, Human
agucagccuggcugggcucuggugggggcucc

SEQ ID NO: 60207 - RNA, 21 nt, Human
agucagccugggcuucugcca

SEQ ID NO: 60208 - RNA, 32 nt, Human
agucagccuucucucccccauaaggacuggcu

SEQ ID NO: 60209 - RNA, 23 nt, Human
agucagcugcccuuucuccugug

SEQ ID NO: 60210 - RNA, 32 nt, Human
agucagcuugccaucccuccucuucacuagca

SEQ ID NO: 60211 - RNA, 23 nt, Human
agucaggaaugauugcugacuca

SEQ ID NO: 60212 - RNA, 32 nt, Human
agucaggaauuaaacuuauaccaaugagagcc

SEQ ID NO: 60213 - RNA, 32 nt, Human
agucaggaauuuuuccucuggagacugccuaa

SEQ ID NO: 60214 - RNA, 32 nt, Human
agucaggaccgccugcaccgcaguccggggau

SEQ ID NO: 60215 - RNA, 32 nt, Human
agucaggacucugcucccaucuuugccuccac

SEQ ID NO: 60216 - RNA, 32 nt, Human
agucaggagagaccagccuggccagcauagug

SEQ ID NO: 60217 - RNA, 32 nt, Human
agucaggagaucaagaccauccuggccaacac

SEQ ID NO: 60218 - RNA, 32 nt, Human
agucaggagauuuaaacaaaauagcuuuggag

SEQ ID NO: 60219 - RNA, 32 nt, Human
agucaggagguugaggcugcagugagcuauga

SEQ ID NO: 60220 - RNA, 32 nt, Human
agucaggaguuugagagcagccugagcaacau

SEQ ID NO: 60221 - RNA, 22 nt, Human
agucaggcacguagcucagcgg

SEQ ID NO: 60222 - RNA, 32 nt, Human
agucaggcagccacaccuugguccucaucuug

SEQ ID NO: 60223 - RNA, 32 nt, Human
agucaggcagcccaagaggaucuucuuugguc

SEQ ID NO: 60224 - RNA, 32 nt, Human
agucaggcaggcugggacugaagguggcuccc

SEQ ID NO: 60225 - RNA, 32 nt, Human
agucaggcagugagacugguggggcacggggg

SEQ ID NO: 60226 - RNA, 22 nt, Human
agucaggcaguuugcuuaagga

SEQ ID NO: 60227 - RNA, 24 nt, Human
agucaggcauggcaagcccaggga

SEQ ID NO: 60228 - RNA, 32 nt, Human
agucaggcaugguggugggugccuggaguccc

SEQ ID NO: 60229 - RNA, 32 nt, Human
agucaggccacaugccuggucacugaaucaug

SEQ ID NO: 60230 - RNA, 32 nt, Human
agucaggcccaugauagucagugcaguugggg

SEQ ID NO: 60231 - RNA, 32 nt, Human
agucaggcucauuugggguaaugugaugacug

SEQ ID NO: 60232 - RNA, 32 nt, Human
agucaggcugagaaauccuuucccaggccagg

SEQ ID NO: 60233 - RNA, 32 nt, Human
agucaggcuguugcgcucccaccucagcccca

SEQ ID NO: 60234 - RNA, 32 nt, Human
agucaggcuuccagcacauucucccccauuug

SEQ ID NO: 60235 - RNA, 32 nt, Human
agucaggcuuuguacuugacccuuccccuccc

SEQ ID NO: 60236 - RNA, 32 nt, Human
agucagggagagacagaacugggggaaaggga

SEQ ID NO: 60237 - RNA, 32 nt, Human
agucagggagggcagaggguggcagcgagggc

SEQ ID NO: 60238 - RNA, 32 nt, Human
agucagggcagagaggaggagggaggcuguca

SEQ ID NO: 60239 - RNA, 32 nt, Human
agucagggcccacuccaggagggacccacugc

SEQ ID NO: 60240 - RNA, 32 nt, Human
agucaggggccaggaugcccucggaucagggc

SEQ ID NO: 60241 - RNA, 32 nt, Human
agucaggggcugggggcugagcccucaccccc

SEQ ID NO: 60242 - RNA, 32 nt, Human
agucaggggcuugguucucccacuuacacugu

SEQ ID NO: 60243 - RNA, 32 nt, Human
agucaggggugaggaggagccaggccuccugu

SEQ ID NO: 60244 - RNA, 32 nt, Human
agucagggugguguggcgguugcagcggcccc

SEQ ID NO: 60245 - RNA, 32 nt, Human
agucaggguuugaugcuugcuuccuagaaacu

SEQ ID NO: 60246 - RNA, 32 nt, Human
agucagguaauggcagaucuggcaugcacacc

SEQ ID NO: 60247 - RNA, 32 nt, Human
agucagguaccacauaaucauguuucagucag

SEQ ID NO: 60248 - RNA, 32 nt, Human
agucaggucagcugcccacagcccucuugccu

SEQ ID NO: 60249 - RNA, 20 nt, Human
agucaggugcagagguucug

SEQ ID NO: 60250 - RNA, 32 nt, Human
agucaggugguuuaccuuccagaggcuggcaa

SEQ ID NO: 60251 - RNA, 32 nt, Human
agucaggugugcuggggacagcaagaaugaug

SEQ ID NO: 60252 - RNA, 32 nt, Human
agucaguacaguacaggaaggggcugggcuga

SEQ ID NO: 60253 - RNA, 32 nt, Human
agucaguacuaugggguccugggaaacaaaga

SEQ ID NO: 60254 - RNA, 32 nt, Human
agucaguagcccugaaacuuucuacacauucc

SEQ ID NO: 60255 - RNA, 32 nt, Human
agucaguccaaucauaguacagugauguggug

SEQ ID NO: 60256 - RNA, 32 nt, Human
agucaguccucucuuuuaauacugaagggcac

SEQ ID NO: 60257 - RNA, 32 nt, Human
agucaguccuuuggaaaccagcaggucugaaa

SEQ ID NO: 60258 - RNA, 23 nt, Human
agucagucuccucccugucucca

SEQ ID NO: 60259 - RNA, 23 nt, Human
agucagugauaauuugcugaaga

SEQ ID NO: 60260 - RNA, 32 nt, Human
agucagugaugaucgcaucacaguugagugaa

SEQ ID NO: 60261 - RNA, 32 nt, Human
agucagugauugucuuuuugggcuuccccucc

SEQ ID NO: 60262 - RNA, 32 nt, Human
agucaguggauacaaguagugcagaagguuca

SEQ ID NO: 60263 - RNA, 32 nt, Human
agucaguggcaccauuuccuaaaguaacugaa

SEQ ID NO: 60264 - RNA, 32 nt, Human
agucaguggcaucacaguuuguagccucaggg

SEQ ID NO: 60265 - RNA, 32 nt, Human
agucaguggcuguuguucugucuugcugucug

SEQ ID NO: 60266 - RNA, 32 nt, Human
agucaguggggcuggacgggagccaaaaucag

SEQ ID NO: 60267 - RNA, 32 nt, Human
agucagugguuucccuuggauucauucuccua

SEQ ID NO: 60268 - RNA, 32 nt, Human
agucaguguaggcuuuguuacuuucccuuuuc

SEQ ID NO: 60269 - RNA, 32 nt, Human
agucaguguggaccucaugauuauagaggcca

SEQ ID NO: 60270 - RNA, 32 nt, Human
agucaguucaaaaccuucuggaaaggauucac

SEQ ID NO: 60271 - RNA, 32 nt, Human
agucaguucguagguggcgaucagaggcaccc

SEQ ID NO: 60272 - RNA, 32 nt, Human
agucaguuggcaagcaguggaauaagauuuuu

SEQ ID NO: 60273 - RNA, 32 nt, Human
agucaguuugaggccagaugaauagaaauugc

SEQ ID NO: 60274 - RNA, 30 nt, Human
agucaguuugcugugucagaaagcacuucu

SEQ ID NO: 60275 - RNA, 32 nt, Human
agucaguuuuaggguugccuguauccaguaac

SEQ ID NO: 60276 - RNA, 32 nt, Human
agucauaccccucaagaggcaggaugacaucu

SEQ ID NO: 60277 - RNA, 22 nt, Human
agucauagcccuggcuugggga

SEQ ID NO: 60278 - RNA, 32 nt, Human
agucauaggagguuggcaggacggguaucaca

SEQ ID NO: 60279 - RNA, 32 nt, Human
agucauaucucauucaugcugcagccuuugca

SEQ ID NO: 60280 - RNA, 32 nt, Human
agucauauuucugcuacuacuaccuucauuua

SEQ ID NO: 60281 - RNA, 32 nt, Human
agucauauuucuggguuuuauggcaggguuug

SEQ ID NO: 60282 - RNA, 32 nt, Human
agucaucaagaaaaguccaaagaagacuuuaa

SEQ ID NO: 60283 - RNA, 32 nt, Human
agucaucaauaugaagccaugauuaaugcuug

SEQ ID NO: 60284 - RNA, 32 nt, Human
agucaucacauuuggcuacuacccgggaaagc

SEQ ID NO: 60285 - RNA, 32 nt, Human
agucaucacccagcugggcuucugcaguguuu

SEQ ID NO: 60286 - RNA, 32 nt, Human
agucaucagauauuuuagccaccuacacaaaa

SEQ ID NO: 60287 - RNA, 32 nt, Human
agucaucauggacacccuccagcccggcuucc

SEQ ID NO: 60288 - RNA, 32 nt, Human
agucauccacacacaauccacacacgcauagc

SEQ ID NO: 60289 - RNA, 28 nt, Human
agucauccaggugcugccacaugacagg

SEQ ID NO: 60290 - RNA, 32 nt, Human
agucauccucaaggauuuuauccuggaacauu

SEQ ID NO: 60291 - RNA, 32 nt, Human
agucauccuuucuacugcuuuugaggcccucc

SEQ ID NO: 60292 - RNA, 32 nt, Human
agucaucgagcuguggccaacauggagcuagc

SEQ ID NO: 60293 - RNA, 32 nt, Human
agucaucgauuuuccagguguuggugaacugc

SEQ ID NO: 60294 - RNA, 32 nt, Human
agucaucucauuccacuguugguauuauauaa

SEQ ID NO: 60295 - RNA, 32 nt, Human
agucaucugcugucucuucagucugcuccauc

SEQ ID NO: 60296 - RNA, 32 nt, Human
agucaucuucuuucagugucuuuaugguagaa

SEQ ID NO: 60297 - RNA, 32 nt, Human
agucaugaacaacacugagaaacgucaaagug

SEQ ID NO: 60298 - RNA, 29 nt, Human
agucaugaggugcuucagaguacucuggg

SEQ ID NO: 60299 - RNA, 32 nt, Human
agucaugauguuuuggugguaccaccugguug

SEQ ID NO: 60300 - RNA, 32 nt, Human
agucaugcagaggccaagcucuaaagggcacc

SEQ ID NO: 60301 - RNA, 32 nt, Human
agucaugccaagcauagcccucaugucagcgc

SEQ ID NO: 60302 - RNA, 32 nt, Human
agucaugccacugcacucaaaccuggcggaca

SEQ ID NO: 60303 - RNA, 32 nt, Human
agucaugccuccugcauuucgcuacccgaguu

SEQ ID NO: 60304 - RNA, 32 nt, Human
agucaugccuuaagaagcagagcuaccuuacg

SEQ ID NO: 60305 - RNA, 19 nt, Human
agucaugcuuuugcuauca

SEQ ID NO: 60306 - RNA, 32 nt, Human
agucauggagccaugauaggccagagccugag

SEQ ID NO: 60307 - RNA, 32 nt, Human
agucauggagggacacguuccccacuuagccu

SEQ ID NO: 60308 - RNA, 32 nt, Human
agucauggaguuaagaagugagucagagagga

SEQ ID NO: 60309 - RNA, 32 nt, Human
agucauggcugcaggccagggagaugccugac

SEQ ID NO: 60310 - RNA, 32 nt, Human
agucaugggaggcagagcugggggagcgaggc

SEQ ID NO: 60311 - RNA, 29 nt, Human
agucauggggacccuauuaggucucggug

SEQ ID NO: 60312 - RNA, 32 nt, Human
agucauggggaccugaaggcugacacccagcc

SEQ ID NO: 60313 - RNA, 32 nt, Human
agucaugggguuucaccgccuuccucacucca

SEQ ID NO: 60314 - RNA, 32 nt, Human
agucauggucucagcuuugacucaaaagucaa

SEQ ID NO: 60315 - RNA, 32 nt, Human
agucauggucucagcuuugacucuaaagucaa

SEQ ID NO: 60316 - RNA, 32 nt, Human
agucaugucugcuuacagguguuauuugucug

SEQ ID NO: 60317 - RNA, 32 nt, Human
agucauguuuuauguaccauguuuucacacgu

SEQ ID NO: 60318 - RNA, 32 nt, Human
agucauuauuaggguggguaugguggcucaca

SEQ ID NO: 60319 - RNA, 32 nt, Human
agucauuccaagacuccuguccucacucaggg

SEQ ID NO: 60320 - RNA, 32 nt, Human
agucauuccaucuuucacucaggaugaaugcg

SEQ ID NO: 60321 - RNA, 32 nt, Human
agucauucuaacuauaaaagugcaaugacuaa

SEQ ID NO: 60322 - RNA, 32 nt, Human
agucauucuccccucucucauccaccucaccc

SEQ ID NO: 60323 - RNA, 32 nt, Human
agucauucucucuuuaaccauauaauuuaaaa

SEQ ID NO: 60324 - RNA, 32 nt, Human
agucauugauuccugggugucuugcuugauuu

SEQ ID NO: 60325 - RNA, 32 nt, Human
agucauugccguggugcugcugguguuuggag

SEQ ID NO: 60326 - RNA, 22 nt, Human
agucauugcuggaucugaacca

SEQ ID NO: 60327 - RNA, 32 nt, Human
agucauuggacagguuucucuccagcaagaaa

SEQ ID NO: 60328 - RNA, 32 nt, Human
agucauuguuccuuaucagauccucugcguag

SEQ ID NO: 60329 - RNA, 32 nt, Human
agucauuuccccucucugagccucggugucuu

SEQ ID NO: 60330 - RNA, 32 nt, Human
agucauuuccuguucaccccuaacccagcccc

SEQ ID NO: 60331 - RNA, 32 nt, Human
agucauuugaccaagacacagaagaugaugaa

SEQ ID NO: 60332 - RNA, 32 nt, Human
agucauuuugccuauguuucuacaaugaagug

SEQ ID NO: 60333 - RNA, 32 nt, Human
aguccaaaagaaaaggaagaggaggaaaaaca

SEQ ID NO: 60334 - RNA, 32 nt, Human
aguccaaaaggagccagagcaagucagaauuu

SEQ ID NO: 60335 - RNA, 22 nt, Human
aguccaaacaauugggagacaa

SEQ ID NO: 60336 - RNA, 32 nt, Human
aguccaaacauguggggccuggugaggcuccu

SEQ ID NO: 60337 - RNA, 32 nt, Human
aguccaaaggacagugugucacugugaacugg

SEQ ID NO: 60338 - RNA, 32 nt, Human
aguccaacaucagccaaccacacacagccgug

SEQ ID NO: 60339 - RNA, 32 nt, Human
aguccaaccuauuuaaaaaccccaccauuugg

SEQ ID NO: 60340 - RNA, 32 nt, Human
aguccaagaucauggugccaucaggguugguu

SEQ ID NO: 60341 - RNA, 32 nt, Human
aguccaagcagagaagguaggaacccuccaua

SEQ ID NO: 60342 - RNA, 24 nt, Human
aguccaagccaacagcuggugcua

SEQ ID NO: 60343 - RNA, 32 nt, Human
aguccaagcuacucaagaggcugaggugggag

SEQ ID NO: 60344 - RNA, 32 nt, Human
aguccaagcuacucaggaggcugaggcagaag

SEQ ID NO: 60345 - RNA, 32 nt, Human
aguccaagcucaaagcuggagugcaauggcgc

SEQ ID NO: 60346 - RNA, 32 nt, Human
aguccaaggaauaucaaaaauucugguuguau

SEQ ID NO: 60347 - RNA, 32 nt, Human
aguccaaggcagauccucucucccagggaauc

SEQ ID NO: 60348 - RNA, 32 nt, Human
aguccaagguacuguguuauagcaucaggaac

SEQ ID NO: 60349 - RNA, 32 nt, Human
aguccaauaacaagaccaaguaagaauguuuc

SEQ ID NO: 60350 - RNA, 32 nt, Human
aguccacacugcaaguccagagagcagggaac

SEQ ID NO: 60351 - RNA, 32 nt, Human
aguccacagagccugggcugggcccgguggag

SEQ ID NO: 60352 - RNA, 32 nt, Human
aguccacaguuguggcuccuuccagggccugg

SEQ ID NO: 60353 - RNA, 31 nt, Human
aguccacaguuucaucauuugagucaagugg

SEQ ID NO: 60354 - RNA, 21 nt, Human
aguccacaucuggcuuucuca

SEQ ID NO: 60355 - RNA, 32 nt, Human
aguccaccugaaccacacacucuaaagaaaua

SEQ ID NO: 60356 - RNA, 32 nt, Human
aguccacgugaagagccacacacccauuuucc

SEQ ID NO: 60357 - RNA, 32 nt, Human
aguccacucauccugaucucauucagcagauc

SEQ ID NO: 60358 - RNA, 32 nt, Human
aguccacugcaaccucugcccucccggguuua

SEQ ID NO: 60359 - RNA, 32 nt, Human
aguccacugcagccuaggaggguguuucccag

SEQ ID NO: 60360 - RNA, 32 nt, Human
aguccacugcauucuuauaaguucuaaauuuu

SEQ ID NO: 60361 - RNA, 32 nt, Human
aguccacugggaucauucagcagagcagagga

SEQ ID NO: 60362 - RNA, 32 nt, Human
aguccacuggucuucuauuugggaaacaagga

SEQ ID NO: 60363 - RNA, 32 nt, Human
aguccacuugaagcuguggaagaugguucauc

SEQ ID NO: 60364 - RNA, 32 nt, Human
aguccagaaacauaugugagguuguuucccuc

SEQ ID NO: 60365 - RNA, 32 nt, Human
aguccagaaagaagaauggaaggaggguggcc

SEQ ID NO: 60366 - RNA, 32 nt, Human
aguccagaaaguggcaguugcagugaguggag

SEQ ID NO: 60367 - RNA, 32 nt, Human
aguccagaagucccugaaccccaaacuguucu

SEQ ID NO: 60368 - RNA, 32 nt, Human
aguccagaagucugaaagaaucuccucucagg

SEQ ID NO: 60369 - RNA, 32 nt, Human
aguccagaaguucaagguuacagugaacuacg

SEQ ID NO: 60370 - RNA, 32 nt, Human
aguccagaaguuugagaucagccugggcaaug

SEQ ID NO: 60371 - RNA, 32 nt, Human
aguccagacacaaagagacaaagcuuugaaga

SEQ ID NO: 60372 - RNA, 32 nt, Human
aguccagacagugcucggcgggugaggaaggg

SEQ ID NO: 60373 - RNA, 32 nt, Human
aguccagaccccaugagcucucagccagcucu

SEQ ID NO: 60374 - RNA, 32 nt, Human
aguccagacucuuggugucggcccagacugca

SEQ ID NO: 60375 - RNA, 32 nt, Human
aguccagacuuggcacauggcuagggauacug

SEQ ID NO: 60376 - RNA, 32 nt, Human
aguccagagagggacuuaaggggcaagucggg

SEQ ID NO: 60377 - RNA, 32 nt, Human
aguccagagcaucagaccuggccgccuccauc

SEQ ID NO: 60378 - RNA, 32 nt, Human
aguccagagcugauacagcugcuccaaucacc

SEQ ID NO: 60379 - RNA, 32 nt, Human
aguccagauccaggacugagaucccagaacca

SEQ ID NO: 60380 - RNA, 32 nt, Human
aguccagaugcugaaggaugggaagacccaag

SEQ ID NO: 60381 - RNA, 23 nt, Human
aguccagaugucguggcucaggg

SEQ ID NO: 60382 - RNA, 32 nt, Human
aguccagcaacaacgucugccuaagcaucagc

SEQ ID NO: 60383 - RNA, 32 nt, Human
aguccagcaaccugcacuccagccugggugac

SEQ ID NO: 60384 - RNA, 32 nt, Human
aguccagcagcagccuggcugccuugucaugg

SEQ ID NO: 60385 - RNA, 16 nt, Human
aguccagccauccccu

SEQ ID NO: 60386 - RNA, 22 nt, Human
aguccagcccaggcaacacagc

SEQ ID NO: 60387 - RNA, 32 nt, Human
aguccagccgcuggugcgcggagcgguucacc

SEQ ID NO: 60388 - RNA, 32 nt, Human
aguccagccugaccaacaugaagaaacccugu

SEQ ID NO: 60389 - RNA, 32 nt, Human
aguccagccuggaggugugcucugagggccuc

SEQ ID NO: 60390 - RNA, 21 nt, Human
aguccagccugggcaacaaga

SEQ ID NO: 60391 - RNA, 26 nt, Human
aguccagccugggugacagagugaga

SEQ ID NO: 60392 - RNA, 32 nt, Human
aguccaggaauuagagguugcagugagguaug

SEQ ID NO: 60393 - RNA, 32 nt, Human
aguccaggacauugucugucugccuuccggua

SEQ ID NO: 60394 - RNA, 32 nt, Human
aguccaggacccaggagagggaagaaucugag

SEQ ID NO: 60395 - RNA, 18 nt, Human
aguccaggacuccaggag

SEQ ID NO: 60396 - RNA, 32 nt, Human
aguccaggaggcagagguucuauuaauggaga

SEQ ID NO: 60397 - RNA, 32 nt, Human
aguccaggaggcggaggcugcagugagcugug

SEQ ID NO: 60398 - RNA, 32 nt, Human
aguccaggaggucgaggcugcagugagccaag

SEQ ID NO: 60399 - RNA, 32 nt, Human
aguccaggagguugaggcugcagugagcugug

SEQ ID NO: 60400 - RNA, 32 nt, Human
aguccaggaguucaaggcugcagugaguugug

SEQ ID NO: 60401 - RNA, 32 nt, Human
aguccaggaguucaagguggcagugagcuauu

SEQ ID NO: 60402 - RNA, 32 nt, Human
aguccaggaguuggaggcuacagugagccaug

SEQ ID NO: 60403 - RNA, 32 nt, Human
aguccaggaguuuugagaccagccugggcaac

SEQ ID NO: 60404 - RNA, 32 nt, Human
aguccaggauagccucaugagcauaggccuuc

SEQ ID NO: 60405 - RNA, 32 nt, Human
aguccaggcacugcagaggccuagaggcaacc

SEQ ID NO: 60406 - RNA, 32 nt, Human
aguccaggcccggcuggucaccagggauucaa

SEQ ID NO: 60407 - RNA, 32 nt, Human
aguccaggcggacgggguggaagguucagagc

SEQ ID NO: 60408 - RNA, 32 nt, Human
aguccaggcugagccccaggaggaguaggagu

SEQ ID NO: 60409 - RNA, 32 nt, Human
aguccaggcugaugcaguggcuucaagagcuc

SEQ ID NO: 60410 - RNA, 32 nt, Human
aguccaggcugcagccgagggagcugaguagg

SEQ ID NO: 60411 - RNA, 18 nt, Human
aguccaggcugcugugcc

SEQ ID NO: 60412 - RNA, 32 nt, Human
aguccagggagggccaaguccacccagcauca

SEQ ID NO: 60413 - RNA, 32 nt, Human
aguccagggucuuugcccucucccuuguggcu

SEQ ID NO: 60414 - RNA, 32 nt, Human
aguccagggugucgcaccagcccugggcugau

SEQ ID NO: 60415 - RNA, 32 nt, Human
aguccagguguucccuguguuugaggucaagg

SEQ ID NO: 60416 - RNA, 32 nt, Human
aguccaguaaagccuuaaguggcagaauauaa

SEQ ID NO: 60417 - RNA, 32 nt, Human
aguccaguccccuuaccccuguggaccucagu

SEQ ID NO: 60418 - RNA, 32 nt, Human
aguccagugaaaggcaaagggaaagugggucg

SEQ ID NO: 60419 - RNA, 32 nt, Human
aguccagugaagaggaagaagaggaggaugag

SEQ ID NO: 60420 - RNA, 32 nt, Human
aguccagugucacccgcccugguuuauuaaca

SEQ ID NO: 60421 - RNA, 32 nt, Human
aguccagugucaucugaaggggccauuucucc

SEQ ID NO: 60422 - RNA, 32 nt, Human
aguccaguuugaaggugcucucugccaguuca

SEQ ID NO: 60423 - RNA, 32 nt, Human
aguccaucagcaaguuacuuuugagcgccuac

SEQ ID NO: 60424 - RNA, 32 nt, Human
aguccaucaggacuugaaagaccugaguccau

SEQ ID NO: 60425 - RNA, 23 nt, Human
aguccaucaguuaccagcacauu

SEQ ID NO: 60426 - RNA, 32 nt, Human
aguccaucauguccuucggcagagacauggag

SEQ ID NO: 60427 - RNA, 32 nt, Human
aguccauccuuugaggaaggcagacuuggcgg

SEQ ID NO: 60428 - RNA, 32 nt, Human
aguccaucggguccugggccucagcuucccuu

SEQ ID NO: 60429 - RNA, 32 nt, Human
aguccaugaagggggugugagggggaggguau

SEQ ID NO: 60430 - RNA, 30 nt, Human
aguccaugagucagccaccccucugcaugc

SEQ ID NO: 60431 - RNA, 32 nt, Human
aguccaugauaucuaaggaguuggcaagcuua

SEQ ID NO: 60432 - RNA, 30 nt, Human
aguccaugcaguuaaagcuagagaauaugc

SEQ ID NO: 60433 - RNA, 32 nt, Human
aguccaugcugugagcuuccuaccucagccca

SEQ ID NO: 60434 - RNA, 32 nt, Human
aguccauggaagcauccaggagggaggcugua

SEQ ID NO: 60435 - RNA, 32 nt, Human
aguccauggagaauuugcucagcuggaccagu

SEQ ID NO: 60436 - RNA, 32 nt, Human
aguccauggugucgcugugugccuguaucauu

SEQ ID NO: 60437 - RNA, 32 nt, Human
aguccauguacaguguagaugcagacucaccg

SEQ ID NO: 60438 - RNA, 30 nt, Human
aguccaugugcagccaauuuucuuuuagag

SEQ ID NO: 60439 - RNA, 32 nt, Human
aguccauguucaggaaauggcugaagcucgua

SEQ ID NO: 60440 - RNA, 32 nt, Human
aguccauguucaggaaauggcugaaguucgua

SEQ ID NO: 60441 - RNA, 32 nt, Human
aguccauuauuuccucuggcuuccucaaauuc

SEQ ID NO: 60442 - RNA, 32 nt, Human
aguccauuccaucaugaugcugugcccgcuau

SEQ ID NO: 60443 - RNA, 32 nt, Human
aguccauucccgaggggauaagaaggagacca

SEQ ID NO: 60444 - RNA, 32 nt, Human
agucccaaagugccaugagagaagcucucagg

SEQ ID NO: 60445 - RNA, 31 nt, Human
agucccaacgucugccucacagcagauucuu

SEQ ID NO: 60446 - RNA, 32 nt, Human
agucccaacuacucggaaggcugaggcaggag

SEQ ID NO: 60447 - RNA, 32 nt, Human
agucccaacuacucgggaggcugaagcaggag

SEQ ID NO: 60448 - RNA, 32 nt, Human
agucccaacuacucgggaggcugaggcgggag

SEQ ID NO: 60449 - RNA, 32 nt, Human
agucccaacuacucggguaucugaggugggag

SEQ ID NO: 60450 - RNA, 20 nt, Human
agucccaagcucuaucauua

SEQ ID NO: 60451 - RNA, 32 nt, Human
agucccaaguacagcugucccuuuguauccuu

SEQ ID NO: 60452 - RNA, 32 nt, Human
agucccaauuacucgggaggcugcagcaggag

SEQ ID NO: 60453 - RNA, 32 nt, Human
agucccacaccuccaccaccagcccagcacuc

SEQ ID NO: 60454 - RNA, 20 nt, Human
agucccacaguugcacugcc

SEQ ID NO: 60455 - RNA, 32 nt, Human
agucccacauggcuggugaggccucacaauca

SEQ ID NO: 60456 - RNA, 32 nt, Human
agucccacccagcaccauaaagaaaggcaaau

SEQ ID NO: 60457 - RNA, 32 nt, Human
agucccacccgcuccaggagagauuggcagcu

SEQ ID NO: 60458 - RNA, 32 nt, Human
agucccaccuacucgggaagcugaggcaauag

SEQ ID NO: 60459 - RNA, 32 nt, Human
agucccaccuggaggaggagguuggaggguug

SEQ ID NO: 60460 - RNA, 32 nt, Human
agucccaccugugcugugacagucccacgugg

SEQ ID NO: 60461 - RNA, 32 nt, Human
agucccacggaggaggggcagagccaggaggc

SEQ ID NO: 60462 - RNA, 32 nt, Human
agucccacucacuggccuuccuuucaauaaag

SEQ ID NO: 60463 - RNA, 16 nt, Human
agucccacuguccccu

SEQ ID NO: 60464 - RNA, 32 nt, Human
agucccacuuccccaucuccccaaguaggugg

SEQ ID NO: 60465 - RNA, 32 nt, Human
agucccagaagcuuccuggucucaugaaccua

SEQ ID NO: 60466 - RNA, 32 nt, Human
agucccagaaguaaacccucacugugaaucag

SEQ ID NO: 60467 - RNA, 32 nt, Human
agucccagagcaccucaccucccgaagccacc

SEQ ID NO: 60468 - RNA, 32 nt, Human
agucccagauacucgggaggcuaaggcaggag

SEQ ID NO: 60469 - RNA, 32 nt, Human
agucccagauacucgggaggcugaggcaggag

SEQ ID NO: 60470 - RNA, 32 nt, Human
agucccagauacuugggaggccaaggcaggag

SEQ ID NO: 60471 - RNA, 32 nt, Human
agucccagaucuugcucugccuugggguucaa

SEQ ID NO: 60472 - RNA, 32 nt, Human
agucccagcaacucgggaggcugaggcaggag

SEQ ID NO: 60473 - RNA, 32 nt, Human
agucccagcaccugugucaguaaagaaagugg

SEQ ID NO: 60474 - RNA, 32 nt, Human
agucccagcacuuugggagacugaggcaggcg

SEQ ID NO: 60475 - RNA, 20 nt, Human
agucccagcaggaacuguga

SEQ ID NO: 60476 - RNA, 32 nt, Human
agucccagccacucgggaggcugagacaggag

SEQ ID NO: 60477 - RNA, 22 nt, Human
agucccagcccaggcagggaga

SEQ ID NO: 60478 - RNA, 32 nt, Human
agucccagcccauccuggagcugucggaagcc

SEQ ID NO: 60479 - RNA, 32 nt, Human
agucccagccucagaacccaggauaggaaaug

SEQ ID NO: 60480 - RNA, 32 nt, Human
agucccagccucccccggaacccucuaccaau

SEQ ID NO: 60481 - RNA, 32 nt, Human
agucccagccucuccccucuacaacuccugcc

SEQ ID NO: 60482 - RNA, 32 nt, Human
agucccagccugccggccgguacucaccgcua

SEQ ID NO: 60483 - RNA, 32 nt, Human
agucccagcuacuaggaaggcugaggcaggag

SEQ ID NO: 60484 - RNA, 32 nt, Human
agucccagcuacuagggaggcaggaggaucac

SEQ ID NO: 60485 - RNA, 32 nt, Human
agucccagcuacuagggaggcugagccaggag

SEQ ID NO: 60486 - RNA, 32 nt, Human
agucccagcuacuagggaggcugaggcaggag

SEQ ID NO: 60487 - RNA, 32 nt, Human
agucccagcuacuauggagguugaggugggag

SEQ ID NO: 60488 - RNA, 32 nt, Human
agucccagcuacucaagaggcugaggcagaag

SEQ ID NO: 60489 - RNA, 32 nt, Human
agucccagcuacucaagaggcugaggcaggag

SEQ ID NO: 60490 - RNA, 32 nt, Human
agucccagcuacucaaguggcuaaggugagag

SEQ ID NO: 60491 - RNA, 32 nt, Human
agucccagcuacucagaagccugaggcuggga

SEQ ID NO: 60492 - RNA, 32 nt, Human
agucccagcuacucagaaggaugaggugggag

SEQ ID NO: 60493 - RNA, 32 nt, Human
agucccagcuacucagaaggccgaggcaggag

SEQ ID NO: 60494 - RNA, 32 nt, Human
agucccagcuacucagaagggugaggcagaau

SEQ ID NO: 60495 - RNA, 32 nt, Human
agucccagcuacucaggaagcugaggugagag

SEQ ID NO: 60496 - RNA, 32 nt, Human
agucccagcuacucaggagacugaggcgggag

SEQ ID NO: 60497 - RNA, 32 nt, Human
agucccagcuacucaggagacugaggcuagaa

SEQ ID NO: 60498 - RNA, 32 nt, Human
agucccagcuacucaggaggccaaggugggau

SEQ ID NO: 60499 - RNA, 32 nt, Human
agucccagcuacucaggaggccgaggcaggag

SEQ ID NO: 60500 - RNA, 32 nt, Human
agucccagcuacucaggaggcuaaagcggcag

SEQ ID NO: 60501 - RNA, 32 nt, Human
agucccagcuacucaggaggcuaagcaaaagg

SEQ ID NO: 60502 - RNA, 32 nt, Human
agucccagcuacucaggaggcuaaggcaggag

SEQ ID NO: 60503 - RNA, 32 nt, Human
agucccagcuacucaggaggcuagagcaggag

SEQ ID NO: 60504 - RNA, 32 nt, Human
agucccagcuacucaggaggcucagcagcagg

SEQ ID NO: 60505 - RNA, 32 nt, Human
agucccagcuacucaggaggcugaagcaggag

SEQ ID NO: 60506 - RNA, 32 nt, Human
agucccagcuacucaggaggcugaagcaggau

SEQ ID NO: 60507 - RNA, 32 nt, Human
agucccagcuacucaggaggcugagacaggag

SEQ ID NO: 60508 - RNA, 32 nt, Human
agucccagcuacucaggaggcugaggaagauc

SEQ ID NO: 60509 - RNA, 32 nt, Human
agucccagcuacucaggaggcugaggcaagag

SEQ ID NO: 60510 - RNA, 32 nt, Human
agucccagcuacucaggaggcugaggcaagcu

SEQ ID NO: 60511 - RNA, 32 nt, Human
agucccagcuacucaggaggcugaggcagaag

SEQ ID NO: 60512 - RNA, 32 nt, Human
agucccagcuacucaggaggcugaggcaggag

SEQ ID NO: 60513 - RNA, 32 nt, Human
agucccagcuacucaggaggcugaggcgggag

SEQ ID NO: 60514 - RNA, 32 nt, Human
agucccagcuacucaggaggcugaggcuagaa

SEQ ID NO: 60515 - RNA, 32 nt, Human
agucccagcuacucaggaggcugagguaggag

SEQ ID NO: 60516 - RNA, 32 nt, Human
agucccagcuacucaggaggcugagguaggau

SEQ ID NO: 60517 - RNA, 32 nt, Human
agucccagcuacucaggaggcugagguggaag

SEQ ID NO: 60518 - RNA, 32 nt, Human
agucccagcuacucaggaggcugaggugggaa

SEQ ID NO: 60519 - RNA, 32 nt, Human
agucccagcuacucaggaggcugaggugggac

SEQ ID NO: 60520 - RNA, 32 nt, Human
agucccagcuacucaggaggcugaggugggag

SEQ ID NO: 60521 - RNA, 32 nt, Human
agucccagcuacucaggaggcugggcaggaga

SEQ ID NO: 60522 - RNA, 32 nt, Human
agucccagcuacucaggaggcuggggaaggaa

SEQ ID NO: 60523 - RNA, 32 nt, Human
agucccagcuacucaggaggcuggggcaggag

SEQ ID NO: 60524 - RNA, 32 nt, Human
agucccagcuacucaggaggcuguggugggag

SEQ ID NO: 60525 - RNA, 32 nt, Human
agucccagcuacucaggaggcuuagguaggag

SEQ ID NO: 60526 - RNA, 32 nt, Human
agucccagcuacucaggaggcuugggugggag

SEQ ID NO: 60527 - RNA, 32 nt, Human
agucccagcuacucaggagguugaagugggag

SEQ ID NO: 60528 - RNA, 32 nt, Human
agucccagcuacucaggagguugaggcagaag

SEQ ID NO: 60529 - RNA, 32 nt, Human
agucccagcuacucaggagguugagguaggag

SEQ ID NO: 60530 - RNA, 32 nt, Human
agucccagcuacucaggagguugaggugggaa

SEQ ID NO: 60531 - RNA, 32 nt, Human
agucccagcuacucaggagucugagcugggag

SEQ ID NO: 60532 - RNA, 32 nt, Human
agucccagcuacucaggaguugaggcggaagg

SEQ ID NO: 60533 - RNA, 32 nt, Human
agucccagcuacucaggaugcugaagcagaag

SEQ ID NO: 60534 - RNA, 32 nt, Human
agucccagcuacucaggauucugaggcaggag

SEQ ID NO: 60535 - RNA, 32 nt, Human
agucccagcuacucaggcugaggcaggagaau

SEQ ID NO: 60536 - RNA, 32 nt, Human
agucccagcuacucagggcugaggcaggagaa

SEQ ID NO: 60537 - RNA, 32 nt, Human
agucccagcuacucagggggcugaggcgggag

SEQ ID NO: 60538 - RNA, 32 nt, Human
agucccagcuacucaugaggcuuaaauggagg

SEQ ID NO: 60539 - RNA, 32 nt, Human
agucccagcuacuccagagauugaggcaugag

SEQ ID NO: 60540 - RNA, 32 nt, Human
agucccagcuacuccagaggcugagauggauc

SEQ ID NO: 60541 - RNA, 32 nt, Human
agucccagcuacuccagaggucgaggcaggag

SEQ ID NO: 60542 - RNA, 32 nt, Human
agucccagcuacuccagaugcugaggcaggag

SEQ ID NO: 60543 - RNA, 32 nt, Human
agucccagcuacuccggacacugaugugagag

SEQ ID NO: 60544 - RNA, 32 nt, Human
agucccagcuacuccggaggcugaggcaggag

SEQ ID NO: 60545 - RNA, 32 nt, Human
agucccagcuacuccggaggcugagggaggag

SEQ ID NO: 60546 - RNA, 32 nt, Human
agucccagcuacuccugaggcugaggugggag

SEQ ID NO: 60547 - RNA, 32 nt, Human
agucccagcuacucgaaaggcugaggcgggag

SEQ ID NO: 60548 - RNA, 32 nt, Human
agucccagcuacucgagagccugaggcaggag

SEQ ID NO: 60549 - RNA, 32 nt, Human
agucccagcuacucgagaggcuaaggcaggaa

SEQ ID NO: 60550 - RNA, 32 nt, Human
agucccagcuacucgagaggcugaggcaggag

SEQ ID NO: 60551 - RNA, 32 nt, Human
agucccagcuacucgagaggcugaggcuggag

SEQ ID NO: 60552 - RNA, 32 nt, Human
agucccagcuacucgcgagacugaggcaggag

SEQ ID NO: 60553 - RNA, 32 nt, Human
agucccagcuacucggaaggcuaaggcaggag

SEQ ID NO: 60554 - RNA, 32 nt, Human
agucccagcuacucggaaggcugaagcaggag

SEQ ID NO: 60555 - RNA, 32 nt, Human
agucccagcuacucggaggcugaggcaguaga

SEQ ID NO: 60556 - RNA, 32 nt, Human
agucccagcuacucggcaggcugaggugggag

SEQ ID NO: 60557 - RNA, 32 nt, Human
agucccagcuacucggcaggcugcagcaggaa

SEQ ID NO: 60558 - RNA, 32 nt, Human
agucccagcuacucgggaagcuaaggugggag

SEQ ID NO: 60559 - RNA, 32 nt, Human
agucccagcuacucgggaagcugaggcaagag

SEQ ID NO: 60560 - RNA, 32 nt, Human
agucccagcuacucgggaagcugaggcagaag

SEQ ID NO: 60561 - RNA, 32 nt, Human
agucccagcuacucgggaagcugaggugggag

SEQ ID NO: 60562 - RNA, 32 nt, Human
agucccagcuacucgggagacugaggcaggag

SEQ ID NO: 60563 - RNA, 32 nt, Human
agucccagcuacucgggagcccaacgcacgag

SEQ ID NO: 60564 - RNA, 32 nt, Human
agucccagcuacucgggagccugaggcaggag

SEQ ID NO: 60565 - RNA, 32 nt, Human
agucccagcuacucgggaggccgaggcagaag

SEQ ID NO: 60566 - RNA, 32 nt, Human
agucccagcuacucgggaggcuaaggcaggag

SEQ ID NO: 60567 - RNA, 32 nt, Human
agucccagcuacucgggaggcugaagcagaag

SEQ ID NO: 60568 - RNA, 32 nt, Human
agucccagcuacucgggaggcugaagcaggag

SEQ ID NO: 60569 - RNA, 32 nt, Human
agucccagcuacucgggaggcugaagcgggag

SEQ ID NO: 60570 - RNA, 32 nt, Human
agucccagcuacucgggaggcugagacagaag

SEQ ID NO: 60571 - RNA, 32 nt, Human
agucccagcuacucgggaggcugagacaggag

SEQ ID NO: 60572 - RNA, 32 nt, Human
agucccagcuacucgggaggcugagcuucgag

SEQ ID NO: 60573 - RNA, 32 nt, Human
agucccagcuacucgggaggcugaggaaggag

SEQ ID NO: 60574 - RNA, 32 nt, Human
agucccagcuacucgggaggcugaggcaagag

SEQ ID NO: 60575 - RNA, 32 nt, Human
agucccagcuacucgggaggcugaggcacaag

SEQ ID NO: 60576 - RNA, 32 nt, Human
agucccagcuacucgggaggcugaggcacgag

SEQ ID NO: 60577 - RNA, 32 nt, Human
agucccagcuacucgggaggcugaggcagaag

SEQ ID NO: 60578 - RNA, 32 nt, Human
agucccagcuacucgggaggcugaggcaggaa

SEQ ID NO: 60579 - RNA, 32 nt, Human
agucccagcuacucgggaggcugaggcaggag

SEQ ID NO: 60580 - RNA, 32 nt, Human
agucccagcuacucgggaggcugaggcaggau

SEQ ID NO: 60581 - RNA, 32 nt, Human
agucccagcuacucgggaggcugaggcagggg

SEQ ID NO: 60582 - RNA, 32 nt, Human
agucccagcuacucgggaggcugaggcaugag

SEQ ID NO: 60583 - RNA, 32 nt, Human
agucccagcuacucgggaggcugaggccguag

SEQ ID NO: 60584 - RNA, 32 nt, Human
agucccagcuacucgggaggcugaggcgggag

SEQ ID NO: 60585 - RNA, 32 nt, Human
agucccagcuacucgggaggcugaggcuggag

SEQ ID NO: 60586 - RNA, 32 nt, Human
agucccagcuacucgggaggcugagguaggag

SEQ ID NO: 60587 - RNA, 32 nt, Human
agucccagcuacucgggaggcugaggugggag

SEQ ID NO: 60588 - RNA, 32 nt, Human
agucccagcuacucgggaggcugaugcagaag

SEQ ID NO: 60589 - RNA, 32 nt, Human
agucccagcuacucgggaggcuggggcaggag

SEQ ID NO: 60590 - RNA, 32 nt, Human
agucccagcuacucgggagguugaggcaggag

SEQ ID NO: 60591 - RNA, 32 nt, Human
agucccagcuacucgggagucugaaacaggag

SEQ ID NO: 60592 - RNA, 32 nt, Human
agucccagcuacucggggcgcugaggcaggag

SEQ ID NO: 60593 - RNA, 32 nt, Human
agucccagcuacucuagaggcugaggugggag

SEQ ID NO: 60594 - RNA, 32 nt, Human
agucccagcuacucuauagccugaggugggag

SEQ ID NO: 60595 - RNA, 32 nt, Human
agucccagcuacucugaagacugaggcaggag

SEQ ID NO: 60596 - RNA, 32 nt, Human
agucccagcuacucuggaggcugaaaugggag

SEQ ID NO: 60597 - RNA, 32 nt, Human
agucccagcuacucuggaggcugaagcaggag

SEQ ID NO: 60598 - RNA, 32 nt, Human
agucccagcuacucuggaggcugaaguuggag

SEQ ID NO: 60599 - RNA, 32 nt, Human
agucccagcuacucuggaggcugagacaggag

SEQ ID NO: 60600 - RNA, 32 nt, Human
agucccagcuacucuggaggcugaggcaggaa

SEQ ID NO: 60601 - RNA, 32 nt, Human
agucccagcuacucuggaggcugaggcaggag

SEQ ID NO: 60602 - RNA, 32 nt, Human
agucccagcuacucuggaggcugaggcgggag

SEQ ID NO: 60603 - RNA, 32 nt, Human
agucccagcuacucuggaggcugaggugaggg

SEQ ID NO: 60604 - RNA, 32 nt, Human
agucccagcuacucuggagucugaggcgagag

SEQ ID NO: 60605 - RNA, 32 nt, Human
agucccagcuacucuugaaggcugagcuggga

SEQ ID NO: 60606 - RNA, 32 nt, Human
agucccagcuacuggcgaggcugaggcuggag

SEQ ID NO: 60607 - RNA, 32 nt, Human
agucccagcuacuggggaggcugaggcagcau

SEQ ID NO: 60608 - RNA, 32 nt, Human
agucccagcuacuggggaggcugaggcaggaa

SEQ ID NO: 60609 - RNA, 32 nt, Human
agucccagcuacuggggaggcugaggcaggag

SEQ ID NO: 60610 - RNA, 32 nt, Human
agucccagcuacuggggaggcugaggcagggg

SEQ ID NO: 60611 - RNA, 32 nt, Human
agucccagcuacugguaggccgaggcaggaga

SEQ ID NO: 60612 - RNA, 32 nt, Human
agucccagcuacuuaggaggcugagaugggag

SEQ ID NO: 60613 - RNA, 32 nt, Human
agucccagcuacuuaggaggcugaggcaugag

SEQ ID NO: 60614 - RNA, 32 nt, Human
agucccagcuacuuaggaggcugaggggcaag

SEQ ID NO: 60615 - RNA, 32 nt, Human
agucccagcuacuuaggaggcugagguaggag

SEQ ID NO: 60616 - RNA, 32 nt, Human
agucccagcuacuuaggaggcugaggugggag

SEQ ID NO: 60617 - RNA, 32 nt, Human
agucccagcuacuucggggacugaggugggag

SEQ ID NO: 60618 - RNA, 32 nt, Human
agucccagcuacuugagaggcugagccgggaa

SEQ ID NO: 60619 - RNA, 32 nt, Human
agucccagcuacuugagaggcugaggcaagaa

SEQ ID NO: 60620 - RNA, 32 nt, Human
agucccagcuacuugagaggcugaggcaagag

SEQ ID NO: 60621 - RNA, 32 nt, Human
agucccagcuacuugagaggcugaggcuggag

SEQ ID NO: 60622 - RNA, 32 nt, Human
agucccagcuacuugaguggccgaggcaggag

SEQ ID NO: 60623 - RNA, 32 nt, Human
agucccagcuacuuggaagcugaggugggagg

SEQ ID NO: 60624 - RNA, 32 nt, Human
agucccagcuacuuggaaggcugagacaggag

SEQ ID NO: 60625 - RNA, 32 nt, Human
agucccagcuacuuggaggcugaggcgugaga

SEQ ID NO: 60626 - RNA, 32 nt, Human
agucccagcuacuuggagggcagaggugggag

SEQ ID NO: 60627 - RNA, 32 nt, Human
agucccagcuacuuggcaggcugaggcagaag

SEQ ID NO: 60628 - RNA, 32 nt, Human
agucccagcuacuuggcaggcugaggcaggag

SEQ ID NO: 60629 - RNA, 18 nt, Human
agucccagcuacuuggga

SEQ ID NO: 60630 - RNA, 32 nt, Human
agucccagcuacuugggaagcagaggcuggag

SEQ ID NO: 60631 - RNA, 32 nt, Human
agucccagcuacuugggaagcugaagugggag

SEQ ID NO: 60632 - RNA, 32 nt, Human
agucccagcuacuugggaagcugaggaaggag

SEQ ID NO: 60633 - RNA, 32 nt, Human
agucccagcuacuugggaagcugaggcaggag

SEQ ID NO: 60634 - RNA, 32 nt, Human
agucccagcuacuugggaagcugaggugggaa

SEQ ID NO: 60635 - RNA, 32 nt, Human
agucccagcuacuugggacaccgaggcaggag

SEQ ID NO: 60636 - RNA, 32 nt, Human
agucccagcuacuugggagacugagguggggg

SEQ ID NO: 60637 - RNA, 32 nt, Human
agucccagcuacuugggaggaugaggcaggag

SEQ ID NO: 60638 - RNA, 32 nt, Human
agucccagcuacuugggaggcagaggcaggag

SEQ ID NO: 60639 - RNA, 32 nt, Human
agucccagcuacuugggaggcagaggugggaa

SEQ ID NO: 60640 - RNA, 32 nt, Human
agucccagcuacuugggaggccaaggcacgag

SEQ ID NO: 60641 - RNA, 32 nt, Human
agucccagcuacuugggaggccaaggcaggag

SEQ ID NO: 60642 - RNA, 32 nt, Human
agucccagcuacuugggaggccgaggcacgag

SEQ ID NO: 60643 - RNA, 32 nt, Human
agucccagcuacuugggaggccgaggcaggag

SEQ ID NO: 60644 - RNA, 32 nt, Human
agucccagcuacuugggaggccuaggcaggag

SEQ ID NO: 60645 - RNA, 32 nt, Human
agucccagcuacuugggaggcuaagcccaguu

SEQ ID NO: 60646 - RNA, 32 nt, Human
agucccagcuacuugggaggcuaaggcaggag

SEQ ID NO: 60647 - RNA, 32 nt, Human
agucccagcuacuugggaggcugaagcaggag

SEQ ID NO: 60648 - RNA, 32 nt, Human
agucccagcuacuugggaggcugaagugggag

SEQ ID NO: 60649 - RNA, 32 nt, Human
agucccagcuacuugggaggcugagacaggag

SEQ ID NO: 60650 - RNA, 32 nt, Human
agucccagcuacuugggaggcugagagaggag

SEQ ID NO: 60651 - RNA, 32 nt, Human
agucccagcuacuugggaggcugagaugggag

SEQ ID NO: 60652 - RNA, 32 nt, Human
agucccagcuacuugggaggcugagcccugga

SEQ ID NO: 60653 - RNA, 32 nt, Human
agucccagcuacuugggaggcugaggcaagag

SEQ ID NO: 60654 - RNA, 32 nt, Human
agucccagcuacuugggaggcugaggcacaag

SEQ ID NO: 60655 - RNA, 32 nt, Human
agucccagcuacuugggaggcugaggcagaag

SEQ ID NO: 60656 - RNA, 32 nt, Human
agucccagcuacuugggaggcugaggcagaau

SEQ ID NO: 60657 - RNA, 32 nt, Human
agucccagcuacuugggaggcugaggcaggag

SEQ ID NO: 60658 - RNA, 32 nt, Human
agucccagcuacuugggaggcugaggcagggg

SEQ ID NO: 60659 - RNA, 32 nt, Human
agucccagcuacuugggaggcugagggcagga

SEQ ID NO: 60660 - RNA, 32 nt, Human
agucccagcuacuugggaggcugagguaggag

SEQ ID NO: 60661 - RNA, 32 nt, Human
agucccagcuacuugggaggcugaggucagag

SEQ ID NO: 60662 - RNA, 32 nt, Human
agucccagcuacuugggaggcugagguggaag

SEQ ID NO: 60663 - RNA, 32 nt, Human
agucccagcuacuugggaggcugagguggagg

SEQ ID NO: 60664 - RNA, 32 nt, Human
agucccagcuacuugggaggcugaggugggaa

SEQ ID NO: 60665 - RNA, 32 nt, Human
agucccagcuacuugggaggcugaggugggag

SEQ ID NO: 60666 - RNA, 32 nt, Human
agucccagcuacuugggaggcugagguggggg

SEQ ID NO: 60667 - RNA, 32 nt, Human
agucccagcuacuugggaggcugaguccggag

SEQ ID NO: 60668 - RNA, 32 nt, Human
agucccagcuacuugggaggcugaugcaugag

SEQ ID NO: 60669 - RNA, 32 nt, Human
agucccagcuacuugggaggcugcagcugugg

SEQ ID NO: 60670 - RNA, 32 nt, Human
agucccagcuacuugggaggcuggggaaggag

SEQ ID NO: 60671 - RNA, 32 nt, Human
agucccagcuacuugggaggcuggggcaugag

SEQ ID NO: 60672 - RNA, 32 nt, Human
agucccagcuacuugggaggcuuagucaggag

SEQ ID NO: 60673 - RNA, 32 nt, Human
agucccagcuacuugggagggcugaagccagg

SEQ ID NO: 60674 - RNA, 32 nt, Human
agucccagcuacuugggagguggaggugggag

SEQ ID NO: 60675 - RNA, 32 nt, Human
agucccagcuacuugggagguugaggcuggaa

SEQ ID NO: 60676 - RNA, 32 nt, Human
agucccagcuacuugggagguugagguaggag

SEQ ID NO: 60677 - RNA, 32 nt, Human
agucccagcuacuugggaugccgaggcaggaa

SEQ ID NO: 60678 - RNA, 32 nt, Human
agucccagcuacuugggggccugaggcacgag

SEQ ID NO: 60679 - RNA, 32 nt, Human
agucccagcuacuuggggugcugaggcgggag

SEQ ID NO: 60680 - RNA, 32 nt, Human
agucccagcuacuugguaggcugaggcaggag

SEQ ID NO: 60681 - RNA, 32 nt, Human
agucccagcuacuugugaggcugagggaggag

SEQ ID NO: 60682 - RNA, 32 nt, Human
agucccagcuacuugugaggcugaggugggag

SEQ ID NO: 60683 - RNA, 32 nt, Human
agucccagcuacuuuggaggcugaagcggaag

SEQ ID NO: 60684 - RNA, 32 nt, Human
agucccagcuacuuuggaggcugaggcaggag

SEQ ID NO: 60685 - RNA, 32 nt, Human
agucccagcuagucaagaggcugaggccagag

SEQ ID NO: 60686 - RNA, 32 nt, Human
agucccagcuagucgggaggcugaggcaggag

SEQ ID NO: 60687 - RNA, 32 nt, Human
agucccagcuauuccagggggcugaggcagga

SEQ ID NO: 60688 - RNA, 20 nt, Human
agucccagcuccacacugcc

SEQ ID NO: 60689 - RNA, 32 nt, Human
agucccagcugcucgggaggcugaggcaggag

SEQ ID NO: 60690 - RNA, 32 nt, Human
agucccagcugcucgggaggcugaggcagggg

SEQ ID NO: 60691 - RNA, 32 nt, Human
agucccagcugcucgggagggugaggcaggag

SEQ ID NO: 60692 - RNA, 32 nt, Human
agucccagcugcucggggaggcugagguagga

SEQ ID NO: 60693 - RNA, 22 nt, Human
agucccagcuggagaguccagg

SEQ ID NO: 60694 - RNA, 32 nt, Human
agucccagcuucucgggaggcugaggcaggag

SEQ ID NO: 60695 - RNA, 18 nt, Human
agucccagcuuucucugg

SEQ ID NO: 60696 - RNA, 32 nt, Human
agucccaggaggauggggaccaggaaggcugu

SEQ ID NO: 60697 - RNA, 32 nt, Human
agucccagggaccugggcaggcccaagcccac

SEQ ID NO: 60698 - RNA, 32 nt, Human
agucccagguacucgggaggcugaggcaggag

SEQ ID NO: 60699 - RNA, 19 nt, Human
agucccaguagcaaccgcc

SEQ ID NO: 60700 - RNA, 32 nt, Human
agucccaguccaaacucugauuuacaucacuu

SEQ ID NO: 60701 - RNA, 32 nt, Human
agucccaguuacucaguagacugagcucuuuu

SEQ ID NO: 60702 - RNA, 32 nt, Human
agucccaguuacucgggaggcugaggcacgag

SEQ ID NO: 60703 - RNA, 32 nt, Human
agucccaguuacucgggaggcugaggcaggag

SEQ ID NO: 60704 - RNA, 32 nt, Human
agucccaguuacucggguggcugaggcaggag

SEQ ID NO: 60705 - RNA, 32 nt, Human
agucccaguuccagggggaggccugcaggccc

SEQ ID NO: 60706 - RNA, 32 nt, Human
agucccauaccagacucacggucuccauuauu

SEQ ID NO: 60707 - RNA, 32 nt, Human
agucccauauucccucaaauuugggaaucacg

SEQ ID NO: 60708 - RNA, 32 nt, Human
agucccauccacugcaccacuacucccaagcc

SEQ ID NO: 60709 - RNA, 32 nt, Human
agucccaucugacuccccaugaggcuccuggc

SEQ ID NO: 60710 - RNA, 32 nt, Human
agucccaugaagugggcaccauugcuauugcc

SEQ ID NO: 60711 - RNA, 32 nt, Human
agucccaugaucaccccagccugugagaggca

SEQ ID NO: 60712 - RNA, 32 nt, Human
agucccaugaucgccccagccugugagcggca

SEQ ID NO: 60713 - RNA, 32 nt, Human
agucccaugauuaccccagccugugagcggca

SEQ ID NO: 60714 - RNA, 32 nt, Human
agucccaugauuaccccagccugugaguggca

SEQ ID NO: 60715 - RNA, 32 nt, Human
agucccaugccacccguccccuugugaccucc

SEQ ID NO: 60716 - RNA, 32 nt, Human
agucccauggggaaugucaacaggcaggggca

SEQ ID NO: 60717 - RNA, 32 nt, Human
aguccccaaaaacagguggaagagggaagggu

SEQ ID NO: 60718 - RNA, 32 nt, Human
aguccccaacacagugacucugaccuggaacc

SEQ ID NO: 60719 - RNA, 32 nt, Human
aguccccacaccuuggcagcucagggucccca

SEQ ID NO: 60720 - RNA, 32 nt, Human
aguccccacacuggaaaacugggaaauggcca

SEQ ID NO: 60721 - RNA, 31 nt, Human
aguccccacagcuagaaagugccagagucgu

SEQ ID NO: 60722 - RNA, 32 nt, Human
aguccccacagcuggaucagacaacuuuuggu

SEQ ID NO: 60723 - RNA, 32 nt, Human
aguccccacauacucagucaguuaucaaagua

SEQ ID NO: 60724 - RNA, 32 nt, Human
aguccccaccacagugaccacacccucacugg

SEQ ID NO: 60725 - RNA, 21 nt, Human
aguccccaccucuuccugccc

SEQ ID NO: 60726 - RNA, 32 nt, Human
aguccccacucacggugacaccaccuuccuga

SEQ ID NO: 60727 - RNA, 32 nt, Human
aguccccacugcacccccuccagaggcgacuu

SEQ ID NO: 60728 - RNA, 32 nt, Human
aguccccagaaugcugcgcuucuccuacaagg

SEQ ID NO: 60729 - RNA, 32 nt, Human
aguccccagagcaggccguacccugcuguagu

SEQ ID NO: 60730 - RNA, 32 nt, Human
aguccccaggagaggggagcuguguagugagg

SEQ ID NO: 60731 - RNA, 32 nt, Human
aguccccaggcaggaagcggguuuguuuugga

SEQ ID NO: 60732 - RNA, 32 nt, Human
aguccccagggugggggugccaggagcccuug

SEQ ID NO: 60733 - RNA, 32 nt, Human
aguccccaguucacccuccaucccucaccuuc

SEQ ID NO: 60734 - RNA, 32 nt, Human
aguccccaucuucacucuacccuucaggaccc

SEQ ID NO: 60735 - RNA, 32 nt, Human
agucccccaaaguggugggauuacagguggga

SEQ ID NO: 60736 - RNA, 22 nt, Human
agucccccaauuauuuuucuaa

SEQ ID NO: 60737 - RNA, 32 nt, Human
agucccccgaguagcugggauuacagaugccc

SEQ ID NO: 60738 - RNA, 32 nt, Human
agucccccgauuagcuggaauuacaggugccu

SEQ ID NO: 60739 - RNA, 32 nt, Human
agucccccucacaaaccaccccacagauccaa

SEQ ID NO: 60740 - RNA, 32 nt, Human
agucccccucagacuucaugucucugcucauc

SEQ ID NO: 60741 - RNA, 32 nt, Human
agucccccuccaccaccaccgccuccuacccu

SEQ ID NO: 60742 - RNA, 32 nt, Human
agucccccugagcuccagggcccagcccuacc

SEQ ID NO: 60743 - RNA, 32 nt, Human
agucccccugccagaauggaggccagugcaug

SEQ ID NO: 60744 - RNA, 21 nt, Human
aguccccggagcugcggucuc

SEQ ID NO: 60745 - RNA, 31 nt, Human
aguccccggcgcucugagguuggagagaaag

SEQ ID NO: 60746 - RNA, 22 nt, Human
aguccccgugaaggagagcccu

SEQ ID NO: 60747 - RNA, 32 nt, Human
aguccccuacucccucuucacuguggccacag

SEQ ID NO: 60748 - RNA, 32 nt, Human
aguccccucauuagacuguagcauuaggaugu

SEQ ID NO: 60749 - RNA, 32 nt, Human
aguccccucccgcuucugcagaaugcaugcuc

SEQ ID NO: 60750 - RNA, 24 nt, Human
aguccccugaguccucccaaguga

SEQ ID NO: 60751 - RNA, 32 nt, Human
aguccccugccugugcuccugcuggggaaggc

SEQ ID NO: 60752 - RNA, 32 nt, Human
aguccccugcugucugucugugggagucggac

SEQ ID NO: 60753 - RNA, 32 nt, Human
aguccccuuacaagaccucuggcuugggccgg

SEQ ID NO: 60754 - RNA, 32 nt, Human
aguccccuucacugcagagccuugccuuuccc

SEQ ID NO: 60755 - RNA, 32 nt, Human
aguccccuuccaucccagagggugggcuucag

SEQ ID NO: 60756 - RNA, 32 nt, Human
aguccccuuuuguuguagcuucaccucguuug

SEQ ID NO: 60757 - RNA, 32 nt, Human
agucccgagagugucagacaaggaagaaaucc

SEQ ID NO: 60758 - RNA, 32 nt, Human
agucccgagcucccagaaaugccacaugaugg

SEQ ID NO: 60759 - RNA, 32 nt, Human
agucccgccacugcacuccagccugggcaaca

SEQ ID NO: 60760 - RNA, 32 nt, Human
agucccgccagccucagccaggugggccugua

SEQ ID NO: 60761 - RNA, 32 nt, Human
agucccgcccuccuugcugucacaggugcagc

SEQ ID NO: 60762 - RNA, 20 nt, Human
agucccgcgggccgugcgcg

SEQ ID NO: 60763 - RNA, 32 nt, Human
agucccgcucugucacgcaggcugccaggcug

SEQ ID NO: 60764 - RNA, 32 nt, Human
agucccgcuguggagcugucagucaccggagu

SEQ ID NO: 60765 - RNA, 32 nt, Human
agucccggcuacucgggaggcugaggcaggag

SEQ ID NO: 60766 - RNA, 32 nt, Human
agucccgguuacucgggaggcugagacaggag

SEQ ID NO: 60767 - RNA, 32 nt, Human
agucccgguuagugaaaagguuugacccugau

SEQ ID NO: 60768 - RNA, 32 nt, Human
agucccgucagucacagcaacaggaggucuuc

SEQ ID NO: 60769 - RNA, 32 nt, Human
agucccgucccaggcucugggcucgggcagcc

SEQ ID NO: 60770 - RNA, 32 nt, Human
agucccguggagcccgccucuccagucccagc

SEQ ID NO: 60771 - RNA, 32 nt, Human
agucccuauuuggcuaccuacuucucuacauu

SEQ ID NO: 60772 - RNA, 32 nt, Human
agucccucacccccaacccccaugcuguuugu

SEQ ID NO: 60773 - RNA, 32 nt, Human
agucccucagucagguggugcuaguagagcua

SEQ ID NO: 60774 - RNA, 32 nt, Human
agucccuccaccaagauucaguagaagaaaua

SEQ ID NO: 60775 - RNA, 32 nt, Human
agucccucccacucccacucacugacccuguc

SEQ ID NO: 60776 - RNA, 32 nt, Human
agucccuccguucuccccuuugaccauguaau

SEQ ID NO: 60777 - RNA, 32 nt, Human
agucccuccuagacuccugggccccaugaccu

SEQ ID NO: 60778 - RNA, 32 nt, Human
agucccucucucucugcaacacucuccucaug

SEQ ID NO: 60779 - RNA, 32 nt, Human
agucccucuugcacugugcucucucccgucuc

SEQ ID NO: 60780 - RNA, 32 nt, Human
agucccugaaauguagauaggggccaccuaga

SEQ ID NO: 60781 - RNA, 32 nt, Human
agucccugaacucucgcuuucuuuuuaauccc

SEQ ID NO: 60782 - RNA, 32 nt, Human
agucccugagccgccucauggccacacucagc

SEQ ID NO: 60783 - RNA, 32 nt, Human
agucccugcagcgcggccucggcuaggcuccg

SEQ ID NO: 60784 - RNA, 32 nt, Human
agucccugcagcucagcacccccagccuggug

SEQ ID NO: 60785 - RNA, 32 nt, Human
agucccugcaggugaauaaacacacagaucug

SEQ ID NO: 60786 - RNA, 32 nt, Human
agucccugcggccucccaccucccugccuuuc

SEQ ID NO: 60787 - RNA, 32 nt, Human
agucccugcuggcccagcugagcuccacauag

SEQ ID NO: 60788 - RNA, 32 nt, Human
agucccugcuggggaagaacagccccggggcc

SEQ ID NO: 60789 - RNA, 32 nt, Human
agucccugcuuauucauguggagcagcagcua

SEQ ID NO: 60790 - RNA, 21 nt, Human
agucccuggaagcugagcucu

SEQ ID NO: 60791 - RNA, 32 nt, Human
agucccuggcauuuagucaucugugauuguuu

SEQ ID NO: 60792 - RNA, 32 nt, Human
agucccuggccucucccccuggcugaucacuc

SEQ ID NO: 60793 - RNA, 32 nt, Human
agucccugggagcccgaagugggugggcacag

SEQ ID NO: 60794 - RNA, 19 nt, Human
agucccugggcacccagga

SEQ ID NO: 60795 - RNA, 32 nt, Human
agucccugggcuggggaagacagauccaccau

SEQ ID NO: 60796 - RNA, 32 nt, Human
agucccuguacaguuucuuccucuguccaaag

SEQ ID NO: 60797 - RNA, 32 nt, Human
agucccuuauuuggaagagagaaaggaugugu

SEQ ID NO: 60798 - RNA, 32 nt, Human
agucccuucccccugaagcaauagccccuccc

SEQ ID NO: 60799 - RNA, 32 nt, Human
agucccuucgcugguaggcccuucuucaguca

SEQ ID NO: 60800 - RNA, 32 nt, Human
agucccuucuuuccucacugcuccucuccacc

SEQ ID NO: 60801 - RNA, 32 nt, Human
agucccuugagccacagcauggggcuacagaa

SEQ ID NO: 60802 - RNA, 32 nt, Human
agucccuuucauuggggaucagucccauuaaa

SEQ ID NO: 60803 - RNA, 32 nt, Human
agucccuuuccaaagcugcccccaccacccug

SEQ ID NO: 60804 - RNA, 32 nt, Human
agucccuuucuccuggauuccaugucuugaau

SEQ ID NO: 60805 - RNA, 32 nt, Human
aguccgagcuacucgggaggcugaggcagaag

SEQ ID NO: 60806 - RNA, 32 nt, Human
aguccgaggaggaggagaaggaggccugcaga

SEQ ID NO: 60807 - RNA, 32 nt, Human
aguccgaggccgcggccguggcgcugggcggc

SEQ ID NO: 60808 - RNA, 32 nt, Human
aguccgaguggagagagcgagcugagugguug

SEQ ID NO: 60809 - RNA, 21 nt, Human
aguccgaucacagaggcaggg

SEQ ID NO: 60810 - RNA, 32 nt, Human
aguccgaugaaugugcuugcucugcuggagga

SEQ ID NO: 60811 - RNA, 18 nt, Human
aguccgcaggaggcugug

SEQ ID NO: 60812 - RNA, 32 nt, Human
aguccgcaucucagcccccaggaagaggaaga

SEQ ID NO: 60813 - RNA, 32 nt, Human
aguccgcaucuguguguaucaucaauaaaguu

SEQ ID NO: 60814 - RNA, 32 nt, Human
aguccgccccaccacacuccccgccuguccug

SEQ ID NO: 60815 - RNA, 32 nt, Human
aguccggaaucagguugccuugcuugaaaucc

SEQ ID NO: 60816 - RNA, 32 nt, Human
aguccggacucgugggagacgaucgcgaugaa

SEQ ID NO: 60817 - RNA, 32 nt, Human
aguccggcucacugcaguuuugaccucccagg

SEQ ID NO: 60818 - RNA, 32 nt, Human
aguccgggaggaaguucugcccggcgcucucc

SEQ ID NO: 60819 - RNA, 32 nt, Human
aguccgggaggcaccguccggcggcgagcucu

SEQ ID NO: 60820 - RNA, 32 nt, Human
aguccgggaguuugagucugcagugagcuaug

SEQ ID NO: 60821 - RNA, 32 nt, Human
aguccgggugcucaccucuuguggaacgugca

SEQ ID NO: 60822 - RNA, 31 nt, Human
aguccguagagaccugcgcaggagccgggac

SEQ ID NO: 60823 - RNA, 32 nt, Human
aguccgucaccugaaaucauauucauguauaa

SEQ ID NO: 60824 - RNA, 32 nt, Human
aguccgugugugucuguguuguuguucggcgg

SEQ ID NO: 60825 - RNA, 32 nt, Human
aguccguuagccucucugggccucuguccauc

SEQ ID NO: 60826 - RNA, 32 nt, Human
aguccuaaaacaguaaccgugucuacauaacg

SEQ ID NO: 60827 - RNA, 32 nt, Human
aguccuaaaaggauacuuuggaacuuaacauu

SEQ ID NO: 60828 - RNA, 24 nt, Human
aguccuaacccccaguaacuguga

SEQ ID NO: 60829 - RNA, 32 nt, Human
aguccuacaccuugcccugccugggcuuuggu

SEQ ID NO: 60830 - RNA, 32 nt, Human
aguccuaccaguuaucggaggcugcgggacug

SEQ ID NO: 60831 - RNA, 32 nt, Human
aguccuagaagaaagagcagagagggagacug

SEQ ID NO: 60832 - RNA, 32 nt, Human
aguccuagaggaccugagucugcuauauuuuc

SEQ ID NO: 60833 - RNA, 32 nt, Human
aguccuagccccagagccccagccccucaugu

SEQ ID NO: 60834 - RNA, 18 nt, Human
aguccuagccgcguguga

SEQ ID NO: 60835 - RNA, 32 nt, Human
aguccuagccugguaaagacccuccaccaccc

SEQ ID NO: 60836 - RNA, 32 nt, Human
aguccuagcuacucagaagacugaggcuggag

SEQ ID NO: 60837 - RNA, 32 nt, Human
aguccuagcuacucaggaggcugagaugggag

SEQ ID NO: 60838 - RNA, 32 nt, Human
aguccuagcuacucaggaggcugaggcaggag

SEQ ID NO: 60839 - RNA, 32 nt, Human
aguccuagcuacucaggaggcugaggugggag

SEQ ID NO: 60840 - RNA, 32 nt, Human
aguccuagcuacuccggaggcugagccaggag

SEQ ID NO: 60841 - RNA, 32 nt, Human
aguccuagcuacucgagaggcugaggcaggag

SEQ ID NO: 60842 - RNA, 32 nt, Human
aguccuagcuacucggaaggcugaggcaggag

SEQ ID NO: 60843 - RNA, 32 nt, Human
aguccuagcuacucgggaggcugaggcacgag

SEQ ID NO: 60844 - RNA, 32 nt, Human
aguccuagcuacucgggaggcugaggcaggag

SEQ ID NO: 60845 - RNA, 32 nt, Human
aguccuagcuacucggggaggcugaggcagga

SEQ ID NO: 60846 - RNA, 32 nt, Human
aguccuagcugcucgggaggcugaggcaggag

SEQ ID NO: 60847 - RNA, 32 nt, Human
aguccuagcugguuccagcaaacaccaacguu

SEQ ID NO: 60848 - RNA, 32 nt, Human
aguccuaggaagagagaggcaccagaggcacc

SEQ ID NO: 60849 - RNA, 32 nt, Human
aguccuaggauuauaggcaugagccacugugc

SEQ ID NO: 60850 - RNA, 32 nt, Human
aguccuaggcugcacaccucacaagcaucucu

SEQ ID NO: 60851 - RNA, 32 nt, Human
aguccuaggcuggacagcaaugggcugcaauu

SEQ ID NO: 60852 - RNA, 32 nt, Human
aguccuauacaaaaauuagcugggcguggugg

SEQ ID NO: 60853 - RNA, 32 nt, Human
aguccuaugaggacaaagaggcuuccaugacc

SEQ ID NO: 60854 - RNA, 32 nt, Human
aguccucaaagcagcuccugaaggucuguguu

SEQ ID NO: 60855 - RNA, 32 nt, Human
aguccucaaucagccucuccaacugccaccaa

SEQ ID NO: 60856 - RNA, 32 nt, Human
aguccucacaaacccacuuuuccucuugccug

SEQ ID NO: 60857 - RNA, 32 nt, Human
aguccucacaacaaauccaggcugcagauuuu

SEQ ID NO: 60858 - RNA, 18 nt, Human
aguccucacaccccuguc

SEQ ID NO: 60859 - RNA, 32 nt, Human
aguccucaccagaagaacaggucucacaagua

SEQ ID NO: 60860 - RNA, 32 nt, Human
aguccucacccuuaacuucugccaugggaauu

SEQ ID NO: 60861 - RNA, 32 nt, Human
aguccucaccugcugguuuggagacucaugag

SEQ ID NO: 60862 - RNA, 22 nt, Human
aguccucacuggaacccgccca

SEQ ID NO: 60863 - RNA, 32 nt, Human
aguccucagcugcagccuucucugaauacagu

SEQ ID NO: 60864 - RNA, 32 nt, Human
aguccucagggcagaaaaggggccaguacauc

SEQ ID NO: 60865 - RNA, 32 nt, Human
aguccucagggucucacacccucagugcugau

SEQ ID NO: 60866 - RNA, 32 nt, Human
aguccucaucugagucucagccuggguccccc

SEQ ID NO: 60867 - RNA, 22 nt, Human
aguccucauggagacucugccg

SEQ ID NO: 60868 - RNA, 20 nt, Human
aguccucaugugcccagaga

SEQ ID NO: 60869 - RNA, 32 nt, Human
aguccuccacucgcaucucccuccccugccag

SEQ ID NO: 60870 - RNA, 20 nt, Human
aguccucccaagcugugcug

SEQ ID NO: 60871 - RNA, 32 nt, Human
aguccucccacuuuaccauccuccuuccuccc

SEQ ID NO: 60872 - RNA, 32 nt, Human
aguccuccccacccuccuuccucugucucccu

SEQ ID NO: 60873 - RNA, 31 nt, Human
aguccuccccacucugggcuugugcacacug

SEQ ID NO: 60874 - RNA, 32 nt, Human
aguccucccccuucuccugcagucucuggagg

SEQ ID NO: 60875 - RNA, 32 nt, Human
aguccuccgggggaggaggguguagcuggcau

SEQ ID NO: 60876 - RNA, 32 nt, Human
aguccuccucagacacuggagcagggaggcac

SEQ ID NO: 60877 - RNA, 32 nt, Human
aguccuccuccacuacaaccuccaugaccuug

SEQ ID NO: 60878 - RNA, 32 nt, Human
aguccuccucguuccucuccccaccgccuggc

SEQ ID NO: 60879 - RNA, 32 nt, Human
aguccuccuguccaaucucccugccauuucuc

SEQ ID NO: 60880 - RNA, 32 nt, Human
aguccuccuuaaccacuuaucucccauaugag

SEQ ID NO: 60881 - RNA, 32 nt, Human
aguccuccuucccagcucuacauucugcucug

SEQ ID NO: 60882 - RNA, 32 nt, Human
aguccucgagcaccuggccuguuugcucacau

SEQ ID NO: 60883 - RNA, 32 nt, Human
aguccucggaaccaagcuuacucucauggccg

SEQ ID NO: 60884 - RNA, 32 nt, Human
aguccucggauuacaggcaugagccaccacac

SEQ ID NO: 60885 - RNA, 32 nt, Human
aguccucucucaucuggugaucuucuuuucca

SEQ ID NO: 60886 - RNA, 32 nt, Human
aguccucugauuuuuccuccauccugcuuacc

SEQ ID NO: 60887 - RNA, 32 nt, Human
aguccucugcaucccaacauucccaggacaug

SEQ ID NO: 60888 - RNA, 32 nt, Human
aguccucugcuucaguuucauuguuaacgggc

SEQ ID NO: 60889 - RNA, 32 nt, Human
aguccucuguauccucaugagauaacgagagg

SEQ ID NO: 60890 - RNA, 18 nt, Human
aguccucuguuccuccca

SEQ ID NO: 60891 - RNA, 19 nt, Human
aguccucuugcacaucuaa

SEQ ID NO: 60892 - RNA, 21 nt, Human
aguccucuuggacacagguug

SEQ ID NO: 60893 - RNA, 32 nt, Human
aguccucuuuuucucacuaccaccugcagggu

SEQ ID NO: 60894 - RNA, 32 nt, Human
aguccugaaaacaaacugaggacuuuaguggu

SEQ ID NO: 60895 - RNA, 32 nt, Human
aguccugaaguagaugguugagauaugaguuc

SEQ ID NO: 60896 - RNA, 21 nt, Human
aguccugagaacuaauuguca

SEQ ID NO: 60897 - RNA, 32 nt, Human
aguccugagagcagcaucucuguccccacggu

SEQ ID NO: 60898 - RNA, 32 nt, Human
aguccugagagugucagacaaggaagaaaucc

SEQ ID NO: 60899 - RNA, 24 nt, Human
aguccugagcuugguuucuuccca

SEQ ID NO: 60900 - RNA, 19 nt, Human
aguccugaggacccaggag

SEQ ID NO: 60901 - RNA, 32 nt, Human
aguccugagugacccagagcaacuuugcgguu

SEQ ID NO: 60902 - RNA, 23 nt, Human
aguccugagugagcuuucuguua

SEQ ID NO: 60903 - RNA, 32 nt, Human
aguccugcaaauccaaauccacacaacuguaa

SEQ ID NO: 60904 - RNA, 32 nt, Human
aguccugcaaggaaagcaacauggaaaacagc

SEQ ID NO: 60905 - RNA, 32 nt, Human
aguccugcaccaggccugggugaguggaugcg

SEQ ID NO: 60906 - RNA, 32 nt, Human
aguccugcagagccucugggcugggcuggugc

SEQ ID NO: 60907 - RNA, 32 nt, Human
aguccugcagcuucccccuccuucccugucag

SEQ ID NO: 60908 - RNA, 32 nt, Human
aguccugccacauuccccucacugagauggua

SEQ ID NO: 60909 - RNA, 19 nt, Human
aguccugcccugccuuccu

SEQ ID NO: 60910 - RNA, 32 nt, Human
aguccugccuggccaggcagaucugugcccca

SEQ ID NO: 60911 - RNA, 32 nt, Human
aguccugccuggggucaggcccucacugaccc

SEQ ID NO: 60912 - RNA, 32 nt, Human
aguccugccuggguccuggugccuuggacccc

SEQ ID NO: 60913 - RNA, 32 nt, Human
aguccugccuuuccuuucaucaucccaaauuu

SEQ ID NO: 60914 - RNA, 32 nt, Human
aguccugcgugggccacguaggaagcagcgug

SEQ ID NO: 60915 - RNA, 32 nt, Human
aguccugcuccccucaccuuccuugggcccgu

SEQ ID NO: 60916 - RNA, 32 nt, Human
aguccugcuccgacaccaccuccacaggggaa

SEQ ID NO: 60917 - RNA, 21 nt, Human
aguccugcuccuuucugccca

SEQ ID NO: 60918 - RNA, 32 nt, Human
aguccugcucgcugcacccucuagccugacgu

SEQ ID NO: 60919 - RNA, 32 nt, Human
aguccugcucuccgcacgccaccuuaggcccg

SEQ ID NO: 60920 - RNA, 32 nt, Human
aguccugcuggguuugggcaaugucucagcag

SEQ ID NO: 60921 - RNA, 32 nt, Human
aguccugcugucccucagcugagaaucaaacc

SEQ ID NO: 60922 - RNA, 32 nt, Human
aguccugcuuccagaauuuggaaauccuaguu

SEQ ID NO: 60923 - RNA, 17 nt, Human
aguccugcuuggccuga

SEQ ID NO: 60924 - RNA, 32 nt, Human
aguccuggaaacacuuucaaccuagaguaguu

SEQ ID NO: 60925 - RNA, 32 nt, Human
aguccuggaagagagagaugagccagggcagu

SEQ ID NO: 60926 - RNA, 32 nt, Human
aguccuggaaguugaagguggagauggcccuu

SEQ ID NO: 60927 - RNA, 32 nt, Human
aguccuggaggaagcagacaaugaagggagca

SEQ ID NO: 60928 - RNA, 32 nt, Human
aguccuggcaaaugaagguggggcggggcagu

SEQ ID NO: 60929 - RNA, 32 nt, Human
aguccuggcauuaugucuaggacuaaagcagu

SEQ ID NO: 60930 - RNA, 32 nt, Human
aguccuggccagcauggugaaaccccaucucu

SEQ ID NO: 60931 - RNA, 32 nt, Human
aguccuggcccuggcccuggcauaucaccccg

SEQ ID NO: 60932 - RNA, 30 nt, Human
aguccuggccucuccauuuacuucuuccca

SEQ ID NO: 60933 - RNA, 32 nt, Human
aguccuggcuuccccugcaugaaggugacagu

SEQ ID NO: 60934 - RNA, 32 nt, Human
aguccugggauuacaggcgugagccacugugc

SEQ ID NO: 60935 - RNA, 32 nt, Human
aguccugggauuacaggcugagccaccgcgac

SEQ ID NO: 60936 - RNA, 19 nt, Human
aguccugggauuacaggug

SEQ ID NO: 60937 - RNA, 32 nt, Human
aguccugggauuacaggugugagccaccacau

SEQ ID NO: 60938 - RNA, 32 nt, Human
aguccuggggacuuccuugaagcaucauuuuc

SEQ ID NO: 60939 - RNA, 32 nt, Human
aguccuggggguaaagcccucagaucccaggg

SEQ ID NO: 60940 - RNA, 32 nt, Human
aguccuggucaaggagaucuaggucuacucca

SEQ ID NO: 60941 - RNA, 32 nt, Human
aguccuggucagagcagucaggaagcagaaaa

SEQ ID NO: 60942 - RNA, 32 nt, Human
aguccuggucccagcaguaugugugcugacuu

SEQ ID NO: 60943 - RNA, 32 nt, Human
aguccugguccuuccacugugcaccugcgcgg

SEQ ID NO: 60944 - RNA, 32 nt, Human
aguccugguuuccuggcagccugcugcgcgug

SEQ ID NO: 60945 - RNA, 32 nt, Human
aguccugguuucuuuuucucauggaagaaaug

SEQ ID NO: 60946 - RNA, 32 nt, Human
aguccuguagggaaccaguuuccagaagaggu

SEQ ID NO: 60947 - RNA, 32 nt, Human
aguccuguaggucagccuuucucacaaacucu

SEQ ID NO: 60948 - RNA, 32 nt, Human
aguccuguauuggaguucuacuuccaaauucu

SEQ ID NO: 60949 - RNA, 32 nt, Human
aguccugucauccuggucaggacuagucgcgu

SEQ ID NO: 60950 - RNA, 32 nt, Human
aguccuguccugccucagggcuuuucggagcc

SEQ ID NO: 60951 - RNA, 32 nt, Human
aguccugucuguuuauagugcugguaguauca

SEQ ID NO: 60952 - RNA, 32 nt, Human
aguccuguggugaggcccaugucaagaaggcc

SEQ ID NO: 60953 - RNA, 32 nt, Human
aguccuguuacaaaauagauaacugagcaccu

SEQ ID NO: 60954 - RNA, 32 nt, Human
aguccuguuagagauucaguagauggagccac

SEQ ID NO: 60955 - RNA, 32 nt, Human
aguccuguugguuggucaucuuugucacuucu

SEQ ID NO: 60956 - RNA, 21 nt, Human
aguccuguuguccugucauca

SEQ ID NO: 60957 - RNA, 32 nt, Human
aguccuguuucuugcuuccugccucugacuuu

SEQ ID NO: 60958 - RNA, 32 nt, Human
aguccuuaccauugggucuaaggcaguuucca

SEQ ID NO: 60959 - RNA, 31 nt, Human
aguccuucaauaaaaagcugcuuauugaaaa

SEQ ID NO: 60960 - RNA, 32 nt, Human
aguccuuccagaggagggcuggagggacagga

SEQ ID NO: 60961 - RNA, 32 nt, Human
aguccuucccacugcacuccccaguggcuggc

SEQ ID NO: 60962 - RNA, 32 nt, Human
aguccuucccagcauacacacagggaaacaaa

SEQ ID NO: 60963 - RNA, 32 nt, Human
aguccuugaaaccauuuaggagacugcuacag

SEQ ID NO: 60964 - RNA, 32 nt, Human
aguccuugaaacugagccccauucugaauccc

SEQ ID NO: 60965 - RNA, 21 nt, Human
aguccuugaagaauggguucu

SEQ ID NO: 60966 - RNA, 32 nt, Human
aguccuugauuguucgggugugcaaugucuga

SEQ ID NO: 60967 - RNA, 32 nt, Human
aguccuugcagcuggucuuuggcauugacgug

SEQ ID NO: 60968 - RNA, 31 nt, Human
aguccuugcauucaaaggguuggagauugcu

SEQ ID NO: 60969 - RNA, 32 nt, Human
aguccuugcccaggcuggagugcaguggcgcg

SEQ ID NO: 60970 - RNA, 28 nt, Human
aguccuugcccugcugccuccucauacc

SEQ ID NO: 60971 - RNA, 32 nt, Human
aguccuugcuguccacuccugcccucagucug

SEQ ID NO: 60972 - RNA, 32 nt, Human
aguccuuggacacaacgcggagcggggcugag

SEQ ID NO: 60973 - RNA, 32 nt, Human
aguccuuggugucagggagcccccaggccgca

SEQ ID NO: 60974 - RNA, 29 nt, Human
aguccuugucauugugugccuggcagugg

SEQ ID NO: 60975 - RNA, 32 nt, Human
aguccuugucauugugugccuggcaguggggg

SEQ ID NO: 60976 - RNA, 32 nt, Human
aguccuuguuguaggaguugcucucugaaugc

SEQ ID NO: 60977 - RNA, 32 nt, Human
aguccuuucagccucagaggucacagugggug

SEQ ID NO: 60978 - RNA, 32 nt, Human
aguccuuucaggaagguggagcugcauugguu

SEQ ID NO: 60979 - RNA, 19 nt, Human
aguccuuucccguccuccu

SEQ ID NO: 60980 - RNA, 32 nt, Human
aguccuuuccucacccaccccacaccaucacu

SEQ ID NO: 60981 - RNA, 32 nt, Human
aguccuuucgugccgcugccuuccucggccgc

SEQ ID NO: 60982 - RNA, 32 nt, Human
aguccuuugcaaaggcaccccuugucuuaaaa

SEQ ID NO: 60983 - RNA, 32 nt, Human
aguccuuuggccugggagguccaggcugcaau

SEQ ID NO: 60984 - RNA, 32 nt, Human
aguccuuugggguugagggagaugggagcuag

SEQ ID NO: 60985 - RNA, 32 nt, Human
aguccuuuugaaggccuauccucugcucugua

SEQ ID NO: 60986 - RNA, 32 nt, Human
agucgaagcuacucaggaggcugaggcagaag

SEQ ID NO: 60987 - RNA, 32 nt, Human
agucgaagugcuugguucuaaaugucuaaaca

SEQ ID NO: 60988 - RNA, 32 nt, Human
agucgacugucgucuucuguuagugccaugcg

SEQ ID NO: 60989 - RNA, 32 nt, Human
agucgagaaaagagcccauuugcagauggagg

SEQ ID NO: 60990 - RNA, 32 nt, Human
agucgagagccagccaauagauggaauggagg

SEQ ID NO: 60991 - RNA, 32 nt, Human
agucgagagcccagaguugagacacacuggga

SEQ ID NO: 60992 - RNA, 32 nt, Human
agucgagaucauugcacuccagccugggcaau

SEQ ID NO: 60993 - RNA, 32 nt, Human
agucgagcaagaauuagcaugugcguagugaa

SEQ ID NO: 60994 - RNA, 32 nt, Human
agucgaggcugcagugagcccagaucgagcca

SEQ ID NO: 60995 - RNA, 32 nt, Human
agucgaggggcggagagagggggccggaggag

SEQ ID NO: 60996 - RNA, 32 nt, Human
agucgaucagccagaggcagcagcaguggacu

SEQ ID NO: 60997 - RNA, 32 nt, Human
agucgaugcucaauaaauguguguugacugca

SEQ ID NO: 60998 - RNA, 32 nt, Human
agucgcaauaacaugucugcucccgagguuaa

SEQ ID NO: 60999 - RNA, 32 nt, Human
agucgcacucuuacaacaagcuucuggguuuu

SEQ ID NO: 61000 - RNA, 32 nt, Human
agucgcagcuacuagggaaguugaggcaggag

SEQ ID NO: 61001 - RNA, 32 nt, Human
agucgcagcuacucagaaggcugaggugggag

SEQ ID NO: 61002 - RNA, 32 nt, Human
agucgcagcuacucaggaggcugaggcgggag

SEQ ID NO: 61003 - RNA, 32 nt, Human
agucgcagcuacucgcgagguugaggcaggag

SEQ ID NO: 61004 - RNA, 32 nt, Human
agucgcagcuacuggggaggcugaggcaggag

SEQ ID NO: 61005 - RNA, 32 nt, Human
agucgcagcuacuugggaggcuggggcaggag

SEQ ID NO: 61006 - RNA, 32 nt, Human
agucgcaggacccggccgccagccucucccuc

SEQ ID NO: 61007 - RNA, 32 nt, Human
agucgcaguugacugagcauagaggaaacagg

SEQ ID NO: 61008 - RNA, 32 nt, Human
agucgcaucuggggcugaugggagacagugac

SEQ ID NO: 61009 - RNA, 32 nt, Human
agucgccacuggcugccugaggugcucuuaca

SEQ ID NO: 61010 - RNA, 32 nt, Human
agucgccaggcaggaggccauuccaggagugg

SEQ ID NO: 61011 - RNA, 22 nt, Human
agucgcccaggcuggagugcag

SEQ ID NO: 61012 - RNA, 32 nt, Human
agucgcccccagcuggguugugcuccacugug

SEQ ID NO: 61013 - RNA, 32 nt, Human
agucgccccgaccuuucucugcgcaguacggc

SEQ ID NO: 61014 - RNA, 22 nt, Human
agucgcccgggagcaggugcug

SEQ ID NO: 61015 - RNA, 32 nt, Human
agucgcccuaggaacaccagauuuccugguuc

SEQ ID NO: 61016 - RNA, 32 nt, Human
agucgcccucugugugcaggcagcagcugccu

SEQ ID NO: 61017 - RNA, 32 nt, Human
agucgccgaggcaccucugagcuagacagacc

SEQ ID NO: 61018 - RNA, 18 nt, Human
agucgccgcaacugcagc

SEQ ID NO: 61019 - RNA, 32 nt, Human
agucgccugcugcacuacaugagaaagggacu

SEQ ID NO: 61020 - RNA, 32 nt, Human
agucgccuggccucuucuccccucucuuccca

SEQ ID NO: 61021 - RNA, 32 nt, Human
agucgcgcggaggcggaggcuugggugcguuc

SEQ ID NO: 61022 - RNA, 32 nt, Human
agucgcggaaggcgcgggagcuugcgugcugc

SEQ ID NO: 61023 - RNA, 32 nt, Human
agucgcggaguuuccugguuggaggcuguggc

SEQ ID NO: 61024 - RNA, 25 nt, Human
agucgcucaggcuggagugcaaugg

SEQ ID NO: 61025 - RNA, 32 nt, Human
agucgcucuaagaaucugcuugaagucucgua

SEQ ID NO: 61026 - RNA, 32 nt, Human
agucgcucucccacccagccuggacuuggccc

SEQ ID NO: 61027 - RNA, 32 nt, Human
agucgcuggcauguuucacuccugcuucucuc

SEQ ID NO: 61028 - RNA, 32 nt, Human
agucgcugugccacaggcuuagggacaggacc

SEQ ID NO: 61029 - RNA, 18 nt, Human
agucggaaaaggcugcug

SEQ ID NO: 61030 - RNA, 21 nt, Human
agucggacaggaaacaucugg

SEQ ID NO: 61031 - RNA, 32 nt, Human
agucggacgagauggagcugcucuacucagcc

SEQ ID NO: 61032 - RNA, 22 nt, Human
agucggagaaauagccagucaa

SEQ ID NO: 61033 - RNA, 32 nt, Human
agucggagaugaugcagcacacacacaauucc

SEQ ID NO: 61034 - RNA, 22 nt, Human
agucggagcaaagaacuuacca

SEQ ID NO: 61035 - RNA, 32 nt, Human
agucggagcuacaggcagugccuucagcucug

SEQ ID NO: 61036 - RNA, 32 nt, Human
agucggaggcccagggccccaagugaacugcu

SEQ ID NO: 61037 - RNA, 32 nt, Human
agucggaggcgcccucagacagcaguggcauc

SEQ ID NO: 61038 - RNA, 32 nt, Human
agucggagggccuugggcaagaucgccuccuc

SEQ ID NO: 61039 - RNA, 32 nt, Human
agucggagggcggggagcuaggaggagggagc

SEQ ID NO: 61040 - RNA, 32 nt, Human
agucggaguuugagccccggaggcagagcggc

SEQ ID NO: 61041 - RNA, 32 nt, Human
agucggauggggagagguguggaguuagaucu

SEQ ID NO: 61042 - RNA, 32 nt, Human
agucggcacugaguggcccagcaccgccuagc

SEQ ID NO: 61043 - RNA, 32 nt, Human
agucggcagcagagggaacagggaagaaaccu

SEQ ID NO: 61044 - RNA, 32 nt, Human
agucggccacugcggcccccuccugaguggga

SEQ ID NO: 61045 - RNA, 32 nt, Human
agucggcccucgggggaggccuugcccaccuu

SEQ ID NO: 61046 - RNA, 32 nt, Human
agucggccugcgcuccucagccuggcgguucu

SEQ ID NO: 61047 - RNA, 32 nt, Human
agucggccuggagucugugccugguccuuugc

SEQ ID NO: 61048 - RNA, 32 nt, Human
agucggccugggaaguucacugccccaacucu

SEQ ID NO: 61049 - RNA, 32 nt, Human
agucggcggaccacagcucagccaauuggcuu

SEQ ID NO: 61050 - RNA, 32 nt, Human
agucggcggccggacugggaagauggacgcag

SEQ ID NO: 61051 - RNA, 32 nt, Human
agucggcucaacgcaaccuccgccucccaggu

SEQ ID NO: 61052 - RNA, 32 nt, Human
agucggcugggcagggcgcagggcgcuccggc

SEQ ID NO: 61053 - RNA, 32 nt, Human
agucggcuuacccgcuggccgccuccugacaa

SEQ ID NO: 61054 - RNA, 32 nt, Human
agucgggagaucaagaccauccuggcuaacac

SEQ ID NO: 61055 - RNA, 24 nt, Human
agucgggagcgcgcgaggcgcggg

SEQ ID NO: 61056 - RNA, 32 nt, Human
agucgggaggcguggagggugaccacaccuug

SEQ ID NO: 61057 - RNA, 32 nt, Human
agucgggagggagggagcgagcaggcgaagcc

SEQ ID NO: 61058 - RNA, 32 nt, Human
agucgggcuccaggcuccuccugggucugagc

SEQ ID NO: 61059 - RNA, 32 nt, Human
agucgggcuucaucuuuacgcagcgggcccgg

SEQ ID NO: 61060 - RNA, 32 nt, Human
agucggggacaaggagcuuccgucuggcaagg

SEQ ID NO: 61061 - RNA, 32 nt, Human
agucgggggucacaagccaaagccacaccgcu

SEQ ID NO: 61062 - RNA, 32 nt, Human
agucggggugaaauaaauaccucagacugauu

SEQ ID NO: 61063 - RNA, 21 nt, Human
agucgggguuucaccauguug

SEQ ID NO: 61064 - RNA, 32 nt, Human
agucggguccugccaggcagggggccuguguu

SEQ ID NO: 61065 - RNA, 23 nt, Human
agucgggugggccgccuccccuc

SEQ ID NO: 61066 - RNA, 32 nt, Human
agucgguccugggcuggcugugguguagggcg

SEQ ID NO: 61067 - RNA, 32 nt, Human
agucggugaacugccccuggccuguguccccc

SEQ ID NO: 61068 - RNA, 32 nt, Human
agucggugagcagcugggaagagcagaaccgg

SEQ ID NO: 61069 - RNA, 32 nt, Human
agucggugcugcuggaauuacugcacagcugg

SEQ ID NO: 61070 - RNA, 32 nt, Human
agucggugggagaagggcgggagggugggccc

SEQ ID NO: 61071 - RNA, 32 nt, Human
agucguaauucauagguacugacuccucagcc

SEQ ID NO: 61072 - RNA, 32 nt, Human
agucguaguaauaugugcacacacagaagggg

SEQ ID NO: 61073 - RNA, 32 nt, Human
agucguauucuuggcauauuaugaauuucuug

SEQ ID NO: 61074 - RNA, 22 nt, Human
agucgucacgccuguaauccca

SEQ ID NO: 61075 - RNA, 19 nt, Human
agucguccagaggcugucc

SEQ ID NO: 61076 - RNA, 32 nt, Human
agucguccgccccucacgcccucucuuccucu

SEQ ID NO: 61077 - RNA, 32 nt, Human
agucgucucaacugauuuacucacuuagcuuc

SEQ ID NO: 61078 - RNA, 32 nt, Human
agucgucuccaggcugcugucacugcauccag

SEQ ID NO: 61079 - RNA, 32 nt, Human
agucgugaacugugcgagcacugugguuuaca

SEQ ID NO: 61080 - RNA, 32 nt, Human
agucgugauuaaagugauaaaaccccauaucu

SEQ ID NO: 61081 - RNA, 32 nt, Human
agucgugcccccgugaucucaaggaccggucu

SEQ ID NO: 61082 - RNA, 32 nt, Human
agucgugccgauggcucucaaauggcagagga

SEQ ID NO: 61083 - RNA, 20 nt, Human
agucgugccucugacuguua

SEQ ID NO: 61084 - RNA, 32 nt, Human
agucgugcuguccccucccucucccucagucu

SEQ ID NO: 61085 - RNA, 32 nt, Human
agucguggacggggaaaggagagaugcugguc

SEQ ID NO: 61086 - RNA, 32 nt, Human
agucguggccuccuuccagaaggaaagagauu

SEQ ID NO: 61087 - RNA, 32 nt, Human
agucgugggccccagcaaggcuggagagcagg

SEQ ID NO: 61088 - RNA, 32 nt, Human
agucguggguccuccucugucccuucauugca

SEQ ID NO: 61089 - RNA, 32 nt, Human
agucgugucauccuagggguuggggcugggca

SEQ ID NO: 61090 - RNA, 32 nt, Human
agucgugucuugugacucucccaggaaucaga

SEQ ID NO: 61091 - RNA, 32 nt, Human
agucgugugcaggagccagcagggcgccaagu

SEQ ID NO: 61092 - RNA, 32 nt, Human
agucgugugcuggagugagugcugcagaaccg

SEQ ID NO: 61093 - RNA, 32 nt, Human
agucguuaacaggaaauaguauucuugcucag

SEQ ID NO: 61094 - RNA, 32 nt, Human
agucguuggaggcuggagcgcaauggcccugc

SEQ ID NO: 61095 - RNA, 32 nt, Human
agucguuucaacucuuaaagacaucuuaaucc

SEQ ID NO: 61096 - RNA, 32 nt, Human
agucuaaaaucaaagauacauggugguagggu

SEQ ID NO: 61097 - RNA, 32 nt, Human
agucuaaaucaguaauuuagaggauagugaca

SEQ ID NO: 61098 - RNA, 32 nt, Human
agucuaacaaguccaaaagcuggagugugagg

SEQ ID NO: 61099 - RNA, 32 nt, Human
agucuaaccaucauaaagacacugccugucuu

SEQ ID NO: 61100 - RNA, 32 nt, Human
agucuaaccauggugcuauuauuaggcuugcu

SEQ ID NO: 61101 - RNA, 32 nt, Human
agucuaaccuucuguguugaugcaugaaggcu

SEQ ID NO: 61102 - RNA, 32 nt, Human
agucuaagaggauuuugaccauguagaaauuc

SEQ ID NO: 61103 - RNA, 32 nt, Human
agucuaagcaaaccccagcaggaaagcagggg

SEQ ID NO: 61104 - RNA, 32 nt, Human
agucuaagcccaaacaggaauuccuguugaau

SEQ ID NO: 61105 - RNA, 23 nt, Human
agucuaagcucugcuuaugccua

SEQ ID NO: 61106 - RNA, 32 nt, Human
agucuaagcugcacuauuugguaaaccccuug

SEQ ID NO: 61107 - RNA, 31 nt, Human
agucuaaggagaccuggcagccugagauacc

SEQ ID NO: 61108 - RNA, 32 nt, Human
agucuaauuugaggcugggugcaguggcucac

SEQ ID NO: 61109 - RNA, 32 nt, Human
agucuacacgcccuuaucuucagagaaaagau

SEQ ID NO: 61110 - RNA, 21 nt, Human
agucuacacucacaaucaucu

SEQ ID NO: 61111 - RNA, 32 nt, Human
agucuacaggcuaggugcacacuggacaguca

SEQ ID NO: 61112 - RNA, 32 nt, Human
agucuaccauuuucuugcucucccuccuuccu

SEQ ID NO: 61113 - RNA, 32 nt, Human
agucuacccagagacagagaaugugucuuuau

SEQ ID NO: 61114 - RNA, 32 nt, Human
agucuacccggaggagaaagaggcuuccgggc

SEQ ID NO: 61115 - RNA, 21 nt, Human
agucuacguugucucuuucca

SEQ ID NO: 61116 - RNA, 32 nt, Human
agucuacucaagaaaucucacaaggagauauu

SEQ ID NO: 61117 - RNA, 32 nt, Human
agucuacucuaggauuuucaacuuuuuaguuu

SEQ ID NO: 61118 - RNA, 32 nt, Human
agucuacugcguagcugggauuacaggugccc

SEQ ID NO: 61119 - RNA, 32 nt, Human
agucuacuugggaggcugaggugggagaucac

SEQ ID NO: 61120 - RNA, 32 nt, Human
agucuagacaggaaagaugcagaggaaagggg

SEQ ID NO: 61121 - RNA, 32 nt, Human
agucuagagguggacauugucagggguucugg

SEQ ID NO: 61122 - RNA, 32 nt, Human
agucuagcaggaaaggagagggagcuuucccc

SEQ ID NO: 61123 - RNA, 32 nt, Human
agucuaggcaagaugaccuguucaucaggaau

SEQ ID NO: 61124 - RNA, 32 nt, Human
agucuagggggccucaggaggagggagguggg

SEQ ID NO: 61125 - RNA, 32 nt, Human
agucuagucucgaacuccugaccuugugaucc

SEQ ID NO: 61126 - RNA, 32 nt, Human
agucuagucuugaacuccugggcuacaguuac

SEQ ID NO: 61127 - RNA, 32 nt, Human
agucuagucuuuccacguuccucugccugcuu

SEQ ID NO: 61128 - RNA, 18 nt, Human
agucuaguuuuugccaca

SEQ ID NO: 61129 - RNA, 23 nt, Human
agucuauaauguaaaagcuugaa

SEQ ID NO: 61130 - RNA, 32 nt, Human
agucuauauggcaaucuguguuaugaucagaa

SEQ ID NO: 61131 - RNA, 32 nt, Human
agucuaucaugcauuauucugaguaagcucag

SEQ ID NO: 61132 - RNA, 32 nt, Human
agucuauccggcacuaggaacagccccggggg

SEQ ID NO: 61133 - RNA, 32 nt, Human
agucuaucguggaaguucaagaggaauuucuu

SEQ ID NO: 61134 - RNA, 32 nt, Human
agucuaugccugcaacuccaaauguuuguggu

SEQ ID NO: 61135 - RNA, 32 nt, Human
agucuauucuaggaaugaaccagcaaguuguu

SEQ ID NO: 61136 - RNA, 32 nt, Human
agucucaaaaucaacucucuuaugguauuaua

SEQ ID NO: 61137 - RNA, 32 nt, Human
agucucaaacuaucaccugggcuggagugcga

SEQ ID NO: 61138 - RNA, 32 nt, Human
agucucaaaugucccuucaucuccuuacucuc

SEQ ID NO: 61139 - RNA, 32 nt, Human
agucucaacucacucuagccugggugacagag

SEQ ID NO: 61140 - RNA, 32 nt, Human
agucucaagauaugagaugccuagccuacaga

SEQ ID NO: 61141 - RNA, 32 nt, Human
agucucaagauauucagcucuuggucuuugug

SEQ ID NO: 61142 - RNA, 32 nt, Human
agucucaaggcuuucucucuugcuuaacuaaa

SEQ ID NO: 61143 - RNA, 32 nt, Human
agucucaaggggauuccagccuucagaagguu

SEQ ID NO: 61144 - RNA, 19 nt, Human
agucucaaucucuacuaca

SEQ ID NO: 61145 - RNA, 18 nt, Human
agucucacaaaggccccg

SEQ ID NO: 61146 - RNA, 32 nt, Human
agucucacaaauagcugggguuacaggugugc

SEQ ID NO: 61147 - RNA, 21 nt, Human
agucucacacccgccgggccg

SEQ ID NO: 61148 - RNA, 21 nt, Human
agucucacagaaacugagcug

SEQ ID NO: 61149 - RNA, 20 nt, Human
agucucacagaaggcaggcu

SEQ ID NO: 61150 - RNA, 20 nt, Human
agucucacagagagagggcc

SEQ ID NO: 61151 - RNA, 19 nt, Human
agucucacagaggaagggc

SEQ ID NO: 61152 - RNA, 20 nt, Human
agucucacagaggccugggu

SEQ ID NO: 61153 - RNA, 17 nt, Human
agucucacagaggggcu

SEQ ID NO: 61154 - RNA, 19 nt, Human
agucucacagauugcugcc

SEQ ID NO: 61155 - RNA, 32 nt, Human
agucucacagcagaggaaaggacagggaaaaa

SEQ ID NO: 61156 - RNA, 18 nt, Human
agucucacaggccaugcc

SEQ ID NO: 61157 - RNA, 32 nt, Human
agucucacaugguggcuguacaugcacaaccg

SEQ ID NO: 61158 - RNA, 32 nt, Human
agucucaccuggggccuagaguggaagugggg

SEQ ID NO: 61159 - RNA, 32 nt, Human
agucucacgaccuacccccaccccggacugcc

SEQ ID NO: 61160 - RNA, 32 nt, Human
agucucacuauguugcccagacuggucuugaa

SEQ ID NO: 61161 - RNA, 17 nt, Human
agucucacucugucgcc

SEQ ID NO: 61162 - RNA, 18 nt, Human
agucucacucugucgccg

SEQ ID NO: 61163 - RNA, 16 nt, Human
agucucacucuguguc

SEQ ID NO: 61164 - RNA, 17 nt, Human
agucucacucuguugcc

SEQ ID NO: 61165 - RNA, 32 nt, Human
agucucacucuucacucaggcugcagugcagu

SEQ ID NO: 61166 - RNA, 32 nt, Human
agucucacugcaccagugucuuugaugguggu

SEQ ID NO: 61167 - RNA, 32 nt, Human
agucucacugcacucaggcuggagugcagugg

SEQ ID NO: 61168 - RNA, 32 nt, Human
agucucacuguguugcccagccugggugucaa

SEQ ID NO: 61169 - RNA, 32 nt, Human
agucucacuuuccuccucugugaaaugggggu

SEQ ID NO: 61170 - RNA, 32 nt, Human
agucucagaagagguugggcuuccaugccugu

SEQ ID NO: 61171 - RNA, 32 nt, Human
agucucagagugaggcgggggccuuucggaua

SEQ ID NO: 61172 - RNA, 23 nt, Human
agucucagcaucugacugugcug

SEQ ID NO: 61173 - RNA, 32 nt, Human
agucucagccacucgggaggcugaggcaggag

SEQ ID NO: 61174 - RNA, 32 nt, Human
agucucagcccagcccccaccuuuggguugua

SEQ ID NO: 61175 - RNA, 21 nt, Human
agucucagccucagguacucc

SEQ ID NO: 61176 - RNA, 32 nt, Human
agucucagcuacuagggaggcugaggcaagag

SEQ ID NO: 61177 - RNA, 32 nt, Human
agucucagcuacucagaggcugaggcaggagg

SEQ ID NO: 61178 - RNA, 32 nt, Human
agucucagcuacucaggaggcugagacaggag

SEQ ID NO: 61179 - RNA, 32 nt, Human
agucucagcuacucaggaggcugagaugagag

SEQ ID NO: 61180 - RNA, 32 nt, Human
agucucagcuacucaggaggcugaggcaggag

SEQ ID NO: 61181 - RNA, 32 nt, Human
agucucagcuacucaggaggcuguggcaggaa

SEQ ID NO: 61182 - RNA, 32 nt, Human
agucucagcuacucaggaggcuuaggcaggag

SEQ ID NO: 61183 - RNA, 32 nt, Human
agucucagcuacucggaaggcugaggcaggag

SEQ ID NO: 61184 - RNA, 32 nt, Human
agucucagcuacucgggaggaugaggcaggag

SEQ ID NO: 61185 - RNA, 32 nt, Human
agucucagcuacucgggaggcugaggcaggag

SEQ ID NO: 61186 - RNA, 32 nt, Human
agucucagcuacucuggagguuuagcaggagg

SEQ ID NO: 61187 - RNA, 32 nt, Human
agucucagcuacuuaggagaaugaggugggag

SEQ ID NO: 61188 - RNA, 32 nt, Human
agucucagcuacuuaggaggcugagguggcag

SEQ ID NO: 61189 - RNA, 32 nt, Human
agucucagcuacuuaggaggcugaggugggag

SEQ ID NO: 61190 - RNA, 32 nt, Human
agucucagcuacuugggaggccauggugggag

SEQ ID NO: 61191 - RNA, 32 nt, Human
agucucagcuacuugggaggcugaggcacaag

SEQ ID NO: 61192 - RNA, 32 nt, Human
agucucagcuacuugggaggcugaggcaggag

SEQ ID NO: 61193 - RNA, 32 nt, Human
agucucagcuaguuggggagcuaaggugggag

SEQ ID NO: 61194 - RNA, 32 nt, Human
agucucagcuuauccuggagggaauugggaac

SEQ ID NO: 61195 - RNA, 32 nt, Human
agucucagcuuggccaaggccugucacugacu

SEQ ID NO: 61196 - RNA, 32 nt, Human
agucucaggaagagcuugguacuuguggggac

SEQ ID NO: 61197 - RNA, 32 nt, Human
agucucaggcagggacagacccagaaagaaca

SEQ ID NO: 61198 - RNA, 32 nt, Human
agucucaguucugcagaggagcugagugcccc

SEQ ID NO: 61199 - RNA, 32 nt, Human
agucucauacaagcugucugauagagaacuuu

SEQ ID NO: 61200 - RNA, 20 nt, Human
agucucauagggccaugcug

SEQ ID NO: 61201 - RNA, 32 nt, Human
agucucauauuuaguauugaauacuuacauuc

SEQ ID NO: 61202 - RNA, 32 nt, Human
agucucaucagacucugaggucugggacgugu

SEQ ID NO: 61203 - RNA, 32 nt, Human
agucucaucugucuuucccuuuacagcacaga

SEQ ID NO: 61204 - RNA, 32 nt, Human
agucucaugcaaguugucugauagagaacuuu

SEQ ID NO: 61205 - RNA, 32 nt, Human
agucucaugccuguaaucccagcacuuuggga

SEQ ID NO: 61206 - RNA, 32 nt, Human
agucucaugguggaaaauucauuggggagagc

SEQ ID NO: 61207 - RNA, 32 nt, Human
agucuccaagcccacuugaaaagucacacuga

SEQ ID NO: 61208 - RNA, 32 nt, Human
agucuccaagccccacgaacccugaggagugg

SEQ ID NO: 61209 - RNA, 32 nt, Human
agucuccaagccccgugaacccugaggagugg

SEQ ID NO: 61210 - RNA, 32 nt, Human
agucuccaaucccaucuauucucugccuuuac

SEQ ID NO: 61211 - RNA, 32 nt, Human
agucuccaccacucccuuuugucuuucacaug

SEQ ID NO: 61212 - RNA, 32 nt, Human
agucuccacugcaaccacucuggccaaggcca

SEQ ID NO: 61213 - RNA, 32 nt, Human
agucuccagaacugugagacagugcauuuugu

SEQ ID NO: 61214 - RNA, 32 nt, Human
agucuccagaauagcugggacuauaggugcac

SEQ ID NO: 61215 - RNA, 32 nt, Human
agucuccaggaaccccagccuguuagggucac

SEQ ID NO: 61216 - RNA, 20 nt, Human
agucuccaguugggcugugc

SEQ ID NO: 61217 - RNA, 32 nt, Human
agucuccauaaaaggccuaagaggagggguuu

SEQ ID NO: 61218 - RNA, 32 nt, Human
agucucccaaaaugcugggauuacaggaguga

SEQ ID NO: 61219 - RNA, 32 nt, Human
agucucccaaaccaccuucccucaucuuucau

SEQ ID NO: 61220 - RNA, 32 nt, Human
agucucccaaagcgcugggauuacaggcagga

SEQ ID NO: 61221 - RNA, 32 nt, Human
agucucccaaagggcugggauuaaaggcauga

SEQ ID NO: 61222 - RNA, 32 nt, Human
agucucccaaaguacugggauuacaggcguga

SEQ ID NO: 61223 - RNA, 32 nt, Human
agucucccaaagugcuaggauuacagcgugau

SEQ ID NO: 61224 - RNA, 32 nt, Human
agucucccaaagugcugagauuacaggcauga

SEQ ID NO: 61225 - RNA, 32 nt, Human
agucucccaaagugcugggauuacaggcauga

SEQ ID NO: 61226 - RNA, 32 nt, Human
agucucccaaagugcugggauuacaggcguga

SEQ ID NO: 61227 - RNA, 32 nt, Human
agucucccaaagugcugggauuauaggcguaa

SEQ ID NO: 61228 - RNA, 32 nt, Human
agucucccaaagugcugguauuacaggcguga

SEQ ID NO: 61229 - RNA, 32 nt, Human
agucucccaaauugccgggauuacaggcauga

SEQ ID NO: 61230 - RNA, 32 nt, Human
agucucccaagcagcugggauuguagguacac

SEQ ID NO: 61231 - RNA, 32 nt, Human
agucucccaaguaccugggaugacaggcgccu

SEQ ID NO: 61232 - RNA, 32 nt, Human
agucucccaaguagcagggauuacaggcaugc

SEQ ID NO: 61233 - RNA, 32 nt, Human
agucucccaaguagcugaaauuacaggagccu

SEQ ID NO: 61234 - RNA, 32 nt, Human
agucucccaaguagcugggacuacaagcaugc

SEQ ID NO: 61235 - RNA, 32 nt, Human
agucucccaaguagcugggacuacaggcaggu

SEQ ID NO: 61236 - RNA, 32 nt, Human
agucucccaaguagcugggacuacagguacgu

SEQ ID NO: 61237 - RNA, 32 nt, Human
agucucccaaguagcugggacuauaggcacgu

SEQ ID NO: 61238 - RNA, 32 nt, Human
agucucccaaguagcugggacuauuuugcaug

SEQ ID NO: 61239 - RNA, 32 nt, Human
agucucccaaguagcugggauuacaggugugc

SEQ ID NO: 61240 - RNA, 32 nt, Human
agucucccaaguagcugggauuacaggugugu

SEQ ID NO: 61241 - RNA, 32 nt, Human
agucucccaaguagcugggauuauaggcaucc

SEQ ID NO: 61242 - RNA, 32 nt, Human
agucucccaaguagcugggguuacaggugcac

SEQ ID NO: 61243 - RNA, 32 nt, Human
agucucccaaguagcuuggauuacaggugagc

SEQ ID NO: 61244 - RNA, 32 nt, Human
agucucccaaguaggugggacuacaggcgcac

SEQ ID NO: 61245 - RNA, 32 nt, Human
agucucccacauagcugggaauacaggugcgc

SEQ ID NO: 61246 - RNA, 32 nt, Human
agucucccagcaccucugacucagcuuggcca

SEQ ID NO: 61247 - RNA, 32 nt, Human
agucucccaggagaggaugcacucgguggugg

SEQ ID NO: 61248 - RNA, 32 nt, Human
agucucccagguagcugggauuacaggcaugu

SEQ ID NO: 61249 - RNA, 32 nt, Human
agucucccagugggugaugcuuuugcugcugc

SEQ ID NO: 61250 - RNA, 32 nt, Human
agucuccccauguucugcucacuccugucucc

SEQ ID NO: 61251 - RNA, 32 nt, Human
agucucccccuuccuccugugcccuccccuuc

SEQ ID NO: 61252 - RNA, 32 nt, Human
agucuccccgagugccuggauuacaggcauga

SEQ ID NO: 61253 - RNA, 32 nt, Human
agucuccccugcccccugcccccuggaguggc

SEQ ID NO: 61254 - RNA, 32 nt, Human
agucuccccugcccucccggguagagcuggga

SEQ ID NO: 61255 - RNA, 32 nt, Human
agucucccgaagugcugggauuacagauguga

SEQ ID NO: 61256 - RNA, 32 nt, Human
agucucccgaagugcugggauuacugacauga

SEQ ID NO: 61257 - RNA, 32 nt, Human
agucucccgacuagcugggacuacaggcgccc

SEQ ID NO: 61258 - RNA, 32 nt, Human
agucucccgaguagcuaggauuacagaugugc

SEQ ID NO: 61259 - RNA, 32 nt, Human
agucucccgaguagcugggacuacaggcaccu

SEQ ID NO: 61260 - RNA, 32 nt, Human
agucucccgaguagcugggauuacaggcacuu

SEQ ID NO: 61261 - RNA, 32 nt, Human
agucucccgaguagcugggauuacaggcgugc

SEQ ID NO: 61262 - RNA, 32 nt, Human
agucucccgaguagcugggauuauaggcgccc

SEQ ID NO: 61263 - RNA, 32 nt, Human
agucucccgaguaguggaaauuacaggugugu

SEQ ID NO: 61264 - RNA, 32 nt, Human
agucucccuaagugcugggauuacagacguga

SEQ ID NO: 61265 - RNA, 32 nt, Human
agucucccuauguugcccaggcuggucuccaa

SEQ ID NO: 61266 - RNA, 16 nt, Human
agucucccuccaggaa

SEQ ID NO: 61267 - RNA, 32 nt, Human
agucucccuccaggaaaggccugaggaugugu

SEQ ID NO: 61268 - RNA, 32 nt, Human
agucucccuccccugacucccucugcuguccu

SEQ ID NO: 61269 - RNA, 32 nt, Human
agucucccuucccaucuccuguguccuggcug

SEQ ID NO: 61270 - RNA, 32 nt, Human
agucuccgccuucuguucuucuugccgaccuu

SEQ ID NO: 61271 - RNA, 32 nt, Human
agucuccggcucucuccugcaggaucggucaa

SEQ ID NO: 61272 - RNA, 32 nt, Human
agucuccuaaagugcugggauuacauguguga

SEQ ID NO: 61273 - RNA, 32 nt, Human
agucuccuaugggagcaaguugauucuaggug

SEQ ID NO: 61274 - RNA, 32 nt, Human
agucuccucaaaggaaggcagcauguguccuu

SEQ ID NO: 61275 - RNA, 32 nt, Human
agucuccucagacauagucaaagcuuugccga

SEQ ID NO: 61276 - RNA, 32 nt, Human
agucuccucaguagcuggggcuuuaggugggc

SEQ ID NO: 61277 - RNA, 32 nt, Human
agucuccuccaggcugacauuuccucaaucuu

SEQ ID NO: 61278 - RNA, 18 nt, Human
agucuccuccccuacucu

SEQ ID NO: 61279 - RNA, 32 nt, Human
agucuccucggaacaggggugaggggucgacu

SEQ ID NO: 61280 - RNA, 19 nt, Human
agucuccucucuaccgcca

SEQ ID NO: 61281 - RNA, 32 nt, Human
agucuccucuuucugaagcuuccugugccacc

SEQ ID NO: 61282 - RNA, 32 nt, Human
agucuccugacuagcugggacuacaggugcau

SEQ ID NO: 61283 - RNA, 32 nt, Human
agucuccugagcagcugggauuacaggcaaac

SEQ ID NO: 61284 - RNA, 32 nt, Human
agucuccugaguagccgggacuacaggcaugc

SEQ ID NO: 61285 - RNA, 32 nt, Human
agucuccugaguagcuaggacuacaggcacac

SEQ ID NO: 61286 - RNA, 32 nt, Human
agucuccugaguagcugagacuacagcugugc

SEQ ID NO: 61287 - RNA, 32 nt, Human
agucuccugaguagcugagacuacaggcacgc

SEQ ID NO: 61288 - RNA, 32 nt, Human
agucuccugaguagcuggaacuacaaggaagg

SEQ ID NO: 61289 - RNA, 32 nt, Human
agucuccugaguagcuggaacuacaggugugc

SEQ ID NO: 61290 - RNA, 32 nt, Human
agucuccugaguagcugggacuacaggugcgu

SEQ ID NO: 61291 - RNA, 32 nt, Human
agucuccugaguagcugggacugcaggcaugc

SEQ ID NO: 61292 - RNA, 32 nt, Human
agucuccugaguagcugggaucacaggcaugc

SEQ ID NO: 61293 - RNA, 32 nt, Human
agucuccugaguagcugggaucacagggacca

SEQ ID NO: 61294 - RNA, 32 nt, Human
agucuccugaguagcugggaugacaggcacgc

SEQ ID NO: 61295 - RNA, 32 nt, Human
agucuccugaguagcugggauuacaggcaccc

SEQ ID NO: 61296 - RNA, 32 nt, Human
agucuccugaguagcugggauuacaggugccc

SEQ ID NO: 61297 - RNA, 32 nt, Human
agucuccugaguagcugggauuacgggugcgu

SEQ ID NO: 61298 - RNA, 32 nt, Human
agucuccugaguaguugacggcuagcggggag

SEQ ID NO: 61299 - RNA, 32 nt, Human
agucuccugaguaucuaggacuacaggcccgc

SEQ ID NO: 61300 - RNA, 32 nt, Human
agucuccugaugcugagaugaauagacugggu

SEQ ID NO: 61301 - RNA, 32 nt, Human
agucuccugccucagccuucugaguagcuggg

SEQ ID NO: 61302 - RNA, 32 nt, Human
agucuccugccugcuugccaaaagcuaggaug

SEQ ID NO: 61303 - RNA, 32 nt, Human
agucuccugcuagucugacuccugaagcauca

SEQ ID NO: 61304 - RNA, 32 nt, Human
agucuccuggagggagauguuuaagagggguu

SEQ ID NO: 61305 - RNA, 21 nt, Human
agucuccugggaagcugugcc

SEQ ID NO: 61306 - RNA, 32 nt, Human
agucuccuuuccaacaggaugaugcauuugcu

SEQ ID NO: 61307 - RNA, 32 nt, Human
agucuccuuuggugauguugugggauuuuauu

SEQ ID NO: 61308 - RNA, 32 nt, Human
agucucgacuagggcaguagccccaggacucc

SEQ ID NO: 61309 - RNA, 32 nt, Human
agucucgcuauccucaaaauaugccgugugua

SEQ ID NO: 61310 - RNA, 32 nt, Human
agucucgcucugcacuccagccuggcgacuga

SEQ ID NO: 61311 - RNA, 32 nt, Human
agucucgcucugucucccagguuggagugcag

SEQ ID NO: 61312 - RNA, 32 nt, Human
agucucgcugggacagcaagaaacaggaacac

SEQ ID NO: 61313 - RNA, 32 nt, Human
agucucggacuccggcccaggagcucagcguu

SEQ ID NO: 61314 - RNA, 22 nt, Human
agucucggcgagaggaguccuc

SEQ ID NO: 61315 - RNA, 22 nt, Human
agucucggcuggagugcagugg

SEQ ID NO: 61316 - RNA, 32 nt, Human
agucucgggcccacagucaccgccgcuuaccu

SEQ ID NO: 61317 - RNA, 32 nt, Human
agucucguuccuuugugcugcggcggcggcuu

SEQ ID NO: 61318 - RNA, 32 nt, Human
agucucguugagaccaccaccauaccucagaa

SEQ ID NO: 61319 - RNA, 32 nt, Human
agucucuaaguuggcaacuuuggcugaacaaa

SEQ ID NO: 61320 - RNA, 32 nt, Human
agucucuacagcuguuucccucuuuucccauc

SEQ ID NO: 61321 - RNA, 32 nt, Human
agucucuaccuccagggaaagccuucuuacca

SEQ ID NO: 61322 - RNA, 32 nt, Human
agucucuacuaaaaauacaaaaauuagccagg

SEQ ID NO: 61323 - RNA, 32 nt, Human
agucucuacuaaaaauacaaaaauuagcccgg

SEQ ID NO: 61324 - RNA, 32 nt, Human
agucucuacuaaaaauacaaaaauuagcuagg

SEQ ID NO: 61325 - RNA, 32 nt, Human
agucucuacuaaaaauacaaaaauuagcuggg

SEQ ID NO: 61326 - RNA, 32 nt, Human
agucucuacuaaaaauacaaaaauuagucagg

SEQ ID NO: 61327 - RNA, 32 nt, Human
agucucuacuaauaauacaaaaauuagcuggg

SEQ ID NO: 61328 - RNA, 32 nt, Human
agucucuacugaaaauacagaaaaguuagcca

SEQ ID NO: 61329 - RNA, 32 nt, Human
agucucuacuuaaaauacaaaaauuagccagg

SEQ ID NO: 61330 - RNA, 32 nt, Human
agucucuaggaacccccagguccuggugcugc

SEQ ID NO: 61331 - RNA, 32 nt, Human
agucucuagucgugcacauuccugggccucag

SEQ ID NO: 61332 - RNA, 32 nt, Human
agucucucaaagugcugggauuacaggcauga

SEQ ID NO: 61333 - RNA, 32 nt, Human
agucucucaaagugcugggauuacagguguga

SEQ ID NO: 61334 - RNA, 32 nt, Human
agucucucagugaggaaugagaggccagcuuc

SEQ ID NO: 61335 - RNA, 32 nt, Human
agucucuccagaaguuuuuaaggcuacauuuu

SEQ ID NO: 61336 - RNA, 32 nt, Human
agucucuccagccucacagaugcuggccucuu

SEQ ID NO: 61337 - RNA, 32 nt, Human
agucucuccucccuagcgcucuggguccuuaa

SEQ ID NO: 61338 - RNA, 32 nt, Human
agucucucuaguagcuggaauuauaggcacac

SEQ ID NO: 61339 - RNA, 32 nt, Human
agucucucucacccuucuaggcagugcaucag

SEQ ID NO: 61340 - RNA, 32 nt, Human
agucucucugcacuccagccugggugacagag

SEQ ID NO: 61341 - RNA, 32 nt, Human
agucucucuuucucccgggccucccuucuguu

SEQ ID NO: 61342 - RNA, 32 nt, Human
agucucugaagccucaucagucaccgggacug

SEQ ID NO: 61343 - RNA, 32 nt, Human
agucucugacuccagccgcacaccuccugccu

SEQ ID NO: 61344 - RNA, 20 nt, Human
agucucugcagccugcucca

SEQ ID NO: 61345 - RNA, 32 nt, Human
agucucugccauccacaaugcuuguguucuaa

SEQ ID NO: 61346 - RNA, 31 nt, Human
agucucugccucuuucgccuaguaucucugc

SEQ ID NO: 61347 - RNA, 32 nt, Human
agucucuggcaguucuggaauggaaggguucu

SEQ ID NO: 61348 - RNA, 32 nt, Human
agucucuggcccacaucaguguuuucaguaag

SEQ ID NO: 61349 - RNA, 32 nt, Human
agucucugggcuugcccugaaauuacucgcug

SEQ ID NO: 61350 - RNA, 31 nt, Human
agucucugguggcagcuucuaccucagccaa

SEQ ID NO: 61351 - RNA, 32 nt, Human
agucucugucucuaucugaaaccuuuuugaag

SEQ ID NO: 61352 - RNA, 19 nt, Human
agucucuguugcugugcug

SEQ ID NO: 61353 - RNA, 32 nt, Human
agucucuuacccaggcuagggugcaguggugu

SEQ ID NO: 61354 - RNA, 32 nt, Human
agucucuuauucacccuggaccaacagggaga

SEQ ID NO: 61355 - RNA, 32 nt, Human
agucucuucaacccucuucucacuuuuuaaaa

SEQ ID NO: 61356 - RNA, 32 nt, Human
agucucuucccuuuaaaccuuucuuuuucucu

SEQ ID NO: 61357 - RNA, 32 nt, Human
agucucuuccuccuccuccucuucucuccacc

SEQ ID NO: 61358 - RNA, 32 nt, Human
agucucuucgaggcuuuacaguguaaacuguc

SEQ ID NO: 61359 - RNA, 21 nt, Human
agucucuucucuguauuauca

SEQ ID NO: 61360 - RNA, 32 nt, Human
agucucuugaagcauaccucaaagucauagag

SEQ ID NO: 61361 - RNA, 32 nt, Human
agucucuugaguagcugagauuacagguacgc

SEQ ID NO: 61362 - RNA, 32 nt, Human
agucucuugaguagcugggacuucaggagacu

SEQ ID NO: 61363 - RNA, 32 nt, Human
agucucuugccccaggaaaccccaucaguccc

SEQ ID NO: 61364 - RNA, 32 nt, Human
agucucuugggaaguguguuuagaaggguuca

SEQ ID NO: 61365 - RNA, 32 nt, Human
agucucuugugcuaaauuuggccaaagaugau

SEQ ID NO: 61366 - RNA, 32 nt, Human
agucucuuuccccagccaccccucucaucgcc

SEQ ID NO: 61367 - RNA, 32 nt, Human
agucucuuugggccagccgggcugcugcagac

SEQ ID NO: 61368 - RNA, 32 nt, Human
agucucuuuugccauguaaggcaacauucaca

SEQ ID NO: 61369 - RNA, 32 nt, Human
agucucuuuuuacacuucaccuccuucugcag

SEQ ID NO: 61370 - RNA, 32 nt, Human
agucucuuuuucuuccucucggcuggaagaac

SEQ ID NO: 61371 - RNA, 21 nt, Human
agucugaaacaaaguaguaaa

SEQ ID NO: 61372 - RNA, 32 nt, Human
agucugaagaaauggcacagggacagugaaug

SEQ ID NO: 61373 - RNA, 32 nt, Human
agucugaagaggaugugcugugguguauugag

SEQ ID NO: 61374 - RNA, 32 nt, Human
agucugaagcacucucgcacacacagugauuc

SEQ ID NO: 61375 - RNA, 18 nt, Human
agucugaagcuggggaga

SEQ ID NO: 61376 - RNA, 32 nt, Human
agucugaaggcugggagcucuuggggcugggc

SEQ ID NO: 61377 - RNA, 20 nt, Human
agucugaaucacugcuguca

SEQ ID NO: 61378 - RNA, 32 nt, Human
agucugaauguucuuugaaaauaacuggaguu

SEQ ID NO: 61379 - RNA, 32 nt, Human
agucugacccuccgccaggcaaaaggaagauu

SEQ ID NO: 61380 - RNA, 32 nt, Human
agucugaccucaguccucccucccucuguugu

SEQ ID NO: 61381 - RNA, 32 nt, Human
agucugagauggcuacauucauuauggacaaa

SEQ ID NO: 61382 - RNA, 32 nt, Human
agucugagcaccuugaggccuccuguuggaaa

SEQ ID NO: 61383 - RNA, 23 nt, Human
agucugagccacugccuuuccca

SEQ ID NO: 61384 - RNA, 32 nt, Human
agucugagcuacucaggaggcugauguaugag

SEQ ID NO: 61385 - RNA, 32 nt, Human
agucugaggcggagggaguaauggcaggacaa

SEQ ID NO: 61386 - RNA, 32 nt, Human
agucugagggcugcuugguguagucagguugu

SEQ ID NO: 61387 - RNA, 32 nt, Human
agucugaggguuccgguugucuuggccugaga

SEQ ID NO: 61388 - RNA, 32 nt, Human
agucugagguacacaucauauugccuacagcc

SEQ ID NO: 61389 - RNA, 23 nt, Human
agucugaguggcagaagcuucaa

SEQ ID NO: 61390 - RNA, 32 nt, Human
agucugagugguuccagcagggaagacaaaug

SEQ ID NO: 61391 - RNA, 32 nt, Human
agucugaguuacucgggagggaaaagugcagc

SEQ ID NO: 61392 - RNA, 32 nt, Human
agucugaguuucuggcguuccaugccucuggg

SEQ ID NO: 61393 - RNA, 32 nt, Human
agucugaucaaaucgugaaguaauacagugaa

SEQ ID NO: 61394 - RNA, 32 nt, Human
agucugaucuuuugacuucuacauauagugga

SEQ ID NO: 61395 - RNA, 32 nt, Human
agucugaugaggaugugcugugguguauugag

SEQ ID NO: 61396 - RNA, 32 nt, Human
agucugaugcagagccugcacucuggcacucg

SEQ ID NO: 61397 - RNA, 19 nt, Human
agucugaugccugcuuccc

SEQ ID NO: 61398 - RNA, 32 nt, Human
agucugauguaggggcaaagagacuggcuuuu

SEQ ID NO: 61399 - RNA, 19 nt, Human
agucugauuggcaccggcu

SEQ ID NO: 61400 - RNA, 32 nt, Human
agucugauuugcuucuugaaggauuuaauaac

SEQ ID NO: 61401 - RNA, 18 nt, Human
agucugauuuuaucguca

SEQ ID NO: 61402 - RNA, 32 nt, Human
agucugcaauuuaugccuacaggccagcagcu

SEQ ID NO: 61403 - RNA, 32 nt, Human
agucugcacaugcagcugcacccucccuccga

SEQ ID NO: 61404 - RNA, 32 nt, Human
agucugcacaugcuucugucugagugcaggaa

SEQ ID NO: 61405 - RNA, 32 nt, Human
agucugcacugagcuuggcucaggaaagaagg

SEQ ID NO: 61406 - RNA, 32 nt, Human
agucugcacuggagcugccuggugaccagaag

SEQ ID NO: 61407 - RNA, 32 nt, Human
agucugcagccccuccaccaucccacauccuc

SEQ ID NO: 61408 - RNA, 32 nt, Human
agucugcagugagccgagaucaugccacugca

SEQ ID NO: 61409 - RNA, 32 nt, Human
agucugcagugggcuaugguuucuugacaagu

SEQ ID NO: 61410 - RNA, 32 nt, Human
agucugccacccaggcuggaguccaguggcgu

SEQ ID NO: 61411 - RNA, 32 nt, Human
agucugccagccacacugggaaaacauuggag

SEQ ID NO: 61412 - RNA, 32 nt, Human
agucugcccugccuuuuccuuucgggcaccac

SEQ ID NO: 61413 - RNA, 32 nt, Human
agucugcccuucugauagccugccucacagag

SEQ ID NO: 61414 - RNA, 32 nt, Human
agucugccgaguagcugggauuacaggcaugc

SEQ ID NO: 61415 - RNA, 32 nt, Human
agucugccuauccuggccaggugugguggcuc

SEQ ID NO: 61416 - RNA, 32 nt, Human
agucugccucccagacuggcuacuguauguaa

SEQ ID NO: 61417 - RNA, 32 nt, Human
agucugccuccccuaugggacucccuucuacc

SEQ ID NO: 61418 - RNA, 32 nt, Human
agucugcgaucuagcccagaauccgcgauccc

SEQ ID NO: 61419 - RNA, 32 nt, Human
agucugcgcugcgaagucugggagacacucua

SEQ ID NO: 61420 - RNA, 32 nt, Human
agucugcgcuguggcccugccucugcccagcg

SEQ ID NO: 61421 - RNA, 32 nt, Human
agucugcggucugaggcucuuuggguucagac

SEQ ID NO: 61422 - RNA, 20 nt, Human
agucugcucuggcugugcug

SEQ ID NO: 61423 - RNA, 19 nt, Human
agucugcugaagcugugcc

SEQ ID NO: 61424 - RNA, 32 nt, Human
agucugcugcagaugaccucaugaacuggaag

SEQ ID NO: 61425 - RNA, 32 nt, Human
agucugcugcagcugccagaaaacaugccuac

SEQ ID NO: 61426 - RNA, 32 nt, Human
agucugcugcgagcacgacuccgcccuuggca

SEQ ID NO: 61427 - RNA, 18 nt, Human
agucugcugcuauuauua

SEQ ID NO: 61428 - RNA, 32 nt, Human
agucugcugucaggagagauggcugaaaaggu

SEQ ID NO: 61429 - RNA, 20 nt, Human
agucugcuuucucuacuguc

SEQ ID NO: 61430 - RNA, 31 nt, Human
agucugcuuuugaaggagguagggaaugaca

SEQ ID NO: 61431 - RNA, 32 nt, Human
agucuggaaaauuuguugaauguacugagcaa

SEQ ID NO: 61432 - RNA, 32 nt, Human
agucuggaagcagcagaacugaaggaaguaaa

SEQ ID NO: 61433 - RNA, 32 nt, Human
agucuggaauacuuccugucaucugccccuuc

SEQ ID NO: 61434 - RNA, 19 nt, Human
agucuggacuucaacaaga

SEQ ID NO: 61435 - RNA, 32 nt, Human
agucuggagaaagggucucccuugucuggccu

SEQ ID NO: 61436 - RNA, 32 nt, Human
agucuggagacugggagccuucacuucggccu

SEQ ID NO: 61437 - RNA, 32 nt, Human
agucuggagagcaggcaucucagaucccuaag

SEQ ID NO: 61438 - RNA, 32 nt, Human
agucuggagaugggaagucaaagaccaaagua

SEQ ID NO: 61439 - RNA, 32 nt, Human
agucuggagcccagaagggacacaccagcaca

SEQ ID NO: 61440 - RNA, 32 nt, Human
agucuggaggacgcugagggcggaggcgggag

SEQ ID NO: 61441 - RNA, 32 nt, Human
agucuggauccagcagugcuguuuucccugag

SEQ ID NO: 61442 - RNA, 32 nt, Human
agucuggcaaggugaugaccagcuggagagag

SEQ ID NO: 61443 - RNA, 32 nt, Human
agucuggcaccucuuucuucugaccucagacg

SEQ ID NO: 61444 - RNA, 32 nt, Human
agucuggcaggaagaggcaggaagggagagaa

SEQ ID NO: 61445 - RNA, 18 nt, Human
agucuggcaggcaggaga

SEQ ID NO: 61446 - RNA, 32 nt, Human
agucuggcagggucuccuagcugcuaguauag

SEQ ID NO: 61447 - RNA, 18 nt, Human
agucuggccaaaacggua

SEQ ID NO: 61448 - RNA, 21 nt, Human
agucuggccaacaucgugaaa

SEQ ID NO: 61449 - RNA, 21 nt, Human
agucuggccaacauggagaaa

SEQ ID NO: 61450 - RNA, 21 nt, Human
agucuggccaacauggcgaaa

SEQ ID NO: 61451 - RNA, 21 nt, Human
agucuggccaacauggggaaa

SEQ ID NO: 61452 - RNA, 21 nt, Human
agucuggccaacauggugaaa

SEQ ID NO: 61453 - RNA, 21 nt, Human
agucuggccaaccuggugaaa

SEQ ID NO: 61454 - RNA, 21 nt, Human
agucuggccaauauggugaaa

SEQ ID NO: 61455 - RNA, 32 nt, Human
agucuggccacugucaaggcagggaaggggcc

SEQ ID NO: 61456 - RNA, 32 nt, Human
agucuggccagccuggcccugcaggucuccca

SEQ ID NO: 61457 - RNA, 21 nt, Human
agucuggcccacauggugaaa

SEQ ID NO: 61458 - RNA, 32 nt, Human
agucuggccuagaacuccuggccucaacugau

SEQ ID NO: 61459 - RNA, 32 nt, Human
agucuggccuuucccaugcugcccucggccug

SEQ ID NO: 61460 - RNA, 32 nt, Human
agucuggcgacugccccacgcccagccguggg

SEQ ID NO: 61461 - RNA, 32 nt, Human
agucuggcuacuuugcugaagagaccacauga

SEQ ID NO: 61462 - RNA, 32 nt, Human
agucuggcuccggucacucuucuggcuuaggu

SEQ ID NO: 61463 - RNA, 32 nt, Human
agucuggcucucugucgcccaggcuggagugc

SEQ ID NO: 61464 - RNA, 32 nt, Human
agucugggaacaaagagaggagccagccuccc

SEQ ID NO: 61465 - RNA, 32 nt, Human
agucugggacacccucccuacuuugagaaucc

SEQ ID NO: 61466 - RNA, 23 nt, Human
agucugggacauccuggacuuga

SEQ ID NO: 61467 - RNA, 32 nt, Human
agucugggagaaggaggcuacagugagcugug

SEQ ID NO: 61468 - RNA, 32 nt, Human
agucugggagagaacacagggagccagccgug

SEQ ID NO: 61469 - RNA, 32 nt, Human
agucugggaggcagguuuccaagagcagggac

SEQ ID NO: 61470 - RNA, 26 nt, Human
agucugggaggcggagguugcaguga

SEQ ID NO: 61471 - RNA, 32 nt, Human
agucugggaggcggagguugcagugagcugag

SEQ ID NO: 61472 - RNA, 32 nt, Human
agucugggagggcaugggagcagugagcaggc

SEQ ID NO: 61473 - RNA, 32 nt, Human
agucugggagguggaggcugcagugagccgug

SEQ ID NO: 61474 - RNA, 32 nt, Human
agucugggagguugaggcugcagugagcugug

SEQ ID NO: 61475 - RNA, 18 nt, Human
agucugggaguaaggaga

SEQ ID NO: 61476 - RNA, 18 nt, Human
agucugggagugaggaga

SEQ ID NO: 61477 - RNA, 32 nt, Human
agucugggagugagggaaggaggcaggggugc

SEQ ID NO: 61478 - RNA, 32 nt, Human
agucugggaugccauauacaaaaguuugggcu

SEQ ID NO: 61479 - RNA, 32 nt, Human
agucugggauucaaggaccaguuccagagagg

SEQ ID NO: 61480 - RNA, 32 nt, Human
agucugggcacuggcuggucucugccugaccc

SEQ ID NO: 61481 - RNA, 32 nt, Human
agucugggcccaggcugugaguuccaggucug

SEQ ID NO: 61482 - RNA, 32 nt, Human
agucugggcgacagagugagacuccaucucaa

SEQ ID NO: 61483 - RNA, 32 nt, Human
agucugggcucugccauuucauuuuuccccac

SEQ ID NO: 61484 - RNA, 32 nt, Human
agucugggcuggauucucccuccagucucugg

SEQ ID NO: 61485 - RNA, 32 nt, Human
agucugggcuuggccagagcucagggugcuga

SEQ ID NO: 61486 - RNA, 25 nt, Human
agucuggggaggagagagacuggaa

SEQ ID NO: 61487 - RNA, 32 nt, Human
agucugggggccuggaacaggagagcgggcgu

SEQ ID NO: 61488 - RNA, 32 nt, Human
agucuggguagggcccuuugaggcagaggguc

SEQ ID NO: 61489 - RNA, 32 nt, Human
agucugggucccauccagacccuccucuccaa

SEQ ID NO: 61490 - RNA, 32 nt, Human
agucuggguggguggagggcaggcagguggcu

SEQ ID NO: 61491 - RNA, 32 nt, Human
agucugguauccugagcuucgugaguugagcg

SEQ ID NO: 61492 - RNA, 21 nt, Human
agucuggucaacauggugaaa

SEQ ID NO: 61493 - RNA, 32 nt, Human
agucuggucccuuuggggaauguggcagucag

SEQ ID NO: 61494 - RNA, 32 nt, Human
agucuggucuagaacuccugacgucaggugau

SEQ ID NO: 61495 - RNA, 32 nt, Human
agucuggucucaaacucccgaccucaggugau

SEQ ID NO: 61496 - RNA, 32 nt, Human
agucuggucucaaacuccugaccucaaggauc

SEQ ID NO: 61497 - RNA, 32 nt, Human
agucuggucuccuauagauuguuuucacugca

SEQ ID NO: 61498 - RNA, 32 nt, Human
agucuggucucgaacucugaccuugugaucca

SEQ ID NO: 61499 - RNA, 32 nt, Human
agucuggucuugaauuccugaccucaagugau

SEQ ID NO: 61500 - RNA, 32 nt, Human
agucugguuugagcaagcgagcugaaugugac

SEQ ID NO: 61501 - RNA, 23 nt, Human
agucuguaaccccaaguguaaug

SEQ ID NO: 61502 - RNA, 32 nt, Human
agucuguaagcuccuuaagaguaggguugugc

SEQ ID NO: 61503 - RNA, 22 nt, Human
agucuguacaccuuuauuauua

SEQ ID NO: 61504 - RNA, 32 nt, Human
agucuguauuacuucaggcuugugggcaaggu

SEQ ID NO: 61505 - RNA, 32 nt, Human
agucugucaacgggagggcagcagggaacaag

SEQ ID NO: 61506 - RNA, 32 nt, Human
agucugucaccaggcuggagugcaguggcaug

SEQ ID NO: 61507 - RNA, 32 nt, Human
agucugucacccaggcuggagugaucucagcu

SEQ ID NO: 61508 - RNA, 32 nt, Human
agucugucacccaggcuggagugcaguggcgu

SEQ ID NO: 61509 - RNA, 32 nt, Human
agucugucacccagguuggagugcaguggcgu

SEQ ID NO: 61510 - RNA, 32 nt, Human
agucugucaguggcauaaugguaacuaucuug

SEQ ID NO: 61511 - RNA, 32 nt, Human
agucuguccacuuugaaaauaccuuuccaggc

SEQ ID NO: 61512 - RNA, 19 nt, Human
agucugucccauacuguua

SEQ ID NO: 61513 - RNA, 22 nt, Human
agucuguccgaccguaccauua

SEQ ID NO: 61514 - RNA, 20 nt, Human
agucuguccucacugccauc

SEQ ID NO: 61515 - RNA, 32 nt, Human
agucugucgugcaccgaugagaacucuccuua

SEQ ID NO: 61516 - RNA, 32 nt, Human
agucugucuaccuuuagccaggcacaggacag

SEQ ID NO: 61517 - RNA, 18 nt, Human
agucugucucccgccguc

SEQ ID NO: 61518 - RNA, 32 nt, Human
agucugucugagguccuuaugaagcacugcug

SEQ ID NO: 61519 - RNA, 32 nt, Human
agucugucuggcuuuucuccuaucuugcuucu

SEQ ID NO: 61520 - RNA, 21 nt, Human
agucugucugucuguccauua

SEQ ID NO: 61521 - RNA, 18 nt, Human
agucugucugugcucuca

SEQ ID NO: 61522 - RNA, 18 nt, Human
agucugucuucaacuauu

SEQ ID NO: 61523 - RNA, 17 nt, Human
agucugucuuuaacaca

SEQ ID NO: 61524 - RNA, 32 nt, Human
agucugucuuucuccgcucuucucugaccccu

SEQ ID NO: 61525 - RNA, 32 nt, Human
agucugugaccugccccuucucuuuacaugca

SEQ ID NO: 61526 - RNA, 32 nt, Human
agucugugagcugauagugcagccaggacucu

SEQ ID NO: 61527 - RNA, 32 nt, Human
agucugugagcugauagugcagccaggacuug

SEQ ID NO: 61528 - RNA, 32 nt, Human
agucugugaggggagagcagagagcagaaccu

SEQ ID NO: 61529 - RNA, 32 nt, Human
agucugugcacaucugcucacaguugaguggg

SEQ ID NO: 61530 - RNA, 19 nt, Human
agucugugccuuugccguu

SEQ ID NO: 61531 - RNA, 32 nt, Human
agucugugcugucuuggcaugccuuggguuuc

SEQ ID NO: 61532 - RNA, 32 nt, Human
agucuguggaucagagaugcaccaccaagcca

SEQ ID NO: 61533 - RNA, 32 nt, Human
agucuguggccugaggugucugcucugggugg

SEQ ID NO: 61534 - RNA, 32 nt, Human
agucugugggguacgccauggugcaggcugcu

SEQ ID NO: 61535 - RNA, 32 nt, Human
agucugugggugaauggauguguguugaauuu

SEQ ID NO: 61536 - RNA, 20 nt, Human
agucuguggucuuugcauca

SEQ ID NO: 61537 - RNA, 32 nt, Human
agucuguguauccuuuuuccucuggcucuaca

SEQ ID NO: 61538 - RNA, 32 nt, Human
agucugugucaaaagagcuucucuccagagua

SEQ ID NO: 61539 - RNA, 19 nt, Human
agucugugugagcuaguuu

SEQ ID NO: 61540 - RNA, 32 nt, Human
agucugugugcuggugcaaggucugggacaaa

SEQ ID NO: 61541 - RNA, 32 nt, Human
agucuguguguagggagagagcugaguaggag

SEQ ID NO: 61542 - RNA, 32 nt, Human
agucuguguugaucuaauaauuuuggauaaag

SEQ ID NO: 61543 - RNA, 32 nt, Human
agucuguuacaccauuuagaacuuuccucagc

SEQ ID NO: 61544 - RNA, 18 nt, Human
agucuguuaccacuauua

SEQ ID NO: 61545 - RNA, 18 nt, Human
agucuguuauaugcauua

SEQ ID NO: 61546 - RNA, 19 nt, Human
agucuguuauuuauuauua

SEQ ID NO: 61547 - RNA, 16 nt, Human
agucuguucgcuauua

SEQ ID NO: 61548 - RNA, 18 nt, Human
agucuguucuagccagca

SEQ ID NO: 61549 - RNA, 32 nt, Human
agucuguucucacaccugugcgcagguuugca

SEQ ID NO: 61550 - RNA, 32 nt, Human
agucuguugcccaggcuggagugcaguggcgc

SEQ ID NO: 61551 - RNA, 32 nt, Human
agucuguuggcagacuggagugcaaucauggc

SEQ ID NO: 61552 - RNA, 18 nt, Human
agucuguuuaacucuuca

SEQ ID NO: 61553 - RNA, 18 nt, Human
agucuguuuauaucaaca

SEQ ID NO: 61554 - RNA, 32 nt, Human
agucuguuucaaugcuacaauguuugcuggga

SEQ ID NO: 61555 - RNA, 32 nt, Human
agucuguuucccaggcuggaguguagugauac

SEQ ID NO: 61556 - RNA, 17 nt, Human
agucuguuuggccauua

SEQ ID NO: 61557 - RNA, 18 nt, Human
agucuguuuuccccacca

SEQ ID NO: 61558 - RNA, 32 nt, Human
agucuguuuucccuccuuggagacagggcccu

SEQ ID NO: 61559 - RNA, 32 nt, Human
agucuguuuugcaggccucugcucugccuccu

SEQ ID NO: 61560 - RNA, 18 nt, Human
agucuguuuuuucuagca

SEQ ID NO: 61561 - RNA, 32 nt, Human
agucuuacaaguggccuuauuccaacuccaga

SEQ ID NO: 61562 - RNA, 32 nt, Human
agucuuacagaaagauaugcuuccauaauaug

SEQ ID NO: 61563 - RNA, 32 nt, Human
agucuuaccuuucuagauaucaaaugugcuau

SEQ ID NO: 61564 - RNA, 32 nt, Human
agucuuacuaaagacgugggaggaaguucucc

SEQ ID NO: 61565 - RNA, 32 nt, Human
agucuuacuccaaagacuauugcagggaggaa

SEQ ID NO: 61566 - RNA, 32 nt, Human
agucuuacuuaaaagacuuucaguuaauucuc

SEQ ID NO: 61567 - RNA, 32 nt, Human
agucuuacuuggaauaaauuuacugguacaau

SEQ ID NO: 61568 - RNA, 32 nt, Human
agucuuagaaauaggguuggucuggaaccuaa

SEQ ID NO: 61569 - RNA, 32 nt, Human
agucuuagaucuuucuagagcuuguuuguuca

SEQ ID NO: 61570 - RNA, 32 nt, Human
agucuuagcaacaguccucuggucccacagcu

SEQ ID NO: 61571 - RNA, 32 nt, Human
agucuuagcuacucaggaggcugaagcagaag

SEQ ID NO: 61572 - RNA, 32 nt, Human
agucuuagcuacucaggaggcugaggagggag

SEQ ID NO: 61573 - RNA, 32 nt, Human
agucuuagcuacucaggaggcugaggcaggag

SEQ ID NO: 61574 - RNA, 32 nt, Human
agucuuaggccugguggcugaucacuuguggg

SEQ ID NO: 61575 - RNA, 32 nt, Human
agucuuaggugaucgagggugugcccaggggg

SEQ ID NO: 61576 - RNA, 32 nt, Human
agucuuauccccaaauggcauuugcuuucgac

SEQ ID NO: 61577 - RNA, 32 nt, Human
agucuuauuugcugacuuuuucugucaugagu

SEQ ID NO: 61578 - RNA, 32 nt, Human
agucuucaacuugcacucggagcuccuuugau

SEQ ID NO: 61579 - RNA, 32 nt, Human
agucuucaagccuugguucucuaaugcagcua

SEQ ID NO: 61580 - RNA, 32 nt, Human
agucuucacacaugaucccaucuugcuaaacu

SEQ ID NO: 61581 - RNA, 32 nt, Human
agucuucauaugccagaauauaagagcaagug

SEQ ID NO: 61582 - RNA, 32 nt, Human
agucuucaucaguauauccauauuaaaacgag

SEQ ID NO: 61583 - RNA, 32 nt, Human
agucuucauuuuuaaaaacaaaaaggcaggca

SEQ ID NO: 61584 - RNA, 32 nt, Human
agucuuccaagcagcugggacuacagguaccc

SEQ ID NO: 61585 - RNA, 32 nt, Human
agucuuccaaggccagaaggagggggacaacc

SEQ ID NO: 61586 - RNA, 32 nt, Human
agucuuccacacucaacugugggaugggaggg

SEQ ID NO: 61587 - RNA, 32 nt, Human
agucuuccagcaggguucugaaagcagccugc

SEQ ID NO: 61588 - RNA, 32 nt, Human
agucuuccgaguagcugggauuacaggcgugu

SEQ ID NO: 61589 - RNA, 32 nt, Human
agucuuccgcccccagcccacucucauggucc

SEQ ID NO: 61590 - RNA, 32 nt, Human
agucuuccggguagcugggacuacaggugugc

SEQ ID NO: 61591 - RNA, 32 nt, Human
agucuuccuaccugagggguucagaggcugcu

SEQ ID NO: 61592 - RNA, 32 nt, Human
agucuuccuccucugugucuucccaaggcucu

SEQ ID NO: 61593 - RNA, 32 nt, Human
agucuuccuuucuccuggcuccagccugaagu

SEQ ID NO: 61594 - RNA, 32 nt, Human
agucuucgggagaggaggaggaguaggccgcc

SEQ ID NO: 61595 - RNA, 32 nt, Human
agucuucgggaggcagaauugaagugaacaug

SEQ ID NO: 61596 - RNA, 32 nt, Human
agucuucguucuuccuccccucaguggcaguu

SEQ ID NO: 61597 - RNA, 22 nt, Human
agucuucuagauuguucuuaua

SEQ ID NO: 61598 - RNA, 32 nt, Human
agucuucuccaauguccaaaaggcuagggggu

SEQ ID NO: 61599 - RNA, 32 nt, Human
agucuucuugcagccguguggacgaaguuugg

SEQ ID NO: 61600 - RNA, 18 nt, Human
agucuucuugcugaacug

SEQ ID NO: 61601 - RNA, 32 nt, Human
agucuucuuuaauuagagugagaagaaaagag

SEQ ID NO: 61602 - RNA, 22 nt, Human
agucuugaccuuuugggcucaa

SEQ ID NO: 61603 - RNA, 32 nt, Human
agucuugacucacugcaauucugccuccuggg

SEQ ID NO: 61604 - RNA, 22 nt, Human
agucuugagcugucucuuuuca

SEQ ID NO: 61605 - RNA, 32 nt, Human
agucuugcccucccagcucaaacccuccacug

SEQ ID NO: 61606 - RNA, 32 nt, Human
agucuugcucugcuggagugcgguggugcaau

SEQ ID NO: 61607 - RNA, 32 nt, Human
agucuugcucugcuggagugcgguggugcagu

SEQ ID NO: 61608 - RNA, 32 nt, Human
agucuugcucuguagcccaggccagagugcag

SEQ ID NO: 61609 - RNA, 32 nt, Human
agucuugcucugucgccaaguuggagugcaau

SEQ ID NO: 61610 - RNA, 31 nt, Human
agucuugcucugucucccuggcuagggugug

SEQ ID NO: 61611 - RNA, 32 nt, Human
agucuugcugguacaauuugggcuaaggaguc

SEQ ID NO: 61612 - RNA, 32 nt, Human
agucuugcugugucacccaggcugccaggcug

SEQ ID NO: 61613 - RNA, 32 nt, Human
agucuugcuuauucuucuccugggcuucuuga

SEQ ID NO: 61614 - RNA, 32 nt, Human
agucuuggagacaggcauaaauuggagugggg

SEQ ID NO: 61615 - RNA, 32 nt, Human
agucuuggagagaaccaacgacuaagguagcu

SEQ ID NO: 61616 - RNA, 32 nt, Human
agucuuggcagggaaaucccuuuuggccacac

SEQ ID NO: 61617 - RNA, 32 nt, Human
agucuuggcugcagacugagccuguaccucac

SEQ ID NO: 61618 - RNA, 22 nt, Human
agucuugggcugggugcagugg

SEQ ID NO: 61619 - RNA, 32 nt, Human
agucuugguaugacaauucacugauauuuaug

SEQ ID NO: 61620 - RNA, 32 nt, Human
agucuuggugugcagccccucuccucucuguc

SEQ ID NO: 61621 - RNA, 32 nt, Human
agucuuguacacacaacuucagcuuugcauca

SEQ ID NO: 61622 - RNA, 32 nt, Human
agucuuguacuuucuaugccucccagggagcc

SEQ ID NO: 61623 - RNA, 32 nt, Human
agucuugucagaauuggccucaguguaguuaa

SEQ ID NO: 61624 - RNA, 32 nt, Human
agucuuguccacccucuccauacaagucucaa

SEQ ID NO: 61625 - RNA, 32 nt, Human
agucuuguccuccucugucaccgacuugcugu

SEQ ID NO: 61626 - RNA, 32 nt, Human
agucuuguccugagaaauguuucucuuagucu

SEQ ID NO: 61627 - RNA, 32 nt, Human
agucuugucucaaacuccugggcucaagcgau

SEQ ID NO: 61628 - RNA, 32 nt, Human
agucuugucucuucuguccauggcuguagccc

SEQ ID NO: 61629 - RNA, 24 nt, Human
agucuugugcuaugcagcaggugu

SEQ ID NO: 61630 - RNA, 32 nt, Human
agucuuguggcccaacaagaggaagcucuccc

SEQ ID NO: 61631 - RNA, 24 nt, Human
agucuuguguuaaaagcccagugu

SEQ ID NO: 61632 - RNA, 24 nt, Human
agucuuguucuuagucucuuucca

SEQ ID NO: 61633 - RNA, 32 nt, Human
agucuuguugcccaggcuggagugcaauggcg

SEQ ID NO: 61634 - RNA, 32 nt, Human
agucuuguuucccaggcuggagugcaauggca

SEQ ID NO: 61635 - RNA, 18 nt, Human
agucuuguuucuucauca

SEQ ID NO: 61636 - RNA, 32 nt, Human
agucuuuacagcugagcacauucuggcucagg

SEQ ID NO: 61637 - RNA, 19 nt, Human
agucuuuacuuugcuauua

SEQ ID NO: 61638 - RNA, 32 nt, Human
agucuuuagcuauggugacuauuguuuauuuu

SEQ ID NO: 61639 - RNA, 32 nt, Human
agucuuucaguucuccaaaagcccaauuuaau

SEQ ID NO: 61640 - RNA, 32 nt, Human
agucuuucauuucccccuuccccauuccuuua

SEQ ID NO: 61641 - RNA, 32 nt, Human
agucuuucauuugucucuugaacaaucugaaa

SEQ ID NO: 61642 - RNA, 32 nt, Human
agucuuucccagaucccuccucugggcauauu

SEQ ID NO: 61643 - RNA, 32 nt, Human
agucuuucuaacacacugagggaaagauuaaa

SEQ ID NO: 61644 - RNA, 32 nt, Human
agucuuucucccagauuccaacagucaguguu

SEQ ID NO: 61645 - RNA, 32 nt, Human
agucuuucugggguguuuauguccucagcuga

SEQ ID NO: 61646 - RNA, 32 nt, Human
agucuuucuucagaauugucaggcugggcagg

SEQ ID NO: 61647 - RNA, 32 nt, Human
agucuuugaauccagagauuuggucuuagucc

SEQ ID NO: 61648 - RNA, 32 nt, Human
agucuuugaggugaaaguggaagagcuagaug

SEQ ID NO: 61649 - RNA, 22 nt, Human
agucuuuggagcaaggcugcug

SEQ ID NO: 61650 - RNA, 32 nt, Human
agucuuuggagccauugcugaaaacucuaaaa

SEQ ID NO: 61651 - RNA, 32 nt, Human
agucuuuggccagagcagaaaucuuacuaucu

SEQ ID NO: 61652 - RNA, 32 nt, Human
agucuuuguggacagaggcaggaucaugcugg

SEQ ID NO: 61653 - RNA, 20 nt, Human
agucuuuguugcuaucauca

SEQ ID NO: 61654 - RNA, 32 nt, Human
agucuuuuacuccaugaacaugggcuauuucu

SEQ ID NO: 61655 - RNA, 32 nt, Human
agucuuuugcuuccuuucuccuuuuuacaaaa

SEQ ID NO: 61656 - RNA, 32 nt, Human
agucuuuuguguuguuuauuuucuaccugugc

SEQ ID NO: 61657 - RNA, 32 nt, Human
agucuuuuucucagcuuaguuccagagagaaa

SEQ ID NO: 61658 - RNA, 32 nt, Human
agugaaaaacuaagggcuucauucaccaucac

SEQ ID NO: 61659 - RNA, 32 nt, Human
agugaaaaagacuucgcagcagucuucauugu

SEQ ID NO: 61660 - RNA, 32 nt, Human
agugaaaaaggagcucaaagagugcucauuaa

SEQ ID NO: 61661 - RNA, 32 nt, Human
agugaaaacucauuaaacuacucaaaucuuaa

SEQ ID NO: 61662 - RNA, 32 nt, Human
agugaaaacuucccauuugucccuucaaagau

SEQ ID NO: 61663 - RNA, 32 nt, Human
agugaaaagaggagugacaggagggaaagggg

SEQ ID NO: 61664 - RNA, 32 nt, Human
agugaaaagauaacacaggucuauugacucac

SEQ ID NO: 61665 - RNA, 32 nt, Human
agugaaaagccaugcuagaauuguagugucau

SEQ ID NO: 61666 - RNA, 32 nt, Human
agugaaaagugacaguguggaccauggaauca

SEQ ID NO: 61667 - RNA, 32 nt, Human
agugaaaaguugagcgucguuuuucuuagugu

SEQ ID NO: 61668 - RNA, 32 nt, Human
agugaaaaucugagaaagaguuaauugcaaug

SEQ ID NO: 61669 - RNA, 32 nt, Human
agugaaaaugccacucuccugugccuaccaau

SEQ ID NO: 61670 - RNA, 32 nt, Human
agugaaaccaaaaugauaaauagcuuuaagaa

SEQ ID NO: 61671 - RNA, 32 nt, Human
agugaaaccaacauccagaucuauagcagagu

SEQ ID NO: 61672 - RNA, 32 nt, Human
agugaaaccccuccucuacuaaaaauacaaaa

SEQ ID NO: 61673 - RNA, 32 nt, Human
agugaaagaacucagaaggcagugccagcagc

SEQ ID NO: 61674 - RNA, 32 nt, Human
agugaaagagaaagaauggggucgguggugaa

SEQ ID NO: 61675 - RNA, 32 nt, Human
agugaaagagaaggugaaugacguccucaaga

SEQ ID NO: 61676 - RNA, 32 nt, Human
agugaaagagauggccugguggaaagccugga

SEQ ID NO: 61677 - RNA, 32 nt, Human
agugaaagcauuucucaacaauggaucccgcu

SEQ ID NO: 61678 - RNA, 32 nt, Human
agugaaagcuccaggaaacaaaauacagagcu

SEQ ID NO: 61679 - RNA, 32 nt, Human
agugaaagcuuccugaggucuccccggaagca

SEQ ID NO: 61680 - RNA, 32 nt, Human
agugaaaggaggcuggccagaggaggaaagga

SEQ ID NO: 61681 - RNA, 32 nt, Human
agugaaaguuaaugccaauagaaaaauucaag

SEQ ID NO: 61682 - RNA, 32 nt, Human
agugaaauagaaugauuugaaaccacuacugu

SEQ ID NO: 61683 - RNA, 32 nt, Human
agugaaaugcagcaucugucuccugcuucaca

SEQ ID NO: 61684 - RNA, 32 nt, Human
agugaaaugccaccuccucacccuccuacuaa

SEQ ID NO: 61685 - RNA, 31 nt, Human
agugaaaugcugcugcugccauuucaacugu

SEQ ID NO: 61686 - RNA, 32 nt, Human
agugaaauggcaguuagaccaacagaggcuug

SEQ ID NO: 61687 - RNA, 32 nt, Human
agugaaauguuuucuuugguucauccuucuuu

SEQ ID NO: 61688 - RNA, 32 nt, Human
agugaaauuucuuaccugcaaggaaagugaac

SEQ ID NO: 61689 - RNA, 31 nt, Human
agugaacaagugugcagauugucaaauaugu

SEQ ID NO: 61690 - RNA, 32 nt, Human
agugaacaauccucaggaaaagaaggaccauu

SEQ ID NO: 61691 - RNA, 32 nt, Human
agugaacacccacguuuauuccugccugcucc

SEQ ID NO: 61692 - RNA, 32 nt, Human
agugaacagaacugauuuccagcacugcuguu

SEQ ID NO: 61693 - RNA, 32 nt, Human
agugaacagcaaggaagaguguuugcacagua

SEQ ID NO: 61694 - RNA, 32 nt, Human
agugaacagcauaugcaaagguguggaaaugu

SEQ ID NO: 61695 - RNA, 32 nt, Human
agugaacaugaaguuuagcuuagagaagaaaa

SEQ ID NO: 61696 - RNA, 32 nt, Human
agugaaccaaccaaagucaccaguucagaagu

SEQ ID NO: 61697 - RNA, 32 nt, Human
agugaaccaugauugcacuccaaccugggcga

SEQ ID NO: 61698 - RNA, 32 nt, Human
agugaacccgggaggcagagcuugcagugagc

SEQ ID NO: 61699 - RNA, 32 nt, Human
agugaacccgggaggcagagguugcagugaac

SEQ ID NO: 61700 - RNA, 32 nt, Human
agugaaccgaggaggcagagcuugcagugagc

SEQ ID NO: 61701 - RNA, 32 nt, Human
agugaaccucaagggguuuuacaggaggagcu

SEQ ID NO: 61702 - RNA, 31 nt, Human
agugaacggagaaucucagccccaugggcuc

SEQ ID NO: 61703 - RNA, 32 nt, Human
agugaacuacauacugaauauccaaguucuca

SEQ ID NO: 61704 - RNA, 32 nt, Human
agugaacucagcugucaucugcagccucugcc

SEQ ID NO: 61705 - RNA, 32 nt, Human
agugaacucuggugucucaaagaaggguagaa

SEQ ID NO: 61706 - RNA, 32 nt, Human
agugaacucuguggucacaugaagggagguuc

SEQ ID NO: 61707 - RNA, 32 nt, Human
agugaacugcagcugcugguaacccucagaaa

SEQ ID NO: 61708 - RNA, 32 nt, Human
agugaacugcuggaacucacacaugcccugau

SEQ ID NO: 61709 - RNA, 32 nt, Human
agugaacuguggacucgcuuucccaggcaggg

SEQ ID NO: 61710 - RNA, 32 nt, Human
agugaacuugcagccuuggauggggaagggcc

SEQ ID NO: 61711 - RNA, 32 nt, Human
agugaacuuuucuccuccuuuguuaacugccu

SEQ ID NO: 61712 - RNA, 32 nt, Human
agugaagaaagaggcgcagagcccuguguucc

SEQ ID NO: 61713 - RNA, 32 nt, Human
agugaagaaagccguccagacaauucucccag

SEQ ID NO: 61714 - RNA, 32 nt, Human
agugaagaaauguuacagccaggaacauauuc

SEQ ID NO: 61715 - RNA, 32 nt, Human
agugaagaagggugaagaagagaccuggggcu

SEQ ID NO: 61716 - RNA, 32 nt, Human
agugaagaagucagagggcagucaccugggga

SEQ ID NO: 61717 - RNA, 32 nt, Human
agugaagaauucuagcaucaggaacaagagaa

SEQ ID NO: 61718 - RNA, 32 nt, Human
agugaagacucugccugucggacuugcuuuga

SEQ ID NO: 61719 - RNA, 24 nt, Human
agugaagagcacagacucuguggg

SEQ ID NO: 61720 - RNA, 32 nt, Human
agugaagagcccaccuguggaaggacauggcg

SEQ ID NO: 61721 - RNA, 32 nt, Human
agugaagagccccaccucggggucacaauaaa

SEQ ID NO: 61722 - RNA, 32 nt, Human
agugaagaggaaaggggucuucccuggaacgc

SEQ ID NO: 61723 - RNA, 32 nt, Human
agugaagaguagcacauuaaagugauuuuauu

SEQ ID NO: 61724 - RNA, 32 nt, Human
agugaagaugcugaaguuuuggaugccacacc

SEQ ID NO: 61725 - RNA, 32 nt, Human
agugaagauggaagccggucccauacaggugg

SEQ ID NO: 61726 - RNA, 32 nt, Human
agugaagauggaccugcucuuauacuguugau

SEQ ID NO: 61727 - RNA, 32 nt, Human
agugaagauggccauuggcugugguuaugaca

SEQ ID NO: 61728 - RNA, 32 nt, Human
agugaagauugauuaggauucucagugaaugu

SEQ ID NO: 61729 - RNA, 32 nt, Human
agugaagcaaugaaggaagaagaaggagguug

SEQ ID NO: 61730 - RNA, 32 nt, Human
agugaagcagugucucacagggucauuacaga

SEQ ID NO: 61731 - RNA, 32 nt, Human
agugaagccacuaacaugcugugugacuuuau

SEQ ID NO: 61732 - RNA, 17 nt, Human
agugaagccagaagcca

SEQ ID NO: 61733 - RNA, 32 nt, Human
agugaagccccagcuggacucauggaugugca

SEQ ID NO: 61734 - RNA, 32 nt, Human
agugaagccugcaguggacccugcugcugcca

SEQ ID NO: 61735 - RNA, 32 nt, Human
agugaagcgcgcccggcgucacggugagugcg

SEQ ID NO: 61736 - RNA, 32 nt, Human
agugaagcucaccacuguccuuuguuuuggag

SEQ ID NO: 61737 - RNA, 31 nt, Human
agugaagcugagagagaagcaggauuuuaag

SEQ ID NO: 61738 - RNA, 32 nt, Human
agugaagcugggaggagaaggcggcggaaggu

SEQ ID NO: 61739 - RNA, 32 nt, Human
agugaaggaagagagacagaggaucaagggcu

SEQ ID NO: 61740 - RNA, 32 nt, Human
agugaaggagaaaggugaaaaugcuggaaggu

SEQ ID NO: 61741 - RNA, 32 nt, Human
agugaaggaggagaacuugggagccagguucu

SEQ ID NO: 61742 - RNA, 32 nt, Human
agugaaggaggccgccccugcccccaccugag

SEQ ID NO: 61743 - RNA, 32 nt, Human
agugaaggccuggagugcuuaagagggauuuc

SEQ ID NO: 61744 - RNA, 32 nt, Human
agugaaggcucgucuagaaccugccugagaaa

SEQ ID NO: 61745 - RNA, 32 nt, Human
agugaaggcugcaguacaucugcagacacgau

SEQ ID NO: 61746 - RNA, 32 nt, Human
agugaagggaggcaguggcggcggcggcgaac

SEQ ID NO: 61747 - RNA, 32 nt, Human
agugaagggcagggagcuggaccuggaggcgc

SEQ ID NO: 61748 - RNA, 32 nt, Human
agugaaggugacuccagcucacaguccugccg

SEQ ID NO: 61749 - RNA, 32 nt, Human
agugaaguaacaagccguggguggugacagug

SEQ ID NO: 61750 - RNA, 32 nt, Human
agugaaguaauaaaccguggguggugauagug

SEQ ID NO: 61751 - RNA, 32 nt, Human
agugaaguauuugaagccaucaacaucacaaa

SEQ ID NO: 61752 - RNA, 20 nt, Human
agugaagucaccccgugucc

SEQ ID NO: 61753 - RNA, 32 nt, Human
agugaagugauugaaacuuucuucugaugagu

SEQ ID NO: 61754 - RNA, 32 nt, Human
agugaagugcagucauacaaaauuuauacuca

SEQ ID NO: 61755 - RNA, 32 nt, Human
agugaaguggucagaagcagccagcagugagg

SEQ ID NO: 61756 - RNA, 32 nt, Human
agugaaguguguugcuucugucacuuuauauu

SEQ ID NO: 61757 - RNA, 31 nt, Human
agugaaguuagagcccagcucacuuagccag

SEQ ID NO: 61758 - RNA, 32 nt, Human
agugaaguuucccugcuuuucaucuagaucag

SEQ ID NO: 61759 - RNA, 26 nt, Human
agugaauaaagugcacauggacccug

SEQ ID NO: 61760 - RNA, 32 nt, Human
agugaauaccccaaugguuucuccaauuaugc

SEQ ID NO: 61761 - RNA, 32 nt, Human
agugaauagcuuccaccuccuuuuuggcccuc

SEQ ID NO: 61762 - RNA, 32 nt, Human
agugaauagugacuacaugaagggggcacuua

SEQ ID NO: 61763 - RNA, 32 nt, Human
agugaauauauacacacacauacagacacuca

SEQ ID NO: 61764 - RNA, 23 nt, Human
agugaaucacaccuguaauccca

SEQ ID NO: 61765 - RNA, 32 nt, Human
agugaaucccuacaaaugugaagaauguggca

SEQ ID NO: 61766 - RNA, 20 nt, Human
agugaaucuauuacugagga

SEQ ID NO: 61767 - RNA, 32 nt, Human
agugaaucucugugguugggccagucuuucua

SEQ ID NO: 61768 - RNA, 32 nt, Human
agugaaucuuucucccauccuuccccaaagag

SEQ ID NO: 61769 - RNA, 32 nt, Human
agugaaugaagaaugaaagggaaagaaugugu

SEQ ID NO: 61770 - RNA, 32 nt, Human
agugaaugcuccugaauaaaugugcauuccuc

SEQ ID NO: 61771 - RNA, 32 nt, Human
agugaaugcucuuguuaacaaauguuugcaua

SEQ ID NO: 61772 - RNA, 32 nt, Human
agugaaugggagguggaggaggguugcagcuc

SEQ ID NO: 61773 - RNA, 32 nt, Human
agugaaugggcaaaagcuggaagccuuucccu

SEQ ID NO: 61774 - RNA, 32 nt, Human
agugaauguaaaggaagauaugauugaaaagg

SEQ ID NO: 61775 - RNA, 29 nt, Human
agugaauguaagucugugccuggagagcu

SEQ ID NO: 61776 - RNA, 32 nt, Human
agugaauuaacauuuggugauuaugccuagcu

SEQ ID NO: 61777 - RNA, 32 nt, Human
agugaauuacaggucacaugaaaccaaaacgg

SEQ ID NO: 61778 - RNA, 32 nt, Human
agugaauucccugggagucaucaaagaagacc

SEQ ID NO: 61779 - RNA, 32 nt, Human
agugacaaauccagcagccaccauacugccag

SEQ ID NO: 61780 - RNA, 32 nt, Human
agugacacaggcagagcggugcagcccuccuu

SEQ ID NO: 61781 - RNA, 32 nt, Human
agugacacagggcagaggcauccauggcuggc

SEQ ID NO: 61782 - RNA, 32 nt, Human
agugacacaguuuccucugaugcagcugcuuc

SEQ ID NO: 61783 - RNA, 32 nt, Human
agugacaccugggagcuuguuaggaaugcaga

SEQ ID NO: 61784 - RNA, 32 nt, Human
agugacacuaugcacccccaccgugacccgag

SEQ ID NO: 61785 - RNA, 32 nt, Human
agugacagaaagcacaucacuucacaaggcag

SEQ ID NO: 61786 - RNA, 32 nt, Human
agugacagaaauggauucgaaauaucagugug

SEQ ID NO: 61787 - RNA, 32 nt, Human
agugacagacagcgccggagugcacggugggc

SEQ ID NO: 61788 - RNA, 32 nt, Human
agugacagcacaggagaucugcuggcucgggg

SEQ ID NO: 61789 - RNA, 32 nt, Human
agugacagccuccugacagcuuagaaaugugg

SEQ ID NO: 61790 - RNA, 32 nt, Human
agugacaggcuggucagagggcggggcuggug

SEQ ID NO: 61791 - RNA, 32 nt, Human
agugacaggguguggugguggaguggggagcu

SEQ ID NO: 61792 - RNA, 32 nt, Human
agugacaggguugguuucaaagaaaaaggucc

SEQ ID NO: 61793 - RNA, 32 nt, Human
agugacauguacacaguagaugcucaagcagu

SEQ ID NO: 61794 - RNA, 32 nt, Human
agugacauguccucucugcuugguguaaacca

SEQ ID NO: 61795 - RNA, 32 nt, Human
agugacaugugcugauccuccugccuuuaguu

SEQ ID NO: 61796 - RNA, 32 nt, Human
agugacauuguguacacacugcagcuuggggg

SEQ ID NO: 61797 - RNA, 32 nt, Human
agugacauuucuaucacaaucauuuuauggaa

SEQ ID NO: 61798 - RNA, 32 nt, Human
agugaccaaacagugugcaaaacucacaaagg

SEQ ID NO: 61799 - RNA, 32 nt, Human
agugaccaagcagcaccagcaggccugcccag

SEQ ID NO: 61800 - RNA, 32 nt, Human
agugaccaaguggagacaguaaguuagauccc

SEQ ID NO: 61801 - RNA, 32 nt, Human
agugaccaaugccuccaccucuuggaccaggu

SEQ ID NO: 61802 - RNA, 32 nt, Human
agugaccacagaacucaguguaccaaacaugc

SEQ ID NO: 61803 - RNA, 32 nt, Human
agugaccagaugucccagcuccagugcugugg

SEQ ID NO: 61804 - RNA, 18 nt, Human
agugaccagcaugggagg

SEQ ID NO: 61805 - RNA, 32 nt, Human
agugaccagcuccugcucacugcccucagaaa

SEQ ID NO: 61806 - RNA, 31 nt, Human
agugaccagcucuguggcccugugucgucag

SEQ ID NO: 61807 - RNA, 32 nt, Human
agugaccaggauagagaagcaccagaaccgcc

SEQ ID NO: 61808 - RNA, 32 nt, Human
agugaccaggaugagucauaagacugaugaaa

SEQ ID NO: 61809 - RNA, 32 nt, Human
agugaccaggcccagcagggaggacuugugca

SEQ ID NO: 61810 - RNA, 32 nt, Human
agugaccagguaggaggaggagagggaguaga

SEQ ID NO: 61811 - RNA, 32 nt, Human
agugaccauugguagggccaugguggccggga

SEQ ID NO: 61812 - RNA, 32 nt, Human
agugacccauuucucaagcuccucacguggca

SEQ ID NO: 61813 - RNA, 32 nt, Human
agugacccauuuuccugucuagacucugccuu

SEQ ID NO: 61814 - RNA, 32 nt, Human
agugaccccgaggggcccaucacugcacaaau

SEQ ID NO: 61815 - RNA, 32 nt, Human
agugaccccucgguucuccagcucacccccag

SEQ ID NO: 61816 - RNA, 32 nt, Human
agugaccccugccuacuuccuuccuguuggau

SEQ ID NO: 61817 - RNA, 32 nt, Human
agugaccccuggcauggggaccacacccugga

SEQ ID NO: 61818 - RNA, 32 nt, Human
agugaccccuuuccuguaaccugcacuuuggg

SEQ ID NO: 61819 - RNA, 32 nt, Human
agugacccguuucuguguggguccccacuccc

SEQ ID NO: 61820 - RNA, 32 nt, Human
agugacccugcagagucacucagccaaaucug

SEQ ID NO: 61821 - RNA, 15 nt, Human
agugacccugcuuca

SEQ ID NO: 61822 - RNA, 32 nt, Human
agugaccgagagaagagagcucuggcugcaga

SEQ ID NO: 61823 - RNA, 32 nt, Human
agugaccucagggcacuuugggcuuggcuaga

SEQ ID NO: 61824 - RNA, 32 nt, Human
agugaccucccucagcccccaggggaguaggu

SEQ ID NO: 61825 - RNA, 32 nt, Human
agugaccucccuggccccacuuugcccagagu

SEQ ID NO: 61826 - RNA, 32 nt, Human
agugaccucuacugcuucucugauaccagcug

SEQ ID NO: 61827 - RNA, 32 nt, Human
agugaccucugccucucccacauuccuccccg

SEQ ID NO: 61828 - RNA, 32 nt, Human
agugaccucuuucagugggagguuucugacug

SEQ ID NO: 61829 - RNA, 32 nt, Human
agugaccugcugugacacugugcucucuucug

SEQ ID NO: 61830 - RNA, 32 nt, Human
agugaccuggaaaggguacuagauggaaacuu

SEQ ID NO: 61831 - RNA, 32 nt, Human
agugaccuguucuccugagugcucuagugucu

SEQ ID NO: 61832 - RNA, 32 nt, Human
agugaccuucuccuggaugagcucuccuggcc

SEQ ID NO: 61833 - RNA, 32 nt, Human
agugaccuuuuuggccugcucuccccagcucu

SEQ ID NO: 61834 - RNA, 32 nt, Human
agugacgcuguggugugagguguucugagcuc

SEQ ID NO: 61835 - RNA, 32 nt, Human
agugacggacaugcacguggcagaucaugauu

SEQ ID NO: 61836 - RNA, 32 nt, Human
agugacggccacuccugcggugaacaguacug

SEQ ID NO: 61837 - RNA, 32 nt, Human
agugacggcugagccaagagcuugcuuucagc

SEQ ID NO: 61838 - RNA, 32 nt, Human
agugacgggguuucaccauguuggccaggcug

SEQ ID NO: 61839 - RNA, 18 nt, Human
agugacgucucccugcug

SEQ ID NO: 61840 - RNA, 32 nt, Human
agugacgugugggcagaagcgcacggagccug

SEQ ID NO: 61841 - RNA, 32 nt, Human
agugacucaaugcucagcacccagcuggcaau

SEQ ID NO: 61842 - RNA, 32 nt, Human
agugacucacaaggcuaagcugugcauggggg

SEQ ID NO: 61843 - RNA, 23 nt, Human
agugacucacaccuguaauccca

SEQ ID NO: 61844 - RNA, 32 nt, Human
agugacucagccaggcagacaugagacauggc

SEQ ID NO: 61845 - RNA, 32 nt, Human
agugacucaggucacuuguauguggccaugag

SEQ ID NO: 61846 - RNA, 23 nt, Human
agugacucgcaccuguaauccca

SEQ ID NO: 61847 - RNA, 32 nt, Human
agugacucucuaauuucacaucagcauguuca

SEQ ID NO: 61848 - RNA, 32 nt, Human
agugacucugugccugucuguuuaguucugug

SEQ ID NO: 61849 - RNA, 32 nt, Human
agugacugagggguuaccuuggaguugaugcc

SEQ ID NO: 61850 - RNA, 32 nt, Human
agugacugagggucaggggaauggagccccuc

SEQ ID NO: 61851 - RNA, 32 nt, Human
agugacugaucaguccuuguuuucagguugug

SEQ ID NO: 61852 - RNA, 32 nt, Human
agugacugcuaccuaugauuuaagugacagua

SEQ ID NO: 61853 - RNA, 32 nt, Human
agugacuggaacuucccguacauugcugcugg

SEQ ID NO: 61854 - RNA, 32 nt, Human
agugacuggagcauucaggaagaggcuuucca

SEQ ID NO: 61855 - RNA, 32 nt, Human
agugacugggcaggcagcagaaauuaaaugaa

SEQ ID NO: 61856 - RNA, 21 nt, Human
agugacuggguaaggcaggau

SEQ ID NO: 61857 - RNA, 32 nt, Human
agugacuggguuucaccauguuggccaggcug

SEQ ID NO: 61858 - RNA, 32 nt, Human
agugacuguaugccauucucuuugccaaguaa

SEQ ID NO: 61859 - RNA, 32 nt, Human
agugacuguggaauucuggggaauucugaguu

SEQ ID NO: 61860 - RNA, 31 nt, Human
agugacuguguguucccuugcccuuagauga

SEQ ID NO: 61861 - RNA, 32 nt, Human
agugacuguucccuucccucuguugcagggaa

SEQ ID NO: 61862 - RNA, 32 nt, Human
agugacuuagagacacuguguaucaguuuugc

SEQ ID NO: 61863 - RNA, 32 nt, Human
agugacuucagggacagagcagaggaaagcaa

SEQ ID NO: 61864 - RNA, 32 nt, Human
agugacuuccuggccuucccuucuuuacugau

SEQ ID NO: 61865 - RNA, 32 nt, Human
agugacuucugaccaacagaguguggggagaa

SEQ ID NO: 61866 - RNA, 32 nt, Human
agugacuugccuaagcucgaauagcugugugg

SEQ ID NO: 61867 - RNA, 32 nt, Human
agugacuuguccagagccacucugucaaaagg

SEQ ID NO: 61868 - RNA, 32 nt, Human
agugacuuuccucuuuugcauccugguggaug

SEQ ID NO: 61869 - RNA, 32 nt, Human
agugacuuuuauuuaagccuacuccugacuaa

SEQ ID NO: 61870 - RNA, 32 nt, Human
agugagaaaaacauuuuaaaauuuuaguuaaa

SEQ ID NO: 61871 - RNA, 22 nt, Human
agugagaaaacugggugaagga

SEQ ID NO: 61872 - RNA, 32 nt, Human
agugagaaaagugggacaaaauauacuuuuga

SEQ ID NO: 61873 - RNA, 32 nt, Human
agugagaaaguuuguuugagggcaguagcuca

SEQ ID NO: 61874 - RNA, 32 nt, Human
agugagaagaagcaucgagggcgaggggaaua

SEQ ID NO: 61875 - RNA, 32 nt, Human
agugagaagagggacagggacaaguaguccuu

SEQ ID NO: 61876 - RNA, 32 nt, Human
agugagaagcuaagcaccagccucugcugggc

SEQ ID NO: 61877 - RNA, 21 nt, Human
agugagaaggagcaggcacug

SEQ ID NO: 61878 - RNA, 32 nt, Human
agugagaaggaguuugccuagcaaagauaauu

SEQ ID NO: 61879 - RNA, 32 nt, Human
agugagaagggcccuguauucaccuccacugc

SEQ ID NO: 61880 - RNA, 32 nt, Human
agugagaaugugccucuggauugaccaguggc

SEQ ID NO: 61881 - RNA, 32 nt, Human
agugagacaagcaauuucucccuucugaguua

SEQ ID NO: 61882 - RNA, 32 nt, Human
agugagacacaugagggagaaggugaacccag

SEQ ID NO: 61883 - RNA, 32 nt, Human
agugagacacgugcauuccugccuuccgugaa

SEQ ID NO: 61884 - RNA, 32 nt, Human
agugagaccagccucuagacugugggcugcau

SEQ ID NO: 61885 - RNA, 32 nt, Human
agugagaccagcuucucaucaacuugggcccg

SEQ ID NO: 61886 - RNA, 23 nt, Human
agugagacccccaucucuacaaa

SEQ ID NO: 61887 - RNA, 22 nt, Human
agugagaccccguaucuacaaa

SEQ ID NO: 61888 - RNA, 19 nt, Human
agugagaccccuucucaaa

SEQ ID NO: 61889 - RNA, 19 nt, Human
agugagacccuaucucaaa

SEQ ID NO: 61890 - RNA, 19 nt, Human
agugagacccugucucaaa

SEQ ID NO: 61891 - RNA, 32 nt, Human
agugagagaauagaaaaagcgcuuuaguuugu

SEQ ID NO: 61892 - RNA, 32 nt, Human
agugagagccauaggucggcagagggaacuca

SEQ ID NO: 61893 - RNA, 32 nt, Human
agugagagccuccccugccccugccugcccac

SEQ ID NO: 61894 - RNA, 31 nt, Human
agugagagccuuuucugacgaugccgaagaa

SEQ ID NO: 61895 - RNA, 32 nt, Human
agugagaggaaaagggagagggcgguugagac

SEQ ID NO: 61896 - RNA, 32 nt, Human
agugagaggaaaggaaaagcaucuggcaugug

SEQ ID NO: 61897 - RNA, 32 nt, Human
agugagaggagaagggagagagcuguucuuuu

SEQ ID NO: 61898 - RNA, 32 nt, Human
agugagaggaggaggaggugggcagaggaagg

SEQ ID NO: 61899 - RNA, 32 nt, Human
agugagaggcagugaggaaaaccaccagcgag

SEQ ID NO: 61900 - RNA, 32 nt, Human
agugagaggcaugaaguuacaguguguuuccc

SEQ ID NO: 61901 - RNA, 32 nt, Human
agugagagggguauuuaauuccccuacuaaca

SEQ ID NO: 61902 - RNA, 32 nt, Human
agugagagguacucaauacacugagucacucc

SEQ ID NO: 61903 - RNA, 32 nt, Human
agugagaucuggaggaaugugagaagcauaug

SEQ ID NO: 61904 - RNA, 32 nt, Human
agugagaucuuguagaguggcuuuuucuucca

SEQ ID NO: 61905 - RNA, 32 nt, Human
agugagaugagcccguccuuucaccugcgauc

SEQ ID NO: 61906 - RNA, 32 nt, Human
agugagaugccugcacaucuaaccuugucaga

SEQ ID NO: 61907 - RNA, 32 nt, Human
agugagauguaggauucaaggaagaaauuagg

SEQ ID NO: 61908 - RNA, 32 nt, Human
agugagauuuggguguggagggggaggcgcca

SEQ ID NO: 61909 - RNA, 32 nt, Human
agugagauuuuccagguuaacggucauaaucg

SEQ ID NO: 61910 - RNA, 32 nt, Human
agugagcacacccgugugcacacucauacaca

SEQ ID NO: 61911 - RNA, 32 nt, Human
agugagcacgugcugugggcucugccuagaag

SEQ ID NO: 61912 - RNA, 32 nt, Human
agugagcagagcaacagaggcccccagagacu

SEQ ID NO: 61913 - RNA, 32 nt, Human
agugagcaggcugaggccaccauggagcagug

SEQ ID NO: 61914 - RNA, 32 nt, Human
agugagcaggugaggagaaagacugaaaacua

SEQ ID NO: 61915 - RNA, 32 nt, Human
agugagcaugugagacagagauaagaaauuag

SEQ ID NO: 61916 - RNA, 32 nt, Human
agugagcauuuucuaguucauaugaaaauaac

SEQ ID NO: 61917 - RNA, 32 nt, Human
agugagccaaagguacaccacuacacuccagc

SEQ ID NO: 61918 - RNA, 32 nt, Human
agugagccaagauugcacuacuacacuccagc

SEQ ID NO: 61919 - RNA, 32 nt, Human
agugagccacggcacuccacccugggcaacag

SEQ ID NO: 61920 - RNA, 32 nt, Human
agugagccacugcacuccagccugaugacaga

SEQ ID NO: 61921 - RNA, 32 nt, Human
agugagccacuguaccuggccuuuuggacuaa

SEQ ID NO: 61922 - RNA, 32 nt, Human
agugagccaugauauugccagccugggugaca

SEQ ID NO: 61923 - RNA, 32 nt, Human
agugagccauguucacaccgcugcacucaagc

SEQ ID NO: 61924 - RNA, 32 nt, Human
agugagcccaggaguccucggccagcccugcc

SEQ ID NO: 61925 - RNA, 32 nt, Human
agugagcccaggaguucaaggcugcaaugagc

SEQ ID NO: 61926 - RNA, 32 nt, Human
agugagcccaggaguucagggccagcuuugau

SEQ ID NO: 61927 - RNA, 32 nt, Human
agugagcccugccugggcuccacacccagaga

SEQ ID NO: 61928 - RNA, 32 nt, Human
agugagccgagacugugcuccagccugggcga

SEQ ID NO: 61929 - RNA, 32 nt, Human
agugagccgagauugugccccugcacuccagc

SEQ ID NO: 61930 - RNA, 32 nt, Human
agugagccgagcuugcacuacugcacuccagc

SEQ ID NO: 61931 - RNA, 32 nt, Human
agugagccuagccaggagguguuuggggcucu

SEQ ID NO: 61932 - RNA, 32 nt, Human
agugagccucaggccccgucccugcaccccac

SEQ ID NO: 61933 - RNA, 32 nt, Human
agugagccuccccuccaugcagggggaccuga

SEQ ID NO: 61934 - RNA, 32 nt, Human
agugagccuggaggaggaccugaaggaagggg

SEQ ID NO: 61935 - RNA, 32 nt, Human
agugagccugggaguucgaggcugcagugagc

SEQ ID NO: 61936 - RNA, 32 nt, Human
agugagccuuucuuuucuccugcucguggacu

SEQ ID NO: 61937 - RNA, 32 nt, Human
agugagcggagaucgccccacuacacuccagc

SEQ ID NO: 61938 - RNA, 32 nt, Human
agugagcuagggugggagaaagguggugcuga

SEQ ID NO: 61939 - RNA, 32 nt, Human
agugagcucacugugacccauccuuacucuac

SEQ ID NO: 61940 - RNA, 32 nt, Human
agugagcucaugaucauaccacugcacuuaac

SEQ ID NO: 61941 - RNA, 32 nt, Human
agugagcuccaaugcuaacucaugugccgauc

SEQ ID NO: 61942 - RNA, 32 nt, Human
agugagcuccagaucgacgcugagccucgggg

SEQ ID NO: 61943 - RNA, 32 nt, Human
agugagcuccaggaguggagggggcucauguu

SEQ ID NO: 61944 - RNA, 32 nt, Human
agugagcuccuuuacuaacauucauguuaugg

SEQ ID NO: 61945 - RNA, 32 nt, Human
agugagcucucuuugaggcuaagcaaggaggc

SEQ ID NO: 61946 - RNA, 32 nt, Human
agugagcugacugccuuggccucccagagugc

SEQ ID NO: 61947 - RNA, 32 nt, Human
agugagcugagaucuucccacugcacuccagc

SEQ ID NO: 61948 - RNA, 32 nt, Human
agugagcugagauugcacuccagccugggcga

SEQ ID NO: 61949 - RNA, 32 nt, Human
agugagcugcacugcauuccagccugggugac

SEQ ID NO: 61950 - RNA, 32 nt, Human
agugagcugcgacgggcacaccccggagcguc

SEQ ID NO: 61951 - RNA, 32 nt, Human
agugagcuggggagggaaguggauccauuucu

SEQ ID NO: 61952 - RNA, 32 nt, Human
agugagcuggggccugcugagguggggguggg

SEQ ID NO: 61953 - RNA, 31 nt, Human
agugagcugugauugcaccacuuguaacucc

SEQ ID NO: 61954 - RNA, 32 nt, Human
agugagcuuggcugcuugugaggagcuacaag

SEQ ID NO: 61955 - RNA, 32 nt, Human
agugagcuugugcuuaguauuuacauuggaug

SEQ ID NO: 61956 - RNA, 32 nt, Human
agugaggaaauggcaacacauggaagugaagu

SEQ ID NO: 61957 - RNA, 32 nt, Human
agugaggaaauggcaacacguggaggugaagu

SEQ ID NO: 61958 - RNA, 32 nt, Human
agugaggaacuagauccuucucuccucagccu

SEQ ID NO: 61959 - RNA, 24 nt, Human
agugaggaagugacuguaugugga

SEQ ID NO: 61960 - RNA, 32 nt, Human
agugaggaagugagacagggaaaacagggcag

SEQ ID NO: 61961 - RNA, 32 nt, Human
agugaggaaguggcuguccugaauugcuguaa

SEQ ID NO: 61962 - RNA, 32 nt, Human
agugaggacugcagcugcuuucuugaacaaua

SEQ ID NO: 61963 - RNA, 32 nt, Human
agugaggagaggaggagagaggcuugucaaaa

SEQ ID NO: 61964 - RNA, 32 nt, Human
agugaggaggaggaggaggagaaggaggagga

SEQ ID NO: 61965 - RNA, 32 nt, Human
agugaggaggauacugaacaggauguggcuaa

SEQ ID NO: 61966 - RNA, 32 nt, Human
agugaggaggcugaaggcagggcccagaggag

SEQ ID NO: 61967 - RNA, 32 nt, Human
agugaggagggguuuggggaggugggggcggg

SEQ ID NO: 61968 - RNA, 32 nt, Human
agugaggagguggguggaggcaugcaggggag

SEQ ID NO: 61969 - RNA, 32 nt, Human
agugaggcagugagaugcugcugcuguggauu

SEQ ID NO: 61970 - RNA, 32 nt, Human
agugaggccaaagcacuguccuguaagucuua

SEQ ID NO: 61971 - RNA, 32 nt, Human
agugaggccaggaguucaagaucagccuggcc

SEQ ID NO: 61972 - RNA, 32 nt, Human
agugaggcccagggagugcagauagcuacaga

SEQ ID NO: 61973 - RNA, 32 nt, Human
agugaggcccucagaccugccacagggcagag

SEQ ID NO: 61974 - RNA, 32 nt, Human
agugaggccucugccauguccagagggcacaa

SEQ ID NO: 61975 - RNA, 32 nt, Human
agugaggcucagaagggacacaaagagggaug

SEQ ID NO: 61976 - RNA, 32 nt, Human
agugaggcugcuuuggucuccucaagucuguc

SEQ ID NO: 61977 - RNA, 32 nt, Human
agugagggaaagucaguugagggacacaaaag

SEQ ID NO: 61978 - RNA, 32 nt, Human
agugagggaagacacgcggaaacaggcuugca

SEQ ID NO: 61979 - RNA, 22 nt, Human
agugagggaauuagaccuuugg

SEQ ID NO: 61980 - RNA, 32 nt, Human
agugagggagaaagugaucugcagggaggugg

SEQ ID NO: 61981 - RNA, 32 nt, Human
agugagggagcaagggagagcaggggaggugu

SEQ ID NO: 61982 - RNA, 32 nt, Human
agugagggaggaauuuuacugacccagcaucc

SEQ ID NO: 61983 - RNA, 32 nt, Human
agugagggagguggacggugccagcugaggcu

SEQ ID NO: 61984 - RNA, 32 nt, Human
agugagggaugccgcaaccucgacuucucagc

SEQ ID NO: 61985 - RNA, 21 nt, Human
agugagggcacugcucuugga

SEQ ID NO: 61986 - RNA, 32 nt, Human
agugagggcagaauucaacaagcacaacucac

SEQ ID NO: 61987 - RNA, 32 nt, Human
agugagggccagggagugaguguuagaagaag

SEQ ID NO: 61988 - RNA, 32 nt, Human
agugagggccauccucuuucugcuccucgaca

SEQ ID NO: 61989 - RNA, 32 nt, Human
agugagggccucagagccugaccugagagucc

SEQ ID NO: 61990 - RNA, 32 nt, Human
agugagggcgaggaggaugacgagggcgagga

SEQ ID NO: 61991 - RNA, 32 nt, Human
agugagggcuccaggaaugaggagaaucuuca

SEQ ID NO: 61992 - RNA, 32 nt, Human
agugagggggagacucacccacccucucccuc

SEQ ID NO: 61993 - RNA, 32 nt, Human
agugagggguggagcuugccaaggagcacugg

SEQ ID NO: 61994 - RNA, 32 nt, Human
agugagggugccuagcacaaugucuggcacaa

SEQ ID NO: 61995 - RNA, 32 nt, Human
agugaggguggagggagacagugggcggcagc

SEQ ID NO: 61996 - RNA, 32 nt, Human
agugaggguguagaugucugugucugugagau

SEQ ID NO: 61997 - RNA, 32 nt, Human
agugagguaggccagcuuuuaugacgcaccug

SEQ ID NO: 61998 - RNA, 32 nt, Human
agugaggucacaguccacccacccucucucug

SEQ ID NO: 61999 - RNA, 32 nt, Human
agugagguggcucuggcacugccccuggacuu

SEQ ID NO: 62000 - RNA, 32 nt, Human
agugaggugggcuccuggaacugcagcagcca

SEQ ID NO: 62001 - RNA, 32 nt, Human
agugaggugggugggagaggaagaaaguuggg

SEQ ID NO: 62002 - RNA, 32 nt, Human
agugaggugggugucccaugugcuuggucucc

SEQ ID NO: 62003 - RNA, 32 nt, Human
agugagguuccguugugcgcugugccuaucuc

SEQ ID NO: 62004 - RNA, 32 nt, Human
agugagguuucuucucuucugcccuaacuauu

SEQ ID NO: 62005 - RNA, 32 nt, Human
agugagguuuuuaucuuuuaaaggacaggccc

SEQ ID NO: 62006 - RNA, 32 nt, Human
agugaguaacaccucauucuggccgagaguag

SEQ ID NO: 62007 - RNA, 32 nt, Human
agugagucagcuuuaggugaccugguucuugu

SEQ ID NO: 62008 - RNA, 32 nt, Human
agugaguccauguggagagagcacugugugcg

SEQ ID NO: 62009 - RNA, 32 nt, Human
agugaguccuccucuuccucuggcaucaauuu

SEQ ID NO: 62010 - RNA, 24 nt, Human
agugagucuccaggaagucacaga

SEQ ID NO: 62011 - RNA, 23 nt, Human
agugagucuccaggucugccaca

SEQ ID NO: 62012 - RNA, 32 nt, Human
agugagucucggcuggagugcaguggugcagu

SEQ ID NO: 62013 - RNA, 32 nt, Human
agugagucugccucuugugcuuggugucuuuu

SEQ ID NO: 62014 - RNA, 32 nt, Human
agugagugacagccucacagccucaggcccac

SEQ ID NO: 62015 - RNA, 31 nt, Human
agugagugacuucucgugagagaucuggucg

SEQ ID NO: 62016 - RNA, 32 nt, Human
agugagugagcugaagccacaggcagcgaucc

SEQ ID NO: 62017 - RNA, 32 nt, Human
agugagugccaugcuuuuuggugagggcagau

SEQ ID NO: 62018 - RNA, 32 nt, Human
agugagugcuccaucaauaucugugcaauaau

SEQ ID NO: 62019 - RNA, 32 nt, Human
agugagugcugagcucucacccuucccccacu

SEQ ID NO: 62020 - RNA, 32 nt, Human
agugaguggagagccuacauaaaagagaguaa

SEQ ID NO: 62021 - RNA, 32 nt, Human
agugaguguucugccuguguguguuuuagguc

SEQ ID NO: 62022 - RNA, 32 nt, Human
agugaguucuaaaauacaaauaugaaagcagg

SEQ ID NO: 62023 - RNA, 32 nt, Human
agugaguucuguaaauggagacuuaggucccc

SEQ ID NO: 62024 - RNA, 32 nt, Human
agugaguugguggaaguauuuggccauggaaa

SEQ ID NO: 62025 - RNA, 21 nt, Human
agugaguuguaaagucagaga

SEQ ID NO: 62026 - RNA, 32 nt, Human
agugauaaacuaagucacauacagauaaagca

SEQ ID NO: 62027 - RNA, 32 nt, Human
agugauacauaaaauuaaagccuguggcauuu

SEQ ID NO: 62028 - RNA, 32 nt, Human
agugauaccaucccugcacuccuggguccugc

SEQ ID NO: 62029 - RNA, 32 nt, Human
agugauagaaagccaugugaggggacgagagg

SEQ ID NO: 62030 - RNA, 32 nt, Human
agugauagcgaugguguuuccucuccagggau

SEQ ID NO: 62031 - RNA, 32 nt, Human
agugauaguagccugaaccacauuuuagauaa

SEQ ID NO: 62032 - RNA, 32 nt, Human
agugauaguuaccuucacaauggugcuacccc

SEQ ID NO: 62033 - RNA, 32 nt, Human
agugauauacccuuccuuuuauagcucaaggg

SEQ ID NO: 62034 - RNA, 32 nt, Human
agugauauuuagaccccucucaguuaagaaau

SEQ ID NO: 62035 - RNA, 32 nt, Human
agugaucaacacaccaaagucucugccauaaa

SEQ ID NO: 62036 - RNA, 32 nt, Human
agugaucaagugaaaaagcugcaucaagaccc

SEQ ID NO: 62037 - RNA, 32 nt, Human
agugaucacauccugauugaguggcuauggac

SEQ ID NO: 62038 - RNA, 32 nt, Human
agugaucacgccauugcacuccagccugggug

SEQ ID NO: 62039 - RNA, 32 nt, Human
agugaucacugcacgcccaucgugcacaccug

SEQ ID NO: 62040 - RNA, 32 nt, Human
agugaucagcuaccccagcucggcgggggagc

SEQ ID NO: 62041 - RNA, 32 nt, Human
agugaucagcucccuaaaaccaugccuaagua

SEQ ID NO: 62042 - RNA, 19 nt, Human
agugaucaucagaugagau

SEQ ID NO: 62043 - RNA, 32 nt, Human
agugaucauggugugcgaguggucaauugagu

SEQ ID NO: 62044 - RNA, 32 nt, Human
agugauccacccaccucagccucccagagugc

SEQ ID NO: 62045 - RNA, 32 nt, Human
agugauccacccaucucagccuccugaguagc

SEQ ID NO: 62046 - RNA, 32 nt, Human
agugauccacuggccccacgucacacaguuac

SEQ ID NO: 62047 - RNA, 32 nt, Human
agugauccagcuuucuccuuuuggauugaggc

SEQ ID NO: 62048 - RNA, 32 nt, Human
agugauccagggaugaacacccccugugcggu

SEQ ID NO: 62049 - RNA, 32 nt, Human
agugauccugccgcccccucccugggcucguc

SEQ ID NO: 62050 - RNA, 32 nt, Human
agugaucgaguccuggcuugggagggaagguc

SEQ ID NO: 62051 - RNA, 32 nt, Human
agugaucuacccaccucggcuucccaaagugc

SEQ ID NO: 62052 - RNA, 32 nt, Human
agugaucucagaggggcccauggauuaacgcc

SEQ ID NO: 62053 - RNA, 32 nt, Human
agugaucucuacucaaguggucgugaucgggu

SEQ ID NO: 62054 - RNA, 32 nt, Human
agugaucugcccaccucugccucccaaagugc

SEQ ID NO: 62055 - RNA, 32 nt, Human
agugaucugcccaccuuggucuuccaaaguac

SEQ ID NO: 62056 - RNA, 32 nt, Human
agugaucugcccgccacagcaggcugggauca

SEQ ID NO: 62057 - RNA, 32 nt, Human
agugaucugcccgccucgaccucucucaaaau

SEQ ID NO: 62058 - RNA, 32 nt, Human
agugaucuggcugggaaaggggaccaggagug

SEQ ID NO: 62059 - RNA, 32 nt, Human
agugaucugugccuuaagaacaugcuccugcu

SEQ ID NO: 62060 - RNA, 32 nt, Human
agugaucuuaccagccagcuguccucagcgca

SEQ ID NO: 62061 - RNA, 32 nt, Human
agugaugaaagaaaacaaagaaauagaguugu

SEQ ID NO: 62062 - RNA, 32 nt, Human
agugaugaaaucaagacuauuuauuuggaaua

SEQ ID NO: 62063 - RNA, 23 nt, Human
agugaugaaauuauccuaaauac

SEQ ID NO: 62064 - RNA, 19 nt, Human
agugaugaacauuuugguc

SEQ ID NO: 62065 - RNA, 32 nt, Human
agugaugaagugaaaauaauuuacauucgaua

SEQ ID NO: 62066 - RNA, 32 nt, Human
agugaugagauuauaggcgugagccaccgcgc

SEQ ID NO: 62067 - RNA, 32 nt, Human
agugaugcauguugauguuacagucaauuugg

SEQ ID NO: 62068 - RNA, 32 nt, Human
agugaugccagaagguuugggaagaaggugug

SEQ ID NO: 62069 - RNA, 32 nt, Human
agugaugccgcaccucagucucucccucugcu

SEQ ID NO: 62070 - RNA, 32 nt, Human
agugaugccuggggacucuccuuaaucacuca

SEQ ID NO: 62071 - RNA, 32 nt, Human
agugaugcgcaacuuccucucucuuagggaau

SEQ ID NO: 62072 - RNA, 32 nt, Human
agugaugcuacuuuuaaaaggaucccaaacuu

SEQ ID NO: 62073 - RNA, 32 nt, Human
agugaugcuggcugaagcugccugugcacguu

SEQ ID NO: 62074 - RNA, 32 nt, Human
agugaugcuuccaggauuuguuuucagaaaca

SEQ ID NO: 62075 - RNA, 32 nt, Human
agugauggacgccuccacaggucuucacagag

SEQ ID NO: 62076 - RNA, 29 nt, Human
agugauggaggaaauaccagcccaggaag

SEQ ID NO: 62077 - RNA, 32 nt, Human
agugauggaggcuguggacagaaacaggucag

SEQ ID NO: 62078 - RNA, 32 nt, Human
agugauggcgaugcccuccaccucuuuccucc

SEQ ID NO: 62079 - RNA, 32 nt, Human
agugauggcuggcgccugccucccgggugucu

SEQ ID NO: 62080 - RNA, 32 nt, Human
agugauggcuuggaacacugucuuacacagca

SEQ ID NO: 62081 - RNA, 32 nt, Human
agugaugggaucucgcucuguugcccagggug

SEQ ID NO: 62082 - RNA, 32 nt, Human
agugaugggauuacagaugugagccaccgugc

SEQ ID NO: 62083 - RNA, 32 nt, Human
agugaugggauuacaggcaugagccaccgugc

SEQ ID NO: 62084 - RNA, 32 nt, Human
agugaugggauuacaggcgugagccaccgcgc

SEQ ID NO: 62085 - RNA, 32 nt, Human
agugauggggaaagcuuuuucugaagcugccu

SEQ ID NO: 62086 - RNA, 32 nt, Human
agugauggggugggcagagagaggauaggagg

SEQ ID NO: 62087 - RNA, 32 nt, Human
agugaugguggaggugcagccagggcaaggag

SEQ ID NO: 62088 - RNA, 32 nt, Human
agugaugucaucuuuuucuuuuaaagaauuaa

SEQ ID NO: 62089 - RNA, 32 nt, Human
agugauguccucucucagcuaucacaucacaa

SEQ ID NO: 62090 - RNA, 32 nt, Human
agugaugucucugcccuuccucuagccucuug

SEQ ID NO: 62091 - RNA, 32 nt, Human
agugaugucugguaacaagaugugacuuuuug

SEQ ID NO: 62092 - RNA, 20 nt, Human
agugaugugacuucuugguc

SEQ ID NO: 62093 - RNA, 32 nt, Human
agugaugugguuuucuaauuucuuugggguaa

SEQ ID NO: 62094 - RNA, 32 nt, Human
agugauguuauccugaggagcaauugggggag

SEQ ID NO: 62095 - RNA, 32 nt, Human
agugauguuguuugggagagugcaguaguaau

SEQ ID NO: 62096 - RNA, 32 nt, Human
agugauucaugccuuacagaacaucagagagu

SEQ ID NO: 62097 - RNA, 32 nt, Human
agugauuccucuucaaagauuuuagccuguaa

SEQ ID NO: 62098 - RNA, 32 nt, Human
agugauucucccgccucagucucccaaguagc

SEQ ID NO: 62099 - RNA, 32 nt, Human
agugauucuccugccucagccucccagguagc

SEQ ID NO: 62100 - RNA, 32 nt, Human
agugauucuccugccucagucucccaaguagc

SEQ ID NO: 62101 - RNA, 32 nt, Human
agugauucuccugccuuagccucccagguagc

SEQ ID NO: 62102 - RNA, 22 nt, Human
agugauucugccuguaauccca

SEQ ID NO: 62103 - RNA, 32 nt, Human
agugauucugugcaagucugucucaaucuuuu

SEQ ID NO: 62104 - RNA, 32 nt, Human
agugauucuguuugccuuuuguuuucauuggu

SEQ ID NO: 62105 - RNA, 32 nt, Human
agugauugcaccacugcacuccagccugggug

SEQ ID NO: 62106 - RNA, 32 nt, Human
agugauugcauauuauuuccauaucauaguau

SEQ ID NO: 62107 - RNA, 32 nt, Human
agugauuguacagcaggcugggcccaggaggu

SEQ ID NO: 62108 - RNA, 32 nt, Human
agugauuguuagagguaguuuucuugaauuaa

SEQ ID NO: 62109 - RNA, 32 nt, Human
agugauuuauucacaaccccaaaaucagaaaa

SEQ ID NO: 62110 - RNA, 32 nt, Human
agugauuuauucauauauuccuguccaaagcc

SEQ ID NO: 62111 - RNA, 32 nt, Human
agugauuucuacugcucuuggcccagagccag

SEQ ID NO: 62112 - RNA, 32 nt, Human
agugauuugcagccccuccuuucagaguacca

SEQ ID NO: 62113 - RNA, 32 nt, Human
agugauuugugggaaaaauaaauaaauguucu

SEQ ID NO: 62114 - RNA, 32 nt, Human
agugauuuguuaaaauaccuugcccaagaaua

SEQ ID NO: 62115 - RNA, 32 nt, Human
agugauuuuagcuucugccagcugcuuuugcc

SEQ ID NO: 62116 - RNA, 32 nt, Human
agugauuuuagugcuugucagcauuuuuccau

SEQ ID NO: 62117 - RNA, 24 nt, Human
agugauuuuggcacaagugaccga

SEQ ID NO: 62118 - RNA, 32 nt, Human
agugauuuuucagugguccuucagagggagaa

SEQ ID NO: 62119 - RNA, 32 nt, Human
agugcaaaaagcugguuucuuuagaggcacuu

SEQ ID NO: 62120 - RNA, 32 nt, Human
agugcaaaccagcauggugaaugagcuugauu

SEQ ID NO: 62121 - RNA, 32 nt, Human
agugcaaaggcccugaggcaggggugugucug

SEQ ID NO: 62122 - RNA, 32 nt, Human
agugcaaaggccuguuuggagacucuguggga

SEQ ID NO: 62123 - RNA, 32 nt, Human
agugcaaagugcccucauuuguggcccaagcc

SEQ ID NO: 62124 - RNA, 32 nt, Human
agugcaaauuuuagcauauggggccugacuuc

SEQ ID NO: 62125 - RNA, 32 nt, Human
agugcaacaaaugccagcauugccauucgggg

SEQ ID NO: 62126 - RNA, 32 nt, Human
agugcaacacugcagggcucucaggagggggu

SEQ ID NO: 62127 - RNA, 21 nt, Human
agugcaacagucaggcugcug

SEQ ID NO: 62128 - RNA, 32 nt, Human
agugcaacauggccaggggcugccucugcugc

SEQ ID NO: 62129 - RNA, 32 nt, Human
agugcaagaagcuuccuugccugagaucaccu

SEQ ID NO: 62130 - RNA, 32 nt, Human
agugcaagaauagccagcauuuccgauuuuga

SEQ ID NO: 62131 - RNA, 32 nt, Human
agugcaagacaugccaauuugagacacacggu

SEQ ID NO: 62132 - RNA, 32 nt, Human
agugcaagaggcuccaaaaggaagaaaaagaa

SEQ ID NO: 62133 - RNA, 32 nt, Human
agugcaaggugcccaggacagaaacagacccc

SEQ ID NO: 62134 - RNA, 32 nt, Human
agugcaagucagagcaaagcccagaaagcaga

SEQ ID NO: 62135 - RNA, 32 nt, Human
agugcaaguucagauucuguggcagagauuug

SEQ ID NO: 62136 - RNA, 32 nt, Human
agugcaauauuuugcaaacagcucuucuuagg

SEQ ID NO: 62137 - RNA, 32 nt, Human
agugcaaugggagacaucagagacuuuaaaaa

SEQ ID NO: 62138 - RNA, 32 nt, Human
agugcacaaagacacugguuuucaaucggcgu

SEQ ID NO: 62139 - RNA, 32 nt, Human
agugcacacacacagucuuccagccugcucug

SEQ ID NO: 62140 - RNA, 27 nt, Human
agugcacacagguccccggggacccca

SEQ ID NO: 62141 - RNA, 32 nt, Human
agugcacacauguggugguggaagagggcaug

SEQ ID NO: 62142 - RNA, 32 nt, Human
agugcacaccuguaaucccagguacucgggag

SEQ ID NO: 62143 - RNA, 32 nt, Human
agugcacagaugggccuaggagaggacucagg

SEQ ID NO: 62144 - RNA, 31 nt, Human
agugcacaggacggccccacagcagaccagc

SEQ ID NO: 62145 - RNA, 32 nt, Human
agugcacaggagaaaguuaagaagcaucacag

SEQ ID NO: 62146 - RNA, 32 nt, Human
agugcacauacccaguccuuaagcagacauug

SEQ ID NO: 62147 - RNA, 20 nt, Human
agugcacauggccugaggcg

SEQ ID NO: 62148 - RNA, 32 nt, Human
agugcaccacucggcgccgucccaggcccgac

SEQ ID NO: 62149 - RNA, 32 nt, Human
agugcaccacugcacuccagccugggcaacaa

SEQ ID NO: 62150 - RNA, 32 nt, Human
agugcaccacugcacuccagccugggcaacag

SEQ ID NO: 62151 - RNA, 32 nt, Human
agugcaccauugcacuccagccugggcaaaaa

SEQ ID NO: 62152 - RNA, 32 nt, Human
agugcaccggaauaaagagaauuuguaggcgu

SEQ ID NO: 62153 - RNA, 16 nt, Human
agugcaccuggccuga

SEQ ID NO: 62154 - RNA, 32 nt, Human
agugcaccuguaaucccagcuacucuggaggc

SEQ ID NO: 62155 - RNA, 19 nt, Human
agugcaccuuccaguccca

SEQ ID NO: 62156 - RNA, 32 nt, Human
agugcacgacaccuuuaaaaugccuagauuuc

SEQ ID NO: 62157 - RNA, 32 nt, Human
agugcacgccagccugggcgacagacucugug

SEQ ID NO: 62158 - RNA, 32 nt, Human
agugcacgccuguaaucccagcuacucaggag

SEQ ID NO: 62159 - RNA, 32 nt, Human
agugcacgccuguaaucccagcuucuugggag

SEQ ID NO: 62160 - RNA, 32 nt, Human
agugcacgccuguaaucccugcuacucgggag

SEQ ID NO: 62161 - RNA, 32 nt, Human
agugcacgcuggucccagauggggcugggggu

SEQ ID NO: 62162 - RNA, 32 nt, Human
agugcacuacuguacuccagccagggcaagag

SEQ ID NO: 62163 - RNA, 20 nt, Human
agugcacuagacagcugcug

SEQ ID NO: 62164 - RNA, 32 nt, Human
agugcacuccagccugagagacagagugagau

SEQ ID NO: 62165 - RNA, 32 nt, Human
agugcacucucucaccccuccuucaguccuac

SEQ ID NO: 62166 - RNA, 32 nt, Human
agugcacugaaagcccugucucggcuggccca

SEQ ID NO: 62167 - RNA, 32 nt, Human
agugcacuggccuccagccucaaucuguuccg

SEQ ID NO: 62168 - RNA, 32 nt, Human
agugcacugugucuugcugccugggugcccuc

SEQ ID NO: 62169 - RNA, 32 nt, Human
agugcacuugcuggauugaagaaugugagugu

SEQ ID NO: 62170 - RNA, 32 nt, Human
agugcacuuuggccugggcaugguggcucaug

SEQ ID NO: 62171 - RNA, 32 nt, Human
agugcagaagucagauggaccgauuggaucgg

SEQ ID NO: 62172 - RNA, 32 nt, Human
agugcagaaugggccagcagggcugcaggugc

SEQ ID NO: 62173 - RNA, 32 nt, Human
agugcagacaccgucaucccaccccaccugag

SEQ ID NO: 62174 - RNA, 32 nt, Human
agugcagaccagagccuugcagagccagacag

SEQ ID NO: 62175 - RNA, 32 nt, Human
agugcagaccucugacccuggagucgcucggc

SEQ ID NO: 62176 - RNA, 32 nt, Human
agugcagagacaccaccagguacugcgagaag

SEQ ID NO: 62177 - RNA, 32 nt, Human
agugcagagagggagacaggcaggcaggcagg

SEQ ID NO: 62178 - RNA, 32 nt, Human
agugcagagauggggaggaggggcucugccac

SEQ ID NO: 62179 - RNA, 32 nt, Human
agugcagaggaaaugggacaccaccuguccug

SEQ ID NO: 62180 - RNA, 22 nt, Human
agugcagaggagaagggcugcu

SEQ ID NO: 62181 - RNA, 32 nt, Human
agugcagaggcagagucuggggcucagguugg

SEQ ID NO: 62182 - RNA, 22 nt, Human
agugcagauugcuuguauguaa

SEQ ID NO: 62183 - RNA, 32 nt, Human
agugcagcaaaacccacugccuccaggaagcc

SEQ ID NO: 62184 - RNA, 32 nt, Human
agugcagcagugacaugaucauagcucacugc

SEQ ID NO: 62185 - RNA, 32 nt, Human
agugcagccagagaaugcccacugccuguaac

SEQ ID NO: 62186 - RNA, 32 nt, Human
agugcagccagcagcccugcccugccaggugg

SEQ ID NO: 62187 - RNA, 32 nt, Human
agugcagccccagggugagaaggugcccaccg

SEQ ID NO: 62188 - RNA, 32 nt, Human
agugcagcccggcgccggcgacugccugcccc

SEQ ID NO: 62189 - RNA, 32 nt, Human
agugcagccucaaacuccugggcucaagccau

SEQ ID NO: 62190 - RNA, 32 nt, Human
agugcagccucgaccaccugugcucaagcaau

SEQ ID NO: 62191 - RNA, 32 nt, Human
agugcagccucuucccuuggggccucagagag

SEQ ID NO: 62192 - RNA, 32 nt, Human
agugcagccuguaaguucuccacauugacaca

SEQ ID NO: 62193 - RNA, 32 nt, Human
agugcagcuaacugaggccucaggggcaggag

SEQ ID NO: 62194 - RNA, 31 nt, Human
agugcagcucccaugcaaaguuugcuuuuag

SEQ ID NO: 62195 - RNA, 32 nt, Human
agugcagcuccguuuggcagugcaaugguaua

SEQ ID NO: 62196 - RNA, 32 nt, Human
agugcagcuuuucauuguguugugugguuggu

SEQ ID NO: 62197 - RNA, 32 nt, Human
agugcaggagcagaaaucgaagucauccauca

SEQ ID NO: 62198 - RNA, 32 nt, Human
agugcaggcaggcagccaaaugagugggaauu

SEQ ID NO: 62199 - RNA, 32 nt, Human
agugcagggaaagaggugaucaacaaagagga

SEQ ID NO: 62200 - RNA, 32 nt, Human
agugcagggaaagaggugucaacaaagaggac

SEQ ID NO: 62201 - RNA, 32 nt, Human
agugcagggaaaggaggcagggaaaagaccag

SEQ ID NO: 62202 - RNA, 32 nt, Human
agugcagggacaccucccggguucaagcaguu

SEQ ID NO: 62203 - RNA, 32 nt, Human
agugcagggaggugugggguaagggagggaag

SEQ ID NO: 62204 - RNA, 24 nt, Human
agugcagggaguugaacuuuugga

SEQ ID NO: 62205 - RNA, 32 nt, Human
agugcagggauuacaggcaugagccaccaugc

SEQ ID NO: 62206 - RNA, 32 nt, Human
agugcagggauuacaggcgugagccacugcuc

SEQ ID NO: 62207 - RNA, 32 nt, Human
agugcagggccuguaaucccagcauuuuggga

SEQ ID NO: 62208 - RNA, 32 nt, Human
agugcagggcuuacaggugugagccacagugc

SEQ ID NO: 62209 - RNA, 32 nt, Human
agugcaggggauggcccugcugcugcuuccgg

SEQ ID NO: 62210 - RNA, 19 nt, Human
agugcagggguggcugcug

SEQ ID NO: 62211 - RNA, 32 nt, Human
agugcagggugcgggcaccaggaaagggggcg

SEQ ID NO: 62212 - RNA, 32 nt, Human
agugcagguagacuuuauuuuugaaagcaucg

SEQ ID NO: 62213 - RNA, 24 nt, Human
agugcagguagcuaacacugacca

SEQ ID NO: 62214 - RNA, 18 nt, Human
agugcaggucagccugga

SEQ ID NO: 62215 - RNA, 32 nt, Human
agugcaggucugcuuugguccuucuccuaaac

SEQ ID NO: 62216 - RNA, 32 nt, Human
agugcaggugggcauaggugcagugagugcag

SEQ ID NO: 62217 - RNA, 32 nt, Human
agugcaguauagaauaggcacuuuaaaacacu

SEQ ID NO: 62218 - RNA, 32 nt, Human
agugcagucaucaccauccucagaccucauga

SEQ ID NO: 62219 - RNA, 32 nt, Human
agugcagucaucucuuauucaugguaguguuu

SEQ ID NO: 62220 - RNA, 32 nt, Human
agugcagugagcugagauugcgccacugcacu

SEQ ID NO: 62221 - RNA, 32 nt, Human
agugcagugagugagaguccuugggagcgcgg

SEQ ID NO: 62222 - RNA, 32 nt, Human
agugcagugcgcuguaguaggcauuuuuacca

SEQ ID NO: 62223 - RNA, 32 nt, Human
agugcauaaucgagcaggaggcuggaaucugg

SEQ ID NO: 62224 - RNA, 32 nt, Human
agugcaucagauacauuuuauauuucuuaaaa

SEQ ID NO: 62225 - RNA, 24 nt, Human
agugcauccacaagcuggaucuga

SEQ ID NO: 62226 - RNA, 23 nt, Human
agugcaucgcuauaauucauuaa

SEQ ID NO: 62227 - RNA, 32 nt, Human
agugcaugaaggacagugauguggggaggccg

SEQ ID NO: 62228 - RNA, 32 nt, Human
agugcaugaauaagcauuuucccacacaauga

SEQ ID NO: 62229 - RNA, 32 nt, Human
agugcaugagccaccaugccuggccuguuuag

SEQ ID NO: 62230 - RNA, 32 nt, Human
agugcaugcacuccagccugggcaacagacag

SEQ ID NO: 62231 - RNA, 32 nt, Human
agugcaugccucuaaucccagcuacucaggag

SEQ ID NO: 62232 - RNA, 32 nt, Human
agugcaugccuguaaucccagcuacucaggag

SEQ ID NO: 62233 - RNA, 32 nt, Human
agugcaugccuguaaucccagcuacuugggag

SEQ ID NO: 62234 - RNA, 32 nt, Human
agugcaugccuguagucccagcuaccugggag

SEQ ID NO: 62235 - RNA, 32 nt, Human
agugcaugccuguagucccagcuacuugggag

SEQ ID NO: 62236 - RNA, 32 nt, Human
agugcauguguuggagagaggugggaagcaga

SEQ ID NO: 62237 - RNA, 32 nt, Human
agugcauucccaaauucuaaauagcugacccu

SEQ ID NO: 62238 - RNA, 32 nt, Human
agugcauugggaugguuuuccaggcaaggcac

SEQ ID NO: 62239 - RNA, 32 nt, Human
agugcauuugccuuuccuuucugcacuuggcu

SEQ ID NO: 62240 - RNA, 32 nt, Human
agugcauuuguaacuggauuuauuucuuaaua

SEQ ID NO: 62241 - RNA, 32 nt, Human
agugcauuuuaaccaguacucugggugcaaua

SEQ ID NO: 62242 - RNA, 25 nt, Human
agugccaaagagaagagcuuacugg

SEQ ID NO: 62243 - RNA, 32 nt, Human
agugccaaagagaagagcuuacuggguaguua

SEQ ID NO: 62244 - RNA, 32 nt, Human
agugccaacgagagccgcucccugccacagcc

SEQ ID NO: 62245 - RNA, 32 nt, Human
agugccaagaccagccuuccagccgagguuug

SEQ ID NO: 62246 - RNA, 18 nt, Human
agugccaagacugugccg

SEQ ID NO: 62247 - RNA, 32 nt, Human
agugccaagagagcugagaggagcaguuguga

SEQ ID NO: 62248 - RNA, 32 nt, Human
agugccaagagugucccucugagacccuuggg

SEQ ID NO: 62249 - RNA, 32 nt, Human
agugccaaggcucugagggugucuuggguuca

SEQ ID NO: 62250 - RNA, 32 nt, Human
agugccacaaagccacuguagccagacugccu

SEQ ID NO: 62251 - RNA, 22 nt, Human
agugccacacugugggguguug

SEQ ID NO: 62252 - RNA, 32 nt, Human
agugccacagccucgucuggaaaaaggaccag

SEQ ID NO: 62253 - RNA, 32 nt, Human
agugccacagcucuccagccugggcgacagag

SEQ ID NO: 62254 - RNA, 32 nt, Human
agugccacaggaggaggaggaggacauggggu

SEQ ID NO: 62255 - RNA, 32 nt, Human
agugccacaggguacgcacacgcagagccccg

SEQ ID NO: 62256 - RNA, 32 nt, Human
agugccacccagcaggcguuugaaaacaagaa

SEQ ID NO: 62257 - RNA, 18 nt, Human
agugccacccucgccuca

SEQ ID NO: 62258 - RNA, 32 nt, Human
agugccaccguacucuagccugggcgacagag

SEQ ID NO: 62259 - RNA, 32 nt, Human
agugccacugauuuucuagucugcuucauacc

SEQ ID NO: 62260 - RNA, 32 nt, Human
agugccacugcaaucaagcucccaguugugga

SEQ ID NO: 62261 - RNA, 32 nt, Human
agugccacugcaauccagccugggcaacagag

SEQ ID NO: 62262 - RNA, 32 nt, Human
agugccacugcaauucagccugggugacauag

SEQ ID NO: 62263 - RNA, 32 nt, Human
agugccacugcacuacagcccgggcgacagag

SEQ ID NO: 62264 - RNA, 32 nt, Human
agugccacugcacuccagccugggcaacacag

SEQ ID NO: 62265 - RNA, 32 nt, Human
agugccacugcacuccagccugggugacagag

SEQ ID NO: 62266 - RNA, 32 nt, Human
agugccacugcacuucagccugggugacagag

SEQ ID NO: 62267 - RNA, 32 nt, Human
agugccacugcacuucagcuugggcaacagag

SEQ ID NO: 62268 - RNA, 32 nt, Human
agugccacugcauuccggccugggcgacagag

SEQ ID NO: 62269 - RNA, 32 nt, Human
agugccacugugcuccagccuggaugacggag

SEQ ID NO: 62270 - RNA, 32 nt, Human
agugccacuuccuuuccauaaaccauaaugau

SEQ ID NO: 62271 - RNA, 32 nt, Human
agugccagacaggaugaaagcguaggagaacu

SEQ ID NO: 62272 - RNA, 32 nt, Human
agugccagagaagccccuggguccccagugcc

SEQ ID NO: 62273 - RNA, 32 nt, Human
agugccagcaguaugaggguuugcauuggcuu

SEQ ID NO: 62274 - RNA, 32 nt, Human
agugccagccugccucacaagagacgucuugu

SEQ ID NO: 62275 - RNA, 32 nt, Human
agugccagcuacucaggaggccgaggcaggag

SEQ ID NO: 62276 - RNA, 32 nt, Human
agugccagcuacucaggaggcugaggcaggag

SEQ ID NO: 62277 - RNA, 32 nt, Human
agugccagcuacucgggagguugagcaggagg

SEQ ID NO: 62278 - RNA, 32 nt, Human
agugccagcucccucucugucugcaccaggga

SEQ ID NO: 62279 - RNA, 32 nt, Human
agugccagcugacaccaggagcagggagaggc

SEQ ID NO: 62280 - RNA, 32 nt, Human
agugccaggauuacaggcaugagccacugugu

SEQ ID NO: 62281 - RNA, 32 nt, Human
agugccaggauuauaggccugagccacugcgu

SEQ ID NO: 62282 - RNA, 32 nt, Human
agugccaggcauucaccaugcuguuuugaugu

SEQ ID NO: 62283 - RNA, 32 nt, Human
agugccaggcucuaggcugaggugggggacac

SEQ ID NO: 62284 - RNA, 32 nt, Human
agugccaggcugggcacaauggcucgugcuug

SEQ ID NO: 62285 - RNA, 32 nt, Human
agugccagggcugggccccuuccaaauguccc

SEQ ID NO: 62286 - RNA, 32 nt, Human
agugccaggguuggccauaggagaaugagccc

SEQ ID NO: 62287 - RNA, 21 nt, Human
agugccagguggacagccagu

SEQ ID NO: 62288 - RNA, 21 nt, Human
agugccagguggcggcugcug

SEQ ID NO: 62289 - RNA, 32 nt, Human
agugccagguugaaggaugacagggugcccag

SEQ ID NO: 62290 - RNA, 22 nt, Human
agugccaguaguucacaccgaa

SEQ ID NO: 62291 - RNA, 32 nt, Human
agugccagugccugugccagagguggcgaggu

SEQ ID NO: 62292 - RNA, 32 nt, Human
agugccaguucuuaugcuaagcagguuacgug

SEQ ID NO: 62293 - RNA, 32 nt, Human
agugccaguuggacccaagagaagacugcagc

SEQ ID NO: 62294 - RNA, 25 nt, Human
agugccauacagcggaaaggcaggg

SEQ ID NO: 62295 - RNA, 21 nt, Human
agugccauaguagggguucug

SEQ ID NO: 62296 - RNA, 26 nt, Human
agugccauauaauguugaagcuguug

SEQ ID NO: 62297 - RNA, 15 nt, Human
agugccaucaugagg

SEQ ID NO: 62298 - RNA, 32 nt, Human
agugccauccaccagcuuuacucucugacaca

SEQ ID NO: 62299 - RNA, 32 nt, Human
agugccaucccuuguauccuggaauagcucca

SEQ ID NO: 62300 - RNA, 32 nt, Human
agugccauccugggugcccagggcagagcagg

SEQ ID NO: 62301 - RNA, 32 nt, Human
agugccaucgcacuccagccuggacaacagag

SEQ ID NO: 62302 - RNA, 24 nt, Human
agugccaucugggcaccauugcuc

SEQ ID NO: 62303 - RNA, 16 nt, Human
agugccaugacugaga

SEQ ID NO: 62304 - RNA, 20 nt, Human
agugccaugcugaccugcug

SEQ ID NO: 62305 - RNA, 32 nt, Human
agugccauguaccacacagauguuccugucuc

SEQ ID NO: 62306 - RNA, 19 nt, Human
agugccauuagaugauaua

SEQ ID NO: 62307 - RNA, 32 nt, Human
agugccauucagcucugggccagagcaugguc

SEQ ID NO: 62308 - RNA, 32 nt, Human
agugccauuccuguccuuaaggcacagucuca

SEQ ID NO: 62309 - RNA, 20 nt, Human
agugccauugaugugagaug

SEQ ID NO: 62310 - RNA, 32 nt, Human
agugccauugcacuccagccugcacaacaaga

SEQ ID NO: 62311 - RNA, 32 nt, Human
agugccauugcacuccggccugggcaacagag

SEQ ID NO: 62312 - RNA, 32 nt, Human
agugccauuguacuccagcuugggcaacagag

SEQ ID NO: 62313 - RNA, 32 nt, Human
agugccauuucagcaguucagugaggagcuuu

SEQ ID NO: 62314 - RNA, 17 nt, Human
agugcccaacauggcgg

SEQ ID NO: 62315 - RNA, 32 nt, Human
agugcccaccgcccuccuccacuuggaaacgg

SEQ ID NO: 62316 - RNA, 32 nt, Human
agugcccagcacaaagcagauccucaauaaac

SEQ ID NO: 62317 - RNA, 32 nt, Human
agugcccagcaugaagguggggccagugcugg

SEQ ID NO: 62318 - RNA, 32 nt, Human
agugcccagcccacccccuugcccucucccag

SEQ ID NO: 62319 - RNA, 32 nt, Human
agugcccagcuccaaggcucuagaggguguuc

SEQ ID NO: 62320 - RNA, 32 nt, Human
agugcccaggauuaggcaguaccuccugcauc

SEQ ID NO: 62321 - RNA, 32 nt, Human
agugcccaggccccacacagucuucaaagguc

SEQ ID NO: 62322 - RNA, 32 nt, Human
agugcccaucaaccucugcccaacacagagcc

SEQ ID NO: 62323 - RNA, 32 nt, Human
agugcccaugcccucugugaagugcccaaaug

SEQ ID NO: 62324 - RNA, 32 nt, Human
agugcccauuccaacucagagaaucuuuacau

SEQ ID NO: 62325 - RNA, 32 nt, Human
agugccccacagggaccccagccugggugguc

SEQ ID NO: 62326 - RNA, 32 nt, Human
agugccccacugcacuccagccugggugacag

SEQ ID NO: 62327 - RNA, 32 nt, Human
agugcccccacccucaccuucuccuggugcau

SEQ ID NO: 62328 - RNA, 32 nt, Human
agugcccccucaggccagagggcagggccaac

SEQ ID NO: 62329 - RNA, 32 nt, Human
agugcccccugccacaucuccaggcugcgcac

SEQ ID NO: 62330 - RNA, 21 nt, Human
agugccccgugcaccuggcca

SEQ ID NO: 62331 - RNA, 32 nt, Human
agugccccuccagcuguggguuggcagugucc

SEQ ID NO: 62332 - RNA, 32 nt, Human
agugccccucccucccccuggccaagccuccu

SEQ ID NO: 62333 - RNA, 20 nt, Human
agugccccucgagcagccag

SEQ ID NO: 62334 - RNA, 32 nt, Human
agugcccgaagccaggagcccggggcgccuag

SEQ ID NO: 62335 - RNA, 32 nt, Human
agugcccgagcauccucuggugaccucccuca

SEQ ID NO: 62336 - RNA, 18 nt, Human
agugcccgcaggcugcug

SEQ ID NO: 62337 - RNA, 32 nt, Human
agugcccgcugggcccagccuggggacaggga

SEQ ID NO: 62338 - RNA, 32 nt, Human
agugcccuacaaaggcuagaacacuacagggg

SEQ ID NO: 62339 - RNA, 32 nt, Human
agugcccuccacccuuccuggugucugacccg

SEQ ID NO: 62340 - RNA, 32 nt, Human
agugcccucccucuguucccuggaccaccacc

SEQ ID NO: 62341 - RNA, 18 nt, Human
agugcccuccuaccccca

SEQ ID NO: 62342 - RNA, 32 nt, Human
agugcccuccuccccucucagccuccucuuua

SEQ ID NO: 62343 - RNA, 32 nt, Human
agugcccuccuggcuccugggcugggacaagu

SEQ ID NO: 62344 - RNA, 32 nt, Human
agugcccucuagggcagccaggggaauacuau

SEQ ID NO: 62345 - RNA, 23 nt, Human
agugcccucuguugaaauuguca

SEQ ID NO: 62346 - RNA, 32 nt, Human
agugcccugagucucaaggaagagucucuagg

SEQ ID NO: 62347 - RNA, 32 nt, Human
agugcccugcaugacagagggucuuuguugug

SEQ ID NO: 62348 - RNA, 32 nt, Human
agugcccugcauuuaaucagcaccugaugacu

SEQ ID NO: 62349 - RNA, 32 nt, Human
agugcccugcugucucuggacuucccaucggc

SEQ ID NO: 62350 - RNA, 32 nt, Human
agugcccuggguggaaggaaggcacugagagc

SEQ ID NO: 62351 - RNA, 32 nt, Human
agugcccugguggcaguggcugaaguggcggc

SEQ ID NO: 62352 - RNA, 32 nt, Human
agugcccuguguuccuggagaaggcauuccag

SEQ ID NO: 62353 - RNA, 32 nt, Human
agugcccuguucugccgguguguacagccuca

SEQ ID NO: 62354 - RNA, 28 nt, Human
agugcccuuagugcugccacacucccug

SEQ ID NO: 62355 - RNA, 32 nt, Human
agugcccuuugugggugacuucaggcuucccg

SEQ ID NO: 62356 - RNA, 32 nt, Human
agugccgagcuggcugguggcaguggugucgu

SEQ ID NO: 62357 - RNA, 32 nt, Human
agugccgauaaauaaagugguacugaaacaca

SEQ ID NO: 62358 - RNA, 32 nt, Human
agugccgcagaaccccagcgucacgaggauuu

SEQ ID NO: 62359 - RNA, 32 nt, Human
agugccgccagaccuacugcugugcuguuucu

SEQ ID NO: 62360 - RNA, 32 nt, Human
agugccgccagccugaccagaggggaggugga

SEQ ID NO: 62361 - RNA, 32 nt, Human
agugccgcugcacuccauucugggcaagagcu

SEQ ID NO: 62362 - RNA, 32 nt, Human
agugccggcugcagaagggcaaggugaccauu

SEQ ID NO: 62363 - RNA, 32 nt, Human
agugccgggaugacaggcaugagccaccgcgc

SEQ ID NO: 62364 - RNA, 32 nt, Human
agugccgggauuacagacgugagccacugugc

SEQ ID NO: 62365 - RNA, 32 nt, Human
agugccgggauuacaggcaugagccacugcac

SEQ ID NO: 62366 - RNA, 32 nt, Human
agugccgggauuacaggcgugagccaccgcgc

SEQ ID NO: 62367 - RNA, 32 nt, Human
agugccgggauuacaggcgugagccaccuugc

SEQ ID NO: 62368 - RNA, 32 nt, Human
agugccgggauuacaggcgugagccacugcgc

SEQ ID NO: 62369 - RNA, 32 nt, Human
agugccggggugaacccccgggggagccgaga

SEQ ID NO: 62370 - RNA, 32 nt, Human
agugccggggugaacccccgggggagccggga

SEQ ID NO: 62371 - RNA, 22 nt, Human
agugccguauugugacaugcug

SEQ ID NO: 62372 - RNA, 32 nt, Human
agugccguuuauuucagaagcuuccuggccac

SEQ ID NO: 62373 - RNA, 32 nt, Human
agugccuacuauuaaagcuuugcuccaaguuc

SEQ ID NO: 62374 - RNA, 32 nt, Human
agugccuagagauuuucacuccucuaacaucu

SEQ ID NO: 62375 - RNA, 32 nt, Human
agugccuagaggcacggagccaccagggauca

SEQ ID NO: 62376 - RNA, 32 nt, Human
agugccuaggacuuucuuccaccagcucaaag

SEQ ID NO: 62377 - RNA, 18 nt, Human
agugccuagggcacgugg

SEQ ID NO: 62378 - RNA, 32 nt, Human
agugccucaaagcaaaggcaagcaaaggaacc

SEQ ID NO: 62379 - RNA, 32 nt, Human
agugccucacagauugugugacuuuaggcaaa

SEQ ID NO: 62380 - RNA, 32 nt, Human
agugccucaccucccccugccucccagccucc

SEQ ID NO: 62381 - RNA, 32 nt, Human
agugccucacucugucacccaggcuggagugu

SEQ ID NO: 62382 - RNA, 32 nt, Human
agugccucagaugcauccuccccuucucuuuu

SEQ ID NO: 62383 - RNA, 32 nt, Human
agugccucaguuucagcuuuccugggcaccag

SEQ ID NO: 62384 - RNA, 32 nt, Human
agugccucaucuucaacuuuugugcuucccuu

SEQ ID NO: 62385 - RNA, 32 nt, Human
agugccuccagccagagcucccugcgcucgcu

SEQ ID NO: 62386 - RNA, 32 nt, Human
agugccucccaggaguccucaggcccugggga

SEQ ID NO: 62387 - RNA, 32 nt, Human
agugccucgagggcgccguucgggcggggagg

SEQ ID NO: 62388 - RNA, 32 nt, Human
agugccucuccuggcccugaaggugccacucc

SEQ ID NO: 62389 - RNA, 32 nt, Human
agugccucuccuggcccuggaaggugccacuc

SEQ ID NO: 62390 - RNA, 32 nt, Human
agugccucuccuggcccuggaaguugccacuc

SEQ ID NO: 62391 - RNA, 32 nt, Human
agugccucugcacuccagccugcgugacaaag

SEQ ID NO: 62392 - RNA, 32 nt, Human
agugccucugccagacacacacugccugaguu

SEQ ID NO: 62393 - RNA, 32 nt, Human
agugccucuggagggcccugggcucuggcaga

SEQ ID NO: 62394 - RNA, 32 nt, Human
agugccucuugcccucuccucaccuccuuuuc

SEQ ID NO: 62395 - RNA, 32 nt, Human
agugccugaggucacuguauagggggaugugg

SEQ ID NO: 62396 - RNA, 18 nt, Human
agugccugagucacguga

SEQ ID NO: 62397 - RNA, 32 nt, Human
agugccugauccugcccugggcucagagccag

SEQ ID NO: 62398 - RNA, 32 nt, Human
agugccugcagccugcccugccucucucacag

SEQ ID NO: 62399 - RNA, 17 nt, Human
agugccugcaggcugcu

SEQ ID NO: 62400 - RNA, 32 nt, Human
agugccugcagucccagcuacucgggaagcug

SEQ ID NO: 62401 - RNA, 32 nt, Human
agugccugccagagcccaagugccaucccaca

SEQ ID NO: 62402 - RNA, 32 nt, Human
agugccugcccaccgcucuacuucuaaccagg

SEQ ID NO: 62403 - RNA, 32 nt, Human
agugccugcccucccuucaucuacgcagucaa

SEQ ID NO: 62404 - RNA, 32 nt, Human
agugccugccuccuggcugacucuugaagccc

SEQ ID NO: 62405 - RNA, 32 nt, Human
agugccugccuccuuuuucagcucgucuugcg

SEQ ID NO: 62406 - RNA, 32 nt, Human
agugccugcuucugcuccaucaggugcagggg

SEQ ID NO: 62407 - RNA, 32 nt, Human
agugccuggacccagaggcuuugcaggacagu

SEQ ID NO: 62408 - RNA, 32 nt, Human
agugccuggacucccugcuccgugaggcgaau

SEQ ID NO: 62409 - RNA, 32 nt, Human
agugccuggcacauagucagugcccuaaguau

SEQ ID NO: 62410 - RNA, 32 nt, Human
agugccuggcacucugugggugcucaauaaau

SEQ ID NO: 62411 - RNA, 32 nt, Human
agugccuggccaggggcucugcugggaucaaa

SEQ ID NO: 62412 - RNA, 32 nt, Human
agugccugguagagacagagcggaacggccac

SEQ ID NO: 62413 - RNA, 32 nt, Human
agugccugguggagacagagcggaacgcccac

SEQ ID NO: 62414 - RNA, 32 nt, Human
agugccugguggaggggccuggaaaagacacc

SEQ ID NO: 62415 - RNA, 32 nt, Human
agugccuguaaucccagcuacucgggaggcug

SEQ ID NO: 62416 - RNA, 32 nt, Human
agugccuguaaucccagcuacuugggaggcug

SEQ ID NO: 62417 - RNA, 32 nt, Human
agugccuguaaucccagcuauucgggagccug

SEQ ID NO: 62418 - RNA, 32 nt, Human
agugccuguaaucccagcuauuugggaggcug

SEQ ID NO: 62419 - RNA, 32 nt, Human
agugccuguagucccagcuacucaggaggcug

SEQ ID NO: 62420 - RNA, 32 nt, Human
agugccuguagucccagcuacucuggaggcug

SEQ ID NO: 62421 - RNA, 32 nt, Human
agugccuguagucccagcugcucgggaggcug

SEQ ID NO: 62422 - RNA, 32 nt, Human
agugccugucaccacuguggauucaccugcac

SEQ ID NO: 62423 - RNA, 19 nt, Human
agugccugucuggcugcug

SEQ ID NO: 62424 - RNA, 29 nt, Human
agugccugucugugccugggagaacagag

SEQ ID NO: 62425 - RNA, 32 nt, Human
agugccuuacacuggacuucugaccccaugag

SEQ ID NO: 62426 - RNA, 32 nt, Human
agugccuucaaggagcuuacguucuaguuagg

SEQ ID NO: 62427 - RNA, 32 nt, Human
agugccuucauacacuguaccccagcucucuu

SEQ ID NO: 62428 - RNA, 32 nt, Human
agugccuugcucccccugcucacucucugcug

SEQ ID NO: 62429 - RNA, 32 nt, Human
agugccuuguugccucugcccuuugaagucgg

SEQ ID NO: 62430 - RNA, 32 nt, Human
agugccuuuaaucccaccucaggaggcugagg

SEQ ID NO: 62431 - RNA, 19 nt, Human
agugccuuuccauccguga

SEQ ID NO: 62432 - RNA, 32 nt, Human
agugccuuuuacaaaugcaguuuaucccuggu

SEQ ID NO: 62433 - RNA, 32 nt, Human
agugcgacagaccuccaugaaggggcugccuu

SEQ ID NO: 62434 - RNA, 32 nt, Human
agugcgaccugcuuuaacucugcagcaccgcu

SEQ ID NO: 62435 - RNA, 32 nt, Human
agugcgagcugcuguguguggaggcuccugag

SEQ ID NO: 62436 - RNA, 17 nt, Human
agugcgcaagugagaua

SEQ ID NO: 62437 - RNA, 32 nt, Human
agugcgcagccuuggcugcugggaaaugccca

SEQ ID NO: 62438 - RNA, 32 nt, Human
agugcgcaggugugaguguaaguucauguagg

SEQ ID NO: 62439 - RNA, 32 nt, Human
agugcgcaugugugugcgugcaugcacauaug

SEQ ID NO: 62440 - RNA, 32 nt, Human
agugcgccacuucacuccagccugggcaacag

SEQ ID NO: 62441 - RNA, 32 nt, Human
agugcgccaucuugcaagcagcucuuccagcc

SEQ ID NO: 62442 - RNA, 32 nt, Human
agugcgcccucccucccucccaucugggggua

SEQ ID NO: 62443 - RNA, 21 nt, Human
agugcgccuggcuggcugcug

SEQ ID NO: 62444 - RNA, 32 nt, Human
agugcgcgcggagcugcugggcgccgcuuggg

SEQ ID NO: 62445 - RNA, 32 nt, Human
agugcgcuagagcauucugggguggggcuugg

SEQ ID NO: 62446 - RNA, 32 nt, Human
agugcgcuguguccaaggaccucacccagcag

SEQ ID NO: 62447 - RNA, 32 nt, Human
agugcgcuugagcugcuccaaaccuggcccuu

SEQ ID NO: 62448 - RNA, 32 nt, Human
agugcggcaccagggcaggagcugcaguagcu

SEQ ID NO: 62449 - RNA, 17 nt, Human
agugcggcccgggcugc

SEQ ID NO: 62450 - RNA, 21 nt, Human
agugcgggacuggggcuccug

SEQ ID NO: 62451 - RNA, 21 nt, Human
agugcgggaggccagcuccug

SEQ ID NO: 62452 - RNA, 18 nt, Human
agugcgggcagagcacug

SEQ ID NO: 62453 - RNA, 32 nt, Human
agugcgggccggcagaggcuggcggggagcag

SEQ ID NO: 62454 - RNA, 19 nt, Human
agugcgggccugggcccug

SEQ ID NO: 62455 - RNA, 17 nt, Human
agugcgggcgccggcgc

SEQ ID NO: 62456 - RNA, 20 nt, Human
agugcgggcucccgcugcug

SEQ ID NO: 62457 - RNA, 18 nt, Human
agugcggggaagcgccgc

SEQ ID NO: 62458 - RNA, 18 nt, Human
agugcggggagagggagc

SEQ ID NO: 62459 - RNA, 21 nt, Human
agugcggggagcaggcugcug

SEQ ID NO: 62460 - RNA, 18 nt, Human
agugcggggaggcccugc

SEQ ID NO: 62461 - RNA, 15 nt, Human
agugcggggaggcug

SEQ ID NO: 62462 - RNA, 16 nt, Human
agugcggggagugcgc

SEQ ID NO: 62463 - RNA, 32 nt, Human
agugcggggauuacaggcuugagccacugcac

SEQ ID NO: 62464 - RNA, 19 nt, Human
agugcggggcgcccggcgc

SEQ ID NO: 62465 - RNA, 17 nt, Human
agugcggggcgccgcgc

SEQ ID NO: 62466 - RNA, 18 nt, Human
agugcggggcugcucugc

SEQ ID NO: 62467 - RNA, 21 nt, Human
agugcggggucccaagcccug

SEQ ID NO: 62468 - RNA, 32 nt, Human
agugcggggugggggcagagaugaggaggccu

SEQ ID NO: 62469 - RNA, 20 nt, Human
agugcgggucaaagccucug

SEQ ID NO: 62470 - RNA, 32 nt, Human
agugcgguauugcucugugaauucaaguucaa

SEQ ID NO: 62471 - RNA, 32 nt, Human
agugcggucacauacuuccagaagagcggacc

SEQ ID NO: 62472 - RNA, 32 nt, Human
agugcgguuguacauccuccccaccucauaac

SEQ ID NO: 62473 - RNA, 32 nt, Human
agugcgucucuuuuguuccuggcuuugacaug

SEQ ID NO: 62474 - RNA, 32 nt, Human
agugcgugagccacuuuagccaggauauacuu

SEQ ID NO: 62475 - RNA, 32 nt, Human
agugcgugauuucucagugauuuccuacagug

SEQ ID NO: 62476 - RNA, 32 nt, Human
agugcgugccugugaucccagcuacuugggag

SEQ ID NO: 62477 - RNA, 32 nt, Human
agugcguggcaggccccuguggaggaucaaug

SEQ ID NO: 62478 - RNA, 32 nt, Human
agugcuaaaugagaaagcccauguaggaauac

SEQ ID NO: 62479 - RNA, 21 nt, Human
agugcuacaccaccugccuga

SEQ ID NO: 62480 - RNA, 32 nt, Human
agugcuacccaucuccccucagaagaggcuuu

SEQ ID NO: 62481 - RNA, 32 nt, Human
agugcuaccugggcacacacguagacaagggc

SEQ ID NO: 62482 - RNA, 32 nt, Human
agugcuacgugauccucugccgcccagaccuc

SEQ ID NO: 62483 - RNA, 23 nt, Human
agugcuagaauuacaggccugag

SEQ ID NO: 62484 - RNA, 32 nt, Human
agugcuagcgcuccucuccagcaugcugcggc

SEQ ID NO: 62485 - RNA, 32 nt, Human
agugcuagcuacucagaaggcugaggugggag

SEQ ID NO: 62486 - RNA, 32 nt, Human
agugcuagcuucccuuaaucuuccagcagcaa

SEQ ID NO: 62487 - RNA, 32 nt, Human
agugcuaggauuacaggagugagccacugcgc

SEQ ID NO: 62488 - RNA, 23 nt, Human
agugcuaggauuacaggcaugag

SEQ ID NO: 62489 - RNA, 32 nt, Human
agugcuaggauuacaggcaugagccacagcac

SEQ ID NO: 62490 - RNA, 32 nt, Human
agugcuaggauuacaggcaugagccaccacau

SEQ ID NO: 62491 - RNA, 32 nt, Human
agugcuaggauuacaggcaugagccaccacgc

SEQ ID NO: 62492 - RNA, 32 nt, Human
agugcuaggauuacaggcaugagccaccaugc

SEQ ID NO: 62493 - RNA, 32 nt, Human
agugcuaggauuacaggcaugagccacugcac

SEQ ID NO: 62494 - RNA, 32 nt, Human
agugcuaggauuacaggcgugagccaccaaca

SEQ ID NO: 62495 - RNA, 32 nt, Human
agugcuaggauuacaggcgugagccaccacac

SEQ ID NO: 62496 - RNA, 32 nt, Human
agugcuaggauuacaggcgugagccaccacgc

SEQ ID NO: 62497 - RNA, 32 nt, Human
agugcuaggauuacaggcgugagccaccaugc

SEQ ID NO: 62498 - RNA, 32 nt, Human
agugcuaggauuacaggcgugagccaccguac

SEQ ID NO: 62499 - RNA, 32 nt, Human
agugcuaggauuacaggcgugagccaccgugc

SEQ ID NO: 62500 - RNA, 32 nt, Human
agugcuaggauuacaggcgugagccacugcag

SEQ ID NO: 62501 - RNA, 32 nt, Human
agugcuaggauuacaggcgugagccacuuacc

SEQ ID NO: 62502 - RNA, 32 nt, Human
agugcuaggauuacagguaugagccaccaugc

SEQ ID NO: 62503 - RNA, 19 nt, Human
agugcuaggauuacaggug

SEQ ID NO: 62504 - RNA, 32 nt, Human
agugcuaggauuacaggugugagccaccacac

SEQ ID NO: 62505 - RNA, 32 nt, Human
agugcuaggauuacaggugugagccaccacgc

SEQ ID NO: 62506 - RNA, 32 nt, Human
agugcuaggauuacaggugugagccacugugc

SEQ ID NO: 62507 - RNA, 32 nt, Human
agugcuaggauuacagguuugagccaccgugc

SEQ ID NO: 62508 - RNA, 32 nt, Human
agugcuaggauuauaggcaugagccaccacac

SEQ ID NO: 62509 - RNA, 32 nt, Human
agugcuaggauuauaggcgugaaccaccacgc

SEQ ID NO: 62510 - RNA, 32 nt, Human
agugcuaggauuauaggcuugagcuacugugc

SEQ ID NO: 62511 - RNA, 32 nt, Human
agugcuaggauuauaggugugagccaucacgc

SEQ ID NO: 62512 - RNA, 32 nt, Human
agugcuaggauuccaggugugagccacaucac

SEQ ID NO: 62513 - RNA, 32 nt, Human
agugcuaggauugcaggugugagccaccacac

SEQ ID NO: 62514 - RNA, 32 nt, Human
agugcuaggauugcaggugugagccacugugc

SEQ ID NO: 62515 - RNA, 32 nt, Human
agugcuaggguuacaggcaugagccacugugc

SEQ ID NO: 62516 - RNA, 32 nt, Human
agugcuaucugcaggcuggccagcuuccucug

SEQ ID NO: 62517 - RNA, 32 nt, Human
agugcuaugagacuaggagaggaacaccccag

SEQ ID NO: 62518 - RNA, 18 nt, Human
agugcuaugugugagaua

SEQ ID NO: 62519 - RNA, 23 nt, Human
agugcucaacuuagacucugggc

SEQ ID NO: 62520 - RNA, 32 nt, Human
agugcucacuguauaugaggcuuuucauuaau

SEQ ID NO: 62521 - RNA, 32 nt, Human
agugcucaggacucccuggccccugguaccuu

SEQ ID NO: 62522 - RNA, 32 nt, Human
agugcucaggaggcagcaucuggaguuggggc

SEQ ID NO: 62523 - RNA, 32 nt, Human
agugcucaggauuacaggcgugagccacugug

SEQ ID NO: 62524 - RNA, 32 nt, Human
agugcuccaaggaaaggaaggaaggaaggaaa

SEQ ID NO: 62525 - RNA, 32 nt, Human
agugcuccccugugacgugcuccaucaccggg

SEQ ID NO: 62526 - RNA, 32 nt, Human
agugcucccgaauccagacccaggaagaaagc

SEQ ID NO: 62527 - RNA, 32 nt, Human
agugcucccgggaacucugccugcgcggcggc

SEQ ID NO: 62528 - RNA, 32 nt, Human
agugcuccgcgagcuggcaagggagacacugg

SEQ ID NO: 62529 - RNA, 32 nt, Human
agugcuccuuagaauacuacagagaggaagag

SEQ ID NO: 62530 - RNA, 19 nt, Human
agugcucggauuacaggug

SEQ ID NO: 62531 - RNA, 32 nt, Human
agugcucggauuacaggugugagccacugugc

SEQ ID NO: 62532 - RNA, 32 nt, Human
agugcucuaguugcuggaucuaauggccuguc

SEQ ID NO: 62533 - RNA, 32 nt, Human
agugcucucagcuggcagugcaaugcuuguag

SEQ ID NO: 62534 - RNA, 32 nt, Human
agugcucucccaggaccucauuguggcagacg

SEQ ID NO: 62535 - RNA, 32 nt, Human
agugcucuccugccugggcagcaacaaccaag

SEQ ID NO: 62536 - RNA, 32 nt, Human
agugcucugcuuuuagucacguguauuuucau

SEQ ID NO: 62537 - RNA, 32 nt, Human
agugcucuggcugagggccuccaggaugaaga

SEQ ID NO: 62538 - RNA, 32 nt, Human
agugcucugucaaaagcacaaaaagaaacuuu

SEQ ID NO: 62539 - RNA, 32 nt, Human
agugcugaaaucugcagugagugaaagagcag

SEQ ID NO: 62540 - RNA, 32 nt, Human
agugcugaagaaaaagaaagugaagaagucgu

SEQ ID NO: 62541 - RNA, 23 nt, Human
agugcugagauuacacacgugag

SEQ ID NO: 62542 - RNA, 32 nt, Human
agugcugagauuacaggcaugagccaccacac

SEQ ID NO: 62543 - RNA, 32 nt, Human
agugcugagauuacaggcaugagccaccacgc

SEQ ID NO: 62544 - RNA, 32 nt, Human
agugcugagauuacaggcaugagccaccaugc

SEQ ID NO: 62545 - RNA, 32 nt, Human
agugcugagauuacaggcaugagccaccgcac

SEQ ID NO: 62546 - RNA, 32 nt, Human
agugcugagauuacaggcaugagccacugcac

SEQ ID NO: 62547 - RNA, 32 nt, Human
agugcugagauuacaggccugagccaccgugc

SEQ ID NO: 62548 - RNA, 23 nt, Human
agugcugagauuacaggcgugag

SEQ ID NO: 62549 - RNA, 32 nt, Human
agugcugagauuacaggcgugagccaccacac

SEQ ID NO: 62550 - RNA, 32 nt, Human
agugcugagauuacaggcgugagccaccgugc

SEQ ID NO: 62551 - RNA, 32 nt, Human
agugcugagauuacaggcgugagccacugugc

SEQ ID NO: 62552 - RNA, 32 nt, Human
agugcugagauuacaggcuugagccaccacgc

SEQ ID NO: 62553 - RNA, 32 nt, Human
agugcugagauuacaggggugagccacugcgc

SEQ ID NO: 62554 - RNA, 19 nt, Human
agugcugagauuacaggug

SEQ ID NO: 62555 - RNA, 32 nt, Human
agugcugagauuacaggugugagccaccaggc

SEQ ID NO: 62556 - RNA, 32 nt, Human
agugcugagauuacaggugugagccaccaugc

SEQ ID NO: 62557 - RNA, 32 nt, Human
agugcugagauuacaggugugagccaccgcac

SEQ ID NO: 62558 - RNA, 32 nt, Human
agugcugagauuacaggugugagccaccgugc

SEQ ID NO: 62559 - RNA, 32 nt, Human
agugcugagauuacaggugugagccacugugc

SEQ ID NO: 62560 - RNA, 32 nt, Human
agugcugagauuacgggcaugagccaccgcac

SEQ ID NO: 62561 - RNA, 32 nt, Human
agugcugagauuacuggcuugagccacugcac

SEQ ID NO: 62562 - RNA, 32 nt, Human
agugcugagauuauaggcaugagccaccacgc

SEQ ID NO: 62563 - RNA, 32 nt, Human
agugcugagauuauaggcaugagccacugugc

SEQ ID NO: 62564 - RNA, 32 nt, Human
agugcugagauuaugggcgugagccaccguga

SEQ ID NO: 62565 - RNA, 24 nt, Human
agugcugagauuuacaggcgugag

SEQ ID NO: 62566 - RNA, 25 nt, Human
agugcugagcuuuuaacaggaaaug

SEQ ID NO: 62567 - RNA, 32 nt, Human
agugcugaggucuucugcagcaguacuaucag

SEQ ID NO: 62568 - RNA, 32 nt, Human
agugcugagguuauaggugugagccacugucc

SEQ ID NO: 62569 - RNA, 32 nt, Human
agugcugaguacaccaggcuccucaggcaccu

SEQ ID NO: 62570 - RNA, 32 nt, Human
agugcugcacacacaaugauuacgggaaagcg

SEQ ID NO: 62571 - RNA, 32 nt, Human
agugcugcacacagaguaggcaucuuuauaug

SEQ ID NO: 62572 - RNA, 22 nt, Human
agugcugcaccaggcagccagc

SEQ ID NO: 62573 - RNA, 32 nt, Human
agugcugcagaacagcagaacuucuuccucuu

SEQ ID NO: 62574 - RNA, 32 nt, Human
agugcugcagagccacguggccgccacgcagu

SEQ ID NO: 62575 - RNA, 24 nt, Human
agugcugcagggauggaguggcgu

SEQ ID NO: 62576 - RNA, 32 nt, Human
agugcugcagugaacauacacaugcuuguauc

SEQ ID NO: 62577 - RNA, 32 nt, Human
agugcugccagccugugaugcaagaguccuaa

SEQ ID NO: 62578 - RNA, 32 nt, Human
agugcugcccggggccucaucugggccagcuu

SEQ ID NO: 62579 - RNA, 32 nt, Human
agugcugcccugccauaauccccaagcccagc

SEQ ID NO: 62580 - RNA, 32 nt, Human
agugcugcgauuacaggcaugagccaccgcgc

SEQ ID NO: 62581 - RNA, 32 nt, Human
agugcugcgauuacaggcgugagccaccgcac

SEQ ID NO: 62582 - RNA, 32 nt, Human
agugcugcgguugauuccagugagggagaaag

SEQ ID NO: 62583 - RNA, 32 nt, Human
agugcugcguucucccccucuuggcucuccug

SEQ ID NO: 62584 - RNA, 32 nt, Human
agugcugcugcugaccuucacugacagcuccu

SEQ ID NO: 62585 - RNA, 32 nt, Human
agugcugcugugaaagggcucuggacagcuca

SEQ ID NO: 62586 - RNA, 23 nt, Human
agugcuggaauuacaagcaugag

SEQ ID NO: 62587 - RNA, 32 nt, Human
agugcuggaauuacaagcaugagccacugugc

SEQ ID NO: 62588 - RNA, 32 nt, Human
agugcuggaauuacaggcaugagccaccacac

SEQ ID NO: 62589 - RNA, 32 nt, Human
agugcuggaauuacaggcaugagccaccgcgc

SEQ ID NO: 62590 - RNA, 32 nt, Human
agugcuggaauuacaggccugagccaccccac

SEQ ID NO: 62591 - RNA, 32 nt, Human
agugcuggaauuacaggcgugagccaccacgc

SEQ ID NO: 62592 - RNA, 32 nt, Human
agugcuggaauuacaggcgugagccaccacuc

SEQ ID NO: 62593 - RNA, 32 nt, Human
agugcuggaauuacaggcgugagccaccaugc

SEQ ID NO: 62594 - RNA, 32 nt, Human
agugcuggaauuacaggcgugagccaccgcgc

SEQ ID NO: 62595 - RNA, 32 nt, Human
agugcuggaauuacaggcgugagccacugcgc

SEQ ID NO: 62596 - RNA, 32 nt, Human
agugcuggaauuacaggcgugagccacugcuc

SEQ ID NO: 62597 - RNA, 19 nt, Human
agugcuggaauuacaggug

SEQ ID NO: 62598 - RNA, 32 nt, Human
agugcuggaauuacaggugugagccacucugc

SEQ ID NO: 62599 - RNA, 23 nt, Human
agugcuggaauuacuggcaugag

SEQ ID NO: 62600 - RNA, 32 nt, Human
agugcuggaauuacuggcaugagccaccgagg

SEQ ID NO: 62601 - RNA, 32 nt, Human
agugcuggaauugcaggcaugagccaccacuc

SEQ ID NO: 62602 - RNA, 19 nt, Human
agugcuggacaggcugcug

SEQ ID NO: 62603 - RNA, 32 nt, Human
agugcuggagaacaguguagccuggccuguac

SEQ ID NO: 62604 - RNA, 32 nt, Human
agugcuggagauuacaggcaugagccaccacg

SEQ ID NO: 62605 - RNA, 32 nt, Human
agugcuggaggaaccacgcuuccuaacugcug

SEQ ID NO: 62606 - RNA, 18 nt, Human
agugcuggauuacaggug

SEQ ID NO: 62607 - RNA, 32 nt, Human
agugcuggcauuacaggcaugagccaccacac

SEQ ID NO: 62608 - RNA, 32 nt, Human
agugcuggcauuacaggcgugagccaccacgc

SEQ ID NO: 62609 - RNA, 32 nt, Human
agugcuggcauuacaggcgugagccacugugc

SEQ ID NO: 62610 - RNA, 32 nt, Human
agugcuggcauuacagguaugagccacugcgc

SEQ ID NO: 62611 - RNA, 19 nt, Human
agugcuggcauuacaggug

SEQ ID NO: 62612 - RNA, 32 nt, Human
agugcuggcauuacaggugugagccaccgugc

SEQ ID NO: 62613 - RNA, 32 nt, Human
agugcuggccaccugguguuggugcacagacc

SEQ ID NO: 62614 - RNA, 32 nt, Human
agugcuggccacgucuccaccuaacaacccuc

SEQ ID NO: 62615 - RNA, 32 nt, Human
agugcuggccucugccuccaucucagucacac

SEQ ID NO: 62616 - RNA, 32 nt, Human
agugcuggcugcaggcaagaccaaggccacca

SEQ ID NO: 62617 - RNA, 32 nt, Human
agugcuggcugcagggucccaggugcaggagu

SEQ ID NO: 62618 - RNA, 32 nt, Human
agugcuggcugcuggcccacagcucugcugga

SEQ ID NO: 62619 - RNA, 32 nt, Human
agugcuggcuuccucuuugcauggacucugug

SEQ ID NO: 62620 - RNA, 32 nt, Human
agugcugggaaacagugcuaagaaggauacag

SEQ ID NO: 62621 - RNA, 32 nt, Human
agugcugggaauacaggcaugagccaccgcac

SEQ ID NO: 62622 - RNA, 19 nt, Human
agugcugggaauacaggug

SEQ ID NO: 62623 - RNA, 32 nt, Human
agugcugggacuacaggcaugagccaccacgc

SEQ ID NO: 62624 - RNA, 32 nt, Human
agugcugggacuacaggcaugagccacugugc

SEQ ID NO: 62625 - RNA, 32 nt, Human
agugcugggacuacaggcgugagccaccacgc

SEQ ID NO: 62626 - RNA, 32 nt, Human
agugcugggacuauaagugugagccacugcau

SEQ ID NO: 62627 - RNA, 32 nt, Human
agugcugggacugcaggcgugagccaccgcgc

SEQ ID NO: 62628 - RNA, 32 nt, Human
agugcugggaggauccuuagagaugccuggga

SEQ ID NO: 62629 - RNA, 32 nt, Human
agugcugggagggguggagcugccucauaauc

SEQ ID NO: 62630 - RNA, 32 nt, Human
agugcugggauaacaggcgugagccacuacaa

SEQ ID NO: 62631 - RNA, 32 nt, Human
agugcugggaucacagacaugagccaccacgc

SEQ ID NO: 62632 - RNA, 32 nt, Human
agugcugggaucacaggcaugagccaccgaac

SEQ ID NO: 62633 - RNA, 32 nt, Human
agugcugggaucacaggcaugagccacugugc

SEQ ID NO: 62634 - RNA, 23 nt, Human
agugcugggaucacaggcgugag

SEQ ID NO: 62635 - RNA, 32 nt, Human
agugcugggaucacaggcgugagccaccgcac

SEQ ID NO: 62636 - RNA, 32 nt, Human
agugcugggaucacaggcgugagccacugcgc

SEQ ID NO: 62637 - RNA, 32 nt, Human
agugcugggaugacaggcaugagccaccacgc

SEQ ID NO: 62638 - RNA, 32 nt, Human
agugcugggaugacaggcaugagccaccgugc

SEQ ID NO: 62639 - RNA, 32 nt, Human
agugcugggaugacaggcgugagccacagcuc

SEQ ID NO: 62640 - RNA, 32 nt, Human
agugcugggaugacaggcgugagccaccgcgc

SEQ ID NO: 62641 - RNA, 19 nt, Human
agugcugggaugacaggug

SEQ ID NO: 62642 - RNA, 32 nt, Human
agugcugggaugacaggugugagccaccgccc

SEQ ID NO: 62643 - RNA, 32 nt, Human
agugcugggaugacaggugugagccacugcgc

SEQ ID NO: 62644 - RNA, 32 nt, Human
agugcugggaugacaguugugagccacugcgc

SEQ ID NO: 62645 - RNA, 32 nt, Human
agugcugggaugauaggcgugagccaccacac

SEQ ID NO: 62646 - RNA, 23 nt, Human
agugcugggauuaaagacgugag

SEQ ID NO: 62647 - RNA, 32 nt, Human
agugcugggauuaaagacgugagccacggcac

SEQ ID NO: 62648 - RNA, 32 nt, Human
agugcugggauuaaagcugugagccacugugc

SEQ ID NO: 62649 - RNA, 32 nt, Human
agugcugggauuaaaggcguaagccacugcgc

SEQ ID NO: 62650 - RNA, 32 nt, Human
agugcugggauuaaaggcgugagccaccaugc

SEQ ID NO: 62651 - RNA, 32 nt, Human
agugcugggauuaaaggcgugagccaccguac

SEQ ID NO: 62652 - RNA, 32 nt, Human
agugcugggauuaaaggcgugagccaccgugc

SEQ ID NO: 62653 - RNA, 32 nt, Human
agugcugggauuaaaggugugagccaccaugc

SEQ ID NO: 62654 - RNA, 32 nt, Human
agugcugggauuaacagguaugaaccaccgcg

SEQ ID NO: 62655 - RNA, 32 nt, Human
agugcugggauuaacgggugugagccacggcg

SEQ ID NO: 62656 - RNA, 32 nt, Human
agugcugggauuaaggcgugagccacugcgcc

SEQ ID NO: 62657 - RNA, 32 nt, Human
agugcugggauuaauggcgugagccaccguac

SEQ ID NO: 62658 - RNA, 32 nt, Human
agugcugggauuaauggcgugagccacuguac

SEQ ID NO: 62659 - RNA, 32 nt, Human
agugcugggauuacaagaaugagccaccgugc

SEQ ID NO: 62660 - RNA, 32 nt, Human
agugcugggauuacaagcaugagccaccacac

SEQ ID NO: 62661 - RNA, 32 nt, Human
agugcugggauuacaagcaugagccaccacgc

SEQ ID NO: 62662 - RNA, 32 nt, Human
agugcugggauuacaagcaugagccaccgcac

SEQ ID NO: 62663 - RNA, 32 nt, Human
agugcugggauuacaagcaugagccacugugc

SEQ ID NO: 62664 - RNA, 32 nt, Human
agugcugggauuacaagcaugagcuacugcac

SEQ ID NO: 62665 - RNA, 20 nt, Human
agugcugggauuacaagcgu

SEQ ID NO: 62666 - RNA, 23 nt, Human
agugcugggauuacaagcgugag

SEQ ID NO: 62667 - RNA, 32 nt, Human
agugcugggauuacaagcgugagccaccacac

SEQ ID NO: 62668 - RNA, 32 nt, Human
agugcugggauuacaagcgugagccaccgacc

SEQ ID NO: 62669 - RNA, 32 nt, Human
agugcugggauuacaagcgugagccaccgggc

SEQ ID NO: 62670 - RNA, 32 nt, Human
agugcugggauuacaagcgugagccacugcac

SEQ ID NO: 62671 - RNA, 32 nt, Human
agugcugggauuacaagcgugagccacugugc

SEQ ID NO: 62672 - RNA, 32 nt, Human
agugcugggauuacaagggugagccaccaugc

SEQ ID NO: 62673 - RNA, 32 nt, Human
agugcugggauuacaaguaugagccacugcau

SEQ ID NO: 62674 - RNA, 32 nt, Human
agugcugggauuacaagugugagccaccacac

SEQ ID NO: 62675 - RNA, 32 nt, Human
agugcugggauuacaagugugagccaccacgc

SEQ ID NO: 62676 - RNA, 32 nt, Human
agugcugggauuacaaguuugagccacugcac

SEQ ID NO: 62677 - RNA, 32 nt, Human
agugcugggauuacaauugugagccaccacgu

SEQ ID NO: 62678 - RNA, 32 nt, Human
agugcugggauuacacgcgugagccacugugc

SEQ ID NO: 62679 - RNA, 32 nt, Human
agugcugggauuacagaagugagccacuguac

SEQ ID NO: 62680 - RNA, 32 nt, Human
agugcugggauuacagacacgagccaccucac

SEQ ID NO: 62681 - RNA, 23 nt, Human
agugcugggauuacagacaugag

SEQ ID NO: 62682 - RNA, 32 nt, Human
agugcugggauuacagacaugagccaccacgc

SEQ ID NO: 62683 - RNA, 32 nt, Human
agugcugggauuacagacaugagccaccaugc

SEQ ID NO: 62684 - RNA, 32 nt, Human
agugcugggauuacagacaugagccacugcgc

SEQ ID NO: 62685 - RNA, 32 nt, Human
agugcugggauuacagacaugagccacugugc

SEQ ID NO: 62686 - RNA, 32 nt, Human
agugcugggauuacagaccugagccaccacac

SEQ ID NO: 62687 - RNA, 23 nt, Human
agugcugggauuacagacgugag

SEQ ID NO: 62688 - RNA, 32 nt, Human
agugcugggauuacagacgugagccaccacgc

SEQ ID NO: 62689 - RNA, 32 nt, Human
aguuuaccucccaagcuggaguccagugguga

SEQ ID NO: 62690 - RNA, 32 nt, Human
aguuuaccuggucuuuuccuauugaagaauuu

SEQ ID NO: 62691 - RNA, 32 nt, Human
aguuuaccuguauaacaaaccugcacauguau

SEQ ID NO: 62692 - RNA, 32 nt, Human
aguuuacgccuguaaucccagcacugugggag

SEQ ID NO: 62693 - RNA, 32 nt, Human
aguuuacgcucaucucuucucucagcuaacuu

SEQ ID NO: 62694 - RNA, 32 nt, Human
aguuuacgcuguagauggaacauguuucugug

SEQ ID NO: 62695 - RNA, 32 nt, Human
aguuuacguuuacgacuuucuucugaacugcc

SEQ ID NO: 62696 - RNA, 23 nt, Human
aguuuacucaaucuccccuugca

SEQ ID NO: 62697 - RNA, 32 nt, Human
aguuuacucccaggccagggggcugccaucuu

SEQ ID NO: 62698 - RNA, 32 nt, Human
aguuuacucucucccucuacuaauuuccugcu

SEQ ID NO: 62699 - RNA, 32 nt, Human
aguuuacugagggugauaucuucagguaauca

SEQ ID NO: 62700 - RNA, 32 nt, Human
aguuuacuguguauaggaacgguuuguauuuc

SEQ ID NO: 62701 - RNA, 24 nt, Human
aguuuacuuaugcaucucuuugca

SEQ ID NO: 62702 - RNA, 32 nt, Human
aguuuacuugagauggagucucacucuguugc

SEQ ID NO: 62703 - RNA, 24 nt, Human
aguuuacuugguuucccuugugca

SEQ ID NO: 62704 - RNA, 32 nt, Human
aguuuacuuguguuuugcuacuugcaaaggaa

SEQ ID NO: 62705 - RNA, 23 nt, Human
aguuuacuuugagccuacuugca

SEQ ID NO: 62706 - RNA, 32 nt, Human
aguuuagaaaccagcuuauugccaaagggaaa

SEQ ID NO: 62707 - RNA, 32 nt, Human
aguuuagaaaugucacacauaacuucauaaca

SEQ ID NO: 62708 - RNA, 32 nt, Human
aguuuagaagaaaaguaggaguccaaaggaag

SEQ ID NO: 62709 - RNA, 32 nt, Human
aguuuagaagugaguguaauccagcaauacag

SEQ ID NO: 62710 - RNA, 32 nt, Human
aguuuagaccugccccucccacccccacccug

SEQ ID NO: 62711 - RNA, 32 nt, Human
aguuuagagaaaauucaaggaauggaagagua

SEQ ID NO: 62712 - RNA, 32 nt, Human
aguuuagagaaaugguagaugaaaugcucuuu

SEQ ID NO: 62713 - RNA, 32 nt, Human
aguuuagauccaguuggagguucucccuggcu

SEQ ID NO: 62714 - RNA, 32 nt, Human
aguuuagcaagcaacagaaacauacugaacau

SEQ ID NO: 62715 - RNA, 32 nt, Human
aguuuagcaaguacagugcuguccuaauguga

SEQ ID NO: 62716 - RNA, 32 nt, Human
aguuuagcaauggcgucuuucucugcugagac

SEQ ID NO: 62717 - RNA, 24 nt, Human
aguuuagccaugacaaaccaaaga

SEQ ID NO: 62718 - RNA, 21 nt, Human
aguuuagccauguccucaaga

SEQ ID NO: 62719 - RNA, 24 nt, Human
aguuuagccauuuugaacuuaaga

SEQ ID NO: 62720 - RNA, 32 nt, Human
aguuuagccugggagcaguggcucacgccuau

SEQ ID NO: 62721 - RNA, 32 nt, Human
aguuuagcucacacagguguuugcugacauuc

SEQ ID NO: 62722 - RNA, 32 nt, Human
aguuuagcuccaaaggaaaagagggaaauaug

SEQ ID NO: 62723 - RNA, 32 nt, Human
aguuuagcucugagaaccguagaugauuucag

SEQ ID NO: 62724 - RNA, 32 nt, Human
aguuuaggaaaucauaauguggcagagguggu

SEQ ID NO: 62725 - RNA, 32 nt, Human
aguuuaggaauggaacgcugagcugagcugag

SEQ ID NO: 62726 - RNA, 32 nt, Human
aguuuaggaauuggaggcggcagugagucaug

SEQ ID NO: 62727 - RNA, 32 nt, Human
aguuuaggaggugacugcauccuccagcaucu

SEQ ID NO: 62728 - RNA, 32 nt, Human
aguuuagggaaagaagguugcuguggugagga

SEQ ID NO: 62729 - RNA, 32 nt, Human
aguuuagggucaaauguaaacccuggaaccug

SEQ ID NO: 62730 - RNA, 32 nt, Human
aguuuagguauuuggauuugugaagaacuagu

SEQ ID NO: 62731 - RNA, 32 nt, Human
aguuuaguaagguuguguacacugacaccuuu

SEQ ID NO: 62732 - RNA, 32 nt, Human
aguuuagucaucuguuuccucagcuugaaaug

SEQ ID NO: 62733 - RNA, 32 nt, Human
aguuuagucauggagaauacuucccacauuuu

SEQ ID NO: 62734 - RNA, 32 nt, Human
aguuuaguccauacuuugcacugacauacuuu

SEQ ID NO: 62735 - RNA, 32 nt, Human
aguuuaguggacaacuaaaucagacucuugcc

SEQ ID NO: 62736 - RNA, 24 nt, Human
aguuuaguucuugguaucuuuuca

SEQ ID NO: 62737 - RNA, 32 nt, Human
aguuuaguugacugcuggaccuuggauauucu

SEQ ID NO: 62738 - RNA, 32 nt, Human
aguuuaguuguagaauaaaacuuaugagugac

SEQ ID NO: 62739 - RNA, 32 nt, Human
aguuuaguuuaugaauuuuagguuucaugaua

SEQ ID NO: 62740 - RNA, 32 nt, Human
aguuuaguuuuaaaacugcacugccaacaagu

SEQ ID NO: 62741 - RNA, 32 nt, Human
aguuuaguuuuccuccuugccuucccuucugu

SEQ ID NO: 62742 - RNA, 32 nt, Human
aguuuaguuuuucacuuuagcaaaggggcaau

SEQ ID NO: 62743 - RNA, 20 nt, Human
aguuuauacacucucuccuc

SEQ ID NO: 62744 - RNA, 32 nt, Human
aguuuauacagagcugacucaaaaagacaaaa

SEQ ID NO: 62745 - RNA, 32 nt, Human
aguuuauauaaaggaagcauugggacuugugg

SEQ ID NO: 62746 - RNA, 32 nt, Human
aguuuaugcaacuucugccuccccagguucaa

SEQ ID NO: 62747 - RNA, 32 nt, Human
aguuuauggcaaaaauagccauuuuccaagug

SEQ ID NO: 62748 - RNA, 32 nt, Human
aguuuaugggaaugccuuuucccucuggcacu

SEQ ID NO: 62749 - RNA, 32 nt, Human
aguuuaugggagaagggacugggccggcugcc

SEQ ID NO: 62750 - RNA, 32 nt, Human
aguuuaugguuggcagaauggagagaagucac

SEQ ID NO: 62751 - RNA, 32 nt, Human
aguuuaugugccaggaacaucauucuguccuu

SEQ ID NO: 62752 - RNA, 32 nt, Human
aguuuauguugggccuuccuuuuuggaaugua

SEQ ID NO: 62753 - RNA, 32 nt, Human
aguuuauuaaagauugacauuuuaaguacaac

SEQ ID NO: 62754 - RNA, 32 nt, Human
aguuuauuagcccuugauuucagcugaaaaua

SEQ ID NO: 62755 - RNA, 32 nt, Human
aguuuauuccuccugguggggaggcucugccc

SEQ ID NO: 62756 - RNA, 31 nt, Human
aguuuauugggaugguuucagaugcucagcu

SEQ ID NO: 62757 - RNA, 32 nt, Human
aguuuauuuccaguuugaugcugcaauaccac

SEQ ID NO: 62758 - RNA, 32 nt, Human
aguuuauuuucucuuacccuuuacuaauuuaa

SEQ ID NO: 62759 - RNA, 32 nt, Human
aguuucaaaggccacauaccucucugagacug

SEQ ID NO: 62760 - RNA, 21 nt, Human
aguuucaaauaccuacuucaa

SEQ ID NO: 62761 - RNA, 32 nt, Human
aguuucaacucauacauugucuuguuugauuu

SEQ ID NO: 62762 - RNA, 32 nt, Human
aguuucaagucaaguuccaccuuagcuccagg

SEQ ID NO: 62763 - RNA, 22 nt, Human
aguuucaaguuccugggcucaa

SEQ ID NO: 62764 - RNA, 31 nt, Human
aguuucaauuaaagcuggcuguugaauaacu

SEQ ID NO: 62765 - RNA, 32 nt, Human
aguuucacagcuuugccucuucuuuuugaugu

SEQ ID NO: 62766 - RNA, 32 nt, Human
aguuucaccauguuagccaggcuggucucgaa

SEQ ID NO: 62767 - RNA, 32 nt, Human
aguuucaccauguugaccaggcuggucuugaa

SEQ ID NO: 62768 - RNA, 32 nt, Human
aguuucaccauguugcccaggcuggucucaaa

SEQ ID NO: 62769 - RNA, 32 nt, Human
aguuucaccauguuggccaggcuggucaagaa

SEQ ID NO: 62770 - RNA, 32 nt, Human
aguuucaccauguuggccaggcuggucucaaa

SEQ ID NO: 62771 - RNA, 32 nt, Human
aguuucaccauguuggccaggcuggucuccaa

SEQ ID NO: 62772 - RNA, 32 nt, Human
aguuucaccauguuggccaggcuggucucgaa

SEQ ID NO: 62773 - RNA, 32 nt, Human
aguuucaccauguuggccaggcuggucuugaa

SEQ ID NO: 62774 - RNA, 32 nt, Human
aguuucacccaccccacccuuugcuuucauuu

SEQ ID NO: 62775 - RNA, 32 nt, Human
aguuucacccagcaagcgugagaacagguacu

SEQ ID NO: 62776 - RNA, 32 nt, Human
aguuucaccguguugaccaggcuggucuugaa

SEQ ID NO: 62777 - RNA, 31 nt, Human
aguuucacuaguggaaauaccaaaagcuucc

SEQ ID NO: 62778 - RNA, 32 nt, Human
aguuucacucugugaggagugagggaacccug

SEQ ID NO: 62779 - RNA, 32 nt, Human
aguuucacuguguuggccaggcuggucucaaa

SEQ ID NO: 62780 - RNA, 22 nt, Human
aguuucagaaaauacgccugga

SEQ ID NO: 62781 - RNA, 32 nt, Human
aguuucagaacuggacuuguuccuucacugcc

SEQ ID NO: 62782 - RNA, 32 nt, Human
aguuucagaccaccuuggcaacacagugagac

SEQ ID NO: 62783 - RNA, 32 nt, Human
aguuucagcucacugcaaccuccgccucccag

SEQ ID NO: 62784 - RNA, 32 nt, Human
aguuucaggaagaggcaagaugcauucaauuu

SEQ ID NO: 62785 - RNA, 32 nt, Human
aguuucaggccugugcauguguguacagcagg

SEQ ID NO: 62786 - RNA, 32 nt, Human
aguuucaggccuguucuagcaucuggccgggg

SEQ ID NO: 62787 - RNA, 32 nt, Human
aguuucagggccugaguccccaugcccugcuc

SEQ ID NO: 62788 - RNA, 32 nt, Human
aguuucagggcuaacgaccacagggucugcac

SEQ ID NO: 62789 - RNA, 32 nt, Human
aguuucaggggcuggggcugaacuggggcucc

SEQ ID NO: 62790 - RNA, 32 nt, Human
aguuucagggguggggccccagcuggagguua

SEQ ID NO: 62791 - RNA, 32 nt, Human
aguuucaguaccucagcuaucaacauuucuga

SEQ ID NO: 62792 - RNA, 32 nt, Human
aguuucagugccagaaugaauuuucuuguuuc

SEQ ID NO: 62793 - RNA, 32 nt, Human
aguuucagugguuccugggauguaguauaagu

SEQ ID NO: 62794 - RNA, 32 nt, Human
aguuucaguuaucagaguauuagaccagacuu

SEQ ID NO: 62795 - RNA, 32 nt, Human
aguuucaguuugcauugcagcugggauugaaa

SEQ ID NO: 62796 - RNA, 32 nt, Human
aguuucaucaugaagacagagucugggagcuu

SEQ ID NO: 62797 - RNA, 32 nt, Human
aguuucaucauguuggccaggauggucucgau

SEQ ID NO: 62798 - RNA, 32 nt, Human
aguuucauugaaaaucguggcucuauugcuuu

SEQ ID NO: 62799 - RNA, 32 nt, Human
aguuucauugcauuccaugaaaagugucuugg

SEQ ID NO: 62800 - RNA, 32 nt, Human
aguuucauuucaauucuuuccaugucucauca

SEQ ID NO: 62801 - RNA, 32 nt, Human
aguuuccaaaaauguaaauauacuguaacugu

SEQ ID NO: 62802 - RNA, 23 nt, Human
aguuuccaaaauggaaccaccuc

SEQ ID NO: 62803 - RNA, 32 nt, Human
aguuuccaaauugcccuaugcugugcuccaua

SEQ ID NO: 62804 - RNA, 32 nt, Human
aguuuccaaccagcacaaauuccauagucagg

SEQ ID NO: 62805 - RNA, 32 nt, Human
aguuuccaagugagaaggggagcagguguuua

SEQ ID NO: 62806 - RNA, 32 nt, Human
aguuuccaaguugggacccagaaggugggguu

SEQ ID NO: 62807 - RNA, 32 nt, Human
aguuuccaccucagcacuuugccuuaucaaca

SEQ ID NO: 62808 - RNA, 32 nt, Human
aguuuccacugcaguggcuggagagugaccug

SEQ ID NO: 62809 - RNA, 32 nt, Human
aguuuccacugugcgggaacucugagucagaa

SEQ ID NO: 62810 - RNA, 32 nt, Human
aguuuccagaaauacaaguuagauaauuggcu

SEQ ID NO: 62811 - RNA, 32 nt, Human
aguuuccagaaguaagagggaaaaugaccacg

SEQ ID NO: 62812 - RNA, 32 nt, Human
aguuuccagacucuguuacagaaacagagggc

SEQ ID NO: 62813 - RNA, 32 nt, Human
aguuuccagaucuguguguguacugucggcgc

SEQ ID NO: 62814 - RNA, 32 nt, Human
aguuuccagcagaaagaaucagagacuuuaau

SEQ ID NO: 62815 - RNA, 32 nt, Human
aguuuccaguucccaguauguggcccagagug

SEQ ID NO: 62816 - RNA, 32 nt, Human
aguuuccaguuuuugaugaauuuuggauugua

SEQ ID NO: 62817 - RNA, 32 nt, Human
aguuuccauagacugcggacuggggucuuccu

SEQ ID NO: 62818 - RNA, 32 nt, Human
aguuucccacagauucauaaagguccauacaa

SEQ ID NO: 62819 - RNA, 32 nt, Human
aguuucccagagagacauagcuggaaaauucc

SEQ ID NO: 62820 - RNA, 32 nt, Human
aguuucccaggaguuagagggaugcgaggcua

SEQ ID NO: 62821 - RNA, 32 nt, Human
aguuucccaguucuuccugcgugcgggcgaga

SEQ ID NO: 62822 - RNA, 32 nt, Human
aguuucccaucuuugugcagcuaccuccgcau

SEQ ID NO: 62823 - RNA, 32 nt, Human
aguuuccccaaaauuggacuucucagaaccuu

SEQ ID NO: 62824 - RNA, 32 nt, Human
aguuuccccacugugucugucccaucaugcgc

SEQ ID NO: 62825 - RNA, 32 nt, Human
aguuuccccauguuggccaggcuggucuugaa

SEQ ID NO: 62826 - RNA, 32 nt, Human
aguuucccuauauaacaaaccuucacauauac

SEQ ID NO: 62827 - RNA, 32 nt, Human
aguuucccucauccucuauccguaaguguccu

SEQ ID NO: 62828 - RNA, 32 nt, Human
aguuucccuccucugacucaacaaugccauca

SEQ ID NO: 62829 - RNA, 32 nt, Human
aguuucccuuaaauugguuauuucauguuguc

SEQ ID NO: 62830 - RNA, 32 nt, Human
aguuuccguucccuccuagucucuguucgcuc

SEQ ID NO: 62831 - RNA, 32 nt, Human
aguuuccucauuuuguuugacaggguccucag

SEQ ID NO: 62832 - RNA, 32 nt, Human
aguuuccucccagucagcaccaguuuagggga

SEQ ID NO: 62833 - RNA, 32 nt, Human
aguuuccucccccuccucuucucccuccucuc

SEQ ID NO: 62834 - RNA, 32 nt, Human
aguuuccucuacugcaaacaguguucugugac

SEQ ID NO: 62835 - RNA, 32 nt, Human
aguuuccucuccccucccuucuacuuccacug

SEQ ID NO: 62836 - RNA, 32 nt, Human
aguuuccugagagaauuggccauccggaaccc

SEQ ID NO: 62837 - RNA, 32 nt, Human
aguuuccugauaguuggaugaaaaacaaggag

SEQ ID NO: 62838 - RNA, 32 nt, Human
aguuuccugcaugacagaggaggcucaaggga

SEQ ID NO: 62839 - RNA, 32 nt, Human
aguuuccugccgugcccugccugagcucucag

SEQ ID NO: 62840 - RNA, 32 nt, Human
aguuuccugcuguugcuugugaauuucuuucu

SEQ ID NO: 62841 - RNA, 32 nt, Human
aguuuccuuccaacccuucccaccuuuccccc

SEQ ID NO: 62842 - RNA, 32 nt, Human
aguuuccuuucuuggaucugcaaagaaagcuu

SEQ ID NO: 62843 - RNA, 32 nt, Human
aguuucgagcgccgcuuccuggcggcgcgcac

SEQ ID NO: 62844 - RNA, 32 nt, Human
aguuucgcaaauguggggauugcugaauaauc

SEQ ID NO: 62845 - RNA, 32 nt, Human
aguuucgcaagaugaagaguuccagagaugga

SEQ ID NO: 62846 - RNA, 32 nt, Human
aguuucgccauguuggccaggcuggucucgaa

SEQ ID NO: 62847 - RNA, 32 nt, Human
aguuucggcaggcgggugaggucgcugagggc

SEQ ID NO: 62848 - RNA, 32 nt, Human
aguuucgucauguugcccaggcuggucucagg

SEQ ID NO: 62849 - RNA, 32 nt, Human
aguuucuaaggcagggcaugagcuggaaauag

SEQ ID NO: 62850 - RNA, 32 nt, Human
aguuucuacaaaauauuuaaaaauuagccagg

SEQ ID NO: 62851 - RNA, 32 nt, Human
aguuucuacuuacuugcucuuccaccuugucc

SEQ ID NO: 62852 - RNA, 32 nt, Human
aguuucuagccccagguuccugguuguguccg

SEQ ID NO: 62853 - RNA, 32 nt, Human
aguuucuagugccacacacaguauuuagaaaa

SEQ ID NO: 62854 - RNA, 32 nt, Human
aguuucuauccaggaauguucacauccaaagg

SEQ ID NO: 62855 - RNA, 32 nt, Human
aguuucuauuuuccucccuucucagacagggc

SEQ ID NO: 62856 - RNA, 32 nt, Human
aguuucucaaaacccuuaaaagaaggacccuu

SEQ ID NO: 62857 - RNA, 32 nt, Human
aguuucucaaccuuuauuuuuaaugaaggagg

SEQ ID NO: 62858 - RNA, 31 nt, Human
aguuucucaauaaaguuguuuggaaaauauu

SEQ ID NO: 62859 - RNA, 32 nt, Human
aguuucucacuuacucuuucugagguccaggg

SEQ ID NO: 62860 - RNA, 32 nt, Human
aguuucucagacuguagccauugaaaauuaga

SEQ ID NO: 62861 - RNA, 32 nt, Human
aguuucuccaucucccugcugcagccccgagg

SEQ ID NO: 62862 - RNA, 20 nt, Human
aguuucucccccuccucucc

SEQ ID NO: 62863 - RNA, 32 nt, Human
aguuucuccuccucacagauaggggcugaggc

SEQ ID NO: 62864 - RNA, 32 nt, Human
aguuucucguggggagauggaggcagagccca

SEQ ID NO: 62865 - RNA, 32 nt, Human
aguuucucugagaaauagagacaggauucucu

SEQ ID NO: 62866 - RNA, 32 nt, Human
aguuucugagucuguguugcagccucugacac

SEQ ID NO: 62867 - RNA, 32 nt, Human
aguuucugcaccugucaaauaggguuuauguu

SEQ ID NO: 62868 - RNA, 32 nt, Human
aguuucugcacucagccaggcggcaucaaugg

SEQ ID NO: 62869 - RNA, 32 nt, Human
aguuucugccaccuccccuccugagccugcug

SEQ ID NO: 62870 - RNA, 32 nt, Human
aguuucugcgcuuccuucucccucucuccaga

SEQ ID NO: 62871 - RNA, 32 nt, Human
aguuucugcucacccacauccucccuccacag

SEQ ID NO: 62872 - RNA, 32 nt, Human
aguuucugcuucuucccugccucugccuggcc

SEQ ID NO: 62873 - RNA, 32 nt, Human
aguuucugcuuggcacagucucugccugcuug

SEQ ID NO: 62874 - RNA, 32 nt, Human
aguuucuggguccccacagagcucgggaaaca

SEQ ID NO: 62875 - RNA, 32 nt, Human
aguuucuggugcuauuuuuguguuguaaugug

SEQ ID NO: 62876 - RNA, 32 nt, Human
aguuucugguucucacacuguacucugagguc

SEQ ID NO: 62877 - RNA, 32 nt, Human
aguuucuguaaaaauggcaagccacaugcuuu

SEQ ID NO: 62878 - RNA, 32 nt, Human
aguuucuguucccagcaccugccuuugaagga

SEQ ID NO: 62879 - RNA, 32 nt, Human
aguuucuguuugauuuggaucaucucaggauc

SEQ ID NO: 62880 - RNA, 32 nt, Human
aguuucuuaauuguggacaaauuaacaguugg

SEQ ID NO: 62881 - RNA, 32 nt, Human
aguuucuuaucuauaaaaugggauuauaaaau

SEQ ID NO: 62882 - RNA, 32 nt, Human
aguuucuucauacuucugucacuuuuuccauu

SEQ ID NO: 62883 - RNA, 32 nt, Human
aguuucuucccagagagucugucccagaagga

SEQ ID NO: 62884 - RNA, 32 nt, Human
aguuucuuccccaagagcuguuagguaucaaa

SEQ ID NO: 62885 - RNA, 32 nt, Human
aguuucuucugagcucaggugucuggcuauuu

SEQ ID NO: 62886 - RNA, 32 nt, Human
aguuucuugauaggauagauacccacauacag

SEQ ID NO: 62887 - RNA, 32 nt, Human
aguuucuugcagaaaacuuucacauucaucuc

SEQ ID NO: 62888 - RNA, 32 nt, Human
aguuucuugguugggacacuccucuggcagcc

SEQ ID NO: 62889 - RNA, 32 nt, Human
aguuucuuucucuuccuucauagaugacacgg

SEQ ID NO: 62890 - RNA, 32 nt, Human
aguuucuuuuugaauacuuguuucuuuagcac

SEQ ID NO: 62891 - RNA, 32 nt, Human
aguuucuuuuugcccaggcuggagugcagugg

SEQ ID NO: 62892 - RNA, 32 nt, Human
aguuugaaaccagccuggccaacauggugaaa

SEQ ID NO: 62893 - RNA, 32 nt, Human
aguuugaaaccagucucaccaggcgcaguggc

SEQ ID NO: 62894 - RNA, 32 nt, Human
aguuugaaagagaggguucccuaugaauaaga

SEQ ID NO: 62895 - RNA, 32 nt, Human
aguuugaacucugacaccacauuuuccuucua

SEQ ID NO: 62896 - RNA, 32 nt, Human
aguuugaagaacacugguaauguguggaguau

SEQ ID NO: 62897 - RNA, 32 nt, Human
aguuugaaggacauugauaaacugugauuuua

SEQ ID NO: 62898 - RNA, 32 nt, Human
aguuugaagguaacugagagcagaugguccuc

SEQ ID NO: 62899 - RNA, 19 nt, Human
aguuugaagguucucggaa

SEQ ID NO: 62900 - RNA, 32 nt, Human
aguuugaagucuuccuccucugugucuuccca

SEQ ID NO: 62901 - RNA, 32 nt, Human
aguuugaauacugugaauucauuacgaagaau

SEQ ID NO: 62902 - RNA, 32 nt, Human
aguuugacaaauccugcaguguuuccaggcau

SEQ ID NO: 62903 - RNA, 32 nt, Human
aguuugacaguggccucagguucacagugcac

SEQ ID NO: 62904 - RNA, 32 nt, Human
aguuugaccaucacccucagcaguucagcucc

SEQ ID NO: 62905 - RNA, 32 nt, Human
aguuugacuaugccgucuucugcccuaaccug

SEQ ID NO: 62906 - RNA, 32 nt, Human
aguuugagacagcuccguguggagagcuuagc

SEQ ID NO: 62907 - RNA, 32 nt, Human
aguuugagacaggagaccuggcacuggaugca

SEQ ID NO: 62908 - RNA, 32 nt, Human
aguuugagaccagccuagucaacaugaggaaa

SEQ ID NO: 62909 - RNA, 32 nt, Human
aguuugagaccagccugagugacauagugaga

SEQ ID NO: 62910 - RNA, 32 nt, Human
aguuugagaccagccuggccaacagggugaaa

SEQ ID NO: 62911 - RNA, 32 nt, Human
aguuugagaccagccugggcaacagagugaga

SEQ ID NO: 62912 - RNA, 32 nt, Human
aguuugagaccagccugggcaacaggguaagg

SEQ ID NO: 62913 - RNA, 32 nt, Human
aguuugagaccagcuuagccaacauaguaaga

SEQ ID NO: 62914 - RNA, 32 nt, Human
aguuugagaccagcuuggugaaacccugucuc

SEQ ID NO: 62915 - RNA, 32 nt, Human
aguuugagacuauccuggucaacaugaugaaa

SEQ ID NO: 62916 - RNA, 32 nt, Human
aguuugagccagccuggccaacauggugaaac

SEQ ID NO: 62917 - RNA, 32 nt, Human
aguuugagccugggcaauguagcaagaccccc

SEQ ID NO: 62918 - RNA, 32 nt, Human
aguuugaggaagagcccagaagucuaacaggu

SEQ ID NO: 62919 - RNA, 32 nt, Human
aguuugaggaauauuucaagcucugcaacagg

SEQ ID NO: 62920 - RNA, 32 nt, Human
aguuugaggcugcagugagcugugauagcacc

SEQ ID NO: 62921 - RNA, 32 nt, Human
aguuugaggcuuuguuaaaaguggggagaagg

SEQ ID NO: 62922 - RNA, 32 nt, Human
aguuugaguguguguggugugugcaucuggug

SEQ ID NO: 62923 - RNA, 32 nt, Human
aguuugauaaucaguauaucccuucccaaccc

SEQ ID NO: 62924 - RNA, 32 nt, Human
aguuugaucucagacugcugugcuagcaauca

SEQ ID NO: 62925 - RNA, 32 nt, Human
aguuugaugcagagcuuuuuagccaugaagaa

SEQ ID NO: 62926 - RNA, 32 nt, Human
aguuugcaaaggaccagguaauuggggagggg

SEQ ID NO: 62927 - RNA, 32 nt, Human
aguuugcaccuugauuuccccagugaaaaggg

SEQ ID NO: 62928 - RNA, 32 nt, Human
aguuugcaguccugugugcuucccucucuuau

SEQ ID NO: 62929 - RNA, 32 nt, Human
aguuugcagugagccgagagugcgccacuuca

SEQ ID NO: 62930 - RNA, 32 nt, Human
aguuugcagugagccgagauagugccauugua

SEQ ID NO: 62931 - RNA, 32 nt, Human
aguuugcagugagccgagaucgugucacugca

SEQ ID NO: 62932 - RNA, 32 nt, Human
aguuugcagugcguuucaucaucuuuauguga

SEQ ID NO: 62933 - RNA, 32 nt, Human
aguuugcagugcugggcaggugacuucaucuc

SEQ ID NO: 62934 - RNA, 32 nt, Human
aguuugcaguuaugcagaauccaaaguaaaug

SEQ ID NO: 62935 - RNA, 32 nt, Human
aguuugcaucacugcacuccagccugggcaac

SEQ ID NO: 62936 - RNA, 32 nt, Human
aguuugccaaccuuauuuguagccugauuggg

SEQ ID NO: 62937 - RNA, 20 nt, Human
aguuugccagaauuuuucua

SEQ ID NO: 62938 - RNA, 32 nt, Human
aguuugcccaguacuggagaaaaugaacuggg

SEQ ID NO: 62939 - RNA, 32 nt, Human
aguuugcccgcgggugugugaagggagacagu

SEQ ID NO: 62940 - RNA, 32 nt, Human
aguuugccgagcugcccagccaggcuguuccc

SEQ ID NO: 62941 - RNA, 32 nt, Human
aguuugccuccaacaaccugaggucccugggg

SEQ ID NO: 62942 - RNA, 32 nt, Human
aguuugccucugcacgugcacacaccugcaca

SEQ ID NO: 62943 - RNA, 32 nt, Human
aguuugccugagcucaggaguuugagaccaac

SEQ ID NO: 62944 - RNA, 32 nt, Human
aguuugccuucugaccucauuuccuucuugau

SEQ ID NO: 62945 - RNA, 32 nt, Human
aguuugcuaguaucauuagaaugugaaauaga

SEQ ID NO: 62946 - RNA, 32 nt, Human
aguuugcuaugccuaggaaaugguuuaaacaa

SEQ ID NO: 62947 - RNA, 32 nt, Human
aguuugcucaggaaguucggggcaugcaggcc

SEQ ID NO: 62948 - RNA, 32 nt, Human
aguuugcucgcuuuccuccccugccggccccc

SEQ ID NO: 62949 - RNA, 32 nt, Human
aguuugcugauaaaugucuguuggauucuuuu

SEQ ID NO: 62950 - RNA, 32 nt, Human
aguuugcugcggccucgaccuccugggcuuaa

SEQ ID NO: 62951 - RNA, 20 nt, Human
aguuugcugcugauucuucc

SEQ ID NO: 62952 - RNA, 32 nt, Human
aguuugcuuaauaccugggugaugaaauaauu

SEQ ID NO: 62953 - RNA, 32 nt, Human
aguuugcuugccucaucugucaaacaagagag

SEQ ID NO: 62954 - RNA, 32 nt, Human
aguuugcuuguauuagcugugccuucauuauu

SEQ ID NO: 62955 - RNA, 32 nt, Human
aguuugcuuuccaaucaaagggcauuuauuuu

SEQ ID NO: 62956 - RNA, 19 nt, Human
aguuugcuuuucuaccauc

SEQ ID NO: 62957 - RNA, 32 nt, Human
aguuugcuuuugauuugcaucuucucacuagu

SEQ ID NO: 62958 - RNA, 32 nt, Human
aguuugcuuuugcccaaggcccuuaacauuug

SEQ ID NO: 62959 - RNA, 32 nt, Human
aguuuggaaguuauguaacagagcagguugag

SEQ ID NO: 62960 - RNA, 32 nt, Human
aguuuggaccagccugggcaacauggugaaac

SEQ ID NO: 62961 - RNA, 32 nt, Human
aguuuggacuacagguacaugccaccacaccu

SEQ ID NO: 62962 - RNA, 32 nt, Human
aguuuggagaaaugaugagcuacgccuugaug

SEQ ID NO: 62963 - RNA, 32 nt, Human
aguuuggagcagugcugaggccaaagccgccu

SEQ ID NO: 62964 - RNA, 32 nt, Human
aguuuggagcauugcccucuaagagcuuuaaa

SEQ ID NO: 62965 - RNA, 32 nt, Human
aguuuggaggcaggcguugagcugugcacauc

SEQ ID NO: 62966 - RNA, 32 nt, Human
aguuuggagggaggggaauggaagggcaugga

SEQ ID NO: 62967 - RNA, 32 nt, Human
aguuuggaggugcuccuugaggugggaaguau

SEQ ID NO: 62968 - RNA, 32 nt, Human
aguuuggcaauaguuugcauagagguaccagc

SEQ ID NO: 62969 - RNA, 32 nt, Human
aguuuggcggcggcuccgggaggcagagcggg

SEQ ID NO: 62970 - RNA, 32 nt, Human
aguuugggaaaagauuauuuuuaagcuuaaaa

SEQ ID NO: 62971 - RNA, 32 nt, Human
aguuugggacagugggggaggagaugggaagg

SEQ ID NO: 62972 - RNA, 32 nt, Human
aguuugggagagaggagagaaguggguguggu

SEQ ID NO: 62973 - RNA, 19 nt, Human
aguuugggaggcugagccg

SEQ ID NO: 62974 - RNA, 32 nt, Human
aguuugggagggcugguaagcuccauccuuuc

SEQ ID NO: 62975 - RNA, 32 nt, Human
aguuugggauggaggugggagaacaaaaauga

SEQ ID NO: 62976 - RNA, 32 nt, Human
aguuugggauuuguuuuuaaauaauuuauacc

SEQ ID NO: 62977 - RNA, 21 nt, Human
aguuugggcaacauggcgaaa

SEQ ID NO: 62978 - RNA, 32 nt, Human
aguuugggccacugcacucuagccuggcaaca

SEQ ID NO: 62979 - RNA, 32 nt, Human
aguuugggcuggaaggagagaugccagcccuc

SEQ ID NO: 62980 - RNA, 32 nt, Human
aguuugggcugggggccaggguuggguggguc

SEQ ID NO: 62981 - RNA, 32 nt, Human
aguuuggggaaagcgggaggcacuucccaggg

SEQ ID NO: 62982 - RNA, 26 nt, Human
aguuuggggagcagccccuggcuccu

SEQ ID NO: 62983 - RNA, 32 nt, Human
aguuuggggccuugguucccaccugcagaugc

SEQ ID NO: 62984 - RNA, 32 nt, Human
aguuugggggaagagaaacuugcagugaaaag

SEQ ID NO: 62985 - RNA, 32 nt, Human
aguuugggguagggcuggaggaucgcuccugu

SEQ ID NO: 62986 - RNA, 31 nt, Human
aguuuggggucaagagagcauagguagguuc

SEQ ID NO: 62987 - RNA, 32 nt, Human
aguuuggggugagguaguuggcauaggcuuau

SEQ ID NO: 62988 - RNA, 32 nt, Human
aguuugggguucuuccuggugcaggggcugaa

SEQ ID NO: 62989 - RNA, 32 nt, Human
aguuugggucugggacuggagauuggccauua

SEQ ID NO: 62990 - RNA, 32 nt, Human
aguuuggugcaggagcaggggcagggggccac

SEQ ID NO: 62991 - RNA, 19 nt, Human
aguuuggugcaucuugguu

SEQ ID NO: 62992 - RNA, 32 nt, Human
aguuugguguguccuccgccuuaccaggagaa

SEQ ID NO: 62993 - RNA, 32 nt, Human
aguuugguuccaugcuuugaaggcaggcuuua

SEQ ID NO: 62994 - RNA, 32 nt, Human
aguuugguuuuagcuggggauugugcuggcau

SEQ ID NO: 62995 - RNA, 19 nt, Human
aguuugguuuugcacauua

SEQ ID NO: 62996 - RNA, 18 nt, Human
aguuuguaaguaucauua

SEQ ID NO: 62997 - RNA, 32 nt, Human
aguuuguacauacacuaguggcauuucuuauc

SEQ ID NO: 62998 - RNA, 32 nt, Human
aguuuguacuuauuucaucaagcuuuucuaag

SEQ ID NO: 62999 - RNA, 32 nt, Human
aguuuguagauauugccaagauuucccaggcu

SEQ ID NO: 63000 - RNA, 32 nt, Human
aguuuguauguuuaaguggucaagcaaggcuc

SEQ ID NO: 63001 - RNA, 32 nt, Human
aguuuguauuuuuaguagagacaggguuucuc

SEQ ID NO: 63002 - RNA, 32 nt, Human
aguuugucacccaggcuggagugcaguggcau

SEQ ID NO: 63003 - RNA, 32 nt, Human
aguuugucacccaggcuggagugcuguggugu

SEQ ID NO: 63004 - RNA, 18 nt, Human
aguuugucaguaccguua

SEQ ID NO: 63005 - RNA, 18 nt, Human
aguuugucauucaccuca

SEQ ID NO: 63006 - RNA, 18 nt, Human
aguuuguccaucaccauu

SEQ ID NO: 63007 - RNA, 20 nt, Human
aguuugucccaucugaacug

SEQ ID NO: 63008 - RNA, 32 nt, Human
aguuugucuuaucugcugauguguccccaucu

SEQ ID NO: 63009 - RNA, 32 nt, Human
aguuugucuuccucuuguuuacgacgugaucu

SEQ ID NO: 63010 - RNA, 18 nt, Human
aguuugucuuuucuuuca

SEQ ID NO: 63011 - RNA, 32 nt, Human
aguuugucuuuucuuucagaaacaucucuuag

SEQ ID NO: 63012 - RNA, 32 nt, Human
aguuugugaaaugaugagggcauuuuaucugc

SEQ ID NO: 63013 - RNA, 32 nt, Human
aguuugugagccagcccggcccuguacagaug

SEQ ID NO: 63014 - RNA, 32 nt, Human
aguuugugagccagcccggcccuguacaggug

SEQ ID NO: 63015 - RNA, 21 nt, Human
aguuugugauugcagugaaua

SEQ ID NO: 63016 - RNA, 32 nt, Human
aguuugugccucacacuccagccuggguaaca

SEQ ID NO: 63017 - RNA, 32 nt, Human
aguuugugucuuucuuucuguccauaacugaa

SEQ ID NO: 63018 - RNA, 32 nt, Human
aguuuguguugacuuaacauugaguucaagcc

SEQ ID NO: 63019 - RNA, 19 nt, Human
aguuuguguuucuacuauu

SEQ ID NO: 63020 - RNA, 18 nt, Human
aguuuguuaaguaccauc

SEQ ID NO: 63021 - RNA, 32 nt, Human
aguuuguuaggugcauuugagcacacauuuua

SEQ ID NO: 63022 - RNA, 31 nt, Human
aguuuguucaauaaauaugcuugauggagcu

SEQ ID NO: 63023 - RNA, 32 nt, Human
aguuuguucuauucuguuuauuuggaaacugc

SEQ ID NO: 63024 - RNA, 32 nt, Human
aguuuguugcccaggcuggagugaguggcaca

SEQ ID NO: 63025 - RNA, 32 nt, Human
aguuuguuuacuuaugcccuccggaaaucaug

SEQ ID NO: 63026 - RNA, 32 nt, Human
aguuuguuuccuggaaacuuugacaagcuuua

SEQ ID NO: 63027 - RNA, 19 nt, Human
aguuuguuucuuuuuauua

SEQ ID NO: 63028 - RNA, 18 nt, Human
aguuuguuugcugccauu

SEQ ID NO: 63029 - RNA, 32 nt, Human
aguuuguuuuuaccucugccuccugguuuuca

SEQ ID NO: 63030 - RNA, 32 nt, Human
aguuuguuuuucucaggauauuguccuggccc

SEQ ID NO: 63031 - RNA, 19 nt, Human
aguuuguuuuucucuauua

SEQ ID NO: 63032 - RNA, 17 nt, Human
aguuuguuuuucuguca

SEQ ID NO: 63033 - RNA, 19 nt, Human
aguuuguuuuuuauuauca

SEQ ID NO: 63034 - RNA, 17 nt, Human
aguuuguuuuuuccuca

SEQ ID NO: 63035 - RNA, 20 nt, Human
aguuuuaaaaaccaaagcau

SEQ ID NO: 63036 - RNA, 32 nt, Human
aguuuuaaaauuaggaguuaagagagaagagg

SEQ ID NO: 63037 - RNA, 32 nt, Human
aguuuuaaaggauguucauacacaugguauag

SEQ ID NO: 63038 - RNA, 32 nt, Human
aguuuuaagaaauggcucuaucaaagaagcaa

SEQ ID NO: 63039 - RNA, 32 nt, Human
aguuuuaagaauuguuccuuggggaaaaauuu

SEQ ID NO: 63040 - RNA, 32 nt, Human
aguuuuaaggugcagggcacuuuaggguacug

SEQ ID NO: 63041 - RNA, 32 nt, Human
aguuuuacagcaguuccaacccuggaaucaac

SEQ ID NO: 63042 - RNA, 32 nt, Human
aguuuuacaggguuauacauuguuaagggacc

SEQ ID NO: 63043 - RNA, 32 nt, Human
aguuuuaccauguuggccaggcuggucuugaa

SEQ ID NO: 63044 - RNA, 32 nt, Human
aguuuuacccauuaagaaacugaagaucagag

SEQ ID NO: 63045 - RNA, 32 nt, Human
aguuuuacuaugaacagcacccugcugagauc

SEQ ID NO: 63046 - RNA, 32 nt, Human
aguuuuacugauuuuaucuccaccucucugau

SEQ ID NO: 63047 - RNA, 32 nt, Human
aguuuuacugcacauuacguuggugcaaaagu

SEQ ID NO: 63048 - RNA, 32 nt, Human
aguuuuacuguacuuucuugucugcacagaaa

SEQ ID NO: 63049 - RNA, 32 nt, Human
aguuuuagaaaugagaaaaauacagaguuuua

SEQ ID NO: 63050 - RNA, 32 nt, Human
aguuuuaguagagacgggguuucuccauguug

SEQ ID NO: 63051 - RNA, 32 nt, Human
aguuuuaguaugguuuugucucuaaugaauaa

SEQ ID NO: 63052 - RNA, 32 nt, Human
aguuuuagucaugggcuuucuucaccugcucu

SEQ ID NO: 63053 - RNA, 29 nt, Human
aguuuuaguuugugugugucuugcugggg

SEQ ID NO: 63054 - RNA, 32 nt, Human
aguuuuaucucccacuuuaggguggcagccag

SEQ ID NO: 63055 - RNA, 32 nt, Human
aguuuuaucucucucaagcucuaccuuccgca

SEQ ID NO: 63056 - RNA, 32 nt, Human
aguuuuaucugcuucaaaaugccauugaucau

SEQ ID NO: 63057 - RNA, 32 nt, Human
aguuuuauugaccccucuaauucucuuaccca

SEQ ID NO: 63058 - RNA, 32 nt, Human
aguuuuauuuggaaccuucuaagaggaaauca

SEQ ID NO: 63059 - RNA, 22 nt, Human
aguuuuauuuuggucucuucca

SEQ ID NO: 63060 - RNA, 32 nt, Human
aguuuuauuuuuggagaugacacaccuacugc

SEQ ID NO: 63061 - RNA, 32 nt, Human
aguuuucaagggagugggaggcuuccaacaua

SEQ ID NO: 63062 - RNA, 31 nt, Human
aguuuucacagcuacaaagagcuagaaaugu

SEQ ID NO: 63063 - RNA, 32 nt, Human
aguuuucaccauuuguccucagucuccuuuau

SEQ ID NO: 63064 - RNA, 32 nt, Human
aguuuucacggcaauccucugaccaccgcagg

SEQ ID NO: 63065 - RNA, 32 nt, Human
aguuuucagucacagaucacgccuuaaaagac

SEQ ID NO: 63066 - RNA, 32 nt, Human
aguuuucaucccuuuuccaguacacacagcua

SEQ ID NO: 63067 - RNA, 32 nt, Human
aguuuucaugucuauaaaauaagguggcuagu

SEQ ID NO: 63068 - RNA, 32 nt, Human
aguuuucauuguccaagcauccucagggaaca

SEQ ID NO: 63069 - RNA, 32 nt, Human
aguuuucauuuuacuguggauuuugcuauacu

SEQ ID NO: 63070 - RNA, 32 nt, Human
aguuuuccaagaaauuaagcauaacagucuca

SEQ ID NO: 63071 - RNA, 32 nt, Human
aguuuucccaacuaacaagguaaguugccaug

SEQ ID NO: 63072 - RNA, 32 nt, Human
aguuuucccaaugauguuuaaaagcuuugaga

SEQ ID NO: 63073 - RNA, 32 nt, Human
aguuuucccacauuauuugucuccaugauacc

SEQ ID NO: 63074 - RNA, 32 nt, Human
aguuuucccuccuggcagggaccccagggauu

SEQ ID NO: 63075 - RNA, 32 nt, Human
aguuuuccuccacccuuuccucucccucaguu

SEQ ID NO: 63076 - RNA, 32 nt, Human
aguuuuccucuuccucuccucguacggaguuc

SEQ ID NO: 63077 - RNA, 32 nt, Human
aguuuuccuucccagaaucucacugcucuuuu

SEQ ID NO: 63078 - RNA, 32 nt, Human
aguuuuccuuuccuagcugaugauuuguucac

SEQ ID NO: 63079 - RNA, 32 nt, Human
aguuuucuaagauuaaaucuccuucacaauga

SEQ ID NO: 63080 - RNA, 32 nt, Human
aguuuucuauuauuccaaucucugcucaguua

SEQ ID NO: 63081 - RNA, 32 nt, Human
aguuuucuauuuuaaagaggaaucugaaagca

SEQ ID NO: 63082 - RNA, 32 nt, Human
aguuuucucuauaggagauacucuccaguuua

SEQ ID NO: 63083 - RNA, 23 nt, Human
aguuuucucuucugaauuccuug

SEQ ID NO: 63084 - RNA, 32 nt, Human
aguuuucugggcaggacuuuggugguuuaaaa

SEQ ID NO: 63085 - RNA, 32 nt, Human
aguuuucuuacuuucagggaagguaagaaaau

SEQ ID NO: 63086 - RNA, 32 nt, Human
aguuuucuuagcucccuggacccgguugaccu

SEQ ID NO: 63087 - RNA, 32 nt, Human
aguuuucuuuaacagugagguggaucuuuacc

SEQ ID NO: 63088 - RNA, 32 nt, Human
aguuuucuuuccuccuuuccuccucugacuug

SEQ ID NO: 63089 - RNA, 32 nt, Human
aguuuugacagcugccagucuuccugccccuu

SEQ ID NO: 63090 - RNA, 32 nt, Human
aguuuugagauggagucuagcucuguccccug

SEQ ID NO: 63091 - RNA, 32 nt, Human
aguuuugagauggcgacuaccuuucuguaugg

SEQ ID NO: 63092 - RNA, 24 nt, Human
aguuuugauuauccaugaacccuu

SEQ ID NO: 63093 - RNA, 32 nt, Human
aguuuugauuugaggagguuugcacauguaga

SEQ ID NO: 63094 - RNA, 32 nt, Human
aguuuugcaguggugcaaucauagcucauugc

SEQ ID NO: 63095 - RNA, 32 nt, Human
aguuuugccacagaagccccagagggcuggcc

SEQ ID NO: 63096 - RNA, 32 nt, Human
aguuuugccagccauggccaggguuuggcucc

SEQ ID NO: 63097 - RNA, 32 nt, Human
aguuuugccagccuggcaacagagcaagacuc

SEQ ID NO: 63098 - RNA, 32 nt, Human
aguuuugccauguuggccaggcuggucuugaa

SEQ ID NO: 63099 - RNA, 32 nt, Human
aguuuugcuaucucucugagaagcucaucuga

SEQ ID NO: 63100 - RNA, 32 nt, Human
aguuuugcucauucuaaugauggcccauucua

SEQ ID NO: 63101 - RNA, 32 nt, Human
aguuuuggaaaccauugcaaagcugucaagug

SEQ ID NO: 63102 - RNA, 32 nt, Human
aguuuuggccacaucuugcuugcugaugagga

SEQ ID NO: 63103 - RNA, 32 nt, Human
aguuuugggauuacaagugugggccaccgcgg

SEQ ID NO: 63104 - RNA, 24 nt, Human
aguuuugggguaaagacaccugga

SEQ ID NO: 63105 - RNA, 32 nt, Human
aguuuuguaauucuagcaacaugggaaagcau

SEQ ID NO: 63106 - RNA, 32 nt, Human
aguuuuguagcaguguacccacgcuggguauu

SEQ ID NO: 63107 - RNA, 20 nt, Human
aguuuugucccagaacugug

SEQ ID NO: 63108 - RNA, 32 nt, Human
aguuuugucugaagaccaggucccacugcccc

SEQ ID NO: 63109 - RNA, 32 nt, Human
aguuuugugguguuuuaacuugcccuauuccu

SEQ ID NO: 63110 - RNA, 32 nt, Human
aguuuugugguuucugcuuucuugccuaaauc

SEQ ID NO: 63111 - RNA, 23 nt, Human
aguuuuguuauaguuguuuucua

SEQ ID NO: 63112 - RNA, 23 nt, Human
aguuuuguucuaauuucauuuca

SEQ ID NO: 63113 - RNA, 19 nt, Human
aguuuuguucuaucuuucu

SEQ ID NO: 63114 - RNA, 32 nt, Human
aguuuuguuuagagcaguuaacaucugaagug

SEQ ID NO: 63115 - RNA, 23 nt, Human
aguuuuguuuugauuuguuucca

SEQ ID NO: 63116 - RNA, 23 nt, Human
aguuuuguuuuuugcucuuuuca

SEQ ID NO: 63117 - RNA, 32 nt, Human
aguuuuuaaauggugagagugugucucugggg

SEQ ID NO: 63118 - RNA, 32 nt, Human
aguuuuuaacacucuugccaagucuagaagag

SEQ ID NO: 63119 - RNA, 32 nt, Human
aguuuuuaagggacaccagagccgcagccugc

SEQ ID NO: 63120 - RNA, 32 nt, Human
aguuuuuaaucuucagcucaucaugucccagg

SEQ ID NO: 63121 - RNA, 32 nt, Human
aguuuuuaggagaagaggagagacaggcagga

SEQ ID NO: 63122 - RNA, 25 nt, Human
aguuuuuagugaacaaucaaagcac

SEQ ID NO: 63123 - RNA, 32 nt, Human
aguuuuuaucucuagcuuuuucaagccaggua

SEQ ID NO: 63124 - RNA, 32 nt, Human
aguuuuucaaagauauuuuacuugggggugga

SEQ ID NO: 63125 - RNA, 19 nt, Human
aguuuuucagaacguggaa

SEQ ID NO: 63126 - RNA, 32 nt, Human
aguuuuucagcuccucuccacucugcuuuccc

SEQ ID NO: 63127 - RNA, 32 nt, Human
aguuuuucaggaagagaaaguagagaagaaaa

SEQ ID NO: 63128 - RNA, 32 nt, Human
aguuuuucaugggcaugauuccaaaaucaaca

SEQ ID NO: 63129 - RNA, 32 nt, Human
aguuuuucauucuuccuuguccaccaugaucu

SEQ ID NO: 63130 - RNA, 32 nt, Human
aguuuuuccaaggagaauggaaagcacuugcc

SEQ ID NO: 63131 - RNA, 32 nt, Human
aguuuuuccacagccuuggagaggggcuuuga

SEQ ID NO: 63132 - RNA, 32 nt, Human
aguuuuuccagccuccaagucaccuggccugg

SEQ ID NO: 63133 - RNA, 32 nt, Human
aguuuuuccauucaaaccaagaugcaaauuca

SEQ ID NO: 63134 - RNA, 20 nt, Human
aguuuuuccauuuaccauca

SEQ ID NO: 63135 - RNA, 32 nt, Human
aguuuuuccauuuaccaucaacauggaaacuu

SEQ ID NO: 63136 - RNA, 32 nt, Human
aguuuuucccugccagagauggcaggggaaag

SEQ ID NO: 63137 - RNA, 32 nt, Human
aguuuuuccugccccauuccccaaacagaagc

SEQ ID NO: 63138 - RNA, 32 nt, Human
aguuuuuccuuucuccgcaaccagauguacau

SEQ ID NO: 63139 - RNA, 32 nt, Human
aguuuuucuaacuccaggguaguguuuagugu

SEQ ID NO: 63140 - RNA, 32 nt, Human
aguuuuucuagccaaguguuuggggcuuuaau

SEQ ID NO: 63141 - RNA, 32 nt, Human
aguuuuucucacuaaaauauggggcaauuguu

SEQ ID NO: 63142 - RNA, 19 nt, Human
aguuuuucucaugccauca

SEQ ID NO: 63143 - RNA, 32 nt, Human
aguuuuucuccucugcugaggaaacaguaccg

SEQ ID NO: 63144 - RNA, 32 nt, Human
aguuuuugagguggggacacaggagguccagu

SEQ ID NO: 63145 - RNA, 32 nt, Human
aguuuuugauagcacaucuacaugcaucugca

SEQ ID NO: 63146 - RNA, 32 nt, Human
aguuuuuggaggaucagagggaggggaggcag

SEQ ID NO: 63147 - RNA, 32 nt, Human
aguuuuuggcaaaggaagguaacuucaaugua

SEQ ID NO: 63148 - RNA, 32 nt, Human
aguuuuuggcauugcuagaugcagagaacccu

SEQ ID NO: 63149 - RNA, 22 nt, Human
aguuuuuguacaaaagcuucaa

SEQ ID NO: 63150 - RNA, 32 nt, Human
aguuuuuguggaauuaaagugcugcugcugcg

SEQ ID NO: 63151 - RNA, 32 nt, Human
  misc_feature (2)..(2): n is a, c, g, or u
anaucauucauguguccagagaucuuggaaaa

SEQ ID NO: 63152 - RNA, 32 nt, Human
  misc_feature (2)..(2): n is a, c, g, or u
anucaagcaagacucugcuucuauguauggug

SEQ ID NO: 63153 - RNA, 32 nt, Human
auaaaaacaacaaauacuuccauauggagcau

SEQ ID NO: 63154 - RNA, 32 nt, Human
auaaaaacacaacuauugauucagagaaagga

SEQ ID NO: 63155 - RNA, 32 nt, Human
auaaaaacagaaaaacucagacuuggcauuuu

SEQ ID NO: 63156 - RNA, 32 nt, Human
auaaaaacauaacuuauuuaacuucuugcacu

SEQ ID NO: 63157 - RNA, 26 nt, Human
auaaaaaccaaaauauuuggcucuca

SEQ ID NO: 63158 - RNA, 32 nt, Human
auaaaaaccacacacaugcaugcacacaaaca

SEQ ID NO: 63159 - RNA, 32 nt, Human
auaaaaaccaccacccuccagccugggcaacg

SEQ ID NO: 63160 - RNA, 30 nt, Human
auaaaaacuauacaagcuucccgccucaag

SEQ ID NO: 63161 - RNA, 32 nt, Human
auaaaaacuccagaggauaaguuuacacuuaa

SEQ ID NO: 63162 - RNA, 32 nt, Human
auaaaaacugccucuguuguguuucucacugg

SEQ ID NO: 63163 - RNA, 21 nt, Human
auaaaaacuguaaacaaagca

SEQ ID NO: 63164 - RNA, 32 nt, Human
auaaaaacugugagucgagaagaaggaaagag

SEQ ID NO: 63165 - RNA, 32 nt, Human
auaaaaacuuaucuagaaggggagaaacuccc

SEQ ID NO: 63166 - RNA, 32 nt, Human
auaaaaacuuugcagaaaauuagacaguguuu

SEQ ID NO: 63167 - RNA, 32 nt, Human
auaaaaacuuugcagaaaauuagacgguguuu

SEQ ID NO: 63168 - RNA, 32 nt, Human
auaaaaagaaaagagaaggaaaggaaagagac

SEQ ID NO: 63169 - RNA, 32 nt, Human
auaaaaagaacaaacuaccugugcacaccaca

SEQ ID NO: 63170 - RNA, 32 nt, Human
auaaaaagagcuccccuuugcugacagaacug

SEQ ID NO: 63171 - RNA, 32 nt, Human
auaaaaagagcuucaggccaggcgugguggcu

SEQ ID NO: 63172 - RNA, 32 nt, Human
auaaaaagcaagagaaucagcuuugggcaaug

SEQ ID NO: 63173 - RNA, 32 nt, Human
auaaaaagcaaugccgggaggcugaggcggga

SEQ ID NO: 63174 - RNA, 32 nt, Human
auaaaaagccuuccacccuccugucugcuuua

SEQ ID NO: 63175 - RNA, 29 nt, Human
auaaaaagcuguucugucuucccacccaa

SEQ ID NO: 63176 - RNA, 32 nt, Human
auaaaaagggcuugggagauucaugcgaugug

SEQ ID NO: 63177 - RNA, 32 nt, Human
auaaaaauacaaaaauuagcuggacauggugg

SEQ ID NO: 63178 - RNA, 32 nt, Human
auaaaaauacaaaaauuagcugggcauggugc

SEQ ID NO: 63179 - RNA, 32 nt, Human
auaaaaauacaaaaauuagcugggcauggugg

SEQ ID NO: 63180 - RNA, 32 nt, Human
auaaaaauacaaaacuuagcugggcguggugg

SEQ ID NO: 63181 - RNA, 32 nt, Human
auaaaaauaguacuaguuaacugugaaaauug

SEQ ID NO: 63182 - RNA, 32 nt, Human
auaaaaauauccaugaaauucaucuaccucuu

SEQ ID NO: 63183 - RNA, 32 nt, Human
auaaaaaucuagacugacacauuuuuaagucu

SEQ ID NO: 63184 - RNA, 32 nt, Human
auaaaaaucucucauuuguguggagucauuuc

SEQ ID NO: 63185 - RNA, 32 nt, Human
auaaaaaucuggcugcgaccagucccaugugu

SEQ ID NO: 63186 - RNA, 31 nt, Human
auaaaaaugagcuuuugaggcaggcagucag

SEQ ID NO: 63187 - RNA, 32 nt, Human
auaaaaauguaaacaucuccacacacacaaaa

SEQ ID NO: 63188 - RNA, 32 nt, Human
auaaaaauuagcagggugugguggugcaugcc

SEQ ID NO: 63189 - RNA, 32 nt, Human
auaaaaauucaugucuguauuucaggagcaaa

SEQ ID NO: 63190 - RNA, 32 nt, Human
auaaaaauuuuggcuggaugcaauggcucacg

SEQ ID NO: 63191 - RNA, 21 nt, Human
auaaaacaacaaaaacaaagc

SEQ ID NO: 63192 - RNA, 32 nt, Human
auaaaacaauuuuagccuuucucaguuuauuu

SEQ ID NO: 63193 - RNA, 32 nt, Human
auaaaacacacuuucaaauuauuugaauuacc

SEQ ID NO: 63194 - RNA, 32 nt, Human
auaaaacaccaucuaauuucuucaaagaaaaa

SEQ ID NO: 63195 - RNA, 32 nt, Human
auaaaacacccacugcuuaagaggcaggcucg

SEQ ID NO: 63196 - RNA, 32 nt, Human
auaaaacacccucacagaaacaccuagaauaa

SEQ ID NO: 63197 - RNA, 32 nt, Human
auaaaacaccuuguacuuuauuuucuauaauu

SEQ ID NO: 63198 - RNA, 32 nt, Human
auaaaacacuugcuuuucuuuuugagaaaaau

SEQ ID NO: 63199 - RNA, 32 nt, Human
auaaaacaggcccugaggugugguggcucaug

SEQ ID NO: 63200 - RNA, 32 nt, Human
auaaaacauaccacaggcugggcaugguggcu

SEQ ID NO: 63201 - RNA, 31 nt, Human
auaaaacauacuucacauuagaacacagaau

SEQ ID NO: 63202 - RNA, 32 nt, Human
auaaaacaucaaacugcacagaacaguugaau

SEQ ID NO: 63203 - RNA, 32 nt, Human
auaaaacauggacugaugggucugcuccaggc

SEQ ID NO: 63204 - RNA, 32 nt, Human
auaaaacauguagauuugaaaagagaagacuu

SEQ ID NO: 63205 - RNA, 32 nt, Human
auaaaacauuucagaagaaaaaguaugaaaca

SEQ ID NO: 63206 - RNA, 32 nt, Human
auaaaaccauuuuaggaauuagaaaaaucaac

SEQ ID NO: 63207 - RNA, 32 nt, Human
auaaaaccuaucugcccaugcuuuacagccuu

SEQ ID NO: 63208 - RNA, 32 nt, Human
auaaaaccucauaugauuguccugccucaugg

SEQ ID NO: 63209 - RNA, 32 nt, Human
auaaaaccuuuauauuucugcuuuguagaaau

SEQ ID NO: 63210 - RNA, 32 nt, Human
auaaaacgugcuggcuccuccuuugccuucug

SEQ ID NO: 63211 - RNA, 32 nt, Human
auaaaacuacucucuaccucuggcugggccca

SEQ ID NO: 63212 - RNA, 32 nt, Human
auaaaacugaaauaaaccugcacugaaaccug

SEQ ID NO: 63213 - RNA, 32 nt, Human
auaaaacugccuggcuggcuccgggccgcccc

SEQ ID NO: 63214 - RNA, 32 nt, Human
auaaaacugcgaggacaucaaagugguaaaua

SEQ ID NO: 63215 - RNA, 32 nt, Human
auaaaagaaagccuggcccauggcguccagcu

SEQ ID NO: 63216 - RNA, 32 nt, Human
auaaaagaaaugcagagguuuacagaguuugc

SEQ ID NO: 63217 - RNA, 32 nt, Human
auaaaagaaauggcaggacucauauuauucag

SEQ ID NO: 63218 - RNA, 32 nt, Human
auaaaagaaaugucacagaagaaaaccacaaa

SEQ ID NO: 63219 - RNA, 32 nt, Human
auaaaagaagugagugaagaagaaccagauga

SEQ ID NO: 63220 - RNA, 32 nt, Human
auaaaagacaaaugcaacauuuuaaggcaaug

SEQ ID NO: 63221 - RNA, 32 nt, Human
auaaaagacggcaccuuugagggaaaaggcag

SEQ ID NO: 63222 - RNA, 32 nt, Human
auaaaagacuaaagacagggagcuagaugaaa

SEQ ID NO: 63223 - RNA, 32 nt, Human
auaaaagacucagcccugccuccgggaacuca

SEQ ID NO: 63224 - RNA, 32 nt, Human
auaaaagagaaaauaccagaaggaaacaaaua

SEQ ID NO: 63225 - RNA, 32 nt, Human
auaaaagagacacaccacauuuuaaugaggcu

SEQ ID NO: 63226 - RNA, 32 nt, Human
auaaaagagcacuucuguggcucauuuaaaag

SEQ ID NO: 63227 - RNA, 32 nt, Human
auaaaagaguuggccaggcaugguggcuuacg

SEQ ID NO: 63228 - RNA, 32 nt, Human
auaaaagauagaaggaaggagaugauagagga

SEQ ID NO: 63229 - RNA, 32 nt, Human
auaaaagaugugccauggcaggauagcaccaa

SEQ ID NO: 63230 - RNA, 32 nt, Human
auaaaagauguggcauucuuaagaaaguauau

SEQ ID NO: 63231 - RNA, 32 nt, Human
auaaaagcaacuccugccucccuuccucaccc

SEQ ID NO: 63232 - RNA, 32 nt, Human
auaaaagcaaguuuggcucccucuuuuccuca

SEQ ID NO: 63233 - RNA, 32 nt, Human
auaaaagcaauauguucucugaucauauacuc

SEQ ID NO: 63234 - RNA, 32 nt, Human
auaaaagcacagaacagaugugguggugguau

SEQ ID NO: 63235 - RNA, 32 nt, Human
auaaaagcccaggagcccauuuggagggccug

SEQ ID NO: 63236 - RNA, 32 nt, Human
auaaaagcuguugcaggccuuugcuaagcuau

SEQ ID NO: 63237 - RNA, 32 nt, Human
auaaaaggaaaagaaaacagaggcuuuaaauu

SEQ ID NO: 63238 - RNA, 32 nt, Human
auaaaaggauucacacuggagagaaacccuau

SEQ ID NO: 63239 - RNA, 32 nt, Human
auaaaaggcacacccauucucucaugcuugga

SEQ ID NO: 63240 - RNA, 32 nt, Human
auaaaaggcaggcagaugggccagaggagcag

SEQ ID NO: 63241 - RNA, 32 nt, Human
auaaaaggccugacauaucugagggagaagca

SEQ ID NO: 63242 - RNA, 32 nt, Human
auaaaaggcgugagccaccgcgccuggccuga

SEQ ID NO: 63243 - RNA, 32 nt, Human
auaaaagggaauagagaagagaugggacuauu

SEQ ID NO: 63244 - RNA, 32 nt, Human
auaaaagggagggagaugagaaguuucugaau

SEQ ID NO: 63245 - RNA, 32 nt, Human
auaaaaggggaggggaagguucccuggggcuu

SEQ ID NO: 63246 - RNA, 32 nt, Human
auaaaaggggagguggagagaccccuucagag

SEQ ID NO: 63247 - RNA, 32 nt, Human
auaaaagguaaauucauagcugccuuuuacua

SEQ ID NO: 63248 - RNA, 32 nt, Human
auaaaaggucucagccuguagcuuaaacuuau

SEQ ID NO: 63249 - RNA, 32 nt, Human
auaaaaguauagcagcauccucuacugaggug

SEQ ID NO: 63250 - RNA, 32 nt, Human
auaaaagucuggaaacagcccagcucucucaa

SEQ ID NO: 63251 - RNA, 32 nt, Human
auaaaagugauuaauuuuuacuugguguguac

SEQ ID NO: 63252 - RNA, 32 nt, Human
auaaaauaaguaagauguuaagagauauugau

SEQ ID NO: 63253 - RNA, 32 nt, Human
auaaaauaauaucacucuuuuaauaguauaca

SEQ ID NO: 63254 - RNA, 32 nt, Human
auaaaauaauguauauaaaauagacaagcucu

SEQ ID NO: 63255 - RNA, 32 nt, Human
auaaaauacaaaccaacgugccuaauuaauua

SEQ ID NO: 63256 - RNA, 32 nt, Human
auaaaauaccacuuucuuuucucucaucaggu

SEQ ID NO: 63257 - RNA, 32 nt, Human
auaaaauacuaaugcaauucuacagcauucaa

SEQ ID NO: 63258 - RNA, 32 nt, Human
auaaaauacugaucuguguugcauuucaaaau

SEQ ID NO: 63259 - RNA, 32 nt, Human
auaaaauacuuugcauucuaaguugccaauaa

SEQ ID NO: 63260 - RNA, 32 nt, Human
auaaaauaucuaucuuuucaucaugucuauag

SEQ ID NO: 63261 - RNA, 32 nt, Human
auaaaauaugcgucucuaugugcauugucaac

SEQ ID NO: 63262 - RNA, 32 nt, Human
auaaaaucaaccaacauaucugaaaaggauca

SEQ ID NO: 63263 - RNA, 32 nt, Human
auaaaaucacaguccgugagucuuccagcugc

SEQ ID NO: 63264 - RNA, 32 nt, Human
auaaaaucagagaaaagcagaggcagaaacuc

SEQ ID NO: 63265 - RNA, 32 nt, Human
auaaaaucaguuccuuucucuguuccucuuac

SEQ ID NO: 63266 - RNA, 32 nt, Human
auaaaauccagccuguagcuugccugaucaaa

SEQ ID NO: 63267 - RNA, 32 nt, Human
auaaaauccaugucgucgucuuuaaaaugugc

SEQ ID NO: 63268 - RNA, 32 nt, Human
auaaaauccuuccuucccauguuacuaaauua

SEQ ID NO: 63269 - RNA, 32 nt, Human
auaaaaucugcuuuucacacugggugauaaua

SEQ ID NO: 63270 - RNA, 32 nt, Human
auaaaaugaaguuuuuaaauugucaggaguug

SEQ ID NO: 63271 - RNA, 32 nt, Human
auaaaaugagccugugcucaugacagcugcuc

SEQ ID NO: 63272 - RNA, 32 nt, Human
auaaaaugauuagauugggaagguguguugau

SEQ ID NO: 63273 - RNA, 32 nt, Human
auaaaaugggcugaggguaccuuuuuggggag

SEQ ID NO: 63274 - RNA, 30 nt, Human
auaaaaugguuccugauagaucaaagaggg

SEQ ID NO: 63275 - RNA, 32 nt, Human
auaaaauuagagcuguaaggaaaaugaaaagc

SEQ ID NO: 63276 - RNA, 32 nt, Human
auaaaauugcccagucuucagcggagcaguuu

SEQ ID NO: 63277 - RNA, 32 nt, Human
auaaaauuggacugcauuucuuagaguguuuu

SEQ ID NO: 63278 - RNA, 32 nt, Human
auaaaauugggaacaggaaugagcaggaagcc

SEQ ID NO: 63279 - RNA, 32 nt, Human
auaaaauuguggcuuuaaaaaugcaugaaacc

SEQ ID NO: 63280 - RNA, 32 nt, Human
auaaaauuguucuaauuuggugccauuuccug

SEQ ID NO: 63281 - RNA, 32 nt, Human
auaaaauuucagggaaaacagaagcaaaggag

SEQ ID NO: 63282 - RNA, 30 nt, Human
auaaaauuuccuccucuauauuccaaaguu

SEQ ID NO: 63283 - RNA, 32 nt, Human
auaaaauuuucaugagaguaguuuacaaaagc

SEQ ID NO: 63284 - RNA, 32 nt, Human
auaaacaaaauaccacugucuucaagaaacau

SEQ ID NO: 63285 - RNA, 32 nt, Human
auaaacaagaauuggaagacaugaggaaagcu

SEQ ID NO: 63286 - RNA, 32 nt, Human
auaaacacacacguaauguacaugcauauagg

SEQ ID NO: 63287 - RNA, 32 nt, Human
auaaacacagcugcuuucuucuuacaccccgg

SEQ ID NO: 63288 - RNA, 26 nt, Human
auaaacaccuguguguuuaagacaug

SEQ ID NO: 63289 - RNA, 32 nt, Human
auaaacaccuuaaaugucuugucaacuggaug

SEQ ID NO: 63290 - RNA, 32 nt, Human
auaaacacggauuaccagacccugcgcaggga

SEQ ID NO: 63291 - RNA, 32 nt, Human
auaaacacugcacuuuggugcugacacugggu

SEQ ID NO: 63292 - RNA, 32 nt, Human
auaaacacuucuacaacuuaaauuuaauuuua

SEQ ID NO: 63293 - RNA, 32 nt, Human
auaaacagaaaaucuuuccucuucucauuacc

SEQ ID NO: 63294 - RNA, 32 nt, Human
auaaacagacccaauucaucaacuggaaagca

SEQ ID NO: 63295 - RNA, 32 nt, Human
auaaacagaucuuuccuauaaccuaggaaagu

SEQ ID NO: 63296 - RNA, 32 nt, Human
auaaacagcucccuugguuggaggcucuggug

SEQ ID NO: 63297 - RNA, 22 nt, Human
auaaacaguuaaaagcugaaaa

SEQ ID NO: 63298 - RNA, 32 nt, Human
auaaacauaagaaaauucacacuguagauaaa

SEQ ID NO: 63299 - RNA, 32 nt, Human
auaaacaucucuuccaaggggauggagagugg

SEQ ID NO: 63300 - RNA, 32 nt, Human
auaaacaugcuggauaucugcgguaccaaacu

SEQ ID NO: 63301 - RNA, 32 nt, Human
auaaacauugguucagucuggaaaagccagag

SEQ ID NO: 63302 - RNA, 31 nt, Human
auaaacauuuuaugcuugcauuuaaacuuga

SEQ ID NO: 63303 - RNA, 32 nt, Human
auaaaccaagucauaaauugcuguaaucuuuc

SEQ ID NO: 63304 - RNA, 32 nt, Human
auaaaccacagcugucccccaggaucccacuc

SEQ ID NO: 63305 - RNA, 32 nt, Human
auaaaccacuggcuuucucuuugucccccuag

SEQ ID NO: 63306 - RNA, 32 nt, Human
auaaaccagguaaaacugguuacccacgaggc

SEQ ID NO: 63307 - RNA, 32 nt, Human
auaaaccauuuccucaaggauuuucucaugug

SEQ ID NO: 63308 - RNA, 32 nt, Human
auaaacccaggaggccgagcugacaaagugag

SEQ ID NO: 63309 - RNA, 32 nt, Human
auaaacccugggaacaucuggcugcaggaauu

SEQ ID NO: 63310 - RNA, 32 nt, Human
auaaaccucaauugcuggagugggguguaguu

SEQ ID NO: 63311 - RNA, 32 nt, Human
auaaaccucuccccauauuuugcaaagaggaa

SEQ ID NO: 63312 - RNA, 32 nt, Human
auaaaccucuuuacuccuccagcaggcuuuuc

SEQ ID NO: 63313 - RNA, 32 nt, Human
auaaaccugcagcguuucaugccacgucuuug

SEQ ID NO: 63314 - RNA, 32 nt, Human
auaaaccuggcacuuuacaaacaaauaaacau

SEQ ID NO: 63315 - RNA, 32 nt, Human
auaaacgggugcaucccaccacucccuggagg

SEQ ID NO: 63316 - RNA, 32 nt, Human
auaaacuaaguuccucccaaaguuaggucagc

SEQ ID NO: 63317 - RNA, 32 nt, Human
auaaacuagguaaacuuggauaggcaguagau

SEQ ID NO: 63318 - RNA, 32 nt, Human
auaaacuagugugacugucuucugagcacagu

SEQ ID NO: 63319 - RNA, 32 nt, Human
auaaacucacucacacugaggccuuggggacu

SEQ ID NO: 63320 - RNA, 32 nt, Human
auaaacucagagucccagccccaaauagaccc

SEQ ID NO: 63321 - RNA, 32 nt, Human
auaaacucuaaggaagacagugauggagugaa

SEQ ID NO: 63322 - RNA, 22 nt, Human
auaaacucuagcucugaagggu

SEQ ID NO: 63323 - RNA, 23 nt, Human
auaaacucuaucugcugaaaggg

SEQ ID NO: 63324 - RNA, 26 nt, Human
auaaacucucucuuuguuuuuaaagg

SEQ ID NO: 63325 - RNA, 32 nt, Human
auaaacucuguggugcuguuggaucagguauu

SEQ ID NO: 63326 - RNA, 32 nt, Human
auaaacucuuagccucaguccagguuaaucug

SEQ ID NO: 63327 - RNA, 32 nt, Human
auaaacugcacaccuggggugauggcuuaaag

SEQ ID NO: 63328 - RNA, 32 nt, Human
auaaacugcuagccacaaauuuuaguuaugua

SEQ ID NO: 63329 - RNA, 32 nt, Human
auaaacuggcugagcuuagagagaggugcaga

SEQ ID NO: 63330 - RNA, 32 nt, Human
auaaacugggaaacugcuguggucucuguugc

SEQ ID NO: 63331 - RNA, 32 nt, Human
auaaacugggagaacuauggcagcuacuugca

SEQ ID NO: 63332 - RNA, 32 nt, Human
auaaacugggcuguucugcgugaggggaagua

SEQ ID NO: 63333 - RNA, 32 nt, Human
auaaacuuagagccaugcaaaugccagcagcu

SEQ ID NO: 63334 - RNA, 32 nt, Human
auaaacuuagaggccugugaagcucucccucu

SEQ ID NO: 63335 - RNA, 32 nt, Human
auaaacuucucccgaguuccaucucaguaaaa

SEQ ID NO: 63336 - RNA, 32 nt, Human
auaaacuuggcccugcgucuucccaggugacc

SEQ ID NO: 63337 - RNA, 32 nt, Human
auaaacuuucuuuagaugcuguucuuuaaaaa

SEQ ID NO: 63338 - RNA, 32 nt, Human
auaaagaaaaacacucaaggacuuuguucauu

SEQ ID NO: 63339 - RNA, 32 nt, Human
auaaagaaaagaggaggaggaggaggaagaaa

SEQ ID NO: 63340 - RNA, 32 nt, Human
auaaagaaaagagguuuaauugacucacaguu

SEQ ID NO: 63341 - RNA, 32 nt, Human
auaaagaaaagagguuuaauuggcucacaguu

SEQ ID NO: 63342 - RNA, 32 nt, Human
auaaagaaaagagguuuaauuggcucaugguu

SEQ ID NO: 63343 - RNA, 32 nt, Human
auaaagaaaagcuucuccucugccucauccac

SEQ ID NO: 63344 - RNA, 32 nt, Human
auaaagaaaauccugcugcucugguccuugug

SEQ ID NO: 63345 - RNA, 32 nt, Human
auaaagaaaggaugauaucucuaaagguaugu

SEQ ID NO: 63346 - RNA, 31 nt, Human
auaaagaaguuucucccugcugucaagggua

SEQ ID NO: 63347 - RNA, 32 nt, Human
auaaagaauuugucacaggaaggcugucucag

SEQ ID NO: 63348 - RNA, 24 nt, Human
auaaagacaaacuaaaacaaaaca

SEQ ID NO: 63349 - RNA, 32 nt, Human
auaaagacaacaaaagaaaucuccuaacaaaa

SEQ ID NO: 63350 - RNA, 32 nt, Human
auaaagacagaccacaccuaaaacugccuuuc

SEQ ID NO: 63351 - RNA, 32 nt, Human
auaaagacagaggcagagacugaagugaugcu

SEQ ID NO: 63352 - RNA, 32 nt, Human
auaaagaccacccuggccaacauggugaaacc

SEQ ID NO: 63353 - RNA, 32 nt, Human
auaaagacuagaaccacccccacucugcacuc

SEQ ID NO: 63354 - RNA, 32 nt, Human
auaaagacucccagaacuugugucacagggcu

SEQ ID NO: 63355 - RNA, 32 nt, Human
auaaagacugacacagaaaaucaggucagugu

SEQ ID NO: 63356 - RNA, 32 nt, Human
auaaagagacccagagagcuccaucaccccuu

SEQ ID NO: 63357 - RNA, 32 nt, Human
auaaagagacuccaagguugacuuuaguuugu

SEQ ID NO: 63358 - RNA, 32 nt, Human
auaaagagagauucauauaaagaauuauauuc

SEQ ID NO: 63359 - RNA, 32 nt, Human
auaaagagagcaggagaggagcugcagauuuc

SEQ ID NO: 63360 - RNA, 32 nt, Human
auaaagagagccaagcagaagaggaggcgaga

SEQ ID NO: 63361 - RNA, 32 nt, Human
auaaagagccggggcucagggggcuccacacc

SEQ ID NO: 63362 - RNA, 32 nt, Human
auaaagaggaaugacuuaauuaugagacugua

SEQ ID NO: 63363 - RNA, 32 nt, Human
auaaagaggagaaaggcuuaggaaguuuuucu

SEQ ID NO: 63364 - RNA, 32 nt, Human
auaaagaggcauucaugaaggcuuuuguugaa

SEQ ID NO: 63365 - RNA, 32 nt, Human
auaaagaucgauaucuacaugauggauauugu

SEQ ID NO: 63366 - RNA, 18 nt, Human
auaaagaugacuguaaga

SEQ ID NO: 63367 - RNA, 32 nt, Human
auaaagauggcagaagaaaagggaaagcaagu

SEQ ID NO: 63368 - RNA, 32 nt, Human
auaaagauuguuugacucuggagaggagaaag

SEQ ID NO: 63369 - RNA, 32 nt, Human
auaaagcaccucuucaccuugcucaccuucua

SEQ ID NO: 63370 - RNA, 32 nt, Human
auaaagcagaaauauauuacaguucauuccac

SEQ ID NO: 63371 - RNA, 32 nt, Human
auaaagcagauggggaaagacuucacacagaa

SEQ ID NO: 63372 - RNA, 32 nt, Human
auaaagcagcagcagcgcgaagauagcgagag

SEQ ID NO: 63373 - RNA, 32 nt, Human
auaaagcaggcagaaguuggaaugagcagacu

SEQ ID NO: 63374 - RNA, 32 nt, Human
auaaagcaucucuggggagggcuuaggacucu

SEQ ID NO: 63375 - RNA, 32 nt, Human
auaaagcauguucacccuuauagucuaagacu

SEQ ID NO: 63376 - RNA, 32 nt, Human
auaaagcauguuugguuuuccaaaagaacaua

SEQ ID NO: 63377 - RNA, 32 nt, Human
auaaagccaccugucaacaaacccccauuaug

SEQ ID NO: 63378 - RNA, 21 nt, Human
auaaagccagcucacaggauc

SEQ ID NO: 63379 - RNA, 32 nt, Human
auaaagccaguggaguacaggcugcaauauaa

SEQ ID NO: 63380 - RNA, 32 nt, Human
auaaagcccugccuucuacaacucagugucug

SEQ ID NO: 63381 - RNA, 32 nt, Human
auaaagccgccuggccuugucucugucaaaaa

SEQ ID NO: 63382 - RNA, 32 nt, Human
auaaagccuagagugauauguuuaucuauaaa

SEQ ID NO: 63383 - RNA, 32 nt, Human
auaaagcgagaugguaguucugccugguuugc

SEQ ID NO: 63384 - RNA, 32 nt, Human
auaaagcgggacaacacagaacuucccaguua

SEQ ID NO: 63385 - RNA, 20 nt, Human
auaaagcuggauacaguuug

SEQ ID NO: 63386 - RNA, 32 nt, Human
auaaaggaaaagagagaaaaaggcaaagcaag

SEQ ID NO: 63387 - RNA, 32 nt, Human
auaaaggaaacuggauauuuuuagcacgaugu

SEQ ID NO: 63388 - RNA, 32 nt, Human
auaaaggaaagagguuuaacugacucucaguu

SEQ ID NO: 63389 - RNA, 21 nt, Human
auaaaggaaauaugcacugcu

SEQ ID NO: 63390 - RNA, 32 nt, Human
auaaaggacaggccacaccacagcagagacca

SEQ ID NO: 63391 - RNA, 32 nt, Human
auaaaggacucaaggaccacagccucugccca

SEQ ID NO: 63392 - RNA, 32 nt, Human
auaaaggacucagcaaccagccagggacagau

SEQ ID NO: 63393 - RNA, 29 nt, Human
auaaaggagaaacugagguacccggaaaa

SEQ ID NO: 63394 - RNA, 32 nt, Human
auaaaggagaaggaggaggaggaagagagugu

SEQ ID NO: 63395 - RNA, 32 nt, Human
auaaaggagagggaaugugcaggaacagaggc

SEQ ID NO: 63396 - RNA, 32 nt, Human
auaaaggcaguacagacccaaaaagcgagcag

SEQ ID NO: 63397 - RNA, 24 nt, Human
auaaaggcauuuuggguuuuaaga

SEQ ID NO: 63398 - RNA, 32 nt, Human
auaaaggcccaagaugggaaggagauccaaac

SEQ ID NO: 63399 - RNA, 32 nt, Human
auaaagggaagaaaggaggcagcauggagaga

SEQ ID NO: 63400 - RNA, 32 nt, Human
auaaagggacuuuuagaacacaacccaaugca

SEQ ID NO: 63401 - RNA, 19 nt, Human
auaaagggagaagagggaa

SEQ ID NO: 63402 - RNA, 32 nt, Human
auaaagggauuucucggcugaagacgaggcug

SEQ ID NO: 63403 - RNA, 32 nt, Human
auaaagggccagaaaguaacuauuuuagguuu

SEQ ID NO: 63404 - RNA, 32 nt, Human
auaaaggggaagugaggagaauuucuuucaag

SEQ ID NO: 63405 - RNA, 32 nt, Human
auaaagguauuucuuccuuggugccuucaaaa

SEQ ID NO: 63406 - RNA, 32 nt, Human
auaaaguaaauguuaauugcuggagaagaacc

SEQ ID NO: 63407 - RNA, 32 nt, Human
auaaaguacguguuuacuuggugaggaggagg

SEQ ID NO: 63408 - RNA, 32 nt, Human
auaaaguagaggaaaacauaagauugaugaaa

SEQ ID NO: 63409 - RNA, 32 nt, Human
auaaaguagggagggaaggcgagaggaagcaa

SEQ ID NO: 63410 - RNA, 32 nt, Human
auaaaguauaaauauguuuauauucuguacau

SEQ ID NO: 63411 - RNA, 32 nt, Human
auaaaguaugagugaaaaagagacugaagguc

SEQ ID NO: 63412 - RNA, 32 nt, Human
auaaaguauuucagguuauccacacacuaauc

SEQ ID NO: 63413 - RNA, 32 nt, Human
auaaagucacccagcaggucaacaaugggccc

SEQ ID NO: 63414 - RNA, 32 nt, Human
auaaagucaccuaggugaggauaggcgcggga

SEQ ID NO: 63415 - RNA, 32 nt, Human
auaaagucccuccaauuaaaccaaacgcuggg

SEQ ID NO: 63416 - RNA, 32 nt, Human
auaaaguccuuucuagauccuaugugaaaaga

SEQ ID NO: 63417 - RNA, 32 nt, Human
auaaagugauuaguugaacuggcauccugcuu

SEQ ID NO: 63418 - RNA, 32 nt, Human
auaaagugggaaaugcucuuuggagaagacaa

SEQ ID NO: 63419 - RNA, 32 nt, Human
auaaaguuaagugucccucaggcagggagagg

SEQ ID NO: 63420 - RNA, 32 nt, Human
auaaaguucagugagguaggccagcuuuuaug

SEQ ID NO: 63421 - RNA, 32 nt, Human
auaaaguuguagauucuuauguguuuuuguau

SEQ ID NO: 63422 - RNA, 32 nt, Human
auaaaguuuuaaguuuucugcaaagaauccuu

SEQ ID NO: 63423 - RNA, 32 nt, Human
auaaauaaauacaaagcccauucuuccagagu

SEQ ID NO: 63424 - RNA, 32 nt, Human
auaaauaaaugauccuguaggcccacuaaucu

SEQ ID NO: 63425 - RNA, 32 nt, Human
auaaauaaccaccacacacgcgcagcccggag

SEQ ID NO: 63426 - RNA, 32 nt, Human
auaaauaacccugggcuguccagccuuaauag

SEQ ID NO: 63427 - RNA, 32 nt, Human
auaaauaaggaagaaagagggagacaguagcu

SEQ ID NO: 63428 - RNA, 32 nt, Human
auaaauacaagucccgaugcagucaaagccaa

SEQ ID NO: 63429 - RNA, 32 nt, Human
auaaauacaucucaucuaacacacacgacaaa

SEQ ID NO: 63430 - RNA, 32 nt, Human
auaaauaccauguagcaaguguacuuugugga

SEQ ID NO: 63431 - RNA, 32 nt, Human
auaaauagcaucaccauucuuugcuguggcac

SEQ ID NO: 63432 - RNA, 32 nt, Human
auaaauagcuauaaauucucucucacacacac

SEQ ID NO: 63433 - RNA, 32 nt, Human
auaaauauacagucuucccacuucacuaacca

SEQ ID NO: 63434 - RNA, 31 nt, Human
auaaauauauuucuucauugccaaagaggcu

SEQ ID NO: 63435 - RNA, 32 nt, Human
auaaauaucaguggauuuucucuguguauaug

SEQ ID NO: 63436 - RNA, 32 nt, Human
auaaauauguagauagucacauauacaccaga

SEQ ID NO: 63437 - RNA, 32 nt, Human
auaaauauuacaaacccuaagauagcuaauaa

SEQ ID NO: 63438 - RNA, 22 nt, Human
auaaauauucaugagauugccu

SEQ ID NO: 63439 - RNA, 32 nt, Human
auaaauauuuggaaugaaggggaauguacuag

SEQ ID NO: 63440 - RNA, 32 nt, Human
auaaauauuuggacaauuuugaauucugacaa

SEQ ID NO: 63441 - RNA, 32 nt, Human
auaaauauuuuauaucaggaaaguucauauuu

SEQ ID NO: 63442 - RNA, 31 nt, Human
auaaaucaacuguccaucaggugaggugugc

SEQ ID NO: 63443 - RNA, 32 nt, Human
auaaaucaagcucagucuggguuauggagaag

SEQ ID NO: 63444 - RNA, 32 nt, Human
auaaaucaaggcugcaaugcagcuggugcugu

SEQ ID NO: 63445 - RNA, 32 nt, Human
auaaaucaaucuuauuacugagagugcaaauu

SEQ ID NO: 63446 - RNA, 31 nt, Human
auaaaucacagcuggaaaacugagccggcaa

SEQ ID NO: 63447 - RNA, 29 nt, Human
auaaaucaccucuuccgcuguuuuagcug

SEQ ID NO: 63448 - RNA, 31 nt, Human
auaaaucaccucuuccgcuguuuuagcugaa

SEQ ID NO: 63449 - RNA, 32 nt, Human
auaaaucaccucuuccgcuguuuuagcugaag

SEQ ID NO: 63450 - RNA, 32 nt, Human
auaaaucaugugaaaaggaagagauacaaauu

SEQ ID NO: 63451 - RNA, 32 nt, Human
auaaaucauuugcuccugucuuuugcuuuaau

SEQ ID NO: 63452 - RNA, 32 nt, Human
auaaauccacagaaccggaugagcugcuuagg

SEQ ID NO: 63453 - RNA, 32 nt, Human
auaaauccaguaaagaaaguguaguaaauucu

SEQ ID NO: 63454 - RNA, 32 nt, Human
auaaauccaguauggugguuauagauguaaaa

SEQ ID NO: 63455 - RNA, 32 nt, Human
auaaaucgauacugcuggccaaucagugucau

SEQ ID NO: 63456 - RNA, 32 nt, Human
auaaaucuacaaagggaagccuuacuacaauu

SEQ ID NO: 63457 - RNA, 32 nt, Human
auaaaucuacagcuagacccuuagucaauagu

SEQ ID NO: 63458 - RNA, 32 nt, Human
auaaaucuccaucaucugucuuaaaguuuuau

SEQ ID NO: 63459 - RNA, 32 nt, Human
auaaaucucucuuuacccaucggcucucccua

SEQ ID NO: 63460 - RNA, 32 nt, Human
auaaaucugaaggucauguggcaucagggaaa

SEQ ID NO: 63461 - RNA, 32 nt, Human
auaaaucuggcuuacaugcacguccagucaua

SEQ ID NO: 63462 - RNA, 32 nt, Human
auaaaucuggcuuacgugcacguccagucaua

SEQ ID NO: 63463 - RNA, 32 nt, Human
auaaaugaaaagauaagggauuuggaagccac

SEQ ID NO: 63464 - RNA, 32 nt, Human
auaaaugaacaacauaaaaacuuuuguuuuga

SEQ ID NO: 63465 - RNA, 32 nt, Human
auaaaugaacuagggaaggauguaauaaauua

SEQ ID NO: 63466 - RNA, 32 nt, Human
auaaaugaagaaaagacacagagaaggaugug

SEQ ID NO: 63467 - RNA, 32 nt, Human
auaaaugagaauauguaugcacugcagagaau

SEQ ID NO: 63468 - RNA, 32 nt, Human
auaaaugagagguuuggcuucaucucaguuua

SEQ ID NO: 63469 - RNA, 32 nt, Human
auaaaugaggccgggcgcaguggugccuguaa

SEQ ID NO: 63470 - RNA, 29 nt, Human
auaaaugauuccuauuucucucagucuaa

SEQ ID NO: 63471 - RNA, 32 nt, Human
auaaaugcaaauggcuaccguuuuacaauaaa

SEQ ID NO: 63472 - RNA, 32 nt, Human
auaaaugcaaaugugcauuuuucugacgagug

SEQ ID NO: 63473 - RNA, 32 nt, Human
auaaaugcaaaugugcuuacaucuuuuggccc

SEQ ID NO: 63474 - RNA, 32 nt, Human
auaaaugcaacagucuccaccuaacaaaggca

SEQ ID NO: 63475 - RNA, 32 nt, Human
auaaaugcucuggcagugucuccauguaacua

SEQ ID NO: 63476 - RNA, 32 nt, Human
auaaaugcugacagauuuccaagaacuaccaa

SEQ ID NO: 63477 - RNA, 32 nt, Human
auaaaugcuuauaggcugggccagguggcucc

SEQ ID NO: 63478 - RNA, 32 nt, Human
auaaaugcuuguuuuaggaaagugaaucuguu

SEQ ID NO: 63479 - RNA, 32 nt, Human
auaaauggaaacaccacugcuaggggagagcu

SEQ ID NO: 63480 - RNA, 32 nt, Human
auaaauggaggugagaagauauagcugagauu

SEQ ID NO: 63481 - RNA, 32 nt, Human
auaaauggauucacucaggggagggguauuca

SEQ ID NO: 63482 - RNA, 32 nt, Human
auaaauggcaaaaacucuuucucagacuuaca

SEQ ID NO: 63483 - RNA, 31 nt, Human
auaaauggcacugccacagccaacaugccca

SEQ ID NO: 63484 - RNA, 32 nt, Human
auaaauggcauaacugauuacaggguacaguu

SEQ ID NO: 63485 - RNA, 29 nt, Human
auaaauggcuuacuaucaucaccccuggc

SEQ ID NO: 63486 - RNA, 32 nt, Human
auaaauggguccagggcugaucaaagaacucu

SEQ ID NO: 63487 - RNA, 32 nt, Human
auaaauggugcugaagcaggacccgaagccua

SEQ ID NO: 63488 - RNA, 32 nt, Human
auaaaugguguucacagcugccauauaaaguu

SEQ ID NO: 63489 - RNA, 32 nt, Human
auaaaugucagcauuggccucuguguacaaac

SEQ ID NO: 63490 - RNA, 32 nt, Human
auaaaugucuguaugcccuggaagaggggaua

SEQ ID NO: 63491 - RNA, 32 nt, Human
auaaaugugcaggauagcagaccugggugugg

SEQ ID NO: 63492 - RNA, 32 nt, Human
auaaaugugcuaaguuauuugagacuuccuca

SEQ ID NO: 63493 - RNA, 32 nt, Human
auaaaugugguguuuggccugccucagcagca

SEQ ID NO: 63494 - RNA, 32 nt, Human
auaaauguguaaugaacaaagauauguuguau

SEQ ID NO: 63495 - RNA, 32 nt, Human
auaaauguuaucuuuguacuagauagcaaccc

SEQ ID NO: 63496 - RNA, 32 nt, Human
auaaauguugauuuccuuucugcggcuccacu

SEQ ID NO: 63497 - RNA, 31 nt, Human
auaaauguuucugagcugccuguguucuccc

SEQ ID NO: 63498 - RNA, 32 nt, Human
auaaauguuuuuaaguauaaauccuacuagag

SEQ ID NO: 63499 - RNA, 32 nt, Human
auaaauuaagggacaauggggcugacagcacu

SEQ ID NO: 63500 - RNA, 32 nt, Human
auaaauuaaugagacaaagugaaaaagaaauu

SEQ ID NO: 63501 - RNA, 32 nt, Human
auaaauuaaugagacaaagugaagaagaaauu

SEQ ID NO: 63502 - RNA, 32 nt, Human
auaaauuaucuucucucuuuguauugggaacc

SEQ ID NO: 63503 - RNA, 32 nt, Human
auaaauuauucaacugacggugcaaaaacauu

SEQ ID NO: 63504 - RNA, 32 nt, Human
auaaauuauucauguaaaaguauuucaaguag

SEQ ID NO: 63505 - RNA, 32 nt, Human
auaaauucaaaaccugcaguuaacaggauauu

SEQ ID NO: 63506 - RNA, 32 nt, Human
auaaauucaagcacuaccacuggucaguuuug

SEQ ID NO: 63507 - RNA, 32 nt, Human
auaaauucacuugucaccucagugcuuuacag

SEQ ID NO: 63508 - RNA, 32 nt, Human
auaaauucagaagggaggagauguguguacag

SEQ ID NO: 63509 - RNA, 32 nt, Human
auaaauucauauaggaaugcauaggucaucug

SEQ ID NO: 63510 - RNA, 32 nt, Human
auaaauucaucaauuaauauuuugccacuuug

SEQ ID NO: 63511 - RNA, 32 nt, Human
auaaauugaaagauggagucuaaaaauuauua

SEQ ID NO: 63512 - RNA, 25 nt, Human
auaaauugaacucccugcacugcug

SEQ ID NO: 63513 - RNA, 32 nt, Human
auaaauugacuuggguugcaagcacugagcac

SEQ ID NO: 63514 - RNA, 32 nt, Human
auaaauugagaaggaauuuucucucuauaagu

SEQ ID NO: 63515 - RNA, 32 nt, Human
auaaauugcccagccucagguauucuuuauag

SEQ ID NO: 63516 - RNA, 32 nt, Human
auaaauugguccuucccuaccuugccagcuuc

SEQ ID NO: 63517 - RNA, 32 nt, Human
auaaauuuacucuguugaauauuuagcauaaa

SEQ ID NO: 63518 - RNA, 32 nt, Human
auaaauuucaaacuuuugaauauuuacccuac

SEQ ID NO: 63519 - RNA, 32 nt, Human
auaaauuucccaagcguuucuuuccaccugga

SEQ ID NO: 63520 - RNA, 32 nt, Human
auaaauuucccaaguauuugaaauuuguuuug

SEQ ID NO: 63521 - RNA, 32 nt, Human
auaaauuugagagucugugacccacuuaccuu

SEQ ID NO: 63522 - RNA, 32 nt, Human
auaaauuugcuuuuugagauguugagaggaac

SEQ ID NO: 63523 - RNA, 32 nt, Human
auaaauuuucuacaaaauuaacuuuuuauauu

SEQ ID NO: 63524 - RNA, 32 nt, Human
auaaauuuuguagcugguacacucuggccugg

SEQ ID NO: 63525 - RNA, 32 nt, Human
auaacaaacaauaucaaugcuuuaaucaagga

SEQ ID NO: 63526 - RNA, 32 nt, Human
auaacaaaguaugacaaguuaaguuuaaauaa

SEQ ID NO: 63527 - RNA, 32 nt, Human
auaacaaaugugaacagaagccagcagagaau

SEQ ID NO: 63528 - RNA, 32 nt, Human
auaacaacacagaaauaacaagggcagacuuu

SEQ ID NO: 63529 - RNA, 32 nt, Human
auaacaacugcacuccagccuggaugacagaa

SEQ ID NO: 63530 - RNA, 32 nt, Human
auaacaagagugaggaggagccagagauaguu

SEQ ID NO: 63531 - RNA, 32 nt, Human
auaacaagggucagauuuccucuccugccuua

SEQ ID NO: 63532 - RNA, 32 nt, Human
auaacaagugacaaggcagaauucuuuaaauc

SEQ ID NO: 63533 - RNA, 32 nt, Human
auaacaauaagaaacuuagggaagcaggcugu

SEQ ID NO: 63534 - RNA, 32 nt, Human
auaacaauuaagagacggcagggccuucaggc

SEQ ID NO: 63535 - RNA, 32 nt, Human
auaacacauaaauauauaauaugucaacuggc

SEQ ID NO: 63536 - RNA, 32 nt, Human
auaacaccaccaucaucaaagagcugcucaag

SEQ ID NO: 63537 - RNA, 32 nt, Human
auaacaccagagaaagcuggcaacuuuaugug

SEQ ID NO: 63538 - RNA, 32 nt, Human
auaacacuacugcauuccagccugggugacag

SEQ ID NO: 63539 - RNA, 32 nt, Human
auaacacugcacuccaggcuggacaacacagc

SEQ ID NO: 63540 - RNA, 32 nt, Human
auaacacuguguuugcaaauggagauucaggu

SEQ ID NO: 63541 - RNA, 32 nt, Human
auaacacuguuugugguaggaaaggaaaacau

SEQ ID NO: 63542 - RNA, 32 nt, Human
auaacacuuccuaucuugucacugagcugaac

SEQ ID NO: 63543 - RNA, 32 nt, Human
auaacacuuccugacaucuccuuuggaaaaga

SEQ ID NO: 63544 - RNA, 32 nt, Human
auaacacuuuggcuuuuucuccauucacgcug

SEQ ID NO: 63545 - RNA, 32 nt, Human
auaacacuuuguuugcuggauaccaaguagac

SEQ ID NO: 63546 - RNA, 32 nt, Human
auaacagaauaccacagacuggguaacgugau

SEQ ID NO: 63547 - RNA, 32 nt, Human
auaacagaugacugucaagugaaugagcuguu

SEQ ID NO: 63548 - RNA, 32 nt, Human
auaacagcaguggaauauguauuugccuauau

SEQ ID NO: 63549 - RNA, 32 nt, Human
auaacagcaguuagaaaagcagacucccugug

SEQ ID NO: 63550 - RNA, 32 nt, Human
auaacagccugagacagaggucccaggagauc

SEQ ID NO: 63551 - RNA, 32 nt, Human
auaacagccugagguuccaauucuuuaucaug

SEQ ID NO: 63552 - RNA, 32 nt, Human
auaacagcucacugcagucuugaacuccuggg

SEQ ID NO: 63553 - RNA, 32 nt, Human
auaacaggauacagaauuaacaagagaaaaug

SEQ ID NO: 63554 - RNA, 32 nt, Human
auaacaggaucuccuuugggcucuugagguug

SEQ ID NO: 63555 - RNA, 32 nt, Human
auaacaggcaugagccacugugcccagccaga

SEQ ID NO: 63556 - RNA, 32 nt, Human
auaacagggaggcagaauucagguuggcuuga

SEQ ID NO: 63557 - RNA, 32 nt, Human
auaacaggggcuucuaauuaaauuuaggggau

SEQ ID NO: 63558 - RNA, 32 nt, Human
auaacaggguuccugagcucacugaaaagacu

SEQ ID NO: 63559 - RNA, 32 nt, Human
auaacaggucauugccgagaaaaggauagcac

SEQ ID NO: 63560 - RNA, 32 nt, Human
auaacagguugagaaagagggaguuagcauca

SEQ ID NO: 63561 - RNA, 32 nt, Human
auaacaguauugugcuuuuuguggggaaagug

SEQ ID NO: 63562 - RNA, 32 nt, Human
auaacagugggugggaaagguagaggccugug

SEQ ID NO: 63563 - RNA, 32 nt, Human
auaacaguuccuucaaaauuggccuaggaaau

SEQ ID NO: 63564 - RNA, 32 nt, Human
auaacaguuuagaagccaagguuguggauuug

SEQ ID NO: 63565 - RNA, 32 nt, Human
auaacauaggugcucuuccucaucucaucucc

SEQ ID NO: 63566 - RNA, 32 nt, Human
auaacauauagucaagaaaacagacuuaaaaa

SEQ ID NO: 63567 - RNA, 32 nt, Human
auaacauccaucguggcucugccuucaaaggg

SEQ ID NO: 63568 - RNA, 32 nt, Human
auaacauccauguacacauucuuuguugauuu

SEQ ID NO: 63569 - RNA, 32 nt, Human
auaacauccuggaggcagaagcgcagaggcug

SEQ ID NO: 63570 - RNA, 32 nt, Human
auaacaugagcaguacaaaagaaaaauaaauc

SEQ ID NO: 63571 - RNA, 32 nt, Human
auaacaugaguaagaugaacuggaacacaaaa

SEQ ID NO: 63572 - RNA, 32 nt, Human
auaacaugcccacccuuccuccuuuagaaacu

SEQ ID NO: 63573 - RNA, 32 nt, Human
auaacauggacugcucaguggccagguuauca

SEQ ID NO: 63574 - RNA, 32 nt, Human
auaacauucaaaggagcucacauuuauggaau

SEQ ID NO: 63575 - RNA, 32 nt, Human
auaacauugucaaguggaaacaugcugaaauc

SEQ ID NO: 63576 - RNA, 32 nt, Human
auaacauuuaauuauaaugacauucugauuau

SEQ ID NO: 63577 - RNA, 32 nt, Human
auaacauuuacauugucaaccuuuauugacuu

SEQ ID NO: 63578 - RNA, 32 nt, Human
auaacauuuacggacucauccccagcugcacu

SEQ ID NO: 63579 - RNA, 31 nt, Human
auaaccaacauauuuauacauuuagaaucau

SEQ ID NO: 63580 - RNA, 32 nt, Human
auaaccaagaaugucuccauuguuaaaugucc

SEQ ID NO: 63581 - RNA, 32 nt, Human
auaaccaagagccuucucucuuccuguugaca

SEQ ID NO: 63582 - RNA, 32 nt, Human
auaaccaagcaagcucagcucugugggggccu

SEQ ID NO: 63583 - RNA, 32 nt, Human
auaaccaagcuuuacucccauuuggaauauag

SEQ ID NO: 63584 - RNA, 32 nt, Human
auaaccaauaaacaguaaccuccaucaaaugc

SEQ ID NO: 63585 - RNA, 32 nt, Human
auaaccaaucuacaaucucccuucacaaguuu

SEQ ID NO: 63586 - RNA, 22 nt, Human
auaaccaauugucaguucucca

SEQ ID NO: 63587 - RNA, 32 nt, Human
auaaccacaagccaccacccauuugacauccu

SEQ ID NO: 63588 - RNA, 32 nt, Human
auaaccacugcacuccaaccugggcaacaugg

SEQ ID NO: 63589 - RNA, 32 nt, Human
auaaccagagagugauuucauuuacacucaua

SEQ ID NO: 63590 - RNA, 32 nt, Human
auaaccagggcuacccagaaaaagugacuuga

SEQ ID NO: 63591 - RNA, 32 nt, Human
auaaccaugaaugacugaauaguuuaguccag

SEQ ID NO: 63592 - RNA, 32 nt, Human
auaaccaugagccuugcggcacggugagcuca

SEQ ID NO: 63593 - RNA, 25 nt, Human
auaaccaugucacgugagcauguca

SEQ ID NO: 63594 - RNA, 22 nt, Human
auaacccaccuucugccccacu

SEQ ID NO: 63595 - RNA, 32 nt, Human
auaacccaugagaacacacaugugcacagaaa

SEQ ID NO: 63596 - RNA, 32 nt, Human
auaaccccaccuccccaccccaaaaagggcaa

SEQ ID NO: 63597 - RNA, 32 nt, Human
auaaccccagaacauuccacugugacucugca

SEQ ID NO: 63598 - RNA, 32 nt, Human
auaaccccuuucuccccuuuggaccaucugcc

SEQ ID NO: 63599 - RNA, 32 nt, Human
auaaccccuuucugcuguucucccaugaucca

SEQ ID NO: 63600 - RNA, 31 nt, Human
auaacccgaauguccaucagaaggggacugc

SEQ ID NO: 63601 - RNA, 32 nt, Human
auaacccucccagcuagucuacuccagggcag

SEQ ID NO: 63602 - RNA, 32 nt, Human
auaacccuggugucaucaucucccaggaucca

SEQ ID NO: 63603 - RNA, 32 nt, Human
auaacccuuucaaauuucuccuggggccucca

SEQ ID NO: 63604 - RNA, 32 nt, Human
auaaccggaggcaggcugggugcaguggcuca

SEQ ID NO: 63605 - RNA, 32 nt, Human
auaaccgggcuaggaaccugaccgggcuggac

SEQ ID NO: 63606 - RNA, 32 nt, Human
auaaccuaaaccuacuccaaugcuaaacuaau

SEQ ID NO: 63607 - RNA, 32 nt, Human
auaaccucacccaggccuuacaacaguccccc

SEQ ID NO: 63608 - RNA, 32 nt, Human
auaaccucauacaaccuucugucccaucuccu

SEQ ID NO: 63609 - RNA, 32 nt, Human
auaaccucucaucaggauucuggguuuggaac

SEQ ID NO: 63610 - RNA, 32 nt, Human
auaaccugacaggaacaugcuacugaaguuua

SEQ ID NO: 63611 - RNA, 32 nt, Human
auaaccugucauucacauauugagugccuacu

SEQ ID NO: 63612 - RNA, 32 nt, Human
auaaccuuaaugaccaauugcuuucaauucuu

SEQ ID NO: 63613 - RNA, 32 nt, Human
auaaccuuaggcugcaacuguacauaggguua

SEQ ID NO: 63614 - RNA, 32 nt, Human
auaaccuuaguauuuucccaaccaauagaaac

SEQ ID NO: 63615 - RNA, 32 nt, Human
auaaccuuccccucagcuaauuugaaagccuc

SEQ ID NO: 63616 - RNA, 32 nt, Human
auaaccuuuuaagagaggucauucuuuugaaa

SEQ ID NO: 63617 - RNA, 32 nt, Human
auaacgacugcacuccagccuggaugacagaa

SEQ ID NO: 63618 - RNA, 32 nt, Human
auaacgagaagaauucagaaaaccacuuaagc

SEQ ID NO: 63619 - RNA, 32 nt, Human
auaacgauuguguaaagaaacagcuucuucau

SEQ ID NO: 63620 - RNA, 32 nt, Human
auaacgcagccacugaggaagagugguuuucc

SEQ ID NO: 63621 - RNA, 32 nt, Human
auaacgccugggagaagagggcuggaguucua

SEQ ID NO: 63622 - RNA, 32 nt, Human
auaacggaagugaggaagggugagaguuaucu

SEQ ID NO: 63623 - RNA, 32 nt, Human
auaacggaguuuugcucuuauugcccaggcgc

SEQ ID NO: 63624 - RNA, 32 nt, Human
auaacguguuaaauaaaugucauugucauaga

SEQ ID NO: 63625 - RNA, 32 nt, Human
auaacuaaagaaugugucagggaagaaagacu

SEQ ID NO: 63626 - RNA, 32 nt, Human
auaacuaacaugcugcucuauuuucugggugu

SEQ ID NO: 63627 - RNA, 32 nt, Human
auaacuaaccgaugaugaggccgagguaaaag

SEQ ID NO: 63628 - RNA, 32 nt, Human
auaacuaacuauucaauuauuuccauuauuaa

SEQ ID NO: 63629 - RNA, 32 nt, Human
auaacuaauucuuuugcuuaagggccuauggc

SEQ ID NO: 63630 - RNA, 32 nt, Human
auaacuacuacauuuuaaccuacuucuguuug

SEQ ID NO: 63631 - RNA, 32 nt, Human
auaacuacuaguagaaauauaacuacuacccu

SEQ ID NO: 63632 - RNA, 32 nt, Human
auaacuacugauuuaggaaaauuggaugcaga

SEQ ID NO: 63633 - RNA, 32 nt, Human
auaacuagacauauaucagaaacuuuaaaaug

SEQ ID NO: 63634 - RNA, 32 nt, Human
auaacuagcacuaguuuggccuuaugaccugg

SEQ ID NO: 63635 - RNA, 32 nt, Human
auaacuagguugaguuuuucuccucugcugag

SEQ ID NO: 63636 - RNA, 32 nt, Human
auaacucaccuucucuauccuugcucaaaaug

SEQ ID NO: 63637 - RNA, 32 nt, Human
auaacucacugcagccucaaacuucuggccuc

SEQ ID NO: 63638 - RNA, 32 nt, Human
auaacucagauggcgagaaggcagcauuaucu

SEQ ID NO: 63639 - RNA, 32 nt, Human
auaacucagcuuucaacagccauacauccaaa

SEQ ID NO: 63640 - RNA, 32 nt, Human
auaacucauguggacuuaugccagucuagagg

SEQ ID NO: 63641 - RNA, 32 nt, Human
auaacuccaggccacacuuuugaagaccagac

SEQ ID NO: 63642 - RNA, 32 nt, Human
auaacuccaguuuggcaguuugcauauuauaa

SEQ ID NO: 63643 - RNA, 29 nt, Human
auaacucuagcuguaucauccucucaccu

SEQ ID NO: 63644 - RNA, 32 nt, Human
auaacucucacccuucugacugccuuccaucc

SEQ ID NO: 63645 - RNA, 32 nt, Human
auaacucugcaaaggccugggcuggccuggca

SEQ ID NO: 63646 - RNA, 32 nt, Human
auaacucuuaaagaaaaugucauuuuagacaa

SEQ ID NO: 63647 - RNA, 19 nt, Human
auaacucuuuguuauugga

SEQ ID NO: 63648 - RNA, 24 nt, Human
auaacucuuuguugaacuagagua

SEQ ID NO: 63649 - RNA, 32 nt, Human
auaacugaaaggaaugaagaccgccaacaaga

SEQ ID NO: 63650 - RNA, 32 nt, Human
auaacugaaauacuuuacuuuuucucauaucc

SEQ ID NO: 63651 - RNA, 31 nt, Human
auaacugaagcuuuauaccuguugaacaacu

SEQ ID NO: 63652 - RNA, 32 nt, Human
auaacugaucauagaagaagaauccaguaauu

SEQ ID NO: 63653 - RNA, 32 nt, Human
auaacugauuauuacuucuguuucucuuuugg

SEQ ID NO: 63654 - RNA, 32 nt, Human
auaacugauuuccuuuuuaguccucuacugcu

SEQ ID NO: 63655 - RNA, 32 nt, Human
auaacugcaagaacuacuugacugagcuguug

SEQ ID NO: 63656 - RNA, 32 nt, Human
auaacugccagugcccuuucacagcugauuau

SEQ ID NO: 63657 - RNA, 32 nt, Human
auaacugcccaucucagcuguagguggaauuu

SEQ ID NO: 63658 - RNA, 32 nt, Human
auaacugcuuccugccuccuuccaaacugacu

SEQ ID NO: 63659 - RNA, 32 nt, Human
auaacugcuuucuaacacuaaauguggccaac

SEQ ID NO: 63660 - RNA, 32 nt, Human
auaacuggaacacaugacucugggucuguaga

SEQ ID NO: 63661 - RNA, 32 nt, Human
auaacuggggcagaaaguguguaagugaagua

SEQ ID NO: 63662 - RNA, 32 nt, Human
auaacuggggcuccugugucagguguguuuac

SEQ ID NO: 63663 - RNA, 32 nt, Human
auaacuggggguggggugaggguaggaggcau

SEQ ID NO: 63664 - RNA, 32 nt, Human
auaacugggugugguaguuuaagccuauaauc

SEQ ID NO: 63665 - RNA, 32 nt, Human
auaacugguaaaacugaccaacuuuuacuucu

SEQ ID NO: 63666 - RNA, 32 nt, Human
auaacugguuccuggaggugugcagugccccc

SEQ ID NO: 63667 - RNA, 32 nt, Human
auaacuguaacauauacauacauaagcacagg

SEQ ID NO: 63668 - RNA, 32 nt, Human
auaacugugguguuacucugucauuuauaugg

SEQ ID NO: 63669 - RNA, 32 nt, Human
auaacuguuccgcugccuucuugucugugcua

SEQ ID NO: 63670 - RNA, 23 nt, Human
auaacuuaacaauuuugcagaga

SEQ ID NO: 63671 - RNA, 32 nt, Human
auaacuuaccugaagggguuuucuugauaauu

SEQ ID NO: 63672 - RNA, 32 nt, Human
auaacuucacagucauccagucccaacaccug

SEQ ID NO: 63673 - RNA, 32 nt, Human
auaacuuccaaacaugcaaaguagaaggggcc

SEQ ID NO: 63674 - RNA, 32 nt, Human
auaacuuccaggacaaugcagauugauguuga

SEQ ID NO: 63675 - RNA, 32 nt, Human
auaacuuccaucucccuuacuggcuuguaggc

SEQ ID NO: 63676 - RNA, 32 nt, Human
auaacuuccccaagucacacagugguaucaga

SEQ ID NO: 63677 - RNA, 32 nt, Human
auaacuuccugaucuuggauuuuauagcuggg

SEQ ID NO: 63678 - RNA, 20 nt, Human
auaacuugaaaaagaacugu

SEQ ID NO: 63679 - RNA, 22 nt, Human
auaacuugauauagaaagcugu

SEQ ID NO: 63680 - RNA, 32 nt, Human
auaacuugcauuucuaacaaguucccagguga

SEQ ID NO: 63681 - RNA, 32 nt, Human
auaacuuguaccauuuuaaauggagaucauaa

SEQ ID NO: 63682 - RNA, 32 nt, Human
auaacuuguaucuucugcuuaacuccuuuaua

SEQ ID NO: 63683 - RNA, 32 nt, Human
auaacuugucuauuuuucugccuaugugugcu

SEQ ID NO: 63684 - RNA, 24 nt, Human
auaacuuguuuguaaaagagcugu

SEQ ID NO: 63685 - RNA, 24 nt, Human
auaacuuuagaaaugauucuaaua

SEQ ID NO: 63686 - RNA, 32 nt, Human
auaacuuuauagacgaaaagaccuaccuggcg

SEQ ID NO: 63687 - RNA, 32 nt, Human
auaacuuuuccuuuguguauugcaaugauaau

SEQ ID NO: 63688 - RNA, 32 nt, Human
auaacuuuuuccucucgauucccauccccaau

SEQ ID NO: 63689 - RNA, 32 nt, Human
auaagaaaacuuugcuuucuucaguuaucaca

SEQ ID NO: 63690 - RNA, 32 nt, Human
auaagaaaauaacaaagcccuuauucucuuuu

SEQ ID NO: 63691 - RNA, 32 nt, Human
auaagaaaauuagcuuggcaugguggcacgug

SEQ ID NO: 63692 - RNA, 32 nt, Human
auaagaaacucagccuguggccuuucuuccaa

SEQ ID NO: 63693 - RNA, 32 nt, Human
auaagaaacucagccuguggccuuucuuucuu

SEQ ID NO: 63694 - RNA, 32 nt, Human
auaagaaagaccugcauauggaaagggugauc

SEQ ID NO: 63695 - RNA, 32 nt, Human
auaagaaagagagagaaggaaaggagagaagg

SEQ ID NO: 63696 - RNA, 32 nt, Human
auaagaaagccagacuuuggaaaaggauaauu

SEQ ID NO: 63697 - RNA, 22 nt, Human
auaagaaaguggccauuucuca

SEQ ID NO: 63698 - RNA, 32 nt, Human
auaagaaauguucucgacagcaaguugaaagc

SEQ ID NO: 63699 - RNA, 32 nt, Human
auaagaaauuggacacacauugcccuguuuga

SEQ ID NO: 63700 - RNA, 32 nt, Human
auaagaacagagaaggaggagggggaaaggag

SEQ ID NO: 63701 - RNA, 32 nt, Human
auaagaacccaggguggagagggagacuccug

SEQ ID NO: 63702 - RNA, 32 nt, Human
auaagaacugcggauucugccugggcacacac

SEQ ID NO: 63703 - RNA, 32 nt, Human
auaagaacuggcugcugaacugucuuuaguca

SEQ ID NO: 63704 - RNA, 32 nt, Human
auaagaagaccccacuucaacuuccccucgaa

SEQ ID NO: 63705 - RNA, 32 nt, Human
auaagaagcccccgaggugguggagaaggucu

SEQ ID NO: 63706 - RNA, 32 nt, Human
auaagaaggcaagagacaaggugcuucaaaua

SEQ ID NO: 63707 - RNA, 32 nt, Human
auaagaagggcuuguggaauuugcauuuggcu

SEQ ID NO: 63708 - RNA, 32 nt, Human
auaagaaggggauggaaugggggaagaggagg

SEQ ID NO: 63709 - RNA, 32 nt, Human
auaagaauggcacuuuaccucugugguccucc

SEQ ID NO: 63710 - RNA, 32 nt, Human
auaagaauucuuuauuugcacccucccuccga

SEQ ID NO: 63711 - RNA, 32 nt, Human
auaagacaaggaugaaaucauacauggaaaau

SEQ ID NO: 63712 - RNA, 32 nt, Human
auaagacagagaaaaucacuuauuucucuaag

SEQ ID NO: 63713 - RNA, 32 nt, Human
auaagacagugaucauuaggaugaagaggaag

SEQ ID NO: 63714 - RNA, 32 nt, Human
auaagacaugcuguuugaugggcugggcuggg

SEQ ID NO: 63715 - RNA, 32 nt, Human
auaagacauggcuuuucccuuuccaccaugau

SEQ ID NO: 63716 - RNA, 31 nt, Human
auaagacauuuucucccuuuuaaagaucauc

SEQ ID NO: 63717 - RNA, 32 nt, Human
auaagaccaaaaaucgaaguguguaagauccu

SEQ ID NO: 63718 - RNA, 32 nt, Human
auaagaccugcagggcuccucauuacuguucc

SEQ ID NO: 63719 - RNA, 32 nt, Human
auaagaccugcucucuuccugaagaccuauaa

SEQ ID NO: 63720 - RNA, 32 nt, Human
auaagaccuuaaggcugggugcaguggcucac

SEQ ID NO: 63721 - RNA, 32 nt, Human
auaagacuuugaugcagaacugaacaagauau

SEQ ID NO: 63722 - RNA, 32 nt, Human
auaagagaaaguuguucuaauugugcugaaac

SEQ ID NO: 63723 - RNA, 32 nt, Human
auaagagaacuggccaaggugcccggcuuggu

SEQ ID NO: 63724 - RNA, 32 nt, Human
auaagagaagccuguuuaaagagcagaugcca

SEQ ID NO: 63725 - RNA, 32 nt, Human
auaagagaccgagagaaguaagcugggucuug

SEQ ID NO: 63726 - RNA, 32 nt, Human
auaagagacucagaaagccucaaugaaaugga

SEQ ID NO: 63727 - RNA, 32 nt, Human
auaagagacugcccugcuugguguuuugcagg

SEQ ID NO: 63728 - RNA, 32 nt, Human
auaagagagagaguaagagggagagagaagaa

SEQ ID NO: 63729 - RNA, 32 nt, Human
auaagagagaucugugcagcugcgccucaggg

SEQ ID NO: 63730 - RNA, 32 nt, Human
auaagagcaagaaaucuacagcugguguaaaa

SEQ ID NO: 63731 - RNA, 32 nt, Human
auaagagcaguggcaucacauuuguuguuguu

SEQ ID NO: 63732 - RNA, 32 nt, Human
auaagagggaggcaggaggguuagagugagua

SEQ ID NO: 63733 - RNA, 32 nt, Human
auaagagggggaaacaaagaaguaaucauucc

SEQ ID NO: 63734 - RNA, 32 nt, Human
auaagaguauucauacuggagagaaacccuac

SEQ ID NO: 63735 - RNA, 32 nt, Human
auaagagucuuuguggaaguggugaaaaguac

SEQ ID NO: 63736 - RNA, 32 nt, Human
auaagaguucucuuugauuugcacuagcacua

SEQ ID NO: 63737 - RNA, 32 nt, Human
auaagauacuuaaaagucaucuuugaaugaua

SEQ ID NO: 63738 - RNA, 32 nt, Human
auaagauauaaauauuaaaacauuuuauacuu

SEQ ID NO: 63739 - RNA, 32 nt, Human
auaagauauccuaaaaucacgcuggaaccuug

SEQ ID NO: 63740 - RNA, 32 nt, Human
auaagauauuucugaaguguauacuuggucaa

SEQ ID NO: 63741 - RNA, 31 nt, Human
auaagaucaauaaauacuuguggaaugcaaa

SEQ ID NO: 63742 - RNA, 32 nt, Human
auaagaucagguacugugucagcauugauuuc

SEQ ID NO: 63743 - RNA, 32 nt, Human
auaagauccacccacaccuaagucacagaauu

SEQ ID NO: 63744 - RNA, 18 nt, Human
auaagaugcugcugagca

SEQ ID NO: 63745 - RNA, 32 nt, Human
auaagauggcgcuuugaaggggagccgaggcc

SEQ ID NO: 63746 - RNA, 32 nt, Human
auaagaugguuuuugcaaggggaccagguucu

SEQ ID NO: 63747 - RNA, 32 nt, Human
auaagauucaaacuuugagugacauuuagucc

SEQ ID NO: 63748 - RNA, 32 nt, Human
auaagauugugaaggguuuacugcuccuucca

SEQ ID NO: 63749 - RNA, 32 nt, Human
auaagcaaaacaaagcaugucuuugaguaaca

SEQ ID NO: 63750 - RNA, 32 nt, Human
auaagcaagaaaguggguucucaccagccauc

SEQ ID NO: 63751 - RNA, 32 nt, Human
auaagcaagagccacugcucccagcucauggu

SEQ ID NO: 63752 - RNA, 32 nt, Human
auaagcaagcccagauaaaaacaaauagcaga

SEQ ID NO: 63753 - RNA, 32 nt, Human
auaagcaccaauaucaacuucauguggauuuu

SEQ ID NO: 63754 - RNA, 32 nt, Human
auaagcacuuggcuccuuuaauagcuguccgu

SEQ ID NO: 63755 - RNA, 32 nt, Human
auaagcagacuugcacaauucaagccuguauu

SEQ ID NO: 63756 - RNA, 32 nt, Human
auaagcagaguuaagaggccaggacaaaagaa

SEQ ID NO: 63757 - RNA, 32 nt, Human
auaagcagcaaggggacaaaucaccaaagaac

SEQ ID NO: 63758 - RNA, 32 nt, Human
auaagcagcccagucucuggcaguuuuuacgg

SEQ ID NO: 63759 - RNA, 32 nt, Human
auaagcaggaaagagggaugaagaagaggguu

SEQ ID NO: 63760 - RNA, 32 nt, Human
auaagcaugccacuauacuccagccugggcaa

SEQ ID NO: 63761 - RNA, 32 nt, Human
auaagcaugccuguuuucccauggccuugcuu

SEQ ID NO: 63762 - RNA, 20 nt, Human
auaagcauuacaacagagaa

SEQ ID NO: 63763 - RNA, 32 nt, Human
auaagcauuuuucugcccaauuaccugugaga

SEQ ID NO: 63764 - RNA, 32 nt, Human
auaagccaaaauacaacucaccuuuggaauca

SEQ ID NO: 63765 - RNA, 32 nt, Human
auaagccacaaaugaagagaaaagccaugccc

SEQ ID NO: 63766 - RNA, 32 nt, Human
auaagccacugcacccagcugaaaguugguau

SEQ ID NO: 63767 - RNA, 32 nt, Human
auaagccaggaaaagugaaaagagaacacagu

SEQ ID NO: 63768 - RNA, 32 nt, Human
auaagccaguuaaaccucuuuucuuuauaaau

SEQ ID NO: 63769 - RNA, 32 nt, Human
auaagccaugcugcuuugcacacacacuagcc

SEQ ID NO: 63770 - RNA, 32 nt, Human
auaagccauguuucuguauuguacauguaaag

SEQ ID NO: 63771 - RNA, 32 nt, Human
auaagcccaggccccauggagagaggcucagc

SEQ ID NO: 63772 - RNA, 32 nt, Human
auaagccgggcggauugcaaaugaaguguaau

SEQ ID NO: 63773 - RNA, 32 nt, Human
auaagccgucaaguaguaagaagaacuuggau

SEQ ID NO: 63774 - RNA, 32 nt, Human
auaagccucaguuuuccaucuguuuuugauaa

SEQ ID NO: 63775 - RNA, 32 nt, Human
auaagccucuacugggucuauauugugaauca

SEQ ID NO: 63776 - RNA, 32 nt, Human
auaagccugcaaccucuugaccuucagcuccu

SEQ ID NO: 63777 - RNA, 32 nt, Human
auaagccugcagucccagcuacuugggaggcc

SEQ ID NO: 63778 - RNA, 32 nt, Human
auaagccuguucuagagaaguaccaugcaaca

SEQ ID NO: 63779 - RNA, 32 nt, Human
auaagccuuuaauucauccucagugacucugg

SEQ ID NO: 63780 - RNA, 32 nt, Human
auaagcggaggugggaggaggagcucgccaag

SEQ ID NO: 63781 - RNA, 32 nt, Human
auaagcgugcuuuauuucacauagaggggcau

SEQ ID NO: 63782 - RNA, 32 nt, Human
auaagcuaaguccugcauguucaggcaccagc

SEQ ID NO: 63783 - RNA, 32 nt, Human
auaagcuagggagggaugacaagaaggaaaau

SEQ ID NO: 63784 - RNA, 32 nt, Human
auaagcuauauuuuccccuuguuuuuaaaagg

SEQ ID NO: 63785 - RNA, 32 nt, Human
auaagcucauacccaaauucacaaagccuauu

SEQ ID NO: 63786 - RNA, 32 nt, Human
auaagcucaugguagaaaaccauagcuaagua

SEQ ID NO: 63787 - RNA, 32 nt, Human
auaagcuccagaagugacaagacacuucacau

SEQ ID NO: 63788 - RNA, 32 nt, Human
auaagcucucaacuauaguuaacuauaucaca

SEQ ID NO: 63789 - RNA, 32 nt, Human
auaagcucuuucccucuccguuugcugcuuuu

SEQ ID NO: 63790 - RNA, 32 nt, Human
auaagcuguucugguggcaguaacaugcaaca

SEQ ID NO: 63791 - RNA, 32 nt, Human
auaagcuguuggcuucucugagcuccagugga

SEQ ID NO: 63792 - RNA, 32 nt, Human
auaagcuucccccuagcuagggaugcacgggg

SEQ ID NO: 63793 - RNA, 32 nt, Human
auaagcuuggaucuugaugaaagguuaccagg

SEQ ID NO: 63794 - RNA, 32 nt, Human
auaagcuugucacugcaaaaaguugccuuuug

SEQ ID NO: 63795 - RNA, 32 nt, Human
auaagcuuugccugcuuacuuucugccauugg

SEQ ID NO: 63796 - RNA, 32 nt, Human
auaaggaaaccagcucagagaggccaaguaac

SEQ ID NO: 63797 - RNA, 32 nt, Human
auaaggaaaccaguguugccauugagguuauc

SEQ ID NO: 63798 - RNA, 32 nt, Human
auaaggaagaaagagggagacaguagcugcuc

SEQ ID NO: 63799 - RNA, 32 nt, Human
auaaggaagagaggagagccuauccccgagca

SEQ ID NO: 63800 - RNA, 32 nt, Human
auaaggaagagcaaaggagcugagcuggugga

SEQ ID NO: 63801 - RNA, 32 nt, Human
auaaggaagagcaucucauacauaucauuauc

SEQ ID NO: 63802 - RNA, 32 nt, Human
auaaggaagugagagaccuccuacuugguucc

SEQ ID NO: 63803 - RNA, 32 nt, Human
auaaggaaguugaggaacauccaccucugucu

SEQ ID NO: 63804 - RNA, 31 nt, Human
auaaggacaagguaguuuucacuggauccuu

SEQ ID NO: 63805 - RNA, 31 nt, Human
auaaggacaggccacaccacagcagagacca

SEQ ID NO: 63806 - RNA, 32 nt, Human
auaaggagaagaaagcuucaguuuacuguuuc

SEQ ID NO: 63807 - RNA, 32 nt, Human
auaaggaggaagcugaagcgggcagaucacuu

SEQ ID NO: 63808 - RNA, 32 nt, Human
auaaggaucaauagacagaagccuggggcggg

SEQ ID NO: 63809 - RNA, 32 nt, Human
auaaggauuauuuggucuucuggauuuggagg

SEQ ID NO: 63810 - RNA, 32 nt, Human
auaaggauuuuuaaaaacuuucuggucauuuc

SEQ ID NO: 63811 - RNA, 32 nt, Human
auaaggcaaagaaugugcaguaugaguaugag

SEQ ID NO: 63812 - RNA, 32 nt, Human
auaaggcaagggggaguguagagcagagcaga

SEQ ID NO: 63813 - RNA, 32 nt, Human
auaaggcaaucagaauaaucaucuuccuuguu

SEQ ID NO: 63814 - RNA, 32 nt, Human
auaaggccaucucacuugccacugugcuguuu

SEQ ID NO: 63815 - RNA, 32 nt, Human
auaaggccccuggguacacugcagaagcccca

SEQ ID NO: 63816 - RNA, 32 nt, Human
auaaggcccuggaguccaccuccaggcugggu

SEQ ID NO: 63817 - RNA, 32 nt, Human
auaaggccuaaguuauguuugugcccaggcaa

SEQ ID NO: 63818 - RNA, 32 nt, Human
auaaggcucuuggauguauaacauacucaaaa

SEQ ID NO: 63819 - RNA, 32 nt, Human
auaaggcuuaauauuuaauugauuuguuuaau

SEQ ID NO: 63820 - RNA, 32 nt, Human
auaagggaauaaaagcuggccacugccagcuu

SEQ ID NO: 63821 - RNA, 32 nt, Human
auaagggaauaagcuguugagcuaaaccugua

SEQ ID NO: 63822 - RNA, 32 nt, Human
auaagggaaugugaccauguuuggagauaggg

SEQ ID NO: 63823 - RNA, 32 nt, Human
auaagggagagggaaauacaaggagggccucu

SEQ ID NO: 63824 - RNA, 32 nt, Human
auaagggaggcugcugugcaggggagcacagg

SEQ ID NO: 63825 - RNA, 32 nt, Human
auaagggauuucaugaaacaaaacagauaaaa

SEQ ID NO: 63826 - RNA, 32 nt, Human
auaagggcauggcccaagucugucuuugacuc

SEQ ID NO: 63827 - RNA, 32 nt, Human
auaaggggaaggaagagagagggagcaggcgg

SEQ ID NO: 63828 - RNA, 32 nt, Human
auaagggguuacucuuucaagaguaacaaaaa

SEQ ID NO: 63829 - RNA, 32 nt, Human
auaaggguauagaacugcuuuucucauaggua

SEQ ID NO: 63830 - RNA, 32 nt, Human
auaaggguuaucuuuaaguccuaagggauucc

SEQ ID NO: 63831 - RNA, 32 nt, Human
auaaggucaggagaucaagaccauccuggcua

SEQ ID NO: 63832 - RNA, 32 nt, Human
auaaggucauacaggcaagaccuggcauaaua

SEQ ID NO: 63833 - RNA, 32 nt, Human
auaaggucauuuucucccucuacucacaauac

SEQ ID NO: 63834 - RNA, 32 nt, Human
auaaggucauuuuucuccaucaggggcaaaug

SEQ ID NO: 63835 - RNA, 32 nt, Human
auaagguguggaaaaugcuuuucuguuaguag

SEQ ID NO: 63836 - RNA, 32 nt, Human
auaagguuaaaaguuguuaaugaccaaacauu

SEQ ID NO: 63837 - RNA, 32 nt, Human
auaagguugaggacagugacugccauuuguau

SEQ ID NO: 63838 - RNA, 32 nt, Human
auaaguaagacagauucuucacuguguuuuaa

SEQ ID NO: 63839 - RNA, 32 nt, Human
auaaguaggccuggagccucagcuucuguaaa

SEQ ID NO: 63840 - RNA, 32 nt, Human
auaaguauagccaccccacucucuuuugguuu

SEQ ID NO: 63841 - RNA, 32 nt, Human
auaaguaugcagcagaacuccaacuaucuuuu

SEQ ID NO: 63842 - RNA, 22 nt, Human
auaagucaccguguuggauuga

SEQ ID NO: 63843 - RNA, 32 nt, Human
auaagucagucaccuugcuccucuccagaggc

SEQ ID NO: 63844 - RNA, 32 nt, Human
auaagucaugaccaagacaaacugccaauaca

SEQ ID NO: 63845 - RNA, 32 nt, Human
auaagucaugucccagccugggcaacauagca

SEQ ID NO: 63846 - RNA, 32 nt, Human
auaagucauguuccuucaagaucauguacccc

SEQ ID NO: 63847 - RNA, 32 nt, Human
auaaguccuuccacuuugaccccauggaggau

SEQ ID NO: 63848 - RNA, 32 nt, Human
auaagucugagugcuuuccucuucuucaacac

SEQ ID NO: 63849 - RNA, 32 nt, Human
auaagucugauucuauuucuaugacuuugaau

SEQ ID NO: 63850 - RNA, 32 nt, Human
auaagucugccucugccucugccucacccugc

SEQ ID NO: 63851 - RNA, 32 nt, Human
auaagucuuccccauuccucauacucgagccu

SEQ ID NO: 63852 - RNA, 32 nt, Human
auaagucuuuuucugccccaguggccuguuug

SEQ ID NO: 63853 - RNA, 32 nt, Human
auaagugaagaaagugauauugaagaaaagac

SEQ ID NO: 63854 - RNA, 32 nt, Human
auaagugaccuaaaaugucacuguucaaauua

SEQ ID NO: 63855 - RNA, 32 nt, Human
auaagugccaggauggaaugaugggucaguug

SEQ ID NO: 63856 - RNA, 32 nt, Human
auaagugguuucuucaggaaaauaaauaucac

SEQ ID NO: 63857 - RNA, 32 nt, Human
auaaguguagacugcugucaaggaggcuucau

SEQ ID NO: 63858 - RNA, 32 nt, Human
auaaguguccacuggcccuggccaacuggccu

SEQ ID NO: 63859 - RNA, 32 nt, Human
auaagugugcagggggaugggccagggccagg

SEQ ID NO: 63860 - RNA, 32 nt, Human
auaaguuaauucuaagugcuagcucuugaaac

SEQ ID NO: 63861 - RNA, 32 nt, Human
auaaguuauauuuuuggcugggcucggucgcu

SEQ ID NO: 63862 - RNA, 32 nt, Human
auaaguucacagucagccuuuugggcagaaga

SEQ ID NO: 63863 - RNA, 32 nt, Human
auaaguucccucugagcaaccagaacaugcug

SEQ ID NO: 63864 - RNA, 32 nt, Human
auaaguucgugccaaaugaaauccuuccuguu

SEQ ID NO: 63865 - RNA, 32 nt, Human
auaaguucuucccacuuuuaagcugaugaaag

SEQ ID NO: 63866 - RNA, 32 nt, Human
auaaguugcaaaaguuggggcugcaauuaaug

SEQ ID NO: 63867 - RNA, 32 nt, Human
auaaguugcuguucuuuugucuucuuuuuaau

SEQ ID NO: 63868 - RNA, 32 nt, Human
auaaguuggauuuuccucauaauauguguggg

SEQ ID NO: 63869 - RNA, 32 nt, Human
auaaguuguaagcuccuugagagcaggaucca

SEQ ID NO: 63870 - RNA, 32 nt, Human
auaaguuguugccuauucaguguuacagauuu

SEQ ID NO: 63871 - RNA, 32 nt, Human
auaauaaaaauacuuuaccuacccugaucacc

SEQ ID NO: 63872 - RNA, 32 nt, Human
auaauaaaaggagccaguccccugcagguauc

SEQ ID NO: 63873 - RNA, 32 nt, Human
auaauaaaucaucucaucacaaaucaauacgg

SEQ ID NO: 63874 - RNA, 32 nt, Human
auaauaaaucuguaccuuaucaaacauuuucu

SEQ ID NO: 63875 - RNA, 32 nt, Human
auaauaaaugggcucauuuaguugccugggca

SEQ ID NO: 63876 - RNA, 32 nt, Human
auaauaaauguuucugagcugccuguguucuc

SEQ ID NO: 63877 - RNA, 32 nt, Human
auaauaacaauuaagagacggcagggccuuca

SEQ ID NO: 63878 - RNA, 32 nt, Human
auaauaacacaaugcucagcucagggagcaag

SEQ ID NO: 63879 - RNA, 32 nt, Human
auaauaacaggcugggugcaauggcucacacc

SEQ ID NO: 63880 - RNA, 32 nt, Human
auaauaaccaaccaaccaaccaaccaaacuuc

SEQ ID NO: 63881 - RNA, 32 nt, Human
auaauaaccuauauugaaaugccaagaauugu

SEQ ID NO: 63882 - RNA, 32 nt, Human
auaauaagaaaaucuauguuuaaucaacugag

SEQ ID NO: 63883 - RNA, 32 nt, Human
auaauaagaaacugagaaggaggaauucuggc

SEQ ID NO: 63884 - RNA, 32 nt, Human
auaauaagagaacgugccaucuguaaagcacu

SEQ ID NO: 63885 - RNA, 32 nt, Human
auaauaagaggcuacuguugugucuaauguuc

SEQ ID NO: 63886 - RNA, 32 nt, Human
auaauaagagucuucagagagaugaugggagg

SEQ ID NO: 63887 - RNA, 32 nt, Human
auaauaagguaaagagguagaaucacuuucag

SEQ ID NO: 63888 - RNA, 32 nt, Human
auaauaaggucauaauuacaccuaacguaaua

SEQ ID NO: 63889 - RNA, 32 nt, Human
auaauaagugggaaagagagggacgggucuga

SEQ ID NO: 63890 - RNA, 32 nt, Human
auaauaauacaaaaauuagcugggcguggugg

SEQ ID NO: 63891 - RNA, 32 nt, Human
auaauaauaccaaucuccuagacuucauaaga

SEQ ID NO: 63892 - RNA, 32 nt, Human
auaauaauagcccuuccaucuggcaguggggg

SEQ ID NO: 63893 - RNA, 32 nt, Human
auaauaaugauacuuauguuagaagauuguuu

SEQ ID NO: 63894 - RNA, 31 nt, Human
auaauaauguucucuggguagguguugaaaa

SEQ ID NO: 63895 - RNA, 32 nt, Human
auaauaauuauaauccaguuuuaagauaauau

SEQ ID NO: 63896 - RNA, 32 nt, Human
auaauaauuuaccuuagcagacaugcaaaagc

SEQ ID NO: 63897 - RNA, 32 nt, Human
auaauacacagaauccugcaacuuuuugcaca

SEQ ID NO: 63898 - RNA, 32 nt, Human
auaauacacagccccuggauggggagggggua

SEQ ID NO: 63899 - RNA, 32 nt, Human
auaauacaucuuccacacauuuggcccacuga

SEQ ID NO: 63900 - RNA, 20 nt, Human
auaauacauucaccucccug

SEQ ID NO: 63901 - RNA, 32 nt, Human
auaauacccugccuucucguauugcugcugag

SEQ ID NO: 63902 - RNA, 32 nt, Human
auaauaccuauguaacaaacugagcagcuguu

SEQ ID NO: 63903 - RNA, 32 nt, Human
auaauaccuaugugaugcuguaauuuuacuuu

SEQ ID NO: 63904 - RNA, 32 nt, Human
auaauaccucaguuuugagguuaugcacacua

SEQ ID NO: 63905 - RNA, 32 nt, Human
auaauaccucaguuuugauguuaugcacacua

SEQ ID NO: 63906 - RNA, 32 nt, Human
auaauaccuuguaaguugcuuuuguuuguaaa

SEQ ID NO: 63907 - RNA, 20 nt, Human
auaauacugauugccucccu

SEQ ID NO: 63908 - RNA, 32 nt, Human
auaauagaaacagcaggucuugucagcuccuu

SEQ ID NO: 63909 - RNA, 32 nt, Human
auaauagaauugcucccuaccagcugaacagg

SEQ ID NO: 63910 - RNA, 32 nt, Human
auaauagaccagcaauugcagcacuuacaauc

SEQ ID NO: 63911 - RNA, 32 nt, Human
auaauagagcaucgauucucauucucucccuc

SEQ ID NO: 63912 - RNA, 32 nt, Human
auaauagaguccauauuauauaggguguccac

SEQ ID NO: 63913 - RNA, 32 nt, Human
auaauagauugaucaugcaccauauccacagg

SEQ ID NO: 63914 - RNA, 32 nt, Human
auaauagauuucauuucacucuagccuacaua

SEQ ID NO: 63915 - RNA, 32 nt, Human
auaauagcagugguaaaaguauuugcuuaaaa

SEQ ID NO: 63916 - RNA, 32 nt, Human
auaauaggaaaccagagaggggcaggggcugg

SEQ ID NO: 63917 - RNA, 32 nt, Human
auaauaggaacaaugcauucuaaugguacaac

SEQ ID NO: 63918 - RNA, 32 nt, Human
auaauaggcuacucgggaggcugaggcuggag

SEQ ID NO: 63919 - RNA, 32 nt, Human
auaauaguccuaauaagugauuucaaguauau

SEQ ID NO: 63920 - RNA, 32 nt, Human
auaauaguccuagaguuugcagcugguaaaac

SEQ ID NO: 63921 - RNA, 32 nt, Human
auaauaguucacuuacaaaugugauuugaugu

SEQ ID NO: 63922 - RNA, 32 nt, Human
auaauaguuguucagugaaggaagucagcugc

SEQ ID NO: 63923 - RNA, 32 nt, Human
auaauauagccuguccguuugcuguuuccagg

SEQ ID NO: 63924 - RNA, 32 nt, Human
auaauauaguaauccuguaacuggguuugaaa

SEQ ID NO: 63925 - RNA, 32 nt, Human
auaauauccguguuaagaagggguucuuuggc

SEQ ID NO: 63926 - RNA, 32 nt, Human
auaauaucucauuagccaggcuuuuuaggaac

SEQ ID NO: 63927 - RNA, 32 nt, Human
auaauaugugagaggacagauuguuagauaug

SEQ ID NO: 63928 - RNA, 31 nt, Human
auaauauucaaagccaauaccaaaacgaugg

SEQ ID NO: 63929 - RNA, 32 nt, Human
auaauauucauaaaccuaugggagacucgugu

SEQ ID NO: 63930 - RNA, 32 nt, Human
auaauauuccagauuacacuguaccuggcuuc

SEQ ID NO: 63931 - RNA, 32 nt, Human
auaauauuuuuccagaauuaacaguauaaauu

SEQ ID NO: 63932 - RNA, 22 nt, Human
auaaucaaucucuacuagguua

SEQ ID NO: 63933 - RNA, 32 nt, Human
auaaucaauucaucaagccaguuauuacugaa

SEQ ID NO: 63934 - RNA, 32 nt, Human
auaaucaccugaaagaaggggaagggacagag

SEQ ID NO: 63935 - RNA, 32 nt, Human
auaaucacgccacugcacuccagccugggcug

SEQ ID NO: 63936 - RNA, 32 nt, Human
auaaucacuugaaccugggagguggaaguugc

SEQ ID NO: 63937 - RNA, 32 nt, Human
auaaucaggcuuauggcauaagaaaaaugagu

SEQ ID NO: 63938 - RNA, 31 nt, Human
auaaucagucaaauaaagugaucugugcauc

SEQ ID NO: 63939 - RNA, 32 nt, Human
auaaucagugaaacuacuuaacacagcuaauu

SEQ ID NO: 63940 - RNA, 32 nt, Human
auaaucaguuacugguaucugucacugaccuu

SEQ ID NO: 63941 - RNA, 32 nt, Human
auaaucaguuuaucuaagaaaagggaauuuua

SEQ ID NO: 63942 - RNA, 32 nt, Human
auaaucauaaaaugaacaaaaccucagagccc

SEQ ID NO: 63943 - RNA, 32 nt, Human
auaaucauaacagcaaaaaccgaccaggagcc

SEQ ID NO: 63944 - RNA, 32 nt, Human
auaaucauaauguuuacaaugcagccuacugg

SEQ ID NO: 63945 - RNA, 32 nt, Human
auaaucaucccuuaaacacucugugaugggau

SEQ ID NO: 63946 - RNA, 32 nt, Human
auaaucaucucaaggacaugguaagugaaaga

SEQ ID NO: 63947 - RNA, 32 nt, Human
auaaucaugccacuguacuccagccuggguga

SEQ ID NO: 63948 - RNA, 32 nt, Human
auaaucauguugucuaaugguacucuggauuc

SEQ ID NO: 63949 - RNA, 32 nt, Human
auaaucauugucaacccuuugaugagugauau

SEQ ID NO: 63950 - RNA, 32 nt, Human
auaauccaacccacaugagcugagaguuuuuc

SEQ ID NO: 63951 - RNA, 32 nt, Human
auaauccagcacuuugggaagccgaggcgggc

SEQ ID NO: 63952 - RNA, 32 nt, Human
auaaucccaacacuuugggaggccgagguggg

SEQ ID NO: 63953 - RNA, 32 nt, Human
auaaucccaccccuagguaaauacucaaaaca

SEQ ID NO: 63954 - RNA, 32 nt, Human
auaaucccacugcauuccagccugggcaacag

SEQ ID NO: 63955 - RNA, 32 nt, Human
auaaucccagcacuaugggaggcugaggcaag

SEQ ID NO: 63956 - RNA, 32 nt, Human
auaaucccagcacuuggggaggccguggugag

SEQ ID NO: 63957 - RNA, 32 nt, Human
auaaucccagcacuuugggaggccaaaaucac

SEQ ID NO: 63958 - RNA, 32 nt, Human
auaaucccagcacuuugggaggccaagcuugg

SEQ ID NO: 63959 - RNA, 32 nt, Human
auaaucccagcacuuugggaggcugaagcagg

SEQ ID NO: 63960 - RNA, 32 nt, Human
auaaucccagcacuuugggaggcugaaguggg

SEQ ID NO: 63961 - RNA, 32 nt, Human
auaaucccagcacuuugggaggcugaggcagg

SEQ ID NO: 63962 - RNA, 32 nt, Human
auaaucccagcacuuugggaggcugagggagg

SEQ ID NO: 63963 - RNA, 32 nt, Human
auaaucccagcacuuugggaggcugaggugag

SEQ ID NO: 63964 - RNA, 32 nt, Human
auaaucccagcacuuugggaggcugagguggg

SEQ ID NO: 63965 - RNA, 32 nt, Human
auaaucccagcacuuugggaggcugagguggu

SEQ ID NO: 63966 - RNA, 32 nt, Human
auaaucccagcgcuuuggaggcugagguugga

SEQ ID NO: 63967 - RNA, 32 nt, Human
auaaucccagugcuuuacaaggcugaggcagg

SEQ ID NO: 63968 - RNA, 32 nt, Human
auaaucccgcuacucgggaggcugaggcagga

SEQ ID NO: 63969 - RNA, 32 nt, Human
auaaucccuaaaagcacccacauuuguuucaa

SEQ ID NO: 63970 - RNA, 32 nt, Human
auaauccuagagucuuaaagcauuucaggcca

SEQ ID NO: 63971 - RNA, 32 nt, Human
auaauccuagcuacucagguggcggaggugag

SEQ ID NO: 63972 - RNA, 32 nt, Human
auaauccuauauugagcuucaguggagaauaa

SEQ ID NO: 63973 - RNA, 32 nt, Human
auaauccuccauccucuuucccagacucacuc

SEQ ID NO: 63974 - RNA, 32 nt, Human
auaauccugaaauccaaaauugcacuguguuu

SEQ ID NO: 63975 - RNA, 32 nt, Human
auaauccuggacaugggugaacaugaggagaa

SEQ ID NO: 63976 - RNA, 32 nt, Human
auaaucgcuaguguuaugucaaaguuaagccc

SEQ ID NO: 63977 - RNA, 32 nt, Human
auaaucggcccacagcucccaccccacccccu

SEQ ID NO: 63978 - RNA, 32 nt, Human
auaaucgugccacugcaguccagccuaggcaa

SEQ ID NO: 63979 - RNA, 32 nt, Human
auaaucuaaugccacugcugaucugacaggag

SEQ ID NO: 63980 - RNA, 32 nt, Human
auaaucuacuucugguaaucugagggugcuuu

SEQ ID NO: 63981 - RNA, 32 nt, Human
auaaucuagcuucuccaccucuuguuucacac

SEQ ID NO: 63982 - RNA, 32 nt, Human
auaaucuauaugauuaaagaaaauaugcauaa

SEQ ID NO: 63983 - RNA, 20 nt, Human
auaaucucaagacaccuccc

SEQ ID NO: 63984 - RNA, 32 nt, Human
auaaucucaaguuagaaaacaguagguccuga

SEQ ID NO: 63985 - RNA, 31 nt, Human
auaaucucaauaaacaguuaaaaguucgaaa

SEQ ID NO: 63986 - RNA, 32 nt, Human
auaaucucaauuauaaaauuccugccucuccc

SEQ ID NO: 63987 - RNA, 32 nt, Human
auaaucucacaaaauacagauaugcaauuuuu

SEQ ID NO: 63988 - RNA, 32 nt, Human
auaaucucagcccuuuuggaggccaagguaag

SEQ ID NO: 63989 - RNA, 32 nt, Human
auaaucucuuuacuccccugugagugauucac

SEQ ID NO: 63990 - RNA, 32 nt, Human
auaaucucuuugugcaaacaccaggaagcccu

SEQ ID NO: 63991 - RNA, 32 nt, Human
auaaucugcaguaucauacuuguuuauauuac

SEQ ID NO: 63992 - RNA, 32 nt, Human
auaaucuggacuucagagauuaagucaccaau

SEQ ID NO: 63993 - RNA, 32 nt, Human
auaaucuggcucaugguaccuguucuucuauc

SEQ ID NO: 63994 - RNA, 32 nt, Human
auaaucuggguggggaaaauggcacugcuugg

SEQ ID NO: 63995 - RNA, 32 nt, Human
auaaucugguaaccccagccaagccaaggaug

SEQ ID NO: 63996 - RNA, 32 nt, Human
auaaucuguaauuuucuuuguuuauacuuccc

SEQ ID NO: 63997 - RNA, 32 nt, Human
auaaucuuauuuggggaggaaugggugggcac

SEQ ID NO: 63998 - RNA, 32 nt, Human
auaaucuucaaaaugaagacuuuggaaaauuu

SEQ ID NO: 63999 - RNA, 32 nt, Human
auaaucuuguucugcugauuuguuucuuguaa

SEQ ID NO: 64000 - RNA, 32 nt, Human
auaaucuuucacugcagccucaaacuccugga

SEQ ID NO: 64001 - RNA, 32 nt, Human
auaaucuuugagccacaccaaaaggaaugcca

SEQ ID NO: 64002 - RNA, 32 nt, Human
auaaugaaaaacaaaucucuccuuaauuugag

SEQ ID NO: 64003 - RNA, 32 nt, Human
auaaugaaaagcuuuuaaagagcuuuggguuu

SEQ ID NO: 64004 - RNA, 32 nt, Human
auaaugaaaccaugacaacgguucgcugugga

SEQ ID NO: 64005 - RNA, 32 nt, Human
auaaugaaacgguucggaauacuggcucaaga

SEQ ID NO: 64006 - RNA, 32 nt, Human
auaaugaacccccauauacccuuccuucugga

SEQ ID NO: 64007 - RNA, 32 nt, Human
auaaugaagauuuccuuuuuccuugccuauuu

SEQ ID NO: 64008 - RNA, 31 nt, Human
auaaugacaacuucuuuagaaauuugaaugg

SEQ ID NO: 64009 - RNA, 32 nt, Human
auaaugagccguugugcuccagccugggcgac

SEQ ID NO: 64010 - RNA, 32 nt, Human
auaaugaggcugucucugaaccccggagggcg

SEQ ID NO: 64011 - RNA, 32 nt, Human
auaaugagguaguuugugguaucagagcuaag

SEQ ID NO: 64012 - RNA, 32 nt, Human
auaaugauccaagaggaaguggcaaaugagug

SEQ ID NO: 64013 - RNA, 32 nt, Human
auaaugaucuacauuuaaaacucuuuauguaa

SEQ ID NO: 64014 - RNA, 32 nt, Human
auaaugaugauaauaccacuuaucucauagca

SEQ ID NO: 64015 - RNA, 32 nt, Human
auaaugauuugagucaguauaccauuuuaccu

SEQ ID NO: 64016 - RNA, 32 nt, Human
auaaugcaagagaugcugaugccaccagaaua

SEQ ID NO: 64017 - RNA, 32 nt, Human
auaaugcacaugcucuaacugcucaacaggaa

SEQ ID NO: 64018 - RNA, 32 nt, Human
auaaugcaccuugaaggcgcagaaggaacaca

SEQ ID NO: 64019 - RNA, 32 nt, Human
auaaugcaucuucuucccuccuucuacuguac

SEQ ID NO: 64020 - RNA, 32 nt, Human
auaaugcauucuauguagccaugucacuguga

SEQ ID NO: 64021 - RNA, 32 nt, Human
auaaugccacugcacuccagccugccuggaug

SEQ ID NO: 64022 - RNA, 32 nt, Human
auaaugccauccggaucccugugcucuaucuc

SEQ ID NO: 64023 - RNA, 32 nt, Human
auaaugcccuuuauagcuaccccacaccguca

SEQ ID NO: 64024 - RNA, 32 nt, Human
auaaugccguauauguaguagcacuuuucaaa

SEQ ID NO: 64025 - RNA, 32 nt, Human
auaaugccuaucuuccugcagccuccccacgu

SEQ ID NO: 64026 - RNA, 32 nt, Human
auaaugccucagagucuucacacuguggagaa

SEQ ID NO: 64027 - RNA, 32 nt, Human
auaaugccuccaccauuuucuaccuggugacu

SEQ ID NO: 64028 - RNA, 32 nt, Human
auaaugcggugagcaggcaccacgccggcaga

SEQ ID NO: 64029 - RNA, 32 nt, Human
auaaugcugggcccaacaccugggugauggaa

SEQ ID NO: 64030 - RNA, 32 nt, Human
auaauggaagugaugaugagaaaacaggacuc

SEQ ID NO: 64031 - RNA, 32 nt, Human
auaauggacuccuccuauagugccaauagguc

SEQ ID NO: 64032 - RNA, 32 nt, Human
auaauggacucuuaagaauggaaagggaugac

SEQ ID NO: 64033 - RNA, 32 nt, Human
auaauggagaagaggacagaggauguguggga

SEQ ID NO: 64034 - RNA, 32 nt, Human
auaauggagguuucacugugaagcaucaccag

SEQ ID NO: 64035 - RNA, 32 nt, Human
auaauggauacuuugcuuggauccaagucaaa

SEQ ID NO: 64036 - RNA, 32 nt, Human
auaauggcaaaaacuggcugggcacaguggcu

SEQ ID NO: 64037 - RNA, 32 nt, Human
auaauggcaacacugcgcuccagccuggcaga

SEQ ID NO: 64038 - RNA, 32 nt, Human
auaauggcaagugacguggcccuggggaaagg

SEQ ID NO: 64039 - RNA, 32 nt, Human
auaauggcauuucuccuuucugugcacagcac

SEQ ID NO: 64040 - RNA, 32 nt, Human
auaauggcauuugagacugaauuucuaaaaau

SEQ ID NO: 64041 - RNA, 32 nt, Human
auaauggcgguuugggggagccugcuagaaug

SEQ ID NO: 64042 - RNA, 32 nt, Human
auaauggcucaauaacucugaggcugguugcu

SEQ ID NO: 64043 - RNA, 32 nt, Human
auaauggcuuauaaaugguguuuaaauaugca

SEQ ID NO: 64044 - RNA, 32 nt, Human
auaaugggacucuugcuauguugcucacacua

SEQ ID NO: 64045 - RNA, 32 nt, Human
auaaugggagccaaaauucagagaaugaaaau

SEQ ID NO: 64046 - RNA, 32 nt, Human
auaaugggccuuguaagucuuuucaccauuca

SEQ ID NO: 64047 - RNA, 32 nt, Human
auaauggggaaaauauuugggaccaagcugaa

SEQ ID NO: 64048 - RNA, 23 nt, Human
auaaugggggccuggccauccca

SEQ ID NO: 64049 - RNA, 32 nt, Human
auaaugggucaccagcucccaugcccuagaug

SEQ ID NO: 64050 - RNA, 32 nt, Human
auaauggugccacuggacuccagccugggaga

SEQ ID NO: 64051 - RNA, 32 nt, Human
auaaugguuuggcuguuucuccacccaaaucu

SEQ ID NO: 64052 - RNA, 32 nt, Human
auaauguaacagcaccuacauacccauucccu

SEQ ID NO: 64053 - RNA, 32 nt, Human
auaauguauaaauuaagcauagcaagagauua

SEQ ID NO: 64054 - RNA, 31 nt, Human
auaauguauuucugauagcauuuaaauuccu

SEQ ID NO: 64055 - RNA, 32 nt, Human
auaaugucaguaggagacuuaaccuuagugug

SEQ ID NO: 64056 - RNA, 32 nt, Human
auaaugucauuuuuacggaaacccuuucggcg

SEQ ID NO: 64057 - RNA, 32 nt, Human
auaaugucuccacuuuguccaugccauuuagc

SEQ ID NO: 64058 - RNA, 32 nt, Human
auaaugucugauguuauucuuguauuuuucug

SEQ ID NO: 64059 - RNA, 32 nt, Human
auaaugucugcucuuguguagcucaggagaca

SEQ ID NO: 64060 - RNA, 32 nt, Human
auaaugucuuccaguucuacccauguuguuga

SEQ ID NO: 64061 - RNA, 32 nt, Human
auaaugucuuccuuuucccccuucccgccugg

SEQ ID NO: 64062 - RNA, 32 nt, Human
auaaugugaagacauugucuuuucacucuauc

SEQ ID NO: 64063 - RNA, 32 nt, Human
auaauguggaaauggcaguugucccgagggcg

SEQ ID NO: 64064 - RNA, 29 nt, Human
auaaugugucuguguugcuucaaauuggu

SEQ ID NO: 64065 - RNA, 32 nt, Human
auaauguguguauguuuauauguguacauaua

SEQ ID NO: 64066 - RNA, 32 nt, Human
auaauguucacuuauacauuccuguacagaaa

SEQ ID NO: 64067 - RNA, 31 nt, Human
auaauguugugaaucuccaugccaagugaaa

SEQ ID NO: 64068 - RNA, 32 nt, Human
auaauguuuuaguuaagaguccuguuggcugc

SEQ ID NO: 64069 - RNA, 31 nt, Human
auaauuaaaguguccauugacauguacagag

SEQ ID NO: 64070 - RNA, 32 nt, Human
auaauuaagcccauccaaaagaaaaaccaacc

SEQ ID NO: 64071 - RNA, 32 nt, Human
auaauuacacauauuuguauauuucagagaag

SEQ ID NO: 64072 - RNA, 32 nt, Human
auaauuacaguguuuaagagcauuuccccuag

SEQ ID NO: 64073 - RNA, 32 nt, Human
auaauuacgucuugagucugggauuauccgca

SEQ ID NO: 64074 - RNA, 32 nt, Human
auaauuacuuuagcuuuucuccagaaaagcuu

SEQ ID NO: 64075 - RNA, 32 nt, Human
auaauuacuuucaauuuccuccaggcaugacu

SEQ ID NO: 64076 - RNA, 32 nt, Human
auaauuagaagaaacccuuuuccuucagggaa

SEQ ID NO: 64077 - RNA, 32 nt, Human
auaauuagcugcaugcugcagacucaacaaag

SEQ ID NO: 64078 - RNA, 32 nt, Human
auaauuagggcugagugacuuuucgggacaca

SEQ ID NO: 64079 - RNA, 32 nt, Human
auaauuagugauauaagcauuguuuuuauugc

SEQ ID NO: 64080 - RNA, 32 nt, Human
auaauuauagcauuaacaccagggggcagagg

SEQ ID NO: 64081 - RNA, 32 nt, Human
auaauuauaucuuccccgcccaccucacaggc

SEQ ID NO: 64082 - RNA, 32 nt, Human
auaauuaucauugcaguggagugccuggauug

SEQ ID NO: 64083 - RNA, 32 nt, Human
auaauuauuacagcaaaaguuaagaaaugaaa

SEQ ID NO: 64084 - RNA, 32 nt, Human
auaauuauuuaucuuugcauuuugcucaggua

SEQ ID NO: 64085 - RNA, 32 nt, Human
auaauucaagugacuaagcuagauacuugagg

SEQ ID NO: 64086 - RNA, 32 nt, Human
auaauucacaccuugcacagcaugagauaauu

SEQ ID NO: 64087 - RNA, 32 nt, Human
auaauucaguaggucuggggugaggccugagg

SEQ ID NO: 64088 - RNA, 32 nt, Human
auaauucauacuggaaagaaacucugcaaacc

SEQ ID NO: 64089 - RNA, 32 nt, Human
auaauucauagugauagagugcagugauguuu

SEQ ID NO: 64090 - RNA, 32 nt, Human
auaauucaugccacggaccugugcacaugccu

SEQ ID NO: 64091 - RNA, 32 nt, Human
auaauucccauaagaguaacaaaaaggaccag

SEQ ID NO: 64092 - RNA, 32 nt, Human
auaauuccucacccccaauccuuaucaauucu

SEQ ID NO: 64093 - RNA, 32 nt, Human
auaauuccugugagaacacgagaagauggugg

SEQ ID NO: 64094 - RNA, 32 nt, Human
auaauucuacuuuguuuaauguagaguaacua

SEQ ID NO: 64095 - RNA, 32 nt, Human
auaauucuauaaacugaauuauuuuaaaaggu

SEQ ID NO: 64096 - RNA, 32 nt, Human
auaauucuauacuguugauucgucugcgauuu

SEQ ID NO: 64097 - RNA, 32 nt, Human
auaauucugaugucucaagcauuggcaggcug

SEQ ID NO: 64098 - RNA, 32 nt, Human
auaauucugcaauccucuugcucaggaagugu

SEQ ID NO: 64099 - RNA, 32 nt, Human
auaauucuggaaaaccugguuuuggaugcuuu

SEQ ID NO: 64100 - RNA, 32 nt, Human
auaauucuuacugcagagaaacucuacaaacc

SEQ ID NO: 64101 - RNA, 32 nt, Human
auaauucuuccaggaaaacucagucuuccaac

SEQ ID NO: 64102 - RNA, 32 nt, Human
auaauucuugguuuuuaucuaaucagauauuc

SEQ ID NO: 64103 - RNA, 32 nt, Human
auaauugaagaaaaaugauggaagagagugga

SEQ ID NO: 64104 - RNA, 32 nt, Human
auaauugagggaagagaugggagccagggcac

SEQ ID NO: 64105 - RNA, 32 nt, Human
auaauugcacacugcagauaaacugcacaugu

SEQ ID NO: 64106 - RNA, 32 nt, Human
auaauugcacaugguuuugagaacaggaacug

SEQ ID NO: 64107 - RNA, 32 nt, Human
auaauugcaucauugcacuccagccugggcaa

SEQ ID NO: 64108 - RNA, 32 nt, Human
auaauugcuugagccugggaggcagaggcugc

SEQ ID NO: 64109 - RNA, 32 nt, Human
auaauugcuuggaccugggagguggagguugc

SEQ ID NO: 64110 - RNA, 32 nt, Human
auaauuggauacucauucuucccuucaaaacc

SEQ ID NO: 64111 - RNA, 32 nt, Human
auaauugguguugggaguguugcagugacuga

SEQ ID NO: 64112 - RNA, 32 nt, Human
auaauugugaaauauggaauuauuucugacac

SEQ ID NO: 64113 - RNA, 32 nt, Human
auaauugugauuaauuacaaaauaauugcuaa

SEQ ID NO: 64114 - RNA, 32 nt, Human
auaauugugccacugcacugcagccugggcga

SEQ ID NO: 64115 - RNA, 32 nt, Human
auaauuguugcagaggucucuguauuuugcag

SEQ ID NO: 64116 - RNA, 32 nt, Human
auaauuuaggcuucagcaucucaccagccccu

SEQ ID NO: 64117 - RNA, 32 nt, Human
auaauuuaguguuauuuuuacuuuauuuaggc

SEQ ID NO: 64118 - RNA, 32 nt, Human
auaauuuaugugaagacacaaagauguuuaaa

SEQ ID NO: 64119 - RNA, 32 nt, Human
auaauuucaugagaaagacaggcggauuccuu

SEQ ID NO: 64120 - RNA, 32 nt, Human
auaauuucuaaccucuguucucucaguaaaca

SEQ ID NO: 64121 - RNA, 32 nt, Human
auaauuucuagagagccacccuuucuacauga

SEQ ID NO: 64122 - RNA, 32 nt, Human
auaauuucuaggcuuaucuuguuuugcaguuu

SEQ ID NO: 64123 - RNA, 32 nt, Human
auaauuucuccucauuuaauauuuuucaaaau

SEQ ID NO: 64124 - RNA, 32 nt, Human
auaauuugcucuaggucccuauacuaauugag

SEQ ID NO: 64125 - RNA, 32 nt, Human
auaauuuggcaaaugcuggccuuuauggacga

SEQ ID NO: 64126 - RNA, 32 nt, Human
auaauuuggcugcugauuggcuuacuuuuaga

SEQ ID NO: 64127 - RNA, 32 nt, Human
auaauuugucagccccuggccuagggggaaga

SEQ ID NO: 64128 - RNA, 32 nt, Human
auaauuuguggaccagggauugcuuuucugaa

SEQ ID NO: 64129 - RNA, 32 nt, Human
auaauuugugucgauggauguucugugaaggc

SEQ ID NO: 64130 - RNA, 24 nt, Human
auaauuuguuccaccacuagauua

SEQ ID NO: 64131 - RNA, 32 nt, Human
auaauuuuauagcacguuuacucuagugcuag

SEQ ID NO: 64132 - RNA, 32 nt, Human
auaauuuucagcuaauuaucugggugacccag

SEQ ID NO: 64133 - RNA, 32 nt, Human
auaauuuucauuuuuaauuccucuugguguca

SEQ ID NO: 64134 - RNA, 32 nt, Human
auaauuuuccagaacuuaccucuguuuuaaaa

SEQ ID NO: 64135 - RNA, 32 nt, Human
auaauuuuccugucucugccucugggagggaa

SEQ ID NO: 64136 - RNA, 32 nt, Human
auaauuuugauguguuacaaaauacuacugug

SEQ ID NO: 64137 - RNA, 32 nt, Human
auaauuuugguuuaaaugugcugguuaguuga

SEQ ID NO: 64138 - RNA, 32 nt, Human
auaauuuuucuuggauuuauguucuguaucug

SEQ ID NO: 64139 - RNA, 32 nt, Human
auaauuuuugugauaucugccaccacagauaa

SEQ ID NO: 64140 - RNA, 32 nt, Human
auacaaaaacuagcugggcaugguggcuuuuu

SEQ ID NO: 64141 - RNA, 32 nt, Human
auacaaaaagcccuaaaugaacuguuaacuau

SEQ ID NO: 64142 - RNA, 32 nt, Human
auacaaaaauuaauugggcauggugguggaca

SEQ ID NO: 64143 - RNA, 32 nt, Human
auacaaaaauuagacuggcaugguggcaugcg

SEQ ID NO: 64144 - RNA, 32 nt, Human
auacaaaaauuagcagagcaugguggcaggcg

SEQ ID NO: 64145 - RNA, 32 nt, Human
auacaaaaauuagcagggcaugguggugcaug

SEQ ID NO: 64146 - RNA, 32 nt, Human
auacaaaaauuagccacgcaugguggcacaca

SEQ ID NO: 64147 - RNA, 32 nt, Human
auacaaaaauuagccaggcaugguggcaaacg

SEQ ID NO: 64148 - RNA, 32 nt, Human
auacaaaaauuagccaggcaugguggcacaca

SEQ ID NO: 64149 - RNA, 32 nt, Human
auacaaaaauuagccaggcaugguggcacacg

SEQ ID NO: 64150 - RNA, 32 nt, Human
auacaaaaauuagccaggcaugguggcacaug

SEQ ID NO: 64151 - RNA, 32 nt, Human
auacaaaaauuagccaggcaugguggcacgcg

SEQ ID NO: 64152 - RNA, 32 nt, Human
auacaaaaauuagccaggcaugguggcacgug

SEQ ID NO: 64153 - RNA, 32 nt, Human
auacaaaaauuagccaggcaugguggcaggag

SEQ ID NO: 64154 - RNA, 32 nt, Human
auacaaaaauuagccaggcaugguggcaggcg

SEQ ID NO: 64155 - RNA, 32 nt, Human
auacaaaaauuagccaggcaugguggcaugca

SEQ ID NO: 64156 - RNA, 32 nt, Human
auacaaaaauuagccaggcaugguggccagca

SEQ ID NO: 64157 - RNA, 32 nt, Human
auacaaaaauuagccaggcaugguggcgggcg

SEQ ID NO: 64158 - RNA, 32 nt, Human
auacaaaaauuagccaggcaugguggcgggug

SEQ ID NO: 64159 - RNA, 32 nt, Human
auacaaaaauuagccaggcaugguggcgugug

SEQ ID NO: 64160 - RNA, 32 nt, Human
auacaaaaauuagccaggcauggugguacaca

SEQ ID NO: 64161 - RNA, 32 nt, Human
auacaaaaauuagccaggcaugguggugagcc

SEQ ID NO: 64162 - RNA, 32 nt, Human
auacaaaaauuagccaggcaugguggugcaca

SEQ ID NO: 64163 - RNA, 32 nt, Human
auacaaaaauuagccaggcaugguggugcacg

SEQ ID NO: 64164 - RNA, 32 nt, Human
auacaaaaauuagccaggcaugguggugcaug

SEQ ID NO: 64165 - RNA, 32 nt, Human
auacaaaaauuagccaggcaugguggugggua

SEQ ID NO: 64166 - RNA, 32 nt, Human
auacaaaaauuagccaggcaugguggugggug

SEQ ID NO: 64167 - RNA, 32 nt, Human
auacaaaaauuagccaggcaugguggugugca

SEQ ID NO: 64168 - RNA, 32 nt, Human
auacaaaaauuagccaggcaugguggugugcg

SEQ ID NO: 64169 - RNA, 32 nt, Human
auacaaaaauuagccagguaugguggcacgug

SEQ ID NO: 64170 - RNA, 32 nt, Human
auacaaaaauuagccaugcaugguggcgggug

SEQ ID NO: 64171 - RNA, 32 nt, Human
auacaaaaauuagccaugcaugguggcucaug

SEQ ID NO: 64172 - RNA, 32 nt, Human
auacaaaaauuagccaugcaugguggugcaug

SEQ ID NO: 64173 - RNA, 32 nt, Human
auacaaaaauuagccgagcaugguggccugug

SEQ ID NO: 64174 - RNA, 32 nt, Human
auacaaaaauuagccgagcaugguggcgggca

SEQ ID NO: 64175 - RNA, 32 nt, Human
auacaaaaauuagccgggcaugguagcaggca

SEQ ID NO: 64176 - RNA, 32 nt, Human
auacaaaaauuagccgggcauggugacaggca

SEQ ID NO: 64177 - RNA, 32 nt, Human
auacaaaaauuagccgggcaugguggcacacg

SEQ ID NO: 64178 - RNA, 32 nt, Human
auacaaaaauuagccgggcaugguggcacaug

SEQ ID NO: 64179 - RNA, 32 nt, Human
auacaaaaauuagccgggcaugguggcacgcg

SEQ ID NO: 64180 - RNA, 32 nt, Human
auacaaaaauuagccgggcaugguggcacgug

SEQ ID NO: 64181 - RNA, 32 nt, Human
auacaaaaauuagccgggcaugguggcaggca

SEQ ID NO: 64182 - RNA, 32 nt, Human
auacaaaaauuagccgggcaugguggcaggcg

SEQ ID NO: 64183 - RNA, 32 nt, Human
auacaaaaauuagccgggcaugguggcaggug

SEQ ID NO: 64184 - RNA, 32 nt, Human
auacaaaaauuagccgggcaugguggcaguca

SEQ ID NO: 64185 - RNA, 32 nt, Human
auacaaaaauuagccgggcaugguggcaugca

SEQ ID NO: 64186 - RNA, 32 nt, Human
auacaaaaauuagccgggcaugguggcaugcg

SEQ ID NO: 64187 - RNA, 32 nt, Human
auacaaaaauuagccgggcaugguggcgcaug

SEQ ID NO: 64188 - RNA, 32 nt, Human
auacaaaaauuagccgggcaugguggcgcgca

SEQ ID NO: 64189 - RNA, 32 nt, Human
auacaaaaauuagccgggcaugguggcgcuca

SEQ ID NO: 64190 - RNA, 32 nt, Human
auacaaaaauuagccgggcaugguggcgggcc

SEQ ID NO: 64191 - RNA, 32 nt, Human
auacaaaaauuagccgggcaugguggcgggug

SEQ ID NO: 64192 - RNA, 32 nt, Human
auacaaaaauuagccgggcaugguggcgugca

SEQ ID NO: 64193 - RNA, 32 nt, Human
auacaaaaauuagccgggcaugguggcgugug

SEQ ID NO: 64194 - RNA, 32 nt, Human
auacaaaaauuagccgggcauggugguagggg

SEQ ID NO: 64195 - RNA, 32 nt, Human
auacaaaaauuagccgggcaugguggugcaca

SEQ ID NO: 64196 - RNA, 32 nt, Human
auacaaaaauuagccgggcaugguggugcacg

SEQ ID NO: 64197 - RNA, 32 nt, Human
auacaaaaauuagccgggcaugguggugcgua

SEQ ID NO: 64198 - RNA, 32 nt, Human
auacaaaaauuagccgggcaugguggugggca

SEQ ID NO: 64199 - RNA, 32 nt, Human
auacaaaaauuagccgggcaugguggugggcg

SEQ ID NO: 64200 - RNA, 32 nt, Human
auacaaaaauuagccgggcaugguggugggua

SEQ ID NO: 64201 - RNA, 32 nt, Human
auacaaaaauuagccgggcaugguggugugug

SEQ ID NO: 64202 - RNA, 32 nt, Human
auacaaaaauuagccgggcaugguguugcgug

SEQ ID NO: 64203 - RNA, 32 nt, Human
auacaaaaauuagccgugcaugguggugcacg

SEQ ID NO: 64204 - RNA, 32 nt, Human
auacaaaaauuagccuagcaugguggcgcaua

SEQ ID NO: 64205 - RNA, 32 nt, Human
auacaaaaauuagccuggcaugguggcaggcg

SEQ ID NO: 64206 - RNA, 32 nt, Human
auacaaaaauuagcuaggcaugguggcacacg

SEQ ID NO: 64207 - RNA, 32 nt, Human
auacaaaaauuagcuaggcaugguggcaggcg

SEQ ID NO: 64208 - RNA, 32 nt, Human
auacaaaaauuagcuaggcaugguggcgugca

SEQ ID NO: 64209 - RNA, 32 nt, Human
auacaaaaauuagcucagcaugguggcaugcg

SEQ ID NO: 64210 - RNA, 32 nt, Human
auacaaaaauuagcugagcgugguugcgcgcg

SEQ ID NO: 64211 - RNA, 32 nt, Human
auacaaaaauuagcugagugugguggcacaug

SEQ ID NO: 64212 - RNA, 32 nt, Human
auacaaaaauuagcugaucaugguggcacacg

SEQ ID NO: 64213 - RNA, 32 nt, Human
auacaaaaauuagcuggacaugguggcacgug

SEQ ID NO: 64214 - RNA, 32 nt, Human
auacaaaaauuagcuggacaugguggcgggcg

SEQ ID NO: 64215 - RNA, 32 nt, Human
auacaaaaauuagcuggacaugguggugcaug

SEQ ID NO: 64216 - RNA, 32 nt, Human
auacaaaaauuagcuggacgugguggugcaug

SEQ ID NO: 64217 - RNA, 32 nt, Human
auacaaaaauuagcuggacgugguggugugca

SEQ ID NO: 64218 - RNA, 32 nt, Human
auacaaaaauuagcuggauauggugguaugug

SEQ ID NO: 64219 - RNA, 32 nt, Human
auacaaaaauuagcuggaugugguggcacaca

SEQ ID NO: 64220 - RNA, 32 nt, Human
auacaaaaauuagcuggaugugguggcagugc

SEQ ID NO: 64221 - RNA, 32 nt, Human
auacaaaaauuagcuggcaugguggugugcac

SEQ ID NO: 64222 - RNA, 32 nt, Human
auacaaaaauuagcuggcugugguggugggca

SEQ ID NO: 64223 - RNA, 32 nt, Human
auacaaaaauuagcugggcacgguggcgggca

SEQ ID NO: 64224 - RNA, 32 nt, Human
auacaaaaauuagcugggcacgguggugcgug

SEQ ID NO: 64225 - RNA, 32 nt, Human
auacaaaaauuagcugggcauaguggcgggua

SEQ ID NO: 64226 - RNA, 32 nt, Human
auacaaaaauuagcugggcauaguggugcaug

SEQ ID NO: 64227 - RNA, 32 nt, Human
auacaaaaauuagcugggcaucauggcacaca

SEQ ID NO: 64228 - RNA, 32 nt, Human
auacaaaaauuagcugggcaugauggcaggca

SEQ ID NO: 64229 - RNA, 32 nt, Human
auacaaaaauuagcugggcaugauggcgagug

SEQ ID NO: 64230 - RNA, 32 nt, Human
auacaaaaauuagcugggcaugauggugcaug

SEQ ID NO: 64231 - RNA, 32 nt, Human
auacaaaaauuagcugggcauggcggcgugug

SEQ ID NO: 64232 - RNA, 32 nt, Human
auacaaaaauuagcugggcaugguagugcaug

SEQ ID NO: 64233 - RNA, 32 nt, Human
auacaaaaauuagcugggcauggugcgggcac

SEQ ID NO: 64234 - RNA, 32 nt, Human
auacaaaaauuagcugggcaugguggcaagag

SEQ ID NO: 64235 - RNA, 32 nt, Human
auacaaaaauuagcugggcaugguggcacaca

SEQ ID NO: 64236 - RNA, 32 nt, Human
auacaaaaauuagcugggcaugguggcacaug

SEQ ID NO: 64237 - RNA, 32 nt, Human
auacaaaaauuagcugggcaugguggcacccg

SEQ ID NO: 64238 - RNA, 32 nt, Human
auacaaaaauuagcugggcaugguggcaggcg

SEQ ID NO: 64239 - RNA, 32 nt, Human
auacaaaaauuagcugggcaugguggcaugcg

SEQ ID NO: 64240 - RNA, 32 nt, Human
auacaaaaauuagcugggcaugguggcgcacg

SEQ ID NO: 64241 - RNA, 32 nt, Human
auacaaaaauuagcugggcaugguggcgcaua

SEQ ID NO: 64242 - RNA, 32 nt, Human
auacaaaaauuagcugggcaugguggcgcaug

SEQ ID NO: 64243 - RNA, 32 nt, Human
auacaaaaauuagcugggcaugguggcgggca

SEQ ID NO: 64244 - RNA, 32 nt, Human
auacaaaaauuagcugggcaugguggcgggug

SEQ ID NO: 64245 - RNA, 32 nt, Human
auacaaaaauuagcugggcaugguggggcaug

SEQ ID NO: 64246 - RNA, 32 nt, Human
auacaaaaauuagcugggcaugguggugcaca

SEQ ID NO: 64247 - RNA, 32 nt, Human
auacaaaaauuagcugggcaugguggugcgug

SEQ ID NO: 64248 - RNA, 32 nt, Human
auacaaaaauuagcugggcaugguggugggac

SEQ ID NO: 64249 - RNA, 32 nt, Human
auacaaaaauuagcugggcaugguggugggcg

SEQ ID NO: 64250 - RNA, 32 nt, Human
auacaaaaauuagcugggcaugguggugugca

SEQ ID NO: 64251 - RNA, 32 nt, Human
auacaaaaauuagcugggcaugguggugugcg

SEQ ID NO: 64252 - RNA, 32 nt, Human
auacaaaaauuagcugggcaugguguugugca

SEQ ID NO: 64253 - RNA, 32 nt, Human
auacaaaaauuagcugggcaugguugcgugcg

SEQ ID NO: 64254 - RNA, 32 nt, Human
auacaaaaauuagcugggcauguuggcaugca

SEQ ID NO: 64255 - RNA, 32 nt, Human
auacaaaaauuagcugggcgcgguggugcaca

SEQ ID NO: 64256 - RNA, 32 nt, Human
auacaaaaauuagcugggcgggguggcacaca

SEQ ID NO: 64257 - RNA, 32 nt, Human
auacaaaaauuagcugggcgugauggcgagcg

SEQ ID NO: 64258 - RNA, 32 nt, Human
auacaaaaauuagcugggcgugauguugcuua

SEQ ID NO: 64259 - RNA, 32 nt, Human
auacaaaaauuagcugggcgugcuggcacgug

SEQ ID NO: 64260 - RNA, 32 nt, Human
auacaaaaauuagcugggcguggaggcgcgug

SEQ ID NO: 64261 - RNA, 32 nt, Human
auacaaaaauuagcugggcguggcggugcgca

SEQ ID NO: 64262 - RNA, 32 nt, Human
auacaaaaauuagcugggcgugguagugcaag

SEQ ID NO: 64263 - RNA, 32 nt, Human
auacaaaaauuagcugggcgugguagugcaug

SEQ ID NO: 64264 - RNA, 32 nt, Human
auacaaaaauuagcugggcgugguggcacaca

SEQ ID NO: 64265 - RNA, 32 nt, Human
auacaaaaauuagcugggcgugguggcacacg

SEQ ID NO: 64266 - RNA, 32 nt, Human
auacaaaaauuagcugggcgugguggcacaug

SEQ ID NO: 64267 - RNA, 32 nt, Human
auacaaaaauuagcugggcgugguggcacguu

SEQ ID NO: 64268 - RNA, 32 nt, Human
auacaaaaauuagcugggcgugguggcagaug

SEQ ID NO: 64269 - RNA, 32 nt, Human
auacaaaaauuagcugggcgugguggcaggca

SEQ ID NO: 64270 - RNA, 32 nt, Human
auacaaaaauuagcugggcgugguggcaugcg

SEQ ID NO: 64271 - RNA, 32 nt, Human
auacaaaaauuagcugggcgugguggcgcaug

SEQ ID NO: 64272 - RNA, 32 nt, Human
auacaaaaauuagcugggcgugguggcgggca

SEQ ID NO: 64273 - RNA, 32 nt, Human
auacaaaaauuagcugggcgugguggcgugca

SEQ ID NO: 64274 - RNA, 32 nt, Human
auacaaaaauuagcugggcgugguggcgugug

SEQ ID NO: 64275 - RNA, 32 nt, Human
auacaaaaauuagcugggcgugguggugcaug

SEQ ID NO: 64276 - RNA, 32 nt, Human
auacaaaaauuagcugggcgugguggugcgug

SEQ ID NO: 64277 - RNA, 32 nt, Human
auacaaaaauuagcugggcguggugguggaua

SEQ ID NO: 64278 - RNA, 32 nt, Human
auacaaaaauuagcugggcgugguggugggaa

SEQ ID NO: 64279 - RNA, 32 nt, Human
auacaaaaauuagcugggcgugguggugggcg

SEQ ID NO: 64280 - RNA, 32 nt, Human
auacaaaaauuagcugggcgugguggugggua

SEQ ID NO: 64281 - RNA, 32 nt, Human
auacaaaaauuagcugggcguggugguguacc

SEQ ID NO: 64282 - RNA, 32 nt, Human
auacaaaaauuagcugggcgugguugcacacg

SEQ ID NO: 64283 - RNA, 32 nt, Human
auacaaaaauuagcugggcguguuggcacaca

SEQ ID NO: 64284 - RNA, 32 nt, Human
auacaaaaauuagcugggcguguuggcacgcg

SEQ ID NO: 64285 - RNA, 32 nt, Human
auacaaaaauuagcugggcguuauggcgggcg

SEQ ID NO: 64286 - RNA, 32 nt, Human
auacaaaaauuagcugggcuucguggcgggua

SEQ ID NO: 64287 - RNA, 32 nt, Human
auacaaaaauuagcugggcuugguggcuggcg

SEQ ID NO: 64288 - RNA, 32 nt, Human
auacaaaaauuagcugggcuugguggugugag

SEQ ID NO: 64289 - RNA, 32 nt, Human
auacaaaaauuagcugggggugguggcaugcg

SEQ ID NO: 64290 - RNA, 32 nt, Human
auacaaaaauuagcugggguugguggcacaug

SEQ ID NO: 64291 - RNA, 32 nt, Human
auacaaaaauuagcuggguaugaugaugcacg

SEQ ID NO: 64292 - RNA, 32 nt, Human
auacaaaaauuagcuggguaugguggcacaua

SEQ ID NO: 64293 - RNA, 32 nt, Human
auacaaaaauuagcugggugcgguggcaggug

SEQ ID NO: 64294 - RNA, 32 nt, Human
auacaaaaauuagcuggguguaguggcaugcg

SEQ ID NO: 64295 - RNA, 32 nt, Human
auacaaaaauuagcuggguguaguggcgggug

SEQ ID NO: 64296 - RNA, 32 nt, Human
auacaaaaauuagcuggguguauggcgcccac

SEQ ID NO: 64297 - RNA, 32 nt, Human
auacaaaaauuagcugggugugauggccacuu

SEQ ID NO: 64298 - RNA, 32 nt, Human
auacaaaaauuagcugggugugauggugcaca

SEQ ID NO: 64299 - RNA, 32 nt, Human
auacaaaaauuagcuggguguggugacaggcg

SEQ ID NO: 64300 - RNA, 32 nt, Human
auacaaaaauuagcuggguguggugccacaug

SEQ ID NO: 64301 - RNA, 32 nt, Human
auacaaaaauuagcugggugugguggcacaca

SEQ ID NO: 64302 - RNA, 32 nt, Human
auacaaaaauuagcugggugugguggcacacg

SEQ ID NO: 64303 - RNA, 32 nt, Human
auacaaaaauuagcugggugugguggcacaug

SEQ ID NO: 64304 - RNA, 32 nt, Human
auacaaaaauuagcugggugugguggcacgug

SEQ ID NO: 64305 - RNA, 32 nt, Human
auacaaaaauuagcugggugugguggcaggca

SEQ ID NO: 64306 - RNA, 32 nt, Human
auacaaaaauuagcugggugugguggcauacg

SEQ ID NO: 64307 - RNA, 32 nt, Human
auacaaaaauuagcugggugugguggcaugcg

SEQ ID NO: 64308 - RNA, 32 nt, Human
auacaaaaauuagcugggugugguggcggcgc

SEQ ID NO: 64309 - RNA, 32 nt, Human
auacaaaaauuagcugggugugguggcgggca

SEQ ID NO: 64310 - RNA, 32 nt, Human
auacaaaaauuagcugggugugguggcgggug

SEQ ID NO: 64311 - RNA, 32 nt, Human
auacaaaaauuagcugggugugguggcgugcg

SEQ ID NO: 64312 - RNA, 32 nt, Human
auacaaaaauuagcugggugugguggcgugug

SEQ ID NO: 64313 - RNA, 32 nt, Human
auacaaaaauuagcuggguguggugguacacg

SEQ ID NO: 64314 - RNA, 32 nt, Human
auacaaaaauuagcuggguguggugguaggca

SEQ ID NO: 64315 - RNA, 32 nt, Human
auacaaaaauuagcuggguguggugguaugug

SEQ ID NO: 64316 - RNA, 32 nt, Human
auacaaaaauuagcugggugugguggugcaca

SEQ ID NO: 64317 - RNA, 32 nt, Human
auacaaaaauuagcugggugugguggugcacg

SEQ ID NO: 64318 - RNA, 32 nt, Human
auacaaaaauuagcugggugugguggugcaug

SEQ ID NO: 64319 - RNA, 32 nt, Human
auacaaaaauuagcugggugugguggugcgca

SEQ ID NO: 64320 - RNA, 32 nt, Human
auacaaaaauuagcugggugugguggugggca

SEQ ID NO: 64321 - RNA, 32 nt, Human
auacaaaaauuagcuggguguggugucagaug

SEQ ID NO: 64322 - RNA, 32 nt, Human
auacaaaaauuagcuggguguguuggugcaug

SEQ ID NO: 64323 - RNA, 32 nt, Human
auacaaaaauuagcuggucuugguggcgggcg

SEQ ID NO: 64324 - RNA, 32 nt, Human
auacaaaaauuagcugugcauagugguuggca

SEQ ID NO: 64325 - RNA, 32 nt, Human
auacaaaaauuagguggacaugguggcgagca

SEQ ID NO: 64326 - RNA, 32 nt, Human
auacaaaaauuagucaggcaugguggcacaug

SEQ ID NO: 64327 - RNA, 32 nt, Human
auacaaaaauuagucaggcaugguggugggcg

SEQ ID NO: 64328 - RNA, 32 nt, Human
auacaaaaauuaguucggcaugguggcaggcg

SEQ ID NO: 64329 - RNA, 32 nt, Human
auacaaaaauuaguugggcaugguggcacaca

SEQ ID NO: 64330 - RNA, 32 nt, Human
auacaaaaauuaguugggcaugguggugagca

SEQ ID NO: 64331 - RNA, 32 nt, Human
auacaaaaauuaguuggucauggugguguuca

SEQ ID NO: 64332 - RNA, 32 nt, Human
auacaaaaauuauccgggcaugguggcacaug

SEQ ID NO: 64333 - RNA, 32 nt, Human
auacaaaaauuaucugggcaugguggcacgug

SEQ ID NO: 64334 - RNA, 32 nt, Human
auacaaaaauuaucugggcaugguggugcaug

SEQ ID NO: 64335 - RNA, 32 nt, Human
auacaaaaauuggcugggcaugguggcgggug

SEQ ID NO: 64336 - RNA, 32 nt, Human
auacaaaaauuggucgggcauggugguggugc

SEQ ID NO: 64337 - RNA, 32 nt, Human
auacaaaaauuugcugggcaugguggcgcgug

SEQ ID NO: 64338 - RNA, 32 nt, Human
auacaaaaccucuccacuccacugaccuggug

SEQ ID NO: 64339 - RNA, 32 nt, Human
auacaaaacuuagcugggcgugguggcaugca

SEQ ID NO: 64340 - RNA, 32 nt, Human
auacaaaacuuagcugggugugguggugugau

SEQ ID NO: 64341 - RNA, 32 nt, Human
auacaaaaggggagguuuuagacaggcucccu

SEQ ID NO: 64342 - RNA, 32 nt, Human
auacaaaaguuagcugagcaugguggcgugug

SEQ ID NO: 64343 - RNA, 32 nt, Human
auacaaaaguuagcuggggcugguggugggca

SEQ ID NO: 64344 - RNA, 32 nt, Human
auacaaaaguuagcugggugugguggcagagg

SEQ ID NO: 64345 - RNA, 32 nt, Human
auacaaaaguuagcugggugugguggugugca

SEQ ID NO: 64346 - RNA, 32 nt, Human
auacaaaaguuagucgggcaugguggcgcgcc

SEQ ID NO: 64347 - RNA, 32 nt, Human
auacaaaaugugagccaggaaacccaguuuuu

SEQ ID NO: 64348 - RNA, 32 nt, Human
auacaaaauuuagccaggcaugguggcacaca

SEQ ID NO: 64349 - RNA, 32 nt, Human
auacaaaauuuagccaggcaugguggcaugca

SEQ ID NO: 64350 - RNA, 32 nt, Human
auacaaaauuuagcugggcaugguggcgugcc

SEQ ID NO: 64351 - RNA, 32 nt, Human
auacaaacaaaggacuuucucucccagcaaau

SEQ ID NO: 64352 - RNA, 32 nt, Human
auacaaacaaaugaauuuaaauacaaaaauua

SEQ ID NO: 64353 - RNA, 32 nt, Human
auacaaacaacaaaauuaucuauuuuccagag

SEQ ID NO: 64354 - RNA, 32 nt, Human
auacaaacagaauuugaucagcuuagaagcau

SEQ ID NO: 64355 - RNA, 32 nt, Human
auacaaacauuagccgggcaugguggcacgca

SEQ ID NO: 64356 - RNA, 32 nt, Human
auacaaaccacaugucuaacacuugcuaccuc

SEQ ID NO: 64357 - RNA, 32 nt, Human
auacaaaccgcgccacuauuccugccugucau

SEQ ID NO: 64358 - RNA, 32 nt, Human
auacaaacucaggccugcagaggcucugagga

SEQ ID NO: 64359 - RNA, 23 nt, Human
auacaaacuugccuuauuuucua

SEQ ID NO: 64360 - RNA, 32 nt, Human
auacaaagaaaggucagagaaaugcaugggaa

SEQ ID NO: 64361 - RNA, 18 nt, Human
auacaaagccacugccuc

SEQ ID NO: 64362 - RNA, 22 nt, Human
auacaaaguauacauacaguau

SEQ ID NO: 64363 - RNA, 17 nt, Human
auacaaagucacccuca

SEQ ID NO: 64364 - RNA, 24 nt, Human
auacaaaguguuaauaugugucau

SEQ ID NO: 64365 - RNA, 24 nt, Human
auacaaauaaaaacaauacagcau

SEQ ID NO: 64366 - RNA, 32 nt, Human
auacaaauaauguuguaauuaacucaaauuac

SEQ ID NO: 64367 - RNA, 19 nt, Human
auacaaauacacaauccuc

SEQ ID NO: 64368 - RNA, 18 nt, Human
auacaaauacuugguuca

SEQ ID NO: 64369 - RNA, 16 nt, Human
auacaaauauaccuua

SEQ ID NO: 64370 - RNA, 18 nt, Human
auacaaauauauuccuua

SEQ ID NO: 64371 - RNA, 19 nt, Human
auacaaauauccuacuuca

SEQ ID NO: 64372 - RNA, 17 nt, Human
auacaaauauuaccuca

SEQ ID NO: 64373 - RNA, 32 nt, Human
auacaaauauuagccgggcaugguggcgggcg

SEQ ID NO: 64374 - RNA, 32 nt, Human
auacaaauauuagcuggauaugguggugggca

SEQ ID NO: 64375 - RNA, 32 nt, Human
auacaaauauuagcugggcaugaugaugggcc

SEQ ID NO: 64376 - RNA, 32 nt, Human
auacaaauauuagcugggcgugguggcaggug

SEQ ID NO: 64377 - RNA, 32 nt, Human
auacaaaucucuuaaggagguggaccccaagu

SEQ ID NO: 64378 - RNA, 18 nt, Human
auacaaaugcaugacuca

SEQ ID NO: 64379 - RNA, 19 nt, Human
auacaaauguuccuccuca

SEQ ID NO: 64380 - RNA, 17 nt, Human
auacaaauuauuuccuc

SEQ ID NO: 64381 - RNA, 32 nt, Human
auacaacaggaaagguccaaauucacccucug

SEQ ID NO: 64382 - RNA, 32 nt, Human
auacaacaggugaacggguuucugccacaucu

SEQ ID NO: 64383 - RNA, 32 nt, Human
auacaacagugaucugaaaagaccaaaaagag

SEQ ID NO: 64384 - RNA, 32 nt, Human
auacaacaguuagucgggcaugguggugcaca

SEQ ID NO: 64385 - RNA, 32 nt, Human
auacaacucugugaccauggccagcaggaagc

SEQ ID NO: 64386 - RNA, 32 nt, Human
auacaacuguauugggggaaauucagccagac

SEQ ID NO: 64387 - RNA, 32 nt, Human
auacaacuguuugaauuccagaaggaccaaca

SEQ ID NO: 64388 - RNA, 21 nt, Human
auacaagaaagaaaccucaca

SEQ ID NO: 64389 - RNA, 21 nt, Human
auacaagaaccuuuuauuuuc

SEQ ID NO: 64390 - RNA, 32 nt, Human
auacaagaauuagcugggcgugguggcgugug

SEQ ID NO: 64391 - RNA, 32 nt, Human
auacaagaauuagcugggugugguggcaugug

SEQ ID NO: 64392 - RNA, 32 nt, Human
auacaagaauuagcugggugugguggcgcaug

SEQ ID NO: 64393 - RNA, 32 nt, Human
auacaagagaagaggaagggagcagagagcac

SEQ ID NO: 64394 - RNA, 32 nt, Human
auacaagcaagaagcuuacagccucaguggcg

SEQ ID NO: 64395 - RNA, 32 nt, Human
auacaagcauuaaacuggagugcaguaaaccu

SEQ ID NO: 64396 - RNA, 32 nt, Human
auacaagccaaaacaggaauauuucuccacag

SEQ ID NO: 64397 - RNA, 32 nt, Human
auacaagcccgaggaaugaggaagagaagaca

SEQ ID NO: 64398 - RNA, 32 nt, Human
auacaagccucuggugggcagagaggauagua

SEQ ID NO: 64399 - RNA, 32 nt, Human
auacaagccuuaccaacaauuacagaaacauu

SEQ ID NO: 64400 - RNA, 32 nt, Human
auacaaggauuagcugggcaugguggugugug

SEQ ID NO: 64401 - RNA, 32 nt, Human
auacaaggcucaauuccgaacuguugaaggaa

SEQ ID NO: 64402 - RNA, 32 nt, Human
auacaagguggggaaaucuggaaaaagauuuc

SEQ ID NO: 64403 - RNA, 32 nt, Human
auacaaggugugaauuugagcacaguccagaa

SEQ ID NO: 64404 - RNA, 32 nt, Human
auacaagguuaguccuucaugguauaaucuua

SEQ ID NO: 64405 - RNA, 32 nt, Human
auacaaguaggaacuuccuuuccuucacuucc

SEQ ID NO: 64406 - RNA, 32 nt, Human
auacaaguagugcagaagguucacacugcaaa

SEQ ID NO: 64407 - RNA, 18 nt, Human
auacaagucaaugcccca

SEQ ID NO: 64408 - RNA, 32 nt, Human
auacaagucucuguaccagcgcuuuauguuaa

SEQ ID NO: 64409 - RNA, 32 nt, Human
auacaagugacaugcugugcucaguauugugu

SEQ ID NO: 64410 - RNA, 32 nt, Human
auacaagugccccagagcgcauguauaugucu

SEQ ID NO: 64411 - RNA, 32 nt, Human
auacaaguuaggagcauugauaacaacacguu

SEQ ID NO: 64412 - RNA, 32 nt, Human
auacaaguuguuaggccaggugcaauggcucg

SEQ ID NO: 64413 - RNA, 32 nt, Human
auacaaguuucaugaggacagggacuuuaucc

SEQ ID NO: 64414 - RNA, 32 nt, Human
auacaauaaagugguggucucaauuaucccca

SEQ ID NO: 64415 - RNA, 32 nt, Human
auacaauaauuagccaggcaugguggcgggca

SEQ ID NO: 64416 - RNA, 32 nt, Human
auacaauaauuagcugggcgugguggcacaug

SEQ ID NO: 64417 - RNA, 32 nt, Human
auacaauaauuagcugggcgugguggcaggca

SEQ ID NO: 64418 - RNA, 19 nt, Human
auacaauacaccugcuuca

SEQ ID NO: 64419 - RNA, 32 nt, Human
auacaauacaugcacgugcacacacauacaca

SEQ ID NO: 64420 - RNA, 32 nt, Human
auacaauauaauaaaugcauaauguuaagcuu

SEQ ID NO: 64421 - RNA, 32 nt, Human
auacaauauagacugaaaauuuuaaauaugua

SEQ ID NO: 64422 - RNA, 32 nt, Human
auacaaucacagacuuauauuuccucacaaaa

SEQ ID NO: 64423 - RNA, 32 nt, Human
auacaauccuacagcagcaggagcuguggaga

SEQ ID NO: 64424 - RNA, 32 nt, Human
auacaaucuuggacaaccuccaucuucagaau

SEQ ID NO: 64425 - RNA, 18 nt, Human
auacaaugcauuuccuca

SEQ ID NO: 64426 - RNA, 18 nt, Human
auacaaugcggaugccca

SEQ ID NO: 64427 - RNA, 32 nt, Human
auacaauggaaagaugaaaauggaaaggaaga

SEQ ID NO: 64428 - RNA, 32 nt, Human
auacaauggaaaugugaauaaagaauuuacua

SEQ ID NO: 64429 - RNA, 32 nt, Human
auacaauguuugauuuuaugcacuuugucgcu

SEQ ID NO: 64430 - RNA, 32 nt, Human
auacaauucaacauuuguuuuauacguaaucu

SEQ ID NO: 64431 - RNA, 31 nt, Human
auacaauugcaaguauuaacagcagaguaga

SEQ ID NO: 64432 - RNA, 32 nt, Human
auacaauuggugauauuuuacaagaagagaga

SEQ ID NO: 64433 - RNA, 32 nt, Human
auacacaaaaggaaagagaaauggagcagcug

SEQ ID NO: 64434 - RNA, 32 nt, Human
auacacaaauuagcugcgugugguggccuaug

SEQ ID NO: 64435 - RNA, 19 nt, Human
auacacaacaacauaggga

SEQ ID NO: 64436 - RNA, 21 nt, Human
auacacaacagauaaugugga

SEQ ID NO: 64437 - RNA, 20 nt, Human
auacacaagaaaaacagaga

SEQ ID NO: 64438 - RNA, 18 nt, Human
auacacaagaucuguguc

SEQ ID NO: 64439 - RNA, 21 nt, Human
auacacaagucauacaggaga

SEQ ID NO: 64440 - RNA, 25 nt, Human
auacacaaucugcaccaaacaggga

SEQ ID NO: 64441 - RNA, 19 nt, Human
auacacacacaaauacaca

SEQ ID NO: 64442 - RNA, 22 nt, Human
auacacacacauauuuuacaca

SEQ ID NO: 64443 - RNA, 32 nt, Human
auacacacacgguucuucuagacugggggagu

SEQ ID NO: 64444 - RNA, 19 nt, Human
auacacacagacauacaca

SEQ ID NO: 64445 - RNA, 32 nt, Human
auacacacagcagugugaauagccuggccacc

SEQ ID NO: 64446 - RNA, 23 nt, Human
auacacacauacauacauacaua

SEQ ID NO: 64447 - RNA, 19 nt, Human
auacacacaugugcacaca

SEQ ID NO: 64448 - RNA, 23 nt, Human
auacacacgcaucuguacacaca

SEQ ID NO: 64449 - RNA, 32 nt, Human
auacacagacacaagacacacacgcucaaacc

SEQ ID NO: 64450 - RNA, 32 nt, Human
auacacagaguguggaggcagggaggucgagu

SEQ ID NO: 64451 - RNA, 32 nt, Human
auacacagauuuuucugcuggccaggugggcc

SEQ ID NO: 64452 - RNA, 18 nt, Human
auacacagcacacaggga

SEQ ID NO: 64453 - RNA, 32 nt, Human
auacacagccugggcuggggguggggugggag

SEQ ID NO: 64454 - RNA, 25 nt, Human
auacacaggcauacaugcaugcaca

SEQ ID NO: 64455 - RNA, 32 nt, Human
auacacauaauacaaacauacaugcaugcaca

SEQ ID NO: 64456 - RNA, 32 nt, Human
auacacauaaugagaccuuggggaugggaccc

SEQ ID NO: 64457 - RNA, 23 nt, Human
auacacauauacauacauacaca

SEQ ID NO: 64458 - RNA, 32 nt, Human
auacacauauacauacauacacacauacauac

SEQ ID NO: 64459 - RNA, 21 nt, Human
auacacauauauacacacaca

SEQ ID NO: 64460 - RNA, 21 nt, Human
auacacauauauguauacaua

SEQ ID NO: 64461 - RNA, 32 nt, Human
auacacauaugcagacacaugccagggccccc

SEQ ID NO: 64462 - RNA, 32 nt, Human
auacacaugcugggccauugugauugaagucu

SEQ ID NO: 64463 - RNA, 32 nt, Human
auacacaugcuugcaguaguuucaugaaguuu

SEQ ID NO: 64464 - RNA, 23 nt, Human
auacacauuaaucagauaucauu

SEQ ID NO: 64465 - RNA, 21 nt, Human
auacacauuauuccaccaauu

SEQ ID NO: 64466 - RNA, 32 nt, Human
auacacauucuucuccuagcacauggaucuuu

SEQ ID NO: 64467 - RNA, 32 nt, Human
auacacauuuaagacagugaggaugugaauaa

SEQ ID NO: 64468 - RNA, 32 nt, Human
auacacauuugucagcauuuccggucguggug

SEQ ID NO: 64469 - RNA, 32 nt, Human
auacaccaaucaggagaggguagcugccugca

SEQ ID NO: 64470 - RNA, 32 nt, Human
auacaccauugagacuugacugggcaacacca

SEQ ID NO: 64471 - RNA, 25 nt, Human
auacacccagaccccaggcuggaca

SEQ ID NO: 64472 - RNA, 32 nt, Human
auacacccagcagcccaagguggagggugcgu

SEQ ID NO: 64473 - RNA, 32 nt, Human
auacacccagcucuuuucaguaaaaggugaag

SEQ ID NO: 64474 - RNA, 32 nt, Human
auacacccauucccuuugcucacuauuuguuc

SEQ ID NO: 64475 - RNA, 18 nt, Human
auacaccgcccccugccc

SEQ ID NO: 64476 - RNA, 32 nt, Human
auacaccuaguucuguaugaucauaucauagu

SEQ ID NO: 64477 - RNA, 32 nt, Human
auacaccuguaauuccagcuacucauaggaua

SEQ ID NO: 64478 - RNA, 20 nt, Human
auacaccuguagucccagcu

SEQ ID NO: 64479 - RNA, 32 nt, Human
auacaccuguagucccagcuacucaggaggcu

SEQ ID NO: 64480 - RNA, 32 nt, Human
auacaccuguagucccagcuacucgggaggcu

SEQ ID NO: 64481 - RNA, 20 nt, Human
auacaccuguaguccuagcu

SEQ ID NO: 64482 - RNA, 32 nt, Human
auacaccuguaguccuagcuacucaggaggcu

SEQ ID NO: 64483 - RNA, 32 nt, Human
auacaccuguguucccagcuacucaggaggcu

SEQ ID NO: 64484 - RNA, 32 nt, Human
auacacgaacaacauggauggacugccaaaga

SEQ ID NO: 64485 - RNA, 32 nt, Human
auacacgguaacuuuucugccuugcagcauca

SEQ ID NO: 64486 - RNA, 32 nt, Human
auacacgugggggucagugaaucugcuugccu

SEQ ID NO: 64487 - RNA, 32 nt, Human
auacacuaaaaaucugagaaacucuacaugua

SEQ ID NO: 64488 - RNA, 22 nt, Human
auacacuaaaugaguaauucag

SEQ ID NO: 64489 - RNA, 32 nt, Human
auacacuaggaauccauucuuccuccaccauu

SEQ ID NO: 64490 - RNA, 32 nt, Human
auacacuaggagggcacagagaugcuacugaa

SEQ ID NO: 64491 - RNA, 32 nt, Human
auacacucagcuuuacaaaaucaugucauugu

SEQ ID NO: 64492 - RNA, 32 nt, Human
auacacucccuauugcuaacaagaccacagug

SEQ ID NO: 64493 - RNA, 32 nt, Human
auacacuccuucccuuccaucacugcagaccu

SEQ ID NO: 64494 - RNA, 32 nt, Human
auacacugcagcuuugccaaggucugugauau

SEQ ID NO: 64495 - RNA, 32 nt, Human
auacacugcaucuuuggucaucuaagauuugu

SEQ ID NO: 64496 - RNA, 32 nt, Human
auacacuggaccuauccuuuccucacugacag

SEQ ID NO: 64497 - RNA, 32 nt, Human
auacacuguuacuaucuuaaucucaagagugu

SEQ ID NO: 64498 - RNA, 32 nt, Human
auacacuguuccuagugagcagggcucuggcc

SEQ ID NO: 64499 - RNA, 20 nt, Human
auacacuguuucacugccuc

SEQ ID NO: 64500 - RNA, 32 nt, Human
auacacuuacacaccaucugauuuaaugacac

SEQ ID NO: 64501 - RNA, 32 nt, Human
auacacuuccacugccuucagcugacgucaca

SEQ ID NO: 64502 - RNA, 32 nt, Human
auacacuucucccauuuuguaucagguguguu

SEQ ID NO: 64503 - RNA, 32 nt, Human
auacacuuggcugggcaugccuguaaucccag

SEQ ID NO: 64504 - RNA, 32 nt, Human
auacacuuguagucccagcuacuuggcaggcu

SEQ ID NO: 64505 - RNA, 32 nt, Human
auacacuuguccaugauggauccacuuuaaag

SEQ ID NO: 64506 - RNA, 32 nt, Human
auacacuuuucccucacuacgacugcuucuuu

SEQ ID NO: 64507 - RNA, 32 nt, Human
auacacuuuucuugcuuuggugcucaaagugg

SEQ ID NO: 64508 - RNA, 32 nt, Human
auacagaaaagagguuuaauuggcucacaguu

SEQ ID NO: 64509 - RNA, 32 nt, Human
auacagaaaauacaaaaauuagccagguaugg

SEQ ID NO: 64510 - RNA, 32 nt, Human
auacagaaauuagccgggcauggugucgcgug

SEQ ID NO: 64511 - RNA, 32 nt, Human
auacagaaauuagccggucauggugguggaca

SEQ ID NO: 64512 - RNA, 32 nt, Human
auacagaaauuagcugggugugguugcacacg

SEQ ID NO: 64513 - RNA, 32 nt, Human
auacagaaggcuggucuuuacccuucuuccuc

SEQ ID NO: 64514 - RNA, 32 nt, Human
auacagaauucgacaccaaauuuuggaacuua

SEQ ID NO: 64515 - RNA, 32 nt, Human
auacagacaagaaaggcaaacucaccauggcc

SEQ ID NO: 64516 - RNA, 32 nt, Human
auacagacagguaaccuaguucuguguucacg

SEQ ID NO: 64517 - RNA, 32 nt, Human
auacagagagaaagaggagacacuccaggaag

SEQ ID NO: 64518 - RNA, 32 nt, Human
auacagagaguggauuuucuccccaaguccca

SEQ ID NO: 64519 - RNA, 32 nt, Human
auacagaggaaaggaaaaacaaguauuaaagg

SEQ ID NO: 64520 - RNA, 32 nt, Human
auacagaguagagcgaaggcauuugguggauc

SEQ ID NO: 64521 - RNA, 32 nt, Human
auacagauaauguucucacuacccauaauaug

SEQ ID NO: 64522 - RNA, 32 nt, Human
auacagcaaacagucaggauuaauccacaaga

SEQ ID NO: 64523 - RNA, 32 nt, Human
auacagcaaaugcugcucaucagcgucaaaau

SEQ ID NO: 64524 - RNA, 32 nt, Human
auacagcaacaacuaucuggcccaaacugcuu

SEQ ID NO: 64525 - RNA, 32 nt, Human
auacagcaaguugggcuugggaugauuauaac

SEQ ID NO: 64526 - RNA, 21 nt, Human
auacagcacuaaagucugcua

SEQ ID NO: 64527 - RNA, 32 nt, Human
auacagcagagcuagguggaaaagccuggguu

SEQ ID NO: 64528 - RNA, 32 nt, Human
auacagcaguccuucugggaaggaaauuuggg

SEQ ID NO: 64529 - RNA, 32 nt, Human
auacagcagucuugcucaaucuucccaguuuc

SEQ ID NO: 64530 - RNA, 31 nt, Human
auacagcagugagucaguuccuuggagaggg

SEQ ID NO: 64531 - RNA, 32 nt, Human
auacagcaucccaccucacaggcgaggaagcu

SEQ ID NO: 64532 - RNA, 32 nt, Human
auacagccaucuuuuagcaucuguaaacucau

SEQ ID NO: 64533 - RNA, 21 nt, Human
auacagcccuaaagucugcua

SEQ ID NO: 64534 - RNA, 32 nt, Human
auacagcgucagaaggaugccauaaccauucu

SEQ ID NO: 64535 - RNA, 32 nt, Human
auacagcuuauuaccuucaucauguccgugag

SEQ ID NO: 64536 - RNA, 32 nt, Human
auacagcuuggagagauuuuuguaucacauua

SEQ ID NO: 64537 - RNA, 32 nt, Human
auacaggaaguagcccugcaccugccagugag

SEQ ID NO: 64538 - RNA, 32 nt, Human
auacaggaauuagcuggucaugagggcgcaca

SEQ ID NO: 64539 - RNA, 32 nt, Human
auacaggagaagcacaagacagagaagggcca

SEQ ID NO: 64540 - RNA, 32 nt, Human
auacaggagaaugauggaaggaagggaggaag

SEQ ID NO: 64541 - RNA, 21 nt, Human
auacaggagagaaaccucaca

SEQ ID NO: 64542 - RNA, 32 nt, Human
auacaggagagaaaccuuacauaugugcugaa

SEQ ID NO: 64543 - RNA, 32 nt, Human
auacaggagcuggagucaaagcuggugagcaa

SEQ ID NO: 64544 - RNA, 32 nt, Human
auacaggaucugaauauuuacacacauagcac

SEQ ID NO: 64545 - RNA, 32 nt, Human
auacaggauggauacauaguuggcaacagucu

SEQ ID NO: 64546 - RNA, 32 nt, Human
auacaggcaagaagacaaaaaggagagaaaau

SEQ ID NO: 64547 - RNA, 32 nt, Human
auacaggcaccaagaggcggggguggagcagg

SEQ ID NO: 64548 - RNA, 32 nt, Human
auacaggcagcugcugcaagacugcuccucuc

SEQ ID NO: 64549 - RNA, 32 nt, Human
auacaggccagaggcagagagggcagcauaag

SEQ ID NO: 64550 - RNA, 32 nt, Human
auacaggccaggaaagccaaaugaagucauuu

SEQ ID NO: 64551 - RNA, 32 nt, Human
auacaggcgagugacugucaagaaggccaauu

SEQ ID NO: 64552 - RNA, 26 nt, Human
auacaggcgcacgccgcaccaccacg

SEQ ID NO: 64553 - RNA, 32 nt, Human
auacaggcuuucuaaacauuggcuuugcugga

SEQ ID NO: 64554 - RNA, 32 nt, Human
auacagggacuguuuccaggcacagaauauga

SEQ ID NO: 64555 - RNA, 32 nt, Human
auacagggaucaauaaaggcugaaaacuaagg

SEQ ID NO: 64556 - RNA, 32 nt, Human
auacaggggaaauguugaaaaggaagguggaa

SEQ ID NO: 64557 - RNA, 32 nt, Human
auacaggggaaugaugacaaccagcccagcca

SEQ ID NO: 64558 - RNA, 32 nt, Human
auacagguaguuuuaaaaguacccuuuugugu

SEQ ID NO: 64559 - RNA, 32 nt, Human
auacaggucuuccagucagcuggucauuuacc

SEQ ID NO: 64560 - RNA, 32 nt, Human
auacagguggcaauggaaaugggugaguggau

SEQ ID NO: 64561 - RNA, 32 nt, Human
auacaggugucaaacuccacuugacauuuacu

SEQ ID NO: 64562 - RNA, 32 nt, Human
auacaguaaaaacacaggagaagaagcugagc

SEQ ID NO: 64563 - RNA, 32 nt, Human
auacaguacagguuuguagccuaggaguccua

SEQ ID NO: 64564 - RNA, 32 nt, Human
auacaguacucaguuaggcagugcaguacuca

SEQ ID NO: 64565 - RNA, 32 nt, Human
auacaguacucuuuuauuuuucuuuuaauagc

SEQ ID NO: 64566 - RNA, 32 nt, Human
auacaguagcuggagggagucgaagcugaugg

SEQ ID NO: 64567 - RNA, 32 nt, Human
auacaguauaaauacucauuugauucucguaa

SEQ ID NO: 64568 - RNA, 32 nt, Human
auacaguccacuuucugguuucuuuuauugug

SEQ ID NO: 64569 - RNA, 19 nt, Human
auacagucugcagugcagc

SEQ ID NO: 64570 - RNA, 32 nt, Human
auacagucuucucuaguuucugaggugaauug

SEQ ID NO: 64571 - RNA, 32 nt, Human
auacagucuuucuccaucuuuggucuuauuac

SEQ ID NO: 64572 - RNA, 32 nt, Human
auacagugaauucccugggagucaucaaagaa

SEQ ID NO: 64573 - RNA, 32 nt, Human
auacagugagccagccuugcaguaggcaguag

SEQ ID NO: 64574 - RNA, 32 nt, Human
auacagugcauccuugaacugucagcccacag

SEQ ID NO: 64575 - RNA, 32 nt, Human
auacagugccuggagaaagccaaagaccuuua

SEQ ID NO: 64576 - RNA, 32 nt, Human
auacagugucuggaacuauugguucuaagaua

SEQ ID NO: 64577 - RNA, 29 nt, Human
auacagugucugugauguuuggaagcaaa

SEQ ID NO: 64578 - RNA, 19 nt, Human
auacaguugacacaccuca

SEQ ID NO: 64579 - RNA, 17 nt, Human
auacaguugcugccuua

SEQ ID NO: 64580 - RNA, 20 nt, Human
auacaguuuaaaaagccugc

SEQ ID NO: 64581 - RNA, 32 nt, Human
auacaguuuguacuuauuucaucaagcuuuuc

SEQ ID NO: 64582 - RNA, 32 nt, Human
auacauaaacuauaacaaacccugccauuuug

SEQ ID NO: 64583 - RNA, 32 nt, Human
auacauaaagagacaguaggacauuguggcug

SEQ ID NO: 64584 - RNA, 32 nt, Human
auacauaacuaaauuugauacuuauauuuucg

SEQ ID NO: 64585 - RNA, 32 nt, Human
auacauaauguuugauucuaugccauuuggac

SEQ ID NO: 64586 - RNA, 32 nt, Human
auacauaauuuggaauuguuuaagucuauuuc

SEQ ID NO: 64587 - RNA, 32 nt, Human
auacauacacagaaaaauaagcacauacucau

SEQ ID NO: 64588 - RNA, 21 nt, Human
auacauacacauauauacaca

SEQ ID NO: 64589 - RNA, 32 nt, Human
auacauacacucacugacauacacucaugugc

SEQ ID NO: 64590 - RNA, 32 nt, Human
auacauacauaauuuggaauuguuuaagucua

SEQ ID NO: 64591 - RNA, 19 nt, Human
auacauacauacauacaua

SEQ ID NO: 64592 - RNA, 32 nt, Human
auacauacccuagcaacauucuccuugcucag

SEQ ID NO: 64593 - RNA, 32 nt, Human
auacauacgugcacacacacauacauauucau

SEQ ID NO: 64594 - RNA, 32 nt, Human
auacauagaauguauaauauauacaaacuguu

SEQ ID NO: 64595 - RNA, 32 nt, Human
auacauagagacaccgaggagccucaguucug

SEQ ID NO: 64596 - RNA, 32 nt, Human
auacauaggagugggagccgaggaccacuugu

SEQ ID NO: 64597 - RNA, 32 nt, Human
auacauagucaaggguuuagagucuggagaca

SEQ ID NO: 64598 - RNA, 32 nt, Human
auacauauacaugcauagaaaugaaaugcuau

SEQ ID NO: 64599 - RNA, 32 nt, Human
auacauaugaauauagacaaaaagccauugag

SEQ ID NO: 64600 - RNA, 20 nt, Human
auacauaugcagucuaguca

SEQ ID NO: 64601 - RNA, 32 nt, Human
auacauaugugugcuuucucuuuccuuuuagg

SEQ ID NO: 64602 - RNA, 32 nt, Human
auacauauugaauaggccugaucaucugaauc

SEQ ID NO: 64603 - RNA, 19 nt, Human
auacaucacauuauacaca

SEQ ID NO: 64604 - RNA, 32 nt, Human
auacaucagcuugguaguuaacacaucaaaua

SEQ ID NO: 64605 - RNA, 21 nt, Human
auacaucagugggaaauuugg

SEQ ID NO: 64606 - RNA, 32 nt, Human
auacaucauccagcugagcggacugcuccaag

SEQ ID NO: 64607 - RNA, 32 nt, Human
auacauccauauaacauauaucacaaacuuaa

SEQ ID NO: 64608 - RNA, 32 nt, Human
auacaucccacacaccauccuccaggucuggg

SEQ ID NO: 64609 - RNA, 32 nt, Human
auacauccugcuuucccuccccaaacccauca

SEQ ID NO: 64610 - RNA, 32 nt, Human
auacauccugggaaggacccuacccagucauu

SEQ ID NO: 64611 - RNA, 32 nt, Human
auacaucucaaugucauuccuuucacaggucc

SEQ ID NO: 64612 - RNA, 32 nt, Human
auacaucucgcugcgaauacaggcagccaagg

SEQ ID NO: 64613 - RNA, 32 nt, Human
auacaucugugaccugaugguggagaacaaga

SEQ ID NO: 64614 - RNA, 32 nt, Human
auacaucuguuuauaggaaugaccucaggacu

SEQ ID NO: 64615 - RNA, 32 nt, Human
auacaucuuagagucuagggcagcaguccaua

SEQ ID NO: 64616 - RNA, 32 nt, Human
auacaugagauaaagaccucaagaaguuaaaa

SEQ ID NO: 64617 - RNA, 32 nt, Human
auacaugauaauagcaauccuugaugagugcc

SEQ ID NO: 64618 - RNA, 32 nt, Human
auacaugauacuuggguagcucaacauucuua

SEQ ID NO: 64619 - RNA, 18 nt, Human
auacaugcaaccaucacc

SEQ ID NO: 64620 - RNA, 32 nt, Human
auacaugcacacaaacaaaauguuuuaaaaug

SEQ ID NO: 64621 - RNA, 32 nt, Human
auacaugcacacugauacauacauguacugau

SEQ ID NO: 64622 - RNA, 32 nt, Human
auacaugcaucuuuaucagcagccaaaacacu

SEQ ID NO: 64623 - RNA, 32 nt, Human
auacaugccuuccuuucuacugcugcacaacc

SEQ ID NO: 64624 - RNA, 32 nt, Human
auacaugcucacaucuuacucaacaucagaga

SEQ ID NO: 64625 - RNA, 32 nt, Human
auacaugcucagguagagaaagucuccauagu

SEQ ID NO: 64626 - RNA, 32 nt, Human
auacaugcuggagcccugccucuccacugcua

SEQ ID NO: 64627 - RNA, 32 nt, Human
auacaugcuggucauaacugugccaagaaauc

SEQ ID NO: 64628 - RNA, 32 nt, Human
auacaugcuguaauuugacauucugggucaca

SEQ ID NO: 64629 - RNA, 32 nt, Human
auacaugcuuggucuucucugcagagaacuga

SEQ ID NO: 64630 - RNA, 32 nt, Human
auacauggacagcauccgguugauaugcucua

SEQ ID NO: 64631 - RNA, 22 nt, Human
auacauggaugaauugggguaa

SEQ ID NO: 64632 - RNA, 32 nt, Human
auacaugguagacggaauauuucuccauuaau

SEQ ID NO: 64633 - RNA, 32 nt, Human
auacauguaaagcauuuaaagccagaccuggc

SEQ ID NO: 64634 - RNA, 23 nt, Human
auacauguaauauauauuauaua

SEQ ID NO: 64635 - RNA, 32 nt, Human
auacauguauucucagguacacacagagcuga

SEQ ID NO: 64636 - RNA, 32 nt, Human
auacauguauuguguuuuccauggugcuacag

SEQ ID NO: 64637 - RNA, 29 nt, Human
auacaugucaugccagggaaaugcucgag

SEQ ID NO: 64638 - RNA, 32 nt, Human
auacaugugcauguucgucacaggguauauug

SEQ ID NO: 64639 - RNA, 32 nt, Human
auacaugugugacuuggccauuucugugagau

SEQ ID NO: 64640 - RNA, 32 nt, Human
auacaugugugugaaaccauuccaaaaauuua

SEQ ID NO: 64641 - RNA, 32 nt, Human
auacauuagccugucccuuucugccuuaaacc

SEQ ID NO: 64642 - RNA, 23 nt, Human
auacauuaguucccccucagcua

SEQ ID NO: 64643 - RNA, 19 nt, Human
auacauucacaucuaguca

SEQ ID NO: 64644 - RNA, 21 nt, Human
auacauucauauauauacaua

SEQ ID NO: 64645 - RNA, 32 nt, Human
auacauucauugucuucagucauacagcaaga

SEQ ID NO: 64646 - RNA, 32 nt, Human
auacauuccugagauucugggaaaggugcuca

SEQ ID NO: 64647 - RNA, 32 nt, Human
auacauugaaggaguguaggggguggggguuc

SEQ ID NO: 64648 - RNA, 32 nt, Human
auacauugaccuuccauucacugcagugggaa

SEQ ID NO: 64649 - RNA, 32 nt, Human
auacauugacuaggaagaacuaaacaagacca

SEQ ID NO: 64650 - RNA, 32 nt, Human
auacauugauacaaaguacagaaaaauacuuu

SEQ ID NO: 64651 - RNA, 32 nt, Human
auacauugccuaggugcagagaaauggaagua

SEQ ID NO: 64652 - RNA, 32 nt, Human
auacauugcggaggacaccagugagcuuccac

SEQ ID NO: 64653 - RNA, 32 nt, Human
auacauugcuauauacauaaaaaugguaacaa

SEQ ID NO: 64654 - RNA, 21 nt, Human
auacauuggagaaacuggcag

SEQ ID NO: 64655 - RNA, 20 nt, Human
auacauuuaauuguuguaag

SEQ ID NO: 64656 - RNA, 21 nt, Human
auacauuuauuuccauuauca

SEQ ID NO: 64657 - RNA, 32 nt, Human
auacauuugaaccacuaccauuuuugaaguuu

SEQ ID NO: 64658 - RNA, 32 nt, Human
auacauuuguuccaauggggagcuuggaagau

SEQ ID NO: 64659 - RNA, 32 nt, Human
auaccaaaauguuuuguuucaccaggaggugc

SEQ ID NO: 64660 - RNA, 32 nt, Human
auaccaaaauuagcugggacugguggcacguu

SEQ ID NO: 64661 - RNA, 32 nt, Human
auaccaaaauuagcugggcaugguggcacgcg

SEQ ID NO: 64662 - RNA, 32 nt, Human
auaccaaaauuagcugggcaugguggcgcgug

SEQ ID NO: 64663 - RNA, 32 nt, Human
auaccaaaauuagcugggugugguggugcacg

SEQ ID NO: 64664 - RNA, 32 nt, Human
auaccaaacucagaauuggaacuuuuuacauu

SEQ ID NO: 64665 - RNA, 32 nt, Human
auaccaaagaaauaggggguagcuagaguaaa

SEQ ID NO: 64666 - RNA, 32 nt, Human
auaccaaagaggagguuuggcuuucugugggu

SEQ ID NO: 64667 - RNA, 32 nt, Human
auaccaaauacugaugaggauacaaacuggau

SEQ ID NO: 64668 - RNA, 32 nt, Human
auaccaaaugauagaaacagacugccugaauu

SEQ ID NO: 64669 - RNA, 32 nt, Human
auaccaacauuucugugcuuuuaccaacagca

SEQ ID NO: 64670 - RNA, 32 nt, Human
auaccaagaaagcuuccucuguggaaaucugu

SEQ ID NO: 64671 - RNA, 32 nt, Human
auaccaagaagagggagcugaaaaggaaaauu

SEQ ID NO: 64672 - RNA, 32 nt, Human
auaccaagcaugaccugaguguaaucucuaac

SEQ ID NO: 64673 - RNA, 23 nt, Human
auaccaagcuagccucguacacc

SEQ ID NO: 64674 - RNA, 32 nt, Human
auaccaagcugcaggcgagcugccgggcgcuu

SEQ ID NO: 64675 - RNA, 32 nt, Human
auaccaaggagaguggcauaggagggaaaagc

SEQ ID NO: 64676 - RNA, 32 nt, Human
auaccaaggaugaccuccuccgaucagguaug

SEQ ID NO: 64677 - RNA, 32 nt, Human
auaccaagugaaaaggaagagugaagaacaga

SEQ ID NO: 64678 - RNA, 32 nt, Human
auaccaaucaguuacacucaaagcuuucuugg

SEQ ID NO: 64679 - RNA, 32 nt, Human
auaccacagugggaaaaggaaagggaagaaag

SEQ ID NO: 64680 - RNA, 32 nt, Human
auaccacaucuucucacuuauagaugguagcu

SEQ ID NO: 64681 - RNA, 32 nt, Human
auaccaccaaggagccucaucgugugcuuuua

SEQ ID NO: 64682 - RNA, 32 nt, Human
auaccaccgcacuccagccugagcaacagagu

SEQ ID NO: 64683 - RNA, 31 nt, Human
auaccaccgugcucagugcacuugugcagga

SEQ ID NO: 64684 - RNA, 32 nt, Human
auaccaccucccaucagaaaucauguccuuga

SEQ ID NO: 64685 - RNA, 32 nt, Human
auaccacggcacuccagccugggugacaguga

SEQ ID NO: 64686 - RNA, 32 nt, Human
auaccacugcacuccagccuggcgacagagca

SEQ ID NO: 64687 - RNA, 32 nt, Human
auaccacugcacuccagccugggcgacagaga

SEQ ID NO: 64688 - RNA, 32 nt, Human
auaccacugcacuccagccugggugacagagc

SEQ ID NO: 64689 - RNA, 32 nt, Human
auaccacugcacuccagucugggcaacagagc

SEQ ID NO: 64690 - RNA, 32 nt, Human
auaccacugcacugcagccugagugacacagu

SEQ ID NO: 64691 - RNA, 32 nt, Human
auaccacugcacuuaacuuggcaacagagcaa

SEQ ID NO: 64692 - RNA, 32 nt, Human
auaccacugcauuccagccugggugacagagc

SEQ ID NO: 64693 - RNA, 32 nt, Human
auaccacuucauuccagccugggugacagagc

SEQ ID NO: 64694 - RNA, 32 nt, Human
auaccagaaggcggaucccccaagaccacagu

SEQ ID NO: 64695 - RNA, 32 nt, Human
auaccagagcauaucagcagaguaggagagca

SEQ ID NO: 64696 - RNA, 32 nt, Human
auaccagagugucagaaagaaagaaugagaac

SEQ ID NO: 64697 - RNA, 32 nt, Human
auaccagaguuagcuggguauagagguggcuc

SEQ ID NO: 64698 - RNA, 32 nt, Human
auaccagauccgggaagucucucuucaccucu

SEQ ID NO: 64699 - RNA, 32 nt, Human
auaccagaugccacucugcagguugcaauaac

SEQ ID NO: 64700 - RNA, 32 nt, Human
auaccagaugccuucuucaucaugccacugaa

SEQ ID NO: 64701 - RNA, 32 nt, Human
auaccagcaccaccuuugccuucagucuuccu

SEQ ID NO: 64702 - RNA, 32 nt, Human
auaccagcagcagccuuaagcacagggagacc

SEQ ID NO: 64703 - RNA, 32 nt, Human
auaccagccugaccaacauggagaaaccccau

SEQ ID NO: 64704 - RNA, 32 nt, Human
auaccagccugaccaacauggcgaaaccccgu

SEQ ID NO: 64705 - RNA, 32 nt, Human
auaccagccugaggugucucaggggaggcugg

SEQ ID NO: 64706 - RNA, 32 nt, Human
auaccagccugguucccugccuuugugccaac

SEQ ID NO: 64707 - RNA, 32 nt, Human
auaccagcuguaaucccagcuacuugggaggc

SEQ ID NO: 64708 - RNA, 32 nt, Human
auaccagcuuuuuccaauaaaauaacaaaugu

SEQ ID NO: 64709 - RNA, 32 nt, Human
auaccaggaccacugcauuuaccagccugaua

SEQ ID NO: 64710 - RNA, 32 nt, Human
auaccaggaggcagggaugcugggggucgugg

SEQ ID NO: 64711 - RNA, 32 nt, Human
auaccaggcuacaugugcccccggguuccuuc

SEQ ID NO: 64712 - RNA, 32 nt, Human
auaccagggcccagacagaggcagagaguccg

SEQ ID NO: 64713 - RNA, 32 nt, Human
auaccagguacagccuuuccacccucauccag

SEQ ID NO: 64714 - RNA, 32 nt, Human
auaccagugcauuccagccuggguacacagcg

SEQ ID NO: 64715 - RNA, 32 nt, Human
auaccaguggaccuggaguggcugguuggucu

SEQ ID NO: 64716 - RNA, 32 nt, Human
auaccaguucccaaacaaaccaucucuccauu

SEQ ID NO: 64717 - RNA, 32 nt, Human
auaccauaaaaauacauaaaaucugaugauga

SEQ ID NO: 64718 - RNA, 32 nt, Human
auaccauauuaccuugcuguuggguuguucug

SEQ ID NO: 64719 - RNA, 32 nt, Human
auaccaucugucauagcguuuaccucaacaca

SEQ ID NO: 64720 - RNA, 32 nt, Human
auaccaucuuguccugcugaaguaucuccaug

SEQ ID NO: 64721 - RNA, 32 nt, Human
auaccauggagaaugaccucagccuucugugu

SEQ ID NO: 64722 - RNA, 30 nt, Human
auaccauggccaagaaaguugcagugauug

SEQ ID NO: 64723 - RNA, 32 nt, Human
auaccauguuggacauuugccccuaucaguug

SEQ ID NO: 64724 - RNA, 32 nt, Human
auaccauugauaagaagaagauaaaaacaaaa

SEQ ID NO: 64725 - RNA, 32 nt, Human
auaccauugcacuccagccuaggcaacaagag

SEQ ID NO: 64726 - RNA, 32 nt, Human
auaccauugcacuccagccugggcaacaagag

SEQ ID NO: 64727 - RNA, 32 nt, Human
auaccauugcuucagacacuuucccaaaguuu

SEQ ID NO: 64728 - RNA, 32 nt, Human
auaccauuucuuccugacauuugucagugaug

SEQ ID NO: 64729 - RNA, 32 nt, Human
auacccaaagcucucugucaauuacaaggcuu

SEQ ID NO: 64730 - RNA, 21 nt, Human
auacccaaaucauuugcacuu

SEQ ID NO: 64731 - RNA, 32 nt, Human
auacccaacagaacaugacuguuucuuugagg

SEQ ID NO: 64732 - RNA, 32 nt, Human
auacccaacccugcccucaccuccagggccug

SEQ ID NO: 64733 - RNA, 32 nt, Human
auacccaacuauaccaucucucuacucuuuau

SEQ ID NO: 64734 - RNA, 32 nt, Human
auacccaagcagccugauggggcaguuccccu

SEQ ID NO: 64735 - RNA, 32 nt, Human
auacccacacagucacagucacacacacauau

SEQ ID NO: 64736 - RNA, 32 nt, Human
auacccacaugggaaaaaucccaggggauguu

SEQ ID NO: 64737 - RNA, 32 nt, Human
auacccaccucgggggcuugaggaucaaauga

SEQ ID NO: 64738 - RNA, 32 nt, Human
auacccaccucugcccuccucaccuuccaguc

SEQ ID NO: 64739 - RNA, 32 nt, Human
auacccacuccccuccccuuuuucauuccuuc

SEQ ID NO: 64740 - RNA, 32 nt, Human
auacccacugauaucaguaccuuaccaacucg

SEQ ID NO: 64741 - RNA, 32 nt, Human
auacccacugcccugaccccugggcaggcccc

SEQ ID NO: 64742 - RNA, 32 nt, Human
auacccagaugggaaggaaggagacagccgcg

SEQ ID NO: 64743 - RNA, 32 nt, Human
auacccagcuacucgggaggcugaggcagaau

SEQ ID NO: 64744 - RNA, 32 nt, Human
auacccagcuuugcaaguuuuguagauugacc

SEQ ID NO: 64745 - RNA, 32 nt, Human
auacccaggaagggaggcugucuggccagccu

SEQ ID NO: 64746 - RNA, 32 nt, Human
auacccaggcucuugagcaacagugagcugcc

SEQ ID NO: 64747 - RNA, 32 nt, Human
auacccagggaggggagcaacacacacugggg

SEQ ID NO: 64748 - RNA, 32 nt, Human
auacccaguuagcacaguagguggggagucug

SEQ ID NO: 64749 - RNA, 32 nt, Human
auacccaugaguacucaacuugccuugauguc

SEQ ID NO: 64750 - RNA, 32 nt, Human
auacccauucuuugggcucugaaguuuggaau

SEQ ID NO: 64751 - RNA, 32 nt, Human
auacccauuggaaugacaucaucccuccccaa

SEQ ID NO: 64752 - RNA, 32 nt, Human
auaccccacagcaaauagaguaacugacaaac

SEQ ID NO: 64753 - RNA, 32 nt, Human
auaccccacugggcacacgcacaaacacacac

SEQ ID NO: 64754 - RNA, 32 nt, Human
auaccccagaggcauauaauuucuuguauucu

SEQ ID NO: 64755 - RNA, 32 nt, Human
auaccccauagcuggggccagcagguucugcu

SEQ ID NO: 64756 - RNA, 32 nt, Human
auacccccacacaccagucuuuuuggggguuu

SEQ ID NO: 64757 - RNA, 32 nt, Human
auacccccuggcugggcuucauggagaaaucu

SEQ ID NO: 64758 - RNA, 32 nt, Human
auaccccucaacucauuugcucuaauaaauuu

SEQ ID NO: 64759 - RNA, 32 nt, Human
auaccccucacagccccugucauuccggaguc

SEQ ID NO: 64760 - RNA, 32 nt, Human
auaccccugaggguggcugccuccucuggucc

SEQ ID NO: 64761 - RNA, 32 nt, Human
auaccccuuccuccaaauuaacuauuugguga

SEQ ID NO: 64762 - RNA, 32 nt, Human
auacccggcuaauuuuguauuuuuauagagac

SEQ ID NO: 64763 - RNA, 32 nt, Human
auacccggcuucaugccagggugcaugccggg

SEQ ID NO: 64764 - RNA, 32 nt, Human
auacccguauggugauagcuggccuuuucgcg

SEQ ID NO: 64765 - RNA, 32 nt, Human
auacccuccuuuccuucuaccuaucuugccuu

SEQ ID NO: 64766 - RNA, 32 nt, Human
auacccucugccugaccaacauggugaaaccc

SEQ ID NO: 64767 - RNA, 32 nt, Human
auacccugaaaguguguccauugaaaggcaaa

SEQ ID NO: 64768 - RNA, 32 nt, Human
auacccugaaucuuaauuuaucucccauuauu

SEQ ID NO: 64769 - RNA, 32 nt, Human
auacccugaccuggcccccucaguguugucac

SEQ ID NO: 64770 - RNA, 32 nt, Human
auacccugagccaccucucucacuuucuuuag

SEQ ID NO: 64771 - RNA, 32 nt, Human
auacccugcaacugaguccaccuucagauggu

SEQ ID NO: 64772 - RNA, 32 nt, Human
auacccugcuucaccaaaauuccugcuucauu

SEQ ID NO: 64773 - RNA, 28 nt, Human
auacccuggaacacugccucauugucuu

SEQ ID NO: 64774 - RNA, 32 nt, Human
auacccuucaaacuuugagaguuuacaucaga

SEQ ID NO: 64775 - RNA, 32 nt, Human
auacccuucagccucugcuccacagagccuaa

SEQ ID NO: 64776 - RNA, 32 nt, Human
auaccgaggccuucccucccugaggcccgcaa

SEQ ID NO: 64777 - RNA, 32 nt, Human
auaccgccaucuuacacgaaagccacagaguu

SEQ ID NO: 64778 - RNA, 32 nt, Human
auaccgcucagcucaagagucugcaccccauc

SEQ ID NO: 64779 - RNA, 32 nt, Human
auaccggacccccauucgcaucuaacaaggaa

SEQ ID NO: 64780 - RNA, 32 nt, Human
auaccggagagaaaccuuacaaaugguguggu

SEQ ID NO: 64781 - RNA, 32 nt, Human
auaccggagagguucuggcaccauuucggggu

SEQ ID NO: 64782 - RNA, 32 nt, Human
auaccggcgggcugugacucugggcagggacc

SEQ ID NO: 64783 - RNA, 32 nt, Human
auaccgggaccacaguaucaguucacccgaca

SEQ ID NO: 64784 - RNA, 32 nt, Human
auaccggguacccgggcuauggcgccggcgca

SEQ ID NO: 64785 - RNA, 32 nt, Human
auaccgucaaaaccagcacuuaccaaacucag

SEQ ID NO: 64786 - RNA, 32 nt, Human
auaccguggaaaccaucaccucaggcucgucg

SEQ ID NO: 64787 - RNA, 32 nt, Human
auaccguggggugacuuccuggucaccaaggc

SEQ ID NO: 64788 - RNA, 32 nt, Human
auaccguucacagccaaaccacugacauuccu

SEQ ID NO: 64789 - RNA, 32 nt, Human
auaccuaacacauaguaaacacccaacaauuu

SEQ ID NO: 64790 - RNA, 32 nt, Human
auaccuaacucuucaauguccagacacugaug

SEQ ID NO: 64791 - RNA, 32 nt, Human
auaccuaaguacuguaauaauaccucaauguu

SEQ ID NO: 64792 - RNA, 31 nt, Human
auaccuacauucaaggagaggggaccaugca

SEQ ID NO: 64793 - RNA, 32 nt, Human
auaccuaccuccaggguuggcgugaggauuca

SEQ ID NO: 64794 - RNA, 32 nt, Human
auaccuacuucuaggauugcaaagggagucuu

SEQ ID NO: 64795 - RNA, 32 nt, Human
auaccuagcuaaaccaucuuucaagagaaagg

SEQ ID NO: 64796 - RNA, 32 nt, Human
auaccuagcugcagauugugccaucacccuuc

SEQ ID NO: 64797 - RNA, 32 nt, Human
auaccuaguuuauaccuguuauccuggaauaa

SEQ ID NO: 64798 - RNA, 31 nt, Human
auaccucacagcuuggccauuugaggcaaag

SEQ ID NO: 64799 - RNA, 32 nt, Human
auaccucacugcagccucuugggcuuauguga

SEQ ID NO: 64800 - RNA, 32 nt, Human
auaccucacugcagcuucaacuuccugggcuc

SEQ ID NO: 64801 - RNA, 32 nt, Human
auaccucagaugggagagagccagagagagga

SEQ ID NO: 64802 - RNA, 32 nt, Human
auaccucagugcagaggucacuuguggagcaa

SEQ ID NO: 64803 - RNA, 32 nt, Human
auaccuccagcagaguaaggagucugugugau

SEQ ID NO: 64804 - RNA, 32 nt, Human
auaccuccccuccacaucacugacacagcuga

SEQ ID NO: 64805 - RNA, 32 nt, Human
auaccucccuugugacucccacaucaaccauu

SEQ ID NO: 64806 - RNA, 32 nt, Human
auaccuccuccucccuucuuucuuugaagccu

SEQ ID NO: 64807 - RNA, 32 nt, Human
auaccuccugaccccucucucccucauguccu

SEQ ID NO: 64808 - RNA, 32 nt, Human
auaccuccuucaccccagaauauuugccgucu

SEQ ID NO: 64809 - RNA, 32 nt, Human
auaccucggaggucaaaaagaaauauuucaaa

SEQ ID NO: 64810 - RNA, 32 nt, Human
auaccucggccaugcggccccugcugcuacug

SEQ ID NO: 64811 - RNA, 32 nt, Human
auaccucgguccagaucuccggauugucgggg

SEQ ID NO: 64812 - RNA, 32 nt, Human
auaccucuaaugaagcacagagagaggaagag

SEQ ID NO: 64813 - RNA, 32 nt, Human
auaccucucccuucauuagagucaucaucucc

SEQ ID NO: 64814 - RNA, 32 nt, Human
auaccucucucugcagagagcuucuggguggg

SEQ ID NO: 64815 - RNA, 32 nt, Human
auaccucuggggacaggaaagguagaggauga

SEQ ID NO: 64816 - RNA, 32 nt, Human
auaccugaaaccaaaauggauauuuuuagucu

SEQ ID NO: 64817 - RNA, 32 nt, Human
auaccugacgaacugcagcccaggucccuggc

SEQ ID NO: 64818 - RNA, 32 nt, Human
auaccugcacuaaucauucagacuucauugag

SEQ ID NO: 64819 - RNA, 32 nt, Human
auaccugcagcaucuuuaucaaguuggaggag

SEQ ID NO: 64820 - RNA, 32 nt, Human
auaccugcagugagccaaggaccaggcuaguu

SEQ ID NO: 64821 - RNA, 32 nt, Human
auaccugccccagguuaucccauuucuguugu

SEQ ID NO: 64822 - RNA, 32 nt, Human
auaccugccugggauagccgcugguaacuguu

SEQ ID NO: 64823 - RNA, 32 nt, Human
auaccugcuguucucagcuccagcuucaaacc

SEQ ID NO: 64824 - RNA, 32 nt, Human
auaccugcuucaccaucuucucauaccaucac

SEQ ID NO: 64825 - RNA, 22 nt, Human
auaccugcuuuucaucuggaca

SEQ ID NO: 64826 - RNA, 32 nt, Human
auaccuggcugcugucuuaacucguagucugg

SEQ ID NO: 64827 - RNA, 32 nt, Human
auaccugggacaggccagggagccuuuagugc

SEQ ID NO: 64828 - RNA, 32 nt, Human
auaccugggaggaaggcuuuuccuucacaauu

SEQ ID NO: 64829 - RNA, 32 nt, Human
auaccugggaggcggagauugcagugagccga

SEQ ID NO: 64830 - RNA, 32 nt, Human
auaccuggggacuugauguuccuuccagauug

SEQ ID NO: 64831 - RNA, 32 nt, Human
auaccuggguggagcccacagaccagccccca

SEQ ID NO: 64832 - RNA, 32 nt, Human
auaccuggguuauuuccaggcauauaaugugc

SEQ ID NO: 64833 - RNA, 32 nt, Human
auaccuguaguuggaggaugaauacuggagac

SEQ ID NO: 64834 - RNA, 32 nt, Human
auaccugucuguucuuaaagauuucaugguug

SEQ ID NO: 64835 - RNA, 32 nt, Human
auaccugugccucggcuuuucucagcuggaug

SEQ ID NO: 64836 - RNA, 32 nt, Human
auaccuguguucagauuguaagaucuaguccg

SEQ ID NO: 64837 - RNA, 32 nt, Human
auaccuguguuuucauucucccccucucuccc

SEQ ID NO: 64838 - RNA, 32 nt, Human
auaccuguuuagaaccaaaaccaccaugacac

SEQ ID NO: 64839 - RNA, 32 nt, Human
auaccuguuuagaugauguagagcaagguaac

SEQ ID NO: 64840 - RNA, 32 nt, Human
auaccuuacuaaaaauuuaaaaucuaggaauu

SEQ ID NO: 64841 - RNA, 32 nt, Human
auaccuuagacagaggcuguccucuacacagg

SEQ ID NO: 64842 - RNA, 32 nt, Human
auaccuucaguuauuuacaugugaauaugagg

SEQ ID NO: 64843 - RNA, 32 nt, Human
auaccuuccaagcaaugcauuaccucccccag

SEQ ID NO: 64844 - RNA, 32 nt, Human
auaccuuccucuuccccuuuaccaaauaaagc

SEQ ID NO: 64845 - RNA, 32 nt, Human
auaccuucuguaacaguggcauucccuuaauu

SEQ ID NO: 64846 - RNA, 32 nt, Human
auaccuugaaaaaguagagaacagucaugagg

SEQ ID NO: 64847 - RNA, 32 nt, Human
auaccuugcccacuccuagagacagcugugcu

SEQ ID NO: 64848 - RNA, 32 nt, Human
auaccuuggggagggaguagggggacacgggg

SEQ ID NO: 64849 - RNA, 25 nt, Human
auaccuuguguuuuguuuugauuua

SEQ ID NO: 64850 - RNA, 32 nt, Human
auaccuuuaaucuuguuuuucaugaucaucau

SEQ ID NO: 64851 - RNA, 23 nt, Human
auaccuuuaucauuccugagaca

SEQ ID NO: 64852 - RNA, 19 nt, Human
auaccuuucuaagggaaaa

SEQ ID NO: 64853 - RNA, 32 nt, Human
auaccuuucuccugagagacugaagaaucucu

SEQ ID NO: 64854 - RNA, 32 nt, Human
auaccuuugccucuccgguaagcucccuugcu

SEQ ID NO: 64855 - RNA, 23 nt, Human
auaccuuugggcugccugggaca

SEQ ID NO: 64856 - RNA, 32 nt, Human
auaccuuugugaaguugcccaccaaaacacag

SEQ ID NO: 64857 - RNA, 32 nt, Human
auaccuuuugcaccucagcugccacaccuaua

SEQ ID NO: 64858 - RNA, 32 nt, Human
auacgaaaauuagcugggcgugguggugggca

SEQ ID NO: 64859 - RNA, 32 nt, Human
auacgaaaauuagcugggugugauggcgcaug

SEQ ID NO: 64860 - RNA, 32 nt, Human
auacgaaacuuagcugggcgugguggugugug

SEQ ID NO: 64861 - RNA, 32 nt, Human
auacgaaagcacacaaaacacuccaaguuuca

SEQ ID NO: 64862 - RNA, 32 nt, Human
auacgaaaguuagucgggcaugguggcaugca

SEQ ID NO: 64863 - RNA, 32 nt, Human
auacgaacauuagcugggucugauggugugca

SEQ ID NO: 64864 - RNA, 32 nt, Human
auacgaacugcgccauggagaggagaggcacu

SEQ ID NO: 64865 - RNA, 32 nt, Human
auacgaagcccucuugcaaaguagccucuuuc

SEQ ID NO: 64866 - RNA, 32 nt, Human
auacgaaggggcagcuacauuccacgacuuuu

SEQ ID NO: 64867 - RNA, 32 nt, Human
auacgaaucucuuaaggggguggaccccaagu

SEQ ID NO: 64868 - RNA, 32 nt, Human
auacgaaugugggcauacucagagaccauccc

SEQ ID NO: 64869 - RNA, 32 nt, Human
auacgacccugaggaggaguacgacccggaga

SEQ ID NO: 64870 - RNA, 32 nt, Human
auacgacuugcagugagcgucaggagcacguc

SEQ ID NO: 64871 - RNA, 32 nt, Human
auacgagaaacugccucccugcuucgggucag

SEQ ID NO: 64872 - RNA, 32 nt, Human
auacgaggaugcuauaggucuccagcaucaca

SEQ ID NO: 64873 - RNA, 32 nt, Human
auacgaugugugugucacaucacauauugugc

SEQ ID NO: 64874 - RNA, 32 nt, Human
auacgauuuuucuagggccaugggguuugagg

SEQ ID NO: 64875 - RNA, 32 nt, Human
auacgcaagaacaucacggagacucugguguc

SEQ ID NO: 64876 - RNA, 32 nt, Human
auacgcacucccgaccccagaaacccggauuc

SEQ ID NO: 64877 - RNA, 32 nt, Human
auacgcagcuuaacuauaucuuccugcgugug

SEQ ID NO: 64878 - RNA, 32 nt, Human
auacgcauccaagaagucgggugguagcucca

SEQ ID NO: 64879 - RNA, 32 nt, Human
auacgcaucugugccagcaucccaagagugag

SEQ ID NO: 64880 - RNA, 32 nt, Human
auacgccuguaaucccagcuacucgggaggcu

SEQ ID NO: 64881 - RNA, 32 nt, Human
auacgccuguaauccuagcuacuugggaggcu

SEQ ID NO: 64882 - RNA, 32 nt, Human
auacgcgcuuucuucugauccagccuguagag

SEQ ID NO: 64883 - RNA, 32 nt, Human
auacgcuucugcacuccggggaagaaggagua

SEQ ID NO: 64884 - RNA, 32 nt, Human
auacggacagagucugcuuagaagagauacaa

SEQ ID NO: 64885 - RNA, 32 nt, Human
auacggagugggagggauugggggaggaaagg

SEQ ID NO: 64886 - RNA, 32 nt, Human
auacggccaagugcccugugugccgcuggcag

SEQ ID NO: 64887 - RNA, 32 nt, Human
auacgggacgucaucaauguguuucaccgccu

SEQ ID NO: 64888 - RNA, 32 nt, Human
auacgggagagaaaccuuauaaguguaaugaa

SEQ ID NO: 64889 - RNA, 32 nt, Human
auacgggaguugcugcacaagccugggugcuc

SEQ ID NO: 64890 - RNA, 32 nt, Human
auacggggagugaaggaaggccggcaggcauc

SEQ ID NO: 64891 - RNA, 32 nt, Human
auacggggcucccgguggccaugacgacgggu

SEQ ID NO: 64892 - RNA, 32 nt, Human
auacggguauuuuuaaagauucuccaaaaagu

SEQ ID NO: 64893 - RNA, 32 nt, Human
auacggugguucagacaacaggcauuucucuc

SEQ ID NO: 64894 - RNA, 32 nt, Human
auacgguuggaaaggaaaaaugagacacaggu

SEQ ID NO: 64895 - RNA, 32 nt, Human
auacguaaacacccaggaaggcagggggcucc

SEQ ID NO: 64896 - RNA, 32 nt, Human
auacguaauucauauaucuauaugcuucacgu

SEQ ID NO: 64897 - RNA, 32 nt, Human
auacguacaaagagaaaggggaaagugauuua

SEQ ID NO: 64898 - RNA, 32 nt, Human
auacguaggagguggggaugggggaggggagg

SEQ ID NO: 64899 - RNA, 32 nt, Human
auacguauguuuaaaaacccuuccugcuauac

SEQ ID NO: 64900 - RNA, 32 nt, Human
auacgucaacaccuaugaaaagaagcggggaa

SEQ ID NO: 64901 - RNA, 32 nt, Human
auacguccacacacaccaaggcaccucacuca

SEQ ID NO: 64902 - RNA, 32 nt, Human
auacgucccagugaaacacagcuucgucacca

SEQ ID NO: 64903 - RNA, 32 nt, Human
auacgugaaugcugugcucuuccuucaugauc

SEQ ID NO: 64904 - RNA, 32 nt, Human
auacgugacgcauacauacacauguauguaug

SEQ ID NO: 64905 - RNA, 32 nt, Human
auacgugcucauuccaucuucaauggaacaaa

SEQ ID NO: 64906 - RNA, 20 nt, Human
auacguggccaacugccuca

SEQ ID NO: 64907 - RNA, 31 nt, Human
auacguguccuccuggggguuggagaugauc

SEQ ID NO: 64908 - RNA, 32 nt, Human
auacgugugguggcucacgccuguaaucccaa

SEQ ID NO: 64909 - RNA, 32 nt, Human
auacguguuaguccuguuauuuggaggcuuuu

SEQ ID NO: 64910 - RNA, 32 nt, Human
auacguguuuuuaaaauuuguguuuucuaucu

SEQ ID NO: 64911 - RNA, 32 nt, Human
auacguugaguuuggcucuggaaggaauauga

SEQ ID NO: 64912 - RNA, 32 nt, Human
auacguugguuauuuacagcacaacaugaaaa

SEQ ID NO: 64913 - RNA, 32 nt, Human
auacguuugucagaauaauacagggaaccauu

SEQ ID NO: 64914 - RNA, 32 nt, Human
auacuaaaaauacaaaaauuggcugggugugg

SEQ ID NO: 64915 - RNA, 32 nt, Human
auacuaaaagccuguugccacuguugugucau

SEQ ID NO: 64916 - RNA, 32 nt, Human
auacuaaaauuagcuggucgcgguggcuucug

SEQ ID NO: 64917 - RNA, 32 nt, Human
auacuaaagagaaacuacaaaccugaagaugu

SEQ ID NO: 64918 - RNA, 32 nt, Human
auacuaaaucgacaaccaaauuugucauguga

SEQ ID NO: 64919 - RNA, 32 nt, Human
auacuaaggaacagaguggacuuacaacaucu

SEQ ID NO: 64920 - RNA, 32 nt, Human
auacuaaggacccccucuguacaccaacgcca

SEQ ID NO: 64921 - RNA, 32 nt, Human
auacuaauucagcaaucccccaucguuaccca

SEQ ID NO: 64922 - RNA, 32 nt, Human
auacuacaauugcacuuccagcacuuugagaa

SEQ ID NO: 64923 - RNA, 32 nt, Human
auacuacacuggagaaaacaaaacaaaccaaa

SEQ ID NO: 64924 - RNA, 32 nt, Human
auacuacagccaggcuggaauuuggugucuua

SEQ ID NO: 64925 - RNA, 32 nt, Human
auacuacaggcacccaccaccacgcccagcua

SEQ ID NO: 64926 - RNA, 22 nt, Human
auacuacaguaacugugacuga

SEQ ID NO: 64927 - RNA, 32 nt, Human
auacuaccaguucuuuaugagcacuggaaugu

SEQ ID NO: 64928 - RNA, 32 nt, Human
auacuaccucucucuucuggccugugucuaag

SEQ ID NO: 64929 - RNA, 32 nt, Human
auacuaccucugucuguuaauucuuuccuaac

SEQ ID NO: 64930 - RNA, 32 nt, Human
auacuaccuggagguuuguccucuccauuuuu

SEQ ID NO: 64931 - RNA, 32 nt, Human
auacuacugcacuccagccugggcgacaagag

SEQ ID NO: 64932 - RNA, 32 nt, Human
auacuacugccucuccuugucuuaguggguau

SEQ ID NO: 64933 - RNA, 32 nt, Human
auacuacugcguccucccugaucccacccccu

SEQ ID NO: 64934 - RNA, 32 nt, Human
auacuagcacuacuauucuuagcagugcuugg

SEQ ID NO: 64935 - RNA, 32 nt, Human
auacuagggcuggugaauuaccagaucuccgu

SEQ ID NO: 64936 - RNA, 32 nt, Human
auacuaguaaagugaaugaauuacugaguuua

SEQ ID NO: 64937 - RNA, 32 nt, Human
auacuaguacaagugguaauuuuuguacauua

SEQ ID NO: 64938 - RNA, 32 nt, Human
auacuaguaccucccucuuaaggucagggcug

SEQ ID NO: 64939 - RNA, 32 nt, Human
auacuaguuuugagcuuuagaccucagccuuu

SEQ ID NO: 64940 - RNA, 32 nt, Human
auacuauacaauauguuuauugcacuucccau

SEQ ID NO: 64941 - RNA, 32 nt, Human
auacuauagagaaacccccggggaccauguga

SEQ ID NO: 64942 - RNA, 32 nt, Human
auacuauaguuucaccuguauucuaguaaaug

SEQ ID NO: 64943 - RNA, 32 nt, Human
auacuauauuuucuccccaauaccaccaacga

SEQ ID NO: 64944 - RNA, 32 nt, Human
auacuaucuuuuaugucuaaagccauuuuaua

SEQ ID NO: 64945 - RNA, 31 nt, Human
auacuauggacaaguuccugacaauacauuu

SEQ ID NO: 64946 - RNA, 32 nt, Human
auacuauguaugcagugcaucugcauagaaca

SEQ ID NO: 64947 - RNA, 22 nt, Human
auacuauuauuaaauuuucaug

SEQ ID NO: 64948 - RNA, 32 nt, Human
auacuauuccauccacacaguuuccacccuca

SEQ ID NO: 64949 - RNA, 32 nt, Human
auacucaaugauugaugacaccaguuuuggcu

SEQ ID NO: 64950 - RNA, 32 nt, Human
auacucaccaaacccucuuccccaccacccug

SEQ ID NO: 64951 - RNA, 32 nt, Human
auacucaccaggauaccccucguuaagggcaa

SEQ ID NO: 64952 - RNA, 32 nt, Human
auacucacucacucuccaccagccugggaaau

SEQ ID NO: 64953 - RNA, 32 nt, Human
auacucagaauauggguugauuugaauaucug

SEQ ID NO: 64954 - RNA, 32 nt, Human
auacucaggaggcugaggcaggagaaucgcuu

SEQ ID NO: 64955 - RNA, 32 nt, Human
auacucaggaggcugaggcaggagaauuguuu

SEQ ID NO: 64956 - RNA, 19 nt, Human
auacucaggauaacagaga

SEQ ID NO: 64957 - RNA, 32 nt, Human
auacucagggcguuguuaacagggagugguau

SEQ ID NO: 64958 - RNA, 32 nt, Human
auacucauaauccaguuuaauccuuuuauuug

SEQ ID NO: 64959 - RNA, 32 nt, Human
auacucaucugaugucuauugugaauuggcug

SEQ ID NO: 64960 - RNA, 32 nt, Human
auacucaugcaaccagccugagucgcggugag

SEQ ID NO: 64961 - RNA, 32 nt, Human
auacucauuaaaguuaggaucuagucauggac

SEQ ID NO: 64962 - RNA, 32 nt, Human
auacucauucaccccaaaggcucuuuuaagag

SEQ ID NO: 64963 - RNA, 32 nt, Human
auacuccaccuuguguuucaaagaauuuaguu

SEQ ID NO: 64964 - RNA, 32 nt, Human
auacuccagaaagcuguagacacugcucauuu

SEQ ID NO: 64965 - RNA, 32 nt, Human
auacuccagccuggugacagagugagacucug

SEQ ID NO: 64966 - RNA, 32 nt, Human
auacuccaggcagaggaaauaguguguauaga

SEQ ID NO: 64967 - RNA, 32 nt, Human
auacuccaguuccaacaccaucuucugagaug

SEQ ID NO: 64968 - RNA, 32 nt, Human
auacucccacaggauggacucacugcagaagc

SEQ ID NO: 64969 - RNA, 32 nt, Human
auacucccccauuuguuaaaugggguccugaa

SEQ ID NO: 64970 - RNA, 32 nt, Human
auacucccucugcccuccuuuuugguuuccuu

SEQ ID NO: 64971 - RNA, 32 nt, Human
auacucccugccuccuuucuucugccuaccag

SEQ ID NO: 64972 - RNA, 32 nt, Human
auacucccugcucccugugguagagacaccug

SEQ ID NO: 64973 - RNA, 32 nt, Human
auacuccuacugucuguguggucacagcuagu

SEQ ID NO: 64974 - RNA, 32 nt, Human
auacuccuaugcuagccucuggcuccucaggg

SEQ ID NO: 64975 - RNA, 32 nt, Human
auacuccuggggaaggugagcagauggacaag

SEQ ID NO: 64976 - RNA, 32 nt, Human
auacuccuguagucccagcuacuccagagauu

SEQ ID NO: 64977 - RNA, 32 nt, Human
auacucgggaggcuaaggcaggagaaucgcuu

SEQ ID NO: 64978 - RNA, 32 nt, Human
auacucgggaggcugaagcaggagaauugcuu

SEQ ID NO: 64979 - RNA, 32 nt, Human
auacucgggaggcugaggcaggagaaucacuu

SEQ ID NO: 64980 - RNA, 32 nt, Human
auacucgggaggcugaggcaggagaauugcuu

SEQ ID NO: 64981 - RNA, 32 nt, Human
auacucggggaggcaggguagcagugcuucca

SEQ ID NO: 64982 - RNA, 32 nt, Human
auacucggucggcgacgguagaacgggcgacg

SEQ ID NO: 64983 - RNA, 22 nt, Human
auacucgugaagguguaaggua

SEQ ID NO: 64984 - RNA, 32 nt, Human
auacucuacacucauucuuaacuuuucgcaaa

SEQ ID NO: 64985 - RNA, 32 nt, Human
auacucuagaaucuugucugucacucacuaca

SEQ ID NO: 64986 - RNA, 32 nt, Human
auacucuagucguuucugcauuuccuuuaaaa

SEQ ID NO: 64987 - RNA, 32 nt, Human
auacucuaucucagaagcaaaaagccauccau

SEQ ID NO: 64988 - RNA, 32 nt, Human
auacucuauuuggggaaacaaagcagcugaca

SEQ ID NO: 64989 - RNA, 32 nt, Human
auacucucagcuugcugaguggaugacaaaaa

SEQ ID NO: 64990 - RNA, 32 nt, Human
auacucucccauuaaagaggaagagaagauuu

SEQ ID NO: 64991 - RNA, 32 nt, Human
auacucuccccuuaccuuuccucucuccauuc

SEQ ID NO: 64992 - RNA, 32 nt, Human
auacucucucacucuaauaaacuuggcacuuc

SEQ ID NO: 64993 - RNA, 32 nt, Human
auacucucucugaggcaaagauggggacaagg

SEQ ID NO: 64994 - RNA, 19 nt, Human
auacucugcacuugccuca

SEQ ID NO: 64995 - RNA, 32 nt, Human
auacucuggguacaaugcucccaaucacccug

SEQ ID NO: 64996 - RNA, 31 nt, Human
auacucugucauaaauaccauugaauauauu

SEQ ID NO: 64997 - RNA, 32 nt, Human
auacucuuccuguguccauguguucucauugu

SEQ ID NO: 64998 - RNA, 32 nt, Human
auacucuucucccaucucccuucacaggauga

SEQ ID NO: 64999 - RNA, 32 nt, Human
auacucuugacccauuaaaaacugauggaaag

SEQ ID NO: 65000 - RNA, 32 nt, Human
auacucuugagcucugugacccugcuccuguc

SEQ ID NO: 65001 - RNA, 32 nt, Human
auacucuugguauuuguggugaugggaggaug

SEQ ID NO: 65002 - RNA, 32 nt, Human
auacugaaauucugcauaaugugaacaggaua

SEQ ID NO: 65003 - RNA, 32 nt, Human
auacugaacaugaaccucaccgucccucucuc

SEQ ID NO: 65004 - RNA, 32 nt, Human
auacugaaccuacauagcccagcucuugcugu

SEQ ID NO: 65005 - RNA, 32 nt, Human
auacugaaggaacugaggccugggugauuuau

SEQ ID NO: 65006 - RNA, 32 nt, Human
auacugaagugaggauuauaagagaaauaaac

SEQ ID NO: 65007 - RNA, 32 nt, Human
auacugaaugaggccgggugcaauggcuuacg

SEQ ID NO: 65008 - RNA, 32 nt, Human
auacugacaauauuccaugagggugugcaagc

SEQ ID NO: 65009 - RNA, 32 nt, Human
auacugacagccaccagcagguggaagagauc

SEQ ID NO: 65010 - RNA, 32 nt, Human
auacugacaugcagaagaaauaagugcauucu

SEQ ID NO: 65011 - RNA, 32 nt, Human
auacugacaugcugagauaccuguaauaauug

SEQ ID NO: 65012 - RNA, 32 nt, Human
auacugaccugagaggaggcccagugagauuc

SEQ ID NO: 65013 - RNA, 32 nt, Human
auacugacgugucuugaguaauuuggaaccca

SEQ ID NO: 65014 - RNA, 32 nt, Human
auacugacucaacauggagucucacuggccaa

SEQ ID NO: 65015 - RNA, 32 nt, Human
auacugacucuagcccauguugccuugcccaa

SEQ ID NO: 65016 - RNA, 32 nt, Human
auacugacuuuaguuaguauccuuggauuuuu

SEQ ID NO: 65017 - RNA, 32 nt, Human
auacugagccucucaccucccagcccucagcc

SEQ ID NO: 65018 - RNA, 32 nt, Human
auacugagcuauacuggauucacugacaagaa

SEQ ID NO: 65019 - RNA, 32 nt, Human
auacugagcugauggugucauccagcagccuc

SEQ ID NO: 65020 - RNA, 22 nt, Human
auacugagggaacucagaggcc

SEQ ID NO: 65021 - RNA, 32 nt, Human
auacugaguacuuauaaguagcagaacauaaa

SEQ ID NO: 65022 - RNA, 32 nt, Human
auacugagucagaaacucuggaauagggcccc

SEQ ID NO: 65023 - RNA, 32 nt, Human
auacugauaaauuuuaaagaaaauaugaggaa

SEQ ID NO: 65024 - RNA, 32 nt, Human
auacugaugacagauuucugagguugccugua

SEQ ID NO: 65025 - RNA, 32 nt, Human
auacugauuccaucauuuaaucuuuaaaagua

SEQ ID NO: 65026 - RNA, 19 nt, Human
auacugcaacacugucuca

SEQ ID NO: 65027 - RNA, 32 nt, Human
auacugcaagcaccuggguucucuccaccccu

SEQ ID NO: 65028 - RNA, 21 nt, Human
auacugcacuuuuugcacagu

SEQ ID NO: 65029 - RNA, 32 nt, Human
auacugcagcaagaccaaagugguaaagaaac

SEQ ID NO: 65030 - RNA, 32 nt, Human
auacugcaugugugugcauacaugcauuuucc

SEQ ID NO: 65031 - RNA, 32 nt, Human
auacugcauucucuuuaucacauagugguugu

SEQ ID NO: 65032 - RNA, 32 nt, Human
auacugcccuagugucuccauggaccaaauuu

SEQ ID NO: 65033 - RNA, 32 nt, Human
auacugcgagugaacagugggcggcgaggcug

SEQ ID NO: 65034 - RNA, 32 nt, Human
auacugcggauggugaagguggagcaguggau

SEQ ID NO: 65035 - RNA, 23 nt, Human
auacugcuacaaggugcagagua

SEQ ID NO: 65036 - RNA, 32 nt, Human
auacugcucccaggggccuagguagcugccag

SEQ ID NO: 65037 - RNA, 32 nt, Human
auacugcucuaguuucuuaguacucuguaaug

SEQ ID NO: 65038 - RNA, 32 nt, Human
auacugcucuuuuccccucucccuccacacca

SEQ ID NO: 65039 - RNA, 32 nt, Human
auacugcuguauaagguaauaaaacucugcac

SEQ ID NO: 65040 - RNA, 32 nt, Human
auacugcuuccuugcauggauacaugggaggg

SEQ ID NO: 65041 - RNA, 23 nt, Human
auacuggaaccgauuuguacaau

SEQ ID NO: 65042 - RNA, 32 nt, Human
auacuggacccacuucuuucagaagagaugaa

SEQ ID NO: 65043 - RNA, 32 nt, Human
auacuggagaaaagccauacaaaugagaagaa

SEQ ID NO: 65044 - RNA, 32 nt, Human
auacuggagagaaaccuuagagugcagucauu

SEQ ID NO: 65045 - RNA, 32 nt, Human
auacuggagagaaaccuuauaaguguaaugag

SEQ ID NO: 65046 - RNA, 32 nt, Human
auacuggagagaaaccuuauaaguguaaugau

SEQ ID NO: 65047 - RNA, 32 nt, Human
auacuggauggagcuaccaagagcagacagag

SEQ ID NO: 65048 - RNA, 32 nt, Human
auacuggcaaaaagauuaaaaacaauugcauu

SEQ ID NO: 65049 - RNA, 32 nt, Human
auacuggcaaaaaucuaaauugcuuucuuucc

SEQ ID NO: 65050 - RNA, 32 nt, Human
auacuggcaauacuccagccuggugacagagu

SEQ ID NO: 65051 - RNA, 31 nt, Human
auacuggcacuuuuccuugcagaaagcacuc

SEQ ID NO: 65052 - RNA, 32 nt, Human
auacuggcaggcuaaauguccacugcuucuug

SEQ ID NO: 65053 - RNA, 32 nt, Human
auacuggcccucccuucucuucucuuugcugc

SEQ ID NO: 65054 - RNA, 32 nt, Human
auacugggaagaaaccauaugagugcggggaa

SEQ ID NO: 65055 - RNA, 32 nt, Human
auacugggcugcagaaucucacaugggcacca

SEQ ID NO: 65056 - RNA, 32 nt, Human
auacugggcuuggcucaugcuuuaauuagcua

SEQ ID NO: 65057 - RNA, 32 nt, Human
auacugggguccccagauucugcucuaagggg

SEQ ID NO: 65058 - RNA, 32 nt, Human
auacugguaggggccaaggccaugcuccccuu

SEQ ID NO: 65059 - RNA, 32 nt, Human
auacuggucaucuuucugacaucacaguagaa

SEQ ID NO: 65060 - RNA, 32 nt, Human
auacuggucugaucuguucuacauauuaaagu

SEQ ID NO: 65061 - RNA, 24 nt, Human
auacugucauuccaaauucucaug

SEQ ID NO: 65062 - RNA, 32 nt, Human
auacugugacgguuucaucuuuggaaaauacc

SEQ ID NO: 65063 - RNA, 32 nt, Human
auacugugaggcaucggaaggccagccuguug

SEQ ID NO: 65064 - RNA, 32 nt, Human
auacugugaugaccuuucuacuccgaaaccug

SEQ ID NO: 65065 - RNA, 32 nt, Human
auacugugccauugcacuccaagccugggcaa

SEQ ID NO: 65066 - RNA, 32 nt, Human
auacuguguguuuucccaaagcacuuuuaaaa

SEQ ID NO: 65067 - RNA, 22 nt, Human
auacuguuaccaaauucuucau

SEQ ID NO: 65068 - RNA, 32 nt, Human
auacuguucacucacucuaaaggcgcugagac

SEQ ID NO: 65069 - RNA, 32 nt, Human
auacuguucuacugcuucccucaguaucugaa

SEQ ID NO: 65070 - RNA, 32 nt, Human
auacuguucucuggcccuuacugcgcacaccc

SEQ ID NO: 65071 - RNA, 32 nt, Human
auacuguucuggacugugccuguuaguugcuc

SEQ ID NO: 65072 - RNA, 32 nt, Human
auacuguugucuaguaagugugcaauagcauu

SEQ ID NO: 65073 - RNA, 32 nt, Human
auacuguuugauacaugcuuuuauuuuccuuc

SEQ ID NO: 65074 - RNA, 32 nt, Human
auacuguuuuguuccucugaguuucuuucagu

SEQ ID NO: 65075 - RNA, 32 nt, Human
auacuuaacauggugguugugucucuuuaugc

SEQ ID NO: 65076 - RNA, 32 nt, Human
auacuuaauuuugaauuucuccuugccacguu

SEQ ID NO: 65077 - RNA, 32 nt, Human
auacuuaggggucaaaccugugguguguggaa

SEQ ID NO: 65078 - RNA, 32 nt, Human
auacuuaggguucucauuuuguaguuucuucc

SEQ ID NO: 65079 - RNA, 31 nt, Human
auacuuaguauuuucugacuauagaguacau

SEQ ID NO: 65080 - RNA, 32 nt, Human
auacuuaucuucuggcugucuuccugcugugg

SEQ ID NO: 65081 - RNA, 32 nt, Human
auacuuauuguucauuuugaaaagacuuuguu

SEQ ID NO: 65082 - RNA, 32 nt, Human
auacuuauuuggagcuugggugagauaagcau

SEQ ID NO: 65083 - RNA, 32 nt, Human
auacuucaccuuucuuuuaauuccccaugaug

SEQ ID NO: 65084 - RNA, 32 nt, Human
auacuucagauauggcagggaggccaggugga

SEQ ID NO: 65085 - RNA, 32 nt, Human
auacuucccagcuauuccaucuguggaugaaa

SEQ ID NO: 65086 - RNA, 32 nt, Human
auacuucccaggaguugugacagacuuuccuc

SEQ ID NO: 65087 - RNA, 32 nt, Human
auacuucuacaacuuuaaaacugcucauuuca

SEQ ID NO: 65088 - RNA, 20 nt, Human
auacuucuucaagauuggac

SEQ ID NO: 65089 - RNA, 32 nt, Human
auacuucuucauaauggucacagucugaggau

SEQ ID NO: 65090 - RNA, 32 nt, Human
auacuugaaagaaaccucaauuaucaguggcu

SEQ ID NO: 65091 - RNA, 32 nt, Human
auacuugaccuguccugcuguuuauuaugugg

SEQ ID NO: 65092 - RNA, 32 nt, Human
auacuugauuacaaaugaaaacucagaaacca

SEQ ID NO: 65093 - RNA, 32 nt, Human
auacuugauugaaguagcucucugcuaaaaug

SEQ ID NO: 65094 - RNA, 32 nt, Human
auacuugcaaaguguguggugugagagaggug

SEQ ID NO: 65095 - RNA, 32 nt, Human
auacuugcacacacaagugaguuaacauuuca

SEQ ID NO: 65096 - RNA, 32 nt, Human
auacuugcacacacauauuuauagcagcaaaa

SEQ ID NO: 65097 - RNA, 32 nt, Human
auacuugccaggagacagcaugggaugccauu

SEQ ID NO: 65098 - RNA, 32 nt, Human
auacuugccuucuuccuguacagggcugggaa

SEQ ID NO: 65099 - RNA, 32 nt, Human
auacuugcugaacuugaaaaccuucacucucc

SEQ ID NO: 65100 - RNA, 32 nt, Human
auacuuggacacuaaagccaggaugugcaugc

SEQ ID NO: 65101 - RNA, 32 nt, Human
auacuuggagcuuuaaaaauuaaaaggagaga

SEQ ID NO: 65102 - RNA, 32 nt, Human
auacuuggcuuggaaauuuaacacaguccuuu

SEQ ID NO: 65103 - RNA, 32 nt, Human
auacuugggacacgaugauuuaggcaccccac

SEQ ID NO: 65104 - RNA, 32 nt, Human
auacuugggaggcugagccaggagaaucacuu

SEQ ID NO: 65105 - RNA, 32 nt, Human
auacuugggaggcugaggcaggagaauugcuu

SEQ ID NO: 65106 - RNA, 22 nt, Human
auacuugguccuugcaauggug

SEQ ID NO: 65107 - RNA, 32 nt, Human
auacuugucaauguuuuuauucuuuuacaaga

SEQ ID NO: 65108 - RNA, 32 nt, Human
auacuuguccuuccucccauuuccucccuuug

SEQ ID NO: 65109 - RNA, 32 nt, Human
auacuugugucaccgauccaggguuucucuuu

SEQ ID NO: 65110 - RNA, 32 nt, Human
auacuuguuguauccaugggaaaugaggucau

SEQ ID NO: 65111 - RNA, 32 nt, Human
auacuuguuuuuaaucauuaaauacuuucuuc

SEQ ID NO: 65112 - RNA, 32 nt, Human
auacuuuacauaguaaacuuuccccuuuuaag

SEQ ID NO: 65113 - RNA, 32 nt, Human
auacuuuagggugggggagggaagggagugag

SEQ ID NO: 65114 - RNA, 32 nt, Human
auacuuuauauacuuuucuccaguaauacaug

SEQ ID NO: 65115 - RNA, 32 nt, Human
auacuuuaugagggcuggagugcacuggagca

SEQ ID NO: 65116 - RNA, 32 nt, Human
auacuuucacauacuuuaagcuuuucacccug

SEQ ID NO: 65117 - RNA, 31 nt, Human
auacuuuccuacaguaauaccaauguauaug

SEQ ID NO: 65118 - RNA, 32 nt, Human
auacuuucucuccaaaggaaacuuuuaaauca

SEQ ID NO: 65119 - RNA, 32 nt, Human
auacuuucucucucuuucaugcaguucaaagc

SEQ ID NO: 65120 - RNA, 32 nt, Human
auacuuucucuucucucucuuuuaauuuucuu

SEQ ID NO: 65121 - RNA, 32 nt, Human
auacuuucuggcagacauacagaaagcucugu

SEQ ID NO: 65122 - RNA, 32 nt, Human
auacuuucuucugauuuuaaagccauuugaua

SEQ ID NO: 65123 - RNA, 32 nt, Human
auacuuugcauccuucaauccagucaagcuga

SEQ ID NO: 65124 - RNA, 32 nt, Human
auacuuuggauaagagcuaaaccaccugccac

SEQ ID NO: 65125 - RNA, 32 nt, Human
auacuuugggaggcugaggcaagugaagcacu

SEQ ID NO: 65126 - RNA, 32 nt, Human
auacuuuguaacuaugcuugggugauauugag

SEQ ID NO: 65127 - RNA, 32 nt, Human
auacuuuuaacugcaaccaccagacacaaaug

SEQ ID NO: 65128 - RNA, 32 nt, Human
auacuuuuagacuuauauugccaagccaaagu

SEQ ID NO: 65129 - RNA, 32 nt, Human
auacuuuuauaugauuggcagugcaguaaguu

SEQ ID NO: 65130 - RNA, 32 nt, Human
auacuuuucacuccaacuuccaauaacugaca

SEQ ID NO: 65131 - RNA, 32 nt, Human
auacuuuucccauaaaguuuuaagugugaaag

SEQ ID NO: 65132 - RNA, 32 nt, Human
auacuuuucuucuucuuacuaauucuuuuagg

SEQ ID NO: 65133 - RNA, 32 nt, Human
auacuuuugcagccuuuguccugugggacgaa

SEQ ID NO: 65134 - RNA, 32 nt, Human
auacuuuuuauugagcacuuugcugcugaaau

SEQ ID NO: 65135 - RNA, 32 nt, Human
auacuuuuuccuuccugacauuuguuuuuacu

SEQ ID NO: 65136 - RNA, 32 nt, Human
auagaaaaagagaagcuggagugaagggaaga

SEQ ID NO: 65137 - RNA, 32 nt, Human
auagaaaaauuagcuaggcaugguggcacaug

SEQ ID NO: 65138 - RNA, 32 nt, Human
auagaaaaauuagcuggccaugguggugcucg

SEQ ID NO: 65139 - RNA, 32 nt, Human
auagaaaaauuagcugggcaugguggcgcgug

SEQ ID NO: 65140 - RNA, 32 nt, Human
auagaaaaauuagcugggcaugguggugggcg

SEQ ID NO: 65141 - RNA, 32 nt, Human
auagaaaagaugagaggcagaggcagacaggc

SEQ ID NO: 65142 - RNA, 32 nt, Human
auagaaaaggaaauaguggagaaagcacuggc

SEQ ID NO: 65143 - RNA, 32 nt, Human
auagaaaaucaaguuaucagcaagcaaagggc

SEQ ID NO: 65144 - RNA, 32 nt, Human
auagaaaauugucauucuagccuggauuucuc

SEQ ID NO: 65145 - RNA, 32 nt, Human
auagaaacacaggagaggaagaauuuggaaug

SEQ ID NO: 65146 - RNA, 32 nt, Human
auagaaaccaaaaggcugggcguaguggcuca

SEQ ID NO: 65147 - RNA, 32 nt, Human
auagaaacucacaacuuccuuguuuuguuauc

SEQ ID NO: 65148 - RNA, 32 nt, Human
auagaaacugagaagcagcaaucuguauuugu

SEQ ID NO: 65149 - RNA, 21 nt, Human
aucacgccaccuggacagcca

SEQ ID NO: 65150 - RNA, 32 nt, Human
aucacgccaccuggacagccagaguccaaggc

SEQ ID NO: 65151 - RNA, 22 nt, Human
aucacgccacuacacuccaacc

SEQ ID NO: 65152 - RNA, 32 nt, Human
aucacgccacuacacuccagccugggcaacag

SEQ ID NO: 65153 - RNA, 32 nt, Human
aucacgccacuacacuccagccugggcgacag

SEQ ID NO: 65154 - RNA, 22 nt, Human
aucacgccacugaacuccagcc

SEQ ID NO: 65155 - RNA, 32 nt, Human
aucacgccacugaacuccagccugggagacag

SEQ ID NO: 65156 - RNA, 32 nt, Human
aucacgccacugaacuccagccugggugacag

SEQ ID NO: 65157 - RNA, 32 nt, Human
aucacgccacugcaacuccagcuugggugaca

SEQ ID NO: 65158 - RNA, 32 nt, Human
aucacgccacugcaccccagccugggugacag

SEQ ID NO: 65159 - RNA, 22 nt, Human
aucacgccacugcacuacagcc

SEQ ID NO: 65160 - RNA, 32 nt, Human
aucacgccacugcacuacagccuggacgacag

SEQ ID NO: 65161 - RNA, 22 nt, Human
aucacgccacugcacuauagcc

SEQ ID NO: 65162 - RNA, 32 nt, Human
aucacgccacugcacuauagccuaggugacag

SEQ ID NO: 65163 - RNA, 22 nt, Human
aucacgccacugcacucaagcc

SEQ ID NO: 65164 - RNA, 32 nt, Human
aucacgccacugcacucaagccugggcgacag

SEQ ID NO: 65165 - RNA, 22 nt, Human
aucacgccacugcacuccaacc

SEQ ID NO: 65166 - RNA, 32 nt, Human
aucacgccacugcacuccaaccugggugacag

SEQ ID NO: 65167 - RNA, 32 nt, Human
aucacgccacugcacuccaacuugggcaacag

SEQ ID NO: 65168 - RNA, 32 nt, Human
aucacgccacugcacuccaccugggcaacaag

SEQ ID NO: 65169 - RNA, 32 nt, Human
aucacgccacugcacuccagcacccugggcga

SEQ ID NO: 65170 - RNA, 22 nt, Human
aucacgccacugcacuccagcc

SEQ ID NO: 65171 - RNA, 32 nt, Human
aucacgccacugcacuccagcccgggcgacag

SEQ ID NO: 65172 - RNA, 32 nt, Human
aucacgccacugcacuccagcccgggcggcag

SEQ ID NO: 65173 - RNA, 32 nt, Human
aucacgccacugcacuccagcccggggacaga

SEQ ID NO: 65174 - RNA, 32 nt, Human
aucacgccacugcacuccagccuaggcgacag

SEQ ID NO: 65175 - RNA, 32 nt, Human
aucacgccacugcacuccagccucggugacag

SEQ ID NO: 65176 - RNA, 32 nt, Human
aucacgccacugcacuccagccugagugacag

SEQ ID NO: 65177 - RNA, 32 nt, Human
aucacgccacugcacuccagccugcggacaga

SEQ ID NO: 65178 - RNA, 32 nt, Human
aucacgccacugcacuccagccuggacaacag

SEQ ID NO: 65179 - RNA, 32 nt, Human
aucacgccacugcacuccagccuggaugacag

SEQ ID NO: 65180 - RNA, 32 nt, Human
aucacgccacugcacuccagccuggcgacaga

SEQ ID NO: 65181 - RNA, 32 nt, Human
aucacgccacugcacuccagccugggagacag

SEQ ID NO: 65182 - RNA, 32 nt, Human
aucacgccacugcacuccagccugggcaacaa

SEQ ID NO: 65183 - RNA, 32 nt, Human
aucacgccacugcacuccagccugggcaacag

SEQ ID NO: 65184 - RNA, 32 nt, Human
aucacgccacugcacuccagccugggcaacgg

SEQ ID NO: 65185 - RNA, 32 nt, Human
aucacgccacugcacuccagccugggccacag

SEQ ID NO: 65186 - RNA, 32 nt, Human
aucacgccacugcacuccagccugggcgacag

SEQ ID NO: 65187 - RNA, 32 nt, Human
aucacgccacugcacuccagccugggcgaugg

SEQ ID NO: 65188 - RNA, 32 nt, Human
aucacgccacugcacuccagccugggcugcag

SEQ ID NO: 65189 - RNA, 32 nt, Human
aucacgccacugcacuccagccuggguaacaa

SEQ ID NO: 65190 - RNA, 32 nt, Human
aucacgccacugcacuccagccuggguaacag

SEQ ID NO: 65191 - RNA, 32 nt, Human
aucacgccacugcacuccagccugggugacag

SEQ ID NO: 65192 - RNA, 32 nt, Human
aucacgccacugcacuccagccuggucaacag

SEQ ID NO: 65193 - RNA, 32 nt, Human
aucacgccacugcacuccagccuggugacaga

SEQ ID NO: 65194 - RNA, 32 nt, Human
aucacgccacugcacuccagccuggugacagc

SEQ ID NO: 65195 - RNA, 32 nt, Human
aucacgccacugcacuccagccuguugacaaa

SEQ ID NO: 65196 - RNA, 32 nt, Human
aucacgccacugcacuccagcuggagugacag

SEQ ID NO: 65197 - RNA, 32 nt, Human
aucacgccacugcacuccagcuugggugacaa

SEQ ID NO: 65198 - RNA, 32 nt, Human
aucacgccacugcacuccagucugggugacag

SEQ ID NO: 65199 - RNA, 23 nt, Human
aucacgccacugcacuccaucca

SEQ ID NO: 65200 - RNA, 32 nt, Human
aucacgccacugcacuccauccagccugggug

SEQ ID NO: 65201 - RNA, 32 nt, Human
aucacgccacugcacucuagccuaggcgacag

SEQ ID NO: 65202 - RNA, 32 nt, Human
aucacgccacugcacucuagccugggauacag

SEQ ID NO: 65203 - RNA, 32 nt, Human
aucacgccacugcacucuagccugggcaacaa

SEQ ID NO: 65204 - RNA, 32 nt, Human
aucacgccacugcacucuagccugggcaauaa

SEQ ID NO: 65205 - RNA, 22 nt, Human
aucacgccacugcacuugagcc

SEQ ID NO: 65206 - RNA, 32 nt, Human
aucacgccacugcacuugagccugggcgacac

SEQ ID NO: 65207 - RNA, 22 nt, Human
aucacgccacugcauuacagcc

SEQ ID NO: 65208 - RNA, 32 nt, Human
aucacgccacugcauuacagccuggugcagag

SEQ ID NO: 65209 - RNA, 32 nt, Human
aucacgccacugcauuccagacugggcgacag

SEQ ID NO: 65210 - RNA, 22 nt, Human
aucacgccacugcauuccagcc

SEQ ID NO: 65211 - RNA, 32 nt, Human
aucacgccacugcauuccagccugggcgacag

SEQ ID NO: 65212 - RNA, 32 nt, Human
aucacgccacugcauuccagccuggugacaga

SEQ ID NO: 65213 - RNA, 32 nt, Human
aucacgccacugcauuccagccugugcgacag

SEQ ID NO: 65214 - RNA, 22 nt, Human
aucacgccacugcccuccagcc

SEQ ID NO: 65215 - RNA, 32 nt, Human
aucacgccacugcccuccagccuggggagaca

SEQ ID NO: 65216 - RNA, 22 nt, Human
aucacgccacugcgcuacagcc

SEQ ID NO: 65217 - RNA, 32 nt, Human
aucacgccacugcgcuacagccugggcgacac

SEQ ID NO: 65218 - RNA, 32 nt, Human
aucacgccacugcgcuccagccugggcgaaag

SEQ ID NO: 65219 - RNA, 22 nt, Human
aucacgccacuguacuccagcc

SEQ ID NO: 65220 - RNA, 32 nt, Human
aucacgccacuguacuccagccuggaugacac

SEQ ID NO: 65221 - RNA, 32 nt, Human
aucacgccacuguacuccagccugggagacac

SEQ ID NO: 65222 - RNA, 32 nt, Human
aucacgccacuguacuucuagccuggguuaca

SEQ ID NO: 65223 - RNA, 22 nt, Human
aucacgccacugugcuccagcc

SEQ ID NO: 65224 - RNA, 32 nt, Human
aucacgccacugugcuccagccugggcaacaa

SEQ ID NO: 65225 - RNA, 32 nt, Human
aucacgccagugcacuccagccugagagacag

SEQ ID NO: 65226 - RNA, 32 nt, Human
aucacgccauuacacuccagccugggcaacag

SEQ ID NO: 65227 - RNA, 32 nt, Human
aucacgccauugcacuacagccugggugacag

SEQ ID NO: 65228 - RNA, 22 nt, Human
aucacgccauugcacuccaacc

SEQ ID NO: 65229 - RNA, 32 nt, Human
aucacgccauugcacuccaaccugggugacaa

SEQ ID NO: 65230 - RNA, 22 nt, Human
aucacgccauugcacuccagcc

SEQ ID NO: 65231 - RNA, 32 nt, Human
aucacgccauugcacuccagccuaggcaacga

SEQ ID NO: 65232 - RNA, 32 nt, Human
aucacgccauugcacuccagccuaggcgacag

SEQ ID NO: 65233 - RNA, 32 nt, Human
aucacgccauugcacuccagccugggcaacaa

SEQ ID NO: 65234 - RNA, 32 nt, Human
aucacgccauugcacuccagccugggcaacag

SEQ ID NO: 65235 - RNA, 32 nt, Human
aucacgccauugcacuccagccugggcaacga

SEQ ID NO: 65236 - RNA, 32 nt, Human
aucacgccauugcacuccagccugggcaauaa

SEQ ID NO: 65237 - RNA, 32 nt, Human
aucacgccauugcacuccagccugggcgacag

SEQ ID NO: 65238 - RNA, 32 nt, Human
aucacgccauugcacuccagccugggggacag

SEQ ID NO: 65239 - RNA, 32 nt, Human
aucacgccauugcacuccagccugggugacac

SEQ ID NO: 65240 - RNA, 32 nt, Human
aucacgccauugcacuccagccugggugacag

SEQ ID NO: 65241 - RNA, 32 nt, Human
aucacgccauugcacuccagccugugcgacaa

SEQ ID NO: 65242 - RNA, 32 nt, Human
aucacgccauugcacuccagucugguugacag

SEQ ID NO: 65243 - RNA, 22 nt, Human
aucacgccauuguacuccagcc

SEQ ID NO: 65244 - RNA, 32 nt, Human
aucacgccauuguacuccagccuggcaacaga

SEQ ID NO: 65245 - RNA, 32 nt, Human
aucacgccauuguacuccagccugggcaacaa

SEQ ID NO: 65246 - RNA, 32 nt, Human
aucacgccauuguacuccagccugggcgacag

SEQ ID NO: 65247 - RNA, 32 nt, Human
aucacgcccggcuaauguuuuguauuuuuagu

SEQ ID NO: 65248 - RNA, 32 nt, Human
aucacgccgcugcacuccagccugagcacaga

SEQ ID NO: 65249 - RNA, 32 nt, Human
aucacgccguugcacuccagccugggcaacaa

SEQ ID NO: 65250 - RNA, 32 nt, Human
aucacgccucugcacuccagccugggcaacaa

SEQ ID NO: 65251 - RNA, 32 nt, Human
aucacgccuguaaucccagcacauugggaggc

SEQ ID NO: 65252 - RNA, 32 nt, Human
aucacgccuguaaucccagcacuuagggaggc

SEQ ID NO: 65253 - RNA, 32 nt, Human
aucacgccuguaaucccagcgcuuugggaggc

SEQ ID NO: 65254 - RNA, 22 nt, Human
aucacgccuugcccaaguguga

SEQ ID NO: 65255 - RNA, 32 nt, Human
aucacgcgaaaggguggcugaggcucuugaaa

SEQ ID NO: 65256 - RNA, 32 nt, Human
aucacggagaaaagucagagugcucagugcca

SEQ ID NO: 65257 - RNA, 32 nt, Human
aucacggcagaguucaaggccgcuuguagacu

SEQ ID NO: 65258 - RNA, 32 nt, Human
aucacggcucacugcaaccuccaccuccugag

SEQ ID NO: 65259 - RNA, 32 nt, Human
aucacggcucacugcagccucaaccuccuggg

SEQ ID NO: 65260 - RNA, 32 nt, Human
aucacggcucacugcagccucgaccuccccag

SEQ ID NO: 65261 - RNA, 32 nt, Human
aucacggcucacugcagccucuaccuccccag

SEQ ID NO: 65262 - RNA, 32 nt, Human
aucacggcucacugcagcuucaaacuccuggg

SEQ ID NO: 65263 - RNA, 32 nt, Human
aucacggcucacugcagucucugccucccaga

SEQ ID NO: 65264 - RNA, 32 nt, Human
aucacggcucacuguagucucgaccucccagg

SEQ ID NO: 65265 - RNA, 32 nt, Human
aucacgggaaugucacaaugcccagacuugga

SEQ ID NO: 65266 - RNA, 32 nt, Human
aucacgggaggaggcagcugcggcggggccga

SEQ ID NO: 65267 - RNA, 32 nt, Human
aucacgggggaugcagacauugaccaugacca

SEQ ID NO: 65268 - RNA, 32 nt, Human
aucacgguaggcagugcuugaaugagaaaagc

SEQ ID NO: 65269 - RNA, 32 nt, Human
aucacgguugacugacagcuccugggguucau

SEQ ID NO: 65270 - RNA, 32 nt, Human
aucacgucacugcacuccagcuugggcaacag

SEQ ID NO: 65271 - RNA, 32 nt, Human
aucacgucacugcacuccggccugggugacag

SEQ ID NO: 65272 - RNA, 32 nt, Human
aucacgucacugcauuccagccuggauaauag

SEQ ID NO: 65273 - RNA, 32 nt, Human
aucacgucacuguacuccagccugggugacag

SEQ ID NO: 65274 - RNA, 32 nt, Human
aucacguccuuucuaggaacauggauggagcu

SEQ ID NO: 65275 - RNA, 32 nt, Human
aucacgucuauguaaugaagccuccacaagaa

SEQ ID NO: 65276 - RNA, 32 nt, Human
aucacgucucacugcagccucaaccuccuggg

SEQ ID NO: 65277 - RNA, 32 nt, Human
aucacuacaacaaaugcuaacuucuaaucccc

SEQ ID NO: 65278 - RNA, 32 nt, Human
aucacuacaagcuuuuaacuuuuuaaguuauu

SEQ ID NO: 65279 - RNA, 32 nt, Human
aucacuacauuucaaagcaauggcuccuugag

SEQ ID NO: 65280 - RNA, 32 nt, Human
aucacuagauacugccuccucaauuucaaaag

SEQ ID NO: 65281 - RNA, 32 nt, Human
aucacuagaucuucuccaccagucauguuccc

SEQ ID NO: 65282 - RNA, 32 nt, Human
aucacuaggaggcagagguugcagugagcagu

SEQ ID NO: 65283 - RNA, 32 nt, Human
aucacuauagagaacuuaagaggcuggcuuau

SEQ ID NO: 65284 - RNA, 31 nt, Human
aucacuaugucaacagacacagguguuuccc

SEQ ID NO: 65285 - RNA, 24 nt, Human
aucacuauugaauuucucuccaca

SEQ ID NO: 65286 - RNA, 32 nt, Human
aucacucagagcagucugugacuuaguggaca

SEQ ID NO: 65287 - RNA, 32 nt, Human
aucacucagcucccaucuccuuucagaaaaau

SEQ ID NO: 65288 - RNA, 32 nt, Human
aucacucaucacuuguuuucuuuuggcuuuug

SEQ ID NO: 65289 - RNA, 32 nt, Human
aucacuccacugcacuccagccugggcaacag

SEQ ID NO: 65290 - RNA, 32 nt, Human
aucacuccacugcacuccagccugggcgacag

SEQ ID NO: 65291 - RNA, 32 nt, Human
aucacuccacugcacuccagccugggugacag

SEQ ID NO: 65292 - RNA, 20 nt, Human
aucacucccaaugccucccu

SEQ ID NO: 65293 - RNA, 32 nt, Human
aucacucccggaaauuucuuuaucucuguuac

SEQ ID NO: 65294 - RNA, 32 nt, Human
aucacuccucagugugaccucccaggccucuu

SEQ ID NO: 65295 - RNA, 32 nt, Human
aucacucgaacccaggaggcagagguugcagu

SEQ ID NO: 65296 - RNA, 32 nt, Human
aucacucgcagcuaaguuuuuguauuuuuagu

SEQ ID NO: 65297 - RNA, 32 nt, Human
aucacucgccauucuccuacugccuuccagaa

SEQ ID NO: 65298 - RNA, 32 nt, Human
aucacucgcuguuuucuggcuagcucuuggca

SEQ ID NO: 65299 - RNA, 32 nt, Human
aucacucuccauacucuuucuugugauucucc

SEQ ID NO: 65300 - RNA, 32 nt, Human
aucacucucuuccuccucuagacucuguguuu

SEQ ID NO: 65301 - RNA, 32 nt, Human
aucacucuggauggugucuguggaguucaggu

SEQ ID NO: 65302 - RNA, 32 nt, Human
aucacucugugucugaguggcuucacuccugc

SEQ ID NO: 65303 - RNA, 32 nt, Human
aucacucuuagcacccuccucuugacaaaacu

SEQ ID NO: 65304 - RNA, 32 nt, Human
aucacucuuuggagaugggaauuuguaucccc

SEQ ID NO: 65305 - RNA, 32 nt, Human
aucacugaaacccaagaggcagagguugagua

SEQ ID NO: 65306 - RNA, 32 nt, Human
aucacugaaauauuuaugacagugcauaauuu

SEQ ID NO: 65307 - RNA, 32 nt, Human
aucacugaagacugccuggaaggggccgcgcg

SEQ ID NO: 65308 - RNA, 32 nt, Human
aucacugacagcagcuccuucuggacccaguc

SEQ ID NO: 65309 - RNA, 32 nt, Human
aucacugagcuccacuccuuccucauuuugcu

SEQ ID NO: 65310 - RNA, 32 nt, Human
aucacugaggaaggggaagugggcaaagcaga

SEQ ID NO: 65311 - RNA, 32 nt, Human
aucacugagguuggccagccccugccaagugu

SEQ ID NO: 65312 - RNA, 30 nt, Human
aucacugaucacugcagccuccacuuccca

SEQ ID NO: 65313 - RNA, 32 nt, Human
aucacugauccuguaaguugucaucaaaauau

SEQ ID NO: 65314 - RNA, 32 nt, Human
aucacugaugcugaagcugcaggccugagccc

SEQ ID NO: 65315 - RNA, 32 nt, Human
aucacugcaaccuccgccuccuggguucaaac

SEQ ID NO: 65316 - RNA, 32 nt, Human
aucacugcaaccuccgccuccuggguucaagc

SEQ ID NO: 65317 - RNA, 32 nt, Human
aucacugcaaccucugccuccuggguucaagc

SEQ ID NO: 65318 - RNA, 32 nt, Human
aucacugcacuccagccugggugacagagcga

SEQ ID NO: 65319 - RNA, 32 nt, Human
aucacugcacuccagcuugggugacagagcaa

SEQ ID NO: 65320 - RNA, 32 nt, Human
aucacugcacuccauccugggugacagagaga

SEQ ID NO: 65321 - RNA, 32 nt, Human
aucacugcagccuccaacuccugggcucaagu

SEQ ID NO: 65322 - RNA, 32 nt, Human
aucacugcaguccagccugggugacagagcaa

SEQ ID NO: 65323 - RNA, 32 nt, Human
aucacugccagcuaccgccauggaugcagcag

SEQ ID NO: 65324 - RNA, 32 nt, Human
aucacugccccaggcccagcugugucccuaca

SEQ ID NO: 65325 - RNA, 32 nt, Human
aucacugccguuggucucucaugacuuaacug

SEQ ID NO: 65326 - RNA, 31 nt, Human
aucacugccuucucugggcuucaguguccuu

SEQ ID NO: 65327 - RNA, 32 nt, Human
aucacugccuucuuccuccucuugccccauuc

SEQ ID NO: 65328 - RNA, 22 nt, Human
aucacugccuugaggcgcacuu

SEQ ID NO: 65329 - RNA, 25 nt, Human
aucacugcuauauucucauugcuga

SEQ ID NO: 65330 - RNA, 32 nt, Human
aucacugcucagugcaaccucugccucccagg

SEQ ID NO: 65331 - RNA, 32 nt, Human
aucacugcucuuucuuucuucuuugucauuug

SEQ ID NO: 65332 - RNA, 32 nt, Human
aucacuggacagaagccaugaggcagagccag

SEQ ID NO: 65333 - RNA, 32 nt, Human
aucacuggaggcaugcauaaugaauggagaau

SEQ ID NO: 65334 - RNA, 32 nt, Human
aucacuggaguacaggaguuuggggcuguagu

SEQ ID NO: 65335 - RNA, 32 nt, Human
aucacuggaguucgaggcugcagugagcuaug

SEQ ID NO: 65336 - RNA, 32 nt, Human
aucacuggaguuugagaccacccuggccaaca

SEQ ID NO: 65337 - RNA, 32 nt, Human
aucacuggcuuugcacagaaguaugcucuacu

SEQ ID NO: 65338 - RNA, 32 nt, Human
aucacugggauuauaggcaugagccauuaugc

SEQ ID NO: 65339 - RNA, 32 nt, Human
aucacugggcccagaggagaggagacagacac

SEQ ID NO: 65340 - RNA, 32 nt, Human
aucacuggggaauaacuugcuccuucuucucu

SEQ ID NO: 65341 - RNA, 32 nt, Human
aucacuggggcccagagagagcuguccgccag

SEQ ID NO: 65342 - RNA, 32 nt, Human
aucacugggguuucccauguugcagcacuucu

SEQ ID NO: 65343 - RNA, 29 nt, Human
aucacuguaaaugguaaucaguuggaauu

SEQ ID NO: 65344 - RNA, 32 nt, Human
aucacugucaguggagggaagcugcugacugu

SEQ ID NO: 65345 - RNA, 32 nt, Human
aucacuguccuuuugaaccaggaaaagucaca

SEQ ID NO: 65346 - RNA, 31 nt, Human
aucacugugagugucugaugggugggcaucc

SEQ ID NO: 65347 - RNA, 32 nt, Human
aucacugugccacucuacuccagccugggcaa

SEQ ID NO: 65348 - RNA, 32 nt, Human
aucacugugccccgguggagggggaggcccuu

SEQ ID NO: 65349 - RNA, 32 nt, Human
aucacugugcuacucuacuccagccugggcaa

SEQ ID NO: 65350 - RNA, 21 nt, Human
aucacuguggcugucuggaaa

SEQ ID NO: 65351 - RNA, 32 nt, Human
aucacuguggucagucuccugucccagcuuca

SEQ ID NO: 65352 - RNA, 32 nt, Human
aucacugugguguucuccaugucugcuagcca

SEQ ID NO: 65353 - RNA, 32 nt, Human
aucacugugguugccaaauauuuacuucagaa

SEQ ID NO: 65354 - RNA, 32 nt, Human
aucacuguuacaaguuuuguuuugagaauuaa

SEQ ID NO: 65355 - RNA, 32 nt, Human
aucacuuaaaggccauaugaccuuagacaagu

SEQ ID NO: 65356 - RNA, 32 nt, Human
aucacuuacgagcucaucaacuucuccauagu

SEQ ID NO: 65357 - RNA, 32 nt, Human
aucacuuagcuuuggacuaagaggguaagaga

SEQ ID NO: 65358 - RNA, 20 nt, Human
aucacuucaaaaccaagcaa

SEQ ID NO: 65359 - RNA, 32 nt, Human
aucacuucaaaacuccagcuugcccaauaagg

SEQ ID NO: 65360 - RNA, 32 nt, Human
aucacuucaacccaggaggcagaggcuacagu

SEQ ID NO: 65361 - RNA, 32 nt, Human
aucacuucagcccaggaggucaggucaaggcu

SEQ ID NO: 65362 - RNA, 32 nt, Human
aucacuucagcccaggagguggagguugcagu

SEQ ID NO: 65363 - RNA, 32 nt, Human
aucacuuccauggcauggauguucacauacag

SEQ ID NO: 65364 - RNA, 32 nt, Human
aucacuuccauuccuguugcuguuuacacaga

SEQ ID NO: 65365 - RNA, 32 nt, Human
aucacuucccauaggccugggguuucuagacu

SEQ ID NO: 65366 - RNA, 32 nt, Human
aucacuucugcugcuccacacacccagagaag

SEQ ID NO: 65367 - RNA, 31 nt, Human
aucacuugaaccaaggagguggagguugcag

SEQ ID NO: 65368 - RNA, 32 nt, Human
aucacuugaacccaaaaggcagacauugcagu

SEQ ID NO: 65369 - RNA, 32 nt, Human
aucacuugaacccaagaggcagaguuugcagu

SEQ ID NO: 65370 - RNA, 32 nt, Human
aucacuugaacccagaagacagguugcaguga

SEQ ID NO: 65371 - RNA, 32 nt, Human
aucacuugaacccagaaggcggaaguugcagu

SEQ ID NO: 65372 - RNA, 32 nt, Human
aucacuugaacccagaaggugcagguugcagu

SEQ ID NO: 65373 - RNA, 32 nt, Human
aucacuugaacccagcaggcagagguugcagu

SEQ ID NO: 65374 - RNA, 32 nt, Human
aucacuugaacccagcaggcggagguugcggu

SEQ ID NO: 65375 - RNA, 32 nt, Human
aucacuugaacccaggaagcagagguugcagu

SEQ ID NO: 65376 - RNA, 32 nt, Human
aucacuugaacccaggaagcgggguugcagug

SEQ ID NO: 65377 - RNA, 32 nt, Human
aucacuugaacccaggaaguggagguugcagu

SEQ ID NO: 65378 - RNA, 32 nt, Human
aucacuugaacccaggaauucaggcugcagua

SEQ ID NO: 65379 - RNA, 32 nt, Human
aucacuugaacccaggagacggagguugcggu

SEQ ID NO: 65380 - RNA, 32 nt, Human
aucacuugaacccaggagacggugguugcagu

SEQ ID NO: 65381 - RNA, 32 nt, Human
aucacuugaacccaggagaggaagguugcagu

SEQ ID NO: 65382 - RNA, 32 nt, Human
aucacuugaacccaggaggcagagauugcagu

SEQ ID NO: 65383 - RNA, 32 nt, Human
aucacuugaacccaggaggcagagguugcagu

SEQ ID NO: 65384 - RNA, 32 nt, Human
aucacuugaacccaggaggcagagguugcggu

SEQ ID NO: 65385 - RNA, 32 nt, Human
aucacuugaacccaggaggcagagugagccga

SEQ ID NO: 65386 - RNA, 32 nt, Human
aucacuugaacccaggaggcagaguuugcagu

SEQ ID NO: 65387 - RNA, 32 nt, Human
aucacuugaacccaggaggcagcuguugcagu

SEQ ID NO: 65388 - RNA, 32 nt, Human
aucacuugaacccaggaggcggaaguugcagu

SEQ ID NO: 65389 - RNA, 32 nt, Human
aucacuugaacccaggaggcggagguugcagu

SEQ ID NO: 65390 - RNA, 32 nt, Human
aucacuugaacccaggaggcggagguugcggu

SEQ ID NO: 65391 - RNA, 32 nt, Human
aucacuugaacccaggagguagaggcugcagu

SEQ ID NO: 65392 - RNA, 32 nt, Human
aucacuugaacccaggagguagagguugcagu

SEQ ID NO: 65393 - RNA, 32 nt, Human
aucacuugaacccaggagguggagauugcagu

SEQ ID NO: 65394 - RNA, 32 nt, Human
aucacuugaacccaggagguggaggcugcggu

SEQ ID NO: 65395 - RNA, 32 nt, Human
aucacuugaacccaggagguggagguugcagc

SEQ ID NO: 65396 - RNA, 32 nt, Human
aucacuugaacccaggagguggagguugcagu

SEQ ID NO: 65397 - RNA, 32 nt, Human
aucacuugaacccaggagguggagguuguagu

SEQ ID NO: 65398 - RNA, 32 nt, Human
aucacuugaacccaggaggugggcauugcagu

SEQ ID NO: 65399 - RNA, 32 nt, Human
aucacuugaacccaggagguggugguugcagu

SEQ ID NO: 65400 - RNA, 32 nt, Human
aucacuugaacccaggagguguugcagugaac

SEQ ID NO: 65401 - RNA, 31 nt, Human
aucacuugaacccaggagguugaggcugcag

SEQ ID NO: 65402 - RNA, 32 nt, Human
aucacuugaacccaggagguugaggcugcagu

SEQ ID NO: 65403 - RNA, 32 nt, Human
aucacuugaacccaggaguucaaaucugcagu

SEQ ID NO: 65404 - RNA, 32 nt, Human
aucacuugaacccaggcgguggaggcuauagu

SEQ ID NO: 65405 - RNA, 32 nt, Human
aucacuugaacccaguagaggaagguugcagu

SEQ ID NO: 65406 - RNA, 32 nt, Human
aucacuugaacccaguaggcggaaguugcagu

SEQ ID NO: 65407 - RNA, 32 nt, Human
aucacuugaaccccagaggcagaggcugaagu

SEQ ID NO: 65408 - RNA, 32 nt, Human
aucacuugaacccgagaggcggagguugcagu

SEQ ID NO: 65409 - RNA, 32 nt, Human
aucacuugaacccgagagguggagguugaagu

SEQ ID NO: 65410 - RNA, 32 nt, Human
aucacuugaacccgagagguggagguugcagu

SEQ ID NO: 65411 - RNA, 32 nt, Human
aucacuugaacccggaagcgaagguugcagug

SEQ ID NO: 65412 - RNA, 32 nt, Human
aucacuugaacccggaaggcagagguugcagu

SEQ ID NO: 65413 - RNA, 32 nt, Human
aucacuugaacccggaggcggagguugcggua

SEQ ID NO: 65414 - RNA, 32 nt, Human
aucacuugaacccgggaagcagagguugcggu

SEQ ID NO: 65415 - RNA, 32 nt, Human
aucacuugaacccgggaagcggagguugcagu

SEQ ID NO: 65416 - RNA, 32 nt, Human
aucacuugaacccgggaaguggagguugccgu

SEQ ID NO: 65417 - RNA, 32 nt, Human
aucacuugaacccgggagaugaagguugcagu

SEQ ID NO: 65418 - RNA, 32 nt, Human
aucacuugaacccgggaggcaaagguugcggu

SEQ ID NO: 65419 - RNA, 32 nt, Human
aucacuugaacccgggaggcagagggugcagu

SEQ ID NO: 65420 - RNA, 32 nt, Human
aucacuugaacccgggaggcagagguugcagu

SEQ ID NO: 65421 - RNA, 32 nt, Human
aucacuugaacccgggaggcagagguugcggu

SEQ ID NO: 65422 - RNA, 32 nt, Human
aucacuugaacccgggaggcagagguuguagu

SEQ ID NO: 65423 - RNA, 32 nt, Human
aucacuugaacccgggaggcggagcuugcagu

SEQ ID NO: 65424 - RNA, 32 nt, Human
aucacuugaacccgggaggcggagguugcagu

SEQ ID NO: 65425 - RNA, 32 nt, Human
aucacuugaacccgggaggcggagguugcggu

SEQ ID NO: 65426 - RNA, 32 nt, Human
aucacuugaacccgggaggcggaguugcggug

SEQ ID NO: 65427 - RNA, 32 nt, Human
aucacuugaacccgggagggagagguugcagu

SEQ ID NO: 65428 - RNA, 32 nt, Human
aucacuugaacccgggagguggagauugcagu

SEQ ID NO: 65429 - RNA, 32 nt, Human
aucacuugaacccgggagguggaggcugcagu

SEQ ID NO: 65430 - RNA, 32 nt, Human
aucacuugaacccgggagguggagguggaggu

SEQ ID NO: 65431 - RNA, 32 nt, Human
aucacuugaacccgggagguggagguggcagu

SEQ ID NO: 65432 - RNA, 32 nt, Human
aucacuugaacccgggagguggagguugcagu

SEQ ID NO: 65433 - RNA, 32 nt, Human
aucacuugaacccgggagguggcaguugcagg

SEQ ID NO: 65434 - RNA, 32 nt, Human
aucacuugaacccgggaguuaaagguugcagu

SEQ ID NO: 65435 - RNA, 32 nt, Human
aucacuugaacccgggaugcagagguugcagu

SEQ ID NO: 65436 - RNA, 32 nt, Human
aucacuugaacccgggcagcggagguugcagu

SEQ ID NO: 65437 - RNA, 32 nt, Human
aucacuugaacccuaaaggcagagguugcagu

SEQ ID NO: 65438 - RNA, 32 nt, Human
aucacuugaacccuggaggcagaggugguagu

SEQ ID NO: 65439 - RNA, 32 nt, Human
aucacuugaacccuggagguagaaguugcagu

SEQ ID NO: 65440 - RNA, 32 nt, Human
aucacuugaacccuggagguggagguugcagu

SEQ ID NO: 65441 - RNA, 32 nt, Human
aucacuugaagccaggaggcggagguugcagu

SEQ ID NO: 65442 - RNA, 32 nt, Human
aucacuugaccagcgcuuucuggcaagacguc

SEQ ID NO: 65443 - RNA, 32 nt, Human
aucacuugacccaggagguggaggucgcagug

SEQ ID NO: 65444 - RNA, 32 nt, Human
aucacuugagcccaggaggcggaggcugcagu

SEQ ID NO: 65445 - RNA, 32 nt, Human
aucacuugagcccaggagguggaggcugcaau

SEQ ID NO: 65446 - RNA, 32 nt, Human
aucacuugagcccaggagguggagguugcagu

SEQ ID NO: 65447 - RNA, 32 nt, Human
aucacuugagcccaggagguggagguuucagc

SEQ ID NO: 65448 - RNA, 31 nt, Human
aucacuugagcccaggagguugaggcugcag

SEQ ID NO: 65449 - RNA, 32 nt, Human
aucacuugagcccaggagguugaggcugcagu

SEQ ID NO: 65450 - RNA, 32 nt, Human
aucacuugagccccggagguugagacugcagu

SEQ ID NO: 65451 - RNA, 32 nt, Human
aucacuugagcccgggaaguggagguugcacu

SEQ ID NO: 65452 - RNA, 32 nt, Human
aucacuugagcccgggagguugaggcugcagu

SEQ ID NO: 65453 - RNA, 32 nt, Human
aucacuugagccugggagguugugguugcagu

SEQ ID NO: 65454 - RNA, 32 nt, Human
aucacuugaggaguucaagaccagccugguca

SEQ ID NO: 65455 - RNA, 32 nt, Human
aucacuugaggccaggaguuugaggcugcagu

SEQ ID NO: 65456 - RNA, 32 nt, Human
aucacuugaggucaggaauuugagacuagccu

SEQ ID NO: 65457 - RNA, 32 nt, Human
aucacuugaggucaggaguuugagacuagccu

SEQ ID NO: 65458 - RNA, 32 nt, Human
aucacuugaguccaggaggcggaggcugcagu

SEQ ID NO: 65459 - RNA, 32 nt, Human
aucacuugaguccaggaguccgagaccagccu

SEQ ID NO: 65460 - RNA, 32 nt, Human
aucacuugauggcugccaggaaggcauuugac

SEQ ID NO: 65461 - RNA, 32 nt, Human
aucacuugcacuuggaagaaugugcaauugag

SEQ ID NO: 65462 - RNA, 32 nt, Human
aucacuuggcucuucucugauaugaacugggc

SEQ ID NO: 65463 - RNA, 32 nt, Human
aucacuuggguccaggagguggaggcugcagu

SEQ ID NO: 65464 - RNA, 32 nt, Human
aucacuuuccaagauuccacauucauauuacu

SEQ ID NO: 65465 - RNA, 32 nt, Human
aucacuuuccauucuuucuugaucuuacccca

SEQ ID NO: 65466 - RNA, 32 nt, Human
aucacuuuggggagagcuggagaacaggauuc

SEQ ID NO: 65467 - RNA, 32 nt, Human
aucacuuuggucuccauuuuucccaggacagg

SEQ ID NO: 65468 - RNA, 32 nt, Human
aucacuuuucuggcuacagcaggacagaauau

SEQ ID NO: 65469 - RNA, 32 nt, Human
aucacuuuugcccaggcuggagugcaguggcg

SEQ ID NO: 65470 - RNA, 32 nt, Human
aucacuuuugcucuuugacuaauccuaugcug

SEQ ID NO: 65471 - RNA, 32 nt, Human
aucacuuuugcugugaugauguguucuugugu

SEQ ID NO: 65472 - RNA, 32 nt, Human
aucacuuuuguaggugguguuaguuuuuagac

SEQ ID NO: 65473 - RNA, 32 nt, Human
aucagaaaacacaagcuggagauaaauuuggu

SEQ ID NO: 65474 - RNA, 32 nt, Human
aucagaaaaggacuagauuuguuuaagaagaa

SEQ ID NO: 65475 - RNA, 32 nt, Human
aucagaaacacaugaaaaguugucacaaaugu

SEQ ID NO: 65476 - RNA, 32 nt, Human
aucagaaagggcagaaguaggggaagaauaau

SEQ ID NO: 65477 - RNA, 32 nt, Human
aucagaaauuaccuuugacgugcagugacagu

SEQ ID NO: 65478 - RNA, 32 nt, Human
aucagaaauuuuggaaggguucuuugaaauag

SEQ ID NO: 65479 - RNA, 32 nt, Human
aucagaaccauccugaccuucuuagggacgug

SEQ ID NO: 65480 - RNA, 32 nt, Human
aucagaagaagauggccacugcccaguugcag

SEQ ID NO: 65481 - RNA, 18 nt, Human
aucagaagcaccaaguaa

SEQ ID NO: 65482 - RNA, 32 nt, Human
aucagaagcccaagggguacauuuauugcuuu

SEQ ID NO: 65483 - RNA, 32 nt, Human
aucagaagccugguugaagaggaaagacuagu

SEQ ID NO: 65484 - RNA, 32 nt, Human
aucagaagcuccaaguuccugucuucuguuuu

SEQ ID NO: 65485 - RNA, 32 nt, Human
aucagaagcucguuccuucacacucaguggcg

SEQ ID NO: 65486 - RNA, 32 nt, Human
aucagaagcuguuccugccucuuccgucaagc

SEQ ID NO: 65487 - RNA, 32 nt, Human
aucagaaggagugugcuuuaggauuuauugca

SEQ ID NO: 65488 - RNA, 32 nt, Human
aucagaagggaacgagaaaagugaagaugcug

SEQ ID NO: 65489 - RNA, 32 nt, Human
aucagaagucauguagcuccucaggggacugu

SEQ ID NO: 65490 - RNA, 32 nt, Human
aucagaauaaaggagaucggcguuuauuucgu

SEQ ID NO: 65491 - RNA, 32 nt, Human
aucagaauggcaauauacauggagaggaggga

SEQ ID NO: 65492 - RNA, 32 nt, Human
aucagaauucuccagccacuccuggauaccau

SEQ ID NO: 65493 - RNA, 32 nt, Human
aucagaauugccuggagugugcacugaaacug

SEQ ID NO: 65494 - RNA, 32 nt, Human
aucagaauugcuucucagcacuuuggguaacu

SEQ ID NO: 65495 - RNA, 32 nt, Human
aucagacaaccagaagcacauccauuuuugua

SEQ ID NO: 65496 - RNA, 32 nt, Human
aucagacacagccccagaagggggcauuaugg

SEQ ID NO: 65497 - RNA, 32 nt, Human
aucagacagacaccucccucuggagaugcagu

SEQ ID NO: 65498 - RNA, 32 nt, Human
aucagacagaggauccugggaaagcacccuaa

SEQ ID NO: 65499 - RNA, 32 nt, Human
aucagacagauggggguugggagggccuagug

SEQ ID NO: 65500 - RNA, 32 nt, Human
aucagacagcuuguacucacaggccaaggaca

SEQ ID NO: 65501 - RNA, 32 nt, Human
aucagacaguaagagaaagccaaaaagcaaug

SEQ ID NO: 65502 - RNA, 31 nt, Human
aucagacaguuucaagacacacccagucacu

SEQ ID NO: 65503 - RNA, 32 nt, Human
aucagacaucacagaugcaacuucuuguaaug

SEQ ID NO: 65504 - RNA, 18 nt, Human
aucagacaugucaagcaa

SEQ ID NO: 65505 - RNA, 32 nt, Human
aucagaccaccagauguuaccgcucgguugaa

SEQ ID NO: 65506 - RNA, 32 nt, Human
aucagaccacugcccuccagccugggcaauag

SEQ ID NO: 65507 - RNA, 32 nt, Human
aucagaccauccuggcuaacacggugaaaccc

SEQ ID NO: 65508 - RNA, 32 nt, Human
aucagaccgugccucugcggggagaggcugga

SEQ ID NO: 65509 - RNA, 19 nt, Human
aucagacucccuucacuaa

SEQ ID NO: 65510 - RNA, 32 nt, Human
aucagacugccuggccagccuggggcacugaa

SEQ ID NO: 65511 - RNA, 32 nt, Human
aucagacuggacaacauauugaaaccucaugu

SEQ ID NO: 65512 - RNA, 32 nt, Human
aucagacugggaucccagcacgugggagccau

SEQ ID NO: 65513 - RNA, 32 nt, Human
aucagacuguuacugugccuauguggaaagaa

SEQ ID NO: 65514 - RNA, 32 nt, Human
aucagagaaauccuggcauacuugggcuuccu

SEQ ID NO: 65515 - RNA, 32 nt, Human
aucagagaaguuaagaaacuugcucaacauca

SEQ ID NO: 65516 - RNA, 32 nt, Human
aucagagacccaugauaaaucacuuacaacag

SEQ ID NO: 65517 - RNA, 31 nt, Human
aucagagagacggcuccucagaugcucagcu

SEQ ID NO: 65518 - RNA, 32 nt, Human
aucagagaggcagagguggcacaggacaguaa

SEQ ID NO: 65519 - RNA, 32 nt, Human
aucagagcaacagcuacaacaaugaagaauuc

SEQ ID NO: 65520 - RNA, 32 nt, Human
aucagagcagaggccugauuagcccacuuugg

SEQ ID NO: 65521 - RNA, 32 nt, Human
aucagagcaguuacucucagcagaacaccuau

SEQ ID NO: 65522 - RNA, 32 nt, Human
aucagagccacugucugagccagagucacagc

SEQ ID NO: 65523 - RNA, 32 nt, Human
aucagagcccuccagcccuucuuuuugaaacc

SEQ ID NO: 65524 - RNA, 32 nt, Human
aucagagccgagccuggaaucaaacugccucu

SEQ ID NO: 65525 - RNA, 32 nt, Human
aucagagcuagaugaaagggcaaugcuggcag

SEQ ID NO: 65526 - RNA, 32 nt, Human
aucagagcuagaugugggcagauuugaaaaca

SEQ ID NO: 65527 - RNA, 32 nt, Human
aucagagcucacugcagcuucaacaccccagg

SEQ ID NO: 65528 - RNA, 32 nt, Human
aucagagcucacugcagcuucaaucuccuggc

SEQ ID NO: 65529 - RNA, 32 nt, Human
aucagagcucacugcauccuugaccucccaga

SEQ ID NO: 65530 - RNA, 32 nt, Human
aucagagcuccagcuacacugagucuuucaau

SEQ ID NO: 65531 - RNA, 32 nt, Human
aucagagcuuucuaugagcuauaccugaccuu

SEQ ID NO: 65532 - RNA, 32 nt, Human
aucagaggagacaaaggacgaggacucugugg

SEQ ID NO: 65533 - RNA, 32 nt, Human
aucagaggagagaugguguugggagcccuuug

SEQ ID NO: 65534 - RNA, 32 nt, Human
aucagaggaggaagaggaagaggaggaggagg

SEQ ID NO: 65535 - RNA, 32 nt, Human
aucagaggaggccacacccacuccaggacacc

SEQ ID NO: 65536 - RNA, 32 nt, Human
aucagaggcagagaccuccugaugucuugguu

SEQ ID NO: 65537 - RNA, 32 nt, Human
aucagaggcccaggugccucagagccacauug

SEQ ID NO: 65538 - RNA, 32 nt, Human
aucagagggucugaggugacucuugcaggagc

SEQ ID NO: 65539 - RNA, 32 nt, Human
aucagaggucaucccuuccuccucuccuggaa

SEQ ID NO: 65540 - RNA, 32 nt, Human
aucagaggugcuguuccgugguucugcauuaa

SEQ ID NO: 65541 - RNA, 32 nt, Human
aucagagguggaggucaggggguuagguccag

SEQ ID NO: 65542 - RNA, 32 nt, Human
aucagagugauaaaauuccugucccuaggagg

SEQ ID NO: 65543 - RNA, 32 nt, Human
aucagaguguucaugaucuacuguaccuauuu

SEQ ID NO: 65544 - RNA, 32 nt, Human
aucagauacaauauugugucuacaauugcaaa

SEQ ID NO: 65545 - RNA, 32 nt, Human
aucagauacauaccaucuuuuuaguuccuaag

SEQ ID NO: 65546 - RNA, 32 nt, Human
aucagauacuccaugaaaggucacaauuucuc

SEQ ID NO: 65547 - RNA, 32 nt, Human
aucagauagacaaccaggccaccaagaggccc

SEQ ID NO: 65548 - RNA, 32 nt, Human
aucagaucagcccucaaagaauggggucugug

SEQ ID NO: 65549 - RNA, 32 nt, Human
aucagaucauaugaaaacaaucuaagauugug

SEQ ID NO: 65550 - RNA, 32 nt, Human
aucagauccccaaaacgguauccacugcauug

SEQ ID NO: 65551 - RNA, 18 nt, Human
aucagaucgugccucuuu

SEQ ID NO: 65552 - RNA, 23 nt, Human
aucagaucuacagcuccuggaua

SEQ ID NO: 65553 - RNA, 32 nt, Human
aucagaugauuucuucuaauuuggaggcaauu

SEQ ID NO: 65554 - RNA, 32 nt, Human
aucagaugcaaacuucaucacagcagggauuu

SEQ ID NO: 65555 - RNA, 32 nt, Human
aucagaugcaggaauaaagcaggaagaaggcu

SEQ ID NO: 65556 - RNA, 32 nt, Human
aucagaugcuuugaguuuaaacccaccaugua

SEQ ID NO: 65557 - RNA, 32 nt, Human
aucagaugucacuggaaucaagcauuaaaccu

SEQ ID NO: 65558 - RNA, 32 nt, Human
aucagaugucucuguguucgggaaggucuccg

SEQ ID NO: 65559 - RNA, 24 nt, Human
aucagauguugagucuccugaaca

SEQ ID NO: 65560 - RNA, 32 nt, Human
aucagauuacggacaacucauucucaucccag

SEQ ID NO: 65561 - RNA, 32 nt, Human
aucagauuggaucaccucccacccugaggccc

SEQ ID NO: 65562 - RNA, 32 nt, Human
aucagauuguaaucccaguacuuugggaggcc

SEQ ID NO: 65563 - RNA, 32 nt, Human
aucagauugugagcuccuggagggcaggagcu

SEQ ID NO: 65564 - RNA, 31 nt, Human
aucagcaacaacagcgaggauggaaauggaa

SEQ ID NO: 65565 - RNA, 32 nt, Human
aucagcaagacccaucccaggagaccuugaag

SEQ ID NO: 65566 - RNA, 32 nt, Human
aucagcaagauauaaagcagaaugauaauccu

SEQ ID NO: 65567 - RNA, 32 nt, Human
aucagcaaggugccucacagguugugauuuua

SEQ ID NO: 65568 - RNA, 32 nt, Human
aucagcaaugccccaaacuuucucauaagcac

SEQ ID NO: 65569 - RNA, 32 nt, Human
aucagcaauuugagagaaaggcaaaguuacug

SEQ ID NO: 65570 - RNA, 32 nt, Human
aucagcaccaacagcacaguucuucauaucca

SEQ ID NO: 65571 - RNA, 32 nt, Human
aucagcacuccucaucaucacucaucugccaa

SEQ ID NO: 65572 - RNA, 32 nt, Human
aucagcacugcacuguuagcugagagugcggg

SEQ ID NO: 65573 - RNA, 32 nt, Human
aucagcacuuucucccucugccagugucucag

SEQ ID NO: 65574 - RNA, 32 nt, Human
aucagcagagcacuucuccacagcggguguca

SEQ ID NO: 65575 - RNA, 32 nt, Human
aucagcagaugguagacaguguuuauguagau

SEQ ID NO: 65576 - RNA, 32 nt, Human
aucagcagcaacaacugucaguucauccugca

SEQ ID NO: 65577 - RNA, 23 nt, Human
aucagcagccucuuccuccucca

SEQ ID NO: 65578 - RNA, 32 nt, Human
aucagcagcucuuuuccagaucaaagaacuca

SEQ ID NO: 65579 - RNA, 32 nt, Human
aucagcaggagagagaagggugaauuguauaa

SEQ ID NO: 65580 - RNA, 32 nt, Human
aucagcaggccuuaccugcacuccaggcuccu

SEQ ID NO: 65581 - RNA, 32 nt, Human
aucagcaggcuccaguugaacacuagucugug

SEQ ID NO: 65582 - RNA, 32 nt, Human
aucagcagucuucagcuccuuacaaauuacca

SEQ ID NO: 65583 - RNA, 32 nt, Human
aucagcaguuguauucaaaugaagagcucauu

SEQ ID NO: 65584 - RNA, 32 nt, Human
aucagcaucucuaguuuaccaguacuuuaaua

SEQ ID NO: 65585 - RNA, 21 nt, Human
aucagcaucugggccaggcaa

SEQ ID NO: 65586 - RNA, 32 nt, Human
aucagcaugcucucccugccuugggcuuuucu

SEQ ID NO: 65587 - RNA, 32 nt, Human
aucagcaugcuggcucuccuccugugaagaau

SEQ ID NO: 65588 - RNA, 32 nt, Human
aucagcauuaaacuccagcccagaccaccuaa

SEQ ID NO: 65589 - RNA, 32 nt, Human
aucagcauugaaugguuguuaggcagccaugu

SEQ ID NO: 65590 - RNA, 32 nt, Human
aucagccaagaaccccagugcagggcagagac

SEQ ID NO: 65591 - RNA, 32 nt, Human
aucagccaauaaaagacaagaaggaauuucca

SEQ ID NO: 65592 - RNA, 32 nt, Human
aucagccaauucccagaauuuccccaggcaau

SEQ ID NO: 65593 - RNA, 21 nt, Human
aucagccacugccuucugcug

SEQ ID NO: 65594 - RNA, 32 nt, Human
aucagccagcaaccuuagagagaggaaagaca

SEQ ID NO: 65595 - RNA, 32 nt, Human
aucagccagguguggugguaugcaccaguggu

SEQ ID NO: 65596 - RNA, 21 nt, Human
aucagccaucuuguccugugc

SEQ ID NO: 65597 - RNA, 32 nt, Human
aucagccaugccacugaagagcuggagaccug

SEQ ID NO: 65598 - RNA, 32 nt, Human
aucagccauggagcagccacaggaggaagccc

SEQ ID NO: 65599 - RNA, 21 nt, Human
aucagccauugugaaacugcu

SEQ ID NO: 65600 - RNA, 28 nt, Human
aucagcccaagugcuuguuuuauuccaa

SEQ ID NO: 65601 - RNA, 32 nt, Human
aucagcccagggucacugggaacucucucaca

SEQ ID NO: 65602 - RNA, 32 nt, Human
aucagcccauggguggcugguggagagcucaa

SEQ ID NO: 65603 - RNA, 32 nt, Human
aucagccccugccaguuccacccagcugcagg

SEQ ID NO: 65604 - RNA, 32 nt, Human
aucagccccugggaacaggccccacgcccucu

SEQ ID NO: 65605 - RNA, 24 nt, Human
aucagcccgggcaacauggugaaa

SEQ ID NO: 65606 - RNA, 32 nt, Human
aucagcccuccagacuggggcagguccuguuc

SEQ ID NO: 65607 - RNA, 32 nt, Human
aucagcccuccugauugcaaaggaauacugag

SEQ ID NO: 65608 - RNA, 32 nt, Human
aucagcccuguuaguaggaauguggcuauggc

SEQ ID NO: 65609 - RNA, 24 nt, Human
aucagccuaggcaacauggugaaa

SEQ ID NO: 65610 - RNA, 20 nt, Human
aucagccucauucuaagcaa

SEQ ID NO: 65611 - RNA, 32 nt, Human
aucagccuccucugccugcagcucccuggcuc

SEQ ID NO: 65612 - RNA, 32 nt, Human
aucagccuccugccagcaguucuugaagcuuc

SEQ ID NO: 65613 - RNA, 24 nt, Human
aucagccugaccaacaugaugaaa

SEQ ID NO: 65614 - RNA, 24 nt, Human
aucagccugaccaauauggugaaa

SEQ ID NO: 65615 - RNA, 32 nt, Human
aucagccugagcaacauaacaagacccugucu

SEQ ID NO: 65616 - RNA, 32 nt, Human
aucagccugcagcugauuucauauuccaugcu

SEQ ID NO: 65617 - RNA, 32 nt, Human
aucagccugcugggacacacggguccuccuga

SEQ ID NO: 65618 - RNA, 32 nt, Human
aucagccuggacaauacggugagacccugucu

SEQ ID NO: 65619 - RNA, 32 nt, Human
aucagccuggagaacaaagugagacccccauc

SEQ ID NO: 65620 - RNA, 32 nt, Human
aucagccuggccaacauaaggagaccuaagug

SEQ ID NO: 65621 - RNA, 18 nt, Human
aucagccuggccaacaug

SEQ ID NO: 65622 - RNA, 24 nt, Human
aucagccuggccaacaugaugaaa

SEQ ID NO: 65623 - RNA, 19 nt, Human
aucagccuggccaacaugg

SEQ ID NO: 65624 - RNA, 24 nt, Human
aucagccuggccaacauggugaaa

SEQ ID NO: 65625 - RNA, 24 nt, Human
aucagccuggccaauauggugaaa

SEQ ID NO: 65626 - RNA, 32 nt, Human
aucagccuggcuugggaaauucauguuguuga

SEQ ID NO: 65627 - RNA, 32 nt, Human
aucagccugggaaacauagugagaccccgucu

SEQ ID NO: 65628 - RNA, 20 nt, Human
aucagccugggcaacauagc

SEQ ID NO: 65629 - RNA, 24 nt, Human
aucagccugggcaacauagugaaa

SEQ ID NO: 65630 - RNA, 24 nt, Human
aucagccugggcaacauggugaaa

SEQ ID NO: 65631 - RNA, 32 nt, Human
aucagccuguguaggcagucauggcaccaaag

SEQ ID NO: 65632 - RNA, 32 nt, Human
aucagccuuucuccucuucucuucuugggaca

SEQ ID NO: 65633 - RNA, 31 nt, Human
aucagcgcauuuucuacgccugugucauugu

SEQ ID NO: 65634 - RNA, 32 nt, Human
aucagcgcauuuucuacgccugugucauugug

SEQ ID NO: 65635 - RNA, 32 nt, Human
aucagcgguccuacuggaugaagagaagaugg

SEQ ID NO: 65636 - RNA, 32 nt, Human
aucagcguggccuuguucugucaccaauguac

SEQ ID NO: 65637 - RNA, 32 nt, Human
aucagcgugggguggaggagaaguggaguuug

SEQ ID NO: 65638 - RNA, 32 nt, Human
aucagcuaaacaccacgucacuucaugcaggu

SEQ ID NO: 65639 - RNA, 19 nt, Human
aucagcuaaauaaucaucu

SEQ ID NO: 65640 - RNA, 17 nt, Human
aucagcuaagaguccuc

SEQ ID NO: 65641 - RNA, 18 nt, Human
aucagcuaauacuucucu

SEQ ID NO: 65642 - RNA, 32 nt, Human
aucagcuagauuaagcaagaggcuccagaaga

SEQ ID NO: 65643 - RNA, 17 nt, Human
aucagcuagcuuauucu

SEQ ID NO: 65644 - RNA, 32 nt, Human
aucagcuagguccaagucuccaggcaggacua

SEQ ID NO: 65645 - RNA, 19 nt, Human
aucagcuauauacucugcu

SEQ ID NO: 65646 - RNA, 32 nt, Human
aucagcuaucaaaucugaauucuaagcgccau

SEQ ID NO: 65647 - RNA, 17 nt, Human
aucagcuauugcucuuu

SEQ ID NO: 65648 - RNA, 32 nt, Human
aucagcucaacaucuucuguuaguuuuagcug

SEQ ID NO: 65649 - RNA, 32 nt, Human
aucagcucaauggacccucugccuuaucacaa

SEQ ID NO: 65650 - RNA, 32 nt, Human
aucagcucacauauguaggauaaaauuccaaa

SEQ ID NO: 65651 - RNA, 32 nt, Human
aucagcucauuucccgcaccccauuucuugcu

SEQ ID NO: 65652 - RNA, 32 nt, Human
aucagcucccucuccuccucagcuacuuauuc

SEQ ID NO: 65653 - RNA, 32 nt, Human
aucagcucccuguccuccuuucuucccccguu

SEQ ID NO: 65654 - RNA, 32 nt, Human
aucagcuccuagaguggaaccaggaaggauuc

SEQ ID NO: 65655 - RNA, 18 nt, Human
aucagcuccugccucucu

SEQ ID NO: 65656 - RNA, 32 nt, Human
aucagcuccugccucucugccaugagggcuuu

SEQ ID NO: 65657 - RNA, 21 nt, Human
aucagcuccuggagcuucucu

SEQ ID NO: 65658 - RNA, 32 nt, Human
aucagcucucauucccuaugggucaagauuuc

SEQ ID NO: 65659 - RNA, 32 nt, Human
aucagcucucuggaccugggagcuccaagaua

SEQ ID NO: 65660 - RNA, 32 nt, Human
aucagcucucuuaaaauauauagcaagauuga

SEQ ID NO: 65661 - RNA, 21 nt, Human
aucagcucuugaugccuuucu

SEQ ID NO: 65662 - RNA, 32 nt, Human
aucagcugaagaagggagaggacuuggaggau

SEQ ID NO: 65663 - RNA, 22 nt, Human
aucagcugaccauugacaauca

SEQ ID NO: 65664 - RNA, 32 nt, Human
aucagcugagcuuggugguuugaggaggagag

SEQ ID NO: 65665 - RNA, 32 nt, Human
aucagcugaugagaggcuccagaaggauuucu

SEQ ID NO: 65666 - RNA, 18 nt, Human
aucagcugcagccccucu

SEQ ID NO: 65667 - RNA, 21 nt, Human
aucagcugcagcucccacuca

SEQ ID NO: 65668 - RNA, 32 nt, Human
aucagcugccaagggagcccuagaggggacug

SEQ ID NO: 65669 - RNA, 32 nt, Human
aucagcugccauccuuuccucucuccucaggg

SEQ ID NO: 65670 - RNA, 32 nt, Human
aucagcugccgccgccucuggagcucagucuc

SEQ ID NO: 65671 - RNA, 32 nt, Human
aucagcugccuaacuuauccaucuuugaacuu

SEQ ID NO: 65672 - RNA, 18 nt, Human
aucagcugcuccuccucu

SEQ ID NO: 65673 - RNA, 17 nt, Human
aucagcugcugcucuuu

SEQ ID NO: 65674 - RNA, 32 nt, Human
aucagcuggggccugggcuguggacagaagga

SEQ ID NO: 65675 - RNA, 32 nt, Human
aucagcugguuggauuucucaccaggauuguc

SEQ ID NO: 65676 - RNA, 32 nt, Human
aucagcuguccgcccugccugccugccugugu

SEQ ID NO: 65677 - RNA, 17 nt, Human
aucagcugugccucucu

SEQ ID NO: 65678 - RNA, 32 nt, Human
aucagcuucauaaacacuuuucuuccucccug

SEQ ID NO: 65679 - RNA, 18 nt, Human
aucagcuugagucucucu

SEQ ID NO: 65680 - RNA, 32 nt, Human
aucagcuuguacuggucucauaacucugguuu

SEQ ID NO: 65681 - RNA, 22 nt, Human
aucagcuuuagcucaaaaccaa

SEQ ID NO: 65682 - RNA, 32 nt, Human
aucagcuuuaggacugacauuucuaucuugaa

SEQ ID NO: 65683 - RNA, 23 nt, Human
aucagcuuucccuggcucaggga

SEQ ID NO: 65684 - RNA, 32 nt, Human
aucagcuuuguuacugaauuaccuaaaaccag

SEQ ID NO: 65685 - RNA, 19 nt, Human
aucagcuuuuccccucuca

SEQ ID NO: 65686 - RNA, 32 nt, Human
aucagcuuuucuuauuccuuuuuauuccuuuu

SEQ ID NO: 65687 - RNA, 32 nt, Human
aucaggaaagagagaccuuucuuguuucugga

SEQ ID NO: 65688 - RNA, 17 nt, Human
aucaggaaaugccuucu

SEQ ID NO: 65689 - RNA, 32 nt, Human
aucaggaagggacauggaugugcuccugccac

SEQ ID NO: 65690 - RNA, 22 nt, Human
aucaggaaggggcugccucagg

SEQ ID NO: 65691 - RNA, 32 nt, Human
aucaggaauagauuuguucaguucaguauuua

SEQ ID NO: 65692 - RNA, 32 nt, Human
aucaggaauuccagggaagaaacucuggagaa

SEQ ID NO: 65693 - RNA, 32 nt, Human
aucaggacaggcagagguggucagggagaagg

SEQ ID NO: 65694 - RNA, 32 nt, Human
aucaggaccagccuggucaagauggugaaacu

SEQ ID NO: 65695 - RNA, 32 nt, Human
aucaggaccagugcuucccaccaggcuuuccu

SEQ ID NO: 65696 - RNA, 32 nt, Human
aucaggaccauccuggcuaacaccgugaaacu

SEQ ID NO: 65697 - RNA, 32 nt, Human
aucaggaccauccuggcuaacauggugaaacc

SEQ ID NO: 65698 - RNA, 32 nt, Human
aucaggacugcacucucuucucggcugcacua

SEQ ID NO: 65699 - RNA, 32 nt, Human
aucaggacuuguauuagcagguucuggcuaga

SEQ ID NO: 65700 - RNA, 32 nt, Human
aucaggagaaugcauuucaugucugauucugc

SEQ ID NO: 65701 - RNA, 32 nt, Human
aucaggagcaguuucucaguguucaucuucca

SEQ ID NO: 65702 - RNA, 32 nt, Human
aucaggagccagaauuucaggauccuuuuucc

SEQ ID NO: 65703 - RNA, 32 nt, Human
aucaggagccaggagagagggggacagauagg

SEQ ID NO: 65704 - RNA, 32 nt, Human
aucaggaggaaucacugcuuuaaggguauuau

SEQ ID NO: 65705 - RNA, 32 nt, Human
aucaggaggcugaggcagagaaucacuugaac

SEQ ID NO: 65706 - RNA, 32 nt, Human
aucaggaggggagaagaaggagccucugcugc

SEQ ID NO: 65707 - RNA, 32 nt, Human
aucaggagucacugcaaggcccccaggguggg

SEQ ID NO: 65708 - RNA, 32 nt, Human
aucaggaguucaauaaaugucuguugaugacu

SEQ ID NO: 65709 - RNA, 32 nt, Human
aucaggaguucugccagguuuaaggucaccug

SEQ ID NO: 65710 - RNA, 32 nt, Human
aucaggauagcacucccaggccacuuuggucu

SEQ ID NO: 65711 - RNA, 25 nt, Human
aucaggaugaugcuggccucauaga

SEQ ID NO: 65712 - RNA, 32 nt, Human
aucaggauggcugcagugccagccuggggcag

SEQ ID NO: 65713 - RNA, 32 nt, Human
aucaggauuuccucuugaaccagaaccagucu

SEQ ID NO: 65714 - RNA, 32 nt, Human
aucaggauuuggaaguuuucgaauuaggagua

SEQ ID NO: 65715 - RNA, 32 nt, Human
aucaggcacacaacuucuguuuccuucucuug

SEQ ID NO: 65716 - RNA, 32 nt, Human
aucaggcacaggaggguucagcuuugggucaa

SEQ ID NO: 65717 - RNA, 32 nt, Human
aucaggcacuagaguuuaacugcagcggaaca

SEQ ID NO: 65718 - RNA, 32 nt, Human
aucaggcacugagccacugcgcccagucaaca

SEQ ID NO: 65719 - RNA, 32 nt, Human
aucaggcagccccaaacuggugcauaaugcau

SEQ ID NO: 65720 - RNA, 32 nt, Human
aucaggcagcuguccagccaacugucucucca

SEQ ID NO: 65721 - RNA, 32 nt, Human
aucaggcaggagagcaugccuuuugcuguggu

SEQ ID NO: 65722 - RNA, 32 nt, Human
aucaggcagggacaggacgggcaagcagggcc

SEQ ID NO: 65723 - RNA, 32 nt, Human
aucaggcagggagggggcagaggcaaaucacc

SEQ ID NO: 65724 - RNA, 32 nt, Human
aucaggcaguguuucugauaggaugugaaaug

SEQ ID NO: 65725 - RNA, 32 nt, Human
aucaggcaugcccucggguccuaacaaaguau

SEQ ID NO: 65726 - RNA, 32 nt, Human
aucaggccaacguccaccccagccucacauug

SEQ ID NO: 65727 - RNA, 32 nt, Human
aucaggccacacugcugccaccucucacacgc

SEQ ID NO: 65728 - RNA, 32 nt, Human
aucaggccacugcacuccagccugaacaacaa

SEQ ID NO: 65729 - RNA, 32 nt, Human
aucaggccacugcacuccagccugggcaacag

SEQ ID NO: 65730 - RNA, 32 nt, Human
aucaggccacugcacuccagccuggguaacag

SEQ ID NO: 65731 - RNA, 32 nt, Human
aucaggccagagguuuccaaucagccuugccu

SEQ ID NO: 65732 - RNA, 32 nt, Human
aucaggccauuacauuguccauguuaaaauua

SEQ ID NO: 65733 - RNA, 32 nt, Human
aucaggccauugcacuccagccugggcaauag

SEQ ID NO: 65734 - RNA, 32 nt, Human
aucaggccauugcacuucagccugggugacag

SEQ ID NO: 65735 - RNA, 22 nt, Human
aucaggcccagaccgccucucu

SEQ ID NO: 65736 - RNA, 23 nt, Human
aucaggccccguggccucaaggg

SEQ ID NO: 65737 - RNA, 32 nt, Human
aucaggcccuaucuaagaagcucaugguauac

SEQ ID NO: 65738 - RNA, 32 nt, Human
aucaggccgccgagggcugagcuccagagccg

SEQ ID NO: 65739 - RNA, 32 nt, Human
aucaggccggacaggagagggagggguggggg

SEQ ID NO: 65740 - RNA, 32 nt, Human
aucaggccgggugggagcgagcuugcgggcag

SEQ ID NO: 65741 - RNA, 32 nt, Human
aucaggccugggacacugcucuccuuccccgc

SEQ ID NO: 65742 - RNA, 32 nt, Human
aucaggcgaggugcuaugucucaggccuguaa

SEQ ID NO: 65743 - RNA, 32 nt, Human
aucaggcgugagccccucccacccugccagac

SEQ ID NO: 65744 - RNA, 32 nt, Human
aucaggcuacagcacuccagccugggcaacaa

SEQ ID NO: 65745 - RNA, 19 nt, Human
aucaggcuagaugccuccu

SEQ ID NO: 65746 - RNA, 19 nt, Human
aucaggcuggagugcagug

SEQ ID NO: 65747 - RNA, 32 nt, Human
aucagggaaaggcugccucuuugguaucucaa

SEQ ID NO: 65748 - RNA, 19 nt, Human
aucagggaaaugccucccu

SEQ ID NO: 65749 - RNA, 32 nt, Human
aucagggaagacucaguuacagagccucacag

SEQ ID NO: 65750 - RNA, 32 nt, Human
aucagggaagggugccugggacuuggaggguc

SEQ ID NO: 65751 - RNA, 32 nt, Human
aucagggacaguuuuuccacggaugggugaca

SEQ ID NO: 65752 - RNA, 32 nt, Human
aucagggacuccugcuuccugcccagagcccc

SEQ ID NO: 65753 - RNA, 32 nt, Human
aucagggagcauggugaggggcaacggcagga

SEQ ID NO: 65754 - RNA, 32 nt, Human
aucagggagccaggacacagaggggcagagca

SEQ ID NO: 65755 - RNA, 32 nt, Human
aucagggagcgccgcgcgaggguggggaccag

SEQ ID NO: 65756 - RNA, 32 nt, Human
aucagggaggcggagguuguggugagccgaga

SEQ ID NO: 65757 - RNA, 32 nt, Human
aucagggaucacugcaaccucugccuccuggg

SEQ ID NO: 65758 - RNA, 32 nt, Human
aucagggauguauacgcuuccuuggggcagac

SEQ ID NO: 65759 - RNA, 32 nt, Human
aucagggcacuucucaacuuaaaaccauuucu

SEQ ID NO: 65760 - RNA, 32 nt, Human
aucagggcccuccugcacuccacaugaugagg

SEQ ID NO: 65761 - RNA, 32 nt, Human
aucagggccgagcagaaccgcacucuucccaa

SEQ ID NO: 65762 - RNA, 32 nt, Human
aucagggcggaagccuuaaagcagcagcgggu

SEQ ID NO: 65763 - RNA, 32 nt, Human
aucagggcggggucgggugcacugguagccug

SEQ ID NO: 65764 - RNA, 32 nt, Human
aucagggcucacugcagccucgaccuccuggg

SEQ ID NO: 65765 - RNA, 32 nt, Human
aucagggcucacugcagcuuugacuucccagg

SEQ ID NO: 65766 - RNA, 32 nt, Human
aucagggcucacuguaaccuccgacuccuggg

SEQ ID NO: 65767 - RNA, 32 nt, Human
aucaggggaaugcggcaaggcacacagggcuc

SEQ ID NO: 65768 - RNA, 32 nt, Human
aucaggggcagaggcaugaaagagucggggcu

SEQ ID NO: 65769 - RNA, 32 nt, Human
aucaggggccuuccucugcccacagagggagu

SEQ ID NO: 65770 - RNA, 32 nt, Human
aucagggggucucuucuauucucccuuggguu

SEQ ID NO: 65771 - RNA, 32 nt, Human
aucagggguagcgagguugcaggagcuggcug

SEQ ID NO: 65772 - RNA, 31 nt, Human
aucagggugcucaaggauuggagaggagaca

SEQ ID NO: 65773 - RNA, 32 nt, Human
aucagggugggccugugcuggggauggggcag

SEQ ID NO: 65774 - RNA, 32 nt, Human
aucaggguuguucugggaguccugucagcuuc

SEQ ID NO: 65775 - RNA, 32 nt, Human
aucagguaaaacugaauguggagaugcagguu

SEQ ID NO: 65776 - RNA, 32 nt, Human
aucagguaaucaggaacucuucaguugaagcu

SEQ ID NO: 65777 - RNA, 32 nt, Human
aucagguacauuccagccuguuggcaacucca

SEQ ID NO: 65778 - RNA, 32 nt, Human
aucagguagcccagacuggugauggagcagag

SEQ ID NO: 65779 - RNA, 32 nt, Human
aucaggucagaaagggaugagugaagaagcug

SEQ ID NO: 65780 - RNA, 32 nt, Human
aucagguccaucucaaaggucacacguaauag

SEQ ID NO: 65781 - RNA, 32 nt, Human
aucagguccuaucaguuaagagcugcuuguua

SEQ ID NO: 65782 - RNA, 32 nt, Human
aucaggucucugcucuucugcagccucaucuc

SEQ ID NO: 65783 - RNA, 32 nt, Human
aucaggucuguuccuguuacuguugggucuug

SEQ ID NO: 65784 - RNA, 32 nt, Human
aucaggugaccuucgcaacaaaguuugccccc

SEQ ID NO: 65785 - RNA, 32 nt, Human
aucaggugagccacagagcccaccccagacac

SEQ ID NO: 65786 - RNA, 32 nt, Human
aucaggugauucaagaugcccaaaaaugaugg

SEQ ID NO: 65787 - RNA, 32 nt, Human
aucagguggccuggcuguuucuuuggaucccu

SEQ ID NO: 65788 - RNA, 15 nt, Human
aucagguggugggaa

SEQ ID NO: 65789 - RNA, 32 nt, Human
aucagguguccaccuuccaaugaugaagcaag

SEQ ID NO: 65790 - RNA, 32 nt, Human
aucagguguuuucagguuaaccgucagaaacg

SEQ ID NO: 65791 - RNA, 20 nt, Human
aucagguuaaauucugaaca

SEQ ID NO: 65792 - RNA, 32 nt, Human
aucaguaaaugaugucgguuugcccaguauca

SEQ ID NO: 65793 - RNA, 32 nt, Human
aucaguaacugcauuauugaauuguucuuaaa

SEQ ID NO: 65794 - RNA, 32 nt, Human
aucaguaaucacccauguguaucugcaccuuc

SEQ ID NO: 65795 - RNA, 32 nt, Human
aucaguacgacagccucagagcagagcaaggg

SEQ ID NO: 65796 - RNA, 32 nt, Human
aucaguagagacauugcuguuccugcccaucc

SEQ ID NO: 65797 - RNA, 32 nt, Human
aucaguagcaagagauggcccaacgaagauga

SEQ ID NO: 65798 - RNA, 32 nt, Human
aucaguaguccuccagccugggcagcuguccc

SEQ ID NO: 65799 - RNA, 32 nt, Human
aucaguauaaaauauauaauauacacuaauau

SEQ ID NO: 65800 - RNA, 18 nt, Human
aucaguaucugccucuuu

SEQ ID NO: 65801 - RNA, 32 nt, Human
aucaguauuugugguugggaaagauggacuua

SEQ ID NO: 65802 - RNA, 18 nt, Human
aucagucaaaggcagcaa

SEQ ID NO: 65803 - RNA, 19 nt, Human
aucagucaaaggcaugcag

SEQ ID NO: 65804 - RNA, 18 nt, Human
aucagucaagggaaagca

SEQ ID NO: 65805 - RNA, 32 nt, Human
aucagucaaugccacucuccacaacaacaaug

SEQ ID NO: 65806 - RNA, 32 nt, Human
aucagucacaagaaucaaauauguaaauuaug

SEQ ID NO: 65807 - RNA, 32 nt, Human
aucagucacucagcacagcccugggcacaucg

SEQ ID NO: 65808 - RNA, 32 nt, Human
aucagucacugcacuggugcaaaggcaagcag

SEQ ID NO: 65809 - RNA, 17 nt, Human
aucagucaggacgauca

SEQ ID NO: 65810 - RNA, 32 nt, Human
aucagucaggagcugggaguugagaccuccag

SEQ ID NO: 65811 - RNA, 18 nt, Human
aucagucagggugcguaa

SEQ ID NO: 65812 - RNA, 20 nt, Human
aucagucagguuuuaagcaa

SEQ ID NO: 65813 - RNA, 19 nt, Human
aucagucagugggcacaag

SEQ ID NO: 65814 - RNA, 19 nt, Human
aucagucaguuucaugcaa

SEQ ID NO: 65815 - RNA, 32 nt, Human
aucaguccacauggaauccugacaucccagcc

SEQ ID NO: 65816 - RNA, 32 nt, Human
aucagucccacucccuccugagguccccaagg

SEQ ID NO: 65817 - RNA, 32 nt, Human
aucagucccugccugcccugccuaggucuagc

SEQ ID NO: 65818 - RNA, 32 nt, Human
aucagucccugggcacccccuccugggcucgu

SEQ ID NO: 65819 - RNA, 20 nt, Human
aucaguccucuucuaagcaa

SEQ ID NO: 65820 - RNA, 32 nt, Human
aucagucgguccugggcuggcugugguguagg

SEQ ID NO: 65821 - RNA, 32 nt, Human
aucagucuccacagcuaccaucuugucgggca

SEQ ID NO: 65822 - RNA, 32 nt, Human
aucagucucggccagaaggaggacggagagcc

SEQ ID NO: 65823 - RNA, 32 nt, Human
aucagucucuggucccagcccaccccauggcc

SEQ ID NO: 65824 - RNA, 32 nt, Human
aucagucugcacuugaaauccccagggccuga

SEQ ID NO: 65825 - RNA, 32 nt, Human
aucagucuggacaacauggcaaaacccugucu

SEQ ID NO: 65826 - RNA, 32 nt, Human
aucagucuguaaccugcaaaugaugcuauuag

SEQ ID NO: 65827 - RNA, 18 nt, Human
aucagucuguucaagcaa

SEQ ID NO: 65828 - RNA, 32 nt, Human
aucagucuuaacugaaccagcucucagaauau

SEQ ID NO: 65829 - RNA, 32 nt, Human
aucagucuugcaaauggagaaccugcucucug

SEQ ID NO: 65830 - RNA, 32 nt, Human
aucagucuuguccugggagccggguccugcug

SEQ ID NO: 65831 - RNA, 32 nt, Human
aucagucuuuuucuuuaugacuucugcuuuuu

SEQ ID NO: 65832 - RNA, 32 nt, Human
aucagugaaacuacuuaacacagcuaauuuuu

SEQ ID NO: 65833 - RNA, 32 nt, Human
aucagugaaggaagagaaggccagcagaucag

SEQ ID NO: 65834 - RNA, 32 nt, Human
aucagugaauaaccccagcugcaccaugagcc

SEQ ID NO: 65835 - RNA, 32 nt, Human
aucagugacgugcagcuugaguucaccaagcu

SEQ ID NO: 65836 - RNA, 32 nt, Human
aucagugacuguuccucuaccugccucucaca

SEQ ID NO: 65837 - RNA, 32 nt, Human
aucagugagagcuuccuauaaagaacuccagg

SEQ ID NO: 65838 - RNA, 32 nt, Human
aucagugagauacaauccagucuucucaugca

SEQ ID NO: 65839 - RNA, 32 nt, Human
aucagugaggaugaagaagacuauguuuccuc

SEQ ID NO: 65840 - RNA, 32 nt, Human
aucagugauggaagaacagucucagaacucug

SEQ ID NO: 65841 - RNA, 32 nt, Human
aucagugcagagaagccacaugacauguuggg

SEQ ID NO: 65842 - RNA, 32 nt, Human
aucagugcagcucuccgggcgaugccagaaua

SEQ ID NO: 65843 - RNA, 32 nt, Human
aucagugcccucagcaaaccuguggugcaggg

SEQ ID NO: 65844 - RNA, 32 nt, Human
aucagugccugcuccugccugcccuggcccug

SEQ ID NO: 65845 - RNA, 32 nt, Human
aucagugccuggaaggcaggugugcccgucag

SEQ ID NO: 65846 - RNA, 20 nt, Human
aucagugcuauuaaaggugg

SEQ ID NO: 65847 - RNA, 32 nt, Human
aucaguggagaaauguauuauuuccaugauca

SEQ ID NO: 65848 - RNA, 32 nt, Human
aucaguggagagaaacgcagauuuaggacccu

SEQ ID NO: 65849 - RNA, 32 nt, Human
aucaguggaggaagaggagaaagagggaggga

SEQ ID NO: 65850 - RNA, 32 nt, Human
aucaguggaggaggcagugggggcagcagcag

SEQ ID NO: 65851 - RNA, 32 nt, Human
aucaguggagugagcugaccgaggcagagcga

SEQ ID NO: 65852 - RNA, 32 nt, Human
aucaguggcuaaaguugaaaagggguugguuu

SEQ ID NO: 65853 - RNA, 18 nt, Human
aucaguggcugccuuucu

SEQ ID NO: 65854 - RNA, 32 nt, Human
aucagugggaagcagaacaacagaaggaacuu

SEQ ID NO: 65855 - RNA, 32 nt, Human
aucagugggcagcucuggucaagcacagcaug

SEQ ID NO: 65856 - RNA, 32 nt, Human
aucagugggcaggccacauguagcaggaagga

SEQ ID NO: 65857 - RNA, 32 nt, Human
aucagugggccagagcucgccggguggccgca

SEQ ID NO: 65858 - RNA, 32 nt, Human
aucagugguggaagaacggucucagaacuguu

SEQ ID NO: 65859 - RNA, 32 nt, Human
aucagugguggaagaauggucucagaacuguu

SEQ ID NO: 65860 - RNA, 32 nt, Human
aucagugucauccagaagcaaggcuauggaga

SEQ ID NO: 65861 - RNA, 32 nt, Human
aucagugucccugggcaggaggaugacccagu

SEQ ID NO: 65862 - RNA, 21 nt, Human
aucagugucgaacgucucucu

SEQ ID NO: 65863 - RNA, 32 nt, Human
aucagugucucuaguccuacccaguuuuaaag

SEQ ID NO: 65864 - RNA, 32 nt, Human
aucaguguucucaguggcaguggguggaagug

SEQ ID NO: 65865 - RNA, 16 nt, Human
aucaguuaaaccucuc

SEQ ID NO: 65866 - RNA, 30 nt, Human
aucaguuacagaguccaguggaccauuuug

SEQ ID NO: 65867 - RNA, 32 nt, Human
aucaguuacgcugaagccauggaucaacuucu

SEQ ID NO: 65868 - RNA, 32 nt, Human
aucaguuacuaaaaacaaaauuugaauccuuu

SEQ ID NO: 65869 - RNA, 19 nt, Human
aucaguuaggugcaagcaa

SEQ ID NO: 65870 - RNA, 18 nt, Human
aucaguucagccaagcaa

SEQ ID NO: 65871 - RNA, 32 nt, Human
aucaguuccgccucugccccaagagccaagag

SEQ ID NO: 65872 - RNA, 32 nt, Human
aucaguugaacccaggagguggagguugcagu

SEQ ID NO: 65873 - RNA, 32 nt, Human
aucaguugacagccuacagagaacaaagacug

SEQ ID NO: 65874 - RNA, 32 nt, Human
aucaguugaccaaaaauguacaggcuuauuuc

SEQ ID NO: 65875 - RNA, 16 nt, Human
aucaguugacucucuc

SEQ ID NO: 65876 - RNA, 18 nt, Human
aucaguugagccccugcu

SEQ ID NO: 65877 - RNA, 32 nt, Human
aucaguugcucuugcugaccccucggagcaag

SEQ ID NO: 65878 - RNA, 32 nt, Human
aucaguugcuuuuacucaguguuuucaaauag

SEQ ID NO: 65879 - RNA, 32 nt, Human
aucaguuggaaauuuauaaccaaccaaaccaa

SEQ ID NO: 65880 - RNA, 32 nt, Human
aucaguuggaguuugugucuguugcuuguaau

SEQ ID NO: 65881 - RNA, 32 nt, Human
aucaguuuccagccuacagacuuucggggguu

SEQ ID NO: 65882 - RNA, 17 nt, Human
aucaguuucugccucuu

SEQ ID NO: 65883 - RNA, 32 nt, Human
aucaguuugcaggagcaggggugcaggauccu

SEQ ID NO: 65884 - RNA, 32 nt, Human
aucaguuuguguucucccuccuuuucucuccc

SEQ ID NO: 65885 - RNA, 32 nt, Human
aucaguuuguuuagggguggggaagugucagc

SEQ ID NO: 65886 - RNA, 32 nt, Human
aucaguuuuaucuuuugaaaggcacagucuaa

SEQ ID NO: 65887 - RNA, 32 nt, Human
aucaguuuuauggauaaagaagccugagacuc

SEQ ID NO: 65888 - RNA, 32 nt, Human
aucaguuuugcacuuuagagaguguuucugac

SEQ ID NO: 65889 - RNA, 32 nt, Human
aucauaaaggacaagaugguuaagucaauucu

SEQ ID NO: 65890 - RNA, 32 nt, Human
aucauaaauucuugaaguuaaauuuggcagag

SEQ ID NO: 65891 - RNA, 32 nt, Human
aucauaaauuuguacugaacuauuuuuccuua

SEQ ID NO: 65892 - RNA, 32 nt, Human
aucauaacacugcacuccaggcuggacaacac

SEQ ID NO: 65893 - RNA, 32 nt, Human
aucauaaccccaguacucaguaggcgcugaau

SEQ ID NO: 65894 - RNA, 32 nt, Human
aucauaaccuaugaaugauggaaguccaaaau

SEQ ID NO: 65895 - RNA, 32 nt, Human
aucauaacucacugcagccucaaacuucuggc

SEQ ID NO: 65896 - RNA, 32 nt, Human
aucauaagaaaugcugcacauauaauaauggc

SEQ ID NO: 65897 - RNA, 32 nt, Human
aucauaaugaugucaugugaucagaggaaacc

SEQ ID NO: 65898 - RNA, 32 nt, Human
aucauaaugguagauccacuggcagcuugcac

SEQ ID NO: 65899 - RNA, 32 nt, Human
aucauaauucuguaucuggaauacucauagag

SEQ ID NO: 65900 - RNA, 32 nt, Human
aucauaauugugcuuucacuucccaggcucca

SEQ ID NO: 65901 - RNA, 32 nt, Human
aucauacacaucaaccuccauguccuuagucc

SEQ ID NO: 65902 - RNA, 32 nt, Human
aucauaccacggcacuccagccugggugacag

SEQ ID NO: 65903 - RNA, 32 nt, Human
aucauaccacugcacuccagccuggcgacaga

SEQ ID NO: 65904 - RNA, 32 nt, Human
aucauaccacugcacuccagccugggcgacag

SEQ ID NO: 65905 - RNA, 32 nt, Human
aucauaccacugcacuccagccugggugacag

SEQ ID NO: 65906 - RNA, 32 nt, Human
aucauaccacugcacuccagucugggcaacag

SEQ ID NO: 65907 - RNA, 32 nt, Human
aucauaccacugcacugcagccugagugacac

SEQ ID NO: 65908 - RNA, 32 nt, Human
aucauaccacugcacuuaacuuggcaacagag

SEQ ID NO: 65909 - RNA, 32 nt, Human
aucauaccacuucauuccagccugggugacag

SEQ ID NO: 65910 - RNA, 32 nt, Human
aucauaccauugcacuccagccuaggcaacaa

SEQ ID NO: 65911 - RNA, 32 nt, Human
aucauaccauugcacuccagccugggcaacaa

SEQ ID NO: 65912 - RNA, 32 nt, Human
aucauacccucagagucugggccuaucaucuu

SEQ ID NO: 65913 - RNA, 32 nt, Human
aucauaccucacugcagcuucaacuuccuggg

SEQ ID NO: 65914 - RNA, 32 nt, Human
aucauacuacugcacuccagccugggcgacaa

SEQ ID NO: 65915 - RNA, 32 nt, Human
aucauacucaagaauaguacagauguguggaa

SEQ ID NO: 65916 - RNA, 32 nt, Human
aucauacucacugcagccuugaccgccugggc

SEQ ID NO: 65917 - RNA, 32 nt, Human
aucauacuccccagucaagacuucccugacag

SEQ ID NO: 65918 - RNA, 32 nt, Human
aucauacuucauuuugugguugucuuacauuc

SEQ ID NO: 65919 - RNA, 32 nt, Human
aucauacuugauacacacguuuuuauuugcac

SEQ ID NO: 65920 - RNA, 23 nt, Human
aucauagaagcagauagcuucag

SEQ ID NO: 65921 - RNA, 32 nt, Human
aucauagacugcauacuggagagaaaccuuac

SEQ ID NO: 65922 - RNA, 32 nt, Human
aucauagaucacugcagccucaaacuccuggg

SEQ ID NO: 65923 - RNA, 32 nt, Human
aucauagcaccaaacuccuuuguccaugagau

SEQ ID NO: 65924 - RNA, 32 nt, Human
aucauagcauaucuguuaugugucguugcuuu

SEQ ID NO: 65925 - RNA, 32 nt, Human
aucauagcucacuacagccuugaacuccuggg

SEQ ID NO: 65926 - RNA, 32 nt, Human
aucauagcucacuacagcuucaaaccccugaa

SEQ ID NO: 65927 - RNA, 32 nt, Human
aucauagcucacuaccgucuugaaucccuggg

SEQ ID NO: 65928 - RNA, 32 nt, Human
aucauagcucacuauaaccuugaacuccuggg

SEQ ID NO: 65929 - RNA, 32 nt, Human
aucauagcucacuccagccuccaacuccuggg

SEQ ID NO: 65930 - RNA, 32 nt, Human
aucauagcucacuccagccugaagcaagccuc

SEQ ID NO: 65931 - RNA, 32 nt, Human
aucauagcucacugaagccucaaccucccugg

SEQ ID NO: 65932 - RNA, 32 nt, Human
aucauagcucacugcaaccucaaacuccuggg

SEQ ID NO: 65933 - RNA, 32 nt, Human
aucauagcucacugcacccucaaccuccuggg

SEQ ID NO: 65934 - RNA, 32 nt, Human
aucauagcucacugcagacuccaacuccuggc

SEQ ID NO: 65935 - RNA, 32 nt, Human
aucauagcucacugcagccucaaacuccugga

SEQ ID NO: 65936 - RNA, 32 nt, Human
aucauagcucacugcagccucaaacuccuggg

SEQ ID NO: 65937 - RNA, 32 nt, Human
aucauagcucacugcagccucaaacucuuugg

SEQ ID NO: 65938 - RNA, 32 nt, Human
aucauagcucacugcagccucauacuccuggg

SEQ ID NO: 65939 - RNA, 32 nt, Human
aucauagcucacugcagccuccaacuccuggg

SEQ ID NO: 65940 - RNA, 32 nt, Human
aucauagcucacugcagccucgaacucuuggg

SEQ ID NO: 65941 - RNA, 32 nt, Human
aucauagcucacugcagccucgaaucccuggg

SEQ ID NO: 65942 - RNA, 32 nt, Human
aucauagcucacugcagccuggaacuccuggg

SEQ ID NO: 65943 - RNA, 32 nt, Human
aucauagcucacugcagccuggaacuccuugg

SEQ ID NO: 65944 - RNA, 32 nt, Human
aucauagcucacugcagccuggaauuccuggg

SEQ ID NO: 65945 - RNA, 32 nt, Human
aucauagcucacugcagccuucaacuucuggg

SEQ ID NO: 65946 - RNA, 32 nt, Human
aucauagcucacugcagccuugaacuccuggg

SEQ ID NO: 65947 - RNA, 32 nt, Human
aucauagcucacugcagccuugaauuccuagg

SEQ ID NO: 65948 - RNA, 32 nt, Human
aucauagcucacugcagccuugacccccuccc

SEQ ID NO: 65949 - RNA, 32 nt, Human
aucauagcucacugcagccuugagcuccuagg

SEQ ID NO: 65950 - RNA, 32 nt, Human
aucauagcucacugcagccuugagcuccuggg

SEQ ID NO: 65951 - RNA, 32 nt, Human
aucauagcucacugcagccuuuaacuacuggg

SEQ ID NO: 65952 - RNA, 32 nt, Human
aucauagcucacugcagcuucaaacucuuggg

SEQ ID NO: 65953 - RNA, 32 nt, Human
aucauagcucacugcagcuuugaccucccaga

SEQ ID NO: 65954 - RNA, 32 nt, Human
aucauagcucacugcagcuuugacuuccuggg

SEQ ID NO: 65955 - RNA, 32 nt, Human
aucauagcucacugcauccuccaguuccuggg

SEQ ID NO: 65956 - RNA, 32 nt, Human
aucauagcucacugcugccucaaccucccagg

SEQ ID NO: 65957 - RNA, 32 nt, Human
aucauagcucacugcugcugcuccacccacuu

SEQ ID NO: 65958 - RNA, 32 nt, Human
aucauagcucacuggagccucuaaugccuggg

SEQ ID NO: 65959 - RNA, 32 nt, Human
aucauagcucacuguaaccucaaacuccugga

SEQ ID NO: 65960 - RNA, 32 nt, Human
aucauagcucacuguaaccuuaaacuuggacu

SEQ ID NO: 65961 - RNA, 32 nt, Human
aucauagcucacuguacccuugaacuccuggg

SEQ ID NO: 65962 - RNA, 32 nt, Human
aucauagcucacuguagccucgaccuuccggg

SEQ ID NO: 65963 - RNA, 32 nt, Human
aucauagcucauagcucacugcagccucaaac

SEQ ID NO: 65964 - RNA, 31 nt, Human
aucauaggcaccuucuuuacaucugauuaca

SEQ ID NO: 65965 - RNA, 32 nt, Human
aucauaggucacugcagccucaaacucccaaa

SEQ ID NO: 65966 - RNA, 32 nt, Human
aucauaggugugagccaccucacccggccucc

SEQ ID NO: 65967 - RNA, 32 nt, Human
aucauaguaagaucacuuguguauuuuauauu

SEQ ID NO: 65968 - RNA, 32 nt, Human
aucauaguacagaacccgaccaaaguaggcug

SEQ ID NO: 65969 - RNA, 32 nt, Human
aucauagugaguuaauuugauauucauaucgu

SEQ ID NO: 65970 - RNA, 32 nt, Human
aucauaguuauuaaccauucuaauuaaaccuu

SEQ ID NO: 65971 - RNA, 32 nt, Human
aucauauacagaaaauuagcucaaaguggauu

SEQ ID NO: 65972 - RNA, 32 nt, Human
aucauauacuccacucuagcucccagaaucua

SEQ ID NO: 65973 - RNA, 32 nt, Human
aucauauaguaagcagaagaguugccaugaaa

SEQ ID NO: 65974 - RNA, 32 nt, Human
aucauaucacugcacuccagccuggcugacag

SEQ ID NO: 65975 - RNA, 32 nt, Human
aucauauccaugaaaaaugucauuuuaagaca

SEQ ID NO: 65976 - RNA, 32 nt, Human
aucauaucucaaauacauaaccugguaauaua

SEQ ID NO: 65977 - RNA, 32 nt, Human
aucauaugaggacacagccaggaagcaucauc

SEQ ID NO: 65978 - RNA, 32 nt, Human
aucauaugauccagcaaucccacugcuggaua

SEQ ID NO: 65979 - RNA, 32 nt, Human
aucauaugucauggaauggagcuaugaaaugu

SEQ ID NO: 65980 - RNA, 32 nt, Human
aucauaugugggcucucagagaacacagagcu

SEQ ID NO: 65981 - RNA, 32 nt, Human
aucauauucaaaggaggaaagaauggaugaca

SEQ ID NO: 65982 - RNA, 32 nt, Human
aucauauucgcuugugaccaugaagcuuguca

SEQ ID NO: 65983 - RNA, 32 nt, Human
aucauauuguagcuauuagggaagagaagaau

SEQ ID NO: 65984 - RNA, 32 nt, Human
aucauauuucauuuugcagauguggccauaaa

SEQ ID NO: 65985 - RNA, 32 nt, Human
aucauauuuccccuuggacacuugguuagacg

SEQ ID NO: 65986 - RNA, 32 nt, Human
aucaucaaaaccacagcauccuugaucagaga

SEQ ID NO: 65987 - RNA, 32 nt, Human
aucaucaagaagacuuuauggaugggcugucc

SEQ ID NO: 65988 - RNA, 32 nt, Human
aucaucacaaaacucaugaugcuccagcugcu

SEQ ID NO: 65989 - RNA, 24 nt, Human
aucaucaccaccaucaucaucauc

SEQ ID NO: 65990 - RNA, 32 nt, Human
aucaucacccugcucaagaaugugggcgagcg

SEQ ID NO: 65991 - RNA, 22 nt, Human
aucaucagaaaguccucccuga

SEQ ID NO: 65992 - RNA, 22 nt, Human
aucaucagaaugugucugaaaa

SEQ ID NO: 65993 - RNA, 32 nt, Human
aucaucagaucuuuuguacauaguggcaguau

SEQ ID NO: 65994 - RNA, 32 nt, Human
aucaucagaugugccuugagaauaguauaugu

SEQ ID NO: 65995 - RNA, 32 nt, Human
aucaucagccuauuuguaauaugucugccaca

SEQ ID NO: 65996 - RNA, 32 nt, Human
aucaucagcuauucaauaaaacacuaaucuag

SEQ ID NO: 65997 - RNA, 32 nt, Human
aucaucagcuauucaauaaaauacuaaucuag

SEQ ID NO: 65998 - RNA, 32 nt, Human
aucaucagcuuuccugauucugaggcuuuggg

SEQ ID NO: 65999 - RNA, 32 nt, Human
aucaucagggauuggccgauggagaugaaaug

SEQ ID NO: 66000 - RNA, 32 nt, Human
aucaucagucaaggaagacccacuggagagga

SEQ ID NO: 66001 - RNA, 32 nt, Human
aucaucagugaagaauuguauuucaagauuca

SEQ ID NO: 66002 - RNA, 32 nt, Human
aucaucaguuaggaauauuaacaugaaggaua

SEQ ID NO: 66003 - RNA, 32 nt, Human
aucaucauaggaguguggaagcugcugguaca

SEQ ID NO: 66004 - RNA, 24 nt, Human
aucaucaucaccaccaucaucauc

SEQ ID NO: 66005 - RNA, 32 nt, Human
aucaucaucauaaaugauucaaggccugaaug

SEQ ID NO: 66006 - RNA, 25 nt, Human
aucaucaucaucaucaucauccuca

SEQ ID NO: 66007 - RNA, 25 nt, Human
aucaucaucaucauccucauccuca

SEQ ID NO: 66008 - RNA, 32 nt, Human
aucaucaucgaugugaauaaauagacauauau

SEQ ID NO: 66009 - RNA, 32 nt, Human
aucaucaucuuccuccugugcagauggaaagg

SEQ ID NO: 66010 - RNA, 32 nt, Human
aucaucaucuucuaagagcugaucaagaaauu

SEQ ID NO: 66011 - RNA, 21 nt, Human
aucauccacagcccacccagc

SEQ ID NO: 66012 - RNA, 32 nt, Human
aucauccagguaaauggcacccaggugaguag

SEQ ID NO: 66013 - RNA, 24 nt, Human
aucauccauccacaugaacaugca

SEQ ID NO: 66014 - RNA, 24 nt, Human
aucauccauccaccccugcuguca

SEQ ID NO: 66015 - RNA, 32 nt, Human
aucauccauguccuccagaggagcuuccuccu

SEQ ID NO: 66016 - RNA, 32 nt, Human
aucaucccaacaaaauaugaaacuucuguaag

SEQ ID NO: 66017 - RNA, 32 nt, Human
aucauccccauccuccagagaaacccagggag

SEQ ID NO: 66018 - RNA, 32 nt, Human
aucaucccuaugccuuuccauccugguacaug

SEQ ID NO: 66019 - RNA, 32 nt, Human
aucaucccuccccaaccccagcucucucugcu

SEQ ID NO: 66020 - RNA, 32 nt, Human
aucaucccucuccaucuguggcucccugcccc

SEQ ID NO: 66021 - RNA, 32 nt, Human
aucauccucucuggggauggugggugggggug

SEQ ID NO: 66022 - RNA, 32 nt, Human
aucauccugaaaagaaggagacagggauuuuu

SEQ ID NO: 66023 - RNA, 32 nt, Human
aucauccugccaaacuccaggcucagaugaug

SEQ ID NO: 66024 - RNA, 32 nt, Human
aucauccugccaaacuccaggcucagauguca

SEQ ID NO: 66025 - RNA, 32 nt, Human
aucauccugccaaacuccaggcucagauuguc

SEQ ID NO: 66026 - RNA, 32 nt, Human
aucauccuggaguaccuuccuggaccacucuc

SEQ ID NO: 66027 - RNA, 32 nt, Human
aucauccugggagcaacugggaggcagagcac

SEQ ID NO: 66028 - RNA, 32 nt, Human
aucauccuguugaugaauucacagaauuaacu

SEQ ID NO: 66029 - RNA, 32 nt, Human
aucauccuuaaggagcuguaggccucucgagc

SEQ ID NO: 66030 - RNA, 32 nt, Human
aucauccuugaucuuauaucugagucucccau

SEQ ID NO: 66031 - RNA, 31 nt, Human
aucaucgccuccuagaauacccagcucaacg

SEQ ID NO: 66032 - RNA, 32 nt, Human
aucaucggcggcggcaggaucggccagaggag

SEQ ID NO: 66033 - RNA, 31 nt, Human
aucaucuacagccucugcccugguagcauaa

SEQ ID NO: 66034 - RNA, 32 nt, Human
aucaucuaucuaccuagauagacagagauauc

SEQ ID NO: 66035 - RNA, 32 nt, Human
aucaucuaucuuccuuuccuuuuucuuuucuu

SEQ ID NO: 66036 - RNA, 32 nt, Human
aucaucuaucuucuagaaaaggccaaccuugc

SEQ ID NO: 66037 - RNA, 32 nt, Human
aucaucucaggagguuucaggggccuguugac

SEQ ID NO: 66038 - RNA, 32 nt, Human
aucaucucauuuaauccucccuuccucccuau

SEQ ID NO: 66039 - RNA, 32 nt, Human
aucaucuccacugucccaagcagucacuaggu

SEQ ID NO: 66040 - RNA, 32 nt, Human
aucaucuccuccacuguuuccuuuucuauguc

SEQ ID NO: 66041 - RNA, 32 nt, Human
aucaucucucacaaaacacaggcaacccagac

SEQ ID NO: 66042 - RNA, 21 nt, Human
aucaucucugccaacagucuc

SEQ ID NO: 66043 - RNA, 32 nt, Human
aucaucucuggcaccuuccaccaguggagaga

SEQ ID NO: 66044 - RNA, 32 nt, Human
aucaucugaacccaggagacagguugcaguga

SEQ ID NO: 66045 - RNA, 32 nt, Human
aucaucugaagaucaucaucugaaaagaucag

SEQ ID NO: 66046 - RNA, 32 nt, Human
aucaucugagauuucagcaguggggccacgug

SEQ ID NO: 66047 - RNA, 32 nt, Human
aucaucugagccugggagggugaggaugcaug

SEQ ID NO: 66048 - RNA, 32 nt, Human
aucaucugaggguuugggcaucagcucugccu

SEQ ID NO: 66049 - RNA, 32 nt, Human
aucaucugaggucgggagauugagacuagccu

SEQ ID NO: 66050 - RNA, 32 nt, Human
aucaucugagugugggguaauugaguacauag

SEQ ID NO: 66051 - RNA, 32 nt, Human
aucaucugcagcugccuuccucggugggccuu

SEQ ID NO: 66052 - RNA, 32 nt, Human
aucaucugcaugugcaucaaggccaguccuau

SEQ ID NO: 66053 - RNA, 22 nt, Human
aucaucugccugcccuuccuga

SEQ ID NO: 66054 - RNA, 24 nt, Human
aucaucugccugcccuuccugaug

SEQ ID NO: 66055 - RNA, 25 nt, Human
aucaucugccuguuuuuucuugaua

SEQ ID NO: 66056 - RNA, 32 nt, Human
aucaucuggguggaucaccugaggucaggagu

SEQ ID NO: 66057 - RNA, 32 nt, Human
aucaucugucuauuuuucugucuaucaucuau

SEQ ID NO: 66058 - RNA, 32 nt, Human
aucaucuguuagccccuaacucuacugccuuc

SEQ ID NO: 66059 - RNA, 32 nt, Human
aucaucuuacaaaugccucuuugcuacuuugu

SEQ ID NO: 66060 - RNA, 25 nt, Human
aucaucuucacuucagacaauucag

SEQ ID NO: 66061 - RNA, 32 nt, Human
aucaucuucagccucaggaacaaggagcugaa

SEQ ID NO: 66062 - RNA, 32 nt, Human
aucaucuucaggauaaaauaaugaggacauua

SEQ ID NO: 66063 - RNA, 32 nt, Human
aucaucuuccuaggcagucucuuccccaaagu

SEQ ID NO: 66064 - RNA, 32 nt, Human
aucaucuucguuagugcagacaggucggagga

SEQ ID NO: 66065 - RNA, 32 nt, Human
aucaucuucuccuggccaaggcucugaccaug

SEQ ID NO: 66066 - RNA, 32 nt, Human
aucaucuuuagcucuccucucaguugaaugca

SEQ ID NO: 66067 - RNA, 32 nt, Human
aucaucuuucuuggaaaccaauugaaagcguc

SEQ ID NO: 66068 - RNA, 32 nt, Human
aucaucuuugaggccagaacagcccagcugug

SEQ ID NO: 66069 - RNA, 32 nt, Human
aucaugaauggaaugacacacucugaaccgaa

SEQ ID NO: 66070 - RNA, 32 nt, Human
aucaugaauguuucuacaacacugcugcauuc

SEQ ID NO: 66071 - RNA, 32 nt, Human
aucaugacacugcacuccagccugggcaacag

SEQ ID NO: 66072 - RNA, 32 nt, Human
aucaugacagugagacggugagauggauucgu

SEQ ID NO: 66073 - RNA, 32 nt, Human
aucaugaccauccuggccaacacagugaaacc

SEQ ID NO: 66074 - RNA, 32 nt, Human
aucaugacggaagaagagagugagccgcaauu

SEQ ID NO: 66075 - RNA, 32 nt, Human
aucaugacucacugcagccucaaacuccuggg

SEQ ID NO: 66076 - RNA, 32 nt, Human
aucaugagaaagagggaagaagaagaagggau

SEQ ID NO: 66077 - RNA, 32 nt, Human
aucaugagaaaugcuaucaacaucugugauuu

SEQ ID NO: 66078 - RNA, 32 nt, Human
aucaugagauggggagacuaucuuggauuauu

SEQ ID NO: 66079 - RNA, 32 nt, Human
aucaugaggaucagagaggaaaagucacuugc

SEQ ID NO: 66080 - RNA, 32 nt, Human
aucaugaggucagcagaucgagaccagccugg

SEQ ID NO: 66081 - RNA, 32 nt, Human
aucaugauccaguaucacaguauugugcuguu

SEQ ID NO: 66082 - RNA, 32 nt, Human
aucaugauggugcuacucagccugcuacaaau

SEQ ID NO: 66083 - RNA, 32 nt, Human
aucaugcaauagcaaagucacaguuauuccua

SEQ ID NO: 66084 - RNA, 32 nt, Human
aucaugcaaucuugcagugaagaaggaguauc

SEQ ID NO: 66085 - RNA, 32 nt, Human
aucaugcagcacaagcgggccaugcaggacau

SEQ ID NO: 66086 - RNA, 32 nt, Human
aucaugcaucacucucccuucugccuccuuca

SEQ ID NO: 66087 - RNA, 32 nt, Human
aucaugccacaccguacuccagccugggcgac

SEQ ID NO: 66088 - RNA, 32 nt, Human
aucaugccacaucacuccagccugggcaacag

SEQ ID NO: 66089 - RNA, 32 nt, Human
aucaugccaccaggaauaaccaggaaguuugc

SEQ ID NO: 66090 - RNA, 32 nt, Human
aucaugccaccgcacuccagccugggcaacag

SEQ ID NO: 66091 - RNA, 32 nt, Human
aucaugccaccgcacuucagccugggugacag

SEQ ID NO: 66092 - RNA, 32 nt, Human
aucaugccaccgcacuuccagccugggugaca

SEQ ID NO: 66093 - RNA, 32 nt, Human
aucaugccacuacacuccagccuggcgacaga

SEQ ID NO: 66094 - RNA, 32 nt, Human
aucaugccacuccacuccagucugggcgacag

SEQ ID NO: 66095 - RNA, 32 nt, Human
aucaugccacucuaccuugggugacagagaga

SEQ ID NO: 66096 - RNA, 32 nt, Human
aucaugccacugaacuccagccugggcaacag

SEQ ID NO: 66097 - RNA, 32 nt, Human
aucaugccacugaacuccagccugggugacag

SEQ ID NO: 66098 - RNA, 32 nt, Human
aucaugccacugcaaucuagccugggugacag

SEQ ID NO: 66099 - RNA, 32 nt, Human
aucaugccacugcaccccagcaccuggcuaca

SEQ ID NO: 66100 - RNA, 32 nt, Human
aucaugccacugcaccccagccugggcaacag

SEQ ID NO: 66101 - RNA, 32 nt, Human
aucaugccacugcacccuagcuuggguggcaa

SEQ ID NO: 66102 - RNA, 32 nt, Human
aucaugccacugcacccuagcuuggguggcag

SEQ ID NO: 66103 - RNA, 32 nt, Human
aucaugccacugcacuagagccugggcaacag

SEQ ID NO: 66104 - RNA, 32 nt, Human
aucaugccacugcacuccaaccugggcaacag

SEQ ID NO: 66105 - RNA, 32 nt, Human
aucaugccacugcacuccaaccugggcagcag

SEQ ID NO: 66106 - RNA, 32 nt, Human
aucaugccacugcacuccaaccugggcgacag

SEQ ID NO: 66107 - RNA, 32 nt, Human
aucaugccacugcacuccaaccugggugacag

SEQ ID NO: 66108 - RNA, 32 nt, Human
aucaugccacugcacuccacucugggcaacag

SEQ ID NO: 66109 - RNA, 32 nt, Human
aucaugccacugcacuccagcaugggugaugg

SEQ ID NO: 66110 - RNA, 32 nt, Human
aucaugccacugcacuccagcccaggugacag

SEQ ID NO: 66111 - RNA, 32 nt, Human
aucaugccacugcacuccagccugagugacag

SEQ ID NO: 66112 - RNA, 32 nt, Human
aucaugccacugcacuccagccuggacaacag

SEQ ID NO: 66113 - RNA, 32 nt, Human
aucaugccacugcacuccagccuggaugacag

SEQ ID NO: 66114 - RNA, 32 nt, Human
aucaugccacugcacuccagccugggcaacaa

SEQ ID NO: 66115 - RNA, 32 nt, Human
aucaugccacugcacuccagccugggcaacac

SEQ ID NO: 66116 - RNA, 32 nt, Human
aucaugccacugcacuccagccugggcaacag

SEQ ID NO: 66117 - RNA, 32 nt, Human
aucaugccacugcacuccagccugggcaacca

SEQ ID NO: 66118 - RNA, 32 nt, Human
aucaugccacugcacuccagccugggcaaugg

SEQ ID NO: 66119 - RNA, 32 nt, Human
aucaugccacugcacuccagccugggcagcag

SEQ ID NO: 66120 - RNA, 32 nt, Human
aucaugccacugcacuccagccugggcaugag

SEQ ID NO: 66121 - RNA, 32 nt, Human
aucaugccacugcacuccagccugggccagaa

SEQ ID NO: 66122 - RNA, 32 nt, Human
aucaugccacugcacuccagccugggcgacag

SEQ ID NO: 66123 - RNA, 32 nt, Human
aucaugccacugcacuccagccugggcgacgg

SEQ ID NO: 66124 - RNA, 32 nt, Human
aucaugccacugcacuccagccugggcgaugg

SEQ ID NO: 66125 - RNA, 32 nt, Human
aucaugccacugcacuccagccugggcggcag

SEQ ID NO: 66126 - RNA, 32 nt, Human
aucaugccacugcacuccagccuggggcugac

SEQ ID NO: 66127 - RNA, 32 nt, Human
aucaugccacugcacuccagccugggugacag

SEQ ID NO: 66128 - RNA, 32 nt, Human
aucaugccacugcacuccagcuugggcgacag

SEQ ID NO: 66129 - RNA, 32 nt, Human
aucaugccacugcacuccagcuugggugagag

SEQ ID NO: 66130 - RNA, 32 nt, Human
aucaugccacugcacuccagucuggaugacag

SEQ ID NO: 66131 - RNA, 32 nt, Human
aucaugccacugcacuccagucugggugacag

SEQ ID NO: 66132 - RNA, 32 nt, Human
aucaugccacugcacuccauccugggcaacaa

SEQ ID NO: 66133 - RNA, 32 nt, Human
aucaugccacugcacuccauccugggugacag

SEQ ID NO: 66134 - RNA, 32 nt, Human
aucaugccacugcacuccggccuaggugacag

SEQ ID NO: 66135 - RNA, 32 nt, Human
aucaugccacugcacuccuccgugggugacag

SEQ ID NO: 66136 - RNA, 32 nt, Human
aucaugccacugcacuccugccugggugacaa

SEQ ID NO: 66137 - RNA, 32 nt, Human
aucaugccacugcacucuagccuaggcuacag

SEQ ID NO: 66138 - RNA, 32 nt, Human
aucaugccacugcacucugggcuggguaacag

SEQ ID NO: 66139 - RNA, 32 nt, Human
aucaugccacugcacugcacuccagccugggu

SEQ ID NO: 66140 - RNA, 32 nt, Human
aucaugccacugcacugcagcccgggcgacag

SEQ ID NO: 66141 - RNA, 32 nt, Human
aucaugccacugcacuuccagccugggugaca

SEQ ID NO: 66142 - RNA, 32 nt, Human
aucaugccacugcacuuuagccugggcaacag

SEQ ID NO: 66143 - RNA, 32 nt, Human
aucaugccacugcacuuuagccugggugacag

SEQ ID NO: 66144 - RNA, 32 nt, Human
aucaugccacugcaugccagccugggcaacag

SEQ ID NO: 66145 - RNA, 32 nt, Human
aucaugccacugcauuccagccugggcaacag

SEQ ID NO: 66146 - RNA, 32 nt, Human
aucaugccacugcauuccagccugggcgacag

SEQ ID NO: 66147 - RNA, 32 nt, Human
aucaugccacugcauuccagccugugugaugg

SEQ ID NO: 66148 - RNA, 32 nt, Human
aucaugccacugcauucuagccugggcaacag

SEQ ID NO: 66149 - RNA, 32 nt, Human
aucaugccacugcauucuagcuuugauggcga

SEQ ID NO: 66150 - RNA, 32 nt, Human
aucaugccacuggacuccagccugggugaaag

SEQ ID NO: 66151 - RNA, 32 nt, Human
aucaugccacuguacuccagccuaggugacag

SEQ ID NO: 66152 - RNA, 32 nt, Human
aucaugccacuguacuccagccugggcgacag

SEQ ID NO: 66153 - RNA, 32 nt, Human
aucaugccacuguacuccagccugggugacag

SEQ ID NO: 66154 - RNA, 32 nt, Human
aucaugccagugcacuccagccugggcaacag

SEQ ID NO: 66155 - RNA, 32 nt, Human
aucaugccauggcacuccauccugggugacaa

SEQ ID NO: 66156 - RNA, 32 nt, Human
aucaugccauuacacuccagccugggcgacag

SEQ ID NO: 66157 - RNA, 32 nt, Human
aucaugccauuacuccagccugggugacauag

SEQ ID NO: 66158 - RNA, 32 nt, Human
aucaugccauuauacuccagccugggugacag

SEQ ID NO: 66159 - RNA, 32 nt, Human
aucaugccauugcacagcagccugggugacag

SEQ ID NO: 66160 - RNA, 32 nt, Human
aucaugccauugcacuccaaccugggugacag

SEQ ID NO: 66161 - RNA, 32 nt, Human
aucaugccauugcacuccagcccagguaacag

SEQ ID NO: 66162 - RNA, 32 nt, Human
aucaugccauugcacuccagcccggguuacag

SEQ ID NO: 66163 - RNA, 32 nt, Human
aucaugccauugcacuccagccuaggcaacaa

SEQ ID NO: 66164 - RNA, 32 nt, Human
aucaugccauugcacuccagccugagugacaa

SEQ ID NO: 66165 - RNA, 32 nt, Human
aucaugccauugcacuccagccuggacaacag

SEQ ID NO: 66166 - RNA, 32 nt, Human
aucaugccauugcacuccagccugggcaacaa

SEQ ID NO: 66167 - RNA, 32 nt, Human
aucaugccauugcacuccagccugggcaacag

SEQ ID NO: 66168 - RNA, 32 nt, Human
aucaugccauugcacuccagccugggcaacga

SEQ ID NO: 66169 - RNA, 32 nt, Human
aucaugccauugcacuccagccugggcgacaa

SEQ ID NO: 66170 - RNA, 32 nt, Human
aucaugccauugcacuccagccugggcgacag

SEQ ID NO: 66171 - RNA, 32 nt, Human
aucaugccauugcacuccagccugggugacaa

SEQ ID NO: 66172 - RNA, 32 nt, Human
aucaugccauugcacuccagccugggugacag

SEQ ID NO: 66173 - RNA, 32 nt, Human
aucaugccauugcacuccagccugggugauaa

SEQ ID NO: 66174 - RNA, 32 nt, Human
aucaugccauugcacuccagcuugggugacag

SEQ ID NO: 66175 - RNA, 32 nt, Human
aucaugccauugcacuccagucugggcgacag

SEQ ID NO: 66176 - RNA, 32 nt, Human
aucaugccauugcacugcaccugggcaacaag

SEQ ID NO: 66177 - RNA, 32 nt, Human
aucaugccauugcauuccagccuaggcaacac

SEQ ID NO: 66178 - RNA, 32 nt, Human
aucaugccauugcauuccagccuuggcgacag

SEQ ID NO: 66179 - RNA, 32 nt, Human
aucaugccauuguacuucaccugggcaacaag

SEQ ID NO: 66180 - RNA, 32 nt, Human
aucaugccccuguacuccagccugggugacag

SEQ ID NO: 66181 - RNA, 32 nt, Human
aucaugcccggucccaccccucccucugucca

SEQ ID NO: 66182 - RNA, 28 nt, Human
aucaugccgcugcauuccagccugggug

SEQ ID NO: 66183 - RNA, 32 nt, Human
aucaugccguuguacuccagcuugggcaacag

SEQ ID NO: 66184 - RNA, 32 nt, Human
aucaugccuacugcacuccagccugggcaaca

SEQ ID NO: 66185 - RNA, 32 nt, Human
aucaugccucacugcagccucgaccucccugg

SEQ ID NO: 66186 - RNA, 32 nt, Human
aucaugccucacugcagccucggcuuccuggg

SEQ ID NO: 66187 - RNA, 32 nt, Human
aucaugccuguaaucccagcacuuugggaagu

SEQ ID NO: 66188 - RNA, 32 nt, Human
aucaugccuguaaucccaguacuuugggaggc

SEQ ID NO: 66189 - RNA, 32 nt, Human
aucaugcgggugugugucuggggaagagacuu

SEQ ID NO: 66190 - RNA, 32 nt, Human
aucaugcuacugcacuccagccuaggugacag

SEQ ID NO: 66191 - RNA, 32 nt, Human
aucaugcuacugcacuccagccugggcgacag

SEQ ID NO: 66192 - RNA, 32 nt, Human
aucaugcuacugcacuccagccugggugacag

SEQ ID NO: 66193 - RNA, 32 nt, Human
aucaugcuacugcacuccagcuuagguggcaa

SEQ ID NO: 66194 - RNA, 32 nt, Human
aucaugcuacugcaugccagccugggugacaa

SEQ ID NO: 66195 - RNA, 32 nt, Human
aucaugcucauggggagggagcaggggaaggu

SEQ ID NO: 66196 - RNA, 32 nt, Human
aucaugcuccaauaugaucuauuccuucuucc

SEQ ID NO: 66197 - RNA, 32 nt, Human
aucaugcugugaggaagcccaagcuaaccaca

SEQ ID NO: 66198 - RNA, 32 nt, Human
aucaugcuugcagguuugagggcacaguguuu

SEQ ID NO: 66199 - RNA, 32 nt, Human
aucauggaaauggucgggauauuuacguggug

SEQ ID NO: 66200 - RNA, 32 nt, Human
aucauggaacauaagaaaaauaaaacagaugu

SEQ ID NO: 66201 - RNA, 32 nt, Human
aucauggagaacagcaugacagcugucuuugg

SEQ ID NO: 66202 - RNA, 32 nt, Human
aucauggaguuagcuaacagcccagggaacug

SEQ ID NO: 66203 - RNA, 32 nt, Human
aucauggaguuucuuuaaauguuuuccuagag

SEQ ID NO: 66204 - RNA, 26 nt, Human
aucauggaugcuggguggucugugua

SEQ ID NO: 66205 - RNA, 32 nt, Human
aucauggcaaacauguaaguggccaaagauaa

SEQ ID NO: 66206 - RNA, 32 nt, Human
aucauggcacugcacuccagccugggcaacag

SEQ ID NO: 66207 - RNA, 32 nt, Human
aucauggcaguuuggaaaacgggcuaacugua

SEQ ID NO: 66208 - RNA, 32 nt, Human
aucauggcaucauugcauuccagccugggcaa

SEQ ID NO: 66209 - RNA, 32 nt, Human
aucauggccaaagcagcugugauguggcaagc

SEQ ID NO: 66210 - RNA, 31 nt, Human
aucauggcccaggagugaggcauucagggcu

SEQ ID NO: 66211 - RNA, 32 nt, Human
aucauggcccaggagugaggcauucagggcug

SEQ ID NO: 66212 - RNA, 32 nt, Human
aucauggcucacugcaaccuccaccuccuggg

SEQ ID NO: 66213 - RNA, 32 nt, Human
aucauggcucacugcaaccucugccucccggu

SEQ ID NO: 66214 - RNA, 32 nt, Human
aucauggcucacugcaaccuugaccucccagg

SEQ ID NO: 66215 - RNA, 32 nt, Human
aucauggcucacugcagccccaaccuucaggg

SEQ ID NO: 66216 - RNA, 32 nt, Human
aucauggcucacugcagccucaaccuagccau

SEQ ID NO: 66217 - RNA, 32 nt, Human
aucauggcucacugcagccucaaccuugaaga

SEQ ID NO: 66218 - RNA, 32 nt, Human
aucauggcucacugcagccuccaccucccagg

SEQ ID NO: 66219 - RNA, 32 nt, Human
aucauggcucacugcagccuccaccuccuuga

SEQ ID NO: 66220 - RNA, 32 nt, Human
aucauggcucacugcagccucgaacuccuggg

SEQ ID NO: 66221 - RNA, 32 nt, Human
aucauggcucacugcagccucgaccucccagg

SEQ ID NO: 66222 - RNA, 32 nt, Human
aucauggcucacugcagccucgaccuccuggg

SEQ ID NO: 66223 - RNA, 32 nt, Human
aucauggcucacugcagccucgagcuccugag

SEQ ID NO: 66224 - RNA, 32 nt, Human
aucauggcucacugcagccuggagcuccuggg

SEQ ID NO: 66225 - RNA, 32 nt, Human
aucauggcucacugcagccuugaacucccaga

SEQ ID NO: 66226 - RNA, 32 nt, Human
aucauggcucacugcagccuugaacuccugag

SEQ ID NO: 66227 - RNA, 32 nt, Human
aucauggcucacugcagccuugaacuccuggc

SEQ ID NO: 66228 - RNA, 32 nt, Human
aucauggcucacugcagccuugaccuuccagc

SEQ ID NO: 66229 - RNA, 32 nt, Human
aucauggcucacugcagccuugacuucucagg

SEQ ID NO: 66230 - RNA, 32 nt, Human
aucauggcucacugcagucucaaucucucugg

SEQ ID NO: 66231 - RNA, 32 nt, Human
aucauggcucacugcagucucugccucccagg

SEQ ID NO: 66232 - RNA, 32 nt, Human
aucauggcucacugcggccucaaacuccgggg

SEQ ID NO: 66233 - RNA, 32 nt, Human
aucauggcucacuguaaccucugccucccagg

SEQ ID NO: 66234 - RNA, 32 nt, Human
aucauggcucacuguagccacaaccucucagg

SEQ ID NO: 66235 - RNA, 32 nt, Human
aucauggcucacuguagccucgaccuccuggg

SEQ ID NO: 66236 - RNA, 32 nt, Human
aucauggcucauugcaaccuugaauuccuggg

SEQ ID NO: 66237 - RNA, 32 nt, Human
aucaugggaaugauagcccagaacaaaaagaa

SEQ ID NO: 66238 - RNA, 32 nt, Human
aucaugggacugcacuccagccugggugacag

SEQ ID NO: 66239 - RNA, 32 nt, Human
aucaugggacuugccauuuaggaggauaauuu

SEQ ID NO: 66240 - RNA, 28 nt, Human
aucaugggaggcggcugguggugggcuc

SEQ ID NO: 66241 - RNA, 32 nt, Human
aucaugggccuaauuacagucacugcaguggc

SEQ ID NO: 66242 - RNA, 32 nt, Human
aucaugggccuggagagcagcagugagcucuu

SEQ ID NO: 66243 - RNA, 32 nt, Human
aucaugggcuguauuuucaaguugauucauaa

SEQ ID NO: 66244 - RNA, 32 nt, Human
aucauggggaaaggauaguaaccuggccgggu

SEQ ID NO: 66245 - RNA, 32 nt, Human
aucauggggaacauauucuucuaguuuaagau

SEQ ID NO: 66246 - RNA, 32 nt, Human
aucauggggaaggagugcugugauugacuagu

SEQ ID NO: 66247 - RNA, 32 nt, Human
aucauggggugagcuuugaagugcuggugguc

SEQ ID NO: 66248 - RNA, 32 nt, Human
aucauggguccaggcugauagcaauggacaga

SEQ ID NO: 66249 - RNA, 32 nt, Human
aucaugguaaauauaaacuaaccacaagauag

SEQ ID NO: 66250 - RNA, 32 nt, Human
aucaugguaggcagugcuugaaugagaaaagg

SEQ ID NO: 66251 - RNA, 32 nt, Human
aucaugguccagucuucggguuucaccuccua

SEQ ID NO: 66252 - RNA, 32 nt, Human
aucauggugaagaugacaugagaugcuaaugc

SEQ ID NO: 66253 - RNA, 32 nt, Human
aucauggugaagcugaugcagcguugccgagg

SEQ ID NO: 66254 - RNA, 32 nt, Human
aucaugguggggaccgagauagagagggagac

SEQ ID NO: 66255 - RNA, 32 nt, Human
aucauggugucaggaaggcugagauguauugg

SEQ ID NO: 66256 - RNA, 32 nt, Human
aucaugguucacugcaaucucgacuuccaguu

SEQ ID NO: 66257 - RNA, 28 nt, Human
aucaugguucacugcagccucagccucc

SEQ ID NO: 66258 - RNA, 32 nt, Human
aucaugguucacugcagccucgaccucccagg

SEQ ID NO: 66259 - RNA, 32 nt, Human
aucaugguucacugcagccuugaccuccaggg

SEQ ID NO: 66260 - RNA, 32 nt, Human
aucaugguucacugcagucuugaccucccagg

SEQ ID NO: 66261 - RNA, 32 nt, Human
aucaugguucacugcagucuugaccuuuuggg

SEQ ID NO: 66262 - RNA, 32 nt, Human
aucaugguugaauugcaaacagguuggauaga

SEQ ID NO: 66263 - RNA, 32 nt, Human
aucaugguugagugaggauaagggaaagaaua

SEQ ID NO: 66264 - RNA, 32 nt, Human
aucauguaagaauuuaaacuugcugaauguaa

SEQ ID NO: 66265 - RNA, 32 nt, Human
aucauguaaggauuuaaacuugcugaauguaa

SEQ ID NO: 66266 - RNA, 32 nt, Human
aucauguagggagggacggggaggggagccag

SEQ ID NO: 66267 - RNA, 32 nt, Human
aucauguauaugguuuguguucuuuuacugug

SEQ ID NO: 66268 - RNA, 32 nt, Human
aucauguauuuugccucauguauuuuuaucac

SEQ ID NO: 66269 - RNA, 32 nt, Human
aucaugucacugcacuccagccugggugacag

SEQ ID NO: 66270 - RNA, 32 nt, Human
aucaugucacugcacucuagcuugggagacag

SEQ ID NO: 66271 - RNA, 32 nt, Human
aucaugucacuguacuccagccugggcaacag

SEQ ID NO: 66272 - RNA, 32 nt, Human
aucaugucagcacauaguagguguggccuaug

SEQ ID NO: 66273 - RNA, 26 nt, Human
aucaugucagcuuaucuucuuugaua

SEQ ID NO: 66274 - RNA, 28 nt, Human
aucauguccauggcuggcagagcugucc

SEQ ID NO: 66275 - RNA, 32 nt, Human
aucauguccuuacacuccagccuggauaacag

SEQ ID NO: 66276 - RNA, 19 nt, Human
aucaugucuaaccaaguaa

SEQ ID NO: 66277 - RNA, 28 nt, Human
aucaugucuacagccucugccgccuccu

SEQ ID NO: 66278 - RNA, 32 nt, Human
aucaugucugguaaccgggugccugagcccca

SEQ ID NO: 66279 - RNA, 32 nt, Human
aucaugucuguaauccuagcacugugggaggc

SEQ ID NO: 66280 - RNA, 32 nt, Human
aucaugucuuccuuugugcuaaacccacugcu

SEQ ID NO: 66281 - RNA, 32 nt, Human
aucaugugcuguaaaguuuuccuaaaugaggc

SEQ ID NO: 66282 - RNA, 32 nt, Human
aucaugugcuuuggugauuguuucugaaaagg

SEQ ID NO: 66283 - RNA, 29 nt, Human
aucauguggcugcugucacccuugaccag

SEQ ID NO: 66284 - RNA, 32 nt, Human
aucauguggucuuaagcaaaucacaucaucuc

SEQ ID NO: 66285 - RNA, 32 nt, Human
aucauguuauccaucccucuccaggucagaaa

SEQ ID NO: 66286 - RNA, 32 nt, Human
aucauguuggacacaguugagggugacaugca

SEQ ID NO: 66287 - RNA, 32 nt, Human
aucauguuucuguguaccuagcaauguguucc

SEQ ID NO: 66288 - RNA, 21 nt, Human
aucauguuuucccuguuggua

SEQ ID NO: 66289 - RNA, 32 nt, Human
aucauguuuugcuacaguuugcaggugaaaaa

SEQ ID NO: 66290 - RNA, 32 nt, Human
aucauuaacccccagaccagccucagaacuga

SEQ ID NO: 66291 - RNA, 32 nt, Human
aucauuacccuuuaucacaugaauucuuggaa

SEQ ID NO: 66292 - RNA, 32 nt, Human
aucauuaccugguccugagagcugagcuguag

SEQ ID NO: 66293 - RNA, 32 nt, Human
aucauuacuucugcauuuuauuuuuguuuucu

SEQ ID NO: 66294 - RNA, 32 nt, Human
aucauuagauguccucaccccuccucacugcc

SEQ ID NO: 66295 - RNA, 32 nt, Human
aucauuagugaucuguguuguagaacaugagg

SEQ ID NO: 66296 - RNA, 32 nt, Human
aucauuaucacucuuaacccacccuaaaauuu

SEQ ID NO: 66297 - RNA, 32 nt, Human
aucauuaucugcuccuugucuacuucucuacu

SEQ ID NO: 66298 - RNA, 32 nt, Human
aucauuauuaucuauuuuuaaaagcuucaaaa

SEQ ID NO: 66299 - RNA, 32 nt, Human
aucauuauucacacuccucugcccucgauuug

SEQ ID NO: 66300 - RNA, 32 nt, Human
aucauuauugucacaaauaugcacaaaacaag

SEQ ID NO: 66301 - RNA, 32 nt, Human
aucauuauuugagacuguccugugccugauua

SEQ ID NO: 66302 - RNA, 32 nt, Human
aucauucaaggagccagacaugagguccugca

SEQ ID NO: 66303 - RNA, 32 nt, Human
aucauucacagugcccuccccacagcacuacc

SEQ ID NO: 66304 - RNA, 32 nt, Human
aucauucagagcacagccugaagagaccagug

SEQ ID NO: 66305 - RNA, 32 nt, Human
aucauucagcucaccuggugcaucuggguuga

SEQ ID NO: 66306 - RNA, 32 nt, Human
aucauucaggggcagccuggggacuugaggga

SEQ ID NO: 66307 - RNA, 32 nt, Human
aucauucauauguaaguaaauauguaccuuac

SEQ ID NO: 66308 - RNA, 32 nt, Human
aucauucauccaguuaagaauuugaagaagug

SEQ ID NO: 66309 - RNA, 32 nt, Human
aucauucaucccuuaacaggcacauuagaucu

SEQ ID NO: 66310 - RNA, 32 nt, Human
aucauucauggaccaguagauuguugaaaguu

SEQ ID NO: 66311 - RNA, 32 nt, Human
aucauuccaccuaccuccacuggaccaaaaag

SEQ ID NO: 66312 - RNA, 32 nt, Human
aucauuccacugcauuucagccugggggauac

SEQ ID NO: 66313 - RNA, 32 nt, Human
aucauuccagaaggaaaagugugucagggcaa

SEQ ID NO: 66314 - RNA, 32 nt, Human
aucauuccagccugggcaacaagagugaaacu

SEQ ID NO: 66315 - RNA, 32 nt, Human
aucauuccauuacacuccagccugggcaccag

SEQ ID NO: 66316 - RNA, 32 nt, Human
aucauucccagaaacauuucccagaaaauguu

SEQ ID NO: 66317 - RNA, 32 nt, Human
aucauuccuacaugauuccuggcggcagaaac

SEQ ID NO: 66318 - RNA, 32 nt, Human
aucauuccuccucacuaggagcacuuugaugu

SEQ ID NO: 66319 - RNA, 32 nt, Human
aucauuccuucucuuguuaaagguagaagaau

SEQ ID NO: 66320 - RNA, 32 nt, Human
aucauucgagagcagacagaaggggaguacag

SEQ ID NO: 66321 - RNA, 32 nt, Human
aucauucuccucugcugacaaccucugccgca

SEQ ID NO: 66322 - RNA, 32 nt, Human
aucauucucgacaauccucccugccccgaaac

SEQ ID NO: 66323 - RNA, 23 nt, Human
aucauucugacugcguucaaaaa

SEQ ID NO: 66324 - RNA, 32 nt, Human
aucauucuggcuggagagugcaaugugucauu

SEQ ID NO: 66325 - RNA, 22 nt, Human
aucauucuguuuuugcuuaaaa

SEQ ID NO: 66326 - RNA, 32 nt, Human
aucauucuuggcugugugcgguggcucacgcc

SEQ ID NO: 66327 - RNA, 32 nt, Human
aucauucuuguugccacagcuggagcucucaa

SEQ ID NO: 66328 - RNA, 32 nt, Human
aucauugaaauggauuggucagaaauugcuau

SEQ ID NO: 66329 - RNA, 32 nt, Human
aucauugaaauuacaguagauuuuuaagaaua

SEQ ID NO: 66330 - RNA, 32 nt, Human
aucauugagaagaggaagaagauggaagcuga

SEQ ID NO: 66331 - RNA, 32 nt, Human
aucauugauagucuugugugucucacauauca

SEQ ID NO: 66332 - RNA, 32 nt, Human
aucauugauuucaguguucaagacagaagaag

SEQ ID NO: 66333 - RNA, 32 nt, Human
aucauugcacuccagccugggugacagaguga

SEQ ID NO: 66334 - RNA, 32 nt, Human
aucauugcauuccagccugggcaacagagcaa

SEQ ID NO: 66335 - RNA, 31 nt, Human
aucauugccaaugggaucaccaaagccuucc

SEQ ID NO: 66336 - RNA, 32 nt, Human
aucauugcuagauuuaaagggacuuguaagca

SEQ ID NO: 66337 - RNA, 32 nt, Human
aucauugcucacuguagccucgaauuccuggg

SEQ ID NO: 66338 - RNA, 32 nt, Human
aucauugcucuccuggacaaaguuaacagcau

SEQ ID NO: 66339 - RNA, 32 nt, Human
aucauugcuucuagaagucugcaauucuuuac

SEQ ID NO: 66340 - RNA, 32 nt, Human
aucauuggaaaacaguggaaagaggcugugug

SEQ ID NO: 66341 - RNA, 32 nt, Human
aucauuggauucaguucccaaaauagaauguu

SEQ ID NO: 66342 - RNA, 32 nt, Human
aucauuggcuguacuguggagcugucacaucu

SEQ ID NO: 66343 - RNA, 32 nt, Human
aucauugguaccaauggcauugagaggaggug

SEQ ID NO: 66344 - RNA, 32 nt, Human
aucauuguccugagagagaggagcagcgcggu

SEQ ID NO: 66345 - RNA, 32 nt, Human
aucauugucuaugauaucugcaauggaaauga

SEQ ID NO: 66346 - RNA, 32 nt, Human
aucauugugcacccaccuuccucccagggacu

SEQ ID NO: 66347 - RNA, 32 nt, Human
aucauuguggaaggcaggaccucuccugggcu

SEQ ID NO: 66348 - RNA, 32 nt, Human
aucauuguguuggacucuaucucuccauguag

SEQ ID NO: 66349 - RNA, 32 nt, Human
aucauuguucucuccaucucccuagucaucau

SEQ ID NO: 66350 - RNA, 16 nt, Human
aucauuguugccucuc

SEQ ID NO: 66351 - RNA, 32 nt, Human
aucauuguuggccaggcuggucucaaacuccu

SEQ ID NO: 66352 - RNA, 32 nt, Human
aucauuuaaacccaggaggcagagguugcagu

SEQ ID NO: 66353 - RNA, 32 nt, Human
aucauuuacagugccacacggaacccuguauu

SEQ ID NO: 66354 - RNA, 32 nt, Human
aucauuuacugauuugcagugaugaauauuuu

SEQ ID NO: 66355 - RNA, 32 nt, Human
aucauuuagauuaacauuuggggccugauagg

SEQ ID NO: 66356 - RNA, 32 nt, Human
aucauuuagcucccacuuguaagugagaacaa

SEQ ID NO: 66357 - RNA, 32 nt, Human
aucauuuaguacuuuugucuucucccaugugc

SEQ ID NO: 66358 - RNA, 32 nt, Human
aucauuucacccaaguauuuuaaaguaugugu

SEQ ID NO: 66359 - RNA, 32 nt, Human
aucauuucaccucacuccagccugggugacag

SEQ ID NO: 66360 - RNA, 32 nt, Human
aucauuucacuugucaggagugugugugagug

SEQ ID NO: 66361 - RNA, 31 nt, Human
aucauuucagcccaggagguuguggauacag

SEQ ID NO: 66362 - RNA, 32 nt, Human
aucauuuccguuuugccugugacuguaaagag

SEQ ID NO: 66363 - RNA, 32 nt, Human
aucauuuccuuuguaacagaguuuuacgacuu

SEQ ID NO: 66364 - RNA, 32 nt, Human
aucauuucugaugauagcuugggaauagagau

SEQ ID NO: 66365 - RNA, 32 nt, Human
aucauuugaacccaggacacggagauugcagu

SEQ ID NO: 66366 - RNA, 32 nt, Human
aucauuugaacccgggaggcagagguugcagu

SEQ ID NO: 66367 - RNA, 32 nt, Human
aucauuugaaguauuuuuauauguauaucuau

SEQ ID NO: 66368 - RNA, 32 nt, Human
aucauuugagccaggagguugagguugcagug

SEQ ID NO: 66369 - RNA, 32 nt, Human
aucauuugagcccagagguagaggcugcagug

SEQ ID NO: 66370 - RNA, 32 nt, Human
aucauuugagcccaggaggcugaggcugcaau

SEQ ID NO: 66371 - RNA, 32 nt, Human
aucauuugcagcugucugcuucagaaagugag

SEQ ID NO: 66372 - RNA, 32 nt, Human
aucauuugcuuuguuggcaucuguguuuauuu

SEQ ID NO: 66373 - RNA, 32 nt, Human
aucauuugucauuuuucucuggcagauuguuu

SEQ ID NO: 66374 - RNA, 32 nt, Human
aucauuuuaaaccaaaaagcugcuggauaaca

SEQ ID NO: 66375 - RNA, 32 nt, Human
aucauuuuagggucucaaaaggccccaaagag

SEQ ID NO: 66376 - RNA, 32 nt, Human
aucauuuucagcucacgugucuugucauucuu

SEQ ID NO: 66377 - RNA, 32 nt, Human
aucauuuucauaauggaaaagacucagaaaau

SEQ ID NO: 66378 - RNA, 32 nt, Human
aucauuuuccaagguggcagagcugcuugcuc

SEQ ID NO: 66379 - RNA, 32 nt, Human
aucauuuuccuacggcguuagcacuuuaagca

SEQ ID NO: 66380 - RNA, 32 nt, Human
aucauuuugccuuugggaaaauugcaggggag

SEQ ID NO: 66381 - RNA, 32 nt, Human
aucauuuuucucucauaucuuccuaauaugca

SEQ ID NO: 66382 - RNA, 32 nt, Human
aucauuuuugcuuuucaauagacuuaaggagu

SEQ ID NO: 66383 - RNA, 32 nt, Human
auccaaaaauuagcugggcaugguggcaugca

SEQ ID NO: 66384 - RNA, 32 nt, Human
auccaaaacaaagaaguaccuggaguggagag

SEQ ID NO: 66385 - RNA, 32 nt, Human
auccaaaaccagccuggauuucauacauggac

SEQ ID NO: 66386 - RNA, 32 nt, Human
auccaaaccaagaagaaaucccugauuuaccu

SEQ ID NO: 66387 - RNA, 32 nt, Human
auccaaaccccaaggauucagagaaucuugua

SEQ ID NO: 66388 - RNA, 32 nt, Human
auccaaaccccagaccacuauccaggagccug

SEQ ID NO: 66389 - RNA, 32 nt, Human
auccaaagaacagccguuccugugcggcccuu

SEQ ID NO: 66390 - RNA, 25 nt, Human
auccaaauacaugaaucuaaagcug

SEQ ID NO: 66391 - RNA, 32 nt, Human
auccaaaucaaugucuugaauccuuugaaaac

SEQ ID NO: 66392 - RNA, 32 nt, Human
auccaaaucugcauugcaaugagacccccagg

SEQ ID NO: 66393 - RNA, 32 nt, Human
auccaaauguacugagguuaccacacacuuga

SEQ ID NO: 66394 - RNA, 23 nt, Human
auccaaauguguaccauugguga

SEQ ID NO: 66395 - RNA, 32 nt, Human
auccaaauuagaaaaugcuacucuccggauga

SEQ ID NO: 66396 - RNA, 32 nt, Human
auccaaauuuuuaaacuugcuuccuaauaagu

SEQ ID NO: 66397 - RNA, 32 nt, Human
auccaacaauguccugcuuccuuggggagcug

SEQ ID NO: 66398 - RNA, 32 nt, Human
auccaacaggagacccaagaauugguucaaau

SEQ ID NO: 66399 - RNA, 32 nt, Human
auccaacaguaggaguaagugguguacaccau

SEQ ID NO: 66400 - RNA, 32 nt, Human
auccaacauggugaagccccgucucuacuaaa

SEQ ID NO: 66401 - RNA, 32 nt, Human
auccaacccaugagcuucuccccagcuaaaca

SEQ ID NO: 66402 - RNA, 32 nt, Human
auccaacccaugaugagcuccucuuccuggcu

SEQ ID NO: 66403 - RNA, 32 nt, Human
auccaaccuaauguucaugcaggauagagaac

SEQ ID NO: 66404 - RNA, 32 nt, Human
auccaaccucacuacauuguagcucaguccaa

SEQ ID NO: 66405 - RNA, 32 nt, Human
auccaaccucuuggugcuucaguuuccucauc

SEQ ID NO: 66406 - RNA, 22 nt, Human
auccaaccuggggauuuuuuaa

SEQ ID NO: 66407 - RNA, 32 nt, Human
auccaacuaccuguggaauccuaaggccccuu

SEQ ID NO: 66408 - RNA, 32 nt, Human
auccaacuccaggggccccuguugcacucccc

SEQ ID NO: 66409 - RNA, 32 nt, Human
auccaacucugacuucggaggcauucccagcc

SEQ ID NO: 66410 - RNA, 32 nt, Human
auccaacuggacaacgugugggauggaccugg

SEQ ID NO: 66411 - RNA, 32 nt, Human
auccaagaaccacagcucaucugccaacaauc

SEQ ID NO: 66412 - RNA, 32 nt, Human
auccaagaacuaagggcaaccacugggcuccg

SEQ ID NO: 66413 - RNA, 32 nt, Human
auccaagaagauuuccuggcucuggcuuuuag

SEQ ID NO: 66414 - RNA, 32 nt, Human
auccaagacaacagggugcacugcugccugua

SEQ ID NO: 66415 - RNA, 22 nt, Human
auccaagaggccaguccuccau

SEQ ID NO: 66416 - RNA, 32 nt, Human
auccaagaugcugaguggaaguggacccuggg

SEQ ID NO: 66417 - RNA, 25 nt, Human
auccaagcagauaaaaucaaggcug

SEQ ID NO: 66418 - RNA, 32 nt, Human
auccaagccuaucauuguaguaggguacuucu

SEQ ID NO: 66419 - RNA, 32 nt, Human
auccaagccuccaaggucaggaugggaucucu

SEQ ID NO: 66420 - RNA, 23 nt, Human
auccaagccugccucccaagguc

SEQ ID NO: 66421 - RNA, 32 nt, Human
auccaaggcucuucccaggccugcuggcugca

SEQ ID NO: 66422 - RNA, 32 nt, Human
auccaagggaaaggggaaaucucacagggcag

SEQ ID NO: 66423 - RNA, 32 nt, Human
auccaagggaaaguggggaggagccagcucuc

SEQ ID NO: 66424 - RNA, 32 nt, Human
auccaagggaaugaacaagaagacuaccuuga

SEQ ID NO: 66425 - RNA, 30 nt, Human
auccaaguaguauauggacaguccagggcu

SEQ ID NO: 66426 - RNA, 32 nt, Human
auccaaguauuugggagugaagaugguuguug

SEQ ID NO: 66427 - RNA, 23 nt, Human
auccaagucacccagcucuggaa

SEQ ID NO: 66428 - RNA, 32 nt, Human
auccaagucauagcuucaugucucucugcgcu

SEQ ID NO: 66429 - RNA, 23 nt, Human
auccaagugauccucccaccuca

SEQ ID NO: 66430 - RNA, 32 nt, Human
auccaaguuuuacccauuaagaaacugaagau

SEQ ID NO: 66431 - RNA, 20 nt, Human
auccaauagucuuccuccau

SEQ ID NO: 66432 - RNA, 32 nt, Human
auccaauauuguaauccuagcacuuugggagg

SEQ ID NO: 66433 - RNA, 32 nt, Human
auccaaucagccaguggccaggagagaacaaa

SEQ ID NO: 66434 - RNA, 32 nt, Human
auccaaucccugcugccaccuccugggaugga

SEQ ID NO: 66435 - RNA, 32 nt, Human
auccaaucugaauuuaccuggaagaggccuug

SEQ ID NO: 66436 - RNA, 32 nt, Human
auccaaugacaaugguacuggcauacacaggg

SEQ ID NO: 66437 - RNA, 32 nt, Human
auccaaugagauaaaaagugaaauuucccaga

SEQ ID NO: 66438 - RNA, 32 nt, Human
auccaauguugacuuagccaugguagaacucu

SEQ ID NO: 66439 - RNA, 32 nt, Human
auccaauuguugggaaagcaucuuaaguuuaa

SEQ ID NO: 66440 - RNA, 32 nt, Human
auccaauuuagcaaaauugguaccaaaaugau

SEQ ID NO: 66441 - RNA, 32 nt, Human
auccacaaagcuacggacuugcagcccacggg

SEQ ID NO: 66442 - RNA, 32 nt, Human
auccacaaauaccaccagcugcuucauccaca

SEQ ID NO: 66443 - RNA, 32 nt, Human
auccacaacugacucacacuuccccagacagg

SEQ ID NO: 66444 - RNA, 21 nt, Human
auccacaagaggcuuggcaaa

SEQ ID NO: 66445 - RNA, 22 nt, Human
auccacaaucccauuacuggga

SEQ ID NO: 66446 - RNA, 19 nt, Human
auccacacaacaccaggac

SEQ ID NO: 66447 - RNA, 22 nt, Human
auccacacaacaccaggacuua

SEQ ID NO: 66448 - RNA, 32 nt, Human
auccacacacaauccacacacgcauagcaaac

SEQ ID NO: 66449 - RNA, 32 nt, Human
auccacacacuaaucaucucagugucuuuaau

SEQ ID NO: 66450 - RNA, 32 nt, Human
auccacacacugcacccccacuccuggggcag

SEQ ID NO: 66451 - RNA, 32 nt, Human
auccacacagcccgguucaagaggagggagua

SEQ ID NO: 66452 - RNA, 19 nt, Human
auccacacaggaaaggacu

SEQ ID NO: 66453 - RNA, 32 nt, Human
auccacacaucuuuagaacuagucgucuccuc

SEQ ID NO: 66454 - RNA, 32 nt, Human
auccacaccacucuucgccacccggcugggag

SEQ ID NO: 66455 - RNA, 32 nt, Human
auccacaccaugguuuucuucuaguuccugau

SEQ ID NO: 66456 - RNA, 32 nt, Human
auccacacccaccuaucccugcagcuaauuua

SEQ ID NO: 66457 - RNA, 32 nt, Human
auccacacugcacacugccuagcccaaaacgu

SEQ ID NO: 66458 - RNA, 32 nt, Human
auccacacuucuguuaacuucccaccaccauc

SEQ ID NO: 66459 - RNA, 23 nt, Human
auccacagcuaagacaccaggac

SEQ ID NO: 66460 - RNA, 32 nt, Human
auccacagcuacuuacucaucuugccucuggc

SEQ ID NO: 66461 - RNA, 32 nt, Human
auccacagcucuguuaaauaaaugggagaaau

SEQ ID NO: 66462 - RNA, 20 nt, Human
auccacagcuuuuccuccau

SEQ ID NO: 66463 - RNA, 32 nt, Human
auccacaggguaacagugguuaccagcgaugc

SEQ ID NO: 66464 - RNA, 32 nt, Human
auccacaggguagagguuggguguguguacgg

SEQ ID NO: 66465 - RNA, 32 nt, Human
auccacagguuacaucuuuacuauucuguuac

SEQ ID NO: 66466 - RNA, 32 nt, Human
auccacagucuacaaaaccccacagcuccuga

SEQ ID NO: 66467 - RNA, 32 nt, Human
auccacaguguggauggauacuuauuugguga

SEQ ID NO: 66468 - RNA, 32 nt, Human
auccacauauccacaagaagugccucuuaggu

SEQ ID NO: 66469 - RNA, 19 nt, Human
auccacauccccuccccca

SEQ ID NO: 66470 - RNA, 31 nt, Human
auccacaugagcuacucucagggcaccaguc

SEQ ID NO: 66471 - RNA, 32 nt, Human
auccaccaagacuuuagucucucccaacccag

SEQ ID NO: 66472 - RNA, 32 nt, Human
auccaccagguaacaaugguuacccaugagga

SEQ ID NO: 66473 - RNA, 32 nt, Human
auccaccagguaacaaugguuacccuagaggc

SEQ ID NO: 66474 - RNA, 32 nt, Human
auccaccagguaacacugguuucccacgaggc

SEQ ID NO: 66475 - RNA, 32 nt, Human
auccaccagguaacagugguuacacacgaggu

SEQ ID NO: 66476 - RNA, 32 nt, Human
auccaccagguaacagugguuacccaagaggc

SEQ ID NO: 66477 - RNA, 32 nt, Human
auccaccagguaacagugguuacccuagagac

SEQ ID NO: 66478 - RNA, 32 nt, Human
auccaccagguaacagugguuacccuagaggc

SEQ ID NO: 66479 - RNA, 32 nt, Human
auccaccagguaacagugguuaccugcgaggc

SEQ ID NO: 66480 - RNA, 32 nt, Human
auccaccagguaacagugguuaccugggagac

SEQ ID NO: 66481 - RNA, 32 nt, Human
auccaccauaaggaaaggagacccuggaccaa

SEQ ID NO: 66482 - RNA, 32 nt, Human
auccaccaucauccuucaugucugcgauggag

SEQ ID NO: 66483 - RNA, 32 nt, Human
auccaccaugccacaugacagccagccugaca

SEQ ID NO: 66484 - RNA, 32 nt, Human
auccaccaugcugcugugagacucgggcaguu

SEQ ID NO: 66485 - RNA, 18 nt, Human
auccacccaccucagccu

SEQ ID NO: 66486 - RNA, 23 nt, Human
auccacccaccucagccuccgaa

SEQ ID NO: 66487 - RNA, 22 nt, Human
auccacccaccucagccuucca

SEQ ID NO: 66488 - RNA, 23 nt, Human
auccacccaccucggccuccgaa

SEQ ID NO: 66489 - RNA, 32 nt, Human
auccacccaccucggucuccccaaagugcugg

SEQ ID NO: 66490 - RNA, 32 nt, Human
auccacccacgcuuuuuccuuucuugagauaa

SEQ ID NO: 66491 - RNA, 32 nt, Human
auccacccagaaccuccacccucugacaccau

SEQ ID NO: 66492 - RNA, 32 nt, Human
auccacccagaagaaagggauucaggcauggg

SEQ ID NO: 66493 - RNA, 32 nt, Human
auccacccagcggacccagccugcugcggagg

SEQ ID NO: 66494 - RNA, 32 nt, Human
auccacccagcucuccuggagcuguucugguc

SEQ ID NO: 66495 - RNA, 21 nt, Human
auccacccagggaccccggag

SEQ ID NO: 66496 - RNA, 32 nt, Human
auccaccccaggagcccaggagccuugccuga

SEQ ID NO: 66497 - RNA, 17 nt, Human
auccaccccggcucccc

SEQ ID NO: 66498 - RNA, 32 nt, Human
auccacccuccaccucuagcccagacaccccc

SEQ ID NO: 66499 - RNA, 32 nt, Human
auccacccucuacuuucugucucucugaucuu

SEQ ID NO: 66500 - RNA, 32 nt, Human
auccacccugaggaaagagcauggagagccag

SEQ ID NO: 66501 - RNA, 21 nt, Human
auccacccuuauuugcucuca

SEQ ID NO: 66502 - RNA, 32 nt, Human
auccaccuacagcccucaugccugggcccagc

SEQ ID NO: 66503 - RNA, 32 nt, Human
auccaccucccuggcccugccccugcacucag

SEQ ID NO: 66504 - RNA, 32 nt, Human
auccaccuccucuguguccucccaaggcagca

SEQ ID NO: 66505 - RNA, 22 nt, Human
auccaccucguccuuccuccau

SEQ ID NO: 66506 - RNA, 22 nt, Human
auccaccugccucagccuucca

SEQ ID NO: 66507 - RNA, 32 nt, Human
auccaccugccucugagcuuucaccucugacu

SEQ ID NO: 66508 - RNA, 32 nt, Human
auccaccugcugggacccugcaguccucggcc

SEQ ID NO: 66509 - RNA, 22 nt, Human
auccaccugcuucagccuacca

SEQ ID NO: 66510 - RNA, 22 nt, Human
auccaccugcuucggccuccca

SEQ ID NO: 66511 - RNA, 32 nt, Human
auccaccuuacuguguuuucuacuuucagaaa

SEQ ID NO: 66512 - RNA, 19 nt, Human
auccacgacaacaaucacc

SEQ ID NO: 66513 - RNA, 32 nt, Human
auccacgaccaagcucuuccaccugcggagcu

SEQ ID NO: 66514 - RNA, 32 nt, Human
auccacgaggcagaggcagcaguagcgcugga

SEQ ID NO: 66515 - RNA, 32 nt, Human
auccacgagggagcuccuggccagcagccguc

SEQ ID NO: 66516 - RNA, 32 nt, Human
auccacgcucaaucucaggucuucacgcgggg

SEQ ID NO: 66517 - RNA, 31 nt, Human
auccacggccuuuucuggcaagagaagggcc

SEQ ID NO: 66518 - RNA, 32 nt, Human
auccacguccccguacuggcucagggaaaggc

SEQ ID NO: 66519 - RNA, 32 nt, Human
auccacgugcuuugaaacuuuuccccucaccc

SEQ ID NO: 66520 - RNA, 32 nt, Human
auccacuacaccugacagagacauccucuacu

SEQ ID NO: 66521 - RNA, 32 nt, Human
auccacuaucgugggcuaacagugagcuugag

SEQ ID NO: 66522 - RNA, 32 nt, Human
auccacuaugagacuuacagggccaagcggcu

SEQ ID NO: 66523 - RNA, 32 nt, Human
auccacucauccccuucuucucuccuuggccu

SEQ ID NO: 66524 - RNA, 32 nt, Human
auccacuccccagucucccaaaguacugggau

SEQ ID NO: 66525 - RNA, 32 nt, Human
auccacuccugcucucccuccugcaggugacc

SEQ ID NO: 66526 - RNA, 32 nt, Human
auccacuccuuugaagaucacagccauguguc

SEQ ID NO: 66527 - RNA, 32 nt, Human
auccacucuugguggguggaaguacgguuacc

SEQ ID NO: 66528 - RNA, 32 nt, Human
auccacugagccuucaucucccaugaacuuga

SEQ ID NO: 66529 - RNA, 32 nt, Human
auccacuggggaggcaggguuuguaaacuugu

SEQ ID NO: 66530 - RNA, 32 nt, Human
auccacugguaagccacaucuaaugaagagaa

SEQ ID NO: 66531 - RNA, 32 nt, Human
auccacuggucacaucauaacugucuauaggg

SEQ ID NO: 66532 - RNA, 32 nt, Human
auccacuguggacccccaaaaccuguccuguc

SEQ ID NO: 66533 - RNA, 32 nt, Human
auccacuguuuugccuucugagguuucaguua

SEQ ID NO: 66534 - RNA, 32 nt, Human
auccacuuccaggggacauuuucacaaaauau

SEQ ID NO: 66535 - RNA, 32 nt, Human
auccacuucccaaacagagccccacgcagguu

SEQ ID NO: 66536 - RNA, 32 nt, Human
auccacuugccugaggagcuggaggaagggga

SEQ ID NO: 66537 - RNA, 32 nt, Human
auccacuugcuggagcccauguuuacagacag

SEQ ID NO: 66538 - RNA, 32 nt, Human
auccacuuuagcaaaguggggugccuacuugg

SEQ ID NO: 66539 - RNA, 32 nt, Human
auccacuuugagggugagugccuccagcagaa

SEQ ID NO: 66540 - RNA, 32 nt, Human
auccacuuugcagcuucuuugagauuaccuau

SEQ ID NO: 66541 - RNA, 19 nt, Human
auccacuuugcaggacuua

SEQ ID NO: 66542 - RNA, 32 nt, Human
auccagaacgacggaggaaggggcggagaggg

SEQ ID NO: 66543 - RNA, 32 nt, Human
auccagaagacaaccacuucucuccuuuuaga

SEQ ID NO: 66544 - RNA, 32 nt, Human
auccagaagagaagaaagacauggcugacagu

SEQ ID NO: 66545 - RNA, 32 nt, Human
auccagaagaugacucaagaccggccucugcu

SEQ ID NO: 66546 - RNA, 32 nt, Human
auccagaagccagaggauggacuaagugggag

SEQ ID NO: 66547 - RNA, 32 nt, Human
auccagaaggaagauuuguggccagauugccu

SEQ ID NO: 66548 - RNA, 32 nt, Human
auccagaaggcggagguugcagugagcugaga

SEQ ID NO: 66549 - RNA, 32 nt, Human
auccagaagggcccagcacggcccuguggggu

SEQ ID NO: 66550 - RNA, 23 nt, Human
auccagaaucuacaaugaacuca

SEQ ID NO: 66551 - RNA, 32 nt, Human
auccagacacccccacccccacccucagauca

SEQ ID NO: 66552 - RNA, 32 nt, Human
auccagacaucaugaauuuuacaugguacucu

SEQ ID NO: 66553 - RNA, 32 nt, Human
auccagaccauccuggccaacauggugaaauc

SEQ ID NO: 66554 - RNA, 32 nt, Human
auccagacccucccuucuugcuggggagggga

SEQ ID NO: 66555 - RNA, 32 nt, Human
auccagaccguccuggcuaacauggugaaacc

SEQ ID NO: 66556 - RNA, 24 nt, Human
auccagaccuuguucacacucuca

SEQ ID NO: 66557 - RNA, 32 nt, Human
auccagagacaugcucuaaaucuucacaaaaa

SEQ ID NO: 66558 - RNA, 32 nt, Human
auccagagacuuuaucuuaucucuacauaaca

SEQ ID NO: 66559 - RNA, 32 nt, Human
auccagagagccaaggucagagggagagaugg

SEQ ID NO: 66560 - RNA, 22 nt, Human
auccagagauugaacacagaga

SEQ ID NO: 66561 - RNA, 24 nt, Human
auccagagcaggguggguuagaga

SEQ ID NO: 66562 - RNA, 32 nt, Human
auccagagccuggcuguggggaaagugaccac

SEQ ID NO: 66563 - RNA, 32 nt, Human
auccagagcuaacaggcuaaaguuucccauuc

SEQ ID NO: 66564 - RNA, 32 nt, Human
auccagaggcaggaacugggaauaggcuugga

SEQ ID NO: 66565 - RNA, 32 nt, Human
auccagaggccaccugcccugucuucucguac

SEQ ID NO: 66566 - RNA, 24 nt, Human
auccagaggcggagguugcaguga

SEQ ID NO: 66567 - RNA, 32 nt, Human
auccagagggcaacagugguuacccaugaggg

SEQ ID NO: 66568 - RNA, 32 nt, Human
auccagagggcgaaagauaucucuccauugug

SEQ ID NO: 66569 - RNA, 32 nt, Human
auccagaggggguggggcagaggcggagucug

SEQ ID NO: 66570 - RNA, 32 nt, Human
auccagagguuacuaaccacgggugaguaaca

SEQ ID NO: 66571 - RNA, 25 nt, Human
auccagagguuucagcuuucaguua

SEQ ID NO: 66572 - RNA, 32 nt, Human
auccagagucaucucagcccugccuuucucug

SEQ ID NO: 66573 - RNA, 22 nt, Human
auccagaguggggagacagaga

SEQ ID NO: 66574 - RNA, 32 nt, Human
auccagauaugccacacuucugccugcuguug

SEQ ID NO: 66575 - RNA, 18 nt, Human
auccagaucuccagucuu

SEQ ID NO: 66576 - RNA, 32 nt, Human
auccagcacaucuccccaguggcagccucgcc

SEQ ID NO: 66577 - RNA, 32 nt, Human
auccagcagcuggcaucugaccuuggcacucg

SEQ ID NO: 66578 - RNA, 32 nt, Human
auccagcagcuguggcgaaaaacgaaccgggg

SEQ ID NO: 66579 - RNA, 32 nt, Human
auccagcaggagaaagaguguguucaaacauc

SEQ ID NO: 66580 - RNA, 32 nt, Human
auccagcagguggagguugcagugagccaaga

SEQ ID NO: 66581 - RNA, 32 nt, Human
auccagcagucaccccaguugcagagaugagu

SEQ ID NO: 66582 - RNA, 32 nt, Human
auccagcagugugcuauucgugccucaguuuu

SEQ ID NO: 66583 - RNA, 32 nt, Human
auccagccaagaagaugaaaacuacagagaag

SEQ ID NO: 66584 - RNA, 32 nt, Human
auccagccacagcacuccagccugggugacag

SEQ ID NO: 66585 - RNA, 32 nt, Human
auccagccacgauggaugacauggcuguggau

SEQ ID NO: 66586 - RNA, 32 nt, Human
auccagccagcccagcccugugaaagauggag

SEQ ID NO: 66587 - RNA, 32 nt, Human
auccagccagcgccccuggccuguggacgccc

SEQ ID NO: 66588 - RNA, 32 nt, Human
auccagccagcuggaggaaggaagggcaggcu

SEQ ID NO: 66589 - RNA, 32 nt, Human
auccagccauauuagucuucuggcuuuucuuu

SEQ ID NO: 66590 - RNA, 32 nt, Human
auccagccauguaggaaaccugagaugcagug

SEQ ID NO: 66591 - RNA, 32 nt, Human
auccagcccauccuggccaacauggugaaacc

SEQ ID NO: 66592 - RNA, 30 nt, Human
auccagccccagcugggugacagagugaga

SEQ ID NO: 66593 - RNA, 23 nt, Human
auccagccccuccaaccucccuc

SEQ ID NO: 66594 - RNA, 32 nt, Human
auccagccucccagcagccucugcgacgggcg

SEQ ID NO: 66595 - RNA, 32 nt, Human
auccagccuccugcgacuccccaaucuggaug

SEQ ID NO: 66596 - RNA, 29 nt, Human
auccagccugcuugcaacccugggguccu

SEQ ID NO: 66597 - RNA, 25 nt, Human
auccagccugggugacagggugaga

SEQ ID NO: 66598 - RNA, 32 nt, Human
auccagccuuagccaaucaccaccucauuggg

SEQ ID NO: 66599 - RNA, 32 nt, Human
auccagccuucaacuaucuuuacccuggaaaa

SEQ ID NO: 66600 - RNA, 32 nt, Human
auccagccuucacuccagcugguuaaaaaugu

SEQ ID NO: 66601 - RNA, 23 nt, Human
auccagcgagcccuccccaccca

SEQ ID NO: 66602 - RNA, 32 nt, Human
auccagcgagugcccacccaaugucagagcag

SEQ ID NO: 66603 - RNA, 32 nt, Human
auccagcgccaggucccgccagucccagcugc

SEQ ID NO: 66604 - RNA, 32 nt, Human
auccagcgcccagagagacaccagagaaccca

SEQ ID NO: 66605 - RNA, 32 nt, Human
auccagcuaccagggcccucccaguggaggca

SEQ ID NO: 66606 - RNA, 32 nt, Human
auccagcuaggccugaccugugccucaucccg

SEQ ID NO: 66607 - RNA, 32 nt, Human
auccagcucuggaggccacggugcaggcauag

SEQ ID NO: 66608 - RNA, 32 nt, Human
auccagcugagcggacugcuccaagugugugu

SEQ ID NO: 66609 - RNA, 20 nt, Human
auccagcuuagcugcugcug

SEQ ID NO: 66610 - RNA, 22 nt, Human
auccagcuucauuauggcugcu

SEQ ID NO: 66611 - RNA, 32 nt, Human
auccagcuuccauccccuccccaaccuggcag

SEQ ID NO: 66612 - RNA, 25 nt, Human
auccagcuucccuguccuggcccca

SEQ ID NO: 66613 - RNA, 32 nt, Human
auccaggaacacccucccagcaggggauggga

SEQ ID NO: 66614 - RNA, 32 nt, Human
auccaggaaccugacuagcccaaauagcaagu

SEQ ID NO: 66615 - RNA, 32 nt, Human
auccaggaagaaugagguacauggacaacugg

SEQ ID NO: 66616 - RNA, 32 nt, Human
auccaggaagcagagguugcggugagccgaaa

SEQ ID NO: 66617 - RNA, 32 nt, Human
auccaggaauacagucugcagugcagcaacag

SEQ ID NO: 66618 - RNA, 32 nt, Human
auccaggaauguuaaggugaggugaagcucac

SEQ ID NO: 66619 - RNA, 32 nt, Human
auccaggacuccagagagucaggucaaccccg

SEQ ID NO: 66620 - RNA, 32 nt, Human
auccaggagauagaaguugcagugagcugaga

SEQ ID NO: 66621 - RNA, 32 nt, Human
auccaggagaugcucacaggccacaggaccug

SEQ ID NO: 66622 - RNA, 32 nt, Human
auccaggagccacaggaagcagugagcuuucu

SEQ ID NO: 66623 - RNA, 32 nt, Human
auccaggagcccagacugagcaaauaaguacu

SEQ ID NO: 66624 - RNA, 32 nt, Human
auccaggaggaggagguugcagugagccgaga

SEQ ID NO: 66625 - RNA, 32 nt, Human
auccaggaggcaaagguugcagugagccaaaa

SEQ ID NO: 66626 - RNA, 32 nt, Human
auccaggaggcagagcuugcagugagcugaga

SEQ ID NO: 66627 - RNA, 32 nt, Human
auccaggaggcagaggcuguggugagccaaga

SEQ ID NO: 66628 - RNA, 32 nt, Human
auccaggaggcagagguugcaaugagccaaga

SEQ ID NO: 66629 - RNA, 32 nt, Human
auccaggaggcagagguugcagugaguggagg

SEQ ID NO: 66630 - RNA, 32 nt, Human
auccaggaggcgaagguugcagugagcugaga

SEQ ID NO: 66631 - RNA, 32 nt, Human
auccaggaggcggagguugcagugaaccaaga

SEQ ID NO: 66632 - RNA, 32 nt, Human
auccaggaggcggagguugcagugagccaaga

SEQ ID NO: 66633 - RNA, 32 nt, Human
auccaggaggcggagguugcagugagccgaga

SEQ ID NO: 66634 - RNA, 32 nt, Human
auccaggagguggagccugcagugagccaaga

SEQ ID NO: 66635 - RNA, 32 nt, Human
auccaggagguggagcuugcagugagccgaga

SEQ ID NO: 66636 - RNA, 32 nt, Human
auccaggagguggagguugcagcgagccaaga

SEQ ID NO: 66637 - RNA, 32 nt, Human
auccaggagguggagguugcagugagcugaga

SEQ ID NO: 66638 - RNA, 32 nt, Human
auccaggaguccauagaaaagcuucgugcccu

SEQ ID NO: 66639 - RNA, 32 nt, Human
auccaggaguuuaaagagagucuggcucuguc

SEQ ID NO: 66640 - RNA, 32 nt, Human
auccaggaugacugaggaaucccucgucacug

SEQ ID NO: 66641 - RNA, 32 nt, Human
auccaggauguacaaggugcagccaaggcagg

SEQ ID NO: 66642 - RNA, 32 nt, Human
auccaggcaaagugcugugagggggucugagc

SEQ ID NO: 66643 - RNA, 32 nt, Human
auccaggcaauggcauuaaacauucuugcuau

SEQ ID NO: 66644 - RNA, 32 nt, Human
auccaggcacugggcccgugcagagaaggcac

SEQ ID NO: 66645 - RNA, 31 nt, Human
auccaggcacuuuucuuugugcagguguagu

SEQ ID NO: 66646 - RNA, 32 nt, Human
auccaggcagcacuuccagaaacuugacacac

SEQ ID NO: 66647 - RNA, 32 nt, Human
auccaggcagcucuucccaaucugccuucuua

SEQ ID NO: 66648 - RNA, 32 nt, Human
auccaggcaugaugccaggugcaccaacuuac

SEQ ID NO: 66649 - RNA, 32 nt, Human
auccaggcauuugagaccagccuggguaacau

SEQ ID NO: 66650 - RNA, 32 nt, Human
auccaggccccagaaagccucaccuacagaca

SEQ ID NO: 66651 - RNA, 32 nt, Human
auccaggcccucagcucagcaugggugguucu

SEQ ID NO: 66652 - RNA, 20 nt, Human
auccaggccuacuccuccau

SEQ ID NO: 66653 - RNA, 32 nt, Human
auccaggccugccaaggugaagagauacagcc

SEQ ID NO: 66654 - RNA, 32 nt, Human
auccaggcucagguuucugccuccagguacag

SEQ ID NO: 66655 - RNA, 32 nt, Human
auccaggcuccagcagcaaagccccaggagaa

SEQ ID NO: 66656 - RNA, 32 nt, Human
auccaggcuccccucauuucaccuucagcaua

SEQ ID NO: 66657 - RNA, 32 nt, Human
auccaggcugaucucaaacuccuggcuucaag

SEQ ID NO: 66658 - RNA, 32 nt, Human
auccaggcuggccucaaacuccugggcucaag

SEQ ID NO: 66659 - RNA, 32 nt, Human
auccaggcugugagccgcugcugagcaugggg

SEQ ID NO: 66660 - RNA, 32 nt, Human
auccaggcugugcgcacccaggagaaggagca

SEQ ID NO: 66661 - RNA, 32 nt, Human
auccagggaugggaggggaagggacggauggg

SEQ ID NO: 66662 - RNA, 20 nt, Human
auccagggcuuaaacaugau

SEQ ID NO: 66663 - RNA, 32 nt, Human
auccaggggagggagauggaggcacccaaacu

SEQ ID NO: 66664 - RNA, 32 nt, Human
auccagguagccuaaggacuccuggucacugg

SEQ ID NO: 66665 - RNA, 32 nt, Human
auccagguaguggaggaugaucucagagugac

SEQ ID NO: 66666 - RNA, 32 nt, Human
auccaggucuuggggagcucaggacuugggcu

SEQ ID NO: 66667 - RNA, 32 nt, Human
auccagguggcggagguugcagugagccgaga

SEQ ID NO: 66668 - RNA, 32 nt, Human
auccaggugggaggugucagagcccagcucau

SEQ ID NO: 66669 - RNA, 20 nt, Human
auccagguucucgccaggcc

SEQ ID NO: 66670 - RNA, 32 nt, Human
auccagguugcugcugccacuagagggcagcc

SEQ ID NO: 66671 - RNA, 32 nt, Human
auccaguaagcuugugacaaaugcagacuccu

SEQ ID NO: 66672 - RNA, 32 nt, Human
auccaguaaugggaacugccaucucuguagaa

SEQ ID NO: 66673 - RNA, 32 nt, Human
auccaguacagaaucgguccaggagggugcgg

SEQ ID NO: 66674 - RNA, 32 nt, Human
auccaguacugaggacccaggugggagaaugu

SEQ ID NO: 66675 - RNA, 32 nt, Human
auccaguaucaugcagugcugcccucauccuc

SEQ ID NO: 66676 - RNA, 32 nt, Human
auccagucaaucucauggaggguggaguaugg

SEQ ID NO: 66677 - RNA, 32 nt, Human
auccagucagcagauggucagcagguucaaau

SEQ ID NO: 66678 - RNA, 32 nt, Human
auccaguccacuuuaccaucaguguuuaagga

SEQ ID NO: 66679 - RNA, 24 nt, Human
auccaguccuagcacuugaucuca

SEQ ID NO: 66680 - RNA, 32 nt, Human
auccagucuaggauccucacaccagcuacuug

SEQ ID NO: 66681 - RNA, 32 nt, Human
auccagucucuugccuuccucuccucccugau

SEQ ID NO: 66682 - RNA, 32 nt, Human
auccagugaacccguccaggugccccaagagg

SEQ ID NO: 66683 - RNA, 32 nt, Human
auccagugaggugaaugaagagaguggggauc

SEQ ID NO: 66684 - RNA, 32 nt, Human
auccagugcacucaaguuuggccaagggacuc

SEQ ID NO: 66685 - RNA, 32 nt, Human
auccagugcagccugcaccaugagcuucuggu

SEQ ID NO: 66686 - RNA, 32 nt, Human
auccagugcauccccuaauucaaaaccauccu

SEQ ID NO: 66687 - RNA, 32 nt, Human
auccagugcugacguccuugugccucaccuau

SEQ ID NO: 66688 - RNA, 32 nt, Human
auccaguggaggugaugcugaaguggcagccc

SEQ ID NO: 66689 - RNA, 32 nt, Human
auccaguggcugggaggcuccaggccugagga

SEQ ID NO: 66690 - RNA, 32 nt, Human
auccagugggaaccuggguuuucuagcuggug

SEQ ID NO: 66691 - RNA, 32 nt, Human
auccagugggaggcggaggccgugagcgccca

SEQ ID NO: 66692 - RNA, 32 nt, Human
auccagugggcaagaaguagcaaacacacugg

SEQ ID NO: 66693 - RNA, 32 nt, Human
auccagugguuuucgugaaauggaauuauguu

SEQ ID NO: 66694 - RNA, 32 nt, Human
auccaguguauaaauccaauaucaugucuugu

SEQ ID NO: 66695 - RNA, 32 nt, Human
auccagugucaaagcuaugauacauuguugcu

SEQ ID NO: 66696 - RNA, 32 nt, Human
auccagugucagcuccagccuauucaauuuca

SEQ ID NO: 66697 - RNA, 32 nt, Human
auccagugugcaccccuccccauucacagagc

SEQ ID NO: 66698 - RNA, 32 nt, Human
auccaguguugaggcagaagagggugccugug

SEQ ID NO: 66699 - RNA, 32 nt, Human
auccaguucaucccagaaacacugaccugauu

SEQ ID NO: 66700 - RNA, 18 nt, Human
auccaguuccacauguuc

SEQ ID NO: 66701 - RNA, 32 nt, Human
auccaguucuuaucuacucucccuuuauucag

SEQ ID NO: 66702 - RNA, 22 nt, Human
auccaguuuacccugugcuguc

SEQ ID NO: 66703 - RNA, 32 nt, Human
auccaguuuauagcaugccuguccuaaguuac

SEQ ID NO: 66704 - RNA, 32 nt, Human
auccaguuuaugaggguugggggugagcaagg

SEQ ID NO: 66705 - RNA, 32 nt, Human
auccaguuucuuuccccagcaguuucuguccu

SEQ ID NO: 66706 - RNA, 32 nt, Human
auccaguuuuccucuuuuacggaccauccuca

SEQ ID NO: 66707 - RNA, 32 nt, Human
auccauaaaucugcaguauccaaccaaacuag

SEQ ID NO: 66708 - RNA, 32 nt, Human
auccauaaaugauacauaguagugcuuauuau

SEQ ID NO: 66709 - RNA, 32 nt, Human
auccauacaccauuaagaaacagccucugcau

SEQ ID NO: 66710 - RNA, 32 nt, Human
auccauacaggcaacuuagcuggugaaaggac

SEQ ID NO: 66711 - RNA, 32 nt, Human
auccauagagaagguaguugaaggguagggcc

SEQ ID NO: 66712 - RNA, 32 nt, Human
auccauagaguaauaaagucacuguguguaga

SEQ ID NO: 66713 - RNA, 30 nt, Human
auccauagccucuucagauuccuuauaaaa

SEQ ID NO: 66714 - RNA, 32 nt, Human
auccauaugcaucagaaucaccuguguauuuc

SEQ ID NO: 66715 - RNA, 32 nt, Human
auccauaugugaagaacuggagaagaaggagc

SEQ ID NO: 66716 - RNA, 32 nt, Human
auccaucaagcuuggcucaugggaucugcugc

SEQ ID NO: 66717 - RNA, 32 nt, Human
auccaucaaggauuuccauaggggugacuggu

SEQ ID NO: 66718 - RNA, 32 nt, Human
auccaucagaaugacaccuucucagguugccu

SEQ ID NO: 66719 - RNA, 32 nt, Human
auccaucagacaccugcugggcaucugcugug

SEQ ID NO: 66720 - RNA, 22 nt, Human
auccaucagagaugacucuguc

SEQ ID NO: 66721 - RNA, 32 nt, Human
auccaucagcaaccucagaccaacccaagaag

SEQ ID NO: 66722 - RNA, 32 nt, Human
auccaucauccaggcugcagugcagcagcgcc

SEQ ID NO: 66723 - RNA, 32 nt, Human
auccaucaucccucacagagauguagaggaug

SEQ ID NO: 66724 - RNA, 32 nt, Human
auccauccaaaacaaauuccuccuucaaccuu

SEQ ID NO: 66725 - RNA, 32 nt, Human
auccauccaucauccauccauccaccuaacca

SEQ ID NO: 66726 - RNA, 32 nt, Human
auccauccauccacccauccaucauccaucca

SEQ ID NO: 66727 - RNA, 32 nt, Human
auccauccauccacccauccauccauccaucc

SEQ ID NO: 66728 - RNA, 32 nt, Human
auccauccauccacccauccuccauccaucca

SEQ ID NO: 66729 - RNA, 32 nt, Human
auccauccauccauccuucauccagccaucca

SEQ ID NO: 66730 - RNA, 32 nt, Human
auccauccauccuccauccaucauccauccau

SEQ ID NO: 66731 - RNA, 32 nt, Human
auccaucccacacaccuuggccuucugcaagc

SEQ ID NO: 66732 - RNA, 32 nt, Human
auccaucccagcaccuggaacagggucugaca

SEQ ID NO: 66733 - RNA, 32 nt, Human
auccaucccuccacggucacguuccuguuucc

SEQ ID NO: 66734 - RNA, 32 nt, Human
auccauccguccagccaagagcucuucaucug

SEQ ID NO: 66735 - RNA, 32 nt, Human
auccauccugcacuucuacaguuuagaaagua

SEQ ID NO: 66736 - RNA, 32 nt, Human
auccauccugcaggagcacacaguucuaaacc

SEQ ID NO: 66737 - RNA, 32 nt, Human
auccauccuggagccucauggaacaggaugau

SEQ ID NO: 66738 - RNA, 32 nt, Human
auccaucuauaccucacagcaguccugggggu

SEQ ID NO: 66739 - RNA, 32 nt, Human
auccaucucugagauggaugagaaucugaguc

SEQ ID NO: 66740 - RNA, 32 nt, Human
auccaucugccucugcaggugaccguaacaac

SEQ ID NO: 66741 - RNA, 32 nt, Human
auccaucugcuccccucaacucucagagcacu

SEQ ID NO: 66742 - RNA, 32 nt, Human
auccaugagacaccccgaguugugcuucauga

SEQ ID NO: 66743 - RNA, 32 nt, Human
auccaugaggcugcugcgccauguugcacuaa

SEQ ID NO: 66744 - RNA, 32 nt, Human
auccaugcaacagucuucucugugcauuuccc

SEQ ID NO: 66745 - RNA, 32 nt, Human
auccaugcacuccuaacaugaacuaauucuca

SEQ ID NO: 66746 - RNA, 32 nt, Human
auccaugcaguaugugcaagaccuauugcugu

SEQ ID NO: 66747 - RNA, 32 nt, Human
auccaugccaauaguugcuguccccuuccagg

SEQ ID NO: 66748 - RNA, 18 nt, Human
auccaugcccccucuuua

SEQ ID NO: 66749 - RNA, 32 nt, Human
auccaugccuguaaugaagucauacuauugug

SEQ ID NO: 66750 - RNA, 32 nt, Human
auccaugcuaucuccuaaagcagucauucuga

SEQ ID NO: 66751 - RNA, 32 nt, Human
auccaugcuggguggggugagguggggugcuu

SEQ ID NO: 66752 - RNA, 32 nt, Human
auccauggaagagccuuugugaggugaauuac

SEQ ID NO: 66753 - RNA, 32 nt, Human
auccauggcagucuggcuuacaagcaauacua

SEQ ID NO: 66754 - RNA, 32 nt, Human
auccauggcccgagggggaaccugguggucuc

SEQ ID NO: 66755 - RNA, 32 nt, Human
auccauggccuggaccaccccagaucccacau

SEQ ID NO: 66756 - RNA, 32 nt, Human
auccauggcuuccuggacguucacccguagag

SEQ ID NO: 66757 - RNA, 32 nt, Human
auccaugggcacuaacccgccucccaggcuga

SEQ ID NO: 66758 - RNA, 32 nt, Human
auccaugggcaggggaauuuggagagagaccu

SEQ ID NO: 66759 - RNA, 32 nt, Human
auccaugguuaggaaauguuuaguuggagauu

SEQ ID NO: 66760 - RNA, 32 nt, Human
auccauguauagagagaaaauuuggaaaacag

SEQ ID NO: 66761 - RNA, 32 nt, Human
auccauguauugccuuucagcucuagaucccc

SEQ ID NO: 66762 - RNA, 32 nt, Human
auccauguuggagccaucaaucaaagaauugc

SEQ ID NO: 66763 - RNA, 32 nt, Human
auccauuaaaauuaauuugugcaucagaaaau

SEQ ID NO: 66764 - RNA, 32 nt, Human
auccauuaugagcugaggucagccuggaucug

SEQ ID NO: 66765 - RNA, 32 nt, Human
auccauucacaguucuuugggccagacaugcc

SEQ ID NO: 66766 - RNA, 32 nt, Human
auccauucagaaucugccccaguggagaccca

SEQ ID NO: 66767 - RNA, 32 nt, Human
auccauucauuucugagcuuuaaccucugguu

SEQ ID NO: 66768 - RNA, 32 nt, Human
auccauucugcugcugauagaucaagaaguac

SEQ ID NO: 66769 - RNA, 32 nt, Human
auccauucuguccugacgcaguacaguuuuga

SEQ ID NO: 66770 - RNA, 32 nt, Human
auccauugacucaaacuuucaccauuguaucc

SEQ ID NO: 66771 - RNA, 30 nt, Human
auccauugcauuucucaggaagugaacuaa

SEQ ID NO: 66772 - RNA, 32 nt, Human
auccauugucauaaccauuuuuaaaagucaaa

SEQ ID NO: 66773 - RNA, 32 nt, Human
auccauuuaacccugaguggacacagcacaug

SEQ ID NO: 66774 - RNA, 32 nt, Human
auccauuuaccacauauuuccaucugauaauc

SEQ ID NO: 66775 - RNA, 32 nt, Human
auccauuuaucuuuuguauaucuaagacucau

SEQ ID NO: 66776 - RNA, 32 nt, Human
auccauuuccauucaucucccccucaaaucau

SEQ ID NO: 66777 - RNA, 32 nt, Human
auccauuucuauuccuccacugcauugccauc

SEQ ID NO: 66778 - RNA, 32 nt, Human
auccauuugucaucaggaaucaaaacccacag

SEQ ID NO: 66779 - RNA, 32 nt, Human
auccauuuucacuaaaagugugugaaaccuac

SEQ ID NO: 66780 - RNA, 32 nt, Human
auccauuuucagaauuuccuggcauugauuua

SEQ ID NO: 66781 - RNA, 32 nt, Human
aucccaaaauggcugggcgaaaacuugcucua

SEQ ID NO: 66782 - RNA, 32 nt, Human
aucccaaaccuauaaaaccaguuccacuccca

SEQ ID NO: 66783 - RNA, 32 nt, Human
aucccaaagugcugagauuacaguuggcgcuc

SEQ ID NO: 66784 - RNA, 32 nt, Human
aucccaaagugcugggacuacaggccugagcu

SEQ ID NO: 66785 - RNA, 32 nt, Human
aucccaaagugcugggauuacagcaucccagc

SEQ ID NO: 66786 - RNA, 32 nt, Human
aucccaaagugcugggauuacaggcaugagcc

SEQ ID NO: 66787 - RNA, 32 nt, Human
aucccaaagugcugggauuacaggcgugagcc

SEQ ID NO: 66788 - RNA, 32 nt, Human
aucccaaagugcugggauuacaggugugagcc

SEQ ID NO: 66789 - RNA, 32 nt, Human
aucccaaagugcugggauuacgagcgugaguc

SEQ ID NO: 66790 - RNA, 32 nt, Human
aucccaaaguguugggauuacagccgugagcc

SEQ ID NO: 66791 - RNA, 32 nt, Human
aucccaaaguguugggauuauaggcacgagcc

SEQ ID NO: 66792 - RNA, 32 nt, Human
aucccaacacaaaacaaacaccaccuccgauu

SEQ ID NO: 66793 - RNA, 31 nt, Human
aucccaacacucggggagguugaggcuacag

SEQ ID NO: 66794 - RNA, 32 nt, Human
aucccaacacucggggagguugaggcuacagg

SEQ ID NO: 66795 - RNA, 32 nt, Human
aucccaacagcccagcaagaaggaggagacag

SEQ ID NO: 66796 - RNA, 32 nt, Human
aucccaacagcccagcaaggggagagagaaag

SEQ ID NO: 66797 - RNA, 32 nt, Human
aucccaaccagccacgccucagccucucccag

SEQ ID NO: 66798 - RNA, 32 nt, Human
aucccaaccccuggcugggacugaaccaccca

SEQ ID NO: 66799 - RNA, 24 nt, Human
aucccaacucacugcaacuuccgc

SEQ ID NO: 66800 - RNA, 32 nt, Human
aucccaacugcagcucugcugugggggcccgu

SEQ ID NO: 66801 - RNA, 32 nt, Human
aucccaagaaucaccuucagguugucaggaaa

SEQ ID NO: 66802 - RNA, 21 nt, Human
aucccaagacgaccucaccca

SEQ ID NO: 66803 - RNA, 32 nt, Human
aucccaagacuuucucaccaguggagaaacac

SEQ ID NO: 66804 - RNA, 32 nt, Human
aucccaagaggcaccugcagccaggaaggaaa

SEQ ID NO: 66805 - RNA, 32 nt, Human
aucccaagaugacuggggugggaggucuugcu

SEQ ID NO: 66806 - RNA, 32 nt, Human
aucccaagcaguguccuuuccuggugaacacu

SEQ ID NO: 66807 - RNA, 32 nt, Human
aucccaagcuaguucaaaacagcuugggagag

SEQ ID NO: 66808 - RNA, 32 nt, Human
aucccaaggcaggcugcuacugccuuugcuga

SEQ ID NO: 66809 - RNA, 32 nt, Human
aucccaaggcauuuacuccuuggucugucucg

SEQ ID NO: 66810 - RNA, 32 nt, Human
aucccaagguggucuguugcucuggcuuccuu

SEQ ID NO: 66811 - RNA, 32 nt, Human
aucccaaguagcugggauuacaggcacccacc

SEQ ID NO: 66812 - RNA, 32 nt, Human
aucccaaucugaauucuauacccauggugacu

SEQ ID NO: 66813 - RNA, 31 nt, Human
aucccaauggcccuguccuuuucuuuacuga

SEQ ID NO: 66814 - RNA, 32 nt, Human
aucccaauuuugcuuugagaaguugccuuuuc

SEQ ID NO: 66815 - RNA, 32 nt, Human
aucccacaaaggagagaacggagaagcuugca

SEQ ID NO: 66816 - RNA, 16 nt, Human
aucccacaacaaccac

SEQ ID NO: 66817 - RNA, 32 nt, Human
aucccacaccaugccucacaugguagacccca

SEQ ID NO: 66818 - RNA, 32 nt, Human
aucccacaccuguuucaaauccuugaaaugca

SEQ ID NO: 66819 - RNA, 32 nt, Human
aucccacagccauuuuucucucggguucuacc

SEQ ID NO: 66820 - RNA, 32 nt, Human
aucccacaggaccacacgcaggccucccugcc

SEQ ID NO: 66821 - RNA, 32 nt, Human
aucccacauggacugcaugugccaccuaccau

SEQ ID NO: 66822 - RNA, 32 nt, Human
aucccaccacugcacuccagccugggcgacag

SEQ ID NO: 66823 - RNA, 32 nt, Human
aucccaccacugcacuccagccugggugacag

SEQ ID NO: 66824 - RNA, 32 nt, Human
aucccaccagaagacagggguguuggcaggca

SEQ ID NO: 66825 - RNA, 32 nt, Human
aucccaccagccucuccaaggguggugaccaa

SEQ ID NO: 66826 - RNA, 32 nt, Human
aucccaccauugcacuccagccugggcaacag

SEQ ID NO: 66827 - RNA, 32 nt, Human
aucccacccauguuguaccaccuuggugaguc

SEQ ID NO: 66828 - RNA, 19 nt, Human
aucccaccccaucagguca

SEQ ID NO: 66829 - RNA, 32 nt, Human
aucccacccccgcaguuuccaggauuuccucc

SEQ ID NO: 66830 - RNA, 20 nt, Human
aucccacccccgggaccagc

SEQ ID NO: 66831 - RNA, 32 nt, Human
aucccacccuggggacccccaugauuggccac

SEQ ID NO: 66832 - RNA, 32 nt, Human
aucccacccuggggcccuuucagugacuccua

SEQ ID NO: 66833 - RNA, 32 nt, Human
aucccaccuccacccccuccccaaugcagaca

SEQ ID NO: 66834 - RNA, 32 nt, Human
aucccaccucuccgccucuccaucaccagccu

SEQ ID NO: 66835 - RNA, 16 nt, Human
aucccaccugccacca

SEQ ID NO: 66836 - RNA, 16 nt, Human
aucccaccugccacua

SEQ ID NO: 66837 - RNA, 32 nt, Human
aucccaccuggggaggaaaggaagggcuggga

SEQ ID NO: 66838 - RNA, 32 nt, Human
aucccacgguugacuugccuugauggcaagcu

SEQ ID NO: 66839 - RNA, 32 nt, Human
aucccacuacugcauuccagccuggguggaca

SEQ ID NO: 66840 - RNA, 25 nt, Human
aucccacucagagcccgggccugua

SEQ ID NO: 66841 - RNA, 32 nt, Human
aucccacuccauuuuucccugcucaugccugc

SEQ ID NO: 66842 - RNA, 32 nt, Human
aucccacucccggcggcccaggcacagaaggg

SEQ ID NO: 66843 - RNA, 32 nt, Human
aucccacucccucucuuuccugcuccauuggu

SEQ ID NO: 66844 - RNA, 32 nt, Human
aucccacuccuucuccccauuucugucccaca

SEQ ID NO: 66845 - RNA, 32 nt, Human
aucccacugcacucugcuuaaggguuccugcg

SEQ ID NO: 66846 - RNA, 32 nt, Human
aucccacugcauuccagccugggcaacagcgu

SEQ ID NO: 66847 - RNA, 32 nt, Human
aucccacuucagccucuugaauagcugggacu

SEQ ID NO: 66848 - RNA, 32 nt, Human
aucccacuucucacucucgauguggccucccc

SEQ ID NO: 66849 - RNA, 32 nt, Human
aucccacuugcagccuccccaggugucugccc

SEQ ID NO: 66850 - RNA, 32 nt, Human
aucccagaaaugcugugaucagagccaauaag

SEQ ID NO: 66851 - RNA, 32 nt, Human
aucccagaaucugcuauuccccaaaccacuuc

SEQ ID NO: 66852 - RNA, 32 nt, Human
aucccagacagaaacaacacaugcuauucuaa

SEQ ID NO: 66853 - RNA, 32 nt, Human
aucccagaccuguuguucucuccauccagcgu

SEQ ID NO: 66854 - RNA, 32 nt, Human
aucccagacgcugcaggagcugaagauggcga

SEQ ID NO: 66855 - RNA, 32 nt, Human
aucccagacuccaaagcccugguccuuuccug

SEQ ID NO: 66856 - RNA, 32 nt, Human
aucccagagacaaucaguaugugcuuaccugu

SEQ ID NO: 66857 - RNA, 32 nt, Human
aucccagagcugucagcaccggccucagccca

SEQ ID NO: 66858 - RNA, 32 nt, Human
aucccagaggccagcaucaacauguuuccauc

SEQ ID NO: 66859 - RNA, 32 nt, Human
aucccagaggcugaggcaggcggaucaccuga

SEQ ID NO: 66860 - RNA, 32 nt, Human
aucccagaggggccucaucagcaaagacagaa

SEQ ID NO: 66861 - RNA, 32 nt, Human
aucccagaggucgaggcugcagugagcuguga

SEQ ID NO: 66862 - RNA, 32 nt, Human
aucccagauccucugcaaucuaccugcacccc

SEQ ID NO: 66863 - RNA, 32 nt, Human
aucccagauuucagguuuuauuacaaaaugua

SEQ ID NO: 66864 - RNA, 32 nt, Human
aucccagcaacuugaugaguuaggugcagaug

SEQ ID NO: 66865 - RNA, 28 nt, Human
aucccagcaagugcugcucugcucugcc

SEQ ID NO: 66866 - RNA, 21 nt, Human
aucccagcacacaggccuggg

SEQ ID NO: 66867 - RNA, 21 nt, Human
aucccagcacaccucguggga

SEQ ID NO: 66868 - RNA, 32 nt, Human
aucccagcacagugggaggccaacgagggugg

SEQ ID NO: 66869 - RNA, 21 nt, Human
aucccagcacaugauuuggga

SEQ ID NO: 66870 - RNA, 22 nt, Human
aucccagcacuuacuuugggag

SEQ ID NO: 66871 - RNA, 23 nt, Human
aucccagcacuugaggccaggag

SEQ ID NO: 66872 - RNA, 32 nt, Human
aucccagcacuuugggaggcucaggugggcga

SEQ ID NO: 66873 - RNA, 31 nt, Human
aucccagcacuuugggagguugaggcaggcg

SEQ ID NO: 66874 - RNA, 31 nt, Human
aucccagcacuuugggagguugaggcgggca

SEQ ID NO: 66875 - RNA, 31 nt, Human
aucccagcacuuugggagguugagguaggua

SEQ ID NO: 66876 - RNA, 31 nt, Human
aucccagcacuuugggagguugaggugggca

SEQ ID NO: 66877 - RNA, 31 nt, Human
aucccagcacuuugggagguugaggugggcg

SEQ ID NO: 66878 - RNA, 31 nt, Human
aucccagcacuuugggagguugaggugggug

SEQ ID NO: 66879 - RNA, 32 nt, Human
aucccagcagccuucagggugggaggcacaag

SEQ ID NO: 66880 - RNA, 32 nt, Human
aucccagcaggcuggaugagggauaguagggc

SEQ ID NO: 66881 - RNA, 32 nt, Human
aucccagcaugcugggaggccaaggagagaga

SEQ ID NO: 66882 - RNA, 32 nt, Human
aucccagccccuaugcugccaucccccagggc

SEQ ID NO: 66883 - RNA, 32 nt, Human
aucccagcccucucugucuuaauuagcacaaa

SEQ ID NO: 66884 - RNA, 21 nt, Human
aucccagccucaggccugcca

SEQ ID NO: 66885 - RNA, 32 nt, Human
aucccagccuccauucaccaugugcuuccgug

SEQ ID NO: 66886 - RNA, 32 nt, Human
aucccagcgaugaaaccaggaacucacuuucc

SEQ ID NO: 66887 - RNA, 32 nt, Human
aucccagcggacgucccugagcacuuccgggg

SEQ ID NO: 66888 - RNA, 32 nt, Human
aucccagcuacacagccacucccagagguguc

SEQ ID NO: 66889 - RNA, 32 nt, Human
aucccagcuacuagggagacugaggcaggaga

SEQ ID NO: 66890 - RNA, 32 nt, Human
aucccagcuacucaagagguugcagugagcug

SEQ ID NO: 66891 - RNA, 32 nt, Human
aucccagcuacucaggagacugaggcagaagg

SEQ ID NO: 66892 - RNA, 32 nt, Human
aucccagcuacucaggagacugaggcagagaa

SEQ ID NO: 66893 - RNA, 32 nt, Human
aucccagcuacucaggagacugaggcaggaaa

SEQ ID NO: 66894 - RNA, 32 nt, Human
aucccagcuacucaggagacugaggcaggaga

SEQ ID NO: 66895 - RNA, 32 nt, Human
aucccagcuacucaggaggcugagggaggaga

SEQ ID NO: 66896 - RNA, 31 nt, Human
aucccagcuacucaggagguugagacaggag

SEQ ID NO: 66897 - RNA, 31 nt, Human
aucccagcuacucaggagguugaggcagcag

SEQ ID NO: 66898 - RNA, 32 nt, Human
aucccagcuacucaggagguugaggcagcaga

SEQ ID NO: 66899 - RNA, 32 nt, Human
aucccagcuacucgggagacuaggcagagaau

SEQ ID NO: 66900 - RNA, 32 nt, Human
aucccagcuacucgggagacugaggcagaaga

SEQ ID NO: 66901 - RNA, 32 nt, Human
aucccagcuacucgggagacugaggcagagaa

SEQ ID NO: 66902 - RNA, 32 nt, Human
aucccagcuacucgggagacugaggcaggaga

SEQ ID NO: 66903 - RNA, 32 nt, Human
aucccagcuacucgggaggcuaaagcaggaga

SEQ ID NO: 66904 - RNA, 31 nt, Human
aucccagcuacucgggagguugaggcaggag

SEQ ID NO: 66905 - RNA, 31 nt, Human
aucccagcuacucgggagguugagggaggag

SEQ ID NO: 66906 - RNA, 32 nt, Human
aucccagcuacucuggagacugaggugggaga

SEQ ID NO: 66907 - RNA, 32 nt, Human
aucccagcuacuggggagacugaggugggagg

SEQ ID NO: 66908 - RNA, 31 nt, Human
aucccagcuacuuaggagguugaggcuggga

SEQ ID NO: 66909 - RNA, 32 nt, Human
aucccagcuacuuaggagguugaggcugggag

SEQ ID NO: 66910 - RNA, 32 nt, Human
aucccagcuacuugagagacugaggcaggaga

SEQ ID NO: 66911 - RNA, 32 nt, Human
aucccagcuacuuggaaggcugaggcaggaga

SEQ ID NO: 66912 - RNA, 32 nt, Human
aucccagcuacuugggagacugaggcaagaga

SEQ ID NO: 66913 - RNA, 32 nt, Human
aucccagcuacuugggagacugaggcacgaga

SEQ ID NO: 66914 - RNA, 32 nt, Human
aucccagcuacuugggagacugaggcaggaga

SEQ ID NO: 66915 - RNA, 32 nt, Human
aucccagcuagacuucucccuccuggacuguc

SEQ ID NO: 66916 - RNA, 32 nt, Human
aucccagcuaggaggcugagacaggagaaugg

SEQ ID NO: 66917 - RNA, 31 nt, Human
aucccagcuauucaggagguugaggcagaag

SEQ ID NO: 66918 - RNA, 32 nt, Human
aucccagcucaccgcaacgucuaccucccagg

SEQ ID NO: 66919 - RNA, 24 nt, Human
aucccagcucacugcaaccuccgc

SEQ ID NO: 66920 - RNA, 32 nt, Human
aucccagcucacugcaaccuccgccuccuggg

SEQ ID NO: 66921 - RNA, 32 nt, Human
aucccagcucacugcaacuuccgccccgccag

SEQ ID NO: 66922 - RNA, 32 nt, Human
aucccagcucacugcagccucgaccucccugg

SEQ ID NO: 66923 - RNA, 32 nt, Human
aucccagcucuuccagcuaugacaucauguga

SEQ ID NO: 66924 - RNA, 32 nt, Human
aucccagcugacucgcucacugccuucgaagu

SEQ ID NO: 66925 - RNA, 32 nt, Human
aucccagcugcucaggagacugaggcaggaga

SEQ ID NO: 66926 - RNA, 32 nt, Human
aucccagcuggguuauugaagaugaugcaucu

SEQ ID NO: 66927 - RNA, 32 nt, Human
aucccagcuucucaggagucugaggcaggaga

SEQ ID NO: 66928 - RNA, 32 nt, Human
aucccagcuuugagagaggagugugugugcac

SEQ ID NO: 66929 - RNA, 32 nt, Human
aucccaggaauuugagguugcaguaagcuaug

SEQ ID NO: 66930 - RNA, 32 nt, Human
aucccaggagacagagguugcagugagccgag

SEQ ID NO: 66931 - RNA, 32 nt, Human
aucccaggagagaagagcucaggagaugggaa

SEQ ID NO: 66932 - RNA, 26 nt, Human
aucccaggaggcggagguugcaguga

SEQ ID NO: 66933 - RNA, 32 nt, Human
aucccaggaggcggagguugcagugaguugca

SEQ ID NO: 66934 - RNA, 32 nt, Human
aucccaggccggccugugacucuagauaaguu

SEQ ID NO: 66935 - RNA, 20 nt, Human
aucccaggcugguggcagga

SEQ ID NO: 66936 - RNA, 32 nt, Human
aucccaggggcagaaaagagcuugccuuuggc

SEQ ID NO: 66937 - RNA, 32 nt, Human
aucccagggugcugagauuacaggugugagcc

SEQ ID NO: 66938 - RNA, 32 nt, Human
aucccagguagccaugguagaguuggguagag

SEQ ID NO: 66939 - RNA, 32 nt, Human
aucccaggugcaagaguggccccuugaggccc

SEQ ID NO: 66940 - RNA, 18 nt, Human
aucccagucugauugcau

SEQ ID NO: 66941 - RNA, 32 nt, Human
aucccagugcuacaccugagguucuggagcuc

SEQ ID NO: 66942 - RNA, 32 nt, Human
aucccaguguacaaaaccugcuucucuucuca

SEQ ID NO: 66943 - RNA, 32 nt, Human
aucccaguuccuaggcaacuuguucaccaggu

SEQ ID NO: 66944 - RNA, 21 nt, Human
aucccaguuuuccgucuggga

SEQ ID NO: 66945 - RNA, 32 nt, Human
aucccauacucaaaauacccaguuuagcaagc

SEQ ID NO: 66946 - RNA, 32 nt, Human
aucccaucaccucaaagccagaggguccccaa

SEQ ID NO: 66947 - RNA, 32 nt, Human
aucccauccaccccuucucuucauccuucccu

SEQ ID NO: 66948 - RNA, 32 nt, Human
aucccauccccacccccagccccagcccaguc

SEQ ID NO: 66949 - RNA, 32 nt, Human
aucccaucccuaaaaccugccuucuccuuuua

SEQ ID NO: 66950 - RNA, 32 nt, Human
aucccaucccuaacccuugccugaccauguga

SEQ ID NO: 66951 - RNA, 32 nt, Human
aucccauccuggggccccuucagugacuccug

SEQ ID NO: 66952 - RNA, 32 nt, Human
aucccaucuaugcugucaagggcugcugguug

SEQ ID NO: 66953 - RNA, 32 nt, Human
aucccaucugggcgguggcuucacuccugagu

SEQ ID NO: 66954 - RNA, 32 nt, Human
aucccaugaucacacaucuguauuccagccug

SEQ ID NO: 66955 - RNA, 32 nt, Human
aucccaugccaggugguagcugugaguaccuc

SEQ ID NO: 66956 - RNA, 30 nt, Human
aucccaugccccagcccccacccucucgug

SEQ ID NO: 66957 - RNA, 32 nt, Human
aucccaugcugccccuaguccugggcauggug

SEQ ID NO: 66958 - RNA, 32 nt, Human
aucccaugggcugcugucuggguucuggcucu

SEQ ID NO: 66959 - RNA, 21 nt, Human
aucccaugguaaaauauucaa

SEQ ID NO: 66960 - RNA, 32 nt, Human
aucccaugucgagcugugguccccgguguugg

SEQ ID NO: 66961 - RNA, 30 nt, Human
aucccaugucggcccugaggcgcucgggcu

SEQ ID NO: 66962 - RNA, 32 nt, Human
aucccauuauuuacauauaccaaaaauacuuu

SEQ ID NO: 66963 - RNA, 32 nt, Human
aucccauugccuggcuaccgcugccuggcagc

SEQ ID NO: 66964 - RNA, 32 nt, Human
aucccauuucuguccugcucccaggaagauuc

SEQ ID NO: 66965 - RNA, 32 nt, Human
aucccauuugcccuccuccucagcuagggcca

SEQ ID NO: 66966 - RNA, 32 nt, Human
auccccaaacaguaggcuucaguucccugcca

SEQ ID NO: 66967 - RNA, 32 nt, Human
auccccaaaccagccagccuucaguuauuuac

SEQ ID NO: 66968 - RNA, 32 nt, Human
auccccaacaugguuaauuccaacucucagau

SEQ ID NO: 66969 - RNA, 32 nt, Human
auccccaacugcuccagccucugccgcugcca

SEQ ID NO: 66970 - RNA, 28 nt, Human
auccccaagaaugcugccuugucugugg

SEQ ID NO: 66971 - RNA, 32 nt, Human
auccccacaggcuggggacgggcccggugcgg

SEQ ID NO: 66972 - RNA, 32 nt, Human
auccccaccccuucugccagacugccuuugaa

SEQ ID NO: 66973 - RNA, 32 nt, Human
auccccacgcuguguaaguggaaagggcauug

SEQ ID NO: 66974 - RNA, 32 nt, Human
auccccacucauuggagugaacagugacgcaa

SEQ ID NO: 66975 - RNA, 32 nt, Human
auccccacugucaggggcagccaggacuguuc

SEQ ID NO: 66976 - RNA, 32 nt, Human
auccccagaccucacuugccucugccuccauc

SEQ ID NO: 66977 - RNA, 32 nt, Human
auccccagagucagggagggcagaggguggca

SEQ ID NO: 66978 - RNA, 32 nt, Human
auccccagagugaaagauggagcugggccaca

SEQ ID NO: 66979 - RNA, 32 nt, Human
auccccagauacucgggaggcugaagcaggag

SEQ ID NO: 66980 - RNA, 16 nt, Human
auccccagcccuucca

SEQ ID NO: 66981 - RNA, 32 nt, Human
auccccagccgacgccacucacugccuccuuc

SEQ ID NO: 66982 - RNA, 32 nt, Human
auccccagcuaggaagaaagaauggcacucuu

SEQ ID NO: 66983 - RNA, 32 nt, Human
auccccagcucucuccugauuggaauucuuug

SEQ ID NO: 66984 - RNA, 32 nt, Human
auccccagcugcgggaggcccuggugacucug

SEQ ID NO: 66985 - RNA, 32 nt, Human
auccccaggaauagaacuuaaggggugggaag

SEQ ID NO: 66986 - RNA, 32 nt, Human
auccccaggaauagaauuuaagggaugggaag

SEQ ID NO: 66987 - RNA, 32 nt, Human
auccccaggagcaaccacucugguaucuagaa

SEQ ID NO: 66988 - RNA, 32 nt, Human
auccccaggcacugccuaucccuuucccacac

SEQ ID NO: 66989 - RNA, 23 nt, Human
auccccaggccccuccgugcuca

SEQ ID NO: 66990 - RNA, 32 nt, Human
auccccaggccugacugagcggcaggggagca

SEQ ID NO: 66991 - RNA, 32 nt, Human
auccccaggccuguggccaccucgggucugga

SEQ ID NO: 66992 - RNA, 32 nt, Human
auccccagggaaggaaaggcuccgccauuugg

SEQ ID NO: 66993 - RNA, 32 nt, Human
auccccagggagcauugcgaaggagagaggcg

SEQ ID NO: 66994 - RNA, 32 nt, Human
auccccaguagugaaugagacacugcuuugac

SEQ ID NO: 66995 - RNA, 32 nt, Human
auccccauagagcaaaauucugccugugacaa

SEQ ID NO: 66996 - RNA, 32 nt, Human
auccccaucagccuggucaucaccggcgucac

SEQ ID NO: 66997 - RNA, 32 nt, Human
auccccaucccuugagugggugggccuggccu

SEQ ID NO: 66998 - RNA, 32 nt, Human
auccccauccuagcuucucucuccuuccccuc

SEQ ID NO: 66999 - RNA, 32 nt, Human
auccccaucuucauggaaccagggcuaaaggu

SEQ ID NO: 67000 - RNA, 31 nt, Human
auccccauggacaacaaggaggucccgggcg

SEQ ID NO: 67001 - RNA, 32 nt, Human
auccccauuucugcuucucuguuuccccuccu

SEQ ID NO: 67002 - RNA, 32 nt, Human
aucccccaaagucagacacagagcaagagucc

SEQ ID NO: 67003 - RNA, 32 nt, Human
aucccccaacagcagccccugccagucccucg

SEQ ID NO: 67004 - RNA, 32 nt, Human
aucccccacaguuuagagccuucugcuuuucu

SEQ ID NO: 67005 - RNA, 32 nt, Human
aucccccacccaccugccaucaggcucccaga

SEQ ID NO: 67006 - RNA, 21 nt, Human
aucccccacgcaggaccaacu

SEQ ID NO: 67007 - RNA, 18 nt, Human
aucccccagaagccuuca

SEQ ID NO: 67008 - RNA, 32 nt, Human
aucccccagcaagccagccaccugcccagccg

SEQ ID NO: 67009 - RNA, 32 nt, Human
aucccccagcaagccccucugccugcaccuca

SEQ ID NO: 67010 - RNA, 32 nt, Human
aucccccaucgcuuaucucugccuccuuccuc

SEQ ID NO: 67011 - RNA, 32 nt, Human
aucccccaucuccucaaccaccagggucugag

SEQ ID NO: 67012 - RNA, 21 nt, Human
auccccccacccuguggccac

SEQ ID NO: 67013 - RNA, 32 nt, Human
aucccccgaccgcacuccagccugggcgacag

SEQ ID NO: 67014 - RNA, 32 nt, Human
aucccccgccagcaaccauuacggucugucag

SEQ ID NO: 67015 - RNA, 32 nt, Human
aucccccgcccuccaucucccccggcucuggg

SEQ ID NO: 67016 - RNA, 32 nt, Human
aucccccggagguggaggcgcgguaccccggg

SEQ ID NO: 67017 - RNA, 32 nt, Human
aucccccggugagcuuccugcagccuguggau

SEQ ID NO: 67018 - RNA, 32 nt, Human
aucccccuaagucccuuugucuugacccccaa

SEQ ID NO: 67019 - RNA, 32 nt, Human
aucccccuacaaccccagccuccugagggcuc

SEQ ID NO: 67020 - RNA, 32 nt, Human
aucccccuaccugaaccccucuugccacugcc

SEQ ID NO: 67021 - RNA, 32 nt, Human
aucccccucccaggccuuccucccucucccau

SEQ ID NO: 67022 - RNA, 32 nt, Human
aucccccuccugaccugugacccccugccaca

SEQ ID NO: 67023 - RNA, 32 nt, Human
aucccccucuccugaagcccugccgcuguggc

SEQ ID NO: 67024 - RNA, 32 nt, Human
aucccccucugcaaagugcccucuugguuugg

SEQ ID NO: 67025 - RNA, 23 nt, Human
aucccccugcacagacuggccac

SEQ ID NO: 67026 - RNA, 23 nt, Human
aucccccugccggcagccccuca

SEQ ID NO: 67027 - RNA, 28 nt, Human
aucccccugccugcugccucagucugca

SEQ ID NO: 67028 - RNA, 24 nt, Human
aucccccugcuggccguagcccca

SEQ ID NO: 67029 - RNA, 21 nt, Human
aucccccuggcagggccagcu

SEQ ID NO: 67030 - RNA, 32 nt, Human
aucccccuuccuccucuccucccuguccugag

SEQ ID NO: 67031 - RNA, 32 nt, Human
aucccccuuuccaaccuguaacucugaugugc

SEQ ID NO: 67032 - RNA, 32 nt, Human
auccccgacagaaacgcagcagaugcagacgc

SEQ ID NO: 67033 - RNA, 32 nt, Human
auccccgaggcggagguugcacugagccgaga

SEQ ID NO: 67034 - RNA, 32 nt, Human
auccccgccugagagcuccucacugacggcuc

SEQ ID NO: 67035 - RNA, 32 nt, Human
auccccgcuuuggaugugauucccucucccca

SEQ ID NO: 67036 - RNA, 32 nt, Human
auccccggucucaaguaggccucaucugccgg

SEQ ID NO: 67037 - RNA, 32 nt, Human
auccccgugggugugaggccgggguaggacca

SEQ ID NO: 67038 - RNA, 32 nt, Human
auccccuaaagacccacccucaagcagcagau

SEQ ID NO: 67039 - RNA, 32 nt, Human
auccccuacacauacaugcacauagacacaca

SEQ ID NO: 67040 - RNA, 32 nt, Human
auccccuacaucuggcagcauguggagcaggc

SEQ ID NO: 67041 - RNA, 32 nt, Human
auccccuagauccccauuggaaaaagggagaa

SEQ ID NO: 67042 - RNA, 32 nt, Human
auccccuaggucaccguuggaaaaagggagaa

SEQ ID NO: 67043 - RNA, 32 nt, Human
auccccucaccuccuucucuuuacccccuuca

SEQ ID NO: 67044 - RNA, 32 nt, Human
auccccucaccugaggccagggaagccuugac

SEQ ID NO: 67045 - RNA, 32 nt, Human
auccccucagcacuaaccacauccacucucaa

SEQ ID NO: 67046 - RNA, 32 nt, Human
auccccucaguuccucaccccucucccugcuu

SEQ ID NO: 67047 - RNA, 32 nt, Human
auccccuccacuccagaguuggguggcacgga

SEQ ID NO: 67048 - RNA, 32 nt, Human
auccccuccacuccagaguugggugguacgga

SEQ ID NO: 67049 - RNA, 32 nt, Human
auccccuccccagccacagucugaggagcccc

SEQ ID NO: 67050 - RNA, 32 nt, Human
auccccuccccgcugccgccuccuccugggcu

SEQ ID NO: 67051 - RNA, 32 nt, Human
auccccuccccucugcuugagccuugagccuu

SEQ ID NO: 67052 - RNA, 32 nt, Human
auccccuccugccucagaccccuuugccaggg

SEQ ID NO: 67053 - RNA, 32 nt, Human
auccccucucaucuuccuccccuaaaccccac

SEQ ID NO: 67054 - RNA, 32 nt, Human
auccccucugggcugcucauccaggccuggcc

SEQ ID NO: 67055 - RNA, 32 nt, Human
auccccucuguccaugucccugccucaguuua

SEQ ID NO: 67056 - RNA, 32 nt, Human
auccccugagcucaggaguccaaccugggcaa

SEQ ID NO: 67057 - RNA, 32 nt, Human
auccccugaggguggucagccaaggcucccgu

SEQ ID NO: 67058 - RNA, 32 nt, Human
auccccugcacccgcuaccacaccagcucagc

SEQ ID NO: 67059 - RNA, 32 nt, Human
auccccuggccuccucccacuuacuuguucua

SEQ ID NO: 67060 - RNA, 32 nt, Human
auccccuguaggaggccagggaggggaacuca

SEQ ID NO: 67061 - RNA, 18 nt, Human
auccccuuaccccagugg

SEQ ID NO: 67062 - RNA, 20 nt, Human
auccccuucccucccaguga

SEQ ID NO: 67063 - RNA, 32 nt, Human
auccccuucgccaacugggacaucuuccgaca

SEQ ID NO: 67064 - RNA, 32 nt, Human
auccccuucucccggccccagccugccucccu

SEQ ID NO: 67065 - RNA, 32 nt, Human
auccccuugacucuccccucccagcccucgcu

SEQ ID NO: 67066 - RNA, 32 nt, Human
auccccuuguaaaggaguuggggaaggaagag

SEQ ID NO: 67067 - RNA, 32 nt, Human
auccccuugugagccccaugagagaagggccu

SEQ ID NO: 67068 - RNA, 32 nt, Human
auccccuuuccaaggcugcuucccuggugugu

SEQ ID NO: 67069 - RNA, 32 nt, Human
auccccuuucuuuccaaguagcuacuuggaaa

SEQ ID NO: 67070 - RNA, 32 nt, Human
auccccuuuuccccaucuucuucuuucagauc

SEQ ID NO: 67071 - RNA, 32 nt, Human
auccccuuuuuguucuuccuggaccugggcau

SEQ ID NO: 67072 - RNA, 20 nt, Human
aucccgagggccuuccugcc

SEQ ID NO: 67073 - RNA, 32 nt, Human
aucccgagucauuaauuugaagcucgcuaaca

SEQ ID NO: 67074 - RNA, 32 nt, Human
aucccgaucuggggaacucugauccaguauau

SEQ ID NO: 67075 - RNA, 32 nt, Human
aucccgcaaaaugggcuuccugccugguuuuu

SEQ ID NO: 67076 - RNA, 32 nt, Human
aucccgcagcacccuccagccuugcagaagca

SEQ ID NO: 67077 - RNA, 32 nt, Human
aucccgccacaccuuucgcucucagcuaccag

SEQ ID NO: 67078 - RNA, 32 nt, Human
aucccgccacucacuccagccuggauaaaaga

SEQ ID NO: 67079 - RNA, 32 nt, Human
aucccgccacugcacgccagccugggcgacag

SEQ ID NO: 67080 - RNA, 32 nt, Human
aucccgccacugcacuccagacugggcgacag

SEQ ID NO: 67081 - RNA, 32 nt, Human
aucccgccacugcacuccagcccaggugacag

SEQ ID NO: 67082 - RNA, 32 nt, Human
aucccgccacugcacuccagccugggcgacag

SEQ ID NO: 67083 - RNA, 32 nt, Human
aucccgccacugcacucuagccugggugacag

SEQ ID NO: 67084 - RNA, 32 nt, Human
aucccgccagcaccccagccuaagugaaagag

SEQ ID NO: 67085 - RNA, 32 nt, Human
aucccgcccagaggaguugaugccgcugucgc

SEQ ID NO: 67086 - RNA, 32 nt, Human
aucccgcccagccaugugacacuggcucccgg

SEQ ID NO: 67087 - RNA, 32 nt, Human
aucccgcgccgcugcgguucucagccggcucu

SEQ ID NO: 67088 - RNA, 32 nt, Human
aucccgcgcugccuccccggcgaucugucuga

SEQ ID NO: 67089 - RNA, 32 nt, Human
aucccgcucagugccauguccucuuuugugau

SEQ ID NO: 67090 - RNA, 32 nt, Human
aucccgcuggugcuaugugcagaucuuaacuc

SEQ ID NO: 67091 - RNA, 24 nt, Human
aucccgcuuagccugccucaccca

SEQ ID NO: 67092 - RNA, 21 nt, Human
aucccgcuucccccuccccca

SEQ ID NO: 67093 - RNA, 32 nt, Human
aucccggacugcgggcccugcagccaccugga

SEQ ID NO: 67094 - RNA, 32 nt, Human
aucccggagucugaggaccuuuaugggcuuug

SEQ ID NO: 67095 - RNA, 32 nt, Human
aucccggcagugacugccugugcccggugcug

SEQ ID NO: 67096 - RNA, 32 nt, Human
aucccggccagccccugacaucugccaucgau

SEQ ID NO: 67097 - RNA, 32 nt, Human
aucccggccucccugcacuucacucugcuccu

SEQ ID NO: 67098 - RNA, 32 nt, Human
aucccggccuggccaaccuccgccuccugggu

SEQ ID NO: 67099 - RNA, 23 nt, Human
aucccggcgggaccaaggaggug

SEQ ID NO: 67100 - RNA, 32 nt, Human
aucccggcucacugcaaccuccaccucccagg

SEQ ID NO: 67101 - RNA, 32 nt, Human
aucccggcucacugcaaccuccgccucccugg

SEQ ID NO: 67102 - RNA, 32 nt, Human
aucccgggaauucaagguugcagugagcuaug

SEQ ID NO: 67103 - RNA, 32 nt, Human
aucccgggacgcagcaggaggccaggccggcg

SEQ ID NO: 67104 - RNA, 32 nt, Human
aucccgggagccugggcuggggccugggcacu

SEQ ID NO: 67105 - RNA, 32 nt, Human
aucccgggcuguaacuugcucuuuuguuuccc

SEQ ID NO: 67106 - RNA, 32 nt, Human
aucccggggaaggagccggaccccuauggcgg

SEQ ID NO: 67107 - RNA, 32 nt, Human
aucccggggagccaggaagcagugagcccagg

SEQ ID NO: 67108 - RNA, 32 nt, Human
aucccgguccacugcaaccuccacuucccggg

SEQ ID NO: 67109 - RNA, 32 nt, Human
aucccgguuucagaagcugcagcuggucuguu

SEQ ID NO: 67110 - RNA, 32 nt, Human
aucccgucaaacaaaugguauguaauagaaag

SEQ ID NO: 67111 - RNA, 32 nt, Human
aucccguccaacaggcuggaguacaauggcga

SEQ ID NO: 67112 - RNA, 32 nt, Human
aucccgugcaacaacaagggagcucacugagu

SEQ ID NO: 67113 - RNA, 32 nt, Human
aucccguucccccuaacauccucagagaaccu

SEQ ID NO: 67114 - RNA, 32 nt, Human
aucccuaauaacaaccuucauucuucuaauac

SEQ ID NO: 67115 - RNA, 32 nt, Human
aucccuacccacguuccagccucuaggugagu

SEQ ID NO: 67116 - RNA, 17 nt, Human
aucccuaccucccacca

SEQ ID NO: 67117 - RNA, 30 nt, Human
aucccuaccugcuccccgcuccuguugcca

SEQ ID NO: 67118 - RNA, 32 nt, Human
aucccuagcuccagccucuuccugggccagcc

SEQ ID NO: 67119 - RNA, 32 nt, Human
aucccuaggagagaugaaauuugagaggugau

SEQ ID NO: 67120 - RNA, 32 nt, Human
aucccuaggugaggagaagcggcuugaagcag

SEQ ID NO: 67121 - RNA, 32 nt, Human
aucccuaucauguggaugcacacacacccucu

SEQ ID NO: 67122 - RNA, 21 nt, Human
aucccuaucuauuguaaccca

SEQ ID NO: 67123 - RNA, 32 nt, Human
aucccucaagccacaguuaaugauucagaugu

SEQ ID NO: 67124 - RNA, 32 nt, Human
aucccucacagccucuugcugcuaaaauagau

SEQ ID NO: 67125 - RNA, 32 nt, Human
aucccucaggaggaagaggaguccugcagcgc

SEQ ID NO: 67126 - RNA, 32 nt, Human
aucccucaggcauggccaggaggccgacuuca

SEQ ID NO: 67127 - RNA, 32 nt, Human
aucccucaguggcaacagaaacaggcacaacu

SEQ ID NO: 67128 - RNA, 32 nt, Human
aucccucaucuucugacccuggguucugggcu

SEQ ID NO: 67129 - RNA, 32 nt, Human
aucccuccaacugccagcacccugccauugcc

SEQ ID NO: 67130 - RNA, 32 nt, Human
aucccuccagugguaccugucacugcaaaugc

SEQ ID NO: 67131 - RNA, 32 nt, Human
aucccucccagccuauuucugcuccucucuuc

SEQ ID NO: 67132 - RNA, 32 nt, Human
aucccucccaugaaaaauggcuuccuggccgg

SEQ ID NO: 67133 - RNA, 22 nt, Human
aucccuccccacccucucucca

SEQ ID NO: 67134 - RNA, 32 nt, Human
aucccuccccacccucucuccaaggcccucuc

SEQ ID NO: 67135 - RNA, 32 nt, Human
aucccuccccuguccaccuuuguccagugcua

SEQ ID NO: 67136 - RNA, 32 nt, Human
aucccucccuccuucugaccucuuagcugggg

SEQ ID NO: 67137 - RNA, 32 nt, Human
aucccuccuuccuucuuuccuccuacagugcu

SEQ ID NO: 67138 - RNA, 32 nt, Human
aucccuccuucuagggccuauggcaguucucc

SEQ ID NO: 67139 - RNA, 32 nt, Human
aucccucgugagaccagaucaguuacauguau

SEQ ID NO: 67140 - RNA, 23 nt, Human
aucccucuauuaaccccacccca

SEQ ID NO: 67141 - RNA, 24 nt, Human
aucccucucaaucuucccugccca

SEQ ID NO: 67142 - RNA, 21 nt, Human
aucccucucaggcuccuucca

SEQ ID NO: 67143 - RNA, 24 nt, Human
aucccucuccaccccuucccccca

SEQ ID NO: 67144 - RNA, 24 nt, Human
aucccucucccacuccccacccca

SEQ ID NO: 67145 - RNA, 24 nt, Human
aucccucucccauuuagcaaccac

SEQ ID NO: 67146 - RNA, 23 nt, Human
aucccucuccuccuccaucccca

SEQ ID NO: 67147 - RNA, 32 nt, Human
aucccucucucccucacaguuccaggagcggc

SEQ ID NO: 67148 - RNA, 32 nt, Human
aucccucucugaaacagaacagcuccaauagc

SEQ ID NO: 67149 - RNA, 32 nt, Human
aucccucugcuccuuuuuaugguucuuguugu

SEQ ID NO: 67150 - RNA, 32 nt, Human
aucccucuggaaggagcuguccucacagaaug

SEQ ID NO: 67151 - RNA, 32 nt, Human
aucccucugugaccucagcccagaugugccug

SEQ ID NO: 67152 - RNA, 32 nt, Human
aucccucuguucuccccuccuaucuuuccaug

SEQ ID NO: 67153 - RNA, 32 nt, Human
aucccucuucauuccucuucucuguguucauu

SEQ ID NO: 67154 - RNA, 32 nt, Human
aucccucuuccaccaucuccucccaauguguu

SEQ ID NO: 67155 - RNA, 19 nt, Human
aucccucuuucuaccugac

SEQ ID NO: 67156 - RNA, 32 nt, Human
aucccugacaucuggaaucuggagaccaggga

SEQ ID NO: 67157 - RNA, 32 nt, Human
aucccugacaucuuuccccuuuccuuuccuuc

SEQ ID NO: 67158 - RNA, 32 nt, Human
aucccugacccauggcgcugaagaggauucag

SEQ ID NO: 67159 - RNA, 32 nt, Human
aucccugaccuggccucuggggucaggaaggc

SEQ ID NO: 67160 - RNA, 32 nt, Human
aucccugagaagcagaaccacagggaaaccuc

SEQ ID NO: 67161 - RNA, 32 nt, Human
aucccugagacuguucucccugacacugugag

SEQ ID NO: 67162 - RNA, 32 nt, Human
aucccugaggcagagguugcagugagcugaga

SEQ ID NO: 67163 - RNA, 20 nt, Human
aucccugccaccagucuggg

SEQ ID NO: 67164 - RNA, 32 nt, Human
aucccugccacuaacuuaauccuugaaguguu

SEQ ID NO: 67165 - RNA, 18 nt, Human
aucccugccaggaagcag

SEQ ID NO: 67166 - RNA, 32 nt, Human
aucccugcccugccuccagccuugguggcucc

SEQ ID NO: 67167 - RNA, 32 nt, Human
aucccugccugugagccacaccuccuagcucu

SEQ ID NO: 67168 - RNA, 18 nt, Human
aucccugccuucauggaa

SEQ ID NO: 67169 - RNA, 21 nt, Human
aucccugccuuccucucugaa

SEQ ID NO: 67170 - RNA, 32 nt, Human
aucccugcgcgcccagccugccaagcagcgug

SEQ ID NO: 67171 - RNA, 32 nt, Human
aucccugcuacuugggagacugaggcaggaga

SEQ ID NO: 67172 - RNA, 32 nt, Human
aucccugcucacugcagccuccgcuucccugg

SEQ ID NO: 67173 - RNA, 32 nt, Human
aucccugcuccuuugaccuuuuuaauagcuca

SEQ ID NO: 67174 - RNA, 32 nt, Human
aucccugcugacugcccagagacucagaggaa

SEQ ID NO: 67175 - RNA, 32 nt, Human
aucccugcugcacucagugguuggcggaaaca

SEQ ID NO: 67176 - RNA, 32 nt, Human
aucccugcugcucuccagggacucacagcaug

SEQ ID NO: 67177 - RNA, 18 nt, Human
aucccugcugggcugcug

SEQ ID NO: 67178 - RNA, 32 nt, Human
aucccugcugguacacaagaccacgacuaggg

SEQ ID NO: 67179 - RNA, 32 nt, Human
aucccuggagaaagcucacccaguuagaagag

SEQ ID NO: 67180 - RNA, 32 nt, Human
aucccuggagccugagacugggugccagcuuc

SEQ ID NO: 67181 - RNA, 32 nt, Human
aucccuggcuaccucgggauuaugugcaagcu

SEQ ID NO: 67182 - RNA, 32 nt, Human
aucccuggcugucugugagcagcacuugacag

SEQ ID NO: 67183 - RNA, 32 nt, Human
aucccugggacccucacgcccugcucccuugc

SEQ ID NO: 67184 - RNA, 32 nt, Human
aucccugggcccagccagcccugcugcacaug

SEQ ID NO: 67185 - RNA, 32 nt, Human
aucccuggggcuuccuuugcucugccuuauuu

SEQ ID NO: 67186 - RNA, 32 nt, Human
aucccuggggugaagguggcugggaauuagac

SEQ ID NO: 67187 - RNA, 32 nt, Human
aucccugggguuugcaaguuguucacuuaaaa

SEQ ID NO: 67188 - RNA, 32 nt, Human
aucccuggguucugggagacugcaggugccgc

SEQ ID NO: 67189 - RNA, 32 nt, Human
aucccuggucaacccucaaacauuccggacuc

SEQ ID NO: 67190 - RNA, 32 nt, Human
aucccugguccugagaacucaggcuggcacag

SEQ ID NO: 67191 - RNA, 32 nt, Human
aucccuguauuuuuaugugaagucuccuaguu

SEQ ID NO: 67192 - RNA, 32 nt, Human
aucccuguccagucccugucaccacccaguuu

SEQ ID NO: 67193 - RNA, 32 nt, Human
aucccuguccagucccugucaucacccaguuu

SEQ ID NO: 67194 - RNA, 32 nt, Human
aucccuguccauugauuccacucuggaacucu

SEQ ID NO: 67195 - RNA, 32 nt, Human
aucccuguccuccugggcccugaggccccugc

SEQ ID NO: 67196 - RNA, 32 nt, Human
aucccugucucuucagcuucucugaugcuuga

SEQ ID NO: 67197 - RNA, 32 nt, Human
aucccugucugaagaaugcuagcccaucuggc

SEQ ID NO: 67198 - RNA, 32 nt, Human
aucccugugcagguacagcugcagggaagccc

SEQ ID NO: 67199 - RNA, 32 nt, Human
aucccugugccucacucagcuccugcugcucu

SEQ ID NO: 67200 - RNA, 32 nt, Human
aucccuguggccauggagcuccugggugagca

SEQ ID NO: 67201 - RNA, 32 nt, Human
aucccugugugaaaauggguguuaacaaaaua

SEQ ID NO: 67202 - RNA, 32 nt, Human
aucccuguucagcccaccuuaaagguguaggc

SEQ ID NO: 67203 - RNA, 32 nt, Human
aucccuuacaugccaucauagacuucauacgg

SEQ ID NO: 67204 - RNA, 32 nt, Human
aucccuuagcuacucaggaggcugaggcagga

SEQ ID NO: 67205 - RNA, 32 nt, Human
aucccuuaggccacagugauugguucagaaau

SEQ ID NO: 67206 - RNA, 32 nt, Human
aucccuucaccagcaggccuucagaagggcaa

SEQ ID NO: 67207 - RNA, 22 nt, Human
aucccuucaccuugugaacuca

SEQ ID NO: 67208 - RNA, 32 nt, Human
aucccuucaggcuucugacacacuaguggccu

SEQ ID NO: 67209 - RNA, 32 nt, Human
aucccuucauucuugcugaguucaucuccuau

SEQ ID NO: 67210 - RNA, 32 nt, Human
aucccuuccucagacgccuugugggcuggacu

SEQ ID NO: 67211 - RNA, 32 nt, Human
aucccuuccucccauuggccucuccuugccaa

SEQ ID NO: 67212 - RNA, 32 nt, Human
aucccuuccucucaagaaaauauucuuucacc

SEQ ID NO: 67213 - RNA, 32 nt, Human
aucccuucuaaggcuguccaccaggagcccgg

SEQ ID NO: 67214 - RNA, 32 nt, Human
aucccuucucucuugcccagagagcggcauuu

SEQ ID NO: 67215 - RNA, 32 nt, Human
aucccuucucuuccuccacacccuguccuuuc

SEQ ID NO: 67216 - RNA, 32 nt, Human
aucccuucugagaucaucucccccaagaaagu

SEQ ID NO: 67217 - RNA, 32 nt, Human
aucccuugaacccaggaggcagaaguugcagu

SEQ ID NO: 67218 - RNA, 32 nt, Human
aucccuugacccuuauaacuagaagggaccuu

SEQ ID NO: 67219 - RNA, 32 nt, Human
aucccuugagccuaggagguugaggcugcagu

SEQ ID NO: 67220 - RNA, 32 nt, Human
aucccuugaguccaggagguugaggcugcagu

SEQ ID NO: 67221 - RNA, 32 nt, Human
aucccuugccagcacaugaaaacaaacuggaa

SEQ ID NO: 67222 - RNA, 32 nt, Human
aucccuugcuuugguauaauaauuugaacuuu

SEQ ID NO: 67223 - RNA, 32 nt, Human
aucccuugguucacuugagugugcaagucauu

SEQ ID NO: 67224 - RNA, 32 nt, Human
aucccuugugaaguguagagcagcagagaggc

SEQ ID NO: 67225 - RNA, 32 nt, Human
aucccuugugaaugucccuuagggaggcacca

SEQ ID NO: 67226 - RNA, 32 nt, Human
aucccuuuaagagaaccaaugauucuuuagga

SEQ ID NO: 67227 - RNA, 32 nt, Human
aucccuuuauuucagcccaucccuucguuucc

SEQ ID NO: 67228 - RNA, 19 nt, Human
aucccuuucuucccuuccc

SEQ ID NO: 67229 - RNA, 31 nt, Human
aucccuuuggucaaggagagggagagagagg

SEQ ID NO: 67230 - RNA, 32 nt, Human
aucccuuuuagcuucaccauccugggucaagc

SEQ ID NO: 67231 - RNA, 32 nt, Human
aucccuuuugauugagccuccaccucugggau

SEQ ID NO: 67232 - RNA, 32 nt, Human
aucccuuuugcagcuuuucuuuuuggcucucu

SEQ ID NO: 67233 - RNA, 32 nt, Human
aucccuuuuucuuuuuauccuuaguucuaguc

SEQ ID NO: 67234 - RNA, 32 nt, Human
aucccuuuuuguaaucaucucaucucagggua

SEQ ID NO: 67235 - RNA, 32 nt, Human
auccgaagggaaccuuggggaacugguggccu

SEQ ID NO: 67236 - RNA, 32 nt, Human
auccgacccccgaccaccaccuccgggaaaag

SEQ ID NO: 67237 - RNA, 32 nt, Human
auccgagaaauauacagaaagcacuuaagaga

SEQ ID NO: 67238 - RNA, 32 nt, Human
auccgagacucugccaggauucacaugccacu

SEQ ID NO: 67239 - RNA, 32 nt, Human
auccgagccagcuaugcugcagaagagcguau

SEQ ID NO: 67240 - RNA, 26 nt, Human
auccgaggcugcaggcaaggcuuggg

SEQ ID NO: 67241 - RNA, 32 nt, Human
auccgagggcagcagugcuggguggagagagc

SEQ ID NO: 67242 - RNA, 32 nt, Human
auccgaggucucaauccauugcgcccaggcug

SEQ ID NO: 67243 - RNA, 32 nt, Human
auccgagucggccccggggagcuccaggagag

SEQ ID NO: 67244 - RNA, 32 nt, Human
auccgaguuagcaggcagcacuguccagaugg

SEQ ID NO: 67245 - RNA, 32 nt, Human
auccgauguccugcacucggccuggauccuca

SEQ ID NO: 67246 - RNA, 32 nt, Human
auccgauuagccgacuggcccagauccagcag

SEQ ID NO: 67247 - RNA, 32 nt, Human
auccgauuucuacaacacuacagagcacuguu

SEQ ID NO: 67248 - RNA, 32 nt, Human
auccgcaauguggagcagcagccacugcacag

SEQ ID NO: 67249 - RNA, 32 nt, Human
auccgcacccaguuugauaccugcacuguccu

SEQ ID NO: 67250 - RNA, 32 nt, Human
auccgcagagucacucacccacuguguuucug

SEQ ID NO: 67251 - RNA, 32 nt, Human
auccgcaggcuuaaccagcagccuucucaggg

SEQ ID NO: 67252 - RNA, 32 nt, Human
auccgcagggaugucaacgucaauaucacagg

SEQ ID NO: 67253 - RNA, 32 nt, Human
auccgcaugggugacagcaaguucuuccgcga

SEQ ID NO: 67254 - RNA, 32 nt, Human
auccgccacugcacuccagccugggugacaga

SEQ ID NO: 67255 - RNA, 32 nt, Human
auccgccaucugcaguggagccgccaccaaaa

SEQ ID NO: 67256 - RNA, 32 nt, Human
auccgccauggagccagagagggaagggaccg

SEQ ID NO: 67257 - RNA, 32 nt, Human
auccgccauuacacuccagccugggugacaga

SEQ ID NO: 67258 - RNA, 32 nt, Human
auccgccccuuagagcccucuggcuagaggag

SEQ ID NO: 67259 - RNA, 32 nt, Human
auccgcccgccgguuccccaucauguccgaac

SEQ ID NO: 67260 - RNA, 32 nt, Human
auccgcccgccuccgccuccccaagcgcugag

SEQ ID NO: 67261 - RNA, 18 nt, Human
auccgcccucuguugcuc

SEQ ID NO: 67262 - RNA, 32 nt, Human
auccgcccuuuucauagagcgcuguuucuuga

SEQ ID NO: 67263 - RNA, 32 nt, Human
auccgccucagccucccaacaugcugggauua

SEQ ID NO: 67264 - RNA, 32 nt, Human
auccgccucugccgcccugccuggcacccacg

SEQ ID NO: 67265 - RNA, 32 nt, Human
auccgccugguaacgggcgucuucccagaugc

SEQ ID NO: 67266 - RNA, 32 nt, Human
auccgccuguagucccagcuacucaggaggcu

SEQ ID NO: 67267 - RNA, 32 nt, Human
auccgccuuucccaccgcccucccuccccagc

SEQ ID NO: 67268 - RNA, 32 nt, Human
auccgcggggagggcacaacagcugcuaccug

SEQ ID NO: 67269 - RNA, 32 nt, Human
auccgcggugaagcacugccucagcuaccagc

SEQ ID NO: 67270 - RNA, 23 nt, Human
auccgcguccacggaagagcagc

SEQ ID NO: 67271 - RNA, 32 nt, Human
auccgcuacucuuacuccccugccucccccua

SEQ ID NO: 67272 - RNA, 32 nt, Human
auccgcuacuugcaccaaccagucccggguua

SEQ ID NO: 67273 - RNA, 32 nt, Human
auccgcuccccugacccagcaguuuccucugc

SEQ ID NO: 67274 - RNA, 32 nt, Human
auccgcucugcccgcuguguccugggcaugga

SEQ ID NO: 67275 - RNA, 32 nt, Human
auccgcugcuucuguggaagugagcaugguug

SEQ ID NO: 67276 - RNA, 32 nt, Human
auccgcugucugcugcugccucuuuccuccuc

SEQ ID NO: 67277 - RNA, 32 nt, Human
auccgcuucucagacuccaauggcaguguccu

SEQ ID NO: 67278 - RNA, 32 nt, Human
auccgcuugguggaggucgagugggugcaagg

SEQ ID NO: 67279 - RNA, 32 nt, Human
auccggaagaaagcuuuacacacgucuugcac

SEQ ID NO: 67280 - RNA, 32 nt, Human
auccggaccacgugucaagguguaaucucgac

SEQ ID NO: 67281 - RNA, 32 nt, Human
auccggaccucaccaccucuuuuccuuugagc

SEQ ID NO: 67282 - RNA, 32 nt, Human
auccggacuucuaacaccaucggugaguuuca

SEQ ID NO: 67283 - RNA, 32 nt, Human
auccggagagcugucuggugugcaggacuggg

SEQ ID NO: 67284 - RNA, 32 nt, Human
auccggagaugugaguuuggggcugaagaaga

SEQ ID NO: 67285 - RNA, 32 nt, Human
auccggagcaguaaguggagaagagcucucca

SEQ ID NO: 67286 - RNA, 32 nt, Human
auccggagccaagacuuguggacagcacuuca

SEQ ID NO: 67287 - RNA, 32 nt, Human
auccggagugagcaauggaguggcugccaugg

SEQ ID NO: 67288 - RNA, 32 nt, Human
auccggaucccagaacucuggucuccaaauua

SEQ ID NO: 67289 - RNA, 32 nt, Human
auccggcacccucugggguaggagaacagcca

SEQ ID NO: 67290 - RNA, 32 nt, Human
auccggcagagggaggaaggcagagcaagugg

SEQ ID NO: 67291 - RNA, 32 nt, Human
auccggccccuccccucgccuccucuccuagg

SEQ ID NO: 67292 - RNA, 32 nt, Human
auccggcccuuaccggcaagcagcgggcuaac

SEQ ID NO: 67293 - RNA, 32 nt, Human
auccggcugggagcaugaccuuggcgucuguu

SEQ ID NO: 67294 - RNA, 32 nt, Human
auccgggaagcagagguuguagugagccaaga

SEQ ID NO: 67295 - RNA, 32 nt, Human
auccgggaagggcggcugcgggcagacgcggc

SEQ ID NO: 67296 - RNA, 32 nt, Human
auccgggacaccugggccgggcuguagaucag

SEQ ID NO: 67297 - RNA, 32 nt, Human
auccgggaccuucagacccagggaaaggguga

SEQ ID NO: 67298 - RNA, 32 nt, Human
auccgggagaugcauguugcagugagcugaga

SEQ ID NO: 67299 - RNA, 32 nt, Human
auccgggaggcagagauugcagugggccuaga

SEQ ID NO: 67300 - RNA, 32 nt, Human
auccgggaggcagagguugcaggagcugagau

SEQ ID NO: 67301 - RNA, 32 nt, Human
auccgggaggcggagguugcagugaaccgaac

SEQ ID NO: 67302 - RNA, 32 nt, Human
auccgggaggcggagguugcggugagccaagg

SEQ ID NO: 67303 - RNA, 32 nt, Human
auccgggaggcgggucuugcagugagcagaga

SEQ ID NO: 67304 - RNA, 32 nt, Human
auccgggagguggagguugcagugagccaaga

SEQ ID NO: 67305 - RNA, 32 nt, Human
auccgggcagaggcgccccucaccucccggac

SEQ ID NO: 67306 - RNA, 32 nt, Human
auccgggccacugucccaggucccaggucccg

SEQ ID NO: 67307 - RNA, 32 nt, Human
auccgggcugcucuuccccaucuggaaguggc

SEQ ID NO: 67308 - RNA, 32 nt, Human
auccgggcugggcuguucuccugcugcucucc

SEQ ID NO: 67309 - RNA, 32 nt, Human
auccggggagguggaaguugcagugggccaag

SEQ ID NO: 67310 - RNA, 32 nt, Human
auccgggggcagcucuggaggggguuugcugg

SEQ ID NO: 67311 - RNA, 32 nt, Human
auccggggguccagggaauggagcucaggucc

SEQ ID NO: 67312 - RNA, 32 nt, Human
auccgggugugguggcuucugccugaaauccc

SEQ ID NO: 67313 - RNA, 32 nt, Human
auccggucagcagccccuguggcuaaggaaca

SEQ ID NO: 67314 - RNA, 32 nt, Human
auccggucgucggggauagggaagggagggga

SEQ ID NO: 67315 - RNA, 18 nt, Human
auccgguggccuauucca

SEQ ID NO: 67316 - RNA, 32 nt, Human
auccgguggcugggaaaccucacccuugcacc

SEQ ID NO: 67317 - RNA, 32 nt, Human
auccgguuccccagucccuggagccaccgcgg

SEQ ID NO: 67318 - RNA, 32 nt, Human
auccgguuguguccugugggagggucagaggc

SEQ ID NO: 67319 - RNA, 16 nt, Human
auccguaaugccuccu

SEQ ID NO: 67320 - RNA, 32 nt, Human
auccgucacagagagauuuaagugaucuucau

SEQ ID NO: 67321 - RNA, 32 nt, Human
auccgucagccccaggagaguccugagaugau

SEQ ID NO: 67322 - RNA, 32 nt, Human
auccguccagaaggcggggagagcagcagcgg

SEQ ID NO: 67323 - RNA, 32 nt, Human
auccguccagcucagccauccagccugucucu

SEQ ID NO: 67324 - RNA, 32 nt, Human
auccguccauccuccauccaucauccauccau

SEQ ID NO: 67325 - RNA, 32 nt, Human
auccgucguugcugcccagggugcgcgucggg

SEQ ID NO: 67326 - RNA, 32 nt, Human
auccgucguuggcgcccagggugcgcgucggg

SEQ ID NO: 67327 - RNA, 32 nt, Human
auccgucuugaaggcagcuccucucugugccg

SEQ ID NO: 67328 - RNA, 25 nt, Human
auccgugagguggagguuguaguga

SEQ ID NO: 67329 - RNA, 32 nt, Human
auccgugagguggagguuguagugagucaaga

SEQ ID NO: 67330 - RNA, 31 nt, Human
auccguggcagguacgccacagcagacacaa

SEQ ID NO: 67331 - RNA, 32 nt, Human
auccguggcugcaggggucucaugugguccuc

SEQ ID NO: 67332 - RNA, 32 nt, Human
auccguggcuuccuuggcuugucgucgcauca

SEQ ID NO: 67333 - RNA, 32 nt, Human
auccgugggcuucagugucuuggucuguggga

SEQ ID NO: 67334 - RNA, 32 nt, Human
auccgugguguuuuguaagcacugcuggcgau

SEQ ID NO: 67335 - RNA, 32 nt, Human
auccgugucaacccagccauggggaagaucac

SEQ ID NO: 67336 - RNA, 32 nt, Human
auccguuugguuuauggagaaaaagaaaaugg

SEQ ID NO: 67337 - RNA, 32 nt, Human
auccguuuuauauccagguuucagaggaccug

SEQ ID NO: 67338 - RNA, 32 nt, Human
auccuaaaaagauacaccuugcaguagcagag

SEQ ID NO: 67339 - RNA, 32 nt, Human
auccuaaaagaggcgguggaagugaaaauucu

SEQ ID NO: 67340 - RNA, 32 nt, Human
auccuaaaaggaaugccaauuaaguuuuguua

SEQ ID NO: 67341 - RNA, 32 nt, Human
auccuaaaccauugguaauuuccacugucuuu

SEQ ID NO: 67342 - RNA, 32 nt, Human
auccuaaacuagcgggcaccacagaccagcug

SEQ ID NO: 67343 - RNA, 32 nt, Human
auccuaaagcagcaagagaaaaggaacaaaua

SEQ ID NO: 67344 - RNA, 32 nt, Human
auccuaaagugcugagaugacaggcaugagcc

SEQ ID NO: 67345 - RNA, 32 nt, Human
auccuaaagugcugggauuacaggcgugagcu

SEQ ID NO: 67346 - RNA, 32 nt, Human
auccuaacaccuccauaauauuuucugcuaaa

SEQ ID NO: 67347 - RNA, 32 nt, Human
auccuaacacggugaaaucccgucucuauuaa

SEQ ID NO: 67348 - RNA, 32 nt, Human
auccuaacccugggcucccuggaggacucuag

SEQ ID NO: 67349 - RNA, 32 nt, Human
auccuaaccucugucuaccaaccuuuuugcuc

SEQ ID NO: 67350 - RNA, 32 nt, Human
auccuaacuucugaguucaucucugucucugc

SEQ ID NO: 67351 - RNA, 32 nt, Human
auccuaagcccuuuuauuaauguauaaccagg

SEQ ID NO: 67352 - RNA, 32 nt, Human
auccuaaucuugugccucucccccuuugcuag

SEQ ID NO: 67353 - RNA, 32 nt, Human
auccuaauggucugggugauuggaugguuuga

SEQ ID NO: 67354 - RNA, 32 nt, Human
auccuaauucccuguucuccugccucacuauu

SEQ ID NO: 67355 - RNA, 32 nt, Human
auccuaauugugguccugccucuuuucuaagc

SEQ ID NO: 67356 - RNA, 32 nt, Human
auccuacacucugagggaguuggcaacgcaug

SEQ ID NO: 67357 - RNA, 32 nt, Human
auccuacagcauaaagcacauugcugagccag

SEQ ID NO: 67358 - RNA, 32 nt, Human
auccuacaggacagcaaggagaugccaccuaa

SEQ ID NO: 67359 - RNA, 32 nt, Human
auccuacauggcuaaaagaagcagaagcaagu

SEQ ID NO: 67360 - RNA, 32 nt, Human
auccuaccacugcacuucagccuaggugacau

SEQ ID NO: 67361 - RNA, 32 nt, Human
auccuacccucgggcccaccuggccaccugag

SEQ ID NO: 67362 - RNA, 32 nt, Human
auccuaccggaagaucaaggaggcaggccaga

SEQ ID NO: 67363 - RNA, 32 nt, Human
auccuaccucccugaccagcucuggcuucugc

SEQ ID NO: 67364 - RNA, 32 nt, Human
auccuaccuucccccaccuccccaccguaaua

SEQ ID NO: 67365 - RNA, 32 nt, Human
auccuacucaacaaaaggaaggguggucagaa

SEQ ID NO: 67366 - RNA, 32 nt, Human
auccuacucagcaaggccccaucugaucagcu

SEQ ID NO: 67367 - RNA, 32 nt, Human
auccuacuucaucagagaauucacaguggaaa

SEQ ID NO: 67368 - RNA, 32 nt, Human
auccuagaacacagugcauuugcaagucauaa

SEQ ID NO: 67369 - RNA, 32 nt, Human
auccuagacucacugucugauccggaaggcac

SEQ ID NO: 67370 - RNA, 32 nt, Human
auccuagagccagcugauaauauuuaauaauc

SEQ ID NO: 67371 - RNA, 19 nt, Human
auccuagcaccuugggagg

SEQ ID NO: 67372 - RNA, 31 nt, Human
auccuagcacuuuugggaggcagagauggga

SEQ ID NO: 67373 - RNA, 32 nt, Human
auccuagcagccgccucccagcccugccuagg

SEQ ID NO: 67374 - RNA, 32 nt, Human
auccuagcaguggagcaguaccagcugggaca

SEQ ID NO: 67375 - RNA, 32 nt, Human
auccuagccaaggggauuucguguaaauguga

SEQ ID NO: 67376 - RNA, 32 nt, Human
auccuagccagccaccuugucuccaguccugg

SEQ ID NO: 67377 - RNA, 32 nt, Human
auccuagccugccucgcaccugcugagccgca

SEQ ID NO: 67378 - RNA, 32 nt, Human
auccuagcuacucgggagacugacgggagaau

SEQ ID NO: 67379 - RNA, 32 nt, Human
auccuagcucacaugccuccccuagcaguuaa

SEQ ID NO: 67380 - RNA, 32 nt, Human
auccuaggaaacuagugggaaacuggaaauca

SEQ ID NO: 67381 - RNA, 32 nt, Human
auccuaggagggugauguugacugagacuuca

SEQ ID NO: 67382 - RNA, 32 nt, Human
auccuaggcagacugugucugaaggagcuggu

SEQ ID NO: 67383 - RNA, 32 nt, Human
auccuaggccgagaagaaccugcuagcuugac

SEQ ID NO: 67384 - RNA, 32 nt, Human
auccuaggcugggcuggcccacccucaccccc

SEQ ID NO: 67385 - RNA, 32 nt, Human
auccuagggccuggguuuucauguuuuugaaa

SEQ ID NO: 67386 - RNA, 32 nt, Human
auccuaguaccaacuuuaucacuucugauggc

SEQ ID NO: 67387 - RNA, 32 nt, Human
auccuaguuuauacuagacuaccauuuaaaaa

SEQ ID NO: 67388 - RNA, 32 nt, Human
auccuaguuuauacuauacuaccauuuaaaua

SEQ ID NO: 67389 - RNA, 32 nt, Human
auccuauacuauagggacuguaguaucuauga

SEQ ID NO: 67390 - RNA, 32 nt, Human
auccuauacugcacccuguccaccucugcucc

SEQ ID NO: 67391 - RNA, 32 nt, Human
auccuauaugaaguuccugaaacugaccuuug

SEQ ID NO: 67392 - RNA, 32 nt, Human
auccuaucacagugcccaugccauacaugcca

SEQ ID NO: 67393 - RNA, 32 nt, Human
auccuauggaagagaauauuccuacuugcagu

SEQ ID NO: 67394 - RNA, 32 nt, Human
auccuauuaguucugucccuccagagaacccu

SEQ ID NO: 67395 - RNA, 32 nt, Human
auccuauuaguucugucccucuagagaacccc

SEQ ID NO: 67396 - RNA, 32 nt, Human
auccucaaaaccuaguaaggggaccaaugauu

SEQ ID NO: 67397 - RNA, 32 nt, Human
auccucaaaccugaaaacaaguuucacgucaa

SEQ ID NO: 67398 - RNA, 32 nt, Human
auccucaaaguuaaguagucaggaaagggggc

SEQ ID NO: 67399 - RNA, 32 nt, Human
auccucaaauccuuccacagugaccccaguuu

SEQ ID NO: 67400 - RNA, 24 nt, Human
auccucaaggacauuacaguugag

SEQ ID NO: 67401 - RNA, 32 nt, Human
auccucaaggauuuuauccuggaacauuacag

SEQ ID NO: 67402 - RNA, 32 nt, Human
auccucacacugacgggggcuccauacggacc

SEQ ID NO: 67403 - RNA, 32 nt, Human
auccucacagucaagugcgaggcuggggcuga

SEQ ID NO: 67404 - RNA, 32 nt, Human
auccucaccaagcucauuacaucugccagggc

SEQ ID NO: 67405 - RNA, 32 nt, Human
auccucaccugggguucucugugugcaaagcu

SEQ ID NO: 67406 - RNA, 32 nt, Human
auccucaccuuuccuucucaccuguccugcuu

SEQ ID NO: 67407 - RNA, 21 nt, Human
auccucacucugagucuuggu

SEQ ID NO: 67408 - RNA, 32 nt, Human
auccucacugacagcuucggccgcaucaagcg

SEQ ID NO: 67409 - RNA, 32 nt, Human
auccucacugcacuccagcagaggcuagagga

SEQ ID NO: 67410 - RNA, 32 nt, Human
auccucacugggcucacugcaggcaugcugaa

SEQ ID NO: 67411 - RNA, 32 nt, Human
auccucacuuugcugccccaccaucuugcuga

SEQ ID NO: 67412 - RNA, 32 nt, Human
auccucagaaugcaggaagugccugugcuugc

SEQ ID NO: 67413 - RNA, 32 nt, Human
auccucagaggacuuucccacuucgcuccugu

SEQ ID NO: 67414 - RNA, 32 nt, Human
auccucagaggaugaagccaccaggaauuuca

SEQ ID NO: 67415 - RNA, 32 nt, Human
auccucagccauguucaagugaaguaagccug

SEQ ID NO: 67416 - RNA, 32 nt, Human
auccucagggcagagguguuaagugagaagca

SEQ ID NO: 67417 - RNA, 32 nt, Human
auccucaguagcugcaacuacagccauacccc

SEQ ID NO: 67418 - RNA, 32 nt, Human
auccucaguggggauacaagacauauaaagua

SEQ ID NO: 67419 - RNA, 32 nt, Human
auccucaguucugaaucuaccuuggccucaag

SEQ ID NO: 67420 - RNA, 32 nt, Human
auccucauaggugagucuuuucacacaucugc

SEQ ID NO: 67421 - RNA, 32 nt, Human
auccucaucugucauaucaagaaaucacuaua

SEQ ID NO: 67422 - RNA, 32 nt, Human
auccucauuaccaggaucuauaccuuuaagcu

SEQ ID NO: 67423 - RNA, 32 nt, Human
auccuccaaaagugcugggauuacaggcauga

SEQ ID NO: 67424 - RNA, 32 nt, Human
auccuccaagaauuaaaugauaagcuaggauu

SEQ ID NO: 67425 - RNA, 16 nt, Human
auccuccaccccucca

SEQ ID NO: 67426 - RNA, 32 nt, Human
auccuccagagaaacccagggaggaagacugu

SEQ ID NO: 67427 - RNA, 32 nt, Human
auccuccagcuucagcuacccaaguagcugga

SEQ ID NO: 67428 - RNA, 32 nt, Human
auccuccaugccacauuccacccugguggcca

SEQ ID NO: 67429 - RNA, 32 nt, Human
auccucccaaaaugcugggauuacaggcauaa

SEQ ID NO: 67430 - RNA, 32 nt, Human
auccucccaaagugcugggauuacaaguguga

SEQ ID NO: 67431 - RNA, 32 nt, Human
auccucccaaagugcugggauuacagguguga

SEQ ID NO: 67432 - RNA, 32 nt, Human
auccucccaaagugcugggauuauaggccuga

SEQ ID NO: 67433 - RNA, 32 nt, Human
auccucccaaaguguugggauuacagguguga

SEQ ID NO: 67434 - RNA, 32 nt, Human
auccucccaaguagcuggaacuacaggugugc

SEQ ID NO: 67435 - RNA, 32 nt, Human
auccucccaaguagcugggauuacagaugccu

SEQ ID NO: 67436 - RNA, 32 nt, Human
auccucccaaguaggugggauuacaggugccc

SEQ ID NO: 67437 - RNA, 32 nt, Human
auccucccaauguauguaucccuuuacucaca

SEQ ID NO: 67438 - RNA, 21 nt, Human
auccucccacuucagccucca

SEQ ID NO: 67439 - RNA, 32 nt, Human
auccucccagaaaggaucaguguuagaauggg

SEQ ID NO: 67440 - RNA, 21 nt, Human
auccucccauccguguuguga

SEQ ID NO: 67441 - RNA, 32 nt, Human
auccucccauggcuuccccugcccucacuccc

SEQ ID NO: 67442 - RNA, 32 nt, Human
auccuccccauuaucucccccuugucuggaua

SEQ ID NO: 67443 - RNA, 32 nt, Human
auccuccccuccacuccagcccaccggugacu

SEQ ID NO: 67444 - RNA, 32 nt, Human
auccuccccugcccugaugucagcugcuuugc

SEQ ID NO: 67445 - RNA, 32 nt, Human
auccuccccuggcugcagaugcuuagcugggc

SEQ ID NO: 67446 - RNA, 32 nt, Human
auccucccgaguaacugggacuacagaugcgu

SEQ ID NO: 67447 - RNA, 22 nt, Human
auccucccgccucagccuucca

SEQ ID NO: 67448 - RNA, 32 nt, Human
auccucccucccccaccgucccucccuuuucu

SEQ ID NO: 67449 - RNA, 32 nt, Human
auccucccucccccagccaccacccucaggug

SEQ ID NO: 67450 - RNA, 32 nt, Human
auccucccuccccuaauuaaagucucuuuuug

SEQ ID NO: 67451 - RNA, 32 nt, Human
auccucccugcacugcauucgcacaaacugcu

SEQ ID NO: 67452 - RNA, 32 nt, Human
auccuccgaccaucacggacgugaccagcgcc

SEQ ID NO: 67453 - RNA, 32 nt, Human
auccuccgagacucaaagggcaaggccauggg

SEQ ID NO: 67454 - RNA, 32 nt, Human
auccuccgcuccucccccuaguccuggugcuc

SEQ ID NO: 67455 - RNA, 32 nt, Human
auccuccggaguagcugggauuacaggcgccu

SEQ ID NO: 67456 - RNA, 24 nt, Human
auccuccuccagggacugcuguga

SEQ ID NO: 67457 - RNA, 32 nt, Human
auccuccucuagacaaaaccagccuuuaaaau

SEQ ID NO: 67458 - RNA, 32 nt, Human
auccuccucucaucugugacaacuccacgagc

SEQ ID NO: 67459 - RNA, 32 nt, Human
auccuccucugccuuuccccugcccuugaucc

SEQ ID NO: 67460 - RNA, 32 nt, Human
auccuccugagcagcugggacuacaggcacac

SEQ ID NO: 67461 - RNA, 32 nt, Human
auccuccugaguagcugggauuacaggcgugu

SEQ ID NO: 67462 - RNA, 32 nt, Human
auccuccugaguagcugggauuacaggugccu

SEQ ID NO: 67463 - RNA, 32 nt, Human
auccuccugaguagcugggguuacaggugugu

SEQ ID NO: 67464 - RNA, 32 nt, Human
auccuccugagugcuggaccucauuaaagugc

SEQ ID NO: 67465 - RNA, 32 nt, Human
auccuccugcaguuucccagcugcagccuagg

SEQ ID NO: 67466 - RNA, 32 nt, Human
auccuccugccccugggcucucagggaccccc

SEQ ID NO: 67467 - RNA, 22 nt, Human
auccuccugccucagccuucca

SEQ ID NO: 67468 - RNA, 32 nt, Human
auccuccugccucagccuucugaguagcuggg

SEQ ID NO: 67469 - RNA, 32 nt, Human
auccuccugccugggccugccaaagugcuagg

SEQ ID NO: 67470 - RNA, 32 nt, Human
auccuccugccugucagccugucagcguucuc

SEQ ID NO: 67471 - RNA, 21 nt, Human
auccuccuguccccucuggga

SEQ ID NO: 67472 - RNA, 32 nt, Human
auccuccuucacucccugucauaguuaccgau

SEQ ID NO: 67473 - RNA, 32 nt, Human
auccucgaugaggauguggaaaugcuaaggca

SEQ ID NO: 67474 - RNA, 32 nt, Human
auccucgcagagugggagaggcugcagcaagg

SEQ ID NO: 67475 - RNA, 32 nt, Human
auccucgcgcguccucacccugucucuaccag

SEQ ID NO: 67476 - RNA, 32 nt, Human
auccucgcuggugaagacccagaggaaagggg

SEQ ID NO: 67477 - RNA, 32 nt, Human
auccucggcaaggacacaacacugccccagag

SEQ ID NO: 67478 - RNA, 32 nt, Human
auccucggggccgcaggaaggaagaggaggca

SEQ ID NO: 67479 - RNA, 32 nt, Human
auccucguuguugcugucaucauguucacugu

SEQ ID NO: 67480 - RNA, 32 nt, Human
auccucuaacagcaaaccaaggugcuauucuu

SEQ ID NO: 67481 - RNA, 32 nt, Human
auccucuagaugggugugagacccuggccccg

SEQ ID NO: 67482 - RNA, 32 nt, Human
auccucuagcuugaaacuuuugcucaaguuua

SEQ ID NO: 67483 - RNA, 32 nt, Human
auccucuaugugucacaagaccagucuuucug

SEQ ID NO: 67484 - RNA, 32 nt, Human
auccucucacagaaacacugggccaaacagug

SEQ ID NO: 67485 - RNA, 32 nt, Human
auccucucaggccuccucucccccgacaaaaa

SEQ ID NO: 67486 - RNA, 28 nt, Human
auccucuccacagcugccucuucccucu

SEQ ID NO: 67487 - RNA, 32 nt, Human
auccucucccuaaucccaaagccacuccuacc

SEQ ID NO: 67488 - RNA, 24 nt, Human
auccucucccuucuuacaccguga

SEQ ID NO: 67489 - RNA, 24 nt, Human
auccucucccuucuuacacuguga

SEQ ID NO: 67490 - RNA, 32 nt, Human
auccucucuaguccuuuuguuuggaaacugag

SEQ ID NO: 67491 - RNA, 32 nt, Human
auccucucucagcguccagccuagacggcggu

SEQ ID NO: 67492 - RNA, 32 nt, Human
auccucucuccucagccucccaaagugcuggg

SEQ ID NO: 67493 - RNA, 32 nt, Human
auccucucucucuugagcaaaguauagcaaca

SEQ ID NO: 67494 - RNA, 32 nt, Human
auccucucuuucucaucuggcuuuccuuagcc

SEQ ID NO: 67495 - RNA, 32 nt, Human
auccucugaaacccucucugugccccaaguac

SEQ ID NO: 67496 - RNA, 32 nt, Human
auccucugagugacccugguuucugagcucca

SEQ ID NO: 67497 - RNA, 21 nt, Human
auccucugccaccucucucuu

SEQ ID NO: 67498 - RNA, 32 nt, Human
auccucugccuccccuuccucuucuuguuuug

SEQ ID NO: 67499 - RNA, 32 nt, Human
auccucugcuccauuucacucuuguccucaca

SEQ ID NO: 67500 - RNA, 32 nt, Human
auccucugcucccaggggaaugugggagagaa

SEQ ID NO: 67501 - RNA, 32 nt, Human
auccucuggcaugccuuggccucccaaagggc

SEQ ID NO: 67502 - RNA, 32 nt, Human
auccucuuaaguauuccugucuccaaaggacc

SEQ ID NO: 67503 - RNA, 32 nt, Human
auccucuucauacccccucaugcacccaugaa

SEQ ID NO: 67504 - RNA, 32 nt, Human
auccucuuccuccucucgcugccagacuucau

SEQ ID NO: 67505 - RNA, 32 nt, Human
auccucuucuccccguacugccucaacccuga

SEQ ID NO: 67506 - RNA, 22 nt, Human
auccucuugccuuggccugcca

SEQ ID NO: 67507 - RNA, 32 nt, Human
auccucuugguuggcccccuugucagucccag

SEQ ID NO: 67508 - RNA, 32 nt, Human
auccucuuuucuccagaguagggaagacuccc

SEQ ID NO: 67509 - RNA, 32 nt, Human
auccucuuuugaucuugugugaccuccuggag

SEQ ID NO: 67510 - RNA, 31 nt, Human
auccucuuuuucugggccccugugucucggg

SEQ ID NO: 67511 - RNA, 32 nt, Human
auccugaaaugaggcagugcauuguggagaaa

SEQ ID NO: 67512 - RNA, 32 nt, Human
auccugaaauuucagccaugaaucaggcauaa

SEQ ID NO: 67513 - RNA, 31 nt, Human
auccugaagagaccuucaccugggugccacg

SEQ ID NO: 67514 - RNA, 32 nt, Human
auccugaagcuaagguacuugucuccuugucu

SEQ ID NO: 67515 - RNA, 32 nt, Human
auccugaaugacguugaaaacucccccucccc

SEQ ID NO: 67516 - RNA, 32 nt, Human
auccugaaugugccccuggaccuucuggaccc

SEQ ID NO: 67517 - RNA, 32 nt, Human
auccugaauguucaauaacuauccacaaacuc

SEQ ID NO: 67518 - RNA, 32 nt, Human
auccugaauguucaguacuauccacaaacuca

SEQ ID NO: 67519 - RNA, 32 nt, Human
auccugacacauucugaguaacaucagcagga

SEQ ID NO: 67520 - RNA, 32 nt, Human
auccugacaucucauuucuauuuucuguaauu

SEQ ID NO: 67521 - RNA, 32 nt, Human
auccugacauuggccaggcaugguggcucacg

SEQ ID NO: 67522 - RNA, 32 nt, Human
auccugaccacucuugaacccagaaggaggac

SEQ ID NO: 67523 - RNA, 32 nt, Human
auccugaccagugcaaccacgggaugccuccu

SEQ ID NO: 67524 - RNA, 32 nt, Human
auccugaccccagcagccucagaaggauccgu

SEQ ID NO: 67525 - RNA, 32 nt, Human
auccugacccccaggcuggagaggagccaaaa

SEQ ID NO: 67526 - RNA, 32 nt, Human
auccugacugccucuuggguugucaaaaccca

SEQ ID NO: 67527 - RNA, 20 nt, Human
auccugagagcccgagcgcc

SEQ ID NO: 67528 - RNA, 32 nt, Human
auccugagaguaagcaaaggaaccaugagaac

SEQ ID NO: 67529 - RNA, 32 nt, Human
auccugagcgcaggccaggguuguuugguuuu

SEQ ID NO: 67530 - RNA, 32 nt, Human
auccugagcugagcugcuuuucuugaaguugu

SEQ ID NO: 67531 - RNA, 32 nt, Human
auccugaggauagggcagagugcccagggugg

SEQ ID NO: 67532 - RNA, 32 nt, Human
auccugaggcauagaaauugaagaauuuguaa

SEQ ID NO: 67533 - RNA, 22 nt, Human
auccugagggcuggccccugcu

SEQ ID NO: 67534 - RNA, 32 nt, Human
auccugagggguccccaggggaggccagacuc

SEQ ID NO: 67535 - RNA, 32 nt, Human
auccugaguaguaaucucacacuucauccuau

SEQ ID NO: 67536 - RNA, 32 nt, Human
auccugaguccuggcccuccugggaucugggg

SEQ ID NO: 67537 - RNA, 32 nt, Human
auccugaguugaaauuuauccuaaagauauua

SEQ ID NO: 67538 - RNA, 32 nt, Human
auccugauaaucaaggcuuagaggaggaaguu

SEQ ID NO: 67539 - RNA, 32 nt, Human
auccugauacccuuuccuucuccaugucagua

SEQ ID NO: 67540 - RNA, 32 nt, Human
auccugcaacagaagcauucucuaggucccag

SEQ ID NO: 67541 - RNA, 32 nt, Human
auccugcaccccagucccccagcccuaaaucc

SEQ ID NO: 67542 - RNA, 32 nt, Human
auccugcaccuccucccucucccuucaccuca

SEQ ID NO: 67543 - RNA, 25 nt, Human
auccugcacgccauucuccaccuca

SEQ ID NO: 67544 - RNA, 32 nt, Human
auccugcagaggagccgccuucugcugucugu

SEQ ID NO: 67545 - RNA, 32 nt, Human
auccugcagagggucaaggagcagggauguug

SEQ ID NO: 67546 - RNA, 32 nt, Human
auccugcagcacaagcuccuccacucacugcc

SEQ ID NO: 67547 - RNA, 23 nt, Human
auccugcagcagcugagggggug

SEQ ID NO: 67548 - RNA, 32 nt, Human
auccugcagccuucccaguccugcugcuugug

SEQ ID NO: 67549 - RNA, 32 nt, Human
auccugcagcuggcuggcuaccagugagcagc

SEQ ID NO: 67550 - RNA, 32 nt, Human
auccugcaggcccugaggaccgcgcugaagca

SEQ ID NO: 67551 - RNA, 32 nt, Human
auccugcagggccuuguuuuuguauuuggaga

SEQ ID NO: 67552 - RNA, 32 nt, Human
auccugcagucccucacuggcugcccucacaa

SEQ ID NO: 67553 - RNA, 32 nt, Human
auccugcaucccagucccccucccagcacccc

SEQ ID NO: 67554 - RNA, 32 nt, Human
auccugcaugggggcuccuguugcuuuggggg

SEQ ID NO: 67555 - RNA, 32 nt, Human
auccugccacugcacaccagccugggugacag

SEQ ID NO: 67556 - RNA, 32 nt, Human
auccugccacugcacuccagccugggcaacag

SEQ ID NO: 67557 - RNA, 32 nt, Human
auccugccacugcacuccagccugggcgacag

SEQ ID NO: 67558 - RNA, 32 nt, Human
auccugccacugcacuccagccugugccacag

SEQ ID NO: 67559 - RNA, 32 nt, Human
auccugccacuucacaucuacucuuccauggc

SEQ ID NO: 67560 - RNA, 32 nt, Human
auccugccacuucuaugucucuggaccacagg

SEQ ID NO: 67561 - RNA, 32 nt, Human
auccugccaucuuuccuuccuaucucccccag

SEQ ID NO: 67562 - RNA, 32 nt, Human
auccugcccagcccugccuccuggccaugccg

SEQ ID NO: 67563 - RNA, 32 nt, Human
auccugccccacagcccugccuggauuuguau

SEQ ID NO: 67564 - RNA, 32 nt, Human
auccugccccauagcccugccuggauuuguau

SEQ ID NO: 67565 - RNA, 32 nt, Human
auccugccccaucccuuccccagugcacucug

SEQ ID NO: 67566 - RNA, 32 nt, Human
auccugccccuguccuacagcagaucaauugc

SEQ ID NO: 67567 - RNA, 32 nt, Human
auccugccccuugucaucugcagcgggaucuc

SEQ ID NO: 67568 - RNA, 32 nt, Human
auccugcccggaccacagaaggagaguuggcg

SEQ ID NO: 67569 - RNA, 32 nt, Human
auccugcccucacaucuuccaccagcaccuua

SEQ ID NO: 67570 - RNA, 32 nt, Human
auccugcccucaccucacccuuuuccaacuug

SEQ ID NO: 67571 - RNA, 32 nt, Human
auccugcccuggggcucccugccagggcccug

SEQ ID NO: 67572 - RNA, 32 nt, Human
auccugccucauuaauucaagcagaaaauauc

SEQ ID NO: 67573 - RNA, 32 nt, Human
auccugccuccacccaguuccccacaaagcac

SEQ ID NO: 67574 - RNA, 32 nt, Human
auccugccugagcuccagcccccagcccccac

SEQ ID NO: 67575 - RNA, 32 nt, Human
auccugccugcucugauccucuugacccuucu

SEQ ID NO: 67576 - RNA, 32 nt, Human
auccugccuuucugucugggaggaaacagaga

SEQ ID NO: 67577 - RNA, 18 nt, Human
auccugcgcuggcugcug

SEQ ID NO: 67578 - RNA, 32 nt, Human
auccugcggcuggucugggguggggucuguug

SEQ ID NO: 67579 - RNA, 32 nt, Human
auccugcggggugggcccucuguauagcugcu

SEQ ID NO: 67580 - RNA, 18 nt, Human
auccugcuaugacugcau

SEQ ID NO: 67581 - RNA, 32 nt, Human
auccugcucagguucaaaaagaggguguauag

SEQ ID NO: 67582 - RNA, 32 nt, Human
auccugcuccacugccuuccucuagugcagcc

SEQ ID NO: 67583 - RNA, 32 nt, Human
auccugcucuccuccagccgagggacccuggu

SEQ ID NO: 67584 - RNA, 32 nt, Human
auccugcuucaguggacaaagaagaugagaca

SEQ ID NO: 67585 - RNA, 32 nt, Human
auccugcuucuccagccuuucucccauuucag

SEQ ID NO: 67586 - RNA, 32 nt, Human
auccuggaacuacauucuuucuuucugcaguu

SEQ ID NO: 67587 - RNA, 32 nt, Human
auccuggaagaaaaggagaaagugugauguag

SEQ ID NO: 67588 - RNA, 32 nt, Human
auccuggacccaagggcuugggugaugcccac

SEQ ID NO: 67589 - RNA, 19 nt, Human
auccuggacccauuacaua

SEQ ID NO: 67590 - RNA, 32 nt, Human
auccuggacccuuguucucagcacuuuuggau

SEQ ID NO: 67591 - RNA, 32 nt, Human
auccuggagccucauggaacaggaugauggca

SEQ ID NO: 67592 - RNA, 32 nt, Human
auccuggagcugcagccugccuggguggcugu

SEQ ID NO: 67593 - RNA, 32 nt, Human
auccuggaggcagagguugcagugagcugaga

SEQ ID NO: 67594 - RNA, 32 nt, Human
auccuggaggcuugguccccaggccuugaggu

SEQ ID NO: 67595 - RNA, 32 nt, Human
auccuggaggggcaggcucugcgcaucugcuc

SEQ ID NO: 67596 - RNA, 32 nt, Human
auccuggaggugaagguugcagugagccaaga

SEQ ID NO: 67597 - RNA, 32 nt, Human
auccuggauacugccaaaggaaccugaaaauc

SEQ ID NO: 67598 - RNA, 32 nt, Human
auccuggcaaaggauugugggguggucaggag

SEQ ID NO: 67599 - RNA, 32 nt, Human
auccuggcacagcuguggcgccucccagcucg

SEQ ID NO: 67600 - RNA, 20 nt, Human
auccuggcagauguaaggug

SEQ ID NO: 67601 - RNA, 32 nt, Human
auccuggcaucacauuuaacauguuaucuacu

SEQ ID NO: 67602 - RNA, 32 nt, Human
auccuggccaauaggcugcgccucaagaggug

SEQ ID NO: 67603 - RNA, 32 nt, Human
auccuggccacagacaguuucaaguaguguca

SEQ ID NO: 67604 - RNA, 32 nt, Human
auccuggccagggaauggaagggagaccagga

SEQ ID NO: 67605 - RNA, 24 nt, Human
auccuggccaugagagcugaggag

SEQ ID NO: 67606 - RNA, 32 nt, Human
auccuggcccacacaggcaccccacacaaacc

SEQ ID NO: 67607 - RNA, 32 nt, Human
auccuggcccugagccucagccucugccaugg

SEQ ID NO: 67608 - RNA, 32 nt, Human
auccuggccuccaucccuuaaaagcuuuguga

SEQ ID NO: 67609 - RNA, 32 nt, Human
auccuggccugggggagaaugcuggagggagc

SEQ ID NO: 67610 - RNA, 32 nt, Human
auccuggccuuugaaagucugauauccugaga

SEQ ID NO: 67611 - RNA, 32 nt, Human
auccuggcuaacacgggugaaaccccgucucu

SEQ ID NO: 67612 - RNA, 32 nt, Human
auccuggcuagaucugccucuguuuugcuggu

SEQ ID NO: 67613 - RNA, 31 nt, Human
auccuggcuauggugaaaccccgucucuacu

SEQ ID NO: 67614 - RNA, 32 nt, Human
auccuggcucacugcaaacucugccucccagg

SEQ ID NO: 67615 - RNA, 32 nt, Human
auccuggcucacugcaaccuccaccucccggg

SEQ ID NO: 67616 - RNA, 32 nt, Human
auccuggcucacugcaacugcagccucccggg

SEQ ID NO: 67617 - RNA, 32 nt, Human
auccuggcucacugcaaucuccaucucccggg

SEQ ID NO: 67618 - RNA, 24 nt, Human
auccuggcucacugcaaucuccgc

SEQ ID NO: 67619 - RNA, 32 nt, Human
auccuggcucacugcaaucuccgccuccccag

SEQ ID NO: 67620 - RNA, 32 nt, Human
auccuggcucacuguaaccucuggguucaagc

SEQ ID NO: 67621 - RNA, 32 nt, Human
auccuggcuccccucccucuuccacucuuucc

SEQ ID NO: 67622 - RNA, 32 nt, Human
auccuggcuccuaucucugccuuccaggcauc

SEQ ID NO: 67623 - RNA, 32 nt, Human
auccuggcugucuaugaacuaggguuuucucc

SEQ ID NO: 67624 - RNA, 32 nt, Human
auccuggcuugcagcucgggagcuuuacacac

SEQ ID NO: 67625 - RNA, 32 nt, Human
auccugggaacucaacuugaaggucugucuuc

SEQ ID NO: 67626 - RNA, 32 nt, Human
auccugggagagaggugacaaguucagaggug

SEQ ID NO: 67627 - RNA, 32 nt, Human
aucugggugaugaaaugcacugucuggaguca

SEQ ID NO: 67628 - RNA, 32 nt, Human
aucuggguucaagaagauggccagcagaugaa

SEQ ID NO: 67629 - RNA, 32 nt, Human
aucuggguucaagcgauucuccugccucauuc

SEQ ID NO: 67630 - RNA, 24 nt, Human
aucuggguucacugcaaccuccgc

SEQ ID NO: 67631 - RNA, 32 nt, Human
aucuggguucacugcaaccuccgccucuuggg

SEQ ID NO: 67632 - RNA, 32 nt, Human
aucuggguucacugcaaccucugccuccaggu

SEQ ID NO: 67633 - RNA, 32 nt, Human
aucuggguucacugcaaccucugccuccuggg

SEQ ID NO: 67634 - RNA, 32 nt, Human
aucuggguuucugcucuaugagggucccugag

SEQ ID NO: 67635 - RNA, 28 nt, Human
aucuggucaauaaagcuguuuagaccag

SEQ ID NO: 67636 - RNA, 32 nt, Human
aucuggucaucccuggcaccucuccuuuggag

SEQ ID NO: 67637 - RNA, 32 nt, Human
aucugguccaucccaaaccugacgaagcagaa

SEQ ID NO: 67638 - RNA, 32 nt, Human
aucugguccuuccuccccagcuuuuguguggg

SEQ ID NO: 67639 - RNA, 32 nt, Human
aucuggucucacugcaaccucuaccucccagg

SEQ ID NO: 67640 - RNA, 32 nt, Human
aucuggugauccaaacccucagagccagucuc

SEQ ID NO: 67641 - RNA, 32 nt, Human
aucuggugcccuccccuccacccucacaagga

SEQ ID NO: 67642 - RNA, 32 nt, Human
aucuggugccuccucaaacccagucucagaca

SEQ ID NO: 67643 - RNA, 32 nt, Human
aucugguggagggaagagagaagagguaggaa

SEQ ID NO: 67644 - RNA, 29 nt, Human
aucugguggcugcugucaucuguccccag

SEQ ID NO: 67645 - RNA, 32 nt, Human
aucugguggcuggaaaaagcaaacaaacaaac

SEQ ID NO: 67646 - RNA, 32 nt, Human
aucugguggcuucccccgcccuucccauguag

SEQ ID NO: 67647 - RNA, 32 nt, Human
aucuggugguuuuuacacauggucagaaugug

SEQ ID NO: 67648 - RNA, 32 nt, Human
aucuggugugggaagaagauggggaguuacuu

SEQ ID NO: 67649 - RNA, 32 nt, Human
aucugguuaccugugcaguugugaauacccag

SEQ ID NO: 67650 - RNA, 32 nt, Human
aucugguugggcuggauucccucuguaagccu

SEQ ID NO: 67651 - RNA, 31 nt, Human
aucugguugguggaaaacuaggugaagugcu

SEQ ID NO: 67652 - RNA, 32 nt, Human
aucugguuucacuuccuccaccuuuuaaggac

SEQ ID NO: 67653 - RNA, 32 nt, Human
aucugguuuugcugaucucauuuuggauuuag

SEQ ID NO: 67654 - RNA, 32 nt, Human
aucuguaaauaaauggacaaggcuggguucca

SEQ ID NO: 67655 - RNA, 32 nt, Human
aucuguaaauucuuugcgcccuucccggcugc

SEQ ID NO: 67656 - RNA, 32 nt, Human
aucuguaacccagcuauucaagaggcugaggc

SEQ ID NO: 67657 - RNA, 32 nt, Human
aucuguaagguucaaguauacauauuacugaa

SEQ ID NO: 67658 - RNA, 32 nt, Human
aucuguaaguuuuaaaguuugugcaaaauguc

SEQ ID NO: 67659 - RNA, 21 nt, Human
aucuguaauacagcauuuuua

SEQ ID NO: 67660 - RNA, 22 nt, Human
aucuguaauuuccuugcucuca

SEQ ID NO: 67661 - RNA, 23 nt, Human
aucuguaauuuuuugacuuuuua

SEQ ID NO: 67662 - RNA, 32 nt, Human
aucuguaccaaagaggaguauggugggagagg

SEQ ID NO: 67663 - RNA, 32 nt, Human
aucuguaccuuaacuuuaucacuguuuaaaac

SEQ ID NO: 67664 - RNA, 32 nt, Human
aucuguagaaauaucagugucuucuggggagg

SEQ ID NO: 67665 - RNA, 32 nt, Human
aucuguagacaggcucacaugcaccaggaacu

SEQ ID NO: 67666 - RNA, 32 nt, Human
aucuguagacauguguccccacugcagggagu

SEQ ID NO: 67667 - RNA, 32 nt, Human
aucuguagugagauagcauugugaacugacag

SEQ ID NO: 67668 - RNA, 32 nt, Human
aucuguaucaggucagcagaagaaggaacuga

SEQ ID NO: 67669 - RNA, 32 nt, Human
aucuguaucucucacucuacagaucauucugu

SEQ ID NO: 67670 - RNA, 32 nt, Human
aucuguaugggcccaacccugaucucaaaccu

SEQ ID NO: 67671 - RNA, 32 nt, Human
aucuguauucgccaucuacaccaaaauaaacc

SEQ ID NO: 67672 - RNA, 32 nt, Human
aucuguauugggcuaaccagagccaaauacuu

SEQ ID NO: 67673 - RNA, 32 nt, Human
aucugucacccaggcuggagcgcaguggugug

SEQ ID NO: 67674 - RNA, 32 nt, Human
aucugucacccaggcuggagugcaauggcaug

SEQ ID NO: 67675 - RNA, 32 nt, Human
aucugucacccaggcuggagugcaguagugca

SEQ ID NO: 67676 - RNA, 32 nt, Human
aucugucacccaggcuggagugcaguggcaca

SEQ ID NO: 67677 - RNA, 32 nt, Human
aucugucacccaggcuggagugcaguggcaug

SEQ ID NO: 67678 - RNA, 32 nt, Human
aucugucacccaggcuggugugcaggggugcg

SEQ ID NO: 67679 - RNA, 32 nt, Human
aucugucacucagcuucucugugucucugguu

SEQ ID NO: 67680 - RNA, 32 nt, Human
aucugucauccaagcugaggugcaguggcacg

SEQ ID NO: 67681 - RNA, 32 nt, Human
aucuguccaaagcagaggcaguggagcuugag

SEQ ID NO: 67682 - RNA, 32 nt, Human
aucuguccagaaccugcucccaccucaggccc

SEQ ID NO: 67683 - RNA, 32 nt, Human
aucuguccaguggguagguuggacuggaaaau

SEQ ID NO: 67684 - RNA, 32 nt, Human
aucuguccaucccacagcucagccuggaugcc

SEQ ID NO: 67685 - RNA, 32 nt, Human
aucuguccaugguucgagaagcugcuguucac

SEQ ID NO: 67686 - RNA, 32 nt, Human
aucugucccgugggaauccugaagucugacuc

SEQ ID NO: 67687 - RNA, 32 nt, Human
aucugucccugagagugucucugauaaaaggg

SEQ ID NO: 67688 - RNA, 32 nt, Human
aucugucccugaggaagccccacuucucugua

SEQ ID NO: 67689 - RNA, 32 nt, Human
aucuguccugcaccaucugccuaauuccuucc

SEQ ID NO: 67690 - RNA, 32 nt, Human
aucugucgcccaggcuggagugcaguagcgug

SEQ ID NO: 67691 - RNA, 32 nt, Human
aucugucuccacucaagaggcugaugggcagg

SEQ ID NO: 67692 - RNA, 32 nt, Human
aucugucuccccuuguuccugaguggccccac

SEQ ID NO: 67693 - RNA, 32 nt, Human
aucugucuccugggucugacugcuacccacua

SEQ ID NO: 67694 - RNA, 32 nt, Human
aucugucugagguuucuuccuccugggguuuc

SEQ ID NO: 67695 - RNA, 32 nt, Human
aucugucugaguuuucuuccuccugggguuuc

SEQ ID NO: 67696 - RNA, 32 nt, Human
aucugucuggccauucagaggauucuaaagac

SEQ ID NO: 67697 - RNA, 32 nt, Human
aucugucugucuagacucugcagucaccagcu

SEQ ID NO: 67698 - RNA, 32 nt, Human
aucugucugucugugggcuucagcacuuuaaa

SEQ ID NO: 67699 - RNA, 32 nt, Human
aucugucuuuaauccaucuuuuuaaucaugaa

SEQ ID NO: 67700 - RNA, 32 nt, Human
aucugugaaauuaugugaauagagaccauuuu

SEQ ID NO: 67701 - RNA, 32 nt, Human
aucugugaccggcagccccagaccugccugcc

SEQ ID NO: 67702 - RNA, 32 nt, Human
aucugugaccugaugguggagaacaagaaggu

SEQ ID NO: 67703 - RNA, 32 nt, Human
aucugugagagggaauggggugggagaugugg

SEQ ID NO: 67704 - RNA, 32 nt, Human
aucugugaggcguguguuauaaauaauauucc

SEQ ID NO: 67705 - RNA, 32 nt, Human
aucugugagggccuucuugcugccucaccuca

SEQ ID NO: 67706 - RNA, 32 nt, Human
aucugugaggugacucgugaaaguaggugauu

SEQ ID NO: 67707 - RNA, 32 nt, Human
aucugugaucugaggagguucuggaagacugg

SEQ ID NO: 67708 - RNA, 32 nt, Human
aucugugauuacaggcacgugccaccaugccc

SEQ ID NO: 67709 - RNA, 32 nt, Human
aucugugauucuuauaagagcuuugucuucag

SEQ ID NO: 67710 - RNA, 32 nt, Human
aucugugcacacauacacacgucugugccugu

SEQ ID NO: 67711 - RNA, 32 nt, Human
aucugugcagagccagccaccuugggggcugg

SEQ ID NO: 67712 - RNA, 32 nt, Human
aucugugcagcaaagcaccaugguacauguuu

SEQ ID NO: 67713 - RNA, 32 nt, Human
aucugugcauuuggcaaaaugucuuaacaaau

SEQ ID NO: 67714 - RNA, 32 nt, Human
aucugugccacccggcacuaccauuucgaggg

SEQ ID NO: 67715 - RNA, 32 nt, Human
aucugugccaugacucuucugaauguuuggac

SEQ ID NO: 67716 - RNA, 32 nt, Human
aucugugcccugcaguuaguucugauccagga

SEQ ID NO: 67717 - RNA, 32 nt, Human
aucugugccugucuguccaaccccucccccac

SEQ ID NO: 67718 - RNA, 32 nt, Human
aucugugcgaugccuccccacaugucacggga

SEQ ID NO: 67719 - RNA, 21 nt, Human
aucugugcuaggcauacaucc

SEQ ID NO: 67720 - RNA, 32 nt, Human
aucugugcucuuggugaggagagcaagaggaa

SEQ ID NO: 67721 - RNA, 32 nt, Human
aucugugcuuggcuaugacucuaccuccaggu

SEQ ID NO: 67722 - RNA, 32 nt, Human
aucuguggacuucacucaggaggagugggggc

SEQ ID NO: 67723 - RNA, 32 nt, Human
aucuguggagccaguggagacucacagcagug

SEQ ID NO: 67724 - RNA, 32 nt, Human
aucuguggccuucccugcucagccucuugguc

SEQ ID NO: 67725 - RNA, 32 nt, Human
aucuguggcugcaggggucagacagacaagga

SEQ ID NO: 67726 - RNA, 32 nt, Human
aucugugggcaccacuugacuauccaaccuga

SEQ ID NO: 67727 - RNA, 32 nt, Human
aucugugguacauuuauuuaccuacucccuga

SEQ ID NO: 67728 - RNA, 32 nt, Human
aucuguggucacauccugcccaauuccagcuc

SEQ ID NO: 67729 - RNA, 32 nt, Human
aucuguggucauugucccucugcagaauaaag

SEQ ID NO: 67730 - RNA, 32 nt, Human
aucugugguucaccuguagacagagagcagau

SEQ ID NO: 67731 - RNA, 32 nt, Human
aucugugguugaauuugcuguguuguuaugaa

SEQ ID NO: 67732 - RNA, 32 nt, Human
aucuguguacaaaaauuaguugcauuucuaua

SEQ ID NO: 67733 - RNA, 32 nt, Human
aucugugucugugacuugacuccuggagccug

SEQ ID NO: 67734 - RNA, 32 nt, Human
aucugugucuucaaacagauccugguuacagc

SEQ ID NO: 67735 - RNA, 32 nt, Human
aucugugucuuuuggaaaaggagcugcauggc

SEQ ID NO: 67736 - RNA, 32 nt, Human
aucuguguggcucaccagcaggcaugcuucgc

SEQ ID NO: 67737 - RNA, 32 nt, Human
aucugugugugugcugauuuguugucuugcca

SEQ ID NO: 67738 - RNA, 32 nt, Human
aucuguguguucucuuaagucuuuggaggaaa

SEQ ID NO: 67739 - RNA, 32 nt, Human
aucuguguuauuucuggcuuucuuugagugac

SEQ ID NO: 67740 - RNA, 32 nt, Human
aucuguguucacagacaucugggggaagaaaa

SEQ ID NO: 67741 - RNA, 32 nt, Human
aucuguguucucugccuuagaccuucugcaga

SEQ ID NO: 67742 - RNA, 32 nt, Human
aucuguuacccaggcuggagugcagugacaca

SEQ ID NO: 67743 - RNA, 32 nt, Human
aucuguuacccaggcuggagugcaguggcaug

SEQ ID NO: 67744 - RNA, 32 nt, Human
aucuguuacccaggcuggagugcaguggugcu

SEQ ID NO: 67745 - RNA, 32 nt, Human
aucuguuagagguucauguacugcuaaggcgu

SEQ ID NO: 67746 - RNA, 32 nt, Human
aucuguuauguguguuugcugcggugggaggg

SEQ ID NO: 67747 - RNA, 32 nt, Human
aucuguucacaucuuacucaacaucagagauu

SEQ ID NO: 67748 - RNA, 19 nt, Human
aucuguucagaccaagcaa

SEQ ID NO: 67749 - RNA, 32 nt, Human
aucuguucagcccaaaugaaaucuuccuuuua

SEQ ID NO: 67750 - RNA, 32 nt, Human
aucuguuccuaugcccaggaugauuuugugaa

SEQ ID NO: 67751 - RNA, 32 nt, Human
aucuguucuaguuaaugauuugggagauuuuu

SEQ ID NO: 67752 - RNA, 18 nt, Human
aucuguucuggggaucug

SEQ ID NO: 67753 - RNA, 32 nt, Human
aucuguugaaucagauauuuuaucaagauauc

SEQ ID NO: 67754 - RNA, 32 nt, Human
aucuguugaauuugggaagccuccaguuuuaa

SEQ ID NO: 67755 - RNA, 32 nt, Human
aucuguugcccaggcuggagugcaguggagca

SEQ ID NO: 67756 - RNA, 32 nt, Human
aucuguugcccagguccugcaaaggagccaug

SEQ ID NO: 67757 - RNA, 32 nt, Human
aucuguuggccaccugcaggccagucucaacc

SEQ ID NO: 67758 - RNA, 32 nt, Human
aucuguugguggagguauaaaaugaggagacu

SEQ ID NO: 67759 - RNA, 32 nt, Human
aucuguugugcgcauugaagugugcaugauua

SEQ ID NO: 67760 - RNA, 32 nt, Human
aucuguuuacagccauuuccgugccauacuuu

SEQ ID NO: 67761 - RNA, 32 nt, Human
aucuguuuauugacccagaccugggcacaggc

SEQ ID NO: 67762 - RNA, 32 nt, Human
aucuguuucagcaaccaggccugaggucagaa

SEQ ID NO: 67763 - RNA, 32 nt, Human
aucuguuuccaccugcugaauggugcucugac

SEQ ID NO: 67764 - RNA, 32 nt, Human
aucuguuuccagaguuauuauggccucagagg

SEQ ID NO: 67765 - RNA, 32 nt, Human
aucuguuucuguaguugaggacaacugugaug

SEQ ID NO: 67766 - RNA, 32 nt, Human
aucuguuucuucuccuccuuucucucccucuu

SEQ ID NO: 67767 - RNA, 32 nt, Human
aucuguuugaaggaauuuccugguuuucagau

SEQ ID NO: 67768 - RNA, 32 nt, Human
aucuguuugugccaguucuuuacauguacuaa

SEQ ID NO: 67769 - RNA, 32 nt, Human
aucuguuuguuguuguuguugaagacaguaaa

SEQ ID NO: 67770 - RNA, 32 nt, Human
aucuguuuuuaguaucagcagcauuuggcaag

SEQ ID NO: 67771 - RNA, 32 nt, Human
aucuguuuuugggcuccacuugccaggccuga

SEQ ID NO: 67772 - RNA, 32 nt, Human
aucuuaaaaauggaaguccuaaaaauuaguuu

SEQ ID NO: 67773 - RNA, 32 nt, Human
aucuuaaaauguaaauaugcugggacaaugug

SEQ ID NO: 67774 - RNA, 32 nt, Human
aucuuaaagagaccaguuacagaugcuugguu

SEQ ID NO: 67775 - RNA, 32 nt, Human
aucuuaaagccuugaaaaauguuaauaaucuu

SEQ ID NO: 67776 - RNA, 32 nt, Human
aucuuaaaguacagcgaagaagaaagggaagu

SEQ ID NO: 67777 - RNA, 32 nt, Human
aucuuaaaugauuuuugccacugguauuccuu

SEQ ID NO: 67778 - RNA, 32 nt, Human
aucuuaacaaauuccugaacaauggcuccaaa

SEQ ID NO: 67779 - RNA, 32 nt, Human
aucuuaacauuucuuacaaauccacagauugg

SEQ ID NO: 67780 - RNA, 32 nt, Human
aucuuaaccagcugagggagcuuguacaacac

SEQ ID NO: 67781 - RNA, 32 nt, Human
aucuuaacucacugcaaccuccgcuucccagg

SEQ ID NO: 67782 - RNA, 32 nt, Human
aucuuaacuuccucuucccccaagcuaucugg

SEQ ID NO: 67783 - RNA, 32 nt, Human
aucuuaagaaaauuugucuggcuacacucuuu

SEQ ID NO: 67784 - RNA, 32 nt, Human
aucuuaagaacugcccagccucagcugaaaac

SEQ ID NO: 67785 - RNA, 32 nt, Human
aucuuaagcaucagcgugacgugaccucucug

SEQ ID NO: 67786 - RNA, 32 nt, Human
aucuuaagcuuucuuuugcucucuucagcaau

SEQ ID NO: 67787 - RNA, 32 nt, Human
aucuuaaggagugaaaauagagucuaaaucuu

SEQ ID NO: 67788 - RNA, 32 nt, Human
aucuuaagggaauuuuucuaaaaaccuuuuca

SEQ ID NO: 67789 - RNA, 32 nt, Human
aucuuaaggggaaguugaaagugggggcgggg

SEQ ID NO: 67790 - RNA, 32 nt, Human
aucuuaagugcucucucuacucccagguccag

SEQ ID NO: 67791 - RNA, 32 nt, Human
aucuuaauacaacauggacaccacguugcuga

SEQ ID NO: 67792 - RNA, 22 nt, Human
aucuuaauuucuggcucuauca

SEQ ID NO: 67793 - RNA, 32 nt, Human
aucuuacacaucugccaccggaaauaccaugc

SEQ ID NO: 67794 - RNA, 32 nt, Human
aucuuacaguuggaguucaauguaacauuuua

SEQ ID NO: 67795 - RNA, 32 nt, Human
aucuuacauucuguuuucuuccagucuuugca

SEQ ID NO: 67796 - RNA, 28 nt, Human
aucuuaccaagugccaucauccuucacc

SEQ ID NO: 67797 - RNA, 32 nt, Human
aucuuaccacacacauggguguuucuauuauc

SEQ ID NO: 67798 - RNA, 32 nt, Human
aucuuaccugcucuggauugccaugagcaggu

SEQ ID NO: 67799 - RNA, 32 nt, Human
aucuuaccuguaauccuagcacuuugagacca

SEQ ID NO: 67800 - RNA, 32 nt, Human
aucuuaccuucuccuuuuuaugaagggaagag

SEQ ID NO: 67801 - RNA, 32 nt, Human
aucuuacucccaggccuccugucaccagcugu

SEQ ID NO: 67802 - RNA, 32 nt, Human
aucuuacuccugaaccuuagacaggaaguauu

SEQ ID NO: 67803 - RNA, 32 nt, Human
aucuuacucugagugugaugcagucagaggca

SEQ ID NO: 67804 - RNA, 32 nt, Human
aucuuacucuucucagcuucucagcuuggcuc

SEQ ID NO: 67805 - RNA, 32 nt, Human
aucuuacugcaagcagcguccugaggagacag

SEQ ID NO: 67806 - RNA, 32 nt, Human
aucuuacuguaccgccuguuguaucugggagc

SEQ ID NO: 67807 - RNA, 32 nt, Human
aucuuagaacucuuucugaagagaccuuauca

SEQ ID NO: 67808 - RNA, 32 nt, Human
aucuuagagcaucacucuuccucacaccacaa

SEQ ID NO: 67809 - RNA, 32 nt, Human
aucuuagagguagauuauccaggccauccccu

SEQ ID NO: 67810 - RNA, 32 nt, Human
aucuuagcucacuacaaccucugccucccagg

SEQ ID NO: 67811 - RNA, 32 nt, Human
aucuuagcucacuacaacuucugccucccagg

SEQ ID NO: 67812 - RNA, 24 nt, Human
aucuuagcucacugcaacccccgc

SEQ ID NO: 67813 - RNA, 32 nt, Human
aucuuagcucacugcaacccccgccucccggg

SEQ ID NO: 67814 - RNA, 32 nt, Human
aucuuagcucacugcaaccuccaccucccagg

SEQ ID NO: 67815 - RNA, 32 nt, Human
aucuuagcucacugcaaccuccaccucccggg

SEQ ID NO: 67816 - RNA, 32 nt, Human
aucuuagcucacugcaaccuccgccuccuggg

SEQ ID NO: 67817 - RNA, 32 nt, Human
aucuuagcucacugcaaccucugcuuccuggg

SEQ ID NO: 67818 - RNA, 24 nt, Human
aucuuagcucacugcaagcuccgc

SEQ ID NO: 67819 - RNA, 32 nt, Human
aucuuagcucacugcaagcuccgccucccagg

SEQ ID NO: 67820 - RNA, 32 nt, Human
aucuuagcucucugcaaccucugccucccagg

SEQ ID NO: 67821 - RNA, 32 nt, Human
aucuuagcuuugauaaaugacugagcuggaga

SEQ ID NO: 67822 - RNA, 32 nt, Human
aucuuaggacacagaugugcccagggaggugg

SEQ ID NO: 67823 - RNA, 32 nt, Human
aucuuaggagaaagggggcaaggaaguaaauc

SEQ ID NO: 67824 - RNA, 32 nt, Human
aucuuaggaucauggaaaaccuggaaucaagg

SEQ ID NO: 67825 - RNA, 32 nt, Human
aucuuaggcaccuugcacaggccuucucguuu

SEQ ID NO: 67826 - RNA, 32 nt, Human
aucuuaggcaugugcugguauccacaguuaau

SEQ ID NO: 67827 - RNA, 32 nt, Human
aucuuaggccuggaaguuagagugagggaaau

SEQ ID NO: 67828 - RNA, 32 nt, Human
aucuuaggccugguuauuaggggccugaucag

SEQ ID NO: 67829 - RNA, 32 nt, Human
aucuuagggaacuagggucaccuggagagccg

SEQ ID NO: 67830 - RNA, 32 nt, Human
aucuuagggacugauauugguaauuaugguca

SEQ ID NO: 67831 - RNA, 32 nt, Human
aucuuagggucagaacugcugaaagagacaaa

SEQ ID NO: 67832 - RNA, 32 nt, Human
aucuuaguaugacuuuauuuccuuccagcucu

SEQ ID NO: 67833 - RNA, 32 nt, Human
aucuuagucaucaguccuugaccucagccuuc

SEQ ID NO: 67834 - RNA, 32 nt, Human
aucuuagucauucauguuucaccagaggacag

SEQ ID NO: 67835 - RNA, 32 nt, Human
aucuuagugucugagguugacuguggguaaau

SEQ ID NO: 67836 - RNA, 32 nt, Human
aucuuaguugcugggccaguucuucugaauca

SEQ ID NO: 67837 - RNA, 32 nt, Human
aucuuauaacaugcagaugaaugcuuuauaag

SEQ ID NO: 67838 - RNA, 32 nt, Human
aucuuauacucagauuaacuauuaguuaaagg

SEQ ID NO: 67839 - RNA, 32 nt, Human
aucuuaucugucagugcugugugacagcaucg

SEQ ID NO: 67840 - RNA, 32 nt, Human
aucuuaugauucacccaccucuaccucccgaa

SEQ ID NO: 67841 - RNA, 25 nt, Human
aucuuaugcacaccucccacccccu

SEQ ID NO: 67842 - RNA, 32 nt, Human
aucuuauggaggaggaugccgcuacgaggagu

SEQ ID NO: 67843 - RNA, 32 nt, Human
aucuuaugugaucacugucauuucugcagucc

SEQ ID NO: 67844 - RNA, 32 nt, Human
aucuuauuaacuccuucucucuuuuuaacaag

SEQ ID NO: 67845 - RNA, 32 nt, Human
aucuuauucuaaugaaauguagauuuuuauuu

SEQ ID NO: 67846 - RNA, 32 nt, Human
aucuuauugaauaccuccucugugcuacccau

SEQ ID NO: 67847 - RNA, 32 nt, Human
aucuuauugauagcauuuuuacaaauguguuu

SEQ ID NO: 67848 - RNA, 32 nt, Human
aucuuauuuucucaaucuccucucucuuuccu

SEQ ID NO: 67849 - RNA, 32 nt, Human
aucuucaaaaucaguagacauuucuggacaua

SEQ ID NO: 67850 - RNA, 32 nt, Human
aucuucaaguaccuagccugacugguagggcu

SEQ ID NO: 67851 - RNA, 32 nt, Human
aucuucacaaguguguaaagcacagauuucaa

SEQ ID NO: 67852 - RNA, 32 nt, Human
aucuucaccucucucugucagcauugcuucuu

SEQ ID NO: 67853 - RNA, 32 nt, Human
aucuucacucuugccagagccauucucaauaa

SEQ ID NO: 67854 - RNA, 32 nt, Human
aucuucacuucuaaaugcauauccugagccau

SEQ ID NO: 67855 - RNA, 32 nt, Human
aucuucagaagaaaaucucuucagcacuuucc

SEQ ID NO: 67856 - RNA, 32 nt, Human
aucuucagaaucccccaggcccucucuugauc

SEQ ID NO: 67857 - RNA, 32 nt, Human
aucuucagccaaacaucuagucuuccauagac

SEQ ID NO: 67858 - RNA, 32 nt, Human
aucuucagccuccuccugggccagcucuugug

SEQ ID NO: 67859 - RNA, 32 nt, Human
aucuucagccuccugcagaaccacggugucau

SEQ ID NO: 67860 - RNA, 32 nt, Human
aucuucaggaacuucugaccucaccaagucaa

SEQ ID NO: 67861 - RNA, 32 nt, Human
aucuucaggaaggaaaaggcauccuggagaca

SEQ ID NO: 67862 - RNA, 19 nt, Human
aucuucaggacuugugaaa

SEQ ID NO: 67863 - RNA, 32 nt, Human
aucuucagggaaaggcacugcccacgccaggc

SEQ ID NO: 67864 - RNA, 32 nt, Human
aucuucagggcgggaaaggggccacuucuggc

SEQ ID NO: 67865 - RNA, 32 nt, Human
aucuucagggugggaaaggggccacuucuggc

SEQ ID NO: 67866 - RNA, 32 nt, Human
aucuucaguugcuucaggccacuuugaaugua

SEQ ID NO: 67867 - RNA, 32 nt, Human
aucuucauaagcuuuuuagcagguauauguug

SEQ ID NO: 67868 - RNA, 21 nt, Human
aucuucauacaucaccacacc

SEQ ID NO: 67869 - RNA, 32 nt, Human
aucuucauuaguuacauucaugaaauugugau

SEQ ID NO: 67870 - RNA, 32 nt, Human
aucuucauucacugggauucuggaccauaaua

SEQ ID NO: 67871 - RNA, 32 nt, Human
aucuucauuuccuugcugaauuuuuaugcuuu

SEQ ID NO: 67872 - RNA, 32 nt, Human
aucuucauuuuuggcaccucacagaacaaauu

SEQ ID NO: 67873 - RNA, 32 nt, Human
aucuuccaagaccaaagaaggaaggaaggugg

SEQ ID NO: 67874 - RNA, 32 nt, Human
aucuuccaagcauacaugcacacugauacaua

SEQ ID NO: 67875 - RNA, 32 nt, Human
aucuuccacaugcuccaagccacaggucccca

SEQ ID NO: 67876 - RNA, 32 nt, Human
aucuuccaccagcaccuuacugcccaggccua

SEQ ID NO: 67877 - RNA, 32 nt, Human
aucuuccacucuccuauuauuuugccacuacu

SEQ ID NO: 67878 - RNA, 32 nt, Human
aucuuccagcuucugucagaacuuuaggucag

SEQ ID NO: 67879 - RNA, 32 nt, Human
aucuuccaggguggggaggagaaaaucccacc

SEQ ID NO: 67880 - RNA, 32 nt, Human
aucuuccagguggggugaggcaguggguccca

SEQ ID NO: 67881 - RNA, 32 nt, Human
aucuuccaggugucuaaaucuccagucugucu

SEQ ID NO: 67882 - RNA, 22 nt, Human
aucuuccaguccugggccccca

SEQ ID NO: 67883 - RNA, 32 nt, Human
aucuuccaguggccagcacacccuagacaccc

SEQ ID NO: 67884 - RNA, 32 nt, Human
aucuucccaaagcucauuuaugagccaccaga

SEQ ID NO: 67885 - RNA, 32 nt, Human
aucuucccacaguggcuucacagacccacaag

SEQ ID NO: 67886 - RNA, 21 nt, Human
aucuucccacccgggcugugc

SEQ ID NO: 67887 - RNA, 32 nt, Human
aucuucccacugcacuccagccuggccaauaa

SEQ ID NO: 67888 - RNA, 32 nt, Human
aucuucccagguagcugggauuacaggcaugu

SEQ ID NO: 67889 - RNA, 32 nt, Human
aucuucccaucuccuaaaacucagaaugcaca

SEQ ID NO: 67890 - RNA, 32 nt, Human
aucuucccauucuaggccuacaagcacuacuu

SEQ ID NO: 67891 - RNA, 32 nt, Human
aucuuccccaaaggggaaaggaagagagugau

SEQ ID NO: 67892 - RNA, 32 nt, Human
aucuuccccgccccaaacacuagaauagacug

SEQ ID NO: 67893 - RNA, 32 nt, Human
aucuuccccucaccuuccacccaugagaacag

SEQ ID NO: 67894 - RNA, 32 nt, Human
aucuucccgacagccaacagguuuccaggaga

SEQ ID NO: 67895 - RNA, 32 nt, Human
aucuucccugacuucuuugccugcuagcagcc

SEQ ID NO: 67896 - RNA, 32 nt, Human
aucuucccugccccugugccucuguccuagac

SEQ ID NO: 67897 - RNA, 32 nt, Human
aucuucccugcuuacucucugccuaccugccu

SEQ ID NO: 67898 - RNA, 32 nt, Human
aucuucccuggcguccucucccuccuggccag

SEQ ID NO: 67899 - RNA, 32 nt, Human
aucuucccugggaagucuuucuggccaagucu

SEQ ID NO: 67900 - RNA, 32 nt, Human
aucuucccugggaggaaggcuccaaauucuca

SEQ ID NO: 67901 - RNA, 32 nt, Human
aucuucccuuugccuuuucaggauuuaggccu

SEQ ID NO: 67902 - RNA, 32 nt, Human
aucuuccgcuaucacccuaaucuccgguuccc

SEQ ID NO: 67903 - RNA, 32 nt, Human
aucuuccggugacucuggaggaagaggugggc

SEQ ID NO: 67904 - RNA, 32 nt, Human
aucuuccuccaguggcugccaggauuucuggu

SEQ ID NO: 67905 - RNA, 18 nt, Human
aucuuccuccccaaggaa

SEQ ID NO: 67906 - RNA, 32 nt, Human
aucuuccucccuuccucccuuucuuaccacag

SEQ ID NO: 67907 - RNA, 32 nt, Human
aucuuccuccucccucaucccuuccaaccuuu

SEQ ID NO: 67908 - RNA, 32 nt, Human
aucuuccucuuaccucaccccuuucaaacaaa

SEQ ID NO: 67909 - RNA, 32 nt, Human
aucuuccugaccccuccuucucccucuccugg

SEQ ID NO: 67910 - RNA, 32 nt, Human
aucuuccugcaggcccuuccucugccugcugg

SEQ ID NO: 67911 - RNA, 32 nt, Human
aucuuccugccucaggcuucugaguagcuagg

SEQ ID NO: 67912 - RNA, 32 nt, Human
aucuuccuggccccucccuggacugcuuugga

SEQ ID NO: 67913 - RNA, 24 nt, Human
aucuuccuguccgggcugcugcga

SEQ ID NO: 67914 - RNA, 32 nt, Human
aucuuccuguucuaccuccucauucagacugu

SEQ ID NO: 67915 - RNA, 32 nt, Human
aucuuccuucagcccaccucaggauccgggcu

SEQ ID NO: 67916 - RNA, 32 nt, Human
aucuuccuugcuggauguggcagaauccacac

SEQ ID NO: 67917 - RNA, 32 nt, Human
aucuuccuugcugguuguguggaagugauggg

SEQ ID NO: 67918 - RNA, 32 nt, Human
aucuuccuuucuuuaaacauggagucuaaaua

SEQ ID NO: 67919 - RNA, 32 nt, Human
aucuuccuuugucuuauacauggcuuccauuu

SEQ ID NO: 67920 - RNA, 32 nt, Human
aucuucgauccucaccucagugccccagagau

SEQ ID NO: 67921 - RNA, 32 nt, Human
aucuucgcgucccucuccgcuuuccggccggc

SEQ ID NO: 67922 - RNA, 32 nt, Human
aucuucgcucacuucaaccucugccuucuggg

SEQ ID NO: 67923 - RNA, 32 nt, Human
aucuucguucuuucucacugaccgagacucag

SEQ ID NO: 67924 - RNA, 19 nt, Human
aucuucguuuucugugaaa

SEQ ID NO: 67925 - RNA, 32 nt, Human
aucuucuaacaaacuucagccugggaagugag

SEQ ID NO: 67926 - RNA, 32 nt, Human
aucuucuaugaaagccuaugugcaugugugug

SEQ ID NO: 67927 - RNA, 32 nt, Human
aucuucucagaaagagcugcacuguggcccca

SEQ ID NO: 67928 - RNA, 32 nt, Human
aucuucucagcccugagguuugaaucugacuu

SEQ ID NO: 67929 - RNA, 32 nt, Human
aucuucucaggcucacugagugcaaugucugc

SEQ ID NO: 67930 - RNA, 32 nt, Human
aucuucucauuuuucccuacaaaaacaccagg

SEQ ID NO: 67931 - RNA, 32 nt, Human
aucuucuccacacaccccaucacccagauaau

SEQ ID NO: 67932 - RNA, 32 nt, Human
aucuucuccagaaguccuagaaacaucucauc

SEQ ID NO: 67933 - RNA, 32 nt, Human
aucuucucgcaaaaggcgagugugugggguuc

SEQ ID NO: 67934 - RNA, 32 nt, Human
aucuucucuccucuucucccuuuuaucaggcc

SEQ ID NO: 67935 - RNA, 32 nt, Human
aucuucugacauacaacugaggucaugacaag

SEQ ID NO: 67936 - RNA, 32 nt, Human
aucuucugagagaaccugcuuccuuccaucag

SEQ ID NO: 67937 - RNA, 21 nt, Human
aucuucugaugggccccacaa

SEQ ID NO: 67938 - RNA, 32 nt, Human
aucuucugcaagaggcugccuccugguccacu

SEQ ID NO: 67939 - RNA, 32 nt, Human
aucuucugcaucaagccacaucauguuaaaca

SEQ ID NO: 67940 - RNA, 32 nt, Human
aucuucugcauuuauagguuugaauaaaggcu

SEQ ID NO: 67941 - RNA, 32 nt, Human
aucuucugccccagcuuugcaggaugaaaagc

SEQ ID NO: 67942 - RNA, 32 nt, Human
aucuucugccuccuggauaucuuggagaaaau

SEQ ID NO: 67943 - RNA, 32 nt, Human
aucuucuggagugacucaaaugcagaggaagc

SEQ ID NO: 67944 - RNA, 32 nt, Human
aucuucuggcuucccugcaucuugccuuuggg

SEQ ID NO: 67945 - RNA, 32 nt, Human
aucuucugggagaaggaaaccaaaggaucuaa

SEQ ID NO: 67946 - RNA, 32 nt, Human
aucuucuggguuaggccuugccuaggcauagc

SEQ ID NO: 67947 - RNA, 32 nt, Human
aucuucuggguugaaauaauucacaaauuggu

SEQ ID NO: 67948 - RNA, 23 nt, Human
aucuucuguauuccacaauagua

SEQ ID NO: 67949 - RNA, 32 nt, Human
aucuucuucucccuucccucgcccaagggagu

SEQ ID NO: 67950 - RNA, 32 nt, Human
aucuucuucuuccuccuccgucuccuuuccuc

SEQ ID NO: 67951 - RNA, 32 nt, Human
aucuucuugaccuuuggccacugccuucccag

SEQ ID NO: 67952 - RNA, 32 nt, Human
aucuucuugugagcccugggcuuaggagucac

SEQ ID NO: 67953 - RNA, 32 nt, Human
aucuucuuuauuauuccuagucuuuccaguca

SEQ ID NO: 67954 - RNA, 32 nt, Human
aucuucuuucugcuuuggguuguucucugccc

SEQ ID NO: 67955 - RNA, 32 nt, Human
aucuucuuuggaaauaaaagauaaaagagcga

SEQ ID NO: 67956 - RNA, 32 nt, Human
aucuucuuuugggcugaccaagccaggagggc

SEQ ID NO: 67957 - RNA, 32 nt, Human
aucuugaaaugaggagacaauccuggguuauc

SEQ ID NO: 67958 - RNA, 32 nt, Human
aucuugaaccauuguuuuauauuuuucaccuu

SEQ ID NO: 67959 - RNA, 32 nt, Human
aucuugaacuccugggcucaagcaaucugcca

SEQ ID NO: 67960 - RNA, 32 nt, Human
aucuugaagugaaaccaccacaauggccauuu

SEQ ID NO: 67961 - RNA, 32 nt, Human
aucuugaauaggggcugggugaaaugaggcug

SEQ ID NO: 67962 - RNA, 32 nt, Human
aucuugacaaagccucuucuguuuccaauggg

SEQ ID NO: 67963 - RNA, 32 nt, Human
aucuugacuauaauaaagcuucccuacugcaa

SEQ ID NO: 67964 - RNA, 32 nt, Human
aucuugacucacuacaaccuccgccucccagg

SEQ ID NO: 67965 - RNA, 32 nt, Human
aucuugacucacugcaacaucugccucccggg

SEQ ID NO: 67966 - RNA, 32 nt, Human
aucuugacucacugcaaccuccaccucccagg

SEQ ID NO: 67967 - RNA, 32 nt, Human
aucuugacucacugcaaccuccgccucacagc

SEQ ID NO: 67968 - RNA, 32 nt, Human
aucuugacucacugcaaccuccgccucccagg

SEQ ID NO: 67969 - RNA, 32 nt, Human
aucuugacucacugcaaccucugccucccagg

SEQ ID NO: 67970 - RNA, 32 nt, Human
aucuugacucacugcaaccucugccucucggg

SEQ ID NO: 67971 - RNA, 32 nt, Human
aucuugacucacugcaacuucugccacccagg

SEQ ID NO: 67972 - RNA, 32 nt, Human
aucuugacucacugcaaucuccaccucccaca

SEQ ID NO: 67973 - RNA, 32 nt, Human
aucuugacucacugcagccucaaccucccagg

SEQ ID NO: 67974 - RNA, 32 nt, Human
aucuugacucacugcauuuuccaccuugggag

SEQ ID NO: 67975 - RNA, 32 nt, Human
aucuugacucgcagcaaccuccgccuccuggg

SEQ ID NO: 67976 - RNA, 32 nt, Human
aucuugagaagagaaauuguaugauggcuaug

SEQ ID NO: 67977 - RNA, 32 nt, Human
aucuugagaagcaggcggguugggugggagga

SEQ ID NO: 67978 - RNA, 32 nt, Human
aucuugagauacccaggaagggaggcugucug

SEQ ID NO: 67979 - RNA, 32 nt, Human
aucuugagcaacauucaauuaauaggcaauuu

SEQ ID NO: 67980 - RNA, 32 nt, Human
aucuugagcugggggugugagggggagggccu

SEQ ID NO: 67981 - RNA, 32 nt, Human
aucuugaggaagaugcauaauaugaguaaagu

SEQ ID NO: 67982 - RNA, 32 nt, Human
aucuugaggagaagaauuuucggagugaagac

SEQ ID NO: 67983 - RNA, 32 nt, Human
aucuugaggcagcagagucugucugcagcuau

SEQ ID NO: 67984 - RNA, 32 nt, Human
aucuugagggaagagggugagugaagcccagg

SEQ ID NO: 67985 - RNA, 32 nt, Human
aucuugaggggugaugaacacaagcaaaccaa

SEQ ID NO: 67986 - RNA, 31 nt, Human
aucuugaggucguucuccacauuccuuccag

SEQ ID NO: 67987 - RNA, 32 nt, Human
aucuugagguguugugccauucucugggaaca

SEQ ID NO: 67988 - RNA, 32 nt, Human
aucuugaguuauaucucaccauccaucagagg

SEQ ID NO: 67989 - RNA, 32 nt, Human
aucuugaguuuccaagaccuagagagcuuggg

SEQ ID NO: 67990 - RNA, 32 nt, Human
aucuugaugagacagauuuccaggcaacaaaa

SEQ ID NO: 67991 - RNA, 32 nt, Human
aucuugaugcuuucuucuuucucuuuaaauuu

SEQ ID NO: 67992 - RNA, 32 nt, Human
aucuugcaaaacugucauuuauugugaauauc

SEQ ID NO: 67993 - RNA, 32 nt, Human
aucuugcacuguuuugaaugcaucugcuauuu

SEQ ID NO: 67994 - RNA, 23 nt, Human
aucuugcagugcugcaaccugga

SEQ ID NO: 67995 - RNA, 32 nt, Human
aucuugcauauguauaguucauuuuuccugug

SEQ ID NO: 67996 - RNA, 32 nt, Human
aucuugcaucuggcuggacucaaugagcugga

SEQ ID NO: 67997 - RNA, 32 nt, Human
aucuugccaauccaguugacuucugucuucuc

SEQ ID NO: 67998 - RNA, 32 nt, Human
aucuugccacugcacaccagccugggcaacac

SEQ ID NO: 67999 - RNA, 32 nt, Human
aucuugccacugcacuccagccugggcaacag

SEQ ID NO: 68000 - RNA, 32 nt, Human
aucuugccacugcucuacagccuggaagacag

SEQ ID NO: 68001 - RNA, 32 nt, Human
aucuugccacuguacuccagccugaagagcga

SEQ ID NO: 68002 - RNA, 32 nt, Human
aucuugccucacugcaacgccugccucucagg

SEQ ID NO: 68003 - RNA, 32 nt, Human
aucuugccuccucaaguagcuucaucacagag

SEQ ID NO: 68004 - RNA, 32 nt, Human
aucuugccugcccuauuccuccucccaagucu

SEQ ID NO: 68005 - RNA, 32 nt, Human
aucuugccuuaaauucucucuaccacacugcc

SEQ ID NO: 68006 - RNA, 32 nt, Human
aucuugccuucugguuucuuccagccacauug

SEQ ID NO: 68007 - RNA, 32 nt, Human
aucuugcuaggaggcauggaagugaucuaucc

SEQ ID NO: 68008 - RNA, 16 nt, Human
aucuugcugcugcuca

SEQ ID NO: 68009 - RNA, 31 nt, Human
aucuugcuuaauaaauaucugcuggauucuu

SEQ ID NO: 68010 - RNA, 32 nt, Human
aucuuggaagagaagagaagaggacaguacca

SEQ ID NO: 68011 - RNA, 32 nt, Human
aucuuggaaguauuugaccauuucuugagaua

SEQ ID NO: 68012 - RNA, 32 nt, Human
aucuuggacauuaaccccugaggcuccaccac

SEQ ID NO: 68013 - RNA, 32 nt, Human
aucuuggacccagggagagagcuguuacugcu

SEQ ID NO: 68014 - RNA, 32 nt, Human
aucuuggaccugaggcugcuuucuugaagaaa

SEQ ID NO: 68015 - RNA, 32 nt, Human
aucuuggagaaacugaaguuacccugggcggc

SEQ ID NO: 68016 - RNA, 32 nt, Human
aucuuggagaguuucuucuugugauuuuaguu

SEQ ID NO: 68017 - RNA, 32 nt, Human
aucuuggagaugguuucccugcucccggggca

SEQ ID NO: 68018 - RNA, 32 nt, Human
aucuuggauacaguguaaaccagauccauaua

SEQ ID NO: 68019 - RNA, 32 nt, Human
aucuuggauuggagguggggguuucagagugu

SEQ ID NO: 68020 - RNA, 32 nt, Human
aucuuggauuuuuguguguauguauguaugug

SEQ ID NO: 68021 - RNA, 32 nt, Human
aucuuggcaguacaggauuucuucagacgugg

SEQ ID NO: 68022 - RNA, 22 nt, Human
aucuuggccaaugugacccgaa

SEQ ID NO: 68023 - RNA, 32 nt, Human
aucuuggccacugcaagcuccaccucccaggu

SEQ ID NO: 68024 - RNA, 32 nt, Human
aucuuggccacuuuaauaguuucugauucacu

SEQ ID NO: 68025 - RNA, 32 nt, Human
aucuuggccaggcuggugugaucauggcucau

SEQ ID NO: 68026 - RNA, 32 nt, Human
aucuuggccauccuccucuagacaaaaccagc

SEQ ID NO: 68027 - RNA, 32 nt, Human
aucuuggccaugucacuggucauugugugaaa

SEQ ID NO: 68028 - RNA, 32 nt, Human
aucuuggcccacugcaaccucugccucccggg

SEQ ID NO: 68029 - RNA, 32 nt, Human
aucuuggcccacugcaaccucugcuuccuagg

SEQ ID NO: 68030 - RNA, 32 nt, Human
aucuuggcccccugcaaccuccgccucccggg

SEQ ID NO: 68031 - RNA, 32 nt, Human
aucuuggcgcaggccuuucugugggccucacc

SEQ ID NO: 68032 - RNA, 32 nt, Human
aucuuggcuaacugcaaccuccagcuccuggg

SEQ ID NO: 68033 - RNA, 32 nt, Human
aucuuggcuaacugcaaccuccgccucccagg

SEQ ID NO: 68034 - RNA, 32 nt, Human
aucuuggcuaacugcaacuuccaccuccuggg

SEQ ID NO: 68035 - RNA, 32 nt, Human
aucuuggcuacccuacaugcucccucuggcac

SEQ ID NO: 68036 - RNA, 32 nt, Human
aucuuggcuauugugaaaaaugaugcuauaaa

SEQ ID NO: 68037 - RNA, 32 nt, Human
aucuuggcucacagcaaccucuaccuccuggg

SEQ ID NO: 68038 - RNA, 32 nt, Human
aucuuggcucacagcagccucugccucccggg

SEQ ID NO: 68039 - RNA, 22 nt, Human
aucuuggcucaccacaaccucc

SEQ ID NO: 68040 - RNA, 32 nt, Human
aucuuggcucaccacaaccucuaccuccaggg

SEQ ID NO: 68041 - RNA, 32 nt, Human
aucuuggcucaccacaaccucugccucccggg

SEQ ID NO: 68042 - RNA, 32 nt, Human
aucuuggcucaccacaaccucugccuccuggg

SEQ ID NO: 68043 - RNA, 22 nt, Human
aucuuggcucaccgcaaccucc

SEQ ID NO: 68044 - RNA, 32 nt, Human
aucuuggcucaccgcaaccuccaccuccugag

SEQ ID NO: 68045 - RNA, 24 nt, Human
aucuuggcucaccgcaaccuccgc

SEQ ID NO: 68046 - RNA, 32 nt, Human
aucuuggcucaccgcaaccuccgccucccagg

SEQ ID NO: 68047 - RNA, 32 nt, Human
aucuuggcucaccgcaaccuccgccuccuagg

SEQ ID NO: 68048 - RNA, 32 nt, Human
aucuuggcucaccgcaaccucugccuaccggg

SEQ ID NO: 68049 - RNA, 32 nt, Human
aucuuggcucaccgcaaccucugccucccugg

SEQ ID NO: 68050 - RNA, 32 nt, Human
aucuuggcucaccgcaaccucugccuccuggg

SEQ ID NO: 68051 - RNA, 32 nt, Human
aucuuggcucacgacaaccucugccucucgga

SEQ ID NO: 68052 - RNA, 32 nt, Human
aucuuggcucacuacaaccucugccucccggg

SEQ ID NO: 68053 - RNA, 32 nt, Human
aucuuggcucacuacaaccucugccucgcagg

SEQ ID NO: 68054 - RNA, 32 nt, Human
aucuuggcucacugaaaccucugccucccggu

SEQ ID NO: 68055 - RNA, 23 nt, Human
aucuuggcucacugcaaacccgc

SEQ ID NO: 68056 - RNA, 32 nt, Human
aucuuggcucacugcaaacccgccucccaggu

SEQ ID NO: 68057 - RNA, 24 nt, Human
aucuuggcucacugcaaacuccgc

SEQ ID NO: 68058 - RNA, 32 nt, Human
aucuuggcucacugcaaacuccgccuuccagg

SEQ ID NO: 68059 - RNA, 32 nt, Human
aucuuggcucacugcaaacucugccuaccagg

SEQ ID NO: 68060 - RNA, 32 nt, Human
aucuuggcucacugcaaacucugccuuuuggg

SEQ ID NO: 68061 - RNA, 32 nt, Human
aucuuggcucacugcaacauccgccucccggg

SEQ ID NO: 68062 - RNA, 32 nt, Human
aucuuggcucacugcaacaucugacuccuggg

SEQ ID NO: 68063 - RNA, 32 nt, Human
aucuuggcucacugcaaccacugcuuccuggg

SEQ ID NO: 68064 - RNA, 32 nt, Human
aucuuggcucacugcaaccacugucucccggg

SEQ ID NO: 68065 - RNA, 32 nt, Human
aucuuggcucacugcaacccccaccucccggg

SEQ ID NO: 68066 - RNA, 24 nt, Human
aucuuggcucacugcaacccccgc

SEQ ID NO: 68067 - RNA, 32 nt, Human
aucuuggcucacugcaacccccgccuccaggg

SEQ ID NO: 68068 - RNA, 23 nt, Human
aucuuggcucacugcaaccccgc

SEQ ID NO: 68069 - RNA, 32 nt, Human
aucuuggcucacugcaaccccgccucccaggu

SEQ ID NO: 68070 - RNA, 32 nt, Human
aucuuggcucacugcaacccucccucccgggu

SEQ ID NO: 68071 - RNA, 32 nt, Human
aucuuggcucacugcaaccucaaccagcccag

SEQ ID NO: 68072 - RNA, 32 nt, Human
aucuuggcucacugcaaccucagccucccagg

SEQ ID NO: 68073 - RNA, 22 nt, Human
aucuuggcucacugcaaccucc

SEQ ID NO: 68074 - RNA, 32 nt, Human
aucuuggcucacugcaaccuccacccgccggg

SEQ ID NO: 68075 - RNA, 32 nt, Human
aucuuggcucacugcaaccuccaccuccaggu

SEQ ID NO: 68076 - RNA, 32 nt, Human
aucuuggcucacugcaaccuccaccucccagg

SEQ ID NO: 68077 - RNA, 32 nt, Human
aucuuggcucacugcaaccuccaccucccagu

SEQ ID NO: 68078 - RNA, 32 nt, Human
aucuuggcucacugcaaccuccaccucccggg

SEQ ID NO: 68079 - RNA, 32 nt, Human
aucuuggcucacugcaaccuccaccuccuggg

SEQ ID NO: 68080 - RNA, 32 nt, Human
aucuuggcucacugcaaccuccaccucuggga

SEQ ID NO: 68081 - RNA, 32 nt, Human
aucuuggcucacugcaaccuccaccuuccugg

SEQ ID NO: 68082 - RNA, 32 nt, Human
aucuuggcucacugcaaccuccacuucccagg

SEQ ID NO: 68083 - RNA, 32 nt, Human
aucuuggcucacugcaaccuccacuucccggg

SEQ ID NO: 68084 - RNA, 32 nt, Human
aucuuggcucacugcaaccuccacuuccuggg

SEQ ID NO: 68085 - RNA, 32 nt, Human
aucuuggcucacugcaaccuccacuucucagg

SEQ ID NO: 68086 - RNA, 32 nt, Human
aucuuggcucacugcaaccuccgacucccagg

SEQ ID NO: 68087 - RNA, 32 nt, Human
aucuuggcucacugcaaccuccgacucccugg

SEQ ID NO: 68088 - RNA, 24 nt, Human
aucuuggcucacugcaaccuccgc

SEQ ID NO: 68089 - RNA, 32 nt, Human
aucuuggcucacugcaaccuccgccuccaggg

SEQ ID NO: 68090 - RNA, 32 nt, Human
aucuuggcucacugcaaccuccgccucccagg

SEQ ID NO: 68091 - RNA, 32 nt, Human
aucuuggcucacugcaaccuccgccucccgag

SEQ ID NO: 68092 - RNA, 32 nt, Human
aucuuggcucacugcaaccuccgccucccggg

SEQ ID NO: 68093 - RNA, 32 nt, Human
aucuuggcucacugcaaccuccgccuccuggg

SEQ ID NO: 68094 - RNA, 32 nt, Human
aucuuggcucacugcaaccuccgccucucagg

SEQ ID NO: 68095 - RNA, 32 nt, Human
aucuuggcucacugcaaccuccgccucucggg

SEQ ID NO: 68096 - RNA, 32 nt, Human
aucuuggcucacugcaaccuccgccucuuggg

SEQ ID NO: 68097 - RNA, 32 nt, Human
aucuuggcucacugcaaccuccgccuuccugg

SEQ ID NO: 68098 - RNA, 32 nt, Human
aucuuggcucacugcaaccuccgucucccagg

SEQ ID NO: 68099 - RNA, 32 nt, Human
aucuuggcucacugcaaccuccgucuccuggg

SEQ ID NO: 68100 - RNA, 32 nt, Human
aucuuggcucacugcaaccuccgucuuccggg

SEQ ID NO: 68101 - RNA, 32 nt, Human
aucuuggcucacugcaaccuccuccucccggg

SEQ ID NO: 68102 - RNA, 32 nt, Human
aucuuggcucacugcaaccuccugcuuccugg

SEQ ID NO: 68103 - RNA, 32 nt, Human
aucuuggcucacugcaaccucuaccuccuggg

SEQ ID NO: 68104 - RNA, 32 nt, Human
aucuuggcucacugcaaccucugccaccuggg

SEQ ID NO: 68105 - RNA, 32 nt, Human
aucuuggcucacugcaaccucugccccaccaa

SEQ ID NO: 68106 - RNA, 32 nt, Human
aucuuggcucacugcaaccucugccuaccgga

SEQ ID NO: 68107 - RNA, 32 nt, Human
aucuuggcucacugcaaccucugccucacagg

SEQ ID NO: 68108 - RNA, 32 nt, Human
aucuuggcucacugcaaccucugccucccagg

SEQ ID NO: 68109 - RNA, 32 nt, Human
aucuuggcucacugcaaccucugccucccggg

SEQ ID NO: 68110 - RNA, 30 nt, Human
aucuuggcucacugcaaccucugccuccug

SEQ ID NO: 68111 - RNA, 32 nt, Human
aucuuggcucacugcaaccucugccuccugaa

SEQ ID NO: 68112 - RNA, 32 nt, Human
aucuuggcucacugcaaccucugccuccuggg

SEQ ID NO: 68113 - RNA, 32 nt, Human
aucuuggcucacugcaaccucugccuccuucg

SEQ ID NO: 68114 - RNA, 32 nt, Human
aucuuggcucacugcaaccucugccugccggg

SEQ ID NO: 68115 - RNA, 32 nt, Human
aucuuggcucacugcaaccucugccuucuggg

SEQ ID NO: 68116 - RNA, 32 nt, Human
aucuuggcucacugcaaccucugcgggcucac

SEQ ID NO: 68117 - RNA, 32 nt, Human
aucuuggcucacugcaaccucugcuucccagg

SEQ ID NO: 68118 - RNA, 32 nt, Human
aucuuggcucacugcaaccucugcuucccgag

SEQ ID NO: 68119 - RNA, 32 nt, Human
aucuuggcucacugcaaccucugcuucccggg

SEQ ID NO: 68120 - RNA, 32 nt, Human
aucuuggcucacugcaaccucugucucccagg

SEQ ID NO: 68121 - RNA, 32 nt, Human
aucuuggcucacugcaaccucugucuccuggg

SEQ ID NO: 68122 - RNA, 32 nt, Human
aucuuggcucacugcaaccucugucuuccagg

SEQ ID NO: 68123 - RNA, 32 nt, Human
aucuuggcucacugcaaccucuguguccuggg

SEQ ID NO: 68124 - RNA, 32 nt, Human
aucuuggcucacugcaaccucuuccuccuggu

SEQ ID NO: 68125 - RNA, 32 nt, Human
aucuuggcucacugcaaccugcgccuccuggg

SEQ ID NO: 68126 - RNA, 32 nt, Human
aucuuggcucacugcaacguccgccucccagg

SEQ ID NO: 68127 - RNA, 32 nt, Human
aucuuggcucacugcaacgucugccuccuggg

SEQ ID NO: 68128 - RNA, 32 nt, Human
aucuuggcucacugcaacucugcuucccaggu

SEQ ID NO: 68129 - RNA, 32 nt, Human
aucuuggcucacugcaacuuccaccucuggga

SEQ ID NO: 68130 - RNA, 32 nt, Human
aucuuggcucacugcaacuuccacuucccggg

SEQ ID NO: 68131 - RNA, 32 nt, Human
aucuuggcucacugcaacuuccgccuccugug

SEQ ID NO: 68132 - RNA, 32 nt, Human
aucuuggcucacugcaacuuccgucucccggg

SEQ ID NO: 68133 - RNA, 32 nt, Human
aucuuggcucacugcaacuucuaccuccgagg

SEQ ID NO: 68134 - RNA, 32 nt, Human
aucuuggcucacugcaacuucugccaccuggg

SEQ ID NO: 68135 - RNA, 32 nt, Human
aucuuggcucacugcaacuucugccuuccagg

SEQ ID NO: 68136 - RNA, 32 nt, Human
aucuuggcucacugcaacuugggccucccagg

SEQ ID NO: 68137 - RNA, 22 nt, Human
aucuuggcucacugcaagcucc

SEQ ID NO: 68138 - RNA, 32 nt, Human
aucuuggcucacugcaagcuccaccuccuggg

SEQ ID NO: 68139 - RNA, 24 nt, Human
aucuuggcucacugcaagcuccgc

SEQ ID NO: 68140 - RNA, 32 nt, Human
aucuuggcucacugcaagcuccgccucccagg

SEQ ID NO: 68141 - RNA, 32 nt, Human
aucuuggcucacugcaagcuccgccucccgag

SEQ ID NO: 68142 - RNA, 32 nt, Human
aucuuggcucacugcaagcuccgccucccggc

SEQ ID NO: 68143 - RNA, 32 nt, Human
aucuuggcucacugcaagcuccgccucccggg

SEQ ID NO: 68144 - RNA, 32 nt, Human
aucuuggcucacugcaagcuccgccuccuggg

SEQ ID NO: 68145 - RNA, 32 nt, Human
aucuuggcucacugcaagcuccgccucucggg

SEQ ID NO: 68146 - RNA, 24 nt, Human
aucuuggcucacugcaagcucugc

SEQ ID NO: 68147 - RNA, 32 nt, Human
aucuuggcucacugcaagcucugcccuccccg

SEQ ID NO: 68148 - RNA, 32 nt, Human
aucuuggcucacugcaagcuuccccuuccggg

SEQ ID NO: 68149 - RNA, 32 nt, Human
aucuuggcucacugcaaucucuauccccuggg

SEQ ID NO: 68150 - RNA, 32 nt, Human
aucuuggcucacugcaaucucugccucucggg

SEQ ID NO: 68151 - RNA, 32 nt, Human
aucuuggcucacugcaaucucugccuuccggg

SEQ ID NO: 68152 - RNA, 32 nt, Human
aucuuggcucacugcacccucugucuguuggg

SEQ ID NO: 68153 - RNA, 32 nt, Human
aucuuggcucacugcaccuccaccuuccgggc

SEQ ID NO: 68154 - RNA, 32 nt, Human
aucuuggcucacugcaccucugucucccaagu

SEQ ID NO: 68155 - RNA, 32 nt, Human
aucuuggcucacugcagacuucaccuccugag

SEQ ID NO: 68156 - RNA, 32 nt, Human
aucuuggcucacugcagccucaaccuguuggg

SEQ ID NO: 68157 - RNA, 32 nt, Human
aucuuggcucacugcagccucaacuuccagcg

SEQ ID NO: 68158 - RNA, 32 nt, Human
aucuuggcucacugcagccuccaccuccccgg

SEQ ID NO: 68159 - RNA, 32 nt, Human
aucuuggcucacugcagccuccaccucccggg

SEQ ID NO: 68160 - RNA, 32 nt, Human
aucuuggcucacugcagccuccgccucccggg

SEQ ID NO: 68161 - RNA, 32 nt, Human
aucuuggcucacugcagccucgacuuccuggg

SEQ ID NO: 68162 - RNA, 32 nt, Human
aucuuggcucacugcagccucugccucccagg

SEQ ID NO: 68163 - RNA, 32 nt, Human
aucuuggcucacugcagccucugccucccggg

SEQ ID NO: 68164 - RNA, 32 nt, Human
aucuuggcucacugcagccucugccuccuggg

SEQ ID NO: 68165 - RNA, 32 nt, Human
aucuuggcucacugcagccuucgccucccggg

SEQ ID NO: 68166 - RNA, 32 nt, Human
aucuuggcucacugcaggcucugccucccggu

SEQ ID NO: 68167 - RNA, 32 nt, Human
aucuuggcucacugcauccuccgccuuccagg

SEQ ID NO: 68168 - RNA, 32 nt, Human
aucuuggcucacugcaugcucugccacuuggg

SEQ ID NO: 68169 - RNA, 32 nt, Human
aucuuggcucacugcggccucugccucccggc

SEQ ID NO: 68170 - RNA, 32 nt, Human
aucuuggcucacugcuaccucuaccaugagca

SEQ ID NO: 68171 - RNA, 32 nt, Human
aucuuggcucacugcugcaaccucccccuccu

SEQ ID NO: 68172 - RNA, 32 nt, Human
aucuuggcucacuguaaccuccaccucccagg

SEQ ID NO: 68173 - RNA, 32 nt, Human
aucuuggcucacuguaaccuccgccucccagg

SEQ ID NO: 68174 - RNA, 32 nt, Human
aucuuggcucacuguaaccuccgccucccggg

SEQ ID NO: 68175 - RNA, 32 nt, Human
aucuuggcucacuguaaccucugccuccagga

SEQ ID NO: 68176 - RNA, 32 nt, Human
aucuuggcucacuguaaccucugccucccagu

SEQ ID NO: 68177 - RNA, 32 nt, Human
aucuuggcucacuguaacuuccacuugccagg

SEQ ID NO: 68178 - RNA, 32 nt, Human
aucuuggcucacuguagccuugacauccuggg

SEQ ID NO: 68179 - RNA, 32 nt, Human
aucuuggcucagugcaaccuccgccuccuggg

SEQ ID NO: 68180 - RNA, 32 nt, Human
aucuuggcucauugcaaccuccgccucccucc

SEQ ID NO: 68181 - RNA, 32 nt, Human
aucuuggcucauugcaaccucugccucccagg

SEQ ID NO: 68182 - RNA, 32 nt, Human
aucuuggcucccugcaaccucugcuuccuggg

SEQ ID NO: 68183 - RNA, 32 nt, Human
aucuuggcuccucuccccuuguuccugauuuu

SEQ ID NO: 68184 - RNA, 32 nt, Human
aucuuggcuccugcuccugccgucuagacaaa

SEQ ID NO: 68185 - RNA, 32 nt, Human
aucuuggcucgcugcaaccucagcuuccagag

SEQ ID NO: 68186 - RNA, 32 nt, Human
aucuuggcucgcugcaaccuccgccucccagg

SEQ ID NO: 68187 - RNA, 31 nt, Human
aucuuggcucgcugcaaccucugccuccugg

SEQ ID NO: 68188 - RNA, 32 nt, Human
aucuuggcucgcugcaaccuucacccuucacc

SEQ ID NO: 68189 - RNA, 32 nt, Human
aucuuggcucucugcaaccucugccucccagg

SEQ ID NO: 68190 - RNA, 32 nt, Human
aucuuggcucuuugcaaccucugccuccuggg

SEQ ID NO: 68191 - RNA, 32 nt, Human
aucuuggcugacugcaacuucugccuccuggg

SEQ ID NO: 68192 - RNA, 32 nt, Human
aucuuggcuuacugcaaccuccaccucccagg

SEQ ID NO: 68193 - RNA, 32 nt, Human
aucuuggcuuacugcaaccuccaccuccuggg

SEQ ID NO: 68194 - RNA, 32 nt, Human
aucuuggcuuacugcaaccuccgccuccuggg

SEQ ID NO: 68195 - RNA, 32 nt, Human
aucuuggcuuacugcaaccucugccucccagg

SEQ ID NO: 68196 - RNA, 32 nt, Human
aucuuggcuuacugcaacuuccgacucccagg

SEQ ID NO: 68197 - RNA, 24 nt, Human
aucuuggcuuacugcaagcuccgc

SEQ ID NO: 68198 - RNA, 32 nt, Human
aucuuggcuuacugcaagcucugccuccuggg

SEQ ID NO: 68199 - RNA, 32 nt, Human
aucuuggcuuucugcaaccucugccucccagg

SEQ ID NO: 68200 - RNA, 32 nt, Human
aucuuggcuuuuaguaaucauguuggcugguc

SEQ ID NO: 68201 - RNA, 32 nt, Human
aucuugggcuuucagcccccaaaggugugaga

SEQ ID NO: 68202 - RNA, 32 nt, Human
aucuuggggaaagugaaaaauguaaucugcaa

SEQ ID NO: 68203 - RNA, 32 nt, Human
aucuuggggagguggccgggugcaguggcucg

SEQ ID NO: 68204 - RNA, 32 nt, Human
aucuuggggcaggccagcucugauguggauga

SEQ ID NO: 68205 - RNA, 24 nt, Human
aucuugggucacugcaaacuccgc

SEQ ID NO: 68206 - RNA, 32 nt, Human
aucuugggucacugcaaacuccgccucccagg

SEQ ID NO: 68207 - RNA, 32 nt, Human
aucuugggucacugcaaccucugccuccuggg

SEQ ID NO: 68208 - RNA, 32 nt, Human
aucuugggucacugcagccuccaacuccuugg

SEQ ID NO: 68209 - RNA, 32 nt, Human
aucuugggugacuucucaucacucuggaccuc

SEQ ID NO: 68210 - RNA, 31 nt, Human
aucuugggugagagagagggaccugcaggau

SEQ ID NO: 68211 - RNA, 32 nt, Human
aucuugggugagagagagggaccugcaggaug

SEQ ID NO: 68212 - RNA, 32 nt, Human
aucuugguaacgagccaagaucaugcaaccag

SEQ ID NO: 68213 - RNA, 32 nt, Human
aucuugguaauuuaaauguggcugauucaucu

SEQ ID NO: 68214 - RNA, 32 nt, Human
aucuugguagugccugccuuugaaacagggug

SEQ ID NO: 68215 - RNA, 32 nt, Human
aucuugguauacuggcugggcacaguggcuca

SEQ ID NO: 68216 - RNA, 32 nt, Human
aucuugguggccccuccaggcccagccucugc

SEQ ID NO: 68217 - RNA, 32 nt, Human
aucuugguuacaaaugagacuccuucagucag

SEQ ID NO: 68218 - RNA, 22 nt, Human
aucuugguucacugcaaccucc

SEQ ID NO: 68219 - RNA, 32 nt, Human
aucuugguucacugcaaccuccaccuccaggg

SEQ ID NO: 68220 - RNA, 32 nt, Human
aucuugguucacugcaaccuccaccucccagg

SEQ ID NO: 68221 - RNA, 32 nt, Human
aucuugguucacugcaaccuccaccucuuggg

SEQ ID NO: 68222 - RNA, 24 nt, Human
aucuugguucacugcaaccuccgc

SEQ ID NO: 68223 - RNA, 32 nt, Human
aucuugguucacugcaaccuccgcauccgggg

SEQ ID NO: 68224 - RNA, 32 nt, Human
aucuugguucacugcaaccuccgccuccugga

SEQ ID NO: 68225 - RNA, 32 nt, Human
aucuugguucacugcaaccucugccucccagg

SEQ ID NO: 68226 - RNA, 32 nt, Human
aucuugguucacugcaaccucugccucccggg

SEQ ID NO: 68227 - RNA, 22 nt, Human
aucuugguucacugcaagcucc

SEQ ID NO: 68228 - RNA, 32 nt, Human
aucuugguucacugcaagcuccaccucccggg

SEQ ID NO: 68229 - RNA, 32 nt, Human
aucuugguuuacugcaaccuccaccuccuagg

SEQ ID NO: 68230 - RNA, 32 nt, Human
aucuuguaaagucuguuuuccuuucccaagga

SEQ ID NO: 68231 - RNA, 32 nt, Human
aucuuguacauacacaaauuuuccucagguuu

SEQ ID NO: 68232 - RNA, 32 nt, Human
aucuuguagcugggguauaauugggaaauguu

SEQ ID NO: 68233 - RNA, 32 nt, Human
aucuuguauauacuuggaacauccuuucaaga

SEQ ID NO: 68234 - RNA, 32 nt, Human
aucuuguauuggagauugaaagaugcuguaau

SEQ ID NO: 68235 - RNA, 32 nt, Human
aucuuguccucaacccucucccuagaucaguc

SEQ ID NO: 68236 - RNA, 32 nt, Human
aucuugucucacugcaaccucugccucccggg

SEQ ID NO: 68237 - RNA, 32 nt, Human
aucuugucucucaggcuggguugcaauggcac

SEQ ID NO: 68238 - RNA, 19 nt, Human
aucuugucugagacugcau

SEQ ID NO: 68239 - RNA, 32 nt, Human
aucuugugacagggacaggcugaggggcaaau

SEQ ID NO: 68240 - RNA, 32 nt, Human
aucuugugaggguguguuuuucccagugugaa

SEQ ID NO: 68241 - RNA, 32 nt, Human
aucuugugccgucuaggcccagccaggcuuuu

SEQ ID NO: 68242 - RNA, 32 nt, Human
aucuugugccucucccccuuugcuaggaguug

SEQ ID NO: 68243 - RNA, 32 nt, Human
aucuugugccuggaaauagccugagguggcuc

SEQ ID NO: 68244 - RNA, 32 nt, Human
aucuugugcugcuuuucucacugacguguugc

SEQ ID NO: 68245 - RNA, 32 nt, Human
aucuugugggaccaguccugcccacauggggc

SEQ ID NO: 68246 - RNA, 32 nt, Human
aucuugugguuauucuggguuguggaaggaaa

SEQ ID NO: 68247 - RNA, 29 nt, Human
aucuugugucuguugugccugaauuuggc

SEQ ID NO: 68248 - RNA, 32 nt, Human
aucuuguguucuguuaugaaauagcacaacca

SEQ ID NO: 68249 - RNA, 32 nt, Human
aucuuguguugugccuguaugaauuuuuaaaa

SEQ ID NO: 68250 - RNA, 31 nt, Human
aucuuguuagagagcuuuucacugugaggaa

SEQ ID NO: 68251 - RNA, 32 nt, Human
aucuuguuagagagcuuuucacugugaggaag

SEQ ID NO: 68252 - RNA, 32 nt, Human
aucuuguugcugcaaugagaaauaaaugaaug

SEQ ID NO: 68253 - RNA, 32 nt, Human
aucuuguuucucccccugccagucucuucuga

SEQ ID NO: 68254 - RNA, 32 nt, Human
aucuuuaaaagugccuuaggggaacccugucc

SEQ ID NO: 68255 - RNA, 32 nt, Human
aucuuuaacagaaacaucauacugcauuaaaa

SEQ ID NO: 68256 - RNA, 32 nt, Human
aucuuuaauacaauauagaaauuguguaauag

SEQ ID NO: 68257 - RNA, 32 nt, Human
aucuuuaauaugugggacuaacagcaguguag

SEQ ID NO: 68258 - RNA, 32 nt, Human
aucuuuaauauuuuaucuuuacagauuucccu

SEQ ID NO: 68259 - RNA, 32 nt, Human
aucuuuaccuaaauugcucaggcauuauucca

SEQ ID NO: 68260 - RNA, 32 nt, Human
aucuuuacugcagcucugccggccuggagggg

SEQ ID NO: 68261 - RNA, 32 nt, Human
aucuuuagcaguuuccucagugauggaauauc

SEQ ID NO: 68262 - RNA, 32 nt, Human
aucuuuagcugcacagucuacuacucaucaac

SEQ ID NO: 68263 - RNA, 32 nt, Human
aucuuuaggguuuagaaucuaaccucaagaau

SEQ ID NO: 68264 - RNA, 32 nt, Human
aucuuuaguaaggacaaaaggaagcacugugg

SEQ ID NO: 68265 - RNA, 32 nt, Human
aucuuuagucuguguucuuucuaguuauuugg

SEQ ID NO: 68266 - RNA, 32 nt, Human
aucuuuagugcagaggauggaaaguugaugcc

SEQ ID NO: 68267 - RNA, 32 nt, Human
aucuuuaguugacucuacagucaugaaacaua

SEQ ID NO: 68268 - RNA, 32 nt, Human
aucuuuauccagagguaaucauagcugccugg

SEQ ID NO: 68269 - RNA, 32 nt, Human
aucuuuauuagcaacuauuuuuccaacuauuu

SEQ ID NO: 68270 - RNA, 32 nt, Human
aucuuuauuuagcauaucaauguggccauugu

SEQ ID NO: 68271 - RNA, 31 nt, Human
aucuuucacagcuagaaauugaaagggccuu

SEQ ID NO: 68272 - RNA, 32 nt, Human
aucuuucaccaagauggguggcaccaaccuug

SEQ ID NO: 68273 - RNA, 32 nt, Human
aucuuucacugauuucugaaucauguucuagu

SEQ ID NO: 68274 - RNA, 32 nt, Human
aucuuucagccuggagacugugcagaaacaug

SEQ ID NO: 68275 - RNA, 32 nt, Human
aucuuucagccuucugucaucaguaaaauuua

SEQ ID NO: 68276 - RNA, 32 nt, Human
aucuuucaggaaauuuuugcauguuuaauaau

SEQ ID NO: 68277 - RNA, 32 nt, Human
aucuuucauuucagucaaaucacugcagucau

SEQ ID NO: 68278 - RNA, 32 nt, Human
aucuuucccaucaacucugugugaaggcaggu

SEQ ID NO: 68279 - RNA, 32 nt, Human
aucuuucccguggagcaacuuccugcuccacg

SEQ ID NO: 68280 - RNA, 32 nt, Human
aucuuucccuuuccuuacuagaccucucuuua

SEQ ID NO: 68281 - RNA, 32 nt, Human
aucuuuccucauguucccuugaguauuucaau

SEQ ID NO: 68282 - RNA, 32 nt, Human
aucuuuccucauucacucuucacguggaccgu

SEQ ID NO: 68283 - RNA, 32 nt, Human
aucuuuccucauugacugacucugugccacgu

SEQ ID NO: 68284 - RNA, 32 nt, Human
aucuuucuacagcuacggggcuccgggcuacu

SEQ ID NO: 68285 - RNA, 23 nt, Human
aucuuucuaugugcuuacugcug

SEQ ID NO: 68286 - RNA, 32 nt, Human
aucuuucucagaggaggaggaauagacuuaaa

SEQ ID NO: 68287 - RNA, 32 nt, Human
aucuuucucauaauuaucuccuucuagguuga

SEQ ID NO: 68288 - RNA, 32 nt, Human
aucuuucucccauccuuccccaaagagaucuc

SEQ ID NO: 68289 - RNA, 32 nt, Human
aucuuucuccccgcuuccccagucuuuaaaca

SEQ ID NO: 68290 - RNA, 32 nt, Human
aucuuucugcuucugggcuuucugaaaagcuu

SEQ ID NO: 68291 - RNA, 32 nt, Human
aucuuucuguugguaguggcuuuucaucagcu

SEQ ID NO: 68292 - RNA, 32 nt, Human
aucuuucuguuucuauuuuuaugccaaugaag

SEQ ID NO: 68293 - RNA, 32 nt, Human
aucuuucuuagagaugaaaguagcccgcuuua

SEQ ID NO: 68294 - RNA, 32 nt, Human
aucuuucuucuguuucuuccuccccgcuguca

SEQ ID NO: 68295 - RNA, 32 nt, Human
aucuuucuuuccccaucuuucuauuuucugca

SEQ ID NO: 68296 - RNA, 32 nt, Human
aucuuugaaaaagcauauuuugucaucaaguu

SEQ ID NO: 68297 - RNA, 32 nt, Human
aucuuugaaaccaaguucuugucucagauuga

SEQ ID NO: 68298 - RNA, 32 nt, Human
aucuuugaaagaaucaggaggucaagucaaga

SEQ ID NO: 68299 - RNA, 32 nt, Human
aucuuugacuugggagguggaauaagaauucg

SEQ ID NO: 68300 - RNA, 32 nt, Human
aucuuugcagugaauuaugcuuugcuuuaaaa

SEQ ID NO: 68301 - RNA, 32 nt, Human
aucuuugccacccucaugcugugugacucaaa

SEQ ID NO: 68302 - RNA, 32 nt, Human
aucuuugccuccagauuucaagaggagaaauu

SEQ ID NO: 68303 - RNA, 32 nt, Human
aucuuugccuucauuucaccuuccucuucguu

SEQ ID NO: 68304 - RNA, 32 nt, Human
aucuuugccuugaaaugaauggaaaaguauuu

SEQ ID NO: 68305 - RNA, 32 nt, Human
aucuuugccuuuggagagacugccccgagcac

SEQ ID NO: 68306 - RNA, 32 nt, Human
aucuuugcucacugcaacauccaccucauggg

SEQ ID NO: 68307 - RNA, 32 nt, Human
aucuuugcucacugcaaccucugccacccggg

SEQ ID NO: 68308 - RNA, 32 nt, Human
aucuuugcucauguguuauaagccccaaguug

SEQ ID NO: 68309 - RNA, 32 nt, Human
aucuuugcuuugcugaccucucaggccucuuc

SEQ ID NO: 68310 - RNA, 22 nt, Human
aucuuuggaacaucagcaccag

SEQ ID NO: 68311 - RNA, 32 nt, Human
aucuuuggagaaggagaaagaaaggaaagaac

SEQ ID NO: 68312 - RNA, 31 nt, Human
aucuuuggagacuucuuccagaugcuaguaa

SEQ ID NO: 68313 - RNA, 32 nt, Human
aucuuuggagagaaggagguggggauccgagu

SEQ ID NO: 68314 - RNA, 32 nt, Human
aucuuuggauugauguucacagcuuuauacuu

SEQ ID NO: 68315 - RNA, 32 nt, Human
aucuuuggcagcucuuuucuucugcucagacc

SEQ ID NO: 68316 - RNA, 32 nt, Human
aucuuuggcaggaacccagggcuguucuguca

SEQ ID NO: 68317 - RNA, 32 nt, Human
aucuuuggcaggaaggcgaggcuuccgcccgg

SEQ ID NO: 68318 - RNA, 32 nt, Human
aucuuuggccgacagugguguaacugugugug

SEQ ID NO: 68319 - RNA, 32 nt, Human
aucuuuggccucugucuccacucucacuucuu

SEQ ID NO: 68320 - RNA, 32 nt, Human
aucuuuggcucuuuugaugcacaauauccauc

SEQ ID NO: 68321 - RNA, 32 nt, Human
aucuuugggggaggggaggggcaggaagaggu

SEQ ID NO: 68322 - RNA, 32 nt, Human
aucuuuggggguugguuugaggucuuagaacu

SEQ ID NO: 68323 - RNA, 32 nt, Human
aucuuuggguagaagcuggacaguacuguugc

SEQ ID NO: 68324 - RNA, 32 nt, Human
aucuuugggucagugagcuccuggagaagaga

SEQ ID NO: 68325 - RNA, 32 nt, Human
aucuuugggugguggagugcaaaggaggcgac

SEQ ID NO: 68326 - RNA, 31 nt, Human
aucuuugguaaaggaacuagagaugcaugca

SEQ ID NO: 68327 - RNA, 32 nt, Human
aucuuuggugacgggucacaggcauugguagu

SEQ ID NO: 68328 - RNA, 32 nt, Human
aucuuugguuuucccaaccaucuggaaaucuc

SEQ ID NO: 68329 - RNA, 31 nt, Human
aucuuuguauacuucugacaauugccagauc

SEQ ID NO: 68330 - RNA, 32 nt, Human
aucuuuguaucuuucauguuugccugcaguug

SEQ ID NO: 68331 - RNA, 32 nt, Human
aucuuuguccauaacuugcucugugauccagu

SEQ ID NO: 68332 - RNA, 32 nt, Human
aucuuugucuucccucggaucagcuuuaaaga

SEQ ID NO: 68333 - RNA, 32 nt, Human
aucuuugucuuugcuucuggccuguguaagca

SEQ ID NO: 68334 - RNA, 32 nt, Human
aucuuugugcagaugaccaaagcaauugacuu

SEQ ID NO: 68335 - RNA, 32 nt, Human
aucuuuguguccugacagccgugaccgugacc

SEQ ID NO: 68336 - RNA, 32 nt, Human
aucuuuguucugagucacugcaguccccaaag

SEQ ID NO: 68337 - RNA, 32 nt, Human
aucuuuguuggcgaucugagugcaguguggca

SEQ ID NO: 68338 - RNA, 32 nt, Human
aucuuuguuucaguugucugucaggguuuaau

SEQ ID NO: 68339 - RNA, 32 nt, Human
aucuuuuaauuccuauuuucugcuucauuggu

SEQ ID NO: 68340 - RNA, 32 nt, Human
aucuuuuaggccagccagcugaaggagacacu

SEQ ID NO: 68341 - RNA, 32 nt, Human
aucuuuuauacccacugacucugagcagccug

SEQ ID NO: 68342 - RNA, 32 nt, Human
aucuuuuaugacugcaacuugccuuuuccauu

SEQ ID NO: 68343 - RNA, 32 nt, Human
aucuuuuauguuuuuaaaugcauucauuuuac

SEQ ID NO: 68344 - RNA, 32 nt, Human
aucuuuuauuuuuauagcucagguauuguaau

SEQ ID NO: 68345 - RNA, 32 nt, Human
aucuuuucaagcauguucuaccaccuuggaag

SEQ ID NO: 68346 - RNA, 32 nt, Human
aucuuuucaccauggaugaaacuauaacuuaa

SEQ ID NO: 68347 - RNA, 32 nt, Human
aucuuuucagaagaaaauaaaagcauuuaauu

SEQ ID NO: 68348 - RNA, 32 nt, Human
aucuuuucagauuccauuucuuuuuacauaaa

SEQ ID NO: 68349 - RNA, 32 nt, Human
aucuuuucagcccugugguccaguguccauca

SEQ ID NO: 68350 - RNA, 25 nt, Human
aucuuuucaguguuuuuucacuuua

SEQ ID NO: 68351 - RNA, 32 nt, Human
aucuuuucauuuccuuuauaucucuuuucuuc

SEQ ID NO: 68352 - RNA, 32 nt, Human
aucuuuucggugcucccuaauccaagcagcuu

SEQ ID NO: 68353 - RNA, 32 nt, Human
aucuuuucucucucacacaugcaguccucaau

SEQ ID NO: 68354 - RNA, 32 nt, Human
aucuuuucugaccauuuuaguacagaauuagu

SEQ ID NO: 68355 - RNA, 32 nt, Human
aucuuuucuguguguaaacauaguugaaauuc

SEQ ID NO: 68356 - RNA, 32 nt, Human
aucuuuucuuacugcaaccuucgccucccgag

SEQ ID NO: 68357 - RNA, 32 nt, Human
aucuuuucuuagguauuguauuucaggguaca

SEQ ID NO: 68358 - RNA, 32 nt, Human
aucuuuucuucagauaccagauuugauauaaa

SEQ ID NO: 68359 - RNA, 32 nt, Human
aucuuuucuucagauaccagauuugauauaau

SEQ ID NO: 68360 - RNA, 32 nt, Human
aucuuuucuucugcuguuuucuuuuccccucu

SEQ ID NO: 68361 - RNA, 32 nt, Human
aucuuuucuucugcuuucuucccuccaagagc

SEQ ID NO: 68362 - RNA, 32 nt, Human
aucuuuugccuuuaagacgauucauucuuguc

SEQ ID NO: 68363 - RNA, 32 nt, Human
aucuuuuuaaaaacuacagacgucagcauguu

SEQ ID NO: 68364 - RNA, 32 nt, Human
aucuuuuuaauccaaaggugcuuuacuuuucc

SEQ ID NO: 68365 - RNA, 32 nt, Human
aucuuuuucaaaggacuguaguuuuguaaugg

SEQ ID NO: 68366 - RNA, 23 nt, Human
aucuuuuucacaauauccuauga

SEQ ID NO: 68367 - RNA, 32 nt, Human
aucuuuuucagauauuaauucauuucaucugc

SEQ ID NO: 68368 - RNA, 32 nt, Human
aucuuuuucucaaaugccauaauuaacugaaa

SEQ ID NO: 68369 - RNA, 32 nt, Human
aucuuuuuggagagucaugggaggaauguaaa

SEQ ID NO: 68370 - RNA, 20 nt, Human
augaaaaaacacuuuacuaa

SEQ ID NO: 68371 - RNA, 32 nt, Human
augaaaaaccauugaacaguuuucucgauggc

SEQ ID NO: 68372 - RNA, 32 nt, Human
augaaaaagaaacagucaagcacacaauagug

SEQ ID NO: 68373 - RNA, 25 nt, Human
augaaaaagaagcagacggugcagg

SEQ ID NO: 68374 - RNA, 32 nt, Human
augaaaaagaggagagaucucaagagggauaa

SEQ ID NO: 68375 - RNA, 29 nt, Human
augaaaaagcagggaaucucaaacuuuau

SEQ ID NO: 68376 - RNA, 32 nt, Human
augaaaaaggagagacauggaaagggagacag

SEQ ID NO: 68377 - RNA, 32 nt, Human
augaaaaauacuguggacacuuaaauaauggg

SEQ ID NO: 68378 - RNA, 32 nt, Human
augaaaaaucuguugauaaauccaucacuaua

SEQ ID NO: 68379 - RNA, 21 nt, Human
augaaaaaugugagaccaaag

SEQ ID NO: 68380 - RNA, 32 nt, Human
augaaaaauucuugccuuuccuuguuucagug

SEQ ID NO: 68381 - RNA, 32 nt, Human
augaaaacaaaauuccauuacaggggcagugc

SEQ ID NO: 68382 - RNA, 32 nt, Human
augaaaacagaauauucuguggugccagugca

SEQ ID NO: 68383 - RNA, 32 nt, Human
augaaaacagcaugggaaagacuugcccccau

SEQ ID NO: 68384 - RNA, 32 nt, Human
augaaaacaggccaggacaguggugcaugcca

SEQ ID NO: 68385 - RNA, 32 nt, Human
augaaaacaggccgggacaguggugcaugcca

SEQ ID NO: 68386 - RNA, 32 nt, Human
augaaaacaggcugggacaguggugcaugcca

SEQ ID NO: 68387 - RNA, 32 nt, Human
augaaaacccuuguagaucugcuaaacuucuc

SEQ ID NO: 68388 - RNA, 32 nt, Human
augaaaagacuucggaaaauuagucagagaug

SEQ ID NO: 68389 - RNA, 32 nt, Human
augaaaagagaauguugugauuugagcuuuua

SEQ ID NO: 68390 - RNA, 32 nt, Human
augaaaagagggcugagacuuuagcuguugag

SEQ ID NO: 68391 - RNA, 32 nt, Human
augaaaagccaagaaguaucugaaagauguca

SEQ ID NO: 68392 - RNA, 32 nt, Human
augaaaagcuggaagauugcuauagagucccu

SEQ ID NO: 68393 - RNA, 32 nt, Human
augaaaagcuguuacuggugauuauagaugag

SEQ ID NO: 68394 - RNA, 32 nt, Human
augaaaagcuuuguuuguucuuguuuuuaagu

SEQ ID NO: 68395 - RNA, 20 nt, Human
augaaaaggacacauucuga

SEQ ID NO: 68396 - RNA, 32 nt, Human
augaaaaggagaggacacagagacagaggaga

SEQ ID NO: 68397 - RNA, 32 nt, Human
augaaaaggaggaggaacaggaccaaggggug

SEQ ID NO: 68398 - RNA, 32 nt, Human
augaaaaguccccaggagaggggagcugugua

SEQ ID NO: 68399 - RNA, 22 nt, Human
augaaaaguguauuuuuggaga

SEQ ID NO: 68400 - RNA, 32 nt, Human
augaaaaguuugcugggucugcuggcugggaa

SEQ ID NO: 68401 - RNA, 32 nt, Human
augaaaauagccaugcagacaagucucucauc

SEQ ID NO: 68402 - RNA, 32 nt, Human
augaaaauauagaaugauuaucucagagcaga

SEQ ID NO: 68403 - RNA, 21 nt, Human
augaaaaucaauuuaccccau

SEQ ID NO: 68404 - RNA, 32 nt, Human
augaaaaucagguuguccuguacaguaucugc

SEQ ID NO: 68405 - RNA, 32 nt, Human
augaaaauccuuuuaaccauuuuaaccuagau

SEQ ID NO: 68406 - RNA, 32 nt, Human
augaaaaugaaccauucacagugcaagaagga

SEQ ID NO: 68407 - RNA, 32 nt, Human
augaaaaugaugaauaaccaguaccaguucca

SEQ ID NO: 68408 - RNA, 32 nt, Human
augaaaauggagccagagagccuggacaucag

SEQ ID NO: 68409 - RNA, 22 nt, Human
augaaaauggcuucugcuccau

SEQ ID NO: 68410 - RNA, 32 nt, Human
augaaaaugguguguuauuggaagauguuaaa

SEQ ID NO: 68411 - RNA, 32 nt, Human
augaaaauguauuuuuauauuauuuuacuuau

SEQ ID NO: 68412 - RNA, 32 nt, Human
augaaaauguucuauuucuugaucugaauugu

SEQ ID NO: 68413 - RNA, 24 nt, Human
augaaaauuauauuuuaacuucau

SEQ ID NO: 68414 - RNA, 32 nt, Human
augaaaauuccaguggauagacuuauauggcu

SEQ ID NO: 68415 - RNA, 32 nt, Human
augaaacaaaaacaaaaucacaagaggaagaa

SEQ ID NO: 68416 - RNA, 32 nt, Human
augaaacaaaggccagcccagggcuuagcaca

SEQ ID NO: 68417 - RNA, 32 nt, Human
augaaacaacuaaugagaaaagaaaaggaauu

SEQ ID NO: 68418 - RNA, 32 nt, Human
augaaacaagucuagucuucugguuuucuagc

SEQ ID NO: 68419 - RNA, 32 nt, Human
augaaacaggcagcguaggauggggguccagu

SEQ ID NO: 68420 - RNA, 32 nt, Human
augaaacagggcaccccagcugaccugguacu

SEQ ID NO: 68421 - RNA, 32 nt, Human
augaaacagggcaccccagcugcccugguacu

SEQ ID NO: 68422 - RNA, 32 nt, Human
augaaacaguuggugauguuucagagaaccca

SEQ ID NO: 68423 - RNA, 32 nt, Human
augaaacaucaguuggugaagcagaggacgca

SEQ ID NO: 68424 - RNA, 32 nt, Human
augaaacauugcauccaugaaggacagcacca

SEQ ID NO: 68425 - RNA, 32 nt, Human
augaaacauuucucuacuucaagaccaccucu

SEQ ID NO: 68426 - RNA, 32 nt, Human
augaaacccaggcuguagagaggauugaggcc

SEQ ID NO: 68427 - RNA, 32 nt, Human
augaaacccaucccuggacuccaggcuaagaa

SEQ ID NO: 68428 - RNA, 32 nt, Human
augaaacccccuaccacuuuugcaaauccugu

SEQ ID NO: 68429 - RNA, 32 nt, Human
augaaacgaauuuaagagaacauaucaaagag

SEQ ID NO: 68430 - RNA, 32 nt, Human
augaaacggaccucacuggacccauucuuuuu

SEQ ID NO: 68431 - RNA, 32 nt, Human
augaaacggugcaggccaggcgggcccuaaua

SEQ ID NO: 68432 - RNA, 32 nt, Human
augaaacuccaaaugcuuggaugucugauuca

SEQ ID NO: 68433 - RNA, 32 nt, Human
augaaacucccaaaggugccagagauggcugu

SEQ ID NO: 68434 - RNA, 32 nt, Human
augaaacucucaucuaguucugugauguguuu

SEQ ID NO: 68435 - RNA, 32 nt, Human
augaaacugaaguuuggugccuccucuuuauc

SEQ ID NO: 68436 - RNA, 32 nt, Human
augaaacugaguaguugaccuucaggucacga

SEQ ID NO: 68437 - RNA, 32 nt, Human
augaaacugcaacccaccugcccccagcccug

SEQ ID NO: 68438 - RNA, 32 nt, Human
augaaacugccucaccaagcacuaugcaauug

SEQ ID NO: 68439 - RNA, 32 nt, Human
augaaacugcuauauuugaaugcaguuguuca

SEQ ID NO: 68440 - RNA, 32 nt, Human
augaaacugggcugagauguguuacaggagcc

SEQ ID NO: 68441 - RNA, 32 nt, Human
augaaacuguccaccaagaucaagcagagaaa

SEQ ID NO: 68442 - RNA, 32 nt, Human
augaaacuuccccucaccuccucaucuuucca

SEQ ID NO: 68443 - RNA, 26 nt, Human
augaaagaaaaggaaugacuacagga

SEQ ID NO: 68444 - RNA, 32 nt, Human
augaaagaaagaaagaguggguuucagaagug

SEQ ID NO: 68445 - RNA, 32 nt, Human
augaaagaaagggaaaaggcagugguguguag

SEQ ID NO: 68446 - RNA, 32 nt, Human
augaaagaagcauauggcacuugugaagauaa

SEQ ID NO: 68447 - RNA, 32 nt, Human
augaaagaauguggcuuucuucagucaaagca

SEQ ID NO: 68448 - RNA, 32 nt, Human
augaaagacagugucauacaugggggaagaau

SEQ ID NO: 68449 - RNA, 32 nt, Human
augaaagagagcucuaaccagauggaacacug

SEQ ID NO: 68450 - RNA, 32 nt, Human
augaaagagaucuguaaaaccugcccaggaac

SEQ ID NO: 68451 - RNA, 32 nt, Human
augaaagaggcucaggcauaaguugagauucu

SEQ ID NO: 68452 - RNA, 32 nt, Human
augaaagaguagaagaagagagugucuccuga

SEQ ID NO: 68453 - RNA, 32 nt, Human
augaaagauacaugaguuugcauuuugaccug

SEQ ID NO: 68454 - RNA, 32 nt, Human
augaaagcagcugagagggaggcuguacccug

SEQ ID NO: 68455 - RNA, 32 nt, Human
augaaagccagccagcccuuccuccuucccuc

SEQ ID NO: 68456 - RNA, 32 nt, Human
augaaagccgugagccuccuggacuccacguc

SEQ ID NO: 68457 - RNA, 23 nt, Human
augaaagccugugucuuugaggg

SEQ ID NO: 68458 - RNA, 32 nt, Human
augaaagccuguuuugggcugaaagaaugauu

SEQ ID NO: 68459 - RNA, 32 nt, Human
augaaagcugccgaaaguuuaucugcccccag

SEQ ID NO: 68460 - RNA, 32 nt, Human
augaaaggaggaagaagaaagggacuuggaac

SEQ ID NO: 68461 - RNA, 32 nt, Human
augaaaggcugcagugccaguuuuaagaaaga

SEQ ID NO: 68462 - RNA, 32 nt, Human
augaaaggcuuagaauggaauauccucugauc

SEQ ID NO: 68463 - RNA, 22 nt, Human
augaaagggaggagacacaggc

SEQ ID NO: 68464 - RNA, 32 nt, Human
augaaaguaucugccuggcagugcaguaaaug

SEQ ID NO: 68465 - RNA, 32 nt, Human
augaaaguauugggguggagguugcagugagc

SEQ ID NO: 68466 - RNA, 32 nt, Human
augaaagugccuucccauuaugccguacgcug

SEQ ID NO: 68467 - RNA, 32 nt, Human
augaaagugccuucccauuaugcuguacccug

SEQ ID NO: 68468 - RNA, 22 nt, Human
augaaaguuauuuaagccccau

SEQ ID NO: 68469 - RNA, 32 nt, Human
augaaaguugaaaucauaccuaccucauaagg

SEQ ID NO: 68470 - RNA, 32 nt, Human
augaaauaaagaaaauaugguacauauacaca

SEQ ID NO: 68471 - RNA, 32 nt, Human
augaaauagcaucuacucaccauccuuccuca

SEQ ID NO: 68472 - RNA, 32 nt, Human
augaaauauauucaaauacauaccuuauuuua

SEQ ID NO: 68473 - RNA, 32 nt, Human
augaaauaucucccuggcaggguccucuucuu

SEQ ID NO: 68474 - RNA, 32 nt, Human
augaaauaugcugcaaucauuucugcauccuu

SEQ ID NO: 68475 - RNA, 32 nt, Human
augaaauauguauaacuuuaacuucuguuuua

SEQ ID NO: 68476 - RNA, 32 nt, Human
augaaauauucagcaaaauucuagaaaaugcu

SEQ ID NO: 68477 - RNA, 32 nt, Human
augaaaucaaaugguuuccuggauuacugcau

SEQ ID NO: 68478 - RNA, 32 nt, Human
augaaaucacaaaaucacugaggcugugacag

SEQ ID NO: 68479 - RNA, 23 nt, Human
augaaaucagugguauuuugaau

SEQ ID NO: 68480 - RNA, 32 nt, Human
augaaaucccccaggagucacuggauggaugu

SEQ ID NO: 68481 - RNA, 32 nt, Human
augaaaugaaaccuuuacccaugaccaacagu

SEQ ID NO: 68482 - RNA, 32 nt, Human
augaaaugaaggauugagggauugagggauug

SEQ ID NO: 68483 - RNA, 32 nt, Human
augaaaugagccaccgugaacagacaucugcc

SEQ ID NO: 68484 - RNA, 32 nt, Human
augaaauggaagaaggaggaagagcaugaagg

SEQ ID NO: 68485 - RNA, 32 nt, Human
augaaauggaggaucucuaaagagcaucugau

SEQ ID NO: 68486 - RNA, 32 nt, Human
augaaaugucugcacuguagucucagaucacu

SEQ ID NO: 68487 - RNA, 32 nt, Human
augaaaugugguaaaucaacuccacagaacca

SEQ ID NO: 68488 - RNA, 32 nt, Human
augaaauuauguguaauaacgcuuuauguuau

SEQ ID NO: 68489 - RNA, 32 nt, Human
augaaauucaagacaaagaagaaaaauacuca

SEQ ID NO: 68490 - RNA, 32 nt, Human
augaaauucauauggugucccaccuuauuuaa

SEQ ID NO: 68491 - RNA, 32 nt, Human
augaaauuccagccuugacuuucuucugugca

SEQ ID NO: 68492 - RNA, 32 nt, Human
augaaauucucuuccuuagaggaaagggaaag

SEQ ID NO: 68493 - RNA, 32 nt, Human
augaaauugacaccgacucugccuacauucuu

SEQ ID NO: 68494 - RNA, 32 nt, Human
augaaauugauauuuuggggaagauuaaucuu

SEQ ID NO: 68495 - RNA, 32 nt, Human
augaaauugggaguugcuguguggaaacucaa

SEQ ID NO: 68496 - RNA, 21 nt, Human
augaaauuguaccacugggua

SEQ ID NO: 68497 - RNA, 32 nt, Human
augaaauuuacagugauagaacaaaagaggau

SEQ ID NO: 68498 - RNA, 32 nt, Human
augaacaaaggccauaucauuuuuauugacaa

SEQ ID NO: 68499 - RNA, 32 nt, Human
augaacaaauuuccuugguuacaugguuuuuc

SEQ ID NO: 68500 - RNA, 32 nt, Human
augaacaagguggacacucacugaccugucac

SEQ ID NO: 68501 - RNA, 32 nt, Human
augaacaauacauccaacaaggcuucuagcaa

SEQ ID NO: 68502 - RNA, 32 nt, Human
augaacacagaaacccucccaaauccucagac

SEQ ID NO: 68503 - RNA, 32 nt, Human
augaacaccacugcacuccaccuguccacuug

SEQ ID NO: 68504 - RNA, 22 nt, Human
augaacacgucuuguuuggagg

SEQ ID NO: 68505 - RNA, 31 nt, Human
augaacacugugcaagguguuggagaaaucc

SEQ ID NO: 68506 - RNA, 20 nt, Human
augaacagaaaacauucuga

SEQ ID NO: 68507 - RNA, 21 nt, Human
augaacagauucauuugaaga

SEQ ID NO: 68508 - RNA, 32 nt, Human
augaacagccaaguagcuuccagcuuacagca

SEQ ID NO: 68509 - RNA, 32 nt, Human
augaacagccucauuuccccagcuucccugau

SEQ ID NO: 68510 - RNA, 32 nt, Human
augaacaggaauagagagaggggacugguguc

SEQ ID NO: 68511 - RNA, 32 nt, Human
augaacaggaauagaucugaauaaagcaaauc

SEQ ID NO: 68512 - RNA, 32 nt, Human
augaacaggagaaagaagcgcuuacccacucu

SEQ ID NO: 68513 - RNA, 32 nt, Human
augaacaggcagccacgaggugggugggagcu

SEQ ID NO: 68514 - RNA, 22 nt, Human
augaacaggcaguucuuggaga

SEQ ID NO: 68515 - RNA, 32 nt, Human
augaacaggcugggagugguggcucagccuac

SEQ ID NO: 68516 - RNA, 32 nt, Human
augaacagggauuuuauaccaggcgucagaag

SEQ ID NO: 68517 - RNA, 32 nt, Human
augaacagucacauacuugagagaaacuguga

SEQ ID NO: 68518 - RNA, 32 nt, Human
augaacagucacccgugcuggcuguagccccc

SEQ ID NO: 68519 - RNA, 23 nt, Human
augaacaguuucuucugugagga

SEQ ID NO: 68520 - RNA, 32 nt, Human
augaacauaaggcaaauuaauguucuaggauu

SEQ ID NO: 68521 - RNA, 32 nt, Human
augaacaucucucucugcauauuuuauccuau

SEQ ID NO: 68522 - RNA, 32 nt, Human
augaacaugaggaugggaucaaugugggauga

SEQ ID NO: 68523 - RNA, 32 nt, Human
augaacaugccacccagcuccccuuccaccac

SEQ ID NO: 68524 - RNA, 32 nt, Human
augaacaugggcuauuucuguauucauuaggu

SEQ ID NO: 68525 - RNA, 32 nt, Human
augaacaugugaaguuauacuguggcuaugca

SEQ ID NO: 68526 - RNA, 32 nt, Human
augaacauguuuguccauuaacaaacuuauaa

SEQ ID NO: 68527 - RNA, 32 nt, Human
augaacauuuaagaacugaggaaucauagaug

SEQ ID NO: 68528 - RNA, 32 nt, Human
augaaccaagaauuuaaagcccaaugaaccau

SEQ ID NO: 68529 - RNA, 32 nt, Human
augaaccaauuaagguuuuucacuacaguucu

SEQ ID NO: 68530 - RNA, 32 nt, Human
augaaccacagcuguguuuucaaauauguagu

SEQ ID NO: 68531 - RNA, 32 nt, Human
augaaccacucccauuccccuguccccaaugu

SEQ ID NO: 68532 - RNA, 32 nt, Human
augaaccaggagagacuucaaggaucaacucu

SEQ ID NO: 68533 - RNA, 32 nt, Human
augaaccagggcaugaaacugaaagugcauaa

SEQ ID NO: 68534 - RNA, 32 nt, Human
augaaccauggcaccuuugagagagggggcac

SEQ ID NO: 68535 - RNA, 32 nt, Human
augaacccaagucacauuggaacacagagcug

SEQ ID NO: 68536 - RNA, 28 nt, Human
augaacccaagugaacuuuccucauuac

SEQ ID NO: 68537 - RNA, 32 nt, Human
augaacccaggaggcagagcuugcagugagcc

SEQ ID NO: 68538 - RNA, 32 nt, Human
augaacccaggaggcagagcuuguagugagcc

SEQ ID NO: 68539 - RNA, 32 nt, Human
augaacccaggaggcagagguugcagugagcc

SEQ ID NO: 68540 - RNA, 32 nt, Human
augaacccaggaggcggagcuugcagugagcu

SEQ ID NO: 68541 - RNA, 32 nt, Human
augaacccaggagguugaagcugcggugggcc

SEQ ID NO: 68542 - RNA, 32 nt, Human
augaacccaggaguuggagcuugcagugagcc

SEQ ID NO: 68543 - RNA, 32 nt, Human
augaacccaggaugcggagguugcagugagcc

SEQ ID NO: 68544 - RNA, 32 nt, Human
augaaccccaggcuggagugcaguggcucaau

SEQ ID NO: 68545 - RNA, 32 nt, Human
augaaccccuccagaugguuuuaggauuaaaa

SEQ ID NO: 68546 - RNA, 32 nt, Human
augaacccgggaggcagagguugcagugagcc

SEQ ID NO: 68547 - RNA, 32 nt, Human
augaacccgggaggcggagguugcagucagcc

SEQ ID NO: 68548 - RNA, 32 nt, Human
augaacccgggaggugcagguugcagugagcc

SEQ ID NO: 68549 - RNA, 32 nt, Human
augaacccgguaggggagcuugcagugagccc

SEQ ID NO: 68550 - RNA, 32 nt, Human
augaacccgguagguggagguugcagugagcc

SEQ ID NO: 68551 - RNA, 32 nt, Human
augaaccucagaaaaagagcaacagaaguaau

SEQ ID NO: 68552 - RNA, 32 nt, Human
augaaccucuacugguuccuguacaucguggc

SEQ ID NO: 68553 - RNA, 32 nt, Human
augaaccucugcuucuucaucuggaucacacu

SEQ ID NO: 68554 - RNA, 32 nt, Human
augaaccugccugauucuccacuuucucugcu

SEQ ID NO: 68555 - RNA, 32 nt, Human
augaaccugccugccucagauugcuguccccg

SEQ ID NO: 68556 - RNA, 32 nt, Human
augaaccugggagguggagcaugcagccagcc

SEQ ID NO: 68557 - RNA, 32 nt, Human
augaaccugggagguggagguugcagugagcc

SEQ ID NO: 68558 - RNA, 32 nt, Human
augaacggaauaccugcuagguuccaggaaug

SEQ ID NO: 68559 - RNA, 18 nt, Human
augaacgguacauucugg

SEQ ID NO: 68560 - RNA, 21 nt, Human
augaacgguacauucuggagg

SEQ ID NO: 68561 - RNA, 21 nt, Human
augaacggugcuguucugaag

SEQ ID NO: 68562 - RNA, 32 nt, Human
augaacggugcuguucugaagucuucaaauuu

SEQ ID NO: 68563 - RNA, 32 nt, Human
augaacguggccgaggcugacaaggucacggg

SEQ ID NO: 68564 - RNA, 32 nt, Human
augaacuaccugauuucugccuccaggcuugu

SEQ ID NO: 68565 - RNA, 32 nt, Human
augaacuacgguguguuaaacaacagcagugg

SEQ ID NO: 68566 - RNA, 32 nt, Human
augaacuacugauuuuguuuucaugaaaauuc

SEQ ID NO: 68567 - RNA, 32 nt, Human
augaacuagacaugccaacagcuuggggaaga

SEQ ID NO: 68568 - RNA, 32 nt, Human
augaacucacugcauuucugugcucccuccuc

SEQ ID NO: 68569 - RNA, 32 nt, Human
augaacucagugaagccaaagccauucuaaca

SEQ ID NO: 68570 - RNA, 32 nt, Human
augaacucaucauuccagccugggcaacaaga

SEQ ID NO: 68571 - RNA, 32 nt, Human
augaacucccaggagagggaagaugggagcca

SEQ ID NO: 68572 - RNA, 32 nt, Human
augaacugcaccuuccagcccugcccauaagc

SEQ ID NO: 68573 - RNA, 32 nt, Human
augaacugcaggcugagaaaagaaggaaaaag

SEQ ID NO: 68574 - RNA, 32 nt, Human
augaacugcaguggccaguggccacaucagga

SEQ ID NO: 68575 - RNA, 32 nt, Human
augaacugcuuugggagauuaucaguagaaag

SEQ ID NO: 68576 - RNA, 21 nt, Human
augaacuguuuuuucuguaga

SEQ ID NO: 68577 - RNA, 32 nt, Human
augaacuuaaaaggagagccuggagaaucauc

SEQ ID NO: 68578 - RNA, 32 nt, Human
augaacuucaccaccacuagugucuguccaug

SEQ ID NO: 68579 - RNA, 32 nt, Human
augaacuugagacuccugauguacacugugau

SEQ ID NO: 68580 - RNA, 32 nt, Human
augaacuugcagacuguggcgcaacuggucuu

SEQ ID NO: 68581 - RNA, 32 nt, Human
augaacuugcaggaucauauaguuaauucuac

SEQ ID NO: 68582 - RNA, 32 nt, Human
augaacuugccucccuuucucccuucuccacu

SEQ ID NO: 68583 - RNA, 32 nt, Human
augaacuuuuguauuuuucauuuuucauuuga

SEQ ID NO: 68584 - RNA, 21 nt, Human
augaagaaaaaaguacuguga

SEQ ID NO: 68585 - RNA, 32 nt, Human
augaagaaaagagguuuaauugacucacaguu

SEQ ID NO: 68586 - RNA, 32 nt, Human
augaagaaaagagguuuaauuggcucacgguu

SEQ ID NO: 68587 - RNA, 32 nt, Human
augaagaaaauaagcaaagaaaaauggagacu

SEQ ID NO: 68588 - RNA, 32 nt, Human
augaagaaauauuuuaaggaaaccuauuugaa

SEQ ID NO: 68589 - RNA, 32 nt, Human
augaagaacauucaaaagugugcucaaaaaug

SEQ ID NO: 68590 - RNA, 21 nt, Human
augaagaagaagcaaccgaua

SEQ ID NO: 68591 - RNA, 32 nt, Human
augaagaaggcagggaagguaaggagugagag

SEQ ID NO: 68592 - RNA, 32 nt, Human
augaagaauagggaugacucuagugaaaagua

SEQ ID NO: 68593 - RNA, 32 nt, Human
augaagaauagggcugggcacaguggcucacg

SEQ ID NO: 68594 - RNA, 32 nt, Human
augaagaauuccagguguacuagugaauguaa

SEQ ID NO: 68595 - RNA, 32 nt, Human
augaagacacuggcauuucagugggauuguaa

SEQ ID NO: 68596 - RNA, 32 nt, Human
augaagacagaauugucaagucagggcuuuca

SEQ ID NO: 68597 - RNA, 32 nt, Human
augaagacaggaucuagaauaaucuugcucac

SEQ ID NO: 68598 - RNA, 32 nt, Human
augaagacccuagggcaaggcuugagaagcca

SEQ ID NO: 68599 - RNA, 32 nt, Human
augaagacccucucccuucuuuguagaauuaa

SEQ ID NO: 68600 - RNA, 32 nt, Human
augaagacugaggcaggcggagcugcuaagag

SEQ ID NO: 68601 - RNA, 32 nt, Human
augaagacuuaucagggcccuagaaagugcua

SEQ ID NO: 68602 - RNA, 20 nt, Human
augaagagaaugcauuuuga

SEQ ID NO: 68603 - RNA, 32 nt, Human
augaagagacugccccucccauuauugcccca

SEQ ID NO: 68604 - RNA, 32 nt, Human
augaagagagagagggucuccuauguuuccua

SEQ ID NO: 68605 - RNA, 32 nt, Human
augaagagagauggaaaacuugaugacuagcu

SEQ ID NO: 68606 - RNA, 32 nt, Human
augaagagccaagaugcuggugaagcaggugc

SEQ ID NO: 68607 - RNA, 30 nt, Human
augaagagccucuccacggcuccugcgccu

SEQ ID NO: 68608 - RNA, 32 nt, Human
augaagagcugccagauccaacagaaauguga

SEQ ID NO: 68609 - RNA, 32 nt, Human
augaagaggaagagacaugagagauacgcaca

SEQ ID NO: 68610 - RNA, 32 nt, Human
augaagaggaggguugaggcuggagaagagcc

SEQ ID NO: 68611 - RNA, 32 nt, Human
augaagaggaguaggaaggaaaauggaaucaa

SEQ ID NO: 68612 - RNA, 32 nt, Human
augaagaggcaagagcacagacuuacaaggau

SEQ ID NO: 68613 - RNA, 32 nt, Human
augaagagugauccuccuuccuucccuggccc

SEQ ID NO: 68614 - RNA, 18 nt, Human
augaagagugcauucugg

SEQ ID NO: 68615 - RNA, 32 nt, Human
augaagaucaccacugaauugcugacaaauag

SEQ ID NO: 68616 - RNA, 32 nt, Human
augaagaucagaaaauucucuccaugucaccg

SEQ ID NO: 68617 - RNA, 32 nt, Human
augaagaucugcagagugagaagccagaccau

SEQ ID NO: 68618 - RNA, 32 nt, Human
augaagaugagaucaggcauggggaaggaccc

SEQ ID NO: 68619 - RNA, 32 nt, Human
augaagaugaucauauuucauuuugcagaugu

SEQ ID NO: 68620 - RNA, 32 nt, Human
augaagauguacugaugacgccccagaaaugc

SEQ ID NO: 68621 - RNA, 32 nt, Human
augaagauucuugagccccauuuccaagaccc

SEQ ID NO: 68622 - RNA, 32 nt, Human
augaagcaaggcccugaauauauuaccaagau

SEQ ID NO: 68623 - RNA, 32 nt, Human
augaagcacaauggauuuacagcucuaggaac

SEQ ID NO: 68624 - RNA, 32 nt, Human
augaagcacauacaaaagaagacagagaaugc

SEQ ID NO: 68625 - RNA, 32 nt, Human
augaagcaccacugcccuguagaccugggaua

SEQ ID NO: 68626 - RNA, 32 nt, Human
augaagcaccuugcccaaggucucaccaggca

SEQ ID NO: 68627 - RNA, 32 nt, Human
augaagcaggcagagcucagaggaucuuggca

SEQ ID NO: 68628 - RNA, 32 nt, Human
augaagcagugucugcaggcguucagugcugc

SEQ ID NO: 68629 - RNA, 32 nt, Human
augaagcaguguugugacucuucucucucccc

SEQ ID NO: 68630 - RNA, 32 nt, Human
augaagccaccaagucuagacuugaugguguu

SEQ ID NO: 68631 - RNA, 24 nt, Human
augaagccagcagcacccagagcc

SEQ ID NO: 68632 - RNA, 32 nt, Human
augaagccaggaguucgagaccagccugacca

SEQ ID NO: 68633 - RNA, 32 nt, Human
augaagccagugcacgccagccugggcgacag

SEQ ID NO: 68634 - RNA, 32 nt, Human
augaagccauaugaaccagcugucaguugcac

SEQ ID NO: 68635 - RNA, 32 nt, Human
augaagcccagccugcacgucugucccucucu

SEQ ID NO: 68636 - RNA, 32 nt, Human
augaagccccaaauguagaaacucagccagcc

SEQ ID NO: 68637 - RNA, 32 nt, Human
augaagccccaaauguagaaacucagccaguc

SEQ ID NO: 68638 - RNA, 32 nt, Human
augaagccccuggcauuugcuggggaagggac

SEQ ID NO: 68639 - RNA, 32 nt, Human
augaagcccguuggucucagccuggcuugagc

SEQ ID NO: 68640 - RNA, 32 nt, Human
augaagccgacgaggggcucagucuaggggaa

SEQ ID NO: 68641 - RNA, 19 nt, Human
augaagccuccagguaaca

SEQ ID NO: 68642 - RNA, 21 nt, Human
augaagcggagguugcaguga

SEQ ID NO: 68643 - RNA, 32 nt, Human
augaagcuacacaaaugugguauuuaaaugca

SEQ ID NO: 68644 - RNA, 21 nt, Human
augaagcucaacacuguggua

SEQ ID NO: 68645 - RNA, 32 nt, Human
augaagcugaaccguuacucucugccaaaacc

SEQ ID NO: 68646 - RNA, 32 nt, Human
augaagcugaugugagagcccuggagagaaac

SEQ ID NO: 68647 - RNA, 32 nt, Human
augaagcuggaggcagagauuggagugauaca

SEQ ID NO: 68648 - RNA, 32 nt, Human
augaagcuuggaaaauacuauauucaacaaaa

SEQ ID NO: 68649 - RNA, 32 nt, Human
augaagcuuguccucugacuagguuucuaauu

SEQ ID NO: 68650 - RNA, 32 nt, Human
augaagcuugugaguagagcaaacaaacguuu

SEQ ID NO: 68651 - RNA, 32 nt, Human
augaaggaaagggacacaaaaauaugugacua

SEQ ID NO: 68652 - RNA, 32 nt, Human
augaaggagaagaaagaggaaaaagaaguaaa

SEQ ID NO: 68653 - RNA, 32 nt, Human
augaaggagaagcagaagcagacggcuggccu

SEQ ID NO: 68654 - RNA, 32 nt, Human
augaaggagaagggcaagagauccucugaaca

SEQ ID NO: 68655 - RNA, 32 nt, Human
augaaggagaggaggguaaaggagaaugggaa

SEQ ID NO: 68656 - RNA, 32 nt, Human
augaaggagcaggaggagaggaagaaacuuuu

SEQ ID NO: 68657 - RNA, 32 nt, Human
augaaggagccaggcuugcacacagacaauuc

SEQ ID NO: 68658 - RNA, 32 nt, Human
augaaggaguuucaacauccagcuucaucuag

SEQ ID NO: 68659 - RNA, 31 nt, Human
augaaggcaauguuuccaaggaaaggaaaug

SEQ ID NO: 68660 - RNA, 32 nt, Human
augaaggcacagacuuuucuuguucucuucuc

SEQ ID NO: 68661 - RNA, 32 nt, Human
augaaggcagagccauggaccacgcaggaagg

SEQ ID NO: 68662 - RNA, 32 nt, Human
augaaggcagaggcaugcacauuccucacuga

SEQ ID NO: 68663 - RNA, 32 nt, Human
augaaggcauguuuagaggugugucacaguua

SEQ ID NO: 68664 - RNA, 32 nt, Human
augaaggcauugaagcuugcacaagcucucca

SEQ ID NO: 68665 - RNA, 32 nt, Human
augaaggcccagguuccagucaucacaggauc

SEQ ID NO: 68666 - RNA, 22 nt, Human
augaaggcuaaaauuuuggcca

SEQ ID NO: 68667 - RNA, 32 nt, Human
augaaggcuccagggauacagaguuguccauu

SEQ ID NO: 68668 - RNA, 32 nt, Human
augaaggcugaacacaggcuuguuaaugucag

SEQ ID NO: 68669 - RNA, 32 nt, Human
augaaggcuugucagcacuuccaguuuagaac

SEQ ID NO: 68670 - RNA, 32 nt, Human
augaaggcuuuuuccaaguuugucauauaaag

SEQ ID NO: 68671 - RNA, 32 nt, Human
augaagggagaagggagguuuucucacucuag

SEQ ID NO: 68672 - RNA, 32 nt, Human
augaagggaggagcuccaggaggcgagggaag

SEQ ID NO: 68673 - RNA, 32 nt, Human
augaagggcacccaccuggcuuaagagaacga

SEQ ID NO: 68674 - RNA, 32 nt, Human
augaagggcucucuggggcauguuggaauggc

SEQ ID NO: 68675 - RNA, 32 nt, Human
augaagggcuucaggcugggggcaguggacag

SEQ ID NO: 68676 - RNA, 32 nt, Human
augaaggggugccugggcuagggcugcaggcu

SEQ ID NO: 68677 - RNA, 32 nt, Human
augaagggugugggguaaaagaugcauaaggc

SEQ ID NO: 68678 - RNA, 32 nt, Human
augaaggguuggcacagagaggguggcgacca

SEQ ID NO: 68679 - RNA, 32 nt, Human
augaagguaaacugagguaaugagagggggac

SEQ ID NO: 68680 - RNA, 32 nt, Human
augaagguacauuuucuguucucuccuagguu

SEQ ID NO: 68681 - RNA, 32 nt, Human
augaagguaggaaguaaugugugcuugcagaa

SEQ ID NO: 68682 - RNA, 32 nt, Human
augaagguauaaugggcauacaagaaacugca

SEQ ID NO: 68683 - RNA, 32 nt, Human
augaagguggagggucucuaguuccacgccuc

SEQ ID NO: 68684 - RNA, 32 nt, Human
augaaggugggacuuggagaugcugcugccua

SEQ ID NO: 68685 - RNA, 32 nt, Human
augaaggugugauugaacaagacacugaugcc

SEQ ID NO: 68686 - RNA, 32 nt, Human
augaagguuaaacauuuugccaacgcagguac

SEQ ID NO: 68687 - RNA, 32 nt, Human
augaagguuaagcuggcggugcugcuggugac

SEQ ID NO: 68688 - RNA, 32 nt, Human
augaagguuaccaaacuuguggacaggagccu

SEQ ID NO: 68689 - RNA, 32 nt, Human
augaagucacccauuccauuugacucuuuagc

SEQ ID NO: 68690 - RNA, 32 nt, Human
augaagucaggagaucaagaccauccuggcca

SEQ ID NO: 68691 - RNA, 32 nt, Human
augaagucaggaguucgagaccagccugacca

SEQ ID NO: 68692 - RNA, 20 nt, Human
augaagucaguuucuuugaa

SEQ ID NO: 68693 - RNA, 23 nt, Human
augaaguccaucuaauuuugcca

SEQ ID NO: 68694 - RNA, 32 nt, Human
augaaguccuuuauagcaaaaguuuccaguuc

SEQ ID NO: 68695 - RNA, 32 nt, Human
augaagucucacugcacucaggcuggagugca

SEQ ID NO: 68696 - RNA, 23 nt, Human
augaagucuugcuauuuuaccca

SEQ ID NO: 68697 - RNA, 32 nt, Human
augaagucuuuuaacagucucucuuuauauaa

SEQ ID NO: 68698 - RNA, 32 nt, Human
augaagugaacccaugcagugacuggaugauu

SEQ ID NO: 68699 - RNA, 32 nt, Human
augaagugagccuggacaacaacguggagccu

SEQ ID NO: 68700 - RNA, 32 nt, Human
augaagugagucuucacugucucuccauauuu

SEQ ID NO: 68701 - RNA, 31 nt, Human
augaagugcgacagcauuaaagacugaugcu

SEQ ID NO: 68702 - RNA, 32 nt, Human
augaagugucccuucccaucaguuugauucaa

SEQ ID NO: 68703 - RNA, 22 nt, Human
augaaguuacagauuuuagcca

SEQ ID NO: 68704 - RNA, 32 nt, Human
augaaguuagccaccaaguccucacaagccgu

SEQ ID NO: 68705 - RNA, 32 nt, Human
augaaguucacuauggcagccaccuccggcuc

SEQ ID NO: 68706 - RNA, 32 nt, Human
augaaguucauauccaugaauucacuccuaau

SEQ ID NO: 68707 - RNA, 32 nt, Human
augaaguucaucucaaaauggagaccaugacc

SEQ ID NO: 68708 - RNA, 32 nt, Human
augaaguucugaaauugguugaauaaaacaaa

SEQ ID NO: 68709 - RNA, 32 nt, Human
augaaguuucaagaaaaggaaauuggugggug

SEQ ID NO: 68710 - RNA, 32 nt, Human
augaauaaaagcuuguucugugugacccagca

SEQ ID NO: 68711 - RNA, 32 nt, Human
augaauacacacugcaagcuucuccuuggcuu

SEQ ID NO: 68712 - RNA, 32 nt, Human
augaauacacgagguaugaggucuaggaacau

SEQ ID NO: 68713 - RNA, 32 nt, Human
augaauaccuccccacuguggcugguaacacc

SEQ ID NO: 68714 - RNA, 32 nt, Human
augaauaccuccucauagaaguggugucuuua

SEQ ID NO: 68715 - RNA, 21 nt, Human
augaauacgguacucugaagg

SEQ ID NO: 68716 - RNA, 32 nt, Human
augaauacuaggcuuaauaccugggugaugac

SEQ ID NO: 68717 - RNA, 23 nt, Human
augaauagauguuucacugaaga

SEQ ID NO: 68718 - RNA, 32 nt, Human
augaauagcuagauguggaaagagauauguaa

SEQ ID NO: 68719 - RNA, 32 nt, Human
augaauagguaaccucaagccaccgacuccaa

SEQ ID NO: 68720 - RNA, 22 nt, Human
augaauagguguucucaggagg

SEQ ID NO: 68721 - RNA, 20 nt, Human
augaauaguacacauuuuga

SEQ ID NO: 68722 - RNA, 32 nt, Human
augaauaugucugugugaacacacaggcaugc

SEQ ID NO: 68723 - RNA, 23 nt, Human
augaauauucauguuuuugaagg

SEQ ID NO: 68724 - RNA, 32 nt, Human
augaauauuguggcugggguaauucucagcac

SEQ ID NO: 68725 - RNA, 32 nt, Human
augaauauuugaccuuaaaucuccagugacuc

SEQ ID NO: 68726 - RNA, 32 nt, Human
augaaucaccacacucggccaguuuucuaaaa

SEQ ID NO: 68727 - RNA, 32 nt, Human
augaaucacugcaccucuuugucacagggugu

SEQ ID NO: 68728 - RNA, 32 nt, Human
augaaucacuucucuuuaauuaauaguaugua

SEQ ID NO: 68729 - RNA, 32 nt, Human
augaaucagaugucugucacagaaucugggcc

SEQ ID NO: 68730 - RNA, 32 nt, Human
augaaucagauguguguucucagugaaauaac

SEQ ID NO: 68731 - RNA, 32 nt, Human
augaaucaugaaguucccccuaccuccuuuaa

SEQ ID NO: 68732 - RNA, 32 nt, Human
augaauccaggagguggagguugcagugagcu

SEQ ID NO: 68733 - RNA, 32 nt, Human
augaauccauaggauagagaaaaaucugcuug

SEQ ID NO: 68734 - RNA, 32 nt, Human
augaaucccagccaggacaagugaguugaggc

SEQ ID NO: 68735 - RNA, 32 nt, Human
augaauccuaccucuugcccagucccaggcag

SEQ ID NO: 68736 - RNA, 32 nt, Human
augaauccugcagggccaaggucugggggugc

SEQ ID NO: 68737 - RNA, 32 nt, Human
augaaucguugaugacuuauggauucugucag

SEQ ID NO: 68738 - RNA, 32 nt, Human
augaaucuaccugaguugcuggcauugggagg

SEQ ID NO: 68739 - RNA, 32 nt, Human
augaaucuacuuuuuaaaaaugauuaauuuug

SEQ ID NO: 68740 - RNA, 32 nt, Human
augaaucuccugggaauaauucugcucucugg

SEQ ID NO: 68741 - RNA, 32 nt, Human
augaaucucguuccaaagaacuaccccuuuuc

SEQ ID NO: 68742 - RNA, 32 nt, Human
augaaucucugccucucccaggcugucccccu

SEQ ID NO: 68743 - RNA, 25 nt, Human
augaaucugaauauggggagagaga

SEQ ID NO: 68744 - RNA, 32 nt, Human
augaaucugagcugauggugacuuuaaguuaa

SEQ ID NO: 68745 - RNA, 32 nt, Human
augaaucuucaaaaacuugcacaaacagaaaa

SEQ ID NO: 68746 - RNA, 32 nt, Human
augaaucuucuuuauuguccugauuuguccuc

SEQ ID NO: 68747 - RNA, 32 nt, Human
augaaucuucuuuauuguccugauuuguccug

SEQ ID NO: 68748 - RNA, 22 nt, Human
augaaucuugguauccugugaa

SEQ ID NO: 68749 - RNA, 32 nt, Human
augaaucuuuaaagggugucucuguguacuuu

SEQ ID NO: 68750 - RNA, 32 nt, Human
augaaucuuucaaagguuucccaaaccacucc

SEQ ID NO: 68751 - RNA, 32 nt, Human
augaaugaaagaaccaaggagagaugcagaga

SEQ ID NO: 68752 - RNA, 32 nt, Human
augaaugaagaaugcauggaggacugcaaacu

SEQ ID NO: 68753 - RNA, 32 nt, Human
augaaugaagcccaggggacugccauuuuaua

SEQ ID NO: 68754 - RNA, 32 nt, Human
augaaugaauguaggaaauacaauucagucca

SEQ ID NO: 68755 - RNA, 32 nt, Human
augaaugacaacauacccauuuuacagaugag

SEQ ID NO: 68756 - RNA, 32 nt, Human
augaaugacgcaagcacugaugcugaagaucc

SEQ ID NO: 68757 - RNA, 25 nt, Human
augaaugauaagcuguuucugaggg

SEQ ID NO: 68758 - RNA, 32 nt, Human
augaaugaucauguguugaaagccacauuauu

SEQ ID NO: 68759 - RNA, 32 nt, Human
augaaugcacacacgugugaagcuccugcuga

SEQ ID NO: 68760 - RNA, 32 nt, Human
augaaugccccacugcacuccagccugggcga

SEQ ID NO: 68761 - RNA, 32 nt, Human
augaaugccugcaacagugccugguacacagu

SEQ ID NO: 68762 - RNA, 32 nt, Human
augaaugcggugggugagaaucccggugcccu

SEQ ID NO: 68763 - RNA, 32 nt, Human
augaaugcuccacaauuucaacauaccacaag

SEQ ID NO: 68764 - RNA, 32 nt, Human
augaaugcugauuuuaaaaccaggucauggga

SEQ ID NO: 68765 - RNA, 32 nt, Human
augaauggacucaaacugccuuggcuucaggg

SEQ ID NO: 68766 - RNA, 32 nt, Human
augaauggagaaugagugaacuuccaaugcaa

SEQ ID NO: 68767 - RNA, 32 nt, Human
augaauggagagagacagagaggaagugcagg

SEQ ID NO: 68768 - RNA, 32 nt, Human
augaauggauuguucuuguuucucagaugggu

SEQ ID NO: 68769 - RNA, 32 nt, Human
augaaugggaagggagaacauaucuauccucu

SEQ ID NO: 68770 - RNA, 32 nt, Human
augaaugggugugugccucagagcagagguca

SEQ ID NO: 68771 - RNA, 32 nt, Human
augaaugguaaauucuaugaaaaguaagugau

SEQ ID NO: 68772 - RNA, 22 nt, Human
augaauggucaugcuuuggaga

SEQ ID NO: 68773 - RNA, 32 nt, Human
augaaugucaugauaacccacucuggaauaug

SEQ ID NO: 68774 - RNA, 23 nt, Human
augaaugucgcuaucuuugagga

SEQ ID NO: 68775 - RNA, 32 nt, Human
augaaugugaacaacagagugaucagaagagu

SEQ ID NO: 68776 - RNA, 32 nt, Human
augaaugugaaugacacuucuuauucuuaaug

SEQ ID NO: 68777 - RNA, 32 nt, Human
augaaugugcaggggaccugucucaggcuccu

SEQ ID NO: 68778 - RNA, 32 nt, Human
augaaugugcucaccugucagggcaggauggu

SEQ ID NO: 68779 - RNA, 32 nt, Human
augaauguggacugccuuuuaucucuauuuca

SEQ ID NO: 68780 - RNA, 32 nt, Human
augaauguguuuccuccacauuguauauccuu

SEQ ID NO: 68781 - RNA, 32 nt, Human
augaauguuaagcagaacaccaauggccagug

SEQ ID NO: 68782 - RNA, 32 nt, Human
augaauuaagcagcaaauacuuuuauauccaa

SEQ ID NO: 68783 - RNA, 32 nt, Human
augaauuauuuggacgguuguccacuugaaag

SEQ ID NO: 68784 - RNA, 32 nt, Human
augaauucauucuggucucucuauuaccacug

SEQ ID NO: 68785 - RNA, 32 nt, Human
augaauucauugcacuggaaugaggcucaaca

SEQ ID NO: 68786 - RNA, 32 nt, Human
augaauucccauuaaugagcagucuucaguau

SEQ ID NO: 68787 - RNA, 32 nt, Human
augaauucuccuuuguccuguuucuccuguuu

SEQ ID NO: 68788 - RNA, 32 nt, Human
augaauucucugcaaucuguuguuucgcugau

SEQ ID NO: 68789 - RNA, 32 nt, Human
augaauugagcagaaggaaacaaaguucugca

SEQ ID NO: 68790 - RNA, 32 nt, Human
augaauugaguauucuagacagcagcauaaga

SEQ ID NO: 68791 - RNA, 32 nt, Human
augaauugcuugaauccaggaggcagagguug

SEQ ID NO: 68792 - RNA, 32 nt, Human
augaauugggucuugcuguguugcccggggua

SEQ ID NO: 68793 - RNA, 32 nt, Human
augaauugugcaaggauguaaacauucagucc

SEQ ID NO: 68794 - RNA, 32 nt, Human
augaauuucauuuauugacuguucaacagagu

SEQ ID NO: 68795 - RNA, 32 nt, Human
augaauuucucaggugacauuucuauaucugc

SEQ ID NO: 68796 - RNA, 32 nt, Human
augaauuugagaccagccuggccaacagacgg

SEQ ID NO: 68797 - RNA, 32 nt, Human
augaauuuguucaccaccugucuugcuuaagc

SEQ ID NO: 68798 - RNA, 32 nt, Human
augacaaacacacaacauuacacacauauaca

SEQ ID NO: 68799 - RNA, 32 nt, Human
augacaaacacacauuacacacacaacaucac

SEQ ID NO: 68800 - RNA, 32 nt, Human
augacaaacacacauuacacacacaucacaau

SEQ ID NO: 68801 - RNA, 32 nt, Human
augacaaaccgcaagagccacagacuugccag

SEQ ID NO: 68802 - RNA, 32 nt, Human
augacaaacugucaaagugacacagaauacug

SEQ ID NO: 68803 - RNA, 32 nt, Human
augacaaagacugaguacguugugcauuuggu

SEQ ID NO: 68804 - RNA, 32 nt, Human
augacaaagaggaguggaagaagacagagaga

SEQ ID NO: 68805 - RNA, 32 nt, Human
augacaacaacaaaagagccacacuuauuucu

SEQ ID NO: 68806 - RNA, 32 nt, Human
augacaacaugcuggagccaagugcuaacacg

SEQ ID NO: 68807 - RNA, 19 nt, Human
augacaaccuaccucccug

SEQ ID NO: 68808 - RNA, 32 nt, Human
augacaacuucccagugaauucuugaaggaaa

SEQ ID NO: 68809 - RNA, 32 nt, Human
augacaaggcaccuaccaauguucuuggguca

SEQ ID NO: 68810 - RNA, 32 nt, Human
augacaaggugaugcagaugugaccuaggaug

SEQ ID NO: 68811 - RNA, 32 nt, Human
augacaagucacacccuccccauuaguauccu

SEQ ID NO: 68812 - RNA, 32 nt, Human
augacaagucucggagcugcugagaugacagg

SEQ ID NO: 68813 - RNA, 32 nt, Human
augacaaguuugaaaaucugaacacaguugcu

SEQ ID NO: 68814 - RNA, 32 nt, Human
augacaauaccagcccuggacuaccuaccugu

SEQ ID NO: 68815 - RNA, 32 nt, Human
augacaaucguccucuuuacucuccaaguuug

SEQ ID NO: 68816 - RNA, 32 nt, Human
augacaauguaggaauugcugaauuaaauguu

SEQ ID NO: 68817 - RNA, 32 nt, Human
augacaaugugaaaccaucacagcugggaaga

SEQ ID NO: 68818 - RNA, 32 nt, Human
augacaauuccccuaaccauuccucuucauau

SEQ ID NO: 68819 - RNA, 32 nt, Human
augacacaaagaaaaucaucaucccaucuuca

SEQ ID NO: 68820 - RNA, 32 nt, Human
augacacaacaaacauuuaucuugggugcaca

SEQ ID NO: 68821 - RNA, 26 nt, Human
augacacaaggggaggggacuuguca

SEQ ID NO: 68822 - RNA, 32 nt, Human
augacacagaacuauugcuaauguauaaaaca

SEQ ID NO: 68823 - RNA, 32 nt, Human
augacacagcacaacucuacagacagugaugu

SEQ ID NO: 68824 - RNA, 32 nt, Human
augacacaggaugaggaagauuaaggauaauc

SEQ ID NO: 68825 - RNA, 32 nt, Human
augacacauacagcuguacaaaguggggaaaa

SEQ ID NO: 68826 - RNA, 32 nt, Human
augacacauugauaacacaggucuuuauuccc

SEQ ID NO: 68827 - RNA, 32 nt, Human
augacaccaacugucaccacuaacucagagcc

SEQ ID NO: 68828 - RNA, 32 nt, Human
augacaccaagugcccggauaaagucagcuuc

SEQ ID NO: 68829 - RNA, 32 nt, Human
augacaccacugcacuccaaccuagguaacag

SEQ ID NO: 68830 - RNA, 32 nt, Human
augacaccaggauuugaaauaagacaggaaua

SEQ ID NO: 68831 - RNA, 32 nt, Human
augacaccaguuuuccugucaugacaagccuc

SEQ ID NO: 68832 - RNA, 32 nt, Human
augacaccaucaaaauuuaagaccaugaugaa

SEQ ID NO: 68833 - RNA, 32 nt, Human
augacaccaucccguuuccaagguugaacccu

SEQ ID NO: 68834 - RNA, 32 nt, Human
augacaccccagugaagacgguucuguccucc

SEQ ID NO: 68835 - RNA, 32 nt, Human
augacacccggagcuccugaaucaccugggga

SEQ ID NO: 68836 - RNA, 32 nt, Human
augacacccuugggcucccuccugccuccucu

SEQ ID NO: 68837 - RNA, 32 nt, Human
augacacugagggcagggagaagaaagaacac

SEQ ID NO: 68838 - RNA, 32 nt, Human
augacacugagugucagucauggagggacacg

SEQ ID NO: 68839 - RNA, 32 nt, Human
augacacugcacuccagccugggcaacagagc

SEQ ID NO: 68840 - RNA, 32 nt, Human
augacacugcacuccagccugggugauagagu

SEQ ID NO: 68841 - RNA, 32 nt, Human
augacacugcacuccagccuuggcaacaaagc

SEQ ID NO: 68842 - RNA, 32 nt, Human
augacacugcacuccagccuuggcaacagagu

SEQ ID NO: 68843 - RNA, 32 nt, Human
augacacugcccuccagccuggacaacagauu

SEQ ID NO: 68844 - RNA, 32 nt, Human
augacacugccucuauuucuauaaccauuuca

SEQ ID NO: 68845 - RNA, 19 nt, Human
augacacuggugacuugac

SEQ ID NO: 68846 - RNA, 32 nt, Human
augacacuuugaucuuggacuucccagccccu

SEQ ID NO: 68847 - RNA, 32 nt, Human
augacagaaaaaugaaaaguguuugaguucag

SEQ ID NO: 68848 - RNA, 32 nt, Human
augacagaaaagucuggaauaauguuuguuuu

SEQ ID NO: 68849 - RNA, 32 nt, Human
augacagaauuguccuggauuuugacuccauc

SEQ ID NO: 68850 - RNA, 32 nt, Human
augacagaccuccagcauccacgcaucucuug

SEQ ID NO: 68851 - RNA, 32 nt, Human
augacagauaauauguagaaauauucauaaag

SEQ ID NO: 68852 - RNA, 32 nt, Human
augacagaugaagaaggagcagaauaaauguu

SEQ ID NO: 68853 - RNA, 32 nt, Human
augacagcaccacugcacagagcuuugggagg

SEQ ID NO: 68854 - RNA, 32 nt, Human
augacagcaccacugcacuccagccaggaaug

SEQ ID NO: 68855 - RNA, 32 nt, Human
augacagcaccccugagcugggcaaagguacu

SEQ ID NO: 68856 - RNA, 32 nt, Human
augacagcaugugacccacacagccauccuag

SEQ ID NO: 68857 - RNA, 32 nt, Human
augacagccagccugacagcaccagucgcugg

SEQ ID NO: 68858 - RNA, 32 nt, Human
augacagccaugagucucacagaggaccccga

SEQ ID NO: 68859 - RNA, 32 nt, Human
augacagcccuaggaccuaacacccaccugcc

SEQ ID NO: 68860 - RNA, 32 nt, Human
augacagccucucccuacaagagaccaguagc

SEQ ID NO: 68861 - RNA, 32 nt, Human
augacagcggagagggggugauagcagcugag

SEQ ID NO: 68862 - RNA, 32 nt, Human
augacagcgucccauugagauuaugcugaugg

SEQ ID NO: 68863 - RNA, 32 nt, Human
augacaggcacuaggacgucugccuuuuuaag

SEQ ID NO: 68864 - RNA, 32 nt, Human
augacaggcaugagccaccgugcccggccggu

SEQ ID NO: 68865 - RNA, 32 nt, Human
augacaggcaugagccacgacgcccagccaca

SEQ ID NO: 68866 - RNA, 32 nt, Human
augacaggcgcacaccaccacgcccagcaaau

SEQ ID NO: 68867 - RNA, 32 nt, Human
augacaggcgcacaucaccacgcccagcugau

SEQ ID NO: 68868 - RNA, 32 nt, Human
augacaggcgugagccacagcucccagccuag

SEQ ID NO: 68869 - RNA, 32 nt, Human
augacaggcgugagccaccgcgcccagccuga

SEQ ID NO: 68870 - RNA, 32 nt, Human
augacaggcgugagccaccgcgcccggccuau

SEQ ID NO: 68871 - RNA, 32 nt, Human
augacaggcgugagccaccgcgccgggcccaa

SEQ ID NO: 68872 - RNA, 32 nt, Human
augacagggaacagcugcuggggagguggaga

SEQ ID NO: 68873 - RNA, 32 nt, Human
augacagggacgccugcgaggccaggcgggcg

SEQ ID NO: 68874 - RNA, 32 nt, Human
augacaggguagggagaugacaguggugcaug

SEQ ID NO: 68875 - RNA, 32 nt, Human
augacaggugcgagccacugcaccuggcccac

SEQ ID NO: 68876 - RNA, 32 nt, Human
augacaggugcuuuuauugucauuccagagcu

SEQ ID NO: 68877 - RNA, 32 nt, Human
augacaggugugagccaccgcccccggccccu

SEQ ID NO: 68878 - RNA, 32 nt, Human
augacaggugugagccacugcgcccagccuga

SEQ ID NO: 68879 - RNA, 32 nt, Human
augacagucuuccugcaaucccaugccugagu

SEQ ID NO: 68880 - RNA, 32 nt, Human
augacaguggacugcacgcuuggugcaucgug

SEQ ID NO: 68881 - RNA, 32 nt, Human
augacaguugugagccacugcgcccagccccu

SEQ ID NO: 68882 - RNA, 32 nt, Human
augacauacuucuccuuuguauucucucagug

SEQ ID NO: 68883 - RNA, 32 nt, Human
augacauauagcaaaggggucagggcaagugu

SEQ ID NO: 68884 - RNA, 32 nt, Human
augacaucacccaagaggaguauggagaauuc

SEQ ID NO: 68885 - RNA, 32 nt, Human
augacaucacccaggaugcaaugauccaaaag

SEQ ID NO: 68886 - RNA, 32 nt, Human
augacaucagccaggugacagcagcaggcagg

SEQ ID NO: 68887 - RNA, 32 nt, Human
augacaucauccauuuagucugugagucaaca

SEQ ID NO: 68888 - RNA, 32 nt, Human
augacauccuacucuucccucaccuuucuaca

SEQ ID NO: 68889 - RNA, 32 nt, Human
augacaucuguuuaaaaacaagcacaaccugc

SEQ ID NO: 68890 - RNA, 21 nt, Human
augacaugaaugcugcuaaag

SEQ ID NO: 68891 - RNA, 32 nt, Human
augacaugagccuggggagaccucauuugguu

SEQ ID NO: 68892 - RNA, 32 nt, Human
augacaugccacccucuccaugcccaaccuaa

SEQ ID NO: 68893 - RNA, 32 nt, Human
augacaugcccauucacuacagccuggaugac

SEQ ID NO: 68894 - RNA, 32 nt, Human
augacauggcuucugggguggagggugggggu

SEQ ID NO: 68895 - RNA, 32 nt, Human
augacauggggaggacaaagagagcucaagag

SEQ ID NO: 68896 - RNA, 32 nt, Human
augacaugggggacaguuggcagauggaguug

SEQ ID NO: 68897 - RNA, 32 nt, Human
augacauggugacacccgugcccagccugagc

SEQ ID NO: 68898 - RNA, 32 nt, Human
augacaugguuugcagaccacucuggacaugc

SEQ ID NO: 68899 - RNA, 30 nt, Human
augacaugucuguagcuaucagaaagagaa

SEQ ID NO: 68900 - RNA, 32 nt, Human
augacauguuaacugugugcccaggacagccg

SEQ ID NO: 68901 - RNA, 32 nt, Human
augacauucggaacagcaaagccauauaugca

SEQ ID NO: 68902 - RNA, 32 nt, Human
augacauucuuucuuccugccaccaaccacau

SEQ ID NO: 68903 - RNA, 32 nt, Human
augacauugucuuuaucauccuuuccccuuuc

SEQ ID NO: 68904 - RNA, 32 nt, Human
augacauuuaacauguugugaugcuugaaaac

SEQ ID NO: 68905 - RNA, 32 nt, Human
augacauuuucuggauacauuuugacaagagu

SEQ ID NO: 68906 - RNA, 16 nt, Human
augaccaacacgggga

SEQ ID NO: 68907 - RNA, 32 nt, Human
augaccaacauggagaaaccccgucucuacua

SEQ ID NO: 68908 - RNA, 32 nt, Human
augaccaacauggagaaccccaucucuacuaa

SEQ ID NO: 68909 - RNA, 32 nt, Human
augaccaacauggcgaaaccccaucucuacua

SEQ ID NO: 68910 - RNA, 32 nt, Human
augaccaacauggugaaacccugucucuacca

SEQ ID NO: 68911 - RNA, 32 nt, Human
augaccaagagcaggcuuccugcuccauggag

SEQ ID NO: 68912 - RNA, 32 nt, Human
augaccaaggacagcacccacuguugaagaug

SEQ ID NO: 68913 - RNA, 32 nt, Human
augaccaagggaauuaugcuguucauuuauaa

SEQ ID NO: 68914 - RNA, 32 nt, Human
augaccaauucgacuuccauacauacugcaug

SEQ ID NO: 68915 - RNA, 32 nt, Human
augaccacacugaaaauuacagaagugauaau

SEQ ID NO: 68916 - RNA, 32 nt, Human
augaccacauuguacaaaugaaucuguguuaa

SEQ ID NO: 68917 - RNA, 32 nt, Human
augaccaccugaagacagagaaaagggaaucu

SEQ ID NO: 68918 - RNA, 32 nt, Human
augaccacugcagccuccaccuccuaggcuca

SEQ ID NO: 68919 - RNA, 32 nt, Human
augaccagagccaaggcucacagaaaagacac

SEQ ID NO: 68920 - RNA, 32 nt, Human
augaccagaguucugugcauaacaggauccca

SEQ ID NO: 68921 - RNA, 32 nt, Human
augaccagcaguagacaaauggauacugagca

SEQ ID NO: 68922 - RNA, 32 nt, Human
augaccagccugggcaacauagcgagacugug

SEQ ID NO: 68923 - RNA, 32 nt, Human
augaccagcugcuuagucaccuggcaaagcag

SEQ ID NO: 68924 - RNA, 32 nt, Human
augaccauaccagugcauuccagccuggguac

SEQ ID NO: 68925 - RNA, 32 nt, Human
augaccauauuuacucuuucuaacuuucuuua

SEQ ID NO: 68926 - RNA, 32 nt, Human
augacccaaugccauuacagaaauuccauuac

SEQ ID NO: 68927 - RNA, 32 nt, Human
augacccacacaccucucaggggagccauggc

SEQ ID NO: 68928 - RNA, 25 nt, Human
augacccacgcccauuaugaugccg

SEQ ID NO: 68929 - RNA, 32 nt, Human
augacccagucccugggcacagguacagccac

SEQ ID NO: 68930 - RNA, 32 nt, Human
augacccauaguuaaugcuuucucuucaccag

SEQ ID NO: 68931 - RNA, 32 nt, Human
augacccauccagggcccuccccauggacacg

SEQ ID NO: 68932 - RNA, 32 nt, Human
augaccccacgucugacagccauguccaccug

SEQ ID NO: 68933 - RNA, 32 nt, Human
augaccccaggccccugcuccaccaggauguc

SEQ ID NO: 68934 - RNA, 32 nt, Human
augaccccaugucccagcuccccacacagcgc

SEQ ID NO: 68935 - RNA, 32 nt, Human
augacccccagccuggcuccauuccugguugu

SEQ ID NO: 68936 - RNA, 32 nt, Human
augacccccaggagugcugagguacaagaaag

SEQ ID NO: 68937 - RNA, 32 nt, Human
augacccccugccccugucaccaccccgagcu

SEQ ID NO: 68938 - RNA, 32 nt, Human
augacccugggugacaggaaagccuuucgaga

SEQ ID NO: 68939 - RNA, 32 nt, Human
augacccugguguuaucaucucccaggaucca

SEQ ID NO: 68940 - RNA, 32 nt, Human
augacccuugcaaucauggugcacagaauuaa

SEQ ID NO: 68941 - RNA, 32 nt, Human
augaccgagaugaccucuaugcugagcagaug

SEQ ID NO: 68942 - RNA, 32 nt, Human
augaccgcugcuucggagaagcucucgacccu

SEQ ID NO: 68943 - RNA, 32 nt, Human
augaccggcacuaguguuagccugcggaacgg

SEQ ID NO: 68944 - RNA, 32 nt, Human
augaccggguuucuuugaugcgaccucaggaa

SEQ ID NO: 68945 - RNA, 21 nt, Human
augaccuaggcacccuacgcu

SEQ ID NO: 68946 - RNA, 32 nt, Human
augaccuccugcugcaugucccuucccuuccc

SEQ ID NO: 68947 - RNA, 32 nt, Human
augaccucuagggaccagcccagacccaaggg

SEQ ID NO: 68948 - RNA, 32 nt, Human
augaccucuuuccuuguuuuguuuucaugcug

SEQ ID NO: 68949 - RNA, 32 nt, Human
augaccugcauccuuaauauccagugacuuca

SEQ ID NO: 68950 - RNA, 32 nt, Human
augaccugcucacugugucagcuguuuucccu

SEQ ID NO: 68951 - RNA, 32 nt, Human
augaccuggaaagaagggacaggcugaaaccg

SEQ ID NO: 68952 - RNA, 32 nt, Human
augaccuggcauguggaguuacagagggaucc

SEQ ID NO: 68953 - RNA, 32 nt, Human
augaccuggcucaaacuuaacuuggauuugaa

SEQ ID NO: 68954 - RNA, 32 nt, Human
augaccugguagaaggaagagaggcaaaggaa

SEQ ID NO: 68955 - RNA, 32 nt, Human
augaccuguaguucucugcuucauagaugcuu

SEQ ID NO: 68956 - RNA, 25 nt, Human
augaccugugucuguucucugggga

SEQ ID NO: 68957 - RNA, 32 nt, Human
augaccuguucaucuguggccauuccaucagg

SEQ ID NO: 68958 - RNA, 32 nt, Human
augaccuguucccauuuggaguacagugaugu

SEQ ID NO: 68959 - RNA, 32 nt, Human
augaccuuccaaacuuagaagacaucuauacu

SEQ ID NO: 68960 - RNA, 32 nt, Human
augaccuuccaaguaagcagaugggaacugaa

SEQ ID NO: 68961 - RNA, 32 nt, Human
augaccuuggauuacauaaggauuucuaugca

SEQ ID NO: 68962 - RNA, 24 nt, Human
augaccuugugauccacccaccuc

SEQ ID NO: 68963 - RNA, 22 nt, Human
augaccuugugauccgcccgcc

SEQ ID NO: 68964 - RNA, 32 nt, Human
augacgacauccucgaugaguccuccagcccc

SEQ ID NO: 68965 - RNA, 32 nt, Human
augacgacucacugcagccucaaccuccuggg

SEQ ID NO: 68966 - RNA, 32 nt, Human
augacgagcugcagagaacucagcaccaaggg

SEQ ID NO: 68967 - RNA, 32 nt, Human
augacgaugggcccugaaugccaagauucauu

SEQ ID NO: 68968 - RNA, 32 nt, Human
augacgauucugaugaugaguucugccaccgg

SEQ ID NO: 68969 - RNA, 32 nt, Human
augacgccauugcacuccagccuaggcaauaa

SEQ ID NO: 68970 - RNA, 32 nt, Human
augacgccauugcacuccagccugggugagaa

SEQ ID NO: 68971 - RNA, 32 nt, Human
augacgccugauggugcugcucaggcccaugc

SEQ ID NO: 68972 - RNA, 32 nt, Human
augacggauuagaauguauacacauguauacu

SEQ ID NO: 68973 - RNA, 32 nt, Human
augacggcaggagggcccugcuacucgcuuuu

SEQ ID NO: 68974 - RNA, 22 nt, Human
augacggcucaugccuguaauc

SEQ ID NO: 68975 - RNA, 32 nt, Human
augacgggaccccagaggugccgggugacagc

SEQ ID NO: 68976 - RNA, 32 nt, Human
augacgggccccuagccacacagcuguccuca

SEQ ID NO: 68977 - RNA, 32 nt, Human
augacgguccccaaggagaugcccgagaagug

SEQ ID NO: 68978 - RNA, 32 nt, Human
augacgguccugcaccuguuauaguagagaau

SEQ ID NO: 68979 - RNA, 32 nt, Human
augacggugccacugcacuccagcuuggguga

SEQ ID NO: 68980 - RNA, 32 nt, Human
augacgucagccaacccagcuggacuggccuu

SEQ ID NO: 68981 - RNA, 32 nt, Human
augacuaauuuuaaaagaaccugcccugaaaa

SEQ ID NO: 68982 - RNA, 21 nt, Human
augacuacacagaaucuccug

SEQ ID NO: 68983 - RNA, 32 nt, Human
augacuacagacauuaaauaaucgaaguaauu

SEQ ID NO: 68984 - RNA, 32 nt, Human
augacuacaucaauguuccugccugcaacucc

SEQ ID NO: 68985 - RNA, 32 nt, Human
augacuaccagcugguucgaaaauuaggccga

SEQ ID NO: 68986 - RNA, 32 nt, Human
augacuaccuauacauuauuucaagguuauuu

SEQ ID NO: 68987 - RNA, 32 nt, Human
augacuagcucuuugagccuguccucagagga

SEQ ID NO: 68988 - RNA, 32 nt, Human
augacuaugccacuguacuccagccuggguaa

SEQ ID NO: 68989 - RNA, 32 nt, Human
augacuaugccuggcccuggaguugcguacuu

SEQ ID NO: 68990 - RNA, 32 nt, Human
augacuauguucuucucccaaacaaggauuga

SEQ ID NO: 68991 - RNA, 32 nt, Human
augacucaauauuacaaccucuucuucucuua

SEQ ID NO: 68992 - RNA, 32 nt, Human
augacucacccaaccacauuuccuggggccuc

SEQ ID NO: 68993 - RNA, 32 nt, Human
augacucacugcagcacccccucccacuucgc

SEQ ID NO: 68994 - RNA, 26 nt, Human
augacucagagcgucugucuuuguau

SEQ ID NO: 68995 - RNA, 32 nt, Human
augacucaggcagggccccaggguggggugag

SEQ ID NO: 68996 - RNA, 31 nt, Human
augacucaguuucaguuaccugagccacagc

SEQ ID NO: 68997 - RNA, 32 nt, Human
augacuccacuguuuuucucuaaugcuugauu

SEQ ID NO: 68998 - RNA, 32 nt, Human
augacuccagaacaacaacugggaagaaacuu

SEQ ID NO: 68999 - RNA, 32 nt, Human
augacuccaugggagaaaaagaagaagccaaa

SEQ ID NO: 69000 - RNA, 28 nt, Human
augacucccacugcugccucuccugggc

SEQ ID NO: 69001 - RNA, 32 nt, Human
augacucccacugcugccucuccugggcaugg

SEQ ID NO: 69002 - RNA, 32 nt, Human
augacuccccuccccaacccccucaucuaaag

SEQ ID NO: 69003 - RNA, 32 nt, Human
augacucccuuucaaagucaaucuuuggaaaa

SEQ ID NO: 69004 - RNA, 32 nt, Human
augacucccuuucagggaaggcugggccucuu

SEQ ID NO: 69005 - RNA, 32 nt, Human
augacucccuuuuacuccccuaccccacauca

SEQ ID NO: 69006 - RNA, 32 nt, Human
augacuccuauuccuuucauuauugcuuugaa

SEQ ID NO: 69007 - RNA, 32 nt, Human
augacuccuuucucuuagugggcuacuauuua

SEQ ID NO: 69008 - RNA, 32 nt, Human
augacucucacagaugaaggccuagacgcagg

SEQ ID NO: 69009 - RNA, 32 nt, Human
augacucucccccauuucccaggucucugggu

SEQ ID NO: 69010 - RNA, 32 nt, Human
augacucucuacugccucaaccucucaggccc

SEQ ID NO: 69011 - RNA, 22 nt, Human
augacugaaagugacuuccgua

SEQ ID NO: 69012 - RNA, 32 nt, Human
augacugaacgaauuuguuuauuucccauuag

SEQ ID NO: 69013 - RNA, 32 nt, Human
augacugagcaggcccagccccagaggacaag

SEQ ID NO: 69014 - RNA, 32 nt, Human
augacugauacagguuuagcuuugugugaaaa

SEQ ID NO: 69015 - RNA, 32 nt, Human
augacugaucaaaggcaggcgauacuuccugu

SEQ ID NO: 69016 - RNA, 32 nt, Human
augacugcacuccagccugggugacagacccu

SEQ ID NO: 69017 - RNA, 32 nt, Human
augacugcacuccagccugggugacagagcaa

SEQ ID NO: 69018 - RNA, 32 nt, Human
augacugcaguggagccaguaccggcuguagu

SEQ ID NO: 69019 - RNA, 32 nt, Human
augacugcauagggaccaacacugccugacuu

SEQ ID NO: 69020 - RNA, 32 nt, Human
augacugcaucacugcacuccagccugggcaa

SEQ ID NO: 69021 - RNA, 32 nt, Human
augacugcauuuguuccugccugccucggcgg

SEQ ID NO: 69022 - RNA, 32 nt, Human
augacugccaggcacggagcagguguggagga

SEQ ID NO: 69023 - RNA, 32 nt, Human
augacugcgcuccacacauacaucauugcccg

SEQ ID NO: 69024 - RNA, 32 nt, Human
augacugcucacugcagccuccaccuccuggg

SEQ ID NO: 69025 - RNA, 32 nt, Human
augacugcucaggccucaccucccagggcuac

SEQ ID NO: 69026 - RNA, 32 nt, Human
augacugcuugaaauagucucucucccaugga

SEQ ID NO: 69027 - RNA, 32 nt, Human
augacuggaaugugacuagugaucucaggaga

SEQ ID NO: 69028 - RNA, 32 nt, Human
augacuggagagaagugagaagacucccagaa

SEQ ID NO: 69029 - RNA, 32 nt, Human
augacuguaaccuaggcugagccaagaaugga

SEQ ID NO: 69030 - RNA, 32 nt, Human
augacugugaaaagcugcaauauuuccaaugu

SEQ ID NO: 69031 - RNA, 32 nt, Human
augacugugaaccagaacagacugccucgcug

SEQ ID NO: 69032 - RNA, 32 nt, Human
augacugugccacugcaccucuagucugggug

SEQ ID NO: 69033 - RNA, 32 nt, Human
augacugugccacugcacuccagccuggucaa

SEQ ID NO: 69034 - RNA, 32 nt, Human
augacuguggugucaucuaaaaggcagaggug

SEQ ID NO: 69035 - RNA, 32 nt, Human
augacugugguguggagggagugagccagcag

SEQ ID NO: 69036 - RNA, 32 nt, Human
augacuguuccagagagcgggcagaccuggca

SEQ ID NO: 69037 - RNA, 32 nt, Human
augacuguugcugcacuccagccugagugaca

SEQ ID NO: 69038 - RNA, 32 nt, Human
augacuguuuauggaaaguaucuuuaauaaag

SEQ ID NO: 69039 - RNA, 32 nt, Human
augacuuagagaagaagaugcaaagaggcgaa

SEQ ID NO: 69040 - RNA, 32 nt, Human
augacuuagcugacuuguggcagcggggcaag

SEQ ID NO: 69041 - RNA, 32 nt, Human
augacuucagccuguaaugcugugagugcuuu

SEQ ID NO: 69042 - RNA, 32 nt, Human
augacuucaugcuauggaggugauucugauuc

SEQ ID NO: 69043 - RNA, 32 nt, Human
augacuuccucaaacugacaccaucuuaauua

SEQ ID NO: 69044 - RNA, 32 nt, Human
augacuuccugccucccugccuugugacugau

SEQ ID NO: 69045 - RNA, 32 nt, Human
augacuucgucuaugacuguaacugaguggcc

SEQ ID NO: 69046 - RNA, 32 nt, Human
augacuucucuggccaguuugccuuccacgug

SEQ ID NO: 69047 - RNA, 32 nt, Human
augacuugagcccaggaggaggaggcugcagu

SEQ ID NO: 69048 - RNA, 22 nt, Human
augacuugaggagaaacuuuua

SEQ ID NO: 69049 - RNA, 32 nt, Human
augacuugcccaggguaaaacaguccauggca

SEQ ID NO: 69050 - RNA, 32 nt, Human
augacuugcccuuucuaaaguggcaucucagc

SEQ ID NO: 69051 - RNA, 32 nt, Human
augacuugcugguucuaacuuucaauuuaaaa

SEQ ID NO: 69052 - RNA, 32 nt, Human
augacuuguucauuuuucucucccucuuuuuc

SEQ ID NO: 69053 - RNA, 32 nt, Human
augacuuguuuuugaaugcaggcaguauuuag

SEQ ID NO: 69054 - RNA, 32 nt, Human
augacuuuaccuccauucccucuacccagaac

SEQ ID NO: 69055 - RNA, 32 nt, Human
augacuuuacuaccugcagaacugcacuauaa

SEQ ID NO: 69056 - RNA, 32 nt, Human
augacuuucagugcagauucauagcuaaccca

SEQ ID NO: 69057 - RNA, 32 nt, Human
augacuuucccuaggcugagggcaguggaccc

SEQ ID NO: 69058 - RNA, 20 nt, Human
augacuuucuaguaccaaag

SEQ ID NO: 69059 - RNA, 32 nt, Human
augacuuugaaaggcaaaagaggaaucaagaa

SEQ ID NO: 69060 - RNA, 25 nt, Human
augacuuugagguucauccauguca

SEQ ID NO: 69061 - RNA, 25 nt, Human
augacuuugugguuuacccccuuca

SEQ ID NO: 69062 - RNA, 32 nt, Human
augacuuuguuuggaaacccuuuuggaggcac

SEQ ID NO: 69063 - RNA, 32 nt, Human
augacuuuuagauaugagaugacgggaagcag

SEQ ID NO: 69064 - RNA, 32 nt, Human
augacuuuuccauugaccagcucucuuccugu

SEQ ID NO: 69065 - RNA, 32 nt, Human
augacuuuucuccccagcuccaaaccucauau

SEQ ID NO: 69066 - RNA, 32 nt, Human
augacuuuugugccuuucugcuccagucucaa

SEQ ID NO: 69067 - RNA, 32 nt, Human
augagaaaaaugucgcaggagguuugcucguu

SEQ ID NO: 69068 - RNA, 32 nt, Human
augagaaaacaguucuauaaguccaggguuaa

SEQ ID NO: 69069 - RNA, 19 nt, Human
augagaaaacauauucuga

SEQ ID NO: 69070 - RNA, 19 nt, Human
augagaaaagccagccagg

SEQ ID NO: 69071 - RNA, 32 nt, Human
augagaaaagccuccuggugcaucuucaaaau

SEQ ID NO: 69072 - RNA, 32 nt, Human
augagaaaaggacagagcucuaauugauaacu

SEQ ID NO: 69073 - RNA, 32 nt, Human
augagaaaauggagguuuauggucuguucuca

SEQ ID NO: 69074 - RNA, 32 nt, Human
augagaaacugugacagaucugugucaauuaa

SEQ ID NO: 69075 - RNA, 32 nt, Human
augagaaagagggaagaagaagaagggaugau

SEQ ID NO: 69076 - RNA, 32 nt, Human
augagaaagccgacugugccagucccagccgc

SEQ ID NO: 69077 - RNA, 32 nt, Human
augagaaagcuaaacaugaaauauaaugaaua

SEQ ID NO: 69078 - RNA, 18 nt, Human
augagaaaggcccagggg

SEQ ID NO: 69079 - RNA, 32 nt, Human
augagaaaguccugugcaguccugagaugauu

SEQ ID NO: 69080 - RNA, 32 nt, Human
augagaaauggaagaugagaacucccuaagag

SEQ ID NO: 69081 - RNA, 32 nt, Human
augagaacaaauguacaaauauaaagaaagua

SEQ ID NO: 69082 - RNA, 32 nt, Human
augagaacagaggcacaggugccggcccugca

SEQ ID NO: 69083 - RNA, 20 nt, Human
augagaacagcacauucuga

SEQ ID NO: 69084 - RNA, 32 nt, Human
augagaacccgcugauaccauucuaaguccgc

SEQ ID NO: 69085 - RNA, 32 nt, Human
augagaacuagaaaggaaacaagagcauagga

SEQ ID NO: 69086 - RNA, 32 nt, Human
augagaacucaacuccuggcuccugggacugc

SEQ ID NO: 69087 - RNA, 32 nt, Human
augagaacugacacaacuuugccuuaaagagu

SEQ ID NO: 69088 - RNA, 24 nt, Human
augagaagaagcucagagcagagc

SEQ ID NO: 69089 - RNA, 22 nt, Human
augagaagaauucaucugggac

SEQ ID NO: 69090 - RNA, 32 nt, Human
augagaagacagagucuccuaguuuuguaucu

SEQ ID NO: 69091 - RNA, 32 nt, Human
augagaagagguggggaguggaagcggggaug

SEQ ID NO: 69092 - RNA, 32 nt, Human
augagaagcucacgcagagaacauucuggcug

SEQ ID NO: 69093 - RNA, 32 nt, Human
augagaagcuuuuauuuaaaacugauauauuu

SEQ ID NO: 69094 - RNA, 22 nt, Human
augagaaggaggaggacagcgc

SEQ ID NO: 69095 - RNA, 32 nt, Human
augagaaggaggaggacagcgccgaggaggaa

SEQ ID NO: 69096 - RNA, 32 nt, Human
augagaagggcacugcccucccucacccauau

SEQ ID NO: 69097 - RNA, 32 nt, Human
augagaauauggccaucaccugaaaaguuuuc

SEQ ID NO: 69098 - RNA, 32 nt, Human
augagaaucaguggguuugaggugggcccaag

SEQ ID NO: 69099 - RNA, 32 nt, Human
augagaaugaguugccuccacccugucccaac

SEQ ID NO: 69100 - RNA, 32 nt, Human
augagaaugccucuguguuugugagugugaga

SEQ ID NO: 69101 - RNA, 32 nt, Human
augagaauugagcuuaaauagaugugggugga

SEQ ID NO: 69102 - RNA, 21 nt, Human
augagacaaaaguuguuucca

SEQ ID NO: 69103 - RNA, 32 nt, Human
augagacaauacaggcaucacuggcagaggau

SEQ ID NO: 69104 - RNA, 32 nt, Human
augagacagaaaugaggagacacaccugaggc

SEQ ID NO: 69105 - RNA, 32 nt, Human
augagacagaacuugucacaaagacagcugau

SEQ ID NO: 69106 - RNA, 32 nt, Human
augagacagagugccuaagagaaacccuugca

SEQ ID NO: 69107 - RNA, 32 nt, Human
augagacaggaagcuguucacugugaaacagu

SEQ ID NO: 69108 - RNA, 31 nt, Human
augagacagguccucaggccuguguuccaag

SEQ ID NO: 69109 - RNA, 30 nt, Human
augagacauaaauuucuguuguguauaagc

SEQ ID NO: 69110 - RNA, 32 nt, Human
augagacaucuuuccagggguagaaggguuag

SEQ ID NO: 69111 - RNA, 32 nt, Human
augagaccaacaccugucugugccucaaugcc

SEQ ID NO: 69112 - RNA, 32 nt, Human
augagaccaagagggaggaggggaaggacucc

SEQ ID NO: 69113 - RNA, 32 nt, Human
augagaccaggcguucaagaccagccuggcca

SEQ ID NO: 69114 - RNA, 32 nt, Human
augagaccucccacuccuggggccagaaggag

SEQ ID NO: 69115 - RNA, 32 nt, Human
augagaccuuaguguucuccaggcucuguggc

SEQ ID NO: 69116 - RNA, 25 nt, Human
augagacgacuccggcacagagaag

SEQ ID NO: 69117 - RNA, 32 nt, Human
augagacuccuggaaacugggugggaauuggc

SEQ ID NO: 69118 - RNA, 32 nt, Human
augagacugaagacaucaagaaauaaggaggg

SEQ ID NO: 69119 - RNA, 32 nt, Human
augagacugauuagggaggggauuugcacagg

SEQ ID NO: 69120 - RNA, 32 nt, Human
augagacugcaggagagagagcagcggagggc

SEQ ID NO: 69121 - RNA, 32 nt, Human
augagacugcuggcgggcuggcugugccugag

SEQ ID NO: 69122 - RNA, 21 nt, Human
augagacugggcacagccuga

SEQ ID NO: 69123 - RNA, 32 nt, Human
augagacuucuccaagcugcuucacaagcaaa

SEQ ID NO: 69124 - RNA, 20 nt, Human
augagagaagggacacauuc

SEQ ID NO: 69125 - RNA, 32 nt, Human
augagagaauccugccucuguagaccaacauc

SEQ ID NO: 69126 - RNA, 22 nt, Human
augagagaaugguacuuaggga

SEQ ID NO: 69127 - RNA, 32 nt, Human
augagagacauauaaucuccacccucacggag

SEQ ID NO: 69128 - RNA, 32 nt, Human
augagagaccuccaggugguccuucuggggag

SEQ ID NO: 69129 - RNA, 32 nt, Human
augagagagaaauagcaaauguucuuucuaug

SEQ ID NO: 69130 - RNA, 32 nt, Human
augagagagcccagagggaggaagaagccaga

SEQ ID NO: 69131 - RNA, 24 nt, Human
augagagauuugggagagcugagc

SEQ ID NO: 69132 - RNA, 32 nt, Human
augagagcacuuuucauugacugugaacuuuu

SEQ ID NO: 69133 - RNA, 32 nt, Human
augagagcaguuuuuagcgaguauuuuagugg

SEQ ID NO: 69134 - RNA, 32 nt, Human
augagagccaacacaugcucacugccagcucc

SEQ ID NO: 69135 - RNA, 32 nt, Human
augagagcccugcaccuggccagagugucaca

SEQ ID NO: 69136 - RNA, 32 nt, Human
augagagccugacagacccuucaaaguuggac

SEQ ID NO: 69137 - RNA, 32 nt, Human
augagagcucagauggagauggugcuagaaga

SEQ ID NO: 69138 - RNA, 32 nt, Human
augagagcugcacucuggcuggggaaggcaug

SEQ ID NO: 69139 - RNA, 20 nt, Human
augagaggaaggagauagag

SEQ ID NO: 69140 - RNA, 32 nt, Human
augagaggagaaagccauccugccuggugugu

SEQ ID NO: 69141 - RNA, 15 nt, Human
augagaggcacacug

SEQ ID NO: 69142 - RNA, 32 nt, Human
augagaggccaucuaucccagccugggugauc

SEQ ID NO: 69143 - RNA, 32 nt, Human
augagaggccuauggcugcucuccaaucccgg

SEQ ID NO: 69144 - RNA, 32 nt, Human
augagaggcuguggcagcaggagacucugcgg

SEQ ID NO: 69145 - RNA, 23 nt, Human
augagagggaagagaaaacaagu

SEQ ID NO: 69146 - RNA, 24 nt, Human
augagagggaagagauagcauggc

SEQ ID NO: 69147 - RNA, 32 nt, Human
augagagggaagagauagcauggcaugcagca

SEQ ID NO: 69148 - RNA, 20 nt, Human
augagagggaagugggcaga

SEQ ID NO: 69149 - RNA, 20 nt, Human
augagagggagaagcggcag

SEQ ID NO: 69150 - RNA, 32 nt, Human
augagagggagaccggcaugcuuuguccucac

SEQ ID NO: 69151 - RNA, 32 nt, Human
augagagggagggagaggagagagagugcgag

SEQ ID NO: 69152 - RNA, 32 nt, Human
augagaggggaaguggugggggagacauagcc

SEQ ID NO: 69153 - RNA, 32 nt, Human
augagaggggcaggaagugggguccagacagg

SEQ ID NO: 69154 - RNA, 32 nt, Human
augagaggggugaggucucuguggaaggacag

SEQ ID NO: 69155 - RNA, 32 nt, Human
augagagguauuucaaaaugagugaagcauga

SEQ ID NO: 69156 - RNA, 23 nt, Human
augagagguuauggaaagcagag

SEQ ID NO: 69157 - RNA, 32 nt, Human
augagagguuuagcacuuaagaucagauucaa

SEQ ID NO: 69158 - RNA, 32 nt, Human
augagaguugcugguagcaggcucccuccuuc

SEQ ID NO: 69159 - RNA, 32 nt, Human
augagaguuucacacaccagcccauagguggg

SEQ ID NO: 69160 - RNA, 32 nt, Human
augagauaagccugcaaccucuugaccuucag

SEQ ID NO: 69161 - RNA, 32 nt, Human
augagauacccaguuuaucuuucacaaugagc

SEQ ID NO: 69162 - RNA, 32 nt, Human
augagaucaggaguucgagaccagccuggcca

SEQ ID NO: 69163 - RNA, 32 nt, Human
augagaucagugcuucaacauccagguugacg

SEQ ID NO: 69164 - RNA, 32 nt, Human
augagauccaggcuggagcggcugugccagag

SEQ ID NO: 69165 - RNA, 32 nt, Human
augagaucgggccacacuugagcugagucacc

SEQ ID NO: 69166 - RNA, 32 nt, Human
augagaucucgcuauguugcccaggccagucu

SEQ ID NO: 69167 - RNA, 32 nt, Human
augagaucuggcuguugaagacauggugaccc

SEQ ID NO: 69168 - RNA, 32 nt, Human
augagaugacugccauguacacugcagucaag

SEQ ID NO: 69169 - RNA, 32 nt, Human
augagaugagcugaguuauagagagaaaggga

SEQ ID NO: 69170 - RNA, 32 nt, Human
augagaugccguaccuccucuggaccaucaag

SEQ ID NO: 69171 - RNA, 32 nt, Human
augagauggauuggaaguggccagcagcaagu

SEQ ID NO: 69172 - RNA, 30 nt, Human
augagaugggauucuccaacauggaagaug

SEQ ID NO: 69173 - RNA, 32 nt, Human
augagaugggauucuccaacauggaagaugau

SEQ ID NO: 69174 - RNA, 32 nt, Human
augagauuccagguccugagagcugcuuugag

SEQ ID NO: 69175 - RNA, 32 nt, Human
augagauucccuaucuccuuuuagaccuggga

SEQ ID NO: 69176 - RNA, 32 nt, Human
augagauugccuuccuauauccuuccuuguuc

SEQ ID NO: 69177 - RNA, 29 nt, Human
augagauugcuguguguugccugggacac

SEQ ID NO: 69178 - RNA, 21 nt, Human
augagauuuaaauucuguggg

SEQ ID NO: 69179 - RNA, 32 nt, Human
augagcaaaugcugucauuagcaaccaugcau

SEQ ID NO: 69180 - RNA, 32 nt, Human
augagcaacucuauucauuccuugccaugugg

SEQ ID NO: 69181 - RNA, 32 nt, Human
augagcaaggagaagcgagaggcugucaguaa

SEQ ID NO: 69182 - RNA, 32 nt, Human
augagcaaguguccuaagcuaugucauccaaa

SEQ ID NO: 69183 - RNA, 32 nt, Human
augagcacccagagauggaggaagggucagcc

SEQ ID NO: 69184 - RNA, 26 nt, Human
augagcaccccuguuuucucuggaga

SEQ ID NO: 69185 - RNA, 32 nt, Human
augagcaccuccaggagccucaguuucgccuu

SEQ ID NO: 69186 - RNA, 32 nt, Human
augagcaccugggcacagguuggggcucugca

SEQ ID NO: 69187 - RNA, 32 nt, Human
augagcacuggagggcagaggccucagugucc

SEQ ID NO: 69188 - RNA, 32 nt, Human
augagcagaccagcagguacguagugggagag

SEQ ID NO: 69189 - RNA, 32 nt, Human
augagcagagacacgaacccagagccagugcc

SEQ ID NO: 69190 - RNA, 32 nt, Human
augagcagaggcaccuuuagaagaaauaaugu

SEQ ID NO: 69191 - RNA, 32 nt, Human
augagcagcacuggagccugguaaaugcagau

SEQ ID NO: 69192 - RNA, 32 nt, Human
augagcagccgagccugcuaaccgcagcuccg

SEQ ID NO: 69193 - RNA, 32 nt, Human
augagcagccugccuugaacccucucucucac

SEQ ID NO: 69194 - RNA, 32 nt, Human
augagcaggcagcagcagggcauggccccauc

SEQ ID NO: 69195 - RNA, 32 nt, Human
augagcaggggcugggaguagaggguuucugg

SEQ ID NO: 69196 - RNA, 23 nt, Human
augagcagucuccuuacugaagg

SEQ ID NO: 69197 - RNA, 22 nt, Human
augagcagucuguuguugcaga

SEQ ID NO: 69198 - RNA, 22 nt, Human
augagcagugauuuucuuagga

SEQ ID NO: 69199 - RNA, 32 nt, Human
augagcaguugugggaagagccauagguauuu

SEQ ID NO: 69200 - RNA, 32 nt, Human
augagcauaguauguggauagguaucuucacc

SEQ ID NO: 69201 - RNA, 32 nt, Human
augagcaucaaaccaccauggauuucauaauc

SEQ ID NO: 69202 - RNA, 32 nt, Human
augagcauuaaauauauuuggaauagcagaag

SEQ ID NO: 69203 - RNA, 30 nt, Human
augagcauuuccuuugagcaucaugccugc

SEQ ID NO: 69204 - RNA, 32 nt, Human
augagccaacagcaccggauccacagaauguu

SEQ ID NO: 69205 - RNA, 32 nt, Human
augagccaagcccucacuguacagaagaguga

SEQ ID NO: 69206 - RNA, 32 nt, Human
augagccaaguaaaccucuuuucuuuauaaau

SEQ ID NO: 69207 - RNA, 32 nt, Human
augagccaaguggcagcuaaaaguugggggug

SEQ ID NO: 69208 - RNA, 32 nt, Human
augagccaauuaaaccucuuuucuuuauaaau

SEQ ID NO: 69209 - RNA, 32 nt, Human
augagccacaacaucaccacccugccacuuac

SEQ ID NO: 69210 - RNA, 32 nt, Human
augagccacaguugagaagcggaggggccagc

SEQ ID NO: 69211 - RNA, 32 nt, Human
augagccaccgcacccagccucucuugugcuu

SEQ ID NO: 69212 - RNA, 32 nt, Human
augagccaccugcccagccauguuuggggcuu

SEQ ID NO: 69213 - RNA, 32 nt, Human
augagccacugcaccagccccaggggucuaau

SEQ ID NO: 69214 - RNA, 32 nt, Human
augagccacugcacccaaccccuggaaaacua

SEQ ID NO: 69215 - RNA, 32 nt, Human
augagccacugcacccagcaaugaguagucuu

SEQ ID NO: 69216 - RNA, 32 nt, Human
augagccacugcacccagccaagugaucauuu

SEQ ID NO: 69217 - RNA, 32 nt, Human
augagccacugcacccagcccuguauucuuau

SEQ ID NO: 69218 - RNA, 32 nt, Human
augagccacugcacccagccgauaggaaguuu

SEQ ID NO: 69219 - RNA, 32 nt, Human
augagccacugcacccagccuuggcgggcauc

SEQ ID NO: 69220 - RNA, 32 nt, Human
augagccacugcacccggccaagucuuugguc

SEQ ID NO: 69221 - RNA, 32 nt, Human
augagccacugcacccggcccugagaauauau

SEQ ID NO: 69222 - RNA, 32 nt, Human
augagccacugcacccggccgguggaaagcau

SEQ ID NO: 69223 - RNA, 32 nt, Human
augagccacugcaccugaccugcugaauuguu

SEQ ID NO: 69224 - RNA, 32 nt, Human
augagccacugcaccuggccuacguauuaggc

SEQ ID NO: 69225 - RNA, 32 nt, Human
augagccacugcaccuggccuaggacuggugu

SEQ ID NO: 69226 - RNA, 32 nt, Human
augagccacugcaccuggccuguguauuguuu

SEQ ID NO: 69227 - RNA, 32 nt, Human
augagccacugcacucaaccuuaagaccuacu

SEQ ID NO: 69228 - RNA, 32 nt, Human
augagccacugcauccggccuguuaaggauuu

SEQ ID NO: 69229 - RNA, 32 nt, Human
augagccacugcgcccggccugggucuccguu

SEQ ID NO: 69230 - RNA, 32 nt, Human
augagccacuguccccggccuccuggcuuccu

SEQ ID NO: 69231 - RNA, 32 nt, Human
augagccacugugcccagccuaguuucuuuuc

SEQ ID NO: 69232 - RNA, 32 nt, Human
augagccacuuuccucuccaggugaaggcagg

SEQ ID NO: 69233 - RNA, 32 nt, Human
augagccaggacagcgggaagcagggauggcc

SEQ ID NO: 69234 - RNA, 32 nt, Human
augagccaggcccugggcugggccuccacuuc

SEQ ID NO: 69235 - RNA, 32 nt, Human
augagccagucaccaucccaugauaugaaagu

SEQ ID NO: 69236 - RNA, 32 nt, Human
augagccaugaagccgcccggcagcagcucgc

SEQ ID NO: 69237 - RNA, 32 nt, Human
augagcccagccccagcucaccugccaaucca

SEQ ID NO: 69238 - RNA, 32 nt, Human
augagcccagccuguuaaaaacaaaugacccc

SEQ ID NO: 69239 - RNA, 32 nt, Human
augagcccaggagguugaggcugcagugaggu

SEQ ID NO: 69240 - RNA, 32 nt, Human
augagcccagguauucaagaccagccugggaa

SEQ ID NO: 69241 - RNA, 32 nt, Human
augagccccacagccugcacagcagcucugaa

SEQ ID NO: 69242 - RNA, 15 nt, Human
augagccccuguucu

SEQ ID NO: 69243 - RNA, 31 nt, Human
augagccggcacuucauuccuuuuuauaaug

SEQ ID NO: 69244 - RNA, 32 nt, Human
augagccgugaaugggggcagagccagauccu

SEQ ID NO: 69245 - RNA, 32 nt, Human
augagccgugcugcugggcacagccaggcaca

SEQ ID NO: 69246 - RNA, 32 nt, Human
augagccguugugcuccagccugggcgacaga

SEQ ID NO: 69247 - RNA, 32 nt, Human
augagccuaguagaauauggacuuggaaaauu

SEQ ID NO: 69248 - RNA, 32 nt, Human
augagccuauguugacucacuggguggggguc

SEQ ID NO: 69249 - RNA, 32 nt, Human
augagccuauguugacucacuggguggggucc

SEQ ID NO: 69250 - RNA, 32 nt, Human
augagccuccaccaccuccucuuugugacauc

SEQ ID NO: 69251 - RNA, 32 nt, Human
augagccucccacccucaccucccagacccug

SEQ ID NO: 69252 - RNA, 32 nt, Human
augagccucuccccagguguauuucagcagac

SEQ ID NO: 69253 - RNA, 32 nt, Human
augagccucugccuggccccugcugcuguccu

SEQ ID NO: 69254 - RNA, 32 nt, Human
augagccugcagcauuuguccaccugucccac

SEQ ID NO: 69255 - RNA, 32 nt, Human
augagccuggcuuggggguugguggggcucug

SEQ ID NO: 69256 - RNA, 32 nt, Human
augagccuguguucccagcugcuuaggaggcu

SEQ ID NO: 69257 - RNA, 32 nt, Human
augagccuucuuucugcccuccagauccacgg

SEQ ID NO: 69258 - RNA, 25 nt, Human
augagcgagguggaggcggcagcgg

SEQ ID NO: 69259 - RNA, 32 nt, Human
augagcgccuuccugcagaacacacagugccu

SEQ ID NO: 69260 - RNA, 32 nt, Human
augagcggguucccuggauagaaggagucuuc

SEQ ID NO: 69261 - RNA, 32 nt, Human
augagcggugagacgaacaaaagggaaaggaa

SEQ ID NO: 69262 - RNA, 32 nt, Human
augagcuaccucccucuuuucauaaaguauuu

SEQ ID NO: 69263 - RNA, 32 nt, Human
augagcuacugugcccagccucuaugauuuca

SEQ ID NO: 69264 - RNA, 32 nt, Human
augagcuagcugguguggguuccaaccauagg

SEQ ID NO: 69265 - RNA, 32 nt, Human
augagcuaggaacccuggacgaaaccaacaca

SEQ ID NO: 69266 - RNA, 32 nt, Human
augagcuagugaguggguacaggaagcccggg

SEQ ID NO: 69267 - RNA, 32 nt, Human
augagcuauuaaaacucagccugggacaguuu

SEQ ID NO: 69268 - RNA, 32 nt, Human
augagcucaagugauccucccaccucagccua

SEQ ID NO: 69269 - RNA, 32 nt, Human
augagcucacaguccaggucucuugcugugug

SEQ ID NO: 69270 - RNA, 32 nt, Human
augagcucaguacuugcccugugaaaauccca

SEQ ID NO: 69271 - RNA, 32 nt, Human
augagcucaucaagcucuaucuguaccuguga

SEQ ID NO: 69272 - RNA, 32 nt, Human
augagcuccucuuccuggcuucuuacugaaag

SEQ ID NO: 69273 - RNA, 32 nt, Human
augagcucucgguggaugaggcugcaguccau

SEQ ID NO: 69274 - RNA, 32 nt, Human
augagcucuugcuauguugcccaggcuggucu

SEQ ID NO: 69275 - RNA, 32 nt, Human
augagcugaguagaucacuuuaaggaugaaaa

SEQ ID NO: 69276 - RNA, 32 nt, Human
augagcugaucuguaagucacucugccccagg

SEQ ID NO: 69277 - RNA, 32 nt, Human
augagcugcacguuggaggggaagugaauuca

SEQ ID NO: 69278 - RNA, 32 nt, Human
augagcugcaguccccaggccaugagccuccc

SEQ ID NO: 69279 - RNA, 25 nt, Human
augagcugccuccauagggaaccca

SEQ ID NO: 69280 - RNA, 32 nt, Human
augagcuggagaagggcccucuggccuccuga

SEQ ID NO: 69281 - RNA, 32 nt, Human
augagcuggaggagggaggaguaaggccuugg

SEQ ID NO: 69282 - RNA, 32 nt, Human
augagcuggaguggggaugacaagacuugugu

SEQ ID NO: 69283 - RNA, 32 nt, Human
augagcuggcuucguccuucccucucuacaga

SEQ ID NO: 69284 - RNA, 32 nt, Human
augagcugggcccugggugaggugggggucug

SEQ ID NO: 69285 - RNA, 32 nt, Human
augagcugggcuguggugcagagcaagcagac

SEQ ID NO: 69286 - RNA, 32 nt, Human
augagcuggguacugacugagauaagaaaagc

SEQ ID NO: 69287 - RNA, 32 nt, Human
augagcugguugccagccuugcucugaggggc

SEQ ID NO: 69288 - RNA, 32 nt, Human
augagcugugugugaauguacguguaucaguc

SEQ ID NO: 69289 - RNA, 32 nt, Human
augagcuucacacccgaggagcuggcccagga

SEQ ID NO: 69290 - RNA, 32 nt, Human
augagcuucaccacucgucugccuccuguguc

SEQ ID NO: 69291 - RNA, 24 nt, Human
augagcuugcuguuucuuugaugg

SEQ ID NO: 69292 - RNA, 32 nt, Human
augagcuuuaagugccugucguucugaaaauu

SEQ ID NO: 69293 - RNA, 32 nt, Human
augaggaaaaagaggaaaacaagugggacacu

SEQ ID NO: 69294 - RNA, 32 nt, Human
augaggaaaaagagguaauaucagggcuucug

SEQ ID NO: 69295 - RNA, 32 nt, Human
augaggaaaaugucacagaauaaauuuauauu

SEQ ID NO: 69296 - RNA, 32 nt, Human
augaggaaaccaggcacgggagagggaggggc

SEQ ID NO: 69297 - RNA, 23 nt, Human
augaggaaacugaggcucagggg

SEQ ID NO: 69298 - RNA, 21 nt, Human
augaggaaauacuguuucuaa

SEQ ID NO: 69299 - RNA, 23 nt, Human
augaggaacaagacuuuuucuaa

SEQ ID NO: 69300 - RNA, 23 nt, Human
augaggaacagaagaagcagagc

SEQ ID NO: 69301 - RNA, 32 nt, Human
augaggaagaggagagagaagagauggacaga

SEQ ID NO: 69302 - RNA, 32 nt, Human
augaggaagauaaggcccaaggaggugaaaug

SEQ ID NO: 69303 - RNA, 19 nt, Human
augaggaagaucuugugga

SEQ ID NO: 69304 - RNA, 32 nt, Human
augaggaagauggcaguggccaccggaggacu

SEQ ID NO: 69305 - RNA, 17 nt, Human
augaggaagggcccugg

SEQ ID NO: 69306 - RNA, 32 nt, Human
augaggaagugagcucagggaggcugaguguc

SEQ ID NO: 69307 - RNA, 32 nt, Human
augaggaagugcccaagucuuccuucgggaag

SEQ ID NO: 69308 - RNA, 32 nt, Human
augaggaauaagaauggagauguuacaucugg

SEQ ID NO: 69309 - RNA, 32 nt, Human
augaggaaugcuucccacauccuugaaagaaa

SEQ ID NO: 69310 - RNA, 32 nt, Human
augaggacaccucagugacaaacacaccuuuu

SEQ ID NO: 69311 - RNA, 32 nt, Human
augaggacagaagauauucugauaagagagaa

SEQ ID NO: 69312 - RNA, 32 nt, Human
augaggacagcauugggcaacacuccuucugg

SEQ ID NO: 69313 - RNA, 32 nt, Human
augaggacagcugcagagguggcagugugugg

SEQ ID NO: 69314 - RNA, 32 nt, Human
augaggaccccagccccacuucccuggaacug

SEQ ID NO: 69315 - RNA, 32 nt, Human
augaggaccggcagagggaggaagaggaagac

SEQ ID NO: 69316 - RNA, 32 nt, Human
augaggacucugggcugcuggaauaggacacu

SEQ ID NO: 69317 - RNA, 32 nt, Human
augaggacugagcuuccucuccccaggacccg

SEQ ID NO: 69318 - RNA, 32 nt, Human
augaggacugucugccuuugagggcuugggca

SEQ ID NO: 69319 - RNA, 32 nt, Human
augaggacugugaggggaggaggcggagccgg

SEQ ID NO: 69320 - RNA, 22 nt, Human
augaggacuucaagccccacca

SEQ ID NO: 69321 - RNA, 17 nt, Human
augaggagaauauuuga

SEQ ID NO: 69322 - RNA, 18 nt, Human
augaggagacaauccugg

SEQ ID NO: 69323 - RNA, 18 nt, Human
augaggagacacaccuga

SEQ ID NO: 69324 - RNA, 32 nt, Human
augaggagagagaagaugagguuggacaagau

SEQ ID NO: 69325 - RNA, 19 nt, Human
augaggagaggcuguguga

SEQ ID NO: 69326 - RNA, 18 nt, Human
augaggagcaaaucauga

SEQ ID NO: 69327 - RNA, 32 nt, Human
augaggagcagucaugucuuacaugguggcag

SEQ ID NO: 69328 - RNA, 20 nt, Human
augaggagccucaguuuuga

SEQ ID NO: 69329 - RNA, 19 nt, Human
augaggagcguggacucug

SEQ ID NO: 69330 - RNA, 32 nt, Human
augaggagcuuccuccugauuggagugggaac

SEQ ID NO: 69331 - RNA, 32 nt, Human
augaggaggaacaggcagaagcucuccggagg

SEQ ID NO: 69332 - RNA, 18 nt, Human
augaggaggaacaguuga

SEQ ID NO: 69333 - RNA, 19 nt, Human
augaggaggaagaauuuga

SEQ ID NO: 69334 - RNA, 19 nt, Human
augaggaggaauaacuuga

SEQ ID NO: 69335 - RNA, 18 nt, Human
augaggaggacaacacug

SEQ ID NO: 69336 - RNA, 20 nt, Human
augaggaggaccaaccauga

SEQ ID NO: 69337 - RNA, 16 nt, Human
augaggaggaccacug

SEQ ID NO: 69338 - RNA, 18 nt, Human
augaggaggaccagugga

SEQ ID NO: 69339 - RNA, 19 nt, Human
augaggaggacggcaucuc

SEQ ID NO: 69340 - RNA, 17 nt, Human
augaggaggagaucugg

SEQ ID NO: 69341 - RNA, 18 nt, Human
augaggaggagaugucug

SEQ ID NO: 69342 - RNA, 17 nt, Human
augaggaggaggcccug

SEQ ID NO: 69343 - RNA, 31 nt, Human
augaggaggcagaugaugcagaugcugcugg

SEQ ID NO: 69344 - RNA, 32 nt, Human
augaggaggccugcugggagcuggaaaaguuc

SEQ ID NO: 69345 - RNA, 32 nt, Human
augaggagguacuaguuccaagcaacaaacuc

SEQ ID NO: 69346 - RNA, 32 nt, Human
augaggaggugaaucagggugggcaggugcug

SEQ ID NO: 69347 - RNA, 18 nt, Human
augaggaguacuuucuga

SEQ ID NO: 69348 - RNA, 32 nt, Human
augaggaguguugcucauuugugagccuucau

SEQ ID NO: 69349 - RNA, 21 nt, Human
augaggaugaggcccaggaga

SEQ ID NO: 69350 - RNA, 32 nt, Human
augaggaugcaggcacacugggcaagaggggg

SEQ ID NO: 69351 - RNA, 32 nt, Human
augaggauuauaauagcccugcuuuauuaaag

SEQ ID NO: 69352 - RNA, 21 nt, Human
augaggcaaaggaugcaguga

SEQ ID NO: 69353 - RNA, 32 nt, Human
augaggcacaacuauacuacauggacagagua

SEQ ID NO: 69354 - RNA, 32 nt, Human
augaggcacacagcaaguugcugucuacaaga

SEQ ID NO: 69355 - RNA, 32 nt, Human
augaggcaccacugcacucuagccugggcaag

SEQ ID NO: 69356 - RNA, 32 nt, Human
augaggcaccuugcuggagucucagauuccaa

SEQ ID NO: 69357 - RNA, 32 nt, Human
augaggcacgccugccuucuccccuccaagug

SEQ ID NO: 69358 - RNA, 32 nt, Human
augaggcagagccagaggaacagugcccacau

SEQ ID NO: 69359 - RNA, 32 nt, Human
augaggcagaggauggagcaggcugagccagg

SEQ ID NO: 69360 - RNA, 32 nt, Human
augaggcaggagaccugcuugaaccuggaggu

SEQ ID NO: 69361 - RNA, 32 nt, Human
augaggcaggcagaggugcgggucacccuuag

SEQ ID NO: 69362 - RNA, 32 nt, Human
augaggcaggugugagggacccgagcacuccu

SEQ ID NO: 69363 - RNA, 32 nt, Human
augaggcaguaggagguggggaagaaaagaag

SEQ ID NO: 69364 - RNA, 32 nt, Human
augaggccaaaggaccacagggcuaaggaugg

SEQ ID NO: 69365 - RNA, 23 nt, Human
augaggccacagcauuuuuuaaa

SEQ ID NO: 69366 - RNA, 32 nt, Human
augaggccaggaauucaagaccagccugagua

SEQ ID NO: 69367 - RNA, 32 nt, Human
augaggccaggaguucaagaccagccuggcca

SEQ ID NO: 69368 - RNA, 32 nt, Human
augaggcccaggauauggaguuguauagaaaa

SEQ ID NO: 69369 - RNA, 32 nt, Human
augaggcccugcaccuuccccaaaggaaccgc

SEQ ID NO: 69370 - RNA, 32 nt, Human
augaggcccuggagugcgcaaggagugcccgg

SEQ ID NO: 69371 - RNA, 32 nt, Human
augaggccuauguauucuacuguguuuaauac

SEQ ID NO: 69372 - RNA, 32 nt, Human
augaggccucaauacuuuucagucuuaauugu

SEQ ID NO: 69373 - RNA, 32 nt, Human
augaggccucggaggcugggguugagauuugg

SEQ ID NO: 69374 - RNA, 32 nt, Human
augaggccucuuggaccucugcucugaggcuu

SEQ ID NO: 69375 - RNA, 32 nt, Human
augaggccugcagguggccuauuuugacucag

SEQ ID NO: 69376 - RNA, 32 nt, Human
augaggcgagaggaggaggaggaggaggagaa

SEQ ID NO: 69377 - RNA, 32 nt, Human
augaggcggagcuccaggauggggaggggcuc

SEQ ID NO: 69378 - RNA, 32 nt, Human
augaggcucacuguaaacacuacauuguccug

SEQ ID NO: 69379 - RNA, 32 nt, Human
augaggcucaucagaacuagaucuugugagaa

SEQ ID NO: 69380 - RNA, 32 nt, Human
augaggcucaugggagguuuggacgggugcug

SEQ ID NO: 69381 - RNA, 32 nt, Human
augaggcucuucuaccccgugccugcaccucg

SEQ ID NO: 69382 - RNA, 32 nt, Human
augaggcugcaguccaugcagcuguucuugcc

SEQ ID NO: 69383 - RNA, 32 nt, Human
augaggcugcgcugcacuccucugcccugggg

SEQ ID NO: 69384 - RNA, 32 nt, Human
augaggcuggacugaggagggguaggccugca

SEQ ID NO: 69385 - RNA, 32 nt, Human
augaggcuuacaacuugcuaaccccaaaagaa

SEQ ID NO: 69386 - RNA, 32 nt, Human
augagggaaacugcccccaugauucaauuacc

SEQ ID NO: 69387 - RNA, 32 nt, Human
augagggaaagugaguuuugagggaggagugg

SEQ ID NO: 69388 - RNA, 25 nt, Human
augagggaagagccaaauagacuac

SEQ ID NO: 69389 - RNA, 32 nt, Human
augagggaaggugaguuuugagggaggagugg

SEQ ID NO: 69390 - RNA, 32 nt, Human
augagggagagaggagagaggagaggaaaggg

SEQ ID NO: 69391 - RNA, 32 nt, Human
augagggagauugaggcugcagugagcugugu

SEQ ID NO: 69392 - RNA, 32 nt, Human
augagggaggcaggcaauaugcagugaaaacc

SEQ ID NO: 69393 - RNA, 32 nt, Human
augagggaggucggggcugcagugagccaaga

SEQ ID NO: 69394 - RNA, 32 nt, Human
augagggagguggggcugggggccuggagugu

SEQ ID NO: 69395 - RNA, 32 nt, Human
augagggccauccugggucuguucccauggag

SEQ ID NO: 69396 - RNA, 32 nt, Human
augagggcccaggaggucaaggcuucagugag

SEQ ID NO: 69397 - RNA, 32 nt, Human
augagggcugaaaauauccuccccacaagggc

SEQ ID NO: 69398 - RNA, 32 nt, Human
augagggcugucuccccuuauucaccccuguc

SEQ ID NO: 69399 - RNA, 31 nt, Human
augaggggaaagagggaaaaagagccuguuu

SEQ ID NO: 69400 - RNA, 32 nt, Human
augaggggaagcugggguuugcagugguuuga

SEQ ID NO: 69401 - RNA, 32 nt, Human
augaggggacacaggggaggugccaucgggca

SEQ ID NO: 69402 - RNA, 32 nt, Human
augaggggacagugcagcuacaggauaugcca

SEQ ID NO: 69403 - RNA, 32 nt, Human
augaggggagcagcagcagccacacucccacc

SEQ ID NO: 69404 - RNA, 32 nt, Human
augaggggcguccauucuccuccauacauccc

SEQ ID NO: 69405 - RNA, 32 nt, Human
augaggggcugcaccuucccccaggaaugacc

SEQ ID NO: 69406 - RNA, 32 nt, Human
augagggggaaagaaggagaaaggaaagaaaa

SEQ ID NO: 69407 - RNA, 32 nt, Human
augagggguagugggggauggaagagaguacc

SEQ ID NO: 69408 - RNA, 16 nt, Human
augaggggucacucug

SEQ ID NO: 69409 - RNA, 32 nt, Human
augagggugaaguuuggcaguuacccaagaga

SEQ ID NO: 69410 - RNA, 31 nt, Human
augaggguuauuuucugaaaugcagauggga

SEQ ID NO: 69411 - RNA, 32 nt, Human
augaggguucacucuucuuguuguacaugcug

SEQ ID NO: 69412 - RNA, 32 nt, Human
augaggguucagaagaggacuugcuguggaga

SEQ ID NO: 69413 - RNA, 25 nt, Human
augaggguucaucaucccucccugc

SEQ ID NO: 69414 - RNA, 32 nt, Human
augaggguucaucaucccucccugccuaagga

SEQ ID NO: 69415 - RNA, 32 nt, Human
augaggguuggaaacauuaauaguguuaaggu

SEQ ID NO: 69416 - RNA, 23 nt, Human
augagguaacugaggcucaggga

SEQ ID NO: 69417 - RNA, 32 nt, Human
augagguagaccacgcucaguucugcccaggc

SEQ ID NO: 69418 - RNA, 32 nt, Human
augagguauacaacuaguauuuaagauaccau

SEQ ID NO: 69419 - RNA, 32 nt, Human
augagguauucuguacuucucaguuaagacuu

SEQ ID NO: 69420 - RNA, 32 nt, Human
augaggucaagagaucgagaccagccuggcca

SEQ ID NO: 69421 - RNA, 31 nt, Human
augaggucacucagagugaagcgggagaaca

SEQ ID NO: 69422 - RNA, 32 nt, Human
augaggucagaagauaaagaccacccuggcca

SEQ ID NO: 69423 - RNA, 32 nt, Human
augaggucagaaguucaagaccagccuagcca

SEQ ID NO: 69424 - RNA, 32 nt, Human
augaggucagaaguucgagaccagccuaacca

SEQ ID NO: 69425 - RNA, 32 nt, Human
augaggucagcagaucgagaccagccuggcca

SEQ ID NO: 69426 - RNA, 32 nt, Human
augaggucagcaguugagaccagccugaacaa

SEQ ID NO: 69427 - RNA, 32 nt, Human
augaggucaggacuuccagaccagccugguca

SEQ ID NO: 69428 - RNA, 32 nt, Human
augaggucaggagaucaagaccacccuggcua

SEQ ID NO: 69429 - RNA, 32 nt, Human
augaggucaggagaucaagaccauccuggcca

SEQ ID NO: 69430 - RNA, 32 nt, Human
augaggucaggagaucaagaccauccuggcua

SEQ ID NO: 69431 - RNA, 32 nt, Human
augaggucaggagaucaagaccaucguggcuu

SEQ ID NO: 69432 - RNA, 32 nt, Human
augaggucaggagaucaagaccaucuuggcua

SEQ ID NO: 69433 - RNA, 32 nt, Human
augaggucaggagauggagaccauccuggcca

SEQ ID NO: 69434 - RNA, 32 nt, Human
augaggucaggagauggagaccauccuggcua

SEQ ID NO: 69435 - RNA, 32 nt, Human
augaggucaggaguucaagaccagccuagcca

SEQ ID NO: 69436 - RNA, 32 nt, Human
augaggucaggaguucaagaccagccugacca

SEQ ID NO: 69437 - RNA, 32 nt, Human
augaggucaggaguucaagaccagccuggcca

SEQ ID NO: 69438 - RNA, 32 nt, Human
augaggucaggaguuccagaccagccugacca

SEQ ID NO: 69439 - RNA, 32 nt, Human
augaggucaggaguuccagaccagccuggcca

SEQ ID NO: 69440 - RNA, 32 nt, Human
augaggucaggaguucgagaccagcccgccca

SEQ ID NO: 69441 - RNA, 32 nt, Human
augaggucaggaguucgagaccagccuaaaca

SEQ ID NO: 69442 - RNA, 32 nt, Human
augaggucaggaguucgagaccagccugacca

SEQ ID NO: 69443 - RNA, 32 nt, Human
augaggucaggaguucgagaccagccuggcca

SEQ ID NO: 69444 - RNA, 32 nt, Human
augaggucaggaguuugagaccagccugacca

SEQ ID NO: 69445 - RNA, 32 nt, Human
augaggucaggaguuugagaccagccuggcca

SEQ ID NO: 69446 - RNA, 32 nt, Human
augaggucaguaguucgagaccagccuggcca

SEQ ID NO: 69447 - RNA, 32 nt, Human
augaggucaguaguuugagaccagccuggcca

SEQ ID NO: 69448 - RNA, 32 nt, Human
augagguccaagcugagagaaaagagucauga

SEQ ID NO: 69449 - RNA, 32 nt, Human
augaggucgggaguucaagaccagcuuggcca

SEQ ID NO: 69450 - RNA, 32 nt, Human
augaggucgggaguucgaaaccagccuggcca

SEQ ID NO: 69451 - RNA, 32 nt, Human
augaggucuaaugugccgcucuucuauuucua

SEQ ID NO: 69452 - RNA, 32 nt, Human
augaggucuaggaacauacuucagcucacaca

SEQ ID NO: 69453 - RNA, 32 nt, Human
augaggucucacuauguugcccaggcuggacu

SEQ ID NO: 69454 - RNA, 32 nt, Human
augaggucucacuauguugcccaggcuggucu

SEQ ID NO: 69455 - RNA, 32 nt, Human
augaggucucccuauguugcccaggcuggucu

SEQ ID NO: 69456 - RNA, 19 nt, Human
augaggucucgccauguug

SEQ ID NO: 69457 - RNA, 32 nt, Human
augaggucugcacucgggccggggugggugcc

SEQ ID NO: 69458 - RNA, 32 nt, Human
augaggucuugcuauguugcccaagcuaguuu

SEQ ID NO: 69459 - RNA, 32 nt, Human
augaggugaagaucacugucaucuaaagccgg

SEQ ID NO: 69460 - RNA, 32 nt, Human
augaggugaagcaaaggaaggcccuguaaaua

SEQ ID NO: 69461 - RNA, 18 nt, Human
augaggugacuauucuga

SEQ ID NO: 69462 - RNA, 32 nt, Human
augagguggaguuuuacucuuguugucuaggc

SEQ ID NO: 69463 - RNA, 32 nt, Human
augagguggggccuggccugcccagcucagag

SEQ ID NO: 69464 - RNA, 32 nt, Human
augagguggucaccaggauugagcuuccucag

SEQ ID NO: 69465 - RNA, 32 nt, Human
augagguuaaugaaguaccaagcugugcuuga

SEQ ID NO: 69466 - RNA, 32 nt, Human
augagguuacuacuaguaucuaccucaaagcg

SEQ ID NO: 69467 - RNA, 32 nt, Human
augagguuccagcaacagcugggaucacccau

SEQ ID NO: 69468 - RNA, 32 nt, Human
augagguucccugcaacccccgcccuccagcc

SEQ ID NO: 69469 - RNA, 32 nt, Human
augagguuggacaaggcuucacagaauuucug

SEQ ID NO: 69470 - RNA, 32 nt, Human
augagguugggaguucgagaccagccugacca

SEQ ID NO: 69471 - RNA, 22 nt, Human
augagguuguuaauuagaguca

SEQ ID NO: 69472 - RNA, 20 nt, Human
augagguuguuuggaaaguc

SEQ ID NO: 69473 - RNA, 32 nt, Human
augaguaaaagcuuccuaaggccuucccagga

SEQ ID NO: 69474 - RNA, 32 nt, Human
augaguaaaagcuuccugaggcuuccccagaa

SEQ ID NO: 69475 - RNA, 20 nt, Human
augaguaaaauccacaggca

SEQ ID NO: 69476 - RNA, 32 nt, Human
augaguaaacccaguagcaucuuuuugagugu

SEQ ID NO: 69477 - RNA, 32 nt, Human
augaguaacauaucgucucucccuucaaggua

SEQ ID NO: 69478 - RNA, 32 nt, Human
augaguaacuugcauucacuuccuucaaacca

SEQ ID NO: 69479 - RNA, 25 nt, Human
augaguaagaggcagacagcagagg

SEQ ID NO: 69480 - RNA, 32 nt, Human
augaguaagucuagagaggacauugcaccuuu

SEQ ID NO: 69481 - RNA, 32 nt, Human
augaguacagcagagaccuuccugcuuuuuac

SEQ ID NO: 69482 - RNA, 32 nt, Human
augaguagccacugcacuccagccugggcaac

SEQ ID NO: 69483 - RNA, 32 nt, Human
augaguagcgcuauaguuacuguccuguugau

SEQ ID NO: 69484 - RNA, 32 nt, Human
augaguaggggcacuauuguucccuccaugcc

SEQ ID NO: 69485 - RNA, 32 nt, Human
augaguagguguaggaaggagaaauguggaag

SEQ ID NO: 69486 - RNA, 32 nt, Human
augaguaguauaagccaccuauuuuuacuucc

SEQ ID NO: 69487 - RNA, 32 nt, Human
augaguaucacauacacccagcucuuuucagu

SEQ ID NO: 69488 - RNA, 32 nt, Human
augaguaugccgcugcacuccagccuggggga

SEQ ID NO: 69489 - RNA, 32 nt, Human
augaguauuuggaagaaaauugaccuagaaaa

SEQ ID NO: 69490 - RNA, 32 nt, Human
augagucaagaagggucucuuccuuuaucauu

SEQ ID NO: 69491 - RNA, 20 nt, Human
augagucaaggaguguacac

SEQ ID NO: 69492 - RNA, 30 nt, Human
augagucaauuaaaccucuuuucuuuauaa

SEQ ID NO: 69493 - RNA, 32 nt, Human
augagucaauuaaaccucuuuucuuuauaaau

SEQ ID NO: 69494 - RNA, 32 nt, Human
augagucacagagcaggcugggcacgguggcu

SEQ ID NO: 69495 - RNA, 32 nt, Human
augagucaggagcaaggaacguccagggagug

SEQ ID NO: 69496 - RNA, 32 nt, Human
augagucauggucaugauuauaaacaucagcc

SEQ ID NO: 69497 - RNA, 32 nt, Human
augaguccaggaguucgagaccagccuaggca

SEQ ID NO: 69498 - RNA, 32 nt, Human
augaguccauucaguucaugccgugcaauuuu

SEQ ID NO: 69499 - RNA, 32 nt, Human
augagucccacauccucuuuucauccauaagc

SEQ ID NO: 69500 - RNA, 32 nt, Human
augaguccccaagcuccucuggcugugggacc

SEQ ID NO: 69501 - RNA, 32 nt, Human
augaguccucccaggugaccucagcccuccca

SEQ ID NO: 69502 - RNA, 22 nt, Human
augagucgcuuaacccuugaca

SEQ ID NO: 69503 - RNA, 24 nt, Human
augagucgcuuugagcuucugaca

SEQ ID NO: 69504 - RNA, 32 nt, Human
augagucucagacaucuuuaaacaucuuuaaa

SEQ ID NO: 69505 - RNA, 32 nt, Human
augagucucgcucugcacuccagccuggcgac

SEQ ID NO: 69506 - RNA, 32 nt, Human
augagucuggaggccccaccucccuggggcuc

SEQ ID NO: 69507 - RNA, 32 nt, Human
augagucuucuuucucaauaccugcccugucu

SEQ ID NO: 69508 - RNA, 32 nt, Human
augagugaaagggagccagaagacugauugga

SEQ ID NO: 69509 - RNA, 28 nt, Human
augagugaaaggguugccucaucaagca

SEQ ID NO: 69510 - RNA, 32 nt, Human
augagugaaggcuggagccagggagcgcugga

SEQ ID NO: 69511 - RNA, 32 nt, Human
augagugaaguggucagaagcagccagcagug

SEQ ID NO: 69512 - RNA, 32 nt, Human
augagugaaguuauagcaaaucaagcugcaca

SEQ ID NO: 69513 - RNA, 32 nt, Human
augagugacuccacauccagagcugccucccu

SEQ ID NO: 69514 - RNA, 32 nt, Human
augagugagaacaggcgguguuugguuuucug

SEQ ID NO: 69515 - RNA, 32 nt, Human
augagugagaacaugcgguguuugguuuucug

SEQ ID NO: 69516 - RNA, 32 nt, Human
augagugagccccagcacccgugagcucacca

SEQ ID NO: 69517 - RNA, 32 nt, Human
augagugcaaguuuacaaaucaaagaagcauu

SEQ ID NO: 69518 - RNA, 32 nt, Human
augagugcauugcugagccaucauguuccccu

SEQ ID NO: 69519 - RNA, 32 nt, Human
augagugccagccugagccugcauggugccgc

SEQ ID NO: 69520 - RNA, 32 nt, Human
augagugccaucauggcucuccacucagacug

SEQ ID NO: 69521 - RNA, 32 nt, Human
augagugccuguaguccaagcuacucaagagg

SEQ ID NO: 69522 - RNA, 32 nt, Human
augagugcuaagagccucuggaagggagggcu

SEQ ID NO: 69523 - RNA, 32 nt, Human
augagugcugaguaguauugcagagaauguga

SEQ ID NO: 69524 - RNA, 32 nt, Human
augaguggcaaaaauugucugacucacagaaa

SEQ ID NO: 69525 - RNA, 32 nt, Human
augaguggcaacucccugggggcacaggaaac

SEQ ID NO: 69526 - RNA, 32 nt, Human
augaguggccugagccuuaacaacauguuuuu

SEQ ID NO: 69527 - RNA, 32 nt, Human
augaguggcuucucccugucauccccaggggu

SEQ ID NO: 69528 - RNA, 32 nt, Human
augagugggaggggagaaagcacacagagcuc

SEQ ID NO: 69529 - RNA, 32 nt, Human
augagugguucagccaucaccaccaguggcca

SEQ ID NO: 69530 - RNA, 32 nt, Human
augagugucugcuaugggccauucauugugcu

SEQ ID NO: 69531 - RNA, 32 nt, Human
augagugugagagcugggaugggcaggaaggg

SEQ ID NO: 69532 - RNA, 32 nt, Human
augagugugcagaugaguuagcuugacaaccu

SEQ ID NO: 69533 - RNA, 32 nt, Human
augagugugcugcucaccuucccaaguucugu

SEQ ID NO: 69534 - RNA, 32 nt, Human
augaguguggacauggcuucaguaggaaaugu

SEQ ID NO: 69535 - RNA, 32 nt, Human
augaguguggcccugaggaccagggcuggcag

SEQ ID NO: 69536 - RNA, 32 nt, Human
augaguguguuggggugagcaccaacgcccca

SEQ ID NO: 69537 - RNA, 32 nt, Human
augaguguuaccuggggaaagggcuagcaaga

SEQ ID NO: 69538 - RNA, 32 nt, Human
augaguguuuuguucuaccugcuuucaagucu

SEQ ID NO: 69539 - RNA, 32 nt, Human
augaguuaaaauauucaccagauggaacuuac

SEQ ID NO: 69540 - RNA, 32 nt, Human
augaguuaacugcucaagacccugugccacug

SEQ ID NO: 69541 - RNA, 32 nt, Human
augaguuaggcaggagcccuuccuccuugauu

SEQ ID NO: 69542 - RNA, 20 nt, Human
augaguuauauagcauccuu

SEQ ID NO: 69543 - RNA, 32 nt, Human
augaguuauuaggauuaaaguaagaauuuccu

SEQ ID NO: 69544 - RNA, 31 nt, Human
augaguucaaauguucccaugcuaagcugag

SEQ ID NO: 69545 - RNA, 32 nt, Human
augaguucaagaccagccugaccaacauggcc

SEQ ID NO: 69546 - RNA, 32 nt, Human
augaguucaagaccagccugggcaacauggua

SEQ ID NO: 69547 - RNA, 32 nt, Human
augaguucagguccuuuguagggacguggaua

SEQ ID NO: 69548 - RNA, 32 nt, Human
augaguucauuuguagcuuuagaauuuuaaaa

SEQ ID NO: 69549 - RNA, 32 nt, Human
augaguuccagaaaguaaaggugacaucggaa

SEQ ID NO: 69550 - RNA, 32 nt, Human
augaguucgaaaccagccuggccaaaacagug

SEQ ID NO: 69551 - RNA, 32 nt, Human
augaguucgagaccagccuggccaacaugaug

SEQ ID NO: 69552 - RNA, 32 nt, Human
augaguucgagaccagccuggccaacauggug

SEQ ID NO: 69553 - RNA, 32 nt, Human
augaguucucaggggucaaguucagaaacggc

SEQ ID NO: 69554 - RNA, 32 nt, Human
augaguugaaguugccuucccggggcucauuu

SEQ ID NO: 69555 - RNA, 32 nt, Human
augaguugccagggcugagagagauggagaag

SEQ ID NO: 69556 - RNA, 32 nt, Human
augaguugugaucaccccaaaaggcacaguug

SEQ ID NO: 69557 - RNA, 32 nt, Human
augaguuuccagcagcagagcuuuagguauga

SEQ ID NO: 69558 - RNA, 32 nt, Human
augaguuugacagaugcauacaugcauguaac

SEQ ID NO: 69559 - RNA, 32 nt, Human
augaguuugagaccagccuggguaacauagca

SEQ ID NO: 69560 - RNA, 32 nt, Human
augaguuugcagccaaggcuacagaggaucaa

SEQ ID NO: 69561 - RNA, 32 nt, Human
augaguuugcuaaacccagcugugauaccuca

SEQ ID NO: 69562 - RNA, 32 nt, Human
augaguuugcuacugcugugggggcauguggg

SEQ ID NO: 69563 - RNA, 32 nt, Human
augaguuugguucauucuggcaugcuguaccg

SEQ ID NO: 69564 - RNA, 32 nt, Human
augaguuugugugguucuguuuuccauuuuug

SEQ ID NO: 69565 - RNA, 32 nt, Human
augaguuuuuaaaaucagguggacuuagguga

SEQ ID NO: 69566 - RNA, 32 nt, Human
augaguuuuucaugauggugaugaguagcacu

SEQ ID NO: 69567 - RNA, 32 nt, Human
augaguuuuugccauguugcccagacuggucu

SEQ ID NO: 69568 - RNA, 31 nt, Human
augauaaagagacagugauauuggaacuugc

SEQ ID NO: 69569 - RNA, 32 nt, Human
augauaacaaaagguuucuugugacugguaac

SEQ ID NO: 69570 - RNA, 25 nt, Human
augauaacaccacugcacuccugcu

SEQ ID NO: 69571 - RNA, 32 nt, Human
augauaacauuuccucucaaaccuuaucccuu

SEQ ID NO: 69572 - RNA, 32 nt, Human
augauaaccugacaugccauucucaaaaugcu

SEQ ID NO: 69573 - RNA, 32 nt, Human
augauaacuagguacagcgacuuuaaauacag

SEQ ID NO: 69574 - RNA, 32 nt, Human
augauaacugguuuguuuguuuguuuguuucu

SEQ ID NO: 69575 - RNA, 32 nt, Human
augauaagaagauggagaagaaaacccgcaaa

SEQ ID NO: 69576 - RNA, 19 nt, Human
augauaaggcucugaaaug

SEQ ID NO: 69577 - RNA, 32 nt, Human
augauaauaacagccacagcugggcaggucgu

SEQ ID NO: 69578 - RNA, 32 nt, Human
augauacaacuugcccugggucacauaguugg

SEQ ID NO: 69579 - RNA, 32 nt, Human
augauacacauguguauguguacauugggucc

SEQ ID NO: 69580 - RNA, 32 nt, Human
augauaccaagugcugaaccugagagcagccc

SEQ ID NO: 69581 - RNA, 32 nt, Human
augauaccuaccucacaggggguugugaggau

SEQ ID NO: 69582 - RNA, 32 nt, Human
augauaccucucccucccuuuguccacaugua

SEQ ID NO: 69583 - RNA, 32 nt, Human
augauaccugcucuuuauuucaggaugagagg

SEQ ID NO: 69584 - RNA, 32 nt, Human
augauaccuggaaagcagaugaccucagaaaa

SEQ ID NO: 69585 - RNA, 32 nt, Human
augauaccuuuacaggggcagaaaaaucccca

SEQ ID NO: 69586 - RNA, 32 nt, Human
augauacucuccccuuaccuuuccucucucca

SEQ ID NO: 69587 - RNA, 32 nt, Human
augauacuucgacacuguucuuagcucaauga

SEQ ID NO: 69588 - RNA, 32 nt, Human
augauagaaccuuugauuuuucaaguggguau

SEQ ID NO: 69589 - RNA, 32 nt, Human
augauagagcagcugcucacacaggaggccgg

SEQ ID NO: 69590 - RNA, 32 nt, Human
augauagcaccacugcacuccagccugggcaa

SEQ ID NO: 69591 - RNA, 32 nt, Human
augauagcaccacugcacuccagccuggguga

SEQ ID NO: 69592 - RNA, 32 nt, Human
augauagcaccacugcaguccagccugggcga

SEQ ID NO: 69593 - RNA, 32 nt, Human
augauagcagaaugugcuucucucuggcagcu

SEQ ID NO: 69594 - RNA, 32 nt, Human
augauagcauuuuuccucucuucagucacuga

SEQ ID NO: 69595 - RNA, 32 nt, Human
augauaggcauucucauagccagggacagauu

SEQ ID NO: 69596 - RNA, 32 nt, Human
augauaggcgugagccaccacacccggccaag

SEQ ID NO: 69597 - RNA, 32 nt, Human
augauagggccugguuuacauucauuuaacuc

SEQ ID NO: 69598 - RNA, 32 nt, Human
augauaguaccacugcacuccagccugggcaa

SEQ ID NO: 69599 - RNA, 32 nt, Human
augauaguauuuuuaugcacucuucucccaca

SEQ ID NO: 69600 - RNA, 32 nt, Human
augauauaggagcuaggggaaggggguuguuu

SEQ ID NO: 69601 - RNA, 22 nt, Human
augauauaugucuucccuucca

SEQ ID NO: 69602 - RNA, 32 nt, Human
augauaucugggucccaaagagagcagcuuua

SEQ ID NO: 69603 - RNA, 23 nt, Human
augauaugaaugugaagcauaaa

SEQ ID NO: 69604 - RNA, 32 nt, Human
augauaugacucuccugcuugugccagagcca

SEQ ID NO: 69605 - RNA, 21 nt, Human
augauaugcauugacaagcuc

SEQ ID NO: 69606 - RNA, 32 nt, Human
augauaugccuguauguuggacuuugcuuuug

SEQ ID NO: 69607 - RNA, 32 nt, Human
augauauguucaaaugaaacacacacucuguu

SEQ ID NO: 69608 - RNA, 32 nt, Human
augauauugagauuguuucugagccaugugcu

SEQ ID NO: 69609 - RNA, 32 nt, Human
augauauugagugucggguggggaaggaggcc

SEQ ID NO: 69610 - RNA, 32 nt, Human
augauauuguuacugaguuuggugauugagcu

SEQ ID NO: 69611 - RNA, 32 nt, Human
augaucaaaccacuguaguccagccugaguga

SEQ ID NO: 69612 - RNA, 21 nt, Human
augaucaagauggugauggua

SEQ ID NO: 69613 - RNA, 32 nt, Human
augaucaauauugcaggagagcuuuuuguaca

SEQ ID NO: 69614 - RNA, 32 nt, Human
augaucacacaucuguauuccagccugggcaa

SEQ ID NO: 69615 - RNA, 32 nt, Human
augaucacaccaccacacuccagccugagcag

SEQ ID NO: 69616 - RNA, 32 nt, Human
augaucacaccaccucacuccagccugggcaa

SEQ ID NO: 69617 - RNA, 32 nt, Human
augaucacaccacuacacuccagccuggacaa

SEQ ID NO: 69618 - RNA, 32 nt, Human
augaucacaccacugcaauccagccucgguaa

SEQ ID NO: 69619 - RNA, 32 nt, Human
augaucacaccacugcaccccagccuggguga

SEQ ID NO: 69620 - RNA, 32 nt, Human
augaucacaccacugcacuccagccuggguga

SEQ ID NO: 69621 - RNA, 32 nt, Human
augaucacaccacugcacuccagccugggugu

SEQ ID NO: 69622 - RNA, 32 nt, Human
augaucacaccacugcacucuagccugggcaa

SEQ ID NO: 69623 - RNA, 32 nt, Human
augaucacaccacuguacuccagccugggcaa

SEQ ID NO: 69624 - RNA, 32 nt, Human
augaucacaggugauucacacguacacacaua

SEQ ID NO: 69625 - RNA, 32 nt, Human
augaucacaucacugcaguccagccuggguga

SEQ ID NO: 69626 - RNA, 32 nt, Human
augaucacgauccugcacuccagccugggcaa

SEQ ID NO: 69627 - RNA, 32 nt, Human
augaucacgccacugcacuccagccugggcga

SEQ ID NO: 69628 - RNA, 32 nt, Human
augaucacgccacugcacuccagccuggguaa

SEQ ID NO: 69629 - RNA, 32 nt, Human
augaucacucaucuugaguuaauuagaaaaua

SEQ ID NO: 69630 - RNA, 32 nt, Human
augaucagccgugggagccacgggaaucaauu

SEQ ID NO: 69631 - RNA, 32 nt, Human
augaucagcuucucccuuucuucauuuucugu

SEQ ID NO: 69632 - RNA, 32 nt, Human
augaucaguggacagucugcucuagaugagcu

SEQ ID NO: 69633 - RNA, 32 nt, Human
augaucauaccacugcacuccagccuggguga

SEQ ID NO: 69634 - RNA, 32 nt, Human
augaucauagccccaggaacccuugagguucu

SEQ ID NO: 69635 - RNA, 32 nt, Human
augaucaucacugagccagugugguuugucua

SEQ ID NO: 69636 - RNA, 32 nt, Human
augaucaucuuggcaguucuugugcuuuuacu

SEQ ID NO: 69637 - RNA, 32 nt, Human
augaucaugccacugcacuccaaccugggcaa

SEQ ID NO: 69638 - RNA, 32 nt, Human
augaucaugccacugcacuccagcauggguga

SEQ ID NO: 69639 - RNA, 32 nt, Human
augaucaugccacugcacuccagccugggcaa

SEQ ID NO: 69640 - RNA, 32 nt, Human
augaucaugccacugcacuccagccuggguga

SEQ ID NO: 69641 - RNA, 32 nt, Human
augaucaugccacugcacuccagcuuggguga

SEQ ID NO: 69642 - RNA, 32 nt, Human
augaucaugccacugcacuccagucuggauga

SEQ ID NO: 69643 - RNA, 32 nt, Human
augaucaugccacugcacuccagucuggguga

SEQ ID NO: 69644 - RNA, 32 nt, Human
augaucaugccacugcacuccauccuggguga

SEQ ID NO: 69645 - RNA, 32 nt, Human
augaucaugccacugcauuccagccugggcaa

SEQ ID NO: 69646 - RNA, 32 nt, Human
augaucaugccauugcacuccagccuggguga

SEQ ID NO: 69647 - RNA, 32 nt, Human
augaucaugccauugucuuccagccugagugu

SEQ ID NO: 69648 - RNA, 32 nt, Human
augaucaugccugugaauagccacugcacuug

SEQ ID NO: 69649 - RNA, 32 nt, Human
augaucauuaacaucagccucucugaucaaag

SEQ ID NO: 69650 - RNA, 32 nt, Human
augaucauuccacugcauuucagccuggggga

SEQ ID NO: 69651 - RNA, 32 nt, Human
augaucauucuuuagaugacgaauuaacccuu

SEQ ID NO: 69652 - RNA, 32 nt, Human
augaucauugcuuuuucucuuuacaggggaga

SEQ ID NO: 69653 - RNA, 32 nt, Human
augauccaaacuugauaaaggacaugaaaaag

SEQ ID NO: 69654 - RNA, 32 nt, Human
augauccacagaauucacuuuaugugagaucu

SEQ ID NO: 69655 - RNA, 32 nt, Human
augaucccaggaguuuaagaccagccugggca

SEQ ID NO: 69656 - RNA, 32 nt, Human
augaucccauuaacucgaugcugguaucuaca

SEQ ID NO: 69657 - RNA, 32 nt, Human
augauccggauuuaauuugauaucacagucua

SEQ ID NO: 69658 - RNA, 32 nt, Human
augauccuaccacugcacuucagccuagguga

SEQ ID NO: 69659 - RNA, 32 nt, Human
augauccugcaagcccugccuuccuuccuggg

SEQ ID NO: 69660 - RNA, 32 nt, Human
augauccugcagcaguucugggcccuaugcca

SEQ ID NO: 69661 - RNA, 32 nt, Human
augauccugccacugcacuccagccugggcga

SEQ ID NO: 69662 - RNA, 32 nt, Human
augauccuggaguguggaggcagcagcggcac

SEQ ID NO: 69663 - RNA, 32 nt, Human
augauccuuacaaguaaacagaagagaccaca

SEQ ID NO: 69664 - RNA, 32 nt, Human
augauccuuccagugagcaauucuuucuggug

SEQ ID NO: 69665 - RNA, 32 nt, Human
augaucgagccacugcacuccagccugggcaa

SEQ ID NO: 69666 - RNA, 32 nt, Human
augaucgaguuacugcacuccagccuggguga

SEQ ID NO: 69667 - RNA, 32 nt, Human
augaucgcaccacugcacccaaaccuggggag

SEQ ID NO: 69668 - RNA, 32 nt, Human
augaucgcaccacugcacuccagccuaggcga

SEQ ID NO: 69669 - RNA, 32 nt, Human
augaucgcaccacugcacuccagccuggguga

SEQ ID NO: 69670 - RNA, 32 nt, Human
augaucgcaccacugcacucuagccuggguga

SEQ ID NO: 69671 - RNA, 32 nt, Human
augaucgcaccacugcauuccagaccccaucu

SEQ ID NO: 69672 - RNA, 32 nt, Human
augaucgcaccauugcacuccagccugaguga

SEQ ID NO: 69673 - RNA, 32 nt, Human
augaucgcaucaguccacuccagccugagcaa

SEQ ID NO: 69674 - RNA, 32 nt, Human
augaucgcgacacugcacuccagccuggguga

SEQ ID NO: 69675 - RNA, 32 nt, Human
augaucgcgccacuacacuccagccugagcaa

SEQ ID NO: 69676 - RNA, 32 nt, Human
augaucgcgccacugcacuccagcccggguga

SEQ ID NO: 69677 - RNA, 32 nt, Human
augaucgcgccacugcacuccaggcugggcaa

SEQ ID NO: 69678 - RNA, 32 nt, Human
augaucgcgccacugcacuccugccugggcaa

SEQ ID NO: 69679 - RNA, 32 nt, Human
augaucgggaggaggaagaggagaauaaggag

SEQ ID NO: 69680 - RNA, 32 nt, Human
augaucguaccacugcacuccagccuagguga

SEQ ID NO: 69681 - RNA, 32 nt, Human
augaucguaugcugcuagacuacuucuuuucu

SEQ ID NO: 69682 - RNA, 32 nt, Human
augaucgugccacuacacuccagccuggguga

SEQ ID NO: 69683 - RNA, 32 nt, Human
augaucgugccacugcacuccagccugggcaa

SEQ ID NO: 69684 - RNA, 32 nt, Human
augaucucaccacuacacuccagccuggguga

SEQ ID NO: 69685 - RNA, 32 nt, Human
augaucucaccacuguacuccagccuggguga

SEQ ID NO: 69686 - RNA, 32 nt, Human
augaucucaccaugcacuccagccuagacaac

SEQ ID NO: 69687 - RNA, 32 nt, Human
augaucucacugcaaccuccaucuccugucuc

SEQ ID NO: 69688 - RNA, 32 nt, Human
augaucucagaugcaggggcugguuuuggggu

SEQ ID NO: 69689 - RNA, 32 nt, Human
augaucucaggagauguguauggguucagcuu

SEQ ID NO: 69690 - RNA, 32 nt, Human
augaucucucuagcuuugucauaguuauguga

SEQ ID NO: 69691 - RNA, 32 nt, Human
augaucucugcagcauuuuucuuggaaccucu

SEQ ID NO: 69692 - RNA, 32 nt, Human
augaucucugcucuucccucucccagauuggu

SEQ ID NO: 69693 - RNA, 32 nt, Human
augaucucuggaggcagaaugagggagugagc

SEQ ID NO: 69694 - RNA, 32 nt, Human
augaucucuucccauuuaucagauuaccuuuu

SEQ ID NO: 69695 - RNA, 32 nt, Human
augaucucuugcuguuucaucaggggaaagca

SEQ ID NO: 69696 - RNA, 32 nt, Human
augaucucuuuauuagugaaucaugcuuauuu

SEQ ID NO: 69697 - RNA, 32 nt, Human
augaucugcccaccucugccucccaaagugcu

SEQ ID NO: 69698 - RNA, 32 nt, Human
augaucugccgcuguuucugcacagaaaugag

SEQ ID NO: 69699 - RNA, 32 nt, Human
augaucugucuccagccccuuccuucugccca

SEQ ID NO: 69700 - RNA, 32 nt, Human
augaucugugugaucuugaaaaaguggcuuaa

SEQ ID NO: 69701 - RNA, 32 nt, Human
augaucuguuuaugcgauaacuccuuuuuguu

SEQ ID NO: 69702 - RNA, 32 nt, Human
augaucuuaugcacaaagauaacuggaggauu

SEQ ID NO: 69703 - RNA, 32 nt, Human
augaucuugaacuuuccagccuccaggauugu

SEQ ID NO: 69704 - RNA, 32 nt, Human
augaucuugauucccggguuucccaggagcgu

SEQ ID NO: 69705 - RNA, 32 nt, Human
augaucuugccaaggaguugggcuguuccuac

SEQ ID NO: 69706 - RNA, 17 nt, Human
augaucuugcccuugcc

SEQ ID NO: 69707 - RNA, 32 nt, Human
augaucuuggcagaugugaucaaguuaagggu

SEQ ID NO: 69708 - RNA, 32 nt, Human
augaucuuguguuuugcuauccuuuuuacugu

SEQ ID NO: 69709 - RNA, 22 nt, Human
augaugaaaaggguuuuuguau

SEQ ID NO: 69710 - RNA, 32 nt, Human
augaugaaagagacaauguaauacuguugguc

SEQ ID NO: 69711 - RNA, 32 nt, Human
augaugaaauacaggccuccaccaaauuggug

SEQ ID NO: 69712 - RNA, 32 nt, Human
augaugaaauuuccagacagaaagagcccuuu

SEQ ID NO: 69713 - RNA, 32 nt, Human
augaugaacauacaguauucauuaaugcagcg

SEQ ID NO: 69714 - RNA, 32 nt, Human
augaugaacccccuucccucuggcaggagaac

SEQ ID NO: 69715 - RNA, 32 nt, Human
augaugaaggggaggaaggagaggaggaugaa

SEQ ID NO: 69716 - RNA, 32 nt, Human
augaugaauguauagguuagggaucuuuuggu

SEQ ID NO: 69717 - RNA, 32 nt, Human
augaugaauguauagguugagugaauaaccaa

SEQ ID NO: 69718 - RNA, 32 nt, Human
augaugaauuucccucauuugcucaauaaauc

SEQ ID NO: 69719 - RNA, 32 nt, Human
augaugaccacagcccaauccagggcuuccuc

SEQ ID NO: 69720 - RNA, 32 nt, Human
augaugaccagagacagaacugguccaucaug

SEQ ID NO: 69721 - RNA, 32 nt, Human
augaugaccagggccacauccggagggggcaa

SEQ ID NO: 69722 - RNA, 32 nt, Human
augaugacccuucuugaguuuugaacaccuga

SEQ ID NO: 69723 - RNA, 32 nt, Human
augaugacugcacugccaucgugggcagaugc

SEQ ID NO: 69724 - RNA, 32 nt, Human
augaugacuguaacuucuggcuucucaagaau

SEQ ID NO: 69725 - RNA, 32 nt, Human
augaugacuucugcugcuuccgucucuggaga

SEQ ID NO: 69726 - RNA, 32 nt, Human
augaugagaagugcugcggcugaggcaaagcu

SEQ ID NO: 69727 - RNA, 32 nt, Human
augaugagacacaaucacagcuucaaaucaca

SEQ ID NO: 69728 - RNA, 32 nt, Human
augaugagccuaucauuugauuugaguucuau

SEQ ID NO: 69729 - RNA, 32 nt, Human
augaugaggaggaggaugaggaugaggaggag

SEQ ID NO: 69730 - RNA, 32 nt, Human
augaugaggaugaccuaggcacccuacgcuag

SEQ ID NO: 69731 - RNA, 17 nt, Human
augaugaggccaguuga

SEQ ID NO: 69732 - RNA, 32 nt, Human
augaugagggagaucuuuauccaucucaaguu

SEQ ID NO: 69733 - RNA, 32 nt, Human
augaugauaacagaacuuuuccucuguaucac

SEQ ID NO: 69734 - RNA, 32 nt, Human
augaugauauagaauuguggcuuuaguagcac

SEQ ID NO: 69735 - RNA, 32 nt, Human
augaugaucaaccacaccucacauuugcuuca

SEQ ID NO: 69736 - RNA, 32 nt, Human
augaugaucauugugaaaauucugaguugaag

SEQ ID NO: 69737 - RNA, 32 nt, Human
augaugauccagaauauaauuuccuggaagac

SEQ ID NO: 69738 - RNA, 32 nt, Human
augaugaucccugacagcaaaaaguuucuuuu

SEQ ID NO: 69739 - RNA, 32 nt, Human
augaugaugaaggggguggggaagaagacaca

SEQ ID NO: 69740 - RNA, 32 nt, Human
augaugaugcucuggaaugcuuggggacuuug

SEQ ID NO: 69741 - RNA, 32 nt, Human
augaugaugguuuuuauuccuggcauccagag

SEQ ID NO: 69742 - RNA, 32 nt, Human
augaugcaggucucgacucaagccugacgggc

SEQ ID NO: 69743 - RNA, 32 nt, Human
augaugcaugcacagguuguacccacagacau

SEQ ID NO: 69744 - RNA, 32 nt, Human
augaugcauuuuaagguggaguacaguaagau

SEQ ID NO: 69745 - RNA, 32 nt, Human
augaugccacugcacuccagccugggcuacag

SEQ ID NO: 69746 - RNA, 32 nt, Human
augaugccauugcacuccagccugggcaacaa

SEQ ID NO: 69747 - RNA, 32 nt, Human
augaugccauuguccuggaugaugccaccucg

SEQ ID NO: 69748 - RNA, 32 nt, Human
augaugccuccagcuucguucuuuuugcugag

SEQ ID NO: 69749 - RNA, 32 nt, Human
augaugcgagcucaucuccuguccugggugug

SEQ ID NO: 69750 - RNA, 32 nt, Human
augaugcuacccgguuccacagacagggaaac

SEQ ID NO: 69751 - RNA, 31 nt, Human
augaugcucaauagcugugaugagguccaag

SEQ ID NO: 69752 - RNA, 32 nt, Human
augaugcuccaaugcuuccaugcuucgaggga

SEQ ID NO: 69753 - RNA, 32 nt, Human
augaugcucuggacauuuuaggaagcuuaagu

SEQ ID NO: 69754 - RNA, 32 nt, Human
augaugcuggggcuggagccaaagggagagga

SEQ ID NO: 69755 - RNA, 32 nt, Human
augaugcuguuacugagaauaaugaaaaucau

SEQ ID NO: 69756 - RNA, 32 nt, Human
augauggaaggacuuacgguaucagauaccaa

SEQ ID NO: 69757 - RNA, 32 nt, Human
augauggaaugaauagaaaacuuuuucacuca

SEQ ID NO: 69758 - RNA, 32 nt, Human
augauggaggcuguggucagaaacaggucaau

SEQ ID NO: 69759 - RNA, 32 nt, Human
augauggaggcuguggucagaaacaggucagu

SEQ ID NO: 69760 - RNA, 32 nt, Human
augauggagggcgugcaguaggaguggacagu

SEQ ID NO: 69761 - RNA, 32 nt, Human
augauggcaaugaaguggcucccaaugggcag

SEQ ID NO: 69762 - RNA, 22 nt, Human
augauggcacaugccuguaauc

SEQ ID NO: 69763 - RNA, 32 nt, Human
augauggcaccacugcacuccagccugggaga

SEQ ID NO: 69764 - RNA, 32 nt, Human
augauggcaccacugcacuccagccugggcaa

SEQ ID NO: 69765 - RNA, 32 nt, Human
augauggcaccacugcacuucagccuggguga

SEQ ID NO: 69766 - RNA, 32 nt, Human
augauggcaccacuguacuccagccuggguga

SEQ ID NO: 69767 - RNA, 19 nt, Human
augauggcaccuguggucc

SEQ ID NO: 69768 - RNA, 32 nt, Human
augauggcacugcugcacuccagccugcggga

SEQ ID NO: 69769 - RNA, 32 nt, Human
augauggcaggcaccuguaaucccagcuacuc

SEQ ID NO: 69770 - RNA, 32 nt, Human
augauggcaggcgccuguagucucagcuacuc

SEQ ID NO: 69771 - RNA, 32 nt, Human
augauggcaucacuugcacuuggaagaaugug

SEQ ID NO: 69772 - RNA, 32 nt, Human
augauggccagcugcuucccuccuugguuauc

SEQ ID NO: 69773 - RNA, 32 nt, Human
augauggcgguggagguggugguuguagugug

SEQ ID NO: 69774 - RNA, 22 nt, Human
augauggcucacaccuguaauc

SEQ ID NO: 69775 - RNA, 32 nt, Human
augauggcucaggguggucauccagguugaaa

SEQ ID NO: 69776 - RNA, 21 nt, Human
augauggcucaugccuguaau

SEQ ID NO: 69777 - RNA, 32 nt, Human
augaugggaacugcccuuuucaccugccaggg

SEQ ID NO: 69778 - RNA, 22 nt, Human
augaugggacuucucaagagug

SEQ ID NO: 69779 - RNA, 32 nt, Human
augaugggagaaaaggagaaaugaagacucga

SEQ ID NO: 69780 - RNA, 32 nt, Human
augaugggaugggggaguauauacacguauag

SEQ ID NO: 69781 - RNA, 19 nt, Human
augaugggauuuuauacca

SEQ ID NO: 69782 - RNA, 32 nt, Human
augaugggcacagagcaucacaugagcuguuu

SEQ ID NO: 69783 - RNA, 32 nt, Human
augauggggcaagauggcagagguauuggguu

SEQ ID NO: 69784 - RNA, 32 nt, Human
augauggggugagggcucuugguggguuagug

SEQ ID NO: 69785 - RNA, 32 nt, Human
augauggguuucagaucuggcuuuuguuaaca

SEQ ID NO: 69786 - RNA, 24 nt, Human
augaugguaccacaccagggccuc

SEQ ID NO: 69787 - RNA, 32 nt, Human
augaugguaccccugcacuccagcccagguua

SEQ ID NO: 69788 - RNA, 32 nt, Human
augauggucucgaucuccugaccucgugaucu

SEQ ID NO: 69789 - RNA, 32 nt, Human
augauggugauacuguacuccagccugagcaa

SEQ ID NO: 69790 - RNA, 32 nt, Human
augauggugccacuacacuccagccuggguaa

SEQ ID NO: 69791 - RNA, 25 nt, Human
augauggugccacugcacuccagcc

SEQ ID NO: 69792 - RNA, 32 nt, Human
augauggugccacugcacuccagccuggggga

SEQ ID NO: 69793 - RNA, 32 nt, Human
augauggugccacugcacuccaguauggauga

SEQ ID NO: 69794 - RNA, 32 nt, Human
augauggugccacugcauuccagccuggguga

SEQ ID NO: 69795 - RNA, 32 nt, Human
augauggugcuggcucauauaguguagucccu

SEQ ID NO: 69796 - RNA, 32 nt, Human
augaugguggaggccaauacuuugccaaacca

SEQ ID NO: 69797 - RNA, 32 nt, Human
augauggugggugggugggaugaguacccccu

SEQ ID NO: 69798 - RNA, 21 nt, Human
augaugguuaaacucuguggg

SEQ ID NO: 69799 - RNA, 32 nt, Human
augauguaacaucccuuuugcucauccagauc

SEQ ID NO: 69800 - RNA, 32 nt, Human
augauguagaaacagaugagaagucaguccca

SEQ ID NO: 69801 - RNA, 32 nt, Human
augauguaggagagaggagaaaugcuggaaag

SEQ ID NO: 69802 - RNA, 32 nt, Human
augauguagggccugcugcacccuggggaggg

SEQ ID NO: 69803 - RNA, 32 nt, Human
augauguaguaaaaagauuucuccagaaaaca

SEQ ID NO: 69804 - RNA, 32 nt, Human
augauguaguaagcuauaauggugccacugga

SEQ ID NO: 69805 - RNA, 32 nt, Human
augauguagugccacccaccuccugagcuguu

SEQ ID NO: 69806 - RNA, 32 nt, Human
augauguagugccucuuucauccacuagugca

SEQ ID NO: 69807 - RNA, 32 nt, Human
augaugucaaugaugaugacagugaugaugau

SEQ ID NO: 69808 - RNA, 32 nt, Human
augaugucacacaagcuccuuaaccuuccaug

SEQ ID NO: 69809 - RNA, 32 nt, Human
augaugucacucugaaacucaggcuggaauac

SEQ ID NO: 69810 - RNA, 32 nt, Human
augaugucagccucccugucgccccucgguac

SEQ ID NO: 69811 - RNA, 32 nt, Human
augauguccagggggagaaggaagauaggacg

SEQ ID NO: 69812 - RNA, 32 nt, Human
augauguccuagugaaccuugugcuuucuuua

SEQ ID NO: 69813 - RNA, 19 nt, Human
augaugucucugaugaagc

SEQ ID NO: 69814 - RNA, 32 nt, Human
augaugucuguaacgcaguuuuguuugaaaua

SEQ ID NO: 69815 - RNA, 32 nt, Human
augaugugaugauuuucaagguguuggaggca

SEQ ID NO: 69816 - RNA, 32 nt, Human
augaugugccugcuucagccucccacagugcu

SEQ ID NO: 69817 - RNA, 32 nt, Human
augaugugccuuucuagcuuugucuaguuuau

SEQ ID NO: 69818 - RNA, 32 nt, Human
augaugugcgcccauccucccuugcuuccaga

SEQ ID NO: 69819 - RNA, 19 nt, Human
augauguggacagaagccu

SEQ ID NO: 69820 - RNA, 32 nt, Human
augauguggccaccccugacacgguggcuaau

SEQ ID NO: 69821 - RNA, 32 nt, Human
augaugugguauagccagaaugucuggucaga

SEQ ID NO: 69822 - RNA, 32 nt, Human
augauguguggggcacacggaaggcauugcug

SEQ ID NO: 69823 - RNA, 32 nt, Human
augauguugaguggcauuuucuuuuuaguuuu

SEQ ID NO: 69824 - RNA, 32 nt, Human
augauguugauaauuaacuuacccuuaucugc

SEQ ID NO: 69825 - RNA, 32 nt, Human
augauguugugcaaagaugcacuccaggaaga

SEQ ID NO: 69826 - RNA, 32 nt, Human
augauguuucauuaauaaacaguguuuuguuu

SEQ ID NO: 69827 - RNA, 22 nt, Human
augauguuucccucuccuucca

SEQ ID NO: 69828 - RNA, 32 nt, Human
augauuaaaacaauguaaaucuaaauuguaug

SEQ ID NO: 69829 - RNA, 32 nt, Human
augauuaaaagaacaggagcagaaggggcuca

SEQ ID NO: 69830 - RNA, 32 nt, Human
augauuaaaccaaggcacuccagccuggguga

SEQ ID NO: 69831 - RNA, 32 nt, Human
augauuaauuuccagcccuagaucugcugucu

SEQ ID NO: 69832 - RNA, 32 nt, Human
augauuacacaaauuugguaggggcauuugua

SEQ ID NO: 69833 - RNA, 32 nt, Human
augauuacaccacugcacuucagucuguguga

SEQ ID NO: 69834 - RNA, 32 nt, Human
augauuacaccacugcacuugagccugggcag

SEQ ID NO: 69835 - RNA, 32 nt, Human
augauuacagaaguccuacuugacaaucacau

SEQ ID NO: 69836 - RNA, 32 nt, Human
augauuacaguucugaaucuguaacacuuaca

SEQ ID NO: 69837 - RNA, 32 nt, Human
augauuacgccacugcauuguagccugggcaa

SEQ ID NO: 69838 - RNA, 32 nt, Human
augauuacuccacugcacuccagccugggcaa

SEQ ID NO: 69839 - RNA, 32 nt, Human
augauuaugccacugcuuuccagccugggcaa

SEQ ID NO: 69840 - RNA, 32 nt, Human
augauuaugccauuacacuccagccugggcaa

SEQ ID NO: 69841 - RNA, 32 nt, Human
augauuaugcugcugcacuccagccuggacaa

SEQ ID NO: 69842 - RNA, 32 nt, Human
augauuauuucugauuaauagcagaaacuuuu

SEQ ID NO: 69843 - RNA, 32 nt, Human
augauucacacuugaaugaaacccuacaaaug

SEQ ID NO: 69844 - RNA, 32 nt, Human
augauucacagcacugcacugcagccugggug

SEQ ID NO: 69845 - RNA, 32 nt, Human
augauucacagcccaggcaggacagagcagau

SEQ ID NO: 69846 - RNA, 32 nt, Human
augauucacaugcuaaagccaggauuguguug

SEQ ID NO: 69847 - RNA, 32 nt, Human
augauucagaguuuaaauggcuguaguuacaa

SEQ ID NO: 69848 - RNA, 32 nt, Human
augauucagcucccuuauacccccauuaaauu

SEQ ID NO: 69849 - RNA, 32 nt, Human
augauucaggauucagggggagaauccuucuu

SEQ ID NO: 69850 - RNA, 32 nt, Human
augauucauauauaaucauaucuaagaucuau

SEQ ID NO: 69851 - RNA, 32 nt, Human
augauucauucaaccaagucgcuggacuuuug

SEQ ID NO: 69852 - RNA, 32 nt, Human
augauucauuuugcagauuuacauuuugcuug

SEQ ID NO: 69853 - RNA, 32 nt, Human
augauuccaccauugcacuccagucugggcaa

SEQ ID NO: 69854 - RNA, 32 nt, Human
augauuccagccucucacugugccuuaugcau

SEQ ID NO: 69855 - RNA, 32 nt, Human
augauucccacacaaaaccuggauuuagauaa

SEQ ID NO: 69856 - RNA, 32 nt, Human
augauucccgcaccugggacgaugacucggac

SEQ ID NO: 69857 - RNA, 32 nt, Human
augauucccucacuguauauccucaacccucc

SEQ ID NO: 69858 - RNA, 32 nt, Human
augauucccuugcccagcuugccaaggugagg

SEQ ID NO: 69859 - RNA, 32 nt, Human
augauuccuaaacuccagccuggccaaggaga

SEQ ID NO: 69860 - RNA, 32 nt, Human
augauucucuuaguaaauuaaacauuuaaaaa

SEQ ID NO: 69861 - RNA, 32 nt, Human
augauucugagcacaugguuucugccuccagc

SEQ ID NO: 69862 - RNA, 32 nt, Human
augauucugaugcaaguggucucuccagccug

SEQ ID NO: 69863 - RNA, 32 nt, Human
augauucuguuaauguaaugaacaugggaaag

SEQ ID NO: 69864 - RNA, 32 nt, Human
augauucuuugaaaccugaugacuguuuggca

SEQ ID NO: 69865 - RNA, 32 nt, Human
augauucuuuucucccccauuaugccccuaua

SEQ ID NO: 69866 - RNA, 32 nt, Human
augauugaaucagcuuuaaagcaucauaccau

SEQ ID NO: 69867 - RNA, 32 nt, Human
augauugagcccaggagaggaagaacaaacaa

SEQ ID NO: 69868 - RNA, 32 nt, Human
augauugagugaagccaccccguccgcagcca

SEQ ID NO: 69869 - RNA, 32 nt, Human
augauugauaaccucucugccagcaaucauuc

SEQ ID NO: 69870 - RNA, 32 nt, Human
augauugaugggcuggggaacccuggagagcc

SEQ ID NO: 69871 - RNA, 32 nt, Human
augauugcacagcugcacuccagccugugcug

SEQ ID NO: 69872 - RNA, 32 nt, Human
augauugcaccacugcacuccaaccugggcaa

SEQ ID NO: 69873 - RNA, 32 nt, Human
augauugcaccacugcacuccaaccuggguga

SEQ ID NO: 69874 - RNA, 32 nt, Human
augauugcaccacugcacuccagccuggaaaa

SEQ ID NO: 69875 - RNA, 32 nt, Human
augauugcaccacugcacuccagccugggcaa

SEQ ID NO: 69876 - RNA, 32 nt, Human
augauugcaccacugcacuccagccuggguga

SEQ ID NO: 69877 - RNA, 32 nt, Human
augauugcaccacugcacuccagccugggugu

SEQ ID NO: 69878 - RNA, 32 nt, Human
augauugcaccacugcacuccagucugguuga

SEQ ID NO: 69879 - RNA, 32 nt, Human
augauugcaccacugcacucuaacuugggcaa

SEQ ID NO: 69880 - RNA, 32 nt, Human
augauugcaccacugcacucuacucuggguga

SEQ ID NO: 69881 - RNA, 32 nt, Human
augauugcaccacuguacuccagccugggcaa

SEQ ID NO: 69882 - RNA, 32 nt, Human
augauugcaccccugcacuccagccuggguga

SEQ ID NO: 69883 - RNA, 32 nt, Human
augauugcacugucgcacuccagccuggauga

SEQ ID NO: 69884 - RNA, 32 nt, Human
augauugcaucacugcacugcagccugggcaa

SEQ ID NO: 69885 - RNA, 32 nt, Human
augauugccaaagaauaguauuaaggagaaga

SEQ ID NO: 69886 - RNA, 32 nt, Human
augauugcgccacugcacuccagccugggcag

SEQ ID NO: 69887 - RNA, 32 nt, Human
augauugcgccgcugcacuccagccugggcaa

SEQ ID NO: 69888 - RNA, 32 nt, Human
augauugcuaucuuauuuuuguuauccaagac

SEQ ID NO: 69889 - RNA, 28 nt, Human
augauuggaagugcugccuacgucuucu

SEQ ID NO: 69890 - RNA, 32 nt, Human
augauuggaccacuauacuccagccuggcaac

SEQ ID NO: 69891 - RNA, 32 nt, Human
augauuggaugaguuuauucuuuucuaagcag

SEQ ID NO: 69892 - RNA, 32 nt, Human
augauuggcuucaccgccucuggaucagauga

SEQ ID NO: 69893 - RNA, 32 nt, Human
augauugggaaucuuacuauuucaucugauac

SEQ ID NO: 69894 - RNA, 32 nt, Human
augauuguaauaauguuacaugaucaugggug

SEQ ID NO: 69895 - RNA, 32 nt, Human
augauuguaccacugcacuccagccugggcaa

SEQ ID NO: 69896 - RNA, 32 nt, Human
augauuguaccacugcacuccagccuggguga

SEQ ID NO: 69897 - RNA, 32 nt, Human
augauuguaccacuguauuccagccuggacga

SEQ ID NO: 69898 - RNA, 32 nt, Human
augauuguaugacugcacuccagccuggguga

SEQ ID NO: 69899 - RNA, 32 nt, Human
augauugugccacacacuccagccuggguggc

SEQ ID NO: 69900 - RNA, 32 nt, Human
augauugugccaccgcacuccagcauggguga

SEQ ID NO: 69901 - RNA, 32 nt, Human
augauugugccacugcacuccagccugggcaa

SEQ ID NO: 69902 - RNA, 32 nt, Human
augauugugccacugcacuccagccuggguaa

SEQ ID NO: 69903 - RNA, 32 nt, Human
augauugugccacugcacuccagccugggugg

SEQ ID NO: 69904 - RNA, 32 nt, Human
augauugugccacugcacuccagccuuggcaa

SEQ ID NO: 69905 - RNA, 32 nt, Human
augauugugccacugcacuccagcuuggugac

SEQ ID NO: 69906 - RNA, 32 nt, Human
augauugugccacugcacuccagucuggacaa

SEQ ID NO: 69907 - RNA, 32 nt, Human
augauugugccacuguacuccagccugggaga

SEQ ID NO: 69908 - RNA, 32 nt, Human
augauugugccacuguacuccagccuggguga

SEQ ID NO: 69909 - RNA, 32 nt, Human
augauugugccacuucccuccagccugggcaa

SEQ ID NO: 69910 - RNA, 32 nt, Human
augauugugcuacugcacuccaaucuggcaac

SEQ ID NO: 69911 - RNA, 32 nt, Human
augauuguggcauugcacuccagccugggugg

SEQ ID NO: 69912 - RNA, 32 nt, Human
augauuguuaaguuuccugaggccuccccagc

SEQ ID NO: 69913 - RNA, 32 nt, Human
augauuguucucucccuuguagcucucugcuu

SEQ ID NO: 69914 - RNA, 32 nt, Human
augauuguuuauggaaaguaucuuuaauaaag

SEQ ID NO: 69915 - RNA, 32 nt, Human
augauuucaaugauuguuuaauuguaggucaa

SEQ ID NO: 69916 - RNA, 32 nt, Human
augauuucaccacugcauucuagccugggcaa

SEQ ID NO: 69917 - RNA, 32 nt, Human
augauuuccacuggacaguagaaaaauaugug

SEQ ID NO: 69918 - RNA, 32 nt, Human
augauuucccacugcacuccagccugagugac

SEQ ID NO: 69919 - RNA, 32 nt, Human
augauuuccuggcuggccaacugguggccagu

SEQ ID NO: 69920 - RNA, 32 nt, Human
augauuucucuccucaugacuuuuggugucuc

SEQ ID NO: 69921 - RNA, 32 nt, Human
augauuucuugcuuuggggaaaaagaaugaug

SEQ ID NO: 69922 - RNA, 32 nt, Human
augauuucuuuuuccuccucugccccaggucc

SEQ ID NO: 69923 - RNA, 32 nt, Human
augauuugggguucaauugaaaaggaacauga

SEQ ID NO: 69924 - RNA, 32 nt, Human
augauuuguaaaguguuaugcauauguauguu

SEQ ID NO: 69925 - RNA, 31 nt, Human
augauuugucagagaaccuguugaaauguga

SEQ ID NO: 69926 - RNA, 32 nt, Human
augauuuguccucagagcuaacauaaggacag

SEQ ID NO: 69927 - RNA, 32 nt, Human
augauuugugugugugaaggacauaccacguu

SEQ ID NO: 69928 - RNA, 32 nt, Human
augauuuguucccagagguuugaaacauucag

SEQ ID NO: 69929 - RNA, 32 nt, Human
augauuuuaccacugcacuccagcuugggcga

SEQ ID NO: 69930 - RNA, 32 nt, Human
augauuuugaggugugggggaagcacucuugg

SEQ ID NO: 69931 - RNA, 32 nt, Human
augauuuugauccuaaaucugccuuuucaucu

SEQ ID NO: 69932 - RNA, 32 nt, Human
augauuuuguaacccagauuuugcuguauauu

SEQ ID NO: 69933 - RNA, 32 nt, Human
augauuuuguuaaaaauugcuauggaguacuu

SEQ ID NO: 69934 - RNA, 32 nt, Human
augauuuuugcuuacaaucacuuaacuuagca

SEQ ID NO: 69935 - RNA, 32 nt, Human
augcaaaaauuaccugggcaugguggcaggug

SEQ ID NO: 69936 - RNA, 32 nt, Human
augcaaaaauuagcuggacgugguggcacacg

SEQ ID NO: 69937 - RNA, 32 nt, Human
augcaaaaauuagcugggcacgguggcgggca

SEQ ID NO: 69938 - RNA, 32 nt, Human
augcaaaaauuagcugggcaugguagcaugcg

SEQ ID NO: 69939 - RNA, 32 nt, Human
augcaaaaauuagcugggcaugguggugcacg

SEQ ID NO: 69940 - RNA, 32 nt, Human
augcaaaaauuagcugggcgugguggugugug

SEQ ID NO: 69941 - RNA, 32 nt, Human
augcaaaaauuagcugggugugguggcgggcg

SEQ ID NO: 69942 - RNA, 32 nt, Human
augcaaaaauuagcugggugugguggcgugug

SEQ ID NO: 69943 - RNA, 32 nt, Human
augcaaaacuccacuuucaaucuuuuauaucu

SEQ ID NO: 69944 - RNA, 32 nt, Human
augcaaaacuuuaggcccugccccagauuuac

SEQ ID NO: 69945 - RNA, 32 nt, Human
augcaaaagacauuucuagugaaaugccccuc

SEQ ID NO: 69946 - RNA, 32 nt, Human
augcaaaagugcuuugccaucuuaaaaaugcc

SEQ ID NO: 69947 - RNA, 32 nt, Human
augcaaaauacuguacauugugaacagaaguu

SEQ ID NO: 69948 - RNA, 21 nt, Human
augcaaaauaguuggggcaaa

SEQ ID NO: 69949 - RNA, 32 nt, Human
augcaaacaaaccaacccagagcccaugccug

SEQ ID NO: 69950 - RNA, 32 nt, Human
augcaaacacaaagaucuggauuucuggcaag

SEQ ID NO: 69951 - RNA, 32 nt, Human
augcaaacacccugaggauucagagaacaauu

SEQ ID NO: 69952 - RNA, 32 nt, Human
augcaaacaggcaaaauugguaccaaagggaa

SEQ ID NO: 69953 - RNA, 32 nt, Human
augcaaacauguuggcugggcgcuguggcuca

SEQ ID NO: 69954 - RNA, 32 nt, Human
augcaaacauuagcugggcaugguggcacaug

SEQ ID NO: 69955 - RNA, 32 nt, Human
augcaaacauuucugugccugcuggguagggg

SEQ ID NO: 69956 - RNA, 32 nt, Human
augcaaacauuuuaaugcuauuuucugcacuu

SEQ ID NO: 69957 - RNA, 32 nt, Human
augcaaacgugagucugaaugacaaucagauc

SEQ ID NO: 69958 - RNA, 32 nt, Human
augcaaacuuugggcauaaugugaacuaaaau

SEQ ID NO: 69959 - RNA, 32 nt, Human
augcaaagaaauuugccagucacuggaaguua

SEQ ID NO: 69960 - RNA, 32 nt, Human
augcaaagagccagaauauucuaaagagguga

SEQ ID NO: 69961 - RNA, 32 nt, Human
augcaaagcaccaggcgauggagcucagagga

SEQ ID NO: 69962 - RNA, 32 nt, Human
augcaaagccaccacaaugccuacaggaaggc

SEQ ID NO: 69963 - RNA, 20 nt, Human
augcaaagccuuccaugucu

SEQ ID NO: 69964 - RNA, 32 nt, Human
augcaaaggucaggaacucucuccacugcaug

SEQ ID NO: 69965 - RNA, 32 nt, Human
augcaaagguuagccgggcaugguggcgggcg

SEQ ID NO: 69966 - RNA, 32 nt, Human
augcaaaguaaaaccucagcagcugugaugaa

SEQ ID NO: 69967 - RNA, 19 nt, Human
augcaaaguucuguguuua

SEQ ID NO: 69968 - RNA, 32 nt, Human
augcaaaguuuauaccugaugaucagggcagu

SEQ ID NO: 69969 - RNA, 32 nt, Human
augcaaauaggcuuagggagggcaggugggau

SEQ ID NO: 69970 - RNA, 32 nt, Human
augcaaaucacccccgggagugcagcugggcu

SEQ ID NO: 69971 - RNA, 32 nt, Human
augcaaaugaggaaguaagucagggcgggcuu

SEQ ID NO: 69972 - RNA, 32 nt, Human
augcaacaaagaagaggagacagugugguuac

SEQ ID NO: 69973 - RNA, 32 nt, Human
augcaacaacacaguuuucacacuucaaauuu

SEQ ID NO: 69974 - RNA, 32 nt, Human
augcaacaaguuggcucuugagaauggcagua

SEQ ID NO: 69975 - RNA, 32 nt, Human
augcaacagggcugggacaggaaggcucucuu

SEQ ID NO: 69976 - RNA, 32 nt, Human
augcaacauuucucccucugggccuugaaaau

SEQ ID NO: 69977 - RNA, 32 nt, Human
augcaaccacugcaaucaaugugucauauguc

SEQ ID NO: 69978 - RNA, 32 nt, Human
augcaaccagaacacaggagaagaaaagcucc

SEQ ID NO: 69979 - RNA, 32 nt, Human
augcaaccccagcuccacuccagccuggcguc

SEQ ID NO: 69980 - RNA, 32 nt, Human
augcaaccccagucuacucagugaguuuucua

SEQ ID NO: 69981 - RNA, 32 nt, Human
augcaacggcugagccagcccagagaggcagc

SEQ ID NO: 69982 - RNA, 32 nt, Human
augcaacuaauaaaaacuaccuuacauuaauu

SEQ ID NO: 69983 - RNA, 32 nt, Human
augcaacuacuuucuuuuucuaccaaacgaaa

SEQ ID NO: 69984 - RNA, 32 nt, Human
augcaacucccagauuccaaaggauucaaguu

SEQ ID NO: 69985 - RNA, 32 nt, Human
augcaacugcuguccccgccuacucugagggg

SEQ ID NO: 69986 - RNA, 32 nt, Human
augcaacugguuuuacuagugugcaagugugu

SEQ ID NO: 69987 - RNA, 32 nt, Human
augcaacuucagccauaccauguggccuccuc

SEQ ID NO: 69988 - RNA, 32 nt, Human
augcaacuugaaaggaaacaguuuaauggugg

SEQ ID NO: 69989 - RNA, 32 nt, Human
augcaagaaagccucagaaaugacugcauaca

SEQ ID NO: 69990 - RNA, 32 nt, Human
augcaagaauuagcugggugugguggugugca

SEQ ID NO: 69991 - RNA, 32 nt, Human
augcaagacugacagugauggacucugugaca

SEQ ID NO: 69992 - RNA, 32 nt, Human
augcaagagaaaaguuauuuggaaagaagacc

SEQ ID NO: 69993 - RNA, 21 nt, Human
augcaagagaauaaaugugag

SEQ ID NO: 69994 - RNA, 32 nt, Human
augcaagaguccuaauccugaagacauugaau

SEQ ID NO: 69995 - RNA, 32 nt, Human
augcaagauaaauuaaaguuauuauaacagug

SEQ ID NO: 69996 - RNA, 32 nt, Human
augcaagauggaaugggacucccccggcugcu

SEQ ID NO: 69997 - RNA, 32 nt, Human
augcaagcaagagcacaucuacuccagcauga

SEQ ID NO: 69998 - RNA, 32 nt, Human
augcaagcacagugcuuucacgcccagccucc

SEQ ID NO: 69999 - RNA, 32 nt, Human
augcaagcacgccuuaaacacacagauauaga

SEQ ID NO: 70000 - RNA, 32 nt, Human
augcaagcuaaagccccucuauacccugguag

SEQ ID NO: 70001 - RNA, 32 nt, Human
augcaaggaguagauuguguguggggugguga

SEQ ID NO: 70002 - RNA, 32 nt, Human
augcaagggggaaaccaaaucaaaaguguaga

SEQ ID NO: 70003 - RNA, 32 nt, Human
augcaaggucaaguaucucaauccagaggacu

SEQ ID NO: 70004 - RNA, 32 nt, Human
augcaaggugucaucacaugcccagcccugac

SEQ ID NO: 70005 - RNA, 32 nt, Human
augcaaguccgaaauccagcagggcugucaaa

SEQ ID NO: 70006 - RNA, 32 nt, Human
augcaaguuguuacgauugagcuguauuacca

SEQ ID NO: 70007 - RNA, 32 nt, Human
augcaauaaaguguuuacaggaugcccuucug

SEQ ID NO: 70008 - RNA, 32 nt, Human
augcaauaaccagccaucugaucaaaguugaa

SEQ ID NO: 70009 - RNA, 32 nt, Human
augcaauaauuuaaaaucauaaagggccagug

SEQ ID NO: 70010 - RNA, 25 nt, Human
augcaauauuccauauuuuucccca

SEQ ID NO: 70011 - RNA, 32 nt, Human
augcaaucaggaagguugggggacuugggacu

SEQ ID NO: 70012 - RNA, 32 nt, Human
augcaaucauagcucacugcagccuggaacuc

SEQ ID NO: 70013 - RNA, 32 nt, Human
augcaaucucaguucacugcagucucugccuc

SEQ ID NO: 70014 - RNA, 32 nt, Human
augcaaucuccaucuggccuucauccuucucc

SEQ ID NO: 70015 - RNA, 32 nt, Human
augcaaugagccuacucugguuaagauguucu

SEQ ID NO: 70016 - RNA, 32 nt, Human
augcaauguaugcacaaauauguacaguuagu

SEQ ID NO: 70017 - RNA, 32 nt, Human
augcaaugucuaaaauggacgaaucuauauag

SEQ ID NO: 70018 - RNA, 32 nt, Human
augcaauguguuuaucacaguaucugguauac

SEQ ID NO: 70019 - RNA, 32 nt, Human
augcaauuagccucauaguuauuauccagagg

SEQ ID NO: 70020 - RNA, 32 nt, Human
augcaauucucaagucuauaagagguaugugc

SEQ ID NO: 70021 - RNA, 32 nt, Human
augcaauucugccaccaugauggaaggauuga

SEQ ID NO: 70022 - RNA, 32 nt, Human
augcaauugcacuccagccugggcaacaagaa

SEQ ID NO: 70023 - RNA, 32 nt, Human
augcaauuuccaggcugugcuguggacuucuu

SEQ ID NO: 70024 - RNA, 31 nt, Human
augcacaaaauaaauggcuguugaaauuuga

SEQ ID NO: 70025 - RNA, 32 nt, Human
augcacaaaggaugauuaauucugggacuaua

SEQ ID NO: 70026 - RNA, 32 nt, Human
augcacacaagaaaauauguguuuuucagaga

SEQ ID NO: 70027 - RNA, 21 nt, Human
augcacacacacauauacaca

SEQ ID NO: 70028 - RNA, 19 nt, Human
augcacacacauauacaca

SEQ ID NO: 70029 - RNA, 19 nt, Human
augcacacacauaugcaca

SEQ ID NO: 70030 - RNA, 32 nt, Human
augcacacacccuuugugcuggggagugacac

SEQ ID NO: 70031 - RNA, 23 nt, Human
augcacacaccgaugugcgcaca

SEQ ID NO: 70032 - RNA, 32 nt, Human
augcacacacgcagaggugcagagcgaggagg

SEQ ID NO: 70033 - RNA, 32 nt, Human
augcacacacgcaugcacacacacaaagccuu

SEQ ID NO: 70034 - RNA, 21 nt, Human
augcacacagauguacauaca

SEQ ID NO: 70035 - RNA, 32 nt, Human
augcacacaggcaugacacagguuuggauuca

SEQ ID NO: 70036 - RNA, 32 nt, Human
augcacacauacacaugcacacacacaugcac

SEQ ID NO: 70037 - RNA, 19 nt, Human
augcacacauacauacaua

SEQ ID NO: 70038 - RNA, 19 nt, Human
augcacacauauaugcaca

SEQ ID NO: 70039 - RNA, 23 nt, Human
augcacacccacaagccuauaca

SEQ ID NO: 70040 - RNA, 32 nt, Human
augcacacuuugcacacagacacacacguaua

SEQ ID NO: 70041 - RNA, 32 nt, Human
augcacagaacacacagauauaugcacacgug

SEQ ID NO: 70042 - RNA, 32 nt, Human
augcacagacuagagcagagcaauacaucaug

SEQ ID NO: 70043 - RNA, 32 nt, Human
augcacagagaaggaaaagggaacaucucauc

SEQ ID NO: 70044 - RNA, 32 nt, Human
augcacagagcagaggagggagaagcucuggg

SEQ ID NO: 70045 - RNA, 32 nt, Human
augcacagaggggaucacugugcagugggacc

SEQ ID NO: 70046 - RNA, 32 nt, Human
augcacagccauccuucccuaccuugagugag

SEQ ID NO: 70047 - RNA, 32 nt, Human
augcacagccucccugaggaugcucuuuuccu

SEQ ID NO: 70048 - RNA, 32 nt, Human
augcacagcuccauauccuggaagccucugua

SEQ ID NO: 70049 - RNA, 32 nt, Human
augcacaggaaagacacaggggaaggucaagu

SEQ ID NO: 70050 - RNA, 32 nt, Human
augcacaggccugcuugugaaucaggacugaa

SEQ ID NO: 70051 - RNA, 32 nt, Human
augcacagggcaggccacagagcucgagggac

SEQ ID NO: 70052 - RNA, 32 nt, Human
augcacagucccggggguggccuuggaggcug

SEQ ID NO: 70053 - RNA, 32 nt, Human
augcacaguggaggaaaagaacaaagaagcac

SEQ ID NO: 70054 - RNA, 32 nt, Human
augcacaguucugcacagugucuggcgcauau

SEQ ID NO: 70055 - RNA, 32 nt, Human
augcacauacacacaaaauuaggcgggagugg

SEQ ID NO: 70056 - RNA, 32 nt, Human
augcacauauagacacauacacccaaacacuu

SEQ ID NO: 70057 - RNA, 32 nt, Human
augcacauccaccauugucucugaguaguauu

SEQ ID NO: 70058 - RNA, 32 nt, Human
augcacaugcauuacacacaugcacacacaua

SEQ ID NO: 70059 - RNA, 32 nt, Human
augcaccaaucacagcucaugccgagguggag

SEQ ID NO: 70060 - RNA, 32 nt, Human
augcaccaccugacugauuuuguauuuuagua

SEQ ID NO: 70061 - RNA, 32 nt, Human
augcaccacggcacucaagccugggcaaugua

SEQ ID NO: 70062 - RNA, 32 nt, Human
augcaccacugcaccccagccugggcgacgga

SEQ ID NO: 70063 - RNA, 32 nt, Human
augcaccacugcacuccagcaugggcaacaca

SEQ ID NO: 70064 - RNA, 32 nt, Human
augcaccacugcaguccagccuaggcaacagu

SEQ ID NO: 70065 - RNA, 32 nt, Human
augcaccaggaaaauuuaggacagggacaaac

SEQ ID NO: 70066 - RNA, 16 nt, Human
augcaccaggguccca

SEQ ID NO: 70067 - RNA, 32 nt, Human
augcaccauugcacacuaaccugggugacaga

SEQ ID NO: 70068 - RNA, 32 nt, Human
augcaccccaacauugagauguguuuuuaaug

SEQ ID NO: 70069 - RNA, 32 nt, Human
augcaccuaaucuugaggcagcuucugaauug

SEQ ID NO: 70070 - RNA, 32 nt, Human
augcaccuaaucuugaggcagcuucugaguug

SEQ ID NO: 70071 - RNA, 32 nt, Human
augcaccuauguuuccagcuacuugggaggcg

SEQ ID NO: 70072 - RNA, 32 nt, Human
augcaccuauugucucaguuacuugggaggcu

SEQ ID NO: 70073 - RNA, 32 nt, Human
augcaccucgagcaacacuugugagccaugcu

SEQ ID NO: 70074 - RNA, 32 nt, Human
augcaccugcaaucccagcuacucgggaggcu

SEQ ID NO: 70075 - RNA, 32 nt, Human
augcaccugcagcugggugcugccagcagcuu

SEQ ID NO: 70076 - RNA, 32 nt, Human
augcaccugcauucccagcuacuugggaggcu

SEQ ID NO: 70077 - RNA, 32 nt, Human
augcaccuguaaacccagcuacuugggaggcu

SEQ ID NO: 70078 - RNA, 32 nt, Human
augcaccuguaaucccaacuacucagcugagg

SEQ ID NO: 70079 - RNA, 32 nt, Human
augcaccuguaaucccaacuacucuggaggcu

SEQ ID NO: 70080 - RNA, 32 nt, Human
augcaccuguaaucccaccuacucaggaggcu

SEQ ID NO: 70081 - RNA, 32 nt, Human
augcaccuguaaucccagcuacucaggaagcu

SEQ ID NO: 70082 - RNA, 32 nt, Human
augcaccuguaaucccagcuacucgggaggcu

SEQ ID NO: 70083 - RNA, 32 nt, Human
augcaccuguaaucccagcuacuugggaggcu

SEQ ID NO: 70084 - RNA, 32 nt, Human
augcaccuguagucccagcuacucaaguggcu

SEQ ID NO: 70085 - RNA, 32 nt, Human
augcaccuguagucccagcuacucaggaggcu

SEQ ID NO: 70086 - RNA, 32 nt, Human
augcaccuguagucccagcuacuccggaggcu

SEQ ID NO: 70087 - RNA, 32 nt, Human
augcaccuguagucccagcuacucuggaggcu

SEQ ID NO: 70088 - RNA, 32 nt, Human
augcaccuguagucccagcuacuugggaagcu

SEQ ID NO: 70089 - RNA, 32 nt, Human
augcaccuguagucccagcuacuuggggugcu

SEQ ID NO: 70090 - RNA, 32 nt, Human
augcaccuguagucccagcuauuugggaggcu

SEQ ID NO: 70091 - RNA, 32 nt, Human
augcaccuguagucccagcugcuugggaggcu

SEQ ID NO: 70092 - RNA, 32 nt, Human
augcaccugucaucccagcuacucgggaggcu

SEQ ID NO: 70093 - RNA, 32 nt, Human
augcaccuuacgaggcagagcaggcagacugg

SEQ ID NO: 70094 - RNA, 32 nt, Human
augcaccuuucaacuuuacaucauguccugaa

SEQ ID NO: 70095 - RNA, 32 nt, Human
augcacgcacacacacaugcacacauacacgu

SEQ ID NO: 70096 - RNA, 32 nt, Human
augcacgcacacacauacacacugaaggccac

SEQ ID NO: 70097 - RNA, 32 nt, Human
auggggguucuggcggggguuggaguacaaau

SEQ ID NO: 70098 - RNA, 32 nt, Human
augggguaaggcagaagcaccagcuguacuac

SEQ ID NO: 70099 - RNA, 28 nt, Human
augggguacccugcuucacagggcccuu

SEQ ID NO: 70100 - RNA, 23 nt, Human
augggguaccugaugaggacaag

SEQ ID NO: 70101 - RNA, 32 nt, Human
augggguacuuacacaaaccuagaugguauua

SEQ ID NO: 70102 - RNA, 32 nt, Human
augggguagaggagggcaugggagggagggag

SEQ ID NO: 70103 - RNA, 32 nt, Human
augggguaggccgggugcaguggcucacgccu

SEQ ID NO: 70104 - RNA, 32 nt, Human
auggggucacagugguuauaaagaguuauacc

SEQ ID NO: 70105 - RNA, 32 nt, Human
auggggucaucccagggcugccucccuccagc

SEQ ID NO: 70106 - RNA, 32 nt, Human
augggguccagcgcuggcugggcccagacaga

SEQ ID NO: 70107 - RNA, 32 nt, Human
auggggucgcccauggguagagacggcuuucu

SEQ ID NO: 70108 - RNA, 32 nt, Human
auggggucucacuauguugcccaggcuaguau

SEQ ID NO: 70109 - RNA, 32 nt, Human
auggggucucacuauguugcccaggcuggucu

SEQ ID NO: 70110 - RNA, 32 nt, Human
auggggucucacuauguugcccaggcuguucu

SEQ ID NO: 70111 - RNA, 32 nt, Human
auggggucucugccuauggaucauacuucaaa

SEQ ID NO: 70112 - RNA, 32 nt, Human
auggggucuuacuauguugcccaggcuggugu

SEQ ID NO: 70113 - RNA, 32 nt, Human
auggggucuuacuauguuguccaggcuaagag

SEQ ID NO: 70114 - RNA, 32 nt, Human
auggggucuuccucuguugcccaggcuggagu

SEQ ID NO: 70115 - RNA, 32 nt, Human
auggggucuugcuauguugcccaagcuggucu

SEQ ID NO: 70116 - RNA, 32 nt, Human
auggggucuugcuauguugcccaggcuggucu

SEQ ID NO: 70117 - RNA, 32 nt, Human
auggggucuuguuauguugcccaggcugaauu

SEQ ID NO: 70118 - RNA, 32 nt, Human
auggggugaaccuggggagccucgggggcaga

SEQ ID NO: 70119 - RNA, 31 nt, Human
auggggugacuucccuggucaccaaggcagu

SEQ ID NO: 70120 - RNA, 32 nt, Human
auggggugcaggaguggaggagaaacguggca

SEQ ID NO: 70121 - RNA, 32 nt, Human
auggggugcauucuagcuguugaccagauugc

SEQ ID NO: 70122 - RNA, 32 nt, Human
auggggugcugaaguggggucucagugagggg

SEQ ID NO: 70123 - RNA, 32 nt, Human
auggggugcuguguguuuuucagggcgcccug

SEQ ID NO: 70124 - RNA, 32 nt, Human
augggguggccuggccccuucucugcuuaaag

SEQ ID NO: 70125 - RNA, 32 nt, Human
auggggugggcaggccuggggugaaaugagaa

SEQ ID NO: 70126 - RNA, 32 nt, Human
auggggugggcugcucccagaaucugcucagc

SEQ ID NO: 70127 - RNA, 32 nt, Human
auggggugggggauauugagggagacagcgcu

SEQ ID NO: 70128 - RNA, 32 nt, Human
augggguggggugggaguagguagagcugaga

SEQ ID NO: 70129 - RNA, 32 nt, Human
auggggugucugcugggcccacuuacaggcag

SEQ ID NO: 70130 - RNA, 32 nt, Human
augggguguggaggggaaagggauagaaagcg

SEQ ID NO: 70131 - RNA, 32 nt, Human
augggguucucccuggaaugcaugauggcauu

SEQ ID NO: 70132 - RNA, 32 nt, Human
augggguugccccuccugaauuggaguuagcg

SEQ ID NO: 70133 - RNA, 32 nt, Human
augggguugugcaggcgagggugcagcacguu

SEQ ID NO: 70134 - RNA, 19 nt, Human
augggguuucaccacauug

SEQ ID NO: 70135 - RNA, 19 nt, Human
augggguuucaccaugcug

SEQ ID NO: 70136 - RNA, 18 nt, Human
augggguuucaccauguu

SEQ ID NO: 70137 - RNA, 19 nt, Human
augggguuucaccauguua

SEQ ID NO: 70138 - RNA, 19 nt, Human
augggguuucaccauguug

SEQ ID NO: 70139 - RNA, 32 nt, Human
augggguuucaccauguugccaaggccagucu

SEQ ID NO: 70140 - RNA, 20 nt, Human
augggguuucaccauguugg

SEQ ID NO: 70141 - RNA, 18 nt, Human
augggguuucaccguguu

SEQ ID NO: 70142 - RNA, 19 nt, Human
augggguuucacuauguug

SEQ ID NO: 70143 - RNA, 18 nt, Human
augggguuucacuguguu

SEQ ID NO: 70144 - RNA, 32 nt, Human
augggguuucaguugcgaaacaggucuguuuu

SEQ ID NO: 70145 - RNA, 19 nt, Human
augggguuucaucauguug

SEQ ID NO: 70146 - RNA, 18 nt, Human
augggguuucccauguug

SEQ ID NO: 70147 - RNA, 19 nt, Human
augggguuucgccacguug

SEQ ID NO: 70148 - RNA, 19 nt, Human
augggguuucgccauguug

SEQ ID NO: 70149 - RNA, 19 nt, Human
augggguuucgucauguug

SEQ ID NO: 70150 - RNA, 19 nt, Human
augggguuucuccauguug

SEQ ID NO: 70151 - RNA, 19 nt, Human
augggguuuuaccauguug

SEQ ID NO: 70152 - RNA, 32 nt, Human
augggguuuugccauguugcccaggcuggucu

SEQ ID NO: 70153 - RNA, 32 nt, Human
augggguuuugccauguugcccaggcuucucu

SEQ ID NO: 70154 - RNA, 32 nt, Human
augggguuuugcuauguugcccaggcuggucu

SEQ ID NO: 70155 - RNA, 32 nt, Human
auggguaaagcaggaagagagugggaaagaga

SEQ ID NO: 70156 - RNA, 25 nt, Human
auggguaggguggaagacgggggaa

SEQ ID NO: 70157 - RNA, 24 nt, Human
auggguaguaagcaugguuucuug

SEQ ID NO: 70158 - RNA, 32 nt, Human
auggguauaggggcuucauuuguucacucuga

SEQ ID NO: 70159 - RNA, 32 nt, Human
auggguaucacacccaagacuacccaccaagc

SEQ ID NO: 70160 - RNA, 32 nt, Human
augggucaacagucuuggccauuucucaucaa

SEQ ID NO: 70161 - RNA, 32 nt, Human
augggucccacugccuguccagccuggcuccc

SEQ ID NO: 70162 - RNA, 32 nt, Human
auggguccuaaccccugauuuugaugggaugu

SEQ ID NO: 70163 - RNA, 32 nt, Human
augggucucagcuaaaaugucaucccuucaaa

SEQ ID NO: 70164 - RNA, 32 nt, Human
augggucuccucuccacugagagcuggacacu

SEQ ID NO: 70165 - RNA, 32 nt, Human
augggucucuaccauggucaggucuugugcaa

SEQ ID NO: 70166 - RNA, 32 nt, Human
augggucucuggaaggcggcuugggcccuggg

SEQ ID NO: 70167 - RNA, 32 nt, Human
augggucuuucugcaggauuuaucaucccugg

SEQ ID NO: 70168 - RNA, 32 nt, Human
augggugaaugagcuugucaaugugauuuuaa

SEQ ID NO: 70169 - RNA, 20 nt, Human
augggugacuauuuugugaa

SEQ ID NO: 70170 - RNA, 32 nt, Human
augggugagacagaagcuucaucagcagugaa

SEQ ID NO: 70171 - RNA, 32 nt, Human
augggugaguaugucacaaauguauuggccaa

SEQ ID NO: 70172 - RNA, 32 nt, Human
augggugagucuguggccuucucuccagggcc

SEQ ID NO: 70173 - RNA, 25 nt, Human
augggugcaccacuacacaucagcc

SEQ ID NO: 70174 - RNA, 32 nt, Human
augggugcagcaaaguaccauggcacauguau

SEQ ID NO: 70175 - RNA, 32 nt, Human
augggugccuccugccccacacuggggccugc

SEQ ID NO: 70176 - RNA, 32 nt, Human
auggguggaauaagucugcuucaugccaaggc

SEQ ID NO: 70177 - RNA, 22 nt, Human
auggguggacucacacuugcuc

SEQ ID NO: 70178 - RNA, 32 nt, Human
auggguggagcagcagcucaagguccaggaua

SEQ ID NO: 70179 - RNA, 32 nt, Human
auggguggagcuauggcgccuccaaugaagga

SEQ ID NO: 70180 - RNA, 32 nt, Human
auggguggaucaccugagcucaggaguucaag

SEQ ID NO: 70181 - RNA, 32 nt, Human
auggguggccagcuuguacaccagucccugaa

SEQ ID NO: 70182 - RNA, 32 nt, Human
auggguggcugccugccugccugccugccuca

SEQ ID NO: 70183 - RNA, 32 nt, Human
augggugggcugucccgugagucccuagucca

SEQ ID NO: 70184 - RNA, 32 nt, Human
augggugggggccucugugagcaccacguaug

SEQ ID NO: 70185 - RNA, 32 nt, Human
auggguggguacuagggagacuggguacaagg

SEQ ID NO: 70186 - RNA, 23 nt, Human
augggugggucuaacuggcuuuu

SEQ ID NO: 70187 - RNA, 32 nt, Human
augggugguggggugcuagagcuguuuagaga

SEQ ID NO: 70188 - RNA, 32 nt, Human
augggugucccuugagucugagcuagagugug

SEQ ID NO: 70189 - RNA, 32 nt, Human
augggugucguggcaugagaucagcuggaggg

SEQ ID NO: 70190 - RNA, 32 nt, Human
augggugugaaugcacacacauacgcguacac

SEQ ID NO: 70191 - RNA, 32 nt, Human
augggugugcaugugcuugucuuagaaguauc

SEQ ID NO: 70192 - RNA, 32 nt, Human
auggguguggagccagucuccaagaggaugcc

SEQ ID NO: 70193 - RNA, 32 nt, Human
auggguguguguccuugggccgccagggucac

SEQ ID NO: 70194 - RNA, 32 nt, Human
auggguguuuuggcaccugccuguaaucucag

SEQ ID NO: 70195 - RNA, 32 nt, Human
auggguuauuucagaagauguaagcauuuuaa

SEQ ID NO: 70196 - RNA, 32 nt, Human
auggguucucaggguaugccaggggcagaaac

SEQ ID NO: 70197 - RNA, 32 nt, Human
auggguugacuugagagaagggcugaucucag

SEQ ID NO: 70198 - RNA, 32 nt, Human
auggguugaggagggcccauccccagcagccc

SEQ ID NO: 70199 - RNA, 32 nt, Human
auggguugcauaugauccagaauuacagcuga

SEQ ID NO: 70200 - RNA, 22 nt, Human
auggguuuagguugguuuuuug

SEQ ID NO: 70201 - RNA, 32 nt, Human
auggguuucagcaagaaagucugugaugugac

SEQ ID NO: 70202 - RNA, 32 nt, Human
auggguuucuacaucuucccuccugggaaugg

SEQ ID NO: 70203 - RNA, 21 nt, Human
auggguuucugaaauauuuua

SEQ ID NO: 70204 - RNA, 32 nt, Human
auggguuugagaccagccuggcaacacagcaa

SEQ ID NO: 70205 - RNA, 32 nt, Human
auggguuugggucagguggcucuggguucuga

SEQ ID NO: 70206 - RNA, 32 nt, Human
auggguuugucugucccugacuucugccucug

SEQ ID NO: 70207 - RNA, 32 nt, Human
auggguuuucuauuugaacaugugccuuuucu

SEQ ID NO: 70208 - RNA, 32 nt, Human
auggguuuuguuguuuuugggggcuaauuggu

SEQ ID NO: 70209 - RNA, 22 nt, Human
augguaaacgggaucuaaaaug

SEQ ID NO: 70210 - RNA, 32 nt, Human
augguaaagaggaaaaaggaaauacaaggaaa

SEQ ID NO: 70211 - RNA, 25 nt, Human
augguaaagauggaaaugcuggaaa

SEQ ID NO: 70212 - RNA, 32 nt, Human
augguaacacauacuccagauugaccuuauaa

SEQ ID NO: 70213 - RNA, 32 nt, Human
augguaacaccacugcacuccaaccugggcaa

SEQ ID NO: 70214 - RNA, 32 nt, Human
augguaacaguauguuaauacacacauacaua

SEQ ID NO: 70215 - RNA, 32 nt, Human
augguaaccugacacucucaggagacauuaag

SEQ ID NO: 70216 - RNA, 22 nt, Human
augguaacgggugccuguaguc

SEQ ID NO: 70217 - RNA, 22 nt, Human
augguaacucacgccuguaauc

SEQ ID NO: 70218 - RNA, 32 nt, Human
augguaacuguacauuuugugcuaaaaugcau

SEQ ID NO: 70219 - RNA, 22 nt, Human
augguaacuugugccuguaauu

SEQ ID NO: 70220 - RNA, 19 nt, Human
augguaagaaauugaagua

SEQ ID NO: 70221 - RNA, 18 nt, Human
augguaagaccucugaga

SEQ ID NO: 70222 - RNA, 32 nt, Human
augguaagacuuguauuuauaagggguaauuu

SEQ ID NO: 70223 - RNA, 19 nt, Human
augguaagaguuucuaaaa

SEQ ID NO: 70224 - RNA, 31 nt, Human
augguaagcuguaaauaccguuggaauaaaa

SEQ ID NO: 70225 - RNA, 17 nt, Human
augguaaggagaaaaua

SEQ ID NO: 70226 - RNA, 19 nt, Human
augguaagguucacaaaua

SEQ ID NO: 70227 - RNA, 18 nt, Human
augguaaguauugaaaua

SEQ ID NO: 70228 - RNA, 32 nt, Human
augguaauaauacuucaccuaccucauagggg

SEQ ID NO: 70229 - RNA, 32 nt, Human
augguaauggggauuagagaacugacaugaga

SEQ ID NO: 70230 - RNA, 23 nt, Human
augguaauucagucacuaaaaua

SEQ ID NO: 70231 - RNA, 32 nt, Human
augguacaagcagaggcucgggagaggcuccc

SEQ ID NO: 70232 - RNA, 32 nt, Human
augguacacauaacaguggaguggggaccaau

SEQ ID NO: 70233 - RNA, 21 nt, Human
augguacacuagaauuuucug

SEQ ID NO: 70234 - RNA, 32 nt, Human
augguacagccugcccucccaauuucaaaacc

SEQ ID NO: 70235 - RNA, 32 nt, Human
augguacaggcagagcucagggcgauccccag

SEQ ID NO: 70236 - RNA, 19 nt, Human
augguacaugcauuuucua

SEQ ID NO: 70237 - RNA, 32 nt, Human
augguacauggagcuuugaggugaaaacucau

SEQ ID NO: 70238 - RNA, 32 nt, Human
augguacauugaguaguguggggaagacaccu

SEQ ID NO: 70239 - RNA, 32 nt, Human
augguaccaaucaugaaucuuuguuucagguu

SEQ ID NO: 70240 - RNA, 32 nt, Human
augguaccacugcacuccagccugggugacag

SEQ ID NO: 70241 - RNA, 32 nt, Human
augguaccaucucauuaaaaauagauaccuca

SEQ ID NO: 70242 - RNA, 32 nt, Human
augguacccacgugggcauggaaauggggcag

SEQ ID NO: 70243 - RNA, 32 nt, Human
augguaccucugcacugcagccugggcaacag

SEQ ID NO: 70244 - RNA, 32 nt, Human
augguaccugcugccacucaucacagagcccu

SEQ ID NO: 70245 - RNA, 32 nt, Human
augguaccuuuuugucaggacaauuaggauug

SEQ ID NO: 70246 - RNA, 32 nt, Human
augguacuagcacaccacugcaugucucuaga

SEQ ID NO: 70247 - RNA, 32 nt, Human
augguacugcugcauccgggugucuggaggcu

SEQ ID NO: 70248 - RNA, 32 nt, Human
augguacugcuggcccaacacugcucucuuug

SEQ ID NO: 70249 - RNA, 32 nt, Human
augguacuuccucugugaacugugugugaauc

SEQ ID NO: 70250 - RNA, 32 nt, Human
augguagaaauguguuucucugcagaaacauc

SEQ ID NO: 70251 - RNA, 32 nt, Human
augguagaauggggugggggaggagggcgcac

SEQ ID NO: 70252 - RNA, 28 nt, Human
augguagcaagugcugcccuuuaucagc

SEQ ID NO: 70253 - RNA, 32 nt, Human
augguagcaaugggauauaauacccuucuaag

SEQ ID NO: 70254 - RNA, 32 nt, Human
augguagcaaugggauauaauaccuuucuaag

SEQ ID NO: 70255 - RNA, 32 nt, Human
augguagcaccacugcacuucagccuggacaa

SEQ ID NO: 70256 - RNA, 32 nt, Human
augguagcauuuuugcuugcuguguuuuccau

SEQ ID NO: 70257 - RNA, 32 nt, Human
augguagcgcacaccuguaauuccagcuacuc

SEQ ID NO: 70258 - RNA, 22 nt, Human
augguagcucacgccuguaauc

SEQ ID NO: 70259 - RNA, 20 nt, Human
augguagcucaugccuguaa

SEQ ID NO: 70260 - RNA, 22 nt, Human
augguagcucaugccuguaauc

SEQ ID NO: 70261 - RNA, 22 nt, Human
augguagcucaugcuuguaauc

SEQ ID NO: 70262 - RNA, 32 nt, Human
augguagcuuuggacuugcuuccccgucugac

SEQ ID NO: 70263 - RNA, 32 nt, Human
augguaggggaaacgugcuccuucuccaugcu

SEQ ID NO: 70264 - RNA, 22 nt, Human
augguaguccaugccuguaguc

SEQ ID NO: 70265 - RNA, 22 nt, Human
augguagugcaugccuguaguc

SEQ ID NO: 70266 - RNA, 32 nt, Human
augguaguggaggagccgaguaucuugauugu

SEQ ID NO: 70267 - RNA, 32 nt, Human
augguauagucuuucucaguucuuuuaauuuu

SEQ ID NO: 70268 - RNA, 32 nt, Human
augguauauuaacucuugagggcugcuaaacc

SEQ ID NO: 70269 - RNA, 32 nt, Human
augguaucaagaaaccccgaucacaaagauac

SEQ ID NO: 70270 - RNA, 32 nt, Human
augguauccauuagcugggacuuaaaugacuc

SEQ ID NO: 70271 - RNA, 32 nt, Human
augguauccuuccuaauuaucuuccaaaggaa

SEQ ID NO: 70272 - RNA, 32 nt, Human
augguaugaauccaggagguggagcuugcagu

SEQ ID NO: 70273 - RNA, 32 nt, Human
augguaugcucacaauuuucugcaaguugccu

SEQ ID NO: 70274 - RNA, 21 nt, Human
augguauggacagaucuucug

SEQ ID NO: 70275 - RNA, 32 nt, Human
augguauugcagcuucacugccugcguuccug

SEQ ID NO: 70276 - RNA, 32 nt, Human
augguauuuugaaaaguguucuuuccguguuc

SEQ ID NO: 70277 - RNA, 32 nt, Human
auggucaaaggggcugggcaugguggcucacg

SEQ ID NO: 70278 - RNA, 32 nt, Human
auggucaaggguguccugccugccugggucca

SEQ ID NO: 70279 - RNA, 22 nt, Human
auggucaauauuugguuuccua

SEQ ID NO: 70280 - RNA, 19 nt, Human
auggucacaagcacuccug

SEQ ID NO: 70281 - RNA, 32 nt, Human
auggucacaccacugcacuccagccugggcaa

SEQ ID NO: 70282 - RNA, 19 nt, Human
auggucacauacucuucua

SEQ ID NO: 70283 - RNA, 20 nt, Human
auggucacaugccaucucuu

SEQ ID NO: 70284 - RNA, 19 nt, Human
auggucaccaucauuccug

SEQ ID NO: 70285 - RNA, 19 nt, Human
auggucacccguauuuccu

SEQ ID NO: 70286 - RNA, 32 nt, Human
auggucacuacaggaugguggagcagggggca

SEQ ID NO: 70287 - RNA, 21 nt, Human
auggucacuagaaagucucuu

SEQ ID NO: 70288 - RNA, 32 nt, Human
auggucacuagguaugcaaucacgcauucaaa

SEQ ID NO: 70289 - RNA, 18 nt, Human
auggucacuauaguuuuc

SEQ ID NO: 70290 - RNA, 32 nt, Human
auggucacugcucuccucagggaccaggacaa

SEQ ID NO: 70291 - RNA, 19 nt, Human
auggucacuuccucucuua

SEQ ID NO: 70292 - RNA, 32 nt, Human
auggucacuuccucucuuaaaacagaaccagg

SEQ ID NO: 70293 - RNA, 22 nt, Human
auggucacuucuccauuuccug

SEQ ID NO: 70294 - RNA, 32 nt, Human
auggucagaggagacccagcuguccugcaccc

SEQ ID NO: 70295 - RNA, 32 nt, Human
auggucaggacagucagccacuacgugaugcu

SEQ ID NO: 70296 - RNA, 32 nt, Human
auggucaggaugguggugacagguguggggua

SEQ ID NO: 70297 - RNA, 32 nt, Human
auggucagugaaagcgcuuccucuuuaacucu

SEQ ID NO: 70298 - RNA, 32 nt, Human
auggucauaccaccgcacuccagccugagcaa

SEQ ID NO: 70299 - RNA, 32 nt, Human
auggucaucacugauaguaggauucuccucuc

SEQ ID NO: 70300 - RNA, 20 nt, Human
auggucaugacuuucuucug

SEQ ID NO: 70301 - RNA, 32 nt, Human
auggucaugccacugcacuccagccugggcaa

SEQ ID NO: 70302 - RNA, 19 nt, Human
auggucauuaccuuuccug

SEQ ID NO: 70303 - RNA, 20 nt, Human
auggucauuagcuccuuuua

SEQ ID NO: 70304 - RNA, 21 nt, Human
auggucauuaugccuuucucc

SEQ ID NO: 70305 - RNA, 31 nt, Human
augguccaaguguccauccagagaugagacu

SEQ ID NO: 70306 - RNA, 32 nt, Human
augguccacaggcuggagggugcauggaaccc

SEQ ID NO: 70307 - RNA, 32 nt, Human
augguccacaugcucacgcuguccaccugcca

SEQ ID NO: 70308 - RNA, 32 nt, Human
augguccaggacaggaggaugaaaugagaucc

SEQ ID NO: 70309 - RNA, 32 nt, Human
augguccaguaggaagagaagcagcccugauu

SEQ ID NO: 70310 - RNA, 32 nt, Human
augguccaucagcucucugccuuccagccaga

SEQ ID NO: 70311 - RNA, 32 nt, Human
augguccaugcauuguaauguccccuucucuc

SEQ ID NO: 70312 - RNA, 32 nt, Human
auggucccaccugugcgagacccccuguccug

SEQ ID NO: 70313 - RNA, 32 nt, Human
auggucccaggugagagaaggaagugaggcca

SEQ ID NO: 70314 - RNA, 32 nt, Human
augguccccugcccugcagcuccaccaugagg

SEQ ID NO: 70315 - RNA, 32 nt, Human
auggucccuccccugugcgccuuccucucagg

SEQ ID NO: 70316 - RNA, 24 nt, Human
auggucccucucaaguaucuccug

SEQ ID NO: 70317 - RNA, 32 nt, Human
auggucccuucccucuuucucucccuuucccu

SEQ ID NO: 70318 - RNA, 32 nt, Human
auggucccuuucuccacugcacuggagcuuug

SEQ ID NO: 70319 - RNA, 32 nt, Human
augguccgagggaccuuccacagcaaguagaa

SEQ ID NO: 70320 - RNA, 32 nt, Human
augguccucacacccagcucccugcacaccca

SEQ ID NO: 70321 - RNA, 32 nt, Human
augguccuccacccuuccugccauucugcccu

SEQ ID NO: 70322 - RNA, 31 nt, Human
augguccugcucucuggccccugcauccccu

SEQ ID NO: 70323 - RNA, 32 nt, Human
augguccugguuggcccuggcuuugccuacua

SEQ ID NO: 70324 - RNA, 32 nt, Human
auggucgcauuuucccugccuaccucacagag

SEQ ID NO: 70325 - RNA, 32 nt, Human
auggucggaggcagagguguuuccagugaucg

SEQ ID NO: 70326 - RNA, 31 nt, Human
auggucggucacuaugggccuggugucuccc

SEQ ID NO: 70327 - RNA, 21 nt, Human
auggucgugaaagcucuccua

SEQ ID NO: 70328 - RNA, 32 nt, Human
auggucuagaggcuggagauucaagaucuggg

SEQ ID NO: 70329 - RNA, 32 nt, Human
auggucuaggguagugcuggugaggagauaac

SEQ ID NO: 70330 - RNA, 32 nt, Human
auggucucaaucuccugaccucauguccaccu

SEQ ID NO: 70331 - RNA, 32 nt, Human
auggucucaaucuccugaccucauguccgccc

SEQ ID NO: 70332 - RNA, 32 nt, Human
auggucucagggaacagccugcuucccaccag

SEQ ID NO: 70333 - RNA, 32 nt, Human
auggucucaugcgcaugugucuugccccacuu

SEQ ID NO: 70334 - RNA, 32 nt, Human
auggucucauuuccuuugcuucuuuggaauau

SEQ ID NO: 70335 - RNA, 32 nt, Human
auggucuccugucuccagccugcuugaucuuu

SEQ ID NO: 70336 - RNA, 32 nt, Human
auggucucgaucuccugaccucgugaugggcc

SEQ ID NO: 70337 - RNA, 32 nt, Human
auggucucgaucuccugaccucguguccaccc

SEQ ID NO: 70338 - RNA, 32 nt, Human
auggucucgaucuccugaccuuguguccgccc

SEQ ID NO: 70339 - RNA, 32 nt, Human
auggucucgaucuccugacuucgugucugccc

SEQ ID NO: 70340 - RNA, 32 nt, Human
auggucucgaucugcugaccucgugauccacc

SEQ ID NO: 70341 - RNA, 32 nt, Human
auggucucgauuuccugaccucguguccgccc

SEQ ID NO: 70342 - RNA, 32 nt, Human
auggucucuaaccacuugacaccagaaacccc

SEQ ID NO: 70343 - RNA, 32 nt, Human
auggucucuacagggaggggagucuagggaau

SEQ ID NO: 70344 - RNA, 28 nt, Human
auggucucuagugcugccuaucaacuug

SEQ ID NO: 70345 - RNA, 32 nt, Human
auggucucuaucuccugaccucgugauccgcc

SEQ ID NO: 70346 - RNA, 32 nt, Human
auggucucuaucuccugaccucgugaucugcc

SEQ ID NO: 70347 - RNA, 32 nt, Human
auggucucuaucuccugaccucguguccgccc

SEQ ID NO: 70348 - RNA, 32 nt, Human
auggucucuaucuccugaccuugugauccgcc

SEQ ID NO: 70349 - RNA, 32 nt, Human
auggucucucccuccuggccucaggcccauuc

SEQ ID NO: 70350 - RNA, 32 nt, Human
auggucucugaagccaaaccugaguuugguuu

SEQ ID NO: 70351 - RNA, 24 nt, Human
auggucucugucacaucugggaca

SEQ ID NO: 70352 - RNA, 32 nt, Human
auggucugacaccugggcuggagugcaguggu

SEQ ID NO: 70353 - RNA, 32 nt, Human
auggucugcagcucugggcccccagccccacu

SEQ ID NO: 70354 - RNA, 32 nt, Human
auggucuggagugcucuguagaacagcccgaa

SEQ ID NO: 70355 - RNA, 32 nt, Human
auggucuggaguggucuggaaagcagggucag

SEQ ID NO: 70356 - RNA, 29 nt, Human
auggucuggcugcgcucagucccuuaagc

SEQ ID NO: 70357 - RNA, 32 nt, Human
auggucuggggugaccccaugccuguaacuga

SEQ ID NO: 70358 - RNA, 32 nt, Human
auggucugguccaaucugcaucuuguuguguc

SEQ ID NO: 70359 - RNA, 18 nt, Human
auggucuucgcgucuccu

SEQ ID NO: 70360 - RNA, 32 nt, Human
auggucuugaucuccugaccucguguccaccc

SEQ ID NO: 70361 - RNA, 32 nt, Human
auggucuuuaucuccugaccucaugauccgcc

SEQ ID NO: 70362 - RNA, 32 nt, Human
auggucuuugagacagaggauucugguguagg

SEQ ID NO: 70363 - RNA, 32 nt, Human
auggugaaaccccgucucuaccaaaauacaaa

SEQ ID NO: 70364 - RNA, 32 nt, Human
auggugaaacccugucucuaccaaaauacaaa

SEQ ID NO: 70365 - RNA, 32 nt, Human
auggugaacuggaguuucucuugugagaguuc

SEQ ID NO: 70366 - RNA, 32 nt, Human
auggugaaggaaacucagaaacuuacugcagu

SEQ ID NO: 70367 - RNA, 20 nt, Human
auggugaauccccaaaaaua

SEQ ID NO: 70368 - RNA, 32 nt, Human
auggugaaugugccagggacuguugacauuca

SEQ ID NO: 70369 - RNA, 32 nt, Human
auggugacaaguccugggcaguucugguaaac

SEQ ID NO: 70370 - RNA, 32 nt, Human
auggugacaauguguggaggacauaggccaga

SEQ ID NO: 70371 - RNA, 22 nt, Human
auggugacacacaccuguaauc

SEQ ID NO: 70372 - RNA, 22 nt, Human
auggugacacaugccuguaguc

SEQ ID NO: 70373 - RNA, 22 nt, Human
auggugacaggugccuguaauc

SEQ ID NO: 70374 - RNA, 22 nt, Human
auggugacccacaccuguaauc

SEQ ID NO: 70375 - RNA, 22 nt, Human
auggugacgggugccuguaauc

SEQ ID NO: 70376 - RNA, 32 nt, Human
auggugacucacaauuguccucagaaccuagu

SEQ ID NO: 70377 - RNA, 22 nt, Human
auggugacucacaucuguaauc

SEQ ID NO: 70378 - RNA, 22 nt, Human
auggugacucaggccuguaauc

SEQ ID NO: 70379 - RNA, 22 nt, Human
auggugacucauaccuguaauc

SEQ ID NO: 70380 - RNA, 22 nt, Human
auggugacucaugccuguaauc

SEQ ID NO: 70381 - RNA, 32 nt, Human
auggugacugauguaguuauuaauacuaccaa

SEQ ID NO: 70382 - RNA, 32 nt, Human
auggugagaaaacagaaaaaugagaucagaag

SEQ ID NO: 70383 - RNA, 32 nt, Human
auggugagaaggaggaugaagggaggagagag

SEQ ID NO: 70384 - RNA, 32 nt, Human
auggugagacuccuaaaaugacaggaguuuuu

SEQ ID NO: 70385 - RNA, 32 nt, Human
auggugagacucugccucuacaaaagaaaaau

SEQ ID NO: 70386 - RNA, 32 nt, Human
auggugagcugcaugucuggaggcuuaacaga

SEQ ID NO: 70387 - RNA, 32 nt, Human
auggugaggcgaaggccagguugggggcagug

SEQ ID NO: 70388 - RNA, 32 nt, Human
auggugaguuggcuuccagagcuguggguaga

SEQ ID NO: 70389 - RNA, 32 nt, Human
auggugauauuacuggaacucaucucauaggg

SEQ ID NO: 70390 - RNA, 32 nt, Human
auggugaugaggcacccugaggccuccauggg

SEQ ID NO: 70391 - RNA, 22 nt, Human
auggugaugagugccuguaguc

SEQ ID NO: 70392 - RNA, 22 nt, Human
auggugaugcacaccuguaauc

SEQ ID NO: 70393 - RNA, 22 nt, Human
auggugaugcaugccuguaauc

SEQ ID NO: 70394 - RNA, 32 nt, Human
auggugauggagggcaacaaggacuccgagga

SEQ ID NO: 70395 - RNA, 18 nt, Human
auggugaugucuguaauc

SEQ ID NO: 70396 - RNA, 21 nt, Human
auggugauuaaaaugaguuua

SEQ ID NO: 70397 - RNA, 32 nt, Human
auggugcaaguauaucaaagaggcacaaaaac

SEQ ID NO: 70398 - RNA, 21 nt, Human
auggugcacacgccuguaauc

SEQ ID NO: 70399 - RNA, 32 nt, Human
auggugcagaagcagcaggaggcacuugagga

SEQ ID NO: 70400 - RNA, 32 nt, Human
auggugcagcacucuggcauuuaucaccccca

SEQ ID NO: 70401 - RNA, 32 nt, Human
auggugcagguaaaagcacaucuuucucacac

SEQ ID NO: 70402 - RNA, 19 nt, Human
auggugcaugccuguaauc

SEQ ID NO: 70403 - RNA, 19 nt, Human
auggugcaugccuguaguc

SEQ ID NO: 70404 - RNA, 22 nt, Human
auggugcauuacguauuuccug

SEQ ID NO: 70405 - RNA, 24 nt, Human
auggugccaaggcugucuuuguau

SEQ ID NO: 70406 - RNA, 32 nt, Human
auggugccacuacacuccagccuggguaaaag

SEQ ID NO: 70407 - RNA, 32 nt, Human
auggugccacugcaccaucuggacaacagagc

SEQ ID NO: 70408 - RNA, 32 nt, Human
auggugccacugcacuccagccuaggugacag

SEQ ID NO: 70409 - RNA, 32 nt, Human
auggugccacugcacuccagccuggcgacaga

SEQ ID NO: 70410 - RNA, 32 nt, Human
auggugccacugcacuccagccugggcaacag

SEQ ID NO: 70411 - RNA, 32 nt, Human
auggugccacugcacuccagccugggcgaaag

SEQ ID NO: 70412 - RNA, 32 nt, Human
auggugccacugcacuccagccugggggacag

SEQ ID NO: 70413 - RNA, 32 nt, Human
auggugccacugcacuccagccugggugacag

SEQ ID NO: 70414 - RNA, 32 nt, Human
auggugccacugcacuccagccuggguggcag

SEQ ID NO: 70415 - RNA, 32 nt, Human
auggugccacugcacuccagcuuaggugacag

SEQ ID NO: 70416 - RNA, 32 nt, Human
auggugccacugcacuccaguauggaugacau

SEQ ID NO: 70417 - RNA, 32 nt, Human
auggugccacugcacuccagucugggcaacag

SEQ ID NO: 70418 - RNA, 32 nt, Human
auggugccacugcacucuaaccugggcgacag

SEQ ID NO: 70419 - RNA, 32 nt, Human
auggugccacugcacuucagccugggcaacag

SEQ ID NO: 70420 - RNA, 32 nt, Human
auggugccacugcauuccagccugggcaacag

SEQ ID NO: 70421 - RNA, 32 nt, Human
auggugccacugcauuccagccugggugacag

SEQ ID NO: 70422 - RNA, 32 nt, Human
auggugccacuggacuccagccugggagacag

SEQ ID NO: 70423 - RNA, 32 nt, Human
auggugccacuguacuccagccugggugauag

SEQ ID NO: 70424 - RNA, 32 nt, Human
auggugccaggcagggcagacauggcaaggaa

SEQ ID NO: 70425 - RNA, 32 nt, Human
auggugccaucauacucacugcagccuugacc

SEQ ID NO: 70426 - RNA, 32 nt, Human
auggugccaugaaaagguuauguaauaaaaua

SEQ ID NO: 70427 - RNA, 32 nt, Human
auggugccauugcccuccagccugggcaagaa

SEQ ID NO: 70428 - RNA, 32 nt, Human
auggugcccaagggaagagacacuccuuuccu

SEQ ID NO: 70429 - RNA, 32 nt, Human
auggugcccaggcuggagugcaguggcgugau

SEQ ID NO: 70430 - RNA, 32 nt, Human
auggugcccgugccucugugcuguguauguga

SEQ ID NO: 70431 - RNA, 32 nt, Human
auggugcccuauaugggguauuggacauagau

SEQ ID NO: 70432 - RNA, 32 nt, Human
auggugccguugcacuccagccgggcaacaag

SEQ ID NO: 70433 - RNA, 22 nt, Human
auggugccucacaccuguaauc

SEQ ID NO: 70434 - RNA, 32 nt, Human
auggugccucaguaaauauguuauuaaauaug

SEQ ID NO: 70435 - RNA, 32 nt, Human
auggugccuccagggagccuuccuggucccag

SEQ ID NO: 70436 - RNA, 32 nt, Human
auggugccuccugcccucuccucucucaggag

SEQ ID NO: 70437 - RNA, 32 nt, Human
auggugccugugugccuggccuuggggauggc

SEQ ID NO: 70438 - RNA, 32 nt, Human
auggugcgagucacggaucugcgcaggaaggg

SEQ ID NO: 70439 - RNA, 32 nt, Human
auggugcggcaucuugcuguuguacuucugaa

SEQ ID NO: 70440 - RNA, 24 nt, Human
auggugcuagcugcaaguccauca

SEQ ID NO: 70441 - RNA, 32 nt, Human
auggugcucacaaucauauacagggaacccug

SEQ ID NO: 70442 - RNA, 32 nt, Human
auggugcuccagaccaugaaacugcuagcaau

SEQ ID NO: 70443 - RNA, 32 nt, Human
auggugcucuggggcuggaggcuaguaaggaa

SEQ ID NO: 70444 - RNA, 32 nt, Human
auggugcucuuuuguugaaccuguauugauuu

SEQ ID NO: 70445 - RNA, 32 nt, Human
auggugcugaugguaaaguuugagacuuuugc

SEQ ID NO: 70446 - RNA, 25 nt, Human
auggugcugcaccuacugcucuucu

SEQ ID NO: 70447 - RNA, 22 nt, Human
auggugcugcaugccugcaauc

SEQ ID NO: 70448 - RNA, 32 nt, Human
auggugcugcuccuguccagagacaggcccuc

SEQ ID NO: 70449 - RNA, 32 nt, Human
auggugcuggcaggaauggcuaagggugaugg

SEQ ID NO: 70450 - RNA, 32 nt, Human
auggugcuugcuggugccugccaccuucaagu

SEQ ID NO: 70451 - RNA, 32 nt, Human
auggugcuuggggcuuugugaaugaucagugg

SEQ ID NO: 70452 - RNA, 32 nt, Human
augguggaaggugaacagggagcaggcacggc

SEQ ID NO: 70453 - RNA, 32 nt, Human
augguggaagucagagagcaacccuggggauu

SEQ ID NO: 70454 - RNA, 21 nt, Human
augguggacucgccuguaauc

SEQ ID NO: 70455 - RNA, 32 nt, Human
augguggagaccagggacaggagagccagcag

SEQ ID NO: 70456 - RNA, 32 nt, Human
augguggagagggagcuggggcgcauggggaa

SEQ ID NO: 70457 - RNA, 22 nt, Human
augguggagcaugccuguaguc

SEQ ID NO: 70458 - RNA, 32 nt, Human
augguggaggcagcgaugagaccuggagucua

SEQ ID NO: 70459 - RNA, 32 nt, Human
augguggagguggaggauaugaugguuacaau

SEQ ID NO: 70460 - RNA, 32 nt, Human
augguggagguggugguggugguggugguagu

SEQ ID NO: 70461 - RNA, 22 nt, Human
augguggcaaacgccuguaauc

SEQ ID NO: 70462 - RNA, 22 nt, Human
augguggcaagagccuguaauc

SEQ ID NO: 70463 - RNA, 22 nt, Human
augguggcaagcgccuguaguc

SEQ ID NO: 70464 - RNA, 32 nt, Human
augguggcaaguaccuguagucucagcuauug

SEQ ID NO: 70465 - RNA, 22 nt, Human
augguggcacaagccuguaauc

SEQ ID NO: 70466 - RNA, 22 nt, Human
augguggcacacaccuguaauc

SEQ ID NO: 70467 - RNA, 22 nt, Human
augguggcacacaccuguaguc

SEQ ID NO: 70468 - RNA, 32 nt, Human
augguggcacacaccuguagucccaggcugag

SEQ ID NO: 70469 - RNA, 22 nt, Human
augguggcacacgccuguaauc

SEQ ID NO: 70470 - RNA, 22 nt, Human
augguggcacacgccuguaguc

SEQ ID NO: 70471 - RNA, 22 nt, Human
augguggcacacgcuuguaauc

SEQ ID NO: 70472 - RNA, 32 nt, Human
augguggcacauaccuguggucucagcuauuc

SEQ ID NO: 70473 - RNA, 22 nt, Human
augguggcacaugacuguaauc

SEQ ID NO: 70474 - RNA, 22 nt, Human
augguggcacaugccuauaguc

SEQ ID NO: 70475 - RNA, 20 nt, Human
augguggcacaugccuguaa

SEQ ID NO: 70476 - RNA, 22 nt, Human
augguggcacaugccuguaauc

SEQ ID NO: 70477 - RNA, 22 nt, Human
augguggcacaugccuguaguc

SEQ ID NO: 70478 - RNA, 32 nt, Human
augguggcacaugccuguggucucagcuacuu

SEQ ID NO: 70479 - RNA, 22 nt, Human
augguggcacaugcuuguaauc

SEQ ID NO: 70480 - RNA, 32 nt, Human
augguggcaccacugcacuccagccuggguga

SEQ ID NO: 70481 - RNA, 22 nt, Human
augguggcaccugccuguaauc

SEQ ID NO: 70482 - RNA, 21 nt, Human
augguggcacgcucuguaauc

SEQ ID NO: 70483 - RNA, 32 nt, Human
augguggcacgugaguuaggucucagcuacuc

SEQ ID NO: 70484 - RNA, 32 nt, Human
augguggcaggcaccuguaaucccagcuacuu

SEQ ID NO: 70485 - RNA, 32 nt, Human
augguggcaggcaccuguagucccagccaguc

SEQ ID NO: 70486 - RNA, 32 nt, Human
augguggcaggcaccuguagucccagcuacuc

SEQ ID NO: 70487 - RNA, 22 nt, Human
augguggcaggcgccuguaauc

SEQ ID NO: 70488 - RNA, 22 nt, Human
augguggcaggcgccuguaguc

SEQ ID NO: 70489 - RNA, 22 nt, Human
augguggcaggugccuguaauc

SEQ ID NO: 70490 - RNA, 22 nt, Human
augguggcaggugccuguaguc

SEQ ID NO: 70491 - RNA, 22 nt, Human
augguggcagucaccuguaauc

SEQ ID NO: 70492 - RNA, 22 nt, Human
augguggcaguugccuguaauc

SEQ ID NO: 70493 - RNA, 22 nt, Human
augguggcauaugccuguaguc

SEQ ID NO: 70494 - RNA, 22 nt, Human
augguggcaugcgccuguaauc

SEQ ID NO: 70495 - RNA, 22 nt, Human
augguggcaugugccugcaauc

SEQ ID NO: 70496 - RNA, 22 nt, Human
augguggcaugugccuguaauc

SEQ ID NO: 70497 - RNA, 22 nt, Human
augguggcaugugccuguaguc

SEQ ID NO: 70498 - RNA, 22 nt, Human
augguggcaugugccuguauuc

SEQ ID NO: 70499 - RNA, 32 nt, Human
augguggcaugugccuguggucucagcuacuc

SEQ ID NO: 70500 - RNA, 22 nt, Human
augguggcauguggcuguaauc

SEQ ID NO: 70501 - RNA, 22 nt, Human
augguggcauuugccuguaauc

SEQ ID NO: 70502 - RNA, 30 nt, Human
augguggccaggagugcggucuacuugggg

SEQ ID NO: 70503 - RNA, 22 nt, Human
augguggcccacgccuguaauc

SEQ ID NO: 70504 - RNA, 32 nt, Human
augguggccgugguggucaugugccucguguc

SEQ ID NO: 70505 - RNA, 32 nt, Human
augguggccugaggccaggaggcugcagcugc

SEQ ID NO: 70506 - RNA, 22 nt, Human
augguggcgaaugacuguaauc

SEQ ID NO: 70507 - RNA, 22 nt, Human
augguggcgaaugccuguaauc

SEQ ID NO: 70508 - RNA, 22 nt, Human
augguggcgagugccuguaauc

SEQ ID NO: 70509 - RNA, 22 nt, Human
augguggcgcaagccuguaauc

SEQ ID NO: 70510 - RNA, 22 nt, Human
augguggcgcacaccuguaauc

SEQ ID NO: 70511 - RNA, 22 nt, Human
augguggcgcacaccuguaguc

SEQ ID NO: 70512 - RNA, 22 nt, Human
augguggcgcacgccuguaguc

SEQ ID NO: 70513 - RNA, 22 nt, Human
augguggcgcauaccuguaauc

SEQ ID NO: 70514 - RNA, 22 nt, Human
augguggcgcauaccuguaguc

SEQ ID NO: 70515 - RNA, 22 nt, Human
augguggcgcaugccuguaauc

SEQ ID NO: 70516 - RNA, 22 nt, Human
augguggcgcaugccuguaguc

SEQ ID NO: 70517 - RNA, 22 nt, Human
augguggcgcaugccugugauc

SEQ ID NO: 70518 - RNA, 32 nt, Human
augguggcgccugccuguggucucagcuacuc

SEQ ID NO: 70519 - RNA, 22 nt, Human
augguggcgggcgccuguaguc

SEQ ID NO: 70520 - RNA, 22 nt, Human
augguggcgggugccuguaauc

SEQ ID NO: 70521 - RNA, 22 nt, Human
augguggcgggugccuguaguc

SEQ ID NO: 70522 - RNA, 22 nt, Human
augguggcguacgccuguaguc

SEQ ID NO: 70523 - RNA, 22 nt, Human
augguggcguaugccuguaauc

SEQ ID NO: 70524 - RNA, 20 nt, Human
augguggcgugccuguauuc

SEQ ID NO: 70525 - RNA, 22 nt, Human
augguggcgugugccuguaauc

SEQ ID NO: 70526 - RNA, 22 nt, Human
augguggcucaagccuauaauc

SEQ ID NO: 70527 - RNA, 32 nt, Human
augguggcucaagccucuaaucucaacgcuuu

SEQ ID NO: 70528 - RNA, 22 nt, Human
augguggcucaagccuguaauc

SEQ ID NO: 70529 - RNA, 22 nt, Human
augguggcucacaccgguaauc

SEQ ID NO: 70530 - RNA, 22 nt, Human
augguggcucacaccuauaauc

SEQ ID NO: 70531 - RNA, 32 nt, Human
augguggcucacaccuguaacccccagcacuu

SEQ ID NO: 70532 - RNA, 22 nt, Human
augguggcucacaccuguaauc

SEQ ID NO: 70533 - RNA, 22 nt, Human
augguggcucacaccuguaauu

SEQ ID NO: 70534 - RNA, 32 nt, Human
augguggcucacaccuguaauuccagcacuuu

SEQ ID NO: 70535 - RNA, 32 nt, Human
augguggcucacaccuguaauucuagcacuuu

SEQ ID NO: 70536 - RNA, 32 nt, Human
augguggcucacaccuguaauuucagcaccuu

SEQ ID NO: 70537 - RNA, 22 nt, Human
augguggcucacaccugugauc

SEQ ID NO: 70538 - RNA, 32 nt, Human
augguggcucacaccugugcucccagcacuuu

SEQ ID NO: 70539 - RNA, 22 nt, Human
augguggcucacacguguaauc

SEQ ID NO: 70540 - RNA, 32 nt, Human
augguggcucacccccuguaaucccagcacuu

SEQ ID NO: 70541 - RNA, 22 nt, Human
augguggcucacgcccguaauc

SEQ ID NO: 70542 - RNA, 22 nt, Human
augguggcucacgccuauaauu

SEQ ID NO: 70543 - RNA, 22 nt, Human
augguggcucacgccugaaauc

SEQ ID NO: 70544 - RNA, 20 nt, Human
augguggcucacgccuguaa

SEQ ID NO: 70545 - RNA, 22 nt, Human
augguggcucacgccuguaauc

SEQ ID NO: 70546 - RNA, 32 nt, Human
augguggcucacgccuguaauccuagcauuuu

SEQ ID NO: 70547 - RNA, 22 nt, Human
augguggcucacgccuguaguc

SEQ ID NO: 70548 - RNA, 22 nt, Human
augguggcucacgccugugauc

SEQ ID NO: 70549 - RNA, 32 nt, Human
augguggcucacgccuguggucucagcacuuu

SEQ ID NO: 70550 - RNA, 22 nt, Human
augguggcucacgcuuguaauc

SEQ ID NO: 70551 - RNA, 22 nt, Human
augguggcucaggccuguaauc

SEQ ID NO: 70552 - RNA, 22 nt, Human
augguggcucauaccuguaauc

SEQ ID NO: 70553 - RNA, 22 nt, Human
augguggcucaugccuauaauc

SEQ ID NO: 70554 - RNA, 22 nt, Human
augguggcucaugccuauauuc

SEQ ID NO: 70555 - RNA, 22 nt, Human
augguggcucaugccuauuauc

SEQ ID NO: 70556 - RNA, 22 nt, Human
augguggcucaugccuccaauc

SEQ ID NO: 70557 - RNA, 20 nt, Human
augguggcucaugccuguaa

SEQ ID NO: 70558 - RNA, 22 nt, Human
augguggcucaugccuguaauc

SEQ ID NO: 70559 - RNA, 32 nt, Human
augguggcucaugccuguaaucccagcauuuu

SEQ ID NO: 70560 - RNA, 22 nt, Human
augguggcucaugccuguaguc

SEQ ID NO: 70561 - RNA, 32 nt, Human
augguggcucaugccuguaucccagcacuuug

SEQ ID NO: 70562 - RNA, 22 nt, Human
augguggcucaugccugugauc

SEQ ID NO: 70563 - RNA, 22 nt, Human
augguggcucaugcuuguaauc

SEQ ID NO: 70564 - RNA, 32 nt, Human
augguggcucauguuuguaaaucccagcacuu

SEQ ID NO: 70565 - RNA, 22 nt, Human
augguggcucccgccuguaauc

SEQ ID NO: 70566 - RNA, 22 nt, Human
augguggcucgugccuguaauc

SEQ ID NO: 70567 - RNA, 22 nt, Human
augguggcugacgccuguaauc

SEQ ID NO: 70568 - RNA, 22 nt, Human
augguggcuggcgccuguaguc

SEQ ID NO: 70569 - RNA, 22 nt, Human
augguggcuggugucuguaauc

SEQ ID NO: 70570 - RNA, 22 nt, Human
augguggcuuacaccuguaauc

SEQ ID NO: 70571 - RNA, 22 nt, Human
augguggcuuacaucuguaauc

SEQ ID NO: 70572 - RNA, 22 nt, Human
augguggcuuacgccuguaauc

SEQ ID NO: 70573 - RNA, 22 nt, Human
augguggcuuaugccuguaauc

SEQ ID NO: 70574 - RNA, 22 nt, Human
augguggcuugcaccuguaauc

SEQ ID NO: 70575 - RNA, 32 nt, Human
auggugggaaauucagcugaguuccaccaauu

SEQ ID NO: 70576 - RNA, 32 nt, Human
auggugggagagacugugaggcggcagcuggg

SEQ ID NO: 70577 - RNA, 32 nt, Human
auggugggagauguuguuacagaacugggcuu

SEQ ID NO: 70578 - RNA, 32 nt, Human
auggugggauaagagaaaagccaagggcagaa

SEQ ID NO: 70579 - RNA, 32 nt, Human
auggugggaugcugaggucggaggcuucgcuu

SEQ ID NO: 70580 - RNA, 32 nt, Human
auggugggcaccaaucuacaacuaugucauua

SEQ ID NO: 70581 - RNA, 19 nt, Human
auggugggcaccuguaauc

SEQ ID NO: 70582 - RNA, 32 nt, Human
augguggggaggauggggugaauuuaggaaag

SEQ ID NO: 70583 - RNA, 22 nt, Human
augguggggcacgccuguaguc

SEQ ID NO: 70584 - RNA, 22 nt, Human
augguggggcaugccuguaguc

SEQ ID NO: 70585 - RNA, 22 nt, Human
augguggggcgugccuguaguc

SEQ ID NO: 70586 - RNA, 32 nt, Human
auggugggggcagcuccucuucuucugacuca

SEQ ID NO: 70587 - RNA, 32 nt, Human
augguggggguggccccggcaggccuggcucc

SEQ ID NO: 70588 - RNA, 32 nt, Human
augguggggugagggaauaugagugcguggug

SEQ ID NO: 70589 - RNA, 22 nt, Human
augguggguugugccuguaauc

SEQ ID NO: 70590 - RNA, 22 nt, Human
auggugguacacgccuguaguc

SEQ ID NO: 70591 - RNA, 18 nt, Human
auggugguacccaagaua

SEQ ID NO: 70592 - RNA, 22 nt, Human
auggugguacucgccuguaguc

SEQ ID NO: 70593 - RNA, 22 nt, Human
auggugguagaugccuguaauu

SEQ ID NO: 70594 - RNA, 22 nt, Human
auggugguaggugccuguaauc

SEQ ID NO: 70595 - RNA, 32 nt, Human
auggugguagugcaccuguagucccagcuacu

SEQ ID NO: 70596 - RNA, 32 nt, Human
auggugguauguugaagcguugugugaucaag

SEQ ID NO: 70597 - RNA, 32 nt, Human
augguggucgagggguuggaggaauuaaaaga

SEQ ID NO: 70598 - RNA, 32 nt, Human
augguggucucaggauaacauuccaagaacgu

SEQ ID NO: 70599 - RNA, 31 nt, Human
augguggucuucuccccuugccaggccuugg

SEQ ID NO: 70600 - RNA, 32 nt, Human
augguggucuucuccccuugccaggccuugga

SEQ ID NO: 70601 - RNA, 32 nt, Human
augguggugaagaugucgguggacucuaugau

SEQ ID NO: 70602 - RNA, 22 nt, Human
augguggugagugccuguaauc

SEQ ID NO: 70603 - RNA, 22 nt, Human
augguggugcacgccuguaguc

SEQ ID NO: 70604 - RNA, 22 nt, Human
augguggugcauaccuguaguc

SEQ ID NO: 70605 - RNA, 21 nt, Human
augguggugcauccuguaauc

SEQ ID NO: 70606 - RNA, 22 nt, Human
augguggugcaugacuguaauc

SEQ ID NO: 70607 - RNA, 22 nt, Human
augguggugcaugccuguaauc

SEQ ID NO: 70608 - RNA, 22 nt, Human
augguggugcaugccuguaauu

SEQ ID NO: 70609 - RNA, 22 nt, Human
augguggugcaugccuguauuc

SEQ ID NO: 70610 - RNA, 22 nt, Human
augguggugccugccuguaguc

SEQ ID NO: 70611 - RNA, 22 nt, Human
augguggugcgugccuguaauc

SEQ ID NO: 70612 - RNA, 22 nt, Human
augguggugcgugccuguaguc

SEQ ID NO: 70613 - RNA, 32 nt, Human
auggugguggaggccaauacuuugccaaacca

SEQ ID NO: 70614 - RNA, 19 nt, Human
auggugguggccuguaauc

SEQ ID NO: 70615 - RNA, 32 nt, Human
auggugguggcuugagagccuuggggaaauua

SEQ ID NO: 70616 - RNA, 32 nt, Human
augguggugggacgucuguaaucccagcuacu

SEQ ID NO: 70617 - RNA, 32 nt, Human
augguggugggcaccuguggucucagcuacuc

SEQ ID NO: 70618 - RNA, 22 nt, Human
augguggugggugccuguaauc

SEQ ID NO: 70619 - RNA, 32 nt, Human
auggugguggugaugauguugaugacaauuau

SEQ ID NO: 70620 - RNA, 22 nt, Human
auggugguguacgccuguaauc

SEQ ID NO: 70621 - RNA, 22 nt, Human
auggugguguaugccuguaguc

SEQ ID NO: 70622 - RNA, 32 nt, Human
augguggugugcaccugagaaucccagcuacu

SEQ ID NO: 70623 - RNA, 22 nt, Human
augguggugugugccuguaauc

SEQ ID NO: 70624 - RNA, 22 nt, Human
augguggugugugccuguaguc

SEQ ID NO: 70625 - RNA, 32 nt, Human
auggugguucacaccuguaaucccggcacuuu

SEQ ID NO: 70626 - RNA, 22 nt, Human
auggugguucaugccuguaauc

SEQ ID NO: 70627 - RNA, 32 nt, Human
augguguaacacuaaaguaggugguucgugug

SEQ ID NO: 70628 - RNA, 32 nt, Human
augguguauguaaugguacaggcaaaugugac

SEQ ID NO: 70629 - RNA, 32 nt, Human
auggugucacaguguuugguucuuuuguuuug

SEQ ID NO: 70630 - RNA, 22 nt, Human
auggugucaggcaccuguaauc

SEQ ID NO: 70631 - RNA, 32 nt, Human
auggugucaggcugucacggacauaggauaaa

SEQ ID NO: 70632 - RNA, 32 nt, Human
augguguccaggcuggagugcaguggcgugau

SEQ ID NO: 70633 - RNA, 32 nt, Human
augguguccuccucugggcagcuguauaggau

SEQ ID NO: 70634 - RNA, 23 nt, Human
augguguccuggcugguuccuua

SEQ ID NO: 70635 - RNA, 32 nt, Human
auggugucugcagcagagugacagcaguggag

SEQ ID NO: 70636 - RNA, 32 nt, Human
auggugucuucauuuuuacuguauuuaacuga

SEQ ID NO: 70637 - RNA, 32 nt, Human
auggugugaacccaggaggcagagcuugcagu

SEQ ID NO: 70638 - RNA, 32 nt, Human
auggugugaacccaggaggcggugcuugcagg

SEQ ID NO: 70639 - RNA, 32 nt, Human
auggugugagugugugggugugugauaagcuu

SEQ ID NO: 70640 - RNA, 32 nt, Human
auggugugcucccagccugcagucuuuggagc

SEQ ID NO: 70641 - RNA, 18 nt, Human
auggugugcucuaaaaua

SEQ ID NO: 70642 - RNA, 32 nt, Human
augguguggaaaugcaaauaauaccaaguaaa

SEQ ID NO: 70643 - RNA, 32 nt, Human
augguguggcuggaaucauuccuguaccaaau

SEQ ID NO: 70644 - RNA, 32 nt, Human
auggugugguguuuguaggcuguggggucugg

SEQ ID NO: 70645 - RNA, 32 nt, Human
augguguguuccugucuucucuagucuugucc

SEQ ID NO: 70646 - RNA, 32 nt, Human
augguguucugacuucaagggcuggcagccag

SEQ ID NO: 70647 - RNA, 32 nt, Human
augguguugagccaucacagggcagaggucac

SEQ ID NO: 70648 - RNA, 22 nt, Human
augguguugcgugccuguaguc

SEQ ID NO: 70649 - RNA, 32 nt, Human
augguguuuagacuuaugguuguuaaaaaugu

SEQ ID NO: 70650 - RNA, 19 nt, Human
augguguuucaccauguug

SEQ ID NO: 70651 - RNA, 23 nt, Human
augguguuucaccauguuggcca

SEQ ID NO: 70652 - RNA, 32 nt, Human
augguguuucucaaacuaccaccaucuucaug

SEQ ID NO: 70653 - RNA, 32 nt, Human
augguguuucuuuuguuccuuuacagaaaugu

SEQ ID NO: 70654 - RNA, 26 nt, Human
augguuaaacugauuaguauuuccua

SEQ ID NO: 70655 - RNA, 20 nt, Human
augguuaaauacauuuccug

SEQ ID NO: 70656 - RNA, 32 nt, Human
augguuaagaguccaagaauccacauuucuaa

SEQ ID NO: 70657 - RNA, 20 nt, Human
augguuacauuacauccuua

SEQ ID NO: 70658 - RNA, 22 nt, Human
augguuacauuugaaucucuua

SEQ ID NO: 70659 - RNA, 32 nt, Human
augguuaccaugucuuucucucucacucccuc

SEQ ID NO: 70660 - RNA, 24 nt, Human
augguuacuauaugauauuuucug

SEQ ID NO: 70661 - RNA, 19 nt, Human
augguuacuccuucucuug

SEQ ID NO: 70662 - RNA, 32 nt, Human
augguuacugauggggaagugggaggcauaag

SEQ ID NO: 70663 - RNA, 32 nt, Human
augguuacuguucugucccuacaauagaaugu

SEQ ID NO: 70664 - RNA, 21 nt, Human
augguuacuuaauauuuucua

SEQ ID NO: 70665 - RNA, 19 nt, Human
augguuacuucuucucuua

SEQ ID NO: 70666 - RNA, 22 nt, Human
augguuauuccagucaucucuu

SEQ ID NO: 70667 - RNA, 32 nt, Human
augguucaaaaacagugguaggagcaaugcuu

SEQ ID NO: 70668 - RNA, 32 nt, Human
augguucaaaucuagaagaugcaguucaaaaa

SEQ ID NO: 70669 - RNA, 32 nt, Human
augguucaacacuaugaguguuugggaugugu

SEQ ID NO: 70670 - RNA, 32 nt, Human
augguucaagucacuaaagauucauuuuuguu

SEQ ID NO: 70671 - RNA, 32 nt, Human
augguucacagaggcagagugggcagggacaa

SEQ ID NO: 70672 - RNA, 32 nt, Human
augguucacagcaaugugcuacgauccaagau

SEQ ID NO: 70673 - RNA, 32 nt, Human
augguucacugcaaucucgacuuccaguuuca

SEQ ID NO: 70674 - RNA, 32 nt, Human
augguucacugcagacuccaccucuccaggcu

SEQ ID NO: 70675 - RNA, 25 nt, Human
augguucacugcagccucagccucc

SEQ ID NO: 70676 - RNA, 32 nt, Human
augguucacugcagccucgaccucccaggcuc

SEQ ID NO: 70677 - RNA, 32 nt, Human
augguucacugcagccuugaccuccagggcuc

SEQ ID NO: 70678 - RNA, 20 nt, Human
augguucacugcagcuccug

SEQ ID NO: 70679 - RNA, 32 nt, Human
augguucacugcagcuccugucacaagcuggg

SEQ ID NO: 70680 - RNA, 32 nt, Human
augguucacugcagucuugaccucccaggcuu

SEQ ID NO: 70681 - RNA, 32 nt, Human
augguucaucauugugaaagaaaugguuaucu

SEQ ID NO: 70682 - RNA, 32 nt, Human
augguucauguuacucuuucucucuccaucag

SEQ ID NO: 70683 - RNA, 32 nt, Human
augguucccacaugcauuuaugcacagaagaa

SEQ ID NO: 70684 - RNA, 32 nt, Human
augguucccacauucgcacuccauggccuccu

SEQ ID NO: 70685 - RNA, 32 nt, Human
augguuccguggaaggaacagaaacaagcacu

SEQ ID NO: 70686 - RNA, 32 nt, Human
augguuccuagagccugggggucaaguguucc

SEQ ID NO: 70687 - RNA, 32 nt, Human
augguuccucaaguuuccuuuuuaaacauuug

SEQ ID NO: 70688 - RNA, 32 nt, Human
augguuccugcccugcucacaggagcccgggc

SEQ ID NO: 70689 - RNA, 32 nt, Human
augguucuacccuuucugccuucuguuuggga

SEQ ID NO: 70690 - RNA, 32 nt, Human
augguucugaaggcucugccauccuggaaaag

SEQ ID NO: 70691 - RNA, 32 nt, Human
augguucugggggagacagaaaagaggugcgg

SEQ ID NO: 70692 - RNA, 32 nt, Human
augguucugggugagaggggagcaggcugagc

SEQ ID NO: 70693 - RNA, 32 nt, Human
augguucuuagaagccaccccuuccccaggca

SEQ ID NO: 70694 - RNA, 32 nt, Human
augguucuuaucuccccaccaucccacccugg

SEQ ID NO: 70695 - RNA, 32 nt, Human
augguucuuaucuccccaccaucccauccugg

SEQ ID NO: 70696 - RNA, 32 nt, Human
augguugaacucccaugucagcauuuuuguug

SEQ ID NO: 70697 - RNA, 32 nt, Human
augguugaaugcuguauuuucuaaagaauaaa

SEQ ID NO: 70698 - RNA, 32 nt, Human
augguugagaaaugaauaauuucccaauuagg

SEQ ID NO: 70699 - RNA, 21 nt, Human
augguugaucccucuaaaaua

SEQ ID NO: 70700 - RNA, 32 nt, Human
augguugcaaugagucaugaucacgccacugc

SEQ ID NO: 70701 - RNA, 32 nt, Human
augguugcaccacuacacuguagccuggguga

SEQ ID NO: 70702 - RNA, 32 nt, Human
augguugcaccacugcucuccaggcuugagug

SEQ ID NO: 70703 - RNA, 32 nt, Human
augguugcaccacuguacuccagccugggcga

SEQ ID NO: 70704 - RNA, 32 nt, Human
augguugcacugcagcgggaaguggcuucucu

SEQ ID NO: 70705 - RNA, 32 nt, Human
augguuggccgaugaacuuugaugacagcaau

SEQ ID NO: 70706 - RNA, 30 nt, Human
augguuggccucgcccagcuccuguacccu

SEQ ID NO: 70707 - RNA, 32 nt, Human
augguuguaauagagaaaacaaaugauugaaa

SEQ ID NO: 70708 - RNA, 22 nt, Human
augguuguacaaacaucucuug

SEQ ID NO: 70709 - RNA, 32 nt, Human
augguuguacagaggauagcaccccaccaugc

SEQ ID NO: 70710 - RNA, 32 nt, Human
augguugugaugcccaugagguguugggcugg

SEQ ID NO: 70711 - RNA, 32 nt, Human
augguugugccacugcacuccagccuggguaa

SEQ ID NO: 70712 - RNA, 32 nt, Human
augguuuaaaaaggaagaagaguggaagugaa

SEQ ID NO: 70713 - RNA, 21 nt, Human
augguuuaggccccuuaaaua

SEQ ID NO: 70714 - RNA, 32 nt, Human
augguuuaggcccuguuccagcaauaagaacc

SEQ ID NO: 70715 - RNA, 32 nt, Human
augguuuauggccugacauuacuugcaaccaa

SEQ ID NO: 70716 - RNA, 25 nt, Human
augguuuauugcugcagguuuuuug

SEQ ID NO: 70717 - RNA, 32 nt, Human
augguuucaaacacuucuccugccucagccuc

SEQ ID NO: 70718 - RNA, 32 nt, Human
augguuucagauugcuugccucuuuucucuuu

SEQ ID NO: 70719 - RNA, 32 nt, Human
augguuucagguuuuccuucccuuccuuuuuc

SEQ ID NO: 70720 - RNA, 32 nt, Human
augguuucaguuacucauagccaacugcagac

SEQ ID NO: 70721 - RNA, 32 nt, Human
augguuucauucuuaucaguccaacccuuugc

SEQ ID NO: 70722 - RNA, 32 nt, Human
augguuuccaggcagugaaagagggugauuca

SEQ ID NO: 70723 - RNA, 24 nt, Human
augguuucucaaggagauugggga

SEQ ID NO: 70724 - RNA, 32 nt, Human
augguuugaacccggcaggcggagguugcagu

SEQ ID NO: 70725 - RNA, 32 nt, Human
augguuugaagguguccccaaauguuuaugua

SEQ ID NO: 70726 - RNA, 32 nt, Human
augguuugggauaggcugggugccguggguca

SEQ ID NO: 70727 - RNA, 31 nt, Human
augguuugucacucugcaccugugucuccac

SEQ ID NO: 70728 - RNA, 22 nt, Human
augguuuucaguacauuuccua

SEQ ID NO: 70729 - RNA, 32 nt, Human
augguuuucuuaagccucuuaugaaaccauga

SEQ ID NO: 70730 - RNA, 32 nt, Human
augguuuuuaaacuugggcuucauuuuaaacu

SEQ ID NO: 70731 - RNA, 32 nt, Human
auguaaaagcuuccuccaccccucucuuuaua

SEQ ID NO: 70732 - RNA, 32 nt, Human
auguaaaauguucucagccgggcacgguggcu

SEQ ID NO: 70733 - RNA, 32 nt, Human
auguaaacagaacuggcacacacacauuaaga

SEQ ID NO: 70734 - RNA, 25 nt, Human
auguaaacagcuuuuuaaaaaauug

SEQ ID NO: 70735 - RNA, 24 nt, Human
auguaaaccauucgaagucagcua

SEQ ID NO: 70736 - RNA, 32 nt, Human
auguaaacuaaauccgcgucugugaauacguu

SEQ ID NO: 70737 - RNA, 32 nt, Human
auguaaagaacaaggaauaacaguuguaggaa

SEQ ID NO: 70738 - RNA, 32 nt, Human
auguaaagaacgcgacuuccacaaaccuggau

SEQ ID NO: 70739 - RNA, 32 nt, Human
auguaaagcacuuagcccagagccuagcacau

SEQ ID NO: 70740 - RNA, 32 nt, Human
auguaaagcgccuugcacacugccuggcacac

SEQ ID NO: 70741 - RNA, 32 nt, Human
auguaaagcuaaauacuuuccucuccaaagau

SEQ ID NO: 70742 - RNA, 32 nt, Human
auguaaaggaaaugcagguucuucaagaaggu

SEQ ID NO: 70743 - RNA, 32 nt, Human
auguaaaggccuuguuuugcuguagcaauaaa

SEQ ID NO: 70744 - RNA, 32 nt, Human
auguaaagggccuuuuaaaaaugcgggaucuu

SEQ ID NO: 70745 - RNA, 32 nt, Human
auguaaaggguccauucaugaggaauaacauc

SEQ ID NO: 70746 - RNA, 32 nt, Human
auguaaagguguacuuucuaugugccaccaag

SEQ ID NO: 70747 - RNA, 32 nt, Human
auguaaagugcugggaagagggguggggaguc

SEQ ID NO: 70748 - RNA, 32 nt, Human
auguaaauacaucaaaaauggguaauuuucuu

SEQ ID NO: 70749 - RNA, 32 nt, Human
auguaaauagggacugugcaguauuucugaca

SEQ ID NO: 70750 - RNA, 32 nt, Human
auguaaauaugcugggacaaugugugccuucu

SEQ ID NO: 70751 - RNA, 32 nt, Human
auguaaaugauggaucugauucugcuauuggu

SEQ ID NO: 70752 - RNA, 32 nt, Human
auguaaaugauuacuuucauccauccauuaua

SEQ ID NO: 70753 - RNA, 32 nt, Human
auguaaauggugccucuaggcaaaggaggcuu

SEQ ID NO: 70754 - RNA, 32 nt, Human
auguaaauucuuuauaugaaacuaucuaguuc

SEQ ID NO: 70755 - RNA, 32 nt, Human
auguaacaaaccuaguaguuuauguucaucaa

SEQ ID NO: 70756 - RNA, 32 nt, Human
auguaacaaaccugcacauccugcacauguac

SEQ ID NO: 70757 - RNA, 32 nt, Human
auguaacaaaccugcacauccugcacauguau

SEQ ID NO: 70758 - RNA, 32 nt, Human
auguaacaaaccugcacaugugggcugggcgc

SEQ ID NO: 70759 - RNA, 32 nt, Human
auguaacaaaccugcacauucugcacauauau

SEQ ID NO: 70760 - RNA, 32 nt, Human
auguaacaaaccugcacauugugcacauguac

SEQ ID NO: 70761 - RNA, 32 nt, Human
auguaacaaaccugcacguucagcacauguau

SEQ ID NO: 70762 - RNA, 32 nt, Human
auguaacaaaccugcacguucugcacauguau

SEQ ID NO: 70763 - RNA, 32 nt, Human
auguaacaaaccugcacguugugcacacguac

SEQ ID NO: 70764 - RNA, 32 nt, Human
auguaacaaaccugcacguugugcacauggua

SEQ ID NO: 70765 - RNA, 32 nt, Human
auguaacaaaccugcacguugugcacauguac

SEQ ID NO: 70766 - RNA, 32 nt, Human
auguaacaaaccugcauauccugcacauguau

SEQ ID NO: 70767 - RNA, 32 nt, Human
auguaacaaaccugcauguugugcacauguac

SEQ ID NO: 70768 - RNA, 32 nt, Human
auguaacaaaucugcacguugugcacauguac

SEQ ID NO: 70769 - RNA, 32 nt, Human
auguaacaaauuugcaaauugugcacauguac

SEQ ID NO: 70770 - RNA, 32 nt, Human
auguaacaccugcgaugagacaucggacucuc

SEQ ID NO: 70771 - RNA, 32 nt, Human
auguaacccacuggauacaguccccuuaaugu

SEQ ID NO: 70772 - RNA, 32 nt, Human
auguaacccugacugagcaaugcucagcagag

SEQ ID NO: 70773 - RNA, 32 nt, Human
auguaaccuggucagauuacuucaccucucug

SEQ ID NO: 70774 - RNA, 32 nt, Human
auguaacguucauccacucugccugcuuacac

SEQ ID NO: 70775 - RNA, 32 nt, Human
auguaacuaaccugcacaaugcgcacauguac

SEQ ID NO: 70776 - RNA, 32 nt, Human
auguaacuaaccugcacaaugugcacauguac

SEQ ID NO: 70777 - RNA, 32 nt, Human
auguaacuaaccugcacauugugcacacguac

SEQ ID NO: 70778 - RNA, 32 nt, Human
auguaacuaaccugcacauugugcacauguac

SEQ ID NO: 70779 - RNA, 32 nt, Human
auguaacucaggaccccuuuucccucuugcgu

SEQ ID NO: 70780 - RNA, 32 nt, Human
auguaacuccacucuccucucuuccaaaccuc

SEQ ID NO: 70781 - RNA, 32 nt, Human
auguaacucugccuuuuaaaguuuugcugaag

SEQ ID NO: 70782 - RNA, 32 nt, Human
auguaacugccuuuuaaaauuucauuacaaua

SEQ ID NO: 70783 - RNA, 32 nt, Human
auguaacuguauacugaauucugacaaaauaa

SEQ ID NO: 70784 - RNA, 32 nt, Human
auguaacuguuucccuuugauucuccaguauu

SEQ ID NO: 70785 - RNA, 32 nt, Human
auguaacuuccucuuaggauguuucaccaagg

SEQ ID NO: 70786 - RNA, 21 nt, Human
auguaagaggcuuaaaaugau

SEQ ID NO: 70787 - RNA, 32 nt, Human
auguaagcaauauuuccuaccauacuucacuc

SEQ ID NO: 70788 - RNA, 32 nt, Human
auguaagcacacaugcgcacacacacuugcau

SEQ ID NO: 70789 - RNA, 32 nt, Human
auguaagcagccauuaauaaacuguugcacau

SEQ ID NO: 70790 - RNA, 32 nt, Human
auguaagcuaaguuggugcagggguuuuuguc

SEQ ID NO: 70791 - RNA, 32 nt, Human
auguaagcuucaaaguagcacauuuguacugu

SEQ ID NO: 70792 - RNA, 32 nt, Human
auguaaggacucaggcuuggucaaggugguaa

SEQ ID NO: 70793 - RNA, 32 nt, Human
auguaaggcaacauucacagauccugggaaug

SEQ ID NO: 70794 - RNA, 32 nt, Human
auguaagggugcugguaugccugcugucuccc

SEQ ID NO: 70795 - RNA, 32 nt, Human
auguaaggguggaggaguuccuggagaaggac

SEQ ID NO: 70796 - RNA, 32 nt, Human
auguaagguuugugacaaagcuuuugggcgug

SEQ ID NO: 70797 - RNA, 32 nt, Human
auguaaguauuuauauucacagccucuuaugu

SEQ ID NO: 70798 - RNA, 32 nt, Human
auguaagugaccccaggcuuugcucagggccu

SEQ ID NO: 70799 - RNA, 32 nt, Human
auguaaguuccaagagaacagggacuuugucu

SEQ ID NO: 70800 - RNA, 32 nt, Human
auguaaguucugaauguucacauugcuuuacc

SEQ ID NO: 70801 - RNA, 32 nt, Human
auguaaguuuuauuuuuccuugccagggucag

SEQ ID NO: 70802 - RNA, 21 nt, Human
auguaauaaauacacuugugu

SEQ ID NO: 70803 - RNA, 32 nt, Human
auguaauaugcuguaaggcuagugcagauggg

SEQ ID NO: 70804 - RNA, 32 nt, Human
auguaaucacugggcugggugcaguggcucac

SEQ ID NO: 70805 - RNA, 32 nt, Human
auguaaucaguuaugccuauguaaugaagcuu

SEQ ID NO: 70806 - RNA, 32 nt, Human
auguaauccagaccaggcacaguggcucaugc

SEQ ID NO: 70807 - RNA, 32 nt, Human
auguaauccaggcuggggaagauggcgguggc

SEQ ID NO: 70808 - RNA, 32 nt, Human
auguaaugaaccuaauuugauuuccauuuuaa

SEQ ID NO: 70809 - RNA, 32 nt, Human
auguaaugcaaccaaguuccucccagauuaaa

SEQ ID NO: 70810 - RNA, 32 nt, Human
auguaaugcaagaaugaacagaacaagcaaaa

SEQ ID NO: 70811 - RNA, 32 nt, Human
auguaauggggagaggguggggcagaugagua

SEQ ID NO: 70812 - RNA, 32 nt, Human
auguaaugugggaggcagggcuaugcgauagu

SEQ ID NO: 70813 - RNA, 32 nt, Human
auguaauugucaucuucauuugucuucacaac

SEQ ID NO: 70814 - RNA, 32 nt, Human
auguacaaaauggucagagcuaguuggagaau

SEQ ID NO: 70815 - RNA, 32 nt, Human
auguacaaagaaugucuucagaucaaagaaaa

SEQ ID NO: 70816 - RNA, 32 nt, Human
auguacaagaaccugggcucuucacucaggaa

SEQ ID NO: 70817 - RNA, 32 nt, Human
auguacaaguuagagucagaagacguuuuaga

SEQ ID NO: 70818 - RNA, 32 nt, Human
auguacacacagauuccugucccuuugccaac

SEQ ID NO: 70819 - RNA, 28 nt, Human
auguacacaggugcugccucucccugau

SEQ ID NO: 70820 - RNA, 32 nt, Human
auguacaccaggcugggugcgguggcucacgc

SEQ ID NO: 70821 - RNA, 32 nt, Human
auguacacucugaaguacagccuggguuaguc

SEQ ID NO: 70822 - RNA, 32 nt, Human
auguacacugacugcuuuagagcccuugauaa

SEQ ID NO: 70823 - RNA, 32 nt, Human
auguacagaacacauuucucugaucuccauaa

SEQ ID NO: 70824 - RNA, 32 nt, Human
auguacagacugaggcucuggggugagguccc

SEQ ID NO: 70825 - RNA, 32 nt, Human
auguacagagccagacaaagcugugaauggcc

SEQ ID NO: 70826 - RNA, 32 nt, Human
auguacagagguuuuucugugguuguaaaugg

SEQ ID NO: 70827 - RNA, 32 nt, Human
auguacagccaagagccuagaaugacauggcc

SEQ ID NO: 70828 - RNA, 32 nt, Human
auguacagcuguaaacauuccuuaaaucuucu

SEQ ID NO: 70829 - RNA, 30 nt, Human
auguacagcuugcaaguagaagucucaggc

SEQ ID NO: 70830 - RNA, 32 nt, Human
auguacaggaagcauagugccagcaucugcuu

SEQ ID NO: 70831 - RNA, 32 nt, Human
auguacaguaguuuuauuuccacagccacauu

SEQ ID NO: 70832 - RNA, 32 nt, Human
auguacaguccccaucaguagcguauagaaca

SEQ ID NO: 70833 - RNA, 32 nt, Human
auguacauagccagagagucaugccacguggu

SEQ ID NO: 70834 - RNA, 32 nt, Human
auguacauauuuauacauacacacaccuuccu

SEQ ID NO: 70835 - RNA, 32 nt, Human
auguacaucacugaggccacugcacccuuucu

SEQ ID NO: 70836 - RNA, 32 nt, Human
auguacauggaaaauucuagggacaggagcau

SEQ ID NO: 70837 - RNA, 32 nt, Human
auguacauugauacaaccuuuaugauggcaau

SEQ ID NO: 70838 - RNA, 32 nt, Human
auguacauuuauuucagauaaaggacaauaag

SEQ ID NO: 70839 - RNA, 32 nt, Human
auguaccaacagcacaacuuugaaaacuguua

SEQ ID NO: 70840 - RNA, 31 nt, Human
auguaccaccgcgccuggccugugucuauuu

SEQ ID NO: 70841 - RNA, 32 nt, Human
auguaccaggagcugaaggugccugcagagga

SEQ ID NO: 70842 - RNA, 32 nt, Human
auguaccaucaucaugcaucauugugcaucau

SEQ ID NO: 70843 - RNA, 32 nt, Human
auguaccaucccaacccacccaccucaauccc

SEQ ID NO: 70844 - RNA, 32 nt, Human
auguacccacaccauacauacauacauauaua

SEQ ID NO: 70845 - RNA, 32 nt, Human
auguacccaggugccuuuuugcuaauuugaua

SEQ ID NO: 70846 - RNA, 32 nt, Human
auguacccuccacccuuuuccuggcccccuaa

SEQ ID NO: 70847 - RNA, 32 nt, Human
auguacccuccccuuuuaugcacuucaaauaa

SEQ ID NO: 70848 - RNA, 32 nt, Human
auguacccuuaaauugaagaaauuuaagcugc

SEQ ID NO: 70849 - RNA, 32 nt, Human
auguaccgcauccuucuuuuccucagccaccc

SEQ ID NO: 70850 - RNA, 32 nt, Human
auguaccguaggagccaagaccaccuauacua

SEQ ID NO: 70851 - RNA, 32 nt, Human
auguaccucuggcaaaugccccaccuugguga

SEQ ID NO: 70852 - RNA, 32 nt, Human
auguaccucuggcaaaugcccugguauguacc

SEQ ID NO: 70853 - RNA, 32 nt, Human
auguaccucuguuacucucagccuggaauccc

SEQ ID NO: 70854 - RNA, 32 nt, Human
auguaccugaggaaaucagagagaugguggcu

SEQ ID NO: 70855 - RNA, 32 nt, Human
auguaccugcauucccagcuacuugggaggcu

SEQ ID NO: 70856 - RNA, 32 nt, Human
auguaccugcugcaacugaaccagacuggguu

SEQ ID NO: 70857 - RNA, 32 nt, Human
auguaccuguaguuccagcuacauaggaggcu

SEQ ID NO: 70858 - RNA, 32 nt, Human
auguaccuuaaacuuccacaucacugcacccu

SEQ ID NO: 70859 - RNA, 32 nt, Human
auguacggucuggccaaaccaccuucccagcc

SEQ ID NO: 70860 - RNA, 32 nt, Human
auguacuaaaauauguaucucucuccauauau

SEQ ID NO: 70861 - RNA, 32 nt, Human
auguacuacugcacuugagcaugaauggguag

SEQ ID NO: 70862 - RNA, 32 nt, Human
auguacucaagaaaauugaacaaauguaaugg

SEQ ID NO: 70863 - RNA, 28 nt, Human
auguacucaauaaauauuuguuggcuuu

SEQ ID NO: 70864 - RNA, 32 nt, Human
auguacucagccucaggagagcuugcugcacc

SEQ ID NO: 70865 - RNA, 32 nt, Human
auguacucucacacacacaggcaccagcauac

SEQ ID NO: 70866 - RNA, 32 nt, Human
auguacugaagcugcaaaaacgagcucuucau

SEQ ID NO: 70867 - RNA, 29 nt, Human
auguacugaguguucgcaucccccuucag

SEQ ID NO: 70868 - RNA, 32 nt, Human
auguacugccuuagugcugaugccuguguacu

SEQ ID NO: 70869 - RNA, 32 nt, Human
auguacuggguaguaggagggagccuagacuu

SEQ ID NO: 70870 - RNA, 32 nt, Human
auguacuguauguagucaugcacuuuguauua

SEQ ID NO: 70871 - RNA, 32 nt, Human
auguacuuugaauuugagaagugggugauccc

SEQ ID NO: 70872 - RNA, 32 nt, Human
auguacuuuucugcauaauuucugccuucugu

SEQ ID NO: 70873 - RNA, 32 nt, Human
auguagaaaggaaacucucuucaaugaauggu

SEQ ID NO: 70874 - RNA, 19 nt, Human
auguagaacaaagcccaca

SEQ ID NO: 70875 - RNA, 32 nt, Human
auguagaagagggagaaggagaggcucugaaa

SEQ ID NO: 70876 - RNA, 20 nt, Human
auguagaagcuaagggucag

SEQ ID NO: 70877 - RNA, 25 nt, Human
auguagaagcugacugagaccugcu

SEQ ID NO: 70878 - RNA, 26 nt, Human
auguagaagcugacugagaccugcug

SEQ ID NO: 70879 - RNA, 22 nt, Human
auguagaagcugacuugaaagg

SEQ ID NO: 70880 - RNA, 32 nt, Human
auguagaaugauuuuugcuauuucuaguagaa

SEQ ID NO: 70881 - RNA, 32 nt, Human
auguagaauggcugaagagaucaagaauuuaa

SEQ ID NO: 70882 - RNA, 32 nt, Human
auguagaaugggauguauucuucugcugcugc

SEQ ID NO: 70883 - RNA, 32 nt, Human
auguagacacaaaacagcaacacuuguaugaa

SEQ ID NO: 70884 - RNA, 32 nt, Human
auguagacuauuuuugguggccaaugcuacua

SEQ ID NO: 70885 - RNA, 32 nt, Human
auguagacuguccuuagacuccugagguuuuu

SEQ ID NO: 70886 - RNA, 32 nt, Human
auguagagaaaaggugacaguuuaaggaaaaa

SEQ ID NO: 70887 - RNA, 32 nt, Human
auguagagaacagcaaaugauugaugcaguua

SEQ ID NO: 70888 - RNA, 32 nt, Human
auguagagaacaggaguccgcagcugcuggca

SEQ ID NO: 70889 - RNA, 32 nt, Human
auguagagaugaaaaauacagaauguaauggc

SEQ ID NO: 70890 - RNA, 32 nt, Human
auguagagauuugagugcaguugguacaguac

SEQ ID NO: 70891 - RNA, 32 nt, Human
auguagagugggaggacugggaguggggagcc

SEQ ID NO: 70892 - RNA, 32 nt, Human
auguagaguuaagaaccaggaggcaggaacau

SEQ ID NO: 70893 - RNA, 32 nt, Human
auguagauauuucucuuauuguuuucauguaa

SEQ ID NO: 70894 - RNA, 23 nt, Human
auguagauguacauauacaugua

SEQ ID NO: 70895 - RNA, 32 nt, Human
auguagauuuuuauuuucuacuuuugauuauu

SEQ ID NO: 70896 - RNA, 32 nt, Human
auguagcaaagcuuuuuaggauuuucagaacu

SEQ ID NO: 70897 - RNA, 32 nt, Human
auguagcaaccagaaacaacacaugcuuauua

SEQ ID NO: 70898 - RNA, 32 nt, Human
auguagcacugaguggugauacccagaccagc

SEQ ID NO: 70899 - RNA, 21 nt, Human
auguagcagaauaccaggcag

SEQ ID NO: 70900 - RNA, 32 nt, Human
auguagcagaauugcacuugugccucacgaac

SEQ ID NO: 70901 - RNA, 32 nt, Human
auguagcagugacccaggcuugggagccagaa

SEQ ID NO: 70902 - RNA, 32 nt, Human
auguagcauauguaauugcaaaaugauuuaga

SEQ ID NO: 70903 - RNA, 32 nt, Human
auguagccagcagaacugaagugugcugugac

SEQ ID NO: 70904 - RNA, 32 nt, Human
auguagccaucccggccagccccugacaucug

SEQ ID NO: 70905 - RNA, 32 nt, Human
auguagccauuuuagaggugucaaaauaaauc

SEQ ID NO: 70906 - RNA, 32 nt, Human
auguagcccaggaaaugaccgaccugaugugu

SEQ ID NO: 70907 - RNA, 32 nt, Human
auguagccccagucauccugcccagcccugcc

SEQ ID NO: 70908 - RNA, 32 nt, Human
auguagcccugagguucccuucccaggacagc

SEQ ID NO: 70909 - RNA, 32 nt, Human
auguagccuccaggcacuucugcucucuggca

SEQ ID NO: 70910 - RNA, 32 nt, Human
auguagcuaagguaaugguucauaucauacaa

SEQ ID NO: 70911 - RNA, 32 nt, Human
auguagcugaugucacucaggagcacgagcga

SEQ ID NO: 70912 - RNA, 32 nt, Human
auguagcuguguagccaugugugugcauaugg

SEQ ID NO: 70913 - RNA, 32 nt, Human
auguaggaaaaugccuugccauucuaguugaa

SEQ ID NO: 70914 - RNA, 32 nt, Human
auguaggaaggccucaaggauguaauucuagc

SEQ ID NO: 70915 - RNA, 32 nt, Human
auguaggagaaugaaacuggauccucaucucu

SEQ ID NO: 70916 - RNA, 32 nt, Human
auguaggcaaaaugucaagggaaauguaauca

SEQ ID NO: 70917 - RNA, 19 nt, Human
auguaggcacaauaagcac

SEQ ID NO: 70918 - RNA, 32 nt, Human
auguaggccgggugccccuguucuccggguuu

SEQ ID NO: 70919 - RNA, 32 nt, Human
auguaggcucucugcaaccugggccucccggg

SEQ ID NO: 70920 - RNA, 18 nt, Human
auguagggaagccuucag

SEQ ID NO: 70921 - RNA, 23 nt, Human
auguagggcaccuuggaccucuc

SEQ ID NO: 70922 - RNA, 32 nt, Human
auguaggggagggaggaaggagggccagggua

SEQ ID NO: 70923 - RNA, 21 nt, Human
auguaggggccagcccaucuc

SEQ ID NO: 70924 - RNA, 32 nt, Human
auguagggggcugucagccuuggagacucuag

SEQ ID NO: 70925 - RNA, 32 nt, Human
auguagguacuacugggucuccaggcucaucu

SEQ ID NO: 70926 - RNA, 32 nt, Human
auguaggucagagcugccuccaggcaacuugu

SEQ ID NO: 70927 - RNA, 32 nt, Human
auguagguccaaccauauuauuucucagguga

SEQ ID NO: 70928 - RNA, 32 nt, Human
auguagguuuguaacaaggcuuuugggaguga

SEQ ID NO: 70929 - RNA, 32 nt, Human
auguaguacuuguuuguaaagcacuuugagau

SEQ ID NO: 70930 - RNA, 32 nt, Human
auguaguaggacaccaguauccuaggacagag

SEQ ID NO: 70931 - RNA, 32 nt, Human
auguaguauauagcaggcugccagcgacuccu

SEQ ID NO: 70932 - RNA, 31 nt, Human
auguaguauauuuucugacuacaggagauaa

SEQ ID NO: 70933 - RNA, 32 nt, Human
auguaguccccaaauaccugaaagcugucuuu

SEQ ID NO: 70934 - RNA, 32 nt, Human
auguaguggcucaugccuuaaucccagcacuu

SEQ ID NO: 70935 - RNA, 32 nt, Human
auguaguuuuuguccaggcuugagucaccaug

SEQ ID NO: 70936 - RNA, 32 nt, Human
auguauaaagcagaaugccugccuuuccuggu

SEQ ID NO: 70937 - RNA, 32 nt, Human
auguauaacaauuuucuucagaagaauucuau

SEQ ID NO: 70938 - RNA, 32 nt, Human
auguauaaccuguuuccagccuggccugaggu

SEQ ID NO: 70939 - RNA, 32 nt, Human
auguauaccuuuuccauauuacugugaacuuu

SEQ ID NO: 70940 - RNA, 32 nt, Human
auguauacucuaguauucugguguuuuuauau

SEQ ID NO: 70941 - RNA, 32 nt, Human
auguauacuuuacauaguaaacuuuccccuuu

SEQ ID NO: 70942 - RNA, 32 nt, Human
auguauagacacaccucuaccaauccaucuuc

SEQ ID NO: 70943 - RNA, 32 nt, Human
auguauagaucuguccuuaugcccauaccaca

SEQ ID NO: 70944 - RNA, 32 nt, Human
auguauagccauugcccucuagcaggccaggc

SEQ ID NO: 70945 - RNA, 32 nt, Human
auguauaggcuccacuugacaagaccacaccu

SEQ ID NO: 70946 - RNA, 32 nt, Human
auguauauaaagcauaugagcacacaaaugga

SEQ ID NO: 70947 - RNA, 32 nt, Human
auguauauccaagucacucaggaacuuuuaug

SEQ ID NO: 70948 - RNA, 32 nt, Human
auguauaucugugaguguauauacaugcaugc

SEQ ID NO: 70949 - RNA, 19 nt, Human
auguauaugugcacacaca

SEQ ID NO: 70950 - RNA, 32 nt, Human
auguauauguguuugcuuugggaggagguggc

SEQ ID NO: 70951 - RNA, 32 nt, Human
auguauauuugaacuccucucagcugaacacc

SEQ ID NO: 70952 - RNA, 32 nt, Human
auguaucaaacaguaaagugcuucauauuugg

SEQ ID NO: 70953 - RNA, 32 nt, Human
auguaucaaaggacacaguccagggggagggu

SEQ ID NO: 70954 - RNA, 32 nt, Human
auguaucaagcaucuccaggugaccuacuguc

SEQ ID NO: 70955 - RNA, 32 nt, Human
auguaucaauaaucccagcccagucaaagcac

SEQ ID NO: 70956 - RNA, 32 nt, Human
auguaucauaugcagauacuuauugcauuucu

SEQ ID NO: 70957 - RNA, 32 nt, Human
auguauccacacacauccuugugcacacauag

SEQ ID NO: 70958 - RNA, 32 nt, Human
auguaucuacuguaugugcagaccaugucgag

SEQ ID NO: 70959 - RNA, 32 nt, Human
auguaucuauaguuggccugcaagacacuuuu

SEQ ID NO: 70960 - RNA, 32 nt, Human
auguaucuccauccuccccugcuccagccagg

SEQ ID NO: 70961 - RNA, 32 nt, Human
auguaucugaagaagaggcucagggaguaaau

SEQ ID NO: 70962 - RNA, 32 nt, Human
auguaucugagcugcucggauccagaggucau

SEQ ID NO: 70963 - RNA, 32 nt, Human
auguaucuuccagagaagauuuuauuuguggu

SEQ ID NO: 70964 - RNA, 32 nt, Human
auguaucuuucaucuuccaguuaccucuaggc

SEQ ID NO: 70965 - RNA, 32 nt, Human
auguaucuuugucuuuuccucuagaaccugcc

SEQ ID NO: 70966 - RNA, 32 nt, Human
auguaugacucuguaugggaauugccuguuug

SEQ ID NO: 70967 - RNA, 32 nt, Human
auguaugcaaggacacauauguacguaauuuc

SEQ ID NO: 70968 - RNA, 32 nt, Human
auguaugcacacacacaugcaccgcacacaua

SEQ ID NO: 70969 - RNA, 32 nt, Human
auguaugcacacacaugcgcgcacacgugcuc

SEQ ID NO: 70970 - RNA, 32 nt, Human
auguaugcacacauacccauacauguauauga

SEQ ID NO: 70971 - RNA, 32 nt, Human
auguaugcaguacuauucagaaugauauacac

SEQ ID NO: 70972 - RNA, 32 nt, Human
auguaugccauuuucucccugcaaagcagcuc

SEQ ID NO: 70973 - RNA, 32 nt, Human
auguaugcccucagugcagugggguuugcugc

SEQ ID NO: 70974 - RNA, 32 nt, Human
auguaugcucuccccucucagaugcgauuugg

SEQ ID NO: 70975 - RNA, 32 nt, Human
auguaugcugaagaauuuggagaagaaaaugc

SEQ ID NO: 70976 - RNA, 32 nt, Human
auguaugcuuccagggacaagcuuaggucaug

SEQ ID NO: 70977 - RNA, 32 nt, Human
auguauggaaauucagcuaauuuuuggugcug

SEQ ID NO: 70978 - RNA, 32 nt, Human
auguaugggacagggucucacucugucaccca

SEQ ID NO: 70979 - RNA, 32 nt, Human
auguauggggaucaccuuugccagagcugcau

SEQ ID NO: 70980 - RNA, 32 nt, Human
auguaugggugagaggaaggaggaucuccuuc

SEQ ID NO: 70981 - RNA, 32 nt, Human
auguaugguaacacuggggaaugcuugggugu

SEQ ID NO: 70982 - RNA, 32 nt, Human
auguauggugauuuuuauuuucucugucugaa

SEQ ID NO: 70983 - RNA, 32 nt, Human
auguauguaauguaaugagagcacuuuucauu

SEQ ID NO: 70984 - RNA, 32 nt, Human
auguauguacauauuccacauauguauuuagu

SEQ ID NO: 70985 - RNA, 32 nt, Human
auguauguauauuucaaaguaccacacugaaa

SEQ ID NO: 70986 - RNA, 32 nt, Human
auguaugucuaaauuccuggagaagaugauau

SEQ ID NO: 70987 - RNA, 32 nt, Human
auguaugucuucagaugccuuucugccucugu

SEQ ID NO: 70988 - RNA, 32 nt, Human
auguauguuccuuacaccuugauuccauacac

SEQ ID NO: 70989 - RNA, 32 nt, Human
auguauuacuuuucccagcaggccagugcuag

SEQ ID NO: 70990 - RNA, 32 nt, Human
auguauuagagccacaguggggccuggaacac

SEQ ID NO: 70991 - RNA, 32 nt, Human
auguauucaccuuucuuuuguaaagagaccau

SEQ ID NO: 70992 - RNA, 32 nt, Human
auguauucccuucagggauucccuguccccaa

SEQ ID NO: 70993 - RNA, 32 nt, Human
auguauucgggaggacaagggcuuccaguuuu

SEQ ID NO: 70994 - RNA, 32 nt, Human
auguauucuuuucagucuuuuguguuugauuu

SEQ ID NO: 70995 - RNA, 32 nt, Human
auguauugagugucuguuaggugcaaaguaug

SEQ ID NO: 70996 - RNA, 31 nt, Human
auguauugggucaagaagugaucuuuagcua

SEQ ID NO: 70997 - RNA, 32 nt, Human
auguauugguucuuuauuaaauaauuuuugaa

SEQ ID NO: 70998 - RNA, 32 nt, Human
auguauuuaugcugguguucuuucauguuauu

SEQ ID NO: 70999 - RNA, 32 nt, Human
auguauuuccacuugcccugaguaaaucugug

SEQ ID NO: 71000 - RNA, 32 nt, Human
auguauuuccucauaucuuucuuuuucauuac

SEQ ID NO: 71001 - RNA, 32 nt, Human
auguauuuggcuauuuuaauuguauuugacaa

SEQ ID NO: 71002 - RNA, 32 nt, Human
auguauuugggucuuauuuacauccuucuuua

SEQ ID NO: 71003 - RNA, 32 nt, Human
auguauuugugacacccuaucuugucaauaaa

SEQ ID NO: 71004 - RNA, 32 nt, Human
auguauuuguuugcauaggugaucucauuuaa

SEQ ID NO: 71005 - RNA, 32 nt, Human
auguauuuuaauuuagauucuguguuuuuaag

SEQ ID NO: 71006 - RNA, 32 nt, Human
augucaaagcucaugugaaagaggguagguug

SEQ ID NO: 71007 - RNA, 32 nt, Human
augucaacaggcaggggcagcacugcagagau

SEQ ID NO: 71008 - RNA, 32 nt, Human
augucaacaguuaugaaggccaggcgcggcgg

SEQ ID NO: 71009 - RNA, 32 nt, Human
augucaacccccaguaagggaaaggaggaugg

SEQ ID NO: 71010 - RNA, 19 nt, Human
augucaaccuugugugagu

SEQ ID NO: 71011 - RNA, 32 nt, Human
augucaacuacaaaucaaaagugcugaguuaa

SEQ ID NO: 71012 - RNA, 32 nt, Human
augucaacuugaauaggccacagggugccaaa

SEQ ID NO: 71013 - RNA, 32 nt, Human
augucaaggaagaaaggaaggaaggaaggcga

SEQ ID NO: 71014 - RNA, 31 nt, Human
augucaaguggcagcucagccaccacucagu

SEQ ID NO: 71015 - RNA, 32 nt, Human
augucaaguucaagugauaugugccuaauauc

SEQ ID NO: 71016 - RNA, 23 nt, Human
augucaaucaucacucccagcca

SEQ ID NO: 71017 - RNA, 32 nt, Human
augucaauuauaggaaaacauaguuggaaaug

SEQ ID NO: 71018 - RNA, 32 nt, Human
augucaauucacccagcucucuugccugcagg

SEQ ID NO: 71019 - RNA, 22 nt, Human
augucaauuuuuaucucuuaaa

SEQ ID NO: 71020 - RNA, 32 nt, Human
augucacaaagcuucucucaagagcucucgua

SEQ ID NO: 71021 - RNA, 32 nt, Human
augucacaacuuugcaagcucugccuuggguu

SEQ ID NO: 71022 - RNA, 32 nt, Human
augucacagaacuuuucacuuguauacuacuc

SEQ ID NO: 71023 - RNA, 32 nt, Human
augucacaggcaggucccaggguuugaguuca

SEQ ID NO: 71024 - RNA, 32 nt, Human
augucacaggcgggacuuucuucagagagugg

SEQ ID NO: 71025 - RNA, 32 nt, Human
augucacauccgcccagacagcucuuugauga

SEQ ID NO: 71026 - RNA, 32 nt, Human
augucaccacugcccuccagccugggugacag

SEQ ID NO: 71027 - RNA, 32 nt, Human
augucaccaggauaagaccacagggaagcaaa

SEQ ID NO: 71028 - RNA, 32 nt, Human
augucaccagugucuuuucuccuuccugucuu

SEQ ID NO: 71029 - RNA, 21 nt, Human
augucacccacucacucacca

SEQ ID NO: 71030 - RNA, 25 nt, Human
augucacccagacuggagugcagug

SEQ ID NO: 71031 - RNA, 25 nt, Human
augucacccaggcuggagugcaaug

SEQ ID NO: 71032 - RNA, 24 nt, Human
augucacccaggcuggagugcagu

SEQ ID NO: 71033 - RNA, 25 nt, Human
augucacccaggcuggagugcagug

SEQ ID NO: 71034 - RNA, 32 nt, Human
augucacccaggcuguggugcaguaagccaag

SEQ ID NO: 71035 - RNA, 25 nt, Human
augucacccaggguggaauacagug

SEQ ID NO: 71036 - RNA, 32 nt, Human
augucacccaugucagcugacuuuaaguaaac

SEQ ID NO: 71037 - RNA, 32 nt, Human
augucacccugccuccagcuagcuaugggccc

SEQ ID NO: 71038 - RNA, 32 nt, Human
augucacccuggcuggagugcaguagugcgau

SEQ ID NO: 71039 - RNA, 32 nt, Human
augucacccuuucagggaaauucaggcaauua

SEQ ID NO: 71040 - RNA, 18 nt, Human
augucaccuggagcgagu

SEQ ID NO: 71041 - RNA, 32 nt, Human
augucaccuuguauuacagcauguuauauaag

SEQ ID NO: 71042 - RNA, 32 nt, Human
augucacggcaaccuccgccucccagguucaa

SEQ ID NO: 71043 - RNA, 21 nt, Human
augucacuaacaaguggcaaa

SEQ ID NO: 71044 - RNA, 32 nt, Human
augucacuaaccugcacauucugcacauguac

SEQ ID NO: 71045 - RNA, 32 nt, Human
augucacuagugacuaccacacuggacagugc

SEQ ID NO: 71046 - RNA, 32 nt, Human
augucacucaggcuggagugcaguggcacaau

SEQ ID NO: 71047 - RNA, 32 nt, Human
augucacuccagccugggcaacagagugagac

SEQ ID NO: 71048 - RNA, 32 nt, Human
augucacucucuuccuuuuuguauccacucuc

SEQ ID NO: 71049 - RNA, 32 nt, Human
augucacucuugggcaucugugcucaggaggu

SEQ ID NO: 71050 - RNA, 24 nt, Human
augucacugagaagcuugugcaaa

SEQ ID NO: 71051 - RNA, 32 nt, Human
augucacugauugcauuccagccugggugaca

SEQ ID NO: 71052 - RNA, 32 nt, Human
augucacugcacuccagccugggugacagagu

SEQ ID NO: 71053 - RNA, 32 nt, Human
augucacugcacuccauccugggugacaagag

SEQ ID NO: 71054 - RNA, 32 nt, Human
augucacugcacucuagcuugggagacagagc

SEQ ID NO: 71055 - RNA, 32 nt, Human
augucacuggauucaucaccuaggugauggga

SEQ ID NO: 71056 - RNA, 32 nt, Human
augucacugguggcagauugcauugcccaaag

SEQ ID NO: 71057 - RNA, 32 nt, Human
augucacuguacuccagccugggcaacagagu

SEQ ID NO: 71058 - RNA, 32 nt, Human
augucacuuuaucagaauacuaguuuuaaaag

SEQ ID NO: 71059 - RNA, 32 nt, Human
augucagaaaaugcaucucagauggagaaggg

SEQ ID NO: 71060 - RNA, 32 nt, Human
augucagaacagcccuggaggaagguaugcaa

SEQ ID NO: 71061 - RNA, 32 nt, Human
augucagacaucuaguggggcagcucucuucc

SEQ ID NO: 71062 - RNA, 32 nt, Human
augucagauaaggcaacugggcuggucuuacu

SEQ ID NO: 71063 - RNA, 32 nt, Human
augucagaucagcaaggagaaacuucaacuca

SEQ ID NO: 71064 - RNA, 32 nt, Human
augucagcacacacuuacagagcacaaaugca

SEQ ID NO: 71065 - RNA, 32 nt, Human
augucagcaguggccugaagugaguugugcaa

SEQ ID NO: 71066 - RNA, 32 nt, Human
augucagcaguuacugccacacuccugucagc

SEQ ID NO: 71067 - RNA, 22 nt, Human
augucagcauucugacuacuua

SEQ ID NO: 71068 - RNA, 32 nt, Human
augucagcucccugcaaccuccgccuccuggg

SEQ ID NO: 71069 - RNA, 32 nt, Human
augucagcucucugcccucccugcugccgugg

SEQ ID NO: 71070 - RNA, 32 nt, Human
augucagcucuuccuguuucuaacuggcaaca

SEQ ID NO: 71071 - RNA, 32 nt, Human
augucagcucuuguuaaaaacuccucaccaaa

SEQ ID NO: 71072 - RNA, 32 nt, Human
augucagcugaccucucaccucccaugggcag

SEQ ID NO: 71073 - RNA, 32 nt, Human
augucaggccccgcccccuccccaccaacauu

SEQ ID NO: 71074 - RNA, 32 nt, Human
augucaggcuugcccaggaaaggggcugugcu

SEQ ID NO: 71075 - RNA, 32 nt, Human
augucagggagaaaguagagaacaggcaaccu

SEQ ID NO: 71076 - RNA, 32 nt, Human
augucagggugagggaggagacaaaaccacga

SEQ ID NO: 71077 - RNA, 32 nt, Human
augucagggugaggggugcaggagcgcagagg

SEQ ID NO: 71078 - RNA, 32 nt, Human
augucagguacugagcaaggccccagauccuu

SEQ ID NO: 71079 - RNA, 32 nt, Human
augucagguagcugccccuugccuucugggug

SEQ ID NO: 71080 - RNA, 32 nt, Human
augucaguauagaggcucuacuuuauguagac

SEQ ID NO: 71081 - RNA, 32 nt, Human
augucaguccuggaggcugagcuguuccccag

SEQ ID NO: 71082 - RNA, 32 nt, Human
augucagucucaucgucccaaggcuugaaauc

SEQ ID NO: 71083 - RNA, 32 nt, Human
augucagucuguccacguggagagaaguugcc

SEQ ID NO: 71084 - RNA, 32 nt, Human
augucagugacacgccacaguggccuagucag

SEQ ID NO: 71085 - RNA, 32 nt, Human
augucaguggcugaggcugcacucagagggau

SEQ ID NO: 71086 - RNA, 32 nt, Human
augucaguguaucuggauacacgaggaaaagg

SEQ ID NO: 71087 - RNA, 32 nt, Human
augucauagucuccuuucaaagaauuguguug

SEQ ID NO: 71088 - RNA, 32 nt, Human
augucauaucagauaauaccacugcagagaau

SEQ ID NO: 71089 - RNA, 32 nt, Human
augucaucaguguggcaaggucuucaguccga

SEQ ID NO: 71090 - RNA, 32 nt, Human
augucaucaguguggcaaggucuucagucuga

SEQ ID NO: 71091 - RNA, 32 nt, Human
augucaucaguguggcaagguuuucagucuga

SEQ ID NO: 71092 - RNA, 32 nt, Human
augucauccccucugcuauagucauaggccca

SEQ ID NO: 71093 - RNA, 32 nt, Human
augucauccgugugucccagacugucugcugu

SEQ ID NO: 71094 - RNA, 32 nt, Human
augucauccucagaaugugagcuguuugagau

SEQ ID NO: 71095 - RNA, 32 nt, Human
augucaucugaauugaggccuuucugugaaca

SEQ ID NO: 71096 - RNA, 32 nt, Human
augucaucuuuucuaaaagagacaaaugaagc

SEQ ID NO: 71097 - RNA, 30 nt, Human
augucaugaaaaccagccuugaccucacaa

SEQ ID NO: 71098 - RNA, 32 nt, Human
augucaugaagauaauggaauuuggagucuca

SEQ ID NO: 71099 - RNA, 32 nt, Human
augucaugaaugcauaaaauauacagaccaua

SEQ ID NO: 71100 - RNA, 32 nt, Human
augucaugaccaucacagcagaggagugacuu

SEQ ID NO: 71101 - RNA, 30 nt, Human
augucauggaauuggagaguauuaucgagg

SEQ ID NO: 71102 - RNA, 32 nt, Human
augucauggaauuggagaguuuuaucgagguu

SEQ ID NO: 71103 - RNA, 32 nt, Human
augucauggaguguaggaaagagcagaccaaa

SEQ ID NO: 71104 - RNA, 32 nt, Human
augucauggaguuuaguccuuguuucagguuu

SEQ ID NO: 71105 - RNA, 32 nt, Human
augucaugugacccugugccucaguuuccuca

SEQ ID NO: 71106 - RNA, 32 nt, Human
augucauuggggaaaugccgccagcaggacug

SEQ ID NO: 71107 - RNA, 32 nt, Human
augucauuuacaagccucucacacgcaggccu

SEQ ID NO: 71108 - RNA, 32 nt, Human
augucauuuucccauucuuccuuuacuaauaa

SEQ ID NO: 71109 - RNA, 32 nt, Human
auguccaaagaagagcuuagggucuuaguaac

SEQ ID NO: 71110 - RNA, 32 nt, Human
auguccaaagaggucucagaccuugcacaaug

SEQ ID NO: 71111 - RNA, 22 nt, Human
auguccaaauuuaccaauagca

SEQ ID NO: 71112 - RNA, 32 nt, Human
auguccacaaaaggcugccacagggaaguuca

SEQ ID NO: 71113 - RNA, 31 nt, Human
auguccacacauuagaauaccaguuggcagu

SEQ ID NO: 71114 - RNA, 21 nt, Human
auguccacauauauauacaca

SEQ ID NO: 71115 - RNA, 32 nt, Human
auguccacgagaugcuuggguugcuuuuccag

SEQ ID NO: 71116 - RNA, 32 nt, Human
auguccacguccugccccaccuccaggccacg

SEQ ID NO: 71117 - RNA, 32 nt, Human
auguccagacaugcucuuagucuacuagagag

SEQ ID NO: 71118 - RNA, 32 nt, Human
auguccagaggcaccaucccugcuaugaagag

SEQ ID NO: 71119 - RNA, 32 nt, Human
auguccagagggcacaaaacugucucaaugag

SEQ ID NO: 71120 - RNA, 32 nt, Human
auguccaggcuuuauccuccugaggaugagga

SEQ ID NO: 71121 - RNA, 32 nt, Human
auguccaguccccagccaggcucuguccccug

SEQ ID NO: 71122 - RNA, 32 nt, Human
auguccaguggcuagagguggggugggaagag

SEQ ID NO: 71123 - RNA, 32 nt, Human
auguccaguguguucgguuuguuacauauucc

SEQ ID NO: 71124 - RNA, 32 nt, Human
auguccaguguuuccuguuauccacaggagaa

SEQ ID NO: 71125 - RNA, 32 nt, Human
auguccaucaagggaggaagggugggucauca

SEQ ID NO: 71126 - RNA, 32 nt, Human
auguccaucgcuccagcuugguggugaaugcu

SEQ ID NO: 71127 - RNA, 32 nt, Human
auguccaucugaaggccuaucccacucagggc

SEQ ID NO: 71128 - RNA, 32 nt, Human
auguccaugagggagagguugcugagaaguac

SEQ ID NO: 71129 - RNA, 32 nt, Human
augucccaccccacucccaccaaaaaguacaa

SEQ ID NO: 71130 - RNA, 32 nt, Human
augucccaccuauuuucacuuguccauuccau

SEQ ID NO: 71131 - RNA, 32 nt, Human
augucccagacacaaaugaaaugucuccugag

SEQ ID NO: 71132 - RNA, 32 nt, Human
augucccagccuggccuguggcugcccuccau

SEQ ID NO: 71133 - RNA, 32 nt, Human
augucccagggcaugcagagguugcaccuaga

SEQ ID NO: 71134 - RNA, 32 nt, Human
augucccauaugcacauuuugugcauucaaua

SEQ ID NO: 71135 - RNA, 32 nt, Human
auguccccaacaagauugcuuaauaaauugug

SEQ ID NO: 71136 - RNA, 32 nt, Human
augucccccaccucauguuuucaccuuuucug

SEQ ID NO: 71137 - RNA, 32 nt, Human
augucccccagccuggcauggcugcacuguaa

SEQ ID NO: 71138 - RNA, 32 nt, Human
augucccccaucucccuuccugcacccugcug

SEQ ID NO: 71139 - RNA, 32 nt, Human
augucccccggaugguuuugguugcagauugu

SEQ ID NO: 71140 - RNA, 32 nt, Human
auguccccgcugcccucgaggcucccucuucc

SEQ ID NO: 71141 - RNA, 32 nt, Human
auguccccuccccagguccuucauucaccccu

SEQ ID NO: 71142 - RNA, 32 nt, Human
auguccccucgcccucuccagucaaggccacc

SEQ ID NO: 71143 - RNA, 18 nt, Human
augucccuaccguguaaa

SEQ ID NO: 71144 - RNA, 32 nt, Human
augucccugcagcuuccuacaucagaucugcc

SEQ ID NO: 71145 - RNA, 32 nt, Human
augucccugcugcaaaguuggugggugagaga

SEQ ID NO: 71146 - RNA, 20 nt, Human
augucccuggagaguagccu

SEQ ID NO: 71147 - RNA, 32 nt, Human
augucccuguggucccagcuacucaggaggcu

SEQ ID NO: 71148 - RNA, 32 nt, Human
augucccuuacaggaaccggcagcagcuaggc

SEQ ID NO: 71149 - RNA, 32 nt, Human
augucccuuccccucacucucacuuucucucu

SEQ ID NO: 71150 - RNA, 32 nt, Human
augucccuuccucugcauugaaaugucaucaa

SEQ ID NO: 71151 - RNA, 32 nt, Human
augucccuugcacagcccacacaugaaccauc

SEQ ID NO: 71152 - RNA, 32 nt, Human
auguccgcucuuccccgugauuuggaacuuuc

SEQ ID NO: 71153 - RNA, 32 nt, Human
auguccgggaggacaaaggcaggcacgguccc

SEQ ID NO: 71154 - RNA, 32 nt, Human
auguccgucucgcucaucaucaccgacauguc

SEQ ID NO: 71155 - RNA, 32 nt, Human
auguccuacaucacugccaagaacagcauuuc

SEQ ID NO: 71156 - RNA, 32 nt, Human
auguccuaggaaugcagccccaggaaguccca

SEQ ID NO: 71157 - RNA, 32 nt, Human
auguccuauauacuugacacuuucuccuugcu

SEQ ID NO: 71158 - RNA, 32 nt, Human
auguccucacucucgccaucuggcagaucgug

SEQ ID NO: 71159 - RNA, 32 nt, Human
auguccuccacagaaagggaggauagugaaca

SEQ ID NO: 71160 - RNA, 32 nt, Human
auguccuccagaggagcuuccuccuccaggcc

SEQ ID NO: 71161 - RNA, 32 nt, Human
auguccucgcucccuccauuccugccucucac

SEQ ID NO: 71162 - RNA, 32 nt, Human
auguccucuuagaaaaugaugcaucaggaagc

SEQ ID NO: 71163 - RNA, 32 nt, Human
auguccugaccuugaaccggaaccugagugac

SEQ ID NO: 71164 - RNA, 32 nt, Human
auguccugagggugcaauccuccaucaucuug

SEQ ID NO: 71165 - RNA, 32 nt, Human
auguccugagucugcuucagucuggagcuguu

SEQ ID NO: 71166 - RNA, 32 nt, Human
auguccugcagcugccccacuucuccuuuacg

SEQ ID NO: 71167 - RNA, 32 nt, Human
auguccugcgcugcagugagaccugggugaaa

SEQ ID NO: 71168 - RNA, 32 nt, Human
auguccugcggacucuugcccagaucucggcu

SEQ ID NO: 71169 - RNA, 32 nt, Human
auguccugcuuccuuggggagcugcagccaug

SEQ ID NO: 71170 - RNA, 32 nt, Human
auguccugggguccuucuuuguacugcaccca

SEQ ID NO: 71171 - RNA, 32 nt, Human
auguccugguccccacagcucgccaagcgcaa

SEQ ID NO: 71172 - RNA, 32 nt, Human
auguccuguaauacuucaccuccaggaacugu

SEQ ID NO: 71173 - RNA, 32 nt, Human
auguccuucgcccacuuuuugaugggguuguu

SEQ ID NO: 71174 - RNA, 32 nt, Human
auguccuugggucucuuaccuuccucagcccu

SEQ ID NO: 71175 - RNA, 32 nt, Human
auguccuugugagucacucugggccuggcugu

SEQ ID NO: 71176 - RNA, 32 nt, Human
augucgaacugcauaaaagaccugguaggcug

SEQ ID NO: 71177 - RNA, 32 nt, Human
augucgcaggcagcgggcccagccugagcaau

SEQ ID NO: 71178 - RNA, 25 nt, Human
augucgcccaagcuggagcgcaaug

SEQ ID NO: 71179 - RNA, 25 nt, Human
augucgcccaagcuggaguacagug

SEQ ID NO: 71180 - RNA, 25 nt, Human
augucgcccagacuagaaugcagug

SEQ ID NO: 71181 - RNA, 25 nt, Human
augucgcccaggcuagagugcagug

SEQ ID NO: 71182 - RNA, 25 nt, Human
augucgcccaggcuggaaugcagug

SEQ ID NO: 71183 - RNA, 25 nt, Human
augucgcccaggcuggagcgcagug

SEQ ID NO: 71184 - RNA, 25 nt, Human
augucgcccaggcuggaguacagug

SEQ ID NO: 71185 - RNA, 23 nt, Human
augucgcccaggcuggagugcag

SEQ ID NO: 71186 - RNA, 25 nt, Human
augucgcccaggcuggagugcagug

SEQ ID NO: 71187 - RNA, 32 nt, Human
augucgccugcuuaagcaaaucaugcuucucu

SEQ ID NO: 71188 - RNA, 32 nt, Human
augucgccugggagccagggccuggaguucug

SEQ ID NO: 71189 - RNA, 32 nt, Human
augucggcggcgcugggguugcagggaaaaga

SEQ ID NO: 71190 - RNA, 32 nt, Human
augucggcucacugaaccuccgccucucaggu

SEQ ID NO: 71191 - RNA, 32 nt, Human
augucggcucacugcaacguccgccuccuggg

SEQ ID NO: 71192 - RNA, 32 nt, Human
augucggcucacugcaagcuccgccuccuggg

SEQ ID NO: 71193 - RNA, 32 nt, Human
augucggcucacugccaacaucugccacccag

SEQ ID NO: 71194 - RNA, 32 nt, Human
augucggggucucaauuccaagcccugucuag

SEQ ID NO: 71195 - RNA, 32 nt, Human
augucgggguuucaucagagcuagggagcgac

SEQ ID NO: 71196 - RNA, 32 nt, Human
augucgucacaugccacauccacacacuucuu

SEQ ID NO: 71197 - RNA, 32 nt, Human
augucguccuacaagguggaagccaaggggga

SEQ ID NO: 71198 - RNA, 32 nt, Human
augucguccucggugaaaaccccagcacugga

SEQ ID NO: 71199 - RNA, 32 nt, Human
augucgugauucucccuccaccugacaguuug

SEQ ID NO: 71200 - RNA, 32 nt, Human
augucguggucccgggccuggcccaggggccc

SEQ ID NO: 71201 - RNA, 32 nt, Human
augucguguguaguggaugccaguagacaacu

SEQ ID NO: 71202 - RNA, 32 nt, Human
augucguuacgcagcugagcacugguugggau

SEQ ID NO: 71203 - RNA, 32 nt, Human
augucguuuccuuccugcuccugcugcacagc

SEQ ID NO: 71204 - RNA, 32 nt, Human
augucuaccuacuccauuguguggaccaaagg

SEQ ID NO: 71205 - RNA, 32 nt, Human
augucuaccucaccaaccucgcucaucauuug

SEQ ID NO: 71206 - RNA, 32 nt, Human
augucuacuucuuucuacacagacacaguaac

SEQ ID NO: 71207 - RNA, 32 nt, Human
augucuaggagugggagccugacagacaccac

SEQ ID NO: 71208 - RNA, 32 nt, Human
augucuagggcugagggcuuugccgccauggg

SEQ ID NO: 71209 - RNA, 32 nt, Human
augucuauagccuccagaacugugagaaauaa

SEQ ID NO: 71210 - RNA, 24 nt, Human
augucuauaguuccugagauuuua

SEQ ID NO: 71211 - RNA, 32 nt, Human
augucuaucauguuauacaaaaaucuagaaau

SEQ ID NO: 71212 - RNA, 32 nt, Human
augucuauugugauuuugaugaagacagaauu

SEQ ID NO: 71213 - RNA, 32 nt, Human
augucucaaacaguaucaaacaccauuucaua

SEQ ID NO: 71214 - RNA, 32 nt, Human
augucucacagcccuggccacuggcagaucag

SEQ ID NO: 71215 - RNA, 32 nt, Human
augucucacaggacaggagggagugagggaaa

SEQ ID NO: 71216 - RNA, 32 nt, Human
augucucacuucuuacugagcuacuuaaauca

SEQ ID NO: 71217 - RNA, 32 nt, Human
augucucagcaacuggacccccucaggagcag

SEQ ID NO: 71218 - RNA, 31 nt, Human
augucucaguuaagaaagaaagacugggcca

SEQ ID NO: 71219 - RNA, 32 nt, Human
augucucauguaauuugcauuacucuggugga

SEQ ID NO: 71220 - RNA, 32 nt, Human
augucuccacgcacagcuaauggcaguaccug

SEQ ID NO: 71221 - RNA, 24 nt, Human
augucuccacuaaaaauacaaaau

SEQ ID NO: 71222 - RNA, 32 nt, Human
augucuccacugcuucuacucuggguugggau

SEQ ID NO: 71223 - RNA, 32 nt, Human
augucucccaggcuggagugcaguggcacagu

SEQ ID NO: 71224 - RNA, 28 nt, Human
augucuccuauuuuuauaauuucugagu

SEQ ID NO: 71225 - RNA, 32 nt, Human
augucuccuccugguuuuuaguuguuuuucuu

SEQ ID NO: 71226 - RNA, 32 nt, Human
augucuccuggacucagggucugcuuccccca

SEQ ID NO: 71227 - RNA, 32 nt, Human
augucuccugggaagagccucccacaaccuca

SEQ ID NO: 71228 - RNA, 23 nt, Human
augucucuacuaaaaauacaaaa

SEQ ID NO: 71229 - RNA, 24 nt, Human
augucucuacuaaaaauacaaaau

SEQ ID NO: 71230 - RNA, 32 nt, Human
augucucucagucauuccccuggggcucaagc

SEQ ID NO: 71231 - RNA, 32 nt, Human
augucucucugcaaauccagcugguaaaauaa

SEQ ID NO: 71232 - RNA, 32 nt, Human
augucucuggcucauaaaaugagacucccuca

SEQ ID NO: 71233 - RNA, 32 nt, Human
augucucuuccagaggcaucugaggcugugug

SEQ ID NO: 71234 - RNA, 32 nt, Human
augucucuuggcuaccuucugcaugcauuucu

SEQ ID NO: 71235 - RNA, 32 nt, Human
augucucuuugugggacccaggcucaugggac

SEQ ID NO: 71236 - RNA, 26 nt, Human
augucugaccucaggugauccacccg

SEQ ID NO: 71237 - RNA, 32 nt, Human
augucugagaaaaggauccugauugagucaau

SEQ ID NO: 71238 - RNA, 32 nt, Human
augucugagaaucaguucaaggcauaugcaga

SEQ ID NO: 71239 - RNA, 32 nt, Human
augucugagcagcuccagagggagggccacca

SEQ ID NO: 71240 - RNA, 32 nt, Human
augucugagccccagugccuucuguucgggcc

SEQ ID NO: 71241 - RNA, 24 nt, Human
augucugagucaccagaaauucca

SEQ ID NO: 71242 - RNA, 32 nt, Human
augucugcacauucugguggcaggcagacaau

SEQ ID NO: 71243 - RNA, 32 nt, Human
augucugcaggcaguggcaugugggcaggggg

SEQ ID NO: 71244 - RNA, 32 nt, Human
augucugccgccagcccugcugugcugccugu

SEQ ID NO: 71245 - RNA, 32 nt, Human
augucugccugggggugggguuuucccugagc

SEQ ID NO: 71246 - RNA, 23 nt, Human
augucugccugugccucagcugu

SEQ ID NO: 71247 - RNA, 32 nt, Human
augucugcucuaagaagcagacaaccggacau

SEQ ID NO: 71248 - RNA, 32 nt, Human
augucugcucugcagguucuucauacagcugc

SEQ ID NO: 71249 - RNA, 32 nt, Human
augucuggagcuuccuuuuaaggaaagaaaag

SEQ ID NO: 71250 - RNA, 32 nt, Human
augucuggagugagugcaggcucagaucaggg

SEQ ID NO: 71251 - RNA, 32 nt, Human
augucugggagagaggauaggaugggaaugcu

SEQ ID NO: 71252 - RNA, 32 nt, Human
augucugguguuuuuaacuugaucaugaucag

SEQ ID NO: 71253 - RNA, 21 nt, Human
augucuguaaaacuugacgua

SEQ ID NO: 71254 - RNA, 32 nt, Human
augucuguaacagugaacaguuauagacuuuu

SEQ ID NO: 71255 - RNA, 32 nt, Human
augucuguaccaucgucuccuuccgcucggcc

SEQ ID NO: 71256 - RNA, 32 nt, Human
augucugugacagggagggaaggcucugcccu

SEQ ID NO: 71257 - RNA, 32 nt, Human
augucugugcugcugucaccaggcaccuuugu

SEQ ID NO: 71258 - RNA, 32 nt, Human
augucugugucagcugucuuuguaguuaggaa

SEQ ID NO: 71259 - RNA, 32 nt, Human
augucuguguuggugauauuaucaagcuagaa

SEQ ID NO: 71260 - RNA, 32 nt, Human
augucuguguuuugaggaggagggugucugug

SEQ ID NO: 71261 - RNA, 32 nt, Human
augucuguuaccccucuccaucuuaccaaguu

SEQ ID NO: 71262 - RNA, 32 nt, Human
augucuguucauguguucaguguuacagcaaa

SEQ ID NO: 71263 - RNA, 21 nt, Human
augucuguugaguacuucaua

SEQ ID NO: 71264 - RNA, 32 nt, Human
augucuguuggauucaugucuuuugcuauagu

SEQ ID NO: 71265 - RNA, 32 nt, Human
augucuguuguucaaguaauaaaaguugcccu

SEQ ID NO: 71266 - RNA, 32 nt, Human
augucuuaguguuacccuccccuagucaacag

SEQ ID NO: 71267 - RNA, 32 nt, Human
augucuuauuuuauuugucaggcacagaugcu

SEQ ID NO: 71268 - RNA, 32 nt, Human
augucuucaacaucugagucaccaagaaguaa

SEQ ID NO: 71269 - RNA, 32 nt, Human
augucuucaauaacacauucacuugagcuuuu

SEQ ID NO: 71270 - RNA, 25 nt, Human
augucuucacauaggaggaaagcga

SEQ ID NO: 71271 - RNA, 32 nt, Human
augucuucagaacuuagaugugaaaaucuaca

SEQ ID NO: 71272 - RNA, 32 nt, Human
augucuucagaggcucaucuaacucuguccuu

SEQ ID NO: 71273 - RNA, 32 nt, Human
augucuucagaugccuuucugccucugucgau

SEQ ID NO: 71274 - RNA, 32 nt, Human
augucuucaguuaucucucgaguuuugaagcu

SEQ ID NO: 71275 - RNA, 32 nt, Human
augucuuccacuuuccaucauguauguaaaau

SEQ ID NO: 71276 - RNA, 22 nt, Human
augucuucccucccccgacccc

SEQ ID NO: 71277 - RNA, 32 nt, Human
augucuuccucuuccucucucuuccagagccc

SEQ ID NO: 71278 - RNA, 32 nt, Human
augucuucucaggccaugagcugcagugacug

SEQ ID NO: 71279 - RNA, 25 nt, Human
augucuucuuuggggcucugcaguu

SEQ ID NO: 71280 - RNA, 32 nt, Human
augucuucuuuuggcuguucugauuuguaucc

SEQ ID NO: 71281 - RNA, 32 nt, Human
augucuugaaacauguucaucuggaaguauuu

SEQ ID NO: 71282 - RNA, 32 nt, Human
augucuugaguugagguuaucaucucaaugag

SEQ ID NO: 71283 - RNA, 32 nt, Human
augucuuggaaagaaaaaguucaucacagaaa

SEQ ID NO: 71284 - RNA, 32 nt, Human
augucuuggaaccugucuugaguggggacaac

SEQ ID NO: 71285 - RNA, 32 nt, Human
augucuuguuauuauucuuugccaucaugcuu

SEQ ID NO: 71286 - RNA, 32 nt, Human
augucuuuaaaaagcauguugugauguacaca

SEQ ID NO: 71287 - RNA, 32 nt, Human
augucuuuaguguugagccucuggauucuggg

SEQ ID NO: 71288 - RNA, 32 nt, Human
augucuuuaucagcagugugaaaaugaacuaa

SEQ ID NO: 71289 - RNA, 32 nt, Human
augucuuugaagcaaagccugucccgcuagcc

SEQ ID NO: 71290 - RNA, 32 nt, Human
augucuuugggaggugucugugaagcagucau

SEQ ID NO: 71291 - RNA, 32 nt, Human
augucuuuucaauaucuuuucauuuucuccca

SEQ ID NO: 71292 - RNA, 32 nt, Human
augucuuuugcuuugaucuggagggagggcug

SEQ ID NO: 71293 - RNA, 32 nt, Human
augugaaaaccugucacuugcacagaggccag

SEQ ID NO: 71294 - RNA, 32 nt, Human
augugaaacaaccugggcaacauggugaaacc

SEQ ID NO: 71295 - RNA, 32 nt, Human
augugaaacaguauguguuagcauuugagcac

SEQ ID NO: 71296 - RNA, 32 nt, Human
augugaaaccacagauauuucauuaaaacaua

SEQ ID NO: 71297 - RNA, 32 nt, Human
augugaaagauuaugccuaugugucuugcaga

SEQ ID NO: 71298 - RNA, 32 nt, Human
augugaaagugguggagggcaauggaagggaa

SEQ ID NO: 71299 - RNA, 32 nt, Human
augugaacacaaaacacauuucuauggcauag

SEQ ID NO: 71300 - RNA, 32 nt, Human
augugaaccagcccuucucuucucaguuucag

SEQ ID NO: 71301 - RNA, 32 nt, Human
augugaaccauuaaccagaucuagucaaucaa

SEQ ID NO: 71302 - RNA, 32 nt, Human
augugaaccugacggacauggacgcccugagc

SEQ ID NO: 71303 - RNA, 32 nt, Human
augugaagaaaauuauuucuuucaaaguuugc

SEQ ID NO: 71304 - RNA, 32 nt, Human
augugaagaauaugcaaagccugugaaugguc

SEQ ID NO: 71305 - RNA, 32 nt, Human
augugaagaaugugacaaagcuuacaguuuca

SEQ ID NO: 71306 - RNA, 32 nt, Human
augugaagaaugugacaaagcuuuccguguga

SEQ ID NO: 71307 - RNA, 32 nt, Human
augugaagacgagaagaaggcaacugucucca

SEQ ID NO: 71308 - RNA, 32 nt, Human
augugaagauagugacaaagcuuacaguuuca

SEQ ID NO: 71309 - RNA, 32 nt, Human
augugaagauauuuccuuuuccauucagaacc

SEQ ID NO: 71310 - RNA, 32 nt, Human
augugaaggcacaagcugcuguuauauacaac

SEQ ID NO: 71311 - RNA, 32 nt, Human
augugaaggccuaggacauuacuguacacuac

SEQ ID NO: 71312 - RNA, 32 nt, Human
augugaaguaaagaucauaauuagcuguguua

SEQ ID NO: 71313 - RNA, 32 nt, Human
augugaaguucugcauagaugccagucaacca

SEQ ID NO: 71314 - RNA, 32 nt, Human
augugaauagccacugcacuccagccugggca

SEQ ID NO: 71315 - RNA, 32 nt, Human
augugaaucuucucuccacuguaguucagggg

SEQ ID NO: 71316 - RNA, 32 nt, Human
augugaaugccaacauggccaggucauuagag

SEQ ID NO: 71317 - RNA, 32 nt, Human
augugaauuauaaaugagauaauccacaguua

SEQ ID NO: 71318 - RNA, 32 nt, Human
augugacaaagccuuuaaccaguccucaauuu

SEQ ID NO: 71319 - RNA, 32 nt, Human
augugacaaucucauuggaacaugucacaaaa

SEQ ID NO: 71320 - RNA, 24 nt, Human
augugacacaggacagccauagua

SEQ ID NO: 71321 - RNA, 32 nt, Human
augugacacucaggcuggaguggugguaaggg

SEQ ID NO: 71322 - RNA, 32 nt, Human
augugacagacaccucggcucuccuugaauaa

SEQ ID NO: 71323 - RNA, 25 nt, Human
augugacagagcucgacccaagcca

SEQ ID NO: 71324 - RNA, 32 nt, Human
augugacagauggggaaacugaggccuugaga

SEQ ID NO: 71325 - RNA, 32 nt, Human
augugacagcauggggguggacuuugauguga

SEQ ID NO: 71326 - RNA, 32 nt, Human
augugacagccauugugagacugaugcacaaa

SEQ ID NO: 71327 - RNA, 32 nt, Human
augugacaggaggcagcagaaguugcagagaa

SEQ ID NO: 71328 - RNA, 32 nt, Human
augugacagugacacuuccuggaguguagagc

SEQ ID NO: 71329 - RNA, 32 nt, Human
augugacaugaggccgacuggggccaggcuca

SEQ ID NO: 71330 - RNA, 32 nt, Human
augugacaugucugugggaagcucccagaguu

SEQ ID NO: 71331 - RNA, 32 nt, Human
augugaccaaacuaaagugagaaaaauguagg

SEQ ID NO: 71332 - RNA, 32 nt, Human
augugaccagaagugcugaugaccucagggaa

SEQ ID NO: 71333 - RNA, 32 nt, Human
augugaccagcccugaguucaccaguguucag

SEQ ID NO: 71334 - RNA, 32 nt, Human
augugacccccaggacagaauggugcuggacu

SEQ ID NO: 71335 - RNA, 32 nt, Human
augugacccuagugacgucacagaccugagau

SEQ ID NO: 71336 - RNA, 32 nt, Human
augugacccuugccaucuccaaaugagugauc

SEQ ID NO: 71337 - RNA, 32 nt, Human
augugaccuggggcaggauaccgucagugagg

SEQ ID NO: 71338 - RNA, 32 nt, Human
augugacucagagaggaggguucugggcaggg

SEQ ID NO: 71339 - RNA, 32 nt, Human
augugacucaggauggaggguggcacugucca

SEQ ID NO: 71340 - RNA, 32 nt, Human
augugacuccuggaagugacguaggagugagu

SEQ ID NO: 71341 - RNA, 32 nt, Human
augugacugagguggugcccgagcccagccag

SEQ ID NO: 71342 - RNA, 32 nt, Human
augugacuggugcugcggcggggcgugcugcg

SEQ ID NO: 71343 - RNA, 32 nt, Human
augugagaaagaaaucucuagauuugaugggu

SEQ ID NO: 71344 - RNA, 32 nt, Human
augugagaagcagaacguggugaccuuucacg

SEQ ID NO: 71345 - RNA, 32 nt, Human
augugagaaggaagggaggaguaggaaucuug

SEQ ID NO: 71346 - RNA, 32 nt, Human
augugagaaggugucacaguuugaggcgaagg

SEQ ID NO: 71347 - RNA, 32 nt, Human
augugagacaacugcacuccagugugggcgug

SEQ ID NO: 71348 - RNA, 32 nt, Human
augugagacccgcuugugaguccuccacacuc

SEQ ID NO: 71349 - RNA, 32 nt, Human
augugagacgguggacuuuuccucuggacaaa

SEQ ID NO: 71350 - RNA, 32 nt, Human
augugagagaccggaguaugauccucagugcg

SEQ ID NO: 71351 - RNA, 32 nt, Human
augugagaggcagagagggcgaguggcugcga

SEQ ID NO: 71352 - RNA, 32 nt, Human
augugagaguuuuccuuuuucugcaccacuag

SEQ ID NO: 71353 - RNA, 32 nt, Human
augugagcacacugugagaagaugccauccgc

SEQ ID NO: 71354 - RNA, 32 nt, Human
augugagcacagacccagguguuucugaaccu

SEQ ID NO: 71355 - RNA, 32 nt, Human
augugagcauggucacaagcacaaagcucaag

SEQ ID NO: 71356 - RNA, 32 nt, Human
augugagccacugcaccuggccccagaaauua

SEQ ID NO: 71357 - RNA, 32 nt, Human
augugagccacugucuuucccauuuuuggcug

SEQ ID NO: 71358 - RNA, 32 nt, Human
augugagccuggcugcucagcgucuccuggcc

SEQ ID NO: 71359 - RNA, 32 nt, Human
augugagccugggaggucaaggcugcagugag

SEQ ID NO: 71360 - RNA, 32 nt, Human
augugagcucagccacagaccucagcuggcgg

SEQ ID NO: 71361 - RNA, 32 nt, Human
augugagcuggcaguuaagagcugaauggcuc

SEQ ID NO: 71362 - RNA, 32 nt, Human
augugagcuuaggaguuggcagccuguggcau

SEQ ID NO: 71363 - RNA, 32 nt, Human
augugaggaagacaggcuucccuuccuucccc

SEQ ID NO: 71364 - RNA, 32 nt, Human
augugaggaucaggugggcaugguggcucaug

SEQ ID NO: 71365 - RNA, 32 nt, Human
augugaggaugaggagacagaaaacaaguagc

SEQ ID NO: 71366 - RNA, 32 nt, Human
augugaggcagugacaccgagcuguuugacca

SEQ ID NO: 71367 - RNA, 32 nt, Human
augugaggcugaggcagguggaucacuugagg

SEQ ID NO: 71368 - RNA, 32 nt, Human
augugaggggcugaggggcucaaggaggggag

SEQ ID NO: 71369 - RNA, 32 nt, Human
augugaggugccauccucugagcccaggucug

SEQ ID NO: 71370 - RNA, 32 nt, Human
augugagguucacaguuguauuccaguauuca

SEQ ID NO: 71371 - RNA, 32 nt, Human
augugaguccugggccuuucugccuccugaug

SEQ ID NO: 71372 - RNA, 32 nt, Human
augugagugggugggauggggacauuugaaca

SEQ ID NO: 71373 - RNA, 23 nt, Human
augugaguguacauauauacaca

SEQ ID NO: 71374 - RNA, 32 nt, Human
augugaguuucugcuuuugaaaauugcuugua

SEQ ID NO: 71375 - RNA, 32 nt, Human
augugauaaaaugaaacaauugcucaacugau

SEQ ID NO: 71376 - RNA, 32 nt, Human
augugauaaaguuuacaguggcaaaucaagcc

SEQ ID NO: 71377 - RNA, 32 nt, Human
augugauaggcacaggacaggaguaggcaccu

SEQ ID NO: 71378 - RNA, 31 nt, Human
augugaucaauuacuguccucacuuagaaca

SEQ ID NO: 71379 - RNA, 32 nt, Human
augugauccucuguaucuccccaguaaucaca

SEQ ID NO: 71380 - RNA, 32 nt, Human
augugauccugccuugcugugaaauuucugua

SEQ ID NO: 71381 - RNA, 32 nt, Human
augugaucuauucugcugaaugcucugugugc

SEQ ID NO: 71382 - RNA, 32 nt, Human
augugaucugucuuguaauauuuuguauuauu

SEQ ID NO: 71383 - RNA, 32 nt, Human
augugaugauucacuuuucaguucucaaauua

SEQ ID NO: 71384 - RNA, 32 nt, Human
augugaugcaugcucacgugucuccgcagccg

SEQ ID NO: 71385 - RNA, 30 nt, Human
augugaugcugggggcagagacagaggaga

SEQ ID NO: 71386 - RNA, 32 nt, Human
augugaugcugggggcagagacagaggagaag

SEQ ID NO: 71387 - RNA, 32 nt, Human
augugauguccuuuugcauauuuccuucauuc

SEQ ID NO: 71388 - RNA, 30 nt, Human
augugauguuggaaaauuaugggaacaugg

SEQ ID NO: 71389 - RNA, 32 nt, Human
augugauuagauaguuccugacaaaauaaaug

SEQ ID NO: 71390 - RNA, 32 nt, Human
augugauucacugccuuccucucucuaccagu

SEQ ID NO: 71391 - RNA, 32 nt, Human
augugauucccaaccaacucaggaugaaguaa

SEQ ID NO: 71392 - RNA, 32 nt, Human
augugauuccccagaacccaggacaggacagc

SEQ ID NO: 71393 - RNA, 32 nt, Human
augugauucccucuccccaaaugggccuacca

SEQ ID NO: 71394 - RNA, 32 nt, Human
augugauucuggaaguccuggaugccagagac

SEQ ID NO: 71395 - RNA, 32 nt, Human
augugauuuauucaaggucacauagaggggua

SEQ ID NO: 71396 - RNA, 32 nt, Human
augugauuuucacagauucagcucuucucucc

SEQ ID NO: 71397 - RNA, 32 nt, Human
augugcaaguguuugauucaugccauuugaua

SEQ ID NO: 71398 - RNA, 32 nt, Human
augugcacacauauacauguaggaguguuuau

SEQ ID NO: 71399 - RNA, 32 nt, Human
augugcacccccuguccccuggcugggccacc

SEQ ID NO: 71400 - RNA, 32 nt, Human
augugcacccuucucccuccagccugggcuac

SEQ ID NO: 71401 - RNA, 32 nt, Human
augugcaccugagaccugaugucuaucugugg

SEQ ID NO: 71402 - RNA, 32 nt, Human
augugcacugugacugccugguggccuuuggu

SEQ ID NO: 71403 - RNA, 32 nt, Human
augugcagacagcagagacuggcugaguggaa

SEQ ID NO: 71404 - RNA, 32 nt, Human
augugcaggacauguccagcauggacagagcc

SEQ ID NO: 71405 - RNA, 32 nt, Human
augugcaggauaggacagcuuagaaugagugc

SEQ ID NO: 71406 - RNA, 32 nt, Human
augugcagugagccaccauggaggaccaagca

SEQ ID NO: 71407 - RNA, 32 nt, Human
augugcagugucuuuucagaaaggacacucug

SEQ ID NO: 71408 - RNA, 32 nt, Human
augugcauauagacacaucuauaauuuuacac

SEQ ID NO: 71409 - RNA, 32 nt, Human
augugcauauuuaaaauauggauagagacgca

SEQ ID NO: 71410 - RNA, 32 nt, Human
augugcaucaagccagccugaccaacauggug

SEQ ID NO: 71411 - RNA, 32 nt, Human
augugcaucuucccuuucuugguuuuagaugu

SEQ ID NO: 71412 - RNA, 32 nt, Human
augugcauggugcugugaauaauugucuagua

SEQ ID NO: 71413 - RNA, 32 nt, Human
augugccaaacgucagugguguuuucauaugg

SEQ ID NO: 71414 - RNA, 32 nt, Human
augugccacgaccuggggugggcacagggagg

SEQ ID NO: 71415 - RNA, 32 nt, Human
augugccacuggacucccagccugggugacag

SEQ ID NO: 71416 - RNA, 32 nt, Human
augugccagcuacucgggaggcugaggcaaga

SEQ ID NO: 71417 - RNA, 32 nt, Human
augugccaggugcagagauuaaggaguuaucu

SEQ ID NO: 71418 - RNA, 32 nt, Human
augugccaguagucccagcuacucgaaaggcu

SEQ ID NO: 71419 - RNA, 32 nt, Human
augugcccaccuggcccugcccuggccgccac

SEQ ID NO: 71420 - RNA, 32 nt, Human
augugcccagcaccuccuuugugccaggcccc

SEQ ID NO: 71421 - RNA, 32 nt, Human
augugcccagcacuaugcugagcuuacacuaa

SEQ ID NO: 71422 - RNA, 32 nt, Human
augugcccagugcgggcugagauaaggcccug

SEQ ID NO: 71423 - RNA, 32 nt, Human
augugccccaggcuuuauuuuaauagugaucu

SEQ ID NO: 71424 - RNA, 32 nt, Human
augugccccauguccaaguccaaccugccugu

SEQ ID NO: 71425 - RNA, 32 nt, Human
augugcccuguaucuauuggcagugaccuugg

SEQ ID NO: 71426 - RNA, 32 nt, Human
augugcccuucaugccccucccugcauugagg

SEQ ID NO: 71427 - RNA, 32 nt, Human
augugccgguagccccagcuacucgggaggcu

SEQ ID NO: 71428 - RNA, 32 nt, Human
augugccuauagccccagcuacucaggaagcu

SEQ ID NO: 71429 - RNA, 32 nt, Human
augugccuauagucccagcuacuugggaggug

SEQ ID NO: 71430 - RNA, 32 nt, Human
augugccucauuaagaggcaggucuuaaucag

SEQ ID NO: 71431 - RNA, 32 nt, Human
augugccucauucugugccuccuucugugccu

SEQ ID NO: 71432 - RNA, 32 nt, Human
augugccucccauccugacuguggaguuggga

SEQ ID NO: 71433 - RNA, 30 nt, Human
augugccucuccagacugcuccugcacuua

SEQ ID NO: 71434 - RNA, 32 nt, Human
augugccugaaggcuauccacuacauucugaa

SEQ ID NO: 71435 - RNA, 32 nt, Human
augugccugagauucggauggggagcucucaa

SEQ ID NO: 71436 - RNA, 32 nt, Human
augugccugaugugguggagggagacaccagc

SEQ ID NO: 71437 - RNA, 32 nt, Human
augugccugcaaucccagcuacucaggaggcu

SEQ ID NO: 71438 - RNA, 32 nt, Human
augugccugcggucccagcugcucugauaaga

SEQ ID NO: 71439 - RNA, 32 nt, Human
augugccugcuuccuguucaccuucugccaug

SEQ ID NO: 71440 - RNA, 32 nt, Human
augugccuggagucccagcuacucaggaggcu

SEQ ID NO: 71441 - RNA, 32 nt, Human
augugccuguaaccccagcuacucaggaggcc

SEQ ID NO: 71442 - RNA, 32 nt, Human
augugccuguaaucccaccuacucgagaggcu

SEQ ID NO: 71443 - RNA, 32 nt, Human
augugccuguaaucccagcuacucaggaggcc

SEQ ID NO: 71444 - RNA, 32 nt, Human
augugccuguaaucccagcuacucaggaggcu

SEQ ID NO: 71445 - RNA, 32 nt, Human
augugccuguaaucccagcuacucaggagucu

SEQ ID NO: 71446 - RNA, 32 nt, Human
augugccuguaaucccagcuacuugggaggcu

SEQ ID NO: 71447 - RNA, 32 nt, Human
augugccuguaaucccagcuauuuggcaggcu

SEQ ID NO: 71448 - RNA, 32 nt, Human
augugccuguaaucccagcuucuggaggcuga

SEQ ID NO: 71449 - RNA, 32 nt, Human
augugccuguaaucccagcuucuugggaagcu

SEQ ID NO: 71450 - RNA, 32 nt, Human
augugccuguaaucccaguuacuggggaggcu

SEQ ID NO: 71451 - RNA, 32 nt, Human
augugccuguaaucccugcuacucaggaggcu

SEQ ID NO: 71452 - RNA, 32 nt, Human
augugccuguaauuccagcuacucgggaggcu

SEQ ID NO: 71453 - RNA, 32 nt, Human
augugccuguagucccagcuacaugggaggcu

SEQ ID NO: 71454 - RNA, 32 nt, Human
augugccuguagucccagcuacucaggaggcu

SEQ ID NO: 71455 - RNA, 32 nt, Human
augugccuguagucccagcuacucaggagucu

SEQ ID NO: 71456 - RNA, 32 nt, Human
augugccuguagucccagcuacucuggagucu

SEQ ID NO: 71457 - RNA, 32 nt, Human
augugccuguagucccagcuacuugggaggcu

SEQ ID NO: 71458 - RNA, 32 nt, Human
augugccuguagucucagcuacucaggaggcu

SEQ ID NO: 71459 - RNA, 32 nt, Human
augugccuguaguuccagcuacucaggaggcu

SEQ ID NO: 71460 - RNA, 32 nt, Human
augugccuguaucuuuuucuccacccaaaccc

SEQ ID NO: 71461 - RNA, 32 nt, Human
augugccuguauucccagcuacucaugaggcu

SEQ ID NO: 71462 - RNA, 32 nt, Human
augugccugucguuccagcuaccugggaugcu

SEQ ID NO: 71463 - RNA, 32 nt, Human
augugccugugggguggggaggcguagggguc

SEQ ID NO: 71464 - RNA, 32 nt, Human
augugccuguggucccagcuacucaagaggcu

SEQ ID NO: 71465 - RNA, 32 nt, Human
augugccuguggucccagcuacucaggaggcu

SEQ ID NO: 71466 - RNA, 32 nt, Human
augugccugugguccuagcuacucaggaggcu

SEQ ID NO: 71467 - RNA, 32 nt, Human
augugccuguggucucagcuacucaggaggcu

SEQ ID NO: 71468 - RNA, 32 nt, Human
augugccuucuaaauggcaugacauauguaga

SEQ ID NO: 71469 - RNA, 32 nt, Human
augugccuuggaccaguuccuguguuggaaug

SEQ ID NO: 71470 - RNA, 25 nt, Human
augugccuuugauuuguuagcuuua

SEQ ID NO: 71471 - RNA, 32 nt, Human
augugccuuuugguuacaugcauuaaaucuaa

SEQ ID NO: 71472 - RNA, 32 nt, Human
augugcgcaagguuguuuccugcugagagcug

SEQ ID NO: 71473 - RNA, 22 nt, Human
augugcgcccucagggcuucca

SEQ ID NO: 71474 - RNA, 32 nt, Human
augugcgcgcacacaccacacaugcacacacg

SEQ ID NO: 71475 - RNA, 32 nt, Human
augugcggaagggacccaggagaccugcagga

SEQ ID NO: 71476 - RNA, 32 nt, Human
augugcggccagcucccuccccuugaccccag

SEQ ID NO: 71477 - RNA, 23 nt, Human
augugcuaaugaaagagauucua

SEQ ID NO: 71478 - RNA, 22 nt, Human
augugcuacacuagauauuuca

SEQ ID NO: 71479 - RNA, 32 nt, Human
augugcuacugcccccaggugcuuggauggcu

SEQ ID NO: 71480 - RNA, 22 nt, Human
augugcuagcaccagaacuucu

SEQ ID NO: 71481 - RNA, 32 nt, Human
augugcuaggauuacaggcgugggccaccaca

SEQ ID NO: 71482 - RNA, 22 nt, Human
augugcuauacuagauauuuca

SEQ ID NO: 71483 - RNA, 23 nt, Human
augugcuauauauuagaaauuuc

SEQ ID NO: 71484 - RNA, 32 nt, Human
augugcuauuggagaacaggucuuuguggaga

SEQ ID NO: 71485 - RNA, 32 nt, Human
augugcucacuggcucaacuguauuuuucaaa

SEQ ID NO: 71486 - RNA, 32 nt, Human
augugcucagccaggcuggaggcggcaggcgg

SEQ ID NO: 71487 - RNA, 22 nt, Human
augugcuccaggccaugcugga

SEQ ID NO: 71488 - RNA, 19 nt, Human
augugcuccgggaccugga

SEQ ID NO: 71489 - RNA, 23 nt, Human
augugcucguuucuaaaauucua

SEQ ID NO: 71490 - RNA, 18 nt, Human
augugcucuggagcugga

SEQ ID NO: 71491 - RNA, 23 nt, Human
augugcugaaagccaaacuuuua

SEQ ID NO: 71492 - RNA, 32 nt, Human
augugcugaaagucaucugucuucugagucaa

SEQ ID NO: 71493 - RNA, 32 nt, Human
augugcugacggggguccagaggcagaguccu

SEQ ID NO: 71494 - RNA, 32 nt, Human
augugcugagauugcaggcaugagccacugcg

SEQ ID NO: 71495 - RNA, 32 nt, Human
augugcugcacuccuucccuccugccuccugc

SEQ ID NO: 71496 - RNA, 32 nt, Human
augugcugccuucuguuguggauuuccugcca

SEQ ID NO: 71497 - RNA, 32 nt, Human
augugcugcucuucuugguggggcuuugggcu

SEQ ID NO: 71498 - RNA, 32 nt, Human
augugcugggaugggagcccccugagagcagg

SEQ ID NO: 71499 - RNA, 32 nt, Human
augugcugggauuacaggcaugagccaccgca

SEQ ID NO: 71500 - RNA, 32 nt, Human
augugcugggauuacaggcgugagccuuggug

SEQ ID NO: 71501 - RNA, 32 nt, Human
augugcugggauuacaguugucacguaccgcg

SEQ ID NO: 71502 - RNA, 32 nt, Human
augugcugguggauccacucccauggauccac

SEQ ID NO: 71503 - RNA, 32 nt, Human
augugcugguuccucccaccaucaagcaggga

SEQ ID NO: 71504 - RNA, 32 nt, Human
augugcuguaguuugaaaccuaacgaauccuc

SEQ ID NO: 71505 - RNA, 24 nt, Human
augugcuguaucccaggcauacua

SEQ ID NO: 71506 - RNA, 32 nt, Human
augugcuguccagcaaagcacacauggagaag

SEQ ID NO: 71507 - RNA, 32 nt, Human
augugcugugugugcaccugcucacaggaugu

SEQ ID NO: 71508 - RNA, 32 nt, Human
augugcugugugugugcaugugugcaugacgg

SEQ ID NO: 71509 - RNA, 32 nt, Human
augugcuuacaggccaguaagcuuugaccuca

SEQ ID NO: 71510 - RNA, 32 nt, Human
augugcuuggucuccccuucugcuguucuccu

SEQ ID NO: 71511 - RNA, 32 nt, Human
augugcuuguaaucccagcuacucuggaggcu

SEQ ID NO: 71512 - RNA, 32 nt, Human
augugcuuguacauggagccucugcuguagcu

SEQ ID NO: 71513 - RNA, 32 nt, Human
augugcuuucaccucugccucaucuuuccucc

SEQ ID NO: 71514 - RNA, 32 nt, Human
augugcuuuccuggaaauuuuucuagauagaa

SEQ ID NO: 71515 - RNA, 32 nt, Human
augugcuuuguggcuucucuuuacagcuuugu

SEQ ID NO: 71516 - RNA, 24 nt, Human
augugcuuuuccaguucuucugga

SEQ ID NO: 71517 - RNA, 32 nt, Human
auguggaaacuuuuuaguucucacuacaaugu

SEQ ID NO: 71518 - RNA, 32 nt, Human
auguggaaagucugaaugcaguauuuauagac

SEQ ID NO: 71519 - RNA, 32 nt, Human
auguggaaaugagaugugcuuaggaaaggguc

SEQ ID NO: 71520 - RNA, 32 nt, Human
auguggaaauggacacagggaucuucugaagu

SEQ ID NO: 71521 - RNA, 32 nt, Human
auguggaaauucuuccuguuggcuaaagggga

SEQ ID NO: 71522 - RNA, 32 nt, Human
auguggaagaacuuaggcaucugugggcaugg

SEQ ID NO: 71523 - RNA, 32 nt, Human
auguggaagacaaauccuguccagccgggugg

SEQ ID NO: 71524 - RNA, 32 nt, Human
auguggaagagccagaggaggagcagcuuuac

SEQ ID NO: 71525 - RNA, 32 nt, Human
auguggaauguguuuucuagcuuucuuugaau

SEQ ID NO: 71526 - RNA, 31 nt, Human
auguggaauugacugccuaugccaagucccu

SEQ ID NO: 71527 - RNA, 32 nt, Human
auguggacacauauccggaaacugcagcugcu

SEQ ID NO: 71528 - RNA, 32 nt, Human
auguggaccaaauucguaccacuaucuaaaau

SEQ ID NO: 71529 - RNA, 32 nt, Human
auguggagagagcacugugugcgcagcggcag

SEQ ID NO: 71530 - RNA, 32 nt, Human
auguggagcgggguuuagcucaugcaaaagac

SEQ ID NO: 71531 - RNA, 32 nt, Human
auguggaggaauacacauacacacacaaacau

SEQ ID NO: 71532 - RNA, 32 nt, Human
auguggaggacagucugagggagccacugucc

SEQ ID NO: 71533 - RNA, 32 nt, Human
auguggaggacauguucccauggaucauaugu

SEQ ID NO: 71534 - RNA, 32 nt, Human
auguggaggagaaagagggaaucccuccacaa

SEQ ID NO: 71535 - RNA, 31 nt, Human
auguggauacuauccuaguugaguagaguag

SEQ ID NO: 71536 - RNA, 32 nt, Human
auguggauagaacuuauaagccuaguagugau

SEQ ID NO: 71537 - RNA, 32 nt, Human
auguggauauccagccagaaugcccucucucc

SEQ ID NO: 71538 - RNA, 32 nt, Human
auguggaucuaaggcaaauuguucacuuugug

SEQ ID NO: 71539 - RNA, 32 nt, Human
auguggaugcagcuguccagccacugcccuuu

SEQ ID NO: 71540 - RNA, 32 nt, Human
auguggauggccuggggacuccuggguuuucu

SEQ ID NO: 71541 - RNA, 32 nt, Human
auguggauguggccagugucagccuggagaaa

SEQ ID NO: 71542 - RNA, 32 nt, Human
auguggauucacauuucuguggagauuuucgg

SEQ ID NO: 71543 - RNA, 32 nt, Human
auguggcaaagcuuuuaaccaguccucaaacu

SEQ ID NO: 71544 - RNA, 32 nt, Human
auguggcaaagcuuuuaaccaguccucaaccc

SEQ ID NO: 71545 - RNA, 21 nt, Human
auguggcaaggucuucuggca

SEQ ID NO: 71546 - RNA, 32 nt, Human
auguggcaaugccaccccucagcccaggacua

SEQ ID NO: 71547 - RNA, 32 nt, Human
auguggcacugagcccuacccagcaccucagu

SEQ ID NO: 71548 - RNA, 32 nt, Human
auguggcacuuagguccaaggucuccagaggg

SEQ ID NO: 71549 - RNA, 32 nt, Human
auguggcagagcuuuuaaccaguccgcaaagc

SEQ ID NO: 71550 - RNA, 32 nt, Human
auguggcagaggcaggccagaggaccuaagug

SEQ ID NO: 71551 - RNA, 32 nt, Human
auguggcagcagcugcaccugggaggcaggca

SEQ ID NO: 71552 - RNA, 32 nt, Human
auguggcaggagaaagaaagaaaacgggccga

SEQ ID NO: 71553 - RNA, 32 nt, Human
auguggcaggcaaccucuguguggcagaaaaa

SEQ ID NO: 71554 - RNA, 32 nt, Human
auguggcaguggggauguggcagugaggaaga

SEQ ID NO: 71555 - RNA, 32 nt, Human
auguggcaguuucaaaggauuacuugaugcaa

SEQ ID NO: 71556 - RNA, 32 nt, Human
auguggccccagagaagggcagagggaaaggg

SEQ ID NO: 71557 - RNA, 32 nt, Human
auguggccccugccauccuuguggucacuagg

SEQ ID NO: 71558 - RNA, 32 nt, Human
auguggcccuuccucccccucauugaggacuu

SEQ ID NO: 71559 - RNA, 32 nt, Human
auguggccucagcugcugcggauccccugggc

SEQ ID NO: 71560 - RNA, 32 nt, Human
auguggccuccccucgcugccuguucaucccg

SEQ ID NO: 71561 - RNA, 32 nt, Human
auguggccucuccuguucucaggccccuacac

SEQ ID NO: 71562 - RNA, 32 nt, Human
auguggccuggagaggacaggagcugguaagg

SEQ ID NO: 71563 - RNA, 32 nt, Human
auguggccuguucacagcuacauaauugugac

SEQ ID NO: 71564 - RNA, 32 nt, Human
auguggcgggaggugaggcgggagguucagca

SEQ ID NO: 71565 - RNA, 32 nt, Human
auguggcugccccauuuauccaccuccaucuu

SEQ ID NO: 71566 - RNA, 32 nt, Human
auguggcugggcugagcagccugagcagcggc

SEQ ID NO: 71567 - RNA, 32 nt, Human
auguggcuggucucaaacuccugggcucaagu

SEQ ID NO: 71568 - RNA, 32 nt, Human
auguggcuguagucccagcuacucgggaggcu

SEQ ID NO: 71569 - RNA, 32 nt, Human
auguggcuguagucccagcuacuuuggaggcu

SEQ ID NO: 71570 - RNA, 32 nt, Human
auguggcuucucugucucuguggaaaagccau

SEQ ID NO: 71571 - RNA, 32 nt, Human
auguggcuuugguggaugggguauucuugaac

SEQ ID NO: 71572 - RNA, 32 nt, Human
augugggaaaacagggauuaacgaggggcaag

SEQ ID NO: 71573 - RNA, 32 nt, Human
augugggaaaacuuccagcccucuguuaauug

SEQ ID NO: 71574 - RNA, 32 nt, Human
augugggaaauccuucagcuuaagcucagcuc

SEQ ID NO: 71575 - RNA, 32 nt, Human
augugggaaggcagaggaucucugaggaguuc

SEQ ID NO: 71576 - RNA, 32 nt, Human
augugggaggcggagguugcagugagucagau

SEQ ID NO: 71577 - RNA, 32 nt, Human
augugggaggcugagacacgaggaucacuuga

SEQ ID NO: 71578 - RNA, 32 nt, Human
augugggagggcccuggacauggcccggcccc

SEQ ID NO: 71579 - RNA, 32 nt, Human
augugggagguggauaggucggugaugugugg

SEQ ID NO: 71580 - RNA, 32 nt, Human
augugggaguggggugggagggggcagcaggc

SEQ ID NO: 71581 - RNA, 32 nt, Human
augugggauccagguuuuagcugugcugcccg

SEQ ID NO: 71582 - RNA, 32 nt, Human
augugggauccugcccuggggcucccugccag

SEQ ID NO: 71583 - RNA, 32 nt, Human
augugggcagcuguuuaacauggcugagcccu

SEQ ID NO: 71584 - RNA, 32 nt, Human
augugggcaggggcuugugugguuuggauuuc

SEQ ID NO: 71585 - RNA, 32 nt, Human
augugggccagccugccucacuuuacccaagu

SEQ ID NO: 71586 - RNA, 32 nt, Human
augugggcccuucagcuugggcugcuuggcca

SEQ ID NO: 71587 - RNA, 32 nt, Human
augugggccucacaacucgugaccucagcuau

SEQ ID NO: 71588 - RNA, 32 nt, Human
augugggcucacugcaaccucugccuuccagg

SEQ ID NO: 71589 - RNA, 32 nt, Human
augugggcuguaauuccaccuuugcgggggag

SEQ ID NO: 71590 - RNA, 32 nt, Human
auguggggaaaagcaagagagaucagauuguu

SEQ ID NO: 71591 - RNA, 19 nt, Human
auguggggacacauucuga

SEQ ID NO: 71592 - RNA, 32 nt, Human
auguggggagcaccucugcccggccgcgaccc

SEQ ID NO: 71593 - RNA, 32 nt, Human
auguggggccugggugggcaggcaggaccugg

SEQ ID NO: 71594 - RNA, 32 nt, Human
augugggggaaaugcauccccucagaggacug

SEQ ID NO: 71595 - RNA, 32 nt, Human
augugggggugaaccuuggccuccaggacauc

SEQ ID NO: 71596 - RNA, 32 nt, Human
auguggguaaauauaaaagauauuucucucuu

SEQ ID NO: 71597 - RNA, 32 nt, Human
auguggguaaccuguaguauucugcuauacua

SEQ ID NO: 71598 - RNA, 32 nt, Human
auguggguaagaggagcagagggcaggggugc

SEQ ID NO: 71599 - RNA, 32 nt, Human
auguggguacccuuucugaagcugucagggcu

SEQ ID NO: 71600 - RNA, 32 nt, Human
augugggucauaauucugccuuccucuagggg

SEQ ID NO: 71601 - RNA, 32 nt, Human
augugggugaagagaaccgagcaaagaucaaa

SEQ ID NO: 71602 - RNA, 32 nt, Human
augugggugcaggcaugcacacacacgaugga

SEQ ID NO: 71603 - RNA, 32 nt, Human
augugggugccuguuccuuuguggacuugugu

SEQ ID NO: 71604 - RNA, 32 nt, Human
auguggguggaggaaaccuguaauuuccuucu

SEQ ID NO: 71605 - RNA, 32 nt, Human
augugguaaaugccaugaaaauuggccacuuu

SEQ ID NO: 71606 - RNA, 32 nt, Human
augugguaaguguugucagagcagggcaauau

SEQ ID NO: 71607 - RNA, 32 nt, Human
augugguacaaggacgaggugcugcugaccga

SEQ ID NO: 71608 - RNA, 32 nt, Human
augugguaccucuucuuuccuuggcuuccaug

SEQ ID NO: 71609 - RNA, 32 nt, Human
augugguacuccugaacuuucacuccuggucc

SEQ ID NO: 71610 - RNA, 32 nt, Human
augugguaguaagaggauuuucuuccauaaug

SEQ ID NO: 71611 - RNA, 32 nt, Human
augugguagugaaaaucgaggaagcaccucuc

SEQ ID NO: 71612 - RNA, 32 nt, Human
auguggucacagucucucaggcaugugcaggg

SEQ ID NO: 71613 - RNA, 32 nt, Human
augugguccaagccagcacuccugccaucaca

SEQ ID NO: 71614 - RNA, 32 nt, Human
augugguccaucucugaaaacaagagacugcu

SEQ ID NO: 71615 - RNA, 32 nt, Human
augugguccuggcucugccacuggcuugcuuu

SEQ ID NO: 71616 - RNA, 32 nt, Human
auguggucgccuaucuccuuccucugcucccu

SEQ ID NO: 71617 - RNA, 32 nt, Human
auguggucucagauacuugggaggcugaggug

SEQ ID NO: 71618 - RNA, 32 nt, Human
auguggucuccaccauauucacacaccaccac

SEQ ID NO: 71619 - RNA, 32 nt, Human
augugguggaacccuggacacugucguugaag

SEQ ID NO: 71620 - RNA, 32 nt, Human
augugguggagcugggcugggaccuccgggcu

SEQ ID NO: 71621 - RNA, 32 nt, Human
augugguggcagugccuguaaucccagcuauu

SEQ ID NO: 71622 - RNA, 32 nt, Human
augugguggucccucucuucguuguuucugcc

SEQ ID NO: 71623 - RNA, 32 nt, Human
auguggugucacagauacaucgccgagagagg

SEQ ID NO: 71624 - RNA, 32 nt, Human
augugguuaagccugguaagccugcuaaaaug

SEQ ID NO: 71625 - RNA, 32 nt, Human
augugguucccuuugucacuucuuuggugguc

SEQ ID NO: 71626 - RNA, 32 nt, Human
augugguuggaagaugcaaacuguggaugauc

SEQ ID NO: 71627 - RNA, 32 nt, Human
augugguuuucuuuuaaaaagcuccuguuuuu

SEQ ID NO: 71628 - RNA, 32 nt, Human
auguguaaagaaggaagagcaagaacauggcc

SEQ ID NO: 71629 - RNA, 32 nt, Human
auguguaacuuccucacguugugugcgauaac

SEQ ID NO: 71630 - RNA, 22 nt, Human
auguguaagaaaaggcccauua

SEQ ID NO: 71631 - RNA, 32 nt, Human
auguguaagucccaugaaggcaaagauugguc

SEQ ID NO: 71632 - RNA, 32 nt, Human
auguguaauaugcacaaguuuguuuuuguuuu

SEQ ID NO: 71633 - RNA, 21 nt, Human
auguguacacauauguacaua

SEQ ID NO: 71634 - RNA, 32 nt, Human
auguguacauaaugaaccaucuuuaaaaauaa

SEQ ID NO: 71635 - RNA, 22 nt, Human
auguguaccaguagagaagccu

SEQ ID NO: 71636 - RNA, 32 nt, Human
auguguacuucuuuccacacagacacggcaac

SEQ ID NO: 71637 - RNA, 32 nt, Human
auguguacuugauagagcuaaaauaugaucuu

SEQ ID NO: 71638 - RNA, 32 nt, Human
auguguagaagcuuguauuuguguacaggugu

SEQ ID NO: 71639 - RNA, 32 nt, Human
auguguagacaagcucucgcucugucacccag

SEQ ID NO: 71640 - RNA, 32 nt, Human
auguguagacauuccaagucacugcuugguag

SEQ ID NO: 71641 - RNA, 32 nt, Human
auguguagccuucuggaaucugcacgugacug

SEQ ID NO: 71642 - RNA, 32 nt, Human
auguguaggguuggggagagugcagugauggg

SEQ ID NO: 71643 - RNA, 32 nt, Human
auguguauacauuguucuuuacguuguucuag

SEQ ID NO: 71644 - RNA, 32 nt, Human
auguguauagcuucccaaguucuuuuacaguc

SEQ ID NO: 71645 - RNA, 32 nt, Human
auguguauauaagaaugaguugggaccucugu

SEQ ID NO: 71646 - RNA, 32 nt, Human
auguguaucccaggaccacccugggcggggag

SEQ ID NO: 71647 - RNA, 32 nt, Human
auguguaucuuuucuucagauaccagauuuga

SEQ ID NO: 71648 - RNA, 32 nt, Human
auguguaugaugcaacagagcugaagaauggg

SEQ ID NO: 71649 - RNA, 32 nt, Human
auguguauggcggugaggcgggcggguacaug

SEQ ID NO: 71650 - RNA, 32 nt, Human
auguguaugguaucauguaucucucuguggug

SEQ ID NO: 71651 - RNA, 32 nt, Human
augugucaaauacaaaaaugguaacuagguug

SEQ ID NO: 71652 - RNA, 32 nt, Human
augugucaacugccugucagccuggauucaau

SEQ ID NO: 71653 - RNA, 32 nt, Human
augugucaauuuaaccaaauucacaaauaacc

SEQ ID NO: 71654 - RNA, 32 nt, Human
augugucacuugugcuuugcucuugucccacg

SEQ ID NO: 71655 - RNA, 32 nt, Human
augugucagagaagucugaggcucccuguguu

SEQ ID NO: 71656 - RNA, 32 nt, Human
augugucagccaugccucuguggggagucugc

SEQ ID NO: 71657 - RNA, 32 nt, Human
augugucaugaaugaggaggugugugagcagg

SEQ ID NO: 71658 - RNA, 32 nt, Human
auguguccaaugcugccuucccaugaaucugu

SEQ ID NO: 71659 - RNA, 32 nt, Human
auguguccacaaaccuguccaggaguuguguc

SEQ ID NO: 71660 - RNA, 32 nt, Human
auguguccacaggaaaugaccccacaucccuu

SEQ ID NO: 71661 - RNA, 32 nt, Human
auguguccacucaacccagcugcccaggacgg

SEQ ID NO: 71662 - RNA, 32 nt, Human
auguguccagggacacagaauguugguuucua

SEQ ID NO: 71663 - RNA, 32 nt, Human
augugucccaggacagcuuugaauguggccca

SEQ ID NO: 71664 - RNA, 32 nt, Human
auguguccucaccgggguaucggccgucacuc

SEQ ID NO: 71665 - RNA, 32 nt, Human
auguguccuccccuccccucccuuccucuccu

SEQ ID NO: 71666 - RNA, 32 nt, Human
augugucgugucugcuuacauuuccuucuccc

SEQ ID NO: 71667 - RNA, 32 nt, Human
augugucuauggugcggcaucuugcuguugua

SEQ ID NO: 71668 - RNA, 32 nt, Human
augugucuauggugcugcaucuugcuguugua

SEQ ID NO: 71669 - RNA, 32 nt, Human
augugucucacaguuugaaauaagcuauuuga

SEQ ID NO: 71670 - RNA, 32 nt, Human
augugucucacccuaccguucgucucaccaau

SEQ ID NO: 71671 - RNA, 32 nt, Human
augugucuccucccacccucuuccuaaugguc

SEQ ID NO: 71672 - RNA, 32 nt, Human
augugucugaaccugaagaccucucuccuaaa

SEQ ID NO: 71673 - RNA, 32 nt, Human
augugucugcgccgaagguggaggccgaagug

SEQ ID NO: 71674 - RNA, 32 nt, Human
augugucuggcuuaaaaggccauguucuuucc

SEQ ID NO: 71675 - RNA, 32 nt, Human
augugucuguuaccaagcaaagccaguuaaag

SEQ ID NO: 71676 - RNA, 32 nt, Human
augugucuugcagauugcaagauauuuuacca

SEQ ID NO: 71677 - RNA, 32 nt, Human
augugucuuguuggggaggugacuugcauggu

SEQ ID NO: 71678 - RNA, 32 nt, Human
augugugaagcugggcagucugugguguggag

SEQ ID NO: 71679 - RNA, 32 nt, Human
augugugacugagaagcagccuggguguguaa

SEQ ID NO: 71680 - RNA, 32 nt, Human
augugugacuugaaacaaaaaugaguaucuug

SEQ ID NO: 71681 - RNA, 32 nt, Human
augugugagaagccguuucauuuuauuucuca

SEQ ID NO: 71682 - RNA, 32 nt, Human
augugugaggagcugcuggcuugcagugcgcg

SEQ ID NO: 71683 - RNA, 32 nt, Human
augugugaguuucuuuguaauaaaauguauca

SEQ ID NO: 71684 - RNA, 32 nt, Human
augugugauggccagaauaaaagccaaaaucu

SEQ ID NO: 71685 - RNA, 32 nt, Human
augugugcaccugcuuuuccugccuggaaugu

SEQ ID NO: 71686 - RNA, 32 nt, Human
augugugcagagugagaccucuggccugccau

SEQ ID NO: 71687 - RNA, 32 nt, Human
augugugcagcaccuggcucaaagaccacaca

SEQ ID NO: 71688 - RNA, 32 nt, Human
augugugccaagggaguauuuucacaaaguuc

SEQ ID NO: 71689 - RNA, 32 nt, Human
augugugccugggagaggcucugucuccuucc

SEQ ID NO: 71690 - RNA, 32 nt, Human
augugugccugggaucuccuugccccagccug

SEQ ID NO: 71691 - RNA, 32 nt, Human
augugugccuguagauacaucaucaagcccuu

SEQ ID NO: 71692 - RNA, 32 nt, Human
augugugcgugugcacacacacuuaaacacgu

SEQ ID NO: 71693 - RNA, 32 nt, Human
augugugcucgugccacacauacacauccugg

SEQ ID NO: 71694 - RNA, 32 nt, Human
augugugcuguguguguccugccuguauaugu

SEQ ID NO: 71695 - RNA, 32 nt, Human
auguguggacauccacacacagcgcugguugu

SEQ ID NO: 71696 - RNA, 32 nt, Human
auguguggcuacggcaucuguacagcaccgac

SEQ ID NO: 71697 - RNA, 32 nt, Human
auguguggcugcagacguguccacaugggccu

SEQ ID NO: 71698 - RNA, 32 nt, Human
auguguggcugcaggucgcgaagcugcuuaau

SEQ ID NO: 71699 - RNA, 32 nt, Human
augugugggcaacaaggguccugcugagcuca

SEQ ID NO: 71700 - RNA, 32 nt, Human
augugugggcugaguuuucaacugaaugauua

SEQ ID NO: 71701 - RNA, 32 nt, Human
augugugggggcagagguuaugugggaaaucu

SEQ ID NO: 71702 - RNA, 32 nt, Human
augugugguggaggccgagggccggagagugg

SEQ ID NO: 71703 - RNA, 32 nt, Human
auguguggugugugccguaugcaugggcagau

SEQ ID NO: 71704 - RNA, 32 nt, Human
augugugguguucuucuggagguugucucuuu

SEQ ID NO: 71705 - RNA, 32 nt, Human
auguguguauagaaagucuguauuccaauguu

SEQ ID NO: 71706 - RNA, 32 nt, Human
auguguguauaguacaucuguugguuauguac

SEQ ID NO: 71707 - RNA, 23 nt, Human
auguguguauauauguguauaua

SEQ ID NO: 71708 - RNA, 32 nt, Human
auguguguauaugugucauauguauguacaug

SEQ ID NO: 71709 - RNA, 21 nt, Human
auguguguauguauacaugua

SEQ ID NO: 71710 - RNA, 23 nt, Human
auguguguauuguagaaguuuua

SEQ ID NO: 71711 - RNA, 32 nt, Human
augugugucagggggagacuugcugguggguu

SEQ ID NO: 71712 - RNA, 32 nt, Human
augugugucauuuagaaguggaagcuauuagc

SEQ ID NO: 71713 - RNA, 32 nt, Human
augugugucugugucuucuccuuaaacacucg

SEQ ID NO: 71714 - RNA, 32 nt, Human
augugugugggggugugucuguggccagucau

SEQ ID NO: 71715 - RNA, 32 nt, Human
auguguguggugugugcguguuuugcugcaua

SEQ ID NO: 71716 - RNA, 29 nt, Human
auguguguggugugugugcuugguuuagg

SEQ ID NO: 71717 - RNA, 32 nt, Human
augugugugucuuuuuccuccuuucuuuuggg

SEQ ID NO: 71718 - RNA, 32 nt, Human
augugugugugauggagggaaggggacagauu

SEQ ID NO: 71719 - RNA, 32 nt, Human
augugugugugcacacacacagaaaccacgag

SEQ ID NO: 71720 - RNA, 32 nt, Human
auguguguucuaaaggaggacaugagcugugu

SEQ ID NO: 71721 - RNA, 32 nt, Human
auguguguucuccucucuccccacccccgcca

SEQ ID NO: 71722 - RNA, 32 nt, Human
auguguguugugagccaggacgcaacuugccg

SEQ ID NO: 71723 - RNA, 32 nt, Human
auguguguuucaggcuuauuugggagaacuaa

SEQ ID NO: 71724 - RNA, 32 nt, Human
auguguuaaauuuguaacuccucuuugggguc

SEQ ID NO: 71725 - RNA, 32 nt, Human
auguguuaagcauaggagauuugucagugaaa

SEQ ID NO: 71726 - RNA, 32 nt, Human
auguguuacaagcauggguucuugccgugugu

SEQ ID NO: 71727 - RNA, 32 nt, Human
auguguuagcugcagccuuuugaaacacgcaa

SEQ ID NO: 71728 - RNA, 32 nt, Human
auguguuauaagcuaggagaaucccuuuggac

SEQ ID NO: 71729 - RNA, 28 nt, Human
auguguuauacacaaucuuaaaauuuca

SEQ ID NO: 71730 - RNA, 24 nt, Human
auguguuauaucuguaguauucua

SEQ ID NO: 71731 - RNA, 32 nt, Human
auguguucaggcacagagcaaagggcugagag

SEQ ID NO: 71732 - RNA, 32 nt, Human
auguguucauguggacacacacagacacacac

SEQ ID NO: 71733 - RNA, 32 nt, Human
auguguuccacucagaaaugagaguguauuag

SEQ ID NO: 71734 - RNA, 24 nt, Human
auguguucuauuccggauguucua

SEQ ID NO: 71735 - RNA, 32 nt, Human
auguguucuggugugucuuaaaauuccaaaca

SEQ ID NO: 71736 - RNA, 32 nt, Human
auguguugaagaugaaauuggcaucaguguag

SEQ ID NO: 71737 - RNA, 23 nt, Human
auguguugauuugagaaauuuua

SEQ ID NO: 71738 - RNA, 32 nt, Human
auguguuggaacgggauuuacacacacuggag

SEQ ID NO: 71739 - RNA, 32 nt, Human
auguguugggauuacaggcgugaaccaccgcg

SEQ ID NO: 71740 - RNA, 32 nt, Human
auguguugugggaaggacccugugggagguca

SEQ ID NO: 71741 - RNA, 32 nt, Human
auguguugugggagggaggcagugggaaguag

SEQ ID NO: 71742 - RNA, 32 nt, Human
auguguuuauucauccagcaguguugcucagc

SEQ ID NO: 71743 - RNA, 24 nt, Human
auguguuucaaacauuucuggaca

SEQ ID NO: 71744 - RNA, 22 nt, Human
auguguuucaggaucuucgggc

SEQ ID NO: 71745 - RNA, 32 nt, Human
auguguuuccagaucugcuuauuguuuggguu

SEQ ID NO: 71746 - RNA, 22 nt, Human
auguguuuccuauuaaaagcca

SEQ ID NO: 71747 - RNA, 32 nt, Human
auguguuucugcuccccucccacccaagaugc

SEQ ID NO: 71748 - RNA, 23 nt, Human
auguguuugaucucaggagucca

SEQ ID NO: 71749 - RNA, 32 nt, Human
auguguuugcaaacacuugucuugaagauuau

SEQ ID NO: 71750 - RNA, 32 nt, Human
auguguuugggggacuuugccugcugcacagg

SEQ ID NO: 71751 - RNA, 24 nt, Human
auguguuuguaugcauucuggaca

SEQ ID NO: 71752 - RNA, 32 nt, Human
auguguuuguguuuguagacaaaaggcaaagg

SEQ ID NO: 71753 - RNA, 32 nt, Human
auguguuuuccaaauauagauaugaaauaucu

SEQ ID NO: 71754 - RNA, 32 nt, Human
auguguuuuccuagucccauccaggcuuccca

SEQ ID NO: 71755 - RNA, 32 nt, Human
auguguuuuguuguuuugggaauuuuuaucaa

SEQ ID NO: 71756 - RNA, 32 nt, Human
auguuaaaaguggggucucugaugccuuugcc

SEQ ID NO: 71757 - RNA, 32 nt, Human
auguuaaacauuuuagauaacugugaagauag

SEQ ID NO: 71758 - RNA, 21 nt, Human
auguuaaacuauaacaagcac

SEQ ID NO: 71759 - RNA, 32 nt, Human
auguuaaacuauuaccacacagcccauaaaac

SEQ ID NO: 71760 - RNA, 23 nt, Human
auguuaaacugcauaacaggcac

SEQ ID NO: 71761 - RNA, 32 nt, Human
auguuaaacuucaucagcgucagaccuauugu

SEQ ID NO: 71762 - RNA, 32 nt, Human
auguuaaauuggcuugaaauuuucagagaauu

SEQ ID NO: 71763 - RNA, 32 nt, Human
auguuaacacuguggaaauaaauaugaagaug

SEQ ID NO: 71764 - RNA, 32 nt, Human
auguuaaccccuggcaucuaucuagugagcag

SEQ ID NO: 71765 - RNA, 32 nt, Human
auguuaaccuugugguucgaaaucaacaaagc

SEQ ID NO: 71766 - RNA, 32 nt, Human
auguuaacugcacuuuucauuacgugaaugga

SEQ ID NO: 71767 - RNA, 32 nt, Human
auguuaagagaagggaguguguccugaagaag

SEQ ID NO: 71768 - RNA, 32 nt, Human
auguuaagauaaugcggguaacagacaauaua

SEQ ID NO: 71769 - RNA, 32 nt, Human
auguuaagcccuucugaaaaaguauccugcuu

SEQ ID NO: 71770 - RNA, 32 nt, Human
auguuaaggauguauuuauuccccuacccuga

SEQ ID NO: 71771 - RNA, 32 nt, Human
auguuaaucaugauuacuuuaagcccacaucc

SEQ ID NO: 71772 - RNA, 32 nt, Human
auguuaauccuuuaacacuaagguaacaugac

SEQ ID NO: 71773 - RNA, 32 nt, Human
auguuaaugauggaauaauguuccaucaugca

SEQ ID NO: 71774 - RNA, 32 nt, Human
auguuaauggcagaagagaaaacaauaaauca

SEQ ID NO: 71775 - RNA, 32 nt, Human
auguuaauggggacccuccaaaggaagggguu

SEQ ID NO: 71776 - RNA, 32 nt, Human
auguuaauuauuuugacaaauauuucauauau

SEQ ID NO: 71777 - RNA, 32 nt, Human
auguuaauugucuuuguuucucccucugguaa

SEQ ID NO: 71778 - RNA, 32 nt, Human
auguuaauuucucagcccccaaagaagcaucu

SEQ ID NO: 71779 - RNA, 32 nt, Human
auguuaauuuguagcuuugccccagccacuuu

SEQ ID NO: 71780 - RNA, 32 nt, Human
auguuacaaauacaggaagugcaggacugugc

SEQ ID NO: 71781 - RNA, 26 nt, Human
auguuacaacuacuuugagguggcca

SEQ ID NO: 71782 - RNA, 32 nt, Human
auguuacacaugcuuccacuccacaguaccua

SEQ ID NO: 71783 - RNA, 32 nt, Human
auguuacacuggcugguguugaacuccuaacc

SEQ ID NO: 71784 - RNA, 32 nt, Human
auguuacagccaggaacauauuccucagucag

SEQ ID NO: 71785 - RNA, 32 nt, Human
auguuacagggccuggugguguuccaguucaa

SEQ ID NO: 71786 - RNA, 32 nt, Human
auguuacaguaauccacugagauguaguuuag

SEQ ID NO: 71787 - RNA, 32 nt, Human
auguuacauauaaaacaaacaaaaagacuccg

SEQ ID NO: 71788 - RNA, 32 nt, Human
auguuacauucaaagcucuuguuuucaucaca

SEQ ID NO: 71789 - RNA, 32 nt, Human
auguuaccaaagaugaguuugagguuucaagc

SEQ ID NO: 71790 - RNA, 32 nt, Human
auguuaccaguggaugcaggcuucagugacca

SEQ ID NO: 71791 - RNA, 25 nt, Human
auguuacccaggcuggagugcagug

SEQ ID NO: 71792 - RNA, 32 nt, Human
auguuaccuuuucugauuuacacuucuguuuu

SEQ ID NO: 71793 - RNA, 32 nt, Human
auguuacucugaguuauuaauguggauuuuaa

SEQ ID NO: 71794 - RNA, 27 nt, Human
auguuacucuuuucuuucaucaauccc

SEQ ID NO: 71795 - RNA, 32 nt, Human
auguuacugcugauuuucuuuuccaaggugua

SEQ ID NO: 71796 - RNA, 32 nt, Human
auguuacuguauugcaaaaucuguuaagagca

SEQ ID NO: 71797 - RNA, 32 nt, Human
auguuacuucuagugcuaaacauggcauauuu

SEQ ID NO: 71798 - RNA, 32 nt, Human
auguuacuuucuccagcaacccugcacugggg

SEQ ID NO: 71799 - RNA, 32 nt, Human
auguuagaauuuauguucaccuuuauuacaau

SEQ ID NO: 71800 - RNA, 20 nt, Human
auguuagagaaacagagcac

SEQ ID NO: 71801 - RNA, 32 nt, Human
auguuagagagguagcgagcugcucugcuaua

SEQ ID NO: 71802 - RNA, 32 nt, Human
auguuagcaaaccuguuccauggacacuaaau

SEQ ID NO: 71803 - RNA, 32 nt, Human
auguuagcagauagccagcccauacaagaucg

SEQ ID NO: 71804 - RNA, 32 nt, Human
auguuagccauccugaaguagccgaacaguag

SEQ ID NO: 71805 - RNA, 32 nt, Human
auguuagccucugcuuucccuuccuguccuga

SEQ ID NO: 71806 - RNA, 32 nt, Human
auguuagcuguggucuugaaacuguccagcug

SEQ ID NO: 71807 - RNA, 32 nt, Human
auguuagcuuccggcuccccucccaggcugca

SEQ ID NO: 71808 - RNA, 32 nt, Human
auguuagcuuccuccuauugguacaguagaaa

SEQ ID NO: 71809 - RNA, 24 nt, Human
auguuagguagcuuacauuuucuc

SEQ ID NO: 71810 - RNA, 19 nt, Human
auguuaguauguacauaua

SEQ ID NO: 71811 - RNA, 32 nt, Human
auguuaguauuuucacugcuguguccccagcg

SEQ ID NO: 71812 - RNA, 32 nt, Human
auguuagucaccaagggaaggugguggaaugu

SEQ ID NO: 71813 - RNA, 32 nt, Human
auguuagucaggcuggucuccaccucagguga

SEQ ID NO: 71814 - RNA, 32 nt, Human
auguuagugaugugagaacaaggagcaggggu

SEQ ID NO: 71815 - RNA, 32 nt, Human
auguuaguucaauacugaaagaaaaauauuau

SEQ ID NO: 71816 - RNA, 32 nt, Human
auguuaguucucuucaagacugugcauggcuu

SEQ ID NO: 71817 - RNA, 32 nt, Human
auguuaguugacuguacuguaauguuguauca

SEQ ID NO: 71818 - RNA, 32 nt, Human
auguuauaaccuggucccuugugaacuuuuga

SEQ ID NO: 71819 - RNA, 32 nt, Human
auguuauauaaugcucacagguccuucuagca

SEQ ID NO: 71820 - RNA, 32 nt, Human
auguuaucagucucucuuuccacaguacaaac

SEQ ID NO: 71821 - RNA, 32 nt, Human
auguuaugaaaaucuuauuuaaaagagaaagc

SEQ ID NO: 71822 - RNA, 30 nt, Human
auguuaugaaauggccucccaccuucagcg

SEQ ID NO: 71823 - RNA, 32 nt, Human
auguuaugaauacauuucuacuuuauuuugaa

SEQ ID NO: 71824 - RNA, 30 nt, Human
auguuaugacaugucagccaggaccuggug

SEQ ID NO: 71825 - RNA, 32 nt, Human
auguuaugcauaaagucagugcccaacuguua

SEQ ID NO: 71826 - RNA, 32 nt, Human
auguuaugcuuugguugcuugguuggucuuuu

SEQ ID NO: 71827 - RNA, 32 nt, Human
auguuauguacaguacacucugaaaagaaauc

SEQ ID NO: 71828 - RNA, 32 nt, Human
auguuauguggaagaagugugggaaugauggg

SEQ ID NO: 71829 - RNA, 32 nt, Human
auguuauguuauuagauauuaacucuauuuaa

SEQ ID NO: 71830 - RNA, 32 nt, Human
auguuauguuuccugaauuguaguaugugacu

SEQ ID NO: 71831 - RNA, 32 nt, Human
auguuauuaugcuauagcuucuauuucuguuu

SEQ ID NO: 71832 - RNA, 32 nt, Human
auguuauuccuaucaaaccaccaaugacauuc

SEQ ID NO: 71833 - RNA, 32 nt, Human
auguuauuugugauuaagcauuagcguguaua

SEQ ID NO: 71834 - RNA, 32 nt, Human
auguucaaaacacacaguacagacagcaugga

SEQ ID NO: 71835 - RNA, 32 nt, Human
auguucaaaugauguagauugucuuagaauga

SEQ ID NO: 71836 - RNA, 32 nt, Human
auguucaaguaggcugcuuaaaagaaguugac

SEQ ID NO: 71837 - RNA, 32 nt, Human
auguucaauggagcggcacacagucuagaccc

SEQ ID NO: 71838 - RNA, 32 nt, Human
auguucacaccgcugcacucaagcuuggguga

SEQ ID NO: 71839 - RNA, 32 nt, Human
auguucacucacuguacacucaucucuggaaa

SEQ ID NO: 71840 - RNA, 22 nt, Human
auguucacucuggcaucuuuua

SEQ ID NO: 71841 - RNA, 32 nt, Human
auguucacuuggucaaggaggggucuaggagc

SEQ ID NO: 71842 - RNA, 32 nt, Human
auguucagaauggauuuaucagaaauuauacu

SEQ ID NO: 71843 - RNA, 32 nt, Human
auguucagccuaugaugaaguauuugauuauu

SEQ ID NO: 71844 - RNA, 32 nt, Human
auguucagcugguauuuuccauuuuuaaauua

SEQ ID NO: 71845 - RNA, 32 nt, Human
auguucaggaagcacagggauggaaaccucuu

SEQ ID NO: 71846 - RNA, 32 nt, Human
auguucagggaugcucauuccaugacucugcc

SEQ ID NO: 71847 - RNA, 32 nt, Human
auguucagguagcagugagcauuguucauaug

SEQ ID NO: 71848 - RNA, 32 nt, Human
auguucaguaaagaugagcgugugugaguuaa

SEQ ID NO: 71849 - RNA, 32 nt, Human
auguucagucucucaagauuuggcauuaguca

SEQ ID NO: 71850 - RNA, 32 nt, Human
auguucaucaauaccugcugagaguacugucc

SEQ ID NO: 71851 - RNA, 32 nt, Human
auguucaugacacugcacuccagccuggguga

SEQ ID NO: 71852 - RNA, 32 nt, Human
auguucauuaacaaacuucuuuaucacaugua

SEQ ID NO: 71853 - RNA, 22 nt, Human
auguucauugacuggcuuuuua

SEQ ID NO: 71854 - RNA, 32 nt, Human
auguuccaaaauuguguaaaacuccuagaaau

SEQ ID NO: 71855 - RNA, 24 nt, Human
auguuccaauuaugcaucacuucc

SEQ ID NO: 71856 - RNA, 32 nt, Human
auguuccaggcagaggaaaaggcauaugcaaa

SEQ ID NO: 71857 - RNA, 32 nt, Human
auguuccauaugggagccccaaaggaacugga

SEQ ID NO: 71858 - RNA, 32 nt, Human
auguuccaucauguuccaugcugcugcugacg

SEQ ID NO: 71859 - RNA, 32 nt, Human
auguuccauuggacaaagcaaaucacauggcc

SEQ ID NO: 71860 - RNA, 32 nt, Human
auguucccaaacuuagcaacagcggcaaacua

SEQ ID NO: 71861 - RNA, 32 nt, Human
auguucccaguuccaacaagccaaauaccaga

SEQ ID NO: 71862 - RNA, 32 nt, Human
auguucccccaaaucuccucugccaaccagag

SEQ ID NO: 71863 - RNA, 32 nt, Human
auguuccccuccauguccauguguucucauug

SEQ ID NO: 71864 - RNA, 32 nt, Human
auguucccgcauucaccugcuuuugcaguaau

SEQ ID NO: 71865 - RNA, 32 nt, Human
auguucccuucagaccagcagagugaagacag

SEQ ID NO: 71866 - RNA, 32 nt, Human
auguuccuccccauauuccuggacuucggaga

SEQ ID NO: 71867 - RNA, 32 nt, Human
auguuccuccccucaucugcccggguucagua

SEQ ID NO: 71868 - RNA, 32 nt, Human
auguuccuccuccucucuccccacuugaacca

SEQ ID NO: 71869 - RNA, 32 nt, Human
auguuccugcuguauuuccugcuucccuguug

SEQ ID NO: 71870 - RNA, 16 nt, Human
auguuccuggacaguu

SEQ ID NO: 71871 - RNA, 32 nt, Human
auguuccuggagaagaggagccagccaggucu

SEQ ID NO: 71872 - RNA, 32 nt, Human
auguuccuggagaugaaaaaugagaaggaaaa

SEQ ID NO: 71873 - RNA, 32 nt, Human
auguuccugucucuccccucccccaccuuggc

SEQ ID NO: 71874 - RNA, 32 nt, Human
auguuccuguucaucuccuccuuucucccaaa

SEQ ID NO: 71875 - RNA, 32 nt, Human
auguuccuuuagaggaagguguuuuccagugu

SEQ ID NO: 71876 - RNA, 32 nt, Human
auguuccuuuccagucugguucacgauguuua

SEQ ID NO: 71877 - RNA, 32 nt, Human
auguucgaaggcagcaauacuaugaugcuggu

SEQ ID NO: 71878 - RNA, 29 nt, Human
auguucgugcugugucugccuggacaguu

SEQ ID NO: 71879 - RNA, 32 nt, Human
auguucuacagauggaaaggggugcuugguua

SEQ ID NO: 71880 - RNA, 32 nt, Human
auguucuaccucugcacucacuguccaguaca

SEQ ID NO: 71881 - RNA, 32 nt, Human
auguucuacuccuagacuagugcuuuaccuuu

SEQ ID NO: 71882 - RNA, 32 nt, Human
auguucuagcccuucagggucuucaagggaga

SEQ ID NO: 71883 - RNA, 32 nt, Human
auguucuaucgguuuuuaagggacuugagaau

SEQ ID NO: 71884 - RNA, 32 nt, Human
auguucucacagaacagaaccccacagcugga

SEQ ID NO: 71885 - RNA, 32 nt, Human
auguucuccacuucuaaguaaagacagugggc

SEQ ID NO: 71886 - RNA, 32 nt, Human
auguucucccagcuguuccaagacugggccgu

SEQ ID NO: 71887 - RNA, 32 nt, Human
auguucucuccucuguacuggaaaggcugugg

SEQ ID NO: 71888 - RNA, 32 nt, Human
auguucugaaggcuccagggccacuuuguuug

SEQ ID NO: 71889 - RNA, 32 nt, Human
auguucugaggccuccccagccauguggaacu

SEQ ID NO: 71890 - RNA, 32 nt, Human
auguucugagugaacccacagcagucgcagaa

SEQ ID NO: 71891 - RNA, 32 nt, Human
auguucugcagauccccacaugggaggagauu

SEQ ID NO: 71892 - RNA, 32 nt, Human
auguucugcauugagccuaguuuugccauugu

SEQ ID NO: 71893 - RNA, 32 nt, Human
auguucugcuggaagccagaggcccuucaagc

SEQ ID NO: 71894 - RNA, 32 nt, Human
auguucugcuuggcucaucuugcccagagaag

SEQ ID NO: 71895 - RNA, 32 nt, Human
auguucugcuuuccuccacugugccuucgcuc

SEQ ID NO: 71896 - RNA, 32 nt, Human
auguucuggaugaaaagagcaggaguaacaau

SEQ ID NO: 71897 - RNA, 32 nt, Human
auguucuggccacuggggaugacacagguggu

SEQ ID NO: 71898 - RNA, 32 nt, Human
auguucugggcaacaucauaccucccuuauuc

SEQ ID NO: 71899 - RNA, 32 nt, Human
auguucugggugggggacagagccagauucag

SEQ ID NO: 71900 - RNA, 31 nt, Human
auguucuguaaaauuagucuguugaaaaugu

SEQ ID NO: 71901 - RNA, 32 nt, Human
auguucugucaacaagauguuugguaauuuuu

SEQ ID NO: 71902 - RNA, 32 nt, Human
auguucuguguugcagaccagagucuguuuau

SEQ ID NO: 71903 - RNA, 32 nt, Human
auguucuuauuaaccuccuuuuuauacuaagg

SEQ ID NO: 71904 - RNA, 32 nt, Human
auguucuucaaucuuauuacuaauccaugcaa

SEQ ID NO: 71905 - RNA, 32 nt, Human
auguucuucacucuuucauccagcaagugcuu

SEQ ID NO: 71906 - RNA, 32 nt, Human
auguucuucucccuguguccauguguucucau

SEQ ID NO: 71907 - RNA, 32 nt, Human
auguucuuguaucugcugcugccuguguuuuu

SEQ ID NO: 71908 - RNA, 32 nt, Human
auguucuuuccacuucauguuacugccaccaa

SEQ ID NO: 71909 - RNA, 32 nt, Human
auguucuuucuuucuccauccacuggcugaau

SEQ ID NO: 71910 - RNA, 32 nt, Human
auguucuuugcauuuuauuuuugagguuucug

SEQ ID NO: 71911 - RNA, 32 nt, Human
auguucuuuugccucccauagccucuugcuuu

SEQ ID NO: 71912 - RNA, 32 nt, Human
auguugaaaacuaauccccaaugugauuguau

SEQ ID NO: 71913 - RNA, 32 nt, Human
auguugaaaccuaauccccaaugugaugguau

SEQ ID NO: 71914 - RNA, 32 nt, Human
auguugaagcuacaguuauuuuaugauagcac

SEQ ID NO: 71915 - RNA, 32 nt, Human
auguugaaguaguggccuggaguggccuuucc

SEQ ID NO: 71916 - RNA, 32 nt, Human
auguugacccucucucagaaggucaguccagc

SEQ ID NO: 71917 - RNA, 32 nt, Human
auguugacuggaagccacccacaaacacacac

SEQ ID NO: 71918 - RNA, 32 nt, Human
auguugagaaagacaaagaaagacugaggagc

SEQ ID NO: 71919 - RNA, 32 nt, Human
auguugagccauugcuaucaugcauuccuguc

SEQ ID NO: 71920 - RNA, 32 nt, Human
auguugaguguuguuuccuucaauguuucugc

SEQ ID NO: 71921 - RNA, 32 nt, Human
auguugaugcugcuguucauggcacuacaaag

SEQ ID NO: 71922 - RNA, 32 nt, Human
auguugauguguguuucucucuacccucggcu

SEQ ID NO: 71923 - RNA, 32 nt, Human
auguugauuacaucagcgucuccuugggacac

SEQ ID NO: 71924 - RNA, 32 nt, Human
auguugcaaaggcucuugggcauuuuaaacaa

SEQ ID NO: 71925 - RNA, 32 nt, Human
auguugcaggacaccaaaaggaagaaaacaau

SEQ ID NO: 71926 - RNA, 32 nt, Human
auguugcauaguuaccagggaagauuagucca

SEQ ID NO: 71927 - RNA, 32 nt, Human
auguugccaauaucuugacaccugccaaagcu

SEQ ID NO: 71928 - RNA, 28 nt, Human
auguugcccaagcuggaguacaguagug

SEQ ID NO: 71929 - RNA, 25 nt, Human
auguugcccagacuagagugcagug

SEQ ID NO: 71930 - RNA, 25 nt, Human
auguugcccagacuggagugcagug

SEQ ID NO: 71931 - RNA, 25 nt, Human
auguugcccaggcuagagugcagug

SEQ ID NO: 71932 - RNA, 32 nt, Human
auguugcccaggcuagagugcaguggcacaau

SEQ ID NO: 71933 - RNA, 32 nt, Human
auguugcccaggcuagagugcaguggcuauuc

SEQ ID NO: 71934 - RNA, 25 nt, Human
auguugcccaggcuggaaugcagug

SEQ ID NO: 71935 - RNA, 25 nt, Human
auguugcccaggcuggaguacauug

SEQ ID NO: 71936 - RNA, 23 nt, Human
auguugcccaggcuggagugcaa

SEQ ID NO: 71937 - RNA, 28 nt, Human
auguugcccaggcuggagugcaacggug

SEQ ID NO: 71938 - RNA, 25 nt, Human
auguugcccaggcuggagugcaaug

SEQ ID NO: 71939 - RNA, 23 nt, Human
auguugcccaggcuggagugcag

SEQ ID NO: 71940 - RNA, 24 nt, Human
auguugcccaggcuggagugcagu

SEQ ID NO: 71941 - RNA, 25 nt, Human
auguugcccaggcuggagugcagug

SEQ ID NO: 71942 - RNA, 32 nt, Human
auguugcccaggcuggagugcaguggcgugau

SEQ ID NO: 71943 - RNA, 32 nt, Human
auguugcccaggcuggagugcaguggugcgau

SEQ ID NO: 71944 - RNA, 32 nt, Human
auguugcccaggcuggucuccuggcuucaagc

SEQ ID NO: 71945 - RNA, 32 nt, Human
auguugcccaggcuggucucuuaacuccuagg

SEQ ID NO: 71946 - RNA, 32 nt, Human
auguugcccaggcuggucugaagcugcugggc

SEQ ID NO: 71947 - RNA, 32 nt, Human
auguugcccaggcuggucuuuaauuccugggc

SEQ ID NO: 71948 - RNA, 32 nt, Human
auguugcccaggcuggugucaaacuccugggc

SEQ ID NO: 71949 - RNA, 32 nt, Human
auguugcccaggcuggugucgaacuccugggc

SEQ ID NO: 71950 - RNA, 32 nt, Human
auguugcccgggcuggucuagaacuccugggu

SEQ ID NO: 71951 - RNA, 32 nt, Human
auguugcccgggcuggucucaaacuccugggu

SEQ ID NO: 71952 - RNA, 32 nt, Human
auguugcccgggcuggucucaaacuuguggcu

SEQ ID NO: 71953 - RNA, 32 nt, Human
auguugcccgggcuggucucgaacuccugacc

SEQ ID NO: 71954 - RNA, 32 nt, Human
auguugccuaggcugaccuugagcucuugggc

SEQ ID NO: 71955 - RNA, 32 nt, Human
auguugccuaggcuggucuugagcuccugagc

SEQ ID NO: 71956 - RNA, 32 nt, Human
auguugccucaccagcccugaggcuccgcccc

SEQ ID NO: 71957 - RNA, 32 nt, Human
auguugccuucagaauuugugugaagguacaa

SEQ ID NO: 71958 - RNA, 32 nt, Human
auguugccuucauccuagcugcuggggaagcg

SEQ ID NO: 71959 - RNA, 32 nt, Human
auguugcgcugccggagguugagggaagcuuu

SEQ ID NO: 71960 - RNA, 32 nt, Human
auguugcuaugauuggaacaagguucccccuc

SEQ ID NO: 71961 - RNA, 32 nt, Human
auguugcugcagagacugaaugacaugcaaca

SEQ ID NO: 71962 - RNA, 32 nt, Human
auguugcugccucucugugcuuuuggccucug

SEQ ID NO: 71963 - RNA, 32 nt, Human
auguugcuguaaccaguggcccaggggauguu

SEQ ID NO: 71964 - RNA, 32 nt, Human
auguugcuuccagacauacuucucugcaacuu

SEQ ID NO: 71965 - RNA, 32 nt, Human
auguugcuugcacuccagccugggugacagag

SEQ ID NO: 71966 - RNA, 32 nt, Human
auguuggacacacugcucuaccaguccuucgu

SEQ ID NO: 71967 - RNA, 32 nt, Human
auguuggagacucuaaggauaaggcuggugcu

SEQ ID NO: 71968 - RNA, 24 nt, Human
auguuggauucuguacuuaaaagg

SEQ ID NO: 71969 - RNA, 32 nt, Human
auguuggcacuguguucacacgcauggucccc

SEQ ID NO: 71970 - RNA, 32 nt, Human
auguuggccaacauucaauuugaacagagcau

SEQ ID NO: 71971 - RNA, 32 nt, Human
auguuggccaggaguucaaaaccagccugacc

SEQ ID NO: 71972 - RNA, 32 nt, Human
auguuggccaggcugguguugaacuccugacc

SEQ ID NO: 71973 - RNA, 32 nt, Human
auguuggccaggcugguguugaacucuugacc

SEQ ID NO: 71974 - RNA, 32 nt, Human
auguuggcuaggcuggucucaaacucuugacc

SEQ ID NO: 71975 - RNA, 32 nt, Human
auguuggcucacaccuguauucccaguacuuu

SEQ ID NO: 71976 - RNA, 32 nt, Human
auguuggcucacugcaaccuccaacucccugg

SEQ ID NO: 71977 - RNA, 32 nt, Human
auguuggcucagaaucaaccucuuuaaauauu

SEQ ID NO: 71978 - RNA, 22 nt, Human
auguuggcucccgccuguaauc

SEQ ID NO: 71979 - RNA, 32 nt, Human
auguugggagaaaggcggcuucuggaaccuuc

SEQ ID NO: 71980 - RNA, 32 nt, Human
auguugggagagagcuggggcagagcggggag

SEQ ID NO: 71981 - RNA, 32 nt, Human
auguugggagcacagcucuauucugccugcuc

SEQ ID NO: 71982 - RNA, 32 nt, Human
auguugggauggaaaaugcuaaucaacuaccc

SEQ ID NO: 71983 - RNA, 32 nt, Human
auguugggcaaaaauaaguaacccaaugguag

SEQ ID NO: 71984 - RNA, 32 nt, Human
auguugggcuuccucucucaggagcagggcuu

SEQ ID NO: 71985 - RNA, 32 nt, Human
auguuggggaggaagagaggagauggauuuca

SEQ ID NO: 71986 - RNA, 32 nt, Human
auguugggugaaacugggaacaacuacucaga

SEQ ID NO: 71987 - RNA, 32 nt, Human
auguuggguuagaaucagcucuuucaaacuug

SEQ ID NO: 71988 - RNA, 32 nt, Human
auguuggucaggcugguguugaacuccugacc

SEQ ID NO: 71989 - RNA, 32 nt, Human
auguuggucucaaacuccugaccucagguaau

SEQ ID NO: 71990 - RNA, 32 nt, Human
auguuggucucgaacuccugaccucaugaucu

SEQ ID NO: 71991 - RNA, 32 nt, Human
auguuggugcugccuccgccccgugggccuag

SEQ ID NO: 71992 - RNA, 32 nt, Human
auguugguuauuuuacuguucuugccuaucua

SEQ ID NO: 71993 - RNA, 32 nt, Human
auguugguuugauacuguuaacacaccaaaaa

SEQ ID NO: 71994 - RNA, 32 nt, Human
auguuguaaauggcauugacagcugcucuuua

SEQ ID NO: 71995 - RNA, 32 nt, Human
auguuguacugaugucauuugaccacguccau

SEQ ID NO: 71996 - RNA, 32 nt, Human
auguuguaguaaaauuuaauuuuuccuuuugu

SEQ ID NO: 71997 - RNA, 32 nt, Human
auguugucauucuuacuaaucuaguccagccg

SEQ ID NO: 71998 - RNA, 32 nt, Human
auguugucuggggcugccgucaucucauggcu

SEQ ID NO: 71999 - RNA, 32 nt, Human
auguugugacuauucagaaaaggugaauaaaa

SEQ ID NO: 72000 - RNA, 32 nt, Human
auguugugagaggaacaugagccagacaaaga

SEQ ID NO: 72001 - RNA, 32 nt, Human
auguuguggcuguguguuuccuuaaugcucuc

SEQ ID NO: 72002 - RNA, 18 nt, Human
auguuguggggacugcau

SEQ ID NO: 72003 - RNA, 32 nt, Human
auguuguggugagccgagaucaagccauugca

SEQ ID NO: 72004 - RNA, 32 nt, Human
auguuguguggauguggagaugacuccauccc

SEQ ID NO: 72005 - RNA, 32 nt, Human
auguugugugugugcauguacauguauggaca

SEQ ID NO: 72006 - RNA, 32 nt, Human
auguuguguuacuguacacagaagugugugca

SEQ ID NO: 72007 - RNA, 32 nt, Human
auguuguguugcacuccaggcaccuggccaag

SEQ ID NO: 72008 - RNA, 32 nt, Human
auguuguuacccuuggaagauaaagcuggguc

SEQ ID NO: 72009 - RNA, 32 nt, Human
auguuguuuuguucugugauggcuuuuucacc

SEQ ID NO: 72010 - RNA, 32 nt, Human
auguuuaaaauguaaauuguuuuaauuauuca

SEQ ID NO: 72011 - RNA, 32 nt, Human
auguuuaacaagauggagaggccaggcacgau

SEQ ID NO: 72012 - RNA, 32 nt, Human
auguuuaaccuacaauaauucagcuauaccca

SEQ ID NO: 72013 - RNA, 32 nt, Human
auguuuaacugcagacuugccuuaaaacaaga

SEQ ID NO: 72014 - RNA, 32 nt, Human
auguuuaagagggagagaggggaggcaaagcu

SEQ ID NO: 72015 - RNA, 32 nt, Human
auguuuaagcaaagcaucugcccacacucccc

SEQ ID NO: 72016 - RNA, 32 nt, Human
auguuuaaguggucaagcaaggcucuaggagg

SEQ ID NO: 72017 - RNA, 32 nt, Human
auguuuaaguguuuagaaaucauagaaggugu

SEQ ID NO: 72018 - RNA, 32 nt, Human
auguuuaaguugaguuaguucccaucuuuuca

SEQ ID NO: 72019 - RNA, 32 nt, Human
auguuuaauggaggggaggcugagggaaaggc

SEQ ID NO: 72020 - RNA, 32 nt, Human
auguuuacaauguuguguauaaaugggacaac

SEQ ID NO: 72021 - RNA, 32 nt, Human
auguuuacagaaguggagaaaggacuaaagga

SEQ ID NO: 72022 - RNA, 32 nt, Human
auguuuacaguauuuucaguuuuauuauaaaa

SEQ ID NO: 72023 - RNA, 32 nt, Human
auguuuaccagcacacggcucuucuucccacg

SEQ ID NO: 72024 - RNA, 32 nt, Human
auguuuacccuugcggaaguugcaucacuuaa

SEQ ID NO: 72025 - RNA, 22 nt, Human
auguuuaccucaguuuauguca

SEQ ID NO: 72026 - RNA, 32 nt, Human
auguuuacuucuagaaugggccuguuguaaac

SEQ ID NO: 72027 - RNA, 24 nt, Human
auguuuacuuuucagggcaucuua

SEQ ID NO: 72028 - RNA, 32 nt, Human
auguuuagacaucaagacaagaggguagaaag

SEQ ID NO: 72029 - RNA, 32 nt, Human
auguuuagccacugccccaggcucccgugacc

SEQ ID NO: 72030 - RNA, 32 nt, Human
auguuuagguuuuaagcaaauaaaguuccagu

SEQ ID NO: 72031 - RNA, 32 nt, Human
auguuuaguaaagaucauaauuagcuguguua

SEQ ID NO: 72032 - RNA, 24 nt, Human
auguuuaguuuuguuuacccaagg

SEQ ID NO: 72033 - RNA, 32 nt, Human
auguuuauaccuuuuguuuuccuugccgcgac

SEQ ID NO: 72034 - RNA, 32 nt, Human
auguuuaucauguuguaaaguagcaucaguug

SEQ ID NO: 72035 - RNA, 32 nt, Human
auguuuaucuugggacugucuugcugggccgg

SEQ ID NO: 72036 - RNA, 32 nt, Human
auguuuauguucagaguuaacagaacaccuuu

SEQ ID NO: 72037 - RNA, 32 nt, Human
auguuuauuggaccccuccaucuugaugauau

SEQ ID NO: 72038 - RNA, 22 nt, Human
auguuuauuuccugaaauuuca

SEQ ID NO: 72039 - RNA, 21 nt, Human
auguuucaaacauucuaaaua

SEQ ID NO: 72040 - RNA, 32 nt, Human
auguuucagagacuuuaauaugcuacucugcu

SEQ ID NO: 72041 - RNA, 32 nt, Human
auguuucagaguagcuggagugaugcagggag

SEQ ID NO: 72042 - RNA, 26 nt, Human
auguuucagcucauuccauccucaca

SEQ ID NO: 72043 - RNA, 32 nt, Human
auguuucaggcaggagugggguaaauaagugu

SEQ ID NO: 72044 - RNA, 22 nt, Human
auguuucagugccacucacaua

SEQ ID NO: 72045 - RNA, 32 nt, Human
auguuucauggagcuuauuuugagaacuuucc

SEQ ID NO: 72046 - RNA, 32 nt, Human
auguuuccagaagguaagggacaguaauucug

SEQ ID NO: 72047 - RNA, 32 nt, Human
auguuuccagaguccccagucacuugcaaagg

SEQ ID NO: 72048 - RNA, 32 nt, Human
auguuucccuuuccuuucuuucaccuugucau

SEQ ID NO: 72049 - RNA, 32 nt, Human
auguuucccuuucgucuauucuaucuuuuccu

SEQ ID NO: 72050 - RNA, 32 nt, Human
auguuuccuaguuuauaauucauuugggcagu

SEQ ID NO: 72051 - RNA, 32 nt, Human
auguuuccuaugcuuugaucccuucucacuua

SEQ ID NO: 72052 - RNA, 32 nt, Human
auguuuccuggaagcugacucagucuguucac

SEQ ID NO: 72053 - RNA, 32 nt, Human
auguuucggacuuggucuuccuuuuaauuuac

SEQ ID NO: 72054 - RNA, 32 nt, Human
auguuucuacccuaaagauuuccccaguacag

SEQ ID NO: 72055 - RNA, 32 nt, Human
auguuucucagccucccccuuuacagaggaag

SEQ ID NO: 72056 - RNA, 32 nt, Human
auguuucucauccuucuugcucugccuuugag

SEQ ID NO: 72057 - RNA, 32 nt, Human
auguuucuccaaugcaaucaagcccuagacuc

SEQ ID NO: 72058 - RNA, 32 nt, Human
auguuucuccaauguuacgcucgcuugccuag

SEQ ID NO: 72059 - RNA, 32 nt, Human
auguuucuccaguucugccugcccuggcagaa

SEQ ID NO: 72060 - RNA, 32 nt, Human
auguuucugauuuaccuaagggaauucaaaua

SEQ ID NO: 72061 - RNA, 32 nt, Human
auguuucugcgcuccuagccugggugacagag

SEQ ID NO: 72062 - RNA, 32 nt, Human
auguuucugcuugcugugccuuguuauggcug

SEQ ID NO: 72063 - RNA, 32 nt, Human
auguuucugguugucugugcugccucaaagag

SEQ ID NO: 72064 - RNA, 32 nt, Human
auguuucuuagagagaagaucacugaagaaac

SEQ ID NO: 72065 - RNA, 32 nt, Human
auguuucuucagcuugagaaauuuuagaauga

SEQ ID NO: 72066 - RNA, 32 nt, Human
auguuucuugaauugauuuuguucugugguac

SEQ ID NO: 72067 - RNA, 32 nt, Human
auguuugaaagauguucccuuccuucacugua

SEQ ID NO: 72068 - RNA, 32 nt, Human
auguuugaaagccacagucaguccuuuaagca

SEQ ID NO: 72069 - RNA, 32 nt, Human
auguuugaaagccacugagauagaaggaccag

SEQ ID NO: 72070 - RNA, 32 nt, Human
auguuugaccaacaugcugaaaccccaucucu

SEQ ID NO: 72071 - RNA, 32 nt, Human
auguuugauaaauguuguccagguuccauugc

SEQ ID NO: 72072 - RNA, 32 nt, Human
auguuugauguccccaaaguaccacacugagu

SEQ ID NO: 72073 - RNA, 32 nt, Human
auguuugauucuguauucuuuauuccagugug

SEQ ID NO: 72074 - RNA, 32 nt, Human
auguuugcaaaaauauggcacauguauacauu

SEQ ID NO: 72075 - RNA, 32 nt, Human
auguuugcagcauugcacuccagccuggguga

SEQ ID NO: 72076 - RNA, 32 nt, Human
auguuugcagucagugcaagacaagucuaugg

SEQ ID NO: 72077 - RNA, 32 nt, Human
auguuugcaguucauguagcaggcaugacaga

SEQ ID NO: 72078 - RNA, 32 nt, Human
auguuugccacagccucugccuggaaccuggc

SEQ ID NO: 72079 - RNA, 32 nt, Human
auguuugccaucacccgcacccuuacuggcuc

SEQ ID NO: 72080 - RNA, 32 nt, Human
auguuugcccugcucugccugggacugagcga

SEQ ID NO: 72081 - RNA, 32 nt, Human
auguuugcuuuuguuaaaagcuuuauugagau

SEQ ID NO: 72082 - RNA, 32 nt, Human
auguuuggaauggagaaaguguguagauguau

SEQ ID NO: 72083 - RNA, 32 nt, Human
auguuugggacugaaguaaacauaucaaguua

SEQ ID NO: 72084 - RNA, 32 nt, Human
auguuugguaauaaucagcucuucuggcccac

SEQ ID NO: 72085 - RNA, 32 nt, Human
auguuuguaaaacuacacaucccuaaugugug

SEQ ID NO: 72086 - RNA, 23 nt, Human
auguuuguaaagugauuugccau

SEQ ID NO: 72087 - RNA, 23 nt, Human
auguuuguagaauucauuuuuua

SEQ ID NO: 72088 - RNA, 32 nt, Human
auguuuguaguuacuauaaaucaagcuuugga

SEQ ID NO: 72089 - RNA, 32 nt, Human
auguuugucauccuuuagaauaaugggaauua

SEQ ID NO: 72090 - RNA, 32 nt, Human
auguuugucuacugcacaagccucggccugcc

SEQ ID NO: 72091 - RNA, 22 nt, Human
auguuugucuggauuggcuaua

SEQ ID NO: 72092 - RNA, 32 nt, Human
auguuuguggcuuucucuccagccucucuuag

SEQ ID NO: 72093 - RNA, 32 nt, Human
auguuugugugugaacccuuguuuccuccaaa

SEQ ID NO: 72094 - RNA, 32 nt, Human
auguuuguugaaugaguaaaugaaucacaaac

SEQ ID NO: 72095 - RNA, 32 nt, Human
auguuuguuguuuaagccuuucaggcuacggc

SEQ ID NO: 72096 - RNA, 32 nt, Human
auguuuuaaauacaugcauugucuucacgaag

SEQ ID NO: 72097 - RNA, 32 nt, Human
auguuuuaagaaguugagaucuugugaauaua

SEQ ID NO: 72098 - RNA, 32 nt, Human
auguuuuaauaugccucauugugccuuuacug

SEQ ID NO: 72099 - RNA, 32 nt, Human
auguuuuagcacagcguuaugugucugccaca

SEQ ID NO: 72100 - RNA, 32 nt, Human
auguuuuaguaaggagagauuagaagacaaca

SEQ ID NO: 72101 - RNA, 32 nt, Human
auguuuuaucaucuggaacgguugugaagcuu

SEQ ID NO: 72102 - RNA, 32 nt, Human
auguuuuauucagguguagaugaauuucauuu

SEQ ID NO: 72103 - RNA, 32 nt, Human
auguuuucaaaaacuuagugugcaauagaguc

SEQ ID NO: 72104 - RNA, 25 nt, Human
auguuuucaaaagugccuugccaug

SEQ ID NO: 72105 - RNA, 32 nt, Human
auguuuucauuuccuugacuuauuuuuguuag

SEQ ID NO: 72106 - RNA, 32 nt, Human
auguuuucuacccugccaccucuuuucagcaa

SEQ ID NO: 72107 - RNA, 32 nt, Human
auguuuucucaaauauaugcugugccuguacu

SEQ ID NO: 72108 - RNA, 32 nt, Human
auguuuucucccuggagcugagcugagcuuuc

SEQ ID NO: 72109 - RNA, 32 nt, Human
auguuuucuccucuguuugcuucuaaugucuc

SEQ ID NO: 72110 - RNA, 32 nt, Human
auguuuucucucucacacacaaagauucaaaa

SEQ ID NO: 72111 - RNA, 32 nt, Human
auguuuucuuucuccucuuugcuuccauucau

SEQ ID NO: 72112 - RNA, 32 nt, Human
auguuuugacguuugcagucacacacaacacc

SEQ ID NO: 72113 - RNA, 32 nt, Human
auguuuugccugccaauugaaugauuucguag

SEQ ID NO: 72114 - RNA, 32 nt, Human
auguuuugcuucucucucagacugccuuccug

SEQ ID NO: 72115 - RNA, 32 nt, Human
auguuuugcuuuggugaaacauugugaaugac

SEQ ID NO: 72116 - RNA, 32 nt, Human
auguuuuggggguuugaaaaaucaaagauaau

SEQ ID NO: 72117 - RNA, 32 nt, Human
auguuuugguuucagagcacuugcccaauccu

SEQ ID NO: 72118 - RNA, 32 nt, Human
auguuuuguccuuuuaaaacauuuucuuuuga

SEQ ID NO: 72119 - RNA, 32 nt, Human
auguuuugugucagagaaaacauguacaaaac

SEQ ID NO: 72120 - RNA, 32 nt, Human
auguuuuguuucucccuccaggccaguauaaa

SEQ ID NO: 72121 - RNA, 32 nt, Human
auguuuuuaauggcucauuuaggguagauuua

SEQ ID NO: 72122 - RNA, 32 nt, Human
auguuuuuauuuaugaauaaagaaugccauuu

SEQ ID NO: 72123 - RNA, 32 nt, Human
auguuuuucauuucccguguguuuccauuucc

SEQ ID NO: 72124 - RNA, 32 nt, Human
auguuuuucauuuccucugaguucaguagcca

SEQ ID NO: 72125 - RNA, 32 nt, Human
auguuuuucuccaggauuuuggugaggguugg

SEQ ID NO: 72126 - RNA, 32 nt, Human
auguuuuucuguauuuuuaguagagacggggu

SEQ ID NO: 72127 - RNA, 32 nt, Human
auguuuuucuugaacuuuagagggcagcagag

SEQ ID NO: 72128 - RNA, 32 nt, Human
auguuuuugcuuuucaacacacaaagcacaaa

SEQ ID NO: 72129 - RNA, 32 nt, Human
auguuuuugucuuuguggcaugcagcuaacuc

SEQ ID NO: 72130 - RNA, 32 nt, Human
auuaaaaacaacacaucuccacuaccagugcu

SEQ ID NO: 72131 - RNA, 32 nt, Human
auuaaaaacucauguggaggaacucaaggaau

SEQ ID NO: 72132 - RNA, 32 nt, Human
auuaaaaagagcauaggguaaaaaccugauau

SEQ ID NO: 72133 - RNA, 32 nt, Human
auuaaaaagcaugauuuugcugugcauguacc

SEQ ID NO: 72134 - RNA, 32 nt, Human
auuaaaaaggaaaguuugccaggaggaacaaa

SEQ ID NO: 72135 - RNA, 32 nt, Human
auuaaaaaguaaaauaauaggccaggcauggu

SEQ ID NO: 72136 - RNA, 32 nt, Human
auuaaaaaugcacacggucuuugacccagcaa

SEQ ID NO: 72137 - RNA, 32 nt, Human
auuaaaacaagguaggaaugaggcuagaccuu

SEQ ID NO: 72138 - RNA, 32 nt, Human
auuaaaacauaguuaucuaguaguaggagagg

SEQ ID NO: 72139 - RNA, 32 nt, Human
auuaaaacauuagcuaggcaugguggugcaca

SEQ ID NO: 72140 - RNA, 32 nt, Human
auuaaaacauuagcugggugugguggcgcaua

SEQ ID NO: 72141 - RNA, 32 nt, Human
auuaaaaccaacaaggaguuucaugugcaaag

SEQ ID NO: 72142 - RNA, 32 nt, Human
auuaaaaccacaaugacacauaugaugcccau

SEQ ID NO: 72143 - RNA, 32 nt, Human
auuaaaaccuauagcaaucauuucaaaucuau

SEQ ID NO: 72144 - RNA, 32 nt, Human
auuaaaaccuuaagaguucuaaccaugccuac

SEQ ID NO: 72145 - RNA, 32 nt, Human
auuaaaacgccuacagcugccuccuagaauau

SEQ ID NO: 72146 - RNA, 32 nt, Human
auuaaaagaaucacaucuucagaagagaagac

SEQ ID NO: 72147 - RNA, 32 nt, Human
auuaaaagauuauccaggugugguagugugug

SEQ ID NO: 72148 - RNA, 32 nt, Human
auuaaaagcagucucggaaacacagagccagg

SEQ ID NO: 72149 - RNA, 32 nt, Human
auuaaaaggaagcagaagcauugaccauuuuu

SEQ ID NO: 72150 - RNA, 32 nt, Human
auuaaaaggaagcuuacaugccuaccaauauu

SEQ ID NO: 72151 - RNA, 27 nt, Human
auuaaaaggacuauuucucuaaaacuc

SEQ ID NO: 72152 - RNA, 28 nt, Human
auuaaaaggacuauuucucuaaaacuca

SEQ ID NO: 72153 - RNA, 32 nt, Human
auuaaaaggacuauuucucuaaaacucaaaaa

SEQ ID NO: 72154 - RNA, 32 nt, Human
auuaaaaggaugagagaagcaagagcaaacac

SEQ ID NO: 72155 - RNA, 32 nt, Human
auuaaaaggguuuaagaagaauucuuucucag

SEQ ID NO: 72156 - RNA, 32 nt, Human
auuaaaauagucaagacaacacugaccuugca

SEQ ID NO: 72157 - RNA, 32 nt, Human
auuaaaauagucucuuuaaaaggaaagaaaac

SEQ ID NO: 72158 - RNA, 32 nt, Human
auuaaaaugaaaaaugcauuagccaggugugg

SEQ ID NO: 72159 - RNA, 32 nt, Human
auuaaaaugcuggggcaagaugcaguacaagu

SEQ ID NO: 72160 - RNA, 32 nt, Human
auuaaaaugugguugagugugccuaaauuaac

SEQ ID NO: 72161 - RNA, 32 nt, Human
auuaaaauguucuggaauuauaagcaaucuuu

SEQ ID NO: 72162 - RNA, 32 nt, Human
auuaaaauuuggugcuuauaagagaaaguuaa

SEQ ID NO: 72163 - RNA, 32 nt, Human
auuaaaauuuugggucagacuuugccauaaug

SEQ ID NO: 72164 - RNA, 32 nt, Human
auuaaacaacugcccauugccaccucccccuc

SEQ ID NO: 72165 - RNA, 32 nt, Human
auuaaacaaugccauuucuugaccacuucugu

SEQ ID NO: 72166 - RNA, 32 nt, Human
auuaaacacacuuccauuucucuuggaagcau

SEQ ID NO: 72167 - RNA, 32 nt, Human
auuaaacauaagucaagauaaauguucuuacc

SEQ ID NO: 72168 - RNA, 32 nt, Human
auuaaacauggugcaauggcaccucuguccaa

SEQ ID NO: 72169 - RNA, 32 nt, Human
auuaaacauucugcauuggguauaaucuaaga

SEQ ID NO: 72170 - RNA, 32 nt, Human
auuaaaccaaggcacuccagccugggugacag

SEQ ID NO: 72171 - RNA, 32 nt, Human
auuaaaccaguauuuugagcuggcaaaauucu

SEQ ID NO: 72172 - RNA, 32 nt, Human
auuaaacccacaagcugccucugacagcagcc

SEQ ID NO: 72173 - RNA, 32 nt, Human
auuaaaccucacugcaaauuuccucccaucac

SEQ ID NO: 72174 - RNA, 32 nt, Human
auuaaacgcccaaacuaaacuccucauuccua

SEQ ID NO: 72175 - RNA, 32 nt, Human
auuaaacggugcuuguuuucuauaauguuuug

SEQ ID NO: 72176 - RNA, 32 nt, Human
auuaaacuaucaucuccaccuuccuuuugauu

SEQ ID NO: 72177 - RNA, 32 nt, Human
auuaaacugagugcugggagugaguugguaau

SEQ ID NO: 72178 - RNA, 32 nt, Human
auuaaacugugacccuagucaccagaauucag

SEQ ID NO: 72179 - RNA, 32 nt, Human
auuaaagaaaugcuacauguuccgguugcaga

SEQ ID NO: 72180 - RNA, 32 nt, Human
auuaaagaacauucuaaauuaccugguaauuu

SEQ ID NO: 72181 - RNA, 32 nt, Human
auuaaagagacauuugaacccuauguuuacug

SEQ ID NO: 72182 - RNA, 32 nt, Human
auuaaagagccuuccuggaaaauggagguugc

SEQ ID NO: 72183 - RNA, 32 nt, Human
auuaaagagugcauuuacacaaggcuggcagg

SEQ ID NO: 72184 - RNA, 32 nt, Human
auuaaagcaaacauuucgacuaaaggggcgaa

SEQ ID NO: 72185 - RNA, 32 nt, Human
auuaaagccaugcaaaagaaggucuaggucca

SEQ ID NO: 72186 - RNA, 32 nt, Human
auuaaagccugagacucaggccagaauuagga

SEQ ID NO: 72187 - RNA, 32 nt, Human
auuaaagccuuuauuccaucucucaagauaua

SEQ ID NO: 72188 - RNA, 32 nt, Human
auuaaagcuaugguuauauuagcaccaaacuu

SEQ ID NO: 72189 - RNA, 32 nt, Human
auuaaagcuggguacuaagaaaugucauuugc

SEQ ID NO: 72190 - RNA, 32 nt, Human
auuaaagcugugagccacugugccaaggcuuu

SEQ ID NO: 72191 - RNA, 32 nt, Human
auuaaaggcguaagccacugcgccuggcuguu

SEQ ID NO: 72192 - RNA, 32 nt, Human
auuaaaggcgugagccaccaugcccagccucc

SEQ ID NO: 72193 - RNA, 32 nt, Human
auuaaaggcgugagccaccgugcccagccuaa

SEQ ID NO: 72194 - RNA, 20 nt, Human
auuaaaggcuuucaguacgg

SEQ ID NO: 72195 - RNA, 32 nt, Human
auuaaaggggcugucucccaaugaaagaggca

SEQ ID NO: 72196 - RNA, 32 nt, Human
auuaaaggugugagccaccaugccuggcccua

SEQ ID NO: 72197 - RNA, 32 nt, Human
auuaaagguuuggccugcuuuaucucucgcuu

SEQ ID NO: 72198 - RNA, 32 nt, Human
auuaaaguaacaauagccugguggcagaugaa

SEQ ID NO: 72199 - RNA, 32 nt, Human
auuaaagucucccacuauuauuauaugggagu

SEQ ID NO: 72200 - RNA, 32 nt, Human
auuaaaguuagaaacgacuacagagugaaaug

SEQ ID NO: 72201 - RNA, 32 nt, Human
auuaaaguuaggaucuagucauggacacuacu

SEQ ID NO: 72202 - RNA, 32 nt, Human
auuaaaguugaaugaauuuuugaagaaucagc

SEQ ID NO: 72203 - RNA, 32 nt, Human
auuaaauaaccuguuuuacugccuguacauuc

SEQ ID NO: 72204 - RNA, 21 nt, Human
auuaaauaauuugcugugaaa

SEQ ID NO: 72205 - RNA, 32 nt, Human
auuaaauacuuugccagcacugccuuugccag

SEQ ID NO: 72206 - RNA, 32 nt, Human
auuaaauagcucagagaguacaucugccauau

SEQ ID NO: 72207 - RNA, 32 nt, Human
auuaaauauacgacacauccaggaguuuauug

SEQ ID NO: 72208 - RNA, 32 nt, Human
auuaaauauuucacagcuaaaaagcuaaagag

SEQ ID NO: 72209 - RNA, 21 nt, Human
auuaaaucagaaugcugaaua

SEQ ID NO: 72210 - RNA, 21 nt, Human
auuaaaucagcgcguuuaaca

SEQ ID NO: 72211 - RNA, 32 nt, Human
auuaaauccagccuaaacauuuugccaggaac

SEQ ID NO: 72212 - RNA, 32 nt, Human
auuaaaugaaacacaguaaagaaaguugggcu

SEQ ID NO: 72213 - RNA, 32 nt, Human
auuaaaugaauccaaaguauccuagcucuuug

SEQ ID NO: 72214 - RNA, 23 nt, Human
auuaaaugagauggcaugugaaa

SEQ ID NO: 72215 - RNA, 32 nt, Human
auuaaaugaggugaaaacaaguaggagugaau

SEQ ID NO: 72216 - RNA, 21 nt, Human
auuaaaugaguaccugugaaa

SEQ ID NO: 72217 - RNA, 24 nt, Human
auuaaaugagugcuaucugugaaa

SEQ ID NO: 72218 - RNA, 32 nt, Human
auuaaaugauuccuggccaagaaacaaaagca

SEQ ID NO: 72219 - RNA, 24 nt, Human
auuaaaugauuugcccaaagucuc

SEQ ID NO: 72220 - RNA, 23 nt, Human
auuaaauggauaucagccugaaa

SEQ ID NO: 72221 - RNA, 32 nt, Human
auuaaauguagcgacugucaacagcgugcagg

SEQ ID NO: 72222 - RNA, 32 nt, Human
auuaaauguaugguugcaucugucuuuuuaua

SEQ ID NO: 72223 - RNA, 32 nt, Human
auuaaaugugucauacauauccacuugagggc

SEQ ID NO: 72224 - RNA, 32 nt, Human
auuaaauuaacuauuaaccacauucaccuugu

SEQ ID NO: 72225 - RNA, 32 nt, Human
auuaaauuauauaauacauuacauucugguua

SEQ ID NO: 72226 - RNA, 32 nt, Human
auuaaauucagccuaaacauuuugccaggaac

SEQ ID NO: 72227 - RNA, 32 nt, Human
auuaaauucccagagcccccuaggaaagauga

SEQ ID NO: 72228 - RNA, 32 nt, Human
auuaaauucucaaaauaauccuuugaaaaggg

SEQ ID NO: 72229 - RNA, 32 nt, Human
auuaaauucugggugaaacccuuuucucccac

SEQ ID NO: 72230 - RNA, 32 nt, Human
auuaaauuggaaaauauuggaauggaaccauu

SEQ ID NO: 72231 - RNA, 32 nt, Human
auuaaauugugagcucuuagaagacaggggug

SEQ ID NO: 72232 - RNA, 32 nt, Human
auuaaauuuauaccacugagggagagacccuu

SEQ ID NO: 72233 - RNA, 32 nt, Human
auuaaauuucagacuguagagccacauuuaca

SEQ ID NO: 72234 - RNA, 32 nt, Human
auuaaauuucuuauugaauuauuugaauucaa

SEQ ID NO: 72235 - RNA, 32 nt, Human
auuaacaaggagucucaaaaagaaaugagagg

SEQ ID NO: 72236 - RNA, 32 nt, Human
auuaacaaggucucugaggucauucagggaaa

SEQ ID NO: 72237 - RNA, 32 nt, Human
auuaacaauuaauugugaauacaugcuguuac

SEQ ID NO: 72238 - RNA, 32 nt, Human
auuaacacuagaugaauuaaagacuuaaacgu

SEQ ID NO: 72239 - RNA, 32 nt, Human
auuaacacuuaagguugggugcugcuaauucu

SEQ ID NO: 72240 - RNA, 32 nt, Human
auuaacagaaggcaaaguagaagguucacaaa

SEQ ID NO: 72241 - RNA, 32 nt, Human
auuaacagagcacacuaauaauuuguauagau

SEQ ID NO: 72242 - RNA, 32 nt, Human
auuaacagaggagaggaaaaagauggcucagc

SEQ ID NO: 72243 - RNA, 32 nt, Human
auuaacagagguggauguauugcuuaugaaaa

SEQ ID NO: 72244 - RNA, 32 nt, Human
auuaacagccagcauucaaaauugauaaauua

SEQ ID NO: 72245 - RNA, 32 nt, Human
auuaacagcguaauuauacaggcauauuuaau

SEQ ID NO: 72246 - RNA, 32 nt, Human
auuaacaggcucuggaccuauaagaucaagga

SEQ ID NO: 72247 - RNA, 32 nt, Human
auuaacaucuauugcuuuuucccuucaucugu

SEQ ID NO: 72248 - RNA, 32 nt, Human
auuaacaucucaggacucuucucuuguaaaga

SEQ ID NO: 72249 - RNA, 32 nt, Human
auuaacaucuucagaaaaggaagcaggcaugg

SEQ ID NO: 72250 - RNA, 32 nt, Human
auuaaccaaggcagaaagaggugaguaacuug

SEQ ID NO: 72251 - RNA, 32 nt, Human
auuaaccaagucccgagaaaagaaagugaaua

SEQ ID NO: 72252 - RNA, 32 nt, Human
auuaaccaauccaggaacugcuuuaccuuugg

SEQ ID NO: 72253 - RNA, 32 nt, Human
auuaaccaccaagcugcagcggauggggcaag

SEQ ID NO: 72254 - RNA, 32 nt, Human
auuaaccacccuccgcaaaccccagaaccccu

SEQ ID NO: 72255 - RNA, 32 nt, Human
auuaaccaccucuucuguguuucugguagcua

SEQ ID NO: 72256 - RNA, 32 nt, Human
auuaaccaggaggagguggcugcugugcccca

SEQ ID NO: 72257 - RNA, 32 nt, Human
auuaaccauaucugcccuucagguauuuugua

SEQ ID NO: 72258 - RNA, 32 nt, Human
auuaaccaucacagcaacaugccugcuaaauu

SEQ ID NO: 72259 - RNA, 32 nt, Human
auuaacccaggagaugggggucgaggagagac

SEQ ID NO: 72260 - RNA, 32 nt, Human
auuaacccaguaaacauauacaaaguaagcuu

SEQ ID NO: 72261 - RNA, 32 nt, Human
auuaacccauuuuauuuccuguccuuaguguc

SEQ ID NO: 72262 - RNA, 32 nt, Human
auuaaccccagugcaguaggguccccaggggc

SEQ ID NO: 72263 - RNA, 32 nt, Human
auuaaccccugccucaugucuguaacauguga

SEQ ID NO: 72264 - RNA, 32 nt, Human
auuaacccuuuccacacugcuccccugacuca

SEQ ID NO: 72265 - RNA, 32 nt, Human
auuaaccuaaguguccaucaauagagaauugg

SEQ ID NO: 72266 - RNA, 32 nt, Human
auuaaccuagguguccaucaauagagaauugg

SEQ ID NO: 72267 - RNA, 32 nt, Human
auuaaccugggcaacauaaugauacccugucu

SEQ ID NO: 72268 - RNA, 32 nt, Human
auuaaccuggguugcaacuacagguggcacug

SEQ ID NO: 72269 - RNA, 32 nt, Human
auuaaccuuacuguuuaagaggccaacuucug

SEQ ID NO: 72270 - RNA, 32 nt, Human
auuaacgaggggcaaggaagaggaguuggcca

SEQ ID NO: 72271 - RNA, 32 nt, Human
auuaacuaaaauucuaaugaucuugcuaccag

SEQ ID NO: 72272 - RNA, 32 nt, Human
auuaacuagggguuguggugugcaccuguagu

SEQ ID NO: 72273 - RNA, 32 nt, Human
auuaacuagguuuaagaaaagaccugaggcuu

SEQ ID NO: 72274 - RNA, 32 nt, Human
auuaacuauauuggauagcacagccguaaaau

SEQ ID NO: 72275 - RNA, 32 nt, Human
auuaacucaaauaacuaaauuucagaaaauua

SEQ ID NO: 72276 - RNA, 28 nt, Human
auuaacucauguacagccucauccugua

SEQ ID NO: 72277 - RNA, 32 nt, Human
auuaacucccaaaaauuggaauugcuaagagc

SEQ ID NO: 72278 - RNA, 32 nt, Human
auuaacugaggguaauuacaguaguagacaug

SEQ ID NO: 72279 - RNA, 22 nt, Human
auuaacugcugaauccauguga

SEQ ID NO: 72280 - RNA, 32 nt, Human
auuaacuggaaaacauauguuccuuaugugug

SEQ ID NO: 72281 - RNA, 32 nt, Human
auuaacuguuuaauuaaaauguuguaacaagu

SEQ ID NO: 72282 - RNA, 32 nt, Human
auuaacuucaauguaaucaugccuccuauuac

SEQ ID NO: 72283 - RNA, 32 nt, Human
auuaacuucagauccagcagguuugacccacc

SEQ ID NO: 72284 - RNA, 32 nt, Human
auuaacuucccauucuuggcgugacugaaagg

SEQ ID NO: 72285 - RNA, 32 nt, Human
auuaacuucuuagaaugcaugauguguuugug

SEQ ID NO: 72286 - RNA, 32 nt, Human
auuaacuuuacugacauggagugaagugcaau

SEQ ID NO: 72287 - RNA, 32 nt, Human
auuaagaaauagacagcaugagagggaugagg

SEQ ID NO: 72288 - RNA, 32 nt, Human
auuaagaacaucaaagugaaaaaugaaaagcc

SEQ ID NO: 72289 - RNA, 32 nt, Human
auuaagaagaauagaaguggagaggggaauua

SEQ ID NO: 72290 - RNA, 32 nt, Human
auuaagaagcuggacucuacugccauuaaagc

SEQ ID NO: 72291 - RNA, 32 nt, Human
auuaagaauaaaggaggaggaaaacaacaaag

SEQ ID NO: 72292 - RNA, 32 nt, Human
auuaagaauacaaaugcugggcugggcacagu

SEQ ID NO: 72293 - RNA, 32 nt, Human
auuaagaaucuuccauaauuguuuccacaaac

SEQ ID NO: 72294 - RNA, 32 nt, Human
auuaagacaaagacacagaaauauagugcaga

SEQ ID NO: 72295 - RNA, 32 nt, Human
auuaagacaagccuggcaacacaccuggugaa

SEQ ID NO: 72296 - RNA, 32 nt, Human
auuaagacagaagauggcuggaagagauguga

SEQ ID NO: 72297 - RNA, 32 nt, Human
auuaagacuuuucuaaggacugaagauuggca

SEQ ID NO: 72298 - RNA, 32 nt, Human
auuaagagacagacugugagccuagcagggca

SEQ ID NO: 72299 - RNA, 32 nt, Human
auuaagagaugggguuucgucauguuggccag

SEQ ID NO: 72300 - RNA, 32 nt, Human
auuaagagccucccucccucccucuauccauu

SEQ ID NO: 72301 - RNA, 32 nt, Human
auuaagaggaagcaaaacgcugcccagauccu

SEQ ID NO: 72302 - RNA, 32 nt, Human
auuaagaguaguaaugaaaaacaugcucagug

SEQ ID NO: 72303 - RNA, 32 nt, Human
auuaagagucucgggcccugccccagaccuag

SEQ ID NO: 72304 - RNA, 32 nt, Human
auuaagaucauccuggccaacauggugacacc

SEQ ID NO: 72305 - RNA, 32 nt, Human
auuaagauuacuggaaugguuaagucaugguu

SEQ ID NO: 72306 - RNA, 32 nt, Human
auuaagcaaacuugagaaaggggacuauucau

SEQ ID NO: 72307 - RNA, 32 nt, Human
auuaagcaaagcauuacucuggacuuuauugu

SEQ ID NO: 72308 - RNA, 32 nt, Human
auuaagcaaauugcuuaacacuugguuccagu

SEQ ID NO: 72309 - RNA, 32 nt, Human
auuaagcaauaaaaaccaaauugucugucauu

SEQ ID NO: 72310 - RNA, 32 nt, Human
auuaagccaccgcacuccagccugggcgacag

SEQ ID NO: 72311 - RNA, 32 nt, Human
auuaagccauugguggaacuagaaagagaauc

SEQ ID NO: 72312 - RNA, 32 nt, Human
auuaagcccuacuuuguccucugcacaaagau

SEQ ID NO: 72313 - RNA, 32 nt, Human
auuaagccucgguugagcccuuguauauuaaa

SEQ ID NO: 72314 - RNA, 32 nt, Human
auuaagccucuaagaacaaaauucauuagguu

SEQ ID NO: 72315 - RNA, 32 nt, Human
auuaagccuucagggcugucucaggccuuccu

SEQ ID NO: 72316 - RNA, 32 nt, Human
auuaagccuucccugcacuacuugugccccag

SEQ ID NO: 72317 - RNA, 32 nt, Human
auuaagcgauuccuggccaagaaacaaaagca

SEQ ID NO: 72318 - RNA, 32 nt, Human
auuaagcuaaucaaggaugcaccagaaaaagg

SEQ ID NO: 72319 - RNA, 32 nt, Human
auuaagcucauuuugacuguaaugucaucaaa

SEQ ID NO: 72320 - RNA, 32 nt, Human
auuaagcuucuuccucuucauaaaauuucaga

SEQ ID NO: 72321 - RNA, 32 nt, Human
auuaagcuuggucaguccacagacacacuagg

SEQ ID NO: 72322 - RNA, 32 nt, Human
auuaaggaaaccagauuuucaauuauuuagug

SEQ ID NO: 72323 - RNA, 32 nt, Human
auuaaggaagaaaagguaggauuauaagauuu

SEQ ID NO: 72324 - RNA, 32 nt, Human
auuaaggauauauacaguuacacuuuuugcug

SEQ ID NO: 72325 - RNA, 32 nt, Human
auuaaggaucaguggcaagcuucaacucagua

SEQ ID NO: 72326 - RNA, 32 nt, Human
auuaaggcagcaaguccuggguugugaaaaau

SEQ ID NO: 72327 - RNA, 32 nt, Human
auuaaggccaggaguucaaccagccuggacaa

SEQ ID NO: 72328 - RNA, 32 nt, Human
auuaaggcuugacaaagucaaaaguuuugucc

SEQ ID NO: 72329 - RNA, 32 nt, Human
auuaagggaacagugucuguuugcauguaaga

SEQ ID NO: 72330 - RNA, 32 nt, Human
auuaagggaagaaggugggagggcauuaguca

SEQ ID NO: 72331 - RNA, 32 nt, Human
auuaagggccggcacuccaucuugcuucaaua

SEQ ID NO: 72332 - RNA, 32 nt, Human
auuaagggcucaauaaauguuagcugaaugaa

SEQ ID NO: 72333 - RNA, 32 nt, Human
auuaagggucaccaccuaauuuuacuuuguau

SEQ ID NO: 72334 - RNA, 32 nt, Human
auuaaggguguacaaauuauaauaaugcaucu

SEQ ID NO: 72335 - RNA, 32 nt, Human
auuaagguccaauacauggguuguauuuuucu

SEQ ID NO: 72336 - RNA, 32 nt, Human
auuaaguaaagauggcuucgugacuaguguuu

SEQ ID NO: 72337 - RNA, 32 nt, Human
auuaaguaaguacucaagaaaugugcaauuuu

SEQ ID NO: 72338 - RNA, 32 nt, Human
auuaaguauauacuguguuuuauuuuuaaugu

SEQ ID NO: 72339 - RNA, 32 nt, Human
auuaagucaagagaucaagaccauccuggcca

SEQ ID NO: 72340 - RNA, 25 nt, Human
auuaagucacauuuuccuuuuguua

SEQ ID NO: 72341 - RNA, 24 nt, Human
auuaagucagugcacauccuaaca

SEQ ID NO: 72342 - RNA, 32 nt, Human
auuaaguccaccugucccuccugggcugcugg

SEQ ID NO: 72343 - RNA, 32 nt, Human
auuaagugaaugcuuugcaaguuugacuguau

SEQ ID NO: 72344 - RNA, 32 nt, Human
auuaagugagaagggagacucucagccuucag

SEQ ID NO: 72345 - RNA, 32 nt, Human
auuaagugagccagucaugcaugggccgagaa

SEQ ID NO: 72346 - RNA, 32 nt, Human
auuaaguguuuauuucauaaugccauuuauac

SEQ ID NO: 72347 - RNA, 32 nt, Human
auuaaguuauaccagcaaaagugcaguagugu

SEQ ID NO: 72348 - RNA, 32 nt, Human
auuaaguucaguuauuagucugugaagugcuu

SEQ ID NO: 72349 - RNA, 32 nt, Human
auuaaguuccacaagcuguuuguacucaaaua

SEQ ID NO: 72350 - RNA, 32 nt, Human
auuaaguuucacaagcuguuuguacucaaaua

SEQ ID NO: 72351 - RNA, 32 nt, Human
auuaaguuuguucauucucugcuuuauucucu

SEQ ID NO: 72352 - RNA, 32 nt, Human
auuaauaaaucauaauuucauuuccacauuga

SEQ ID NO: 72353 - RNA, 32 nt, Human
auuaauaacaaccaagacaaugcccagauuuc

SEQ ID NO: 72354 - RNA, 32 nt, Human
auuaauaccauaagguugggaacugacgcugg

SEQ ID NO: 72355 - RNA, 31 nt, Human
auuaauacucuauuuuuacauuuaaaccuuu

SEQ ID NO: 72356 - RNA, 32 nt, Human
auuaauagcacagcagaugugugcugcccauc

SEQ ID NO: 72357 - RNA, 32 nt, Human
auuaauaggcuucuucucuuaagucuucaucu

SEQ ID NO: 72358 - RNA, 32 nt, Human
auuaauaucaauuacgaugccaaaaauugcug

SEQ ID NO: 72359 - RNA, 32 nt, Human
auuaauauugaccagagccaaugaggucaucu

SEQ ID NO: 72360 - RNA, 32 nt, Human
auuaauauuuagaguaggaugcagccucuuau

SEQ ID NO: 72361 - RNA, 32 nt, Human
auuaaucaagaggaagccaguggaacaucuuu

SEQ ID NO: 72362 - RNA, 32 nt, Human
auuaaucaauuucucaauaguucuuaaaauua

SEQ ID NO: 72363 - RNA, 32 nt, Human
auuaaucagcugguuucaacucuacugcgaaa

SEQ ID NO: 72364 - RNA, 32 nt, Human
auuaaucaggaauauuacaguaaugaggauuu

SEQ ID NO: 72365 - RNA, 32 nt, Human
auuaaucaguucauuagaaauauuuuaaaauc

SEQ ID NO: 72366 - RNA, 32 nt, Human
auuaaucauuuugcauuuuacauuuaaauaug

SEQ ID NO: 72367 - RNA, 32 nt, Human
auuaauccaguggcaggagcgaauugaauuug

SEQ ID NO: 72368 - RNA, 32 nt, Human
auuaauccccuggauccuggagaaugcaaucc

SEQ ID NO: 72369 - RNA, 32 nt, Human
auuaaucccucuuuuugugacacaaguacaau

SEQ ID NO: 72370 - RNA, 32 nt, Human
auuaauccugagucauucucucccagguaaug

SEQ ID NO: 72371 - RNA, 32 nt, Human
auuaaucuaucccuuuugugcaugcaccauuu

SEQ ID NO: 72372 - RNA, 32 nt, Human
auuaaucucauggaugguucucaaagguaaaa

SEQ ID NO: 72373 - RNA, 32 nt, Human
auuaaucuggggaagaacagagccagggaaag

SEQ ID NO: 72374 - RNA, 32 nt, Human
auuaaucuucguuccuccuacaccagcacuuc

SEQ ID NO: 72375 - RNA, 32 nt, Human
auuaaugacucucaggcacaggggguuuuaag

SEQ ID NO: 72376 - RNA, 32 nt, Human
auuaaugagaugaaaguaugcacagaauaacu

SEQ ID NO: 72377 - RNA, 32 nt, Human
auuaaugauagguauuugaguaagaaugaaaa

SEQ ID NO: 72378 - RNA, 32 nt, Human
auuaaugauauuucauacugugcaaugaacag

SEQ ID NO: 72379 - RNA, 32 nt, Human
auuaaugaucacacuaaaugauauuuguuuuu

SEQ ID NO: 72380 - RNA, 32 nt, Human
auuaaugcauuuugcugccuuuauuaggguac

SEQ ID NO: 72381 - RNA, 32 nt, Human
auuaaugcuaucucccuguguacuguuucucu

SEQ ID NO: 72382 - RNA, 29 nt, Human
auuaauggagaaacuuagaacuuaccauu

SEQ ID NO: 72383 - RNA, 32 nt, Human
auuaauggagcuggugccuugcagcuucccuu

SEQ ID NO: 72384 - RNA, 32 nt, Human
auuaauggauacugaauaagccuggcaccugc

SEQ ID NO: 72385 - RNA, 32 nt, Human
auuaauggccagguauuuuaggaugugagaag

SEQ ID NO: 72386 - RNA, 32 nt, Human
auuaauggcgugagccacuguaccuggccaua

SEQ ID NO: 72387 - RNA, 32 nt, Human
auuaaugguggagccagagggagcccagugag

SEQ ID NO: 72388 - RNA, 32 nt, Human
auuaaugguucugcaugaccuagccacugcug

SEQ ID NO: 72389 - RNA, 32 nt, Human
auuaauguaugguauuugcucugugauuguuc

SEQ ID NO: 72390 - RNA, 32 nt, Human
auuaaugucacaaagcucuagugcaaucuagu

SEQ ID NO: 72391 - RNA, 32 nt, Human
auuaaugucaguacuaccagcacuuugccaaa

SEQ ID NO: 72392 - RNA, 32 nt, Human
auuaauguggaaggucaucaauaaaggggaau

SEQ ID NO: 72393 - RNA, 32 nt, Human
auuaauguggguggagauggggaugauuguag

SEQ ID NO: 72394 - RNA, 32 nt, Human
auuaauguucuaaagauaauuucugauugaaa

SEQ ID NO: 72395 - RNA, 32 nt, Human
auuaauguugacuucccuugguuggauccucu

SEQ ID NO: 72396 - RNA, 22 nt, Human
auuaauguugguuguacaccca

SEQ ID NO: 72397 - RNA, 32 nt, Human
auuaauguuuacuuucagaaccacacgcacag

SEQ ID NO: 72398 - RNA, 32 nt, Human
auuaauuaaugucuuugaaaagggaaaaguau

SEQ ID NO: 72399 - RNA, 32 nt, Human
auuaauuacaguguccuauagaaaaugccauu

SEQ ID NO: 72400 - RNA, 32 nt, Human
auuaauuacauacagauuuuaccuauccacaa

SEQ ID NO: 72401 - RNA, 32 nt, Human
auuaauuaucaguaucuaaagccacauuguuc

SEQ ID NO: 72402 - RNA, 32 nt, Human
auuaauuauuugguuguuuuguuuucauuuuu

SEQ ID NO: 72403 - RNA, 32 nt, Human
auuaauuccuggucuaguuuccugggccuugu

SEQ ID NO: 72404 - RNA, 32 nt, Human
auuaauucucacuaaaauucagcaaaggacuu

SEQ ID NO: 72405 - RNA, 32 nt, Human
auuaauucugaagaaggaaaagaaacugacau

SEQ ID NO: 72406 - RNA, 32 nt, Human
auuaauucuugguuaaggaaugaaucaacgaa

SEQ ID NO: 72407 - RNA, 32 nt, Human
auuaauugaaauccuucucaaucuugcacccc

SEQ ID NO: 72408 - RNA, 32 nt, Human
auuaauugaacccaagaagggggcugugguaa

SEQ ID NO: 72409 - RNA, 31 nt, Human
auuaauuggguggaagauugggcaagaaguc

SEQ ID NO: 72410 - RNA, 32 nt, Human
auuaauuguaccacaugcuaauccugaagaga

SEQ ID NO: 72411 - RNA, 32 nt, Human
auuaauuucaaagcuuccucuggccagguaga

SEQ ID NO: 72412 - RNA, 32 nt, Human
auuaauuucuuauaaagcagcauaaccuuggc

SEQ ID NO: 72413 - RNA, 32 nt, Human
auuaauuugaaggugagagguaucauuuucuc

SEQ ID NO: 72414 - RNA, 32 nt, Human
auuaauuuugauacggagucucccucugucgu

SEQ ID NO: 72415 - RNA, 32 nt, Human
auuaauuuuuacuauuaaaacuucuuauauua

SEQ ID NO: 72416 - RNA, 32 nt, Human
auuacaaaaauuagcuggcaugguggugcaug

SEQ ID NO: 72417 - RNA, 32 nt, Human
auuacaaacagcugggacccugaggggcagua

SEQ ID NO: 72418 - RNA, 32 nt, Human
auuacaaacccauucauuacauaguauaagga

SEQ ID NO: 72419 - RNA, 32 nt, Human
auuacaaaguacccacauucaggaugaaguau

SEQ ID NO: 72420 - RNA, 32 nt, Human
auuacaaccuggcuuuuuauuguauuuguuuc

SEQ ID NO: 72421 - RNA, 32 nt, Human
auuacaagcaugagccaccacaccuggccuau

SEQ ID NO: 72422 - RNA, 32 nt, Human
auuacaagcaugagccaccacaccuggccugu

SEQ ID NO: 72423 - RNA, 32 nt, Human
auuacaagcaugcgucaccacagcaggcccaa

SEQ ID NO: 72424 - RNA, 32 nt, Human
auuacaagccuugugcucuuuaucucuacauu

SEQ ID NO: 72425 - RNA, 32 nt, Human
auuacaagggugagccaccaugcccggccgua

SEQ ID NO: 72426 - RNA, 32 nt, Human
auuacaagugcccaccaccaugcccagcuaau

SEQ ID NO: 72427 - RNA, 32 nt, Human
auuacaagugugagccaccacacccagccuaa

SEQ ID NO: 72428 - RNA, 32 nt, Human
auuacaagugugagccaccgcgcccggcccag

SEQ ID NO: 72429 - RNA, 32 nt, Human
auuacaagugugagccacugugcccagcuuuu

SEQ ID NO: 72430 - RNA, 32 nt, Human
auuacaauaaacauacuaagacaauggguugc

SEQ ID NO: 72431 - RNA, 32 nt, Human
auuacaauggcagaaacagacagaaagggugg

SEQ ID NO: 72432 - RNA, 32 nt, Human
auuacaaugggcugugcucuccaccucagcau

SEQ ID NO: 72433 - RNA, 32 nt, Human
auuacaauuuuuaauaaauugaauagguagua

SEQ ID NO: 72434 - RNA, 32 nt, Human
auuacacaacaguuuguuaauucuucauucuu

SEQ ID NO: 72435 - RNA, 32 nt, Human
auuacacaaguccaguuauacacuuuauuuuu

SEQ ID NO: 72436 - RNA, 32 nt, Human
auuacacacaugcacacacauaugcacacaca

SEQ ID NO: 72437 - RNA, 32 nt, Human
auuacacaguucucuuucuccaaagggcaaga

SEQ ID NO: 72438 - RNA, 32 nt, Human
auuacaccacugcacuucagucugugugacug

SEQ ID NO: 72439 - RNA, 32 nt, Human
auuacaccacugcacuugagccugggcagcag

SEQ ID NO: 72440 - RNA, 32 nt, Human
auuacaccauugcauuccagccuaggcaacag

SEQ ID NO: 72441 - RNA, 32 nt, Human
auuacaccauugcauuccagccugggcaacag

SEQ ID NO: 72442 - RNA, 32 nt, Human
auuacaccccugcacuccagccugggcggcag

SEQ ID NO: 72443 - RNA, 32 nt, Human
auuacaccccuggacuccagcuugggugacac

SEQ ID NO: 72444 - RNA, 32 nt, Human
auuacaccugccuguccuuccugggccccucc

SEQ ID NO: 72445 - RNA, 32 nt, Human
auuacacgcgugagccacugugcccagccgau

SEQ ID NO: 72446 - RNA, 32 nt, Human
auuacacgugcccaccaccaugcccagcuaau

SEQ ID NO: 72447 - RNA, 32 nt, Human
auuacacuacucagcacaagacagguuuaauc

SEQ ID NO: 72448 - RNA, 32 nt, Human
auuacacuccagccuggcugacagugcaagac

SEQ ID NO: 72449 - RNA, 32 nt, Human
auuacacuccagccugggcgaaagggugagac

SEQ ID NO: 72450 - RNA, 32 nt, Human
auuacacuccagccugggugacagagugagac

SEQ ID NO: 72451 - RNA, 32 nt, Human
auuacacugucaaauauaaaauauuguuauau

SEQ ID NO: 72452 - RNA, 32 nt, Human
auuacacuuucacuagaagcccaaaccucagc

SEQ ID NO: 72453 - RNA, 32 nt, Human
auuacagaagaggacgccuccacccacaggaa

SEQ ID NO: 72454 - RNA, 32 nt, Human
auuacagacaugugccaccacgcccagcuaau

SEQ ID NO: 72455 - RNA, 32 nt, Human
auuacagaccugagccaccacaccugggcaac

SEQ ID NO: 72456 - RNA, 32 nt, Human
auuacagacgccugccaccacgcacagcuaac

SEQ ID NO: 72457 - RNA, 32 nt, Human
auuacagacgccugccaucacgcccagcucaa

SEQ ID NO: 72458 - RNA, 32 nt, Human
auuacagacuucuuccucuagacuuggagggc

SEQ ID NO: 72459 - RNA, 32 nt, Human
auuacagagcucaccucacaccugaguuaaga

SEQ ID NO: 72460 - RNA, 32 nt, Human
auuacagaugggagccaccacgcccagcccag

SEQ ID NO: 72461 - RNA, 32 nt, Human
auuacagauguaugcuaccacgcccagguagu

SEQ ID NO: 72462 - RNA, 32 nt, Human
auuacagaugugagccaacgcacccggcuaca

SEQ ID NO: 72463 - RNA, 32 nt, Human
auuacagaugugagccaccacaccaggccggu

SEQ ID NO: 72464 - RNA, 32 nt, Human
auuacagaugugagccaccacgcccagccaga

SEQ ID NO: 72465 - RNA, 32 nt, Human
auuacagaugugagccaccacgcccggccuuu

SEQ ID NO: 72466 - RNA, 32 nt, Human
auuacagaugugagccaccaugcccagcuuuc

SEQ ID NO: 72467 - RNA, 32 nt, Human
auuacagaugugagccaccgcacccagccuga

SEQ ID NO: 72468 - RNA, 32 nt, Human
auuacagaugugagccaccguacccagcuaau

SEQ ID NO: 72469 - RNA, 32 nt, Human
auuacagaugugagccaccgugccuagccaag

SEQ ID NO: 72470 - RNA, 32 nt, Human
auuacagaugugagccacugcaccuggcaaga

SEQ ID NO: 72471 - RNA, 32 nt, Human
auuacagaugugagccacugcaccuggcccca

SEQ ID NO: 72472 - RNA, 32 nt, Human
auuacagaugugagccauggugcccggcuacu

SEQ ID NO: 72473 - RNA, 32 nt, Human
auuacagaugugagccauuguggccuaagaug

SEQ ID NO: 72474 - RNA, 32 nt, Human
auuacagaugugagccgccgcgcccagacagu

SEQ ID NO: 72475 - RNA, 32 nt, Human
auuacagaugugagccugugccuggcuggucu

SEQ ID NO: 72476 - RNA, 32 nt, Human
auuacagauuugcagacuauagaaagaguuuc

SEQ ID NO: 72477 - RNA, 32 nt, Human
auuacagcacacugaguaaccacacugggcuc

SEQ ID NO: 72478 - RNA, 32 nt, Human
auuacagcacagaaaacuguuagugacugguu

SEQ ID NO: 72479 - RNA, 32 nt, Human
auuacagcauaaucacaccucauuucuuucau

SEQ ID NO: 72480 - RNA, 32 nt, Human
auuacagccagcuuugccaucuguggaaauag

SEQ ID NO: 72481 - RNA, 32 nt, Human
auuacagccaugcggcaccauucccggcuaau

SEQ ID NO: 72482 - RNA, 32 nt, Human
auuacagccuggcccacuggccucggugguac

SEQ ID NO: 72483 - RNA, 32 nt, Human
auuacagccuggugcagagcaagacucugucu

SEQ ID NO: 72484 - RNA, 32 nt, Human
auuacagcugugagccaccgugccuggccuuu

SEQ ID NO: 72485 - RNA, 32 nt, Human
auuacagcugugagccacugcacccggccggg

SEQ ID NO: 72486 - RNA, 32 nt, Human
auuacaggaacgcgccaccacgcccagcuaau

SEQ ID NO: 72487 - RNA, 32 nt, Human
auuacaggagagaacgagcaccugccagcacc

SEQ ID NO: 72488 - RNA, 32 nt, Human
auuacaggagcaagagaaagaagauaauuuaa

SEQ ID NO: 72489 - RNA, 32 nt, Human
auuacaggagugagccaccaugcccggcuggc

SEQ ID NO: 72490 - RNA, 32 nt, Human
auuacaggagugagccaccgcgccuggucccc

SEQ ID NO: 72491 - RNA, 32 nt, Human
auuacaggagugagccaccgugcccggccuaa

SEQ ID NO: 72492 - RNA, 32 nt, Human
auuacaggagugagccacugcgccuggcccac

SEQ ID NO: 72493 - RNA, 32 nt, Human
auuacaggcacacaccacaaugccuggcaaau

SEQ ID NO: 72494 - RNA, 32 nt, Human
auuacaggcacacaccaccacgcccagcuaau

SEQ ID NO: 72495 - RNA, 32 nt, Human
auuacaggcacacaccaccacgcccagcuagu

SEQ ID NO: 72496 - RNA, 32 nt, Human
auuacaggcacacaccaccacgcuugguuaau

SEQ ID NO: 72497 - RNA, 32 nt, Human
auuacaggcacccaccaccacgcccagcuaau

SEQ ID NO: 72498 - RNA, 32 nt, Human
auuacaggcacccgccaccacgcccagcuaau

SEQ ID NO: 72499 - RNA, 32 nt, Human
auuacaggcaccugacaucacgcccagcuaau

SEQ ID NO: 72500 - RNA, 32 nt, Human
auuacaggcaccugccaccacgcccagcuaau

SEQ ID NO: 72501 - RNA, 32 nt, Human
auuacaggcaccugucaccacacccagcuaau

SEQ ID NO: 72502 - RNA, 32 nt, Human
auuacaggcacgagccacugugcccggccauc

SEQ ID NO: 72503 - RNA, 32 nt, Human
auuacaggcacgagccacugugccuggccuca

SEQ ID NO: 72504 - RNA, 32 nt, Human
auuacaggcacgugccaccacgcccagacuaa

SEQ ID NO: 72505 - RNA, 32 nt, Human
auuacaggcacgugccaucacgcccagcuaau

SEQ ID NO: 72506 - RNA, 32 nt, Human
auuacaggcagacaccaucacgcccagcuaau

SEQ ID NO: 72507 - RNA, 32 nt, Human
auuacaggcaggagccacugagcccagccaag

SEQ ID NO: 72508 - RNA, 32 nt, Human
auuacaggcauaaaccacaaugccuggccccu

SEQ ID NO: 72509 - RNA, 32 nt, Human
auuacaggcauaagccacugagcccagcccua

SEQ ID NO: 72510 - RNA, 32 nt, Human
auuacaggcauaagccacugcacccagcccac

SEQ ID NO: 72511 - RNA, 32 nt, Human
auuacaggcauaagccacugcacccagcugaa

SEQ ID NO: 72512 - RNA, 32 nt, Human
auuacaggcauaagccacugugcccaggcaga

SEQ ID NO: 72513 - RNA, 32 nt, Human
auuacaggcauccgccaccacgcccagcuaau

SEQ ID NO: 72514 - RNA, 32 nt, Human
auuacaggcaugagccacagcacccggcccag

SEQ ID NO: 72515 - RNA, 32 nt, Human
auuacaggcaugagccacagugcccggccaag

SEQ ID NO: 72516 - RNA, 32 nt, Human
auuacaggcaugagccaccaaacccagcccag

SEQ ID NO: 72517 - RNA, 32 nt, Human
auuacaggcaugagccaccacacccacacaag

SEQ ID NO: 72518 - RNA, 32 nt, Human
auuacaggcaugagccaccacacccagccccu

SEQ ID NO: 72519 - RNA, 32 nt, Human
auuacaggcaugagccaccacacccagcccgg

SEQ ID NO: 72520 - RNA, 32 nt, Human
auuacaggcaugagccaccacacccagccuuu

SEQ ID NO: 72521 - RNA, 32 nt, Human
auuacaggcaugagccaccacacccagcgaga

SEQ ID NO: 72522 - RNA, 32 nt, Human
auuacaggcaugagccaccacaccuggauugc

SEQ ID NO: 72523 - RNA, 32 nt, Human
auuacaggcaugagccaccacaccuggcaagg

SEQ ID NO: 72524 - RNA, 32 nt, Human
auuacaggcaugagccaccacaccuggcccca

SEQ ID NO: 72525 - RNA, 32 nt, Human
auuacaggcaugagccaccacgcccagccaaa

SEQ ID NO: 72526 - RNA, 32 nt, Human
auuacaggcaugagccaccacgcccagccauu

SEQ ID NO: 72527 - RNA, 32 nt, Human
auuacaggcaugagccaccacgcccagcccau

SEQ ID NO: 72528 - RNA, 32 nt, Human
auuacaggcaugagccaccacgcccagccuaa

SEQ ID NO: 72529 - RNA, 32 nt, Human
auuacaggcaugagccaccacgcccagccuau

SEQ ID NO: 72530 - RNA, 32 nt, Human
auuacaggcaugagccaccacgcccagccugu

SEQ ID NO: 72531 - RNA, 32 nt, Human
auuacaggcaugagccaccacgcccggaccau

SEQ ID NO: 72532 - RNA, 32 nt, Human
auuacaggcaugagccaccacgcccggccaaa

SEQ ID NO: 72533 - RNA, 32 nt, Human
auuacaggcaugagccaccacgcccggcccac

SEQ ID NO: 72534 - RNA, 32 nt, Human
auuacaggcaugagccaccacgcccggcuaga

SEQ ID NO: 72535 - RNA, 32 nt, Human
auuacaggcaugagccaccaggcccggccuua

SEQ ID NO: 72536 - RNA, 32 nt, Human
auuacaggcaugagccaccaugcccagccaaa

SEQ ID NO: 72537 - RNA, 32 nt, Human
auuacaggcaugagccaccaugcccagccaau

SEQ ID NO: 72538 - RNA, 32 nt, Human
auuacaggcaugagccaccaugcccagcccac

SEQ ID NO: 72539 - RNA, 32 nt, Human
auuacaggcaugagccaccaugcccagcccuc

SEQ ID NO: 72540 - RNA, 32 nt, Human
auuacaggcaugagccaccaugcccagccucc

SEQ ID NO: 72541 - RNA, 32 nt, Human
auuacaggcaugagccaccaugcccagccuuu

SEQ ID NO: 72542 - RNA, 32 nt, Human
auuacaggcaugagccaccaugcccagcugac

SEQ ID NO: 72543 - RNA, 32 nt, Human
auuacaggcaugagccaccaugcccagcugcu

SEQ ID NO: 72544 - RNA, 32 nt, Human
auuacaggcaugagccaccaugcccagucgau

SEQ ID NO: 72545 - RNA, 32 nt, Human
auuacaggcaugagccaccaugcccggcccag

SEQ ID NO: 72546 - RNA, 32 nt, Human
auuacaggcaugagccaccaugcccggccccu

SEQ ID NO: 72547 - RNA, 32 nt, Human
auuacaggcaugagccaccaugcccggccuaa

SEQ ID NO: 72548 - RNA, 32 nt, Human
auuacaggcaugagccaccaugcccggccuuc

SEQ ID NO: 72549 - RNA, 32 nt, Human
auuacaggcaugagccaccaugcccggcuguu

SEQ ID NO: 72550 - RNA, 32 nt, Human
auuacaggcaugagccaccaugccuagccagc

SEQ ID NO: 72551 - RNA, 32 nt, Human
auuacaggcaugagccaccaugccuagcccag

SEQ ID NO: 72552 - RNA, 32 nt, Human
auuacaggcaugagccaccaugccuggcccag

SEQ ID NO: 72553 - RNA, 32 nt, Human
auuacaggcaugagccaccccgcccagcugag

SEQ ID NO: 72554 - RNA, 32 nt, Human
auuacaggcaugagccaccgagcucagccucc

SEQ ID NO: 72555 - RNA, 32 nt, Human
auuacaggcaugagccaccgcacccagcaaga

SEQ ID NO: 72556 - RNA, 32 nt, Human
auuacaggcaugagccaccgcacccagcccau

SEQ ID NO: 72557 - RNA, 32 nt, Human
auuacaggcaugagccaccgcacccagccuau

SEQ ID NO: 72558 - RNA, 32 nt, Human
auuacaggcaugagccaccgcacccagccugc

SEQ ID NO: 72559 - RNA, 32 nt, Human
auuacaggcaugagccaccgcacccagccugg

SEQ ID NO: 72560 - RNA, 32 nt, Human
auuacaggcaugagccaccgcaccugacccag

SEQ ID NO: 72561 - RNA, 32 nt, Human
auuacaggcaugagccaccgcgccaggccaag

SEQ ID NO: 72562 - RNA, 32 nt, Human
auuacaggcaugagccaccgcgcccagccaag

SEQ ID NO: 72563 - RNA, 32 nt, Human
auuacaggcaugagccaccgcgcccagccuaa

SEQ ID NO: 72564 - RNA, 32 nt, Human
auuacaggcaugagccaccgcgcccagcugcc

SEQ ID NO: 72565 - RNA, 32 nt, Human
auuacaggcaugagccaccgcgcccggccacg

SEQ ID NO: 72566 - RNA, 32 nt, Human
auuacaggcaugagccaccgcgcccggccaga

SEQ ID NO: 72567 - RNA, 32 nt, Human
auuacaggcaugagccaccgcgcccggcccaa

SEQ ID NO: 72568 - RNA, 32 nt, Human
auuacaggcaugagccaccgcgcccggcccca

SEQ ID NO: 72569 - RNA, 32 nt, Human
auuacaggcaugagccaccgcgcccggccuca

SEQ ID NO: 72570 - RNA, 32 nt, Human
auuacaggcaugagccaccgcgcccggccugu

SEQ ID NO: 72571 - RNA, 32 nt, Human
auuacaggcaugagccaccgcucccagccuuu

SEQ ID NO: 72572 - RNA, 32 nt, Human
auuacaggcaugagccaccgugccaggccaac

SEQ ID NO: 72573 - RNA, 32 nt, Human
auuacaggcaugagccaccgugcccagccaaa

SEQ ID NO: 72574 - RNA, 32 nt, Human
auuacaggcaugagccaccgugcccagccaag

SEQ ID NO: 72575 - RNA, 32 nt, Human
auuacaggcaugagccaccgugcccagccagg

SEQ ID NO: 72576 - RNA, 32 nt, Human
auuacaggcaugagccaccgugcccagcccaa

SEQ ID NO: 72577 - RNA, 32 nt, Human
auuacaggcaugagccaccgugcccagccuac

SEQ ID NO: 72578 - RNA, 32 nt, Human
auuacaggcaugagccaccgugcccagccuau

SEQ ID NO: 72579 - RNA, 32 nt, Human
auuacaggcaugagccaccgugcccggcccuu

SEQ ID NO: 72580 - RNA, 32 nt, Human
auuacaggcaugagccaccgugcccggccuca

SEQ ID NO: 72581 - RNA, 32 nt, Human
auuacaggcaugagccaccgugcccggcugua

SEQ ID NO: 72582 - RNA, 32 nt, Human
auuacaggcaugagccaccgugcccggcuuca

SEQ ID NO: 72583 - RNA, 32 nt, Human
auuacaggcaugagccaccucacccagcauuu

SEQ ID NO: 72584 - RNA, 32 nt, Human
auuacaggcaugagccaccucacccagcuccg

SEQ ID NO: 72585 - RNA, 32 nt, Human
auuacaggcaugagccaccucgccuagcccac

SEQ ID NO: 72586 - RNA, 32 nt, Human
auuacaggcaugagccaccugcccagccaugu

SEQ ID NO: 72587 - RNA, 32 nt, Human
auuacaggcaugagccacggcacccagccuca

SEQ ID NO: 72588 - RNA, 32 nt, Human
auuacaggcaugagccacuacacccagccgau

SEQ ID NO: 72589 - RNA, 32 nt, Human
auuacaggcaugagccacuacgccuggccaag

SEQ ID NO: 72590 - RNA, 32 nt, Human
auuacaggcaugagccacugagcccuacuuuu

SEQ ID NO: 72591 - RNA, 32 nt, Human
auuacaggcaugagccacugcacccagacuag

SEQ ID NO: 72592 - RNA, 32 nt, Human
auucuuccugcugaaguaaagcagaaaguacu

SEQ ID NO: 72593 - RNA, 32 nt, Human
auucuuccuuccaggaugguguauggugaggc

SEQ ID NO: 72594 - RNA, 32 nt, Human
auucuuccuugaccucacagguggugguaagg

SEQ ID NO: 72595 - RNA, 32 nt, Human
auucuucuaccuaacccacugcuuuuccccag

SEQ ID NO: 72596 - RNA, 31 nt, Human
auucuucuacuuuucuguauauucagcaggg

SEQ ID NO: 72597 - RNA, 32 nt, Human
auucuucuccuguugguuauucugagucugac

SEQ ID NO: 72598 - RNA, 32 nt, Human
auucuucucucccaccccuucuucucucuucu

SEQ ID NO: 72599 - RNA, 32 nt, Human
auucuucucuguuccucuuugccuccucccca

SEQ ID NO: 72600 - RNA, 32 nt, Human
auucuucucuuccccucucuucccuuuccucu

SEQ ID NO: 72601 - RNA, 32 nt, Human
auucuucugaaaaagacuuucuucucauccag

SEQ ID NO: 72602 - RNA, 32 nt, Human
auucuucugcaggaugugucugucuuugucac

SEQ ID NO: 72603 - RNA, 32 nt, Human
auucuucugcauuauaguaagagaaaaccauu

SEQ ID NO: 72604 - RNA, 32 nt, Human
auucuucugcauuuuuggauuccacgugcuua

SEQ ID NO: 72605 - RNA, 32 nt, Human
auucuucugccucagccuucugaguagcuggg

SEQ ID NO: 72606 - RNA, 32 nt, Human
auucuucuggcuuucucucugucgaggacuug

SEQ ID NO: 72607 - RNA, 32 nt, Human
auucuucugggaaacuuugaggcacugaggca

SEQ ID NO: 72608 - RNA, 32 nt, Human
auucuucuguggggcgggcuucccagggugcu

SEQ ID NO: 72609 - RNA, 32 nt, Human
auucuucuuaguccucaccucuuccuugucuu

SEQ ID NO: 72610 - RNA, 32 nt, Human
auucuucuucuccagauugucucuagcauaau

SEQ ID NO: 72611 - RNA, 32 nt, Human
auucuugaaacuuggcuuuccauaacauggua

SEQ ID NO: 72612 - RNA, 32 nt, Human
auucuugaacccaggagacggaaguugcagug

SEQ ID NO: 72613 - RNA, 32 nt, Human
auucuugaagucagggagaccaagaacccacc

SEQ ID NO: 72614 - RNA, 32 nt, Human
auucuugaauuucugcuagaaauaaguagguu

SEQ ID NO: 72615 - RNA, 32 nt, Human
auucuugacagagagaaauaagaucacuuaga

SEQ ID NO: 72616 - RNA, 32 nt, Human
auucuugagaaaaggacccugagaaggagguu

SEQ ID NO: 72617 - RNA, 21 nt, Human
auucuugagagcauugggaua

SEQ ID NO: 72618 - RNA, 32 nt, Human
auucuugagcaaaaggaggggaagagacaauc

SEQ ID NO: 72619 - RNA, 32 nt, Human
auucuugaggucuugagggaauagugaaacac

SEQ ID NO: 72620 - RNA, 32 nt, Human
auucuugcagagccauagcaggacauguuaaa

SEQ ID NO: 72621 - RNA, 32 nt, Human
auucuugcagcuaagcaagacagccauaugau

SEQ ID NO: 72622 - RNA, 32 nt, Human
auucuugccuuauaccucuuucucucuccugu

SEQ ID NO: 72623 - RNA, 32 nt, Human
auucuugcugggacaacaaaauugggaagcgg

SEQ ID NO: 72624 - RNA, 32 nt, Human
auucuuggcagugcuuuuucuuuagcauucug

SEQ ID NO: 72625 - RNA, 32 nt, Human
auucuuggcauugcaaccuccauuucuagcuc

SEQ ID NO: 72626 - RNA, 32 nt, Human
auucuuggccucugucccauauccaauagaga

SEQ ID NO: 72627 - RNA, 32 nt, Human
auucuuggccugggugguagaggagauauccu

SEQ ID NO: 72628 - RNA, 32 nt, Human
auucuugggaagacacuuugcuccucaucuuu

SEQ ID NO: 72629 - RNA, 32 nt, Human
auucuugguauuccuccuggauggaaaggcug

SEQ ID NO: 72630 - RNA, 32 nt, Human
auucuuguaucagauccaaagcucuauuguac

SEQ ID NO: 72631 - RNA, 32 nt, Human
auucuugucacccagacuggagugcgauggca

SEQ ID NO: 72632 - RNA, 31 nt, Human
auucuugucauuuuuccucaugcagauaaca

SEQ ID NO: 72633 - RNA, 32 nt, Human
auucuugugagacugcggucagacaguggcuu

SEQ ID NO: 72634 - RNA, 32 nt, Human
auucuugugaguccuaauuccuccuuauccac

SEQ ID NO: 72635 - RNA, 32 nt, Human
auucuuguguuuuuauaaagugcccuuuucuc

SEQ ID NO: 72636 - RNA, 32 nt, Human
auucuuguuacuuauuauaggcauuuucaggc

SEQ ID NO: 72637 - RNA, 32 nt, Human
auucuuguugccgaggcuggagugcaauggcg

SEQ ID NO: 72638 - RNA, 32 nt, Human
auucuuguugccuaggcuggagugcaauggcg

SEQ ID NO: 72639 - RNA, 32 nt, Human
auucuuguugcuuuuuaaaaaucaggcuaauc

SEQ ID NO: 72640 - RNA, 32 nt, Human
auucuuuaagggaaaagaaaaauguucugaaa

SEQ ID NO: 72641 - RNA, 32 nt, Human
auucuuuacagaaccuuguagugccaaaaacu

SEQ ID NO: 72642 - RNA, 32 nt, Human
auucuuuacugcacucagauuuaagccuuaca

SEQ ID NO: 72643 - RNA, 32 nt, Human
auucuuuagaaacuaacaaagccacauuuacu

SEQ ID NO: 72644 - RNA, 32 nt, Human
auucuuuaguaaagacaggguuucuccauguu

SEQ ID NO: 72645 - RNA, 32 nt, Human
auucuuuauacuucucuucauucuuuuaaggc

SEQ ID NO: 72646 - RNA, 32 nt, Human
auucuuuauaugucuuuuaaagcacaauuuaa

SEQ ID NO: 72647 - RNA, 21 nt, Human
auucuuuauuucucucagggu

SEQ ID NO: 72648 - RNA, 32 nt, Human
auucuuucacccccucuccuccugcucagcug

SEQ ID NO: 72649 - RNA, 32 nt, Human
auucuuucacucccagcugcagcugguagccg

SEQ ID NO: 72650 - RNA, 23 nt, Human
auucuuucagcuaguuugaguga

SEQ ID NO: 72651 - RNA, 32 nt, Human
auucuuucauuucccccuuccccauuccuuua

SEQ ID NO: 72652 - RNA, 32 nt, Human
auucuuucauuucccccuucccuauuccuuua

SEQ ID NO: 72653 - RNA, 21 nt, Human
auucuuuccagacagcauccu

SEQ ID NO: 72654 - RNA, 32 nt, Human
auucuuuccauagguagaagagaaaguugauu

SEQ ID NO: 72655 - RNA, 32 nt, Human
auucuuuccuaaagaacauuuuuagcagcaaa

SEQ ID NO: 72656 - RNA, 32 nt, Human
auucuuucugugacuauuuuguuccuguagac

SEQ ID NO: 72657 - RNA, 32 nt, Human
auucuuucuuuaucaucucccuccaaagccuc

SEQ ID NO: 72658 - RNA, 32 nt, Human
auucuuucuuucugccaagaaacaaaguuuug

SEQ ID NO: 72659 - RNA, 32 nt, Human
auucuuugaacccaggaggcagagguugcagu

SEQ ID NO: 72660 - RNA, 23 nt, Human
auucuuugaacuuauuuccacuu

SEQ ID NO: 72661 - RNA, 32 nt, Human
auucuuugccugccuucccuucauccuauccu

SEQ ID NO: 72662 - RNA, 30 nt, Human
auucuuuggcaaucagugcuccuguaaguc

SEQ ID NO: 72663 - RNA, 32 nt, Human
auucuuugguaucuaggaaucugcgacuuccc

SEQ ID NO: 72664 - RNA, 32 nt, Human
auucuuugucccucagcuucucagaguccggc

SEQ ID NO: 72665 - RNA, 32 nt, Human
auucuuuguggaugagaaaagauuugagucuu

SEQ ID NO: 72666 - RNA, 32 nt, Human
auucuuuuaacuucuaccuccuggcucuaguu

SEQ ID NO: 72667 - RNA, 32 nt, Human
auucuuuucaagagcugggaugauaugcauaa

SEQ ID NO: 72668 - RNA, 32 nt, Human
auucuuuucaaguaacagcagcacuugugaaa

SEQ ID NO: 72669 - RNA, 32 nt, Human
auucuuuucaauggagcucaucuucuaucucu

SEQ ID NO: 72670 - RNA, 32 nt, Human
auucuuuuccacugcuugcagucuccaaugua

SEQ ID NO: 72671 - RNA, 32 nt, Human
auucuuuucccagaaaagagucuuugauucac

SEQ ID NO: 72672 - RNA, 32 nt, Human
auucuuuucccuugacguuuacuuucaaguaa

SEQ ID NO: 72673 - RNA, 32 nt, Human
auucuuuuccuuaaaaugggaagauaaaggca

SEQ ID NO: 72674 - RNA, 32 nt, Human
auucuuuucuccuccucucuccuuccugcugu

SEQ ID NO: 72675 - RNA, 32 nt, Human
auucuuuucuucuuuuuccuauauguccugga

SEQ ID NO: 72676 - RNA, 32 nt, Human
auucuuuugacaacauuaaauauuucugugag

SEQ ID NO: 72677 - RNA, 32 nt, Human
auucuuuugcccaggcuggagugcaguggcac

SEQ ID NO: 72678 - RNA, 32 nt, Human
auucuuuuggaaauuagagguggaaacacacu

SEQ ID NO: 72679 - RNA, 32 nt, Human
auucuuuugugccuggcuucuuucucucagcc

SEQ ID NO: 72680 - RNA, 32 nt, Human
auucuuuuucccuugcccccaaagccguggag

SEQ ID NO: 72681 - RNA, 32 nt, Human
auucuuuuucuuuauaaauuacccagguucug

SEQ ID NO: 72682 - RNA, 32 nt, Human
auucuuuuugggcucccaagaacagggagaua

SEQ ID NO: 72683 - RNA, 32 nt, Human
auucuuuuugggcucccgagaacagggagaua

SEQ ID NO: 72684 - RNA, 32 nt, Human
auucuuuuugguguauuuuugccuuccuguug

SEQ ID NO: 72685 - RNA, 32 nt, Human
auugaaaaaccagcuuuacugccgguucuugg

SEQ ID NO: 72686 - RNA, 32 nt, Human
auugaaaaaccucaguguaacuuuaauauauu

SEQ ID NO: 72687 - RNA, 32 nt, Human
auugaaaaacuaagaacaugaaaugucaagag

SEQ ID NO: 72688 - RNA, 32 nt, Human
auugaaaaauaaagaugucaauaaaaggagaa

SEQ ID NO: 72689 - RNA, 32 nt, Human
auugaaaagacaggagaaaagcaaacagaaac

SEQ ID NO: 72690 - RNA, 32 nt, Human
auugaaaagauaacauguaggccaggcagguc

SEQ ID NO: 72691 - RNA, 32 nt, Human
auugaaaagcagcacaagaacugugaaaacuu

SEQ ID NO: 72692 - RNA, 32 nt, Human
auugaaaaggaaaaccugucugagaaaaugcc

SEQ ID NO: 72693 - RNA, 32 nt, Human
auugaaaauaagagaaguaaucccagauaaua

SEQ ID NO: 72694 - RNA, 32 nt, Human
auugaaaauguuaauuacacacacaugcaugc

SEQ ID NO: 72695 - RNA, 32 nt, Human
auugaaacaagaaaggucucauucuuuaccuu

SEQ ID NO: 72696 - RNA, 32 nt, Human
auugaaaccuaaaggcauuuugaaugacauug

SEQ ID NO: 72697 - RNA, 32 nt, Human
auugaaacguguuucacugcacugguacaaau

SEQ ID NO: 72698 - RNA, 32 nt, Human
auugaaacuuuuucuguuaaaauaacauaaca

SEQ ID NO: 72699 - RNA, 32 nt, Human
auugaaagaaaaaucauagaaauaaguaaaau

SEQ ID NO: 72700 - RNA, 32 nt, Human
auugaaagacacacacccaggcaaccccugag

SEQ ID NO: 72701 - RNA, 32 nt, Human
auugaaagaggcuuccucuucucaggaagaag

SEQ ID NO: 72702 - RNA, 32 nt, Human
auugaaagaguauuugggaaauguggcaaugu

SEQ ID NO: 72703 - RNA, 32 nt, Human
auugaaagagucagcaccagcagaggcuacuc

SEQ ID NO: 72704 - RNA, 32 nt, Human
auugaaagcagaaaguucuacucucguaucug

SEQ ID NO: 72705 - RNA, 32 nt, Human
auugaaaggaggugggggauugagggagggac

SEQ ID NO: 72706 - RNA, 24 nt, Human
auugaaaguccacagucauauuca

SEQ ID NO: 72707 - RNA, 32 nt, Human
auugaaaguuuuucacauguuuucacuguaua

SEQ ID NO: 72708 - RNA, 23 nt, Human
auugaaauaaaauggaucugcca

SEQ ID NO: 72709 - RNA, 32 nt, Human
auugaaauaggcugggagagagcaauguuucu

SEQ ID NO: 72710 - RNA, 23 nt, Human
auugaaauauuugcucucugcca

SEQ ID NO: 72711 - RNA, 32 nt, Human
auugaaaugaagagaaauagccagcaggugau

SEQ ID NO: 72712 - RNA, 32 nt, Human
auugaaauggauguucucagguuguauuuauu

SEQ ID NO: 72713 - RNA, 32 nt, Human
auugaaaugguccaaguagacagcugcuuguu

SEQ ID NO: 72714 - RNA, 32 nt, Human
auugaaauuguacagguccauaauuucauuuu

SEQ ID NO: 72715 - RNA, 32 nt, Human
auugaacaaauggugccauaguuauuuuucuc

SEQ ID NO: 72716 - RNA, 32 nt, Human
auugaacaauaaaaacacuuggacacagggug

SEQ ID NO: 72717 - RNA, 32 nt, Human
auugaacagcugucuaugccaggcucuguaca

SEQ ID NO: 72718 - RNA, 32 nt, Human
auugaaccaaaccuagugcuucaaagcuccug

SEQ ID NO: 72719 - RNA, 32 nt, Human
auugaaccagaauucacccacccgggccugcc

SEQ ID NO: 72720 - RNA, 32 nt, Human
auugaacccaggaggcggagcuugcagugagc

SEQ ID NO: 72721 - RNA, 32 nt, Human
auugaacccaggagguggagguugcagugagc

SEQ ID NO: 72722 - RNA, 32 nt, Human
auugaacccgggaggcagagguugcacugagc

SEQ ID NO: 72723 - RNA, 32 nt, Human
auugaacccgggaggcggagcuuacagugagc

SEQ ID NO: 72724 - RNA, 32 nt, Human
auugaaccugcucaucuccaaggauccucucc

SEQ ID NO: 72725 - RNA, 32 nt, Human
auugaaccugggaggcggagguugcagugagc

SEQ ID NO: 72726 - RNA, 32 nt, Human
auugaaccugggaggcggagguuguagugagc

SEQ ID NO: 72727 - RNA, 32 nt, Human
auugaaccugggagguggagguugcauugagc

SEQ ID NO: 72728 - RNA, 32 nt, Human
auugaaccuuaaauaagaagugcuuuuaaugu

SEQ ID NO: 72729 - RNA, 32 nt, Human
auugaacuauuuaucugaguucccucugccgg

SEQ ID NO: 72730 - RNA, 32 nt, Human
auugaacuggggucaccuguguccuuucuuau

SEQ ID NO: 72731 - RNA, 32 nt, Human
auugaacuugaagcaucggauuacauguuugu

SEQ ID NO: 72732 - RNA, 32 nt, Human
auugaacuugccaaugguggaguguugguugg

SEQ ID NO: 72733 - RNA, 32 nt, Human
auugaacuugcccuccccuucuggccuuggug

SEQ ID NO: 72734 - RNA, 32 nt, Human
auugaagaaagaaacuuaaaauccagguuguu

SEQ ID NO: 72735 - RNA, 32 nt, Human
auugaagaaaugcaaagcuuccaggcuccacu

SEQ ID NO: 72736 - RNA, 32 nt, Human
auugaagaaaugcaggaucuggagcucaggac

SEQ ID NO: 72737 - RNA, 32 nt, Human
auugaagaacccaaggcucugagaguuaacua

SEQ ID NO: 72738 - RNA, 32 nt, Human
auugaagaauguuccuuucuucuggagaaagg

SEQ ID NO: 72739 - RNA, 32 nt, Human
auugaagaauucaccauuagaggacauuuagc

SEQ ID NO: 72740 - RNA, 32 nt, Human
auugaagacaaacacucaccaaaaagaaaaau

SEQ ID NO: 72741 - RNA, 32 nt, Human
auugaagagagggauaaaauucaggagcaagu

SEQ ID NO: 72742 - RNA, 32 nt, Human
auugaagcacagacugcagagcacuuguuaac

SEQ ID NO: 72743 - RNA, 32 nt, Human
auugaagcccagacauucuugcagcuuggacu

SEQ ID NO: 72744 - RNA, 32 nt, Human
auugaagccuuugccagccauucuuucccuuu

SEQ ID NO: 72745 - RNA, 32 nt, Human
auugaagcuagaccucuuccuuacaccauaua

SEQ ID NO: 72746 - RNA, 32 nt, Human
auugaaggaaagaaaaugcaucuucaaacauu

SEQ ID NO: 72747 - RNA, 32 nt, Human
auugaaggccuggaauuagcuuggggccaggg

SEQ ID NO: 72748 - RNA, 32 nt, Human
auugaaggcugacauggagaauguuuacuuuu

SEQ ID NO: 72749 - RNA, 32 nt, Human
auugaaggcuuaggggcuucacugcguucgca

SEQ ID NO: 72750 - RNA, 32 nt, Human
auugaaguggugcauaacauugccaaaauagu

SEQ ID NO: 72751 - RNA, 20 nt, Human
auugaauaacaugcaucuga

SEQ ID NO: 72752 - RNA, 32 nt, Human
auugaauaaggcaauauccuacucucaagcaa

SEQ ID NO: 72753 - RNA, 32 nt, Human
auugaauacuccugaauuuaccauguuacuug

SEQ ID NO: 72754 - RNA, 32 nt, Human
auugaauauaaaugccuaauuucauucuuugu

SEQ ID NO: 72755 - RNA, 32 nt, Human
auugaauauccagaaaagacuggaguuuaacu

SEQ ID NO: 72756 - RNA, 32 nt, Human
auugaauaugcacacaggcaugacacagguuu

SEQ ID NO: 72757 - RNA, 32 nt, Human
auugaauccaggcugaggauggaaggugugga

SEQ ID NO: 72758 - RNA, 32 nt, Human
auugaaugagacuucugcuacugugguuuccc

SEQ ID NO: 72759 - RNA, 32 nt, Human
auugaaugagggugagggcaucccugcugggg

SEQ ID NO: 72760 - RNA, 32 nt, Human
auugaaugaguauugagacugaggagaaugau

SEQ ID NO: 72761 - RNA, 32 nt, Human
auugaaugcuugccaugugccaggcacugugc

SEQ ID NO: 72762 - RNA, 32 nt, Human
auugaauuaauuugaggaugggauuauucuaa

SEQ ID NO: 72763 - RNA, 32 nt, Human
auugaauuaccacuccugauacagggcuuuau

SEQ ID NO: 72764 - RNA, 32 nt, Human
auugaauuuaacaaugcgaaugguagucuaac

SEQ ID NO: 72765 - RNA, 32 nt, Human
auugaauuucuuugggggaaucuauguuuuac

SEQ ID NO: 72766 - RNA, 32 nt, Human
auugaauuuuauaauggaacagaacauuggua

SEQ ID NO: 72767 - RNA, 32 nt, Human
auugacaaaagcugugcaugaagaacugccuu

SEQ ID NO: 72768 - RNA, 32 nt, Human
auugacaaaaugugucugcugaaaugcugagg

SEQ ID NO: 72769 - RNA, 32 nt, Human
auugacaaggcaaauuucaugggugaguugga

SEQ ID NO: 72770 - RNA, 32 nt, Human
auugacaauucccacauucaaaacauucucau

SEQ ID NO: 72771 - RNA, 32 nt, Human
auugacacauggacucugccugggcauguuag

SEQ ID NO: 72772 - RNA, 32 nt, Human
auugacacauucauuuuucuuugcuuauuuga

SEQ ID NO: 72773 - RNA, 32 nt, Human
auugacacgugcugggauaggggcugcagaau

SEQ ID NO: 72774 - RNA, 32 nt, Human
auugacagccuccaucccugucccccaucuug

SEQ ID NO: 72775 - RNA, 32 nt, Human
auugacagcugaacugagagaccaucacccac

SEQ ID NO: 72776 - RNA, 32 nt, Human
auugacaguuuugcacagguucuugaaaacgu

SEQ ID NO: 72777 - RNA, 32 nt, Human
auugacauccucccccuacacucccucucuga

SEQ ID NO: 72778 - RNA, 32 nt, Human
auugacaugcuaaaacuuucuaagacaggauu

SEQ ID NO: 72779 - RNA, 32 nt, Human
auugacauguacacagaacauuuuaaaacuuu

SEQ ID NO: 72780 - RNA, 32 nt, Human
auugacauguacagagaacuaacacuauuuua

SEQ ID NO: 72781 - RNA, 32 nt, Human
auugacauuagagugaaaacuccuuccuuugg

SEQ ID NO: 72782 - RNA, 32 nt, Human
auugaccaaucagcaugagcuuccuccccucu

SEQ ID NO: 72783 - RNA, 32 nt, Human
auugaccagaguaucuuuuacugauaugacca

SEQ ID NO: 72784 - RNA, 32 nt, Human
auugaccagguaacagugguuacccuagaagc

SEQ ID NO: 72785 - RNA, 32 nt, Human
auugaccaucugucuccagccaggccaccccu

SEQ ID NO: 72786 - RNA, 32 nt, Human
auugacccauagcacacacauacacaccacca

SEQ ID NO: 72787 - RNA, 32 nt, Human
auugaccgaagccacagggcagcauggaaguu

SEQ ID NO: 72788 - RNA, 32 nt, Human
auugaccggagcauuuacaggccagccuagua

SEQ ID NO: 72789 - RNA, 32 nt, Human
auugaccucagcugcacauuccuggccccggg

SEQ ID NO: 72790 - RNA, 32 nt, Human
auugaccuccacccaccugccccauguccacu

SEQ ID NO: 72791 - RNA, 32 nt, Human
auugaccugggagcaaggugcuaauucugugg

SEQ ID NO: 72792 - RNA, 32 nt, Human
auugaccugggggcaaacuuuccucuugaaug

SEQ ID NO: 72793 - RNA, 32 nt, Human
auugaccuuugucuaauaggaguuuuaaguau

SEQ ID NO: 72794 - RNA, 32 nt, Human
auugacgcaagccuggagaggagcccggggag

SEQ ID NO: 72795 - RNA, 32 nt, Human
auugacgugggccagccuccuugagacacacc

SEQ ID NO: 72796 - RNA, 32 nt, Human
auugacguuagcugccccauugccucuaaguu

SEQ ID NO: 72797 - RNA, 32 nt, Human
auugacuaauuugagccacauucccaacucua

SEQ ID NO: 72798 - RNA, 21 nt, Human
auugacuacuaaaggcaguuc

SEQ ID NO: 72799 - RNA, 32 nt, Human
auugacuagauggaccauugugccaguugcca

SEQ ID NO: 72800 - RNA, 32 nt, Human
auugacuauccagcuguuacaagagcagucga

SEQ ID NO: 72801 - RNA, 32 nt, Human
auugacucagaaugacacauuuuggcaccacg

SEQ ID NO: 72802 - RNA, 32 nt, Human
auugacucaucaucugucaguaaugagaggau

SEQ ID NO: 72803 - RNA, 32 nt, Human
auugacucuacuaaaauaacaauguuucaguc

SEQ ID NO: 72804 - RNA, 32 nt, Human
auugacucucacacugaaucagcugcugacug

SEQ ID NO: 72805 - RNA, 32 nt, Human
auugacucucccagguuuccagcuugcaacug

SEQ ID NO: 72806 - RNA, 32 nt, Human
auugacucucucuuugauaacuaagcaaaugg

SEQ ID NO: 72807 - RNA, 32 nt, Human
auugacugaaggagggccaagauggaaacaga

SEQ ID NO: 72808 - RNA, 32 nt, Human
auugacugaugaagacauaaagcucuauguuu

SEQ ID NO: 72809 - RNA, 32 nt, Human
auugacugaugccagcucugugccagacacau

SEQ ID NO: 72810 - RNA, 32 nt, Human
auugacugggaaaccugagugagacccagcaa

SEQ ID NO: 72811 - RNA, 32 nt, Human
auugacuggggucuccuggaccauucuuguga

SEQ ID NO: 72812 - RNA, 32 nt, Human
auugacugucaugggauugcagugcuugcauu

SEQ ID NO: 72813 - RNA, 32 nt, Human
auugacuguccacccagccuugcuguuaggca

SEQ ID NO: 72814 - RNA, 32 nt, Human
auugacuucagaaacuuuuucuaaauuauaaa

SEQ ID NO: 72815 - RNA, 32 nt, Human
auugacuugaaugacaggcaaaggagggugga

SEQ ID NO: 72816 - RNA, 32 nt, Human
auugacuuucccaccagaugcugaaaaugucc

SEQ ID NO: 72817 - RNA, 32 nt, Human
auugacuuucucuuacuugcuguacuaucagc

SEQ ID NO: 72818 - RNA, 32 nt, Human
auugacuuucuuagaugugaucaugacagucu

SEQ ID NO: 72819 - RNA, 32 nt, Human
auugagaaaaggaacauaugcauuuuagcuuu

SEQ ID NO: 72820 - RNA, 32 nt, Human
auugagaaaaugcagaagaucgugcagacaga

SEQ ID NO: 72821 - RNA, 32 nt, Human
auugagaaaccaggacucuucccagcccuccu

SEQ ID NO: 72822 - RNA, 32 nt, Human
auugagaaaucguaagucuauacacauuucuu

SEQ ID NO: 72823 - RNA, 32 nt, Human
auugagaacccugcaucuugcacuuugggaau

SEQ ID NO: 72824 - RNA, 32 nt, Human
auugagaagaaauccaaucucaguccuggauu

SEQ ID NO: 72825 - RNA, 32 nt, Human
auugagaauacagcuaaauaaauuugaagauu

SEQ ID NO: 72826 - RNA, 32 nt, Human
auugagacaaguguucaaacagaaagacgcuu

SEQ ID NO: 72827 - RNA, 32 nt, Human
auugagaccagccuggccaacauggugaaacc

SEQ ID NO: 72828 - RNA, 32 nt, Human
auugagaccagccugggcaacauaguaagacg

SEQ ID NO: 72829 - RNA, 32 nt, Human
auugagaccaggaguucgagaagagccugggc

SEQ ID NO: 72830 - RNA, 32 nt, Human
auugagaccauccuggauaacacagugaaacc

SEQ ID NO: 72831 - RNA, 32 nt, Human
auugagaccauccuggauaacauggugaaacc

SEQ ID NO: 72832 - RNA, 32 nt, Human
auugagaccauccuggcaaacauggugaaacc

SEQ ID NO: 72833 - RNA, 32 nt, Human
auugagaccauccuggccaacauggugaaacc

SEQ ID NO: 72834 - RNA, 32 nt, Human
auugagaccauccuggccagcauggugaaacc

SEQ ID NO: 72835 - RNA, 32 nt, Human
auugagaccauccuggcuaacauggugaaacc

SEQ ID NO: 72836 - RNA, 32 nt, Human
auugagacccuccccaaggggaugggcugcuu

SEQ ID NO: 72837 - RNA, 32 nt, Human
auugagaccuuccuggcuaacauggugaaacc

SEQ ID NO: 72838 - RNA, 32 nt, Human
auugagacgucagugauaaaugagcuagaugg

SEQ ID NO: 72839 - RNA, 32 nt, Human
auugagacuggcugcugaugcaccuugguaau

SEQ ID NO: 72840 - RNA, 32 nt, Human
auugagacuuccaagaaaacuggacaccaggu

SEQ ID NO: 72841 - RNA, 32 nt, Human
auugagagaacuguguuuuuccgacaaacggu

SEQ ID NO: 72842 - RNA, 32 nt, Human
auugagagcaugggcuguagagacagucuucu

SEQ ID NO: 72843 - RNA, 32 nt, Human
auugagagcucugcuaugccacuguugaauuu

SEQ ID NO: 72844 - RNA, 32 nt, Human
auugagaggcagcauggcugcaacugugagga

SEQ ID NO: 72845 - RNA, 32 nt, Human
auugagaggugaaggagccagguggcuucauu

SEQ ID NO: 72846 - RNA, 32 nt, Human
auugagagguguuacgagaaugcaguuaauuu

SEQ ID NO: 72847 - RNA, 32 nt, Human
auugagaguuuggacguguccgucuguccagg

SEQ ID NO: 72848 - RNA, 32 nt, Human
auugagauacuuuuucuuuuguaagugcuaca

SEQ ID NO: 72849 - RNA, 32 nt, Human
auugagauauaauucacauacaauacaauaua

SEQ ID NO: 72850 - RNA, 32 nt, Human
auugagauauaauucacauaccuuacaauuca

SEQ ID NO: 72851 - RNA, 32 nt, Human
auugagauauccuuuaucacaggauuuguuuu

SEQ ID NO: 72852 - RNA, 32 nt, Human
auugagaucauccuggccaacacggugaaacc

SEQ ID NO: 72853 - RNA, 32 nt, Human
auugagaucuuuuuggcucucugccucuaaac

SEQ ID NO: 72854 - RNA, 32 nt, Human
auugagaugaaggccagugacaugacaacugu

SEQ ID NO: 72855 - RNA, 31 nt, Human
auugagauguggaagcuguugcuguggguug

SEQ ID NO: 72856 - RNA, 32 nt, Human
auugagauuaagaugacuccuuucucuuagug

SEQ ID NO: 72857 - RNA, 32 nt, Human
auugagauucauuccagcacuugaagggggag

SEQ ID NO: 72858 - RNA, 31 nt, Human
auugagauugauguguuuucacuggauuuuu

SEQ ID NO: 72859 - RNA, 32 nt, Human
auugagcaaagcaguucuuucagaucugcaag

SEQ ID NO: 72860 - RNA, 32 nt, Human
auugagcagacugaugccugcauaagaugaau

SEQ ID NO: 72861 - RNA, 32 nt, Human
auugagcaguagcauuugccuuuuggguuuuu

SEQ ID NO: 72862 - RNA, 32 nt, Human
auugagcagucauuaugcauccauuaugaaaa

SEQ ID NO: 72863 - RNA, 32 nt, Human
auugagcauuaucaaaauccugugguauuuau

SEQ ID NO: 72864 - RNA, 32 nt, Human
auugagccaaacccuucucuggcccucaccuu

SEQ ID NO: 72865 - RNA, 32 nt, Human
auugagccaagaggugagggugcacgucuucc

SEQ ID NO: 72866 - RNA, 32 nt, Human
auugagccacugcacuccaaucugggugacag

SEQ ID NO: 72867 - RNA, 32 nt, Human
auugagccacugcacuccagccucggccacag

SEQ ID NO: 72868 - RNA, 32 nt, Human
auugagccacugcacuccagccugggugacag

SEQ ID NO: 72869 - RNA, 32 nt, Human
auugagccacugcacuccagccugggugacug

SEQ ID NO: 72870 - RNA, 32 nt, Human
auugagccauugaaggcauuccauuucuaaag

SEQ ID NO: 72871 - RNA, 32 nt, Human
auugagccauugcucuccagccugggugacac

SEQ ID NO: 72872 - RNA, 32 nt, Human
auugagcccagccuccagggcccgggcgcguu

SEQ ID NO: 72873 - RNA, 32 nt, Human
auugagcccaggagcucuagaccaccacaccc

SEQ ID NO: 72874 - RNA, 32 nt, Human
auugagcccaggaguccagccugggcaaaaua

SEQ ID NO: 72875 - RNA, 32 nt, Human
auugagcccaggaguucaagaccagccugggc

SEQ ID NO: 72876 - RNA, 32 nt, Human
auugagcccaggaguucgagaccagccugggc

SEQ ID NO: 72877 - RNA, 32 nt, Human
auugagcccuacuccccaaaauguacaaacag

SEQ ID NO: 72878 - RNA, 32 nt, Human
auugagccugcgaggccaaggcugcagcaggc

SEQ ID NO: 72879 - RNA, 32 nt, Human
auugagccuggagaagagaagacugaggggca

SEQ ID NO: 72880 - RNA, 32 nt, Human
auugagcgcugaaucgugucccaugagaucag

SEQ ID NO: 72881 - RNA, 32 nt, Human
auugagcucccaucuagcuucagcagggcaga

SEQ ID NO: 72882 - RNA, 32 nt, Human
auugagcugcaggagcuggagccauggguagg

SEQ ID NO: 72883 - RNA, 32 nt, Human
auugagcugccuccagccugguggcccagcua

SEQ ID NO: 72884 - RNA, 32 nt, Human
auugaggaacagaagaagcagagcagaugauc

SEQ ID NO: 72885 - RNA, 32 nt, Human
auugaggaaucagcagcauaggcuuuaucucc

SEQ ID NO: 72886 - RNA, 31 nt, Human
auugaggaguuuuucugagggcagagauugg

SEQ ID NO: 72887 - RNA, 32 nt, Human
auugaggauaagauggaaggcagcaguauaag

SEQ ID NO: 72888 - RNA, 32 nt, Human
auugaggauaauggugguaaaggauguaccag

SEQ ID NO: 72889 - RNA, 32 nt, Human
auugaggccaggaguucaagaccagccugggc

SEQ ID NO: 72890 - RNA, 24 nt, Human
auugaggccaggaguuggagacca

SEQ ID NO: 72891 - RNA, 32 nt, Human
auugaggccaggaguuggagaccagccugggc

SEQ ID NO: 72892 - RNA, 24 nt, Human
auugaggccaggaguuugagacca

SEQ ID NO: 72893 - RNA, 32 nt, Human
auugaggccaggaguuugagaccagccuggcc

SEQ ID NO: 72894 - RNA, 32 nt, Human
auugaggccuacaagagaggggagccuaggag

SEQ ID NO: 72895 - RNA, 32 nt, Human
auugaggcugggguacugccacuguuguuauc

SEQ ID NO: 72896 - RNA, 32 nt, Human
auugagggagauguccccacaggccaguuuua

SEQ ID NO: 72897 - RNA, 32 nt, Human
auugagggcagguggcacguggggaagagggc

SEQ ID NO: 72898 - RNA, 32 nt, Human
auugagggcuuugauacugagcuguucucaua

SEQ ID NO: 72899 - RNA, 32 nt, Human
auugaggggcaguuuuguuugccugaauaaac

SEQ ID NO: 72900 - RNA, 32 nt, Human
auugaggguaguggaaagcaggugugggacag

SEQ ID NO: 72901 - RNA, 32 nt, Human
auugagggugggcagagauagcugaugcucca

SEQ ID NO: 72902 - RNA, 32 nt, Human
auugaggugaagcucacggggccaggcugacc

SEQ ID NO: 72903 - RNA, 32 nt, Human
auugaggugggagagagaagcagagcgagaga

SEQ ID NO: 72904 - RNA, 32 nt, Human
auugagucaccaccagcccccggcagaggcug

SEQ ID NO: 72905 - RNA, 32 nt, Human
auugagucccuccuccucuucucccaugccuu

SEQ ID NO: 72906 - RNA, 32 nt, Human
auugagugcccuccuggcuccugggcugggac

SEQ ID NO: 72907 - RNA, 32 nt, Human
auugaguggacucugugcucacuggguggagc

SEQ ID NO: 72908 - RNA, 32 nt, Human
auugaguuuaaauauuuuauaacugguuuugc

SEQ ID NO: 72909 - RNA, 32 nt, Human
auugaguuuuggcuugcagggguggguuuaga

SEQ ID NO: 72910 - RNA, 32 nt, Human
auugauaaaaagagcuccccuuugcugacaga

SEQ ID NO: 72911 - RNA, 32 nt, Human
auugauaagcuuggacagaauauugcuguggu

SEQ ID NO: 72912 - RNA, 32 nt, Human
auugauaaguucuguuagcucaccauagcacu

SEQ ID NO: 72913 - RNA, 32 nt, Human
auugauagcaucucccaggaacaacgacuuuu

SEQ ID NO: 72914 - RNA, 32 nt, Human
auugauauguuauuaaaagaaacaguaauaaa

SEQ ID NO: 72915 - RNA, 32 nt, Human
auugauauucuacuggccaugaugccacugaa

SEQ ID NO: 72916 - RNA, 32 nt, Human
auugaucaccauaagaaggaacauuugugaag

SEQ ID NO: 72917 - RNA, 32 nt, Human
auugaucagcacccaccccaccccugaggcuu

SEQ ID NO: 72918 - RNA, 32 nt, Human
auugaucagcugggugagggaggaaggagugu

SEQ ID NO: 72919 - RNA, 32 nt, Human
auugaucagugagacuaugaagagcacugacu

SEQ ID NO: 72920 - RNA, 32 nt, Human
auugaucaucacauuuugauaccugccaugua

SEQ ID NO: 72921 - RNA, 31 nt, Human
auugaucaugaaaaggggguuggaggagcug

SEQ ID NO: 72922 - RNA, 32 nt, Human
auugaucauuuuagacacugggagaagagaac

SEQ ID NO: 72923 - RNA, 32 nt, Human
auugauccaguugucauccaccacagacaucu

SEQ ID NO: 72924 - RNA, 32 nt, Human
auugauccugaaguuccuuuugccaaagaugc

SEQ ID NO: 72925 - RNA, 32 nt, Human
auugauccuggaugugucugugaggguguugc

SEQ ID NO: 72926 - RNA, 32 nt, Human
auugauccuggcugugucugugaggguguugc

SEQ ID NO: 72927 - RNA, 32 nt, Human
auugauccugggugugucugugaggguguugc

SEQ ID NO: 72928 - RNA, 32 nt, Human
auugauccuuucuccucaccuucagaauccag

SEQ ID NO: 72929 - RNA, 32 nt, Human
auugaucuacauuuucuuuaguaauguuuucu

SEQ ID NO: 72930 - RNA, 32 nt, Human
auugaucucauucugccccacauuuaacugcc

SEQ ID NO: 72931 - RNA, 32 nt, Human
auugaucuccuggaggcugguucugcugccuc

SEQ ID NO: 72932 - RNA, 32 nt, Human
auugaucugagugcuuucauauuuuccaaauu

SEQ ID NO: 72933 - RNA, 32 nt, Human
auugaucugcaucagcuuauuuauaaaaguaa

SEQ ID NO: 72934 - RNA, 32 nt, Human
auugaucugcuaaugcuuucuuugccacucua

SEQ ID NO: 72935 - RNA, 32 nt, Human
auugaucugucucugcaggccagauccaggcu

SEQ ID NO: 72936 - RNA, 32 nt, Human
auugaugaaugccgacucuguacuggguucug

SEQ ID NO: 72937 - RNA, 32 nt, Human
auugaugagcaucuuauuucuuaucucuaaaa

SEQ ID NO: 72938 - RNA, 32 nt, Human
auugaugcacccccaggaaggccacgcgcuca

SEQ ID NO: 72939 - RNA, 32 nt, Human
auugaugccagcugcuccauggaccaggcccu

SEQ ID NO: 72940 - RNA, 32 nt, Human
auugaugccucuccucuucuuguucugcuguu

SEQ ID NO: 72941 - RNA, 32 nt, Human
auugaugcuacaaauggaaagccaaugccuuu

SEQ ID NO: 72942 - RNA, 32 nt, Human
auugaugcuggcacaagaugaagauaggcaag

SEQ ID NO: 72943 - RNA, 32 nt, Human
auugauggagucugcauuccaccacauaucca

SEQ ID NO: 72944 - RNA, 32 nt, Human
auugauggcaaaaagauggcagacacaagcag

SEQ ID NO: 72945 - RNA, 32 nt, Human
auugauggcuaccuuucaugucccugucuaaa

SEQ ID NO: 72946 - RNA, 32 nt, Human
auugaugggaaagauugcuuagggaguucugg

SEQ ID NO: 72947 - RNA, 29 nt, Human
auugaugucuauuuccuugagcucuuuaa

SEQ ID NO: 72948 - RNA, 32 nt, Human
auugauguuuuacugcaaaucuuaugggucua

SEQ ID NO: 72949 - RNA, 32 nt, Human
auugauguuuuuaaaauguauccugaugaaug

SEQ ID NO: 72950 - RNA, 32 nt, Human
auugauuacacaugauaauggaugauacacaa

SEQ ID NO: 72951 - RNA, 32 nt, Human
auugauuacaggugaggaaguacuggaauucc

SEQ ID NO: 72952 - RNA, 32 nt, Human
auugauuauugagaaaauguagcaguuugcau

SEQ ID NO: 72953 - RNA, 32 nt, Human
auugauuauuuuuaugauagcgguauucagga

SEQ ID NO: 72954 - RNA, 32 nt, Human
auugauucagauguuuggcaagagguggcuga

SEQ ID NO: 72955 - RNA, 32 nt, Human
auugauuccaaagaacuccaccaggaauuccu

SEQ ID NO: 72956 - RNA, 32 nt, Human
auugauuccagcacccucaggaauaccuauau

SEQ ID NO: 72957 - RNA, 32 nt, Human
auugauuccugggacuccccuccaggguggcc

SEQ ID NO: 72958 - RNA, 32 nt, Human
auugauucucccuggacaaagcaggaaagcag

SEQ ID NO: 72959 - RNA, 32 nt, Human
auugauugaaauucauguuuucucaagcucca

SEQ ID NO: 72960 - RNA, 32 nt, Human
auugauugaauggauacuauggaaaaguggau

SEQ ID NO: 72961 - RNA, 32 nt, Human
auugauugagccagugagguccaggcugcacu

SEQ ID NO: 72962 - RNA, 32 nt, Human
auugauugagcucaggagguggaagcuacacg

SEQ ID NO: 72963 - RNA, 32 nt, Human
auugauugcuagugguggaguugauuggaaga

SEQ ID NO: 72964 - RNA, 32 nt, Human
auugauugggaaugggguagggggaggaguug

SEQ ID NO: 72965 - RNA, 32 nt, Human
auugauugggcuacucagaaaagaggacccgg

SEQ ID NO: 72966 - RNA, 32 nt, Human
auugauugggggagagaaaccagcagagcaca

SEQ ID NO: 72967 - RNA, 32 nt, Human
auugauugguccugucuugggcaggucuagug

SEQ ID NO: 72968 - RNA, 32 nt, Human
auugauuucaacaaagauggccacauugauau

SEQ ID NO: 72969 - RNA, 32 nt, Human
auugauuucaagucuccuaauuuggaaugggu

SEQ ID NO: 72970 - RNA, 32 nt, Human
auugauuucaucauuuaacagaaacaaacagc

SEQ ID NO: 72971 - RNA, 32 nt, Human
auugauuucccucucccggcuuuugcuucucu

SEQ ID NO: 72972 - RNA, 32 nt, Human
auugauuucuaggaacccccaaaaggagaaua

SEQ ID NO: 72973 - RNA, 32 nt, Human
auugauuugcauucuggaaagcucucccagga

SEQ ID NO: 72974 - RNA, 32 nt, Human
auugauuugguugaucuggcugagcaggcggg

SEQ ID NO: 72975 - RNA, 22 nt, Human
auugauuuuaaccaauguagca

SEQ ID NO: 72976 - RNA, 32 nt, Human
auugauuuuuauguauggugugagaaaggauc

SEQ ID NO: 72977 - RNA, 32 nt, Human
auugauuuuugaaacuuaacucuuuuggggca

SEQ ID NO: 72978 - RNA, 32 nt, Human
auugauuuuugauagacugaagugccagauca

SEQ ID NO: 72979 - RNA, 32 nt, Human
auugcaaaagggaggaagggagccaaaggcua

SEQ ID NO: 72980 - RNA, 32 nt, Human
auugcaaacuacaccuccacccacugggcuga

SEQ ID NO: 72981 - RNA, 32 nt, Human
auugcaaacuccucuucucaccugccaaagau

SEQ ID NO: 72982 - RNA, 32 nt, Human
auugcaacacugccacuccagccugggugaca

SEQ ID NO: 72983 - RNA, 32 nt, Human
auugcaaccuguguguuugucaucauccucau

SEQ ID NO: 72984 - RNA, 32 nt, Human
auugcaagcauauuucuuuuaaugacuccagu

SEQ ID NO: 72985 - RNA, 24 nt, Human
auugcaagcuccgccucccagguu

SEQ ID NO: 72986 - RNA, 32 nt, Human
auugcaaggugcuucuguacuuuuccagccug

SEQ ID NO: 72987 - RNA, 32 nt, Human
auugcaagucaaaggcaagacaggcuuccaua

SEQ ID NO: 72988 - RNA, 32 nt, Human
auugcaauggagaucaugacacuacuguuaau

SEQ ID NO: 72989 - RNA, 32 nt, Human
auugcaauuucuacuuucauagagucauagaa

SEQ ID NO: 72990 - RNA, 32 nt, Human
auugcacacagccucugcugggagaagagagg

SEQ ID NO: 72991 - RNA, 32 nt, Human
auugcacacgucacuccagcaucucuguaaaa

SEQ ID NO: 72992 - RNA, 32 nt, Human
auugcacacugcacuccagccugggugacuag

SEQ ID NO: 72993 - RNA, 32 nt, Human
auugcacacuggcugaauagcaucccuggucc

SEQ ID NO: 72994 - RNA, 32 nt, Human
auugcacagaugagcaauuacagcagagaaaa

SEQ ID NO: 72995 - RNA, 32 nt, Human
auugcacagauggggaaacugaggcuuaggaa

SEQ ID NO: 72996 - RNA, 32 nt, Human
auugcacaguggccacagaaggcuccauuggc

SEQ ID NO: 72997 - RNA, 32 nt, Human
auugcacauaucuccccucuaaaaccuguagu

SEQ ID NO: 72998 - RNA, 32 nt, Human
auugcacaucuguuggaggacaucccagauuu

SEQ ID NO: 72999 - RNA, 32 nt, Human
auugcaccacagcacuccaaccugggugacag

SEQ ID NO: 73000 - RNA, 32 nt, Human
auugcaccaccacacuccagccugggugacaa

SEQ ID NO: 73001 - RNA, 32 nt, Human
auugcaccaccacacuccagccugggugacag

SEQ ID NO: 73002 - RNA, 32 nt, Human
auugcaccaccgcacuccagccugggugacag

SEQ ID NO: 73003 - RNA, 32 nt, Human
auugcaccacggcacuccagccugggugacag

SEQ ID NO: 73004 - RNA, 32 nt, Human
auugcaccacuacacuccagccuggaugacag

SEQ ID NO: 73005 - RNA, 32 nt, Human
auugcaccacuacacuccagccugggcaacag

SEQ ID NO: 73006 - RNA, 32 nt, Human
auugcaccacuacacuccagccugggugacaa

SEQ ID NO: 73007 - RNA, 32 nt, Human
auugcaccacugaacuccagccugggccacau

SEQ ID NO: 73008 - RNA, 32 nt, Human
auugcaccacugcacgccagccugggugaaag

SEQ ID NO: 73009 - RNA, 32 nt, Human
auugcaccacugcacuacagcuugggugacag

SEQ ID NO: 73010 - RNA, 32 nt, Human
auugcaccacugcacucaagccugggcaacag

SEQ ID NO: 73011 - RNA, 32 nt, Human
auugcaccacugcacuccaaccugggcaacag

SEQ ID NO: 73012 - RNA, 32 nt, Human
auugcaccacugcacuccaaccugggugacaa

SEQ ID NO: 73013 - RNA, 32 nt, Human
auugcaccacugcacuccaaccugggugacag

SEQ ID NO: 73014 - RNA, 32 nt, Human
auugcaccacugcacuccagcccaggcaacag

SEQ ID NO: 73015 - RNA, 32 nt, Human
auugcaccacugcacuccagccggggugacag

SEQ ID NO: 73016 - RNA, 32 nt, Human
auugcaccacugcacuccagccuaggcgacag

SEQ ID NO: 73017 - RNA, 32 nt, Human
auugcaccacugcacuccagccugagugacag

SEQ ID NO: 73018 - RNA, 32 nt, Human
auugcaccacugcacuccagccugagugagga

SEQ ID NO: 73019 - RNA, 32 nt, Human
auugcaccacugcacuccagccuggaaaacgg

SEQ ID NO: 73020 - RNA, 32 nt, Human
auugcaccacugcacuccagccuggcgacaaa

SEQ ID NO: 73021 - RNA, 32 nt, Human
auugcaccacugcacuccagccugggaaacag

SEQ ID NO: 73022 - RNA, 32 nt, Human
auugcaccacugcacuccagccugggagacag

SEQ ID NO: 73023 - RNA, 32 nt, Human
auugcaccacugcacuccagccugggcaacaa

SEQ ID NO: 73024 - RNA, 32 nt, Human
auugcaccacugcacuccagccugggcaacag

SEQ ID NO: 73025 - RNA, 32 nt, Human
auugcaccacugcacuccagccugggcaauag

SEQ ID NO: 73026 - RNA, 32 nt, Human
auugcaccacugcacuccagccugggcgacag

SEQ ID NO: 73027 - RNA, 32 nt, Human
auugcaccacugcacuccagccugggcgacug

SEQ ID NO: 73028 - RNA, 32 nt, Human
auugcaccacugcacuccagccugggcggcag

SEQ ID NO: 73029 - RNA, 32 nt, Human
auugcaccacugcacuccagccugggcuacag

SEQ ID NO: 73030 - RNA, 32 nt, Human
auugcaccacugcacuccagccuggggacaga

SEQ ID NO: 73031 - RNA, 32 nt, Human
auugcaccacugcacuccagccuggguaacaa

SEQ ID NO: 73032 - RNA, 32 nt, Human
auugcaccacugcacuccagccugggugacag

SEQ ID NO: 73033 - RNA, 32 nt, Human
auugcaccacugcacuccagccugggugauag

SEQ ID NO: 73034 - RNA, 32 nt, Human
auugcaccacugcacuccagccuggguggcag

SEQ ID NO: 73035 - RNA, 32 nt, Human
auugcaccacugcacuccagccugggugucag

SEQ ID NO: 73036 - RNA, 32 nt, Human
auugcaccacugcacuccagccuggugacaga

SEQ ID NO: 73037 - RNA, 32 nt, Human
auugcaccacugcacuccagccuggugacagg

SEQ ID NO: 73038 - RNA, 32 nt, Human
auugcaccacugcacuccaggcuggguaacag

SEQ ID NO: 73039 - RNA, 32 nt, Human
auugcaccacugcacuccagucugggcaacag

SEQ ID NO: 73040 - RNA, 32 nt, Human
auugcaccacugcacuccagucugggugagag

SEQ ID NO: 73041 - RNA, 32 nt, Human
auugcaccacugcacuccagucugguugagag

SEQ ID NO: 73042 - RNA, 32 nt, Human
auugcaccacugcacuccauccugggcaacag

SEQ ID NO: 73043 - RNA, 32 nt, Human
auugcaccacugcacucuaacuugggcaacaa

SEQ ID NO: 73044 - RNA, 32 nt, Human
auugcaccacugcacucuacucugggugacag

SEQ ID NO: 73045 - RNA, 32 nt, Human
auugcaccacugcacucuagccugcgugacac

SEQ ID NO: 73046 - RNA, 32 nt, Human
auugcaccacugcacucuagccuggggaacag

SEQ ID NO: 73047 - RNA, 32 nt, Human
auugcaccacugcacucuagccuggguaacaa

SEQ ID NO: 73048 - RNA, 32 nt, Human
auugcaccacugcacugcagccugggaaacag

SEQ ID NO: 73049 - RNA, 32 nt, Human
auugcaccacugcacuucagccuggugacaga

SEQ ID NO: 73050 - RNA, 32 nt, Human
auugcaccacugcacuucagcuugggcaacag

SEQ ID NO: 73051 - RNA, 32 nt, Human
auugcaccacugcacuuuagucugggugacag

SEQ ID NO: 73052 - RNA, 32 nt, Human
auugcaccacugcaguucagccuggaugauga

SEQ ID NO: 73053 - RNA, 32 nt, Human
auugcaccacugcauuccaaccugggcggcag

SEQ ID NO: 73054 - RNA, 32 nt, Human
auugcaccacugcauuccagcauggccacaaa

SEQ ID NO: 73055 - RNA, 32 nt, Human
auugcaccacugcauuccagccuggaugacag

SEQ ID NO: 73056 - RNA, 32 nt, Human
auugcaccacugcauuccagccuggcgacaga

SEQ ID NO: 73057 - RNA, 32 nt, Human
auugcaccacugcucuccaagcugggcaaugg

SEQ ID NO: 73058 - RNA, 32 nt, Human
auugcaccacugcucuccagccuggggaacag

SEQ ID NO: 73059 - RNA, 32 nt, Human
auugcaccacugcucucuagccugggcaaaaa

SEQ ID NO: 73060 - RNA, 32 nt, Human
auugcaccacuggacgccagccuaggcaacac

SEQ ID NO: 73061 - RNA, 32 nt, Human
auugcaccacuguacuccagcacucuagccug

SEQ ID NO: 73062 - RNA, 32 nt, Human
auugcaccacuguacuccagccugggcaacag

SEQ ID NO: 73063 - RNA, 32 nt, Human
auugcaccacuguacuccagccugggugacaa

SEQ ID NO: 73064 - RNA, 32 nt, Human
auugcaccacuguacuccagccugggugacag

SEQ ID NO: 73065 - RNA, 32 nt, Human
auugcaccacuuacuccagccugggcaacaga

SEQ ID NO: 73066 - RNA, 32 nt, Human
auugcaccacuucacuccagccugggugacgg

SEQ ID NO: 73067 - RNA, 32 nt, Human
auugcaccacuucaucccagccugggagacag

SEQ ID NO: 73068 - RNA, 32 nt, Human
auugcaccacuuguaacuccagccugggcaac

SEQ ID NO: 73069 - RNA, 32 nt, Human
auugcaccacuuuacuuagccugggugacaga

SEQ ID NO: 73070 - RNA, 32 nt, Human
auugcaccagugcacuccagcugggcgacaga

SEQ ID NO: 73071 - RNA, 32 nt, Human
auugcaccauugaacuccagccugggcaacaa

SEQ ID NO: 73072 - RNA, 32 nt, Human
auugcaccauugcaccuccagccugggcaaca

SEQ ID NO: 73073 - RNA, 32 nt, Human
auugcaccauugcacuccagccugcgcaacaa

SEQ ID NO: 73074 - RNA, 32 nt, Human
auugcaccauugcacuccagccuggcgacaga

SEQ ID NO: 73075 - RNA, 32 nt, Human
auugcaccauugcacuccagccugggcaacaa

SEQ ID NO: 73076 - RNA, 32 nt, Human
auugcaccauugcacuccagccugggcaacag

SEQ ID NO: 73077 - RNA, 32 nt, Human
auugcaccauugcacuccagccugggcaauaa

SEQ ID NO: 73078 - RNA, 32 nt, Human
auugcaccauugcacuccagccugggcgacag

SEQ ID NO: 73079 - RNA, 32 nt, Human
auugcaccauugcacuccagccugggugacag

SEQ ID NO: 73080 - RNA, 32 nt, Human
auugcaccauugcacuccagccugugcaacaa

SEQ ID NO: 73081 - RNA, 32 nt, Human
auugcaccauugcacuccagcuugggugacag

SEQ ID NO: 73082 - RNA, 32 nt, Human
auugcaccauugcacuccugccugggcaacaa

SEQ ID NO: 73083 - RNA, 32 nt, Human
auugcaccauugcauuccagccugggcaacaa

SEQ ID NO: 73084 - RNA, 32 nt, Human
auugcaccauugcauuccagccugggugacag

SEQ ID NO: 73085 - RNA, 32 nt, Human
auugcaccauuguacuccagccugggcaauaa

SEQ ID NO: 73086 - RNA, 32 nt, Human
auugcaccauuucauuccagccugggcaacau

SEQ ID NO: 73087 - RNA, 32 nt, Human
auugcaccccugcacuccagccugggugacag

SEQ ID NO: 73088 - RNA, 32 nt, Human
auugcaccccugcacuccaggcugggcaacag

SEQ ID NO: 73089 - RNA, 32 nt, Human
auugcacccugcacucuagccugggcaacaag

SEQ ID NO: 73090 - RNA, 32 nt, Human
auugcacccugggcucugggcuggcucugcac

SEQ ID NO: 73091 - RNA, 32 nt, Human
auugcaccgcugcacuccagccuggcgacaga

SEQ ID NO: 73092 - RNA, 32 nt, Human
auugcaccgugacacuccagccugggcaacag

SEQ ID NO: 73093 - RNA, 32 nt, Human
auugcaccuaucucccccaucucauugccacg

SEQ ID NO: 73094 - RNA, 32 nt, Human
auugcaccuggccaagaagagacaucuugacu

SEQ ID NO: 73095 - RNA, 32 nt, Human
auugcaccuuuguacuccagccugggcaacga

SEQ ID NO: 73096 - RNA, 32 nt, Human
auugcacgacugcacuccagccugggcaaugg

SEQ ID NO: 73097 - RNA, 32 nt, Human
auugcacgggccucucuguguuugcgugcaug

SEQ ID NO: 73098 - RNA, 32 nt, Human
auugcacuacuacacuccagccuggugacaga

SEQ ID NO: 73099 - RNA, 32 nt, Human
auugcacuacugcacuccagacuggugacgga

SEQ ID NO: 73100 - RNA, 32 nt, Human
auugcacuacugcacuccagccugggugacag

SEQ ID NO: 73101 - RNA, 32 nt, Human
auugcacuacugcauuccagccugggugacau

SEQ ID NO: 73102 - RNA, 32 nt, Human
auugcacuaggcaaguguauauuuuguauuuu

SEQ ID NO: 73103 - RNA, 32 nt, Human
auugcacuauugcacuccagccugggcaacag

SEQ ID NO: 73104 - RNA, 32 nt, Human
auugcacuccacacuccagccugagcaacaag

SEQ ID NO: 73105 - RNA, 32 nt, Human
auugcacuccagccuagauaacaagagugaga

SEQ ID NO: 73106 - RNA, 32 nt, Human
auugcacuccagccuaggcauggugagacucc

SEQ ID NO: 73107 - RNA, 32 nt, Human
auugcacuccagccuaggcgacagagugagac

SEQ ID NO: 73108 - RNA, 32 nt, Human
auugcacuccagccuggaugacagagugagac

SEQ ID NO: 73109 - RNA, 32 nt, Human
auugcacuccagccuggaugauagagugagac

SEQ ID NO: 73110 - RNA, 32 nt, Human
auugcacuccagccuggcgacagagugagacu

SEQ ID NO: 73111 - RNA, 32 nt, Human
auugcacuccagccugggcaacaagugcaaaa

SEQ ID NO: 73112 - RNA, 32 nt, Human
auugcacuccagccugggcaacagagugaaaa

SEQ ID NO: 73113 - RNA, 32 nt, Human
auugcacuccagccugggcaacagagugagac

SEQ ID NO: 73114 - RNA, 32 nt, Human
auugcacuccagccugggcaacaguguuaaga

SEQ ID NO: 73115 - RNA, 32 nt, Human
auugcacuccagccugggcaacgagugaaacu

SEQ ID NO: 73116 - RNA, 32 nt, Human
auugcacuccagccugggcaacgagugcaaaa

SEQ ID NO: 73117 - RNA, 32 nt, Human
auugcacuccagccugggcaauagagugagac

SEQ ID NO: 73118 - RNA, 32 nt, Human
auugcacuccagccugggcgacagagugacac

SEQ ID NO: 73119 - RNA, 32 nt, Human
auugcacuccagccugggcgacagagugagac

SEQ ID NO: 73120 - RNA, 32 nt, Human
auugcacuccagccugggcgacagggugagac

SEQ ID NO: 73121 - RNA, 32 nt, Human
auugcacuccagccugggcgauagagugagac

SEQ ID NO: 73122 - RNA, 32 nt, Human
auugcacuccagccugggugacagaguaacac

SEQ ID NO: 73123 - RNA, 32 nt, Human
auugcacuccagccugggugacagagugaaac

SEQ ID NO: 73124 - RNA, 32 nt, Human
auugcacuccagccugggugacagagugagac

SEQ ID NO: 73125 - RNA, 32 nt, Human
auugcacuccagccugggugacgagugaaacu

SEQ ID NO: 73126 - RNA, 32 nt, Human
auugcacuccagccugggugauaagagcaaga

SEQ ID NO: 73127 - RNA, 32 nt, Human
auugcacuccagccugggugauaagagcgaaa

SEQ ID NO: 73128 - RNA, 32 nt, Human
auugcacuccagccugggugguagaucaaggc

SEQ ID NO: 73129 - RNA, 32 nt, Human
auugcacucugacuugccuggggcuguuggca

SEQ ID NO: 73130 - RNA, 32 nt, Human
auugcacugucgcacuccagccuggaugauag

SEQ ID NO: 73131 - RNA, 32 nt, Human
auugcacuugacucaaaacugcccucggccug

SEQ ID NO: 73132 - RNA, 32 nt, Human
auugcacuuucccaccucuauaccuugccugu

SEQ ID NO: 73133 - RNA, 32 nt, Human
auugcagaaagggggaguggcggcccacgcag

SEQ ID NO: 73134 - RNA, 32 nt, Human
auugcagaagucaauccuuuguucuuuuguuu

SEQ ID NO: 73135 - RNA, 32 nt, Human
auugcagaccgggcaaggucccccaggccagg

SEQ ID NO: 73136 - RNA, 32 nt, Human
auugcagacucaugaaagacccugagcagagg

SEQ ID NO: 73137 - RNA, 32 nt, Human
auugcagagaaucagacuccuuuuccagggcc

SEQ ID NO: 73138 - RNA, 32 nt, Human
auugcagauaccugccuuucuuucuagguugu

SEQ ID NO: 73139 - RNA, 32 nt, Human
auugcagaugugagccaccgugccuggccaga

SEQ ID NO: 73140 - RNA, 32 nt, Human
auugcagaugugagccacugugccaggcuccu

SEQ ID NO: 73141 - RNA, 32 nt, Human
auugcagcaaaaucacuuaucuguucuuuucg

SEQ ID NO: 73142 - RNA, 32 nt, Human
auugcagcaguggcaaugcaauaaauguuauu

SEQ ID NO: 73143 - RNA, 32 nt, Human
auugcagccucaaacaccugugcucaagcaau

SEQ ID NO: 73144 - RNA, 32 nt, Human
auugcagccucaaacuccugggcucaagcaau

SEQ ID NO: 73145 - RNA, 32 nt, Human
auugcagccuccacuuccugggcucaagcgau

SEQ ID NO: 73146 - RNA, 32 nt, Human
auugcagcucacugcugcugccucugaaacag

SEQ ID NO: 73147 - RNA, 32 nt, Human
auugcagcuccucagcccccaggauugaccuc

SEQ ID NO: 73148 - RNA, 22 nt, Human
auugcagcugccacaaccacau

SEQ ID NO: 73149 - RNA, 32 nt, Human
auugcagcugggcgugguggcuuaugcuugua

SEQ ID NO: 73150 - RNA, 32 nt, Human
auugcagcuucuucuuucuucugcucauaaaa

SEQ ID NO: 73151 - RNA, 32 nt, Human
auugcaggaaagacagguaaagugauugcugc

SEQ ID NO: 73152 - RNA, 32 nt, Human
auugcaggaaagcgaagguggagagagaagag

SEQ ID NO: 73153 - RNA, 32 nt, Human
auugcaggaagaggaaaggccugugacagagc

SEQ ID NO: 73154 - RNA, 32 nt, Human
auugcaggaagagguggccaggagggcgcagg

SEQ ID NO: 73155 - RNA, 32 nt, Human
auugcaggaccugauuuaacagcucucuucuu

SEQ ID NO: 73156 - RNA, 32 nt, Human
auugcaggcacaugccaccacgcccagcuaau

SEQ ID NO: 73157 - RNA, 32 nt, Human
auugcaggcaugagccaccgcgcccagccaga

SEQ ID NO: 73158 - RNA, 32 nt, Human
auugcaggcaugagccaccgugcccagccuca

SEQ ID NO: 73159 - RNA, 32 nt, Human
auugcaggcaugagccacugcacccagcccug

SEQ ID NO: 73160 - RNA, 32 nt, Human
auugcaggcaugagccacugcgccuggccuaa

SEQ ID NO: 73161 - RNA, 32 nt, Human
auugcaggcaugagccacugcgccuggccuca

SEQ ID NO: 73162 - RNA, 32 nt, Human
auugcaggcaugagccacugcucccggcccua

SEQ ID NO: 73163 - RNA, 32 nt, Human
auugcaggcaugagccacuucgccuagccaag

SEQ ID NO: 73164 - RNA, 32 nt, Human
auugcaggccugagccaccgcgcccggccccu

SEQ ID NO: 73165 - RNA, 32 nt, Human
auugcaggcgugagccaccacacccggcccac

SEQ ID NO: 73166 - RNA, 32 nt, Human
auugcaggcgugagccaccacgcccggccucc

SEQ ID NO: 73167 - RNA, 32 nt, Human
auugcaggcgugagccaccaugcccggcucuc

SEQ ID NO: 73168 - RNA, 32 nt, Human
auugcaggcgugagccaccaugccuggccaga

SEQ ID NO: 73169 - RNA, 32 nt, Human
auugcaggcgugagccaccgcgcccggccugc

SEQ ID NO: 73170 - RNA, 32 nt, Human
auugcaggcgugagccacugcacccagccucu

SEQ ID NO: 73171 - RNA, 32 nt, Human
auugcaggcgugagccacugcuccuggcuuga

SEQ ID NO: 73172 - RNA, 32 nt, Human
auugcaggcgugagccacuuucccagccucuc

SEQ ID NO: 73173 - RNA, 32 nt, Human
auugcaggcuuagucguggcuacuguucuccu

SEQ ID NO: 73174 - RNA, 32 nt, Human
auugcaggggccucugggugccuuguccgggc

SEQ ID NO: 73175 - RNA, 32 nt, Human
auugcaggucugagacaguggaggcuuagugg

SEQ ID NO: 73176 - RNA, 32 nt, Human
auugcaggugcccaccaccacgcccagcuaau

SEQ ID NO: 73177 - RNA, 32 nt, Human
auugcaggugugagccaccacacccagccaug

SEQ ID NO: 73178 - RNA, 32 nt, Human
auugcaggugugagccaccacgcccagccuag

SEQ ID NO: 73179 - RNA, 32 nt, Human
auugcaggugugagccaccgcacccagccuca

SEQ ID NO: 73180 - RNA, 32 nt, Human
auugcaggugugagccacugcacccggcccuu

SEQ ID NO: 73181 - RNA, 32 nt, Human
auugcaggugugagccacugcgccuggccuaa

SEQ ID NO: 73182 - RNA, 32 nt, Human
auugcaggugugagccacugugccuggcuggc

SEQ ID NO: 73183 - RNA, 32 nt, Human
auugcaggugugagccagugcacccggccgua

SEQ ID NO: 73184 - RNA, 32 nt, Human
auugcagucuugaaaauccugagagcuaaaaa

SEQ ID NO: 73185 - RNA, 32 nt, Human
auugcagugagcugagauugcaccacugcacu

SEQ ID NO: 73186 - RNA, 32 nt, Human
auugcagugagcugagauugcgccacugcacu

SEQ ID NO: 73187 - RNA, 32 nt, Human
auugcagugagcugauaucgcaccauuguacu

SEQ ID NO: 73188 - RNA, 32 nt, Human
auugcaguuuucugccgcaaccccugagccga

SEQ ID NO: 73189 - RNA, 32 nt, Human
auugcauagccuugcuuucuugaacuaaacug

SEQ ID NO: 73190 - RNA, 32 nt, Human
auugcauagccuuguccuccugugugccugag

SEQ ID NO: 73191 - RNA, 32 nt, Human
auugcauagguuuagagagagcgacgugugac

SEQ ID NO: 73192 - RNA, 32 nt, Human
auugcauauagcuugguuuccauaacauagag

SEQ ID NO: 73193 - RNA, 32 nt, Human
auugcaucacccuccuccucugcccagaccug

SEQ ID NO: 73194 - RNA, 32 nt, Human
auugcaucacugcacuccaaccugggcaacag

SEQ ID NO: 73195 - RNA, 32 nt, Human
auugcaucacugcacuccagccugggcgaugg

SEQ ID NO: 73196 - RNA, 32 nt, Human
auugcaucacugcacuccagccugggugacag

SEQ ID NO: 73197 - RNA, 32 nt, Human
auugcaucacugcacuccagcuugggugacag

SEQ ID NO: 73198 - RNA, 32 nt, Human
auugcaucacugcacugcagccugggcaacau

SEQ ID NO: 73199 - RNA, 32 nt, Human
auugcaucaguauuuccuauuggaaaauacau

SEQ ID NO: 73200 - RNA, 32 nt, Human
auugcaucauugcacuccagccugggcaacaa

SEQ ID NO: 73201 - RNA, 32 nt, Human
auugcaucauugcacuccagccugggcaacag

SEQ ID NO: 73202 - RNA, 32 nt, Human
auugcaucuugaccaggcacaguggcucaugc

SEQ ID NO: 73203 - RNA, 31 nt, Human
auugcaugauuuucuuuacuuuugaaguaaa

SEQ ID NO: 73204 - RNA, 32 nt, Human
auugcaugcaggaagagaagaaggaagaggag

SEQ ID NO: 73205 - RNA, 32 nt, Human
auugcaugcuuccuccuuugcucuugggaaga

SEQ ID NO: 73206 - RNA, 32 nt, Human
auugcauggcugcacucuagccugggugacag

SEQ ID NO: 73207 - RNA, 32 nt, Human
auugcauguggaggucuccagcucaggaaagu

SEQ ID NO: 73208 - RNA, 32 nt, Human
auugcauguguaguuugagcacagaucccaaa

SEQ ID NO: 73209 - RNA, 32 nt, Human
auugcauuccaagugagcugugcucagcagug

SEQ ID NO: 73210 - RNA, 32 nt, Human
auugcauuccagccuaggcaacagagugagac

SEQ ID NO: 73211 - RNA, 32 nt, Human
auugcauugcacuccagcuugagcaacagagg

SEQ ID NO: 73212 - RNA, 32 nt, Human
auugcauugcauucagaguaaccugugugcau

SEQ ID NO: 73213 - RNA, 32 nt, Human
auugcauugguguuuucacccaauuguuaagu

SEQ ID NO: 73214 - RNA, 32 nt, Human
auugcauuuccaaaguagcaucuugcuagacc

SEQ ID NO: 73215 - RNA, 32 nt, Human
auugccaaaaccagcaaguacacagaguccug

SEQ ID NO: 73216 - RNA, 32 nt, Human
auugccaaaaugugauaggaaaccuacucauu

SEQ ID NO: 73217 - RNA, 32 nt, Human
auugccaaaguaguauuuucauaacuuucuug

SEQ ID NO: 73218 - RNA, 32 nt, Human
auugccaacuauacgaauggcuucgaggagau

SEQ ID NO: 73219 - RNA, 32 nt, Human
auugccaagaauuacugucaagagaaaugaua

SEQ ID NO: 73220 - RNA, 32 nt, Human
auugccaagcuuccagcugccucuucuccuaa

SEQ ID NO: 73221 - RNA, 32 nt, Human
auugccacagcaccuggauucaugauugggca

SEQ ID NO: 73222 - RNA, 22 nt, Human
auugccaccaucuuggagcuca

SEQ ID NO: 73223 - RNA, 32 nt, Human
auugccacgugugcacuuacuacucuccagua

SEQ ID NO: 73224 - RNA, 32 nt, Human
auugccacugcacuccagccuaagcaaauagc

SEQ ID NO: 73225 - RNA, 32 nt, Human
auugccacugcacuccagccugggcaacaaga

SEQ ID NO: 73226 - RNA, 32 nt, Human
auugccagacuggagugcaguggcgugaucuc

SEQ ID NO: 73227 - RNA, 32 nt, Human
auugccagccgggcccgccaggcccaggagcg

SEQ ID NO: 73228 - RNA, 32 nt, Human
auugccagccugggugacagagcaagaccuug

SEQ ID NO: 73229 - RNA, 32 nt, Human
auugccagcuacucggaaggcugaggcaggag

SEQ ID NO: 73230 - RNA, 32 nt, Human
auugccaggcagaauuaaugagcucaguucua

SEQ ID NO: 73231 - RNA, 32 nt, Human
auugccagggccugagcucugaugguccagga

SEQ ID NO: 73232 - RNA, 32 nt, Human
auugccagguaguucuuggcacuggcaccugg

SEQ ID NO: 73233 - RNA, 32 nt, Human
auugccaguagccugcaauaucuuuccuuccu

SEQ ID NO: 73234 - RNA, 32 nt, Human
auugccaguggggugggcagugcaguggggug

SEQ ID NO: 73235 - RNA, 32 nt, Human
auugccauccccucccuucuuuaaaugcaaag

SEQ ID NO: 73236 - RNA, 32 nt, Human
auugccaucuccauuccucugcccucuugagc

SEQ ID NO: 73237 - RNA, 32 nt, Human
auugccaugaaugcuaguuacaggguagaaag

SEQ ID NO: 73238 - RNA, 32 nt, Human
auugccauuccuccccuccaagagguaacaau

SEQ ID NO: 73239 - RNA, 32 nt, Human
auugccauuccuccccuccagagguaacaauu

SEQ ID NO: 73240 - RNA, 32 nt, Human
auugcccaaagauuucucaaggccugugaaga

SEQ ID NO: 73241 - RNA, 32 nt, Human
auugcccaagccggucucaaacuccugagcuc

SEQ ID NO: 73242 - RNA, 32 nt, Human
auugcccacugcacuccagccugggcaacaga

SEQ ID NO: 73243 - RNA, 32 nt, Human
auugcccacuucuguguagacaugguucuggu

SEQ ID NO: 73244 - RNA, 19 nt, Human
auugcccagccucagugca

SEQ ID NO: 73245 - RNA, 32 nt, Human
auugcccaggaucaagggugcgguguuggggg

SEQ ID NO: 73246 - RNA, 31 nt, Human
auugcccaggcugcucucacauuccuagccu

SEQ ID NO: 73247 - RNA, 22 nt, Human
auugcccaggcuggaguacaau

SEQ ID NO: 73248 - RNA, 32 nt, Human
auugcccaggcuggagugcagugagcuauuac

SEQ ID NO: 73249 - RNA, 32 nt, Human
auugcccagugccuucuguuucccaggcagcu

SEQ ID NO: 73250 - RNA, 32 nt, Human
auugcccagugcugccagagugagugagugua

SEQ ID NO: 73251 - RNA, 32 nt, Human
auugcccaugcacuuguugcagaaacagccaa

SEQ ID NO: 73252 - RNA, 32 nt, Human
auugccccacugcacuccacccugggcaaugg

SEQ ID NO: 73253 - RNA, 32 nt, Human
auugccccacugcacuccagccuaggcaacag

SEQ ID NO: 73254 - RNA, 32 nt, Human
auugccccagaacaaacagugaaauuauuaca

SEQ ID NO: 73255 - RNA, 32 nt, Human
auugccccaggaggacaccagauacagacuuc

SEQ ID NO: 73256 - RNA, 32 nt, Human
auugccccaggucuuuuccuuuuggauuuugu

SEQ ID NO: 73257 - RNA, 32 nt, Human
auugcccccggcccgcagcccaguguccugcu

SEQ ID NO: 73258 - RNA, 32 nt, Human
auugcccccugagauggccugucuucuggggu

SEQ ID NO: 73259 - RNA, 32 nt, Human
auugcccccugccugcugcuccugucacagac

SEQ ID NO: 73260 - RNA, 32 nt, Human
auugccccgugccuucaggcagucuccugggg

SEQ ID NO: 73261 - RNA, 32 nt, Human
auugccccucugccuugcccuccugggcccug

SEQ ID NO: 73262 - RNA, 32 nt, Human
auugccccugcccugcucaccaccugucacag

SEQ ID NO: 73263 - RNA, 32 nt, Human
auugccccuuucaggggaccccacuuuguagg

SEQ ID NO: 73264 - RNA, 32 nt, Human
auugccccuuucucgucccccuuuucuuccuc

SEQ ID NO: 73265 - RNA, 32 nt, Human
auugcccggcgccuggacagugaucaucuugu

SEQ ID NO: 73266 - RNA, 32 nt, Human
auugcccuccagguauccucagucuuucugcu

SEQ ID NO: 73267 - RNA, 32 nt, Human
auugcccuccccaccauccaucauagccaggc

SEQ ID NO: 73268 - RNA, 32 nt, Human
auugcccucucccccgccucuucugagcuguc

SEQ ID NO: 73269 - RNA, 32 nt, Human
auugcccugcaggcuggagugcagcggcauga

SEQ ID NO: 73270 - RNA, 32 nt, Human
auugcccugccucugucccccuuuaaacguug

SEQ ID NO: 73271 - RNA, 32 nt, Human
auugcccugggacucuggaggggccaggguac

SEQ ID NO: 73272 - RNA, 32 nt, Human
auugcccuggugagccaggucuugccgguuua

SEQ ID NO: 73273 - RNA, 32 nt, Human
auugcccuuauuccuccaccccacuucuuuua

SEQ ID NO: 73274 - RNA, 32 nt, Human
auugcccuuccucaccagcaaucugcacuuuc

SEQ ID NO: 73275 - RNA, 32 nt, Human
auugcccuuccugcuuucuuccuccaacagcu

SEQ ID NO: 73276 - RNA, 32 nt, Human
auugccggccccggacgggugaggagaacugc

SEQ ID NO: 73277 - RNA, 32 nt, Human
auugccgggauuacaggcaugagccacugugu

SEQ ID NO: 73278 - RNA, 32 nt, Human
auugccguggugcuuggcauugaggggcugca

SEQ ID NO: 73279 - RNA, 32 nt, Human
auugccuaaagaggaaggaccaaggagaugaa

SEQ ID NO: 73280 - RNA, 32 nt, Human
auugccuacaaagacaaauaccaggcuuucuc

SEQ ID NO: 73281 - RNA, 32 nt, Human
auugccuaccacauguuaugggcugaauaaug

SEQ ID NO: 73282 - RNA, 32 nt, Human
auugccuaucgccaagcaaaucgaggccauca

SEQ ID NO: 73283 - RNA, 32 nt, Human
auugccuauggcaggauucuuucuugaauuaa

SEQ ID NO: 73284 - RNA, 32 nt, Human
auugccucagccaagucucccaccucucugcu

SEQ ID NO: 73285 - RNA, 32 nt, Human
auugccucagcuccucccccucaggcugggag

SEQ ID NO: 73286 - RNA, 32 nt, Human
auugccucauuucuccacuaauacuuagcaaa

SEQ ID NO: 73287 - RNA, 32 nt, Human
auugccuccagccugaguccuaggcucuaaaa

SEQ ID NO: 73288 - RNA, 32 nt, Human
auugccuccucagcacucccuccugggaggcc

SEQ ID NO: 73289 - RNA, 32 nt, Human
auugccuccugccagagaugguuuccaaguug

SEQ ID NO: 73290 - RNA, 32 nt, Human
auugccucuccccucucccauuuucucucuug

SEQ ID NO: 73291 - RNA, 32 nt, Human
auugccucugaccuuuuauaagacaguuuauc

SEQ ID NO: 73292 - RNA, 32 nt, Human
auugccucuuucucagaauccucuuuccuccc

SEQ ID NO: 73293 - RNA, 32 nt, Human
auugccugaacccaggaggcggagguugcagu

SEQ ID NO: 73294 - RNA, 32 nt, Human
auugccugaacccaggagguggagguugcagu

SEQ ID NO: 73295 - RNA, 32 nt, Human
auugccugagaccaggagguugaggcugcagu

SEQ ID NO: 73296 - RNA, 32 nt, Human
auugccugagccugggaaguggaaguugcagu

SEQ ID NO: 73297 - RNA, 32 nt, Human
auugccugaggucaggaguuugagacuagucu

SEQ ID NO: 73298 - RNA, 32 nt, Human
auugccugaggucaggaguuugagacuauccu

SEQ ID NO: 73299 - RNA, 32 nt, Human
auugccugccuaccccaugccugcugcagaaa

SEQ ID NO: 73300 - RNA, 32 nt, Human
auugccugccucugcugcgucuuugcccacug

SEQ ID NO: 73301 - RNA, 23 nt, Human
auugccugccuuagaaacuggcu

SEQ ID NO: 73302 - RNA, 32 nt, Human
auugccuggaaccuucuucuagcauaaaugaa

SEQ ID NO: 73303 - RNA, 32 nt, Human
auugccuggaagcaaauuucaggccuucuuua

SEQ ID NO: 73304 - RNA, 32 nt, Human
auugccuggcuaaugagaaccccugguucuca

SEQ ID NO: 73305 - RNA, 32 nt, Human
auugccuggggaacuagccacacaggaggccg

SEQ ID NO: 73306 - RNA, 32 nt, Human
auugccuguaaucccagcuacuagggaggcug

SEQ ID NO: 73307 - RNA, 32 nt, Human
auugccuguagucccagcuacuugggaggcug

SEQ ID NO: 73308 - RNA, 32 nt, Human
auugccuguguguugcacuggagcacagagga

SEQ ID NO: 73309 - RNA, 32 nt, Human
auugccuguuuuccccuuccuuaucuucucuc

SEQ ID NO: 73310 - RNA, 32 nt, Human
auugccuuaaauagccucucuccccauuuagg

SEQ ID NO: 73311 - RNA, 32 nt, Human
auugccuuaucucuccccaucuagccaggaau

SEQ ID NO: 73312 - RNA, 32 nt, Human
auugccuuaugagaucauccucauguuaaacc

SEQ ID NO: 73313 - RNA, 32 nt, Human
auugccuuccuauuuugcauaauaaaugcuuc

SEQ ID NO: 73314 - RNA, 32 nt, Human
auugccuucucccuuccuguucccucaucccu

SEQ ID NO: 73315 - RNA, 32 nt, Human
auugccuucuuugaagaagguggaccuuuuaa

SEQ ID NO: 73316 - RNA, 32 nt, Human
auugccuuguaggccccagagcaaucggggaa

SEQ ID NO: 73317 - RNA, 32 nt, Human
auugccuuucuuuuccccuccuccuuuguauu

SEQ ID NO: 73318 - RNA, 32 nt, Human
auugccuuuggcaauucuucuucucaagcacu

SEQ ID NO: 73319 - RNA, 32 nt, Human
auugccuuuuaccugagggaauaaagacuucu

SEQ ID NO: 73320 - RNA, 32 nt, Human
auugccuuuuccaggaaagggaagaaaacacu

SEQ ID NO: 73321 - RNA, 32 nt, Human
auugcgacaggagggaaauggcggcucugcaa

SEQ ID NO: 73322 - RNA, 32 nt, Human
auugcgcaaaacugaaaggcaugugaagggaa

SEQ ID NO: 73323 - RNA, 32 nt, Human
auugcgccacagcauuccagccugggcgaugg

SEQ ID NO: 73324 - RNA, 32 nt, Human
auugcgccaccacacuccagccugggcaacag

SEQ ID NO: 73325 - RNA, 32 nt, Human
auugcgccaccacugcacuccagccugggcaa

SEQ ID NO: 73326 - RNA, 32 nt, Human
auugcgccaccgcacuccagccugggcaacag

SEQ ID NO: 73327 - RNA, 32 nt, Human
auugcgccaccgcacuccagccugggcgacag

SEQ ID NO: 73328 - RNA, 32 nt, Human
auugcgccacugcaaaccagccugggcaauag

SEQ ID NO: 73329 - RNA, 32 nt, Human
auugcgccacugcacaccagucuggagacaga

SEQ ID NO: 73330 - RNA, 32 nt, Human
auugcgccacugcacacuagcuugggugacag

SEQ ID NO: 73331 - RNA, 32 nt, Human
auugcgccacugcaccccagcccagugacagg

SEQ ID NO: 73332 - RNA, 32 nt, Human
auugcgccacugcaccccagcccgggugacag

SEQ ID NO: 73333 - RNA, 32 nt, Human
auugcgccacugcaccccagccuggacaacag

SEQ ID NO: 73334 - RNA, 32 nt, Human
auugcgccacugcaccccagccugggcgacag

SEQ ID NO: 73335 - RNA, 32 nt, Human
auugcgccacugcaccccagccugggugacag

SEQ ID NO: 73336 - RNA, 32 nt, Human
auugcgccacugcacucaagucugggcgacag

SEQ ID NO: 73337 - RNA, 32 nt, Human
auugcgccacugcacuccaaccugggcaauag

SEQ ID NO: 73338 - RNA, 32 nt, Human
auugcgccacugcacuccacccugggugacag

SEQ ID NO: 73339 - RNA, 23 nt, Human
auugcgccacugcacuccagcca

SEQ ID NO: 73340 - RNA, 32 nt, Human
auugcgccacugcacuccagccagggcgaagg

SEQ ID NO: 73341 - RNA, 32 nt, Human
auugcgccacugcacuccagccuaggugauag

SEQ ID NO: 73342 - RNA, 32 nt, Human
auugcgccacugcacuccagccugacgacaaa

SEQ ID NO: 73343 - RNA, 32 nt, Human
auugcgccacugcacuccagccugagcgacag

SEQ ID NO: 73344 - RNA, 32 nt, Human
auugcgccacugcacuccagccuggcgacaga

SEQ ID NO: 73345 - RNA, 32 nt, Human
auugcgccacugcacuccagccugggagacag

SEQ ID NO: 73346 - RNA, 32 nt, Human
auugcgccacugcacuccagccugggcaacaa

SEQ ID NO: 73347 - RNA, 32 nt, Human
auugcgccacugcacuccagccugggcaacag

SEQ ID NO: 73348 - RNA, 32 nt, Human
auugcgccacugcacuccagccugggcaauag

SEQ ID NO: 73349 - RNA, 32 nt, Human
auugcgccacugcacuccagccugggcagcag

SEQ ID NO: 73350 - RNA, 32 nt, Human
auugcgccacugcacuccagccugggcgacag

SEQ ID NO: 73351 - RNA, 32 nt, Human
auugcgccacugcacuccagccugggcgacgg

SEQ ID NO: 73352 - RNA, 32 nt, Human
auugcgccacugcacuccagccugggcuacag

SEQ ID NO: 73353 - RNA, 32 nt, Human
auugcgccacugcacuccagccugggggacag

SEQ ID NO: 73354 - RNA, 32 nt, Human
auugcgccacugcacuccagccuggguaacag

SEQ ID NO: 73355 - RNA, 32 nt, Human
auugcgccacugcacuccagccugggugacag

SEQ ID NO: 73356 - RNA, 32 nt, Human
auugcgccacugcacuccagccugggugacug

SEQ ID NO: 73357 - RNA, 32 nt, Human
auugcgccacugcacuccagccugguugacag

SEQ ID NO: 73358 - RNA, 32 nt, Human
auugcgccacugcacuccagcgcggaagacag

SEQ ID NO: 73359 - RNA, 32 nt, Human
auugcgccacugcacuccagcgugggcuacag

SEQ ID NO: 73360 - RNA, 32 nt, Human
auugcgccacugcacuccagucugggcgacag

SEQ ID NO: 73361 - RNA, 32 nt, Human
auugcgccacugcacuccagucuggucggcaa

SEQ ID NO: 73362 - RNA, 32 nt, Human
auugcgccacugcacuucagccuggaugacag

SEQ ID NO: 73363 - RNA, 32 nt, Human
auugcgccacugcacuucagccugggcaacag

SEQ ID NO: 73364 - RNA, 32 nt, Human
auugcgccacugcaguccgcaguccggccugg

SEQ ID NO: 73365 - RNA, 32 nt, Human
auugcgccacugcaguccgcagucuggccugg

SEQ ID NO: 73366 - RNA, 32 nt, Human
auugcgccacugcauuccagccugggugacug

SEQ ID NO: 73367 - RNA, 32 nt, Human
auugcgccacugcauuccagcuugggcgacag

SEQ ID NO: 73368 - RNA, 32 nt, Human
auugcgccacugcauucuagccuggaugacag

SEQ ID NO: 73369 - RNA, 32 nt, Human
auugcgccacugcccucuagccuagacgacag

SEQ ID NO: 73370 - RNA, 32 nt, Human
auugcgccacugcgcuccagccugggcaacag

SEQ ID NO: 73371 - RNA, 32 nt, Human
auugcgccacuguacuccagccuggcaacaga

SEQ ID NO: 73372 - RNA, 32 nt, Human
auugcgccacuguacuccagccugggugacga

SEQ ID NO: 73373 - RNA, 32 nt, Human
auugcgccacuguacuccagcuugggcaacag

SEQ ID NO: 73374 - RNA, 32 nt, Human
auugcgccacuucacuccagccugggugacag

SEQ ID NO: 73375 - RNA, 32 nt, Human
auugcgccagugcacuccagcugggcgacaga

SEQ ID NO: 73376 - RNA, 32 nt, Human
auugcgccauugcacuccagccuagguaacaa

SEQ ID NO: 73377 - RNA, 32 nt, Human
auugcgccauugcacuccagccugggcaaaaa

SEQ ID NO: 73378 - RNA, 32 nt, Human
auugcgccauugcacuccagccugggcaacaa

SEQ ID NO: 73379 - RNA, 32 nt, Human
auugcgccauugcacuccagccugggcaacac

SEQ ID NO: 73380 - RNA, 32 nt, Human
auugcgccauugcacuccagccugggcaacag

SEQ ID NO: 73381 - RNA, 32 nt, Human
auugcgccauugcacuccagccugggcaacga

SEQ ID NO: 73382 - RNA, 32 nt, Human
auugcgccauugcacuccagccuggggacaaa

SEQ ID NO: 73383 - RNA, 32 nt, Human
auugcgccauugcacucuagccugugugacag

SEQ ID NO: 73384 - RNA, 32 nt, Human
auugcgccauugcauuccagccugggcaacaa

SEQ ID NO: 73385 - RNA, 32 nt, Human
auugcgccauugcauuccagccugggugacag

SEQ ID NO: 73386 - RNA, 32 nt, Human
auugcgccauuguacuccagccugggcaacaa

SEQ ID NO: 73387 - RNA, 32 nt, Human
auugcgccauuguacuccagccugggggacag

SEQ ID NO: 73388 - RNA, 32 nt, Human
auugcgccauugugcuccagccugggugacaa

SEQ ID NO: 73389 - RNA, 32 nt, Human
auugcgcccccugcacuccagccugggcuuca

SEQ ID NO: 73390 - RNA, 32 nt, Human
auugcgccccugcacuccaaccuggacaacac

SEQ ID NO: 73391 - RNA, 32 nt, Human
auugcgccgcugcacuccagccugggcaacag

SEQ ID NO: 73392 - RNA, 32 nt, Human
auugcgccgcugcacuccagccugggcgacag

SEQ ID NO: 73393 - RNA, 32 nt, Human
auugcgccguuguacuccagccugggcaacag

SEQ ID NO: 73394 - RNA, 32 nt, Human
auugcgccucgaggcuccgaucgggcuaggcc

SEQ ID NO: 73395 - RNA, 32 nt, Human
auugcgcuacuacgcuacagccugggugacag

SEQ ID NO: 73396 - RNA, 32 nt, Human
auugcgcuacugaacuccagccuggguuacag

SEQ ID NO: 73397 - RNA, 32 nt, Human
auugcgcuacugcacuccagccuaggcaacag

SEQ ID NO: 73398 - RNA, 32 nt, Human
auugcgcuacugcacuccagccugggcgacag

SEQ ID NO: 73399 - RNA, 32 nt, Human
auugcgcuacugcacuccagccugggugacag

SEQ ID NO: 73400 - RNA, 32 nt, Human
auugcgcucagguuauguuccuuuuaccuccu

SEQ ID NO: 73401 - RNA, 32 nt, Human
auugcggagaaguugcuucugccgcucagaag

SEQ ID NO: 73402 - RNA, 32 nt, Human
auugcggaucacugucuaacauuugacuucuu

SEQ ID NO: 73403 - RNA, 32 nt, Human
auugcggaucacuguuuaacauuugacuucuu

SEQ ID NO: 73404 - RNA, 32 nt, Human
auugcggcuuucugucucuggugugaacaggc

SEQ ID NO: 73405 - RNA, 31 nt, Human
auugcgggaaaaggaacuugauuuaacagaa

SEQ ID NO: 73406 - RNA, 32 nt, Human
auugcggggagacagcucucucucccaccucc

SEQ ID NO: 73407 - RNA, 32 nt, Human
auugcgggggccugggcuagcugcuggcuacc

SEQ ID NO: 73408 - RNA, 32 nt, Human
auugcggguccccacaugcacacagaacucug

SEQ ID NO: 73409 - RNA, 32 nt, Human
auugcggugagccgggauugcgccagugcacu

SEQ ID NO: 73410 - RNA, 32 nt, Human
auugcguaguugaaagaaaaagugauccuguc

SEQ ID NO: 73411 - RNA, 32 nt, Human
auugcgucacugcacuccaaccugggugacag

SEQ ID NO: 73412 - RNA, 32 nt, Human
auugcgucacugcacuccagccugggcgacag

SEQ ID NO: 73413 - RNA, 32 nt, Human
auugcgucacugcacugcagccugggugacag

SEQ ID NO: 73414 - RNA, 32 nt, Human
auugcgucucagagaccaucuuuggagaaugg

SEQ ID NO: 73415 - RNA, 32 nt, Human
auugcgugaugagcuauuguucuggcuguuaa

SEQ ID NO: 73416 - RNA, 32 nt, Human
auugcuaaagcccacagcccccaguguggguu

SEQ ID NO: 73417 - RNA, 32 nt, Human
auugcuaaaugaugcauaguauuuuagucuac

SEQ ID NO: 73418 - RNA, 32 nt, Human
auugcuaacauggugaaaccccgucucuacua

SEQ ID NO: 73419 - RNA, 32 nt, Human
auugcuaacuagaauaaccacuuuagagaaga

SEQ ID NO: 73420 - RNA, 32 nt, Human
auugcuacagcaucuaguguacugagccugcg

SEQ ID NO: 73421 - RNA, 32 nt, Human
auugcuacuaugugaaacuuucacaugcaacc

SEQ ID NO: 73422 - RNA, 32 nt, Human
auugcuaguuucaugcuuccuccucugauuuu

SEQ ID NO: 73423 - RNA, 32 nt, Human
auugcuauaagaaaaguuacaagggaaaguuu

SEQ ID NO: 73424 - RNA, 32 nt, Human
auugcuauacugcuuaguuuuaacugguuuau

SEQ ID NO: 73425 - RNA, 32 nt, Human
auugcuauuagucuacauguauuucuguaaua

SEQ ID NO: 73426 - RNA, 32 nt, Human
auugcucaaucaccagccuuugcgaggaguug

SEQ ID NO: 73427 - RNA, 32 nt, Human
auugcucaaugccacuguccaaguuacgacuu

SEQ ID NO: 73428 - RNA, 32 nt, Human
auugcucacccagacaccaugugcaaugacau

SEQ ID NO: 73429 - RNA, 32 nt, Human
auugcucagaacuuaaguaagcaugccaacau

SEQ ID NO: 73430 - RNA, 32 nt, Human
auugcucagagaagguaaaagacugaaucuac

SEQ ID NO: 73431 - RNA, 32 nt, Human
auugcucagccaggcuguggagcagcugaggc

SEQ ID NO: 73432 - RNA, 32 nt, Human
auugcucaggcauuauuccagcaguagauagu

SEQ ID NO: 73433 - RNA, 24 nt, Human
auugcuccacuguucaccaaggaa

SEQ ID NO: 73434 - RNA, 24 nt, Human
auugcuccaggccuccgagccuca

SEQ ID NO: 73435 - RNA, 32 nt, Human
auugcuccauugcacuccagccugggcaacga

SEQ ID NO: 73436 - RNA, 32 nt, Human
auugcuccauugcacuccagccugggcgauag

SEQ ID NO: 73437 - RNA, 32 nt, Human
auugcucccagucuacuaaagcagaaagaaaa

SEQ ID NO: 73438 - RNA, 32 nt, Human
auugcuccccucucccugccacccuuccccag

SEQ ID NO: 73439 - RNA, 32 nt, Human
auugcucucaaggaucuaguggauuaguaagu

SEQ ID NO: 73440 - RNA, 32 nt, Human
auugcucuccacuguauccccucuaccuggca

SEQ ID NO: 73441 - RNA, 32 nt, Human
auugcucucccucgugcuccccaaaucaccac

SEQ ID NO: 73442 - RNA, 32 nt, Human
auugcucucuauacuaggauagacuuuaucua

SEQ ID NO: 73443 - RNA, 32 nt, Human
auugcucucucaucuugccuccagucagaugu

SEQ ID NO: 73444 - RNA, 32 nt, Human
auugcucugaaauuuaucuuaaaagagcuugc

SEQ ID NO: 73445 - RNA, 22 nt, Human
auugcucugauaaaaaauagcu

SEQ ID NO: 73446 - RNA, 32 nt, Human
auugcucugucgcccaggcuggaaugcagugg

SEQ ID NO: 73447 - RNA, 32 nt, Human
auugcucuguguacauuuaauucuucagugug

SEQ ID NO: 73448 - RNA, 32 nt, Human
auugcucuguugcccaggcuagagugcagugg

SEQ ID NO: 73449 - RNA, 32 nt, Human
auugcucuguugcccaggcuggaguacagugg

SEQ ID NO: 73450 - RNA, 32 nt, Human
auugcucuguugcccaggcuggagugcagugg

SEQ ID NO: 73451 - RNA, 24 nt, Human
auugcugaaaaguggaaauucggu

SEQ ID NO: 73452 - RNA, 32 nt, Human
auugcugaagacacaguggauauuuugggcca

SEQ ID NO: 73453 - RNA, 31 nt, Human
auugcugaagagagagacaaaagacugccaa

SEQ ID NO: 73454 - RNA, 32 nt, Human
auugcugacacuuuccccuugugaaacuguau

SEQ ID NO: 73455 - RNA, 22 nt, Human
auugcugacaucuuggagcuca

SEQ ID NO: 73456 - RNA, 32 nt, Human
auugcugagcuuaugccaggagcaucaggcug

SEQ ID NO: 73457 - RNA, 32 nt, Human
auugcugaggagaagcaggaaaccuguuuccu

SEQ ID NO: 73458 - RNA, 32 nt, Human
auugcugaggagaguggaggccaggcuggggu

SEQ ID NO: 73459 - RNA, 32 nt, Human
auugcugaggaggcggcggguagcuggcaggc

SEQ ID NO: 73460 - RNA, 32 nt, Human
auugcugauacuugaauaaucaaucucuacua

SEQ ID NO: 73461 - RNA, 32 nt, Human
auugcugauuuacacuggaucuugccuuagaa

SEQ ID NO: 73462 - RNA, 32 nt, Human
auugcugcaccucaucaggccauuacauuguc

SEQ ID NO: 73463 - RNA, 32 nt, Human
auugcugcacuccuguaacaaacauuauuuuu

SEQ ID NO: 73464 - RNA, 32 nt, Human
auugcugcacuuuggaaagucaaaaucaagug

SEQ ID NO: 73465 - RNA, 32 nt, Human
auugcugcaguuuccaccacucuuauacagga

SEQ ID NO: 73466 - RNA, 32 nt, Human
auugcugccuacgauaugcaggcugcacagaa

SEQ ID NO: 73467 - RNA, 32 nt, Human
auugcugccuuucuaaaaacccaaaauguagu

SEQ ID NO: 73468 - RNA, 32 nt, Human
auugcugccuuuguugaggugcaaggagugua

SEQ ID NO: 73469 - RNA, 32 nt, Human
auugcugcuagugccgugagcaccgcccagcc

SEQ ID NO: 73470 - RNA, 32 nt, Human
auugcugcugcuuaaauggcaggccaacuggu

SEQ ID NO: 73471 - RNA, 32 nt, Human
auugcugcuucuccaacucuugcuuggggcca

SEQ ID NO: 73472 - RNA, 32 nt, Human
auugcugcuugguucccaccucagagguucug

SEQ ID NO: 73473 - RNA, 32 nt, Human
auugcuggagagaacgcggcgauggagccggg

SEQ ID NO: 73474 - RNA, 32 nt, Human
auugcuggaugcuacacuccaugucucuuugu

SEQ ID NO: 73475 - RNA, 32 nt, Human
auugcuggcggugggagcgccgcccggucuca

SEQ ID NO: 73476 - RNA, 32 nt, Human
auugcugggauuacaggcaugagccaccacac

SEQ ID NO: 73477 - RNA, 32 nt, Human
auugcugggauuacaggcaugagccacugcac

SEQ ID NO: 73478 - RNA, 32 nt, Human
auugcugggauuacaggcgugagccaccacac

SEQ ID NO: 73479 - RNA, 32 nt, Human
auugcugggauuacaggcgugagccauggcgc

SEQ ID NO: 73480 - RNA, 32 nt, Human
auugcugggauuacaggcgugagucaccgugc

SEQ ID NO: 73481 - RNA, 32 nt, Human
auugcugggauuacaggugugagccaccgcac

SEQ ID NO: 73482 - RNA, 32 nt, Human
auugcugggauuacaggugugagccaccgcgc

SEQ ID NO: 73483 - RNA, 22 nt, Human
auugcugggcccagcaccaagg

SEQ ID NO: 73484 - RNA, 23 nt, Human
auugcugggcccuggauauugga

SEQ ID NO: 73485 - RNA, 32 nt, Human
auugcugggcucauggucagaguucccaguua

SEQ ID NO: 73486 - RNA, 32 nt, Human
auugcuggggaagaaacaaacacacaccaaac

SEQ ID NO: 73487 - RNA, 32 nt, Human
auugcuggguggaaauauucagaugcugcuua

SEQ ID NO: 73488 - RNA, 32 nt, Human
auugcuggguuuacaggcaugagccaccacgc

SEQ ID NO: 73489 - RNA, 32 nt, Human
auugcuguaaaaauaggauggcgaguuugugu

SEQ ID NO: 73490 - RNA, 32 nt, Human
auugcuguagcagauucuguucugccugcugc

SEQ ID NO: 73491 - RNA, 32 nt, Human
auugcuguaguuuggauuaacuccccucccgc

SEQ ID NO: 73492 - RNA, 32 nt, Human
auugcuguauuguuaaugaaacagguguaauc

SEQ ID NO: 73493 - RNA, 32 nt, Human
auugcugucagauuaauuccaugaucacuaaa

SEQ ID NO: 73494 - RNA, 32 nt, Human
auugcugugaagauuagugaaauaaugcaugu

SEQ ID NO: 73495 - RNA, 32 nt, Human
auugcugugagcugauuguccucuaguuucuc

SEQ ID NO: 73496 - RNA, 32 nt, Human
auugcugugaguuccugcauccuggccauggu

SEQ ID NO: 73497 - RNA, 32 nt, Human
auugcugugccucccaaaauuguuuugagcuu

SEQ ID NO: 73498 - RNA, 32 nt, Human
auugcuguggauauguccaggagaccuuagau

SEQ ID NO: 73499 - RNA, 32 nt, Human
auugcugugguguugggcaggucucugucccu

SEQ ID NO: 73500 - RNA, 32 nt, Human
auugcuuaaacccaggaggcaaaggcugcagu

SEQ ID NO: 73501 - RNA, 32 nt, Human
auugcuuaagucugggagguugaggcugcagu

SEQ ID NO: 73502 - RNA, 29 nt, Human
auugcuuaauaaacacauuuugggugauu

SEQ ID NO: 73503 - RNA, 32 nt, Human
auugcuuacuccuuuucuuaucaugcccuggg

SEQ ID NO: 73504 - RNA, 32 nt, Human
auugcuuauggcuaugagauagguugaucucg

SEQ ID NO: 73505 - RNA, 32 nt, Human
auugcuuccuuuucuuuuuccuuuugcgauuu

SEQ ID NO: 73506 - RNA, 32 nt, Human
auugcuucucaagcucuugaaccugaggaugg

SEQ ID NO: 73507 - RNA, 32 nt, Human
auugcuucucaagucuaaccagccucagcagu

SEQ ID NO: 73508 - RNA, 32 nt, Human
auugcuucucggccuuuuggcuaagaucaagu

SEQ ID NO: 73509 - RNA, 32 nt, Human
auugcuucugcucuccucagaggucccgggcu

SEQ ID NO: 73510 - RNA, 32 nt, Human
auugcuucuguacugcucuucuuuugcucuaa

SEQ ID NO: 73511 - RNA, 32 nt, Human
auugcuucuuugccucuccaugaauggccaau

SEQ ID NO: 73512 - RNA, 32 nt, Human
auugcuugaacccaagaggucgaggcugcagu

SEQ ID NO: 73513 - RNA, 32 nt, Human
auugcuugaacccagaagguagagguugcagc

SEQ ID NO: 73514 - RNA, 32 nt, Human
auugcuugaacccaggaagcagagguugcagu

SEQ ID NO: 73515 - RNA, 32 nt, Human
auugcuugaacccaggaagcggagguugcagu

SEQ ID NO: 73516 - RNA, 32 nt, Human
auugcuugaacccaggaaguggcaguugcagu

SEQ ID NO: 73517 - RNA, 32 nt, Human
auugcuugaacccaggagacagagguugcagu

SEQ ID NO: 73518 - RNA, 32 nt, Human
auugcuugaacccaggagacagagguuguagu

SEQ ID NO: 73519 - RNA, 32 nt, Human
auugcuugaacccaggagacggagguugcagu

SEQ ID NO: 73520 - RNA, 32 nt, Human
auugcuugaacccaggagauggaaguugcagu

SEQ ID NO: 73521 - RNA, 32 nt, Human
auugcuugaacccaggagauggagguugcagu

SEQ ID NO: 73522 - RNA, 32 nt, Human
auugcuugaacccaggagauggagguugcggu

SEQ ID NO: 73523 - RNA, 32 nt, Human
auugcuugaacccaggaggaagagguugcagu

SEQ ID NO: 73524 - RNA, 32 nt, Human
auugcuugaacccaggaggagguggagaucgc

SEQ ID NO: 73525 - RNA, 32 nt, Human
auugcuugaacccaggaggcagagauugcggu

SEQ ID NO: 73526 - RNA, 32 nt, Human
auugcuugaacccaggaggcagaggguugcag

SEQ ID NO: 73527 - RNA, 32 nt, Human
auugcuugaacccaggaggcagagguuacagu

SEQ ID NO: 73528 - RNA, 32 nt, Human
auugcuugaacccaggaggcagagguugcagu

SEQ ID NO: 73529 - RNA, 32 nt, Human
auugcuugaacccaggaggcagagguuguagu

SEQ ID NO: 73530 - RNA, 32 nt, Human
auugcuugaacccaggaggcgaagguugcagu

SEQ ID NO: 73531 - RNA, 32 nt, Human
auugcuugaacccaggaggcggagguagcagu

SEQ ID NO: 73532 - RNA, 32 nt, Human
auugcuugaacccaggaggcggagguaguggu

SEQ ID NO: 73533 - RNA, 32 nt, Human
auugcuugaacccaggaggcggagguugcagu

SEQ ID NO: 73534 - RNA, 32 nt, Human
auugcuugaacccaggaggcggagguugcggu

SEQ ID NO: 73535 - RNA, 32 nt, Human
auugcuugaacccaggaggcggagguuguagu

SEQ ID NO: 73536 - RNA, 32 nt, Human
auugcuugaacccaggaggcggaguuugcagu

SEQ ID NO: 73537 - RNA, 32 nt, Human
auugcuugaacccaggaggcggggguugcagu

SEQ ID NO: 73538 - RNA, 32 nt, Human
auugcuugaacccaggaggcugagguugcagu

SEQ ID NO: 73539 - RNA, 32 nt, Human
auugcuugaacccaggagguagaaguugcagu

SEQ ID NO: 73540 - RNA, 32 nt, Human
auugcuugaacccaggagguggagguugcagu

SEQ ID NO: 73541 - RNA, 32 nt, Human
auugcuugaacccaggagguggaguuugcagu

SEQ ID NO: 73542 - RNA, 32 nt, Human
auugcuugaacccaggcaguggagguugcagu

SEQ ID NO: 73543 - RNA, 32 nt, Human
auugcuugaacccagggggcagagguugcagu

SEQ ID NO: 73544 - RNA, 32 nt, Human
auugcuugaacccauaaggcagagguugcagu

SEQ ID NO: 73545 - RNA, 32 nt, Human
auugcuugaacccaugaggcggagguugcagu

SEQ ID NO: 73546 - RNA, 32 nt, Human
auugcuugaacccaugagguggagguugcggu

SEQ ID NO: 73547 - RNA, 32 nt, Human
auugcuugaacccgagaggcggaaguugcagu

SEQ ID NO: 73548 - RNA, 32 nt, Human
auugcuugaacccggaaggcggagguugcagu

SEQ ID NO: 73549 - RNA, 32 nt, Human
auugcuugaacccggaggcagagguugcagug

SEQ ID NO: 73550 - RNA, 32 nt, Human
auugcuugaacccggcaggcagagguugcagu

SEQ ID NO: 73551 - RNA, 32 nt, Human
auugcuugaacccggcgggcagagguugcagu

SEQ ID NO: 73552 - RNA, 32 nt, Human
auugcuugaacccgggagacggagguugcagu

SEQ ID NO: 73553 - RNA, 32 nt, Human
auugcuugaacccgggaggcagagauagcagu

SEQ ID NO: 73554 - RNA, 32 nt, Human
auugcuugaacccgggaggcagaggcuguagu

SEQ ID NO: 73555 - RNA, 32 nt, Human
auugcuugaacccgggaggcagagguugaagu

SEQ ID NO: 73556 - RNA, 32 nt, Human
auugcuugaacccgggaggcagagguugcagc

SEQ ID NO: 73557 - RNA, 32 nt, Human
auugcuugaacccgggaggcagagguugcagu

SEQ ID NO: 73558 - RNA, 32 nt, Human
auugcuugaacccgggaggcagagguugcggu

SEQ ID NO: 73559 - RNA, 32 nt, Human
auugcuugaacccgggaggcggagguugcagu

SEQ ID NO: 73560 - RNA, 32 nt, Human
auugcuugaacccgggaggcggagguugcggu

SEQ ID NO: 73561 - RNA, 32 nt, Human
auugcuugaacccgggaggcggaguuugcagu

SEQ ID NO: 73562 - RNA, 32 nt, Human
auugcuugaacccgggagguagagguugcagu

SEQ ID NO: 73563 - RNA, 32 nt, Human
auugcuugaacccgggagguggaggcugcagu

SEQ ID NO: 73564 - RNA, 32 nt, Human
auugcuugaacccgggagguggaggcugcggu

SEQ ID NO: 73565 - RNA, 32 nt, Human
auugcuugaacccgggagguggagguugcagu

SEQ ID NO: 73566 - RNA, 32 nt, Human
auugcuugaacccgggagguggagguugcggu

SEQ ID NO: 73567 - RNA, 32 nt, Human
auugcuugaacccgggagguggagguuguagu

SEQ ID NO: 73568 - RNA, 32 nt, Human
auugcuugaacccgggcggcggaaguugcagu

SEQ ID NO: 73569 - RNA, 32 nt, Human
auugcuugaacccgggggcagaggcugcagug

SEQ ID NO: 73570 - RNA, 32 nt, Human
auugcuugaacccgugaggcagagguugcagu

SEQ ID NO: 73571 - RNA, 32 nt, Human
auugcuugaacccgugaggcggagguuguagu

SEQ ID NO: 73572 - RNA, 32 nt, Human
auugcuugaacccuggaggcggagauugaagu

SEQ ID NO: 73573 - RNA, 32 nt, Human
auugcuugaacccuggaggcggagguugcagu

SEQ ID NO: 73574 - RNA, 32 nt, Human
auugcuugaacccuggagguggagguugcagu

SEQ ID NO: 73575 - RNA, 32 nt, Human
auugcuugaacccugggaggcagagguugcag

SEQ ID NO: 73576 - RNA, 32 nt, Human
auugcuugagccaggaagguugagguugcagu

SEQ ID NO: 73577 - RNA, 32 nt, Human
auugcuugagcccagaggcggagguugcagug

SEQ ID NO: 73578 - RNA, 32 nt, Human
auugcuugagcccaggagguugaggcugcagu

SEQ ID NO: 73579 - RNA, 32 nt, Human
auugcuugagccugggagguugaggcugcagu

SEQ ID NO: 73580 - RNA, 32 nt, Human
auugcuugagcugaggaguuugagaccagccu

SEQ ID NO: 73581 - RNA, 32 nt, Human
auugcuugaguccaggagguugaggcugcagu

SEQ ID NO: 73582 - RNA, 32 nt, Human
auugcuugagucugcgagguuggggcugccgu

SEQ ID NO: 73583 - RNA, 32 nt, Human
auugcuugauguuuucuuguaugucuacauua

SEQ ID NO: 73584 - RNA, 32 nt, Human
auugcuugcuguucuuuuucauaaucugucuu

SEQ ID NO: 73585 - RNA, 32 nt, Human
auugcuuggacugucuuugaacucugcaccuc

SEQ ID NO: 73586 - RNA, 32 nt, Human
auugcuugucaugggagacuggagugcagauu

SEQ ID NO: 73587 - RNA, 32 nt, Human
auugcuugugcagagggccacaauaaguguau

SEQ ID NO: 73588 - RNA, 32 nt, Human
auugcuuuaauguagacucauaguugaaauua

SEQ ID NO: 73589 - RNA, 32 nt, Human
auugcuuuacagccacaacacuuggauuccug

SEQ ID NO: 73590 - RNA, 32 nt, Human
auugcuuucauuucuuaaaaugcuucacuuca

SEQ ID NO: 73591 - RNA, 32 nt, Human
auugcuuucuuccuccccauuuggacccuucu

SEQ ID NO: 73592 - RNA, 32 nt, Human
auugcuuuguguauuuuguaggguucucuguu

SEQ ID NO: 73593 - RNA, 32 nt, Human
auugcuuuucaggaagaagacauggcagacua

SEQ ID NO: 73594 - RNA, 32 nt, Human
auugcuuuuccuucccuaauucauacaaugaa

SEQ ID NO: 73595 - RNA, 32 nt, Human
auugcuuuugcagcagagaccucagggagaaa

SEQ ID NO: 73596 - RNA, 32 nt, Human
auuggaaaaagcuggccgagaaccauuuauac

SEQ ID NO: 73597 - RNA, 32 nt, Human
auuggaaaagccccaguccucggggagcagau

SEQ ID NO: 73598 - RNA, 32 nt, Human
auuggaaacccagcucacgaaccgcagccagg

SEQ ID NO: 73599 - RNA, 25 nt, Human
auuggaaagauuugcacacccucca

SEQ ID NO: 73600 - RNA, 32 nt, Human
auuggaaagcagccuggccaacauagugggac

SEQ ID NO: 73601 - RNA, 32 nt, Human
auuggaaaucagaacuuugaggugaaggcaga

SEQ ID NO: 73602 - RNA, 32 nt, Human
auuggaacaaggcuucuuaagacauggaugua

SEQ ID NO: 73603 - RNA, 32 nt, Human
auuggaacacccuuuguccuucucggcggggg

SEQ ID NO: 73604 - RNA, 32 nt, Human
auuggaaccaucucaaaauaauuacaaaguuu

SEQ ID NO: 73605 - RNA, 32 nt, Human
auuggaaccaucucaaaauaauuacaaauuuu

SEQ ID NO: 73606 - RNA, 32 nt, Human
auuggaagaacaggagaaaaagaaaagcaaaa

SEQ ID NO: 73607 - RNA, 32 nt, Human
auuggaagagugagcaggacacagaggggagg

SEQ ID NO: 73608 - RNA, 32 nt, Human
auuggaagcaaaugacaucacagcaggucaga

SEQ ID NO: 73609 - RNA, 32 nt, Human
auuggaagcaacuguuuucagcaccuuuuaua

SEQ ID NO: 73610 - RNA, 32 nt, Human
auuggaagcaguauauagaaacuguuucauua

SEQ ID NO: 73611 - RNA, 32 nt, Human
auuggaagcccuugcucuugcacuuugcauua

SEQ ID NO: 73612 - RNA, 32 nt, Human
auuggaagcuguuuaaaugacaccauaucagg

SEQ ID NO: 73613 - RNA, 32 nt, Human
auuggaaggauuuagcuguacuuuaugucuca

SEQ ID NO: 73614 - RNA, 32 nt, Human
auuggaagggagccauccucugggagauugcu

SEQ ID NO: 73615 - RNA, 32 nt, Human
auuggaagguucauuugagaauucuuuccuuc

SEQ ID NO: 73616 - RNA, 32 nt, Human
auuggaauaaggggguggggagagggagagaa

SEQ ID NO: 73617 - RNA, 31 nt, Human
auuggaauacugcagaggaccaaagcugagg

SEQ ID NO: 73618 - RNA, 32 nt, Human
auuggaaucccuuuuccaacguuuucuuuaua

SEQ ID NO: 73619 - RNA, 32 nt, Human
auuggaaugggagagugaugauccaaauagga

SEQ ID NO: 73620 - RNA, 32 nt, Human
auuggaauuagagcaagguauuggacagaacc

SEQ ID NO: 73621 - RNA, 32 nt, Human
auuggaauuaucuaaggugagccccaguuucc

SEQ ID NO: 73622 - RNA, 32 nt, Human
auuggaauuguuggaaaacuuuccugaaacuu

SEQ ID NO: 73623 - RNA, 32 nt, Human
auuggacaacacaggaagucccucuggccacc

SEQ ID NO: 73624 - RNA, 32 nt, Human
auuggacaauuuauaagaacuaugggagcaau

SEQ ID NO: 73625 - RNA, 32 nt, Human
auuggacagaguuuaugaaacagcugugcuuu

SEQ ID NO: 73626 - RNA, 32 nt, Human
auuggacagcuuucacaaguaacaggauuagg

SEQ ID NO: 73627 - RNA, 32 nt, Human
auuggacagguuucucuccagcaagaaagccc

SEQ ID NO: 73628 - RNA, 21 nt, Human
auuggacaguguauccuaaca

SEQ ID NO: 73629 - RNA, 31 nt, Human
auuggacaguuucagaggccuuauuuuguca

SEQ ID NO: 73630 - RNA, 32 nt, Human
auuggacaucacaguacaccauggucuuucac

SEQ ID NO: 73631 - RNA, 32 nt, Human
auuggaccacuauacuccagccuggcaacaga

SEQ ID NO: 73632 - RNA, 32 nt, Human
auuggaccacugcucuccagccugggcaacag

SEQ ID NO: 73633 - RNA, 32 nt, Human
auuggaccaguucugcugccuaagaaggucug

SEQ ID NO: 73634 - RNA, 32 nt, Human
auuggaccauguuagaggaggaauggugucau

SEQ ID NO: 73635 - RNA, 32 nt, Human
auuggaccgcacuuaucucccuuguccuguau

SEQ ID NO: 73636 - RNA, 32 nt, Human
auuggaccuggaagaagugagucuccucucag

SEQ ID NO: 73637 - RNA, 32 nt, Human
auuggacgggagacagagugacgcacugacuc

SEQ ID NO: 73638 - RNA, 32 nt, Human
auuggacuuuuucccuuuaauacugaugaugc

SEQ ID NO: 73639 - RNA, 32 nt, Human
auuggagaaaaguuacuguucagucccugaag

SEQ ID NO: 73640 - RNA, 32 nt, Human
auuggagaaagccaguagcaacugugagaaau

SEQ ID NO: 73641 - RNA, 32 nt, Human
auuggagaacaaggagcugcugggucucagcc

SEQ ID NO: 73642 - RNA, 20 nt, Human
auuggagaagaaccaagcug

SEQ ID NO: 73643 - RNA, 32 nt, Human
auuggagaagauuuaugucagcacacacuuac

SEQ ID NO: 73644 - RNA, 32 nt, Human
auuggagaaucagcucacugcucucuagaaac

SEQ ID NO: 73645 - RNA, 32 nt, Human
auuggagaccucccuucugucuuuuaggcuau

SEQ ID NO: 73646 - RNA, 19 nt, Human
auuggagacuacuccccca

SEQ ID NO: 73647 - RNA, 32 nt, Human
auuggagagcucaggaucuggccccagagaaa

SEQ ID NO: 73648 - RNA, 32 nt, Human
auuggagagggauggggagggaagggaaggca

SEQ ID NO: 73649 - RNA, 32 nt, Human
auuggagaugagaauuguguuuggagguaacu

SEQ ID NO: 73650 - RNA, 18 nt, Human
auuggagcaggaacugga

SEQ ID NO: 73651 - RNA, 32 nt, Human
auuggagcccaugguagcauccucagcaugga

SEQ ID NO: 73652 - RNA, 32 nt, Human
auuggagcugaguacucaggaacuugacugua

SEQ ID NO: 73653 - RNA, 32 nt, Human
auuggaggaaugagucagcaggcguggcucau

SEQ ID NO: 73654 - RNA, 32 nt, Human
auuggaggccaggaguuggagaucagccuggg

SEQ ID NO: 73655 - RNA, 32 nt, Human
auuggaggcuuggggccaugcccagccagguu

SEQ ID NO: 73656 - RNA, 32 nt, Human
auuggagggaggugguguguucacgugagccu

SEQ ID NO: 73657 - RNA, 32 nt, Human
auuggagggcccuaucuugugaguggggcauc

SEQ ID NO: 73658 - RNA, 32 nt, Human
auuggagggguucuugggggagggagggagag

SEQ ID NO: 73659 - RNA, 32 nt, Human
auuggaggguggagacuguggggaaggaguuc

SEQ ID NO: 73660 - RNA, 32 nt, Human
auuggaggguggcccuccuuccccacaaggau

SEQ ID NO: 73661 - RNA, 32 nt, Human
auuggagggugguagccccuccccagccuucu

SEQ ID NO: 73662 - RNA, 32 nt, Human
auuggagguggggguuucagaguguugccacg

SEQ ID NO: 73663 - RNA, 32 nt, Human
auuggaguauagaaaauggaagaugguguugu

SEQ ID NO: 73664 - RNA, 32 nt, Human
auuggagugaagauuucugugacaugcugggu

SEQ ID NO: 73665 - RNA, 32 nt, Human
auuggaguggggcgaggagagagccagaaaac

SEQ ID NO: 73666 - RNA, 32 nt, Human
auuggagugucugagacacaggcagauuauuc

SEQ ID NO: 73667 - RNA, 32 nt, Human
auuggaguuuaggaauuggaggcggcagugag

SEQ ID NO: 73668 - RNA, 32 nt, Human
auuggauacauacaccagcauuccuuuugaac

SEQ ID NO: 73669 - RNA, 32 nt, Human
auuggaucaacagccuccucucuuggggacuc

SEQ ID NO: 73670 - RNA, 32 nt, Human
auuggaucacaaaagcuguauucuucccccua

SEQ ID NO: 73671 - RNA, 32 nt, Human
auuggaucagagcucaucuccauccagucuug

SEQ ID NO: 73672 - RNA, 32 nt, Human
auuggauccucccacaguugcccuggugauga

SEQ ID NO: 73673 - RNA, 32 nt, Human
auuggaucucaggaguuggagaucagcauggg

SEQ ID NO: 73674 - RNA, 32 nt, Human
auuggaucuuucuccacugcuguggcuggaca

SEQ ID NO: 73675 - RNA, 32 nt, Human
auuggaugacccugggugguuauggcucagaa

SEQ ID NO: 73676 - RNA, 32 nt, Human
auuggaugagcugcaggaaaauggcaggcagg

SEQ ID NO: 73677 - RNA, 32 nt, Human
auuggaugggagaagaaggaaggggguggccc

SEQ ID NO: 73678 - RNA, 31 nt, Human
auuggaugggagagagaucaaaggcugggag

SEQ ID NO: 73679 - RNA, 32 nt, Human
auuggauuacaugcucacauuuaacaaagaga

SEQ ID NO: 73680 - RNA, 32 nt, Human
auuggauuagagaauuuccagauucccuucca

SEQ ID NO: 73681 - RNA, 32 nt, Human
auuggauugaaggauacaaaauauugauccug

SEQ ID NO: 73682 - RNA, 32 nt, Human
auuggauugaaggaugcaauauugauccugga

SEQ ID NO: 73683 - RNA, 32 nt, Human
auuggauuucguuccuccugaggagaccaugc

SEQ ID NO: 73684 - RNA, 32 nt, Human
auuggauuuucauggaggccaggacagagagu

SEQ ID NO: 73685 - RNA, 32 nt, Human
auuggcaaauggguugggugcaauggcucacg

SEQ ID NO: 73686 - RNA, 32 nt, Human
auuggcacaaagcaugaagaaaccccauuuuu

SEQ ID NO: 73687 - RNA, 32 nt, Human
auuggcacaaauguuuuauacaaagaguuuga

SEQ ID NO: 73688 - RNA, 32 nt, Human
auuggcacccccagugcaggcagcagggaucc

SEQ ID NO: 73689 - RNA, 32 nt, Human
auuggcaccccuccagccuggaggccaggcuu

SEQ ID NO: 73690 - RNA, 32 nt, Human
auuggcacugcagguuuuuagagccauuuuga

SEQ ID NO: 73691 - RNA, 32 nt, Human
auuggcacuucccuguccagcacuacaacuua

SEQ ID NO: 73692 - RNA, 32 nt, Human
auuggcagacaggcacaugggaggcuggagua

SEQ ID NO: 73693 - RNA, 32 nt, Human
auuggcagagguggggguuggcuguggccugg

SEQ ID NO: 73694 - RNA, 32 nt, Human
auuggcagagugagaugggaagaagaucuucu

SEQ ID NO: 73695 - RNA, 32 nt, Human
auuggcagaugccugaggucauagcugugucc

SEQ ID NO: 73696 - RNA, 32 nt, Human
auuggcagccuggauuauggcccuagggagag

SEQ ID NO: 73697 - RNA, 32 nt, Human
auuggcaggcugggugaaaaugagaaagauga

SEQ ID NO: 73698 - RNA, 32 nt, Human
auuggcaucauucuccuugcucuguuuugcuu

SEQ ID NO: 73699 - RNA, 32 nt, Human
auuggcaugacaccugccaugccacuaucuuu

SEQ ID NO: 73700 - RNA, 32 nt, Human
auuggcaugaggaauggggauggggcuggcau

SEQ ID NO: 73701 - RNA, 32 nt, Human
auuggcauuguuagucccacaggccaaggaua

SEQ ID NO: 73702 - RNA, 32 nt, Human
auuggccaaaaaguucacagacagcaguguuu

SEQ ID NO: 73703 - RNA, 32 nt, Human
auuggccaaaggacacggcucagcaaggggga

SEQ ID NO: 73704 - RNA, 32 nt, Human
auuggccaaggccugaaggccccggagugcac

SEQ ID NO: 73705 - RNA, 32 nt, Human
auuggccaauuuccauggcagaaaaauauauu

SEQ ID NO: 73706 - RNA, 32 nt, Human
auuggccacauugaugacuacagugcccuaag

SEQ ID NO: 73707 - RNA, 32 nt, Human
auuggccacuggcuuuaugcuccucuucuauc

SEQ ID NO: 73708 - RNA, 32 nt, Human
auuggccagcucugcuugcuguguggcauugu

SEQ ID NO: 73709 - RNA, 32 nt, Human
auuggccaggggacgguagcugcaggacucug

SEQ ID NO: 73710 - RNA, 32 nt, Human
auuggccauauugaggaucacucugaauacug

SEQ ID NO: 73711 - RNA, 32 nt, Human
auuggccaucaggauauaccaggaguugguaa

SEQ ID NO: 73712 - RNA, 32 nt, Human
auuggccauugcacuccagccugggugacaga

SEQ ID NO: 73713 - RNA, 32 nt, Human
auuggcccaacaagaagguuucuguccuaauc

SEQ ID NO: 73714 - RNA, 32 nt, Human
auuggccccagugccaucuugcccagcuuggc

SEQ ID NO: 73715 - RNA, 32 nt, Human
auuggccccaucacaagagaucagugacucaa

SEQ ID NO: 73716 - RNA, 32 nt, Human
auuggcccuccagagaaggggcggccccuucu

SEQ ID NO: 73717 - RNA, 18 nt, Human
auuggcccucuggacucc

SEQ ID NO: 73718 - RNA, 32 nt, Human
auuggcccugcuccguuucccuucucuccugg

SEQ ID NO: 73719 - RNA, 32 nt, Human
auuggcccuggcugcugccacacacauaucca

SEQ ID NO: 73720 - RNA, 32 nt, Human
auuggccuaaccuccgucccagccuccuggcu

SEQ ID NO: 73721 - RNA, 32 nt, Human
auuggccuagaggggcugacuggggaggagca

SEQ ID NO: 73722 - RNA, 24 nt, Human
auuggccucccaaaagacuccagu

SEQ ID NO: 73723 - RNA, 32 nt, Human
auuggccuggcugggugcaguggcucacaccu

SEQ ID NO: 73724 - RNA, 32 nt, Human
auuggccuuccuggcugggauuucacggacgg

SEQ ID NO: 73725 - RNA, 32 nt, Human
auuggccuucuuaaauuguggccagugucuuu

SEQ ID NO: 73726 - RNA, 32 nt, Human
auuggccuuuucuauuccuguaaugaaagcug

SEQ ID NO: 73727 - RNA, 32 nt, Human
auuggcuaaagugggccuugcccagaguccag

SEQ ID NO: 73728 - RNA, 21 nt, Human
auuggcuaauaaauguugcca

SEQ ID NO: 73729 - RNA, 32 nt, Human
auuggcuauuuuaaauagguucagagaacuaa

SEQ ID NO: 73730 - RNA, 32 nt, Human
auuggcucaacuucaguugagagggugcaguc

SEQ ID NO: 73731 - RNA, 32 nt, Human
auuggcucacaguuccgcaggcuguacaggaa

SEQ ID NO: 73732 - RNA, 32 nt, Human
auuggcucacaguucugcaggcuguaugggaa

SEQ ID NO: 73733 - RNA, 32 nt, Human
auuggcucacccaagcaaggccaaaauuacca

SEQ ID NO: 73734 - RNA, 32 nt, Human
auuggcucacugcaaccucugccuucuggguu

SEQ ID NO: 73735 - RNA, 32 nt, Human
auuggcucccaagcuucccccaccucauaugu

SEQ ID NO: 73736 - RNA, 32 nt, Human
auuggcuccuggguuucauguucugugacauc

SEQ ID NO: 73737 - RNA, 32 nt, Human
auuggcucugcagcccccuaaccugccucugg

SEQ ID NO: 73738 - RNA, 32 nt, Human
auuggcugagccaagauggaggcggggcucgg

SEQ ID NO: 73739 - RNA, 32 nt, Human
auuggcugaguccauuagcucuccaguugguu

SEQ ID NO: 73740 - RNA, 31 nt, Human
auuggcugggaagucucagccaugcacggac

SEQ ID NO: 73741 - RNA, 32 nt, Human
auuggcugggagcaguggcucacaccuauagu

SEQ ID NO: 73742 - RNA, 32 nt, Human
auuggcugggccgacuccuucuccccuccugg

SEQ ID NO: 73743 - RNA, 32 nt, Human
auuggcugggggcacggaauaagcacauagua

SEQ ID NO: 73744 - RNA, 19 nt, Human
auuggcuggguaguggagu

SEQ ID NO: 73745 - RNA, 32 nt, Human
auuggcugugccguggccgccugcugcagccu

SEQ ID NO: 73746 - RNA, 32 nt, Human
auuggcuuagggcagauuuucaugcaaaaguu

SEQ ID NO: 73747 - RNA, 32 nt, Human
auuggcuucauccucuuuagaguuagacuguu

SEQ ID NO: 73748 - RNA, 32 nt, Human
auuggcuucucccugcaccagcccuguccuca

SEQ ID NO: 73749 - RNA, 32 nt, Human
auuggcuucugugguugucugagaggcauccc

SEQ ID NO: 73750 - RNA, 32 nt, Human
auugggaaaggaguagaaaaagcaguaacuga

SEQ ID NO: 73751 - RNA, 32 nt, Human
auugggaaauauuuaaagcaacagacaggcuu

SEQ ID NO: 73752 - RNA, 32 nt, Human
auugggaaccaaucauuguccaaggcaauaug

SEQ ID NO: 73753 - RNA, 32 nt, Human
auugggaaggcaggguuuguauugucaguccc

SEQ ID NO: 73754 - RNA, 32 nt, Human
auugggaauagaauggccccuuuuguucuggu

SEQ ID NO: 73755 - RNA, 32 nt, Human
auugggaccagcugggccccaccacggccacg

SEQ ID NO: 73756 - RNA, 32 nt, Human
auugggaccugcggaagccuggcuacagauaa

SEQ ID NO: 73757 - RNA, 32 nt, Human
auugggacucaggccuagcgugugucaggggg

SEQ ID NO: 73758 - RNA, 32 nt, Human
auugggacugagugcugagauugggaaggcac

SEQ ID NO: 73759 - RNA, 32 nt, Human
auugggagagguggggguggguucgcggagaa

SEQ ID NO: 73760 - RNA, 32 nt, Human
auugggaggaauagaggaggcugguacaaaua

SEQ ID NO: 73761 - RNA, 32 nt, Human
auugggaggagaaacgcggcaggccuggcuca

SEQ ID NO: 73762 - RNA, 32 nt, Human
auugggaggaugacacuuaguccaaccaccug

SEQ ID NO: 73763 - RNA, 32 nt, Human
auugggaggcuccucaggucucaggcucaggu

SEQ ID NO: 73764 - RNA, 32 nt, Human
auugggagucccaggauucaagguggaagaug

SEQ ID NO: 73765 - RNA, 32 nt, Human
auugggagugcagguugggaugugggaaugac

SEQ ID NO: 73766 - RNA, 32 nt, Human
auugggaguguguggcaugcauccucaucauc

SEQ ID NO: 73767 - RNA, 32 nt, Human
auugggaguuggguuucaguggggcaugucua

SEQ ID NO: 73768 - RNA, 32 nt, Human
auugggaucaucuccucuguccagaggucuuc

SEQ ID NO: 73769 - RNA, 32 nt, Human
auugggauccacccucacucaauauggccuca

SEQ ID NO: 73770 - RNA, 32 nt, Human
auugggauggguggagaaagacgacaagagag

SEQ ID NO: 73771 - RNA, 32 nt, Human
auugggcagaacucccccuccaggccaucuca

SEQ ID NO: 73772 - RNA, 32 nt, Human
auugggcagaggaguauaggacuggggucuag

SEQ ID NO: 73773 - RNA, 32 nt, Human
auugggcaggguggcuccaggauguuaggaac

SEQ ID NO: 73774 - RNA, 31 nt, Human
auugggcaguagguaacuggcauuccucucu

SEQ ID NO: 73775 - RNA, 32 nt, Human
auugggccacugcacuccacccugggcgacag

SEQ ID NO: 73776 - RNA, 32 nt, Human
auugggccacugcagucgagccugggcgacac

SEQ ID NO: 73777 - RNA, 32 nt, Human
auugggccagguacagugucucacaccuguaa

SEQ ID NO: 73778 - RNA, 32 nt, Human
auugggcccaggagugaaggccaagaagccca

SEQ ID NO: 73779 - RNA, 32 nt, Human
auugggccugaguggagaugggagacagaggc

SEQ ID NO: 73780 - RNA, 32 nt, Human
auugggccugguuuucuugucccuucauaccc

SEQ ID NO: 73781 - RNA, 32 nt, Human
auugggccuuccccacaauuagaauauuuuga

SEQ ID NO: 73782 - RNA, 32 nt, Human
auugggcuaguuagcacagagcagggacggca

SEQ ID NO: 73783 - RNA, 32 nt, Human
auugggcugaagcugcuccaccucauccuugc

SEQ ID NO: 73784 - RNA, 32 nt, Human
auugggcugacagcuggcccuacuuuccuccc

SEQ ID NO: 73785 - RNA, 32 nt, Human
auuggggaacccaggagcuuccaguccucucc

SEQ ID NO: 73786 - RNA, 32 nt, Human
auuggggaagaaaaggggagggggaaggcaag

SEQ ID NO: 73787 - RNA, 32 nt, Human
auuggggacacuccccucaucuugucaucacg

SEQ ID NO: 73788 - RNA, 32 nt, Human
auuggggacgggccaggcugggccaggucggg

SEQ ID NO: 73789 - RNA, 32 nt, Human
auuggggacugaggacuggaaggguggagagu

SEQ ID NO: 73790 - RNA, 32 nt, Human
auuggggagaagcuagaugaaagggaagcugg

SEQ ID NO: 73791 - RNA, 32 nt, Human
auuggggagcuccauuuucccugcugagugag

SEQ ID NO: 73792 - RNA, 32 nt, Human
auuggggaggcggagguugcagugagcugaga

SEQ ID NO: 73793 - RNA, 21 nt, Human
auuggggagugaucucuugga

SEQ ID NO: 73794 - RNA, 32 nt, Human
auuggggaucugaauuuuaaauaauuuguuuc

SEQ ID NO: 73795 - RNA, 32 nt, Human
auuggggauggggacaaagaaauagcaagaga

SEQ ID NO: 73796 - RNA, 32 nt, Human
auuggggauguuaaacaguugcaguggaaguc

SEQ ID NO: 73797 - RNA, 32 nt, Human
auuggggauuacauuucacaugagauuugggc

SEQ ID NO: 73798 - RNA, 32 nt, Human
auuggggcacauuccaggucaucgucuucugu

SEQ ID NO: 73799 - RNA, 32 nt, Human
auuggggcagacagcacuggcccagggaugcu

SEQ ID NO: 73800 - RNA, 32 nt, Human
auuggggcagcugcuguggaaacacacuggug

SEQ ID NO: 73801 - RNA, 32 nt, Human
auuggggcauguuacagagaguuucaguaaaa

SEQ ID NO: 73802 - RNA, 32 nt, Human
auuggggcccacccugcuccagcauggccuaa

SEQ ID NO: 73803 - RNA, 32 nt, Human
auuggggccccgggagagcaggagaaccgggg

SEQ ID NO: 73804 - RNA, 32 nt, Human
auuggggccugggaacgcucggcccccggcag

SEQ ID NO: 73805 - RNA, 32 nt, Human
auuggggcgggcaagggggacagccagcggag

SEQ ID NO: 73806 - RNA, 32 nt, Human
auuggggcucagggagaugaucuggccugagg

SEQ ID NO: 73807 - RNA, 32 nt, Human
auuggggcuccaauugauaaggggacauggcc

SEQ ID NO: 73808 - RNA, 32 nt, Human
auugggggaggaagagagggaggcacguagga

SEQ ID NO: 73809 - RNA, 32 nt, Human
auugggggcaggaggagucuggaacacagccu

SEQ ID NO: 73810 - RNA, 32 nt, Human
auugggggcggcgggggaggagaggggaaaga

SEQ ID NO: 73811 - RNA, 21 nt, Human
auugggggcugggaacagcag

SEQ ID NO: 73812 - RNA, 31 nt, Human
auugggggugguuugggaugggugggcagcu

SEQ ID NO: 73813 - RNA, 32 nt, Human
auugggguaauauuuccuccuuuuccaagacc

SEQ ID NO: 73814 - RNA, 32 nt, Human
auuggggucugcucuaagcugcagcaagagaa

SEQ ID NO: 73815 - RNA, 32 nt, Human
auuggggugccuggccucccugaacuguuagg

SEQ ID NO: 73816 - RNA, 32 nt, Human
auugggguuagugaccuggccagagggugcca

SEQ ID NO: 73817 - RNA, 32 nt, Human
auuggguaaagaaaauaugguauguauacauc

SEQ ID NO: 73818 - RNA, 32 nt, Human
auuggguaagcauagccauuccaaguggaaga

SEQ ID NO: 73819 - RNA, 32 nt, Human
auuggguggaagaagccaggaggaagggcauu

SEQ ID NO: 73820 - RNA, 32 nt, Human
auugggugggcuauaauccagcacuuuaggag

SEQ ID NO: 73821 - RNA, 32 nt, Human
auuggguggguuaaguacaugggugaauuuua

SEQ ID NO: 73822 - RNA, 32 nt, Human
auuggguuccuggacagaucaggcuagcccug

SEQ ID NO: 73823 - RNA, 32 nt, Human
auuggguuggcuaucuuuacuuauaaaucuac

SEQ ID NO: 73824 - RNA, 32 nt, Human
auuggguugguuugauaccacauuuaacauug

SEQ ID NO: 73825 - RNA, 32 nt, Human
auugguaaaauggguaauuuuggaaaugcuuc

SEQ ID NO: 73826 - RNA, 32 nt, Human
auugguaaagaauggaagguggagaagcuccc

SEQ ID NO: 73827 - RNA, 32 nt, Human
auugguaagcuuugcucaccucccucucucuu

SEQ ID NO: 73828 - RNA, 32 nt, Human
auugguagaagucuugggaucuugccauggga

SEQ ID NO: 73829 - RNA, 32 nt, Human
auugguagagggcucugaagagccaaaacugu

SEQ ID NO: 73830 - RNA, 22 nt, Human
auugguagguacuaaugauuua

SEQ ID NO: 73831 - RNA, 32 nt, Human
auugguagugucuagccuuuuccuccacgaca

SEQ ID NO: 73832 - RNA, 22 nt, Human
auugguauacauauggacugua

SEQ ID NO: 73833 - RNA, 32 nt, Human
auugguaugcaaaagcucaucacccauuaagg

SEQ ID NO: 73834 - RNA, 32 nt, Human
auugguauuaccuacuggacaucucuauggac

SEQ ID NO: 73835 - RNA, 32 nt, Human
auuggucacacuaauaacaucaacaucugcua

SEQ ID NO: 73836 - RNA, 32 nt, Human
auuggucaccugcuggggaugaggcauaggcc

SEQ ID NO: 73837 - RNA, 32 nt, Human
auuggucagaauuguguccagaaugugcucag

SEQ ID NO: 73838 - RNA, 32 nt, Human
auuggucagagggacagagcaaggaaugcauc

SEQ ID NO: 73839 - RNA, 32 nt, Human
auuggucagaguugggcugagcacagagaagg

SEQ ID NO: 73840 - RNA, 32 nt, Human
auuggucaguuuccaccucagcacuuugccuu

SEQ ID NO: 73841 - RNA, 32 nt, Human
auuggucauaaauaauuggcaaaauaacaaau

SEQ ID NO: 73842 - RNA, 32 nt, Human
auuggucauccuaugccuucaccagaauaacu

SEQ ID NO: 73843 - RNA, 32 nt, Human
auuggucccaccgcacuccagccugggcaaca

SEQ ID NO: 73844 - RNA, 32 nt, Human
auuggucccagcugcucccagaagaacgggcg

SEQ ID NO: 73845 - RNA, 32 nt, Human
auugguccuagagaaaagacuaugucauuuac

SEQ ID NO: 73846 - RNA, 32 nt, Human
auugguccugugguuggaaacagggucaagua

SEQ ID NO: 73847 - RNA, 32 nt, Human
auugguccuuucuccuaaacuggucuuugugc

SEQ ID NO: 73848 - RNA, 32 nt, Human
auuggucguugaguuaugggaagaacuuaagc

SEQ ID NO: 73849 - RNA, 32 nt, Human
auuggucuuuucccaaggcucuuccagaccug

SEQ ID NO: 73850 - RNA, 32 nt, Human
auuggugaacuccccagggcuccagugggcuc

SEQ ID NO: 73851 - RNA, 32 nt, Human
auuggugagcccgacuccccagccucggugcc

SEQ ID NO: 73852 - RNA, 32 nt, Human
auuggugaucaaacaaagaaacagguggggaa

SEQ ID NO: 73853 - RNA, 32 nt, Human
auuggugauggagggccagcugaggggaaguu

SEQ ID NO: 73854 - RNA, 32 nt, Human
auuggugauuucugcugccuuuuacucaugau

SEQ ID NO: 73855 - RNA, 32 nt, Human
auuggugcaagacccaucucuuaugcauugac

SEQ ID NO: 73856 - RNA, 32 nt, Human
auuggugcuuucuccucauccucaugcccccu

SEQ ID NO: 73857 - RNA, 32 nt, Human
auugguggcuuauauuuucagcaaagaauuuu

SEQ ID NO: 73858 - RNA, 32 nt, Human
auuggugggacuuaaaucacacccaaaauucc

SEQ ID NO: 73859 - RNA, 31 nt, Human
auuggugggugacagagauggguggaggggc

SEQ ID NO: 73860 - RNA, 32 nt, Human
auuggugugcacugaaugcauguauggaagaa

SEQ ID NO: 73861 - RNA, 32 nt, Human
auugguguguuguguguggguuuaugagugug

SEQ ID NO: 73862 - RNA, 32 nt, Human
auugguguuaucuguaaauuccagacacugua

SEQ ID NO: 73863 - RNA, 32 nt, Human
auugguguuaucuguaaauuccagacauugua

SEQ ID NO: 73864 - RNA, 32 nt, Human
auugguguuuagaauaagucaauguuuuuccu

SEQ ID NO: 73865 - RNA, 32 nt, Human
auugguuaucagucuucacacuuauuaaccau

SEQ ID NO: 73866 - RNA, 32 nt, Human
auugguuauccugauuugcaaagugaucaaaa

SEQ ID NO: 73867 - RNA, 32 nt, Human
auugguucacacacagacagcaaaguaugucg

SEQ ID NO: 73868 - RNA, 32 nt, Human
auugguucaggcaaucuucagcggugauccag

SEQ ID NO: 73869 - RNA, 32 nt, Human
auugguuccuagugaguuuuguggccuacucc

SEQ ID NO: 73870 - RNA, 32 nt, Human
auugguucucaaggacuaaccugugggggaaa

SEQ ID NO: 73871 - RNA, 32 nt, Human
auugguugaacccaggaggcggagguugcagu

SEQ ID NO: 73872 - RNA, 32 nt, Human
auugguugaacccgggagguggagguugcagu

SEQ ID NO: 73873 - RNA, 32 nt, Human
auugguugagcuuaggagguugaggcugcagu

SEQ ID NO: 73874 - RNA, 32 nt, Human
auugguugcucaauaaauaguugcugacuuua

SEQ ID NO: 73875 - RNA, 32 nt, Human
auugguugguguuucaugacauguggacuucu

SEQ ID NO: 73876 - RNA, 32 nt, Human
auugguuucaccaaccucagaaggcacuauuc

SEQ ID NO: 73877 - RNA, 32 nt, Human
auugguuucacucaaaaugcugcagucauuug

SEQ ID NO: 73878 - RNA, 32 nt, Human
auugguuucaucucuucugugauuccaaagag

SEQ ID NO: 73879 - RNA, 32 nt, Human
auugguuucucaaauucagguugaaauacaaa

SEQ ID NO: 73880 - RNA, 32 nt, Human
auugguuuuguucuugccuaggguuuuuaaaa

SEQ ID NO: 73881 - RNA, 32 nt, Human
auugguuuuuacuucuaggcagucccaauuuu

SEQ ID NO: 73882 - RNA, 32 nt, Human
auuguaaaaaugucaggaaaaguaugaucauc

SEQ ID NO: 73883 - RNA, 32 nt, Human
auuguaaaagggaagaaagaagaagaggaggc

SEQ ID NO: 73884 - RNA, 32 nt, Human
auuguaaaauacggaucauuuguauuuugggg

SEQ ID NO: 73885 - RNA, 32 nt, Human
auuguaaacaaguucagccacuguggaagaca

SEQ ID NO: 73886 - RNA, 32 nt, Human
auuguaaaggaaauuuaaauucuggagaauuc

SEQ ID NO: 73887 - RNA, 32 nt, Human
auuguaaaggugggcaaagccuaguagagaac

SEQ ID NO: 73888 - RNA, 32 nt, Human
auuguaaaugucccaggaucagagaccuguug

SEQ ID NO: 73889 - RNA, 32 nt, Human
auuguaacaauaaaucacagccacuugacaag

SEQ ID NO: 73890 - RNA, 32 nt, Human
auuguaacaccagagugcagccuggaucucuc

SEQ ID NO: 73891 - RNA, 32 nt, Human
auuguaacccuuguggguugcuaauaaccaag

SEQ ID NO: 73892 - RNA, 32 nt, Human
auuguaaccuccaucuccugugcucaagccau

SEQ ID NO: 73893 - RNA, 32 nt, Human
auuguaaccucucccuuguccaaaucuaggau

SEQ ID NO: 73894 - RNA, 32 nt, Human
auuguaacucacugcagccugaaacuccuugg

SEQ ID NO: 73895 - RNA, 32 nt, Human
auuguaaguccaggaugaacuaggagaaagca

SEQ ID NO: 73896 - RNA, 32 nt, Human
auuguaaguguuuacugacuggcagcuuuuau

SEQ ID NO: 73897 - RNA, 32 nt, Human
auuguaaguucaauaaaccucuuuguuuugua

SEQ ID NO: 73898 - RNA, 32 nt, Human
auuguaaguuugccuaggcuguugguguacag

SEQ ID NO: 73899 - RNA, 32 nt, Human
auuguaauaaagaaaucuuuccugugaagaua

SEQ ID NO: 73900 - RNA, 32 nt, Human
auuguaauauauuuacuuuuacaugguuauaa

SEQ ID NO: 73901 - RNA, 32 nt, Human
auuguaaucaaagaaguaaggagguaagauug

SEQ ID NO: 73902 - RNA, 32 nt, Human
auuguaauguagcacuuacuuuaaaaguauaa

SEQ ID NO: 73903 - RNA, 32 nt, Human
auuguaauguuaauuuauacuuuuggauugug

SEQ ID NO: 73904 - RNA, 32 nt, Human
auuguaauugauuucaaucuuagcugauaaau

SEQ ID NO: 73905 - RNA, 32 nt, Human
auuguacagaugucggugcagaucucuugucc

SEQ ID NO: 73906 - RNA, 32 nt, Human
auuguacaggaaaguuaagaauaccugaaaaa

SEQ ID NO: 73907 - RNA, 32 nt, Human
auuguacauaacugguauaugugcacaagcau

SEQ ID NO: 73908 - RNA, 32 nt, Human
auuguacauccuuuucuuuucuccccuugggu

SEQ ID NO: 73909 - RNA, 32 nt, Human
auuguacauugggcacauaucuccucuugggc

SEQ ID NO: 73910 - RNA, 32 nt, Human
auuguaccacugcacuccaaccuggguuacag

SEQ ID NO: 73911 - RNA, 32 nt, Human
auuguaccacugcacuccagccugggcaacag

SEQ ID NO: 73912 - RNA, 32 nt, Human
auuguaccacugcacuccagccugggcgacag

SEQ ID NO: 73913 - RNA, 32 nt, Human
auuguaccacugcacuccagccugggugacag

SEQ ID NO: 73914 - RNA, 32 nt, Human
auuguaccacugcacuccagccuggucaaugg

SEQ ID NO: 73915 - RNA, 32 nt, Human
auuguaccacugcacuccagcucggggaacag

SEQ ID NO: 73916 - RNA, 32 nt, Human
auuguaccacugcacuccagucugggcaacag

SEQ ID NO: 73917 - RNA, 32 nt, Human
auuguaccacugcacuccaguuuggcaacaga

SEQ ID NO: 73918 - RNA, 32 nt, Human
auuguaccacugcgcuccaaacugggugacau

SEQ ID NO: 73919 - RNA, 32 nt, Human
auuguaccacuguacuccagccugggcuggac

SEQ ID NO: 73920 - RNA, 32 nt, Human
auuguaccacuguauuccagccuggacgacug

SEQ ID NO: 73921 - RNA, 32 nt, Human
auuguaccaugcacuccagccuggguaacaga

SEQ ID NO: 73922 - RNA, 32 nt, Human
auuguaccauggcacuccagccuggacaacaa

SEQ ID NO: 73923 - RNA, 32 nt, Human
auuguaccauugcacuccagccugggcaacaa

SEQ ID NO: 73924 - RNA, 32 nt, Human
auuguaccauugcacuccagccugggcaacag

SEQ ID NO: 73925 - RNA, 32 nt, Human
auuguacccaacucuauuucucuccauacuga

SEQ ID NO: 73926 - RNA, 32 nt, Human
auuguaccuaaaggagaguaacuaaugguaac

SEQ ID NO: 73927 - RNA, 32 nt, Human
auuguacugcaaccucagcuggcaucauggac

SEQ ID NO: 73928 - RNA, 32 nt, Human
auuguacuguaucugauuucugugccagucau

SEQ ID NO: 73929 - RNA, 32 nt, Human
auuguacuuuuccuugauguucuuaaaaggua

SEQ ID NO: 73930 - RNA, 32 nt, Human
auuguagaaauagcuuaacccuuucauuuacc

SEQ ID NO: 73931 - RNA, 32 nt, Human
auuguagacacagggucucacuauguugccca

SEQ ID NO: 73932 - RNA, 32 nt, Human
auuguagaccucuauuacuuuugucugcucag

SEQ ID NO: 73933 - RNA, 32 nt, Human
auuguagagacggagucucccuauguugccua

SEQ ID NO: 73934 - RNA, 32 nt, Human
auuguagagcuugguggcugagcuuggcccua

SEQ ID NO: 73935 - RNA, 32 nt, Human
auuguagauuuucugcagucacccauacuuaa

SEQ ID NO: 73936 - RNA, 32 nt, Human
auuguagccagccucagcacucagugaguuca

SEQ ID NO: 73937 - RNA, 32 nt, Human
auuguagcccaggaguuugagaacagccuggg

SEQ ID NO: 73938 - RNA, 32 nt, Human
auuguagccucaaccucccaggcuccaagcag

SEQ ID NO: 73939 - RNA, 32 nt, Human
auuguagccuccauacaguggggucuucucug

SEQ ID NO: 73940 - RNA, 32 nt, Human
auuguagcucacugcagccuccaacuccaugg

SEQ ID NO: 73941 - RNA, 32 nt, Human
auuguagcucacugcagucuucagccucccca

SEQ ID NO: 73942 - RNA, 32 nt, Human
auuguagcugccauuccaucuguucuagggag

SEQ ID NO: 73943 - RNA, 32 nt, Human
auuguagugauaccuuaaaucauguauucagg

SEQ ID NO: 73944 - RNA, 22 nt, Human
auuguaguuuugcugcucaucc

SEQ ID NO: 73945 - RNA, 32 nt, Human
auuguauaaguccugauuaaauccagggcuua

SEQ ID NO: 73946 - RNA, 32 nt, Human
auuguauaccuaaacagagauagcucaucuuu

SEQ ID NO: 73947 - RNA, 32 nt, Human
auuguauagauuucacaacacaaaaaggacau

SEQ ID NO: 73948 - RNA, 32 nt, Human
auuguaucacauagaaauauggccaggaagga

SEQ ID NO: 73949 - RNA, 32 nt, Human
auuguaucuccauccagaugguggaguaccgc

SEQ ID NO: 73950 - RNA, 32 nt, Human
auuguaugaaguuucacaugcuagaaauacuc

SEQ ID NO: 73951 - RNA, 32 nt, Human
auuguaugacugcacuccagccugggugacag

SEQ ID NO: 73952 - RNA, 32 nt, Human
auuguauggaaaggaaaaugcaggaaauggga

SEQ ID NO: 73953 - RNA, 32 nt, Human
auuguauguguaugcacaugaucaugugugua

SEQ ID NO: 73954 - RNA, 32 nt, Human
auuguauguguauuuauauguuuuuaaucauu

SEQ ID NO: 73955 - RNA, 32 nt, Human
auuguauucaaaugcuguaucuuucaugaaag

SEQ ID NO: 73956 - RNA, 32 nt, Human
auuguauugaccaccaguacuucuauaauggu

SEQ ID NO: 73957 - RNA, 32 nt, Human
auuguauugcuguccaacagggguugggaggg

SEQ ID NO: 73958 - RNA, 32 nt, Human
auuguauuugaauuugugccucuuuguuuuuc

SEQ ID NO: 73959 - RNA, 32 nt, Human
auugucaaagccuaggaagaccaguuuaagaa

SEQ ID NO: 73960 - RNA, 32 nt, Human
auugucaaccugaagaacaagcagaaagaggc

SEQ ID NO: 73961 - RNA, 32 nt, Human
auugucaaggcaugcauauucuaaagaauuaa

SEQ ID NO: 73962 - RNA, 32 nt, Human
auugucaaugaucuuaaaugucugaagacaau

SEQ ID NO: 73963 - RNA, 32 nt, Human
auugucacaauauaauagaaauguuagcaacc

SEQ ID NO: 73964 - RNA, 32 nt, Human
auugucacaucgauucacucuccugggaggcc

SEQ ID NO: 73965 - RNA, 25 nt, Human
auugucaccaggcuggagugcagug

SEQ ID NO: 73966 - RNA, 32 nt, Human
auugucaccauggcuuucccaacucuccaagc

SEQ ID NO: 73967 - RNA, 25 nt, Human
auugucacccaggcuggagugcagu

SEQ ID NO: 73968 - RNA, 32 nt, Human
auugucacucugauguucaugugaacugguug

SEQ ID NO: 73969 - RNA, 32 nt, Human
auugucagaacagguggcugcuguguggugcc

SEQ ID NO: 73970 - RNA, 32 nt, Human
auugucagagacuggugggaggaagccugggg

SEQ ID NO: 73971 - RNA, 24 nt, Human
auugucagauucaccaagguugaa

SEQ ID NO: 73972 - RNA, 24 nt, Human
auugucagauucauugaaguugaa

SEQ ID NO: 73973 - RNA, 32 nt, Human
auugucagcaucauuuucaucuguaagucacu

SEQ ID NO: 73974 - RNA, 32 nt, Human
auugucagguaauacucuaugguucuauuucu

SEQ ID NO: 73975 - RNA, 32 nt, Human
auugucagguauagggccacuuggagaugcag

SEQ ID NO: 73976 - RNA, 32 nt, Human
auugucagugcccuaagguauccauugguucc

SEQ ID NO: 73977 - RNA, 32 nt, Human
auugucauaaacaucugcccccgugugguucu

SEQ ID NO: 73978 - RNA, 32 nt, Human
auugucauagugaccuugaaaaccacuggcuu

SEQ ID NO: 73979 - RNA, 24 nt, Human
auugucaugaaaaauugggguuga

SEQ ID NO: 73980 - RNA, 32 nt, Human
auugucauuccacuccagguccuggcaaaugu

SEQ ID NO: 73981 - RNA, 32 nt, Human
auugucauuuggagaaacaauaaaagauuucu

SEQ ID NO: 73982 - RNA, 32 nt, Human
auugucauuuguaaaagugauacaugacuguu

SEQ ID NO: 73983 - RNA, 32 nt, Human
auuguccacuuccugagaguaaggcugacuug

SEQ ID NO: 73984 - RNA, 32 nt, Human
auuguccaggcuggauucaaacuccugggcuc

SEQ ID NO: 73985 - RNA, 32 nt, Human
auugucccaagcagaaaaauaauggcuauuag

SEQ ID NO: 73986 - RNA, 32 nt, Human
auugucccaucuucacccccauuccagagcag

SEQ ID NO: 73987 - RNA, 32 nt, Human
auugucccccaccaccuucuucuauaaaugca

SEQ ID NO: 73988 - RNA, 32 nt, Human
auuguccccuccauucuaggauuucaucguca

SEQ ID NO: 73989 - RNA, 32 nt, Human
auugucccuugccaucucuugcuuuuucccuu

SEQ ID NO: 73990 - RNA, 32 nt, Human
auuguccggcuucucaucuguuucccagaguu

SEQ ID NO: 73991 - RNA, 32 nt, Human
auuguccuccaacauccucccaccucuuugac

SEQ ID NO: 73992 - RNA, 32 nt, Human
auuguccugccuccucaacuuccugacuacag

SEQ ID NO: 73993 - RNA, 32 nt, Human
auuguccugccuguguuccagcaugcuuauuu

SEQ ID NO: 73994 - RNA, 32 nt, Human
auuguccugucuaguuugaauauuucaagaac

SEQ ID NO: 73995 - RNA, 32 nt, Human
auuguccuugcucacaugcugccaucauguca

SEQ ID NO: 73996 - RNA, 32 nt, Human
auuguccuuggggcggggugguugcaguagug

SEQ ID NO: 73997 - RNA, 32 nt, Human
auuguccuuuucucccauuucuugcuagcuau

SEQ ID NO: 73998 - RNA, 32 nt, Human
auugucgaauacugacaguuuuccaaagugca

SEQ ID NO: 73999 - RNA, 22 nt, Human
auugucgugaaauagguuagaa

SEQ ID NO: 74000 - RNA, 32 nt, Human
auugucuacuuucuucuccauccugcuuuaaa

SEQ ID NO: 74001 - RNA, 32 nt, Human
auugucuagaagccuaaggacagcaauuucuc

SEQ ID NO: 74002 - RNA, 32 nt, Human
auugucuauagggcagggccaagagcaggaac

SEQ ID NO: 74003 - RNA, 32 nt, Human
auugucucaccuuuugccuggguggcugccug

SEQ ID NO: 74004 - RNA, 32 nt, Human
auugucucauuuucccagggggugggucaugg

SEQ ID NO: 74005 - RNA, 32 nt, Human
auugucucauuuuucaaugucacaaaccacgg

SEQ ID NO: 74006 - RNA, 32 nt, Human
auugucuccauuucucuuucuccagagcuccu

SEQ ID NO: 74007 - RNA, 32 nt, Human
auugucucugacugcagguuugaauaaguuga

SEQ ID NO: 74008 - RNA, 32 nt, Human
auugucugaggaccccaagagcagugauucag

SEQ ID NO: 74009 - RNA, 32 nt, Human
auugucugagucugugcacguacuuuuagaua

SEQ ID NO: 74010 - RNA, 32 nt, Human
auugucugcuuugcaauagcaaagacuuggaa

SEQ ID NO: 74011 - RNA, 32 nt, Human
auugucugguugacaccagguccugguuuugu

SEQ ID NO: 74012 - RNA, 32 nt, Human
auugucuuauaccuugacauuuuucuacucgu

SEQ ID NO: 74013 - RNA, 32 nt, Human
auugucuuaucaaaguaguguucuaacuuuaa

SEQ ID NO: 74014 - RNA, 32 nt, Human
auugucuucccaggagauggaaaaagacgcca

SEQ ID NO: 74015 - RNA, 32 nt, Human
auugugaaaccagcuucaauuucugaggaaga

SEQ ID NO: 74016 - RNA, 32 nt, Human
auugugaaccuccugaaugccugagacucuag

SEQ ID NO: 74017 - RNA, 32 nt, Human
auugugaaccuguguacgcacacacacauaua

SEQ ID NO: 74018 - RNA, 32 nt, Human
auugugaacucuccaccauacccaguaccguc

SEQ ID NO: 74019 - RNA, 32 nt, Human
auugugaauacaugcuguuaccagcuuccuua

SEQ ID NO: 74020 - RNA, 32 nt, Human
auugugaaucaggcagucacacuggacaacau

SEQ ID NO: 74021 - RNA, 32 nt, Human
auugugacacugcacuccagccugggcaacag

SEQ ID NO: 74022 - RNA, 32 nt, Human
auugugacacugcccuccagccugggugacag

SEQ ID NO: 74023 - RNA, 32 nt, Human
auugugaccacaggcugguguguaggugguaa

SEQ ID NO: 74024 - RNA, 25 nt, Human
auugugacgcuuuuggccuggcugg

SEQ ID NO: 74025 - RNA, 32 nt, Human
auugugacugaucaugauuuauuugaagaugg

SEQ ID NO: 74026 - RNA, 32 nt, Human
auugugagaaccagauauuacucaacagaaag

SEQ ID NO: 74027 - RNA, 32 nt, Human
auugugagaucacaaguggaggcuccaaccag

SEQ ID NO: 74028 - RNA, 32 nt, Human
auugugagcacacauaguaccuaguuacaucu

SEQ ID NO: 74029 - RNA, 32 nt, Human
auugugagccucuauguuuucuguuaggugag

SEQ ID NO: 74030 - RNA, 32 nt, Human
auugugagccuggagaaguagcauuuaguugg

SEQ ID NO: 74031 - RNA, 22 nt, Human
auugugaggaccacccaagaaa

SEQ ID NO: 74032 - RNA, 32 nt, Human
auugugagggggaccauaaaaggauggaaacu

SEQ ID NO: 74033 - RNA, 32 nt, Human
auugugagucacugacuuuucccccugggaaa

SEQ ID NO: 74034 - RNA, 32 nt, Human
auugugagucagucucaguagccaucagccug

SEQ ID NO: 74035 - RNA, 32 nt, Human
auugugauaugaaaacagcuauagacaaucau

SEQ ID NO: 74036 - RNA, 32 nt, Human
auugugaugccggcaggcagagcagcuacuga

SEQ ID NO: 74037 - RNA, 32 nt, Human
auugugcaaaauggcauaccugucuuucuccc

SEQ ID NO: 74038 - RNA, 32 nt, Human
auugugcaaagucaccugcccaauaaagcuug

SEQ ID NO: 74039 - RNA, 32 nt, Human
auugugcaaugcauuaagaaacccauccagcu

SEQ ID NO: 74040 - RNA, 32 nt, Human
auugugcacaacuuccuccaccuuucccuugg

SEQ ID NO: 74041 - RNA, 32 nt, Human
auugugcacugcacucuagccugggggaagag

SEQ ID NO: 74042 - RNA, 32 nt, Human
auugugcagacaagguagaguguguggucccu

SEQ ID NO: 74043 - RNA, 32 nt, Human
auugugcagauggggaaacugagguuugcggg

SEQ ID NO: 74044 - RNA, 32 nt, Human
auugugcauugcacuccagccugagcaacagg

SEQ ID NO: 74045 - RNA, 32 nt, Human
auugugccacacacuccagccuggguggcaaa

SEQ ID NO: 74046 - RNA, 32 nt, Human
auugugccaccacacuccagccugggcgacag

SEQ ID NO: 74047 - RNA, 32 nt, Human
auugugccaccgcacuccagcaugggugacag

SEQ ID NO: 74048 - RNA, 32 nt, Human
auugugccaccuucauuaagagucauuacaau

SEQ ID NO: 74049 - RNA, 32 nt, Human
auugugccacggcacuccagccugggcagcag

SEQ ID NO: 74050 - RNA, 32 nt, Human
auugugccacuacacuccagccuggccacaga

SEQ ID NO: 74051 - RNA, 32 nt, Human
auugugccacuacacuccagccuggccgacag

SEQ ID NO: 74052 - RNA, 32 nt, Human
auugugccacuacacuccagccugggagacag

SEQ ID NO: 74053 - RNA, 32 nt, Human
auugugccacuacacuccagccugggcaacac

SEQ ID NO: 74054 - RNA, 32 nt, Human
auugugccacuacacuccagccugggcaacag

SEQ ID NO: 74055 - RNA, 32 nt, Human
auugugccacuacacuccagccugggugacaa

SEQ ID NO: 74056 - RNA, 32 nt, Human
auugugccacuaguacuccagccugggugaca

SEQ ID NO: 74057 - RNA, 32 nt, Human
auugugccacugcacaccagccuggacaacag

SEQ ID NO: 74058 - RNA, 32 nt, Human
auugugccacugcacaccggccugggugacag

SEQ ID NO: 74059 - RNA, 32 nt, Human
auugugccacugcacacuccaaucugggugaa

SEQ ID NO: 74060 - RNA, 32 nt, Human
auugugccacugcaccccagccuuggcaacag

SEQ ID NO: 74061 - RNA, 32 nt, Human
auugugccacugcacgcacuccagccugggcg

SEQ ID NO: 74062 - RNA, 32 nt, Human
auugugccacugcacucaagccugggugacga

SEQ ID NO: 74063 - RNA, 32 nt, Human
auugugccacugcacucauccuggaagacaga

SEQ ID NO: 74064 - RNA, 32 nt, Human
auugugccacugcacuccaaccugggugacag

SEQ ID NO: 74065 - RNA, 32 nt, Human
auugugccacugcacuccacccugggcaacag

SEQ ID NO: 74066 - RNA, 32 nt, Human
auugugccacugcacuccagacugggugacac

SEQ ID NO: 74067 - RNA, 23 nt, Human
auugugccacugcacuccagcca

SEQ ID NO: 74068 - RNA, 32 nt, Human
auugugccacugcacuccagccagagugacag

SEQ ID NO: 74069 - RNA, 32 nt, Human
auugugccacugcacuccagccggggugacag

SEQ ID NO: 74070 - RNA, 32 nt, Human
auugugccacugcacuccagccuaggcaacag

SEQ ID NO: 74071 - RNA, 32 nt, Human
auugugccacugcacuccagccuaggcgacag

SEQ ID NO: 74072 - RNA, 32 nt, Human
auugugccacugcacuccagccugagcaacaa

SEQ ID NO: 74073 - RNA, 32 nt, Human
auugugccacugcacuccagccuggacgacag

SEQ ID NO: 74074 - RNA, 32 nt, Human
auugugccacugcacuccagccuggcaacaga

SEQ ID NO: 74075 - RNA, 32 nt, Human
auugugccacugcacuccagccugggagacag

SEQ ID NO: 74076 - RNA, 32 nt, Human
auugugccacugcacuccagccugggcaacaa

SEQ ID NO: 74077 - RNA, 32 nt, Human
auugugccacugcacuccagccugggcaacac

SEQ ID NO: 74078 - RNA, 32 nt, Human
auugugccacugcacuccagccugggcaacag

SEQ ID NO: 74079 - RNA, 32 nt, Human
auugugccacugcacuccagccugggcaacug

SEQ ID NO: 74080 - RNA, 32 nt, Human
auugugccacugcacuccagccugggcaauag

SEQ ID NO: 74081 - RNA, 32 nt, Human
auugugccacugcacuccagccugggcaccaa

SEQ ID NO: 74082 - RNA, 32 nt, Human
auugugccacugcacuccagccugggccacag

SEQ ID NO: 74083 - RNA, 32 nt, Human
auugugccacugcacuccagccugggcgacag

SEQ ID NO: 74084 - RNA, 32 nt, Human
auugugccacugcacuccagccugggcgauag

SEQ ID NO: 74085 - RNA, 32 nt, Human
auugugccacugcacuccagccuggguaacag

SEQ ID NO: 74086 - RNA, 32 nt, Human
auugugccacugcacuccagccugggugaaag

SEQ ID NO: 74087 - RNA, 32 nt, Human
auugugccacugcacuccagccugggugacag

SEQ ID NO: 74088 - RNA, 32 nt, Human
auugugccacugcacuccagccugggugacug

SEQ ID NO: 74089 - RNA, 32 nt, Human
auugugccacugcacuccagccuggguggcag

SEQ ID NO: 74090 - RNA, 32 nt, Human
auugugccacugcacuccagccuggguuacag

SEQ ID NO: 74091 - RNA, 32 nt, Human
auugugccacugcacuccagccuuggcaacaa

SEQ ID NO: 74092 - RNA, 32 nt, Human
auugugccacugcacuccagccuuggcaacac

SEQ ID NO: 74093 - RNA, 32 nt, Human
auugugccacugcacuccagcgugggcaacgg

SEQ ID NO: 74094 - RNA, 32 nt, Human
auugugccacugcacuccagcuggguggcaga

SEQ ID NO: 74095 - RNA, 32 nt, Human
auugugccacugcacuccagcuuggugacaga

SEQ ID NO: 74096 - RNA, 32 nt, Human
auugugccacugcacuccagucuggacaacag

SEQ ID NO: 74097 - RNA, 32 nt, Human
auugugccacugcacucccgccugggcgacag

SEQ ID NO: 74098 - RNA, 32 nt, Human
auugugccacugcacucgagccugggugacag

SEQ ID NO: 74099 - RNA, 32 nt, Human
auugugccacugcacucuagccuagguggcug

SEQ ID NO: 74100 - RNA, 32 nt, Human
auugugccacugcacucuagccucggugacag

SEQ ID NO: 74101 - RNA, 32 nt, Human
auugugccacugcacucuagccuggacagcag

SEQ ID NO: 74102 - RNA, 32 nt, Human
auugugccacugcacucuagccugggcaauaa

SEQ ID NO: 74103 - RNA, 32 nt, Human
auugugccacugcacucuagccugggugacaa

SEQ ID NO: 74104 - RNA, 32 nt, Human
auugugccacugcacucuagccugggugacag

SEQ ID NO: 74105 - RNA, 32 nt, Human
auugugccacugcacugcagccugggcgacaa

SEQ ID NO: 74106 - RNA, 32 nt, Human
auugugccacugcacugcaggcugggugacag

SEQ ID NO: 74107 - RNA, 32 nt, Human
auugugccacugcacuucagccugggcgacag

SEQ ID NO: 74108 - RNA, 32 nt, Human
auugugccacugcacuucagcuugggugacag

SEQ ID NO: 74109 - RNA, 32 nt, Human
auugugccacugcacuuuucagccugggugcc

SEQ ID NO: 74110 - RNA, 32 nt, Human
auugugccacugcauaccagccuaggugacag

SEQ ID NO: 74111 - RNA, 32 nt, Human
auugugccacugcauucuagccugggcgauag

SEQ ID NO: 74112 - RNA, 32 nt, Human
auugugccacugcccuccagccugggugacag

SEQ ID NO: 74113 - RNA, 32 nt, Human
auugugccacugccuccggccugggcgagagu

SEQ ID NO: 74114 - RNA, 32 nt, Human
auugugccacugcgcuccagccugggcgacag

SEQ ID NO: 74115 - RNA, 32 nt, Human
auugugccacugcucuccagccugggaggcac

SEQ ID NO: 74116 - RNA, 32 nt, Human
auugugccacuguacaccagccugggugacag

SEQ ID NO: 74117 - RNA, 32 nt, Human
auugugccacuguacuccagccuggaagacaa

SEQ ID NO: 74118 - RNA, 32 nt, Human
auugugccacuguacuccagccugggagauag

SEQ ID NO: 74119 - RNA, 32 nt, Human
auugugccacuguacuccagccugggcgacag

SEQ ID NO: 74120 - RNA, 32 nt, Human
auugugccacuguacuccagccugggugacag

SEQ ID NO: 74121 - RNA, 32 nt, Human
auugugccacuguacuccagccuggugacaga

SEQ ID NO: 74122 - RNA, 32 nt, Human
auugugccacuguacugcagccugggugacag

SEQ ID NO: 74123 - RNA, 32 nt, Human
auugugccacuguuuuccagccugggcaauac

SEQ ID NO: 74124 - RNA, 32 nt, Human
auugugccacuucacuccagccugggugacaa

SEQ ID NO: 74125 - RNA, 32 nt, Human
auugugccacuucauuccagccugggcgacag

SEQ ID NO: 74126 - RNA, 32 nt, Human
auugugccaggucagcugucccuuccucuggc

SEQ ID NO: 74127 - RNA, 32 nt, Human
auugugccagugcacuccaggcuggacgacag

SEQ ID NO: 74128 - RNA, 32 nt, Human
auugugccagugcacuccggccugggugacag

SEQ ID NO: 74129 - RNA, 32 nt, Human
auugugccauugcacuacagccuggucaacag

SEQ ID NO: 74130 - RNA, 32 nt, Human
auugugccauugcacuccaaccugggcaacaa

SEQ ID NO: 74131 - RNA, 32 nt, Human
auugugccauugcacuccagccuggacaacaa

SEQ ID NO: 74132 - RNA, 32 nt, Human
auugugccauugcacuccagccugggcaacaa

SEQ ID NO: 74133 - RNA, 32 nt, Human
auugugccauugcacuccagccugggcaacag

SEQ ID NO: 74134 - RNA, 32 nt, Human
auugugccauugcacuccagccugggcaacga

SEQ ID NO: 74135 - RNA, 32 nt, Human
auugugccauugcacuccagccugggcgacaa

SEQ ID NO: 74136 - RNA, 32 nt, Human
auugugccauugcacuccagccugggcgacag

SEQ ID NO: 74137 - RNA, 32 nt, Human
auugugccauugcacuccagccugggcuacaa

SEQ ID NO: 74138 - RNA, 32 nt, Human
auugugccauugcacuccagccugggugacag

SEQ ID NO: 74139 - RNA, 32 nt, Human
auugugccauugcacuccagccugggugauaa

SEQ ID NO: 74140 - RNA, 32 nt, Human
auugugccauugcacugcagccuggaugacag

SEQ ID NO: 74141 - RNA, 32 nt, Human
auugugccauuguacuccagccugggcgacaa

SEQ ID NO: 74142 - RNA, 32 nt, Human
auugugccauuuauggaaaaacucuccccacu

SEQ ID NO: 74143 - RNA, 32 nt, Human
auugugccgcugcacuccagccuggcgacaaa

SEQ ID NO: 74144 - RNA, 32 nt, Human
auugugccucgaggccccgaucgggcuaggcc

SEQ ID NO: 74145 - RNA, 32 nt, Human
auugugcuacugcacucuagauugggugacag

SEQ ID NO: 74146 - RNA, 32 nt, Human
auugugcuauugcacuccagccugggugacag

SEQ ID NO: 74147 - RNA, 32 nt, Human
auugugcuauuugcacucuagccugggugaca

SEQ ID NO: 74148 - RNA, 32 nt, Human
auugugcuccaauaaugucauaguuuuaagag

SEQ ID NO: 74149 - RNA, 32 nt, Human
auugugcuccagccugggcaacagagugagac

SEQ ID NO: 74150 - RNA, 32 nt, Human
auugugcugcugcacuccagccugggagacag

SEQ ID NO: 74151 - RNA, 32 nt, Human
auugugcugcugcacuccagccugggugaaaa

SEQ ID NO: 74152 - RNA, 32 nt, Human
auugugcuucuuuggagauguuauguuuccuu

SEQ ID NO: 74153 - RNA, 32 nt, Human
auugugcuuuaaaagacauauaaagaauuggg

SEQ ID NO: 74154 - RNA, 32 nt, Human
auuguggaaagaggggaccaggguggcugggg

SEQ ID NO: 74155 - RNA, 32 nt, Human
auuguggaauguaaagcuuuaagaacuuaaac

SEQ ID NO: 74156 - RNA, 32 nt, Human
auuguggacccgagaagcagagagcgagaggg

SEQ ID NO: 74157 - RNA, 32 nt, Human
auuguggagcguccccuuccaucaagcagccu

SEQ ID NO: 74158 - RNA, 32 nt, Human
auuguggcaaagcguuuacuucacauucacac

SEQ ID NO: 74159 - RNA, 32 nt, Human
auuguggcaccucuugggcacagcauuuccug

SEQ ID NO: 74160 - RNA, 32 nt, Human
auuguggcacugcacuccagucugggugacag

SEQ ID NO: 74161 - RNA, 32 nt, Human
auuguggcauugcacuccagccugggugguag

SEQ ID NO: 74162 - RNA, 32 nt, Human
auuguggccaguauccacuguguccuuaggcu

SEQ ID NO: 74163 - RNA, 32 nt, Human
auuguggcucacugcaaacuccacuucccuag

SEQ ID NO: 74164 - RNA, 31 nt, Human
auuguggcugagagagaugauuacugcuuug

SEQ ID NO: 74165 - RNA, 32 nt, Human
auuguggcuggcucucgagucucuucugauau

SEQ ID NO: 74166 - RNA, 32 nt, Human
auuguggcuguaacagaguccaguuccaugug

SEQ ID NO: 74167 - RNA, 32 nt, Human
auuguggcuucucaguggcuugacagcaucuu

SEQ ID NO: 74168 - RNA, 32 nt, Human
auugugggaaauuacuuaaccucuucaagccc

SEQ ID NO: 74169 - RNA, 32 nt, Human
auugugggaccccagaggcuguccuguccacu

SEQ ID NO: 74170 - RNA, 32 nt, Human
auugugggcaguguccagacagaagaagagac

SEQ ID NO: 74171 - RNA, 22 nt, Human
auugugggcucaaacuggacag

SEQ ID NO: 74172 - RNA, 20 nt, Human
auugugggcucucugcuucc

SEQ ID NO: 74173 - RNA, 32 nt, Human
auugugggcucuggaaaccacauggcuucacc

SEQ ID NO: 74174 - RNA, 21 nt, Human
auuguggggaggcauggccag

SEQ ID NO: 74175 - RNA, 32 nt, Human
auuguggggcagaggccucucugcucuuguuu

SEQ ID NO: 74176 - RNA, 32 nt, Human
auugugggugugagccaccgcgcucagucuug

SEQ ID NO: 74177 - RNA, 23 nt, Human
auuguggguuucuucugugcuag

SEQ ID NO: 74178 - RNA, 32 nt, Human
auugugguaguggcagaagucacauuacgguu

SEQ ID NO: 74179 - RNA, 32 nt, Human
auuguggucugggcaguaaauccacagccaac

SEQ ID NO: 74180 - RNA, 32 nt, Human
auuguggugauggcuacguaacugugcauauu

SEQ ID NO: 74181 - RNA, 32 nt, Human
auuguggugucugucuaggaaggaagggguga

SEQ ID NO: 74182 - RNA, 32 nt, Human
auugugguguggcaggauggguugguggggag

SEQ ID NO: 74183 - RNA, 32 nt, Human
auugugguuucugccacuaucaaaguuccagc

SEQ ID NO: 74184 - RNA, 32 nt, Human
auuguguacuuggugguucugucccucugccu

SEQ ID NO: 74185 - RNA, 32 nt, Human
auuguguagugugcucagaaccacugaucucc

SEQ ID NO: 74186 - RNA, 32 nt, Human
auugugucacugcacuccagccugggcaacag

SEQ ID NO: 74187 - RNA, 32 nt, Human
auugugucacugcacuccagcuugggugacag

SEQ ID NO: 74188 - RNA, 32 nt, Human
auugugucaggucacuguggauaaaggcaaag

SEQ ID NO: 74189 - RNA, 32 nt, Human
auugugucaguuucagauccugaucuuaagag

SEQ ID NO: 74190 - RNA, 32 nt, Human
auugugucauugcacuccagccugggcaacaa

SEQ ID NO: 74191 - RNA, 32 nt, Human
auuguguccaggggagggugggcccugcucac

SEQ ID NO: 74192 - RNA, 32 nt, Human
auugugucuuccuucacuaucugaccugaaaa

SEQ ID NO: 74193 - RNA, 32 nt, Human
auugugugaccauacuaagcuucuggguguaa

SEQ ID NO: 74194 - RNA, 32 nt, Human
auugugugagaccaaagcauagagacuagaua

SEQ ID NO: 74195 - RNA, 22 nt, Human
auuguguggaugaccacauaag

SEQ ID NO: 74196 - RNA, 32 nt, Human
auuguguguaugaccucagaacugaaauugau

SEQ ID NO: 74197 - RNA, 32 nt, Human
auuguguguuaacaccuguucuuuguaauugg

SEQ ID NO: 74198 - RNA, 32 nt, Human
auuguguuaccuggguaugagaguguuggaag

SEQ ID NO: 74199 - RNA, 32 nt, Human
auuguguuccccaggcugaagugcaguggcau

SEQ ID NO: 74200 - RNA, 32 nt, Human
auuguguugagugaaguuuggagauuuuucau

SEQ ID NO: 74201 - RNA, 32 nt, Human
auuguguugucaaaucaagaaugggugugcau

SEQ ID NO: 74202 - RNA, 32 nt, Human
auuguguugugaggcgcacuguuccuggcaga

SEQ ID NO: 74203 - RNA, 32 nt, Human
auuguguuucccagccucuccacucccccgcc

SEQ ID NO: 74204 - RNA, 32 nt, Human
auuguguuugaucuucuucugaacaacuuagg

SEQ ID NO: 74205 - RNA, 32 nt, Human
auuguguuuucagguuuuguuuuuaguaggug

SEQ ID NO: 74206 - RNA, 32 nt, Human
auuguguuuugacugcagcuggaucuuggcuu

SEQ ID NO: 74207 - RNA, 32 nt, Human
auuguuaaagugacaggaguuguaggguuacc

SEQ ID NO: 74208 - RNA, 32 nt, Human
auuguuaacauaccaaacacacaugguaauag

SEQ ID NO: 74209 - RNA, 32 nt, Human
auuguuaauauuugugaggaaaagugaaacaa

SEQ ID NO: 74210 - RNA, 32 nt, Human
auuguuaauucccacuacaaguuuauaacgac

SEQ ID NO: 74211 - RNA, 32 nt, Human
auuguuacgucacuuuucuauaguuuugagag

SEQ ID NO: 74212 - RNA, 32 nt, Human
auuguuacuuacugcuccaggcauuuuauuaa

SEQ ID NO: 74213 - RNA, 32 nt, Human
auuguuacuuuacugccuagcugccaaccagu

SEQ ID NO: 74214 - RNA, 32 nt, Human
auuguuagagccucugacugggguucaccaua

SEQ ID NO: 74215 - RNA, 32 nt, Human
auuguuaggaauaugaagguugacggugaaau

SEQ ID NO: 74216 - RNA, 32 nt, Human
auuguuaguaaguggccaagagacuugaggaa

SEQ ID NO: 74217 - RNA, 32 nt, Human
auuguuaugaucuacucauuugcugacacauc

SEQ ID NO: 74218 - RNA, 32 nt, Human
auuguucacccagcagaacugggaggugcaaa

SEQ ID NO: 74219 - RNA, 32 nt, Human
auuguucacuggcuccaucgcacuccucccug

SEQ ID NO: 74220 - RNA, 32 nt, Human
auuguucagagagguuuaauccuaugugguag

SEQ ID NO: 74221 - RNA, 32 nt, Human
auuguucagaugucaagccaugcccaauuuuc

SEQ ID NO: 74222 - RNA, 32 nt, Human
auuguucagcaacgauuucuguacaucaccaa

SEQ ID NO: 74223 - RNA, 32 nt, Human
auuguucaguucaagggaaugaagaauucaga

SEQ ID NO: 74224 - RNA, 32 nt, Human
auuguucauagaagauauuauguacauuuauu

SEQ ID NO: 74225 - RNA, 32 nt, Human
auuguucauccagcaaccaggaugaucuuguu

SEQ ID NO: 74226 - RNA, 32 nt, Human
auuguuccacagacugaaugcuguguucguau

SEQ ID NO: 74227 - RNA, 32 nt, Human
auuguucccaggggccugcccaccccagugcc

SEQ ID NO: 74228 - RNA, 32 nt, Human
auuguucccgauggucucucucccucugucuu

SEQ ID NO: 74229 - RNA, 32 nt, Human
auuguuccuccaccgucccacacuuuaggggg

SEQ ID NO: 74230 - RNA, 32 nt, Human
auuguuccugccuccuccgccaccuccgcccc

SEQ ID NO: 74231 - RNA, 31 nt, Human
auuguucuaaauaaauacauguuuuugaaua

SEQ ID NO: 74232 - RNA, 32 nt, Human
auuguucuauuuaaaauauuccuugaauuaaa

SEQ ID NO: 74233 - RNA, 32 nt, Human
auuguucucucccuguuuucauuucgggacca

SEQ ID NO: 74234 - RNA, 32 nt, Human
auuguucugcaguucucucuucuuuuccucag

SEQ ID NO: 74235 - RNA, 32 nt, Human
auuguucugcugucugggacuccugucuaggu

SEQ ID NO: 74236 - RNA, 32 nt, Human
auuguucuguauuuuuaaauugccaagaaaaa

SEQ ID NO: 74237 - RNA, 32 nt, Human
auuguugaacagcucugggcaguugauugugu

SEQ ID NO: 74238 - RNA, 32 nt, Human
auuguugaagauaauaaagaagaacaguauuc

SEQ ID NO: 74239 - RNA, 32 nt, Human
auuguugaagccuccuggaauguuugagucaa

SEQ ID NO: 74240 - RNA, 32 nt, Human
auuguugaaggagaggaacaagagugauagca

SEQ ID NO: 74241 - RNA, 32 nt, Human
auuguugauaacacuguucaucuacugaagca

SEQ ID NO: 74242 - RNA, 32 nt, Human
auuguugcaacuuuucuuggcguguuuaaauc

SEQ ID NO: 74243 - RNA, 32 nt, Human
auuguugcaagauggccgcgcccagugaugga

SEQ ID NO: 74244 - RNA, 32 nt, Human
auuguugcagagcaagugaugauagaccacuu

SEQ ID NO: 74245 - RNA, 32 nt, Human
auuguugcauugaaauggcagacgaagcaaga

SEQ ID NO: 74246 - RNA, 32 nt, Human
auuguuggcaaaacuuaaucaugauuguuuug

SEQ ID NO: 74247 - RNA, 32 nt, Human
auuguuggcagugucaucucugagaaacagau

SEQ ID NO: 74248 - RNA, 32 nt, Human
auuguugggagguggagggaaagaacuacuau

SEQ ID NO: 74249 - RNA, 32 nt, Human
auuguugggauuauaggcgugagccacugcac

SEQ ID NO: 74250 - RNA, 32 nt, Human
auuguugucucagucaugcuugcugauuacag

SEQ ID NO: 74251 - RNA, 32 nt, Human
auuguugugccauuaagcaauuuagcuaaucc

SEQ ID NO: 74252 - RNA, 32 nt, Human
auuguugugucugugcccuccaaagagccuuc

SEQ ID NO: 74253 - RNA, 32 nt, Human
auuguuuaaucaauggaauuuguaccagccuu

SEQ ID NO: 74254 - RNA, 32 nt, Human
auuguuuacaauauuuguacaucuaugcaaaa

SEQ ID NO: 74255 - RNA, 32 nt, Human
auuguuuacauccugagacuguucuacaguuu

SEQ ID NO: 74256 - RNA, 32 nt, Human
auuguuuacuaucccuuauuugacaaaaaguc

SEQ ID NO: 74257 - RNA, 32 nt, Human
auuguuuacucucuuauuuaccaacuucuggc

SEQ ID NO: 74258 - RNA, 32 nt, Human
auuguuucagugccauuuguuaaaaagacugu

SEQ ID NO: 74259 - RNA, 32 nt, Human
auuguuucauucuucucucuuccugucaccuu

SEQ ID NO: 74260 - RNA, 32 nt, Human
auuguuucccacauauuaagucaggguggaua

SEQ ID NO: 74261 - RNA, 32 nt, Human
auuguuuccuucugacuuaagcaauagagaga

SEQ ID NO: 74262 - RNA, 32 nt, Human
auuguuucucucucaaccacuuugccacuccu

SEQ ID NO: 74263 - RNA, 32 nt, Human
auuguuucugagaaguugggaaauuaccauua

SEQ ID NO: 74264 - RNA, 32 nt, Human
auuguuucuguaugugucugguguuuugcaca

SEQ ID NO: 74265 - RNA, 32 nt, Human
auuguuugaacagaugucagaugugaguaaug

SEQ ID NO: 74266 - RNA, 32 nt, Human
auuguuugaacccaggaggcacagguugcagu

SEQ ID NO: 74267 - RNA, 32 nt, Human
auuguuugaacccaggagguggaggcugcagu

SEQ ID NO: 74268 - RNA, 32 nt, Human
auuguuugaaccccggagauggagguugcagu

SEQ ID NO: 74269 - RNA, 32 nt, Human
auuguuugaaccccggaggcagagguuucagu

SEQ ID NO: 74270 - RNA, 32 nt, Human
auuguuugaacccgggaggcagagguugcagu

SEQ ID NO: 74271 - RNA, 32 nt, Human
auuguuugaacccgggaggcggagguugcagu

SEQ ID NO: 74272 - RNA, 32 nt, Human
auuguuugaacccggguggcagagguugcagu

SEQ ID NO: 74273 - RNA, 32 nt, Human
auuguuugaacccuggaggcagagguuguagu

SEQ ID NO: 74274 - RNA, 32 nt, Human
auuguuugaacccuggaggcggaaguugcagu

SEQ ID NO: 74275 - RNA, 32 nt, Human
auuguuugacucuguguccccacccagaucuc

SEQ ID NO: 74276 - RNA, 32 nt, Human
auuguuugagcccaggagguugaggcugcagu

SEQ ID NO: 74277 - RNA, 32 nt, Human
auuguuugagcccuggagguugaggcugcagu

SEQ ID NO: 74278 - RNA, 32 nt, Human
auuguuugaugaagccuaauuaugcuggacug

SEQ ID NO: 74279 - RNA, 32 nt, Human
auuguuugcaccugcuggguauggccuuuggg

SEQ ID NO: 74280 - RNA, 32 nt, Human
auuguuuggcaaggagacaggagaaacaagca

SEQ ID NO: 74281 - RNA, 32 nt, Human
auuguuuggucaauacacugaagauggagaau

SEQ ID NO: 74282 - RNA, 32 nt, Human
auuguuuuacuuuugucuuccucacuagugua

SEQ ID NO: 74283 - RNA, 32 nt, Human
auuguuuuauguucuagugauuuccuguauaa

SEQ ID NO: 74284 - RNA, 32 nt, Human
auuguuuuccagggcccuugaccaacaucggc

SEQ ID NO: 74285 - RNA, 32 nt, Human
auuguuuucccucacagacauuucucuuucau

SEQ ID NO: 74286 - RNA, 32 nt, Human
auuguuuuccgugcuguguccucugccauuua

SEQ ID NO: 74287 - RNA, 32 nt, Human
auuguuuucuacugcuaugugucacacuuugc

SEQ ID NO: 74288 - RNA, 32 nt, Human
auuguuuugaaggaauaaagaauggcuacucc

SEQ ID NO: 74289 - RNA, 32 nt, Human
auuguuuugaugucuagccccucccauuucca

SEQ ID NO: 74290 - RNA, 32 nt, Human
auuguuuugguuucuguucccuuucugacugc

SEQ ID NO: 74291 - RNA, 32 nt, Human
auuguuuugucaaucaacacagccugcacuga

SEQ ID NO: 74292 - RNA, 32 nt, Human
auuguuuuuaaugcagcgugggaggggaggau

SEQ ID NO: 74293 - RNA, 32 nt, Human
auuguuuuugacuaagugacuaagacauacac

SEQ ID NO: 74294 - RNA, 32 nt, Human
auuguuuuugacugaguaucuaggagagcagu

SEQ ID NO: 74295 - RNA, 32 nt, Human
auuuaaaaacaacuuuaauucuaagaugugua

SEQ ID NO: 74296 - RNA, 32 nt, Human
auuuaaaaacccacaacuaaaaauguauccac

SEQ ID NO: 74297 - RNA, 32 nt, Human
auuuaaaaaccugcagcaacaugggggaggag

SEQ ID NO: 74298 - RNA, 22 nt, Human
auuuaaaaacuagaauaacaga

SEQ ID NO: 74299 - RNA, 32 nt, Human
auuuaaaaauaaaauugugcaaaacuuauuug

SEQ ID NO: 74300 - RNA, 32 nt, Human
auuuaaaaauuagccuagcaugguggcacgcu

SEQ ID NO: 74301 - RNA, 32 nt, Human
auuuaaaaauuagcugagcaugguggcaugug

SEQ ID NO: 74302 - RNA, 32 nt, Human
auuuaaaaauuagcugggcaugguagcacaug

SEQ ID NO: 74303 - RNA, 32 nt, Human
auuuaaaaauuagcugggcaugguggcaugug

SEQ ID NO: 74304 - RNA, 32 nt, Human
auuuaaaaauuagcugggcaugguggcgcaug

SEQ ID NO: 74305 - RNA, 32 nt, Human
auuuaaaaauuagcugggcauggugguagugc

SEQ ID NO: 74306 - RNA, 32 nt, Human
auuuaaaacuuagcuggcauugguggcgcaug

SEQ ID NO: 74307 - RNA, 32 nt, Human
auuuaaaagaugaccugaccaaaaacuuuaca

SEQ ID NO: 74308 - RNA, 32 nt, Human
auuuaaaagcauucuuauuuugucauuaagac

SEQ ID NO: 74309 - RNA, 32 nt, Human
auuuaaaagcuauuauucuuagcauuaaccua

SEQ ID NO: 74310 - RNA, 32 nt, Human
auuuaaaauguucuucgggggagaagggagcu

SEQ ID NO: 74311 - RNA, 32 nt, Human
auuuaaacaauguuguuuuaaaauauucuaac

SEQ ID NO: 74312 - RNA, 32 nt, Human
auuuaaacagucaaguaaaaucaagcugggua

SEQ ID NO: 74313 - RNA, 32 nt, Human
auuuaaacccaggaggcagagguugcagugag

SEQ ID NO: 74314 - RNA, 32 nt, Human
auuuaaacugaacaaaucacuacuuuugggau

SEQ ID NO: 74315 - RNA, 32 nt, Human
auuuaaagacaccaaggaaaacuacaacuguc

SEQ ID NO: 74316 - RNA, 32 nt, Human
auuuaaagcacaugccuucugugccggcuuuc

SEQ ID NO: 74317 - RNA, 32 nt, Human
auuuaaagcuugggaaggaaggauggaaagcg

SEQ ID NO: 74318 - RNA, 32 nt, Human
auuuaaagguacccacuuuaccccgugcccac

SEQ ID NO: 74319 - RNA, 32 nt, Human
auuuaaagguccagagaggcaagugaauuguc

SEQ ID NO: 74320 - RNA, 32 nt, Human
auuuaaaguauucuccauccucccaggaaccg

SEQ ID NO: 74321 - RNA, 32 nt, Human
auuuaaagugaagaaugaaaaauauguaagag

SEQ ID NO: 74322 - RNA, 32 nt, Human
auuuaaaguuaggaagaucugggagauagggg

SEQ ID NO: 74323 - RNA, 30 nt, Human
auuuaaauaaagaacugcugugucugacuu

SEQ ID NO: 74324 - RNA, 32 nt, Human
auuuaaauagccacauuuaacuccagccuugg

SEQ ID NO: 74325 - RNA, 32 nt, Human
auuuaaauaugugaagcugaguuaauuuaugu

SEQ ID NO: 74326 - RNA, 32 nt, Human
auuuaaaucucccagggcuuccuccaagggcc

SEQ ID NO: 74327 - RNA, 32 nt, Human
auuuaaauugagauggauucuugcucugucgc

SEQ ID NO: 74328 - RNA, 32 nt, Human
auuuaacaaaccugaauguggccguguucaaa

SEQ ID NO: 74329 - RNA, 32 nt, Human
auuuaacaaccugaaauuuauucacauauauc

SEQ ID NO: 74330 - RNA, 32 nt, Human
auuuaacaacuuggccagccgugguggcucac

SEQ ID NO: 74331 - RNA, 32 nt, Human
auuuaacaaugccacaccugaagcacuuggau

SEQ ID NO: 74332 - RNA, 32 nt, Human
auuuaacacaaaggcagaugauacacuuauaa

SEQ ID NO: 74333 - RNA, 32 nt, Human
auuuaacagauagaguguggcuucauuugucc

SEQ ID NO: 74334 - RNA, 32 nt, Human
auuuaacaggcaggacgcugaggcucugauaa

SEQ ID NO: 74335 - RNA, 32 nt, Human
auuuaacaggcucacccucccuuuccuuuucc

SEQ ID NO: 74336 - RNA, 32 nt, Human
auuuaacagggaggggaagagggggcgaucgc

SEQ ID NO: 74337 - RNA, 32 nt, Human
auuuaacauuuccucuuuccaagaccaaccua

SEQ ID NO: 74338 - RNA, 32 nt, Human
auuuaaccacuccgcuauuaauagacauucau

SEQ ID NO: 74339 - RNA, 32 nt, Human
auuuaaccagcuuuuaaaucucucuuuucucu

SEQ ID NO: 74340 - RNA, 32 nt, Human
auuuaaccagugcuuggaaaaaucuugcuugg

SEQ ID NO: 74341 - RNA, 32 nt, Human
auuuaaccaugccaccuaugagugccagugac

SEQ ID NO: 74342 - RNA, 32 nt, Human
auuuaaccccuccacugcugggggugagcugu

SEQ ID NO: 74343 - RNA, 32 nt, Human
auuuaaccucucugaaccucagcuucucaucc

SEQ ID NO: 74344 - RNA, 32 nt, Human
auuuaaccuguaaaaugucaauagcaaaugaa

SEQ ID NO: 74345 - RNA, 32 nt, Human
auuuaacgaaaugcuucucuucuauagccagg

SEQ ID NO: 74346 - RNA, 32 nt, Human
auuuaacggcuucacuggacaguuuuccuuag

SEQ ID NO: 74347 - RNA, 32 nt, Human
auuuaacuagacuugccgaauauguuacuagc

SEQ ID NO: 74348 - RNA, 32 nt, Human
auuuaacucuuucacuacaguucuugcaagua

SEQ ID NO: 74349 - RNA, 32 nt, Human
auuuaacugaaaguagggccugcucugacagg

SEQ ID NO: 74350 - RNA, 32 nt, Human
auuuaacuucacugcaauucuguuucccucau

SEQ ID NO: 74351 - RNA, 32 nt, Human
auuuaagaaaagauaccaaaguagaagucaaa

SEQ ID NO: 74352 - RNA, 32 nt, Human
auuuaagaacuuugauuuccauuccauuuuca

SEQ ID NO: 74353 - RNA, 32 nt, Human
auuuaagaagcagcuccaauauuuuuaaaacg

SEQ ID NO: 74354 - RNA, 32 nt, Human
auuuaagaaguuauuuucacauguucugacac

SEQ ID NO: 74355 - RNA, 32 nt, Human
auuuaagaggaaauggacuggcauuuauggug

SEQ ID NO: 74356 - RNA, 32 nt, Human
auuuaagauugcaacagaagcacuuuucaaua

SEQ ID NO: 74357 - RNA, 32 nt, Human
auuuaagcaauuggcaacuacaaagacauuau

SEQ ID NO: 74358 - RNA, 32 nt, Human
auuuaagcacagaaaucccagaccuguuguuc

SEQ ID NO: 74359 - RNA, 32 nt, Human
auuuaagcagcccagagcuccagagaaaaaga

SEQ ID NO: 74360 - RNA, 32 nt, Human
auuuaagcagugagaggcagggaccagguuaa

SEQ ID NO: 74361 - RNA, 32 nt, Human
auuuaagcaguuuuaauguguaccuuuaccca

SEQ ID NO: 74362 - RNA, 32 nt, Human
auuuaagccaucuuuucauccuaaggaaaauu

SEQ ID NO: 74363 - RNA, 32 nt, Human
auuuaagcuaaaacagagcacauguauaugua

SEQ ID NO: 74364 - RNA, 32 nt, Human
auuuaagcuacugccaucaaccccacccccau

SEQ ID NO: 74365 - RNA, 32 nt, Human
auuuaaggcauaacagcacauucaucccuuug

SEQ ID NO: 74366 - RNA, 32 nt, Human
auuuaagggaagagagugacccagaugguagg

SEQ ID NO: 74367 - RNA, 32 nt, Human
auuuaagggcuauuuuugacacccuaaaugug

SEQ ID NO: 74368 - RNA, 32 nt, Human
auuuaaggguagggcuuucugaaggauuucug

SEQ ID NO: 74369 - RNA, 32 nt, Human
auuuaaguaauggagaagaauuaaacauugua

SEQ ID NO: 74370 - RNA, 32 nt, Human
auuuaaguauuuuuaaucaucagccaagcauu

SEQ ID NO: 74371 - RNA, 32 nt, Human
auuuaagucuucacugagggccacuuuacaaa

SEQ ID NO: 74372 - RNA, 32 nt, Human
auuuaagugcguguguagaguuaagaagcugu

SEQ ID NO: 74373 - RNA, 32 nt, Human
auuuaaguguuggacugcuaggagaacuugua

SEQ ID NO: 74374 - RNA, 32 nt, Human
auuuaaguuaacucaaagccaaugaguuaaau

SEQ ID NO: 74375 - RNA, 32 nt, Human
auuuaauaaauauuucaggauauuuuuccucu

SEQ ID NO: 74376 - RNA, 32 nt, Human
auuuaauaaccaaacuauuuuaauaguuuacc

SEQ ID NO: 74377 - RNA, 32 nt, Human
auuuaauaaguggcaauggguauugucccuag

SEQ ID NO: 74378 - RNA, 32 nt, Human
auuuaauaguguugggucucccauggaaaaca

SEQ ID NO: 74379 - RNA, 32 nt, Human
auuuaauauauguacacccauuauguuuucag

SEQ ID NO: 74380 - RNA, 32 nt, Human
auuuaauauuaaggcuguggguggugauugcu

SEQ ID NO: 74381 - RNA, 32 nt, Human
auuuaaucaacuuuauugucuuaguauuuaga

SEQ ID NO: 74382 - RNA, 32 nt, Human
auuuaaucaagaaacuaccuggaaccagugaa

SEQ ID NO: 74383 - RNA, 32 nt, Human
auuuaaucacauaaaagucaugaagaccagcc

SEQ ID NO: 74384 - RNA, 32 nt, Human
auuuaaucaucaccaccgguguuuccauauuu

SEQ ID NO: 74385 - RNA, 32 nt, Human
auuuaaucccaggaaagaggcaucaaagcuag

SEQ ID NO: 74386 - RNA, 32 nt, Human
auuuaaucucccacaguauucaugagaccauc

SEQ ID NO: 74387 - RNA, 32 nt, Human
auuuaaucuucuugcauuuauuucucaagaau

SEQ ID NO: 74388 - RNA, 32 nt, Human
auuuaaucuuuccuugcuuucuuuagccaacu

SEQ ID NO: 74389 - RNA, 32 nt, Human
auuuaaugagcccucuuucuuguggccguuuc

SEQ ID NO: 74390 - RNA, 32 nt, Human
auuuaaugauggcauaaaauucccagauacuu

SEQ ID NO: 74391 - RNA, 32 nt, Human
auuuaaugauuacacccuuucccuucauagau

SEQ ID NO: 74392 - RNA, 32 nt, Human
auuuaaugcaaagaaauucuguuacuuaaugu

SEQ ID NO: 74393 - RNA, 32 nt, Human
auuuaaugccauuuguguuucaugccauuuua

SEQ ID NO: 74394 - RNA, 32 nt, Human
auuuaauggaguugucagcaugaucaucaucu

SEQ ID NO: 74395 - RNA, 32 nt, Human
auuuaaugggaguauuuggaguauuuaacggg

SEQ ID NO: 74396 - RNA, 31 nt, Human
auuuaauguagaggaacugaccaucaugaau

SEQ ID NO: 74397 - RNA, 32 nt, Human
auuuaaugucagggaagauccuuagaaucgcg

SEQ ID NO: 74398 - RNA, 32 nt, Human
auuuaauguccugcuuucacauugaagggcag

SEQ ID NO: 74399 - RNA, 32 nt, Human
auuuaauguguacuugaaaacauugcuuuugu

SEQ ID NO: 74400 - RNA, 32 nt, Human
auuuaauguguauguguguauguguguaugug

SEQ ID NO: 74401 - RNA, 32 nt, Human
auuuaauuccaucagguccaguacaguacuag

SEQ ID NO: 74402 - RNA, 32 nt, Human
auuuaauucgcagcggggcacugacuuuacac

SEQ ID NO: 74403 - RNA, 32 nt, Human
auuuaauucuuaagauguguagaccuugaugg

SEQ ID NO: 74404 - RNA, 32 nt, Human
auuuaauuggaaguaguuuaaaugucucauug

SEQ ID NO: 74405 - RNA, 32 nt, Human
auuuaauuuacagccagcauuuugccacguuc

SEQ ID NO: 74406 - RNA, 32 nt, Human
auuuaauuucuucccuucuccccaccaguguu

SEQ ID NO: 74407 - RNA, 18 nt, Human
auuuacaacgcacaucga

SEQ ID NO: 74408 - RNA, 31 nt, Human
auuuacaacucaguuuuacauuuaaauucag

SEQ ID NO: 74409 - RNA, 32 nt, Human
auuuacaacugauuccugcgcaguggagaagu

SEQ ID NO: 74410 - RNA, 32 nt, Human
auuuacacaaauuauaaaaauuagucgggugu

SEQ ID NO: 74411 - RNA, 17 nt, Human
auuuacacaaccuugga

SEQ ID NO: 74412 - RNA, 20 nt, Human
auuuacacacagaagucaua

SEQ ID NO: 74413 - RNA, 17 nt, Human
auuuacacacagcugga

SEQ ID NO: 74414 - RNA, 17 nt, Human
auuuacacauaguuuga

SEQ ID NO: 74415 - RNA, 23 nt, Human
auuuacaccuguaaauuuauuca

SEQ ID NO: 74416 - RNA, 18 nt, Human
auuuacacuauauguucg

SEQ ID NO: 74417 - RNA, 32 nt, Human
auuuacacucacaacacccuaggcucacuaaa

SEQ ID NO: 74418 - RNA, 32 nt, Human
auuuacagaccagccagccaccauucugcuug

SEQ ID NO: 74419 - RNA, 32 nt, Human
auuuacagacuccagccccuuccucuguccgu

SEQ ID NO: 74420 - RNA, 32 nt, Human
auuuacagagucacagaucugucagccuggga

SEQ ID NO: 74421 - RNA, 32 nt, Human
auuuacagcuguccuugaacaaguaucaaugu

SEQ ID NO: 74422 - RNA, 32 nt, Human
auuuacaggugaggaaauggaggcucagagag

SEQ ID NO: 74423 - RNA, 32 nt, Human
auuuacaguccaagcacccaucagcugccaag

SEQ ID NO: 74424 - RNA, 32 nt, Human
auuuacaguguuucuuggagauauaauuuuac

SEQ ID NO: 74425 - RNA, 17 nt, Human
auuuacauacaccugga

SEQ ID NO: 74426 - RNA, 32 nt, Human
auuuacauccuuguaauggccaguuaagcuag

SEQ ID NO: 74427 - RNA, 32 nt, Human
auuuacauguuuaaauucaaagccugauccau

SEQ ID NO: 74428 - RNA, 32 nt, Human
auuuacauucccuagagaacacugugaggcaa

SEQ ID NO: 74429 - RNA, 32 nt, Human
auuuacauuucuaacaaguucccagguaaugc

SEQ ID NO: 74430 - RNA, 32 nt, Human
auuuaccaaucaccaagcaugcaccaaacacu

SEQ ID NO: 74431 - RNA, 32 nt, Human
auuuaccaaugagacaucuuccuaggaacugg

SEQ ID NO: 74432 - RNA, 21 nt, Human
auuuaccaauuaaauaacuga

SEQ ID NO: 74433 - RNA, 32 nt, Human
auuuaccagaaacaguccuuugucuagaugga

SEQ ID NO: 74434 - RNA, 32 nt, Human
auuuaccagaagccaagaugauguaggacccc

SEQ ID NO: 74435 - RNA, 32 nt, Human
auuuaccaggagaaagaguuuugugcuguauu

SEQ ID NO: 74436 - RNA, 32 nt, Human
auuuaccaggauucccguagggcguuuuguaa

SEQ ID NO: 74437 - RNA, 32 nt, Human
auuuaccagguaacagugguuacccaagaggc

SEQ ID NO: 74438 - RNA, 32 nt, Human
auuuaccaucuugcauauguauaguucauuuu

SEQ ID NO: 74439 - RNA, 28 nt, Human
auuuacccaaguguucagcuuauucacc

SEQ ID NO: 74440 - RNA, 32 nt, Human
auuuacccaaguguucagcuuauucaccccac

SEQ ID NO: 74441 - RNA, 32 nt, Human
auuuacccaauacugucacagaaaaaugaaac

SEQ ID NO: 74442 - RNA, 32 nt, Human
auuuacccagcacucugagauaaauaccauua

SEQ ID NO: 74443 - RNA, 32 nt, Human
auuuacccguuuccuuuuuccucuuccuuaau

SEQ ID NO: 74444 - RNA, 32 nt, Human
auuuacccuacaagacaccaaaauuagguuuu

SEQ ID NO: 74445 - RNA, 32 nt, Human
auuuacccuggacuucuccgggugccagcacc

SEQ ID NO: 74446 - RNA, 32 nt, Human
auuuacccuucaugaucuuuggcgauucucca

SEQ ID NO: 74447 - RNA, 23 nt, Human
auuuaccguucugcaacaacgga

SEQ ID NO: 74448 - RNA, 32 nt, Human
auuuaccuaaaaugugcuaguagcaucuugcc

SEQ ID NO: 74449 - RNA, 32 nt, Human
auuuaccuauuuuaaaaggaaggaauuguaag

SEQ ID NO: 74450 - RNA, 32 nt, Human
auuuaccucgaauuugauucccagaggaguug

SEQ ID NO: 74451 - RNA, 31 nt, Human
auuuaccuguuuucgcaccuaccaucaggga

SEQ ID NO: 74452 - RNA, 32 nt, Human
auuuacguaaaaagauauuucuaauuuacugu

SEQ ID NO: 74453 - RNA, 32 nt, Human
auuuacuaaaaauacaaaaacuuagccgggca

SEQ ID NO: 74454 - RNA, 32 nt, Human
auuuacuaauccugucuuauuucccacaaauc

SEQ ID NO: 74455 - RNA, 32 nt, Human
auuuacuacaauauguacauuucuaagucaaa

SEQ ID NO: 74456 - RNA, 32 nt, Human
auuuacuccaaagccuguuguucuuaacugca

SEQ ID NO: 74457 - RNA, 32 nt, Human
auuuacuccagaggaucaucucuuuguauuug

SEQ ID NO: 74458 - RNA, 32 nt, Human
auuuacucuaggguaagguaguacacauuugg

SEQ ID NO: 74459 - RNA, 32 nt, Human
auuuacucugcugcaaccucucuuucuccuac

SEQ ID NO: 74460 - RNA, 32 nt, Human
auuuacucuguaguaauugaugauuaacuugg

SEQ ID NO: 74461 - RNA, 32 nt, Human
auuuacugaacaaagccuccuuugccaaaggc

SEQ ID NO: 74462 - RNA, 32 nt, Human
auuuacuggaaauguauucauacugugaauug

SEQ ID NO: 74463 - RNA, 32 nt, Human
auuuacuggaagacuuggauuugguggaagac

SEQ ID NO: 74464 - RNA, 22 nt, Human
auuuacuuaagucaauaacaga

SEQ ID NO: 74465 - RNA, 32 nt, Human
auuuacuugccccacugcugugcaaugccuua

SEQ ID NO: 74466 - RNA, 32 nt, Human
auuuacuuguucuuuaucucccccuuuuucua

SEQ ID NO: 74467 - RNA, 32 nt, Human
auuuacuuuaugcuaccucucccacacugguu

SEQ ID NO: 74468 - RNA, 32 nt, Human
auuuacuuugaaugucaagucagauuggucug

SEQ ID NO: 74469 - RNA, 32 nt, Human
auuuacuuuugaaaagaaauuucuuuaacagg

SEQ ID NO: 74470 - RNA, 32 nt, Human
auuuagaaaauuccucuucguucaccuuggcu

SEQ ID NO: 74471 - RNA, 32 nt, Human
auuuagaaauuagcugggcaugguggcaccca

SEQ ID NO: 74472 - RNA, 32 nt, Human
auuuagaagaacagaaaacaaaacuauuacaa

SEQ ID NO: 74473 - RNA, 32 nt, Human
auuuagaagacagcauacuagauggaauaauc

SEQ ID NO: 74474 - RNA, 32 nt, Human
auuuagaagcuccucagaugauucuaguuuuc

SEQ ID NO: 74475 - RNA, 32 nt, Human
auuuagaauuauugcauuuucauuccaaagua

SEQ ID NO: 74476 - RNA, 32 nt, Human
auuuagacaaaacuccagccuuguugaccacc

SEQ ID NO: 74477 - RNA, 32 nt, Human
auuuagacaaugaaaauuaucaagagauaauu

SEQ ID NO: 74478 - RNA, 32 nt, Human
auuuagacuuguuuucccguuuccuugaauga

SEQ ID NO: 74479 - RNA, 32 nt, Human
auuuagagaaguuagucucucugggccuguuu

SEQ ID NO: 74480 - RNA, 32 nt, Human
auuuagagacagagucucacccuguuggccag

SEQ ID NO: 74481 - RNA, 32 nt, Human
auuuagagaugggguuuugccauguuggccag

SEQ ID NO: 74482 - RNA, 32 nt, Human
auuuagagcaaagccucagcuaagugacacau

SEQ ID NO: 74483 - RNA, 32 nt, Human
auuuagaggaauauuugugagcugccauuugu

SEQ ID NO: 74484 - RNA, 17 nt, Human
auuuagauaaccuuuga

SEQ ID NO: 74485 - RNA, 32 nt, Human
auuuagauaauagggcaggggaagcacccucu

SEQ ID NO: 74486 - RNA, 32 nt, Human
auuuagauaccaacccucccggcuguaucagu

SEQ ID NO: 74487 - RNA, 32 nt, Human
auuuagauaguaugucaguaguuguguuuuua

SEQ ID NO: 74488 - RNA, 31 nt, Human
auuuagauggaaagugauggcauucacaggc

SEQ ID NO: 74489 - RNA, 32 nt, Human
auuuagauuaucauuuaugugcuguugcacag

SEQ ID NO: 74490 - RNA, 32 nt, Human
auuuagauucacugugaugaaaagcacagccu

SEQ ID NO: 74491 - RNA, 32 nt, Human
auuuagauugauucuccccaaauguggaugaa

SEQ ID NO: 74492 - RNA, 32 nt, Human
auuuagcagccuuucaaauguauaugguucug

SEQ ID NO: 74493 - RNA, 32 nt, Human
auuuagcaggagcuauccugacuuaauaucca

SEQ ID NO: 74494 - RNA, 32 nt, Human
auuuagcagugaggcagcaaugcugaguaggu

SEQ ID NO: 74495 - RNA, 22 nt, Human
auuuagcaugguguguugaaau

SEQ ID NO: 74496 - RNA, 32 nt, Human
auuuagcgaugaggaaagugaagcucagagca

SEQ ID NO: 74497 - RNA, 32 nt, Human
auuuagcucacuguaacacaguuucacucucu

SEQ ID NO: 74498 - RNA, 32 nt, Human
auuuagcuccagaaagcaaagaaaacucgagu

SEQ ID NO: 74499 - RNA, 32 nt, Human
auuuagcuccaugccaaccacucccggcuugc

SEQ ID NO: 74500 - RNA, 32 nt, Human
auuuagcugcccacgcugcagugugaguaaug

SEQ ID NO: 74501 - RNA, 32 nt, Human
auuuagcugcugccaguucaagugaccugucc

SEQ ID NO: 74502 - RNA, 32 nt, Human
auuuagcugcugccuccagccucuggcuugag

SEQ ID NO: 74503 - RNA, 32 nt, Human
auuuaggaaaugauauggcaucagguaagccu

SEQ ID NO: 74504 - RNA, 32 nt, Human
auuuaggaccacugcauccugucuuaauccaa

SEQ ID NO: 74505 - RNA, 32 nt, Human
auuuaggagugccauuucagcaguucagugag

SEQ ID NO: 74506 - RNA, 32 nt, Human
auuuaggaguuucaauaauaaccauugcuuuu

SEQ ID NO: 74507 - RNA, 31 nt, Human
auuuaggauucuccuguuucaucugggucag

SEQ ID NO: 74508 - RNA, 32 nt, Human
auuuaggauuucagggaaaaguguccaagcuu

SEQ ID NO: 74509 - RNA, 32 nt, Human
auuuaggcaaaacuuacaguauuguucuggga

SEQ ID NO: 74510 - RNA, 19 nt, Human
auuuaggcugggugcagug

SEQ ID NO: 74511 - RNA, 32 nt, Human
auuuagggaaggugaaaggcauaccuuugugg

SEQ ID NO: 74512 - RNA, 32 nt, Human
auuuagggacaugcuacccacuaccuacucuu

SEQ ID NO: 74513 - RNA, 32 nt, Human
auuuagggaguuaccuguuuucaucucgaggu

SEQ ID NO: 74514 - RNA, 32 nt, Human
auuuagggaucucagauuuggaagaugacugc

SEQ ID NO: 74515 - RNA, 32 nt, Human
auuuagggcaaguugcuugagcucuuugggcc

SEQ ID NO: 74516 - RNA, 32 nt, Human
auuuagggccagaugagaacgacugggggcca

SEQ ID NO: 74517 - RNA, 32 nt, Human
auuuagggcuaugacaaaaauguuguuaaagc

SEQ ID NO: 74518 - RNA, 32 nt, Human
auuuaggggaugggaacaacaugucuucaccu

SEQ ID NO: 74519 - RNA, 32 nt, Human
auuuagggugcuguacaaaucaccuccgccua

SEQ ID NO: 74520 - RNA, 32 nt, Human
auuuagguagguugaagcuaggaggauuuucu

SEQ ID NO: 74521 - RNA, 32 nt, Human
auuuaggucccuuggucuguacaaauaauagc

SEQ ID NO: 74522 - RNA, 32 nt, Human
auuuaggugauaccuaaauccuucuuauguuu

SEQ ID NO: 74523 - RNA, 32 nt, Human
auuuagguugagucaugagaaccggucauugg

SEQ ID NO: 74524 - RNA, 32 nt, Human
auuuagguuguugccaauguuuuauuauaacg

SEQ ID NO: 74525 - RNA, 23 nt, Human
auuuaguaaaguguaucaaagua

SEQ ID NO: 74526 - RNA, 32 nt, Human
auuuaguacaguuuagaaagagcacuuauuuu

SEQ ID NO: 74527 - RNA, 32 nt, Human
auuuaguaguccauugauaaauuugccagcau

SEQ ID NO: 74528 - RNA, 22 nt, Human
auuuaguauaguguagaaaaua

SEQ ID NO: 74529 - RNA, 32 nt, Human
auuuagucacccagaggagccaguaaauguua

SEQ ID NO: 74530 - RNA, 32 nt, Human
auuuagucacccagaggagccaguaaguguua

SEQ ID NO: 74531 - RNA, 32 nt, Human
auuuagucauucuucuuuuaaauuuagaaacc

SEQ ID NO: 74532 - RNA, 32 nt, Human
auuuaguccuaaaaggauacuuuggaacuuaa

SEQ ID NO: 74533 - RNA, 32 nt, Human
auuuaguccugugcauacugugguguuuuuac

SEQ ID NO: 74534 - RNA, 32 nt, Human
auuuagucucugugucagcacaguguaaucuc

SEQ ID NO: 74535 - RNA, 32 nt, Human
auuuagugaaguugugcaacggccaggguugu

SEQ ID NO: 74536 - RNA, 32 nt, Human
auuuagugcccagggaguccagcgaaugacgu

SEQ ID NO: 74537 - RNA, 32 nt, Human
auuuagugcuaaacaaguaagaaaaauaagcu

SEQ ID NO: 74538 - RNA, 32 nt, Human
auuuagugggggaggcuggaucacgcugcagc

SEQ ID NO: 74539 - RNA, 31 nt, Human
auuuagugggugggaagaggcccugaugcug

SEQ ID NO: 74540 - RNA, 32 nt, Human
auuuagugugacugcacacaucugggcucuaa

SEQ ID NO: 74541 - RNA, 32 nt, Human
auuuaguguguaguuucugaaagcaaacugau

SEQ ID NO: 74542 - RNA, 32 nt, Human
auuuaguugccugccuguggcugguaagguaa

SEQ ID NO: 74543 - RNA, 32 nt, Human
auuuaguuuuuaaccccuaugaaaauuugacu

SEQ ID NO: 74544 - RNA, 32 nt, Human
auuuaguuuuuccacuuuaccuucaugauuua

SEQ ID NO: 74545 - RNA, 32 nt, Human
auuuauaaaagcagacucaccuaauaaaauca

SEQ ID NO: 74546 - RNA, 32 nt, Human
auuuauaaauaacauuuaauuuuaauuuauuu

SEQ ID NO: 74547 - RNA, 32 nt, Human
auuuauaacuaaaucucuauuuguucggauga

SEQ ID NO: 74548 - RNA, 32 nt, Human
auuuauaacucauaaucauuuagacauaaugc

SEQ ID NO: 74549 - RNA, 32 nt, Human
auuuauaacuggauagcauugcagugaaagca

SEQ ID NO: 74550 - RNA, 32 nt, Human
auuuauaagagcaguguuugagaccuccugug

SEQ ID NO: 74551 - RNA, 32 nt, Human
auuuauaaucuuguggcuaauuuguuaguccu

SEQ ID NO: 74552 - RNA, 32 nt, Human
auuuauacaauccauuucuguccucuuuaugg

SEQ ID NO: 74553 - RNA, 32 nt, Human
auuuauacacuucucccauuuuguaucaggug

SEQ ID NO: 74554 - RNA, 32 nt, Human
auuuauacaucuccauuuucugaccucuggac

SEQ ID NO: 74555 - RNA, 32 nt, Human
auuuauacauggcagaucuuacugucucuaca

SEQ ID NO: 74556 - RNA, 32 nt, Human
auuuauacugaucuuuuuccauccagcagugg

SEQ ID NO: 74557 - RNA, 32 nt, Human
auuuauagaccaccuccagccagugacgcucc

SEQ ID NO: 74558 - RNA, 32 nt, Human
auuuauagagaaacgcguguccccgaggcccg

SEQ ID NO: 74559 - RNA, 32 nt, Human
auuuauagaugaggcuuauaugaaaaggcuag

SEQ ID NO: 74560 - RNA, 32 nt, Human
auuuauagaugaugggauuauagguguuugcu

SEQ ID NO: 74561 - RNA, 32 nt, Human
auuuauaggaagaagguuuuugcucaguaccu

SEQ ID NO: 74562 - RNA, 32 nt, Human
auuuauaggaccacaggccagccugggagauu

SEQ ID NO: 74563 - RNA, 32 nt, Human
auuuauaggcuauuaaggcaagggauaucuua

SEQ ID NO: 74564 - RNA, 32 nt, Human
auuuauaguggagaugggguuucuccauauug

SEQ ID NO: 74565 - RNA, 32 nt, Human
auuuauauaacuguuuuguuauuugaaucuug

SEQ ID NO: 74566 - RNA, 20 nt, Human
auuuauaugaacaccuuuga

SEQ ID NO: 74567 - RNA, 32 nt, Human
auuuauaugccaccuugucuuucauaaaagcu

SEQ ID NO: 74568 - RNA, 32 nt, Human
auuuauaugucagagcuguucuaaauuuauca

SEQ ID NO: 74569 - RNA, 31 nt, Human
auuuauauguuacuggcaguuggaaaugcag

SEQ ID NO: 74570 - RNA, 32 nt, Human
auuuauauuucacauaauguaaaguucuacaa

SEQ ID NO: 74571 - RNA, 32 nt, Human
auuuaucagacauugaacuucugugauuaauc

SEQ ID NO: 74572 - RNA, 32 nt, Human
auuuaucagacuccugggagaacaccaacauc

SEQ ID NO: 74573 - RNA, 32 nt, Human
auuuaucauauguaaauuaaacaugaauacau

SEQ ID NO: 74574 - RNA, 32 nt, Human
auuuaucauccauccauccaucauccauccgu

SEQ ID NO: 74575 - RNA, 28 nt, Human
auuuauccaagugcuuucauuuuuccag

SEQ ID NO: 74576 - RNA, 32 nt, Human
auuuauccauucaguguuuccugggccucugc

SEQ ID NO: 74577 - RNA, 32 nt, Human
auuuauccccauccguucguauuuauauuaaa

SEQ ID NO: 74578 - RNA, 32 nt, Human
auuuauccucaagagucagcuggcaggaucuc

SEQ ID NO: 74579 - RNA, 32 nt, Human
auuuauccugaucugucguugccaucaccucc

SEQ ID NO: 74580 - RNA, 32 nt, Human
auuuauccuuuuccuuuccuuccccuaagaug

SEQ ID NO: 74581 - RNA, 32 nt, Human
auuuaucuaccuaucuguaucuccuugugaaa

SEQ ID NO: 74582 - RNA, 32 nt, Human
auuuaucucaaagcugcaaguuccugccaucu

SEQ ID NO: 74583 - RNA, 32 nt, Human
auuuaucuccaacuuccuaaaggcuuaugacu

SEQ ID NO: 74584 - RNA, 32 nt, Human
auuuaucuccaggauguuuuuguggcuguauu

SEQ ID NO: 74585 - RNA, 32 nt, Human
auuuaucugggauguggacaucagugggccag

SEQ ID NO: 74586 - RNA, 32 nt, Human
auuuaucugggcuuugcuguuagcauuagccu

SEQ ID NO: 74587 - RNA, 32 nt, Human
auuuaucugucugucccuuaguuuucucaccu

SEQ ID NO: 74588 - RNA, 32 nt, Human
auuuaucuucccuugucuuccugcuuugcauu

SEQ ID NO: 74589 - RNA, 32 nt, Human
auuuaucuucugcugcugcuuggaguuacauu

SEQ ID NO: 74590 - RNA, 32 nt, Human
auuuaucuugcuggguaaaugagggauaccca

SEQ ID NO: 74591 - RNA, 32 nt, Human
auuuaucuuggggaaaccucagaacuggucua

SEQ ID NO: 74592 - RNA, 32 nt, Human
auuuaugaaacugagcucucuuccauuuuacu

SEQ ID NO: 74593 - RNA, 32 nt, Human
auuuaugaaaucucaaagagaugagccaccuu

SEQ ID NO: 74594 - RNA, 32 nt, Human
auuuaugaaucuugcugccuuuuagcaccagg

SEQ ID NO: 74595 - RNA, 32 nt, Human
auuuaugacaagcuguaucacugccuucguuu

SEQ ID NO: 74596 - RNA, 32 nt, Human
auuuaugacucuguuaagcauaccguuugucu

SEQ ID NO: 74597 - RNA, 32 nt, Human
auuuaugagaauuauaaguaaagcuuucugua

SEQ ID NO: 74598 - RNA, 32 nt, Human
auuuaugcagcuauuuucauacauucccuguu

SEQ ID NO: 74599 - RNA, 32 nt, Human
auuuaugcaucaguguaagacaggaggauggg

SEQ ID NO: 74600 - RNA, 32 nt, Human
auuuaugccugagagauuccuugaaaaugcaa

SEQ ID NO: 74601 - RNA, 32 nt, Human
auuuaugccuuuucagcuuugcaccuggaacu

SEQ ID NO: 74602 - RNA, 32 nt, Human
auuuaugcucuaauaucaacguaacauaaaua

SEQ ID NO: 74603 - RNA, 32 nt, Human
auuuaugcucuuccuccacaucuucauuuggc

SEQ ID NO: 74604 - RNA, 32 nt, Human
auuuaugcuugggaggucgaggcugcagugag

SEQ ID NO: 74605 - RNA, 32 nt, Human
auuuaugcuuugagugaaucaucuguugaggu

SEQ ID NO: 74606 - RNA, 32 nt, Human
auuuauggaaagcacaacauaugcaauuauau

SEQ ID NO: 74607 - RNA, 32 nt, Human
auuuauggaaauagauauuugugcagcucaau

SEQ ID NO: 74608 - RNA, 31 nt, Human
auuuauggacuucucuuuugaaaagacacac

SEQ ID NO: 74609 - RNA, 32 nt, Human
auuuauggagugcuugcuaugugccccucaug

SEQ ID NO: 74610 - RNA, 32 nt, Human
auuuauggaucacacugaucugaauucagaca

SEQ ID NO: 74611 - RNA, 32 nt, Human
auuuaugggacugauagagaacuuuuauuauu

SEQ ID NO: 74612 - RNA, 32 nt, Human
auuuauggggagacagagagaaagaggagaca

SEQ ID NO: 74613 - RNA, 32 nt, Human
auuuaugggguggggugagggguggggauggg

SEQ ID NO: 74614 - RNA, 32 nt, Human
auuuauggguggauuuauccuuuugccuucug

SEQ ID NO: 74615 - RNA, 32 nt, Human
auuuauguacuuugcuuaauguaaucauucau

SEQ ID NO: 74616 - RNA, 32 nt, Human
auuuauguccccaaacuuggaaacaagaacuc

SEQ ID NO: 74617 - RNA, 32 nt, Human
auuuauguucaugggcugaccccacauuggac

SEQ ID NO: 74618 - RNA, 32 nt, Human
auuuauguucauguccuguaaauuuuuaagua

SEQ ID NO: 74619 - RNA, 32 nt, Human
auuuauguugcggaaagguaaccacaaaguua

SEQ ID NO: 74620 - RNA, 31 nt, Human
auuuauuaauccucccugccugugucuauua

SEQ ID NO: 74621 - RNA, 32 nt, Human
auuuauuaauggcugcugucuccaguuucugg

SEQ ID NO: 74622 - RNA, 32 nt, Human
auuuauuacuaugacugcuccccagcccuggc

SEQ ID NO: 74623 - RNA, 32 nt, Human
auuuauuacucagagugccauucuucucauau

SEQ ID NO: 74624 - RNA, 32 nt, Human
auuuauuacuucuucuuuccaggaccugacag

SEQ ID NO: 74625 - RNA, 32 nt, Human
auuuauuagaaaaagaguauuucuccaaaaau

SEQ ID NO: 74626 - RNA, 32 nt, Human
auuuauuagaagacuuuuaaggaggguggaua

SEQ ID NO: 74627 - RNA, 32 nt, Human
auuuauuagauguuuugcuauauaaauuaccg

SEQ ID NO: 74628 - RNA, 32 nt, Human
auuuauuagcugguuggagagcuagaaccugg

SEQ ID NO: 74629 - RNA, 32 nt, Human
auuuauuaugcagccagaguuggcagcaagca

SEQ ID NO: 74630 - RNA, 32 nt, Human
auuuauuauuguaaaucaugugcugccaccag

SEQ ID NO: 74631 - RNA, 32 nt, Human
auuuauucacacuugaauugcauuugugauca

SEQ ID NO: 74632 - RNA, 32 nt, Human
auuuauucagcaccuguuauguaccaggcacu

SEQ ID NO: 74633 - RNA, 32 nt, Human
auuuauucauucugcagcagcuacaaucuaug

SEQ ID NO: 74634 - RNA, 32 nt, Human
auuuauucauucuuuuaauuuauguaaguuuu

SEQ ID NO: 74635 - RNA, 32 nt, Human
auuuauucauuucucuccucugccaaaucuac

SEQ ID NO: 74636 - RNA, 32 nt, Human
auuuauucccacaaaauguuggcauugcuuga

SEQ ID NO: 74637 - RNA, 32 nt, Human
auuuauuccccaaauacuuauuagcugacacc

SEQ ID NO: 74638 - RNA, 32 nt, Human
auuuauucccuucuauucaaggccaguuagga

SEQ ID NO: 74639 - RNA, 32 nt, Human
auuuauuccgcuccgcccccucccucucccuu

SEQ ID NO: 74640 - RNA, 32 nt, Human
auuuauuccuuauuucucuuucaucaaaacaa

SEQ ID NO: 74641 - RNA, 32 nt, Human
auuuauuccuuuccuuucuauccuuuuauauu

SEQ ID NO: 74642 - RNA, 32 nt, Human
auuuauucuccuaugugucauaugaaaggcca

SEQ ID NO: 74643 - RNA, 32 nt, Human
auuuauucuguaaccugacacucaucuggccc

SEQ ID NO: 74644 - RNA, 31 nt, Human
auuuauugacuucucauguucuagagaguag

SEQ ID NO: 74645 - RNA, 32 nt, Human
auuuauugcuaccuucugugaaugcuuagcuc

SEQ ID NO: 74646 - RNA, 32 nt, Human
auuuauugcuaucugaggccacuagugagauu

SEQ ID NO: 74647 - RNA, 32 nt, Human
auuuauugucugagucuuuguucaguccuugc

SEQ ID NO: 74648 - RNA, 32 nt, Human
auuuauugugagaauggcuacacuucuuuagg

SEQ ID NO: 74649 - RNA, 32 nt, Human
auuuauugugcaaaugcugguauuucuuacau

SEQ ID NO: 74650 - RNA, 32 nt, Human
auuuauuguuuauacggaugacugggaggcac

SEQ ID NO: 74651 - RNA, 32 nt, Human
auuuauuucccugacuguugccucacuuccuu

SEQ ID NO: 74652 - RNA, 32 nt, Human
auuuauuucuggaugucccauacaugaaaaau

SEQ ID NO: 74653 - RNA, 32 nt, Human
auuuauuucuguaguugugccagggacagacu

SEQ ID NO: 74654 - RNA, 32 nt, Human
auuuauuucuuuccucaccuguucccugacug

SEQ ID NO: 74655 - RNA, 32 nt, Human
auuuauuugaaaggaaugaggauccugcacuc

SEQ ID NO: 74656 - RNA, 32 nt, Human
auuuauuugggccauccgccacccugccagug

SEQ ID NO: 74657 - RNA, 32 nt, Human
auuuauuugguguuucgggcguggccucugga

SEQ ID NO: 74658 - RNA, 32 nt, Human
auuuauuugguguuugcuugaaugcugguacu

SEQ ID NO: 74659 - RNA, 32 nt, Human
auuuauuuguguugaccuuacuuucuuuaagc

SEQ ID NO: 74660 - RNA, 32 nt, Human
auuuauuuuacuucuguguccuaaggguaauu

SEQ ID NO: 74661 - RNA, 32 nt, Human
auuuauuuucauaaaucuuuuguccuggcuuc

SEQ ID NO: 74662 - RNA, 32 nt, Human
auuuauuuucauuguuggcccacgguuagucc

SEQ ID NO: 74663 - RNA, 32 nt, Human
auuuauuuugagauagagccuugcucugucac

SEQ ID NO: 74664 - RNA, 32 nt, Human
auuuauuuugagauggaguuucacucuuguug

SEQ ID NO: 74665 - RNA, 32 nt, Human
auuuauuuugcuauacaggauguaauagguca

SEQ ID NO: 74666 - RNA, 32 nt, Human
auuuauuuuggauucaaauuguauuuacauau

SEQ ID NO: 74667 - RNA, 32 nt, Human
auuuauuuuuaaacuccuuucagauuauuuua

SEQ ID NO: 74668 - RNA, 32 nt, Human
auuuauuuuuagauaaaggauaugaaaacucu

SEQ ID NO: 74669 - RNA, 32 nt, Human
auuuauuuuuagauggagucuugcuccgucgc

SEQ ID NO: 74670 - RNA, 32 nt, Human
auuuauuuuugucaaaaaucaauguuuugaca

SEQ ID NO: 74671 - RNA, 32 nt, Human
auuucaaaaggauauuuggugcaaagcaauuu

SEQ ID NO: 74672 - RNA, 32 nt, Human
auuucaaaaggcugcugauguaguucccgggu

SEQ ID NO: 74673 - RNA, 32 nt, Human
auuucaaaaucacccaaaacuuuuggcaaaua

SEQ ID NO: 74674 - RNA, 32 nt, Human
auuucaaaaugugcuugacaccugccuuaaau

SEQ ID NO: 74675 - RNA, 32 nt, Human
auuucaaacugaucaccuggggaugagagcaa

SEQ ID NO: 74676 - RNA, 32 nt, Human
auuucaaagacucauguuucugcuaugaccau

SEQ ID NO: 74677 - RNA, 32 nt, Human
auuucaaagagauuuaaaugaauuuguuuuau

SEQ ID NO: 74678 - RNA, 32 nt, Human
auuucaaauaaaccacaaaucaucauuuucca

SEQ ID NO: 74679 - RNA, 32 nt, Human
auuucaaauccugcacucaggccuggugguga

SEQ ID NO: 74680 - RNA, 32 nt, Human
auuucaaaucucuccuccucccccucucuccu

SEQ ID NO: 74681 - RNA, 32 nt, Human
auuucaaaucuuuccaauuuacccuggaauca

SEQ ID NO: 74682 - RNA, 32 nt, Human
auuucaaauucacauuagcuuugcuaccacua

SEQ ID NO: 74683 - RNA, 32 nt, Human
auuucaacacauuuagugccucuuucauuucu

SEQ ID NO: 74684 - RNA, 32 nt, Human
auuucaacacugagggccuggagaccucggcu

SEQ ID NO: 74685 - RNA, 32 nt, Human
auuucaacccaggaggcagacguugcagcgag

SEQ ID NO: 74686 - RNA, 18 nt, Human
auuucaacuagcuucuga

SEQ ID NO: 74687 - RNA, 32 nt, Human
auuucaacuguucuguugaaucaucugccuga

SEQ ID NO: 74688 - RNA, 32 nt, Human
auuucaagaaaaugcauauuuuccaauaauuu

SEQ ID NO: 74689 - RNA, 32 nt, Human
auuucaagaaugacacucuacacaugcuccug

SEQ ID NO: 74690 - RNA, 32 nt, Human
auuucaagauauugguacauuuuauagguauc

SEQ ID NO: 74691 - RNA, 32 nt, Human
auuucaagccacuggggaaacugaggcaaaac

SEQ ID NO: 74692 - RNA, 32 nt, Human
auuucaagcccacagucugucacuuugaagua

SEQ ID NO: 74693 - RNA, 32 nt, Human
auuucaagcgagaacucgucuaugaugacguc

SEQ ID NO: 74694 - RNA, 31 nt, Human
auuucaaggcuaagagagaaagacugccucu

SEQ ID NO: 74695 - RNA, 32 nt, Human
auuucaaggguaggaagauggaagaaauaggg

SEQ ID NO: 74696 - RNA, 32 nt, Human
auuucaaguaaauauaugcacugguagaaaug

SEQ ID NO: 74697 - RNA, 32 nt, Human
auuucaagugauuugggggugcaaugauaaug

SEQ ID NO: 74698 - RNA, 32 nt, Human
auuucaaguuaauuacaaacaguuuuguaacu

SEQ ID NO: 74699 - RNA, 32 nt, Human
auuucaaugacuuuuaagaacaacagcccuuc

SEQ ID NO: 74700 - RNA, 32 nt, Human
auuucaauuggcugagaaggcagagagcuagc

SEQ ID NO: 74701 - RNA, 32 nt, Human
auuucacaaacaucaggcaauuuccaggguug

SEQ ID NO: 74702 - RNA, 32 nt, Human
auuucacaaagggggaaauugaggcacagagg

SEQ ID NO: 74703 - RNA, 24 nt, Human
auuucacaaauaucucuagacuca

SEQ ID NO: 74704 - RNA, 32 nt, Human
auuucacaaaucagaagaacaucagcaaucca

SEQ ID NO: 74705 - RNA, 32 nt, Human
auuucacaacacaaaaaggacauuuguggaug

SEQ ID NO: 74706 - RNA, 32 nt, Human
auuucacaacuaaagcuuugucauagacuuca

SEQ ID NO: 74707 - RNA, 32 nt, Human
auuucacacagcauuuugaaacuggcuacaau

SEQ ID NO: 74708 - RNA, 32 nt, Human
auuucacacagggagaagcugaggcuuaaggu

SEQ ID NO: 74709 - RNA, 32 nt, Human
auuucacacuccuccaccugucucaaacucua

SEQ ID NO: 74710 - RNA, 32 nt, Human
auuucacagcuuucacauagcacagauaacuc

SEQ ID NO: 74711 - RNA, 32 nt, Human
auuucacaggcagagaggugccaucaguucgc

SEQ ID NO: 74712 - RNA, 32 nt, Human
auuucacaggccaggguucaguucugcuccuc

SEQ ID NO: 74713 - RNA, 32 nt, Human
auuucacaggcgauuuugaccaugcuucuaca

SEQ ID NO: 74714 - RNA, 32 nt, Human
auuucacagggugggaguggcccgagcagugg

SEQ ID NO: 74715 - RNA, 32 nt, Human
auuucacagguaaaagucaguaggauggaaca

SEQ ID NO: 74716 - RNA, 32 nt, Human
auuucacagguaguguuucagacucugaaagc

SEQ ID NO: 74717 - RNA, 32 nt, Human
auuucacauaaauauauuuucaauuguguaca

SEQ ID NO: 74718 - RNA, 31 nt, Human
auuucacauacuuuucuuaugucauuagaua

SEQ ID NO: 74719 - RNA, 32 nt, Human
auuucacauuuuauuuggagauauuuaaauga

SEQ ID NO: 74720 - RNA, 32 nt, Human
auuucaccacacgucagcaucuaaucccaaga

SEQ ID NO: 74721 - RNA, 32 nt, Human
auuucaccaccacuccagccugggugagaaag

SEQ ID NO: 74722 - RNA, 32 nt, Human
auuucaccacugcauucuagccugggcaacag

SEQ ID NO: 74723 - RNA, 32 nt, Human
auuucaccagugcacuccagccugggugacag

SEQ ID NO: 74724 - RNA, 20 nt, Human
auuucaccaugaggacacuu

SEQ ID NO: 74725 - RNA, 32 nt, Human
auuucacccacaguucagcuggcuguugauuu

SEQ ID NO: 74726 - RNA, 32 nt, Human
auuucacccuugcauuccagccugugaaauaa

SEQ ID NO: 74727 - RNA, 32 nt, Human
auuucaccgccuggcccugggcuccaggagag

SEQ ID NO: 74728 - RNA, 32 nt, Human
auuucaccggcuccaccaaauuagugccucuu

SEQ ID NO: 74729 - RNA, 32 nt, Human
auuucaccucaaguggagaaucgcugaccuug

SEQ ID NO: 74730 - RNA, 32 nt, Human
auuucaccucacuccagccugggugacagcgu

SEQ ID NO: 74731 - RNA, 32 nt, Human
auuucaccugcucuacuuuugcugcauuaauu

SEQ ID NO: 74732 - RNA, 32 nt, Human
auuucacguuuugaacagcagcaguuugaagg

SEQ ID NO: 74733 - RNA, 32 nt, Human
auuucacucacacuccaguuuguaauaaaaug

SEQ ID NO: 74734 - RNA, 32 nt, Human
auuucacucugccugugggaguccugugaauc

SEQ ID NO: 74735 - RNA, 32 nt, Human
auuucacugauuauaaaauacagauuuuucac

SEQ ID NO: 74736 - RNA, 32 nt, Human
auuucacugcaaucccccguaucauccauggg

SEQ ID NO: 74737 - RNA, 32 nt, Human
auuucacugucaccccucuuuguggacagaag

SEQ ID NO: 74738 - RNA, 32 nt, Human
auuucacuuuauaacuaaccaguccuacauau

SEQ ID NO: 74739 - RNA, 32 nt, Human
auuucacuuuccucuuccaggggcaaaggcug

SEQ ID NO: 74740 - RNA, 32 nt, Human
auuucacuuuuaauuugcugguguuuuaauaa

SEQ ID NO: 74741 - RNA, 32 nt, Human
auuucacuuuugauccuuccagcuccaggguc

SEQ ID NO: 74742 - RNA, 22 nt, Human
auuucagaaauaaaaugaaaug

SEQ ID NO: 74743 - RNA, 32 nt, Human
auuucagaaauccaguaucacagggugauccu

SEQ ID NO: 74744 - RNA, 32 nt, Human
auuucagaacuccuaauuaagcccuggauacu

SEQ ID NO: 74745 - RNA, 22 nt, Human
auuucagaauaggaaguaaaug

SEQ ID NO: 74746 - RNA, 32 nt, Human
auuucagaaucugccuuucagcccuuccuucu

SEQ ID NO: 74747 - RNA, 32 nt, Human
auuucagagaaacugaggcaccagagaugcuu

SEQ ID NO: 74748 - RNA, 32 nt, Human
auuucagagagggagcuggcuggagagaaagg

SEQ ID NO: 74749 - RNA, 32 nt, Human
auuucagaguguuggagaagaaucuguagcuu

SEQ ID NO: 74750 - RNA, 32 nt, Human
auuucagauaaucuaucuacuuaaacauguuu

SEQ ID NO: 74751 - RNA, 24 nt, Human
auuucagauacuuuaagugaauug

SEQ ID NO: 74752 - RNA, 32 nt, Human
auuucagauccaccccacccccagacucaucc

SEQ ID NO: 74753 - RNA, 32 nt, Human
auuucagaugaugacuguccaagugccuccaa

SEQ ID NO: 74754 - RNA, 32 nt, Human
auuucagaugccccugcccucuugucugccac

SEQ ID NO: 74755 - RNA, 23 nt, Human
auuucagcacaaucuuagacuca

SEQ ID NO: 74756 - RNA, 32 nt, Human
auuucagcacauugggucuuucugccacaggc

SEQ ID NO: 74757 - RNA, 32 nt, Human
auuucagcagggccaggcaggaccuggguuuc

SEQ ID NO: 74758 - RNA, 24 nt, Human
auuucagcagugugaagguaaaug

SEQ ID NO: 74759 - RNA, 32 nt, Human
auuucagccacuucuagcagaucaugccaugg

SEQ ID NO: 74760 - RNA, 32 nt, Human
auuucagccagcccuugcgcccuguuugugcc

SEQ ID NO: 74761 - RNA, 32 nt, Human
auuucagccagccuuuaucauuccucuuacuu

SEQ ID NO: 74762 - RNA, 32 nt, Human
auuucagcccaggagguuguggauacagugag

SEQ ID NO: 74763 - RNA, 32 nt, Human
auuucagccguauuaaaagaaaggacacugug

SEQ ID NO: 74764 - RNA, 32 nt, Human
auuucagcucacggcuaccucugccucccggg

SEQ ID NO: 74765 - RNA, 32 nt, Human
auuucagcucacuacaaccuccugcuccuggg

SEQ ID NO: 74766 - RNA, 32 nt, Human
auuucagcucacuacaaccucugccuccgggu

SEQ ID NO: 74767 - RNA, 32 nt, Human
auuucagcucacugaaccucugccucccaggu

SEQ ID NO: 74768 - RNA, 22 nt, Human
auuucagcucacugcaaccucc

SEQ ID NO: 74769 - RNA, 32 nt, Human
auuucagcucacugcaaccuccaccucccagg

SEQ ID NO: 74770 - RNA, 32 nt, Human
auuucagcucacugcaaccucugccucccagg

SEQ ID NO: 74771 - RNA, 32 nt, Human
auuucagcucacugcaaccucugccucccggg

SEQ ID NO: 74772 - RNA, 32 nt, Human
auuucagcucacugcaaccuucgccaccuggg

SEQ ID NO: 74773 - RNA, 32 nt, Human
auuucagcucacugcaaccuucgccucccagc

SEQ ID NO: 74774 - RNA, 32 nt, Human
auuucagcucacugcaaucucugccacccaga

SEQ ID NO: 74775 - RNA, 32 nt, Human
auuucagcuguggaggaguuuuuagccucaag

SEQ ID NO: 74776 - RNA, 32 nt, Human
auuucaggagcaggggugggaggcagguggac

SEQ ID NO: 74777 - RNA, 32 nt, Human
auuucaggcgugagccaccacacccggccaaa

SEQ ID NO: 74778 - RNA, 32 nt, Human
auuucagguauuuaauacgaaauguggaaggg

SEQ ID NO: 74779 - RNA, 32 nt, Human
auuucaggucucaggauguuuagaaagcuaaa

SEQ ID NO: 74780 - RNA, 23 nt, Human
auuucagguguggcuguggaaug

SEQ ID NO: 74781 - RNA, 32 nt, Human
auuucagguucccagcugcagcucucuggguc

SEQ ID NO: 74782 - RNA, 32 nt, Human
auuucaguaaacaaugaauaguuuuucauugu

SEQ ID NO: 74783 - RNA, 32 nt, Human
auuucaguagaaucacuuacucauccuaaaag

SEQ ID NO: 74784 - RNA, 24 nt, Human
auuucagucacaggaaauggggug

SEQ ID NO: 74785 - RNA, 32 nt, Human
auuucagucaucuucagggaccagucugaugu

SEQ ID NO: 74786 - RNA, 32 nt, Human
auuucagugaagauagacuagcaugcuaaacu

SEQ ID NO: 74787 - RNA, 32 nt, Human
auuucagugacaguuucuuuugcaauuuugug

SEQ ID NO: 74788 - RNA, 32 nt, Human
auuucagugauguuuauaccaaucuguauaua

SEQ ID NO: 74789 - RNA, 32 nt, Human
auuucaguucacugcaaccuccaccucccagg

SEQ ID NO: 74790 - RNA, 32 nt, Human
auuucaguucacugcagccucgaccucccagg

SEQ ID NO: 74791 - RNA, 17 nt, Human
auuucauacacccucga

SEQ ID NO: 74792 - RNA, 32 nt, Human
auuucauagauacuucauuuguauuuacagua

SEQ ID NO: 74793 - RNA, 32 nt, Human
auuucauagcacuuuacagugugcaaaugcuu

SEQ ID NO: 74794 - RNA, 32 nt, Human
auuucauaucaacuuuuguauccacaguagac

SEQ ID NO: 74795 - RNA, 32 nt, Human
auuucaucacaagaaaccuacucuucugucau

SEQ ID NO: 74796 - RNA, 32 nt, Human
auuucaucacccagguauuaagcccaauaccc

SEQ ID NO: 74797 - RNA, 32 nt, Human
auuucaucacccagguauuaagcccagugccu

SEQ ID NO: 74798 - RNA, 32 nt, Human
auuucaucaucugccuucugcuuuucaagacc

SEQ ID NO: 74799 - RNA, 32 nt, Human
auuucaucaucuuuaccaaccaguggcuuuuc

SEQ ID NO: 74800 - RNA, 32 nt, Human
auuucauccaugucccuacaaaggacaugaac

SEQ ID NO: 74801 - RNA, 32 nt, Human
auuucauccaugucccuacaaaggauaugaac

SEQ ID NO: 74802 - RNA, 32 nt, Human
auuucaucccuaauuucuuccuccaccaugcc

SEQ ID NO: 74803 - RNA, 32 nt, Human
auuucaucuagcaauucucuuugacuuagucg

SEQ ID NO: 74804 - RNA, 32 nt, Human
auuucaucugcucuccuuccuggagcccagag

SEQ ID NO: 74805 - RNA, 32 nt, Human
auuucaucuuuguccuaacaugagugcuugua

SEQ ID NO: 74806 - RNA, 32 nt, Human
auuucaugaaaugcaaaacaauaggacagcug

SEQ ID NO: 74807 - RNA, 32 nt, Human
auuucaugaagauuuuagaucaagagagcuac

SEQ ID NO: 74808 - RNA, 32 nt, Human
auuucaugagucuaguaguucuuugauuuaua

SEQ ID NO: 74809 - RNA, 32 nt, Human
auuucaugaucuggggcaucaugucgguagcu

SEQ ID NO: 74810 - RNA, 32 nt, Human
auuucaugauugguggaagcucucaagcucca

SEQ ID NO: 74811 - RNA, 32 nt, Human
auuucaugcccugugcuguuacagaggagaac

SEQ ID NO: 74812 - RNA, 32 nt, Human
auuucaugcuccacuauaauuuuccuggaaac

SEQ ID NO: 74813 - RNA, 32 nt, Human
auuucaugcuuauuuuuccuuuaucagagaga

SEQ ID NO: 74814 - RNA, 32 nt, Human
auuucauggaaccuggaggcugggcuucaggc

SEQ ID NO: 74815 - RNA, 32 nt, Human
auuucaugucuuucagcagguggaccuugugu

SEQ ID NO: 74816 - RNA, 26 nt, Human
auuucauguggggaacccucaaggcc

SEQ ID NO: 74817 - RNA, 32 nt, Human
auuucauuaccuccuacuugccauucacccau

SEQ ID NO: 74818 - RNA, 32 nt, Human
auuucauucagaaccauuuuaguguuuuccua

SEQ ID NO: 74819 - RNA, 32 nt, Human
auuucauuccaaaggaaauaccagcuugucca

SEQ ID NO: 74820 - RNA, 32 nt, Human
auuucauucucuuccugauuguugcaccccua

SEQ ID NO: 74821 - RNA, 32 nt, Human
auuucauuuacuacugaauuuuauugcuaagu

SEQ ID NO: 74822 - RNA, 32 nt, Human
auuucauuucccuccucucucccaggguaccu

SEQ ID NO: 74823 - RNA, 19 nt, Human
auuucauuuuucacuauuu

SEQ ID NO: 74824 - RNA, 32 nt, Human
auuuccaaacgugcucucagacaguggauaau

SEQ ID NO: 74825 - RNA, 32 nt, Human
auuuccaaagacuugggggagugaaggcagag

SEQ ID NO: 74826 - RNA, 32 nt, Human
auuuccaaaggaagaagcuaagagugagaaaa

SEQ ID NO: 74827 - RNA, 32 nt, Human
auuuccaaaggcugcuggccccaggcacacuc

SEQ ID NO: 74828 - RNA, 32 nt, Human
auuuccaagaggagagaaaaaguggagucaug

SEQ ID NO: 74829 - RNA, 32 nt, Human
auuuccacaaccucuaaccacauucaguccag

SEQ ID NO: 74830 - RNA, 32 nt, Human
auuuccacaagaaaauuaauucauuccaauau

SEQ ID NO: 74831 - RNA, 32 nt, Human
auuuccacagaauucacaggagcaugguuccu

SEQ ID NO: 74832 - RNA, 32 nt, Human
auuuccacagcaccugcuaaguuuguauuuaa

SEQ ID NO: 74833 - RNA, 32 nt, Human
auuuccacagccguacaugugaucccagugac

SEQ ID NO: 74834 - RNA, 32 nt, Human
auuuccacaguggcugaacuaauuuacauucc

SEQ ID NO: 74835 - RNA, 32 nt, Human
auuuccaccaugggcauucaggcucuccacac

SEQ ID NO: 74836 - RNA, 32 nt, Human
auuuccacccagccccaggauuuccagagcgc

SEQ ID NO: 74837 - RNA, 32 nt, Human
auuuccaccugggaauuucuggugccaugcca

SEQ ID NO: 74838 - RNA, 32 nt, Human
auuuccacucaacaucaagauaagcugcucua

SEQ ID NO: 74839 - RNA, 32 nt, Human
auuuccacucuucugugagccuggugacaaua

SEQ ID NO: 74840 - RNA, 32 nt, Human
auuuccacuguuggacgaauucugagcgccca

SEQ ID NO: 74841 - RNA, 32 nt, Human
auuuccacuucuggguggaauaccaaaauaau

SEQ ID NO: 74842 - RNA, 32 nt, Human
auuuccacuuuaugcagaauuaauacucaauu

SEQ ID NO: 74843 - RNA, 32 nt, Human
auuuccagagacccagcuacaguucccuggcu

SEQ ID NO: 74844 - RNA, 21 nt, Human
auuuccagagccagggucagg

SEQ ID NO: 74845 - RNA, 32 nt, Human
auuuccagcagcccucauccucagccuugcgg

SEQ ID NO: 74846 - RNA, 32 nt, Human
auuuccagccugaacagauguugaguacaagc

SEQ ID NO: 74847 - RNA, 32 nt, Human
auuuccagccuuggacggacagcugggaacgu

SEQ ID NO: 74848 - RNA, 32 nt, Human
auuuccagcugcugccagccuuccugcaguau

SEQ ID NO: 74849 - RNA, 32 nt, Human
auuuccagguuagaaccuguggauuguuucaa

SEQ ID NO: 74850 - RNA, 32 nt, Human
auuuccagucaauucagaagcauuuuaccagu

SEQ ID NO: 74851 - RNA, 32 nt, Human
auuuccagucucugcugagugucccagacccu

SEQ ID NO: 74852 - RNA, 32 nt, Human
auuuccagugcacacauuucaucaccaggugg

SEQ ID NO: 74853 - RNA, 25 nt, Human
auuuccagugucccaacuacuguca

SEQ ID NO: 74854 - RNA, 32 nt, Human
auuuccaguucuguagaguuuauugucaauug

SEQ ID NO: 74855 - RNA, 32 nt, Human
auuuccauaaaauaaacaaagcacuuaaauca

SEQ ID NO: 74856 - RNA, 32 nt, Human
auuuccauagcuuuuggcugggggcgggggac

SEQ ID NO: 74857 - RNA, 32 nt, Human
auuuccaucagcaguaaacaaagacauuccug

SEQ ID NO: 74858 - RNA, 32 nt, Human
auuuccauccaauauuuaaagacuugaauuuu

SEQ ID NO: 74859 - RNA, 32 nt, Human
auuuccauccauaggaaaauggauagacaaac

SEQ ID NO: 74860 - RNA, 32 nt, Human
auuuccaugucucugcuuagcugugcuggcag

SEQ ID NO: 74861 - RNA, 32 nt, Human
auuuccauuucaggugguuuucuaagugcucc

SEQ ID NO: 74862 - RNA, 20 nt, Human
auuucccaaaaguaugcucc

SEQ ID NO: 74863 - RNA, 32 nt, Human
auuucccaaaauucuaagagcagcagcauaug

SEQ ID NO: 74864 - RNA, 22 nt, Human
auuucccaaacacuccgcucca

SEQ ID NO: 74865 - RNA, 32 nt, Human
auuucccaaacaguccacaggucccaugccca

SEQ ID NO: 74866 - RNA, 24 nt, Human
auuucccaaaguccucugcuccag

SEQ ID NO: 74867 - RNA, 21 nt, Human
auuucccaagaagcacuucag

SEQ ID NO: 74868 - RNA, 32 nt, Human
auuucccaagaagcacuucaguuuaucagucu

SEQ ID NO: 74869 - RNA, 21 nt, Human
auuucccaagagaagagccag

SEQ ID NO: 74870 - RNA, 20 nt, Human
auuucccaccccugcuccag

SEQ ID NO: 74871 - RNA, 32 nt, Human
auuucccaccccugcuccagccucgauuuggu

SEQ ID NO: 74872 - RNA, 32 nt, Human
auuucccacugcacuccagccugagugacaga

SEQ ID NO: 74873 - RNA, 32 nt, Human
auuucccagaggacuagcaggaggcagccuug

SEQ ID NO: 74874 - RNA, 32 nt, Human
auuucccagaggagggacuaaaagagagggca

SEQ ID NO: 74875 - RNA, 32 nt, Human
auuucccaggagaaggauaauugggucaaaag

SEQ ID NO: 74876 - RNA, 32 nt, Human
auuucccaggagagggauaauugggucaaaag

SEQ ID NO: 74877 - RNA, 32 nt, Human
auuucccaggagcugggcagugguaaaauuaa

SEQ ID NO: 74878 - RNA, 21 nt, Human
auuucccagggacuccagggu

SEQ ID NO: 74879 - RNA, 32 nt, Human
auuucccauaggaagagaucugccagacgcga

SEQ ID NO: 74880 - RNA, 32 nt, Human
auuucccauauuucaggugaauaauuuaauuu

SEQ ID NO: 74881 - RNA, 32 nt, Human
auuucccaucccccaucuccucaaccaccagg

SEQ ID NO: 74882 - RNA, 32 nt, Human
auuuccccaacccagcuccaucaucacagaca

SEQ ID NO: 74883 - RNA, 32 nt, Human
auuuccccagaaccugcgccgcgcgagaagga

SEQ ID NO: 74884 - RNA, 32 nt, Human
auuuccccagcgucgauugagcucucggcccu

SEQ ID NO: 74885 - RNA, 32 nt, Human
auuuccccaggccuuguuaaaacaaagaaagc

SEQ ID NO: 74886 - RNA, 32 nt, Human
auuucccccaaucccugcugggcugcugaauc

SEQ ID NO: 74887 - RNA, 32 nt, Human
auuucccccauccuccuuccucucccacagcu

SEQ ID NO: 74888 - RNA, 32 nt, Human
auuucccccauguugucuuucccuuggcugau

SEQ ID NO: 74889 - RNA, 32 nt, Human
auuucccccuacucccucccucuccugcaccc

SEQ ID NO: 74890 - RNA, 32 nt, Human
auuucccccucucauaacuucuccccauccca

SEQ ID NO: 74891 - RNA, 32 nt, Human
auuucccccugcugcuggcccagcacaauugu

SEQ ID NO: 74892 - RNA, 32 nt, Human
auuucccccuuuaguuuccaaccuucucccca

SEQ ID NO: 74893 - RNA, 32 nt, Human
auuuccccucauucuaccucucuaaggcuaug

SEQ ID NO: 74894 - RNA, 32 nt, Human
auuuccccugguuugucucauucuucuugguu

SEQ ID NO: 74895 - RNA, 32 nt, Human
auuucccgccuccauuugauguuuccagguuu

SEQ ID NO: 74896 - RNA, 32 nt, Human
auuucccggggugggaacgccgggaggcggga

SEQ ID NO: 74897 - RNA, 32 nt, Human
auuucccuaauagagaccuaaccagagggcca

SEQ ID NO: 74898 - RNA, 32 nt, Human
auuucccuagccucuuccuuuuucauuagccc

SEQ ID NO: 74899 - RNA, 32 nt, Human
auuucccucacacacuaccaugaugaccaguc

SEQ ID NO: 74900 - RNA, 32 nt, Human
auuucccucagguucuauuuucuuaaaccaac

SEQ ID NO: 74901 - RNA, 32 nt, Human
auuucccucccucccucugguuguucuguuga

SEQ ID NO: 74902 - RNA, 32 nt, Human
auuucccucgcucuccccucccugcuuggccc

SEQ ID NO: 74903 - RNA, 32 nt, Human
auuucccucuacugccucuuccugccucuccc

SEQ ID NO: 74904 - RNA, 32 nt, Human
auuucccugauccccaggcuuggggcaauugg

SEQ ID NO: 74905 - RNA, 32 nt, Human
auuucccugcagaugguacagauguuccugcc

SEQ ID NO: 74906 - RNA, 32 nt, Human
auuucccugccugcucuuuaggccuuuggcac

SEQ ID NO: 74907 - RNA, 32 nt, Human
auuucccuggaugguuucuugccugcacugcu

SEQ ID NO: 74908 - RNA, 32 nt, Human
auuucccuucauuucucugcuugccacccuug

SEQ ID NO: 74909 - RNA, 32 nt, Human
auuucccuuuuucaauuuacauagaagcauag

SEQ ID NO: 74910 - RNA, 32 nt, Human
auuuccgagaaagcuucagacaugcuuauaag

SEQ ID NO: 74911 - RNA, 32 nt, Human
auuuccgccacccugaauuuaguagagcuagu

SEQ ID NO: 74912 - RNA, 32 nt, Human
auuuccgcucacugcaaccuccgccucccagg

SEQ ID NO: 74913 - RNA, 32 nt, Human
auuuccguagggcuucccagcaugggggauuu

SEQ ID NO: 74914 - RNA, 32 nt, Human
auuuccguaguaguagagauaauaugagaaau

SEQ ID NO: 74915 - RNA, 32 nt, Human
auuuccuaacaacagagagauucucuuauguc

SEQ ID NO: 74916 - RNA, 32 nt, Human
auuuccuaagcuacauauggccaucuugacag

SEQ ID NO: 74917 - RNA, 32 nt, Human
auuuccuaauaacaaaacuuucuguguucuua

SEQ ID NO: 74918 - RNA, 32 nt, Human
auuuccuaaucgcccucaccucuggcuucagg

SEQ ID NO: 74919 - RNA, 32 nt, Human
auuuccuaccuaagcaucucccgagaaaaaua

SEQ ID NO: 74920 - RNA, 32 nt, Human
auuuccuaguacuagagugagccccgacuuag

SEQ ID NO: 74921 - RNA, 32 nt, Human
auuuccuauccagcagaaccugcagcaagcuc

SEQ ID NO: 74922 - RNA, 28 nt, Human
auuuccuauggcuauuaauucuuagggu

SEQ ID NO: 74923 - RNA, 32 nt, Human
auuuccuauguugaaacccaaucccuaguaug

SEQ ID NO: 74924 - RNA, 32 nt, Human
auuuccucaaaaagauuuccccauuuagguuu

SEQ ID NO: 74925 - RNA, 32 nt, Human
auuuccucagucuuuucuuuuguacuccuauc

SEQ ID NO: 74926 - RNA, 32 nt, Human
auuuccucaucugcccacaccuuccggugggc

SEQ ID NO: 74927 - RNA, 32 nt, Human
auuuccucauguugcugaccaggugcccauau

SEQ ID NO: 74928 - RNA, 32 nt, Human
auuuccucauuucaguuccuucugcagccugu

SEQ ID NO: 74929 - RNA, 32 nt, Human
auuuccucauuuuuauaaugucccuucacaaa

SEQ ID NO: 74930 - RNA, 32 nt, Human
auuuccucuccuccuguagccauacuuugauu

SEQ ID NO: 74931 - RNA, 32 nt, Human
auuuccucuggcccauauuugaauuuauugga

SEQ ID NO: 74932 - RNA, 32 nt, Human
auuuccucuguucaauaaauacugaaggucac

SEQ ID NO: 74933 - RNA, 32 nt, Human
auuuccucuuagcucaaauaauucuguuuuuc

SEQ ID NO: 74934 - RNA, 32 nt, Human
auuuccucuucgcucuauuuuagcaguuggau

SEQ ID NO: 74935 - RNA, 32 nt, Human
auuuccugauuccuggaacucagucccaggau

SEQ ID NO: 74936 - RNA, 32 nt, Human
auuuccugccaagaaggugaacgcuggagacc

SEQ ID NO: 74937 - RNA, 20 nt, Human
auuuccugccccuuucaggg

SEQ ID NO: 74938 - RNA, 32 nt, Human
auuuccugcugucccucagccuccaggcuuca

SEQ ID NO: 74939 - RNA, 32 nt, Human
auuuccuggcaaucacggguaaggaggauuag

SEQ ID NO: 74940 - RNA, 32 nt, Human
auuuccuggucacaucauuaacugcuaauucu

SEQ ID NO: 74941 - RNA, 32 nt, Human
auuuccuguccuuuuaaauugcccacccuuua

SEQ ID NO: 74942 - RNA, 32 nt, Human
auuuccugugaaccucgucuggaguugaagag

SEQ ID NO: 74943 - RNA, 32 nt, Human
auuuccuguucucccagcuccagguccaccuc

SEQ ID NO: 74944 - RNA, 32 nt, Human
auuuccuuaccucuagccagucacuuccuuuu

SEQ ID NO: 74945 - RNA, 32 nt, Human
auuuccuucucccuuucccugcccacccuguc

SEQ ID NO: 74946 - RNA, 32 nt, Human
auuuccuugggauagagguuguguuggggaau

SEQ ID NO: 74947 - RNA, 32 nt, Human
auuuccuuguccccucuuccccaaaaccucug

SEQ ID NO: 74948 - RNA, 32 nt, Human
auuuccuuucuagccccugcaucuccaacaag

SEQ ID NO: 74949 - RNA, 32 nt, Human
auuuccuuucuuuuuaagaacaggguugggac

SEQ ID NO: 74950 - RNA, 32 nt, Human
auuuccuuuuaagcugcccuguugauucuacu

SEQ ID NO: 74951 - RNA, 32 nt, Human
auuuccuuuucccaccucuccccugaccccca

SEQ ID NO: 74952 - RNA, 32 nt, Human
auuucgaagaggagguggcaaagugggagaaa

SEQ ID NO: 74953 - RNA, 32 nt, Human
auuucgacucacugcaaccucugccucccagg

SEQ ID NO: 74954 - RNA, 32 nt, Human
auuucgagaaaguugugcuggugaggauggag

SEQ ID NO: 74955 - RNA, 32 nt, Human
auuucgagggcagaacucugggaaggaaagaa

SEQ ID NO: 74956 - RNA, 32 nt, Human
auuucgauggccagcauuacccuuuaccugug

SEQ ID NO: 74957 - RNA, 32 nt, Human
auuucgcaacuggcuccucaaugacauaccau

SEQ ID NO: 74958 - RNA, 32 nt, Human
auuucgcuccaauguaaauucucugauguuga

SEQ ID NO: 74959 - RNA, 32 nt, Human
auuucgcucugucacccagacuggagugcaau

SEQ ID NO: 74960 - RNA, 32 nt, Human
auuucggacccugcaacuccuauuauaucgcc

SEQ ID NO: 74961 - RNA, 32 nt, Human
auuucggagcacggaagcacacacaagcucuu

SEQ ID NO: 74962 - RNA, 32 nt, Human
auuucggaggagagaagaaagugcaacguggg

SEQ ID NO: 74963 - RNA, 22 nt, Human
auuucggcucacugcaaccucc

SEQ ID NO: 74964 - RNA, 32 nt, Human
auuucggcucacugcaaccuccaccuccuggg

SEQ ID NO: 74965 - RNA, 32 nt, Human
auuucggcucacugcaaccuccuccucccaga

SEQ ID NO: 74966 - RNA, 32 nt, Human
auuucggcucacugcaaccucugccucccaag

SEQ ID NO: 74967 - RNA, 32 nt, Human
auuucggcucacugcaaccucugucuccuggg

SEQ ID NO: 74968 - RNA, 32 nt, Human
auuucggcucacugcaacuucugccucccggg

SEQ ID NO: 74969 - RNA, 24 nt, Human
auuucggcucacuucaaacuccgc

SEQ ID NO: 74970 - RNA, 32 nt, Human
auuucguacaaaccugaaaaacacacugauuu

SEQ ID NO: 74971 - RNA, 32 nt, Human
auuucguacaauauuauuguuuuacuuuucag

SEQ ID NO: 74972 - RNA, 32 nt, Human
auuucguacagcacaguggcuuauaaggaacc

SEQ ID NO: 74973 - RNA, 32 nt, Human
auuucguccucuuccguucuucaccccuacac

SEQ ID NO: 74974 - RNA, 32 nt, Human
auuucgucguuaugguaaguggagauuauucc

SEQ ID NO: 74975 - RNA, 32 nt, Human
auuucgugcuggaguggagcagccucuagaac

SEQ ID NO: 74976 - RNA, 32 nt, Human
auuucgugcuucaccuccauuuacuuacaagc

SEQ ID NO: 74977 - RNA, 32 nt, Human
auuucuaaaauggcagcuucaguucuagagaa

SEQ ID NO: 74978 - RNA, 32 nt, Human
auuucuaaagaauguguucuaaaacagcagaa

SEQ ID NO: 74979 - RNA, 32 nt, Human
auuucuaaagcagcagcaauaguguucuuuua

SEQ ID NO: 74980 - RNA, 32 nt, Human
auuucuaagagugguugagggaagggaguagg

SEQ ID NO: 74981 - RNA, 32 nt, Human
auuucuaagcaagauaggaagggagcacuuuc

SEQ ID NO: 74982 - RNA, 32 nt, Human
auuucuaagcaguugaaugacacagucagauu

SEQ ID NO: 74983 - RNA, 32 nt, Human
auuucuacaaaaugcaaaaauuagcugggcau

SEQ ID NO: 74984 - RNA, 32 nt, Human
auuucuacacguugcccaucaucccuucuucc

SEQ ID NO: 74985 - RNA, 32 nt, Human
auuucuacaguaaacacucaaaaccaagcaaa

SEQ ID NO: 74986 - RNA, 32 nt, Human
auuucuacagucuuuuagaugaugccaacucc

SEQ ID NO: 74987 - RNA, 32 nt, Human
auuucuaccaacaacauccaacuuccaacaaa

SEQ ID NO: 74988 - RNA, 32 nt, Human
auuucuaccucuuuccuggcaauugaaaugaa

SEQ ID NO: 74989 - RNA, 32 nt, Human
auuucuaccucuuuccuggcaauugaaaugga

SEQ ID NO: 74990 - RNA, 32 nt, Human
auuucuaccugaaggccagaagugugccugaa

SEQ ID NO: 74991 - RNA, 32 nt, Human
auuucuacucacaauuugaucaucacacacac

SEQ ID NO: 74992 - RNA, 32 nt, Human
auuucuacugcuuuucuuucugcuucaaacac

SEQ ID NO: 74993 - RNA, 32 nt, Human
auuucuagaaugcugaaaagcuuuccugaccc

SEQ ID NO: 74994 - RNA, 32 nt, Human
auuucuagcaaguuuccaggugaugcuguugu

SEQ ID NO: 74995 - RNA, 32 nt, Human
auuucuagcaugggggcuguguuuguaugaga

SEQ ID NO: 74996 - RNA, 32 nt, Human
auuucuaggcucugaaauagccacuuuaagaa

SEQ ID NO: 74997 - RNA, 32 nt, Human
auuucuaguagagaugggguuucuccauggug

SEQ ID NO: 74998 - RNA, 32 nt, Human
auuucuaguagagaugggguuucuccauguug

SEQ ID NO: 74999 - RNA, 32 nt, Human
auuucuaguagaguuagaguuucuccauauug

SEQ ID NO: 75000 - RNA, 32 nt, Human
auuucuagugucacccucccucuccuucaugg

SEQ ID NO: 75001 - RNA, 32 nt, Human
auuucuaucucuucccgaaagagaggguaugu

SEQ ID NO: 75002 - RNA, 32 nt, Human
auuucuaugcagcccccgacccagagccgagc

SEQ ID NO: 75003 - RNA, 22 nt, Human
auuucuauggcuuucaaagcua

SEQ ID NO: 75004 - RNA, 32 nt, Human
auuucuauuaccugcagauaguaagaaggaug

SEQ ID NO: 75005 - RNA, 32 nt, Human
auuucuauuaugcaguuuguugaccauggcua

SEQ ID NO: 75006 - RNA, 32 nt, Human
auuucucaagaaggaagacuccccugccuccc

SEQ ID NO: 75007 - RNA, 32 nt, Human
auuucucaaugggcuggaaggaaggagagaaa

SEQ ID NO: 75008 - RNA, 32 nt, Human
auuucucacuccugcccuucuuccacagcgua

SEQ ID NO: 75009 - RNA, 32 nt, Human
auuucucagcacaccaugccaucuguuuauca

SEQ ID NO: 75010 - RNA, 32 nt, Human
auuucucaggagaccagaacugaucugccagc

SEQ ID NO: 75011 - RNA, 21 nt, Human
auuucucagucuguuuccuca

SEQ ID NO: 75012 - RNA, 32 nt, Human
auuucucagugaauuucaauguaucugccucu

SEQ ID NO: 75013 - RNA, 32 nt, Human
auuucucaguggcuucuccauccucauuugca

SEQ ID NO: 75014 - RNA, 32 nt, Human
auuucucaucagaacaaagcacgagauggaau

SEQ ID NO: 75015 - RNA, 32 nt, Human
auuucucaugccauuagcucucuacaaaauaa

SEQ ID NO: 75016 - RNA, 32 nt, Human
auuucucauuuaagggcagaauggagggauga

SEQ ID NO: 75017 - RNA, 32 nt, Human
auuucuccaagaggagaguggggaagguuccc

SEQ ID NO: 75018 - RNA, 32 nt, Human
auuucuccaccugugucaacacuuguuauuuu

SEQ ID NO: 75019 - RNA, 32 nt, Human
auuucuccacuugccaguuuaauuccagccuu

SEQ ID NO: 75020 - RNA, 32 nt, Human
auuucucccaaccaaauccucuuaaagacccu

SEQ ID NO: 75021 - RNA, 32 nt, Human
auuucucccaaugcuaaugaacagcucauaag

SEQ ID NO: 75022 - RNA, 32 nt, Human
auuucucccagagggagcugcuggcccgcucu

SEQ ID NO: 75023 - RNA, 32 nt, Human
auuucucccugccugcuuugugccaacuagca

SEQ ID NO: 75024 - RNA, 32 nt, Human
auuucuccuacuuuucuuuucuacuguugucu

SEQ ID NO: 75025 - RNA, 32 nt, Human
auuucuccuccuaaucugggccucuugucaug

SEQ ID NO: 75026 - RNA, 32 nt, Human
auuucuccuccuccugugcccucuucgccccc

SEQ ID NO: 75027 - RNA, 32 nt, Human
auuucuccuggcuguuguccagggcucuccuc

SEQ ID NO: 75028 - RNA, 32 nt, Human
auuucuccugucucagcuucucaaagugcugg

SEQ ID NO: 75029 - RNA, 32 nt, Human
auuucuccuuugaggcagagguuuaaguguag

SEQ ID NO: 75030 - RNA, 32 nt, Human
auuucuccuuuggaggaggaggaggaggagga

SEQ ID NO: 75031 - RNA, 23 nt, Human
auuucucggacacuucucagugu

SEQ ID NO: 75032 - RNA, 32 nt, Human
auuucucguuugccuuucuauuuccuuccaaa

SEQ ID NO: 75033 - RNA, 32 nt, Human
auuucucuacauccucuccagcaucuguuguu

SEQ ID NO: 75034 - RNA, 18 nt, Human
auuucucuacguuuucuc

SEQ ID NO: 75035 - RNA, 32 nt, Human
caaagguucucaaauucccugaaaauaugcaa

SEQ ID NO: 75036 - RNA, 19 nt, Human
caaagguugccugcaaagg

SEQ ID NO: 75037 - RNA, 32 nt, Human
caaagguuucucugcaacccuucccuaagcau

SEQ ID NO: 75038 - RNA, 32 nt, Human
caaaguaaaagcuuucuuggagccuuucucuu

SEQ ID NO: 75039 - RNA, 32 nt, Human
caaaguaagccucaccuuugccuuccaacugc

SEQ ID NO: 75040 - RNA, 32 nt, Human
caaaguacguccucccuccuugcugccucuuc

SEQ ID NO: 75041 - RNA, 23 nt, Human
caaaguacugggacuacaggcgu

SEQ ID NO: 75042 - RNA, 23 nt, Human
caaaguacugggauuacaaacau

SEQ ID NO: 75043 - RNA, 21 nt, Human
caaaguacugggauuacaggc

SEQ ID NO: 75044 - RNA, 23 nt, Human
caaaguacugggauuacaggcau

SEQ ID NO: 75045 - RNA, 23 nt, Human
caaaguacugggauuacaggcgu

SEQ ID NO: 75046 - RNA, 32 nt, Human
caaaguagcaagaaaaauacgacauuggugua

SEQ ID NO: 75047 - RNA, 32 nt, Human
caaaguagcuagcuaaaggaguagccuuaaau

SEQ ID NO: 75048 - RNA, 23 nt, Human
caaaguagcugggauuacaggca

SEQ ID NO: 75049 - RNA, 24 nt, Human
caaaguagcugggauuacaggcau

SEQ ID NO: 75050 - RNA, 32 nt, Human
caaaguaggaagggagagccauuugaaaggca

SEQ ID NO: 75051 - RNA, 32 nt, Human
caaaguaggagaagaaauggggaggacucggg

SEQ ID NO: 75052 - RNA, 32 nt, Human
caaaguaggagacagauaacagguacauccau

SEQ ID NO: 75053 - RNA, 32 nt, Human
caaaguaggagagaggcccagaggaaagccca

SEQ ID NO: 75054 - RNA, 21 nt, Human
caaaguagggagggcauccaa

SEQ ID NO: 75055 - RNA, 32 nt, Human
caaaguauaaaggaauuggaccaaauaauuua

SEQ ID NO: 75056 - RNA, 32 nt, Human
caaaguaugguugagaaauuguggcagaaaga

SEQ ID NO: 75057 - RNA, 23 nt, Human
caaaguauugggacuacaggcgu

SEQ ID NO: 75058 - RNA, 32 nt, Human
caaagucaacaaaaacaagugauggggaaagg

SEQ ID NO: 75059 - RNA, 23 nt, Human
caaagucagauccccaucucuac

SEQ ID NO: 75060 - RNA, 32 nt, Human
caaagucagcaacucuccuguugguucauuau

SEQ ID NO: 75061 - RNA, 32 nt, Human
caaagucaggaguucaagaccagccgggccag

SEQ ID NO: 75062 - RNA, 32 nt, Human
caaagucaggaguucaagaccagccuggccaa

SEQ ID NO: 75063 - RNA, 32 nt, Human
caaagucauagagagaauauggcauuugaaag

SEQ ID NO: 75064 - RNA, 32 nt, Human
caaagucaucccucuguucacagagauggaug

SEQ ID NO: 75065 - RNA, 32 nt, Human
caaagucauggacugaagccugaggccaucug

SEQ ID NO: 75066 - RNA, 32 nt, Human
caaagucaugucugcuuccucugccuccagcu

SEQ ID NO: 75067 - RNA, 20 nt, Human
caaagucauguguccacaca

SEQ ID NO: 75068 - RNA, 32 nt, Human
caaagucauguuuaaacuuggaaaagaggaug

SEQ ID NO: 75069 - RNA, 32 nt, Human
caaaguccagcuccccagaacacugcucgaca

SEQ ID NO: 75070 - RNA, 32 nt, Human
caaaguccggggauggcggcagagggggacca

SEQ ID NO: 75071 - RNA, 32 nt, Human
caaaguccuaucucaugccaaaggacagugag

SEQ ID NO: 75072 - RNA, 21 nt, Human
caaaguccugggauuacaggc

SEQ ID NO: 75073 - RNA, 32 nt, Human
caaaguccuuggaucauagaacugagugcuga

SEQ ID NO: 75074 - RNA, 32 nt, Human
caaaguccuuucucacacuccacugcccaaua

SEQ ID NO: 75075 - RNA, 32 nt, Human
caaaguccuuucucuccuggccccuuuucacg

SEQ ID NO: 75076 - RNA, 32 nt, Human
caaagucgggagaucaagaccauccuggcuaa

SEQ ID NO: 75077 - RNA, 32 nt, Human
caaagucuaaaaugguggggcaguagggaccu

SEQ ID NO: 75078 - RNA, 32 nt, Human
caaagucuaugaaggaucuucugcaagaggcu

SEQ ID NO: 75079 - RNA, 32 nt, Human
caaagucucaacaaccaucuuccgcuugacga

SEQ ID NO: 75080 - RNA, 32 nt, Human
caaagucucagucaguuccugaggcagaagag

SEQ ID NO: 75081 - RNA, 32 nt, Human
caaagucucauagcuuuggaggagccaucugc

SEQ ID NO: 75082 - RNA, 32 nt, Human
caaagucucuuuaaaagaagcuagggcauuuc

SEQ ID NO: 75083 - RNA, 32 nt, Human
caaagucugaggcuuuuuccaucaguaaucag

SEQ ID NO: 75084 - RNA, 32 nt, Human
caaagucugcaaccuugauguucaggucaagu

SEQ ID NO: 75085 - RNA, 32 nt, Human
caaagucuuuuuccuucucuccuuccuaugcu

SEQ ID NO: 75086 - RNA, 32 nt, Human
caaagugaaagccagccacuggagucgcagcc

SEQ ID NO: 75087 - RNA, 31 nt, Human
caaagugaagagagagauaggaagcugccuc

SEQ ID NO: 75088 - RNA, 32 nt, Human
caaagugaaugugguuuguauccauuuaugca

SEQ ID NO: 75089 - RNA, 23 nt, Human
caaagugagacccccaucucuac

SEQ ID NO: 75090 - RNA, 22 nt, Human
caaagugagacuccaucucuau

SEQ ID NO: 75091 - RNA, 25 nt, Human
caaagugagagccugucucuacaaa

SEQ ID NO: 75092 - RNA, 25 nt, Human
caaagugauacccugucucuacaaa

SEQ ID NO: 75093 - RNA, 32 nt, Human
caaagugauccuccaacgucagccucucgagu

SEQ ID NO: 75094 - RNA, 32 nt, Human
caaagugauggacaggaaggggcagagugagu

SEQ ID NO: 75095 - RNA, 23 nt, Human
caaagugaugggauuacaggcau

SEQ ID NO: 75096 - RNA, 22 nt, Human
caaagugcagggauuacaggca

SEQ ID NO: 75097 - RNA, 23 nt, Human
caaagugcagggauuacaggcau

SEQ ID NO: 75098 - RNA, 19 nt, Human
caaagugccagcagauuca

SEQ ID NO: 75099 - RNA, 23 nt, Human
caaagugccaggauuacaggcau

SEQ ID NO: 75100 - RNA, 32 nt, Human
caaagugccaggauuacaggcaugagccacug

SEQ ID NO: 75101 - RNA, 23 nt, Human
caaagugccgggaugacaggcau

SEQ ID NO: 75102 - RNA, 23 nt, Human
caaagugccgggauuacaggcau

SEQ ID NO: 75103 - RNA, 23 nt, Human
caaagugccgggauuacaggcgu

SEQ ID NO: 75104 - RNA, 32 nt, Human
caaagugcggaguguggagcuggaccagcugc

SEQ ID NO: 75105 - RNA, 22 nt, Human
caaagugcgggauuacaagcgu

SEQ ID NO: 75106 - RNA, 23 nt, Human
caaagugcuaggauuacagacau

SEQ ID NO: 75107 - RNA, 20 nt, Human
caaagugcuaggauuacagg

SEQ ID NO: 75108 - RNA, 21 nt, Human
caaagugcuaggauuacaggc

SEQ ID NO: 75109 - RNA, 22 nt, Human
caaagugcuaggauuacaggca

SEQ ID NO: 75110 - RNA, 23 nt, Human
caaagugcuaggauuacaggcau

SEQ ID NO: 75111 - RNA, 23 nt, Human
caaagugcuaggauuacaggcgu

SEQ ID NO: 75112 - RNA, 23 nt, Human
caaagugcuaggauuacagguau

SEQ ID NO: 75113 - RNA, 23 nt, Human
caaagugcuaggauuauaggcau

SEQ ID NO: 75114 - RNA, 23 nt, Human
caaagugcuaggguuacagacau

SEQ ID NO: 75115 - RNA, 23 nt, Human
caaagugcuaggguuacaggcau

SEQ ID NO: 75116 - RNA, 23 nt, Human
caaagugcuagguuuacaggcau

SEQ ID NO: 75117 - RNA, 24 nt, Human
caaagugcucaggauuacaggcgu

SEQ ID NO: 75118 - RNA, 32 nt, Human
caaagugcucccuucccagaggaggggcccca

SEQ ID NO: 75119 - RNA, 23 nt, Human
caaagugcucggauuacagacau

SEQ ID NO: 75120 - RNA, 23 nt, Human
caaagugcugaaauuacaggcau

SEQ ID NO: 75121 - RNA, 23 nt, Human
caaagugcugagauuacaagcgu

SEQ ID NO: 75122 - RNA, 23 nt, Human
caaagugcugagauuacagacau

SEQ ID NO: 75123 - RNA, 23 nt, Human
caaagugcugagauuacagacgu

SEQ ID NO: 75124 - RNA, 21 nt, Human
caaagugcugagauuacaggc

SEQ ID NO: 75125 - RNA, 23 nt, Human
caaagugcugagauuacaggcau

SEQ ID NO: 75126 - RNA, 23 nt, Human
caaagugcugagauuacaggcgu

SEQ ID NO: 75127 - RNA, 22 nt, Human
caaagugcugagauuauaggca

SEQ ID NO: 75128 - RNA, 23 nt, Human
caaagugcugagauuauaggcau

SEQ ID NO: 75129 - RNA, 23 nt, Human
caaagugcugauauuacaggcau

SEQ ID NO: 75130 - RNA, 23 nt, Human
caaagugcugcgauuacagacau

SEQ ID NO: 75131 - RNA, 23 nt, Human
caaagugcugcgauuacaggcau

SEQ ID NO: 75132 - RNA, 21 nt, Human
caaagugcuggaauuacaggc

SEQ ID NO: 75133 - RNA, 23 nt, Human
caaagugcuggaauuacaggcau

SEQ ID NO: 75134 - RNA, 23 nt, Human
caaagugcuggaauuacaggcgu

SEQ ID NO: 75135 - RNA, 23 nt, Human
caaagugcuggaauuacagucau

SEQ ID NO: 75136 - RNA, 31 nt, Human
caaagugcuggaauuacaugggugagcuacc

SEQ ID NO: 75137 - RNA, 23 nt, Human
caaagugcuggaauuacuggcau

SEQ ID NO: 75138 - RNA, 23 nt, Human
caaagugcuggaauuauaggcau

SEQ ID NO: 75139 - RNA, 23 nt, Human
caaagugcuggaauugcaggcau

SEQ ID NO: 75140 - RNA, 22 nt, Human
caaagugcuggauuacaggcau

SEQ ID NO: 75141 - RNA, 23 nt, Human
caaagugcuggcacuacaggcau

SEQ ID NO: 75142 - RNA, 32 nt, Human
caaagugcuggcauuacaggugggagcuaccg

SEQ ID NO: 75143 - RNA, 23 nt, Human
caaagugcugggaauacaggcau

SEQ ID NO: 75144 - RNA, 24 nt, Human
caaagugcugggaauuacaggcgu

SEQ ID NO: 75145 - RNA, 21 nt, Human
caaagugcugggacuacaggc

SEQ ID NO: 75146 - RNA, 32 nt, Human
caaagugcugggacuacaggcaggagccaccg

SEQ ID NO: 75147 - RNA, 23 nt, Human
caaagugcugggaucacagacgu

SEQ ID NO: 75148 - RNA, 23 nt, Human
caaagugcugggaucacaggcau

SEQ ID NO: 75149 - RNA, 22 nt, Human
caaagugcugggaucacaggcg

SEQ ID NO: 75150 - RNA, 23 nt, Human
caaagugcugggaucacaggcgu

SEQ ID NO: 75151 - RNA, 23 nt, Human
caaagugcugggaugacaggcau

SEQ ID NO: 75152 - RNA, 23 nt, Human
caaagugcugggauuacaagcau

SEQ ID NO: 75153 - RNA, 23 nt, Human
caaagugcugggauuacaagcgu

SEQ ID NO: 75154 - RNA, 19 nt, Human
caaagugcugggauuacag

SEQ ID NO: 75155 - RNA, 22 nt, Human
caaagugcugggauuacagaca

SEQ ID NO: 75156 - RNA, 23 nt, Human
caaagugcugggauuacagacau

SEQ ID NO: 75157 - RNA, 23 nt, Human
caaagugcugggauuacagacgu

SEQ ID NO: 75158 - RNA, 22 nt, Human
caaagugcugggauuacagcca

SEQ ID NO: 75159 - RNA, 21 nt, Human
caaagugcugggauuacaggc

SEQ ID NO: 75160 - RNA, 22 nt, Human
caaagugcugggauuacaggca

SEQ ID NO: 75161 - RNA, 23 nt, Human
caaagugcugggauuacaggcau

SEQ ID NO: 75162 - RNA, 22 nt, Human
caaagugcugggauuacaggcg

SEQ ID NO: 75163 - RNA, 23 nt, Human
caaagugcugggauuacaggcgu

SEQ ID NO: 75164 - RNA, 32 nt, Human
caaagugcugggauuacaggcgugggccacug

SEQ ID NO: 75165 - RNA, 32 nt, Human
caaagugcugggauuacaggcgugggccgccg

SEQ ID NO: 75166 - RNA, 23 nt, Human
caaagugcugggauuacagggau

SEQ ID NO: 75167 - RNA, 32 nt, Human
caaagugcugggauuacagggauaagccacca

SEQ ID NO: 75168 - RNA, 22 nt, Human
caaagugcugggauuacaggua

SEQ ID NO: 75169 - RNA, 23 nt, Human
caaagugcugggauuacagguau

SEQ ID NO: 75170 - RNA, 32 nt, Human
caaagugcugggauuacaggugugggagccac

SEQ ID NO: 75171 - RNA, 23 nt, Human
caaagugcugggauuacagucau

SEQ ID NO: 75172 - RNA, 23 nt, Human
caaagugcugggauuaccagcau

SEQ ID NO: 75173 - RNA, 23 nt, Human
caaagugcugggauuaccggcau

SEQ ID NO: 75174 - RNA, 23 nt, Human
caaagugcugggauuacgggcau

SEQ ID NO: 75175 - RNA, 23 nt, Human
caaagugcugggauuacgggcgu

SEQ ID NO: 75176 - RNA, 23 nt, Human
caaagugcugggauuacuggcau

SEQ ID NO: 75177 - RNA, 23 nt, Human
caaagugcugggauuagaggcau

SEQ ID NO: 75178 - RNA, 23 nt, Human
caaagugcugggauuauagacau

SEQ ID NO: 75179 - RNA, 22 nt, Human
caaagugcugggauuauaggca

SEQ ID NO: 75180 - RNA, 23 nt, Human
caaagugcugggauuauaggcau

SEQ ID NO: 75181 - RNA, 23 nt, Human
caaagugcugggauugcaggcau

SEQ ID NO: 75182 - RNA, 23 nt, Human
caaagugcuguaauuacaggcau

SEQ ID NO: 75183 - RNA, 23 nt, Human
caaagugcuuggauuacaggcau

SEQ ID NO: 75184 - RNA, 32 nt, Human
caaaguggagcuugugaguaagaaugcagaua

SEQ ID NO: 75185 - RNA, 32 nt, Human
caaaguggagugaugcgcuaagcggagugacc

SEQ ID NO: 75186 - RNA, 32 nt, Human
caaaguggcaucugcauaacuuucaaguacaa

SEQ ID NO: 75187 - RNA, 32 nt, Human
caaaguggcccacuuucuguggcucugaucag

SEQ ID NO: 75188 - RNA, 32 nt, Human
caaaguggccugcuuuucccaucccaggagcu

SEQ ID NO: 75189 - RNA, 32 nt, Human
caaaguggcugcagauaucucaaaauaguauu

SEQ ID NO: 75190 - RNA, 19 nt, Human
caaaguggcugccaccacu

SEQ ID NO: 75191 - RNA, 21 nt, Human
caaaguggcuuggaaggagug

SEQ ID NO: 75192 - RNA, 32 nt, Human
caaagugggagaaucacuugagcccaggaguu

SEQ ID NO: 75193 - RNA, 32 nt, Human
caaagugggaggaggaguggggauucuaugag

SEQ ID NO: 75194 - RNA, 32 nt, Human
caaagugggaggauugcuugagcucaggaguu

SEQ ID NO: 75195 - RNA, 32 nt, Human
caaagugggaggauugcuuggcucaagacaag

SEQ ID NO: 75196 - RNA, 32 nt, Human
caaagugggccgaucaccugagcucaggaauu

SEQ ID NO: 75197 - RNA, 32 nt, Human
caaagugggccuucccugggcugugcugcagg

SEQ ID NO: 75198 - RNA, 32 nt, Human
caaaguggggaccugucccaaggacuggccca

SEQ ID NO: 75199 - RNA, 32 nt, Human
caaaguggggauagcucucugagccaccucgg

SEQ ID NO: 75200 - RNA, 32 nt, Human
caaagugggggaggggagcuagaggcccagaa

SEQ ID NO: 75201 - RNA, 32 nt, Human
caaaguggguggaucacuugaggaguucaaga

SEQ ID NO: 75202 - RNA, 23 nt, Human
caaaguggugggaucacaggcgu

SEQ ID NO: 75203 - RNA, 23 nt, Human
caaagugguuucagcaauauuua

SEQ ID NO: 75204 - RNA, 32 nt, Human
caaagugucagcaacuuugaggagggcaccag

SEQ ID NO: 75205 - RNA, 32 nt, Human
caaagugugauuucacacuguuuuuaaaucua

SEQ ID NO: 75206 - RNA, 32 nt, Human
caaagugugcagcuguaacugcucacgccaaa

SEQ ID NO: 75207 - RNA, 32 nt, Human
caaaguguggaagccagggcccagggaaggca

SEQ ID NO: 75208 - RNA, 32 nt, Human
caaaguguggaagguuggaggaaaugcacaaa

SEQ ID NO: 75209 - RNA, 32 nt, Human
caaaguguggugaccuagaugucaucuuugaa

SEQ ID NO: 75210 - RNA, 32 nt, Human
caaaguguguaaaagauuguuuugaaacguac

SEQ ID NO: 75211 - RNA, 32 nt, Human
caaaguguguggugugagagaggugugacagg

SEQ ID NO: 75212 - RNA, 23 nt, Human
caaaguguuaggauuacaggcau

SEQ ID NO: 75213 - RNA, 23 nt, Human
caaaguguuaggauuacaggcgu

SEQ ID NO: 75214 - RNA, 32 nt, Human
caaaguguuauuuuguuuuuccuuccaauguc

SEQ ID NO: 75215 - RNA, 32 nt, Human
caaaguguugacuguauggcauucaaagggau

SEQ ID NO: 75216 - RNA, 21 nt, Human
caaaguguugagacuacaggc

SEQ ID NO: 75217 - RNA, 23 nt, Human
caaaguguugagaucacaggcgu

SEQ ID NO: 75218 - RNA, 23 nt, Human
caaaguguugagauuacaggcau

SEQ ID NO: 75219 - RNA, 23 nt, Human
caaaguguugagauuacaggcgu

SEQ ID NO: 75220 - RNA, 23 nt, Human
caaaguguugcuuucuuacauuu

SEQ ID NO: 75221 - RNA, 23 nt, Human
caaaguguuggaauuacaggcgu

SEQ ID NO: 75222 - RNA, 23 nt, Human
caaaguguugggauuacagacau

SEQ ID NO: 75223 - RNA, 23 nt, Human
caaaguguugggauuacaggcau

SEQ ID NO: 75224 - RNA, 23 nt, Human
caaaguguugggauuacaggcgu

SEQ ID NO: 75225 - RNA, 23 nt, Human
caaaguguugggauuauaggcau

SEQ ID NO: 75226 - RNA, 23 nt, Human
caaaguguugggauugcaggcau

SEQ ID NO: 75227 - RNA, 32 nt, Human
caaaguguuguugcuggcccugggcuugugug

SEQ ID NO: 75228 - RNA, 32 nt, Human
caaaguguuuauguaguaguucuguccuuuug

SEQ ID NO: 75229 - RNA, 32 nt, Human
caaaguuaaauaccccaucuuccuuggcugug

SEQ ID NO: 75230 - RNA, 32 nt, Human
caaaguuaaucaggacccaagucugcuucugu

SEQ ID NO: 75231 - RNA, 32 nt, Human
caaaguuaaucaggagccaagucugcuucugu

SEQ ID NO: 75232 - RNA, 32 nt, Human
caaaguuauuguggcuucuggugaggggaagu

SEQ ID NO: 75233 - RNA, 32 nt, Human
caaaguucagggacucuggaccauuuucccaa

SEQ ID NO: 75234 - RNA, 23 nt, Human
caaaguucagggauuacaggcau

SEQ ID NO: 75235 - RNA, 32 nt, Human
caaaguucagggauuacaggcaugagccacca

SEQ ID NO: 75236 - RNA, 32 nt, Human
caaaguuccccgauggcggcccaggggugcgc

SEQ ID NO: 75237 - RNA, 32 nt, Human
caaaguucuauugugcugaauaaaugccccuu

SEQ ID NO: 75238 - RNA, 21 nt, Human
caaaguucugggauuacaggc

SEQ ID NO: 75239 - RNA, 23 nt, Human
caaaguucugggauuacaggcau

SEQ ID NO: 75240 - RNA, 23 nt, Human
caaaguucugggauuacaggcgu

SEQ ID NO: 75241 - RNA, 32 nt, Human
caaaguugaagggacaaggcacugugagggga

SEQ ID NO: 75242 - RNA, 32 nt, Human
caaaguugccaagaacguacacugggggaaag

SEQ ID NO: 75243 - RNA, 16 nt, Human
caaaguugcuggcaga

SEQ ID NO: 75244 - RNA, 32 nt, Human
caaaguuggacagcuacugagauaggguauug

SEQ ID NO: 75245 - RNA, 32 nt, Human
caaaguuggaccugggcuugagcuuacagaca

SEQ ID NO: 75246 - RNA, 15 nt, Human
caaaguuguccagug

SEQ ID NO: 75247 - RNA, 32 nt, Human
caaaguugugcaaaacugguaacgucugcuuc

SEQ ID NO: 75248 - RNA, 32 nt, Human
caaaguuucauggaggccaggagaucuucugu

SEQ ID NO: 75249 - RNA, 32 nt, Human
caaaguuuccuuccuuucuucucuuucuucau

SEQ ID NO: 75250 - RNA, 32 nt, Human
caaaguuucugaguuauucuguggggaauuug

SEQ ID NO: 75251 - RNA, 32 nt, Human
caaaguuugaggcuauuucuccuaauucagga

SEQ ID NO: 75252 - RNA, 32 nt, Human
caaaguuuguugaauaaagcaacuuuuguaga

SEQ ID NO: 75253 - RNA, 29 nt, Human
caaauaaaaagcuuucuuugcacaaccca

SEQ ID NO: 75254 - RNA, 32 nt, Human
caaauaaaacucaaaugagagucaguucuuug

SEQ ID NO: 75255 - RNA, 32 nt, Human
caaauaaacccagcaaaggaacuagcagagcu

SEQ ID NO: 75256 - RNA, 22 nt, Human
caaauaaaccccuggacccccu

SEQ ID NO: 75257 - RNA, 32 nt, Human
caaauaaagaagcagacacuuaggcugggaaa

SEQ ID NO: 75258 - RNA, 32 nt, Human
caaauaaagcacugcauuuccaccauagacuu

SEQ ID NO: 75259 - RNA, 32 nt, Human
caaauaaaggcauuccucugagaguauaccua

SEQ ID NO: 75260 - RNA, 32 nt, Human
caaauaaauggcuucaaaauuguaugcuuuuu

SEQ ID NO: 75261 - RNA, 32 nt, Human
caaauaaccaccaguaucuccaccccacgaag

SEQ ID NO: 75262 - RNA, 32 nt, Human
caaauaaccauuuaacacuaguauuuguuaaa

SEQ ID NO: 75263 - RNA, 32 nt, Human
caaauaaccuaaaaaucaaucacuugaaagug

SEQ ID NO: 75264 - RNA, 32 nt, Human
caaauaagagccucuuauaaacuccauucuug

SEQ ID NO: 75265 - RNA, 32 nt, Human
caaauaagcauucuauuuccagcaaaacuauc

SEQ ID NO: 75266 - RNA, 32 nt, Human
caaauaagccgugcuacaguacuuucaugacc

SEQ ID NO: 75267 - RNA, 32 nt, Human
caaauaaggaagggggaagggggaugugaguu

SEQ ID NO: 75268 - RNA, 32 nt, Human
caaauaaggcacuggggcaugggguaggggug

SEQ ID NO: 75269 - RNA, 32 nt, Human
caaauaagggcugaggcgccuggaggucuuug

SEQ ID NO: 75270 - RNA, 31 nt, Human
caaauaaggguccccuccucacuggagacua

SEQ ID NO: 75271 - RNA, 32 nt, Human
caaauaagucucacauccagccauuccccuga

SEQ ID NO: 75272 - RNA, 32 nt, Human
caaauaaguuuccugagggcuggaauuaugcc

SEQ ID NO: 75273 - RNA, 32 nt, Human
caaauaauaacaaagcauuaccaccuuguguc

SEQ ID NO: 75274 - RNA, 24 nt, Human
caaauaauauguuuccuucccuca

SEQ ID NO: 75275 - RNA, 24 nt, Human
caaauaaugaagaucucuccuuca

SEQ ID NO: 75276 - RNA, 32 nt, Human
caaauaaugcacagaaaaaugcagccuauaau

SEQ ID NO: 75277 - RNA, 32 nt, Human
caaauaauggauuccugagagcucaggaagua

SEQ ID NO: 75278 - RNA, 32 nt, Human
caaauaauuucuaagauaaaagccugaauuug

SEQ ID NO: 75279 - RNA, 32 nt, Human
caaauaauuuucuccccuugcucuuccuggcc

SEQ ID NO: 75280 - RNA, 32 nt, Human
caaauacaacagcauggaagaugccaaagucu

SEQ ID NO: 75281 - RNA, 32 nt, Human
caaauacaagagguucauauaaaagggcaaau

SEQ ID NO: 75282 - RNA, 32 nt, Human
caaauacaagaugccagcguggccaauggggc

SEQ ID NO: 75283 - RNA, 32 nt, Human
caaauacagauaaaugguaauucuuagaauga

SEQ ID NO: 75284 - RNA, 32 nt, Human
caaauacauccacuccccaugccacugacauc

SEQ ID NO: 75285 - RNA, 32 nt, Human
caaauacauuuuauaaaugauuuuggaauuag

SEQ ID NO: 75286 - RNA, 32 nt, Human
caaauaccagcuacugugccagaagagaucau

SEQ ID NO: 75287 - RNA, 32 nt, Human
caaauaccaguggcuccagcccagucauucau

SEQ ID NO: 75288 - RNA, 32 nt, Human
caaauacccaagcuugaaaccugugacuuauu

SEQ ID NO: 75289 - RNA, 32 nt, Human
caaauaccccucuguacaguuaaucuaacagg

SEQ ID NO: 75290 - RNA, 25 nt, Human
caaauacgggcauuuacacuuucag

SEQ ID NO: 75291 - RNA, 32 nt, Human
caaauacuaauguauuugcuuccccuucauaa

SEQ ID NO: 75292 - RNA, 32 nt, Human
caaauacuacagccaccaaggccauagccugu

SEQ ID NO: 75293 - RNA, 32 nt, Human
caaauacuacaggcccuuaaagcacagucuga

SEQ ID NO: 75294 - RNA, 32 nt, Human
caaauacugugugaucucguauauggaaccua

SEQ ID NO: 75295 - RNA, 32 nt, Human
caaauacuuaaucucaauuuauuugagauuuu

SEQ ID NO: 75296 - RNA, 32 nt, Human
caaauacuucaugagcuuagcagccugggcuc

SEQ ID NO: 75297 - RNA, 32 nt, Human
caaauacuucccuuacccauguuaucauuucc

SEQ ID NO: 75298 - RNA, 32 nt, Human
caaauacuucuuggcccuggcccugugcugcc

SEQ ID NO: 75299 - RNA, 32 nt, Human
caaauacuugauacaagauuuaauuucauuau

SEQ ID NO: 75300 - RNA, 32 nt, Human
caaauacuugcaaguuagaggcuggcaggggg

SEQ ID NO: 75301 - RNA, 21 nt, Human
caaauacuuucacucccuuca

SEQ ID NO: 75302 - RNA, 32 nt, Human
caaauagagugacccguaaaaucuaggauuuu

SEQ ID NO: 75303 - RNA, 32 nt, Human
caaauagcagcaaagucaaaagcagauguagc

SEQ ID NO: 75304 - RNA, 32 nt, Human
caaauagcaucagcaacaacaaauagaauaau

SEQ ID NO: 75305 - RNA, 32 nt, Human
caaauagccaggcccucucucccucaagaaau

SEQ ID NO: 75306 - RNA, 32 nt, Human
caaauagccugaggaagcaggagaguuccugg

SEQ ID NO: 75307 - RNA, 32 nt, Human
caaauagcucuuccccaccuccucauuuuagu

SEQ ID NO: 75308 - RNA, 32 nt, Human
caaauagcuggcuuucguugcuuguugaauga

SEQ ID NO: 75309 - RNA, 19 nt, Human
caaauaggaaccucugaug

SEQ ID NO: 75310 - RNA, 32 nt, Human
caaauaggaacuuaauucucagcacugaacau

SEQ ID NO: 75311 - RNA, 32 nt, Human
caaauaggcaugccucacacacacaguccaaa

SEQ ID NO: 75312 - RNA, 32 nt, Human
caaauaggucagcuccaccuggagugcgaauu

SEQ ID NO: 75313 - RNA, 32 nt, Human
caaauaguaaagggaaaaagccaaaauucaga

SEQ ID NO: 75314 - RNA, 32 nt, Human
caaauaguccugguucauucccagaagggcac

SEQ ID NO: 75315 - RNA, 32 nt, Human
caaauagugccaucugccccaguagaagauag

SEQ ID NO: 75316 - RNA, 32 nt, Human
caaauaguguuuuggcaucauggaacguguag

SEQ ID NO: 75317 - RNA, 22 nt, Human
caaauaguugggauuacaggca

SEQ ID NO: 75318 - RNA, 32 nt, Human
caaauauacaguaucugcuauuauaggaaaca

SEQ ID NO: 75319 - RNA, 32 nt, Human
caaauauacaugcacauacauacacagaaugc

SEQ ID NO: 75320 - RNA, 32 nt, Human
caaauaucaguagcuuaauuuaauauugcacg

SEQ ID NO: 75321 - RNA, 32 nt, Human
caaauauccuaucacugccagcaauaauuuau

SEQ ID NO: 75322 - RNA, 32 nt, Human
caaauaucgugccuuaacaauguggcuguccu

SEQ ID NO: 75323 - RNA, 32 nt, Human
caaauaucucuagacucacccagaucccagcu

SEQ ID NO: 75324 - RNA, 32 nt, Human
caaauaugcccuuuccagagcuacccagacca

SEQ ID NO: 75325 - RNA, 32 nt, Human
caaauauggaaacugagaaucccuaaggauua

SEQ ID NO: 75326 - RNA, 32 nt, Human
caaauauguggaauuaccacacucugcuuagu

SEQ ID NO: 75327 - RNA, 32 nt, Human
caaauaugugggguguaaauauuuugugguuc

SEQ ID NO: 75328 - RNA, 32 nt, Human
caaauauuaugugccugcugugugcugacuau

SEQ ID NO: 75329 - RNA, 32 nt, Human
caaauauucucccauaugaaugugauauuuuu

SEQ ID NO: 75330 - RNA, 32 nt, Human
caaauauuuaaugcccucagugggaaauuugu

SEQ ID NO: 75331 - RNA, 32 nt, Human
caaauauuucacccuuucuuccuugcccugcu

SEQ ID NO: 75332 - RNA, 32 nt, Human
caaauauuugagcucuggaguuugagaccagc

SEQ ID NO: 75333 - RNA, 32 nt, Human
caaauauuuucucaaguucuauagguugccuu

SEQ ID NO: 75334 - RNA, 32 nt, Human
caaauauuuuucuccccuugcucuuccuggcc

SEQ ID NO: 75335 - RNA, 32 nt, Human
caaaucaaacuaagaagaccuuagaaauaagc

SEQ ID NO: 75336 - RNA, 32 nt, Human
caaaucaacuguugaagaaggggugaguuuuc

SEQ ID NO: 75337 - RNA, 32 nt, Human
caaaucaagaccaccuuucuucaacggucacu

SEQ ID NO: 75338 - RNA, 32 nt, Human
caaaucacaaaggagaugguguggcuuagcaa

SEQ ID NO: 75339 - RNA, 23 nt, Human
caaaucacugggauuauaggcau

SEQ ID NO: 75340 - RNA, 32 nt, Human
caaaucagcgaagauucugaaaggacuggugg

SEQ ID NO: 75341 - RNA, 32 nt, Human
caaaucaggccugccuccugaauuuguaaaua

SEQ ID NO: 75342 - RNA, 32 nt, Human
caaaucaguuuuucucuuucuuacucccucuc

SEQ ID NO: 75343 - RNA, 32 nt, Human
caaaucauauaucagucugcucaguugaaacc

SEQ ID NO: 75344 - RNA, 32 nt, Human
caaaucaucauuucucccaggaauggggugcc

SEQ ID NO: 75345 - RNA, 32 nt, Human
caaaucaucugucauaugaggcugccaccucg

SEQ ID NO: 75346 - RNA, 32 nt, Human
caaaucaucugucuucuggaaaaucauggauu

SEQ ID NO: 75347 - RNA, 32 nt, Human
caaaucaugucaccaagcuucaagccauggag

SEQ ID NO: 75348 - RNA, 32 nt, Human
caaaucauugacuugcugugaugugacuaauu

SEQ ID NO: 75349 - RNA, 32 nt, Human
caaauccaagcacccagagaucaauugggauc

SEQ ID NO: 75350 - RNA, 32 nt, Human
caaauccacugcagauuaggggugauagucac

SEQ ID NO: 75351 - RNA, 32 nt, Human
caaauccagaagcaaagagauaguaggaccca

SEQ ID NO: 75352 - RNA, 32 nt, Human
caaauccagacuccaggcuccucccacugcca

SEQ ID NO: 75353 - RNA, 32 nt, Human
caaauccagagcagccuguggccuguaaagca

SEQ ID NO: 75354 - RNA, 32 nt, Human
caaauccagcucccugcuuguuuuuauaaaua

SEQ ID NO: 75355 - RNA, 32 nt, Human
caaauccagcuccuuguccuagcagguucuca

SEQ ID NO: 75356 - RNA, 20 nt, Human
caaauccaguccugcaggcu

SEQ ID NO: 75357 - RNA, 32 nt, Human
caaauccaguguuaacacauauuucuggcuga

SEQ ID NO: 75358 - RNA, 32 nt, Human
caaauccauacagugaggaaucagaguguuua

SEQ ID NO: 75359 - RNA, 32 nt, Human
caaauccaucagcauaaugacuguguguucug

SEQ ID NO: 75360 - RNA, 32 nt, Human
caaauccaucccucucucccucacaguuccag

SEQ ID NO: 75361 - RNA, 32 nt, Human
caaauccauuccugccuucuggcucucagaau

SEQ ID NO: 75362 - RNA, 32 nt, Human
caaaucccaaguggcgauggcauguaaccaca

SEQ ID NO: 75363 - RNA, 28 nt, Human
caaaucccaaguguugacacagccaucu

SEQ ID NO: 75364 - RNA, 32 nt, Human
caaaucccaaguguugacacagccaucuuguc

SEQ ID NO: 75365 - RNA, 32 nt, Human
caaaucccauugucaccuaacucugaagaucu

SEQ ID NO: 75366 - RNA, 32 nt, Human
caaaucccgcagcugccacggucccuccuguc

SEQ ID NO: 75367 - RNA, 32 nt, Human
caaaucccugcucucacgggaucucuggagau

SEQ ID NO: 75368 - RNA, 32 nt, Human
caaaucccuuugguuuuccaugggaucuggaa

SEQ ID NO: 75369 - RNA, 32 nt, Human
caaauccuccugcccauaccgugcacccuuag

SEQ ID NO: 75370 - RNA, 32 nt, Human
caaauccugauuuugaccccaguggcccagcc

SEQ ID NO: 75371 - RNA, 32 nt, Human
caaauccugccaggcugccuggcaucccuggg

SEQ ID NO: 75372 - RNA, 32 nt, Human
caaauccugccccguuggcacagggccacagg

SEQ ID NO: 75373 - RNA, 32 nt, Human
caaauccugccugugcuccuugacugucucuc

SEQ ID NO: 75374 - RNA, 32 nt, Human
caaauccuuccagagggaaaguucuuuguuua

SEQ ID NO: 75375 - RNA, 32 nt, Human
caaauccuuccuuccucccagcaccccucgug

SEQ ID NO: 75376 - RNA, 32 nt, Human
caaauccuuuccuagugccuucagagggagug

SEQ ID NO: 75377 - RNA, 32 nt, Human
caaaucggggcagaggcugcacuugugccccc

SEQ ID NO: 75378 - RNA, 32 nt, Human
caaaucuacugaaccacuauucuacauauagu

SEQ ID NO: 75379 - RNA, 32 nt, Human
caaaucucccaaaacguugggauaugcuuacu

SEQ ID NO: 75380 - RNA, 32 nt, Human
caaaucuccuccuuccacaccugcugccaguc

SEQ ID NO: 75381 - RNA, 32 nt, Human
caaaucuccuuuuucuccuuuugccuucucug

SEQ ID NO: 75382 - RNA, 32 nt, Human
caaaucucuccucugccuucuccuuaucagac

SEQ ID NO: 75383 - RNA, 32 nt, Human
caaaucucugauccucccuuuccauugcuucu

SEQ ID NO: 75384 - RNA, 32 nt, Human
caaaucugaacccauguccucacuucaagguu

SEQ ID NO: 75385 - RNA, 32 nt, Human
caaaucugauguuaauguuugcucuuagaagu

SEQ ID NO: 75386 - RNA, 32 nt, Human
caaaucugccuacuucugucaauucaucaauc

SEQ ID NO: 75387 - RNA, 32 nt, Human
caaaucugccuguaauaaauauuuuuaaucua

SEQ ID NO: 75388 - RNA, 32 nt, Human
caaaucuggggugggaggggcuaggcugaccc

SEQ ID NO: 75389 - RNA, 32 nt, Human
caaaucuggugccucucucuugcuuacaaaug

SEQ ID NO: 75390 - RNA, 32 nt, Human
caaaucuguaaauacuacacugcucuuaagac

SEQ ID NO: 75391 - RNA, 32 nt, Human
caaaucugugcuggacaagcugugggaagcgu
